United States Patent Application Publication US 2026/0258423 A1 - sequence listing, part 35

SEQ ID NO: 181934 - DNA, 20 bp, synthetic construct
  source 1..20: mol_type = other DNA
cctgtgaggttgcaaattct

SEQ ID NO: 181935 - DNA, 20 bp, synthetic construct
  source 1..20: mol_type = other DNA
ccctgtgaggttgcaaattc

SEQ ID NO: 181936 - DNA, 20 bp, synthetic construct
  source 1..20: mol_type = other DNA
accctgtgaggttgcaaatt

SEQ ID NO: 181937 - DNA, 20 bp, synthetic construct
  source 1..20: mol_type = other DNA
taccctgtgaggttgcaaat

SEQ ID NO: 181938 - DNA, 20 bp, synthetic construct
  source 1..20: mol_type = other DNA
gtaccctgtgaggttgcaaa

SEQ ID NO: 181939 - DNA, 20 bp, synthetic construct
  source 1..20: mol_type = other DNA
agtaccctgtgaggttgcaa

SEQ ID NO: 181940 - DNA, 20 bp, synthetic construct
  source 1..20: mol_type = other DNA
aagtaccctgtgaggttgca

SEQ ID NO: 181941 - DNA, 20 bp, synthetic construct
  source 1..20: mol_type = other DNA
aaagtaccctgtgaggttgc

SEQ ID NO: 181942 - DNA, 20 bp, synthetic construct
  source 1..20: mol_type = other DNA
gaaagtaccctgtgaggttg

SEQ ID NO: 181943 - DNA, 20 bp, synthetic construct
  source 1..20: mol_type = other DNA
tgaaagtaccctgtgaggtt

SEQ ID NO: 181944 - DNA, 20 bp, synthetic construct
  source 1..20: mol_type = other DNA
atgaaagtaccctgtgaggt

SEQ ID NO: 181945 - DNA, 20 bp, synthetic construct
  source 1..20: mol_type = other DNA
catgaaagtaccctgtgagg

SEQ ID NO: 181946 - DNA, 20 bp, synthetic construct
  source 1..20: mol_type = other DNA
ccatgaaagtaccctgtgag

SEQ ID NO: 181947 - DNA, 20 bp, synthetic construct
  source 1..20: mol_type = other DNA
gccatgaaagtaccctgtga

SEQ ID NO: 181948 - DNA, 20 bp, synthetic construct
  source 1..20: mol_type = other DNA
cgccatgaaagtaccctgtg

SEQ ID NO: 181949 - DNA, 20 bp, synthetic construct
  source 1..20: mol_type = other DNA
acgccatgaaagtaccctgt

SEQ ID NO: 181950 - DNA, 20 bp, synthetic construct
  source 1..20: mol_type = other DNA
aacgccatgaaagtaccctg

SEQ ID NO: 181951 - DNA, 20 bp, synthetic construct
  source 1..20: mol_type = other DNA
caacgccatgaaagtaccct

SEQ ID NO: 181952 - DNA, 20 bp, synthetic construct
  source 1..20: mol_type = other DNA
tcaacgccatgaaagtaccc

SEQ ID NO: 181953 - DNA, 20 bp, synthetic construct
  source 1..20: mol_type = other DNA
ttcaacgccatgaaagtacc

SEQ ID NO: 181954 - DNA, 20 bp, synthetic construct
  source 1..20: mol_type = other DNA
tttcaacgccatgaaagtac

SEQ ID NO: 181955 - DNA, 20 bp, synthetic construct
  source 1..20: mol_type = other DNA
atttcaacgccatgaaagta

SEQ ID NO: 181956 - DNA, 20 bp, synthetic construct
  source 1..20: mol_type = other DNA
tatttcaacgccatgaaagt

SEQ ID NO: 181957 - DNA, 20 bp, synthetic construct
  source 1..20: mol_type = other DNA
gtatttcaacgccatgaaag

SEQ ID NO: 181958 - DNA, 20 bp, synthetic construct
  source 1..20: mol_type = other DNA
tgtatttcaacgccatgaaa

SEQ ID NO: 181959 - DNA, 20 bp, synthetic construct
  source 1..20: mol_type = other DNA
gtgtatttcaacgccatgaa

SEQ ID NO: 181960 - DNA, 20 bp, synthetic construct
  source 1..20: mol_type = other DNA
agtgtatttcaacgccatga

SEQ ID NO: 181961 - DNA, 20 bp, synthetic construct
  source 1..20: mol_type = other DNA
aagtgtatttcaacgccatg

SEQ ID NO: 181962 - DNA, 20 bp, synthetic construct
  source 1..20: mol_type = other DNA
gaagtgtatttcaacgccat

SEQ ID NO: 181963 - DNA, 20 bp, synthetic construct
  source 1..20: mol_type = other DNA
ggaagtgtatttcaacgcca

SEQ ID NO: 181964 - DNA, 20 bp, synthetic construct
  source 1..20: mol_type = other DNA
gggaagtgtatttcaacgcc

SEQ ID NO: 181965 - DNA, 20 bp, synthetic construct
  source 1..20: mol_type = other DNA
tgggaagtgtatttcaacgc

SEQ ID NO: 181966 - DNA, 20 bp, synthetic construct
  source 1..20: mol_type = other DNA
gtgggaagtgtatttcaacg

SEQ ID NO: 181967 - DNA, 20 bp, synthetic construct
  source 1..20: mol_type = other DNA
tgtgggaagtgtatttcaac

SEQ ID NO: 181968 - DNA, 20 bp, synthetic construct
  source 1..20: mol_type = other DNA
ctgtgggaagtgtatttcaa

SEQ ID NO: 181969 - DNA, 20 bp, synthetic construct
  source 1..20: mol_type = other DNA
gctgtgggaagtgtatttca

SEQ ID NO: 181970 - DNA, 20 bp, synthetic construct
  source 1..20: mol_type = other DNA
ggctgtgggaagtgtatttc

SEQ ID NO: 181971 - DNA, 20 bp, synthetic construct
  source 1..20: mol_type = other DNA
tggctgtgggaagtgtattt

SEQ ID NO: 181972 - DNA, 20 bp, synthetic construct
  source 1..20: mol_type = other DNA
gtggctgtgggaagtgtatt

SEQ ID NO: 181973 - DNA, 20 bp, synthetic construct
  source 1..20: mol_type = other DNA
ggtggctgtgggaagtgtat

SEQ ID NO: 181974 - DNA, 20 bp, synthetic construct
  source 1..20: mol_type = other DNA
gggtggctgtgggaagtgta

SEQ ID NO: 181975 - DNA, 20 bp, synthetic construct
  source 1..20: mol_type = other DNA
agggtggctgtgggaagtgt

SEQ ID NO: 181976 - DNA, 20 bp, synthetic construct
  source 1..20: mol_type = other DNA
gagggtggctgtgggaagtg

SEQ ID NO: 181977 - DNA, 20 bp, synthetic construct
  source 1..20: mol_type = other DNA
ggagggtggctgtgggaagt

SEQ ID NO: 181978 - DNA, 20 bp, synthetic construct
  source 1..20: mol_type = other DNA
gggagggtggctgtgggaag

SEQ ID NO: 181979 - DNA, 20 bp, synthetic construct
  source 1..20: mol_type = other DNA
agggagggtggctgtgggaa

SEQ ID NO: 181980 - DNA, 20 bp, synthetic construct
  source 1..20: mol_type = other DNA
gagggagggtggctgtggga

SEQ ID NO: 181981 - DNA, 20 bp, synthetic construct
  source 1..20: mol_type = other DNA
agagggagggtggctgtggg

SEQ ID NO: 181982 - DNA, 20 bp, synthetic construct
  source 1..20: mol_type = other DNA
tagagggagggtggctgtgg

SEQ ID NO: 181983 - DNA, 20 bp, synthetic construct
  source 1..20: mol_type = other DNA
ttagagggagggtggctgtg

SEQ ID NO: 181984 - DNA, 20 bp, synthetic construct
  source 1..20: mol_type = other DNA
gttagagggagggtggctgt

SEQ ID NO: 181985 - DNA, 20 bp, synthetic construct
  source 1..20: mol_type = other DNA
agttagagggagggtggctg

SEQ ID NO: 181986 - DNA, 20 bp, synthetic construct
  source 1..20: mol_type = other DNA
tagttagagggagggtggct

SEQ ID NO: 181987 - DNA, 20 bp, synthetic construct
  source 1..20: mol_type = other DNA
ttagttagagggagggtggc

SEQ ID NO: 181988 - DNA, 20 bp, synthetic construct
  source 1..20: mol_type = other DNA
tttagttagagggagggtgg

SEQ ID NO: 181989 - DNA, 20 bp, synthetic construct
  source 1..20: mol_type = other DNA
ttttagttagagggagggtg

SEQ ID NO: 181990 - DNA, 20 bp, synthetic construct
  source 1..20: mol_type = other DNA
cttttagttagagggagggt

SEQ ID NO: 181991 - DNA, 20 bp, synthetic construct
  source 1..20: mol_type = other DNA
gcttttagttagagggaggg

SEQ ID NO: 181992 - DNA, 20 bp, synthetic construct
  source 1..20: mol_type = other DNA
tgcttttagttagagggagg

SEQ ID NO: 181993 - DNA, 20 bp, synthetic construct
  source 1..20: mol_type = other DNA
ttgcttttagttagagggag

SEQ ID NO: 181994 - DNA, 20 bp, synthetic construct
  source 1..20: mol_type = other DNA
cttgcttttagttagaggga

SEQ ID NO: 181995 - DNA, 20 bp, synthetic construct
  source 1..20: mol_type = other DNA
tcttgcttttagttagaggg

SEQ ID NO: 181996 - DNA, 20 bp, synthetic construct
  source 1..20: mol_type = other DNA
ctcttgcttttagttagagg

SEQ ID NO: 181997 - DNA, 20 bp, synthetic construct
  source 1..20: mol_type = other DNA
actcttgcttttagttagag

SEQ ID NO: 181998 - DNA, 20 bp, synthetic construct
  source 1..20: mol_type = other DNA
gactcttgcttttagttaga

SEQ ID NO: 181999 - DNA, 20 bp, synthetic construct
  source 1..20: mol_type = other DNA
tgactcttgcttttagttag

SEQ ID NO: 182000 - DNA, 20 bp, synthetic construct
  source 1..20: mol_type = other DNA
atgactcttgcttttagtta

SEQ ID NO: 182001 - DNA, 20 bp, synthetic construct
  source 1..20: mol_type = other DNA
aatgactcttgcttttagtt

SEQ ID NO: 182002 - DNA, 20 bp, synthetic construct
  source 1..20: mol_type = other DNA
aaatgactcttgcttttagt

SEQ ID NO: 182003 - DNA, 20 bp, synthetic construct
  source 1..20: mol_type = other DNA
gaaatgactcttgcttttag

SEQ ID NO: 182004 - DNA, 20 bp, synthetic construct
  source 1..20: mol_type = other DNA
agaaatgactcttgctttta

SEQ ID NO: 182005 - DNA, 20 bp, synthetic construct
  source 1..20: mol_type = other DNA
gagaaatgactcttgctttt

SEQ ID NO: 182006 - DNA, 20 bp, synthetic construct
  source 1..20: mol_type = other DNA
tgagaaatgactcttgcttt

SEQ ID NO: 182007 - DNA, 20 bp, synthetic construct
  source 1..20: mol_type = other DNA
ctgagaaatgactcttgctt

SEQ ID NO: 182008 - DNA, 20 bp, synthetic construct
  source 1..20: mol_type = other DNA
actgagaaatgactcttgct

SEQ ID NO: 182009 - DNA, 20 bp, synthetic construct
  source 1..20: mol_type = other DNA
aactgagaaatgactcttgc

SEQ ID NO: 182010 - DNA, 20 bp, synthetic construct
  source 1..20: mol_type = other DNA
gaactgagaaatgactcttg

SEQ ID NO: 182011 - DNA, 20 bp, synthetic construct
  source 1..20: mol_type = other DNA
agaactgagaaatgactctt

SEQ ID NO: 182012 - DNA, 20 bp, synthetic construct
  source 1..20: mol_type = other DNA
cagaactgagaaatgactct

SEQ ID NO: 182013 - DNA, 20 bp, synthetic construct
  source 1..20: mol_type = other DNA
ccagaactgagaaatgactc

SEQ ID NO: 182014 - DNA, 20 bp, synthetic construct
  source 1..20: mol_type = other DNA
accagaactgagaaatgact

SEQ ID NO: 182015 - DNA, 20 bp, synthetic construct
  source 1..20: mol_type = other DNA
gaccagaactgagaaatgac

SEQ ID NO: 182016 - DNA, 20 bp, synthetic construct
  source 1..20: mol_type = other DNA
agaccagaactgagaaatga

SEQ ID NO: 182017 - DNA, 20 bp, synthetic construct
  source 1..20: mol_type = other DNA
aagaccagaactgagaaatg

SEQ ID NO: 182018 - DNA, 20 bp, synthetic construct
  source 1..20: mol_type = other DNA
caagaccagaactgagaaat

SEQ ID NO: 182019 - DNA, 20 bp, synthetic construct
  source 1..20: mol_type = other DNA
gcaagaccagaactgagaaa

SEQ ID NO: 182020 - DNA, 20 bp, synthetic construct
  source 1..20: mol_type = other DNA
ggcaagaccagaactgagaa

SEQ ID NO: 182021 - DNA, 20 bp, synthetic construct
  source 1..20: mol_type = other DNA
aggcaagaccagaactgaga

SEQ ID NO: 182022 - DNA, 20 bp, synthetic construct
  source 1..20: mol_type = other DNA
gaggcaagaccagaactgag

SEQ ID NO: 182023 - DNA, 20 bp, synthetic construct
  source 1..20: mol_type = other DNA
ggaggcaagaccagaactga

SEQ ID NO: 182024 - DNA, 20 bp, synthetic construct
  source 1..20: mol_type = other DNA
gggaggcaagaccagaactg

SEQ ID NO: 182025 - DNA, 20 bp, synthetic construct
  source 1..20: mol_type = other DNA
tgggaggcaagaccagaact

SEQ ID NO: 182026 - DNA, 20 bp, synthetic construct
  source 1..20: mol_type = other DNA
gtgggaggcaagaccagaac

SEQ ID NO: 182027 - DNA, 20 bp, synthetic construct
  source 1..20: mol_type = other DNA
cgtgggaggcaagaccagaa

SEQ ID NO: 182028 - DNA, 20 bp, synthetic construct
  source 1..20: mol_type = other DNA
acgtgggaggcaagaccaga

SEQ ID NO: 182029 - DNA, 20 bp, synthetic construct
  source 1..20: mol_type = other DNA
aacgtgggaggcaagaccag

SEQ ID NO: 182030 - DNA, 20 bp, synthetic construct
  source 1..20: mol_type = other DNA
gaacgtgggaggcaagacca

SEQ ID NO: 182031 - DNA, 20 bp, synthetic construct
  source 1..20: mol_type = other DNA
agaacgtgggaggcaagacc

SEQ ID NO: 182032 - DNA, 20 bp, synthetic construct
  source 1..20: mol_type = other DNA
gagaacgtgggaggcaagac

SEQ ID NO: 182033 - DNA, 20 bp, synthetic construct
  source 1..20: mol_type = other DNA
ggagaacgtgggaggcaaga

SEQ ID NO: 182034 - DNA, 20 bp, synthetic construct
  source 1..20: mol_type = other DNA
aggagaacgtgggaggcaag

SEQ ID NO: 182035 - DNA, 20 bp, synthetic construct
  source 1..20: mol_type = other DNA
gaggagaacgtgggaggcaa

SEQ ID NO: 182036 - DNA, 20 bp, synthetic construct
  source 1..20: mol_type = other DNA
ggaggagaacgtgggaggca

SEQ ID NO: 182037 - DNA, 20 bp, synthetic construct
  source 1..20: mol_type = other DNA
tggaggagaacgtgggaggc

SEQ ID NO: 182038 - DNA, 20 bp, synthetic construct
  source 1..20: mol_type = other DNA
gtggaggagaacgtgggagg

SEQ ID NO: 182039 - DNA, 20 bp, synthetic construct
  source 1..20: mol_type = other DNA
tgtggaggagaacgtgggag

SEQ ID NO: 182040 - DNA, 20 bp, synthetic construct
  source 1..20: mol_type = other DNA
atgtggaggagaacgtggga

SEQ ID NO: 182041 - DNA, 20 bp, synthetic construct
  source 1..20: mol_type = other DNA
aatgtggaggagaacgtggg

SEQ ID NO: 182042 - DNA, 20 bp, synthetic construct
  source 1..20: mol_type = other DNA
aaatgtggaggagaacgtgg

SEQ ID NO: 182043 - DNA, 20 bp, synthetic construct
  source 1..20: mol_type = other DNA
taaatgtggaggagaacgtg

SEQ ID NO: 182044 - DNA, 20 bp, synthetic construct
  source 1..20: mol_type = other DNA
ttaaatgtggaggagaacgt

SEQ ID NO: 182045 - DNA, 20 bp, synthetic construct
  source 1..20: mol_type = other DNA
cttaaatgtggaggagaacg

SEQ ID NO: 182046 - DNA, 20 bp, synthetic construct
  source 1..20: mol_type = other DNA
tcttaaatgtggaggagaac

SEQ ID NO: 182047 - DNA, 20 bp, synthetic construct
  source 1..20: mol_type = other DNA
ttcttaaatgtggaggagaa

SEQ ID NO: 182048 - DNA, 20 bp, synthetic construct
  source 1..20: mol_type = other DNA
tttcttaaatgtggaggaga

SEQ ID NO: 182049 - DNA, 20 bp, synthetic construct
  source 1..20: mol_type = other DNA
ttttcttaaatgtggaggag

SEQ ID NO: 182050 - DNA, 20 bp, synthetic construct
  source 1..20: mol_type = other DNA
attttcttaaatgtggagga

SEQ ID NO: 182051 - DNA, 20 bp, synthetic construct
  source 1..20: mol_type = other DNA
gattttcttaaatgtggagg

SEQ ID NO: 182052 - DNA, 20 bp, synthetic construct
  source 1..20: mol_type = other DNA
ggattttcttaaatgtggag

SEQ ID NO: 182053 - DNA, 20 bp, synthetic construct
  source 1..20: mol_type = other DNA
tggattttcttaaatgtgga

SEQ ID NO: 182054 - DNA, 20 bp, synthetic construct
  source 1..20: mol_type = other DNA
gtggattttcttaaatgtgg

SEQ ID NO: 182055 - DNA, 20 bp, synthetic construct
  source 1..20: mol_type = other DNA
ggtggattttcttaaatgtg

SEQ ID NO: 182056 - DNA, 20 bp, synthetic construct
  source 1..20: mol_type = other DNA
tggtggattttcttaaatgt

SEQ ID NO: 182057 - DNA, 20 bp, synthetic construct
  source 1..20: mol_type = other DNA
ctggtggattttcttaaatg

SEQ ID NO: 182058 - DNA, 20 bp, synthetic construct
  source 1..20: mol_type = other DNA
gctggtggattttcttaaat

SEQ ID NO: 182059 - DNA, 20 bp, synthetic construct
  source 1..20: mol_type = other DNA
agctggtggattttcttaaa

SEQ ID NO: 182060 - DNA, 20 bp, synthetic construct
  source 1..20: mol_type = other DNA
tagctggtggattttcttaa

SEQ ID NO: 182061 - DNA, 20 bp, synthetic construct
  source 1..20: mol_type = other DNA
gtagctggtggattttctta

SEQ ID NO: 182062 - DNA, 20 bp, synthetic construct
  source 1..20: mol_type = other DNA
tgtagctggtggattttctt

SEQ ID NO: 182063 - DNA, 20 bp, synthetic construct
  source 1..20: mol_type = other DNA
ttgtagctggtggattttct

SEQ ID NO: 182064 - DNA, 20 bp, synthetic construct
  source 1..20: mol_type = other DNA
tttgtagctggtggattttc

SEQ ID NO: 182065 - DNA, 20 bp, synthetic construct
  source 1..20: mol_type = other DNA
ctttgtagctggtggatttt

SEQ ID NO: 182066 - DNA, 20 bp, synthetic construct
  source 1..20: mol_type = other DNA
actttgtagctggtggattt

SEQ ID NO: 182067 - DNA, 20 bp, synthetic construct
  source 1..20: mol_type = other DNA
cactttgtagctggtggatt

SEQ ID NO: 182068 - DNA, 20 bp, synthetic construct
  source 1..20: mol_type = other DNA
tcactttgtagctggtggat

SEQ ID NO: 182069 - DNA, 20 bp, synthetic construct
  source 1..20: mol_type = other DNA
ttcactttgtagctggtgga

SEQ ID NO: 182070 - DNA, 20 bp, synthetic construct
  source 1..20: mol_type = other DNA
cttcactttgtagctggtgg

SEQ ID NO: 182071 - DNA, 20 bp, synthetic construct
  source 1..20: mol_type = other DNA
tcttcactttgtagctggtg

SEQ ID NO: 182072 - DNA, 20 bp, synthetic construct
  source 1..20: mol_type = other DNA
atcttcactttgtagctggt

SEQ ID NO: 182073 - DNA, 20 bp, synthetic construct
  source 1..20: mol_type = other DNA
tatcttcactttgtagctgg

SEQ ID NO: 182074 - DNA, 20 bp, synthetic construct
  source 1..20: mol_type = other DNA
gtatcttcactttgtagctg

SEQ ID NO: 182075 - DNA, 20 bp, synthetic construct
  source 1..20: mol_type = other DNA
ggtatcttcactttgtagct

SEQ ID NO: 182076 - DNA, 20 bp, synthetic construct
  source 1..20: mol_type = other DNA
tggtatcttcactttgtagc

SEQ ID NO: 182077 - DNA, 20 bp, synthetic construct
  source 1..20: mol_type = other DNA
atggtatcttcactttgtag

SEQ ID NO: 182078 - DNA, 20 bp, synthetic construct
  source 1..20: mol_type = other DNA
tatggtatcttcactttgta

SEQ ID NO: 182079 - DNA, 20 bp, synthetic construct
  source 1..20: mol_type = other DNA
atatggtatcttcactttgt

SEQ ID NO: 182080 - DNA, 20 bp, synthetic construct
  source 1..20: mol_type = other DNA
catatggtatcttcactttg

SEQ ID NO: 182081 - DNA, 20 bp, synthetic construct
  source 1..20: mol_type = other DNA
acatatggtatcttcacttt

SEQ ID NO: 182082 - DNA, 20 bp, synthetic construct
  source 1..20: mol_type = other DNA
cacatatggtatcttcactt

SEQ ID NO: 182083 - DNA, 20 bp, synthetic construct
  source 1..20: mol_type = other DNA
tcacatatggtatcttcact

SEQ ID NO: 182084 - DNA, 20 bp, synthetic construct
  source 1..20: mol_type = other DNA
atcacatatggtatcttcac

SEQ ID NO: 182085 - DNA, 20 bp, synthetic construct
  source 1..20: mol_type = other DNA
tatcacatatggtatcttca

SEQ ID NO: 182086 - DNA, 20 bp, synthetic construct
  source 1..20: mol_type = other DNA
atatcacatatggtatcttc

SEQ ID NO: 182087 - DNA, 20 bp, synthetic construct
  source 1..20: mol_type = other DNA
gatatcacatatggtatctt

SEQ ID NO: 182088 - DNA, 20 bp, synthetic construct
  source 1..20: mol_type = other DNA
ggatatcacatatggtatct

SEQ ID NO: 182089 - DNA, 20 bp, synthetic construct
  source 1..20: mol_type = other DNA
gggatatcacatatggtatc

SEQ ID NO: 182090 - DNA, 20 bp, synthetic construct
  source 1..20: mol_type = other DNA
tgggatatcacatatggtat

SEQ ID NO: 182091 - DNA, 20 bp, synthetic construct
  source 1..20: mol_type = other DNA
gtgggatatcacatatggta

SEQ ID NO: 182092 - DNA, 20 bp, synthetic construct
  source 1..20: mol_type = other DNA
ggtgggatatcacatatggt

SEQ ID NO: 182093 - DNA, 20 bp, synthetic construct
  source 1..20: mol_type = other DNA
gggtgggatatcacatatgg

SEQ ID NO: 182094 - DNA, 20 bp, synthetic construct
  source 1..20: mol_type = other DNA
agggtgggatatcacatatg

SEQ ID NO: 182095 - DNA, 20 bp, synthetic construct
  source 1..20: mol_type = other DNA
tagggtgggatatcacatat

SEQ ID NO: 182096 - DNA, 20 bp, synthetic construct
  source 1..20: mol_type = other DNA
ctagggtgggatatcacata

SEQ ID NO: 182097 - DNA, 20 bp, synthetic construct
  source 1..20: mol_type = other DNA
actagggtgggatatcacat

SEQ ID NO: 182098 - DNA, 20 bp, synthetic construct
  source 1..20: mol_type = other DNA
aactagggtgggatatcaca

SEQ ID NO: 182099 - DNA, 20 bp, synthetic construct
  source 1..20: mol_type = other DNA
aaactagggtgggatatcac

SEQ ID NO: 182100 - DNA, 20 bp, synthetic construct
  source 1..20: mol_type = other DNA
gaaactagggtgggatatca

SEQ ID NO: 182101 - DNA, 20 bp, synthetic construct
  source 1..20: mol_type = other DNA
agaaactagggtgggatatc

SEQ ID NO: 182102 - DNA, 20 bp, synthetic construct
  source 1..20: mol_type = other DNA
cagaaactagggtgggatat

SEQ ID NO: 182103 - DNA, 20 bp, synthetic construct
  source 1..20: mol_type = other DNA
acagaaactagggtgggata

SEQ ID NO: 182104 - DNA, 20 bp, synthetic construct
  source 1..20: mol_type = other DNA
aacagaaactagggtgggat

SEQ ID NO: 182105 - DNA, 20 bp, synthetic construct
  source 1..20: mol_type = other DNA
aaacagaaactagggtggga

SEQ ID NO: 182106 - DNA, 20 bp, synthetic construct
  source 1..20: mol_type = other DNA
aaaacagaaactagggtggg

SEQ ID NO: 182107 - DNA, 20 bp, synthetic construct
  source 1..20: mol_type = other DNA
taaaacagaaactagggtgg

SEQ ID NO: 182108 - DNA, 20 bp, synthetic construct
  source 1..20: mol_type = other DNA
ataaaacagaaactagggtg

SEQ ID NO: 182109 - DNA, 20 bp, synthetic construct
  source 1..20: mol_type = other DNA
gataaaacagaaactagggt

SEQ ID NO: 182110 - DNA, 20 bp, synthetic construct
  source 1..20: mol_type = other DNA
tgataaaacagaaactaggg

SEQ ID NO: 182111 - DNA, 20 bp, synthetic construct
  source 1..20: mol_type = other DNA
ctgataaaacagaaactagg

SEQ ID NO: 182112 - DNA, 20 bp, synthetic construct
  source 1..20: mol_type = other DNA
cctgataaaacagaaactag

SEQ ID NO: 182113 - DNA, 20 bp, synthetic construct
  source 1..20: mol_type = other DNA
ccctgataaaacagaaacta

SEQ ID NO: 182114 - DNA, 20 bp, synthetic construct
  source 1..20: mol_type = other DNA
accctgataaaacagaaact

SEQ ID NO: 182115 - DNA, 20 bp, synthetic construct
  source 1..20: mol_type = other DNA
aaccctgataaaacagaaac

SEQ ID NO: 182116 - DNA, 20 bp, synthetic construct
  source 1..20: mol_type = other DNA
aaaccctgataaaacagaaa

SEQ ID NO: 182117 - DNA, 20 bp, synthetic construct
  source 1..20: mol_type = other DNA
caaaccctgataaaacagaa

SEQ ID NO: 182118 - DNA, 20 bp, synthetic construct
  source 1..20: mol_type = other DNA
ccaaaccctgataaaacaga

SEQ ID NO: 182119 - DNA, 20 bp, synthetic construct
  source 1..20: mol_type = other DNA
tccaaaccctgataaaacag

SEQ ID NO: 182120 - DNA, 20 bp, synthetic construct
  source 1..20: mol_type = other DNA
ctccaaaccctgataaaaca

SEQ ID NO: 182121 - DNA, 20 bp, synthetic construct
  source 1..20: mol_type = other DNA
gctccaaaccctgataaaac

SEQ ID NO: 182122 - DNA, 20 bp, synthetic construct
  source 1..20: mol_type = other DNA
tgctccaaaccctgataaaa

SEQ ID NO: 182123 - DNA, 20 bp, synthetic construct
  source 1..20: mol_type = other DNA
ctgctccaaaccctgataaa

SEQ ID NO: 182124 - DNA, 20 bp, synthetic construct
  source 1..20: mol_type = other DNA
cctgctccaaaccctgataa

SEQ ID NO: 182125 - DNA, 20 bp, synthetic construct
  source 1..20: mol_type = other DNA
acctgctccaaaccctgata

SEQ ID NO: 182126 - DNA, 20 bp, synthetic construct
  source 1..20: mol_type = other DNA
cacctgctccaaaccctgat

SEQ ID NO: 182127 - DNA, 20 bp, synthetic construct
  source 1..20: mol_type = other DNA
ccacctgctccaaaccctga

SEQ ID NO: 182128 - DNA, 20 bp, synthetic construct
  source 1..20: mol_type = other DNA
tccacctgctccaaaccctg

SEQ ID NO: 182129 - DNA, 20 bp, synthetic construct
  source 1..20: mol_type = other DNA
ctccacctgctccaaaccct

SEQ ID NO: 182130 - DNA, 20 bp, synthetic construct
  source 1..20: mol_type = other DNA
gctccacctgctccaaaccc

SEQ ID NO: 182131 - DNA, 20 bp, synthetic construct
  source 1..20: mol_type = other DNA
tgctccacctgctccaaacc

SEQ ID NO: 182132 - DNA, 20 bp, synthetic construct
  source 1..20: mol_type = other DNA
ctgctccacctgctccaaac

SEQ ID NO: 182133 - DNA, 20 bp, synthetic construct
  source 1..20: mol_type = other DNA
cctgctccacctgctccaaa

SEQ ID NO: 182134 - DNA, 20 bp, synthetic construct
  source 1..20: mol_type = other DNA
gcctgctccacctgctccaa

SEQ ID NO: 182135 - DNA, 20 bp, synthetic construct
  source 1..20: mol_type = other DNA
tgcctgctccacctgctcca

SEQ ID NO: 182136 - DNA, 20 bp, synthetic construct
  source 1..20: mol_type = other DNA
ctgcctgctccacctgctcc

SEQ ID NO: 182137 - DNA, 20 bp, synthetic construct
  source 1..20: mol_type = other DNA
tctgcctgctccacctgctc

SEQ ID NO: 182138 - DNA, 20 bp, synthetic construct
  source 1..20: mol_type = other DNA
ctctgcctgctccacctgct

SEQ ID NO: 182139 - DNA, 20 bp, synthetic construct
  source 1..20: mol_type = other DNA
cctctgcctgctccacctgc

SEQ ID NO: 182140 - DNA, 20 bp, synthetic construct
  source 1..20: mol_type = other DNA
ccctctgcctgctccacctg

SEQ ID NO: 182141 - DNA, 20 bp, synthetic construct
  source 1..20: mol_type = other DNA
tccctctgcctgctccacct

SEQ ID NO: 182142 - DNA, 20 bp, synthetic construct
  source 1..20: mol_type = other DNA
atccctctgcctgctccacc

SEQ ID NO: 182143 - DNA, 20 bp, synthetic construct
  source 1..20: mol_type = other DNA
gatccctctgcctgctccac

SEQ ID NO: 182144 - DNA, 20 bp, synthetic construct
  source 1..20: mol_type = other DNA
tgatccctctgcctgctcca

SEQ ID NO: 182145 - DNA, 20 bp, synthetic construct
  source 1..20: mol_type = other DNA
atgatccctctgcctgctcc

SEQ ID NO: 182146 - DNA, 20 bp, synthetic construct
  source 1..20: mol_type = other DNA
aatgatccctctgcctgctc

SEQ ID NO: 182147 - DNA, 20 bp, synthetic construct
  source 1..20: mol_type = other DNA
aaatgatccctctgcctgct

SEQ ID NO: 182148 - DNA, 20 bp, synthetic construct
  source 1..20: mol_type = other DNA
gaaatgatccctctgcctgc

SEQ ID NO: 182149 - DNA, 20 bp, synthetic construct
  source 1..20: mol_type = other DNA
tgaaatgatccctctgcctg

SEQ ID NO: 182150 - DNA, 20 bp, synthetic construct
  source 1..20: mol_type = other DNA
ctgaaatgatccctctgcct

SEQ ID NO: 182151 - DNA, 20 bp, synthetic construct
  source 1..20: mol_type = other DNA
gctgaaatgatccctctgcc

SEQ ID NO: 182152 - DNA, 20 bp, synthetic construct
  source 1..20: mol_type = other DNA
ggctgaaatgatccctctgc

SEQ ID NO: 182153 - DNA, 20 bp, synthetic construct
  source 1..20: mol_type = other DNA
aggctgaaatgatccctctg

SEQ ID NO: 182154 - DNA, 20 bp, synthetic construct
  source 1..20: mol_type = other DNA
taggctgaaatgatccctct

SEQ ID NO: 182155 - DNA, 20 bp, synthetic construct
  source 1..20: mol_type = other DNA
ataggctgaaatgatccctc

SEQ ID NO: 182156 - DNA, 20 bp, synthetic construct
  source 1..20: mol_type = other DNA
tataggctgaaatgatccct

SEQ ID NO: 182157 - DNA, 20 bp, synthetic construct
  source 1..20: mol_type = other DNA
ttataggctgaaatgatccc

SEQ ID NO: 182158 - DNA, 20 bp, synthetic construct
  source 1..20: mol_type = other DNA
tttataggctgaaatgatcc

SEQ ID NO: 182159 - DNA, 20 bp, synthetic construct
  source 1..20: mol_type = other DNA
atttataggctgaaatgatc

SEQ ID NO: 182160 - DNA, 20 bp, synthetic construct
  source 1..20: mol_type = other DNA
aatttataggctgaaatgat

SEQ ID NO: 182161 - DNA, 20 bp, synthetic construct
  source 1..20: mol_type = other DNA
caatttataggctgaaatga

SEQ ID NO: 182162 - DNA, 20 bp, synthetic construct
  source 1..20: mol_type = other DNA
acaatttataggctgaaatg

SEQ ID NO: 182163 - DNA, 20 bp, synthetic construct
  source 1..20: mol_type = other DNA
tacaatttataggctgaaat

SEQ ID NO: 182164 - DNA, 20 bp, synthetic construct
  source 1..20: mol_type = other DNA
atacaatttataggctgaaa

SEQ ID NO: 182165 - DNA, 20 bp, synthetic construct
  source 1..20: mol_type = other DNA
aatacaatttataggctgaa

SEQ ID NO: 182166 - DNA, 20 bp, synthetic construct
  source 1..20: mol_type = other DNA
taatacaatttataggctga

SEQ ID NO: 182167 - DNA, 20 bp, synthetic construct
  source 1..20: mol_type = other DNA
ttaatacaatttataggctg

SEQ ID NO: 182168 - DNA, 20 bp, synthetic construct
  source 1..20: mol_type = other DNA
cttaatacaatttataggct

SEQ ID NO: 182169 - DNA, 20 bp, synthetic construct
  source 1..20: mol_type = other DNA
ccttaatacaatttataggc

SEQ ID NO: 182170 - DNA, 20 bp, synthetic construct
  source 1..20: mol_type = other DNA
cccttaatacaatttatagg

SEQ ID NO: 182171 - DNA, 20 bp, synthetic construct
  source 1..20: mol_type = other DNA
acccttaatacaatttatag

SEQ ID NO: 182172 - DNA, 20 bp, synthetic construct
  source 1..20: mol_type = other DNA
cacccttaatacaatttata

SEQ ID NO: 182173 - DNA, 20 bp, synthetic construct
  source 1..20: mol_type = other DNA
tcacccttaatacaatttat

SEQ ID NO: 182174 - DNA, 20 bp, synthetic construct
  source 1..20: mol_type = other DNA
ctcacccttaatacaattta

SEQ ID NO: 182175 - DNA, 20 bp, synthetic construct
  source 1..20: mol_type = other DNA
actcacccttaatacaattt

SEQ ID NO: 182176 - DNA, 20 bp, synthetic construct
  source 1..20: mol_type = other DNA
tactcacccttaatacaatt

SEQ ID NO: 182177 - DNA, 20 bp, synthetic construct
  source 1..20: mol_type = other DNA
gtactcacccttaatacaat

SEQ ID NO: 182178 - DNA, 20 bp, synthetic construct
  source 1..20: mol_type = other DNA
agtactcacccttaatacaa

SEQ ID NO: 182179 - DNA, 20 bp, synthetic construct
  source 1..20: mol_type = other DNA
cagtactcacccttaataca

SEQ ID NO: 182180 - DNA, 20 bp, synthetic construct
  source 1..20: mol_type = other DNA
tcagtactcacccttaatac

SEQ ID NO: 182181 - DNA, 20 bp, synthetic construct
  source 1..20: mol_type = other DNA
ctcagtactcacccttaata

SEQ ID NO: 182182 - DNA, 20 bp, synthetic construct
  source 1..20: mol_type = other DNA
actcagtactcacccttaat

SEQ ID NO: 182183 - DNA, 20 bp, synthetic construct
  source 1..20: mol_type = other DNA
gactcagtactcacccttaa

SEQ ID NO: 182184 - DNA, 20 bp, synthetic construct
  source 1..20: mol_type = other DNA
tgactcagtactcaccctta

SEQ ID NO: 182185 - DNA, 20 bp, synthetic construct
  source 1..20: mol_type = other DNA
atgactcagtactcaccctt

SEQ ID NO: 182186 - DNA, 20 bp, synthetic construct
  source 1..20: mol_type = other DNA
aatgactcagtactcaccct

SEQ ID NO: 182187 - DNA, 20 bp, synthetic construct
  source 1..20: mol_type = other DNA
gaatgactcagtactcaccc

SEQ ID NO: 182188 - DNA, 20 bp, synthetic construct
  source 1..20: mol_type = other DNA
agaatgactcagtactcacc

SEQ ID NO: 182189 - DNA, 20 bp, synthetic construct
  source 1..20: mol_type = other DNA
aagaatgactcagtactcac

SEQ ID NO: 182190 - DNA, 20 bp, synthetic construct
  source 1..20: mol_type = other DNA
gaagaatgactcagtactca

SEQ ID NO: 182191 - DNA, 20 bp, synthetic construct
  source 1..20: mol_type = other DNA
tgaagaatgactcagtactc

SEQ ID NO: 182192 - DNA, 20 bp, synthetic construct
  source 1..20: mol_type = other DNA
ttgaagaatgactcagtact

SEQ ID NO: 182193 - DNA, 20 bp, synthetic construct
  source 1..20: mol_type = other DNA
cttgaagaatgactcagtac

SEQ ID NO: 182194 - DNA, 20 bp, synthetic construct
  source 1..20: mol_type = other DNA
tcttgaagaatgactcagta

SEQ ID NO: 182195 - DNA, 20 bp, synthetic construct
  source 1..20: mol_type = other DNA
ttcttgaagaatgactcagt

SEQ ID NO: 182196 - DNA, 20 bp, synthetic construct
  source 1..20: mol_type = other DNA
tttcttgaagaatgactcag

SEQ ID NO: 182197 - DNA, 20 bp, synthetic construct
  source 1..20: mol_type = other DNA
ttttcttgaagaatgactca

SEQ ID NO: 182198 - DNA, 20 bp, synthetic construct
  source 1..20: mol_type = other DNA
cttttcttgaagaatgactc

SEQ ID NO: 182199 - DNA, 20 bp, synthetic construct
  source 1..20: mol_type = other DNA
acttttcttgaagaatgact

SEQ ID NO: 182200 - DNA, 20 bp, synthetic construct
  source 1..20: mol_type = other DNA
aacttttcttgaagaatgac

SEQ ID NO: 182201 - DNA, 20 bp, synthetic construct
  source 1..20: mol_type = other DNA
aaacttttcttgaagaatga

SEQ ID NO: 182202 - DNA, 20 bp, synthetic construct
  source 1..20: mol_type = other DNA
aaaacttttcttgaagaatg

SEQ ID NO: 182203 - DNA, 20 bp, synthetic construct
  source 1..20: mol_type = other DNA
taaaacttttcttgaagaat

SEQ ID NO: 182204 - DNA, 20 bp, synthetic construct
  source 1..20: mol_type = other DNA
ctaaaacttttcttgaagaa

SEQ ID NO: 182205 - DNA, 20 bp, synthetic construct
  source 1..20: mol_type = other DNA
tctaaaacttttcttgaaga

SEQ ID NO: 182206 - DNA, 20 bp, synthetic construct
  source 1..20: mol_type = other DNA
ttctaaaacttttcttgaag

SEQ ID NO: 182207 - DNA, 20 bp, synthetic construct
  source 1..20: mol_type = other DNA
cttctaaaacttttcttgaa

SEQ ID NO: 182208 - DNA, 20 bp, synthetic construct
  source 1..20: mol_type = other DNA
gcttctaaaacttttcttga

SEQ ID NO: 182209 - DNA, 20 bp, synthetic construct
  source 1..20: mol_type = other DNA
tgcttctaaaacttttcttg

SEQ ID NO: 182210 - DNA, 20 bp, synthetic construct
  source 1..20: mol_type = other DNA
atgcttctaaaacttttctt

SEQ ID NO: 182211 - DNA, 20 bp, synthetic construct
  source 1..20: mol_type = other DNA
gatgcttctaaaacttttct

SEQ ID NO: 182212 - DNA, 20 bp, synthetic construct
  source 1..20: mol_type = other DNA
ggatgcttctaaaacttttc

SEQ ID NO: 182213 - DNA, 20 bp, synthetic construct
  source 1..20: mol_type = other DNA
tggatgcttctaaaactttt

SEQ ID NO: 182214 - DNA, 20 bp, synthetic construct
  source 1..20: mol_type = other DNA
ttggatgcttctaaaacttt

SEQ ID NO: 182215 - DNA, 20 bp, synthetic construct
  source 1..20: mol_type = other DNA
tttggatgcttctaaaactt

SEQ ID NO: 182216 - DNA, 20 bp, synthetic construct
  source 1..20: mol_type = other DNA
ttttggatgcttctaaaact

SEQ ID NO: 182217 - DNA, 20 bp, synthetic construct
  source 1..20: mol_type = other DNA
gttttggatgcttctaaaac

SEQ ID NO: 182218 - DNA, 20 bp, synthetic construct
  source 1..20: mol_type = other DNA
agttttggatgcttctaaaa

SEQ ID NO: 182219 - DNA, 20 bp, synthetic construct
  source 1..20: mol_type = other DNA
cagttttggatgcttctaaa

SEQ ID NO: 182220 - DNA, 20 bp, synthetic construct
  source 1..20: mol_type = other DNA
tcagttttggatgcttctaa

SEQ ID NO: 182221 - DNA, 20 bp, synthetic construct
  source 1..20: mol_type = other DNA
ttcagttttggatgcttcta

SEQ ID NO: 182222 - DNA, 20 bp, synthetic construct
  source 1..20: mol_type = other DNA
cttcagttttggatgcttct

SEQ ID NO: 182223 - DNA, 20 bp, synthetic construct
  source 1..20: mol_type = other DNA
ccttcagttttggatgcttc

SEQ ID NO: 182224 - DNA, 20 bp, synthetic construct
  source 1..20: mol_type = other DNA
cccttcagttttggatgctt

SEQ ID NO: 182225 - DNA, 20 bp, synthetic construct
  source 1..20: mol_type = other DNA
acccttcagttttggatgct

SEQ ID NO: 182226 - DNA, 20 bp, synthetic construct
  source 1..20: mol_type = other DNA
cacccttcagttttggatgc

SEQ ID NO: 182227 - DNA, 20 bp, synthetic construct
  source 1..20: mol_type = other DNA
ccacccttcagttttggatg

SEQ ID NO: 182228 - DNA, 20 bp, synthetic construct
  source 1..20: mol_type = other DNA
tccacccttcagttttggat

SEQ ID NO: 182229 - DNA, 20 bp, synthetic construct
  source 1..20: mol_type = other DNA
ctccacccttcagttttgga

SEQ ID NO: 182230 - DNA, 20 bp, synthetic construct
  source 1..20: mol_type = other DNA
gctccacccttcagttttgg

SEQ ID NO: 182231 - DNA, 20 bp, synthetic construct
  source 1..20: mol_type = other DNA
ggctccacccttcagttttg

SEQ ID NO: 182232 - DNA, 20 bp, synthetic construct
  source 1..20: mol_type = other DNA
tggctccacccttcagtttt

SEQ ID NO: 182233 - DNA, 20 bp, synthetic construct
  source 1..20: mol_type = other DNA
gtggctccacccttcagttt

SEQ ID NO: 182234 - DNA, 20 bp, synthetic construct
  source 1..20: mol_type = other DNA
ggtggctccacccttcagtt

SEQ ID NO: 182235 - DNA, 20 bp, synthetic construct
  source 1..20: mol_type = other DNA
aggtggctccacccttcagt

SEQ ID NO: 182236 - DNA, 20 bp, synthetic construct
  source 1..20: mol_type = other DNA
caggtggctccacccttcag

SEQ ID NO: 182237 - DNA, 20 bp, synthetic construct
  source 1..20: mol_type = other DNA
ccaggtggctccacccttca

SEQ ID NO: 182238 - DNA, 20 bp, synthetic construct
  source 1..20: mol_type = other DNA
tccaggtggctccacccttc

SEQ ID NO: 182239 - DNA, 20 bp, synthetic construct
  source 1..20: mol_type = other DNA
ctccaggtggctccaccctt

SEQ ID NO: 182240 - DNA, 20 bp, synthetic construct
  source 1..20: mol_type = other DNA
tctccaggtggctccaccct

SEQ ID NO: 182241 - DNA, 20 bp, synthetic construct
  source 1..20: mol_type = other DNA
gtctccaggtggctccaccc

SEQ ID NO: 182242 - DNA, 20 bp, synthetic construct
  source 1..20: mol_type = other DNA
tgtctccaggtggctccacc

SEQ ID NO: 182243 - DNA, 20 bp, synthetic construct
  source 1..20: mol_type = other DNA
ctgtctccaggtggctccac

SEQ ID NO: 182244 - DNA, 20 bp, synthetic construct
  source 1..20: mol_type = other DNA
actgtctccaggtggctcca

SEQ ID NO: 182245 - DNA, 20 bp, synthetic construct
  source 1..20: mol_type = other DNA
tactgtctccaggtggctcc

SEQ ID NO: 182246 - DNA, 20 bp, synthetic construct
  source 1..20: mol_type = other DNA
atactgtctccaggtggctc

SEQ ID NO: 182247 - DNA, 20 bp, synthetic construct
  source 1..20: mol_type = other DNA
gatactgtctccaggtggct

SEQ ID NO: 182248 - DNA, 20 bp, synthetic construct
  source 1..20: mol_type = other DNA
tgatactgtctccaggtggc

SEQ ID NO: 182249 - DNA, 20 bp, synthetic construct
  source 1..20: mol_type = other DNA
atgatactgtctccaggtgg

SEQ ID NO: 182250 - DNA, 20 bp, synthetic construct
  source 1..20: mol_type = other DNA
gatgatactgtctccaggtg

SEQ ID NO: 182251 - DNA, 20 bp, synthetic construct
  source 1..20: mol_type = other DNA
tgatgatactgtctccaggt

SEQ ID NO: 182252 - DNA, 20 bp, synthetic construct
  source 1..20: mol_type = other DNA
ctgatgatactgtctccagg

SEQ ID NO: 182253 - DNA, 20 bp, synthetic construct
  source 1..20: mol_type = other DNA
actgatgatactgtctccag

SEQ ID NO: 182254 - DNA, 20 bp, synthetic construct
  source 1..20: mol_type = other DNA
gactgatgatactgtctcca

SEQ ID NO: 182255 - DNA, 20 bp, synthetic construct
  source 1..20: mol_type = other DNA
ggactgatgatactgtctcc

SEQ ID NO: 182256 - DNA, 20 bp, synthetic construct
  source 1..20: mol_type = other DNA
aggactgatgatactgtctc

SEQ ID NO: 182257 - DNA, 20 bp, synthetic construct
  source 1..20: mol_type = other DNA
caggactgatgatactgtct

SEQ ID NO: 182258 - DNA, 20 bp, synthetic construct
  source 1..20: mol_type = other DNA
ccaggactgatgatactgtc

SEQ ID NO: 182259 - DNA, 20 bp, synthetic construct
  source 1..20: mol_type = other DNA
gccaggactgatgatactgt

SEQ ID NO: 182260 - DNA, 20 bp, synthetic construct
  source 1..20: mol_type = other DNA
ggccaggactgatgatactg

SEQ ID NO: 182261 - DNA, 20 bp, synthetic construct
  source 1..20: mol_type = other DNA
gggccaggactgatgatact

SEQ ID NO: 182262 - DNA, 20 bp, synthetic construct
  source 1..20: mol_type = other DNA
ggggccaggactgatgatac

SEQ ID NO: 182263 - DNA, 20 bp, synthetic construct
  source 1..20: mol_type = other DNA
cggggccaggactgatgata

SEQ ID NO: 182264 - DNA, 20 bp, synthetic construct
  source 1..20: mol_type = other DNA
tcggggccaggactgatgat

SEQ ID NO: 182265 - DNA, 20 bp, synthetic construct
  source 1..20: mol_type = other DNA
ctcggggccaggactgatga

SEQ ID NO: 182266 - DNA, 20 bp, synthetic construct
  source 1..20: mol_type = other DNA
gctcggggccaggactgatg

SEQ ID NO: 182267 - DNA, 20 bp, synthetic construct
  source 1..20: mol_type = other DNA
tgctcggggccaggactgat

SEQ ID NO: 182268 - DNA, 20 bp, synthetic construct
  source 1..20: mol_type = other DNA
atgctcggggccaggactga

SEQ ID NO: 182269 - DNA, 20 bp, synthetic construct
  source 1..20: mol_type = other DNA
catgctcggggccaggactg

SEQ ID NO: 182270 - DNA, 20 bp, synthetic construct
  source 1..20: mol_type = other DNA
ccatgctcggggccaggact

SEQ ID NO: 182271 - DNA, 20 bp, synthetic construct
  source 1..20: mol_type = other DNA
gccatgctcggggccaggac

SEQ ID NO: 182272 - DNA, 20 bp, synthetic construct
  source 1..20: mol_type = other DNA
ggccatgctcggggccagga

SEQ ID NO: 182273 - DNA, 20 bp, synthetic construct
  source 1..20: mol_type = other DNA
aggccatgctcggggccagg

SEQ ID NO: 182274 - DNA, 20 bp, synthetic construct
  source 1..20: mol_type = other DNA
caggccatgctcggggccag

SEQ ID NO: 182275 - DNA, 20 bp, synthetic construct
  source 1..20: mol_type = other DNA
gcaggccatgctcggggcca

SEQ ID NO: 182276 - DNA, 20 bp, synthetic construct
  source 1..20: mol_type = other DNA
tgcaggccatgctcggggcc

SEQ ID NO: 182277 - DNA, 20 bp, synthetic construct
  source 1..20: mol_type = other DNA
atgcaggccatgctcggggc

SEQ ID NO: 182278 - DNA, 20 bp, synthetic construct
  source 1..20: mol_type = other DNA
tatgcaggccatgctcgggg

SEQ ID NO: 182279 - DNA, 20 bp, synthetic construct
  source 1..20: mol_type = other DNA
ctatgcaggccatgctcggg

SEQ ID NO: 182280 - DNA, 20 bp, synthetic construct
  source 1..20: mol_type = other DNA
cctatgcaggccatgctcgg

SEQ ID NO: 182281 - DNA, 20 bp, synthetic construct
  source 1..20: mol_type = other DNA
gcctatgcaggccatgctcg

SEQ ID NO: 182282 - DNA, 20 bp, synthetic construct
  source 1..20: mol_type = other DNA
ggcctatgcaggccatgctc

SEQ ID NO: 182283 - DNA, 20 bp, synthetic construct
  source 1..20: mol_type = other DNA
gggcctatgcaggccatgct

SEQ ID NO: 182284 - DNA, 20 bp, synthetic construct
  source 1..20: mol_type = other DNA
ggggcctatgcaggccatgc

SEQ ID NO: 182285 - DNA, 20 bp, synthetic construct
  source 1..20: mol_type = other DNA
gggggcctatgcaggccatg

SEQ ID NO: 182286 - DNA, 20 bp, synthetic construct
  source 1..20: mol_type = other DNA
tgggggcctatgcaggccat

SEQ ID NO: 182287 - DNA, 20 bp, synthetic construct
  source 1..20: mol_type = other DNA
atgggggcctatgcaggcca

SEQ ID NO: 182288 - DNA, 20 bp, synthetic construct
  source 1..20: mol_type = other DNA
catgggggcctatgcaggcc

SEQ ID NO: 182289 - DNA, 20 bp, synthetic construct
  source 1..20: mol_type = other DNA
ccatgggggcctatgcaggc

SEQ ID NO: 182290 - DNA, 20 bp, synthetic construct
  source 1..20: mol_type = other DNA
tccatgggggcctatgcagg

SEQ ID NO: 182291 - DNA, 20 bp, synthetic construct
  source 1..20: mol_type = other DNA
atccatgggggcctatgcag

SEQ ID NO: 182292 - DNA, 20 bp, synthetic construct
  source 1..20: mol_type = other DNA
gatccatgggggcctatgca

SEQ ID NO: 182293 - DNA, 20 bp, synthetic construct
  source 1..20: mol_type = other DNA
ggatccatgggggcctatgc

SEQ ID NO: 182294 - DNA, 20 bp, synthetic construct
  source 1..20: mol_type = other DNA
gggatccatgggggcctatg

SEQ ID NO: 182295 - DNA, 20 bp, synthetic construct
  source 1..20: mol_type = other DNA
tgggatccatgggggcctat

SEQ ID NO: 182296 - DNA, 20 bp, synthetic construct
  source 1..20: mol_type = other DNA
ctgggatccatgggggccta

SEQ ID NO: 182297 - DNA, 20 bp, synthetic construct
  source 1..20: mol_type = other DNA
gctgggatccatgggggcct

SEQ ID NO: 182298 - DNA, 20 bp, synthetic construct
  source 1..20: mol_type = other DNA
cgctgggatccatgggggcc

SEQ ID NO: 182299 - DNA, 20 bp, synthetic construct
  source 1..20: mol_type = other DNA
ccgctgggatccatgggggc

SEQ ID NO: 182300 - DNA, 20 bp, synthetic construct
  source 1..20: mol_type = other DNA
cccgctgggatccatggggg

SEQ ID NO: 182301 - DNA, 20 bp, synthetic construct
  source 1..20: mol_type = other DNA
tcccgctgggatccatgggg

SEQ ID NO: 182302 - DNA, 20 bp, synthetic construct
  source 1..20: mol_type = other DNA
ctcccgctgggatccatggg

SEQ ID NO: 182303 - DNA, 20 bp, synthetic construct
  source 1..20: mol_type = other DNA
gctcccgctgggatccatgg

SEQ ID NO: 182304 - DNA, 20 bp, synthetic construct
  source 1..20: mol_type = other DNA
agctcccgctgggatccatg

SEQ ID NO: 182305 - DNA, 20 bp, synthetic construct
  source 1..20: mol_type = other DNA
cagctcccgctgggatccat

SEQ ID NO: 182306 - DNA, 20 bp, synthetic construct
  source 1..20: mol_type = other DNA
gcagctcccgctgggatcca

SEQ ID NO: 182307 - DNA, 20 bp, synthetic construct
  source 1..20: mol_type = other DNA
tgcagctcccgctgggatcc

SEQ ID NO: 182308 - DNA, 20 bp, synthetic construct
  source 1..20: mol_type = other DNA
ctgcagctcccgctgggatc

SEQ ID NO: 182309 - DNA, 20 bp, synthetic construct
  source 1..20: mol_type = other DNA
tctgcagctcccgctgggat

SEQ ID NO: 182310 - DNA, 20 bp, synthetic construct
  source 1..20: mol_type = other DNA
ctctgcagctcccgctggga

SEQ ID NO: 182311 - DNA, 20 bp, synthetic construct
  source 1..20: mol_type = other DNA
actctgcagctcccgctggg

SEQ ID NO: 182312 - DNA, 20 bp, synthetic construct
  source 1..20: mol_type = other DNA
cactctgcagctcccgctgg

SEQ ID NO: 182313 - DNA, 20 bp, synthetic construct
  source 1..20: mol_type = other DNA
gcactctgcagctcccgctg

SEQ ID NO: 182314 - DNA, 20 bp, synthetic construct
  source 1..20: mol_type = other DNA
cgcactctgcagctcccgct

SEQ ID NO: 182315 - DNA, 20 bp, synthetic construct
  source 1..20: mol_type = other DNA
ccgcactctgcagctcccgc

SEQ ID NO: 182316 - DNA, 20 bp, synthetic construct
  source 1..20: mol_type = other DNA
cccgcactctgcagctcccg

SEQ ID NO: 182317 - DNA, 20 bp, synthetic construct
  source 1..20: mol_type = other DNA
gcccgcactctgcagctccc

SEQ ID NO: 182318 - DNA, 20 bp, synthetic construct
  source 1..20: mol_type = other DNA
tgcccgcactctgcagctcc

SEQ ID NO: 182319 - DNA, 20 bp, synthetic construct
  source 1..20: mol_type = other DNA
gtgcccgcactctgcagctc

SEQ ID NO: 182320 - DNA, 20 bp, synthetic construct
  source 1..20: mol_type = other DNA
ggtgcccgcactctgcagct

SEQ ID NO: 182321 - DNA, 20 bp, synthetic construct
  source 1..20: mol_type = other DNA
aggtgcccgcactctgcagc

SEQ ID NO: 182322 - DNA, 20 bp, synthetic construct
  source 1..20: mol_type = other DNA
aaggtgcccgcactctgcag

SEQ ID NO: 182323 - DNA, 20 bp, synthetic construct
  source 1..20: mol_type = other DNA
caaggtgcccgcactctgca

SEQ ID NO: 182324 - DNA, 20 bp, synthetic construct
  source 1..20: mol_type = other DNA
ccaaggtgcccgcactctgc

SEQ ID NO: 182325 - DNA, 20 bp, synthetic construct
  source 1..20: mol_type = other DNA
gccaaggtgcccgcactctg

SEQ ID NO: 182326 - DNA, 20 bp, synthetic construct
  source 1..20: mol_type = other DNA
tgccaaggtgcccgcactct

SEQ ID NO: 182327 - DNA, 20 bp, synthetic construct
  source 1..20: mol_type = other DNA
gtgccaaggtgcccgcactc

SEQ ID NO: 182328 - DNA, 20 bp, synthetic construct
  source 1..20: mol_type = other DNA
tgtgccaaggtgcccgcact

SEQ ID NO: 182329 - DNA, 20 bp, synthetic construct
  source 1..20: mol_type = other DNA
gtgtgccaaggtgcccgcac

SEQ ID NO: 182330 - DNA, 20 bp, synthetic construct
  source 1..20: mol_type = other DNA
tgtgtgccaaggtgcccgca

SEQ ID NO: 182331 - DNA, 20 bp, synthetic construct
  source 1..20: mol_type = other DNA
ctgtgtgccaaggtgcccgc

SEQ ID NO: 182332 - DNA, 20 bp, synthetic construct
  source 1..20: mol_type = other DNA
gctgtgtgccaaggtgcccg

SEQ ID NO: 182333 - DNA, 20 bp, synthetic construct
  source 1..20: mol_type = other DNA
ggctgtgtgccaaggtgccc

SEQ ID NO: 182334 - DNA, 20 bp, synthetic construct
  source 1..20: mol_type = other DNA
gggctgtgtgccaaggtgcc

SEQ ID NO: 182335 - DNA, 20 bp, synthetic construct
  source 1..20: mol_type = other DNA
agggctgtgtgccaaggtgc

SEQ ID NO: 182336 - DNA, 20 bp, synthetic construct
  source 1..20: mol_type = other DNA
cagggctgtgtgccaaggtg

SEQ ID NO: 182337 - DNA, 20 bp, synthetic construct
  source 1..20: mol_type = other DNA
tcagggctgtgtgccaaggt

SEQ ID NO: 182338 - DNA, 20 bp, synthetic construct
  source 1..20: mol_type = other DNA
ctcagggctgtgtgccaagg

SEQ ID NO: 182339 - DNA, 20 bp, synthetic construct
  source 1..20: mol_type = other DNA
actcagggctgtgtgccaag

SEQ ID NO: 182340 - DNA, 20 bp, synthetic construct
  source 1..20: mol_type = other DNA
cactcagggctgtgtgccaa

SEQ ID NO: 182341 - DNA, 20 bp, synthetic construct
  source 1..20: mol_type = other DNA
gcactcagggctgtgtgcca

SEQ ID NO: 182342 - DNA, 20 bp, synthetic construct
  source 1..20: mol_type = other DNA
tgcactcagggctgtgtgcc

SEQ ID NO: 182343 - DNA, 20 bp, synthetic construct
  source 1..20: mol_type = other DNA
ttgcactcagggctgtgtgc

SEQ ID NO: 182344 - DNA, 20 bp, synthetic construct
  source 1..20: mol_type = other DNA
tttgcactcagggctgtgtg

SEQ ID NO: 182345 - DNA, 20 bp, synthetic construct
  source 1..20: mol_type = other DNA
ttttgcactcagggctgtgt

SEQ ID NO: 182346 - DNA, 20 bp, synthetic construct
  source 1..20: mol_type = other DNA
attttgcactcagggctgtg

SEQ ID NO: 182347 - DNA, 20 bp, synthetic construct
  source 1..20: mol_type = other DNA
aattttgcactcagggctgt

SEQ ID NO: 182348 - DNA, 20 bp, synthetic construct
  source 1..20: mol_type = other DNA
taattttgcactcagggctg

SEQ ID NO: 182349 - DNA, 20 bp, synthetic construct
  source 1..20: mol_type = other DNA
ctaattttgcactcagggct

SEQ ID NO: 182350 - DNA, 20 bp, synthetic construct
  source 1..20: mol_type = other DNA
cctaattttgcactcagggc

SEQ ID NO: 182351 - DNA, 20 bp, synthetic construct
  source 1..20: mol_type = other DNA
tcctaattttgcactcaggg

SEQ ID NO: 182352 - DNA, 20 bp, synthetic construct
  source 1..20: mol_type = other DNA
ctcctaattttgcactcagg

SEQ ID NO: 182353 - DNA, 20 bp, synthetic construct
  source 1..20: mol_type = other DNA
gctcctaattttgcactcag

SEQ ID NO: 182354 - DNA, 20 bp, synthetic construct
  source 1..20: mol_type = other DNA
agctcctaattttgcactca

SEQ ID NO: 182355 - DNA, 20 bp, synthetic construct
  source 1..20: mol_type = other DNA
cagctcctaattttgcactc

SEQ ID NO: 182356 - DNA, 20 bp, synthetic construct
  source 1..20: mol_type = other DNA
ccagctcctaattttgcact

SEQ ID NO: 182357 - DNA, 20 bp, synthetic construct
  source 1..20: mol_type = other DNA
cccagctcctaattttgcac

SEQ ID NO: 182358 - DNA, 20 bp, synthetic construct
  source 1..20: mol_type = other DNA
gcccagctcctaattttgca

SEQ ID NO: 182359 - DNA, 20 bp, synthetic construct
  source 1..20: mol_type = other DNA
tgcccagctcctaattttgc

SEQ ID NO: 182360 - DNA, 20 bp, synthetic construct
  source 1..20: mol_type = other DNA
ctgcccagctcctaattttg

SEQ ID NO: 182361 - DNA, 20 bp, synthetic construct
  source 1..20: mol_type = other DNA
tctgcccagctcctaatttt

SEQ ID NO: 182362 - DNA, 20 bp, synthetic construct
  source 1..20: mol_type = other DNA
ctctgcccagctcctaattt

SEQ ID NO: 182363 - DNA, 20 bp, synthetic construct
  source 1..20: mol_type = other DNA
cctctgcccagctcctaatt

SEQ ID NO: 182364 - DNA, 20 bp, synthetic construct
  source 1..20: mol_type = other DNA
ccctctgcccagctcctaat

SEQ ID NO: 182365 - DNA, 20 bp, synthetic construct
  source 1..20: mol_type = other DNA
gccctctgcccagctcctaa

SEQ ID NO: 182366 - DNA, 20 bp, synthetic construct
  source 1..20: mol_type = other DNA
tgccctctgcccagctccta

SEQ ID NO: 182367 - DNA, 20 bp, synthetic construct
  source 1..20: mol_type = other DNA
atgccctctgcccagctcct

SEQ ID NO: 182368 - DNA, 20 bp, synthetic construct
  source 1..20: mol_type = other DNA
gatgccctctgcccagctcc

SEQ ID NO: 182369 - DNA, 20 bp, synthetic construct
  source 1..20: mol_type = other DNA
agatgccctctgcccagctc

SEQ ID NO: 182370 - DNA, 20 bp, synthetic construct
  source 1..20: mol_type = other DNA
gagatgccctctgcccagct

SEQ ID NO: 182371 - DNA, 20 bp, synthetic construct
  source 1..20: mol_type = other DNA
agagatgccctctgcccagc

SEQ ID NO: 182372 - DNA, 20 bp, synthetic construct
  source 1..20: mol_type = other DNA
gagagatgccctctgcccag

SEQ ID NO: 182373 - DNA, 20 bp, synthetic construct
  source 1..20: mol_type = other DNA
agagagatgccctctgccca

SEQ ID NO: 182374 - DNA, 20 bp, synthetic construct
  source 1..20: mol_type = other DNA
cagagagatgccctctgccc

SEQ ID NO: 182375 - DNA, 20 bp, synthetic construct
  source 1..20: mol_type = other DNA
acagagagatgccctctgcc

SEQ ID NO: 182376 - DNA, 20 bp, synthetic construct
  source 1..20: mol_type = other DNA
gacagagagatgccctctgc

SEQ ID NO: 182377 - DNA, 20 bp, synthetic construct
  source 1..20: mol_type = other DNA
cgacagagagatgccctctg

SEQ ID NO: 182378 - DNA, 20 bp, synthetic construct
  source 1..20: mol_type = other DNA
gcgacagagagatgccctct

SEQ ID NO: 182379 - DNA, 20 bp, synthetic construct
  source 1..20: mol_type = other DNA
ggcgacagagagatgccctc

SEQ ID NO: 182380 - DNA, 20 bp, synthetic construct
  source 1..20: mol_type = other DNA
tggcgacagagagatgccct

SEQ ID NO: 182381 - DNA, 20 bp, synthetic construct
  source 1..20: mol_type = other DNA
atggcgacagagagatgccc

SEQ ID NO: 182382 - DNA, 20 bp, synthetic construct
  source 1..20: mol_type = other DNA
aatggcgacagagagatgcc

SEQ ID NO: 182383 - DNA, 20 bp, synthetic construct
  source 1..20: mol_type = other DNA
caatggcgacagagagatgc

SEQ ID NO: 182384 - DNA, 20 bp, synthetic construct
  source 1..20: mol_type = other DNA
ccaatggcgacagagagatg

SEQ ID NO: 182385 - DNA, 20 bp, synthetic construct
  source 1..20: mol_type = other DNA
cccaatggcgacagagagat

SEQ ID NO: 182386 - DNA, 20 bp, synthetic construct
  source 1..20: mol_type = other DNA
gcccaatggcgacagagaga

SEQ ID NO: 182387 - DNA, 20 bp, synthetic construct
  source 1..20: mol_type = other DNA
tgcccaatggcgacagagag

SEQ ID NO: 182388 - DNA, 20 bp, synthetic construct
  source 1..20: mol_type = other DNA
ctgcccaatggcgacagaga

SEQ ID NO: 182389 - DNA, 20 bp, synthetic construct
  source 1..20: mol_type = other DNA
gctgcccaatggcgacagag

SEQ ID NO: 182390 - DNA, 20 bp, synthetic construct
  source 1..20: mol_type = other DNA
ggctgcccaatggcgacaga

SEQ ID NO: 182391 - DNA, 20 bp, synthetic construct
  source 1..20: mol_type = other DNA
gggctgcccaatggcgacag

SEQ ID NO: 182392 - DNA, 20 bp, synthetic construct
  source 1..20: mol_type = other DNA
tgggctgcccaatggcgaca

SEQ ID NO: 182393 - DNA, 20 bp, synthetic construct
  source 1..20: mol_type = other DNA
ctgggctgcccaatggcgac

SEQ ID NO: 182394 - DNA, 20 bp, synthetic construct
  source 1..20: mol_type = other DNA
cctgggctgcccaatggcga

SEQ ID NO: 182395 - DNA, 20 bp, synthetic construct
  source 1..20: mol_type = other DNA
ccctgggctgcccaatggcg

SEQ ID NO: 182396 - DNA, 20 bp, synthetic construct
  source 1..20: mol_type = other DNA
gccctgggctgcccaatggc

SEQ ID NO: 182397 - DNA, 20 bp, synthetic construct
  source 1..20: mol_type = other DNA
tgccctgggctgcccaatgg

SEQ ID NO: 182398 - DNA, 20 bp, synthetic construct
  source 1..20: mol_type = other DNA
gtgccctgggctgcccaatg

SEQ ID NO: 182399 - DNA, 20 bp, synthetic construct
  source 1..20: mol_type = other DNA
tgtgccctgggctgcccaat

SEQ ID NO: 182400 - DNA, 20 bp, synthetic construct
  source 1..20: mol_type = other DNA
gtgtgccctgggctgcccaa

SEQ ID NO: 182401 - DNA, 20 bp, synthetic construct
  source 1..20: mol_type = other DNA
agtgtgccctgggctgccca

SEQ ID NO: 182402 - DNA, 20 bp, synthetic construct
  source 1..20: mol_type = other DNA
cagtgtgccctgggctgccc

SEQ ID NO: 182403 - DNA, 20 bp, synthetic construct
  source 1..20: mol_type = other DNA
ccagtgtgccctgggctgcc

SEQ ID NO: 182404 - DNA, 20 bp, synthetic construct
  source 1..20: mol_type = other DNA
accagtgtgccctgggctgc

SEQ ID NO: 182405 - DNA, 20 bp, synthetic construct
  source 1..20: mol_type = other DNA
gaccagtgtgccctgggctg

SEQ ID NO: 182406 - DNA, 20 bp, synthetic construct
  source 1..20: mol_type = other DNA
tgaccagtgtgccctgggct

SEQ ID NO: 182407 - DNA, 20 bp, synthetic construct
  source 1..20: mol_type = other DNA
atgaccagtgtgccctgggc

SEQ ID NO: 182408 - DNA, 20 bp, synthetic construct
  source 1..20: mol_type = other DNA
tatgaccagtgtgccctggg

SEQ ID NO: 182409 - DNA, 20 bp, synthetic construct
  source 1..20: mol_type = other DNA
ctatgaccagtgtgccctgg

SEQ ID NO: 182410 - DNA, 20 bp, synthetic construct
  source 1..20: mol_type = other DNA
gctatgaccagtgtgccctg

SEQ ID NO: 182411 - DNA, 20 bp, synthetic construct
  source 1..20: mol_type = other DNA
ggctatgaccagtgtgccct

SEQ ID NO: 182412 - DNA, 20 bp, synthetic construct
  source 1..20: mol_type = other DNA
aggctatgaccagtgtgccc

SEQ ID NO: 182413 - DNA, 20 bp, synthetic construct
  source 1..20: mol_type = other DNA
aaggctatgaccagtgtgcc

SEQ ID NO: 182414 - DNA, 20 bp, synthetic construct
  source 1..20: mol_type = other DNA
taaggctatgaccagtgtgc

SEQ ID NO: 182415 - DNA, 20 bp, synthetic construct
  source 1..20: mol_type = other DNA
ctaaggctatgaccagtgtg

SEQ ID NO: 182416 - DNA, 20 bp, synthetic construct
  source 1..20: mol_type = other DNA
tctaaggctatgaccagtgt

SEQ ID NO: 182417 - DNA, 20 bp, synthetic construct
  source 1..20: mol_type = other DNA
gtctaaggctatgaccagtg

SEQ ID NO: 182418 - DNA, 20 bp, synthetic construct
  source 1..20: mol_type = other DNA
ggtctaaggctatgaccagt

SEQ ID NO: 182419 - DNA, 20 bp, synthetic construct
  source 1..20: mol_type = other DNA
tggtctaaggctatgaccag

SEQ ID NO: 182420 - DNA, 20 bp, synthetic construct
  source 1..20: mol_type = other DNA
gtggtctaaggctatgacca

SEQ ID NO: 182421 - DNA, 20 bp, synthetic construct
  source 1..20: mol_type = other DNA
cgtggtctaaggctatgacc

SEQ ID NO: 182422 - DNA, 20 bp, synthetic construct
  source 1..20: mol_type = other DNA
tcgtggtctaaggctatgac

SEQ ID NO: 182423 - DNA, 20 bp, synthetic construct
  source 1..20: mol_type = other DNA
ttcgtggtctaaggctatga

SEQ ID NO: 182424 - DNA, 20 bp, synthetic construct
  source 1..20: mol_type = other DNA
gttcgtggtctaaggctatg

SEQ ID NO: 182425 - DNA, 20 bp, synthetic construct
  source 1..20: mol_type = other DNA
tgttcgtggtctaaggctat

SEQ ID NO: 182426 - DNA, 20 bp, synthetic construct
  source 1..20: mol_type = other DNA
gtgttcgtggtctaaggcta

SEQ ID NO: 182427 - DNA, 20 bp, synthetic construct
  source 1..20: mol_type = other DNA
ggtgttcgtggtctaaggct

SEQ ID NO: 182428 - DNA, 20 bp, synthetic construct
  source 1..20: mol_type = other DNA
gggtgttcgtggtctaaggc

SEQ ID NO: 182429 - DNA, 20 bp, synthetic construct
  source 1..20: mol_type = other DNA
agggtgttcgtggtctaagg

SEQ ID NO: 182430 - DNA, 20 bp, synthetic construct
  source 1..20: mol_type = other DNA
cagggtgttcgtggtctaag

SEQ ID NO: 182431 - DNA, 20 bp, synthetic construct
  source 1..20: mol_type = other DNA
acagggtgttcgtggtctaa

SEQ ID NO: 182432 - DNA, 20 bp, synthetic construct
  source 1..20: mol_type = other DNA
cacagggtgttcgtggtcta

SEQ ID NO: 182433 - DNA, 20 bp, synthetic construct
  source 1..20: mol_type = other DNA
gcacagggtgttcgtggtct

SEQ ID NO: 182434 - DNA, 20 bp, synthetic construct
  source 1..20: mol_type = other DNA
ggcacagggtgttcgtggtc

SEQ ID NO: 182435 - DNA, 20 bp, synthetic construct
  source 1..20: mol_type = other DNA
gggcacagggtgttcgtggt

SEQ ID NO: 182436 - DNA, 20 bp, synthetic construct
  source 1..20: mol_type = other DNA
cgggcacagggtgttcgtgg

SEQ ID NO: 182437 - DNA, 20 bp, synthetic construct
  source 1..20: mol_type = other DNA
ccgggcacagggtgttcgtg

SEQ ID NO: 182438 - DNA, 20 bp, synthetic construct
  source 1..20: mol_type = other DNA
cccgggcacagggtgttcgt

SEQ ID NO: 182439 - DNA, 20 bp, synthetic construct
  source 1..20: mol_type = other DNA
ccccgggcacagggtgttcg

SEQ ID NO: 182440 - DNA, 20 bp, synthetic construct
  source 1..20: mol_type = other DNA
cccccgggcacagggtgttc

SEQ ID NO: 182441 - DNA, 20 bp, synthetic construct
  source 1..20: mol_type = other DNA
tcccccgggcacagggtgtt

SEQ ID NO: 182442 - DNA, 20 bp, synthetic construct
  source 1..20: mol_type = other DNA
gtcccccgggcacagggtgt

SEQ ID NO: 182443 - DNA, 20 bp, synthetic construct
  source 1..20: mol_type = other DNA
tgtcccccgggcacagggtg

SEQ ID NO: 182444 - DNA, 20 bp, synthetic construct
  source 1..20: mol_type = other DNA
ctgtcccccgggcacagggt

SEQ ID NO: 182445 - DNA, 20 bp, synthetic construct
  source 1..20: mol_type = other DNA
tctgtcccccgggcacaggg

SEQ ID NO: 182446 - DNA, 20 bp, synthetic construct
  source 1..20: mol_type = other DNA
atctgtcccccgggcacagg

SEQ ID NO: 182447 - DNA, 20 bp, synthetic construct
  source 1..20: mol_type = other DNA
catctgtcccccgggcacag

SEQ ID NO: 182448 - DNA, 20 bp, synthetic construct
  source 1..20: mol_type = other DNA
gcatctgtcccccgggcaca

SEQ ID NO: 182449 - DNA, 20 bp, synthetic construct
  source 1..20: mol_type = other DNA
tgcatctgtcccccgggcac

SEQ ID NO: 182450 - DNA, 20 bp, synthetic construct
  source 1..20: mol_type = other DNA
ttgcatctgtcccccgggca

SEQ ID NO: 182451 - DNA, 20 bp, synthetic construct
  source 1..20: mol_type = other DNA
gttgcatctgtcccccgggc

SEQ ID NO: 182452 - DNA, 20 bp, synthetic construct
  source 1..20: mol_type = other DNA
ggttgcatctgtcccccggg

SEQ ID NO: 182453 - DNA, 20 bp, synthetic construct
  source 1..20: mol_type = other DNA
tggttgcatctgtcccccgg

SEQ ID NO: 182454 - DNA, 20 bp, synthetic construct
  source 1..20: mol_type = other DNA
ctggttgcatctgtcccccg

SEQ ID NO: 182455 - DNA, 20 bp, synthetic construct
  source 1..20: mol_type = other DNA
actggttgcatctgtccccc

SEQ ID NO: 182456 - DNA, 20 bp, synthetic construct
  source 1..20: mol_type = other DNA
cactggttgcatctgtcccc

SEQ ID NO: 182457 - DNA, 20 bp, synthetic construct
  source 1..20: mol_type = other DNA
acactggttgcatctgtccc

SEQ ID NO: 182458 - DNA, 20 bp, synthetic construct
  source 1..20: mol_type = other DNA
cacactggttgcatctgtcc

SEQ ID NO: 182459 - DNA, 20 bp, synthetic construct
  source 1..20: mol_type = other DNA
gcacactggttgcatctgtc

SEQ ID NO: 182460 - DNA, 20 bp, synthetic construct
  source 1..20: mol_type = other DNA
ggcacactggttgcatctgt

SEQ ID NO: 182461 - DNA, 20 bp, synthetic construct
  source 1..20: mol_type = other DNA
gggcacactggttgcatctg

SEQ ID NO: 182462 - DNA, 20 bp, synthetic construct
  source 1..20: mol_type = other DNA
agggcacactggttgcatct

SEQ ID NO: 182463 - DNA, 20 bp, synthetic construct
  source 1..20: mol_type = other DNA
cagggcacactggttgcatc

SEQ ID NO: 182464 - DNA, 20 bp, synthetic construct
  source 1..20: mol_type = other DNA
ccagggcacactggttgcat

SEQ ID NO: 182465 - DNA, 20 bp, synthetic construct
  source 1..20: mol_type = other DNA
cccagggcacactggttgca

SEQ ID NO: 182466 - DNA, 20 bp, synthetic construct
  source 1..20: mol_type = other DNA
gcccagggcacactggttgc

SEQ ID NO: 182467 - DNA, 20 bp, synthetic construct
  source 1..20: mol_type = other DNA
agcccagggcacactggttg

SEQ ID NO: 182468 - DNA, 20 bp, synthetic construct
  source 1..20: mol_type = other DNA
cagcccagggcacactggtt

SEQ ID NO: 182469 - DNA, 20 bp, synthetic construct
  source 1..20: mol_type = other DNA
gcagcccagggcacactggt

SEQ ID NO: 182470 - DNA, 20 bp, synthetic construct
  source 1..20: mol_type = other DNA
ggcagcccagggcacactgg

SEQ ID NO: 182471 - DNA, 20 bp, synthetic construct
  source 1..20: mol_type = other DNA
gggcagcccagggcacactg

SEQ ID NO: 182472 - DNA, 20 bp, synthetic construct
  source 1..20: mol_type = other DNA
tgggcagcccagggcacact

SEQ ID NO: 182473 - DNA, 20 bp, synthetic construct
  source 1..20: mol_type = other DNA
ttgggcagcccagggcacac

SEQ ID NO: 182474 - DNA, 20 bp, synthetic construct
  source 1..20: mol_type = other DNA
attgggcagcccagggcaca

SEQ ID NO: 182475 - DNA, 20 bp, synthetic construct
  source 1..20: mol_type = other DNA
cattgggcagcccagggcac

SEQ ID NO: 182476 - DNA, 20 bp, synthetic construct
  source 1..20: mol_type = other DNA
ccattgggcagcccagggca

SEQ ID NO: 182477 - DNA, 20 bp, synthetic construct
  source 1..20: mol_type = other DNA
gccattgggcagcccagggc

SEQ ID NO: 182478 - DNA, 20 bp, synthetic construct
  source 1..20: mol_type = other DNA
tgccattgggcagcccaggg

SEQ ID NO: 182479 - DNA, 20 bp, synthetic construct
  source 1..20: mol_type = other DNA
ttgccattgggcagcccagg

SEQ ID NO: 182480 - DNA, 20 bp, synthetic construct
  source 1..20: mol_type = other DNA
gttgccattgggcagcccag

SEQ ID NO: 182481 - DNA, 20 bp, synthetic construct
  source 1..20: mol_type = other DNA
tgttgccattgggcagccca

SEQ ID NO: 182482 - DNA, 20 bp, synthetic construct
  source 1..20: mol_type = other DNA
ctgttgccattgggcagccc

SEQ ID NO: 182483 - DNA, 20 bp, synthetic construct
  source 1..20: mol_type = other DNA
tctgttgccattgggcagcc

SEQ ID NO: 182484 - DNA, 20 bp, synthetic construct
  source 1..20: mol_type = other DNA
ctctgttgccattgggcagc

SEQ ID NO: 182485 - DNA, 20 bp, synthetic construct
  source 1..20: mol_type = other DNA
tctctgttgccattgggcag

SEQ ID NO: 182486 - DNA, 20 bp, synthetic construct
  source 1..20: mol_type = other DNA
ctctctgttgccattgggca

SEQ ID NO: 182487 - DNA, 20 bp, synthetic construct
  source 1..20: mol_type = other DNA
tctctctgttgccattgggc

SEQ ID NO: 182488 - DNA, 20 bp, synthetic construct
  source 1..20: mol_type = other DNA
atctctctgttgccattggg

SEQ ID NO: 182489 - DNA, 20 bp, synthetic construct
  source 1..20: mol_type = other DNA
gatctctctgttgccattgg

SEQ ID NO: 182490 - DNA, 20 bp, synthetic construct
  source 1..20: mol_type = other DNA
cgatctctctgttgccattg

SEQ ID NO: 182491 - DNA, 20 bp, synthetic construct
  source 1..20: mol_type = other DNA
tcgatctctctgttgccatt

SEQ ID NO: 182492 - DNA, 20 bp, synthetic construct
  source 1..20: mol_type = other DNA
gtcgatctctctgttgccat

SEQ ID NO: 182493 - DNA, 20 bp, synthetic construct
  source 1..20: mol_type = other DNA
tgtcgatctctctgttgcca

SEQ ID NO: 182494 - DNA, 20 bp, synthetic construct
  source 1..20: mol_type = other DNA
gtgtcgatctctctgttgcc

SEQ ID NO: 182495 - DNA, 20 bp, synthetic construct
  source 1..20: mol_type = other DNA
ggtgtcgatctctctgttgc

SEQ ID NO: 182496 - DNA, 20 bp, synthetic construct
  source 1..20: mol_type = other DNA
aggtgtcgatctctctgttg

SEQ ID NO: 182497 - DNA, 20 bp, synthetic construct
  source 1..20: mol_type = other DNA
caggtgtcgatctctctgtt

SEQ ID NO: 182498 - DNA, 20 bp, synthetic construct
  source 1..20: mol_type = other DNA
ccaggtgtcgatctctctgt

SEQ ID NO: 182499 - DNA, 20 bp, synthetic construct
  source 1..20: mol_type = other DNA
tccaggtgtcgatctctctg

SEQ ID NO: 182500 - DNA, 20 bp, synthetic construct
  source 1..20: mol_type = other DNA
gtccaggtgtcgatctctct

SEQ ID NO: 182501 - DNA, 20 bp, synthetic construct
  source 1..20: mol_type = other DNA
ggtccaggtgtcgatctctc

SEQ ID NO: 182502 - DNA, 20 bp, synthetic construct
  source 1..20: mol_type = other DNA
gggtccaggtgtcgatctct

SEQ ID NO: 182503 - DNA, 20 bp, synthetic construct
  source 1..20: mol_type = other DNA
ggggtccaggtgtcgatctc

SEQ ID NO: 182504 - DNA, 20 bp, synthetic construct
  source 1..20: mol_type = other DNA
tggggtccaggtgtcgatct

SEQ ID NO: 182505 - DNA, 20 bp, synthetic construct
  source 1..20: mol_type = other DNA
atggggtccaggtgtcgatc

SEQ ID NO: 182506 - DNA, 20 bp, synthetic construct
  source 1..20: mol_type = other DNA
catggggtccaggtgtcgat

SEQ ID NO: 182507 - DNA, 20 bp, synthetic construct
  source 1..20: mol_type = other DNA
acatggggtccaggtgtcga

SEQ ID NO: 182508 - DNA, 20 bp, synthetic construct
  source 1..20: mol_type = other DNA
gacatggggtccaggtgtcg

SEQ ID NO: 182509 - DNA, 20 bp, synthetic construct
  source 1..20: mol_type = other DNA
tgacatggggtccaggtgtc

SEQ ID NO: 182510 - DNA, 20 bp, synthetic construct
  source 1..20: mol_type = other DNA
gtgacatggggtccaggtgt

SEQ ID NO: 182511 - DNA, 20 bp, synthetic construct
  source 1..20: mol_type = other DNA
cgtgacatggggtccaggtg

SEQ ID NO: 182512 - DNA, 20 bp, synthetic construct
  source 1..20: mol_type = other DNA
ccgtgacatggggtccaggt

SEQ ID NO: 182513 - DNA, 20 bp, synthetic construct
  source 1..20: mol_type = other DNA
cccgtgacatggggtccagg

SEQ ID NO: 182514 - DNA, 20 bp, synthetic construct
  source 1..20: mol_type = other DNA
ccccgtgacatggggtccag

SEQ ID NO: 182515 - DNA, 20 bp, synthetic construct
  source 1..20: mol_type = other DNA
tccccgtgacatggggtcca

SEQ ID NO: 182516 - DNA, 20 bp, synthetic construct
  source 1..20: mol_type = other DNA
gtccccgtgacatggggtcc

SEQ ID NO: 182517 - DNA, 20 bp, synthetic construct
  source 1..20: mol_type = other DNA
agtccccgtgacatggggtc

SEQ ID NO: 182518 - DNA, 20 bp, synthetic construct
  source 1..20: mol_type = other DNA
gagtccccgtgacatggggt

SEQ ID NO: 182519 - DNA, 20 bp, synthetic construct
  source 1..20: mol_type = other DNA
ggagtccccgtgacatgggg

SEQ ID NO: 182520 - DNA, 20 bp, synthetic construct
  source 1..20: mol_type = other DNA
tggagtccccgtgacatggg

SEQ ID NO: 182521 - DNA, 20 bp, synthetic construct
  source 1..20: mol_type = other DNA
gtggagtccccgtgacatgg

SEQ ID NO: 182522 - DNA, 20 bp, synthetic construct
  source 1..20: mol_type = other DNA
agtggagtccccgtgacatg

SEQ ID NO: 182523 - DNA, 20 bp, synthetic construct
  source 1..20: mol_type = other DNA
tagtggagtccccgtgacat

SEQ ID NO: 182524 - DNA, 20 bp, synthetic construct
  source 1..20: mol_type = other DNA
gtagtggagtccccgtgaca

SEQ ID NO: 182525 - DNA, 20 bp, synthetic construct
  source 1..20: mol_type = other DNA
agtagtggagtccccgtgac

SEQ ID NO: 182526 - DNA, 20 bp, synthetic construct
  source 1..20: mol_type = other DNA
tagtagtggagtccccgtga

SEQ ID NO: 182527 - DNA, 20 bp, synthetic construct
  source 1..20: mol_type = other DNA
ttagtagtggagtccccgtg

SEQ ID NO: 182528 - DNA, 20 bp, synthetic construct
  source 1..20: mol_type = other DNA
cttagtagtggagtccccgt

SEQ ID NO: 182529 - DNA, 20 bp, synthetic construct
  source 1..20: mol_type = other DNA
ccttagtagtggagtccccg

SEQ ID NO: 182530 - DNA, 20 bp, synthetic construct
  source 1..20: mol_type = other DNA
gccttagtagtggagtcccc

SEQ ID NO: 182531 - DNA, 20 bp, synthetic construct
  source 1..20: mol_type = other DNA
agccttagtagtggagtccc

SEQ ID NO: 182532 - DNA, 20 bp, synthetic construct
  source 1..20: mol_type = other DNA
gagccttagtagtggagtcc

SEQ ID NO: 182533 - DNA, 20 bp, synthetic construct
  source 1..20: mol_type = other DNA
ggagccttagtagtggagtc

SEQ ID NO: 182534 - DNA, 20 bp, synthetic construct
  source 1..20: mol_type = other DNA
aggagccttagtagtggagt

SEQ ID NO: 182535 - DNA, 20 bp, synthetic construct
  source 1..20: mol_type = other DNA
taggagccttagtagtggag

SEQ ID NO: 182536 - DNA, 20 bp, synthetic construct
  source 1..20: mol_type = other DNA
ttaggagccttagtagtgga

SEQ ID NO: 182537 - DNA, 20 bp, synthetic construct
  source 1..20: mol_type = other DNA
cttaggagccttagtagtgg

SEQ ID NO: 182538 - DNA, 20 bp, synthetic construct
  source 1..20: mol_type = other DNA
tcttaggagccttagtagtg

SEQ ID NO: 182539 - DNA, 20 bp, synthetic construct
  source 1..20: mol_type = other DNA
gtcttaggagccttagtagt

SEQ ID NO: 182540 - DNA, 20 bp, synthetic construct
  source 1..20: mol_type = other DNA
agtcttaggagccttagtag

SEQ ID NO: 182541 - DNA, 20 bp, synthetic construct
  source 1..20: mol_type = other DNA
cagtcttaggagccttagta

SEQ ID NO: 182542 - DNA, 20 bp, synthetic construct
  source 1..20: mol_type = other DNA
gcagtcttaggagccttagt

SEQ ID NO: 182543 - DNA, 20 bp, synthetic construct
  source 1..20: mol_type = other DNA
ggcagtcttaggagccttag

SEQ ID NO: 182544 - DNA, 20 bp, synthetic construct
  source 1..20: mol_type = other DNA
tggcagtcttaggagcctta

SEQ ID NO: 182545 - DNA, 20 bp, synthetic construct
  source 1..20: mol_type = other DNA
gtggcagtcttaggagcctt

SEQ ID NO: 182546 - DNA, 20 bp, synthetic construct
  source 1..20: mol_type = other DNA
ggtggcagtcttaggagcct

SEQ ID NO: 182547 - DNA, 20 bp, synthetic construct
  source 1..20: mol_type = other DNA
aggtggcagtcttaggagcc

SEQ ID NO: 182548 - DNA, 20 bp, synthetic construct
  source 1..20: mol_type = other DNA
aaggtggcagtcttaggagc

SEQ ID NO: 182549 - DNA, 20 bp, synthetic construct
  source 1..20: mol_type = other DNA
gaaggtggcagtcttaggag

SEQ ID NO: 182550 - DNA, 20 bp, synthetic construct
  source 1..20: mol_type = other DNA
ggaaggtggcagtcttagga

SEQ ID NO: 182551 - DNA, 20 bp, synthetic construct
  source 1..20: mol_type = other DNA
tggaaggtggcagtcttagg

SEQ ID NO: 182552 - DNA, 20 bp, synthetic construct
  source 1..20: mol_type = other DNA
ctggaaggtggcagtcttag

SEQ ID NO: 182553 - DNA, 20 bp, synthetic construct
  source 1..20: mol_type = other DNA
actggaaggtggcagtctta

SEQ ID NO: 182554 - DNA, 20 bp, synthetic construct
  source 1..20: mol_type = other DNA
cactggaaggtggcagtctt

SEQ ID NO: 182555 - DNA, 20 bp, synthetic construct
  source 1..20: mol_type = other DNA
ccactggaaggtggcagtct

SEQ ID NO: 182556 - DNA, 20 bp, synthetic construct
  source 1..20: mol_type = other DNA
cccactggaaggtggcagtc

SEQ ID NO: 182557 - DNA, 20 bp, synthetic construct
  source 1..20: mol_type = other DNA
tcccactggaaggtggcagt

SEQ ID NO: 182558 - DNA, 20 bp, synthetic construct
  source 1..20: mol_type = other DNA
atcccactggaaggtggcag

SEQ ID NO: 182559 - DNA, 20 bp, synthetic construct
  source 1..20: mol_type = other DNA
tatcccactggaaggtggca

SEQ ID NO: 182560 - DNA, 20 bp, synthetic construct
  source 1..20: mol_type = other DNA
ttatcccactggaaggtggc

SEQ ID NO: 182561 - DNA, 20 bp, synthetic construct
  source 1..20: mol_type = other DNA
cttatcccactggaaggtgg

SEQ ID NO: 182562 - DNA, 20 bp, synthetic construct
  source 1..20: mol_type = other DNA
gcttatcccactggaaggtg

SEQ ID NO: 182563 - DNA, 20 bp, synthetic construct
  source 1..20: mol_type = other DNA
ggcttatcccactggaaggt

SEQ ID NO: 182564 - DNA, 20 bp, synthetic construct
  source 1..20: mol_type = other DNA
gggcttatcccactggaagg

SEQ ID NO: 182565 - DNA, 20 bp, synthetic construct
  source 1..20: mol_type = other DNA
agggcttatcccactggaag

SEQ ID NO: 182566 - DNA, 20 bp, synthetic construct
  source 1..20: mol_type = other DNA
cagggcttatcccactggaa

SEQ ID NO: 182567 - DNA, 20 bp, synthetic construct
  source 1..20: mol_type = other DNA
gcagggcttatcccactgga

SEQ ID NO: 182568 - DNA, 20 bp, synthetic construct
  source 1..20: mol_type = other DNA
ggcagggcttatcccactgg

SEQ ID NO: 182569 - DNA, 20 bp, synthetic construct
  source 1..20: mol_type = other DNA
aggcagggcttatcccactg

SEQ ID NO: 182570 - DNA, 20 bp, synthetic construct
  source 1..20: mol_type = other DNA
gaggcagggcttatcccact

SEQ ID NO: 182571 - DNA, 20 bp, synthetic construct
  source 1..20: mol_type = other DNA
ggaggcagggcttatcccac

SEQ ID NO: 182572 - DNA, 20 bp, synthetic construct
  source 1..20: mol_type = other DNA
aggaggcagggcttatccca

SEQ ID NO: 182573 - DNA, 20 bp, synthetic construct
  source 1..20: mol_type = other DNA
taggaggcagggcttatccc

SEQ ID NO: 182574 - DNA, 20 bp, synthetic construct
  source 1..20: mol_type = other DNA
gtaggaggcagggcttatcc

SEQ ID NO: 182575 - DNA, 20 bp, synthetic construct
  source 1..20: mol_type = other DNA
agtaggaggcagggcttatc

SEQ ID NO: 182576 - DNA, 20 bp, synthetic construct
  source 1..20: mol_type = other DNA
cagtaggaggcagggcttat

SEQ ID NO: 182577 - DNA, 20 bp, synthetic construct
  source 1..20: mol_type = other DNA
ccagtaggaggcagggctta

SEQ ID NO: 182578 - DNA, 20 bp, synthetic construct
  source 1..20: mol_type = other DNA
cccagtaggaggcagggctt

SEQ ID NO: 182579 - DNA, 20 bp, synthetic construct
  source 1..20: mol_type = other DNA
gcccagtaggaggcagggct

SEQ ID NO: 182580 - DNA, 20 bp, synthetic construct
  source 1..20: mol_type = other DNA
ggcccagtaggaggcagggc

SEQ ID NO: 182581 - DNA, 20 bp, synthetic construct
  source 1..20: mol_type = other DNA
gggcccagtaggaggcaggg

SEQ ID NO: 182582 - DNA, 20 bp, synthetic construct
  source 1..20: mol_type = other DNA
tgggcccagtaggaggcagg

SEQ ID NO: 182583 - DNA, 20 bp, synthetic construct
  source 1..20: mol_type = other DNA
gtgggcccagtaggaggcag

SEQ ID NO: 182584 - DNA, 20 bp, synthetic construct
  source 1..20: mol_type = other DNA
tgtgggcccagtaggaggca

SEQ ID NO: 182585 - DNA, 20 bp, synthetic construct
  source 1..20: mol_type = other DNA
ttgtgggcccagtaggaggc

SEQ ID NO: 182586 - DNA, 20 bp, synthetic construct
  source 1..20: mol_type = other DNA
attgtgggcccagtaggagg

SEQ ID NO: 182587 - DNA, 20 bp, synthetic construct
  source 1..20: mol_type = other DNA
cattgtgggcccagtaggag

SEQ ID NO: 182588 - DNA, 20 bp, synthetic construct
  source 1..20: mol_type = other DNA
acattgtgggcccagtagga

SEQ ID NO: 182589 - DNA, 20 bp, synthetic construct
  source 1..20: mol_type = other DNA
cacattgtgggcccagtagg

SEQ ID NO: 182590 - DNA, 20 bp, synthetic construct
  source 1..20: mol_type = other DNA
gcacattgtgggcccagtag

SEQ ID NO: 182591 - DNA, 20 bp, synthetic construct
  source 1..20: mol_type = other DNA
tgcacattgtgggcccagta

SEQ ID NO: 182592 - DNA, 20 bp, synthetic construct
  source 1..20: mol_type = other DNA
ctgcacattgtgggcccagt

SEQ ID NO: 182593 - DNA, 20 bp, synthetic construct
  source 1..20: mol_type = other DNA
tctgcacattgtgggcccag

SEQ ID NO: 182594 - DNA, 20 bp, synthetic construct
  source 1..20: mol_type = other DNA
ctctgcacattgtgggccca

SEQ ID NO: 182595 - DNA, 20 bp, synthetic construct
  source 1..20: mol_type = other DNA
tctctgcacattgtgggccc

SEQ ID NO: 182596 - DNA, 20 bp, synthetic construct
  source 1..20: mol_type = other DNA
ttctctgcacattgtgggcc

SEQ ID NO: 182597 - DNA, 20 bp, synthetic construct
  source 1..20: mol_type = other DNA
gttctctgcacattgtgggc

SEQ ID NO: 182598 - DNA, 20 bp, synthetic construct
  source 1..20: mol_type = other DNA
tgttctctgcacattgtggg

SEQ ID NO: 182599 - DNA, 20 bp, synthetic construct
  source 1..20: mol_type = other DNA
gtgttctctgcacattgtgg

SEQ ID NO: 182600 - DNA, 20 bp, synthetic construct
  source 1..20: mol_type = other DNA
agtgttctctgcacattgtg

SEQ ID NO: 182601 - DNA, 20 bp, synthetic construct
  source 1..20: mol_type = other DNA
aagtgttctctgcacattgt

SEQ ID NO: 182602 - DNA, 20 bp, synthetic construct
  source 1..20: mol_type = other DNA
caagtgttctctgcacattg

SEQ ID NO: 182603 - DNA, 20 bp, synthetic construct
  source 1..20: mol_type = other DNA
ccaagtgttctctgcacatt

SEQ ID NO: 182604 - DNA, 20 bp, synthetic construct
  source 1..20: mol_type = other DNA
cccaagtgttctctgcacat

SEQ ID NO: 182605 - DNA, 20 bp, synthetic construct
  source 1..20: mol_type = other DNA
tcccaagtgttctctgcaca

SEQ ID NO: 182606 - DNA, 20 bp, synthetic construct
  source 1..20: mol_type = other DNA
gtcccaagtgttctctgcac

SEQ ID NO: 182607 - DNA, 20 bp, synthetic construct
  source 1..20: mol_type = other DNA
agtcccaagtgttctctgca

SEQ ID NO: 182608 - DNA, 20 bp, synthetic construct
  source 1..20: mol_type = other DNA
tagtcccaagtgttctctgc

SEQ ID NO: 182609 - DNA, 20 bp, synthetic construct
  source 1..20: mol_type = other DNA
gtagtcccaagtgttctctg

SEQ ID NO: 182610 - DNA, 20 bp, synthetic construct
  source 1..20: mol_type = other DNA
ggtagtcccaagtgttctct

SEQ ID NO: 182611 - DNA, 20 bp, synthetic construct
  source 1..20: mol_type = other DNA
aggtagtcccaagtgttctc

SEQ ID NO: 182612 - DNA, 20 bp, synthetic construct
  source 1..20: mol_type = other DNA
caggtagtcccaagtgttct

SEQ ID NO: 182613 - DNA, 20 bp, synthetic construct
  source 1..20: mol_type = other DNA
ccaggtagtcccaagtgttc

SEQ ID NO: 182614 - DNA, 20 bp, synthetic construct
  source 1..20: mol_type = other DNA
gccaggtagtcccaagtgtt

SEQ ID NO: 182615 - DNA, 20 bp, synthetic construct
  source 1..20: mol_type = other DNA
agccaggtagtcccaagtgt

SEQ ID NO: 182616 - DNA, 20 bp, synthetic construct
  source 1..20: mol_type = other DNA
aagccaggtagtcccaagtg

SEQ ID NO: 182617 - DNA, 20 bp, synthetic construct
  source 1..20: mol_type = other DNA
aaagccaggtagtcccaagt

SEQ ID NO: 182618 - DNA, 20 bp, synthetic construct
  source 1..20: mol_type = other DNA
gaaagccaggtagtcccaag

SEQ ID NO: 182619 - DNA, 20 bp, synthetic construct
  source 1..20: mol_type = other DNA
agaaagccaggtagtcccaa

SEQ ID NO: 182620 - DNA, 20 bp, synthetic construct
  source 1..20: mol_type = other DNA
cagaaagccaggtagtccca

SEQ ID NO: 182621 - DNA, 20 bp, synthetic construct
  source 1..20: mol_type = other DNA
ccagaaagccaggtagtccc

SEQ ID NO: 182622 - DNA, 20 bp, synthetic construct
  source 1..20: mol_type = other DNA
tccagaaagccaggtagtcc

SEQ ID NO: 182623 - DNA, 20 bp, synthetic construct
  source 1..20: mol_type = other DNA
atccagaaagccaggtagtc

SEQ ID NO: 182624 - DNA, 20 bp, synthetic construct
  source 1..20: mol_type = other DNA
tatccagaaagccaggtagt

SEQ ID NO: 182625 - DNA, 20 bp, synthetic construct
  source 1..20: mol_type = other DNA
gtatccagaaagccaggtag

SEQ ID NO: 182626 - DNA, 20 bp, synthetic construct
  source 1..20: mol_type = other DNA
tgtatccagaaagccaggta

SEQ ID NO: 182627 - DNA, 20 bp, synthetic construct
  source 1..20: mol_type = other DNA
gtgtatccagaaagccaggt

SEQ ID NO: 182628 - DNA, 20 bp, synthetic construct
  source 1..20: mol_type = other DNA
tgtgtatccagaaagccagg

SEQ ID NO: 182629 - DNA, 20 bp, synthetic construct
  source 1..20: mol_type = other DNA
ttgtgtatccagaaagccag

SEQ ID NO: 182630 - DNA, 20 bp, synthetic construct
  source 1..20: mol_type = other DNA
tttgtgtatccagaaagcca

SEQ ID NO: 182631 - DNA, 20 bp, synthetic construct
  source 1..20: mol_type = other DNA
atttgtgtatccagaaagcc

SEQ ID NO: 182632 - DNA, 20 bp, synthetic construct
  source 1..20: mol_type = other DNA
tatttgtgtatccagaaagc

SEQ ID NO: 182633 - DNA, 20 bp, synthetic construct
  source 1..20: mol_type = other DNA
atatttgtgtatccagaaag

SEQ ID NO: 182634 - DNA, 20 bp, synthetic construct
  source 1..20: mol_type = other DNA
aatatttgtgtatccagaaa

SEQ ID NO: 182635 - DNA, 20 bp, synthetic construct
  source 1..20: mol_type = other DNA
caatatttgtgtatccagaa

SEQ ID NO: 182636 - DNA, 20 bp, synthetic construct
  source 1..20: mol_type = other DNA
tcaatatttgtgtatccaga

SEQ ID NO: 182637 - DNA, 20 bp, synthetic construct
  source 1..20: mol_type = other DNA
atcaatatttgtgtatccag

SEQ ID NO: 182638 - DNA, 20 bp, synthetic construct
  source 1..20: mol_type = other DNA
gatcaatatttgtgtatcca

SEQ ID NO: 182639 - DNA, 20 bp, synthetic construct
  source 1..20: mol_type = other DNA
ggatcaatatttgtgtatcc

SEQ ID NO: 182640 - DNA, 20 bp, synthetic construct
  source 1..20: mol_type = other DNA
tggatcaatatttgtgtatc

SEQ ID NO: 182641 - DNA, 20 bp, synthetic construct
  source 1..20: mol_type = other DNA
ttggatcaatatttgtgtat

SEQ ID NO: 182642 - DNA, 20 bp, synthetic construct
  source 1..20: mol_type = other DNA
attggatcaatatttgtgta

SEQ ID NO: 182643 - DNA, 20 bp, synthetic construct
  source 1..20: mol_type = other DNA
gattggatcaatatttgtgt

SEQ ID NO: 182644 - DNA, 20 bp, synthetic construct
  source 1..20: mol_type = other DNA
agattggatcaatatttgtg

SEQ ID NO: 182645 - DNA, 20 bp, synthetic construct
  source 1..20: mol_type = other DNA
cagattggatcaatatttgt

SEQ ID NO: 182646 - DNA, 20 bp, synthetic construct
  source 1..20: mol_type = other DNA
ccagattggatcaatatttg

SEQ ID NO: 182647 - DNA, 20 bp, synthetic construct
  source 1..20: mol_type = other DNA
tccagattggatcaatattt

SEQ ID NO: 182648 - DNA, 20 bp, synthetic construct
  source 1..20: mol_type = other DNA
gtccagattggatcaatatt

SEQ ID NO: 182649 - DNA, 20 bp, synthetic construct
  source 1..20: mol_type = other DNA
agtccagattggatcaatat

SEQ ID NO: 182650 - DNA, 20 bp, synthetic construct
  source 1..20: mol_type = other DNA
tagtccagattggatcaata

SEQ ID NO: 182651 - DNA, 20 bp, synthetic construct
  source 1..20: mol_type = other DNA
ttagtccagattggatcaat

SEQ ID NO: 182652 - DNA, 20 bp, synthetic construct
  source 1..20: mol_type = other DNA
attagtccagattggatcaa

SEQ ID NO: 182653 - DNA, 20 bp, synthetic construct
  source 1..20: mol_type = other DNA
aattagtccagattggatca

SEQ ID NO: 182654 - DNA, 20 bp, synthetic construct
  source 1..20: mol_type = other DNA
taattagtccagattggatc

SEQ ID NO: 182655 - DNA, 20 bp, synthetic construct
  source 1..20: mol_type = other DNA
ctaattagtccagattggat

SEQ ID NO: 182656 - DNA, 20 bp, synthetic construct
  source 1..20: mol_type = other DNA
tctaattagtccagattgga

SEQ ID NO: 182657 - DNA, 20 bp, synthetic construct
  source 1..20: mol_type = other DNA
ttctaattagtccagattgg

SEQ ID NO: 182658 - DNA, 20 bp, synthetic construct
  source 1..20: mol_type = other DNA
cttctaattagtccagattg

SEQ ID NO: 182659 - DNA, 20 bp, synthetic construct
  source 1..20: mol_type = other DNA
ccttctaattagtccagatt

SEQ ID NO: 182660 - DNA, 20 bp, synthetic construct
  source 1..20: mol_type = other DNA
accttctaattagtccagat

SEQ ID NO: 182661 - DNA, 20 bp, synthetic construct
  source 1..20: mol_type = other DNA
gaccttctaattagtccaga

SEQ ID NO: 182662 - DNA, 20 bp, synthetic construct
  source 1..20: mol_type = other DNA
tgaccttctaattagtccag

SEQ ID NO: 182663 - DNA, 20 bp, synthetic construct
  source 1..20: mol_type = other DNA
ctgaccttctaattagtcca

SEQ ID NO: 182664 - DNA, 20 bp, synthetic construct
  source 1..20: mol_type = other DNA
actgaccttctaattagtcc

SEQ ID NO: 182665 - DNA, 20 bp, synthetic construct
  source 1..20: mol_type = other DNA
gactgaccttctaattagtc

SEQ ID NO: 182666 - DNA, 20 bp, synthetic construct
  source 1..20: mol_type = other DNA
ggactgaccttctaattagt

SEQ ID NO: 182667 - DNA, 20 bp, synthetic construct
  source 1..20: mol_type = other DNA
gggactgaccttctaattag

SEQ ID NO: 182668 - DNA, 20 bp, synthetic construct
  source 1..20: mol_type = other DNA
tgggactgaccttctaatta

SEQ ID NO: 182669 - DNA, 20 bp, synthetic construct
  source 1..20: mol_type = other DNA
ttgggactgaccttctaatt

SEQ ID NO: 182670 - DNA, 20 bp, synthetic construct
  source 1..20: mol_type = other DNA
attgggactgaccttctaat

SEQ ID NO: 182671 - DNA, 20 bp, synthetic construct
  source 1..20: mol_type = other DNA
tattgggactgaccttctaa

SEQ ID NO: 182672 - DNA, 20 bp, synthetic construct
  source 1..20: mol_type = other DNA
ttattgggactgaccttcta

SEQ ID NO: 182673 - DNA, 20 bp, synthetic construct
  source 1..20: mol_type = other DNA
gttattgggactgaccttct

SEQ ID NO: 182674 - DNA, 20 bp, synthetic construct
  source 1..20: mol_type = other DNA
tgttattgggactgaccttc

SEQ ID NO: 182675 - DNA, 20 bp, synthetic construct
  source 1..20: mol_type = other DNA
ttgttattgggactgacctt

SEQ ID NO: 182676 - DNA, 20 bp, synthetic construct
  source 1..20: mol_type = other DNA
tttgttattgggactgacct

SEQ ID NO: 182677 - DNA, 20 bp, synthetic construct
  source 1..20: mol_type = other DNA
atttgttattgggactgacc

SEQ ID NO: 182678 - DNA, 20 bp, synthetic construct
  source 1..20: mol_type = other DNA
gatttgttattgggactgac

SEQ ID NO: 182679 - DNA, 20 bp, synthetic construct
  source 1..20: mol_type = other DNA
cgatttgttattgggactga

SEQ ID NO: 182680 - DNA, 20 bp, synthetic construct
  source 1..20: mol_type = other DNA
tcgatttgttattgggactg

SEQ ID NO: 182681 - DNA, 20 bp, synthetic construct
  source 1..20: mol_type = other DNA
ttcgatttgttattgggact

SEQ ID NO: 182682 - DNA, 20 bp, synthetic construct
  source 1..20: mol_type = other DNA
cttcgatttgttattgggac

SEQ ID NO: 182683 - DNA, 20 bp, synthetic construct
  source 1..20: mol_type = other DNA
acttcgatttgttattggga

SEQ ID NO: 182684 - DNA, 20 bp, synthetic construct
  source 1..20: mol_type = other DNA
gacttcgatttgttattggg

SEQ ID NO: 182685 - DNA, 20 bp, synthetic construct
  source 1..20: mol_type = other DNA
tgacttcgatttgttattgg

SEQ ID NO: 182686 - DNA, 20 bp, synthetic construct
  source 1..20: mol_type = other DNA
ctgacttcgatttgttattg

SEQ ID NO: 182687 - DNA, 20 bp, synthetic construct
  source 1..20: mol_type = other DNA
gctgacttcgatttgttatt

SEQ ID NO: 182688 - DNA, 20 bp, synthetic construct
  source 1..20: mol_type = other DNA
agctgacttcgatttgttat

SEQ ID NO: 182689 - DNA, 20 bp, synthetic construct
  source 1..20: mol_type = other DNA
cagctgacttcgatttgtta

SEQ ID NO: 182690 - DNA, 20 bp, synthetic construct
  source 1..20: mol_type = other DNA
ccagctgacttcgatttgtt

SEQ ID NO: 182691 - DNA, 20 bp, synthetic construct
  source 1..20: mol_type = other DNA
cccagctgacttcgatttgt

SEQ ID NO: 182692 - DNA, 20 bp, synthetic construct
  source 1..20: mol_type = other DNA
gcccagctgacttcgatttg

SEQ ID NO: 182693 - DNA, 20 bp, synthetic construct
  source 1..20: mol_type = other DNA
cgcccagctgacttcgattt

SEQ ID NO: 182694 - DNA, 20 bp, synthetic construct
  source 1..20: mol_type = other DNA
acgcccagctgacttcgatt

SEQ ID NO: 182695 - DNA, 20 bp, synthetic construct
  source 1..20: mol_type = other DNA
cacgcccagctgacttcgat

SEQ ID NO: 182696 - DNA, 20 bp, synthetic construct
  source 1..20: mol_type = other DNA
tcacgcccagctgacttcga

SEQ ID NO: 182697 - DNA, 20 bp, synthetic construct
  source 1..20: mol_type = other DNA
atcacgcccagctgacttcg

SEQ ID NO: 182698 - DNA, 20 bp, synthetic construct
  source 1..20: mol_type = other DNA
catcacgcccagctgacttc

SEQ ID NO: 182699 - DNA, 20 bp, synthetic construct
  source 1..20: mol_type = other DNA
ccatcacgcccagctgactt

SEQ ID NO: 182700 - DNA, 20 bp, synthetic construct
  source 1..20: mol_type = other DNA
gccatcacgcccagctgact

SEQ ID NO: 182701 - DNA, 20 bp, synthetic construct
  source 1..20: mol_type = other DNA
agccatcacgcccagctgac

SEQ ID NO: 182702 - DNA, 20 bp, synthetic construct
  source 1..20: mol_type = other DNA
gagccatcacgcccagctga

SEQ ID NO: 182703 - DNA, 20 bp, synthetic construct
  source 1..20: mol_type = other DNA
tgagccatcacgcccagctg

SEQ ID NO: 182704 - DNA, 20 bp, synthetic construct
  source 1..20: mol_type = other DNA
gtgagccatcacgcccagct

SEQ ID NO: 182705 - DNA, 20 bp, synthetic construct
  source 1..20: mol_type = other DNA
agtgagccatcacgcccagc

SEQ ID NO: 182706 - DNA, 20 bp, synthetic construct
  source 1..20: mol_type = other DNA
gagtgagccatcacgcccag

SEQ ID NO: 182707 - DNA, 20 bp, synthetic construct
  source 1..20: mol_type = other DNA
ggagtgagccatcacgccca

SEQ ID NO: 182708 - DNA, 20 bp, synthetic construct
  source 1..20: mol_type = other DNA
aggagtgagccatcacgccc

SEQ ID NO: 182709 - DNA, 20 bp, synthetic construct
  source 1..20: mol_type = other DNA
taggagtgagccatcacgcc

SEQ ID NO: 182710 - DNA, 20 bp, synthetic construct
  source 1..20: mol_type = other DNA
ataggagtgagccatcacgc

SEQ ID NO: 182711 - DNA, 20 bp, synthetic construct
  source 1..20: mol_type = other DNA
tataggagtgagccatcacg

SEQ ID NO: 182712 - DNA, 20 bp, synthetic construct
  source 1..20: mol_type = other DNA
ttataggagtgagccatcac

SEQ ID NO: 182713 - DNA, 20 bp, synthetic construct
  source 1..20: mol_type = other DNA
attataggagtgagccatca

SEQ ID NO: 182714 - DNA, 20 bp, synthetic construct
  source 1..20: mol_type = other DNA
gattataggagtgagccatc

SEQ ID NO: 182715 - DNA, 20 bp, synthetic construct
  source 1..20: mol_type = other DNA
ggattataggagtgagccat

SEQ ID NO: 182716 - DNA, 20 bp, synthetic construct
  source 1..20: mol_type = other DNA
gggattataggagtgagcca

SEQ ID NO: 182717 - DNA, 20 bp, synthetic construct
  source 1..20: mol_type = other DNA
tgggattataggagtgagcc

SEQ ID NO: 182718 - DNA, 20 bp, synthetic construct
  source 1..20: mol_type = other DNA
ctgggattataggagtgagc

SEQ ID NO: 182719 - DNA, 20 bp, synthetic construct
  source 1..20: mol_type = other DNA
gctgggattataggagtgag

SEQ ID NO: 182720 - DNA, 20 bp, synthetic construct
  source 1..20: mol_type = other DNA
tgctgggattataggagtga

SEQ ID NO: 182721 - DNA, 20 bp, synthetic construct
  source 1..20: mol_type = other DNA
gtgctgggattataggagtg

SEQ ID NO: 182722 - DNA, 20 bp, synthetic construct
  source 1..20: mol_type = other DNA
agtgctgggattataggagt

SEQ ID NO: 182723 - DNA, 20 bp, synthetic construct
  source 1..20: mol_type = other DNA
aagtgctgggattataggag

SEQ ID NO: 182724 - DNA, 20 bp, synthetic construct
  source 1..20: mol_type = other DNA
aaagtgctgggattatagga

SEQ ID NO: 182725 - DNA, 20 bp, synthetic construct
  source 1..20: mol_type = other DNA
caaagtgctgggattatagg

SEQ ID NO: 182726 - DNA, 20 bp, synthetic construct
  source 1..20: mol_type = other DNA
ccaaagtgctgggattatag

SEQ ID NO: 182727 - DNA, 20 bp, synthetic construct
  source 1..20: mol_type = other DNA
cccaaagtgctgggattata

SEQ ID NO: 182728 - DNA, 20 bp, synthetic construct
  source 1..20: mol_type = other DNA
tcccaaagtgctgggattat

SEQ ID NO: 182729 - DNA, 20 bp, synthetic construct
  source 1..20: mol_type = other DNA
ctcccaaagtgctgggatta

SEQ ID NO: 182730 - DNA, 20 bp, synthetic construct
  source 1..20: mol_type = other DNA
cctcccaaagtgctgggatt

SEQ ID NO: 182731 - DNA, 20 bp, synthetic construct
  source 1..20: mol_type = other DNA
gcctcccaaagtgctgggat

SEQ ID NO: 182732 - DNA, 20 bp, synthetic construct
  source 1..20: mol_type = other DNA
agcctcccaaagtgctggga

SEQ ID NO: 182733 - DNA, 20 bp, synthetic construct
  source 1..20: mol_type = other DNA
cagcctcccaaagtgctggg

SEQ ID NO: 182734 - DNA, 20 bp, synthetic construct
  source 1..20: mol_type = other DNA
tcagcctcccaaagtgctgg

SEQ ID NO: 182735 - DNA, 20 bp, synthetic construct
  source 1..20: mol_type = other DNA
ctcagcctcccaaagtgctg

SEQ ID NO: 182736 - DNA, 20 bp, synthetic construct
  source 1..20: mol_type = other DNA
cctcagcctcccaaagtgct

SEQ ID NO: 182737 - DNA, 20 bp, synthetic construct
  source 1..20: mol_type = other DNA
acctcagcctcccaaagtgc

SEQ ID NO: 182738 - DNA, 20 bp, synthetic construct
  source 1..20: mol_type = other DNA
cacctcagcctcccaaagtg

SEQ ID NO: 182739 - DNA, 20 bp, synthetic construct
  source 1..20: mol_type = other DNA
ccacctcagcctcccaaagt

SEQ ID NO: 182740 - DNA, 20 bp, synthetic construct
  source 1..20: mol_type = other DNA
cccacctcagcctcccaaag

SEQ ID NO: 182741 - DNA, 20 bp, synthetic construct
  source 1..20: mol_type = other DNA
gcccacctcagcctcccaaa

SEQ ID NO: 182742 - DNA, 20 bp, synthetic construct
  source 1..20: mol_type = other DNA
tgcccacctcagcctcccaa

SEQ ID NO: 182743 - DNA, 20 bp, synthetic construct
  source 1..20: mol_type = other DNA
ctgcccacctcagcctccca

SEQ ID NO: 182744 - DNA, 20 bp, synthetic construct
  source 1..20: mol_type = other DNA
tctgcccacctcagcctccc

SEQ ID NO: 182745 - DNA, 20 bp, synthetic construct
  source 1..20: mol_type = other DNA
atctgcccacctcagcctcc

SEQ ID NO: 182746 - DNA, 20 bp, synthetic construct
  source 1..20: mol_type = other DNA
gatctgcccacctcagcctc

SEQ ID NO: 182747 - DNA, 20 bp, synthetic construct
  source 1..20: mol_type = other DNA
tgatctgcccacctcagcct

SEQ ID NO: 182748 - DNA, 20 bp, synthetic construct
  source 1..20: mol_type = other DNA
atgatctgcccacctcagcc

SEQ ID NO: 182749 - DNA, 20 bp, synthetic construct
  source 1..20: mol_type = other DNA
aatgatctgcccacctcagc

SEQ ID NO: 182750 - DNA, 20 bp, synthetic construct
  source 1..20: mol_type = other DNA
aaatgatctgcccacctcag

SEQ ID NO: 182751 - DNA, 20 bp, synthetic construct
  source 1..20: mol_type = other DNA
caaatgatctgcccacctca

SEQ ID NO: 182752 - DNA, 20 bp, synthetic construct
  source 1..20: mol_type = other DNA
tcaaatgatctgcccacctc

SEQ ID NO: 182753 - DNA, 20 bp, synthetic construct
  source 1..20: mol_type = other DNA
ttcaaatgatctgcccacct

SEQ ID NO: 182754 - DNA, 20 bp, synthetic construct
  source 1..20: mol_type = other DNA
cttcaaatgatctgcccacc

SEQ ID NO: 182755 - DNA, 20 bp, synthetic construct
  source 1..20: mol_type = other DNA
gcttcaaatgatctgcccac

SEQ ID NO: 182756 - DNA, 20 bp, synthetic construct
  source 1..20: mol_type = other DNA
ggcttcaaatgatctgccca

SEQ ID NO: 182757 - DNA, 20 bp, synthetic construct
  source 1..20: mol_type = other DNA
tggcttcaaatgatctgccc

SEQ ID NO: 182758 - DNA, 20 bp, synthetic construct
  source 1..20: mol_type = other DNA
ctggcttcaaatgatctgcc

SEQ ID NO: 182759 - DNA, 20 bp, synthetic construct
  source 1..20: mol_type = other DNA
tctggcttcaaatgatctgc

SEQ ID NO: 182760 - DNA, 20 bp, synthetic construct
  source 1..20: mol_type = other DNA
ttctggcttcaaatgatctg

SEQ ID NO: 182761 - DNA, 20 bp, synthetic construct
  source 1..20: mol_type = other DNA
cttctggcttcaaatgatct

SEQ ID NO: 182762 - DNA, 20 bp, synthetic construct
  source 1..20: mol_type = other DNA
acttctggcttcaaatgatc

SEQ ID NO: 182763 - DNA, 20 bp, synthetic construct
  source 1..20: mol_type = other DNA
aacttctggcttcaaatgat

SEQ ID NO: 182764 - DNA, 20 bp, synthetic construct
  source 1..20: mol_type = other DNA
gaacttctggcttcaaatga

SEQ ID NO: 182765 - DNA, 20 bp, synthetic construct
  source 1..20: mol_type = other DNA
tgaacttctggcttcaaatg

SEQ ID NO: 182766 - DNA, 20 bp, synthetic construct
  source 1..20: mol_type = other DNA
ttgaacttctggcttcaaat

SEQ ID NO: 182767 - DNA, 20 bp, synthetic construct
  source 1..20: mol_type = other DNA
cttgaacttctggcttcaaa

SEQ ID NO: 182768 - DNA, 20 bp, synthetic construct
  source 1..20: mol_type = other DNA
tcttgaacttctggcttcaa

SEQ ID NO: 182769 - DNA, 20 bp, synthetic construct
  source 1..20: mol_type = other DNA
gtcttgaacttctggcttca

SEQ ID NO: 182770 - DNA, 20 bp, synthetic construct
  source 1..20: mol_type = other DNA
ggtcttgaacttctggcttc

SEQ ID NO: 182771 - DNA, 20 bp, synthetic construct
  source 1..20: mol_type = other DNA
tggtcttgaacttctggctt

SEQ ID NO: 182772 - DNA, 20 bp, synthetic construct
  source 1..20: mol_type = other DNA
ctggtcttgaacttctggct

SEQ ID NO: 182773 - DNA, 20 bp, synthetic construct
  source 1..20: mol_type = other DNA
gctggtcttgaacttctggc

SEQ ID NO: 182774 - DNA, 20 bp, synthetic construct
  source 1..20: mol_type = other DNA
ggctggtcttgaacttctgg

SEQ ID NO: 182775 - DNA, 20 bp, synthetic construct
  source 1..20: mol_type = other DNA
aggctggtcttgaacttctg

SEQ ID NO: 182776 - DNA, 20 bp, synthetic construct
  source 1..20: mol_type = other DNA
caggctggtcttgaacttct

SEQ ID NO: 182777 - DNA, 20 bp, synthetic construct
  source 1..20: mol_type = other DNA
ccaggctggtcttgaacttc

SEQ ID NO: 182778 - DNA, 20 bp, synthetic construct
  source 1..20: mol_type = other DNA
cccaggctggtcttgaactt

SEQ ID NO: 182779 - DNA, 20 bp, synthetic construct
  source 1..20: mol_type = other DNA
gcccaggctggtcttgaact

SEQ ID NO: 182780 - DNA, 20 bp, synthetic construct
  source 1..20: mol_type = other DNA
tgcccaggctggtcttgaac

SEQ ID NO: 182781 - DNA, 20 bp, synthetic construct
  source 1..20: mol_type = other DNA
ttgcccaggctggtcttgaa

SEQ ID NO: 182782 - DNA, 20 bp, synthetic construct
  source 1..20: mol_type = other DNA
gttgcccaggctggtcttga

SEQ ID NO: 182783 - DNA, 20 bp, synthetic construct
  source 1..20: mol_type = other DNA
tgttgcccaggctggtcttg

SEQ ID NO: 182784 - DNA, 20 bp, synthetic construct
  source 1..20: mol_type = other DNA
atgttgcccaggctggtctt

SEQ ID NO: 182785 - DNA, 20 bp, synthetic construct
  source 1..20: mol_type = other DNA
tatgttgcccaggctggtct

SEQ ID NO: 182786 - DNA, 20 bp, synthetic construct
  source 1..20: mol_type = other DNA
ctatgttgcccaggctggtc

SEQ ID NO: 182787 - DNA, 20 bp, synthetic construct
  source 1..20: mol_type = other DNA
gctatgttgcccaggctggt

SEQ ID NO: 182788 - DNA, 20 bp, synthetic construct
  source 1..20: mol_type = other DNA
tgctatgttgcccaggctgg

SEQ ID NO: 182789 - DNA, 20 bp, synthetic construct
  source 1..20: mol_type = other DNA
ttgctatgttgcccaggctg

SEQ ID NO: 182790 - DNA, 20 bp, synthetic construct
  source 1..20: mol_type = other DNA
tttgctatgttgcccaggct

SEQ ID NO: 182791 - DNA, 20 bp, synthetic construct
  source 1..20: mol_type = other DNA
ttttgctatgttgcccaggc

SEQ ID NO: 182792 - DNA, 20 bp, synthetic construct
  source 1..20: mol_type = other DNA
gttttgctatgttgcccagg

SEQ ID NO: 182793 - DNA, 20 bp, synthetic construct
  source 1..20: mol_type = other DNA
ggttttgctatgttgcccag

SEQ ID NO: 182794 - DNA, 20 bp, synthetic construct
  source 1..20: mol_type = other DNA
gggttttgctatgttgccca

SEQ ID NO: 182795 - DNA, 20 bp, synthetic construct
  source 1..20: mol_type = other DNA
agggttttgctatgttgccc

SEQ ID NO: 182796 - DNA, 20 bp, synthetic construct
  source 1..20: mol_type = other DNA
cagggttttgctatgttgcc

SEQ ID NO: 182797 - DNA, 20 bp, synthetic construct
  source 1..20: mol_type = other DNA
acagggttttgctatgttgc

SEQ ID NO: 182798 - DNA, 20 bp, synthetic construct
  source 1..20: mol_type = other DNA
gacagggttttgctatgttg

SEQ ID NO: 182799 - DNA, 20 bp, synthetic construct
  source 1..20: mol_type = other DNA
agacagggttttgctatgtt

SEQ ID NO: 182800 - DNA, 20 bp, synthetic construct
  source 1..20: mol_type = other DNA
gagacagggttttgctatgt

SEQ ID NO: 182801 - DNA, 20 bp, synthetic construct
  source 1..20: mol_type = other DNA
agagacagggttttgctatg

SEQ ID NO: 182802 - DNA, 20 bp, synthetic construct
  source 1..20: mol_type = other DNA
tagagacagggttttgctat

SEQ ID NO: 182803 - DNA, 20 bp, synthetic construct
  source 1..20: mol_type = other DNA
gtagagacagggttttgcta

SEQ ID NO: 182804 - DNA, 20 bp, synthetic construct
  source 1..20: mol_type = other DNA
agtagagacagggttttgct

SEQ ID NO: 182805 - DNA, 20 bp, synthetic construct
  source 1..20: mol_type = other DNA
tagtagagacagggttttgc

SEQ ID NO: 182806 - DNA, 20 bp, synthetic construct
  source 1..20: mol_type = other DNA
ttagtagagacagggttttg

SEQ ID NO: 182807 - DNA, 20 bp, synthetic construct
  source 1..20: mol_type = other DNA
tttagtagagacagggtttt

SEQ ID NO: 182808 - DNA, 20 bp, synthetic construct
  source 1..20: mol_type = other DNA
ttttagtagagacagggttt

SEQ ID NO: 182809 - DNA, 20 bp, synthetic construct
  source 1..20: mol_type = other DNA
tttttagtagagacagggtt

SEQ ID NO: 182810 - DNA, 20 bp, synthetic construct
  source 1..20: mol_type = other DNA
atttttagtagagacagggt

SEQ ID NO: 182811 - DNA, 20 bp, synthetic construct
  source 1..20: mol_type = other DNA
tatttttagtagagacaggg

SEQ ID NO: 182812 - DNA, 20 bp, synthetic construct
  source 1..20: mol_type = other DNA
gtatttttagtagagacagg

SEQ ID NO: 182813 - DNA, 20 bp, synthetic construct
  source 1..20: mol_type = other DNA
tgtatttttagtagagacag

SEQ ID NO: 182814 - DNA, 20 bp, synthetic construct
  source 1..20: mol_type = other DNA
ttgtatttttagtagagaca

SEQ ID NO: 182815 - DNA, 20 bp, synthetic construct
  source 1..20: mol_type = other DNA
tttgtatttttagtagagac

SEQ ID NO: 182816 - DNA, 20 bp, synthetic construct
  source 1..20: mol_type = other DNA
atttgtatttttagtagaga

SEQ ID NO: 182817 - DNA, 20 bp, synthetic construct
  source 1..20: mol_type = other DNA
tatttgtatttttagtagag

SEQ ID NO: 182818 - DNA, 20 bp, synthetic construct
  source 1..20: mol_type = other DNA
ttatttgtatttttagtaga

SEQ ID NO: 182819 - DNA, 20 bp, synthetic construct
  source 1..20: mol_type = other DNA
attatttgtatttttagtag

SEQ ID NO: 182820 - DNA, 20 bp, synthetic construct
  source 1..20: mol_type = other DNA
aattatttgtatttttagta

SEQ ID NO: 182821 - DNA, 20 bp, synthetic construct
  source 1..20: mol_type = other DNA
taattatttgtatttttagt

SEQ ID NO: 182822 - DNA, 20 bp, synthetic construct
  source 1..20: mol_type = other DNA
ctaattatttgtatttttag

SEQ ID NO: 182823 - DNA, 20 bp, synthetic construct
  source 1..20: mol_type = other DNA
cctaattatttgtattttta

SEQ ID NO: 182824 - DNA, 20 bp, synthetic construct
  source 1..20: mol_type = other DNA
gcctaattatttgtattttt

SEQ ID NO: 182825 - DNA, 20 bp, synthetic construct
  source 1..20: mol_type = other DNA
agcctaattatttgtatttt

SEQ ID NO: 182826 - DNA, 20 bp, synthetic construct
  source 1..20: mol_type = other DNA
cagcctaattatttgtattt

SEQ ID NO: 182827 - DNA, 20 bp, synthetic construct
  source 1..20: mol_type = other DNA
ccagcctaattatttgtatt

SEQ ID NO: 182828 - DNA, 20 bp, synthetic construct
  source 1..20: mol_type = other DNA
cccagcctaattatttgtat

SEQ ID NO: 182829 - DNA, 20 bp, synthetic construct
  source 1..20: mol_type = other DNA
acccagcctaattatttgta

SEQ ID NO: 182830 - DNA, 20 bp, synthetic construct
  source 1..20: mol_type = other DNA
cacccagcctaattatttgt

SEQ ID NO: 182831 - DNA, 20 bp, synthetic construct
  source 1..20: mol_type = other DNA
acacccagcctaattatttg

SEQ ID NO: 182832 - DNA, 20 bp, synthetic construct
  source 1..20: mol_type = other DNA
cacacccagcctaattattt

SEQ ID NO: 182833 - DNA, 20 bp, synthetic construct
  source 1..20: mol_type = other DNA
ccacacccagcctaattatt

SEQ ID NO: 182834 - DNA, 20 bp, synthetic construct
  source 1..20: mol_type = other DNA
accacacccagcctaattat

SEQ ID NO: 182835 - DNA, 20 bp, synthetic construct
  source 1..20: mol_type = other DNA
caccacacccagcctaatta

SEQ ID NO: 182836 - DNA, 20 bp, synthetic construct
  source 1..20: mol_type = other DNA
ccaccacacccagcctaatt

SEQ ID NO: 182837 - DNA, 20 bp, synthetic construct
  source 1..20: mol_type = other DNA
gccaccacacccagcctaat

SEQ ID NO: 182838 - DNA, 20 bp, synthetic construct
  source 1..20: mol_type = other DNA
agccaccacacccagcctaa

SEQ ID NO: 182839 - DNA, 20 bp, synthetic construct
  source 1..20: mol_type = other DNA
gagccaccacacccagccta

SEQ ID NO: 182840 - DNA, 20 bp, synthetic construct
  source 1..20: mol_type = other DNA
tgagccaccacacccagcct

SEQ ID NO: 182841 - DNA, 20 bp, synthetic construct
  source 1..20: mol_type = other DNA
atgagccaccacacccagcc

SEQ ID NO: 182842 - DNA, 20 bp, synthetic construct
  source 1..20: mol_type = other DNA
catgagccaccacacccagc

SEQ ID NO: 182843 - DNA, 20 bp, synthetic construct
  source 1..20: mol_type = other DNA
gcatgagccaccacacccag

SEQ ID NO: 182844 - DNA, 20 bp, synthetic construct
  source 1..20: mol_type = other DNA
ggcatgagccaccacaccca

SEQ ID NO: 182845 - DNA, 20 bp, synthetic construct
  source 1..20: mol_type = other DNA
aggcatgagccaccacaccc

SEQ ID NO: 182846 - DNA, 20 bp, synthetic construct
  source 1..20: mol_type = other DNA
caggcatgagccaccacacc

SEQ ID NO: 182847 - DNA, 20 bp, synthetic construct
  source 1..20: mol_type = other DNA
acaggcatgagccaccacac

SEQ ID NO: 182848 - DNA, 20 bp, synthetic construct
  source 1..20: mol_type = other DNA
tacaggcatgagccaccaca

SEQ ID NO: 182849 - DNA, 20 bp, synthetic construct
  source 1..20: mol_type = other DNA
ttacaggcatgagccaccac

SEQ ID NO: 182850 - DNA, 20 bp, synthetic construct
  source 1..20: mol_type = other DNA
attacaggcatgagccacca

SEQ ID NO: 182851 - DNA, 20 bp, synthetic construct
  source 1..20: mol_type = other DNA
gattacaggcatgagccacc

SEQ ID NO: 182852 - DNA, 20 bp, synthetic construct
  source 1..20: mol_type = other DNA
ggattacaggcatgagccac

SEQ ID NO: 182853 - DNA, 20 bp, synthetic construct
  source 1..20: mol_type = other DNA
gggattacaggcatgagcca

SEQ ID NO: 182854 - DNA, 20 bp, synthetic construct
  source 1..20: mol_type = other DNA
tgggattacaggcatgagcc

SEQ ID NO: 182855 - DNA, 20 bp, synthetic construct
  source 1..20: mol_type = other DNA
ttgggattacaggcatgagc

SEQ ID NO: 182856 - DNA, 20 bp, synthetic construct
  source 1..20: mol_type = other DNA
gttgggattacaggcatgag

SEQ ID NO: 182857 - DNA, 20 bp, synthetic construct
  source 1..20: mol_type = other DNA
tgttgggattacaggcatga

SEQ ID NO: 182858 - DNA, 20 bp, synthetic construct
  source 1..20: mol_type = other DNA
ctgttgggattacaggcatg

SEQ ID NO: 182859 - DNA, 20 bp, synthetic construct
  source 1..20: mol_type = other DNA
actgttgggattacaggcat

SEQ ID NO: 182860 - DNA, 20 bp, synthetic construct
  source 1..20: mol_type = other DNA
aactgttgggattacaggca

SEQ ID NO: 182861 - DNA, 20 bp, synthetic construct
  source 1..20: mol_type = other DNA
aaactgttgggattacaggc

SEQ ID NO: 182862 - DNA, 20 bp, synthetic construct
  source 1..20: mol_type = other DNA
caaactgttgggattacagg

SEQ ID NO: 182863 - DNA, 20 bp, synthetic construct
  source 1..20: mol_type = other DNA
ccaaactgttgggattacag

SEQ ID NO: 182864 - DNA, 20 bp, synthetic construct
  source 1..20: mol_type = other DNA
cccaaactgttgggattaca

SEQ ID NO: 182865 - DNA, 20 bp, synthetic construct
  source 1..20: mol_type = other DNA
tcccaaactgttgggattac

SEQ ID NO: 182866 - DNA, 20 bp, synthetic construct
  source 1..20: mol_type = other DNA
ctcccaaactgttgggatta

SEQ ID NO: 182867 - DNA, 20 bp, synthetic construct
  source 1..20: mol_type = other DNA
cctcccaaactgttgggatt

SEQ ID NO: 182868 - DNA, 20 bp, synthetic construct
  source 1..20: mol_type = other DNA
gcctcccaaactgttgggat

SEQ ID NO: 182869 - DNA, 20 bp, synthetic construct
  source 1..20: mol_type = other DNA
agcctcccaaactgttggga

SEQ ID NO: 182870 - DNA, 20 bp, synthetic construct
  source 1..20: mol_type = other DNA
cagcctcccaaactgttggg

SEQ ID NO: 182871 - DNA, 20 bp, synthetic construct
  source 1..20: mol_type = other DNA
tcagcctcccaaactgttgg

SEQ ID NO: 182872 - DNA, 20 bp, synthetic construct
  source 1..20: mol_type = other DNA
ctcagcctcccaaactgttg

SEQ ID NO: 182873 - DNA, 20 bp, synthetic construct
  source 1..20: mol_type = other DNA
cctcagcctcccaaactgtt

SEQ ID NO: 182874 - DNA, 20 bp, synthetic construct
  source 1..20: mol_type = other DNA
gcctcagcctcccaaactgt

SEQ ID NO: 182875 - DNA, 20 bp, synthetic construct
  source 1..20: mol_type = other DNA
tgcctcagcctcccaaactg

SEQ ID NO: 182876 - DNA, 20 bp, synthetic construct
  source 1..20: mol_type = other DNA
ctgcctcagcctcccaaact

SEQ ID NO: 182877 - DNA, 20 bp, synthetic construct
  source 1..20: mol_type = other DNA
cctgcctcagcctcccaaac

SEQ ID NO: 182878 - DNA, 20 bp, synthetic construct
  source 1..20: mol_type = other DNA
acctgcctcagcctcccaaa

SEQ ID NO: 182879 - DNA, 20 bp, synthetic construct
  source 1..20: mol_type = other DNA
cacctgcctcagcctcccaa

SEQ ID NO: 182880 - DNA, 20 bp, synthetic construct
  source 1..20: mol_type = other DNA
ccacctgcctcagcctccca

SEQ ID NO: 182881 - DNA, 20 bp, synthetic construct
  source 1..20: mol_type = other DNA
accacctgcctcagcctccc

SEQ ID NO: 182882 - DNA, 20 bp, synthetic construct
  source 1..20: mol_type = other DNA
gaccacctgcctcagcctcc

SEQ ID NO: 182883 - DNA, 20 bp, synthetic construct
  source 1..20: mol_type = other DNA
tgaccacctgcctcagcctc

SEQ ID NO: 182884 - DNA, 20 bp, synthetic construct
  source 1..20: mol_type = other DNA
gtgaccacctgcctcagcct

SEQ ID NO: 182885 - DNA, 20 bp, synthetic construct
  source 1..20: mol_type = other DNA
ggtgaccacctgcctcagcc

SEQ ID NO: 182886 - DNA, 20 bp, synthetic construct
  source 1..20: mol_type = other DNA
aggtgaccacctgcctcagc

SEQ ID NO: 182887 - DNA, 20 bp, synthetic construct
  source 1..20: mol_type = other DNA
caggtgaccacctgcctcag

SEQ ID NO: 182888 - DNA, 20 bp, synthetic construct
  source 1..20: mol_type = other DNA
tcaggtgaccacctgcctca

SEQ ID NO: 182889 - DNA, 20 bp, synthetic construct
  source 1..20: mol_type = other DNA
ctcaggtgaccacctgcctc

SEQ ID NO: 182890 - DNA, 20 bp, synthetic construct
  source 1..20: mol_type = other DNA
cctcaggtgaccacctgcct

SEQ ID NO: 182891 - DNA, 20 bp, synthetic construct
  source 1..20: mol_type = other DNA
acctcaggtgaccacctgcc

SEQ ID NO: 182892 - DNA, 20 bp, synthetic construct
  source 1..20: mol_type = other DNA
gacctcaggtgaccacctgc

SEQ ID NO: 182893 - DNA, 20 bp, synthetic construct
  source 1..20: mol_type = other DNA
tgacctcaggtgaccacctg

SEQ ID NO: 182894 - DNA, 20 bp, synthetic construct
  source 1..20: mol_type = other DNA
ctgacctcaggtgaccacct

SEQ ID NO: 182895 - DNA, 20 bp, synthetic construct
  source 1..20: mol_type = other DNA
cctgacctcaggtgaccacc

SEQ ID NO: 182896 - DNA, 20 bp, synthetic construct
  source 1..20: mol_type = other DNA
tcctgacctcaggtgaccac

SEQ ID NO: 182897 - DNA, 20 bp, synthetic construct
  source 1..20: mol_type = other DNA
ctcctgacctcaggtgacca

SEQ ID NO: 182898 - DNA, 20 bp, synthetic construct
  source 1..20: mol_type = other DNA
actcctgacctcaggtgacc

SEQ ID NO: 182899 - DNA, 20 bp, synthetic construct
  source 1..20: mol_type = other DNA
aactcctgacctcaggtgac

SEQ ID NO: 182900 - DNA, 20 bp, synthetic construct
  source 1..20: mol_type = other DNA
aaactcctgacctcaggtga

SEQ ID NO: 182901 - DNA, 20 bp, synthetic construct
  source 1..20: mol_type = other DNA
caaactcctgacctcaggtg

SEQ ID NO: 182902 - DNA, 20 bp, synthetic construct
  source 1..20: mol_type = other DNA
tcaaactcctgacctcaggt

SEQ ID NO: 182903 - DNA, 20 bp, synthetic construct
  source 1..20: mol_type = other DNA
ctcaaactcctgacctcagg

SEQ ID NO: 182904 - DNA, 20 bp, synthetic construct
  source 1..20: mol_type = other DNA
tctcaaactcctgacctcag

SEQ ID NO: 182905 - DNA, 20 bp, synthetic construct
  source 1..20: mol_type = other DNA
gtctcaaactcctgacctca

SEQ ID NO: 182906 - DNA, 20 bp, synthetic construct
  source 1..20: mol_type = other DNA
ggtctcaaactcctgacctc

SEQ ID NO: 182907 - DNA, 20 bp, synthetic construct
  source 1..20: mol_type = other DNA
tggtctcaaactcctgacct

SEQ ID NO: 182908 - DNA, 20 bp, synthetic construct
  source 1..20: mol_type = other DNA
ctggtctcaaactcctgacc

SEQ ID NO: 182909 - DNA, 20 bp, synthetic construct
  source 1..20: mol_type = other DNA
gctggtctcaaactcctgac

SEQ ID NO: 182910 - DNA, 20 bp, synthetic construct
  source 1..20: mol_type = other DNA
ggctggtctcaaactcctga

SEQ ID NO: 182911 - DNA, 20 bp, synthetic construct
  source 1..20: mol_type = other DNA
aggctggtctcaaactcctg

SEQ ID NO: 182912 - DNA, 20 bp, synthetic construct
  source 1..20: mol_type = other DNA
caggctggtctcaaactcct

SEQ ID NO: 182913 - DNA, 20 bp, synthetic construct
  source 1..20: mol_type = other DNA
ccaggctggtctcaaactcc

SEQ ID NO: 182914 - DNA, 20 bp, synthetic construct
  source 1..20: mol_type = other DNA
gccaggctggtctcaaactc

SEQ ID NO: 182915 - DNA, 20 bp, synthetic construct
  source 1..20: mol_type = other DNA
ggccaggctggtctcaaact

SEQ ID NO: 182916 - DNA, 20 bp, synthetic construct
  source 1..20: mol_type = other DNA
tggccaggctggtctcaaac

SEQ ID NO: 182917 - DNA, 20 bp, synthetic construct
  source 1..20: mol_type = other DNA
ttggccaggctggtctcaaa

SEQ ID NO: 182918 - DNA, 20 bp, synthetic construct
  source 1..20: mol_type = other DNA
gttggccaggctggtctcaa

SEQ ID NO: 182919 - DNA, 20 bp, synthetic construct
  source 1..20: mol_type = other DNA
tgttggccaggctggtctca

SEQ ID NO: 182920 - DNA, 20 bp, synthetic construct
  source 1..20: mol_type = other DNA
ctgttggccaggctggtctc

SEQ ID NO: 182921 - DNA, 20 bp, synthetic construct
  source 1..20: mol_type = other DNA
cctgttggccaggctggtct

SEQ ID NO: 182922 - DNA, 20 bp, synthetic construct
  source 1..20: mol_type = other DNA
ccctgttggccaggctggtc

SEQ ID NO: 182923 - DNA, 20 bp, synthetic construct
  source 1..20: mol_type = other DNA
accctgttggccaggctggt

SEQ ID NO: 182924 - DNA, 20 bp, synthetic construct
  source 1..20: mol_type = other DNA
caccctgttggccaggctgg

SEQ ID NO: 182925 - DNA, 20 bp, synthetic construct
  source 1..20: mol_type = other DNA
tcaccctgttggccaggctg

SEQ ID NO: 182926 - DNA, 20 bp, synthetic construct
  source 1..20: mol_type = other DNA
ttcaccctgttggccaggct

SEQ ID NO: 182927 - DNA, 20 bp, synthetic construct
  source 1..20: mol_type = other DNA
tttcaccctgttggccaggc

SEQ ID NO: 182928 - DNA, 20 bp, synthetic construct
  source 1..20: mol_type = other DNA
gtttcaccctgttggccagg

SEQ ID NO: 182929 - DNA, 20 bp, synthetic construct
  source 1..20: mol_type = other DNA
ggtttcaccctgttggccag

SEQ ID NO: 182930 - DNA, 20 bp, synthetic construct
  source 1..20: mol_type = other DNA
gggtttcaccctgttggcca

SEQ ID NO: 182931 - DNA, 20 bp, synthetic construct
  source 1..20: mol_type = other DNA
ggggtttcaccctgttggcc

SEQ ID NO: 182932 - DNA, 20 bp, synthetic construct
  source 1..20: mol_type = other DNA
cggggtttcaccctgttggc

SEQ ID NO: 182933 - DNA, 20 bp, synthetic construct
  source 1..20: mol_type = other DNA
acggggtttcaccctgttgg

SEQ ID NO: 182934 - DNA, 20 bp, synthetic construct
  source 1..20: mol_type = other DNA
cacggggtttcaccctgttg

SEQ ID NO: 182935 - DNA, 20 bp, synthetic construct
  source 1..20: mol_type = other DNA
acacggggtttcaccctgtt

SEQ ID NO: 182936 - DNA, 20 bp, synthetic construct
  source 1..20: mol_type = other DNA
gacacggggtttcaccctgt

SEQ ID NO: 182937 - DNA, 20 bp, synthetic construct
  source 1..20: mol_type = other DNA
agacacggggtttcaccctg

SEQ ID NO: 182938 - DNA, 20 bp, synthetic construct
  source 1..20: mol_type = other DNA
tagacacggggtttcaccct

SEQ ID NO: 182939 - DNA, 20 bp, synthetic construct
  source 1..20: mol_type = other DNA
gtagacacggggtttcaccc

SEQ ID NO: 182940 - DNA, 20 bp, synthetic construct
  source 1..20: mol_type = other DNA
agtagacacggggtttcacc

SEQ ID NO: 182941 - DNA, 20 bp, synthetic construct
  source 1..20: mol_type = other DNA
tagtagacacggggtttcac

SEQ ID NO: 182942 - DNA, 20 bp, synthetic construct
  source 1..20: mol_type = other DNA
ttagtagacacggggtttca

SEQ ID NO: 182943 - DNA, 20 bp, synthetic construct
  source 1..20: mol_type = other DNA
tttagtagacacggggtttc

SEQ ID NO: 182944 - DNA, 20 bp, synthetic construct
  source 1..20: mol_type = other DNA
ttttagtagacacggggttt

SEQ ID NO: 182945 - DNA, 20 bp, synthetic construct
  source 1..20: mol_type = other DNA
tttttagtagacacggggtt

SEQ ID NO: 182946 - DNA, 20 bp, synthetic construct
  source 1..20: mol_type = other DNA
gtttttagtagacacggggt

SEQ ID NO: 182947 - DNA, 20 bp, synthetic construct
  source 1..20: mol_type = other DNA
tgtttttagtagacacgggg

SEQ ID NO: 182948 - DNA, 20 bp, synthetic construct
  source 1..20: mol_type = other DNA
atgtttttagtagacacggg

SEQ ID NO: 182949 - DNA, 20 bp, synthetic construct
  source 1..20: mol_type = other DNA
tatgtttttagtagacacgg

SEQ ID NO: 182950 - DNA, 20 bp, synthetic construct
  source 1..20: mol_type = other DNA
ttatgtttttagtagacacg

SEQ ID NO: 182951 - DNA, 20 bp, synthetic construct
  source 1..20: mol_type = other DNA
tttatgtttttagtagacac

SEQ ID NO: 182952 - DNA, 20 bp, synthetic construct
  source 1..20: mol_type = other DNA
ttttatgtttttagtagaca

SEQ ID NO: 182953 - DNA, 20 bp, synthetic construct
  source 1..20: mol_type = other DNA
tttttatgtttttagtagac

SEQ ID NO: 182954 - DNA, 20 bp, synthetic construct
  source 1..20: mol_type = other DNA
atttttatgtttttagtaga

SEQ ID NO: 182955 - DNA, 20 bp, synthetic construct
  source 1..20: mol_type = other DNA
aatttttatgtttttagtag

SEQ ID NO: 182956 - DNA, 20 bp, synthetic construct
  source 1..20: mol_type = other DNA
taatttttatgtttttagta

SEQ ID NO: 182957 - DNA, 20 bp, synthetic construct
  source 1..20: mol_type = other DNA
ctaatttttatgtttttagt

SEQ ID NO: 182958 - DNA, 20 bp, synthetic construct
  source 1..20: mol_type = other DNA
gctaatttttatgtttttag

SEQ ID NO: 182959 - DNA, 20 bp, synthetic construct
  source 1..20: mol_type = other DNA
ggctaatttttatgttttta

SEQ ID NO: 182960 - DNA, 20 bp, synthetic construct
  source 1..20: mol_type = other DNA
tggctaatttttatgttttt

SEQ ID NO: 182961 - DNA, 20 bp, synthetic construct
  source 1..20: mol_type = other DNA
ttggctaatttttatgtttt

SEQ ID NO: 182962 - DNA, 20 bp, synthetic construct
  source 1..20: mol_type = other DNA
cttggctaatttttatgttt

SEQ ID NO: 182963 - DNA, 20 bp, synthetic construct
  source 1..20: mol_type = other DNA
gcttggctaatttttatgtt

SEQ ID NO: 182964 - DNA, 20 bp, synthetic construct
  source 1..20: mol_type = other DNA
tgcttggctaatttttatgt

SEQ ID NO: 182965 - DNA, 20 bp, synthetic construct
  source 1..20: mol_type = other DNA
atgcttggctaatttttatg

SEQ ID NO: 182966 - DNA, 20 bp, synthetic construct
  source 1..20: mol_type = other DNA
catgcttggctaatttttat

SEQ ID NO: 182967 - DNA, 20 bp, synthetic construct
  source 1..20: mol_type = other DNA
tcatgcttggctaattttta

SEQ ID NO: 182968 - DNA, 20 bp, synthetic construct
  source 1..20: mol_type = other DNA
atcatgcttggctaattttt

SEQ ID NO: 182969 - DNA, 20 bp, synthetic construct
  source 1..20: mol_type = other DNA
catcatgcttggctaatttt

SEQ ID NO: 182970 - DNA, 20 bp, synthetic construct
  source 1..20: mol_type = other DNA
ccatcatgcttggctaattt

SEQ ID NO: 182971 - DNA, 20 bp, synthetic construct
  source 1..20: mol_type = other DNA
gccatcatgcttggctaatt

SEQ ID NO: 182972 - DNA, 20 bp, synthetic construct
  source 1..20: mol_type = other DNA
tgccatcatgcttggctaat

SEQ ID NO: 182973 - DNA, 20 bp, synthetic construct
  source 1..20: mol_type = other DNA
atgccatcatgcttggctaa

SEQ ID NO: 182974 - DNA, 20 bp, synthetic construct
  source 1..20: mol_type = other DNA
catgccatcatgcttggcta

SEQ ID NO: 182975 - DNA, 20 bp, synthetic construct
  source 1..20: mol_type = other DNA
acatgccatcatgcttggct

SEQ ID NO: 182976 - DNA, 20 bp, synthetic construct
  source 1..20: mol_type = other DNA
cacatgccatcatgcttggc

SEQ ID NO: 182977 - DNA, 20 bp, synthetic construct
  source 1..20: mol_type = other DNA
gcacatgccatcatgcttgg

SEQ ID NO: 182978 - DNA, 20 bp, synthetic construct
  source 1..20: mol_type = other DNA
ggcacatgccatcatgcttg

SEQ ID NO: 182979 - DNA, 20 bp, synthetic construct
  source 1..20: mol_type = other DNA
aggcacatgccatcatgctt

SEQ ID NO: 182980 - DNA, 20 bp, synthetic construct
  source 1..20: mol_type = other DNA
taggcacatgccatcatgct

SEQ ID NO: 182981 - DNA, 20 bp, synthetic construct
  source 1..20: mol_type = other DNA
ataggcacatgccatcatgc

SEQ ID NO: 182982 - DNA, 20 bp, synthetic construct
  source 1..20: mol_type = other DNA
tataggcacatgccatcatg

SEQ ID NO: 182983 - DNA, 20 bp, synthetic construct
  source 1..20: mol_type = other DNA
ttataggcacatgccatcat

SEQ ID NO: 182984 - DNA, 20 bp, synthetic construct
  source 1..20: mol_type = other DNA
attataggcacatgccatca

SEQ ID NO: 182985 - DNA, 20 bp, synthetic construct
  source 1..20: mol_type = other DNA
gattataggcacatgccatc

SEQ ID NO: 182986 - DNA, 20 bp, synthetic construct
  source 1..20: mol_type = other DNA
ggattataggcacatgccat

SEQ ID NO: 182987 - DNA, 20 bp, synthetic construct
  source 1..20: mol_type = other DNA
aggattataggcacatgcca

SEQ ID NO: 182988 - DNA, 20 bp, synthetic construct
  source 1..20: mol_type = other DNA
caggattataggcacatgcc

SEQ ID NO: 182989 - DNA, 20 bp, synthetic construct
  source 1..20: mol_type = other DNA
ccaggattataggcacatgc

SEQ ID NO: 182990 - DNA, 20 bp, synthetic construct
  source 1..20: mol_type = other DNA
gccaggattataggcacatg

SEQ ID NO: 182991 - DNA, 20 bp, synthetic construct
  source 1..20: mol_type = other DNA
agccaggattataggcacat

SEQ ID NO: 182992 - DNA, 20 bp, synthetic construct
  source 1..20: mol_type = other DNA
tagccaggattataggcaca

SEQ ID NO: 182993 - DNA, 20 bp, synthetic construct
  source 1..20: mol_type = other DNA
gtagccaggattataggcac

SEQ ID NO: 182994 - DNA, 20 bp, synthetic construct
  source 1..20: mol_type = other DNA
agtagccaggattataggca

SEQ ID NO: 182995 - DNA, 20 bp, synthetic construct
  source 1..20: mol_type = other DNA
tagtagccaggattataggc

SEQ ID NO: 182996 - DNA, 20 bp, synthetic construct
  source 1..20: mol_type = other DNA
ctagtagccaggattatagg

SEQ ID NO: 182997 - DNA, 20 bp, synthetic construct
  source 1..20: mol_type = other DNA
cctagtagccaggattatag

SEQ ID NO: 182998 - DNA, 20 bp, synthetic construct
  source 1..20: mol_type = other DNA
ccctagtagccaggattata

SEQ ID NO: 182999 - DNA, 20 bp, synthetic construct
  source 1..20: mol_type = other DNA
tccctagtagccaggattat

SEQ ID NO: 183000 - DNA, 20 bp, synthetic construct
  source 1..20: mol_type = other DNA
ctccctagtagccaggatta

SEQ ID NO: 183001 - DNA, 20 bp, synthetic construct
  source 1..20: mol_type = other DNA
cctccctagtagccaggatt

SEQ ID NO: 183002 - DNA, 20 bp, synthetic construct
  source 1..20: mol_type = other DNA
gcctccctagtagccaggat

SEQ ID NO: 183003 - DNA, 20 bp, synthetic construct
  source 1..20: mol_type = other DNA
agcctccctagtagccagga

SEQ ID NO: 183004 - DNA, 20 bp, synthetic construct
  source 1..20: mol_type = other DNA
cagcctccctagtagccagg

SEQ ID NO: 183005 - DNA, 20 bp, synthetic construct
  source 1..20: mol_type = other DNA
tcagcctccctagtagccag

SEQ ID NO: 183006 - DNA, 20 bp, synthetic construct
  source 1..20: mol_type = other DNA
ctcagcctccctagtagcca

SEQ ID NO: 183007 - DNA, 20 bp, synthetic construct
  source 1..20: mol_type = other DNA
tctcagcctccctagtagcc

SEQ ID NO: 183008 - DNA, 20 bp, synthetic construct
  source 1..20: mol_type = other DNA
gtctcagcctccctagtagc

SEQ ID NO: 183009 - DNA, 20 bp, synthetic construct
  source 1..20: mol_type = other DNA
tgtctcagcctccctagtag

SEQ ID NO: 183010 - DNA, 20 bp, synthetic construct
  source 1..20: mol_type = other DNA
ctgtctcagcctccctagta

SEQ ID NO: 183011 - DNA, 20 bp, synthetic construct
  source 1..20: mol_type = other DNA
cctgtctcagcctccctagt

SEQ ID NO: 183012 - DNA, 20 bp, synthetic construct
  source 1..20: mol_type = other DNA
tcctgtctcagcctccctag

SEQ ID NO: 183013 - DNA, 20 bp, synthetic construct
  source 1..20: mol_type = other DNA
ctcctgtctcagcctcccta

SEQ ID NO: 183014 - DNA, 20 bp, synthetic construct
  source 1..20: mol_type = other DNA
tctcctgtctcagcctccct

SEQ ID NO: 183015 - DNA, 20 bp, synthetic construct
  source 1..20: mol_type = other DNA
ctctcctgtctcagcctccc

SEQ ID NO: 183016 - DNA, 20 bp, synthetic construct
  source 1..20: mol_type = other DNA
tctctcctgtctcagcctcc

SEQ ID NO: 183017 - DNA, 20 bp, synthetic construct
  source 1..20: mol_type = other DNA
ttctctcctgtctcagcctc

SEQ ID NO: 183018 - DNA, 20 bp, synthetic construct
  source 1..20: mol_type = other DNA
attctctcctgtctcagcct

SEQ ID NO: 183019 - DNA, 20 bp, synthetic construct
  source 1..20: mol_type = other DNA
gattctctcctgtctcagcc

SEQ ID NO: 183020 - DNA, 20 bp, synthetic construct
  source 1..20: mol_type = other DNA
cgattctctcctgtctcagc

SEQ ID NO: 183021 - DNA, 20 bp, synthetic construct
  source 1..20: mol_type = other DNA
gcgattctctcctgtctcag

SEQ ID NO: 183022 - DNA, 20 bp, synthetic construct
  source 1..20: mol_type = other DNA
agcgattctctcctgtctca

SEQ ID NO: 183023 - DNA, 20 bp, synthetic construct
  source 1..20: mol_type = other DNA
aagcgattctctcctgtctc

SEQ ID NO: 183024 - DNA, 20 bp, synthetic construct
  source 1..20: mol_type = other DNA
caagcgattctctcctgtct

SEQ ID NO: 183025 - DNA, 20 bp, synthetic construct
  source 1..20: mol_type = other DNA
tcaagcgattctctcctgtc

SEQ ID NO: 183026 - DNA, 20 bp, synthetic construct
  source 1..20: mol_type = other DNA
ttcaagcgattctctcctgt

SEQ ID NO: 183027 - DNA, 20 bp, synthetic construct
  source 1..20: mol_type = other DNA
attcaagcgattctctcctg

SEQ ID NO: 183028 - DNA, 20 bp, synthetic construct
  source 1..20: mol_type = other DNA
gattcaagcgattctctcct

SEQ ID NO: 183029 - DNA, 20 bp, synthetic construct
  source 1..20: mol_type = other DNA
ggattcaagcgattctctcc

SEQ ID NO: 183030 - DNA, 20 bp, synthetic construct
  source 1..20: mol_type = other DNA
tggattcaagcgattctctc

SEQ ID NO: 183031 - DNA, 20 bp, synthetic construct
  source 1..20: mol_type = other DNA
ctggattcaagcgattctct

SEQ ID NO: 183032 - DNA, 20 bp, synthetic construct
  source 1..20: mol_type = other DNA
cctggattcaagcgattctc

SEQ ID NO: 183033 - DNA, 20 bp, synthetic construct
  source 1..20: mol_type = other DNA
tcctggattcaagcgattct

SEQ ID NO: 183034 - DNA, 20 bp, synthetic construct
  source 1..20: mol_type = other DNA
ctcctggattcaagcgattc

SEQ ID NO: 183035 - DNA, 20 bp, synthetic construct
  source 1..20: mol_type = other DNA
cctcctggattcaagcgatt

SEQ ID NO: 183036 - DNA, 20 bp, synthetic construct
  source 1..20: mol_type = other DNA
acctcctggattcaagcgat

SEQ ID NO: 183037 - DNA, 20 bp, synthetic construct
  source 1..20: mol_type = other DNA
cacctcctggattcaagcga

SEQ ID NO: 183038 - DNA, 20 bp, synthetic construct
  source 1..20: mol_type = other DNA
ccacctcctggattcaagcg

SEQ ID NO: 183039 - DNA, 20 bp, synthetic construct
  source 1..20: mol_type = other DNA
accacctcctggattcaagc

SEQ ID NO: 183040 - DNA, 20 bp, synthetic construct
  source 1..20: mol_type = other DNA
aaccacctcctggattcaag

SEQ ID NO: 183041 - DNA, 20 bp, synthetic construct
  source 1..20: mol_type = other DNA
caaccacctcctggattcaa

SEQ ID NO: 183042 - DNA, 20 bp, synthetic construct
  source 1..20: mol_type = other DNA
gcaaccacctcctggattca

SEQ ID NO: 183043 - DNA, 20 bp, synthetic construct
  source 1..20: mol_type = other DNA
tgcaaccacctcctggattc

SEQ ID NO: 183044 - DNA, 20 bp, synthetic construct
  source 1..20: mol_type = other DNA
ctgcaaccacctcctggatt

SEQ ID NO: 183045 - DNA, 20 bp, synthetic construct
  source 1..20: mol_type = other DNA
actgcaaccacctcctggat

SEQ ID NO: 183046 - DNA, 20 bp, synthetic construct
  source 1..20: mol_type = other DNA
cactgcaaccacctcctgga

SEQ ID NO: 183047 - DNA, 20 bp, synthetic construct
  source 1..20: mol_type = other DNA
tcactgcaaccacctcctgg

SEQ ID NO: 183048 - DNA, 20 bp, synthetic construct
  source 1..20: mol_type = other DNA
ctcactgcaaccacctcctg

SEQ ID NO: 183049 - DNA, 20 bp, synthetic construct
  source 1..20: mol_type = other DNA
gctcactgcaaccacctcct

SEQ ID NO: 183050 - DNA, 20 bp, synthetic construct
  source 1..20: mol_type = other DNA
agctcactgcaaccacctcc

SEQ ID NO: 183051 - DNA, 20 bp, synthetic construct
  source 1..20: mol_type = other DNA
cagctcactgcaaccacctc

SEQ ID NO: 183052 - DNA, 20 bp, synthetic construct
  source 1..20: mol_type = other DNA
tcagctcactgcaaccacct

SEQ ID NO: 183053 - DNA, 20 bp, synthetic construct
  source 1..20: mol_type = other DNA
ctcagctcactgcaaccacc

SEQ ID NO: 183054 - DNA, 20 bp, synthetic construct
  source 1..20: mol_type = other DNA
tctcagctcactgcaaccac

SEQ ID NO: 183055 - DNA, 20 bp, synthetic construct
  source 1..20: mol_type = other DNA
atctcagctcactgcaacca

SEQ ID NO: 183056 - DNA, 20 bp, synthetic construct
  source 1..20: mol_type = other DNA
catctcagctcactgcaacc

SEQ ID NO: 183057 - DNA, 20 bp, synthetic construct
  source 1..20: mol_type = other DNA
ccatctcagctcactgcaac

SEQ ID NO: 183058 - DNA, 20 bp, synthetic construct
  source 1..20: mol_type = other DNA
accatctcagctcactgcaa

SEQ ID NO: 183059 - DNA, 20 bp, synthetic construct
  source 1..20: mol_type = other DNA
caccatctcagctcactgca

SEQ ID NO: 183060 - DNA, 20 bp, synthetic construct
  source 1..20: mol_type = other DNA
gcaccatctcagctcactgc

SEQ ID NO: 183061 - DNA, 20 bp, synthetic construct
  source 1..20: mol_type = other DNA
ggcaccatctcagctcactg

SEQ ID NO: 183062 - DNA, 20 bp, synthetic construct
  source 1..20: mol_type = other DNA
tggcaccatctcagctcact

SEQ ID NO: 183063 - DNA, 20 bp, synthetic construct
  source 1..20: mol_type = other DNA
gtggcaccatctcagctcac

SEQ ID NO: 183064 - DNA, 20 bp, synthetic construct
  source 1..20: mol_type = other DNA
agtggcaccatctcagctca

SEQ ID NO: 183065 - DNA, 20 bp, synthetic construct
  source 1..20: mol_type = other DNA
cagtggcaccatctcagctc

SEQ ID NO: 183066 - DNA, 20 bp, synthetic construct
  source 1..20: mol_type = other DNA
gcagtggcaccatctcagct

SEQ ID NO: 183067 - DNA, 20 bp, synthetic construct
  source 1..20: mol_type = other DNA
tgcagtggcaccatctcagc

SEQ ID NO: 183068 - DNA, 20 bp, synthetic construct
  source 1..20: mol_type = other DNA
gtgcagtggcaccatctcag

SEQ ID NO: 183069 - DNA, 20 bp, synthetic construct
  source 1..20: mol_type = other DNA
agtgcagtggcaccatctca

SEQ ID NO: 183070 - DNA, 20 bp, synthetic construct
  source 1..20: mol_type = other DNA
gagtgcagtggcaccatctc

SEQ ID NO: 183071 - DNA, 20 bp, synthetic construct
  source 1..20: mol_type = other DNA
ggagtgcagtggcaccatct

SEQ ID NO: 183072 - DNA, 20 bp, synthetic construct
  source 1..20: mol_type = other DNA
tggagtgcagtggcaccatc

SEQ ID NO: 183073 - DNA, 20 bp, synthetic construct
  source 1..20: mol_type = other DNA
ctggagtgcagtggcaccat

SEQ ID NO: 183074 - DNA, 20 bp, synthetic construct
  source 1..20: mol_type = other DNA
gctggagtgcagtggcacca

SEQ ID NO: 183075 - DNA, 20 bp, synthetic construct
  source 1..20: mol_type = other DNA
ggctggagtgcagtggcacc

SEQ ID NO: 183076 - DNA, 20 bp, synthetic construct
  source 1..20: mol_type = other DNA
aggctggagtgcagtggcac

SEQ ID NO: 183077 - DNA, 20 bp, synthetic construct
  source 1..20: mol_type = other DNA
caggctggagtgcagtggca

SEQ ID NO: 183078 - DNA, 20 bp, synthetic construct
  source 1..20: mol_type = other DNA
ccaggctggagtgcagtggc

SEQ ID NO: 183079 - DNA, 20 bp, synthetic construct
  source 1..20: mol_type = other DNA
accaggctggagtgcagtgg

SEQ ID NO: 183080 - DNA, 20 bp, synthetic construct
  source 1..20: mol_type = other DNA
aaccaggctggagtgcagtg

SEQ ID NO: 183081 - DNA, 20 bp, synthetic construct
  source 1..20: mol_type = other DNA
caaccaggctggagtgcagt

SEQ ID NO: 183082 - DNA, 20 bp, synthetic construct
  source 1..20: mol_type = other DNA
tcaaccaggctggagtgcag

SEQ ID NO: 183083 - DNA, 20 bp, synthetic construct
  source 1..20: mol_type = other DNA
gtcaaccaggctggagtgca

SEQ ID NO: 183084 - DNA, 20 bp, synthetic construct
  source 1..20: mol_type = other DNA
tgtcaaccaggctggagtgc

SEQ ID NO: 183085 - DNA, 20 bp, synthetic construct
  source 1..20: mol_type = other DNA
ctgtcaaccaggctggagtg

SEQ ID NO: 183086 - DNA, 20 bp, synthetic construct
  source 1..20: mol_type = other DNA
tctgtcaaccaggctggagt

SEQ ID NO: 183087 - DNA, 20 bp, synthetic construct
  source 1..20: mol_type = other DNA
ctctgtcaaccaggctggag

SEQ ID NO: 183088 - DNA, 20 bp, synthetic construct
  source 1..20: mol_type = other DNA
gctctgtcaaccaggctgga

SEQ ID NO: 183089 - DNA, 20 bp, synthetic construct
  source 1..20: mol_type = other DNA
tgctctgtcaaccaggctgg

SEQ ID NO: 183090 - DNA, 20 bp, synthetic construct
  source 1..20: mol_type = other DNA
ttgctctgtcaaccaggctg

SEQ ID NO: 183091 - DNA, 20 bp, synthetic construct
  source 1..20: mol_type = other DNA
cttgctctgtcaaccaggct

SEQ ID NO: 183092 - DNA, 20 bp, synthetic construct
  source 1..20: mol_type = other DNA
tcttgctctgtcaaccaggc

SEQ ID NO: 183093 - DNA, 20 bp, synthetic construct
  source 1..20: mol_type = other DNA
gtcttgctctgtcaaccagg

SEQ ID NO: 183094 - DNA, 20 bp, synthetic construct
  source 1..20: mol_type = other DNA
agtcttgctctgtcaaccag

SEQ ID NO: 183095 - DNA, 20 bp, synthetic construct
  source 1..20: mol_type = other DNA
gagtcttgctctgtcaacca

SEQ ID NO: 183096 - DNA, 20 bp, synthetic construct
  source 1..20: mol_type = other DNA
agagtcttgctctgtcaacc

SEQ ID NO: 183097 - DNA, 20 bp, synthetic construct
  source 1..20: mol_type = other DNA
cagagtcttgctctgtcaac

SEQ ID NO: 183098 - DNA, 20 bp, synthetic construct
  source 1..20: mol_type = other DNA
acagagtcttgctctgtcaa

SEQ ID NO: 183099 - DNA, 20 bp, synthetic construct
  source 1..20: mol_type = other DNA
gacagagtcttgctctgtca

SEQ ID NO: 183100 - DNA, 20 bp, synthetic construct
  source 1..20: mol_type = other DNA
agacagagtcttgctctgtc

SEQ ID NO: 183101 - DNA, 20 bp, synthetic construct
  source 1..20: mol_type = other DNA
gagacagagtcttgctctgt

SEQ ID NO: 183102 - DNA, 20 bp, synthetic construct
  source 1..20: mol_type = other DNA
tgagacagagtcttgctctg

SEQ ID NO: 183103 - DNA, 20 bp, synthetic construct
  source 1..20: mol_type = other DNA
ttgagacagagtcttgctct

SEQ ID NO: 183104 - DNA, 20 bp, synthetic construct
  source 1..20: mol_type = other DNA
tttgagacagagtcttgctc

SEQ ID NO: 183105 - DNA, 20 bp, synthetic construct
  source 1..20: mol_type = other DNA
ttttgagacagagtcttgct

SEQ ID NO: 183106 - DNA, 20 bp, synthetic construct
  source 1..20: mol_type = other DNA
tttttgagacagagtcttgc

SEQ ID NO: 183107 - DNA, 20 bp, synthetic construct
  source 1..20: mol_type = other DNA
ttttttgagacagagtcttg

SEQ ID NO: 183108 - DNA, 20 bp, synthetic construct
  source 1..20: mol_type = other DNA
tttttttgagacagagtctt

SEQ ID NO: 183109 - DNA, 20 bp, synthetic construct
  source 1..20: mol_type = other DNA
ttttttttgagacagagtct

SEQ ID NO: 183110 - DNA, 20 bp, synthetic construct
  source 1..20: mol_type = other DNA
tttttttttgagacagagtc

SEQ ID NO: 183111 - DNA, 20 bp, synthetic construct
  source 1..20: mol_type = other DNA
ttttttttttgagacagagt

SEQ ID NO: 183112 - DNA, 20 bp, synthetic construct
  source 1..20: mol_type = other DNA
tttttttttttgagacagag

SEQ ID NO: 183113 - DNA, 20 bp, synthetic construct
  source 1..20: mol_type = other DNA
ttttttttttttgagacaga

SEQ ID NO: 183114 - DNA, 20 bp, synthetic construct
  source 1..20: mol_type = other DNA
tttttttttttttgagacag

SEQ ID NO: 183115 - DNA, 20 bp, synthetic construct
  source 1..20: mol_type = other DNA
ttttttttttttttgagaca

SEQ ID NO: 183116 - DNA, 20 bp, synthetic construct
  source 1..20: mol_type = other DNA
tttttttttttttttgagac

SEQ ID NO: 183117 - DNA, 20 bp, synthetic construct
  source 1..20: mol_type = other DNA
ttttttttttttttttgaga

SEQ ID NO: 183118 - DNA, 20 bp, synthetic construct
  source 1..20: mol_type = other DNA
tttttttttttttttttgag

SEQ ID NO: 183119 - DNA, 20 bp, synthetic construct
  source 1..20: mol_type = other DNA
ttttttttttttttttttga

SEQ ID NO: 183120 - DNA, 20 bp, synthetic construct
  source 1..20: mol_type = other DNA
tttttttttttttttttttg

SEQ ID NO: 183121 - DNA, 20 bp, synthetic construct
  source 1..20: mol_type = other DNA
tttttttttttttttttttt

SEQ ID NO: 183122 - DNA, 20 bp, synthetic construct
  source 1..20: mol_type = other DNA
tttttttttttttttttttt

SEQ ID NO: 183123 - DNA, 20 bp, synthetic construct
  source 1..20: mol_type = other DNA
tttttttttttttttttttt

SEQ ID NO: 183124 - DNA, 20 bp, synthetic construct
  source 1..20: mol_type = other DNA
tttttttttttttttttttt

SEQ ID NO: 183125 - DNA, 20 bp, synthetic construct
  source 1..20: mol_type = other DNA
tttttttttttttttttttt

SEQ ID NO: 183126 - DNA, 20 bp, synthetic construct
  source 1..20: mol_type = other DNA
cttttttttttttttttttt

SEQ ID NO: 183127 - DNA, 20 bp, synthetic construct
  source 1..20: mol_type = other DNA
gctttttttttttttttttt

SEQ ID NO: 183128 - DNA, 20 bp, synthetic construct
  source 1..20: mol_type = other DNA
ggcttttttttttttttttt

SEQ ID NO: 183129 - DNA, 20 bp, synthetic construct
  source 1..20: mol_type = other DNA
tggctttttttttttttttt

SEQ ID NO: 183130 - DNA, 20 bp, synthetic construct
  source 1..20: mol_type = other DNA
atggcttttttttttttttt

SEQ ID NO: 183131 - DNA, 20 bp, synthetic construct
  source 1..20: mol_type = other DNA
catggctttttttttttttt

SEQ ID NO: 183132 - DNA, 20 bp, synthetic construct
  source 1..20: mol_type = other DNA
gcatggcttttttttttttt

SEQ ID NO: 183133 - DNA, 20 bp, synthetic construct
  source 1..20: mol_type = other DNA
ggcatggctttttttttttt

SEQ ID NO: 183134 - DNA, 20 bp, synthetic construct
  source 1..20: mol_type = other DNA
aggcatggcttttttttttt

SEQ ID NO: 183135 - DNA, 20 bp, synthetic construct
  source 1..20: mol_type = other DNA
caggcatggctttttttttt

SEQ ID NO: 183136 - DNA, 20 bp, synthetic construct
  source 1..20: mol_type = other DNA
ccaggcatggcttttttttt

SEQ ID NO: 183137 - DNA, 20 bp, synthetic construct
  source 1..20: mol_type = other DNA
accaggcatggctttttttt

SEQ ID NO: 183138 - DNA, 20 bp, synthetic construct
  source 1..20: mol_type = other DNA
caccaggcatggcttttttt

SEQ ID NO: 183139 - DNA, 20 bp, synthetic construct
  source 1..20: mol_type = other DNA
ccaccaggcatggctttttt

SEQ ID NO: 183140 - DNA, 20 bp, synthetic construct
  source 1..20: mol_type = other DNA
tccaccaggcatggcttttt

SEQ ID NO: 183141 - DNA, 20 bp, synthetic construct
  source 1..20: mol_type = other DNA
ctccaccaggcatggctttt

SEQ ID NO: 183142 - DNA, 20 bp, synthetic construct
  source 1..20: mol_type = other DNA
gctccaccaggcatggcttt

SEQ ID NO: 183143 - DNA, 20 bp, synthetic construct
  source 1..20: mol_type = other DNA
tgctccaccaggcatggctt

SEQ ID NO: 183144 - DNA, 20 bp, synthetic construct
  source 1..20: mol_type = other DNA
gtgctccaccaggcatggct

SEQ ID NO: 183145 - DNA, 20 bp, synthetic construct
  source 1..20: mol_type = other DNA
agtgctccaccaggcatggc

SEQ ID NO: 183146 - DNA, 20 bp, synthetic construct
  source 1..20: mol_type = other DNA
tagtgctccaccaggcatgg

SEQ ID NO: 183147 - DNA, 20 bp, synthetic construct
  source 1..20: mol_type = other DNA
gtagtgctccaccaggcatg

SEQ ID NO: 183148 - DNA, 20 bp, synthetic construct
  source 1..20: mol_type = other DNA
cgtagtgctccaccaggcat

SEQ ID NO: 183149 - DNA, 20 bp, synthetic construct
  source 1..20: mol_type = other DNA
acgtagtgctccaccaggca

SEQ ID NO: 183150 - DNA, 20 bp, synthetic construct
  source 1..20: mol_type = other DNA
cacgtagtgctccaccaggc

SEQ ID NO: 183151 - DNA, 20 bp, synthetic construct
  source 1..20: mol_type = other DNA
acacgtagtgctccaccagg

SEQ ID NO: 183152 - DNA, 20 bp, synthetic construct
  source 1..20: mol_type = other DNA
tacacgtagtgctccaccag

SEQ ID NO: 183153 - DNA, 20 bp, synthetic construct
  source 1..20: mol_type = other DNA
ttacacgtagtgctccacca

SEQ ID NO: 183154 - DNA, 20 bp, synthetic construct
  source 1..20: mol_type = other DNA
attacacgtagtgctccacc

SEQ ID NO: 183155 - DNA, 20 bp, synthetic construct
  source 1..20: mol_type = other DNA
gattacacgtagtgctccac

SEQ ID NO: 183156 - DNA, 20 bp, synthetic construct
  source 1..20: mol_type = other DNA
agattacacgtagtgctcca

SEQ ID NO: 183157 - DNA, 20 bp, synthetic construct
  source 1..20: mol_type = other DNA
gagattacacgtagtgctcc

SEQ ID NO: 183158 - DNA, 20 bp, synthetic construct
  source 1..20: mol_type = other DNA
tgagattacacgtagtgctc

SEQ ID NO: 183159 - DNA, 20 bp, synthetic construct
  source 1..20: mol_type = other DNA
ctgagattacacgtagtgct

SEQ ID NO: 183160 - DNA, 20 bp, synthetic construct
  source 1..20: mol_type = other DNA
gctgagattacacgtagtgc

SEQ ID NO: 183161 - DNA, 20 bp, synthetic construct
  source 1..20: mol_type = other DNA
agctgagattacacgtagtg

SEQ ID NO: 183162 - DNA, 20 bp, synthetic construct
  source 1..20: mol_type = other DNA
tagctgagattacacgtagt

SEQ ID NO: 183163 - DNA, 20 bp, synthetic construct
  source 1..20: mol_type = other DNA
atagctgagattacacgtag

SEQ ID NO: 183164 - DNA, 20 bp, synthetic construct
  source 1..20: mol_type = other DNA
aatagctgagattacacgta

SEQ ID NO: 183165 - DNA, 20 bp, synthetic construct
  source 1..20: mol_type = other DNA
aaatagctgagattacacgt

SEQ ID NO: 183166 - DNA, 20 bp, synthetic construct
  source 1..20: mol_type = other DNA
caaatagctgagattacacg

SEQ ID NO: 183167 - DNA, 20 bp, synthetic construct
  source 1..20: mol_type = other DNA
ccaaatagctgagattacac

SEQ ID NO: 183168 - DNA, 20 bp, synthetic construct
  source 1..20: mol_type = other DNA
cccaaatagctgagattaca

SEQ ID NO: 183169 - DNA, 20 bp, synthetic construct
  source 1..20: mol_type = other DNA
tcccaaatagctgagattac

SEQ ID NO: 183170 - DNA, 20 bp, synthetic construct
  source 1..20: mol_type = other DNA
ctcccaaatagctgagatta

SEQ ID NO: 183171 - DNA, 20 bp, synthetic construct
  source 1..20: mol_type = other DNA
cctcccaaatagctgagatt

SEQ ID NO: 183172 - DNA, 20 bp, synthetic construct
  source 1..20: mol_type = other DNA
gcctcccaaatagctgagat

SEQ ID NO: 183173 - DNA, 20 bp, synthetic construct
  source 1..20: mol_type = other DNA
agcctcccaaatagctgaga

SEQ ID NO: 183174 - DNA, 20 bp, synthetic construct
  source 1..20: mol_type = other DNA
cagcctcccaaatagctgag

SEQ ID NO: 183175 - DNA, 20 bp, synthetic construct
  source 1..20: mol_type = other DNA
tcagcctcccaaatagctga

SEQ ID NO: 183176 - DNA, 20 bp, synthetic construct
  source 1..20: mol_type = other DNA
ctcagcctcccaaatagctg

SEQ ID NO: 183177 - DNA, 20 bp, synthetic construct
  source 1..20: mol_type = other DNA
cctcagcctcccaaatagct

SEQ ID NO: 183178 - DNA, 20 bp, synthetic construct
  source 1..20: mol_type = other DNA
gcctcagcctcccaaatagc

SEQ ID NO: 183179 - DNA, 20 bp, synthetic construct
  source 1..20: mol_type = other DNA
tgcctcagcctcccaaatag

SEQ ID NO: 183180 - DNA, 20 bp, synthetic construct
  source 1..20: mol_type = other DNA
gtgcctcagcctcccaaata

SEQ ID NO: 183181 - DNA, 20 bp, synthetic construct
  source 1..20: mol_type = other DNA
cgtgcctcagcctcccaaat

SEQ ID NO: 183182 - DNA, 20 bp, synthetic construct
  source 1..20: mol_type = other DNA
tcgtgcctcagcctcccaaa

SEQ ID NO: 183183 - DNA, 20 bp, synthetic construct
  source 1..20: mol_type = other DNA
ctcgtgcctcagcctcccaa

SEQ ID NO: 183184 - DNA, 20 bp, synthetic construct
  source 1..20: mol_type = other DNA
tctcgtgcctcagcctccca

SEQ ID NO: 183185 - DNA, 20 bp, synthetic construct
  source 1..20: mol_type = other DNA
ttctcgtgcctcagcctccc

SEQ ID NO: 183186 - DNA, 20 bp, synthetic construct
  source 1..20: mol_type = other DNA
attctcgtgcctcagcctcc

SEQ ID NO: 183187 - DNA, 20 bp, synthetic construct
  source 1..20: mol_type = other DNA
gattctcgtgcctcagcctc

SEQ ID NO: 183188 - DNA, 20 bp, synthetic construct
  source 1..20: mol_type = other DNA
tgattctcgtgcctcagcct

SEQ ID NO: 183189 - DNA, 20 bp, synthetic construct
  source 1..20: mol_type = other DNA
gtgattctcgtgcctcagcc

SEQ ID NO: 183190 - DNA, 20 bp, synthetic construct
  source 1..20: mol_type = other DNA
agtgattctcgtgcctcagc

SEQ ID NO: 183191 - DNA, 20 bp, synthetic construct
  source 1..20: mol_type = other DNA
aagtgattctcgtgcctcag

SEQ ID NO: 183192 - DNA, 20 bp, synthetic construct
  source 1..20: mol_type = other DNA
caagtgattctcgtgcctca

SEQ ID NO: 183193 - DNA, 20 bp, synthetic construct
  source 1..20: mol_type = other DNA
tcaagtgattctcgtgcctc

SEQ ID NO: 183194 - DNA, 20 bp, synthetic construct
  source 1..20: mol_type = other DNA
ttcaagtgattctcgtgcct

SEQ ID NO: 183195 - DNA, 20 bp, synthetic construct
  source 1..20: mol_type = other DNA
gttcaagtgattctcgtgcc

SEQ ID NO: 183196 - DNA, 20 bp, synthetic construct
  source 1..20: mol_type = other DNA
ggttcaagtgattctcgtgc

SEQ ID NO: 183197 - DNA, 20 bp, synthetic construct
  source 1..20: mol_type = other DNA
aggttcaagtgattctcgtg

SEQ ID NO: 183198 - DNA, 20 bp, synthetic construct
  source 1..20: mol_type = other DNA
caggttcaagtgattctcgt

SEQ ID NO: 183199 - DNA, 20 bp, synthetic construct
  source 1..20: mol_type = other DNA
ccaggttcaagtgattctcg

SEQ ID NO: 183200 - DNA, 20 bp, synthetic construct
  source 1..20: mol_type = other DNA
cccaggttcaagtgattctc

SEQ ID NO: 183201 - DNA, 20 bp, synthetic construct
  source 1..20: mol_type = other DNA
tcccaggttcaagtgattct

SEQ ID NO: 183202 - DNA, 20 bp, synthetic construct
  source 1..20: mol_type = other DNA
ctcccaggttcaagtgattc

SEQ ID NO: 183203 - DNA, 20 bp, synthetic construct
  source 1..20: mol_type = other DNA
cctcccaggttcaagtgatt

SEQ ID NO: 183204 - DNA, 20 bp, synthetic construct
  source 1..20: mol_type = other DNA
gcctcccaggttcaagtgat

SEQ ID NO: 183205 - DNA, 20 bp, synthetic construct
  source 1..20: mol_type = other DNA
tgcctcccaggttcaagtga

SEQ ID NO: 183206 - DNA, 20 bp, synthetic construct
  source 1..20: mol_type = other DNA
ctgcctcccaggttcaagtg

SEQ ID NO: 183207 - DNA, 20 bp, synthetic construct
  source 1..20: mol_type = other DNA
actgcctcccaggttcaagt

SEQ ID NO: 183208 - DNA, 20 bp, synthetic construct
  source 1..20: mol_type = other DNA
cactgcctcccaggttcaag

SEQ ID NO: 183209 - DNA, 20 bp, synthetic construct
  source 1..20: mol_type = other DNA
ccactgcctcccaggttcaa

SEQ ID NO: 183210 - DNA, 20 bp, synthetic construct
  source 1..20: mol_type = other DNA
accactgcctcccaggttca

SEQ ID NO: 183211 - DNA, 20 bp, synthetic construct
  source 1..20: mol_type = other DNA
aaccactgcctcccaggttc

SEQ ID NO: 183212 - DNA, 20 bp, synthetic construct
  source 1..20: mol_type = other DNA
caaccactgcctcccaggtt

SEQ ID NO: 183213 - DNA, 20 bp, synthetic construct
  source 1..20: mol_type = other DNA
gcaaccactgcctcccaggt

SEQ ID NO: 183214 - DNA, 20 bp, synthetic construct
  source 1..20: mol_type = other DNA
tgcaaccactgcctcccagg

SEQ ID NO: 183215 - DNA, 20 bp, synthetic construct
  source 1..20: mol_type = other DNA
ctgcaaccactgcctcccag

SEQ ID NO: 183216 - DNA, 20 bp, synthetic construct
  source 1..20: mol_type = other DNA
actgcaaccactgcctccca

SEQ ID NO: 183217 - DNA, 20 bp, synthetic construct
  source 1..20: mol_type = other DNA
cactgcaaccactgcctccc

SEQ ID NO: 183218 - DNA, 20 bp, synthetic construct
  source 1..20: mol_type = other DNA
tcactgcaaccactgcctcc

SEQ ID NO: 183219 - DNA, 20 bp, synthetic construct
  source 1..20: mol_type = other DNA
ctcactgcaaccactgcctc

SEQ ID NO: 183220 - DNA, 20 bp, synthetic construct
  source 1..20: mol_type = other DNA
gctcactgcaaccactgcct

SEQ ID NO: 183221 - DNA, 20 bp, synthetic construct
  source 1..20: mol_type = other DNA
agctcactgcaaccactgcc

SEQ ID NO: 183222 - DNA, 20 bp, synthetic construct
  source 1..20: mol_type = other DNA
cagctcactgcaaccactgc

SEQ ID NO: 183223 - DNA, 20 bp, synthetic construct
  source 1..20: mol_type = other DNA
tcagctcactgcaaccactg

SEQ ID NO: 183224 - DNA, 20 bp, synthetic construct
  source 1..20: mol_type = other DNA
ctcagctcactgcaaccact

SEQ ID NO: 183225 - DNA, 20 bp, synthetic construct
  source 1..20: mol_type = other DNA
tctcagctcactgcaaccac

SEQ ID NO: 183226 - DNA, 20 bp, synthetic construct
  source 1..20: mol_type = other DNA
atctcagctcactgcaacca

SEQ ID NO: 183227 - DNA, 20 bp, synthetic construct
  source 1..20: mol_type = other DNA
gatctcagctcactgcaacc

SEQ ID NO: 183228 - DNA, 20 bp, synthetic construct
  source 1..20: mol_type = other DNA
cgatctcagctcactgcaac

SEQ ID NO: 183229 - DNA, 20 bp, synthetic construct
  source 1..20: mol_type = other DNA
gcgatctcagctcactgcaa

SEQ ID NO: 183230 - DNA, 20 bp, synthetic construct
  source 1..20: mol_type = other DNA
cgcgatctcagctcactgca

SEQ ID NO: 183231 - DNA, 20 bp, synthetic construct
  source 1..20: mol_type = other DNA
gcgcgatctcagctcactgc

SEQ ID NO: 183232 - DNA, 20 bp, synthetic construct
  source 1..20: mol_type = other DNA
ggcgcgatctcagctcactg

SEQ ID NO: 183233 - DNA, 20 bp, synthetic construct
  source 1..20: mol_type = other DNA
tggcgcgatctcagctcact

SEQ ID NO: 183234 - DNA, 20 bp, synthetic construct
  source 1..20: mol_type = other DNA
gtggcgcgatctcagctcac

SEQ ID NO: 183235 - DNA, 20 bp, synthetic construct
  source 1..20: mol_type = other DNA
agtggcgcgatctcagctca

SEQ ID NO: 183236 - DNA, 20 bp, synthetic construct
  source 1..20: mol_type = other DNA
cagtggcgcgatctcagctc

SEQ ID NO: 183237 - DNA, 20 bp, synthetic construct
  source 1..20: mol_type = other DNA
gcagtggcgcgatctcagct

SEQ ID NO: 183238 - DNA, 20 bp, synthetic construct
  source 1..20: mol_type = other DNA
tgcagtggcgcgatctcagc

SEQ ID NO: 183239 - DNA, 20 bp, synthetic construct
  source 1..20: mol_type = other DNA
gtgcagtggcgcgatctcag

SEQ ID NO: 183240 - DNA, 20 bp, synthetic construct
  source 1..20: mol_type = other DNA
agtgcagtggcgcgatctca

SEQ ID NO: 183241 - DNA, 20 bp, synthetic construct
  source 1..20: mol_type = other DNA
gagtgcagtggcgcgatctc

SEQ ID NO: 183242 - DNA, 20 bp, synthetic construct
  source 1..20: mol_type = other DNA
ggagtgcagtggcgcgatct

SEQ ID NO: 183243 - DNA, 20 bp, synthetic construct
  source 1..20: mol_type = other DNA
tggagtgcagtggcgcgatc

SEQ ID NO: 183244 - DNA, 20 bp, synthetic construct
  source 1..20: mol_type = other DNA
ctggagtgcagtggcgcgat

SEQ ID NO: 183245 - DNA, 20 bp, synthetic construct
  source 1..20: mol_type = other DNA
gctggagtgcagtggcgcga

SEQ ID NO: 183246 - DNA, 20 bp, synthetic construct
  source 1..20: mol_type = other DNA
ggctggagtgcagtggcgcg

SEQ ID NO: 183247 - DNA, 20 bp, synthetic construct
  source 1..20: mol_type = other DNA
aggctggagtgcagtggcgc

SEQ ID NO: 183248 - DNA, 20 bp, synthetic construct
  source 1..20: mol_type = other DNA
caggctggagtgcagtggcg

SEQ ID NO: 183249 - DNA, 20 bp, synthetic construct
  source 1..20: mol_type = other DNA
ccaggctggagtgcagtggc

SEQ ID NO: 183250 - DNA, 20 bp, synthetic construct
  source 1..20: mol_type = other DNA
cccaggctggagtgcagtgg

SEQ ID NO: 183251 - DNA, 20 bp, synthetic construct
  source 1..20: mol_type = other DNA
gcccaggctggagtgcagtg

SEQ ID NO: 183252 - DNA, 20 bp, synthetic construct
  source 1..20: mol_type = other DNA
cgcccaggctggagtgcagt

SEQ ID NO: 183253 - DNA, 20 bp, synthetic construct
  source 1..20: mol_type = other DNA
tcgcccaggctggagtgcag

SEQ ID NO: 183254 - DNA, 20 bp, synthetic construct
  source 1..20: mol_type = other DNA
gtcgcccaggctggagtgca

SEQ ID NO: 183255 - DNA, 20 bp, synthetic construct
  source 1..20: mol_type = other DNA
tgtcgcccaggctggagtgc

SEQ ID NO: 183256 - DNA, 20 bp, synthetic construct
  source 1..20: mol_type = other DNA
ctgtcgcccaggctggagtg

SEQ ID NO: 183257 - DNA, 20 bp, synthetic construct
  source 1..20: mol_type = other DNA
tctgtcgcccaggctggagt

SEQ ID NO: 183258 - DNA, 20 bp, synthetic construct
  source 1..20: mol_type = other DNA
ctctgtcgcccaggctggag

SEQ ID NO: 183259 - DNA, 20 bp, synthetic construct
  source 1..20: mol_type = other DNA
actctgtcgcccaggctgga

SEQ ID NO: 183260 - DNA, 20 bp, synthetic construct
  source 1..20: mol_type = other DNA
cactctgtcgcccaggctgg

SEQ ID NO: 183261 - DNA, 20 bp, synthetic construct
  source 1..20: mol_type = other DNA
tcactctgtcgcccaggctg

SEQ ID NO: 183262 - DNA, 20 bp, synthetic construct
  source 1..20: mol_type = other DNA
ctcactctgtcgcccaggct

SEQ ID NO: 183263 - DNA, 20 bp, synthetic construct
  source 1..20: mol_type = other DNA
actcactctgtcgcccaggc

SEQ ID NO: 183264 - DNA, 20 bp, synthetic construct
  source 1..20: mol_type = other DNA
cactcactctgtcgcccagg

SEQ ID NO: 183265 - DNA, 20 bp, synthetic construct
  source 1..20: mol_type = other DNA
tcactcactctgtcgcccag

SEQ ID NO: 183266 - DNA, 20 bp, synthetic construct
  source 1..20: mol_type = other DNA
ctcactcactctgtcgccca

SEQ ID NO: 183267 - DNA, 20 bp, synthetic construct
  source 1..20: mol_type = other DNA
tctcactcactctgtcgccc

SEQ ID NO: 183268 - DNA, 20 bp, synthetic construct
  source 1..20: mol_type = other DNA
gtctcactcactctgtcgcc

SEQ ID NO: 183269 - DNA, 20 bp, synthetic construct
  source 1..20: mol_type = other DNA
agtctcactcactctgtcgc

SEQ ID NO: 183270 - DNA, 20 bp, synthetic construct
  source 1..20: mol_type = other DNA
gagtctcactcactctgtcg

SEQ ID NO: 183271 - DNA, 20 bp, synthetic construct
  source 1..20: mol_type = other DNA
ggagtctcactcactctgtc

SEQ ID NO: 183272 - DNA, 20 bp, synthetic construct
  source 1..20: mol_type = other DNA
tggagtctcactcactctgt

SEQ ID NO: 183273 - DNA, 20 bp, synthetic construct
  source 1..20: mol_type = other DNA
atggagtctcactcactctg

SEQ ID NO: 183274 - DNA, 20 bp, synthetic construct
  source 1..20: mol_type = other DNA
aatggagtctcactcactct

SEQ ID NO: 183275 - DNA, 20 bp, synthetic construct
  source 1..20: mol_type = other DNA
aaatggagtctcactcactc

SEQ ID NO: 183276 - DNA, 20 bp, synthetic construct
  source 1..20: mol_type = other DNA
gaaatggagtctcactcact

SEQ ID NO: 183277 - DNA, 20 bp, synthetic construct
  source 1..20: mol_type = other DNA
tgaaatggagtctcactcac

SEQ ID NO: 183278 - DNA, 20 bp, synthetic construct
  source 1..20: mol_type = other DNA
ttgaaatggagtctcactca

SEQ ID NO: 183279 - DNA, 20 bp, synthetic construct
  source 1..20: mol_type = other DNA
tttgaaatggagtctcactc

SEQ ID NO: 183280 - DNA, 20 bp, synthetic construct
  source 1..20: mol_type = other DNA
ttttgaaatggagtctcact

SEQ ID NO: 183281 - DNA, 20 bp, synthetic construct
  source 1..20: mol_type = other DNA
tttttgaaatggagtctcac

SEQ ID NO: 183282 - DNA, 20 bp, synthetic construct
  source 1..20: mol_type = other DNA
ttttttgaaatggagtctca

SEQ ID NO: 183283 - DNA, 20 bp, synthetic construct
  source 1..20: mol_type = other DNA
tttttttgaaatggagtctc

SEQ ID NO: 183284 - DNA, 20 bp, synthetic construct
  source 1..20: mol_type = other DNA
atttttttgaaatggagtct

SEQ ID NO: 183285 - DNA, 20 bp, synthetic construct
  source 1..20: mol_type = other DNA
tatttttttgaaatggagtc

SEQ ID NO: 183286 - DNA, 20 bp, synthetic construct
  source 1..20: mol_type = other DNA
ttatttttttgaaatggagt

SEQ ID NO: 183287 - DNA, 20 bp, synthetic construct
  source 1..20: mol_type = other DNA
attatttttttgaaatggag

SEQ ID NO: 183288 - DNA, 20 bp, synthetic construct
  source 1..20: mol_type = other DNA
tattatttttttgaaatgga

SEQ ID NO: 183289 - DNA, 20 bp, synthetic construct
  source 1..20: mol_type = other DNA
ttattatttttttgaaatgg

SEQ ID NO: 183290 - DNA, 20 bp, synthetic construct
  source 1..20: mol_type = other DNA
tttattatttttttgaaatg

SEQ ID NO: 183291 - DNA, 20 bp, synthetic construct
  source 1..20: mol_type = other DNA
atttattatttttttgaaat

SEQ ID NO: 183292 - DNA, 20 bp, synthetic construct
  source 1..20: mol_type = other DNA
gatttattatttttttgaaa

SEQ ID NO: 183293 - DNA, 20 bp, synthetic construct
  source 1..20: mol_type = other DNA
agatttattatttttttgaa

SEQ ID NO: 183294 - DNA, 20 bp, synthetic construct
  source 1..20: mol_type = other DNA
cagatttattatttttttga

SEQ ID NO: 183295 - DNA, 20 bp, synthetic construct
  source 1..20: mol_type = other DNA
tcagatttattatttttttg

SEQ ID NO: 183296 - DNA, 20 bp, synthetic construct
  source 1..20: mol_type = other DNA
ctcagatttattattttttt

SEQ ID NO: 183297 - DNA, 20 bp, synthetic construct
  source 1..20: mol_type = other DNA
actcagatttattatttttt

SEQ ID NO: 183298 - DNA, 20 bp, synthetic construct
  source 1..20: mol_type = other DNA
gactcagatttattattttt

SEQ ID NO: 183299 - DNA, 20 bp, synthetic construct
  source 1..20: mol_type = other DNA
tgactcagatttattatttt

SEQ ID NO: 183300 - DNA, 20 bp, synthetic construct
  source 1..20: mol_type = other DNA
gtgactcagatttattattt

SEQ ID NO: 183301 - DNA, 20 bp, synthetic construct
  source 1..20: mol_type = other DNA
agtgactcagatttattatt

SEQ ID NO: 183302 - DNA, 20 bp, synthetic construct
  source 1..20: mol_type = other DNA
aagtgactcagatttattat

SEQ ID NO: 183303 - DNA, 20 bp, synthetic construct
  source 1..20: mol_type = other DNA
aaagtgactcagatttatta

SEQ ID NO: 183304 - DNA, 20 bp, synthetic construct
  source 1..20: mol_type = other DNA
taaagtgactcagatttatt

SEQ ID NO: 183305 - DNA, 20 bp, synthetic construct
  source 1..20: mol_type = other DNA
ttaaagtgactcagatttat

SEQ ID NO: 183306 - DNA, 20 bp, synthetic construct
  source 1..20: mol_type = other DNA
attaaagtgactcagattta

SEQ ID NO: 183307 - DNA, 20 bp, synthetic construct
  source 1..20: mol_type = other DNA
tattaaagtgactcagattt

SEQ ID NO: 183308 - DNA, 20 bp, synthetic construct
  source 1..20: mol_type = other DNA
atattaaagtgactcagatt

SEQ ID NO: 183309 - DNA, 20 bp, synthetic construct
  source 1..20: mol_type = other DNA
aatattaaagtgactcagat

SEQ ID NO: 183310 - DNA, 20 bp, synthetic construct
  source 1..20: mol_type = other DNA
caatattaaagtgactcaga

SEQ ID NO: 183311 - DNA, 20 bp, synthetic construct
  source 1..20: mol_type = other DNA
acaatattaaagtgactcag

SEQ ID NO: 183312 - DNA, 20 bp, synthetic construct
  source 1..20: mol_type = other DNA
aacaatattaaagtgactca

SEQ ID NO: 183313 - DNA, 20 bp, synthetic construct
  source 1..20: mol_type = other DNA
taacaatattaaagtgactc

SEQ ID NO: 183314 - DNA, 20 bp, synthetic construct
  source 1..20: mol_type = other DNA
ataacaatattaaagtgact

SEQ ID NO: 183315 - DNA, 20 bp, synthetic construct
  source 1..20: mol_type = other DNA
aataacaatattaaagtgac

SEQ ID NO: 183316 - DNA, 20 bp, synthetic construct
  source 1..20: mol_type = other DNA
aaataacaatattaaagtga

SEQ ID NO: 183317 - DNA, 20 bp, synthetic construct
  source 1..20: mol_type = other DNA
caaataacaatattaaagtg

SEQ ID NO: 183318 - DNA, 20 bp, synthetic construct
  source 1..20: mol_type = other DNA
ccaaataacaatattaaagt

SEQ ID NO: 183319 - DNA, 20 bp, synthetic construct
  source 1..20: mol_type = other DNA
tccaaataacaatattaaag

SEQ ID NO: 183320 - DNA, 20 bp, synthetic construct
  source 1..20: mol_type = other DNA
atccaaataacaatattaaa

SEQ ID NO: 183321 - DNA, 20 bp, synthetic construct
  source 1..20: mol_type = other DNA
catccaaataacaatattaa

SEQ ID NO: 183322 - DNA, 20 bp, synthetic construct
  source 1..20: mol_type = other DNA
acatccaaataacaatatta

SEQ ID NO: 183323 - DNA, 20 bp, synthetic construct
  source 1..20: mol_type = other DNA
gacatccaaataacaatatt

SEQ ID NO: 183324 - DNA, 20 bp, synthetic construct
  source 1..20: mol_type = other DNA
tgacatccaaataacaatat

SEQ ID NO: 183325 - DNA, 20 bp, synthetic construct
  source 1..20: mol_type = other DNA
ttgacatccaaataacaata

SEQ ID NO: 183326 - DNA, 20 bp, synthetic construct
  source 1..20: mol_type = other DNA
gttgacatccaaataacaat

SEQ ID NO: 183327 - DNA, 20 bp, synthetic construct
  source 1..20: mol_type = other DNA
ggttgacatccaaataacaa

SEQ ID NO: 183328 - DNA, 20 bp, synthetic construct
  source 1..20: mol_type = other DNA
aggttgacatccaaataaca

SEQ ID NO: 183329 - DNA, 20 bp, synthetic construct
  source 1..20: mol_type = other DNA
gaggttgacatccaaataac

SEQ ID NO: 183330 - DNA, 20 bp, synthetic construct
  source 1..20: mol_type = other DNA
agaggttgacatccaaataa

SEQ ID NO: 183331 - DNA, 20 bp, synthetic construct
  source 1..20: mol_type = other DNA
tagaggttgacatccaaata

SEQ ID NO: 183332 - DNA, 20 bp, synthetic construct
  source 1..20: mol_type = other DNA
ctagaggttgacatccaaat

SEQ ID NO: 183333 - DNA, 20 bp, synthetic construct
  source 1..20: mol_type = other DNA
cctagaggttgacatccaaa

SEQ ID NO: 183334 - DNA, 20 bp, synthetic construct
  source 1..20: mol_type = other DNA
acctagaggttgacatccaa

SEQ ID NO: 183335 - DNA, 20 bp, synthetic construct
  source 1..20: mol_type = other DNA
cacctagaggttgacatcca

SEQ ID NO: 183336 - DNA, 20 bp, synthetic construct
  source 1..20: mol_type = other DNA
acacctagaggttgacatcc

SEQ ID NO: 183337 - DNA, 20 bp, synthetic construct
  source 1..20: mol_type = other DNA
aacacctagaggttgacatc

SEQ ID NO: 183338 - DNA, 20 bp, synthetic construct
  source 1..20: mol_type = other DNA
aaacacctagaggttgacat

SEQ ID NO: 183339 - DNA, 20 bp, synthetic construct
  source 1..20: mol_type = other DNA
caaacacctagaggttgaca

SEQ ID NO: 183340 - DNA, 20 bp, synthetic construct
  source 1..20: mol_type = other DNA
tcaaacacctagaggttgac

SEQ ID NO: 183341 - DNA, 20 bp, synthetic construct
  source 1..20: mol_type = other DNA
ctcaaacacctagaggttga

SEQ ID NO: 183342 - DNA, 20 bp, synthetic construct
  source 1..20: mol_type = other DNA
tctcaaacacctagaggttg

SEQ ID NO: 183343 - DNA, 20 bp, synthetic construct
  source 1..20: mol_type = other DNA
gtctcaaacacctagaggtt

SEQ ID NO: 183344 - DNA, 20 bp, synthetic construct
  source 1..20: mol_type = other DNA
tgtctcaaacacctagaggt

SEQ ID NO: 183345 - DNA, 20 bp, synthetic construct
  source 1..20: mol_type = other DNA
ctgtctcaaacacctagagg

SEQ ID NO: 183346 - DNA, 20 bp, synthetic construct
  source 1..20: mol_type = other DNA
cctgtctcaaacacctagag

SEQ ID NO: 183347 - DNA, 20 bp, synthetic construct
  source 1..20: mol_type = other DNA
tcctgtctcaaacacctaga

SEQ ID NO: 183348 - DNA, 20 bp, synthetic construct
  source 1..20: mol_type = other DNA
ctcctgtctcaaacacctag

SEQ ID NO: 183349 - DNA, 20 bp, synthetic construct
  source 1..20: mol_type = other DNA
tctcctgtctcaaacaccta

SEQ ID NO: 183350 - DNA, 20 bp, synthetic construct
  source 1..20: mol_type = other DNA
ctctcctgtctcaaacacct

SEQ ID NO: 183351 - DNA, 20 bp, synthetic construct
  source 1..20: mol_type = other DNA
actctcctgtctcaaacacc

SEQ ID NO: 183352 - DNA, 20 bp, synthetic construct
  source 1..20: mol_type = other DNA
cactctcctgtctcaaacac

SEQ ID NO: 183353 - DNA, 20 bp, synthetic construct
  source 1..20: mol_type = other DNA
tcactctcctgtctcaaaca

SEQ ID NO: 183354 - DNA, 20 bp, synthetic construct
  source 1..20: mol_type = other DNA
atcactctcctgtctcaaac

SEQ ID NO: 183355 - DNA, 20 bp, synthetic construct
  source 1..20: mol_type = other DNA
tatcactctcctgtctcaaa

SEQ ID NO: 183356 - DNA, 20 bp, synthetic construct
  source 1..20: mol_type = other DNA
atatcactctcctgtctcaa

SEQ ID NO: 183357 - DNA, 20 bp, synthetic construct
  source 1..20: mol_type = other DNA
catatcactctcctgtctca

SEQ ID NO: 183358 - DNA, 20 bp, synthetic construct
  source 1..20: mol_type = other DNA
ccatatcactctcctgtctc

SEQ ID NO: 183359 - DNA, 20 bp, synthetic construct
  source 1..20: mol_type = other DNA
cccatatcactctcctgtct

SEQ ID NO: 183360 - DNA, 20 bp, synthetic construct
  source 1..20: mol_type = other DNA
ccccatatcactctcctgtc

SEQ ID NO: 183361 - DNA, 20 bp, synthetic construct
  source 1..20: mol_type = other DNA
cccccatatcactctcctgt

SEQ ID NO: 183362 - DNA, 20 bp, synthetic construct
  source 1..20: mol_type = other DNA
gcccccatatcactctcctg

SEQ ID NO: 183363 - DNA, 20 bp, synthetic construct
  source 1..20: mol_type = other DNA
tgcccccatatcactctcct

SEQ ID NO: 183364 - DNA, 20 bp, synthetic construct
  source 1..20: mol_type = other DNA
gtgcccccatatcactctcc

SEQ ID NO: 183365 - DNA, 20 bp, synthetic construct
  source 1..20: mol_type = other DNA
agtgcccccatatcactctc

SEQ ID NO: 183366 - DNA, 20 bp, synthetic construct
  source 1..20: mol_type = other DNA
cagtgcccccatatcactct

SEQ ID NO: 183367 - DNA, 20 bp, synthetic construct
  source 1..20: mol_type = other DNA
ccagtgcccccatatcactc

SEQ ID NO: 183368 - DNA, 20 bp, synthetic construct
  source 1..20: mol_type = other DNA
tccagtgcccccatatcact

SEQ ID NO: 183369 - DNA, 20 bp, synthetic construct
  source 1..20: mol_type = other DNA
ttccagtgcccccatatcac

SEQ ID NO: 183370 - DNA, 20 bp, synthetic construct
  source 1..20: mol_type = other DNA
tttccagtgcccccatatca

SEQ ID NO: 183371 - DNA, 20 bp, synthetic construct
  source 1..20: mol_type = other DNA
gtttccagtgcccccatatc

SEQ ID NO: 183372 - DNA, 20 bp, synthetic construct
  source 1..20: mol_type = other DNA
tgtttccagtgcccccatat

SEQ ID NO: 183373 - DNA, 20 bp, synthetic construct
  source 1..20: mol_type = other DNA
gtgtttccagtgcccccata

SEQ ID NO: 183374 - DNA, 20 bp, synthetic construct
  source 1..20: mol_type = other DNA
tgtgtttccagtgcccccat

SEQ ID NO: 183375 - DNA, 20 bp, synthetic construct
  source 1..20: mol_type = other DNA
gtgtgtttccagtgccccca

SEQ ID NO: 183376 - DNA, 20 bp, synthetic construct
  source 1..20: mol_type = other DNA
tgtgtgtttccagtgccccc

SEQ ID NO: 183377 - DNA, 20 bp, synthetic construct
  source 1..20: mol_type = other DNA
ctgtgtgtttccagtgcccc

SEQ ID NO: 183378 - DNA, 20 bp, synthetic construct
  source 1..20: mol_type = other DNA
cctgtgtgtttccagtgccc

SEQ ID NO: 183379 - DNA, 20 bp, synthetic construct
  source 1..20: mol_type = other DNA
gcctgtgtgtttccagtgcc

SEQ ID NO: 183380 - DNA, 20 bp, synthetic construct
  source 1..20: mol_type = other DNA
tgcctgtgtgtttccagtgc

SEQ ID NO: 183381 - DNA, 20 bp, synthetic construct
  source 1..20: mol_type = other DNA
gtgcctgtgtgtttccagtg

SEQ ID NO: 183382 - DNA, 20 bp, synthetic construct
  source 1..20: mol_type = other DNA
cgtgcctgtgtgtttccagt

SEQ ID NO: 183383 - DNA, 20 bp, synthetic construct
  source 1..20: mol_type = other DNA
ccgtgcctgtgtgtttccag

SEQ ID NO: 183384 - DNA, 20 bp, synthetic construct
  source 1..20: mol_type = other DNA
cccgtgcctgtgtgtttcca

SEQ ID NO: 183385 - DNA, 20 bp, synthetic construct
  source 1..20: mol_type = other DNA
ccccgtgcctgtgtgtttcc

SEQ ID NO: 183386 - DNA, 20 bp, synthetic construct
  source 1..20: mol_type = other DNA
accccgtgcctgtgtgtttc

SEQ ID NO: 183387 - DNA, 20 bp, synthetic construct
  source 1..20: mol_type = other DNA
caccccgtgcctgtgtgttt

SEQ ID NO: 183388 - DNA, 20 bp, synthetic construct
  source 1..20: mol_type = other DNA
acaccccgtgcctgtgtgtt

SEQ ID NO: 183389 - DNA, 20 bp, synthetic construct
  source 1..20: mol_type = other DNA
gacaccccgtgcctgtgtgt

SEQ ID NO: 183390 - DNA, 20 bp, synthetic construct
  source 1..20: mol_type = other DNA
ggacaccccgtgcctgtgtg

SEQ ID NO: 183391 - DNA, 20 bp, synthetic construct
  source 1..20: mol_type = other DNA
aggacaccccgtgcctgtgt

SEQ ID NO: 183392 - DNA, 20 bp, synthetic construct
  source 1..20: mol_type = other DNA
gaggacaccccgtgcctgtg

SEQ ID NO: 183393 - DNA, 20 bp, synthetic construct
  source 1..20: mol_type = other DNA
tgaggacaccccgtgcctgt

SEQ ID NO: 183394 - DNA, 20 bp, synthetic construct
  source 1..20: mol_type = other DNA
gtgaggacaccccgtgcctg

SEQ ID NO: 183395 - DNA, 20 bp, synthetic construct
  source 1..20: mol_type = other DNA
tgtgaggacaccccgtgcct

SEQ ID NO: 183396 - DNA, 20 bp, synthetic construct
  source 1..20: mol_type = other DNA
gtgtgaggacaccccgtgcc

SEQ ID NO: 183397 - DNA, 20 bp, synthetic construct
  source 1..20: mol_type = other DNA
agtgtgaggacaccccgtgc

SEQ ID NO: 183398 - DNA, 20 bp, synthetic construct
  source 1..20: mol_type = other DNA
aagtgtgaggacaccccgtg

SEQ ID NO: 183399 - DNA, 20 bp, synthetic construct
  source 1..20: mol_type = other DNA
caagtgtgaggacaccccgt

SEQ ID NO: 183400 - DNA, 20 bp, synthetic construct
  source 1..20: mol_type = other DNA
ccaagtgtgaggacaccccg

SEQ ID NO: 183401 - DNA, 20 bp, synthetic construct
  source 1..20: mol_type = other DNA
cccaagtgtgaggacacccc

SEQ ID NO: 183402 - DNA, 20 bp, synthetic construct
  source 1..20: mol_type = other DNA
acccaagtgtgaggacaccc

SEQ ID NO: 183403 - DNA, 20 bp, synthetic construct
  source 1..20: mol_type = other DNA
tacccaagtgtgaggacacc

SEQ ID NO: 183404 - DNA, 20 bp, synthetic construct
  source 1..20: mol_type = other DNA
ctacccaagtgtgaggacac

SEQ ID NO: 183405 - DNA, 20 bp, synthetic construct
  source 1..20: mol_type = other DNA
gctacccaagtgtgaggaca

SEQ ID NO: 183406 - DNA, 20 bp, synthetic construct
  source 1..20: mol_type = other DNA
ggctacccaagtgtgaggac

SEQ ID NO: 183407 - DNA, 20 bp, synthetic construct
  source 1..20: mol_type = other DNA
gggctacccaagtgtgagga

SEQ ID NO: 183408 - DNA, 20 bp, synthetic construct
  source 1..20: mol_type = other DNA
tgggctacccaagtgtgagg

SEQ ID NO: 183409 - DNA, 20 bp, synthetic construct
  source 1..20: mol_type = other DNA
gtgggctacccaagtgtgag

SEQ ID NO: 183410 - DNA, 20 bp, synthetic construct
  source 1..20: mol_type = other DNA
tgtgggctacccaagtgtga

SEQ ID NO: 183411 - DNA, 20 bp, synthetic construct
  source 1..20: mol_type = other DNA
gtgtgggctacccaagtgtg

SEQ ID NO: 183412 - DNA, 20 bp, synthetic construct
  source 1..20: mol_type = other DNA
cgtgtgggctacccaagtgt

SEQ ID NO: 183413 - DNA, 20 bp, synthetic construct
  source 1..20: mol_type = other DNA
tcgtgtgggctacccaagtg

SEQ ID NO: 183414 - DNA, 20 bp, synthetic construct
  source 1..20: mol_type = other DNA
atcgtgtgggctacccaagt

SEQ ID NO: 183415 - DNA, 20 bp, synthetic construct
  source 1..20: mol_type = other DNA
catcgtgtgggctacccaag

SEQ ID NO: 183416 - DNA, 20 bp, synthetic construct
  source 1..20: mol_type = other DNA
acatcgtgtgggctacccaa

SEQ ID NO: 183417 - DNA, 20 bp, synthetic construct
  source 1..20: mol_type = other DNA
cacatcgtgtgggctaccca

SEQ ID NO: 183418 - DNA, 20 bp, synthetic construct
  source 1..20: mol_type = other DNA
tcacatcgtgtgggctaccc

SEQ ID NO: 183419 - DNA, 20 bp, synthetic construct
  source 1..20: mol_type = other DNA
atcacatcgtgtgggctacc

SEQ ID NO: 183420 - DNA, 20 bp, synthetic construct
  source 1..20: mol_type = other DNA
aatcacatcgtgtgggctac

SEQ ID NO: 183421 - DNA, 20 bp, synthetic construct
  source 1..20: mol_type = other DNA
aaatcacatcgtgtgggcta

SEQ ID NO: 183422 - DNA, 20 bp, synthetic construct
  source 1..20: mol_type = other DNA
gaaatcacatcgtgtgggct

SEQ ID NO: 183423 - DNA, 20 bp, synthetic construct
  source 1..20: mol_type = other DNA
tgaaatcacatcgtgtgggc

SEQ ID NO: 183424 - DNA, 20 bp, synthetic construct
  source 1..20: mol_type = other DNA
ctgaaatcacatcgtgtggg

SEQ ID NO: 183425 - DNA, 20 bp, synthetic construct
  source 1..20: mol_type = other DNA
cctgaaatcacatcgtgtgg

SEQ ID NO: 183426 - DNA, 20 bp, synthetic construct
  source 1..20: mol_type = other DNA
ccctgaaatcacatcgtgtg

SEQ ID NO: 183427 - DNA, 20 bp, synthetic construct
  source 1..20: mol_type = other DNA
accctgaaatcacatcgtgt

SEQ ID NO: 183428 - DNA, 20 bp, synthetic construct
  source 1..20: mol_type = other DNA
caccctgaaatcacatcgtg

SEQ ID NO: 183429 - DNA, 20 bp, synthetic construct
  source 1..20: mol_type = other DNA
gcaccctgaaatcacatcgt

SEQ ID NO: 183430 - DNA, 20 bp, synthetic construct
  source 1..20: mol_type = other DNA
agcaccctgaaatcacatcg

SEQ ID NO: 183431 - DNA, 20 bp, synthetic construct
  source 1..20: mol_type = other DNA
cagcaccctgaaatcacatc

SEQ ID NO: 183432 - DNA, 20 bp, synthetic construct
  source 1..20: mol_type = other DNA
ccagcaccctgaaatcacat

SEQ ID NO: 183433 - DNA, 20 bp, synthetic construct
  source 1..20: mol_type = other DNA
cccagcaccctgaaatcaca

SEQ ID NO: 183434 - DNA, 20 bp, synthetic construct
  source 1..20: mol_type = other DNA
tcccagcaccctgaaatcac

SEQ ID NO: 183435 - DNA, 20 bp, synthetic construct
  source 1..20: mol_type = other DNA
ctcccagcaccctgaaatca

SEQ ID NO: 183436 - DNA, 20 bp, synthetic construct
  source 1..20: mol_type = other DNA
cctcccagcaccctgaaatc

SEQ ID NO: 183437 - DNA, 20 bp, synthetic construct
  source 1..20: mol_type = other DNA
acctcccagcaccctgaaat

SEQ ID NO: 183438 - DNA, 20 bp, synthetic construct
  source 1..20: mol_type = other DNA
gacctcccagcaccctgaaa

SEQ ID NO: 183439 - DNA, 20 bp, synthetic construct
  source 1..20: mol_type = other DNA
ggacctcccagcaccctgaa

SEQ ID NO: 183440 - DNA, 20 bp, synthetic construct
  source 1..20: mol_type = other DNA
gggacctcccagcaccctga

SEQ ID NO: 183441 - DNA, 20 bp, synthetic construct
  source 1..20: mol_type = other DNA
ggggacctcccagcaccctg

SEQ ID NO: 183442 - DNA, 20 bp, synthetic construct
  source 1..20: mol_type = other DNA
gggggacctcccagcaccct

SEQ ID NO: 183443 - DNA, 20 bp, synthetic construct
  source 1..20: mol_type = other DNA
ggggggacctcccagcaccc

SEQ ID NO: 183444 - DNA, 20 bp, synthetic construct
  source 1..20: mol_type = other DNA
tggggggacctcccagcacc

SEQ ID NO: 183445 - DNA, 20 bp, synthetic construct
  source 1..20: mol_type = other DNA
gtggggggacctcccagcac

SEQ ID NO: 183446 - DNA, 20 bp, synthetic construct
  source 1..20: mol_type = other DNA
agtggggggacctcccagca

SEQ ID NO: 183447 - DNA, 20 bp, synthetic construct
  source 1..20: mol_type = other DNA
gagtggggggacctcccagc

SEQ ID NO: 183448 - DNA, 20 bp, synthetic construct
  source 1..20: mol_type = other DNA
ggagtggggggacctcccag

SEQ ID NO: 183449 - DNA, 20 bp, synthetic construct
  source 1..20: mol_type = other DNA
gggagtggggggacctccca

SEQ ID NO: 183450 - DNA, 20 bp, synthetic construct
  source 1..20: mol_type = other DNA
ggggagtggggggacctccc

SEQ ID NO: 183451 - DNA, 20 bp, synthetic construct
  source 1..20: mol_type = other DNA
tggggagtggggggacctcc

SEQ ID NO: 183452 - DNA, 20 bp, synthetic construct
  source 1..20: mol_type = other DNA
ttggggagtggggggacctc

SEQ ID NO: 183453 - DNA, 20 bp, synthetic construct
  source 1..20: mol_type = other DNA
tttggggagtggggggacct

SEQ ID NO: 183454 - DNA, 20 bp, synthetic construct
  source 1..20: mol_type = other DNA
atttggggagtggggggacc

SEQ ID NO: 183455 - DNA, 20 bp, synthetic construct
  source 1..20: mol_type = other DNA
aatttggggagtggggggac

SEQ ID NO: 183456 - DNA, 20 bp, synthetic construct
  source 1..20: mol_type = other DNA
taatttggggagtgggggga

SEQ ID NO: 183457 - DNA, 20 bp, synthetic construct
  source 1..20: mol_type = other DNA
gtaatttggggagtgggggg

SEQ ID NO: 183458 - DNA, 20 bp, synthetic construct
  source 1..20: mol_type = other DNA
agtaatttggggagtggggg

SEQ ID NO: 183459 - DNA, 20 bp, synthetic construct
  source 1..20: mol_type = other DNA
tagtaatttggggagtgggg

SEQ ID NO: 183460 - DNA, 20 bp, synthetic construct
  source 1..20: mol_type = other DNA
ttagtaatttggggagtggg

SEQ ID NO: 183461 - DNA, 20 bp, synthetic construct
  source 1..20: mol_type = other DNA
gttagtaatttggggagtgg

SEQ ID NO: 183462 - DNA, 20 bp, synthetic construct
  source 1..20: mol_type = other DNA
tgttagtaatttggggagtg

SEQ ID NO: 183463 - DNA, 20 bp, synthetic construct
  source 1..20: mol_type = other DNA
ttgttagtaatttggggagt

SEQ ID NO: 183464 - DNA, 20 bp, synthetic construct
  source 1..20: mol_type = other DNA
cttgttagtaatttggggag

SEQ ID NO: 183465 - DNA, 20 bp, synthetic construct
  source 1..20: mol_type = other DNA
acttgttagtaatttgggga

SEQ ID NO: 183466 - DNA, 20 bp, synthetic construct
  source 1..20: mol_type = other DNA
cacttgttagtaatttgggg

SEQ ID NO: 183467 - DNA, 20 bp, synthetic construct
  source 1..20: mol_type = other DNA
ccacttgttagtaatttggg

SEQ ID NO: 183468 - DNA, 20 bp, synthetic construct
  source 1..20: mol_type = other DNA
tccacttgttagtaatttgg

SEQ ID NO: 183469 - DNA, 20 bp, synthetic construct
  source 1..20: mol_type = other DNA
atccacttgttagtaatttg

SEQ ID NO: 183470 - DNA, 20 bp, synthetic construct
  source 1..20: mol_type = other DNA
tatccacttgttagtaattt

SEQ ID NO: 183471 - DNA, 20 bp, synthetic construct
  source 1..20: mol_type = other DNA
ctatccacttgttagtaatt

SEQ ID NO: 183472 - DNA, 20 bp, synthetic construct
  source 1..20: mol_type = other DNA
actatccacttgttagtaat

SEQ ID NO: 183473 - DNA, 20 bp, synthetic construct
  source 1..20: mol_type = other DNA
tactatccacttgttagtaa

SEQ ID NO: 183474 - DNA, 20 bp, synthetic construct
  source 1..20: mol_type = other DNA
gtactatccacttgttagta

SEQ ID NO: 183475 - DNA, 20 bp, synthetic construct
  source 1..20: mol_type = other DNA
agtactatccacttgttagt

SEQ ID NO: 183476 - DNA, 20 bp, synthetic construct
  source 1..20: mol_type = other DNA
aagtactatccacttgttag

SEQ ID NO: 183477 - DNA, 20 bp, synthetic construct
  source 1..20: mol_type = other DNA
aaagtactatccacttgtta

SEQ ID NO: 183478 - DNA, 20 bp, synthetic construct
  source 1..20: mol_type = other DNA
taaagtactatccacttgtt

SEQ ID NO: 183479 - DNA, 20 bp, synthetic construct
  source 1..20: mol_type = other DNA
gtaaagtactatccacttgt

SEQ ID NO: 183480 - DNA, 20 bp, synthetic construct
  source 1..20: mol_type = other DNA
tgtaaagtactatccacttg

SEQ ID NO: 183481 - DNA, 20 bp, synthetic construct
  source 1..20: mol_type = other DNA
ctgtaaagtactatccactt

SEQ ID NO: 183482 - DNA, 20 bp, synthetic construct
  source 1..20: mol_type = other DNA
actgtaaagtactatccact

SEQ ID NO: 183483 - DNA, 20 bp, synthetic construct
  source 1..20: mol_type = other DNA
aactgtaaagtactatccac

SEQ ID NO: 183484 - DNA, 20 bp, synthetic construct
  source 1..20: mol_type = other DNA
aaactgtaaagtactatcca

SEQ ID NO: 183485 - DNA, 20 bp, synthetic construct
  source 1..20: mol_type = other DNA
taaactgtaaagtactatcc

SEQ ID NO: 183486 - DNA, 20 bp, synthetic construct
  source 1..20: mol_type = other DNA
ataaactgtaaagtactatc

SEQ ID NO: 183487 - DNA, 20 bp, synthetic construct
  source 1..20: mol_type = other DNA
tataaactgtaaagtactat

SEQ ID NO: 183488 - DNA, 20 bp, synthetic construct
  source 1..20: mol_type = other DNA
atataaactgtaaagtacta

SEQ ID NO: 183489 - DNA, 20 bp, synthetic construct
  source 1..20: mol_type = other DNA
catataaactgtaaagtact

SEQ ID NO: 183490 - DNA, 20 bp, synthetic construct
  source 1..20: mol_type = other DNA
tcatataaactgtaaagtac

SEQ ID NO: 183491 - DNA, 20 bp, synthetic construct
  source 1..20: mol_type = other DNA
atcatataaactgtaaagta

SEQ ID NO: 183492 - DNA, 20 bp, synthetic construct
  source 1..20: mol_type = other DNA
gatcatataaactgtaaagt

SEQ ID NO: 183493 - DNA, 20 bp, synthetic construct
  source 1..20: mol_type = other DNA
agatcatataaactgtaaag

SEQ ID NO: 183494 - DNA, 20 bp, synthetic construct
  source 1..20: mol_type = other DNA
gagatcatataaactgtaaa

SEQ ID NO: 183495 - DNA, 20 bp, synthetic construct
  source 1..20: mol_type = other DNA
tgagatcatataaactgtaa

SEQ ID NO: 183496 - DNA, 20 bp, synthetic construct
  source 1..20: mol_type = other DNA
atgagatcatataaactgta

SEQ ID NO: 183497 - DNA, 20 bp, synthetic construct
  source 1..20: mol_type = other DNA
aatgagatcatataaactgt

SEQ ID NO: 183498 - DNA, 20 bp, synthetic construct
  source 1..20: mol_type = other DNA
aaatgagatcatataaactg

SEQ ID NO: 183499 - DNA, 20 bp, synthetic construct
  source 1..20: mol_type = other DNA
caaatgagatcatataaact

SEQ ID NO: 183500 - DNA, 20 bp, synthetic construct
  source 1..20: mol_type = other DNA
tcaaatgagatcatataaac

SEQ ID NO: 183501 - DNA, 20 bp, synthetic construct
  source 1..20: mol_type = other DNA
atcaaatgagatcatataaa

SEQ ID NO: 183502 - DNA, 20 bp, synthetic construct
  source 1..20: mol_type = other DNA
aatcaaatgagatcatataa

SEQ ID NO: 183503 - DNA, 20 bp, synthetic construct
  source 1..20: mol_type = other DNA
gaatcaaatgagatcatata

SEQ ID NO: 183504 - DNA, 20 bp, synthetic construct
  source 1..20: mol_type = other DNA
agaatcaaatgagatcatat

SEQ ID NO: 183505 - DNA, 20 bp, synthetic construct
  source 1..20: mol_type = other DNA
aagaatcaaatgagatcata

SEQ ID NO: 183506 - DNA, 20 bp, synthetic construct
  source 1..20: mol_type = other DNA
taagaatcaaatgagatcat

SEQ ID NO: 183507 - DNA, 20 bp, synthetic construct
  source 1..20: mol_type = other DNA
ttaagaatcaaatgagatca

SEQ ID NO: 183508 - DNA, 20 bp, synthetic construct
  source 1..20: mol_type = other DNA
gttaagaatcaaatgagatc

SEQ ID NO: 183509 - DNA, 20 bp, synthetic construct
  source 1..20: mol_type = other DNA
tgttaagaatcaaatgagat

SEQ ID NO: 183510 - DNA, 20 bp, synthetic construct
  source 1..20: mol_type = other DNA
atgttaagaatcaaatgaga

SEQ ID NO: 183511 - DNA, 20 bp, synthetic construct
  source 1..20: mol_type = other DNA
catgttaagaatcaaatgag

SEQ ID NO: 183512 - DNA, 20 bp, synthetic construct
  source 1..20: mol_type = other DNA
tcatgttaagaatcaaatga

SEQ ID NO: 183513 - DNA, 20 bp, synthetic construct
  source 1..20: mol_type = other DNA
ctcatgttaagaatcaaatg

SEQ ID NO: 183514 - DNA, 20 bp, synthetic construct
  source 1..20: mol_type = other DNA
gctcatgttaagaatcaaat

SEQ ID NO: 183515 - DNA, 20 bp, synthetic construct
  source 1..20: mol_type = other DNA
ggctcatgttaagaatcaaa

SEQ ID NO: 183516 - DNA, 20 bp, synthetic construct
  source 1..20: mol_type = other DNA
aggctcatgttaagaatcaa

SEQ ID NO: 183517 - DNA, 20 bp, synthetic construct
  source 1..20: mol_type = other DNA
caggctcatgttaagaatca

SEQ ID NO: 183518 - DNA, 20 bp, synthetic construct
  source 1..20: mol_type = other DNA
acaggctcatgttaagaatc

SEQ ID NO: 183519 - DNA, 20 bp, synthetic construct
  source 1..20: mol_type = other DNA
cacaggctcatgttaagaat

SEQ ID NO: 183520 - DNA, 20 bp, synthetic construct
  source 1..20: mol_type = other DNA
tcacaggctcatgttaagaa

SEQ ID NO: 183521 - DNA, 20 bp, synthetic construct
  source 1..20: mol_type = other DNA
ctcacaggctcatgttaaga

SEQ ID NO: 183522 - DNA, 20 bp, synthetic construct
  source 1..20: mol_type = other DNA
actcacaggctcatgttaag

SEQ ID NO: 183523 - DNA, 20 bp, synthetic construct
  source 1..20: mol_type = other DNA
cactcacaggctcatgttaa

SEQ ID NO: 183524 - DNA, 20 bp, synthetic construct
  source 1..20: mol_type = other DNA
tcactcacaggctcatgtta

SEQ ID NO: 183525 - DNA, 20 bp, synthetic construct
  source 1..20: mol_type = other DNA
ttcactcacaggctcatgtt

SEQ ID NO: 183526 - DNA, 20 bp, synthetic construct
  source 1..20: mol_type = other DNA
tttcactcacaggctcatgt

SEQ ID NO: 183527 - DNA, 20 bp, synthetic construct
  source 1..20: mol_type = other DNA
ttttcactcacaggctcatg

SEQ ID NO: 183528 - DNA, 20 bp, synthetic construct
  source 1..20: mol_type = other DNA
tttttcactcacaggctcat

SEQ ID NO: 183529 - DNA, 20 bp, synthetic construct
  source 1..20: mol_type = other DNA
atttttcactcacaggctca

SEQ ID NO: 183530 - DNA, 20 bp, synthetic construct
  source 1..20: mol_type = other DNA
aatttttcactcacaggctc

SEQ ID NO: 183531 - DNA, 20 bp, synthetic construct
  source 1..20: mol_type = other DNA
gaatttttcactcacaggct

SEQ ID NO: 183532 - DNA, 20 bp, synthetic construct
  source 1..20: mol_type = other DNA
ggaatttttcactcacaggc

SEQ ID NO: 183533 - DNA, 20 bp, synthetic construct
  source 1..20: mol_type = other DNA
aggaatttttcactcacagg

SEQ ID NO: 183534 - DNA, 20 bp, synthetic construct
  source 1..20: mol_type = other DNA
aaggaatttttcactcacag

SEQ ID NO: 183535 - DNA, 20 bp, synthetic construct
  source 1..20: mol_type = other DNA
gaaggaatttttcactcaca

SEQ ID NO: 183536 - DNA, 20 bp, synthetic construct
  source 1..20: mol_type = other DNA
ggaaggaatttttcactcac

SEQ ID NO: 183537 - DNA, 20 bp, synthetic construct
  source 1..20: mol_type = other DNA
gggaaggaatttttcactca

SEQ ID NO: 183538 - DNA, 20 bp, synthetic construct
  source 1..20: mol_type = other DNA
ggggaaggaatttttcactc

SEQ ID NO: 183539 - DNA, 20 bp, synthetic construct
  source 1..20: mol_type = other DNA
aggggaaggaatttttcact

SEQ ID NO: 183540 - DNA, 20 bp, synthetic construct
  source 1..20: mol_type = other DNA
gaggggaaggaatttttcac

SEQ ID NO: 183541 - DNA, 20 bp, synthetic construct
  source 1..20: mol_type = other DNA
agaggggaaggaatttttca

SEQ ID NO: 183542 - DNA, 20 bp, synthetic construct
  source 1..20: mol_type = other DNA
aagaggggaaggaatttttc

SEQ ID NO: 183543 - DNA, 20 bp, synthetic construct
  source 1..20: mol_type = other DNA
gaagaggggaaggaattttt

SEQ ID NO: 183544 - DNA, 20 bp, synthetic construct
  source 1..20: mol_type = other DNA
agaagaggggaaggaatttt

SEQ ID NO: 183545 - DNA, 20 bp, synthetic construct
  source 1..20: mol_type = other DNA
tagaagaggggaaggaattt

SEQ ID NO: 183546 - DNA, 20 bp, synthetic construct
  source 1..20: mol_type = other DNA
gtagaagaggggaaggaatt

SEQ ID NO: 183547 - DNA, 20 bp, synthetic construct
  source 1..20: mol_type = other DNA
tgtagaagaggggaaggaat

SEQ ID NO: 183548 - DNA, 20 bp, synthetic construct
  source 1..20: mol_type = other DNA
ctgtagaagaggggaaggaa

SEQ ID NO: 183549 - DNA, 20 bp, synthetic construct
  source 1..20: mol_type = other DNA
tctgtagaagaggggaagga

SEQ ID NO: 183550 - DNA, 20 bp, synthetic construct
  source 1..20: mol_type = other DNA
atctgtagaagaggggaagg

SEQ ID NO: 183551 - DNA, 20 bp, synthetic construct
  source 1..20: mol_type = other DNA
aatctgtagaagaggggaag

SEQ ID NO: 183552 - DNA, 20 bp, synthetic construct
  source 1..20: mol_type = other DNA
taatctgtagaagaggggaa

SEQ ID NO: 183553 - DNA, 20 bp, synthetic construct
  source 1..20: mol_type = other DNA
ctaatctgtagaagagggga

SEQ ID NO: 183554 - DNA, 20 bp, synthetic construct
  source 1..20: mol_type = other DNA
cctaatctgtagaagagggg

SEQ ID NO: 183555 - DNA, 20 bp, synthetic construct
  source 1..20: mol_type = other DNA
tcctaatctgtagaagaggg

SEQ ID NO: 183556 - DNA, 20 bp, synthetic construct
  source 1..20: mol_type = other DNA
gtcctaatctgtagaagagg

SEQ ID NO: 183557 - DNA, 20 bp, synthetic construct
  source 1..20: mol_type = other DNA
cgtcctaatctgtagaagag

SEQ ID NO: 183558 - DNA, 20 bp, synthetic construct
  source 1..20: mol_type = other DNA
acgtcctaatctgtagaaga

SEQ ID NO: 183559 - DNA, 20 bp, synthetic construct
  source 1..20: mol_type = other DNA
aacgtcctaatctgtagaag

SEQ ID NO: 183560 - DNA, 20 bp, synthetic construct
  source 1..20: mol_type = other DNA
caacgtcctaatctgtagaa

SEQ ID NO: 183561 - DNA, 20 bp, synthetic construct
  source 1..20: mol_type = other DNA
tcaacgtcctaatctgtaga

SEQ ID NO: 183562 - DNA, 20 bp, synthetic construct
  source 1..20: mol_type = other DNA
ctcaacgtcctaatctgtag

SEQ ID NO: 183563 - DNA, 20 bp, synthetic construct
  source 1..20: mol_type = other DNA
tctcaacgtcctaatctgta

SEQ ID NO: 183564 - DNA, 20 bp, synthetic construct
  source 1..20: mol_type = other DNA
atctcaacgtcctaatctgt

SEQ ID NO: 183565 - DNA, 20 bp, synthetic construct
  source 1..20: mol_type = other DNA
aatctcaacgtcctaatctg

SEQ ID NO: 183566 - DNA, 20 bp, synthetic construct
  source 1..20: mol_type = other DNA
gaatctcaacgtcctaatct

SEQ ID NO: 183567 - DNA, 20 bp, synthetic construct
  source 1..20: mol_type = other DNA
tgaatctcaacgtcctaatc

SEQ ID NO: 183568 - DNA, 20 bp, synthetic construct
  source 1..20: mol_type = other DNA
ctgaatctcaacgtcctaat

SEQ ID NO: 183569 - DNA, 20 bp, synthetic construct
  source 1..20: mol_type = other DNA
cctgaatctcaacgtcctaa

SEQ ID NO: 183570 - DNA, 20 bp, synthetic construct
  source 1..20: mol_type = other DNA
ccctgaatctcaacgtccta

SEQ ID NO: 183571 - DNA, 20 bp, synthetic construct
  source 1..20: mol_type = other DNA
tccctgaatctcaacgtcct

SEQ ID NO: 183572 - DNA, 20 bp, synthetic construct
  source 1..20: mol_type = other DNA
ctccctgaatctcaacgtcc

SEQ ID NO: 183573 - DNA, 20 bp, synthetic construct
  source 1..20: mol_type = other DNA
cctccctgaatctcaacgtc

SEQ ID NO: 183574 - DNA, 20 bp, synthetic construct
  source 1..20: mol_type = other DNA
acctccctgaatctcaacgt

SEQ ID NO: 183575 - DNA, 20 bp, synthetic construct
  source 1..20: mol_type = other DNA
aacctccctgaatctcaacg

SEQ ID NO: 183576 - DNA, 20 bp, synthetic construct
  source 1..20: mol_type = other DNA
gaacctccctgaatctcaac

SEQ ID NO: 183577 - DNA, 20 bp, synthetic construct
  source 1..20: mol_type = other DNA
tgaacctccctgaatctcaa

SEQ ID NO: 183578 - DNA, 20 bp, synthetic construct
  source 1..20: mol_type = other DNA
ctgaacctccctgaatctca

SEQ ID NO: 183579 - DNA, 20 bp, synthetic construct
  source 1..20: mol_type = other DNA
tctgaacctccctgaatctc

SEQ ID NO: 183580 - DNA, 20 bp, synthetic construct
  source 1..20: mol_type = other DNA
ctctgaacctccctgaatct

SEQ ID NO: 183581 - DNA, 20 bp, synthetic construct
  source 1..20: mol_type = other DNA
cctctgaacctccctgaatc

SEQ ID NO: 183582 - DNA, 20 bp, synthetic construct
  source 1..20: mol_type = other DNA
ccctctgaacctccctgaat

SEQ ID NO: 183583 - DNA, 20 bp, synthetic construct
  source 1..20: mol_type = other DNA
tccctctgaacctccctgaa

SEQ ID NO: 183584 - DNA, 20 bp, synthetic construct
  source 1..20: mol_type = other DNA
atccctctgaacctccctga

SEQ ID NO: 183585 - DNA, 20 bp, synthetic construct
  source 1..20: mol_type = other DNA
aatccctctgaacctccctg

SEQ ID NO: 183586 - DNA, 20 bp, synthetic construct
  source 1..20: mol_type = other DNA
gaatccctctgaacctccct

SEQ ID NO: 183587 - DNA, 20 bp, synthetic construct
  source 1..20: mol_type = other DNA
tgaatccctctgaacctccc

SEQ ID NO: 183588 - DNA, 20 bp, synthetic construct
  source 1..20: mol_type = other DNA
ctgaatccctctgaacctcc

SEQ ID NO: 183589 - DNA, 20 bp, synthetic construct
  source 1..20: mol_type = other DNA
cctgaatccctctgaacctc

SEQ ID NO: 183590 - DNA, 20 bp, synthetic construct
  source 1..20: mol_type = other DNA
ccctgaatccctctgaacct

SEQ ID NO: 183591 - DNA, 20 bp, synthetic construct
  source 1..20: mol_type = other DNA
tccctgaatccctctgaacc

SEQ ID NO: 183592 - DNA, 20 bp, synthetic construct
  source 1..20: mol_type = other DNA
ttccctgaatccctctgaac

SEQ ID NO: 183593 - DNA, 20 bp, synthetic construct
  source 1..20: mol_type = other DNA
cttccctgaatccctctgaa

SEQ ID NO: 183594 - DNA, 20 bp, synthetic construct
  source 1..20: mol_type = other DNA
acttccctgaatccctctga

SEQ ID NO: 183595 - DNA, 20 bp, synthetic construct
  source 1..20: mol_type = other DNA
gacttccctgaatccctctg

SEQ ID NO: 183596 - DNA, 20 bp, synthetic construct
  source 1..20: mol_type = other DNA
tgacttccctgaatccctct

SEQ ID NO: 183597 - DNA, 20 bp, synthetic construct
  source 1..20: mol_type = other DNA
ttgacttccctgaatccctc

SEQ ID NO: 183598 - DNA, 20 bp, synthetic construct
  source 1..20: mol_type = other DNA
cttgacttccctgaatccct

SEQ ID NO: 183599 - DNA, 20 bp, synthetic construct
  source 1..20: mol_type = other DNA
acttgacttccctgaatccc

SEQ ID NO: 183600 - DNA, 20 bp, synthetic construct
  source 1..20: mol_type = other DNA
cacttgacttccctgaatcc

SEQ ID NO: 183601 - DNA, 20 bp, synthetic construct
  source 1..20: mol_type = other DNA
ccacttgacttccctgaatc

SEQ ID NO: 183602 - DNA, 20 bp, synthetic construct
  source 1..20: mol_type = other DNA
gccacttgacttccctgaat

SEQ ID NO: 183603 - DNA, 20 bp, synthetic construct
  source 1..20: mol_type = other DNA
tgccacttgacttccctgaa

SEQ ID NO: 183604 - DNA, 20 bp, synthetic construct
  source 1..20: mol_type = other DNA
gtgccacttgacttccctga

SEQ ID NO: 183605 - DNA, 20 bp, synthetic construct
  source 1..20: mol_type = other DNA
ggtgccacttgacttccctg

SEQ ID NO: 183606 - DNA, 20 bp, synthetic construct
  source 1..20: mol_type = other DNA
aggtgccacttgacttccct

SEQ ID NO: 183607 - DNA, 20 bp, synthetic construct
  source 1..20: mol_type = other DNA
caggtgccacttgacttccc

SEQ ID NO: 183608 - DNA, 20 bp, synthetic construct
  source 1..20: mol_type = other DNA
ccaggtgccacttgacttcc

SEQ ID NO: 183609 - DNA, 20 bp, synthetic construct
  source 1..20: mol_type = other DNA
tccaggtgccacttgacttc

SEQ ID NO: 183610 - DNA, 20 bp, synthetic construct
  source 1..20: mol_type = other DNA
ctccaggtgccacttgactt

SEQ ID NO: 183611 - DNA, 20 bp, synthetic construct
  source 1..20: mol_type = other DNA
actccaggtgccacttgact

SEQ ID NO: 183612 - DNA, 20 bp, synthetic construct
  source 1..20: mol_type = other DNA
gactccaggtgccacttgac

SEQ ID NO: 183613 - DNA, 20 bp, synthetic construct
  source 1..20: mol_type = other DNA
ggactccaggtgccacttga

SEQ ID NO: 183614 - DNA, 20 bp, synthetic construct
  source 1..20: mol_type = other DNA
gggactccaggtgccacttg

SEQ ID NO: 183615 - DNA, 20 bp, synthetic construct
  source 1..20: mol_type = other DNA
cgggactccaggtgccactt

SEQ ID NO: 183616 - DNA, 20 bp, synthetic construct
  source 1..20: mol_type = other DNA
acgggactccaggtgccact

SEQ ID NO: 183617 - DNA, 20 bp, synthetic construct
  source 1..20: mol_type = other DNA
cacgggactccaggtgccac

SEQ ID NO: 183618 - DNA, 20 bp, synthetic construct
  source 1..20: mol_type = other DNA
ccacgggactccaggtgcca

SEQ ID NO: 183619 - DNA, 20 bp, synthetic construct
  source 1..20: mol_type = other DNA
gccacgggactccaggtgcc

SEQ ID NO: 183620 - DNA, 20 bp, synthetic construct
  source 1..20: mol_type = other DNA
agccacgggactccaggtgc

SEQ ID NO: 183621 - DNA, 20 bp, synthetic construct
  source 1..20: mol_type = other DNA
tagccacgggactccaggtg

SEQ ID NO: 183622 - DNA, 20 bp, synthetic construct
  source 1..20: mol_type = other DNA
ttagccacgggactccaggt

SEQ ID NO: 183623 - DNA, 20 bp, synthetic construct
  source 1..20: mol_type = other DNA
attagccacgggactccagg

SEQ ID NO: 183624 - DNA, 20 bp, synthetic construct
  source 1..20: mol_type = other DNA
aattagccacgggactccag

SEQ ID NO: 183625 - DNA, 20 bp, synthetic construct
  source 1..20: mol_type = other DNA
aaattagccacgggactcca

SEQ ID NO: 183626 - DNA, 20 bp, synthetic construct
  source 1..20: mol_type = other DNA
caaattagccacgggactcc

SEQ ID NO: 183627 - DNA, 20 bp, synthetic construct
  source 1..20: mol_type = other DNA
tcaaattagccacgggactc

SEQ ID NO: 183628 - DNA, 20 bp, synthetic construct
  source 1..20: mol_type = other DNA
ctcaaattagccacgggact

SEQ ID NO: 183629 - DNA, 20 bp, synthetic construct
  source 1..20: mol_type = other DNA
cctcaaattagccacgggac

SEQ ID NO: 183630 - DNA, 20 bp, synthetic construct
  source 1..20: mol_type = other DNA
gcctcaaattagccacggga

SEQ ID NO: 183631 - DNA, 20 bp, synthetic construct
  source 1..20: mol_type = other DNA
ggcctcaaattagccacggg

SEQ ID NO: 183632 - DNA, 20 bp, synthetic construct
  source 1..20: mol_type = other DNA
cggcctcaaattagccacgg

SEQ ID NO: 183633 - DNA, 20 bp, synthetic construct
  source 1..20: mol_type = other DNA
ccggcctcaaattagccacg

SEQ ID NO: 183634 - DNA, 20 bp, synthetic construct
  source 1..20: mol_type = other DNA
accggcctcaaattagccac

SEQ ID NO: 183635 - DNA, 20 bp, synthetic construct
  source 1..20: mol_type = other DNA
taccggcctcaaattagcca

SEQ ID NO: 183636 - DNA, 20 bp, synthetic construct
  source 1..20: mol_type = other DNA
ctaccggcctcaaattagcc

SEQ ID NO: 183637 - DNA, 20 bp, synthetic construct
  source 1..20: mol_type = other DNA
cctaccggcctcaaattagc

SEQ ID NO: 183638 - DNA, 20 bp, synthetic construct
  source 1..20: mol_type = other DNA
ccctaccggcctcaaattag

SEQ ID NO: 183639 - DNA, 20 bp, synthetic construct
  source 1..20: mol_type = other DNA
cccctaccggcctcaaatta

SEQ ID NO: 183640 - DNA, 20 bp, synthetic construct
  source 1..20: mol_type = other DNA
tcccctaccggcctcaaatt

SEQ ID NO: 183641 - DNA, 20 bp, synthetic construct
  source 1..20: mol_type = other DNA
atcccctaccggcctcaaat

SEQ ID NO: 183642 - DNA, 20 bp, synthetic construct
  source 1..20: mol_type = other DNA
aatcccctaccggcctcaaa

SEQ ID NO: 183643 - DNA, 20 bp, synthetic construct
  source 1..20: mol_type = other DNA
gaatcccctaccggcctcaa

SEQ ID NO: 183644 - DNA, 20 bp, synthetic construct
  source 1..20: mol_type = other DNA
cgaatcccctaccggcctca

SEQ ID NO: 183645 - DNA, 20 bp, synthetic construct
  source 1..20: mol_type = other DNA
tcgaatcccctaccggcctc

SEQ ID NO: 183646 - DNA, 20 bp, synthetic construct
  source 1..20: mol_type = other DNA
ttcgaatcccctaccggcct

SEQ ID NO: 183647 - DNA, 20 bp, synthetic construct
  source 1..20: mol_type = other DNA
gttcgaatcccctaccggcc

SEQ ID NO: 183648 - DNA, 20 bp, synthetic construct
  source 1..20: mol_type = other DNA
ggttcgaatcccctaccggc

SEQ ID NO: 183649 - DNA, 20 bp, synthetic construct
  source 1..20: mol_type = other DNA
gggttcgaatcccctaccgg

SEQ ID NO: 183650 - DNA, 20 bp, synthetic construct
  source 1..20: mol_type = other DNA
tgggttcgaatcccctaccg

SEQ ID NO: 183651 - DNA, 20 bp, synthetic construct
  source 1..20: mol_type = other DNA
ctgggttcgaatcccctacc

SEQ ID NO: 183652 - DNA, 20 bp, synthetic construct
  source 1..20: mol_type = other DNA
cctgggttcgaatcccctac

SEQ ID NO: 183653 - DNA, 20 bp, synthetic construct
  source 1..20: mol_type = other DNA
tcctgggttcgaatccccta

SEQ ID NO: 183654 - DNA, 20 bp, synthetic construct
  source 1..20: mol_type = other DNA
atcctgggttcgaatcccct

SEQ ID NO: 183655 - DNA, 20 bp, synthetic construct
  source 1..20: mol_type = other DNA
aatcctgggttcgaatcccc

SEQ ID NO: 183656 - DNA, 20 bp, synthetic construct
  source 1..20: mol_type = other DNA
aaatcctgggttcgaatccc

SEQ ID NO: 183657 - DNA, 20 bp, synthetic construct
  source 1..20: mol_type = other DNA
caaatcctgggttcgaatcc

SEQ ID NO: 183658 - DNA, 20 bp, synthetic construct
  source 1..20: mol_type = other DNA
acaaatcctgggttcgaatc

SEQ ID NO: 183659 - DNA, 20 bp, synthetic construct
  source 1..20: mol_type = other DNA
cacaaatcctgggttcgaat

SEQ ID NO: 183660 - DNA, 20 bp, synthetic construct
  source 1..20: mol_type = other DNA
gcacaaatcctgggttcgaa

SEQ ID NO: 183661 - DNA, 20 bp, synthetic construct
  source 1..20: mol_type = other DNA
agcacaaatcctgggttcga

SEQ ID NO: 183662 - DNA, 20 bp, synthetic construct
  source 1..20: mol_type = other DNA
aagcacaaatcctgggttcg

SEQ ID NO: 183663 - DNA, 20 bp, synthetic construct
  source 1..20: mol_type = other DNA
gaagcacaaatcctgggttc

SEQ ID NO: 183664 - DNA, 20 bp, synthetic construct
  source 1..20: mol_type = other DNA
agaagcacaaatcctgggtt

SEQ ID NO: 183665 - DNA, 20 bp, synthetic construct
  source 1..20: mol_type = other DNA
aagaagcacaaatcctgggt

SEQ ID NO: 183666 - DNA, 20 bp, synthetic construct
  source 1..20: mol_type = other DNA
taagaagcacaaatcctggg

SEQ ID NO: 183667 - DNA, 20 bp, synthetic construct
  source 1..20: mol_type = other DNA
ataagaagcacaaatcctgg

SEQ ID NO: 183668 - DNA, 20 bp, synthetic construct
  source 1..20: mol_type = other DNA
cataagaagcacaaatcctg

SEQ ID NO: 183669 - DNA, 20 bp, synthetic construct
  source 1..20: mol_type = other DNA
gcataagaagcacaaatcct

SEQ ID NO: 183670 - DNA, 20 bp, synthetic construct
  source 1..20: mol_type = other DNA
ggcataagaagcacaaatcc

SEQ ID NO: 183671 - DNA, 20 bp, synthetic construct
  source 1..20: mol_type = other DNA
aggcataagaagcacaaatc

SEQ ID NO: 183672 - DNA, 20 bp, synthetic construct
  source 1..20: mol_type = other DNA
caggcataagaagcacaaat

SEQ ID NO: 183673 - DNA, 20 bp, synthetic construct
  source 1..20: mol_type = other DNA
ccaggcataagaagcacaaa

SEQ ID NO: 183674 - DNA, 20 bp, synthetic construct
  source 1..20: mol_type = other DNA
cccaggcataagaagcacaa

SEQ ID NO: 183675 - DNA, 20 bp, synthetic construct
  source 1..20: mol_type = other DNA
gcccaggcataagaagcaca

SEQ ID NO: 183676 - DNA, 20 bp, synthetic construct
  source 1..20: mol_type = other DNA
agcccaggcataagaagcac

SEQ ID NO: 183677 - DNA, 20 bp, synthetic construct
  source 1..20: mol_type = other DNA
aagcccaggcataagaagca

SEQ ID NO: 183678 - DNA, 20 bp, synthetic construct
  source 1..20: mol_type = other DNA
gaagcccaggcataagaagc

SEQ ID NO: 183679 - DNA, 20 bp, synthetic construct
  source 1..20: mol_type = other DNA
agaagcccaggcataagaag

SEQ ID NO: 183680 - DNA, 20 bp, synthetic construct
  source 1..20: mol_type = other DNA
cagaagcccaggcataagaa

SEQ ID NO: 183681 - DNA, 20 bp, synthetic construct
  source 1..20: mol_type = other DNA
gcagaagcccaggcataaga

SEQ ID NO: 183682 - DNA, 20 bp, synthetic construct
  source 1..20: mol_type = other DNA
agcagaagcccaggcataag

SEQ ID NO: 183683 - DNA, 20 bp, synthetic construct
  source 1..20: mol_type = other DNA
gagcagaagcccaggcataa

SEQ ID NO: 183684 - DNA, 20 bp, synthetic construct
  source 1..20: mol_type = other DNA
ggagcagaagcccaggcata

SEQ ID NO: 183685 - DNA, 20 bp, synthetic construct
  source 1..20: mol_type = other DNA
gggagcagaagcccaggcat

SEQ ID NO: 183686 - DNA, 20 bp, synthetic construct
  source 1..20: mol_type = other DNA
agggagcagaagcccaggca

SEQ ID NO: 183687 - DNA, 20 bp, synthetic construct
  source 1..20: mol_type = other DNA
cagggagcagaagcccaggc

SEQ ID NO: 183688 - DNA, 20 bp, synthetic construct
  source 1..20: mol_type = other DNA
ccagggagcagaagcccagg

SEQ ID NO: 183689 - DNA, 20 bp, synthetic construct
  source 1..20: mol_type = other DNA
cccagggagcagaagcccag

SEQ ID NO: 183690 - DNA, 20 bp, synthetic construct
  source 1..20: mol_type = other DNA
ccccagggagcagaagccca

SEQ ID NO: 183691 - DNA, 20 bp, synthetic construct
  source 1..20: mol_type = other DNA
gccccagggagcagaagccc

SEQ ID NO: 183692 - DNA, 20 bp, synthetic construct
  source 1..20: mol_type = other DNA
tgccccagggagcagaagcc

SEQ ID NO: 183693 - DNA, 20 bp, synthetic construct
  source 1..20: mol_type = other DNA
atgccccagggagcagaagc

SEQ ID NO: 183694 - DNA, 20 bp, synthetic construct
  source 1..20: mol_type = other DNA
catgccccagggagcagaag

SEQ ID NO: 183695 - DNA, 20 bp, synthetic construct
  source 1..20: mol_type = other DNA
ccatgccccagggagcagaa

SEQ ID NO: 183696 - DNA, 20 bp, synthetic construct
  source 1..20: mol_type = other DNA
accatgccccagggagcaga

SEQ ID NO: 183697 - DNA, 20 bp, synthetic construct
  source 1..20: mol_type = other DNA
gaccatgccccagggagcag

SEQ ID NO: 183698 - DNA, 20 bp, synthetic construct
  source 1..20: mol_type = other DNA
agaccatgccccagggagca

SEQ ID NO: 183699 - DNA, 20 bp, synthetic construct
  source 1..20: mol_type = other DNA
aagaccatgccccagggagc

SEQ ID NO: 183700 - DNA, 20 bp, synthetic construct
  source 1..20: mol_type = other DNA
gaagaccatgccccagggag

SEQ ID NO: 183701 - DNA, 20 bp, synthetic construct
  source 1..20: mol_type = other DNA
ggaagaccatgccccaggga

SEQ ID NO: 183702 - DNA, 20 bp, synthetic construct
  source 1..20: mol_type = other DNA
gggaagaccatgccccaggg

SEQ ID NO: 183703 - DNA, 20 bp, synthetic construct
  source 1..20: mol_type = other DNA
ggggaagaccatgccccagg

SEQ ID NO: 183704 - DNA, 20 bp, synthetic construct
  source 1..20: mol_type = other DNA
gggggaagaccatgccccag

SEQ ID NO: 183705 - DNA, 20 bp, synthetic construct
  source 1..20: mol_type = other DNA
agggggaagaccatgcccca

SEQ ID NO: 183706 - DNA, 20 bp, synthetic construct
  source 1..20: mol_type = other DNA
tagggggaagaccatgcccc

SEQ ID NO: 183707 - DNA, 20 bp, synthetic construct
  source 1..20: mol_type = other DNA
ctagggggaagaccatgccc

SEQ ID NO: 183708 - DNA, 20 bp, synthetic construct
  source 1..20: mol_type = other DNA
gctagggggaagaccatgcc

SEQ ID NO: 183709 - DNA, 20 bp, synthetic construct
  source 1..20: mol_type = other DNA
agctagggggaagaccatgc

SEQ ID NO: 183710 - DNA, 20 bp, synthetic construct
  source 1..20: mol_type = other DNA
aagctagggggaagaccatg

SEQ ID NO: 183711 - DNA, 20 bp, synthetic construct
  source 1..20: mol_type = other DNA
aaagctagggggaagaccat

SEQ ID NO: 183712 - DNA, 20 bp, synthetic construct
  source 1..20: mol_type = other DNA
gaaagctagggggaagacca

SEQ ID NO: 183713 - DNA, 20 bp, synthetic construct
  source 1..20: mol_type = other DNA
ggaaagctagggggaagacc

SEQ ID NO: 183714 - DNA, 20 bp, synthetic construct
  source 1..20: mol_type = other DNA
gggaaagctagggggaagac

SEQ ID NO: 183715 - DNA, 20 bp, synthetic construct
  source 1..20: mol_type = other DNA
tgggaaagctagggggaaga

SEQ ID NO: 183716 - DNA, 20 bp, synthetic construct
  source 1..20: mol_type = other DNA
atgggaaagctagggggaag

SEQ ID NO: 183717 - DNA, 20 bp, synthetic construct
  source 1..20: mol_type = other DNA
aatgggaaagctagggggaa

SEQ ID NO: 183718 - DNA, 20 bp, synthetic construct
  source 1..20: mol_type = other DNA
gaatgggaaagctaggggga

SEQ ID NO: 183719 - DNA, 20 bp, synthetic construct
  source 1..20: mol_type = other DNA
tgaatgggaaagctaggggg

SEQ ID NO: 183720 - DNA, 20 bp, synthetic construct
  source 1..20: mol_type = other DNA
gtgaatgggaaagctagggg

SEQ ID NO: 183721 - DNA, 20 bp, synthetic construct
  source 1..20: mol_type = other DNA
agtgaatgggaaagctaggg

SEQ ID NO: 183722 - DNA, 20 bp, synthetic construct
  source 1..20: mol_type = other DNA
cagtgaatgggaaagctagg

SEQ ID NO: 183723 - DNA, 20 bp, synthetic construct
  source 1..20: mol_type = other DNA
gcagtgaatgggaaagctag

SEQ ID NO: 183724 - DNA, 20 bp, synthetic construct
  source 1..20: mol_type = other DNA
agcagtgaatgggaaagcta

SEQ ID NO: 183725 - DNA, 20 bp, synthetic construct
  source 1..20: mol_type = other DNA
aagcagtgaatgggaaagct

SEQ ID NO: 183726 - DNA, 20 bp, synthetic construct
  source 1..20: mol_type = other DNA
aaagcagtgaatgggaaagc

SEQ ID NO: 183727 - DNA, 20 bp, synthetic construct
  source 1..20: mol_type = other DNA
taaagcagtgaatgggaaag

SEQ ID NO: 183728 - DNA, 20 bp, synthetic construct
  source 1..20: mol_type = other DNA
ctaaagcagtgaatgggaaa

SEQ ID NO: 183729 - DNA, 20 bp, synthetic construct
  source 1..20: mol_type = other DNA
gctaaagcagtgaatgggaa

SEQ ID NO: 183730 - DNA, 20 bp, synthetic construct
  source 1..20: mol_type = other DNA
ggctaaagcagtgaatggga

SEQ ID NO: 183731 - DNA, 20 bp, synthetic construct
  source 1..20: mol_type = other DNA
aggctaaagcagtgaatggg

SEQ ID NO: 183732 - DNA, 20 bp, synthetic construct
  source 1..20: mol_type = other DNA
taggctaaagcagtgaatgg

SEQ ID NO: 183733 - DNA, 20 bp, synthetic construct
  source 1..20: mol_type = other DNA
ctaggctaaagcagtgaatg

SEQ ID NO: 183734 - DNA, 20 bp, synthetic construct
  source 1..20: mol_type = other DNA
cctaggctaaagcagtgaat

SEQ ID NO: 183735 - DNA, 20 bp, synthetic construct
  source 1..20: mol_type = other DNA
ccctaggctaaagcagtgaa

SEQ ID NO: 183736 - DNA, 20 bp, synthetic construct
  source 1..20: mol_type = other DNA
cccctaggctaaagcagtga

SEQ ID NO: 183737 - DNA, 20 bp, synthetic construct
  source 1..20: mol_type = other DNA
acccctaggctaaagcagtg

SEQ ID NO: 183738 - DNA, 20 bp, synthetic construct
  source 1..20: mol_type = other DNA
gacccctaggctaaagcagt

SEQ ID NO: 183739 - DNA, 20 bp, synthetic construct
  source 1..20: mol_type = other DNA
ggacccctaggctaaagcag

SEQ ID NO: 183740 - DNA, 20 bp, synthetic construct
  source 1..20: mol_type = other DNA
aggacccctaggctaaagca

SEQ ID NO: 183741 - DNA, 20 bp, synthetic construct
  source 1..20: mol_type = other DNA
taggacccctaggctaaagc

SEQ ID NO: 183742 - DNA, 20 bp, synthetic construct
  source 1..20: mol_type = other DNA
gtaggacccctaggctaaag

SEQ ID NO: 183743 - DNA, 20 bp, synthetic construct
  source 1..20: mol_type = other DNA
ggtaggacccctaggctaaa

SEQ ID NO: 183744 - DNA, 20 bp, synthetic construct
  source 1..20: mol_type = other DNA
gggtaggacccctaggctaa

SEQ ID NO: 183745 - DNA, 20 bp, synthetic construct
  source 1..20: mol_type = other DNA
agggtaggacccctaggcta

SEQ ID NO: 183746 - DNA, 20 bp, synthetic construct
  source 1..20: mol_type = other DNA
aagggtaggacccctaggct

SEQ ID NO: 183747 - DNA, 20 bp, synthetic construct
  source 1..20: mol_type = other DNA
aaagggtaggacccctaggc

SEQ ID NO: 183748 - DNA, 20 bp, synthetic construct
  source 1..20: mol_type = other DNA
taaagggtaggacccctagg

SEQ ID NO: 183749 - DNA, 20 bp, synthetic construct
  source 1..20: mol_type = other DNA
ataaagggtaggacccctag

SEQ ID NO: 183750 - DNA, 20 bp, synthetic construct
  source 1..20: mol_type = other DNA
aataaagggtaggaccccta

SEQ ID NO: 183751 - DNA, 20 bp, synthetic construct
  source 1..20: mol_type = other DNA
taataaagggtaggacccct

SEQ ID NO: 183752 - DNA, 20 bp, synthetic construct
  source 1..20: mol_type = other DNA
ttaataaagggtaggacccc

SEQ ID NO: 183753 - DNA, 20 bp, synthetic construct
  source 1..20: mol_type = other DNA
tttaataaagggtaggaccc

SEQ ID NO: 183754 - DNA, 20 bp, synthetic construct
  source 1..20: mol_type = other DNA
gtttaataaagggtaggacc

SEQ ID NO: 183755 - DNA, 20 bp, synthetic construct
  source 1..20: mol_type = other DNA
agtttaataaagggtaggac

SEQ ID NO: 183756 - DNA, 20 bp, synthetic construct
  source 1..20: mol_type = other DNA
cagtttaataaagggtagga

SEQ ID NO: 183757 - DNA, 20 bp, synthetic construct
  source 1..20: mol_type = other DNA
gcagtttaataaagggtagg

SEQ ID NO: 183758 - DNA, 20 bp, synthetic construct
  source 1..20: mol_type = other DNA
ggcagtttaataaagggtag

SEQ ID NO: 183759 - DNA, 20 bp, synthetic construct
  source 1..20: mol_type = other DNA
tggcagtttaataaagggta

SEQ ID NO: 183760 - DNA, 20 bp, synthetic construct
  source 1..20: mol_type = other DNA
ctggcagtttaataaagggt

SEQ ID NO: 183761 - DNA, 20 bp, synthetic construct
  source 1..20: mol_type = other DNA
actggcagtttaataaaggg

SEQ ID NO: 183762 - DNA, 20 bp, synthetic construct
  source 1..20: mol_type = other DNA
cactggcagtttaataaagg

SEQ ID NO: 183763 - DNA, 20 bp, synthetic construct
  source 1..20: mol_type = other DNA
gcactggcagtttaataaag

SEQ ID NO: 183764 - DNA, 20 bp, synthetic construct
  source 1..20: mol_type = other DNA
ggcactggcagtttaataaa

SEQ ID NO: 183765 - DNA, 20 bp, synthetic construct
  source 1..20: mol_type = other DNA
aggcactggcagtttaataa

SEQ ID NO: 183766 - DNA, 20 bp, synthetic construct
  source 1..20: mol_type = other DNA
gaggcactggcagtttaata

SEQ ID NO: 183767 - DNA, 20 bp, synthetic construct
  source 1..20: mol_type = other DNA
tgaggcactggcagtttaat

SEQ ID NO: 183768 - DNA, 20 bp, synthetic construct
  source 1..20: mol_type = other DNA
gtgaggcactggcagtttaa

SEQ ID NO: 183769 - DNA, 20 bp, synthetic construct
  source 1..20: mol_type = other DNA
agtgaggcactggcagttta

SEQ ID NO: 183770 - DNA, 20 bp, synthetic construct
  source 1..20: mol_type = other DNA
cagtgaggcactggcagttt

SEQ ID NO: 183771 - DNA, 20 bp, synthetic construct
  source 1..20: mol_type = other DNA
gcagtgaggcactggcagtt

SEQ ID NO: 183772 - DNA, 20 bp, synthetic construct
  source 1..20: mol_type = other DNA
agcagtgaggcactggcagt

SEQ ID NO: 183773 - DNA, 20 bp, synthetic construct
  source 1..20: mol_type = other DNA
aagcagtgaggcactggcag

SEQ ID NO: 183774 - DNA, 20 bp, synthetic construct
  source 1..20: mol_type = other DNA
aaagcagtgaggcactggca

SEQ ID NO: 183775 - DNA, 20 bp, synthetic construct
  source 1..20: mol_type = other DNA
aaaagcagtgaggcactggc

SEQ ID NO: 183776 - DNA, 20 bp, synthetic construct
  source 1..20: mol_type = other DNA
gaaaagcagtgaggcactgg

SEQ ID NO: 183777 - DNA, 20 bp, synthetic construct
  source 1..20: mol_type = other DNA
agaaaagcagtgaggcactg

SEQ ID NO: 183778 - DNA, 20 bp, synthetic construct
  source 1..20: mol_type = other DNA
gagaaaagcagtgaggcact

SEQ ID NO: 183779 - DNA, 20 bp, synthetic construct
  source 1..20: mol_type = other DNA
ggagaaaagcagtgaggcac

SEQ ID NO: 183780 - DNA, 20 bp, synthetic construct
  source 1..20: mol_type = other DNA
gggagaaaagcagtgaggca

SEQ ID NO: 183781 - DNA, 20 bp, synthetic construct
  source 1..20: mol_type = other DNA
ggggagaaaagcagtgaggc

SEQ ID NO: 183782 - DNA, 20 bp, synthetic construct
  source 1..20: mol_type = other DNA
gggggagaaaagcagtgagg

SEQ ID NO: 183783 - DNA, 20 bp, synthetic construct
  source 1..20: mol_type = other DNA
tgggggagaaaagcagtgag

SEQ ID NO: 183784 - DNA, 20 bp, synthetic construct
  source 1..20: mol_type = other DNA
ttgggggagaaaagcagtga

SEQ ID NO: 183785 - DNA, 20 bp, synthetic construct
  source 1..20: mol_type = other DNA
tttgggggagaaaagcagtg

SEQ ID NO: 183786 - DNA, 20 bp, synthetic construct
  source 1..20: mol_type = other DNA
ctttgggggagaaaagcagt

SEQ ID NO: 183787 - DNA, 20 bp, synthetic construct
  source 1..20: mol_type = other DNA
tctttgggggagaaaagcag

SEQ ID NO: 183788 - DNA, 20 bp, synthetic construct
  source 1..20: mol_type = other DNA
gtctttgggggagaaaagca

SEQ ID NO: 183789 - DNA, 20 bp, synthetic construct
  source 1..20: mol_type = other DNA
tgtctttgggggagaaaagc

SEQ ID NO: 183790 - DNA, 20 bp, synthetic construct
  source 1..20: mol_type = other DNA
ttgtctttgggggagaaaag

SEQ ID NO: 183791 - DNA, 20 bp, synthetic construct
  source 1..20: mol_type = other DNA
tttgtctttgggggagaaaa

SEQ ID NO: 183792 - DNA, 20 bp, synthetic construct
  source 1..20: mol_type = other DNA
ttttgtctttgggggagaaa

SEQ ID NO: 183793 - DNA, 20 bp, synthetic construct
  source 1..20: mol_type = other DNA
tttttgtctttgggggagaa

SEQ ID NO: 183794 - DNA, 20 bp, synthetic construct
  source 1..20: mol_type = other DNA
ttttttgtctttgggggaga

SEQ ID NO: 183795 - DNA, 20 bp, synthetic construct
  source 1..20: mol_type = other DNA
tttttttgtctttgggggag

SEQ ID NO: 183796 - DNA, 20 bp, synthetic construct
  source 1..20: mol_type = other DNA
ttttttttgtctttggggga

SEQ ID NO: 183797 - DNA, 20 bp, synthetic construct
  source 1..20: mol_type = other DNA
tttttttttgtctttggggg

SEQ ID NO: 183798 - DNA, 20 bp, synthetic construct
  source 1..20: mol_type = other DNA
ctttttttttgtctttgggg

SEQ ID NO: 183799 - DNA, 20 bp, synthetic construct
  source 1..20: mol_type = other DNA
actttttttttgtctttggg

SEQ ID NO: 183800 - DNA, 20 bp, synthetic construct
  source 1..20: mol_type = other DNA
cactttttttttgtctttgg

SEQ ID NO: 183801 - DNA, 20 bp, synthetic construct
  source 1..20: mol_type = other DNA
acactttttttttgtctttg

SEQ ID NO: 183802 - DNA, 20 bp, synthetic construct
  source 1..20: mol_type = other DNA
aacactttttttttgtcttt

SEQ ID NO: 183803 - DNA, 20 bp, synthetic construct
  source 1..20: mol_type = other DNA
aaacactttttttttgtctt

SEQ ID NO: 183804 - DNA, 20 bp, synthetic construct
  source 1..20: mol_type = other DNA
aaaacactttttttttgtct

SEQ ID NO: 183805 - DNA, 20 bp, synthetic construct
  source 1..20: mol_type = other DNA
aaaaacactttttttttgtc

SEQ ID NO: 183806 - DNA, 20 bp, synthetic construct
  source 1..20: mol_type = other DNA
caaaaacactttttttttgt

SEQ ID NO: 183807 - DNA, 20 bp, synthetic construct
  source 1..20: mol_type = other DNA
gcaaaaacactttttttttg

SEQ ID NO: 183808 - DNA, 20 bp, synthetic construct
  source 1..20: mol_type = other DNA
agcaaaaacacttttttttt

SEQ ID NO: 183809 - DNA, 20 bp, synthetic construct
  source 1..20: mol_type = other DNA
aagcaaaaacactttttttt

SEQ ID NO: 183810 - DNA, 20 bp, synthetic construct
  source 1..20: mol_type = other DNA
aaagcaaaaacacttttttt

SEQ ID NO: 183811 - DNA, 20 bp, synthetic construct
  source 1..20: mol_type = other DNA
aaaagcaaaaacactttttt

SEQ ID NO: 183812 - DNA, 20 bp, synthetic construct
  source 1..20: mol_type = other DNA
caaaagcaaaaacacttttt

SEQ ID NO: 183813 - DNA, 20 bp, synthetic construct
  source 1..20: mol_type = other DNA
acaaaagcaaaaacactttt

SEQ ID NO: 183814 - DNA, 20 bp, synthetic construct
  source 1..20: mol_type = other DNA
aacaaaagcaaaaacacttt

SEQ ID NO: 183815 - DNA, 20 bp, synthetic construct
  source 1..20: mol_type = other DNA
aaacaaaagcaaaaacactt

SEQ ID NO: 183816 - DNA, 20 bp, synthetic construct
  source 1..20: mol_type = other DNA
aaaacaaaagcaaaaacact

SEQ ID NO: 183817 - DNA, 20 bp, synthetic construct
  source 1..20: mol_type = other DNA
caaaacaaaagcaaaaacac

SEQ ID NO: 183818 - DNA, 20 bp, synthetic construct
  source 1..20: mol_type = other DNA
acaaaacaaaagcaaaaaca

SEQ ID NO: 183819 - DNA, 20 bp, synthetic construct
  source 1..20: mol_type = other DNA
aacaaaacaaaagcaaaaac

SEQ ID NO: 183820 - DNA, 20 bp, synthetic construct
  source 1..20: mol_type = other DNA
aaacaaaacaaaagcaaaaa

SEQ ID NO: 183821 - DNA, 20 bp, synthetic construct
  source 1..20: mol_type = other DNA
aaaacaaaacaaaagcaaaa

SEQ ID NO: 183822 - DNA, 20 bp, synthetic construct
  source 1..20: mol_type = other DNA
aaaaacaaaacaaaagcaaa

SEQ ID NO: 183823 - DNA, 20 bp, synthetic construct
  source 1..20: mol_type = other DNA
gaaaaacaaaacaaaagcaa

SEQ ID NO: 183824 - DNA, 20 bp, synthetic construct
  source 1..20: mol_type = other DNA
tgaaaaacaaaacaaaagca

SEQ ID NO: 183825 - DNA, 20 bp, synthetic construct
  source 1..20: mol_type = other DNA
atgaaaaacaaaacaaaagc

SEQ ID NO: 183826 - DNA, 20 bp, synthetic construct
  source 1..20: mol_type = other DNA
catgaaaaacaaaacaaaag

SEQ ID NO: 183827 - DNA, 20 bp, synthetic construct
  source 1..20: mol_type = other DNA
ccatgaaaaacaaaacaaaa

SEQ ID NO: 183828 - DNA, 20 bp, synthetic construct
  source 1..20: mol_type = other DNA
cccatgaaaaacaaaacaaa

SEQ ID NO: 183829 - DNA, 20 bp, synthetic construct
  source 1..20: mol_type = other DNA
gcccatgaaaaacaaaacaa

SEQ ID NO: 183830 - DNA, 20 bp, synthetic construct
  source 1..20: mol_type = other DNA
tgcccatgaaaaacaaaaca

SEQ ID NO: 183831 - DNA, 20 bp, synthetic construct
  source 1..20: mol_type = other DNA
ctgcccatgaaaaacaaaac

SEQ ID NO: 183832 - DNA, 20 bp, synthetic construct
  source 1..20: mol_type = other DNA
tctgcccatgaaaaacaaaa

SEQ ID NO: 183833 - DNA, 20 bp, synthetic construct
  source 1..20: mol_type = other DNA
ctctgcccatgaaaaacaaa

SEQ ID NO: 183834 - DNA, 20 bp, synthetic construct
  source 1..20: mol_type = other DNA
tctctgcccatgaaaaacaa

SEQ ID NO: 183835 - DNA, 20 bp, synthetic construct
  source 1..20: mol_type = other DNA
gtctctgcccatgaaaaaca

SEQ ID NO: 183836 - DNA, 20 bp, synthetic construct
  source 1..20: mol_type = other DNA
ggtctctgcccatgaaaaac

SEQ ID NO: 183837 - DNA, 20 bp, synthetic construct
  source 1..20: mol_type = other DNA
aggtctctgcccatgaaaaa

SEQ ID NO: 183838 - DNA, 20 bp, synthetic construct
  source 1..20: mol_type = other DNA
caggtctctgcccatgaaaa

SEQ ID NO: 183839 - DNA, 20 bp, synthetic construct
  source 1..20: mol_type = other DNA
ccaggtctctgcccatgaaa

SEQ ID NO: 183840 - DNA, 20 bp, synthetic construct
  source 1..20: mol_type = other DNA
tccaggtctctgcccatgaa

SEQ ID NO: 183841 - DNA, 20 bp, synthetic construct
  source 1..20: mol_type = other DNA
ttccaggtctctgcccatga

SEQ ID NO: 183842 - DNA, 20 bp, synthetic construct
  source 1..20: mol_type = other DNA
attccaggtctctgcccatg

SEQ ID NO: 183843 - DNA, 20 bp, synthetic construct
  source 1..20: mol_type = other DNA
aattccaggtctctgcccat

SEQ ID NO: 183844 - DNA, 20 bp, synthetic construct
  source 1..20: mol_type = other DNA
aaattccaggtctctgccca

SEQ ID NO: 183845 - DNA, 20 bp, synthetic construct
  source 1..20: mol_type = other DNA
gaaattccaggtctctgccc

SEQ ID NO: 183846 - DNA, 20 bp, synthetic construct
  source 1..20: mol_type = other DNA
tgaaattccaggtctctgcc

SEQ ID NO: 183847 - DNA, 20 bp, synthetic construct
  source 1..20: mol_type = other DNA
ctgaaattccaggtctctgc

SEQ ID NO: 183848 - DNA, 20 bp, synthetic construct
  source 1..20: mol_type = other DNA
gctgaaattccaggtctctg

SEQ ID NO: 183849 - DNA, 20 bp, synthetic construct
  source 1..20: mol_type = other DNA
agctgaaattccaggtctct

SEQ ID NO: 183850 - DNA, 20 bp, synthetic construct
  source 1..20: mol_type = other DNA
aagctgaaattccaggtctc

SEQ ID NO: 183851 - DNA, 20 bp, synthetic construct
  source 1..20: mol_type = other DNA
caagctgaaattccaggtct

SEQ ID NO: 183852 - DNA, 20 bp, synthetic construct
  source 1..20: mol_type = other DNA
tcaagctgaaattccaggtc

SEQ ID NO: 183853 - DNA, 20 bp, synthetic construct
  source 1..20: mol_type = other DNA
ctcaagctgaaattccaggt

SEQ ID NO: 183854 - DNA, 20 bp, synthetic construct
  source 1..20: mol_type = other DNA
tctcaagctgaaattccagg

SEQ ID NO: 183855 - DNA, 20 bp, synthetic construct
  source 1..20: mol_type = other DNA
ttctcaagctgaaattccag

SEQ ID NO: 183856 - DNA, 20 bp, synthetic construct
  source 1..20: mol_type = other DNA
attctcaagctgaaattcca

SEQ ID NO: 183857 - DNA, 20 bp, synthetic construct
  source 1..20: mol_type = other DNA
aattctcaagctgaaattcc

SEQ ID NO: 183858 - DNA, 20 bp, synthetic construct
  source 1..20: mol_type = other DNA
aaattctcaagctgaaattc

SEQ ID NO: 183859 - DNA, 20 bp, synthetic construct
  source 1..20: mol_type = other DNA
caaattctcaagctgaaatt

SEQ ID NO: 183860 - DNA, 20 bp, synthetic construct
  source 1..20: mol_type = other DNA
acaaattctcaagctgaaat

SEQ ID NO: 183861 - DNA, 20 bp, synthetic construct
  source 1..20: mol_type = other DNA
cacaaattctcaagctgaaa

SEQ ID NO: 183862 - DNA, 20 bp, synthetic construct
  source 1..20: mol_type = other DNA
gcacaaattctcaagctgaa

SEQ ID NO: 183863 - DNA, 20 bp, synthetic construct
  source 1..20: mol_type = other DNA
ggcacaaattctcaagctga

SEQ ID NO: 183864 - DNA, 20 bp, synthetic construct
  source 1..20: mol_type = other DNA
tggcacaaattctcaagctg

SEQ ID NO: 183865 - DNA, 20 bp, synthetic construct
  source 1..20: mol_type = other DNA
atggcacaaattctcaagct

SEQ ID NO: 183866 - DNA, 20 bp, synthetic construct
  source 1..20: mol_type = other DNA
tatggcacaaattctcaagc

SEQ ID NO: 183867 - DNA, 20 bp, synthetic construct
  source 1..20: mol_type = other DNA
atatggcacaaattctcaag

SEQ ID NO: 183868 - DNA, 20 bp, synthetic construct
  source 1..20: mol_type = other DNA
catatggcacaaattctcaa

SEQ ID NO: 183869 - DNA, 20 bp, synthetic construct
  source 1..20: mol_type = other DNA
tcatatggcacaaattctca

SEQ ID NO: 183870 - DNA, 20 bp, synthetic construct
  source 1..20: mol_type = other DNA
atcatatggcacaaattctc

SEQ ID NO: 183871 - DNA, 20 bp, synthetic construct
  source 1..20: mol_type = other DNA
tatcatatggcacaaattct

SEQ ID NO: 183872 - DNA, 20 bp, synthetic construct
  source 1..20: mol_type = other DNA
ttatcatatggcacaaattc

SEQ ID NO: 183873 - DNA, 20 bp, synthetic construct
  source 1..20: mol_type = other DNA
tttatcatatggcacaaatt

SEQ ID NO: 183874 - DNA, 20 bp, synthetic construct
  source 1..20: mol_type = other DNA
atttatcatatggcacaaat

SEQ ID NO: 183875 - DNA, 20 bp, synthetic construct
  source 1..20: mol_type = other DNA
tatttatcatatggcacaaa

SEQ ID NO: 183876 - DNA, 20 bp, synthetic construct
  source 1..20: mol_type = other DNA
ttatttatcatatggcacaa

SEQ ID NO: 183877 - DNA, 20 bp, synthetic construct
  source 1..20: mol_type = other DNA
tttatttatcatatggcaca

SEQ ID NO: 183878 - DNA, 20 bp, synthetic construct
  source 1..20: mol_type = other DNA
atttatttatcatatggcac

SEQ ID NO: 183879 - DNA, 20 bp, synthetic construct
  source 1..20: mol_type = other DNA
gatttatttatcatatggca

SEQ ID NO: 183880 - DNA, 20 bp, synthetic construct
  source 1..20: mol_type = other DNA
tgatttatttatcatatggc

SEQ ID NO: 183881 - DNA, 20 bp, synthetic construct
  source 1..20: mol_type = other DNA
ttgatttatttatcatatgg

SEQ ID NO: 183882 - DNA, 20 bp, synthetic construct
  source 1..20: mol_type = other DNA
gttgatttatttatcatatg

SEQ ID NO: 183883 - DNA, 20 bp, synthetic construct
  source 1..20: mol_type = other DNA
tgttgatttatttatcatat

SEQ ID NO: 183884 - DNA, 20 bp, synthetic construct
  source 1..20: mol_type = other DNA
ctgttgatttatttatcata

SEQ ID NO: 183885 - DNA, 20 bp, synthetic construct
  source 1..20: mol_type = other DNA
tctgttgatttatttatcat

SEQ ID NO: 183886 - DNA, 20 bp, synthetic construct
  source 1..20: mol_type = other DNA
atctgttgatttatttatca

SEQ ID NO: 183887 - DNA, 20 bp, synthetic construct
  source 1..20: mol_type = other DNA
catctgttgatttatttatc

SEQ ID NO: 183888 - DNA, 20 bp, synthetic construct
  source 1..20: mol_type = other DNA
ccatctgttgatttatttat

SEQ ID NO: 183889 - DNA, 20 bp, synthetic construct
  source 1..20: mol_type = other DNA
gccatctgttgatttattta

SEQ ID NO: 183890 - DNA, 20 bp, synthetic construct
  source 1..20: mol_type = other DNA
agccatctgttgatttattt

SEQ ID NO: 183891 - DNA, 20 bp, synthetic construct
  source 1..20: mol_type = other DNA
aagccatctgttgatttatt

SEQ ID NO: 183892 - DNA, 20 bp, synthetic construct
  source 1..20: mol_type = other DNA
aaagccatctgttgatttat

SEQ ID NO: 183893 - DNA, 20 bp, synthetic construct
  source 1..20: mol_type = other DNA
aaaagccatctgttgattta

SEQ ID NO: 183894 - DNA, 20 bp, synthetic construct
  source 1..20: mol_type = other DNA
aaaaagccatctgttgattt

SEQ ID NO: 183895 - DNA, 20 bp, synthetic construct
  source 1..20: mol_type = other DNA
gaaaaagccatctgttgatt

SEQ ID NO: 183896 - DNA, 20 bp, synthetic construct
  source 1..20: mol_type = other DNA
ggaaaaagccatctgttgat

SEQ ID NO: 183897 - DNA, 20 bp, synthetic construct
  source 1..20: mol_type = other DNA
aggaaaaagccatctgttga

SEQ ID NO: 183898 - DNA, 20 bp, synthetic construct
  source 1..20: mol_type = other DNA
aaggaaaaagccatctgttg

SEQ ID NO: 183899 - DNA, 20 bp, synthetic construct
  source 1..20: mol_type = other DNA
taaggaaaaagccatctgtt

SEQ ID NO: 183900 - DNA, 20 bp, synthetic construct
  source 1..20: mol_type = other DNA
ttaaggaaaaagccatctgt

SEQ ID NO: 183901 - DNA, 20 bp, synthetic construct
  source 1..20: mol_type = other DNA
tttaaggaaaaagccatctg

SEQ ID NO: 183902 - DNA, 20 bp, synthetic construct
  source 1..20: mol_type = other DNA
ttttaaggaaaaagccatct

SEQ ID NO: 183903 - DNA, 20 bp, synthetic construct
  source 1..20: mol_type = other DNA
tttttaaggaaaaagccatc

SEQ ID NO: 183904 - DNA, 20 bp, synthetic construct
  source 1..20: mol_type = other DNA
ttttttaaggaaaaagccat

SEQ ID NO: 183905 - DNA, 20 bp, synthetic construct
  source 1..20: mol_type = other DNA
tttttttaaggaaaaagcca

SEQ ID NO: 183906 - DNA, 20 bp, synthetic construct
  source 1..20: mol_type = other DNA
ttttttttaaggaaaaagcc

SEQ ID NO: 183907 - DNA, 20 bp, synthetic construct
  source 1..20: mol_type = other DNA
tttttttttaaggaaaaagc

SEQ ID NO: 183908 - DNA, 20 bp, synthetic construct
  source 1..20: mol_type = other DNA
ttttttttttaaggaaaaag

SEQ ID NO: 183909 - DNA, 20 bp, synthetic construct
  source 1..20: mol_type = other DNA
tttttttttttaaggaaaaa

SEQ ID NO: 183910 - DNA, 20 bp, synthetic construct
  source 1..20: mol_type = other DNA
ttttttttttttaaggaaaa

SEQ ID NO: 183911 - DNA, 20 bp, synthetic construct
  source 1..20: mol_type = other DNA
tttttttttttttaaggaaa

SEQ ID NO: 183912 - DNA, 20 bp, synthetic construct
  source 1..20: mol_type = other DNA
ttttttttttttttaaggaa

SEQ ID NO: 183913 - DNA, 20 bp, synthetic construct
  source 1..20: mol_type = other DNA
tttttttttttttttaagga

SEQ ID NO: 183914 - DNA, 20 bp, synthetic construct
  source 1..20: mol_type = other DNA
ttttttttttttttttaagg

SEQ ID NO: 183915 - DNA, 20 bp, synthetic construct
  source 1..20: mol_type = other DNA
tttttttttttttttttaag

SEQ ID NO: 183916 - DNA, 20 bp, synthetic construct
  source 1..20: mol_type = other DNA
ttttttttttttttttttaa

SEQ ID NO: 183917 - DNA, 20 bp, synthetic construct
  source 1..20: mol_type = other DNA
ttttttttttttttttttta

SEQ ID NO: 183918 - DNA, 20 bp, synthetic construct
  source 1..20: mol_type = other DNA
tttttttttttttttttttt

SEQ ID NO: 183919 - DNA, 20 bp, synthetic construct
  source 1..20: mol_type = other DNA
gttttttttttttttttttt

SEQ ID NO: 183920 - DNA, 20 bp, synthetic construct
  source 1..20: mol_type = other DNA
agtttttttttttttttttt

SEQ ID NO: 183921 - DNA, 20 bp, synthetic construct
  source 1..20: mol_type = other DNA
tagttttttttttttttttt

SEQ ID NO: 183922 - DNA, 20 bp, synthetic construct
  source 1..20: mol_type = other DNA
ttagtttttttttttttttt

SEQ ID NO: 183923 - DNA, 20 bp, synthetic construct
  source 1..20: mol_type = other DNA
cttagttttttttttttttt

SEQ ID NO: 183924 - DNA, 20 bp, synthetic construct
  source 1..20: mol_type = other DNA
tcttagtttttttttttttt

SEQ ID NO: 183925 - DNA, 20 bp, synthetic construct
  source 1..20: mol_type = other DNA
atcttagttttttttttttt

SEQ ID NO: 183926 - DNA, 20 bp, synthetic construct
  source 1..20: mol_type = other DNA
catcttagtttttttttttt

SEQ ID NO: 183927 - DNA, 20 bp, synthetic construct
  source 1..20: mol_type = other DNA
acatcttagttttttttttt

SEQ ID NO: 183928 - DNA, 20 bp, synthetic construct
  source 1..20: mol_type = other DNA
tacatcttagtttttttttt

SEQ ID NO: 183929 - DNA, 20 bp, synthetic construct
  source 1..20: mol_type = other DNA
atacatcttagttttttttt

SEQ ID NO: 183930 - DNA, 20 bp, synthetic construct
  source 1..20: mol_type = other DNA
aatacatcttagtttttttt

SEQ ID NO: 183931 - DNA, 20 bp, synthetic construct
  source 1..20: mol_type = other DNA
aaatacatcttagttttttt

SEQ ID NO: 183932 - DNA, 20 bp, synthetic construct
  source 1..20: mol_type = other DNA
caaatacatcttagtttttt

SEQ ID NO: 183933 - DNA, 20 bp, synthetic construct
  source 1..20: mol_type = other DNA
gcaaatacatcttagttttt

SEQ ID NO: 183934 - DNA, 20 bp, synthetic construct
  source 1..20: mol_type = other DNA
tgcaaatacatcttagtttt

SEQ ID NO: 183935 - DNA, 20 bp, synthetic construct
  source 1..20: mol_type = other DNA
ctgcaaatacatcttagttt

SEQ ID NO: 183936 - DNA, 20 bp, synthetic construct
  source 1..20: mol_type = other DNA
actgcaaatacatcttagtt

SEQ ID NO: 183937 - DNA, 20 bp, synthetic construct
  source 1..20: mol_type = other DNA
cactgcaaatacatcttagt

SEQ ID NO: 183938 - DNA, 20 bp, synthetic construct
  source 1..20: mol_type = other DNA
tcactgcaaatacatcttag

SEQ ID NO: 183939 - DNA, 20 bp, synthetic construct
  source 1..20: mol_type = other DNA
ctcactgcaaatacatctta

SEQ ID NO: 183940 - DNA, 20 bp, synthetic construct
  source 1..20: mol_type = other DNA
cctcactgcaaatacatctt

SEQ ID NO: 183941 - DNA, 20 bp, synthetic construct
  source 1..20: mol_type = other DNA
gcctcactgcaaatacatct

SEQ ID NO: 183942 - DNA, 20 bp, synthetic construct
  source 1..20: mol_type = other DNA
tgcctcactgcaaatacatc

SEQ ID NO: 183943 - DNA, 20 bp, synthetic construct
  source 1..20: mol_type = other DNA
atgcctcactgcaaatacat

SEQ ID NO: 183944 - DNA, 20 bp, synthetic construct
  source 1..20: mol_type = other DNA
tatgcctcactgcaaataca

SEQ ID NO: 183945 - DNA, 20 bp, synthetic construct
  source 1..20: mol_type = other DNA
ttatgcctcactgcaaatac

SEQ ID NO: 183946 - DNA, 20 bp, synthetic construct
  source 1..20: mol_type = other DNA
attatgcctcactgcaaata

SEQ ID NO: 183947 - DNA, 20 bp, synthetic construct
  source 1..20: mol_type = other DNA
aattatgcctcactgcaaat

SEQ ID NO: 183948 - DNA, 20 bp, synthetic construct
  source 1..20: mol_type = other DNA
aaattatgcctcactgcaaa

SEQ ID NO: 183949 - DNA, 20 bp, synthetic construct
  source 1..20: mol_type = other DNA
caaattatgcctcactgcaa

SEQ ID NO: 183950 - DNA, 20 bp, synthetic construct
  source 1..20: mol_type = other DNA
acaaattatgcctcactgca

SEQ ID NO: 183951 - DNA, 20 bp, synthetic construct
  source 1..20: mol_type = other DNA
tacaaattatgcctcactgc

SEQ ID NO: 183952 - DNA, 20 bp, synthetic construct
  source 1..20: mol_type = other DNA
gtacaaattatgcctcactg

SEQ ID NO: 183953 - DNA, 20 bp, synthetic construct
  source 1..20: mol_type = other DNA
ggtacaaattatgcctcact

SEQ ID NO: 183954 - DNA, 20 bp, synthetic construct
  source 1..20: mol_type = other DNA
tggtacaaattatgcctcac

SEQ ID NO: 183955 - DNA, 20 bp, synthetic construct
  source 1..20: mol_type = other DNA
ttggtacaaattatgcctca

SEQ ID NO: 183956 - DNA, 20 bp, synthetic construct
  source 1..20: mol_type = other DNA
tttggtacaaattatgcctc

SEQ ID NO: 183957 - DNA, 20 bp, synthetic construct
  source 1..20: mol_type = other DNA
ttttggtacaaattatgcct

SEQ ID NO: 183958 - DNA, 20 bp, synthetic construct
  source 1..20: mol_type = other DNA
tttttggtacaaattatgcc

SEQ ID NO: 183959 - DNA, 20 bp, synthetic construct
  source 1..20: mol_type = other DNA
ctttttggtacaaattatgc

SEQ ID NO: 183960 - DNA, 20 bp, synthetic construct
  source 1..20: mol_type = other DNA
actttttggtacaaattatg

SEQ ID NO: 183961 - DNA, 20 bp, synthetic construct
  source 1..20: mol_type = other DNA
cactttttggtacaaattat

SEQ ID NO: 183962 - DNA, 20 bp, synthetic construct
  source 1..20: mol_type = other DNA
gcactttttggtacaaatta

SEQ ID NO: 183963 - DNA, 20 bp, synthetic construct
  source 1..20: mol_type = other DNA
agcactttttggtacaaatt

SEQ ID NO: 183964 - DNA, 20 bp, synthetic construct
  source 1..20: mol_type = other DNA
gagcactttttggtacaaat

SEQ ID NO: 183965 - DNA, 20 bp, synthetic construct
  source 1..20: mol_type = other DNA
tgagcactttttggtacaaa

SEQ ID NO: 183966 - DNA, 20 bp, synthetic construct
  source 1..20: mol_type = other DNA
gtgagcactttttggtacaa

SEQ ID NO: 183967 - DNA, 20 bp, synthetic construct
  source 1..20: mol_type = other DNA
ggtgagcactttttggtaca

SEQ ID NO: 183968 - DNA, 20 bp, synthetic construct
  source 1..20: mol_type = other DNA
tggtgagcactttttggtac

SEQ ID NO: 183969 - DNA, 20 bp, synthetic construct
  source 1..20: mol_type = other DNA
gtggtgagcactttttggta

SEQ ID NO: 183970 - DNA, 20 bp, synthetic construct
  source 1..20: mol_type = other DNA
tgtggtgagcactttttggt

SEQ ID NO: 183971 - DNA, 20 bp, synthetic construct
  source 1..20: mol_type = other DNA
gtgtggtgagcactttttgg

SEQ ID NO: 183972 - DNA, 20 bp, synthetic construct
  source 1..20: mol_type = other DNA
agtgtggtgagcactttttg

SEQ ID NO: 183973 - DNA, 20 bp, synthetic construct
  source 1..20: mol_type = other DNA
cagtgtggtgagcacttttt

SEQ ID NO: 183974 - DNA, 20 bp, synthetic construct
  source 1..20: mol_type = other DNA
acagtgtggtgagcactttt

SEQ ID NO: 183975 - DNA, 20 bp, synthetic construct
  source 1..20: mol_type = other DNA
tacagtgtggtgagcacttt

SEQ ID NO: 183976 - DNA, 20 bp, synthetic construct
  source 1..20: mol_type = other DNA
ctacagtgtggtgagcactt

SEQ ID NO: 183977 - DNA, 20 bp, synthetic construct
  source 1..20: mol_type = other DNA
actacagtgtggtgagcact

SEQ ID NO: 183978 - DNA, 20 bp, synthetic construct
  source 1..20: mol_type = other DNA
gactacagtgtggtgagcac

SEQ ID NO: 183979 - DNA, 20 bp, synthetic construct
  source 1..20: mol_type = other DNA
tgactacagtgtggtgagca

SEQ ID NO: 183980 - DNA, 20 bp, synthetic construct
  source 1..20: mol_type = other DNA
atgactacagtgtggtgagc

SEQ ID NO: 183981 - DNA, 20 bp, synthetic construct
  source 1..20: mol_type = other DNA
catgactacagtgtggtgag

SEQ ID NO: 183982 - DNA, 20 bp, synthetic construct
  source 1..20: mol_type = other DNA
ccatgactacagtgtggtga

SEQ ID NO: 183983 - DNA, 20 bp, synthetic construct
  source 1..20: mol_type = other DNA
cccatgactacagtgtggtg

SEQ ID NO: 183984 - DNA, 20 bp, synthetic construct
  source 1..20: mol_type = other DNA
ccccatgactacagtgtggt

SEQ ID NO: 183985 - DNA, 20 bp, synthetic construct
  source 1..20: mol_type = other DNA
cccccatgactacagtgtgg

SEQ ID NO: 183986 - DNA, 20 bp, synthetic construct
  source 1..20: mol_type = other DNA
gcccccatgactacagtgtg

SEQ ID NO: 183987 - DNA, 20 bp, synthetic construct
  source 1..20: mol_type = other DNA
tgcccccatgactacagtgt

SEQ ID NO: 183988 - DNA, 20 bp, synthetic construct
  source 1..20: mol_type = other DNA
ctgcccccatgactacagtg

SEQ ID NO: 183989 - DNA, 20 bp, synthetic construct
  source 1..20: mol_type = other DNA
cctgcccccatgactacagt

SEQ ID NO: 183990 - DNA, 20 bp, synthetic construct
  source 1..20: mol_type = other DNA
tcctgcccccatgactacag

SEQ ID NO: 183991 - DNA, 20 bp, synthetic construct
  source 1..20: mol_type = other DNA
ctcctgcccccatgactaca

SEQ ID NO: 183992 - DNA, 20 bp, synthetic construct
  source 1..20: mol_type = other DNA
cctcctgcccccatgactac

SEQ ID NO: 183993 - DNA, 20 bp, synthetic construct
  source 1..20: mol_type = other DNA
gcctcctgcccccatgacta

SEQ ID NO: 183994 - DNA, 20 bp, synthetic construct
  source 1..20: mol_type = other DNA
tgcctcctgcccccatgact

SEQ ID NO: 183995 - DNA, 20 bp, synthetic construct
  source 1..20: mol_type = other DNA
ctgcctcctgcccccatgac

SEQ ID NO: 183996 - DNA, 20 bp, synthetic construct
  source 1..20: mol_type = other DNA
gctgcctcctgcccccatga

SEQ ID NO: 183997 - DNA, 20 bp, synthetic construct
  source 1..20: mol_type = other DNA
ggctgcctcctgcccccatg

SEQ ID NO: 183998 - DNA, 20 bp, synthetic construct
  source 1..20: mol_type = other DNA
cggctgcctcctgcccccat

SEQ ID NO: 183999 - DNA, 20 bp, synthetic construct
  source 1..20: mol_type = other DNA
gcggctgcctcctgccccca

SEQ ID NO: 184000 - DNA, 20 bp, synthetic construct
  source 1..20: mol_type = other DNA
cgcggctgcctcctgccccc

SEQ ID NO: 184001 - DNA, 20 bp, synthetic construct
  source 1..20: mol_type = other DNA
ccgcggctgcctcctgcccc

SEQ ID NO: 184002 - DNA, 20 bp, synthetic construct
  source 1..20: mol_type = other DNA
cccgcggctgcctcctgccc

SEQ ID NO: 184003 - DNA, 20 bp, synthetic construct
  source 1..20: mol_type = other DNA
acccgcggctgcctcctgcc

SEQ ID NO: 184004 - DNA, 20 bp, synthetic construct
  source 1..20: mol_type = other DNA
cacccgcggctgcctcctgc

SEQ ID NO: 184005 - DNA, 20 bp, synthetic construct
  source 1..20: mol_type = other DNA
tcacccgcggctgcctcctg

SEQ ID NO: 184006 - DNA, 20 bp, synthetic construct
  source 1..20: mol_type = other DNA
ttcacccgcggctgcctcct

SEQ ID NO: 184007 - DNA, 20 bp, synthetic construct
  source 1..20: mol_type = other DNA
cttcacccgcggctgcctcc

SEQ ID NO: 184008 - DNA, 20 bp, synthetic construct
  source 1..20: mol_type = other DNA
ccttcacccgcggctgcctc

SEQ ID NO: 184009 - DNA, 20 bp, synthetic construct
  source 1..20: mol_type = other DNA
cccttcacccgcggctgcct

SEQ ID NO: 184010 - DNA, 20 bp, synthetic construct
  source 1..20: mol_type = other DNA
tcccttcacccgcggctgcc

SEQ ID NO: 184011 - DNA, 20 bp, synthetic construct
  source 1..20: mol_type = other DNA
ctcccttcacccgcggctgc

SEQ ID NO: 184012 - DNA, 20 bp, synthetic construct
  source 1..20: mol_type = other DNA
tctcccttcacccgcggctg

SEQ ID NO: 184013 - DNA, 20 bp, synthetic construct
  source 1..20: mol_type = other DNA
ttctcccttcacccgcggct

SEQ ID NO: 184014 - DNA, 20 bp, synthetic construct
  source 1..20: mol_type = other DNA
tttctcccttcacccgcggc

SEQ ID NO: 184015 - DNA, 20 bp, synthetic construct
  source 1..20: mol_type = other DNA
atttctcccttcacccgcgg

SEQ ID NO: 184016 - DNA, 20 bp, synthetic construct
  source 1..20: mol_type = other DNA
gatttctcccttcacccgcg

SEQ ID NO: 184017 - DNA, 20 bp, synthetic construct
  source 1..20: mol_type = other DNA
agatttctcccttcacccgc

SEQ ID NO: 184018 - DNA, 20 bp, synthetic construct
  source 1..20: mol_type = other DNA
aagatttctcccttcacccg

SEQ ID NO: 184019 - DNA, 20 bp, synthetic construct
  source 1..20: mol_type = other DNA
caagatttctcccttcaccc

SEQ ID NO: 184020 - DNA, 20 bp, synthetic construct
  source 1..20: mol_type = other DNA
ccaagatttctcccttcacc

SEQ ID NO: 184021 - DNA, 20 bp, synthetic construct
  source 1..20: mol_type = other DNA
tccaagatttctcccttcac

SEQ ID NO: 184022 - DNA, 20 bp, synthetic construct
  source 1..20: mol_type = other DNA
ctccaagatttctcccttca

SEQ ID NO: 184023 - DNA, 20 bp, synthetic construct
  source 1..20: mol_type = other DNA
actccaagatttctcccttc

SEQ ID NO: 184024 - DNA, 20 bp, synthetic construct
  source 1..20: mol_type = other DNA
gactccaagatttctccctt

SEQ ID NO: 184025 - DNA, 20 bp, synthetic construct
  source 1..20: mol_type = other DNA
ggactccaagatttctccct

SEQ ID NO: 184026 - DNA, 20 bp, synthetic construct
  source 1..20: mol_type = other DNA
tggactccaagatttctccc

SEQ ID NO: 184027 - DNA, 20 bp, synthetic construct
  source 1..20: mol_type = other DNA
ctggactccaagatttctcc

SEQ ID NO: 184028 - DNA, 20 bp, synthetic construct
  source 1..20: mol_type = other DNA
cctggactccaagatttctc

SEQ ID NO: 184029 - DNA, 20 bp, synthetic construct
  source 1..20: mol_type = other DNA
gcctggactccaagatttct

SEQ ID NO: 184030 - DNA, 20 bp, synthetic construct
  source 1..20: mol_type = other DNA
tgcctggactccaagatttc

SEQ ID NO: 184031 - DNA, 20 bp, synthetic construct
  source 1..20: mol_type = other DNA
ctgcctggactccaagattt

SEQ ID NO: 184032 - DNA, 20 bp, synthetic construct
  source 1..20: mol_type = other DNA
gctgcctggactccaagatt

SEQ ID NO: 184033 - DNA, 20 bp, synthetic construct
  source 1..20: mol_type = other DNA
ggctgcctggactccaagat

SEQ ID NO: 184034 - DNA, 20 bp, synthetic construct
  source 1..20: mol_type = other DNA
gggctgcctggactccaaga

SEQ ID NO: 184035 - DNA, 20 bp, synthetic construct
  source 1..20: mol_type = other DNA
ggggctgcctggactccaag

SEQ ID NO: 184036 - DNA, 20 bp, synthetic construct
  source 1..20: mol_type = other DNA
gggggctgcctggactccaa

SEQ ID NO: 184037 - DNA, 20 bp, synthetic construct
  source 1..20: mol_type = other DNA
agggggctgcctggactcca

SEQ ID NO: 184038 - DNA, 20 bp, synthetic construct
  source 1..20: mol_type = other DNA
aagggggctgcctggactcc

SEQ ID NO: 184039 - DNA, 20 bp, synthetic construct
  source 1..20: mol_type = other DNA
gaagggggctgcctggactc

SEQ ID NO: 184040 - DNA, 20 bp, synthetic construct
  source 1..20: mol_type = other DNA
agaagggggctgcctggact

SEQ ID NO: 184041 - DNA, 20 bp, synthetic construct
  source 1..20: mol_type = other DNA
cagaagggggctgcctggac

SEQ ID NO: 184042 - DNA, 20 bp, synthetic construct
  source 1..20: mol_type = other DNA
ccagaagggggctgcctgga

SEQ ID NO: 184043 - DNA, 20 bp, synthetic construct
  source 1..20: mol_type = other DNA
cccagaagggggctgcctgg

SEQ ID NO: 184044 - DNA, 20 bp, synthetic construct
  source 1..20: mol_type = other DNA
gcccagaagggggctgcctg

SEQ ID NO: 184045 - DNA, 20 bp, synthetic construct
  source 1..20: mol_type = other DNA
agcccagaagggggctgcct

SEQ ID NO: 184046 - DNA, 20 bp, synthetic construct
  source 1..20: mol_type = other DNA
cagcccagaagggggctgcc

SEQ ID NO: 184047 - DNA, 20 bp, synthetic construct
  source 1..20: mol_type = other DNA
tcagcccagaagggggctgc

SEQ ID NO: 184048 - DNA, 20 bp, synthetic construct
  source 1..20: mol_type = other DNA
ttcagcccagaagggggctg

SEQ ID NO: 184049 - DNA, 20 bp, synthetic construct
  source 1..20: mol_type = other DNA
gttcagcccagaagggggct

SEQ ID NO: 184050 - DNA, 20 bp, synthetic construct
  source 1..20: mol_type = other DNA
agttcagcccagaagggggc

SEQ ID NO: 184051 - DNA, 20 bp, synthetic construct
  source 1..20: mol_type = other DNA
cagttcagcccagaaggggg

SEQ ID NO: 184052 - DNA, 20 bp, synthetic construct
  source 1..20: mol_type = other DNA
ccagttcagcccagaagggg

SEQ ID NO: 184053 - DNA, 20 bp, synthetic construct
  source 1..20: mol_type = other DNA
cccagttcagcccagaaggg

SEQ ID NO: 184054 - DNA, 20 bp, synthetic construct
  source 1..20: mol_type = other DNA
ccccagttcagcccagaagg

SEQ ID NO: 184055 - DNA, 20 bp, synthetic construct
  source 1..20: mol_type = other DNA
tccccagttcagcccagaag

SEQ ID NO: 184056 - DNA, 20 bp, synthetic construct
  source 1..20: mol_type = other DNA
ctccccagttcagcccagaa

SEQ ID NO: 184057 - DNA, 20 bp, synthetic construct
  source 1..20: mol_type = other DNA
gctccccagttcagcccaga

SEQ ID NO: 184058 - DNA, 20 bp, synthetic construct
  source 1..20: mol_type = other DNA
agctccccagttcagcccag

SEQ ID NO: 184059 - DNA, 20 bp, synthetic construct
  source 1..20: mol_type = other DNA
cagctccccagttcagccca

SEQ ID NO: 184060 - DNA, 20 bp, synthetic construct
  source 1..20: mol_type = other DNA
ccagctccccagttcagccc

SEQ ID NO: 184061 - DNA, 20 bp, synthetic construct
  source 1..20: mol_type = other DNA
cccagctccccagttcagcc

SEQ ID NO: 184062 - DNA, 20 bp, synthetic construct
  source 1..20: mol_type = other DNA
ccccagctccccagttcagc

SEQ ID NO: 184063 - DNA, 20 bp, synthetic construct
  source 1..20: mol_type = other DNA
cccccagctccccagttcag

SEQ ID NO: 184064 - DNA, 20 bp, synthetic construct
  source 1..20: mol_type = other DNA
acccccagctccccagttca

SEQ ID NO: 184065 - DNA, 20 bp, synthetic construct
  source 1..20: mol_type = other DNA
cacccccagctccccagttc

SEQ ID NO: 184066 - DNA, 20 bp, synthetic construct
  source 1..20: mol_type = other DNA
gcacccccagctccccagtt

SEQ ID NO: 184067 - DNA, 20 bp, synthetic construct
  source 1..20: mol_type = other DNA
agcacccccagctccccagt

SEQ ID NO: 184068 - DNA, 20 bp, synthetic construct
  source 1..20: mol_type = other DNA
cagcacccccagctccccag

SEQ ID NO: 184069 - DNA, 20 bp, synthetic construct
  source 1..20: mol_type = other DNA
gcagcacccccagctcccca

SEQ ID NO: 184070 - DNA, 20 bp, synthetic construct
  source 1..20: mol_type = other DNA
ggcagcacccccagctcccc

SEQ ID NO: 184071 - DNA, 20 bp, synthetic construct
  source 1..20: mol_type = other DNA
tggcagcacccccagctccc

SEQ ID NO: 184072 - DNA, 20 bp, synthetic construct
  source 1..20: mol_type = other DNA
ctggcagcacccccagctcc

SEQ ID NO: 184073 - DNA, 20 bp, synthetic construct
  source 1..20: mol_type = other DNA
gctggcagcacccccagctc

SEQ ID NO: 184074 - DNA, 20 bp, synthetic construct
  source 1..20: mol_type = other DNA
ggctggcagcacccccagct

SEQ ID NO: 184075 - DNA, 20 bp, synthetic construct
  source 1..20: mol_type = other DNA
gggctggcagcacccccagc

SEQ ID NO: 184076 - DNA, 20 bp, synthetic construct
  source 1..20: mol_type = other DNA
agggctggcagcacccccag

SEQ ID NO: 184077 - DNA, 20 bp, synthetic construct
  source 1..20: mol_type = other DNA
cagggctggcagcaccccca

SEQ ID NO: 184078 - DNA, 20 bp, synthetic construct
  source 1..20: mol_type = other DNA
gcagggctggcagcaccccc

SEQ ID NO: 184079 - DNA, 20 bp, synthetic construct
  source 1..20: mol_type = other DNA
ggcagggctggcagcacccc

SEQ ID NO: 184080 - DNA, 20 bp, synthetic construct
  source 1..20: mol_type = other DNA
tggcagggctggcagcaccc

SEQ ID NO: 184081 - DNA, 20 bp, synthetic construct
  source 1..20: mol_type = other DNA
ctggcagggctggcagcacc

SEQ ID NO: 184082 - DNA, 20 bp, synthetic construct
  source 1..20: mol_type = other DNA
cctggcagggctggcagcac

SEQ ID NO: 184083 - DNA, 20 bp, synthetic construct
  source 1..20: mol_type = other DNA
acctggcagggctggcagca

SEQ ID NO: 184084 - DNA, 20 bp, synthetic construct
  source 1..20: mol_type = other DNA
aacctggcagggctggcagc

SEQ ID NO: 184085 - DNA, 20 bp, synthetic construct
  source 1..20: mol_type = other DNA
gaacctggcagggctggcag

SEQ ID NO: 184086 - DNA, 20 bp, synthetic construct
  source 1..20: mol_type = other DNA
agaacctggcagggctggca

SEQ ID NO: 184087 - DNA, 20 bp, synthetic construct
  source 1..20: mol_type = other DNA
gagaacctggcagggctggc

SEQ ID NO: 184088 - DNA, 20 bp, synthetic construct
  source 1..20: mol_type = other DNA
ggagaacctggcagggctgg

SEQ ID NO: 184089 - DNA, 20 bp, synthetic construct
  source 1..20: mol_type = other DNA
aggagaacctggcagggctg

SEQ ID NO: 184090 - DNA, 20 bp, synthetic construct
  source 1..20: mol_type = other DNA
taggagaacctggcagggct

SEQ ID NO: 184091 - DNA, 20 bp, synthetic construct
  source 1..20: mol_type = other DNA
ctaggagaacctggcagggc

SEQ ID NO: 184092 - DNA, 20 bp, synthetic construct
  source 1..20: mol_type = other DNA
cctaggagaacctggcaggg

SEQ ID NO: 184093 - DNA, 20 bp, synthetic construct
  source 1..20: mol_type = other DNA
tcctaggagaacctggcagg

SEQ ID NO: 184094 - DNA, 20 bp, synthetic construct
  source 1..20: mol_type = other DNA
ctcctaggagaacctggcag

SEQ ID NO: 184095 - DNA, 20 bp, synthetic construct
  source 1..20: mol_type = other DNA
cctcctaggagaacctggca

SEQ ID NO: 184096 - DNA, 20 bp, synthetic construct
  source 1..20: mol_type = other DNA
gcctcctaggagaacctggc

SEQ ID NO: 184097 - DNA, 20 bp, synthetic construct
  source 1..20: mol_type = other DNA
cgcctcctaggagaacctgg

SEQ ID NO: 184098 - DNA, 20 bp, synthetic construct
  source 1..20: mol_type = other DNA
ccgcctcctaggagaacctg

SEQ ID NO: 184099 - DNA, 20 bp, synthetic construct
  source 1..20: mol_type = other DNA
gccgcctcctaggagaacct

SEQ ID NO: 184100 - DNA, 20 bp, synthetic construct
  source 1..20: mol_type = other DNA
tgccgcctcctaggagaacc

SEQ ID NO: 184101 - DNA, 20 bp, synthetic construct
  source 1..20: mol_type = other DNA
ctgccgcctcctaggagaac

SEQ ID NO: 184102 - DNA, 20 bp, synthetic construct
  source 1..20: mol_type = other DNA
gctgccgcctcctaggagaa

SEQ ID NO: 184103 - DNA, 20 bp, synthetic construct
  source 1..20: mol_type = other DNA
agctgccgcctcctaggaga

SEQ ID NO: 184104 - DNA, 20 bp, synthetic construct
  source 1..20: mol_type = other DNA
gagctgccgcctcctaggag

SEQ ID NO: 184105 - DNA, 20 bp, synthetic construct
  source 1..20: mol_type = other DNA
tgagctgccgcctcctagga

SEQ ID NO: 184106 - DNA, 20 bp, synthetic construct
  source 1..20: mol_type = other DNA
atgagctgccgcctcctagg

SEQ ID NO: 184107 - DNA, 20 bp, synthetic construct
  source 1..20: mol_type = other DNA
tatgagctgccgcctcctag

SEQ ID NO: 184108 - DNA, 20 bp, synthetic construct
  source 1..20: mol_type = other DNA
atatgagctgccgcctccta

SEQ ID NO: 184109 - DNA, 20 bp, synthetic construct
  source 1..20: mol_type = other DNA
catatgagctgccgcctcct

SEQ ID NO: 184110 - DNA, 20 bp, synthetic construct
  source 1..20: mol_type = other DNA
ccatatgagctgccgcctcc

SEQ ID NO: 184111 - DNA, 20 bp, synthetic construct
  source 1..20: mol_type = other DNA
gccatatgagctgccgcctc

SEQ ID NO: 184112 - DNA, 20 bp, synthetic construct
  source 1..20: mol_type = other DNA
agccatatgagctgccgcct

SEQ ID NO: 184113 - DNA, 20 bp, synthetic construct
  source 1..20: mol_type = other DNA
cagccatatgagctgccgcc

SEQ ID NO: 184114 - DNA, 20 bp, synthetic construct
  source 1..20: mol_type = other DNA
acagccatatgagctgccgc

SEQ ID NO: 184115 - DNA, 20 bp, synthetic construct
  source 1..20: mol_type = other DNA
cacagccatatgagctgccg

SEQ ID NO: 184116 - DNA, 20 bp, synthetic construct
  source 1..20: mol_type = other DNA
ccacagccatatgagctgcc

SEQ ID NO: 184117 - DNA, 20 bp, synthetic construct
  source 1..20: mol_type = other DNA
cccacagccatatgagctgc

SEQ ID NO: 184118 - DNA, 20 bp, synthetic construct
  source 1..20: mol_type = other DNA
tcccacagccatatgagctg

SEQ ID NO: 184119 - DNA, 20 bp, synthetic construct
  source 1..20: mol_type = other DNA
ctcccacagccatatgagct

SEQ ID NO: 184120 - DNA, 20 bp, synthetic construct
  source 1..20: mol_type = other DNA
cctcccacagccatatgagc

SEQ ID NO: 184121 - DNA, 20 bp, synthetic construct
  source 1..20: mol_type = other DNA
tcctcccacagccatatgag

SEQ ID NO: 184122 - DNA, 20 bp, synthetic construct
  source 1..20: mol_type = other DNA
ctcctcccacagccatatga

SEQ ID NO: 184123 - DNA, 20 bp, synthetic construct
  source 1..20: mol_type = other DNA
cctcctcccacagccatatg

SEQ ID NO: 184124 - DNA, 20 bp, synthetic construct
  source 1..20: mol_type = other DNA
gcctcctcccacagccatat

SEQ ID NO: 184125 - DNA, 20 bp, synthetic construct
  source 1..20: mol_type = other DNA
tgcctcctcccacagccata

SEQ ID NO: 184126 - DNA, 20 bp, synthetic construct
  source 1..20: mol_type = other DNA
ctgcctcctcccacagccat

SEQ ID NO: 184127 - DNA, 20 bp, synthetic construct
  source 1..20: mol_type = other DNA
tctgcctcctcccacagcca

SEQ ID NO: 184128 - DNA, 20 bp, synthetic construct
  source 1..20: mol_type = other DNA
ctctgcctcctcccacagcc

SEQ ID NO: 184129 - DNA, 20 bp, synthetic construct
  source 1..20: mol_type = other DNA
cctctgcctcctcccacagc

SEQ ID NO: 184130 - DNA, 20 bp, synthetic construct
  source 1..20: mol_type = other DNA
ccctctgcctcctcccacag

SEQ ID NO: 184131 - DNA, 20 bp, synthetic construct
  source 1..20: mol_type = other DNA
tccctctgcctcctcccaca

SEQ ID NO: 184132 - DNA, 20 bp, synthetic construct
  source 1..20: mol_type = other DNA
ctccctctgcctcctcccac

SEQ ID NO: 184133 - DNA, 20 bp, synthetic construct
  source 1..20: mol_type = other DNA
gctccctctgcctcctccca

SEQ ID NO: 184134 - DNA, 20 bp, synthetic construct
  source 1..20: mol_type = other DNA
ggctccctctgcctcctccc

SEQ ID NO: 184135 - DNA, 20 bp, synthetic construct
  source 1..20: mol_type = other DNA
aggctccctctgcctcctcc

SEQ ID NO: 184136 - DNA, 20 bp, synthetic construct
  source 1..20: mol_type = other DNA
gaggctccctctgcctcctc

SEQ ID NO: 184137 - DNA, 20 bp, synthetic construct
  source 1..20: mol_type = other DNA
tgaggctccctctgcctcct

SEQ ID NO: 184138 - DNA, 20 bp, synthetic construct
  source 1..20: mol_type = other DNA
atgaggctccctctgcctcc

SEQ ID NO: 184139 - DNA, 20 bp, synthetic construct
  source 1..20: mol_type = other DNA
tatgaggctccctctgcctc

SEQ ID NO: 184140 - DNA, 20 bp, synthetic construct
  source 1..20: mol_type = other DNA
atatgaggctccctctgcct

SEQ ID NO: 184141 - DNA, 20 bp, synthetic construct
  source 1..20: mol_type = other DNA
catatgaggctccctctgcc

SEQ ID NO: 184142 - DNA, 20 bp, synthetic construct
  source 1..20: mol_type = other DNA
gcatatgaggctccctctgc

SEQ ID NO: 184143 - DNA, 20 bp, synthetic construct
  source 1..20: mol_type = other DNA
tgcatatgaggctccctctg

SEQ ID NO: 184144 - DNA, 20 bp, synthetic construct
  source 1..20: mol_type = other DNA
gtgcatatgaggctccctct

SEQ ID NO: 184145 - DNA, 20 bp, synthetic construct
  source 1..20: mol_type = other DNA
ggtgcatatgaggctccctc

SEQ ID NO: 184146 - DNA, 20 bp, synthetic construct
  source 1..20: mol_type = other DNA
gggtgcatatgaggctccct

SEQ ID NO: 184147 - DNA, 20 bp, synthetic construct
  source 1..20: mol_type = other DNA
tgggtgcatatgaggctccc

SEQ ID NO: 184148 - DNA, 20 bp, synthetic construct
  source 1..20: mol_type = other DNA
gtgggtgcatatgaggctcc

SEQ ID NO: 184149 - DNA, 20 bp, synthetic construct
  source 1..20: mol_type = other DNA
tgtgggtgcatatgaggctc

SEQ ID NO: 184150 - DNA, 20 bp, synthetic construct
  source 1..20: mol_type = other DNA
atgtgggtgcatatgaggct

SEQ ID NO: 184151 - DNA, 20 bp, synthetic construct
  source 1..20: mol_type = other DNA
aatgtgggtgcatatgaggc

SEQ ID NO: 184152 - DNA, 20 bp, synthetic construct
  source 1..20: mol_type = other DNA
aaatgtgggtgcatatgagg

SEQ ID NO: 184153 - DNA, 20 bp, synthetic construct
  source 1..20: mol_type = other DNA
gaaatgtgggtgcatatgag

SEQ ID NO: 184154 - DNA, 20 bp, synthetic construct
  source 1..20: mol_type = other DNA
ggaaatgtgggtgcatatga

SEQ ID NO: 184155 - DNA, 20 bp, synthetic construct
  source 1..20: mol_type = other DNA
tggaaatgtgggtgcatatg

SEQ ID NO: 184156 - DNA, 20 bp, synthetic construct
  source 1..20: mol_type = other DNA
ctggaaatgtgggtgcatat

SEQ ID NO: 184157 - DNA, 20 bp, synthetic construct
  source 1..20: mol_type = other DNA
cctggaaatgtgggtgcata

SEQ ID NO: 184158 - DNA, 20 bp, synthetic construct
  source 1..20: mol_type = other DNA
ccctggaaatgtgggtgcat

SEQ ID NO: 184159 - DNA, 20 bp, synthetic construct
  source 1..20: mol_type = other DNA
tccctggaaatgtgggtgca

SEQ ID NO: 184160 - DNA, 20 bp, synthetic construct
  source 1..20: mol_type = other DNA
atccctggaaatgtgggtgc

SEQ ID NO: 184161 - DNA, 20 bp, synthetic construct
  source 1..20: mol_type = other DNA
gatccctggaaatgtgggtg

SEQ ID NO: 184162 - DNA, 20 bp, synthetic construct
  source 1..20: mol_type = other DNA
agatccctggaaatgtgggt

SEQ ID NO: 184163 - DNA, 20 bp, synthetic construct
  source 1..20: mol_type = other DNA
tagatccctggaaatgtggg

SEQ ID NO: 184164 - DNA, 20 bp, synthetic construct
  source 1..20: mol_type = other DNA
ctagatccctggaaatgtgg

SEQ ID NO: 184165 - DNA, 20 bp, synthetic construct
  source 1..20: mol_type = other DNA
tctagatccctggaaatgtg

SEQ ID NO: 184166 - DNA, 20 bp, synthetic construct
  source 1..20: mol_type = other DNA
ttctagatccctggaaatgt

SEQ ID NO: 184167 - DNA, 20 bp, synthetic construct
  source 1..20: mol_type = other DNA
cttctagatccctggaaatg

SEQ ID NO: 184168 - DNA, 20 bp, synthetic construct
  source 1..20: mol_type = other DNA
tcttctagatccctggaaat

SEQ ID NO: 184169 - DNA, 20 bp, synthetic construct
  source 1..20: mol_type = other DNA
gtcttctagatccctggaaa

SEQ ID NO: 184170 - DNA, 20 bp, synthetic construct
  source 1..20: mol_type = other DNA
tgtcttctagatccctggaa

SEQ ID NO: 184171 - DNA, 20 bp, synthetic construct
  source 1..20: mol_type = other DNA
ctgtcttctagatccctgga

SEQ ID NO: 184172 - DNA, 20 bp, synthetic construct
  source 1..20: mol_type = other DNA
tctgtcttctagatccctgg

SEQ ID NO: 184173 - DNA, 20 bp, synthetic construct
  source 1..20: mol_type = other DNA
ttctgtcttctagatccctg

SEQ ID NO: 184174 - DNA, 20 bp, synthetic construct
  source 1..20: mol_type = other DNA
cttctgtcttctagatccct

SEQ ID NO: 184175 - DNA, 20 bp, synthetic construct
  source 1..20: mol_type = other DNA
ccttctgtcttctagatccc

SEQ ID NO: 184176 - DNA, 20 bp, synthetic construct
  source 1..20: mol_type = other DNA
tccttctgtcttctagatcc

SEQ ID NO: 184177 - DNA, 20 bp, synthetic construct
  source 1..20: mol_type = other DNA
ctccttctgtcttctagatc

SEQ ID NO: 184178 - DNA, 20 bp, synthetic construct
  source 1..20: mol_type = other DNA
cctccttctgtcttctagat

SEQ ID NO: 184179 - DNA, 20 bp, synthetic construct
  source 1..20: mol_type = other DNA
tcctccttctgtcttctaga

SEQ ID NO: 184180 - DNA, 20 bp, synthetic construct
  source 1..20: mol_type = other DNA
ttcctccttctgtcttctag

SEQ ID NO: 184181 - DNA, 20 bp, synthetic construct
  source 1..20: mol_type = other DNA
tttcctccttctgtcttcta

SEQ ID NO: 184182 - DNA, 20 bp, synthetic construct
  source 1..20: mol_type = other DNA
ttttcctccttctgtcttct

SEQ ID NO: 184183 - DNA, 20 bp, synthetic construct
  source 1..20: mol_type = other DNA
gttttcctccttctgtcttc

SEQ ID NO: 184184 - DNA, 20 bp, synthetic construct
  source 1..20: mol_type = other DNA
ggttttcctccttctgtctt

SEQ ID NO: 184185 - DNA, 20 bp, synthetic construct
  source 1..20: mol_type = other DNA
tggttttcctccttctgtct

SEQ ID NO: 184186 - DNA, 20 bp, synthetic construct
  source 1..20: mol_type = other DNA
gtggttttcctccttctgtc

SEQ ID NO: 184187 - DNA, 20 bp, synthetic construct
  source 1..20: mol_type = other DNA
ggtggttttcctccttctgt

SEQ ID NO: 184188 - DNA, 20 bp, synthetic construct
  source 1..20: mol_type = other DNA
tggtggttttcctccttctg

SEQ ID NO: 184189 - DNA, 20 bp, synthetic construct
  source 1..20: mol_type = other DNA
atggtggttttcctccttct

SEQ ID NO: 184190 - DNA, 20 bp, synthetic construct
  source 1..20: mol_type = other DNA
gatggtggttttcctccttc

SEQ ID NO: 184191 - DNA, 20 bp, synthetic construct
  source 1..20: mol_type = other DNA
tgatggtggttttcctcctt

SEQ ID NO: 184192 - DNA, 20 bp, synthetic construct
  source 1..20: mol_type = other DNA
atgatggtggttttcctcct

SEQ ID NO: 184193 - DNA, 20 bp, synthetic construct
  source 1..20: mol_type = other DNA
catgatggtggttttcctcc

SEQ ID NO: 184194 - DNA, 20 bp, synthetic construct
  source 1..20: mol_type = other DNA
acatgatggtggttttcctc

SEQ ID NO: 184195 - DNA, 20 bp, synthetic construct
  source 1..20: mol_type = other DNA
aacatgatggtggttttcct

SEQ ID NO: 184196 - DNA, 20 bp, synthetic construct
  source 1..20: mol_type = other DNA
taacatgatggtggttttcc

SEQ ID NO: 184197 - DNA, 20 bp, synthetic construct
  source 1..20: mol_type = other DNA
ttaacatgatggtggttttc

SEQ ID NO: 184198 - DNA, 20 bp, synthetic construct
  source 1..20: mol_type = other DNA
tttaacatgatggtggtttt

SEQ ID NO: 184199 - DNA, 20 bp, synthetic construct
  source 1..20: mol_type = other DNA
ctttaacatgatggtggttt

SEQ ID NO: 184200 - DNA, 20 bp, synthetic construct
  source 1..20: mol_type = other DNA
gctttaacatgatggtggtt

SEQ ID NO: 184201 - DNA, 20 bp, synthetic construct
  source 1..20: mol_type = other DNA
tgctttaacatgatggtggt

SEQ ID NO: 184202 - DNA, 20 bp, synthetic construct
  source 1..20: mol_type = other DNA
ctgctttaacatgatggtgg

SEQ ID NO: 184203 - DNA, 20 bp, synthetic construct
  source 1..20: mol_type = other DNA
tctgctttaacatgatggtg

SEQ ID NO: 184204 - DNA, 20 bp, synthetic construct
  source 1..20: mol_type = other DNA
gtctgctttaacatgatggt

SEQ ID NO: 184205 - DNA, 20 bp, synthetic construct
  source 1..20: mol_type = other DNA
tgtctgctttaacatgatgg

SEQ ID NO: 184206 - DNA, 20 bp, synthetic construct
  source 1..20: mol_type = other DNA
ctgtctgctttaacatgatg

SEQ ID NO: 184207 - DNA, 20 bp, synthetic construct
  source 1..20: mol_type = other DNA
actgtctgctttaacatgat

SEQ ID NO: 184208 - DNA, 20 bp, synthetic construct
  source 1..20: mol_type = other DNA
aactgtctgctttaacatga

SEQ ID NO: 184209 - DNA, 20 bp, synthetic construct
  source 1..20: mol_type = other DNA
taactgtctgctttaacatg

SEQ ID NO: 184210 - DNA, 20 bp, synthetic construct
  source 1..20: mol_type = other DNA
ctaactgtctgctttaacat

SEQ ID NO: 184211 - DNA, 20 bp, synthetic construct
  source 1..20: mol_type = other DNA
cctaactgtctgctttaaca

SEQ ID NO: 184212 - DNA, 20 bp, synthetic construct
  source 1..20: mol_type = other DNA
acctaactgtctgctttaac

SEQ ID NO: 184213 - DNA, 20 bp, synthetic construct
  source 1..20: mol_type = other DNA
tacctaactgtctgctttaa

SEQ ID NO: 184214 - DNA, 20 bp, synthetic construct
  source 1..20: mol_type = other DNA
ttacctaactgtctgcttta

SEQ ID NO: 184215 - DNA, 20 bp, synthetic construct
  source 1..20: mol_type = other DNA
gttacctaactgtctgcttt

SEQ ID NO: 184216 - DNA, 20 bp, synthetic construct
  source 1..20: mol_type = other DNA
tgttacctaactgtctgctt

SEQ ID NO: 184217 - DNA, 20 bp, synthetic construct
  source 1..20: mol_type = other DNA
gtgttacctaactgtctgct

SEQ ID NO: 184218 - DNA, 20 bp, synthetic construct
  source 1..20: mol_type = other DNA
tgtgttacctaactgtctgc

SEQ ID NO: 184219 - DNA, 20 bp, synthetic construct
  source 1..20: mol_type = other DNA
atgtgttacctaactgtctg

SEQ ID NO: 184220 - DNA, 20 bp, synthetic construct
  source 1..20: mol_type = other DNA
gatgtgttacctaactgtct

SEQ ID NO: 184221 - DNA, 20 bp, synthetic construct
  source 1..20: mol_type = other DNA
ggatgtgttacctaactgtc

SEQ ID NO: 184222 - DNA, 20 bp, synthetic construct
  source 1..20: mol_type = other DNA
aggatgtgttacctaactgt

SEQ ID NO: 184223 - DNA, 20 bp, synthetic construct
  source 1..20: mol_type = other DNA
caggatgtgttacctaactg

SEQ ID NO: 184224 - DNA, 20 bp, synthetic construct
  source 1..20: mol_type = other DNA
acaggatgtgttacctaact

SEQ ID NO: 184225 - DNA, 20 bp, synthetic construct
  source 1..20: mol_type = other DNA
tacaggatgtgttacctaac

SEQ ID NO: 184226 - DNA, 20 bp, synthetic construct
  source 1..20: mol_type = other DNA
ttacaggatgtgttacctaa

SEQ ID NO: 184227 - DNA, 20 bp, synthetic construct
  source 1..20: mol_type = other DNA
attacaggatgtgttaccta

SEQ ID NO: 184228 - DNA, 20 bp, synthetic construct
  source 1..20: mol_type = other DNA
tattacaggatgtgttacct

SEQ ID NO: 184229 - DNA, 20 bp, synthetic construct
  source 1..20: mol_type = other DNA
gtattacaggatgtgttacc

SEQ ID NO: 184230 - DNA, 20 bp, synthetic construct
  source 1..20: mol_type = other DNA
tgtattacaggatgtgttac

SEQ ID NO: 184231 - DNA, 20 bp, synthetic construct
  source 1..20: mol_type = other DNA
ttgtattacaggatgtgtta

SEQ ID NO: 184232 - DNA, 20 bp, synthetic construct
  source 1..20: mol_type = other DNA
cttgtattacaggatgtgtt

SEQ ID NO: 184233 - DNA, 20 bp, synthetic construct
  source 1..20: mol_type = other DNA
acttgtattacaggatgtgt

SEQ ID NO: 184234 - DNA, 20 bp, synthetic construct
  source 1..20: mol_type = other DNA
aacttgtattacaggatgtg

SEQ ID NO: 184235 - DNA, 20 bp, synthetic construct
  source 1..20: mol_type = other DNA
taacttgtattacaggatgt

SEQ ID NO: 184236 - DNA, 20 bp, synthetic construct
  source 1..20: mol_type = other DNA
ataacttgtattacaggatg

SEQ ID NO: 184237 - DNA, 20 bp, synthetic construct
  source 1..20: mol_type = other DNA
aataacttgtattacaggat

SEQ ID NO: 184238 - DNA, 20 bp, synthetic construct
  source 1..20: mol_type = other DNA
aaataacttgtattacagga

SEQ ID NO: 184239 - DNA, 20 bp, synthetic construct
  source 1..20: mol_type = other DNA
aaaataacttgtattacagg

SEQ ID NO: 184240 - DNA, 20 bp, synthetic construct
  source 1..20: mol_type = other DNA
aaaaataacttgtattacag

SEQ ID NO: 184241 - DNA, 20 bp, synthetic construct
  source 1..20: mol_type = other DNA
aaaaaataacttgtattaca

SEQ ID NO: 184242 - DNA, 20 bp, synthetic construct
  source 1..20: mol_type = other DNA
gaaaaaataacttgtattac

SEQ ID NO: 184243 - DNA, 20 bp, synthetic construct
  source 1..20: mol_type = other DNA
ggaaaaaataacttgtatta

SEQ ID NO: 184244 - DNA, 20 bp, synthetic construct
  source 1..20: mol_type = other DNA
tggaaaaaataacttgtatt

SEQ ID NO: 184245 - DNA, 20 bp, synthetic construct
  source 1..20: mol_type = other DNA
gtggaaaaaataacttgtat

SEQ ID NO: 184246 - DNA, 20 bp, synthetic construct
  source 1..20: mol_type = other DNA
tgtggaaaaaataacttgta

SEQ ID NO: 184247 - DNA, 20 bp, synthetic construct
  source 1..20: mol_type = other DNA
atgtggaaaaaataacttgt

SEQ ID NO: 184248 - DNA, 20 bp, synthetic construct
  source 1..20: mol_type = other DNA
gatgtggaaaaaataacttg

SEQ ID NO: 184249 - DNA, 20 bp, synthetic construct
  source 1..20: mol_type = other DNA
agatgtggaaaaaataactt

SEQ ID NO: 184250 - DNA, 20 bp, synthetic construct
  source 1..20: mol_type = other DNA
tagatgtggaaaaaataact

SEQ ID NO: 184251 - DNA, 20 bp, synthetic construct
  source 1..20: mol_type = other DNA
ttagatgtggaaaaaataac

SEQ ID NO: 184252 - DNA, 20 bp, synthetic construct
  source 1..20: mol_type = other DNA
tttagatgtggaaaaaataa

SEQ ID NO: 184253 - DNA, 20 bp, synthetic construct
  source 1..20: mol_type = other DNA
ctttagatgtggaaaaaata

SEQ ID NO: 184254 - DNA, 20 bp, synthetic construct
  source 1..20: mol_type = other DNA
cctttagatgtggaaaaaat

SEQ ID NO: 184255 - DNA, 20 bp, synthetic construct
  source 1..20: mol_type = other DNA
gcctttagatgtggaaaaaa

SEQ ID NO: 184256 - DNA, 20 bp, synthetic construct
  source 1..20: mol_type = other DNA
agcctttagatgtggaaaaa

SEQ ID NO: 184257 - DNA, 20 bp, synthetic construct
  source 1..20: mol_type = other DNA
tagcctttagatgtggaaaa

SEQ ID NO: 184258 - DNA, 20 bp, synthetic construct
  source 1..20: mol_type = other DNA
ttagcctttagatgtggaaa

SEQ ID NO: 184259 - DNA, 20 bp, synthetic construct
  source 1..20: mol_type = other DNA
tttagcctttagatgtggaa

SEQ ID NO: 184260 - DNA, 20 bp, synthetic construct
  source 1..20: mol_type = other DNA
ttttagcctttagatgtgga

SEQ ID NO: 184261 - DNA, 20 bp, synthetic construct
  source 1..20: mol_type = other DNA
tttttagcctttagatgtgg

SEQ ID NO: 184262 - DNA, 20 bp, synthetic construct
  source 1..20: mol_type = other DNA
atttttagcctttagatgtg

SEQ ID NO: 184263 - DNA, 20 bp, synthetic construct
  source 1..20: mol_type = other DNA
tatttttagcctttagatgt

SEQ ID NO: 184264 - DNA, 20 bp, synthetic construct
  source 1..20: mol_type = other DNA
ctatttttagcctttagatg

SEQ ID NO: 184265 - DNA, 20 bp, synthetic construct
  source 1..20: mol_type = other DNA
actatttttagcctttagat

SEQ ID NO: 184266 - DNA, 20 bp, synthetic construct
  source 1..20: mol_type = other DNA
aactatttttagcctttaga

SEQ ID NO: 184267 - DNA, 20 bp, synthetic construct
  source 1..20: mol_type = other DNA
caactatttttagcctttag

SEQ ID NO: 184268 - DNA, 20 bp, synthetic construct
  source 1..20: mol_type = other DNA
acaactatttttagccttta

SEQ ID NO: 184269 - DNA, 20 bp, synthetic construct
  source 1..20: mol_type = other DNA
aacaactatttttagccttt

SEQ ID NO: 184270 - DNA, 20 bp, synthetic construct
  source 1..20: mol_type = other DNA
taacaactatttttagcctt

SEQ ID NO: 184271 - DNA, 20 bp, synthetic construct
  source 1..20: mol_type = other DNA
ctaacaactatttttagcct

SEQ ID NO: 184272 - DNA, 20 bp, synthetic construct
  source 1..20: mol_type = other DNA
tctaacaactatttttagcc

SEQ ID NO: 184273 - DNA, 20 bp, synthetic construct
  source 1..20: mol_type = other DNA
ttctaacaactatttttagc

SEQ ID NO: 184274 - DNA, 20 bp, synthetic construct
  source 1..20: mol_type = other DNA
attctaacaactatttttag

SEQ ID NO: 184275 - DNA, 20 bp, synthetic construct
  source 1..20: mol_type = other DNA
aattctaacaactattttta

SEQ ID NO: 184276 - DNA, 20 bp, synthetic construct
  source 1..20: mol_type = other DNA
aaattctaacaactattttt

SEQ ID NO: 184277 - DNA, 20 bp, synthetic construct
  source 1..20: mol_type = other DNA
taaattctaacaactatttt

SEQ ID NO: 184278 - DNA, 20 bp, synthetic construct
  source 1..20: mol_type = other DNA
ttaaattctaacaactattt

SEQ ID NO: 184279 - DNA, 20 bp, synthetic construct
  source 1..20: mol_type = other DNA
tttaaattctaacaactatt

SEQ ID NO: 184280 - DNA, 20 bp, synthetic construct
  source 1..20: mol_type = other DNA
ctttaaattctaacaactat

SEQ ID NO: 184281 - DNA, 20 bp, synthetic construct
  source 1..20: mol_type = other DNA
tctttaaattctaacaacta

SEQ ID NO: 184282 - DNA, 20 bp, synthetic construct
  source 1..20: mol_type = other DNA
atctttaaattctaacaact

SEQ ID NO: 184283 - DNA, 20 bp, synthetic construct
  source 1..20: mol_type = other DNA
tatctttaaattctaacaac

SEQ ID NO: 184284 - DNA, 20 bp, synthetic construct
  source 1..20: mol_type = other DNA
ttatctttaaattctaacaa

SEQ ID NO: 184285 - DNA, 20 bp, synthetic construct
  source 1..20: mol_type = other DNA
attatctttaaattctaaca

SEQ ID NO: 184286 - DNA, 20 bp, synthetic construct
  source 1..20: mol_type = other DNA
aattatctttaaattctaac

SEQ ID NO: 184287 - DNA, 20 bp, synthetic construct
  source 1..20: mol_type = other DNA
caattatctttaaattctaa

SEQ ID NO: 184288 - DNA, 20 bp, synthetic construct
  source 1..20: mol_type = other DNA
ccaattatctttaaattcta

SEQ ID NO: 184289 - DNA, 20 bp, synthetic construct
  source 1..20: mol_type = other DNA
accaattatctttaaattct

SEQ ID NO: 184290 - DNA, 20 bp, synthetic construct
  source 1..20: mol_type = other DNA
taccaattatctttaaattc

SEQ ID NO: 184291 - DNA, 20 bp, synthetic construct
  source 1..20: mol_type = other DNA
ttaccaattatctttaaatt

SEQ ID NO: 184292 - DNA, 20 bp, synthetic construct
  source 1..20: mol_type = other DNA
tttaccaattatctttaaat

SEQ ID NO: 184293 - DNA, 20 bp, synthetic construct
  source 1..20: mol_type = other DNA
atttaccaattatctttaaa

SEQ ID NO: 184294 - DNA, 20 bp, synthetic construct
  source 1..20: mol_type = other DNA
catttaccaattatctttaa

SEQ ID NO: 184295 - DNA, 20 bp, synthetic construct
  source 1..20: mol_type = other DNA
tcatttaccaattatcttta

SEQ ID NO: 184296 - DNA, 20 bp, synthetic construct
  source 1..20: mol_type = other DNA
ctcatttaccaattatcttt

SEQ ID NO: 184297 - DNA, 20 bp, synthetic construct
  source 1..20: mol_type = other DNA
actcatttaccaattatctt

SEQ ID NO: 184298 - DNA, 20 bp, synthetic construct
  source 1..20: mol_type = other DNA
aactcatttaccaattatct

SEQ ID NO: 184299 - DNA, 20 bp, synthetic construct
  source 1..20: mol_type = other DNA
aaactcatttaccaattatc

SEQ ID NO: 184300 - DNA, 20 bp, synthetic construct
  source 1..20: mol_type = other DNA
gaaactcatttaccaattat

SEQ ID NO: 184301 - DNA, 20 bp, synthetic construct
  source 1..20: mol_type = other DNA
agaaactcatttaccaatta

SEQ ID NO: 184302 - DNA, 20 bp, synthetic construct
  source 1..20: mol_type = other DNA
tagaaactcatttaccaatt

SEQ ID NO: 184303 - DNA, 20 bp, synthetic construct
  source 1..20: mol_type = other DNA
atagaaactcatttaccaat

SEQ ID NO: 184304 - DNA, 20 bp, synthetic construct
  source 1..20: mol_type = other DNA
gatagaaactcatttaccaa

SEQ ID NO: 184305 - DNA, 20 bp, synthetic construct
  source 1..20: mol_type = other DNA
ggatagaaactcatttacca

SEQ ID NO: 184306 - DNA, 20 bp, synthetic construct
  source 1..20: mol_type = other DNA
aggatagaaactcatttacc

SEQ ID NO: 184307 - DNA, 20 bp, synthetic construct
  source 1..20: mol_type = other DNA
aaggatagaaactcatttac

SEQ ID NO: 184308 - DNA, 20 bp, synthetic construct
  source 1..20: mol_type = other DNA
gaaggatagaaactcattta

SEQ ID NO: 184309 - DNA, 20 bp, synthetic construct
  source 1..20: mol_type = other DNA
agaaggatagaaactcattt

SEQ ID NO: 184310 - DNA, 20 bp, synthetic construct
  source 1..20: mol_type = other DNA
tagaaggatagaaactcatt

SEQ ID NO: 184311 - DNA, 20 bp, synthetic construct
  source 1..20: mol_type = other DNA
ctagaaggatagaaactcat

SEQ ID NO: 184312 - DNA, 20 bp, synthetic construct
  source 1..20: mol_type = other DNA
actagaaggatagaaactca

SEQ ID NO: 184313 - DNA, 20 bp, synthetic construct
  source 1..20: mol_type = other DNA
aactagaaggatagaaactc

SEQ ID NO: 184314 - DNA, 20 bp, synthetic construct
  source 1..20: mol_type = other DNA
aaactagaaggatagaaact

SEQ ID NO: 184315 - DNA, 20 bp, synthetic construct
  source 1..20: mol_type = other DNA
gaaactagaaggatagaaac

SEQ ID NO: 184316 - DNA, 20 bp, synthetic construct
  source 1..20: mol_type = other DNA
tgaaactagaaggatagaaa

SEQ ID NO: 184317 - DNA, 20 bp, synthetic construct
  source 1..20: mol_type = other DNA
gtgaaactagaaggatagaa

SEQ ID NO: 184318 - DNA, 20 bp, synthetic construct
  source 1..20: mol_type = other DNA
tgtgaaactagaaggataga

SEQ ID NO: 184319 - DNA, 20 bp, synthetic construct
  source 1..20: mol_type = other DNA
atgtgaaactagaaggatag

SEQ ID NO: 184320 - DNA, 20 bp, synthetic construct
  source 1..20: mol_type = other DNA
gatgtgaaactagaaggata

SEQ ID NO: 184321 - DNA, 20 bp, synthetic construct
  source 1..20: mol_type = other DNA
tgatgtgaaactagaaggat

SEQ ID NO: 184322 - DNA, 20 bp, synthetic construct
  source 1..20: mol_type = other DNA
ttgatgtgaaactagaagga

SEQ ID NO: 184323 - DNA, 20 bp, synthetic construct
  source 1..20: mol_type = other DNA
tttgatgtgaaactagaagg

SEQ ID NO: 184324 - DNA, 20 bp, synthetic construct
  source 1..20: mol_type = other DNA
atttgatgtgaaactagaag

SEQ ID NO: 184325 - DNA, 20 bp, synthetic construct
  source 1..20: mol_type = other DNA
catttgatgtgaaactagaa

SEQ ID NO: 184326 - DNA, 20 bp, synthetic construct
  source 1..20: mol_type = other DNA
ccatttgatgtgaaactaga

SEQ ID NO: 184327 - DNA, 20 bp, synthetic construct
  source 1..20: mol_type = other DNA
tccatttgatgtgaaactag

SEQ ID NO: 184328 - DNA, 20 bp, synthetic construct
  source 1..20: mol_type = other DNA
ttccatttgatgtgaaacta

SEQ ID NO: 184329 - DNA, 20 bp, synthetic construct
  source 1..20: mol_type = other DNA
attccatttgatgtgaaact

SEQ ID NO: 184330 - DNA, 20 bp, synthetic construct
  source 1..20: mol_type = other DNA
gattccatttgatgtgaaac

SEQ ID NO: 184331 - DNA, 20 bp, synthetic construct
  source 1..20: mol_type = other DNA
tgattccatttgatgtgaaa

SEQ ID NO: 184332 - DNA, 20 bp, synthetic construct
  source 1..20: mol_type = other DNA
atgattccatttgatgtgaa

SEQ ID NO: 184333 - DNA, 20 bp, synthetic construct
  source 1..20: mol_type = other DNA
catgattccatttgatgtga

SEQ ID NO: 184334 - DNA, 20 bp, synthetic construct
  source 1..20: mol_type = other DNA
gcatgattccatttgatgtg

SEQ ID NO: 184335 - DNA, 20 bp, synthetic construct
  source 1..20: mol_type = other DNA
agcatgattccatttgatgt

SEQ ID NO: 184336 - DNA, 20 bp, synthetic construct
  source 1..20: mol_type = other DNA
cagcatgattccatttgatg

SEQ ID NO: 184337 - DNA, 20 bp, synthetic construct
  source 1..20: mol_type = other DNA
gcagcatgattccatttgat

SEQ ID NO: 184338 - DNA, 20 bp, synthetic construct
  source 1..20: mol_type = other DNA
ggcagcatgattccatttga

SEQ ID NO: 184339 - DNA, 20 bp, synthetic construct
  source 1..20: mol_type = other DNA
aggcagcatgattccatttg

SEQ ID NO: 184340 - DNA, 20 bp, synthetic construct
  source 1..20: mol_type = other DNA
aaggcagcatgattccattt

SEQ ID NO: 184341 - DNA, 20 bp, synthetic construct
  source 1..20: mol_type = other DNA
gaaggcagcatgattccatt

SEQ ID NO: 184342 - DNA, 20 bp, synthetic construct
  source 1..20: mol_type = other DNA
tgaaggcagcatgattccat

SEQ ID NO: 184343 - DNA, 20 bp, synthetic construct
  source 1..20: mol_type = other DNA
gtgaaggcagcatgattcca

SEQ ID NO: 184344 - DNA, 20 bp, synthetic construct
  source 1..20: mol_type = other DNA
tgtgaaggcagcatgattcc

SEQ ID NO: 184345 - DNA, 20 bp, synthetic construct
  source 1..20: mol_type = other DNA
atgtgaaggcagcatgattc

SEQ ID NO: 184346 - DNA, 20 bp, synthetic construct
  source 1..20: mol_type = other DNA
gatgtgaaggcagcatgatt

SEQ ID NO: 184347 - DNA, 20 bp, synthetic construct
  source 1..20: mol_type = other DNA
tgatgtgaaggcagcatgat

SEQ ID NO: 184348 - DNA, 20 bp, synthetic construct
  source 1..20: mol_type = other DNA
gtgatgtgaaggcagcatga

SEQ ID NO: 184349 - DNA, 20 bp, synthetic construct
  source 1..20: mol_type = other DNA
agtgatgtgaaggcagcatg

SEQ ID NO: 184350 - DNA, 20 bp, synthetic construct
  source 1..20: mol_type = other DNA
tagtgatgtgaaggcagcat

SEQ ID NO: 184351 - DNA, 20 bp, synthetic construct
  source 1..20: mol_type = other DNA
ctagtgatgtgaaggcagca

SEQ ID NO: 184352 - DNA, 20 bp, synthetic construct
  source 1..20: mol_type = other DNA
actagtgatgtgaaggcagc

SEQ ID NO: 184353 - DNA, 20 bp, synthetic construct
  source 1..20: mol_type = other DNA
cactagtgatgtgaaggcag

SEQ ID NO: 184354 - DNA, 20 bp, synthetic construct
  source 1..20: mol_type = other DNA
gcactagtgatgtgaaggca

SEQ ID NO: 184355 - DNA, 20 bp, synthetic construct
  source 1..20: mol_type = other DNA
ggcactagtgatgtgaaggc

SEQ ID NO: 184356 - DNA, 20 bp, synthetic construct
  source 1..20: mol_type = other DNA
gggcactagtgatgtgaagg

SEQ ID NO: 184357 - DNA, 20 bp, synthetic construct
  source 1..20: mol_type = other DNA
cgggcactagtgatgtgaag

SEQ ID NO: 184358 - DNA, 20 bp, synthetic construct
  source 1..20: mol_type = other DNA
acgggcactagtgatgtgaa

SEQ ID NO: 184359 - DNA, 20 bp, synthetic construct
  source 1..20: mol_type = other DNA
aacgggcactagtgatgtga

SEQ ID NO: 184360 - DNA, 20 bp, synthetic construct
  source 1..20: mol_type = other DNA
taacgggcactagtgatgtg

SEQ ID NO: 184361 - DNA, 20 bp, synthetic construct
  source 1..20: mol_type = other DNA
ataacgggcactagtgatgt

SEQ ID NO: 184362 - DNA, 20 bp, synthetic construct
  source 1..20: mol_type = other DNA
aataacgggcactagtgatg

SEQ ID NO: 184363 - DNA, 20 bp, synthetic construct
  source 1..20: mol_type = other DNA
aaataacgggcactagtgat

SEQ ID NO: 184364 - DNA, 20 bp, synthetic construct
  source 1..20: mol_type = other DNA
caaataacgggcactagtga

SEQ ID NO: 184365 - DNA, 20 bp, synthetic construct
  source 1..20: mol_type = other DNA
acaaataacgggcactagtg

SEQ ID NO: 184366 - DNA, 20 bp, synthetic construct
  source 1..20: mol_type = other DNA
cacaaataacgggcactagt

SEQ ID NO: 184367 - DNA, 20 bp, synthetic construct
  source 1..20: mol_type = other DNA
acacaaataacgggcactag

SEQ ID NO: 184368 - DNA, 20 bp, synthetic construct
  source 1..20: mol_type = other DNA
aacacaaataacgggcacta

SEQ ID NO: 184369 - DNA, 20 bp, synthetic construct
  source 1..20: mol_type = other DNA
aaacacaaataacgggcact

SEQ ID NO: 184370 - DNA, 20 bp, synthetic construct
  source 1..20: mol_type = other DNA
taaacacaaataacgggcac

SEQ ID NO: 184371 - DNA, 20 bp, synthetic construct
  source 1..20: mol_type = other DNA
ttaaacacaaataacgggca

SEQ ID NO: 184372 - DNA, 20 bp, synthetic construct
  source 1..20: mol_type = other DNA
attaaacacaaataacgggc

SEQ ID NO: 184373 - DNA, 20 bp, synthetic construct
  source 1..20: mol_type = other DNA
aattaaacacaaataacggg

SEQ ID NO: 184374 - DNA, 20 bp, synthetic construct
  source 1..20: mol_type = other DNA
aaattaaacacaaataacgg

SEQ ID NO: 184375 - DNA, 20 bp, synthetic construct
  source 1..20: mol_type = other DNA
gaaattaaacacaaataacg

SEQ ID NO: 184376 - DNA, 20 bp, synthetic construct
  source 1..20: mol_type = other DNA
ggaaattaaacacaaataac

SEQ ID NO: 184377 - DNA, 20 bp, synthetic construct
  source 1..20: mol_type = other DNA
tggaaattaaacacaaataa

SEQ ID NO: 184378 - DNA, 20 bp, synthetic construct
  source 1..20: mol_type = other DNA
gtggaaattaaacacaaata

SEQ ID NO: 184379 - DNA, 20 bp, synthetic construct
  source 1..20: mol_type = other DNA
tgtggaaattaaacacaaat

SEQ ID NO: 184380 - DNA, 20 bp, synthetic construct
  source 1..20: mol_type = other DNA
ttgtggaaattaaacacaaa

SEQ ID NO: 184381 - DNA, 20 bp, synthetic construct
  source 1..20: mol_type = other DNA
attgtggaaattaaacacaa

SEQ ID NO: 184382 - DNA, 20 bp, synthetic construct
  source 1..20: mol_type = other DNA
cattgtggaaattaaacaca

SEQ ID NO: 184383 - DNA, 20 bp, synthetic construct
  source 1..20: mol_type = other DNA
acattgtggaaattaaacac

SEQ ID NO: 184384 - DNA, 20 bp, synthetic construct
  source 1..20: mol_type = other DNA
aacattgtggaaattaaaca

SEQ ID NO: 184385 - DNA, 20 bp, synthetic construct
  source 1..20: mol_type = other DNA
caacattgtggaaattaaac

SEQ ID NO: 184386 - DNA, 20 bp, synthetic construct
  source 1..20: mol_type = other DNA
acaacattgtggaaattaaa

SEQ ID NO: 184387 - DNA, 20 bp, synthetic construct
  source 1..20: mol_type = other DNA
gacaacattgtggaaattaa

SEQ ID NO: 184388 - DNA, 20 bp, synthetic construct
  source 1..20: mol_type = other DNA
agacaacattgtggaaatta

SEQ ID NO: 184389 - DNA, 20 bp, synthetic construct
  source 1..20: mol_type = other DNA
tagacaacattgtggaaatt

SEQ ID NO: 184390 - DNA, 20 bp, synthetic construct
  source 1..20: mol_type = other DNA
ttagacaacattgtggaaat

SEQ ID NO: 184391 - DNA, 20 bp, synthetic construct
  source 1..20: mol_type = other DNA
attagacaacattgtggaaa

SEQ ID NO: 184392 - DNA, 20 bp, synthetic construct
  source 1..20: mol_type = other DNA
aattagacaacattgtggaa

SEQ ID NO: 184393 - DNA, 20 bp, synthetic construct
  source 1..20: mol_type = other DNA
gaattagacaacattgtgga

SEQ ID NO: 184394 - DNA, 20 bp, synthetic construct
  source 1..20: mol_type = other DNA
ggaattagacaacattgtgg

SEQ ID NO: 184395 - DNA, 20 bp, synthetic construct
  source 1..20: mol_type = other DNA
tggaattagacaacattgtg

SEQ ID NO: 184396 - DNA, 20 bp, synthetic construct
  source 1..20: mol_type = other DNA
gtggaattagacaacattgt

SEQ ID NO: 184397 - DNA, 20 bp, synthetic construct
  source 1..20: mol_type = other DNA
agtggaattagacaacattg

SEQ ID NO: 184398 - DNA, 20 bp, synthetic construct
  source 1..20: mol_type = other DNA
gagtggaattagacaacatt

SEQ ID NO: 184399 - DNA, 20 bp, synthetic construct
  source 1..20: mol_type = other DNA
agagtggaattagacaacat

SEQ ID NO: 184400 - DNA, 20 bp, synthetic construct
  source 1..20: mol_type = other DNA
aagagtggaattagacaaca

SEQ ID NO: 184401 - DNA, 20 bp, synthetic construct
  source 1..20: mol_type = other DNA
aaagagtggaattagacaac

SEQ ID NO: 184402 - DNA, 20 bp, synthetic construct
  source 1..20: mol_type = other DNA
caaagagtggaattagacaa

SEQ ID NO: 184403 - DNA, 20 bp, synthetic construct
  source 1..20: mol_type = other DNA
ccaaagagtggaattagaca

SEQ ID NO: 184404 - DNA, 20 bp, synthetic construct
  source 1..20: mol_type = other DNA
cccaaagagtggaattagac

SEQ ID NO: 184405 - DNA, 20 bp, synthetic construct
  source 1..20: mol_type = other DNA
gcccaaagagtggaattaga

SEQ ID NO: 184406 - DNA, 20 bp, synthetic construct
  source 1..20: mol_type = other DNA
agcccaaagagtggaattag

SEQ ID NO: 184407 - DNA, 20 bp, synthetic construct
  source 1..20: mol_type = other DNA
aagcccaaagagtggaatta

SEQ ID NO: 184408 - DNA, 20 bp, synthetic construct
  source 1..20: mol_type = other DNA
gaagcccaaagagtggaatt

SEQ ID NO: 184409 - DNA, 20 bp, synthetic construct
  source 1..20: mol_type = other DNA
ggaagcccaaagagtggaat

SEQ ID NO: 184410 - DNA, 20 bp, synthetic construct
  source 1..20: mol_type = other DNA
gggaagcccaaagagtggaa

SEQ ID NO: 184411 - DNA, 20 bp, synthetic construct
  source 1..20: mol_type = other DNA
ggggaagcccaaagagtgga

SEQ ID NO: 184412 - DNA, 20 bp, synthetic construct
  source 1..20: mol_type = other DNA
tggggaagcccaaagagtgg

SEQ ID NO: 184413 - DNA, 20 bp, synthetic construct
  source 1..20: mol_type = other DNA
ctggggaagcccaaagagtg

SEQ ID NO: 184414 - DNA, 20 bp, synthetic construct
  source 1..20: mol_type = other DNA
cctggggaagcccaaagagt

SEQ ID NO: 184415 - DNA, 20 bp, synthetic construct
  source 1..20: mol_type = other DNA
ccctggggaagcccaaagag

SEQ ID NO: 184416 - DNA, 20 bp, synthetic construct
  source 1..20: mol_type = other DNA
tccctggggaagcccaaaga

SEQ ID NO: 184417 - DNA, 20 bp, synthetic construct
  source 1..20: mol_type = other DNA
atccctggggaagcccaaag

SEQ ID NO: 184418 - DNA, 20 bp, synthetic construct
  source 1..20: mol_type = other DNA
gatccctggggaagcccaaa

SEQ ID NO: 184419 - DNA, 20 bp, synthetic construct
  source 1..20: mol_type = other DNA
ggatccctggggaagcccaa

SEQ ID NO: 184420 - DNA, 20 bp, synthetic construct
  source 1..20: mol_type = other DNA
tggatccctggggaagccca

SEQ ID NO: 184421 - DNA, 20 bp, synthetic construct
  source 1..20: mol_type = other DNA
ctggatccctggggaagccc

SEQ ID NO: 184422 - DNA, 20 bp, synthetic construct
  source 1..20: mol_type = other DNA
gctggatccctggggaagcc

SEQ ID NO: 184423 - DNA, 20 bp, synthetic construct
  source 1..20: mol_type = other DNA
ggctggatccctggggaagc

SEQ ID NO: 184424 - DNA, 20 bp, synthetic construct
  source 1..20: mol_type = other DNA
aggctggatccctggggaag

SEQ ID NO: 184425 - DNA, 20 bp, synthetic construct
  source 1..20: mol_type = other DNA
gaggctggatccctggggaa

SEQ ID NO: 184426 - DNA, 20 bp, synthetic construct
  source 1..20: mol_type = other DNA
ggaggctggatccctgggga

SEQ ID NO: 184427 - DNA, 20 bp, synthetic construct
  source 1..20: mol_type = other DNA
gggaggctggatccctgggg

SEQ ID NO: 184428 - DNA, 20 bp, synthetic construct
  source 1..20: mol_type = other DNA
agggaggctggatccctggg

SEQ ID NO: 184429 - DNA, 20 bp, synthetic construct
  source 1..20: mol_type = other DNA
gagggaggctggatccctgg

SEQ ID NO: 184430 - DNA, 20 bp, synthetic construct
  source 1..20: mol_type = other DNA
tgagggaggctggatccctg

SEQ ID NO: 184431 - DNA, 20 bp, synthetic construct
  source 1..20: mol_type = other DNA
gtgagggaggctggatccct

SEQ ID NO: 184432 - DNA, 20 bp, synthetic construct
  source 1..20: mol_type = other DNA
agtgagggaggctggatccc

SEQ ID NO: 184433 - DNA, 20 bp, synthetic construct
  source 1..20: mol_type = other DNA
gagtgagggaggctggatcc

SEQ ID NO: 184434 - DNA, 20 bp, synthetic construct
  source 1..20: mol_type = other DNA
cgagtgagggaggctggatc

SEQ ID NO: 184435 - DNA, 20 bp, synthetic construct
  source 1..20: mol_type = other DNA
gcgagtgagggaggctggat

SEQ ID NO: 184436 - DNA, 20 bp, synthetic construct
  source 1..20: mol_type = other DNA
ggcgagtgagggaggctgga

SEQ ID NO: 184437 - DNA, 20 bp, synthetic construct
  source 1..20: mol_type = other DNA
gggcgagtgagggaggctgg

SEQ ID NO: 184438 - DNA, 20 bp, synthetic construct
  source 1..20: mol_type = other DNA
tgggcgagtgagggaggctg

SEQ ID NO: 184439 - DNA, 20 bp, synthetic construct
  source 1..20: mol_type = other DNA
atgggcgagtgagggaggct

SEQ ID NO: 184440 - DNA, 20 bp, synthetic construct
  source 1..20: mol_type = other DNA
gatgggcgagtgagggaggc

SEQ ID NO: 184441 - DNA, 20 bp, synthetic construct
  source 1..20: mol_type = other DNA
cgatgggcgagtgagggagg

SEQ ID NO: 184442 - DNA, 20 bp, synthetic construct
  source 1..20: mol_type = other DNA
gcgatgggcgagtgagggag

SEQ ID NO: 184443 - DNA, 20 bp, synthetic construct
  source 1..20: mol_type = other DNA
tgcgatgggcgagtgaggga

SEQ ID NO: 184444 - DNA, 20 bp, synthetic construct
  source 1..20: mol_type = other DNA
ctgcgatgggcgagtgaggg

SEQ ID NO: 184445 - DNA, 20 bp, synthetic construct
  source 1..20: mol_type = other DNA
cctgcgatgggcgagtgagg

SEQ ID NO: 184446 - DNA, 20 bp, synthetic construct
  source 1..20: mol_type = other DNA
ccctgcgatgggcgagtgag

SEQ ID NO: 184447 - DNA, 20 bp, synthetic construct
  source 1..20: mol_type = other DNA
tccctgcgatgggcgagtga

SEQ ID NO: 184448 - DNA, 20 bp, synthetic construct
  source 1..20: mol_type = other DNA
ctccctgcgatgggcgagtg

SEQ ID NO: 184449 - DNA, 20 bp, synthetic construct
  source 1..20: mol_type = other DNA
tctccctgcgatgggcgagt

SEQ ID NO: 184450 - DNA, 20 bp, synthetic construct
  source 1..20: mol_type = other DNA
atctccctgcgatgggcgag

SEQ ID NO: 184451 - DNA, 20 bp, synthetic construct
  source 1..20: mol_type = other DNA
catctccctgcgatgggcga

SEQ ID NO: 184452 - DNA, 20 bp, synthetic construct
  source 1..20: mol_type = other DNA
gcatctccctgcgatgggcg

SEQ ID NO: 184453 - DNA, 20 bp, synthetic construct
  source 1..20: mol_type = other DNA
agcatctccctgcgatgggc

SEQ ID NO: 184454 - DNA, 20 bp, synthetic construct
  source 1..20: mol_type = other DNA
aagcatctccctgcgatggg

SEQ ID NO: 184455 - DNA, 20 bp, synthetic construct
  source 1..20: mol_type = other DNA
aaagcatctccctgcgatgg

SEQ ID NO: 184456 - DNA, 20 bp, synthetic construct
  source 1..20: mol_type = other DNA
taaagcatctccctgcgatg

SEQ ID NO: 184457 - DNA, 20 bp, synthetic construct
  source 1..20: mol_type = other DNA
ataaagcatctccctgcgat

SEQ ID NO: 184458 - DNA, 20 bp, synthetic construct
  source 1..20: mol_type = other DNA
aataaagcatctccctgcga

SEQ ID NO: 184459 - DNA, 20 bp, synthetic construct
  source 1..20: mol_type = other DNA
gaataaagcatctccctgcg

SEQ ID NO: 184460 - DNA, 20 bp, synthetic construct
  source 1..20: mol_type = other DNA
tgaataaagcatctccctgc

SEQ ID NO: 184461 - DNA, 20 bp, synthetic construct
  source 1..20: mol_type = other DNA
atgaataaagcatctccctg

SEQ ID NO: 184462 - DNA, 20 bp, synthetic construct
  source 1..20: mol_type = other DNA
gatgaataaagcatctccct

SEQ ID NO: 184463 - DNA, 20 bp, synthetic construct
  source 1..20: mol_type = other DNA
agatgaataaagcatctccc

SEQ ID NO: 184464 - DNA, 20 bp, synthetic construct
  source 1..20: mol_type = other DNA
aagatgaataaagcatctcc

SEQ ID NO: 184465 - DNA, 20 bp, synthetic construct
  source 1..20: mol_type = other DNA
aaagatgaataaagcatctc

SEQ ID NO: 184466 - DNA, 20 bp, synthetic construct
  source 1..20: mol_type = other DNA
caaagatgaataaagcatct

SEQ ID NO: 184467 - DNA, 20 bp, synthetic construct
  source 1..20: mol_type = other DNA
acaaagatgaataaagcatc

SEQ ID NO: 184468 - DNA, 20 bp, synthetic construct
  source 1..20: mol_type = other DNA
cacaaagatgaataaagcat

SEQ ID NO: 184469 - DNA, 20 bp, synthetic construct
  source 1..20: mol_type = other DNA
acacaaagatgaataaagca

SEQ ID NO: 184470 - DNA, 20 bp, synthetic construct
  source 1..20: mol_type = other DNA
gacacaaagatgaataaagc

SEQ ID NO: 184471 - DNA, 20 bp, synthetic construct
  source 1..20: mol_type = other DNA
agacacaaagatgaataaag

SEQ ID NO: 184472 - DNA, 20 bp, synthetic construct
  source 1..20: mol_type = other DNA
aagacacaaagatgaataaa

SEQ ID NO: 184473 - DNA, 20 bp, synthetic construct
  source 1..20: mol_type = other DNA
gaagacacaaagatgaataa

SEQ ID NO: 184474 - DNA, 20 bp, synthetic construct
  source 1..20: mol_type = other DNA
agaagacacaaagatgaata

SEQ ID NO: 184475 - DNA, 20 bp, synthetic construct
  source 1..20: mol_type = other DNA
cagaagacacaaagatgaat

SEQ ID NO: 184476 - DNA, 20 bp, synthetic construct
  source 1..20: mol_type = other DNA
acagaagacacaaagatgaa

SEQ ID NO: 184477 - DNA, 20 bp, synthetic construct
  source 1..20: mol_type = other DNA
cacagaagacacaaagatga

SEQ ID NO: 184478 - DNA, 20 bp, synthetic construct
  source 1..20: mol_type = other DNA
gcacagaagacacaaagatg

SEQ ID NO: 184479 - DNA, 20 bp, synthetic construct
  source 1..20: mol_type = other DNA
ggcacagaagacacaaagat

SEQ ID NO: 184480 - DNA, 20 bp, synthetic construct
  source 1..20: mol_type = other DNA
cggcacagaagacacaaaga

SEQ ID NO: 184481 - DNA, 20 bp, synthetic construct
  source 1..20: mol_type = other DNA
ccggcacagaagacacaaag

SEQ ID NO: 184482 - DNA, 20 bp, synthetic construct
  source 1..20: mol_type = other DNA
cccggcacagaagacacaaa

SEQ ID NO: 184483 - DNA, 20 bp, synthetic construct
  source 1..20: mol_type = other DNA
gcccggcacagaagacacaa

SEQ ID NO: 184484 - DNA, 20 bp, synthetic construct
  source 1..20: mol_type = other DNA
tgcccggcacagaagacaca

SEQ ID NO: 184485 - DNA, 20 bp, synthetic construct
  source 1..20: mol_type = other DNA
atgcccggcacagaagacac

SEQ ID NO: 184486 - DNA, 20 bp, synthetic construct
  source 1..20: mol_type = other DNA
tatgcccggcacagaagaca

SEQ ID NO: 184487 - DNA, 20 bp, synthetic construct
  source 1..20: mol_type = other DNA
ctatgcccggcacagaagac

SEQ ID NO: 184488 - DNA, 20 bp, synthetic construct
  source 1..20: mol_type = other DNA
gctatgcccggcacagaaga

SEQ ID NO: 184489 - DNA, 20 bp, synthetic construct
  source 1..20: mol_type = other DNA
cgctatgcccggcacagaag

SEQ ID NO: 184490 - DNA, 20 bp, synthetic construct
  source 1..20: mol_type = other DNA
gcgctatgcccggcacagaa

SEQ ID NO: 184491 - DNA, 20 bp, synthetic construct
  source 1..20: mol_type = other DNA
tgcgctatgcccggcacaga

SEQ ID NO: 184492 - DNA, 20 bp, synthetic construct
  source 1..20: mol_type = other DNA
atgcgctatgcccggcacag

SEQ ID NO: 184493 - DNA, 20 bp, synthetic construct
  source 1..20: mol_type = other DNA
catgcgctatgcccggcaca

SEQ ID NO: 184494 - DNA, 20 bp, synthetic construct
  source 1..20: mol_type = other DNA
ccatgcgctatgcccggcac

SEQ ID NO: 184495 - DNA, 20 bp, synthetic construct
  source 1..20: mol_type = other DNA
gccatgcgctatgcccggca

SEQ ID NO: 184496 - DNA, 20 bp, synthetic construct
  source 1..20: mol_type = other DNA
tgccatgcgctatgcccggc

SEQ ID NO: 184497 - DNA, 20 bp, synthetic construct
  source 1..20: mol_type = other DNA
gtgccatgcgctatgcccgg

SEQ ID NO: 184498 - DNA, 20 bp, synthetic construct
  source 1..20: mol_type = other DNA
tgtgccatgcgctatgcccg

SEQ ID NO: 184499 - DNA, 20 bp, synthetic construct
  source 1..20: mol_type = other DNA
ctgtgccatgcgctatgccc

SEQ ID NO: 184500 - DNA, 20 bp, synthetic construct
  source 1..20: mol_type = other DNA
tctgtgccatgcgctatgcc

SEQ ID NO: 184501 - DNA, 20 bp, synthetic construct
  source 1..20: mol_type = other DNA
ttctgtgccatgcgctatgc

SEQ ID NO: 184502 - DNA, 20 bp, synthetic construct
  source 1..20: mol_type = other DNA
attctgtgccatgcgctatg

SEQ ID NO: 184503 - DNA, 20 bp, synthetic construct
  source 1..20: mol_type = other DNA
tattctgtgccatgcgctat

SEQ ID NO: 184504 - DNA, 20 bp, synthetic construct
  source 1..20: mol_type = other DNA
ttattctgtgccatgcgcta

SEQ ID NO: 184505 - DNA, 20 bp, synthetic construct
  source 1..20: mol_type = other DNA
cttattctgtgccatgcgct

SEQ ID NO: 184506 - DNA, 20 bp, synthetic construct
  source 1..20: mol_type = other DNA
gcttattctgtgccatgcgc

SEQ ID NO: 184507 - DNA, 20 bp, synthetic construct
  source 1..20: mol_type = other DNA
tgcttattctgtgccatgcg

SEQ ID NO: 184508 - DNA, 20 bp, synthetic construct
  source 1..20: mol_type = other DNA
gtgcttattctgtgccatgc

SEQ ID NO: 184509 - DNA, 20 bp, synthetic construct
  source 1..20: mol_type = other DNA
agtgcttattctgtgccatg

SEQ ID NO: 184510 - DNA, 20 bp, synthetic construct
  source 1..20: mol_type = other DNA
gagtgcttattctgtgccat

SEQ ID NO: 184511 - DNA, 20 bp, synthetic construct
  source 1..20: mol_type = other DNA
tgagtgcttattctgtgcca

SEQ ID NO: 184512 - DNA, 20 bp, synthetic construct
  source 1..20: mol_type = other DNA
ctgagtgcttattctgtgcc

SEQ ID NO: 184513 - DNA, 20 bp, synthetic construct
  source 1..20: mol_type = other DNA
actgagtgcttattctgtgc

SEQ ID NO: 184514 - DNA, 20 bp, synthetic construct
  source 1..20: mol_type = other DNA
tactgagtgcttattctgtg

SEQ ID NO: 184515 - DNA, 20 bp, synthetic construct
  source 1..20: mol_type = other DNA
ttactgagtgcttattctgt

SEQ ID NO: 184516 - DNA, 20 bp, synthetic construct
  source 1..20: mol_type = other DNA
attactgagtgcttattctg

SEQ ID NO: 184517 - DNA, 20 bp, synthetic construct
  source 1..20: mol_type = other DNA
aattactgagtgcttattct

SEQ ID NO: 184518 - DNA, 20 bp, synthetic construct
  source 1..20: mol_type = other DNA
caattactgagtgcttattc

SEQ ID NO: 184519 - DNA, 20 bp, synthetic construct
  source 1..20: mol_type = other DNA
tcaattactgagtgcttatt

SEQ ID NO: 184520 - DNA, 20 bp, synthetic construct
  source 1..20: mol_type = other DNA
atcaattactgagtgcttat

SEQ ID NO: 184521 - DNA, 20 bp, synthetic construct
  source 1..20: mol_type = other DNA
aatcaattactgagtgctta

SEQ ID NO: 184522 - DNA, 20 bp, synthetic construct
  source 1..20: mol_type = other DNA
gaatcaattactgagtgctt

SEQ ID NO: 184523 - DNA, 20 bp, synthetic construct
  source 1..20: mol_type = other DNA
tgaatcaattactgagtgct

SEQ ID NO: 184524 - DNA, 20 bp, synthetic construct
  source 1..20: mol_type = other DNA
gtgaatcaattactgagtgc

SEQ ID NO: 184525 - DNA, 20 bp, synthetic construct
  source 1..20: mol_type = other DNA
cgtgaatcaattactgagtg

SEQ ID NO: 184526 - DNA, 20 bp, synthetic construct
  source 1..20: mol_type = other DNA
tcgtgaatcaattactgagt

SEQ ID NO: 184527 - DNA, 20 bp, synthetic construct
  source 1..20: mol_type = other DNA
ctcgtgaatcaattactgag

SEQ ID NO: 184528 - DNA, 20 bp, synthetic construct
  source 1..20: mol_type = other DNA
actcgtgaatcaattactga

SEQ ID NO: 184529 - DNA, 20 bp, synthetic construct
  source 1..20: mol_type = other DNA
cactcgtgaatcaattactg

SEQ ID NO: 184530 - DNA, 20 bp, synthetic construct
  source 1..20: mol_type = other DNA
tcactcgtgaatcaattact

SEQ ID NO: 184531 - DNA, 20 bp, synthetic construct
  source 1..20: mol_type = other DNA
ttcactcgtgaatcaattac

SEQ ID NO: 184532 - DNA, 20 bp, synthetic construct
  source 1..20: mol_type = other DNA
attcactcgtgaatcaatta

SEQ ID NO: 184533 - DNA, 20 bp, synthetic construct
  source 1..20: mol_type = other DNA
tattcactcgtgaatcaatt

SEQ ID NO: 184534 - DNA, 20 bp, synthetic construct
  source 1..20: mol_type = other DNA
ttattcactcgtgaatcaat

SEQ ID NO: 184535 - DNA, 20 bp, synthetic construct
  source 1..20: mol_type = other DNA
tttattcactcgtgaatcaa

SEQ ID NO: 184536 - DNA, 20 bp, synthetic construct
  source 1..20: mol_type = other DNA
atttattcactcgtgaatca

SEQ ID NO: 184537 - DNA, 20 bp, synthetic construct
  source 1..20: mol_type = other DNA
catttattcactcgtgaatc

SEQ ID NO: 184538 - DNA, 20 bp, synthetic construct
  source 1..20: mol_type = other DNA
ccatttattcactcgtgaat

SEQ ID NO: 184539 - DNA, 20 bp, synthetic construct
  source 1..20: mol_type = other DNA
tccatttattcactcgtgaa

SEQ ID NO: 184540 - DNA, 20 bp, synthetic construct
  source 1..20: mol_type = other DNA
atccatttattcactcgtga

SEQ ID NO: 184541 - DNA, 20 bp, synthetic construct
  source 1..20: mol_type = other DNA
catccatttattcactcgtg

SEQ ID NO: 184542 - DNA, 20 bp, synthetic construct
  source 1..20: mol_type = other DNA
tcatccatttattcactcgt

SEQ ID NO: 184543 - DNA, 20 bp, synthetic construct
  source 1..20: mol_type = other DNA
ctcatccatttattcactcg

SEQ ID NO: 184544 - DNA, 20 bp, synthetic construct
  source 1..20: mol_type = other DNA
actcatccatttattcactc

SEQ ID NO: 184545 - DNA, 20 bp, synthetic construct
  source 1..20: mol_type = other DNA
cactcatccatttattcact

SEQ ID NO: 184546 - DNA, 20 bp, synthetic construct
  source 1..20: mol_type = other DNA
ccactcatccatttattcac

SEQ ID NO: 184547 - DNA, 20 bp, synthetic construct
  source 1..20: mol_type = other DNA
cccactcatccatttattca

SEQ ID NO: 184548 - DNA, 20 bp, synthetic construct
  source 1..20: mol_type = other DNA
acccactcatccatttattc

SEQ ID NO: 184549 - DNA, 20 bp, synthetic construct
  source 1..20: mol_type = other DNA
cacccactcatccatttatt

SEQ ID NO: 184550 - DNA, 20 bp, synthetic construct
  source 1..20: mol_type = other DNA
tcacccactcatccatttat

SEQ ID NO: 184551 - DNA, 20 bp, synthetic construct
  source 1..20: mol_type = other DNA
ctcacccactcatccattta

SEQ ID NO: 184552 - DNA, 20 bp, synthetic construct
  source 1..20: mol_type = other DNA
actcacccactcatccattt

SEQ ID NO: 184553 - DNA, 20 bp, synthetic construct
  source 1..20: mol_type = other DNA
aactcacccactcatccatt

SEQ ID NO: 184554 - DNA, 20 bp, synthetic construct
  source 1..20: mol_type = other DNA
gaactcacccactcatccat

SEQ ID NO: 184555 - DNA, 20 bp, synthetic construct
  source 1..20: mol_type = other DNA
tgaactcacccactcatcca

SEQ ID NO: 184556 - DNA, 20 bp, synthetic construct
  source 1..20: mol_type = other DNA
ttgaactcacccactcatcc

SEQ ID NO: 184557 - DNA, 20 bp, synthetic construct
  source 1..20: mol_type = other DNA
attgaactcacccactcatc

SEQ ID NO: 184558 - DNA, 20 bp, synthetic construct
  source 1..20: mol_type = other DNA
tattgaactcacccactcat

SEQ ID NO: 184559 - DNA, 20 bp, synthetic construct
  source 1..20: mol_type = other DNA
atattgaactcacccactca

SEQ ID NO: 184560 - DNA, 20 bp, synthetic construct
  source 1..20: mol_type = other DNA
aatattgaactcacccactc

SEQ ID NO: 184561 - DNA, 20 bp, synthetic construct
  source 1..20: mol_type = other DNA
caatattgaactcacccact

SEQ ID NO: 184562 - DNA, 20 bp, synthetic construct
  source 1..20: mol_type = other DNA
tcaatattgaactcacccac

SEQ ID NO: 184563 - DNA, 20 bp, synthetic construct
  source 1..20: mol_type = other DNA
gtcaatattgaactcaccca

SEQ ID NO: 184564 - DNA, 20 bp, synthetic construct
  source 1..20: mol_type = other DNA
agtcaatattgaactcaccc

SEQ ID NO: 184565 - DNA, 20 bp, synthetic construct
  source 1..20: mol_type = other DNA
tagtcaatattgaactcacc

SEQ ID NO: 184566 - DNA, 20 bp, synthetic construct
  source 1..20: mol_type = other DNA
gtagtcaatattgaactcac

SEQ ID NO: 184567 - DNA, 20 bp, synthetic construct
  source 1..20: mol_type = other DNA
tgtagtcaatattgaactca

SEQ ID NO: 184568 - DNA, 20 bp, synthetic construct
  source 1..20: mol_type = other DNA
ttgtagtcaatattgaactc

SEQ ID NO: 184569 - DNA, 20 bp, synthetic construct
  source 1..20: mol_type = other DNA
tttgtagtcaatattgaact

SEQ ID NO: 184570 - DNA, 20 bp, synthetic construct
  source 1..20: mol_type = other DNA
ttttgtagtcaatattgaac

SEQ ID NO: 184571 - DNA, 20 bp, synthetic construct
  source 1..20: mol_type = other DNA
tttttgtagtcaatattgaa

SEQ ID NO: 184572 - DNA, 20 bp, synthetic construct
  source 1..20: mol_type = other DNA
gtttttgtagtcaatattga

SEQ ID NO: 184573 - DNA, 20 bp, synthetic construct
  source 1..20: mol_type = other DNA
ggtttttgtagtcaatattg

SEQ ID NO: 184574 - DNA, 20 bp, synthetic construct
  source 1..20: mol_type = other DNA
gggtttttgtagtcaatatt

SEQ ID NO: 184575 - DNA, 20 bp, synthetic construct
  source 1..20: mol_type = other DNA
agggtttttgtagtcaatat

SEQ ID NO: 184576 - DNA, 20 bp, synthetic construct
  source 1..20: mol_type = other DNA
tagggtttttgtagtcaata

SEQ ID NO: 184577 - DNA, 20 bp, synthetic construct
  source 1..20: mol_type = other DNA
ttagggtttttgtagtcaat

SEQ ID NO: 184578 - DNA, 20 bp, synthetic construct
  source 1..20: mol_type = other DNA
cttagggtttttgtagtcaa

SEQ ID NO: 184579 - DNA, 20 bp, synthetic construct
  source 1..20: mol_type = other DNA
ccttagggtttttgtagtca

SEQ ID NO: 184580 - DNA, 20 bp, synthetic construct
  source 1..20: mol_type = other DNA
gccttagggtttttgtagtc

SEQ ID NO: 184581 - DNA, 20 bp, synthetic construct
  source 1..20: mol_type = other DNA
ggccttagggtttttgtagt

SEQ ID NO: 184582 - DNA, 20 bp, synthetic construct
  source 1..20: mol_type = other DNA
tggccttagggtttttgtag

SEQ ID NO: 184583 - DNA, 20 bp, synthetic construct
  source 1..20: mol_type = other DNA
gtggccttagggtttttgta

SEQ ID NO: 184584 - DNA, 20 bp, synthetic construct
  source 1..20: mol_type = other DNA
tgtggccttagggtttttgt

SEQ ID NO: 184585 - DNA, 20 bp, synthetic construct
  source 1..20: mol_type = other DNA
gtgtggccttagggtttttg

SEQ ID NO: 184586 - DNA, 20 bp, synthetic construct
  source 1..20: mol_type = other DNA
agtgtggccttagggttttt

SEQ ID NO: 184587 - DNA, 20 bp, synthetic construct
  source 1..20: mol_type = other DNA
cagtgtggccttagggtttt

SEQ ID NO: 184588 - DNA, 20 bp, synthetic construct
  source 1..20: mol_type = other DNA
ccagtgtggccttagggttt

SEQ ID NO: 184589 - DNA, 20 bp, synthetic construct
  source 1..20: mol_type = other DNA
accagtgtggccttagggtt

SEQ ID NO: 184590 - DNA, 20 bp, synthetic construct
  source 1..20: mol_type = other DNA
caccagtgtggccttagggt

SEQ ID NO: 184591 - DNA, 20 bp, synthetic construct
  source 1..20: mol_type = other DNA
tcaccagtgtggccttaggg

SEQ ID NO: 184592 - DNA, 20 bp, synthetic construct
  source 1..20: mol_type = other DNA
ctcaccagtgtggccttagg

SEQ ID NO: 184593 - DNA, 20 bp, synthetic construct
  source 1..20: mol_type = other DNA
actcaccagtgtggccttag

SEQ ID NO: 184594 - DNA, 20 bp, synthetic construct
  source 1..20: mol_type = other DNA
cactcaccagtgtggcctta

SEQ ID NO: 184595 - DNA, 20 bp, synthetic construct
  source 1..20: mol_type = other DNA
ccactcaccagtgtggcctt

SEQ ID NO: 184596 - DNA, 20 bp, synthetic construct
  source 1..20: mol_type = other DNA
gccactcaccagtgtggcct

SEQ ID NO: 184597 - DNA, 20 bp, synthetic construct
  source 1..20: mol_type = other DNA
agccactcaccagtgtggcc

SEQ ID NO: 184598 - DNA, 20 bp, synthetic construct
  source 1..20: mol_type = other DNA
cagccactcaccagtgtggc

SEQ ID NO: 184599 - DNA, 20 bp, synthetic construct
  source 1..20: mol_type = other DNA
gcagccactcaccagtgtgg

SEQ ID NO: 184600 - DNA, 20 bp, synthetic construct
  source 1..20: mol_type = other DNA
cgcagccactcaccagtgtg

SEQ ID NO: 184601 - DNA, 20 bp, synthetic construct
  source 1..20: mol_type = other DNA
gcgcagccactcaccagtgt

SEQ ID NO: 184602 - DNA, 20 bp, synthetic construct
  source 1..20: mol_type = other DNA
ggcgcagccactcaccagtg

SEQ ID NO: 184603 - DNA, 20 bp, synthetic construct
  source 1..20: mol_type = other DNA
aggcgcagccactcaccagt

SEQ ID NO: 184604 - DNA, 20 bp, synthetic construct
  source 1..20: mol_type = other DNA
caggcgcagccactcaccag

SEQ ID NO: 184605 - DNA, 20 bp, synthetic construct
  source 1..20: mol_type = other DNA
acaggcgcagccactcacca

SEQ ID NO: 184606 - DNA, 20 bp, synthetic construct
  source 1..20: mol_type = other DNA
tacaggcgcagccactcacc

SEQ ID NO: 184607 - DNA, 20 bp, synthetic construct
  source 1..20: mol_type = other DNA
ctacaggcgcagccactcac

SEQ ID NO: 184608 - DNA, 20 bp, synthetic construct
  source 1..20: mol_type = other DNA
actacaggcgcagccactca

SEQ ID NO: 184609 - DNA, 20 bp, synthetic construct
  source 1..20: mol_type = other DNA
gactacaggcgcagccactc

SEQ ID NO: 184610 - DNA, 20 bp, synthetic construct
  source 1..20: mol_type = other DNA
ggactacaggcgcagccact

SEQ ID NO: 184611 - DNA, 20 bp, synthetic construct
  source 1..20: mol_type = other DNA
gggactacaggcgcagccac

SEQ ID NO: 184612 - DNA, 20 bp, synthetic construct
  source 1..20: mol_type = other DNA
tgggactacaggcgcagcca

SEQ ID NO: 184613 - DNA, 20 bp, synthetic construct
  source 1..20: mol_type = other DNA
ctgggactacaggcgcagcc

SEQ ID NO: 184614 - DNA, 20 bp, synthetic construct
  source 1..20: mol_type = other DNA
gctgggactacaggcgcagc

SEQ ID NO: 184615 - DNA, 20 bp, synthetic construct
  source 1..20: mol_type = other DNA
agctgggactacaggcgcag

SEQ ID NO: 184616 - DNA, 20 bp, synthetic construct
  source 1..20: mol_type = other DNA
cagctgggactacaggcgca

SEQ ID NO: 184617 - DNA, 20 bp, synthetic construct
  source 1..20: mol_type = other DNA
gcagctgggactacaggcgc

SEQ ID NO: 184618 - DNA, 20 bp, synthetic construct
  source 1..20: mol_type = other DNA
agcagctgggactacaggcg

SEQ ID NO: 184619 - DNA, 20 bp, synthetic construct
  source 1..20: mol_type = other DNA
cagcagctgggactacaggc

SEQ ID NO: 184620 - DNA, 20 bp, synthetic construct
  source 1..20: mol_type = other DNA
ccagcagctgggactacagg

SEQ ID NO: 184621 - DNA, 20 bp, synthetic construct
  source 1..20: mol_type = other DNA
cccagcagctgggactacag

SEQ ID NO: 184622 - DNA, 20 bp, synthetic construct
  source 1..20: mol_type = other DNA
ccccagcagctgggactaca

SEQ ID NO: 184623 - DNA, 20 bp, synthetic construct
  source 1..20: mol_type = other DNA
tccccagcagctgggactac

SEQ ID NO: 184624 - DNA, 20 bp, synthetic construct
  source 1..20: mol_type = other DNA
ttccccagcagctgggacta

SEQ ID NO: 184625 - DNA, 20 bp, synthetic construct
  source 1..20: mol_type = other DNA
attccccagcagctgggact

SEQ ID NO: 184626 - DNA, 20 bp, synthetic construct
  source 1..20: mol_type = other DNA
gattccccagcagctgggac

SEQ ID NO: 184627 - DNA, 20 bp, synthetic construct
  source 1..20: mol_type = other DNA
agattccccagcagctggga

SEQ ID NO: 184628 - DNA, 20 bp, synthetic construct
  source 1..20: mol_type = other DNA
cagattccccagcagctggg

SEQ ID NO: 184629 - DNA, 20 bp, synthetic construct
  source 1..20: mol_type = other DNA
tcagattccccagcagctgg

SEQ ID NO: 184630 - DNA, 20 bp, synthetic construct
  source 1..20: mol_type = other DNA
ctcagattccccagcagctg

SEQ ID NO: 184631 - DNA, 20 bp, synthetic construct
  source 1..20: mol_type = other DNA
cctcagattccccagcagct

SEQ ID NO: 184632 - DNA, 20 bp, synthetic construct
  source 1..20: mol_type = other DNA
gcctcagattccccagcagc

SEQ ID NO: 184633 - DNA, 20 bp, synthetic construct
  source 1..20: mol_type = other DNA
tgcctcagattccccagcag

SEQ ID NO: 184634 - DNA, 20 bp, synthetic construct
  source 1..20: mol_type = other DNA
ctgcctcagattccccagca

SEQ ID NO: 184635 - DNA, 20 bp, synthetic construct
  source 1..20: mol_type = other DNA
cctgcctcagattccccagc

SEQ ID NO: 184636 - DNA, 20 bp, synthetic construct
  source 1..20: mol_type = other DNA
tcctgcctcagattccccag

SEQ ID NO: 184637 - DNA, 20 bp, synthetic construct
  source 1..20: mol_type = other DNA
ctcctgcctcagattcccca

SEQ ID NO: 184638 - DNA, 20 bp, synthetic construct
  source 1..20: mol_type = other DNA
cctcctgcctcagattcccc

SEQ ID NO: 184639 - DNA, 20 bp, synthetic construct
  source 1..20: mol_type = other DNA
tcctcctgcctcagattccc

SEQ ID NO: 184640 - DNA, 20 bp, synthetic construct
  source 1..20: mol_type = other DNA
atcctcctgcctcagattcc

SEQ ID NO: 184641 - DNA, 20 bp, synthetic construct
  source 1..20: mol_type = other DNA
gatcctcctgcctcagattc

SEQ ID NO: 184642 - DNA, 20 bp, synthetic construct
  source 1..20: mol_type = other DNA
agatcctcctgcctcagatt

SEQ ID NO: 184643 - DNA, 20 bp, synthetic construct
  source 1..20: mol_type = other DNA
gagatcctcctgcctcagat

SEQ ID NO: 184644 - DNA, 20 bp, synthetic construct
  source 1..20: mol_type = other DNA
agagatcctcctgcctcaga

SEQ ID NO: 184645 - DNA, 20 bp, synthetic construct
  source 1..20: mol_type = other DNA
aagagatcctcctgcctcag

SEQ ID NO: 184646 - DNA, 20 bp, synthetic construct
  source 1..20: mol_type = other DNA
caagagatcctcctgcctca

SEQ ID NO: 184647 - DNA, 20 bp, synthetic construct
  source 1..20: mol_type = other DNA
tcaagagatcctcctgcctc

SEQ ID NO: 184648 - DNA, 20 bp, synthetic construct
  source 1..20: mol_type = other DNA
ctcaagagatcctcctgcct

SEQ ID NO: 184649 - DNA, 20 bp, synthetic construct
  source 1..20: mol_type = other DNA
gctcaagagatcctcctgcc

SEQ ID NO: 184650 - DNA, 20 bp, synthetic construct
  source 1..20: mol_type = other DNA
ggctcaagagatcctcctgc

SEQ ID NO: 184651 - DNA, 20 bp, synthetic construct
  source 1..20: mol_type = other DNA
gggctcaagagatcctcctg

SEQ ID NO: 184652 - DNA, 20 bp, synthetic construct
  source 1..20: mol_type = other DNA
tgggctcaagagatcctcct

SEQ ID NO: 184653 - DNA, 20 bp, synthetic construct
  source 1..20: mol_type = other DNA
ctgggctcaagagatcctcc

SEQ ID NO: 184654 - DNA, 20 bp, synthetic construct
  source 1..20: mol_type = other DNA
cctgggctcaagagatcctc

SEQ ID NO: 184655 - DNA, 20 bp, synthetic construct
  source 1..20: mol_type = other DNA
tcctgggctcaagagatcct

SEQ ID NO: 184656 - DNA, 20 bp, synthetic construct
  source 1..20: mol_type = other DNA
ctcctgggctcaagagatcc

SEQ ID NO: 184657 - DNA, 20 bp, synthetic construct
  source 1..20: mol_type = other DNA
actcctgggctcaagagatc

SEQ ID NO: 184658 - DNA, 20 bp, synthetic construct
  source 1..20: mol_type = other DNA
aactcctgggctcaagagat

SEQ ID NO: 184659 - DNA, 20 bp, synthetic construct
  source 1..20: mol_type = other DNA
aaactcctgggctcaagaga

SEQ ID NO: 184660 - DNA, 20 bp, synthetic construct
  source 1..20: mol_type = other DNA
caaactcctgggctcaagag

SEQ ID NO: 184661 - DNA, 20 bp, synthetic construct
  source 1..20: mol_type = other DNA
tcaaactcctgggctcaaga

SEQ ID NO: 184662 - DNA, 20 bp, synthetic construct
  source 1..20: mol_type = other DNA
ttcaaactcctgggctcaag

SEQ ID NO: 184663 - DNA, 20 bp, synthetic construct
  source 1..20: mol_type = other DNA
tttcaaactcctgggctcaa

SEQ ID NO: 184664 - DNA, 20 bp, synthetic construct
  source 1..20: mol_type = other DNA
gtttcaaactcctgggctca

SEQ ID NO: 184665 - DNA, 20 bp, synthetic construct
  source 1..20: mol_type = other DNA
agtttcaaactcctgggctc

SEQ ID NO: 184666 - DNA, 20 bp, synthetic construct
  source 1..20: mol_type = other DNA
tagtttcaaactcctgggct

SEQ ID NO: 184667 - DNA, 20 bp, synthetic construct
  source 1..20: mol_type = other DNA
ctagtttcaaactcctgggc

SEQ ID NO: 184668 - DNA, 20 bp, synthetic construct
  source 1..20: mol_type = other DNA
gctagtttcaaactcctggg

SEQ ID NO: 184669 - DNA, 20 bp, synthetic construct
  source 1..20: mol_type = other DNA
ggctagtttcaaactcctgg

SEQ ID NO: 184670 - DNA, 20 bp, synthetic construct
  source 1..20: mol_type = other DNA
aggctagtttcaaactcctg

SEQ ID NO: 184671 - DNA, 20 bp, synthetic construct
  source 1..20: mol_type = other DNA
caggctagtttcaaactcct

SEQ ID NO: 184672 - DNA, 20 bp, synthetic construct
  source 1..20: mol_type = other DNA
ccaggctagtttcaaactcc

SEQ ID NO: 184673 - DNA, 20 bp, synthetic construct
  source 1..20: mol_type = other DNA
cccaggctagtttcaaactc

SEQ ID NO: 184674 - DNA, 20 bp, synthetic construct
  source 1..20: mol_type = other DNA
gcccaggctagtttcaaact

SEQ ID NO: 184675 - DNA, 20 bp, synthetic construct
  source 1..20: mol_type = other DNA
cgcccaggctagtttcaaac

SEQ ID NO: 184676 - DNA, 20 bp, synthetic construct
  source 1..20: mol_type = other DNA
tcgcccaggctagtttcaaa

SEQ ID NO: 184677 - DNA, 20 bp, synthetic construct
  source 1..20: mol_type = other DNA
atcgcccaggctagtttcaa

SEQ ID NO: 184678 - DNA, 20 bp, synthetic construct
  source 1..20: mol_type = other DNA
tatcgcccaggctagtttca

SEQ ID NO: 184679 - DNA, 20 bp, synthetic construct
  source 1..20: mol_type = other DNA
atatcgcccaggctagtttc

SEQ ID NO: 184680 - DNA, 20 bp, synthetic construct
  source 1..20: mol_type = other DNA
tatatcgcccaggctagttt

SEQ ID NO: 184681 - DNA, 20 bp, synthetic construct
  source 1..20: mol_type = other DNA
ctatatcgcccaggctagtt

SEQ ID NO: 184682 - DNA, 20 bp, synthetic construct
  source 1..20: mol_type = other DNA
gctatatcgcccaggctagt

SEQ ID NO: 184683 - DNA, 20 bp, synthetic construct
  source 1..20: mol_type = other DNA
cgctatatcgcccaggctag

SEQ ID NO: 184684 - DNA, 20 bp, synthetic construct
  source 1..20: mol_type = other DNA
tcgctatatcgcccaggcta

SEQ ID NO: 184685 - DNA, 20 bp, synthetic construct
  source 1..20: mol_type = other DNA
ctcgctatatcgcccaggct

SEQ ID NO: 184686 - DNA, 20 bp, synthetic construct
  source 1..20: mol_type = other DNA
tctcgctatatcgcccaggc

SEQ ID NO: 184687 - DNA, 20 bp, synthetic construct
  source 1..20: mol_type = other DNA
ttctcgctatatcgcccagg

SEQ ID NO: 184688 - DNA, 20 bp, synthetic construct
  source 1..20: mol_type = other DNA
gttctcgctatatcgcccag

SEQ ID NO: 184689 - DNA, 20 bp, synthetic construct
  source 1..20: mol_type = other DNA
ggttctcgctatatcgccca

SEQ ID NO: 184690 - DNA, 20 bp, synthetic construct
  source 1..20: mol_type = other DNA
aggttctcgctatatcgccc

SEQ ID NO: 184691 - DNA, 20 bp, synthetic construct
  source 1..20: mol_type = other DNA
caggttctcgctatatcgcc

SEQ ID NO: 184692 - DNA, 20 bp, synthetic construct
  source 1..20: mol_type = other DNA
acaggttctcgctatatcgc

SEQ ID NO: 184693 - DNA, 20 bp, synthetic construct
  source 1..20: mol_type = other DNA
gacaggttctcgctatatcg

SEQ ID NO: 184694 - DNA, 20 bp, synthetic construct
  source 1..20: mol_type = other DNA
agacaggttctcgctatatc

SEQ ID NO: 184695 - DNA, 20 bp, synthetic construct
  source 1..20: mol_type = other DNA
gagacaggttctcgctatat

SEQ ID NO: 184696 - DNA, 20 bp, synthetic construct
  source 1..20: mol_type = other DNA
tgagacaggttctcgctata

SEQ ID NO: 184697 - DNA, 20 bp, synthetic construct
  source 1..20: mol_type = other DNA
ttgagacaggttctcgctat

SEQ ID NO: 184698 - DNA, 20 bp, synthetic construct
  source 1..20: mol_type = other DNA
tttgagacaggttctcgcta

SEQ ID NO: 184699 - DNA, 20 bp, synthetic construct
  source 1..20: mol_type = other DNA
atttgagacaggttctcgct

SEQ ID NO: 184700 - DNA, 20 bp, synthetic construct
  source 1..20: mol_type = other DNA
catttgagacaggttctcgc

SEQ ID NO: 184701 - DNA, 20 bp, synthetic construct
  source 1..20: mol_type = other DNA
tcatttgagacaggttctcg

SEQ ID NO: 184702 - DNA, 20 bp, synthetic construct
  source 1..20: mol_type = other DNA
gtcatttgagacaggttctc

SEQ ID NO: 184703 - DNA, 20 bp, synthetic construct
  source 1..20: mol_type = other DNA
tgtcatttgagacaggttct

SEQ ID NO: 184704 - DNA, 20 bp, synthetic construct
  source 1..20: mol_type = other DNA
ttgtcatttgagacaggttc

SEQ ID NO: 184705 - DNA, 20 bp, synthetic construct
  source 1..20: mol_type = other DNA
tttgtcatttgagacaggtt

SEQ ID NO: 184706 - DNA, 20 bp, synthetic construct
  source 1..20: mol_type = other DNA
ttttgtcatttgagacaggt

SEQ ID NO: 184707 - DNA, 20 bp, synthetic construct
  source 1..20: mol_type = other DNA
tttttgtcatttgagacagg

SEQ ID NO: 184708 - DNA, 20 bp, synthetic construct
  source 1..20: mol_type = other DNA
gtttttgtcatttgagacag

SEQ ID NO: 184709 - DNA, 20 bp, synthetic construct
  source 1..20: mol_type = other DNA
tgtttttgtcatttgagaca

SEQ ID NO: 184710 - DNA, 20 bp, synthetic construct
  source 1..20: mol_type = other DNA
ctgtttttgtcatttgagac

SEQ ID NO: 184711 - DNA, 20 bp, synthetic construct
  source 1..20: mol_type = other DNA
cctgtttttgtcatttgaga

SEQ ID NO: 184712 - DNA, 20 bp, synthetic construct
  source 1..20: mol_type = other DNA
ccctgtttttgtcatttgag

SEQ ID NO: 184713 - DNA, 20 bp, synthetic construct
  source 1..20: mol_type = other DNA
gccctgtttttgtcatttga

SEQ ID NO: 184714 - DNA, 20 bp, synthetic construct
  source 1..20: mol_type = other DNA
ggccctgtttttgtcatttg

SEQ ID NO: 184715 - DNA, 20 bp, synthetic construct
  source 1..20: mol_type = other DNA
tggccctgtttttgtcattt

SEQ ID NO: 184716 - DNA, 20 bp, synthetic construct
  source 1..20: mol_type = other DNA
ctggccctgtttttgtcatt

SEQ ID NO: 184717 - DNA, 20 bp, synthetic construct
  source 1..20: mol_type = other DNA
cctggccctgtttttgtcat

SEQ ID NO: 184718 - DNA, 20 bp, synthetic construct
  source 1..20: mol_type = other DNA
acctggccctgtttttgtca

SEQ ID NO: 184719 - DNA, 20 bp, synthetic construct
  source 1..20: mol_type = other DNA
cacctggccctgtttttgtc

SEQ ID NO: 184720 - DNA, 20 bp, synthetic construct
  source 1..20: mol_type = other DNA
gcacctggccctgtttttgt

SEQ ID NO: 184721 - DNA, 20 bp, synthetic construct
  source 1..20: mol_type = other DNA
tgcacctggccctgtttttg

SEQ ID NO: 184722 - DNA, 20 bp, synthetic construct
  source 1..20: mol_type = other DNA
ctgcacctggccctgttttt

SEQ ID NO: 184723 - DNA, 20 bp, synthetic construct
  source 1..20: mol_type = other DNA
actgcacctggccctgtttt

SEQ ID NO: 184724 - DNA, 20 bp, synthetic construct
  source 1..20: mol_type = other DNA
cactgcacctggccctgttt

SEQ ID NO: 184725 - DNA, 20 bp, synthetic construct
  source 1..20: mol_type = other DNA
ccactgcacctggccctgtt

SEQ ID NO: 184726 - DNA, 20 bp, synthetic construct
  source 1..20: mol_type = other DNA
gccactgcacctggccctgt

SEQ ID NO: 184727 - DNA, 20 bp, synthetic construct
  source 1..20: mol_type = other DNA
agccactgcacctggccctg

SEQ ID NO: 184728 - DNA, 20 bp, synthetic construct
  source 1..20: mol_type = other DNA
gagccactgcacctggccct

SEQ ID NO: 184729 - DNA, 20 bp, synthetic construct
  source 1..20: mol_type = other DNA
tgagccactgcacctggccc

SEQ ID NO: 184730 - DNA, 20 bp, synthetic construct
  source 1..20: mol_type = other DNA
gtgagccactgcacctggcc

SEQ ID NO: 184731 - DNA, 20 bp, synthetic construct
  source 1..20: mol_type = other DNA
cgtgagccactgcacctggc

SEQ ID NO: 184732 - DNA, 20 bp, synthetic construct
  source 1..20: mol_type = other DNA
gcgtgagccactgcacctgg

SEQ ID NO: 184733 - DNA, 20 bp, synthetic construct
  source 1..20: mol_type = other DNA
ggcgtgagccactgcacctg

SEQ ID NO: 184734 - DNA, 20 bp, synthetic construct
  source 1..20: mol_type = other DNA
aggcgtgagccactgcacct

SEQ ID NO: 184735 - DNA, 20 bp, synthetic construct
  source 1..20: mol_type = other DNA
caggcgtgagccactgcacc

SEQ ID NO: 184736 - DNA, 20 bp, synthetic construct
  source 1..20: mol_type = other DNA
ccaggcgtgagccactgcac

SEQ ID NO: 184737 - DNA, 20 bp, synthetic construct
  source 1..20: mol_type = other DNA
tccaggcgtgagccactgca

SEQ ID NO: 184738 - DNA, 20 bp, synthetic construct
  source 1..20: mol_type = other DNA
ttccaggcgtgagccactgc

SEQ ID NO: 184739 - DNA, 20 bp, synthetic construct
  source 1..20: mol_type = other DNA
attccaggcgtgagccactg

SEQ ID NO: 184740 - DNA, 20 bp, synthetic construct
  source 1..20: mol_type = other DNA
gattccaggcgtgagccact

SEQ ID NO: 184741 - DNA, 20 bp, synthetic construct
  source 1..20: mol_type = other DNA
ggattccaggcgtgagccac

SEQ ID NO: 184742 - DNA, 20 bp, synthetic construct
  source 1..20: mol_type = other DNA
gggattccaggcgtgagcca

SEQ ID NO: 184743 - DNA, 20 bp, synthetic construct
  source 1..20: mol_type = other DNA
tgggattccaggcgtgagcc

SEQ ID NO: 184744 - DNA, 20 bp, synthetic construct
  source 1..20: mol_type = other DNA
ctgggattccaggcgtgagc

SEQ ID NO: 184745 - DNA, 20 bp, synthetic construct
  source 1..20: mol_type = other DNA
gctgggattccaggcgtgag

SEQ ID NO: 184746 - DNA, 20 bp, synthetic construct
  source 1..20: mol_type = other DNA
tgctgggattccaggcgtga

SEQ ID NO: 184747 - DNA, 20 bp, synthetic construct
  source 1..20: mol_type = other DNA
gtgctgggattccaggcgtg

SEQ ID NO: 184748 - DNA, 20 bp, synthetic construct
  source 1..20: mol_type = other DNA
agtgctgggattccaggcgt

SEQ ID NO: 184749 - DNA, 20 bp, synthetic construct
  source 1..20: mol_type = other DNA
aagtgctgggattccaggcg

SEQ ID NO: 184750 - DNA, 20 bp, synthetic construct
  source 1..20: mol_type = other DNA
aaagtgctgggattccaggc

SEQ ID NO: 184751 - DNA, 20 bp, synthetic construct
  source 1..20: mol_type = other DNA
taaagtgctgggattccagg

SEQ ID NO: 184752 - DNA, 20 bp, synthetic construct
  source 1..20: mol_type = other DNA
ctaaagtgctgggattccag

SEQ ID NO: 184753 - DNA, 20 bp, synthetic construct
  source 1..20: mol_type = other DNA
cctaaagtgctgggattcca

SEQ ID NO: 184754 - DNA, 20 bp, synthetic construct
  source 1..20: mol_type = other DNA
tcctaaagtgctgggattcc

SEQ ID NO: 184755 - DNA, 20 bp, synthetic construct
  source 1..20: mol_type = other DNA
ctcctaaagtgctgggattc

SEQ ID NO: 184756 - DNA, 20 bp, synthetic construct
  source 1..20: mol_type = other DNA
cctcctaaagtgctgggatt

SEQ ID NO: 184757 - DNA, 20 bp, synthetic construct
  source 1..20: mol_type = other DNA
gcctcctaaagtgctgggat

SEQ ID NO: 184758 - DNA, 20 bp, synthetic construct
  source 1..20: mol_type = other DNA
ggcctcctaaagtgctggga

SEQ ID NO: 184759 - DNA, 20 bp, synthetic construct
  source 1..20: mol_type = other DNA
tggcctcctaaagtgctggg

SEQ ID NO: 184760 - DNA, 20 bp, synthetic construct
  source 1..20: mol_type = other DNA
ttggcctcctaaagtgctgg

SEQ ID NO: 184761 - DNA, 20 bp, synthetic construct
  source 1..20: mol_type = other DNA
cttggcctcctaaagtgctg

SEQ ID NO: 184762 - DNA, 20 bp, synthetic construct
  source 1..20: mol_type = other DNA
tcttggcctcctaaagtgct

SEQ ID NO: 184763 - DNA, 20 bp, synthetic construct
  source 1..20: mol_type = other DNA
atcttggcctcctaaagtgc

SEQ ID NO: 184764 - DNA, 20 bp, synthetic construct
  source 1..20: mol_type = other DNA
catcttggcctcctaaagtg

SEQ ID NO: 184765 - DNA, 20 bp, synthetic construct
  source 1..20: mol_type = other DNA
ccatcttggcctcctaaagt

SEQ ID NO: 184766 - DNA, 20 bp, synthetic construct
  source 1..20: mol_type = other DNA
cccatcttggcctcctaaag

SEQ ID NO: 184767 - DNA, 20 bp, synthetic construct
  source 1..20: mol_type = other DNA
tcccatcttggcctcctaaa

SEQ ID NO: 184768 - DNA, 20 bp, synthetic construct
  source 1..20: mol_type = other DNA
ctcccatcttggcctcctaa

SEQ ID NO: 184769 - DNA, 20 bp, synthetic construct
  source 1..20: mol_type = other DNA
cctcccatcttggcctccta

SEQ ID NO: 184770 - DNA, 20 bp, synthetic construct
  source 1..20: mol_type = other DNA
tcctcccatcttggcctcct

SEQ ID NO: 184771 - DNA, 20 bp, synthetic construct
  source 1..20: mol_type = other DNA
atcctcccatcttggcctcc

SEQ ID NO: 184772 - DNA, 20 bp, synthetic construct
  source 1..20: mol_type = other DNA
gatcctcccatcttggcctc

SEQ ID NO: 184773 - DNA, 20 bp, synthetic construct
  source 1..20: mol_type = other DNA
tgatcctcccatcttggcct

SEQ ID NO: 184774 - DNA, 20 bp, synthetic construct
  source 1..20: mol_type = other DNA
gtgatcctcccatcttggcc

SEQ ID NO: 184775 - DNA, 20 bp, synthetic construct
  source 1..20: mol_type = other DNA
agtgatcctcccatcttggc

SEQ ID NO: 184776 - DNA, 20 bp, synthetic construct
  source 1..20: mol_type = other DNA
aagtgatcctcccatcttgg

SEQ ID NO: 184777 - DNA, 20 bp, synthetic construct
  source 1..20: mol_type = other DNA
caagtgatcctcccatcttg

SEQ ID NO: 184778 - DNA, 20 bp, synthetic construct
  source 1..20: mol_type = other DNA
tcaagtgatcctcccatctt

SEQ ID NO: 184779 - DNA, 20 bp, synthetic construct
  source 1..20: mol_type = other DNA
ctcaagtgatcctcccatct

SEQ ID NO: 184780 - DNA, 20 bp, synthetic construct
  source 1..20: mol_type = other DNA
cctcaagtgatcctcccatc

SEQ ID NO: 184781 - DNA, 20 bp, synthetic construct
  source 1..20: mol_type = other DNA
gcctcaagtgatcctcccat

SEQ ID NO: 184782 - DNA, 20 bp, synthetic construct
  source 1..20: mol_type = other DNA
ggcctcaagtgatcctccca

SEQ ID NO: 184783 - DNA, 20 bp, synthetic construct
  source 1..20: mol_type = other DNA
tggcctcaagtgatcctccc

SEQ ID NO: 184784 - DNA, 20 bp, synthetic construct
  source 1..20: mol_type = other DNA
ctggcctcaagtgatcctcc

SEQ ID NO: 184785 - DNA, 20 bp, synthetic construct
  source 1..20: mol_type = other DNA
cctggcctcaagtgatcctc

SEQ ID NO: 184786 - DNA, 20 bp, synthetic construct
  source 1..20: mol_type = other DNA
tcctggcctcaagtgatcct

SEQ ID NO: 184787 - DNA, 20 bp, synthetic construct
  source 1..20: mol_type = other DNA
ctcctggcctcaagtgatcc

SEQ ID NO: 184788 - DNA, 20 bp, synthetic construct
  source 1..20: mol_type = other DNA
actcctggcctcaagtgatc

SEQ ID NO: 184789 - DNA, 20 bp, synthetic construct
  source 1..20: mol_type = other DNA
gactcctggcctcaagtgat

SEQ ID NO: 184790 - DNA, 20 bp, synthetic construct
  source 1..20: mol_type = other DNA
ggactcctggcctcaagtga

SEQ ID NO: 184791 - DNA, 20 bp, synthetic construct
  source 1..20: mol_type = other DNA
cggactcctggcctcaagtg

SEQ ID NO: 184792 - DNA, 20 bp, synthetic construct
  source 1..20: mol_type = other DNA
tcggactcctggcctcaagt

SEQ ID NO: 184793 - DNA, 20 bp, synthetic construct
  source 1..20: mol_type = other DNA
ctcggactcctggcctcaag

SEQ ID NO: 184794 - DNA, 20 bp, synthetic construct
  source 1..20: mol_type = other DNA
tctcggactcctggcctcaa

SEQ ID NO: 184795 - DNA, 20 bp, synthetic construct
  source 1..20: mol_type = other DNA
gtctcggactcctggcctca

SEQ ID NO: 184796 - DNA, 20 bp, synthetic construct
  source 1..20: mol_type = other DNA
ggtctcggactcctggcctc

SEQ ID NO: 184797 - DNA, 20 bp, synthetic construct
  source 1..20: mol_type = other DNA
tggtctcggactcctggcct

SEQ ID NO: 184798 - DNA, 20 bp, synthetic construct
  source 1..20: mol_type = other DNA
ctggtctcggactcctggcc

SEQ ID NO: 184799 - DNA, 20 bp, synthetic construct
  source 1..20: mol_type = other DNA
gctggtctcggactcctggc

SEQ ID NO: 184800 - DNA, 20 bp, synthetic construct
  source 1..20: mol_type = other DNA
ggctggtctcggactcctgg

SEQ ID NO: 184801 - DNA, 20 bp, synthetic construct
  source 1..20: mol_type = other DNA
aggctggtctcggactcctg

SEQ ID NO: 184802 - DNA, 20 bp, synthetic construct
  source 1..20: mol_type = other DNA
caggctggtctcggactcct

SEQ ID NO: 184803 - DNA, 20 bp, synthetic construct
  source 1..20: mol_type = other DNA
ccaggctggtctcggactcc

SEQ ID NO: 184804 - DNA, 20 bp, synthetic construct
  source 1..20: mol_type = other DNA
cccaggctggtctcggactc

SEQ ID NO: 184805 - DNA, 20 bp, synthetic construct
  source 1..20: mol_type = other DNA
gcccaggctggtctcggact

SEQ ID NO: 184806 - DNA, 20 bp, synthetic construct
  source 1..20: mol_type = other DNA
tgcccaggctggtctcggac

SEQ ID NO: 184807 - DNA, 20 bp, synthetic construct
  source 1..20: mol_type = other DNA
ttgcccaggctggtctcgga

SEQ ID NO: 184808 - DNA, 20 bp, synthetic construct
  source 1..20: mol_type = other DNA
gttgcccaggctggtctcgg

SEQ ID NO: 184809 - DNA, 20 bp, synthetic construct
  source 1..20: mol_type = other DNA
tgttgcccaggctggtctcg

SEQ ID NO: 184810 - DNA, 20 bp, synthetic construct
  source 1..20: mol_type = other DNA
atgttgcccaggctggtctc

SEQ ID NO: 184811 - DNA, 20 bp, synthetic construct
  source 1..20: mol_type = other DNA
tatgttgcccaggctggtct

SEQ ID NO: 184812 - DNA, 20 bp, synthetic construct
  source 1..20: mol_type = other DNA
ctatgttgcccaggctggtc

SEQ ID NO: 184813 - DNA, 20 bp, synthetic construct
  source 1..20: mol_type = other DNA
cctatgttgcccaggctggt

SEQ ID NO: 184814 - DNA, 20 bp, synthetic construct
  source 1..20: mol_type = other DNA
ccctatgttgcccaggctgg

SEQ ID NO: 184815 - DNA, 20 bp, synthetic construct
  source 1..20: mol_type = other DNA
tccctatgttgcccaggctg

SEQ ID NO: 184816 - DNA, 20 bp, synthetic construct
  source 1..20: mol_type = other DNA
ctccctatgttgcccaggct

SEQ ID NO: 184817 - DNA, 20 bp, synthetic construct
  source 1..20: mol_type = other DNA
tctccctatgttgcccaggc

SEQ ID NO: 184818 - DNA, 20 bp, synthetic construct
  source 1..20: mol_type = other DNA
gtctccctatgttgcccagg

SEQ ID NO: 184819 - DNA, 20 bp, synthetic construct
  source 1..20: mol_type = other DNA
ggtctccctatgttgcccag

SEQ ID NO: 184820 - DNA, 20 bp, synthetic construct
  source 1..20: mol_type = other DNA
gggtctccctatgttgccca

SEQ ID NO: 184821 - DNA, 20 bp, synthetic construct
  source 1..20: mol_type = other DNA
agggtctccctatgttgccc

SEQ ID NO: 184822 - DNA, 20 bp, synthetic construct
  source 1..20: mol_type = other DNA
cagggtctccctatgttgcc

SEQ ID NO: 184823 - DNA, 20 bp, synthetic construct
  source 1..20: mol_type = other DNA
acagggtctccctatgttgc

SEQ ID NO: 184824 - DNA, 20 bp, synthetic construct
  source 1..20: mol_type = other DNA
gacagggtctccctatgttg

SEQ ID NO: 184825 - DNA, 20 bp, synthetic construct
  source 1..20: mol_type = other DNA
agacagggtctccctatgtt

SEQ ID NO: 184826 - DNA, 20 bp, synthetic construct
  source 1..20: mol_type = other DNA
gagacagggtctccctatgt

SEQ ID NO: 184827 - DNA, 20 bp, synthetic construct
  source 1..20: mol_type = other DNA
agagacagggtctccctatg

SEQ ID NO: 184828 - DNA, 20 bp, synthetic construct
  source 1..20: mol_type = other DNA
tagagacagggtctccctat

SEQ ID NO: 184829 - DNA, 20 bp, synthetic construct
  source 1..20: mol_type = other DNA
gtagagacagggtctcccta

SEQ ID NO: 184830 - DNA, 20 bp, synthetic construct
  source 1..20: mol_type = other DNA
tgtagagacagggtctccct

SEQ ID NO: 184831 - DNA, 20 bp, synthetic construct
  source 1..20: mol_type = other DNA
ttgtagagacagggtctccc

SEQ ID NO: 184832 - DNA, 20 bp, synthetic construct
  source 1..20: mol_type = other DNA
tttgtagagacagggtctcc

SEQ ID NO: 184833 - DNA, 20 bp, synthetic construct
  source 1..20: mol_type = other DNA
ttttgtagagacagggtctc

SEQ ID NO: 184834 - DNA, 20 bp, synthetic construct
  source 1..20: mol_type = other DNA
tttttgtagagacagggtct

SEQ ID NO: 184835 - DNA, 20 bp, synthetic construct
  source 1..20: mol_type = other DNA
ttttttgtagagacagggtc

SEQ ID NO: 184836 - DNA, 20 bp, synthetic construct
  source 1..20: mol_type = other DNA
attttttgtagagacagggt

SEQ ID NO: 184837 - DNA, 20 bp, synthetic construct
  source 1..20: mol_type = other DNA
aattttttgtagagacaggg

SEQ ID NO: 184838 - DNA, 20 bp, synthetic construct
  source 1..20: mol_type = other DNA
aaattttttgtagagacagg

SEQ ID NO: 184839 - DNA, 20 bp, synthetic construct
  source 1..20: mol_type = other DNA
aaaattttttgtagagacag

SEQ ID NO: 184840 - DNA, 20 bp, synthetic construct
  source 1..20: mol_type = other DNA
aaaaattttttgtagagaca

SEQ ID NO: 184841 - DNA, 20 bp, synthetic construct
  source 1..20: mol_type = other DNA
aaaaaattttttgtagagac

SEQ ID NO: 184842 - DNA, 20 bp, synthetic construct
  source 1..20: mol_type = other DNA
taaaaaattttttgtagaga

SEQ ID NO: 184843 - DNA, 20 bp, synthetic construct
  source 1..20: mol_type = other DNA
ttaaaaaattttttgtagag

SEQ ID NO: 184844 - DNA, 20 bp, synthetic construct
  source 1..20: mol_type = other DNA
tttaaaaaattttttgtaga

SEQ ID NO: 184845 - DNA, 20 bp, synthetic construct
  source 1..20: mol_type = other DNA
ttttaaaaaattttttgtag

SEQ ID NO: 184846 - DNA, 20 bp, synthetic construct
  source 1..20: mol_type = other DNA
tttttaaaaaattttttgta

SEQ ID NO: 184847 - DNA, 20 bp, synthetic construct
  source 1..20: mol_type = other DNA
atttttaaaaaattttttgt

SEQ ID NO: 184848 - DNA, 20 bp, synthetic construct
  source 1..20: mol_type = other DNA
aatttttaaaaaattttttg

SEQ ID NO: 184849 - DNA, 20 bp, synthetic construct
  source 1..20: mol_type = other DNA
taatttttaaaaaatttttt

SEQ ID NO: 184850 - DNA, 20 bp, synthetic construct
  source 1..20: mol_type = other DNA
ctaatttttaaaaaattttt

SEQ ID NO: 184851 - DNA, 20 bp, synthetic construct
  source 1..20: mol_type = other DNA
gctaatttttaaaaaatttt

SEQ ID NO: 184852 - DNA, 20 bp, synthetic construct
  source 1..20: mol_type = other DNA
agctaatttttaaaaaattt

SEQ ID NO: 184853 - DNA, 20 bp, synthetic construct
  source 1..20: mol_type = other DNA
cagctaatttttaaaaaatt

SEQ ID NO: 184854 - DNA, 20 bp, synthetic construct
  source 1..20: mol_type = other DNA
ccagctaatttttaaaaaat

SEQ ID NO: 184855 - DNA, 20 bp, synthetic construct
  source 1..20: mol_type = other DNA
cccagctaatttttaaaaaa

SEQ ID NO: 184856 - DNA, 20 bp, synthetic construct
  source 1..20: mol_type = other DNA
gcccagctaatttttaaaaa

SEQ ID NO: 184857 - DNA, 20 bp, synthetic construct
  source 1..20: mol_type = other DNA
tgcccagctaatttttaaaa

SEQ ID NO: 184858 - DNA, 20 bp, synthetic construct
  source 1..20: mol_type = other DNA
atgcccagctaatttttaaa

SEQ ID NO: 184859 - DNA, 20 bp, synthetic construct
  source 1..20: mol_type = other DNA
catgcccagctaatttttaa

SEQ ID NO: 184860 - DNA, 20 bp, synthetic construct
  source 1..20: mol_type = other DNA
ccatgcccagctaattttta

SEQ ID NO: 184861 - DNA, 20 bp, synthetic construct
  source 1..20: mol_type = other DNA
gccatgcccagctaattttt

SEQ ID NO: 184862 - DNA, 20 bp, synthetic construct
  source 1..20: mol_type = other DNA
cgccatgcccagctaatttt

SEQ ID NO: 184863 - DNA, 20 bp, synthetic construct
  source 1..20: mol_type = other DNA
ccgccatgcccagctaattt

SEQ ID NO: 184864 - DNA, 20 bp, synthetic construct
  source 1..20: mol_type = other DNA
accgccatgcccagctaatt

SEQ ID NO: 184865 - DNA, 20 bp, synthetic construct
  source 1..20: mol_type = other DNA
caccgccatgcccagctaat

SEQ ID NO: 184866 - DNA, 20 bp, synthetic construct
  source 1..20: mol_type = other DNA
acaccgccatgcccagctaa

SEQ ID NO: 184867 - DNA, 20 bp, synthetic construct
  source 1..20: mol_type = other DNA
cacaccgccatgcccagcta

SEQ ID NO: 184868 - DNA, 20 bp, synthetic construct
  source 1..20: mol_type = other DNA
gcacaccgccatgcccagct

SEQ ID NO: 184869 - DNA, 20 bp, synthetic construct
  source 1..20: mol_type = other DNA
cgcacaccgccatgcccagc

SEQ ID NO: 184870 - DNA, 20 bp, synthetic construct
  source 1..20: mol_type = other DNA
gcgcacaccgccatgcccag

SEQ ID NO: 184871 - DNA, 20 bp, synthetic construct
  source 1..20: mol_type = other DNA
agcgcacaccgccatgccca

SEQ ID NO: 184872 - DNA, 20 bp, synthetic construct
  source 1..20: mol_type = other DNA
aagcgcacaccgccatgccc

SEQ ID NO: 184873 - DNA, 20 bp, synthetic construct
  source 1..20: mol_type = other DNA
caagcgcacaccgccatgcc

SEQ ID NO: 184874 - DNA, 20 bp, synthetic construct
  source 1..20: mol_type = other DNA
acaagcgcacaccgccatgc

SEQ ID NO: 184875 - DNA, 20 bp, synthetic construct
  source 1..20: mol_type = other DNA
tacaagcgcacaccgccatg

SEQ ID NO: 184876 - DNA, 20 bp, synthetic construct
  source 1..20: mol_type = other DNA
ctacaagcgcacaccgccat

SEQ ID NO: 184877 - DNA, 20 bp, synthetic construct
  source 1..20: mol_type = other DNA
actacaagcgcacaccgcca

SEQ ID NO: 184878 - DNA, 20 bp, synthetic construct
  source 1..20: mol_type = other DNA
gactacaagcgcacaccgcc

SEQ ID NO: 184879 - DNA, 20 bp, synthetic construct
  source 1..20: mol_type = other DNA
ggactacaagcgcacaccgc

SEQ ID NO: 184880 - DNA, 20 bp, synthetic construct
  source 1..20: mol_type = other DNA
gggactacaagcgcacaccg

SEQ ID NO: 184881 - DNA, 20 bp, synthetic construct
  source 1..20: mol_type = other DNA
tgggactacaagcgcacacc

SEQ ID NO: 184882 - DNA, 20 bp, synthetic construct
  source 1..20: mol_type = other DNA
ctgggactacaagcgcacac

SEQ ID NO: 184883 - DNA, 20 bp, synthetic construct
  source 1..20: mol_type = other DNA
gctgggactacaagcgcaca

SEQ ID NO: 184884 - DNA, 20 bp, synthetic construct
  source 1..20: mol_type = other DNA
agctgggactacaagcgcac

SEQ ID NO: 184885 - DNA, 20 bp, synthetic construct
  source 1..20: mol_type = other DNA
tagctgggactacaagcgca

SEQ ID NO: 184886 - DNA, 20 bp, synthetic construct
  source 1..20: mol_type = other DNA
gtagctgggactacaagcgc

SEQ ID NO: 184887 - DNA, 20 bp, synthetic construct
  source 1..20: mol_type = other DNA
agtagctgggactacaagcg

SEQ ID NO: 184888 - DNA, 20 bp, synthetic construct
  source 1..20: mol_type = other DNA
gagtagctgggactacaagc

SEQ ID NO: 184889 - DNA, 20 bp, synthetic construct
  source 1..20: mol_type = other DNA
tgagtagctgggactacaag

SEQ ID NO: 184890 - DNA, 20 bp, synthetic construct
  source 1..20: mol_type = other DNA
ctgagtagctgggactacaa

SEQ ID NO: 184891 - DNA, 20 bp, synthetic construct
  source 1..20: mol_type = other DNA
cctgagtagctgggactaca

SEQ ID NO: 184892 - DNA, 20 bp, synthetic construct
  source 1..20: mol_type = other DNA
tcctgagtagctgggactac

SEQ ID NO: 184893 - DNA, 20 bp, synthetic construct
  source 1..20: mol_type = other DNA
ctcctgagtagctgggacta

SEQ ID NO: 184894 - DNA, 20 bp, synthetic construct
  source 1..20: mol_type = other DNA
cctcctgagtagctgggact

SEQ ID NO: 184895 - DNA, 20 bp, synthetic construct
  source 1..20: mol_type = other DNA
gcctcctgagtagctgggac

SEQ ID NO: 184896 - DNA, 20 bp, synthetic construct
  source 1..20: mol_type = other DNA
agcctcctgagtagctggga

SEQ ID NO: 184897 - DNA, 20 bp, synthetic construct
  source 1..20: mol_type = other DNA
cagcctcctgagtagctggg

SEQ ID NO: 184898 - DNA, 20 bp, synthetic construct
  source 1..20: mol_type = other DNA
tcagcctcctgagtagctgg

SEQ ID NO: 184899 - DNA, 20 bp, synthetic construct
  source 1..20: mol_type = other DNA
ctcagcctcctgagtagctg

SEQ ID NO: 184900 - DNA, 20 bp, synthetic construct
  source 1..20: mol_type = other DNA
cctcagcctcctgagtagct

SEQ ID NO: 184901 - DNA, 20 bp, synthetic construct
  source 1..20: mol_type = other DNA
gcctcagcctcctgagtagc

SEQ ID NO: 184902 - DNA, 20 bp, synthetic construct
  source 1..20: mol_type = other DNA
tgcctcagcctcctgagtag

SEQ ID NO: 184903 - DNA, 20 bp, synthetic construct
  source 1..20: mol_type = other DNA
ctgcctcagcctcctgagta

SEQ ID NO: 184904 - DNA, 20 bp, synthetic construct
  source 1..20: mol_type = other DNA
cctgcctcagcctcctgagt

SEQ ID NO: 184905 - DNA, 20 bp, synthetic construct
  source 1..20: mol_type = other DNA
tcctgcctcagcctcctgag

SEQ ID NO: 184906 - DNA, 20 bp, synthetic construct
  source 1..20: mol_type = other DNA
ctcctgcctcagcctcctga

SEQ ID NO: 184907 - DNA, 20 bp, synthetic construct
  source 1..20: mol_type = other DNA
cctcctgcctcagcctcctg

SEQ ID NO: 184908 - DNA, 20 bp, synthetic construct
  source 1..20: mol_type = other DNA
tcctcctgcctcagcctcct

SEQ ID NO: 184909 - DNA, 20 bp, synthetic construct
  source 1..20: mol_type = other DNA
atcctcctgcctcagcctcc

SEQ ID NO: 184910 - DNA, 20 bp, synthetic construct
  source 1..20: mol_type = other DNA
gatcctcctgcctcagcctc

SEQ ID NO: 184911 - DNA, 20 bp, synthetic construct
  source 1..20: mol_type = other DNA
tgatcctcctgcctcagcct

SEQ ID NO: 184912 - DNA, 20 bp, synthetic construct
  source 1..20: mol_type = other DNA
gtgatcctcctgcctcagcc

SEQ ID NO: 184913 - DNA, 20 bp, synthetic construct
  source 1..20: mol_type = other DNA
agtgatcctcctgcctcagc

SEQ ID NO: 184914 - DNA, 20 bp, synthetic construct
  source 1..20: mol_type = other DNA
aagtgatcctcctgcctcag

SEQ ID NO: 184915 - DNA, 20 bp, synthetic construct
  source 1..20: mol_type = other DNA
caagtgatcctcctgcctca

SEQ ID NO: 184916 - DNA, 20 bp, synthetic construct
  source 1..20: mol_type = other DNA
tcaagtgatcctcctgcctc

SEQ ID NO: 184917 - DNA, 20 bp, synthetic construct
  source 1..20: mol_type = other DNA
ctcaagtgatcctcctgcct

SEQ ID NO: 184918 - DNA, 20 bp, synthetic construct
  source 1..20: mol_type = other DNA
gctcaagtgatcctcctgcc

SEQ ID NO: 184919 - DNA, 20 bp, synthetic construct
  source 1..20: mol_type = other DNA
ggctcaagtgatcctcctgc

SEQ ID NO: 184920 - DNA, 20 bp, synthetic construct
  source 1..20: mol_type = other DNA
gggctcaagtgatcctcctg

SEQ ID NO: 184921 - DNA, 20 bp, synthetic construct
  source 1..20: mol_type = other DNA
tgggctcaagtgatcctcct

SEQ ID NO: 184922 - DNA, 20 bp, synthetic construct
  source 1..20: mol_type = other DNA
ctgggctcaagtgatcctcc

SEQ ID NO: 184923 - DNA, 20 bp, synthetic construct
  source 1..20: mol_type = other DNA
cctgggctcaagtgatcctc

SEQ ID NO: 184924 - DNA, 20 bp, synthetic construct
  source 1..20: mol_type = other DNA
tcctgggctcaagtgatcct

SEQ ID NO: 184925 - DNA, 20 bp, synthetic construct
  source 1..20: mol_type = other DNA
ttcctgggctcaagtgatcc

SEQ ID NO: 184926 - DNA, 20 bp, synthetic construct
  source 1..20: mol_type = other DNA
tttcctgggctcaagtgatc

SEQ ID NO: 184927 - DNA, 20 bp, synthetic construct
  source 1..20: mol_type = other DNA
atttcctgggctcaagtgat

SEQ ID NO: 184928 - DNA, 20 bp, synthetic construct
  source 1..20: mol_type = other DNA
aatttcctgggctcaagtga

SEQ ID NO: 184929 - DNA, 20 bp, synthetic construct
  source 1..20: mol_type = other DNA
caatttcctgggctcaagtg

SEQ ID NO: 184930 - DNA, 20 bp, synthetic construct
  source 1..20: mol_type = other DNA
tcaatttcctgggctcaagt

SEQ ID NO: 184931 - DNA, 20 bp, synthetic construct
  source 1..20: mol_type = other DNA
ctcaatttcctgggctcaag

SEQ ID NO: 184932 - DNA, 20 bp, synthetic construct
  source 1..20: mol_type = other DNA
cctcaatttcctgggctcaa

SEQ ID NO: 184933 - DNA, 20 bp, synthetic construct
  source 1..20: mol_type = other DNA
gcctcaatttcctgggctca

SEQ ID NO: 184934 - DNA, 20 bp, synthetic construct
  source 1..20: mol_type = other DNA
agcctcaatttcctgggctc

SEQ ID NO: 184935 - DNA, 20 bp, synthetic construct
  source 1..20: mol_type = other DNA
cagcctcaatttcctgggct

SEQ ID NO: 184936 - DNA, 20 bp, synthetic construct
  source 1..20: mol_type = other DNA
gcagcctcaatttcctgggc

SEQ ID NO: 184937 - DNA, 20 bp, synthetic construct
  source 1..20: mol_type = other DNA
tgcagcctcaatttcctggg

SEQ ID NO: 184938 - DNA, 20 bp, synthetic construct
  source 1..20: mol_type = other DNA
ctgcagcctcaatttcctgg

SEQ ID NO: 184939 - DNA, 20 bp, synthetic construct
  source 1..20: mol_type = other DNA
gctgcagcctcaatttcctg

SEQ ID NO: 184940 - DNA, 20 bp, synthetic construct
  source 1..20: mol_type = other DNA
cgctgcagcctcaatttcct

SEQ ID NO: 184941 - DNA, 20 bp, synthetic construct
  source 1..20: mol_type = other DNA
tcgctgcagcctcaatttcc

SEQ ID NO: 184942 - DNA, 20 bp, synthetic construct
  source 1..20: mol_type = other DNA
ctcgctgcagcctcaatttc

SEQ ID NO: 184943 - DNA, 20 bp, synthetic construct
  source 1..20: mol_type = other DNA
gctcgctgcagcctcaattt

SEQ ID NO: 184944 - DNA, 20 bp, synthetic construct
  source 1..20: mol_type = other DNA
ggctcgctgcagcctcaatt

SEQ ID NO: 184945 - DNA, 20 bp, synthetic construct
  source 1..20: mol_type = other DNA
tggctcgctgcagcctcaat

SEQ ID NO: 184946 - DNA, 20 bp, synthetic construct
  source 1..20: mol_type = other DNA
atggctcgctgcagcctcaa

SEQ ID NO: 184947 - DNA, 20 bp, synthetic construct
  source 1..20: mol_type = other DNA
catggctcgctgcagcctca

SEQ ID NO: 184948 - DNA, 20 bp, synthetic construct
  source 1..20: mol_type = other DNA
tcatggctcgctgcagcctc

SEQ ID NO: 184949 - DNA, 20 bp, synthetic construct
  source 1..20: mol_type = other DNA
atcatggctcgctgcagcct

SEQ ID NO: 184950 - DNA, 20 bp, synthetic construct
  source 1..20: mol_type = other DNA
catcatggctcgctgcagcc

SEQ ID NO: 184951 - DNA, 20 bp, synthetic construct
  source 1..20: mol_type = other DNA
ccatcatggctcgctgcagc

SEQ ID NO: 184952 - DNA, 20 bp, synthetic construct
  source 1..20: mol_type = other DNA
gccatcatggctcgctgcag

SEQ ID NO: 184953 - DNA, 20 bp, synthetic construct
  source 1..20: mol_type = other DNA
tgccatcatggctcgctgca

SEQ ID NO: 184954 - DNA, 20 bp, synthetic construct
  source 1..20: mol_type = other DNA
gtgccatcatggctcgctgc

SEQ ID NO: 184955 - DNA, 20 bp, synthetic construct
  source 1..20: mol_type = other DNA
ggtgccatcatggctcgctg

SEQ ID NO: 184956 - DNA, 20 bp, synthetic construct
  source 1..20: mol_type = other DNA
tggtgccatcatggctcgct

SEQ ID NO: 184957 - DNA, 20 bp, synthetic construct
  source 1..20: mol_type = other DNA
gtggtgccatcatggctcgc

SEQ ID NO: 184958 - DNA, 20 bp, synthetic construct
  source 1..20: mol_type = other DNA
agtggtgccatcatggctcg

SEQ ID NO: 184959 - DNA, 20 bp, synthetic construct
  source 1..20: mol_type = other DNA
cagtggtgccatcatggctc

SEQ ID NO: 184960 - DNA, 20 bp, synthetic construct
  source 1..20: mol_type = other DNA
gcagtggtgccatcatggct

SEQ ID NO: 184961 - DNA, 20 bp, synthetic construct
  source 1..20: mol_type = other DNA
tgcagtggtgccatcatggc

SEQ ID NO: 184962 - DNA, 20 bp, synthetic construct
  source 1..20: mol_type = other DNA
gtgcagtggtgccatcatgg

SEQ ID NO: 184963 - DNA, 20 bp, synthetic construct
  source 1..20: mol_type = other DNA
agtgcagtggtgccatcatg

SEQ ID NO: 184964 - DNA, 20 bp, synthetic construct
  source 1..20: mol_type = other DNA
cagtgcagtggtgccatcat

SEQ ID NO: 184965 - DNA, 20 bp, synthetic construct
  source 1..20: mol_type = other DNA
gcagtgcagtggtgccatca

SEQ ID NO: 184966 - DNA, 20 bp, synthetic construct
  source 1..20: mol_type = other DNA
tgcagtgcagtggtgccatc

SEQ ID NO: 184967 - DNA, 20 bp, synthetic construct
  source 1..20: mol_type = other DNA
ctgcagtgcagtggtgccat

SEQ ID NO: 184968 - DNA, 20 bp, synthetic construct
  source 1..20: mol_type = other DNA
gctgcagtgcagtggtgcca

SEQ ID NO: 184969 - DNA, 20 bp, synthetic construct
  source 1..20: mol_type = other DNA
ggctgcagtgcagtggtgcc

SEQ ID NO: 184970 - DNA, 20 bp, synthetic construct
  source 1..20: mol_type = other DNA
aggctgcagtgcagtggtgc

SEQ ID NO: 184971 - DNA, 20 bp, synthetic construct
  source 1..20: mol_type = other DNA
caggctgcagtgcagtggtg

SEQ ID NO: 184972 - DNA, 20 bp, synthetic construct
  source 1..20: mol_type = other DNA
ccaggctgcagtgcagtggt

SEQ ID NO: 184973 - DNA, 20 bp, synthetic construct
  source 1..20: mol_type = other DNA
cccaggctgcagtgcagtgg

SEQ ID NO: 184974 - DNA, 20 bp, synthetic construct
  source 1..20: mol_type = other DNA
gcccaggctgcagtgcagtg

SEQ ID NO: 184975 - DNA, 20 bp, synthetic construct
  source 1..20: mol_type = other DNA
cgcccaggctgcagtgcagt

SEQ ID NO: 184976 - DNA, 20 bp, synthetic construct
  source 1..20: mol_type = other DNA
acgcccaggctgcagtgcag

SEQ ID NO: 184977 - DNA, 20 bp, synthetic construct
  source 1..20: mol_type = other DNA
gacgcccaggctgcagtgca

SEQ ID NO: 184978 - DNA, 20 bp, synthetic construct
  source 1..20: mol_type = other DNA
tgacgcccaggctgcagtgc

SEQ ID NO: 184979 - DNA, 20 bp, synthetic construct
  source 1..20: mol_type = other DNA
ctgacgcccaggctgcagtg

SEQ ID NO: 184980 - DNA, 20 bp, synthetic construct
  source 1..20: mol_type = other DNA
tctgacgcccaggctgcagt

SEQ ID NO: 184981 - DNA, 20 bp, synthetic construct
  source 1..20: mol_type = other DNA
ttctgacgcccaggctgcag

SEQ ID NO: 184982 - DNA, 20 bp, synthetic construct
  source 1..20: mol_type = other DNA
gttctgacgcccaggctgca

SEQ ID NO: 184983 - DNA, 20 bp, synthetic construct
  source 1..20: mol_type = other DNA
cgttctgacgcccaggctgc

SEQ ID NO: 184984 - DNA, 20 bp, synthetic construct
  source 1..20: mol_type = other DNA
tcgttctgacgcccaggctg

SEQ ID NO: 184985 - DNA, 20 bp, synthetic construct
  source 1..20: mol_type = other DNA
ctcgttctgacgcccaggct

SEQ ID NO: 184986 - DNA, 20 bp, synthetic construct
  source 1..20: mol_type = other DNA
tctcgttctgacgcccaggc

SEQ ID NO: 184987 - DNA, 20 bp, synthetic construct
  source 1..20: mol_type = other DNA
gtctcgttctgacgcccagg

SEQ ID NO: 184988 - DNA, 20 bp, synthetic construct
  source 1..20: mol_type = other DNA
ggtctcgttctgacgcccag

SEQ ID NO: 184989 - DNA, 20 bp, synthetic construct
  source 1..20: mol_type = other DNA
aggtctcgttctgacgccca

SEQ ID NO: 184990 - DNA, 20 bp, synthetic construct
  source 1..20: mol_type = other DNA
caggtctcgttctgacgccc

SEQ ID NO: 184991 - DNA, 20 bp, synthetic construct
  source 1..20: mol_type = other DNA
gcaggtctcgttctgacgcc

SEQ ID NO: 184992 - DNA, 20 bp, synthetic construct
  source 1..20: mol_type = other DNA
agcaggtctcgttctgacgc

SEQ ID NO: 184993 - DNA, 20 bp, synthetic construct
  source 1..20: mol_type = other DNA
gagcaggtctcgttctgacg

SEQ ID NO: 184994 - DNA, 20 bp, synthetic construct
  source 1..20: mol_type = other DNA
agagcaggtctcgttctgac

SEQ ID NO: 184995 - DNA, 20 bp, synthetic construct
  source 1..20: mol_type = other DNA
gagagcaggtctcgttctga

SEQ ID NO: 184996 - DNA, 20 bp, synthetic construct
  source 1..20: mol_type = other DNA
tgagagcaggtctcgttctg

SEQ ID NO: 184997 - DNA, 20 bp, synthetic construct
  source 1..20: mol_type = other DNA
ttgagagcaggtctcgttct

SEQ ID NO: 184998 - DNA, 20 bp, synthetic construct
  source 1..20: mol_type = other DNA
tttgagagcaggtctcgttc

SEQ ID NO: 184999 - DNA, 20 bp, synthetic construct
  source 1..20: mol_type = other DNA
ttttgagagcaggtctcgtt

SEQ ID NO: 185000 - DNA, 20 bp, synthetic construct
  source 1..20: mol_type = other DNA
tttttgagagcaggtctcgt

SEQ ID NO: 185001 - DNA, 20 bp, synthetic construct
  source 1..20: mol_type = other DNA
ttttttgagagcaggtctcg

SEQ ID NO: 185002 - DNA, 20 bp, synthetic construct
  source 1..20: mol_type = other DNA
tttttttgagagcaggtctc

SEQ ID NO: 185003 - DNA, 20 bp, synthetic construct
  source 1..20: mol_type = other DNA
gtttttttgagagcaggtct

SEQ ID NO: 185004 - DNA, 20 bp, synthetic construct
  source 1..20: mol_type = other DNA
tgtttttttgagagcaggtc

SEQ ID NO: 185005 - DNA, 20 bp, synthetic construct
  source 1..20: mol_type = other DNA
ttgtttttttgagagcaggt

SEQ ID NO: 185006 - DNA, 20 bp, synthetic construct
  source 1..20: mol_type = other DNA
tttgtttttttgagagcagg

SEQ ID NO: 185007 - DNA, 20 bp, synthetic construct
  source 1..20: mol_type = other DNA
gtttgtttttttgagagcag

SEQ ID NO: 185008 - DNA, 20 bp, synthetic construct
  source 1..20: mol_type = other DNA
tgtttgtttttttgagagca

SEQ ID NO: 185009 - DNA, 20 bp, synthetic construct
  source 1..20: mol_type = other DNA
ttgtttgtttttttgagagc

SEQ ID NO: 185010 - DNA, 20 bp, synthetic construct
  source 1..20: mol_type = other DNA
tttgtttgtttttttgagag

SEQ ID NO: 185011 - DNA, 20 bp, synthetic construct
  source 1..20: mol_type = other DNA
gtttgtttgtttttttgaga

SEQ ID NO: 185012 - DNA, 20 bp, synthetic construct
  source 1..20: mol_type = other DNA
tgtttgtttgtttttttgag

SEQ ID NO: 185013 - DNA, 20 bp, synthetic construct
  source 1..20: mol_type = other DNA
ttgtttgtttgtttttttga

SEQ ID NO: 185014 - DNA, 20 bp, synthetic construct
  source 1..20: mol_type = other DNA
gttgtttgtttgtttttttg

SEQ ID NO: 185015 - DNA, 20 bp, synthetic construct
  source 1..20: mol_type = other DNA
tgttgtttgtttgttttttt

SEQ ID NO: 185016 - DNA, 20 bp, synthetic construct
  source 1..20: mol_type = other DNA
ttgttgtttgtttgtttttt

SEQ ID NO: 185017 - DNA, 20 bp, synthetic construct
  source 1..20: mol_type = other DNA
tttgttgtttgtttgttttt

SEQ ID NO: 185018 - DNA, 20 bp, synthetic construct
  source 1..20: mol_type = other DNA
ttttgttgtttgtttgtttt

SEQ ID NO: 185019 - DNA, 20 bp, synthetic construct
  source 1..20: mol_type = other DNA
tttttgttgtttgtttgttt

SEQ ID NO: 185020 - DNA, 20 bp, synthetic construct
  source 1..20: mol_type = other DNA
ttttttgttgtttgtttgtt

SEQ ID NO: 185021 - DNA, 20 bp, synthetic construct
  source 1..20: mol_type = other DNA
tttttttgttgtttgtttgt

SEQ ID NO: 185022 - DNA, 20 bp, synthetic construct
  source 1..20: mol_type = other DNA
ttttttttgttgtttgtttg

SEQ ID NO: 185023 - DNA, 20 bp, synthetic construct
  source 1..20: mol_type = other DNA
tttttttttgttgtttgttt

SEQ ID NO: 185024 - DNA, 20 bp, synthetic construct
  source 1..20: mol_type = other DNA
ctttttttttgttgtttgtt

SEQ ID NO: 185025 - DNA, 20 bp, synthetic construct
  source 1..20: mol_type = other DNA
cctttttttttgttgtttgt

SEQ ID NO: 185026 - DNA, 20 bp, synthetic construct
  source 1..20: mol_type = other DNA
gcctttttttttgttgtttg

SEQ ID NO: 185027 - DNA, 20 bp, synthetic construct
  source 1..20: mol_type = other DNA
agcctttttttttgttgttt

SEQ ID NO: 185028 - DNA, 20 bp, synthetic construct
  source 1..20: mol_type = other DNA
aagcctttttttttgttgtt

SEQ ID NO: 185029 - DNA, 20 bp, synthetic construct
  source 1..20: mol_type = other DNA
aaagcctttttttttgttgt

SEQ ID NO: 185030 - DNA, 20 bp, synthetic construct
  source 1..20: mol_type = other DNA
gaaagcctttttttttgttg

SEQ ID NO: 185031 - DNA, 20 bp, synthetic construct
  source 1..20: mol_type = other DNA
agaaagcctttttttttgtt

SEQ ID NO: 185032 - DNA, 20 bp, synthetic construct
  source 1..20: mol_type = other DNA
aagaaagcctttttttttgt

SEQ ID NO: 185033 - DNA, 20 bp, synthetic construct
  source 1..20: mol_type = other DNA
taagaaagcctttttttttg

SEQ ID NO: 185034 - DNA, 20 bp, synthetic construct
  source 1..20: mol_type = other DNA
ttaagaaagccttttttttt

SEQ ID NO: 185035 - DNA, 20 bp, synthetic construct
  source 1..20: mol_type = other DNA
tttaagaaagcctttttttt

SEQ ID NO: 185036 - DNA, 20 bp, synthetic construct
  source 1..20: mol_type = other DNA
ctttaagaaagccttttttt

SEQ ID NO: 185037 - DNA, 20 bp, synthetic construct
  source 1..20: mol_type = other DNA
tctttaagaaagcctttttt

SEQ ID NO: 185038 - DNA, 20 bp, synthetic construct
  source 1..20: mol_type = other DNA
ctctttaagaaagccttttt

SEQ ID NO: 185039 - DNA, 20 bp, synthetic construct
  source 1..20: mol_type = other DNA
tctctttaagaaagcctttt

SEQ ID NO: 185040 - DNA, 20 bp, synthetic construct
  source 1..20: mol_type = other DNA
gtctctttaagaaagccttt

SEQ ID NO: 185041 - DNA, 20 bp, synthetic construct
  source 1..20: mol_type = other DNA
agtctctttaagaaagcctt

SEQ ID NO: 185042 - DNA, 20 bp, synthetic construct
  source 1..20: mol_type = other DNA
aagtctctttaagaaagcct

SEQ ID NO: 185043 - DNA, 20 bp, synthetic construct
  source 1..20: mol_type = other DNA
caagtctctttaagaaagcc

SEQ ID NO: 185044 - DNA, 20 bp, synthetic construct
  source 1..20: mol_type = other DNA
tcaagtctctttaagaaagc

SEQ ID NO: 185045 - DNA, 20 bp, synthetic construct
  source 1..20: mol_type = other DNA
ctcaagtctctttaagaaag

SEQ ID NO: 185046 - DNA, 20 bp, synthetic construct
  source 1..20: mol_type = other DNA
tctcaagtctctttaagaaa

SEQ ID NO: 185047 - DNA, 20 bp, synthetic construct
  source 1..20: mol_type = other DNA
ttctcaagtctctttaagaa

SEQ ID NO: 185048 - DNA, 20 bp, synthetic construct
  source 1..20: mol_type = other DNA
gttctcaagtctctttaaga

SEQ ID NO: 185049 - DNA, 20 bp, synthetic construct
  source 1..20: mol_type = other DNA
tgttctcaagtctctttaag

SEQ ID NO: 185050 - DNA, 20 bp, synthetic construct
  source 1..20: mol_type = other DNA
ctgttctcaagtctctttaa

SEQ ID NO: 185051 - DNA, 20 bp, synthetic construct
  source 1..20: mol_type = other DNA
tctgttctcaagtctcttta

SEQ ID NO: 185052 - DNA, 20 bp, synthetic construct
  source 1..20: mol_type = other DNA
ttctgttctcaagtctcttt

SEQ ID NO: 185053 - DNA, 20 bp, synthetic construct
  source 1..20: mol_type = other DNA
tttctgttctcaagtctctt

SEQ ID NO: 185054 - DNA, 20 bp, synthetic construct
  source 1..20: mol_type = other DNA
ctttctgttctcaagtctct

SEQ ID NO: 185055 - DNA, 20 bp, synthetic construct
  source 1..20: mol_type = other DNA
cctttctgttctcaagtctc

SEQ ID NO: 185056 - DNA, 20 bp, synthetic construct
  source 1..20: mol_type = other DNA
ccctttctgttctcaagtct

SEQ ID NO: 185057 - DNA, 20 bp, synthetic construct
  source 1..20: mol_type = other DNA
cccctttctgttctcaagtc

SEQ ID NO: 185058 - DNA, 20 bp, synthetic construct
  source 1..20: mol_type = other DNA
tcccctttctgttctcaagt

SEQ ID NO: 185059 - DNA, 20 bp, synthetic construct
  source 1..20: mol_type = other DNA
ttcccctttctgttctcaag

SEQ ID NO: 185060 - DNA, 20 bp, synthetic construct
  source 1..20: mol_type = other DNA
gttcccctttctgttctcaa

SEQ ID NO: 185061 - DNA, 20 bp, synthetic construct
  source 1..20: mol_type = other DNA
tgttcccctttctgttctca

SEQ ID NO: 185062 - DNA, 20 bp, synthetic construct
  source 1..20: mol_type = other DNA
ctgttcccctttctgttctc

SEQ ID NO: 185063 - DNA, 20 bp, synthetic construct
  source 1..20: mol_type = other DNA
tctgttcccctttctgttct

SEQ ID NO: 185064 - DNA, 20 bp, synthetic construct
  source 1..20: mol_type = other DNA
atctgttcccctttctgttc

SEQ ID NO: 185065 - DNA, 20 bp, synthetic construct
  source 1..20: mol_type = other DNA
tatctgttcccctttctgtt

SEQ ID NO: 185066 - DNA, 20 bp, synthetic construct
  source 1..20: mol_type = other DNA
gtatctgttcccctttctgt

SEQ ID NO: 185067 - DNA, 20 bp, synthetic construct
  source 1..20: mol_type = other DNA
tgtatctgttcccctttctg

SEQ ID NO: 185068 - DNA, 20 bp, synthetic construct
  source 1..20: mol_type = other DNA
atgtatctgttcccctttct

SEQ ID NO: 185069 - DNA, 20 bp, synthetic construct
  source 1..20: mol_type = other DNA
tatgtatctgttcccctttc

SEQ ID NO: 185070 - DNA, 20 bp, synthetic construct
  source 1..20: mol_type = other DNA
ttatgtatctgttccccttt

SEQ ID NO: 185071 - DNA, 20 bp, synthetic construct
  source 1..20: mol_type = other DNA
gttatgtatctgttcccctt

SEQ ID NO: 185072 - DNA, 20 bp, synthetic construct
  source 1..20: mol_type = other DNA
agttatgtatctgttcccct

SEQ ID NO: 185073 - DNA, 20 bp, synthetic construct
  source 1..20: mol_type = other DNA
aagttatgtatctgttcccc

SEQ ID NO: 185074 - DNA, 20 bp, synthetic construct
  source 1..20: mol_type = other DNA
taagttatgtatctgttccc

SEQ ID NO: 185075 - DNA, 20 bp, synthetic construct
  source 1..20: mol_type = other DNA
ataagttatgtatctgttcc

SEQ ID NO: 185076 - DNA, 20 bp, synthetic construct
  source 1..20: mol_type = other DNA
tataagttatgtatctgttc

SEQ ID NO: 185077 - DNA, 20 bp, synthetic construct
  source 1..20: mol_type = other DNA
atataagttatgtatctgtt

SEQ ID NO: 185078 - DNA, 20 bp, synthetic construct
  source 1..20: mol_type = other DNA
tatataagttatgtatctgt

SEQ ID NO: 185079 - DNA, 20 bp, synthetic construct
  source 1..20: mol_type = other DNA
atatataagttatgtatctg

SEQ ID NO: 185080 - DNA, 20 bp, synthetic construct
  source 1..20: mol_type = other DNA
aatatataagttatgtatct

SEQ ID NO: 185081 - DNA, 20 bp, synthetic construct
  source 1..20: mol_type = other DNA
aaatatataagttatgtatc

SEQ ID NO: 185082 - DNA, 20 bp, synthetic construct
  source 1..20: mol_type = other DNA
taaatatataagttatgtat

SEQ ID NO: 185083 - DNA, 20 bp, synthetic construct
  source 1..20: mol_type = other DNA
ataaatatataagttatgta

SEQ ID NO: 185084 - DNA, 20 bp, synthetic construct
  source 1..20: mol_type = other DNA
aataaatatataagttatgt

SEQ ID NO: 185085 - DNA, 20 bp, synthetic construct
  source 1..20: mol_type = other DNA
aaataaatatataagttatg

SEQ ID NO: 185086 - DNA, 20 bp, synthetic construct
  source 1..20: mol_type = other DNA
caaataaatatataagttat

SEQ ID NO: 185087 - DNA, 20 bp, synthetic construct
  source 1..20: mol_type = other DNA
acaaataaatatataagtta

SEQ ID NO: 185088 - DNA, 20 bp, synthetic construct
  source 1..20: mol_type = other DNA
aacaaataaatatataagtt

SEQ ID NO: 185089 - DNA, 20 bp, synthetic construct
  source 1..20: mol_type = other DNA
gaacaaataaatatataagt

SEQ ID NO: 185090 - DNA, 20 bp, synthetic construct
  source 1..20: mol_type = other DNA
tgaacaaataaatatataag

SEQ ID NO: 185091 - DNA, 20 bp, synthetic construct
  source 1..20: mol_type = other DNA
atgaacaaataaatatataa

SEQ ID NO: 185092 - DNA, 20 bp, synthetic construct
  source 1..20: mol_type = other DNA
gatgaacaaataaatatata

SEQ ID NO: 185093 - DNA, 20 bp, synthetic construct
  source 1..20: mol_type = other DNA
agatgaacaaataaatatat

SEQ ID NO: 185094 - DNA, 20 bp, synthetic construct
  source 1..20: mol_type = other DNA
aagatgaacaaataaatata

SEQ ID NO: 185095 - DNA, 20 bp, synthetic construct
  source 1..20: mol_type = other DNA
aaagatgaacaaataaatat

SEQ ID NO: 185096 - DNA, 20 bp, synthetic construct
  source 1..20: mol_type = other DNA
gaaagatgaacaaataaata

SEQ ID NO: 185097 - DNA, 20 bp, synthetic construct
  source 1..20: mol_type = other DNA
ggaaagatgaacaaataaat

SEQ ID NO: 185098 - DNA, 20 bp, synthetic construct
  source 1..20: mol_type = other DNA
tggaaagatgaacaaataaa

SEQ ID NO: 185099 - DNA, 20 bp, synthetic construct
  source 1..20: mol_type = other DNA
gtggaaagatgaacaaataa

SEQ ID NO: 185100 - DNA, 20 bp, synthetic construct
  source 1..20: mol_type = other DNA
ggtggaaagatgaacaaata

SEQ ID NO: 185101 - DNA, 20 bp, synthetic construct
  source 1..20: mol_type = other DNA
aggtggaaagatgaacaaat

SEQ ID NO: 185102 - DNA, 20 bp, synthetic construct
  source 1..20: mol_type = other DNA
aaggtggaaagatgaacaaa

SEQ ID NO: 185103 - DNA, 20 bp, synthetic construct
  source 1..20: mol_type = other DNA
gaaggtggaaagatgaacaa

SEQ ID NO: 185104 - DNA, 20 bp, synthetic construct
  source 1..20: mol_type = other DNA
ggaaggtggaaagatgaaca

SEQ ID NO: 185105 - DNA, 20 bp, synthetic construct
  source 1..20: mol_type = other DNA
aggaaggtggaaagatgaac

SEQ ID NO: 185106 - DNA, 20 bp, synthetic construct
  source 1..20: mol_type = other DNA
caggaaggtggaaagatgaa

SEQ ID NO: 185107 - DNA, 20 bp, synthetic construct
  source 1..20: mol_type = other DNA
ccaggaaggtggaaagatga

SEQ ID NO: 185108 - DNA, 20 bp, synthetic construct
  source 1..20: mol_type = other DNA
tccaggaaggtggaaagatg

SEQ ID NO: 185109 - DNA, 20 bp, synthetic construct
  source 1..20: mol_type = other DNA
ctccaggaaggtggaaagat

SEQ ID NO: 185110 - DNA, 20 bp, synthetic construct
  source 1..20: mol_type = other DNA
cctccaggaaggtggaaaga

SEQ ID NO: 185111 - DNA, 20 bp, synthetic construct
  source 1..20: mol_type = other DNA
ccctccaggaaggtggaaag

SEQ ID NO: 185112 - DNA, 20 bp, synthetic construct
  source 1..20: mol_type = other DNA
accctccaggaaggtggaaa

SEQ ID NO: 185113 - DNA, 20 bp, synthetic construct
  source 1..20: mol_type = other DNA
caccctccaggaaggtggaa

SEQ ID NO: 185114 - DNA, 20 bp, synthetic construct
  source 1..20: mol_type = other DNA
ccaccctccaggaaggtgga

SEQ ID NO: 185115 - DNA, 20 bp, synthetic construct
  source 1..20: mol_type = other DNA
tccaccctccaggaaggtgg

SEQ ID NO: 185116 - DNA, 20 bp, synthetic construct
  source 1..20: mol_type = other DNA
ctccaccctccaggaaggtg

SEQ ID NO: 185117 - DNA, 20 bp, synthetic construct
  source 1..20: mol_type = other DNA
cctccaccctccaggaaggt

SEQ ID NO: 185118 - DNA, 20 bp, synthetic construct
  source 1..20: mol_type = other DNA
ccctccaccctccaggaagg

SEQ ID NO: 185119 - DNA, 20 bp, synthetic construct
  source 1..20: mol_type = other DNA
cccctccaccctccaggaag

SEQ ID NO: 185120 - DNA, 20 bp, synthetic construct
  source 1..20: mol_type = other DNA
tcccctccaccctccaggaa

SEQ ID NO: 185121 - DNA, 20 bp, synthetic construct
  source 1..20: mol_type = other DNA
ttcccctccaccctccagga

SEQ ID NO: 185122 - DNA, 20 bp, synthetic construct
  source 1..20: mol_type = other DNA
gttcccctccaccctccagg

SEQ ID NO: 185123 - DNA, 20 bp, synthetic construct
  source 1..20: mol_type = other DNA
tgttcccctccaccctccag

SEQ ID NO: 185124 - DNA, 20 bp, synthetic construct
  source 1..20: mol_type = other DNA
ctgttcccctccaccctcca

SEQ ID NO: 185125 - DNA, 20 bp, synthetic construct
  source 1..20: mol_type = other DNA
cctgttcccctccaccctcc

SEQ ID NO: 185126 - DNA, 20 bp, synthetic construct
  source 1..20: mol_type = other DNA
acctgttcccctccaccctc

SEQ ID NO: 185127 - DNA, 20 bp, synthetic construct
  source 1..20: mol_type = other DNA
gacctgttcccctccaccct

SEQ ID NO: 185128 - DNA, 20 bp, synthetic construct
  source 1..20: mol_type = other DNA
agacctgttcccctccaccc

SEQ ID NO: 185129 - DNA, 20 bp, synthetic construct
  source 1..20: mol_type = other DNA
cagacctgttcccctccacc

SEQ ID NO: 185130 - DNA, 20 bp, synthetic construct
  source 1..20: mol_type = other DNA
acagacctgttcccctccac

SEQ ID NO: 185131 - DNA, 20 bp, synthetic construct
  source 1..20: mol_type = other DNA
tacagacctgttcccctcca

SEQ ID NO: 185132 - DNA, 20 bp, synthetic construct
  source 1..20: mol_type = other DNA
atacagacctgttcccctcc

SEQ ID NO: 185133 - DNA, 20 bp, synthetic construct
  source 1..20: mol_type = other DNA
aatacagacctgttcccctc

SEQ ID NO: 185134 - DNA, 20 bp, synthetic construct
  source 1..20: mol_type = other DNA
aaatacagacctgttcccct

SEQ ID NO: 185135 - DNA, 20 bp, synthetic construct
  source 1..20: mol_type = other DNA
caaatacagacctgttcccc

SEQ ID NO: 185136 - DNA, 20 bp, synthetic construct
  source 1..20: mol_type = other DNA
ccaaatacagacctgttccc

SEQ ID NO: 185137 - DNA, 20 bp, synthetic construct
  source 1..20: mol_type = other DNA
tccaaatacagacctgttcc

SEQ ID NO: 185138 - DNA, 20 bp, synthetic construct
  source 1..20: mol_type = other DNA
ctccaaatacagacctgttc

SEQ ID NO: 185139 - DNA, 20 bp, synthetic construct
  source 1..20: mol_type = other DNA
actccaaatacagacctgtt

SEQ ID NO: 185140 - DNA, 20 bp, synthetic construct
  source 1..20: mol_type = other DNA
aactccaaatacagacctgt

SEQ ID NO: 185141 - DNA, 20 bp, synthetic construct
  source 1..20: mol_type = other DNA
aaactccaaatacagacctg

SEQ ID NO: 185142 - DNA, 20 bp, synthetic construct
  source 1..20: mol_type = other DNA
aaaactccaaatacagacct

SEQ ID NO: 185143 - DNA, 20 bp, synthetic construct
  source 1..20: mol_type = other DNA
caaaactccaaatacagacc

SEQ ID NO: 185144 - DNA, 20 bp, synthetic construct
  source 1..20: mol_type = other DNA
tcaaaactccaaatacagac

SEQ ID NO: 185145 - DNA, 20 bp, synthetic construct
  source 1..20: mol_type = other DNA
ttcaaaactccaaatacaga

SEQ ID NO: 185146 - DNA, 20 bp, synthetic construct
  source 1..20: mol_type = other DNA
attcaaaactccaaatacag

SEQ ID NO: 185147 - DNA, 20 bp, synthetic construct
  source 1..20: mol_type = other DNA
cattcaaaactccaaataca

SEQ ID NO: 185148 - DNA, 20 bp, synthetic construct
  source 1..20: mol_type = other DNA
gcattcaaaactccaaatac

SEQ ID NO: 185149 - DNA, 20 bp, synthetic construct
  source 1..20: mol_type = other DNA
agcattcaaaactccaaata

SEQ ID NO: 185150 - DNA, 20 bp, synthetic construct
  source 1..20: mol_type = other DNA
tagcattcaaaactccaaat

SEQ ID NO: 185151 - DNA, 20 bp, synthetic construct
  source 1..20: mol_type = other DNA
ttagcattcaaaactccaaa

SEQ ID NO: 185152 - DNA, 20 bp, synthetic construct
  source 1..20: mol_type = other DNA
tttagcattcaaaactccaa

SEQ ID NO: 185153 - DNA, 20 bp, synthetic construct
  source 1..20: mol_type = other DNA
ttttagcattcaaaactcca

SEQ ID NO: 185154 - DNA, 20 bp, synthetic construct
  source 1..20: mol_type = other DNA
cttttagcattcaaaactcc

SEQ ID NO: 185155 - DNA, 20 bp, synthetic construct
  source 1..20: mol_type = other DNA
acttttagcattcaaaactc

SEQ ID NO: 185156 - DNA, 20 bp, synthetic construct
  source 1..20: mol_type = other DNA
cacttttagcattcaaaact

SEQ ID NO: 185157 - DNA, 20 bp, synthetic construct
  source 1..20: mol_type = other DNA
ccacttttagcattcaaaac

SEQ ID NO: 185158 - DNA, 20 bp, synthetic construct
  source 1..20: mol_type = other DNA
cccacttttagcattcaaaa

SEQ ID NO: 185159 - DNA, 20 bp, synthetic construct
  source 1..20: mol_type = other DNA
tcccacttttagcattcaaa

SEQ ID NO: 185160 - DNA, 20 bp, synthetic construct
  source 1..20: mol_type = other DNA
ttcccacttttagcattcaa

SEQ ID NO: 185161 - DNA, 20 bp, synthetic construct
  source 1..20: mol_type = other DNA
attcccacttttagcattca

SEQ ID NO: 185162 - DNA, 20 bp, synthetic construct
  source 1..20: mol_type = other DNA
tattcccacttttagcattc

SEQ ID NO: 185163 - DNA, 20 bp, synthetic construct
  source 1..20: mol_type = other DNA
gtattcccacttttagcatt

SEQ ID NO: 185164 - DNA, 20 bp, synthetic construct
  source 1..20: mol_type = other DNA
tgtattcccacttttagcat

SEQ ID NO: 185165 - DNA, 20 bp, synthetic construct
  source 1..20: mol_type = other DNA
atgtattcccacttttagca

SEQ ID NO: 185166 - DNA, 20 bp, synthetic construct
  source 1..20: mol_type = other DNA
catgtattcccacttttagc

SEQ ID NO: 185167 - DNA, 20 bp, synthetic construct
  source 1..20: mol_type = other DNA
acatgtattcccacttttag

SEQ ID NO: 185168 - DNA, 20 bp, synthetic construct
  source 1..20: mol_type = other DNA
tacatgtattcccactttta

SEQ ID NO: 185169 - DNA, 20 bp, synthetic construct
  source 1..20: mol_type = other DNA
gtacatgtattcccactttt

SEQ ID NO: 185170 - DNA, 20 bp, synthetic construct
  source 1..20: mol_type = other DNA
agtacatgtattcccacttt

SEQ ID NO: 185171 - DNA, 20 bp, synthetic construct
  source 1..20: mol_type = other DNA
cagtacatgtattcccactt

SEQ ID NO: 185172 - DNA, 20 bp, synthetic construct
  source 1..20: mol_type = other DNA
acagtacatgtattcccact

SEQ ID NO: 185173 - DNA, 20 bp, synthetic construct
  source 1..20: mol_type = other DNA
aacagtacatgtattcccac

SEQ ID NO: 185174 - DNA, 20 bp, synthetic construct
  source 1..20: mol_type = other DNA
aaacagtacatgtattccca

SEQ ID NO: 185175 - DNA, 20 bp, synthetic construct
  source 1..20: mol_type = other DNA
caaacagtacatgtattccc

SEQ ID NO: 185176 - DNA, 20 bp, synthetic construct
  source 1..20: mol_type = other DNA
gcaaacagtacatgtattcc

SEQ ID NO: 185177 - DNA, 20 bp, synthetic construct
  source 1..20: mol_type = other DNA
ggcaaacagtacatgtattc

SEQ ID NO: 185178 - DNA, 20 bp, synthetic construct
  source 1..20: mol_type = other DNA
tggcaaacagtacatgtatt

SEQ ID NO: 185179 - DNA, 20 bp, synthetic construct
  source 1..20: mol_type = other DNA
atggcaaacagtacatgtat

SEQ ID NO: 185180 - DNA, 20 bp, synthetic construct
  source 1..20: mol_type = other DNA
catggcaaacagtacatgta

SEQ ID NO: 185181 - DNA, 20 bp, synthetic construct
  source 1..20: mol_type = other DNA
tcatggcaaacagtacatgt

SEQ ID NO: 185182 - DNA, 20 bp, synthetic construct
  source 1..20: mol_type = other DNA
atcatggcaaacagtacatg

SEQ ID NO: 185183 - DNA, 20 bp, synthetic construct
  source 1..20: mol_type = other DNA
gatcatggcaaacagtacat

SEQ ID NO: 185184 - DNA, 20 bp, synthetic construct
  source 1..20: mol_type = other DNA
agatcatggcaaacagtaca

SEQ ID NO: 185185 - DNA, 20 bp, synthetic construct
  source 1..20: mol_type = other DNA
cagatcatggcaaacagtac

SEQ ID NO: 185186 - DNA, 20 bp, synthetic construct
  source 1..20: mol_type = other DNA
acagatcatggcaaacagta

SEQ ID NO: 185187 - DNA, 20 bp, synthetic construct
  source 1..20: mol_type = other DNA
aacagatcatggcaaacagt

SEQ ID NO: 185188 - DNA, 20 bp, synthetic construct
  source 1..20: mol_type = other DNA
gaacagatcatggcaaacag

SEQ ID NO: 185189 - DNA, 20 bp, synthetic construct
  source 1..20: mol_type = other DNA
tgaacagatcatggcaaaca

SEQ ID NO: 185190 - DNA, 20 bp, synthetic construct
  source 1..20: mol_type = other DNA
ttgaacagatcatggcaaac

SEQ ID NO: 185191 - DNA, 20 bp, synthetic construct
  source 1..20: mol_type = other DNA
tttgaacagatcatggcaaa

SEQ ID NO: 185192 - DNA, 20 bp, synthetic construct
  source 1..20: mol_type = other DNA
ttttgaacagatcatggcaa

SEQ ID NO: 185193 - DNA, 20 bp, synthetic construct
  source 1..20: mol_type = other DNA
cttttgaacagatcatggca

SEQ ID NO: 185194 - DNA, 20 bp, synthetic construct
  source 1..20: mol_type = other DNA
acttttgaacagatcatggc

SEQ ID NO: 185195 - DNA, 20 bp, synthetic construct
  source 1..20: mol_type = other DNA
aacttttgaacagatcatgg

SEQ ID NO: 185196 - DNA, 20 bp, synthetic construct
  source 1..20: mol_type = other DNA
taacttttgaacagatcatg

SEQ ID NO: 185197 - DNA, 20 bp, synthetic construct
  source 1..20: mol_type = other DNA
ttaacttttgaacagatcat

SEQ ID NO: 185198 - DNA, 20 bp, synthetic construct
  source 1..20: mol_type = other DNA
cttaacttttgaacagatca

SEQ ID NO: 185199 - DNA, 20 bp, synthetic construct
  source 1..20: mol_type = other DNA
gcttaacttttgaacagatc

SEQ ID NO: 185200 - DNA, 20 bp, synthetic construct
  source 1..20: mol_type = other DNA
ggcttaacttttgaacagat

SEQ ID NO: 185201 - DNA, 20 bp, synthetic construct
  source 1..20: mol_type = other DNA
tggcttaacttttgaacaga

SEQ ID NO: 185202 - DNA, 20 bp, synthetic construct
  source 1..20: mol_type = other DNA
ttggcttaacttttgaacag

SEQ ID NO: 185203 - DNA, 20 bp, synthetic construct
  source 1..20: mol_type = other DNA
tttggcttaacttttgaaca

SEQ ID NO: 185204 - DNA, 20 bp, synthetic construct
  source 1..20: mol_type = other DNA
atttggcttaacttttgaac

SEQ ID NO: 185205 - DNA, 20 bp, synthetic construct
  source 1..20: mol_type = other DNA
catttggcttaacttttgaa

SEQ ID NO: 185206 - DNA, 20 bp, synthetic construct
  source 1..20: mol_type = other DNA
gcatttggcttaacttttga

SEQ ID NO: 185207 - DNA, 20 bp, synthetic construct
  source 1..20: mol_type = other DNA
ggcatttggcttaacttttg

SEQ ID NO: 185208 - DNA, 20 bp, synthetic construct
  source 1..20: mol_type = other DNA
aggcatttggcttaactttt

SEQ ID NO: 185209 - DNA, 20 bp, synthetic construct
  source 1..20: mol_type = other DNA
aaggcatttggcttaacttt

SEQ ID NO: 185210 - DNA, 20 bp, synthetic construct
  source 1..20: mol_type = other DNA
taaggcatttggcttaactt

SEQ ID NO: 185211 - DNA, 20 bp, synthetic construct
  source 1..20: mol_type = other DNA
ctaaggcatttggcttaact

SEQ ID NO: 185212 - DNA, 20 bp, synthetic construct
  source 1..20: mol_type = other DNA
tctaaggcatttggcttaac

SEQ ID NO: 185213 - DNA, 20 bp, synthetic construct
  source 1..20: mol_type = other DNA
atctaaggcatttggcttaa

SEQ ID NO: 185214 - DNA, 20 bp, synthetic construct
  source 1..20: mol_type = other DNA
aatctaaggcatttggctta

SEQ ID NO: 185215 - DNA, 20 bp, synthetic construct
  source 1..20: mol_type = other DNA
gaatctaaggcatttggctt

SEQ ID NO: 185216 - DNA, 20 bp, synthetic construct
  source 1..20: mol_type = other DNA
agaatctaaggcatttggct

SEQ ID NO: 185217 - DNA, 20 bp, synthetic construct
  source 1..20: mol_type = other DNA
gagaatctaaggcatttggc

SEQ ID NO: 185218 - DNA, 20 bp, synthetic construct
  source 1..20: mol_type = other DNA
ggagaatctaaggcatttgg

SEQ ID NO: 185219 - DNA, 20 bp, synthetic construct
  source 1..20: mol_type = other DNA
aggagaatctaaggcatttg

SEQ ID NO: 185220 - DNA, 20 bp, synthetic construct
  source 1..20: mol_type = other DNA
caggagaatctaaggcattt

SEQ ID NO: 185221 - DNA, 20 bp, synthetic construct
  source 1..20: mol_type = other DNA
tcaggagaatctaaggcatt

SEQ ID NO: 185222 - DNA, 20 bp, synthetic construct
  source 1..20: mol_type = other DNA
ttcaggagaatctaaggcat

SEQ ID NO: 185223 - DNA, 20 bp, synthetic construct
  source 1..20: mol_type = other DNA
tttcaggagaatctaaggca

SEQ ID NO: 185224 - DNA, 20 bp, synthetic construct
  source 1..20: mol_type = other DNA
ttttcaggagaatctaaggc

SEQ ID NO: 185225 - DNA, 20 bp, synthetic construct
  source 1..20: mol_type = other DNA
gttttcaggagaatctaagg

SEQ ID NO: 185226 - DNA, 20 bp, synthetic construct
  source 1..20: mol_type = other DNA
agttttcaggagaatctaag

SEQ ID NO: 185227 - DNA, 20 bp, synthetic construct
  source 1..20: mol_type = other DNA
cagttttcaggagaatctaa

SEQ ID NO: 185228 - DNA, 20 bp, synthetic construct
  source 1..20: mol_type = other DNA
ccagttttcaggagaatcta

SEQ ID NO: 185229 - DNA, 20 bp, synthetic construct
  source 1..20: mol_type = other DNA
tccagttttcaggagaatct

SEQ ID NO: 185230 - DNA, 20 bp, synthetic construct
  source 1..20: mol_type = other DNA
ttccagttttcaggagaatc

SEQ ID NO: 185231 - DNA, 20 bp, synthetic construct
  source 1..20: mol_type = other DNA
attccagttttcaggagaat

SEQ ID NO: 185232 - DNA, 20 bp, synthetic construct
  source 1..20: mol_type = other DNA
cattccagttttcaggagaa

SEQ ID NO: 185233 - DNA, 20 bp, synthetic construct
  source 1..20: mol_type = other DNA
gcattccagttttcaggaga

SEQ ID NO: 185234 - DNA, 20 bp, synthetic construct
  source 1..20: mol_type = other DNA
ggcattccagttttcaggag

SEQ ID NO: 185235 - DNA, 20 bp, synthetic construct
  source 1..20: mol_type = other DNA
tggcattccagttttcagga

SEQ ID NO: 185236 - DNA, 20 bp, synthetic construct
  source 1..20: mol_type = other DNA
gtggcattccagttttcagg

SEQ ID NO: 185237 - DNA, 20 bp, synthetic construct
  source 1..20: mol_type = other DNA
agtggcattccagttttcag

SEQ ID NO: 185238 - DNA, 20 bp, synthetic construct
  source 1..20: mol_type = other DNA
cagtggcattccagttttca

SEQ ID NO: 185239 - DNA, 20 bp, synthetic construct
  source 1..20: mol_type = other DNA
acagtggcattccagttttc

SEQ ID NO: 185240 - DNA, 20 bp, synthetic construct
  source 1..20: mol_type = other DNA
tacagtggcattccagtttt

SEQ ID NO: 185241 - DNA, 20 bp, synthetic construct
  source 1..20: mol_type = other DNA
ttacagtggcattccagttt

SEQ ID NO: 185242 - DNA, 20 bp, synthetic construct
  source 1..20: mol_type = other DNA
tttacagtggcattccagtt

SEQ ID NO: 185243 - DNA, 20 bp, synthetic construct
  source 1..20: mol_type = other DNA
gtttacagtggcattccagt

SEQ ID NO: 185244 - DNA, 20 bp, synthetic construct
  source 1..20: mol_type = other DNA
agtttacagtggcattccag

SEQ ID NO: 185245 - DNA, 20 bp, synthetic construct
  source 1..20: mol_type = other DNA
tagtttacagtggcattcca

SEQ ID NO: 185246 - DNA, 20 bp, synthetic construct
  source 1..20: mol_type = other DNA
atagtttacagtggcattcc

SEQ ID NO: 185247 - DNA, 20 bp, synthetic construct
  source 1..20: mol_type = other DNA
tatagtttacagtggcattc

SEQ ID NO: 185248 - DNA, 20 bp, synthetic construct
  source 1..20: mol_type = other DNA
ttatagtttacagtggcatt

SEQ ID NO: 185249 - DNA, 20 bp, synthetic construct
  source 1..20: mol_type = other DNA
cttatagtttacagtggcat

SEQ ID NO: 185250 - DNA, 20 bp, synthetic construct
  source 1..20: mol_type = other DNA
gcttatagtttacagtggca

SEQ ID NO: 185251 - DNA, 20 bp, synthetic construct
  source 1..20: mol_type = other DNA
ggcttatagtttacagtggc

SEQ ID NO: 185252 - DNA, 20 bp, synthetic construct
  source 1..20: mol_type = other DNA
gggcttatagtttacagtgg

SEQ ID NO: 185253 - DNA, 20 bp, synthetic construct
  source 1..20: mol_type = other DNA
ggggcttatagtttacagtg

SEQ ID NO: 185254 - DNA, 20 bp, synthetic construct
  source 1..20: mol_type = other DNA
tggggcttatagtttacagt

SEQ ID NO: 185255 - DNA, 20 bp, synthetic construct
  source 1..20: mol_type = other DNA
gtggggcttatagtttacag

SEQ ID NO: 185256 - DNA, 20 bp, synthetic construct
  source 1..20: mol_type = other DNA
agtggggcttatagtttaca

SEQ ID NO: 185257 - DNA, 20 bp, synthetic construct
  source 1..20: mol_type = other DNA
aagtggggcttatagtttac

SEQ ID NO: 185258 - DNA, 20 bp, synthetic construct
  source 1..20: mol_type = other DNA
gaagtggggcttatagttta

SEQ ID NO: 185259 - DNA, 20 bp, synthetic construct
  source 1..20: mol_type = other DNA
tgaagtggggcttatagttt

SEQ ID NO: 185260 - DNA, 20 bp, synthetic construct
  source 1..20: mol_type = other DNA
ttgaagtggggcttatagtt

SEQ ID NO: 185261 - DNA, 20 bp, synthetic construct
  source 1..20: mol_type = other DNA
tttgaagtggggcttatagt

SEQ ID NO: 185262 - DNA, 20 bp, synthetic construct
  source 1..20: mol_type = other DNA
ctttgaagtggggcttatag

SEQ ID NO: 185263 - DNA, 20 bp, synthetic construct
  source 1..20: mol_type = other DNA
tctttgaagtggggcttata

SEQ ID NO: 185264 - DNA, 20 bp, synthetic construct
  source 1..20: mol_type = other DNA
atctttgaagtggggcttat

SEQ ID NO: 185265 - DNA, 20 bp, synthetic construct
  source 1..20: mol_type = other DNA
tatctttgaagtggggctta

SEQ ID NO: 185266 - DNA, 20 bp, synthetic construct
  source 1..20: mol_type = other DNA
ttatctttgaagtggggctt

SEQ ID NO: 185267 - DNA, 20 bp, synthetic construct
  source 1..20: mol_type = other DNA
tttatctttgaagtggggct

SEQ ID NO: 185268 - DNA, 20 bp, synthetic construct
  source 1..20: mol_type = other DNA
ttttatctttgaagtggggc

SEQ ID NO: 185269 - DNA, 20 bp, synthetic construct
  source 1..20: mol_type = other DNA
cttttatctttgaagtgggg

SEQ ID NO: 185270 - DNA, 20 bp, synthetic construct
  source 1..20: mol_type = other DNA
tcttttatctttgaagtggg

SEQ ID NO: 185271 - DNA, 20 bp, synthetic construct
  source 1..20: mol_type = other DNA
atcttttatctttgaagtgg

SEQ ID NO: 185272 - DNA, 20 bp, synthetic construct
  source 1..20: mol_type = other DNA
gatcttttatctttgaagtg

SEQ ID NO: 185273 - DNA, 20 bp, synthetic construct
  source 1..20: mol_type = other DNA
agatcttttatctttgaagt

SEQ ID NO: 185274 - DNA, 20 bp, synthetic construct
  source 1..20: mol_type = other DNA
aagatcttttatctttgaag

SEQ ID NO: 185275 - DNA, 20 bp, synthetic construct
  source 1..20: mol_type = other DNA
caagatcttttatctttgaa

SEQ ID NO: 185276 - DNA, 20 bp, synthetic construct
  source 1..20: mol_type = other DNA
tcaagatcttttatctttga

SEQ ID NO: 185277 - DNA, 20 bp, synthetic construct
  source 1..20: mol_type = other DNA
atcaagatcttttatctttg

SEQ ID NO: 185278 - DNA, 20 bp, synthetic construct
  source 1..20: mol_type = other DNA
catcaagatcttttatcttt

SEQ ID NO: 185279 - DNA, 20 bp, synthetic construct
  source 1..20: mol_type = other DNA
tcatcaagatcttttatctt

SEQ ID NO: 185280 - DNA, 20 bp, synthetic construct
  source 1..20: mol_type = other DNA
ttcatcaagatcttttatct

SEQ ID NO: 185281 - DNA, 20 bp, synthetic construct
  source 1..20: mol_type = other DNA
gttcatcaagatcttttatc

SEQ ID NO: 185282 - DNA, 20 bp, synthetic construct
  source 1..20: mol_type = other DNA
tgttcatcaagatcttttat

SEQ ID NO: 185283 - DNA, 20 bp, synthetic construct
  source 1..20: mol_type = other DNA
ctgttcatcaagatctttta

SEQ ID NO: 185284 - DNA, 20 bp, synthetic construct
  source 1..20: mol_type = other DNA
cctgttcatcaagatctttt

SEQ ID NO: 185285 - DNA, 20 bp, synthetic construct
  source 1..20: mol_type = other DNA
ccctgttcatcaagatcttt

SEQ ID NO: 185286 - DNA, 20 bp, synthetic construct
  source 1..20: mol_type = other DNA
gccctgttcatcaagatctt

SEQ ID NO: 185287 - DNA, 20 bp, synthetic construct
  source 1..20: mol_type = other DNA
agccctgttcatcaagatct

SEQ ID NO: 185288 - DNA, 20 bp, synthetic construct
  source 1..20: mol_type = other DNA
cagccctgttcatcaagatc

SEQ ID NO: 185289 - DNA, 20 bp, synthetic construct
  source 1..20: mol_type = other DNA
ccagccctgttcatcaagat

SEQ ID NO: 185290 - DNA, 20 bp, synthetic construct
  source 1..20: mol_type = other DNA
cccagccctgttcatcaaga

SEQ ID NO: 185291 - DNA, 20 bp, synthetic construct
  source 1..20: mol_type = other DNA
acccagccctgttcatcaag

SEQ ID NO: 185292 - DNA, 20 bp, synthetic construct
  source 1..20: mol_type = other DNA
gacccagccctgttcatcaa

SEQ ID NO: 185293 - DNA, 20 bp, synthetic construct
  source 1..20: mol_type = other DNA
agacccagccctgttcatca

SEQ ID NO: 185294 - DNA, 20 bp, synthetic construct
  source 1..20: mol_type = other DNA
cagacccagccctgttcatc

SEQ ID NO: 185295 - DNA, 20 bp, synthetic construct
  source 1..20: mol_type = other DNA
acagacccagccctgttcat

SEQ ID NO: 185296 - DNA, 20 bp, synthetic construct
  source 1..20: mol_type = other DNA
cacagacccagccctgttca

SEQ ID NO: 185297 - DNA, 20 bp, synthetic construct
  source 1..20: mol_type = other DNA
ccacagacccagccctgttc

SEQ ID NO: 185298 - DNA, 20 bp, synthetic construct
  source 1..20: mol_type = other DNA
tccacagacccagccctgtt

SEQ ID NO: 185299 - DNA, 20 bp, synthetic construct
  source 1..20: mol_type = other DNA
gtccacagacccagccctgt

SEQ ID NO: 185300 - DNA, 20 bp, synthetic construct
  source 1..20: mol_type = other DNA
agtccacagacccagccctg

SEQ ID NO: 185301 - DNA, 20 bp, synthetic construct
  source 1..20: mol_type = other DNA
cagtccacagacccagccct

SEQ ID NO: 185302 - DNA, 20 bp, synthetic construct
  source 1..20: mol_type = other DNA
ccagtccacagacccagccc

SEQ ID NO: 185303 - DNA, 20 bp, synthetic construct
  source 1..20: mol_type = other DNA
cccagtccacagacccagcc

SEQ ID NO: 185304 - DNA, 20 bp, synthetic construct
  source 1..20: mol_type = other DNA
gcccagtccacagacccagc

SEQ ID NO: 185305 - DNA, 20 bp, synthetic construct
  source 1..20: mol_type = other DNA
ggcccagtccacagacccag

SEQ ID NO: 185306 - DNA, 20 bp, synthetic construct
  source 1..20: mol_type = other DNA
aggcccagtccacagaccca

SEQ ID NO: 185307 - DNA, 20 bp, synthetic construct
  source 1..20: mol_type = other DNA
gaggcccagtccacagaccc

SEQ ID NO: 185308 - DNA, 20 bp, synthetic construct
  source 1..20: mol_type = other DNA
agaggcccagtccacagacc

SEQ ID NO: 185309 - DNA, 20 bp, synthetic construct
  source 1..20: mol_type = other DNA
gagaggcccagtccacagac

SEQ ID NO: 185310 - DNA, 20 bp, synthetic construct
  source 1..20: mol_type = other DNA
ggagaggcccagtccacaga

SEQ ID NO: 185311 - DNA, 20 bp, synthetic construct
  source 1..20: mol_type = other DNA
gggagaggcccagtccacag

SEQ ID NO: 185312 - DNA, 20 bp, synthetic construct
  source 1..20: mol_type = other DNA
ggggagaggcccagtccaca

SEQ ID NO: 185313 - DNA, 20 bp, synthetic construct
  source 1..20: mol_type = other DNA
tggggagaggcccagtccac

SEQ ID NO: 185314 - DNA, 20 bp, synthetic construct
  source 1..20: mol_type = other DNA
gtggggagaggcccagtcca

SEQ ID NO: 185315 - DNA, 20 bp, synthetic construct
  source 1..20: mol_type = other DNA
ggtggggagaggcccagtcc

SEQ ID NO: 185316 - DNA, 20 bp, synthetic construct
  source 1..20: mol_type = other DNA
tggtggggagaggcccagtc

SEQ ID NO: 185317 - DNA, 20 bp, synthetic construct
  source 1..20: mol_type = other DNA
gtggtggggagaggcccagt

SEQ ID NO: 185318 - DNA, 20 bp, synthetic construct
  source 1..20: mol_type = other DNA
tgtggtggggagaggcccag

SEQ ID NO: 185319 - DNA, 20 bp, synthetic construct
  source 1..20: mol_type = other DNA
gtgtggtggggagaggccca

SEQ ID NO: 185320 - DNA, 20 bp, synthetic construct
  source 1..20: mol_type = other DNA
tgtgtggtggggagaggccc

SEQ ID NO: 185321 - DNA, 20 bp, synthetic construct
  source 1..20: mol_type = other DNA
ttgtgtggtggggagaggcc

SEQ ID NO: 185322 - DNA, 20 bp, synthetic construct
  source 1..20: mol_type = other DNA
cttgtgtggtggggagaggc

SEQ ID NO: 185323 - DNA, 20 bp, synthetic construct
  source 1..20: mol_type = other DNA
ccttgtgtggtggggagagg

SEQ ID NO: 185324 - DNA, 20 bp, synthetic construct
  source 1..20: mol_type = other DNA
tccttgtgtggtggggagag

SEQ ID NO: 185325 - DNA, 20 bp, synthetic construct
  source 1..20: mol_type = other DNA
ttccttgtgtggtggggaga

SEQ ID NO: 185326 - DNA, 20 bp, synthetic construct
  source 1..20: mol_type = other DNA
cttccttgtgtggtggggag

SEQ ID NO: 185327 - DNA, 20 bp, synthetic construct
  source 1..20: mol_type = other DNA
ccttccttgtgtggtgggga

SEQ ID NO: 185328 - DNA, 20 bp, synthetic construct
  source 1..20: mol_type = other DNA
cccttccttgtgtggtgggg

SEQ ID NO: 185329 - DNA, 20 bp, synthetic construct
  source 1..20: mol_type = other DNA
acccttccttgtgtggtggg

SEQ ID NO: 185330 - DNA, 20 bp, synthetic construct
  source 1..20: mol_type = other DNA
cacccttccttgtgtggtgg

SEQ ID NO: 185331 - DNA, 20 bp, synthetic construct
  source 1..20: mol_type = other DNA
ccacccttccttgtgtggtg

SEQ ID NO: 185332 - DNA, 20 bp, synthetic construct
  source 1..20: mol_type = other DNA
accacccttccttgtgtggt

SEQ ID NO: 185333 - DNA, 20 bp, synthetic construct
  source 1..20: mol_type = other DNA
caccacccttccttgtgtgg

SEQ ID NO: 185334 - DNA, 20 bp, synthetic construct
  source 1..20: mol_type = other DNA
gcaccacccttccttgtgtg

SEQ ID NO: 185335 - DNA, 20 bp, synthetic construct
  source 1..20: mol_type = other DNA
ggcaccacccttccttgtgt

SEQ ID NO: 185336 - DNA, 20 bp, synthetic construct
  source 1..20: mol_type = other DNA
tggcaccacccttccttgtg

SEQ ID NO: 185337 - DNA, 20 bp, synthetic construct
  source 1..20: mol_type = other DNA
ctggcaccacccttccttgt

SEQ ID NO: 185338 - DNA, 20 bp, synthetic construct
  source 1..20: mol_type = other DNA
actggcaccacccttccttg

SEQ ID NO: 185339 - DNA, 20 bp, synthetic construct
  source 1..20: mol_type = other DNA
aactggcaccacccttcctt

SEQ ID NO: 185340 - DNA, 20 bp, synthetic construct
  source 1..20: mol_type = other DNA
caactggcaccacccttcct

SEQ ID NO: 185341 - DNA, 20 bp, synthetic construct
  source 1..20: mol_type = other DNA
tcaactggcaccacccttcc

SEQ ID NO: 185342 - DNA, 20 bp, synthetic construct
  source 1..20: mol_type = other DNA
ttcaactggcaccacccttc

SEQ ID NO: 185343 - DNA, 20 bp, synthetic construct
  source 1..20: mol_type = other DNA
cttcaactggcaccaccctt

SEQ ID NO: 185344 - DNA, 20 bp, synthetic construct
  source 1..20: mol_type = other DNA
ccttcaactggcaccaccct

SEQ ID NO: 185345 - DNA, 20 bp, synthetic construct
  source 1..20: mol_type = other DNA
tccttcaactggcaccaccc

SEQ ID NO: 185346 - DNA, 20 bp, synthetic construct
  source 1..20: mol_type = other DNA
ttccttcaactggcaccacc

SEQ ID NO: 185347 - DNA, 20 bp, synthetic construct
  source 1..20: mol_type = other DNA
tttccttcaactggcaccac

SEQ ID NO: 185348 - DNA, 20 bp, synthetic construct
  source 1..20: mol_type = other DNA
ttttccttcaactggcacca

SEQ ID NO: 185349 - DNA, 20 bp, synthetic construct
  source 1..20: mol_type = other DNA
attttccttcaactggcacc

SEQ ID NO: 185350 - DNA, 20 bp, synthetic construct
  source 1..20: mol_type = other DNA
gattttccttcaactggcac

SEQ ID NO: 185351 - DNA, 20 bp, synthetic construct
  source 1..20: mol_type = other DNA
tgattttccttcaactggca

SEQ ID NO: 185352 - DNA, 20 bp, synthetic construct
  source 1..20: mol_type = other DNA
gtgattttccttcaactggc

SEQ ID NO: 185353 - DNA, 20 bp, synthetic construct
  source 1..20: mol_type = other DNA
agtgattttccttcaactgg

SEQ ID NO: 185354 - DNA, 20 bp, synthetic construct
  source 1..20: mol_type = other DNA
aagtgattttccttcaactg

SEQ ID NO: 185355 - DNA, 20 bp, synthetic construct
  source 1..20: mol_type = other DNA
taagtgattttccttcaact

SEQ ID NO: 185356 - DNA, 20 bp, synthetic construct
  source 1..20: mol_type = other DNA
ttaagtgattttccttcaac

SEQ ID NO: 185357 - DNA, 20 bp, synthetic construct
  source 1..20: mol_type = other DNA
tttaagtgattttccttcaa

SEQ ID NO: 185358 - DNA, 20 bp, synthetic construct
  source 1..20: mol_type = other DNA
atttaagtgattttccttca

SEQ ID NO: 185359 - DNA, 20 bp, synthetic construct
  source 1..20: mol_type = other DNA
gatttaagtgattttccttc

SEQ ID NO: 185360 - DNA, 20 bp, synthetic construct
  source 1..20: mol_type = other DNA
ggatttaagtgattttcctt

SEQ ID NO: 185361 - DNA, 20 bp, synthetic construct
  source 1..20: mol_type = other DNA
aggatttaagtgattttcct

SEQ ID NO: 185362 - DNA, 20 bp, synthetic construct
  source 1..20: mol_type = other DNA
aaggatttaagtgattttcc

SEQ ID NO: 185363 - DNA, 20 bp, synthetic construct
  source 1..20: mol_type = other DNA
caaggatttaagtgattttc

SEQ ID NO: 185364 - DNA, 20 bp, synthetic construct
  source 1..20: mol_type = other DNA
gcaaggatttaagtgatttt

SEQ ID NO: 185365 - DNA, 20 bp, synthetic construct
  source 1..20: mol_type = other DNA
agcaaggatttaagtgattt

SEQ ID NO: 185366 - DNA, 20 bp, synthetic construct
  source 1..20: mol_type = other DNA
cagcaaggatttaagtgatt

SEQ ID NO: 185367 - DNA, 20 bp, synthetic construct
  source 1..20: mol_type = other DNA
acagcaaggatttaagtgat

SEQ ID NO: 185368 - DNA, 20 bp, synthetic construct
  source 1..20: mol_type = other DNA
gacagcaaggatttaagtga

SEQ ID NO: 185369 - DNA, 20 bp, synthetic construct
  source 1..20: mol_type = other DNA
agacagcaaggatttaagtg

SEQ ID NO: 185370 - DNA, 20 bp, synthetic construct
  source 1..20: mol_type = other DNA
gagacagcaaggatttaagt

SEQ ID NO: 185371 - DNA, 20 bp, synthetic construct
  source 1..20: mol_type = other DNA
ggagacagcaaggatttaag

SEQ ID NO: 185372 - DNA, 20 bp, synthetic construct
  source 1..20: mol_type = other DNA
aggagacagcaaggatttaa

SEQ ID NO: 185373 - DNA, 20 bp, synthetic construct
  source 1..20: mol_type = other DNA
taggagacagcaaggattta

SEQ ID NO: 185374 - DNA, 20 bp, synthetic construct
  source 1..20: mol_type = other DNA
ttaggagacagcaaggattt

SEQ ID NO: 185375 - DNA, 20 bp, synthetic construct
  source 1..20: mol_type = other DNA
attaggagacagcaaggatt

SEQ ID NO: 185376 - DNA, 20 bp, synthetic construct
  source 1..20: mol_type = other DNA
tattaggagacagcaaggat

SEQ ID NO: 185377 - DNA, 20 bp, synthetic construct
  source 1..20: mol_type = other DNA
ttattaggagacagcaagga

SEQ ID NO: 185378 - DNA, 20 bp, synthetic construct
  source 1..20: mol_type = other DNA
cttattaggagacagcaagg

SEQ ID NO: 185379 - DNA, 20 bp, synthetic construct
  source 1..20: mol_type = other DNA
ccttattaggagacagcaag

SEQ ID NO: 185380 - DNA, 20 bp, synthetic construct
  source 1..20: mol_type = other DNA
accttattaggagacagcaa

SEQ ID NO: 185381 - DNA, 20 bp, synthetic construct
  source 1..20: mol_type = other DNA
caccttattaggagacagca

SEQ ID NO: 185382 - DNA, 20 bp, synthetic construct
  source 1..20: mol_type = other DNA
acaccttattaggagacagc

SEQ ID NO: 185383 - DNA, 20 bp, synthetic construct
  source 1..20: mol_type = other DNA
cacaccttattaggagacag

SEQ ID NO: 185384 - DNA, 20 bp, synthetic construct
  source 1..20: mol_type = other DNA
ccacaccttattaggagaca

SEQ ID NO: 185385 - DNA, 20 bp, synthetic construct
  source 1..20: mol_type = other DNA
accacaccttattaggagac

SEQ ID NO: 185386 - DNA, 20 bp, synthetic construct
  source 1..20: mol_type = other DNA
gaccacaccttattaggaga

SEQ ID NO: 185387 - DNA, 20 bp, synthetic construct
  source 1..20: mol_type = other DNA
ggaccacaccttattaggag

SEQ ID NO: 185388 - DNA, 20 bp, synthetic construct
  source 1..20: mol_type = other DNA
gggaccacaccttattagga

SEQ ID NO: 185389 - DNA, 20 bp, synthetic construct
  source 1..20: mol_type = other DNA
tgggaccacaccttattagg

SEQ ID NO: 185390 - DNA, 20 bp, synthetic construct
  source 1..20: mol_type = other DNA
ctgggaccacaccttattag

SEQ ID NO: 185391 - DNA, 20 bp, synthetic construct
  source 1..20: mol_type = other DNA
cctgggaccacaccttatta

SEQ ID NO: 185392 - DNA, 20 bp, synthetic construct
  source 1..20: mol_type = other DNA
acctgggaccacaccttatt

SEQ ID NO: 185393 - DNA, 20 bp, synthetic construct
  source 1..20: mol_type = other DNA
tacctgggaccacaccttat

SEQ ID NO: 185394 - DNA, 20 bp, synthetic construct
  source 1..20: mol_type = other DNA
ctacctgggaccacacctta

SEQ ID NO: 185395 - DNA, 20 bp, synthetic construct
  source 1..20: mol_type = other DNA
cctacctgggaccacacctt

SEQ ID NO: 185396 - DNA, 20 bp, synthetic construct
  source 1..20: mol_type = other DNA
ccctacctgggaccacacct

SEQ ID NO: 185397 - DNA, 20 bp, synthetic construct
  source 1..20: mol_type = other DNA
gccctacctgggaccacacc

SEQ ID NO: 185398 - DNA, 20 bp, synthetic construct
  source 1..20: mol_type = other DNA
agccctacctgggaccacac

SEQ ID NO: 185399 - DNA, 20 bp, synthetic construct
  source 1..20: mol_type = other DNA
cagccctacctgggaccaca

SEQ ID NO: 185400 - DNA, 20 bp, synthetic construct
  source 1..20: mol_type = other DNA
acagccctacctgggaccac

SEQ ID NO: 185401 - DNA, 20 bp, synthetic construct
  source 1..20: mol_type = other DNA
gacagccctacctgggacca

SEQ ID NO: 185402 - DNA, 20 bp, synthetic construct
  source 1..20: mol_type = other DNA
tgacagccctacctgggacc

SEQ ID NO: 185403 - DNA, 20 bp, synthetic construct
  source 1..20: mol_type = other DNA
ctgacagccctacctgggac

SEQ ID NO: 185404 - DNA, 20 bp, synthetic construct
  source 1..20: mol_type = other DNA
tctgacagccctacctggga

SEQ ID NO: 185405 - DNA, 20 bp, synthetic construct
  source 1..20: mol_type = other DNA
ttctgacagccctacctggg

SEQ ID NO: 185406 - DNA, 20 bp, synthetic construct
  source 1..20: mol_type = other DNA
attctgacagccctacctgg

SEQ ID NO: 185407 - DNA, 20 bp, synthetic construct
  source 1..20: mol_type = other DNA
aattctgacagccctacctg

SEQ ID NO: 185408 - DNA, 20 bp, synthetic construct
  source 1..20: mol_type = other DNA
taattctgacagccctacct

SEQ ID NO: 185409 - DNA, 20 bp, synthetic construct
  source 1..20: mol_type = other DNA
ctaattctgacagccctacc

SEQ ID NO: 185410 - DNA, 20 bp, synthetic construct
  source 1..20: mol_type = other DNA
gctaattctgacagccctac

SEQ ID NO: 185411 - DNA, 20 bp, synthetic construct
  source 1..20: mol_type = other DNA
tgctaattctgacagcccta

SEQ ID NO: 185412 - DNA, 20 bp, synthetic construct
  source 1..20: mol_type = other DNA
ttgctaattctgacagccct

SEQ ID NO: 185413 - DNA, 20 bp, synthetic construct
  source 1..20: mol_type = other DNA
tttgctaattctgacagccc

SEQ ID NO: 185414 - DNA, 20 bp, synthetic construct
  source 1..20: mol_type = other DNA
atttgctaattctgacagcc

SEQ ID NO: 185415 - DNA, 20 bp, synthetic construct
  source 1..20: mol_type = other DNA
aatttgctaattctgacagc

SEQ ID NO: 185416 - DNA, 20 bp, synthetic construct
  source 1..20: mol_type = other DNA
taatttgctaattctgacag

SEQ ID NO: 185417 - DNA, 20 bp, synthetic construct
  source 1..20: mol_type = other DNA
ttaatttgctaattctgaca

SEQ ID NO: 185418 - DNA, 20 bp, synthetic construct
  source 1..20: mol_type = other DNA
tttaatttgctaattctgac

SEQ ID NO: 185419 - DNA, 20 bp, synthetic construct
  source 1..20: mol_type = other DNA
ttttaatttgctaattctga

SEQ ID NO: 185420 - DNA, 20 bp, synthetic construct
  source 1..20: mol_type = other DNA
gttttaatttgctaattctg

SEQ ID NO: 185421 - DNA, 20 bp, synthetic construct
  source 1..20: mol_type = other DNA
tgttttaatttgctaattct

SEQ ID NO: 185422 - DNA, 20 bp, synthetic construct
  source 1..20: mol_type = other DNA
gtgttttaatttgctaattc

SEQ ID NO: 185423 - DNA, 20 bp, synthetic construct
  source 1..20: mol_type = other DNA
tgtgttttaatttgctaatt

SEQ ID NO: 185424 - DNA, 20 bp, synthetic construct
  source 1..20: mol_type = other DNA
ctgtgttttaatttgctaat

SEQ ID NO: 185425 - DNA, 20 bp, synthetic construct
  source 1..20: mol_type = other DNA
cctgtgttttaatttgctaa

SEQ ID NO: 185426 - DNA, 20 bp, synthetic construct
  source 1..20: mol_type = other DNA
ccctgtgttttaatttgcta

SEQ ID NO: 185427 - DNA, 20 bp, synthetic construct
  source 1..20: mol_type = other DNA
gccctgtgttttaatttgct

SEQ ID NO: 185428 - DNA, 20 bp, synthetic construct
  source 1..20: mol_type = other DNA
tgccctgtgttttaatttgc

SEQ ID NO: 185429 - DNA, 20 bp, synthetic construct
  source 1..20: mol_type = other DNA
atgccctgtgttttaatttg

SEQ ID NO: 185430 - DNA, 20 bp, synthetic construct
  source 1..20: mol_type = other DNA
gatgccctgtgttttaattt

SEQ ID NO: 185431 - DNA, 20 bp, synthetic construct
  source 1..20: mol_type = other DNA
agatgccctgtgttttaatt

SEQ ID NO: 185432 - DNA, 20 bp, synthetic construct
  source 1..20: mol_type = other DNA
cagatgccctgtgttttaat

SEQ ID NO: 185433 - DNA, 20 bp, synthetic construct
  source 1..20: mol_type = other DNA
acagatgccctgtgttttaa

SEQ ID NO: 185434 - DNA, 20 bp, synthetic construct
  source 1..20: mol_type = other DNA
cacagatgccctgtgtttta

SEQ ID NO: 185435 - DNA, 20 bp, synthetic construct
  source 1..20: mol_type = other DNA
tcacagatgccctgtgtttt

SEQ ID NO: 185436 - DNA, 20 bp, synthetic construct
  source 1..20: mol_type = other DNA
ttcacagatgccctgtgttt

SEQ ID NO: 185437 - DNA, 20 bp, synthetic construct
  source 1..20: mol_type = other DNA
tttcacagatgccctgtgtt

SEQ ID NO: 185438 - DNA, 20 bp, synthetic construct
  source 1..20: mol_type = other DNA
ttttcacagatgccctgtgt

SEQ ID NO: 185439 - DNA, 20 bp, synthetic construct
  source 1..20: mol_type = other DNA
attttcacagatgccctgtg

SEQ ID NO: 185440 - DNA, 20 bp, synthetic construct
  source 1..20: mol_type = other DNA
aattttcacagatgccctgt

SEQ ID NO: 185441 - DNA, 20 bp, synthetic construct
  source 1..20: mol_type = other DNA
taattttcacagatgccctg

SEQ ID NO: 185442 - DNA, 20 bp, synthetic construct
  source 1..20: mol_type = other DNA
ctaattttcacagatgccct

SEQ ID NO: 185443 - DNA, 20 bp, synthetic construct
  source 1..20: mol_type = other DNA
tctaattttcacagatgccc

SEQ ID NO: 185444 - DNA, 20 bp, synthetic construct
  source 1..20: mol_type = other DNA
ttctaattttcacagatgcc

SEQ ID NO: 185445 - DNA, 20 bp, synthetic construct
  source 1..20: mol_type = other DNA
attctaattttcacagatgc

SEQ ID NO: 185446 - DNA, 20 bp, synthetic construct
  source 1..20: mol_type = other DNA
aattctaattttcacagatg

SEQ ID NO: 185447 - DNA, 20 bp, synthetic construct
  source 1..20: mol_type = other DNA
aaattctaattttcacagat

SEQ ID NO: 185448 - DNA, 20 bp, synthetic construct
  source 1..20: mol_type = other DNA
gaaattctaattttcacaga

SEQ ID NO: 185449 - DNA, 20 bp, synthetic construct
  source 1..20: mol_type = other DNA
tgaaattctaattttcacag

SEQ ID NO: 185450 - DNA, 20 bp, synthetic construct
  source 1..20: mol_type = other DNA
ctgaaattctaattttcaca

SEQ ID NO: 185451 - DNA, 20 bp, synthetic construct
  source 1..20: mol_type = other DNA
tctgaaattctaattttcac

SEQ ID NO: 185452 - DNA, 20 bp, synthetic construct
  source 1..20: mol_type = other DNA
atctgaaattctaattttca

SEQ ID NO: 185453 - DNA, 20 bp, synthetic construct
  source 1..20: mol_type = other DNA
tatctgaaattctaattttc

SEQ ID NO: 185454 - DNA, 20 bp, synthetic construct
  source 1..20: mol_type = other DNA
ttatctgaaattctaatttt

SEQ ID NO: 185455 - DNA, 20 bp, synthetic construct
  source 1..20: mol_type = other DNA
gttatctgaaattctaattt

SEQ ID NO: 185456 - DNA, 20 bp, synthetic construct
  source 1..20: mol_type = other DNA
tgttatctgaaattctaatt

SEQ ID NO: 185457 - DNA, 20 bp, synthetic construct
  source 1..20: mol_type = other DNA
ttgttatctgaaattctaat

SEQ ID NO: 185458 - DNA, 20 bp, synthetic construct
  source 1..20: mol_type = other DNA
gttgttatctgaaattctaa

SEQ ID NO: 185459 - DNA, 20 bp, synthetic construct
  source 1..20: mol_type = other DNA
tgttgttatctgaaattcta

SEQ ID NO: 185460 - DNA, 20 bp, synthetic construct
  source 1..20: mol_type = other DNA
ttgttgttatctgaaattct

SEQ ID NO: 185461 - DNA, 20 bp, synthetic construct
  source 1..20: mol_type = other DNA
tttgttgttatctgaaattc

SEQ ID NO: 185462 - DNA, 20 bp, synthetic construct
  source 1..20: mol_type = other DNA
atttgttgttatctgaaatt

SEQ ID NO: 185463 - DNA, 20 bp, synthetic construct
  source 1..20: mol_type = other DNA
tatttgttgttatctgaaat

SEQ ID NO: 185464 - DNA, 20 bp, synthetic construct
  source 1..20: mol_type = other DNA
ttatttgttgttatctgaaa

SEQ ID NO: 185465 - DNA, 20 bp, synthetic construct
  source 1..20: mol_type = other DNA
attatttgttgttatctgaa

SEQ ID NO: 185466 - DNA, 20 bp, synthetic construct
  source 1..20: mol_type = other DNA
aattatttgttgttatctga

SEQ ID NO: 185467 - DNA, 20 bp, synthetic construct
  source 1..20: mol_type = other DNA
caattatttgttgttatctg

SEQ ID NO: 185468 - DNA, 20 bp, synthetic construct
  source 1..20: mol_type = other DNA
ccaattatttgttgttatct

SEQ ID NO: 185469 - DNA, 20 bp, synthetic construct
  source 1..20: mol_type = other DNA
gccaattatttgttgttatc

SEQ ID NO: 185470 - DNA, 20 bp, synthetic construct
  source 1..20: mol_type = other DNA
tgccaattatttgttgttat

SEQ ID NO: 185471 - DNA, 20 bp, synthetic construct
  source 1..20: mol_type = other DNA
atgccaattatttgttgtta

SEQ ID NO: 185472 - DNA, 20 bp, synthetic construct
  source 1..20: mol_type = other DNA
tatgccaattatttgttgtt

SEQ ID NO: 185473 - DNA, 20 bp, synthetic construct
  source 1..20: mol_type = other DNA
ctatgccaattatttgttgt

SEQ ID NO: 185474 - DNA, 20 bp, synthetic construct
  source 1..20: mol_type = other DNA
cctatgccaattatttgttg

SEQ ID NO: 185475 - DNA, 20 bp, synthetic construct
  source 1..20: mol_type = other DNA
gcctatgccaattatttgtt

SEQ ID NO: 185476 - DNA, 20 bp, synthetic construct
  source 1..20: mol_type = other DNA
agcctatgccaattatttgt

SEQ ID NO: 185477 - DNA, 20 bp, synthetic construct
  source 1..20: mol_type = other DNA
cagcctatgccaattatttg

SEQ ID NO: 185478 - DNA, 20 bp, synthetic construct
  source 1..20: mol_type = other DNA
gcagcctatgccaattattt

SEQ ID NO: 185479 - DNA, 20 bp, synthetic construct
  source 1..20: mol_type = other DNA
tgcagcctatgccaattatt

SEQ ID NO: 185480 - DNA, 20 bp, synthetic construct
  source 1..20: mol_type = other DNA
atgcagcctatgccaattat

SEQ ID NO: 185481 - DNA, 20 bp, synthetic construct
  source 1..20: mol_type = other DNA
tatgcagcctatgccaatta

SEQ ID NO: 185482 - DNA, 20 bp, synthetic construct
  source 1..20: mol_type = other DNA
ttatgcagcctatgccaatt

SEQ ID NO: 185483 - DNA, 20 bp, synthetic construct
  source 1..20: mol_type = other DNA
attatgcagcctatgccaat

SEQ ID NO: 185484 - DNA, 20 bp, synthetic construct
  source 1..20: mol_type = other DNA
cattatgcagcctatgccaa

SEQ ID NO: 185485 - DNA, 20 bp, synthetic construct
  source 1..20: mol_type = other DNA
acattatgcagcctatgcca

SEQ ID NO: 185486 - DNA, 20 bp, synthetic construct
  source 1..20: mol_type = other DNA
gacattatgcagcctatgcc

SEQ ID NO: 185487 - DNA, 20 bp, synthetic construct
  source 1..20: mol_type = other DNA
ggacattatgcagcctatgc

SEQ ID NO: 185488 - DNA, 20 bp, synthetic construct
  source 1..20: mol_type = other DNA
gggacattatgcagcctatg

SEQ ID NO: 185489 - DNA, 20 bp, synthetic construct
  source 1..20: mol_type = other DNA
agggacattatgcagcctat

SEQ ID NO: 185490 - DNA, 20 bp, synthetic construct
  source 1..20: mol_type = other DNA
gagggacattatgcagccta

SEQ ID NO: 185491 - DNA, 20 bp, synthetic construct
  source 1..20: mol_type = other DNA
tgagggacattatgcagcct

SEQ ID NO: 185492 - DNA, 20 bp, synthetic construct
  source 1..20: mol_type = other DNA
ttgagggacattatgcagcc

SEQ ID NO: 185493 - DNA, 20 bp, synthetic construct
  source 1..20: mol_type = other DNA
tttgagggacattatgcagc

SEQ ID NO: 185494 - DNA, 20 bp, synthetic construct
  source 1..20: mol_type = other DNA
ctttgagggacattatgcag

SEQ ID NO: 185495 - DNA, 20 bp, synthetic construct
  source 1..20: mol_type = other DNA
tctttgagggacattatgca

SEQ ID NO: 185496 - DNA, 20 bp, synthetic construct
  source 1..20: mol_type = other DNA
atctttgagggacattatgc

SEQ ID NO: 185497 - DNA, 20 bp, synthetic construct
  source 1..20: mol_type = other DNA
tatctttgagggacattatg

SEQ ID NO: 185498 - DNA, 20 bp, synthetic construct
  source 1..20: mol_type = other DNA
atatctttgagggacattat

SEQ ID NO: 185499 - DNA, 20 bp, synthetic construct
  source 1..20: mol_type = other DNA
gatatctttgagggacatta

SEQ ID NO: 185500 - DNA, 20 bp, synthetic construct
  source 1..20: mol_type = other DNA
tgatatctttgagggacatt

SEQ ID NO: 185501 - DNA, 20 bp, synthetic construct
  source 1..20: mol_type = other DNA
ctgatatctttgagggacat

SEQ ID NO: 185502 - DNA, 20 bp, synthetic construct
  source 1..20: mol_type = other DNA
cctgatatctttgagggaca

SEQ ID NO: 185503 - DNA, 20 bp, synthetic construct
  source 1..20: mol_type = other DNA
acctgatatctttgagggac

SEQ ID NO: 185504 - DNA, 20 bp, synthetic construct
  source 1..20: mol_type = other DNA
gacctgatatctttgaggga

SEQ ID NO: 185505 - DNA, 20 bp, synthetic construct
  source 1..20: mol_type = other DNA
ggacctgatatctttgaggg

SEQ ID NO: 185506 - DNA, 20 bp, synthetic construct
  source 1..20: mol_type = other DNA
aggacctgatatctttgagg

SEQ ID NO: 185507 - DNA, 20 bp, synthetic construct
  source 1..20: mol_type = other DNA
taggacctgatatctttgag

SEQ ID NO: 185508 - DNA, 20 bp, synthetic construct
  source 1..20: mol_type = other DNA
ttaggacctgatatctttga

SEQ ID NO: 185509 - DNA, 20 bp, synthetic construct
  source 1..20: mol_type = other DNA
attaggacctgatatctttg

SEQ ID NO: 185510 - DNA, 20 bp, synthetic construct
  source 1..20: mol_type = other DNA
gattaggacctgatatcttt

SEQ ID NO: 185511 - DNA, 20 bp, synthetic construct
  source 1..20: mol_type = other DNA
agattaggacctgatatctt

SEQ ID NO: 185512 - DNA, 20 bp, synthetic construct
  source 1..20: mol_type = other DNA
gagattaggacctgatatct

SEQ ID NO: 185513 - DNA, 20 bp, synthetic construct
  source 1..20: mol_type = other DNA
ggagattaggacctgatatc

SEQ ID NO: 185514 - DNA, 20 bp, synthetic construct
  source 1..20: mol_type = other DNA
tggagattaggacctgatat

SEQ ID NO: 185515 - DNA, 20 bp, synthetic construct
  source 1..20: mol_type = other DNA
ctggagattaggacctgata

SEQ ID NO: 185516 - DNA, 20 bp, synthetic construct
  source 1..20: mol_type = other DNA
tctggagattaggacctgat

SEQ ID NO: 185517 - DNA, 20 bp, synthetic construct
  source 1..20: mol_type = other DNA
ttctggagattaggacctga

SEQ ID NO: 185518 - DNA, 20 bp, synthetic construct
  source 1..20: mol_type = other DNA
gttctggagattaggacctg

SEQ ID NO: 185519 - DNA, 20 bp, synthetic construct
  source 1..20: mol_type = other DNA
ggttctggagattaggacct

SEQ ID NO: 185520 - DNA, 20 bp, synthetic construct
  source 1..20: mol_type = other DNA
aggttctggagattaggacc

SEQ ID NO: 185521 - DNA, 20 bp, synthetic construct
  source 1..20: mol_type = other DNA
caggttctggagattaggac

SEQ ID NO: 185522 - DNA, 20 bp, synthetic construct
  source 1..20: mol_type = other DNA
acaggttctggagattagga

SEQ ID NO: 185523 - DNA, 20 bp, synthetic construct
  source 1..20: mol_type = other DNA
tacaggttctggagattagg

SEQ ID NO: 185524 - DNA, 20 bp, synthetic construct
  source 1..20: mol_type = other DNA
ttacaggttctggagattag

SEQ ID NO: 185525 - DNA, 20 bp, synthetic construct
  source 1..20: mol_type = other DNA
tttacaggttctggagatta

SEQ ID NO: 185526 - DNA, 20 bp, synthetic construct
  source 1..20: mol_type = other DNA
atttacaggttctggagatt

SEQ ID NO: 185527 - DNA, 20 bp, synthetic construct
  source 1..20: mol_type = other DNA
catttacaggttctggagat

SEQ ID NO: 185528 - DNA, 20 bp, synthetic construct
  source 1..20: mol_type = other DNA
acatttacaggttctggaga

SEQ ID NO: 185529 - DNA, 20 bp, synthetic construct
  source 1..20: mol_type = other DNA
cacatttacaggttctggag

SEQ ID NO: 185530 - DNA, 20 bp, synthetic construct
  source 1..20: mol_type = other DNA
tcacatttacaggttctgga

SEQ ID NO: 185531 - DNA, 20 bp, synthetic construct
  source 1..20: mol_type = other DNA
atcacatttacaggttctgg

SEQ ID NO: 185532 - DNA, 20 bp, synthetic construct
  source 1..20: mol_type = other DNA
gatcacatttacaggttctg

SEQ ID NO: 185533 - DNA, 20 bp, synthetic construct
  source 1..20: mol_type = other DNA
agatcacatttacaggttct

SEQ ID NO: 185534 - DNA, 20 bp, synthetic construct
  source 1..20: mol_type = other DNA
aagatcacatttacaggttc

SEQ ID NO: 185535 - DNA, 20 bp, synthetic construct
  source 1..20: mol_type = other DNA
taagatcacatttacaggtt

SEQ ID NO: 185536 - DNA, 20 bp, synthetic construct
  source 1..20: mol_type = other DNA
ataagatcacatttacaggt

SEQ ID NO: 185537 - DNA, 20 bp, synthetic construct
  source 1..20: mol_type = other DNA
aataagatcacatttacagg

SEQ ID NO: 185538 - DNA, 20 bp, synthetic construct
  source 1..20: mol_type = other DNA
aaataagatcacatttacag

SEQ ID NO: 185539 - DNA, 20 bp, synthetic construct
  source 1..20: mol_type = other DNA
caaataagatcacatttaca

SEQ ID NO: 185540 - DNA, 20 bp, synthetic construct
  source 1..20: mol_type = other DNA
ccaaataagatcacatttac

SEQ ID NO: 185541 - DNA, 20 bp, synthetic construct
  source 1..20: mol_type = other DNA
tccaaataagatcacattta

SEQ ID NO: 185542 - DNA, 20 bp, synthetic construct
  source 1..20: mol_type = other DNA
ttccaaataagatcacattt

SEQ ID NO: 185543 - DNA, 20 bp, synthetic construct
  source 1..20: mol_type = other DNA
tttccaaataagatcacatt

SEQ ID NO: 185544 - DNA, 20 bp, synthetic construct
  source 1..20: mol_type = other DNA
ttttccaaataagatcacat

SEQ ID NO: 185545 - DNA, 20 bp, synthetic construct
  source 1..20: mol_type = other DNA
cttttccaaataagatcaca

SEQ ID NO: 185546 - DNA, 20 bp, synthetic construct
  source 1..20: mol_type = other DNA
ccttttccaaataagatcac

SEQ ID NO: 185547 - DNA, 20 bp, synthetic construct
  source 1..20: mol_type = other DNA
cccttttccaaataagatca

SEQ ID NO: 185548 - DNA, 20 bp, synthetic construct
  source 1..20: mol_type = other DNA
ccccttttccaaataagatc

SEQ ID NO: 185549 - DNA, 20 bp, synthetic construct
  source 1..20: mol_type = other DNA
accccttttccaaataagat

SEQ ID NO: 185550 - DNA, 20 bp, synthetic construct
  source 1..20: mol_type = other DNA
gaccccttttccaaataaga

SEQ ID NO: 185551 - DNA, 20 bp, synthetic construct
  source 1..20: mol_type = other DNA
agaccccttttccaaataag

SEQ ID NO: 185552 - DNA, 20 bp, synthetic construct
  source 1..20: mol_type = other DNA
aagaccccttttccaaataa

SEQ ID NO: 185553 - DNA, 20 bp, synthetic construct
  source 1..20: mol_type = other DNA
aaagaccccttttccaaata

SEQ ID NO: 185554 - DNA, 20 bp, synthetic construct
  source 1..20: mol_type = other DNA
caaagaccccttttccaaat

SEQ ID NO: 185555 - DNA, 20 bp, synthetic construct
  source 1..20: mol_type = other DNA
acaaagaccccttttccaaa

SEQ ID NO: 185556 - DNA, 20 bp, synthetic construct
  source 1..20: mol_type = other DNA
tacaaagaccccttttccaa

SEQ ID NO: 185557 - DNA, 20 bp, synthetic construct
  source 1..20: mol_type = other DNA
ctacaaagaccccttttcca

SEQ ID NO: 185558 - DNA, 20 bp, synthetic construct
  source 1..20: mol_type = other DNA
tctacaaagaccccttttcc

SEQ ID NO: 185559 - DNA, 20 bp, synthetic construct
  source 1..20: mol_type = other DNA
atctacaaagaccccttttc

SEQ ID NO: 185560 - DNA, 20 bp, synthetic construct
  source 1..20: mol_type = other DNA
catctacaaagacccctttt

SEQ ID NO: 185561 - DNA, 20 bp, synthetic construct
  source 1..20: mol_type = other DNA
acatctacaaagaccccttt

SEQ ID NO: 185562 - DNA, 20 bp, synthetic construct
  source 1..20: mol_type = other DNA
cacatctacaaagacccctt

SEQ ID NO: 185563 - DNA, 20 bp, synthetic construct
  source 1..20: mol_type = other DNA
ccacatctacaaagacccct

SEQ ID NO: 185564 - DNA, 20 bp, synthetic construct
  source 1..20: mol_type = other DNA
accacatctacaaagacccc

SEQ ID NO: 185565 - DNA, 20 bp, synthetic construct
  source 1..20: mol_type = other DNA
aaccacatctacaaagaccc

SEQ ID NO: 185566 - DNA, 20 bp, synthetic construct
  source 1..20: mol_type = other DNA
taaccacatctacaaagacc

SEQ ID NO: 185567 - DNA, 20 bp, synthetic construct
  source 1..20: mol_type = other DNA
ttaaccacatctacaaagac

SEQ ID NO: 185568 - DNA, 20 bp, synthetic construct
  source 1..20: mol_type = other DNA
tttaaccacatctacaaaga

SEQ ID NO: 185569 - DNA, 20 bp, synthetic construct
  source 1..20: mol_type = other DNA
atttaaccacatctacaaag

SEQ ID NO: 185570 - DNA, 20 bp, synthetic construct
  source 1..20: mol_type = other DNA
aatttaaccacatctacaaa

SEQ ID NO: 185571 - DNA, 20 bp, synthetic construct
  source 1..20: mol_type = other DNA
taatttaaccacatctacaa

SEQ ID NO: 185572 - DNA, 20 bp, synthetic construct
  source 1..20: mol_type = other DNA
ttaatttaaccacatctaca

SEQ ID NO: 185573 - DNA, 20 bp, synthetic construct
  source 1..20: mol_type = other DNA
cttaatttaaccacatctac

SEQ ID NO: 185574 - DNA, 20 bp, synthetic construct
  source 1..20: mol_type = other DNA
ccttaatttaaccacatcta

SEQ ID NO: 185575 - DNA, 20 bp, synthetic construct
  source 1..20: mol_type = other DNA
tccttaatttaaccacatct

SEQ ID NO: 185576 - DNA, 20 bp, synthetic construct
  source 1..20: mol_type = other DNA
atccttaatttaaccacatc

SEQ ID NO: 185577 - DNA, 20 bp, synthetic construct
  source 1..20: mol_type = other DNA
aatccttaatttaaccacat

SEQ ID NO: 185578 - DNA, 20 bp, synthetic construct
  source 1..20: mol_type = other DNA
aaatccttaatttaaccaca

SEQ ID NO: 185579 - DNA, 20 bp, synthetic construct
  source 1..20: mol_type = other DNA
aaaatccttaatttaaccac

SEQ ID NO: 185580 - DNA, 20 bp, synthetic construct
  source 1..20: mol_type = other DNA
caaaatccttaatttaacca

SEQ ID NO: 185581 - DNA, 20 bp, synthetic construct
  source 1..20: mol_type = other DNA
tcaaaatccttaatttaacc

SEQ ID NO: 185582 - DNA, 20 bp, synthetic construct
  source 1..20: mol_type = other DNA
ctcaaaatccttaatttaac

SEQ ID NO: 185583 - DNA, 20 bp, synthetic construct
  source 1..20: mol_type = other DNA
tctcaaaatccttaatttaa

SEQ ID NO: 185584 - DNA, 20 bp, synthetic construct
  source 1..20: mol_type = other DNA
atctcaaaatccttaattta

SEQ ID NO: 185585 - DNA, 20 bp, synthetic construct
  source 1..20: mol_type = other DNA
catctcaaaatccttaattt

SEQ ID NO: 185586 - DNA, 20 bp, synthetic construct
  source 1..20: mol_type = other DNA
ccatctcaaaatccttaatt

SEQ ID NO: 185587 - DNA, 20 bp, synthetic construct
  source 1..20: mol_type = other DNA
cccatctcaaaatccttaat

SEQ ID NO: 185588 - DNA, 20 bp, synthetic construct
  source 1..20: mol_type = other DNA
ccccatctcaaaatccttaa

SEQ ID NO: 185589 - DNA, 20 bp, synthetic construct
  source 1..20: mol_type = other DNA
cccccatctcaaaatcctta

SEQ ID NO: 185590 - DNA, 20 bp, synthetic construct
  source 1..20: mol_type = other DNA
ccccccatctcaaaatcctt

SEQ ID NO: 185591 - DNA, 20 bp, synthetic construct
  source 1..20: mol_type = other DNA
tccccccatctcaaaatcct

SEQ ID NO: 185592 - DNA, 20 bp, synthetic construct
  source 1..20: mol_type = other DNA
atccccccatctcaaaatcc

SEQ ID NO: 185593 - DNA, 20 bp, synthetic construct
  source 1..20: mol_type = other DNA
aatccccccatctcaaaatc

SEQ ID NO: 185594 - DNA, 20 bp, synthetic construct
  source 1..20: mol_type = other DNA
taatccccccatctcaaaat

SEQ ID NO: 185595 - DNA, 20 bp, synthetic construct
  source 1..20: mol_type = other DNA
ataatccccccatctcaaaa

SEQ ID NO: 185596 - DNA, 20 bp, synthetic construct
  source 1..20: mol_type = other DNA
gataatccccccatctcaaa

SEQ ID NO: 185597 - DNA, 20 bp, synthetic construct
  source 1..20: mol_type = other DNA
ggataatccccccatctcaa

SEQ ID NO: 185598 - DNA, 20 bp, synthetic construct
  source 1..20: mol_type = other DNA
aggataatccccccatctca

SEQ ID NO: 185599 - DNA, 20 bp, synthetic construct
  source 1..20: mol_type = other DNA
caggataatccccccatctc

SEQ ID NO: 185600 - DNA, 20 bp, synthetic construct
  source 1..20: mol_type = other DNA
acaggataatccccccatct

SEQ ID NO: 185601 - DNA, 20 bp, synthetic construct
  source 1..20: mol_type = other DNA
tacaggataatccccccatc

SEQ ID NO: 185602 - DNA, 20 bp, synthetic construct
  source 1..20: mol_type = other DNA
atacaggataatccccccat

SEQ ID NO: 185603 - DNA, 20 bp, synthetic construct
  source 1..20: mol_type = other DNA
aatacaggataatcccccca

SEQ ID NO: 185604 - DNA, 20 bp, synthetic construct
  source 1..20: mol_type = other DNA
taatacaggataatcccccc

SEQ ID NO: 185605 - DNA, 20 bp, synthetic construct
  source 1..20: mol_type = other DNA
ataatacaggataatccccc

SEQ ID NO: 185606 - DNA, 20 bp, synthetic construct
  source 1..20: mol_type = other DNA
gataatacaggataatcccc

SEQ ID NO: 185607 - DNA, 20 bp, synthetic construct
  source 1..20: mol_type = other DNA
agataatacaggataatccc

SEQ ID NO: 185608 - DNA, 20 bp, synthetic construct
  source 1..20: mol_type = other DNA
tagataatacaggataatcc

SEQ ID NO: 185609 - DNA, 20 bp, synthetic construct
  source 1..20: mol_type = other DNA
ctagataatacaggataatc

SEQ ID NO: 185610 - DNA, 20 bp, synthetic construct
  source 1..20: mol_type = other DNA
cctagataatacaggataat

SEQ ID NO: 185611 - DNA, 20 bp, synthetic construct
  source 1..20: mol_type = other DNA
acctagataatacaggataa

SEQ ID NO: 185612 - DNA, 20 bp, synthetic construct
  source 1..20: mol_type = other DNA
tacctagataatacaggata

SEQ ID NO: 185613 - DNA, 20 bp, synthetic construct
  source 1..20: mol_type = other DNA
ctacctagataatacaggat

SEQ ID NO: 185614 - DNA, 20 bp, synthetic construct
  source 1..20: mol_type = other DNA
cctacctagataatacagga

SEQ ID NO: 185615 - DNA, 20 bp, synthetic construct
  source 1..20: mol_type = other DNA
acctacctagataatacagg

SEQ ID NO: 185616 - DNA, 20 bp, synthetic construct
  source 1..20: mol_type = other DNA
gacctacctagataatacag

SEQ ID NO: 185617 - DNA, 20 bp, synthetic construct
  source 1..20: mol_type = other DNA
ggacctacctagataataca

SEQ ID NO: 185618 - DNA, 20 bp, synthetic construct
  source 1..20: mol_type = other DNA
aggacctacctagataatac

SEQ ID NO: 185619 - DNA, 20 bp, synthetic construct
  source 1..20: mol_type = other DNA
taggacctacctagataata

SEQ ID NO: 185620 - DNA, 20 bp, synthetic construct
  source 1..20: mol_type = other DNA
ttaggacctacctagataat

SEQ ID NO: 185621 - DNA, 20 bp, synthetic construct
  source 1..20: mol_type = other DNA
tttaggacctacctagataa

SEQ ID NO: 185622 - DNA, 20 bp, synthetic construct
  source 1..20: mol_type = other DNA
atttaggacctacctagata

SEQ ID NO: 185623 - DNA, 20 bp, synthetic construct
  source 1..20: mol_type = other DNA
catttaggacctacctagat

SEQ ID NO: 185624 - DNA, 20 bp, synthetic construct
  source 1..20: mol_type = other DNA
gcatttaggacctacctaga

SEQ ID NO: 185625 - DNA, 20 bp, synthetic construct
  source 1..20: mol_type = other DNA
tgcatttaggacctacctag

SEQ ID NO: 185626 - DNA, 20 bp, synthetic construct
  source 1..20: mol_type = other DNA
ctgcatttaggacctaccta

SEQ ID NO: 185627 - DNA, 20 bp, synthetic construct
  source 1..20: mol_type = other DNA
actgcatttaggacctacct

SEQ ID NO: 185628 - DNA, 20 bp, synthetic construct
  source 1..20: mol_type = other DNA
gactgcatttaggacctacc

SEQ ID NO: 185629 - DNA, 20 bp, synthetic construct
  source 1..20: mol_type = other DNA
tgactgcatttaggacctac

SEQ ID NO: 185630 - DNA, 20 bp, synthetic construct
  source 1..20: mol_type = other DNA
gtgactgcatttaggaccta

SEQ ID NO: 185631 - DNA, 20 bp, synthetic construct
  source 1..20: mol_type = other DNA
tgtgactgcatttaggacct

SEQ ID NO: 185632 - DNA, 20 bp, synthetic construct
  source 1..20: mol_type = other DNA
gtgtgactgcatttaggacc

SEQ ID NO: 185633 - DNA, 20 bp, synthetic construct
  source 1..20: mol_type = other DNA
agtgtgactgcatttaggac

SEQ ID NO: 185634 - DNA, 20 bp, synthetic construct
  source 1..20: mol_type = other DNA
gagtgtgactgcatttagga

SEQ ID NO: 185635 - DNA, 20 bp, synthetic construct
  source 1..20: mol_type = other DNA
tgagtgtgactgcatttagg

SEQ ID NO: 185636 - DNA, 20 bp, synthetic construct
  source 1..20: mol_type = other DNA
atgagtgtgactgcatttag

SEQ ID NO: 185637 - DNA, 20 bp, synthetic construct
  source 1..20: mol_type = other DNA
gatgagtgtgactgcattta

SEQ ID NO: 185638 - DNA, 20 bp, synthetic construct
  source 1..20: mol_type = other DNA
ggatgagtgtgactgcattt

SEQ ID NO: 185639 - DNA, 20 bp, synthetic construct
  source 1..20: mol_type = other DNA
aggatgagtgtgactgcatt

SEQ ID NO: 185640 - DNA, 20 bp, synthetic construct
  source 1..20: mol_type = other DNA
aaggatgagtgtgactgcat

SEQ ID NO: 185641 - DNA, 20 bp, synthetic construct
  source 1..20: mol_type = other DNA
caaggatgagtgtgactgca

SEQ ID NO: 185642 - DNA, 20 bp, synthetic construct
  source 1..20: mol_type = other DNA
acaaggatgagtgtgactgc

SEQ ID NO: 185643 - DNA, 20 bp, synthetic construct
  source 1..20: mol_type = other DNA
tacaaggatgagtgtgactg

SEQ ID NO: 185644 - DNA, 20 bp, synthetic construct
  source 1..20: mol_type = other DNA
ttacaaggatgagtgtgact

SEQ ID NO: 185645 - DNA, 20 bp, synthetic construct
  source 1..20: mol_type = other DNA
cttacaaggatgagtgtgac

SEQ ID NO: 185646 - DNA, 20 bp, synthetic construct
  source 1..20: mol_type = other DNA
tcttacaaggatgagtgtga

SEQ ID NO: 185647 - DNA, 20 bp, synthetic construct
  source 1..20: mol_type = other DNA
ctcttacaaggatgagtgtg

SEQ ID NO: 185648 - DNA, 20 bp, synthetic construct
  source 1..20: mol_type = other DNA
cctcttacaaggatgagtgt

SEQ ID NO: 185649 - DNA, 20 bp, synthetic construct
  source 1..20: mol_type = other DNA
tcctcttacaaggatgagtg

SEQ ID NO: 185650 - DNA, 20 bp, synthetic construct
  source 1..20: mol_type = other DNA
ttcctcttacaaggatgagt

SEQ ID NO: 185651 - DNA, 20 bp, synthetic construct
  source 1..20: mol_type = other DNA
cttcctcttacaaggatgag

SEQ ID NO: 185652 - DNA, 20 bp, synthetic construct
  source 1..20: mol_type = other DNA
ccttcctcttacaaggatga

SEQ ID NO: 185653 - DNA, 20 bp, synthetic construct
  source 1..20: mol_type = other DNA
tccttcctcttacaaggatg

SEQ ID NO: 185654 - DNA, 20 bp, synthetic construct
  source 1..20: mol_type = other DNA
ttccttcctcttacaaggat

SEQ ID NO: 185655 - DNA, 20 bp, synthetic construct
  source 1..20: mol_type = other DNA
cttccttcctcttacaagga

SEQ ID NO: 185656 - DNA, 20 bp, synthetic construct
  source 1..20: mol_type = other DNA
tcttccttcctcttacaagg

SEQ ID NO: 185657 - DNA, 20 bp, synthetic construct
  source 1..20: mol_type = other DNA
ctcttccttcctcttacaag

SEQ ID NO: 185658 - DNA, 20 bp, synthetic construct
  source 1..20: mol_type = other DNA
tctcttccttcctcttacaa

SEQ ID NO: 185659 - DNA, 20 bp, synthetic construct
  source 1..20: mol_type = other DNA
ctctcttccttcctcttaca

SEQ ID NO: 185660 - DNA, 20 bp, synthetic construct
  source 1..20: mol_type = other DNA
tctctcttccttcctcttac

SEQ ID NO: 185661 - DNA, 20 bp, synthetic construct
  source 1..20: mol_type = other DNA
ctctctcttccttcctctta

SEQ ID NO: 185662 - DNA, 20 bp, synthetic construct
  source 1..20: mol_type = other DNA
tctctctcttccttcctctt

SEQ ID NO: 185663 - DNA, 20 bp, synthetic construct
  source 1..20: mol_type = other DNA
atctctctcttccttcctct

SEQ ID NO: 185664 - DNA, 20 bp, synthetic construct
  source 1..20: mol_type = other DNA
catctctctcttccttcctc

SEQ ID NO: 185665 - DNA, 20 bp, synthetic construct
  source 1..20: mol_type = other DNA
ccatctctctcttccttcct

SEQ ID NO: 185666 - DNA, 20 bp, synthetic construct
  source 1..20: mol_type = other DNA
tccatctctctcttccttcc

SEQ ID NO: 185667 - DNA, 20 bp, synthetic construct
  source 1..20: mol_type = other DNA
ttccatctctctcttccttc

SEQ ID NO: 185668 - DNA, 20 bp, synthetic construct
  source 1..20: mol_type = other DNA
tttccatctctctcttcctt

SEQ ID NO: 185669 - DNA, 20 bp, synthetic construct
  source 1..20: mol_type = other DNA
ttttccatctctctcttcct

SEQ ID NO: 185670 - DNA, 20 bp, synthetic construct
  source 1..20: mol_type = other DNA
gttttccatctctctcttcc

SEQ ID NO: 185671 - DNA, 20 bp, synthetic construct
  source 1..20: mol_type = other DNA
tgttttccatctctctcttc

SEQ ID NO: 185672 - DNA, 20 bp, synthetic construct
  source 1..20: mol_type = other DNA
gtgttttccatctctctctt

SEQ ID NO: 185673 - DNA, 20 bp, synthetic construct
  source 1..20: mol_type = other DNA
tgtgttttccatctctctct

SEQ ID NO: 185674 - DNA, 20 bp, synthetic construct
  source 1..20: mol_type = other DNA
ctgtgttttccatctctctc

SEQ ID NO: 185675 - DNA, 20 bp, synthetic construct
  source 1..20: mol_type = other DNA
tctgtgttttccatctctct

SEQ ID NO: 185676 - DNA, 20 bp, synthetic construct
  source 1..20: mol_type = other DNA
ttctgtgttttccatctctc

SEQ ID NO: 185677 - DNA, 20 bp, synthetic construct
  source 1..20: mol_type = other DNA
cttctgtgttttccatctct

SEQ ID NO: 185678 - DNA, 20 bp, synthetic construct
  source 1..20: mol_type = other DNA
tcttctgtgttttccatctc

SEQ ID NO: 185679 - DNA, 20 bp, synthetic construct
  source 1..20: mol_type = other DNA
ctcttctgtgttttccatct

SEQ ID NO: 185680 - DNA, 20 bp, synthetic construct
  source 1..20: mol_type = other DNA
tctcttctgtgttttccatc

SEQ ID NO: 185681 - DNA, 20 bp, synthetic construct
  source 1..20: mol_type = other DNA
ttctcttctgtgttttccat

SEQ ID NO: 185682 - DNA, 20 bp, synthetic construct
  source 1..20: mol_type = other DNA
cttctcttctgtgttttcca

SEQ ID NO: 185683 - DNA, 20 bp, synthetic construct
  source 1..20: mol_type = other DNA
tcttctcttctgtgttttcc

SEQ ID NO: 185684 - DNA, 20 bp, synthetic construct
  source 1..20: mol_type = other DNA
gtcttctcttctgtgttttc

SEQ ID NO: 185685 - DNA, 20 bp, synthetic construct
  source 1..20: mol_type = other DNA
tgtcttctcttctgtgtttt

SEQ ID NO: 185686 - DNA, 20 bp, synthetic construct
  source 1..20: mol_type = other DNA
ttgtcttctcttctgtgttt

SEQ ID NO: 185687 - DNA, 20 bp, synthetic construct
  source 1..20: mol_type = other DNA
attgtcttctcttctgtgtt

SEQ ID NO: 185688 - DNA, 20 bp, synthetic construct
  source 1..20: mol_type = other DNA
cattgtcttctcttctgtgt

SEQ ID NO: 185689 - DNA, 20 bp, synthetic construct
  source 1..20: mol_type = other DNA
acattgtcttctcttctgtg

SEQ ID NO: 185690 - DNA, 20 bp, synthetic construct
  source 1..20: mol_type = other DNA
cacattgtcttctcttctgt

SEQ ID NO: 185691 - DNA, 20 bp, synthetic construct
  source 1..20: mol_type = other DNA
ccacattgtcttctcttctg

SEQ ID NO: 185692 - DNA, 20 bp, synthetic construct
  source 1..20: mol_type = other DNA
accacattgtcttctcttct

SEQ ID NO: 185693 - DNA, 20 bp, synthetic construct
  source 1..20: mol_type = other DNA
caccacattgtcttctcttc

SEQ ID NO: 185694 - DNA, 20 bp, synthetic construct
  source 1..20: mol_type = other DNA
tcaccacattgtcttctctt

SEQ ID NO: 185695 - DNA, 20 bp, synthetic construct
  source 1..20: mol_type = other DNA
atcaccacattgtcttctct

SEQ ID NO: 185696 - DNA, 20 bp, synthetic construct
  source 1..20: mol_type = other DNA
catcaccacattgtcttctc

SEQ ID NO: 185697 - DNA, 20 bp, synthetic construct
  source 1..20: mol_type = other DNA
ccatcaccacattgtcttct

SEQ ID NO: 185698 - DNA, 20 bp, synthetic construct
  source 1..20: mol_type = other DNA
tccatcaccacattgtcttc

SEQ ID NO: 185699 - DNA, 20 bp, synthetic construct
  source 1..20: mol_type = other DNA
ctccatcaccacattgtctt

SEQ ID NO: 185700 - DNA, 20 bp, synthetic construct
  source 1..20: mol_type = other DNA
cctccatcaccacattgtct

SEQ ID NO: 185701 - DNA, 20 bp, synthetic construct
  source 1..20: mol_type = other DNA
gcctccatcaccacattgtc

SEQ ID NO: 185702 - DNA, 20 bp, synthetic construct
  source 1..20: mol_type = other DNA
tgcctccatcaccacattgt

SEQ ID NO: 185703 - DNA, 20 bp, synthetic construct
  source 1..20: mol_type = other DNA
ctgcctccatcaccacattg

SEQ ID NO: 185704 - DNA, 20 bp, synthetic construct
  source 1..20: mol_type = other DNA
tctgcctccatcaccacatt

SEQ ID NO: 185705 - DNA, 20 bp, synthetic construct
  source 1..20: mol_type = other DNA
ctctgcctccatcaccacat

SEQ ID NO: 185706 - DNA, 20 bp, synthetic construct
  source 1..20: mol_type = other DNA
tctctgcctccatcaccaca

SEQ ID NO: 185707 - DNA, 20 bp, synthetic construct
  source 1..20: mol_type = other DNA
atctctgcctccatcaccac

SEQ ID NO: 185708 - DNA, 20 bp, synthetic construct
  source 1..20: mol_type = other DNA
aatctctgcctccatcacca

SEQ ID NO: 185709 - DNA, 20 bp, synthetic construct
  source 1..20: mol_type = other DNA
caatctctgcctccatcacc

SEQ ID NO: 185710 - DNA, 20 bp, synthetic construct
  source 1..20: mol_type = other DNA
ccaatctctgcctccatcac

SEQ ID NO: 185711 - DNA, 20 bp, synthetic construct
  source 1..20: mol_type = other DNA
tccaatctctgcctccatca

SEQ ID NO: 185712 - DNA, 20 bp, synthetic construct
  source 1..20: mol_type = other DNA
ctccaatctctgcctccatc

SEQ ID NO: 185713 - DNA, 20 bp, synthetic construct
  source 1..20: mol_type = other DNA
actccaatctctgcctccat

SEQ ID NO: 185714 - DNA, 20 bp, synthetic construct
  source 1..20: mol_type = other DNA
cactccaatctctgcctcca

SEQ ID NO: 185715 - DNA, 20 bp, synthetic construct
  source 1..20: mol_type = other DNA
tcactccaatctctgcctcc

SEQ ID NO: 185716 - DNA, 20 bp, synthetic construct
  source 1..20: mol_type = other DNA
ctcactccaatctctgcctc

SEQ ID NO: 185717 - DNA, 20 bp, synthetic construct
  source 1..20: mol_type = other DNA
cctcactccaatctctgcct

SEQ ID NO: 185718 - DNA, 20 bp, synthetic construct
  source 1..20: mol_type = other DNA
acctcactccaatctctgcc

SEQ ID NO: 185719 - DNA, 20 bp, synthetic construct
  source 1..20: mol_type = other DNA
cacctcactccaatctctgc

SEQ ID NO: 185720 - DNA, 20 bp, synthetic construct
  source 1..20: mol_type = other DNA
ccacctcactccaatctctg

SEQ ID NO: 185721 - DNA, 20 bp, synthetic construct
  source 1..20: mol_type = other DNA
gccacctcactccaatctct

SEQ ID NO: 185722 - DNA, 20 bp, synthetic construct
  source 1..20: mol_type = other DNA
ggccacctcactccaatctc

SEQ ID NO: 185723 - DNA, 20 bp, synthetic construct
  source 1..20: mol_type = other DNA
tggccacctcactccaatct

SEQ ID NO: 185724 - DNA, 20 bp, synthetic construct
  source 1..20: mol_type = other DNA
gtggccacctcactccaatc

SEQ ID NO: 185725 - DNA, 20 bp, synthetic construct
  source 1..20: mol_type = other DNA
tgtggccacctcactccaat

SEQ ID NO: 185726 - DNA, 20 bp, synthetic construct
  source 1..20: mol_type = other DNA
ttgtggccacctcactccaa

SEQ ID NO: 185727 - DNA, 20 bp, synthetic construct
  source 1..20: mol_type = other DNA
cttgtggccacctcactcca

SEQ ID NO: 185728 - DNA, 20 bp, synthetic construct
  source 1..20: mol_type = other DNA
gcttgtggccacctcactcc

SEQ ID NO: 185729 - DNA, 20 bp, synthetic construct
  source 1..20: mol_type = other DNA
ggcttgtggccacctcactc

SEQ ID NO: 185730 - DNA, 20 bp, synthetic construct
  source 1..20: mol_type = other DNA
tggcttgtggccacctcact

SEQ ID NO: 185731 - DNA, 20 bp, synthetic construct
  source 1..20: mol_type = other DNA
ttggcttgtggccacctcac

SEQ ID NO: 185732 - DNA, 20 bp, synthetic construct
  source 1..20: mol_type = other DNA
cttggcttgtggccacctca

SEQ ID NO: 185733 - DNA, 20 bp, synthetic construct
  source 1..20: mol_type = other DNA
ccttggcttgtggccacctc

SEQ ID NO: 185734 - DNA, 20 bp, synthetic construct
  source 1..20: mol_type = other DNA
tccttggcttgtggccacct

SEQ ID NO: 185735 - DNA, 20 bp, synthetic construct
  source 1..20: mol_type = other DNA
gtccttggcttgtggccacc

SEQ ID NO: 185736 - DNA, 20 bp, synthetic construct
  source 1..20: mol_type = other DNA
agtccttggcttgtggccac

SEQ ID NO: 185737 - DNA, 20 bp, synthetic construct
  source 1..20: mol_type = other DNA
cagtccttggcttgtggcca

SEQ ID NO: 185738 - DNA, 20 bp, synthetic construct
  source 1..20: mol_type = other DNA
gcagtccttggcttgtggcc

SEQ ID NO: 185739 - DNA, 20 bp, synthetic construct
  source 1..20: mol_type = other DNA
agcagtccttggcttgtggc

SEQ ID NO: 185740 - DNA, 20 bp, synthetic construct
  source 1..20: mol_type = other DNA
cagcagtccttggcttgtgg

SEQ ID NO: 185741 - DNA, 20 bp, synthetic construct
  source 1..20: mol_type = other DNA
ccagcagtccttggcttgtg

SEQ ID NO: 185742 - DNA, 20 bp, synthetic construct
  source 1..20: mol_type = other DNA
gccagcagtccttggcttgt

SEQ ID NO: 185743 - DNA, 20 bp, synthetic construct
  source 1..20: mol_type = other DNA
tgccagcagtccttggcttg

SEQ ID NO: 185744 - DNA, 20 bp, synthetic construct
  source 1..20: mol_type = other DNA
ctgccagcagtccttggctt

SEQ ID NO: 185745 - DNA, 20 bp, synthetic construct
  source 1..20: mol_type = other DNA
gctgccagcagtccttggct

SEQ ID NO: 185746 - DNA, 20 bp, synthetic construct
  source 1..20: mol_type = other DNA
agctgccagcagtccttggc

SEQ ID NO: 185747 - DNA, 20 bp, synthetic construct
  source 1..20: mol_type = other DNA
tagctgccagcagtccttgg

SEQ ID NO: 185748 - DNA, 20 bp, synthetic construct
  source 1..20: mol_type = other DNA
gtagctgccagcagtccttg

SEQ ID NO: 185749 - DNA, 20 bp, synthetic construct
  source 1..20: mol_type = other DNA
ggtagctgccagcagtcctt

SEQ ID NO: 185750 - DNA, 20 bp, synthetic construct
  source 1..20: mol_type = other DNA
tggtagctgccagcagtcct

SEQ ID NO: 185751 - DNA, 20 bp, synthetic construct
  source 1..20: mol_type = other DNA
ctggtagctgccagcagtcc

SEQ ID NO: 185752 - DNA, 20 bp, synthetic construct
  source 1..20: mol_type = other DNA
gctggtagctgccagcagtc

SEQ ID NO: 185753 - DNA, 20 bp, synthetic construct
  source 1..20: mol_type = other DNA
tgctggtagctgccagcagt

SEQ ID NO: 185754 - DNA, 20 bp, synthetic construct
  source 1..20: mol_type = other DNA
ctgctggtagctgccagcag

SEQ ID NO: 185755 - DNA, 20 bp, synthetic construct
  source 1..20: mol_type = other DNA
gctgctggtagctgccagca

SEQ ID NO: 185756 - DNA, 20 bp, synthetic construct
  source 1..20: mol_type = other DNA
ggctgctggtagctgccagc

SEQ ID NO: 185757 - DNA, 20 bp, synthetic construct
  source 1..20: mol_type = other DNA
tggctgctggtagctgccag

SEQ ID NO: 185758 - DNA, 20 bp, synthetic construct
  source 1..20: mol_type = other DNA
ctggctgctggtagctgcca

SEQ ID NO: 185759 - DNA, 20 bp, synthetic construct
  source 1..20: mol_type = other DNA
tctggctgctggtagctgcc

SEQ ID NO: 185760 - DNA, 20 bp, synthetic construct
  source 1..20: mol_type = other DNA
ttctggctgctggtagctgc

SEQ ID NO: 185761 - DNA, 20 bp, synthetic construct
  source 1..20: mol_type = other DNA
tttctggctgctggtagctg

SEQ ID NO: 185762 - DNA, 20 bp, synthetic construct
  source 1..20: mol_type = other DNA
ttttctggctgctggtagct

SEQ ID NO: 185763 - DNA, 20 bp, synthetic construct
  source 1..20: mol_type = other DNA
cttttctggctgctggtagc

SEQ ID NO: 185764 - DNA, 20 bp, synthetic construct
  source 1..20: mol_type = other DNA
acttttctggctgctggtag

SEQ ID NO: 185765 - DNA, 20 bp, synthetic construct
  source 1..20: mol_type = other DNA
gacttttctggctgctggta

SEQ ID NO: 185766 - DNA, 20 bp, synthetic construct
  source 1..20: mol_type = other DNA
ggacttttctggctgctggt

SEQ ID NO: 185767 - DNA, 20 bp, synthetic construct
  source 1..20: mol_type = other DNA
tggacttttctggctgctgg

SEQ ID NO: 185768 - DNA, 20 bp, synthetic construct
  source 1..20: mol_type = other DNA
ctggacttttctggctgctg

SEQ ID NO: 185769 - DNA, 20 bp, synthetic construct
  source 1..20: mol_type = other DNA
cctggacttttctggctgct

SEQ ID NO: 185770 - DNA, 20 bp, synthetic construct
  source 1..20: mol_type = other DNA
tcctggacttttctggctgc

SEQ ID NO: 185771 - DNA, 20 bp, synthetic construct
  source 1..20: mol_type = other DNA
ttcctggacttttctggctg

SEQ ID NO: 185772 - DNA, 20 bp, synthetic construct
  source 1..20: mol_type = other DNA
gttcctggacttttctggct

SEQ ID NO: 185773 - DNA, 20 bp, synthetic construct
  source 1..20: mol_type = other DNA
ggttcctggacttttctggc

SEQ ID NO: 185774 - DNA, 20 bp, synthetic construct
  source 1..20: mol_type = other DNA
tggttcctggacttttctgg

SEQ ID NO: 185775 - DNA, 20 bp, synthetic construct
  source 1..20: mol_type = other DNA
ttggttcctggacttttctg

SEQ ID NO: 185776 - DNA, 20 bp, synthetic construct
  source 1..20: mol_type = other DNA
attggttcctggacttttct

SEQ ID NO: 185777 - DNA, 20 bp, synthetic construct
  source 1..20: mol_type = other DNA
aattggttcctggacttttc

SEQ ID NO: 185778 - DNA, 20 bp, synthetic construct
  source 1..20: mol_type = other DNA
gaattggttcctggactttt

SEQ ID NO: 185779 - DNA, 20 bp, synthetic construct
  source 1..20: mol_type = other DNA
agaattggttcctggacttt

SEQ ID NO: 185780 - DNA, 20 bp, synthetic construct
  source 1..20: mol_type = other DNA
gagaattggttcctggactt

SEQ ID NO: 185781 - DNA, 20 bp, synthetic construct
  source 1..20: mol_type = other DNA
agagaattggttcctggact

SEQ ID NO: 185782 - DNA, 20 bp, synthetic construct
  source 1..20: mol_type = other DNA
gagagaattggttcctggac

SEQ ID NO: 185783 - DNA, 20 bp, synthetic construct
  source 1..20: mol_type = other DNA
agagagaattggttcctgga

SEQ ID NO: 185784 - DNA, 20 bp, synthetic construct
  source 1..20: mol_type = other DNA
aagagagaattggttcctgg

SEQ ID NO: 185785 - DNA, 20 bp, synthetic construct
  source 1..20: mol_type = other DNA
caagagagaattggttcctg

SEQ ID NO: 185786 - DNA, 20 bp, synthetic construct
  source 1..20: mol_type = other DNA
ccaagagagaattggttcct

SEQ ID NO: 185787 - DNA, 20 bp, synthetic construct
  source 1..20: mol_type = other DNA
tccaagagagaattggttcc

SEQ ID NO: 185788 - DNA, 20 bp, synthetic construct
  source 1..20: mol_type = other DNA
ctccaagagagaattggttc

SEQ ID NO: 185789 - DNA, 20 bp, synthetic construct
  source 1..20: mol_type = other DNA
gctccaagagagaattggtt

SEQ ID NO: 185790 - DNA, 20 bp, synthetic construct
  source 1..20: mol_type = other DNA
agctccaagagagaattggt

SEQ ID NO: 185791 - DNA, 20 bp, synthetic construct
  source 1..20: mol_type = other DNA
gagctccaagagagaattgg

SEQ ID NO: 185792 - DNA, 20 bp, synthetic construct
  source 1..20: mol_type = other DNA
ggagctccaagagagaattg

SEQ ID NO: 185793 - DNA, 20 bp, synthetic construct
  source 1..20: mol_type = other DNA
tggagctccaagagagaatt

SEQ ID NO: 185794 - DNA, 20 bp, synthetic construct
  source 1..20: mol_type = other DNA
ctggagctccaagagagaat

SEQ ID NO: 185795 - DNA, 20 bp, synthetic construct
  source 1..20: mol_type = other DNA
tctggagctccaagagagaa

SEQ ID NO: 185796 - DNA, 20 bp, synthetic construct
  source 1..20: mol_type = other DNA
ctctggagctccaagagaga

SEQ ID NO: 185797 - DNA, 20 bp, synthetic construct
  source 1..20: mol_type = other DNA
cctctggagctccaagagag

SEQ ID NO: 185798 - DNA, 20 bp, synthetic construct
  source 1..20: mol_type = other DNA
ccctctggagctccaagaga

SEQ ID NO: 185799 - DNA, 20 bp, synthetic construct
  source 1..20: mol_type = other DNA
tccctctggagctccaagag

SEQ ID NO: 185800 - DNA, 20 bp, synthetic construct
  source 1..20: mol_type = other DNA
ctccctctggagctccaaga

SEQ ID NO: 185801 - DNA, 20 bp, synthetic construct
  source 1..20: mol_type = other DNA
actccctctggagctccaag

SEQ ID NO: 185802 - DNA, 20 bp, synthetic construct
  source 1..20: mol_type = other DNA
cactccctctggagctccaa

SEQ ID NO: 185803 - DNA, 20 bp, synthetic construct
  source 1..20: mol_type = other DNA
acactccctctggagctcca

SEQ ID NO: 185804 - DNA, 20 bp, synthetic construct
  source 1..20: mol_type = other DNA
cacactccctctggagctcc

SEQ ID NO: 185805 - DNA, 20 bp, synthetic construct
  source 1..20: mol_type = other DNA
ccacactccctctggagctc

SEQ ID NO: 185806 - DNA, 20 bp, synthetic construct
  source 1..20: mol_type = other DNA
gccacactccctctggagct

SEQ ID NO: 185807 - DNA, 20 bp, synthetic construct
  source 1..20: mol_type = other DNA
ggccacactccctctggagc

SEQ ID NO: 185808 - DNA, 20 bp, synthetic construct
  source 1..20: mol_type = other DNA
gggccacactccctctggag

SEQ ID NO: 185809 - DNA, 20 bp, synthetic construct
  source 1..20: mol_type = other DNA
agggccacactccctctgga

SEQ ID NO: 185810 - DNA, 20 bp, synthetic construct
  source 1..20: mol_type = other DNA
cagggccacactccctctgg

SEQ ID NO: 185811 - DNA, 20 bp, synthetic construct
  source 1..20: mol_type = other DNA
gcagggccacactccctctg

SEQ ID NO: 185812 - DNA, 20 bp, synthetic construct
  source 1..20: mol_type = other DNA
agcagggccacactccctct

SEQ ID NO: 185813 - DNA, 20 bp, synthetic construct
  source 1..20: mol_type = other DNA
cagcagggccacactccctc

SEQ ID NO: 185814 - DNA, 20 bp, synthetic construct
  source 1..20: mol_type = other DNA
tcagcagggccacactccct

SEQ ID NO: 185815 - DNA, 20 bp, synthetic construct
  source 1..20: mol_type = other DNA
gtcagcagggccacactccc

SEQ ID NO: 185816 - DNA, 20 bp, synthetic construct
  source 1..20: mol_type = other DNA
tgtcagcagggccacactcc

SEQ ID NO: 185817 - DNA, 20 bp, synthetic construct
  source 1..20: mol_type = other DNA
gtgtcagcagggccacactc

SEQ ID NO: 185818 - DNA, 20 bp, synthetic construct
  source 1..20: mol_type = other DNA
ggtgtcagcagggccacact

SEQ ID NO: 185819 - DNA, 20 bp, synthetic construct
  source 1..20: mol_type = other DNA
aggtgtcagcagggccacac

SEQ ID NO: 185820 - DNA, 20 bp, synthetic construct
  source 1..20: mol_type = other DNA
aaggtgtcagcagggccaca

SEQ ID NO: 185821 - DNA, 20 bp, synthetic construct
  source 1..20: mol_type = other DNA
taaggtgtcagcagggccac

SEQ ID NO: 185822 - DNA, 20 bp, synthetic construct
  source 1..20: mol_type = other DNA
ctaaggtgtcagcagggcca

SEQ ID NO: 185823 - DNA, 20 bp, synthetic construct
  source 1..20: mol_type = other DNA
gctaaggtgtcagcagggcc

SEQ ID NO: 185824 - DNA, 20 bp, synthetic construct
  source 1..20: mol_type = other DNA
agctaaggtgtcagcagggc

SEQ ID NO: 185825 - DNA, 20 bp, synthetic construct
  source 1..20: mol_type = other DNA
aagctaaggtgtcagcaggg

SEQ ID NO: 185826 - DNA, 20 bp, synthetic construct
  source 1..20: mol_type = other DNA
gaagctaaggtgtcagcagg

SEQ ID NO: 185827 - DNA, 20 bp, synthetic construct
  source 1..20: mol_type = other DNA
tgaagctaaggtgtcagcag

SEQ ID NO: 185828 - DNA, 20 bp, synthetic construct
  source 1..20: mol_type = other DNA
ttgaagctaaggtgtcagca

SEQ ID NO: 185829 - DNA, 20 bp, synthetic construct
  source 1..20: mol_type = other DNA
gttgaagctaaggtgtcagc

SEQ ID NO: 185830 - DNA, 20 bp, synthetic construct
  source 1..20: mol_type = other DNA
ggttgaagctaaggtgtcag

SEQ ID NO: 185831 - DNA, 20 bp, synthetic construct
  source 1..20: mol_type = other DNA
aggttgaagctaaggtgtca

SEQ ID NO: 185832 - DNA, 20 bp, synthetic construct
  source 1..20: mol_type = other DNA
taggttgaagctaaggtgtc

SEQ ID NO: 185833 - DNA, 20 bp, synthetic construct
  source 1..20: mol_type = other DNA
ctaggttgaagctaaggtgt

SEQ ID NO: 185834 - DNA, 20 bp, synthetic construct
  source 1..20: mol_type = other DNA
actaggttgaagctaaggtg

SEQ ID NO: 185835 - DNA, 20 bp, synthetic construct
  source 1..20: mol_type = other DNA
cactaggttgaagctaaggt

SEQ ID NO: 185836 - DNA, 20 bp, synthetic construct
  source 1..20: mol_type = other DNA
tcactaggttgaagctaagg

SEQ ID NO: 185837 - DNA, 20 bp, synthetic construct
  source 1..20: mol_type = other DNA
atcactaggttgaagctaag

SEQ ID NO: 185838 - DNA, 20 bp, synthetic construct
  source 1..20: mol_type = other DNA
gatcactaggttgaagctaa

SEQ ID NO: 185839 - DNA, 20 bp, synthetic construct
  source 1..20: mol_type = other DNA
ggatcactaggttgaagcta

SEQ ID NO: 185840 - DNA, 20 bp, synthetic construct
  source 1..20: mol_type = other DNA
aggatcactaggttgaagct

SEQ ID NO: 185841 - DNA, 20 bp, synthetic construct
  source 1..20: mol_type = other DNA
caggatcactaggttgaagc

SEQ ID NO: 185842 - DNA, 20 bp, synthetic construct
  source 1..20: mol_type = other DNA
tcaggatcactaggttgaag

SEQ ID NO: 185843 - DNA, 20 bp, synthetic construct
  source 1..20: mol_type = other DNA
atcaggatcactaggttgaa

SEQ ID NO: 185844 - DNA, 20 bp, synthetic construct
  source 1..20: mol_type = other DNA
aatcaggatcactaggttga

SEQ ID NO: 185845 - DNA, 20 bp, synthetic construct
  source 1..20: mol_type = other DNA
aaatcaggatcactaggttg

SEQ ID NO: 185846 - DNA, 20 bp, synthetic construct
  source 1..20: mol_type = other DNA
aaaatcaggatcactaggtt

SEQ ID NO: 185847 - DNA, 20 bp, synthetic construct
  source 1..20: mol_type = other DNA
caaaatcaggatcactaggt

SEQ ID NO: 185848 - DNA, 20 bp, synthetic construct
  source 1..20: mol_type = other DNA
ccaaaatcaggatcactagg

SEQ ID NO: 185849 - DNA, 20 bp, synthetic construct
  source 1..20: mol_type = other DNA
tccaaaatcaggatcactag

SEQ ID NO: 185850 - DNA, 20 bp, synthetic construct
  source 1..20: mol_type = other DNA
gtccaaaatcaggatcacta

SEQ ID NO: 185851 - DNA, 20 bp, synthetic construct
  source 1..20: mol_type = other DNA
agtccaaaatcaggatcact

SEQ ID NO: 185852 - DNA, 20 bp, synthetic construct
  source 1..20: mol_type = other DNA
aagtccaaaatcaggatcac

SEQ ID NO: 185853 - DNA, 20 bp, synthetic construct
  source 1..20: mol_type = other DNA
aaagtccaaaatcaggatca

SEQ ID NO: 185854 - DNA, 20 bp, synthetic construct
  source 1..20: mol_type = other DNA
caaagtccaaaatcaggatc

SEQ ID NO: 185855 - DNA, 20 bp, synthetic construct
  source 1..20: mol_type = other DNA
ccaaagtccaaaatcaggat

SEQ ID NO: 185856 - DNA, 20 bp, synthetic construct
  source 1..20: mol_type = other DNA
gccaaagtccaaaatcagga

SEQ ID NO: 185857 - DNA, 20 bp, synthetic construct
  source 1..20: mol_type = other DNA
ggccaaagtccaaaatcagg

SEQ ID NO: 185858 - DNA, 20 bp, synthetic construct
  source 1..20: mol_type = other DNA
aggccaaagtccaaaatcag

SEQ ID NO: 185859 - DNA, 20 bp, synthetic construct
  source 1..20: mol_type = other DNA
aaggccaaagtccaaaatca

SEQ ID NO: 185860 - DNA, 20 bp, synthetic construct
  source 1..20: mol_type = other DNA
gaaggccaaagtccaaaatc

SEQ ID NO: 185861 - DNA, 20 bp, synthetic construct
  source 1..20: mol_type = other DNA
tgaaggccaaagtccaaaat

SEQ ID NO: 185862 - DNA, 20 bp, synthetic construct
  source 1..20: mol_type = other DNA
ctgaaggccaaagtccaaaa

SEQ ID NO: 185863 - DNA, 20 bp, synthetic construct
  source 1..20: mol_type = other DNA
tctgaaggccaaagtccaaa

SEQ ID NO: 185864 - DNA, 20 bp, synthetic construct
  source 1..20: mol_type = other DNA
ttctgaaggccaaagtccaa

SEQ ID NO: 185865 - DNA, 20 bp, synthetic construct
  source 1..20: mol_type = other DNA
cttctgaaggccaaagtcca

SEQ ID NO: 185866 - DNA, 20 bp, synthetic construct
  source 1..20: mol_type = other DNA
acttctgaaggccaaagtcc

SEQ ID NO: 185867 - DNA, 20 bp, synthetic construct
  source 1..20: mol_type = other DNA
cacttctgaaggccaaagtc

SEQ ID NO: 185868 - DNA, 20 bp, synthetic construct
  source 1..20: mol_type = other DNA
acacttctgaaggccaaagt

SEQ ID NO: 185869 - DNA, 20 bp, synthetic construct
  source 1..20: mol_type = other DNA
cacacttctgaaggccaaag

SEQ ID NO: 185870 - DNA, 20 bp, synthetic construct
  source 1..20: mol_type = other DNA
tcacacttctgaaggccaaa

SEQ ID NO: 185871 - DNA, 20 bp, synthetic construct
  source 1..20: mol_type = other DNA
ctcacacttctgaaggccaa

SEQ ID NO: 185872 - DNA, 20 bp, synthetic construct
  source 1..20: mol_type = other DNA
cctcacacttctgaaggcca

SEQ ID NO: 185873 - DNA, 20 bp, synthetic construct
  source 1..20: mol_type = other DNA
ccctcacacttctgaaggcc

SEQ ID NO: 185874 - DNA, 20 bp, synthetic construct
  source 1..20: mol_type = other DNA
tccctcacacttctgaaggc

SEQ ID NO: 185875 - DNA, 20 bp, synthetic construct
  source 1..20: mol_type = other DNA
ttccctcacacttctgaagg

SEQ ID NO: 185876 - DNA, 20 bp, synthetic construct
  source 1..20: mol_type = other DNA
attccctcacacttctgaag

SEQ ID NO: 185877 - DNA, 20 bp, synthetic construct
  source 1..20: mol_type = other DNA
cattccctcacacttctgaa

SEQ ID NO: 185878 - DNA, 20 bp, synthetic construct
  source 1..20: mol_type = other DNA
tcattccctcacacttctga

SEQ ID NO: 185879 - DNA, 20 bp, synthetic construct
  source 1..20: mol_type = other DNA
ttcattccctcacacttctg

SEQ ID NO: 185880 - DNA, 20 bp, synthetic construct
  source 1..20: mol_type = other DNA
attcattccctcacacttct

SEQ ID NO: 185881 - DNA, 20 bp, synthetic construct
  source 1..20: mol_type = other DNA
tattcattccctcacacttc

SEQ ID NO: 185882 - DNA, 20 bp, synthetic construct
  source 1..20: mol_type = other DNA
atattcattccctcacactt

SEQ ID NO: 185883 - DNA, 20 bp, synthetic construct
  source 1..20: mol_type = other DNA
gatattcattccctcacact

SEQ ID NO: 185884 - DNA, 20 bp, synthetic construct
  source 1..20: mol_type = other DNA
agatattcattccctcacac

SEQ ID NO: 185885 - DNA, 20 bp, synthetic construct
  source 1..20: mol_type = other DNA
cagatattcattccctcaca

SEQ ID NO: 185886 - DNA, 20 bp, synthetic construct
  source 1..20: mol_type = other DNA
acagatattcattccctcac

SEQ ID NO: 185887 - DNA, 20 bp, synthetic construct
  source 1..20: mol_type = other DNA
aacagatattcattccctca

SEQ ID NO: 185888 - DNA, 20 bp, synthetic construct
  source 1..20: mol_type = other DNA
caacagatattcattccctc

SEQ ID NO: 185889 - DNA, 20 bp, synthetic construct
  source 1..20: mol_type = other DNA
acaacagatattcattccct

SEQ ID NO: 185890 - DNA, 20 bp, synthetic construct
  source 1..20: mol_type = other DNA
aacaacagatattcattccc

SEQ ID NO: 185891 - DNA, 20 bp, synthetic construct
  source 1..20: mol_type = other DNA
aaacaacagatattcattcc

SEQ ID NO: 185892 - DNA, 20 bp, synthetic construct
  source 1..20: mol_type = other DNA
aaaacaacagatattcattc

SEQ ID NO: 185893 - DNA, 20 bp, synthetic construct
  source 1..20: mol_type = other DNA
taaaacaacagatattcatt

SEQ ID NO: 185894 - DNA, 20 bp, synthetic construct
  source 1..20: mol_type = other DNA
ttaaaacaacagatattcat

SEQ ID NO: 185895 - DNA, 20 bp, synthetic construct
  source 1..20: mol_type = other DNA
cttaaaacaacagatattca

SEQ ID NO: 185896 - DNA, 20 bp, synthetic construct
  source 1..20: mol_type = other DNA
gcttaaaacaacagatattc

SEQ ID NO: 185897 - DNA, 20 bp, synthetic construct
  source 1..20: mol_type = other DNA
ggcttaaaacaacagatatt

SEQ ID NO: 185898 - DNA, 20 bp, synthetic construct
  source 1..20: mol_type = other DNA
tggcttaaaacaacagatat

SEQ ID NO: 185899 - DNA, 20 bp, synthetic construct
  source 1..20: mol_type = other DNA
gtggcttaaaacaacagata

SEQ ID NO: 185900 - DNA, 20 bp, synthetic construct
  source 1..20: mol_type = other DNA
ggtggcttaaaacaacagat

SEQ ID NO: 185901 - DNA, 20 bp, synthetic construct
  source 1..20: mol_type = other DNA
tggtggcttaaaacaacaga

SEQ ID NO: 185902 - DNA, 20 bp, synthetic construct
  source 1..20: mol_type = other DNA
ttggtggcttaaaacaacag

SEQ ID NO: 185903 - DNA, 20 bp, synthetic construct
  source 1..20: mol_type = other DNA
cttggtggcttaaaacaaca

SEQ ID NO: 185904 - DNA, 20 bp, synthetic construct
  source 1..20: mol_type = other DNA
acttggtggcttaaaacaac

SEQ ID NO: 185905 - DNA, 20 bp, synthetic construct
  source 1..20: mol_type = other DNA
aacttggtggcttaaaacaa

SEQ ID NO: 185906 - DNA, 20 bp, synthetic construct
  source 1..20: mol_type = other DNA
aaacttggtggcttaaaaca

SEQ ID NO: 185907 - DNA, 20 bp, synthetic construct
  source 1..20: mol_type = other DNA
taaacttggtggcttaaaac

SEQ ID NO: 185908 - DNA, 20 bp, synthetic construct
  source 1..20: mol_type = other DNA
ataaacttggtggcttaaaa

SEQ ID NO: 185909 - DNA, 20 bp, synthetic construct
  source 1..20: mol_type = other DNA
cataaacttggtggcttaaa

SEQ ID NO: 185910 - DNA, 20 bp, synthetic construct
  source 1..20: mol_type = other DNA
ccataaacttggtggcttaa

SEQ ID NO: 185911 - DNA, 20 bp, synthetic construct
  source 1..20: mol_type = other DNA
accataaacttggtggctta

SEQ ID NO: 185912 - DNA, 20 bp, synthetic construct
  source 1..20: mol_type = other DNA
gaccataaacttggtggctt

SEQ ID NO: 185913 - DNA, 20 bp, synthetic construct
  source 1..20: mol_type = other DNA
tgaccataaacttggtggct

SEQ ID NO: 185914 - DNA, 20 bp, synthetic construct
  source 1..20: mol_type = other DNA
atgaccataaacttggtggc

SEQ ID NO: 185915 - DNA, 20 bp, synthetic construct
  source 1..20: mol_type = other DNA
aatgaccataaacttggtgg

SEQ ID NO: 185916 - DNA, 20 bp, synthetic construct
  source 1..20: mol_type = other DNA
aaatgaccataaacttggtg

SEQ ID NO: 185917 - DNA, 20 bp, synthetic construct
  source 1..20: mol_type = other DNA
gaaatgaccataaacttggt

SEQ ID NO: 185918 - DNA, 20 bp, synthetic construct
  source 1..20: mol_type = other DNA
ggaaatgaccataaacttgg

SEQ ID NO: 185919 - DNA, 20 bp, synthetic construct
  source 1..20: mol_type = other DNA
aggaaatgaccataaacttg

SEQ ID NO: 185920 - DNA, 20 bp, synthetic construct
  source 1..20: mol_type = other DNA
taggaaatgaccataaactt

SEQ ID NO: 185921 - DNA, 20 bp, synthetic construct
  source 1..20: mol_type = other DNA
gtaggaaatgaccataaact

SEQ ID NO: 185922 - DNA, 20 bp, synthetic construct
  source 1..20: mol_type = other DNA
tgtaggaaatgaccataaac

SEQ ID NO: 185923 - DNA, 20 bp, synthetic construct
  source 1..20: mol_type = other DNA
ctgtaggaaatgaccataaa

SEQ ID NO: 185924 - DNA, 20 bp, synthetic construct
  source 1..20: mol_type = other DNA
gctgtaggaaatgaccataa

SEQ ID NO: 185925 - DNA, 20 bp, synthetic construct
  source 1..20: mol_type = other DNA
tgctgtaggaaatgaccata

SEQ ID NO: 185926 - DNA, 20 bp, synthetic construct
  source 1..20: mol_type = other DNA
ctgctgtaggaaatgaccat

SEQ ID NO: 185927 - DNA, 20 bp, synthetic construct
  source 1..20: mol_type = other DNA
gctgctgtaggaaatgacca

SEQ ID NO: 185928 - DNA, 20 bp, synthetic construct
  source 1..20: mol_type = other DNA
ggctgctgtaggaaatgacc

SEQ ID NO: 185929 - DNA, 20 bp, synthetic construct
  source 1..20: mol_type = other DNA
tggctgctgtaggaaatgac

SEQ ID NO: 185930 - DNA, 20 bp, synthetic construct
  source 1..20: mol_type = other DNA
gtggctgctgtaggaaatga

SEQ ID NO: 185931 - DNA, 20 bp, synthetic construct
  source 1..20: mol_type = other DNA
tgtggctgctgtaggaaatg

SEQ ID NO: 185932 - DNA, 20 bp, synthetic construct
  source 1..20: mol_type = other DNA
ctgtggctgctgtaggaaat

SEQ ID NO: 185933 - DNA, 20 bp, synthetic construct
  source 1..20: mol_type = other DNA
cctgtggctgctgtaggaaa

SEQ ID NO: 185934 - DNA, 20 bp, synthetic construct
  source 1..20: mol_type = other DNA
tcctgtggctgctgtaggaa

SEQ ID NO: 185935 - DNA, 20 bp, synthetic construct
  source 1..20: mol_type = other DNA
ttcctgtggctgctgtagga

SEQ ID NO: 185936 - DNA, 20 bp, synthetic construct
  source 1..20: mol_type = other DNA
attcctgtggctgctgtagg

SEQ ID NO: 185937 - DNA, 20 bp, synthetic construct
  source 1..20: mol_type = other DNA
gattcctgtggctgctgtag

SEQ ID NO: 185938 - DNA, 20 bp, synthetic construct
  source 1..20: mol_type = other DNA
tgattcctgtggctgctgta

SEQ ID NO: 185939 - DNA, 20 bp, synthetic construct
  source 1..20: mol_type = other DNA
ttgattcctgtggctgctgt

SEQ ID NO: 185940 - DNA, 20 bp, synthetic construct
  source 1..20: mol_type = other DNA
tttgattcctgtggctgctg

SEQ ID NO: 185941 - DNA, 20 bp, synthetic construct
  source 1..20: mol_type = other DNA
ttttgattcctgtggctgct

SEQ ID NO: 185942 - DNA, 20 bp, synthetic construct
  source 1..20: mol_type = other DNA
tttttgattcctgtggctgc

SEQ ID NO: 185943 - DNA, 20 bp, synthetic construct
  source 1..20: mol_type = other DNA
gtttttgattcctgtggctg

SEQ ID NO: 185944 - DNA, 20 bp, synthetic construct
  source 1..20: mol_type = other DNA
tgtttttgattcctgtggct

SEQ ID NO: 185945 - DNA, 20 bp, synthetic construct
  source 1..20: mol_type = other DNA
ctgtttttgattcctgtggc

SEQ ID NO: 185946 - DNA, 20 bp, synthetic construct
  source 1..20: mol_type = other DNA
actgtttttgattcctgtgg

SEQ ID NO: 185947 - DNA, 20 bp, synthetic construct
  source 1..20: mol_type = other DNA
tactgtttttgattcctgtg

SEQ ID NO: 185948 - DNA, 20 bp, synthetic construct
  source 1..20: mol_type = other DNA
ttactgtttttgattcctgt

SEQ ID NO: 185949 - DNA, 20 bp, synthetic construct
  source 1..20: mol_type = other DNA
cttactgtttttgattcctg

SEQ ID NO: 185950 - DNA, 20 bp, synthetic construct
  source 1..20: mol_type = other DNA
acttactgtttttgattcct

SEQ ID NO: 185951 - DNA, 20 bp, synthetic construct
  source 1..20: mol_type = other DNA
tacttactgtttttgattcc

SEQ ID NO: 185952 - DNA, 20 bp, synthetic construct
  source 1..20: mol_type = other DNA
atacttactgtttttgattc

SEQ ID NO: 185953 - DNA, 20 bp, synthetic construct
  source 1..20: mol_type = other DNA
catacttactgtttttgatt

SEQ ID NO: 185954 - DNA, 20 bp, synthetic construct
  source 1..20: mol_type = other DNA
acatacttactgtttttgat

SEQ ID NO: 185955 - DNA, 20 bp, synthetic construct
  source 1..20: mol_type = other DNA
gacatacttactgtttttga

SEQ ID NO: 185956 - DNA, 20 bp, synthetic construct
  source 1..20: mol_type = other DNA
ggacatacttactgtttttg

SEQ ID NO: 185957 - DNA, 20 bp, synthetic construct
  source 1..20: mol_type = other DNA
gggacatacttactgttttt

SEQ ID NO: 185958 - DNA, 20 bp, synthetic construct
  source 1..20: mol_type = other DNA
tgggacatacttactgtttt

SEQ ID NO: 185959 - DNA, 20 bp, synthetic construct
  source 1..20: mol_type = other DNA
atgggacatacttactgttt

SEQ ID NO: 185960 - DNA, 20 bp, synthetic construct
  source 1..20: mol_type = other DNA
catgggacatacttactgtt

SEQ ID NO: 185961 - DNA, 20 bp, synthetic construct
  source 1..20: mol_type = other DNA
gcatgggacatacttactgt

SEQ ID NO: 185962 - DNA, 20 bp, synthetic construct
  source 1..20: mol_type = other DNA
tgcatgggacatacttactg

SEQ ID NO: 185963 - DNA, 20 bp, synthetic construct
  source 1..20: mol_type = other DNA
ttgcatgggacatacttact

SEQ ID NO: 185964 - DNA, 20 bp, synthetic construct
  source 1..20: mol_type = other DNA
attgcatgggacatacttac

SEQ ID NO: 185965 - DNA, 20 bp, synthetic construct
  source 1..20: mol_type = other DNA
cattgcatgggacatactta

SEQ ID NO: 185966 - DNA, 20 bp, synthetic construct
  source 1..20: mol_type = other DNA
acattgcatgggacatactt

SEQ ID NO: 185967 - DNA, 20 bp, synthetic construct
  source 1..20: mol_type = other DNA
aacattgcatgggacatact

SEQ ID NO: 185968 - DNA, 20 bp, synthetic construct
  source 1..20: mol_type = other DNA
aaacattgcatgggacatac

SEQ ID NO: 185969 - DNA, 20 bp, synthetic construct
  source 1..20: mol_type = other DNA
caaacattgcatgggacata

SEQ ID NO: 185970 - DNA, 20 bp, synthetic construct
  source 1..20: mol_type = other DNA
acaaacattgcatgggacat

SEQ ID NO: 185971 - DNA, 20 bp, synthetic construct
  source 1..20: mol_type = other DNA
cacaaacattgcatgggaca

SEQ ID NO: 185972 - DNA, 20 bp, synthetic construct
  source 1..20: mol_type = other DNA
tcacaaacattgcatgggac

SEQ ID NO: 185973 - DNA, 20 bp, synthetic construct
  source 1..20: mol_type = other DNA
gtcacaaacattgcatggga

SEQ ID NO: 185974 - DNA, 20 bp, synthetic construct
  source 1..20: mol_type = other DNA
tgtcacaaacattgcatggg

SEQ ID NO: 185975 - DNA, 20 bp, synthetic construct
  source 1..20: mol_type = other DNA
gtgtcacaaacattgcatgg

SEQ ID NO: 185976 - DNA, 20 bp, synthetic construct
  source 1..20: mol_type = other DNA
tgtgtcacaaacattgcatg

SEQ ID NO: 185977 - DNA, 20 bp, synthetic construct
  source 1..20: mol_type = other DNA
gtgtgtcacaaacattgcat

SEQ ID NO: 185978 - DNA, 20 bp, synthetic construct
  source 1..20: mol_type = other DNA
tgtgtgtcacaaacattgca

SEQ ID NO: 185979 - DNA, 20 bp, synthetic construct
  source 1..20: mol_type = other DNA
gtgtgtgtcacaaacattgc

SEQ ID NO: 185980 - DNA, 20 bp, synthetic construct
  source 1..20: mol_type = other DNA
ggtgtgtgtcacaaacattg

SEQ ID NO: 185981 - DNA, 20 bp, synthetic construct
  source 1..20: mol_type = other DNA
tggtgtgtgtcacaaacatt

SEQ ID NO: 185982 - DNA, 20 bp, synthetic construct
  source 1..20: mol_type = other DNA
ttggtgtgtgtcacaaacat

SEQ ID NO: 185983 - DNA, 20 bp, synthetic construct
  source 1..20: mol_type = other DNA
tttggtgtgtgtcacaaaca

SEQ ID NO: 185984 - DNA, 20 bp, synthetic construct
  source 1..20: mol_type = other DNA
ttttggtgtgtgtcacaaac

SEQ ID NO: 185985 - DNA, 20 bp, synthetic construct
  source 1..20: mol_type = other DNA
tttttggtgtgtgtcacaaa

SEQ ID NO: 185986 - DNA, 20 bp, synthetic construct
  source 1..20: mol_type = other DNA
atttttggtgtgtgtcacaa

SEQ ID NO: 185987 - DNA, 20 bp, synthetic construct
  source 1..20: mol_type = other DNA
tatttttggtgtgtgtcaca

SEQ ID NO: 185988 - DNA, 20 bp, synthetic construct
  source 1..20: mol_type = other DNA
atatttttggtgtgtgtcac

SEQ ID NO: 185989 - DNA, 20 bp, synthetic construct
  source 1..20: mol_type = other DNA
aatatttttggtgtgtgtca

SEQ ID NO: 185990 - DNA, 20 bp, synthetic construct
  source 1..20: mol_type = other DNA
taatatttttggtgtgtgtc

SEQ ID NO: 185991 - DNA, 20 bp, synthetic construct
  source 1..20: mol_type = other DNA
gtaatatttttggtgtgtgt

SEQ ID NO: 185992 - DNA, 20 bp, synthetic construct
  source 1..20: mol_type = other DNA
agtaatatttttggtgtgtg

SEQ ID NO: 185993 - DNA, 20 bp, synthetic construct
  source 1..20: mol_type = other DNA
aagtaatatttttggtgtgt

SEQ ID NO: 185994 - DNA, 20 bp, synthetic construct
  source 1..20: mol_type = other DNA
caagtaatatttttggtgtg

SEQ ID NO: 185995 - DNA, 20 bp, synthetic construct
  source 1..20: mol_type = other DNA
acaagtaatatttttggtgt

SEQ ID NO: 185996 - DNA, 20 bp, synthetic construct
  source 1..20: mol_type = other DNA
aacaagtaatatttttggtg

SEQ ID NO: 185997 - DNA, 20 bp, synthetic construct
  source 1..20: mol_type = other DNA
caacaagtaatatttttggt

SEQ ID NO: 185998 - DNA, 20 bp, synthetic construct
  source 1..20: mol_type = other DNA
acaacaagtaatatttttgg

SEQ ID NO: 185999 - DNA, 20 bp, synthetic construct
  source 1..20: mol_type = other DNA
aacaacaagtaatatttttg

SEQ ID NO: 186000 - DNA, 20 bp, synthetic construct
  source 1..20: mol_type = other DNA
gaacaacaagtaatattttt

SEQ ID NO: 186001 - DNA, 20 bp, synthetic construct
  source 1..20: mol_type = other DNA
tgaacaacaagtaatatttt

SEQ ID NO: 186002 - DNA, 20 bp, synthetic construct
  source 1..20: mol_type = other DNA
gtgaacaacaagtaatattt

SEQ ID NO: 186003 - DNA, 20 bp, synthetic construct
  source 1..20: mol_type = other DNA
ggtgaacaacaagtaatatt

SEQ ID NO: 186004 - DNA, 20 bp, synthetic construct
  source 1..20: mol_type = other DNA
aggtgaacaacaagtaatat

SEQ ID NO: 186005 - DNA, 20 bp, synthetic construct
  source 1..20: mol_type = other DNA
caggtgaacaacaagtaata

SEQ ID NO: 186006 - DNA, 20 bp, synthetic construct
  source 1..20: mol_type = other DNA
tcaggtgaacaacaagtaat

SEQ ID NO: 186007 - DNA, 20 bp, synthetic construct
  source 1..20: mol_type = other DNA
ttcaggtgaacaacaagtaa

SEQ ID NO: 186008 - DNA, 20 bp, synthetic construct
  source 1..20: mol_type = other DNA
tttcaggtgaacaacaagta

SEQ ID NO: 186009 - DNA, 20 bp, synthetic construct
  source 1..20: mol_type = other DNA
atttcaggtgaacaacaagt

SEQ ID NO: 186010 - DNA, 20 bp, synthetic construct
  source 1..20: mol_type = other DNA
aatttcaggtgaacaacaag

SEQ ID NO: 186011 - DNA, 20 bp, synthetic construct
  source 1..20: mol_type = other DNA
gaatttcaggtgaacaacaa

SEQ ID NO: 186012 - DNA, 20 bp, synthetic construct
  source 1..20: mol_type = other DNA
tgaatttcaggtgaacaaca

SEQ ID NO: 186013 - DNA, 20 bp, synthetic construct
  source 1..20: mol_type = other DNA
ttgaatttcaggtgaacaac

SEQ ID NO: 186014 - DNA, 20 bp, synthetic construct
  source 1..20: mol_type = other DNA
tttgaatttcaggtgaacaa

SEQ ID NO: 186015 - DNA, 20 bp, synthetic construct
  source 1..20: mol_type = other DNA
atttgaatttcaggtgaaca

SEQ ID NO: 186016 - DNA, 20 bp, synthetic construct
  source 1..20: mol_type = other DNA
aatttgaatttcaggtgaac

SEQ ID NO: 186017 - DNA, 20 bp, synthetic construct
  source 1..20: mol_type = other DNA
aaatttgaatttcaggtgaa

SEQ ID NO: 186018 - DNA, 20 bp, synthetic construct
  source 1..20: mol_type = other DNA
taaatttgaatttcaggtga

SEQ ID NO: 186019 - DNA, 20 bp, synthetic construct
  source 1..20: mol_type = other DNA
ttaaatttgaatttcaggtg

SEQ ID NO: 186020 - DNA, 20 bp, synthetic construct
  source 1..20: mol_type = other DNA
gttaaatttgaatttcaggt

SEQ ID NO: 186021 - DNA, 20 bp, synthetic construct
  source 1..20: mol_type = other DNA
agttaaatttgaatttcagg

SEQ ID NO: 186022 - DNA, 20 bp, synthetic construct
  source 1..20: mol_type = other DNA
cagttaaatttgaatttcag

SEQ ID NO: 186023 - DNA, 20 bp, synthetic construct
  source 1..20: mol_type = other DNA
ccagttaaatttgaatttca

SEQ ID NO: 186024 - DNA, 20 bp, synthetic construct
  source 1..20: mol_type = other DNA
cccagttaaatttgaatttc

SEQ ID NO: 186025 - DNA, 20 bp, synthetic construct
  source 1..20: mol_type = other DNA
acccagttaaatttgaattt

SEQ ID NO: 186026 - DNA, 20 bp, synthetic construct
  source 1..20: mol_type = other DNA
gacccagttaaatttgaatt

SEQ ID NO: 186027 - DNA, 20 bp, synthetic construct
  source 1..20: mol_type = other DNA
agacccagttaaatttgaat

SEQ ID NO: 186028 - DNA, 20 bp, synthetic construct
  source 1..20: mol_type = other DNA
gagacccagttaaatttgaa

SEQ ID NO: 186029 - DNA, 20 bp, synthetic construct
  source 1..20: mol_type = other DNA
ggagacccagttaaatttga

SEQ ID NO: 186030 - DNA, 20 bp, synthetic construct
  source 1..20: mol_type = other DNA
aggagacccagttaaatttg

SEQ ID NO: 186031 - DNA, 20 bp, synthetic construct
  source 1..20: mol_type = other DNA
caggagacccagttaaattt

SEQ ID NO: 186032 - DNA, 20 bp, synthetic construct
  source 1..20: mol_type = other DNA
acaggagacccagttaaatt

SEQ ID NO: 186033 - DNA, 20 bp, synthetic construct
  source 1..20: mol_type = other DNA
tacaggagacccagttaaat

SEQ ID NO: 186034 - DNA, 20 bp, synthetic construct
  source 1..20: mol_type = other DNA
atacaggagacccagttaaa

SEQ ID NO: 186035 - DNA, 20 bp, synthetic construct
  source 1..20: mol_type = other DNA
aatacaggagacccagttaa

SEQ ID NO: 186036 - DNA, 20 bp, synthetic construct
  source 1..20: mol_type = other DNA
aaatacaggagacccagtta

SEQ ID NO: 186037 - DNA, 20 bp, synthetic construct
  source 1..20: mol_type = other DNA
aaaatacaggagacccagtt

SEQ ID NO: 186038 - DNA, 20 bp, synthetic construct
  source 1..20: mol_type = other DNA
taaaatacaggagacccagt

SEQ ID NO: 186039 - DNA, 20 bp, synthetic construct
  source 1..20: mol_type = other DNA
ataaaatacaggagacccag

SEQ ID NO: 186040 - DNA, 20 bp, synthetic construct
  source 1..20: mol_type = other DNA
aataaaatacaggagaccca

SEQ ID NO: 186041 - DNA, 20 bp, synthetic construct
  source 1..20: mol_type = other DNA
aaataaaatacaggagaccc

SEQ ID NO: 186042 - DNA, 20 bp, synthetic construct
  source 1..20: mol_type = other DNA
caaataaaatacaggagacc

SEQ ID NO: 186043 - DNA, 20 bp, synthetic construct
  source 1..20: mol_type = other DNA
ccaaataaaatacaggagac

SEQ ID NO: 186044 - DNA, 20 bp, synthetic construct
  source 1..20: mol_type = other DNA
gccaaataaaatacaggaga

SEQ ID NO: 186045 - DNA, 20 bp, synthetic construct
  source 1..20: mol_type = other DNA
ggccaaataaaatacaggag

SEQ ID NO: 186046 - DNA, 20 bp, synthetic construct
  source 1..20: mol_type = other DNA
tggccaaataaaatacagga

SEQ ID NO: 186047 - DNA, 20 bp, synthetic construct
  source 1..20: mol_type = other DNA
ttggccaaataaaatacagg

SEQ ID NO: 186048 - DNA, 20 bp, synthetic construct
  source 1..20: mol_type = other DNA
gttggccaaataaaatacag

SEQ ID NO: 186049 - DNA, 20 bp, synthetic construct
  source 1..20: mol_type = other DNA
ggttggccaaataaaataca

SEQ ID NO: 186050 - DNA, 20 bp, synthetic construct
  source 1..20: mol_type = other DNA
aggttggccaaataaaatac

SEQ ID NO: 186051 - DNA, 20 bp, synthetic construct
  source 1..20: mol_type = other DNA
taggttggccaaataaaata

SEQ ID NO: 186052 - DNA, 20 bp, synthetic construct
  source 1..20: mol_type = other DNA
ctaggttggccaaataaaat

SEQ ID NO: 186053 - DNA, 20 bp, synthetic construct
  source 1..20: mol_type = other DNA
actaggttggccaaataaaa

SEQ ID NO: 186054 - DNA, 20 bp, synthetic construct
  source 1..20: mol_type = other DNA
aactaggttggccaaataaa

SEQ ID NO: 186055 - DNA, 20 bp, synthetic construct
  source 1..20: mol_type = other DNA
gaactaggttggccaaataa

SEQ ID NO: 186056 - DNA, 20 bp, synthetic construct
  source 1..20: mol_type = other DNA
ggaactaggttggccaaata

SEQ ID NO: 186057 - DNA, 20 bp, synthetic construct
  source 1..20: mol_type = other DNA
gggaactaggttggccaaat

SEQ ID NO: 186058 - DNA, 20 bp, synthetic construct
  source 1..20: mol_type = other DNA
tgggaactaggttggccaaa

SEQ ID NO: 186059 - DNA, 20 bp, synthetic construct
  source 1..20: mol_type = other DNA
ctgggaactaggttggccaa

SEQ ID NO: 186060 - DNA, 20 bp, synthetic construct
  source 1..20: mol_type = other DNA
cctgggaactaggttggcca

SEQ ID NO: 186061 - DNA, 20 bp, synthetic construct
  source 1..20: mol_type = other DNA
gcctgggaactaggttggcc

SEQ ID NO: 186062 - DNA, 20 bp, synthetic construct
  source 1..20: mol_type = other DNA
ggcctgggaactaggttggc

SEQ ID NO: 186063 - DNA, 20 bp, synthetic construct
  source 1..20: mol_type = other DNA
gggcctgggaactaggttgg

SEQ ID NO: 186064 - DNA, 20 bp, synthetic construct
  source 1..20: mol_type = other DNA
tgggcctgggaactaggttg

SEQ ID NO: 186065 - DNA, 20 bp, synthetic construct
  source 1..20: mol_type = other DNA
ttgggcctgggaactaggtt

SEQ ID NO: 186066 - DNA, 20 bp, synthetic construct
  source 1..20: mol_type = other DNA
tttgggcctgggaactaggt

SEQ ID NO: 186067 - DNA, 20 bp, synthetic construct
  source 1..20: mol_type = other DNA
ctttgggcctgggaactagg

SEQ ID NO: 186068 - DNA, 20 bp, synthetic construct
  source 1..20: mol_type = other DNA
tctttgggcctgggaactag

SEQ ID NO: 186069 - DNA, 20 bp, synthetic construct
  source 1..20: mol_type = other DNA
ttctttgggcctgggaacta

SEQ ID NO: 186070 - DNA, 20 bp, synthetic construct
  source 1..20: mol_type = other DNA
tttctttgggcctgggaact

SEQ ID NO: 186071 - DNA, 20 bp, synthetic construct
  source 1..20: mol_type = other DNA
ctttctttgggcctgggaac

SEQ ID NO: 186072 - DNA, 20 bp, synthetic construct
  source 1..20: mol_type = other DNA
tctttctttgggcctgggaa

SEQ ID NO: 186073 - DNA, 20 bp, synthetic construct
  source 1..20: mol_type = other DNA
ctctttctttgggcctggga

SEQ ID NO: 186074 - DNA, 20 bp, synthetic construct
  source 1..20: mol_type = other DNA
cctctttctttgggcctggg

SEQ ID NO: 186075 - DNA, 20 bp, synthetic construct
  source 1..20: mol_type = other DNA
gcctctttctttgggcctgg

SEQ ID NO: 186076 - DNA, 20 bp, synthetic construct
  source 1..20: mol_type = other DNA
agcctctttctttgggcctg

SEQ ID NO: 186077 - DNA, 20 bp, synthetic construct
  source 1..20: mol_type = other DNA
aagcctctttctttgggcct

SEQ ID NO: 186078 - DNA, 20 bp, synthetic construct
  source 1..20: mol_type = other DNA
aaagcctctttctttgggcc

SEQ ID NO: 186079 - DNA, 20 bp, synthetic construct
  source 1..20: mol_type = other DNA
aaaagcctctttctttgggc

SEQ ID NO: 186080 - DNA, 20 bp, synthetic construct
  source 1..20: mol_type = other DNA
caaaagcctctttctttggg

SEQ ID NO: 186081 - DNA, 20 bp, synthetic construct
  source 1..20: mol_type = other DNA
tcaaaagcctctttctttgg

SEQ ID NO: 186082 - DNA, 20 bp, synthetic construct
  source 1..20: mol_type = other DNA
ttcaaaagcctctttctttg

SEQ ID NO: 186083 - DNA, 20 bp, synthetic construct
  source 1..20: mol_type = other DNA
tttcaaaagcctctttcttt

SEQ ID NO: 186084 - DNA, 20 bp, synthetic construct
  source 1..20: mol_type = other DNA
atttcaaaagcctctttctt

SEQ ID NO: 186085 - DNA, 20 bp, synthetic construct
  source 1..20: mol_type = other DNA
aatttcaaaagcctctttct

SEQ ID NO: 186086 - DNA, 20 bp, synthetic construct
  source 1..20: mol_type = other DNA
aaatttcaaaagcctctttc

SEQ ID NO: 186087 - DNA, 20 bp, synthetic construct
  source 1..20: mol_type = other DNA
caaatttcaaaagcctcttt

SEQ ID NO: 186088 - DNA, 20 bp, synthetic construct
  source 1..20: mol_type = other DNA
gcaaatttcaaaagcctctt

SEQ ID NO: 186089 - DNA, 20 bp, synthetic construct
  source 1..20: mol_type = other DNA
tgcaaatttcaaaagcctct

SEQ ID NO: 186090 - DNA, 20 bp, synthetic construct
  source 1..20: mol_type = other DNA
ttgcaaatttcaaaagcctc

SEQ ID NO: 186091 - DNA, 20 bp, synthetic construct
  source 1..20: mol_type = other DNA
cttgcaaatttcaaaagcct

SEQ ID NO: 186092 - DNA, 20 bp, synthetic construct
  source 1..20: mol_type = other DNA
tcttgcaaatttcaaaagcc

SEQ ID NO: 186093 - DNA, 20 bp, synthetic construct
  source 1..20: mol_type = other DNA
ttcttgcaaatttcaaaagc

SEQ ID NO: 186094 - DNA, 20 bp, synthetic construct
  source 1..20: mol_type = other DNA
tttcttgcaaatttcaaaag

SEQ ID NO: 186095 - DNA, 20 bp, synthetic construct
  source 1..20: mol_type = other DNA
ctttcttgcaaatttcaaaa

SEQ ID NO: 186096 - DNA, 20 bp, synthetic construct
  source 1..20: mol_type = other DNA
gctttcttgcaaatttcaaa

SEQ ID NO: 186097 - DNA, 20 bp, synthetic construct
  source 1..20: mol_type = other DNA
agctttcttgcaaatttcaa

SEQ ID NO: 186098 - DNA, 20 bp, synthetic construct
  source 1..20: mol_type = other DNA
cagctttcttgcaaatttca

SEQ ID NO: 186099 - DNA, 20 bp, synthetic construct
  source 1..20: mol_type = other DNA
ccagctttcttgcaaatttc

SEQ ID NO: 186100 - DNA, 20 bp, synthetic construct
  source 1..20: mol_type = other DNA
accagctttcttgcaaattt

SEQ ID NO: 186101 - DNA, 20 bp, synthetic construct
  source 1..20: mol_type = other DNA
aaccagctttcttgcaaatt

SEQ ID NO: 186102 - DNA, 20 bp, synthetic construct
  source 1..20: mol_type = other DNA
caaccagctttcttgcaaat

SEQ ID NO: 186103 - DNA, 20 bp, synthetic construct
  source 1..20: mol_type = other DNA
ccaaccagctttcttgcaaa

SEQ ID NO: 186104 - DNA, 20 bp, synthetic construct
  source 1..20: mol_type = other DNA
tccaaccagctttcttgcaa

SEQ ID NO: 186105 - DNA, 20 bp, synthetic construct
  source 1..20: mol_type = other DNA
ctccaaccagctttcttgca

SEQ ID NO: 186106 - DNA, 20 bp, synthetic construct
  source 1..20: mol_type = other DNA
gctccaaccagctttcttgc

SEQ ID NO: 186107 - DNA, 20 bp, synthetic construct
  source 1..20: mol_type = other DNA
agctccaaccagctttcttg

SEQ ID NO: 186108 - DNA, 20 bp, synthetic construct
  source 1..20: mol_type = other DNA
cagctccaaccagctttctt

SEQ ID NO: 186109 - DNA, 20 bp, synthetic construct
  source 1..20: mol_type = other DNA
acagctccaaccagctttct

SEQ ID NO: 186110 - DNA, 20 bp, synthetic construct
  source 1..20: mol_type = other DNA
gacagctccaaccagctttc

SEQ ID NO: 186111 - DNA, 20 bp, synthetic construct
  source 1..20: mol_type = other DNA
tgacagctccaaccagcttt

SEQ ID NO: 186112 - DNA, 20 bp, synthetic construct
  source 1..20: mol_type = other DNA
ctgacagctccaaccagctt

SEQ ID NO: 186113 - DNA, 20 bp, synthetic construct
  source 1..20: mol_type = other DNA
tctgacagctccaaccagct

SEQ ID NO: 186114 - DNA, 20 bp, synthetic construct
  source 1..20: mol_type = other DNA
ttctgacagctccaaccagc

SEQ ID NO: 186115 - DNA, 20 bp, synthetic construct
  source 1..20: mol_type = other DNA
tttctgacagctccaaccag

SEQ ID NO: 186116 - DNA, 20 bp, synthetic construct
  source 1..20: mol_type = other DNA
ctttctgacagctccaacca

SEQ ID NO: 186117 - DNA, 20 bp, synthetic construct
  source 1..20: mol_type = other DNA
actttctgacagctccaacc

SEQ ID NO: 186118 - DNA, 20 bp, synthetic construct
  source 1..20: mol_type = other DNA
cactttctgacagctccaac

SEQ ID NO: 186119 - DNA, 20 bp, synthetic construct
  source 1..20: mol_type = other DNA
ccactttctgacagctccaa

SEQ ID NO: 186120 - DNA, 20 bp, synthetic construct
  source 1..20: mol_type = other DNA
tccactttctgacagctcca

SEQ ID NO: 186121 - DNA, 20 bp, synthetic construct
  source 1..20: mol_type = other DNA
gtccactttctgacagctcc

SEQ ID NO: 186122 - DNA, 20 bp, synthetic construct
  source 1..20: mol_type = other DNA
agtccactttctgacagctc

SEQ ID NO: 186123 - DNA, 20 bp, synthetic construct
  source 1..20: mol_type = other DNA
aagtccactttctgacagct

SEQ ID NO: 186124 - DNA, 20 bp, synthetic construct
  source 1..20: mol_type = other DNA
aaagtccactttctgacagc

SEQ ID NO: 186125 - DNA, 20 bp, synthetic construct
  source 1..20: mol_type = other DNA
caaagtccactttctgacag

SEQ ID NO: 186126 - DNA, 20 bp, synthetic construct
  source 1..20: mol_type = other DNA
acaaagtccactttctgaca

SEQ ID NO: 186127 - DNA, 20 bp, synthetic construct
  source 1..20: mol_type = other DNA
tacaaagtccactttctgac

SEQ ID NO: 186128 - DNA, 20 bp, synthetic construct
  source 1..20: mol_type = other DNA
ttacaaagtccactttctga

SEQ ID NO: 186129 - DNA, 20 bp, synthetic construct
  source 1..20: mol_type = other DNA
tttacaaagtccactttctg

SEQ ID NO: 186130 - DNA, 20 bp, synthetic construct
  source 1..20: mol_type = other DNA
gtttacaaagtccactttct

SEQ ID NO: 186131 - DNA, 20 bp, synthetic construct
  source 1..20: mol_type = other DNA
tgtttacaaagtccactttc

SEQ ID NO: 186132 - DNA, 20 bp, synthetic construct
  source 1..20: mol_type = other DNA
gtgtttacaaagtccacttt

SEQ ID NO: 186133 - DNA, 20 bp, synthetic construct
  source 1..20: mol_type = other DNA
tgtgtttacaaagtccactt

SEQ ID NO: 186134 - DNA, 20 bp, synthetic construct
  source 1..20: mol_type = other DNA
ctgtgtttacaaagtccact

SEQ ID NO: 186135 - DNA, 20 bp, synthetic construct
  source 1..20: mol_type = other DNA
actgtgtttacaaagtccac

SEQ ID NO: 186136 - DNA, 20 bp, synthetic construct
  source 1..20: mol_type = other DNA
tactgtgtttacaaagtcca

SEQ ID NO: 186137 - DNA, 20 bp, synthetic construct
  source 1..20: mol_type = other DNA
gtactgtgtttacaaagtcc

SEQ ID NO: 186138 - DNA, 20 bp, synthetic construct
  source 1..20: mol_type = other DNA
ggtactgtgtttacaaagtc

SEQ ID NO: 186139 - DNA, 20 bp, synthetic construct
  source 1..20: mol_type = other DNA
tggtactgtgtttacaaagt

SEQ ID NO: 186140 - DNA, 20 bp, synthetic construct
  source 1..20: mol_type = other DNA
gtggtactgtgtttacaaag

SEQ ID NO: 186141 - DNA, 20 bp, synthetic construct
  source 1..20: mol_type = other DNA
ggtggtactgtgtttacaaa

SEQ ID NO: 186142 - DNA, 20 bp, synthetic construct
  source 1..20: mol_type = other DNA
cggtggtactgtgtttacaa

SEQ ID NO: 186143 - DNA, 20 bp, synthetic construct
  source 1..20: mol_type = other DNA
tcggtggtactgtgtttaca

SEQ ID NO: 186144 - DNA, 20 bp, synthetic construct
  source 1..20: mol_type = other DNA
ttcggtggtactgtgtttac

SEQ ID NO: 186145 - DNA, 20 bp, synthetic construct
  source 1..20: mol_type = other DNA
gttcggtggtactgtgttta

SEQ ID NO: 186146 - DNA, 20 bp, synthetic construct
  source 1..20: mol_type = other DNA
ggttcggtggtactgtgttt

SEQ ID NO: 186147 - DNA, 20 bp, synthetic construct
  source 1..20: mol_type = other DNA
tggttcggtggtactgtgtt

SEQ ID NO: 186148 - DNA, 20 bp, synthetic construct
  source 1..20: mol_type = other DNA
ttggttcggtggtactgtgt

SEQ ID NO: 186149 - DNA, 20 bp, synthetic construct
  source 1..20: mol_type = other DNA
attggttcggtggtactgtg

SEQ ID NO: 186150 - DNA, 20 bp, synthetic construct
  source 1..20: mol_type = other DNA
aattggttcggtggtactgt

SEQ ID NO: 186151 - DNA, 20 bp, synthetic construct
  source 1..20: mol_type = other DNA
aaattggttcggtggtactg

SEQ ID NO: 186152 - DNA, 20 bp, synthetic construct
  source 1..20: mol_type = other DNA
caaattggttcggtggtact

SEQ ID NO: 186153 - DNA, 20 bp, synthetic construct
  source 1..20: mol_type = other DNA
tcaaattggttcggtggtac

SEQ ID NO: 186154 - DNA, 20 bp, synthetic construct
  source 1..20: mol_type = other DNA
ttcaaattggttcggtggta

SEQ ID NO: 186155 - DNA, 20 bp, synthetic construct
  source 1..20: mol_type = other DNA
gttcaaattggttcggtggt

SEQ ID NO: 186156 - DNA, 20 bp, synthetic construct
  source 1..20: mol_type = other DNA
agttcaaattggttcggtgg

SEQ ID NO: 186157 - DNA, 20 bp, synthetic construct
  source 1..20: mol_type = other DNA
cagttcaaattggttcggtg

SEQ ID NO: 186158 - DNA, 20 bp, synthetic construct
  source 1..20: mol_type = other DNA
acagttcaaattggttcggt

SEQ ID NO: 186159 - DNA, 20 bp, synthetic construct
  source 1..20: mol_type = other DNA
tacagttcaaattggttcgg

SEQ ID NO: 186160 - DNA, 20 bp, synthetic construct
  source 1..20: mol_type = other DNA
gtacagttcaaattggttcg

SEQ ID NO: 186161 - DNA, 20 bp, synthetic construct
  source 1..20: mol_type = other DNA
agtacagttcaaattggttc

SEQ ID NO: 186162 - DNA, 20 bp, synthetic construct
  source 1..20: mol_type = other DNA
tagtacagttcaaattggtt

SEQ ID NO: 186163 - DNA, 20 bp, synthetic construct
  source 1..20: mol_type = other DNA
gtagtacagttcaaattggt

SEQ ID NO: 186164 - DNA, 20 bp, synthetic construct
  source 1..20: mol_type = other DNA
ggtagtacagttcaaattgg

SEQ ID NO: 186165 - DNA, 20 bp, synthetic construct
  source 1..20: mol_type = other DNA
aggtagtacagttcaaattg

SEQ ID NO: 186166 - DNA, 20 bp, synthetic construct
  source 1..20: mol_type = other DNA
gaggtagtacagttcaaatt

SEQ ID NO: 186167 - DNA, 20 bp, synthetic construct
  source 1..20: mol_type = other DNA
agaggtagtacagttcaaat

SEQ ID NO: 186168 - DNA, 20 bp, synthetic construct
  source 1..20: mol_type = other DNA
tagaggtagtacagttcaaa

SEQ ID NO: 186169 - DNA, 20 bp, synthetic construct
  source 1..20: mol_type = other DNA
ctagaggtagtacagttcaa

SEQ ID NO: 186170 - DNA, 20 bp, synthetic construct
  source 1..20: mol_type = other DNA
tctagaggtagtacagttca

SEQ ID NO: 186171 - DNA, 20 bp, synthetic construct
  source 1..20: mol_type = other DNA
gtctagaggtagtacagttc

SEQ ID NO: 186172 - DNA, 20 bp, synthetic construct
  source 1..20: mol_type = other DNA
tgtctagaggtagtacagtt

SEQ ID NO: 186173 - DNA, 20 bp, synthetic construct
  source 1..20: mol_type = other DNA
ttgtctagaggtagtacagt

SEQ ID NO: 186174 - DNA, 20 bp, synthetic construct
  source 1..20: mol_type = other DNA
tttgtctagaggtagtacag

SEQ ID NO: 186175 - DNA, 20 bp, synthetic construct
  source 1..20: mol_type = other DNA
ttttgtctagaggtagtaca

SEQ ID NO: 186176 - DNA, 20 bp, synthetic construct
  source 1..20: mol_type = other DNA
cttttgtctagaggtagtac

SEQ ID NO: 186177 - DNA, 20 bp, synthetic construct
  source 1..20: mol_type = other DNA
tcttttgtctagaggtagta

SEQ ID NO: 186178 - DNA, 20 bp, synthetic construct
  source 1..20: mol_type = other DNA
ctcttttgtctagaggtagt

SEQ ID NO: 186179 - DNA, 20 bp, synthetic construct
  source 1..20: mol_type = other DNA
tctcttttgtctagaggtag

SEQ ID NO: 186180 - DNA, 20 bp, synthetic construct
  source 1..20: mol_type = other DNA
ctctcttttgtctagaggta

SEQ ID NO: 186181 - DNA, 20 bp, synthetic construct
  source 1..20: mol_type = other DNA
cctctcttttgtctagaggt

SEQ ID NO: 186182 - DNA, 20 bp, synthetic construct
  source 1..20: mol_type = other DNA
ccctctcttttgtctagagg

SEQ ID NO: 186183 - DNA, 20 bp, synthetic construct
  source 1..20: mol_type = other DNA
gccctctcttttgtctagag

SEQ ID NO: 186184 - DNA, 20 bp, synthetic construct
  source 1..20: mol_type = other DNA
tgccctctcttttgtctaga

SEQ ID NO: 186185 - DNA, 20 bp, synthetic construct
  source 1..20: mol_type = other DNA
ctgccctctcttttgtctag

SEQ ID NO: 186186 - DNA, 20 bp, synthetic construct
  source 1..20: mol_type = other DNA
actgccctctcttttgtcta

SEQ ID NO: 186187 - DNA, 20 bp, synthetic construct
  source 1..20: mol_type = other DNA
gactgccctctcttttgtct

SEQ ID NO: 186188 - DNA, 20 bp, synthetic construct
  source 1..20: mol_type = other DNA
tgactgccctctcttttgtc

SEQ ID NO: 186189 - DNA, 20 bp, synthetic construct
  source 1..20: mol_type = other DNA
ctgactgccctctcttttgt

SEQ ID NO: 186190 - DNA, 20 bp, synthetic construct
  source 1..20: mol_type = other DNA
tctgactgccctctcttttg

SEQ ID NO: 186191 - DNA, 20 bp, synthetic construct
  source 1..20: mol_type = other DNA
gtctgactgccctctctttt

SEQ ID NO: 186192 - DNA, 20 bp, synthetic construct
  source 1..20: mol_type = other DNA
tgtctgactgccctctcttt

SEQ ID NO: 186193 - DNA, 20 bp, synthetic construct
  source 1..20: mol_type = other DNA
ctgtctgactgccctctctt

SEQ ID NO: 186194 - DNA, 20 bp, synthetic construct
  source 1..20: mol_type = other DNA
actgtctgactgccctctct

SEQ ID NO: 186195 - DNA, 20 bp, synthetic construct
  source 1..20: mol_type = other DNA
aactgtctgactgccctctc

SEQ ID NO: 186196 - DNA, 20 bp, synthetic construct
  source 1..20: mol_type = other DNA
caactgtctgactgccctct

SEQ ID NO: 186197 - DNA, 20 bp, synthetic construct
  source 1..20: mol_type = other DNA
acaactgtctgactgccctc

SEQ ID NO: 186198 - DNA, 20 bp, synthetic construct
  source 1..20: mol_type = other DNA
aacaactgtctgactgccct

SEQ ID NO: 186199 - DNA, 20 bp, synthetic construct
  source 1..20: mol_type = other DNA
gaacaactgtctgactgccc

SEQ ID NO: 186200 - DNA, 20 bp, synthetic construct
  source 1..20: mol_type = other DNA
cgaacaactgtctgactgcc

SEQ ID NO: 186201 - DNA, 20 bp, synthetic construct
  source 1..20: mol_type = other DNA
acgaacaactgtctgactgc

SEQ ID NO: 186202 - DNA, 20 bp, synthetic construct
  source 1..20: mol_type = other DNA
cacgaacaactgtctgactg

SEQ ID NO: 186203 - DNA, 20 bp, synthetic construct
  source 1..20: mol_type = other DNA
tcacgaacaactgtctgact

SEQ ID NO: 186204 - DNA, 20 bp, synthetic construct
  source 1..20: mol_type = other DNA
atcacgaacaactgtctgac

SEQ ID NO: 186205 - DNA, 20 bp, synthetic construct
  source 1..20: mol_type = other DNA
aatcacgaacaactgtctga

SEQ ID NO: 186206 - DNA, 20 bp, synthetic construct
  source 1..20: mol_type = other DNA
aaatcacgaacaactgtctg

SEQ ID NO: 186207 - DNA, 20 bp, synthetic construct
  source 1..20: mol_type = other DNA
gaaatcacgaacaactgtct

SEQ ID NO: 186208 - DNA, 20 bp, synthetic construct
  source 1..20: mol_type = other DNA
agaaatcacgaacaactgtc

SEQ ID NO: 186209 - DNA, 20 bp, synthetic construct
  source 1..20: mol_type = other DNA
aagaaatcacgaacaactgt

SEQ ID NO: 186210 - DNA, 20 bp, synthetic construct
  source 1..20: mol_type = other DNA
gaagaaatcacgaacaactg

SEQ ID NO: 186211 - DNA, 20 bp, synthetic construct
  source 1..20: mol_type = other DNA
agaagaaatcacgaacaact

SEQ ID NO: 186212 - DNA, 20 bp, synthetic construct
  source 1..20: mol_type = other DNA
aagaagaaatcacgaacaac

SEQ ID NO: 186213 - DNA, 20 bp, synthetic construct
  source 1..20: mol_type = other DNA
aaagaagaaatcacgaacaa

SEQ ID NO: 186214 - DNA, 20 bp, synthetic construct
  source 1..20: mol_type = other DNA
gaaagaagaaatcacgaaca

SEQ ID NO: 186215 - DNA, 20 bp, synthetic construct
  source 1..20: mol_type = other DNA
tgaaagaagaaatcacgaac

SEQ ID NO: 186216 - DNA, 20 bp, synthetic construct
  source 1..20: mol_type = other DNA
ttgaaagaagaaatcacgaa

SEQ ID NO: 186217 - DNA, 20 bp, synthetic construct
  source 1..20: mol_type = other DNA
gttgaaagaagaaatcacga

SEQ ID NO: 186218 - DNA, 20 bp, synthetic construct
  source 1..20: mol_type = other DNA
tgttgaaagaagaaatcacg

SEQ ID NO: 186219 - DNA, 20 bp, synthetic construct
  source 1..20: mol_type = other DNA
ctgttgaaagaagaaatcac

SEQ ID NO: 186220 - DNA, 20 bp, synthetic construct
  source 1..20: mol_type = other DNA
actgttgaaagaagaaatca

SEQ ID NO: 186221 - DNA, 20 bp, synthetic construct
  source 1..20: mol_type = other DNA
gactgttgaaagaagaaatc

SEQ ID NO: 186222 - DNA, 20 bp, synthetic construct
  source 1..20: mol_type = other DNA
tgactgttgaaagaagaaat

SEQ ID NO: 186223 - DNA, 20 bp, synthetic construct
  source 1..20: mol_type = other DNA
atgactgttgaaagaagaaa

SEQ ID NO: 186224 - DNA, 20 bp, synthetic construct
  source 1..20: mol_type = other DNA
aatgactgttgaaagaagaa

SEQ ID NO: 186225 - DNA, 20 bp, synthetic construct
  source 1..20: mol_type = other DNA
aaatgactgttgaaagaaga

SEQ ID NO: 186226 - DNA, 20 bp, synthetic construct
  source 1..20: mol_type = other DNA
caaatgactgttgaaagaag

SEQ ID NO: 186227 - DNA, 20 bp, synthetic construct
  source 1..20: mol_type = other DNA
tcaaatgactgttgaaagaa

SEQ ID NO: 186228 - DNA, 20 bp, synthetic construct
  source 1..20: mol_type = other DNA
ctcaaatgactgttgaaaga

SEQ ID NO: 186229 - DNA, 20 bp, synthetic construct
  source 1..20: mol_type = other DNA
gctcaaatgactgttgaaag

SEQ ID NO: 186230 - DNA, 20 bp, synthetic construct
  source 1..20: mol_type = other DNA
tgctcaaatgactgttgaaa

SEQ ID NO: 186231 - DNA, 20 bp, synthetic construct
  source 1..20: mol_type = other DNA
gtgctcaaatgactgttgaa

SEQ ID NO: 186232 - DNA, 20 bp, synthetic construct
  source 1..20: mol_type = other DNA
agtgctcaaatgactgttga

SEQ ID NO: 186233 - DNA, 20 bp, synthetic construct
  source 1..20: mol_type = other DNA
aagtgctcaaatgactgttg

SEQ ID NO: 186234 - DNA, 20 bp, synthetic construct
  source 1..20: mol_type = other DNA
taagtgctcaaatgactgtt

SEQ ID NO: 186235 - DNA, 20 bp, synthetic construct
  source 1..20: mol_type = other DNA
gtaagtgctcaaatgactgt

SEQ ID NO: 186236 - DNA, 20 bp, synthetic construct
  source 1..20: mol_type = other DNA
agtaagtgctcaaatgactg

SEQ ID NO: 186237 - DNA, 20 bp, synthetic construct
  source 1..20: mol_type = other DNA
tagtaagtgctcaaatgact

SEQ ID NO: 186238 - DNA, 20 bp, synthetic construct
  source 1..20: mol_type = other DNA
gtagtaagtgctcaaatgac

SEQ ID NO: 186239 - DNA, 20 bp, synthetic construct
  source 1..20: mol_type = other DNA
tgtagtaagtgctcaaatga

SEQ ID NO: 186240 - DNA, 20 bp, synthetic construct
  source 1..20: mol_type = other DNA
ttgtagtaagtgctcaaatg

SEQ ID NO: 186241 - DNA, 20 bp, synthetic construct
  source 1..20: mol_type = other DNA
tttgtagtaagtgctcaaat

SEQ ID NO: 186242 - DNA, 20 bp, synthetic construct
  source 1..20: mol_type = other DNA
ttttgtagtaagtgctcaaa

SEQ ID NO: 186243 - DNA, 20 bp, synthetic construct
  source 1..20: mol_type = other DNA
gttttgtagtaagtgctcaa

SEQ ID NO: 186244 - DNA, 20 bp, synthetic construct
  source 1..20: mol_type = other DNA
tgttttgtagtaagtgctca

SEQ ID NO: 186245 - DNA, 20 bp, synthetic construct
  source 1..20: mol_type = other DNA
ctgttttgtagtaagtgctc

SEQ ID NO: 186246 - DNA, 20 bp, synthetic construct
  source 1..20: mol_type = other DNA
tctgttttgtagtaagtgct

SEQ ID NO: 186247 - DNA, 20 bp, synthetic construct
  source 1..20: mol_type = other DNA
ttctgttttgtagtaagtgc

SEQ ID NO: 186248 - DNA, 20 bp, synthetic construct
  source 1..20: mol_type = other DNA
cttctgttttgtagtaagtg

SEQ ID NO: 186249 - DNA, 20 bp, synthetic construct
  source 1..20: mol_type = other DNA
gcttctgttttgtagtaagt

SEQ ID NO: 186250 - DNA, 20 bp, synthetic construct
  source 1..20: mol_type = other DNA
agcttctgttttgtagtaag

SEQ ID NO: 186251 - DNA, 20 bp, synthetic construct
  source 1..20: mol_type = other DNA
tagcttctgttttgtagtaa

SEQ ID NO: 186252 - DNA, 20 bp, synthetic construct
  source 1..20: mol_type = other DNA
atagcttctgttttgtagta

SEQ ID NO: 186253 - DNA, 20 bp, synthetic construct
  source 1..20: mol_type = other DNA
catagcttctgttttgtagt

SEQ ID NO: 186254 - DNA, 20 bp, synthetic construct
  source 1..20: mol_type = other DNA
acatagcttctgttttgtag

SEQ ID NO: 186255 - DNA, 20 bp, synthetic construct
  source 1..20: mol_type = other DNA
cacatagcttctgttttgta

SEQ ID NO: 186256 - DNA, 20 bp, synthetic construct
  source 1..20: mol_type = other DNA
acacatagcttctgttttgt

SEQ ID NO: 186257 - DNA, 20 bp, synthetic construct
  source 1..20: mol_type = other DNA
tacacatagcttctgttttg

SEQ ID NO: 186258 - DNA, 20 bp, synthetic construct
  source 1..20: mol_type = other DNA
ttacacatagcttctgtttt

SEQ ID NO: 186259 - DNA, 20 bp, synthetic construct
  source 1..20: mol_type = other DNA
cttacacatagcttctgttt

SEQ ID NO: 186260 - DNA, 20 bp, synthetic construct
  source 1..20: mol_type = other DNA
ccttacacatagcttctgtt

SEQ ID NO: 186261 - DNA, 20 bp, synthetic construct
  source 1..20: mol_type = other DNA
cccttacacatagcttctgt

SEQ ID NO: 186262 - DNA, 20 bp, synthetic construct
  source 1..20: mol_type = other DNA
acccttacacatagcttctg

SEQ ID NO: 186263 - DNA, 20 bp, synthetic construct
  source 1..20: mol_type = other DNA
cacccttacacatagcttct

SEQ ID NO: 186264 - DNA, 20 bp, synthetic construct
  source 1..20: mol_type = other DNA
ccacccttacacatagcttc

SEQ ID NO: 186265 - DNA, 20 bp, synthetic construct
  source 1..20: mol_type = other DNA
tccacccttacacatagctt

SEQ ID NO: 186266 - DNA, 20 bp, synthetic construct
  source 1..20: mol_type = other DNA
ctccacccttacacatagct

SEQ ID NO: 186267 - DNA, 20 bp, synthetic construct
  source 1..20: mol_type = other DNA
cctccacccttacacatagc

SEQ ID NO: 186268 - DNA, 20 bp, synthetic construct
  source 1..20: mol_type = other DNA
gcctccacccttacacatag

SEQ ID NO: 186269 - DNA, 20 bp, synthetic construct
  source 1..20: mol_type = other DNA
cgcctccacccttacacata

SEQ ID NO: 186270 - DNA, 20 bp, synthetic construct
  source 1..20: mol_type = other DNA
acgcctccacccttacacat

SEQ ID NO: 186271 - DNA, 20 bp, synthetic construct
  source 1..20: mol_type = other DNA
aacgcctccacccttacaca

SEQ ID NO: 186272 - DNA, 20 bp, synthetic construct
  source 1..20: mol_type = other DNA
taacgcctccacccttacac

SEQ ID NO: 186273 - DNA, 20 bp, synthetic construct
  source 1..20: mol_type = other DNA
ctaacgcctccacccttaca

SEQ ID NO: 186274 - DNA, 20 bp, synthetic construct
  source 1..20: mol_type = other DNA
gctaacgcctccacccttac

SEQ ID NO: 186275 - DNA, 20 bp, synthetic construct
  source 1..20: mol_type = other DNA
agctaacgcctccaccctta

SEQ ID NO: 186276 - DNA, 20 bp, synthetic construct
  source 1..20: mol_type = other DNA
cagctaacgcctccaccctt

SEQ ID NO: 186277 - DNA, 20 bp, synthetic construct
  source 1..20: mol_type = other DNA
acagctaacgcctccaccct

SEQ ID NO: 186278 - DNA, 20 bp, synthetic construct
  source 1..20: mol_type = other DNA
aacagctaacgcctccaccc

SEQ ID NO: 186279 - DNA, 20 bp, synthetic construct
  source 1..20: mol_type = other DNA
taacagctaacgcctccacc

SEQ ID NO: 186280 - DNA, 20 bp, synthetic construct
  source 1..20: mol_type = other DNA
ttaacagctaacgcctccac

SEQ ID NO: 186281 - DNA, 20 bp, synthetic construct
  source 1..20: mol_type = other DNA
attaacagctaacgcctcca

SEQ ID NO: 186282 - DNA, 20 bp, synthetic construct
  source 1..20: mol_type = other DNA
gattaacagctaacgcctcc

SEQ ID NO: 186283 - DNA, 20 bp, synthetic construct
  source 1..20: mol_type = other DNA
tgattaacagctaacgcctc

SEQ ID NO: 186284 - DNA, 20 bp, synthetic construct
  source 1..20: mol_type = other DNA
ctgattaacagctaacgcct

SEQ ID NO: 186285 - DNA, 20 bp, synthetic construct
  source 1..20: mol_type = other DNA
cctgattaacagctaacgcc

SEQ ID NO: 186286 - DNA, 20 bp, synthetic construct
  source 1..20: mol_type = other DNA
tcctgattaacagctaacgc

SEQ ID NO: 186287 - DNA, 20 bp, synthetic construct
  source 1..20: mol_type = other DNA
gtcctgattaacagctaacg

SEQ ID NO: 186288 - DNA, 20 bp, synthetic construct
  source 1..20: mol_type = other DNA
ggtcctgattaacagctaac

SEQ ID NO: 186289 - DNA, 20 bp, synthetic construct
  source 1..20: mol_type = other DNA
aggtcctgattaacagctaa

SEQ ID NO: 186290 - DNA, 20 bp, synthetic construct
  source 1..20: mol_type = other DNA
gaggtcctgattaacagcta

SEQ ID NO: 186291 - DNA, 20 bp, synthetic construct
  source 1..20: mol_type = other DNA
ggaggtcctgattaacagct

SEQ ID NO: 186292 - DNA, 20 bp, synthetic construct
  source 1..20: mol_type = other DNA
tggaggtcctgattaacagc

SEQ ID NO: 186293 - DNA, 20 bp, synthetic construct
  source 1..20: mol_type = other DNA
ctggaggtcctgattaacag

SEQ ID NO: 186294 - DNA, 20 bp, synthetic construct
  source 1..20: mol_type = other DNA
cctggaggtcctgattaaca

SEQ ID NO: 186295 - DNA, 20 bp, synthetic construct
  source 1..20: mol_type = other DNA
gcctggaggtcctgattaac

SEQ ID NO: 186296 - DNA, 20 bp, synthetic construct
  source 1..20: mol_type = other DNA
agcctggaggtcctgattaa

SEQ ID NO: 186297 - DNA, 20 bp, synthetic construct
  source 1..20: mol_type = other DNA
tagcctggaggtcctgatta

SEQ ID NO: 186298 - DNA, 20 bp, synthetic construct
  source 1..20: mol_type = other DNA
ttagcctggaggtcctgatt

SEQ ID NO: 186299 - DNA, 20 bp, synthetic construct
  source 1..20: mol_type = other DNA
cttagcctggaggtcctgat

SEQ ID NO: 186300 - DNA, 20 bp, synthetic construct
  source 1..20: mol_type = other DNA
acttagcctggaggtcctga

SEQ ID NO: 186301 - DNA, 20 bp, synthetic construct
  source 1..20: mol_type = other DNA
aacttagcctggaggtcctg

SEQ ID NO: 186302 - DNA, 20 bp, synthetic construct
  source 1..20: mol_type = other DNA
aaacttagcctggaggtcct

SEQ ID NO: 186303 - DNA, 20 bp, synthetic construct
  source 1..20: mol_type = other DNA
gaaacttagcctggaggtcc

SEQ ID NO: 186304 - DNA, 20 bp, synthetic construct
  source 1..20: mol_type = other DNA
agaaacttagcctggaggtc

SEQ ID NO: 186305 - DNA, 20 bp, synthetic construct
  source 1..20: mol_type = other DNA
cagaaacttagcctggaggt

SEQ ID NO: 186306 - DNA, 20 bp, synthetic construct
  source 1..20: mol_type = other DNA
acagaaacttagcctggagg

SEQ ID NO: 186307 - DNA, 20 bp, synthetic construct
  source 1..20: mol_type = other DNA
tacagaaacttagcctggag

SEQ ID NO: 186308 - DNA, 20 bp, synthetic construct
  source 1..20: mol_type = other DNA
atacagaaacttagcctgga

SEQ ID NO: 186309 - DNA, 20 bp, synthetic construct
  source 1..20: mol_type = other DNA
aatacagaaacttagcctgg

SEQ ID NO: 186310 - DNA, 20 bp, synthetic construct
  source 1..20: mol_type = other DNA
taatacagaaacttagcctg

SEQ ID NO: 186311 - DNA, 20 bp, synthetic construct
  source 1..20: mol_type = other DNA
ctaatacagaaacttagcct

SEQ ID NO: 186312 - DNA, 20 bp, synthetic construct
  source 1..20: mol_type = other DNA
actaatacagaaacttagcc

SEQ ID NO: 186313 - DNA, 20 bp, synthetic construct
  source 1..20: mol_type = other DNA
gactaatacagaaacttagc

SEQ ID NO: 186314 - DNA, 20 bp, synthetic construct
  source 1..20: mol_type = other DNA
ggactaatacagaaacttag

SEQ ID NO: 186315 - DNA, 20 bp, synthetic construct
  source 1..20: mol_type = other DNA
cggactaatacagaaactta

SEQ ID NO: 186316 - DNA, 20 bp, synthetic construct
  source 1..20: mol_type = other DNA
acggactaatacagaaactt

SEQ ID NO: 186317 - DNA, 20 bp, synthetic construct
  source 1..20: mol_type = other DNA
aacggactaatacagaaact

SEQ ID NO: 186318 - DNA, 20 bp, synthetic construct
  source 1..20: mol_type = other DNA
aaacggactaatacagaaac

SEQ ID NO: 186319 - DNA, 20 bp, synthetic construct
  source 1..20: mol_type = other DNA
aaaacggactaatacagaaa

SEQ ID NO: 186320 - DNA, 20 bp, synthetic construct
  source 1..20: mol_type = other DNA
gaaaacggactaatacagaa

SEQ ID NO: 186321 - DNA, 20 bp, synthetic construct
  source 1..20: mol_type = other DNA
tgaaaacggactaatacaga

SEQ ID NO: 186322 - DNA, 20 bp, synthetic construct
  source 1..20: mol_type = other DNA
gtgaaaacggactaatacag

SEQ ID NO: 186323 - DNA, 20 bp, synthetic construct
  source 1..20: mol_type = other DNA
cgtgaaaacggactaataca

SEQ ID NO: 186324 - DNA, 20 bp, synthetic construct
  source 1..20: mol_type = other DNA
gcgtgaaaacggactaatac

SEQ ID NO: 186325 - DNA, 20 bp, synthetic construct
  source 1..20: mol_type = other DNA
agcgtgaaaacggactaata

SEQ ID NO: 186326 - DNA, 20 bp, synthetic construct
  source 1..20: mol_type = other DNA
cagcgtgaaaacggactaat

SEQ ID NO: 186327 - DNA, 20 bp, synthetic construct
  source 1..20: mol_type = other DNA
gcagcgtgaaaacggactaa

SEQ ID NO: 186328 - DNA, 20 bp, synthetic construct
  source 1..20: mol_type = other DNA
agcagcgtgaaaacggacta

SEQ ID NO: 186329 - DNA, 20 bp, synthetic construct
  source 1..20: mol_type = other DNA
cagcagcgtgaaaacggact

SEQ ID NO: 186330 - DNA, 20 bp, synthetic construct
  source 1..20: mol_type = other DNA
tcagcagcgtgaaaacggac

SEQ ID NO: 186331 - DNA, 20 bp, synthetic construct
  source 1..20: mol_type = other DNA
atcagcagcgtgaaaacgga

SEQ ID NO: 186332 - DNA, 20 bp, synthetic construct
  source 1..20: mol_type = other DNA
tatcagcagcgtgaaaacgg

SEQ ID NO: 186333 - DNA, 20 bp, synthetic construct
  source 1..20: mol_type = other DNA
ttatcagcagcgtgaaaacg

SEQ ID NO: 186334 - DNA, 20 bp, synthetic construct
  source 1..20: mol_type = other DNA
tttatcagcagcgtgaaaac

SEQ ID NO: 186335 - DNA, 20 bp, synthetic construct
  source 1..20: mol_type = other DNA
ctttatcagcagcgtgaaaa

SEQ ID NO: 186336 - DNA, 20 bp, synthetic construct
  source 1..20: mol_type = other DNA
tctttatcagcagcgtgaaa

SEQ ID NO: 186337 - DNA, 20 bp, synthetic construct
  source 1..20: mol_type = other DNA
gtctttatcagcagcgtgaa

SEQ ID NO: 186338 - DNA, 20 bp, synthetic construct
  source 1..20: mol_type = other DNA
tgtctttatcagcagcgtga

SEQ ID NO: 186339 - DNA, 20 bp, synthetic construct
  source 1..20: mol_type = other DNA
atgtctttatcagcagcgtg

SEQ ID NO: 186340 - DNA, 20 bp, synthetic construct
  source 1..20: mol_type = other DNA
tatgtctttatcagcagcgt

SEQ ID NO: 186341 - DNA, 20 bp, synthetic construct
  source 1..20: mol_type = other DNA
gtatgtctttatcagcagcg

SEQ ID NO: 186342 - DNA, 20 bp, synthetic construct
  source 1..20: mol_type = other DNA
ggtatgtctttatcagcagc

SEQ ID NO: 186343 - DNA, 20 bp, synthetic construct
  source 1..20: mol_type = other DNA
gggtatgtctttatcagcag

SEQ ID NO: 186344 - DNA, 20 bp, synthetic construct
  source 1..20: mol_type = other DNA
cgggtatgtctttatcagca

SEQ ID NO: 186345 - DNA, 20 bp, synthetic construct
  source 1..20: mol_type = other DNA
tcgggtatgtctttatcagc

SEQ ID NO: 186346 - DNA, 20 bp, synthetic construct
  source 1..20: mol_type = other DNA
ctcgggtatgtctttatcag

SEQ ID NO: 186347 - DNA, 20 bp, synthetic construct
  source 1..20: mol_type = other DNA
tctcgggtatgtctttatca

SEQ ID NO: 186348 - DNA, 20 bp, synthetic construct
  source 1..20: mol_type = other DNA
gtctcgggtatgtctttatc

SEQ ID NO: 186349 - DNA, 20 bp, synthetic construct
  source 1..20: mol_type = other DNA
agtctcgggtatgtctttat

SEQ ID NO: 186350 - DNA, 20 bp, synthetic construct
  source 1..20: mol_type = other DNA
cagtctcgggtatgtcttta

SEQ ID NO: 186351 - DNA, 20 bp, synthetic construct
  source 1..20: mol_type = other DNA
ccagtctcgggtatgtcttt

SEQ ID NO: 186352 - DNA, 20 bp, synthetic construct
  source 1..20: mol_type = other DNA
cccagtctcgggtatgtctt

SEQ ID NO: 186353 - DNA, 20 bp, synthetic construct
  source 1..20: mol_type = other DNA
ccccagtctcgggtatgtct

SEQ ID NO: 186354 - DNA, 20 bp, synthetic construct
  source 1..20: mol_type = other DNA
tccccagtctcgggtatgtc

SEQ ID NO: 186355 - DNA, 20 bp, synthetic construct
  source 1..20: mol_type = other DNA
ttccccagtctcgggtatgt

SEQ ID NO: 186356 - DNA, 20 bp, synthetic construct
  source 1..20: mol_type = other DNA
attccccagtctcgggtatg

SEQ ID NO: 186357 - DNA, 20 bp, synthetic construct
  source 1..20: mol_type = other DNA
aattccccagtctcgggtat

SEQ ID NO: 186358 - DNA, 20 bp, synthetic construct
  source 1..20: mol_type = other DNA
aaattccccagtctcgggta

SEQ ID NO: 186359 - DNA, 20 bp, synthetic construct
  source 1..20: mol_type = other DNA
taaattccccagtctcgggt

SEQ ID NO: 186360 - DNA, 20 bp, synthetic construct
  source 1..20: mol_type = other DNA
gtaaattccccagtctcggg

SEQ ID NO: 186361 - DNA, 20 bp, synthetic construct
  source 1..20: mol_type = other DNA
tgtaaattccccagtctcgg

SEQ ID NO: 186362 - DNA, 20 bp, synthetic construct
  source 1..20: mol_type = other DNA
ttgtaaattccccagtctcg

SEQ ID NO: 186363 - DNA, 20 bp, synthetic construct
  source 1..20: mol_type = other DNA
tttgtaaattccccagtctc

SEQ ID NO: 186364 - DNA, 20 bp, synthetic construct
  source 1..20: mol_type = other DNA
ttttgtaaattccccagtct

SEQ ID NO: 186365 - DNA, 20 bp, synthetic construct
  source 1..20: mol_type = other DNA
cttttgtaaattccccagtc

SEQ ID NO: 186366 - DNA, 20 bp, synthetic construct
  source 1..20: mol_type = other DNA
tcttttgtaaattccccagt

SEQ ID NO: 186367 - DNA, 20 bp, synthetic construct
  source 1..20: mol_type = other DNA
ttcttttgtaaattccccag

SEQ ID NO: 186368 - DNA, 20 bp, synthetic construct
  source 1..20: mol_type = other DNA
tttcttttgtaaattcccca

SEQ ID NO: 186369 - DNA, 20 bp, synthetic construct
  source 1..20: mol_type = other DNA
ctttcttttgtaaattcccc

SEQ ID NO: 186370 - DNA, 20 bp, synthetic construct
  source 1..20: mol_type = other DNA
tctttcttttgtaaattccc

SEQ ID NO: 186371 - DNA, 20 bp, synthetic construct
  source 1..20: mol_type = other DNA
ctctttcttttgtaaattcc

SEQ ID NO: 186372 - DNA, 20 bp, synthetic construct
  source 1..20: mol_type = other DNA
cctctttcttttgtaaattc

SEQ ID NO: 186373 - DNA, 20 bp, synthetic construct
  source 1..20: mol_type = other DNA
acctctttcttttgtaaatt

SEQ ID NO: 186374 - DNA, 20 bp, synthetic construct
  source 1..20: mol_type = other DNA
aacctctttcttttgtaaat

SEQ ID NO: 186375 - DNA, 20 bp, synthetic construct
  source 1..20: mol_type = other DNA
aaacctctttcttttgtaaa

SEQ ID NO: 186376 - DNA, 20 bp, synthetic construct
  source 1..20: mol_type = other DNA
taaacctctttcttttgtaa

SEQ ID NO: 186377 - DNA, 20 bp, synthetic construct
  source 1..20: mol_type = other DNA
ttaaacctctttcttttgta

SEQ ID NO: 186378 - DNA, 20 bp, synthetic construct
  source 1..20: mol_type = other DNA
attaaacctctttcttttgt

SEQ ID NO: 186379 - DNA, 20 bp, synthetic construct
  source 1..20: mol_type = other DNA
aattaaacctctttcttttg

SEQ ID NO: 186380 - DNA, 20 bp, synthetic construct
  source 1..20: mol_type = other DNA
caattaaacctctttctttt

SEQ ID NO: 186381 - DNA, 20 bp, synthetic construct
  source 1..20: mol_type = other DNA
ccaattaaacctctttcttt

SEQ ID NO: 186382 - DNA, 20 bp, synthetic construct
  source 1..20: mol_type = other DNA
tccaattaaacctctttctt

SEQ ID NO: 186383 - DNA, 20 bp, synthetic construct
  source 1..20: mol_type = other DNA
gtccaattaaacctctttct

SEQ ID NO: 186384 - DNA, 20 bp, synthetic construct
  source 1..20: mol_type = other DNA
agtccaattaaacctctttc

SEQ ID NO: 186385 - DNA, 20 bp, synthetic construct
  source 1..20: mol_type = other DNA
aagtccaattaaacctcttt

SEQ ID NO: 186386 - DNA, 20 bp, synthetic construct
  source 1..20: mol_type = other DNA
taagtccaattaaacctctt

SEQ ID NO: 186387 - DNA, 20 bp, synthetic construct
  source 1..20: mol_type = other DNA
gtaagtccaattaaacctct

SEQ ID NO: 186388 - DNA, 20 bp, synthetic construct
  source 1..20: mol_type = other DNA
tgtaagtccaattaaacctc

SEQ ID NO: 186389 - DNA, 20 bp, synthetic construct
  source 1..20: mol_type = other DNA
ctgtaagtccaattaaacct

SEQ ID NO: 186390 - DNA, 20 bp, synthetic construct
  source 1..20: mol_type = other DNA
actgtaagtccaattaaacc

SEQ ID NO: 186391 - DNA, 20 bp, synthetic construct
  source 1..20: mol_type = other DNA
aactgtaagtccaattaaac

SEQ ID NO: 186392 - DNA, 20 bp, synthetic construct
  source 1..20: mol_type = other DNA
gaactgtaagtccaattaaa

SEQ ID NO: 186393 - DNA, 20 bp, synthetic construct
  source 1..20: mol_type = other DNA
ggaactgtaagtccaattaa

SEQ ID NO: 186394 - DNA, 20 bp, synthetic construct
  source 1..20: mol_type = other DNA
tggaactgtaagtccaatta

SEQ ID NO: 186395 - DNA, 20 bp, synthetic construct
  source 1..20: mol_type = other DNA
ttggaactgtaagtccaatt

SEQ ID NO: 186396 - DNA, 20 bp, synthetic construct
  source 1..20: mol_type = other DNA
cttggaactgtaagtccaat

SEQ ID NO: 186397 - DNA, 20 bp, synthetic construct
  source 1..20: mol_type = other DNA
acttggaactgtaagtccaa

SEQ ID NO: 186398 - DNA, 20 bp, synthetic construct
  source 1..20: mol_type = other DNA
cacttggaactgtaagtcca

SEQ ID NO: 186399 - DNA, 20 bp, synthetic construct
  source 1..20: mol_type = other DNA
ccacttggaactgtaagtcc

SEQ ID NO: 186400 - DNA, 20 bp, synthetic construct
  source 1..20: mol_type = other DNA
gccacttggaactgtaagtc

SEQ ID NO: 186401 - DNA, 20 bp, synthetic construct
  source 1..20: mol_type = other DNA
agccacttggaactgtaagt

SEQ ID NO: 186402 - DNA, 20 bp, synthetic construct
  source 1..20: mol_type = other DNA
cagccacttggaactgtaag

SEQ ID NO: 186403 - DNA, 20 bp, synthetic construct
  source 1..20: mol_type = other DNA
ccagccacttggaactgtaa

SEQ ID NO: 186404 - DNA, 20 bp, synthetic construct
  source 1..20: mol_type = other DNA
cccagccacttggaactgta

SEQ ID NO: 186405 - DNA, 20 bp, synthetic construct
  source 1..20: mol_type = other DNA
ccccagccacttggaactgt

SEQ ID NO: 186406 - DNA, 20 bp, synthetic construct
  source 1..20: mol_type = other DNA
tccccagccacttggaactg

SEQ ID NO: 186407 - DNA, 20 bp, synthetic construct
  source 1..20: mol_type = other DNA
ttccccagccacttggaact

SEQ ID NO: 186408 - DNA, 20 bp, synthetic construct
  source 1..20: mol_type = other DNA
cttccccagccacttggaac

SEQ ID NO: 186409 - DNA, 20 bp, synthetic construct
  source 1..20: mol_type = other DNA
gcttccccagccacttggaa

SEQ ID NO: 186410 - DNA, 20 bp, synthetic construct
  source 1..20: mol_type = other DNA
ggcttccccagccacttgga

SEQ ID NO: 186411 - DNA, 20 bp, synthetic construct
  source 1..20: mol_type = other DNA
aggcttccccagccacttgg

SEQ ID NO: 186412 - DNA, 20 bp, synthetic construct
  source 1..20: mol_type = other DNA
gaggcttccccagccacttg

SEQ ID NO: 186413 - DNA, 20 bp, synthetic construct
  source 1..20: mol_type = other DNA
tgaggcttccccagccactt

SEQ ID NO: 186414 - DNA, 20 bp, synthetic construct
  source 1..20: mol_type = other DNA
gtgaggcttccccagccact

SEQ ID NO: 186415 - DNA, 20 bp, synthetic construct
  source 1..20: mol_type = other DNA
tgtgaggcttccccagccac

SEQ ID NO: 186416 - DNA, 20 bp, synthetic construct
  source 1..20: mol_type = other DNA
ttgtgaggcttccccagcca

SEQ ID NO: 186417 - DNA, 20 bp, synthetic construct
  source 1..20: mol_type = other DNA
attgtgaggcttccccagcc

SEQ ID NO: 186418 - DNA, 20 bp, synthetic construct
  source 1..20: mol_type = other DNA
gattgtgaggcttccccagc

SEQ ID NO: 186419 - DNA, 20 bp, synthetic construct
  source 1..20: mol_type = other DNA
tgattgtgaggcttccccag

SEQ ID NO: 186420 - DNA, 20 bp, synthetic construct
  source 1..20: mol_type = other DNA
atgattgtgaggcttcccca

SEQ ID NO: 186421 - DNA, 20 bp, synthetic construct
  source 1..20: mol_type = other DNA
catgattgtgaggcttcccc

SEQ ID NO: 186422 - DNA, 20 bp, synthetic construct
  source 1..20: mol_type = other DNA
ccatgattgtgaggcttccc

SEQ ID NO: 186423 - DNA, 20 bp, synthetic construct
  source 1..20: mol_type = other DNA
gccatgattgtgaggcttcc

SEQ ID NO: 186424 - DNA, 20 bp, synthetic construct
  source 1..20: mol_type = other DNA
tgccatgattgtgaggcttc

SEQ ID NO: 186425 - DNA, 20 bp, synthetic construct
  source 1..20: mol_type = other DNA
ctgccatgattgtgaggctt

SEQ ID NO: 186426 - DNA, 20 bp, synthetic construct
  source 1..20: mol_type = other DNA
tctgccatgattgtgaggct

SEQ ID NO: 186427 - DNA, 20 bp, synthetic construct
  source 1..20: mol_type = other DNA
ttctgccatgattgtgaggc

SEQ ID NO: 186428 - DNA, 20 bp, synthetic construct
  source 1..20: mol_type = other DNA
cttctgccatgattgtgagg

SEQ ID NO: 186429 - DNA, 20 bp, synthetic construct
  source 1..20: mol_type = other DNA
ccttctgccatgattgtgag

SEQ ID NO: 186430 - DNA, 20 bp, synthetic construct
  source 1..20: mol_type = other DNA
gccttctgccatgattgtga

SEQ ID NO: 186431 - DNA, 20 bp, synthetic construct
  source 1..20: mol_type = other DNA
tgccttctgccatgattgtg

SEQ ID NO: 186432 - DNA, 20 bp, synthetic construct
  source 1..20: mol_type = other DNA
ttgccttctgccatgattgt

SEQ ID NO: 186433 - DNA, 20 bp, synthetic construct
  source 1..20: mol_type = other DNA
cttgccttctgccatgattg

SEQ ID NO: 186434 - DNA, 20 bp, synthetic construct
  source 1..20: mol_type = other DNA
ccttgccttctgccatgatt

SEQ ID NO: 186435 - DNA, 20 bp, synthetic construct
  source 1..20: mol_type = other DNA
tccttgccttctgccatgat

SEQ ID NO: 186436 - DNA, 20 bp, synthetic construct
  source 1..20: mol_type = other DNA
ctccttgccttctgccatga

SEQ ID NO: 186437 - DNA, 20 bp, synthetic construct
  source 1..20: mol_type = other DNA
cctccttgccttctgccatg

SEQ ID NO: 186438 - DNA, 20 bp, synthetic construct
  source 1..20: mol_type = other DNA
tcctccttgccttctgccat

SEQ ID NO: 186439 - DNA, 20 bp, synthetic construct
  source 1..20: mol_type = other DNA
ctcctccttgccttctgcca

SEQ ID NO: 186440 - DNA, 20 bp, synthetic construct
  source 1..20: mol_type = other DNA
gctcctccttgccttctgcc

SEQ ID NO: 186441 - DNA, 20 bp, synthetic construct
  source 1..20: mol_type = other DNA
tgctcctccttgccttctgc

SEQ ID NO: 186442 - DNA, 20 bp, synthetic construct
  source 1..20: mol_type = other DNA
ttgctcctccttgccttctg

SEQ ID NO: 186443 - DNA, 20 bp, synthetic construct
  source 1..20: mol_type = other DNA
cttgctcctccttgccttct

SEQ ID NO: 186444 - DNA, 20 bp, synthetic construct
  source 1..20: mol_type = other DNA
gcttgctcctccttgccttc

SEQ ID NO: 186445 - DNA, 20 bp, synthetic construct
  source 1..20: mol_type = other DNA
ggcttgctcctccttgcctt

SEQ ID NO: 186446 - DNA, 20 bp, synthetic construct
  source 1..20: mol_type = other DNA
tggcttgctcctccttgcct

SEQ ID NO: 186447 - DNA, 20 bp, synthetic construct
  source 1..20: mol_type = other DNA
gtggcttgctcctccttgcc

SEQ ID NO: 186448 - DNA, 20 bp, synthetic construct
  source 1..20: mol_type = other DNA
tgtggcttgctcctccttgc

SEQ ID NO: 186449 - DNA, 20 bp, synthetic construct
  source 1..20: mol_type = other DNA
atgtggcttgctcctccttg

SEQ ID NO: 186450 - DNA, 20 bp, synthetic construct
  source 1..20: mol_type = other DNA
gatgtggcttgctcctcctt

SEQ ID NO: 186451 - DNA, 20 bp, synthetic construct
  source 1..20: mol_type = other DNA
agatgtggcttgctcctcct

SEQ ID NO: 186452 - DNA, 20 bp, synthetic construct
  source 1..20: mol_type = other DNA
aagatgtggcttgctcctcc

SEQ ID NO: 186453 - DNA, 20 bp, synthetic construct
  source 1..20: mol_type = other DNA
taagatgtggcttgctcctc

SEQ ID NO: 186454 - DNA, 20 bp, synthetic construct
  source 1..20: mol_type = other DNA
gtaagatgtggcttgctcct

SEQ ID NO: 186455 - DNA, 20 bp, synthetic construct
  source 1..20: mol_type = other DNA
tgtaagatgtggcttgctcc

SEQ ID NO: 186456 - DNA, 20 bp, synthetic construct
  source 1..20: mol_type = other DNA
atgtaagatgtggcttgctc

SEQ ID NO: 186457 - DNA, 20 bp, synthetic construct
  source 1..20: mol_type = other DNA
catgtaagatgtggcttgct

SEQ ID NO: 186458 - DNA, 20 bp, synthetic construct
  source 1..20: mol_type = other DNA
ccatgtaagatgtggcttgc

SEQ ID NO: 186459 - DNA, 20 bp, synthetic construct
  source 1..20: mol_type = other DNA
tccatgtaagatgtggcttg

SEQ ID NO: 186460 - DNA, 20 bp, synthetic construct
  source 1..20: mol_type = other DNA
atccatgtaagatgtggctt

SEQ ID NO: 186461 - DNA, 20 bp, synthetic construct
  source 1..20: mol_type = other DNA
catccatgtaagatgtggct

SEQ ID NO: 186462 - DNA, 20 bp, synthetic construct
  source 1..20: mol_type = other DNA
ccatccatgtaagatgtggc

SEQ ID NO: 186463 - DNA, 20 bp, synthetic construct
  source 1..20: mol_type = other DNA
gccatccatgtaagatgtgg

SEQ ID NO: 186464 - DNA, 20 bp, synthetic construct
  source 1..20: mol_type = other DNA
tgccatccatgtaagatgtg

SEQ ID NO: 186465 - DNA, 20 bp, synthetic construct
  source 1..20: mol_type = other DNA
ctgccatccatgtaagatgt

SEQ ID NO: 186466 - DNA, 20 bp, synthetic construct
  source 1..20: mol_type = other DNA
gctgccatccatgtaagatg

SEQ ID NO: 186467 - DNA, 20 bp, synthetic construct
  source 1..20: mol_type = other DNA
tgctgccatccatgtaagat

SEQ ID NO: 186468 - DNA, 20 bp, synthetic construct
  source 1..20: mol_type = other DNA
ctgctgccatccatgtaaga

SEQ ID NO: 186469 - DNA, 20 bp, synthetic construct
  source 1..20: mol_type = other DNA
tctgctgccatccatgtaag

SEQ ID NO: 186470 - DNA, 20 bp, synthetic construct
  source 1..20: mol_type = other DNA
gtctgctgccatccatgtaa

SEQ ID NO: 186471 - DNA, 20 bp, synthetic construct
  source 1..20: mol_type = other DNA
tgtctgctgccatccatgta

SEQ ID NO: 186472 - DNA, 20 bp, synthetic construct
  source 1..20: mol_type = other DNA
ctgtctgctgccatccatgt

SEQ ID NO: 186473 - DNA, 20 bp, synthetic construct
  source 1..20: mol_type = other DNA
tctgtctgctgccatccatg

SEQ ID NO: 186474 - DNA, 20 bp, synthetic construct
  source 1..20: mol_type = other DNA
gtctgtctgctgccatccat

SEQ ID NO: 186475 - DNA, 20 bp, synthetic construct
  source 1..20: mol_type = other DNA
tgtctgtctgctgccatcca

SEQ ID NO: 186476 - DNA, 20 bp, synthetic construct
  source 1..20: mol_type = other DNA
ctgtctgtctgctgccatcc

SEQ ID NO: 186477 - DNA, 20 bp, synthetic construct
  source 1..20: mol_type = other DNA
cctgtctgtctgctgccatc

SEQ ID NO: 186478 - DNA, 20 bp, synthetic construct
  source 1..20: mol_type = other DNA
ccctgtctgtctgctgccat

SEQ ID NO: 186479 - DNA, 20 bp, synthetic construct
  source 1..20: mol_type = other DNA
tccctgtctgtctgctgcca

SEQ ID NO: 186480 - DNA, 20 bp, synthetic construct
  source 1..20: mol_type = other DNA
ctccctgtctgtctgctgcc

SEQ ID NO: 186481 - DNA, 20 bp, synthetic construct
  source 1..20: mol_type = other DNA
tctccctgtctgtctgctgc

SEQ ID NO: 186482 - DNA, 20 bp, synthetic construct
  source 1..20: mol_type = other DNA
ctctccctgtctgtctgctg

SEQ ID NO: 186483 - DNA, 20 bp, synthetic construct
  source 1..20: mol_type = other DNA
tctctccctgtctgtctgct

SEQ ID NO: 186484 - DNA, 20 bp, synthetic construct
  source 1..20: mol_type = other DNA
ctctctccctgtctgtctgc

SEQ ID NO: 186485 - DNA, 20 bp, synthetic construct
  source 1..20: mol_type = other DNA
tctctctccctgtctgtctg

SEQ ID NO: 186486 - DNA, 20 bp, synthetic construct
  source 1..20: mol_type = other DNA
ctctctctccctgtctgtct

SEQ ID NO: 186487 - DNA, 20 bp, synthetic construct
  source 1..20: mol_type = other DNA
gctctctctccctgtctgtc

SEQ ID NO: 186488 - DNA, 20 bp, synthetic construct
  source 1..20: mol_type = other DNA
agctctctctccctgtctgt

SEQ ID NO: 186489 - DNA, 20 bp, synthetic construct
  source 1..20: mol_type = other DNA
aagctctctctccctgtctg

SEQ ID NO: 186490 - DNA, 20 bp, synthetic construct
  source 1..20: mol_type = other DNA
caagctctctctccctgtct

SEQ ID NO: 186491 - DNA, 20 bp, synthetic construct
  source 1..20: mol_type = other DNA
acaagctctctctccctgtc

SEQ ID NO: 186492 - DNA, 20 bp, synthetic construct
  source 1..20: mol_type = other DNA
cacaagctctctctccctgt

SEQ ID NO: 186493 - DNA, 20 bp, synthetic construct
  source 1..20: mol_type = other DNA
gcacaagctctctctccctg

SEQ ID NO: 186494 - DNA, 20 bp, synthetic construct
  source 1..20: mol_type = other DNA
tgcacaagctctctctccct

SEQ ID NO: 186495 - DNA, 20 bp, synthetic construct
  source 1..20: mol_type = other DNA
ctgcacaagctctctctccc

SEQ ID NO: 186496 - DNA, 20 bp, synthetic construct
  source 1..20: mol_type = other DNA
cctgcacaagctctctctcc

SEQ ID NO: 186497 - DNA, 20 bp, synthetic construct
  source 1..20: mol_type = other DNA
ccctgcacaagctctctctc

SEQ ID NO: 186498 - DNA, 20 bp, synthetic construct
  source 1..20: mol_type = other DNA
cccctgcacaagctctctct

SEQ ID NO: 186499 - DNA, 20 bp, synthetic construct
  source 1..20: mol_type = other DNA
tcccctgcacaagctctctc

SEQ ID NO: 186500 - DNA, 20 bp, synthetic construct
  source 1..20: mol_type = other DNA
ttcccctgcacaagctctct

SEQ ID NO: 186501 - DNA, 20 bp, synthetic construct
  source 1..20: mol_type = other DNA
gttcccctgcacaagctctc

SEQ ID NO: 186502 - DNA, 20 bp, synthetic construct
  source 1..20: mol_type = other DNA
agttcccctgcacaagctct

SEQ ID NO: 186503 - DNA, 20 bp, synthetic construct
  source 1..20: mol_type = other DNA
gagttcccctgcacaagctc

SEQ ID NO: 186504 - DNA, 20 bp, synthetic construct
  source 1..20: mol_type = other DNA
ggagttcccctgcacaagct

SEQ ID NO: 186505 - DNA, 20 bp, synthetic construct
  source 1..20: mol_type = other DNA
aggagttcccctgcacaagc

SEQ ID NO: 186506 - DNA, 20 bp, synthetic construct
  source 1..20: mol_type = other DNA
gaggagttcccctgcacaag

SEQ ID NO: 186507 - DNA, 20 bp, synthetic construct
  source 1..20: mol_type = other DNA
agaggagttcccctgcacaa

SEQ ID NO: 186508 - DNA, 20 bp, synthetic construct
  source 1..20: mol_type = other DNA
aagaggagttcccctgcaca

SEQ ID NO: 186509 - DNA, 20 bp, synthetic construct
  source 1..20: mol_type = other DNA
aaagaggagttcccctgcac

SEQ ID NO: 186510 - DNA, 20 bp, synthetic construct
  source 1..20: mol_type = other DNA
aaaagaggagttcccctgca

SEQ ID NO: 186511 - DNA, 20 bp, synthetic construct
  source 1..20: mol_type = other DNA
aaaaagaggagttcccctgc

SEQ ID NO: 186512 - DNA, 20 bp, synthetic construct
  source 1..20: mol_type = other DNA
taaaaagaggagttcccctg

SEQ ID NO: 186513 - DNA, 20 bp, synthetic construct
  source 1..20: mol_type = other DNA
ttaaaaagaggagttcccct

SEQ ID NO: 186514 - DNA, 20 bp, synthetic construct
  source 1..20: mol_type = other DNA
tttaaaaagaggagttcccc

SEQ ID NO: 186515 - DNA, 20 bp, synthetic construct
  source 1..20: mol_type = other DNA
ttttaaaaagaggagttccc

SEQ ID NO: 186516 - DNA, 20 bp, synthetic construct
  source 1..20: mol_type = other DNA
gttttaaaaagaggagttcc

SEQ ID NO: 186517 - DNA, 20 bp, synthetic construct
  source 1..20: mol_type = other DNA
ggttttaaaaagaggagttc

SEQ ID NO: 186518 - DNA, 20 bp, synthetic construct
  source 1..20: mol_type = other DNA
tggttttaaaaagaggagtt

SEQ ID NO: 186519 - DNA, 20 bp, synthetic construct
  source 1..20: mol_type = other DNA
atggttttaaaaagaggagt

SEQ ID NO: 186520 - DNA, 20 bp, synthetic construct
  source 1..20: mol_type = other DNA
gatggttttaaaaagaggag

SEQ ID NO: 186521 - DNA, 20 bp, synthetic construct
  source 1..20: mol_type = other DNA
tgatggttttaaaaagagga

SEQ ID NO: 186522 - DNA, 20 bp, synthetic construct
  source 1..20: mol_type = other DNA
ctgatggttttaaaaagagg

SEQ ID NO: 186523 - DNA, 20 bp, synthetic construct
  source 1..20: mol_type = other DNA
tctgatggttttaaaaagag

SEQ ID NO: 186524 - DNA, 20 bp, synthetic construct
  source 1..20: mol_type = other DNA
atctgatggttttaaaaaga

SEQ ID NO: 186525 - DNA, 20 bp, synthetic construct
  source 1..20: mol_type = other DNA
gatctgatggttttaaaaag

SEQ ID NO: 186526 - DNA, 20 bp, synthetic construct
  source 1..20: mol_type = other DNA
agatctgatggttttaaaaa

SEQ ID NO: 186527 - DNA, 20 bp, synthetic construct
  source 1..20: mol_type = other DNA
gagatctgatggttttaaaa

SEQ ID NO: 186528 - DNA, 20 bp, synthetic construct
  source 1..20: mol_type = other DNA
cgagatctgatggttttaaa

SEQ ID NO: 186529 - DNA, 20 bp, synthetic construct
  source 1..20: mol_type = other DNA
acgagatctgatggttttaa

SEQ ID NO: 186530 - DNA, 20 bp, synthetic construct
  source 1..20: mol_type = other DNA
aacgagatctgatggtttta

SEQ ID NO: 186531 - DNA, 20 bp, synthetic construct
  source 1..20: mol_type = other DNA
taacgagatctgatggtttt

SEQ ID NO: 186532 - DNA, 20 bp, synthetic construct
  source 1..20: mol_type = other DNA
ctaacgagatctgatggttt

SEQ ID NO: 186533 - DNA, 20 bp, synthetic construct
  source 1..20: mol_type = other DNA
tctaacgagatctgatggtt

SEQ ID NO: 186534 - DNA, 20 bp, synthetic construct
  source 1..20: mol_type = other DNA
gtctaacgagatctgatggt

SEQ ID NO: 186535 - DNA, 20 bp, synthetic construct
  source 1..20: mol_type = other DNA
agtctaacgagatctgatgg

SEQ ID NO: 186536 - DNA, 20 bp, synthetic construct
  source 1..20: mol_type = other DNA
aagtctaacgagatctgatg

SEQ ID NO: 186537 - DNA, 20 bp, synthetic construct
  source 1..20: mol_type = other DNA
taagtctaacgagatctgat

SEQ ID NO: 186538 - DNA, 20 bp, synthetic construct
  source 1..20: mol_type = other DNA
ataagtctaacgagatctga

SEQ ID NO: 186539 - DNA, 20 bp, synthetic construct
  source 1..20: mol_type = other DNA
aataagtctaacgagatctg

SEQ ID NO: 186540 - DNA, 20 bp, synthetic construct
  source 1..20: mol_type = other DNA
gaataagtctaacgagatct

SEQ ID NO: 186541 - DNA, 20 bp, synthetic construct
  source 1..20: mol_type = other DNA
tgaataagtctaacgagatc

SEQ ID NO: 186542 - DNA, 20 bp, synthetic construct
  source 1..20: mol_type = other DNA
gtgaataagtctaacgagat

SEQ ID NO: 186543 - DNA, 20 bp, synthetic construct
  source 1..20: mol_type = other DNA
agtgaataagtctaacgaga

SEQ ID NO: 186544 - DNA, 20 bp, synthetic construct
  source 1..20: mol_type = other DNA
tagtgaataagtctaacgag

SEQ ID NO: 186545 - DNA, 20 bp, synthetic construct
  source 1..20: mol_type = other DNA
atagtgaataagtctaacga

SEQ ID NO: 186546 - DNA, 20 bp, synthetic construct
  source 1..20: mol_type = other DNA
gatagtgaataagtctaacg

SEQ ID NO: 186547 - DNA, 20 bp, synthetic construct
  source 1..20: mol_type = other DNA
tgatagtgaataagtctaac

SEQ ID NO: 186548 - DNA, 20 bp, synthetic construct
  source 1..20: mol_type = other DNA
ttgatagtgaataagtctaa

SEQ ID NO: 186549 - DNA, 20 bp, synthetic construct
  source 1..20: mol_type = other DNA
cttgatagtgaataagtcta

SEQ ID NO: 186550 - DNA, 20 bp, synthetic construct
  source 1..20: mol_type = other DNA
tcttgatagtgaataagtct

SEQ ID NO: 186551 - DNA, 20 bp, synthetic construct
  source 1..20: mol_type = other DNA
ctcttgatagtgaataagtc

SEQ ID NO: 186552 - DNA, 20 bp, synthetic construct
  source 1..20: mol_type = other DNA
tctcttgatagtgaataagt

SEQ ID NO: 186553 - DNA, 20 bp, synthetic construct
  source 1..20: mol_type = other DNA
ttctcttgatagtgaataag

SEQ ID NO: 186554 - DNA, 20 bp, synthetic construct
  source 1..20: mol_type = other DNA
gttctcttgatagtgaataa

SEQ ID NO: 186555 - DNA, 20 bp, synthetic construct
  source 1..20: mol_type = other DNA
tgttctcttgatagtgaata

SEQ ID NO: 186556 - DNA, 20 bp, synthetic construct
  source 1..20: mol_type = other DNA
ctgttctcttgatagtgaat

SEQ ID NO: 186557 - DNA, 20 bp, synthetic construct
  source 1..20: mol_type = other DNA
gctgttctcttgatagtgaa

SEQ ID NO: 186558 - DNA, 20 bp, synthetic construct
  source 1..20: mol_type = other DNA
tgctgttctcttgatagtga

SEQ ID NO: 186559 - DNA, 20 bp, synthetic construct
  source 1..20: mol_type = other DNA
gtgctgttctcttgatagtg

SEQ ID NO: 186560 - DNA, 20 bp, synthetic construct
  source 1..20: mol_type = other DNA
tgtgctgttctcttgatagt

SEQ ID NO: 186561 - DNA, 20 bp, synthetic construct
  source 1..20: mol_type = other DNA
ctgtgctgttctcttgatag

SEQ ID NO: 186562 - DNA, 20 bp, synthetic construct
  source 1..20: mol_type = other DNA
tctgtgctgttctcttgata

SEQ ID NO: 186563 - DNA, 20 bp, synthetic construct
  source 1..20: mol_type = other DNA
ttctgtgctgttctcttgat

SEQ ID NO: 186564 - DNA, 20 bp, synthetic construct
  source 1..20: mol_type = other DNA
tttctgtgctgttctcttga

SEQ ID NO: 186565 - DNA, 20 bp, synthetic construct
  source 1..20: mol_type = other DNA
ttttctgtgctgttctcttg

SEQ ID NO: 186566 - DNA, 20 bp, synthetic construct
  source 1..20: mol_type = other DNA
cttttctgtgctgttctctt

SEQ ID NO: 186567 - DNA, 20 bp, synthetic construct
  source 1..20: mol_type = other DNA
tcttttctgtgctgttctct

SEQ ID NO: 186568 - DNA, 20 bp, synthetic construct
  source 1..20: mol_type = other DNA
gtcttttctgtgctgttctc

SEQ ID NO: 186569 - DNA, 20 bp, synthetic construct
  source 1..20: mol_type = other DNA
ggtcttttctgtgctgttct

SEQ ID NO: 186570 - DNA, 20 bp, synthetic construct
  source 1..20: mol_type = other DNA
aggtcttttctgtgctgttc

SEQ ID NO: 186571 - DNA, 20 bp, synthetic construct
  source 1..20: mol_type = other DNA
caggtcttttctgtgctgtt

SEQ ID NO: 186572 - DNA, 20 bp, synthetic construct
  source 1..20: mol_type = other DNA
gcaggtcttttctgtgctgt

SEQ ID NO: 186573 - DNA, 20 bp, synthetic construct
  source 1..20: mol_type = other DNA
ggcaggtcttttctgtgctg

SEQ ID NO: 186574 - DNA, 20 bp, synthetic construct
  source 1..20: mol_type = other DNA
gggcaggtcttttctgtgct

SEQ ID NO: 186575 - DNA, 20 bp, synthetic construct
  source 1..20: mol_type = other DNA
ggggcaggtcttttctgtgc

SEQ ID NO: 186576 - DNA, 20 bp, synthetic construct
  source 1..20: mol_type = other DNA
gggggcaggtcttttctgtg

SEQ ID NO: 186577 - DNA, 20 bp, synthetic construct
  source 1..20: mol_type = other DNA
tgggggcaggtcttttctgt

SEQ ID NO: 186578 - DNA, 20 bp, synthetic construct
  source 1..20: mol_type = other DNA
atgggggcaggtcttttctg

SEQ ID NO: 186579 - DNA, 20 bp, synthetic construct
  source 1..20: mol_type = other DNA
catgggggcaggtcttttct

SEQ ID NO: 186580 - DNA, 20 bp, synthetic construct
  source 1..20: mol_type = other DNA
tcatgggggcaggtcttttc

SEQ ID NO: 186581 - DNA, 20 bp, synthetic construct
  source 1..20: mol_type = other DNA
atcatgggggcaggtctttt

SEQ ID NO: 186582 - DNA, 20 bp, synthetic construct
  source 1..20: mol_type = other DNA
aatcatgggggcaggtcttt

SEQ ID NO: 186583 - DNA, 20 bp, synthetic construct
  source 1..20: mol_type = other DNA
gaatcatgggggcaggtctt

SEQ ID NO: 186584 - DNA, 20 bp, synthetic construct
  source 1..20: mol_type = other DNA
tgaatcatgggggcaggtct

SEQ ID NO: 186585 - DNA, 20 bp, synthetic construct
  source 1..20: mol_type = other DNA
ctgaatcatgggggcaggtc

SEQ ID NO: 186586 - DNA, 20 bp, synthetic construct
  source 1..20: mol_type = other DNA
actgaatcatgggggcaggt

SEQ ID NO: 186587 - DNA, 20 bp, synthetic construct
  source 1..20: mol_type = other DNA
aactgaatcatgggggcagg

SEQ ID NO: 186588 - DNA, 20 bp, synthetic construct
  source 1..20: mol_type = other DNA
taactgaatcatgggggcag

SEQ ID NO: 186589 - DNA, 20 bp, synthetic construct
  source 1..20: mol_type = other DNA
gtaactgaatcatgggggca

SEQ ID NO: 186590 - DNA, 20 bp, synthetic construct
  source 1..20: mol_type = other DNA
agtaactgaatcatgggggc

SEQ ID NO: 186591 - DNA, 20 bp, synthetic construct
  source 1..20: mol_type = other DNA
aagtaactgaatcatggggg

SEQ ID NO: 186592 - DNA, 20 bp, synthetic construct
  source 1..20: mol_type = other DNA
gaagtaactgaatcatgggg

SEQ ID NO: 186593 - DNA, 20 bp, synthetic construct
  source 1..20: mol_type = other DNA
ggaagtaactgaatcatggg

SEQ ID NO: 186594 - DNA, 20 bp, synthetic construct
  source 1..20: mol_type = other DNA
gggaagtaactgaatcatgg

SEQ ID NO: 186595 - DNA, 20 bp, synthetic construct
  source 1..20: mol_type = other DNA
tgggaagtaactgaatcatg

SEQ ID NO: 186596 - DNA, 20 bp, synthetic construct
  source 1..20: mol_type = other DNA
gtgggaagtaactgaatcat

SEQ ID NO: 186597 - DNA, 20 bp, synthetic construct
  source 1..20: mol_type = other DNA
ggtgggaagtaactgaatca

SEQ ID NO: 186598 - DNA, 20 bp, synthetic construct
  source 1..20: mol_type = other DNA
tggtgggaagtaactgaatc

SEQ ID NO: 186599 - DNA, 20 bp, synthetic construct
  source 1..20: mol_type = other DNA
ctggtgggaagtaactgaat

SEQ ID NO: 186600 - DNA, 20 bp, synthetic construct
  source 1..20: mol_type = other DNA
tctggtgggaagtaactgaa

SEQ ID NO: 186601 - DNA, 20 bp, synthetic construct
  source 1..20: mol_type = other DNA
atctggtgggaagtaactga

SEQ ID NO: 186602 - DNA, 20 bp, synthetic construct
  source 1..20: mol_type = other DNA
gatctggtgggaagtaactg

SEQ ID NO: 186603 - DNA, 20 bp, synthetic construct
  source 1..20: mol_type = other DNA
ggatctggtgggaagtaact

SEQ ID NO: 186604 - DNA, 20 bp, synthetic construct
  source 1..20: mol_type = other DNA
gggatctggtgggaagtaac

SEQ ID NO: 186605 - DNA, 20 bp, synthetic construct
  source 1..20: mol_type = other DNA
agggatctggtgggaagtaa

SEQ ID NO: 186606 - DNA, 20 bp, synthetic construct
  source 1..20: mol_type = other DNA
gagggatctggtgggaagta

SEQ ID NO: 186607 - DNA, 20 bp, synthetic construct
  source 1..20: mol_type = other DNA
ggagggatctggtgggaagt

SEQ ID NO: 186608 - DNA, 20 bp, synthetic construct
  source 1..20: mol_type = other DNA
gggagggatctggtgggaag

SEQ ID NO: 186609 - DNA, 20 bp, synthetic construct
  source 1..20: mol_type = other DNA
tgggagggatctggtgggaa

SEQ ID NO: 186610 - DNA, 20 bp, synthetic construct
  source 1..20: mol_type = other DNA
gtgggagggatctggtggga

SEQ ID NO: 186611 - DNA, 20 bp, synthetic construct
  source 1..20: mol_type = other DNA
tgtgggagggatctggtggg

SEQ ID NO: 186612 - DNA, 20 bp, synthetic construct
  source 1..20: mol_type = other DNA
ttgtgggagggatctggtgg

SEQ ID NO: 186613 - DNA, 20 bp, synthetic construct
  source 1..20: mol_type = other DNA
gttgtgggagggatctggtg

SEQ ID NO: 186614 - DNA, 20 bp, synthetic construct
  source 1..20: mol_type = other DNA
tgttgtgggagggatctggt

SEQ ID NO: 186615 - DNA, 20 bp, synthetic construct
  source 1..20: mol_type = other DNA
atgttgtgggagggatctgg

SEQ ID NO: 186616 - DNA, 20 bp, synthetic construct
  source 1..20: mol_type = other DNA
catgttgtgggagggatctg

SEQ ID NO: 186617 - DNA, 20 bp, synthetic construct
  source 1..20: mol_type = other DNA
acatgttgtgggagggatct

SEQ ID NO: 186618 - DNA, 20 bp, synthetic construct
  source 1..20: mol_type = other DNA
cacatgttgtgggagggatc

SEQ ID NO: 186619 - DNA, 20 bp, synthetic construct
  source 1..20: mol_type = other DNA
ccacatgttgtgggagggat

SEQ ID NO: 186620 - DNA, 20 bp, synthetic construct
  source 1..20: mol_type = other DNA
cccacatgttgtgggaggga

SEQ ID NO: 186621 - DNA, 20 bp, synthetic construct
  source 1..20: mol_type = other DNA
tcccacatgttgtgggaggg

SEQ ID NO: 186622 - DNA, 20 bp, synthetic construct
  source 1..20: mol_type = other DNA
ttcccacatgttgtgggagg

SEQ ID NO: 186623 - DNA, 20 bp, synthetic construct
  source 1..20: mol_type = other DNA
attcccacatgttgtgggag

SEQ ID NO: 186624 - DNA, 20 bp, synthetic construct
  source 1..20: mol_type = other DNA
aattcccacatgttgtggga

SEQ ID NO: 186625 - DNA, 20 bp, synthetic construct
  source 1..20: mol_type = other DNA
gaattcccacatgttgtggg

SEQ ID NO: 186626 - DNA, 20 bp, synthetic construct
  source 1..20: mol_type = other DNA
tgaattcccacatgttgtgg

SEQ ID NO: 186627 - DNA, 20 bp, synthetic construct
  source 1..20: mol_type = other DNA
ttgaattcccacatgttgtg

SEQ ID NO: 186628 - DNA, 20 bp, synthetic construct
  source 1..20: mol_type = other DNA
cttgaattcccacatgttgt

SEQ ID NO: 186629 - DNA, 20 bp, synthetic construct
  source 1..20: mol_type = other DNA
tcttgaattcccacatgttg

SEQ ID NO: 186630 - DNA, 20 bp, synthetic construct
  source 1..20: mol_type = other DNA
atcttgaattcccacatgtt

SEQ ID NO: 186631 - DNA, 20 bp, synthetic construct
  source 1..20: mol_type = other DNA
catcttgaattcccacatgt

SEQ ID NO: 186632 - DNA, 20 bp, synthetic construct
  source 1..20: mol_type = other DNA
tcatcttgaattcccacatg

SEQ ID NO: 186633 - DNA, 20 bp, synthetic construct
  source 1..20: mol_type = other DNA
ctcatcttgaattcccacat

SEQ ID NO: 186634 - DNA, 20 bp, synthetic construct
  source 1..20: mol_type = other DNA
tctcatcttgaattcccaca

SEQ ID NO: 186635 - DNA, 20 bp, synthetic construct
  source 1..20: mol_type = other DNA
atctcatcttgaattcccac

SEQ ID NO: 186636 - DNA, 20 bp, synthetic construct
  source 1..20: mol_type = other DNA
aatctcatcttgaattccca

SEQ ID NO: 186637 - DNA, 20 bp, synthetic construct
  source 1..20: mol_type = other DNA
aaatctcatcttgaattccc

SEQ ID NO: 186638 - DNA, 20 bp, synthetic construct
  source 1..20: mol_type = other DNA
caaatctcatcttgaattcc

SEQ ID NO: 186639 - DNA, 20 bp, synthetic construct
  source 1..20: mol_type = other DNA
acaaatctcatcttgaattc

SEQ ID NO: 186640 - DNA, 20 bp, synthetic construct
  source 1..20: mol_type = other DNA
aacaaatctcatcttgaatt

SEQ ID NO: 186641 - DNA, 20 bp, synthetic construct
  source 1..20: mol_type = other DNA
taacaaatctcatcttgaat

SEQ ID NO: 186642 - DNA, 20 bp, synthetic construct
  source 1..20: mol_type = other DNA
gtaacaaatctcatcttgaa

SEQ ID NO: 186643 - DNA, 20 bp, synthetic construct
  source 1..20: mol_type = other DNA
ggtaacaaatctcatcttga

SEQ ID NO: 186644 - DNA, 20 bp, synthetic construct
  source 1..20: mol_type = other DNA
tggtaacaaatctcatcttg

SEQ ID NO: 186645 - DNA, 20 bp, synthetic construct
  source 1..20: mol_type = other DNA
atggtaacaaatctcatctt

SEQ ID NO: 186646 - DNA, 20 bp, synthetic construct
  source 1..20: mol_type = other DNA
tatggtaacaaatctcatct

SEQ ID NO: 186647 - DNA, 20 bp, synthetic construct
  source 1..20: mol_type = other DNA
atatggtaacaaatctcatc

SEQ ID NO: 186648 - DNA, 20 bp, synthetic construct
  source 1..20: mol_type = other DNA
gatatggtaacaaatctcat

SEQ ID NO: 186649 - DNA, 20 bp, synthetic construct
  source 1..20: mol_type = other DNA
tgatatggtaacaaatctca

SEQ ID NO: 186650 - DNA, 20 bp, synthetic construct
  source 1..20: mol_type = other DNA
ctgatatggtaacaaatctc

SEQ ID NO: 186651 - DNA, 20 bp, synthetic construct
  source 1..20: mol_type = other DNA
actgatatggtaacaaatct

SEQ ID NO: 186652 - DNA, 20 bp, synthetic construct
  source 1..20: mol_type = other DNA
aactgatatggtaacaaatc

SEQ ID NO: 186653 - DNA, 20 bp, synthetic construct
  source 1..20: mol_type = other DNA
taactgatatggtaacaaat

SEQ ID NO: 186654 - DNA, 20 bp, synthetic construct
  source 1..20: mol_type = other DNA
gtaactgatatggtaacaaa

SEQ ID NO: 186655 - DNA, 20 bp, synthetic construct
  source 1..20: mol_type = other DNA
ggtaactgatatggtaacaa

SEQ ID NO: 186656 - DNA, 20 bp, synthetic construct
  source 1..20: mol_type = other DNA
tggtaactgatatggtaaca

SEQ ID NO: 186657 - DNA, 20 bp, synthetic construct
  source 1..20: mol_type = other DNA
ttggtaactgatatggtaac

SEQ ID NO: 186658 - DNA, 20 bp, synthetic construct
  source 1..20: mol_type = other DNA
gttggtaactgatatggtaa

SEQ ID NO: 186659 - DNA, 20 bp, synthetic construct
  source 1..20: mol_type = other DNA
ggttggtaactgatatggta

SEQ ID NO: 186660 - DNA, 20 bp, synthetic construct
  source 1..20: mol_type = other DNA
gggttggtaactgatatggt

SEQ ID NO: 186661 - DNA, 20 bp, synthetic construct
  source 1..20: mol_type = other DNA
agggttggtaactgatatgg

SEQ ID NO: 186662 - DNA, 20 bp, synthetic construct
  source 1..20: mol_type = other DNA
aagggttggtaactgatatg

SEQ ID NO: 186663 - DNA, 20 bp, synthetic construct
  source 1..20: mol_type = other DNA
gaagggttggtaactgatat

SEQ ID NO: 186664 - DNA, 20 bp, synthetic construct
  source 1..20: mol_type = other DNA
ggaagggttggtaactgata

SEQ ID NO: 186665 - DNA, 20 bp, synthetic construct
  source 1..20: mol_type = other DNA
tggaagggttggtaactgat

SEQ ID NO: 186666 - DNA, 20 bp, synthetic construct
  source 1..20: mol_type = other DNA
ctggaagggttggtaactga

SEQ ID NO: 186667 - DNA, 20 bp, synthetic construct
  source 1..20: mol_type = other DNA
tctggaagggttggtaactg

SEQ ID NO: 186668 - DNA, 20 bp, synthetic construct
  source 1..20: mol_type = other DNA
atctggaagggttggtaact

SEQ ID NO: 186669 - DNA, 20 bp, synthetic construct
  source 1..20: mol_type = other DNA
tatctggaagggttggtaac

SEQ ID NO: 186670 - DNA, 20 bp, synthetic construct
  source 1..20: mol_type = other DNA
ttatctggaagggttggtaa

SEQ ID NO: 186671 - DNA, 20 bp, synthetic construct
  source 1..20: mol_type = other DNA
tttatctggaagggttggta

SEQ ID NO: 186672 - DNA, 20 bp, synthetic construct
  source 1..20: mol_type = other DNA
atttatctggaagggttggt

SEQ ID NO: 186673 - DNA, 20 bp, synthetic construct
  source 1..20: mol_type = other DNA
gatttatctggaagggttgg

SEQ ID NO: 186674 - DNA, 20 bp, synthetic construct
  source 1..20: mol_type = other DNA
tgatttatctggaagggttg

SEQ ID NO: 186675 - DNA, 20 bp, synthetic construct
  source 1..20: mol_type = other DNA
gtgatttatctggaagggtt

SEQ ID NO: 186676 - DNA, 20 bp, synthetic construct
  source 1..20: mol_type = other DNA
cgtgatttatctggaagggt

SEQ ID NO: 186677 - DNA, 20 bp, synthetic construct
  source 1..20: mol_type = other DNA
acgtgatttatctggaaggg

SEQ ID NO: 186678 - DNA, 20 bp, synthetic construct
  source 1..20: mol_type = other DNA
cacgtgatttatctggaagg

SEQ ID NO: 186679 - DNA, 20 bp, synthetic construct
  source 1..20: mol_type = other DNA
tcacgtgatttatctggaag

SEQ ID NO: 186680 - DNA, 20 bp, synthetic construct
  source 1..20: mol_type = other DNA
ttcacgtgatttatctggaa

SEQ ID NO: 186681 - DNA, 20 bp, synthetic construct
  source 1..20: mol_type = other DNA
tttcacgtgatttatctgga

SEQ ID NO: 186682 - DNA, 20 bp, synthetic construct
  source 1..20: mol_type = other DNA
atttcacgtgatttatctgg

SEQ ID NO: 186683 - DNA, 20 bp, synthetic construct
  source 1..20: mol_type = other DNA
tatttcacgtgatttatctg

SEQ ID NO: 186684 - DNA, 20 bp, synthetic construct
  source 1..20: mol_type = other DNA
atatttcacgtgatttatct

SEQ ID NO: 186685 - DNA, 20 bp, synthetic construct
  source 1..20: mol_type = other DNA
gatatttcacgtgatttatc

SEQ ID NO: 186686 - DNA, 20 bp, synthetic construct
  source 1..20: mol_type = other DNA
cgatatttcacgtgatttat

SEQ ID NO: 186687 - DNA, 20 bp, synthetic construct
  source 1..20: mol_type = other DNA
gcgatatttcacgtgattta

SEQ ID NO: 186688 - DNA, 20 bp, synthetic construct
  source 1..20: mol_type = other DNA
ggcgatatttcacgtgattt

SEQ ID NO: 186689 - DNA, 20 bp, synthetic construct
  source 1..20: mol_type = other DNA
tggcgatatttcacgtgatt

SEQ ID NO: 186690 - DNA, 20 bp, synthetic construct
  source 1..20: mol_type = other DNA
atggcgatatttcacgtgat

SEQ ID NO: 186691 - DNA, 20 bp, synthetic construct
  source 1..20: mol_type = other DNA
aatggcgatatttcacgtga

SEQ ID NO: 186692 - DNA, 20 bp, synthetic construct
  source 1..20: mol_type = other DNA
taatggcgatatttcacgtg

SEQ ID NO: 186693 - DNA, 20 bp, synthetic construct
  source 1..20: mol_type = other DNA
ttaatggcgatatttcacgt

SEQ ID NO: 186694 - DNA, 20 bp, synthetic construct
  source 1..20: mol_type = other DNA
gttaatggcgatatttcacg

SEQ ID NO: 186695 - DNA, 20 bp, synthetic construct
  source 1..20: mol_type = other DNA
tgttaatggcgatatttcac

SEQ ID NO: 186696 - DNA, 20 bp, synthetic construct
  source 1..20: mol_type = other DNA
ctgttaatggcgatatttca

SEQ ID NO: 186697 - DNA, 20 bp, synthetic construct
  source 1..20: mol_type = other DNA
tctgttaatggcgatatttc

SEQ ID NO: 186698 - DNA, 20 bp, synthetic construct
  source 1..20: mol_type = other DNA
ctctgttaatggcgatattt

SEQ ID NO: 186699 - DNA, 20 bp, synthetic construct
  source 1..20: mol_type = other DNA
actctgttaatggcgatatt

SEQ ID NO: 186700 - DNA, 20 bp, synthetic construct
  source 1..20: mol_type = other DNA
cactctgttaatggcgatat

SEQ ID NO: 186701 - DNA, 20 bp, synthetic construct
  source 1..20: mol_type = other DNA
tcactctgttaatggcgata

SEQ ID NO: 186702 - DNA, 20 bp, synthetic construct
  source 1..20: mol_type = other DNA
ctcactctgttaatggcgat

SEQ ID NO: 186703 - DNA, 20 bp, synthetic construct
  source 1..20: mol_type = other DNA
gctcactctgttaatggcga

SEQ ID NO: 186704 - DNA, 20 bp, synthetic construct
  source 1..20: mol_type = other DNA
agctcactctgttaatggcg

SEQ ID NO: 186705 - DNA, 20 bp, synthetic construct
  source 1..20: mol_type = other DNA
gagctcactctgttaatggc

SEQ ID NO: 186706 - DNA, 20 bp, synthetic construct
  source 1..20: mol_type = other DNA
tgagctcactctgttaatgg

SEQ ID NO: 186707 - DNA, 20 bp, synthetic construct
  source 1..20: mol_type = other DNA
ctgagctcactctgttaatg

SEQ ID NO: 186708 - DNA, 20 bp, synthetic construct
  source 1..20: mol_type = other DNA
cctgagctcactctgttaat

SEQ ID NO: 186709 - DNA, 20 bp, synthetic construct
  source 1..20: mol_type = other DNA
acctgagctcactctgttaa

SEQ ID NO: 186710 - DNA, 20 bp, synthetic construct
  source 1..20: mol_type = other DNA
cacctgagctcactctgtta

SEQ ID NO: 186711 - DNA, 20 bp, synthetic construct
  source 1..20: mol_type = other DNA
ccacctgagctcactctgtt

SEQ ID NO: 186712 - DNA, 20 bp, synthetic construct
  source 1..20: mol_type = other DNA
accacctgagctcactctgt

SEQ ID NO: 186713 - DNA, 20 bp, synthetic construct
  source 1..20: mol_type = other DNA
aaccacctgagctcactctg

SEQ ID NO: 186714 - DNA, 20 bp, synthetic construct
  source 1..20: mol_type = other DNA
gaaccacctgagctcactct

SEQ ID NO: 186715 - DNA, 20 bp, synthetic construct
  source 1..20: mol_type = other DNA
agaaccacctgagctcactc

SEQ ID NO: 186716 - DNA, 20 bp, synthetic construct
  source 1..20: mol_type = other DNA
aagaaccacctgagctcact

SEQ ID NO: 186717 - DNA, 20 bp, synthetic construct
  source 1..20: mol_type = other DNA
gaagaaccacctgagctcac

SEQ ID NO: 186718 - DNA, 20 bp, synthetic construct
  source 1..20: mol_type = other DNA
tgaagaaccacctgagctca

SEQ ID NO: 186719 - DNA, 20 bp, synthetic construct
  source 1..20: mol_type = other DNA
ctgaagaaccacctgagctc

SEQ ID NO: 186720 - DNA, 20 bp, synthetic construct
  source 1..20: mol_type = other DNA
actgaagaaccacctgagct

SEQ ID NO: 186721 - DNA, 20 bp, synthetic construct
  source 1..20: mol_type = other DNA
cactgaagaaccacctgagc

SEQ ID NO: 186722 - DNA, 20 bp, synthetic construct
  source 1..20: mol_type = other DNA
gcactgaagaaccacctgag

SEQ ID NO: 186723 - DNA, 20 bp, synthetic construct
  source 1..20: mol_type = other DNA
tgcactgaagaaccacctga

SEQ ID NO: 186724 - DNA, 20 bp, synthetic construct
  source 1..20: mol_type = other DNA
atgcactgaagaaccacctg

SEQ ID NO: 186725 - DNA, 20 bp, synthetic construct
  source 1..20: mol_type = other DNA
aatgcactgaagaaccacct

SEQ ID NO: 186726 - DNA, 20 bp, synthetic construct
  source 1..20: mol_type = other DNA
aaatgcactgaagaaccacc

SEQ ID NO: 186727 - DNA, 20 bp, synthetic construct
  source 1..20: mol_type = other DNA
gaaatgcactgaagaaccac

SEQ ID NO: 186728 - DNA, 20 bp, synthetic construct
  source 1..20: mol_type = other DNA
agaaatgcactgaagaacca

SEQ ID NO: 186729 - DNA, 20 bp, synthetic construct
  source 1..20: mol_type = other DNA
cagaaatgcactgaagaacc

SEQ ID NO: 186730 - DNA, 20 bp, synthetic construct
  source 1..20: mol_type = other DNA
tcagaaatgcactgaagaac

SEQ ID NO: 186731 - DNA, 20 bp, synthetic construct
  source 1..20: mol_type = other DNA
atcagaaatgcactgaagaa

SEQ ID NO: 186732 - DNA, 20 bp, synthetic construct
  source 1..20: mol_type = other DNA
tatcagaaatgcactgaaga

SEQ ID NO: 186733 - DNA, 20 bp, synthetic construct
  source 1..20: mol_type = other DNA
gtatcagaaatgcactgaag

SEQ ID NO: 186734 - DNA, 20 bp, synthetic construct
  source 1..20: mol_type = other DNA
ggtatcagaaatgcactgaa

SEQ ID NO: 186735 - DNA, 20 bp, synthetic construct
  source 1..20: mol_type = other DNA
aggtatcagaaatgcactga

SEQ ID NO: 186736 - DNA, 20 bp, synthetic construct
  source 1..20: mol_type = other DNA
caggtatcagaaatgcactg

SEQ ID NO: 186737 - DNA, 20 bp, synthetic construct
  source 1..20: mol_type = other DNA
tcaggtatcagaaatgcact

SEQ ID NO: 186738 - DNA, 20 bp, synthetic construct
  source 1..20: mol_type = other DNA
ttcaggtatcagaaatgcac

SEQ ID NO: 186739 - DNA, 20 bp, synthetic construct
  source 1..20: mol_type = other DNA
gttcaggtatcagaaatgca

SEQ ID NO: 186740 - DNA, 20 bp, synthetic construct
  source 1..20: mol_type = other DNA
ggttcaggtatcagaaatgc

SEQ ID NO: 186741 - DNA, 20 bp, synthetic construct
  source 1..20: mol_type = other DNA
aggttcaggtatcagaaatg

SEQ ID NO: 186742 - DNA, 20 bp, synthetic construct
  source 1..20: mol_type = other DNA
aaggttcaggtatcagaaat

SEQ ID NO: 186743 - DNA, 20 bp, synthetic construct
  source 1..20: mol_type = other DNA
gaaggttcaggtatcagaaa

SEQ ID NO: 186744 - DNA, 20 bp, synthetic construct
  source 1..20: mol_type = other DNA
ggaaggttcaggtatcagaa

SEQ ID NO: 186745 - DNA, 20 bp, synthetic construct
  source 1..20: mol_type = other DNA
gggaaggttcaggtatcaga

SEQ ID NO: 186746 - DNA, 20 bp, synthetic construct
  source 1..20: mol_type = other DNA
agggaaggttcaggtatcag

SEQ ID NO: 186747 - DNA, 20 bp, synthetic construct
  source 1..20: mol_type = other DNA
cagggaaggttcaggtatca

SEQ ID NO: 186748 - DNA, 20 bp, synthetic construct
  source 1..20: mol_type = other DNA
ccagggaaggttcaggtatc

SEQ ID NO: 186749 - DNA, 20 bp, synthetic construct
  source 1..20: mol_type = other DNA
cccagggaaggttcaggtat

SEQ ID NO: 186750 - DNA, 20 bp, synthetic construct
  source 1..20: mol_type = other DNA
tcccagggaaggttcaggta

SEQ ID NO: 186751 - DNA, 20 bp, synthetic construct
  source 1..20: mol_type = other DNA
ttcccagggaaggttcaggt

SEQ ID NO: 186752 - DNA, 20 bp, synthetic construct
  source 1..20: mol_type = other DNA
attcccagggaaggttcagg

SEQ ID NO: 186753 - DNA, 20 bp, synthetic construct
  source 1..20: mol_type = other DNA
aattcccagggaaggttcag

SEQ ID NO: 186754 - DNA, 20 bp, synthetic construct
  source 1..20: mol_type = other DNA
aaattcccagggaaggttca

SEQ ID NO: 186755 - DNA, 20 bp, synthetic construct
  source 1..20: mol_type = other DNA
gaaattcccagggaaggttc

SEQ ID NO: 186756 - DNA, 20 bp, synthetic construct
  source 1..20: mol_type = other DNA
tgaaattcccagggaaggtt

SEQ ID NO: 186757 - DNA, 20 bp, synthetic construct
  source 1..20: mol_type = other DNA
gtgaaattcccagggaaggt

SEQ ID NO: 186758 - DNA, 20 bp, synthetic construct
  source 1..20: mol_type = other DNA
tgtgaaattcccagggaagg

SEQ ID NO: 186759 - DNA, 20 bp, synthetic construct
  source 1..20: mol_type = other DNA
ctgtgaaattcccagggaag

SEQ ID NO: 186760 - DNA, 20 bp, synthetic construct
  source 1..20: mol_type = other DNA
tctgtgaaattcccagggaa

SEQ ID NO: 186761 - DNA, 20 bp, synthetic construct
  source 1..20: mol_type = other DNA
gtctgtgaaattcccaggga

SEQ ID NO: 186762 - DNA, 20 bp, synthetic construct
  source 1..20: mol_type = other DNA
ggtctgtgaaattcccaggg

SEQ ID NO: 186763 - DNA, 20 bp, synthetic construct
  source 1..20: mol_type = other DNA
tggtctgtgaaattcccagg

SEQ ID NO: 186764 - DNA, 20 bp, synthetic construct
  source 1..20: mol_type = other DNA
atggtctgtgaaattcccag

SEQ ID NO: 186765 - DNA, 20 bp, synthetic construct
  source 1..20: mol_type = other DNA
gatggtctgtgaaattccca

SEQ ID NO: 186766 - DNA, 20 bp, synthetic construct
  source 1..20: mol_type = other DNA
tgatggtctgtgaaattccc

SEQ ID NO: 186767 - DNA, 20 bp, synthetic construct
  source 1..20: mol_type = other DNA
ctgatggtctgtgaaattcc

SEQ ID NO: 186768 - DNA, 20 bp, synthetic construct
  source 1..20: mol_type = other DNA
cctgatggtctgtgaaattc

SEQ ID NO: 186769 - DNA, 20 bp, synthetic construct
  source 1..20: mol_type = other DNA
gcctgatggtctgtgaaatt

SEQ ID NO: 186770 - DNA, 20 bp, synthetic construct
  source 1..20: mol_type = other DNA
agcctgatggtctgtgaaat

SEQ ID NO: 186771 - DNA, 20 bp, synthetic construct
  source 1..20: mol_type = other DNA
gagcctgatggtctgtgaaa

SEQ ID NO: 186772 - DNA, 20 bp, synthetic construct
  source 1..20: mol_type = other DNA
agagcctgatggtctgtgaa

SEQ ID NO: 186773 - DNA, 20 bp, synthetic construct
  source 1..20: mol_type = other DNA
gagagcctgatggtctgtga

SEQ ID NO: 186774 - DNA, 20 bp, synthetic construct
  source 1..20: mol_type = other DNA
ggagagcctgatggtctgtg

SEQ ID NO: 186775 - DNA, 20 bp, synthetic construct
  source 1..20: mol_type = other DNA
tggagagcctgatggtctgt

SEQ ID NO: 186776 - DNA, 20 bp, synthetic construct
  source 1..20: mol_type = other DNA
gtggagagcctgatggtctg

SEQ ID NO: 186777 - DNA, 20 bp, synthetic construct
  source 1..20: mol_type = other DNA
ggtggagagcctgatggtct

SEQ ID NO: 186778 - DNA, 20 bp, synthetic construct
  source 1..20: mol_type = other DNA
gggtggagagcctgatggtc

SEQ ID NO: 186779 - DNA, 20 bp, synthetic construct
  source 1..20: mol_type = other DNA
agggtggagagcctgatggt

SEQ ID NO: 186780 - DNA, 20 bp, synthetic construct
  source 1..20: mol_type = other DNA
aagggtggagagcctgatgg

SEQ ID NO: 186781 - DNA, 20 bp, synthetic construct
  source 1..20: mol_type = other DNA
aaagggtggagagcctgatg

SEQ ID NO: 186782 - DNA, 20 bp, synthetic construct
  source 1..20: mol_type = other DNA
caaagggtggagagcctgat

SEQ ID NO: 186783 - DNA, 20 bp, synthetic construct
  source 1..20: mol_type = other DNA
tcaaagggtggagagcctga

SEQ ID NO: 186784 - DNA, 20 bp, synthetic construct
  source 1..20: mol_type = other DNA
atcaaagggtggagagcctg

SEQ ID NO: 186785 - DNA, 20 bp, synthetic construct
  source 1..20: mol_type = other DNA
tatcaaagggtggagagcct

SEQ ID NO: 186786 - DNA, 20 bp, synthetic construct
  source 1..20: mol_type = other DNA
ctatcaaagggtggagagcc

SEQ ID NO: 186787 - DNA, 20 bp, synthetic construct
  source 1..20: mol_type = other DNA
gctatcaaagggtggagagc

SEQ ID NO: 186788 - DNA, 20 bp, synthetic construct
  source 1..20: mol_type = other DNA
tgctatcaaagggtggagag

SEQ ID NO: 186789 - DNA, 20 bp, synthetic construct
  source 1..20: mol_type = other DNA
ctgctatcaaagggtggaga

SEQ ID NO: 186790 - DNA, 20 bp, synthetic construct
  source 1..20: mol_type = other DNA
cctgctatcaaagggtggag

SEQ ID NO: 186791 - DNA, 20 bp, synthetic construct
  source 1..20: mol_type = other DNA
tcctgctatcaaagggtgga

SEQ ID NO: 186792 - DNA, 20 bp, synthetic construct
  source 1..20: mol_type = other DNA
atcctgctatcaaagggtgg

SEQ ID NO: 186793 - DNA, 20 bp, synthetic construct
  source 1..20: mol_type = other DNA
tatcctgctatcaaagggtg

SEQ ID NO: 186794 - DNA, 20 bp, synthetic construct
  source 1..20: mol_type = other DNA
ctatcctgctatcaaagggt

SEQ ID NO: 186795 - DNA, 20 bp, synthetic construct
  source 1..20: mol_type = other DNA
gctatcctgctatcaaaggg

SEQ ID NO: 186796 - DNA, 20 bp, synthetic construct
  source 1..20: mol_type = other DNA
tgctatcctgctatcaaagg

SEQ ID NO: 186797 - DNA, 20 bp, synthetic construct
  source 1..20: mol_type = other DNA
ctgctatcctgctatcaaag

SEQ ID NO: 186798 - DNA, 20 bp, synthetic construct
  source 1..20: mol_type = other DNA
cctgctatcctgctatcaaa

SEQ ID NO: 186799 - DNA, 20 bp, synthetic construct
  source 1..20: mol_type = other DNA
ccctgctatcctgctatcaa

SEQ ID NO: 186800 - DNA, 20 bp, synthetic construct
  source 1..20: mol_type = other DNA
gccctgctatcctgctatca

SEQ ID NO: 186801 - DNA, 20 bp, synthetic construct
  source 1..20: mol_type = other DNA
ggccctgctatcctgctatc

SEQ ID NO: 186802 - DNA, 20 bp, synthetic construct
  source 1..20: mol_type = other DNA
gggccctgctatcctgctat

SEQ ID NO: 186803 - DNA, 20 bp, synthetic construct
  source 1..20: mol_type = other DNA
tgggccctgctatcctgcta

SEQ ID NO: 186804 - DNA, 20 bp, synthetic construct
  source 1..20: mol_type = other DNA
ctgggccctgctatcctgct

SEQ ID NO: 186805 - DNA, 20 bp, synthetic construct
  source 1..20: mol_type = other DNA
cctgggccctgctatcctgc

SEQ ID NO: 186806 - DNA, 20 bp, synthetic construct
  source 1..20: mol_type = other DNA
acctgggccctgctatcctg

SEQ ID NO: 186807 - DNA, 20 bp, synthetic construct
  source 1..20: mol_type = other DNA
aacctgggccctgctatcct

SEQ ID NO: 186808 - DNA, 20 bp, synthetic construct
  source 1..20: mol_type = other DNA
gaacctgggccctgctatcc

SEQ ID NO: 186809 - DNA, 20 bp, synthetic construct
  source 1..20: mol_type = other DNA
agaacctgggccctgctatc

SEQ ID NO: 186810 - DNA, 20 bp, synthetic construct
  source 1..20: mol_type = other DNA
cagaacctgggccctgctat

SEQ ID NO: 186811 - DNA, 20 bp, synthetic construct
  source 1..20: mol_type = other DNA
gcagaacctgggccctgcta

SEQ ID NO: 186812 - DNA, 20 bp, synthetic construct
  source 1..20: mol_type = other DNA
tgcagaacctgggccctgct

SEQ ID NO: 186813 - DNA, 20 bp, synthetic construct
  source 1..20: mol_type = other DNA
ctgcagaacctgggccctgc

SEQ ID NO: 186814 - DNA, 20 bp, synthetic construct
  source 1..20: mol_type = other DNA
cctgcagaacctgggccctg

SEQ ID NO: 186815 - DNA, 20 bp, synthetic construct
  source 1..20: mol_type = other DNA
tcctgcagaacctgggccct

SEQ ID NO: 186816 - DNA, 20 bp, synthetic construct
  source 1..20: mol_type = other DNA
ctcctgcagaacctgggccc

SEQ ID NO: 186817 - DNA, 20 bp, synthetic construct
  source 1..20: mol_type = other DNA
cctcctgcagaacctgggcc

SEQ ID NO: 186818 - DNA, 20 bp, synthetic construct
  source 1..20: mol_type = other DNA
tcctcctgcagaacctgggc

SEQ ID NO: 186819 - DNA, 20 bp, synthetic construct
  source 1..20: mol_type = other DNA
ctcctcctgcagaacctggg

SEQ ID NO: 186820 - DNA, 20 bp, synthetic construct
  source 1..20: mol_type = other DNA
tctcctcctgcagaacctgg

SEQ ID NO: 186821 - DNA, 20 bp, synthetic construct
  source 1..20: mol_type = other DNA
atctcctcctgcagaacctg

SEQ ID NO: 186822 - DNA, 20 bp, synthetic construct
  source 1..20: mol_type = other DNA
catctcctcctgcagaacct

SEQ ID NO: 186823 - DNA, 20 bp, synthetic construct
  source 1..20: mol_type = other DNA
acatctcctcctgcagaacc

SEQ ID NO: 186824 - DNA, 20 bp, synthetic construct
  source 1..20: mol_type = other DNA
aacatctcctcctgcagaac

SEQ ID NO: 186825 - DNA, 20 bp, synthetic construct
  source 1..20: mol_type = other DNA
taacatctcctcctgcagaa

SEQ ID NO: 186826 - DNA, 20 bp, synthetic construct
  source 1..20: mol_type = other DNA
gtaacatctcctcctgcaga

SEQ ID NO: 186827 - DNA, 20 bp, synthetic construct
  source 1..20: mol_type = other DNA
ggtaacatctcctcctgcag

SEQ ID NO: 186828 - DNA, 20 bp, synthetic construct
  source 1..20: mol_type = other DNA
tggtaacatctcctcctgca

SEQ ID NO: 186829 - DNA, 20 bp, synthetic construct
  source 1..20: mol_type = other DNA
gtggtaacatctcctcctgc

SEQ ID NO: 186830 - DNA, 20 bp, synthetic construct
  source 1..20: mol_type = other DNA
tgtggtaacatctcctcctg

SEQ ID NO: 186831 - DNA, 20 bp, synthetic construct
  source 1..20: mol_type = other DNA
ctgtggtaacatctcctcct

SEQ ID NO: 186832 - DNA, 20 bp, synthetic construct
  source 1..20: mol_type = other DNA
cctgtggtaacatctcctcc

SEQ ID NO: 186833 - DNA, 20 bp, synthetic construct
  source 1..20: mol_type = other DNA
gcctgtggtaacatctcctc

SEQ ID NO: 186834 - DNA, 20 bp, synthetic construct
  source 1..20: mol_type = other DNA
ggcctgtggtaacatctcct

SEQ ID NO: 186835 - DNA, 20 bp, synthetic construct
  source 1..20: mol_type = other DNA
aggcctgtggtaacatctcc

SEQ ID NO: 186836 - DNA, 20 bp, synthetic construct
  source 1..20: mol_type = other DNA
caggcctgtggtaacatctc

SEQ ID NO: 186837 - DNA, 20 bp, synthetic construct
  source 1..20: mol_type = other DNA
tcaggcctgtggtaacatct

SEQ ID NO: 186838 - DNA, 20 bp, synthetic construct
  source 1..20: mol_type = other DNA
ttcaggcctgtggtaacatc

SEQ ID NO: 186839 - DNA, 20 bp, synthetic construct
  source 1..20: mol_type = other DNA
tttcaggcctgtggtaacat

SEQ ID NO: 186840 - DNA, 20 bp, synthetic construct
  source 1..20: mol_type = other DNA
ctttcaggcctgtggtaaca

SEQ ID NO: 186841 - DNA, 20 bp, synthetic construct
  source 1..20: mol_type = other DNA
cctttcaggcctgtggtaac

SEQ ID NO: 186842 - DNA, 20 bp, synthetic construct
  source 1..20: mol_type = other DNA
ccctttcaggcctgtggtaa

SEQ ID NO: 186843 - DNA, 20 bp, synthetic construct
  source 1..20: mol_type = other DNA
tccctttcaggcctgtggta

SEQ ID NO: 186844 - DNA, 20 bp, synthetic construct
  source 1..20: mol_type = other DNA
ctccctttcaggcctgtggt

SEQ ID NO: 186845 - DNA, 20 bp, synthetic construct
  source 1..20: mol_type = other DNA
cctccctttcaggcctgtgg

SEQ ID NO: 186846 - DNA, 20 bp, synthetic construct
  source 1..20: mol_type = other DNA
ccctccctttcaggcctgtg

SEQ ID NO: 186847 - DNA, 20 bp, synthetic construct
  source 1..20: mol_type = other DNA
tccctccctttcaggcctgt

SEQ ID NO: 186848 - DNA, 20 bp, synthetic construct
  source 1..20: mol_type = other DNA
ctccctccctttcaggcctg

SEQ ID NO: 186849 - DNA, 20 bp, synthetic construct
  source 1..20: mol_type = other DNA
cctccctccctttcaggcct

SEQ ID NO: 186850 - DNA, 20 bp, synthetic construct
  source 1..20: mol_type = other DNA
ccctccctccctttcaggcc

SEQ ID NO: 186851 - DNA, 20 bp, synthetic construct
  source 1..20: mol_type = other DNA
cccctccctccctttcaggc

SEQ ID NO: 186852 - DNA, 20 bp, synthetic construct
  source 1..20: mol_type = other DNA
gcccctccctccctttcagg

SEQ ID NO: 186853 - DNA, 20 bp, synthetic construct
  source 1..20: mol_type = other DNA
tgcccctccctccctttcag

SEQ ID NO: 186854 - DNA, 20 bp, synthetic construct
  source 1..20: mol_type = other DNA
ctgcccctccctccctttca

SEQ ID NO: 186855 - DNA, 20 bp, synthetic construct
  source 1..20: mol_type = other DNA
tctgcccctccctccctttc

SEQ ID NO: 186856 - DNA, 20 bp, synthetic construct
  source 1..20: mol_type = other DNA
atctgcccctccctcccttt

SEQ ID NO: 186857 - DNA, 20 bp, synthetic construct
  source 1..20: mol_type = other DNA
catctgcccctccctccctt

SEQ ID NO: 186858 - DNA, 20 bp, synthetic construct
  source 1..20: mol_type = other DNA
gcatctgcccctccctccct

SEQ ID NO: 186859 - DNA, 20 bp, synthetic construct
  source 1..20: mol_type = other DNA
agcatctgcccctccctccc

SEQ ID NO: 186860 - DNA, 20 bp, synthetic construct
  source 1..20: mol_type = other DNA
tagcatctgcccctccctcc

SEQ ID NO: 186861 - DNA, 20 bp, synthetic construct
  source 1..20: mol_type = other DNA
gtagcatctgcccctccctc

SEQ ID NO: 186862 - DNA, 20 bp, synthetic construct
  source 1..20: mol_type = other DNA
tgtagcatctgcccctccct

SEQ ID NO: 186863 - DNA, 20 bp, synthetic construct
  source 1..20: mol_type = other DNA
ctgtagcatctgcccctccc

SEQ ID NO: 186864 - DNA, 20 bp, synthetic construct
  source 1..20: mol_type = other DNA
cctgtagcatctgcccctcc

SEQ ID NO: 186865 - DNA, 20 bp, synthetic construct
  source 1..20: mol_type = other DNA
tcctgtagcatctgcccctc

SEQ ID NO: 186866 - DNA, 20 bp, synthetic construct
  source 1..20: mol_type = other DNA
ttcctgtagcatctgcccct

SEQ ID NO: 186867 - DNA, 20 bp, synthetic construct
  source 1..20: mol_type = other DNA
cttcctgtagcatctgcccc

SEQ ID NO: 186868 - DNA, 20 bp, synthetic construct
  source 1..20: mol_type = other DNA
tcttcctgtagcatctgccc

SEQ ID NO: 186869 - DNA, 20 bp, synthetic construct
  source 1..20: mol_type = other DNA
atcttcctgtagcatctgcc

SEQ ID NO: 186870 - DNA, 20 bp, synthetic construct
  source 1..20: mol_type = other DNA
catcttcctgtagcatctgc

SEQ ID NO: 186871 - DNA, 20 bp, synthetic construct
  source 1..20: mol_type = other DNA
gcatcttcctgtagcatctg

SEQ ID NO: 186872 - DNA, 20 bp, synthetic construct
  source 1..20: mol_type = other DNA
agcatcttcctgtagcatct

SEQ ID NO: 186873 - DNA, 20 bp, synthetic construct
  source 1..20: mol_type = other DNA
cagcatcttcctgtagcatc

SEQ ID NO: 186874 - DNA, 20 bp, synthetic construct
  source 1..20: mol_type = other DNA
ccagcatcttcctgtagcat

SEQ ID NO: 186875 - DNA, 20 bp, synthetic construct
  source 1..20: mol_type = other DNA
gccagcatcttcctgtagca

SEQ ID NO: 186876 - DNA, 20 bp, synthetic construct
  source 1..20: mol_type = other DNA
agccagcatcttcctgtagc

SEQ ID NO: 186877 - DNA, 20 bp, synthetic construct
  source 1..20: mol_type = other DNA
gagccagcatcttcctgtag

SEQ ID NO: 186878 - DNA, 20 bp, synthetic construct
  source 1..20: mol_type = other DNA
agagccagcatcttcctgta

SEQ ID NO: 186879 - DNA, 20 bp, synthetic construct
  source 1..20: mol_type = other DNA
cagagccagcatcttcctgt

SEQ ID NO: 186880 - DNA, 20 bp, synthetic construct
  source 1..20: mol_type = other DNA
ccagagccagcatcttcctg

SEQ ID NO: 186881 - DNA, 20 bp, synthetic construct
  source 1..20: mol_type = other DNA
tccagagccagcatcttcct

SEQ ID NO: 186882 - DNA, 20 bp, synthetic construct
  source 1..20: mol_type = other DNA
atccagagccagcatcttcc

SEQ ID NO: 186883 - DNA, 20 bp, synthetic construct
  source 1..20: mol_type = other DNA
aatccagagccagcatcttc

SEQ ID NO: 186884 - DNA, 20 bp, synthetic construct
  source 1..20: mol_type = other DNA
gaatccagagccagcatctt

SEQ ID NO: 186885 - DNA, 20 bp, synthetic construct
  source 1..20: mol_type = other DNA
cgaatccagagccagcatct

SEQ ID NO: 186886 - DNA, 20 bp, synthetic construct
  source 1..20: mol_type = other DNA
gcgaatccagagccagcatc

SEQ ID NO: 186887 - DNA, 20 bp, synthetic construct
  source 1..20: mol_type = other DNA
agcgaatccagagccagcat

SEQ ID NO: 186888 - DNA, 20 bp, synthetic construct
  source 1..20: mol_type = other DNA
cagcgaatccagagccagca

SEQ ID NO: 186889 - DNA, 20 bp, synthetic construct
  source 1..20: mol_type = other DNA
ccagcgaatccagagccagc

SEQ ID NO: 186890 - DNA, 20 bp, synthetic construct
  source 1..20: mol_type = other DNA
tccagcgaatccagagccag

SEQ ID NO: 186891 - DNA, 20 bp, synthetic construct
  source 1..20: mol_type = other DNA
ctccagcgaatccagagcca

SEQ ID NO: 186892 - DNA, 20 bp, synthetic construct
  source 1..20: mol_type = other DNA
cctccagcgaatccagagcc

SEQ ID NO: 186893 - DNA, 20 bp, synthetic construct
  source 1..20: mol_type = other DNA
tcctccagcgaatccagagc

SEQ ID NO: 186894 - DNA, 20 bp, synthetic construct
  source 1..20: mol_type = other DNA
ctcctccagcgaatccagag

SEQ ID NO: 186895 - DNA, 20 bp, synthetic construct
  source 1..20: mol_type = other DNA
gctcctccagcgaatccaga

SEQ ID NO: 186896 - DNA, 20 bp, synthetic construct
  source 1..20: mol_type = other DNA
agctcctccagcgaatccag

SEQ ID NO: 186897 - DNA, 20 bp, synthetic construct
  source 1..20: mol_type = other DNA
aagctcctccagcgaatcca

SEQ ID NO: 186898 - DNA, 20 bp, synthetic construct
  source 1..20: mol_type = other DNA
aaagctcctccagcgaatcc

SEQ ID NO: 186899 - DNA, 20 bp, synthetic construct
  source 1..20: mol_type = other DNA
gaaagctcctccagcgaatc

SEQ ID NO: 186900 - DNA, 20 bp, synthetic construct
  source 1..20: mol_type = other DNA
tgaaagctcctccagcgaat

SEQ ID NO: 186901 - DNA, 20 bp, synthetic construct
  source 1..20: mol_type = other DNA
ttgaaagctcctccagcgaa

SEQ ID NO: 186902 - DNA, 20 bp, synthetic construct
  source 1..20: mol_type = other DNA
cttgaaagctcctccagcga

SEQ ID NO: 186903 - DNA, 20 bp, synthetic construct
  source 1..20: mol_type = other DNA
ccttgaaagctcctccagcg

SEQ ID NO: 186904 - DNA, 20 bp, synthetic construct
  source 1..20: mol_type = other DNA
cccttgaaagctcctccagc

SEQ ID NO: 186905 - DNA, 20 bp, synthetic construct
  source 1..20: mol_type = other DNA
tcccttgaaagctcctccag

SEQ ID NO: 186906 - DNA, 20 bp, synthetic construct
  source 1..20: mol_type = other DNA
ttcccttgaaagctcctcca

SEQ ID NO: 186907 - DNA, 20 bp, synthetic construct
  source 1..20: mol_type = other DNA
cttcccttgaaagctcctcc

SEQ ID NO: 186908 - DNA, 20 bp, synthetic construct
  source 1..20: mol_type = other DNA
acttcccttgaaagctcctc

SEQ ID NO: 186909 - DNA, 20 bp, synthetic construct
  source 1..20: mol_type = other DNA
tacttcccttgaaagctcct

SEQ ID NO: 186910 - DNA, 20 bp, synthetic construct
  source 1..20: mol_type = other DNA
ctacttcccttgaaagctcc

SEQ ID NO: 186911 - DNA, 20 bp, synthetic construct
  source 1..20: mol_type = other DNA
tctacttcccttgaaagctc

SEQ ID NO: 186912 - DNA, 20 bp, synthetic construct
  source 1..20: mol_type = other DNA
atctacttcccttgaaagct

SEQ ID NO: 186913 - DNA, 20 bp, synthetic construct
  source 1..20: mol_type = other DNA
tatctacttcccttgaaagc

SEQ ID NO: 186914 - DNA, 20 bp, synthetic construct
  source 1..20: mol_type = other DNA
gtatctacttcccttgaaag

SEQ ID NO: 186915 - DNA, 20 bp, synthetic construct
  source 1..20: mol_type = other DNA
tgtatctacttcccttgaaa

SEQ ID NO: 186916 - DNA, 20 bp, synthetic construct
  source 1..20: mol_type = other DNA
gtgtatctacttcccttgaa

SEQ ID NO: 186917 - DNA, 20 bp, synthetic construct
  source 1..20: mol_type = other DNA
tgtgtatctacttcccttga

SEQ ID NO: 186918 - DNA, 20 bp, synthetic construct
  source 1..20: mol_type = other DNA
gtgtgtatctacttcccttg

SEQ ID NO: 186919 - DNA, 20 bp, synthetic construct
  source 1..20: mol_type = other DNA
agtgtgtatctacttccctt

SEQ ID NO: 186920 - DNA, 20 bp, synthetic construct
  source 1..20: mol_type = other DNA
cagtgtgtatctacttccct

SEQ ID NO: 186921 - DNA, 20 bp, synthetic construct
  source 1..20: mol_type = other DNA
acagtgtgtatctacttccc

SEQ ID NO: 186922 - DNA, 20 bp, synthetic construct
  source 1..20: mol_type = other DNA
gacagtgtgtatctacttcc

SEQ ID NO: 186923 - DNA, 20 bp, synthetic construct
  source 1..20: mol_type = other DNA
agacagtgtgtatctacttc

SEQ ID NO: 186924 - DNA, 20 bp, synthetic construct
  source 1..20: mol_type = other DNA
gagacagtgtgtatctactt

SEQ ID NO: 186925 - DNA, 20 bp, synthetic construct
  source 1..20: mol_type = other DNA
ggagacagtgtgtatctact

SEQ ID NO: 186926 - DNA, 20 bp, synthetic construct
  source 1..20: mol_type = other DNA
tggagacagtgtgtatctac

SEQ ID NO: 186927 - DNA, 20 bp, synthetic construct
  source 1..20: mol_type = other DNA
atggagacagtgtgtatcta

SEQ ID NO: 186928 - DNA, 20 bp, synthetic construct
  source 1..20: mol_type = other DNA
gatggagacagtgtgtatct

SEQ ID NO: 186929 - DNA, 20 bp, synthetic construct
  source 1..20: mol_type = other DNA
tgatggagacagtgtgtatc

SEQ ID NO: 186930 - DNA, 20 bp, synthetic construct
  source 1..20: mol_type = other DNA
atgatggagacagtgtgtat

SEQ ID NO: 186931 - DNA, 20 bp, synthetic construct
  source 1..20: mol_type = other DNA
aatgatggagacagtgtgta

SEQ ID NO: 186932 - DNA, 20 bp, synthetic construct
  source 1..20: mol_type = other DNA
aaatgatggagacagtgtgt

SEQ ID NO: 186933 - DNA, 20 bp, synthetic construct
  source 1..20: mol_type = other DNA
gaaatgatggagacagtgtg

SEQ ID NO: 186934 - DNA, 20 bp, synthetic construct
  source 1..20: mol_type = other DNA
tgaaatgatggagacagtgt

SEQ ID NO: 186935 - DNA, 20 bp, synthetic construct
  source 1..20: mol_type = other DNA
atgaaatgatggagacagtg

SEQ ID NO: 186936 - DNA, 20 bp, synthetic construct
  source 1..20: mol_type = other DNA
catgaaatgatggagacagt

SEQ ID NO: 186937 - DNA, 20 bp, synthetic construct
  source 1..20: mol_type = other DNA
acatgaaatgatggagacag

SEQ ID NO: 186938 - DNA, 20 bp, synthetic construct
  source 1..20: mol_type = other DNA
gacatgaaatgatggagaca

SEQ ID NO: 186939 - DNA, 20 bp, synthetic construct
  source 1..20: mol_type = other DNA
ggacatgaaatgatggagac

SEQ ID NO: 186940 - DNA, 20 bp, synthetic construct
  source 1..20: mol_type = other DNA
tggacatgaaatgatggaga

SEQ ID NO: 186941 - DNA, 20 bp, synthetic construct
  source 1..20: mol_type = other DNA
atggacatgaaatgatggag

SEQ ID NO: 186942 - DNA, 20 bp, synthetic construct
  source 1..20: mol_type = other DNA
gatggacatgaaatgatgga

SEQ ID NO: 186943 - DNA, 20 bp, synthetic construct
  source 1..20: mol_type = other DNA
tgatggacatgaaatgatgg

SEQ ID NO: 186944 - DNA, 20 bp, synthetic construct
  source 1..20: mol_type = other DNA
gtgatggacatgaaatgatg

SEQ ID NO: 186945 - DNA, 20 bp, synthetic construct
  source 1..20: mol_type = other DNA
tgtgatggacatgaaatgat

SEQ ID NO: 186946 - DNA, 20 bp, synthetic construct
  source 1..20: mol_type = other DNA
gtgtgatggacatgaaatga

SEQ ID NO: 186947 - DNA, 20 bp, synthetic construct
  source 1..20: mol_type = other DNA
agtgtgatggacatgaaatg

SEQ ID NO: 186948 - DNA, 20 bp, synthetic construct
  source 1..20: mol_type = other DNA
gagtgtgatggacatgaaat

SEQ ID NO: 186949 - DNA, 20 bp, synthetic construct
  source 1..20: mol_type = other DNA
agagtgtgatggacatgaaa

SEQ ID NO: 186950 - DNA, 20 bp, synthetic construct
  source 1..20: mol_type = other DNA
tagagtgtgatggacatgaa

SEQ ID NO: 186951 - DNA, 20 bp, synthetic construct
  source 1..20: mol_type = other DNA
ttagagtgtgatggacatga

SEQ ID NO: 186952 - DNA, 20 bp, synthetic construct
  source 1..20: mol_type = other DNA
tttagagtgtgatggacatg

SEQ ID NO: 186953 - DNA, 20 bp, synthetic construct
  source 1..20: mol_type = other DNA
ttttagagtgtgatggacat

SEQ ID NO: 186954 - DNA, 20 bp, synthetic construct
  source 1..20: mol_type = other DNA
attttagagtgtgatggaca

SEQ ID NO: 186955 - DNA, 20 bp, synthetic construct
  source 1..20: mol_type = other DNA
cattttagagtgtgatggac

SEQ ID NO: 186956 - DNA, 20 bp, synthetic construct
  source 1..20: mol_type = other DNA
gcattttagagtgtgatgga

SEQ ID NO: 186957 - DNA, 20 bp, synthetic construct
  source 1..20: mol_type = other DNA
agcattttagagtgtgatgg

SEQ ID NO: 186958 - DNA, 20 bp, synthetic construct
  source 1..20: mol_type = other DNA
aagcattttagagtgtgatg

SEQ ID NO: 186959 - DNA, 20 bp, synthetic construct
  source 1..20: mol_type = other DNA
aaagcattttagagtgtgat

SEQ ID NO: 186960 - DNA, 20 bp, synthetic construct
  source 1..20: mol_type = other DNA
caaagcattttagagtgtga

SEQ ID NO: 186961 - DNA, 20 bp, synthetic construct
  source 1..20: mol_type = other DNA
ccaaagcattttagagtgtg

SEQ ID NO: 186962 - DNA, 20 bp, synthetic construct
  source 1..20: mol_type = other DNA
tccaaagcattttagagtgt

SEQ ID NO: 186963 - DNA, 20 bp, synthetic construct
  source 1..20: mol_type = other DNA
gtccaaagcattttagagtg

SEQ ID NO: 186964 - DNA, 20 bp, synthetic construct
  source 1..20: mol_type = other DNA
tgtccaaagcattttagagt

SEQ ID NO: 186965 - DNA, 20 bp, synthetic construct
  source 1..20: mol_type = other DNA
ttgtccaaagcattttagag

SEQ ID NO: 186966 - DNA, 20 bp, synthetic construct
  source 1..20: mol_type = other DNA
cttgtccaaagcattttaga

SEQ ID NO: 186967 - DNA, 20 bp, synthetic construct
  source 1..20: mol_type = other DNA
tcttgtccaaagcattttag

SEQ ID NO: 186968 - DNA, 20 bp, synthetic construct
  source 1..20: mol_type = other DNA
ttcttgtccaaagcatttta

SEQ ID NO: 186969 - DNA, 20 bp, synthetic construct
  source 1..20: mol_type = other DNA
cttcttgtccaaagcatttt

SEQ ID NO: 186970 - DNA, 20 bp, synthetic construct
  source 1..20: mol_type = other DNA
gcttcttgtccaaagcattt

SEQ ID NO: 186971 - DNA, 20 bp, synthetic construct
  source 1..20: mol_type = other DNA
tgcttcttgtccaaagcatt

SEQ ID NO: 186972 - DNA, 20 bp, synthetic construct
  source 1..20: mol_type = other DNA
ttgcttcttgtccaaagcat

SEQ ID NO: 186973 - DNA, 20 bp, synthetic construct
  source 1..20: mol_type = other DNA
tttgcttcttgtccaaagca

SEQ ID NO: 186974 - DNA, 20 bp, synthetic construct
  source 1..20: mol_type = other DNA
atttgcttcttgtccaaagc

SEQ ID NO: 186975 - DNA, 20 bp, synthetic construct
  source 1..20: mol_type = other DNA
catttgcttcttgtccaaag

SEQ ID NO: 186976 - DNA, 20 bp, synthetic construct
  source 1..20: mol_type = other DNA
acatttgcttcttgtccaaa

SEQ ID NO: 186977 - DNA, 20 bp, synthetic construct
  source 1..20: mol_type = other DNA
aacatttgcttcttgtccaa

SEQ ID NO: 186978 - DNA, 20 bp, synthetic construct
  source 1..20: mol_type = other DNA
taacatttgcttcttgtcca

SEQ ID NO: 186979 - DNA, 20 bp, synthetic construct
  source 1..20: mol_type = other DNA
ttaacatttgcttcttgtcc

SEQ ID NO: 186980 - DNA, 20 bp, synthetic construct
  source 1..20: mol_type = other DNA
tttaacatttgcttcttgtc

SEQ ID NO: 186981 - DNA, 20 bp, synthetic construct
  source 1..20: mol_type = other DNA
ctttaacatttgcttcttgt

SEQ ID NO: 186982 - DNA, 20 bp, synthetic construct
  source 1..20: mol_type = other DNA
tctttaacatttgcttcttg

SEQ ID NO: 186983 - DNA, 20 bp, synthetic construct
  source 1..20: mol_type = other DNA
gtctttaacatttgcttctt

SEQ ID NO: 186984 - DNA, 20 bp, synthetic construct
  source 1..20: mol_type = other DNA
tgtctttaacatttgcttct

SEQ ID NO: 186985 - DNA, 20 bp, synthetic construct
  source 1..20: mol_type = other DNA
ttgtctttaacatttgcttc

SEQ ID NO: 186986 - DNA, 20 bp, synthetic construct
  source 1..20: mol_type = other DNA
tttgtctttaacatttgctt

SEQ ID NO: 186987 - DNA, 20 bp, synthetic construct
  source 1..20: mol_type = other DNA
atttgtctttaacatttgct

SEQ ID NO: 186988 - DNA, 20 bp, synthetic construct
  source 1..20: mol_type = other DNA
catttgtctttaacatttgc

SEQ ID NO: 186989 - DNA, 20 bp, synthetic construct
  source 1..20: mol_type = other DNA
acatttgtctttaacatttg

SEQ ID NO: 186990 - DNA, 20 bp, synthetic construct
  source 1..20: mol_type = other DNA
cacatttgtctttaacattt

SEQ ID NO: 186991 - DNA, 20 bp, synthetic construct
  source 1..20: mol_type = other DNA
ccacatttgtctttaacatt

SEQ ID NO: 186992 - DNA, 20 bp, synthetic construct
  source 1..20: mol_type = other DNA
gccacatttgtctttaacat

SEQ ID NO: 186993 - DNA, 20 bp, synthetic construct
  source 1..20: mol_type = other DNA
ggccacatttgtctttaaca

SEQ ID NO: 186994 - DNA, 20 bp, synthetic construct
  source 1..20: mol_type = other DNA
gggccacatttgtctttaac

SEQ ID NO: 186995 - DNA, 20 bp, synthetic construct
  source 1..20: mol_type = other DNA
tgggccacatttgtctttaa

SEQ ID NO: 186996 - DNA, 20 bp, synthetic construct
  source 1..20: mol_type = other DNA
atgggccacatttgtcttta

SEQ ID NO: 186997 - DNA, 20 bp, synthetic construct
  source 1..20: mol_type = other DNA
aatgggccacatttgtcttt

SEQ ID NO: 186998 - DNA, 20 bp, synthetic construct
  source 1..20: mol_type = other DNA
aaatgggccacatttgtctt

SEQ ID NO: 186999 - DNA, 20 bp, synthetic construct
  source 1..20: mol_type = other DNA
aaaatgggccacatttgtct

SEQ ID NO: 187000 - DNA, 20 bp, synthetic construct
  source 1..20: mol_type = other DNA
gaaaatgggccacatttgtc

SEQ ID NO: 187001 - DNA, 20 bp, synthetic construct
  source 1..20: mol_type = other DNA
ggaaaatgggccacatttgt

SEQ ID NO: 187002 - DNA, 20 bp, synthetic construct
  source 1..20: mol_type = other DNA
aggaaaatgggccacatttg

SEQ ID NO: 187003 - DNA, 20 bp, synthetic construct
  source 1..20: mol_type = other DNA
caggaaaatgggccacattt

SEQ ID NO: 187004 - DNA, 20 bp, synthetic construct
  source 1..20: mol_type = other DNA
acaggaaaatgggccacatt

SEQ ID NO: 187005 - DNA, 20 bp, synthetic construct
  source 1..20: mol_type = other DNA
tacaggaaaatgggccacat

SEQ ID NO: 187006 - DNA, 20 bp, synthetic construct
  source 1..20: mol_type = other DNA
gtacaggaaaatgggccaca

SEQ ID NO: 187007 - DNA, 20 bp, synthetic construct
  source 1..20: mol_type = other DNA
tgtacaggaaaatgggccac

SEQ ID NO: 187008 - DNA, 20 bp, synthetic construct
  source 1..20: mol_type = other DNA
ttgtacaggaaaatgggcca

SEQ ID NO: 187009 - DNA, 20 bp, synthetic construct
  source 1..20: mol_type = other DNA
tttgtacaggaaaatgggcc

SEQ ID NO: 187010 - DNA, 20 bp, synthetic construct
  source 1..20: mol_type = other DNA
ctttgtacaggaaaatgggc

SEQ ID NO: 187011 - DNA, 20 bp, synthetic construct
  source 1..20: mol_type = other DNA
tctttgtacaggaaaatggg

SEQ ID NO: 187012 - DNA, 20 bp, synthetic construct
  source 1..20: mol_type = other DNA
ctctttgtacaggaaaatgg

SEQ ID NO: 187013 - DNA, 20 bp, synthetic construct
  source 1..20: mol_type = other DNA
cctctttgtacaggaaaatg

SEQ ID NO: 187014 - DNA, 20 bp, synthetic construct
  source 1..20: mol_type = other DNA
ccctctttgtacaggaaaat

SEQ ID NO: 187015 - DNA, 20 bp, synthetic construct
  source 1..20: mol_type = other DNA
gccctctttgtacaggaaaa

SEQ ID NO: 187016 - DNA, 20 bp, synthetic construct
  source 1..20: mol_type = other DNA
agccctctttgtacaggaaa

SEQ ID NO: 187017 - DNA, 20 bp, synthetic construct
  source 1..20: mol_type = other DNA
cagccctctttgtacaggaa

SEQ ID NO: 187018 - DNA, 20 bp, synthetic construct
  source 1..20: mol_type = other DNA
gcagccctctttgtacagga

SEQ ID NO: 187019 - DNA, 20 bp, synthetic construct
  source 1..20: mol_type = other DNA
agcagccctctttgtacagg

SEQ ID NO: 187020 - DNA, 20 bp, synthetic construct
  source 1..20: mol_type = other DNA
gagcagccctctttgtacag

SEQ ID NO: 187021 - DNA, 20 bp, synthetic construct
  source 1..20: mol_type = other DNA
ggagcagccctctttgtaca

SEQ ID NO: 187022 - DNA, 20 bp, synthetic construct
  source 1..20: mol_type = other DNA
gggagcagccctctttgtac

SEQ ID NO: 187023 - DNA, 20 bp, synthetic construct
  source 1..20: mol_type = other DNA
tgggagcagccctctttgta

SEQ ID NO: 187024 - DNA, 20 bp, synthetic construct
  source 1..20: mol_type = other DNA
atgggagcagccctctttgt

SEQ ID NO: 187025 - DNA, 20 bp, synthetic construct
  source 1..20: mol_type = other DNA
catgggagcagccctctttg

SEQ ID NO: 187026 - DNA, 20 bp, synthetic construct
  source 1..20: mol_type = other DNA
gcatgggagcagccctcttt

SEQ ID NO: 187027 - DNA, 20 bp, synthetic construct
  source 1..20: mol_type = other DNA
ggcatgggagcagccctctt

SEQ ID NO: 187028 - DNA, 20 bp, synthetic construct
  source 1..20: mol_type = other DNA
tggcatgggagcagccctct

SEQ ID NO: 187029 - DNA, 20 bp, synthetic construct
  source 1..20: mol_type = other DNA
ctggcatgggagcagccctc

SEQ ID NO: 187030 - DNA, 20 bp, synthetic construct
  source 1..20: mol_type = other DNA
cctggcatgggagcagccct

SEQ ID NO: 187031 - DNA, 20 bp, synthetic construct
  source 1..20: mol_type = other DNA
gcctggcatgggagcagccc

SEQ ID NO: 187032 - DNA, 20 bp, synthetic construct
  source 1..20: mol_type = other DNA
agcctggcatgggagcagcc

SEQ ID NO: 187033 - DNA, 20 bp, synthetic construct
  source 1..20: mol_type = other DNA
tagcctggcatgggagcagc

SEQ ID NO: 187034 - DNA, 20 bp, synthetic construct
  source 1..20: mol_type = other DNA
atagcctggcatgggagcag

SEQ ID NO: 187035 - DNA, 20 bp, synthetic construct
  source 1..20: mol_type = other DNA
aatagcctggcatgggagca

SEQ ID NO: 187036 - DNA, 20 bp, synthetic construct
  source 1..20: mol_type = other DNA
caatagcctggcatgggagc

SEQ ID NO: 187037 - DNA, 20 bp, synthetic construct
  source 1..20: mol_type = other DNA
ccaatagcctggcatgggag

SEQ ID NO: 187038 - DNA, 20 bp, synthetic construct
  source 1..20: mol_type = other DNA
gccaatagcctggcatggga

SEQ ID NO: 187039 - DNA, 20 bp, synthetic construct
  source 1..20: mol_type = other DNA
tgccaatagcctggcatggg

SEQ ID NO: 187040 - DNA, 20 bp, synthetic construct
  source 1..20: mol_type = other DNA
gtgccaatagcctggcatgg

SEQ ID NO: 187041 - DNA, 20 bp, synthetic construct
  source 1..20: mol_type = other DNA
agtgccaatagcctggcatg

SEQ ID NO: 187042 - DNA, 20 bp, synthetic construct
  source 1..20: mol_type = other DNA
cagtgccaatagcctggcat

SEQ ID NO: 187043 - DNA, 20 bp, synthetic construct
  source 1..20: mol_type = other DNA
ccagtgccaatagcctggca

SEQ ID NO: 187044 - DNA, 20 bp, synthetic construct
  source 1..20: mol_type = other DNA
accagtgccaatagcctggc

SEQ ID NO: 187045 - DNA, 20 bp, synthetic construct
  source 1..20: mol_type = other DNA
caccagtgccaatagcctgg

SEQ ID NO: 187046 - DNA, 20 bp, synthetic construct
  source 1..20: mol_type = other DNA
ccaccagtgccaatagcctg

SEQ ID NO: 187047 - DNA, 20 bp, synthetic construct
  source 1..20: mol_type = other DNA
cccaccagtgccaatagcct

SEQ ID NO: 187048 - DNA, 20 bp, synthetic construct
  source 1..20: mol_type = other DNA
gcccaccagtgccaatagcc

SEQ ID NO: 187049 - DNA, 20 bp, synthetic construct
  source 1..20: mol_type = other DNA
tgcccaccagtgccaatagc

SEQ ID NO: 187050 - DNA, 20 bp, synthetic construct
  source 1..20: mol_type = other DNA
atgcccaccagtgccaatag

SEQ ID NO: 187051 - DNA, 20 bp, synthetic construct
  source 1..20: mol_type = other DNA
catgcccaccagtgccaata

SEQ ID NO: 187052 - DNA, 20 bp, synthetic construct
  source 1..20: mol_type = other DNA
tcatgcccaccagtgccaat

SEQ ID NO: 187053 - DNA, 20 bp, synthetic construct
  source 1..20: mol_type = other DNA
ctcatgcccaccagtgccaa

SEQ ID NO: 187054 - DNA, 20 bp, synthetic construct
  source 1..20: mol_type = other DNA
cctcatgcccaccagtgcca

SEQ ID NO: 187055 - DNA, 20 bp, synthetic construct
  source 1..20: mol_type = other DNA
gcctcatgcccaccagtgcc

SEQ ID NO: 187056 - DNA, 20 bp, synthetic construct
  source 1..20: mol_type = other DNA
agcctcatgcccaccagtgc

SEQ ID NO: 187057 - DNA, 20 bp, synthetic construct
  source 1..20: mol_type = other DNA
aagcctcatgcccaccagtg

SEQ ID NO: 187058 - DNA, 20 bp, synthetic construct
  source 1..20: mol_type = other DNA
gaagcctcatgcccaccagt

SEQ ID NO: 187059 - DNA, 20 bp, synthetic construct
  source 1..20: mol_type = other DNA
agaagcctcatgcccaccag

SEQ ID NO: 187060 - DNA, 20 bp, synthetic construct
  source 1..20: mol_type = other DNA
gagaagcctcatgcccacca

SEQ ID NO: 187061 - DNA, 20 bp, synthetic construct
  source 1..20: mol_type = other DNA
agagaagcctcatgcccacc

SEQ ID NO: 187062 - DNA, 20 bp, synthetic construct
  source 1..20: mol_type = other DNA
cagagaagcctcatgcccac

SEQ ID NO: 187063 - DNA, 20 bp, synthetic construct
  source 1..20: mol_type = other DNA
gcagagaagcctcatgccca

SEQ ID NO: 187064 - DNA, 20 bp, synthetic construct
  source 1..20: mol_type = other DNA
agcagagaagcctcatgccc

SEQ ID NO: 187065 - DNA, 20 bp, synthetic construct
  source 1..20: mol_type = other DNA
cagcagagaagcctcatgcc

SEQ ID NO: 187066 - DNA, 20 bp, synthetic construct
  source 1..20: mol_type = other DNA
gcagcagagaagcctcatgc

SEQ ID NO: 187067 - DNA, 20 bp, synthetic construct
  source 1..20: mol_type = other DNA
ggcagcagagaagcctcatg

SEQ ID NO: 187068 - DNA, 20 bp, synthetic construct
  source 1..20: mol_type = other DNA
gggcagcagagaagcctcat

SEQ ID NO: 187069 - DNA, 20 bp, synthetic construct
  source 1..20: mol_type = other DNA
agggcagcagagaagcctca

SEQ ID NO: 187070 - DNA, 20 bp, synthetic construct
  source 1..20: mol_type = other DNA
cagggcagcagagaagcctc

SEQ ID NO: 187071 - DNA, 20 bp, synthetic construct
  source 1..20: mol_type = other DNA
ccagggcagcagagaagcct

SEQ ID NO: 187072 - DNA, 20 bp, synthetic construct
  source 1..20: mol_type = other DNA
gccagggcagcagagaagcc

SEQ ID NO: 187073 - DNA, 20 bp, synthetic construct
  source 1..20: mol_type = other DNA
ggccagggcagcagagaagc

SEQ ID NO: 187074 - DNA, 20 bp, synthetic construct
  source 1..20: mol_type = other DNA
cggccagggcagcagagaag

SEQ ID NO: 187075 - DNA, 20 bp, synthetic construct
  source 1..20: mol_type = other DNA
ccggccagggcagcagagaa

SEQ ID NO: 187076 - DNA, 20 bp, synthetic construct
  source 1..20: mol_type = other DNA
cccggccagggcagcagaga

SEQ ID NO: 187077 - DNA, 20 bp, synthetic construct
  source 1..20: mol_type = other DNA
ccccggccagggcagcagag

SEQ ID NO: 187078 - DNA, 20 bp, synthetic construct
  source 1..20: mol_type = other DNA
cccccggccagggcagcaga

SEQ ID NO: 187079 - DNA, 20 bp, synthetic construct
  source 1..20: mol_type = other DNA
ccccccggccagggcagcag

SEQ ID NO: 187080 - DNA, 20 bp, synthetic construct
  source 1..20: mol_type = other DNA
accccccggccagggcagca

SEQ ID NO: 187081 - DNA, 20 bp, synthetic construct
  source 1..20: mol_type = other DNA
aaccccccggccagggcagc

SEQ ID NO: 187082 - DNA, 20 bp, synthetic construct
  source 1..20: mol_type = other DNA
gaaccccccggccagggcag

SEQ ID NO: 187083 - DNA, 20 bp, synthetic construct
  source 1..20: mol_type = other DNA
agaaccccccggccagggca

SEQ ID NO: 187084 - DNA, 20 bp, synthetic construct
  source 1..20: mol_type = other DNA
gagaaccccccggccagggc

SEQ ID NO: 187085 - DNA, 20 bp, synthetic construct
  source 1..20: mol_type = other DNA
agagaaccccccggccaggg

SEQ ID NO: 187086 - DNA, 20 bp, synthetic construct
  source 1..20: mol_type = other DNA
gagagaaccccccggccagg

SEQ ID NO: 187087 - DNA, 20 bp, synthetic construct
  source 1..20: mol_type = other DNA
tgagagaaccccccggccag

SEQ ID NO: 187088 - DNA, 20 bp, synthetic construct
  source 1..20: mol_type = other DNA
gtgagagaaccccccggcca

SEQ ID NO: 187089 - DNA, 20 bp, synthetic construct
  source 1..20: mol_type = other DNA
agtgagagaaccccccggcc

SEQ ID NO: 187090 - DNA, 20 bp, synthetic construct
  source 1..20: mol_type = other DNA
gagtgagagaaccccccggc

SEQ ID NO: 187091 - DNA, 20 bp, synthetic construct
  source 1..20: mol_type = other DNA
tgagtgagagaaccccccgg

SEQ ID NO: 187092 - DNA, 20 bp, synthetic construct
  source 1..20: mol_type = other DNA
gtgagtgagagaaccccccg

SEQ ID NO: 187093 - DNA, 20 bp, synthetic construct
  source 1..20: mol_type = other DNA
ggtgagtgagagaacccccc

SEQ ID NO: 187094 - DNA, 20 bp, synthetic construct
  source 1..20: mol_type = other DNA
tggtgagtgagagaaccccc

SEQ ID NO: 187095 - DNA, 20 bp, synthetic construct
  source 1..20: mol_type = other DNA
atggtgagtgagagaacccc

SEQ ID NO: 187096 - DNA, 20 bp, synthetic construct
  source 1..20: mol_type = other DNA
aatggtgagtgagagaaccc

SEQ ID NO: 187097 - DNA, 20 bp, synthetic construct
  source 1..20: mol_type = other DNA
caatggtgagtgagagaacc

SEQ ID NO: 187098 - DNA, 20 bp, synthetic construct
  source 1..20: mol_type = other DNA
ccaatggtgagtgagagaac

SEQ ID NO: 187099 - DNA, 20 bp, synthetic construct
  source 1..20: mol_type = other DNA
gccaatggtgagtgagagaa

SEQ ID NO: 187100 - DNA, 20 bp, synthetic construct
  source 1..20: mol_type = other DNA
agccaatggtgagtgagaga

SEQ ID NO: 187101 - DNA, 20 bp, synthetic construct
  source 1..20: mol_type = other DNA
gagccaatggtgagtgagag

SEQ ID NO: 187102 - DNA, 20 bp, synthetic construct
  source 1..20: mol_type = other DNA
agagccaatggtgagtgaga

SEQ ID NO: 187103 - DNA, 20 bp, synthetic construct
  source 1..20: mol_type = other DNA
gagagccaatggtgagtgag

SEQ ID NO: 187104 - DNA, 20 bp, synthetic construct
  source 1..20: mol_type = other DNA
agagagccaatggtgagtga

SEQ ID NO: 187105 - DNA, 20 bp, synthetic construct
  source 1..20: mol_type = other DNA
cagagagccaatggtgagtg

SEQ ID NO: 187106 - DNA, 20 bp, synthetic construct
  source 1..20: mol_type = other DNA
tcagagagccaatggtgagt

SEQ ID NO: 187107 - DNA, 20 bp, synthetic construct
  source 1..20: mol_type = other DNA
gtcagagagccaatggtgag

SEQ ID NO: 187108 - DNA, 20 bp, synthetic construct
  source 1..20: mol_type = other DNA
tgtcagagagccaatggtga

SEQ ID NO: 187109 - DNA, 20 bp, synthetic construct
  source 1..20: mol_type = other DNA
gtgtcagagagccaatggtg

SEQ ID NO: 187110 - DNA, 20 bp, synthetic construct
  source 1..20: mol_type = other DNA
ggtgtcagagagccaatggt

SEQ ID NO: 187111 - DNA, 20 bp, synthetic construct
  source 1..20: mol_type = other DNA
aggtgtcagagagccaatgg

SEQ ID NO: 187112 - DNA, 20 bp, synthetic construct
  source 1..20: mol_type = other DNA
caggtgtcagagagccaatg

SEQ ID NO: 187113 - DNA, 20 bp, synthetic construct
  source 1..20: mol_type = other DNA
ccaggtgtcagagagccaat

SEQ ID NO: 187114 - DNA, 20 bp, synthetic construct
  source 1..20: mol_type = other DNA
tccaggtgtcagagagccaa

SEQ ID NO: 187115 - DNA, 20 bp, synthetic construct
  source 1..20: mol_type = other DNA
ctccaggtgtcagagagcca

SEQ ID NO: 187116 - DNA, 20 bp, synthetic construct
  source 1..20: mol_type = other DNA
tctccaggtgtcagagagcc

SEQ ID NO: 187117 - DNA, 20 bp, synthetic construct
  source 1..20: mol_type = other DNA
ctctccaggtgtcagagagc

SEQ ID NO: 187118 - DNA, 20 bp, synthetic construct
  source 1..20: mol_type = other DNA
tctctccaggtgtcagagag

SEQ ID NO: 187119 - DNA, 20 bp, synthetic construct
  source 1..20: mol_type = other DNA
gtctctccaggtgtcagaga

SEQ ID NO: 187120 - DNA, 20 bp, synthetic construct
  source 1..20: mol_type = other DNA
ggtctctccaggtgtcagag

SEQ ID NO: 187121 - DNA, 20 bp, synthetic construct
  source 1..20: mol_type = other DNA
tggtctctccaggtgtcaga

SEQ ID NO: 187122 - DNA, 20 bp, synthetic construct
  source 1..20: mol_type = other DNA
gtggtctctccaggtgtcag

SEQ ID NO: 187123 - DNA, 20 bp, synthetic construct
  source 1..20: mol_type = other DNA
ggtggtctctccaggtgtca

SEQ ID NO: 187124 - DNA, 20 bp, synthetic construct
  source 1..20: mol_type = other DNA
tggtggtctctccaggtgtc

SEQ ID NO: 187125 - DNA, 20 bp, synthetic construct
  source 1..20: mol_type = other DNA
gtggtggtctctccaggtgt

SEQ ID NO: 187126 - DNA, 20 bp, synthetic construct
  source 1..20: mol_type = other DNA
ggtggtggtctctccaggtg

SEQ ID NO: 187127 - DNA, 20 bp, synthetic construct
  source 1..20: mol_type = other DNA
gggtggtggtctctccaggt

SEQ ID NO: 187128 - DNA, 20 bp, synthetic construct
  source 1..20: mol_type = other DNA
agggtggtggtctctccagg

SEQ ID NO: 187129 - DNA, 20 bp, synthetic construct
  source 1..20: mol_type = other DNA
aagggtggtggtctctccag

SEQ ID NO: 187130 - DNA, 20 bp, synthetic construct
  source 1..20: mol_type = other DNA
caagggtggtggtctctcca

SEQ ID NO: 187131 - DNA, 20 bp, synthetic construct
  source 1..20: mol_type = other DNA
ccaagggtggtggtctctcc

SEQ ID NO: 187132 - DNA, 20 bp, synthetic construct
  source 1..20: mol_type = other DNA
cccaagggtggtggtctctc

SEQ ID NO: 187133 - DNA, 20 bp, synthetic construct
  source 1..20: mol_type = other DNA
gcccaagggtggtggtctct

SEQ ID NO: 187134 - DNA, 20 bp, synthetic construct
  source 1..20: mol_type = other DNA
agcccaagggtggtggtctc

SEQ ID NO: 187135 - DNA, 20 bp, synthetic construct
  source 1..20: mol_type = other DNA
aagcccaagggtggtggtct

SEQ ID NO: 187136 - DNA, 20 bp, synthetic construct
  source 1..20: mol_type = other DNA
aaagcccaagggtggtggtc

SEQ ID NO: 187137 - DNA, 20 bp, synthetic construct
  source 1..20: mol_type = other DNA
gaaagcccaagggtggtggt

SEQ ID NO: 187138 - DNA, 20 bp, synthetic construct
  source 1..20: mol_type = other DNA
tgaaagcccaagggtggtgg

SEQ ID NO: 187139 - DNA, 20 bp, synthetic construct
  source 1..20: mol_type = other DNA
atgaaagcccaagggtggtg

SEQ ID NO: 187140 - DNA, 20 bp, synthetic construct
  source 1..20: mol_type = other DNA
catgaaagcccaagggtggt

SEQ ID NO: 187141 - DNA, 20 bp, synthetic construct
  source 1..20: mol_type = other DNA
tcatgaaagcccaagggtgg

SEQ ID NO: 187142 - DNA, 20 bp, synthetic construct
  source 1..20: mol_type = other DNA
atcatgaaagcccaagggtg

SEQ ID NO: 187143 - DNA, 20 bp, synthetic construct
  source 1..20: mol_type = other DNA
catcatgaaagcccaagggt

SEQ ID NO: 187144 - DNA, 20 bp, synthetic construct
  source 1..20: mol_type = other DNA
gcatcatgaaagcccaaggg

SEQ ID NO: 187145 - DNA, 20 bp, synthetic construct
  source 1..20: mol_type = other DNA
agcatcatgaaagcccaagg

SEQ ID NO: 187146 - DNA, 20 bp, synthetic construct
  source 1..20: mol_type = other DNA
gagcatcatgaaagcccaag

SEQ ID NO: 187147 - DNA, 20 bp, synthetic construct
  source 1..20: mol_type = other DNA
tgagcatcatgaaagcccaa

SEQ ID NO: 187148 - DNA, 20 bp, synthetic construct
  source 1..20: mol_type = other DNA
gtgagcatcatgaaagccca

SEQ ID NO: 187149 - DNA, 20 bp, synthetic construct
  source 1..20: mol_type = other DNA
tgtgagcatcatgaaagccc

SEQ ID NO: 187150 - DNA, 20 bp, synthetic construct
  source 1..20: mol_type = other DNA
ctgtgagcatcatgaaagcc

SEQ ID NO: 187151 - DNA, 20 bp, synthetic construct
  source 1..20: mol_type = other DNA
tctgtgagcatcatgaaagc

SEQ ID NO: 187152 - DNA, 20 bp, synthetic construct
  source 1..20: mol_type = other DNA
ttctgtgagcatcatgaaag

SEQ ID NO: 187153 - DNA, 20 bp, synthetic construct
  source 1..20: mol_type = other DNA
attctgtgagcatcatgaaa

SEQ ID NO: 187154 - DNA, 20 bp, synthetic construct
  source 1..20: mol_type = other DNA
gattctgtgagcatcatgaa

SEQ ID NO: 187155 - DNA, 20 bp, synthetic construct
  source 1..20: mol_type = other DNA
ggattctgtgagcatcatga

SEQ ID NO: 187156 - DNA, 20 bp, synthetic construct
  source 1..20: mol_type = other DNA
tggattctgtgagcatcatg

SEQ ID NO: 187157 - DNA, 20 bp, synthetic construct
  source 1..20: mol_type = other DNA
gtggattctgtgagcatcat

SEQ ID NO: 187158 - DNA, 20 bp, synthetic construct
  source 1..20: mol_type = other DNA
tgtggattctgtgagcatca

SEQ ID NO: 187159 - DNA, 20 bp, synthetic construct
  source 1..20: mol_type = other DNA
gtgtggattctgtgagcatc

SEQ ID NO: 187160 - DNA, 20 bp, synthetic construct
  source 1..20: mol_type = other DNA
agtgtggattctgtgagcat

SEQ ID NO: 187161 - DNA, 20 bp, synthetic construct
  source 1..20: mol_type = other DNA
cagtgtggattctgtgagca

SEQ ID NO: 187162 - DNA, 20 bp, synthetic construct
  source 1..20: mol_type = other DNA
acagtgtggattctgtgagc

SEQ ID NO: 187163 - DNA, 20 bp, synthetic construct
  source 1..20: mol_type = other DNA
aacagtgtggattctgtgag

SEQ ID NO: 187164 - DNA, 20 bp, synthetic construct
  source 1..20: mol_type = other DNA
caacagtgtggattctgtga

SEQ ID NO: 187165 - DNA, 20 bp, synthetic construct
  source 1..20: mol_type = other DNA
ccaacagtgtggattctgtg

SEQ ID NO: 187166 - DNA, 20 bp, synthetic construct
  source 1..20: mol_type = other DNA
tccaacagtgtggattctgt

SEQ ID NO: 187167 - DNA, 20 bp, synthetic construct
  source 1..20: mol_type = other DNA
ctccaacagtgtggattctg

SEQ ID NO: 187168 - DNA, 20 bp, synthetic construct
  source 1..20: mol_type = other DNA
gctccaacagtgtggattct

SEQ ID NO: 187169 - DNA, 20 bp, synthetic construct
  source 1..20: mol_type = other DNA
agctccaacagtgtggattc

SEQ ID NO: 187170 - DNA, 20 bp, synthetic construct
  source 1..20: mol_type = other DNA
aagctccaacagtgtggatt

SEQ ID NO: 187171 - DNA, 20 bp, synthetic construct
  source 1..20: mol_type = other DNA
aaagctccaacagtgtggat

SEQ ID NO: 187172 - DNA, 20 bp, synthetic construct
  source 1..20: mol_type = other DNA
taaagctccaacagtgtgga

SEQ ID NO: 187173 - DNA, 20 bp, synthetic construct
  source 1..20: mol_type = other DNA
ttaaagctccaacagtgtgg

SEQ ID NO: 187174 - DNA, 20 bp, synthetic construct
  source 1..20: mol_type = other DNA
cttaaagctccaacagtgtg

SEQ ID NO: 187175 - DNA, 20 bp, synthetic construct
  source 1..20: mol_type = other DNA
ccttaaagctccaacagtgt

SEQ ID NO: 187176 - DNA, 20 bp, synthetic construct
  source 1..20: mol_type = other DNA
tccttaaagctccaacagtg

SEQ ID NO: 187177 - DNA, 20 bp, synthetic construct
  source 1..20: mol_type = other DNA
ctccttaaagctccaacagt

SEQ ID NO: 187178 - DNA, 20 bp, synthetic construct
  source 1..20: mol_type = other DNA
gctccttaaagctccaacag

SEQ ID NO: 187179 - DNA, 20 bp, synthetic construct
  source 1..20: mol_type = other DNA
ggctccttaaagctccaaca

SEQ ID NO: 187180 - DNA, 20 bp, synthetic construct
  source 1..20: mol_type = other DNA
aggctccttaaagctccaac

SEQ ID NO: 187181 - DNA, 20 bp, synthetic construct
  source 1..20: mol_type = other DNA
caggctccttaaagctccaa

SEQ ID NO: 187182 - DNA, 20 bp, synthetic construct
  source 1..20: mol_type = other DNA
ccaggctccttaaagctcca

SEQ ID NO: 187183 - DNA, 20 bp, synthetic construct
  source 1..20: mol_type = other DNA
tccaggctccttaaagctcc

SEQ ID NO: 187184 - DNA, 20 bp, synthetic construct
  source 1..20: mol_type = other DNA
atccaggctccttaaagctc

SEQ ID NO: 187185 - DNA, 20 bp, synthetic construct
  source 1..20: mol_type = other DNA
gatccaggctccttaaagct

SEQ ID NO: 187186 - DNA, 20 bp, synthetic construct
  source 1..20: mol_type = other DNA
tgatccaggctccttaaagc

SEQ ID NO: 187187 - DNA, 20 bp, synthetic construct
  source 1..20: mol_type = other DNA
ttgatccaggctccttaaag

SEQ ID NO: 187188 - DNA, 20 bp, synthetic construct
  source 1..20: mol_type = other DNA
gttgatccaggctccttaaa

SEQ ID NO: 187189 - DNA, 20 bp, synthetic construct
  source 1..20: mol_type = other DNA
agttgatccaggctccttaa

SEQ ID NO: 187190 - DNA, 20 bp, synthetic construct
  source 1..20: mol_type = other DNA
cagttgatccaggctcctta

SEQ ID NO: 187191 - DNA, 20 bp, synthetic construct
  source 1..20: mol_type = other DNA
ccagttgatccaggctcctt

SEQ ID NO: 187192 - DNA, 20 bp, synthetic construct
  source 1..20: mol_type = other DNA
tccagttgatccaggctcct

SEQ ID NO: 187193 - DNA, 20 bp, synthetic construct
  source 1..20: mol_type = other DNA
ttccagttgatccaggctcc

SEQ ID NO: 187194 - DNA, 20 bp, synthetic construct
  source 1..20: mol_type = other DNA
gttccagttgatccaggctc

SEQ ID NO: 187195 - DNA, 20 bp, synthetic construct
  source 1..20: mol_type = other DNA
tgttccagttgatccaggct

SEQ ID NO: 187196 - DNA, 20 bp, synthetic construct
  source 1..20: mol_type = other DNA
ctgttccagttgatccaggc

SEQ ID NO: 187197 - DNA, 20 bp, synthetic construct
  source 1..20: mol_type = other DNA
cctgttccagttgatccagg

SEQ ID NO: 187198 - DNA, 20 bp, synthetic construct
  source 1..20: mol_type = other DNA
gcctgttccagttgatccag

SEQ ID NO: 187199 - DNA, 20 bp, synthetic construct
  source 1..20: mol_type = other DNA
tgcctgttccagttgatcca

SEQ ID NO: 187200 - DNA, 20 bp, synthetic construct
  source 1..20: mol_type = other DNA
ctgcctgttccagttgatcc

SEQ ID NO: 187201 - DNA, 20 bp, synthetic construct
  source 1..20: mol_type = other DNA
cctgcctgttccagttgatc

SEQ ID NO: 187202 - DNA, 20 bp, synthetic construct
  source 1..20: mol_type = other DNA
ccctgcctgttccagttgat

SEQ ID NO: 187203 - DNA, 20 bp, synthetic construct
  source 1..20: mol_type = other DNA
tccctgcctgttccagttga

SEQ ID NO: 187204 - DNA, 20 bp, synthetic construct
  source 1..20: mol_type = other DNA
ctccctgcctgttccagttg

SEQ ID NO: 187205 - DNA, 20 bp, synthetic construct
  source 1..20: mol_type = other DNA
actccctgcctgttccagtt

SEQ ID NO: 187206 - DNA, 20 bp, synthetic construct
  source 1..20: mol_type = other DNA
tactccctgcctgttccagt

SEQ ID NO: 187207 - DNA, 20 bp, synthetic construct
  source 1..20: mol_type = other DNA
gtactccctgcctgttccag

SEQ ID NO: 187208 - DNA, 20 bp, synthetic construct
  source 1..20: mol_type = other DNA
agtactccctgcctgttcca

SEQ ID NO: 187209 - DNA, 20 bp, synthetic construct
  source 1..20: mol_type = other DNA
tagtactccctgcctgttcc

SEQ ID NO: 187210 - DNA, 20 bp, synthetic construct
  source 1..20: mol_type = other DNA
ctagtactccctgcctgttc

SEQ ID NO: 187211 - DNA, 20 bp, synthetic construct
  source 1..20: mol_type = other DNA
cctagtactccctgcctgtt

SEQ ID NO: 187212 - DNA, 20 bp, synthetic construct
  source 1..20: mol_type = other DNA
tcctagtactccctgcctgt

SEQ ID NO: 187213 - DNA, 20 bp, synthetic construct
  source 1..20: mol_type = other DNA
gtcctagtactccctgcctg

SEQ ID NO: 187214 - DNA, 20 bp, synthetic construct
  source 1..20: mol_type = other DNA
tgtcctagtactccctgcct

SEQ ID NO: 187215 - DNA, 20 bp, synthetic construct
  source 1..20: mol_type = other DNA
ctgtcctagtactccctgcc

SEQ ID NO: 187216 - DNA, 20 bp, synthetic construct
  source 1..20: mol_type = other DNA
gctgtcctagtactccctgc

SEQ ID NO: 187217 - DNA, 20 bp, synthetic construct
  source 1..20: mol_type = other DNA
ggctgtcctagtactccctg

SEQ ID NO: 187218 - DNA, 20 bp, synthetic construct
  source 1..20: mol_type = other DNA
gggctgtcctagtactccct

SEQ ID NO: 187219 - DNA, 20 bp, synthetic construct
  source 1..20: mol_type = other DNA
tgggctgtcctagtactccc

SEQ ID NO: 187220 - DNA, 20 bp, synthetic construct
  source 1..20: mol_type = other DNA
ctgggctgtcctagtactcc

SEQ ID NO: 187221 - DNA, 20 bp, synthetic construct
  source 1..20: mol_type = other DNA
gctgggctgtcctagtactc

SEQ ID NO: 187222 - DNA, 20 bp, synthetic construct
  source 1..20: mol_type = other DNA
tgctgggctgtcctagtact

SEQ ID NO: 187223 - DNA, 20 bp, synthetic construct
  source 1..20: mol_type = other DNA
atgctgggctgtcctagtac

SEQ ID NO: 187224 - DNA, 20 bp, synthetic construct
  source 1..20: mol_type = other DNA
aatgctgggctgtcctagta

SEQ ID NO: 187225 - DNA, 20 bp, synthetic construct
  source 1..20: mol_type = other DNA
caatgctgggctgtcctagt

SEQ ID NO: 187226 - DNA, 20 bp, synthetic construct
  source 1..20: mol_type = other DNA
gcaatgctgggctgtcctag

SEQ ID NO: 187227 - DNA, 20 bp, synthetic construct
  source 1..20: mol_type = other DNA
ggcaatgctgggctgtccta

SEQ ID NO: 187228 - DNA, 20 bp, synthetic construct
  source 1..20: mol_type = other DNA
gggcaatgctgggctgtcct

SEQ ID NO: 187229 - DNA, 20 bp, synthetic construct
  source 1..20: mol_type = other DNA
ggggcaatgctgggctgtcc

SEQ ID NO: 187230 - DNA, 20 bp, synthetic construct
  source 1..20: mol_type = other DNA
tggggcaatgctgggctgtc

SEQ ID NO: 187231 - DNA, 20 bp, synthetic construct
  source 1..20: mol_type = other DNA
ttggggcaatgctgggctgt

SEQ ID NO: 187232 - DNA, 20 bp, synthetic construct
  source 1..20: mol_type = other DNA
tttggggcaatgctgggctg

SEQ ID NO: 187233 - DNA, 20 bp, synthetic construct
  source 1..20: mol_type = other DNA
ttttggggcaatgctgggct

SEQ ID NO: 187234 - DNA, 20 bp, synthetic construct
  source 1..20: mol_type = other DNA
attttggggcaatgctgggc

SEQ ID NO: 187235 - DNA, 20 bp, synthetic construct
  source 1..20: mol_type = other DNA
tattttggggcaatgctggg

SEQ ID NO: 187236 - DNA, 20 bp, synthetic construct
  source 1..20: mol_type = other DNA
atattttggggcaatgctgg

SEQ ID NO: 187237 - DNA, 20 bp, synthetic construct
  source 1..20: mol_type = other DNA
gatattttggggcaatgctg

SEQ ID NO: 187238 - DNA, 20 bp, synthetic construct
  source 1..20: mol_type = other DNA
ggatattttggggcaatgct

SEQ ID NO: 187239 - DNA, 20 bp, synthetic construct
  source 1..20: mol_type = other DNA
tggatattttggggcaatgc

SEQ ID NO: 187240 - DNA, 20 bp, synthetic construct
  source 1..20: mol_type = other DNA
ctggatattttggggcaatg

SEQ ID NO: 187241 - DNA, 20 bp, synthetic construct
  source 1..20: mol_type = other DNA
cctggatattttggggcaat

SEQ ID NO: 187242 - DNA, 20 bp, synthetic construct
  source 1..20: mol_type = other DNA
gcctggatattttggggcaa

SEQ ID NO: 187243 - DNA, 20 bp, synthetic construct
  source 1..20: mol_type = other DNA
ggcctggatattttggggca

SEQ ID NO: 187244 - DNA, 20 bp, synthetic construct
  source 1..20: mol_type = other DNA
aggcctggatattttggggc

SEQ ID NO: 187245 - DNA, 20 bp, synthetic construct
  source 1..20: mol_type = other DNA
caggcctggatattttgggg

SEQ ID NO: 187246 - DNA, 20 bp, synthetic construct
  source 1..20: mol_type = other DNA
tcaggcctggatattttggg

SEQ ID NO: 187247 - DNA, 20 bp, synthetic construct
  source 1..20: mol_type = other DNA
atcaggcctggatattttgg

SEQ ID NO: 187248 - DNA, 20 bp, synthetic construct
  source 1..20: mol_type = other DNA
tatcaggcctggatattttg

SEQ ID NO: 187249 - DNA, 20 bp, synthetic construct
  source 1..20: mol_type = other DNA
ttatcaggcctggatatttt

SEQ ID NO: 187250 - DNA, 20 bp, synthetic construct
  source 1..20: mol_type = other DNA
tttatcaggcctggatattt

SEQ ID NO: 187251 - DNA, 20 bp, synthetic construct
  source 1..20: mol_type = other DNA
ttttatcaggcctggatatt

SEQ ID NO: 187252 - DNA, 20 bp, synthetic construct
  source 1..20: mol_type = other DNA
cttttatcaggcctggatat

SEQ ID NO: 187253 - DNA, 20 bp, synthetic construct
  source 1..20: mol_type = other DNA
tcttttatcaggcctggata

SEQ ID NO: 187254 - DNA, 20 bp, synthetic construct
  source 1..20: mol_type = other DNA
ctcttttatcaggcctggat

SEQ ID NO: 187255 - DNA, 20 bp, synthetic construct
  source 1..20: mol_type = other DNA
tctcttttatcaggcctgga

SEQ ID NO: 187256 - DNA, 20 bp, synthetic construct
  source 1..20: mol_type = other DNA
ttctcttttatcaggcctgg

SEQ ID NO: 187257 - DNA, 20 bp, synthetic construct
  source 1..20: mol_type = other DNA
tttctcttttatcaggcctg

SEQ ID NO: 187258 - DNA, 20 bp, synthetic construct
  source 1..20: mol_type = other DNA
ttttctcttttatcaggcct

SEQ ID NO: 187259 - DNA, 20 bp, synthetic construct
  source 1..20: mol_type = other DNA
tttttctcttttatcaggcc

SEQ ID NO: 187260 - DNA, 20 bp, synthetic construct
  source 1..20: mol_type = other DNA
gtttttctcttttatcaggc

SEQ ID NO: 187261 - DNA, 20 bp, synthetic construct
  source 1..20: mol_type = other DNA
tgtttttctcttttatcagg

SEQ ID NO: 187262 - DNA, 20 bp, synthetic construct
  source 1..20: mol_type = other DNA
ctgtttttctcttttatcag

SEQ ID NO: 187263 - DNA, 20 bp, synthetic construct
  source 1..20: mol_type = other DNA
cctgtttttctcttttatca

SEQ ID NO: 187264 - DNA, 20 bp, synthetic construct
  source 1..20: mol_type = other DNA
acctgtttttctcttttatc

SEQ ID NO: 187265 - DNA, 20 bp, synthetic construct
  source 1..20: mol_type = other DNA
tacctgtttttctcttttat

SEQ ID NO: 187266 - DNA, 20 bp, synthetic construct
  source 1..20: mol_type = other DNA
ctacctgtttttctctttta

SEQ ID NO: 187267 - DNA, 20 bp, synthetic construct
  source 1..20: mol_type = other DNA
gctacctgtttttctctttt

SEQ ID NO: 187268 - DNA, 20 bp, synthetic construct
  source 1..20: mol_type = other DNA
agctacctgtttttctcttt

SEQ ID NO: 187269 - DNA, 20 bp, synthetic construct
  source 1..20: mol_type = other DNA
gagctacctgtttttctctt

SEQ ID NO: 187270 - DNA, 20 bp, synthetic construct
  source 1..20: mol_type = other DNA
tgagctacctgtttttctct

SEQ ID NO: 187271 - DNA, 20 bp, synthetic construct
  source 1..20: mol_type = other DNA
gtgagctacctgtttttctc

SEQ ID NO: 187272 - DNA, 20 bp, synthetic construct
  source 1..20: mol_type = other DNA
tgtgagctacctgtttttct

SEQ ID NO: 187273 - DNA, 20 bp, synthetic construct
  source 1..20: mol_type = other DNA
ctgtgagctacctgtttttc

SEQ ID NO: 187274 - DNA, 20 bp, synthetic construct
  source 1..20: mol_type = other DNA
cctgtgagctacctgttttt

SEQ ID NO: 187275 - DNA, 20 bp, synthetic construct
  source 1..20: mol_type = other DNA
tcctgtgagctacctgtttt

SEQ ID NO: 187276 - DNA, 20 bp, synthetic construct
  source 1..20: mol_type = other DNA
ttcctgtgagctacctgttt

SEQ ID NO: 187277 - DNA, 20 bp, synthetic construct
  source 1..20: mol_type = other DNA
tttcctgtgagctacctgtt

SEQ ID NO: 187278 - DNA, 20 bp, synthetic construct
  source 1..20: mol_type = other DNA
ttttcctgtgagctacctgt

SEQ ID NO: 187279 - DNA, 20 bp, synthetic construct
  source 1..20: mol_type = other DNA
cttttcctgtgagctacctg

SEQ ID NO: 187280 - DNA, 20 bp, synthetic construct
  source 1..20: mol_type = other DNA
ccttttcctgtgagctacct

SEQ ID NO: 187281 - DNA, 20 bp, synthetic construct
  source 1..20: mol_type = other DNA
tccttttcctgtgagctacc

SEQ ID NO: 187282 - DNA, 20 bp, synthetic construct
  source 1..20: mol_type = other DNA
atccttttcctgtgagctac

SEQ ID NO: 187283 - DNA, 20 bp, synthetic construct
  source 1..20: mol_type = other DNA
tatccttttcctgtgagcta

SEQ ID NO: 187284 - DNA, 20 bp, synthetic construct
  source 1..20: mol_type = other DNA
ttatccttttcctgtgagct

SEQ ID NO: 187285 - DNA, 20 bp, synthetic construct
  source 1..20: mol_type = other DNA
tttatccttttcctgtgagc

SEQ ID NO: 187286 - DNA, 20 bp, synthetic construct
  source 1..20: mol_type = other DNA
ttttatccttttcctgtgag

SEQ ID NO: 187287 - DNA, 20 bp, synthetic construct
  source 1..20: mol_type = other DNA
tttttatccttttcctgtga

SEQ ID NO: 187288 - DNA, 20 bp, synthetic construct
  source 1..20: mol_type = other DNA
ttttttatccttttcctgtg

SEQ ID NO: 187289 - DNA, 20 bp, synthetic construct
  source 1..20: mol_type = other DNA
tttttttatccttttcctgt

SEQ ID NO: 187290 - DNA, 20 bp, synthetic construct
  source 1..20: mol_type = other DNA
ctttttttatccttttcctg

SEQ ID NO: 187291 - DNA, 20 bp, synthetic construct
  source 1..20: mol_type = other DNA
cctttttttatccttttcct

SEQ ID NO: 187292 - DNA, 20 bp, synthetic construct
  source 1..20: mol_type = other DNA
tcctttttttatccttttcc

SEQ ID NO: 187293 - DNA, 20 bp, synthetic construct
  source 1..20: mol_type = other DNA
ctcctttttttatccttttc

SEQ ID NO: 187294 - DNA, 20 bp, synthetic construct
  source 1..20: mol_type = other DNA
cctcctttttttatcctttt

SEQ ID NO: 187295 - DNA, 20 bp, synthetic construct
  source 1..20: mol_type = other DNA
tcctcctttttttatccttt

SEQ ID NO: 187296 - DNA, 20 bp, synthetic construct
  source 1..20: mol_type = other DNA
ctcctcctttttttatcctt

SEQ ID NO: 187297 - DNA, 20 bp, synthetic construct
  source 1..20: mol_type = other DNA
cctcctcctttttttatcct

SEQ ID NO: 187298 - DNA, 20 bp, synthetic construct
  source 1..20: mol_type = other DNA
ccctcctcctttttttatcc

SEQ ID NO: 187299 - DNA, 20 bp, synthetic construct
  source 1..20: mol_type = other DNA
tccctcctcctttttttatc

SEQ ID NO: 187300 - DNA, 20 bp, synthetic construct
  source 1..20: mol_type = other DNA
atccctcctcctttttttat

SEQ ID NO: 187301 - DNA, 20 bp, synthetic construct
  source 1..20: mol_type = other DNA
aatccctcctccttttttta

SEQ ID NO: 187302 - DNA, 20 bp, synthetic construct
  source 1..20: mol_type = other DNA
aaatccctcctccttttttt

SEQ ID NO: 187303 - DNA, 20 bp, synthetic construct
  source 1..20: mol_type = other DNA
taaatccctcctcctttttt

SEQ ID NO: 187304 - DNA, 20 bp, synthetic construct
  source 1..20: mol_type = other DNA
ttaaatccctcctccttttt

SEQ ID NO: 187305 - DNA, 20 bp, synthetic construct
  source 1..20: mol_type = other DNA
gttaaatccctcctcctttt

SEQ ID NO: 187306 - DNA, 20 bp, synthetic construct
  source 1..20: mol_type = other DNA
tgttaaatccctcctccttt

SEQ ID NO: 187307 - DNA, 20 bp, synthetic construct
  source 1..20: mol_type = other DNA
atgttaaatccctcctcctt

SEQ ID NO: 187308 - DNA, 20 bp, synthetic construct
  source 1..20: mol_type = other DNA
catgttaaatccctcctcct

SEQ ID NO: 187309 - DNA, 20 bp, synthetic construct
  source 1..20: mol_type = other DNA
tcatgttaaatccctcctcc

SEQ ID NO: 187310 - DNA, 20 bp, synthetic construct
  source 1..20: mol_type = other DNA
ttcatgttaaatccctcctc

SEQ ID NO: 187311 - DNA, 20 bp, synthetic construct
  source 1..20: mol_type = other DNA
tttcatgttaaatccctcct

SEQ ID NO: 187312 - DNA, 20 bp, synthetic construct
  source 1..20: mol_type = other DNA
ttttcatgttaaatccctcc

SEQ ID NO: 187313 - DNA, 20 bp, synthetic construct
  source 1..20: mol_type = other DNA
cttttcatgttaaatccctc

SEQ ID NO: 187314 - DNA, 20 bp, synthetic construct
  source 1..20: mol_type = other DNA
ccttttcatgttaaatccct

SEQ ID NO: 187315 - DNA, 20 bp, synthetic construct
  source 1..20: mol_type = other DNA
accttttcatgttaaatccc

SEQ ID NO: 187316 - DNA, 20 bp, synthetic construct
  source 1..20: mol_type = other DNA
caccttttcatgttaaatcc

SEQ ID NO: 187317 - DNA, 20 bp, synthetic construct
  source 1..20: mol_type = other DNA
gcaccttttcatgttaaatc

SEQ ID NO: 187318 - DNA, 20 bp, synthetic construct
  source 1..20: mol_type = other DNA
agcaccttttcatgttaaat

SEQ ID NO: 187319 - DNA, 20 bp, synthetic construct
  source 1..20: mol_type = other DNA
aagcaccttttcatgttaaa

SEQ ID NO: 187320 - DNA, 20 bp, synthetic construct
  source 1..20: mol_type = other DNA
caagcaccttttcatgttaa

SEQ ID NO: 187321 - DNA, 20 bp, synthetic construct
  source 1..20: mol_type = other DNA
tcaagcaccttttcatgtta

SEQ ID NO: 187322 - DNA, 20 bp, synthetic construct
  source 1..20: mol_type = other DNA
atcaagcaccttttcatgtt

SEQ ID NO: 187323 - DNA, 20 bp, synthetic construct
  source 1..20: mol_type = other DNA
gatcaagcaccttttcatgt

SEQ ID NO: 187324 - DNA, 20 bp, synthetic construct
  source 1..20: mol_type = other DNA
agatcaagcaccttttcatg

SEQ ID NO: 187325 - DNA, 20 bp, synthetic construct
  source 1..20: mol_type = other DNA
gagatcaagcaccttttcat

SEQ ID NO: 187326 - DNA, 20 bp, synthetic construct
  source 1..20: mol_type = other DNA
ggagatcaagcaccttttca

SEQ ID NO: 187327 - DNA, 20 bp, synthetic construct
  source 1..20: mol_type = other DNA
gggagatcaagcaccttttc

SEQ ID NO: 187328 - DNA, 20 bp, synthetic construct
  source 1..20: mol_type = other DNA
agggagatcaagcacctttt

SEQ ID NO: 187329 - DNA, 20 bp, synthetic construct
  source 1..20: mol_type = other DNA
gagggagatcaagcaccttt

SEQ ID NO: 187330 - DNA, 20 bp, synthetic construct
  source 1..20: mol_type = other DNA
tgagggagatcaagcacctt

SEQ ID NO: 187331 - DNA, 20 bp, synthetic construct
  source 1..20: mol_type = other DNA
atgagggagatcaagcacct

SEQ ID NO: 187332 - DNA, 20 bp, synthetic construct
  source 1..20: mol_type = other DNA
tatgagggagatcaagcacc

SEQ ID NO: 187333 - DNA, 20 bp, synthetic construct
  source 1..20: mol_type = other DNA
ttatgagggagatcaagcac

SEQ ID NO: 187334 - DNA, 20 bp, synthetic construct
  source 1..20: mol_type = other DNA
attatgagggagatcaagca

SEQ ID NO: 187335 - DNA, 20 bp, synthetic construct
  source 1..20: mol_type = other DNA
tattatgagggagatcaagc

SEQ ID NO: 187336 - DNA, 20 bp, synthetic construct
  source 1..20: mol_type = other DNA
ttattatgagggagatcaag

SEQ ID NO: 187337 - DNA, 20 bp, synthetic construct
  source 1..20: mol_type = other DNA
tttattatgagggagatcaa

SEQ ID NO: 187338 - DNA, 20 bp, synthetic construct
  source 1..20: mol_type = other DNA
ttttattatgagggagatca

SEQ ID NO: 187339 - DNA, 20 bp, synthetic construct
  source 1..20: mol_type = other DNA
tttttattatgagggagatc

SEQ ID NO: 187340 - DNA, 20 bp, synthetic construct
  source 1..20: mol_type = other DNA
ctttttattatgagggagat

SEQ ID NO: 187341 - DNA, 20 bp, synthetic construct
  source 1..20: mol_type = other DNA
tctttttattatgagggaga

SEQ ID NO: 187342 - DNA, 20 bp, synthetic construct
  source 1..20: mol_type = other DNA
gtctttttattatgagggag

SEQ ID NO: 187343 - DNA, 20 bp, synthetic construct
  source 1..20: mol_type = other DNA
agtctttttattatgaggga

SEQ ID NO: 187344 - DNA, 20 bp, synthetic construct
  source 1..20: mol_type = other DNA
cagtctttttattatgaggg

SEQ ID NO: 187345 - DNA, 20 bp, synthetic construct
  source 1..20: mol_type = other DNA
gcagtctttttattatgagg

SEQ ID NO: 187346 - DNA, 20 bp, synthetic construct
  source 1..20: mol_type = other DNA
agcagtctttttattatgag

SEQ ID NO: 187347 - DNA, 20 bp, synthetic construct
  source 1..20: mol_type = other DNA
cagcagtctttttattatga

SEQ ID NO: 187348 - DNA, 20 bp, synthetic construct
  source 1..20: mol_type = other DNA
tcagcagtctttttattatg

SEQ ID NO: 187349 - DNA, 20 bp, synthetic construct
  source 1..20: mol_type = other DNA
atcagcagtctttttattat

SEQ ID NO: 187350 - DNA, 20 bp, synthetic construct
  source 1..20: mol_type = other DNA
aatcagcagtctttttatta

SEQ ID NO: 187351 - DNA, 20 bp, synthetic construct
  source 1..20: mol_type = other DNA
gaatcagcagtctttttatt

SEQ ID NO: 187352 - DNA, 20 bp, synthetic construct
  source 1..20: mol_type = other DNA
ggaatcagcagtctttttat

SEQ ID NO: 187353 - DNA, 20 bp, synthetic construct
  source 1..20: mol_type = other DNA
tggaatcagcagtcttttta

SEQ ID NO: 187354 - DNA, 20 bp, synthetic construct
  source 1..20: mol_type = other DNA
atggaatcagcagtcttttt

SEQ ID NO: 187355 - DNA, 20 bp, synthetic construct
  source 1..20: mol_type = other DNA
gatggaatcagcagtctttt

SEQ ID NO: 187356 - DNA, 20 bp, synthetic construct
  source 1..20: mol_type = other DNA
ggatggaatcagcagtcttt

SEQ ID NO: 187357 - DNA, 20 bp, synthetic construct
  source 1..20: mol_type = other DNA
tggatggaatcagcagtctt

SEQ ID NO: 187358 - DNA, 20 bp, synthetic construct
  source 1..20: mol_type = other DNA
ctggatggaatcagcagtct

SEQ ID NO: 187359 - DNA, 20 bp, synthetic construct
  source 1..20: mol_type = other DNA
cctggatggaatcagcagtc

SEQ ID NO: 187360 - DNA, 20 bp, synthetic construct
  source 1..20: mol_type = other DNA
gcctggatggaatcagcagt

SEQ ID NO: 187361 - DNA, 20 bp, synthetic construct
  source 1..20: mol_type = other DNA
tgcctggatggaatcagcag

SEQ ID NO: 187362 - DNA, 20 bp, synthetic construct
  source 1..20: mol_type = other DNA
ttgcctggatggaatcagca

SEQ ID NO: 187363 - DNA, 20 bp, synthetic construct
  source 1..20: mol_type = other DNA
cttgcctggatggaatcagc

SEQ ID NO: 187364 - DNA, 20 bp, synthetic construct
  source 1..20: mol_type = other DNA
acttgcctggatggaatcag

SEQ ID NO: 187365 - DNA, 20 bp, synthetic construct
  source 1..20: mol_type = other DNA
cacttgcctggatggaatca

SEQ ID NO: 187366 - DNA, 20 bp, synthetic construct
  source 1..20: mol_type = other DNA
tcacttgcctggatggaatc

SEQ ID NO: 187367 - DNA, 20 bp, synthetic construct
  source 1..20: mol_type = other DNA
gtcacttgcctggatggaat

SEQ ID NO: 187368 - DNA, 20 bp, synthetic construct
  source 1..20: mol_type = other DNA
tgtcacttgcctggatggaa

SEQ ID NO: 187369 - DNA, 20 bp, synthetic construct
  source 1..20: mol_type = other DNA
ctgtcacttgcctggatgga

SEQ ID NO: 187370 - DNA, 20 bp, synthetic construct
  source 1..20: mol_type = other DNA
tctgtcacttgcctggatgg

SEQ ID NO: 187371 - DNA, 20 bp, synthetic construct
  source 1..20: mol_type = other DNA
ttctgtcacttgcctggatg

SEQ ID NO: 187372 - DNA, 20 bp, synthetic construct
  source 1..20: mol_type = other DNA
tttctgtcacttgcctggat

SEQ ID NO: 187373 - DNA, 20 bp, synthetic construct
  source 1..20: mol_type = other DNA
ttttctgtcacttgcctgga

SEQ ID NO: 187374 - DNA, 20 bp, synthetic construct
  source 1..20: mol_type = other DNA
tttttctgtcacttgcctgg

SEQ ID NO: 187375 - DNA, 20 bp, synthetic construct
  source 1..20: mol_type = other DNA
ttttttctgtcacttgcctg

SEQ ID NO: 187376 - DNA, 20 bp, synthetic construct
  source 1..20: mol_type = other DNA
tttttttctgtcacttgcct

SEQ ID NO: 187377 - DNA, 20 bp, synthetic construct
  source 1..20: mol_type = other DNA
ttttttttctgtcacttgcc

SEQ ID NO: 187378 - DNA, 20 bp, synthetic construct
  source 1..20: mol_type = other DNA
tttttttttctgtcacttgc

SEQ ID NO: 187379 - DNA, 20 bp, synthetic construct
  source 1..20: mol_type = other DNA
ttttttttttctgtcacttg

SEQ ID NO: 187380 - DNA, 20 bp, synthetic construct
  source 1..20: mol_type = other DNA
tttttttttttctgtcactt

SEQ ID NO: 187381 - DNA, 20 bp, synthetic construct
  source 1..20: mol_type = other DNA
atttttttttttctgtcact

SEQ ID NO: 187382 - DNA, 20 bp, synthetic construct
  source 1..20: mol_type = other DNA
aatttttttttttctgtcac

SEQ ID NO: 187383 - DNA, 20 bp, synthetic construct
  source 1..20: mol_type = other DNA
taatttttttttttctgtca

SEQ ID NO: 187384 - DNA, 20 bp, synthetic construct
  source 1..20: mol_type = other DNA
ttaatttttttttttctgtc

SEQ ID NO: 187385 - DNA, 20 bp, synthetic construct
  source 1..20: mol_type = other DNA
attaatttttttttttctgt

SEQ ID NO: 187386 - DNA, 20 bp, synthetic construct
  source 1..20: mol_type = other DNA
aattaatttttttttttctg

SEQ ID NO: 187387 - DNA, 20 bp, synthetic construct
  source 1..20: mol_type = other DNA
aaattaatttttttttttct

SEQ ID NO: 187388 - DNA, 20 bp, synthetic construct
  source 1..20: mol_type = other DNA
taaattaatttttttttttc

SEQ ID NO: 187389 - DNA, 20 bp, synthetic construct
  source 1..20: mol_type = other DNA
ttaaattaattttttttttt

SEQ ID NO: 187390 - DNA, 20 bp, synthetic construct
  source 1..20: mol_type = other DNA
tttaaattaatttttttttt

SEQ ID NO: 187391 - DNA, 20 bp, synthetic construct
  source 1..20: mol_type = other DNA
ttttaaattaattttttttt

SEQ ID NO: 187392 - DNA, 20 bp, synthetic construct
  source 1..20: mol_type = other DNA
tttttaaattaatttttttt

SEQ ID NO: 187393 - DNA, 20 bp, synthetic construct
  source 1..20: mol_type = other DNA
ctttttaaattaattttttt

SEQ ID NO: 187394 - DNA, 20 bp, synthetic construct
  source 1..20: mol_type = other DNA
tctttttaaattaatttttt

SEQ ID NO: 187395 - DNA, 20 bp, synthetic construct
  source 1..20: mol_type = other DNA
gtctttttaaattaattttt

SEQ ID NO: 187396 - DNA, 20 bp, synthetic construct
  source 1..20: mol_type = other DNA
agtctttttaaattaatttt

SEQ ID NO: 187397 - DNA, 20 bp, synthetic construct
  source 1..20: mol_type = other DNA
cagtctttttaaattaattt

SEQ ID NO: 187398 - DNA, 20 bp, synthetic construct
  source 1..20: mol_type = other DNA
gcagtctttttaaattaatt

SEQ ID NO: 187399 - DNA, 20 bp, synthetic construct
  source 1..20: mol_type = other DNA
agcagtctttttaaattaat

SEQ ID NO: 187400 - DNA, 20 bp, synthetic construct
  source 1..20: mol_type = other DNA
cagcagtctttttaaattaa

SEQ ID NO: 187401 - DNA, 20 bp, synthetic construct
  source 1..20: mol_type = other DNA
tcagcagtctttttaaatta

SEQ ID NO: 187402 - DNA, 20 bp, synthetic construct
  source 1..20: mol_type = other DNA
atcagcagtctttttaaatt

SEQ ID NO: 187403 - DNA, 20 bp, synthetic construct
  source 1..20: mol_type = other DNA
tatcagcagtctttttaaat

SEQ ID NO: 187404 - DNA, 20 bp, synthetic construct
  source 1..20: mol_type = other DNA
ttatcagcagtctttttaaa

SEQ ID NO: 187405 - DNA, 20 bp, synthetic construct
  source 1..20: mol_type = other DNA
tttatcagcagtctttttaa

SEQ ID NO: 187406 - DNA, 20 bp, synthetic construct
  source 1..20: mol_type = other DNA
ttttatcagcagtcttttta

SEQ ID NO: 187407 - DNA, 20 bp, synthetic construct
  source 1..20: mol_type = other DNA
gttttatcagcagtcttttt

SEQ ID NO: 187408 - DNA, 20 bp, synthetic construct
  source 1..20: mol_type = other DNA
ggttttatcagcagtctttt

SEQ ID NO: 187409 - DNA, 20 bp, synthetic construct
  source 1..20: mol_type = other DNA
tggttttatcagcagtcttt

SEQ ID NO: 187410 - DNA, 20 bp, synthetic construct
  source 1..20: mol_type = other DNA
gtggttttatcagcagtctt

SEQ ID NO: 187411 - DNA, 20 bp, synthetic construct
  source 1..20: mol_type = other DNA
tgtggttttatcagcagtct

SEQ ID NO: 187412 - DNA, 20 bp, synthetic construct
  source 1..20: mol_type = other DNA
ctgtggttttatcagcagtc

SEQ ID NO: 187413 - DNA, 20 bp, synthetic construct
  source 1..20: mol_type = other DNA
gctgtggttttatcagcagt

SEQ ID NO: 187414 - DNA, 20 bp, synthetic construct
  source 1..20: mol_type = other DNA
cgctgtggttttatcagcag

SEQ ID NO: 187415 - DNA, 20 bp, synthetic construct
  source 1..20: mol_type = other DNA
tcgctgtggttttatcagca

SEQ ID NO: 187416 - DNA, 20 bp, synthetic construct
  source 1..20: mol_type = other DNA
ctcgctgtggttttatcagc

SEQ ID NO: 187417 - DNA, 20 bp, synthetic construct
  source 1..20: mol_type = other DNA
tctcgctgtggttttatcag

SEQ ID NO: 187418 - DNA, 20 bp, synthetic construct
  source 1..20: mol_type = other DNA
gtctcgctgtggttttatca

SEQ ID NO: 187419 - DNA, 20 bp, synthetic construct
  source 1..20: mol_type = other DNA
tgtctcgctgtggttttatc

SEQ ID NO: 187420 - DNA, 20 bp, synthetic construct
  source 1..20: mol_type = other DNA
gtgtctcgctgtggttttat

SEQ ID NO: 187421 - DNA, 20 bp, synthetic construct
  source 1..20: mol_type = other DNA
agtgtctcgctgtggtttta

SEQ ID NO: 187422 - DNA, 20 bp, synthetic construct
  source 1..20: mol_type = other DNA
cagtgtctcgctgtggtttt

SEQ ID NO: 187423 - DNA, 20 bp, synthetic construct
  source 1..20: mol_type = other DNA
gcagtgtctcgctgtggttt

SEQ ID NO: 187424 - DNA, 20 bp, synthetic construct
  source 1..20: mol_type = other DNA
agcagtgtctcgctgtggtt

SEQ ID NO: 187425 - DNA, 20 bp, synthetic construct
  source 1..20: mol_type = other DNA
cagcagtgtctcgctgtggt

SEQ ID NO: 187426 - DNA, 20 bp, synthetic construct
  source 1..20: mol_type = other DNA
gcagcagtgtctcgctgtgg

SEQ ID NO: 187427 - DNA, 20 bp, synthetic construct
  source 1..20: mol_type = other DNA
agcagcagtgtctcgctgtg

SEQ ID NO: 187428 - DNA, 20 bp, synthetic construct
  source 1..20: mol_type = other DNA
gagcagcagtgtctcgctgt

SEQ ID NO: 187429 - DNA, 20 bp, synthetic construct
  source 1..20: mol_type = other DNA
tgagcagcagtgtctcgctg

SEQ ID NO: 187430 - DNA, 20 bp, synthetic construct
  source 1..20: mol_type = other DNA
ctgagcagcagtgtctcgct

SEQ ID NO: 187431 - DNA, 20 bp, synthetic construct
  source 1..20: mol_type = other DNA
cctgagcagcagtgtctcgc

SEQ ID NO: 187432 - DNA, 20 bp, synthetic construct
  source 1..20: mol_type = other DNA
ccctgagcagcagtgtctcg

SEQ ID NO: 187433 - DNA, 20 bp, synthetic construct
  source 1..20: mol_type = other DNA
tccctgagcagcagtgtctc

SEQ ID NO: 187434 - DNA, 20 bp, synthetic construct
  source 1..20: mol_type = other DNA
atccctgagcagcagtgtct

SEQ ID NO: 187435 - DNA, 20 bp, synthetic construct
  source 1..20: mol_type = other DNA
gatccctgagcagcagtgtc

SEQ ID NO: 187436 - DNA, 20 bp, synthetic construct
  source 1..20: mol_type = other DNA
agatccctgagcagcagtgt

SEQ ID NO: 187437 - DNA, 20 bp, synthetic construct
  source 1..20: mol_type = other DNA
cagatccctgagcagcagtg

SEQ ID NO: 187438 - DNA, 20 bp, synthetic construct
  source 1..20: mol_type = other DNA
tcagatccctgagcagcagt

SEQ ID NO: 187439 - DNA, 20 bp, synthetic construct
  source 1..20: mol_type = other DNA
ctcagatccctgagcagcag

SEQ ID NO: 187440 - DNA, 20 bp, synthetic construct
  source 1..20: mol_type = other DNA
cctcagatccctgagcagca

SEQ ID NO: 187441 - DNA, 20 bp, synthetic construct
  source 1..20: mol_type = other DNA
ccctcagatccctgagcagc

SEQ ID NO: 187442 - DNA, 20 bp, synthetic construct
  source 1..20: mol_type = other DNA
accctcagatccctgagcag

SEQ ID NO: 187443 - DNA, 20 bp, synthetic construct
  source 1..20: mol_type = other DNA
caccctcagatccctgagca

SEQ ID NO: 187444 - DNA, 20 bp, synthetic construct
  source 1..20: mol_type = other DNA
acaccctcagatccctgagc

SEQ ID NO: 187445 - DNA, 20 bp, synthetic construct
  source 1..20: mol_type = other DNA
cacaccctcagatccctgag

SEQ ID NO: 187446 - DNA, 20 bp, synthetic construct
  source 1..20: mol_type = other DNA
ccacaccctcagatccctga

SEQ ID NO: 187447 - DNA, 20 bp, synthetic construct
  source 1..20: mol_type = other DNA
cccacaccctcagatccctg

SEQ ID NO: 187448 - DNA, 20 bp, synthetic construct
  source 1..20: mol_type = other DNA
gcccacaccctcagatccct

SEQ ID NO: 187449 - DNA, 20 bp, synthetic construct
  source 1..20: mol_type = other DNA
tgcccacaccctcagatccc

SEQ ID NO: 187450 - DNA, 20 bp, synthetic construct
  source 1..20: mol_type = other DNA
ctgcccacaccctcagatcc

SEQ ID NO: 187451 - DNA, 20 bp, synthetic construct
  source 1..20: mol_type = other DNA
gctgcccacaccctcagatc

SEQ ID NO: 187452 - DNA, 20 bp, synthetic construct
  source 1..20: mol_type = other DNA
ggctgcccacaccctcagat

SEQ ID NO: 187453 - DNA, 20 bp, synthetic construct
  source 1..20: mol_type = other DNA
tggctgcccacaccctcaga

SEQ ID NO: 187454 - DNA, 20 bp, synthetic construct
  source 1..20: mol_type = other DNA
ctggctgcccacaccctcag

SEQ ID NO: 187455 - DNA, 20 bp, synthetic construct
  source 1..20: mol_type = other DNA
cctggctgcccacaccctca

SEQ ID NO: 187456 - DNA, 20 bp, synthetic construct
  source 1..20: mol_type = other DNA
gcctggctgcccacaccctc

SEQ ID NO: 187457 - DNA, 20 bp, synthetic construct
  source 1..20: mol_type = other DNA
agcctggctgcccacaccct

SEQ ID NO: 187458 - DNA, 20 bp, synthetic construct
  source 1..20: mol_type = other DNA
cagcctggctgcccacaccc

SEQ ID NO: 187459 - DNA, 20 bp, synthetic construct
  source 1..20: mol_type = other DNA
gcagcctggctgcccacacc

SEQ ID NO: 187460 - DNA, 20 bp, synthetic construct
  source 1..20: mol_type = other DNA
ggcagcctggctgcccacac

SEQ ID NO: 187461 - DNA, 20 bp, synthetic construct
  source 1..20: mol_type = other DNA
tggcagcctggctgcccaca

SEQ ID NO: 187462 - DNA, 20 bp, synthetic construct
  source 1..20: mol_type = other DNA
gtggcagcctggctgcccac

SEQ ID NO: 187463 - DNA, 20 bp, synthetic construct
  source 1..20: mol_type = other DNA
cgtggcagcctggctgccca

SEQ ID NO: 187464 - DNA, 20 bp, synthetic construct
  source 1..20: mol_type = other DNA
gcgtggcagcctggctgccc

SEQ ID NO: 187465 - DNA, 20 bp, synthetic construct
  source 1..20: mol_type = other DNA
tgcgtggcagcctggctgcc

SEQ ID NO: 187466 - DNA, 20 bp, synthetic construct
  source 1..20: mol_type = other DNA
atgcgtggcagcctggctgc

SEQ ID NO: 187467 - DNA, 20 bp, synthetic construct
  source 1..20: mol_type = other DNA
gatgcgtggcagcctggctg

SEQ ID NO: 187468 - DNA, 20 bp, synthetic construct
  source 1..20: mol_type = other DNA
tgatgcgtggcagcctggct

SEQ ID NO: 187469 - DNA, 20 bp, synthetic construct
  source 1..20: mol_type = other DNA
atgatgcgtggcagcctggc

SEQ ID NO: 187470 - DNA, 20 bp, synthetic construct
  source 1..20: mol_type = other DNA
catgatgcgtggcagcctgg

SEQ ID NO: 187471 - DNA, 20 bp, synthetic construct
  source 1..20: mol_type = other DNA
ccatgatgcgtggcagcctg

SEQ ID NO: 187472 - DNA, 20 bp, synthetic construct
  source 1..20: mol_type = other DNA
cccatgatgcgtggcagcct

SEQ ID NO: 187473 - DNA, 20 bp, synthetic construct
  source 1..20: mol_type = other DNA
acccatgatgcgtggcagcc

SEQ ID NO: 187474 - DNA, 20 bp, synthetic construct
  source 1..20: mol_type = other DNA
gacccatgatgcgtggcagc

SEQ ID NO: 187475 - DNA, 20 bp, synthetic construct
  source 1..20: mol_type = other DNA
cgacccatgatgcgtggcag

SEQ ID NO: 187476 - DNA, 20 bp, synthetic construct
  source 1..20: mol_type = other DNA
ccgacccatgatgcgtggca

SEQ ID NO: 187477 - DNA, 20 bp, synthetic construct
  source 1..20: mol_type = other DNA
tccgacccatgatgcgtggc

SEQ ID NO: 187478 - DNA, 20 bp, synthetic construct
  source 1..20: mol_type = other DNA
ctccgacccatgatgcgtgg

SEQ ID NO: 187479 - DNA, 20 bp, synthetic construct
  source 1..20: mol_type = other DNA
tctccgacccatgatgcgtg

SEQ ID NO: 187480 - DNA, 20 bp, synthetic construct
  source 1..20: mol_type = other DNA
ctctccgacccatgatgcgt

SEQ ID NO: 187481 - DNA, 20 bp, synthetic construct
  source 1..20: mol_type = other DNA
cctctccgacccatgatgcg

SEQ ID NO: 187482 - DNA, 20 bp, synthetic construct
  source 1..20: mol_type = other DNA
tcctctccgacccatgatgc

SEQ ID NO: 187483 - DNA, 20 bp, synthetic construct
  source 1..20: mol_type = other DNA
ttcctctccgacccatgatg

SEQ ID NO: 187484 - DNA, 20 bp, synthetic construct
  source 1..20: mol_type = other DNA
cttcctctccgacccatgat

SEQ ID NO: 187485 - DNA, 20 bp, synthetic construct
  source 1..20: mol_type = other DNA
tcttcctctccgacccatga

SEQ ID NO: 187486 - DNA, 20 bp, synthetic construct
  source 1..20: mol_type = other DNA
gtcttcctctccgacccatg

SEQ ID NO: 187487 - DNA, 20 bp, synthetic construct
  source 1..20: mol_type = other DNA
ggtcttcctctccgacccat

SEQ ID NO: 187488 - DNA, 20 bp, synthetic construct
  source 1..20: mol_type = other DNA
tggtcttcctctccgaccca

SEQ ID NO: 187489 - DNA, 20 bp, synthetic construct
  source 1..20: mol_type = other DNA
gtggtcttcctctccgaccc

SEQ ID NO: 187490 - DNA, 20 bp, synthetic construct
  source 1..20: mol_type = other DNA
tgtggtcttcctctccgacc

SEQ ID NO: 187491 - DNA, 20 bp, synthetic construct
  source 1..20: mol_type = other DNA
gtgtggtcttcctctccgac

SEQ ID NO: 187492 - DNA, 20 bp, synthetic construct
  source 1..20: mol_type = other DNA
ggtgtggtcttcctctccga

SEQ ID NO: 187493 - DNA, 20 bp, synthetic construct
  source 1..20: mol_type = other DNA
gggtgtggtcttcctctccg

SEQ ID NO: 187494 - DNA, 20 bp, synthetic construct
  source 1..20: mol_type = other DNA
ggggtgtggtcttcctctcc

SEQ ID NO: 187495 - DNA, 20 bp, synthetic construct
  source 1..20: mol_type = other DNA
aggggtgtggtcttcctctc

SEQ ID NO: 187496 - DNA, 20 bp, synthetic construct
  source 1..20: mol_type = other DNA
caggggtgtggtcttcctct

SEQ ID NO: 187497 - DNA, 20 bp, synthetic construct
  source 1..20: mol_type = other DNA
ccaggggtgtggtcttcctc

SEQ ID NO: 187498 - DNA, 20 bp, synthetic construct
  source 1..20: mol_type = other DNA
tccaggggtgtggtcttcct

SEQ ID NO: 187499 - DNA, 20 bp, synthetic construct
  source 1..20: mol_type = other DNA
ctccaggggtgtggtcttcc

SEQ ID NO: 187500 - DNA, 20 bp, synthetic construct
  source 1..20: mol_type = other DNA
gctccaggggtgtggtcttc

SEQ ID NO: 187501 - DNA, 20 bp, synthetic construct
  source 1..20: mol_type = other DNA
tgctccaggggtgtggtctt

SEQ ID NO: 187502 - DNA, 20 bp, synthetic construct
  source 1..20: mol_type = other DNA
ctgctccaggggtgtggtct

SEQ ID NO: 187503 - DNA, 20 bp, synthetic construct
  source 1..20: mol_type = other DNA
tctgctccaggggtgtggtc

SEQ ID NO: 187504 - DNA, 20 bp, synthetic construct
  source 1..20: mol_type = other DNA
ctctgctccaggggtgtggt

SEQ ID NO: 187505 - DNA, 20 bp, synthetic construct
  source 1..20: mol_type = other DNA
cctctgctccaggggtgtgg

SEQ ID NO: 187506 - DNA, 20 bp, synthetic construct
  source 1..20: mol_type = other DNA
ccctctgctccaggggtgtg

SEQ ID NO: 187507 - DNA, 20 bp, synthetic construct
  source 1..20: mol_type = other DNA
gccctctgctccaggggtgt

SEQ ID NO: 187508 - DNA, 20 bp, synthetic construct
  source 1..20: mol_type = other DNA
cgccctctgctccaggggtg

SEQ ID NO: 187509 - DNA, 20 bp, synthetic construct
  source 1..20: mol_type = other DNA
ccgccctctgctccaggggt

SEQ ID NO: 187510 - DNA, 20 bp, synthetic construct
  source 1..20: mol_type = other DNA
gccgccctctgctccagggg

SEQ ID NO: 187511 - DNA, 20 bp, synthetic construct
  source 1..20: mol_type = other DNA
agccgccctctgctccaggg

SEQ ID NO: 187512 - DNA, 20 bp, synthetic construct
  source 1..20: mol_type = other DNA
cagccgccctctgctccagg

SEQ ID NO: 187513 - DNA, 20 bp, synthetic construct
  source 1..20: mol_type = other DNA
tcagccgccctctgctccag

SEQ ID NO: 187514 - DNA, 20 bp, synthetic construct
  source 1..20: mol_type = other DNA
atcagccgccctctgctcca

SEQ ID NO: 187515 - DNA, 20 bp, synthetic construct
  source 1..20: mol_type = other DNA
gatcagccgccctctgctcc

SEQ ID NO: 187516 - DNA, 20 bp, synthetic construct
  source 1..20: mol_type = other DNA
agatcagccgccctctgctc

SEQ ID NO: 187517 - DNA, 20 bp, synthetic construct
  source 1..20: mol_type = other DNA
cagatcagccgccctctgct

SEQ ID NO: 187518 - DNA, 20 bp, synthetic construct
  source 1..20: mol_type = other DNA
acagatcagccgccctctgc

SEQ ID NO: 187519 - DNA, 20 bp, synthetic construct
  source 1..20: mol_type = other DNA
gacagatcagccgccctctg

SEQ ID NO: 187520 - DNA, 20 bp, synthetic construct
  source 1..20: mol_type = other DNA
tgacagatcagccgccctct

SEQ ID NO: 187521 - DNA, 20 bp, synthetic construct
  source 1..20: mol_type = other DNA
ctgacagatcagccgccctc

SEQ ID NO: 187522 - DNA, 20 bp, synthetic construct
  source 1..20: mol_type = other DNA
tctgacagatcagccgccct

SEQ ID NO: 187523 - DNA, 20 bp, synthetic construct
  source 1..20: mol_type = other DNA
atctgacagatcagccgccc

SEQ ID NO: 187524 - DNA, 20 bp, synthetic construct
  source 1..20: mol_type = other DNA
catctgacagatcagccgcc

SEQ ID NO: 187525 - DNA, 20 bp, synthetic construct
  source 1..20: mol_type = other DNA
gcatctgacagatcagccgc

SEQ ID NO: 187526 - DNA, 20 bp, synthetic construct
  source 1..20: mol_type = other DNA
ggcatctgacagatcagccg

SEQ ID NO: 187527 - DNA, 20 bp, synthetic construct
  source 1..20: mol_type = other DNA
gggcatctgacagatcagcc

SEQ ID NO: 187528 - DNA, 20 bp, synthetic construct
  source 1..20: mol_type = other DNA
agggcatctgacagatcagc

SEQ ID NO: 187529 - DNA, 20 bp, synthetic construct
  source 1..20: mol_type = other DNA
aagggcatctgacagatcag

SEQ ID NO: 187530 - DNA, 20 bp, synthetic construct
  source 1..20: mol_type = other DNA
aaagggcatctgacagatca

SEQ ID NO: 187531 - DNA, 20 bp, synthetic construct
  source 1..20: mol_type = other DNA
caaagggcatctgacagatc

SEQ ID NO: 187532 - DNA, 20 bp, synthetic construct
  source 1..20: mol_type = other DNA
tcaaagggcatctgacagat

SEQ ID NO: 187533 - DNA, 20 bp, synthetic construct
  source 1..20: mol_type = other DNA
gtcaaagggcatctgacaga

SEQ ID NO: 187534 - DNA, 20 bp, synthetic construct
  source 1..20: mol_type = other DNA
tgtcaaagggcatctgacag

SEQ ID NO: 187535 - DNA, 20 bp, synthetic construct
  source 1..20: mol_type = other DNA
ctgtcaaagggcatctgaca

SEQ ID NO: 187536 - DNA, 20 bp, synthetic construct
  source 1..20: mol_type = other DNA
gctgtcaaagggcatctgac

SEQ ID NO: 187537 - DNA, 20 bp, synthetic construct
  source 1..20: mol_type = other DNA
tgctgtcaaagggcatctga

SEQ ID NO: 187538 - DNA, 20 bp, synthetic construct
  source 1..20: mol_type = other DNA
gtgctgtcaaagggcatctg

SEQ ID NO: 187539 - DNA, 20 bp, synthetic construct
  source 1..20: mol_type = other DNA
ggtgctgtcaaagggcatct

SEQ ID NO: 187540 - DNA, 20 bp, synthetic construct
  source 1..20: mol_type = other DNA
aggtgctgtcaaagggcatc

SEQ ID NO: 187541 - DNA, 20 bp, synthetic construct
  source 1..20: mol_type = other DNA
gaggtgctgtcaaagggcat

SEQ ID NO: 187542 - DNA, 20 bp, synthetic construct
  source 1..20: mol_type = other DNA
tgaggtgctgtcaaagggca

SEQ ID NO: 187543 - DNA, 20 bp, synthetic construct
  source 1..20: mol_type = other DNA
ctgaggtgctgtcaaagggc

SEQ ID NO: 187544 - DNA, 20 bp, synthetic construct
  source 1..20: mol_type = other DNA
gctgaggtgctgtcaaaggg

SEQ ID NO: 187545 - DNA, 20 bp, synthetic construct
  source 1..20: mol_type = other DNA
agctgaggtgctgtcaaagg

SEQ ID NO: 187546 - DNA, 20 bp, synthetic construct
  source 1..20: mol_type = other DNA
aagctgaggtgctgtcaaag

SEQ ID NO: 187547 - DNA, 20 bp, synthetic construct
  source 1..20: mol_type = other DNA
gaagctgaggtgctgtcaaa

SEQ ID NO: 187548 - DNA, 20 bp, synthetic construct
  source 1..20: mol_type = other DNA
ggaagctgaggtgctgtcaa

SEQ ID NO: 187549 - DNA, 20 bp, synthetic construct
  source 1..20: mol_type = other DNA
tggaagctgaggtgctgtca

SEQ ID NO: 187550 - DNA, 20 bp, synthetic construct
  source 1..20: mol_type = other DNA
ttggaagctgaggtgctgtc

SEQ ID NO: 187551 - DNA, 20 bp, synthetic construct
  source 1..20: mol_type = other DNA
cttggaagctgaggtgctgt

SEQ ID NO: 187552 - DNA, 20 bp, synthetic construct
  source 1..20: mol_type = other DNA
tcttggaagctgaggtgctg

SEQ ID NO: 187553 - DNA, 20 bp, synthetic construct
  source 1..20: mol_type = other DNA
ttcttggaagctgaggtgct

SEQ ID NO: 187554 - DNA, 20 bp, synthetic construct
  source 1..20: mol_type = other DNA
attcttggaagctgaggtgc

SEQ ID NO: 187555 - DNA, 20 bp, synthetic construct
  source 1..20: mol_type = other DNA
aattcttggaagctgaggtg

SEQ ID NO: 187556 - DNA, 20 bp, synthetic construct
  source 1..20: mol_type = other DNA
taattcttggaagctgaggt

SEQ ID NO: 187557 - DNA, 20 bp, synthetic construct
  source 1..20: mol_type = other DNA
ttaattcttggaagctgagg

SEQ ID NO: 187558 - DNA, 20 bp, synthetic construct
  source 1..20: mol_type = other DNA
gttaattcttggaagctgag

SEQ ID NO: 187559 - DNA, 20 bp, synthetic construct
  source 1..20: mol_type = other DNA
ggttaattcttggaagctga

SEQ ID NO: 187560 - DNA, 20 bp, synthetic construct
  source 1..20: mol_type = other DNA
gggttaattcttggaagctg

SEQ ID NO: 187561 - DNA, 20 bp, synthetic construct
  source 1..20: mol_type = other DNA
agggttaattcttggaagct

SEQ ID NO: 187562 - DNA, 20 bp, synthetic construct
  source 1..20: mol_type = other DNA
aagggttaattcttggaagc

SEQ ID NO: 187563 - DNA, 20 bp, synthetic construct
  source 1..20: mol_type = other DNA
aaagggttaattcttggaag

SEQ ID NO: 187564 - DNA, 20 bp, synthetic construct
  source 1..20: mol_type = other DNA
gaaagggttaattcttggaa

SEQ ID NO: 187565 - DNA, 20 bp, synthetic construct
  source 1..20: mol_type = other DNA
agaaagggttaattcttgga

SEQ ID NO: 187566 - DNA, 20 bp, synthetic construct
  source 1..20: mol_type = other DNA
tagaaagggttaattcttgg

SEQ ID NO: 187567 - DNA, 20 bp, synthetic construct
  source 1..20: mol_type = other DNA
atagaaagggttaattcttg

SEQ ID NO: 187568 - DNA, 20 bp, synthetic construct
  source 1..20: mol_type = other DNA
catagaaagggttaattctt

SEQ ID NO: 187569 - DNA, 20 bp, synthetic construct
  source 1..20: mol_type = other DNA
acatagaaagggttaattct

SEQ ID NO: 187570 - DNA, 20 bp, synthetic construct
  source 1..20: mol_type = other DNA
cacatagaaagggttaattc

SEQ ID NO: 187571 - DNA, 20 bp, synthetic construct
  source 1..20: mol_type = other DNA
tcacatagaaagggttaatt

SEQ ID NO: 187572 - DNA, 20 bp, synthetic construct
  source 1..20: mol_type = other DNA
ctcacatagaaagggttaat

SEQ ID NO: 187573 - DNA, 20 bp, synthetic construct
  source 1..20: mol_type = other DNA
gctcacatagaaagggttaa

SEQ ID NO: 187574 - DNA, 20 bp, synthetic construct
  source 1..20: mol_type = other DNA
tgctcacatagaaagggtta

SEQ ID NO: 187575 - DNA, 20 bp, synthetic construct
  source 1..20: mol_type = other DNA
ctgctcacatagaaagggtt

SEQ ID NO: 187576 - DNA, 20 bp, synthetic construct
  source 1..20: mol_type = other DNA
tctgctcacatagaaagggt

SEQ ID NO: 187577 - DNA, 20 bp, synthetic construct
  source 1..20: mol_type = other DNA
ctctgctcacatagaaaggg

SEQ ID NO: 187578 - DNA, 20 bp, synthetic construct
  source 1..20: mol_type = other DNA
cctctgctcacatagaaagg

SEQ ID NO: 187579 - DNA, 20 bp, synthetic construct
  source 1..20: mol_type = other DNA
gcctctgctcacatagaaag

SEQ ID NO: 187580 - DNA, 20 bp, synthetic construct
  source 1..20: mol_type = other DNA
tgcctctgctcacatagaaa

SEQ ID NO: 187581 - DNA, 20 bp, synthetic construct
  source 1..20: mol_type = other DNA
atgcctctgctcacatagaa

SEQ ID NO: 187582 - DNA, 20 bp, synthetic construct
  source 1..20: mol_type = other DNA
gatgcctctgctcacataga

SEQ ID NO: 187583 - DNA, 20 bp, synthetic construct
  source 1..20: mol_type = other DNA
ggatgcctctgctcacatag

SEQ ID NO: 187584 - DNA, 20 bp, synthetic construct
  source 1..20: mol_type = other DNA
tggatgcctctgctcacata

SEQ ID NO: 187585 - DNA, 20 bp, synthetic construct
  source 1..20: mol_type = other DNA
atggatgcctctgctcacat

SEQ ID NO: 187586 - DNA, 20 bp, synthetic construct
  source 1..20: mol_type = other DNA
catggatgcctctgctcaca

SEQ ID NO: 187587 - DNA, 20 bp, synthetic construct
  source 1..20: mol_type = other DNA
ccatggatgcctctgctcac

SEQ ID NO: 187588 - DNA, 20 bp, synthetic construct
  source 1..20: mol_type = other DNA
cccatggatgcctctgctca

SEQ ID NO: 187589 - DNA, 20 bp, synthetic construct
  source 1..20: mol_type = other DNA
ccccatggatgcctctgctc

SEQ ID NO: 187590 - DNA, 20 bp, synthetic construct
  source 1..20: mol_type = other DNA
cccccatggatgcctctgct

SEQ ID NO: 187591 - DNA, 20 bp, synthetic construct
  source 1..20: mol_type = other DNA
ccccccatggatgcctctgc

SEQ ID NO: 187592 - DNA, 20 bp, synthetic construct
  source 1..20: mol_type = other DNA
tccccccatggatgcctctg

SEQ ID NO: 187593 - DNA, 20 bp, synthetic construct
  source 1..20: mol_type = other DNA
gtccccccatggatgcctct

SEQ ID NO: 187594 - DNA, 20 bp, synthetic construct
  source 1..20: mol_type = other DNA
tgtccccccatggatgcctc

SEQ ID NO: 187595 - DNA, 20 bp, synthetic construct
  source 1..20: mol_type = other DNA
gtgtccccccatggatgcct

SEQ ID NO: 187596 - DNA, 20 bp, synthetic construct
  source 1..20: mol_type = other DNA
tgtgtccccccatggatgcc

SEQ ID NO: 187597 - DNA, 20 bp, synthetic construct
  source 1..20: mol_type = other DNA
gtgtgtccccccatggatgc

SEQ ID NO: 187598 - DNA, 20 bp, synthetic construct
  source 1..20: mol_type = other DNA
agtgtgtccccccatggatg

SEQ ID NO: 187599 - DNA, 20 bp, synthetic construct
  source 1..20: mol_type = other DNA
cagtgtgtccccccatggat

SEQ ID NO: 187600 - DNA, 20 bp, synthetic construct
  source 1..20: mol_type = other DNA
ccagtgtgtccccccatgga

SEQ ID NO: 187601 - DNA, 20 bp, synthetic construct
  source 1..20: mol_type = other DNA
accagtgtgtccccccatgg

SEQ ID NO: 187602 - DNA, 20 bp, synthetic construct
  source 1..20: mol_type = other DNA
caccagtgtgtccccccatg

SEQ ID NO: 187603 - DNA, 20 bp, synthetic construct
  source 1..20: mol_type = other DNA
tcaccagtgtgtccccccat

SEQ ID NO: 187604 - DNA, 20 bp, synthetic construct
  source 1..20: mol_type = other DNA
ttcaccagtgtgtcccccca

SEQ ID NO: 187605 - DNA, 20 bp, synthetic construct
  source 1..20: mol_type = other DNA
attcaccagtgtgtcccccc

SEQ ID NO: 187606 - DNA, 20 bp, synthetic construct
  source 1..20: mol_type = other DNA
gattcaccagtgtgtccccc

SEQ ID NO: 187607 - DNA, 20 bp, synthetic construct
  source 1..20: mol_type = other DNA
tgattcaccagtgtgtcccc

SEQ ID NO: 187608 - DNA, 20 bp, synthetic construct
  source 1..20: mol_type = other DNA
atgattcaccagtgtgtccc

SEQ ID NO: 187609 - DNA, 20 bp, synthetic construct
  source 1..20: mol_type = other DNA
gatgattcaccagtgtgtcc

SEQ ID NO: 187610 - DNA, 20 bp, synthetic construct
  source 1..20: mol_type = other DNA
agatgattcaccagtgtgtc

SEQ ID NO: 187611 - DNA, 20 bp, synthetic construct
  source 1..20: mol_type = other DNA
cagatgattcaccagtgtgt

SEQ ID NO: 187612 - DNA, 20 bp, synthetic construct
  source 1..20: mol_type = other DNA
acagatgattcaccagtgtg

SEQ ID NO: 187613 - DNA, 20 bp, synthetic construct
  source 1..20: mol_type = other DNA
aacagatgattcaccagtgt

SEQ ID NO: 187614 - DNA, 20 bp, synthetic construct
  source 1..20: mol_type = other DNA
taacagatgattcaccagtg

SEQ ID NO: 187615 - DNA, 20 bp, synthetic construct
  source 1..20: mol_type = other DNA
ataacagatgattcaccagt

SEQ ID NO: 187616 - DNA, 20 bp, synthetic construct
  source 1..20: mol_type = other DNA
cataacagatgattcaccag

SEQ ID NO: 187617 - DNA, 20 bp, synthetic construct
  source 1..20: mol_type = other DNA
acataacagatgattcacca

SEQ ID NO: 187618 - DNA, 20 bp, synthetic construct
  source 1..20: mol_type = other DNA
tacataacagatgattcacc

SEQ ID NO: 187619 - DNA, 20 bp, synthetic construct
  source 1..20: mol_type = other DNA
ctacataacagatgattcac

SEQ ID NO: 187620 - DNA, 20 bp, synthetic construct
  source 1..20: mol_type = other DNA
tctacataacagatgattca

SEQ ID NO: 187621 - DNA, 20 bp, synthetic construct
  source 1..20: mol_type = other DNA
ttctacataacagatgattc

SEQ ID NO: 187622 - DNA, 20 bp, synthetic construct
  source 1..20: mol_type = other DNA
cttctacataacagatgatt

SEQ ID NO: 187623 - DNA, 20 bp, synthetic construct
  source 1..20: mol_type = other DNA
acttctacataacagatgat

SEQ ID NO: 187624 - DNA, 20 bp, synthetic construct
  source 1..20: mol_type = other DNA
gacttctacataacagatga

SEQ ID NO: 187625 - DNA, 20 bp, synthetic construct
  source 1..20: mol_type = other DNA
agacttctacataacagatg

SEQ ID NO: 187626 - DNA, 20 bp, synthetic construct
  source 1..20: mol_type = other DNA
cagacttctacataacagat

SEQ ID NO: 187627 - DNA, 20 bp, synthetic construct
  source 1..20: mol_type = other DNA
ccagacttctacataacaga

SEQ ID NO: 187628 - DNA, 20 bp, synthetic construct
  source 1..20: mol_type = other DNA
tccagacttctacataacag

SEQ ID NO: 187629 - DNA, 20 bp, synthetic construct
  source 1..20: mol_type = other DNA
ttccagacttctacataaca

SEQ ID NO: 187630 - DNA, 20 bp, synthetic construct
  source 1..20: mol_type = other DNA
tttccagacttctacataac

SEQ ID NO: 187631 - DNA, 20 bp, synthetic construct
  source 1..20: mol_type = other DNA
ttttccagacttctacataa

SEQ ID NO: 187632 - DNA, 20 bp, synthetic construct
  source 1..20: mol_type = other DNA
gttttccagacttctacata

SEQ ID NO: 187633 - DNA, 20 bp, synthetic construct
  source 1..20: mol_type = other DNA
tgttttccagacttctacat

SEQ ID NO: 187634 - DNA, 20 bp, synthetic construct
  source 1..20: mol_type = other DNA
atgttttccagacttctaca

SEQ ID NO: 187635 - DNA, 20 bp, synthetic construct
  source 1..20: mol_type = other DNA
gatgttttccagacttctac

SEQ ID NO: 187636 - DNA, 20 bp, synthetic construct
  source 1..20: mol_type = other DNA
tgatgttttccagacttcta

SEQ ID NO: 187637 - DNA, 20 bp, synthetic construct
  source 1..20: mol_type = other DNA
ctgatgttttccagacttct

SEQ ID NO: 187638 - DNA, 20 bp, synthetic construct
  source 1..20: mol_type = other DNA
cctgatgttttccagacttc

SEQ ID NO: 187639 - DNA, 20 bp, synthetic construct
  source 1..20: mol_type = other DNA
tcctgatgttttccagactt

SEQ ID NO: 187640 - DNA, 20 bp, synthetic construct
  source 1..20: mol_type = other DNA
atcctgatgttttccagact

SEQ ID NO: 187641 - DNA, 20 bp, synthetic construct
  source 1..20: mol_type = other DNA
catcctgatgttttccagac

SEQ ID NO: 187642 - DNA, 20 bp, synthetic construct
  source 1..20: mol_type = other DNA
ccatcctgatgttttccaga

SEQ ID NO: 187643 - DNA, 20 bp, synthetic construct
  source 1..20: mol_type = other DNA
tccatcctgatgttttccag

SEQ ID NO: 187644 - DNA, 20 bp, synthetic construct
  source 1..20: mol_type = other DNA
ttccatcctgatgttttcca

SEQ ID NO: 187645 - DNA, 20 bp, synthetic construct
  source 1..20: mol_type = other DNA
gttccatcctgatgttttcc

SEQ ID NO: 187646 - DNA, 20 bp, synthetic construct
  source 1..20: mol_type = other DNA
agttccatcctgatgttttc

SEQ ID NO: 187647 - DNA, 20 bp, synthetic construct
  source 1..20: mol_type = other DNA
cagttccatcctgatgtttt

SEQ ID NO: 187648 - DNA, 20 bp, synthetic construct
  source 1..20: mol_type = other DNA
ccagttccatcctgatgttt

SEQ ID NO: 187649 - DNA, 20 bp, synthetic construct
  source 1..20: mol_type = other DNA
accagttccatcctgatgtt

SEQ ID NO: 187650 - DNA, 20 bp, synthetic construct
  source 1..20: mol_type = other DNA
caccagttccatcctgatgt

SEQ ID NO: 187651 - DNA, 20 bp, synthetic construct
  source 1..20: mol_type = other DNA
tcaccagttccatcctgatg

SEQ ID NO: 187652 - DNA, 20 bp, synthetic construct
  source 1..20: mol_type = other DNA
ttcaccagttccatcctgat

SEQ ID NO: 187653 - DNA, 20 bp, synthetic construct
  source 1..20: mol_type = other DNA
tttcaccagttccatcctga

SEQ ID NO: 187654 - DNA, 20 bp, synthetic construct
  source 1..20: mol_type = other DNA
atttcaccagttccatcctg

SEQ ID NO: 187655 - DNA, 20 bp, synthetic construct
  source 1..20: mol_type = other DNA
tatttcaccagttccatcct

SEQ ID NO: 187656 - DNA, 20 bp, synthetic construct
  source 1..20: mol_type = other DNA
ttatttcaccagttccatcc

SEQ ID NO: 187657 - DNA, 20 bp, synthetic construct
  source 1..20: mol_type = other DNA
cttatttcaccagttccatc

SEQ ID NO: 187658 - DNA, 20 bp, synthetic construct
  source 1..20: mol_type = other DNA
acttatttcaccagttccat

SEQ ID NO: 187659 - DNA, 20 bp, synthetic construct
  source 1..20: mol_type = other DNA
cacttatttcaccagttcca

SEQ ID NO: 187660 - DNA, 20 bp, synthetic construct
  source 1..20: mol_type = other DNA
acacttatttcaccagttcc

SEQ ID NO: 187661 - DNA, 20 bp, synthetic construct
  source 1..20: mol_type = other DNA
cacacttatttcaccagttc

SEQ ID NO: 187662 - DNA, 20 bp, synthetic construct
  source 1..20: mol_type = other DNA
ccacacttatttcaccagtt

SEQ ID NO: 187663 - DNA, 20 bp, synthetic construct
  source 1..20: mol_type = other DNA
gccacacttatttcaccagt

SEQ ID NO: 187664 - DNA, 20 bp, synthetic construct
  source 1..20: mol_type = other DNA
ggccacacttatttcaccag

SEQ ID NO: 187665 - DNA, 20 bp, synthetic construct
  source 1..20: mol_type = other DNA
aggccacacttatttcacca

SEQ ID NO: 187666 - DNA, 20 bp, synthetic construct
  source 1..20: mol_type = other DNA
gaggccacacttatttcacc

SEQ ID NO: 187667 - DNA, 20 bp, synthetic construct
  source 1..20: mol_type = other DNA
agaggccacacttatttcac

SEQ ID NO: 187668 - DNA, 20 bp, synthetic construct
  source 1..20: mol_type = other DNA
cagaggccacacttatttca

SEQ ID NO: 187669 - DNA, 20 bp, synthetic construct
  source 1..20: mol_type = other DNA
tcagaggccacacttatttc

SEQ ID NO: 187670 - DNA, 20 bp, synthetic construct
  source 1..20: mol_type = other DNA
gtcagaggccacacttattt

SEQ ID NO: 187671 - DNA, 20 bp, synthetic construct
  source 1..20: mol_type = other DNA
cgtcagaggccacacttatt

SEQ ID NO: 187672 - DNA, 20 bp, synthetic construct
  source 1..20: mol_type = other DNA
ccgtcagaggccacacttat

SEQ ID NO: 187673 - DNA, 20 bp, synthetic construct
  source 1..20: mol_type = other DNA
tccgtcagaggccacactta

SEQ ID NO: 187674 - DNA, 20 bp, synthetic construct
  source 1..20: mol_type = other DNA
ttccgtcagaggccacactt

SEQ ID NO: 187675 - DNA, 20 bp, synthetic construct
  source 1..20: mol_type = other DNA
attccgtcagaggccacact

SEQ ID NO: 187676 - DNA, 20 bp, synthetic construct
  source 1..20: mol_type = other DNA
cattccgtcagaggccacac

SEQ ID NO: 187677 - DNA, 20 bp, synthetic construct
  source 1..20: mol_type = other DNA
ccattccgtcagaggccaca

SEQ ID NO: 187678 - DNA, 20 bp, synthetic construct
  source 1..20: mol_type = other DNA
tccattccgtcagaggccac

SEQ ID NO: 187679 - DNA, 20 bp, synthetic construct
  source 1..20: mol_type = other DNA
ctccattccgtcagaggcca

SEQ ID NO: 187680 - DNA, 20 bp, synthetic construct
  source 1..20: mol_type = other DNA
gctccattccgtcagaggcc

SEQ ID NO: 187681 - DNA, 20 bp, synthetic construct
  source 1..20: mol_type = other DNA
cgctccattccgtcagaggc

SEQ ID NO: 187682 - DNA, 20 bp, synthetic construct
  source 1..20: mol_type = other DNA
ccgctccattccgtcagagg

SEQ ID NO: 187683 - DNA, 20 bp, synthetic construct
  source 1..20: mol_type = other DNA
accgctccattccgtcagag

SEQ ID NO: 187684 - DNA, 20 bp, synthetic construct
  source 1..20: mol_type = other DNA
gaccgctccattccgtcaga

SEQ ID NO: 187685 - DNA, 20 bp, synthetic construct
  source 1..20: mol_type = other DNA
ggaccgctccattccgtcag

SEQ ID NO: 187686 - DNA, 20 bp, synthetic construct
  source 1..20: mol_type = other DNA
cggaccgctccattccgtca

SEQ ID NO: 187687 - DNA, 20 bp, synthetic construct
  source 1..20: mol_type = other DNA
acggaccgctccattccgtc

SEQ ID NO: 187688 - DNA, 20 bp, synthetic construct
  source 1..20: mol_type = other DNA
gacggaccgctccattccgt

SEQ ID NO: 187689 - DNA, 20 bp, synthetic construct
  source 1..20: mol_type = other DNA
agacggaccgctccattccg

SEQ ID NO: 187690 - DNA, 20 bp, synthetic construct
  source 1..20: mol_type = other DNA
cagacggaccgctccattcc

SEQ ID NO: 187691 - DNA, 20 bp, synthetic construct
  source 1..20: mol_type = other DNA
gcagacggaccgctccattc

SEQ ID NO: 187692 - DNA, 20 bp, synthetic construct
  source 1..20: mol_type = other DNA
tgcagacggaccgctccatt

SEQ ID NO: 187693 - DNA, 20 bp, synthetic construct
  source 1..20: mol_type = other DNA
gtgcagacggaccgctccat

SEQ ID NO: 187694 - DNA, 20 bp, synthetic construct
  source 1..20: mol_type = other DNA
agtgcagacggaccgctcca

SEQ ID NO: 187695 - DNA, 20 bp, synthetic construct
  source 1..20: mol_type = other DNA
cagtgcagacggaccgctcc

SEQ ID NO: 187696 - DNA, 20 bp, synthetic construct
  source 1..20: mol_type = other DNA
gcagtgcagacggaccgctc

SEQ ID NO: 187697 - DNA, 20 bp, synthetic construct
  source 1..20: mol_type = other DNA
agcagtgcagacggaccgct

SEQ ID NO: 187698 - DNA, 20 bp, synthetic construct
  source 1..20: mol_type = other DNA
cagcagtgcagacggaccgc

SEQ ID NO: 187699 - DNA, 20 bp, synthetic construct
  source 1..20: mol_type = other DNA
gcagcagtgcagacggaccg

SEQ ID NO: 187700 - DNA, 20 bp, synthetic construct
  source 1..20: mol_type = other DNA
cgcagcagtgcagacggacc

SEQ ID NO: 187701 - DNA, 20 bp, synthetic construct
  source 1..20: mol_type = other DNA
ccgcagcagtgcagacggac

SEQ ID NO: 187702 - DNA, 20 bp, synthetic construct
  source 1..20: mol_type = other DNA
cccgcagcagtgcagacgga

SEQ ID NO: 187703 - DNA, 20 bp, synthetic construct
  source 1..20: mol_type = other DNA
acccgcagcagtgcagacgg

SEQ ID NO: 187704 - DNA, 20 bp, synthetic construct
  source 1..20: mol_type = other DNA
cacccgcagcagtgcagacg

SEQ ID NO: 187705 - DNA, 20 bp, synthetic construct
  source 1..20: mol_type = other DNA
gcacccgcagcagtgcagac

SEQ ID NO: 187706 - DNA, 20 bp, synthetic construct
  source 1..20: mol_type = other DNA
ggcacccgcagcagtgcaga

SEQ ID NO: 187707 - DNA, 20 bp, synthetic construct
  source 1..20: mol_type = other DNA
gggcacccgcagcagtgcag

SEQ ID NO: 187708 - DNA, 20 bp, synthetic construct
  source 1..20: mol_type = other DNA
ggggcacccgcagcagtgca

SEQ ID NO: 187709 - DNA, 20 bp, synthetic construct
  source 1..20: mol_type = other DNA
aggggcacccgcagcagtgc

SEQ ID NO: 187710 - DNA, 20 bp, synthetic construct
  source 1..20: mol_type = other DNA
gaggggcacccgcagcagtg

SEQ ID NO: 187711 - DNA, 20 bp, synthetic construct
  source 1..20: mol_type = other DNA
tgaggggcacccgcagcagt

SEQ ID NO: 187712 - DNA, 20 bp, synthetic construct
  source 1..20: mol_type = other DNA
ctgaggggcacccgcagcag

SEQ ID NO: 187713 - DNA, 20 bp, synthetic construct
  source 1..20: mol_type = other DNA
tctgaggggcacccgcagca

SEQ ID NO: 187714 - DNA, 20 bp, synthetic construct
  source 1..20: mol_type = other DNA
atctgaggggcacccgcagc

SEQ ID NO: 187715 - DNA, 20 bp, synthetic construct
  source 1..20: mol_type = other DNA
gatctgaggggcacccgcag

SEQ ID NO: 187716 - DNA, 20 bp, synthetic construct
  source 1..20: mol_type = other DNA
ggatctgaggggcacccgca

SEQ ID NO: 187717 - DNA, 20 bp, synthetic construct
  source 1..20: mol_type = other DNA
aggatctgaggggcacccgc

SEQ ID NO: 187718 - DNA, 20 bp, synthetic construct
  source 1..20: mol_type = other DNA
caggatctgaggggcacccg

SEQ ID NO: 187719 - DNA, 20 bp, synthetic construct
  source 1..20: mol_type = other DNA
acaggatctgaggggcaccc

SEQ ID NO: 187720 - DNA, 20 bp, synthetic construct
  source 1..20: mol_type = other DNA
cacaggatctgaggggcacc

SEQ ID NO: 187721 - DNA, 20 bp, synthetic construct
  source 1..20: mol_type = other DNA
ccacaggatctgaggggcac

SEQ ID NO: 187722 - DNA, 20 bp, synthetic construct
  source 1..20: mol_type = other DNA
cccacaggatctgaggggca

SEQ ID NO: 187723 - DNA, 20 bp, synthetic construct
  source 1..20: mol_type = other DNA
acccacaggatctgaggggc

SEQ ID NO: 187724 - DNA, 20 bp, synthetic construct
  source 1..20: mol_type = other DNA
gacccacaggatctgagggg

SEQ ID NO: 187725 - DNA, 20 bp, synthetic construct
  source 1..20: mol_type = other DNA
tgacccacaggatctgaggg

SEQ ID NO: 187726 - DNA, 20 bp, synthetic construct
  source 1..20: mol_type = other DNA
ctgacccacaggatctgagg

SEQ ID NO: 187727 - DNA, 20 bp, synthetic construct
  source 1..20: mol_type = other DNA
actgacccacaggatctgag

SEQ ID NO: 187728 - DNA, 20 bp, synthetic construct
  source 1..20: mol_type = other DNA
cactgacccacaggatctga

SEQ ID NO: 187729 - DNA, 20 bp, synthetic construct
  source 1..20: mol_type = other DNA
tcactgacccacaggatctg

SEQ ID NO: 187730 - DNA, 20 bp, synthetic construct
  source 1..20: mol_type = other DNA
ctcactgacccacaggatct

SEQ ID NO: 187731 - DNA, 20 bp, synthetic construct
  source 1..20: mol_type = other DNA
tctcactgacccacaggatc

SEQ ID NO: 187732 - DNA, 20 bp, synthetic construct
  source 1..20: mol_type = other DNA
ttctcactgacccacaggat

SEQ ID NO: 187733 - DNA, 20 bp, synthetic construct
  source 1..20: mol_type = other DNA
tttctcactgacccacagga

SEQ ID NO: 187734 - DNA, 20 bp, synthetic construct
  source 1..20: mol_type = other DNA
ttttctcactgacccacagg

SEQ ID NO: 187735 - DNA, 20 bp, synthetic construct
  source 1..20: mol_type = other DNA
cttttctcactgacccacag

SEQ ID NO: 187736 - DNA, 20 bp, synthetic construct
  source 1..20: mol_type = other DNA
gcttttctcactgacccaca

SEQ ID NO: 187737 - DNA, 20 bp, synthetic construct
  source 1..20: mol_type = other DNA
tgcttttctcactgacccac

SEQ ID NO: 187738 - DNA, 20 bp, synthetic construct
  source 1..20: mol_type = other DNA
ctgcttttctcactgaccca

SEQ ID NO: 187739 - DNA, 20 bp, synthetic construct
  source 1..20: mol_type = other DNA
actgcttttctcactgaccc

SEQ ID NO: 187740 - DNA, 20 bp, synthetic construct
  source 1..20: mol_type = other DNA
cactgcttttctcactgacc

SEQ ID NO: 187741 - DNA, 20 bp, synthetic construct
  source 1..20: mol_type = other DNA
tcactgcttttctcactgac

SEQ ID NO: 187742 - DNA, 20 bp, synthetic construct
  source 1..20: mol_type = other DNA
ctcactgcttttctcactga

SEQ ID NO: 187743 - DNA, 20 bp, synthetic construct
  source 1..20: mol_type = other DNA
cctcactgcttttctcactg

SEQ ID NO: 187744 - DNA, 20 bp, synthetic construct
  source 1..20: mol_type = other DNA
tcctcactgcttttctcact

SEQ ID NO: 187745 - DNA, 20 bp, synthetic construct
  source 1..20: mol_type = other DNA
ttcctcactgcttttctcac

SEQ ID NO: 187746 - DNA, 20 bp, synthetic construct
  source 1..20: mol_type = other DNA
gttcctcactgcttttctca

SEQ ID NO: 187747 - DNA, 20 bp, synthetic construct
  source 1..20: mol_type = other DNA
tgttcctcactgcttttctc

SEQ ID NO: 187748 - DNA, 20 bp, synthetic construct
  source 1..20: mol_type = other DNA
ttgttcctcactgcttttct

SEQ ID NO: 187749 - DNA, 20 bp, synthetic construct
  source 1..20: mol_type = other DNA
cttgttcctcactgcttttc

SEQ ID NO: 187750 - DNA, 20 bp, synthetic construct
  source 1..20: mol_type = other DNA
ccttgttcctcactgctttt

SEQ ID NO: 187751 - DNA, 20 bp, synthetic construct
  source 1..20: mol_type = other DNA
gccttgttcctcactgcttt

SEQ ID NO: 187752 - DNA, 20 bp, synthetic construct
  source 1..20: mol_type = other DNA
tgccttgttcctcactgctt

SEQ ID NO: 187753 - DNA, 20 bp, synthetic construct
  source 1..20: mol_type = other DNA
ctgccttgttcctcactgct

SEQ ID NO: 187754 - DNA, 20 bp, synthetic construct
  source 1..20: mol_type = other DNA
cctgccttgttcctcactgc

SEQ ID NO: 187755 - DNA, 20 bp, synthetic construct
  source 1..20: mol_type = other DNA
acctgccttgttcctcactg

SEQ ID NO: 187756 - DNA, 20 bp, synthetic construct
  source 1..20: mol_type = other DNA
tacctgccttgttcctcact

SEQ ID NO: 187757 - DNA, 20 bp, synthetic construct
  source 1..20: mol_type = other DNA
gtacctgccttgttcctcac

SEQ ID NO: 187758 - DNA, 20 bp, synthetic construct
  source 1..20: mol_type = other DNA
agtacctgccttgttcctca

SEQ ID NO: 187759 - DNA, 20 bp, synthetic construct
  source 1..20: mol_type = other DNA
cagtacctgccttgttcctc

SEQ ID NO: 187760 - DNA, 20 bp, synthetic construct
  source 1..20: mol_type = other DNA
acagtacctgccttgttcct

SEQ ID NO: 187761 - DNA, 20 bp, synthetic construct
  source 1..20: mol_type = other DNA
cacagtacctgccttgttcc

SEQ ID NO: 187762 - DNA, 20 bp, synthetic construct
  source 1..20: mol_type = other DNA
acacagtacctgccttgttc

SEQ ID NO: 187763 - DNA, 20 bp, synthetic construct
  source 1..20: mol_type = other DNA
tacacagtacctgccttgtt

SEQ ID NO: 187764 - DNA, 20 bp, synthetic construct
  source 1..20: mol_type = other DNA
gtacacagtacctgccttgt

SEQ ID NO: 187765 - DNA, 20 bp, synthetic construct
  source 1..20: mol_type = other DNA
agtacacagtacctgccttg

SEQ ID NO: 187766 - DNA, 20 bp, synthetic construct
  source 1..20: mol_type = other DNA
cagtacacagtacctgcctt

SEQ ID NO: 187767 - DNA, 20 bp, synthetic construct
  source 1..20: mol_type = other DNA
acagtacacagtacctgcct

SEQ ID NO: 187768 - DNA, 20 bp, synthetic construct
  source 1..20: mol_type = other DNA
gacagtacacagtacctgcc

SEQ ID NO: 187769 - DNA, 20 bp, synthetic construct
  source 1..20: mol_type = other DNA
ggacagtacacagtacctgc

SEQ ID NO: 187770 - DNA, 20 bp, synthetic construct
  source 1..20: mol_type = other DNA
aggacagtacacagtacctg

SEQ ID NO: 187771 - DNA, 20 bp, synthetic construct
  source 1..20: mol_type = other DNA
gaggacagtacacagtacct

SEQ ID NO: 187772 - DNA, 20 bp, synthetic construct
  source 1..20: mol_type = other DNA
agaggacagtacacagtacc

SEQ ID NO: 187773 - DNA, 20 bp, synthetic construct
  source 1..20: mol_type = other DNA
cagaggacagtacacagtac

SEQ ID NO: 187774 - DNA, 20 bp, synthetic construct
  source 1..20: mol_type = other DNA
gcagaggacagtacacagta

SEQ ID NO: 187775 - DNA, 20 bp, synthetic construct
  source 1..20: mol_type = other DNA
cgcagaggacagtacacagt

SEQ ID NO: 187776 - DNA, 20 bp, synthetic construct
  source 1..20: mol_type = other DNA
acgcagaggacagtacacag

SEQ ID NO: 187777 - DNA, 20 bp, synthetic construct
  source 1..20: mol_type = other DNA
cacgcagaggacagtacaca

SEQ ID NO: 187778 - DNA, 20 bp, synthetic construct
  source 1..20: mol_type = other DNA
gcacgcagaggacagtacac

SEQ ID NO: 187779 - DNA, 20 bp, synthetic construct
  source 1..20: mol_type = other DNA
tgcacgcagaggacagtaca

SEQ ID NO: 187780 - DNA, 20 bp, synthetic construct
  source 1..20: mol_type = other DNA
ttgcacgcagaggacagtac

SEQ ID NO: 187781 - DNA, 20 bp, synthetic construct
  source 1..20: mol_type = other DNA
cttgcacgcagaggacagta

SEQ ID NO: 187782 - DNA, 20 bp, synthetic construct
  source 1..20: mol_type = other DNA
ccttgcacgcagaggacagt

SEQ ID NO: 187783 - DNA, 20 bp, synthetic construct
  source 1..20: mol_type = other DNA
tccttgcacgcagaggacag

SEQ ID NO: 187784 - DNA, 20 bp, synthetic construct
  source 1..20: mol_type = other DNA
ttccttgcacgcagaggaca

SEQ ID NO: 187785 - DNA, 20 bp, synthetic construct
  source 1..20: mol_type = other DNA
cttccttgcacgcagaggac

SEQ ID NO: 187786 - DNA, 20 bp, synthetic construct
  source 1..20: mol_type = other DNA
ccttccttgcacgcagagga

SEQ ID NO: 187787 - DNA, 20 bp, synthetic construct
  source 1..20: mol_type = other DNA
gccttccttgcacgcagagg

SEQ ID NO: 187788 - DNA, 20 bp, synthetic construct
  source 1..20: mol_type = other DNA
ggccttccttgcacgcagag

SEQ ID NO: 187789 - DNA, 20 bp, synthetic construct
  source 1..20: mol_type = other DNA
tggccttccttgcacgcaga

SEQ ID NO: 187790 - DNA, 20 bp, synthetic construct
  source 1..20: mol_type = other DNA
ctggccttccttgcacgcag

SEQ ID NO: 187791 - DNA, 20 bp, synthetic construct
  source 1..20: mol_type = other DNA
gctggccttccttgcacgca

SEQ ID NO: 187792 - DNA, 20 bp, synthetic construct
  source 1..20: mol_type = other DNA
cgctggccttccttgcacgc

SEQ ID NO: 187793 - DNA, 20 bp, synthetic construct
  source 1..20: mol_type = other DNA
gcgctggccttccttgcacg

SEQ ID NO: 187794 - DNA, 20 bp, synthetic construct
  source 1..20: mol_type = other DNA
tgcgctggccttccttgcac

SEQ ID NO: 187795 - DNA, 20 bp, synthetic construct
  source 1..20: mol_type = other DNA
atgcgctggccttccttgca

SEQ ID NO: 187796 - DNA, 20 bp, synthetic construct
  source 1..20: mol_type = other DNA
catgcgctggccttccttgc

SEQ ID NO: 187797 - DNA, 20 bp, synthetic construct
  source 1..20: mol_type = other DNA
gcatgcgctggccttccttg

SEQ ID NO: 187798 - DNA, 20 bp, synthetic construct
  source 1..20: mol_type = other DNA
tgcatgcgctggccttcctt

SEQ ID NO: 187799 - DNA, 20 bp, synthetic construct
  source 1..20: mol_type = other DNA
ttgcatgcgctggccttcct

SEQ ID NO: 187800 - DNA, 20 bp, synthetic construct
  source 1..20: mol_type = other DNA
gttgcatgcgctggccttcc

SEQ ID NO: 187801 - DNA, 20 bp, synthetic construct
  source 1..20: mol_type = other DNA
tgttgcatgcgctggccttc

SEQ ID NO: 187802 - DNA, 20 bp, synthetic construct
  source 1..20: mol_type = other DNA
ctgttgcatgcgctggcctt

SEQ ID NO: 187803 - DNA, 20 bp, synthetic construct
  source 1..20: mol_type = other DNA
tctgttgcatgcgctggcct

SEQ ID NO: 187804 - DNA, 20 bp, synthetic construct
  source 1..20: mol_type = other DNA
ctctgttgcatgcgctggcc

SEQ ID NO: 187805 - DNA, 20 bp, synthetic construct
  source 1..20: mol_type = other DNA
actctgttgcatgcgctggc

SEQ ID NO: 187806 - DNA, 20 bp, synthetic construct
  source 1..20: mol_type = other DNA
gactctgttgcatgcgctgg

SEQ ID NO: 187807 - DNA, 20 bp, synthetic construct
  source 1..20: mol_type = other DNA
ggactctgttgcatgcgctg

SEQ ID NO: 187808 - DNA, 20 bp, synthetic construct
  source 1..20: mol_type = other DNA
tggactctgttgcatgcgct

SEQ ID NO: 187809 - DNA, 20 bp, synthetic construct
  source 1..20: mol_type = other DNA
gtggactctgttgcatgcgc

SEQ ID NO: 187810 - DNA, 20 bp, synthetic construct
  source 1..20: mol_type = other DNA
tgtggactctgttgcatgcg

SEQ ID NO: 187811 - DNA, 20 bp, synthetic construct
  source 1..20: mol_type = other DNA
gtgtggactctgttgcatgc

SEQ ID NO: 187812 - DNA, 20 bp, synthetic construct
  source 1..20: mol_type = other DNA
tgtgtggactctgttgcatg

SEQ ID NO: 187813 - DNA, 20 bp, synthetic construct
  source 1..20: mol_type = other DNA
ctgtgtggactctgttgcat

SEQ ID NO: 187814 - DNA, 20 bp, synthetic construct
  source 1..20: mol_type = other DNA
tctgtgtggactctgttgca

SEQ ID NO: 187815 - DNA, 20 bp, synthetic construct
  source 1..20: mol_type = other DNA
gtctgtgtggactctgttgc

SEQ ID NO: 187816 - DNA, 20 bp, synthetic construct
  source 1..20: mol_type = other DNA
tgtctgtgtggactctgttg

SEQ ID NO: 187817 - DNA, 20 bp, synthetic construct
  source 1..20: mol_type = other DNA
atgtctgtgtggactctgtt

SEQ ID NO: 187818 - DNA, 20 bp, synthetic construct
  source 1..20: mol_type = other DNA
tatgtctgtgtggactctgt

SEQ ID NO: 187819 - DNA, 20 bp, synthetic construct
  source 1..20: mol_type = other DNA
ctatgtctgtgtggactctg

SEQ ID NO: 187820 - DNA, 20 bp, synthetic construct
  source 1..20: mol_type = other DNA
gctatgtctgtgtggactct

SEQ ID NO: 187821 - DNA, 20 bp, synthetic construct
  source 1..20: mol_type = other DNA
ggctatgtctgtgtggactc

SEQ ID NO: 187822 - DNA, 20 bp, synthetic construct
  source 1..20: mol_type = other DNA
aggctatgtctgtgtggact

SEQ ID NO: 187823 - DNA, 20 bp, synthetic construct
  source 1..20: mol_type = other DNA
taggctatgtctgtgtggac

SEQ ID NO: 187824 - DNA, 20 bp, synthetic construct
  source 1..20: mol_type = other DNA
ttaggctatgtctgtgtgga

SEQ ID NO: 187825 - DNA, 20 bp, synthetic construct
  source 1..20: mol_type = other DNA
gttaggctatgtctgtgtgg

SEQ ID NO: 187826 - DNA, 20 bp, synthetic construct
  source 1..20: mol_type = other DNA
agttaggctatgtctgtgtg

SEQ ID NO: 187827 - DNA, 20 bp, synthetic construct
  source 1..20: mol_type = other DNA
gagttaggctatgtctgtgt

SEQ ID NO: 187828 - DNA, 20 bp, synthetic construct
  source 1..20: mol_type = other DNA
agagttaggctatgtctgtg

SEQ ID NO: 187829 - DNA, 20 bp, synthetic construct
  source 1..20: mol_type = other DNA
cagagttaggctatgtctgt

SEQ ID NO: 187830 - DNA, 20 bp, synthetic construct
  source 1..20: mol_type = other DNA
ccagagttaggctatgtctg

SEQ ID NO: 187831 - DNA, 20 bp, synthetic construct
  source 1..20: mol_type = other DNA
tccagagttaggctatgtct

SEQ ID NO: 187832 - DNA, 20 bp, synthetic construct
  source 1..20: mol_type = other DNA
ttccagagttaggctatgtc

SEQ ID NO: 187833 - DNA, 20 bp, synthetic construct
  source 1..20: mol_type = other DNA
cttccagagttaggctatgt

SEQ ID NO: 187834 - DNA, 20 bp, synthetic construct
  source 1..20: mol_type = other DNA
ccttccagagttaggctatg

SEQ ID NO: 187835 - DNA, 20 bp, synthetic construct
  source 1..20: mol_type = other DNA
tccttccagagttaggctat

SEQ ID NO: 187836 - DNA, 20 bp, synthetic construct
  source 1..20: mol_type = other DNA
ttccttccagagttaggcta

SEQ ID NO: 187837 - DNA, 20 bp, synthetic construct
  source 1..20: mol_type = other DNA
cttccttccagagttaggct

SEQ ID NO: 187838 - DNA, 20 bp, synthetic construct
  source 1..20: mol_type = other DNA
tcttccttccagagttaggc

SEQ ID NO: 187839 - DNA, 20 bp, synthetic construct
  source 1..20: mol_type = other DNA
ttcttccttccagagttagg

SEQ ID NO: 187840 - DNA, 20 bp, synthetic construct
  source 1..20: mol_type = other DNA
attcttccttccagagttag

SEQ ID NO: 187841 - DNA, 20 bp, synthetic construct
  source 1..20: mol_type = other DNA
cattcttccttccagagtta

SEQ ID NO: 187842 - DNA, 20 bp, synthetic construct
  source 1..20: mol_type = other DNA
tcattcttccttccagagtt

SEQ ID NO: 187843 - DNA, 20 bp, synthetic construct
  source 1..20: mol_type = other DNA
ctcattcttccttccagagt

SEQ ID NO: 187844 - DNA, 20 bp, synthetic construct
  source 1..20: mol_type = other DNA
tctcattcttccttccagag

SEQ ID NO: 187845 - DNA, 20 bp, synthetic construct
  source 1..20: mol_type = other DNA
ttctcattcttccttccaga

SEQ ID NO: 187846 - DNA, 20 bp, synthetic construct
  source 1..20: mol_type = other DNA
attctcattcttccttccag

SEQ ID NO: 187847 - DNA, 20 bp, synthetic construct
  source 1..20: mol_type = other DNA
cattctcattcttccttcca

SEQ ID NO: 187848 - DNA, 20 bp, synthetic construct
  source 1..20: mol_type = other DNA
gcattctcattcttccttcc

SEQ ID NO: 187849 - DNA, 20 bp, synthetic construct
  source 1..20: mol_type = other DNA
tgcattctcattcttccttc

SEQ ID NO: 187850 - DNA, 20 bp, synthetic construct
  source 1..20: mol_type = other DNA
ctgcattctcattcttcctt

SEQ ID NO: 187851 - DNA, 20 bp, synthetic construct
  source 1..20: mol_type = other DNA
actgcattctcattcttcct

SEQ ID NO: 187852 - DNA, 20 bp, synthetic construct
  source 1..20: mol_type = other DNA
aactgcattctcattcttcc

SEQ ID NO: 187853 - DNA, 20 bp, synthetic construct
  source 1..20: mol_type = other DNA
aaactgcattctcattcttc

SEQ ID NO: 187854 - DNA, 20 bp, synthetic construct
  source 1..20: mol_type = other DNA
gaaactgcattctcattctt

SEQ ID NO: 187855 - DNA, 20 bp, synthetic construct
  source 1..20: mol_type = other DNA
tgaaactgcattctcattct

SEQ ID NO: 187856 - DNA, 20 bp, synthetic construct
  source 1..20: mol_type = other DNA
ctgaaactgcattctcattc

SEQ ID NO: 187857 - DNA, 20 bp, synthetic construct
  source 1..20: mol_type = other DNA
actgaaactgcattctcatt

SEQ ID NO: 187858 - DNA, 20 bp, synthetic construct
  source 1..20: mol_type = other DNA
cactgaaactgcattctcat

SEQ ID NO: 187859 - DNA, 20 bp, synthetic construct
  source 1..20: mol_type = other DNA
ccactgaaactgcattctca

SEQ ID NO: 187860 - DNA, 20 bp, synthetic construct
  source 1..20: mol_type = other DNA
accactgaaactgcattctc

SEQ ID NO: 187861 - DNA, 20 bp, synthetic construct
  source 1..20: mol_type = other DNA
caccactgaaactgcattct

SEQ ID NO: 187862 - DNA, 20 bp, synthetic construct
  source 1..20: mol_type = other DNA
ccaccactgaaactgcattc

SEQ ID NO: 187863 - DNA, 20 bp, synthetic construct
  source 1..20: mol_type = other DNA
gccaccactgaaactgcatt

SEQ ID NO: 187864 - DNA, 20 bp, synthetic construct
  source 1..20: mol_type = other DNA
ggccaccactgaaactgcat

SEQ ID NO: 187865 - DNA, 20 bp, synthetic construct
  source 1..20: mol_type = other DNA
aggccaccactgaaactgca

SEQ ID NO: 187866 - DNA, 20 bp, synthetic construct
  source 1..20: mol_type = other DNA
gaggccaccactgaaactgc

SEQ ID NO: 187867 - DNA, 20 bp, synthetic construct
  source 1..20: mol_type = other DNA
agaggccaccactgaaactg

SEQ ID NO: 187868 - DNA, 20 bp, synthetic construct
  source 1..20: mol_type = other DNA
cagaggccaccactgaaact

SEQ ID NO: 187869 - DNA, 20 bp, synthetic construct
  source 1..20: mol_type = other DNA
ccagaggccaccactgaaac

SEQ ID NO: 187870 - DNA, 20 bp, synthetic construct
  source 1..20: mol_type = other DNA
accagaggccaccactgaaa

SEQ ID NO: 187871 - DNA, 20 bp, synthetic construct
  source 1..20: mol_type = other DNA
caccagaggccaccactgaa

SEQ ID NO: 187872 - DNA, 20 bp, synthetic construct
  source 1..20: mol_type = other DNA
ccaccagaggccaccactga

SEQ ID NO: 187873 - DNA, 20 bp, synthetic construct
  source 1..20: mol_type = other DNA
cccaccagaggccaccactg

SEQ ID NO: 187874 - DNA, 20 bp, synthetic construct
  source 1..20: mol_type = other DNA
ccccaccagaggccaccact

SEQ ID NO: 187875 - DNA, 20 bp, synthetic construct
  source 1..20: mol_type = other DNA
tccccaccagaggccaccac

SEQ ID NO: 187876 - DNA, 20 bp, synthetic construct
  source 1..20: mol_type = other DNA
ctccccaccagaggccacca

SEQ ID NO: 187877 - DNA, 20 bp, synthetic construct
  source 1..20: mol_type = other DNA
tctccccaccagaggccacc

SEQ ID NO: 187878 - DNA, 20 bp, synthetic construct
  source 1..20: mol_type = other DNA
ttctccccaccagaggccac

SEQ ID NO: 187879 - DNA, 20 bp, synthetic construct
  source 1..20: mol_type = other DNA
tttctccccaccagaggcca

SEQ ID NO: 187880 - DNA, 20 bp, synthetic construct
  source 1..20: mol_type = other DNA
gtttctccccaccagaggcc

SEQ ID NO: 187881 - DNA, 20 bp, synthetic construct
  source 1..20: mol_type = other DNA
agtttctccccaccagaggc

SEQ ID NO: 187882 - DNA, 20 bp, synthetic construct
  source 1..20: mol_type = other DNA
cagtttctccccaccagagg

SEQ ID NO: 187883 - DNA, 20 bp, synthetic construct
  source 1..20: mol_type = other DNA
ccagtttctccccaccagag

SEQ ID NO: 187884 - DNA, 20 bp, synthetic construct
  source 1..20: mol_type = other DNA
cccagtttctccccaccaga

SEQ ID NO: 187885 - DNA, 20 bp, synthetic construct
  source 1..20: mol_type = other DNA
acccagtttctccccaccag

SEQ ID NO: 187886 - DNA, 20 bp, synthetic construct
  source 1..20: mol_type = other DNA
cacccagtttctccccacca

SEQ ID NO: 187887 - DNA, 20 bp, synthetic construct
  source 1..20: mol_type = other DNA
tcacccagtttctccccacc

SEQ ID NO: 187888 - DNA, 20 bp, synthetic construct
  source 1..20: mol_type = other DNA
ttcacccagtttctccccac

SEQ ID NO: 187889 - DNA, 20 bp, synthetic construct
  source 1..20: mol_type = other DNA
cttcacccagtttctcccca

SEQ ID NO: 187890 - DNA, 20 bp, synthetic construct
  source 1..20: mol_type = other DNA
ccttcacccagtttctcccc

SEQ ID NO: 187891 - DNA, 20 bp, synthetic construct
  source 1..20: mol_type = other DNA
cccttcacccagtttctccc

SEQ ID NO: 187892 - DNA, 20 bp, synthetic construct
  source 1..20: mol_type = other DNA
tcccttcacccagtttctcc

SEQ ID NO: 187893 - DNA, 20 bp, synthetic construct
  source 1..20: mol_type = other DNA
ctcccttcacccagtttctc

SEQ ID NO: 187894 - DNA, 20 bp, synthetic construct
  source 1..20: mol_type = other DNA
tctcccttcacccagtttct

SEQ ID NO: 187895 - DNA, 20 bp, synthetic construct
  source 1..20: mol_type = other DNA
atctcccttcacccagtttc

SEQ ID NO: 187896 - DNA, 20 bp, synthetic construct
  source 1..20: mol_type = other DNA
catctcccttcacccagttt

SEQ ID NO: 187897 - DNA, 20 bp, synthetic construct
  source 1..20: mol_type = other DNA
acatctcccttcacccagtt

SEQ ID NO: 187898 - DNA, 20 bp, synthetic construct
  source 1..20: mol_type = other DNA
gacatctcccttcacccagt

SEQ ID NO: 187899 - DNA, 20 bp, synthetic construct
  source 1..20: mol_type = other DNA
tgacatctcccttcacccag

SEQ ID NO: 187900 - DNA, 20 bp, synthetic construct
  source 1..20: mol_type = other DNA
atgacatctcccttcaccca

SEQ ID NO: 187901 - DNA, 20 bp, synthetic construct
  source 1..20: mol_type = other DNA
aatgacatctcccttcaccc

SEQ ID NO: 187902 - DNA, 20 bp, synthetic construct
  source 1..20: mol_type = other DNA
aaatgacatctcccttcacc

SEQ ID NO: 187903 - DNA, 20 bp, synthetic construct
  source 1..20: mol_type = other DNA
gaaatgacatctcccttcac

SEQ ID NO: 187904 - DNA, 20 bp, synthetic construct
  source 1..20: mol_type = other DNA
ggaaatgacatctcccttca

SEQ ID NO: 187905 - DNA, 20 bp, synthetic construct
  source 1..20: mol_type = other DNA
tggaaatgacatctcccttc

SEQ ID NO: 187906 - DNA, 20 bp, synthetic construct
  source 1..20: mol_type = other DNA
atggaaatgacatctccctt

SEQ ID NO: 187907 - DNA, 20 bp, synthetic construct
  source 1..20: mol_type = other DNA
aatggaaatgacatctccct

SEQ ID NO: 187908 - DNA, 20 bp, synthetic construct
  source 1..20: mol_type = other DNA
aaatggaaatgacatctccc

SEQ ID NO: 187909 - DNA, 20 bp, synthetic construct
  source 1..20: mol_type = other DNA
gaaatggaaatgacatctcc

SEQ ID NO: 187910 - DNA, 20 bp, synthetic construct
  source 1..20: mol_type = other DNA
agaaatggaaatgacatctc

SEQ ID NO: 187911 - DNA, 20 bp, synthetic construct
  source 1..20: mol_type = other DNA
gagaaatggaaatgacatct

SEQ ID NO: 187912 - DNA, 20 bp, synthetic construct
  source 1..20: mol_type = other DNA
agagaaatggaaatgacatc

SEQ ID NO: 187913 - DNA, 20 bp, synthetic construct
  source 1..20: mol_type = other DNA
tagagaaatggaaatgacat

SEQ ID NO: 187914 - DNA, 20 bp, synthetic construct
  source 1..20: mol_type = other DNA
gtagagaaatggaaatgaca

SEQ ID NO: 187915 - DNA, 20 bp, synthetic construct
  source 1..20: mol_type = other DNA
agtagagaaatggaaatgac

SEQ ID NO: 187916 - DNA, 20 bp, synthetic construct
  source 1..20: mol_type = other DNA
tagtagagaaatggaaatga

SEQ ID NO: 187917 - DNA, 20 bp, synthetic construct
  source 1..20: mol_type = other DNA
atagtagagaaatggaaatg

SEQ ID NO: 187918 - DNA, 20 bp, synthetic construct
  source 1..20: mol_type = other DNA
aatagtagagaaatggaaat

SEQ ID NO: 187919 - DNA, 20 bp, synthetic construct
  source 1..20: mol_type = other DNA
taatagtagagaaatggaaa

SEQ ID NO: 187920 - DNA, 20 bp, synthetic construct
  source 1..20: mol_type = other DNA
ttaatagtagagaaatggaa

SEQ ID NO: 187921 - DNA, 20 bp, synthetic construct
  source 1..20: mol_type = other DNA
attaatagtagagaaatgga

SEQ ID NO: 187922 - DNA, 20 bp, synthetic construct
  source 1..20: mol_type = other DNA
aattaatagtagagaaatgg

SEQ ID NO: 187923 - DNA, 20 bp, synthetic construct
  source 1..20: mol_type = other DNA
aaattaatagtagagaaatg

SEQ ID NO: 187924 - DNA, 20 bp, synthetic construct
  source 1..20: mol_type = other DNA
aaaattaatagtagagaaat

SEQ ID NO: 187925 - DNA, 20 bp, synthetic construct
  source 1..20: mol_type = other DNA
caaaattaatagtagagaaa

SEQ ID NO: 187926 - DNA, 20 bp, synthetic construct
  source 1..20: mol_type = other DNA
acaaaattaatagtagagaa

SEQ ID NO: 187927 - DNA, 20 bp, synthetic construct
  source 1..20: mol_type = other DNA
tacaaaattaatagtagaga

SEQ ID NO: 187928 - DNA, 20 bp, synthetic construct
  source 1..20: mol_type = other DNA
atacaaaattaatagtagag

SEQ ID NO: 187929 - DNA, 20 bp, synthetic construct
  source 1..20: mol_type = other DNA
aatacaaaattaatagtaga

SEQ ID NO: 187930 - DNA, 20 bp, synthetic construct
  source 1..20: mol_type = other DNA
taatacaaaattaatagtag

SEQ ID NO: 187931 - DNA, 20 bp, synthetic construct
  source 1..20: mol_type = other DNA
gtaatacaaaattaatagta

SEQ ID NO: 187932 - DNA, 20 bp, synthetic construct
  source 1..20: mol_type = other DNA
ggtaatacaaaattaatagt

SEQ ID NO: 187933 - DNA, 20 bp, synthetic construct
  source 1..20: mol_type = other DNA
tggtaatacaaaattaatag

SEQ ID NO: 187934 - DNA, 20 bp, synthetic construct
  source 1..20: mol_type = other DNA
atggtaatacaaaattaata

SEQ ID NO: 187935 - DNA, 20 bp, synthetic construct
  source 1..20: mol_type = other DNA
catggtaatacaaaattaat

SEQ ID NO: 187936 - DNA, 20 bp, synthetic construct
  source 1..20: mol_type = other DNA
gcatggtaatacaaaattaa

SEQ ID NO: 187937 - DNA, 20 bp, synthetic construct
  source 1..20: mol_type = other DNA
agcatggtaatacaaaatta

SEQ ID NO: 187938 - DNA, 20 bp, synthetic construct
  source 1..20: mol_type = other DNA
aagcatggtaatacaaaatt

SEQ ID NO: 187939 - DNA, 20 bp, synthetic construct
  source 1..20: mol_type = other DNA
taagcatggtaatacaaaat

SEQ ID NO: 187940 - DNA, 20 bp, synthetic construct
  source 1..20: mol_type = other DNA
ttaagcatggtaatacaaaa

SEQ ID NO: 187941 - DNA, 20 bp, synthetic construct
  source 1..20: mol_type = other DNA
tttaagcatggtaatacaaa

SEQ ID NO: 187942 - DNA, 20 bp, synthetic construct
  source 1..20: mol_type = other DNA
atttaagcatggtaatacaa

SEQ ID NO: 187943 - DNA, 20 bp, synthetic construct
  source 1..20: mol_type = other DNA
catttaagcatggtaataca

SEQ ID NO: 187944 - DNA, 20 bp, synthetic construct
  source 1..20: mol_type = other DNA
acatttaagcatggtaatac

SEQ ID NO: 187945 - DNA, 20 bp, synthetic construct
  source 1..20: mol_type = other DNA
aacatttaagcatggtaata

SEQ ID NO: 187946 - DNA, 20 bp, synthetic construct
  source 1..20: mol_type = other DNA
taacatttaagcatggtaat

SEQ ID NO: 187947 - DNA, 20 bp, synthetic construct
  source 1..20: mol_type = other DNA
gtaacatttaagcatggtaa

SEQ ID NO: 187948 - DNA, 20 bp, synthetic construct
  source 1..20: mol_type = other DNA
agtaacatttaagcatggta

SEQ ID NO: 187949 - DNA, 20 bp, synthetic construct
  source 1..20: mol_type = other DNA
aagtaacatttaagcatggt

SEQ ID NO: 187950 - DNA, 20 bp, synthetic construct
  source 1..20: mol_type = other DNA
aaagtaacatttaagcatgg

SEQ ID NO: 187951 - DNA, 20 bp, synthetic construct
  source 1..20: mol_type = other DNA
aaaagtaacatttaagcatg

SEQ ID NO: 187952 - DNA, 20 bp, synthetic construct
  source 1..20: mol_type = other DNA
aaaaagtaacatttaagcat

SEQ ID NO: 187953 - DNA, 20 bp, synthetic construct
  source 1..20: mol_type = other DNA
taaaaagtaacatttaagca

SEQ ID NO: 187954 - DNA, 20 bp, synthetic construct
  source 1..20: mol_type = other DNA
gtaaaaagtaacatttaagc

SEQ ID NO: 187955 - DNA, 20 bp, synthetic construct
  source 1..20: mol_type = other DNA
ggtaaaaagtaacatttaag

SEQ ID NO: 187956 - DNA, 20 bp, synthetic construct
  source 1..20: mol_type = other DNA
aggtaaaaagtaacatttaa

SEQ ID NO: 187957 - DNA, 20 bp, synthetic construct
  source 1..20: mol_type = other DNA
aaggtaaaaagtaacattta

SEQ ID NO: 187958 - DNA, 20 bp, synthetic construct
  source 1..20: mol_type = other DNA
aaaggtaaaaagtaacattt

SEQ ID NO: 187959 - DNA, 20 bp, synthetic construct
  source 1..20: mol_type = other DNA
aaaaggtaaaaagtaacatt

SEQ ID NO: 187960 - DNA, 20 bp, synthetic construct
  source 1..20: mol_type = other DNA
aaaaaggtaaaaagtaacat

SEQ ID NO: 187961 - DNA, 20 bp, synthetic construct
  source 1..20: mol_type = other DNA
aaaaaaggtaaaaagtaaca

SEQ ID NO: 187962 - DNA, 20 bp, synthetic construct
  source 1..20: mol_type = other DNA
aaaaaaaggtaaaaagtaac

SEQ ID NO: 187963 - DNA, 20 bp, synthetic construct
  source 1..20: mol_type = other DNA
aaaaaaaaggtaaaaagtaa

SEQ ID NO: 187964 - DNA, 20 bp, synthetic construct
  source 1..20: mol_type = other DNA
aaaaaaaaaggtaaaaagta

SEQ ID NO: 187965 - DNA, 20 bp, synthetic construct
  source 1..20: mol_type = other DNA
aaaaaaaaaaggtaaaaagt

SEQ ID NO: 187966 - DNA, 20 bp, synthetic construct
  source 1..20: mol_type = other DNA
aaaaaaaaaaaggtaaaaag

SEQ ID NO: 187967 - DNA, 20 bp, synthetic construct
  source 1..20: mol_type = other DNA
aaaaaaaaaaaaggtaaaaa

SEQ ID NO: 187968 - DNA, 20 bp, synthetic construct
  source 1..20: mol_type = other DNA
aaaaaaaaaaaaaggtaaaa

SEQ ID NO: 187969 - DNA, 20 bp, synthetic construct
  source 1..20: mol_type = other DNA
aaaaaaaaaaaaaaggtaaa

SEQ ID NO: 187970 - DNA, 20 bp, synthetic construct
  source 1..20: mol_type = other DNA
aaaaaaaaaaaaaaaggtaa

SEQ ID NO: 187971 - DNA, 20 bp, synthetic construct
  source 1..20: mol_type = other DNA
caaaaaaaaaaaaaaaggta

SEQ ID NO: 187972 - DNA, 20 bp, synthetic construct
  source 1..20: mol_type = other DNA
tcaaaaaaaaaaaaaaaggt

SEQ ID NO: 187973 - DNA, 20 bp, synthetic construct
  source 1..20: mol_type = other DNA
ctcaaaaaaaaaaaaaaagg

SEQ ID NO: 187974 - DNA, 20 bp, synthetic construct
  source 1..20: mol_type = other DNA
tctcaaaaaaaaaaaaaaag

SEQ ID NO: 187975 - DNA, 20 bp, synthetic construct
  source 1..20: mol_type = other DNA
gtctcaaaaaaaaaaaaaaa

SEQ ID NO: 187976 - DNA, 20 bp, synthetic construct
  source 1..20: mol_type = other DNA
tgtctcaaaaaaaaaaaaaa

SEQ ID NO: 187977 - DNA, 20 bp, synthetic construct
  source 1..20: mol_type = other DNA
ctgtctcaaaaaaaaaaaaa

SEQ ID NO: 187978 - DNA, 20 bp, synthetic construct
  source 1..20: mol_type = other DNA
cctgtctcaaaaaaaaaaaa

SEQ ID NO: 187979 - DNA, 20 bp, synthetic construct
  source 1..20: mol_type = other DNA
ccctgtctcaaaaaaaaaaa

SEQ ID NO: 187980 - DNA, 20 bp, synthetic construct
  source 1..20: mol_type = other DNA
accctgtctcaaaaaaaaaa

SEQ ID NO: 187981 - DNA, 20 bp, synthetic construct
  source 1..20: mol_type = other DNA
gaccctgtctcaaaaaaaaa

SEQ ID NO: 187982 - DNA, 20 bp, synthetic construct
  source 1..20: mol_type = other DNA
agaccctgtctcaaaaaaaa

SEQ ID NO: 187983 - DNA, 20 bp, synthetic construct
  source 1..20: mol_type = other DNA
gagaccctgtctcaaaaaaa

SEQ ID NO: 187984 - DNA, 20 bp, synthetic construct
  source 1..20: mol_type = other DNA
agagaccctgtctcaaaaaa

SEQ ID NO: 187985 - DNA, 20 bp, synthetic construct
  source 1..20: mol_type = other DNA
gagagaccctgtctcaaaaa

SEQ ID NO: 187986 - DNA, 20 bp, synthetic construct
  source 1..20: mol_type = other DNA
agagagaccctgtctcaaaa

SEQ ID NO: 187987 - DNA, 20 bp, synthetic construct
  source 1..20: mol_type = other DNA
gagagagaccctgtctcaaa

SEQ ID NO: 187988 - DNA, 20 bp, synthetic construct
  source 1..20: mol_type = other DNA
agagagagaccctgtctcaa

SEQ ID NO: 187989 - DNA, 20 bp, synthetic construct
  source 1..20: mol_type = other DNA
cagagagagaccctgtctca

SEQ ID NO: 187990 - DNA, 20 bp, synthetic construct
  source 1..20: mol_type = other DNA
acagagagagaccctgtctc

SEQ ID NO: 187991 - DNA, 20 bp, synthetic construct
  source 1..20: mol_type = other DNA
aacagagagagaccctgtct

SEQ ID NO: 187992 - DNA, 20 bp, synthetic construct
  source 1..20: mol_type = other DNA
caacagagagagaccctgtc

SEQ ID NO: 187993 - DNA, 20 bp, synthetic construct
  source 1..20: mol_type = other DNA
gcaacagagagagaccctgt

SEQ ID NO: 187994 - DNA, 20 bp, synthetic construct
  source 1..20: mol_type = other DNA
ggcaacagagagagaccctg

SEQ ID NO: 187995 - DNA, 20 bp, synthetic construct
  source 1..20: mol_type = other DNA
gggcaacagagagagaccct

SEQ ID NO: 187996 - DNA, 20 bp, synthetic construct
  source 1..20: mol_type = other DNA
tgggcaacagagagagaccc

SEQ ID NO: 187997 - DNA, 20 bp, synthetic construct
  source 1..20: mol_type = other DNA
ctgggcaacagagagagacc

SEQ ID NO: 187998 - DNA, 20 bp, synthetic construct
  source 1..20: mol_type = other DNA
cctgggcaacagagagagac

SEQ ID NO: 187999 - DNA, 20 bp, synthetic construct
  source 1..20: mol_type = other DNA
gcctgggcaacagagagaga

SEQ ID NO: 188000 - DNA, 20 bp, synthetic construct
  source 1..20: mol_type = other DNA
tgcctgggcaacagagagag

SEQ ID NO: 188001 - DNA, 20 bp, synthetic construct
  source 1..20: mol_type = other DNA
ctgcctgggcaacagagaga

SEQ ID NO: 188002 - DNA, 20 bp, synthetic construct
  source 1..20: mol_type = other DNA
cctgcctgggcaacagagag

SEQ ID NO: 188003 - DNA, 20 bp, synthetic construct
  source 1..20: mol_type = other DNA
tcctgcctgggcaacagaga

SEQ ID NO: 188004 - DNA, 20 bp, synthetic construct
  source 1..20: mol_type = other DNA
ctcctgcctgggcaacagag

SEQ ID NO: 188005 - DNA, 20 bp, synthetic construct
  source 1..20: mol_type = other DNA
actcctgcctgggcaacaga

SEQ ID NO: 188006 - DNA, 20 bp, synthetic construct
  source 1..20: mol_type = other DNA
cactcctgcctgggcaacag

SEQ ID NO: 188007 - DNA, 20 bp, synthetic construct
  source 1..20: mol_type = other DNA
gcactcctgcctgggcaaca

SEQ ID NO: 188008 - DNA, 20 bp, synthetic construct
  source 1..20: mol_type = other DNA
tgcactcctgcctgggcaac

SEQ ID NO: 188009 - DNA, 20 bp, synthetic construct
  source 1..20: mol_type = other DNA
ctgcactcctgcctgggcaa

SEQ ID NO: 188010 - DNA, 20 bp, synthetic construct
  source 1..20: mol_type = other DNA
actgcactcctgcctgggca

SEQ ID NO: 188011 - DNA, 20 bp, synthetic construct
  source 1..20: mol_type = other DNA
cactgcactcctgcctgggc

SEQ ID NO: 188012 - DNA, 20 bp, synthetic construct
  source 1..20: mol_type = other DNA
ccactgcactcctgcctggg

SEQ ID NO: 188013 - DNA, 20 bp, synthetic construct
  source 1..20: mol_type = other DNA
accactgcactcctgcctgg

SEQ ID NO: 188014 - DNA, 20 bp, synthetic construct
  source 1..20: mol_type = other DNA
taccactgcactcctgcctg

SEQ ID NO: 188015 - DNA, 20 bp, synthetic construct
  source 1..20: mol_type = other DNA
gtaccactgcactcctgcct

SEQ ID NO: 188016 - DNA, 20 bp, synthetic construct
  source 1..20: mol_type = other DNA
tgtaccactgcactcctgcc

SEQ ID NO: 188017 - DNA, 20 bp, synthetic construct
  source 1..20: mol_type = other DNA
ttgtaccactgcactcctgc

SEQ ID NO: 188018 - DNA, 20 bp, synthetic construct
  source 1..20: mol_type = other DNA
attgtaccactgcactcctg

SEQ ID NO: 188019 - DNA, 20 bp, synthetic construct
  source 1..20: mol_type = other DNA
gattgtaccactgcactcct

SEQ ID NO: 188020 - DNA, 20 bp, synthetic construct
  source 1..20: mol_type = other DNA
tgattgtaccactgcactcc

SEQ ID NO: 188021 - DNA, 20 bp, synthetic construct
  source 1..20: mol_type = other DNA
atgattgtaccactgcactc

SEQ ID NO: 188022 - DNA, 20 bp, synthetic construct
  source 1..20: mol_type = other DNA
catgattgtaccactgcact

SEQ ID NO: 188023 - DNA, 20 bp, synthetic construct
  source 1..20: mol_type = other DNA
ccatgattgtaccactgcac

SEQ ID NO: 188024 - DNA, 20 bp, synthetic construct
  source 1..20: mol_type = other DNA
accatgattgtaccactgca

SEQ ID NO: 188025 - DNA, 20 bp, synthetic construct
  source 1..20: mol_type = other DNA
aaccatgattgtaccactgc

SEQ ID NO: 188026 - DNA, 20 bp, synthetic construct
  source 1..20: mol_type = other DNA
gaaccatgattgtaccactg

SEQ ID NO: 188027 - DNA, 20 bp, synthetic construct
  source 1..20: mol_type = other DNA
tgaaccatgattgtaccact

SEQ ID NO: 188028 - DNA, 20 bp, synthetic construct
  source 1..20: mol_type = other DNA
gtgaaccatgattgtaccac

SEQ ID NO: 188029 - DNA, 20 bp, synthetic construct
  source 1..20: mol_type = other DNA
agtgaaccatgattgtacca

SEQ ID NO: 188030 - DNA, 20 bp, synthetic construct
  source 1..20: mol_type = other DNA
cagtgaaccatgattgtacc

SEQ ID NO: 188031 - DNA, 20 bp, synthetic construct
  source 1..20: mol_type = other DNA
gcagtgaaccatgattgtac

SEQ ID NO: 188032 - DNA, 20 bp, synthetic construct
  source 1..20: mol_type = other DNA
tgcagtgaaccatgattgta

SEQ ID NO: 188033 - DNA, 20 bp, synthetic construct
  source 1..20: mol_type = other DNA
ctgcagtgaaccatgattgt

SEQ ID NO: 188034 - DNA, 20 bp, synthetic construct
  source 1..20: mol_type = other DNA
gctgcagtgaaccatgattg

SEQ ID NO: 188035 - DNA, 20 bp, synthetic construct
  source 1..20: mol_type = other DNA
ggctgcagtgaaccatgatt

SEQ ID NO: 188036 - DNA, 20 bp, synthetic construct
  source 1..20: mol_type = other DNA
aggctgcagtgaaccatgat

SEQ ID NO: 188037 - DNA, 20 bp, synthetic construct
  source 1..20: mol_type = other DNA
caggctgcagtgaaccatga

SEQ ID NO: 188038 - DNA, 20 bp, synthetic construct
  source 1..20: mol_type = other DNA
tcaggctgcagtgaaccatg

SEQ ID NO: 188039 - DNA, 20 bp, synthetic construct
  source 1..20: mol_type = other DNA
ttcaggctgcagtgaaccat

SEQ ID NO: 188040 - DNA, 20 bp, synthetic construct
  source 1..20: mol_type = other DNA
gttcaggctgcagtgaacca

SEQ ID NO: 188041 - DNA, 20 bp, synthetic construct
  source 1..20: mol_type = other DNA
ggttcaggctgcagtgaacc

SEQ ID NO: 188042 - DNA, 20 bp, synthetic construct
  source 1..20: mol_type = other DNA
aggttcaggctgcagtgaac

SEQ ID NO: 188043 - DNA, 20 bp, synthetic construct
  source 1..20: mol_type = other DNA
gaggttcaggctgcagtgaa

SEQ ID NO: 188044 - DNA, 20 bp, synthetic construct
  source 1..20: mol_type = other DNA
ggaggttcaggctgcagtga

SEQ ID NO: 188045 - DNA, 20 bp, synthetic construct
  source 1..20: mol_type = other DNA
gggaggttcaggctgcagtg

SEQ ID NO: 188046 - DNA, 20 bp, synthetic construct
  source 1..20: mol_type = other DNA
tgggaggttcaggctgcagt

SEQ ID NO: 188047 - DNA, 20 bp, synthetic construct
  source 1..20: mol_type = other DNA
ctgggaggttcaggctgcag

SEQ ID NO: 188048 - DNA, 20 bp, synthetic construct
  source 1..20: mol_type = other DNA
cctgggaggttcaggctgca

SEQ ID NO: 188049 - DNA, 20 bp, synthetic construct
  source 1..20: mol_type = other DNA
gcctgggaggttcaggctgc

SEQ ID NO: 188050 - DNA, 20 bp, synthetic construct
  source 1..20: mol_type = other DNA
agcctgggaggttcaggctg

SEQ ID NO: 188051 - DNA, 20 bp, synthetic construct
  source 1..20: mol_type = other DNA
gagcctgggaggttcaggct

SEQ ID NO: 188052 - DNA, 20 bp, synthetic construct
  source 1..20: mol_type = other DNA
tgagcctgggaggttcaggc

SEQ ID NO: 188053 - DNA, 20 bp, synthetic construct
  source 1..20: mol_type = other DNA
ttgagcctgggaggttcagg

SEQ ID NO: 188054 - DNA, 20 bp, synthetic construct
  source 1..20: mol_type = other DNA
cttgagcctgggaggttcag

SEQ ID NO: 188055 - DNA, 20 bp, synthetic construct
  source 1..20: mol_type = other DNA
gcttgagcctgggaggttca

SEQ ID NO: 188056 - DNA, 20 bp, synthetic construct
  source 1..20: mol_type = other DNA
tgcttgagcctgggaggttc

SEQ ID NO: 188057 - DNA, 20 bp, synthetic construct
  source 1..20: mol_type = other DNA
ttgcttgagcctgggaggtt

SEQ ID NO: 188058 - DNA, 20 bp, synthetic construct
  source 1..20: mol_type = other DNA
attgcttgagcctgggaggt

SEQ ID NO: 188059 - DNA, 20 bp, synthetic construct
  source 1..20: mol_type = other DNA
gattgcttgagcctgggagg

SEQ ID NO: 188060 - DNA, 20 bp, synthetic construct
  source 1..20: mol_type = other DNA
ggattgcttgagcctgggag

SEQ ID NO: 188061 - DNA, 20 bp, synthetic construct
  source 1..20: mol_type = other DNA
aggattgcttgagcctggga

SEQ ID NO: 188062 - DNA, 20 bp, synthetic construct
  source 1..20: mol_type = other DNA
gaggattgcttgagcctggg

SEQ ID NO: 188063 - DNA, 20 bp, synthetic construct
  source 1..20: mol_type = other DNA
ggaggattgcttgagcctgg

SEQ ID NO: 188064 - DNA, 20 bp, synthetic construct
  source 1..20: mol_type = other DNA
gggaggattgcttgagcctg

SEQ ID NO: 188065 - DNA, 20 bp, synthetic construct
  source 1..20: mol_type = other DNA
tgggaggattgcttgagcct

SEQ ID NO: 188066 - DNA, 20 bp, synthetic construct
  source 1..20: mol_type = other DNA
gtgggaggattgcttgagcc

SEQ ID NO: 188067 - DNA, 20 bp, synthetic construct
  source 1..20: mol_type = other DNA
ggtgggaggattgcttgagc

SEQ ID NO: 188068 - DNA, 20 bp, synthetic construct
  source 1..20: mol_type = other DNA
aggtgggaggattgcttgag

SEQ ID NO: 188069 - DNA, 20 bp, synthetic construct
  source 1..20: mol_type = other DNA
gaggtgggaggattgcttga

SEQ ID NO: 188070 - DNA, 20 bp, synthetic construct
  source 1..20: mol_type = other DNA
tgaggtgggaggattgcttg

SEQ ID NO: 188071 - DNA, 20 bp, synthetic construct
  source 1..20: mol_type = other DNA
ctgaggtgggaggattgctt

SEQ ID NO: 188072 - DNA, 20 bp, synthetic construct
  source 1..20: mol_type = other DNA
gctgaggtgggaggattgct

SEQ ID NO: 188073 - DNA, 20 bp, synthetic construct
  source 1..20: mol_type = other DNA
ggctgaggtgggaggattgc

SEQ ID NO: 188074 - DNA, 20 bp, synthetic construct
  source 1..20: mol_type = other DNA
aggctgaggtgggaggattg

SEQ ID NO: 188075 - DNA, 20 bp, synthetic construct
  source 1..20: mol_type = other DNA
gaggctgaggtgggaggatt

SEQ ID NO: 188076 - DNA, 20 bp, synthetic construct
  source 1..20: mol_type = other DNA
ggaggctgaggtgggaggat

SEQ ID NO: 188077 - DNA, 20 bp, synthetic construct
  source 1..20: mol_type = other DNA
aggaggctgaggtgggagga

SEQ ID NO: 188078 - DNA, 20 bp, synthetic construct
  source 1..20: mol_type = other DNA
caggaggctgaggtgggagg

SEQ ID NO: 188079 - DNA, 20 bp, synthetic construct
  source 1..20: mol_type = other DNA
tcaggaggctgaggtgggag

SEQ ID NO: 188080 - DNA, 20 bp, synthetic construct
  source 1..20: mol_type = other DNA
ctcaggaggctgaggtggga

SEQ ID NO: 188081 - DNA, 20 bp, synthetic construct
  source 1..20: mol_type = other DNA
actcaggaggctgaggtggg

SEQ ID NO: 188082 - DNA, 20 bp, synthetic construct
  source 1..20: mol_type = other DNA
tactcaggaggctgaggtgg

SEQ ID NO: 188083 - DNA, 20 bp, synthetic construct
  source 1..20: mol_type = other DNA
ctactcaggaggctgaggtg

SEQ ID NO: 188084 - DNA, 20 bp, synthetic construct
  source 1..20: mol_type = other DNA
gctactcaggaggctgaggt

SEQ ID NO: 188085 - DNA, 20 bp, synthetic construct
  source 1..20: mol_type = other DNA
agctactcaggaggctgagg

SEQ ID NO: 188086 - DNA, 20 bp, synthetic construct
  source 1..20: mol_type = other DNA
cagctactcaggaggctgag

SEQ ID NO: 188087 - DNA, 20 bp, synthetic construct
  source 1..20: mol_type = other DNA
ccagctactcaggaggctga

SEQ ID NO: 188088 - DNA, 20 bp, synthetic construct
  source 1..20: mol_type = other DNA
cccagctactcaggaggctg

SEQ ID NO: 188089 - DNA, 20 bp, synthetic construct
  source 1..20: mol_type = other DNA
tcccagctactcaggaggct

SEQ ID NO: 188090 - DNA, 20 bp, synthetic construct
  source 1..20: mol_type = other DNA
gtcccagctactcaggaggc

SEQ ID NO: 188091 - DNA, 20 bp, synthetic construct
  source 1..20: mol_type = other DNA
agtcccagctactcaggagg

SEQ ID NO: 188092 - DNA, 20 bp, synthetic construct
  source 1..20: mol_type = other DNA
tagtcccagctactcaggag

SEQ ID NO: 188093 - DNA, 20 bp, synthetic construct
  source 1..20: mol_type = other DNA
atagtcccagctactcagga

SEQ ID NO: 188094 - DNA, 20 bp, synthetic construct
  source 1..20: mol_type = other DNA
tatagtcccagctactcagg

SEQ ID NO: 188095 - DNA, 20 bp, synthetic construct
  source 1..20: mol_type = other DNA
ctatagtcccagctactcag

SEQ ID NO: 188096 - DNA, 20 bp, synthetic construct
  source 1..20: mol_type = other DNA
cctatagtcccagctactca

SEQ ID NO: 188097 - DNA, 20 bp, synthetic construct
  source 1..20: mol_type = other DNA
gcctatagtcccagctactc

SEQ ID NO: 188098 - DNA, 20 bp, synthetic construct
  source 1..20: mol_type = other DNA
tgcctatagtcccagctact

SEQ ID NO: 188099 - DNA, 20 bp, synthetic construct
  source 1..20: mol_type = other DNA
gtgcctatagtcccagctac

SEQ ID NO: 188100 - DNA, 20 bp, synthetic construct
  source 1..20: mol_type = other DNA
cgtgcctatagtcccagcta

SEQ ID NO: 188101 - DNA, 20 bp, synthetic construct
  source 1..20: mol_type = other DNA
gcgtgcctatagtcccagct

SEQ ID NO: 188102 - DNA, 20 bp, synthetic construct
  source 1..20: mol_type = other DNA
tgcgtgcctatagtcccagc

SEQ ID NO: 188103 - DNA, 20 bp, synthetic construct
  source 1..20: mol_type = other DNA
atgcgtgcctatagtcccag

SEQ ID NO: 188104 - DNA, 20 bp, synthetic construct
  source 1..20: mol_type = other DNA
tatgcgtgcctatagtccca

SEQ ID NO: 188105 - DNA, 20 bp, synthetic construct
  source 1..20: mol_type = other DNA
gtatgcgtgcctatagtccc

SEQ ID NO: 188106 - DNA, 20 bp, synthetic construct
  source 1..20: mol_type = other DNA
ggtatgcgtgcctatagtcc

SEQ ID NO: 188107 - DNA, 20 bp, synthetic construct
  source 1..20: mol_type = other DNA
tggtatgcgtgcctatagtc

SEQ ID NO: 188108 - DNA, 20 bp, synthetic construct
  source 1..20: mol_type = other DNA
gtggtatgcgtgcctatagt

SEQ ID NO: 188109 - DNA, 20 bp, synthetic construct
  source 1..20: mol_type = other DNA
ggtggtatgcgtgcctatag

SEQ ID NO: 188110 - DNA, 20 bp, synthetic construct
  source 1..20: mol_type = other DNA
cggtggtatgcgtgcctata

SEQ ID NO: 188111 - DNA, 20 bp, synthetic construct
  source 1..20: mol_type = other DNA
acggtggtatgcgtgcctat

SEQ ID NO: 188112 - DNA, 20 bp, synthetic construct
  source 1..20: mol_type = other DNA
cacggtggtatgcgtgccta

SEQ ID NO: 188113 - DNA, 20 bp, synthetic construct
  source 1..20: mol_type = other DNA
gcacggtggtatgcgtgcct

SEQ ID NO: 188114 - DNA, 20 bp, synthetic construct
  source 1..20: mol_type = other DNA
ggcacggtggtatgcgtgcc

SEQ ID NO: 188115 - DNA, 20 bp, synthetic construct
  source 1..20: mol_type = other DNA
gggcacggtggtatgcgtgc

SEQ ID NO: 188116 - DNA, 20 bp, synthetic construct
  source 1..20: mol_type = other DNA
tgggcacggtggtatgcgtg

SEQ ID NO: 188117 - DNA, 20 bp, synthetic construct
  source 1..20: mol_type = other DNA
ctgggcacggtggtatgcgt

SEQ ID NO: 188118 - DNA, 20 bp, synthetic construct
  source 1..20: mol_type = other DNA
gctgggcacggtggtatgcg

SEQ ID NO: 188119 - DNA, 20 bp, synthetic construct
  source 1..20: mol_type = other DNA
agctgggcacggtggtatgc

SEQ ID NO: 188120 - DNA, 20 bp, synthetic construct
  source 1..20: mol_type = other DNA
tagctgggcacggtggtatg

SEQ ID NO: 188121 - DNA, 20 bp, synthetic construct
  source 1..20: mol_type = other DNA
atagctgggcacggtggtat

SEQ ID NO: 188122 - DNA, 20 bp, synthetic construct
  source 1..20: mol_type = other DNA
aatagctgggcacggtggta

SEQ ID NO: 188123 - DNA, 20 bp, synthetic construct
  source 1..20: mol_type = other DNA
aaatagctgggcacggtggt

SEQ ID NO: 188124 - DNA, 20 bp, synthetic construct
  source 1..20: mol_type = other DNA
aaaatagctgggcacggtgg

SEQ ID NO: 188125 - DNA, 20 bp, synthetic construct
  source 1..20: mol_type = other DNA
aaaaatagctgggcacggtg

SEQ ID NO: 188126 - DNA, 20 bp, synthetic construct
  source 1..20: mol_type = other DNA
aaaaaatagctgggcacggt

SEQ ID NO: 188127 - DNA, 20 bp, synthetic construct
  source 1..20: mol_type = other DNA
aaaaaaatagctgggcacgg

SEQ ID NO: 188128 - DNA, 20 bp, synthetic construct
  source 1..20: mol_type = other DNA
aaaaaaaatagctgggcacg

SEQ ID NO: 188129 - DNA, 20 bp, synthetic construct
  source 1..20: mol_type = other DNA
taaaaaaaatagctgggcac

SEQ ID NO: 188130 - DNA, 20 bp, synthetic construct
  source 1..20: mol_type = other DNA
ttaaaaaaaatagctgggca

SEQ ID NO: 188131 - DNA, 20 bp, synthetic construct
  source 1..20: mol_type = other DNA
attaaaaaaaatagctgggc

SEQ ID NO: 188132 - DNA, 20 bp, synthetic construct
  source 1..20: mol_type = other DNA
gattaaaaaaaatagctggg

SEQ ID NO: 188133 - DNA, 20 bp, synthetic construct
  source 1..20: mol_type = other DNA
tgattaaaaaaaatagctgg

SEQ ID NO: 188134 - DNA, 20 bp, synthetic construct
  source 1..20: mol_type = other DNA
ttgattaaaaaaaatagctg

SEQ ID NO: 188135 - DNA, 20 bp, synthetic construct
  source 1..20: mol_type = other DNA
cttgattaaaaaaaatagct

SEQ ID NO: 188136 - DNA, 20 bp, synthetic construct
  source 1..20: mol_type = other DNA
tcttgattaaaaaaaatagc

SEQ ID NO: 188137 - DNA, 20 bp, synthetic construct
  source 1..20: mol_type = other DNA
atcttgattaaaaaaaatag

SEQ ID NO: 188138 - DNA, 20 bp, synthetic construct
  source 1..20: mol_type = other DNA
catcttgattaaaaaaaata

SEQ ID NO: 188139 - DNA, 20 bp, synthetic construct
  source 1..20: mol_type = other DNA
ccatcttgattaaaaaaaat

SEQ ID NO: 188140 - DNA, 20 bp, synthetic construct
  source 1..20: mol_type = other DNA
tccatcttgattaaaaaaaa

SEQ ID NO: 188141 - DNA, 20 bp, synthetic construct
  source 1..20: mol_type = other DNA
ctccatcttgattaaaaaaa

SEQ ID NO: 188142 - DNA, 20 bp, synthetic construct
  source 1..20: mol_type = other DNA
actccatcttgattaaaaaa

SEQ ID NO: 188143 - DNA, 20 bp, synthetic construct
  source 1..20: mol_type = other DNA
aactccatcttgattaaaaa

SEQ ID NO: 188144 - DNA, 20 bp, synthetic construct
  source 1..20: mol_type = other DNA
aaactccatcttgattaaaa

SEQ ID NO: 188145 - DNA, 20 bp, synthetic construct
  source 1..20: mol_type = other DNA
aaaactccatcttgattaaa

SEQ ID NO: 188146 - DNA, 20 bp, synthetic construct
  source 1..20: mol_type = other DNA
aaaaactccatcttgattaa

SEQ ID NO: 188147 - DNA, 20 bp, synthetic construct
  source 1..20: mol_type = other DNA
gaaaaactccatcttgatta

SEQ ID NO: 188148 - DNA, 20 bp, synthetic construct
  source 1..20: mol_type = other DNA
agaaaaactccatcttgatt

SEQ ID NO: 188149 - DNA, 20 bp, synthetic construct
  source 1..20: mol_type = other DNA
tagaaaaactccatcttgat

SEQ ID NO: 188150 - DNA, 20 bp, synthetic construct
  source 1..20: mol_type = other DNA
atagaaaaactccatcttga

SEQ ID NO: 188151 - DNA, 20 bp, synthetic construct
  source 1..20: mol_type = other DNA
catagaaaaactccatcttg

SEQ ID NO: 188152 - DNA, 20 bp, synthetic construct
  source 1..20: mol_type = other DNA
acatagaaaaactccatctt

SEQ ID NO: 188153 - DNA, 20 bp, synthetic construct
  source 1..20: mol_type = other DNA
aacatagaaaaactccatct

SEQ ID NO: 188154 - DNA, 20 bp, synthetic construct
  source 1..20: mol_type = other DNA
caacatagaaaaactccatc

SEQ ID NO: 188155 - DNA, 20 bp, synthetic construct
  source 1..20: mol_type = other DNA
gcaacatagaaaaactccat

SEQ ID NO: 188156 - DNA, 20 bp, synthetic construct
  source 1..20: mol_type = other DNA
ggcaacatagaaaaactcca

SEQ ID NO: 188157 - DNA, 20 bp, synthetic construct
  source 1..20: mol_type = other DNA
gggcaacatagaaaaactcc

SEQ ID NO: 188158 - DNA, 20 bp, synthetic construct
  source 1..20: mol_type = other DNA
tgggcaacatagaaaaactc

SEQ ID NO: 188159 - DNA, 20 bp, synthetic construct
  source 1..20: mol_type = other DNA
ctgggcaacatagaaaaact

SEQ ID NO: 188160 - DNA, 20 bp, synthetic construct
  source 1..20: mol_type = other DNA
cctgggcaacatagaaaaac

SEQ ID NO: 188161 - DNA, 20 bp, synthetic construct
  source 1..20: mol_type = other DNA
gcctgggcaacatagaaaaa

SEQ ID NO: 188162 - DNA, 20 bp, synthetic construct
  source 1..20: mol_type = other DNA
agcctgggcaacatagaaaa

SEQ ID NO: 188163 - DNA, 20 bp, synthetic construct
  source 1..20: mol_type = other DNA
cagcctgggcaacatagaaa

SEQ ID NO: 188164 - DNA, 20 bp, synthetic construct
  source 1..20: mol_type = other DNA
ccagcctgggcaacatagaa

SEQ ID NO: 188165 - DNA, 20 bp, synthetic construct
  source 1..20: mol_type = other DNA
accagcctgggcaacataga

SEQ ID NO: 188166 - DNA, 20 bp, synthetic construct
  source 1..20: mol_type = other DNA
gaccagcctgggcaacatag

SEQ ID NO: 188167 - DNA, 20 bp, synthetic construct
  source 1..20: mol_type = other DNA
agaccagcctgggcaacata

SEQ ID NO: 188168 - DNA, 20 bp, synthetic construct
  source 1..20: mol_type = other DNA
gagaccagcctgggcaacat

SEQ ID NO: 188169 - DNA, 20 bp, synthetic construct
  source 1..20: mol_type = other DNA
tgagaccagcctgggcaaca

SEQ ID NO: 188170 - DNA, 20 bp, synthetic construct
  source 1..20: mol_type = other DNA
ttgagaccagcctgggcaac

SEQ ID NO: 188171 - DNA, 20 bp, synthetic construct
  source 1..20: mol_type = other DNA
cttgagaccagcctgggcaa

SEQ ID NO: 188172 - DNA, 20 bp, synthetic construct
  source 1..20: mol_type = other DNA
gcttgagaccagcctgggca

SEQ ID NO: 188173 - DNA, 20 bp, synthetic construct
  source 1..20: mol_type = other DNA
agcttgagaccagcctgggc

SEQ ID NO: 188174 - DNA, 20 bp, synthetic construct
  source 1..20: mol_type = other DNA
gagcttgagaccagcctggg

SEQ ID NO: 188175 - DNA, 20 bp, synthetic construct
  source 1..20: mol_type = other DNA
ggagcttgagaccagcctgg

SEQ ID NO: 188176 - DNA, 20 bp, synthetic construct
  source 1..20: mol_type = other DNA
aggagcttgagaccagcctg

SEQ ID NO: 188177 - DNA, 20 bp, synthetic construct
  source 1..20: mol_type = other DNA
caggagcttgagaccagcct

SEQ ID NO: 188178 - DNA, 20 bp, synthetic construct
  source 1..20: mol_type = other DNA
ccaggagcttgagaccagcc

SEQ ID NO: 188179 - DNA, 20 bp, synthetic construct
  source 1..20: mol_type = other DNA
tccaggagcttgagaccagc

SEQ ID NO: 188180 - DNA, 20 bp, synthetic construct
  source 1..20: mol_type = other DNA
gtccaggagcttgagaccag

SEQ ID NO: 188181 - DNA, 20 bp, synthetic construct
  source 1..20: mol_type = other DNA
agtccaggagcttgagacca

SEQ ID NO: 188182 - DNA, 20 bp, synthetic construct
  source 1..20: mol_type = other DNA
gagtccaggagcttgagacc

SEQ ID NO: 188183 - DNA, 20 bp, synthetic construct
  source 1..20: mol_type = other DNA
tgagtccaggagcttgagac

SEQ ID NO: 188184 - DNA, 20 bp, synthetic construct
  source 1..20: mol_type = other DNA
ttgagtccaggagcttgaga

SEQ ID NO: 188185 - DNA, 20 bp, synthetic construct
  source 1..20: mol_type = other DNA
cttgagtccaggagcttgag

SEQ ID NO: 188186 - DNA, 20 bp, synthetic construct
  source 1..20: mol_type = other DNA
gcttgagtccaggagcttga

SEQ ID NO: 188187 - DNA, 20 bp, synthetic construct
  source 1..20: mol_type = other DNA
tgcttgagtccaggagcttg

SEQ ID NO: 188188 - DNA, 20 bp, synthetic construct
  source 1..20: mol_type = other DNA
ttgcttgagtccaggagctt

SEQ ID NO: 188189 - DNA, 20 bp, synthetic construct
  source 1..20: mol_type = other DNA
attgcttgagtccaggagct

SEQ ID NO: 188190 - DNA, 20 bp, synthetic construct
  source 1..20: mol_type = other DNA
gattgcttgagtccaggagc

SEQ ID NO: 188191 - DNA, 20 bp, synthetic construct
  source 1..20: mol_type = other DNA
ggattgcttgagtccaggag

SEQ ID NO: 188192 - DNA, 20 bp, synthetic construct
  source 1..20: mol_type = other DNA
aggattgcttgagtccagga

SEQ ID NO: 188193 - DNA, 20 bp, synthetic construct
  source 1..20: mol_type = other DNA
gaggattgcttgagtccagg

SEQ ID NO: 188194 - DNA, 20 bp, synthetic construct
  source 1..20: mol_type = other DNA
ggaggattgcttgagtccag

SEQ ID NO: 188195 - DNA, 20 bp, synthetic construct
  source 1..20: mol_type = other DNA
aggaggattgcttgagtcca

SEQ ID NO: 188196 - DNA, 20 bp, synthetic construct
  source 1..20: mol_type = other DNA
caggaggattgcttgagtcc

SEQ ID NO: 188197 - DNA, 20 bp, synthetic construct
  source 1..20: mol_type = other DNA
gcaggaggattgcttgagtc

SEQ ID NO: 188198 - DNA, 20 bp, synthetic construct
  source 1..20: mol_type = other DNA
ggcaggaggattgcttgagt

SEQ ID NO: 188199 - DNA, 20 bp, synthetic construct
  source 1..20: mol_type = other DNA
aggcaggaggattgcttgag

SEQ ID NO: 188200 - DNA, 20 bp, synthetic construct
  source 1..20: mol_type = other DNA
gaggcaggaggattgcttga

SEQ ID NO: 188201 - DNA, 20 bp, synthetic construct
  source 1..20: mol_type = other DNA
tgaggcaggaggattgcttg

SEQ ID NO: 188202 - DNA, 20 bp, synthetic construct
  source 1..20: mol_type = other DNA
ctgaggcaggaggattgctt

SEQ ID NO: 188203 - DNA, 20 bp, synthetic construct
  source 1..20: mol_type = other DNA
gctgaggcaggaggattgct

SEQ ID NO: 188204 - DNA, 20 bp, synthetic construct
  source 1..20: mol_type = other DNA
ggctgaggcaggaggattgc

SEQ ID NO: 188205 - DNA, 20 bp, synthetic construct
  source 1..20: mol_type = other DNA
aggctgaggcaggaggattg

SEQ ID NO: 188206 - DNA, 20 bp, synthetic construct
  source 1..20: mol_type = other DNA
gaggctgaggcaggaggatt

SEQ ID NO: 188207 - DNA, 20 bp, synthetic construct
  source 1..20: mol_type = other DNA
ggaggctgaggcaggaggat

SEQ ID NO: 188208 - DNA, 20 bp, synthetic construct
  source 1..20: mol_type = other DNA
gggaggctgaggcaggagga

SEQ ID NO: 188209 - DNA, 20 bp, synthetic construct
  source 1..20: mol_type = other DNA
tgggaggctgaggcaggagg

SEQ ID NO: 188210 - DNA, 20 bp, synthetic construct
  source 1..20: mol_type = other DNA
ttgggaggctgaggcaggag

SEQ ID NO: 188211 - DNA, 20 bp, synthetic construct
  source 1..20: mol_type = other DNA
tttgggaggctgaggcagga

SEQ ID NO: 188212 - DNA, 20 bp, synthetic construct
  source 1..20: mol_type = other DNA
ctttgggaggctgaggcagg

SEQ ID NO: 188213 - DNA, 20 bp, synthetic construct
  source 1..20: mol_type = other DNA
cctttgggaggctgaggcag

SEQ ID NO: 188214 - DNA, 20 bp, synthetic construct
  source 1..20: mol_type = other DNA
ccctttgggaggctgaggca

SEQ ID NO: 188215 - DNA, 20 bp, synthetic construct
  source 1..20: mol_type = other DNA
gccctttgggaggctgaggc

SEQ ID NO: 188216 - DNA, 20 bp, synthetic construct
  source 1..20: mol_type = other DNA
agccctttgggaggctgagg

SEQ ID NO: 188217 - DNA, 20 bp, synthetic construct
  source 1..20: mol_type = other DNA
cagccctttgggaggctgag

SEQ ID NO: 188218 - DNA, 20 bp, synthetic construct
  source 1..20: mol_type = other DNA
tcagccctttgggaggctga

SEQ ID NO: 188219 - DNA, 20 bp, synthetic construct
  source 1..20: mol_type = other DNA
ctcagccctttgggaggctg

SEQ ID NO: 188220 - DNA, 20 bp, synthetic construct
  source 1..20: mol_type = other DNA
tctcagccctttgggaggct

SEQ ID NO: 188221 - DNA, 20 bp, synthetic construct
  source 1..20: mol_type = other DNA
atctcagccctttgggaggc

SEQ ID NO: 188222 - DNA, 20 bp, synthetic construct
  source 1..20: mol_type = other DNA
aatctcagccctttgggagg

SEQ ID NO: 188223 - DNA, 20 bp, synthetic construct
  source 1..20: mol_type = other DNA
taatctcagccctttgggag

SEQ ID NO: 188224 - DNA, 20 bp, synthetic construct
  source 1..20: mol_type = other DNA
ttaatctcagccctttggga

SEQ ID NO: 188225 - DNA, 20 bp, synthetic construct
  source 1..20: mol_type = other DNA
tttaatctcagccctttggg

SEQ ID NO: 188226 - DNA, 20 bp, synthetic construct
  source 1..20: mol_type = other DNA
ttttaatctcagccctttgg

SEQ ID NO: 188227 - DNA, 20 bp, synthetic construct
  source 1..20: mol_type = other DNA
gttttaatctcagccctttg

SEQ ID NO: 188228 - DNA, 20 bp, synthetic construct
  source 1..20: mol_type = other DNA
cgttttaatctcagcccttt

SEQ ID NO: 188229 - DNA, 20 bp, synthetic construct
  source 1..20: mol_type = other DNA
acgttttaatctcagccctt

SEQ ID NO: 188230 - DNA, 20 bp, synthetic construct
  source 1..20: mol_type = other DNA
cacgttttaatctcagccct

SEQ ID NO: 188231 - DNA, 20 bp, synthetic construct
  source 1..20: mol_type = other DNA
tcacgttttaatctcagccc

SEQ ID NO: 188232 - DNA, 20 bp, synthetic construct
  source 1..20: mol_type = other DNA
ctcacgttttaatctcagcc

SEQ ID NO: 188233 - DNA, 20 bp, synthetic construct
  source 1..20: mol_type = other DNA
actcacgttttaatctcagc

SEQ ID NO: 188234 - DNA, 20 bp, synthetic construct
  source 1..20: mol_type = other DNA
gactcacgttttaatctcag

SEQ ID NO: 188235 - DNA, 20 bp, synthetic construct
  source 1..20: mol_type = other DNA
tgactcacgttttaatctca

SEQ ID NO: 188236 - DNA, 20 bp, synthetic construct
  source 1..20: mol_type = other DNA
gtgactcacgttttaatctc

SEQ ID NO: 188237 - DNA, 20 bp, synthetic construct
  source 1..20: mol_type = other DNA
ggtgactcacgttttaatct

SEQ ID NO: 188238 - DNA, 20 bp, synthetic construct
  source 1..20: mol_type = other DNA
gggtgactcacgttttaatc

SEQ ID NO: 188239 - DNA, 20 bp, synthetic construct
  source 1..20: mol_type = other DNA
agggtgactcacgttttaat

SEQ ID NO: 188240 - DNA, 20 bp, synthetic construct
  source 1..20: mol_type = other DNA
cagggtgactcacgttttaa

SEQ ID NO: 188241 - DNA, 20 bp, synthetic construct
  source 1..20: mol_type = other DNA
gcagggtgactcacgtttta

SEQ ID NO: 188242 - DNA, 20 bp, synthetic construct
  source 1..20: mol_type = other DNA
ggcagggtgactcacgtttt

SEQ ID NO: 188243 - DNA, 20 bp, synthetic construct
  source 1..20: mol_type = other DNA
gggcagggtgactcacgttt

SEQ ID NO: 188244 - DNA, 20 bp, synthetic construct
  source 1..20: mol_type = other DNA
tgggcagggtgactcacgtt

SEQ ID NO: 188245 - DNA, 20 bp, synthetic construct
  source 1..20: mol_type = other DNA
ctgggcagggtgactcacgt

SEQ ID NO: 188246 - DNA, 20 bp, synthetic construct
  source 1..20: mol_type = other DNA
gctgggcagggtgactcacg

SEQ ID NO: 188247 - DNA, 20 bp, synthetic construct
  source 1..20: mol_type = other DNA
ggctgggcagggtgactcac

SEQ ID NO: 188248 - DNA, 20 bp, synthetic construct
  source 1..20: mol_type = other DNA
tggctgggcagggtgactca

SEQ ID NO: 188249 - DNA, 20 bp, synthetic construct
  source 1..20: mol_type = other DNA
ttggctgggcagggtgactc

SEQ ID NO: 188250 - DNA, 20 bp, synthetic construct
  source 1..20: mol_type = other DNA
attggctgggcagggtgact

SEQ ID NO: 188251 - DNA, 20 bp, synthetic construct
  source 1..20: mol_type = other DNA
aattggctgggcagggtgac

SEQ ID NO: 188252 - DNA, 20 bp, synthetic construct
  source 1..20: mol_type = other DNA
caattggctgggcagggtga

SEQ ID NO: 188253 - DNA, 20 bp, synthetic construct
  source 1..20: mol_type = other DNA
gcaattggctgggcagggtg

SEQ ID NO: 188254 - DNA, 20 bp, synthetic construct
  source 1..20: mol_type = other DNA
agcaattggctgggcagggt

SEQ ID NO: 188255 - DNA, 20 bp, synthetic construct
  source 1..20: mol_type = other DNA
aagcaattggctgggcaggg

SEQ ID NO: 188256 - DNA, 20 bp, synthetic construct
  source 1..20: mol_type = other DNA
aaagcaattggctgggcagg

SEQ ID NO: 188257 - DNA, 20 bp, synthetic construct
  source 1..20: mol_type = other DNA
aaaagcaattggctgggcag

SEQ ID NO: 188258 - DNA, 20 bp, synthetic construct
  source 1..20: mol_type = other DNA
aaaaagcaattggctgggca

SEQ ID NO: 188259 - DNA, 20 bp, synthetic construct
  source 1..20: mol_type = other DNA
taaaaagcaattggctgggc

SEQ ID NO: 188260 - DNA, 20 bp, synthetic construct
  source 1..20: mol_type = other DNA
ttaaaaagcaattggctggg

SEQ ID NO: 188261 - DNA, 20 bp, synthetic construct
  source 1..20: mol_type = other DNA
tttaaaaagcaattggctgg

SEQ ID NO: 188262 - DNA, 20 bp, synthetic construct
  source 1..20: mol_type = other DNA
ttttaaaaagcaattggctg

SEQ ID NO: 188263 - DNA, 20 bp, synthetic construct
  source 1..20: mol_type = other DNA
tttttaaaaagcaattggct

SEQ ID NO: 188264 - DNA, 20 bp, synthetic construct
  source 1..20: mol_type = other DNA
ttttttaaaaagcaattggc

SEQ ID NO: 188265 - DNA, 20 bp, synthetic construct
  source 1..20: mol_type = other DNA
cttttttaaaaagcaattgg

SEQ ID NO: 188266 - DNA, 20 bp, synthetic construct
  source 1..20: mol_type = other DNA
tcttttttaaaaagcaattg

SEQ ID NO: 188267 - DNA, 20 bp, synthetic construct
  source 1..20: mol_type = other DNA
atcttttttaaaaagcaatt

SEQ ID NO: 188268 - DNA, 20 bp, synthetic construct
  source 1..20: mol_type = other DNA
aatcttttttaaaaagcaat

SEQ ID NO: 188269 - DNA, 20 bp, synthetic construct
  source 1..20: mol_type = other DNA
taatcttttttaaaaagcaa

SEQ ID NO: 188270 - DNA, 20 bp, synthetic construct
  source 1..20: mol_type = other DNA
ttaatcttttttaaaaagca

SEQ ID NO: 188271 - DNA, 20 bp, synthetic construct
  source 1..20: mol_type = other DNA
tttaatcttttttaaaaagc

SEQ ID NO: 188272 - DNA, 20 bp, synthetic construct
  source 1..20: mol_type = other DNA
atttaatcttttttaaaaag

SEQ ID NO: 188273 - DNA, 20 bp, synthetic construct
  source 1..20: mol_type = other DNA
catttaatcttttttaaaaa

SEQ ID NO: 188274 - DNA, 20 bp, synthetic construct
  source 1..20: mol_type = other DNA
gcatttaatcttttttaaaa

SEQ ID NO: 188275 - DNA, 20 bp, synthetic construct
  source 1..20: mol_type = other DNA
tgcatttaatcttttttaaa

SEQ ID NO: 188276 - DNA, 20 bp, synthetic construct
  source 1..20: mol_type = other DNA
atgcatttaatcttttttaa

SEQ ID NO: 188277 - DNA, 20 bp, synthetic construct
  source 1..20: mol_type = other DNA
catgcatttaatctttttta

SEQ ID NO: 188278 - DNA, 20 bp, synthetic construct
  source 1..20: mol_type = other DNA
acatgcatttaatctttttt

SEQ ID NO: 188279 - DNA, 20 bp, synthetic construct
  source 1..20: mol_type = other DNA
tacatgcatttaatcttttt

SEQ ID NO: 188280 - DNA, 20 bp, synthetic construct
  source 1..20: mol_type = other DNA
atacatgcatttaatctttt

SEQ ID NO: 188281 - DNA, 20 bp, synthetic construct
  source 1..20: mol_type = other DNA
tatacatgcatttaatcttt

SEQ ID NO: 188282 - DNA, 20 bp, synthetic construct
  source 1..20: mol_type = other DNA
gtatacatgcatttaatctt

SEQ ID NO: 188283 - DNA, 20 bp, synthetic construct
  source 1..20: mol_type = other DNA
cgtatacatgcatttaatct

SEQ ID NO: 188284 - DNA, 20 bp, synthetic construct
  source 1..20: mol_type = other DNA
gcgtatacatgcatttaatc

SEQ ID NO: 188285 - DNA, 20 bp, synthetic construct
  source 1..20: mol_type = other DNA
agcgtatacatgcatttaat

SEQ ID NO: 188286 - DNA, 20 bp, synthetic construct
  source 1..20: mol_type = other DNA
gagcgtatacatgcatttaa

SEQ ID NO: 188287 - DNA, 20 bp, synthetic construct
  source 1..20: mol_type = other DNA
tgagcgtatacatgcattta

SEQ ID NO: 188288 - DNA, 20 bp, synthetic construct
  source 1..20: mol_type = other DNA
ctgagcgtatacatgcattt

SEQ ID NO: 188289 - DNA, 20 bp, synthetic construct
  source 1..20: mol_type = other DNA
cctgagcgtatacatgcatt

SEQ ID NO: 188290 - DNA, 20 bp, synthetic construct
  source 1..20: mol_type = other DNA
gcctgagcgtatacatgcat

SEQ ID NO: 188291 - DNA, 20 bp, synthetic construct
  source 1..20: mol_type = other DNA
tgcctgagcgtatacatgca

SEQ ID NO: 188292 - DNA, 20 bp, synthetic construct
  source 1..20: mol_type = other DNA
atgcctgagcgtatacatgc

SEQ ID NO: 188293 - DNA, 20 bp, synthetic construct
  source 1..20: mol_type = other DNA
gatgcctgagcgtatacatg

SEQ ID NO: 188294 - DNA, 20 bp, synthetic construct
  source 1..20: mol_type = other DNA
tgatgcctgagcgtatacat

SEQ ID NO: 188295 - DNA, 20 bp, synthetic construct
  source 1..20: mol_type = other DNA
ctgatgcctgagcgtataca

SEQ ID NO: 188296 - DNA, 20 bp, synthetic construct
  source 1..20: mol_type = other DNA
gctgatgcctgagcgtatac

SEQ ID NO: 188297 - DNA, 20 bp, synthetic construct
  source 1..20: mol_type = other DNA
tgctgatgcctgagcgtata

SEQ ID NO: 188298 - DNA, 20 bp, synthetic construct
  source 1..20: mol_type = other DNA
gtgctgatgcctgagcgtat

SEQ ID NO: 188299 - DNA, 20 bp, synthetic construct
  source 1..20: mol_type = other DNA
tgtgctgatgcctgagcgta

SEQ ID NO: 188300 - DNA, 20 bp, synthetic construct
  source 1..20: mol_type = other DNA
gtgtgctgatgcctgagcgt

SEQ ID NO: 188301 - DNA, 20 bp, synthetic construct
  source 1..20: mol_type = other DNA
agtgtgctgatgcctgagcg

SEQ ID NO: 188302 - DNA, 20 bp, synthetic construct
  source 1..20: mol_type = other DNA
aagtgtgctgatgcctgagc

SEQ ID NO: 188303 - DNA, 20 bp, synthetic construct
  source 1..20: mol_type = other DNA
caagtgtgctgatgcctgag

SEQ ID NO: 188304 - DNA, 20 bp, synthetic construct
  source 1..20: mol_type = other DNA
ccaagtgtgctgatgcctga

SEQ ID NO: 188305 - DNA, 20 bp, synthetic construct
  source 1..20: mol_type = other DNA
tccaagtgtgctgatgcctg

SEQ ID NO: 188306 - DNA, 20 bp, synthetic construct
  source 1..20: mol_type = other DNA
ttccaagtgtgctgatgcct

SEQ ID NO: 188307 - DNA, 20 bp, synthetic construct
  source 1..20: mol_type = other DNA
tttccaagtgtgctgatgcc

SEQ ID NO: 188308 - DNA, 20 bp, synthetic construct
  source 1..20: mol_type = other DNA
ctttccaagtgtgctgatgc

SEQ ID NO: 188309 - DNA, 20 bp, synthetic construct
  source 1..20: mol_type = other DNA
cctttccaagtgtgctgatg

SEQ ID NO: 188310 - DNA, 20 bp, synthetic construct
  source 1..20: mol_type = other DNA
tcctttccaagtgtgctgat

SEQ ID NO: 188311 - DNA, 20 bp, synthetic construct
  source 1..20: mol_type = other DNA
atcctttccaagtgtgctga

SEQ ID NO: 188312 - DNA, 20 bp, synthetic construct
  source 1..20: mol_type = other DNA
catcctttccaagtgtgctg

SEQ ID NO: 188313 - DNA, 20 bp, synthetic construct
  source 1..20: mol_type = other DNA
tcatcctttccaagtgtgct

SEQ ID NO: 188314 - DNA, 20 bp, synthetic construct
  source 1..20: mol_type = other DNA
ttcatcctttccaagtgtgc

SEQ ID NO: 188315 - DNA, 20 bp, synthetic construct
  source 1..20: mol_type = other DNA
tttcatcctttccaagtgtg

SEQ ID NO: 188316 - DNA, 20 bp, synthetic construct
  source 1..20: mol_type = other DNA
ttttcatcctttccaagtgt

SEQ ID NO: 188317 - DNA, 20 bp, synthetic construct
  source 1..20: mol_type = other DNA
attttcatcctttccaagtg

SEQ ID NO: 188318 - DNA, 20 bp, synthetic construct
  source 1..20: mol_type = other DNA
tattttcatcctttccaagt

SEQ ID NO: 188319 - DNA, 20 bp, synthetic construct
  source 1..20: mol_type = other DNA
atattttcatcctttccaag

SEQ ID NO: 188320 - DNA, 20 bp, synthetic construct
  source 1..20: mol_type = other DNA
gatattttcatcctttccaa

SEQ ID NO: 188321 - DNA, 20 bp, synthetic construct
  source 1..20: mol_type = other DNA
ggatattttcatcctttcca

SEQ ID NO: 188322 - DNA, 20 bp, synthetic construct
  source 1..20: mol_type = other DNA
cggatattttcatcctttcc

SEQ ID NO: 188323 - DNA, 20 bp, synthetic construct
  source 1..20: mol_type = other DNA
ccggatattttcatcctttc

SEQ ID NO: 188324 - DNA, 20 bp, synthetic construct
  source 1..20: mol_type = other DNA
tccggatattttcatccttt

SEQ ID NO: 188325 - DNA, 20 bp, synthetic construct
  source 1..20: mol_type = other DNA
ttccggatattttcatcctt

SEQ ID NO: 188326 - DNA, 20 bp, synthetic construct
  source 1..20: mol_type = other DNA
cttccggatattttcatcct

SEQ ID NO: 188327 - DNA, 20 bp, synthetic construct
  source 1..20: mol_type = other DNA
tcttccggatattttcatcc

SEQ ID NO: 188328 - DNA, 20 bp, synthetic construct
  source 1..20: mol_type = other DNA
ttcttccggatattttcatc

SEQ ID NO: 188329 - DNA, 20 bp, synthetic construct
  source 1..20: mol_type = other DNA
cttcttccggatattttcat

SEQ ID NO: 188330 - DNA, 20 bp, synthetic construct
  source 1..20: mol_type = other DNA
ccttcttccggatattttca

SEQ ID NO: 188331 - DNA, 20 bp, synthetic construct
  source 1..20: mol_type = other DNA
cccttcttccggatattttc

SEQ ID NO: 188332 - DNA, 20 bp, synthetic construct
  source 1..20: mol_type = other DNA
acccttcttccggatatttt

SEQ ID NO: 188333 - DNA, 20 bp, synthetic construct
  source 1..20: mol_type = other DNA
aacccttcttccggatattt

SEQ ID NO: 188334 - DNA, 20 bp, synthetic construct
  source 1..20: mol_type = other DNA
gaacccttcttccggatatt

SEQ ID NO: 188335 - DNA, 20 bp, synthetic construct
  source 1..20: mol_type = other DNA
agaacccttcttccggatat

SEQ ID NO: 188336 - DNA, 20 bp, synthetic construct
  source 1..20: mol_type = other DNA
aagaacccttcttccggata

SEQ ID NO: 188337 - DNA, 20 bp, synthetic construct
  source 1..20: mol_type = other DNA
aaagaacccttcttccggat

SEQ ID NO: 188338 - DNA, 20 bp, synthetic construct
  source 1..20: mol_type = other DNA
aaaagaacccttcttccgga

SEQ ID NO: 188339 - DNA, 20 bp, synthetic construct
  source 1..20: mol_type = other DNA
taaaagaacccttcttccgg

SEQ ID NO: 188340 - DNA, 20 bp, synthetic construct
  source 1..20: mol_type = other DNA
ttaaaagaacccttcttccg

SEQ ID NO: 188341 - DNA, 20 bp, synthetic construct
  source 1..20: mol_type = other DNA
tttaaaagaacccttcttcc

SEQ ID NO: 188342 - DNA, 20 bp, synthetic construct
  source 1..20: mol_type = other DNA
ttttaaaagaacccttcttc

SEQ ID NO: 188343 - DNA, 20 bp, synthetic construct
  source 1..20: mol_type = other DNA
cttttaaaagaacccttctt

SEQ ID NO: 188344 - DNA, 20 bp, synthetic construct
  source 1..20: mol_type = other DNA
ccttttaaaagaacccttct

SEQ ID NO: 188345 - DNA, 20 bp, synthetic construct
  source 1..20: mol_type = other DNA
gccttttaaaagaacccttc

SEQ ID NO: 188346 - DNA, 20 bp, synthetic construct
  source 1..20: mol_type = other DNA
agccttttaaaagaaccctt

SEQ ID NO: 188347 - DNA, 20 bp, synthetic construct
  source 1..20: mol_type = other DNA
gagccttttaaaagaaccct

SEQ ID NO: 188348 - DNA, 20 bp, synthetic construct
  source 1..20: mol_type = other DNA
ggagccttttaaaagaaccc

SEQ ID NO: 188349 - DNA, 20 bp, synthetic construct
  source 1..20: mol_type = other DNA
aggagccttttaaaagaacc

SEQ ID NO: 188350 - DNA, 20 bp, synthetic construct
  source 1..20: mol_type = other DNA
gaggagccttttaaaagaac

SEQ ID NO: 188351 - DNA, 20 bp, synthetic construct
  source 1..20: mol_type = other DNA
tgaggagccttttaaaagaa

SEQ ID NO: 188352 - DNA, 20 bp, synthetic construct
  source 1..20: mol_type = other DNA
ttgaggagccttttaaaaga

SEQ ID NO: 188353 - DNA, 20 bp, synthetic construct
  source 1..20: mol_type = other DNA
cttgaggagccttttaaaag

SEQ ID NO: 188354 - DNA, 20 bp, synthetic construct
  source 1..20: mol_type = other DNA
acttgaggagccttttaaaa

SEQ ID NO: 188355 - DNA, 20 bp, synthetic construct
  source 1..20: mol_type = other DNA
cacttgaggagccttttaaa

SEQ ID NO: 188356 - DNA, 20 bp, synthetic construct
  source 1..20: mol_type = other DNA
tcacttgaggagccttttaa

SEQ ID NO: 188357 - DNA, 20 bp, synthetic construct
  source 1..20: mol_type = other DNA
atcacttgaggagcctttta

SEQ ID NO: 188358 - DNA, 20 bp, synthetic construct
  source 1..20: mol_type = other DNA
catcacttgaggagcctttt

SEQ ID NO: 188359 - DNA, 20 bp, synthetic construct
  source 1..20: mol_type = other DNA
gcatcacttgaggagccttt

SEQ ID NO: 188360 - DNA, 20 bp, synthetic construct
  source 1..20: mol_type = other DNA
agcatcacttgaggagcctt

SEQ ID NO: 188361 - DNA, 20 bp, synthetic construct
  source 1..20: mol_type = other DNA
cagcatcacttgaggagcct

SEQ ID NO: 188362 - DNA, 20 bp, synthetic construct
  source 1..20: mol_type = other DNA
ccagcatcacttgaggagcc

SEQ ID NO: 188363 - DNA, 20 bp, synthetic construct
  source 1..20: mol_type = other DNA
gccagcatcacttgaggagc

SEQ ID NO: 188364 - DNA, 20 bp, synthetic construct
  source 1..20: mol_type = other DNA
tgccagcatcacttgaggag

SEQ ID NO: 188365 - DNA, 20 bp, synthetic construct
  source 1..20: mol_type = other DNA
ctgccagcatcacttgagga

SEQ ID NO: 188366 - DNA, 20 bp, synthetic construct
  source 1..20: mol_type = other DNA
cctgccagcatcacttgagg

SEQ ID NO: 188367 - DNA, 20 bp, synthetic construct
  source 1..20: mol_type = other DNA
gcctgccagcatcacttgag

SEQ ID NO: 188368 - DNA, 20 bp, synthetic construct
  source 1..20: mol_type = other DNA
tgcctgccagcatcacttga

SEQ ID NO: 188369 - DNA, 20 bp, synthetic construct
  source 1..20: mol_type = other DNA
atgcctgccagcatcacttg

SEQ ID NO: 188370 - DNA, 20 bp, synthetic construct
  source 1..20: mol_type = other DNA
catgcctgccagcatcactt

SEQ ID NO: 188371 - DNA, 20 bp, synthetic construct
  source 1..20: mol_type = other DNA
tcatgcctgccagcatcact

SEQ ID NO: 188372 - DNA, 20 bp, synthetic construct
  source 1..20: mol_type = other DNA
gtcatgcctgccagcatcac

SEQ ID NO: 188373 - DNA, 20 bp, synthetic construct
  source 1..20: mol_type = other DNA
cgtcatgcctgccagcatca

SEQ ID NO: 188374 - DNA, 20 bp, synthetic construct
  source 1..20: mol_type = other DNA
tcgtcatgcctgccagcatc

SEQ ID NO: 188375 - DNA, 20 bp, synthetic construct
  source 1..20: mol_type = other DNA
ttcgtcatgcctgccagcat

SEQ ID NO: 188376 - DNA, 20 bp, synthetic construct
  source 1..20: mol_type = other DNA
attcgtcatgcctgccagca

SEQ ID NO: 188377 - DNA, 20 bp, synthetic construct
  source 1..20: mol_type = other DNA
cattcgtcatgcctgccagc

SEQ ID NO: 188378 - DNA, 20 bp, synthetic construct
  source 1..20: mol_type = other DNA
acattcgtcatgcctgccag

SEQ ID NO: 188379 - DNA, 20 bp, synthetic construct
  source 1..20: mol_type = other DNA
gacattcgtcatgcctgcca

SEQ ID NO: 188380 - DNA, 20 bp, synthetic construct
  source 1..20: mol_type = other DNA
ggacattcgtcatgcctgcc

SEQ ID NO: 188381 - DNA, 20 bp, synthetic construct
  source 1..20: mol_type = other DNA
gggacattcgtcatgcctgc

SEQ ID NO: 188382 - DNA, 20 bp, synthetic construct
  source 1..20: mol_type = other DNA
agggacattcgtcatgcctg

SEQ ID NO: 188383 - DNA, 20 bp, synthetic construct
  source 1..20: mol_type = other DNA
cagggacattcgtcatgcct

SEQ ID NO: 188384 - DNA, 20 bp, synthetic construct
  source 1..20: mol_type = other DNA
ccagggacattcgtcatgcc

SEQ ID NO: 188385 - DNA, 20 bp, synthetic construct
  source 1..20: mol_type = other DNA
accagggacattcgtcatgc

SEQ ID NO: 188386 - DNA, 20 bp, synthetic construct
  source 1..20: mol_type = other DNA
gaccagggacattcgtcatg

SEQ ID NO: 188387 - DNA, 20 bp, synthetic construct
  source 1..20: mol_type = other DNA
tgaccagggacattcgtcat

SEQ ID NO: 188388 - DNA, 20 bp, synthetic construct
  source 1..20: mol_type = other DNA
gtgaccagggacattcgtca

SEQ ID NO: 188389 - DNA, 20 bp, synthetic construct
  source 1..20: mol_type = other DNA
tgtgaccagggacattcgtc

SEQ ID NO: 188390 - DNA, 20 bp, synthetic construct
  source 1..20: mol_type = other DNA
ttgtgaccagggacattcgt

SEQ ID NO: 188391 - DNA, 20 bp, synthetic construct
  source 1..20: mol_type = other DNA
tttgtgaccagggacattcg

SEQ ID NO: 188392 - DNA, 20 bp, synthetic construct
  source 1..20: mol_type = other DNA
ttttgtgaccagggacattc

SEQ ID NO: 188393 - DNA, 20 bp, synthetic construct
  source 1..20: mol_type = other DNA
cttttgtgaccagggacatt

SEQ ID NO: 188394 - DNA, 20 bp, synthetic construct
  source 1..20: mol_type = other DNA
gcttttgtgaccagggacat

SEQ ID NO: 188395 - DNA, 20 bp, synthetic construct
  source 1..20: mol_type = other DNA
agcttttgtgaccagggaca

SEQ ID NO: 188396 - DNA, 20 bp, synthetic construct
  source 1..20: mol_type = other DNA
gagcttttgtgaccagggac

SEQ ID NO: 188397 - DNA, 20 bp, synthetic construct
  source 1..20: mol_type = other DNA
agagcttttgtgaccaggga

SEQ ID NO: 188398 - DNA, 20 bp, synthetic construct
  source 1..20: mol_type = other DNA
cagagcttttgtgaccaggg

SEQ ID NO: 188399 - DNA, 20 bp, synthetic construct
  source 1..20: mol_type = other DNA
tcagagcttttgtgaccagg

SEQ ID NO: 188400 - DNA, 20 bp, synthetic construct
  source 1..20: mol_type = other DNA
atcagagcttttgtgaccag

SEQ ID NO: 188401 - DNA, 20 bp, synthetic construct
  source 1..20: mol_type = other DNA
gatcagagcttttgtgacca

SEQ ID NO: 188402 - DNA, 20 bp, synthetic construct
  source 1..20: mol_type = other DNA
agatcagagcttttgtgacc

SEQ ID NO: 188403 - DNA, 20 bp, synthetic construct
  source 1..20: mol_type = other DNA
cagatcagagcttttgtgac

SEQ ID NO: 188404 - DNA, 20 bp, synthetic construct
  source 1..20: mol_type = other DNA
ccagatcagagcttttgtga

SEQ ID NO: 188405 - DNA, 20 bp, synthetic construct
  source 1..20: mol_type = other DNA
gccagatcagagcttttgtg

SEQ ID NO: 188406 - DNA, 20 bp, synthetic construct
  source 1..20: mol_type = other DNA
ggccagatcagagcttttgt

SEQ ID NO: 188407 - DNA, 20 bp, synthetic construct
  source 1..20: mol_type = other DNA
aggccagatcagagcttttg

SEQ ID NO: 188408 - DNA, 20 bp, synthetic construct
  source 1..20: mol_type = other DNA
taggccagatcagagctttt

SEQ ID NO: 188409 - DNA, 20 bp, synthetic construct
  source 1..20: mol_type = other DNA
ttaggccagatcagagcttt

SEQ ID NO: 188410 - DNA, 20 bp, synthetic construct
  source 1..20: mol_type = other DNA
gttaggccagatcagagctt

SEQ ID NO: 188411 - DNA, 20 bp, synthetic construct
  source 1..20: mol_type = other DNA
ggttaggccagatcagagct

SEQ ID NO: 188412 - DNA, 20 bp, synthetic construct
  source 1..20: mol_type = other DNA
gggttaggccagatcagagc

SEQ ID NO: 188413 - DNA, 20 bp, synthetic construct
  source 1..20: mol_type = other DNA
agggttaggccagatcagag

SEQ ID NO: 188414 - DNA, 20 bp, synthetic construct
  source 1..20: mol_type = other DNA
cagggttaggccagatcaga

SEQ ID NO: 188415 - DNA, 20 bp, synthetic construct
  source 1..20: mol_type = other DNA
acagggttaggccagatcag

SEQ ID NO: 188416 - DNA, 20 bp, synthetic construct
  source 1..20: mol_type = other DNA
gacagggttaggccagatca

SEQ ID NO: 188417 - DNA, 20 bp, synthetic construct
  source 1..20: mol_type = other DNA
tgacagggttaggccagatc

SEQ ID NO: 188418 - DNA, 20 bp, synthetic construct
  source 1..20: mol_type = other DNA
atgacagggttaggccagat

SEQ ID NO: 188419 - DNA, 20 bp, synthetic construct
  source 1..20: mol_type = other DNA
catgacagggttaggccaga

SEQ ID NO: 188420 - DNA, 20 bp, synthetic construct
  source 1..20: mol_type = other DNA
acatgacagggttaggccag

SEQ ID NO: 188421 - DNA, 20 bp, synthetic construct
  source 1..20: mol_type = other DNA
aacatgacagggttaggcca

SEQ ID NO: 188422 - DNA, 20 bp, synthetic construct
  source 1..20: mol_type = other DNA
taacatgacagggttaggcc

SEQ ID NO: 188423 - DNA, 20 bp, synthetic construct
  source 1..20: mol_type = other DNA
ctaacatgacagggttaggc

SEQ ID NO: 188424 - DNA, 20 bp, synthetic construct
  source 1..20: mol_type = other DNA
tctaacatgacagggttagg

SEQ ID NO: 188425 - DNA, 20 bp, synthetic construct
  source 1..20: mol_type = other DNA
ctctaacatgacagggttag

SEQ ID NO: 188426 - DNA, 20 bp, synthetic construct
  source 1..20: mol_type = other DNA
tctctaacatgacagggtta

SEQ ID NO: 188427 - DNA, 20 bp, synthetic construct
  source 1..20: mol_type = other DNA
gtctctaacatgacagggtt

SEQ ID NO: 188428 - DNA, 20 bp, synthetic construct
  source 1..20: mol_type = other DNA
agtctctaacatgacagggt

SEQ ID NO: 188429 - DNA, 20 bp, synthetic construct
  source 1..20: mol_type = other DNA
cagtctctaacatgacaggg

SEQ ID NO: 188430 - DNA, 20 bp, synthetic construct
  source 1..20: mol_type = other DNA
ccagtctctaacatgacagg

SEQ ID NO: 188431 - DNA, 20 bp, synthetic construct
  source 1..20: mol_type = other DNA
tccagtctctaacatgacag

SEQ ID NO: 188432 - DNA, 20 bp, synthetic construct
  source 1..20: mol_type = other DNA
ctccagtctctaacatgaca

SEQ ID NO: 188433 - DNA, 20 bp, synthetic construct
  source 1..20: mol_type = other DNA
actccagtctctaacatgac

SEQ ID NO: 188434 - DNA, 20 bp, synthetic construct
  source 1..20: mol_type = other DNA
cactccagtctctaacatga

SEQ ID NO: 188435 - DNA, 20 bp, synthetic construct
  source 1..20: mol_type = other DNA
gcactccagtctctaacatg

SEQ ID NO: 188436 - DNA, 20 bp, synthetic construct
  source 1..20: mol_type = other DNA
cgcactccagtctctaacat

SEQ ID NO: 188437 - DNA, 20 bp, synthetic construct
  source 1..20: mol_type = other DNA
acgcactccagtctctaaca

SEQ ID NO: 188438 - DNA, 20 bp, synthetic construct
  source 1..20: mol_type = other DNA
cacgcactccagtctctaac

SEQ ID NO: 188439 - DNA, 20 bp, synthetic construct
  source 1..20: mol_type = other DNA
acacgcactccagtctctaa

SEQ ID NO: 188440 - DNA, 20 bp, synthetic construct
  source 1..20: mol_type = other DNA
cacacgcactccagtctcta

SEQ ID NO: 188441 - DNA, 20 bp, synthetic construct
  source 1..20: mol_type = other DNA
acacacgcactccagtctct

SEQ ID NO: 188442 - DNA, 20 bp, synthetic construct
  source 1..20: mol_type = other DNA
cacacacgcactccagtctc

SEQ ID NO: 188443 - DNA, 20 bp, synthetic construct
  source 1..20: mol_type = other DNA
acacacacgcactccagtct

SEQ ID NO: 188444 - DNA, 20 bp, synthetic construct
  source 1..20: mol_type = other DNA
cacacacacgcactccagtc

SEQ ID NO: 188445 - DNA, 20 bp, synthetic construct
  source 1..20: mol_type = other DNA
gcacacacacgcactccagt

SEQ ID NO: 188446 - DNA, 20 bp, synthetic construct
  source 1..20: mol_type = other DNA
cgcacacacacgcactccag

SEQ ID NO: 188447 - DNA, 20 bp, synthetic construct
  source 1..20: mol_type = other DNA
gcgcacacacacgcactcca

SEQ ID NO: 188448 - DNA, 20 bp, synthetic construct
  source 1..20: mol_type = other DNA
cgcgcacacacacgcactcc

SEQ ID NO: 188449 - DNA, 20 bp, synthetic construct
  source 1..20: mol_type = other DNA
gcgcgcacacacacgcactc

SEQ ID NO: 188450 - DNA, 20 bp, synthetic construct
  source 1..20: mol_type = other DNA
tgcgcgcacacacacgcact

SEQ ID NO: 188451 - DNA, 20 bp, synthetic construct
  source 1..20: mol_type = other DNA
ttgcgcgcacacacacgcac

SEQ ID NO: 188452 - DNA, 20 bp, synthetic construct
  source 1..20: mol_type = other DNA
tttgcgcgcacacacacgca

SEQ ID NO: 188453 - DNA, 20 bp, synthetic construct
  source 1..20: mol_type = other DNA
ctttgcgcgcacacacacgc

SEQ ID NO: 188454 - DNA, 20 bp, synthetic construct
  source 1..20: mol_type = other DNA
actttgcgcgcacacacacg

SEQ ID NO: 188455 - DNA, 20 bp, synthetic construct
  source 1..20: mol_type = other DNA
cactttgcgcgcacacacac

SEQ ID NO: 188456 - DNA, 20 bp, synthetic construct
  source 1..20: mol_type = other DNA
acactttgcgcgcacacaca

SEQ ID NO: 188457 - DNA, 20 bp, synthetic construct
  source 1..20: mol_type = other DNA
cacactttgcgcgcacacac

SEQ ID NO: 188458 - DNA, 20 bp, synthetic construct
  source 1..20: mol_type = other DNA
ccacactttgcgcgcacaca

SEQ ID NO: 188459 - DNA, 20 bp, synthetic construct
  source 1..20: mol_type = other DNA
cccacactttgcgcgcacac

SEQ ID NO: 188460 - DNA, 20 bp, synthetic construct
  source 1..20: mol_type = other DNA
ccccacactttgcgcgcaca

SEQ ID NO: 188461 - DNA, 20 bp, synthetic construct
  source 1..20: mol_type = other DNA
cccccacactttgcgcgcac

SEQ ID NO: 188462 - DNA, 20 bp, synthetic construct
  source 1..20: mol_type = other DNA
ccccccacactttgcgcgca

SEQ ID NO: 188463 - DNA, 20 bp, synthetic construct
  source 1..20: mol_type = other DNA
tccccccacactttgcgcgc

SEQ ID NO: 188464 - DNA, 20 bp, synthetic construct
  source 1..20: mol_type = other DNA
atccccccacactttgcgcg

SEQ ID NO: 188465 - DNA, 20 bp, synthetic construct
  source 1..20: mol_type = other DNA
catccccccacactttgcgc

SEQ ID NO: 188466 - DNA, 20 bp, synthetic construct
  source 1..20: mol_type = other DNA
ccatccccccacactttgcg

SEQ ID NO: 188467 - DNA, 20 bp, synthetic construct
  source 1..20: mol_type = other DNA
cccatccccccacactttgc

SEQ ID NO: 188468 - DNA, 20 bp, synthetic construct
  source 1..20: mol_type = other DNA
ccccatccccccacactttg

SEQ ID NO: 188469 - DNA, 20 bp, synthetic construct
  source 1..20: mol_type = other DNA
cccccatccccccacacttt

SEQ ID NO: 188470 - DNA, 20 bp, synthetic construct
  source 1..20: mol_type = other DNA
acccccatccccccacactt

SEQ ID NO: 188471 - DNA, 20 bp, synthetic construct
  source 1..20: mol_type = other DNA
cacccccatccccccacact

SEQ ID NO: 188472 - DNA, 20 bp, synthetic construct
  source 1..20: mol_type = other DNA
tcacccccatccccccacac

SEQ ID NO: 188473 - DNA, 20 bp, synthetic construct
  source 1..20: mol_type = other DNA
ctcacccccatccccccaca

SEQ ID NO: 188474 - DNA, 20 bp, synthetic construct
  source 1..20: mol_type = other DNA
actcacccccatccccccac

SEQ ID NO: 188475 - DNA, 20 bp, synthetic construct
  source 1..20: mol_type = other DNA
cactcacccccatcccccca

SEQ ID NO: 188476 - DNA, 20 bp, synthetic construct
  source 1..20: mol_type = other DNA
acactcacccccatcccccc

SEQ ID NO: 188477 - DNA, 20 bp, synthetic construct
  source 1..20: mol_type = other DNA
cacactcacccccatccccc

SEQ ID NO: 188478 - DNA, 20 bp, synthetic construct
  source 1..20: mol_type = other DNA
acacactcacccccatcccc

SEQ ID NO: 188479 - DNA, 20 bp, synthetic construct
  source 1..20: mol_type = other DNA
cacacactcacccccatccc

SEQ ID NO: 188480 - DNA, 20 bp, synthetic construct
  source 1..20: mol_type = other DNA
acacacactcacccccatcc

SEQ ID NO: 188481 - DNA, 20 bp, synthetic construct
  source 1..20: mol_type = other DNA
cacacacactcacccccatc

SEQ ID NO: 188482 - DNA, 20 bp, synthetic construct
  source 1..20: mol_type = other DNA
ccacacacactcacccccat

SEQ ID NO: 188483 - DNA, 20 bp, synthetic construct
  source 1..20: mol_type = other DNA
accacacacactcaccccca

SEQ ID NO: 188484 - DNA, 20 bp, synthetic construct
  source 1..20: mol_type = other DNA
caccacacacactcaccccc

SEQ ID NO: 188485 - DNA, 20 bp, synthetic construct
  source 1..20: mol_type = other DNA
acaccacacacactcacccc

SEQ ID NO: 188486 - DNA, 20 bp, synthetic construct
  source 1..20: mol_type = other DNA
cacaccacacacactcaccc

SEQ ID NO: 188487 - DNA, 20 bp, synthetic construct
  source 1..20: mol_type = other DNA
acacaccacacacactcacc

SEQ ID NO: 188488 - DNA, 20 bp, synthetic construct
  source 1..20: mol_type = other DNA
tacacaccacacacactcac

SEQ ID NO: 188489 - DNA, 20 bp, synthetic construct
  source 1..20: mol_type = other DNA
ttacacaccacacacactca

SEQ ID NO: 188490 - DNA, 20 bp, synthetic construct
  source 1..20: mol_type = other DNA
cttacacaccacacacactc

SEQ ID NO: 188491 - DNA, 20 bp, synthetic construct
  source 1..20: mol_type = other DNA
gcttacacaccacacacact

SEQ ID NO: 188492 - DNA, 20 bp, synthetic construct
  source 1..20: mol_type = other DNA
tgcttacacaccacacacac

SEQ ID NO: 188493 - DNA, 20 bp, synthetic construct
  source 1..20: mol_type = other DNA
atgcttacacaccacacaca

SEQ ID NO: 188494 - DNA, 20 bp, synthetic construct
  source 1..20: mol_type = other DNA
catgcttacacaccacacac

SEQ ID NO: 188495 - DNA, 20 bp, synthetic construct
  source 1..20: mol_type = other DNA
tcatgcttacacaccacaca

SEQ ID NO: 188496 - DNA, 20 bp, synthetic construct
  source 1..20: mol_type = other DNA
ctcatgcttacacaccacac

SEQ ID NO: 188497 - DNA, 20 bp, synthetic construct
  source 1..20: mol_type = other DNA
actcatgcttacacaccaca

SEQ ID NO: 188498 - DNA, 20 bp, synthetic construct
  source 1..20: mol_type = other DNA
cactcatgcttacacaccac

SEQ ID NO: 188499 - DNA, 20 bp, synthetic construct
  source 1..20: mol_type = other DNA
acactcatgcttacacacca

SEQ ID NO: 188500 - DNA, 20 bp, synthetic construct
  source 1..20: mol_type = other DNA
cacactcatgcttacacacc

SEQ ID NO: 188501 - DNA, 20 bp, synthetic construct
  source 1..20: mol_type = other DNA
acacactcatgcttacacac

SEQ ID NO: 188502 - DNA, 20 bp, synthetic construct
  source 1..20: mol_type = other DNA
tacacactcatgcttacaca

SEQ ID NO: 188503 - DNA, 20 bp, synthetic construct
  source 1..20: mol_type = other DNA
atacacactcatgcttacac

SEQ ID NO: 188504 - DNA, 20 bp, synthetic construct
  source 1..20: mol_type = other DNA
catacacactcatgcttaca

SEQ ID NO: 188505 - DNA, 20 bp, synthetic construct
  source 1..20: mol_type = other DNA
acatacacactcatgcttac

SEQ ID NO: 188506 - DNA, 20 bp, synthetic construct
  source 1..20: mol_type = other DNA
cacatacacactcatgctta

SEQ ID NO: 188507 - DNA, 20 bp, synthetic construct
  source 1..20: mol_type = other DNA
acacatacacactcatgctt

SEQ ID NO: 188508 - DNA, 20 bp, synthetic construct
  source 1..20: mol_type = other DNA
cacacatacacactcatgct

SEQ ID NO: 188509 - DNA, 20 bp, synthetic construct
  source 1..20: mol_type = other DNA
acacacatacacactcatgc

SEQ ID NO: 188510 - DNA, 20 bp, synthetic construct
  source 1..20: mol_type = other DNA
cacacacatacacactcatg

SEQ ID NO: 188511 - DNA, 20 bp, synthetic construct
  source 1..20: mol_type = other DNA
ccacacacatacacactcat

SEQ ID NO: 188512 - DNA, 20 bp, synthetic construct
  source 1..20: mol_type = other DNA
accacacacatacacactca

SEQ ID NO: 188513 - DNA, 20 bp, synthetic construct
  source 1..20: mol_type = other DNA
caccacacacatacacactc

SEQ ID NO: 188514 - DNA, 20 bp, synthetic construct
  source 1..20: mol_type = other DNA
acaccacacacatacacact

SEQ ID NO: 188515 - DNA, 20 bp, synthetic construct
  source 1..20: mol_type = other DNA
cacaccacacacatacacac

SEQ ID NO: 188516 - DNA, 20 bp, synthetic construct
  source 1..20: mol_type = other DNA
ccacaccacacacatacaca

SEQ ID NO: 188517 - DNA, 20 bp, synthetic construct
  source 1..20: mol_type = other DNA
cccacaccacacacatacac

SEQ ID NO: 188518 - DNA, 20 bp, synthetic construct
  source 1..20: mol_type = other DNA
ccccacaccacacacataca

SEQ ID NO: 188519 - DNA, 20 bp, synthetic construct
  source 1..20: mol_type = other DNA
cccccacaccacacacatac

SEQ ID NO: 188520 - DNA, 20 bp, synthetic construct
  source 1..20: mol_type = other DNA
acccccacaccacacacata

SEQ ID NO: 188521 - DNA, 20 bp, synthetic construct
  source 1..20: mol_type = other DNA
cacccccacaccacacacat

SEQ ID NO: 188522 - DNA, 20 bp, synthetic construct
  source 1..20: mol_type = other DNA
acacccccacaccacacaca

SEQ ID NO: 188523 - DNA, 20 bp, synthetic construct
  source 1..20: mol_type = other DNA
cacacccccacaccacacac

SEQ ID NO: 188524 - DNA, 20 bp, synthetic construct
  source 1..20: mol_type = other DNA
acacacccccacaccacaca

SEQ ID NO: 188525 - DNA, 20 bp, synthetic construct
  source 1..20: mol_type = other DNA
cacacacccccacaccacac

SEQ ID NO: 188526 - DNA, 20 bp, synthetic construct
  source 1..20: mol_type = other DNA
gcacacacccccacaccaca

SEQ ID NO: 188527 - DNA, 20 bp, synthetic construct
  source 1..20: mol_type = other DNA
agcacacacccccacaccac

SEQ ID NO: 188528 - DNA, 20 bp, synthetic construct
  source 1..20: mol_type = other DNA
cagcacacacccccacacca

SEQ ID NO: 188529 - DNA, 20 bp, synthetic construct
  source 1..20: mol_type = other DNA
acagcacacacccccacacc

SEQ ID NO: 188530 - DNA, 20 bp, synthetic construct
  source 1..20: mol_type = other DNA
cacagcacacacccccacac

SEQ ID NO: 188531 - DNA, 20 bp, synthetic construct
  source 1..20: mol_type = other DNA
acacagcacacacccccaca

SEQ ID NO: 188532 - DNA, 20 bp, synthetic construct
  source 1..20: mol_type = other DNA
cacacagcacacacccccac

SEQ ID NO: 188533 - DNA, 20 bp, synthetic construct
  source 1..20: mol_type = other DNA
tcacacagcacacaccccca

SEQ ID NO: 188534 - DNA, 20 bp, synthetic construct
  source 1..20: mol_type = other DNA
ctcacacagcacacaccccc

SEQ ID NO: 188535 - DNA, 20 bp, synthetic construct
  source 1..20: mol_type = other DNA
gctcacacagcacacacccc

SEQ ID NO: 188536 - DNA, 20 bp, synthetic construct
  source 1..20: mol_type = other DNA
cgctcacacagcacacaccc

SEQ ID NO: 188537 - DNA, 20 bp, synthetic construct
  source 1..20: mol_type = other DNA
acgctcacacagcacacacc

SEQ ID NO: 188538 - DNA, 20 bp, synthetic construct
  source 1..20: mol_type = other DNA
cacgctcacacagcacacac

SEQ ID NO: 188539 - DNA, 20 bp, synthetic construct
  source 1..20: mol_type = other DNA
acacgctcacacagcacaca

SEQ ID NO: 188540 - DNA, 20 bp, synthetic construct
  source 1..20: mol_type = other DNA
cacacgctcacacagcacac

SEQ ID NO: 188541 - DNA, 20 bp, synthetic construct
  source 1..20: mol_type = other DNA
acacacgctcacacagcaca

SEQ ID NO: 188542 - DNA, 20 bp, synthetic construct
  source 1..20: mol_type = other DNA
cacacacgctcacacagcac

SEQ ID NO: 188543 - DNA, 20 bp, synthetic construct
  source 1..20: mol_type = other DNA
tcacacacgctcacacagca

SEQ ID NO: 188544 - DNA, 20 bp, synthetic construct
  source 1..20: mol_type = other DNA
ctcacacacgctcacacagc

SEQ ID NO: 188545 - DNA, 20 bp, synthetic construct
  source 1..20: mol_type = other DNA
actcacacacgctcacacag

SEQ ID NO: 188546 - DNA, 20 bp, synthetic construct
  source 1..20: mol_type = other DNA
gactcacacacgctcacaca

SEQ ID NO: 188547 - DNA, 20 bp, synthetic construct
  source 1..20: mol_type = other DNA
agactcacacacgctcacac

SEQ ID NO: 188548 - DNA, 20 bp, synthetic construct
  source 1..20: mol_type = other DNA
cagactcacacacgctcaca

SEQ ID NO: 188549 - DNA, 20 bp, synthetic construct
  source 1..20: mol_type = other DNA
acagactcacacacgctcac

SEQ ID NO: 188550 - DNA, 20 bp, synthetic construct
  source 1..20: mol_type = other DNA
cacagactcacacacgctca

SEQ ID NO: 188551 - DNA, 20 bp, synthetic construct
  source 1..20: mol_type = other DNA
acacagactcacacacgctc

SEQ ID NO: 188552 - DNA, 20 bp, synthetic construct
  source 1..20: mol_type = other DNA
cacacagactcacacacgct

SEQ ID NO: 188553 - DNA, 20 bp, synthetic construct
  source 1..20: mol_type = other DNA
acacacagactcacacacgc

SEQ ID NO: 188554 - DNA, 20 bp, synthetic construct
  source 1..20: mol_type = other DNA
cacacacagactcacacacg

SEQ ID NO: 188555 - DNA, 20 bp, synthetic construct
  source 1..20: mol_type = other DNA
acacacacagactcacacac

SEQ ID NO: 188556 - DNA, 20 bp, synthetic construct
  source 1..20: mol_type = other DNA
tacacacacagactcacaca

SEQ ID NO: 188557 - DNA, 20 bp, synthetic construct
  source 1..20: mol_type = other DNA
ctacacacacagactcacac

SEQ ID NO: 188558 - DNA, 20 bp, synthetic construct
  source 1..20: mol_type = other DNA
actacacacacagactcaca

SEQ ID NO: 188559 - DNA, 20 bp, synthetic construct
  source 1..20: mol_type = other DNA
cactacacacacagactcac

SEQ ID NO: 188560 - DNA, 20 bp, synthetic construct
  source 1..20: mol_type = other DNA
acactacacacacagactca

SEQ ID NO: 188561 - DNA, 20 bp, synthetic construct
  source 1..20: mol_type = other DNA
cacactacacacacagactc

SEQ ID NO: 188562 - DNA, 20 bp, synthetic construct
  source 1..20: mol_type = other DNA
acacactacacacacagact

SEQ ID NO: 188563 - DNA, 20 bp, synthetic construct
  source 1..20: mol_type = other DNA
cacacactacacacacagac

SEQ ID NO: 188564 - DNA, 20 bp, synthetic construct
  source 1..20: mol_type = other DNA
acacacactacacacacaga

SEQ ID NO: 188565 - DNA, 20 bp, synthetic construct
  source 1..20: mol_type = other DNA
cacacacactacacacacag

SEQ ID NO: 188566 - DNA, 20 bp, synthetic construct
  source 1..20: mol_type = other DNA
acacacacactacacacaca

SEQ ID NO: 188567 - DNA, 20 bp, synthetic construct
  source 1..20: mol_type = other DNA
cacacacacactacacacac

SEQ ID NO: 188568 - DNA, 20 bp, synthetic construct
  source 1..20: mol_type = other DNA
tcacacacacactacacaca

SEQ ID NO: 188569 - DNA, 20 bp, synthetic construct
  source 1..20: mol_type = other DNA
ttcacacacacactacacac

SEQ ID NO: 188570 - DNA, 20 bp, synthetic construct
  source 1..20: mol_type = other DNA
cttcacacacacactacaca

SEQ ID NO: 188571 - DNA, 20 bp, synthetic construct
  source 1..20: mol_type = other DNA
acttcacacacacactacac

SEQ ID NO: 188572 - DNA, 20 bp, synthetic construct
  source 1..20: mol_type = other DNA
tacttcacacacacactaca

SEQ ID NO: 188573 - DNA, 20 bp, synthetic construct
  source 1..20: mol_type = other DNA
atacttcacacacacactac

SEQ ID NO: 188574 - DNA, 20 bp, synthetic construct
  source 1..20: mol_type = other DNA
catacttcacacacacacta

SEQ ID NO: 188575 - DNA, 20 bp, synthetic construct
  source 1..20: mol_type = other DNA
acatacttcacacacacact

SEQ ID NO: 188576 - DNA, 20 bp, synthetic construct
  source 1..20: mol_type = other DNA
cacatacttcacacacacac

SEQ ID NO: 188577 - DNA, 20 bp, synthetic construct
  source 1..20: mol_type = other DNA
ccacatacttcacacacaca

SEQ ID NO: 188578 - DNA, 20 bp, synthetic construct
  source 1..20: mol_type = other DNA
accacatacttcacacacac

SEQ ID NO: 188579 - DNA, 20 bp, synthetic construct
  source 1..20: mol_type = other DNA
caccacatacttcacacaca

SEQ ID NO: 188580 - DNA, 20 bp, synthetic construct
  source 1..20: mol_type = other DNA
acaccacatacttcacacac

SEQ ID NO: 188581 - DNA, 20 bp, synthetic construct
  source 1..20: mol_type = other DNA
cacaccacatacttcacaca

SEQ ID NO: 188582 - DNA, 20 bp, synthetic construct
  source 1..20: mol_type = other DNA
acacaccacatacttcacac

SEQ ID NO: 188583 - DNA, 20 bp, synthetic construct
  source 1..20: mol_type = other DNA
tacacaccacatacttcaca

SEQ ID NO: 188584 - DNA, 20 bp, synthetic construct
  source 1..20: mol_type = other DNA
atacacaccacatacttcac

SEQ ID NO: 188585 - DNA, 20 bp, synthetic construct
  source 1..20: mol_type = other DNA
catacacaccacatacttca

SEQ ID NO: 188586 - DNA, 20 bp, synthetic construct
  source 1..20: mol_type = other DNA
acatacacaccacatacttc

SEQ ID NO: 188587 - DNA, 20 bp, synthetic construct
  source 1..20: mol_type = other DNA
cacatacacaccacatactt

SEQ ID NO: 188588 - DNA, 20 bp, synthetic construct
  source 1..20: mol_type = other DNA
acacatacacaccacatact

SEQ ID NO: 188589 - DNA, 20 bp, synthetic construct
  source 1..20: mol_type = other DNA
cacacatacacaccacatac

SEQ ID NO: 188590 - DNA, 20 bp, synthetic construct
  source 1..20: mol_type = other DNA
tcacacatacacaccacata

SEQ ID NO: 188591 - DNA, 20 bp, synthetic construct
  source 1..20: mol_type = other DNA
gtcacacatacacaccacat

SEQ ID NO: 188592 - DNA, 20 bp, synthetic construct
  source 1..20: mol_type = other DNA
cgtcacacatacacaccaca

SEQ ID NO: 188593 - DNA, 20 bp, synthetic construct
  source 1..20: mol_type = other DNA
acgtcacacatacacaccac

SEQ ID NO: 188594 - DNA, 20 bp, synthetic construct
  source 1..20: mol_type = other DNA
cacgtcacacatacacacca

SEQ ID NO: 188595 - DNA, 20 bp, synthetic construct
  source 1..20: mol_type = other DNA
tcacgtcacacatacacacc

SEQ ID NO: 188596 - DNA, 20 bp, synthetic construct
  source 1..20: mol_type = other DNA
ctcacgtcacacatacacac

SEQ ID NO: 188597 - DNA, 20 bp, synthetic construct
  source 1..20: mol_type = other DNA
cctcacgtcacacatacaca

SEQ ID NO: 188598 - DNA, 20 bp, synthetic construct
  source 1..20: mol_type = other DNA
acctcacgtcacacatacac

SEQ ID NO: 188599 - DNA, 20 bp, synthetic construct
  source 1..20: mol_type = other DNA
cacctcacgtcacacataca

SEQ ID NO: 188600 - DNA, 20 bp, synthetic construct
  source 1..20: mol_type = other DNA
acacctcacgtcacacatac

SEQ ID NO: 188601 - DNA, 20 bp, synthetic construct
  source 1..20: mol_type = other DNA
cacacctcacgtcacacata

SEQ ID NO: 188602 - DNA, 20 bp, synthetic construct
  source 1..20: mol_type = other DNA
acacacctcacgtcacacat

SEQ ID NO: 188603 - DNA, 20 bp, synthetic construct
  source 1..20: mol_type = other DNA
cacacacctcacgtcacaca

SEQ ID NO: 188604 - DNA, 20 bp, synthetic construct
  source 1..20: mol_type = other DNA
acacacacctcacgtcacac

SEQ ID NO: 188605 - DNA, 20 bp, synthetic construct
  source 1..20: mol_type = other DNA
cacacacacctcacgtcaca

SEQ ID NO: 188606 - DNA, 20 bp, synthetic construct
  source 1..20: mol_type = other DNA
ccacacacacctcacgtcac

SEQ ID NO: 188607 - DNA, 20 bp, synthetic construct
  source 1..20: mol_type = other DNA
accacacacacctcacgtca

SEQ ID NO: 188608 - DNA, 20 bp, synthetic construct
  source 1..20: mol_type = other DNA
caccacacacacctcacgtc

SEQ ID NO: 188609 - DNA, 20 bp, synthetic construct
  source 1..20: mol_type = other DNA
acaccacacacacctcacgt

SEQ ID NO: 188610 - DNA, 20 bp, synthetic construct
  source 1..20: mol_type = other DNA
cacaccacacacacctcacg

SEQ ID NO: 188611 - DNA, 20 bp, synthetic construct
  source 1..20: mol_type = other DNA
acacaccacacacacctcac

SEQ ID NO: 188612 - DNA, 20 bp, synthetic construct
  source 1..20: mol_type = other DNA
cacacaccacacacacctca

SEQ ID NO: 188613 - DNA, 20 bp, synthetic construct
  source 1..20: mol_type = other DNA
tcacacaccacacacacctc

SEQ ID NO: 188614 - DNA, 20 bp, synthetic construct
  source 1..20: mol_type = other DNA
ctcacacaccacacacacct

SEQ ID NO: 188615 - DNA, 20 bp, synthetic construct
  source 1..20: mol_type = other DNA
actcacacaccacacacacc

SEQ ID NO: 188616 - DNA, 20 bp, synthetic construct
  source 1..20: mol_type = other DNA
aactcacacaccacacacac

SEQ ID NO: 188617 - DNA, 20 bp, synthetic construct
  source 1..20: mol_type = other DNA
caactcacacaccacacaca

SEQ ID NO: 188618 - DNA, 20 bp, synthetic construct
  source 1..20: mol_type = other DNA
acaactcacacaccacacac

SEQ ID NO: 188619 - DNA, 20 bp, synthetic construct
  source 1..20: mol_type = other DNA
cacaactcacacaccacaca

SEQ ID NO: 188620 - DNA, 20 bp, synthetic construct
  source 1..20: mol_type = other DNA
acacaactcacacaccacac

SEQ ID NO: 188621 - DNA, 20 bp, synthetic construct
  source 1..20: mol_type = other DNA
tacacaactcacacaccaca

SEQ ID NO: 188622 - DNA, 20 bp, synthetic construct
  source 1..20: mol_type = other DNA
atacacaactcacacaccac

SEQ ID NO: 188623 - DNA, 20 bp, synthetic construct
  source 1..20: mol_type = other DNA
catacacaactcacacacca

SEQ ID NO: 188624 - DNA, 20 bp, synthetic construct
  source 1..20: mol_type = other DNA
ccatacacaactcacacacc

SEQ ID NO: 188625 - DNA, 20 bp, synthetic construct
  source 1..20: mol_type = other DNA
accatacacaactcacacac

SEQ ID NO: 188626 - DNA, 20 bp, synthetic construct
  source 1..20: mol_type = other DNA
caccatacacaactcacaca

SEQ ID NO: 188627 - DNA, 20 bp, synthetic construct
  source 1..20: mol_type = other DNA
acaccatacacaactcacac

SEQ ID NO: 188628 - DNA, 20 bp, synthetic construct
  source 1..20: mol_type = other DNA
cacaccatacacaactcaca

SEQ ID NO: 188629 - DNA, 20 bp, synthetic construct
  source 1..20: mol_type = other DNA
acacaccatacacaactcac

SEQ ID NO: 188630 - DNA, 20 bp, synthetic construct
  source 1..20: mol_type = other DNA
cacacaccatacacaactca

SEQ ID NO: 188631 - DNA, 20 bp, synthetic construct
  source 1..20: mol_type = other DNA
gcacacaccatacacaactc

SEQ ID NO: 188632 - DNA, 20 bp, synthetic construct
  source 1..20: mol_type = other DNA
tgcacacaccatacacaact

SEQ ID NO: 188633 - DNA, 20 bp, synthetic construct
  source 1..20: mol_type = other DNA
atgcacacaccatacacaac

SEQ ID NO: 188634 - DNA, 20 bp, synthetic construct
  source 1..20: mol_type = other DNA
catgcacacaccatacacaa

SEQ ID NO: 188635 - DNA, 20 bp, synthetic construct
  source 1..20: mol_type = other DNA
tcatgcacacaccatacaca

SEQ ID NO: 188636 - DNA, 20 bp, synthetic construct
  source 1..20: mol_type = other DNA
ctcatgcacacaccatacac

SEQ ID NO: 188637 - DNA, 20 bp, synthetic construct
  source 1..20: mol_type = other DNA
gctcatgcacacaccataca

SEQ ID NO: 188638 - DNA, 20 bp, synthetic construct
  source 1..20: mol_type = other DNA
tgctcatgcacacaccatac

SEQ ID NO: 188639 - DNA, 20 bp, synthetic construct
  source 1..20: mol_type = other DNA
atgctcatgcacacaccata

SEQ ID NO: 188640 - DNA, 20 bp, synthetic construct
  source 1..20: mol_type = other DNA
catgctcatgcacacaccat

SEQ ID NO: 188641 - DNA, 20 bp, synthetic construct
  source 1..20: mol_type = other DNA
acatgctcatgcacacacca

SEQ ID NO: 188642 - DNA, 20 bp, synthetic construct
  source 1..20: mol_type = other DNA
cacatgctcatgcacacacc

SEQ ID NO: 188643 - DNA, 20 bp, synthetic construct
  source 1..20: mol_type = other DNA
acacatgctcatgcacacac

SEQ ID NO: 188644 - DNA, 20 bp, synthetic construct
  source 1..20: mol_type = other DNA
cacacatgctcatgcacaca

SEQ ID NO: 188645 - DNA, 20 bp, synthetic construct
  source 1..20: mol_type = other DNA
acacacatgctcatgcacac

SEQ ID NO: 188646 - DNA, 20 bp, synthetic construct
  source 1..20: mol_type = other DNA
cacacacatgctcatgcaca

SEQ ID NO: 188647 - DNA, 20 bp, synthetic construct
  source 1..20: mol_type = other DNA
ccacacacatgctcatgcac

SEQ ID NO: 188648 - DNA, 20 bp, synthetic construct
  source 1..20: mol_type = other DNA
cccacacacatgctcatgca

SEQ ID NO: 188649 - DNA, 20 bp, synthetic construct
  source 1..20: mol_type = other DNA
gcccacacacatgctcatgc

SEQ ID NO: 188650 - DNA, 20 bp, synthetic construct
  source 1..20: mol_type = other DNA
tgcccacacacatgctcatg

SEQ ID NO: 188651 - DNA, 20 bp, synthetic construct
  source 1..20: mol_type = other DNA
atgcccacacacatgctcat

SEQ ID NO: 188652 - DNA, 20 bp, synthetic construct
  source 1..20: mol_type = other DNA
catgcccacacacatgctca

SEQ ID NO: 188653 - DNA, 20 bp, synthetic construct
  source 1..20: mol_type = other DNA
acatgcccacacacatgctc

SEQ ID NO: 188654 - DNA, 20 bp, synthetic construct
  source 1..20: mol_type = other DNA
cacatgcccacacacatgct

SEQ ID NO: 188655 - DNA, 20 bp, synthetic construct
  source 1..20: mol_type = other DNA
tcacatgcccacacacatgc

SEQ ID NO: 188656 - DNA, 20 bp, synthetic construct
  source 1..20: mol_type = other DNA
atcacatgcccacacacatg

SEQ ID NO: 188657 - DNA, 20 bp, synthetic construct
  source 1..20: mol_type = other DNA
catcacatgcccacacacat

SEQ ID NO: 188658 - DNA, 20 bp, synthetic construct
  source 1..20: mol_type = other DNA
acatcacatgcccacacaca

SEQ ID NO: 188659 - DNA, 20 bp, synthetic construct
  source 1..20: mol_type = other DNA
cacatcacatgcccacacac

SEQ ID NO: 188660 - DNA, 20 bp, synthetic construct
  source 1..20: mol_type = other DNA
acacatcacatgcccacaca

SEQ ID NO: 188661 - DNA, 20 bp, synthetic construct
  source 1..20: mol_type = other DNA
cacacatcacatgcccacac

SEQ ID NO: 188662 - DNA, 20 bp, synthetic construct
  source 1..20: mol_type = other DNA
acacacatcacatgcccaca

SEQ ID NO: 188663 - DNA, 20 bp, synthetic construct
  source 1..20: mol_type = other DNA
cacacacatcacatgcccac

SEQ ID NO: 188664 - DNA, 20 bp, synthetic construct
  source 1..20: mol_type = other DNA
acacacacatcacatgccca

SEQ ID NO: 188665 - DNA, 20 bp, synthetic construct
  source 1..20: mol_type = other DNA
cacacacacatcacatgccc

SEQ ID NO: 188666 - DNA, 20 bp, synthetic construct
  source 1..20: mol_type = other DNA
ccacacacacatcacatgcc

SEQ ID NO: 188667 - DNA, 20 bp, synthetic construct
  source 1..20: mol_type = other DNA
accacacacacatcacatgc

SEQ ID NO: 188668 - DNA, 20 bp, synthetic construct
  source 1..20: mol_type = other DNA
caccacacacacatcacatg

SEQ ID NO: 188669 - DNA, 20 bp, synthetic construct
  source 1..20: mol_type = other DNA
acaccacacacacatcacat

SEQ ID NO: 188670 - DNA, 20 bp, synthetic construct
  source 1..20: mol_type = other DNA
cacaccacacacacatcaca

SEQ ID NO: 188671 - DNA, 20 bp, synthetic construct
  source 1..20: mol_type = other DNA
acacaccacacacacatcac

SEQ ID NO: 188672 - DNA, 20 bp, synthetic construct
  source 1..20: mol_type = other DNA
tacacaccacacacacatca

SEQ ID NO: 188673 - DNA, 20 bp, synthetic construct
  source 1..20: mol_type = other DNA
ttacacaccacacacacatc

SEQ ID NO: 188674 - DNA, 20 bp, synthetic construct
  source 1..20: mol_type = other DNA
cttacacaccacacacacat

SEQ ID NO: 188675 - DNA, 20 bp, synthetic construct
  source 1..20: mol_type = other DNA
gcttacacaccacacacaca

SEQ ID NO: 188676 - DNA, 20 bp, synthetic construct
  source 1..20: mol_type = other DNA
tgcttacacaccacacacac

SEQ ID NO: 188677 - DNA, 20 bp, synthetic construct
  source 1..20: mol_type = other DNA
atgcttacacaccacacaca

SEQ ID NO: 188678 - DNA, 20 bp, synthetic construct
  source 1..20: mol_type = other DNA
catgcttacacaccacacac

SEQ ID NO: 188679 - DNA, 20 bp, synthetic construct
  source 1..20: mol_type = other DNA
acatgcttacacaccacaca

SEQ ID NO: 188680 - DNA, 20 bp, synthetic construct
  source 1..20: mol_type = other DNA
cacatgcttacacaccacac

SEQ ID NO: 188681 - DNA, 20 bp, synthetic construct
  source 1..20: mol_type = other DNA
acacatgcttacacaccaca

SEQ ID NO: 188682 - DNA, 20 bp, synthetic construct
  source 1..20: mol_type = other DNA
cacacatgcttacacaccac

SEQ ID NO: 188683 - DNA, 20 bp, synthetic construct
  source 1..20: mol_type = other DNA
tcacacatgcttacacacca

SEQ ID NO: 188684 - DNA, 20 bp, synthetic construct
  source 1..20: mol_type = other DNA
ctcacacatgcttacacacc

SEQ ID NO: 188685 - DNA, 20 bp, synthetic construct
  source 1..20: mol_type = other DNA
actcacacatgcttacacac

SEQ ID NO: 188686 - DNA, 20 bp, synthetic construct
  source 1..20: mol_type = other DNA
cactcacacatgcttacaca

SEQ ID NO: 188687 - DNA, 20 bp, synthetic construct
  source 1..20: mol_type = other DNA
acactcacacatgcttacac

SEQ ID NO: 188688 - DNA, 20 bp, synthetic construct
  source 1..20: mol_type = other DNA
cacactcacacatgcttaca

SEQ ID NO: 188689 - DNA, 20 bp, synthetic construct
  source 1..20: mol_type = other DNA
acacactcacacatgcttac

SEQ ID NO: 188690 - DNA, 20 bp, synthetic construct
  source 1..20: mol_type = other DNA
tacacactcacacatgctta

SEQ ID NO: 188691 - DNA, 20 bp, synthetic construct
  source 1..20: mol_type = other DNA
atacacactcacacatgctt

SEQ ID NO: 188692 - DNA, 20 bp, synthetic construct
  source 1..20: mol_type = other DNA
catacacactcacacatgct

SEQ ID NO: 188693 - DNA, 20 bp, synthetic construct
  source 1..20: mol_type = other DNA
acatacacactcacacatgc

SEQ ID NO: 188694 - DNA, 20 bp, synthetic construct
  source 1..20: mol_type = other DNA
aacatacacactcacacatg

SEQ ID NO: 188695 - DNA, 20 bp, synthetic construct
  source 1..20: mol_type = other DNA
aaacatacacactcacacat

SEQ ID NO: 188696 - DNA, 20 bp, synthetic construct
  source 1..20: mol_type = other DNA
caaacatacacactcacaca

SEQ ID NO: 188697 - DNA, 20 bp, synthetic construct
  source 1..20: mol_type = other DNA
tcaaacatacacactcacac

SEQ ID NO: 188698 - DNA, 20 bp, synthetic construct
  source 1..20: mol_type = other DNA
ctcaaacatacacactcaca

SEQ ID NO: 188699 - DNA, 20 bp, synthetic construct
  source 1..20: mol_type = other DNA
gctcaaacatacacactcac

SEQ ID NO: 188700 - DNA, 20 bp, synthetic construct
  source 1..20: mol_type = other DNA
tgctcaaacatacacactca

SEQ ID NO: 188701 - DNA, 20 bp, synthetic construct
  source 1..20: mol_type = other DNA
atgctcaaacatacacactc

SEQ ID NO: 188702 - DNA, 20 bp, synthetic construct
  source 1..20: mol_type = other DNA
catgctcaaacatacacact

SEQ ID NO: 188703 - DNA, 20 bp, synthetic construct
  source 1..20: mol_type = other DNA
acatgctcaaacatacacac

SEQ ID NO: 188704 - DNA, 20 bp, synthetic construct
  source 1..20: mol_type = other DNA
cacatgctcaaacatacaca

SEQ ID NO: 188705 - DNA, 20 bp, synthetic construct
  source 1..20: mol_type = other DNA
acacatgctcaaacatacac

SEQ ID NO: 188706 - DNA, 20 bp, synthetic construct
  source 1..20: mol_type = other DNA
cacacatgctcaaacataca

SEQ ID NO: 188707 - DNA, 20 bp, synthetic construct
  source 1..20: mol_type = other DNA
ccacacatgctcaaacatac

SEQ ID NO: 188708 - DNA, 20 bp, synthetic construct
  source 1..20: mol_type = other DNA
accacacatgctcaaacata

SEQ ID NO: 188709 - DNA, 20 bp, synthetic construct
  source 1..20: mol_type = other DNA
caccacacatgctcaaacat

SEQ ID NO: 188710 - DNA, 20 bp, synthetic construct
  source 1..20: mol_type = other DNA
acaccacacatgctcaaaca

SEQ ID NO: 188711 - DNA, 20 bp, synthetic construct
  source 1..20: mol_type = other DNA
cacaccacacatgctcaaac

SEQ ID NO: 188712 - DNA, 20 bp, synthetic construct
  source 1..20: mol_type = other DNA
acacaccacacatgctcaaa

SEQ ID NO: 188713 - DNA, 20 bp, synthetic construct
  source 1..20: mol_type = other DNA
aacacaccacacatgctcaa

SEQ ID NO: 188714 - DNA, 20 bp, synthetic construct
  source 1..20: mol_type = other DNA
caacacaccacacatgctca

SEQ ID NO: 188715 - DNA, 20 bp, synthetic construct
  source 1..20: mol_type = other DNA
acaacacaccacacatgctc

SEQ ID NO: 188716 - DNA, 20 bp, synthetic construct
  source 1..20: mol_type = other DNA
cacaacacaccacacatgct

SEQ ID NO: 188717 - DNA, 20 bp, synthetic construct
  source 1..20: mol_type = other DNA
tcacaacacaccacacatgc

SEQ ID NO: 188718 - DNA, 20 bp, synthetic construct
  source 1..20: mol_type = other DNA
atcacaacacaccacacatg

SEQ ID NO: 188719 - DNA, 20 bp, synthetic construct
  source 1..20: mol_type = other DNA
tatcacaacacaccacacat

SEQ ID NO: 188720 - DNA, 20 bp, synthetic construct
  source 1..20: mol_type = other DNA
atatcacaacacaccacaca

SEQ ID NO: 188721 - DNA, 20 bp, synthetic construct
  source 1..20: mol_type = other DNA
catatcacaacacaccacac

SEQ ID NO: 188722 - DNA, 20 bp, synthetic construct
  source 1..20: mol_type = other DNA
acatatcacaacacaccaca

SEQ ID NO: 188723 - DNA, 20 bp, synthetic construct
  source 1..20: mol_type = other DNA
cacatatcacaacacaccac

SEQ ID NO: 188724 - DNA, 20 bp, synthetic construct
  source 1..20: mol_type = other DNA
acacatatcacaacacacca

SEQ ID NO: 188725 - DNA, 20 bp, synthetic construct
  source 1..20: mol_type = other DNA
cacacatatcacaacacacc

SEQ ID NO: 188726 - DNA, 20 bp, synthetic construct
  source 1..20: mol_type = other DNA
acacacatatcacaacacac

SEQ ID NO: 188727 - DNA, 20 bp, synthetic construct
  source 1..20: mol_type = other DNA
cacacacatatcacaacaca

SEQ ID NO: 188728 - DNA, 20 bp, synthetic construct
  source 1..20: mol_type = other DNA
ccacacacatatcacaacac

SEQ ID NO: 188729 - DNA, 20 bp, synthetic construct
  source 1..20: mol_type = other DNA
accacacacatatcacaaca

SEQ ID NO: 188730 - DNA, 20 bp, synthetic construct
  source 1..20: mol_type = other DNA
caccacacacatatcacaac

SEQ ID NO: 188731 - DNA, 20 bp, synthetic construct
  source 1..20: mol_type = other DNA
acaccacacacatatcacaa

SEQ ID NO: 188732 - DNA, 20 bp, synthetic construct
  source 1..20: mol_type = other DNA
cacaccacacacatatcaca

SEQ ID NO: 188733 - DNA, 20 bp, synthetic construct
  source 1..20: mol_type = other DNA
acacaccacacacatatcac

SEQ ID NO: 188734 - DNA, 20 bp, synthetic construct
  source 1..20: mol_type = other DNA
cacacaccacacacatatca

SEQ ID NO: 188735 - DNA, 20 bp, synthetic construct
  source 1..20: mol_type = other DNA
tcacacaccacacacatatc

SEQ ID NO: 188736 - DNA, 20 bp, synthetic construct
  source 1..20: mol_type = other DNA
ctcacacaccacacacatat

SEQ ID NO: 188737 - DNA, 20 bp, synthetic construct
  source 1..20: mol_type = other DNA
gctcacacaccacacacata

SEQ ID NO: 188738 - DNA, 20 bp, synthetic construct
  source 1..20: mol_type = other DNA
tgctcacacaccacacacat

SEQ ID NO: 188739 - DNA, 20 bp, synthetic construct
  source 1..20: mol_type = other DNA
atgctcacacaccacacaca

SEQ ID NO: 188740 - DNA, 20 bp, synthetic construct
  source 1..20: mol_type = other DNA
catgctcacacaccacacac

SEQ ID NO: 188741 - DNA, 20 bp, synthetic construct
  source 1..20: mol_type = other DNA
acatgctcacacaccacaca

SEQ ID NO: 188742 - DNA, 20 bp, synthetic construct
  source 1..20: mol_type = other DNA
cacatgctcacacaccacac

SEQ ID NO: 188743 - DNA, 20 bp, synthetic construct
  source 1..20: mol_type = other DNA
acacatgctcacacaccaca

SEQ ID NO: 188744 - DNA, 20 bp, synthetic construct
  source 1..20: mol_type = other DNA
cacacatgctcacacaccac

SEQ ID NO: 188745 - DNA, 20 bp, synthetic construct
  source 1..20: mol_type = other DNA
acacacatgctcacacacca

SEQ ID NO: 188746 - DNA, 20 bp, synthetic construct
  source 1..20: mol_type = other DNA
cacacacatgctcacacacc

SEQ ID NO: 188747 - DNA, 20 bp, synthetic construct
  source 1..20: mol_type = other DNA
acacacacatgctcacacac

SEQ ID NO: 188748 - DNA, 20 bp, synthetic construct
  source 1..20: mol_type = other DNA
cacacacacatgctcacaca

SEQ ID NO: 188749 - DNA, 20 bp, synthetic construct
  source 1..20: mol_type = other DNA
tcacacacacatgctcacac

SEQ ID NO: 188750 - DNA, 20 bp, synthetic construct
  source 1..20: mol_type = other DNA
atcacacacacatgctcaca

SEQ ID NO: 188751 - DNA, 20 bp, synthetic construct
  source 1..20: mol_type = other DNA
catcacacacacatgctcac

SEQ ID NO: 188752 - DNA, 20 bp, synthetic construct
  source 1..20: mol_type = other DNA
acatcacacacacatgctca

SEQ ID NO: 188753 - DNA, 20 bp, synthetic construct
  source 1..20: mol_type = other DNA
cacatcacacacacatgctc

SEQ ID NO: 188754 - DNA, 20 bp, synthetic construct
  source 1..20: mol_type = other DNA
acacatcacacacacatgct

SEQ ID NO: 188755 - DNA, 20 bp, synthetic construct
  source 1..20: mol_type = other DNA
gacacatcacacacacatgc

SEQ ID NO: 188756 - DNA, 20 bp, synthetic construct
  source 1..20: mol_type = other DNA
agacacatcacacacacatg

SEQ ID NO: 188757 - DNA, 20 bp, synthetic construct
  source 1..20: mol_type = other DNA
cagacacatcacacacacat

SEQ ID NO: 188758 - DNA, 20 bp, synthetic construct
  source 1..20: mol_type = other DNA
acagacacatcacacacaca

SEQ ID NO: 188759 - DNA, 20 bp, synthetic construct
  source 1..20: mol_type = other DNA
cacagacacatcacacacac

SEQ ID NO: 188760 - DNA, 20 bp, synthetic construct
  source 1..20: mol_type = other DNA
acacagacacatcacacaca

SEQ ID NO: 188761 - DNA, 20 bp, synthetic construct
  source 1..20: mol_type = other DNA
cacacagacacatcacacac

SEQ ID NO: 188762 - DNA, 20 bp, synthetic construct
  source 1..20: mol_type = other DNA
acacacagacacatcacaca

SEQ ID NO: 188763 - DNA, 20 bp, synthetic construct
  source 1..20: mol_type = other DNA
cacacacagacacatcacac

SEQ ID NO: 188764 - DNA, 20 bp, synthetic construct
  source 1..20: mol_type = other DNA
ccacacacagacacatcaca

SEQ ID NO: 188765 - DNA, 20 bp, synthetic construct
  source 1..20: mol_type = other DNA
accacacacagacacatcac

SEQ ID NO: 188766 - DNA, 20 bp, synthetic construct
  source 1..20: mol_type = other DNA
caccacacacagacacatca

SEQ ID NO: 188767 - DNA, 20 bp, synthetic construct
  source 1..20: mol_type = other DNA
acaccacacacagacacatc

SEQ ID NO: 188768 - DNA, 20 bp, synthetic construct
  source 1..20: mol_type = other DNA
cacaccacacacagacacat

SEQ ID NO: 188769 - DNA, 20 bp, synthetic construct
  source 1..20: mol_type = other DNA
acacaccacacacagacaca

SEQ ID NO: 188770 - DNA, 20 bp, synthetic construct
  source 1..20: mol_type = other DNA
cacacaccacacacagacac

SEQ ID NO: 188771 - DNA, 20 bp, synthetic construct
  source 1..20: mol_type = other DNA
acacacaccacacacagaca

SEQ ID NO: 188772 - DNA, 20 bp, synthetic construct
  source 1..20: mol_type = other DNA
cacacacaccacacacagac

SEQ ID NO: 188773 - DNA, 20 bp, synthetic construct
  source 1..20: mol_type = other DNA
tcacacacaccacacacaga

SEQ ID NO: 188774 - DNA, 20 bp, synthetic construct
  source 1..20: mol_type = other DNA
ctcacacacaccacacacag

SEQ ID NO: 188775 - DNA, 20 bp, synthetic construct
  source 1..20: mol_type = other DNA
gctcacacacaccacacaca

SEQ ID NO: 188776 - DNA, 20 bp, synthetic construct
  source 1..20: mol_type = other DNA
tgctcacacacaccacacac

SEQ ID NO: 188777 - DNA, 20 bp, synthetic construct
  source 1..20: mol_type = other DNA
atgctcacacacaccacaca

SEQ ID NO: 188778 - DNA, 20 bp, synthetic construct
  source 1..20: mol_type = other DNA
catgctcacacacaccacac

SEQ ID NO: 188779 - DNA, 20 bp, synthetic construct
  source 1..20: mol_type = other DNA
acatgctcacacacaccaca

SEQ ID NO: 188780 - DNA, 20 bp, synthetic construct
  source 1..20: mol_type = other DNA
cacatgctcacacacaccac

SEQ ID NO: 188781 - DNA, 20 bp, synthetic construct
  source 1..20: mol_type = other DNA
acacatgctcacacacacca

SEQ ID NO: 188782 - DNA, 20 bp, synthetic construct
  source 1..20: mol_type = other DNA
cacacatgctcacacacacc

SEQ ID NO: 188783 - DNA, 20 bp, synthetic construct
  source 1..20: mol_type = other DNA
acacacatgctcacacacac

SEQ ID NO: 188784 - DNA, 20 bp, synthetic construct
  source 1..20: mol_type = other DNA
aacacacatgctcacacaca

SEQ ID NO: 188785 - DNA, 20 bp, synthetic construct
  source 1..20: mol_type = other DNA
caacacacatgctcacacac

SEQ ID NO: 188786 - DNA, 20 bp, synthetic construct
  source 1..20: mol_type = other DNA
acaacacacatgctcacaca

SEQ ID NO: 188787 - DNA, 20 bp, synthetic construct
  source 1..20: mol_type = other DNA
cacaacacacatgctcacac

SEQ ID NO: 188788 - DNA, 20 bp, synthetic construct
  source 1..20: mol_type = other DNA
acacaacacacatgctcaca

SEQ ID NO: 188789 - DNA, 20 bp, synthetic construct
  source 1..20: mol_type = other DNA
cacacaacacacatgctcac

SEQ ID NO: 188790 - DNA, 20 bp, synthetic construct
  source 1..20: mol_type = other DNA
acacacaacacacatgctca

SEQ ID NO: 188791 - DNA, 20 bp, synthetic construct
  source 1..20: mol_type = other DNA
cacacacaacacacatgctc

SEQ ID NO: 188792 - DNA, 20 bp, synthetic construct
  source 1..20: mol_type = other DNA
acacacacaacacacatgct

SEQ ID NO: 188793 - DNA, 20 bp, synthetic construct
  source 1..20: mol_type = other DNA
cacacacacaacacacatgc

SEQ ID NO: 188794 - DNA, 20 bp, synthetic construct
  source 1..20: mol_type = other DNA
ccacacacacaacacacatg

SEQ ID NO: 188795 - DNA, 20 bp, synthetic construct
  source 1..20: mol_type = other DNA
accacacacacaacacacat

SEQ ID NO: 188796 - DNA, 20 bp, synthetic construct
  source 1..20: mol_type = other DNA
caccacacacacaacacaca

SEQ ID NO: 188797 - DNA, 20 bp, synthetic construct
  source 1..20: mol_type = other DNA
gcaccacacacacaacacac

SEQ ID NO: 188798 - DNA, 20 bp, synthetic construct
  source 1..20: mol_type = other DNA
tgcaccacacacacaacaca

SEQ ID NO: 188799 - DNA, 20 bp, synthetic construct
  source 1..20: mol_type = other DNA
atgcaccacacacacaacac

SEQ ID NO: 188800 - DNA, 20 bp, synthetic construct
  source 1..20: mol_type = other DNA
catgcaccacacacacaaca

SEQ ID NO: 188801 - DNA, 20 bp, synthetic construct
  source 1..20: mol_type = other DNA
acatgcaccacacacacaac

SEQ ID NO: 188802 - DNA, 20 bp, synthetic construct
  source 1..20: mol_type = other DNA
cacatgcaccacacacacaa

SEQ ID NO: 188803 - DNA, 20 bp, synthetic construct
  source 1..20: mol_type = other DNA
acacatgcaccacacacaca

SEQ ID NO: 188804 - DNA, 20 bp, synthetic construct
  source 1..20: mol_type = other DNA
cacacatgcaccacacacac

SEQ ID NO: 188805 - DNA, 20 bp, synthetic construct
  source 1..20: mol_type = other DNA
acacacatgcaccacacaca

SEQ ID NO: 188806 - DNA, 20 bp, synthetic construct
  source 1..20: mol_type = other DNA
cacacacatgcaccacacac

SEQ ID NO: 188807 - DNA, 20 bp, synthetic construct
  source 1..20: mol_type = other DNA
ccacacacatgcaccacaca

SEQ ID NO: 188808 - DNA, 20 bp, synthetic construct
  source 1..20: mol_type = other DNA
gccacacacatgcaccacac

SEQ ID NO: 188809 - DNA, 20 bp, synthetic construct
  source 1..20: mol_type = other DNA
cgccacacacatgcaccaca

SEQ ID NO: 188810 - DNA, 20 bp, synthetic construct
  source 1..20: mol_type = other DNA
acgccacacacatgcaccac

SEQ ID NO: 188811 - DNA, 20 bp, synthetic construct
  source 1..20: mol_type = other DNA
cacgccacacacatgcacca

SEQ ID NO: 188812 - DNA, 20 bp, synthetic construct
  source 1..20: mol_type = other DNA
acacgccacacacatgcacc

SEQ ID NO: 188813 - DNA, 20 bp, synthetic construct
  source 1..20: mol_type = other DNA
cacacgccacacacatgcac

SEQ ID NO: 188814 - DNA, 20 bp, synthetic construct
  source 1..20: mol_type = other DNA
tcacacgccacacacatgca

SEQ ID NO: 188815 - DNA, 20 bp, synthetic construct
  source 1..20: mol_type = other DNA
ctcacacgccacacacatgc

SEQ ID NO: 188816 - DNA, 20 bp, synthetic construct
  source 1..20: mol_type = other DNA
gctcacacgccacacacatg

SEQ ID NO: 188817 - DNA, 20 bp, synthetic construct
  source 1..20: mol_type = other DNA
cgctcacacgccacacacat

SEQ ID NO: 188818 - DNA, 20 bp, synthetic construct
  source 1..20: mol_type = other DNA
acgctcacacgccacacaca

SEQ ID NO: 188819 - DNA, 20 bp, synthetic construct
  source 1..20: mol_type = other DNA
cacgctcacacgccacacac

SEQ ID NO: 188820 - DNA, 20 bp, synthetic construct
  source 1..20: mol_type = other DNA
acacgctcacacgccacaca

SEQ ID NO: 188821 - DNA, 20 bp, synthetic construct
  source 1..20: mol_type = other DNA
cacacgctcacacgccacac

SEQ ID NO: 188822 - DNA, 20 bp, synthetic construct
  source 1..20: mol_type = other DNA
acacacgctcacacgccaca

SEQ ID NO: 188823 - DNA, 20 bp, synthetic construct
  source 1..20: mol_type = other DNA
cacacacgctcacacgccac

SEQ ID NO: 188824 - DNA, 20 bp, synthetic construct
  source 1..20: mol_type = other DNA
acacacacgctcacacgcca

SEQ ID NO: 188825 - DNA, 20 bp, synthetic construct
  source 1..20: mol_type = other DNA
cacacacacgctcacacgcc

SEQ ID NO: 188826 - DNA, 20 bp, synthetic construct
  source 1..20: mol_type = other DNA
gcacacacacgctcacacgc

SEQ ID NO: 188827 - DNA, 20 bp, synthetic construct
  source 1..20: mol_type = other DNA
tgcacacacacgctcacacg

SEQ ID NO: 188828 - DNA, 20 bp, synthetic construct
  source 1..20: mol_type = other DNA
atgcacacacacgctcacac

SEQ ID NO: 188829 - DNA, 20 bp, synthetic construct
  source 1..20: mol_type = other DNA
aatgcacacacacgctcaca

SEQ ID NO: 188830 - DNA, 20 bp, synthetic construct
  source 1..20: mol_type = other DNA
caatgcacacacacgctcac

SEQ ID NO: 188831 - DNA, 20 bp, synthetic construct
  source 1..20: mol_type = other DNA
acaatgcacacacacgctca

SEQ ID NO: 188832 - DNA, 20 bp, synthetic construct
  source 1..20: mol_type = other DNA
cacaatgcacacacacgctc

SEQ ID NO: 188833 - DNA, 20 bp, synthetic construct
  source 1..20: mol_type = other DNA
acacaatgcacacacacgct

SEQ ID NO: 188834 - DNA, 20 bp, synthetic construct
  source 1..20: mol_type = other DNA
gacacaatgcacacacacgc

SEQ ID NO: 188835 - DNA, 20 bp, synthetic construct
  source 1..20: mol_type = other DNA
agacacaatgcacacacacg

SEQ ID NO: 188836 - DNA, 20 bp, synthetic construct
  source 1..20: mol_type = other DNA
cagacacaatgcacacacac

SEQ ID NO: 188837 - DNA, 20 bp, synthetic construct
  source 1..20: mol_type = other DNA
acagacacaatgcacacaca

SEQ ID NO: 188838 - DNA, 20 bp, synthetic construct
  source 1..20: mol_type = other DNA
cacagacacaatgcacacac

SEQ ID NO: 188839 - DNA, 20 bp, synthetic construct
  source 1..20: mol_type = other DNA
tcacagacacaatgcacaca

SEQ ID NO: 188840 - DNA, 20 bp, synthetic construct
  source 1..20: mol_type = other DNA
ctcacagacacaatgcacac

SEQ ID NO: 188841 - DNA, 20 bp, synthetic construct
  source 1..20: mol_type = other DNA
gctcacagacacaatgcaca

SEQ ID NO: 188842 - DNA, 20 bp, synthetic construct
  source 1..20: mol_type = other DNA
tgctcacagacacaatgcac

SEQ ID NO: 188843 - DNA, 20 bp, synthetic construct
  source 1..20: mol_type = other DNA
atgctcacagacacaatgca

SEQ ID NO: 188844 - DNA, 20 bp, synthetic construct
  source 1..20: mol_type = other DNA
catgctcacagacacaatgc

SEQ ID NO: 188845 - DNA, 20 bp, synthetic construct
  source 1..20: mol_type = other DNA
acatgctcacagacacaatg

SEQ ID NO: 188846 - DNA, 20 bp, synthetic construct
  source 1..20: mol_type = other DNA
cacatgctcacagacacaat

SEQ ID NO: 188847 - DNA, 20 bp, synthetic construct
  source 1..20: mol_type = other DNA
acacatgctcacagacacaa

SEQ ID NO: 188848 - DNA, 20 bp, synthetic construct
  source 1..20: mol_type = other DNA
cacacatgctcacagacaca

SEQ ID NO: 188849 - DNA, 20 bp, synthetic construct
  source 1..20: mol_type = other DNA
tcacacatgctcacagacac

SEQ ID NO: 188850 - DNA, 20 bp, synthetic construct
  source 1..20: mol_type = other DNA
ctcacacatgctcacagaca

SEQ ID NO: 188851 - DNA, 20 bp, synthetic construct
  source 1..20: mol_type = other DNA
actcacacatgctcacagac

SEQ ID NO: 188852 - DNA, 20 bp, synthetic construct
  source 1..20: mol_type = other DNA
cactcacacatgctcacaga

SEQ ID NO: 188853 - DNA, 20 bp, synthetic construct
  source 1..20: mol_type = other DNA
acactcacacatgctcacag

SEQ ID NO: 188854 - DNA, 20 bp, synthetic construct
  source 1..20: mol_type = other DNA
cacactcacacatgctcaca

SEQ ID NO: 188855 - DNA, 20 bp, synthetic construct
  source 1..20: mol_type = other DNA
acacactcacacatgctcac

SEQ ID NO: 188856 - DNA, 20 bp, synthetic construct
  source 1..20: mol_type = other DNA
cacacactcacacatgctca

SEQ ID NO: 188857 - DNA, 20 bp, synthetic construct
  source 1..20: mol_type = other DNA
acacacactcacacatgctc

SEQ ID NO: 188858 - DNA, 20 bp, synthetic construct
  source 1..20: mol_type = other DNA
cacacacactcacacatgct

SEQ ID NO: 188859 - DNA, 20 bp, synthetic construct
  source 1..20: mol_type = other DNA
acacacacactcacacatgc

SEQ ID NO: 188860 - DNA, 20 bp, synthetic construct
  source 1..20: mol_type = other DNA
cacacacacactcacacatg

SEQ ID NO: 188861 - DNA, 20 bp, synthetic construct
  source 1..20: mol_type = other DNA
acacacacacactcacacat

SEQ ID NO: 188862 - DNA, 20 bp, synthetic construct
  source 1..20: mol_type = other DNA
aacacacacacactcacaca

SEQ ID NO: 188863 - DNA, 20 bp, synthetic construct
  source 1..20: mol_type = other DNA
gaacacacacacactcacac

SEQ ID NO: 188864 - DNA, 20 bp, synthetic construct
  source 1..20: mol_type = other DNA
tgaacacacacacactcaca

SEQ ID NO: 188865 - DNA, 20 bp, synthetic construct
  source 1..20: mol_type = other DNA
ctgaacacacacacactcac

SEQ ID NO: 188866 - DNA, 20 bp, synthetic construct
  source 1..20: mol_type = other DNA
gctgaacacacacacactca

SEQ ID NO: 188867 - DNA, 20 bp, synthetic construct
  source 1..20: mol_type = other DNA
tgctgaacacacacacactc

SEQ ID NO: 188868 - DNA, 20 bp, synthetic construct
  source 1..20: mol_type = other DNA
atgctgaacacacacacact

SEQ ID NO: 188869 - DNA, 20 bp, synthetic construct
  source 1..20: mol_type = other DNA
tatgctgaacacacacacac

SEQ ID NO: 188870 - DNA, 20 bp, synthetic construct
  source 1..20: mol_type = other DNA
atatgctgaacacacacaca

SEQ ID NO: 188871 - DNA, 20 bp, synthetic construct
  source 1..20: mol_type = other DNA
tatatgctgaacacacacac

SEQ ID NO: 188872 - DNA, 20 bp, synthetic construct
  source 1..20: mol_type = other DNA
atatatgctgaacacacaca

SEQ ID NO: 188873 - DNA, 20 bp, synthetic construct
  source 1..20: mol_type = other DNA
tatatatgctgaacacacac

SEQ ID NO: 188874 - DNA, 20 bp, synthetic construct
  source 1..20: mol_type = other DNA
ttatatatgctgaacacaca

SEQ ID NO: 188875 - DNA, 20 bp, synthetic construct
  source 1..20: mol_type = other DNA
cttatatatgctgaacacac

SEQ ID NO: 188876 - DNA, 20 bp, synthetic construct
  source 1..20: mol_type = other DNA
ccttatatatgctgaacaca

SEQ ID NO: 188877 - DNA, 20 bp, synthetic construct
  source 1..20: mol_type = other DNA
gccttatatatgctgaacac

SEQ ID NO: 188878 - DNA, 20 bp, synthetic construct
  source 1..20: mol_type = other DNA
tgccttatatatgctgaaca

SEQ ID NO: 188879 - DNA, 20 bp, synthetic construct
  source 1..20: mol_type = other DNA
atgccttatatatgctgaac

SEQ ID NO: 188880 - DNA, 20 bp, synthetic construct
  source 1..20: mol_type = other DNA
catgccttatatatgctgaa

SEQ ID NO: 188881 - DNA, 20 bp, synthetic construct
  source 1..20: mol_type = other DNA
acatgccttatatatgctga

SEQ ID NO: 188882 - DNA, 20 bp, synthetic construct
  source 1..20: mol_type = other DNA
tacatgccttatatatgctg

SEQ ID NO: 188883 - DNA, 20 bp, synthetic construct
  source 1..20: mol_type = other DNA
ttacatgccttatatatgct

SEQ ID NO: 188884 - DNA, 20 bp, synthetic construct
  source 1..20: mol_type = other DNA
gttacatgccttatatatgc

SEQ ID NO: 188885 - DNA, 20 bp, synthetic construct
  source 1..20: mol_type = other DNA
agttacatgccttatatatg

SEQ ID NO: 188886 - DNA, 20 bp, synthetic construct
  source 1..20: mol_type = other DNA
cagttacatgccttatatat

SEQ ID NO: 188887 - DNA, 20 bp, synthetic construct
  source 1..20: mol_type = other DNA
tcagttacatgccttatata

SEQ ID NO: 188888 - DNA, 20 bp, synthetic construct
  source 1..20: mol_type = other DNA
ttcagttacatgccttatat

SEQ ID NO: 188889 - DNA, 20 bp, synthetic construct
  source 1..20: mol_type = other DNA
gttcagttacatgccttata

SEQ ID NO: 188890 - DNA, 20 bp, synthetic construct
  source 1..20: mol_type = other DNA
tgttcagttacatgccttat

SEQ ID NO: 188891 - DNA, 20 bp, synthetic construct
  source 1..20: mol_type = other DNA
gtgttcagttacatgcctta

SEQ ID NO: 188892 - DNA, 20 bp, synthetic construct
  source 1..20: mol_type = other DNA
tgtgttcagttacatgcctt

SEQ ID NO: 188893 - DNA, 20 bp, synthetic construct
  source 1..20: mol_type = other DNA
ctgtgttcagttacatgcct

SEQ ID NO: 188894 - DNA, 20 bp, synthetic construct
  source 1..20: mol_type = other DNA
gctgtgttcagttacatgcc

SEQ ID NO: 188895 - DNA, 20 bp, synthetic construct
  source 1..20: mol_type = other DNA
tgctgtgttcagttacatgc

SEQ ID NO: 188896 - DNA, 20 bp, synthetic construct
  source 1..20: mol_type = other DNA
gtgctgtgttcagttacatg

SEQ ID NO: 188897 - DNA, 20 bp, synthetic construct
  source 1..20: mol_type = other DNA
agtgctgtgttcagttacat

SEQ ID NO: 188898 - DNA, 20 bp, synthetic construct
  source 1..20: mol_type = other DNA
aagtgctgtgttcagttaca

SEQ ID NO: 188899 - DNA, 20 bp, synthetic construct
  source 1..20: mol_type = other DNA
aaagtgctgtgttcagttac

SEQ ID NO: 188900 - DNA, 20 bp, synthetic construct
  source 1..20: mol_type = other DNA
taaagtgctgtgttcagtta

SEQ ID NO: 188901 - DNA, 20 bp, synthetic construct
  source 1..20: mol_type = other DNA
ctaaagtgctgtgttcagtt

SEQ ID NO: 188902 - DNA, 20 bp, synthetic construct
  source 1..20: mol_type = other DNA
tctaaagtgctgtgttcagt

SEQ ID NO: 188903 - DNA, 20 bp, synthetic construct
  source 1..20: mol_type = other DNA
ctctaaagtgctgtgttcag

SEQ ID NO: 188904 - DNA, 20 bp, synthetic construct
  source 1..20: mol_type = other DNA
cctctaaagtgctgtgttca

SEQ ID NO: 188905 - DNA, 20 bp, synthetic construct
  source 1..20: mol_type = other DNA
ccctctaaagtgctgtgttc

SEQ ID NO: 188906 - DNA, 20 bp, synthetic construct
  source 1..20: mol_type = other DNA
gccctctaaagtgctgtgtt

SEQ ID NO: 188907 - DNA, 20 bp, synthetic construct
  source 1..20: mol_type = other DNA
agccctctaaagtgctgtgt

SEQ ID NO: 188908 - DNA, 20 bp, synthetic construct
  source 1..20: mol_type = other DNA
gagccctctaaagtgctgtg

SEQ ID NO: 188909 - DNA, 20 bp, synthetic construct
  source 1..20: mol_type = other DNA
agagccctctaaagtgctgt

SEQ ID NO: 188910 - DNA, 20 bp, synthetic construct
  source 1..20: mol_type = other DNA
gagagccctctaaagtgctg

SEQ ID NO: 188911 - DNA, 20 bp, synthetic construct
  source 1..20: mol_type = other DNA
ggagagccctctaaagtgct

SEQ ID NO: 188912 - DNA, 20 bp, synthetic construct
  source 1..20: mol_type = other DNA
aggagagccctctaaagtgc

SEQ ID NO: 188913 - DNA, 20 bp, synthetic construct
  source 1..20: mol_type = other DNA
caggagagccctctaaagtg

SEQ ID NO: 188914 - DNA, 20 bp, synthetic construct
  source 1..20: mol_type = other DNA
ccaggagagccctctaaagt

SEQ ID NO: 188915 - DNA, 20 bp, synthetic construct
  source 1..20: mol_type = other DNA
tccaggagagccctctaaag

SEQ ID NO: 188916 - DNA, 20 bp, synthetic construct
  source 1..20: mol_type = other DNA
ctccaggagagccctctaaa

SEQ ID NO: 188917 - DNA, 20 bp, synthetic construct
  source 1..20: mol_type = other DNA
actccaggagagccctctaa

SEQ ID NO: 188918 - DNA, 20 bp, synthetic construct
  source 1..20: mol_type = other DNA
gactccaggagagccctcta

SEQ ID NO: 188919 - DNA, 20 bp, synthetic construct
  source 1..20: mol_type = other DNA
tgactccaggagagccctct

SEQ ID NO: 188920 - DNA, 20 bp, synthetic construct
  source 1..20: mol_type = other DNA
ctgactccaggagagccctc

SEQ ID NO: 188921 - DNA, 20 bp, synthetic construct
  source 1..20: mol_type = other DNA
tctgactccaggagagccct

SEQ ID NO: 188922 - DNA, 20 bp, synthetic construct
  source 1..20: mol_type = other DNA
ctctgactccaggagagccc

SEQ ID NO: 188923 - DNA, 20 bp, synthetic construct
  source 1..20: mol_type = other DNA
cctctgactccaggagagcc

SEQ ID NO: 188924 - DNA, 20 bp, synthetic construct
  source 1..20: mol_type = other DNA
ccctctgactccaggagagc

SEQ ID NO: 188925 - DNA, 20 bp, synthetic construct
  source 1..20: mol_type = other DNA
cccctctgactccaggagag

SEQ ID NO: 188926 - DNA, 20 bp, synthetic construct
  source 1..20: mol_type = other DNA
ccccctctgactccaggaga

SEQ ID NO: 188927 - DNA, 20 bp, synthetic construct
  source 1..20: mol_type = other DNA
accccctctgactccaggag

SEQ ID NO: 188928 - DNA, 20 bp, synthetic construct
  source 1..20: mol_type = other DNA
caccccctctgactccagga

SEQ ID NO: 188929 - DNA, 20 bp, synthetic construct
  source 1..20: mol_type = other DNA
ccaccccctctgactccagg

SEQ ID NO: 188930 - DNA, 20 bp, synthetic construct
  source 1..20: mol_type = other DNA
cccaccccctctgactccag

SEQ ID NO: 188931 - DNA, 20 bp, synthetic construct
  source 1..20: mol_type = other DNA
acccaccccctctgactcca

SEQ ID NO: 188932 - DNA, 20 bp, synthetic construct
  source 1..20: mol_type = other DNA
tacccaccccctctgactcc

SEQ ID NO: 188933 - DNA, 20 bp, synthetic construct
  source 1..20: mol_type = other DNA
ctacccaccccctctgactc

SEQ ID NO: 188934 - DNA, 20 bp, synthetic construct
  source 1..20: mol_type = other DNA
cctacccaccccctctgact

SEQ ID NO: 188935 - DNA, 20 bp, synthetic construct
  source 1..20: mol_type = other DNA
tcctacccaccccctctgac

SEQ ID NO: 188936 - DNA, 20 bp, synthetic construct
  source 1..20: mol_type = other DNA
ctcctacccaccccctctga

SEQ ID NO: 188937 - DNA, 20 bp, synthetic construct
  source 1..20: mol_type = other DNA
cctcctacccaccccctctg

SEQ ID NO: 188938 - DNA, 20 bp, synthetic construct
  source 1..20: mol_type = other DNA
tcctcctacccaccccctct

SEQ ID NO: 188939 - DNA, 20 bp, synthetic construct
  source 1..20: mol_type = other DNA
ctcctcctacccaccccctc

SEQ ID NO: 188940 - DNA, 20 bp, synthetic construct
  source 1..20: mol_type = other DNA
tctcctcctacccaccccct

SEQ ID NO: 188941 - DNA, 20 bp, synthetic construct
  source 1..20: mol_type = other DNA
ttctcctcctacccaccccc

SEQ ID NO: 188942 - DNA, 20 bp, synthetic construct
  source 1..20: mol_type = other DNA
cttctcctcctacccacccc

SEQ ID NO: 188943 - DNA, 20 bp, synthetic construct
  source 1..20: mol_type = other DNA
ccttctcctcctacccaccc

SEQ ID NO: 188944 - DNA, 20 bp, synthetic construct
  source 1..20: mol_type = other DNA
cccttctcctcctacccacc

SEQ ID NO: 188945 - DNA, 20 bp, synthetic construct
  source 1..20: mol_type = other DNA
tcccttctcctcctacccac

SEQ ID NO: 188946 - DNA, 20 bp, synthetic construct
  source 1..20: mol_type = other DNA
ctcccttctcctcctaccca

SEQ ID NO: 188947 - DNA, 20 bp, synthetic construct
  source 1..20: mol_type = other DNA
cctcccttctcctcctaccc

SEQ ID NO: 188948 - DNA, 20 bp, synthetic construct
  source 1..20: mol_type = other DNA
acctcccttctcctcctacc

SEQ ID NO: 188949 - DNA, 20 bp, synthetic construct
  source 1..20: mol_type = other DNA
cacctcccttctcctcctac

SEQ ID NO: 188950 - DNA, 20 bp, synthetic construct
  source 1..20: mol_type = other DNA
ccacctcccttctcctccta

SEQ ID NO: 188951 - DNA, 20 bp, synthetic construct
  source 1..20: mol_type = other DNA
cccacctcccttctcctcct

SEQ ID NO: 188952 - DNA, 20 bp, synthetic construct
  source 1..20: mol_type = other DNA
gcccacctcccttctcctcc

SEQ ID NO: 188953 - DNA, 20 bp, synthetic construct
  source 1..20: mol_type = other DNA
agcccacctcccttctcctc

SEQ ID NO: 188954 - DNA, 20 bp, synthetic construct
  source 1..20: mol_type = other DNA
tagcccacctcccttctcct

SEQ ID NO: 188955 - DNA, 20 bp, synthetic construct
  source 1..20: mol_type = other DNA
ctagcccacctcccttctcc

SEQ ID NO: 188956 - DNA, 20 bp, synthetic construct
  source 1..20: mol_type = other DNA
actagcccacctcccttctc

SEQ ID NO: 188957 - DNA, 20 bp, synthetic construct
  source 1..20: mol_type = other DNA
cactagcccacctcccttct

SEQ ID NO: 188958 - DNA, 20 bp, synthetic construct
  source 1..20: mol_type = other DNA
acactagcccacctcccttc

SEQ ID NO: 188959 - DNA, 20 bp, synthetic construct
  source 1..20: mol_type = other DNA
cacactagcccacctccctt

SEQ ID NO: 188960 - DNA, 20 bp, synthetic construct
  source 1..20: mol_type = other DNA
gcacactagcccacctccct

SEQ ID NO: 188961 - DNA, 20 bp, synthetic construct
  source 1..20: mol_type = other DNA
agcacactagcccacctccc

SEQ ID NO: 188962 - DNA, 20 bp, synthetic construct
  source 1..20: mol_type = other DNA
cagcacactagcccacctcc

SEQ ID NO: 188963 - DNA, 20 bp, synthetic construct
  source 1..20: mol_type = other DNA
tcagcacactagcccacctc

SEQ ID NO: 188964 - DNA, 20 bp, synthetic construct
  source 1..20: mol_type = other DNA
ttcagcacactagcccacct

SEQ ID NO: 188965 - DNA, 20 bp, synthetic construct
  source 1..20: mol_type = other DNA
cttcagcacactagcccacc

SEQ ID NO: 188966 - DNA, 20 bp, synthetic construct
  source 1..20: mol_type = other DNA
acttcagcacactagcccac

SEQ ID NO: 188967 - DNA, 20 bp, synthetic construct
  source 1..20: mol_type = other DNA
tacttcagcacactagccca

SEQ ID NO: 188968 - DNA, 20 bp, synthetic construct
  source 1..20: mol_type = other DNA
atacttcagcacactagccc

SEQ ID NO: 188969 - DNA, 20 bp, synthetic construct
  source 1..20: mol_type = other DNA
gatacttcagcacactagcc

SEQ ID NO: 188970 - DNA, 20 bp, synthetic construct
  source 1..20: mol_type = other DNA
agatacttcagcacactagc

SEQ ID NO: 188971 - DNA, 20 bp, synthetic construct
  source 1..20: mol_type = other DNA
tagatacttcagcacactag

SEQ ID NO: 188972 - DNA, 20 bp, synthetic construct
  source 1..20: mol_type = other DNA
gtagatacttcagcacacta

SEQ ID NO: 188973 - DNA, 20 bp, synthetic construct
  source 1..20: mol_type = other DNA
agtagatacttcagcacact

SEQ ID NO: 188974 - DNA, 20 bp, synthetic construct
  source 1..20: mol_type = other DNA
gagtagatacttcagcacac

SEQ ID NO: 188975 - DNA, 20 bp, synthetic construct
  source 1..20: mol_type = other DNA
ggagtagatacttcagcaca

SEQ ID NO: 188976 - DNA, 20 bp, synthetic construct
  source 1..20: mol_type = other DNA
aggagtagatacttcagcac

SEQ ID NO: 188977 - DNA, 20 bp, synthetic construct
  source 1..20: mol_type = other DNA
aaggagtagatacttcagca

SEQ ID NO: 188978 - DNA, 20 bp, synthetic construct
  source 1..20: mol_type = other DNA
caaggagtagatacttcagc

SEQ ID NO: 188979 - DNA, 20 bp, synthetic construct
  source 1..20: mol_type = other DNA
acaaggagtagatacttcag

SEQ ID NO: 188980 - DNA, 20 bp, synthetic construct
  source 1..20: mol_type = other DNA
gacaaggagtagatacttca

SEQ ID NO: 188981 - DNA, 20 bp, synthetic construct
  source 1..20: mol_type = other DNA
tgacaaggagtagatacttc

SEQ ID NO: 188982 - DNA, 20 bp, synthetic construct
  source 1..20: mol_type = other DNA
atgacaaggagtagatactt

SEQ ID NO: 188983 - DNA, 20 bp, synthetic construct
  source 1..20: mol_type = other DNA
tatgacaaggagtagatact

SEQ ID NO: 188984 - DNA, 20 bp, synthetic construct
  source 1..20: mol_type = other DNA
ctatgacaaggagtagatac

SEQ ID NO: 188985 - DNA, 20 bp, synthetic construct
  source 1..20: mol_type = other DNA
actatgacaaggagtagata

SEQ ID NO: 188986 - DNA, 20 bp, synthetic construct
  source 1..20: mol_type = other DNA
gactatgacaaggagtagat

SEQ ID NO: 188987 - DNA, 20 bp, synthetic construct
  source 1..20: mol_type = other DNA
agactatgacaaggagtaga

SEQ ID NO: 188988 - DNA, 20 bp, synthetic construct
  source 1..20: mol_type = other DNA
cagactatgacaaggagtag

SEQ ID NO: 188989 - DNA, 20 bp, synthetic construct
  source 1..20: mol_type = other DNA
acagactatgacaaggagta

SEQ ID NO: 188990 - DNA, 20 bp, synthetic construct
  source 1..20: mol_type = other DNA
cacagactatgacaaggagt

SEQ ID NO: 188991 - DNA, 20 bp, synthetic construct
  source 1..20: mol_type = other DNA
tcacagactatgacaaggag

SEQ ID NO: 188992 - DNA, 20 bp, synthetic construct
  source 1..20: mol_type = other DNA
gtcacagactatgacaagga

SEQ ID NO: 188993 - DNA, 20 bp, synthetic construct
  source 1..20: mol_type = other DNA
tgtcacagactatgacaagg

SEQ ID NO: 188994 - DNA, 20 bp, synthetic construct
  source 1..20: mol_type = other DNA
ttgtcacagactatgacaag

SEQ ID NO: 188995 - DNA, 20 bp, synthetic construct
  source 1..20: mol_type = other DNA
gttgtcacagactatgacaa

SEQ ID NO: 188996 - DNA, 20 bp, synthetic construct
  source 1..20: mol_type = other DNA
ggttgtcacagactatgaca

SEQ ID NO: 188997 - DNA, 20 bp, synthetic construct
  source 1..20: mol_type = other DNA
gggttgtcacagactatgac

SEQ ID NO: 188998 - DNA, 20 bp, synthetic construct
  source 1..20: mol_type = other DNA
tgggttgtcacagactatga

SEQ ID NO: 188999 - DNA, 20 bp, synthetic construct
  source 1..20: mol_type = other DNA
ctgggttgtcacagactatg

SEQ ID NO: 189000 - DNA, 20 bp, synthetic construct
  source 1..20: mol_type = other DNA
tctgggttgtcacagactat

SEQ ID NO: 189001 - DNA, 20 bp, synthetic construct
  source 1..20: mol_type = other DNA
gtctgggttgtcacagacta

SEQ ID NO: 189002 - DNA, 20 bp, synthetic construct
  source 1..20: mol_type = other DNA
agtctgggttgtcacagact

SEQ ID NO: 189003 - DNA, 20 bp, synthetic construct
  source 1..20: mol_type = other DNA
tagtctgggttgtcacagac

SEQ ID NO: 189004 - DNA, 20 bp, synthetic construct
  source 1..20: mol_type = other DNA
ctagtctgggttgtcacaga

SEQ ID NO: 189005 - DNA, 20 bp, synthetic construct
  source 1..20: mol_type = other DNA
gctagtctgggttgtcacag

SEQ ID NO: 189006 - DNA, 20 bp, synthetic construct
  source 1..20: mol_type = other DNA
ggctagtctgggttgtcaca

SEQ ID NO: 189007 - DNA, 20 bp, synthetic construct
  source 1..20: mol_type = other DNA
gggctagtctgggttgtcac

SEQ ID NO: 189008 - DNA, 20 bp, synthetic construct
  source 1..20: mol_type = other DNA
tgggctagtctgggttgtca

SEQ ID NO: 189009 - DNA, 20 bp, synthetic construct
  source 1..20: mol_type = other DNA
atgggctagtctgggttgtc

SEQ ID NO: 189010 - DNA, 20 bp, synthetic construct
  source 1..20: mol_type = other DNA
catgggctagtctgggttgt

SEQ ID NO: 189011 - DNA, 20 bp, synthetic construct
  source 1..20: mol_type = other DNA
tcatgggctagtctgggttg

SEQ ID NO: 189012 - DNA, 20 bp, synthetic construct
  source 1..20: mol_type = other DNA
ctcatgggctagtctgggtt

SEQ ID NO: 189013 - DNA, 20 bp, synthetic construct
  source 1..20: mol_type = other DNA
gctcatgggctagtctgggt

SEQ ID NO: 189014 - DNA, 20 bp, synthetic construct
  source 1..20: mol_type = other DNA
ggctcatgggctagtctggg

SEQ ID NO: 189015 - DNA, 20 bp, synthetic construct
  source 1..20: mol_type = other DNA
tggctcatgggctagtctgg

SEQ ID NO: 189016 - DNA, 20 bp, synthetic construct
  source 1..20: mol_type = other DNA
gtggctcatgggctagtctg

SEQ ID NO: 189017 - DNA, 20 bp, synthetic construct
  source 1..20: mol_type = other DNA
ggtggctcatgggctagtct

SEQ ID NO: 189018 - DNA, 20 bp, synthetic construct
  source 1..20: mol_type = other DNA
gggtggctcatgggctagtc

SEQ ID NO: 189019 - DNA, 20 bp, synthetic construct
  source 1..20: mol_type = other DNA
agggtggctcatgggctagt

SEQ ID NO: 189020 - DNA, 20 bp, synthetic construct
  source 1..20: mol_type = other DNA
cagggtggctcatgggctag

SEQ ID NO: 189021 - DNA, 20 bp, synthetic construct
  source 1..20: mol_type = other DNA
acagggtggctcatgggcta

SEQ ID NO: 189022 - DNA, 20 bp, synthetic construct
  source 1..20: mol_type = other DNA
aacagggtggctcatgggct

SEQ ID NO: 189023 - DNA, 20 bp, synthetic construct
  source 1..20: mol_type = other DNA
gaacagggtggctcatgggc

SEQ ID NO: 189024 - DNA, 20 bp, synthetic construct
  source 1..20: mol_type = other DNA
ggaacagggtggctcatggg

SEQ ID NO: 189025 - DNA, 20 bp, synthetic construct
  source 1..20: mol_type = other DNA
gggaacagggtggctcatgg

SEQ ID NO: 189026 - DNA, 20 bp, synthetic construct
  source 1..20: mol_type = other DNA
agggaacagggtggctcatg

SEQ ID NO: 189027 - DNA, 20 bp, synthetic construct
  source 1..20: mol_type = other DNA
cagggaacagggtggctcat

SEQ ID NO: 189028 - DNA, 20 bp, synthetic construct
  source 1..20: mol_type = other DNA
gcagggaacagggtggctca

SEQ ID NO: 189029 - DNA, 20 bp, synthetic construct
  source 1..20: mol_type = other DNA
tgcagggaacagggtggctc

SEQ ID NO: 189030 - DNA, 20 bp, synthetic construct
  source 1..20: mol_type = other DNA
atgcagggaacagggtggct

SEQ ID NO: 189031 - DNA, 20 bp, synthetic construct
  source 1..20: mol_type = other DNA
aatgcagggaacagggtggc

SEQ ID NO: 189032 - DNA, 20 bp, synthetic construct
  source 1..20: mol_type = other DNA
aaatgcagggaacagggtgg

SEQ ID NO: 189033 - DNA, 20 bp, synthetic construct
  source 1..20: mol_type = other DNA
gaaatgcagggaacagggtg

SEQ ID NO: 189034 - DNA, 20 bp, synthetic construct
  source 1..20: mol_type = other DNA
ggaaatgcagggaacagggt

SEQ ID NO: 189035 - DNA, 20 bp, synthetic construct
  source 1..20: mol_type = other DNA
tggaaatgcagggaacaggg

SEQ ID NO: 189036 - DNA, 20 bp, synthetic construct
  source 1..20: mol_type = other DNA
ttggaaatgcagggaacagg

SEQ ID NO: 189037 - DNA, 20 bp, synthetic construct
  source 1..20: mol_type = other DNA
attggaaatgcagggaacag

SEQ ID NO: 189038 - DNA, 20 bp, synthetic construct
  source 1..20: mol_type = other DNA
cattggaaatgcagggaaca

SEQ ID NO: 189039 - DNA, 20 bp, synthetic construct
  source 1..20: mol_type = other DNA
tcattggaaatgcagggaac

SEQ ID NO: 189040 - DNA, 20 bp, synthetic construct
  source 1..20: mol_type = other DNA
ctcattggaaatgcagggaa

SEQ ID NO: 189041 - DNA, 20 bp, synthetic construct
  source 1..20: mol_type = other DNA
tctcattggaaatgcaggga

SEQ ID NO: 189042 - DNA, 20 bp, synthetic construct
  source 1..20: mol_type = other DNA
gtctcattggaaatgcaggg

SEQ ID NO: 189043 - DNA, 20 bp, synthetic construct
  source 1..20: mol_type = other DNA
ggtctcattggaaatgcagg

SEQ ID NO: 189044 - DNA, 20 bp, synthetic construct
  source 1..20: mol_type = other DNA
aggtctcattggaaatgcag

SEQ ID NO: 189045 - DNA, 20 bp, synthetic construct
  source 1..20: mol_type = other DNA
gaggtctcattggaaatgca

SEQ ID NO: 189046 - DNA, 20 bp, synthetic construct
  source 1..20: mol_type = other DNA
cgaggtctcattggaaatgc

SEQ ID NO: 189047 - DNA, 20 bp, synthetic construct
  source 1..20: mol_type = other DNA
ccgaggtctcattggaaatg

SEQ ID NO: 189048 - DNA, 20 bp, synthetic construct
  source 1..20: mol_type = other DNA
accgaggtctcattggaaat

SEQ ID NO: 189049 - DNA, 20 bp, synthetic construct
  source 1..20: mol_type = other DNA
caccgaggtctcattggaaa

SEQ ID NO: 189050 - DNA, 20 bp, synthetic construct
  source 1..20: mol_type = other DNA
ccaccgaggtctcattggaa

SEQ ID NO: 189051 - DNA, 20 bp, synthetic construct
  source 1..20: mol_type = other DNA
tccaccgaggtctcattgga

SEQ ID NO: 189052 - DNA, 20 bp, synthetic construct
  source 1..20: mol_type = other DNA
gtccaccgaggtctcattgg

SEQ ID NO: 189053 - DNA, 20 bp, synthetic construct
  source 1..20: mol_type = other DNA
tgtccaccgaggtctcattg

SEQ ID NO: 189054 - DNA, 20 bp, synthetic construct
  source 1..20: mol_type = other DNA
atgtccaccgaggtctcatt

SEQ ID NO: 189055 - DNA, 20 bp, synthetic construct
  source 1..20: mol_type = other DNA
catgtccaccgaggtctcat

SEQ ID NO: 189056 - DNA, 20 bp, synthetic construct
  source 1..20: mol_type = other DNA
acatgtccaccgaggtctca

SEQ ID NO: 189057 - DNA, 20 bp, synthetic construct
  source 1..20: mol_type = other DNA
aacatgtccaccgaggtctc

SEQ ID NO: 189058 - DNA, 20 bp, synthetic construct
  source 1..20: mol_type = other DNA
gaacatgtccaccgaggtct

SEQ ID NO: 189059 - DNA, 20 bp, synthetic construct
  source 1..20: mol_type = other DNA
ggaacatgtccaccgaggtc

SEQ ID NO: 189060 - DNA, 20 bp, synthetic construct
  source 1..20: mol_type = other DNA
gggaacatgtccaccgaggt

SEQ ID NO: 189061 - DNA, 20 bp, synthetic construct
  source 1..20: mol_type = other DNA
agggaacatgtccaccgagg

SEQ ID NO: 189062 - DNA, 20 bp, synthetic construct
  source 1..20: mol_type = other DNA
cagggaacatgtccaccgag

SEQ ID NO: 189063 - DNA, 20 bp, synthetic construct
  source 1..20: mol_type = other DNA
tcagggaacatgtccaccga

SEQ ID NO: 189064 - DNA, 20 bp, synthetic construct
  source 1..20: mol_type = other DNA
ctcagggaacatgtccaccg

SEQ ID NO: 189065 - DNA, 20 bp, synthetic construct
  source 1..20: mol_type = other DNA
cctcagggaacatgtccacc

SEQ ID NO: 189066 - DNA, 20 bp, synthetic construct
  source 1..20: mol_type = other DNA
acctcagggaacatgtccac

SEQ ID NO: 189067 - DNA, 20 bp, synthetic construct
  source 1..20: mol_type = other DNA
cacctcagggaacatgtcca

SEQ ID NO: 189068 - DNA, 20 bp, synthetic construct
  source 1..20: mol_type = other DNA
tcacctcagggaacatgtcc

SEQ ID NO: 189069 - DNA, 20 bp, synthetic construct
  source 1..20: mol_type = other DNA
ctcacctcagggaacatgtc

SEQ ID NO: 189070 - DNA, 20 bp, synthetic construct
  source 1..20: mol_type = other DNA
cctcacctcagggaacatgt

SEQ ID NO: 189071 - DNA, 20 bp, synthetic construct
  source 1..20: mol_type = other DNA
gcctcacctcagggaacatg

SEQ ID NO: 189072 - DNA, 20 bp, synthetic construct
  source 1..20: mol_type = other DNA
agcctcacctcagggaacat

SEQ ID NO: 189073 - DNA, 20 bp, synthetic construct
  source 1..20: mol_type = other DNA
cagcctcacctcagggaaca

SEQ ID NO: 189074 - DNA, 20 bp, synthetic construct
  source 1..20: mol_type = other DNA
tcagcctcacctcagggaac

SEQ ID NO: 189075 - DNA, 20 bp, synthetic construct
  source 1..20: mol_type = other DNA
gtcagcctcacctcagggaa

SEQ ID NO: 189076 - DNA, 20 bp, synthetic construct
  source 1..20: mol_type = other DNA
agtcagcctcacctcaggga

SEQ ID NO: 189077 - DNA, 20 bp, synthetic construct
  source 1..20: mol_type = other DNA
cagtcagcctcacctcaggg

SEQ ID NO: 189078 - DNA, 20 bp, synthetic construct
  source 1..20: mol_type = other DNA
tcagtcagcctcacctcagg

SEQ ID NO: 189079 - DNA, 20 bp, synthetic construct
  source 1..20: mol_type = other DNA
atcagtcagcctcacctcag

SEQ ID NO: 189080 - DNA, 20 bp, synthetic construct
  source 1..20: mol_type = other DNA
catcagtcagcctcacctca

SEQ ID NO: 189081 - DNA, 20 bp, synthetic construct
  source 1..20: mol_type = other DNA
acatcagtcagcctcacctc

SEQ ID NO: 189082 - DNA, 20 bp, synthetic construct
  source 1..20: mol_type = other DNA
gacatcagtcagcctcacct

SEQ ID NO: 189083 - DNA, 20 bp, synthetic construct
  source 1..20: mol_type = other DNA
tgacatcagtcagcctcacc

SEQ ID NO: 189084 - DNA, 20 bp, synthetic construct
  source 1..20: mol_type = other DNA
atgacatcagtcagcctcac

SEQ ID NO: 189085 - DNA, 20 bp, synthetic construct
  source 1..20: mol_type = other DNA
aatgacatcagtcagcctca

SEQ ID NO: 189086 - DNA, 20 bp, synthetic construct
  source 1..20: mol_type = other DNA
aaatgacatcagtcagcctc

SEQ ID NO: 189087 - DNA, 20 bp, synthetic construct
  source 1..20: mol_type = other DNA
caaatgacatcagtcagcct

SEQ ID NO: 189088 - DNA, 20 bp, synthetic construct
  source 1..20: mol_type = other DNA
tcaaatgacatcagtcagcc

SEQ ID NO: 189089 - DNA, 20 bp, synthetic construct
  source 1..20: mol_type = other DNA
gtcaaatgacatcagtcagc

SEQ ID NO: 189090 - DNA, 20 bp, synthetic construct
  source 1..20: mol_type = other DNA
cgtcaaatgacatcagtcag

SEQ ID NO: 189091 - DNA, 20 bp, synthetic construct
  source 1..20: mol_type = other DNA
tcgtcaaatgacatcagtca

SEQ ID NO: 189092 - DNA, 20 bp, synthetic construct
  source 1..20: mol_type = other DNA
atcgtcaaatgacatcagtc

SEQ ID NO: 189093 - DNA, 20 bp, synthetic construct
  source 1..20: mol_type = other DNA
gatcgtcaaatgacatcagt

SEQ ID NO: 189094 - DNA, 20 bp, synthetic construct
  source 1..20: mol_type = other DNA
agatcgtcaaatgacatcag

SEQ ID NO: 189095 - DNA, 20 bp, synthetic construct
  source 1..20: mol_type = other DNA
aagatcgtcaaatgacatca

SEQ ID NO: 189096 - DNA, 20 bp, synthetic construct
  source 1..20: mol_type = other DNA
caagatcgtcaaatgacatc

SEQ ID NO: 189097 - DNA, 20 bp, synthetic construct
  source 1..20: mol_type = other DNA
tcaagatcgtcaaatgacat

SEQ ID NO: 189098 - DNA, 20 bp, synthetic construct
  source 1..20: mol_type = other DNA
atcaagatcgtcaaatgaca

SEQ ID NO: 189099 - DNA, 20 bp, synthetic construct
  source 1..20: mol_type = other DNA
catcaagatcgtcaaatgac

SEQ ID NO: 189100 - DNA, 20 bp, synthetic construct
  source 1..20: mol_type = other DNA
gcatcaagatcgtcaaatga

SEQ ID NO: 189101 - DNA, 20 bp, synthetic construct
  source 1..20: mol_type = other DNA
ggcatcaagatcgtcaaatg

SEQ ID NO: 189102 - DNA, 20 bp, synthetic construct
  source 1..20: mol_type = other DNA
tggcatcaagatcgtcaaat

SEQ ID NO: 189103 - DNA, 20 bp, synthetic construct
  source 1..20: mol_type = other DNA
ttggcatcaagatcgtcaaa

SEQ ID NO: 189104 - DNA, 20 bp, synthetic construct
  source 1..20: mol_type = other DNA
tttggcatcaagatcgtcaa

SEQ ID NO: 189105 - DNA, 20 bp, synthetic construct
  source 1..20: mol_type = other DNA
atttggcatcaagatcgtca

SEQ ID NO: 189106 - DNA, 20 bp, synthetic construct
  source 1..20: mol_type = other DNA
gatttggcatcaagatcgtc

SEQ ID NO: 189107 - DNA, 20 bp, synthetic construct
  source 1..20: mol_type = other DNA
ggatttggcatcaagatcgt

SEQ ID NO: 189108 - DNA, 20 bp, synthetic construct
  source 1..20: mol_type = other DNA
aggatttggcatcaagatcg

SEQ ID NO: 189109 - DNA, 20 bp, synthetic construct
  source 1..20: mol_type = other DNA
aaggatttggcatcaagatc

SEQ ID NO: 189110 - DNA, 20 bp, synthetic construct
  source 1..20: mol_type = other DNA
aaaggatttggcatcaagat

SEQ ID NO: 189111 - DNA, 20 bp, synthetic construct
  source 1..20: mol_type = other DNA
aaaaggatttggcatcaaga

SEQ ID NO: 189112 - DNA, 20 bp, synthetic construct
  source 1..20: mol_type = other DNA
taaaaggatttggcatcaag

SEQ ID NO: 189113 - DNA, 20 bp, synthetic construct
  source 1..20: mol_type = other DNA
ataaaaggatttggcatcaa

SEQ ID NO: 189114 - DNA, 20 bp, synthetic construct
  source 1..20: mol_type = other DNA
tataaaaggatttggcatca

SEQ ID NO: 189115 - DNA, 20 bp, synthetic construct
  source 1..20: mol_type = other DNA
atataaaaggatttggcatc

SEQ ID NO: 189116 - DNA, 20 bp, synthetic construct
  source 1..20: mol_type = other DNA
gatataaaaggatttggcat

SEQ ID NO: 189117 - DNA, 20 bp, synthetic construct
  source 1..20: mol_type = other DNA
tgatataaaaggatttggca

SEQ ID NO: 189118 - DNA, 20 bp, synthetic construct
  source 1..20: mol_type = other DNA
ttgatataaaaggatttggc

SEQ ID NO: 189119 - DNA, 20 bp, synthetic construct
  source 1..20: mol_type = other DNA
tttgatataaaaggatttgg

SEQ ID NO: 189120 - DNA, 20 bp, synthetic construct
  source 1..20: mol_type = other DNA
ttttgatataaaaggatttg

SEQ ID NO: 189121 - DNA, 20 bp, synthetic construct
  source 1..20: mol_type = other DNA
tttttgatataaaaggattt

SEQ ID NO: 189122 - DNA, 20 bp, synthetic construct
  source 1..20: mol_type = other DNA
gtttttgatataaaaggatt

SEQ ID NO: 189123 - DNA, 20 bp, synthetic construct
  source 1..20: mol_type = other DNA
tgtttttgatataaaaggat

SEQ ID NO: 189124 - DNA, 20 bp, synthetic construct
  source 1..20: mol_type = other DNA
ttgtttttgatataaaagga

SEQ ID NO: 189125 - DNA, 20 bp, synthetic construct
  source 1..20: mol_type = other DNA
gttgtttttgatataaaagg

SEQ ID NO: 189126 - DNA, 20 bp, synthetic construct
  source 1..20: mol_type = other DNA
ggttgtttttgatataaaag

SEQ ID NO: 189127 - DNA, 20 bp, synthetic construct
  source 1..20: mol_type = other DNA
tggttgtttttgatataaaa

SEQ ID NO: 189128 - DNA, 20 bp, synthetic construct
  source 1..20: mol_type = other DNA
ctggttgtttttgatataaa

SEQ ID NO: 189129 - DNA, 20 bp, synthetic construct
  source 1..20: mol_type = other DNA
tctggttgtttttgatataa

SEQ ID NO: 189130 - DNA, 20 bp, synthetic construct
  source 1..20: mol_type = other DNA
ttctggttgtttttgatata

SEQ ID NO: 189131 - DNA, 20 bp, synthetic construct
  source 1..20: mol_type = other DNA
gttctggttgtttttgatat

SEQ ID NO: 189132 - DNA, 20 bp, synthetic construct
  source 1..20: mol_type = other DNA
tgttctggttgtttttgata

SEQ ID NO: 189133 - DNA, 20 bp, synthetic construct
  source 1..20: mol_type = other DNA
gtgttctggttgtttttgat

SEQ ID NO: 189134 - DNA, 20 bp, synthetic construct
  source 1..20: mol_type = other DNA
agtgttctggttgtttttga

SEQ ID NO: 189135 - DNA, 20 bp, synthetic construct
  source 1..20: mol_type = other DNA
gagtgttctggttgtttttg

SEQ ID NO: 189136 - DNA, 20 bp, synthetic construct
  source 1..20: mol_type = other DNA
agagtgttctggttgttttt

SEQ ID NO: 189137 - DNA, 20 bp, synthetic construct
  source 1..20: mol_type = other DNA
gagagtgttctggttgtttt

SEQ ID NO: 189138 - DNA, 20 bp, synthetic construct
  source 1..20: mol_type = other DNA
agagagtgttctggttgttt

SEQ ID NO: 189139 - DNA, 20 bp, synthetic construct
  source 1..20: mol_type = other DNA
aagagagtgttctggttgtt

SEQ ID NO: 189140 - DNA, 20 bp, synthetic construct
  source 1..20: mol_type = other DNA
aaagagagtgttctggttgt

SEQ ID NO: 189141 - DNA, 20 bp, synthetic construct
  source 1..20: mol_type = other DNA
aaaagagagtgttctggttg

SEQ ID NO: 189142 - DNA, 20 bp, synthetic construct
  source 1..20: mol_type = other DNA
gaaaagagagtgttctggtt

SEQ ID NO: 189143 - DNA, 20 bp, synthetic construct
  source 1..20: mol_type = other DNA
agaaaagagagtgttctggt

SEQ ID NO: 189144 - DNA, 20 bp, synthetic construct
  source 1..20: mol_type = other DNA
gagaaaagagagtgttctgg

SEQ ID NO: 189145 - DNA, 20 bp, synthetic construct
  source 1..20: mol_type = other DNA
agagaaaagagagtgttctg

SEQ ID NO: 189146 - DNA, 20 bp, synthetic construct
  source 1..20: mol_type = other DNA
aagagaaaagagagtgttct

SEQ ID NO: 189147 - DNA, 20 bp, synthetic construct
  source 1..20: mol_type = other DNA
taagagaaaagagagtgttc

SEQ ID NO: 189148 - DNA, 20 bp, synthetic construct
  source 1..20: mol_type = other DNA
ctaagagaaaagagagtgtt

SEQ ID NO: 189149 - DNA, 20 bp, synthetic construct
  source 1..20: mol_type = other DNA
actaagagaaaagagagtgt

SEQ ID NO: 189150 - DNA, 20 bp, synthetic construct
  source 1..20: mol_type = other DNA
cactaagagaaaagagagtg

SEQ ID NO: 189151 - DNA, 20 bp, synthetic construct
  source 1..20: mol_type = other DNA
gcactaagagaaaagagagt

SEQ ID NO: 189152 - DNA, 20 bp, synthetic construct
  source 1..20: mol_type = other DNA
agcactaagagaaaagagag

SEQ ID NO: 189153 - DNA, 20 bp, synthetic construct
  source 1..20: mol_type = other DNA
aagcactaagagaaaagaga

SEQ ID NO: 189154 - DNA, 20 bp, synthetic construct
  source 1..20: mol_type = other DNA
aaagcactaagagaaaagag

SEQ ID NO: 189155 - DNA, 20 bp, synthetic construct
  source 1..20: mol_type = other DNA
gaaagcactaagagaaaaga

SEQ ID NO: 189156 - DNA, 20 bp, synthetic construct
  source 1..20: mol_type = other DNA
tgaaagcactaagagaaaag

SEQ ID NO: 189157 - DNA, 20 bp, synthetic construct
  source 1..20: mol_type = other DNA
gtgaaagcactaagagaaaa

SEQ ID NO: 189158 - DNA, 20 bp, synthetic construct
  source 1..20: mol_type = other DNA
ggtgaaagcactaagagaaa

SEQ ID NO: 189159 - DNA, 20 bp, synthetic construct
  source 1..20: mol_type = other DNA
gggtgaaagcactaagagaa

SEQ ID NO: 189160 - DNA, 20 bp, synthetic construct
  source 1..20: mol_type = other DNA
tgggtgaaagcactaagaga

SEQ ID NO: 189161 - DNA, 20 bp, synthetic construct
  source 1..20: mol_type = other DNA
ctgggtgaaagcactaagag

SEQ ID NO: 189162 - DNA, 20 bp, synthetic construct
  source 1..20: mol_type = other DNA
tctgggtgaaagcactaaga

SEQ ID NO: 189163 - DNA, 20 bp, synthetic construct
  source 1..20: mol_type = other DNA
atctgggtgaaagcactaag

SEQ ID NO: 189164 - DNA, 20 bp, synthetic construct
  source 1..20: mol_type = other DNA
catctgggtgaaagcactaa

SEQ ID NO: 189165 - DNA, 20 bp, synthetic construct
  source 1..20: mol_type = other DNA
tcatctgggtgaaagcacta

SEQ ID NO: 189166 - DNA, 20 bp, synthetic construct
  source 1..20: mol_type = other DNA
gtcatctgggtgaaagcact

SEQ ID NO: 189167 - DNA, 20 bp, synthetic construct
  source 1..20: mol_type = other DNA
ggtcatctgggtgaaagcac

SEQ ID NO: 189168 - DNA, 20 bp, synthetic construct
  source 1..20: mol_type = other DNA
tggtcatctgggtgaaagca

SEQ ID NO: 189169 - DNA, 20 bp, synthetic construct
  source 1..20: mol_type = other DNA
gtggtcatctgggtgaaagc

SEQ ID NO: 189170 - DNA, 20 bp, synthetic construct
  source 1..20: mol_type = other DNA
tgtggtcatctgggtgaaag

SEQ ID NO: 189171 - DNA, 20 bp, synthetic construct
  source 1..20: mol_type = other DNA
atgtggtcatctgggtgaaa

SEQ ID NO: 189172 - DNA, 20 bp, synthetic construct
  source 1..20: mol_type = other DNA
aatgtggtcatctgggtgaa

SEQ ID NO: 189173 - DNA, 20 bp, synthetic construct
  source 1..20: mol_type = other DNA
aaatgtggtcatctgggtga

SEQ ID NO: 189174 - DNA, 20 bp, synthetic construct
  source 1..20: mol_type = other DNA
gaaatgtggtcatctgggtg

SEQ ID NO: 189175 - DNA, 20 bp, synthetic construct
  source 1..20: mol_type = other DNA
tgaaatgtggtcatctgggt

SEQ ID NO: 189176 - DNA, 20 bp, synthetic construct
  source 1..20: mol_type = other DNA
atgaaatgtggtcatctggg

SEQ ID NO: 189177 - DNA, 20 bp, synthetic construct
  source 1..20: mol_type = other DNA
gatgaaatgtggtcatctgg

SEQ ID NO: 189178 - DNA, 20 bp, synthetic construct
  source 1..20: mol_type = other DNA
ggatgaaatgtggtcatctg

SEQ ID NO: 189179 - DNA, 20 bp, synthetic construct
  source 1..20: mol_type = other DNA
aggatgaaatgtggtcatct

SEQ ID NO: 189180 - DNA, 20 bp, synthetic construct
  source 1..20: mol_type = other DNA
gaggatgaaatgtggtcatc

SEQ ID NO: 189181 - DNA, 20 bp, synthetic construct
  source 1..20: mol_type = other DNA
ggaggatgaaatgtggtcat

SEQ ID NO: 189182 - DNA, 20 bp, synthetic construct
  source 1..20: mol_type = other DNA
gggaggatgaaatgtggtca

SEQ ID NO: 189183 - DNA, 20 bp, synthetic construct
  source 1..20: mol_type = other DNA
tgggaggatgaaatgtggtc

SEQ ID NO: 189184 - DNA, 20 bp, synthetic construct
  source 1..20: mol_type = other DNA
ctgggaggatgaaatgtggt

SEQ ID NO: 189185 - DNA, 20 bp, synthetic construct
  source 1..20: mol_type = other DNA
gctgggaggatgaaatgtgg

SEQ ID NO: 189186 - DNA, 20 bp, synthetic construct
  source 1..20: mol_type = other DNA
ggctgggaggatgaaatgtg

SEQ ID NO: 189187 - DNA, 20 bp, synthetic construct
  source 1..20: mol_type = other DNA
tggctgggaggatgaaatgt

SEQ ID NO: 189188 - DNA, 20 bp, synthetic construct
  source 1..20: mol_type = other DNA
gtggctgggaggatgaaatg

SEQ ID NO: 189189 - DNA, 20 bp, synthetic construct
  source 1..20: mol_type = other DNA
agtggctgggaggatgaaat

SEQ ID NO: 189190 - DNA, 20 bp, synthetic construct
  source 1..20: mol_type = other DNA
gagtggctgggaggatgaaa

SEQ ID NO: 189191 - DNA, 20 bp, synthetic construct
  source 1..20: mol_type = other DNA
agagtggctgggaggatgaa

SEQ ID NO: 189192 - DNA, 20 bp, synthetic construct
  source 1..20: mol_type = other DNA
cagagtggctgggaggatga

SEQ ID NO: 189193 - DNA, 20 bp, synthetic construct
  source 1..20: mol_type = other DNA
ccagagtggctgggaggatg

SEQ ID NO: 189194 - DNA, 20 bp, synthetic construct
  source 1..20: mol_type = other DNA
cccagagtggctgggaggat

SEQ ID NO: 189195 - DNA, 20 bp, synthetic construct
  source 1..20: mol_type = other DNA
gcccagagtggctgggagga

SEQ ID NO: 189196 - DNA, 20 bp, synthetic construct
  source 1..20: mol_type = other DNA
ggcccagagtggctgggagg

SEQ ID NO: 189197 - DNA, 20 bp, synthetic construct
  source 1..20: mol_type = other DNA
tggcccagagtggctgggag

SEQ ID NO: 189198 - DNA, 20 bp, synthetic construct
  source 1..20: mol_type = other DNA
ctggcccagagtggctggga

SEQ ID NO: 189199 - DNA, 20 bp, synthetic construct
  source 1..20: mol_type = other DNA
cctggcccagagtggctggg

SEQ ID NO: 189200 - DNA, 20 bp, synthetic construct
  source 1..20: mol_type = other DNA
acctggcccagagtggctgg

SEQ ID NO: 189201 - DNA, 20 bp, synthetic construct
  source 1..20: mol_type = other DNA
cacctggcccagagtggctg

SEQ ID NO: 189202 - DNA, 20 bp, synthetic construct
  source 1..20: mol_type = other DNA
ccacctggcccagagtggct

SEQ ID NO: 189203 - DNA, 20 bp, synthetic construct
  source 1..20: mol_type = other DNA
gccacctggcccagagtggc

SEQ ID NO: 189204 - DNA, 20 bp, synthetic construct
  source 1..20: mol_type = other DNA
tgccacctggcccagagtgg

SEQ ID NO: 189205 - DNA, 20 bp, synthetic construct
  source 1..20: mol_type = other DNA
gtgccacctggcccagagtg

SEQ ID NO: 189206 - DNA, 20 bp, synthetic construct
  source 1..20: mol_type = other DNA
agtgccacctggcccagagt

SEQ ID NO: 189207 - DNA, 20 bp, synthetic construct
  source 1..20: mol_type = other DNA
cagtgccacctggcccagag

SEQ ID NO: 189208 - DNA, 20 bp, synthetic construct
  source 1..20: mol_type = other DNA
gcagtgccacctggcccaga

SEQ ID NO: 189209 - DNA, 20 bp, synthetic construct
  source 1..20: mol_type = other DNA
agcagtgccacctggcccag

SEQ ID NO: 189210 - DNA, 20 bp, synthetic construct
  source 1..20: mol_type = other DNA
cagcagtgccacctggccca

SEQ ID NO: 189211 - DNA, 20 bp, synthetic construct
  source 1..20: mol_type = other DNA
ccagcagtgccacctggccc

SEQ ID NO: 189212 - DNA, 20 bp, synthetic construct
  source 1..20: mol_type = other DNA
accagcagtgccacctggcc

SEQ ID NO: 189213 - DNA, 20 bp, synthetic construct
  source 1..20: mol_type = other DNA
aaccagcagtgccacctggc

SEQ ID NO: 189214 - DNA, 20 bp, synthetic construct
  source 1..20: mol_type = other DNA
aaaccagcagtgccacctgg

SEQ ID NO: 189215 - DNA, 20 bp, synthetic construct
  source 1..20: mol_type = other DNA
caaaccagcagtgccacctg

SEQ ID NO: 189216 - DNA, 20 bp, synthetic construct
  source 1..20: mol_type = other DNA
tcaaaccagcagtgccacct

SEQ ID NO: 189217 - DNA, 20 bp, synthetic construct
  source 1..20: mol_type = other DNA
ttcaaaccagcagtgccacc

SEQ ID NO: 189218 - DNA, 20 bp, synthetic construct
  source 1..20: mol_type = other DNA
tttcaaaccagcagtgccac

SEQ ID NO: 189219 - DNA, 20 bp, synthetic construct
  source 1..20: mol_type = other DNA
ctttcaaaccagcagtgcca

SEQ ID NO: 189220 - DNA, 20 bp, synthetic construct
  source 1..20: mol_type = other DNA
cctttcaaaccagcagtgcc

SEQ ID NO: 189221 - DNA, 20 bp, synthetic construct
  source 1..20: mol_type = other DNA
ccctttcaaaccagcagtgc

SEQ ID NO: 189222 - DNA, 20 bp, synthetic construct
  source 1..20: mol_type = other DNA
tccctttcaaaccagcagtg

SEQ ID NO: 189223 - DNA, 20 bp, synthetic construct
  source 1..20: mol_type = other DNA
ctccctttcaaaccagcagt

SEQ ID NO: 189224 - DNA, 20 bp, synthetic construct
  source 1..20: mol_type = other DNA
cctccctttcaaaccagcag

SEQ ID NO: 189225 - DNA, 20 bp, synthetic construct
  source 1..20: mol_type = other DNA
acctccctttcaaaccagca

SEQ ID NO: 189226 - DNA, 20 bp, synthetic construct
  source 1..20: mol_type = other DNA
gacctccctttcaaaccagc

SEQ ID NO: 189227 - DNA, 20 bp, synthetic construct
  source 1..20: mol_type = other DNA
agacctccctttcaaaccag

SEQ ID NO: 189228 - DNA, 20 bp, synthetic construct
  source 1..20: mol_type = other DNA
gagacctccctttcaaacca

SEQ ID NO: 189229 - DNA, 20 bp, synthetic construct
  source 1..20: mol_type = other DNA
ggagacctccctttcaaacc

SEQ ID NO: 189230 - DNA, 20 bp, synthetic construct
  source 1..20: mol_type = other DNA
gggagacctccctttcaaac

SEQ ID NO: 189231 - DNA, 20 bp, synthetic construct
  source 1..20: mol_type = other DNA
ggggagacctccctttcaaa

SEQ ID NO: 189232 - DNA, 20 bp, synthetic construct
  source 1..20: mol_type = other DNA
aggggagacctccctttcaa

SEQ ID NO: 189233 - DNA, 20 bp, synthetic construct
  source 1..20: mol_type = other DNA
caggggagacctccctttca

SEQ ID NO: 189234 - DNA, 20 bp, synthetic construct
  source 1..20: mol_type = other DNA
ccaggggagacctccctttc

SEQ ID NO: 189235 - DNA, 20 bp, synthetic construct
  source 1..20: mol_type = other DNA
tccaggggagacctcccttt

SEQ ID NO: 189236 - DNA, 20 bp, synthetic construct
  source 1..20: mol_type = other DNA
ctccaggggagacctccctt

SEQ ID NO: 189237 - DNA, 20 bp, synthetic construct
  source 1..20: mol_type = other DNA
actccaggggagacctccct

SEQ ID NO: 189238 - DNA, 20 bp, synthetic construct
  source 1..20: mol_type = other DNA
tactccaggggagacctccc

SEQ ID NO: 189239 - DNA, 20 bp, synthetic construct
  source 1..20: mol_type = other DNA
ttactccaggggagacctcc

SEQ ID NO: 189240 - DNA, 20 bp, synthetic construct
  source 1..20: mol_type = other DNA
gttactccaggggagacctc

SEQ ID NO: 189241 - DNA, 20 bp, synthetic construct
  source 1..20: mol_type = other DNA
agttactccaggggagacct

SEQ ID NO: 189242 - DNA, 20 bp, synthetic construct
  source 1..20: mol_type = other DNA
aagttactccaggggagacc

SEQ ID NO: 189243 - DNA, 20 bp, synthetic construct
  source 1..20: mol_type = other DNA
gaagttactccaggggagac

SEQ ID NO: 189244 - DNA, 20 bp, synthetic construct
  source 1..20: mol_type = other DNA
ggaagttactccaggggaga

SEQ ID NO: 189245 - DNA, 20 bp, synthetic construct
  source 1..20: mol_type = other DNA
cggaagttactccaggggag

SEQ ID NO: 189246 - DNA, 20 bp, synthetic construct
  source 1..20: mol_type = other DNA
acggaagttactccagggga

SEQ ID NO: 189247 - DNA, 20 bp, synthetic construct
  source 1..20: mol_type = other DNA
cacggaagttactccagggg

SEQ ID NO: 189248 - DNA, 20 bp, synthetic construct
  source 1..20: mol_type = other DNA
ccacggaagttactccaggg

SEQ ID NO: 189249 - DNA, 20 bp, synthetic construct
  source 1..20: mol_type = other DNA
cccacggaagttactccagg

SEQ ID NO: 189250 - DNA, 20 bp, synthetic construct
  source 1..20: mol_type = other DNA
gcccacggaagttactccag

SEQ ID NO: 189251 - DNA, 20 bp, synthetic construct
  source 1..20: mol_type = other DNA
cgcccacggaagttactcca

SEQ ID NO: 189252 - DNA, 20 bp, synthetic construct
  source 1..20: mol_type = other DNA
ccgcccacggaagttactcc

SEQ ID NO: 189253 - DNA, 20 bp, synthetic construct
  source 1..20: mol_type = other DNA
tccgcccacggaagttactc

SEQ ID NO: 189254 - DNA, 20 bp, synthetic construct
  source 1..20: mol_type = other DNA
atccgcccacggaagttact

SEQ ID NO: 189255 - DNA, 20 bp, synthetic construct
  source 1..20: mol_type = other DNA
aatccgcccacggaagttac

SEQ ID NO: 189256 - DNA, 20 bp, synthetic construct
  source 1..20: mol_type = other DNA
gaatccgcccacggaagtta

SEQ ID NO: 189257 - DNA, 20 bp, synthetic construct
  source 1..20: mol_type = other DNA
tgaatccgcccacggaagtt

SEQ ID NO: 189258 - DNA, 20 bp, synthetic construct
  source 1..20: mol_type = other DNA
gtgaatccgcccacggaagt

SEQ ID NO: 189259 - DNA, 20 bp, synthetic construct
  source 1..20: mol_type = other DNA
tgtgaatccgcccacggaag

SEQ ID NO: 189260 - DNA, 20 bp, synthetic construct
  source 1..20: mol_type = other DNA
gtgtgaatccgcccacggaa

SEQ ID NO: 189261 - DNA, 20 bp, synthetic construct
  source 1..20: mol_type = other DNA
ggtgtgaatccgcccacgga

SEQ ID NO: 189262 - DNA, 20 bp, synthetic construct
  source 1..20: mol_type = other DNA
gggtgtgaatccgcccacgg

SEQ ID NO: 189263 - DNA, 20 bp, synthetic construct
  source 1..20: mol_type = other DNA
agggtgtgaatccgcccacg

SEQ ID NO: 189264 - DNA, 20 bp, synthetic construct
  source 1..20: mol_type = other DNA
cagggtgtgaatccgcccac

SEQ ID NO: 189265 - DNA, 20 bp, synthetic construct
  source 1..20: mol_type = other DNA
gcagggtgtgaatccgccca

SEQ ID NO: 189266 - DNA, 20 bp, synthetic construct
  source 1..20: mol_type = other DNA
ggcagggtgtgaatccgccc

SEQ ID NO: 189267 - DNA, 20 bp, synthetic construct
  source 1..20: mol_type = other DNA
gggcagggtgtgaatccgcc

SEQ ID NO: 189268 - DNA, 20 bp, synthetic construct
  source 1..20: mol_type = other DNA
tgggcagggtgtgaatccgc

SEQ ID NO: 189269 - DNA, 20 bp, synthetic construct
  source 1..20: mol_type = other DNA
gtgggcagggtgtgaatccg

SEQ ID NO: 189270 - DNA, 20 bp, synthetic construct
  source 1..20: mol_type = other DNA
tgtgggcagggtgtgaatcc

SEQ ID NO: 189271 - DNA, 20 bp, synthetic construct
  source 1..20: mol_type = other DNA
ctgtgggcagggtgtgaatc

SEQ ID NO: 189272 - DNA, 20 bp, synthetic construct
  source 1..20: mol_type = other DNA
actgtgggcagggtgtgaat

SEQ ID NO: 189273 - DNA, 20 bp, synthetic construct
  source 1..20: mol_type = other DNA
gactgtgggcagggtgtgaa

SEQ ID NO: 189274 - DNA, 20 bp, synthetic construct
  source 1..20: mol_type = other DNA
ggactgtgggcagggtgtga

SEQ ID NO: 189275 - DNA, 20 bp, synthetic construct
  source 1..20: mol_type = other DNA
aggactgtgggcagggtgtg

SEQ ID NO: 189276 - DNA, 20 bp, synthetic construct
  source 1..20: mol_type = other DNA
caggactgtgggcagggtgt

SEQ ID NO: 189277 - DNA, 20 bp, synthetic construct
  source 1..20: mol_type = other DNA
acaggactgtgggcagggtg

SEQ ID NO: 189278 - DNA, 20 bp, synthetic construct
  source 1..20: mol_type = other DNA
gacaggactgtgggcagggt

SEQ ID NO: 189279 - DNA, 20 bp, synthetic construct
  source 1..20: mol_type = other DNA
ggacaggactgtgggcaggg

SEQ ID NO: 189280 - DNA, 20 bp, synthetic construct
  source 1..20: mol_type = other DNA
gggacaggactgtgggcagg

SEQ ID NO: 189281 - DNA, 20 bp, synthetic construct
  source 1..20: mol_type = other DNA
tgggacaggactgtgggcag

SEQ ID NO: 189282 - DNA, 20 bp, synthetic construct
  source 1..20: mol_type = other DNA
ctgggacaggactgtgggca

SEQ ID NO: 189283 - DNA, 20 bp, synthetic construct
  source 1..20: mol_type = other DNA
actgggacaggactgtgggc

SEQ ID NO: 189284 - DNA, 20 bp, synthetic construct
  source 1..20: mol_type = other DNA
gactgggacaggactgtggg

SEQ ID NO: 189285 - DNA, 20 bp, synthetic construct
  source 1..20: mol_type = other DNA
tgactgggacaggactgtgg

SEQ ID NO: 189286 - DNA, 20 bp, synthetic construct
  source 1..20: mol_type = other DNA
ctgactgggacaggactgtg

SEQ ID NO: 189287 - DNA, 20 bp, synthetic construct
  source 1..20: mol_type = other DNA
gctgactgggacaggactgt

SEQ ID NO: 189288 - DNA, 20 bp, synthetic construct
  source 1..20: mol_type = other DNA
ggctgactgggacaggactg

SEQ ID NO: 189289 - DNA, 20 bp, synthetic construct
  source 1..20: mol_type = other DNA
gggctgactgggacaggact

SEQ ID NO: 189290 - DNA, 20 bp, synthetic construct
  source 1..20: mol_type = other DNA
tgggctgactgggacaggac

SEQ ID NO: 189291 - DNA, 20 bp, synthetic construct
  source 1..20: mol_type = other DNA
gtgggctgactgggacagga

SEQ ID NO: 189292 - DNA, 20 bp, synthetic construct
  source 1..20: mol_type = other DNA
ggtgggctgactgggacagg

SEQ ID NO: 189293 - DNA, 20 bp, synthetic construct
  source 1..20: mol_type = other DNA
tggtgggctgactgggacag

SEQ ID NO: 189294 - DNA, 20 bp, synthetic construct
  source 1..20: mol_type = other DNA
atggtgggctgactgggaca

SEQ ID NO: 189295 - DNA, 20 bp, synthetic construct
  source 1..20: mol_type = other DNA
catggtgggctgactgggac

SEQ ID NO: 189296 - DNA, 20 bp, synthetic construct
  source 1..20: mol_type = other DNA
ccatggtgggctgactggga

SEQ ID NO: 189297 - DNA, 20 bp, synthetic construct
  source 1..20: mol_type = other DNA
accatggtgggctgactggg

SEQ ID NO: 189298 - DNA, 20 bp, synthetic construct
  source 1..20: mol_type = other DNA
caccatggtgggctgactgg

SEQ ID NO: 189299 - DNA, 20 bp, synthetic construct
  source 1..20: mol_type = other DNA
ccaccatggtgggctgactg

SEQ ID NO: 189300 - DNA, 20 bp, synthetic construct
  source 1..20: mol_type = other DNA
accaccatggtgggctgact

SEQ ID NO: 189301 - DNA, 20 bp, synthetic construct
  source 1..20: mol_type = other DNA
gaccaccatggtgggctgac

SEQ ID NO: 189302 - DNA, 20 bp, synthetic construct
  source 1..20: mol_type = other DNA
agaccaccatggtgggctga

SEQ ID NO: 189303 - DNA, 20 bp, synthetic construct
  source 1..20: mol_type = other DNA
gagaccaccatggtgggctg

SEQ ID NO: 189304 - DNA, 20 bp, synthetic construct
  source 1..20: mol_type = other DNA
ggagaccaccatggtgggct

SEQ ID NO: 189305 - DNA, 20 bp, synthetic construct
  source 1..20: mol_type = other DNA
cggagaccaccatggtgggc

SEQ ID NO: 189306 - DNA, 20 bp, synthetic construct
  source 1..20: mol_type = other DNA
ccggagaccaccatggtggg

SEQ ID NO: 189307 - DNA, 20 bp, synthetic construct
  source 1..20: mol_type = other DNA
accggagaccaccatggtgg

SEQ ID NO: 189308 - DNA, 20 bp, synthetic construct
  source 1..20: mol_type = other DNA
aaccggagaccaccatggtg

SEQ ID NO: 189309 - DNA, 20 bp, synthetic construct
  source 1..20: mol_type = other DNA
gaaccggagaccaccatggt

SEQ ID NO: 189310 - DNA, 20 bp, synthetic construct
  source 1..20: mol_type = other DNA
ggaaccggagaccaccatgg

SEQ ID NO: 189311 - DNA, 20 bp, synthetic construct
  source 1..20: mol_type = other DNA
aggaaccggagaccaccatg

SEQ ID NO: 189312 - DNA, 20 bp, synthetic construct
  source 1..20: mol_type = other DNA
gaggaaccggagaccaccat

SEQ ID NO: 189313 - DNA, 20 bp, synthetic construct
  source 1..20: mol_type = other DNA
ggaggaaccggagaccacca

SEQ ID NO: 189314 - DNA, 20 bp, synthetic construct
  source 1..20: mol_type = other DNA
tggaggaaccggagaccacc

SEQ ID NO: 189315 - DNA, 20 bp, synthetic construct
  source 1..20: mol_type = other DNA
ctggaggaaccggagaccac

SEQ ID NO: 189316 - DNA, 20 bp, synthetic construct
  source 1..20: mol_type = other DNA
tctggaggaaccggagacca

SEQ ID NO: 189317 - DNA, 20 bp, synthetic construct
  source 1..20: mol_type = other DNA
ttctggaggaaccggagacc

SEQ ID NO: 189318 - DNA, 20 bp, synthetic construct
  source 1..20: mol_type = other DNA
attctggaggaaccggagac

SEQ ID NO: 189319 - DNA, 20 bp, synthetic construct
  source 1..20: mol_type = other DNA
aattctggaggaaccggaga

SEQ ID NO: 189320 - DNA, 20 bp, synthetic construct
  source 1..20: mol_type = other DNA
gaattctggaggaaccggag

SEQ ID NO: 189321 - DNA, 20 bp, synthetic construct
  source 1..20: mol_type = other DNA
ggaattctggaggaaccgga

SEQ ID NO: 189322 - DNA, 20 bp, synthetic construct
  source 1..20: mol_type = other DNA
gggaattctggaggaaccgg

SEQ ID NO: 189323 - DNA, 20 bp, synthetic construct
  source 1..20: mol_type = other DNA
cgggaattctggaggaaccg

SEQ ID NO: 189324 - DNA, 20 bp, synthetic construct
  source 1..20: mol_type = other DNA
gcgggaattctggaggaacc

SEQ ID NO: 189325 - DNA, 20 bp, synthetic construct
  source 1..20: mol_type = other DNA
agcgggaattctggaggaac

SEQ ID NO: 189326 - DNA, 20 bp, synthetic construct
  source 1..20: mol_type = other DNA
aagcgggaattctggaggaa

SEQ ID NO: 189327 - DNA, 20 bp, synthetic construct
  source 1..20: mol_type = other DNA
aaagcgggaattctggagga

SEQ ID NO: 189328 - DNA, 20 bp, synthetic construct
  source 1..20: mol_type = other DNA
aaaagcgggaattctggagg

SEQ ID NO: 189329 - DNA, 20 bp, synthetic construct
  source 1..20: mol_type = other DNA
gaaaagcgggaattctggag

SEQ ID NO: 189330 - DNA, 20 bp, synthetic construct
  source 1..20: mol_type = other DNA
tgaaaagcgggaattctgga

SEQ ID NO: 189331 - DNA, 20 bp, synthetic construct
  source 1..20: mol_type = other DNA
ctgaaaagcgggaattctgg

SEQ ID NO: 189332 - DNA, 20 bp, synthetic construct
  source 1..20: mol_type = other DNA
gctgaaaagcgggaattctg

SEQ ID NO: 189333 - DNA, 20 bp, synthetic construct
  source 1..20: mol_type = other DNA
agctgaaaagcgggaattct

SEQ ID NO: 189334 - DNA, 20 bp, synthetic construct
  source 1..20: mol_type = other DNA
gagctgaaaagcgggaattc

SEQ ID NO: 189335 - DNA, 20 bp, synthetic construct
  source 1..20: mol_type = other DNA
tgagctgaaaagcgggaatt

SEQ ID NO: 189336 - DNA, 20 bp, synthetic construct
  source 1..20: mol_type = other DNA
atgagctgaaaagcgggaat

SEQ ID NO: 189337 - DNA, 20 bp, synthetic construct
  source 1..20: mol_type = other DNA
gatgagctgaaaagcgggaa

SEQ ID NO: 189338 - DNA, 20 bp, synthetic construct
  source 1..20: mol_type = other DNA
ggatgagctgaaaagcggga

SEQ ID NO: 189339 - DNA, 20 bp, synthetic construct
  source 1..20: mol_type = other DNA
gggatgagctgaaaagcggg

SEQ ID NO: 189340 - DNA, 20 bp, synthetic construct
  source 1..20: mol_type = other DNA
ggggatgagctgaaaagcgg

SEQ ID NO: 189341 - DNA, 20 bp, synthetic construct
  source 1..20: mol_type = other DNA
tggggatgagctgaaaagcg

SEQ ID NO: 189342 - DNA, 20 bp, synthetic construct
  source 1..20: mol_type = other DNA
gtggggatgagctgaaaagc

SEQ ID NO: 189343 - DNA, 20 bp, synthetic construct
  source 1..20: mol_type = other DNA
tgtggggatgagctgaaaag

SEQ ID NO: 189344 - DNA, 20 bp, synthetic construct
  source 1..20: mol_type = other DNA
atgtggggatgagctgaaaa

SEQ ID NO: 189345 - DNA, 20 bp, synthetic construct
  source 1..20: mol_type = other DNA
aatgtggggatgagctgaaa

SEQ ID NO: 189346 - DNA, 20 bp, synthetic construct
  source 1..20: mol_type = other DNA
gaatgtggggatgagctgaa

SEQ ID NO: 189347 - DNA, 20 bp, synthetic construct
  source 1..20: mol_type = other DNA
ggaatgtggggatgagctga

SEQ ID NO: 189348 - DNA, 20 bp, synthetic construct
  source 1..20: mol_type = other DNA
gggaatgtggggatgagctg

SEQ ID NO: 189349 - DNA, 20 bp, synthetic construct
  source 1..20: mol_type = other DNA
cgggaatgtggggatgagct

SEQ ID NO: 189350 - DNA, 20 bp, synthetic construct
  source 1..20: mol_type = other DNA
ccgggaatgtggggatgagc

SEQ ID NO: 189351 - DNA, 20 bp, synthetic construct
  source 1..20: mol_type = other DNA
tccgggaatgtggggatgag

SEQ ID NO: 189352 - DNA, 20 bp, synthetic construct
  source 1..20: mol_type = other DNA
ctccgggaatgtggggatga

SEQ ID NO: 189353 - DNA, 20 bp, synthetic construct
  source 1..20: mol_type = other DNA
cctccgggaatgtggggatg

SEQ ID NO: 189354 - DNA, 20 bp, synthetic construct
  source 1..20: mol_type = other DNA
ccctccgggaatgtggggat

SEQ ID NO: 189355 - DNA, 20 bp, synthetic construct
  source 1..20: mol_type = other DNA
tccctccgggaatgtgggga

SEQ ID NO: 189356 - DNA, 20 bp, synthetic construct
  source 1..20: mol_type = other DNA
gtccctccgggaatgtgggg

SEQ ID NO: 189357 - DNA, 20 bp, synthetic construct
  source 1..20: mol_type = other DNA
agtccctccgggaatgtggg

SEQ ID NO: 189358 - DNA, 20 bp, synthetic construct
  source 1..20: mol_type = other DNA
cagtccctccgggaatgtgg

SEQ ID NO: 189359 - DNA, 20 bp, synthetic construct
  source 1..20: mol_type = other DNA
tcagtccctccgggaatgtg

SEQ ID NO: 189360 - DNA, 20 bp, synthetic construct
  source 1..20: mol_type = other DNA
ctcagtccctccgggaatgt

SEQ ID NO: 189361 - DNA, 20 bp, synthetic construct
  source 1..20: mol_type = other DNA
tctcagtccctccgggaatg

SEQ ID NO: 189362 - DNA, 20 bp, synthetic construct
  source 1..20: mol_type = other DNA
ctctcagtccctccgggaat

SEQ ID NO: 189363 - DNA, 20 bp, synthetic construct
  source 1..20: mol_type = other DNA
gctctcagtccctccgggaa

SEQ ID NO: 189364 - DNA, 20 bp, synthetic construct
  source 1..20: mol_type = other DNA
cgctctcagtccctccggga

SEQ ID NO: 189365 - DNA, 20 bp, synthetic construct
  source 1..20: mol_type = other DNA
gcgctctcagtccctccggg

SEQ ID NO: 189366 - DNA, 20 bp, synthetic construct
  source 1..20: mol_type = other DNA
tgcgctctcagtccctccgg

SEQ ID NO: 189367 - DNA, 20 bp, synthetic construct
  source 1..20: mol_type = other DNA
ctgcgctctcagtccctccg

SEQ ID NO: 189368 - DNA, 20 bp, synthetic construct
  source 1..20: mol_type = other DNA
gctgcgctctcagtccctcc

SEQ ID NO: 189369 - DNA, 20 bp, synthetic construct
  source 1..20: mol_type = other DNA
ggctgcgctctcagtccctc

SEQ ID NO: 189370 - DNA, 20 bp, synthetic construct
  source 1..20: mol_type = other DNA
gggctgcgctctcagtccct

SEQ ID NO: 189371 - DNA, 20 bp, synthetic construct
  source 1..20: mol_type = other DNA
ggggctgcgctctcagtccc

SEQ ID NO: 189372 - DNA, 20 bp, synthetic construct
  source 1..20: mol_type = other DNA
tggggctgcgctctcagtcc

SEQ ID NO: 189373 - DNA, 20 bp, synthetic construct
  source 1..20: mol_type = other DNA
ctggggctgcgctctcagtc

SEQ ID NO: 189374 - DNA, 20 bp, synthetic construct
  source 1..20: mol_type = other DNA
cctggggctgcgctctcagt

SEQ ID NO: 189375 - DNA, 20 bp, synthetic construct
  source 1..20: mol_type = other DNA
ccctggggctgcgctctcag

SEQ ID NO: 189376 - DNA, 20 bp, synthetic construct
  source 1..20: mol_type = other DNA
gccctggggctgcgctctca

SEQ ID NO: 189377 - DNA, 20 bp, synthetic construct
  source 1..20: mol_type = other DNA
ggccctggggctgcgctctc

SEQ ID NO: 189378 - DNA, 20 bp, synthetic construct
  source 1..20: mol_type = other DNA
gggccctggggctgcgctct

SEQ ID NO: 189379 - DNA, 20 bp, synthetic construct
  source 1..20: mol_type = other DNA
agggccctggggctgcgctc

SEQ ID NO: 189380 - DNA, 20 bp, synthetic construct
  source 1..20: mol_type = other DNA
cagggccctggggctgcgct

SEQ ID NO: 189381 - DNA, 20 bp, synthetic construct
  source 1..20: mol_type = other DNA
gcagggccctggggctgcgc

SEQ ID NO: 189382 - DNA, 20 bp, synthetic construct
  source 1..20: mol_type = other DNA
agcagggccctggggctgcg

SEQ ID NO: 189383 - DNA, 20 bp, synthetic construct
  source 1..20: mol_type = other DNA
gagcagggccctggggctgc

SEQ ID NO: 189384 - DNA, 20 bp, synthetic construct
  source 1..20: mol_type = other DNA
agagcagggccctggggctg

SEQ ID NO: 189385 - DNA, 20 bp, synthetic construct
  source 1..20: mol_type = other DNA
aagagcagggccctggggct

SEQ ID NO: 189386 - DNA, 20 bp, synthetic construct
  source 1..20: mol_type = other DNA
aaagagcagggccctggggc

SEQ ID NO: 189387 - DNA, 20 bp, synthetic construct
  source 1..20: mol_type = other DNA
caaagagcagggccctgggg

SEQ ID NO: 189388 - DNA, 20 bp, synthetic construct
  source 1..20: mol_type = other DNA
ccaaagagcagggccctggg

SEQ ID NO: 189389 - DNA, 20 bp, synthetic construct
  source 1..20: mol_type = other DNA
cccaaagagcagggccctgg

SEQ ID NO: 189390 - DNA, 20 bp, synthetic construct
  source 1..20: mol_type = other DNA
ccccaaagagcagggccctg

SEQ ID NO: 189391 - DNA, 20 bp, synthetic construct
  source 1..20: mol_type = other DNA
cccccaaagagcagggccct

SEQ ID NO: 189392 - DNA, 20 bp, synthetic construct
  source 1..20: mol_type = other DNA
gcccccaaagagcagggccc

SEQ ID NO: 189393 - DNA, 20 bp, synthetic construct
  source 1..20: mol_type = other DNA
ggcccccaaagagcagggcc

SEQ ID NO: 189394 - DNA, 20 bp, synthetic construct
  source 1..20: mol_type = other DNA
cggcccccaaagagcagggc

SEQ ID NO: 189395 - DNA, 20 bp, synthetic construct
  source 1..20: mol_type = other DNA
acggcccccaaagagcaggg

SEQ ID NO: 189396 - DNA, 20 bp, synthetic construct
  source 1..20: mol_type = other DNA
gacggcccccaaagagcagg

SEQ ID NO: 189397 - DNA, 20 bp, synthetic construct
  source 1..20: mol_type = other DNA
agacggcccccaaagagcag

SEQ ID NO: 189398 - DNA, 20 bp, synthetic construct
  source 1..20: mol_type = other DNA
gagacggcccccaaagagca

SEQ ID NO: 189399 - DNA, 20 bp, synthetic construct
  source 1..20: mol_type = other DNA
agagacggcccccaaagagc

SEQ ID NO: 189400 - DNA, 20 bp, synthetic construct
  source 1..20: mol_type = other DNA
tagagacggcccccaaagag

SEQ ID NO: 189401 - DNA, 20 bp, synthetic construct
  source 1..20: mol_type = other DNA
gtagagacggcccccaaaga

SEQ ID NO: 189402 - DNA, 20 bp, synthetic construct
  source 1..20: mol_type = other DNA
tgtagagacggcccccaaag

SEQ ID NO: 189403 - DNA, 20 bp, synthetic construct
  source 1..20: mol_type = other DNA
gtgtagagacggcccccaaa

SEQ ID NO: 189404 - DNA, 20 bp, synthetic construct
  source 1..20: mol_type = other DNA
ggtgtagagacggcccccaa

SEQ ID NO: 189405 - DNA, 20 bp, synthetic construct
  source 1..20: mol_type = other DNA
gggtgtagagacggccccca

SEQ ID NO: 189406 - DNA, 20 bp, synthetic construct
  source 1..20: mol_type = other DNA
tgggtgtagagacggccccc

SEQ ID NO: 189407 - DNA, 20 bp, synthetic construct
  source 1..20: mol_type = other DNA
ctgggtgtagagacggcccc

SEQ ID NO: 189408 - DNA, 20 bp, synthetic construct
  source 1..20: mol_type = other DNA
tctgggtgtagagacggccc

SEQ ID NO: 189409 - DNA, 20 bp, synthetic construct
  source 1..20: mol_type = other DNA
ctctgggtgtagagacggcc

SEQ ID NO: 189410 - DNA, 20 bp, synthetic construct
  source 1..20: mol_type = other DNA
tctctgggtgtagagacggc

SEQ ID NO: 189411 - DNA, 20 bp, synthetic construct
  source 1..20: mol_type = other DNA
ttctctgggtgtagagacgg

SEQ ID NO: 189412 - DNA, 20 bp, synthetic construct
  source 1..20: mol_type = other DNA
cttctctgggtgtagagacg

SEQ ID NO: 189413 - DNA, 20 bp, synthetic construct
  source 1..20: mol_type = other DNA
gcttctctgggtgtagagac

SEQ ID NO: 189414 - DNA, 20 bp, synthetic construct
  source 1..20: mol_type = other DNA
tgcttctctgggtgtagaga

SEQ ID NO: 189415 - DNA, 20 bp, synthetic construct
  source 1..20: mol_type = other DNA
ctgcttctctgggtgtagag

SEQ ID NO: 189416 - DNA, 20 bp, synthetic construct
  source 1..20: mol_type = other DNA
gctgcttctctgggtgtaga

SEQ ID NO: 189417 - DNA, 20 bp, synthetic construct
  source 1..20: mol_type = other DNA
tgctgcttctctgggtgtag

SEQ ID NO: 189418 - DNA, 20 bp, synthetic construct
  source 1..20: mol_type = other DNA
ttgctgcttctctgggtgta

SEQ ID NO: 189419 - DNA, 20 bp, synthetic construct
  source 1..20: mol_type = other DNA
cttgctgcttctctgggtgt

SEQ ID NO: 189420 - DNA, 20 bp, synthetic construct
  source 1..20: mol_type = other DNA
ccttgctgcttctctgggtg

SEQ ID NO: 189421 - DNA, 20 bp, synthetic construct
  source 1..20: mol_type = other DNA
gccttgctgcttctctgggt

SEQ ID NO: 189422 - DNA, 20 bp, synthetic construct
  source 1..20: mol_type = other DNA
tgccttgctgcttctctggg

SEQ ID NO: 189423 - DNA, 20 bp, synthetic construct
  source 1..20: mol_type = other DNA
atgccttgctgcttctctgg

SEQ ID NO: 189424 - DNA, 20 bp, synthetic construct
  source 1..20: mol_type = other DNA
aatgccttgctgcttctctg

SEQ ID NO: 189425 - DNA, 20 bp, synthetic construct
  source 1..20: mol_type = other DNA
gaatgccttgctgcttctct

SEQ ID NO: 189426 - DNA, 20 bp, synthetic construct
  source 1..20: mol_type = other DNA
ggaatgccttgctgcttctc

SEQ ID NO: 189427 - DNA, 20 bp, synthetic construct
  source 1..20: mol_type = other DNA
aggaatgccttgctgcttct

SEQ ID NO: 189428 - DNA, 20 bp, synthetic construct
  source 1..20: mol_type = other DNA
taggaatgccttgctgcttc

SEQ ID NO: 189429 - DNA, 20 bp, synthetic construct
  source 1..20: mol_type = other DNA
ctaggaatgccttgctgctt

SEQ ID NO: 189430 - DNA, 20 bp, synthetic construct
  source 1..20: mol_type = other DNA
cctaggaatgccttgctgct

SEQ ID NO: 189431 - DNA, 20 bp, synthetic construct
  source 1..20: mol_type = other DNA
acctaggaatgccttgctgc

SEQ ID NO: 189432 - DNA, 20 bp, synthetic construct
  source 1..20: mol_type = other DNA
aacctaggaatgccttgctg

SEQ ID NO: 189433 - DNA, 20 bp, synthetic construct
  source 1..20: mol_type = other DNA
aaacctaggaatgccttgct

SEQ ID NO: 189434 - DNA, 20 bp, synthetic construct
  source 1..20: mol_type = other DNA
gaaacctaggaatgccttgc

SEQ ID NO: 189435 - DNA, 20 bp, synthetic construct
  source 1..20: mol_type = other DNA
agaaacctaggaatgccttg

SEQ ID NO: 189436 - DNA, 20 bp, synthetic construct
  source 1..20: mol_type = other DNA
gagaaacctaggaatgcctt

SEQ ID NO: 189437 - DNA, 20 bp, synthetic construct
  source 1..20: mol_type = other DNA
agagaaacctaggaatgcct

SEQ ID NO: 189438 - DNA, 20 bp, synthetic construct
  source 1..20: mol_type = other DNA
aagagaaacctaggaatgcc

SEQ ID NO: 189439 - DNA, 20 bp, synthetic construct
  source 1..20: mol_type = other DNA
aaagagaaacctaggaatgc

SEQ ID NO: 189440 - DNA, 20 bp, synthetic construct
  source 1..20: mol_type = other DNA
gaaagagaaacctaggaatg

SEQ ID NO: 189441 - DNA, 20 bp, synthetic construct
  source 1..20: mol_type = other DNA
tgaaagagaaacctaggaat

SEQ ID NO: 189442 - DNA, 20 bp, synthetic construct
  source 1..20: mol_type = other DNA
ctgaaagagaaacctaggaa

SEQ ID NO: 189443 - DNA, 20 bp, synthetic construct
  source 1..20: mol_type = other DNA
tctgaaagagaaacctagga

SEQ ID NO: 189444 - DNA, 20 bp, synthetic construct
  source 1..20: mol_type = other DNA
atctgaaagagaaacctagg

SEQ ID NO: 189445 - DNA, 20 bp, synthetic construct
  source 1..20: mol_type = other DNA
catctgaaagagaaacctag

SEQ ID NO: 189446 - DNA, 20 bp, synthetic construct
  source 1..20: mol_type = other DNA
gcatctgaaagagaaaccta

SEQ ID NO: 189447 - DNA, 20 bp, synthetic construct
  source 1..20: mol_type = other DNA
tgcatctgaaagagaaacct

SEQ ID NO: 189448 - DNA, 20 bp, synthetic construct
  source 1..20: mol_type = other DNA
ctgcatctgaaagagaaacc

SEQ ID NO: 189449 - DNA, 20 bp, synthetic construct
  source 1..20: mol_type = other DNA
tctgcatctgaaagagaaac

SEQ ID NO: 189450 - DNA, 20 bp, synthetic construct
  source 1..20: mol_type = other DNA
ttctgcatctgaaagagaaa

SEQ ID NO: 189451 - DNA, 20 bp, synthetic construct
  source 1..20: mol_type = other DNA
gttctgcatctgaaagagaa

SEQ ID NO: 189452 - DNA, 20 bp, synthetic construct
  source 1..20: mol_type = other DNA
agttctgcatctgaaagaga

SEQ ID NO: 189453 - DNA, 20 bp, synthetic construct
  source 1..20: mol_type = other DNA
aagttctgcatctgaaagag

SEQ ID NO: 189454 - DNA, 20 bp, synthetic construct
  source 1..20: mol_type = other DNA
gaagttctgcatctgaaaga

SEQ ID NO: 189455 - DNA, 20 bp, synthetic construct
  source 1..20: mol_type = other DNA
tgaagttctgcatctgaaag

SEQ ID NO: 189456 - DNA, 20 bp, synthetic construct
  source 1..20: mol_type = other DNA
ctgaagttctgcatctgaaa

SEQ ID NO: 189457 - DNA, 20 bp, synthetic construct
  source 1..20: mol_type = other DNA
actgaagttctgcatctgaa

SEQ ID NO: 189458 - DNA, 20 bp, synthetic construct
  source 1..20: mol_type = other DNA
cactgaagttctgcatctga

SEQ ID NO: 189459 - DNA, 20 bp, synthetic construct
  source 1..20: mol_type = other DNA
acactgaagttctgcatctg

SEQ ID NO: 189460 - DNA, 20 bp, synthetic construct
  source 1..20: mol_type = other DNA
aacactgaagttctgcatct

SEQ ID NO: 189461 - DNA, 20 bp, synthetic construct
  source 1..20: mol_type = other DNA
gaacactgaagttctgcatc

SEQ ID NO: 189462 - DNA, 20 bp, synthetic construct
  source 1..20: mol_type = other DNA
tgaacactgaagttctgcat

SEQ ID NO: 189463 - DNA, 20 bp, synthetic construct
  source 1..20: mol_type = other DNA
ctgaacactgaagttctgca

SEQ ID NO: 189464 - DNA, 20 bp, synthetic construct
  source 1..20: mol_type = other DNA
tctgaacactgaagttctgc

SEQ ID NO: 189465 - DNA, 20 bp, synthetic construct
  source 1..20: mol_type = other DNA
ctctgaacactgaagttctg

SEQ ID NO: 189466 - DNA, 20 bp, synthetic construct
  source 1..20: mol_type = other DNA
tctctgaacactgaagttct

SEQ ID NO: 189467 - DNA, 20 bp, synthetic construct
  source 1..20: mol_type = other DNA
atctctgaacactgaagttc

SEQ ID NO: 189468 - DNA, 20 bp, synthetic construct
  source 1..20: mol_type = other DNA
catctctgaacactgaagtt

SEQ ID NO: 189469 - DNA, 20 bp, synthetic construct
  source 1..20: mol_type = other DNA
acatctctgaacactgaagt

SEQ ID NO: 189470 - DNA, 20 bp, synthetic construct
  source 1..20: mol_type = other DNA
aacatctctgaacactgaag

SEQ ID NO: 189471 - DNA, 20 bp, synthetic construct
  source 1..20: mol_type = other DNA
gaacatctctgaacactgaa

SEQ ID NO: 189472 - DNA, 20 bp, synthetic construct
  source 1..20: mol_type = other DNA
ggaacatctctgaacactga

SEQ ID NO: 189473 - DNA, 20 bp, synthetic construct
  source 1..20: mol_type = other DNA
gggaacatctctgaacactg

SEQ ID NO: 189474 - DNA, 20 bp, synthetic construct
  source 1..20: mol_type = other DNA
tgggaacatctctgaacact

SEQ ID NO: 189475 - DNA, 20 bp, synthetic construct
  source 1..20: mol_type = other DNA
gtgggaacatctctgaacac

SEQ ID NO: 189476 - DNA, 20 bp, synthetic construct
  source 1..20: mol_type = other DNA
agtgggaacatctctgaaca

SEQ ID NO: 189477 - DNA, 20 bp, synthetic construct
  source 1..20: mol_type = other DNA
cagtgggaacatctctgaac

SEQ ID NO: 189478 - DNA, 20 bp, synthetic construct
  source 1..20: mol_type = other DNA
ccagtgggaacatctctgaa

SEQ ID NO: 189479 - DNA, 20 bp, synthetic construct
  source 1..20: mol_type = other DNA
accagtgggaacatctctga

SEQ ID NO: 189480 - DNA, 20 bp, synthetic construct
  source 1..20: mol_type = other DNA
gaccagtgggaacatctctg

SEQ ID NO: 189481 - DNA, 20 bp, synthetic construct
  source 1..20: mol_type = other DNA
ggaccagtgggaacatctct

SEQ ID NO: 189482 - DNA, 20 bp, synthetic construct
  source 1..20: mol_type = other DNA
aggaccagtgggaacatctc

SEQ ID NO: 189483 - DNA, 20 bp, synthetic construct
  source 1..20: mol_type = other DNA
caggaccagtgggaacatct

SEQ ID NO: 189484 - DNA, 20 bp, synthetic construct
  source 1..20: mol_type = other DNA
tcaggaccagtgggaacatc

SEQ ID NO: 189485 - DNA, 20 bp, synthetic construct
  source 1..20: mol_type = other DNA
ctcaggaccagtgggaacat

SEQ ID NO: 189486 - DNA, 20 bp, synthetic construct
  source 1..20: mol_type = other DNA
tctcaggaccagtgggaaca

SEQ ID NO: 189487 - DNA, 20 bp, synthetic construct
  source 1..20: mol_type = other DNA
ctctcaggaccagtgggaac

SEQ ID NO: 189488 - DNA, 20 bp, synthetic construct
  source 1..20: mol_type = other DNA
cctctcaggaccagtgggaa

SEQ ID NO: 189489 - DNA, 20 bp, synthetic construct
  source 1..20: mol_type = other DNA
ccctctcaggaccagtggga

SEQ ID NO: 189490 - DNA, 20 bp, synthetic construct
  source 1..20: mol_type = other DNA
gccctctcaggaccagtggg

SEQ ID NO: 189491 - DNA, 20 bp, synthetic construct
  source 1..20: mol_type = other DNA
agccctctcaggaccagtgg

SEQ ID NO: 189492 - DNA, 20 bp, synthetic construct
  source 1..20: mol_type = other DNA
gagccctctcaggaccagtg

SEQ ID NO: 189493 - DNA, 20 bp, synthetic construct
  source 1..20: mol_type = other DNA
tgagccctctcaggaccagt

SEQ ID NO: 189494 - DNA, 20 bp, synthetic construct
  source 1..20: mol_type = other DNA
ctgagccctctcaggaccag

SEQ ID NO: 189495 - DNA, 20 bp, synthetic construct
  source 1..20: mol_type = other DNA
actgagccctctcaggacca

SEQ ID NO: 189496 - DNA, 20 bp, synthetic construct
  source 1..20: mol_type = other DNA
aactgagccctctcaggacc

SEQ ID NO: 189497 - DNA, 20 bp, synthetic construct
  source 1..20: mol_type = other DNA
gaactgagccctctcaggac

SEQ ID NO: 189498 - DNA, 20 bp, synthetic construct
  source 1..20: mol_type = other DNA
tgaactgagccctctcagga

SEQ ID NO: 189499 - DNA, 20 bp, synthetic construct
  source 1..20: mol_type = other DNA
ctgaactgagccctctcagg

SEQ ID NO: 189500 - DNA, 20 bp, synthetic construct
  source 1..20: mol_type = other DNA
gctgaactgagccctctcag

SEQ ID NO: 189501 - DNA, 20 bp, synthetic construct
  source 1..20: mol_type = other DNA
agctgaactgagccctctca

SEQ ID NO: 189502 - DNA, 20 bp, synthetic construct
  source 1..20: mol_type = other DNA
aagctgaactgagccctctc

SEQ ID NO: 189503 - DNA, 20 bp, synthetic construct
  source 1..20: mol_type = other DNA
aaagctgaactgagccctct

SEQ ID NO: 189504 - DNA, 20 bp, synthetic construct
  source 1..20: mol_type = other DNA
taaagctgaactgagccctc

SEQ ID NO: 189505 - DNA, 20 bp, synthetic construct
  source 1..20: mol_type = other DNA
ttaaagctgaactgagccct

SEQ ID NO: 189506 - DNA, 20 bp, synthetic construct
  source 1..20: mol_type = other DNA
attaaagctgaactgagccc

SEQ ID NO: 189507 - DNA, 20 bp, synthetic construct
  source 1..20: mol_type = other DNA
cattaaagctgaactgagcc

SEQ ID NO: 189508 - DNA, 20 bp, synthetic construct
  source 1..20: mol_type = other DNA
tcattaaagctgaactgagc

SEQ ID NO: 189509 - DNA, 20 bp, synthetic construct
  source 1..20: mol_type = other DNA
gtcattaaagctgaactgag

SEQ ID NO: 189510 - DNA, 20 bp, synthetic construct
  source 1..20: mol_type = other DNA
agtcattaaagctgaactga

SEQ ID NO: 189511 - DNA, 20 bp, synthetic construct
  source 1..20: mol_type = other DNA
cagtcattaaagctgaactg

SEQ ID NO: 189512 - DNA, 20 bp, synthetic construct
  source 1..20: mol_type = other DNA
gcagtcattaaagctgaact

SEQ ID NO: 189513 - DNA, 20 bp, synthetic construct
  source 1..20: mol_type = other DNA
cgcagtcattaaagctgaac

SEQ ID NO: 189514 - DNA, 20 bp, synthetic construct
  source 1..20: mol_type = other DNA
gcgcagtcattaaagctgaa

SEQ ID NO: 189515 - DNA, 20 bp, synthetic construct
  source 1..20: mol_type = other DNA
agcgcagtcattaaagctga

SEQ ID NO: 189516 - DNA, 20 bp, synthetic construct
  source 1..20: mol_type = other DNA
cagcgcagtcattaaagctg

SEQ ID NO: 189517 - DNA, 20 bp, synthetic construct
  source 1..20: mol_type = other DNA
acagcgcagtcattaaagct

SEQ ID NO: 189518 - DNA, 20 bp, synthetic construct
  source 1..20: mol_type = other DNA
aacagcgcagtcattaaagc

SEQ ID NO: 189519 - DNA, 20 bp, synthetic construct
  source 1..20: mol_type = other DNA
caacagcgcagtcattaaag

SEQ ID NO: 189520 - DNA, 20 bp, synthetic construct
  source 1..20: mol_type = other DNA
gcaacagcgcagtcattaaa

SEQ ID NO: 189521 - DNA, 20 bp, synthetic construct
  source 1..20: mol_type = other DNA
cgcaacagcgcagtcattaa

SEQ ID NO: 189522 - DNA, 20 bp, synthetic construct
  source 1..20: mol_type = other DNA
acgcaacagcgcagtcatta

SEQ ID NO: 189523 - DNA, 20 bp, synthetic construct
  source 1..20: mol_type = other DNA
cacgcaacagcgcagtcatt

SEQ ID NO: 189524 - DNA, 20 bp, synthetic construct
  source 1..20: mol_type = other DNA
acacgcaacagcgcagtcat

SEQ ID NO: 189525 - DNA, 20 bp, synthetic construct
  source 1..20: mol_type = other DNA
cacacgcaacagcgcagtca

SEQ ID NO: 189526 - DNA, 20 bp, synthetic construct
  source 1..20: mol_type = other DNA
gcacacgcaacagcgcagtc

SEQ ID NO: 189527 - DNA, 20 bp, synthetic construct
  source 1..20: mol_type = other DNA
agcacacgcaacagcgcagt

SEQ ID NO: 189528 - DNA, 20 bp, synthetic construct
  source 1..20: mol_type = other DNA
gagcacacgcaacagcgcag

SEQ ID NO: 189529 - DNA, 20 bp, synthetic construct
  source 1..20: mol_type = other DNA
agagcacacgcaacagcgca

SEQ ID NO: 189530 - DNA, 20 bp, synthetic construct
  source 1..20: mol_type = other DNA
cagagcacacgcaacagcgc

SEQ ID NO: 189531 - DNA, 20 bp, synthetic construct
  source 1..20: mol_type = other DNA
gcagagcacacgcaacagcg

SEQ ID NO: 189532 - DNA, 20 bp, synthetic construct
  source 1..20: mol_type = other DNA
tgcagagcacacgcaacagc

SEQ ID NO: 189533 - DNA, 20 bp, synthetic construct
  source 1..20: mol_type = other DNA
ctgcagagcacacgcaacag

SEQ ID NO: 189534 - DNA, 20 bp, synthetic construct
  source 1..20: mol_type = other DNA
tctgcagagcacacgcaaca

SEQ ID NO: 189535 - DNA, 20 bp, synthetic construct
  source 1..20: mol_type = other DNA
ctctgcagagcacacgcaac

SEQ ID NO: 189536 - DNA, 20 bp, synthetic construct
  source 1..20: mol_type = other DNA
cctctgcagagcacacgcaa

SEQ ID NO: 189537 - DNA, 20 bp, synthetic construct
  source 1..20: mol_type = other DNA
ccctctgcagagcacacgca

SEQ ID NO: 189538 - DNA, 20 bp, synthetic construct
  source 1..20: mol_type = other DNA
gccctctgcagagcacacgc

SEQ ID NO: 189539 - DNA, 20 bp, synthetic construct
  source 1..20: mol_type = other DNA
cgccctctgcagagcacacg

SEQ ID NO: 189540 - DNA, 20 bp, synthetic construct
  source 1..20: mol_type = other DNA
ccgccctctgcagagcacac

SEQ ID NO: 189541 - DNA, 20 bp, synthetic construct
  source 1..20: mol_type = other DNA
cccgccctctgcagagcaca

SEQ ID NO: 189542 - DNA, 20 bp, synthetic construct
  source 1..20: mol_type = other DNA
acccgccctctgcagagcac

SEQ ID NO: 189543 - DNA, 20 bp, synthetic construct
  source 1..20: mol_type = other DNA
cacccgccctctgcagagca

SEQ ID NO: 189544 - DNA, 20 bp, synthetic construct
  source 1..20: mol_type = other DNA
ccacccgccctctgcagagc

SEQ ID NO: 189545 - DNA, 20 bp, synthetic construct
  source 1..20: mol_type = other DNA
gccacccgccctctgcagag

SEQ ID NO: 189546 - DNA, 20 bp, synthetic construct
  source 1..20: mol_type = other DNA
ggccacccgccctctgcaga

SEQ ID NO: 189547 - DNA, 20 bp, synthetic construct
  source 1..20: mol_type = other DNA
gggccacccgccctctgcag

SEQ ID NO: 189548 - DNA, 20 bp, synthetic construct
  source 1..20: mol_type = other DNA
tgggccacccgccctctgca

SEQ ID NO: 189549 - DNA, 20 bp, synthetic construct
  source 1..20: mol_type = other DNA
ctgggccacccgccctctgc

SEQ ID NO: 189550 - DNA, 20 bp, synthetic construct
  source 1..20: mol_type = other DNA
gctgggccacccgccctctg

SEQ ID NO: 189551 - DNA, 20 bp, synthetic construct
  source 1..20: mol_type = other DNA
cgctgggccacccgccctct

SEQ ID NO: 189552 - DNA, 20 bp, synthetic construct
  source 1..20: mol_type = other DNA
acgctgggccacccgccctc

SEQ ID NO: 189553 - DNA, 20 bp, synthetic construct
  source 1..20: mol_type = other DNA
cacgctgggccacccgccct

SEQ ID NO: 189554 - DNA, 20 bp, synthetic construct
  source 1..20: mol_type = other DNA
ccacgctgggccacccgccc

SEQ ID NO: 189555 - DNA, 20 bp, synthetic construct
  source 1..20: mol_type = other DNA
gccacgctgggccacccgcc

SEQ ID NO: 189556 - DNA, 20 bp, synthetic construct
  source 1..20: mol_type = other DNA
agccacgctgggccacccgc

SEQ ID NO: 189557 - DNA, 20 bp, synthetic construct
  source 1..20: mol_type = other DNA
cagccacgctgggccacccg

SEQ ID NO: 189558 - DNA, 20 bp, synthetic construct
  source 1..20: mol_type = other DNA
tcagccacgctgggccaccc

SEQ ID NO: 189559 - DNA, 20 bp, synthetic construct
  source 1..20: mol_type = other DNA
gtcagccacgctgggccacc

SEQ ID NO: 189560 - DNA, 20 bp, synthetic construct
  source 1..20: mol_type = other DNA
agtcagccacgctgggccac

SEQ ID NO: 189561 - DNA, 20 bp, synthetic construct
  source 1..20: mol_type = other DNA
cagtcagccacgctgggcca

SEQ ID NO: 189562 - DNA, 20 bp, synthetic construct
  source 1..20: mol_type = other DNA
gcagtcagccacgctgggcc

SEQ ID NO: 189563 - DNA, 20 bp, synthetic construct
  source 1..20: mol_type = other DNA
tgcagtcagccacgctgggc

SEQ ID NO: 189564 - DNA, 20 bp, synthetic construct
  source 1..20: mol_type = other DNA
ctgcagtcagccacgctggg

SEQ ID NO: 189565 - DNA, 20 bp, synthetic construct
  source 1..20: mol_type = other DNA
actgcagtcagccacgctgg

SEQ ID NO: 189566 - DNA, 20 bp, synthetic construct
  source 1..20: mol_type = other DNA
aactgcagtcagccacgctg

SEQ ID NO: 189567 - DNA, 20 bp, synthetic construct
  source 1..20: mol_type = other DNA
aaactgcagtcagccacgct

SEQ ID NO: 189568 - DNA, 20 bp, synthetic construct
  source 1..20: mol_type = other DNA
aaaactgcagtcagccacgc

SEQ ID NO: 189569 - DNA, 20 bp, synthetic construct
  source 1..20: mol_type = other DNA
gaaaactgcagtcagccacg

SEQ ID NO: 189570 - DNA, 20 bp, synthetic construct
  source 1..20: mol_type = other DNA
ggaaaactgcagtcagccac

SEQ ID NO: 189571 - DNA, 20 bp, synthetic construct
  source 1..20: mol_type = other DNA
aggaaaactgcagtcagcca

SEQ ID NO: 189572 - DNA, 20 bp, synthetic construct
  source 1..20: mol_type = other DNA
caggaaaactgcagtcagcc

SEQ ID NO: 189573 - DNA, 20 bp, synthetic construct
  source 1..20: mol_type = other DNA
tcaggaaaactgcagtcagc

SEQ ID NO: 189574 - DNA, 20 bp, synthetic construct
  source 1..20: mol_type = other DNA
gtcaggaaaactgcagtcag

SEQ ID NO: 189575 - DNA, 20 bp, synthetic construct
  source 1..20: mol_type = other DNA
cgtcaggaaaactgcagtca

SEQ ID NO: 189576 - DNA, 20 bp, synthetic construct
  source 1..20: mol_type = other DNA
acgtcaggaaaactgcagtc

SEQ ID NO: 189577 - DNA, 20 bp, synthetic construct
  source 1..20: mol_type = other DNA
cacgtcaggaaaactgcagt

SEQ ID NO: 189578 - DNA, 20 bp, synthetic construct
  source 1..20: mol_type = other DNA
ccacgtcaggaaaactgcag

SEQ ID NO: 189579 - DNA, 20 bp, synthetic construct
  source 1..20: mol_type = other DNA
tccacgtcaggaaaactgca

SEQ ID NO: 189580 - DNA, 20 bp, synthetic construct
  source 1..20: mol_type = other DNA
ctccacgtcaggaaaactgc

SEQ ID NO: 189581 - DNA, 20 bp, synthetic construct
  source 1..20: mol_type = other DNA
gctccacgtcaggaaaactg

SEQ ID NO: 189582 - DNA, 20 bp, synthetic construct
  source 1..20: mol_type = other DNA
ggctccacgtcaggaaaact

SEQ ID NO: 189583 - DNA, 20 bp, synthetic construct
  source 1..20: mol_type = other DNA
gggctccacgtcaggaaaac

SEQ ID NO: 189584 - DNA, 20 bp, synthetic construct
  source 1..20: mol_type = other DNA
cgggctccacgtcaggaaaa

SEQ ID NO: 189585 - DNA, 20 bp, synthetic construct
  source 1..20: mol_type = other DNA
tcgggctccacgtcaggaaa

SEQ ID NO: 189586 - DNA, 20 bp, synthetic construct
  source 1..20: mol_type = other DNA
ctcgggctccacgtcaggaa

SEQ ID NO: 189587 - DNA, 20 bp, synthetic construct
  source 1..20: mol_type = other DNA
gctcgggctccacgtcagga

SEQ ID NO: 189588 - DNA, 20 bp, synthetic construct
  source 1..20: mol_type = other DNA
ggctcgggctccacgtcagg

SEQ ID NO: 189589 - DNA, 20 bp, synthetic construct
  source 1..20: mol_type = other DNA
aggctcgggctccacgtcag

SEQ ID NO: 189590 - DNA, 20 bp, synthetic construct
  source 1..20: mol_type = other DNA
caggctcgggctccacgtca

SEQ ID NO: 189591 - DNA, 20 bp, synthetic construct
  source 1..20: mol_type = other DNA
gcaggctcgggctccacgtc

SEQ ID NO: 189592 - DNA, 20 bp, synthetic construct
  source 1..20: mol_type = other DNA
ggcaggctcgggctccacgt

SEQ ID NO: 189593 - DNA, 20 bp, synthetic construct
  source 1..20: mol_type = other DNA
gggcaggctcgggctccacg

SEQ ID NO: 189594 - DNA, 20 bp, synthetic construct
  source 1..20: mol_type = other DNA
ggggcaggctcgggctccac

SEQ ID NO: 189595 - DNA, 20 bp, synthetic construct
  source 1..20: mol_type = other DNA
cggggcaggctcgggctcca

SEQ ID NO: 189596 - DNA, 20 bp, synthetic construct
  source 1..20: mol_type = other DNA
gcggggcaggctcgggctcc

SEQ ID NO: 189597 - DNA, 20 bp, synthetic construct
  source 1..20: mol_type = other DNA
agcggggcaggctcgggctc

SEQ ID NO: 189598 - DNA, 20 bp, synthetic construct
  source 1..20: mol_type = other DNA
cagcggggcaggctcgggct

SEQ ID NO: 189599 - DNA, 20 bp, synthetic construct
  source 1..20: mol_type = other DNA
acagcggggcaggctcgggc

SEQ ID NO: 189600 - DNA, 20 bp, synthetic construct
  source 1..20: mol_type = other DNA
aacagcggggcaggctcggg

SEQ ID NO: 189601 - DNA, 20 bp, synthetic construct
  source 1..20: mol_type = other DNA
aaacagcggggcaggctcgg

SEQ ID NO: 189602 - DNA, 20 bp, synthetic construct
  source 1..20: mol_type = other DNA
taaacagcggggcaggctcg

SEQ ID NO: 189603 - DNA, 20 bp, synthetic construct
  source 1..20: mol_type = other DNA
ataaacagcggggcaggctc

SEQ ID NO: 189604 - DNA, 20 bp, synthetic construct
  source 1..20: mol_type = other DNA
aataaacagcggggcaggct

SEQ ID NO: 189605 - DNA, 20 bp, synthetic construct
  source 1..20: mol_type = other DNA
taataaacagcggggcaggc

SEQ ID NO: 189606 - DNA, 20 bp, synthetic construct
  source 1..20: mol_type = other DNA
ttaataaacagcggggcagg

SEQ ID NO: 189607 - DNA, 20 bp, synthetic construct
  source 1..20: mol_type = other DNA
attaataaacagcggggcag

SEQ ID NO: 189608 - DNA, 20 bp, synthetic construct
  source 1..20: mol_type = other DNA
aattaataaacagcggggca

SEQ ID NO: 189609 - DNA, 20 bp, synthetic construct
  source 1..20: mol_type = other DNA
taattaataaacagcggggc

SEQ ID NO: 189610 - DNA, 20 bp, synthetic construct
  source 1..20: mol_type = other DNA
ttaattaataaacagcgggg

SEQ ID NO: 189611 - DNA, 20 bp, synthetic construct
  source 1..20: mol_type = other DNA
cttaattaataaacagcggg

SEQ ID NO: 189612 - DNA, 20 bp, synthetic construct
  source 1..20: mol_type = other DNA
ccttaattaataaacagcgg

SEQ ID NO: 189613 - DNA, 20 bp, synthetic construct
  source 1..20: mol_type = other DNA
tccttaattaataaacagcg

SEQ ID NO: 189614 - DNA, 20 bp, synthetic construct
  source 1..20: mol_type = other DNA
atccttaattaataaacagc

SEQ ID NO: 189615 - DNA, 20 bp, synthetic construct
  source 1..20: mol_type = other DNA
gatccttaattaataaacag

SEQ ID NO: 189616 - DNA, 20 bp, synthetic construct
  source 1..20: mol_type = other DNA
tgatccttaattaataaaca

SEQ ID NO: 189617 - DNA, 20 bp, synthetic construct
  source 1..20: mol_type = other DNA
gtgatccttaattaataaac

SEQ ID NO: 189618 - DNA, 20 bp, synthetic construct
  source 1..20: mol_type = other DNA
agtgatccttaattaataaa

SEQ ID NO: 189619 - DNA, 20 bp, synthetic construct
  source 1..20: mol_type = other DNA
gagtgatccttaattaataa

SEQ ID NO: 189620 - DNA, 20 bp, synthetic construct
  source 1..20: mol_type = other DNA
agagtgatccttaattaata

SEQ ID NO: 189621 - DNA, 20 bp, synthetic construct
  source 1..20: mol_type = other DNA
cagagtgatccttaattaat

SEQ ID NO: 189622 - DNA, 20 bp, synthetic construct
  source 1..20: mol_type = other DNA
gcagagtgatccttaattaa

SEQ ID NO: 189623 - DNA, 20 bp, synthetic construct
  source 1..20: mol_type = other DNA
agcagagtgatccttaatta

SEQ ID NO: 189624 - DNA, 20 bp, synthetic construct
  source 1..20: mol_type = other DNA
aagcagagtgatccttaatt

SEQ ID NO: 189625 - DNA, 20 bp, synthetic construct
  source 1..20: mol_type = other DNA
caagcagagtgatccttaat

SEQ ID NO: 189626 - DNA, 20 bp, synthetic construct
  source 1..20: mol_type = other DNA
gcaagcagagtgatccttaa

SEQ ID NO: 189627 - DNA, 20 bp, synthetic construct
  source 1..20: mol_type = other DNA
tgcaagcagagtgatcctta

SEQ ID NO: 189628 - DNA, 20 bp, synthetic construct
  source 1..20: mol_type = other DNA
ctgcaagcagagtgatcctt

SEQ ID NO: 189629 - DNA, 20 bp, synthetic construct
  source 1..20: mol_type = other DNA
tctgcaagcagagtgatcct

SEQ ID NO: 189630 - DNA, 20 bp, synthetic construct
  source 1..20: mol_type = other DNA
ttctgcaagcagagtgatcc

SEQ ID NO: 189631 - DNA, 20 bp, synthetic construct
  source 1..20: mol_type = other DNA
gttctgcaagcagagtgatc

SEQ ID NO: 189632 - DNA, 20 bp, synthetic construct
  source 1..20: mol_type = other DNA
ggttctgcaagcagagtgat

SEQ ID NO: 189633 - DNA, 20 bp, synthetic construct
  source 1..20: mol_type = other DNA
gggttctgcaagcagagtga

SEQ ID NO: 189634 - DNA, 20 bp, synthetic construct
  source 1..20: mol_type = other DNA
agggttctgcaagcagagtg

SEQ ID NO: 189635 - DNA, 20 bp, synthetic construct
  source 1..20: mol_type = other DNA
cagggttctgcaagcagagt

SEQ ID NO: 189636 - DNA, 20 bp, synthetic construct
  source 1..20: mol_type = other DNA
tcagggttctgcaagcagag

SEQ ID NO: 189637 - DNA, 20 bp, synthetic construct
  source 1..20: mol_type = other DNA
ttcagggttctgcaagcaga

SEQ ID NO: 189638 - DNA, 20 bp, synthetic construct
  source 1..20: mol_type = other DNA
gttcagggttctgcaagcag

SEQ ID NO: 189639 - DNA, 20 bp, synthetic construct
  source 1..20: mol_type = other DNA
agttcagggttctgcaagca

SEQ ID NO: 189640 - DNA, 20 bp, synthetic construct
  source 1..20: mol_type = other DNA
gagttcagggttctgcaagc

SEQ ID NO: 189641 - DNA, 20 bp, synthetic construct
  source 1..20: mol_type = other DNA
ggagttcagggttctgcaag

SEQ ID NO: 189642 - DNA, 20 bp, synthetic construct
  source 1..20: mol_type = other DNA
gggagttcagggttctgcaa

SEQ ID NO: 189643 - DNA, 20 bp, synthetic construct
  source 1..20: mol_type = other DNA
ggggagttcagggttctgca

SEQ ID NO: 189644 - DNA, 20 bp, synthetic construct
  source 1..20: mol_type = other DNA
tggggagttcagggttctgc

SEQ ID NO: 189645 - DNA, 20 bp, synthetic construct
  source 1..20: mol_type = other DNA
ctggggagttcagggttctg

SEQ ID NO: 189646 - DNA, 20 bp, synthetic construct
  source 1..20: mol_type = other DNA
tctggggagttcagggttct

SEQ ID NO: 189647 - DNA, 20 bp, synthetic construct
  source 1..20: mol_type = other DNA
ttctggggagttcagggttc

SEQ ID NO: 189648 - DNA, 20 bp, synthetic construct
  source 1..20: mol_type = other DNA
gttctggggagttcagggtt

SEQ ID NO: 189649 - DNA, 20 bp, synthetic construct
  source 1..20: mol_type = other DNA
agttctggggagttcagggt

SEQ ID NO: 189650 - DNA, 20 bp, synthetic construct
  source 1..20: mol_type = other DNA
cagttctggggagttcaggg

SEQ ID NO: 189651 - DNA, 20 bp, synthetic construct
  source 1..20: mol_type = other DNA
acagttctggggagttcagg

SEQ ID NO: 189652 - DNA, 20 bp, synthetic construct
  source 1..20: mol_type = other DNA
cacagttctggggagttcag

SEQ ID NO: 189653 - DNA, 20 bp, synthetic construct
  source 1..20: mol_type = other DNA
tcacagttctggggagttca

SEQ ID NO: 189654 - DNA, 20 bp, synthetic construct
  source 1..20: mol_type = other DNA
ctcacagttctggggagttc

SEQ ID NO: 189655 - DNA, 20 bp, synthetic construct
  source 1..20: mol_type = other DNA
cctcacagttctggggagtt

SEQ ID NO: 189656 - DNA, 20 bp, synthetic construct
  source 1..20: mol_type = other DNA
acctcacagttctggggagt

SEQ ID NO: 189657 - DNA, 20 bp, synthetic construct
  source 1..20: mol_type = other DNA
cacctcacagttctggggag

SEQ ID NO: 189658 - DNA, 20 bp, synthetic construct
  source 1..20: mol_type = other DNA
ccacctcacagttctgggga

SEQ ID NO: 189659 - DNA, 20 bp, synthetic construct
  source 1..20: mol_type = other DNA
cccacctcacagttctgggg

SEQ ID NO: 189660 - DNA, 20 bp, synthetic construct
  source 1..20: mol_type = other DNA
tcccacctcacagttctggg

SEQ ID NO: 189661 - DNA, 20 bp, synthetic construct
  source 1..20: mol_type = other DNA
ctcccacctcacagttctgg

SEQ ID NO: 189662 - DNA, 20 bp, synthetic construct
  source 1..20: mol_type = other DNA
tctcccacctcacagttctg

SEQ ID NO: 189663 - DNA, 20 bp, synthetic construct
  source 1..20: mol_type = other DNA
ttctcccacctcacagttct

SEQ ID NO: 189664 - DNA, 20 bp, synthetic construct
  source 1..20: mol_type = other DNA
gttctcccacctcacagttc

SEQ ID NO: 189665 - DNA, 20 bp, synthetic construct
  source 1..20: mol_type = other DNA
ggttctcccacctcacagtt

SEQ ID NO: 189666 - DNA, 20 bp, synthetic construct
  source 1..20: mol_type = other DNA
gggttctcccacctcacagt

SEQ ID NO: 189667 - DNA, 20 bp, synthetic construct
  source 1..20: mol_type = other DNA
ggggttctcccacctcacag

SEQ ID NO: 189668 - DNA, 20 bp, synthetic construct
  source 1..20: mol_type = other DNA
cggggttctcccacctcaca

SEQ ID NO: 189669 - DNA, 20 bp, synthetic construct
  source 1..20: mol_type = other DNA
tcggggttctcccacctcac

SEQ ID NO: 189670 - DNA, 20 bp, synthetic construct
  source 1..20: mol_type = other DNA
ctcggggttctcccacctca

SEQ ID NO: 189671 - DNA, 20 bp, synthetic construct
  source 1..20: mol_type = other DNA
tctcggggttctcccacctc

SEQ ID NO: 189672 - DNA, 20 bp, synthetic construct
  source 1..20: mol_type = other DNA
ctctcggggttctcccacct

SEQ ID NO: 189673 - DNA, 20 bp, synthetic construct
  source 1..20: mol_type = other DNA
cctctcggggttctcccacc

SEQ ID NO: 189674 - DNA, 20 bp, synthetic construct
  source 1..20: mol_type = other DNA
gcctctcggggttctcccac

SEQ ID NO: 189675 - DNA, 20 bp, synthetic construct
  source 1..20: mol_type = other DNA
ggcctctcggggttctccca

SEQ ID NO: 189676 - DNA, 20 bp, synthetic construct
  source 1..20: mol_type = other DNA
tggcctctcggggttctccc

SEQ ID NO: 189677 - DNA, 20 bp, synthetic construct
  source 1..20: mol_type = other DNA
gtggcctctcggggttctcc

SEQ ID NO: 189678 - DNA, 20 bp, synthetic construct
  source 1..20: mol_type = other DNA
ggtggcctctcggggttctc

SEQ ID NO: 189679 - DNA, 20 bp, synthetic construct
  source 1..20: mol_type = other DNA
aggtggcctctcggggttct

SEQ ID NO: 189680 - DNA, 20 bp, synthetic construct
  source 1..20: mol_type = other DNA
caggtggcctctcggggttc

SEQ ID NO: 189681 - DNA, 20 bp, synthetic construct
  source 1..20: mol_type = other DNA
ccaggtggcctctcggggtt

SEQ ID NO: 189682 - DNA, 20 bp, synthetic construct
  source 1..20: mol_type = other DNA
gccaggtggcctctcggggt

SEQ ID NO: 189683 - DNA, 20 bp, synthetic construct
  source 1..20: mol_type = other DNA
ggccaggtggcctctcgggg

SEQ ID NO: 189684 - DNA, 20 bp, synthetic construct
  source 1..20: mol_type = other DNA
gggccaggtggcctctcggg

SEQ ID NO: 189685 - DNA, 20 bp, synthetic construct
  source 1..20: mol_type = other DNA
ggggccaggtggcctctcgg

SEQ ID NO: 189686 - DNA, 20 bp, synthetic construct
  source 1..20: mol_type = other DNA
tggggccaggtggcctctcg

SEQ ID NO: 189687 - DNA, 20 bp, synthetic construct
  source 1..20: mol_type = other DNA
gtggggccaggtggcctctc

SEQ ID NO: 189688 - DNA, 20 bp, synthetic construct
  source 1..20: mol_type = other DNA
agtggggccaggtggcctct

SEQ ID NO: 189689 - DNA, 20 bp, synthetic construct
  source 1..20: mol_type = other DNA
aagtggggccaggtggcctc

SEQ ID NO: 189690 - DNA, 20 bp, synthetic construct
  source 1..20: mol_type = other DNA
gaagtggggccaggtggcct

SEQ ID NO: 189691 - DNA, 20 bp, synthetic construct
  source 1..20: mol_type = other DNA
ggaagtggggccaggtggcc

SEQ ID NO: 189692 - DNA, 20 bp, synthetic construct
  source 1..20: mol_type = other DNA
gggaagtggggccaggtggc

SEQ ID NO: 189693 - DNA, 20 bp, synthetic construct
  source 1..20: mol_type = other DNA
tgggaagtggggccaggtgg

SEQ ID NO: 189694 - DNA, 20 bp, synthetic construct
  source 1..20: mol_type = other DNA
gtgggaagtggggccaggtg

SEQ ID NO: 189695 - DNA, 20 bp, synthetic construct
  source 1..20: mol_type = other DNA
ggtgggaagtggggccaggt

SEQ ID NO: 189696 - DNA, 20 bp, synthetic construct
  source 1..20: mol_type = other DNA
aggtgggaagtggggccagg

SEQ ID NO: 189697 - DNA, 20 bp, synthetic construct
  source 1..20: mol_type = other DNA
caggtgggaagtggggccag

SEQ ID NO: 189698 - DNA, 20 bp, synthetic construct
  source 1..20: mol_type = other DNA
gcaggtgggaagtggggcca

SEQ ID NO: 189699 - DNA, 20 bp, synthetic construct
  source 1..20: mol_type = other DNA
agcaggtgggaagtggggcc

SEQ ID NO: 189700 - DNA, 20 bp, synthetic construct
  source 1..20: mol_type = other DNA
cagcaggtgggaagtggggc

SEQ ID NO: 189701 - DNA, 20 bp, synthetic construct
  source 1..20: mol_type = other DNA
gcagcaggtgggaagtgggg

SEQ ID NO: 189702 - DNA, 20 bp, synthetic construct
  source 1..20: mol_type = other DNA
ggcagcaggtgggaagtggg

SEQ ID NO: 189703 - DNA, 20 bp, synthetic construct
  source 1..20: mol_type = other DNA
gggcagcaggtgggaagtgg

SEQ ID NO: 189704 - DNA, 20 bp, synthetic construct
  source 1..20: mol_type = other DNA
tgggcagcaggtgggaagtg

SEQ ID NO: 189705 - DNA, 20 bp, synthetic construct
  source 1..20: mol_type = other DNA
ttgggcagcaggtgggaagt

SEQ ID NO: 189706 - DNA, 20 bp, synthetic construct
  source 1..20: mol_type = other DNA
tttgggcagcaggtgggaag

SEQ ID NO: 189707 - DNA, 20 bp, synthetic construct
  source 1..20: mol_type = other DNA
gtttgggcagcaggtgggaa

SEQ ID NO: 189708 - DNA, 20 bp, synthetic construct
  source 1..20: mol_type = other DNA
ggtttgggcagcaggtggga

SEQ ID NO: 189709 - DNA, 20 bp, synthetic construct
  source 1..20: mol_type = other DNA
gggtttgggcagcaggtggg

SEQ ID NO: 189710 - DNA, 20 bp, synthetic construct
  source 1..20: mol_type = other DNA
ggggtttgggcagcaggtgg

SEQ ID NO: 189711 - DNA, 20 bp, synthetic construct
  source 1..20: mol_type = other DNA
gggggtttgggcagcaggtg

SEQ ID NO: 189712 - DNA, 20 bp, synthetic construct
  source 1..20: mol_type = other DNA
agggggtttgggcagcaggt

SEQ ID NO: 189713 - DNA, 20 bp, synthetic construct
  source 1..20: mol_type = other DNA
gagggggtttgggcagcagg

SEQ ID NO: 189714 - DNA, 20 bp, synthetic construct
  source 1..20: mol_type = other DNA
agagggggtttgggcagcag

SEQ ID NO: 189715 - DNA, 20 bp, synthetic construct
  source 1..20: mol_type = other DNA
gagagggggtttgggcagca

SEQ ID NO: 189716 - DNA, 20 bp, synthetic construct
  source 1..20: mol_type = other DNA
agagagggggtttgggcagc

SEQ ID NO: 189717 - DNA, 20 bp, synthetic construct
  source 1..20: mol_type = other DNA
cagagagggggtttgggcag

SEQ ID NO: 189718 - DNA, 20 bp, synthetic construct
  source 1..20: mol_type = other DNA
gcagagagggggtttgggca

SEQ ID NO: 189719 - DNA, 20 bp, synthetic construct
  source 1..20: mol_type = other DNA
ggcagagagggggtttgggc

SEQ ID NO: 189720 - DNA, 20 bp, synthetic construct
  source 1..20: mol_type = other DNA
aggcagagagggggtttggg

SEQ ID NO: 189721 - DNA, 20 bp, synthetic construct
  source 1..20: mol_type = other DNA
aaggcagagagggggtttgg

SEQ ID NO: 189722 - DNA, 20 bp, synthetic construct
  source 1..20: mol_type = other DNA
gaaggcagagagggggtttg

SEQ ID NO: 189723 - DNA, 20 bp, synthetic construct
  source 1..20: mol_type = other DNA
ggaaggcagagagggggttt

SEQ ID NO: 189724 - DNA, 20 bp, synthetic construct
  source 1..20: mol_type = other DNA
aggaaggcagagagggggtt

SEQ ID NO: 189725 - DNA, 20 bp, synthetic construct
  source 1..20: mol_type = other DNA
caggaaggcagagagggggt

SEQ ID NO: 189726 - DNA, 20 bp, synthetic construct
  source 1..20: mol_type = other DNA
tcaggaaggcagagaggggg

SEQ ID NO: 189727 - DNA, 20 bp, synthetic construct
  source 1..20: mol_type = other DNA
gtcaggaaggcagagagggg

SEQ ID NO: 189728 - DNA, 20 bp, synthetic construct
  source 1..20: mol_type = other DNA
tgtcaggaaggcagagaggg

SEQ ID NO: 189729 - DNA, 20 bp, synthetic construct
  source 1..20: mol_type = other DNA
ctgtcaggaaggcagagagg

SEQ ID NO: 189730 - DNA, 20 bp, synthetic construct
  source 1..20: mol_type = other DNA
actgtcaggaaggcagagag

SEQ ID NO: 189731 - DNA, 20 bp, synthetic construct
  source 1..20: mol_type = other DNA
gactgtcaggaaggcagaga

SEQ ID NO: 189732 - DNA, 20 bp, synthetic construct
  source 1..20: mol_type = other DNA
tgactgtcaggaaggcagag

SEQ ID NO: 189733 - DNA, 20 bp, synthetic construct
  source 1..20: mol_type = other DNA
gtgactgtcaggaaggcaga

SEQ ID NO: 189734 - DNA, 20 bp, synthetic construct
  source 1..20: mol_type = other DNA
ggtgactgtcaggaaggcag

SEQ ID NO: 189735 - DNA, 20 bp, synthetic construct
  source 1..20: mol_type = other DNA
gggtgactgtcaggaaggca

SEQ ID NO: 189736 - DNA, 20 bp, synthetic construct
  source 1..20: mol_type = other DNA
ggggtgactgtcaggaaggc

SEQ ID NO: 189737 - DNA, 20 bp, synthetic construct
  source 1..20: mol_type = other DNA
tggggtgactgtcaggaagg

SEQ ID NO: 189738 - DNA, 20 bp, synthetic construct
  source 1..20: mol_type = other DNA
ttggggtgactgtcaggaag

SEQ ID NO: 189739 - DNA, 20 bp, synthetic construct
  source 1..20: mol_type = other DNA
gttggggtgactgtcaggaa

SEQ ID NO: 189740 - DNA, 20 bp, synthetic construct
  source 1..20: mol_type = other DNA
agttggggtgactgtcagga

SEQ ID NO: 189741 - DNA, 20 bp, synthetic construct
  source 1..20: mol_type = other DNA
gagttggggtgactgtcagg

SEQ ID NO: 189742 - DNA, 20 bp, synthetic construct
  source 1..20: mol_type = other DNA
ggagttggggtgactgtcag

SEQ ID NO: 189743 - DNA, 20 bp, synthetic construct
  source 1..20: mol_type = other DNA
gggagttggggtgactgtca

SEQ ID NO: 189744 - DNA, 20 bp, synthetic construct
  source 1..20: mol_type = other DNA
tgggagttggggtgactgtc

SEQ ID NO: 189745 - DNA, 20 bp, synthetic construct
  source 1..20: mol_type = other DNA
ctgggagttggggtgactgt

SEQ ID NO: 189746 - DNA, 20 bp, synthetic construct
  source 1..20: mol_type = other DNA
actgggagttggggtgactg

SEQ ID NO: 189747 - DNA, 20 bp, synthetic construct
  source 1..20: mol_type = other DNA
cactgggagttggggtgact

SEQ ID NO: 189748 - DNA, 20 bp, synthetic construct
  source 1..20: mol_type = other DNA
tcactgggagttggggtgac

SEQ ID NO: 189749 - DNA, 20 bp, synthetic construct
  source 1..20: mol_type = other DNA
atcactgggagttggggtga

SEQ ID NO: 189750 - DNA, 20 bp, synthetic construct
  source 1..20: mol_type = other DNA
gatcactgggagttggggtg

SEQ ID NO: 189751 - DNA, 20 bp, synthetic construct
  source 1..20: mol_type = other DNA
ggatcactgggagttggggt

SEQ ID NO: 189752 - DNA, 20 bp, synthetic construct
  source 1..20: mol_type = other DNA
gggatcactgggagttgggg

SEQ ID NO: 189753 - DNA, 20 bp, synthetic construct
  source 1..20: mol_type = other DNA
ggggatcactgggagttggg

SEQ ID NO: 189754 - DNA, 20 bp, synthetic construct
  source 1..20: mol_type = other DNA
tggggatcactgggagttgg

SEQ ID NO: 189755 - DNA, 20 bp, synthetic construct
  source 1..20: mol_type = other DNA
atggggatcactgggagttg

SEQ ID NO: 189756 - DNA, 20 bp, synthetic construct
  source 1..20: mol_type = other DNA
gatggggatcactgggagtt

SEQ ID NO: 189757 - DNA, 20 bp, synthetic construct
  source 1..20: mol_type = other DNA
tgatggggatcactgggagt

SEQ ID NO: 189758 - DNA, 20 bp, synthetic construct
  source 1..20: mol_type = other DNA
ttgatggggatcactgggag

SEQ ID NO: 189759 - DNA, 20 bp, synthetic construct
  source 1..20: mol_type = other DNA
gttgatggggatcactggga

SEQ ID NO: 189760 - DNA, 20 bp, synthetic construct
  source 1..20: mol_type = other DNA
ggttgatggggatcactggg

SEQ ID NO: 189761 - DNA, 20 bp, synthetic construct
  source 1..20: mol_type = other DNA
tggttgatggggatcactgg

SEQ ID NO: 189762 - DNA, 20 bp, synthetic construct
  source 1..20: mol_type = other DNA
atggttgatggggatcactg

SEQ ID NO: 189763 - DNA, 20 bp, synthetic construct
  source 1..20: mol_type = other DNA
gatggttgatggggatcact

SEQ ID NO: 189764 - DNA, 20 bp, synthetic construct
  source 1..20: mol_type = other DNA
agatggttgatggggatcac

SEQ ID NO: 189765 - DNA, 20 bp, synthetic construct
  source 1..20: mol_type = other DNA
cagatggttgatggggatca

SEQ ID NO: 189766 - DNA, 20 bp, synthetic construct
  source 1..20: mol_type = other DNA
tcagatggttgatggggatc

SEQ ID NO: 189767 - DNA, 20 bp, synthetic construct
  source 1..20: mol_type = other DNA
gtcagatggttgatggggat

SEQ ID NO: 189768 - DNA, 20 bp, synthetic construct
  source 1..20: mol_type = other DNA
tgtcagatggttgatgggga

SEQ ID NO: 189769 - DNA, 20 bp, synthetic construct
  source 1..20: mol_type = other DNA
ttgtcagatggttgatgggg

SEQ ID NO: 189770 - DNA, 20 bp, synthetic construct
  source 1..20: mol_type = other DNA
cttgtcagatggttgatggg

SEQ ID NO: 189771 - DNA, 20 bp, synthetic construct
  source 1..20: mol_type = other DNA
ccttgtcagatggttgatgg

SEQ ID NO: 189772 - DNA, 20 bp, synthetic construct
  source 1..20: mol_type = other DNA
cccttgtcagatggttgatg

SEQ ID NO: 189773 - DNA, 20 bp, synthetic construct
  source 1..20: mol_type = other DNA
ccccttgtcagatggttgat

SEQ ID NO: 189774 - DNA, 20 bp, synthetic construct
  source 1..20: mol_type = other DNA
tccccttgtcagatggttga

SEQ ID NO: 189775 - DNA, 20 bp, synthetic construct
  source 1..20: mol_type = other DNA
gtccccttgtcagatggttg

SEQ ID NO: 189776 - DNA, 20 bp, synthetic construct
  source 1..20: mol_type = other DNA
agtccccttgtcagatggtt

SEQ ID NO: 189777 - DNA, 20 bp, synthetic construct
  source 1..20: mol_type = other DNA
cagtccccttgtcagatggt

SEQ ID NO: 189778 - DNA, 20 bp, synthetic construct
  source 1..20: mol_type = other DNA
tcagtccccttgtcagatgg

SEQ ID NO: 189779 - DNA, 20 bp, synthetic construct
  source 1..20: mol_type = other DNA
ctcagtccccttgtcagatg

SEQ ID NO: 189780 - DNA, 20 bp, synthetic construct
  source 1..20: mol_type = other DNA
tctcagtccccttgtcagat

SEQ ID NO: 189781 - DNA, 20 bp, synthetic construct
  source 1..20: mol_type = other DNA
ctctcagtccccttgtcaga

SEQ ID NO: 189782 - DNA, 20 bp, synthetic construct
  source 1..20: mol_type = other DNA
cctctcagtccccttgtcag

SEQ ID NO: 189783 - DNA, 20 bp, synthetic construct
  source 1..20: mol_type = other DNA
ccctctcagtccccttgtca

SEQ ID NO: 189784 - DNA, 20 bp, synthetic construct
  source 1..20: mol_type = other DNA
tccctctcagtccccttgtc

SEQ ID NO: 189785 - DNA, 20 bp, synthetic construct
  source 1..20: mol_type = other DNA
ttccctctcagtccccttgt

SEQ ID NO: 189786 - DNA, 20 bp, synthetic construct
  source 1..20: mol_type = other DNA
cttccctctcagtccccttg

SEQ ID NO: 189787 - DNA, 20 bp, synthetic construct
  source 1..20: mol_type = other DNA
tcttccctctcagtcccctt

SEQ ID NO: 189788 - DNA, 20 bp, synthetic construct
  source 1..20: mol_type = other DNA
ctcttccctctcagtcccct

SEQ ID NO: 189789 - DNA, 20 bp, synthetic construct
  source 1..20: mol_type = other DNA
tctcttccctctcagtcccc

SEQ ID NO: 189790 - DNA, 20 bp, synthetic construct
  source 1..20: mol_type = other DNA
ttctcttccctctcagtccc

SEQ ID NO: 189791 - DNA, 20 bp, synthetic construct
  source 1..20: mol_type = other DNA
tttctcttccctctcagtcc

SEQ ID NO: 189792 - DNA, 20 bp, synthetic construct
  source 1..20: mol_type = other DNA
ctttctcttccctctcagtc

SEQ ID NO: 189793 - DNA, 20 bp, synthetic construct
  source 1..20: mol_type = other DNA
cctttctcttccctctcagt

SEQ ID NO: 189794 - DNA, 20 bp, synthetic construct
  source 1..20: mol_type = other DNA
tcctttctcttccctctcag

SEQ ID NO: 189795 - DNA, 20 bp, synthetic construct
  source 1..20: mol_type = other DNA
ctcctttctcttccctctca

SEQ ID NO: 189796 - DNA, 20 bp, synthetic construct
  source 1..20: mol_type = other DNA
cctcctttctcttccctctc

SEQ ID NO: 189797 - DNA, 20 bp, synthetic construct
  source 1..20: mol_type = other DNA
ccctcctttctcttccctct

SEQ ID NO: 189798 - DNA, 20 bp, synthetic construct
  source 1..20: mol_type = other DNA
cccctcctttctcttccctc

SEQ ID NO: 189799 - DNA, 20 bp, synthetic construct
  source 1..20: mol_type = other DNA
gcccctcctttctcttccct

SEQ ID NO: 189800 - DNA, 20 bp, synthetic construct
  source 1..20: mol_type = other DNA
ggcccctcctttctcttccc

SEQ ID NO: 189801 - DNA, 20 bp, synthetic construct
  source 1..20: mol_type = other DNA
gggcccctcctttctcttcc

SEQ ID NO: 189802 - DNA, 20 bp, synthetic construct
  source 1..20: mol_type = other DNA
tgggcccctcctttctcttc

SEQ ID NO: 189803 - DNA, 20 bp, synthetic construct
  source 1..20: mol_type = other DNA
ttgggcccctcctttctctt

SEQ ID NO: 189804 - DNA, 20 bp, synthetic construct
  source 1..20: mol_type = other DNA
tttgggcccctcctttctct

SEQ ID NO: 189805 - DNA, 20 bp, synthetic construct
  source 1..20: mol_type = other DNA
ctttgggcccctcctttctc

SEQ ID NO: 189806 - DNA, 20 bp, synthetic construct
  source 1..20: mol_type = other DNA
tctttgggcccctcctttct

SEQ ID NO: 189807 - DNA, 20 bp, synthetic construct
  source 1..20: mol_type = other DNA
ctctttgggcccctcctttc

SEQ ID NO: 189808 - DNA, 20 bp, synthetic construct
  source 1..20: mol_type = other DNA
cctctttgggcccctccttt

SEQ ID NO: 189809 - DNA, 20 bp, synthetic construct
  source 1..20: mol_type = other DNA
tcctctttgggcccctcctt

SEQ ID NO: 189810 - DNA, 20 bp, synthetic construct
  source 1..20: mol_type = other DNA
ttcctctttgggcccctcct

SEQ ID NO: 189811 - DNA, 20 bp, synthetic construct
  source 1..20: mol_type = other DNA
cttcctctttgggcccctcc

SEQ ID NO: 189812 - DNA, 20 bp, synthetic construct
  source 1..20: mol_type = other DNA
ccttcctctttgggcccctc

SEQ ID NO: 189813 - DNA, 20 bp, synthetic construct
  source 1..20: mol_type = other DNA
accttcctctttgggcccct

SEQ ID NO: 189814 - DNA, 20 bp, synthetic construct
  source 1..20: mol_type = other DNA
taccttcctctttgggcccc

SEQ ID NO: 189815 - DNA, 20 bp, synthetic construct
  source 1..20: mol_type = other DNA
ttaccttcctctttgggccc

SEQ ID NO: 189816 - DNA, 20 bp, synthetic construct
  source 1..20: mol_type = other DNA
tttaccttcctctttgggcc

SEQ ID NO: 189817 - DNA, 20 bp, synthetic construct
  source 1..20: mol_type = other DNA
ttttaccttcctctttgggc

SEQ ID NO: 189818 - DNA, 20 bp, synthetic construct
  source 1..20: mol_type = other DNA
gttttaccttcctctttggg

SEQ ID NO: 189819 - DNA, 20 bp, synthetic construct
  source 1..20: mol_type = other DNA
agttttaccttcctctttgg

SEQ ID NO: 189820 - DNA, 20 bp, synthetic construct
  source 1..20: mol_type = other DNA
cagttttaccttcctctttg

SEQ ID NO: 189821 - DNA, 20 bp, synthetic construct
  source 1..20: mol_type = other DNA
acagttttaccttcctcttt

SEQ ID NO: 189822 - DNA, 20 bp, synthetic construct
  source 1..20: mol_type = other DNA
gacagttttaccttcctctt

SEQ ID NO: 189823 - DNA, 20 bp, synthetic construct
  source 1..20: mol_type = other DNA
cgacagttttaccttcctct

SEQ ID NO: 189824 - DNA, 20 bp, synthetic construct
  source 1..20: mol_type = other DNA
ccgacagttttaccttcctc

SEQ ID NO: 189825 - DNA, 20 bp, synthetic construct
  source 1..20: mol_type = other DNA
cccgacagttttaccttcct

SEQ ID NO: 189826 - DNA, 20 bp, synthetic construct
  source 1..20: mol_type = other DNA
tcccgacagttttaccttcc

SEQ ID NO: 189827 - DNA, 20 bp, synthetic construct
  source 1..20: mol_type = other DNA
ttcccgacagttttaccttc

SEQ ID NO: 189828 - DNA, 20 bp, synthetic construct
  source 1..20: mol_type = other DNA
gttcccgacagttttacctt

SEQ ID NO: 189829 - DNA, 20 bp, synthetic construct
  source 1..20: mol_type = other DNA
tgttcccgacagttttacct

SEQ ID NO: 189830 - DNA, 20 bp, synthetic construct
  source 1..20: mol_type = other DNA
ctgttcccgacagttttacc

SEQ ID NO: 189831 - DNA, 20 bp, synthetic construct
  source 1..20: mol_type = other DNA
gctgttcccgacagttttac

SEQ ID NO: 189832 - DNA, 20 bp, synthetic construct
  source 1..20: mol_type = other DNA
ggctgttcccgacagtttta

SEQ ID NO: 189833 - DNA, 20 bp, synthetic construct
  source 1..20: mol_type = other DNA
gggctgttcccgacagtttt

SEQ ID NO: 189834 - DNA, 20 bp, synthetic construct
  source 1..20: mol_type = other DNA
ggggctgttcccgacagttt

SEQ ID NO: 189835 - DNA, 20 bp, synthetic construct
  source 1..20: mol_type = other DNA
gggggctgttcccgacagtt

SEQ ID NO: 189836 - DNA, 20 bp, synthetic construct
  source 1..20: mol_type = other DNA
tgggggctgttcccgacagt

SEQ ID NO: 189837 - DNA, 20 bp, synthetic construct
  source 1..20: mol_type = other DNA
ttgggggctgttcccgacag

SEQ ID NO: 189838 - DNA, 20 bp, synthetic construct
  source 1..20: mol_type = other DNA
tttgggggctgttcccgaca

SEQ ID NO: 189839 - DNA, 20 bp, synthetic construct
  source 1..20: mol_type = other DNA
atttgggggctgttcccgac

SEQ ID NO: 189840 - DNA, 20 bp, synthetic construct
  source 1..20: mol_type = other DNA
catttgggggctgttcccga

SEQ ID NO: 189841 - DNA, 20 bp, synthetic construct
  source 1..20: mol_type = other DNA
acatttgggggctgttcccg

SEQ ID NO: 189842 - DNA, 20 bp, synthetic construct
  source 1..20: mol_type = other DNA
cacatttgggggctgttccc

SEQ ID NO: 189843 - DNA, 20 bp, synthetic construct
  source 1..20: mol_type = other DNA
acacatttgggggctgttcc

SEQ ID NO: 189844 - DNA, 20 bp, synthetic construct
  source 1..20: mol_type = other DNA
cacacatttgggggctgttc

SEQ ID NO: 189845 - DNA, 20 bp, synthetic construct
  source 1..20: mol_type = other DNA
tcacacatttgggggctgtt

SEQ ID NO: 189846 - DNA, 20 bp, synthetic construct
  source 1..20: mol_type = other DNA
gtcacacatttgggggctgt

SEQ ID NO: 189847 - DNA, 20 bp, synthetic construct
  source 1..20: mol_type = other DNA
tgtcacacatttgggggctg

SEQ ID NO: 189848 - DNA, 20 bp, synthetic construct
  source 1..20: mol_type = other DNA
ctgtcacacatttgggggct

SEQ ID NO: 189849 - DNA, 20 bp, synthetic construct
  source 1..20: mol_type = other DNA
gctgtcacacatttgggggc

SEQ ID NO: 189850 - DNA, 20 bp, synthetic construct
  source 1..20: mol_type = other DNA
ggctgtcacacatttggggg

SEQ ID NO: 189851 - DNA, 20 bp, synthetic construct
  source 1..20: mol_type = other DNA
aggctgtcacacatttgggg

SEQ ID NO: 189852 - DNA, 20 bp, synthetic construct
  source 1..20: mol_type = other DNA
aaggctgtcacacatttggg

SEQ ID NO: 189853 - DNA, 20 bp, synthetic construct
  source 1..20: mol_type = other DNA
gaaggctgtcacacatttgg

SEQ ID NO: 189854 - DNA, 20 bp, synthetic construct
  source 1..20: mol_type = other DNA
tgaaggctgtcacacatttg

SEQ ID NO: 189855 - DNA, 20 bp, synthetic construct
  source 1..20: mol_type = other DNA
ctgaaggctgtcacacattt

SEQ ID NO: 189856 - DNA, 20 bp, synthetic construct
  source 1..20: mol_type = other DNA
actgaaggctgtcacacatt

SEQ ID NO: 189857 - DNA, 20 bp, synthetic construct
  source 1..20: mol_type = other DNA
cactgaaggctgtcacacat

SEQ ID NO: 189858 - DNA, 20 bp, synthetic construct
  source 1..20: mol_type = other DNA
ccactgaaggctgtcacaca

SEQ ID NO: 189859 - DNA, 20 bp, synthetic construct
  source 1..20: mol_type = other DNA
tccactgaaggctgtcacac

SEQ ID NO: 189860 - DNA, 20 bp, synthetic construct
  source 1..20: mol_type = other DNA
ctccactgaaggctgtcaca

SEQ ID NO: 189861 - DNA, 20 bp, synthetic construct
  source 1..20: mol_type = other DNA
actccactgaaggctgtcac

SEQ ID NO: 189862 - DNA, 20 bp, synthetic construct
  source 1..20: mol_type = other DNA
aactccactgaaggctgtca

SEQ ID NO: 189863 - DNA, 20 bp, synthetic construct
  source 1..20: mol_type = other DNA
caactccactgaaggctgtc

SEQ ID NO: 189864 - DNA, 20 bp, synthetic construct
  source 1..20: mol_type = other DNA
gcaactccactgaaggctgt

SEQ ID NO: 189865 - DNA, 20 bp, synthetic construct
  source 1..20: mol_type = other DNA
ggcaactccactgaaggctg

SEQ ID NO: 189866 - DNA, 20 bp, synthetic construct
  source 1..20: mol_type = other DNA
gggcaactccactgaaggct

SEQ ID NO: 189867 - DNA, 20 bp, synthetic construct
  source 1..20: mol_type = other DNA
tgggcaactccactgaaggc

SEQ ID NO: 189868 - DNA, 20 bp, synthetic construct
  source 1..20: mol_type = other DNA
gtgggcaactccactgaagg

SEQ ID NO: 189869 - DNA, 20 bp, synthetic construct
  source 1..20: mol_type = other DNA
agtgggcaactccactgaag

SEQ ID NO: 189870 - DNA, 20 bp, synthetic construct
  source 1..20: mol_type = other DNA
aagtgggcaactccactgaa

SEQ ID NO: 189871 - DNA, 20 bp, synthetic construct
  source 1..20: mol_type = other DNA
aaagtgggcaactccactga

SEQ ID NO: 189872 - DNA, 20 bp, synthetic construct
  source 1..20: mol_type = other DNA
gaaagtgggcaactccactg

SEQ ID NO: 189873 - DNA, 20 bp, synthetic construct
  source 1..20: mol_type = other DNA
ggaaagtgggcaactccact

SEQ ID NO: 189874 - DNA, 20 bp, synthetic construct
  source 1..20: mol_type = other DNA
gggaaagtgggcaactccac

SEQ ID NO: 189875 - DNA, 20 bp, synthetic construct
  source 1..20: mol_type = other DNA
agggaaagtgggcaactcca

SEQ ID NO: 189876 - DNA, 20 bp, synthetic construct
  source 1..20: mol_type = other DNA
aagggaaagtgggcaactcc

SEQ ID NO: 189877 - DNA, 20 bp, synthetic construct
  source 1..20: mol_type = other DNA
aaagggaaagtgggcaactc

SEQ ID NO: 189878 - DNA, 20 bp, synthetic construct
  source 1..20: mol_type = other DNA
aaaagggaaagtgggcaact

SEQ ID NO: 189879 - DNA, 20 bp, synthetic construct
  source 1..20: mol_type = other DNA
gaaaagggaaagtgggcaac

SEQ ID NO: 189880 - DNA, 20 bp, synthetic construct
  source 1..20: mol_type = other DNA
agaaaagggaaagtgggcaa

SEQ ID NO: 189881 - DNA, 20 bp, synthetic construct
  source 1..20: mol_type = other DNA
gagaaaagggaaagtgggca

SEQ ID NO: 189882 - DNA, 20 bp, synthetic construct
  source 1..20: mol_type = other DNA
ggagaaaagggaaagtgggc

SEQ ID NO: 189883 - DNA, 20 bp, synthetic construct
  source 1..20: mol_type = other DNA
aggagaaaagggaaagtggg

SEQ ID NO: 189884 - DNA, 20 bp, synthetic construct
  source 1..20: mol_type = other DNA
gaggagaaaagggaaagtgg

SEQ ID NO: 189885 - DNA, 20 bp, synthetic construct
  source 1..20: mol_type = other DNA
ggaggagaaaagggaaagtg

SEQ ID NO: 189886 - DNA, 20 bp, synthetic construct
  source 1..20: mol_type = other DNA
gggaggagaaaagggaaagt

SEQ ID NO: 189887 - DNA, 20 bp, synthetic construct
  source 1..20: mol_type = other DNA
agggaggagaaaagggaaag

SEQ ID NO: 189888 - DNA, 20 bp, synthetic construct
  source 1..20: mol_type = other DNA
cagggaggagaaaagggaaa

SEQ ID NO: 189889 - DNA, 20 bp, synthetic construct
  source 1..20: mol_type = other DNA
gcagggaggagaaaagggaa

SEQ ID NO: 189890 - DNA, 20 bp, synthetic construct
  source 1..20: mol_type = other DNA
tgcagggaggagaaaaggga

SEQ ID NO: 189891 - DNA, 20 bp, synthetic construct
  source 1..20: mol_type = other DNA
ctgcagggaggagaaaaggg

SEQ ID NO: 189892 - DNA, 20 bp, synthetic construct
  source 1..20: mol_type = other DNA
cctgcagggaggagaaaagg

SEQ ID NO: 189893 - DNA, 20 bp, synthetic construct
  source 1..20: mol_type = other DNA
tcctgcagggaggagaaaag

SEQ ID NO: 189894 - DNA, 20 bp, synthetic construct
  source 1..20: mol_type = other DNA
gtcctgcagggaggagaaaa

SEQ ID NO: 189895 - DNA, 20 bp, synthetic construct
  source 1..20: mol_type = other DNA
ggtcctgcagggaggagaaa

SEQ ID NO: 189896 - DNA, 20 bp, synthetic construct
  source 1..20: mol_type = other DNA
aggtcctgcagggaggagaa

SEQ ID NO: 189897 - DNA, 20 bp, synthetic construct
  source 1..20: mol_type = other DNA
gaggtcctgcagggaggaga

SEQ ID NO: 189898 - DNA, 20 bp, synthetic construct
  source 1..20: mol_type = other DNA
ggaggtcctgcagggaggag

SEQ ID NO: 189899 - DNA, 20 bp, synthetic construct
  source 1..20: mol_type = other DNA
gggaggtcctgcagggagga

SEQ ID NO: 189900 - DNA, 20 bp, synthetic construct
  source 1..20: mol_type = other DNA
agggaggtcctgcagggagg

SEQ ID NO: 189901 - DNA, 20 bp, synthetic construct
  source 1..20: mol_type = other DNA
aagggaggtcctgcagggag

SEQ ID NO: 189902 - DNA, 20 bp, synthetic construct
  source 1..20: mol_type = other DNA
gaagggaggtcctgcaggga

SEQ ID NO: 189903 - DNA, 20 bp, synthetic construct
  source 1..20: mol_type = other DNA
agaagggaggtcctgcaggg

SEQ ID NO: 189904 - DNA, 20 bp, synthetic construct
  source 1..20: mol_type = other DNA
gagaagggaggtcctgcagg

SEQ ID NO: 189905 - DNA, 20 bp, synthetic construct
  source 1..20: mol_type = other DNA
ggagaagggaggtcctgcag

SEQ ID NO: 189906 - DNA, 20 bp, synthetic construct
  source 1..20: mol_type = other DNA
gggagaagggaggtcctgca

SEQ ID NO: 189907 - DNA, 20 bp, synthetic construct
  source 1..20: mol_type = other DNA
ggggagaagggaggtcctgc

SEQ ID NO: 189908 - DNA, 20 bp, synthetic construct
  source 1..20: mol_type = other DNA
tggggagaagggaggtcctg

SEQ ID NO: 189909 - DNA, 20 bp, synthetic construct
  source 1..20: mol_type = other DNA
ctggggagaagggaggtcct

SEQ ID NO: 189910 - DNA, 20 bp, synthetic construct
  source 1..20: mol_type = other DNA
actggggagaagggaggtcc

SEQ ID NO: 189911 - DNA, 20 bp, synthetic construct
  source 1..20: mol_type = other DNA
gactggggagaagggaggtc

SEQ ID NO: 189912 - DNA, 20 bp, synthetic construct
  source 1..20: mol_type = other DNA
ggactggggagaagggaggt

SEQ ID NO: 189913 - DNA, 20 bp, synthetic construct
  source 1..20: mol_type = other DNA
aggactggggagaagggagg

SEQ ID NO: 189914 - DNA, 20 bp, synthetic construct
  source 1..20: mol_type = other DNA
gaggactggggagaagggag

SEQ ID NO: 189915 - DNA, 20 bp, synthetic construct
  source 1..20: mol_type = other DNA
ggaggactggggagaaggga

SEQ ID NO: 189916 - DNA, 20 bp, synthetic construct
  source 1..20: mol_type = other DNA
gggaggactggggagaaggg

SEQ ID NO: 189917 - DNA, 20 bp, synthetic construct
  source 1..20: mol_type = other DNA
ggggaggactggggagaagg

SEQ ID NO: 189918 - DNA, 20 bp, synthetic construct
  source 1..20: mol_type = other DNA
tggggaggactggggagaag

SEQ ID NO: 189919 - DNA, 20 bp, synthetic construct
  source 1..20: mol_type = other DNA
ttggggaggactggggagaa

SEQ ID NO: 189920 - DNA, 20 bp, synthetic construct
  source 1..20: mol_type = other DNA
gttggggaggactggggaga

SEQ ID NO: 189921 - DNA, 20 bp, synthetic construct
  source 1..20: mol_type = other DNA
agttggggaggactggggag

SEQ ID NO: 189922 - DNA, 20 bp, synthetic construct
  source 1..20: mol_type = other DNA
aagttggggaggactgggga

SEQ ID NO: 189923 - DNA, 20 bp, synthetic construct
  source 1..20: mol_type = other DNA
gaagttggggaggactgggg

SEQ ID NO: 189924 - DNA, 20 bp, synthetic construct
  source 1..20: mol_type = other DNA
agaagttggggaggactggg

SEQ ID NO: 189925 - DNA, 20 bp, synthetic construct
  source 1..20: mol_type = other DNA
cagaagttggggaggactgg

SEQ ID NO: 189926 - DNA, 20 bp, synthetic construct
  source 1..20: mol_type = other DNA
tcagaagttggggaggactg

SEQ ID NO: 189927 - DNA, 20 bp, synthetic construct
  source 1..20: mol_type = other DNA
ctcagaagttggggaggact

SEQ ID NO: 189928 - DNA, 20 bp, synthetic construct
  source 1..20: mol_type = other DNA
cctcagaagttggggaggac

SEQ ID NO: 189929 - DNA, 20 bp, synthetic construct
  source 1..20: mol_type = other DNA
acctcagaagttggggagga

SEQ ID NO: 189930 - DNA, 20 bp, synthetic construct
  source 1..20: mol_type = other DNA
aacctcagaagttggggagg

SEQ ID NO: 189931 - DNA, 20 bp, synthetic construct
  source 1..20: mol_type = other DNA
taacctcagaagttggggag

SEQ ID NO: 189932 - DNA, 20 bp, synthetic construct
  source 1..20: mol_type = other DNA
gtaacctcagaagttgggga

SEQ ID NO: 189933 - DNA, 20 bp, synthetic construct
  source 1..20: mol_type = other DNA
tgtaacctcagaagttgggg

SEQ ID NO: 189934 - DNA, 20 bp, synthetic construct
  source 1..20: mol_type = other DNA
atgtaacctcagaagttggg

SEQ ID NO: 189935 - DNA, 20 bp, synthetic construct
  source 1..20: mol_type = other DNA
aatgtaacctcagaagttgg

SEQ ID NO: 189936 - DNA, 20 bp, synthetic construct
  source 1..20: mol_type = other DNA
caatgtaacctcagaagttg

SEQ ID NO: 189937 - DNA, 20 bp, synthetic construct
  source 1..20: mol_type = other DNA
tcaatgtaacctcagaagtt

SEQ ID NO: 189938 - DNA, 20 bp, synthetic construct
  source 1..20: mol_type = other DNA
ctcaatgtaacctcagaagt

SEQ ID NO: 189939 - DNA, 20 bp, synthetic construct
  source 1..20: mol_type = other DNA
tctcaatgtaacctcagaag

SEQ ID NO: 189940 - DNA, 20 bp, synthetic construct
  source 1..20: mol_type = other DNA
ttctcaatgtaacctcagaa

SEQ ID NO: 189941 - DNA, 20 bp, synthetic construct
  source 1..20: mol_type = other DNA
tttctcaatgtaacctcaga

SEQ ID NO: 189942 - DNA, 20 bp, synthetic construct
  source 1..20: mol_type = other DNA
ttttctcaatgtaacctcag

SEQ ID NO: 189943 - DNA, 20 bp, synthetic construct
  source 1..20: mol_type = other DNA
cttttctcaatgtaacctca

SEQ ID NO: 189944 - DNA, 20 bp, synthetic construct
  source 1..20: mol_type = other DNA
acttttctcaatgtaacctc

SEQ ID NO: 189945 - DNA, 20 bp, synthetic construct
  source 1..20: mol_type = other DNA
gacttttctcaatgtaacct

SEQ ID NO: 189946 - DNA, 20 bp, synthetic construct
  source 1..20: mol_type = other DNA
agacttttctcaatgtaacc

SEQ ID NO: 189947 - DNA, 20 bp, synthetic construct
  source 1..20: mol_type = other DNA
cagacttttctcaatgtaac

SEQ ID NO: 189948 - DNA, 20 bp, synthetic construct
  source 1..20: mol_type = other DNA
gcagacttttctcaatgtaa

SEQ ID NO: 189949 - DNA, 20 bp, synthetic construct
  source 1..20: mol_type = other DNA
tgcagacttttctcaatgta

SEQ ID NO: 189950 - DNA, 20 bp, synthetic construct
  source 1..20: mol_type = other DNA
ctgcagacttttctcaatgt

SEQ ID NO: 189951 - DNA, 20 bp, synthetic construct
  source 1..20: mol_type = other DNA
tctgcagacttttctcaatg

SEQ ID NO: 189952 - DNA, 20 bp, synthetic construct
  source 1..20: mol_type = other DNA
ctctgcagacttttctcaat

SEQ ID NO: 189953 - DNA, 20 bp, synthetic construct
  source 1..20: mol_type = other DNA
tctctgcagacttttctcaa

SEQ ID NO: 189954 - DNA, 20 bp, synthetic construct
  source 1..20: mol_type = other DNA
ctctctgcagacttttctca

SEQ ID NO: 189955 - DNA, 20 bp, synthetic construct
  source 1..20: mol_type = other DNA
cctctctgcagacttttctc

SEQ ID NO: 189956 - DNA, 20 bp, synthetic construct
  source 1..20: mol_type = other DNA
acctctctgcagacttttct

SEQ ID NO: 189957 - DNA, 20 bp, synthetic construct
  source 1..20: mol_type = other DNA
cacctctctgcagacttttc

SEQ ID NO: 189958 - DNA, 20 bp, synthetic construct
  source 1..20: mol_type = other DNA
gcacctctctgcagactttt

SEQ ID NO: 189959 - DNA, 20 bp, synthetic construct
  source 1..20: mol_type = other DNA
ggcacctctctgcagacttt

SEQ ID NO: 189960 - DNA, 20 bp, synthetic construct
  source 1..20: mol_type = other DNA
tggcacctctctgcagactt

SEQ ID NO: 189961 - DNA, 20 bp, synthetic construct
  source 1..20: mol_type = other DNA
ctggcacctctctgcagact

SEQ ID NO: 189962 - DNA, 20 bp, synthetic construct
  source 1..20: mol_type = other DNA
gctggcacctctctgcagac

SEQ ID NO: 189963 - DNA, 20 bp, synthetic construct
  source 1..20: mol_type = other DNA
tgctggcacctctctgcaga

SEQ ID NO: 189964 - DNA, 20 bp, synthetic construct
  source 1..20: mol_type = other DNA
atgctggcacctctctgcag

SEQ ID NO: 189965 - DNA, 20 bp, synthetic construct
  source 1..20: mol_type = other DNA
gatgctggcacctctctgca

SEQ ID NO: 189966 - DNA, 20 bp, synthetic construct
  source 1..20: mol_type = other DNA
tgatgctggcacctctctgc

SEQ ID NO: 189967 - DNA, 20 bp, synthetic construct
  source 1..20: mol_type = other DNA
gtgatgctggcacctctctg

SEQ ID NO: 189968 - DNA, 20 bp, synthetic construct
  source 1..20: mol_type = other DNA
tgtgatgctggcacctctct

SEQ ID NO: 189969 - DNA, 20 bp, synthetic construct
  source 1..20: mol_type = other DNA
ttgtgatgctggcacctctc

SEQ ID NO: 189970 - DNA, 20 bp, synthetic construct
  source 1..20: mol_type = other DNA
cttgtgatgctggcacctct

SEQ ID NO: 189971 - DNA, 20 bp, synthetic construct
  source 1..20: mol_type = other DNA
ccttgtgatgctggcacctc

SEQ ID NO: 189972 - DNA, 20 bp, synthetic construct
  source 1..20: mol_type = other DNA
accttgtgatgctggcacct

SEQ ID NO: 189973 - DNA, 20 bp, synthetic construct
  source 1..20: mol_type = other DNA
caccttgtgatgctggcacc

SEQ ID NO: 189974 - DNA, 20 bp, synthetic construct
  source 1..20: mol_type = other DNA
acaccttgtgatgctggcac

SEQ ID NO: 189975 - DNA, 20 bp, synthetic construct
  source 1..20: mol_type = other DNA
aacaccttgtgatgctggca

SEQ ID NO: 189976 - DNA, 20 bp, synthetic construct
  source 1..20: mol_type = other DNA
taacaccttgtgatgctggc

SEQ ID NO: 189977 - DNA, 20 bp, synthetic construct
  source 1..20: mol_type = other DNA
ttaacaccttgtgatgctgg

SEQ ID NO: 189978 - DNA, 20 bp, synthetic construct
  source 1..20: mol_type = other DNA
cttaacaccttgtgatgctg

SEQ ID NO: 189979 - DNA, 20 bp, synthetic construct
  source 1..20: mol_type = other DNA
ccttaacaccttgtgatgct

SEQ ID NO: 189980 - DNA, 20 bp, synthetic construct
  source 1..20: mol_type = other DNA
tccttaacaccttgtgatgc

SEQ ID NO: 189981 - DNA, 20 bp, synthetic construct
  source 1..20: mol_type = other DNA
gtccttaacaccttgtgatg

SEQ ID NO: 189982 - DNA, 20 bp, synthetic construct
  source 1..20: mol_type = other DNA
ggtccttaacaccttgtgat

SEQ ID NO: 189983 - DNA, 20 bp, synthetic construct
  source 1..20: mol_type = other DNA
tggtccttaacaccttgtga

SEQ ID NO: 189984 - DNA, 20 bp, synthetic construct
  source 1..20: mol_type = other DNA
gtggtccttaacaccttgtg

SEQ ID NO: 189985 - DNA, 20 bp, synthetic construct
  source 1..20: mol_type = other DNA
cgtggtccttaacaccttgt

SEQ ID NO: 189986 - DNA, 20 bp, synthetic construct
  source 1..20: mol_type = other DNA
tcgtggtccttaacaccttg

SEQ ID NO: 189987 - DNA, 20 bp, synthetic construct
  source 1..20: mol_type = other DNA
ctcgtggtccttaacacctt

SEQ ID NO: 189988 - DNA, 20 bp, synthetic construct
  source 1..20: mol_type = other DNA
actcgtggtccttaacacct

SEQ ID NO: 189989 - DNA, 20 bp, synthetic construct
  source 1..20: mol_type = other DNA
aactcgtggtccttaacacc

SEQ ID NO: 189990 - DNA, 20 bp, synthetic construct
  source 1..20: mol_type = other DNA
aaactcgtggtccttaacac

SEQ ID NO: 189991 - DNA, 20 bp, synthetic construct
  source 1..20: mol_type = other DNA
caaactcgtggtccttaaca

SEQ ID NO: 189992 - DNA, 20 bp, synthetic construct
  source 1..20: mol_type = other DNA
ccaaactcgtggtccttaac

SEQ ID NO: 189993 - DNA, 20 bp, synthetic construct
  source 1..20: mol_type = other DNA
gccaaactcgtggtccttaa

SEQ ID NO: 189994 - DNA, 20 bp, synthetic construct
  source 1..20: mol_type = other DNA
tgccaaactcgtggtcctta

SEQ ID NO: 189995 - DNA, 20 bp, synthetic construct
  source 1..20: mol_type = other DNA
atgccaaactcgtggtcctt

SEQ ID NO: 189996 - DNA, 20 bp, synthetic construct
  source 1..20: mol_type = other DNA
aatgccaaactcgtggtcct

SEQ ID NO: 189997 - DNA, 20 bp, synthetic construct
  source 1..20: mol_type = other DNA
aaatgccaaactcgtggtcc

SEQ ID NO: 189998 - DNA, 20 bp, synthetic construct
  source 1..20: mol_type = other DNA
aaaatgccaaactcgtggtc

SEQ ID NO: 189999 - DNA, 20 bp, synthetic construct
  source 1..20: mol_type = other DNA
taaaatgccaaactcgtggt

SEQ ID NO: 190000 - DNA, 20 bp, synthetic construct
  source 1..20: mol_type = other DNA
ttaaaatgccaaactcgtgg

SEQ ID NO: 190001 - DNA, 20 bp, synthetic construct
  source 1..20: mol_type = other DNA
gttaaaatgccaaactcgtg

SEQ ID NO: 190002 - DNA, 20 bp, synthetic construct
  source 1..20: mol_type = other DNA
tgttaaaatgccaaactcgt

SEQ ID NO: 190003 - DNA, 20 bp, synthetic construct
  source 1..20: mol_type = other DNA
ctgttaaaatgccaaactcg

SEQ ID NO: 190004 - DNA, 20 bp, synthetic construct
  source 1..20: mol_type = other DNA
tctgttaaaatgccaaactc

SEQ ID NO: 190005 - DNA, 20 bp, synthetic construct
  source 1..20: mol_type = other DNA
atctgttaaaatgccaaact

SEQ ID NO: 190006 - DNA, 20 bp, synthetic construct
  source 1..20: mol_type = other DNA
catctgttaaaatgccaaac

SEQ ID NO: 190007 - DNA, 20 bp, synthetic construct
  source 1..20: mol_type = other DNA
gcatctgttaaaatgccaaa

SEQ ID NO: 190008 - DNA, 20 bp, synthetic construct
  source 1..20: mol_type = other DNA
ggcatctgttaaaatgccaa

SEQ ID NO: 190009 - DNA, 20 bp, synthetic construct
  source 1..20: mol_type = other DNA
tggcatctgttaaaatgcca

SEQ ID NO: 190010 - DNA, 20 bp, synthetic construct
  source 1..20: mol_type = other DNA
ctggcatctgttaaaatgcc

SEQ ID NO: 190011 - DNA, 20 bp, synthetic construct
  source 1..20: mol_type = other DNA
tctggcatctgttaaaatgc

SEQ ID NO: 190012 - DNA, 20 bp, synthetic construct
  source 1..20: mol_type = other DNA
ctctggcatctgttaaaatg

SEQ ID NO: 190013 - DNA, 20 bp, synthetic construct
  source 1..20: mol_type = other DNA
gctctggcatctgttaaaat

SEQ ID NO: 190014 - DNA, 20 bp, synthetic construct
  source 1..20: mol_type = other DNA
ggctctggcatctgttaaaa

SEQ ID NO: 190015 - DNA, 20 bp, synthetic construct
  source 1..20: mol_type = other DNA
tggctctggcatctgttaaa

SEQ ID NO: 190016 - DNA, 20 bp, synthetic construct
  source 1..20: mol_type = other DNA
gtggctctggcatctgttaa

SEQ ID NO: 190017 - DNA, 20 bp, synthetic construct
  source 1..20: mol_type = other DNA
agtggctctggcatctgtta

SEQ ID NO: 190018 - DNA, 20 bp, synthetic construct
  source 1..20: mol_type = other DNA
aagtggctctggcatctgtt

SEQ ID NO: 190019 - DNA, 20 bp, synthetic construct
  source 1..20: mol_type = other DNA
caagtggctctggcatctgt

SEQ ID NO: 190020 - DNA, 20 bp, synthetic construct
  source 1..20: mol_type = other DNA
tcaagtggctctggcatctg

SEQ ID NO: 190021 - DNA, 20 bp, synthetic construct
  source 1..20: mol_type = other DNA
ctcaagtggctctggcatct

SEQ ID NO: 190022 - DNA, 20 bp, synthetic construct
  source 1..20: mol_type = other DNA
tctcaagtggctctggcatc

SEQ ID NO: 190023 - DNA, 20 bp, synthetic construct
  source 1..20: mol_type = other DNA
ttctcaagtggctctggcat

SEQ ID NO: 190024 - DNA, 20 bp, synthetic construct
  source 1..20: mol_type = other DNA
tttctcaagtggctctggca

SEQ ID NO: 190025 - DNA, 20 bp, synthetic construct
  source 1..20: mol_type = other DNA
atttctcaagtggctctggc

SEQ ID NO: 190026 - DNA, 20 bp, synthetic construct
  source 1..20: mol_type = other DNA
catttctcaagtggctctgg

SEQ ID NO: 190027 - DNA, 20 bp, synthetic construct
  source 1..20: mol_type = other DNA
acatttctcaagtggctctg

SEQ ID NO: 190028 - DNA, 20 bp, synthetic construct
  source 1..20: mol_type = other DNA
cacatttctcaagtggctct

SEQ ID NO: 190029 - DNA, 20 bp, synthetic construct
  source 1..20: mol_type = other DNA
ccacatttctcaagtggctc

SEQ ID NO: 190030 - DNA, 20 bp, synthetic construct
  source 1..20: mol_type = other DNA
accacatttctcaagtggct

SEQ ID NO: 190031 - DNA, 20 bp, synthetic construct
  source 1..20: mol_type = other DNA
taccacatttctcaagtggc

SEQ ID NO: 190032 - DNA, 20 bp, synthetic construct
  source 1..20: mol_type = other DNA
ttaccacatttctcaagtgg

SEQ ID NO: 190033 - DNA, 20 bp, synthetic construct
  source 1..20: mol_type = other DNA
gttaccacatttctcaagtg

SEQ ID NO: 190034 - DNA, 20 bp, synthetic construct
  source 1..20: mol_type = other DNA
agttaccacatttctcaagt

SEQ ID NO: 190035 - DNA, 20 bp, synthetic construct
  source 1..20: mol_type = other DNA
tagttaccacatttctcaag

SEQ ID NO: 190036 - DNA, 20 bp, synthetic construct
  source 1..20: mol_type = other DNA
ttagttaccacatttctcaa

SEQ ID NO: 190037 - DNA, 20 bp, synthetic construct
  source 1..20: mol_type = other DNA
cttagttaccacatttctca

SEQ ID NO: 190038 - DNA, 20 bp, synthetic construct
  source 1..20: mol_type = other DNA
gcttagttaccacatttctc

SEQ ID NO: 190039 - DNA, 20 bp, synthetic construct
  source 1..20: mol_type = other DNA
ggcttagttaccacatttct

SEQ ID NO: 190040 - DNA, 20 bp, synthetic construct
  source 1..20: mol_type = other DNA
gggcttagttaccacatttc

SEQ ID NO: 190041 - DNA, 20 bp, synthetic construct
  source 1..20: mol_type = other DNA
tgggcttagttaccacattt

SEQ ID NO: 190042 - DNA, 20 bp, synthetic construct
  source 1..20: mol_type = other DNA
ctgggcttagttaccacatt

SEQ ID NO: 190043 - DNA, 20 bp, synthetic construct
  source 1..20: mol_type = other DNA
tctgggcttagttaccacat

SEQ ID NO: 190044 - DNA, 20 bp, synthetic construct
  source 1..20: mol_type = other DNA
ctctgggcttagttaccaca

SEQ ID NO: 190045 - DNA, 20 bp, synthetic construct
  source 1..20: mol_type = other DNA
tctctgggcttagttaccac

SEQ ID NO: 190046 - DNA, 20 bp, synthetic construct
  source 1..20: mol_type = other DNA
ctctctgggcttagttacca

SEQ ID NO: 190047 - DNA, 20 bp, synthetic construct
  source 1..20: mol_type = other DNA
cctctctgggcttagttacc

SEQ ID NO: 190048 - DNA, 20 bp, synthetic construct
  source 1..20: mol_type = other DNA
acctctctgggcttagttac

SEQ ID NO: 190049 - DNA, 20 bp, synthetic construct
  source 1..20: mol_type = other DNA
tacctctctgggcttagtta

SEQ ID NO: 190050 - DNA, 20 bp, synthetic construct
  source 1..20: mol_type = other DNA
gtacctctctgggcttagtt

SEQ ID NO: 190051 - DNA, 20 bp, synthetic construct
  source 1..20: mol_type = other DNA
tgtacctctctgggcttagt

SEQ ID NO: 190052 - DNA, 20 bp, synthetic construct
  source 1..20: mol_type = other DNA
ctgtacctctctgggcttag

SEQ ID NO: 190053 - DNA, 20 bp, synthetic construct
  source 1..20: mol_type = other DNA
actgtacctctctgggctta

SEQ ID NO: 190054 - DNA, 20 bp, synthetic construct
  source 1..20: mol_type = other DNA
aactgtacctctctgggctt

SEQ ID NO: 190055 - DNA, 20 bp, synthetic construct
  source 1..20: mol_type = other DNA
taactgtacctctctgggct

SEQ ID NO: 190056 - DNA, 20 bp, synthetic construct
  source 1..20: mol_type = other DNA
ttaactgtacctctctgggc

SEQ ID NO: 190057 - DNA, 20 bp, synthetic construct
  source 1..20: mol_type = other DNA
gttaactgtacctctctggg

SEQ ID NO: 190058 - DNA, 20 bp, synthetic construct
  source 1..20: mol_type = other DNA
ggttaactgtacctctctgg

SEQ ID NO: 190059 - DNA, 20 bp, synthetic construct
  source 1..20: mol_type = other DNA
aggttaactgtacctctctg

SEQ ID NO: 190060 - DNA, 20 bp, synthetic construct
  source 1..20: mol_type = other DNA
gaggttaactgtacctctct

SEQ ID NO: 190061 - DNA, 20 bp, synthetic construct
  source 1..20: mol_type = other DNA
ggaggttaactgtacctctc

SEQ ID NO: 190062 - DNA, 20 bp, synthetic construct
  source 1..20: mol_type = other DNA
gggaggttaactgtacctct

SEQ ID NO: 190063 - DNA, 20 bp, synthetic construct
  source 1..20: mol_type = other DNA
ggggaggttaactgtacctc

SEQ ID NO: 190064 - DNA, 20 bp, synthetic construct
  source 1..20: mol_type = other DNA
tggggaggttaactgtacct

SEQ ID NO: 190065 - DNA, 20 bp, synthetic construct
  source 1..20: mol_type = other DNA
ctggggaggttaactgtacc

SEQ ID NO: 190066 - DNA, 20 bp, synthetic construct
  source 1..20: mol_type = other DNA
tctggggaggttaactgtac

SEQ ID NO: 190067 - DNA, 20 bp, synthetic construct
  source 1..20: mol_type = other DNA
ctctggggaggttaactgta

SEQ ID NO: 190068 - DNA, 20 bp, synthetic construct
  source 1..20: mol_type = other DNA
actctggggaggttaactgt

SEQ ID NO: 190069 - DNA, 20 bp, synthetic construct
  source 1..20: mol_type = other DNA
gactctggggaggttaactg

SEQ ID NO: 190070 - DNA, 20 bp, synthetic construct
  source 1..20: mol_type = other DNA
tgactctggggaggttaact

SEQ ID NO: 190071 - DNA, 20 bp, synthetic construct
  source 1..20: mol_type = other DNA
gtgactctggggaggttaac

SEQ ID NO: 190072 - DNA, 20 bp, synthetic construct
  source 1..20: mol_type = other DNA
tgtgactctggggaggttaa

SEQ ID NO: 190073 - DNA, 20 bp, synthetic construct
  source 1..20: mol_type = other DNA
gtgtgactctggggaggtta

SEQ ID NO: 190074 - DNA, 20 bp, synthetic construct
  source 1..20: mol_type = other DNA
tgtgtgactctggggaggtt

SEQ ID NO: 190075 - DNA, 20 bp, synthetic construct
  source 1..20: mol_type = other DNA
ctgtgtgactctggggaggt

SEQ ID NO: 190076 - DNA, 20 bp, synthetic construct
  source 1..20: mol_type = other DNA
gctgtgtgactctggggagg

SEQ ID NO: 190077 - DNA, 20 bp, synthetic construct
  source 1..20: mol_type = other DNA
tgctgtgtgactctggggag

SEQ ID NO: 190078 - DNA, 20 bp, synthetic construct
  source 1..20: mol_type = other DNA
ctgctgtgtgactctgggga

SEQ ID NO: 190079 - DNA, 20 bp, synthetic construct
  source 1..20: mol_type = other DNA
cctgctgtgtgactctgggg

SEQ ID NO: 190080 - DNA, 20 bp, synthetic construct
  source 1..20: mol_type = other DNA
acctgctgtgtgactctggg

SEQ ID NO: 190081 - DNA, 20 bp, synthetic construct
  source 1..20: mol_type = other DNA
aacctgctgtgtgactctgg

SEQ ID NO: 190082 - DNA, 20 bp, synthetic construct
  source 1..20: mol_type = other DNA
gaacctgctgtgtgactctg

SEQ ID NO: 190083 - DNA, 20 bp, synthetic construct
  source 1..20: mol_type = other DNA
tgaacctgctgtgtgactct

SEQ ID NO: 190084 - DNA, 20 bp, synthetic construct
  source 1..20: mol_type = other DNA
atgaacctgctgtgtgactc

SEQ ID NO: 190085 - DNA, 20 bp, synthetic construct
  source 1..20: mol_type = other DNA
catgaacctgctgtgtgact

SEQ ID NO: 190086 - DNA, 20 bp, synthetic construct
  source 1..20: mol_type = other DNA
ccatgaacctgctgtgtgac

SEQ ID NO: 190087 - DNA, 20 bp, synthetic construct
  source 1..20: mol_type = other DNA
gccatgaacctgctgtgtga

SEQ ID NO: 190088 - DNA, 20 bp, synthetic construct
  source 1..20: mol_type = other DNA
tgccatgaacctgctgtgtg

SEQ ID NO: 190089 - DNA, 20 bp, synthetic construct
  source 1..20: mol_type = other DNA
ttgccatgaacctgctgtgt

SEQ ID NO: 190090 - DNA, 20 bp, synthetic construct
  source 1..20: mol_type = other DNA
tttgccatgaacctgctgtg

SEQ ID NO: 190091 - DNA, 20 bp, synthetic construct
  source 1..20: mol_type = other DNA
ctttgccatgaacctgctgt

SEQ ID NO: 190092 - DNA, 20 bp, synthetic construct
  source 1..20: mol_type = other DNA
gctttgccatgaacctgctg

SEQ ID NO: 190093 - DNA, 20 bp, synthetic construct
  source 1..20: mol_type = other DNA
agctttgccatgaacctgct

SEQ ID NO: 190094 - DNA, 20 bp, synthetic construct
  source 1..20: mol_type = other DNA
cagctttgccatgaacctgc

SEQ ID NO: 190095 - DNA, 20 bp, synthetic construct
  source 1..20: mol_type = other DNA
ccagctttgccatgaacctg

SEQ ID NO: 190096 - DNA, 20 bp, synthetic construct
  source 1..20: mol_type = other DNA
tccagctttgccatgaacct

SEQ ID NO: 190097 - DNA, 20 bp, synthetic construct
  source 1..20: mol_type = other DNA
gtccagctttgccatgaacc

SEQ ID NO: 190098 - DNA, 20 bp, synthetic construct
  source 1..20: mol_type = other DNA
agtccagctttgccatgaac

SEQ ID NO: 190099 - DNA, 20 bp, synthetic construct
  source 1..20: mol_type = other DNA
tagtccagctttgccatgaa

SEQ ID NO: 190100 - DNA, 20 bp, synthetic construct
  source 1..20: mol_type = other DNA
ctagtccagctttgccatga

SEQ ID NO: 190101 - DNA, 20 bp, synthetic construct
  source 1..20: mol_type = other DNA
gctagtccagctttgccatg

SEQ ID NO: 190102 - DNA, 20 bp, synthetic construct
  source 1..20: mol_type = other DNA
tgctagtccagctttgccat

SEQ ID NO: 190103 - DNA, 20 bp, synthetic construct
  source 1..20: mol_type = other DNA
gtgctagtccagctttgcca

SEQ ID NO: 190104 - DNA, 20 bp, synthetic construct
  source 1..20: mol_type = other DNA
tgtgctagtccagctttgcc

SEQ ID NO: 190105 - DNA, 20 bp, synthetic construct
  source 1..20: mol_type = other DNA
ctgtgctagtccagctttgc

SEQ ID NO: 190106 - DNA, 20 bp, synthetic construct
  source 1..20: mol_type = other DNA
cctgtgctagtccagctttg

SEQ ID NO: 190107 - DNA, 20 bp, synthetic construct
  source 1..20: mol_type = other DNA
acctgtgctagtccagcttt

SEQ ID NO: 190108 - DNA, 20 bp, synthetic construct
  source 1..20: mol_type = other DNA
cacctgtgctagtccagctt

SEQ ID NO: 190109 - DNA, 20 bp, synthetic construct
  source 1..20: mol_type = other DNA
acacctgtgctagtccagct

SEQ ID NO: 190110 - DNA, 20 bp, synthetic construct
  source 1..20: mol_type = other DNA
gacacctgtgctagtccagc

SEQ ID NO: 190111 - DNA, 20 bp, synthetic construct
  source 1..20: mol_type = other DNA
ggacacctgtgctagtccag

SEQ ID NO: 190112 - DNA, 20 bp, synthetic construct
  source 1..20: mol_type = other DNA
aggacacctgtgctagtcca

SEQ ID NO: 190113 - DNA, 20 bp, synthetic construct
  source 1..20: mol_type = other DNA
aaggacacctgtgctagtcc

SEQ ID NO: 190114 - DNA, 20 bp, synthetic construct
  source 1..20: mol_type = other DNA
gaaggacacctgtgctagtc

SEQ ID NO: 190115 - DNA, 20 bp, synthetic construct
  source 1..20: mol_type = other DNA
ggaaggacacctgtgctagt

SEQ ID NO: 190116 - DNA, 20 bp, synthetic construct
  source 1..20: mol_type = other DNA
gggaaggacacctgtgctag

SEQ ID NO: 190117 - DNA, 20 bp, synthetic construct
  source 1..20: mol_type = other DNA
ggggaaggacacctgtgcta

SEQ ID NO: 190118 - DNA, 20 bp, synthetic construct
  source 1..20: mol_type = other DNA
aggggaaggacacctgtgct

SEQ ID NO: 190119 - DNA, 20 bp, synthetic construct
  source 1..20: mol_type = other DNA
caggggaaggacacctgtgc

SEQ ID NO: 190120 - DNA, 20 bp, synthetic construct
  source 1..20: mol_type = other DNA
gcaggggaaggacacctgtg

SEQ ID NO: 190121 - DNA, 20 bp, synthetic construct
  source 1..20: mol_type = other DNA
tgcaggggaaggacacctgt

SEQ ID NO: 190122 - DNA, 20 bp, synthetic construct
  source 1..20: mol_type = other DNA
ctgcaggggaaggacacctg

SEQ ID NO: 190123 - DNA, 20 bp, synthetic construct
  source 1..20: mol_type = other DNA
tctgcaggggaaggacacct

SEQ ID NO: 190124 - DNA, 20 bp, synthetic construct
  source 1..20: mol_type = other DNA
atctgcaggggaaggacacc

SEQ ID NO: 190125 - DNA, 20 bp, synthetic construct
  source 1..20: mol_type = other DNA
gatctgcaggggaaggacac

SEQ ID NO: 190126 - DNA, 20 bp, synthetic construct
  source 1..20: mol_type = other DNA
ggatctgcaggggaaggaca

SEQ ID NO: 190127 - DNA, 20 bp, synthetic construct
  source 1..20: mol_type = other DNA
gggatctgcaggggaaggac

SEQ ID NO: 190128 - DNA, 20 bp, synthetic construct
  source 1..20: mol_type = other DNA
ggggatctgcaggggaagga

SEQ ID NO: 190129 - DNA, 20 bp, synthetic construct
  source 1..20: mol_type = other DNA
aggggatctgcaggggaagg

SEQ ID NO: 190130 - DNA, 20 bp, synthetic construct
  source 1..20: mol_type = other DNA
aaggggatctgcaggggaag

SEQ ID NO: 190131 - DNA, 20 bp, synthetic construct
  source 1..20: mol_type = other DNA
gaaggggatctgcaggggaa

SEQ ID NO: 190132 - DNA, 20 bp, synthetic construct
  source 1..20: mol_type = other DNA
agaaggggatctgcagggga

SEQ ID NO: 190133 - DNA, 20 bp, synthetic construct
  source 1..20: mol_type = other DNA
cagaaggggatctgcagggg

SEQ ID NO: 190134 - DNA, 20 bp, synthetic construct
  source 1..20: mol_type = other DNA
acagaaggggatctgcaggg

SEQ ID NO: 190135 - DNA, 20 bp, synthetic construct
  source 1..20: mol_type = other DNA
cacagaaggggatctgcagg

SEQ ID NO: 190136 - DNA, 20 bp, synthetic construct
  source 1..20: mol_type = other DNA
gcacagaaggggatctgcag

SEQ ID NO: 190137 - DNA, 20 bp, synthetic construct
  source 1..20: mol_type = other DNA
ggcacagaaggggatctgca

SEQ ID NO: 190138 - DNA, 20 bp, synthetic construct
  source 1..20: mol_type = other DNA
gggcacagaaggggatctgc

SEQ ID NO: 190139 - DNA, 20 bp, synthetic construct
  source 1..20: mol_type = other DNA
ggggcacagaaggggatctg

SEQ ID NO: 190140 - DNA, 20 bp, synthetic construct
  source 1..20: mol_type = other DNA
tggggcacagaaggggatct

SEQ ID NO: 190141 - DNA, 20 bp, synthetic construct
  source 1..20: mol_type = other DNA
gtggggcacagaaggggatc

SEQ ID NO: 190142 - DNA, 20 bp, synthetic construct
  source 1..20: mol_type = other DNA
tgtggggcacagaaggggat

SEQ ID NO: 190143 - DNA, 20 bp, synthetic construct
  source 1..20: mol_type = other DNA
atgtggggcacagaagggga

SEQ ID NO: 190144 - DNA, 20 bp, synthetic construct
  source 1..20: mol_type = other DNA
gatgtggggcacagaagggg

SEQ ID NO: 190145 - DNA, 20 bp, synthetic construct
  source 1..20: mol_type = other DNA
tgatgtggggcacagaaggg

SEQ ID NO: 190146 - DNA, 20 bp, synthetic construct
  source 1..20: mol_type = other DNA
gtgatgtggggcacagaagg

SEQ ID NO: 190147 - DNA, 20 bp, synthetic construct
  source 1..20: mol_type = other DNA
ggtgatgtggggcacagaag

SEQ ID NO: 190148 - DNA, 20 bp, synthetic construct
  source 1..20: mol_type = other DNA
aggtgatgtggggcacagaa

SEQ ID NO: 190149 - DNA, 20 bp, synthetic construct
  source 1..20: mol_type = other DNA
gaggtgatgtggggcacaga

SEQ ID NO: 190150 - DNA, 20 bp, synthetic construct
  source 1..20: mol_type = other DNA
ggaggtgatgtggggcacag

SEQ ID NO: 190151 - DNA, 20 bp, synthetic construct
  source 1..20: mol_type = other DNA
gggaggtgatgtggggcaca

SEQ ID NO: 190152 - DNA, 20 bp, synthetic construct
  source 1..20: mol_type = other DNA
agggaggtgatgtggggcac

SEQ ID NO: 190153 - DNA, 20 bp, synthetic construct
  source 1..20: mol_type = other DNA
gagggaggtgatgtggggca

SEQ ID NO: 190154 - DNA, 20 bp, synthetic construct
  source 1..20: mol_type = other DNA
ggagggaggtgatgtggggc

SEQ ID NO: 190155 - DNA, 20 bp, synthetic construct
  source 1..20: mol_type = other DNA
tggagggaggtgatgtgggg

SEQ ID NO: 190156 - DNA, 20 bp, synthetic construct
  source 1..20: mol_type = other DNA
ctggagggaggtgatgtggg

SEQ ID NO: 190157 - DNA, 20 bp, synthetic construct
  source 1..20: mol_type = other DNA
actggagggaggtgatgtgg

SEQ ID NO: 190158 - DNA, 20 bp, synthetic construct
  source 1..20: mol_type = other DNA
cactggagggaggtgatgtg

SEQ ID NO: 190159 - DNA, 20 bp, synthetic construct
  source 1..20: mol_type = other DNA
acactggagggaggtgatgt

SEQ ID NO: 190160 - DNA, 20 bp, synthetic construct
  source 1..20: mol_type = other DNA
gacactggagggaggtgatg

SEQ ID NO: 190161 - DNA, 20 bp, synthetic construct
  source 1..20: mol_type = other DNA
agacactggagggaggtgat

SEQ ID NO: 190162 - DNA, 20 bp, synthetic construct
  source 1..20: mol_type = other DNA
cagacactggagggaggtga

SEQ ID NO: 190163 - DNA, 20 bp, synthetic construct
  source 1..20: mol_type = other DNA
ccagacactggagggaggtg

SEQ ID NO: 190164 - DNA, 20 bp, synthetic construct
  source 1..20: mol_type = other DNA
cccagacactggagggaggt

SEQ ID NO: 190165 - DNA, 20 bp, synthetic construct
  source 1..20: mol_type = other DNA
gcccagacactggagggagg

SEQ ID NO: 190166 - DNA, 20 bp, synthetic construct
  source 1..20: mol_type = other DNA
ggcccagacactggagggag

SEQ ID NO: 190167 - DNA, 20 bp, synthetic construct
  source 1..20: mol_type = other DNA
tggcccagacactggaggga

SEQ ID NO: 190168 - DNA, 20 bp, synthetic construct
  source 1..20: mol_type = other DNA
gtggcccagacactggaggg

SEQ ID NO: 190169 - DNA, 20 bp, synthetic construct
  source 1..20: mol_type = other DNA
ggtggcccagacactggagg

SEQ ID NO: 190170 - DNA, 20 bp, synthetic construct
  source 1..20: mol_type = other DNA
aggtggcccagacactggag

SEQ ID NO: 190171 - DNA, 20 bp, synthetic construct
  source 1..20: mol_type = other DNA
caggtggcccagacactgga

SEQ ID NO: 190172 - DNA, 20 bp, synthetic construct
  source 1..20: mol_type = other DNA
ccaggtggcccagacactgg

SEQ ID NO: 190173 - DNA, 20 bp, synthetic construct
  source 1..20: mol_type = other DNA
tccaggtggcccagacactg

SEQ ID NO: 190174 - DNA, 20 bp, synthetic construct
  source 1..20: mol_type = other DNA
ctccaggtggcccagacact

SEQ ID NO: 190175 - DNA, 20 bp, synthetic construct
  source 1..20: mol_type = other DNA
tctccaggtggcccagacac

SEQ ID NO: 190176 - DNA, 20 bp, synthetic construct
  source 1..20: mol_type = other DNA
atctccaggtggcccagaca

SEQ ID NO: 190177 - DNA, 20 bp, synthetic construct
  source 1..20: mol_type = other DNA
catctccaggtggcccagac

SEQ ID NO: 190178 - DNA, 20 bp, synthetic construct
  source 1..20: mol_type = other DNA
ccatctccaggtggcccaga

SEQ ID NO: 190179 - DNA, 20 bp, synthetic construct
  source 1..20: mol_type = other DNA
cccatctccaggtggcccag

SEQ ID NO: 190180 - DNA, 20 bp, synthetic construct
  source 1..20: mol_type = other DNA
gcccatctccaggtggccca

SEQ ID NO: 190181 - DNA, 20 bp, synthetic construct
  source 1..20: mol_type = other DNA
ggcccatctccaggtggccc

SEQ ID NO: 190182 - DNA, 20 bp, synthetic construct
  source 1..20: mol_type = other DNA
gggcccatctccaggtggcc

SEQ ID NO: 190183 - DNA, 20 bp, synthetic construct
  source 1..20: mol_type = other DNA
agggcccatctccaggtggc

SEQ ID NO: 190184 - DNA, 20 bp, synthetic construct
  source 1..20: mol_type = other DNA
gagggcccatctccaggtgg

SEQ ID NO: 190185 - DNA, 20 bp, synthetic construct
  source 1..20: mol_type = other DNA
tgagggcccatctccaggtg

SEQ ID NO: 190186 - DNA, 20 bp, synthetic construct
  source 1..20: mol_type = other DNA
ctgagggcccatctccaggt

SEQ ID NO: 190187 - DNA, 20 bp, synthetic construct
  source 1..20: mol_type = other DNA
tctgagggcccatctccagg

SEQ ID NO: 190188 - DNA, 20 bp, synthetic construct
  source 1..20: mol_type = other DNA
gtctgagggcccatctccag

SEQ ID NO: 190189 - DNA, 20 bp, synthetic construct
  source 1..20: mol_type = other DNA
agtctgagggcccatctcca

SEQ ID NO: 190190 - DNA, 20 bp, synthetic construct
  source 1..20: mol_type = other DNA
gagtctgagggcccatctcc

SEQ ID NO: 190191 - DNA, 20 bp, synthetic construct
  source 1..20: mol_type = other DNA
tgagtctgagggcccatctc

SEQ ID NO: 190192 - DNA, 20 bp, synthetic construct
  source 1..20: mol_type = other DNA
gtgagtctgagggcccatct

SEQ ID NO: 190193 - DNA, 20 bp, synthetic construct
  source 1..20: mol_type = other DNA
ggtgagtctgagggcccatc

SEQ ID NO: 190194 - DNA, 20 bp, synthetic construct
  source 1..20: mol_type = other DNA
gggtgagtctgagggcccat

SEQ ID NO: 190195 - DNA, 20 bp, synthetic construct
  source 1..20: mol_type = other DNA
cgggtgagtctgagggccca

SEQ ID NO: 190196 - DNA, 20 bp, synthetic construct
  source 1..20: mol_type = other DNA
ccgggtgagtctgagggccc

SEQ ID NO: 190197 - DNA, 20 bp, synthetic construct
  source 1..20: mol_type = other DNA
gccgggtgagtctgagggcc

SEQ ID NO: 190198 - DNA, 20 bp, synthetic construct
  source 1..20: mol_type = other DNA
ggccgggtgagtctgagggc

SEQ ID NO: 190199 - DNA, 20 bp, synthetic construct
  source 1..20: mol_type = other DNA
tggccgggtgagtctgaggg

SEQ ID NO: 190200 - DNA, 20 bp, synthetic construct
  source 1..20: mol_type = other DNA
ctggccgggtgagtctgagg

SEQ ID NO: 190201 - DNA, 20 bp, synthetic construct
  source 1..20: mol_type = other DNA
tctggccgggtgagtctgag

SEQ ID NO: 190202 - DNA, 20 bp, synthetic construct
  source 1..20: mol_type = other DNA
ctctggccgggtgagtctga

SEQ ID NO: 190203 - DNA, 20 bp, synthetic construct
  source 1..20: mol_type = other DNA
cctctggccgggtgagtctg

SEQ ID NO: 190204 - DNA, 20 bp, synthetic construct
  source 1..20: mol_type = other DNA
acctctggccgggtgagtct

SEQ ID NO: 190205 - DNA, 20 bp, synthetic construct
  source 1..20: mol_type = other DNA
cacctctggccgggtgagtc

SEQ ID NO: 190206 - DNA, 20 bp, synthetic construct
  source 1..20: mol_type = other DNA
gcacctctggccgggtgagt

SEQ ID NO: 190207 - DNA, 20 bp, synthetic construct
  source 1..20: mol_type = other DNA
ggcacctctggccgggtgag

SEQ ID NO: 190208 - DNA, 20 bp, synthetic construct
  source 1..20: mol_type = other DNA
tggcacctctggccgggtga

SEQ ID NO: 190209 - DNA, 20 bp, synthetic construct
  source 1..20: mol_type = other DNA
atggcacctctggccgggtg

SEQ ID NO: 190210 - DNA, 20 bp, synthetic construct
  source 1..20: mol_type = other DNA
gatggcacctctggccgggt

SEQ ID NO: 190211 - DNA, 20 bp, synthetic construct
  source 1..20: mol_type = other DNA
agatggcacctctggccggg

SEQ ID NO: 190212 - DNA, 20 bp, synthetic construct
  source 1..20: mol_type = other DNA
gagatggcacctctggccgg

SEQ ID NO: 190213 - DNA, 20 bp, synthetic construct
  source 1..20: mol_type = other DNA
tgagatggcacctctggccg

SEQ ID NO: 190214 - DNA, 20 bp, synthetic construct
  source 1..20: mol_type = other DNA
atgagatggcacctctggcc

SEQ ID NO: 190215 - DNA, 20 bp, synthetic construct
  source 1..20: mol_type = other DNA
catgagatggcacctctggc

SEQ ID NO: 190216 - DNA, 20 bp, synthetic construct
  source 1..20: mol_type = other DNA
ccatgagatggcacctctgg

SEQ ID NO: 190217 - DNA, 20 bp, synthetic construct
  source 1..20: mol_type = other DNA
cccatgagatggcacctctg

SEQ ID NO: 190218 - DNA, 20 bp, synthetic construct
  source 1..20: mol_type = other DNA
tcccatgagatggcacctct

SEQ ID NO: 190219 - DNA, 20 bp, synthetic construct
  source 1..20: mol_type = other DNA
ctcccatgagatggcacctc

SEQ ID NO: 190220 - DNA, 20 bp, synthetic construct
  source 1..20: mol_type = other DNA
tctcccatgagatggcacct

SEQ ID NO: 190221 - DNA, 20 bp, synthetic construct
  source 1..20: mol_type = other DNA
ctctcccatgagatggcacc

SEQ ID NO: 190222 - DNA, 20 bp, synthetic construct
  source 1..20: mol_type = other DNA
cctctcccatgagatggcac

SEQ ID NO: 190223 - DNA, 20 bp, synthetic construct
  source 1..20: mol_type = other DNA
acctctcccatgagatggca

SEQ ID NO: 190224 - DNA, 20 bp, synthetic construct
  source 1..20: mol_type = other DNA
gacctctcccatgagatggc

SEQ ID NO: 190225 - DNA, 20 bp, synthetic construct
  source 1..20: mol_type = other DNA
agacctctcccatgagatgg

SEQ ID NO: 190226 - DNA, 20 bp, synthetic construct
  source 1..20: mol_type = other DNA
cagacctctcccatgagatg

SEQ ID NO: 190227 - DNA, 20 bp, synthetic construct
  source 1..20: mol_type = other DNA
ccagacctctcccatgagat

SEQ ID NO: 190228 - DNA, 20 bp, synthetic construct
  source 1..20: mol_type = other DNA
gccagacctctcccatgaga

SEQ ID NO: 190229 - DNA, 20 bp, synthetic construct
  source 1..20: mol_type = other DNA
ggccagacctctcccatgag

SEQ ID NO: 190230 - DNA, 20 bp, synthetic construct
  source 1..20: mol_type = other DNA
tggccagacctctcccatga

SEQ ID NO: 190231 - DNA, 20 bp, synthetic construct
  source 1..20: mol_type = other DNA
ctggccagacctctcccatg

SEQ ID NO: 190232 - DNA, 20 bp, synthetic construct
  source 1..20: mol_type = other DNA
cctggccagacctctcccat

SEQ ID NO: 190233 - DNA, 20 bp, synthetic construct
  source 1..20: mol_type = other DNA
tcctggccagacctctccca

SEQ ID NO: 190234 - DNA, 20 bp, synthetic construct
  source 1..20: mol_type = other DNA
ttcctggccagacctctccc

SEQ ID NO: 190235 - DNA, 20 bp, synthetic construct
  source 1..20: mol_type = other DNA
cttcctggccagacctctcc

SEQ ID NO: 190236 - DNA, 20 bp, synthetic construct
  source 1..20: mol_type = other DNA
gcttcctggccagacctctc

SEQ ID NO: 190237 - DNA, 20 bp, synthetic construct
  source 1..20: mol_type = other DNA
tgcttcctggccagacctct

SEQ ID NO: 190238 - DNA, 20 bp, synthetic construct
  source 1..20: mol_type = other DNA
atgcttcctggccagacctc

SEQ ID NO: 190239 - DNA, 20 bp, synthetic construct
  source 1..20: mol_type = other DNA
gatgcttcctggccagacct

SEQ ID NO: 190240 - DNA, 20 bp, synthetic construct
  source 1..20: mol_type = other DNA
cgatgcttcctggccagacc

SEQ ID NO: 190241 - DNA, 20 bp, synthetic construct
  source 1..20: mol_type = other DNA
tcgatgcttcctggccagac

SEQ ID NO: 190242 - DNA, 20 bp, synthetic construct
  source 1..20: mol_type = other DNA
atcgatgcttcctggccaga

SEQ ID NO: 190243 - DNA, 20 bp, synthetic construct
  source 1..20: mol_type = other DNA
tatcgatgcttcctggccag

SEQ ID NO: 190244 - DNA, 20 bp, synthetic construct
  source 1..20: mol_type = other DNA
atatcgatgcttcctggcca

SEQ ID NO: 190245 - DNA, 20 bp, synthetic construct
  source 1..20: mol_type = other DNA
aatatcgatgcttcctggcc

SEQ ID NO: 190246 - DNA, 20 bp, synthetic construct
  source 1..20: mol_type = other DNA
aaatatcgatgcttcctggc

SEQ ID NO: 190247 - DNA, 20 bp, synthetic construct
  source 1..20: mol_type = other DNA
caaatatcgatgcttcctgg

SEQ ID NO: 190248 - DNA, 20 bp, synthetic construct
  source 1..20: mol_type = other DNA
tcaaatatcgatgcttcctg

SEQ ID NO: 190249 - DNA, 20 bp, synthetic construct
  source 1..20: mol_type = other DNA
ctcaaatatcgatgcttcct

SEQ ID NO: 190250 - DNA, 20 bp, synthetic construct
  source 1..20: mol_type = other DNA
tctcaaatatcgatgcttcc

SEQ ID NO: 190251 - DNA, 20 bp, synthetic construct
  source 1..20: mol_type = other DNA
atctcaaatatcgatgcttc

SEQ ID NO: 190252 - DNA, 20 bp, synthetic construct
  source 1..20: mol_type = other DNA
gatctcaaatatcgatgctt

SEQ ID NO: 190253 - DNA, 20 bp, synthetic construct
  source 1..20: mol_type = other DNA
ggatctcaaatatcgatgct

SEQ ID NO: 190254 - DNA, 20 bp, synthetic construct
  source 1..20: mol_type = other DNA
gggatctcaaatatcgatgc

SEQ ID NO: 190255 - DNA, 20 bp, synthetic construct
  source 1..20: mol_type = other DNA
tgggatctcaaatatcgatg

SEQ ID NO: 190256 - DNA, 20 bp, synthetic construct
  source 1..20: mol_type = other DNA
ttgggatctcaaatatcgat

SEQ ID NO: 190257 - DNA, 20 bp, synthetic construct
  source 1..20: mol_type = other DNA
cttgggatctcaaatatcga

SEQ ID NO: 190258 - DNA, 20 bp, synthetic construct
  source 1..20: mol_type = other DNA
tcttgggatctcaaatatcg

SEQ ID NO: 190259 - DNA, 20 bp, synthetic construct
  source 1..20: mol_type = other DNA
ttcttgggatctcaaatatc

SEQ ID NO: 190260 - DNA, 20 bp, synthetic construct
  source 1..20: mol_type = other DNA
tttcttgggatctcaaatat

SEQ ID NO: 190261 - DNA, 20 bp, synthetic construct
  source 1..20: mol_type = other DNA
atttcttgggatctcaaata

SEQ ID NO: 190262 - DNA, 20 bp, synthetic construct
  source 1..20: mol_type = other DNA
catttcttgggatctcaaat

SEQ ID NO: 190263 - DNA, 20 bp, synthetic construct
  source 1..20: mol_type = other DNA
tcatttcttgggatctcaaa

SEQ ID NO: 190264 - DNA, 20 bp, synthetic construct
  source 1..20: mol_type = other DNA
ttcatttcttgggatctcaa

SEQ ID NO: 190265 - DNA, 20 bp, synthetic construct
  source 1..20: mol_type = other DNA
cttcatttcttgggatctca

SEQ ID NO: 190266 - DNA, 20 bp, synthetic construct
  source 1..20: mol_type = other DNA
tcttcatttcttgggatctc

SEQ ID NO: 190267 - DNA, 20 bp, synthetic construct
  source 1..20: mol_type = other DNA
gtcttcatttcttgggatct

SEQ ID NO: 190268 - DNA, 20 bp, synthetic construct
  source 1..20: mol_type = other DNA
agtcttcatttcttgggatc

SEQ ID NO: 190269 - DNA, 20 bp, synthetic construct
  source 1..20: mol_type = other DNA
aagtcttcatttcttgggat

SEQ ID NO: 190270 - DNA, 20 bp, synthetic construct
  source 1..20: mol_type = other DNA
caagtcttcatttcttggga

SEQ ID NO: 190271 - DNA, 20 bp, synthetic construct
  source 1..20: mol_type = other DNA
ccaagtcttcatttcttggg

SEQ ID NO: 190272 - DNA, 20 bp, synthetic construct
  source 1..20: mol_type = other DNA
gccaagtcttcatttcttgg

SEQ ID NO: 190273 - DNA, 20 bp, synthetic construct
  source 1..20: mol_type = other DNA
ggccaagtcttcatttcttg

SEQ ID NO: 190274 - DNA, 20 bp, synthetic construct
  source 1..20: mol_type = other DNA
aggccaagtcttcatttctt

SEQ ID NO: 190275 - DNA, 20 bp, synthetic construct
  source 1..20: mol_type = other DNA
caggccaagtcttcatttct

SEQ ID NO: 190276 - DNA, 20 bp, synthetic construct
  source 1..20: mol_type = other DNA
acaggccaagtcttcatttc

SEQ ID NO: 190277 - DNA, 20 bp, synthetic construct
  source 1..20: mol_type = other DNA
gacaggccaagtcttcattt

SEQ ID NO: 190278 - DNA, 20 bp, synthetic construct
  source 1..20: mol_type = other DNA
tgacaggccaagtcttcatt

SEQ ID NO: 190279 - DNA, 20 bp, synthetic construct
  source 1..20: mol_type = other DNA
ctgacaggccaagtcttcat

SEQ ID NO: 190280 - DNA, 20 bp, synthetic construct
  source 1..20: mol_type = other DNA
tctgacaggccaagtcttca

SEQ ID NO: 190281 - DNA, 20 bp, synthetic construct
  source 1..20: mol_type = other DNA
atctgacaggccaagtcttc

SEQ ID NO: 190282 - DNA, 20 bp, synthetic construct
  source 1..20: mol_type = other DNA
catctgacaggccaagtctt

SEQ ID NO: 190283 - DNA, 20 bp, synthetic construct
  source 1..20: mol_type = other DNA
tcatctgacaggccaagtct

SEQ ID NO: 190284 - DNA, 20 bp, synthetic construct
  source 1..20: mol_type = other DNA
gtcatctgacaggccaagtc

SEQ ID NO: 190285 - DNA, 20 bp, synthetic construct
  source 1..20: mol_type = other DNA
tgtcatctgacaggccaagt

SEQ ID NO: 190286 - DNA, 20 bp, synthetic construct
  source 1..20: mol_type = other DNA
ctgtcatctgacaggccaag

SEQ ID NO: 190287 - DNA, 20 bp, synthetic construct
  source 1..20: mol_type = other DNA
tctgtcatctgacaggccaa

SEQ ID NO: 190288 - DNA, 20 bp, synthetic construct
  source 1..20: mol_type = other DNA
gtctgtcatctgacaggcca

SEQ ID NO: 190289 - DNA, 20 bp, synthetic construct
  source 1..20: mol_type = other DNA
agtctgtcatctgacaggcc

SEQ ID NO: 190290 - DNA, 20 bp, synthetic construct
  source 1..20: mol_type = other DNA
aagtctgtcatctgacaggc

SEQ ID NO: 190291 - DNA, 20 bp, synthetic construct
  source 1..20: mol_type = other DNA
gaagtctgtcatctgacagg

SEQ ID NO: 190292 - DNA, 20 bp, synthetic construct
  source 1..20: mol_type = other DNA
cgaagtctgtcatctgacag

SEQ ID NO: 190293 - DNA, 20 bp, synthetic construct
  source 1..20: mol_type = other DNA
ccgaagtctgtcatctgaca

SEQ ID NO: 190294 - DNA, 20 bp, synthetic construct
  source 1..20: mol_type = other DNA
accgaagtctgtcatctgac

SEQ ID NO: 190295 - DNA, 20 bp, synthetic construct
  source 1..20: mol_type = other DNA
gaccgaagtctgtcatctga

SEQ ID NO: 190296 - DNA, 20 bp, synthetic construct
  source 1..20: mol_type = other DNA
tgaccgaagtctgtcatctg

SEQ ID NO: 190297 - DNA, 20 bp, synthetic construct
  source 1..20: mol_type = other DNA
atgaccgaagtctgtcatct

SEQ ID NO: 190298 - DNA, 20 bp, synthetic construct
  source 1..20: mol_type = other DNA
catgaccgaagtctgtcatc

SEQ ID NO: 190299 - DNA, 20 bp, synthetic construct
  source 1..20: mol_type = other DNA
ccatgaccgaagtctgtcat

SEQ ID NO: 190300 - DNA, 20 bp, synthetic construct
  source 1..20: mol_type = other DNA
cccatgaccgaagtctgtca

SEQ ID NO: 190301 - DNA, 20 bp, synthetic construct
  source 1..20: mol_type = other DNA
tcccatgaccgaagtctgtc

SEQ ID NO: 190302 - DNA, 20 bp, synthetic construct
  source 1..20: mol_type = other DNA
ttcccatgaccgaagtctgt

SEQ ID NO: 190303 - DNA, 20 bp, synthetic construct
  source 1..20: mol_type = other DNA
gttcccatgaccgaagtctg

SEQ ID NO: 190304 - DNA, 20 bp, synthetic construct
  source 1..20: mol_type = other DNA
tgttcccatgaccgaagtct

SEQ ID NO: 190305 - DNA, 20 bp, synthetic construct
  source 1..20: mol_type = other DNA
gtgttcccatgaccgaagtc

SEQ ID NO: 190306 - DNA, 20 bp, synthetic construct
  source 1..20: mol_type = other DNA
cgtgttcccatgaccgaagt

SEQ ID NO: 190307 - DNA, 20 bp, synthetic construct
  source 1..20: mol_type = other DNA
acgtgttcccatgaccgaag

SEQ ID NO: 190308 - DNA, 20 bp, synthetic construct
  source 1..20: mol_type = other DNA
cacgtgttcccatgaccgaa

SEQ ID NO: 190309 - DNA, 20 bp, synthetic construct
  source 1..20: mol_type = other DNA
tcacgtgttcccatgaccga

SEQ ID NO: 190310 - DNA, 20 bp, synthetic construct
  source 1..20: mol_type = other DNA
atcacgtgttcccatgaccg

SEQ ID NO: 190311 - DNA, 20 bp, synthetic construct
  source 1..20: mol_type = other DNA
gatcacgtgttcccatgacc

SEQ ID NO: 190312 - DNA, 20 bp, synthetic construct
  source 1..20: mol_type = other DNA
agatcacgtgttcccatgac

SEQ ID NO: 190313 - DNA, 20 bp, synthetic construct
  source 1..20: mol_type = other DNA
cagatcacgtgttcccatga

SEQ ID NO: 190314 - DNA, 20 bp, synthetic construct
  source 1..20: mol_type = other DNA
acagatcacgtgttcccatg

SEQ ID NO: 190315 - DNA, 20 bp, synthetic construct
  source 1..20: mol_type = other DNA
aacagatcacgtgttcccat

SEQ ID NO: 190316 - DNA, 20 bp, synthetic construct
  source 1..20: mol_type = other DNA
aaacagatcacgtgttccca

SEQ ID NO: 190317 - DNA, 20 bp, synthetic construct
  source 1..20: mol_type = other DNA
aaaacagatcacgtgttccc

SEQ ID NO: 190318 - DNA, 20 bp, synthetic construct
  source 1..20: mol_type = other DNA
taaaacagatcacgtgttcc

SEQ ID NO: 190319 - DNA, 20 bp, synthetic construct
  source 1..20: mol_type = other DNA
gtaaaacagatcacgtgttc

SEQ ID NO: 190320 - DNA, 20 bp, synthetic construct
  source 1..20: mol_type = other DNA
tgtaaaacagatcacgtgtt

SEQ ID NO: 190321 - DNA, 20 bp, synthetic construct
  source 1..20: mol_type = other DNA
gtgtaaaacagatcacgtgt

SEQ ID NO: 190322 - DNA, 20 bp, synthetic construct
  source 1..20: mol_type = other DNA
tgtgtaaaacagatcacgtg

SEQ ID NO: 190323 - DNA, 20 bp, synthetic construct
  source 1..20: mol_type = other DNA
atgtgtaaaacagatcacgt

SEQ ID NO: 190324 - DNA, 20 bp, synthetic construct
  source 1..20: mol_type = other DNA
catgtgtaaaacagatcacg

SEQ ID NO: 190325 - DNA, 20 bp, synthetic construct
  source 1..20: mol_type = other DNA
gcatgtgtaaaacagatcac

SEQ ID NO: 190326 - DNA, 20 bp, synthetic construct
  source 1..20: mol_type = other DNA
cgcatgtgtaaaacagatca

SEQ ID NO: 190327 - DNA, 20 bp, synthetic construct
  source 1..20: mol_type = other DNA
acgcatgtgtaaaacagatc

SEQ ID NO: 190328 - DNA, 20 bp, synthetic construct
  source 1..20: mol_type = other DNA
gacgcatgtgtaaaacagat

SEQ ID NO: 190329 - DNA, 20 bp, synthetic construct
  source 1..20: mol_type = other DNA
ggacgcatgtgtaaaacaga

SEQ ID NO: 190330 - DNA, 20 bp, synthetic construct
  source 1..20: mol_type = other DNA
gggacgcatgtgtaaaacag

SEQ ID NO: 190331 - DNA, 20 bp, synthetic construct
  source 1..20: mol_type = other DNA
ggggacgcatgtgtaaaaca

SEQ ID NO: 190332 - DNA, 20 bp, synthetic construct
  source 1..20: mol_type = other DNA
aggggacgcatgtgtaaaac

SEQ ID NO: 190333 - DNA, 20 bp, synthetic construct
  source 1..20: mol_type = other DNA
gaggggacgcatgtgtaaaa

SEQ ID NO: 190334 - DNA, 20 bp, synthetic construct
  source 1..20: mol_type = other DNA
tgaggggacgcatgtgtaaa

SEQ ID NO: 190335 - DNA, 20 bp, synthetic construct
  source 1..20: mol_type = other DNA
ctgaggggacgcatgtgtaa

SEQ ID NO: 190336 - DNA, 20 bp, synthetic construct
  source 1..20: mol_type = other DNA
gctgaggggacgcatgtgta

SEQ ID NO: 190337 - DNA, 20 bp, synthetic construct
  source 1..20: mol_type = other DNA
tgctgaggggacgcatgtgt

SEQ ID NO: 190338 - DNA, 20 bp, synthetic construct
  source 1..20: mol_type = other DNA
ctgctgaggggacgcatgtg

SEQ ID NO: 190339 - DNA, 20 bp, synthetic construct
  source 1..20: mol_type = other DNA
gctgctgaggggacgcatgt

SEQ ID NO: 190340 - DNA, 20 bp, synthetic construct
  source 1..20: mol_type = other DNA
tgctgctgaggggacgcatg

SEQ ID NO: 190341 - DNA, 20 bp, synthetic construct
  source 1..20: mol_type = other DNA
ctgctgctgaggggacgcat

SEQ ID NO: 190342 - DNA, 20 bp, synthetic construct
  source 1..20: mol_type = other DNA
gctgctgctgaggggacgca

SEQ ID NO: 190343 - DNA, 20 bp, synthetic construct
  source 1..20: mol_type = other DNA
agctgctgctgaggggacgc

SEQ ID NO: 190344 - DNA, 20 bp, synthetic construct
  source 1..20: mol_type = other DNA
aagctgctgctgaggggacg

SEQ ID NO: 190345 - DNA, 20 bp, synthetic construct
  source 1..20: mol_type = other DNA
aaagctgctgctgaggggac

SEQ ID NO: 190346 - DNA, 20 bp, synthetic construct
  source 1..20: mol_type = other DNA
gaaagctgctgctgagggga

SEQ ID NO: 190347 - DNA, 20 bp, synthetic construct
  source 1..20: mol_type = other DNA
ggaaagctgctgctgagggg

SEQ ID NO: 190348 - DNA, 20 bp, synthetic construct
  source 1..20: mol_type = other DNA
tggaaagctgctgctgaggg

SEQ ID NO: 190349 - DNA, 20 bp, synthetic construct
  source 1..20: mol_type = other DNA
ctggaaagctgctgctgagg

SEQ ID NO: 190350 - DNA, 20 bp, synthetic construct
  source 1..20: mol_type = other DNA
tctggaaagctgctgctgag

SEQ ID NO: 190351 - DNA, 20 bp, synthetic construct
  source 1..20: mol_type = other DNA
ttctggaaagctgctgctga

SEQ ID NO: 190352 - DNA, 20 bp, synthetic construct
  source 1..20: mol_type = other DNA
gttctggaaagctgctgctg

SEQ ID NO: 190353 - DNA, 20 bp, synthetic construct
  source 1..20: mol_type = other DNA
tgttctggaaagctgctgct

SEQ ID NO: 190354 - DNA, 20 bp, synthetic construct
  source 1..20: mol_type = other DNA
atgttctggaaagctgctgc

SEQ ID NO: 190355 - DNA, 20 bp, synthetic construct
  source 1..20: mol_type = other DNA
aatgttctggaaagctgctg

SEQ ID NO: 190356 - DNA, 20 bp, synthetic construct
  source 1..20: mol_type = other DNA
gaatgttctggaaagctgct

SEQ ID NO: 190357 - DNA, 20 bp, synthetic construct
  source 1..20: mol_type = other DNA
ggaatgttctggaaagctgc

SEQ ID NO: 190358 - DNA, 20 bp, synthetic construct
  source 1..20: mol_type = other DNA
gggaatgttctggaaagctg

SEQ ID NO: 190359 - DNA, 20 bp, synthetic construct
  source 1..20: mol_type = other DNA
tgggaatgttctggaaagct

SEQ ID NO: 190360 - DNA, 20 bp, synthetic construct
  source 1..20: mol_type = other DNA
gtgggaatgttctggaaagc

SEQ ID NO: 190361 - DNA, 20 bp, synthetic construct
  source 1..20: mol_type = other DNA
agtgggaatgttctggaaag

SEQ ID NO: 190362 - DNA, 20 bp, synthetic construct
  source 1..20: mol_type = other DNA
aagtgggaatgttctggaaa

SEQ ID NO: 190363 - DNA, 20 bp, synthetic construct
  source 1..20: mol_type = other DNA
aaagtgggaatgttctggaa

SEQ ID NO: 190364 - DNA, 20 bp, synthetic construct
  source 1..20: mol_type = other DNA
gaaagtgggaatgttctgga

SEQ ID NO: 190365 - DNA, 20 bp, synthetic construct
  source 1..20: mol_type = other DNA
agaaagtgggaatgttctgg

SEQ ID NO: 190366 - DNA, 20 bp, synthetic construct
  source 1..20: mol_type = other DNA
aagaaagtgggaatgttctg

SEQ ID NO: 190367 - DNA, 20 bp, synthetic construct
  source 1..20: mol_type = other DNA
gaagaaagtgggaatgttct

SEQ ID NO: 190368 - DNA, 20 bp, synthetic construct
  source 1..20: mol_type = other DNA
agaagaaagtgggaatgttc

SEQ ID NO: 190369 - DNA, 20 bp, synthetic construct
  source 1..20: mol_type = other DNA
cagaagaaagtgggaatgtt

SEQ ID NO: 190370 - DNA, 20 bp, synthetic construct
  source 1..20: mol_type = other DNA
acagaagaaagtgggaatgt

SEQ ID NO: 190371 - DNA, 20 bp, synthetic construct
  source 1..20: mol_type = other DNA
tacagaagaaagtgggaatg

SEQ ID NO: 190372 - DNA, 20 bp, synthetic construct
  source 1..20: mol_type = other DNA
ctacagaagaaagtgggaat

SEQ ID NO: 190373 - DNA, 20 bp, synthetic construct
  source 1..20: mol_type = other DNA
actacagaagaaagtgggaa

SEQ ID NO: 190374 - DNA, 20 bp, synthetic construct
  source 1..20: mol_type = other DNA
cactacagaagaaagtggga

SEQ ID NO: 190375 - DNA, 20 bp, synthetic construct
  source 1..20: mol_type = other DNA
tcactacagaagaaagtggg

SEQ ID NO: 190376 - DNA, 20 bp, synthetic construct
  source 1..20: mol_type = other DNA
ctcactacagaagaaagtgg

SEQ ID NO: 190377 - DNA, 20 bp, synthetic construct
  source 1..20: mol_type = other DNA
tctcactacagaagaaagtg

SEQ ID NO: 190378 - DNA, 20 bp, synthetic construct
  source 1..20: mol_type = other DNA
ttctcactacagaagaaagt

SEQ ID NO: 190379 - DNA, 20 bp, synthetic construct
  source 1..20: mol_type = other DNA
cttctcactacagaagaaag

SEQ ID NO: 190380 - DNA, 20 bp, synthetic construct
  source 1..20: mol_type = other DNA
tcttctcactacagaagaaa

SEQ ID NO: 190381 - DNA, 20 bp, synthetic construct
  source 1..20: mol_type = other DNA
ttcttctcactacagaagaa

SEQ ID NO: 190382 - DNA, 20 bp, synthetic construct
  source 1..20: mol_type = other DNA
gttcttctcactacagaaga

SEQ ID NO: 190383 - DNA, 20 bp, synthetic construct
  source 1..20: mol_type = other DNA
agttcttctcactacagaag

SEQ ID NO: 190384 - DNA, 20 bp, synthetic construct
  source 1..20: mol_type = other DNA
gagttcttctcactacagaa

SEQ ID NO: 190385 - DNA, 20 bp, synthetic construct
  source 1..20: mol_type = other DNA
agagttcttctcactacaga

SEQ ID NO: 190386 - DNA, 20 bp, synthetic construct
  source 1..20: mol_type = other DNA
aagagttcttctcactacag

SEQ ID NO: 190387 - DNA, 20 bp, synthetic construct
  source 1..20: mol_type = other DNA
aaagagttcttctcactaca

SEQ ID NO: 190388 - DNA, 20 bp, synthetic construct
  source 1..20: mol_type = other DNA
gaaagagttcttctcactac

SEQ ID NO: 190389 - DNA, 20 bp, synthetic construct
  source 1..20: mol_type = other DNA
ggaaagagttcttctcacta

SEQ ID NO: 190390 - DNA, 20 bp, synthetic construct
  source 1..20: mol_type = other DNA
gggaaagagttcttctcact

SEQ ID NO: 190391 - DNA, 20 bp, synthetic construct
  source 1..20: mol_type = other DNA
agggaaagagttcttctcac

SEQ ID NO: 190392 - DNA, 20 bp, synthetic construct
  source 1..20: mol_type = other DNA
cagggaaagagttcttctca

SEQ ID NO: 190393 - DNA, 20 bp, synthetic construct
  source 1..20: mol_type = other DNA
gcagggaaagagttcttctc

SEQ ID NO: 190394 - DNA, 20 bp, synthetic construct
  source 1..20: mol_type = other DNA
tgcagggaaagagttcttct

SEQ ID NO: 190395 - DNA, 20 bp, synthetic construct
  source 1..20: mol_type = other DNA
ctgcagggaaagagttcttc

SEQ ID NO: 190396 - DNA, 20 bp, synthetic construct
  source 1..20: mol_type = other DNA
gctgcagggaaagagttctt

SEQ ID NO: 190397 - DNA, 20 bp, synthetic construct
  source 1..20: mol_type = other DNA
ggctgcagggaaagagttct

SEQ ID NO: 190398 - DNA, 20 bp, synthetic construct
  source 1..20: mol_type = other DNA
aggctgcagggaaagagttc

SEQ ID NO: 190399 - DNA, 20 bp, synthetic construct
  source 1..20: mol_type = other DNA
gaggctgcagggaaagagtt

SEQ ID NO: 190400 - DNA, 20 bp, synthetic construct
  source 1..20: mol_type = other DNA
ggaggctgcagggaaagagt

SEQ ID NO: 190401 - DNA, 20 bp, synthetic construct
  source 1..20: mol_type = other DNA
aggaggctgcagggaaagag

SEQ ID NO: 190402 - DNA, 20 bp, synthetic construct
  source 1..20: mol_type = other DNA
caggaggctgcagggaaaga

SEQ ID NO: 190403 - DNA, 20 bp, synthetic construct
  source 1..20: mol_type = other DNA
gcaggaggctgcagggaaag

SEQ ID NO: 190404 - DNA, 20 bp, synthetic construct
  source 1..20: mol_type = other DNA
ggcaggaggctgcagggaaa

SEQ ID NO: 190405 - DNA, 20 bp, synthetic construct
  source 1..20: mol_type = other DNA
gggcaggaggctgcagggaa

SEQ ID NO: 190406 - DNA, 20 bp, synthetic construct
  source 1..20: mol_type = other DNA
tgggcaggaggctgcaggga

SEQ ID NO: 190407 - DNA, 20 bp, synthetic construct
  source 1..20: mol_type = other DNA
ttgggcaggaggctgcaggg

SEQ ID NO: 190408 - DNA, 20 bp, synthetic construct
  source 1..20: mol_type = other DNA
gttgggcaggaggctgcagg

SEQ ID NO: 190409 - DNA, 20 bp, synthetic construct
  source 1..20: mol_type = other DNA
agttgggcaggaggctgcag

SEQ ID NO: 190410 - DNA, 20 bp, synthetic construct
  source 1..20: mol_type = other DNA
gagttgggcaggaggctgca

SEQ ID NO: 190411 - DNA, 20 bp, synthetic construct
  source 1..20: mol_type = other DNA
ggagttgggcaggaggctgc

SEQ ID NO: 190412 - DNA, 20 bp, synthetic construct
  source 1..20: mol_type = other DNA
aggagttgggcaggaggctg

SEQ ID NO: 190413 - DNA, 20 bp, synthetic construct
  source 1..20: mol_type = other DNA
gaggagttgggcaggaggct

SEQ ID NO: 190414 - DNA, 20 bp, synthetic construct
  source 1..20: mol_type = other DNA
ggaggagttgggcaggaggc

SEQ ID NO: 190415 - DNA, 20 bp, synthetic construct
  source 1..20: mol_type = other DNA
aggaggagttgggcaggagg

SEQ ID NO: 190416 - DNA, 20 bp, synthetic construct
  source 1..20: mol_type = other DNA
aaggaggagttgggcaggag

SEQ ID NO: 190417 - DNA, 20 bp, synthetic construct
  source 1..20: mol_type = other DNA
gaaggaggagttgggcagga

SEQ ID NO: 190418 - DNA, 20 bp, synthetic construct
  source 1..20: mol_type = other DNA
tgaaggaggagttgggcagg

SEQ ID NO: 190419 - DNA, 20 bp, synthetic construct
  source 1..20: mol_type = other DNA
ctgaaggaggagttgggcag

SEQ ID NO: 190420 - DNA, 20 bp, synthetic construct
  source 1..20: mol_type = other DNA
actgaaggaggagttgggca

SEQ ID NO: 190421 - DNA, 20 bp, synthetic construct
  source 1..20: mol_type = other DNA
cactgaaggaggagttgggc

SEQ ID NO: 190422 - DNA, 20 bp, synthetic construct
  source 1..20: mol_type = other DNA
acactgaaggaggagttggg

SEQ ID NO: 190423 - DNA, 20 bp, synthetic construct
  source 1..20: mol_type = other DNA
gacactgaaggaggagttgg

SEQ ID NO: 190424 - DNA, 20 bp, synthetic construct
  source 1..20: mol_type = other DNA
agacactgaaggaggagttg

SEQ ID NO: 190425 - DNA, 20 bp, synthetic construct
  source 1..20: mol_type = other DNA
aagacactgaaggaggagtt

SEQ ID NO: 190426 - DNA, 20 bp, synthetic construct
  source 1..20: mol_type = other DNA
aaagacactgaaggaggagt

SEQ ID NO: 190427 - DNA, 20 bp, synthetic construct
  source 1..20: mol_type = other DNA
caaagacactgaaggaggag

SEQ ID NO: 190428 - DNA, 20 bp, synthetic construct
  source 1..20: mol_type = other DNA
gcaaagacactgaaggagga

SEQ ID NO: 190429 - DNA, 20 bp, synthetic construct
  source 1..20: mol_type = other DNA
agcaaagacactgaaggagg

SEQ ID NO: 190430 - DNA, 20 bp, synthetic construct
  source 1..20: mol_type = other DNA
aagcaaagacactgaaggag

SEQ ID NO: 190431 - DNA, 20 bp, synthetic construct
  source 1..20: mol_type = other DNA
gaagcaaagacactgaagga

SEQ ID NO: 190432 - DNA, 20 bp, synthetic construct
  source 1..20: mol_type = other DNA
tgaagcaaagacactgaagg

SEQ ID NO: 190433 - DNA, 20 bp, synthetic construct
  source 1..20: mol_type = other DNA
ctgaagcaaagacactgaag

SEQ ID NO: 190434 - DNA, 20 bp, synthetic construct
  source 1..20: mol_type = other DNA
actgaagcaaagacactgaa

SEQ ID NO: 190435 - DNA, 20 bp, synthetic construct
  source 1..20: mol_type = other DNA
cactgaagcaaagacactga

SEQ ID NO: 190436 - DNA, 20 bp, synthetic construct
  source 1..20: mol_type = other DNA
acactgaagcaaagacactg

SEQ ID NO: 190437 - DNA, 20 bp, synthetic construct
  source 1..20: mol_type = other DNA
gacactgaagcaaagacact

SEQ ID NO: 190438 - DNA, 20 bp, synthetic construct
  source 1..20: mol_type = other DNA
agacactgaagcaaagacac

SEQ ID NO: 190439 - DNA, 20 bp, synthetic construct
  source 1..20: mol_type = other DNA
aagacactgaagcaaagaca

SEQ ID NO: 190440 - DNA, 20 bp, synthetic construct
  source 1..20: mol_type = other DNA
aaagacactgaagcaaagac

SEQ ID NO: 190441 - DNA, 20 bp, synthetic construct
  source 1..20: mol_type = other DNA
caaagacactgaagcaaaga

SEQ ID NO: 190442 - DNA, 20 bp, synthetic construct
  source 1..20: mol_type = other DNA
tcaaagacactgaagcaaag

SEQ ID NO: 190443 - DNA, 20 bp, synthetic construct
  source 1..20: mol_type = other DNA
atcaaagacactgaagcaaa

SEQ ID NO: 190444 - DNA, 20 bp, synthetic construct
  source 1..20: mol_type = other DNA
tatcaaagacactgaagcaa

SEQ ID NO: 190445 - DNA, 20 bp, synthetic construct
  source 1..20: mol_type = other DNA
ttatcaaagacactgaagca

SEQ ID NO: 190446 - DNA, 20 bp, synthetic construct
  source 1..20: mol_type = other DNA
tttatcaaagacactgaagc

SEQ ID NO: 190447 - DNA, 20 bp, synthetic construct
  source 1..20: mol_type = other DNA
gtttatcaaagacactgaag

SEQ ID NO: 190448 - DNA, 20 bp, synthetic construct
  source 1..20: mol_type = other DNA
ggtttatcaaagacactgaa

SEQ ID NO: 190449 - DNA, 20 bp, synthetic construct
  source 1..20: mol_type = other DNA
tggtttatcaaagacactga

SEQ ID NO: 190450 - DNA, 20 bp, synthetic construct
  source 1..20: mol_type = other DNA
atggtttatcaaagacactg

SEQ ID NO: 190451 - DNA, 20 bp, synthetic construct
  source 1..20: mol_type = other DNA
aatggtttatcaaagacact

SEQ ID NO: 190452 - DNA, 20 bp, synthetic construct
  source 1..20: mol_type = other DNA
gaatggtttatcaaagacac

SEQ ID NO: 190453 - DNA, 20 bp, synthetic construct
  source 1..20: mol_type = other DNA
agaatggtttatcaaagaca

SEQ ID NO: 190454 - DNA, 20 bp, synthetic construct
  source 1..20: mol_type = other DNA
cagaatggtttatcaaagac

SEQ ID NO: 190455 - DNA, 20 bp, synthetic construct
  source 1..20: mol_type = other DNA
gcagaatggtttatcaaaga

SEQ ID NO: 190456 - DNA, 20 bp, synthetic construct
  source 1..20: mol_type = other DNA
agcagaatggtttatcaaag

SEQ ID NO: 190457 - DNA, 20 bp, synthetic construct
  source 1..20: mol_type = other DNA
aagcagaatggtttatcaaa

SEQ ID NO: 190458 - DNA, 20 bp, synthetic construct
  source 1..20: mol_type = other DNA
aaagcagaatggtttatcaa

SEQ ID NO: 190459 - DNA, 20 bp, synthetic construct
  source 1..20: mol_type = other DNA
caaagcagaatggtttatca

SEQ ID NO: 190460 - DNA, 20 bp, synthetic construct
  source 1..20: mol_type = other DNA
gcaaagcagaatggtttatc

SEQ ID NO: 190461 - DNA, 20 bp, synthetic construct
  source 1..20: mol_type = other DNA
tgcaaagcagaatggtttat

SEQ ID NO: 190462 - DNA, 20 bp, synthetic construct
  source 1..20: mol_type = other DNA
ctgcaaagcagaatggttta

SEQ ID NO: 190463 - DNA, 20 bp, synthetic construct
  source 1..20: mol_type = other DNA
tctgcaaagcagaatggttt

SEQ ID NO: 190464 - DNA, 20 bp, synthetic construct
  source 1..20: mol_type = other DNA
ctctgcaaagcagaatggtt

SEQ ID NO: 190465 - DNA, 20 bp, synthetic construct
  source 1..20: mol_type = other DNA
actctgcaaagcagaatggt

SEQ ID NO: 190466 - DNA, 20 bp, synthetic construct
  source 1..20: mol_type = other DNA
cactctgcaaagcagaatgg

SEQ ID NO: 190467 - DNA, 20 bp, synthetic construct
  source 1..20: mol_type = other DNA
gcactctgcaaagcagaatg

SEQ ID NO: 190468 - DNA, 20 bp, synthetic construct
  source 1..20: mol_type = other DNA
cgcactctgcaaagcagaat

SEQ ID NO: 190469 - DNA, 20 bp, synthetic construct
  source 1..20: mol_type = other DNA
tcgcactctgcaaagcagaa

SEQ ID NO: 190470 - DNA, 20 bp, synthetic construct
  source 1..20: mol_type = other DNA
ctcgcactctgcaaagcaga

SEQ ID NO: 190471 - DNA, 20 bp, synthetic construct
  source 1..20: mol_type = other DNA
gctcgcactctgcaaagcag

SEQ ID NO: 190472 - DNA, 20 bp, synthetic construct
  source 1..20: mol_type = other DNA
agctcgcactctgcaaagca

SEQ ID NO: 190473 - DNA, 20 bp, synthetic construct
  source 1..20: mol_type = other DNA
gagctcgcactctgcaaagc

SEQ ID NO: 190474 - DNA, 20 bp, synthetic construct
  source 1..20: mol_type = other DNA
agagctcgcactctgcaaag

SEQ ID NO: 190475 - DNA, 20 bp, synthetic construct
  source 1..20: mol_type = other DNA
cagagctcgcactctgcaaa

SEQ ID NO: 190476 - DNA, 20 bp, synthetic construct
  source 1..20: mol_type = other DNA
gcagagctcgcactctgcaa

SEQ ID NO: 190477 - DNA, 20 bp, synthetic construct
  source 1..20: mol_type = other DNA
ggcagagctcgcactctgca

SEQ ID NO: 190478 - DNA, 20 bp, synthetic construct
  source 1..20: mol_type = other DNA
aggcagagctcgcactctgc

SEQ ID NO: 190479 - DNA, 20 bp, synthetic construct
  source 1..20: mol_type = other DNA
aaggcagagctcgcactctg

SEQ ID NO: 190480 - DNA, 20 bp, synthetic construct
  source 1..20: mol_type = other DNA
caaggcagagctcgcactct

SEQ ID NO: 190481 - DNA, 20 bp, synthetic construct
  source 1..20: mol_type = other DNA
gcaaggcagagctcgcactc

SEQ ID NO: 190482 - DNA, 20 bp, synthetic construct
  source 1..20: mol_type = other DNA
tgcaaggcagagctcgcact

SEQ ID NO: 190483 - DNA, 20 bp, synthetic construct
  source 1..20: mol_type = other DNA
ctgcaaggcagagctcgcac

SEQ ID NO: 190484 - DNA, 20 bp, synthetic construct
  source 1..20: mol_type = other DNA
cctgcaaggcagagctcgca

SEQ ID NO: 190485 - DNA, 20 bp, synthetic construct
  source 1..20: mol_type = other DNA
ccctgcaaggcagagctcgc

SEQ ID NO: 190486 - DNA, 20 bp, synthetic construct
  source 1..20: mol_type = other DNA
accctgcaaggcagagctcg

SEQ ID NO: 190487 - DNA, 20 bp, synthetic construct
  source 1..20: mol_type = other DNA
aaccctgcaaggcagagctc

SEQ ID NO: 190488 - DNA, 20 bp, synthetic construct
  source 1..20: mol_type = other DNA
gaaccctgcaaggcagagct

SEQ ID NO: 190489 - DNA, 20 bp, synthetic construct
  source 1..20: mol_type = other DNA
cgaaccctgcaaggcagagc

SEQ ID NO: 190490 - DNA, 20 bp, synthetic construct
  source 1..20: mol_type = other DNA
gcgaaccctgcaaggcagag

SEQ ID NO: 190491 - DNA, 20 bp, synthetic construct
  source 1..20: mol_type = other DNA
tgcgaaccctgcaaggcaga

SEQ ID NO: 190492 - DNA, 20 bp, synthetic construct
  source 1..20: mol_type = other DNA
atgcgaaccctgcaaggcag

SEQ ID NO: 190493 - DNA, 20 bp, synthetic construct
  source 1..20: mol_type = other DNA
gatgcgaaccctgcaaggca

SEQ ID NO: 190494 - DNA, 20 bp, synthetic construct
  source 1..20: mol_type = other DNA
agatgcgaaccctgcaaggc

SEQ ID NO: 190495 - DNA, 20 bp, synthetic construct
  source 1..20: mol_type = other DNA
cagatgcgaaccctgcaagg

SEQ ID NO: 190496 - DNA, 20 bp, synthetic construct
  source 1..20: mol_type = other DNA
gcagatgcgaaccctgcaag

SEQ ID NO: 190497 - DNA, 20 bp, synthetic construct
  source 1..20: mol_type = other DNA
ggcagatgcgaaccctgcaa

SEQ ID NO: 190498 - DNA, 20 bp, synthetic construct
  source 1..20: mol_type = other DNA
aggcagatgcgaaccctgca

SEQ ID NO: 190499 - DNA, 20 bp, synthetic construct
  source 1..20: mol_type = other DNA
caggcagatgcgaaccctgc

SEQ ID NO: 190500 - DNA, 20 bp, synthetic construct
  source 1..20: mol_type = other DNA
acaggcagatgcgaaccctg

SEQ ID NO: 190501 - DNA, 20 bp, synthetic construct
  source 1..20: mol_type = other DNA
cacaggcagatgcgaaccct

SEQ ID NO: 190502 - DNA, 20 bp, synthetic construct
  source 1..20: mol_type = other DNA
gcacaggcagatgcgaaccc

SEQ ID NO: 190503 - DNA, 20 bp, synthetic construct
  source 1..20: mol_type = other DNA
agcacaggcagatgcgaacc

SEQ ID NO: 190504 - DNA, 20 bp, synthetic construct
  source 1..20: mol_type = other DNA
cagcacaggcagatgcgaac

SEQ ID NO: 190505 - DNA, 20 bp, synthetic construct
  source 1..20: mol_type = other DNA
tcagcacaggcagatgcgaa

SEQ ID NO: 190506 - DNA, 20 bp, synthetic construct
  source 1..20: mol_type = other DNA
ctcagcacaggcagatgcga

SEQ ID NO: 190507 - DNA, 20 bp, synthetic construct
  source 1..20: mol_type = other DNA
actcagcacaggcagatgcg

SEQ ID NO: 190508 - DNA, 20 bp, synthetic construct
  source 1..20: mol_type = other DNA
tactcagcacaggcagatgc

SEQ ID NO: 190509 - DNA, 20 bp, synthetic construct
  source 1..20: mol_type = other DNA
ttactcagcacaggcagatg

SEQ ID NO: 190510 - DNA, 20 bp, synthetic construct
  source 1..20: mol_type = other DNA
gttactcagcacaggcagat

SEQ ID NO: 190511 - DNA, 20 bp, synthetic construct
  source 1..20: mol_type = other DNA
ggttactcagcacaggcaga

SEQ ID NO: 190512 - DNA, 20 bp, synthetic construct
  source 1..20: mol_type = other DNA
tggttactcagcacaggcag

SEQ ID NO: 190513 - DNA, 20 bp, synthetic construct
  source 1..20: mol_type = other DNA
ttggttactcagcacaggca

SEQ ID NO: 190514 - DNA, 20 bp, synthetic construct
  source 1..20: mol_type = other DNA
gttggttactcagcacaggc

SEQ ID NO: 190515 - DNA, 20 bp, synthetic construct
  source 1..20: mol_type = other DNA
cgttggttactcagcacagg

SEQ ID NO: 190516 - DNA, 20 bp, synthetic construct
  source 1..20: mol_type = other DNA
gcgttggttactcagcacag

SEQ ID NO: 190517 - DNA, 20 bp, synthetic construct
  source 1..20: mol_type = other DNA
agcgttggttactcagcaca

SEQ ID NO: 190518 - DNA, 20 bp, synthetic construct
  source 1..20: mol_type = other DNA
tagcgttggttactcagcac

SEQ ID NO: 190519 - DNA, 20 bp, synthetic construct
  source 1..20: mol_type = other DNA
ttagcgttggttactcagca

SEQ ID NO: 190520 - DNA, 20 bp, synthetic construct
  source 1..20: mol_type = other DNA
cttagcgttggttactcagc

SEQ ID NO: 190521 - DNA, 20 bp, synthetic construct
  source 1..20: mol_type = other DNA
ccttagcgttggttactcag

SEQ ID NO: 190522 - DNA, 20 bp, synthetic construct
  source 1..20: mol_type = other DNA
accttagcgttggttactca

SEQ ID NO: 190523 - DNA, 20 bp, synthetic construct
  source 1..20: mol_type = other DNA
gaccttagcgttggttactc

SEQ ID NO: 190524 - DNA, 20 bp, synthetic construct
  source 1..20: mol_type = other DNA
cgaccttagcgttggttact

SEQ ID NO: 190525 - DNA, 20 bp, synthetic construct
  source 1..20: mol_type = other DNA
tcgaccttagcgttggttac

SEQ ID NO: 190526 - DNA, 20 bp, synthetic construct
  source 1..20: mol_type = other DNA
ctcgaccttagcgttggtta

SEQ ID NO: 190527 - DNA, 20 bp, synthetic construct
  source 1..20: mol_type = other DNA
actcgaccttagcgttggtt

SEQ ID NO: 190528 - DNA, 20 bp, synthetic construct
  source 1..20: mol_type = other DNA
cactcgaccttagcgttggt

SEQ ID NO: 190529 - DNA, 20 bp, synthetic construct
  source 1..20: mol_type = other DNA
ccactcgaccttagcgttgg

SEQ ID NO: 190530 - DNA, 20 bp, synthetic construct
  source 1..20: mol_type = other DNA
accactcgaccttagcgttg

SEQ ID NO: 190531 - DNA, 20 bp, synthetic construct
  source 1..20: mol_type = other DNA
gaccactcgaccttagcgtt

SEQ ID NO: 190532 - DNA, 20 bp, synthetic construct
  source 1..20: mol_type = other DNA
cgaccactcgaccttagcgt

SEQ ID NO: 190533 - DNA, 20 bp, synthetic construct
  source 1..20: mol_type = other DNA
ccgaccactcgaccttagcg

SEQ ID NO: 190534 - DNA, 20 bp, synthetic construct
  source 1..20: mol_type = other DNA
accgaccactcgaccttagc

SEQ ID NO: 190535 - DNA, 20 bp, synthetic construct
  source 1..20: mol_type = other DNA
gaccgaccactcgaccttag

SEQ ID NO: 190536 - DNA, 20 bp, synthetic construct
  source 1..20: mol_type = other DNA
tgaccgaccactcgacctta

SEQ ID NO: 190537 - DNA, 20 bp, synthetic construct
  source 1..20: mol_type = other DNA
gtgaccgaccactcgacctt

SEQ ID NO: 190538 - DNA, 20 bp, synthetic construct
  source 1..20: mol_type = other DNA
ggtgaccgaccactcgacct

SEQ ID NO: 190539 - DNA, 20 bp, synthetic construct
  source 1..20: mol_type = other DNA
aggtgaccgaccactcgacc

SEQ ID NO: 190540 - DNA, 20 bp, synthetic construct
  source 1..20: mol_type = other DNA
gaggtgaccgaccactcgac

SEQ ID NO: 190541 - DNA, 20 bp, synthetic construct
  source 1..20: mol_type = other DNA
agaggtgaccgaccactcga

SEQ ID NO: 190542 - DNA, 20 bp, synthetic construct
  source 1..20: mol_type = other DNA
gagaggtgaccgaccactcg

SEQ ID NO: 190543 - DNA, 20 bp, synthetic construct
  source 1..20: mol_type = other DNA
tgagaggtgaccgaccactc

SEQ ID NO: 190544 - DNA, 20 bp, synthetic construct
  source 1..20: mol_type = other DNA
atgagaggtgaccgaccact

SEQ ID NO: 190545 - DNA, 20 bp, synthetic construct
  source 1..20: mol_type = other DNA
tatgagaggtgaccgaccac

SEQ ID NO: 190546 - DNA, 20 bp, synthetic construct
  source 1..20: mol_type = other DNA
ttatgagaggtgaccgacca

SEQ ID NO: 190547 - DNA, 20 bp, synthetic construct
  source 1..20: mol_type = other DNA
cttatgagaggtgaccgacc

SEQ ID NO: 190548 - DNA, 20 bp, synthetic construct
  source 1..20: mol_type = other DNA
tcttatgagaggtgaccgac

SEQ ID NO: 190549 - DNA, 20 bp, synthetic construct
  source 1..20: mol_type = other DNA
ctcttatgagaggtgaccga

SEQ ID NO: 190550 - DNA, 20 bp, synthetic construct
  source 1..20: mol_type = other DNA
gctcttatgagaggtgaccg

SEQ ID NO: 190551 - DNA, 20 bp, synthetic construct
  source 1..20: mol_type = other DNA
agctcttatgagaggtgacc

SEQ ID NO: 190552 - DNA, 20 bp, synthetic construct
  source 1..20: mol_type = other DNA
tagctcttatgagaggtgac

SEQ ID NO: 190553 - DNA, 20 bp, synthetic construct
  source 1..20: mol_type = other DNA
ctagctcttatgagaggtga

SEQ ID NO: 190554 - DNA, 20 bp, synthetic construct
  source 1..20: mol_type = other DNA
cctagctcttatgagaggtg

SEQ ID NO: 190555 - DNA, 20 bp, synthetic construct
  source 1..20: mol_type = other DNA
ccctagctcttatgagaggt

SEQ ID NO: 190556 - DNA, 20 bp, synthetic construct
  source 1..20: mol_type = other DNA
accctagctcttatgagagg

SEQ ID NO: 190557 - DNA, 20 bp, synthetic construct
  source 1..20: mol_type = other DNA
aaccctagctcttatgagag

SEQ ID NO: 190558 - DNA, 20 bp, synthetic construct
  source 1..20: mol_type = other DNA
caaccctagctcttatgaga

SEQ ID NO: 190559 - DNA, 20 bp, synthetic construct
  source 1..20: mol_type = other DNA
acaaccctagctcttatgag

SEQ ID NO: 190560 - DNA, 20 bp, synthetic construct
  source 1..20: mol_type = other DNA
gacaaccctagctcttatga

SEQ ID NO: 190561 - DNA, 20 bp, synthetic construct
  source 1..20: mol_type = other DNA
agacaaccctagctcttatg

SEQ ID NO: 190562 - DNA, 20 bp, synthetic construct
  source 1..20: mol_type = other DNA
gagacaaccctagctcttat

SEQ ID NO: 190563 - DNA, 20 bp, synthetic construct
  source 1..20: mol_type = other DNA
tgagacaaccctagctctta

SEQ ID NO: 190564 - DNA, 20 bp, synthetic construct
  source 1..20: mol_type = other DNA
atgagacaaccctagctctt

SEQ ID NO: 190565 - DNA, 20 bp, synthetic construct
  source 1..20: mol_type = other DNA
catgagacaaccctagctct

SEQ ID NO: 190566 - DNA, 20 bp, synthetic construct
  source 1..20: mol_type = other DNA
gcatgagacaaccctagctc

SEQ ID NO: 190567 - DNA, 20 bp, synthetic construct
  source 1..20: mol_type = other DNA
agcatgagacaaccctagct

SEQ ID NO: 190568 - DNA, 20 bp, synthetic construct
  source 1..20: mol_type = other DNA
cagcatgagacaaccctagc

SEQ ID NO: 190569 - DNA, 20 bp, synthetic construct
  source 1..20: mol_type = other DNA
tcagcatgagacaaccctag

SEQ ID NO: 190570 - DNA, 20 bp, synthetic construct
  source 1..20: mol_type = other DNA
atcagcatgagacaacccta

SEQ ID NO: 190571 - DNA, 20 bp, synthetic construct
  source 1..20: mol_type = other DNA
catcagcatgagacaaccct

SEQ ID NO: 190572 - DNA, 20 bp, synthetic construct
  source 1..20: mol_type = other DNA
tcatcagcatgagacaaccc

SEQ ID NO: 190573 - DNA, 20 bp, synthetic construct
  source 1..20: mol_type = other DNA
gtcatcagcatgagacaacc

SEQ ID NO: 190574 - DNA, 20 bp, synthetic construct
  source 1..20: mol_type = other DNA
agtcatcagcatgagacaac

SEQ ID NO: 190575 - DNA, 20 bp, synthetic construct
  source 1..20: mol_type = other DNA
tagtcatcagcatgagacaa

SEQ ID NO: 190576 - DNA, 20 bp, synthetic construct
  source 1..20: mol_type = other DNA
ctagtcatcagcatgagaca

SEQ ID NO: 190577 - DNA, 20 bp, synthetic construct
  source 1..20: mol_type = other DNA
cctagtcatcagcatgagac

SEQ ID NO: 190578 - DNA, 20 bp, synthetic construct
  source 1..20: mol_type = other DNA
tcctagtcatcagcatgaga

SEQ ID NO: 190579 - DNA, 20 bp, synthetic construct
  source 1..20: mol_type = other DNA
gtcctagtcatcagcatgag

SEQ ID NO: 190580 - DNA, 20 bp, synthetic construct
  source 1..20: mol_type = other DNA
agtcctagtcatcagcatga

SEQ ID NO: 190581 - DNA, 20 bp, synthetic construct
  source 1..20: mol_type = other DNA
aagtcctagtcatcagcatg

SEQ ID NO: 190582 - DNA, 20 bp, synthetic construct
  source 1..20: mol_type = other DNA
caagtcctagtcatcagcat

SEQ ID NO: 190583 - DNA, 20 bp, synthetic construct
  source 1..20: mol_type = other DNA
gcaagtcctagtcatcagca

SEQ ID NO: 190584 - DNA, 20 bp, synthetic construct
  source 1..20: mol_type = other DNA
ggcaagtcctagtcatcagc

SEQ ID NO: 190585 - DNA, 20 bp, synthetic construct
  source 1..20: mol_type = other DNA
gggcaagtcctagtcatcag

SEQ ID NO: 190586 - DNA, 20 bp, synthetic construct
  source 1..20: mol_type = other DNA
agggcaagtcctagtcatca

SEQ ID NO: 190587 - DNA, 20 bp, synthetic construct
  source 1..20: mol_type = other DNA
gagggcaagtcctagtcatc

SEQ ID NO: 190588 - DNA, 20 bp, synthetic construct
  source 1..20: mol_type = other DNA
tgagggcaagtcctagtcat

SEQ ID NO: 190589 - DNA, 20 bp, synthetic construct
  source 1..20: mol_type = other DNA
ttgagggcaagtcctagtca

SEQ ID NO: 190590 - DNA, 20 bp, synthetic construct
  source 1..20: mol_type = other DNA
cttgagggcaagtcctagtc

SEQ ID NO: 190591 - DNA, 20 bp, synthetic construct
  source 1..20: mol_type = other DNA
ccttgagggcaagtcctagt

SEQ ID NO: 190592 - DNA, 20 bp, synthetic construct
  source 1..20: mol_type = other DNA
tccttgagggcaagtcctag

SEQ ID NO: 190593 - DNA, 20 bp, synthetic construct
  source 1..20: mol_type = other DNA
ctccttgagggcaagtccta

SEQ ID NO: 190594 - DNA, 20 bp, synthetic construct
  source 1..20: mol_type = other DNA
tctccttgagggcaagtcct

SEQ ID NO: 190595 - DNA, 20 bp, synthetic construct
  source 1..20: mol_type = other DNA
ttctccttgagggcaagtcc

SEQ ID NO: 190596 - DNA, 20 bp, synthetic construct
  source 1..20: mol_type = other DNA
tttctccttgagggcaagtc

SEQ ID NO: 190597 - DNA, 20 bp, synthetic construct
  source 1..20: mol_type = other DNA
ttttctccttgagggcaagt

SEQ ID NO: 190598 - DNA, 20 bp, synthetic construct
  source 1..20: mol_type = other DNA
tttttctccttgagggcaag

SEQ ID NO: 190599 - DNA, 20 bp, synthetic construct
  source 1..20: mol_type = other DNA
atttttctccttgagggcaa

SEQ ID NO: 190600 - DNA, 20 bp, synthetic construct
  source 1..20: mol_type = other DNA
tatttttctccttgagggca

SEQ ID NO: 190601 - DNA, 20 bp, synthetic construct
  source 1..20: mol_type = other DNA
ttatttttctccttgagggc

SEQ ID NO: 190602 - DNA, 20 bp, synthetic construct
  source 1..20: mol_type = other DNA
tttatttttctccttgaggg

SEQ ID NO: 190603 - DNA, 20 bp, synthetic construct
  source 1..20: mol_type = other DNA
atttatttttctccttgagg

SEQ ID NO: 190604 - DNA, 20 bp, synthetic construct
  source 1..20: mol_type = other DNA
gatttatttttctccttgag

SEQ ID NO: 190605 - DNA, 20 bp, synthetic construct
  source 1..20: mol_type = other DNA
tgatttatttttctccttga

SEQ ID NO: 190606 - DNA, 20 bp, synthetic construct
  source 1..20: mol_type = other DNA
ttgatttatttttctccttg

SEQ ID NO: 190607 - DNA, 20 bp, synthetic construct
  source 1..20: mol_type = other DNA
tttgatttatttttctcctt

SEQ ID NO: 190608 - DNA, 20 bp, synthetic construct
  source 1..20: mol_type = other DNA
ttttgatttatttttctcct

SEQ ID NO: 190609 - DNA, 20 bp, synthetic construct
  source 1..20: mol_type = other DNA
gttttgatttatttttctcc

SEQ ID NO: 190610 - DNA, 20 bp, synthetic construct
  source 1..20: mol_type = other DNA
tgttttgatttatttttctc

SEQ ID NO: 190611 - DNA, 20 bp, synthetic construct
  source 1..20: mol_type = other DNA
ttgttttgatttatttttct

SEQ ID NO: 190612 - DNA, 20 bp, synthetic construct
  source 1..20: mol_type = other DNA
tttgttttgatttatttttc

SEQ ID NO: 190613 - DNA, 20 bp, synthetic construct
  source 1..20: mol_type = other DNA
ttttgttttgatttattttt

SEQ ID NO: 190614 - DNA, 20 bp, synthetic construct
  source 1..20: mol_type = other DNA
cttttgttttgatttatttt

SEQ ID NO: 190615 - DNA, 20 bp, synthetic construct
  source 1..20: mol_type = other DNA
gcttttgttttgatttattt

SEQ ID NO: 190616 - DNA, 20 bp, synthetic construct
  source 1..20: mol_type = other DNA
tgcttttgttttgatttatt

SEQ ID NO: 190617 - DNA, 20 bp, synthetic construct
  source 1..20: mol_type = other DNA
ttgcttttgttttgatttat

SEQ ID NO: 190618 - DNA, 20 bp, synthetic construct
  source 1..20: mol_type = other DNA
tttgcttttgttttgattta

SEQ ID NO: 190619 - DNA, 20 bp, synthetic construct
  source 1..20: mol_type = other DNA
ttttgcttttgttttgattt

SEQ ID NO: 190620 - DNA, 20 bp, synthetic construct
  source 1..20: mol_type = other DNA
tttttgcttttgttttgatt

SEQ ID NO: 190621 - DNA, 20 bp, synthetic construct
  source 1..20: mol_type = other DNA
gtttttgcttttgttttgat

SEQ ID NO: 190622 - DNA, 20 bp, synthetic construct
  source 1..20: mol_type = other DNA
tgtttttgcttttgttttga

SEQ ID NO: 190623 - DNA, 20 bp, synthetic construct
  source 1..20: mol_type = other DNA
ctgtttttgcttttgttttg

SEQ ID NO: 190624 - DNA, 20 bp, synthetic construct
  source 1..20: mol_type = other DNA
gctgtttttgcttttgtttt

SEQ ID NO: 190625 - DNA, 20 bp, synthetic construct
  source 1..20: mol_type = other DNA
tgctgtttttgcttttgttt

SEQ ID NO: 190626 - DNA, 20 bp, synthetic construct
  source 1..20: mol_type = other DNA
ttgctgtttttgcttttgtt

SEQ ID NO: 190627 - DNA, 20 bp, synthetic construct
  source 1..20: mol_type = other DNA
tttgctgtttttgcttttgt

SEQ ID NO: 190628 - DNA, 20 bp, synthetic construct
  source 1..20: mol_type = other DNA
gtttgctgtttttgcttttg

SEQ ID NO: 190629 - DNA, 20 bp, synthetic construct
  source 1..20: mol_type = other DNA
tgtttgctgtttttgctttt

SEQ ID NO: 190630 - DNA, 20 bp, synthetic construct
  source 1..20: mol_type = other DNA
atgtttgctgtttttgcttt

SEQ ID NO: 190631 - DNA, 20 bp, synthetic construct
  source 1..20: mol_type = other DNA
catgtttgctgtttttgctt

SEQ ID NO: 190632 - DNA, 20 bp, synthetic construct
  source 1..20: mol_type = other DNA
gcatgtttgctgtttttgct

SEQ ID NO: 190633 - DNA, 20 bp, synthetic construct
  source 1..20: mol_type = other DNA
tgcatgtttgctgtttttgc

SEQ ID NO: 190634 - DNA, 20 bp, synthetic construct
  source 1..20: mol_type = other DNA
atgcatgtttgctgtttttg

SEQ ID NO: 190635 - DNA, 20 bp, synthetic construct
  source 1..20: mol_type = other DNA
gatgcatgtttgctgttttt

SEQ ID NO: 190636 - DNA, 20 bp, synthetic construct
  source 1..20: mol_type = other DNA
agatgcatgtttgctgtttt

SEQ ID NO: 190637 - DNA, 20 bp, synthetic construct
  source 1..20: mol_type = other DNA
gagatgcatgtttgctgttt

SEQ ID NO: 190638 - DNA, 20 bp, synthetic construct
  source 1..20: mol_type = other DNA
agagatgcatgtttgctgtt

SEQ ID NO: 190639 - DNA, 20 bp, synthetic construct
  source 1..20: mol_type = other DNA
aagagatgcatgtttgctgt

SEQ ID NO: 190640 - DNA, 20 bp, synthetic construct
  source 1..20: mol_type = other DNA
taagagatgcatgtttgctg

SEQ ID NO: 190641 - DNA, 20 bp, synthetic construct
  source 1..20: mol_type = other DNA
ttaagagatgcatgtttgct

SEQ ID NO: 190642 - DNA, 20 bp, synthetic construct
  source 1..20: mol_type = other DNA
tttaagagatgcatgtttgc

SEQ ID NO: 190643 - DNA, 20 bp, synthetic construct
  source 1..20: mol_type = other DNA
ctttaagagatgcatgtttg

SEQ ID NO: 190644 - DNA, 20 bp, synthetic construct
  source 1..20: mol_type = other DNA
tctttaagagatgcatgttt

SEQ ID NO: 190645 - DNA, 20 bp, synthetic construct
  source 1..20: mol_type = other DNA
ttctttaagagatgcatgtt

SEQ ID NO: 190646 - DNA, 20 bp, synthetic construct
  source 1..20: mol_type = other DNA
cttctttaagagatgcatgt

SEQ ID NO: 190647 - DNA, 20 bp, synthetic construct
  source 1..20: mol_type = other DNA
ccttctttaagagatgcatg

SEQ ID NO: 190648 - DNA, 20 bp, synthetic construct
  source 1..20: mol_type = other DNA
gccttctttaagagatgcat

SEQ ID NO: 190649 - DNA, 20 bp, synthetic construct
  source 1..20: mol_type = other DNA
agccttctttaagagatgca

SEQ ID NO: 190650 - DNA, 20 bp, synthetic construct
  source 1..20: mol_type = other DNA
gagccttctttaagagatgc

SEQ ID NO: 190651 - DNA, 20 bp, synthetic construct
  source 1..20: mol_type = other DNA
agagccttctttaagagatg

SEQ ID NO: 190652 - DNA, 20 bp, synthetic construct
  source 1..20: mol_type = other DNA
cagagccttctttaagagat

SEQ ID NO: 190653 - DNA, 20 bp, synthetic construct
  source 1..20: mol_type = other DNA
tcagagccttctttaagaga

SEQ ID NO: 190654 - DNA, 20 bp, synthetic construct
  source 1..20: mol_type = other DNA
ctcagagccttctttaagag

SEQ ID NO: 190655 - DNA, 20 bp, synthetic construct
  source 1..20: mol_type = other DNA
actcagagccttctttaaga

SEQ ID NO: 190656 - DNA, 20 bp, synthetic construct
  source 1..20: mol_type = other DNA
gactcagagccttctttaag

SEQ ID NO: 190657 - DNA, 20 bp, synthetic construct
  source 1..20: mol_type = other DNA
ggactcagagccttctttaa

SEQ ID NO: 190658 - DNA, 20 bp, synthetic construct
  source 1..20: mol_type = other DNA
tggactcagagccttcttta

SEQ ID NO: 190659 - DNA, 20 bp, synthetic construct
  source 1..20: mol_type = other DNA
ctggactcagagccttcttt

SEQ ID NO: 190660 - DNA, 20 bp, synthetic construct
  source 1..20: mol_type = other DNA
cctggactcagagccttctt

SEQ ID NO: 190661 - DNA, 20 bp, synthetic construct
  source 1..20: mol_type = other DNA
acctggactcagagccttct

SEQ ID NO: 190662 - DNA, 20 bp, synthetic construct
  source 1..20: mol_type = other DNA
tacctggactcagagccttc

SEQ ID NO: 190663 - DNA, 20 bp, synthetic construct
  source 1..20: mol_type = other DNA
ttacctggactcagagcctt

SEQ ID NO: 190664 - DNA, 20 bp, synthetic construct
  source 1..20: mol_type = other DNA
tttacctggactcagagcct

SEQ ID NO: 190665 - DNA, 20 bp, synthetic construct
  source 1..20: mol_type = other DNA
atttacctggactcagagcc

SEQ ID NO: 190666 - DNA, 20 bp, synthetic construct
  source 1..20: mol_type = other DNA
aatttacctggactcagagc

SEQ ID NO: 190667 - DNA, 20 bp, synthetic construct
  source 1..20: mol_type = other DNA
aaatttacctggactcagag

SEQ ID NO: 190668 - DNA, 20 bp, synthetic construct
  source 1..20: mol_type = other DNA
gaaatttacctggactcaga

SEQ ID NO: 190669 - DNA, 20 bp, synthetic construct
  source 1..20: mol_type = other DNA
ggaaatttacctggactcag

SEQ ID NO: 190670 - DNA, 20 bp, synthetic construct
  source 1..20: mol_type = other DNA
aggaaatttacctggactca

SEQ ID NO: 190671 - DNA, 20 bp, synthetic construct
  source 1..20: mol_type = other DNA
aaggaaatttacctggactc

SEQ ID NO: 190672 - DNA, 20 bp, synthetic construct
  source 1..20: mol_type = other DNA
gaaggaaatttacctggact

SEQ ID NO: 190673 - DNA, 20 bp, synthetic construct
  source 1..20: mol_type = other DNA
ggaaggaaatttacctggac

SEQ ID NO: 190674 - DNA, 20 bp, synthetic construct
  source 1..20: mol_type = other DNA
tggaaggaaatttacctgga

SEQ ID NO: 190675 - DNA, 20 bp, synthetic construct
  source 1..20: mol_type = other DNA
gtggaaggaaatttacctgg

SEQ ID NO: 190676 - DNA, 20 bp, synthetic construct
  source 1..20: mol_type = other DNA
agtggaaggaaatttacctg

SEQ ID NO: 190677 - DNA, 20 bp, synthetic construct
  source 1..20: mol_type = other DNA
cagtggaaggaaatttacct

SEQ ID NO: 190678 - DNA, 20 bp, synthetic construct
  source 1..20: mol_type = other DNA
tcagtggaaggaaatttacc

SEQ ID NO: 190679 - DNA, 20 bp, synthetic construct
  source 1..20: mol_type = other DNA
ttcagtggaaggaaatttac

SEQ ID NO: 190680 - DNA, 20 bp, synthetic construct
  source 1..20: mol_type = other DNA
cttcagtggaaggaaattta

SEQ ID NO: 190681 - DNA, 20 bp, synthetic construct
  source 1..20: mol_type = other DNA
gcttcagtggaaggaaattt

SEQ ID NO: 190682 - DNA, 20 bp, synthetic construct
  source 1..20: mol_type = other DNA
tgcttcagtggaaggaaatt

SEQ ID NO: 190683 - DNA, 20 bp, synthetic construct
  source 1..20: mol_type = other DNA
ctgcttcagtggaaggaaat

SEQ ID NO: 190684 - DNA, 20 bp, synthetic construct
  source 1..20: mol_type = other DNA
gctgcttcagtggaaggaaa

SEQ ID NO: 190685 - DNA, 20 bp, synthetic construct
  source 1..20: mol_type = other DNA
ggctgcttcagtggaaggaa

SEQ ID NO: 190686 - DNA, 20 bp, synthetic construct
  source 1..20: mol_type = other DNA
tggctgcttcagtggaagga

SEQ ID NO: 190687 - DNA, 20 bp, synthetic construct
  source 1..20: mol_type = other DNA
ctggctgcttcagtggaagg

SEQ ID NO: 190688 - DNA, 20 bp, synthetic construct
  source 1..20: mol_type = other DNA
cctggctgcttcagtggaag

SEQ ID NO: 190689 - DNA, 20 bp, synthetic construct
  source 1..20: mol_type = other DNA
gcctggctgcttcagtggaa

SEQ ID NO: 190690 - DNA, 20 bp, synthetic construct
  source 1..20: mol_type = other DNA
agcctggctgcttcagtgga

SEQ ID NO: 190691 - DNA, 20 bp, synthetic construct
  source 1..20: mol_type = other DNA
cagcctggctgcttcagtgg

SEQ ID NO: 190692 - DNA, 20 bp, synthetic construct
  source 1..20: mol_type = other DNA
tcagcctggctgcttcagtg

SEQ ID NO: 190693 - DNA, 20 bp, synthetic construct
  source 1..20: mol_type = other DNA
ttcagcctggctgcttcagt

SEQ ID NO: 190694 - DNA, 20 bp, synthetic construct
  source 1..20: mol_type = other DNA
attcagcctggctgcttcag

SEQ ID NO: 190695 - DNA, 20 bp, synthetic construct
  source 1..20: mol_type = other DNA
aattcagcctggctgcttca

SEQ ID NO: 190696 - DNA, 20 bp, synthetic construct
  source 1..20: mol_type = other DNA
gaattcagcctggctgcttc

SEQ ID NO: 190697 - DNA, 20 bp, synthetic construct
  source 1..20: mol_type = other DNA
cgaattcagcctggctgctt

SEQ ID NO: 190698 - DNA, 20 bp, synthetic construct
  source 1..20: mol_type = other DNA
tcgaattcagcctggctgct

SEQ ID NO: 190699 - DNA, 20 bp, synthetic construct
  source 1..20: mol_type = other DNA
ttcgaattcagcctggctgc

SEQ ID NO: 190700 - DNA, 20 bp, synthetic construct
  source 1..20: mol_type = other DNA
attcgaattcagcctggctg

SEQ ID NO: 190701 - DNA, 20 bp, synthetic construct
  source 1..20: mol_type = other DNA
aattcgaattcagcctggct

SEQ ID NO: 190702 - DNA, 20 bp, synthetic construct
  source 1..20: mol_type = other DNA
taattcgaattcagcctggc

SEQ ID NO: 190703 - DNA, 20 bp, synthetic construct
  source 1..20: mol_type = other DNA
ataattcgaattcagcctgg

SEQ ID NO: 190704 - DNA, 20 bp, synthetic construct
  source 1..20: mol_type = other DNA
gataattcgaattcagcctg

SEQ ID NO: 190705 - DNA, 20 bp, synthetic construct
  source 1..20: mol_type = other DNA
agataattcgaattcagcct

SEQ ID NO: 190706 - DNA, 20 bp, synthetic construct
  source 1..20: mol_type = other DNA
aagataattcgaattcagcc

SEQ ID NO: 190707 - DNA, 20 bp, synthetic construct
  source 1..20: mol_type = other DNA
aaagataattcgaattcagc

SEQ ID NO: 190708 - DNA, 20 bp, synthetic construct
  source 1..20: mol_type = other DNA
caaagataattcgaattcag

SEQ ID NO: 190709 - DNA, 20 bp, synthetic construct
  source 1..20: mol_type = other DNA
gcaaagataattcgaattca

SEQ ID NO: 190710 - DNA, 20 bp, synthetic construct
  source 1..20: mol_type = other DNA
ggcaaagataattcgaattc

SEQ ID NO: 190711 - DNA, 20 bp, synthetic construct
  source 1..20: mol_type = other DNA
gggcaaagataattcgaatt

SEQ ID NO: 190712 - DNA, 20 bp, synthetic construct
  source 1..20: mol_type = other DNA
ggggcaaagataattcgaat

SEQ ID NO: 190713 - DNA, 20 bp, synthetic construct
  source 1..20: mol_type = other DNA
aggggcaaagataattcgaa

SEQ ID NO: 190714 - DNA, 20 bp, synthetic construct
  source 1..20: mol_type = other DNA
caggggcaaagataattcga

SEQ ID NO: 190715 - DNA, 20 bp, synthetic construct
  source 1..20: mol_type = other DNA
gcaggggcaaagataattcg

SEQ ID NO: 190716 - DNA, 20 bp, synthetic construct
  source 1..20: mol_type = other DNA
agcaggggcaaagataattc

SEQ ID NO: 190717 - DNA, 20 bp, synthetic construct
  source 1..20: mol_type = other DNA
aagcaggggcaaagataatt

SEQ ID NO: 190718 - DNA, 20 bp, synthetic construct
  source 1..20: mol_type = other DNA
taagcaggggcaaagataat

SEQ ID NO: 190719 - DNA, 20 bp, synthetic construct
  source 1..20: mol_type = other DNA
ttaagcaggggcaaagataa

SEQ ID NO: 190720 - DNA, 20 bp, synthetic construct
  source 1..20: mol_type = other DNA
tttaagcaggggcaaagata

SEQ ID NO: 190721 - DNA, 20 bp, synthetic construct
  source 1..20: mol_type = other DNA
ttttaagcaggggcaaagat

SEQ ID NO: 190722 - DNA, 20 bp, synthetic construct
  source 1..20: mol_type = other DNA
tttttaagcaggggcaaaga

SEQ ID NO: 190723 - DNA, 20 bp, synthetic construct
  source 1..20: mol_type = other DNA
gtttttaagcaggggcaaag

SEQ ID NO: 190724 - DNA, 20 bp, synthetic construct
  source 1..20: mol_type = other DNA
agtttttaagcaggggcaaa

SEQ ID NO: 190725 - DNA, 20 bp, synthetic construct
  source 1..20: mol_type = other DNA
tagtttttaagcaggggcaa

SEQ ID NO: 190726 - DNA, 20 bp, synthetic construct
  source 1..20: mol_type = other DNA
ttagtttttaagcaggggca

SEQ ID NO: 190727 - DNA, 20 bp, synthetic construct
  source 1..20: mol_type = other DNA
attagtttttaagcaggggc

SEQ ID NO: 190728 - DNA, 20 bp, synthetic construct
  source 1..20: mol_type = other DNA
cattagtttttaagcagggg

SEQ ID NO: 190729 - DNA, 20 bp, synthetic construct
  source 1..20: mol_type = other DNA
gcattagtttttaagcaggg

SEQ ID NO: 190730 - DNA, 20 bp, synthetic construct
  source 1..20: mol_type = other DNA
tgcattagtttttaagcagg

SEQ ID NO: 190731 - DNA, 20 bp, synthetic construct
  source 1..20: mol_type = other DNA
ttgcattagtttttaagcag

SEQ ID NO: 190732 - DNA, 20 bp, synthetic construct
  source 1..20: mol_type = other DNA
tttgcattagtttttaagca

SEQ ID NO: 190733 - DNA, 20 bp, synthetic construct
  source 1..20: mol_type = other DNA
atttgcattagtttttaagc

SEQ ID NO: 190734 - DNA, 20 bp, synthetic construct
  source 1..20: mol_type = other DNA
aatttgcattagtttttaag

SEQ ID NO: 190735 - DNA, 20 bp, synthetic construct
  source 1..20: mol_type = other DNA
aaatttgcattagtttttaa

SEQ ID NO: 190736 - DNA, 20 bp, synthetic construct
  source 1..20: mol_type = other DNA
aaaatttgcattagttttta

SEQ ID NO: 190737 - DNA, 20 bp, synthetic construct
  source 1..20: mol_type = other DNA
gaaaatttgcattagttttt

SEQ ID NO: 190738 - DNA, 20 bp, synthetic construct
  source 1..20: mol_type = other DNA
ggaaaatttgcattagtttt

SEQ ID NO: 190739 - DNA, 20 bp, synthetic construct
  source 1..20: mol_type = other DNA
aggaaaatttgcattagttt

SEQ ID NO: 190740 - DNA, 20 bp, synthetic construct
  source 1..20: mol_type = other DNA
taggaaaatttgcattagtt

SEQ ID NO: 190741 - DNA, 20 bp, synthetic construct
  source 1..20: mol_type = other DNA
ctaggaaaatttgcattagt

SEQ ID NO: 190742 - DNA, 20 bp, synthetic construct
  source 1..20: mol_type = other DNA
tctaggaaaatttgcattag

SEQ ID NO: 190743 - DNA, 20 bp, synthetic construct
  source 1..20: mol_type = other DNA
ctctaggaaaatttgcatta

SEQ ID NO: 190744 - DNA, 20 bp, synthetic construct
  source 1..20: mol_type = other DNA
tctctaggaaaatttgcatt

SEQ ID NO: 190745 - DNA, 20 bp, synthetic construct
  source 1..20: mol_type = other DNA
ttctctaggaaaatttgcat

SEQ ID NO: 190746 - DNA, 20 bp, synthetic construct
  source 1..20: mol_type = other DNA
attctctaggaaaatttgca

SEQ ID NO: 190747 - DNA, 20 bp, synthetic construct
  source 1..20: mol_type = other DNA
tattctctaggaaaatttgc

SEQ ID NO: 190748 - DNA, 20 bp, synthetic construct
  source 1..20: mol_type = other DNA
atattctctaggaaaatttg

SEQ ID NO: 190749 - DNA, 20 bp, synthetic construct
  source 1..20: mol_type = other DNA
gatattctctaggaaaattt

SEQ ID NO: 190750 - DNA, 20 bp, synthetic construct
  source 1..20: mol_type = other DNA
ggatattctctaggaaaatt

SEQ ID NO: 190751 - DNA, 20 bp, synthetic construct
  source 1..20: mol_type = other DNA
tggatattctctaggaaaat

SEQ ID NO: 190752 - DNA, 20 bp, synthetic construct
  source 1..20: mol_type = other DNA
gtggatattctctaggaaaa

SEQ ID NO: 190753 - DNA, 20 bp, synthetic construct
  source 1..20: mol_type = other DNA
agtggatattctctaggaaa

SEQ ID NO: 190754 - DNA, 20 bp, synthetic construct
  source 1..20: mol_type = other DNA
tagtggatattctctaggaa

SEQ ID NO: 190755 - DNA, 20 bp, synthetic construct
  source 1..20: mol_type = other DNA
ttagtggatattctctagga

SEQ ID NO: 190756 - DNA, 20 bp, synthetic construct
  source 1..20: mol_type = other DNA
attagtggatattctctagg

SEQ ID NO: 190757 - DNA, 20 bp, synthetic construct
  source 1..20: mol_type = other DNA
aattagtggatattctctag

SEQ ID NO: 190758 - DNA, 20 bp, synthetic construct
  source 1..20: mol_type = other DNA
gaattagtggatattctcta

SEQ ID NO: 190759 - DNA, 20 bp, synthetic construct
  source 1..20: mol_type = other DNA
ggaattagtggatattctct

SEQ ID NO: 190760 - DNA, 20 bp, synthetic construct
  source 1..20: mol_type = other DNA
aggaattagtggatattctc

SEQ ID NO: 190761 - DNA, 20 bp, synthetic construct
  source 1..20: mol_type = other DNA
caggaattagtggatattct

SEQ ID NO: 190762 - DNA, 20 bp, synthetic construct
  source 1..20: mol_type = other DNA
ccaggaattagtggatattc

SEQ ID NO: 190763 - DNA, 20 bp, synthetic construct
  source 1..20: mol_type = other DNA
tccaggaattagtggatatt

SEQ ID NO: 190764 - DNA, 20 bp, synthetic construct
  source 1..20: mol_type = other DNA
ctccaggaattagtggatat

SEQ ID NO: 190765 - DNA, 20 bp, synthetic construct
  source 1..20: mol_type = other DNA
cctccaggaattagtggata

SEQ ID NO: 190766 - DNA, 20 bp, synthetic construct
  source 1..20: mol_type = other DNA
ccctccaggaattagtggat

SEQ ID NO: 190767 - DNA, 20 bp, synthetic construct
  source 1..20: mol_type = other DNA
cccctccaggaattagtgga

SEQ ID NO: 190768 - DNA, 20 bp, synthetic construct
  source 1..20: mol_type = other DNA
ccccctccaggaattagtgg

SEQ ID NO: 190769 - DNA, 20 bp, synthetic construct
  source 1..20: mol_type = other DNA
gccccctccaggaattagtg

SEQ ID NO: 190770 - DNA, 20 bp, synthetic construct
  source 1..20: mol_type = other DNA
tgccccctccaggaattagt

SEQ ID NO: 190771 - DNA, 20 bp, synthetic construct
  source 1..20: mol_type = other DNA
atgccccctccaggaattag

SEQ ID NO: 190772 - DNA, 20 bp, synthetic construct
  source 1..20: mol_type = other DNA
catgccccctccaggaatta

SEQ ID NO: 190773 - DNA, 20 bp, synthetic construct
  source 1..20: mol_type = other DNA
ccatgccccctccaggaatt

SEQ ID NO: 190774 - DNA, 20 bp, synthetic construct
  source 1..20: mol_type = other DNA
cccatgccccctccaggaat

SEQ ID NO: 190775 - DNA, 20 bp, synthetic construct
  source 1..20: mol_type = other DNA
gcccatgccccctccaggaa

SEQ ID NO: 190776 - DNA, 20 bp, synthetic construct
  source 1..20: mol_type = other DNA
tgcccatgccccctccagga

SEQ ID NO: 190777 - DNA, 20 bp, synthetic construct
  source 1..20: mol_type = other DNA
atgcccatgccccctccagg

SEQ ID NO: 190778 - DNA, 20 bp, synthetic construct
  source 1..20: mol_type = other DNA
aatgcccatgccccctccag

SEQ ID NO: 190779 - DNA, 20 bp, synthetic construct
  source 1..20: mol_type = other DNA
gaatgcccatgccccctcca

SEQ ID NO: 190780 - DNA, 20 bp, synthetic construct
  source 1..20: mol_type = other DNA
ggaatgcccatgccccctcc

SEQ ID NO: 190781 - DNA, 20 bp, synthetic construct
  source 1..20: mol_type = other DNA
aggaatgcccatgccccctc

SEQ ID NO: 190782 - DNA, 20 bp, synthetic construct
  source 1..20: mol_type = other DNA
caggaatgcccatgccccct

SEQ ID NO: 190783 - DNA, 20 bp, synthetic construct
  source 1..20: mol_type = other DNA
tcaggaatgcccatgccccc

SEQ ID NO: 190784 - DNA, 20 bp, synthetic construct
  source 1..20: mol_type = other DNA
atcaggaatgcccatgcccc

SEQ ID NO: 190785 - DNA, 20 bp, synthetic construct
  source 1..20: mol_type = other DNA
catcaggaatgcccatgccc

SEQ ID NO: 190786 - DNA, 20 bp, synthetic construct
  source 1..20: mol_type = other DNA
gcatcaggaatgcccatgcc

SEQ ID NO: 190787 - DNA, 20 bp, synthetic construct
  source 1..20: mol_type = other DNA
ggcatcaggaatgcccatgc

SEQ ID NO: 190788 - DNA, 20 bp, synthetic construct
  source 1..20: mol_type = other DNA
gggcatcaggaatgcccatg

SEQ ID NO: 190789 - DNA, 20 bp, synthetic construct
  source 1..20: mol_type = other DNA
tgggcatcaggaatgcccat

SEQ ID NO: 190790 - DNA, 20 bp, synthetic construct
  source 1..20: mol_type = other DNA
atgggcatcaggaatgccca

SEQ ID NO: 190791 - DNA, 20 bp, synthetic construct
  source 1..20: mol_type = other DNA
catgggcatcaggaatgccc

SEQ ID NO: 190792 - DNA, 20 bp, synthetic construct
  source 1..20: mol_type = other DNA
tcatgggcatcaggaatgcc

SEQ ID NO: 190793 - DNA, 20 bp, synthetic construct
  source 1..20: mol_type = other DNA
ctcatgggcatcaggaatgc

SEQ ID NO: 190794 - DNA, 20 bp, synthetic construct
  source 1..20: mol_type = other DNA
tctcatgggcatcaggaatg

SEQ ID NO: 190795 - DNA, 20 bp, synthetic construct
  source 1..20: mol_type = other DNA
ctctcatgggcatcaggaat

SEQ ID NO: 190796 - DNA, 20 bp, synthetic construct
  source 1..20: mol_type = other DNA
cctctcatgggcatcaggaa

SEQ ID NO: 190797 - DNA, 20 bp, synthetic construct
  source 1..20: mol_type = other DNA
tcctctcatgggcatcagga

SEQ ID NO: 190798 - DNA, 20 bp, synthetic construct
  source 1..20: mol_type = other DNA
gtcctctcatgggcatcagg

SEQ ID NO: 190799 - DNA, 20 bp, synthetic construct
  source 1..20: mol_type = other DNA
ggtcctctcatgggcatcag

SEQ ID NO: 190800 - DNA, 20 bp, synthetic construct
  source 1..20: mol_type = other DNA
tggtcctctcatgggcatca

SEQ ID NO: 190801 - DNA, 20 bp, synthetic construct
  source 1..20: mol_type = other DNA
atggtcctctcatgggcatc

SEQ ID NO: 190802 - DNA, 20 bp, synthetic construct
  source 1..20: mol_type = other DNA
aatggtcctctcatgggcat

SEQ ID NO: 190803 - DNA, 20 bp, synthetic construct
  source 1..20: mol_type = other DNA
aaatggtcctctcatgggca

SEQ ID NO: 190804 - DNA, 20 bp, synthetic construct
  source 1..20: mol_type = other DNA
caaatggtcctctcatgggc

SEQ ID NO: 190805 - DNA, 20 bp, synthetic construct
  source 1..20: mol_type = other DNA
gcaaatggtcctctcatggg

SEQ ID NO: 190806 - DNA, 20 bp, synthetic construct
  source 1..20: mol_type = other DNA
agcaaatggtcctctcatgg

SEQ ID NO: 190807 - DNA, 20 bp, synthetic construct
  source 1..20: mol_type = other DNA
gagcaaatggtcctctcatg

SEQ ID NO: 190808 - DNA, 20 bp, synthetic construct
  source 1..20: mol_type = other DNA
agagcaaatggtcctctcat

SEQ ID NO: 190809 - DNA, 20 bp, synthetic construct
  source 1..20: mol_type = other DNA
aagagcaaatggtcctctca

SEQ ID NO: 190810 - DNA, 20 bp, synthetic construct
  source 1..20: mol_type = other DNA
gaagagcaaatggtcctctc

SEQ ID NO: 190811 - DNA, 20 bp, synthetic construct
  source 1..20: mol_type = other DNA
ggaagagcaaatggtcctct

SEQ ID NO: 190812 - DNA, 20 bp, synthetic construct
  source 1..20: mol_type = other DNA
gggaagagcaaatggtcctc

SEQ ID NO: 190813 - DNA, 20 bp, synthetic construct
  source 1..20: mol_type = other DNA
agggaagagcaaatggtcct

SEQ ID NO: 190814 - DNA, 20 bp, synthetic construct
  source 1..20: mol_type = other DNA
gagggaagagcaaatggtcc

SEQ ID NO: 190815 - DNA, 20 bp, synthetic construct
  source 1..20: mol_type = other DNA
tgagggaagagcaaatggtc

SEQ ID NO: 190816 - DNA, 20 bp, synthetic construct
  source 1..20: mol_type = other DNA
ctgagggaagagcaaatggt

SEQ ID NO: 190817 - DNA, 20 bp, synthetic construct
  source 1..20: mol_type = other DNA
actgagggaagagcaaatgg

SEQ ID NO: 190818 - DNA, 20 bp, synthetic construct
  source 1..20: mol_type = other DNA
tactgagggaagagcaaatg

SEQ ID NO: 190819 - DNA, 20 bp, synthetic construct
  source 1..20: mol_type = other DNA
atactgagggaagagcaaat

SEQ ID NO: 190820 - DNA, 20 bp, synthetic construct
  source 1..20: mol_type = other DNA
catactgagggaagagcaaa

SEQ ID NO: 190821 - DNA, 20 bp, synthetic construct
  source 1..20: mol_type = other DNA
gcatactgagggaagagcaa

SEQ ID NO: 190822 - DNA, 20 bp, synthetic construct
  source 1..20: mol_type = other DNA
agcatactgagggaagagca

SEQ ID NO: 190823 - DNA, 20 bp, synthetic construct
  source 1..20: mol_type = other DNA
tagcatactgagggaagagc

SEQ ID NO: 190824 - DNA, 20 bp, synthetic construct
  source 1..20: mol_type = other DNA
ttagcatactgagggaagag

SEQ ID NO: 190825 - DNA, 20 bp, synthetic construct
  source 1..20: mol_type = other DNA
tttagcatactgagggaaga

SEQ ID NO: 190826 - DNA, 20 bp, synthetic construct
  source 1..20: mol_type = other DNA
atttagcatactgagggaag

SEQ ID NO: 190827 - DNA, 20 bp, synthetic construct
  source 1..20: mol_type = other DNA
tatttagcatactgagggaa

SEQ ID NO: 190828 - DNA, 20 bp, synthetic construct
  source 1..20: mol_type = other DNA
ttatttagcatactgaggga

SEQ ID NO: 190829 - DNA, 20 bp, synthetic construct
  source 1..20: mol_type = other DNA
gttatttagcatactgaggg

SEQ ID NO: 190830 - DNA, 20 bp, synthetic construct
  source 1..20: mol_type = other DNA
tgttatttagcatactgagg

SEQ ID NO: 190831 - DNA, 20 bp, synthetic construct
  source 1..20: mol_type = other DNA
ctgttatttagcatactgag

SEQ ID NO: 190832 - DNA, 20 bp, synthetic construct
  source 1..20: mol_type = other DNA
tctgttatttagcatactga

SEQ ID NO: 190833 - DNA, 20 bp, synthetic construct
  source 1..20: mol_type = other DNA
ttctgttatttagcatactg

SEQ ID NO: 190834 - DNA, 20 bp, synthetic construct
  source 1..20: mol_type = other DNA
cttctgttatttagcatact

SEQ ID NO: 190835 - DNA, 20 bp, synthetic construct
  source 1..20: mol_type = other DNA
gcttctgttatttagcatac

SEQ ID NO: 190836 - DNA, 20 bp, synthetic construct
  source 1..20: mol_type = other DNA
cgcttctgttatttagcata

SEQ ID NO: 190837 - DNA, 20 bp, synthetic construct
  source 1..20: mol_type = other DNA
tcgcttctgttatttagcat

SEQ ID NO: 190838 - DNA, 20 bp, synthetic construct
  source 1..20: mol_type = other DNA
gtcgcttctgttatttagca

SEQ ID NO: 190839 - DNA, 20 bp, synthetic construct
  source 1..20: mol_type = other DNA
tgtcgcttctgttatttagc

SEQ ID NO: 190840 - DNA, 20 bp, synthetic construct
  source 1..20: mol_type = other DNA
atgtcgcttctgttatttag

SEQ ID NO: 190841 - DNA, 20 bp, synthetic construct
  source 1..20: mol_type = other DNA
aatgtcgcttctgttattta

SEQ ID NO: 190842 - DNA, 20 bp, synthetic construct
  source 1..20: mol_type = other DNA
aaatgtcgcttctgttattt

SEQ ID NO: 190843 - DNA, 20 bp, synthetic construct
  source 1..20: mol_type = other DNA
caaatgtcgcttctgttatt

SEQ ID NO: 190844 - DNA, 20 bp, synthetic construct
  source 1..20: mol_type = other DNA
acaaatgtcgcttctgttat

SEQ ID NO: 190845 - DNA, 20 bp, synthetic construct
  source 1..20: mol_type = other DNA
aacaaatgtcgcttctgtta

SEQ ID NO: 190846 - DNA, 20 bp, synthetic construct
  source 1..20: mol_type = other DNA
caacaaatgtcgcttctgtt

SEQ ID NO: 190847 - DNA, 20 bp, synthetic construct
  source 1..20: mol_type = other DNA
gcaacaaatgtcgcttctgt

SEQ ID NO: 190848 - DNA, 20 bp, synthetic construct
  source 1..20: mol_type = other DNA
agcaacaaatgtcgcttctg

SEQ ID NO: 190849 - DNA, 20 bp, synthetic construct
  source 1..20: mol_type = other DNA
cagcaacaaatgtcgcttct

SEQ ID NO: 190850 - DNA, 20 bp, synthetic construct
  source 1..20: mol_type = other DNA
ccagcaacaaatgtcgcttc

SEQ ID NO: 190851 - DNA, 20 bp, synthetic construct
  source 1..20: mol_type = other DNA
tccagcaacaaatgtcgctt

SEQ ID NO: 190852 - DNA, 20 bp, synthetic construct
  source 1..20: mol_type = other DNA
ttccagcaacaaatgtcgct

SEQ ID NO: 190853 - DNA, 20 bp, synthetic construct
  source 1..20: mol_type = other DNA
tttccagcaacaaatgtcgc

SEQ ID NO: 190854 - DNA, 20 bp, synthetic construct
  source 1..20: mol_type = other DNA
ctttccagcaacaaatgtcg

SEQ ID NO: 190855 - DNA, 20 bp, synthetic construct
  source 1..20: mol_type = other DNA
actttccagcaacaaatgtc

SEQ ID NO: 190856 - DNA, 20 bp, synthetic construct
  source 1..20: mol_type = other DNA
tactttccagcaacaaatgt

SEQ ID NO: 190857 - DNA, 20 bp, synthetic construct
  source 1..20: mol_type = other DNA
atactttccagcaacaaatg

SEQ ID NO: 190858 - DNA, 20 bp, synthetic construct
  source 1..20: mol_type = other DNA
gatactttccagcaacaaat

SEQ ID NO: 190859 - DNA, 20 bp, synthetic construct
  source 1..20: mol_type = other DNA
tgatactttccagcaacaaa

SEQ ID NO: 190860 - DNA, 20 bp, synthetic construct
  source 1..20: mol_type = other DNA
ctgatactttccagcaacaa

SEQ ID NO: 190861 - DNA, 20 bp, synthetic construct
  source 1..20: mol_type = other DNA
actgatactttccagcaaca

SEQ ID NO: 190862 - DNA, 20 bp, synthetic construct
  source 1..20: mol_type = other DNA
cactgatactttccagcaac

SEQ ID NO: 190863 - DNA, 20 bp, synthetic construct
  source 1..20: mol_type = other DNA
tcactgatactttccagcaa

SEQ ID NO: 190864 - DNA, 20 bp, synthetic construct
  source 1..20: mol_type = other DNA
ttcactgatactttccagca

SEQ ID NO: 190865 - DNA, 20 bp, synthetic construct
  source 1..20: mol_type = other DNA
cttcactgatactttccagc

SEQ ID NO: 190866 - DNA, 20 bp, synthetic construct
  source 1..20: mol_type = other DNA
acttcactgatactttccag

SEQ ID NO: 190867 - DNA, 20 bp, synthetic construct
  source 1..20: mol_type = other DNA
aacttcactgatactttcca

SEQ ID NO: 190868 - DNA, 20 bp, synthetic construct
  source 1..20: mol_type = other DNA
taacttcactgatactttcc

SEQ ID NO: 190869 - DNA, 20 bp, synthetic construct
  source 1..20: mol_type = other DNA
ttaacttcactgatactttc

SEQ ID NO: 190870 - DNA, 20 bp, synthetic construct
  source 1..20: mol_type = other DNA
attaacttcactgatacttt

SEQ ID NO: 190871 - DNA, 20 bp, synthetic construct
  source 1..20: mol_type = other DNA
tattaacttcactgatactt

SEQ ID NO: 190872 - DNA, 20 bp, synthetic construct
  source 1..20: mol_type = other DNA
ttattaacttcactgatact

SEQ ID NO: 190873 - DNA, 20 bp, synthetic construct
  source 1..20: mol_type = other DNA
cttattaacttcactgatac

SEQ ID NO: 190874 - DNA, 20 bp, synthetic construct
  source 1..20: mol_type = other DNA
ccttattaacttcactgata

SEQ ID NO: 190875 - DNA, 20 bp, synthetic construct
  source 1..20: mol_type = other DNA
accttattaacttcactgat

SEQ ID NO: 190876 - DNA, 20 bp, synthetic construct
  source 1..20: mol_type = other DNA
aaccttattaacttcactga

SEQ ID NO: 190877 - DNA, 20 bp, synthetic construct
  source 1..20: mol_type = other DNA
aaaccttattaacttcactg

SEQ ID NO: 190878 - DNA, 20 bp, synthetic construct
  source 1..20: mol_type = other DNA
aaaaccttattaacttcact

SEQ ID NO: 190879 - DNA, 20 bp, synthetic construct
  source 1..20: mol_type = other DNA
aaaaaccttattaacttcac

SEQ ID NO: 190880 - DNA, 20 bp, synthetic construct
  source 1..20: mol_type = other DNA
gaaaaaccttattaacttca

SEQ ID NO: 190881 - DNA, 20 bp, synthetic construct
  source 1..20: mol_type = other DNA
agaaaaaccttattaacttc

SEQ ID NO: 190882 - DNA, 20 bp, synthetic construct
  source 1..20: mol_type = other DNA
aagaaaaaccttattaactt

SEQ ID NO: 190883 - DNA, 20 bp, synthetic construct
  source 1..20: mol_type = other DNA
caagaaaaaccttattaact

SEQ ID NO: 190884 - DNA, 20 bp, synthetic construct
  source 1..20: mol_type = other DNA
gcaagaaaaaccttattaac

SEQ ID NO: 190885 - DNA, 20 bp, synthetic construct
  source 1..20: mol_type = other DNA
ggcaagaaaaaccttattaa

SEQ ID NO: 190886 - DNA, 20 bp, synthetic construct
  source 1..20: mol_type = other DNA
gggcaagaaaaaccttatta

SEQ ID NO: 190887 - DNA, 20 bp, synthetic construct
  source 1..20: mol_type = other DNA
tgggcaagaaaaaccttatt

SEQ ID NO: 190888 - DNA, 20 bp, synthetic construct
  source 1..20: mol_type = other DNA
ctgggcaagaaaaaccttat

SEQ ID NO: 190889 - DNA, 20 bp, synthetic construct
  source 1..20: mol_type = other DNA
cctgggcaagaaaaacctta

SEQ ID NO: 190890 - DNA, 20 bp, synthetic construct
  source 1..20: mol_type = other DNA
ccctgggcaagaaaaacctt

SEQ ID NO: 190891 - DNA, 20 bp, synthetic construct
  source 1..20: mol_type = other DNA
accctgggcaagaaaaacct

SEQ ID NO: 190892 - DNA, 20 bp, synthetic construct
  source 1..20: mol_type = other DNA
caccctgggcaagaaaaacc

SEQ ID NO: 190893 - DNA, 20 bp, synthetic construct
  source 1..20: mol_type = other DNA
tcaccctgggcaagaaaaac

SEQ ID NO: 190894 - DNA, 20 bp, synthetic construct
  source 1..20: mol_type = other DNA
ctcaccctgggcaagaaaaa

SEQ ID NO: 190895 - DNA, 20 bp, synthetic construct
  source 1..20: mol_type = other DNA
cctcaccctgggcaagaaaa

SEQ ID NO: 190896 - DNA, 20 bp, synthetic construct
  source 1..20: mol_type = other DNA
ccctcaccctgggcaagaaa

SEQ ID NO: 190897 - DNA, 20 bp, synthetic construct
  source 1..20: mol_type = other DNA
tccctcaccctgggcaagaa

SEQ ID NO: 190898 - DNA, 20 bp, synthetic construct
  source 1..20: mol_type = other DNA
ttccctcaccctgggcaaga

SEQ ID NO: 190899 - DNA, 20 bp, synthetic construct
  source 1..20: mol_type = other DNA
gttccctcaccctgggcaag

SEQ ID NO: 190900 - DNA, 20 bp, synthetic construct
  source 1..20: mol_type = other DNA
tgttccctcaccctgggcaa

SEQ ID NO: 190901 - DNA, 20 bp, synthetic construct
  source 1..20: mol_type = other DNA
ctgttccctcaccctgggca

SEQ ID NO: 190902 - DNA, 20 bp, synthetic construct
  source 1..20: mol_type = other DNA
actgttccctcaccctgggc

SEQ ID NO: 190903 - DNA, 20 bp, synthetic construct
  source 1..20: mol_type = other DNA
aactgttccctcaccctggg

SEQ ID NO: 190904 - DNA, 20 bp, synthetic construct
  source 1..20: mol_type = other DNA
gaactgttccctcaccctgg

SEQ ID NO: 190905 - DNA, 20 bp, synthetic construct
  source 1..20: mol_type = other DNA
ggaactgttccctcaccctg

SEQ ID NO: 190906 - DNA, 20 bp, synthetic construct
  source 1..20: mol_type = other DNA
gggaactgttccctcaccct

SEQ ID NO: 190907 - DNA, 20 bp, synthetic construct
  source 1..20: mol_type = other DNA
tgggaactgttccctcaccc

SEQ ID NO: 190908 - DNA, 20 bp, synthetic construct
  source 1..20: mol_type = other DNA
ttgggaactgttccctcacc

SEQ ID NO: 190909 - DNA, 20 bp, synthetic construct
  source 1..20: mol_type = other DNA
attgggaactgttccctcac

SEQ ID NO: 190910 - DNA, 20 bp, synthetic construct
  source 1..20: mol_type = other DNA
cattgggaactgttccctca

SEQ ID NO: 190911 - DNA, 20 bp, synthetic construct
  source 1..20: mol_type = other DNA
tcattgggaactgttccctc

SEQ ID NO: 190912 - DNA, 20 bp, synthetic construct
  source 1..20: mol_type = other DNA
gtcattgggaactgttccct

SEQ ID NO: 190913 - DNA, 20 bp, synthetic construct
  source 1..20: mol_type = other DNA
tgtcattgggaactgttccc

SEQ ID NO: 190914 - DNA, 20 bp, synthetic construct
  source 1..20: mol_type = other DNA
ttgtcattgggaactgttcc

SEQ ID NO: 190915 - DNA, 20 bp, synthetic construct
  source 1..20: mol_type = other DNA
tttgtcattgggaactgttc

SEQ ID NO: 190916 - DNA, 20 bp, synthetic construct
  source 1..20: mol_type = other DNA
atttgtcattgggaactgtt

SEQ ID NO: 190917 - DNA, 20 bp, synthetic construct
  source 1..20: mol_type = other DNA
catttgtcattgggaactgt

SEQ ID NO: 190918 - DNA, 20 bp, synthetic construct
  source 1..20: mol_type = other DNA
gcatttgtcattgggaactg

SEQ ID NO: 190919 - DNA, 20 bp, synthetic construct
  source 1..20: mol_type = other DNA
agcatttgtcattgggaact

SEQ ID NO: 190920 - DNA, 20 bp, synthetic construct
  source 1..20: mol_type = other DNA
cagcatttgtcattgggaac

SEQ ID NO: 190921 - DNA, 20 bp, synthetic construct
  source 1..20: mol_type = other DNA
acagcatttgtcattgggaa

SEQ ID NO: 190922 - DNA, 20 bp, synthetic construct
  source 1..20: mol_type = other DNA
tacagcatttgtcattggga

SEQ ID NO: 190923 - DNA, 20 bp, synthetic construct
  source 1..20: mol_type = other DNA
atacagcatttgtcattggg

SEQ ID NO: 190924 - DNA, 20 bp, synthetic construct
  source 1..20: mol_type = other DNA
catacagcatttgtcattgg

SEQ ID NO: 190925 - DNA, 20 bp, synthetic construct
  source 1..20: mol_type = other DNA
ccatacagcatttgtcattg

SEQ ID NO: 190926 - DNA, 20 bp, synthetic construct
  source 1..20: mol_type = other DNA
cccatacagcatttgtcatt

SEQ ID NO: 190927 - DNA, 20 bp, synthetic construct
  source 1..20: mol_type = other DNA
tcccatacagcatttgtcat

SEQ ID NO: 190928 - DNA, 20 bp, synthetic construct
  source 1..20: mol_type = other DNA
ttcccatacagcatttgtca

SEQ ID NO: 190929 - DNA, 20 bp, synthetic construct
  source 1..20: mol_type = other DNA
cttcccatacagcatttgtc

SEQ ID NO: 190930 - DNA, 20 bp, synthetic construct
  source 1..20: mol_type = other DNA
ccttcccatacagcatttgt

SEQ ID NO: 190931 - DNA, 20 bp, synthetic construct
  source 1..20: mol_type = other DNA
cccttcccatacagcatttg

SEQ ID NO: 190932 - DNA, 20 bp, synthetic construct
  source 1..20: mol_type = other DNA
ccccttcccatacagcattt

SEQ ID NO: 190933 - DNA, 20 bp, synthetic construct
  source 1..20: mol_type = other DNA
gccccttcccatacagcatt

SEQ ID NO: 190934 - DNA, 20 bp, synthetic construct
  source 1..20: mol_type = other DNA
agccccttcccatacagcat

SEQ ID NO: 190935 - DNA, 20 bp, synthetic construct
  source 1..20: mol_type = other DNA
cagccccttcccatacagca

SEQ ID NO: 190936 - DNA, 20 bp, synthetic construct
  source 1..20: mol_type = other DNA
acagccccttcccatacagc

SEQ ID NO: 190937 - DNA, 20 bp, synthetic construct
  source 1..20: mol_type = other DNA
tacagccccttcccatacag

SEQ ID NO: 190938 - DNA, 20 bp, synthetic construct
  source 1..20: mol_type = other DNA
ctacagccccttcccataca

SEQ ID NO: 190939 - DNA, 20 bp, synthetic construct
  source 1..20: mol_type = other DNA
tctacagccccttcccatac

SEQ ID NO: 190940 - DNA, 20 bp, synthetic construct
  source 1..20: mol_type = other DNA
ttctacagccccttcccata

SEQ ID NO: 190941 - DNA, 20 bp, synthetic construct
  source 1..20: mol_type = other DNA
gttctacagccccttcccat

SEQ ID NO: 190942 - DNA, 20 bp, synthetic construct
  source 1..20: mol_type = other DNA
agttctacagccccttccca

SEQ ID NO: 190943 - DNA, 20 bp, synthetic construct
  source 1..20: mol_type = other DNA
cagttctacagccccttccc

SEQ ID NO: 190944 - DNA, 20 bp, synthetic construct
  source 1..20: mol_type = other DNA
gcagttctacagccccttcc

SEQ ID NO: 190945 - DNA, 20 bp, synthetic construct
  source 1..20: mol_type = other DNA
ggcagttctacagccccttc

SEQ ID NO: 190946 - DNA, 20 bp, synthetic construct
  source 1..20: mol_type = other DNA
tggcagttctacagcccctt

SEQ ID NO: 190947 - DNA, 20 bp, synthetic construct
  source 1..20: mol_type = other DNA
ctggcagttctacagcccct

SEQ ID NO: 190948 - DNA, 20 bp, synthetic construct
  source 1..20: mol_type = other DNA
gctggcagttctacagcccc

SEQ ID NO: 190949 - DNA, 20 bp, synthetic construct
  source 1..20: mol_type = other DNA
ggctggcagttctacagccc

SEQ ID NO: 190950 - DNA, 20 bp, synthetic construct
  source 1..20: mol_type = other DNA
gggctggcagttctacagcc

SEQ ID NO: 190951 - DNA, 20 bp, synthetic construct
  source 1..20: mol_type = other DNA
ggggctggcagttctacagc

SEQ ID NO: 190952 - DNA, 20 bp, synthetic construct
  source 1..20: mol_type = other DNA
aggggctggcagttctacag

SEQ ID NO: 190953 - DNA, 20 bp, synthetic construct
  source 1..20: mol_type = other DNA
aaggggctggcagttctaca

SEQ ID NO: 190954 - DNA, 20 bp, synthetic construct
  source 1..20: mol_type = other DNA
aaaggggctggcagttctac

SEQ ID NO: 190955 - DNA, 20 bp, synthetic construct
  source 1..20: mol_type = other DNA
caaaggggctggcagttcta

SEQ ID NO: 190956 - DNA, 20 bp, synthetic construct
  source 1..20: mol_type = other DNA
ccaaaggggctggcagttct

SEQ ID NO: 190957 - DNA, 20 bp, synthetic construct
  source 1..20: mol_type = other DNA
accaaaggggctggcagttc

SEQ ID NO: 190958 - DNA, 20 bp, synthetic construct
  source 1..20: mol_type = other DNA
gaccaaaggggctggcagtt

SEQ ID NO: 190959 - DNA, 20 bp, synthetic construct
  source 1..20: mol_type = other DNA
ggaccaaaggggctggcagt

SEQ ID NO: 190960 - DNA, 20 bp, synthetic construct
  source 1..20: mol_type = other DNA
tggaccaaaggggctggcag

SEQ ID NO: 190961 - DNA, 20 bp, synthetic construct
  source 1..20: mol_type = other DNA
atggaccaaaggggctggca

SEQ ID NO: 190962 - DNA, 20 bp, synthetic construct
  source 1..20: mol_type = other DNA
gatggaccaaaggggctggc

SEQ ID NO: 190963 - DNA, 20 bp, synthetic construct
  source 1..20: mol_type = other DNA
ggatggaccaaaggggctgg

SEQ ID NO: 190964 - DNA, 20 bp, synthetic construct
  source 1..20: mol_type = other DNA
cggatggaccaaaggggctg

SEQ ID NO: 190965 - DNA, 20 bp, synthetic construct
  source 1..20: mol_type = other DNA
acggatggaccaaaggggct

SEQ ID NO: 190966 - DNA, 20 bp, synthetic construct
  source 1..20: mol_type = other DNA
tacggatggaccaaaggggc

SEQ ID NO: 190967 - DNA, 20 bp, synthetic construct
  source 1..20: mol_type = other DNA
ttacggatggaccaaagggg

SEQ ID NO: 190968 - DNA, 20 bp, synthetic construct
  source 1..20: mol_type = other DNA
tttacggatggaccaaaggg

SEQ ID NO: 190969 - DNA, 20 bp, synthetic construct
  source 1..20: mol_type = other DNA
ctttacggatggaccaaagg

SEQ ID NO: 190970 - DNA, 20 bp, synthetic construct
  source 1..20: mol_type = other DNA
actttacggatggaccaaag

SEQ ID NO: 190971 - DNA, 20 bp, synthetic construct
  source 1..20: mol_type = other DNA
cactttacggatggaccaaa

SEQ ID NO: 190972 - DNA, 20 bp, synthetic construct
  source 1..20: mol_type = other DNA
tcactttacggatggaccaa

SEQ ID NO: 190973 - DNA, 20 bp, synthetic construct
  source 1..20: mol_type = other DNA
ttcactttacggatggacca

SEQ ID NO: 190974 - DNA, 20 bp, synthetic construct
  source 1..20: mol_type = other DNA
gttcactttacggatggacc

SEQ ID NO: 190975 - DNA, 20 bp, synthetic construct
  source 1..20: mol_type = other DNA
agttcactttacggatggac

SEQ ID NO: 190976 - DNA, 20 bp, synthetic construct
  source 1..20: mol_type = other DNA
gagttcactttacggatgga

SEQ ID NO: 190977 - DNA, 20 bp, synthetic construct
  source 1..20: mol_type = other DNA
agagttcactttacggatgg

SEQ ID NO: 190978 - DNA, 20 bp, synthetic construct
  source 1..20: mol_type = other DNA
cagagttcactttacggatg

SEQ ID NO: 190979 - DNA, 20 bp, synthetic construct
  source 1..20: mol_type = other DNA
acagagttcactttacggat

SEQ ID NO: 190980 - DNA, 20 bp, synthetic construct
  source 1..20: mol_type = other DNA
cacagagttcactttacgga

SEQ ID NO: 190981 - DNA, 20 bp, synthetic construct
  source 1..20: mol_type = other DNA
ccacagagttcactttacgg

SEQ ID NO: 190982 - DNA, 20 bp, synthetic construct
  source 1..20: mol_type = other DNA
tccacagagttcactttacg

SEQ ID NO: 190983 - DNA, 20 bp, synthetic construct
  source 1..20: mol_type = other DNA
atccacagagttcactttac

SEQ ID NO: 190984 - DNA, 20 bp, synthetic construct
  source 1..20: mol_type = other DNA
gatccacagagttcacttta

SEQ ID NO: 190985 - DNA, 20 bp, synthetic construct
  source 1..20: mol_type = other DNA
ggatccacagagttcacttt

SEQ ID NO: 190986 - DNA, 20 bp, synthetic construct
  source 1..20: mol_type = other DNA
aggatccacagagttcactt

SEQ ID NO: 190987 - DNA, 20 bp, synthetic construct
  source 1..20: mol_type = other DNA
caggatccacagagttcact

SEQ ID NO: 190988 - DNA, 20 bp, synthetic construct
  source 1..20: mol_type = other DNA
ccaggatccacagagttcac

SEQ ID NO: 190989 - DNA, 20 bp, synthetic construct
  source 1..20: mol_type = other DNA
tccaggatccacagagttca

SEQ ID NO: 190990 - DNA, 20 bp, synthetic construct
  source 1..20: mol_type = other DNA
ctccaggatccacagagttc

SEQ ID NO: 190991 - DNA, 20 bp, synthetic construct
  source 1..20: mol_type = other DNA
cctccaggatccacagagtt

SEQ ID NO: 190992 - DNA, 20 bp, synthetic construct
  source 1..20: mol_type = other DNA
tcctccaggatccacagagt

SEQ ID NO: 190993 - DNA, 20 bp, synthetic construct
  source 1..20: mol_type = other DNA
atcctccaggatccacagag

SEQ ID NO: 190994 - DNA, 20 bp, synthetic construct
  source 1..20: mol_type = other DNA
aatcctccaggatccacaga

SEQ ID NO: 190995 - DNA, 20 bp, synthetic construct
  source 1..20: mol_type = other DNA
gaatcctccaggatccacag

SEQ ID NO: 190996 - DNA, 20 bp, synthetic construct
  source 1..20: mol_type = other DNA
ggaatcctccaggatccaca

SEQ ID NO: 190997 - DNA, 20 bp, synthetic construct
  source 1..20: mol_type = other DNA
tggaatcctccaggatccac

SEQ ID NO: 190998 - DNA, 20 bp, synthetic construct
  source 1..20: mol_type = other DNA
ctggaatcctccaggatcca

SEQ ID NO: 190999 - DNA, 20 bp, synthetic construct
  source 1..20: mol_type = other DNA
gctggaatcctccaggatcc

SEQ ID NO: 191000 - DNA, 20 bp, synthetic construct
  source 1..20: mol_type = other DNA
cgctggaatcctccaggatc

SEQ ID NO: 191001 - DNA, 20 bp, synthetic construct
  source 1..20: mol_type = other DNA
acgctggaatcctccaggat

SEQ ID NO: 191002 - DNA, 20 bp, synthetic construct
  source 1..20: mol_type = other DNA
gacgctggaatcctccagga

SEQ ID NO: 191003 - DNA, 20 bp, synthetic construct
  source 1..20: mol_type = other DNA
agacgctggaatcctccagg

SEQ ID NO: 191004 - DNA, 20 bp, synthetic construct
  source 1..20: mol_type = other DNA
aagacgctggaatcctccag

SEQ ID NO: 191005 - DNA, 20 bp, synthetic construct
  source 1..20: mol_type = other DNA
aaagacgctggaatcctcca

SEQ ID NO: 191006 - DNA, 20 bp, synthetic construct
  source 1..20: mol_type = other DNA
aaaagacgctggaatcctcc

SEQ ID NO: 191007 - DNA, 20 bp, synthetic construct
  source 1..20: mol_type = other DNA
aaaaagacgctggaatcctc

SEQ ID NO: 191008 - DNA, 20 bp, synthetic construct
  source 1..20: mol_type = other DNA
aaaaaagacgctggaatcct

SEQ ID NO: 191009 - DNA, 20 bp, synthetic construct
  source 1..20: mol_type = other DNA
aaaaaaagacgctggaatcc

SEQ ID NO: 191010 - DNA, 20 bp, synthetic construct
  source 1..20: mol_type = other DNA
aaaaaaaagacgctggaatc

SEQ ID NO: 191011 - DNA, 20 bp, synthetic construct
  source 1..20: mol_type = other DNA
aaaaaaaaagacgctggaat

SEQ ID NO: 191012 - DNA, 20 bp, synthetic construct
  source 1..20: mol_type = other DNA
aaaaaaaaaagacgctggaa

SEQ ID NO: 191013 - DNA, 20 bp, synthetic construct
  source 1..20: mol_type = other DNA
aaaaaaaaaaagacgctgga

SEQ ID NO: 191014 - DNA, 20 bp, synthetic construct
  source 1..20: mol_type = other DNA
aaaaaaaaaaaagacgctgg

SEQ ID NO: 191015 - DNA, 20 bp, synthetic construct
  source 1..20: mol_type = other DNA
aaaaaaaaaaaaagacgctg

SEQ ID NO: 191016 - DNA, 20 bp, synthetic construct
  source 1..20: mol_type = other DNA
gaaaaaaaaaaaaagacgct

SEQ ID NO: 191017 - DNA, 20 bp, synthetic construct
  source 1..20: mol_type = other DNA
agaaaaaaaaaaaaagacgc

SEQ ID NO: 191018 - DNA, 20 bp, synthetic construct
  source 1..20: mol_type = other DNA
aagaaaaaaaaaaaaagacg

SEQ ID NO: 191019 - DNA, 20 bp, synthetic construct
  source 1..20: mol_type = other DNA
aaagaaaaaaaaaaaaagac

SEQ ID NO: 191020 - DNA, 20 bp, synthetic construct
  source 1..20: mol_type = other DNA
aaaagaaaaaaaaaaaaaga

SEQ ID NO: 191021 - DNA, 20 bp, synthetic construct
  source 1..20: mol_type = other DNA
aaaaagaaaaaaaaaaaaag

SEQ ID NO: 191022 - DNA, 20 bp, synthetic construct
  source 1..20: mol_type = other DNA
aaaaaagaaaaaaaaaaaaa

SEQ ID NO: 191023 - DNA, 20 bp, synthetic construct
  source 1..20: mol_type = other DNA
aaaaaaagaaaaaaaaaaaa

SEQ ID NO: 191024 - DNA, 20 bp, synthetic construct
  source 1..20: mol_type = other DNA
aaaaaaaagaaaaaaaaaaa

SEQ ID NO: 191025 - DNA, 20 bp, synthetic construct
  source 1..20: mol_type = other DNA
aaaaaaaaagaaaaaaaaaa

SEQ ID NO: 191026 - DNA, 20 bp, synthetic construct
  source 1..20: mol_type = other DNA
taaaaaaaaagaaaaaaaaa

SEQ ID NO: 191027 - DNA, 20 bp, synthetic construct
  source 1..20: mol_type = other DNA
ttaaaaaaaaagaaaaaaaa

SEQ ID NO: 191028 - DNA, 20 bp, synthetic construct
  source 1..20: mol_type = other DNA
cttaaaaaaaaagaaaaaaa

SEQ ID NO: 191029 - DNA, 20 bp, synthetic construct
  source 1..20: mol_type = other DNA
tcttaaaaaaaaagaaaaaa

SEQ ID NO: 191030 - DNA, 20 bp, synthetic construct
  source 1..20: mol_type = other DNA
gtcttaaaaaaaaagaaaaa

SEQ ID NO: 191031 - DNA, 20 bp, synthetic construct
  source 1..20: mol_type = other DNA
tgtcttaaaaaaaaagaaaa

SEQ ID NO: 191032 - DNA, 20 bp, synthetic construct
  source 1..20: mol_type = other DNA
ctgtcttaaaaaaaaagaaa

SEQ ID NO: 191033 - DNA, 20 bp, synthetic construct
  source 1..20: mol_type = other DNA
tctgtcttaaaaaaaaagaa

SEQ ID NO: 191034 - DNA, 20 bp, synthetic construct
  source 1..20: mol_type = other DNA
ctctgtcttaaaaaaaaaga

SEQ ID NO: 191035 - DNA, 20 bp, synthetic construct
  source 1..20: mol_type = other DNA
gctctgtcttaaaaaaaaag

SEQ ID NO: 191036 - DNA, 20 bp, synthetic construct
  source 1..20: mol_type = other DNA
ggctctgtcttaaaaaaaaa

SEQ ID NO: 191037 - DNA, 20 bp, synthetic construct
  source 1..20: mol_type = other DNA
aggctctgtcttaaaaaaaa

SEQ ID NO: 191038 - DNA, 20 bp, synthetic construct
  source 1..20: mol_type = other DNA
aaggctctgtcttaaaaaaa

SEQ ID NO: 191039 - DNA, 20 bp, synthetic construct
  source 1..20: mol_type = other DNA
caaggctctgtcttaaaaaa

SEQ ID NO: 191040 - DNA, 20 bp, synthetic construct
  source 1..20: mol_type = other DNA
gcaaggctctgtcttaaaaa

SEQ ID NO: 191041 - DNA, 20 bp, synthetic construct
  source 1..20: mol_type = other DNA
agcaaggctctgtcttaaaa

SEQ ID NO: 191042 - DNA, 20 bp, synthetic construct
  source 1..20: mol_type = other DNA
cagcaaggctctgtcttaaa

SEQ ID NO: 191043 - DNA, 20 bp, synthetic construct
  source 1..20: mol_type = other DNA
acagcaaggctctgtcttaa

SEQ ID NO: 191044 - DNA, 20 bp, synthetic construct
  source 1..20: mol_type = other DNA
gacagcaaggctctgtctta

SEQ ID NO: 191045 - DNA, 20 bp, synthetic construct
  source 1..20: mol_type = other DNA
tgacagcaaggctctgtctt

SEQ ID NO: 191046 - DNA, 20 bp, synthetic construct
  source 1..20: mol_type = other DNA
gtgacagcaaggctctgtct

SEQ ID NO: 191047 - DNA, 20 bp, synthetic construct
  source 1..20: mol_type = other DNA
ggtgacagcaaggctctgtc

SEQ ID NO: 191048 - DNA, 20 bp, synthetic construct
  source 1..20: mol_type = other DNA
gggtgacagcaaggctctgt

SEQ ID NO: 191049 - DNA, 20 bp, synthetic construct
  source 1..20: mol_type = other DNA
tgggtgacagcaaggctctg

SEQ ID NO: 191050 - DNA, 20 bp, synthetic construct
  source 1..20: mol_type = other DNA
ctgggtgacagcaaggctct

SEQ ID NO: 191051 - DNA, 20 bp, synthetic construct
  source 1..20: mol_type = other DNA
cctgggtgacagcaaggctc

SEQ ID NO: 191052 - DNA, 20 bp, synthetic construct
  source 1..20: mol_type = other DNA
gcctgggtgacagcaaggct

SEQ ID NO: 191053 - DNA, 20 bp, synthetic construct
  source 1..20: mol_type = other DNA
agcctgggtgacagcaaggc

SEQ ID NO: 191054 - DNA, 20 bp, synthetic construct
  source 1..20: mol_type = other DNA
cagcctgggtgacagcaagg

SEQ ID NO: 191055 - DNA, 20 bp, synthetic construct
  source 1..20: mol_type = other DNA
ccagcctgggtgacagcaag

SEQ ID NO: 191056 - DNA, 20 bp, synthetic construct
  source 1..20: mol_type = other DNA
tccagcctgggtgacagcaa

SEQ ID NO: 191057 - DNA, 20 bp, synthetic construct
  source 1..20: mol_type = other DNA
ctccagcctgggtgacagca

SEQ ID NO: 191058 - DNA, 20 bp, synthetic construct
  source 1..20: mol_type = other DNA
actccagcctgggtgacagc

SEQ ID NO: 191059 - DNA, 20 bp, synthetic construct
  source 1..20: mol_type = other DNA
cactccagcctgggtgacag

SEQ ID NO: 191060 - DNA, 20 bp, synthetic construct
  source 1..20: mol_type = other DNA
gcactccagcctgggtgaca

SEQ ID NO: 191061 - DNA, 20 bp, synthetic construct
  source 1..20: mol_type = other DNA
tgcactccagcctgggtgac

SEQ ID NO: 191062 - DNA, 20 bp, synthetic construct
  source 1..20: mol_type = other DNA
ctgcactccagcctgggtga

SEQ ID NO: 191063 - DNA, 20 bp, synthetic construct
  source 1..20: mol_type = other DNA
actgcactccagcctgggtg

SEQ ID NO: 191064 - DNA, 20 bp, synthetic construct
  source 1..20: mol_type = other DNA
cactgcactccagcctgggt

SEQ ID NO: 191065 - DNA, 20 bp, synthetic construct
  source 1..20: mol_type = other DNA
ccactgcactccagcctggg

SEQ ID NO: 191066 - DNA, 20 bp, synthetic construct
  source 1..20: mol_type = other DNA
gccactgcactccagcctgg

SEQ ID NO: 191067 - DNA, 20 bp, synthetic construct
  source 1..20: mol_type = other DNA
tgccactgcactccagcctg

SEQ ID NO: 191068 - DNA, 20 bp, synthetic construct
  source 1..20: mol_type = other DNA
gtgccactgcactccagcct

SEQ ID NO: 191069 - DNA, 20 bp, synthetic construct
  source 1..20: mol_type = other DNA
cgtgccactgcactccagcc

SEQ ID NO: 191070 - DNA, 20 bp, synthetic construct
  source 1..20: mol_type = other DNA
tcgtgccactgcactccagc

SEQ ID NO: 191071 - DNA, 20 bp, synthetic construct
  source 1..20: mol_type = other DNA
atcgtgccactgcactccag

SEQ ID NO: 191072 - DNA, 20 bp, synthetic construct
  source 1..20: mol_type = other DNA
gatcgtgccactgcactcca

SEQ ID NO: 191073 - DNA, 20 bp, synthetic construct
  source 1..20: mol_type = other DNA
agatcgtgccactgcactcc

SEQ ID NO: 191074 - DNA, 20 bp, synthetic construct
  source 1..20: mol_type = other DNA
gagatcgtgccactgcactc

SEQ ID NO: 191075 - DNA, 20 bp, synthetic construct
  source 1..20: mol_type = other DNA
tgagatcgtgccactgcact

SEQ ID NO: 191076 - DNA, 20 bp, synthetic construct
  source 1..20: mol_type = other DNA
ctgagatcgtgccactgcac

SEQ ID NO: 191077 - DNA, 20 bp, synthetic construct
  source 1..20: mol_type = other DNA
actgagatcgtgccactgca

SEQ ID NO: 191078 - DNA, 20 bp, synthetic construct
  source 1..20: mol_type = other DNA
aactgagatcgtgccactgc

SEQ ID NO: 191079 - DNA, 20 bp, synthetic construct
  source 1..20: mol_type = other DNA
gaactgagatcgtgccactg

SEQ ID NO: 191080 - DNA, 20 bp, synthetic construct
  source 1..20: mol_type = other DNA
tgaactgagatcgtgccact

SEQ ID NO: 191081 - DNA, 20 bp, synthetic construct
  source 1..20: mol_type = other DNA
gtgaactgagatcgtgccac

SEQ ID NO: 191082 - DNA, 20 bp, synthetic construct
  source 1..20: mol_type = other DNA
agtgaactgagatcgtgcca

SEQ ID NO: 191083 - DNA, 20 bp, synthetic construct
  source 1..20: mol_type = other DNA
cagtgaactgagatcgtgcc

SEQ ID NO: 191084 - DNA, 20 bp, synthetic construct
  source 1..20: mol_type = other DNA
gcagtgaactgagatcgtgc

SEQ ID NO: 191085 - DNA, 20 bp, synthetic construct
  source 1..20: mol_type = other DNA
tgcagtgaactgagatcgtg

SEQ ID NO: 191086 - DNA, 20 bp, synthetic construct
  source 1..20: mol_type = other DNA
ttgcagtgaactgagatcgt

SEQ ID NO: 191087 - DNA, 20 bp, synthetic construct
  source 1..20: mol_type = other DNA
gttgcagtgaactgagatcg

SEQ ID NO: 191088 - DNA, 20 bp, synthetic construct
  source 1..20: mol_type = other DNA
ggttgcagtgaactgagatc

SEQ ID NO: 191089 - DNA, 20 bp, synthetic construct
  source 1..20: mol_type = other DNA
aggttgcagtgaactgagat

SEQ ID NO: 191090 - DNA, 20 bp, synthetic construct
  source 1..20: mol_type = other DNA
gaggttgcagtgaactgaga

SEQ ID NO: 191091 - DNA, 20 bp, synthetic construct
  source 1..20: mol_type = other DNA
ggaggttgcagtgaactgag

SEQ ID NO: 191092 - DNA, 20 bp, synthetic construct
  source 1..20: mol_type = other DNA
cggaggttgcagtgaactga

SEQ ID NO: 191093 - DNA, 20 bp, synthetic construct
  source 1..20: mol_type = other DNA
gcggaggttgcagtgaactg

SEQ ID NO: 191094 - DNA, 20 bp, synthetic construct
  source 1..20: mol_type = other DNA
ggcggaggttgcagtgaact

SEQ ID NO: 191095 - DNA, 20 bp, synthetic construct
  source 1..20: mol_type = other DNA
aggcggaggttgcagtgaac

SEQ ID NO: 191096 - DNA, 20 bp, synthetic construct
  source 1..20: mol_type = other DNA
gaggcggaggttgcagtgaa

SEQ ID NO: 191097 - DNA, 20 bp, synthetic construct
  source 1..20: mol_type = other DNA
ggaggcggaggttgcagtga

SEQ ID NO: 191098 - DNA, 20 bp, synthetic construct
  source 1..20: mol_type = other DNA
gggaggcggaggttgcagtg

SEQ ID NO: 191099 - DNA, 20 bp, synthetic construct
  source 1..20: mol_type = other DNA
cgggaggcggaggttgcagt

SEQ ID NO: 191100 - DNA, 20 bp, synthetic construct
  source 1..20: mol_type = other DNA
ccgggaggcggaggttgcag

SEQ ID NO: 191101 - DNA, 20 bp, synthetic construct
  source 1..20: mol_type = other DNA
cccgggaggcggaggttgca

SEQ ID NO: 191102 - DNA, 20 bp, synthetic construct
  source 1..20: mol_type = other DNA
acccgggaggcggaggttgc

SEQ ID NO: 191103 - DNA, 20 bp, synthetic construct
  source 1..20: mol_type = other DNA
aacccgggaggcggaggttg

SEQ ID NO: 191104 - DNA, 20 bp, synthetic construct
  source 1..20: mol_type = other DNA
gaacccgggaggcggaggtt

SEQ ID NO: 191105 - DNA, 20 bp, synthetic construct
  source 1..20: mol_type = other DNA
tgaacccgggaggcggaggt

SEQ ID NO: 191106 - DNA, 20 bp, synthetic construct
  source 1..20: mol_type = other DNA
ttgaacccgggaggcggagg

SEQ ID NO: 191107 - DNA, 20 bp, synthetic construct
  source 1..20: mol_type = other DNA
cttgaacccgggaggcggag

SEQ ID NO: 191108 - DNA, 20 bp, synthetic construct
  source 1..20: mol_type = other DNA
gcttgaacccgggaggcgga

SEQ ID NO: 191109 - DNA, 20 bp, synthetic construct
  source 1..20: mol_type = other DNA
cgcttgaacccgggaggcgg

SEQ ID NO: 191110 - DNA, 20 bp, synthetic construct
  source 1..20: mol_type = other DNA
tcgcttgaacccgggaggcg

SEQ ID NO: 191111 - DNA, 20 bp, synthetic construct
  source 1..20: mol_type = other DNA
atcgcttgaacccgggaggc

SEQ ID NO: 191112 - DNA, 20 bp, synthetic construct
  source 1..20: mol_type = other DNA
aatcgcttgaacccgggagg

SEQ ID NO: 191113 - DNA, 20 bp, synthetic construct
  source 1..20: mol_type = other DNA
gaatcgcttgaacccgggag

SEQ ID NO: 191114 - DNA, 20 bp, synthetic construct
  source 1..20: mol_type = other DNA
agaatcgcttgaacccggga

SEQ ID NO: 191115 - DNA, 20 bp, synthetic construct
  source 1..20: mol_type = other DNA
gagaatcgcttgaacccggg

SEQ ID NO: 191116 - DNA, 20 bp, synthetic construct
  source 1..20: mol_type = other DNA
tgagaatcgcttgaacccgg

SEQ ID NO: 191117 - DNA, 20 bp, synthetic construct
  source 1..20: mol_type = other DNA
atgagaatcgcttgaacccg

SEQ ID NO: 191118 - DNA, 20 bp, synthetic construct
  source 1..20: mol_type = other DNA
catgagaatcgcttgaaccc

SEQ ID NO: 191119 - DNA, 20 bp, synthetic construct
  source 1..20: mol_type = other DNA
acatgagaatcgcttgaacc

SEQ ID NO: 191120 - DNA, 20 bp, synthetic construct
  source 1..20: mol_type = other DNA
gacatgagaatcgcttgaac

SEQ ID NO: 191121 - DNA, 20 bp, synthetic construct
  source 1..20: mol_type = other DNA
agacatgagaatcgcttgaa

SEQ ID NO: 191122 - DNA, 20 bp, synthetic construct
  source 1..20: mol_type = other DNA
gagacatgagaatcgcttga

SEQ ID NO: 191123 - DNA, 20 bp, synthetic construct
  source 1..20: mol_type = other DNA
cgagacatgagaatcgcttg

SEQ ID NO: 191124 - DNA, 20 bp, synthetic construct
  source 1..20: mol_type = other DNA
ccgagacatgagaatcgctt

SEQ ID NO: 191125 - DNA, 20 bp, synthetic construct
  source 1..20: mol_type = other DNA
gccgagacatgagaatcgct

SEQ ID NO: 191126 - DNA, 20 bp, synthetic construct
  source 1..20: mol_type = other DNA
ggccgagacatgagaatcgc

SEQ ID NO: 191127 - DNA, 20 bp, synthetic construct
  source 1..20: mol_type = other DNA
aggccgagacatgagaatcg

SEQ ID NO: 191128 - DNA, 20 bp, synthetic construct
  source 1..20: mol_type = other DNA
gaggccgagacatgagaatc

SEQ ID NO: 191129 - DNA, 20 bp, synthetic construct
  source 1..20: mol_type = other DNA
ggaggccgagacatgagaat

SEQ ID NO: 191130 - DNA, 20 bp, synthetic construct
  source 1..20: mol_type = other DNA
gggaggccgagacatgagaa

SEQ ID NO: 191131 - DNA, 20 bp, synthetic construct
  source 1..20: mol_type = other DNA
cgggaggccgagacatgaga

SEQ ID NO: 191132 - DNA, 20 bp, synthetic construct
  source 1..20: mol_type = other DNA
tcgggaggccgagacatgag

SEQ ID NO: 191133 - DNA, 20 bp, synthetic construct
  source 1..20: mol_type = other DNA
ctcgggaggccgagacatga

SEQ ID NO: 191134 - DNA, 20 bp, synthetic construct
  source 1..20: mol_type = other DNA
gctcgggaggccgagacatg

SEQ ID NO: 191135 - DNA, 20 bp, synthetic construct
  source 1..20: mol_type = other DNA
tgctcgggaggccgagacat

SEQ ID NO: 191136 - DNA, 20 bp, synthetic construct
  source 1..20: mol_type = other DNA
ctgctcgggaggccgagaca

SEQ ID NO: 191137 - DNA, 20 bp, synthetic construct
  source 1..20: mol_type = other DNA
gctgctcgggaggccgagac

SEQ ID NO: 191138 - DNA, 20 bp, synthetic construct
  source 1..20: mol_type = other DNA
tgctgctcgggaggccgaga

SEQ ID NO: 191139 - DNA, 20 bp, synthetic construct
  source 1..20: mol_type = other DNA
ttgctgctcgggaggccgag

SEQ ID NO: 191140 - DNA, 20 bp, synthetic construct
  source 1..20: mol_type = other DNA
cttgctgctcgggaggccga

SEQ ID NO: 191141 - DNA, 20 bp, synthetic construct
  source 1..20: mol_type = other DNA
tcttgctgctcgggaggccg

SEQ ID NO: 191142 - DNA, 20 bp, synthetic construct
  source 1..20: mol_type = other DNA
gtcttgctgctcgggaggcc

SEQ ID NO: 191143 - DNA, 20 bp, synthetic construct
  source 1..20: mol_type = other DNA
agtcttgctgctcgggaggc

SEQ ID NO: 191144 - DNA, 20 bp, synthetic construct
  source 1..20: mol_type = other DNA
tagtcttgctgctcgggagg

SEQ ID NO: 191145 - DNA, 20 bp, synthetic construct
  source 1..20: mol_type = other DNA
gtagtcttgctgctcgggag

SEQ ID NO: 191146 - DNA, 20 bp, synthetic construct
  source 1..20: mol_type = other DNA
tgtagtcttgctgctcggga

SEQ ID NO: 191147 - DNA, 20 bp, synthetic construct
  source 1..20: mol_type = other DNA
ctgtagtcttgctgctcggg

SEQ ID NO: 191148 - DNA, 20 bp, synthetic construct
  source 1..20: mol_type = other DNA
cctgtagtcttgctgctcgg

SEQ ID NO: 191149 - DNA, 20 bp, synthetic construct
  source 1..20: mol_type = other DNA
acctgtagtcttgctgctcg

SEQ ID NO: 191150 - DNA, 20 bp, synthetic construct
  source 1..20: mol_type = other DNA
cacctgtagtcttgctgctc

SEQ ID NO: 191151 - DNA, 20 bp, synthetic construct
  source 1..20: mol_type = other DNA
gcacctgtagtcttgctgct

SEQ ID NO: 191152 - DNA, 20 bp, synthetic construct
  source 1..20: mol_type = other DNA
cgcacctgtagtcttgctgc

SEQ ID NO: 191153 - DNA, 20 bp, synthetic construct
  source 1..20: mol_type = other DNA
gcgcacctgtagtcttgctg

SEQ ID NO: 191154 - DNA, 20 bp, synthetic construct
  source 1..20: mol_type = other DNA
tgcgcacctgtagtcttgct

SEQ ID NO: 191155 - DNA, 20 bp, synthetic construct
  source 1..20: mol_type = other DNA
gtgcgcacctgtagtcttgc

SEQ ID NO: 191156 - DNA, 20 bp, synthetic construct
  source 1..20: mol_type = other DNA
ggtgcgcacctgtagtcttg

SEQ ID NO: 191157 - DNA, 20 bp, synthetic construct
  source 1..20: mol_type = other DNA
tggtgcgcacctgtagtctt

SEQ ID NO: 191158 - DNA, 20 bp, synthetic construct
  source 1..20: mol_type = other DNA
gtggtgcgcacctgtagtct

SEQ ID NO: 191159 - DNA, 20 bp, synthetic construct
  source 1..20: mol_type = other DNA
ggtggtgcgcacctgtagtc

SEQ ID NO: 191160 - DNA, 20 bp, synthetic construct
  source 1..20: mol_type = other DNA
tggtggtgcgcacctgtagt

SEQ ID NO: 191161 - DNA, 20 bp, synthetic construct
  source 1..20: mol_type = other DNA
atggtggtgcgcacctgtag

SEQ ID NO: 191162 - DNA, 20 bp, synthetic construct
  source 1..20: mol_type = other DNA
catggtggtgcgcacctgta

SEQ ID NO: 191163 - DNA, 20 bp, synthetic construct
  source 1..20: mol_type = other DNA
gcatggtggtgcgcacctgt

SEQ ID NO: 191164 - DNA, 20 bp, synthetic construct
  source 1..20: mol_type = other DNA
ggcatggtggtgcgcacctg

SEQ ID NO: 191165 - DNA, 20 bp, synthetic construct
  source 1..20: mol_type = other DNA
gggcatggtggtgcgcacct

SEQ ID NO: 191166 - DNA, 20 bp, synthetic construct
  source 1..20: mol_type = other DNA
cgggcatggtggtgcgcacc

SEQ ID NO: 191167 - DNA, 20 bp, synthetic construct
  source 1..20: mol_type = other DNA
tcgggcatggtggtgcgcac

SEQ ID NO: 191168 - DNA, 20 bp, synthetic construct
  source 1..20: mol_type = other DNA
gtcgggcatggtggtgcgca

SEQ ID NO: 191169 - DNA, 20 bp, synthetic construct
  source 1..20: mol_type = other DNA
agtcgggcatggtggtgcgc

SEQ ID NO: 191170 - DNA, 20 bp, synthetic construct
  source 1..20: mol_type = other DNA
tagtcgggcatggtggtgcg

SEQ ID NO: 191171 - DNA, 20 bp, synthetic construct
  source 1..20: mol_type = other DNA
ttagtcgggcatggtggtgc

SEQ ID NO: 191172 - DNA, 20 bp, synthetic construct
  source 1..20: mol_type = other DNA
attagtcgggcatggtggtg

SEQ ID NO: 191173 - DNA, 20 bp, synthetic construct
  source 1..20: mol_type = other DNA
aattagtcgggcatggtggt

SEQ ID NO: 191174 - DNA, 20 bp, synthetic construct
  source 1..20: mol_type = other DNA
aaattagtcgggcatggtgg

SEQ ID NO: 191175 - DNA, 20 bp, synthetic construct
  source 1..20: mol_type = other DNA
aaaattagtcgggcatggtg

SEQ ID NO: 191176 - DNA, 20 bp, synthetic construct
  source 1..20: mol_type = other DNA
aaaaattagtcgggcatggt

SEQ ID NO: 191177 - DNA, 20 bp, synthetic construct
  source 1..20: mol_type = other DNA
caaaaattagtcgggcatgg

SEQ ID NO: 191178 - DNA, 20 bp, synthetic construct
  source 1..20: mol_type = other DNA
acaaaaattagtcgggcatg

SEQ ID NO: 191179 - DNA, 20 bp, synthetic construct
  source 1..20: mol_type = other DNA
tacaaaaattagtcgggcat

SEQ ID NO: 191180 - DNA, 20 bp, synthetic construct
  source 1..20: mol_type = other DNA
atacaaaaattagtcgggca

SEQ ID NO: 191181 - DNA, 20 bp, synthetic construct
  source 1..20: mol_type = other DNA
aatacaaaaattagtcgggc

SEQ ID NO: 191182 - DNA, 20 bp, synthetic construct
  source 1..20: mol_type = other DNA
taatacaaaaattagtcggg

SEQ ID NO: 191183 - DNA, 20 bp, synthetic construct
  source 1..20: mol_type = other DNA
ataatacaaaaattagtcgg

SEQ ID NO: 191184 - DNA, 20 bp, synthetic construct
  source 1..20: mol_type = other DNA
aataatacaaaaattagtcg

SEQ ID NO: 191185 - DNA, 20 bp, synthetic construct
  source 1..20: mol_type = other DNA
taataatacaaaaattagtc

SEQ ID NO: 191186 - DNA, 20 bp, synthetic construct
  source 1..20: mol_type = other DNA
ctaataatacaaaaattagt

SEQ ID NO: 191187 - DNA, 20 bp, synthetic construct
  source 1..20: mol_type = other DNA
actaataatacaaaaattag

SEQ ID NO: 191188 - DNA, 20 bp, synthetic construct
  source 1..20: mol_type = other DNA
tactaataatacaaaaatta

SEQ ID NO: 191189 - DNA, 20 bp, synthetic construct
  source 1..20: mol_type = other DNA
ctactaataatacaaaaatt

SEQ ID NO: 191190 - DNA, 20 bp, synthetic construct
  source 1..20: mol_type = other DNA
tctactaataatacaaaaat

SEQ ID NO: 191191 - DNA, 20 bp, synthetic construct
  source 1..20: mol_type = other DNA
ctctactaataatacaaaaa

SEQ ID NO: 191192 - DNA, 20 bp, synthetic construct
  source 1..20: mol_type = other DNA
tctctactaataatacaaaa

SEQ ID NO: 191193 - DNA, 20 bp, synthetic construct
  source 1..20: mol_type = other DNA
gtctctactaataatacaaa

SEQ ID NO: 191194 - DNA, 20 bp, synthetic construct
  source 1..20: mol_type = other DNA
cgtctctactaataatacaa

SEQ ID NO: 191195 - DNA, 20 bp, synthetic construct
  source 1..20: mol_type = other DNA
ccgtctctactaataataca

SEQ ID NO: 191196 - DNA, 20 bp, synthetic construct
  source 1..20: mol_type = other DNA
cccgtctctactaataatac

SEQ ID NO: 191197 - DNA, 20 bp, synthetic construct
  source 1..20: mol_type = other DNA
ccccgtctctactaataata

SEQ ID NO: 191198 - DNA, 20 bp, synthetic construct
  source 1..20: mol_type = other DNA
cccccgtctctactaataat

SEQ ID NO: 191199 - DNA, 20 bp, synthetic construct
  source 1..20: mol_type = other DNA
acccccgtctctactaataa

SEQ ID NO: 191200 - DNA, 20 bp, synthetic construct
  source 1..20: mol_type = other DNA
aacccccgtctctactaata

SEQ ID NO: 191201 - DNA, 20 bp, synthetic construct
  source 1..20: mol_type = other DNA
aaacccccgtctctactaat

SEQ ID NO: 191202 - DNA, 20 bp, synthetic construct
  source 1..20: mol_type = other DNA
gaaacccccgtctctactaa

SEQ ID NO: 191203 - DNA, 20 bp, synthetic construct
  source 1..20: mol_type = other DNA
tgaaacccccgtctctacta

SEQ ID NO: 191204 - DNA, 20 bp, synthetic construct
  source 1..20: mol_type = other DNA
gtgaaacccccgtctctact

SEQ ID NO: 191205 - DNA, 20 bp, synthetic construct
  source 1..20: mol_type = other DNA
agtgaaacccccgtctctac

SEQ ID NO: 191206 - DNA, 20 bp, synthetic construct
  source 1..20: mol_type = other DNA
gagtgaaacccccgtctcta

SEQ ID NO: 191207 - DNA, 20 bp, synthetic construct
  source 1..20: mol_type = other DNA
agagtgaaacccccgtctct

SEQ ID NO: 191208 - DNA, 20 bp, synthetic construct
  source 1..20: mol_type = other DNA
cagagtgaaacccccgtctc

SEQ ID NO: 191209 - DNA, 20 bp, synthetic construct
  source 1..20: mol_type = other DNA
acagagtgaaacccccgtct

SEQ ID NO: 191210 - DNA, 20 bp, synthetic construct
  source 1..20: mol_type = other DNA
aacagagtgaaacccccgtc

SEQ ID NO: 191211 - DNA, 20 bp, synthetic construct
  source 1..20: mol_type = other DNA
caacagagtgaaacccccgt

SEQ ID NO: 191212 - DNA, 20 bp, synthetic construct
  source 1..20: mol_type = other DNA
ccaacagagtgaaacccccg

SEQ ID NO: 191213 - DNA, 20 bp, synthetic construct
  source 1..20: mol_type = other DNA
gccaacagagtgaaaccccc

SEQ ID NO: 191214 - DNA, 20 bp, synthetic construct
  source 1..20: mol_type = other DNA
ggccaacagagtgaaacccc

SEQ ID NO: 191215 - DNA, 20 bp, synthetic construct
  source 1..20: mol_type = other DNA
tggccaacagagtgaaaccc

SEQ ID NO: 191216 - DNA, 20 bp, synthetic construct
  source 1..20: mol_type = other DNA
ctggccaacagagtgaaacc

SEQ ID NO: 191217 - DNA, 20 bp, synthetic construct
  source 1..20: mol_type = other DNA
cctggccaacagagtgaaac

SEQ ID NO: 191218 - DNA, 20 bp, synthetic construct
  source 1..20: mol_type = other DNA
gcctggccaacagagtgaaa

SEQ ID NO: 191219 - DNA, 20 bp, synthetic construct
  source 1..20: mol_type = other DNA
agcctggccaacagagtgaa

SEQ ID NO: 191220 - DNA, 20 bp, synthetic construct
  source 1..20: mol_type = other DNA
cagcctggccaacagagtga

SEQ ID NO: 191221 - DNA, 20 bp, synthetic construct
  source 1..20: mol_type = other DNA
ccagcctggccaacagagtg

SEQ ID NO: 191222 - DNA, 20 bp, synthetic construct
  source 1..20: mol_type = other DNA
accagcctggccaacagagt

SEQ ID NO: 191223 - DNA, 20 bp, synthetic construct
  source 1..20: mol_type = other DNA
gaccagcctggccaacagag

SEQ ID NO: 191224 - DNA, 20 bp, synthetic construct
  source 1..20: mol_type = other DNA
agaccagcctggccaacaga

SEQ ID NO: 191225 - DNA, 20 bp, synthetic construct
  source 1..20: mol_type = other DNA
gagaccagcctggccaacag

SEQ ID NO: 191226 - DNA, 20 bp, synthetic construct
  source 1..20: mol_type = other DNA
tgagaccagcctggccaaca

SEQ ID NO: 191227 - DNA, 20 bp, synthetic construct
  source 1..20: mol_type = other DNA
ttgagaccagcctggccaac

SEQ ID NO: 191228 - DNA, 20 bp, synthetic construct
  source 1..20: mol_type = other DNA
tttgagaccagcctggccaa

SEQ ID NO: 191229 - DNA, 20 bp, synthetic construct
  source 1..20: mol_type = other DNA
gtttgagaccagcctggcca

SEQ ID NO: 191230 - DNA, 20 bp, synthetic construct
  source 1..20: mol_type = other DNA
agtttgagaccagcctggcc

SEQ ID NO: 191231 - DNA, 20 bp, synthetic construct
  source 1..20: mol_type = other DNA
gagtttgagaccagcctggc

SEQ ID NO: 191232 - DNA, 20 bp, synthetic construct
  source 1..20: mol_type = other DNA
ggagtttgagaccagcctgg

SEQ ID NO: 191233 - DNA, 20 bp, synthetic construct
  source 1..20: mol_type = other DNA
aggagtttgagaccagcctg

SEQ ID NO: 191234 - DNA, 20 bp, synthetic construct
  source 1..20: mol_type = other DNA
caggagtttgagaccagcct

SEQ ID NO: 191235 - DNA, 20 bp, synthetic construct
  source 1..20: mol_type = other DNA
tcaggagtttgagaccagcc

SEQ ID NO: 191236 - DNA, 20 bp, synthetic construct
  source 1..20: mol_type = other DNA
gtcaggagtttgagaccagc

SEQ ID NO: 191237 - DNA, 20 bp, synthetic construct
  source 1..20: mol_type = other DNA
ggtcaggagtttgagaccag

SEQ ID NO: 191238 - DNA, 20 bp, synthetic construct
  source 1..20: mol_type = other DNA
aggtcaggagtttgagacca

SEQ ID NO: 191239 - DNA, 20 bp, synthetic construct
  source 1..20: mol_type = other DNA
gaggtcaggagtttgagacc

SEQ ID NO: 191240 - DNA, 20 bp, synthetic construct
  source 1..20: mol_type = other DNA
tgaggtcaggagtttgagac

SEQ ID NO: 191241 - DNA, 20 bp, synthetic construct
  source 1..20: mol_type = other DNA
ctgaggtcaggagtttgaga

SEQ ID NO: 191242 - DNA, 20 bp, synthetic construct
  source 1..20: mol_type = other DNA
cctgaggtcaggagtttgag

SEQ ID NO: 191243 - DNA, 20 bp, synthetic construct
  source 1..20: mol_type = other DNA
acctgaggtcaggagtttga

SEQ ID NO: 191244 - DNA, 20 bp, synthetic construct
  source 1..20: mol_type = other DNA
cacctgaggtcaggagtttg

SEQ ID NO: 191245 - DNA, 20 bp, synthetic construct
  source 1..20: mol_type = other DNA
tcacctgaggtcaggagttt

SEQ ID NO: 191246 - DNA, 20 bp, synthetic construct
  source 1..20: mol_type = other DNA
atcacctgaggtcaggagtt

SEQ ID NO: 191247 - DNA, 20 bp, synthetic construct
  source 1..20: mol_type = other DNA
gatcacctgaggtcaggagt

SEQ ID NO: 191248 - DNA, 20 bp, synthetic construct
  source 1..20: mol_type = other DNA
ggatcacctgaggtcaggag

SEQ ID NO: 191249 - DNA, 20 bp, synthetic construct
  source 1..20: mol_type = other DNA
tggatcacctgaggtcagga

SEQ ID NO: 191250 - DNA, 20 bp, synthetic construct
  source 1..20: mol_type = other DNA
gtggatcacctgaggtcagg

SEQ ID NO: 191251 - DNA, 20 bp, synthetic construct
  source 1..20: mol_type = other DNA
ggtggatcacctgaggtcag

SEQ ID NO: 191252 - DNA, 20 bp, synthetic construct
  source 1..20: mol_type = other DNA
gggtggatcacctgaggtca

SEQ ID NO: 191253 - DNA, 20 bp, synthetic construct
  source 1..20: mol_type = other DNA
cgggtggatcacctgaggtc

SEQ ID NO: 191254 - DNA, 20 bp, synthetic construct
  source 1..20: mol_type = other DNA
gcgggtggatcacctgaggt

SEQ ID NO: 191255 - DNA, 20 bp, synthetic construct
  source 1..20: mol_type = other DNA
ggcgggtggatcacctgagg

SEQ ID NO: 191256 - DNA, 20 bp, synthetic construct
  source 1..20: mol_type = other DNA
aggcgggtggatcacctgag

SEQ ID NO: 191257 - DNA, 20 bp, synthetic construct
  source 1..20: mol_type = other DNA
gaggcgggtggatcacctga

SEQ ID NO: 191258 - DNA, 20 bp, synthetic construct
  source 1..20: mol_type = other DNA
tgaggcgggtggatcacctg

SEQ ID NO: 191259 - DNA, 20 bp, synthetic construct
  source 1..20: mol_type = other DNA
ctgaggcgggtggatcacct

SEQ ID NO: 191260 - DNA, 20 bp, synthetic construct
  source 1..20: mol_type = other DNA
gctgaggcgggtggatcacc

SEQ ID NO: 191261 - DNA, 20 bp, synthetic construct
  source 1..20: mol_type = other DNA
ggctgaggcgggtggatcac

SEQ ID NO: 191262 - DNA, 20 bp, synthetic construct
  source 1..20: mol_type = other DNA
aggctgaggcgggtggatca

SEQ ID NO: 191263 - DNA, 20 bp, synthetic construct
  source 1..20: mol_type = other DNA
gaggctgaggcgggtggatc

SEQ ID NO: 191264 - DNA, 20 bp, synthetic construct
  source 1..20: mol_type = other DNA
ggaggctgaggcgggtggat

SEQ ID NO: 191265 - DNA, 20 bp, synthetic construct
  source 1..20: mol_type = other DNA
gggaggctgaggcgggtgga

SEQ ID NO: 191266 - DNA, 20 bp, synthetic construct
  source 1..20: mol_type = other DNA
tgggaggctgaggcgggtgg

SEQ ID NO: 191267 - DNA, 20 bp, synthetic construct
  source 1..20: mol_type = other DNA
ttgggaggctgaggcgggtg

SEQ ID NO: 191268 - DNA, 20 bp, synthetic construct
  source 1..20: mol_type = other DNA
tttgggaggctgaggcgggt

SEQ ID NO: 191269 - DNA, 20 bp, synthetic construct
  source 1..20: mol_type = other DNA
ctttgggaggctgaggcggg

SEQ ID NO: 191270 - DNA, 20 bp, synthetic construct
  source 1..20: mol_type = other DNA
actttgggaggctgaggcgg

SEQ ID NO: 191271 - DNA, 20 bp, synthetic construct
  source 1..20: mol_type = other DNA
cactttgggaggctgaggcg

SEQ ID NO: 191272 - DNA, 20 bp, synthetic construct
  source 1..20: mol_type = other DNA
gcactttgggaggctgaggc

SEQ ID NO: 191273 - DNA, 20 bp, synthetic construct
  source 1..20: mol_type = other DNA
agcactttgggaggctgagg

SEQ ID NO: 191274 - DNA, 20 bp, synthetic construct
  source 1..20: mol_type = other DNA
cagcactttgggaggctgag

SEQ ID NO: 191275 - DNA, 20 bp, synthetic construct
  source 1..20: mol_type = other DNA
ccagcactttgggaggctga

SEQ ID NO: 191276 - DNA, 20 bp, synthetic construct
  source 1..20: mol_type = other DNA
cccagcactttgggaggctg

SEQ ID NO: 191277 - DNA, 20 bp, synthetic construct
  source 1..20: mol_type = other DNA
tcccagcactttgggaggct

SEQ ID NO: 191278 - DNA, 20 bp, synthetic construct
  source 1..20: mol_type = other DNA
atcccagcactttgggaggc

SEQ ID NO: 191279 - DNA, 20 bp, synthetic construct
  source 1..20: mol_type = other DNA
aatcccagcactttgggagg

SEQ ID NO: 191280 - DNA, 20 bp, synthetic construct
  source 1..20: mol_type = other DNA
taatcccagcactttgggag

SEQ ID NO: 191281 - DNA, 20 bp, synthetic construct
  source 1..20: mol_type = other DNA
gtaatcccagcactttggga

SEQ ID NO: 191282 - DNA, 20 bp, synthetic construct
  source 1..20: mol_type = other DNA
tgtaatcccagcactttggg

SEQ ID NO: 191283 - DNA, 20 bp, synthetic construct
  source 1..20: mol_type = other DNA
ctgtaatcccagcactttgg

SEQ ID NO: 191284 - DNA, 20 bp, synthetic construct
  source 1..20: mol_type = other DNA
cctgtaatcccagcactttg

SEQ ID NO: 191285 - DNA, 20 bp, synthetic construct
  source 1..20: mol_type = other DNA
gcctgtaatcccagcacttt

SEQ ID NO: 191286 - DNA, 20 bp, synthetic construct
  source 1..20: mol_type = other DNA
tgcctgtaatcccagcactt

SEQ ID NO: 191287 - DNA, 20 bp, synthetic construct
  source 1..20: mol_type = other DNA
atgcctgtaatcccagcact

SEQ ID NO: 191288 - DNA, 20 bp, synthetic construct
  source 1..20: mol_type = other DNA
catgcctgtaatcccagcac

SEQ ID NO: 191289 - DNA, 20 bp, synthetic construct
  source 1..20: mol_type = other DNA
tcatgcctgtaatcccagca

SEQ ID NO: 191290 - DNA, 20 bp, synthetic construct
  source 1..20: mol_type = other DNA
ctcatgcctgtaatcccagc

SEQ ID NO: 191291 - DNA, 20 bp, synthetic construct
  source 1..20: mol_type = other DNA
gctcatgcctgtaatcccag

SEQ ID NO: 191292 - DNA, 20 bp, synthetic construct
  source 1..20: mol_type = other DNA
ggctcatgcctgtaatccca

SEQ ID NO: 191293 - DNA, 20 bp, synthetic construct
  source 1..20: mol_type = other DNA
tggctcatgcctgtaatccc

SEQ ID NO: 191294 - DNA, 20 bp, synthetic construct
  source 1..20: mol_type = other DNA
gtggctcatgcctgtaatcc

SEQ ID NO: 191295 - DNA, 20 bp, synthetic construct
  source 1..20: mol_type = other DNA
ggtggctcatgcctgtaatc

SEQ ID NO: 191296 - DNA, 20 bp, synthetic construct
  source 1..20: mol_type = other DNA
tggtggctcatgcctgtaat

SEQ ID NO: 191297 - DNA, 20 bp, synthetic construct
  source 1..20: mol_type = other DNA
atggtggctcatgcctgtaa

SEQ ID NO: 191298 - DNA, 20 bp, synthetic construct
  source 1..20: mol_type = other DNA
catggtggctcatgcctgta

SEQ ID NO: 191299 - DNA, 20 bp, synthetic construct
  source 1..20: mol_type = other DNA
gcatggtggctcatgcctgt

SEQ ID NO: 191300 - DNA, 20 bp, synthetic construct
  source 1..20: mol_type = other DNA
ggcatggtggctcatgcctg

SEQ ID NO: 191301 - DNA, 20 bp, synthetic construct
  source 1..20: mol_type = other DNA
gggcatggtggctcatgcct

SEQ ID NO: 191302 - DNA, 20 bp, synthetic construct
  source 1..20: mol_type = other DNA
tgggcatggtggctcatgcc

SEQ ID NO: 191303 - DNA, 20 bp, synthetic construct
  source 1..20: mol_type = other DNA
ctgggcatggtggctcatgc

SEQ ID NO: 191304 - DNA, 20 bp, synthetic construct
  source 1..20: mol_type = other DNA
gctgggcatggtggctcatg

SEQ ID NO: 191305 - DNA, 20 bp, synthetic construct
  source 1..20: mol_type = other DNA
ggctgggcatggtggctcat

SEQ ID NO: 191306 - DNA, 20 bp, synthetic construct
  source 1..20: mol_type = other DNA
tggctgggcatggtggctca

SEQ ID NO: 191307 - DNA, 20 bp, synthetic construct
  source 1..20: mol_type = other DNA
ctggctgggcatggtggctc

SEQ ID NO: 191308 - DNA, 20 bp, synthetic construct
  source 1..20: mol_type = other DNA
gctggctgggcatggtggct

SEQ ID NO: 191309 - DNA, 20 bp, synthetic construct
  source 1..20: mol_type = other DNA
tgctggctgggcatggtggc

SEQ ID NO: 191310 - DNA, 20 bp, synthetic construct
  source 1..20: mol_type = other DNA
atgctggctgggcatggtgg

SEQ ID NO: 191311 - DNA, 20 bp, synthetic construct
  source 1..20: mol_type = other DNA
gatgctggctgggcatggtg

SEQ ID NO: 191312 - DNA, 20 bp, synthetic construct
  source 1..20: mol_type = other DNA
agatgctggctgggcatggt

SEQ ID NO: 191313 - DNA, 20 bp, synthetic construct
  source 1..20: mol_type = other DNA
aagatgctggctgggcatgg

SEQ ID NO: 191314 - DNA, 20 bp, synthetic construct
  source 1..20: mol_type = other DNA
aaagatgctggctgggcatg

SEQ ID NO: 191315 - DNA, 20 bp, synthetic construct
  source 1..20: mol_type = other DNA
gaaagatgctggctgggcat

SEQ ID NO: 191316 - DNA, 20 bp, synthetic construct
  source 1..20: mol_type = other DNA
tgaaagatgctggctgggca

SEQ ID NO: 191317 - DNA, 20 bp, synthetic construct
  source 1..20: mol_type = other DNA
atgaaagatgctggctgggc

SEQ ID NO: 191318 - DNA, 20 bp, synthetic construct
  source 1..20: mol_type = other DNA
aatgaaagatgctggctggg

SEQ ID NO: 191319 - DNA, 20 bp, synthetic construct
  source 1..20: mol_type = other DNA
aaatgaaagatgctggctgg

SEQ ID NO: 191320 - DNA, 20 bp, synthetic construct
  source 1..20: mol_type = other DNA
aaaatgaaagatgctggctg

SEQ ID NO: 191321 - DNA, 20 bp, synthetic construct
  source 1..20: mol_type = other DNA
aaaaatgaaagatgctggct

SEQ ID NO: 191322 - DNA, 20 bp, synthetic construct
  source 1..20: mol_type = other DNA
gaaaaatgaaagatgctggc

SEQ ID NO: 191323 - DNA, 20 bp, synthetic construct
  source 1..20: mol_type = other DNA
agaaaaatgaaagatgctgg

SEQ ID NO: 191324 - DNA, 20 bp, synthetic construct
  source 1..20: mol_type = other DNA
cagaaaaatgaaagatgctg

SEQ ID NO: 191325 - DNA, 20 bp, synthetic construct
  source 1..20: mol_type = other DNA
acagaaaaatgaaagatgct

SEQ ID NO: 191326 - DNA, 20 bp, synthetic construct
  source 1..20: mol_type = other DNA
gacagaaaaatgaaagatgc

SEQ ID NO: 191327 - DNA, 20 bp, synthetic construct
  source 1..20: mol_type = other DNA
agacagaaaaatgaaagatg

SEQ ID NO: 191328 - DNA, 20 bp, synthetic construct
  source 1..20: mol_type = other DNA
cagacagaaaaatgaaagat

SEQ ID NO: 191329 - DNA, 20 bp, synthetic construct
  source 1..20: mol_type = other DNA
gcagacagaaaaatgaaaga

SEQ ID NO: 191330 - DNA, 20 bp, synthetic construct
  source 1..20: mol_type = other DNA
agcagacagaaaaatgaaag

SEQ ID NO: 191331 - DNA, 20 bp, synthetic construct
  source 1..20: mol_type = other DNA
aagcagacagaaaaatgaaa

SEQ ID NO: 191332 - DNA, 20 bp, synthetic construct
  source 1..20: mol_type = other DNA
aaagcagacagaaaaatgaa

SEQ ID NO: 191333 - DNA, 20 bp, synthetic construct
  source 1..20: mol_type = other DNA
caaagcagacagaaaaatga

SEQ ID NO: 191334 - DNA, 20 bp, synthetic construct
  source 1..20: mol_type = other DNA
ccaaagcagacagaaaaatg

SEQ ID NO: 191335 - DNA, 20 bp, synthetic construct
  source 1..20: mol_type = other DNA
gccaaagcagacagaaaaat

SEQ ID NO: 191336 - DNA, 20 bp, synthetic construct
  source 1..20: mol_type = other DNA
ggccaaagcagacagaaaaa

SEQ ID NO: 191337 - DNA, 20 bp, synthetic construct
  source 1..20: mol_type = other DNA
gggccaaagcagacagaaaa

SEQ ID NO: 191338 - DNA, 20 bp, synthetic construct
  source 1..20: mol_type = other DNA
agggccaaagcagacagaaa

SEQ ID NO: 191339 - DNA, 20 bp, synthetic construct
  source 1..20: mol_type = other DNA
aagggccaaagcagacagaa

SEQ ID NO: 191340 - DNA, 20 bp, synthetic construct
  source 1..20: mol_type = other DNA
aaagggccaaagcagacaga

SEQ ID NO: 191341 - DNA, 20 bp, synthetic construct
  source 1..20: mol_type = other DNA
gaaagggccaaagcagacag

SEQ ID NO: 191342 - DNA, 20 bp, synthetic construct
  source 1..20: mol_type = other DNA
ggaaagggccaaagcagaca

SEQ ID NO: 191343 - DNA, 20 bp, synthetic construct
  source 1..20: mol_type = other DNA
aggaaagggccaaagcagac

SEQ ID NO: 191344 - DNA, 20 bp, synthetic construct
  source 1..20: mol_type = other DNA
gaggaaagggccaaagcaga

SEQ ID NO: 191345 - DNA, 20 bp, synthetic construct
  source 1..20: mol_type = other DNA
agaggaaagggccaaagcag

SEQ ID NO: 191346 - DNA, 20 bp, synthetic construct
  source 1..20: mol_type = other DNA
gagaggaaagggccaaagca

SEQ ID NO: 191347 - DNA, 20 bp, synthetic construct
  source 1..20: mol_type = other DNA
agagaggaaagggccaaagc

SEQ ID NO: 191348 - DNA, 20 bp, synthetic construct
  source 1..20: mol_type = other DNA
gagagaggaaagggccaaag

SEQ ID NO: 191349 - DNA, 20 bp, synthetic construct
  source 1..20: mol_type = other DNA
tgagagaggaaagggccaaa

SEQ ID NO: 191350 - DNA, 20 bp, synthetic construct
  source 1..20: mol_type = other DNA
gtgagagaggaaagggccaa

SEQ ID NO: 191351 - DNA, 20 bp, synthetic construct
  source 1..20: mol_type = other DNA
agtgagagaggaaagggcca

SEQ ID NO: 191352 - DNA, 20 bp, synthetic construct
  source 1..20: mol_type = other DNA
cagtgagagaggaaagggcc

SEQ ID NO: 191353 - DNA, 20 bp, synthetic construct
  source 1..20: mol_type = other DNA
acagtgagagaggaaagggc

SEQ ID NO: 191354 - DNA, 20 bp, synthetic construct
  source 1..20: mol_type = other DNA
gacagtgagagaggaaaggg

SEQ ID NO: 191355 - DNA, 20 bp, synthetic construct
  source 1..20: mol_type = other DNA
agacagtgagagaggaaagg

SEQ ID NO: 191356 - DNA, 20 bp, synthetic construct
  source 1..20: mol_type = other DNA
aagacagtgagagaggaaag

SEQ ID NO: 191357 - DNA, 20 bp, synthetic construct
  source 1..20: mol_type = other DNA
gaagacagtgagagaggaaa

SEQ ID NO: 191358 - DNA, 20 bp, synthetic construct
  source 1..20: mol_type = other DNA
ggaagacagtgagagaggaa

SEQ ID NO: 191359 - DNA, 20 bp, synthetic construct
  source 1..20: mol_type = other DNA
aggaagacagtgagagagga

SEQ ID NO: 191360 - DNA, 20 bp, synthetic construct
  source 1..20: mol_type = other DNA
aaggaagacagtgagagagg

SEQ ID NO: 191361 - DNA, 20 bp, synthetic construct
  source 1..20: mol_type = other DNA
aaaggaagacagtgagagag

SEQ ID NO: 191362 - DNA, 20 bp, synthetic construct
  source 1..20: mol_type = other DNA
aaaaggaagacagtgagaga

SEQ ID NO: 191363 - DNA, 20 bp, synthetic construct
  source 1..20: mol_type = other DNA
gaaaaggaagacagtgagag

SEQ ID NO: 191364 - DNA, 20 bp, synthetic construct
  source 1..20: mol_type = other DNA
ggaaaaggaagacagtgaga

SEQ ID NO: 191365 - DNA, 20 bp, synthetic construct
  source 1..20: mol_type = other DNA
tggaaaaggaagacagtgag

SEQ ID NO: 191366 - DNA, 20 bp, synthetic construct
  source 1..20: mol_type = other DNA
atggaaaaggaagacagtga

SEQ ID NO: 191367 - DNA, 20 bp, synthetic construct
  source 1..20: mol_type = other DNA
aatggaaaaggaagacagtg

SEQ ID NO: 191368 - DNA, 20 bp, synthetic construct
  source 1..20: mol_type = other DNA
aaatggaaaaggaagacagt

SEQ ID NO: 191369 - DNA, 20 bp, synthetic construct
  source 1..20: mol_type = other DNA
gaaatggaaaaggaagacag

SEQ ID NO: 191370 - DNA, 20 bp, synthetic construct
  source 1..20: mol_type = other DNA
ggaaatggaaaaggaagaca

SEQ ID NO: 191371 - DNA, 20 bp, synthetic construct
  source 1..20: mol_type = other DNA
tggaaatggaaaaggaagac

SEQ ID NO: 191372 - DNA, 20 bp, synthetic construct
  source 1..20: mol_type = other DNA
ttggaaatggaaaaggaaga

SEQ ID NO: 191373 - DNA, 20 bp, synthetic construct
  source 1..20: mol_type = other DNA
tttggaaatggaaaaggaag

SEQ ID NO: 191374 - DNA, 20 bp, synthetic construct
  source 1..20: mol_type = other DNA
ctttggaaatggaaaaggaa

SEQ ID NO: 191375 - DNA, 20 bp, synthetic construct
  source 1..20: mol_type = other DNA
actttggaaatggaaaagga

SEQ ID NO: 191376 - DNA, 20 bp, synthetic construct
  source 1..20: mol_type = other DNA
gactttggaaatggaaaagg

SEQ ID NO: 191377 - DNA, 20 bp, synthetic construct
  source 1..20: mol_type = other DNA
tgactttggaaatggaaaag

SEQ ID NO: 191378 - DNA, 20 bp, synthetic construct
  source 1..20: mol_type = other DNA
ctgactttggaaatggaaaa

SEQ ID NO: 191379 - DNA, 20 bp, synthetic construct
  source 1..20: mol_type = other DNA
actgactttggaaatggaaa

SEQ ID NO: 191380 - DNA, 20 bp, synthetic construct
  source 1..20: mol_type = other DNA
gactgactttggaaatggaa

SEQ ID NO: 191381 - DNA, 20 bp, synthetic construct
  source 1..20: mol_type = other DNA
ggactgactttggaaatgga

SEQ ID NO: 191382 - DNA, 20 bp, synthetic construct
  source 1..20: mol_type = other DNA
tggactgactttggaaatgg

SEQ ID NO: 191383 - DNA, 20 bp, synthetic construct
  source 1..20: mol_type = other DNA
atggactgactttggaaatg

SEQ ID NO: 191384 - DNA, 20 bp, synthetic construct
  source 1..20: mol_type = other DNA
gatggactgactttggaaat

SEQ ID NO: 191385 - DNA, 20 bp, synthetic construct
  source 1..20: mol_type = other DNA
agatggactgactttggaaa

SEQ ID NO: 191386 - DNA, 20 bp, synthetic construct
  source 1..20: mol_type = other DNA
gagatggactgactttggaa

SEQ ID NO: 191387 - DNA, 20 bp, synthetic construct
  source 1..20: mol_type = other DNA
tgagatggactgactttgga

SEQ ID NO: 191388 - DNA, 20 bp, synthetic construct
  source 1..20: mol_type = other DNA
gtgagatggactgactttgg

SEQ ID NO: 191389 - DNA, 20 bp, synthetic construct
  source 1..20: mol_type = other DNA
agtgagatggactgactttg

SEQ ID NO: 191390 - DNA, 20 bp, synthetic construct
  source 1..20: mol_type = other DNA
tagtgagatggactgacttt

SEQ ID NO: 191391 - DNA, 20 bp, synthetic construct
  source 1..20: mol_type = other DNA
atagtgagatggactgactt

SEQ ID NO: 191392 - DNA, 20 bp, synthetic construct
  source 1..20: mol_type = other DNA
aatagtgagatggactgact

SEQ ID NO: 191393 - DNA, 20 bp, synthetic construct
  source 1..20: mol_type = other DNA
taatagtgagatggactgac

SEQ ID NO: 191394 - DNA, 20 bp, synthetic construct
  source 1..20: mol_type = other DNA
ctaatagtgagatggactga

SEQ ID NO: 191395 - DNA, 20 bp, synthetic construct
  source 1..20: mol_type = other DNA
gctaatagtgagatggactg

SEQ ID NO: 191396 - DNA, 20 bp, synthetic construct
  source 1..20: mol_type = other DNA
tgctaatagtgagatggact

SEQ ID NO: 191397 - DNA, 20 bp, synthetic construct
  source 1..20: mol_type = other DNA
gtgctaatagtgagatggac

SEQ ID NO: 191398 - DNA, 20 bp, synthetic construct
  source 1..20: mol_type = other DNA
tgtgctaatagtgagatgga

SEQ ID NO: 191399 - DNA, 20 bp, synthetic construct
  source 1..20: mol_type = other DNA
ttgtgctaatagtgagatgg

SEQ ID NO: 191400 - DNA, 20 bp, synthetic construct
  source 1..20: mol_type = other DNA
tttgtgctaatagtgagatg

SEQ ID NO: 191401 - DNA, 20 bp, synthetic construct
  source 1..20: mol_type = other DNA
ttttgtgctaatagtgagat

SEQ ID NO: 191402 - DNA, 20 bp, synthetic construct
  source 1..20: mol_type = other DNA
tttttgtgctaatagtgaga

SEQ ID NO: 191403 - DNA, 20 bp, synthetic construct
  source 1..20: mol_type = other DNA
gtttttgtgctaatagtgag

SEQ ID NO: 191404 - DNA, 20 bp, synthetic construct
  source 1..20: mol_type = other DNA
agtttttgtgctaatagtga

SEQ ID NO: 191405 - DNA, 20 bp, synthetic construct
  source 1..20: mol_type = other DNA
cagtttttgtgctaatagtg

SEQ ID NO: 191406 - DNA, 20 bp, synthetic construct
  source 1..20: mol_type = other DNA
gcagtttttgtgctaatagt

SEQ ID NO: 191407 - DNA, 20 bp, synthetic construct
  source 1..20: mol_type = other DNA
agcagtttttgtgctaatag

SEQ ID NO: 191408 - DNA, 20 bp, synthetic construct
  source 1..20: mol_type = other DNA
tagcagtttttgtgctaata

SEQ ID NO: 191409 - DNA, 20 bp, synthetic construct
  source 1..20: mol_type = other DNA
ctagcagtttttgtgctaat

SEQ ID NO: 191410 - DNA, 20 bp, synthetic construct
  source 1..20: mol_type = other DNA
tctagcagtttttgtgctaa

SEQ ID NO: 191411 - DNA, 20 bp, synthetic construct
  source 1..20: mol_type = other DNA
ctctagcagtttttgtgcta

SEQ ID NO: 191412 - DNA, 20 bp, synthetic construct
  source 1..20: mol_type = other DNA
gctctagcagtttttgtgct

SEQ ID NO: 191413 - DNA, 20 bp, synthetic construct
  source 1..20: mol_type = other DNA
cgctctagcagtttttgtgc

SEQ ID NO: 191414 - DNA, 20 bp, synthetic construct
  source 1..20: mol_type = other DNA
gcgctctagcagtttttgtg

SEQ ID NO: 191415 - DNA, 20 bp, synthetic construct
  source 1..20: mol_type = other DNA
agcgctctagcagtttttgt

SEQ ID NO: 191416 - DNA, 20 bp, synthetic construct
  source 1..20: mol_type = other DNA
aagcgctctagcagtttttg

SEQ ID NO: 191417 - DNA, 20 bp, synthetic construct
  source 1..20: mol_type = other DNA
caagcgctctagcagttttt

SEQ ID NO: 191418 - DNA, 20 bp, synthetic construct
  source 1..20: mol_type = other DNA
acaagcgctctagcagtttt

SEQ ID NO: 191419 - DNA, 20 bp, synthetic construct
  source 1..20: mol_type = other DNA
gacaagcgctctagcagttt

SEQ ID NO: 191420 - DNA, 20 bp, synthetic construct
  source 1..20: mol_type = other DNA
tgacaagcgctctagcagtt

SEQ ID NO: 191421 - DNA, 20 bp, synthetic construct
  source 1..20: mol_type = other DNA
atgacaagcgctctagcagt

SEQ ID NO: 191422 - DNA, 20 bp, synthetic construct
  source 1..20: mol_type = other DNA
aatgacaagcgctctagcag

SEQ ID NO: 191423 - DNA, 20 bp, synthetic construct
  source 1..20: mol_type = other DNA
caatgacaagcgctctagca

SEQ ID NO: 191424 - DNA, 20 bp, synthetic construct
  source 1..20: mol_type = other DNA
ccaatgacaagcgctctagc

SEQ ID NO: 191425 - DNA, 20 bp, synthetic construct
  source 1..20: mol_type = other DNA
accaatgacaagcgctctag

SEQ ID NO: 191426 - DNA, 20 bp, synthetic construct
  source 1..20: mol_type = other DNA
gaccaatgacaagcgctcta

SEQ ID NO: 191427 - DNA, 20 bp, synthetic construct
  source 1..20: mol_type = other DNA
tgaccaatgacaagcgctct

SEQ ID NO: 191428 - DNA, 20 bp, synthetic construct
  source 1..20: mol_type = other DNA
atgaccaatgacaagcgctc

SEQ ID NO: 191429 - DNA, 20 bp, synthetic construct
  source 1..20: mol_type = other DNA
gatgaccaatgacaagcgct

SEQ ID NO: 191430 - DNA, 20 bp, synthetic construct
  source 1..20: mol_type = other DNA
agatgaccaatgacaagcgc

SEQ ID NO: 191431 - DNA, 20 bp, synthetic construct
  source 1..20: mol_type = other DNA
gagatgaccaatgacaagcg

SEQ ID NO: 191432 - DNA, 20 bp, synthetic construct
  source 1..20: mol_type = other DNA
agagatgaccaatgacaagc

SEQ ID NO: 191433 - DNA, 20 bp, synthetic construct
  source 1..20: mol_type = other DNA
gagagatgaccaatgacaag

SEQ ID NO: 191434 - DNA, 20 bp, synthetic construct
  source 1..20: mol_type = other DNA
ggagagatgaccaatgacaa

SEQ ID NO: 191435 - DNA, 20 bp, synthetic construct
  source 1..20: mol_type = other DNA
gggagagatgaccaatgaca

SEQ ID NO: 191436 - DNA, 20 bp, synthetic construct
  source 1..20: mol_type = other DNA
agggagagatgaccaatgac

SEQ ID NO: 191437 - DNA, 20 bp, synthetic construct
  source 1..20: mol_type = other DNA
cagggagagatgaccaatga

SEQ ID NO: 191438 - DNA, 20 bp, synthetic construct
  source 1..20: mol_type = other DNA
gcagggagagatgaccaatg

SEQ ID NO: 191439 - DNA, 20 bp, synthetic construct
  source 1..20: mol_type = other DNA
tgcagggagagatgaccaat

SEQ ID NO: 191440 - DNA, 20 bp, synthetic construct
  source 1..20: mol_type = other DNA
gtgcagggagagatgaccaa

SEQ ID NO: 191441 - DNA, 20 bp, synthetic construct
  source 1..20: mol_type = other DNA
ggtgcagggagagatgacca

SEQ ID NO: 191442 - DNA, 20 bp, synthetic construct
  source 1..20: mol_type = other DNA
aggtgcagggagagatgacc

SEQ ID NO: 191443 - DNA, 20 bp, synthetic construct
  source 1..20: mol_type = other DNA
caggtgcagggagagatgac

SEQ ID NO: 191444 - DNA, 20 bp, synthetic construct
  source 1..20: mol_type = other DNA
ccaggtgcagggagagatga

SEQ ID NO: 191445 - DNA, 20 bp, synthetic construct
  source 1..20: mol_type = other DNA
gccaggtgcagggagagatg

SEQ ID NO: 191446 - DNA, 20 bp, synthetic construct
  source 1..20: mol_type = other DNA
agccaggtgcagggagagat

SEQ ID NO: 191447 - DNA, 20 bp, synthetic construct
  source 1..20: mol_type = other DNA
cagccaggtgcagggagaga

SEQ ID NO: 191448 - DNA, 20 bp, synthetic construct
  source 1..20: mol_type = other DNA
ccagccaggtgcagggagag

SEQ ID NO: 191449 - DNA, 20 bp, synthetic construct
  source 1..20: mol_type = other DNA
accagccaggtgcagggaga

SEQ ID NO: 191450 - DNA, 20 bp, synthetic construct
  source 1..20: mol_type = other DNA
gaccagccaggtgcagggag

SEQ ID NO: 191451 - DNA, 20 bp, synthetic construct
  source 1..20: mol_type = other DNA
agaccagccaggtgcaggga

SEQ ID NO: 191452 - DNA, 20 bp, synthetic construct
  source 1..20: mol_type = other DNA
cagaccagccaggtgcaggg

SEQ ID NO: 191453 - DNA, 20 bp, synthetic construct
  source 1..20: mol_type = other DNA
acagaccagccaggtgcagg

SEQ ID NO: 191454 - DNA, 20 bp, synthetic construct
  source 1..20: mol_type = other DNA
aacagaccagccaggtgcag

SEQ ID NO: 191455 - DNA, 20 bp, synthetic construct
  source 1..20: mol_type = other DNA
gaacagaccagccaggtgca

SEQ ID NO: 191456 - DNA, 20 bp, synthetic construct
  source 1..20: mol_type = other DNA
agaacagaccagccaggtgc

SEQ ID NO: 191457 - DNA, 20 bp, synthetic construct
  source 1..20: mol_type = other DNA
aagaacagaccagccaggtg

SEQ ID NO: 191458 - DNA, 20 bp, synthetic construct
  source 1..20: mol_type = other DNA
caagaacagaccagccaggt

SEQ ID NO: 191459 - DNA, 20 bp, synthetic construct
  source 1..20: mol_type = other DNA
ccaagaacagaccagccagg

SEQ ID NO: 191460 - DNA, 20 bp, synthetic construct
  source 1..20: mol_type = other DNA
gccaagaacagaccagccag

SEQ ID NO: 191461 - DNA, 20 bp, synthetic construct
  source 1..20: mol_type = other DNA
ggccaagaacagaccagcca

SEQ ID NO: 191462 - DNA, 20 bp, synthetic construct
  source 1..20: mol_type = other DNA
tggccaagaacagaccagcc

SEQ ID NO: 191463 - DNA, 20 bp, synthetic construct
  source 1..20: mol_type = other DNA
gtggccaagaacagaccagc

SEQ ID NO: 191464 - DNA, 20 bp, synthetic construct
  source 1..20: mol_type = other DNA
agtggccaagaacagaccag

SEQ ID NO: 191465 - DNA, 20 bp, synthetic construct
  source 1..20: mol_type = other DNA
cagtggccaagaacagacca

SEQ ID NO: 191466 - DNA, 20 bp, synthetic construct
  source 1..20: mol_type = other DNA
tcagtggccaagaacagacc

SEQ ID NO: 191467 - DNA, 20 bp, synthetic construct
  source 1..20: mol_type = other DNA
ttcagtggccaagaacagac

SEQ ID NO: 191468 - DNA, 20 bp, synthetic construct
  source 1..20: mol_type = other DNA
cttcagtggccaagaacaga

SEQ ID NO: 191469 - DNA, 20 bp, synthetic construct
  source 1..20: mol_type = other DNA
gcttcagtggccaagaacag

SEQ ID NO: 191470 - DNA, 20 bp, synthetic construct
  source 1..20: mol_type = other DNA
cgcttcagtggccaagaaca

SEQ ID NO: 191471 - DNA, 20 bp, synthetic construct
  source 1..20: mol_type = other DNA
acgcttcagtggccaagaac

SEQ ID NO: 191472 - DNA, 20 bp, synthetic construct
  source 1..20: mol_type = other DNA
aacgcttcagtggccaagaa

SEQ ID NO: 191473 - DNA, 20 bp, synthetic construct
  source 1..20: mol_type = other DNA
aaacgcttcagtggccaaga

SEQ ID NO: 191474 - DNA, 20 bp, synthetic construct
  source 1..20: mol_type = other DNA
gaaacgcttcagtggccaag

SEQ ID NO: 191475 - DNA, 20 bp, synthetic construct
  source 1..20: mol_type = other DNA
ggaaacgcttcagtggccaa

SEQ ID NO: 191476 - DNA, 20 bp, synthetic construct
  source 1..20: mol_type = other DNA
gggaaacgcttcagtggcca

SEQ ID NO: 191477 - DNA, 20 bp, synthetic construct
  source 1..20: mol_type = other DNA
ggggaaacgcttcagtggcc

SEQ ID NO: 191478 - DNA, 20 bp, synthetic construct
  source 1..20: mol_type = other DNA
gggggaaacgcttcagtggc

SEQ ID NO: 191479 - DNA, 20 bp, synthetic construct
  source 1..20: mol_type = other DNA
tgggggaaacgcttcagtgg

SEQ ID NO: 191480 - DNA, 20 bp, synthetic construct
  source 1..20: mol_type = other DNA
ctgggggaaacgcttcagtg

SEQ ID NO: 191481 - DNA, 20 bp, synthetic construct
  source 1..20: mol_type = other DNA
gctgggggaaacgcttcagt

SEQ ID NO: 191482 - DNA, 20 bp, synthetic construct
  source 1..20: mol_type = other DNA
agctgggggaaacgcttcag

SEQ ID NO: 191483 - DNA, 20 bp, synthetic construct
  source 1..20: mol_type = other DNA
cagctgggggaaacgcttca

SEQ ID NO: 191484 - DNA, 20 bp, synthetic construct
  source 1..20: mol_type = other DNA
acagctgggggaaacgcttc

SEQ ID NO: 191485 - DNA, 20 bp, synthetic construct
  source 1..20: mol_type = other DNA
aacagctgggggaaacgctt

SEQ ID NO: 191486 - DNA, 20 bp, synthetic construct
  source 1..20: mol_type = other DNA
caacagctgggggaaacgct

SEQ ID NO: 191487 - DNA, 20 bp, synthetic construct
  source 1..20: mol_type = other DNA
gcaacagctgggggaaacgc

SEQ ID NO: 191488 - DNA, 20 bp, synthetic construct
  source 1..20: mol_type = other DNA
agcaacagctgggggaaacg

SEQ ID NO: 191489 - DNA, 20 bp, synthetic construct
  source 1..20: mol_type = other DNA
aagcaacagctgggggaaac

SEQ ID NO: 191490 - DNA, 20 bp, synthetic construct
  source 1..20: mol_type = other DNA
aaagcaacagctgggggaaa

SEQ ID NO: 191491 - DNA, 20 bp, synthetic construct
  source 1..20: mol_type = other DNA
taaagcaacagctgggggaa

SEQ ID NO: 191492 - DNA, 20 bp, synthetic construct
  source 1..20: mol_type = other DNA
ttaaagcaacagctggggga

SEQ ID NO: 191493 - DNA, 20 bp, synthetic construct
  source 1..20: mol_type = other DNA
attaaagcaacagctggggg

SEQ ID NO: 191494 - DNA, 20 bp, synthetic construct
  source 1..20: mol_type = other DNA
gattaaagcaacagctgggg

SEQ ID NO: 191495 - DNA, 20 bp, synthetic construct
  source 1..20: mol_type = other DNA
tgattaaagcaacagctggg

SEQ ID NO: 191496 - DNA, 20 bp, synthetic construct
  source 1..20: mol_type = other DNA
atgattaaagcaacagctgg

SEQ ID NO: 191497 - DNA, 20 bp, synthetic construct
  source 1..20: mol_type = other DNA
aatgattaaagcaacagctg

SEQ ID NO: 191498 - DNA, 20 bp, synthetic construct
  source 1..20: mol_type = other DNA
aaatgattaaagcaacagct

SEQ ID NO: 191499 - DNA, 20 bp, synthetic construct
  source 1..20: mol_type = other DNA
aaaatgattaaagcaacagc

SEQ ID NO: 191500 - DNA, 20 bp, synthetic construct
  source 1..20: mol_type = other DNA
taaaatgattaaagcaacag

SEQ ID NO: 191501 - DNA, 20 bp, synthetic construct
  source 1..20: mol_type = other DNA
ataaaatgattaaagcaaca

SEQ ID NO: 191502 - DNA, 20 bp, synthetic construct
  source 1..20: mol_type = other DNA
aataaaatgattaaagcaac

SEQ ID NO: 191503 - DNA, 20 bp, synthetic construct
  source 1..20: mol_type = other DNA
caataaaatgattaaagcaa

SEQ ID NO: 191504 - DNA, 20 bp, synthetic construct
  source 1..20: mol_type = other DNA
acaataaaatgattaaagca

SEQ ID NO: 191505 - DNA, 20 bp, synthetic construct
  source 1..20: mol_type = other DNA
aacaataaaatgattaaagc

SEQ ID NO: 191506 - DNA, 20 bp, synthetic construct
  source 1..20: mol_type = other DNA
taacaataaaatgattaaag

SEQ ID NO: 191507 - DNA, 20 bp, synthetic construct
  source 1..20: mol_type = other DNA
ataacaataaaatgattaaa

SEQ ID NO: 191508 - DNA, 20 bp, synthetic construct
  source 1..20: mol_type = other DNA
aataacaataaaatgattaa

SEQ ID NO: 191509 - DNA, 20 bp, synthetic construct
  source 1..20: mol_type = other DNA
taataacaataaaatgatta

SEQ ID NO: 191510 - DNA, 20 bp, synthetic construct
  source 1..20: mol_type = other DNA
ataataacaataaaatgatt

SEQ ID NO: 191511 - DNA, 20 bp, synthetic construct
  source 1..20: mol_type = other DNA
cataataacaataaaatgat

SEQ ID NO: 191512 - DNA, 20 bp, synthetic construct
  source 1..20: mol_type = other DNA
gcataataacaataaaatga

SEQ ID NO: 191513 - DNA, 20 bp, synthetic construct
  source 1..20: mol_type = other DNA
ggcataataacaataaaatg

SEQ ID NO: 191514 - DNA, 20 bp, synthetic construct
  source 1..20: mol_type = other DNA
aggcataataacaataaaat

SEQ ID NO: 191515 - DNA, 20 bp, synthetic construct
  source 1..20: mol_type = other DNA
aaggcataataacaataaaa

SEQ ID NO: 191516 - DNA, 20 bp, synthetic construct
  source 1..20: mol_type = other DNA
taaggcataataacaataaa

SEQ ID NO: 191517 - DNA, 20 bp, synthetic construct
  source 1..20: mol_type = other DNA
gtaaggcataataacaataa

SEQ ID NO: 191518 - DNA, 20 bp, synthetic construct
  source 1..20: mol_type = other DNA
agtaaggcataataacaata

SEQ ID NO: 191519 - DNA, 20 bp, synthetic construct
  source 1..20: mol_type = other DNA
aagtaaggcataataacaat

SEQ ID NO: 191520 - DNA, 20 bp, synthetic construct
  source 1..20: mol_type = other DNA
taagtaaggcataataacaa

SEQ ID NO: 191521 - DNA, 20 bp, synthetic construct
  source 1..20: mol_type = other DNA
ttaagtaaggcataataaca

SEQ ID NO: 191522 - DNA, 20 bp, synthetic construct
  source 1..20: mol_type = other DNA
cttaagtaaggcataataac

SEQ ID NO: 191523 - DNA, 20 bp, synthetic construct
  source 1..20: mol_type = other DNA
tcttaagtaaggcataataa

SEQ ID NO: 191524 - DNA, 20 bp, synthetic construct
  source 1..20: mol_type = other DNA
ttcttaagtaaggcataata

SEQ ID NO: 191525 - DNA, 20 bp, synthetic construct
  source 1..20: mol_type = other DNA
tttcttaagtaaggcataat

SEQ ID NO: 191526 - DNA, 20 bp, synthetic construct
  source 1..20: mol_type = other DNA
atttcttaagtaaggcataa

SEQ ID NO: 191527 - DNA, 20 bp, synthetic construct
  source 1..20: mol_type = other DNA
catttcttaagtaaggcata

SEQ ID NO: 191528 - DNA, 20 bp, synthetic construct
  source 1..20: mol_type = other DNA
ccatttcttaagtaaggcat

SEQ ID NO: 191529 - DNA, 20 bp, synthetic construct
  source 1..20: mol_type = other DNA
tccatttcttaagtaaggca

SEQ ID NO: 191530 - DNA, 20 bp, synthetic construct
  source 1..20: mol_type = other DNA
atccatttcttaagtaaggc

SEQ ID NO: 191531 - DNA, 20 bp, synthetic construct
  source 1..20: mol_type = other DNA
tatccatttcttaagtaagg

SEQ ID NO: 191532 - DNA, 20 bp, synthetic construct
  source 1..20: mol_type = other DNA
atatccatttcttaagtaag

SEQ ID NO: 191533 - DNA, 20 bp, synthetic construct
  source 1..20: mol_type = other DNA
catatccatttcttaagtaa

SEQ ID NO: 191534 - DNA, 20 bp, synthetic construct
  source 1..20: mol_type = other DNA
tcatatccatttcttaagta

SEQ ID NO: 191535 - DNA, 20 bp, synthetic construct
  source 1..20: mol_type = other DNA
ctcatatccatttcttaagt

SEQ ID NO: 191536 - DNA, 20 bp, synthetic construct
  source 1..20: mol_type = other DNA
tctcatatccatttcttaag

SEQ ID NO: 191537 - DNA, 20 bp, synthetic construct
  source 1..20: mol_type = other DNA
atctcatatccatttcttaa

SEQ ID NO: 191538 - DNA, 20 bp, synthetic construct
  source 1..20: mol_type = other DNA
catctcatatccatttctta

SEQ ID NO: 191539 - DNA, 20 bp, synthetic construct
  source 1..20: mol_type = other DNA
gcatctcatatccatttctt

SEQ ID NO: 191540 - DNA, 20 bp, synthetic construct
  source 1..20: mol_type = other DNA
tgcatctcatatccatttct

SEQ ID NO: 191541 - DNA, 20 bp, synthetic construct
  source 1..20: mol_type = other DNA
atgcatctcatatccatttc

SEQ ID NO: 191542 - DNA, 20 bp, synthetic construct
  source 1..20: mol_type = other DNA
aatgcatctcatatccattt

SEQ ID NO: 191543 - DNA, 20 bp, synthetic construct
  source 1..20: mol_type = other DNA
aaatgcatctcatatccatt

SEQ ID NO: 191544 - DNA, 20 bp, synthetic construct
  source 1..20: mol_type = other DNA
taaatgcatctcatatccat

SEQ ID NO: 191545 - DNA, 20 bp, synthetic construct
  source 1..20: mol_type = other DNA
gtaaatgcatctcatatcca

SEQ ID NO: 191546 - DNA, 20 bp, synthetic construct
  source 1..20: mol_type = other DNA
ggtaaatgcatctcatatcc

SEQ ID NO: 191547 - DNA, 20 bp, synthetic construct
  source 1..20: mol_type = other DNA
aggtaaatgcatctcatatc

SEQ ID NO: 191548 - DNA, 20 bp, synthetic construct
  source 1..20: mol_type = other DNA
caggtaaatgcatctcatat

SEQ ID NO: 191549 - DNA, 20 bp, synthetic construct
  source 1..20: mol_type = other DNA
acaggtaaatgcatctcata

SEQ ID NO: 191550 - DNA, 20 bp, synthetic construct
  source 1..20: mol_type = other DNA
gacaggtaaatgcatctcat

SEQ ID NO: 191551 - DNA, 20 bp, synthetic construct
  source 1..20: mol_type = other DNA
agacaggtaaatgcatctca

SEQ ID NO: 191552 - DNA, 20 bp, synthetic construct
  source 1..20: mol_type = other DNA
gagacaggtaaatgcatctc

SEQ ID NO: 191553 - DNA, 20 bp, synthetic construct
  source 1..20: mol_type = other DNA
agagacaggtaaatgcatct

SEQ ID NO: 191554 - DNA, 20 bp, synthetic construct
  source 1..20: mol_type = other DNA
aagagacaggtaaatgcatc

SEQ ID NO: 191555 - DNA, 20 bp, synthetic construct
  source 1..20: mol_type = other DNA
gaagagacaggtaaatgcat

SEQ ID NO: 191556 - DNA, 20 bp, synthetic construct
  source 1..20: mol_type = other DNA
ggaagagacaggtaaatgca

SEQ ID NO: 191557 - DNA, 20 bp, synthetic construct
  source 1..20: mol_type = other DNA
aggaagagacaggtaaatgc

SEQ ID NO: 191558 - DNA, 20 bp, synthetic construct
  source 1..20: mol_type = other DNA
caggaagagacaggtaaatg

SEQ ID NO: 191559 - DNA, 20 bp, synthetic construct
  source 1..20: mol_type = other DNA
gcaggaagagacaggtaaat

SEQ ID NO: 191560 - DNA, 20 bp, synthetic construct
  source 1..20: mol_type = other DNA
ggcaggaagagacaggtaaa

SEQ ID NO: 191561 - DNA, 20 bp, synthetic construct
  source 1..20: mol_type = other DNA
tggcaggaagagacaggtaa

SEQ ID NO: 191562 - DNA, 20 bp, synthetic construct
  source 1..20: mol_type = other DNA
gtggcaggaagagacaggta

SEQ ID NO: 191563 - DNA, 20 bp, synthetic construct
  source 1..20: mol_type = other DNA
agtggcaggaagagacaggt

SEQ ID NO: 191564 - DNA, 20 bp, synthetic construct
  source 1..20: mol_type = other DNA
gagtggcaggaagagacagg

SEQ ID NO: 191565 - DNA, 20 bp, synthetic construct
  source 1..20: mol_type = other DNA
agagtggcaggaagagacag

SEQ ID NO: 191566 - DNA, 20 bp, synthetic construct
  source 1..20: mol_type = other DNA
cagagtggcaggaagagaca

SEQ ID NO: 191567 - DNA, 20 bp, synthetic construct
  source 1..20: mol_type = other DNA
gcagagtggcaggaagagac

SEQ ID NO: 191568 - DNA, 20 bp, synthetic construct
  source 1..20: mol_type = other DNA
tgcagagtggcaggaagaga

SEQ ID NO: 191569 - DNA, 20 bp, synthetic construct
  source 1..20: mol_type = other DNA
ctgcagagtggcaggaagag

SEQ ID NO: 191570 - DNA, 20 bp, synthetic construct
  source 1..20: mol_type = other DNA
tctgcagagtggcaggaaga

SEQ ID NO: 191571 - DNA, 20 bp, synthetic construct
  source 1..20: mol_type = other DNA
ctctgcagagtggcaggaag

SEQ ID NO: 191572 - DNA, 20 bp, synthetic construct
  source 1..20: mol_type = other DNA
gctctgcagagtggcaggaa

SEQ ID NO: 191573 - DNA, 20 bp, synthetic construct
  source 1..20: mol_type = other DNA
ggctctgcagagtggcagga

SEQ ID NO: 191574 - DNA, 20 bp, synthetic construct
  source 1..20: mol_type = other DNA
tggctctgcagagtggcagg

SEQ ID NO: 191575 - DNA, 20 bp, synthetic construct
  source 1..20: mol_type = other DNA
ctggctctgcagagtggcag

SEQ ID NO: 191576 - DNA, 20 bp, synthetic construct
  source 1..20: mol_type = other DNA
actggctctgcagagtggca

SEQ ID NO: 191577 - DNA, 20 bp, synthetic construct
  source 1..20: mol_type = other DNA
tactggctctgcagagtggc

SEQ ID NO: 191578 - DNA, 20 bp, synthetic construct
  source 1..20: mol_type = other DNA
ttactggctctgcagagtgg

SEQ ID NO: 191579 - DNA, 20 bp, synthetic construct
  source 1..20: mol_type = other DNA
cttactggctctgcagagtg

SEQ ID NO: 191580 - DNA, 20 bp, synthetic construct
  source 1..20: mol_type = other DNA
tcttactggctctgcagagt

SEQ ID NO: 191581 - DNA, 20 bp, synthetic construct
  source 1..20: mol_type = other DNA
atcttactggctctgcagag

SEQ ID NO: 191582 - DNA, 20 bp, synthetic construct
  source 1..20: mol_type = other DNA
catcttactggctctgcaga

SEQ ID NO: 191583 - DNA, 20 bp, synthetic construct
  source 1..20: mol_type = other DNA
acatcttactggctctgcag

SEQ ID NO: 191584 - DNA, 20 bp, synthetic construct
  source 1..20: mol_type = other DNA
cacatcttactggctctgca

SEQ ID NO: 191585 - DNA, 20 bp, synthetic construct
  source 1..20: mol_type = other DNA
ccacatcttactggctctgc

SEQ ID NO: 191586 - DNA, 20 bp, synthetic construct
  source 1..20: mol_type = other DNA
accacatcttactggctctg

SEQ ID NO: 191587 - DNA, 20 bp, synthetic construct
  source 1..20: mol_type = other DNA
caccacatcttactggctct

SEQ ID NO: 191588 - DNA, 20 bp, synthetic construct
  source 1..20: mol_type = other DNA
ccaccacatcttactggctc

SEQ ID NO: 191589 - DNA, 20 bp, synthetic construct
  source 1..20: mol_type = other DNA
tccaccacatcttactggct

SEQ ID NO: 191590 - DNA, 20 bp, synthetic construct
  source 1..20: mol_type = other DNA
ttccaccacatcttactggc

SEQ ID NO: 191591 - DNA, 20 bp, synthetic construct
  source 1..20: mol_type = other DNA
tttccaccacatcttactgg

SEQ ID NO: 191592 - DNA, 20 bp, synthetic construct
  source 1..20: mol_type = other DNA
ctttccaccacatcttactg

SEQ ID NO: 191593 - DNA, 20 bp, synthetic construct
  source 1..20: mol_type = other DNA
cctttccaccacatcttact

SEQ ID NO: 191594 - DNA, 20 bp, synthetic construct
  source 1..20: mol_type = other DNA
ccctttccaccacatcttac

SEQ ID NO: 191595 - DNA, 20 bp, synthetic construct
  source 1..20: mol_type = other DNA
gccctttccaccacatctta

SEQ ID NO: 191596 - DNA, 20 bp, synthetic construct
  source 1..20: mol_type = other DNA
ggccctttccaccacatctt

SEQ ID NO: 191597 - DNA, 20 bp, synthetic construct
  source 1..20: mol_type = other DNA
gggccctttccaccacatct

SEQ ID NO: 191598 - DNA, 20 bp, synthetic construct
  source 1..20: mol_type = other DNA
tgggccctttccaccacatc

SEQ ID NO: 191599 - DNA, 20 bp, synthetic construct
  source 1..20: mol_type = other DNA
ctgggccctttccaccacat

SEQ ID NO: 191600 - DNA, 20 bp, synthetic construct
  source 1..20: mol_type = other DNA
cctgggccctttccaccaca

SEQ ID NO: 191601 - DNA, 20 bp, synthetic construct
  source 1..20: mol_type = other DNA
gcctgggccctttccaccac

SEQ ID NO: 191602 - DNA, 20 bp, synthetic construct
  source 1..20: mol_type = other DNA
agcctgggccctttccacca

SEQ ID NO: 191603 - DNA, 20 bp, synthetic construct
  source 1..20: mol_type = other DNA
aagcctgggccctttccacc

SEQ ID NO: 191604 - DNA, 20 bp, synthetic construct
  source 1..20: mol_type = other DNA
aaagcctgggccctttccac

SEQ ID NO: 191605 - DNA, 20 bp, synthetic construct
  source 1..20: mol_type = other DNA
caaagcctgggccctttcca

SEQ ID NO: 191606 - DNA, 20 bp, synthetic construct
  source 1..20: mol_type = other DNA
ccaaagcctgggccctttcc

SEQ ID NO: 191607 - DNA, 20 bp, synthetic construct
  source 1..20: mol_type = other DNA
tccaaagcctgggccctttc

SEQ ID NO: 191608 - DNA, 20 bp, synthetic construct
  source 1..20: mol_type = other DNA
ctccaaagcctgggcccttt

SEQ ID NO: 191609 - DNA, 20 bp, synthetic construct
  source 1..20: mol_type = other DNA
cctccaaagcctgggccctt

SEQ ID NO: 191610 - DNA, 20 bp, synthetic construct
  source 1..20: mol_type = other DNA
tcctccaaagcctgggccct

SEQ ID NO: 191611 - DNA, 20 bp, synthetic construct
  source 1..20: mol_type = other DNA
ctcctccaaagcctgggccc

SEQ ID NO: 191612 - DNA, 20 bp, synthetic construct
  source 1..20: mol_type = other DNA
cctcctccaaagcctgggcc

SEQ ID NO: 191613 - DNA, 20 bp, synthetic construct
  source 1..20: mol_type = other DNA
ccctcctccaaagcctgggc

SEQ ID NO: 191614 - DNA, 20 bp, synthetic construct
  source 1..20: mol_type = other DNA
gccctcctccaaagcctggg

SEQ ID NO: 191615 - DNA, 20 bp, synthetic construct
  source 1..20: mol_type = other DNA
agccctcctccaaagcctgg

SEQ ID NO: 191616 - DNA, 20 bp, synthetic construct
  source 1..20: mol_type = other DNA
cagccctcctccaaagcctg

SEQ ID NO: 191617 - DNA, 20 bp, synthetic construct
  source 1..20: mol_type = other DNA
ccagccctcctccaaagcct

SEQ ID NO: 191618 - DNA, 20 bp, synthetic construct
  source 1..20: mol_type = other DNA
gccagccctcctccaaagcc

SEQ ID NO: 191619 - DNA, 20 bp, synthetic construct
  source 1..20: mol_type = other DNA
agccagccctcctccaaagc

SEQ ID NO: 191620 - DNA, 20 bp, synthetic construct
  source 1..20: mol_type = other DNA
cagccagccctcctccaaag

SEQ ID NO: 191621 - DNA, 20 bp, synthetic construct
  source 1..20: mol_type = other DNA
ccagccagccctcctccaaa

SEQ ID NO: 191622 - DNA, 20 bp, synthetic construct
  source 1..20: mol_type = other DNA
cccagccagccctcctccaa

SEQ ID NO: 191623 - DNA, 20 bp, synthetic construct
  source 1..20: mol_type = other DNA
ccccagccagccctcctcca

SEQ ID NO: 191624 - DNA, 20 bp, synthetic construct
  source 1..20: mol_type = other DNA
accccagccagccctcctcc

SEQ ID NO: 191625 - DNA, 20 bp, synthetic construct
  source 1..20: mol_type = other DNA
aaccccagccagccctcctc

SEQ ID NO: 191626 - DNA, 20 bp, synthetic construct
  source 1..20: mol_type = other DNA
caaccccagccagccctcct

SEQ ID NO: 191627 - DNA, 20 bp, synthetic construct
  source 1..20: mol_type = other DNA
ccaaccccagccagccctcc

SEQ ID NO: 191628 - DNA, 20 bp, synthetic construct
  source 1..20: mol_type = other DNA
tccaaccccagccagccctc

SEQ ID NO: 191629 - DNA, 20 bp, synthetic construct
  source 1..20: mol_type = other DNA
atccaaccccagccagccct

SEQ ID NO: 191630 - DNA, 20 bp, synthetic construct
  source 1..20: mol_type = other DNA
gatccaaccccagccagccc

SEQ ID NO: 191631 - DNA, 20 bp, synthetic construct
  source 1..20: mol_type = other DNA
agatccaaccccagccagcc

SEQ ID NO: 191632 - DNA, 20 bp, synthetic construct
  source 1..20: mol_type = other DNA
aagatccaaccccagccagc

SEQ ID NO: 191633 - DNA, 20 bp, synthetic construct
  source 1..20: mol_type = other DNA
caagatccaaccccagccag

SEQ ID NO: 191634 - DNA, 20 bp, synthetic construct
  source 1..20: mol_type = other DNA
ccaagatccaaccccagcca

SEQ ID NO: 191635 - DNA, 20 bp, synthetic construct
  source 1..20: mol_type = other DNA
gccaagatccaaccccagcc

SEQ ID NO: 191636 - DNA, 20 bp, synthetic construct
  source 1..20: mol_type = other DNA
agccaagatccaaccccagc

SEQ ID NO: 191637 - DNA, 20 bp, synthetic construct
  source 1..20: mol_type = other DNA
cagccaagatccaaccccag

SEQ ID NO: 191638 - DNA, 20 bp, synthetic construct
  source 1..20: mol_type = other DNA
gcagccaagatccaacccca

SEQ ID NO: 191639 - DNA, 20 bp, synthetic construct
  source 1..20: mol_type = other DNA
ggcagccaagatccaacccc

SEQ ID NO: 191640 - DNA, 20 bp, synthetic construct
  source 1..20: mol_type = other DNA
gggcagccaagatccaaccc

SEQ ID NO: 191641 - DNA, 20 bp, synthetic construct
  source 1..20: mol_type = other DNA
ggggcagccaagatccaacc

SEQ ID NO: 191642 - DNA, 20 bp, synthetic construct
  source 1..20: mol_type = other DNA
gggggcagccaagatccaac

SEQ ID NO: 191643 - DNA, 20 bp, synthetic construct
  source 1..20: mol_type = other DNA
agggggcagccaagatccaa

SEQ ID NO: 191644 - DNA, 20 bp, synthetic construct
  source 1..20: mol_type = other DNA
tagggggcagccaagatcca

SEQ ID NO: 191645 - DNA, 20 bp, synthetic construct
  source 1..20: mol_type = other DNA
gtagggggcagccaagatcc

SEQ ID NO: 191646 - DNA, 20 bp, synthetic construct
  source 1..20: mol_type = other DNA
agtagggggcagccaagatc

SEQ ID NO: 191647 - DNA, 20 bp, synthetic construct
  source 1..20: mol_type = other DNA
tagtagggggcagccaagat

SEQ ID NO: 191648 - DNA, 20 bp, synthetic construct
  source 1..20: mol_type = other DNA
ctagtagggggcagccaaga

SEQ ID NO: 191649 - DNA, 20 bp, synthetic construct
  source 1..20: mol_type = other DNA
gctagtagggggcagccaag

SEQ ID NO: 191650 - DNA, 20 bp, synthetic construct
  source 1..20: mol_type = other DNA
agctagtagggggcagccaa

SEQ ID NO: 191651 - DNA, 20 bp, synthetic construct
  source 1..20: mol_type = other DNA
cagctagtagggggcagcca

SEQ ID NO: 191652 - DNA, 20 bp, synthetic construct
  source 1..20: mol_type = other DNA
acagctagtagggggcagcc

SEQ ID NO: 191653 - DNA, 20 bp, synthetic construct
  source 1..20: mol_type = other DNA
cacagctagtagggggcagc

SEQ ID NO: 191654 - DNA, 20 bp, synthetic construct
  source 1..20: mol_type = other DNA
acacagctagtagggggcag

SEQ ID NO: 191655 - DNA, 20 bp, synthetic construct
  source 1..20: mol_type = other DNA
cacacagctagtagggggca

SEQ ID NO: 191656 - DNA, 20 bp, synthetic construct
  source 1..20: mol_type = other DNA
tcacacagctagtagggggc

SEQ ID NO: 191657 - DNA, 20 bp, synthetic construct
  source 1..20: mol_type = other DNA
gtcacacagctagtaggggg

SEQ ID NO: 191658 - DNA, 20 bp, synthetic construct
  source 1..20: mol_type = other DNA
ggtcacacagctagtagggg

SEQ ID NO: 191659 - DNA, 20 bp, synthetic construct
  source 1..20: mol_type = other DNA
aggtcacacagctagtaggg

SEQ ID NO: 191660 - DNA, 20 bp, synthetic construct
  source 1..20: mol_type = other DNA
aaggtcacacagctagtagg

SEQ ID NO: 191661 - DNA, 20 bp, synthetic construct
  source 1..20: mol_type = other DNA
caaggtcacacagctagtag

SEQ ID NO: 191662 - DNA, 20 bp, synthetic construct
  source 1..20: mol_type = other DNA
ccaaggtcacacagctagta

SEQ ID NO: 191663 - DNA, 20 bp, synthetic construct
  source 1..20: mol_type = other DNA
cccaaggtcacacagctagt

SEQ ID NO: 191664 - DNA, 20 bp, synthetic construct
  source 1..20: mol_type = other DNA
acccaaggtcacacagctag

SEQ ID NO: 191665 - DNA, 20 bp, synthetic construct
  source 1..20: mol_type = other DNA
tacccaaggtcacacagcta

SEQ ID NO: 191666 - DNA, 20 bp, synthetic construct
  source 1..20: mol_type = other DNA
ttacccaaggtcacacagct

SEQ ID NO: 191667 - DNA, 20 bp, synthetic construct
  source 1..20: mol_type = other DNA
cttacccaaggtcacacagc

SEQ ID NO: 191668 - DNA, 20 bp, synthetic construct
  source 1..20: mol_type = other DNA
acttacccaaggtcacacag

SEQ ID NO: 191669 - DNA, 20 bp, synthetic construct
  source 1..20: mol_type = other DNA
tacttacccaaggtcacaca

SEQ ID NO: 191670 - DNA, 20 bp, synthetic construct
  source 1..20: mol_type = other DNA
ctacttacccaaggtcacac

SEQ ID NO: 191671 - DNA, 20 bp, synthetic construct
  source 1..20: mol_type = other DNA
gctacttacccaaggtcaca

SEQ ID NO: 191672 - DNA, 20 bp, synthetic construct
  source 1..20: mol_type = other DNA
agctacttacccaaggtcac

SEQ ID NO: 191673 - DNA, 20 bp, synthetic construct
  source 1..20: mol_type = other DNA
cagctacttacccaaggtca

SEQ ID NO: 191674 - DNA, 20 bp, synthetic construct
  source 1..20: mol_type = other DNA
ccagctacttacccaaggtc

SEQ ID NO: 191675 - DNA, 20 bp, synthetic construct
  source 1..20: mol_type = other DNA
tccagctacttacccaaggt

SEQ ID NO: 191676 - DNA, 20 bp, synthetic construct
  source 1..20: mol_type = other DNA
gtccagctacttacccaagg

SEQ ID NO: 191677 - DNA, 20 bp, synthetic construct
  source 1..20: mol_type = other DNA
ggtccagctacttacccaag

SEQ ID NO: 191678 - DNA, 20 bp, synthetic construct
  source 1..20: mol_type = other DNA
aggtccagctacttacccaa

SEQ ID NO: 191679 - DNA, 20 bp, synthetic construct
  source 1..20: mol_type = other DNA
gaggtccagctacttaccca

SEQ ID NO: 191680 - DNA, 20 bp, synthetic construct
  source 1..20: mol_type = other DNA
agaggtccagctacttaccc

SEQ ID NO: 191681 - DNA, 20 bp, synthetic construct
  source 1..20: mol_type = other DNA
gagaggtccagctacttacc

SEQ ID NO: 191682 - DNA, 20 bp, synthetic construct
  source 1..20: mol_type = other DNA
agagaggtccagctacttac

SEQ ID NO: 191683 - DNA, 20 bp, synthetic construct
  source 1..20: mol_type = other DNA
cagagaggtccagctactta

SEQ ID NO: 191684 - DNA, 20 bp, synthetic construct
  source 1..20: mol_type = other DNA
tcagagaggtccagctactt

SEQ ID NO: 191685 - DNA, 20 bp, synthetic construct
  source 1..20: mol_type = other DNA
ctcagagaggtccagctact

SEQ ID NO: 191686 - DNA, 20 bp, synthetic construct
  source 1..20: mol_type = other DNA
gctcagagaggtccagctac

SEQ ID NO: 191687 - DNA, 20 bp, synthetic construct
  source 1..20: mol_type = other DNA
ggctcagagaggtccagcta

SEQ ID NO: 191688 - DNA, 20 bp, synthetic construct
  source 1..20: mol_type = other DNA
aggctcagagaggtccagct

SEQ ID NO: 191689 - DNA, 20 bp, synthetic construct
  source 1..20: mol_type = other DNA
caggctcagagaggtccagc

SEQ ID NO: 191690 - DNA, 20 bp, synthetic construct
  source 1..20: mol_type = other DNA
ccaggctcagagaggtccag

SEQ ID NO: 191691 - DNA, 20 bp, synthetic construct
  source 1..20: mol_type = other DNA
accaggctcagagaggtcca

SEQ ID NO: 191692 - DNA, 20 bp, synthetic construct
  source 1..20: mol_type = other DNA
aaccaggctcagagaggtcc

SEQ ID NO: 191693 - DNA, 20 bp, synthetic construct
  source 1..20: mol_type = other DNA
gaaccaggctcagagaggtc

SEQ ID NO: 191694 - DNA, 20 bp, synthetic construct
  source 1..20: mol_type = other DNA
cgaaccaggctcagagaggt

SEQ ID NO: 191695 - DNA, 20 bp, synthetic construct
  source 1..20: mol_type = other DNA
ccgaaccaggctcagagagg

SEQ ID NO: 191696 - DNA, 20 bp, synthetic construct
  source 1..20: mol_type = other DNA
tccgaaccaggctcagagag

SEQ ID NO: 191697 - DNA, 20 bp, synthetic construct
  source 1..20: mol_type = other DNA
ttccgaaccaggctcagaga

SEQ ID NO: 191698 - DNA, 20 bp, synthetic construct
  source 1..20: mol_type = other DNA
attccgaaccaggctcagag

SEQ ID NO: 191699 - DNA, 20 bp, synthetic construct
  source 1..20: mol_type = other DNA
gattccgaaccaggctcaga

SEQ ID NO: 191700 - DNA, 20 bp, synthetic construct
  source 1..20: mol_type = other DNA
tgattccgaaccaggctcag

SEQ ID NO: 191701 - DNA, 20 bp, synthetic construct
  source 1..20: mol_type = other DNA
atgattccgaaccaggctca

SEQ ID NO: 191702 - DNA, 20 bp, synthetic construct
  source 1..20: mol_type = other DNA
tatgattccgaaccaggctc

SEQ ID NO: 191703 - DNA, 20 bp, synthetic construct
  source 1..20: mol_type = other DNA
ctatgattccgaaccaggct

SEQ ID NO: 191704 - DNA, 20 bp, synthetic construct
  source 1..20: mol_type = other DNA
gctatgattccgaaccaggc

SEQ ID NO: 191705 - DNA, 20 bp, synthetic construct
  source 1..20: mol_type = other DNA
tgctatgattccgaaccagg

SEQ ID NO: 191706 - DNA, 20 bp, synthetic construct
  source 1..20: mol_type = other DNA
gtgctatgattccgaaccag

SEQ ID NO: 191707 - DNA, 20 bp, synthetic construct
  source 1..20: mol_type = other DNA
ggtgctatgattccgaacca

SEQ ID NO: 191708 - DNA, 20 bp, synthetic construct
  source 1..20: mol_type = other DNA
aggtgctatgattccgaacc

SEQ ID NO: 191709 - DNA, 20 bp, synthetic construct
  source 1..20: mol_type = other DNA
gaggtgctatgattccgaac

SEQ ID NO: 191710 - DNA, 20 bp, synthetic construct
  source 1..20: mol_type = other DNA
agaggtgctatgattccgaa

SEQ ID NO: 191711 - DNA, 20 bp, synthetic construct
  source 1..20: mol_type = other DNA
gagaggtgctatgattccga

SEQ ID NO: 191712 - DNA, 20 bp, synthetic construct
  source 1..20: mol_type = other DNA
agagaggtgctatgattccg

SEQ ID NO: 191713 - DNA, 20 bp, synthetic construct
  source 1..20: mol_type = other DNA
aagagaggtgctatgattcc

SEQ ID NO: 191714 - DNA, 20 bp, synthetic construct
  source 1..20: mol_type = other DNA
aaagagaggtgctatgattc

SEQ ID NO: 191715 - DNA, 20 bp, synthetic construct
  source 1..20: mol_type = other DNA
gaaagagaggtgctatgatt

SEQ ID NO: 191716 - DNA, 20 bp, synthetic construct
  source 1..20: mol_type = other DNA
tgaaagagaggtgctatgat

SEQ ID NO: 191717 - DNA, 20 bp, synthetic construct
  source 1..20: mol_type = other DNA
ctgaaagagaggtgctatga

SEQ ID NO: 191718 - DNA, 20 bp, synthetic construct
  source 1..20: mol_type = other DNA
cctgaaagagaggtgctatg

SEQ ID NO: 191719 - DNA, 20 bp, synthetic construct
  source 1..20: mol_type = other DNA
ccctgaaagagaggtgctat

SEQ ID NO: 191720 - DNA, 20 bp, synthetic construct
  source 1..20: mol_type = other DNA
gccctgaaagagaggtgcta

SEQ ID NO: 191721 - DNA, 20 bp, synthetic construct
  source 1..20: mol_type = other DNA
agccctgaaagagaggtgct

SEQ ID NO: 191722 - DNA, 20 bp, synthetic construct
  source 1..20: mol_type = other DNA
cagccctgaaagagaggtgc

SEQ ID NO: 191723 - DNA, 20 bp, synthetic construct
  source 1..20: mol_type = other DNA
gcagccctgaaagagaggtg

SEQ ID NO: 191724 - DNA, 20 bp, synthetic construct
  source 1..20: mol_type = other DNA
agcagccctgaaagagaggt

SEQ ID NO: 191725 - DNA, 20 bp, synthetic construct
  source 1..20: mol_type = other DNA
cagcagccctgaaagagagg

SEQ ID NO: 191726 - DNA, 20 bp, synthetic construct
  source 1..20: mol_type = other DNA
acagcagccctgaaagagag

SEQ ID NO: 191727 - DNA, 20 bp, synthetic construct
  source 1..20: mol_type = other DNA
tacagcagccctgaaagaga

SEQ ID NO: 191728 - DNA, 20 bp, synthetic construct
  source 1..20: mol_type = other DNA
ttacagcagccctgaaagag

SEQ ID NO: 191729 - DNA, 20 bp, synthetic construct
  source 1..20: mol_type = other DNA
cttacagcagccctgaaaga

SEQ ID NO: 191730 - DNA, 20 bp, synthetic construct
  source 1..20: mol_type = other DNA
ccttacagcagccctgaaag

SEQ ID NO: 191731 - DNA, 20 bp, synthetic construct
  source 1..20: mol_type = other DNA
tccttacagcagccctgaaa

SEQ ID NO: 191732 - DNA, 20 bp, synthetic construct
  source 1..20: mol_type = other DNA
ttccttacagcagccctgaa

SEQ ID NO: 191733 - DNA, 20 bp, synthetic construct
  source 1..20: mol_type = other DNA
attccttacagcagccctga

SEQ ID NO: 191734 - DNA, 20 bp, synthetic construct
  source 1..20: mol_type = other DNA
tattccttacagcagccctg

SEQ ID NO: 191735 - DNA, 20 bp, synthetic construct
  source 1..20: mol_type = other DNA
ctattccttacagcagccct

SEQ ID NO: 191736 - DNA, 20 bp, synthetic construct
  source 1..20: mol_type = other DNA
gctattccttacagcagccc

SEQ ID NO: 191737 - DNA, 20 bp, synthetic construct
  source 1..20: mol_type = other DNA
tgctattccttacagcagcc

SEQ ID NO: 191738 - DNA, 20 bp, synthetic construct
  source 1..20: mol_type = other DNA
ctgctattccttacagcagc

SEQ ID NO: 191739 - DNA, 20 bp, synthetic construct
  source 1..20: mol_type = other DNA
actgctattccttacagcag

SEQ ID NO: 191740 - DNA, 20 bp, synthetic construct
  source 1..20: mol_type = other DNA
cactgctattccttacagca

SEQ ID NO: 191741 - DNA, 20 bp, synthetic construct
  source 1..20: mol_type = other DNA
ccactgctattccttacagc

SEQ ID NO: 191742 - DNA, 20 bp, synthetic construct
  source 1..20: mol_type = other DNA
accactgctattccttacag

SEQ ID NO: 191743 - DNA, 20 bp, synthetic construct
  source 1..20: mol_type = other DNA
caccactgctattccttaca

SEQ ID NO: 191744 - DNA, 20 bp, synthetic construct
  source 1..20: mol_type = other DNA
acaccactgctattccttac

SEQ ID NO: 191745 - DNA, 20 bp, synthetic construct
  source 1..20: mol_type = other DNA
cacaccactgctattcctta

SEQ ID NO: 191746 - DNA, 20 bp, synthetic construct
  source 1..20: mol_type = other DNA
acacaccactgctattcctt

SEQ ID NO: 191747 - DNA, 20 bp, synthetic construct
  source 1..20: mol_type = other DNA
tacacaccactgctattcct

SEQ ID NO: 191748 - DNA, 20 bp, synthetic construct
  source 1..20: mol_type = other DNA
atacacaccactgctattcc

SEQ ID NO: 191749 - DNA, 20 bp, synthetic construct
  source 1..20: mol_type = other DNA
tatacacaccactgctattc

SEQ ID NO: 191750 - DNA, 20 bp, synthetic construct
  source 1..20: mol_type = other DNA
ttatacacaccactgctatt

SEQ ID NO: 191751 - DNA, 20 bp, synthetic construct
  source 1..20: mol_type = other DNA
tttatacacaccactgctat

SEQ ID NO: 191752 - DNA, 20 bp, synthetic construct
  source 1..20: mol_type = other DNA
ctttatacacaccactgcta

SEQ ID NO: 191753 - DNA, 20 bp, synthetic construct
  source 1..20: mol_type = other DNA
gctttatacacaccactgct

SEQ ID NO: 191754 - DNA, 20 bp, synthetic construct
  source 1..20: mol_type = other DNA
tgctttatacacaccactgc

SEQ ID NO: 191755 - DNA, 20 bp, synthetic construct
  source 1..20: mol_type = other DNA
ctgctttatacacaccactg

SEQ ID NO: 191756 - DNA, 20 bp, synthetic construct
  source 1..20: mol_type = other DNA
tctgctttatacacaccact

SEQ ID NO: 191757 - DNA, 20 bp, synthetic construct
  source 1..20: mol_type = other DNA
ctctgctttatacacaccac

SEQ ID NO: 191758 - DNA, 20 bp, synthetic construct
  source 1..20: mol_type = other DNA
gctctgctttatacacacca

SEQ ID NO: 191759 - DNA, 20 bp, synthetic construct
  source 1..20: mol_type = other DNA
cgctctgctttatacacacc

SEQ ID NO: 191760 - DNA, 20 bp, synthetic construct
  source 1..20: mol_type = other DNA
gcgctctgctttatacacac

SEQ ID NO: 191761 - DNA, 20 bp, synthetic construct
  source 1..20: mol_type = other DNA
tgcgctctgctttatacaca

SEQ ID NO: 191762 - DNA, 20 bp, synthetic construct
  source 1..20: mol_type = other DNA
gtgcgctctgctttatacac

SEQ ID NO: 191763 - DNA, 20 bp, synthetic construct
  source 1..20: mol_type = other DNA
tgtgcgctctgctttataca

SEQ ID NO: 191764 - DNA, 20 bp, synthetic construct
  source 1..20: mol_type = other DNA
ctgtgcgctctgctttatac

SEQ ID NO: 191765 - DNA, 20 bp, synthetic construct
  source 1..20: mol_type = other DNA
gctgtgcgctctgctttata

SEQ ID NO: 191766 - DNA, 20 bp, synthetic construct
  source 1..20: mol_type = other DNA
ggctgtgcgctctgctttat

SEQ ID NO: 191767 - DNA, 20 bp, synthetic construct
  source 1..20: mol_type = other DNA
tggctgtgcgctctgcttta

SEQ ID NO: 191768 - DNA, 20 bp, synthetic construct
  source 1..20: mol_type = other DNA
ctggctgtgcgctctgcttt

SEQ ID NO: 191769 - DNA, 20 bp, synthetic construct
  source 1..20: mol_type = other DNA
gctggctgtgcgctctgctt

SEQ ID NO: 191770 - DNA, 20 bp, synthetic construct
  source 1..20: mol_type = other DNA
tgctggctgtgcgctctgct

SEQ ID NO: 191771 - DNA, 20 bp, synthetic construct
  source 1..20: mol_type = other DNA
ttgctggctgtgcgctctgc

SEQ ID NO: 191772 - DNA, 20 bp, synthetic construct
  source 1..20: mol_type = other DNA
gttgctggctgtgcgctctg

SEQ ID NO: 191773 - DNA, 20 bp, synthetic construct
  source 1..20: mol_type = other DNA
agttgctggctgtgcgctct

SEQ ID NO: 191774 - DNA, 20 bp, synthetic construct
  source 1..20: mol_type = other DNA
cagttgctggctgtgcgctc

SEQ ID NO: 191775 - DNA, 20 bp, synthetic construct
  source 1..20: mol_type = other DNA
ccagttgctggctgtgcgct

SEQ ID NO: 191776 - DNA, 20 bp, synthetic construct
  source 1..20: mol_type = other DNA
gccagttgctggctgtgcgc

SEQ ID NO: 191777 - DNA, 20 bp, synthetic construct
  source 1..20: mol_type = other DNA
ggccagttgctggctgtgcg

SEQ ID NO: 191778 - DNA, 20 bp, synthetic construct
  source 1..20: mol_type = other DNA
gggccagttgctggctgtgc

SEQ ID NO: 191779 - DNA, 20 bp, synthetic construct
  source 1..20: mol_type = other DNA
ggggccagttgctggctgtg

SEQ ID NO: 191780 - DNA, 20 bp, synthetic construct
  source 1..20: mol_type = other DNA
aggggccagttgctggctgt

SEQ ID NO: 191781 - DNA, 20 bp, synthetic construct
  source 1..20: mol_type = other DNA
taggggccagttgctggctg

SEQ ID NO: 191782 - DNA, 20 bp, synthetic construct
  source 1..20: mol_type = other DNA
ctaggggccagttgctggct

SEQ ID NO: 191783 - DNA, 20 bp, synthetic construct
  source 1..20: mol_type = other DNA
gctaggggccagttgctggc

SEQ ID NO: 191784 - DNA, 20 bp, synthetic construct
  source 1..20: mol_type = other DNA
ggctaggggccagttgctgg

SEQ ID NO: 191785 - DNA, 20 bp, synthetic construct
  source 1..20: mol_type = other DNA
tggctaggggccagttgctg

SEQ ID NO: 191786 - DNA, 20 bp, synthetic construct
  source 1..20: mol_type = other DNA
gtggctaggggccagttgct

SEQ ID NO: 191787 - DNA, 20 bp, synthetic construct
  source 1..20: mol_type = other DNA
tgtggctaggggccagttgc

SEQ ID NO: 191788 - DNA, 20 bp, synthetic construct
  source 1..20: mol_type = other DNA
gtgtggctaggggccagttg

SEQ ID NO: 191789 - DNA, 20 bp, synthetic construct
  source 1..20: mol_type = other DNA
agtgtggctaggggccagtt

SEQ ID NO: 191790 - DNA, 20 bp, synthetic construct
  source 1..20: mol_type = other DNA
cagtgtggctaggggccagt

SEQ ID NO: 191791 - DNA, 20 bp, synthetic construct
  source 1..20: mol_type = other DNA
gcagtgtggctaggggccag

SEQ ID NO: 191792 - DNA, 20 bp, synthetic construct
  source 1..20: mol_type = other DNA
agcagtgtggctaggggcca

SEQ ID NO: 191793 - DNA, 20 bp, synthetic construct
  source 1..20: mol_type = other DNA
cagcagtgtggctaggggcc

SEQ ID NO: 191794 - DNA, 20 bp, synthetic construct
  source 1..20: mol_type = other DNA
tcagcagtgtggctaggggc

SEQ ID NO: 191795 - DNA, 20 bp, synthetic construct
  source 1..20: mol_type = other DNA
ctcagcagtgtggctagggg

SEQ ID NO: 191796 - DNA, 20 bp, synthetic construct
  source 1..20: mol_type = other DNA
gctcagcagtgtggctaggg

SEQ ID NO: 191797 - DNA, 20 bp, synthetic construct
  source 1..20: mol_type = other DNA
tgctcagcagtgtggctagg

SEQ ID NO: 191798 - DNA, 20 bp, synthetic construct
  source 1..20: mol_type = other DNA
gtgctcagcagtgtggctag

SEQ ID NO: 191799 - DNA, 20 bp, synthetic construct
  source 1..20: mol_type = other DNA
ggtgctcagcagtgtggcta

SEQ ID NO: 191800 - DNA, 20 bp, synthetic construct
  source 1..20: mol_type = other DNA
aggtgctcagcagtgtggct

SEQ ID NO: 191801 - DNA, 20 bp, synthetic construct
  source 1..20: mol_type = other DNA
taggtgctcagcagtgtggc

SEQ ID NO: 191802 - DNA, 20 bp, synthetic construct
  source 1..20: mol_type = other DNA
gtaggtgctcagcagtgtgg

SEQ ID NO: 191803 - DNA, 20 bp, synthetic construct
  source 1..20: mol_type = other DNA
agtaggtgctcagcagtgtg

SEQ ID NO: 191804 - DNA, 20 bp, synthetic construct
  source 1..20: mol_type = other DNA
cagtaggtgctcagcagtgt

SEQ ID NO: 191805 - DNA, 20 bp, synthetic construct
  source 1..20: mol_type = other DNA
acagtaggtgctcagcagtg

SEQ ID NO: 191806 - DNA, 20 bp, synthetic construct
  source 1..20: mol_type = other DNA
cacagtaggtgctcagcagt

SEQ ID NO: 191807 - DNA, 20 bp, synthetic construct
  source 1..20: mol_type = other DNA
tcacagtaggtgctcagcag

SEQ ID NO: 191808 - DNA, 20 bp, synthetic construct
  source 1..20: mol_type = other DNA
atcacagtaggtgctcagca

SEQ ID NO: 191809 - DNA, 20 bp, synthetic construct
  source 1..20: mol_type = other DNA
tatcacagtaggtgctcagc

SEQ ID NO: 191810 - DNA, 20 bp, synthetic construct
  source 1..20: mol_type = other DNA
ttatcacagtaggtgctcag

SEQ ID NO: 191811 - DNA, 20 bp, synthetic construct
  source 1..20: mol_type = other DNA
cttatcacagtaggtgctca

SEQ ID NO: 191812 - DNA, 20 bp, synthetic construct
  source 1..20: mol_type = other DNA
gcttatcacagtaggtgctc

SEQ ID NO: 191813 - DNA, 20 bp, synthetic construct
  source 1..20: mol_type = other DNA
agcttatcacagtaggtgct

SEQ ID NO: 191814 - DNA, 20 bp, synthetic construct
  source 1..20: mol_type = other DNA
cagcttatcacagtaggtgc

SEQ ID NO: 191815 - DNA, 20 bp, synthetic construct
  source 1..20: mol_type = other DNA
gcagcttatcacagtaggtg

SEQ ID NO: 191816 - DNA, 20 bp, synthetic construct
  source 1..20: mol_type = other DNA
ggcagcttatcacagtaggt

SEQ ID NO: 191817 - DNA, 20 bp, synthetic construct
  source 1..20: mol_type = other DNA
tggcagcttatcacagtagg

SEQ ID NO: 191818 - DNA, 20 bp, synthetic construct
  source 1..20: mol_type = other DNA
atggcagcttatcacagtag

SEQ ID NO: 191819 - DNA, 20 bp, synthetic construct
  source 1..20: mol_type = other DNA
aatggcagcttatcacagta

SEQ ID NO: 191820 - DNA, 20 bp, synthetic construct
  source 1..20: mol_type = other DNA
caatggcagcttatcacagt

SEQ ID NO: 191821 - DNA, 20 bp, synthetic construct
  source 1..20: mol_type = other DNA
acaatggcagcttatcacag

SEQ ID NO: 191822 - DNA, 20 bp, synthetic construct
  source 1..20: mol_type = other DNA
cacaatggcagcttatcaca

SEQ ID NO: 191823 - DNA, 20 bp, synthetic construct
  source 1..20: mol_type = other DNA
ccacaatggcagcttatcac

SEQ ID NO: 191824 - DNA, 20 bp, synthetic construct
  source 1..20: mol_type = other DNA
accacaatggcagcttatca

SEQ ID NO: 191825 - DNA, 20 bp, synthetic construct
  source 1..20: mol_type = other DNA
caccacaatggcagcttatc

SEQ ID NO: 191826 - DNA, 20 bp, synthetic construct
  source 1..20: mol_type = other DNA
acaccacaatggcagcttat

SEQ ID NO: 191827 - DNA, 20 bp, synthetic construct
  source 1..20: mol_type = other DNA
cacaccacaatggcagctta

SEQ ID NO: 191828 - DNA, 20 bp, synthetic construct
  source 1..20: mol_type = other DNA
acacaccacaatggcagctt

SEQ ID NO: 191829 - DNA, 20 bp, synthetic construct
  source 1..20: mol_type = other DNA
cacacaccacaatggcagct

SEQ ID NO: 191830 - DNA, 20 bp, synthetic construct
  source 1..20: mol_type = other DNA
tcacacaccacaatggcagc

SEQ ID NO: 191831 - DNA, 20 bp, synthetic construct
  source 1..20: mol_type = other DNA
ttcacacaccacaatggcag

SEQ ID NO: 191832 - DNA, 20 bp, synthetic construct
  source 1..20: mol_type = other DNA
cttcacacaccacaatggca

SEQ ID NO: 191833 - DNA, 20 bp, synthetic construct
  source 1..20: mol_type = other DNA
gcttcacacaccacaatggc

SEQ ID NO: 191834 - DNA, 20 bp, synthetic construct
  source 1..20: mol_type = other DNA
tgcttcacacaccacaatgg

SEQ ID NO: 191835 - DNA, 20 bp, synthetic construct
  source 1..20: mol_type = other DNA
ttgcttcacacaccacaatg

SEQ ID NO: 191836 - DNA, 20 bp, synthetic construct
  source 1..20: mol_type = other DNA
tttgcttcacacaccacaat

SEQ ID NO: 191837 - DNA, 20 bp, synthetic construct
  source 1..20: mol_type = other DNA
ctttgcttcacacaccacaa

SEQ ID NO: 191838 - DNA, 20 bp, synthetic construct
  source 1..20: mol_type = other DNA
cctttgcttcacacaccaca

SEQ ID NO: 191839 - DNA, 20 bp, synthetic construct
  source 1..20: mol_type = other DNA
ccctttgcttcacacaccac

SEQ ID NO: 191840 - DNA, 20 bp, synthetic construct
  source 1..20: mol_type = other DNA
cccctttgcttcacacacca

SEQ ID NO: 191841 - DNA, 20 bp, synthetic construct
  source 1..20: mol_type = other DNA
tcccctttgcttcacacacc

SEQ ID NO: 191842 - DNA, 20 bp, synthetic construct
  source 1..20: mol_type = other DNA
ttcccctttgcttcacacac

SEQ ID NO: 191843 - DNA, 20 bp, synthetic construct
  source 1..20: mol_type = other DNA
tttcccctttgcttcacaca

SEQ ID NO: 191844 - DNA, 20 bp, synthetic construct
  source 1..20: mol_type = other DNA
gtttcccctttgcttcacac

SEQ ID NO: 191845 - DNA, 20 bp, synthetic construct
  source 1..20: mol_type = other DNA
tgtttcccctttgcttcaca

SEQ ID NO: 191846 - DNA, 20 bp, synthetic construct
  source 1..20: mol_type = other DNA
atgtttcccctttgcttcac

SEQ ID NO: 191847 - DNA, 20 bp, synthetic construct
  source 1..20: mol_type = other DNA
catgtttcccctttgcttca

SEQ ID NO: 191848 - DNA, 20 bp, synthetic construct
  source 1..20: mol_type = other DNA
gcatgtttcccctttgcttc

SEQ ID NO: 191849 - DNA, 20 bp, synthetic construct
  source 1..20: mol_type = other DNA
ggcatgtttcccctttgctt

SEQ ID NO: 191850 - DNA, 20 bp, synthetic construct
  source 1..20: mol_type = other DNA
aggcatgtttcccctttgct

SEQ ID NO: 191851 - DNA, 20 bp, synthetic construct
  source 1..20: mol_type = other DNA
caggcatgtttcccctttgc

SEQ ID NO: 191852 - DNA, 20 bp, synthetic construct
  source 1..20: mol_type = other DNA
gcaggcatgtttcccctttg

SEQ ID NO: 191853 - DNA, 20 bp, synthetic construct
  source 1..20: mol_type = other DNA
agcaggcatgtttccccttt

SEQ ID NO: 191854 - DNA, 20 bp, synthetic construct
  source 1..20: mol_type = other DNA
cagcaggcatgtttcccctt

SEQ ID NO: 191855 - DNA, 20 bp, synthetic construct
  source 1..20: mol_type = other DNA
acagcaggcatgtttcccct

SEQ ID NO: 191856 - DNA, 20 bp, synthetic construct
  source 1..20: mol_type = other DNA
tacagcaggcatgtttcccc

SEQ ID NO: 191857 - DNA, 20 bp, synthetic construct
  source 1..20: mol_type = other DNA
ctacagcaggcatgtttccc

SEQ ID NO: 191858 - DNA, 20 bp, synthetic construct
  source 1..20: mol_type = other DNA
actacagcaggcatgtttcc

SEQ ID NO: 191859 - DNA, 20 bp, synthetic construct
  source 1..20: mol_type = other DNA
cactacagcaggcatgtttc

SEQ ID NO: 191860 - DNA, 20 bp, synthetic construct
  source 1..20: mol_type = other DNA
tcactacagcaggcatgttt

SEQ ID NO: 191861 - DNA, 20 bp, synthetic construct
  source 1..20: mol_type = other DNA
ctcactacagcaggcatgtt

SEQ ID NO: 191862 - DNA, 20 bp, synthetic construct
  source 1..20: mol_type = other DNA
gctcactacagcaggcatgt

SEQ ID NO: 191863 - DNA, 20 bp, synthetic construct
  source 1..20: mol_type = other DNA
agctcactacagcaggcatg

SEQ ID NO: 191864 - DNA, 20 bp, synthetic construct
  source 1..20: mol_type = other DNA
aagctcactacagcaggcat

SEQ ID NO: 191865 - DNA, 20 bp, synthetic construct
  source 1..20: mol_type = other DNA
gaagctcactacagcaggca

SEQ ID NO: 191866 - DNA, 20 bp, synthetic construct
  source 1..20: mol_type = other DNA
ggaagctcactacagcaggc

SEQ ID NO: 191867 - DNA, 20 bp, synthetic construct
  source 1..20: mol_type = other DNA
aggaagctcactacagcagg

SEQ ID NO: 191868 - DNA, 20 bp, synthetic construct
  source 1..20: mol_type = other DNA
caggaagctcactacagcag

SEQ ID NO: 191869 - DNA, 20 bp, synthetic construct
  source 1..20: mol_type = other DNA
acaggaagctcactacagca

SEQ ID NO: 191870 - DNA, 20 bp, synthetic construct
  source 1..20: mol_type = other DNA
tacaggaagctcactacagc

SEQ ID NO: 191871 - DNA, 20 bp, synthetic construct
  source 1..20: mol_type = other DNA
ctacaggaagctcactacag

SEQ ID NO: 191872 - DNA, 20 bp, synthetic construct
  source 1..20: mol_type = other DNA
cctacaggaagctcactaca

SEQ ID NO: 191873 - DNA, 20 bp, synthetic construct
  source 1..20: mol_type = other DNA
ccctacaggaagctcactac

SEQ ID NO: 191874 - DNA, 20 bp, synthetic construct
  source 1..20: mol_type = other DNA
gccctacaggaagctcacta

SEQ ID NO: 191875 - DNA, 20 bp, synthetic construct
  source 1..20: mol_type = other DNA
tgccctacaggaagctcact

SEQ ID NO: 191876 - DNA, 20 bp, synthetic construct
  source 1..20: mol_type = other DNA
ctgccctacaggaagctcac

SEQ ID NO: 191877 - DNA, 20 bp, synthetic construct
  source 1..20: mol_type = other DNA
cctgccctacaggaagctca

SEQ ID NO: 191878 - DNA, 20 bp, synthetic construct
  source 1..20: mol_type = other DNA
acctgccctacaggaagctc

SEQ ID NO: 191879 - DNA, 20 bp, synthetic construct
  source 1..20: mol_type = other DNA
aacctgccctacaggaagct

SEQ ID NO: 191880 - DNA, 20 bp, synthetic construct
  source 1..20: mol_type = other DNA
caacctgccctacaggaagc

SEQ ID NO: 191881 - DNA, 20 bp, synthetic construct
  source 1..20: mol_type = other DNA
acaacctgccctacaggaag

SEQ ID NO: 191882 - DNA, 20 bp, synthetic construct
  source 1..20: mol_type = other DNA
tacaacctgccctacaggaa

SEQ ID NO: 191883 - DNA, 20 bp, synthetic construct
  source 1..20: mol_type = other DNA
ctacaacctgccctacagga

SEQ ID NO: 191884 - DNA, 20 bp, synthetic construct
  source 1..20: mol_type = other DNA
tctacaacctgccctacagg

SEQ ID NO: 191885 - DNA, 20 bp, synthetic construct
  source 1..20: mol_type = other DNA
ttctacaacctgccctacag

SEQ ID NO: 191886 - DNA, 20 bp, synthetic construct
  source 1..20: mol_type = other DNA
gttctacaacctgccctaca

SEQ ID NO: 191887 - DNA, 20 bp, synthetic construct
  source 1..20: mol_type = other DNA
ggttctacaacctgccctac

SEQ ID NO: 191888 - DNA, 20 bp, synthetic construct
  source 1..20: mol_type = other DNA
tggttctacaacctgcccta

SEQ ID NO: 191889 - DNA, 20 bp, synthetic construct
  source 1..20: mol_type = other DNA
ctggttctacaacctgccct

SEQ ID NO: 191890 - DNA, 20 bp, synthetic construct
  source 1..20: mol_type = other DNA
tctggttctacaacctgccc

SEQ ID NO: 191891 - DNA, 20 bp, synthetic construct
  source 1..20: mol_type = other DNA
ctctggttctacaacctgcc

SEQ ID NO: 191892 - DNA, 20 bp, synthetic construct
  source 1..20: mol_type = other DNA
cctctggttctacaacctgc

SEQ ID NO: 191893 - DNA, 20 bp, synthetic construct
  source 1..20: mol_type = other DNA
acctctggttctacaacctg

SEQ ID NO: 191894 - DNA, 20 bp, synthetic construct
  source 1..20: mol_type = other DNA
cacctctggttctacaacct

SEQ ID NO: 191895 - DNA, 20 bp, synthetic construct
  source 1..20: mol_type = other DNA
ccacctctggttctacaacc

SEQ ID NO: 191896 - DNA, 20 bp, synthetic construct
  source 1..20: mol_type = other DNA
cccacctctggttctacaac

SEQ ID NO: 191897 - DNA, 20 bp, synthetic construct
  source 1..20: mol_type = other DNA
acccacctctggttctacaa

SEQ ID NO: 191898 - DNA, 20 bp, synthetic construct
  source 1..20: mol_type = other DNA
aacccacctctggttctaca

SEQ ID NO: 191899 - DNA, 20 bp, synthetic construct
  source 1..20: mol_type = other DNA
gaacccacctctggttctac

SEQ ID NO: 191900 - DNA, 20 bp, synthetic construct
  source 1..20: mol_type = other DNA
ggaacccacctctggttcta

SEQ ID NO: 191901 - DNA, 20 bp, synthetic construct
  source 1..20: mol_type = other DNA
tggaacccacctctggttct

SEQ ID NO: 191902 - DNA, 20 bp, synthetic construct
  source 1..20: mol_type = other DNA
ttggaacccacctctggttc

SEQ ID NO: 191903 - DNA, 20 bp, synthetic construct
  source 1..20: mol_type = other DNA
cttggaacccacctctggtt

SEQ ID NO: 191904 - DNA, 20 bp, synthetic construct
  source 1..20: mol_type = other DNA
ccttggaacccacctctggt

SEQ ID NO: 191905 - DNA, 20 bp, synthetic construct
  source 1..20: mol_type = other DNA
accttggaacccacctctgg

SEQ ID NO: 191906 - DNA, 20 bp, synthetic construct
  source 1..20: mol_type = other DNA
aaccttggaacccacctctg

SEQ ID NO: 191907 - DNA, 20 bp, synthetic construct
  source 1..20: mol_type = other DNA
taaccttggaacccacctct

SEQ ID NO: 191908 - DNA, 20 bp, synthetic construct
  source 1..20: mol_type = other DNA
gtaaccttggaacccacctc

SEQ ID NO: 191909 - DNA, 20 bp, synthetic construct
  source 1..20: mol_type = other DNA
tgtaaccttggaacccacct

SEQ ID NO: 191910 - DNA, 20 bp, synthetic construct
  source 1..20: mol_type = other DNA
ttgtaaccttggaacccacc

SEQ ID NO: 191911 - DNA, 20 bp, synthetic construct
  source 1..20: mol_type = other DNA
tttgtaaccttggaacccac

SEQ ID NO: 191912 - DNA, 20 bp, synthetic construct
  source 1..20: mol_type = other DNA
ctttgtaaccttggaaccca

SEQ ID NO: 191913 - DNA, 20 bp, synthetic construct
  source 1..20: mol_type = other DNA
cctttgtaaccttggaaccc

SEQ ID NO: 191914 - DNA, 20 bp, synthetic construct
  source 1..20: mol_type = other DNA
ccctttgtaaccttggaacc

SEQ ID NO: 191915 - DNA, 20 bp, synthetic construct
  source 1..20: mol_type = other DNA
tccctttgtaaccttggaac

SEQ ID NO: 191916 - DNA, 20 bp, synthetic construct
  source 1..20: mol_type = other DNA
gtccctttgtaaccttggaa

SEQ ID NO: 191917 - DNA, 20 bp, synthetic construct
  source 1..20: mol_type = other DNA
agtccctttgtaaccttgga

SEQ ID NO: 191918 - DNA, 20 bp, synthetic construct
  source 1..20: mol_type = other DNA
gagtccctttgtaaccttgg

SEQ ID NO: 191919 - DNA, 20 bp, synthetic construct
  source 1..20: mol_type = other DNA
agagtccctttgtaaccttg

SEQ ID NO: 191920 - DNA, 20 bp, synthetic construct
  source 1..20: mol_type = other DNA
aagagtccctttgtaacctt

SEQ ID NO: 191921 - DNA, 20 bp, synthetic construct
  source 1..20: mol_type = other DNA
taagagtccctttgtaacct

SEQ ID NO: 191922 - DNA, 20 bp, synthetic construct
  source 1..20: mol_type = other DNA
ctaagagtccctttgtaacc

SEQ ID NO: 191923 - DNA, 20 bp, synthetic construct
  source 1..20: mol_type = other DNA
actaagagtccctttgtaac

SEQ ID NO: 191924 - DNA, 20 bp, synthetic construct
  source 1..20: mol_type = other DNA
cactaagagtccctttgtaa

SEQ ID NO: 191925 - DNA, 20 bp, synthetic construct
  source 1..20: mol_type = other DNA
acactaagagtccctttgta

SEQ ID NO: 191926 - DNA, 20 bp, synthetic construct
  source 1..20: mol_type = other DNA
tacactaagagtccctttgt

SEQ ID NO: 191927 - DNA, 20 bp, synthetic construct
  source 1..20: mol_type = other DNA
atacactaagagtccctttg

SEQ ID NO: 191928 - DNA, 20 bp, synthetic construct
  source 1..20: mol_type = other DNA
aatacactaagagtcccttt

SEQ ID NO: 191929 - DNA, 20 bp, synthetic construct
  source 1..20: mol_type = other DNA
taatacactaagagtccctt

SEQ ID NO: 191930 - DNA, 20 bp, synthetic construct
  source 1..20: mol_type = other DNA
ctaatacactaagagtccct

SEQ ID NO: 191931 - DNA, 20 bp, synthetic construct
  source 1..20: mol_type = other DNA
actaatacactaagagtccc

SEQ ID NO: 191932 - DNA, 20 bp, synthetic construct
  source 1..20: mol_type = other DNA
gactaatacactaagagtcc

SEQ ID NO: 191933 - DNA, 20 bp, synthetic construct
  source 1..20: mol_type = other DNA
agactaatacactaagagtc

SEQ ID NO: 191934 - DNA, 20 bp, synthetic construct
  source 1..20: mol_type = other DNA
cagactaatacactaagagt

SEQ ID NO: 191935 - DNA, 20 bp, synthetic construct
  source 1..20: mol_type = other DNA
acagactaatacactaagag

SEQ ID NO: 191936 - DNA, 20 bp, synthetic construct
  source 1..20: mol_type = other DNA
aacagactaatacactaaga

SEQ ID NO: 191937 - DNA, 20 bp, synthetic construct
  source 1..20: mol_type = other DNA
gaacagactaatacactaag

SEQ ID NO: 191938 - DNA, 20 bp, synthetic construct
  source 1..20: mol_type = other DNA
agaacagactaatacactaa

SEQ ID NO: 191939 - DNA, 20 bp, synthetic construct
  source 1..20: mol_type = other DNA
gagaacagactaatacacta

SEQ ID NO: 191940 - DNA, 20 bp, synthetic construct
  source 1..20: mol_type = other DNA
tgagaacagactaatacact

SEQ ID NO: 191941 - DNA, 20 bp, synthetic construct
  source 1..20: mol_type = other DNA
gtgagaacagactaatacac

SEQ ID NO: 191942 - DNA, 20 bp, synthetic construct
  source 1..20: mol_type = other DNA
tgtgagaacagactaataca

SEQ ID NO: 191943 - DNA, 20 bp, synthetic construct
  source 1..20: mol_type = other DNA
atgtgagaacagactaatac

SEQ ID NO: 191944 - DNA, 20 bp, synthetic construct
  source 1..20: mol_type = other DNA
aatgtgagaacagactaata

SEQ ID NO: 191945 - DNA, 20 bp, synthetic construct
  source 1..20: mol_type = other DNA
taatgtgagaacagactaat

SEQ ID NO: 191946 - DNA, 20 bp, synthetic construct
  source 1..20: mol_type = other DNA
gtaatgtgagaacagactaa

SEQ ID NO: 191947 - DNA, 20 bp, synthetic construct
  source 1..20: mol_type = other DNA
agtaatgtgagaacagacta

SEQ ID NO: 191948 - DNA, 20 bp, synthetic construct
  source 1..20: mol_type = other DNA
tagtaatgtgagaacagact

SEQ ID NO: 191949 - DNA, 20 bp, synthetic construct
  source 1..20: mol_type = other DNA
atagtaatgtgagaacagac

SEQ ID NO: 191950 - DNA, 20 bp, synthetic construct
  source 1..20: mol_type = other DNA
tatagtaatgtgagaacaga

SEQ ID NO: 191951 - DNA, 20 bp, synthetic construct
  source 1..20: mol_type = other DNA
ttatagtaatgtgagaacag

SEQ ID NO: 191952 - DNA, 20 bp, synthetic construct
  source 1..20: mol_type = other DNA
tttatagtaatgtgagaaca

SEQ ID NO: 191953 - DNA, 20 bp, synthetic construct
  source 1..20: mol_type = other DNA
ctttatagtaatgtgagaac

SEQ ID NO: 191954 - DNA, 20 bp, synthetic construct
  source 1..20: mol_type = other DNA
tctttatagtaatgtgagaa

SEQ ID NO: 191955 - DNA, 20 bp, synthetic construct
  source 1..20: mol_type = other DNA
gtctttatagtaatgtgaga

SEQ ID NO: 191956 - DNA, 20 bp, synthetic construct
  source 1..20: mol_type = other DNA
ggtctttatagtaatgtgag

SEQ ID NO: 191957 - DNA, 20 bp, synthetic construct
  source 1..20: mol_type = other DNA
aggtctttatagtaatgtga

SEQ ID NO: 191958 - DNA, 20 bp, synthetic construct
  source 1..20: mol_type = other DNA
taggtctttatagtaatgtg

SEQ ID NO: 191959 - DNA, 20 bp, synthetic construct
  source 1..20: mol_type = other DNA
gtaggtctttatagtaatgt

SEQ ID NO: 191960 - DNA, 20 bp, synthetic construct
  source 1..20: mol_type = other DNA
ggtaggtctttatagtaatg

SEQ ID NO: 191961 - DNA, 20 bp, synthetic construct
  source 1..20: mol_type = other DNA
aggtaggtctttatagtaat

SEQ ID NO: 191962 - DNA, 20 bp, synthetic construct
  source 1..20: mol_type = other DNA
caggtaggtctttatagtaa

SEQ ID NO: 191963 - DNA, 20 bp, synthetic construct
  source 1..20: mol_type = other DNA
tcaggtaggtctttatagta

SEQ ID NO: 191964 - DNA, 20 bp, synthetic construct
  source 1..20: mol_type = other DNA
ctcaggtaggtctttatagt

SEQ ID NO: 191965 - DNA, 20 bp, synthetic construct
  source 1..20: mol_type = other DNA
tctcaggtaggtctttatag

SEQ ID NO: 191966 - DNA, 20 bp, synthetic construct
  source 1..20: mol_type = other DNA
gtctcaggtaggtctttata

SEQ ID NO: 191967 - DNA, 20 bp, synthetic construct
  source 1..20: mol_type = other DNA
agtctcaggtaggtctttat

SEQ ID NO: 191968 - DNA, 20 bp, synthetic construct
  source 1..20: mol_type = other DNA
cagtctcaggtaggtcttta

SEQ ID NO: 191969 - DNA, 20 bp, synthetic construct
  source 1..20: mol_type = other DNA
ccagtctcaggtaggtcttt

SEQ ID NO: 191970 - DNA, 20 bp, synthetic construct
  source 1..20: mol_type = other DNA
tccagtctcaggtaggtctt

SEQ ID NO: 191971 - DNA, 20 bp, synthetic construct
  source 1..20: mol_type = other DNA
atccagtctcaggtaggtct

SEQ ID NO: 191972 - DNA, 20 bp, synthetic construct
  source 1..20: mol_type = other DNA
gatccagtctcaggtaggtc

SEQ ID NO: 191973 - DNA, 20 bp, synthetic construct
  source 1..20: mol_type = other DNA
tgatccagtctcaggtaggt

SEQ ID NO: 191974 - DNA, 20 bp, synthetic construct
  source 1..20: mol_type = other DNA
atgatccagtctcaggtagg

SEQ ID NO: 191975 - DNA, 20 bp, synthetic construct
  source 1..20: mol_type = other DNA
aatgatccagtctcaggtag

SEQ ID NO: 191976 - DNA, 20 bp, synthetic construct
  source 1..20: mol_type = other DNA
aaatgatccagtctcaggta

SEQ ID NO: 191977 - DNA, 20 bp, synthetic construct
  source 1..20: mol_type = other DNA
taaatgatccagtctcaggt

SEQ ID NO: 191978 - DNA, 20 bp, synthetic construct
  source 1..20: mol_type = other DNA
ataaatgatccagtctcagg

SEQ ID NO: 191979 - DNA, 20 bp, synthetic construct
  source 1..20: mol_type = other DNA
tataaatgatccagtctcag

SEQ ID NO: 191980 - DNA, 20 bp, synthetic construct
  source 1..20: mol_type = other DNA
ttataaatgatccagtctca

SEQ ID NO: 191981 - DNA, 20 bp, synthetic construct
  source 1..20: mol_type = other DNA
tttataaatgatccagtctc

SEQ ID NO: 191982 - DNA, 20 bp, synthetic construct
  source 1..20: mol_type = other DNA
ctttataaatgatccagtct

SEQ ID NO: 191983 - DNA, 20 bp, synthetic construct
  source 1..20: mol_type = other DNA
tctttataaatgatccagtc

SEQ ID NO: 191984 - DNA, 20 bp, synthetic construct
  source 1..20: mol_type = other DNA
ttctttataaatgatccagt

SEQ ID NO: 191985 - DNA, 20 bp, synthetic construct
  source 1..20: mol_type = other DNA
tttctttataaatgatccag

SEQ ID NO: 191986 - DNA, 20 bp, synthetic construct
  source 1..20: mol_type = other DNA
ttttctttataaatgatcca

SEQ ID NO: 191987 - DNA, 20 bp, synthetic construct
  source 1..20: mol_type = other DNA
cttttctttataaatgatcc

SEQ ID NO: 191988 - DNA, 20 bp, synthetic construct
  source 1..20: mol_type = other DNA
tcttttctttataaatgatc

SEQ ID NO: 191989 - DNA, 20 bp, synthetic construct
  source 1..20: mol_type = other DNA
ctcttttctttataaatgat

SEQ ID NO: 191990 - DNA, 20 bp, synthetic construct
  source 1..20: mol_type = other DNA
cctcttttctttataaatga

SEQ ID NO: 191991 - DNA, 20 bp, synthetic construct
  source 1..20: mol_type = other DNA
acctcttttctttataaatg

SEQ ID NO: 191992 - DNA, 20 bp, synthetic construct
  source 1..20: mol_type = other DNA
aacctcttttctttataaat

SEQ ID NO: 191993 - DNA, 20 bp, synthetic construct
  source 1..20: mol_type = other DNA
aaacctcttttctttataaa

SEQ ID NO: 191994 - DNA, 20 bp, synthetic construct
  source 1..20: mol_type = other DNA
taaacctcttttctttataa

SEQ ID NO: 191995 - DNA, 20 bp, synthetic construct
  source 1..20: mol_type = other DNA
ttaaacctcttttctttata

SEQ ID NO: 191996 - DNA, 20 bp, synthetic construct
  source 1..20: mol_type = other DNA
attaaacctcttttctttat

SEQ ID NO: 191997 - DNA, 20 bp, synthetic construct
  source 1..20: mol_type = other DNA
aattaaacctcttttcttta

SEQ ID NO: 191998 - DNA, 20 bp, synthetic construct
  source 1..20: mol_type = other DNA
caattaaacctcttttcttt

SEQ ID NO: 191999 - DNA, 20 bp, synthetic construct
  source 1..20: mol_type = other DNA
ccaattaaacctcttttctt

SEQ ID NO: 192000 - DNA, 20 bp, synthetic construct
  source 1..20: mol_type = other DNA
gccaattaaacctcttttct

SEQ ID NO: 192001 - DNA, 20 bp, synthetic construct
  source 1..20: mol_type = other DNA
agccaattaaacctcttttc

SEQ ID NO: 192002 - DNA, 20 bp, synthetic construct
  source 1..20: mol_type = other DNA
gagccaattaaacctctttt

SEQ ID NO: 192003 - DNA, 20 bp, synthetic construct
  source 1..20: mol_type = other DNA
tgagccaattaaacctcttt

SEQ ID NO: 192004 - DNA, 20 bp, synthetic construct
  source 1..20: mol_type = other DNA
gtgagccaattaaacctctt

SEQ ID NO: 192005 - DNA, 20 bp, synthetic construct
  source 1..20: mol_type = other DNA
tgtgagccaattaaacctct

SEQ ID NO: 192006 - DNA, 20 bp, synthetic construct
  source 1..20: mol_type = other DNA
atgtgagccaattaaacctc

SEQ ID NO: 192007 - DNA, 20 bp, synthetic construct
  source 1..20: mol_type = other DNA
aatgtgagccaattaaacct

SEQ ID NO: 192008 - DNA, 20 bp, synthetic construct
  source 1..20: mol_type = other DNA
caatgtgagccaattaaacc

SEQ ID NO: 192009 - DNA, 20 bp, synthetic construct
  source 1..20: mol_type = other DNA
ccaatgtgagccaattaaac

SEQ ID NO: 192010 - DNA, 20 bp, synthetic construct
  source 1..20: mol_type = other DNA
gccaatgtgagccaattaaa

SEQ ID NO: 192011 - DNA, 20 bp, synthetic construct
  source 1..20: mol_type = other DNA
agccaatgtgagccaattaa

SEQ ID NO: 192012 - DNA, 20 bp, synthetic construct
  source 1..20: mol_type = other DNA
cagccaatgtgagccaatta

SEQ ID NO: 192013 - DNA, 20 bp, synthetic construct
  source 1..20: mol_type = other DNA
ccagccaatgtgagccaatt

SEQ ID NO: 192014 - DNA, 20 bp, synthetic construct
  source 1..20: mol_type = other DNA
cccagccaatgtgagccaat

SEQ ID NO: 192015 - DNA, 20 bp, synthetic construct
  source 1..20: mol_type = other DNA
acccagccaatgtgagccaa

SEQ ID NO: 192016 - DNA, 20 bp, synthetic construct
  source 1..20: mol_type = other DNA
cacccagccaatgtgagcca

SEQ ID NO: 192017 - DNA, 20 bp, synthetic construct
  source 1..20: mol_type = other DNA
gcacccagccaatgtgagcc

SEQ ID NO: 192018 - DNA, 20 bp, synthetic construct
  source 1..20: mol_type = other DNA
cgcacccagccaatgtgagc

SEQ ID NO: 192019 - DNA, 20 bp, synthetic construct
  source 1..20: mol_type = other DNA
ccgcacccagccaatgtgag

SEQ ID NO: 192020 - DNA, 20 bp, synthetic construct
  source 1..20: mol_type = other DNA
accgcacccagccaatgtga

SEQ ID NO: 192021 - DNA, 20 bp, synthetic construct
  source 1..20: mol_type = other DNA
caccgcacccagccaatgtg

SEQ ID NO: 192022 - DNA, 20 bp, synthetic construct
  source 1..20: mol_type = other DNA
ccaccgcacccagccaatgt

SEQ ID NO: 192023 - DNA, 20 bp, synthetic construct
  source 1..20: mol_type = other DNA
gccaccgcacccagccaatg

SEQ ID NO: 192024 - DNA, 20 bp, synthetic construct
  source 1..20: mol_type = other DNA
agccaccgcacccagccaat

SEQ ID NO: 192025 - DNA, 20 bp, synthetic construct
  source 1..20: mol_type = other DNA
gagccaccgcacccagccaa

SEQ ID NO: 192026 - DNA, 20 bp, synthetic construct
  source 1..20: mol_type = other DNA
tgagccaccgcacccagcca

SEQ ID NO: 192027 - DNA, 20 bp, synthetic construct
  source 1..20: mol_type = other DNA
gtgagccaccgcacccagcc

SEQ ID NO: 192028 - DNA, 20 bp, synthetic construct
  source 1..20: mol_type = other DNA
cgtgagccaccgcacccagc

SEQ ID NO: 192029 - DNA, 20 bp, synthetic construct
  source 1..20: mol_type = other DNA
gcgtgagccaccgcacccag

SEQ ID NO: 192030 - DNA, 20 bp, synthetic construct
  source 1..20: mol_type = other DNA
ggcgtgagccaccgcaccca

SEQ ID NO: 192031 - DNA, 20 bp, synthetic construct
  source 1..20: mol_type = other DNA
aggcgtgagccaccgcaccc

SEQ ID NO: 192032 - DNA, 20 bp, synthetic construct
  source 1..20: mol_type = other DNA
caggcgtgagccaccgcacc

SEQ ID NO: 192033 - DNA, 20 bp, synthetic construct
  source 1..20: mol_type = other DNA
acaggcgtgagccaccgcac

SEQ ID NO: 192034 - DNA, 20 bp, synthetic construct
  source 1..20: mol_type = other DNA
tacaggcgtgagccaccgca

SEQ ID NO: 192035 - DNA, 20 bp, synthetic construct
  source 1..20: mol_type = other DNA
ttacaggcgtgagccaccgc

SEQ ID NO: 192036 - DNA, 20 bp, synthetic construct
  source 1..20: mol_type = other DNA
attacaggcgtgagccaccg

SEQ ID NO: 192037 - DNA, 20 bp, synthetic construct
  source 1..20: mol_type = other DNA
gattacaggcgtgagccacc

SEQ ID NO: 192038 - DNA, 20 bp, synthetic construct
  source 1..20: mol_type = other DNA
ggattacaggcgtgagccac

SEQ ID NO: 192039 - DNA, 20 bp, synthetic construct
  source 1..20: mol_type = other DNA
gggattacaggcgtgagcca

SEQ ID NO: 192040 - DNA, 20 bp, synthetic construct
  source 1..20: mol_type = other DNA
tgggattacaggcgtgagcc

SEQ ID NO: 192041 - DNA, 20 bp, synthetic construct
  source 1..20: mol_type = other DNA
ctgggattacaggcgtgagc

SEQ ID NO: 192042 - DNA, 20 bp, synthetic construct
  source 1..20: mol_type = other DNA
gctgggattacaggcgtgag

SEQ ID NO: 192043 - DNA, 20 bp, synthetic construct
  source 1..20: mol_type = other DNA
tgctgggattacaggcgtga

SEQ ID NO: 192044 - DNA, 20 bp, synthetic construct
  source 1..20: mol_type = other DNA
atgctgggattacaggcgtg

SEQ ID NO: 192045 - DNA, 20 bp, synthetic construct
  source 1..20: mol_type = other DNA
aatgctgggattacaggcgt

SEQ ID NO: 192046 - DNA, 20 bp, synthetic construct
  source 1..20: mol_type = other DNA
aaatgctgggattacaggcg

SEQ ID NO: 192047 - DNA, 20 bp, synthetic construct
  source 1..20: mol_type = other DNA
aaaatgctgggattacaggc

SEQ ID NO: 192048 - DNA, 20 bp, synthetic construct
  source 1..20: mol_type = other DNA
caaaatgctgggattacagg

SEQ ID NO: 192049 - DNA, 20 bp, synthetic construct
  source 1..20: mol_type = other DNA
ccaaaatgctgggattacag

SEQ ID NO: 192050 - DNA, 20 bp, synthetic construct
  source 1..20: mol_type = other DNA
cccaaaatgctgggattaca

SEQ ID NO: 192051 - DNA, 20 bp, synthetic construct
  source 1..20: mol_type = other DNA
tcccaaaatgctgggattac

SEQ ID NO: 192052 - DNA, 20 bp, synthetic construct
  source 1..20: mol_type = other DNA
ctcccaaaatgctgggatta

SEQ ID NO: 192053 - DNA, 20 bp, synthetic construct
  source 1..20: mol_type = other DNA
cctcccaaaatgctgggatt

SEQ ID NO: 192054 - DNA, 20 bp, synthetic construct
  source 1..20: mol_type = other DNA
gcctcccaaaatgctgggat

SEQ ID NO: 192055 - DNA, 20 bp, synthetic construct
  source 1..20: mol_type = other DNA
ggcctcccaaaatgctggga

SEQ ID NO: 192056 - DNA, 20 bp, synthetic construct
  source 1..20: mol_type = other DNA
tggcctcccaaaatgctggg

SEQ ID NO: 192057 - DNA, 20 bp, synthetic construct
  source 1..20: mol_type = other DNA
ttggcctcccaaaatgctgg

SEQ ID NO: 192058 - DNA, 20 bp, synthetic construct
  source 1..20: mol_type = other DNA
cttggcctcccaaaatgctg

SEQ ID NO: 192059 - DNA, 20 bp, synthetic construct
  source 1..20: mol_type = other DNA
ccttggcctcccaaaatgct

SEQ ID NO: 192060 - DNA, 20 bp, synthetic construct
  source 1..20: mol_type = other DNA
gccttggcctcccaaaatgc

SEQ ID NO: 192061 - DNA, 20 bp, synthetic construct
  source 1..20: mol_type = other DNA
ggccttggcctcccaaaatg

SEQ ID NO: 192062 - DNA, 20 bp, synthetic construct
  source 1..20: mol_type = other DNA
cggccttggcctcccaaaat

SEQ ID NO: 192063 - DNA, 20 bp, synthetic construct
  source 1..20: mol_type = other DNA
ccggccttggcctcccaaaa

SEQ ID NO: 192064 - DNA, 20 bp, synthetic construct
  source 1..20: mol_type = other DNA
gccggccttggcctcccaaa

SEQ ID NO: 192065 - DNA, 20 bp, synthetic construct
  source 1..20: mol_type = other DNA
cgccggccttggcctcccaa

SEQ ID NO: 192066 - DNA, 20 bp, synthetic construct
  source 1..20: mol_type = other DNA
ccgccggccttggcctccca

SEQ ID NO: 192067 - DNA, 20 bp, synthetic construct
  source 1..20: mol_type = other DNA
tccgccggccttggcctccc

SEQ ID NO: 192068 - DNA, 20 bp, synthetic construct
  source 1..20: mol_type = other DNA
atccgccggccttggcctcc

SEQ ID NO: 192069 - DNA, 20 bp, synthetic construct
  source 1..20: mol_type = other DNA
gatccgccggccttggcctc

SEQ ID NO: 192070 - DNA, 20 bp, synthetic construct
  source 1..20: mol_type = other DNA
tgatccgccggccttggcct

SEQ ID NO: 192071 - DNA, 20 bp, synthetic construct
  source 1..20: mol_type = other DNA
gtgatccgccggccttggcc

SEQ ID NO: 192072 - DNA, 20 bp, synthetic construct
  source 1..20: mol_type = other DNA
agtgatccgccggccttggc

SEQ ID NO: 192073 - DNA, 20 bp, synthetic construct
  source 1..20: mol_type = other DNA
aagtgatccgccggccttgg

SEQ ID NO: 192074 - DNA, 20 bp, synthetic construct
  source 1..20: mol_type = other DNA
caagtgatccgccggccttg

SEQ ID NO: 192075 - DNA, 20 bp, synthetic construct
  source 1..20: mol_type = other DNA
tcaagtgatccgccggcctt

SEQ ID NO: 192076 - DNA, 20 bp, synthetic construct
  source 1..20: mol_type = other DNA
ctcaagtgatccgccggcct

SEQ ID NO: 192077 - DNA, 20 bp, synthetic construct
  source 1..20: mol_type = other DNA
cctcaagtgatccgccggcc

SEQ ID NO: 192078 - DNA, 20 bp, synthetic construct
  source 1..20: mol_type = other DNA
acctcaagtgatccgccggc

SEQ ID NO: 192079 - DNA, 20 bp, synthetic construct
  source 1..20: mol_type = other DNA
gacctcaagtgatccgccgg

SEQ ID NO: 192080 - DNA, 20 bp, synthetic construct
  source 1..20: mol_type = other DNA
tgacctcaagtgatccgccg

SEQ ID NO: 192081 - DNA, 20 bp, synthetic construct
  source 1..20: mol_type = other DNA
ctgacctcaagtgatccgcc

SEQ ID NO: 192082 - DNA, 20 bp, synthetic construct
  source 1..20: mol_type = other DNA
cctgacctcaagtgatccgc

SEQ ID NO: 192083 - DNA, 20 bp, synthetic construct
  source 1..20: mol_type = other DNA
tcctgacctcaagtgatccg

SEQ ID NO: 192084 - DNA, 20 bp, synthetic construct
  source 1..20: mol_type = other DNA
ttcctgacctcaagtgatcc

SEQ ID NO: 192085 - DNA, 20 bp, synthetic construct
  source 1..20: mol_type = other DNA
attcctgacctcaagtgatc

SEQ ID NO: 192086 - DNA, 20 bp, synthetic construct
  source 1..20: mol_type = other DNA
aattcctgacctcaagtgat

SEQ ID NO: 192087 - DNA, 20 bp, synthetic construct
  source 1..20: mol_type = other DNA
aaattcctgacctcaagtga

SEQ ID NO: 192088 - DNA, 20 bp, synthetic construct
  source 1..20: mol_type = other DNA
caaattcctgacctcaagtg

SEQ ID NO: 192089 - DNA, 20 bp, synthetic construct
  source 1..20: mol_type = other DNA
tcaaattcctgacctcaagt

SEQ ID NO: 192090 - DNA, 20 bp, synthetic construct
  source 1..20: mol_type = other DNA
ctcaaattcctgacctcaag

SEQ ID NO: 192091 - DNA, 20 bp, synthetic construct
  source 1..20: mol_type = other DNA
tctcaaattcctgacctcaa

SEQ ID NO: 192092 - DNA, 20 bp, synthetic construct
  source 1..20: mol_type = other DNA
gtctcaaattcctgacctca

SEQ ID NO: 192093 - DNA, 20 bp, synthetic construct
  source 1..20: mol_type = other DNA
ggtctcaaattcctgacctc

SEQ ID NO: 192094 - DNA, 20 bp, synthetic construct
  source 1..20: mol_type = other DNA
tggtctcaaattcctgacct

SEQ ID NO: 192095 - DNA, 20 bp, synthetic construct
  source 1..20: mol_type = other DNA
ctggtctcaaattcctgacc

SEQ ID NO: 192096 - DNA, 20 bp, synthetic construct
  source 1..20: mol_type = other DNA
gctggtctcaaattcctgac

SEQ ID NO: 192097 - DNA, 20 bp, synthetic construct
  source 1..20: mol_type = other DNA
ggctggtctcaaattcctga

SEQ ID NO: 192098 - DNA, 20 bp, synthetic construct
  source 1..20: mol_type = other DNA
aggctggtctcaaattcctg

SEQ ID NO: 192099 - DNA, 20 bp, synthetic construct
  source 1..20: mol_type = other DNA
caggctggtctcaaattcct

SEQ ID NO: 192100 - DNA, 20 bp, synthetic construct
  source 1..20: mol_type = other DNA
ccaggctggtctcaaattcc

SEQ ID NO: 192101 - DNA, 20 bp, synthetic construct
  source 1..20: mol_type = other DNA
gccaggctggtctcaaattc

SEQ ID NO: 192102 - DNA, 20 bp, synthetic construct
  source 1..20: mol_type = other DNA
ggccaggctggtctcaaatt

SEQ ID NO: 192103 - DNA, 20 bp, synthetic construct
  source 1..20: mol_type = other DNA
tggccaggctggtctcaaat

SEQ ID NO: 192104 - DNA, 20 bp, synthetic construct
  source 1..20: mol_type = other DNA
ttggccaggctggtctcaaa

SEQ ID NO: 192105 - DNA, 20 bp, synthetic construct
  source 1..20: mol_type = other DNA
gttggccaggctggtctcaa

SEQ ID NO: 192106 - DNA, 20 bp, synthetic construct
  source 1..20: mol_type = other DNA
tgttggccaggctggtctca

SEQ ID NO: 192107 - DNA, 20 bp, synthetic construct
  source 1..20: mol_type = other DNA
atgttggccaggctggtctc

SEQ ID NO: 192108 - DNA, 20 bp, synthetic construct
  source 1..20: mol_type = other DNA
catgttggccaggctggtct

SEQ ID NO: 192109 - DNA, 20 bp, synthetic construct
  source 1..20: mol_type = other DNA
ccatgttggccaggctggtc

SEQ ID NO: 192110 - DNA, 20 bp, synthetic construct
  source 1..20: mol_type = other DNA
accatgttggccaggctggt

SEQ ID NO: 192111 - DNA, 20 bp, synthetic construct
  source 1..20: mol_type = other DNA
caccatgttggccaggctgg

SEQ ID NO: 192112 - DNA, 20 bp, synthetic construct
  source 1..20: mol_type = other DNA
tcaccatgttggccaggctg

SEQ ID NO: 192113 - DNA, 20 bp, synthetic construct
  source 1..20: mol_type = other DNA
ttcaccatgttggccaggct

SEQ ID NO: 192114 - DNA, 20 bp, synthetic construct
  source 1..20: mol_type = other DNA
tttcaccatgttggccaggc

SEQ ID NO: 192115 - DNA, 20 bp, synthetic construct
  source 1..20: mol_type = other DNA
gtttcaccatgttggccagg

SEQ ID NO: 192116 - DNA, 20 bp, synthetic construct
  source 1..20: mol_type = other DNA
ggtttcaccatgttggccag

SEQ ID NO: 192117 - DNA, 20 bp, synthetic construct
  source 1..20: mol_type = other DNA
gggtttcaccatgttggcca

SEQ ID NO: 192118 - DNA, 20 bp, synthetic construct
  source 1..20: mol_type = other DNA
agggtttcaccatgttggcc

SEQ ID NO: 192119 - DNA, 20 bp, synthetic construct
  source 1..20: mol_type = other DNA
cagggtttcaccatgttggc

SEQ ID NO: 192120 - DNA, 20 bp, synthetic construct
  source 1..20: mol_type = other DNA
acagggtttcaccatgttgg

SEQ ID NO: 192121 - DNA, 20 bp, synthetic construct
  source 1..20: mol_type = other DNA
gacagggtttcaccatgttg

SEQ ID NO: 192122 - DNA, 20 bp, synthetic construct
  source 1..20: mol_type = other DNA
agacagggtttcaccatgtt

SEQ ID NO: 192123 - DNA, 20 bp, synthetic construct
  source 1..20: mol_type = other DNA
gagacagggtttcaccatgt

SEQ ID NO: 192124 - DNA, 20 bp, synthetic construct
  source 1..20: mol_type = other DNA
agagacagggtttcaccatg

SEQ ID NO: 192125 - DNA, 20 bp, synthetic construct
  source 1..20: mol_type = other DNA
aagagacagggtttcaccat

SEQ ID NO: 192126 - DNA, 20 bp, synthetic construct
  source 1..20: mol_type = other DNA
gaagagacagggtttcacca

SEQ ID NO: 192127 - DNA, 20 bp, synthetic construct
  source 1..20: mol_type = other DNA
agaagagacagggtttcacc

SEQ ID NO: 192128 - DNA, 20 bp, synthetic construct
  source 1..20: mol_type = other DNA
tagaagagacagggtttcac

SEQ ID NO: 192129 - DNA, 20 bp, synthetic construct
  source 1..20: mol_type = other DNA
ttagaagagacagggtttca

SEQ ID NO: 192130 - DNA, 20 bp, synthetic construct
  source 1..20: mol_type = other DNA
tttagaagagacagggtttc

SEQ ID NO: 192131 - DNA, 20 bp, synthetic construct
  source 1..20: mol_type = other DNA
ttttagaagagacagggttt

SEQ ID NO: 192132 - DNA, 20 bp, synthetic construct
  source 1..20: mol_type = other DNA
attttagaagagacagggtt

SEQ ID NO: 192133 - DNA, 20 bp, synthetic construct
  source 1..20: mol_type = other DNA
tattttagaagagacagggt

SEQ ID NO: 192134 - DNA, 20 bp, synthetic construct
  source 1..20: mol_type = other DNA
ttattttagaagagacaggg

SEQ ID NO: 192135 - DNA, 20 bp, synthetic construct
  source 1..20: mol_type = other DNA
tttattttagaagagacagg

SEQ ID NO: 192136 - DNA, 20 bp, synthetic construct
  source 1..20: mol_type = other DNA
ttttattttagaagagacag

SEQ ID NO: 192137 - DNA, 20 bp, synthetic construct
  source 1..20: mol_type = other DNA
attttattttagaagagaca

SEQ ID NO: 192138 - DNA, 20 bp, synthetic construct
  source 1..20: mol_type = other DNA
tattttattttagaagagac

SEQ ID NO: 192139 - DNA, 20 bp, synthetic construct
  source 1..20: mol_type = other DNA
gtattttattttagaagaga

SEQ ID NO: 192140 - DNA, 20 bp, synthetic construct
  source 1..20: mol_type = other DNA
tgtattttattttagaagag

SEQ ID NO: 192141 - DNA, 20 bp, synthetic construct
  source 1..20: mol_type = other DNA
ttgtattttattttagaaga

SEQ ID NO: 192142 - DNA, 20 bp, synthetic construct
  source 1..20: mol_type = other DNA
tttgtattttattttagaag

SEQ ID NO: 192143 - DNA, 20 bp, synthetic construct
  source 1..20: mol_type = other DNA
ttttgtattttattttagaa

SEQ ID NO: 192144 - DNA, 20 bp, synthetic construct
  source 1..20: mol_type = other DNA
tttttgtattttattttaga

SEQ ID NO: 192145 - DNA, 20 bp, synthetic construct
  source 1..20: mol_type = other DNA
atttttgtattttattttag

SEQ ID NO: 192146 - DNA, 20 bp, synthetic construct
  source 1..20: mol_type = other DNA
aatttttgtattttatttta

SEQ ID NO: 192147 - DNA, 20 bp, synthetic construct
  source 1..20: mol_type = other DNA
taatttttgtattttatttt

SEQ ID NO: 192148 - DNA, 20 bp, synthetic construct
  source 1..20: mol_type = other DNA
ctaatttttgtattttattt

SEQ ID NO: 192149 - DNA, 20 bp, synthetic construct
  source 1..20: mol_type = other DNA
gctaatttttgtattttatt

SEQ ID NO: 192150 - DNA, 20 bp, synthetic construct
  source 1..20: mol_type = other DNA
agctaatttttgtattttat

SEQ ID NO: 192151 - DNA, 20 bp, synthetic construct
  source 1..20: mol_type = other DNA
cagctaatttttgtatttta

SEQ ID NO: 192152 - DNA, 20 bp, synthetic construct
  source 1..20: mol_type = other DNA
ccagctaatttttgtatttt

SEQ ID NO: 192153 - DNA, 20 bp, synthetic construct
  source 1..20: mol_type = other DNA
gccagctaatttttgtattt

SEQ ID NO: 192154 - DNA, 20 bp, synthetic construct
  source 1..20: mol_type = other DNA
ggccagctaatttttgtatt

SEQ ID NO: 192155 - DNA, 20 bp, synthetic construct
  source 1..20: mol_type = other DNA
tggccagctaatttttgtat

SEQ ID NO: 192156 - DNA, 20 bp, synthetic construct
  source 1..20: mol_type = other DNA
atggccagctaatttttgta

SEQ ID NO: 192157 - DNA, 20 bp, synthetic construct
  source 1..20: mol_type = other DNA
catggccagctaatttttgt

SEQ ID NO: 192158 - DNA, 20 bp, synthetic construct
  source 1..20: mol_type = other DNA
ccatggccagctaatttttg

SEQ ID NO: 192159 - DNA, 20 bp, synthetic construct
  source 1..20: mol_type = other DNA
accatggccagctaattttt

SEQ ID NO: 192160 - DNA, 20 bp, synthetic construct
  source 1..20: mol_type = other DNA
caccatggccagctaatttt

SEQ ID NO: 192161 - DNA, 20 bp, synthetic construct
  source 1..20: mol_type = other DNA
ccaccatggccagctaattt

SEQ ID NO: 192162 - DNA, 20 bp, synthetic construct
  source 1..20: mol_type = other DNA
accaccatggccagctaatt

SEQ ID NO: 192163 - DNA, 20 bp, synthetic construct
  source 1..20: mol_type = other DNA
caccaccatggccagctaat

SEQ ID NO: 192164 - DNA, 20 bp, synthetic construct
  source 1..20: mol_type = other DNA
acaccaccatggccagctaa

SEQ ID NO: 192165 - DNA, 20 bp, synthetic construct
  source 1..20: mol_type = other DNA
cacaccaccatggccagcta

SEQ ID NO: 192166 - DNA, 20 bp, synthetic construct
  source 1..20: mol_type = other DNA
gcacaccaccatggccagct

SEQ ID NO: 192167 - DNA, 20 bp, synthetic construct
  source 1..20: mol_type = other DNA
cgcacaccaccatggccagc

SEQ ID NO: 192168 - DNA, 20 bp, synthetic construct
  source 1..20: mol_type = other DNA
gcgcacaccaccatggccag

SEQ ID NO: 192169 - DNA, 20 bp, synthetic construct
  source 1..20: mol_type = other DNA
ggcgcacaccaccatggcca

SEQ ID NO: 192170 - DNA, 20 bp, synthetic construct
  source 1..20: mol_type = other DNA
aggcgcacaccaccatggcc

SEQ ID NO: 192171 - DNA, 20 bp, synthetic construct
  source 1..20: mol_type = other DNA
caggcgcacaccaccatggc

SEQ ID NO: 192172 - DNA, 20 bp, synthetic construct
  source 1..20: mol_type = other DNA
ccaggcgcacaccaccatgg

SEQ ID NO: 192173 - DNA, 20 bp, synthetic construct
  source 1..20: mol_type = other DNA
tccaggcgcacaccaccatg

SEQ ID NO: 192174 - DNA, 20 bp, synthetic construct
  source 1..20: mol_type = other DNA
ttccaggcgcacaccaccat

SEQ ID NO: 192175 - DNA, 20 bp, synthetic construct
  source 1..20: mol_type = other DNA
attccaggcgcacaccacca

SEQ ID NO: 192176 - DNA, 20 bp, synthetic construct
  source 1..20: mol_type = other DNA
gattccaggcgcacaccacc

SEQ ID NO: 192177 - DNA, 20 bp, synthetic construct
  source 1..20: mol_type = other DNA
ggattccaggcgcacaccac

SEQ ID NO: 192178 - DNA, 20 bp, synthetic construct
  source 1..20: mol_type = other DNA
gggattccaggcgcacacca

SEQ ID NO: 192179 - DNA, 20 bp, synthetic construct
  source 1..20: mol_type = other DNA
tgggattccaggcgcacacc

SEQ ID NO: 192180 - DNA, 20 bp, synthetic construct
  source 1..20: mol_type = other DNA
ctgggattccaggcgcacac

SEQ ID NO: 192181 - DNA, 20 bp, synthetic construct
  source 1..20: mol_type = other DNA
gctgggattccaggcgcaca

SEQ ID NO: 192182 - DNA, 20 bp, synthetic construct
  source 1..20: mol_type = other DNA
agctgggattccaggcgcac

SEQ ID NO: 192183 - DNA, 20 bp, synthetic construct
  source 1..20: mol_type = other DNA
tagctgggattccaggcgca

SEQ ID NO: 192184 - DNA, 20 bp, synthetic construct
  source 1..20: mol_type = other DNA
gtagctgggattccaggcgc

SEQ ID NO: 192185 - DNA, 20 bp, synthetic construct
  source 1..20: mol_type = other DNA
agtagctgggattccaggcg

SEQ ID NO: 192186 - DNA, 20 bp, synthetic construct
  source 1..20: mol_type = other DNA
gagtagctgggattccaggc

SEQ ID NO: 192187 - DNA, 20 bp, synthetic construct
  source 1..20: mol_type = other DNA
tgagtagctgggattccagg

SEQ ID NO: 192188 - DNA, 20 bp, synthetic construct
  source 1..20: mol_type = other DNA
ctgagtagctgggattccag

SEQ ID NO: 192189 - DNA, 20 bp, synthetic construct
  source 1..20: mol_type = other DNA
cctgagtagctgggattcca

SEQ ID NO: 192190 - DNA, 20 bp, synthetic construct
  source 1..20: mol_type = other DNA
tcctgagtagctgggattcc

SEQ ID NO: 192191 - DNA, 20 bp, synthetic construct
  source 1..20: mol_type = other DNA
ctcctgagtagctgggattc

SEQ ID NO: 192192 - DNA, 20 bp, synthetic construct
  source 1..20: mol_type = other DNA
cctcctgagtagctgggatt

SEQ ID NO: 192193 - DNA, 20 bp, synthetic construct
  source 1..20: mol_type = other DNA
gcctcctgagtagctgggat

SEQ ID NO: 192194 - DNA, 20 bp, synthetic construct
  source 1..20: mol_type = other DNA
agcctcctgagtagctggga

SEQ ID NO: 192195 - DNA, 20 bp, synthetic construct
  source 1..20: mol_type = other DNA
cagcctcctgagtagctggg

SEQ ID NO: 192196 - DNA, 20 bp, synthetic construct
  source 1..20: mol_type = other DNA
tcagcctcctgagtagctgg

SEQ ID NO: 192197 - DNA, 20 bp, synthetic construct
  source 1..20: mol_type = other DNA
ctcagcctcctgagtagctg

SEQ ID NO: 192198 - DNA, 20 bp, synthetic construct
  source 1..20: mol_type = other DNA
cctcagcctcctgagtagct

SEQ ID NO: 192199 - DNA, 20 bp, synthetic construct
  source 1..20: mol_type = other DNA
acctcagcctcctgagtagc

SEQ ID NO: 192200 - DNA, 20 bp, synthetic construct
  source 1..20: mol_type = other DNA
cacctcagcctcctgagtag

SEQ ID NO: 192201 - DNA, 20 bp, synthetic construct
  source 1..20: mol_type = other DNA
ccacctcagcctcctgagta

SEQ ID NO: 192202 - DNA, 20 bp, synthetic construct
  source 1..20: mol_type = other DNA
tccacctcagcctcctgagt

SEQ ID NO: 192203 - DNA, 20 bp, synthetic construct
  source 1..20: mol_type = other DNA
ttccacctcagcctcctgag

SEQ ID NO: 192204 - DNA, 20 bp, synthetic construct
  source 1..20: mol_type = other DNA
cttccacctcagcctcctga

SEQ ID NO: 192205 - DNA, 20 bp, synthetic construct
  source 1..20: mol_type = other DNA
tcttccacctcagcctcctg

SEQ ID NO: 192206 - DNA, 20 bp, synthetic construct
  source 1..20: mol_type = other DNA
ttcttccacctcagcctcct

SEQ ID NO: 192207 - DNA, 20 bp, synthetic construct
  source 1..20: mol_type = other DNA
attcttccacctcagcctcc

SEQ ID NO: 192208 - DNA, 20 bp, synthetic construct
  source 1..20: mol_type = other DNA
aattcttccacctcagcctc

SEQ ID NO: 192209 - DNA, 20 bp, synthetic construct
  source 1..20: mol_type = other DNA
caattcttccacctcagcct

SEQ ID NO: 192210 - DNA, 20 bp, synthetic construct
  source 1..20: mol_type = other DNA
gcaattcttccacctcagcc

SEQ ID NO: 192211 - DNA, 20 bp, synthetic construct
  source 1..20: mol_type = other DNA
agcaattcttccacctcagc

SEQ ID NO: 192212 - DNA, 20 bp, synthetic construct
  source 1..20: mol_type = other DNA
aagcaattcttccacctcag

SEQ ID NO: 192213 - DNA, 20 bp, synthetic construct
  source 1..20: mol_type = other DNA
caagcaattcttccacctca

SEQ ID NO: 192214 - DNA, 20 bp, synthetic construct
  source 1..20: mol_type = other DNA
tcaagcaattcttccacctc

SEQ ID NO: 192215 - DNA, 20 bp, synthetic construct
  source 1..20: mol_type = other DNA
ctcaagcaattcttccacct

SEQ ID NO: 192216 - DNA, 20 bp, synthetic construct
  source 1..20: mol_type = other DNA
gctcaagcaattcttccacc

SEQ ID NO: 192217 - DNA, 20 bp, synthetic construct
  source 1..20: mol_type = other DNA
ggctcaagcaattcttccac

SEQ ID NO: 192218 - DNA, 20 bp, synthetic construct
  source 1..20: mol_type = other DNA
gggctcaagcaattcttcca

SEQ ID NO: 192219 - DNA, 20 bp, synthetic construct
  source 1..20: mol_type = other DNA
cgggctcaagcaattcttcc

SEQ ID NO: 192220 - DNA, 20 bp, synthetic construct
  source 1..20: mol_type = other DNA
ccgggctcaagcaattcttc

SEQ ID NO: 192221 - DNA, 20 bp, synthetic construct
  source 1..20: mol_type = other DNA
cccgggctcaagcaattctt

SEQ ID NO: 192222 - DNA, 20 bp, synthetic construct
  source 1..20: mol_type = other DNA
tcccgggctcaagcaattct

SEQ ID NO: 192223 - DNA, 20 bp, synthetic construct
  source 1..20: mol_type = other DNA
ctcccgggctcaagcaattc

SEQ ID NO: 192224 - DNA, 20 bp, synthetic construct
  source 1..20: mol_type = other DNA
cctcccgggctcaagcaatt

SEQ ID NO: 192225 - DNA, 20 bp, synthetic construct
  source 1..20: mol_type = other DNA
acctcccgggctcaagcaat

SEQ ID NO: 192226 - DNA, 20 bp, synthetic construct
  source 1..20: mol_type = other DNA
cacctcccgggctcaagcaa

SEQ ID NO: 192227 - DNA, 20 bp, synthetic construct
  source 1..20: mol_type = other DNA
ccacctcccgggctcaagca

SEQ ID NO: 192228 - DNA, 20 bp, synthetic construct
  source 1..20: mol_type = other DNA
tccacctcccgggctcaagc

SEQ ID NO: 192229 - DNA, 20 bp, synthetic construct
  source 1..20: mol_type = other DNA
ctccacctcccgggctcaag

SEQ ID NO: 192230 - DNA, 20 bp, synthetic construct
  source 1..20: mol_type = other DNA
cctccacctcccgggctcaa

SEQ ID NO: 192231 - DNA, 20 bp, synthetic construct
  source 1..20: mol_type = other DNA
acctccacctcccgggctca

SEQ ID NO: 192232 - DNA, 20 bp, synthetic construct
  source 1..20: mol_type = other DNA
aacctccacctcccgggctc

SEQ ID NO: 192233 - DNA, 20 bp, synthetic construct
  source 1..20: mol_type = other DNA
caacctccacctcccgggct

SEQ ID NO: 192234 - DNA, 20 bp, synthetic construct
  source 1..20: mol_type = other DNA
gcaacctccacctcccgggc

SEQ ID NO: 192235 - DNA, 20 bp, synthetic construct
  source 1..20: mol_type = other DNA
tgcaacctccacctcccggg

SEQ ID NO: 192236 - DNA, 20 bp, synthetic construct
  source 1..20: mol_type = other DNA
ctgcaacctccacctcccgg

SEQ ID NO: 192237 - DNA, 20 bp, synthetic construct
  source 1..20: mol_type = other DNA
actgcaacctccacctcccg

SEQ ID NO: 192238 - DNA, 20 bp, synthetic construct
  source 1..20: mol_type = other DNA
cactgcaacctccacctccc

SEQ ID NO: 192239 - DNA, 20 bp, synthetic construct
  source 1..20: mol_type = other DNA
tcactgcaacctccacctcc

SEQ ID NO: 192240 - DNA, 20 bp, synthetic construct
  source 1..20: mol_type = other DNA
ctcactgcaacctccacctc

SEQ ID NO: 192241 - DNA, 20 bp, synthetic construct
  source 1..20: mol_type = other DNA
gctcactgcaacctccacct

SEQ ID NO: 192242 - DNA, 20 bp, synthetic construct
  source 1..20: mol_type = other DNA
ggctcactgcaacctccacc

SEQ ID NO: 192243 - DNA, 20 bp, synthetic construct
  source 1..20: mol_type = other DNA
tggctcactgcaacctccac

SEQ ID NO: 192244 - DNA, 20 bp, synthetic construct
  source 1..20: mol_type = other DNA
ttggctcactgcaacctcca

SEQ ID NO: 192245 - DNA, 20 bp, synthetic construct
  source 1..20: mol_type = other DNA
cttggctcactgcaacctcc

SEQ ID NO: 192246 - DNA, 20 bp, synthetic construct
  source 1..20: mol_type = other DNA
tcttggctcactgcaacctc

SEQ ID NO: 192247 - DNA, 20 bp, synthetic construct
  source 1..20: mol_type = other DNA
atcttggctcactgcaacct

SEQ ID NO: 192248 - DNA, 20 bp, synthetic construct
  source 1..20: mol_type = other DNA
gatcttggctcactgcaacc

SEQ ID NO: 192249 - DNA, 20 bp, synthetic construct
  source 1..20: mol_type = other DNA
cgatcttggctcactgcaac

SEQ ID NO: 192250 - DNA, 20 bp, synthetic construct
  source 1..20: mol_type = other DNA
gcgatcttggctcactgcaa

SEQ ID NO: 192251 - DNA, 20 bp, synthetic construct
  source 1..20: mol_type = other DNA
ggcgatcttggctcactgca

SEQ ID NO: 192252 - DNA, 20 bp, synthetic construct
  source 1..20: mol_type = other DNA
gggcgatcttggctcactgc

SEQ ID NO: 192253 - DNA, 20 bp, synthetic construct
  source 1..20: mol_type = other DNA
ggggcgatcttggctcactg

SEQ ID NO: 192254 - DNA, 20 bp, synthetic construct
  source 1..20: mol_type = other DNA
tggggcgatcttggctcact

SEQ ID NO: 192255 - DNA, 20 bp, synthetic construct
  source 1..20: mol_type = other DNA
gtggggcgatcttggctcac

SEQ ID NO: 192256 - DNA, 20 bp, synthetic construct
  source 1..20: mol_type = other DNA
agtggggcgatcttggctca

SEQ ID NO: 192257 - DNA, 20 bp, synthetic construct
  source 1..20: mol_type = other DNA
cagtggggcgatcttggctc

SEQ ID NO: 192258 - DNA, 20 bp, synthetic construct
  source 1..20: mol_type = other DNA
gcagtggggcgatcttggct

SEQ ID NO: 192259 - DNA, 20 bp, synthetic construct
  source 1..20: mol_type = other DNA
tgcagtggggcgatcttggc

SEQ ID NO: 192260 - DNA, 20 bp, synthetic construct
  source 1..20: mol_type = other DNA
gtgcagtggggcgatcttgg

SEQ ID NO: 192261 - DNA, 20 bp, synthetic construct
  source 1..20: mol_type = other DNA
agtgcagtggggcgatcttg

SEQ ID NO: 192262 - DNA, 20 bp, synthetic construct
  source 1..20: mol_type = other DNA
gagtgcagtggggcgatctt

SEQ ID NO: 192263 - DNA, 20 bp, synthetic construct
  source 1..20: mol_type = other DNA
agagtgcagtggggcgatct

SEQ ID NO: 192264 - DNA, 20 bp, synthetic construct
  source 1..20: mol_type = other DNA
tagagtgcagtggggcgatc

SEQ ID NO: 192265 - DNA, 20 bp, synthetic construct
  source 1..20: mol_type = other DNA
ctagagtgcagtggggcgat

SEQ ID NO: 192266 - DNA, 20 bp, synthetic construct
  source 1..20: mol_type = other DNA
gctagagtgcagtggggcga

SEQ ID NO: 192267 - DNA, 20 bp, synthetic construct
  source 1..20: mol_type = other DNA
ggctagagtgcagtggggcg

SEQ ID NO: 192268 - DNA, 20 bp, synthetic construct
  source 1..20: mol_type = other DNA
aggctagagtgcagtggggc

SEQ ID NO: 192269 - DNA, 20 bp, synthetic construct
  source 1..20: mol_type = other DNA
caggctagagtgcagtgggg

SEQ ID NO: 192270 - DNA, 20 bp, synthetic construct
  source 1..20: mol_type = other DNA
ccaggctagagtgcagtggg

SEQ ID NO: 192271 - DNA, 20 bp, synthetic construct
  source 1..20: mol_type = other DNA
cccaggctagagtgcagtgg

SEQ ID NO: 192272 - DNA, 20 bp, synthetic construct
  source 1..20: mol_type = other DNA
gcccaggctagagtgcagtg

SEQ ID NO: 192273 - DNA, 20 bp, synthetic construct
  source 1..20: mol_type = other DNA
tgcccaggctagagtgcagt

SEQ ID NO: 192274 - DNA, 20 bp, synthetic construct
  source 1..20: mol_type = other DNA
ctgcccaggctagagtgcag

SEQ ID NO: 192275 - DNA, 20 bp, synthetic construct
  source 1..20: mol_type = other DNA
gctgcccaggctagagtgca

SEQ ID NO: 192276 - DNA, 20 bp, synthetic construct
  source 1..20: mol_type = other DNA
tgctgcccaggctagagtgc

SEQ ID NO: 192277 - DNA, 20 bp, synthetic construct
  source 1..20: mol_type = other DNA
ctgctgcccaggctagagtg

SEQ ID NO: 192278 - DNA, 20 bp, synthetic construct
  source 1..20: mol_type = other DNA
tctgctgcccaggctagagt

SEQ ID NO: 192279 - DNA, 20 bp, synthetic construct
  source 1..20: mol_type = other DNA
gtctgctgcccaggctagag

SEQ ID NO: 192280 - DNA, 20 bp, synthetic construct
  source 1..20: mol_type = other DNA
agtctgctgcccaggctaga

SEQ ID NO: 192281 - DNA, 20 bp, synthetic construct
  source 1..20: mol_type = other DNA
cagtctgctgcccaggctag

SEQ ID NO: 192282 - DNA, 20 bp, synthetic construct
  source 1..20: mol_type = other DNA
tcagtctgctgcccaggcta

SEQ ID NO: 192283 - DNA, 20 bp, synthetic construct
  source 1..20: mol_type = other DNA
ctcagtctgctgcccaggct

SEQ ID NO: 192284 - DNA, 20 bp, synthetic construct
  source 1..20: mol_type = other DNA
tctcagtctgctgcccaggc

SEQ ID NO: 192285 - DNA, 20 bp, synthetic construct
  source 1..20: mol_type = other DNA
gtctcagtctgctgcccagg

SEQ ID NO: 192286 - DNA, 20 bp, synthetic construct
  source 1..20: mol_type = other DNA
agtctcagtctgctgcccag

SEQ ID NO: 192287 - DNA, 20 bp, synthetic construct
  source 1..20: mol_type = other DNA
gagtctcagtctgctgccca

SEQ ID NO: 192288 - DNA, 20 bp, synthetic construct
  source 1..20: mol_type = other DNA
agagtctcagtctgctgccc

SEQ ID NO: 192289 - DNA, 20 bp, synthetic construct
  source 1..20: mol_type = other DNA
cagagtctcagtctgctgcc

SEQ ID NO: 192290 - DNA, 20 bp, synthetic construct
  source 1..20: mol_type = other DNA
acagagtctcagtctgctgc

SEQ ID NO: 192291 - DNA, 20 bp, synthetic construct
  source 1..20: mol_type = other DNA
gacagagtctcagtctgctg

SEQ ID NO: 192292 - DNA, 20 bp, synthetic construct
  source 1..20: mol_type = other DNA
agacagagtctcagtctgct

SEQ ID NO: 192293 - DNA, 20 bp, synthetic construct
  source 1..20: mol_type = other DNA
gagacagagtctcagtctgc

SEQ ID NO: 192294 - DNA, 20 bp, synthetic construct
  source 1..20: mol_type = other DNA
tgagacagagtctcagtctg

SEQ ID NO: 192295 - DNA, 20 bp, synthetic construct
  source 1..20: mol_type = other DNA
ttgagacagagtctcagtct

SEQ ID NO: 192296 - DNA, 20 bp, synthetic construct
  source 1..20: mol_type = other DNA
attgagacagagtctcagtc

SEQ ID NO: 192297 - DNA, 20 bp, synthetic construct
  source 1..20: mol_type = other DNA
tattgagacagagtctcagt

SEQ ID NO: 192298 - DNA, 20 bp, synthetic construct
  source 1..20: mol_type = other DNA
ttattgagacagagtctcag

SEQ ID NO: 192299 - DNA, 20 bp, synthetic construct
  source 1..20: mol_type = other DNA
tttattgagacagagtctca

SEQ ID NO: 192300 - DNA, 20 bp, synthetic construct
  source 1..20: mol_type = other DNA
ttttattgagacagagtctc

SEQ ID NO: 192301 - DNA, 20 bp, synthetic construct
  source 1..20: mol_type = other DNA
tttttattgagacagagtct

SEQ ID NO: 192302 - DNA, 20 bp, synthetic construct
  source 1..20: mol_type = other DNA
ttttttattgagacagagtc

SEQ ID NO: 192303 - DNA, 20 bp, synthetic construct
  source 1..20: mol_type = other DNA
tttttttattgagacagagt

SEQ ID NO: 192304 - DNA, 20 bp, synthetic construct
  source 1..20: mol_type = other DNA
ttttttttattgagacagag

SEQ ID NO: 192305 - DNA, 20 bp, synthetic construct
  source 1..20: mol_type = other DNA
tttttttttattgagacaga

SEQ ID NO: 192306 - DNA, 20 bp, synthetic construct
  source 1..20: mol_type = other DNA
ttttttttttattgagacag

SEQ ID NO: 192307 - DNA, 20 bp, synthetic construct
  source 1..20: mol_type = other DNA
tttttttttttattgagaca

SEQ ID NO: 192308 - DNA, 20 bp, synthetic construct
  source 1..20: mol_type = other DNA
ttttttttttttattgagac

SEQ ID NO: 192309 - DNA, 20 bp, synthetic construct
  source 1..20: mol_type = other DNA
tttttttttttttattgaga

SEQ ID NO: 192310 - DNA, 20 bp, synthetic construct
  source 1..20: mol_type = other DNA
ttttttttttttttattgag

SEQ ID NO: 192311 - DNA, 20 bp, synthetic construct
  source 1..20: mol_type = other DNA
tttttttttttttttattga

SEQ ID NO: 192312 - DNA, 20 bp, synthetic construct
  source 1..20: mol_type = other DNA
ctttttttttttttttattg

SEQ ID NO: 192313 - DNA, 20 bp, synthetic construct
  source 1..20: mol_type = other DNA
tctttttttttttttttatt

SEQ ID NO: 192314 - DNA, 20 bp, synthetic construct
  source 1..20: mol_type = other DNA
ttctttttttttttttttat

SEQ ID NO: 192315 - DNA, 20 bp, synthetic construct
  source 1..20: mol_type = other DNA
tttcttttttttttttttta

SEQ ID NO: 192316 - DNA, 20 bp, synthetic construct
  source 1..20: mol_type = other DNA
ttttcttttttttttttttt

SEQ ID NO: 192317 - DNA, 20 bp, synthetic construct
  source 1..20: mol_type = other DNA
cttttctttttttttttttt

SEQ ID NO: 192318 - DNA, 20 bp, synthetic construct
  source 1..20: mol_type = other DNA
tcttttcttttttttttttt

SEQ ID NO: 192319 - DNA, 20 bp, synthetic construct
  source 1..20: mol_type = other DNA
ttcttttctttttttttttt

SEQ ID NO: 192320 - DNA, 20 bp, synthetic construct
  source 1..20: mol_type = other DNA
tttcttttcttttttttttt

SEQ ID NO: 192321 - DNA, 20 bp, synthetic construct
  source 1..20: mol_type = other DNA
ttttcttttctttttttttt

SEQ ID NO: 192322 - DNA, 20 bp, synthetic construct
  source 1..20: mol_type = other DNA
tttttcttttcttttttttt

SEQ ID NO: 192323 - DNA, 20 bp, synthetic construct
  source 1..20: mol_type = other DNA
ctttttcttttctttttttt

SEQ ID NO: 192324 - DNA, 20 bp, synthetic construct
  source 1..20: mol_type = other DNA
tctttttcttttcttttttt

SEQ ID NO: 192325 - DNA, 20 bp, synthetic construct
  source 1..20: mol_type = other DNA
ttctttttcttttctttttt

SEQ ID NO: 192326 - DNA, 20 bp, synthetic construct
  source 1..20: mol_type = other DNA
attctttttcttttcttttt

SEQ ID NO: 192327 - DNA, 20 bp, synthetic construct
  source 1..20: mol_type = other DNA
aattctttttcttttctttt

SEQ ID NO: 192328 - DNA, 20 bp, synthetic construct
  source 1..20: mol_type = other DNA
caattctttttcttttcttt

SEQ ID NO: 192329 - DNA, 20 bp, synthetic construct
  source 1..20: mol_type = other DNA
gcaattctttttcttttctt

SEQ ID NO: 192330 - DNA, 20 bp, synthetic construct
  source 1..20: mol_type = other DNA
tgcaattctttttcttttct

SEQ ID NO: 192331 - DNA, 20 bp, synthetic construct
  source 1..20: mol_type = other DNA
ttgcaattctttttcttttc

SEQ ID NO: 192332 - DNA, 20 bp, synthetic construct
  source 1..20: mol_type = other DNA
cttgcaattctttttctttt

SEQ ID NO: 192333 - DNA, 20 bp, synthetic construct
  source 1..20: mol_type = other DNA
tcttgcaattctttttcttt

SEQ ID NO: 192334 - DNA, 20 bp, synthetic construct
  source 1..20: mol_type = other DNA
ttcttgcaattctttttctt

SEQ ID NO: 192335 - DNA, 20 bp, synthetic construct
  source 1..20: mol_type = other DNA
tttcttgcaattctttttct

SEQ ID NO: 192336 - DNA, 20 bp, synthetic construct
  source 1..20: mol_type = other DNA
atttcttgcaattctttttc

SEQ ID NO: 192337 - DNA, 20 bp, synthetic construct
  source 1..20: mol_type = other DNA
tatttcttgcaattcttttt

SEQ ID NO: 192338 - DNA, 20 bp, synthetic construct
  source 1..20: mol_type = other DNA
ttatttcttgcaattctttt

SEQ ID NO: 192339 - DNA, 20 bp, synthetic construct
  source 1..20: mol_type = other DNA
tttatttcttgcaattcttt

SEQ ID NO: 192340 - DNA, 20 bp, synthetic construct
  source 1..20: mol_type = other DNA
atttatttcttgcaattctt

SEQ ID NO: 192341 - DNA, 20 bp, synthetic construct
  source 1..20: mol_type = other DNA
aatttatttcttgcaattct

SEQ ID NO: 192342 - DNA, 20 bp, synthetic construct
  source 1..20: mol_type = other DNA
taatttatttcttgcaattc

SEQ ID NO: 192343 - DNA, 20 bp, synthetic construct
  source 1..20: mol_type = other DNA
ataatttatttcttgcaatt

SEQ ID NO: 192344 - DNA, 20 bp, synthetic construct
  source 1..20: mol_type = other DNA
aataatttatttcttgcaat

SEQ ID NO: 192345 - DNA, 20 bp, synthetic construct
  source 1..20: mol_type = other DNA
caataatttatttcttgcaa

SEQ ID NO: 192346 - DNA, 20 bp, synthetic construct
  source 1..20: mol_type = other DNA
acaataatttatttcttgca

SEQ ID NO: 192347 - DNA, 20 bp, synthetic construct
  source 1..20: mol_type = other DNA
aacaataatttatttcttgc

SEQ ID NO: 192348 - DNA, 20 bp, synthetic construct
  source 1..20: mol_type = other DNA
aaacaataatttatttcttg

SEQ ID NO: 192349 - DNA, 20 bp, synthetic construct
  source 1..20: mol_type = other DNA
taaacaataatttatttctt

SEQ ID NO: 192350 - DNA, 20 bp, synthetic construct
  source 1..20: mol_type = other DNA
ataaacaataatttatttct

SEQ ID NO: 192351 - DNA, 20 bp, synthetic construct
  source 1..20: mol_type = other DNA
cataaacaataatttatttc

SEQ ID NO: 192352 - DNA, 20 bp, synthetic construct
  source 1..20: mol_type = other DNA
tcataaacaataatttattt

SEQ ID NO: 192353 - DNA, 20 bp, synthetic construct
  source 1..20: mol_type = other DNA
ctcataaacaataatttatt

SEQ ID NO: 192354 - DNA, 20 bp, synthetic construct
  source 1..20: mol_type = other DNA
gctcataaacaataatttat

SEQ ID NO: 192355 - DNA, 20 bp, synthetic construct
  source 1..20: mol_type = other DNA
agctcataaacaataattta

SEQ ID NO: 192356 - DNA, 20 bp, synthetic construct
  source 1..20: mol_type = other DNA
tagctcataaacaataattt

SEQ ID NO: 192357 - DNA, 20 bp, synthetic construct
  source 1..20: mol_type = other DNA
atagctcataaacaataatt

SEQ ID NO: 192358 - DNA, 20 bp, synthetic construct
  source 1..20: mol_type = other DNA
tatagctcataaacaataat

SEQ ID NO: 192359 - DNA, 20 bp, synthetic construct
  source 1..20: mol_type = other DNA
atatagctcataaacaataa

SEQ ID NO: 192360 - DNA, 20 bp, synthetic construct
  source 1..20: mol_type = other DNA
catatagctcataaacaata

SEQ ID NO: 192361 - DNA, 20 bp, synthetic construct
  source 1..20: mol_type = other DNA
ccatatagctcataaacaat

SEQ ID NO: 192362 - DNA, 20 bp, synthetic construct
  source 1..20: mol_type = other DNA
accatatagctcataaacaa

SEQ ID NO: 192363 - DNA, 20 bp, synthetic construct
  source 1..20: mol_type = other DNA
gaccatatagctcataaaca

SEQ ID NO: 192364 - DNA, 20 bp, synthetic construct
  source 1..20: mol_type = other DNA
agaccatatagctcataaac

SEQ ID NO: 192365 - DNA, 20 bp, synthetic construct
  source 1..20: mol_type = other DNA
cagaccatatagctcataaa

SEQ ID NO: 192366 - DNA, 20 bp, synthetic construct
  source 1..20: mol_type = other DNA
acagaccatatagctcataa

SEQ ID NO: 192367 - DNA, 20 bp, synthetic construct
  source 1..20: mol_type = other DNA
cacagaccatatagctcata

SEQ ID NO: 192368 - DNA, 20 bp, synthetic construct
  source 1..20: mol_type = other DNA
ccacagaccatatagctcat

SEQ ID NO: 192369 - DNA, 20 bp, synthetic construct
  source 1..20: mol_type = other DNA
accacagaccatatagctca

SEQ ID NO: 192370 - DNA, 20 bp, synthetic construct
  source 1..20: mol_type = other DNA
taccacagaccatatagctc

SEQ ID NO: 192371 - DNA, 20 bp, synthetic construct
  source 1..20: mol_type = other DNA
gtaccacagaccatatagct

SEQ ID NO: 192372 - DNA, 20 bp, synthetic construct
  source 1..20: mol_type = other DNA
ggtaccacagaccatatagc

SEQ ID NO: 192373 - DNA, 20 bp, synthetic construct
  source 1..20: mol_type = other DNA
aggtaccacagaccatatag

SEQ ID NO: 192374 - DNA, 20 bp, synthetic construct
  source 1..20: mol_type = other DNA
aaggtaccacagaccatata

SEQ ID NO: 192375 - DNA, 20 bp, synthetic construct
  source 1..20: mol_type = other DNA
caaggtaccacagaccatat

SEQ ID NO: 192376 - DNA, 20 bp, synthetic construct
  source 1..20: mol_type = other DNA
acaaggtaccacagaccata

SEQ ID NO: 192377 - DNA, 20 bp, synthetic construct
  source 1..20: mol_type = other DNA
aacaaggtaccacagaccat

SEQ ID NO: 192378 - DNA, 20 bp, synthetic construct
  source 1..20: mol_type = other DNA
caacaaggtaccacagacca

SEQ ID NO: 192379 - DNA, 20 bp, synthetic construct
  source 1..20: mol_type = other DNA
acaacaaggtaccacagacc

SEQ ID NO: 192380 - DNA, 20 bp, synthetic construct
  source 1..20: mol_type = other DNA
cacaacaaggtaccacagac

SEQ ID NO: 192381 - DNA, 20 bp, synthetic construct
  source 1..20: mol_type = other DNA
ccacaacaaggtaccacaga

SEQ ID NO: 192382 - DNA, 20 bp, synthetic construct
  source 1..20: mol_type = other DNA
cccacaacaaggtaccacag

SEQ ID NO: 192383 - DNA, 20 bp, synthetic construct
  source 1..20: mol_type = other DNA
tcccacaacaaggtaccaca

SEQ ID NO: 192384 - DNA, 20 bp, synthetic construct
  source 1..20: mol_type = other DNA
gtcccacaacaaggtaccac

SEQ ID NO: 192385 - DNA, 20 bp, synthetic construct
  source 1..20: mol_type = other DNA
agtcccacaacaaggtacca

SEQ ID NO: 192386 - DNA, 20 bp, synthetic construct
  source 1..20: mol_type = other DNA
cagtcccacaacaaggtacc

SEQ ID NO: 192387 - DNA, 20 bp, synthetic construct
  source 1..20: mol_type = other DNA
ccagtcccacaacaaggtac

SEQ ID NO: 192388 - DNA, 20 bp, synthetic construct
  source 1..20: mol_type = other DNA
cccagtcccacaacaaggta

SEQ ID NO: 192389 - DNA, 20 bp, synthetic construct
  source 1..20: mol_type = other DNA
tcccagtcccacaacaaggt

SEQ ID NO: 192390 - DNA, 20 bp, synthetic construct
  source 1..20: mol_type = other DNA
ctcccagtcccacaacaagg

SEQ ID NO: 192391 - DNA, 20 bp, synthetic construct
  source 1..20: mol_type = other DNA
actcccagtcccacaacaag

SEQ ID NO: 192392 - DNA, 20 bp, synthetic construct
  source 1..20: mol_type = other DNA
gactcccagtcccacaacaa

SEQ ID NO: 192393 - DNA, 20 bp, synthetic construct
  source 1..20: mol_type = other DNA
agactcccagtcccacaaca

SEQ ID NO: 192394 - DNA, 20 bp, synthetic construct
  source 1..20: mol_type = other DNA
aagactcccagtcccacaac

SEQ ID NO: 192395 - DNA, 20 bp, synthetic construct
  source 1..20: mol_type = other DNA
caagactcccagtcccacaa

SEQ ID NO: 192396 - DNA, 20 bp, synthetic construct
  source 1..20: mol_type = other DNA
ccaagactcccagtcccaca

SEQ ID NO: 192397 - DNA, 20 bp, synthetic construct
  source 1..20: mol_type = other DNA
gccaagactcccagtcccac

SEQ ID NO: 192398 - DNA, 20 bp, synthetic construct
  source 1..20: mol_type = other DNA
cgccaagactcccagtccca

SEQ ID NO: 192399 - DNA, 20 bp, synthetic construct
  source 1..20: mol_type = other DNA
acgccaagactcccagtccc

SEQ ID NO: 192400 - DNA, 20 bp, synthetic construct
  source 1..20: mol_type = other DNA
gacgccaagactcccagtcc

SEQ ID NO: 192401 - DNA, 20 bp, synthetic construct
  source 1..20: mol_type = other DNA
agacgccaagactcccagtc

SEQ ID NO: 192402 - DNA, 20 bp, synthetic construct
  source 1..20: mol_type = other DNA
gagacgccaagactcccagt

SEQ ID NO: 192403 - DNA, 20 bp, synthetic construct
  source 1..20: mol_type = other DNA
ggagacgccaagactcccag

SEQ ID NO: 192404 - DNA, 20 bp, synthetic construct
  source 1..20: mol_type = other DNA
gggagacgccaagactccca

SEQ ID NO: 192405 - DNA, 20 bp, synthetic construct
  source 1..20: mol_type = other DNA
agggagacgccaagactccc

SEQ ID NO: 192406 - DNA, 20 bp, synthetic construct
  source 1..20: mol_type = other DNA
cagggagacgccaagactcc

SEQ ID NO: 192407 - DNA, 20 bp, synthetic construct
  source 1..20: mol_type = other DNA
tcagggagacgccaagactc

SEQ ID NO: 192408 - DNA, 20 bp, synthetic construct
  source 1..20: mol_type = other DNA
gtcagggagacgccaagact

SEQ ID NO: 192409 - DNA, 20 bp, synthetic construct
  source 1..20: mol_type = other DNA
ggtcagggagacgccaagac

SEQ ID NO: 192410 - DNA, 20 bp, synthetic construct
  source 1..20: mol_type = other DNA
gggtcagggagacgccaaga

SEQ ID NO: 192411 - DNA, 20 bp, synthetic construct
  source 1..20: mol_type = other DNA
agggtcagggagacgccaag

SEQ ID NO: 192412 - DNA, 20 bp, synthetic construct
  source 1..20: mol_type = other DNA
cagggtcagggagacgccaa

SEQ ID NO: 192413 - DNA, 20 bp, synthetic construct
  source 1..20: mol_type = other DNA
gcagggtcagggagacgcca

SEQ ID NO: 192414 - DNA, 20 bp, synthetic construct
  source 1..20: mol_type = other DNA
ggcagggtcagggagacgcc

SEQ ID NO: 192415 - DNA, 20 bp, synthetic construct
  source 1..20: mol_type = other DNA
aggcagggtcagggagacgc

SEQ ID NO: 192416 - DNA, 20 bp, synthetic construct
  source 1..20: mol_type = other DNA
caggcagggtcagggagacg

SEQ ID NO: 192417 - DNA, 20 bp, synthetic construct
  source 1..20: mol_type = other DNA
acaggcagggtcagggagac

SEQ ID NO: 192418 - DNA, 20 bp, synthetic construct
  source 1..20: mol_type = other DNA
aacaggcagggtcagggaga

SEQ ID NO: 192419 - DNA, 20 bp, synthetic construct
  source 1..20: mol_type = other DNA
caacaggcagggtcagggag

SEQ ID NO: 192420 - DNA, 20 bp, synthetic construct
  source 1..20: mol_type = other DNA
gcaacaggcagggtcaggga

SEQ ID NO: 192421 - DNA, 20 bp, synthetic construct
  source 1..20: mol_type = other DNA
agcaacaggcagggtcaggg

SEQ ID NO: 192422 - DNA, 20 bp, synthetic construct
  source 1..20: mol_type = other DNA
cagcaacaggcagggtcagg

SEQ ID NO: 192423 - DNA, 20 bp, synthetic construct
  source 1..20: mol_type = other DNA
gcagcaacaggcagggtcag

SEQ ID NO: 192424 - DNA, 20 bp, synthetic construct
  source 1..20: mol_type = other DNA
tgcagcaacaggcagggtca

SEQ ID NO: 192425 - DNA, 20 bp, synthetic construct
  source 1..20: mol_type = other DNA
ctgcagcaacaggcagggtc

SEQ ID NO: 192426 - DNA, 20 bp, synthetic construct
  source 1..20: mol_type = other DNA
gctgcagcaacaggcagggt

SEQ ID NO: 192427 - DNA, 20 bp, synthetic construct
  source 1..20: mol_type = other DNA
tgctgcagcaacaggcaggg

SEQ ID NO: 192428 - DNA, 20 bp, synthetic construct
  source 1..20: mol_type = other DNA
gtgctgcagcaacaggcagg

SEQ ID NO: 192429 - DNA, 20 bp, synthetic construct
  source 1..20: mol_type = other DNA
ggtgctgcagcaacaggcag

SEQ ID NO: 192430 - DNA, 20 bp, synthetic construct
  source 1..20: mol_type = other DNA
cggtgctgcagcaacaggca

SEQ ID NO: 192431 - DNA, 20 bp, synthetic construct
  source 1..20: mol_type = other DNA
gcggtgctgcagcaacaggc

SEQ ID NO: 192432 - DNA, 20 bp, synthetic construct
  source 1..20: mol_type = other DNA
agcggtgctgcagcaacagg

SEQ ID NO: 192433 - DNA, 20 bp, synthetic construct
  source 1..20: mol_type = other DNA
gagcggtgctgcagcaacag

SEQ ID NO: 192434 - DNA, 20 bp, synthetic construct
  source 1..20: mol_type = other DNA
tgagcggtgctgcagcaaca

SEQ ID NO: 192435 - DNA, 20 bp, synthetic construct
  source 1..20: mol_type = other DNA
ctgagcggtgctgcagcaac

SEQ ID NO: 192436 - DNA, 20 bp, synthetic construct
  source 1..20: mol_type = other DNA
gctgagcggtgctgcagcaa

SEQ ID NO: 192437 - DNA, 20 bp, synthetic construct
  source 1..20: mol_type = other DNA
ggctgagcggtgctgcagca

SEQ ID NO: 192438 - DNA, 20 bp, synthetic construct
  source 1..20: mol_type = other DNA
gggctgagcggtgctgcagc

SEQ ID NO: 192439 - DNA, 20 bp, synthetic construct
  source 1..20: mol_type = other DNA
agggctgagcggtgctgcag

SEQ ID NO: 192440 - DNA, 20 bp, synthetic construct
  source 1..20: mol_type = other DNA
cagggctgagcggtgctgca

SEQ ID NO: 192441 - DNA, 20 bp, synthetic construct
  source 1..20: mol_type = other DNA
gcagggctgagcggtgctgc

SEQ ID NO: 192442 - DNA, 20 bp, synthetic construct
  source 1..20: mol_type = other DNA
ggcagggctgagcggtgctg

SEQ ID NO: 192443 - DNA, 20 bp, synthetic construct
  source 1..20: mol_type = other DNA
aggcagggctgagcggtgct

SEQ ID NO: 192444 - DNA, 20 bp, synthetic construct
  source 1..20: mol_type = other DNA
caggcagggctgagcggtgc

SEQ ID NO: 192445 - DNA, 20 bp, synthetic construct
  source 1..20: mol_type = other DNA
gcaggcagggctgagcggtg

SEQ ID NO: 192446 - DNA, 20 bp, synthetic construct
  source 1..20: mol_type = other DNA
agcaggcagggctgagcggt

SEQ ID NO: 192447 - DNA, 20 bp, synthetic construct
  source 1..20: mol_type = other DNA
gagcaggcagggctgagcgg

SEQ ID NO: 192448 - DNA, 20 bp, synthetic construct
  source 1..20: mol_type = other DNA
ggagcaggcagggctgagcg

SEQ ID NO: 192449 - DNA, 20 bp, synthetic construct
  source 1..20: mol_type = other DNA
gggagcaggcagggctgagc

SEQ ID NO: 192450 - DNA, 20 bp, synthetic construct
  source 1..20: mol_type = other DNA
agggagcaggcagggctgag

SEQ ID NO: 192451 - DNA, 20 bp, synthetic construct
  source 1..20: mol_type = other DNA
tagggagcaggcagggctga

SEQ ID NO: 192452 - DNA, 20 bp, synthetic construct
  source 1..20: mol_type = other DNA
gtagggagcaggcagggctg

SEQ ID NO: 192453 - DNA, 20 bp, synthetic construct
  source 1..20: mol_type = other DNA
ggtagggagcaggcagggct

SEQ ID NO: 192454 - DNA, 20 bp, synthetic construct
  source 1..20: mol_type = other DNA
aggtagggagcaggcagggc

SEQ ID NO: 192455 - DNA, 20 bp, synthetic construct
  source 1..20: mol_type = other DNA
caggtagggagcaggcaggg

SEQ ID NO: 192456 - DNA, 20 bp, synthetic construct
  source 1..20: mol_type = other DNA
gcaggtagggagcaggcagg

SEQ ID NO: 192457 - DNA, 20 bp, synthetic construct
  source 1..20: mol_type = other DNA
ggcaggtagggagcaggcag

SEQ ID NO: 192458 - DNA, 20 bp, synthetic construct
  source 1..20: mol_type = other DNA
aggcaggtagggagcaggca

SEQ ID NO: 192459 - DNA, 20 bp, synthetic construct
  source 1..20: mol_type = other DNA
gaggcaggtagggagcaggc

SEQ ID NO: 192460 - DNA, 20 bp, synthetic construct
  source 1..20: mol_type = other DNA
ggaggcaggtagggagcagg

SEQ ID NO: 192461 - DNA, 20 bp, synthetic construct
  source 1..20: mol_type = other DNA
gggaggcaggtagggagcag

SEQ ID NO: 192462 - DNA, 20 bp, synthetic construct
  source 1..20: mol_type = other DNA
ggggaggcaggtagggagca

SEQ ID NO: 192463 - DNA, 20 bp, synthetic construct
  source 1..20: mol_type = other DNA
aggggaggcaggtagggagc

SEQ ID NO: 192464 - DNA, 20 bp, synthetic construct
  source 1..20: mol_type = other DNA
gaggggaggcaggtagggag

SEQ ID NO: 192465 - DNA, 20 bp, synthetic construct
  source 1..20: mol_type = other DNA
cgaggggaggcaggtaggga

SEQ ID NO: 192466 - DNA, 20 bp, synthetic construct
  source 1..20: mol_type = other DNA
ccgaggggaggcaggtaggg

SEQ ID NO: 192467 - DNA, 20 bp, synthetic construct
  source 1..20: mol_type = other DNA
gccgaggggaggcaggtagg

SEQ ID NO: 192468 - DNA, 20 bp, synthetic construct
  source 1..20: mol_type = other DNA
ggccgaggggaggcaggtag

SEQ ID NO: 192469 - DNA, 20 bp, synthetic construct
  source 1..20: mol_type = other DNA
aggccgaggggaggcaggta

SEQ ID NO: 192470 - DNA, 20 bp, synthetic construct
  source 1..20: mol_type = other DNA
gaggccgaggggaggcaggt

SEQ ID NO: 192471 - DNA, 20 bp, synthetic construct
  source 1..20: mol_type = other DNA
agaggccgaggggaggcagg

SEQ ID NO: 192472 - DNA, 20 bp, synthetic construct
  source 1..20: mol_type = other DNA
gagaggccgaggggaggcag

SEQ ID NO: 192473 - DNA, 20 bp, synthetic construct
  source 1..20: mol_type = other DNA
ggagaggccgaggggaggca

SEQ ID NO: 192474 - DNA, 20 bp, synthetic construct
  source 1..20: mol_type = other DNA
aggagaggccgaggggaggc

SEQ ID NO: 192475 - DNA, 20 bp, synthetic construct
  source 1..20: mol_type = other DNA
caggagaggccgaggggagg

SEQ ID NO: 192476 - DNA, 20 bp, synthetic construct
  source 1..20: mol_type = other DNA
gcaggagaggccgaggggag

SEQ ID NO: 192477 - DNA, 20 bp, synthetic construct
  source 1..20: mol_type = other DNA
ggcaggagaggccgagggga

SEQ ID NO: 192478 - DNA, 20 bp, synthetic construct
  source 1..20: mol_type = other DNA
aggcaggagaggccgagggg

SEQ ID NO: 192479 - DNA, 20 bp, synthetic construct
  source 1..20: mol_type = other DNA
gaggcaggagaggccgaggg

SEQ ID NO: 192480 - DNA, 20 bp, synthetic construct
  source 1..20: mol_type = other DNA
ggaggcaggagaggccgagg

SEQ ID NO: 192481 - DNA, 20 bp, synthetic construct
  source 1..20: mol_type = other DNA
tggaggcaggagaggccgag

SEQ ID NO: 192482 - DNA, 20 bp, synthetic construct
  source 1..20: mol_type = other DNA
gtggaggcaggagaggccga

SEQ ID NO: 192483 - DNA, 20 bp, synthetic construct
  source 1..20: mol_type = other DNA
ggtggaggcaggagaggccg

SEQ ID NO: 192484 - DNA, 20 bp, synthetic construct
  source 1..20: mol_type = other DNA
cggtggaggcaggagaggcc

SEQ ID NO: 192485 - DNA, 20 bp, synthetic construct
  source 1..20: mol_type = other DNA
ccggtggaggcaggagaggc

SEQ ID NO: 192486 - DNA, 20 bp, synthetic construct
  source 1..20: mol_type = other DNA
cccggtggaggcaggagagg

SEQ ID NO: 192487 - DNA, 20 bp, synthetic construct
  source 1..20: mol_type = other DNA
gcccggtggaggcaggagag

SEQ ID NO: 192488 - DNA, 20 bp, synthetic construct
  source 1..20: mol_type = other DNA
ggcccggtggaggcaggaga

SEQ ID NO: 192489 - DNA, 20 bp, synthetic construct
  source 1..20: mol_type = other DNA
gggcccggtggaggcaggag

SEQ ID NO: 192490 - DNA, 20 bp, synthetic construct
  source 1..20: mol_type = other DNA
ggggcccggtggaggcagga

SEQ ID NO: 192491 - DNA, 20 bp, synthetic construct
  source 1..20: mol_type = other DNA
aggggcccggtggaggcagg

SEQ ID NO: 192492 - DNA, 20 bp, synthetic construct
  source 1..20: mol_type = other DNA
caggggcccggtggaggcag

SEQ ID NO: 192493 - DNA, 20 bp, synthetic construct
  source 1..20: mol_type = other DNA
ccaggggcccggtggaggca

SEQ ID NO: 192494 - DNA, 20 bp, synthetic construct
  source 1..20: mol_type = other DNA
accaggggcccggtggaggc

SEQ ID NO: 192495 - DNA, 20 bp, synthetic construct
  source 1..20: mol_type = other DNA
caccaggggcccggtggagg

SEQ ID NO: 192496 - DNA, 20 bp, synthetic construct
  source 1..20: mol_type = other DNA
gcaccaggggcccggtggag

SEQ ID NO: 192497 - DNA, 20 bp, synthetic construct
  source 1..20: mol_type = other DNA
ggcaccaggggcccggtgga

SEQ ID NO: 192498 - DNA, 20 bp, synthetic construct
  source 1..20: mol_type = other DNA
aggcaccaggggcccggtgg

SEQ ID NO: 192499 - DNA, 20 bp, synthetic construct
  source 1..20: mol_type = other DNA
gaggcaccaggggcccggtg

SEQ ID NO: 192500 - DNA, 20 bp, synthetic construct
  source 1..20: mol_type = other DNA
ggaggcaccaggggcccggt

SEQ ID NO: 192501 - DNA, 20 bp, synthetic construct
  source 1..20: mol_type = other DNA
aggaggcaccaggggcccgg

SEQ ID NO: 192502 - DNA, 20 bp, synthetic construct
  source 1..20: mol_type = other DNA
gaggaggcaccaggggcccg

SEQ ID NO: 192503 - DNA, 20 bp, synthetic construct
  source 1..20: mol_type = other DNA
agaggaggcaccaggggccc

SEQ ID NO: 192504 - DNA, 20 bp, synthetic construct
  source 1..20: mol_type = other DNA
tagaggaggcaccaggggcc

SEQ ID NO: 192505 - DNA, 20 bp, synthetic construct
  source 1..20: mol_type = other DNA
ctagaggaggcaccaggggc

SEQ ID NO: 192506 - DNA, 20 bp, synthetic construct
  source 1..20: mol_type = other DNA
tctagaggaggcaccagggg

SEQ ID NO: 192507 - DNA, 20 bp, synthetic construct
  source 1..20: mol_type = other DNA
ctctagaggaggcaccaggg

SEQ ID NO: 192508 - DNA, 20 bp, synthetic construct
  source 1..20: mol_type = other DNA
tctctagaggaggcaccagg

SEQ ID NO: 192509 - DNA, 20 bp, synthetic construct
  source 1..20: mol_type = other DNA
gtctctagaggaggcaccag

SEQ ID NO: 192510 - DNA, 20 bp, synthetic construct
  source 1..20: mol_type = other DNA
tgtctctagaggaggcacca

SEQ ID NO: 192511 - DNA, 20 bp, synthetic construct
  source 1..20: mol_type = other DNA
ctgtctctagaggaggcacc

SEQ ID NO: 192512 - DNA, 20 bp, synthetic construct
  source 1..20: mol_type = other DNA
actgtctctagaggaggcac

SEQ ID NO: 192513 - DNA, 20 bp, synthetic construct
  source 1..20: mol_type = other DNA
gactgtctctagaggaggca

SEQ ID NO: 192514 - DNA, 20 bp, synthetic construct
  source 1..20: mol_type = other DNA
ggactgtctctagaggaggc

SEQ ID NO: 192515 - DNA, 20 bp, synthetic construct
  source 1..20: mol_type = other DNA
aggactgtctctagaggagg

SEQ ID NO: 192516 - DNA, 20 bp, synthetic construct
  source 1..20: mol_type = other DNA
gaggactgtctctagaggag

SEQ ID NO: 192517 - DNA, 20 bp, synthetic construct
  source 1..20: mol_type = other DNA
ggaggactgtctctagagga

SEQ ID NO: 192518 - DNA, 20 bp, synthetic construct
  source 1..20: mol_type = other DNA
aggaggactgtctctagagg

SEQ ID NO: 192519 - DNA, 20 bp, synthetic construct
  source 1..20: mol_type = other DNA
caggaggactgtctctagag

SEQ ID NO: 192520 - DNA, 20 bp, synthetic construct
  source 1..20: mol_type = other DNA
ccaggaggactgtctctaga

SEQ ID NO: 192521 - DNA, 20 bp, synthetic construct
  source 1..20: mol_type = other DNA
cccaggaggactgtctctag

SEQ ID NO: 192522 - DNA, 20 bp, synthetic construct
  source 1..20: mol_type = other DNA
tcccaggaggactgtctcta

SEQ ID NO: 192523 - DNA, 20 bp, synthetic construct
  source 1..20: mol_type = other DNA
gtcccaggaggactgtctct

SEQ ID NO: 192524 - DNA, 20 bp, synthetic construct
  source 1..20: mol_type = other DNA
ggtcccaggaggactgtctc

SEQ ID NO: 192525 - DNA, 20 bp, synthetic construct
  source 1..20: mol_type = other DNA
cggtcccaggaggactgtct

SEQ ID NO: 192526 - DNA, 20 bp, synthetic construct
  source 1..20: mol_type = other DNA
tcggtcccaggaggactgtc

SEQ ID NO: 192527 - DNA, 20 bp, synthetic construct
  source 1..20: mol_type = other DNA
atcggtcccaggaggactgt

SEQ ID NO: 192528 - DNA, 20 bp, synthetic construct
  source 1..20: mol_type = other DNA
aatcggtcccaggaggactg

SEQ ID NO: 192529 - DNA, 20 bp, synthetic construct
  source 1..20: mol_type = other DNA
caatcggtcccaggaggact

SEQ ID NO: 192530 - DNA, 20 bp, synthetic construct
  source 1..20: mol_type = other DNA
acaatcggtcccaggaggac

SEQ ID NO: 192531 - DNA, 20 bp, synthetic construct
  source 1..20: mol_type = other DNA
cacaatcggtcccaggagga

SEQ ID NO: 192532 - DNA, 20 bp, synthetic construct
  source 1..20: mol_type = other DNA
acacaatcggtcccaggagg

SEQ ID NO: 192533 - DNA, 20 bp, synthetic construct
  source 1..20: mol_type = other DNA
aacacaatcggtcccaggag

SEQ ID NO: 192534 - DNA, 20 bp, synthetic construct
  source 1..20: mol_type = other DNA
gaacacaatcggtcccagga

SEQ ID NO: 192535 - DNA, 20 bp, synthetic construct
  source 1..20: mol_type = other DNA
agaacacaatcggtcccagg

SEQ ID NO: 192536 - DNA, 20 bp, synthetic construct
  source 1..20: mol_type = other DNA
gagaacacaatcggtcccag

SEQ ID NO: 192537 - DNA, 20 bp, synthetic construct
  source 1..20: mol_type = other DNA
tgagaacacaatcggtccca

SEQ ID NO: 192538 - DNA, 20 bp, synthetic construct
  source 1..20: mol_type = other DNA
gtgagaacacaatcggtccc

SEQ ID NO: 192539 - DNA, 20 bp, synthetic construct
  source 1..20: mol_type = other DNA
agtgagaacacaatcggtcc

SEQ ID NO: 192540 - DNA, 20 bp, synthetic construct
  source 1..20: mol_type = other DNA
aagtgagaacacaatcggtc

SEQ ID NO: 192541 - DNA, 20 bp, synthetic construct
  source 1..20: mol_type = other DNA
taagtgagaacacaatcggt

SEQ ID NO: 192542 - DNA, 20 bp, synthetic construct
  source 1..20: mol_type = other DNA
gtaagtgagaacacaatcgg

SEQ ID NO: 192543 - DNA, 20 bp, synthetic construct
  source 1..20: mol_type = other DNA
tgtaagtgagaacacaatcg

SEQ ID NO: 192544 - DNA, 20 bp, synthetic construct
  source 1..20: mol_type = other DNA
gtgtaagtgagaacacaatc

SEQ ID NO: 192545 - DNA, 20 bp, synthetic construct
  source 1..20: mol_type = other DNA
cgtgtaagtgagaacacaat

SEQ ID NO: 192546 - DNA, 20 bp, synthetic construct
  source 1..20: mol_type = other DNA
tcgtgtaagtgagaacacaa

SEQ ID NO: 192547 - DNA, 20 bp, synthetic construct
  source 1..20: mol_type = other DNA
ctcgtgtaagtgagaacaca

SEQ ID NO: 192548 - DNA, 20 bp, synthetic construct
  source 1..20: mol_type = other DNA
cctcgtgtaagtgagaacac

SEQ ID NO: 192549 - DNA, 20 bp, synthetic construct
  source 1..20: mol_type = other DNA
gcctcgtgtaagtgagaaca

SEQ ID NO: 192550 - DNA, 20 bp, synthetic construct
  source 1..20: mol_type = other DNA
tgcctcgtgtaagtgagaac

SEQ ID NO: 192551 - DNA, 20 bp, synthetic construct
  source 1..20: mol_type = other DNA
atgcctcgtgtaagtgagaa

SEQ ID NO: 192552 - DNA, 20 bp, synthetic construct
  source 1..20: mol_type = other DNA
gatgcctcgtgtaagtgaga

SEQ ID NO: 192553 - DNA, 20 bp, synthetic construct
  source 1..20: mol_type = other DNA
ggatgcctcgtgtaagtgag

SEQ ID NO: 192554 - DNA, 20 bp, synthetic construct
  source 1..20: mol_type = other DNA
tggatgcctcgtgtaagtga

SEQ ID NO: 192555 - DNA, 20 bp, synthetic construct
  source 1..20: mol_type = other DNA
ctggatgcctcgtgtaagtg

SEQ ID NO: 192556 - DNA, 20 bp, synthetic construct
  source 1..20: mol_type = other DNA
cctggatgcctcgtgtaagt

SEQ ID NO: 192557 - DNA, 20 bp, synthetic construct
  source 1..20: mol_type = other DNA
tcctggatgcctcgtgtaag

SEQ ID NO: 192558 - DNA, 20 bp, synthetic construct
  source 1..20: mol_type = other DNA
gtcctggatgcctcgtgtaa

SEQ ID NO: 192559 - DNA, 20 bp, synthetic construct
  source 1..20: mol_type = other DNA
agtcctggatgcctcgtgta

SEQ ID NO: 192560 - DNA, 20 bp, synthetic construct
  source 1..20: mol_type = other DNA
tagtcctggatgcctcgtgt

SEQ ID NO: 192561 - DNA, 20 bp, synthetic construct
  source 1..20: mol_type = other DNA
gtagtcctggatgcctcgtg

SEQ ID NO: 192562 - DNA, 20 bp, synthetic construct
  source 1..20: mol_type = other DNA
tgtagtcctggatgcctcgt

SEQ ID NO: 192563 - DNA, 20 bp, synthetic construct
  source 1..20: mol_type = other DNA
ctgtagtcctggatgcctcg

SEQ ID NO: 192564 - DNA, 20 bp, synthetic construct
  source 1..20: mol_type = other DNA
tctgtagtcctggatgcctc

SEQ ID NO: 192565 - DNA, 20 bp, synthetic construct
  source 1..20: mol_type = other DNA
atctgtagtcctggatgcct

SEQ ID NO: 192566 - DNA, 20 bp, synthetic construct
  source 1..20: mol_type = other DNA
tatctgtagtcctggatgcc

SEQ ID NO: 192567 - DNA, 20 bp, synthetic construct
  source 1..20: mol_type = other DNA
ttatctgtagtcctggatgc

SEQ ID NO: 192568 - DNA, 20 bp, synthetic construct
  source 1..20: mol_type = other DNA
gttatctgtagtcctggatg

SEQ ID NO: 192569 - DNA, 20 bp, synthetic construct
  source 1..20: mol_type = other DNA
ggttatctgtagtcctggat

SEQ ID NO: 192570 - DNA, 20 bp, synthetic construct
  source 1..20: mol_type = other DNA
tggttatctgtagtcctgga

SEQ ID NO: 192571 - DNA, 20 bp, synthetic construct
  source 1..20: mol_type = other DNA
ctggttatctgtagtcctgg

SEQ ID NO: 192572 - DNA, 20 bp, synthetic construct
  source 1..20: mol_type = other DNA
tctggttatctgtagtcctg

SEQ ID NO: 192573 - DNA, 20 bp, synthetic construct
  source 1..20: mol_type = other DNA
ctctggttatctgtagtcct

SEQ ID NO: 192574 - DNA, 20 bp, synthetic construct
  source 1..20: mol_type = other DNA
cctctggttatctgtagtcc

SEQ ID NO: 192575 - DNA, 20 bp, synthetic construct
  source 1..20: mol_type = other DNA
tcctctggttatctgtagtc

SEQ ID NO: 192576 - DNA, 20 bp, synthetic construct
  source 1..20: mol_type = other DNA
ttcctctggttatctgtagt

SEQ ID NO: 192577 - DNA, 20 bp, synthetic construct
  source 1..20: mol_type = other DNA
cttcctctggttatctgtag

SEQ ID NO: 192578 - DNA, 20 bp, synthetic construct
  source 1..20: mol_type = other DNA
ccttcctctggttatctgta

SEQ ID NO: 192579 - DNA, 20 bp, synthetic construct
  source 1..20: mol_type = other DNA
cccttcctctggttatctgt

SEQ ID NO: 192580 - DNA, 20 bp, synthetic construct
  source 1..20: mol_type = other DNA
ccccttcctctggttatctg

SEQ ID NO: 192581 - DNA, 20 bp, synthetic construct
  source 1..20: mol_type = other DNA
gccccttcctctggttatct

SEQ ID NO: 192582 - DNA, 20 bp, synthetic construct
  source 1..20: mol_type = other DNA
cgccccttcctctggttatc

SEQ ID NO: 192583 - DNA, 20 bp, synthetic construct
  source 1..20: mol_type = other DNA
gcgccccttcctctggttat

SEQ ID NO: 192584 - DNA, 20 bp, synthetic construct
  source 1..20: mol_type = other DNA
ggcgccccttcctctggtta

SEQ ID NO: 192585 - DNA, 20 bp, synthetic construct
  source 1..20: mol_type = other DNA
gggcgccccttcctctggtt

SEQ ID NO: 192586 - DNA, 20 bp, synthetic construct
  source 1..20: mol_type = other DNA
ggggcgccccttcctctggt

SEQ ID NO: 192587 - DNA, 20 bp, synthetic construct
  source 1..20: mol_type = other DNA
gggggcgccccttcctctgg

SEQ ID NO: 192588 - DNA, 20 bp, synthetic construct
  source 1..20: mol_type = other DNA
ggggggcgccccttcctctg

SEQ ID NO: 192589 - DNA, 20 bp, synthetic construct
  source 1..20: mol_type = other DNA
gggggggcgccccttcctct

SEQ ID NO: 192590 - DNA, 20 bp, synthetic construct
  source 1..20: mol_type = other DNA
ggggggggcgccccttcctc

SEQ ID NO: 192591 - DNA, 20 bp, synthetic construct
  source 1..20: mol_type = other DNA
cggggggggcgccccttcct

SEQ ID NO: 192592 - DNA, 20 bp, synthetic construct
  source 1..20: mol_type = other DNA
gcggggggggcgccccttcc

SEQ ID NO: 192593 - DNA, 20 bp, synthetic construct
  source 1..20: mol_type = other DNA
ggcggggggggcgccccttc

SEQ ID NO: 192594 - DNA, 20 bp, synthetic construct
  source 1..20: mol_type = other DNA
aggcggggggggcgcccctt

SEQ ID NO: 192595 - DNA, 20 bp, synthetic construct
  source 1..20: mol_type = other DNA
caggcggggggggcgcccct

SEQ ID NO: 192596 - DNA, 20 bp, synthetic construct
  source 1..20: mol_type = other DNA
gcaggcggggggggcgcccc

SEQ ID NO: 192597 - DNA, 20 bp, synthetic construct
  source 1..20: mol_type = other DNA
ggcaggcggggggggcgccc

SEQ ID NO: 192598 - DNA, 20 bp, synthetic construct
  source 1..20: mol_type = other DNA
gggcaggcggggggggcgcc

SEQ ID NO: 192599 - DNA, 20 bp, synthetic construct
  source 1..20: mol_type = other DNA
agggcaggcggggggggcgc

SEQ ID NO: 192600 - DNA, 20 bp, synthetic construct
  source 1..20: mol_type = other DNA
gagggcaggcggggggggcg

SEQ ID NO: 192601 - DNA, 20 bp, synthetic construct
  source 1..20: mol_type = other DNA
ggagggcaggcggggggggc

SEQ ID NO: 192602 - DNA, 20 bp, synthetic construct
  source 1..20: mol_type = other DNA
aggagggcaggcgggggggg

SEQ ID NO: 192603 - DNA, 20 bp, synthetic construct
  source 1..20: mol_type = other DNA
gaggagggcaggcggggggg

SEQ ID NO: 192604 - DNA, 20 bp, synthetic construct
  source 1..20: mol_type = other DNA
ggaggagggcaggcgggggg

SEQ ID NO: 192605 - DNA, 20 bp, synthetic construct
  source 1..20: mol_type = other DNA
gggaggagggcaggcggggg

SEQ ID NO: 192606 - DNA, 20 bp, synthetic construct
  source 1..20: mol_type = other DNA
agggaggagggcaggcgggg

SEQ ID NO: 192607 - DNA, 20 bp, synthetic construct
  source 1..20: mol_type = other DNA
cagggaggagggcaggcggg

SEQ ID NO: 192608 - DNA, 20 bp, synthetic construct
  source 1..20: mol_type = other DNA
ccagggaggagggcaggcgg

SEQ ID NO: 192609 - DNA, 20 bp, synthetic construct
  source 1..20: mol_type = other DNA
gccagggaggagggcaggcg

SEQ ID NO: 192610 - DNA, 20 bp, synthetic construct
  source 1..20: mol_type = other DNA
tgccagggaggagggcaggc

SEQ ID NO: 192611 - DNA, 20 bp, synthetic construct
  source 1..20: mol_type = other DNA
atgccagggaggagggcagg

SEQ ID NO: 192612 - DNA, 20 bp, synthetic construct
  source 1..20: mol_type = other DNA
gatgccagggaggagggcag

SEQ ID NO: 192613 - DNA, 20 bp, synthetic construct
  source 1..20: mol_type = other DNA
ggatgccagggaggagggca

SEQ ID NO: 192614 - DNA, 20 bp, synthetic construct
  source 1..20: mol_type = other DNA
aggatgccagggaggagggc

SEQ ID NO: 192615 - DNA, 20 bp, synthetic construct
  source 1..20: mol_type = other DNA
gaggatgccagggaggaggg

SEQ ID NO: 192616 - DNA, 20 bp, synthetic construct
  source 1..20: mol_type = other DNA
tgaggatgccagggaggagg

SEQ ID NO: 192617 - DNA, 20 bp, synthetic construct
  source 1..20: mol_type = other DNA
gtgaggatgccagggaggag

SEQ ID NO: 192618 - DNA, 20 bp, synthetic construct
  source 1..20: mol_type = other DNA
cgtgaggatgccagggagga

SEQ ID NO: 192619 - DNA, 20 bp, synthetic construct
  source 1..20: mol_type = other DNA
gcgtgaggatgccagggagg

SEQ ID NO: 192620 - DNA, 20 bp, synthetic construct
  source 1..20: mol_type = other DNA
agcgtgaggatgccagggag

SEQ ID NO: 192621 - DNA, 20 bp, synthetic construct
  source 1..20: mol_type = other DNA
cagcgtgaggatgccaggga

SEQ ID NO: 192622 - DNA, 20 bp, synthetic construct
  source 1..20: mol_type = other DNA
gcagcgtgaggatgccaggg

SEQ ID NO: 192623 - DNA, 20 bp, synthetic construct
  source 1..20: mol_type = other DNA
tgcagcgtgaggatgccagg

SEQ ID NO: 192624 - DNA, 20 bp, synthetic construct
  source 1..20: mol_type = other DNA
ctgcagcgtgaggatgccag

SEQ ID NO: 192625 - DNA, 20 bp, synthetic construct
  source 1..20: mol_type = other DNA
tctgcagcgtgaggatgcca

SEQ ID NO: 192626 - DNA, 20 bp, synthetic construct
  source 1..20: mol_type = other DNA
ctctgcagcgtgaggatgcc

SEQ ID NO: 192627 - DNA, 20 bp, synthetic construct
  source 1..20: mol_type = other DNA
cctctgcagcgtgaggatgc

SEQ ID NO: 192628 - DNA, 20 bp, synthetic construct
  source 1..20: mol_type = other DNA
acctctgcagcgtgaggatg

SEQ ID NO: 192629 - DNA, 20 bp, synthetic construct
  source 1..20: mol_type = other DNA
gacctctgcagcgtgaggat

SEQ ID NO: 192630 - DNA, 20 bp, synthetic construct
  source 1..20: mol_type = other DNA
tgacctctgcagcgtgagga

SEQ ID NO: 192631 - DNA, 20 bp, synthetic construct
  source 1..20: mol_type = other DNA
ctgacctctgcagcgtgagg

SEQ ID NO: 192632 - DNA, 20 bp, synthetic construct
  source 1..20: mol_type = other DNA
tctgacctctgcagcgtgag

SEQ ID NO: 192633 - DNA, 20 bp, synthetic construct
  source 1..20: mol_type = other DNA
ctctgacctctgcagcgtga

SEQ ID NO: 192634 - DNA, 20 bp, synthetic construct
  source 1..20: mol_type = other DNA
gctctgacctctgcagcgtg

SEQ ID NO: 192635 - DNA, 20 bp, synthetic construct
  source 1..20: mol_type = other DNA
ggctctgacctctgcagcgt

SEQ ID NO: 192636 - DNA, 20 bp, synthetic construct
  source 1..20: mol_type = other DNA
aggctctgacctctgcagcg

SEQ ID NO: 192637 - DNA, 20 bp, synthetic construct
  source 1..20: mol_type = other DNA
gaggctctgacctctgcagc

SEQ ID NO: 192638 - DNA, 20 bp, synthetic construct
  source 1..20: mol_type = other DNA
tgaggctctgacctctgcag

SEQ ID NO: 192639 - DNA, 20 bp, synthetic construct
  source 1..20: mol_type = other DNA
atgaggctctgacctctgca

SEQ ID NO: 192640 - DNA, 20 bp, synthetic construct
  source 1..20: mol_type = other DNA
gatgaggctctgacctctgc

SEQ ID NO: 192641 - DNA, 20 bp, synthetic construct
  source 1..20: mol_type = other DNA
ggatgaggctctgacctctg

SEQ ID NO: 192642 - DNA, 20 bp, synthetic construct
  source 1..20: mol_type = other DNA
gggatgaggctctgacctct

SEQ ID NO: 192643 - DNA, 20 bp, synthetic construct
  source 1..20: mol_type = other DNA
tgggatgaggctctgacctc

SEQ ID NO: 192644 - DNA, 20 bp, synthetic construct
  source 1..20: mol_type = other DNA
ctgggatgaggctctgacct

SEQ ID NO: 192645 - DNA, 20 bp, synthetic construct
  source 1..20: mol_type = other DNA
gctgggatgaggctctgacc

SEQ ID NO: 192646 - DNA, 20 bp, synthetic construct
  source 1..20: mol_type = other DNA
ggctgggatgaggctctgac

SEQ ID NO: 192647 - DNA, 20 bp, synthetic construct
  source 1..20: mol_type = other DNA
gggctgggatgaggctctga

SEQ ID NO: 192648 - DNA, 20 bp, synthetic construct
  source 1..20: mol_type = other DNA
ggggctgggatgaggctctg

SEQ ID NO: 192649 - DNA, 20 bp, synthetic construct
  source 1..20: mol_type = other DNA
aggggctgggatgaggctct

SEQ ID NO: 192650 - DNA, 20 bp, synthetic construct
  source 1..20: mol_type = other DNA
aaggggctgggatgaggctc

SEQ ID NO: 192651 - DNA, 20 bp, synthetic construct
  source 1..20: mol_type = other DNA
taaggggctgggatgaggct

SEQ ID NO: 192652 - DNA, 20 bp, synthetic construct
  source 1..20: mol_type = other DNA
gtaaggggctgggatgaggc

SEQ ID NO: 192653 - DNA, 20 bp, synthetic construct
  source 1..20: mol_type = other DNA
ggtaaggggctgggatgagg

SEQ ID NO: 192654 - DNA, 20 bp, synthetic construct
  source 1..20: mol_type = other DNA
aggtaaggggctgggatgag

SEQ ID NO: 192655 - DNA, 20 bp, synthetic construct
  source 1..20: mol_type = other DNA
caggtaaggggctgggatga

SEQ ID NO: 192656 - DNA, 20 bp, synthetic construct
  source 1..20: mol_type = other DNA
gcaggtaaggggctgggatg

SEQ ID NO: 192657 - DNA, 20 bp, synthetic construct
  source 1..20: mol_type = other DNA
ggcaggtaaggggctgggat

SEQ ID NO: 192658 - DNA, 20 bp, synthetic construct
  source 1..20: mol_type = other DNA
gggcaggtaaggggctggga

SEQ ID NO: 192659 - DNA, 20 bp, synthetic construct
  source 1..20: mol_type = other DNA
ggggcaggtaaggggctggg

SEQ ID NO: 192660 - DNA, 20 bp, synthetic construct
  source 1..20: mol_type = other DNA
aggggcaggtaaggggctgg

SEQ ID NO: 192661 - DNA, 20 bp, synthetic construct
  source 1..20: mol_type = other DNA
taggggcaggtaaggggctg

SEQ ID NO: 192662 - DNA, 20 bp, synthetic construct
  source 1..20: mol_type = other DNA
gtaggggcaggtaaggggct

SEQ ID NO: 192663 - DNA, 20 bp, synthetic construct
  source 1..20: mol_type = other DNA
agtaggggcaggtaaggggc

SEQ ID NO: 192664 - DNA, 20 bp, synthetic construct
  source 1..20: mol_type = other DNA
gagtaggggcaggtaagggg

SEQ ID NO: 192665 - DNA, 20 bp, synthetic construct
  source 1..20: mol_type = other DNA
agagtaggggcaggtaaggg

SEQ ID NO: 192666 - DNA, 20 bp, synthetic construct
  source 1..20: mol_type = other DNA
cagagtaggggcaggtaagg

SEQ ID NO: 192667 - DNA, 20 bp, synthetic construct
  source 1..20: mol_type = other DNA
acagagtaggggcaggtaag

SEQ ID NO: 192668 - DNA, 20 bp, synthetic construct
  source 1..20: mol_type = other DNA
cacagagtaggggcaggtaa

SEQ ID NO: 192669 - DNA, 20 bp, synthetic construct
  source 1..20: mol_type = other DNA
ccacagagtaggggcaggta

SEQ ID NO: 192670 - DNA, 20 bp, synthetic construct
  source 1..20: mol_type = other DNA
tccacagagtaggggcaggt

SEQ ID NO: 192671 - DNA, 20 bp, synthetic construct
  source 1..20: mol_type = other DNA
ctccacagagtaggggcagg

SEQ ID NO: 192672 - DNA, 20 bp, synthetic construct
  source 1..20: mol_type = other DNA
tctccacagagtaggggcag

SEQ ID NO: 192673 - DNA, 20 bp, synthetic construct
  source 1..20: mol_type = other DNA
ttctccacagagtaggggca

SEQ ID NO: 192674 - DNA, 20 bp, synthetic construct
  source 1..20: mol_type = other DNA
gttctccacagagtaggggc

SEQ ID NO: 192675 - DNA, 20 bp, synthetic construct
  source 1..20: mol_type = other DNA
ggttctccacagagtagggg

SEQ ID NO: 192676 - DNA, 20 bp, synthetic construct
  source 1..20: mol_type = other DNA
cggttctccacagagtaggg

SEQ ID NO: 192677 - DNA, 20 bp, synthetic construct
  source 1..20: mol_type = other DNA
acggttctccacagagtagg

SEQ ID NO: 192678 - DNA, 20 bp, synthetic construct
  source 1..20: mol_type = other DNA
cacggttctccacagagtag

SEQ ID NO: 192679 - DNA, 20 bp, synthetic construct
  source 1..20: mol_type = other DNA
ccacggttctccacagagta

SEQ ID NO: 192680 - DNA, 20 bp, synthetic construct
  source 1..20: mol_type = other DNA
accacggttctccacagagt

SEQ ID NO: 192681 - DNA, 20 bp, synthetic construct
  source 1..20: mol_type = other DNA
gaccacggttctccacagag

SEQ ID NO: 192682 - DNA, 20 bp, synthetic construct
  source 1..20: mol_type = other DNA
tgaccacggttctccacaga

SEQ ID NO: 192683 - DNA, 20 bp, synthetic construct
  source 1..20: mol_type = other DNA
ctgaccacggttctccacag

SEQ ID NO: 192684 - DNA, 20 bp, synthetic construct
  source 1..20: mol_type = other DNA
actgaccacggttctccaca

SEQ ID NO: 192685 - DNA, 20 bp, synthetic construct
  source 1..20: mol_type = other DNA
aactgaccacggttctccac

SEQ ID NO: 192686 - DNA, 20 bp, synthetic construct
  source 1..20: mol_type = other DNA
gaactgaccacggttctcca

SEQ ID NO: 192687 - DNA, 20 bp, synthetic construct
  source 1..20: mol_type = other DNA
cgaactgaccacggttctcc

SEQ ID NO: 192688 - DNA, 20 bp, synthetic construct
  source 1..20: mol_type = other DNA
gcgaactgaccacggttctc

SEQ ID NO: 192689 - DNA, 20 bp, synthetic construct
  source 1..20: mol_type = other DNA
ggcgaactgaccacggttct

SEQ ID NO: 192690 - DNA, 20 bp, synthetic construct
  source 1..20: mol_type = other DNA
tggcgaactgaccacggttc

SEQ ID NO: 192691 - DNA, 20 bp, synthetic construct
  source 1..20: mol_type = other DNA
ctggcgaactgaccacggtt

SEQ ID NO: 192692 - DNA, 20 bp, synthetic construct
  source 1..20: mol_type = other DNA
cctggcgaactgaccacggt

SEQ ID NO: 192693 - DNA, 20 bp, synthetic construct
  source 1..20: mol_type = other DNA
gcctggcgaactgaccacgg

SEQ ID NO: 192694 - DNA, 20 bp, synthetic construct
  source 1..20: mol_type = other DNA
ggcctggcgaactgaccacg

SEQ ID NO: 192695 - DNA, 20 bp, synthetic construct
  source 1..20: mol_type = other DNA
cggcctggcgaactgaccac

SEQ ID NO: 192696 - DNA, 20 bp, synthetic construct
  source 1..20: mol_type = other DNA
ccggcctggcgaactgacca

SEQ ID NO: 192697 - DNA, 20 bp, synthetic construct
  source 1..20: mol_type = other DNA
tccggcctggcgaactgacc

SEQ ID NO: 192698 - DNA, 20 bp, synthetic construct
  source 1..20: mol_type = other DNA
atccggcctggcgaactgac

SEQ ID NO: 192699 - DNA, 20 bp, synthetic construct
  source 1..20: mol_type = other DNA
gatccggcctggcgaactga

SEQ ID NO: 192700 - DNA, 20 bp, synthetic construct
  source 1..20: mol_type = other DNA
ggatccggcctggcgaactg

SEQ ID NO: 192701 - DNA, 20 bp, synthetic construct
  source 1..20: mol_type = other DNA
tggatccggcctggcgaact

SEQ ID NO: 192702 - DNA, 20 bp, synthetic construct
  source 1..20: mol_type = other DNA
gtggatccggcctggcgaac

SEQ ID NO: 192703 - DNA, 20 bp, synthetic construct
  source 1..20: mol_type = other DNA
cgtggatccggcctggcgaa

SEQ ID NO: 192704 - DNA, 20 bp, synthetic construct
  source 1..20: mol_type = other DNA
tcgtggatccggcctggcga

SEQ ID NO: 192705 - DNA, 20 bp, synthetic construct
  source 1..20: mol_type = other DNA
ttcgtggatccggcctggcg

SEQ ID NO: 192706 - DNA, 20 bp, synthetic construct
  source 1..20: mol_type = other DNA
gttcgtggatccggcctggc

SEQ ID NO: 192707 - DNA, 20 bp, synthetic construct
  source 1..20: mol_type = other DNA
cgttcgtggatccggcctgg

SEQ ID NO: 192708 - DNA, 20 bp, synthetic construct
  source 1..20: mol_type = other DNA
ccgttcgtggatccggcctg

SEQ ID NO: 192709 - DNA, 20 bp, synthetic construct
  source 1..20: mol_type = other DNA
gccgttcgtggatccggcct

SEQ ID NO: 192710 - DNA, 20 bp, synthetic construct
  source 1..20: mol_type = other DNA
ggccgttcgtggatccggcc

SEQ ID NO: 192711 - DNA, 20 bp, synthetic construct
  source 1..20: mol_type = other DNA
aggccgttcgtggatccggc

SEQ ID NO: 192712 - DNA, 20 bp, synthetic construct
  source 1..20: mol_type = other DNA
aaggccgttcgtggatccgg

SEQ ID NO: 192713 - DNA, 20 bp, synthetic construct
  source 1..20: mol_type = other DNA
caaggccgttcgtggatccg

SEQ ID NO: 192714 - DNA, 20 bp, synthetic construct
  source 1..20: mol_type = other DNA
acaaggccgttcgtggatcc

SEQ ID NO: 192715 - DNA, 20 bp, synthetic construct
  source 1..20: mol_type = other DNA
cacaaggccgttcgtggatc

SEQ ID NO: 192716 - DNA, 20 bp, synthetic construct
  source 1..20: mol_type = other DNA
ccacaaggccgttcgtggat

SEQ ID NO: 192717 - DNA, 20 bp, synthetic construct
  source 1..20: mol_type = other DNA
tccacaaggccgttcgtgga

SEQ ID NO: 192718 - DNA, 20 bp, synthetic construct
  source 1..20: mol_type = other DNA
ttccacaaggccgttcgtgg

SEQ ID NO: 192719 - DNA, 20 bp, synthetic construct
  source 1..20: mol_type = other DNA
cttccacaaggccgttcgtg

SEQ ID NO: 192720 - DNA, 20 bp, synthetic construct
  source 1..20: mol_type = other DNA
tcttccacaaggccgttcgt

SEQ ID NO: 192721 - DNA, 20 bp, synthetic construct
  source 1..20: mol_type = other DNA
atcttccacaaggccgttcg

SEQ ID NO: 192722 - DNA, 20 bp, synthetic construct
  source 1..20: mol_type = other DNA
catcttccacaaggccgttc

SEQ ID NO: 192723 - DNA, 20 bp, synthetic construct
  source 1..20: mol_type = other DNA
ccatcttccacaaggccgtt

SEQ ID NO: 192724 - DNA, 20 bp, synthetic construct
  source 1..20: mol_type = other DNA
accatcttccacaaggccgt

SEQ ID NO: 192725 - DNA, 20 bp, synthetic construct
  source 1..20: mol_type = other DNA
caccatcttccacaaggccg

SEQ ID NO: 192726 - DNA, 20 bp, synthetic construct
  source 1..20: mol_type = other DNA
tcaccatcttccacaaggcc

SEQ ID NO: 192727 - DNA, 20 bp, synthetic construct
  source 1..20: mol_type = other DNA
ctcaccatcttccacaaggc

SEQ ID NO: 192728 - DNA, 20 bp, synthetic construct
  source 1..20: mol_type = other DNA
gctcaccatcttccacaagg

SEQ ID NO: 192729 - DNA, 20 bp, synthetic construct
  source 1..20: mol_type = other DNA
agctcaccatcttccacaag

SEQ ID NO: 192730 - DNA, 20 bp, synthetic construct
  source 1..20: mol_type = other DNA
gagctcaccatcttccacaa

SEQ ID NO: 192731 - DNA, 20 bp, synthetic construct
  source 1..20: mol_type = other DNA
tgagctcaccatcttccaca

SEQ ID NO: 192732 - DNA, 20 bp, synthetic construct
  source 1..20: mol_type = other DNA
gtgagctcaccatcttccac

SEQ ID NO: 192733 - DNA, 20 bp, synthetic construct
  source 1..20: mol_type = other DNA
tgtgagctcaccatcttcca

SEQ ID NO: 192734 - DNA, 20 bp, synthetic construct
  source 1..20: mol_type = other DNA
gtgtgagctcaccatcttcc

SEQ ID NO: 192735 - DNA, 20 bp, synthetic construct
  source 1..20: mol_type = other DNA
ggtgtgagctcaccatcttc

SEQ ID NO: 192736 - DNA, 20 bp, synthetic construct
  source 1..20: mol_type = other DNA
gggtgtgagctcaccatctt

SEQ ID NO: 192737 - DNA, 20 bp, synthetic construct
  source 1..20: mol_type = other DNA
tgggtgtgagctcaccatct

SEQ ID NO: 192738 - DNA, 20 bp, synthetic construct
  source 1..20: mol_type = other DNA
ctgggtgtgagctcaccatc

SEQ ID NO: 192739 - DNA, 20 bp, synthetic construct
  source 1..20: mol_type = other DNA
tctgggtgtgagctcaccat

SEQ ID NO: 192740 - DNA, 20 bp, synthetic construct
  source 1..20: mol_type = other DNA
ctctgggtgtgagctcacca

SEQ ID NO: 192741 - DNA, 20 bp, synthetic construct
  source 1..20: mol_type = other DNA
gctctgggtgtgagctcacc

SEQ ID NO: 192742 - DNA, 20 bp, synthetic construct
  source 1..20: mol_type = other DNA
agctctgggtgtgagctcac

SEQ ID NO: 192743 - DNA, 20 bp, synthetic construct
  source 1..20: mol_type = other DNA
cagctctgggtgtgagctca

SEQ ID NO: 192744 - DNA, 20 bp, synthetic construct
  source 1..20: mol_type = other DNA
ccagctctgggtgtgagctc

SEQ ID NO: 192745 - DNA, 20 bp, synthetic construct
  source 1..20: mol_type = other DNA
gccagctctgggtgtgagct

SEQ ID NO: 192746 - DNA, 20 bp, synthetic construct
  source 1..20: mol_type = other DNA
agccagctctgggtgtgagc

SEQ ID NO: 192747 - DNA, 20 bp, synthetic construct
  source 1..20: mol_type = other DNA
gagccagctctgggtgtgag

SEQ ID NO: 192748 - DNA, 20 bp, synthetic construct
  source 1..20: mol_type = other DNA
ggagccagctctgggtgtga

SEQ ID NO: 192749 - DNA, 20 bp, synthetic construct
  source 1..20: mol_type = other DNA
cggagccagctctgggtgtg

SEQ ID NO: 192750 - DNA, 20 bp, synthetic construct
  source 1..20: mol_type = other DNA
tcggagccagctctgggtgt

SEQ ID NO: 192751 - DNA, 20 bp, synthetic construct
  source 1..20: mol_type = other DNA
atcggagccagctctgggtg

SEQ ID NO: 192752 - DNA, 20 bp, synthetic construct
  source 1..20: mol_type = other DNA
catcggagccagctctgggt

SEQ ID NO: 192753 - DNA, 20 bp, synthetic construct
  source 1..20: mol_type = other DNA
tcatcggagccagctctggg

SEQ ID NO: 192754 - DNA, 20 bp, synthetic construct
  source 1..20: mol_type = other DNA
gtcatcggagccagctctgg

SEQ ID NO: 192755 - DNA, 20 bp, synthetic construct
  source 1..20: mol_type = other DNA
ggtcatcggagccagctctg

SEQ ID NO: 192756 - DNA, 20 bp, synthetic construct
  source 1..20: mol_type = other DNA
gggtcatcggagccagctct

SEQ ID NO: 192757 - DNA, 20 bp, synthetic construct
  source 1..20: mol_type = other DNA
agggtcatcggagccagctc

SEQ ID NO: 192758 - DNA, 20 bp, synthetic construct
  source 1..20: mol_type = other DNA
cagggtcatcggagccagct

SEQ ID NO: 192759 - DNA, 20 bp, synthetic construct
  source 1..20: mol_type = other DNA
acagggtcatcggagccagc

SEQ ID NO: 192760 - DNA, 20 bp, synthetic construct
  source 1..20: mol_type = other DNA
gacagggtcatcggagccag

SEQ ID NO: 192761 - DNA, 20 bp, synthetic construct
  source 1..20: mol_type = other DNA
agacagggtcatcggagcca

SEQ ID NO: 192762 - DNA, 20 bp, synthetic construct
  source 1..20: mol_type = other DNA
gagacagggtcatcggagcc

SEQ ID NO: 192763 - DNA, 20 bp, synthetic construct
  source 1..20: mol_type = other DNA
ggagacagggtcatcggagc

SEQ ID NO: 192764 - DNA, 20 bp, synthetic construct
  source 1..20: mol_type = other DNA
aggagacagggtcatcggag

SEQ ID NO: 192765 - DNA, 20 bp, synthetic construct
  source 1..20: mol_type = other DNA
aaggagacagggtcatcgga

SEQ ID NO: 192766 - DNA, 20 bp, synthetic construct
  source 1..20: mol_type = other DNA
aaaggagacagggtcatcgg

SEQ ID NO: 192767 - DNA, 20 bp, synthetic construct
  source 1..20: mol_type = other DNA
taaaggagacagggtcatcg

SEQ ID NO: 192768 - DNA, 20 bp, synthetic construct
  source 1..20: mol_type = other DNA
gtaaaggagacagggtcatc

SEQ ID NO: 192769 - DNA, 20 bp, synthetic construct
  source 1..20: mol_type = other DNA
tgtaaaggagacagggtcat

SEQ ID NO: 192770 - DNA, 20 bp, synthetic construct
  source 1..20: mol_type = other DNA
atgtaaaggagacagggtca

SEQ ID NO: 192771 - DNA, 20 bp, synthetic construct
  source 1..20: mol_type = other DNA
catgtaaaggagacagggtc

SEQ ID NO: 192772 - DNA, 20 bp, synthetic construct
  source 1..20: mol_type = other DNA
acatgtaaaggagacagggt

SEQ ID NO: 192773 - DNA, 20 bp, synthetic construct
  source 1..20: mol_type = other DNA
aacatgtaaaggagacaggg

SEQ ID NO: 192774 - DNA, 20 bp, synthetic construct
  source 1..20: mol_type = other DNA
aaacatgtaaaggagacagg

SEQ ID NO: 192775 - DNA, 20 bp, synthetic construct
  source 1..20: mol_type = other DNA
gaaacatgtaaaggagacag

SEQ ID NO: 192776 - DNA, 20 bp, synthetic construct
  source 1..20: mol_type = other DNA
agaaacatgtaaaggagaca

SEQ ID NO: 192777 - DNA, 20 bp, synthetic construct
  source 1..20: mol_type = other DNA
tagaaacatgtaaaggagac

SEQ ID NO: 192778 - DNA, 20 bp, synthetic construct
  source 1..20: mol_type = other DNA
gtagaaacatgtaaaggaga

SEQ ID NO: 192779 - DNA, 20 bp, synthetic construct
  source 1..20: mol_type = other DNA
ggtagaaacatgtaaaggag

SEQ ID NO: 192780 - DNA, 20 bp, synthetic construct
  source 1..20: mol_type = other DNA
aggtagaaacatgtaaagga

SEQ ID NO: 192781 - DNA, 20 bp, synthetic construct
  source 1..20: mol_type = other DNA
aaggtagaaacatgtaaagg

SEQ ID NO: 192782 - DNA, 20 bp, synthetic construct
  source 1..20: mol_type = other DNA
gaaggtagaaacatgtaaag

SEQ ID NO: 192783 - DNA, 20 bp, synthetic construct
  source 1..20: mol_type = other DNA
ggaaggtagaaacatgtaaa

SEQ ID NO: 192784 - DNA, 20 bp, synthetic construct
  source 1..20: mol_type = other DNA
gggaaggtagaaacatgtaa

SEQ ID NO: 192785 - DNA, 20 bp, synthetic construct
  source 1..20: mol_type = other DNA
ggggaaggtagaaacatgta

SEQ ID NO: 192786 - DNA, 20 bp, synthetic construct
  source 1..20: mol_type = other DNA
aggggaaggtagaaacatgt

SEQ ID NO: 192787 - DNA, 20 bp, synthetic construct
  source 1..20: mol_type = other DNA
gaggggaaggtagaaacatg

SEQ ID NO: 192788 - DNA, 20 bp, synthetic construct
  source 1..20: mol_type = other DNA
ggaggggaaggtagaaacat

SEQ ID NO: 192789 - DNA, 20 bp, synthetic construct
  source 1..20: mol_type = other DNA
gggaggggaaggtagaaaca

SEQ ID NO: 192790 - DNA, 20 bp, synthetic construct
  source 1..20: mol_type = other DNA
agggaggggaaggtagaaac

SEQ ID NO: 192791 - DNA, 20 bp, synthetic construct
  source 1..20: mol_type = other DNA
tagggaggggaaggtagaaa

SEQ ID NO: 192792 - DNA, 20 bp, synthetic construct
  source 1..20: mol_type = other DNA
gtagggaggggaaggtagaa

SEQ ID NO: 192793 - DNA, 20 bp, synthetic construct
  source 1..20: mol_type = other DNA
ggtagggaggggaaggtaga

SEQ ID NO: 192794 - DNA, 20 bp, synthetic construct
  source 1..20: mol_type = other DNA
aggtagggaggggaaggtag

SEQ ID NO: 192795 - DNA, 20 bp, synthetic construct
  source 1..20: mol_type = other DNA
aaggtagggaggggaaggta

SEQ ID NO: 192796 - DNA, 20 bp, synthetic construct
  source 1..20: mol_type = other DNA
gaaggtagggaggggaaggt

SEQ ID NO: 192797 - DNA, 20 bp, synthetic construct
  source 1..20: mol_type = other DNA
ggaaggtagggaggggaagg

SEQ ID NO: 192798 - DNA, 20 bp, synthetic construct
  source 1..20: mol_type = other DNA
gggaaggtagggaggggaag

SEQ ID NO: 192799 - DNA, 20 bp, synthetic construct
  source 1..20: mol_type = other DNA
ggggaaggtagggaggggaa

SEQ ID NO: 192800 - DNA, 20 bp, synthetic construct
  source 1..20: mol_type = other DNA
gggggaaggtagggagggga

SEQ ID NO: 192801 - DNA, 20 bp, synthetic construct
  source 1..20: mol_type = other DNA
tgggggaaggtagggagggg

SEQ ID NO: 192802 - DNA, 20 bp, synthetic construct
  source 1..20: mol_type = other DNA
gtgggggaaggtagggaggg

SEQ ID NO: 192803 - DNA, 20 bp, synthetic construct
  source 1..20: mol_type = other DNA
agtgggggaaggtagggagg

SEQ ID NO: 192804 - DNA, 20 bp, synthetic construct
  source 1..20: mol_type = other DNA
cagtgggggaaggtagggag

SEQ ID NO: 192805 - DNA, 20 bp, synthetic construct
  source 1..20: mol_type = other DNA
gcagtgggggaaggtaggga

SEQ ID NO: 192806 - DNA, 20 bp, synthetic construct
  source 1..20: mol_type = other DNA
agcagtgggggaaggtaggg

SEQ ID NO: 192807 - DNA, 20 bp, synthetic construct
  source 1..20: mol_type = other DNA
cagcagtgggggaaggtagg

SEQ ID NO: 192808 - DNA, 20 bp, synthetic construct
  source 1..20: mol_type = other DNA
ccagcagtgggggaaggtag

SEQ ID NO: 192809 - DNA, 20 bp, synthetic construct
  source 1..20: mol_type = other DNA
cccagcagtgggggaaggta

SEQ ID NO: 192810 - DNA, 20 bp, synthetic construct
  source 1..20: mol_type = other DNA
gcccagcagtgggggaaggt

SEQ ID NO: 192811 - DNA, 20 bp, synthetic construct
  source 1..20: mol_type = other DNA
cgcccagcagtgggggaagg

SEQ ID NO: 192812 - DNA, 20 bp, synthetic construct
  source 1..20: mol_type = other DNA
gcgcccagcagtgggggaag

SEQ ID NO: 192813 - DNA, 20 bp, synthetic construct
  source 1..20: mol_type = other DNA
tgcgcccagcagtgggggaa

SEQ ID NO: 192814 - DNA, 20 bp, synthetic construct
  source 1..20: mol_type = other DNA
ctgcgcccagcagtggggga

SEQ ID NO: 192815 - DNA, 20 bp, synthetic construct
  source 1..20: mol_type = other DNA
tctgcgcccagcagtggggg

SEQ ID NO: 192816 - DNA, 20 bp, synthetic construct
  source 1..20: mol_type = other DNA
ctctgcgcccagcagtgggg

SEQ ID NO: 192817 - DNA, 20 bp, synthetic construct
  source 1..20: mol_type = other DNA
actctgcgcccagcagtggg

SEQ ID NO: 192818 - DNA, 20 bp, synthetic construct
  source 1..20: mol_type = other DNA
cactctgcgcccagcagtgg

SEQ ID NO: 192819 - DNA, 20 bp, synthetic construct
  source 1..20: mol_type = other DNA
ccactctgcgcccagcagtg

SEQ ID NO: 192820 - DNA, 20 bp, synthetic construct
  source 1..20: mol_type = other DNA
tccactctgcgcccagcagt

SEQ ID NO: 192821 - DNA, 20 bp, synthetic construct
  source 1..20: mol_type = other DNA
ctccactctgcgcccagcag

SEQ ID NO: 192822 - DNA, 20 bp, synthetic construct
  source 1..20: mol_type = other DNA
cctccactctgcgcccagca

SEQ ID NO: 192823 - DNA, 20 bp, synthetic construct
  source 1..20: mol_type = other DNA
gcctccactctgcgcccagc

SEQ ID NO: 192824 - DNA, 20 bp, synthetic construct
  source 1..20: mol_type = other DNA
tgcctccactctgcgcccag

SEQ ID NO: 192825 - DNA, 20 bp, synthetic construct
  source 1..20: mol_type = other DNA
ctgcctccactctgcgccca

SEQ ID NO: 192826 - DNA, 20 bp, synthetic construct
  source 1..20: mol_type = other DNA
tctgcctccactctgcgccc

SEQ ID NO: 192827 - DNA, 20 bp, synthetic construct
  source 1..20: mol_type = other DNA
atctgcctccactctgcgcc

SEQ ID NO: 192828 - DNA, 20 bp, synthetic construct
  source 1..20: mol_type = other DNA
catctgcctccactctgcgc

SEQ ID NO: 192829 - DNA, 20 bp, synthetic construct
  source 1..20: mol_type = other DNA
tcatctgcctccactctgcg

SEQ ID NO: 192830 - DNA, 20 bp, synthetic construct
  source 1..20: mol_type = other DNA
ctcatctgcctccactctgc

SEQ ID NO: 192831 - DNA, 20 bp, synthetic construct
  source 1..20: mol_type = other DNA
cctcatctgcctccactctg

SEQ ID NO: 192832 - DNA, 20 bp, synthetic construct
  source 1..20: mol_type = other DNA
acctcatctgcctccactct

SEQ ID NO: 192833 - DNA, 20 bp, synthetic construct
  source 1..20: mol_type = other DNA
aacctcatctgcctccactc

SEQ ID NO: 192834 - DNA, 20 bp, synthetic construct
  source 1..20: mol_type = other DNA
aaacctcatctgcctccact

SEQ ID NO: 192835 - DNA, 20 bp, synthetic construct
  source 1..20: mol_type = other DNA
taaacctcatctgcctccac

SEQ ID NO: 192836 - DNA, 20 bp, synthetic construct
  source 1..20: mol_type = other DNA
ttaaacctcatctgcctcca

SEQ ID NO: 192837 - DNA, 20 bp, synthetic construct
  source 1..20: mol_type = other DNA
tttaaacctcatctgcctcc

SEQ ID NO: 192838 - DNA, 20 bp, synthetic construct
  source 1..20: mol_type = other DNA
ctttaaacctcatctgcctc

SEQ ID NO: 192839 - DNA, 20 bp, synthetic construct
  source 1..20: mol_type = other DNA
gctttaaacctcatctgcct

SEQ ID NO: 192840 - DNA, 20 bp, synthetic construct
  source 1..20: mol_type = other DNA
agctttaaacctcatctgcc

SEQ ID NO: 192841 - DNA, 20 bp, synthetic construct
  source 1..20: mol_type = other DNA
gagctttaaacctcatctgc

SEQ ID NO: 192842 - DNA, 20 bp, synthetic construct
  source 1..20: mol_type = other DNA
tgagctttaaacctcatctg

SEQ ID NO: 192843 - DNA, 20 bp, synthetic construct
  source 1..20: mol_type = other DNA
ctgagctttaaacctcatct

SEQ ID NO: 192844 - DNA, 20 bp, synthetic construct
  source 1..20: mol_type = other DNA
tctgagctttaaacctcatc

SEQ ID NO: 192845 - DNA, 20 bp, synthetic construct
  source 1..20: mol_type = other DNA
ttctgagctttaaacctcat

SEQ ID NO: 192846 - DNA, 20 bp, synthetic construct
  source 1..20: mol_type = other DNA
cttctgagctttaaacctca

SEQ ID NO: 192847 - DNA, 20 bp, synthetic construct
  source 1..20: mol_type = other DNA
ccttctgagctttaaacctc

SEQ ID NO: 192848 - DNA, 20 bp, synthetic construct
  source 1..20: mol_type = other DNA
cccttctgagctttaaacct

SEQ ID NO: 192849 - DNA, 20 bp, synthetic construct
  source 1..20: mol_type = other DNA
gcccttctgagctttaaacc

SEQ ID NO: 192850 - DNA, 20 bp, synthetic construct
  source 1..20: mol_type = other DNA
agcccttctgagctttaaac

SEQ ID NO: 192851 - DNA, 20 bp, synthetic construct
  source 1..20: mol_type = other DNA
aagcccttctgagctttaaa

SEQ ID NO: 192852 - DNA, 20 bp, synthetic construct
  source 1..20: mol_type = other DNA
taagcccttctgagctttaa

SEQ ID NO: 192853 - DNA, 20 bp, synthetic construct
  source 1..20: mol_type = other DNA
ttaagcccttctgagcttta

SEQ ID NO: 192854 - DNA, 20 bp, synthetic construct
  source 1..20: mol_type = other DNA
tttaagcccttctgagcttt

SEQ ID NO: 192855 - DNA, 20 bp, synthetic construct
  source 1..20: mol_type = other DNA
gtttaagcccttctgagctt

SEQ ID NO: 192856 - DNA, 20 bp, synthetic construct
  source 1..20: mol_type = other DNA
cgtttaagcccttctgagct

SEQ ID NO: 192857 - DNA, 20 bp, synthetic construct
  source 1..20: mol_type = other DNA
ccgtttaagcccttctgagc

SEQ ID NO: 192858 - DNA, 20 bp, synthetic construct
  source 1..20: mol_type = other DNA
cccgtttaagcccttctgag

SEQ ID NO: 192859 - DNA, 20 bp, synthetic construct
  source 1..20: mol_type = other DNA
acccgtttaagcccttctga

SEQ ID NO: 192860 - DNA, 20 bp, synthetic construct
  source 1..20: mol_type = other DNA
aacccgtttaagcccttctg

SEQ ID NO: 192861 - DNA, 20 bp, synthetic construct
  source 1..20: mol_type = other DNA
caacccgtttaagcccttct

SEQ ID NO: 192862 - DNA, 20 bp, synthetic construct
  source 1..20: mol_type = other DNA
ccaacccgtttaagcccttc

SEQ ID NO: 192863 - DNA, 20 bp, synthetic construct
  source 1..20: mol_type = other DNA
cccaacccgtttaagccctt

SEQ ID NO: 192864 - DNA, 20 bp, synthetic construct
  source 1..20: mol_type = other DNA
ccccaacccgtttaagccct

SEQ ID NO: 192865 - DNA, 20 bp, synthetic construct
  source 1..20: mol_type = other DNA
gccccaacccgtttaagccc

SEQ ID NO: 192866 - DNA, 20 bp, synthetic construct
  source 1..20: mol_type = other DNA
cgccccaacccgtttaagcc

SEQ ID NO: 192867 - DNA, 20 bp, synthetic construct
  source 1..20: mol_type = other DNA
gcgccccaacccgtttaagc

SEQ ID NO: 192868 - DNA, 20 bp, synthetic construct
  source 1..20: mol_type = other DNA
tgcgccccaacccgtttaag

SEQ ID NO: 192869 - DNA, 20 bp, synthetic construct
  source 1..20: mol_type = other DNA
ctgcgccccaacccgtttaa

SEQ ID NO: 192870 - DNA, 20 bp, synthetic construct
  source 1..20: mol_type = other DNA
actgcgccccaacccgttta

SEQ ID NO: 192871 - DNA, 20 bp, synthetic construct
  source 1..20: mol_type = other DNA
cactgcgccccaacccgttt

SEQ ID NO: 192872 - DNA, 20 bp, synthetic construct
  source 1..20: mol_type = other DNA
ccactgcgccccaacccgtt

SEQ ID NO: 192873 - DNA, 20 bp, synthetic construct
  source 1..20: mol_type = other DNA
gccactgcgccccaacccgt

SEQ ID NO: 192874 - DNA, 20 bp, synthetic construct
  source 1..20: mol_type = other DNA
agccactgcgccccaacccg

SEQ ID NO: 192875 - DNA, 20 bp, synthetic construct
  source 1..20: mol_type = other DNA
gagccactgcgccccaaccc

SEQ ID NO: 192876 - DNA, 20 bp, synthetic construct
  source 1..20: mol_type = other DNA
tgagccactgcgccccaacc

SEQ ID NO: 192877 - DNA, 20 bp, synthetic construct
  source 1..20: mol_type = other DNA
atgagccactgcgccccaac

SEQ ID NO: 192878 - DNA, 20 bp, synthetic construct
  source 1..20: mol_type = other DNA
catgagccactgcgccccaa

SEQ ID NO: 192879 - DNA, 20 bp, synthetic construct
  source 1..20: mol_type = other DNA
gcatgagccactgcgcccca

SEQ ID NO: 192880 - DNA, 20 bp, synthetic construct
  source 1..20: mol_type = other DNA
ggcatgagccactgcgcccc

SEQ ID NO: 192881 - DNA, 20 bp, synthetic construct
  source 1..20: mol_type = other DNA
aggcatgagccactgcgccc

SEQ ID NO: 192882 - DNA, 20 bp, synthetic construct
  source 1..20: mol_type = other DNA
caggcatgagccactgcgcc

SEQ ID NO: 192883 - DNA, 20 bp, synthetic construct
  source 1..20: mol_type = other DNA
acaggcatgagccactgcgc

SEQ ID NO: 192884 - DNA, 20 bp, synthetic construct
  source 1..20: mol_type = other DNA
tacaggcatgagccactgcg

SEQ ID NO: 192885 - DNA, 20 bp, synthetic construct
  source 1..20: mol_type = other DNA
ttacaggcatgagccactgc

SEQ ID NO: 192886 - DNA, 20 bp, synthetic construct
  source 1..20: mol_type = other DNA
attacaggcatgagccactg

SEQ ID NO: 192887 - DNA, 20 bp, synthetic construct
  source 1..20: mol_type = other DNA
gattacaggcatgagccact

SEQ ID NO: 192888 - DNA, 20 bp, synthetic construct
  source 1..20: mol_type = other DNA
ggattacaggcatgagccac

SEQ ID NO: 192889 - DNA, 20 bp, synthetic construct
  source 1..20: mol_type = other DNA
gggattacaggcatgagcca

SEQ ID NO: 192890 - DNA, 20 bp, synthetic construct
  source 1..20: mol_type = other DNA
cgggattacaggcatgagcc

SEQ ID NO: 192891 - DNA, 20 bp, synthetic construct
  source 1..20: mol_type = other DNA
ccgggattacaggcatgagc

SEQ ID NO: 192892 - DNA, 20 bp, synthetic construct
  source 1..20: mol_type = other DNA
gccgggattacaggcatgag

SEQ ID NO: 192893 - DNA, 20 bp, synthetic construct
  source 1..20: mol_type = other DNA
tgccgggattacaggcatga

SEQ ID NO: 192894 - DNA, 20 bp, synthetic construct
  source 1..20: mol_type = other DNA
gtgccgggattacaggcatg

SEQ ID NO: 192895 - DNA, 20 bp, synthetic construct
  source 1..20: mol_type = other DNA
agtgccgggattacaggcat

SEQ ID NO: 192896 - DNA, 20 bp, synthetic construct
  source 1..20: mol_type = other DNA
aagtgccgggattacaggca

SEQ ID NO: 192897 - DNA, 20 bp, synthetic construct
  source 1..20: mol_type = other DNA
aaagtgccgggattacaggc

SEQ ID NO: 192898 - DNA, 20 bp, synthetic construct
  source 1..20: mol_type = other DNA
caaagtgccgggattacagg

SEQ ID NO: 192899 - DNA, 20 bp, synthetic construct
  source 1..20: mol_type = other DNA
ccaaagtgccgggattacag

SEQ ID NO: 192900 - DNA, 20 bp, synthetic construct
  source 1..20: mol_type = other DNA
cccaaagtgccgggattaca

SEQ ID NO: 192901 - DNA, 20 bp, synthetic construct
  source 1..20: mol_type = other DNA
tcccaaagtgccgggattac

SEQ ID NO: 192902 - DNA, 20 bp, synthetic construct
  source 1..20: mol_type = other DNA
ctcccaaagtgccgggatta

SEQ ID NO: 192903 - DNA, 20 bp, synthetic construct
  source 1..20: mol_type = other DNA
cctcccaaagtgccgggatt

SEQ ID NO: 192904 - DNA, 20 bp, synthetic construct
  source 1..20: mol_type = other DNA
gcctcccaaagtgccgggat

SEQ ID NO: 192905 - DNA, 20 bp, synthetic construct
  source 1..20: mol_type = other DNA
ggcctcccaaagtgccggga

SEQ ID NO: 192906 - DNA, 20 bp, synthetic construct
  source 1..20: mol_type = other DNA
tggcctcccaaagtgccggg

SEQ ID NO: 192907 - DNA, 20 bp, synthetic construct
  source 1..20: mol_type = other DNA
ttggcctcccaaagtgccgg

SEQ ID NO: 192908 - DNA, 20 bp, synthetic construct
  source 1..20: mol_type = other DNA
cttggcctcccaaagtgccg

SEQ ID NO: 192909 - DNA, 20 bp, synthetic construct
  source 1..20: mol_type = other DNA
ccttggcctcccaaagtgcc

SEQ ID NO: 192910 - DNA, 20 bp, synthetic construct
  source 1..20: mol_type = other DNA
gccttggcctcccaaagtgc

SEQ ID NO: 192911 - DNA, 20 bp, synthetic construct
  source 1..20: mol_type = other DNA
tgccttggcctcccaaagtg

SEQ ID NO: 192912 - DNA, 20 bp, synthetic construct
  source 1..20: mol_type = other DNA
ctgccttggcctcccaaagt

SEQ ID NO: 192913 - DNA, 20 bp, synthetic construct
  source 1..20: mol_type = other DNA
tctgccttggcctcccaaag

SEQ ID NO: 192914 - DNA, 20 bp, synthetic construct
  source 1..20: mol_type = other DNA
ctctgccttggcctcccaaa

SEQ ID NO: 192915 - DNA, 20 bp, synthetic construct
  source 1..20: mol_type = other DNA
cctctgccttggcctcccaa

SEQ ID NO: 192916 - DNA, 20 bp, synthetic construct
  source 1..20: mol_type = other DNA
tcctctgccttggcctccca

SEQ ID NO: 192917 - DNA, 20 bp, synthetic construct
  source 1..20: mol_type = other DNA
atcctctgccttggcctccc

SEQ ID NO: 192918 - DNA, 20 bp, synthetic construct
  source 1..20: mol_type = other DNA
gatcctctgccttggcctcc

SEQ ID NO: 192919 - DNA, 20 bp, synthetic construct
  source 1..20: mol_type = other DNA
tgatcctctgccttggcctc

SEQ ID NO: 192920 - DNA, 20 bp, synthetic construct
  source 1..20: mol_type = other DNA
gtgatcctctgccttggcct

SEQ ID NO: 192921 - DNA, 20 bp, synthetic construct
  source 1..20: mol_type = other DNA
agtgatcctctgccttggcc

SEQ ID NO: 192922 - DNA, 20 bp, synthetic construct
  source 1..20: mol_type = other DNA
aagtgatcctctgccttggc

SEQ ID NO: 192923 - DNA, 20 bp, synthetic construct
  source 1..20: mol_type = other DNA
caagtgatcctctgccttgg

SEQ ID NO: 192924 - DNA, 20 bp, synthetic construct
  source 1..20: mol_type = other DNA
tcaagtgatcctctgccttg

SEQ ID NO: 192925 - DNA, 20 bp, synthetic construct
  source 1..20: mol_type = other DNA
ctcaagtgatcctctgcctt

SEQ ID NO: 192926 - DNA, 20 bp, synthetic construct
  source 1..20: mol_type = other DNA
gctcaagtgatcctctgcct

SEQ ID NO: 192927 - DNA, 20 bp, synthetic construct
  source 1..20: mol_type = other DNA
ggctcaagtgatcctctgcc

SEQ ID NO: 192928 - DNA, 20 bp, synthetic construct
  source 1..20: mol_type = other DNA
gggctcaagtgatcctctgc

SEQ ID NO: 192929 - DNA, 20 bp, synthetic construct
  source 1..20: mol_type = other DNA
tgggctcaagtgatcctctg

SEQ ID NO: 192930 - DNA, 20 bp, synthetic construct
  source 1..20: mol_type = other DNA
ctgggctcaagtgatcctct

SEQ ID NO: 192931 - DNA, 20 bp, synthetic construct
  source 1..20: mol_type = other DNA
cctgggctcaagtgatcctc

SEQ ID NO: 192932 - DNA, 20 bp, synthetic construct
  source 1..20: mol_type = other DNA
tcctgggctcaagtgatcct

SEQ ID NO: 192933 - DNA, 20 bp, synthetic construct
  source 1..20: mol_type = other DNA
ctcctgggctcaagtgatcc

SEQ ID NO: 192934 - DNA, 20 bp, synthetic construct
  source 1..20: mol_type = other DNA
actcctgggctcaagtgatc

SEQ ID NO: 192935 - DNA, 20 bp, synthetic construct
  source 1..20: mol_type = other DNA
aactcctgggctcaagtgat

SEQ ID NO: 192936 - DNA, 20 bp, synthetic construct
  source 1..20: mol_type = other DNA
gaactcctgggctcaagtga

SEQ ID NO: 192937 - DNA, 20 bp, synthetic construct
  source 1..20: mol_type = other DNA
cgaactcctgggctcaagtg

SEQ ID NO: 192938 - DNA, 20 bp, synthetic construct
  source 1..20: mol_type = other DNA
tcgaactcctgggctcaagt

SEQ ID NO: 192939 - DNA, 20 bp, synthetic construct
  source 1..20: mol_type = other DNA
ctcgaactcctgggctcaag

SEQ ID NO: 192940 - DNA, 20 bp, synthetic construct
  source 1..20: mol_type = other DNA
tctcgaactcctgggctcaa

SEQ ID NO: 192941 - DNA, 20 bp, synthetic construct
  source 1..20: mol_type = other DNA
gtctcgaactcctgggctca

SEQ ID NO: 192942 - DNA, 20 bp, synthetic construct
  source 1..20: mol_type = other DNA
ggtctcgaactcctgggctc

SEQ ID NO: 192943 - DNA, 20 bp, synthetic construct
  source 1..20: mol_type = other DNA
tggtctcgaactcctgggct

SEQ ID NO: 192944 - DNA, 20 bp, synthetic construct
  source 1..20: mol_type = other DNA
ttggtctcgaactcctgggc

SEQ ID NO: 192945 - DNA, 20 bp, synthetic construct
  source 1..20: mol_type = other DNA
gttggtctcgaactcctggg

SEQ ID NO: 192946 - DNA, 20 bp, synthetic construct
  source 1..20: mol_type = other DNA
ggttggtctcgaactcctgg

SEQ ID NO: 192947 - DNA, 20 bp, synthetic construct
  source 1..20: mol_type = other DNA
aggttggtctcgaactcctg

SEQ ID NO: 192948 - DNA, 20 bp, synthetic construct
  source 1..20: mol_type = other DNA
caggttggtctcgaactcct

SEQ ID NO: 192949 - DNA, 20 bp, synthetic construct
  source 1..20: mol_type = other DNA
tcaggttggtctcgaactcc

SEQ ID NO: 192950 - DNA, 20 bp, synthetic construct
  source 1..20: mol_type = other DNA
ctcaggttggtctcgaactc

SEQ ID NO: 192951 - DNA, 20 bp, synthetic construct
  source 1..20: mol_type = other DNA
gctcaggttggtctcgaact

SEQ ID NO: 192952 - DNA, 20 bp, synthetic construct
  source 1..20: mol_type = other DNA
tgctcaggttggtctcgaac

SEQ ID NO: 192953 - DNA, 20 bp, synthetic construct
  source 1..20: mol_type = other DNA
ttgctcaggttggtctcgaa

SEQ ID NO: 192954 - DNA, 20 bp, synthetic construct
  source 1..20: mol_type = other DNA
gttgctcaggttggtctcga

SEQ ID NO: 192955 - DNA, 20 bp, synthetic construct
  source 1..20: mol_type = other DNA
tgttgctcaggttggtctcg

SEQ ID NO: 192956 - DNA, 20 bp, synthetic construct
  source 1..20: mol_type = other DNA
atgttgctcaggttggtctc

SEQ ID NO: 192957 - DNA, 20 bp, synthetic construct
  source 1..20: mol_type = other DNA
tatgttgctcaggttggtct

SEQ ID NO: 192958 - DNA, 20 bp, synthetic construct
  source 1..20: mol_type = other DNA
ctatgttgctcaggttggtc

SEQ ID NO: 192959 - DNA, 20 bp, synthetic construct
  source 1..20: mol_type = other DNA
actatgttgctcaggttggt

SEQ ID NO: 192960 - DNA, 20 bp, synthetic construct
  source 1..20: mol_type = other DNA
cactatgttgctcaggttgg

SEQ ID NO: 192961 - DNA, 20 bp, synthetic construct
  source 1..20: mol_type = other DNA
tcactatgttgctcaggttg

SEQ ID NO: 192962 - DNA, 20 bp, synthetic construct
  source 1..20: mol_type = other DNA
ctcactatgttgctcaggtt

SEQ ID NO: 192963 - DNA, 20 bp, synthetic construct
  source 1..20: mol_type = other DNA
tctcactatgttgctcaggt

SEQ ID NO: 192964 - DNA, 20 bp, synthetic construct
  source 1..20: mol_type = other DNA
gtctcactatgttgctcagg

SEQ ID NO: 192965 - DNA, 20 bp, synthetic construct
  source 1..20: mol_type = other DNA
ggtctcactatgttgctcag

SEQ ID NO: 192966 - DNA, 20 bp, synthetic construct
  source 1..20: mol_type = other DNA
cggtctcactatgttgctca

SEQ ID NO: 192967 - DNA, 20 bp, synthetic construct
  source 1..20: mol_type = other DNA
gcggtctcactatgttgctc

SEQ ID NO: 192968 - DNA, 20 bp, synthetic construct
  source 1..20: mol_type = other DNA
cgcggtctcactatgttgct

SEQ ID NO: 192969 - DNA, 20 bp, synthetic construct
  source 1..20: mol_type = other DNA
acgcggtctcactatgttgc

SEQ ID NO: 192970 - DNA, 20 bp, synthetic construct
  source 1..20: mol_type = other DNA
gacgcggtctcactatgttg

SEQ ID NO: 192971 - DNA, 20 bp, synthetic construct
  source 1..20: mol_type = other DNA
agacgcggtctcactatgtt

SEQ ID NO: 192972 - DNA, 20 bp, synthetic construct
  source 1..20: mol_type = other DNA
gagacgcggtctcactatgt

SEQ ID NO: 192973 - DNA, 20 bp, synthetic construct
  source 1..20: mol_type = other DNA
agagacgcggtctcactatg

SEQ ID NO: 192974 - DNA, 20 bp, synthetic construct
  source 1..20: mol_type = other DNA
tagagacgcggtctcactat

SEQ ID NO: 192975 - DNA, 20 bp, synthetic construct
  source 1..20: mol_type = other DNA
gtagagacgcggtctcacta

SEQ ID NO: 192976 - DNA, 20 bp, synthetic construct
  source 1..20: mol_type = other DNA
tgtagagacgcggtctcact

SEQ ID NO: 192977 - DNA, 20 bp, synthetic construct
  source 1..20: mol_type = other DNA
ttgtagagacgcggtctcac

SEQ ID NO: 192978 - DNA, 20 bp, synthetic construct
  source 1..20: mol_type = other DNA
tttgtagagacgcggtctca

SEQ ID NO: 192979 - DNA, 20 bp, synthetic construct
  source 1..20: mol_type = other DNA
ttttgtagagacgcggtctc

SEQ ID NO: 192980 - DNA, 20 bp, synthetic construct
  source 1..20: mol_type = other DNA
tttttgtagagacgcggtct

SEQ ID NO: 192981 - DNA, 20 bp, synthetic construct
  source 1..20: mol_type = other DNA
ttttttgtagagacgcggtc

SEQ ID NO: 192982 - DNA, 20 bp, synthetic construct
  source 1..20: mol_type = other DNA
attttttgtagagacgcggt

SEQ ID NO: 192983 - DNA, 20 bp, synthetic construct
  source 1..20: mol_type = other DNA
tattttttgtagagacgcgg

SEQ ID NO: 192984 - DNA, 20 bp, synthetic construct
  source 1..20: mol_type = other DNA
ttattttttgtagagacgcg

SEQ ID NO: 192985 - DNA, 20 bp, synthetic construct
  source 1..20: mol_type = other DNA
tttattttttgtagagacgc

SEQ ID NO: 192986 - DNA, 20 bp, synthetic construct
  source 1..20: mol_type = other DNA
ttttattttttgtagagacg

SEQ ID NO: 192987 - DNA, 20 bp, synthetic construct
  source 1..20: mol_type = other DNA
attttattttttgtagagac

SEQ ID NO: 192988 - DNA, 20 bp, synthetic construct
  source 1..20: mol_type = other DNA
tattttattttttgtagaga

SEQ ID NO: 192989 - DNA, 20 bp, synthetic construct
  source 1..20: mol_type = other DNA
ttattttattttttgtagag

SEQ ID NO: 192990 - DNA, 20 bp, synthetic construct
  source 1..20: mol_type = other DNA
tttattttattttttgtaga

SEQ ID NO: 192991 - DNA, 20 bp, synthetic construct
  source 1..20: mol_type = other DNA
atttattttattttttgtag

SEQ ID NO: 192992 - DNA, 20 bp, synthetic construct
  source 1..20: mol_type = other DNA
tatttattttattttttgta

SEQ ID NO: 192993 - DNA, 20 bp, synthetic construct
  source 1..20: mol_type = other DNA
ttatttattttattttttgt

SEQ ID NO: 192994 - DNA, 20 bp, synthetic construct
  source 1..20: mol_type = other DNA
tttatttattttattttttg

SEQ ID NO: 192995 - DNA, 20 bp, synthetic construct
  source 1..20: mol_type = other DNA
ttttatttattttatttttt

SEQ ID NO: 192996 - DNA, 20 bp, synthetic construct
  source 1..20: mol_type = other DNA
attttatttattttattttt

SEQ ID NO: 192997 - DNA, 20 bp, synthetic construct
  source 1..20: mol_type = other DNA
aattttatttattttatttt

SEQ ID NO: 192998 - DNA, 20 bp, synthetic construct
  source 1..20: mol_type = other DNA
taattttatttattttattt

SEQ ID NO: 192999 - DNA, 20 bp, synthetic construct
  source 1..20: mol_type = other DNA
ctaattttatttattttatt

SEQ ID NO: 193000 - DNA, 20 bp, synthetic construct
  source 1..20: mol_type = other DNA
gctaattttatttattttat

SEQ ID NO: 193001 - DNA, 20 bp, synthetic construct
  source 1..20: mol_type = other DNA
agctaattttatttatttta

SEQ ID NO: 193002 - DNA, 20 bp, synthetic construct
  source 1..20: mol_type = other DNA
aagctaattttatttatttt

SEQ ID NO: 193003 - DNA, 20 bp, synthetic construct
  source 1..20: mol_type = other DNA
aaagctaattttatttattt

SEQ ID NO: 193004 - DNA, 20 bp, synthetic construct
  source 1..20: mol_type = other DNA
caaagctaattttatttatt

SEQ ID NO: 193005 - DNA, 20 bp, synthetic construct
  source 1..20: mol_type = other DNA
gcaaagctaattttatttat

SEQ ID NO: 193006 - DNA, 20 bp, synthetic construct
  source 1..20: mol_type = other DNA
tgcaaagctaattttattta

SEQ ID NO: 193007 - DNA, 20 bp, synthetic construct
  source 1..20: mol_type = other DNA
ctgcaaagctaattttattt

SEQ ID NO: 193008 - DNA, 20 bp, synthetic construct
  source 1..20: mol_type = other DNA
cctgcaaagctaattttatt

SEQ ID NO: 193009 - DNA, 20 bp, synthetic construct
  source 1..20: mol_type = other DNA
ccctgcaaagctaattttat

SEQ ID NO: 193010 - DNA, 20 bp, synthetic construct
  source 1..20: mol_type = other DNA
accctgcaaagctaatttta

SEQ ID NO: 193011 - DNA, 20 bp, synthetic construct
  source 1..20: mol_type = other DNA
caccctgcaaagctaatttt

SEQ ID NO: 193012 - DNA, 20 bp, synthetic construct
  source 1..20: mol_type = other DNA
ccaccctgcaaagctaattt

SEQ ID NO: 193013 - DNA, 20 bp, synthetic construct
  source 1..20: mol_type = other DNA
gccaccctgcaaagctaatt

SEQ ID NO: 193014 - DNA, 20 bp, synthetic construct
  source 1..20: mol_type = other DNA
tgccaccctgcaaagctaat

SEQ ID NO: 193015 - DNA, 20 bp, synthetic construct
  source 1..20: mol_type = other DNA
atgccaccctgcaaagctaa

SEQ ID NO: 193016 - DNA, 20 bp, synthetic construct
  source 1..20: mol_type = other DNA
catgccaccctgcaaagcta

SEQ ID NO: 193017 - DNA, 20 bp, synthetic construct
  source 1..20: mol_type = other DNA
gcatgccaccctgcaaagct

SEQ ID NO: 193018 - DNA, 20 bp, synthetic construct
  source 1..20: mol_type = other DNA
tgcatgccaccctgcaaagc

SEQ ID NO: 193019 - DNA, 20 bp, synthetic construct
  source 1..20: mol_type = other DNA
gtgcatgccaccctgcaaag

SEQ ID NO: 193020 - DNA, 20 bp, synthetic construct
  source 1..20: mol_type = other DNA
ggtgcatgccaccctgcaaa

SEQ ID NO: 193021 - DNA, 20 bp, synthetic construct
  source 1..20: mol_type = other DNA
aggtgcatgccaccctgcaa

SEQ ID NO: 193022 - DNA, 20 bp, synthetic construct
  source 1..20: mol_type = other DNA
caggtgcatgccaccctgca

SEQ ID NO: 193023 - DNA, 20 bp, synthetic construct
  source 1..20: mol_type = other DNA
gcaggtgcatgccaccctgc

SEQ ID NO: 193024 - DNA, 20 bp, synthetic construct
  source 1..20: mol_type = other DNA
tgcaggtgcatgccaccctg

SEQ ID NO: 193025 - DNA, 20 bp, synthetic construct
  source 1..20: mol_type = other DNA
ctgcaggtgcatgccaccct

SEQ ID NO: 193026 - DNA, 20 bp, synthetic construct
  source 1..20: mol_type = other DNA
actgcaggtgcatgccaccc

SEQ ID NO: 193027 - DNA, 20 bp, synthetic construct
  source 1..20: mol_type = other DNA
gactgcaggtgcatgccacc

SEQ ID NO: 193028 - DNA, 20 bp, synthetic construct
  source 1..20: mol_type = other DNA
ggactgcaggtgcatgccac

SEQ ID NO: 193029 - DNA, 20 bp, synthetic construct
  source 1..20: mol_type = other DNA
gggactgcaggtgcatgcca

SEQ ID NO: 193030 - DNA, 20 bp, synthetic construct
  source 1..20: mol_type = other DNA
agggactgcaggtgcatgcc

SEQ ID NO: 193031 - DNA, 20 bp, synthetic construct
  source 1..20: mol_type = other DNA
cagggactgcaggtgcatgc

SEQ ID NO: 193032 - DNA, 20 bp, synthetic construct
  source 1..20: mol_type = other DNA
gcagggactgcaggtgcatg

SEQ ID NO: 193033 - DNA, 20 bp, synthetic construct
  source 1..20: mol_type = other DNA
agcagggactgcaggtgcat

SEQ ID NO: 193034 - DNA, 20 bp, synthetic construct
  source 1..20: mol_type = other DNA
tagcagggactgcaggtgca

SEQ ID NO: 193035 - DNA, 20 bp, synthetic construct
  source 1..20: mol_type = other DNA
gtagcagggactgcaggtgc

SEQ ID NO: 193036 - DNA, 20 bp, synthetic construct
  source 1..20: mol_type = other DNA
agtagcagggactgcaggtg

SEQ ID NO: 193037 - DNA, 20 bp, synthetic construct
  source 1..20: mol_type = other DNA
gagtagcagggactgcaggt

SEQ ID NO: 193038 - DNA, 20 bp, synthetic construct
  source 1..20: mol_type = other DNA
tgagtagcagggactgcagg

SEQ ID NO: 193039 - DNA, 20 bp, synthetic construct
  source 1..20: mol_type = other DNA
ctgagtagcagggactgcag

SEQ ID NO: 193040 - DNA, 20 bp, synthetic construct
  source 1..20: mol_type = other DNA
tctgagtagcagggactgca

SEQ ID NO: 193041 - DNA, 20 bp, synthetic construct
  source 1..20: mol_type = other DNA
ttctgagtagcagggactgc

SEQ ID NO: 193042 - DNA, 20 bp, synthetic construct
  source 1..20: mol_type = other DNA
cttctgagtagcagggactg

SEQ ID NO: 193043 - DNA, 20 bp, synthetic construct
  source 1..20: mol_type = other DNA
ccttctgagtagcagggact

SEQ ID NO: 193044 - DNA, 20 bp, synthetic construct
  source 1..20: mol_type = other DNA
gccttctgagtagcagggac

SEQ ID NO: 193045 - DNA, 20 bp, synthetic construct
  source 1..20: mol_type = other DNA
agccttctgagtagcaggga

SEQ ID NO: 193046 - DNA, 20 bp, synthetic construct
  source 1..20: mol_type = other DNA
cagccttctgagtagcaggg

SEQ ID NO: 193047 - DNA, 20 bp, synthetic construct
  source 1..20: mol_type = other DNA
tcagccttctgagtagcagg

SEQ ID NO: 193048 - DNA, 20 bp, synthetic construct
  source 1..20: mol_type = other DNA
ctcagccttctgagtagcag

SEQ ID NO: 193049 - DNA, 20 bp, synthetic construct
  source 1..20: mol_type = other DNA
cctcagccttctgagtagca

SEQ ID NO: 193050 - DNA, 20 bp, synthetic construct
  source 1..20: mol_type = other DNA
acctcagccttctgagtagc

SEQ ID NO: 193051 - DNA, 20 bp, synthetic construct
  source 1..20: mol_type = other DNA
cacctcagccttctgagtag

SEQ ID NO: 193052 - DNA, 20 bp, synthetic construct
  source 1..20: mol_type = other DNA
ccacctcagccttctgagta

SEQ ID NO: 193053 - DNA, 20 bp, synthetic construct
  source 1..20: mol_type = other DNA
cccacctcagccttctgagt

SEQ ID NO: 193054 - DNA, 20 bp, synthetic construct
  source 1..20: mol_type = other DNA
tcccacctcagccttctgag

SEQ ID NO: 193055 - DNA, 20 bp, synthetic construct
  source 1..20: mol_type = other DNA
ctcccacctcagccttctga

SEQ ID NO: 193056 - DNA, 20 bp, synthetic construct
  source 1..20: mol_type = other DNA
cctcccacctcagccttctg

SEQ ID NO: 193057 - DNA, 20 bp, synthetic construct
  source 1..20: mol_type = other DNA
tcctcccacctcagccttct

SEQ ID NO: 193058 - DNA, 20 bp, synthetic construct
  source 1..20: mol_type = other DNA
atcctcccacctcagccttc

SEQ ID NO: 193059 - DNA, 20 bp, synthetic construct
  source 1..20: mol_type = other DNA
gatcctcccacctcagcctt

SEQ ID NO: 193060 - DNA, 20 bp, synthetic construct
  source 1..20: mol_type = other DNA
cgatcctcccacctcagcct

SEQ ID NO: 193061 - DNA, 20 bp, synthetic construct
  source 1..20: mol_type = other DNA
gcgatcctcccacctcagcc

SEQ ID NO: 193062 - DNA, 20 bp, synthetic construct
  source 1..20: mol_type = other DNA
agcgatcctcccacctcagc

SEQ ID NO: 193063 - DNA, 20 bp, synthetic construct
  source 1..20: mol_type = other DNA
aagcgatcctcccacctcag

SEQ ID NO: 193064 - DNA, 20 bp, synthetic construct
  source 1..20: mol_type = other DNA
caagcgatcctcccacctca

SEQ ID NO: 193065 - DNA, 20 bp, synthetic construct
  source 1..20: mol_type = other DNA
acaagcgatcctcccacctc

SEQ ID NO: 193066 - DNA, 20 bp, synthetic construct
  source 1..20: mol_type = other DNA
cacaagcgatcctcccacct

SEQ ID NO: 193067 - DNA, 20 bp, synthetic construct
  source 1..20: mol_type = other DNA
gcacaagcgatcctcccacc

SEQ ID NO: 193068 - DNA, 20 bp, synthetic construct
  source 1..20: mol_type = other DNA
ggcacaagcgatcctcccac

SEQ ID NO: 193069 - DNA, 20 bp, synthetic construct
  source 1..20: mol_type = other DNA
gggcacaagcgatcctccca

SEQ ID NO: 193070 - DNA, 20 bp, synthetic construct
  source 1..20: mol_type = other DNA
tgggcacaagcgatcctccc

SEQ ID NO: 193071 - DNA, 20 bp, synthetic construct
  source 1..20: mol_type = other DNA
ctgggcacaagcgatcctcc

SEQ ID NO: 193072 - DNA, 20 bp, synthetic construct
  source 1..20: mol_type = other DNA
cctgggcacaagcgatcctc

SEQ ID NO: 193073 - DNA, 20 bp, synthetic construct
  source 1..20: mol_type = other DNA
tcctgggcacaagcgatcct

SEQ ID NO: 193074 - DNA, 20 bp, synthetic construct
  source 1..20: mol_type = other DNA
ctcctgggcacaagcgatcc

SEQ ID NO: 193075 - DNA, 20 bp, synthetic construct
  source 1..20: mol_type = other DNA
actcctgggcacaagcgatc

SEQ ID NO: 193076 - DNA, 20 bp, synthetic construct
  source 1..20: mol_type = other DNA
aactcctgggcacaagcgat

SEQ ID NO: 193077 - DNA, 20 bp, synthetic construct
  source 1..20: mol_type = other DNA
aaactcctgggcacaagcga

SEQ ID NO: 193078 - DNA, 20 bp, synthetic construct
  source 1..20: mol_type = other DNA
caaactcctgggcacaagcg

SEQ ID NO: 193079 - DNA, 20 bp, synthetic construct
  source 1..20: mol_type = other DNA
tcaaactcctgggcacaagc

SEQ ID NO: 193080 - DNA, 20 bp, synthetic construct
  source 1..20: mol_type = other DNA
ctcaaactcctgggcacaag

SEQ ID NO: 193081 - DNA, 20 bp, synthetic construct
  source 1..20: mol_type = other DNA
cctcaaactcctgggcacaa

SEQ ID NO: 193082 - DNA, 20 bp, synthetic construct
  source 1..20: mol_type = other DNA
gcctcaaactcctgggcaca

SEQ ID NO: 193083 - DNA, 20 bp, synthetic construct
  source 1..20: mol_type = other DNA
agcctcaaactcctgggcac

SEQ ID NO: 193084 - DNA, 20 bp, synthetic construct
  source 1..20: mol_type = other DNA
cagcctcaaactcctgggca

SEQ ID NO: 193085 - DNA, 20 bp, synthetic construct
  source 1..20: mol_type = other DNA
gcagcctcaaactcctgggc

SEQ ID NO: 193086 - DNA, 20 bp, synthetic construct
  source 1..20: mol_type = other DNA
tgcagcctcaaactcctggg

SEQ ID NO: 193087 - DNA, 20 bp, synthetic construct
  source 1..20: mol_type = other DNA
ctgcagcctcaaactcctgg

SEQ ID NO: 193088 - DNA, 20 bp, synthetic construct
  source 1..20: mol_type = other DNA
actgcagcctcaaactcctg

SEQ ID NO: 193089 - DNA, 20 bp, synthetic construct
  source 1..20: mol_type = other DNA
cactgcagcctcaaactcct

SEQ ID NO: 193090 - DNA, 20 bp, synthetic construct
  source 1..20: mol_type = other DNA
tcactgcagcctcaaactcc

SEQ ID NO: 193091 - DNA, 20 bp, synthetic construct
  source 1..20: mol_type = other DNA
ctcactgcagcctcaaactc

SEQ ID NO: 193092 - DNA, 20 bp, synthetic construct
  source 1..20: mol_type = other DNA
gctcactgcagcctcaaact

SEQ ID NO: 193093 - DNA, 20 bp, synthetic construct
  source 1..20: mol_type = other DNA
agctcactgcagcctcaaac

SEQ ID NO: 193094 - DNA, 20 bp, synthetic construct
  source 1..20: mol_type = other DNA
tagctcactgcagcctcaaa

SEQ ID NO: 193095 - DNA, 20 bp, synthetic construct
  source 1..20: mol_type = other DNA
atagctcactgcagcctcaa

SEQ ID NO: 193096 - DNA, 20 bp, synthetic construct
  source 1..20: mol_type = other DNA
catagctcactgcagcctca

SEQ ID NO: 193097 - DNA, 20 bp, synthetic construct
  source 1..20: mol_type = other DNA
gcatagctcactgcagcctc

SEQ ID NO: 193098 - DNA, 20 bp, synthetic construct
  source 1..20: mol_type = other DNA
agcatagctcactgcagcct

SEQ ID NO: 193099 - DNA, 20 bp, synthetic construct
  source 1..20: mol_type = other DNA
cagcatagctcactgcagcc

SEQ ID NO: 193100 - DNA, 20 bp, synthetic construct
  source 1..20: mol_type = other DNA
ccagcatagctcactgcagc

SEQ ID NO: 193101 - DNA, 20 bp, synthetic construct
  source 1..20: mol_type = other DNA
gccagcatagctcactgcag

SEQ ID NO: 193102 - DNA, 20 bp, synthetic construct
  source 1..20: mol_type = other DNA
tgccagcatagctcactgca

SEQ ID NO: 193103 - DNA, 20 bp, synthetic construct
  source 1..20: mol_type = other DNA
gtgccagcatagctcactgc

SEQ ID NO: 193104 - DNA, 20 bp, synthetic construct
  source 1..20: mol_type = other DNA
ggtgccagcatagctcactg

SEQ ID NO: 193105 - DNA, 20 bp, synthetic construct
  source 1..20: mol_type = other DNA
tggtgccagcatagctcact

SEQ ID NO: 193106 - DNA, 20 bp, synthetic construct
  source 1..20: mol_type = other DNA
gtggtgccagcatagctcac

SEQ ID NO: 193107 - DNA, 20 bp, synthetic construct
  source 1..20: mol_type = other DNA
tgtggtgccagcatagctca

SEQ ID NO: 193108 - DNA, 20 bp, synthetic construct
  source 1..20: mol_type = other DNA
ctgtggtgccagcatagctc

SEQ ID NO: 193109 - DNA, 20 bp, synthetic construct
  source 1..20: mol_type = other DNA
gctgtggtgccagcatagct

SEQ ID NO: 193110 - DNA, 20 bp, synthetic construct
  source 1..20: mol_type = other DNA
tgctgtggtgccagcatagc

SEQ ID NO: 193111 - DNA, 20 bp, synthetic construct
  source 1..20: mol_type = other DNA
gtgctgtggtgccagcatag

SEQ ID NO: 193112 - DNA, 20 bp, synthetic construct
  source 1..20: mol_type = other DNA
agtgctgtggtgccagcata

SEQ ID NO: 193113 - DNA, 20 bp, synthetic construct
  source 1..20: mol_type = other DNA
gagtgctgtggtgccagcat

SEQ ID NO: 193114 - DNA, 20 bp, synthetic construct
  source 1..20: mol_type = other DNA
ggagtgctgtggtgccagca

SEQ ID NO: 193115 - DNA, 20 bp, synthetic construct
  source 1..20: mol_type = other DNA
tggagtgctgtggtgccagc

SEQ ID NO: 193116 - DNA, 20 bp, synthetic construct
  source 1..20: mol_type = other DNA
ctggagtgctgtggtgccag

SEQ ID NO: 193117 - DNA, 20 bp, synthetic construct
  source 1..20: mol_type = other DNA
gctggagtgctgtggtgcca

SEQ ID NO: 193118 - DNA, 20 bp, synthetic construct
  source 1..20: mol_type = other DNA
ggctggagtgctgtggtgcc

SEQ ID NO: 193119 - DNA, 20 bp, synthetic construct
  source 1..20: mol_type = other DNA
aggctggagtgctgtggtgc

SEQ ID NO: 193120 - DNA, 20 bp, synthetic construct
  source 1..20: mol_type = other DNA
caggctggagtgctgtggtg

SEQ ID NO: 193121 - DNA, 20 bp, synthetic construct
  source 1..20: mol_type = other DNA
tcaggctggagtgctgtggt

SEQ ID NO: 193122 - DNA, 20 bp, synthetic construct
  source 1..20: mol_type = other DNA
ctcaggctggagtgctgtgg

SEQ ID NO: 193123 - DNA, 20 bp, synthetic construct
  source 1..20: mol_type = other DNA
actcaggctggagtgctgtg

SEQ ID NO: 193124 - DNA, 20 bp, synthetic construct
  source 1..20: mol_type = other DNA
tactcaggctggagtgctgt

SEQ ID NO: 193125 - DNA, 20 bp, synthetic construct
  source 1..20: mol_type = other DNA
ttactcaggctggagtgctg

SEQ ID NO: 193126 - DNA, 20 bp, synthetic construct
  source 1..20: mol_type = other DNA
gttactcaggctggagtgct

SEQ ID NO: 193127 - DNA, 20 bp, synthetic construct
  source 1..20: mol_type = other DNA
tgttactcaggctggagtgc

SEQ ID NO: 193128 - DNA, 20 bp, synthetic construct
  source 1..20: mol_type = other DNA
ctgttactcaggctggagtg

SEQ ID NO: 193129 - DNA, 20 bp, synthetic construct
  source 1..20: mol_type = other DNA
tctgttactcaggctggagt

SEQ ID NO: 193130 - DNA, 20 bp, synthetic construct
  source 1..20: mol_type = other DNA
ttctgttactcaggctggag

SEQ ID NO: 193131 - DNA, 20 bp, synthetic construct
  source 1..20: mol_type = other DNA
attctgttactcaggctgga

SEQ ID NO: 193132 - DNA, 20 bp, synthetic construct
  source 1..20: mol_type = other DNA
cattctgttactcaggctgg

SEQ ID NO: 193133 - DNA, 20 bp, synthetic construct
  source 1..20: mol_type = other DNA
tcattctgttactcaggctg

SEQ ID NO: 193134 - DNA, 20 bp, synthetic construct
  source 1..20: mol_type = other DNA
ctcattctgttactcaggct

SEQ ID NO: 193135 - DNA, 20 bp, synthetic construct
  source 1..20: mol_type = other DNA
tctcattctgttactcaggc

SEQ ID NO: 193136 - DNA, 20 bp, synthetic construct
  source 1..20: mol_type = other DNA
atctcattctgttactcagg

SEQ ID NO: 193137 - DNA, 20 bp, synthetic construct
  source 1..20: mol_type = other DNA
gatctcattctgttactcag

SEQ ID NO: 193138 - DNA, 20 bp, synthetic construct
  source 1..20: mol_type = other DNA
ggatctcattctgttactca

SEQ ID NO: 193139 - DNA, 20 bp, synthetic construct
  source 1..20: mol_type = other DNA
aggatctcattctgttactc

SEQ ID NO: 193140 - DNA, 20 bp, synthetic construct
  source 1..20: mol_type = other DNA
caggatctcattctgttact

SEQ ID NO: 193141 - DNA, 20 bp, synthetic construct
  source 1..20: mol_type = other DNA
acaggatctcattctgttac

SEQ ID NO: 193142 - DNA, 20 bp, synthetic construct
  source 1..20: mol_type = other DNA
gacaggatctcattctgtta

SEQ ID NO: 193143 - DNA, 20 bp, synthetic construct
  source 1..20: mol_type = other DNA
agacaggatctcattctgtt

SEQ ID NO: 193144 - DNA, 20 bp, synthetic construct
  source 1..20: mol_type = other DNA
gagacaggatctcattctgt

SEQ ID NO: 193145 - DNA, 20 bp, synthetic construct
  source 1..20: mol_type = other DNA
tgagacaggatctcattctg

SEQ ID NO: 193146 - DNA, 20 bp, synthetic construct
  source 1..20: mol_type = other DNA
ttgagacaggatctcattct

SEQ ID NO: 193147 - DNA, 20 bp, synthetic construct
  source 1..20: mol_type = other DNA
tttgagacaggatctcattc

SEQ ID NO: 193148 - DNA, 20 bp, synthetic construct
  source 1..20: mol_type = other DNA
ttttgagacaggatctcatt

SEQ ID NO: 193149 - DNA, 20 bp, synthetic construct
  source 1..20: mol_type = other DNA
gttttgagacaggatctcat

SEQ ID NO: 193150 - DNA, 20 bp, synthetic construct
  source 1..20: mol_type = other DNA
tgttttgagacaggatctca

SEQ ID NO: 193151 - DNA, 20 bp, synthetic construct
  source 1..20: mol_type = other DNA
ttgttttgagacaggatctc

SEQ ID NO: 193152 - DNA, 20 bp, synthetic construct
  source 1..20: mol_type = other DNA
tttgttttgagacaggatct

SEQ ID NO: 193153 - DNA, 20 bp, synthetic construct
  source 1..20: mol_type = other DNA
gtttgttttgagacaggatc

SEQ ID NO: 193154 - DNA, 20 bp, synthetic construct
  source 1..20: mol_type = other DNA
tgtttgttttgagacaggat

SEQ ID NO: 193155 - DNA, 20 bp, synthetic construct
  source 1..20: mol_type = other DNA
ttgtttgttttgagacagga

SEQ ID NO: 193156 - DNA, 20 bp, synthetic construct
  source 1..20: mol_type = other DNA
tttgtttgttttgagacagg

SEQ ID NO: 193157 - DNA, 20 bp, synthetic construct
  source 1..20: mol_type = other DNA
gtttgtttgttttgagacag

SEQ ID NO: 193158 - DNA, 20 bp, synthetic construct
  source 1..20: mol_type = other DNA
tgtttgtttgttttgagaca

SEQ ID NO: 193159 - DNA, 20 bp, synthetic construct
  source 1..20: mol_type = other DNA
ttgtttgtttgttttgagac

SEQ ID NO: 193160 - DNA, 20 bp, synthetic construct
  source 1..20: mol_type = other DNA
tttgtttgtttgttttgaga

SEQ ID NO: 193161 - DNA, 20 bp, synthetic construct
  source 1..20: mol_type = other DNA
gtttgtttgtttgttttgag

SEQ ID NO: 193162 - DNA, 20 bp, synthetic construct
  source 1..20: mol_type = other DNA
tgtttgtttgtttgttttga

SEQ ID NO: 193163 - DNA, 20 bp, synthetic construct
  source 1..20: mol_type = other DNA
ttgtttgtttgtttgttttg

SEQ ID NO: 193164 - DNA, 20 bp, synthetic construct
  source 1..20: mol_type = other DNA
tttgtttgtttgtttgtttt

SEQ ID NO: 193165 - DNA, 20 bp, synthetic construct
  source 1..20: mol_type = other DNA
gtttgtttgtttgtttgttt

SEQ ID NO: 193166 - DNA, 20 bp, synthetic construct
  source 1..20: mol_type = other DNA
tgtttgtttgtttgtttgtt

SEQ ID NO: 193167 - DNA, 20 bp, synthetic construct
  source 1..20: mol_type = other DNA
ttgtttgtttgtttgtttgt

SEQ ID NO: 193168 - DNA, 20 bp, synthetic construct
  source 1..20: mol_type = other DNA
tttgtttgtttgtttgtttg

SEQ ID NO: 193169 - DNA, 20 bp, synthetic construct
  source 1..20: mol_type = other DNA
ttttgtttgtttgtttgttt

SEQ ID NO: 193170 - DNA, 20 bp, synthetic construct
  source 1..20: mol_type = other DNA
cttttgtttgtttgtttgtt

SEQ ID NO: 193171 - DNA, 20 bp, synthetic construct
  source 1..20: mol_type = other DNA
tcttttgtttgtttgtttgt

SEQ ID NO: 193172 - DNA, 20 bp, synthetic construct
  source 1..20: mol_type = other DNA
ttcttttgtttgtttgtttg

SEQ ID NO: 193173 - DNA, 20 bp, synthetic construct
  source 1..20: mol_type = other DNA
cttcttttgtttgtttgttt

SEQ ID NO: 193174 - DNA, 20 bp, synthetic construct
  source 1..20: mol_type = other DNA
ccttcttttgtttgtttgtt

SEQ ID NO: 193175 - DNA, 20 bp, synthetic construct
  source 1..20: mol_type = other DNA
gccttcttttgtttgtttgt

SEQ ID NO: 193176 - DNA, 20 bp, synthetic construct
  source 1..20: mol_type = other DNA
agccttcttttgtttgtttg

SEQ ID NO: 193177 - DNA, 20 bp, synthetic construct
  source 1..20: mol_type = other DNA
aagccttcttttgtttgttt

SEQ ID NO: 193178 - DNA, 20 bp, synthetic construct
  source 1..20: mol_type = other DNA
taagccttcttttgtttgtt

SEQ ID NO: 193179 - DNA, 20 bp, synthetic construct
  source 1..20: mol_type = other DNA
ttaagccttcttttgtttgt

SEQ ID NO: 193180 - DNA, 20 bp, synthetic construct
  source 1..20: mol_type = other DNA
tttaagccttcttttgtttg

SEQ ID NO: 193181 - DNA, 20 bp, synthetic construct
  source 1..20: mol_type = other DNA
ctttaagccttcttttgttt

SEQ ID NO: 193182 - DNA, 20 bp, synthetic construct
  source 1..20: mol_type = other DNA
cctttaagccttcttttgtt

SEQ ID NO: 193183 - DNA, 20 bp, synthetic construct
  source 1..20: mol_type = other DNA
ccctttaagccttcttttgt

SEQ ID NO: 193184 - DNA, 20 bp, synthetic construct
  source 1..20: mol_type = other DNA
cccctttaagccttcttttg

SEQ ID NO: 193185 - DNA, 20 bp, synthetic construct
  source 1..20: mol_type = other DNA
ccccctttaagccttctttt

SEQ ID NO: 193186 - DNA, 20 bp, synthetic construct
  source 1..20: mol_type = other DNA
gccccctttaagccttcttt

SEQ ID NO: 193187 - DNA, 20 bp, synthetic construct
  source 1..20: mol_type = other DNA
agccccctttaagccttctt

SEQ ID NO: 193188 - DNA, 20 bp, synthetic construct
  source 1..20: mol_type = other DNA
gagccccctttaagccttct

SEQ ID NO: 193189 - DNA, 20 bp, synthetic construct
  source 1..20: mol_type = other DNA
ggagccccctttaagccttc

SEQ ID NO: 193190 - DNA, 20 bp, synthetic construct
  source 1..20: mol_type = other DNA
tggagccccctttaagcctt

SEQ ID NO: 193191 - DNA, 20 bp, synthetic construct
  source 1..20: mol_type = other DNA
ctggagccccctttaagcct

SEQ ID NO: 193192 - DNA, 20 bp, synthetic construct
  source 1..20: mol_type = other DNA
cctggagccccctttaagcc

SEQ ID NO: 193193 - DNA, 20 bp, synthetic construct
  source 1..20: mol_type = other DNA
acctggagccccctttaagc

SEQ ID NO: 193194 - DNA, 20 bp, synthetic construct
  source 1..20: mol_type = other DNA
cacctggagccccctttaag

SEQ ID NO: 193195 - DNA, 20 bp, synthetic construct
  source 1..20: mol_type = other DNA
ccacctggagccccctttaa

SEQ ID NO: 193196 - DNA, 20 bp, synthetic construct
  source 1..20: mol_type = other DNA
cccacctggagcccccttta

SEQ ID NO: 193197 - DNA, 20 bp, synthetic construct
  source 1..20: mol_type = other DNA
gcccacctggagcccccttt

SEQ ID NO: 193198 - DNA, 20 bp, synthetic construct
  source 1..20: mol_type = other DNA
agcccacctggagccccctt

SEQ ID NO: 193199 - DNA, 20 bp, synthetic construct
  source 1..20: mol_type = other DNA
aagcccacctggagccccct

SEQ ID NO: 193200 - DNA, 20 bp, synthetic construct
  source 1..20: mol_type = other DNA
caagcccacctggagccccc

SEQ ID NO: 193201 - DNA, 20 bp, synthetic construct
  source 1..20: mol_type = other DNA
ccaagcccacctggagcccc

SEQ ID NO: 193202 - DNA, 20 bp, synthetic construct
  source 1..20: mol_type = other DNA
gccaagcccacctggagccc

SEQ ID NO: 193203 - DNA, 20 bp, synthetic construct
  source 1..20: mol_type = other DNA
tgccaagcccacctggagcc

SEQ ID NO: 193204 - DNA, 20 bp, synthetic construct
  source 1..20: mol_type = other DNA
ctgccaagcccacctggagc

SEQ ID NO: 193205 - DNA, 20 bp, synthetic construct
  source 1..20: mol_type = other DNA
gctgccaagcccacctggag

SEQ ID NO: 193206 - DNA, 20 bp, synthetic construct
  source 1..20: mol_type = other DNA
tgctgccaagcccacctgga

SEQ ID NO: 193207 - DNA, 20 bp, synthetic construct
  source 1..20: mol_type = other DNA
gtgctgccaagcccacctgg

SEQ ID NO: 193208 - DNA, 20 bp, synthetic construct
  source 1..20: mol_type = other DNA
tgtgctgccaagcccacctg

SEQ ID NO: 193209 - DNA, 20 bp, synthetic construct
  source 1..20: mol_type = other DNA
ttgtgctgccaagcccacct

SEQ ID NO: 193210 - DNA, 20 bp, synthetic construct
  source 1..20: mol_type = other DNA
tttgtgctgccaagcccacc

SEQ ID NO: 193211 - DNA, 20 bp, synthetic construct
  source 1..20: mol_type = other DNA
ctttgtgctgccaagcccac

SEQ ID NO: 193212 - DNA, 20 bp, synthetic construct
  source 1..20: mol_type = other DNA
gctttgtgctgccaagccca

SEQ ID NO: 193213 - DNA, 20 bp, synthetic construct
  source 1..20: mol_type = other DNA
agctttgtgctgccaagccc

SEQ ID NO: 193214 - DNA, 20 bp, synthetic construct
  source 1..20: mol_type = other DNA
tagctttgtgctgccaagcc

SEQ ID NO: 193215 - DNA, 20 bp, synthetic construct
  source 1..20: mol_type = other DNA
atagctttgtgctgccaagc

SEQ ID NO: 193216 - DNA, 20 bp, synthetic construct
  source 1..20: mol_type = other DNA
catagctttgtgctgccaag

SEQ ID NO: 193217 - DNA, 20 bp, synthetic construct
  source 1..20: mol_type = other DNA
tcatagctttgtgctgccaa

SEQ ID NO: 193218 - DNA, 20 bp, synthetic construct
  source 1..20: mol_type = other DNA
ttcatagctttgtgctgcca

SEQ ID NO: 193219 - DNA, 20 bp, synthetic construct
  source 1..20: mol_type = other DNA
cttcatagctttgtgctgcc

SEQ ID NO: 193220 - DNA, 20 bp, synthetic construct
  source 1..20: mol_type = other DNA
acttcatagctttgtgctgc

SEQ ID NO: 193221 - DNA, 20 bp, synthetic construct
  source 1..20: mol_type = other DNA
aacttcatagctttgtgctg

SEQ ID NO: 193222 - DNA, 20 bp, synthetic construct
  source 1..20: mol_type = other DNA
gaacttcatagctttgtgct

SEQ ID NO: 193223 - DNA, 20 bp, synthetic construct
  source 1..20: mol_type = other DNA
agaacttcatagctttgtgc

SEQ ID NO: 193224 - DNA, 20 bp, synthetic construct
  source 1..20: mol_type = other DNA
tagaacttcatagctttgtg

SEQ ID NO: 193225 - DNA, 20 bp, synthetic construct
  source 1..20: mol_type = other DNA
atagaacttcatagctttgt

SEQ ID NO: 193226 - DNA, 20 bp, synthetic construct
  source 1..20: mol_type = other DNA
gatagaacttcatagctttg

SEQ ID NO: 193227 - DNA, 20 bp, synthetic construct
  source 1..20: mol_type = other DNA
agatagaacttcatagcttt

SEQ ID NO: 193228 - DNA, 20 bp, synthetic construct
  source 1..20: mol_type = other DNA
aagatagaacttcatagctt

SEQ ID NO: 193229 - DNA, 20 bp, synthetic construct
  source 1..20: mol_type = other DNA
taagatagaacttcatagct

SEQ ID NO: 193230 - DNA, 20 bp, synthetic construct
  source 1..20: mol_type = other DNA
ctaagatagaacttcatagc

SEQ ID NO: 193231 - DNA, 20 bp, synthetic construct
  source 1..20: mol_type = other DNA
tctaagatagaacttcatag

SEQ ID NO: 193232 - DNA, 20 bp, synthetic construct
  source 1..20: mol_type = other DNA
gtctaagatagaacttcata

SEQ ID NO: 193233 - DNA, 20 bp, synthetic construct
  source 1..20: mol_type = other DNA
tgtctaagatagaacttcat

SEQ ID NO: 193234 - DNA, 20 bp, synthetic construct
  source 1..20: mol_type = other DNA
gtgtctaagatagaacttca

SEQ ID NO: 193235 - DNA, 20 bp, synthetic construct
  source 1..20: mol_type = other DNA
tgtgtctaagatagaacttc

SEQ ID NO: 193236 - DNA, 20 bp, synthetic construct
  source 1..20: mol_type = other DNA
ttgtgtctaagatagaactt

SEQ ID NO: 193237 - DNA, 20 bp, synthetic construct
  source 1..20: mol_type = other DNA
cttgtgtctaagatagaact

SEQ ID NO: 193238 - DNA, 20 bp, synthetic construct
  source 1..20: mol_type = other DNA
acttgtgtctaagatagaac

SEQ ID NO: 193239 - DNA, 20 bp, synthetic construct
  source 1..20: mol_type = other DNA
aacttgtgtctaagatagaa

SEQ ID NO: 193240 - DNA, 20 bp, synthetic construct
  source 1..20: mol_type = other DNA
gaacttgtgtctaagataga

SEQ ID NO: 193241 - DNA, 20 bp, synthetic construct
  source 1..20: mol_type = other DNA
agaacttgtgtctaagatag

SEQ ID NO: 193242 - DNA, 20 bp, synthetic construct
  source 1..20: mol_type = other DNA
cagaacttgtgtctaagata

SEQ ID NO: 193243 - DNA, 20 bp, synthetic construct
  source 1..20: mol_type = other DNA
acagaacttgtgtctaagat

SEQ ID NO: 193244 - DNA, 20 bp, synthetic construct
  source 1..20: mol_type = other DNA
aacagaacttgtgtctaaga

SEQ ID NO: 193245 - DNA, 20 bp, synthetic construct
  source 1..20: mol_type = other DNA
taacagaacttgtgtctaag

SEQ ID NO: 193246 - DNA, 20 bp, synthetic construct
  source 1..20: mol_type = other DNA
gtaacagaacttgtgtctaa

SEQ ID NO: 193247 - DNA, 20 bp, synthetic construct
  source 1..20: mol_type = other DNA
agtaacagaacttgtgtcta

SEQ ID NO: 193248 - DNA, 20 bp, synthetic construct
  source 1..20: mol_type = other DNA
cagtaacagaacttgtgtct

SEQ ID NO: 193249 - DNA, 20 bp, synthetic construct
  source 1..20: mol_type = other DNA
ccagtaacagaacttgtgtc

SEQ ID NO: 193250 - DNA, 20 bp, synthetic construct
  source 1..20: mol_type = other DNA
cccagtaacagaacttgtgt

SEQ ID NO: 193251 - DNA, 20 bp, synthetic construct
  source 1..20: mol_type = other DNA
gcccagtaacagaacttgtg

SEQ ID NO: 193252 - DNA, 20 bp, synthetic construct
  source 1..20: mol_type = other DNA
ggcccagtaacagaacttgt

SEQ ID NO: 193253 - DNA, 20 bp, synthetic construct
  source 1..20: mol_type = other DNA
aggcccagtaacagaacttg

SEQ ID NO: 193254 - DNA, 20 bp, synthetic construct
  source 1..20: mol_type = other DNA
aaggcccagtaacagaactt

SEQ ID NO: 193255 - DNA, 20 bp, synthetic construct
  source 1..20: mol_type = other DNA
aaaggcccagtaacagaact

SEQ ID NO: 193256 - DNA, 20 bp, synthetic construct
  source 1..20: mol_type = other DNA
caaaggcccagtaacagaac

SEQ ID NO: 193257 - DNA, 20 bp, synthetic construct
  source 1..20: mol_type = other DNA
gcaaaggcccagtaacagaa

SEQ ID NO: 193258 - DNA, 20 bp, synthetic construct
  source 1..20: mol_type = other DNA
tgcaaaggcccagtaacaga

SEQ ID NO: 193259 - DNA, 20 bp, synthetic construct
  source 1..20: mol_type = other DNA
ctgcaaaggcccagtaacag

SEQ ID NO: 193260 - DNA, 20 bp, synthetic construct
  source 1..20: mol_type = other DNA
cctgcaaaggcccagtaaca

SEQ ID NO: 193261 - DNA, 20 bp, synthetic construct
  source 1..20: mol_type = other DNA
gcctgcaaaggcccagtaac

SEQ ID NO: 193262 - DNA, 20 bp, synthetic construct
  source 1..20: mol_type = other DNA
agcctgcaaaggcccagtaa

SEQ ID NO: 193263 - DNA, 20 bp, synthetic construct
  source 1..20: mol_type = other DNA
cagcctgcaaaggcccagta

SEQ ID NO: 193264 - DNA, 20 bp, synthetic construct
  source 1..20: mol_type = other DNA
ccagcctgcaaaggcccagt

SEQ ID NO: 193265 - DNA, 20 bp, synthetic construct
  source 1..20: mol_type = other DNA
gccagcctgcaaaggcccag

SEQ ID NO: 193266 - DNA, 20 bp, synthetic construct
  source 1..20: mol_type = other DNA
ggccagcctgcaaaggccca

SEQ ID NO: 193267 - DNA, 20 bp, synthetic construct
  source 1..20: mol_type = other DNA
aggccagcctgcaaaggccc

SEQ ID NO: 193268 - DNA, 20 bp, synthetic construct
  source 1..20: mol_type = other DNA
caggccagcctgcaaaggcc

SEQ ID NO: 193269 - DNA, 20 bp, synthetic construct
  source 1..20: mol_type = other DNA
ccaggccagcctgcaaaggc

SEQ ID NO: 193270 - DNA, 20 bp, synthetic construct
  source 1..20: mol_type = other DNA
cccaggccagcctgcaaagg

SEQ ID NO: 193271 - DNA, 20 bp, synthetic construct
  source 1..20: mol_type = other DNA
acccaggccagcctgcaaag

SEQ ID NO: 193272 - DNA, 20 bp, synthetic construct
  source 1..20: mol_type = other DNA
tacccaggccagcctgcaaa

SEQ ID NO: 193273 - DNA, 20 bp, synthetic construct
  source 1..20: mol_type = other DNA
gtacccaggccagcctgcaa

SEQ ID NO: 193274 - DNA, 20 bp, synthetic construct
  source 1..20: mol_type = other DNA
ggtacccaggccagcctgca

SEQ ID NO: 193275 - DNA, 20 bp, synthetic construct
  source 1..20: mol_type = other DNA
aggtacccaggccagcctgc

SEQ ID NO: 193276 - DNA, 20 bp, synthetic construct
  source 1..20: mol_type = other DNA
caggtacccaggccagcctg

SEQ ID NO: 193277 - DNA, 20 bp, synthetic construct
  source 1..20: mol_type = other DNA
ccaggtacccaggccagcct

SEQ ID NO: 193278 - DNA, 20 bp, synthetic construct
  source 1..20: mol_type = other DNA
gccaggtacccaggccagcc

SEQ ID NO: 193279 - DNA, 20 bp, synthetic construct
  source 1..20: mol_type = other DNA
agccaggtacccaggccagc

SEQ ID NO: 193280 - DNA, 20 bp, synthetic construct
  source 1..20: mol_type = other DNA
cagccaggtacccaggccag

SEQ ID NO: 193281 - DNA, 20 bp, synthetic construct
  source 1..20: mol_type = other DNA
gcagccaggtacccaggcca

SEQ ID NO: 193282 - DNA, 20 bp, synthetic construct
  source 1..20: mol_type = other DNA
ggcagccaggtacccaggcc

SEQ ID NO: 193283 - DNA, 20 bp, synthetic construct
  source 1..20: mol_type = other DNA
tggcagccaggtacccaggc

SEQ ID NO: 193284 - DNA, 20 bp, synthetic construct
  source 1..20: mol_type = other DNA
atggcagccaggtacccagg

SEQ ID NO: 193285 - DNA, 20 bp, synthetic construct
  source 1..20: mol_type = other DNA
tatggcagccaggtacccag

SEQ ID NO: 193286 - DNA, 20 bp, synthetic construct
  source 1..20: mol_type = other DNA
ctatggcagccaggtaccca

SEQ ID NO: 193287 - DNA, 20 bp, synthetic construct
  source 1..20: mol_type = other DNA
tctatggcagccaggtaccc

SEQ ID NO: 193288 - DNA, 20 bp, synthetic construct
  source 1..20: mol_type = other DNA
gtctatggcagccaggtacc

SEQ ID NO: 193289 - DNA, 20 bp, synthetic construct
  source 1..20: mol_type = other DNA
tgtctatggcagccaggtac

SEQ ID NO: 193290 - DNA, 20 bp, synthetic construct
  source 1..20: mol_type = other DNA
ctgtctatggcagccaggta

SEQ ID NO: 193291 - DNA, 20 bp, synthetic construct
  source 1..20: mol_type = other DNA
cctgtctatggcagccaggt

SEQ ID NO: 193292 - DNA, 20 bp, synthetic construct
  source 1..20: mol_type = other DNA
ccctgtctatggcagccagg

SEQ ID NO: 193293 - DNA, 20 bp, synthetic construct
  source 1..20: mol_type = other DNA
tccctgtctatggcagccag

SEQ ID NO: 193294 - DNA, 20 bp, synthetic construct
  source 1..20: mol_type = other DNA
ttccctgtctatggcagcca

SEQ ID NO: 193295 - DNA, 20 bp, synthetic construct
  source 1..20: mol_type = other DNA
gttccctgtctatggcagcc

SEQ ID NO: 193296 - DNA, 20 bp, synthetic construct
  source 1..20: mol_type = other DNA
ggttccctgtctatggcagc

SEQ ID NO: 193297 - DNA, 20 bp, synthetic construct
  source 1..20: mol_type = other DNA
aggttccctgtctatggcag

SEQ ID NO: 193298 - DNA, 20 bp, synthetic construct
  source 1..20: mol_type = other DNA
aaggttccctgtctatggca

SEQ ID NO: 193299 - DNA, 20 bp, synthetic construct
  source 1..20: mol_type = other DNA
gaaggttccctgtctatggc

SEQ ID NO: 193300 - DNA, 20 bp, synthetic construct
  source 1..20: mol_type = other DNA
ggaaggttccctgtctatgg

SEQ ID NO: 193301 - DNA, 20 bp, synthetic construct
  source 1..20: mol_type = other DNA
tggaaggttccctgtctatg

SEQ ID NO: 193302 - DNA, 20 bp, synthetic construct
  source 1..20: mol_type = other DNA
ctggaaggttccctgtctat

SEQ ID NO: 193303 - DNA, 20 bp, synthetic construct
  source 1..20: mol_type = other DNA
tctggaaggttccctgtcta

SEQ ID NO: 193304 - DNA, 20 bp, synthetic construct
  source 1..20: mol_type = other DNA
atctggaaggttccctgtct

SEQ ID NO: 193305 - DNA, 20 bp, synthetic construct
  source 1..20: mol_type = other DNA
catctggaaggttccctgtc

SEQ ID NO: 193306 - DNA, 20 bp, synthetic construct
  source 1..20: mol_type = other DNA
tcatctggaaggttccctgt

SEQ ID NO: 193307 - DNA, 20 bp, synthetic construct
  source 1..20: mol_type = other DNA
ctcatctggaaggttccctg

SEQ ID NO: 193308 - DNA, 20 bp, synthetic construct
  source 1..20: mol_type = other DNA
gctcatctggaaggttccct

SEQ ID NO: 193309 - DNA, 20 bp, synthetic construct
  source 1..20: mol_type = other DNA
agctcatctggaaggttccc

SEQ ID NO: 193310 - DNA, 20 bp, synthetic construct
  source 1..20: mol_type = other DNA
cagctcatctggaaggttcc

SEQ ID NO: 193311 - DNA, 20 bp, synthetic construct
  source 1..20: mol_type = other DNA
gcagctcatctggaaggttc

SEQ ID NO: 193312 - DNA, 20 bp, synthetic construct
  source 1..20: mol_type = other DNA
tgcagctcatctggaaggtt

SEQ ID NO: 193313 - DNA, 20 bp, synthetic construct
  source 1..20: mol_type = other DNA
ctgcagctcatctggaaggt

SEQ ID NO: 193314 - DNA, 20 bp, synthetic construct
  source 1..20: mol_type = other DNA
cctgcagctcatctggaagg

SEQ ID NO: 193315 - DNA, 20 bp, synthetic construct
  source 1..20: mol_type = other DNA
gcctgcagctcatctggaag

SEQ ID NO: 193316 - DNA, 20 bp, synthetic construct
  source 1..20: mol_type = other DNA
cgcctgcagctcatctggaa

SEQ ID NO: 193317 - DNA, 20 bp, synthetic construct
  source 1..20: mol_type = other DNA
acgcctgcagctcatctgga

SEQ ID NO: 193318 - DNA, 20 bp, synthetic construct
  source 1..20: mol_type = other DNA
cacgcctgcagctcatctgg

SEQ ID NO: 193319 - DNA, 20 bp, synthetic construct
  source 1..20: mol_type = other DNA
ccacgcctgcagctcatctg

SEQ ID NO: 193320 - DNA, 20 bp, synthetic construct
  source 1..20: mol_type = other DNA
tccacgcctgcagctcatct

SEQ ID NO: 193321 - DNA, 20 bp, synthetic construct
  source 1..20: mol_type = other DNA
ctccacgcctgcagctcatc

SEQ ID NO: 193322 - DNA, 20 bp, synthetic construct
  source 1..20: mol_type = other DNA
gctccacgcctgcagctcat

SEQ ID NO: 193323 - DNA, 20 bp, synthetic construct
  source 1..20: mol_type = other DNA
tgctccacgcctgcagctca

SEQ ID NO: 193324 - DNA, 20 bp, synthetic construct
  source 1..20: mol_type = other DNA
gtgctccacgcctgcagctc

SEQ ID NO: 193325 - DNA, 20 bp, synthetic construct
  source 1..20: mol_type = other DNA
tgtgctccacgcctgcagct

SEQ ID NO: 193326 - DNA, 20 bp, synthetic construct
  source 1..20: mol_type = other DNA
ctgtgctccacgcctgcagc

SEQ ID NO: 193327 - DNA, 20 bp, synthetic construct
  source 1..20: mol_type = other DNA
cctgtgctccacgcctgcag

SEQ ID NO: 193328 - DNA, 20 bp, synthetic construct
  source 1..20: mol_type = other DNA
tcctgtgctccacgcctgca

SEQ ID NO: 193329 - DNA, 20 bp, synthetic construct
  source 1..20: mol_type = other DNA
ctcctgtgctccacgcctgc

SEQ ID NO: 193330 - DNA, 20 bp, synthetic construct
  source 1..20: mol_type = other DNA
gctcctgtgctccacgcctg

SEQ ID NO: 193331 - DNA, 20 bp, synthetic construct
  source 1..20: mol_type = other DNA
ggctcctgtgctccacgcct

SEQ ID NO: 193332 - DNA, 20 bp, synthetic construct
  source 1..20: mol_type = other DNA
tggctcctgtgctccacgcc

SEQ ID NO: 193333 - DNA, 20 bp, synthetic construct
  source 1..20: mol_type = other DNA
ctggctcctgtgctccacgc

SEQ ID NO: 193334 - DNA, 20 bp, synthetic construct
  source 1..20: mol_type = other DNA
cctggctcctgtgctccacg

SEQ ID NO: 193335 - DNA, 20 bp, synthetic construct
  source 1..20: mol_type = other DNA
ccctggctcctgtgctccac

SEQ ID NO: 193336 - DNA, 20 bp, synthetic construct
  source 1..20: mol_type = other DNA
accctggctcctgtgctcca

SEQ ID NO: 193337 - DNA, 20 bp, synthetic construct
  source 1..20: mol_type = other DNA
caccctggctcctgtgctcc

SEQ ID NO: 193338 - DNA, 20 bp, synthetic construct
  source 1..20: mol_type = other DNA
gcaccctggctcctgtgctc

SEQ ID NO: 193339 - DNA, 20 bp, synthetic construct
  source 1..20: mol_type = other DNA
agcaccctggctcctgtgct

SEQ ID NO: 193340 - DNA, 20 bp, synthetic construct
  source 1..20: mol_type = other DNA
gagcaccctggctcctgtgc

SEQ ID NO: 193341 - DNA, 20 bp, synthetic construct
  source 1..20: mol_type = other DNA
agagcaccctggctcctgtg

SEQ ID NO: 193342 - DNA, 20 bp, synthetic construct
  source 1..20: mol_type = other DNA
aagagcaccctggctcctgt

SEQ ID NO: 193343 - DNA, 20 bp, synthetic construct
  source 1..20: mol_type = other DNA
gaagagcaccctggctcctg

SEQ ID NO: 193344 - DNA, 20 bp, synthetic construct
  source 1..20: mol_type = other DNA
ggaagagcaccctggctcct

SEQ ID NO: 193345 - DNA, 20 bp, synthetic construct
  source 1..20: mol_type = other DNA
aggaagagcaccctggctcc

SEQ ID NO: 193346 - DNA, 20 bp, synthetic construct
  source 1..20: mol_type = other DNA
caggaagagcaccctggctc

SEQ ID NO: 193347 - DNA, 20 bp, synthetic construct
  source 1..20: mol_type = other DNA
ccaggaagagcaccctggct

SEQ ID NO: 193348 - DNA, 20 bp, synthetic construct
  source 1..20: mol_type = other DNA
cccaggaagagcaccctggc

SEQ ID NO: 193349 - DNA, 20 bp, synthetic construct
  source 1..20: mol_type = other DNA
gcccaggaagagcaccctgg

SEQ ID NO: 193350 - DNA, 20 bp, synthetic construct
  source 1..20: mol_type = other DNA
agcccaggaagagcaccctg

SEQ ID NO: 193351 - DNA, 20 bp, synthetic construct
  source 1..20: mol_type = other DNA
gagcccaggaagagcaccct

SEQ ID NO: 193352 - DNA, 20 bp, synthetic construct
  source 1..20: mol_type = other DNA
agagcccaggaagagcaccc

SEQ ID NO: 193353 - DNA, 20 bp, synthetic construct
  source 1..20: mol_type = other DNA
cagagcccaggaagagcacc

SEQ ID NO: 193354 - DNA, 20 bp, synthetic construct
  source 1..20: mol_type = other DNA
acagagcccaggaagagcac

SEQ ID NO: 193355 - DNA, 20 bp, synthetic construct
  source 1..20: mol_type = other DNA
gacagagcccaggaagagca

SEQ ID NO: 193356 - DNA, 20 bp, synthetic construct
  source 1..20: mol_type = other DNA
ggacagagcccaggaagagc

SEQ ID NO: 193357 - DNA, 20 bp, synthetic construct
  source 1..20: mol_type = other DNA
tggacagagcccaggaagag

SEQ ID NO: 193358 - DNA, 20 bp, synthetic construct
  source 1..20: mol_type = other DNA
gtggacagagcccaggaaga

SEQ ID NO: 193359 - DNA, 20 bp, synthetic construct
  source 1..20: mol_type = other DNA
tgtggacagagcccaggaag

SEQ ID NO: 193360 - DNA, 20 bp, synthetic construct
  source 1..20: mol_type = other DNA
ctgtggacagagcccaggaa

SEQ ID NO: 193361 - DNA, 20 bp, synthetic construct
  source 1..20: mol_type = other DNA
cctgtggacagagcccagga

SEQ ID NO: 193362 - DNA, 20 bp, synthetic construct
  source 1..20: mol_type = other DNA
gcctgtggacagagcccagg

SEQ ID NO: 193363 - DNA, 20 bp, synthetic construct
  source 1..20: mol_type = other DNA
tgcctgtggacagagcccag

SEQ ID NO: 193364 - DNA, 20 bp, synthetic construct
  source 1..20: mol_type = other DNA
ctgcctgtggacagagccca

SEQ ID NO: 193365 - DNA, 20 bp, synthetic construct
  source 1..20: mol_type = other DNA
tctgcctgtggacagagccc

SEQ ID NO: 193366 - DNA, 20 bp, synthetic construct
  source 1..20: mol_type = other DNA
ttctgcctgtggacagagcc

SEQ ID NO: 193367 - DNA, 20 bp, synthetic construct
  source 1..20: mol_type = other DNA
gttctgcctgtggacagagc

SEQ ID NO: 193368 - DNA, 20 bp, synthetic construct
  source 1..20: mol_type = other DNA
cgttctgcctgtggacagag

SEQ ID NO: 193369 - DNA, 20 bp, synthetic construct
  source 1..20: mol_type = other DNA
acgttctgcctgtggacaga

SEQ ID NO: 193370 - DNA, 20 bp, synthetic construct
  source 1..20: mol_type = other DNA
tacgttctgcctgtggacag

SEQ ID NO: 193371 - DNA, 20 bp, synthetic construct
  source 1..20: mol_type = other DNA
gtacgttctgcctgtggaca

SEQ ID NO: 193372 - DNA, 20 bp, synthetic construct
  source 1..20: mol_type = other DNA
tgtacgttctgcctgtggac

SEQ ID NO: 193373 - DNA, 20 bp, synthetic construct
  source 1..20: mol_type = other DNA
gtgtacgttctgcctgtgga

SEQ ID NO: 193374 - DNA, 20 bp, synthetic construct
  source 1..20: mol_type = other DNA
tgtgtacgttctgcctgtgg

SEQ ID NO: 193375 - DNA, 20 bp, synthetic construct
  source 1..20: mol_type = other DNA
ctgtgtacgttctgcctgtg

SEQ ID NO: 193376 - DNA, 20 bp, synthetic construct
  source 1..20: mol_type = other DNA
actgtgtacgttctgcctgt

SEQ ID NO: 193377 - DNA, 20 bp, synthetic construct
  source 1..20: mol_type = other DNA
gactgtgtacgttctgcctg

SEQ ID NO: 193378 - DNA, 20 bp, synthetic construct
  source 1..20: mol_type = other DNA
agactgtgtacgttctgcct

SEQ ID NO: 193379 - DNA, 20 bp, synthetic construct
  source 1..20: mol_type = other DNA
aagactgtgtacgttctgcc

SEQ ID NO: 193380 - DNA, 20 bp, synthetic construct
  source 1..20: mol_type = other DNA
aaagactgtgtacgttctgc

SEQ ID NO: 193381 - DNA, 20 bp, synthetic construct
  source 1..20: mol_type = other DNA
caaagactgtgtacgttctg

SEQ ID NO: 193382 - DNA, 20 bp, synthetic construct
  source 1..20: mol_type = other DNA
acaaagactgtgtacgttct

SEQ ID NO: 193383 - DNA, 20 bp, synthetic construct
  source 1..20: mol_type = other DNA
tacaaagactgtgtacgttc

SEQ ID NO: 193384 - DNA, 20 bp, synthetic construct
  source 1..20: mol_type = other DNA
gtacaaagactgtgtacgtt

SEQ ID NO: 193385 - DNA, 20 bp, synthetic construct
  source 1..20: mol_type = other DNA
tgtacaaagactgtgtacgt

SEQ ID NO: 193386 - DNA, 20 bp, synthetic construct
  source 1..20: mol_type = other DNA
gtgtacaaagactgtgtacg

SEQ ID NO: 193387 - DNA, 20 bp, synthetic construct
  source 1..20: mol_type = other DNA
cgtgtacaaagactgtgtac

SEQ ID NO: 193388 - DNA, 20 bp, synthetic construct
  source 1..20: mol_type = other DNA
acgtgtacaaagactgtgta

SEQ ID NO: 193389 - DNA, 20 bp, synthetic construct
  source 1..20: mol_type = other DNA
gacgtgtacaaagactgtgt

SEQ ID NO: 193390 - DNA, 20 bp, synthetic construct
  source 1..20: mol_type = other DNA
ggacgtgtacaaagactgtg

SEQ ID NO: 193391 - DNA, 20 bp, synthetic construct
  source 1..20: mol_type = other DNA
cggacgtgtacaaagactgt

SEQ ID NO: 193392 - DNA, 20 bp, synthetic construct
  source 1..20: mol_type = other DNA
ccggacgtgtacaaagactg

SEQ ID NO: 193393 - DNA, 20 bp, synthetic construct
  source 1..20: mol_type = other DNA
gccggacgtgtacaaagact

SEQ ID NO: 193394 - DNA, 20 bp, synthetic construct
  source 1..20: mol_type = other DNA
cgccggacgtgtacaaagac

SEQ ID NO: 193395 - DNA, 20 bp, synthetic construct
  source 1..20: mol_type = other DNA
ccgccggacgtgtacaaaga

SEQ ID NO: 193396 - DNA, 20 bp, synthetic construct
  source 1..20: mol_type = other DNA
gccgccggacgtgtacaaag

SEQ ID NO: 193397 - DNA, 20 bp, synthetic construct
  source 1..20: mol_type = other DNA
agccgccggacgtgtacaaa

SEQ ID NO: 193398 - DNA, 20 bp, synthetic construct
  source 1..20: mol_type = other DNA
gagccgccggacgtgtacaa

SEQ ID NO: 193399 - DNA, 20 bp, synthetic construct
  source 1..20: mol_type = other DNA
agagccgccggacgtgtaca

SEQ ID NO: 193400 - DNA, 20 bp, synthetic construct
  source 1..20: mol_type = other DNA
cagagccgccggacgtgtac

SEQ ID NO: 193401 - DNA, 20 bp, synthetic construct
  source 1..20: mol_type = other DNA
ccagagccgccggacgtgta

SEQ ID NO: 193402 - DNA, 20 bp, synthetic construct
  source 1..20: mol_type = other DNA
accagagccgccggacgtgt

SEQ ID NO: 193403 - DNA, 20 bp, synthetic construct
  source 1..20: mol_type = other DNA
caccagagccgccggacgtg

SEQ ID NO: 193404 - DNA, 20 bp, synthetic construct
  source 1..20: mol_type = other DNA
gcaccagagccgccggacgt

SEQ ID NO: 193405 - DNA, 20 bp, synthetic construct
  source 1..20: mol_type = other DNA
ggcaccagagccgccggacg

SEQ ID NO: 193406 - DNA, 20 bp, synthetic construct
  source 1..20: mol_type = other DNA
aggcaccagagccgccggac

SEQ ID NO: 193407 - DNA, 20 bp, synthetic construct
  source 1..20: mol_type = other DNA
taggcaccagagccgccgga

SEQ ID NO: 193408 - DNA, 20 bp, synthetic construct
  source 1..20: mol_type = other DNA
ataggcaccagagccgccgg

SEQ ID NO: 193409 - DNA, 20 bp, synthetic construct
  source 1..20: mol_type = other DNA
aataggcaccagagccgccg

SEQ ID NO: 193410 - DNA, 20 bp, synthetic construct
  source 1..20: mol_type = other DNA
aaataggcaccagagccgcc

SEQ ID NO: 193411 - DNA, 20 bp, synthetic construct
  source 1..20: mol_type = other DNA
aaaataggcaccagagccgc

SEQ ID NO: 193412 - DNA, 20 bp, synthetic construct
  source 1..20: mol_type = other DNA
aaaaataggcaccagagccg

SEQ ID NO: 193413 - DNA, 20 bp, synthetic construct
  source 1..20: mol_type = other DNA
caaaaataggcaccagagcc

SEQ ID NO: 193414 - DNA, 20 bp, synthetic construct
  source 1..20: mol_type = other DNA
acaaaaataggcaccagagc

SEQ ID NO: 193415 - DNA, 20 bp, synthetic construct
  source 1..20: mol_type = other DNA
aacaaaaataggcaccagag

SEQ ID NO: 193416 - DNA, 20 bp, synthetic construct
  source 1..20: mol_type = other DNA
aaacaaaaataggcaccaga

SEQ ID NO: 193417 - DNA, 20 bp, synthetic construct
  source 1..20: mol_type = other DNA
caaacaaaaataggcaccag

SEQ ID NO: 193418 - DNA, 20 bp, synthetic construct
  source 1..20: mol_type = other DNA
acaaacaaaaataggcacca

SEQ ID NO: 193419 - DNA, 20 bp, synthetic construct
  source 1..20: mol_type = other DNA
cacaaacaaaaataggcacc

SEQ ID NO: 193420 - DNA, 20 bp, synthetic construct
  source 1..20: mol_type = other DNA
acacaaacaaaaataggcac

SEQ ID NO: 193421 - DNA, 20 bp, synthetic construct
  source 1..20: mol_type = other DNA
aacacaaacaaaaataggca

SEQ ID NO: 193422 - DNA, 20 bp, synthetic construct
  source 1..20: mol_type = other DNA
aaacacaaacaaaaataggc

SEQ ID NO: 193423 - DNA, 20 bp, synthetic construct
  source 1..20: mol_type = other DNA
aaaacacaaacaaaaatagg

SEQ ID NO: 193424 - DNA, 20 bp, synthetic construct
  source 1..20: mol_type = other DNA
aaaaacacaaacaaaaatag

SEQ ID NO: 193425 - DNA, 20 bp, synthetic construct
  source 1..20: mol_type = other DNA
gaaaaacacaaacaaaaata

SEQ ID NO: 193426 - DNA, 20 bp, synthetic construct
  source 1..20: mol_type = other DNA
agaaaaacacaaacaaaaat

SEQ ID NO: 193427 - DNA, 20 bp, synthetic construct
  source 1..20: mol_type = other DNA
aagaaaaacacaaacaaaaa

SEQ ID NO: 193428 - DNA, 20 bp, synthetic construct
  source 1..20: mol_type = other DNA
aaagaaaaacacaaacaaaa

SEQ ID NO: 193429 - DNA, 20 bp, synthetic construct
  source 1..20: mol_type = other DNA
aaaagaaaaacacaaacaaa

SEQ ID NO: 193430 - DNA, 20 bp, synthetic construct
  source 1..20: mol_type = other DNA
caaaagaaaaacacaaacaa

SEQ ID NO: 193431 - DNA, 20 bp, synthetic construct
  source 1..20: mol_type = other DNA
acaaaagaaaaacacaaaca

SEQ ID NO: 193432 - DNA, 20 bp, synthetic construct
  source 1..20: mol_type = other DNA
aacaaaagaaaaacacaaac

SEQ ID NO: 193433 - DNA, 20 bp, synthetic construct
  source 1..20: mol_type = other DNA
aaacaaaagaaaaacacaaa

SEQ ID NO: 193434 - DNA, 20 bp, synthetic construct
  source 1..20: mol_type = other DNA
caaacaaaagaaaaacacaa

SEQ ID NO: 193435 - DNA, 20 bp, synthetic construct
  source 1..20: mol_type = other DNA
ccaaacaaaagaaaaacaca

SEQ ID NO: 193436 - DNA, 20 bp, synthetic construct
  source 1..20: mol_type = other DNA
cccaaacaaaagaaaaacac

SEQ ID NO: 193437 - DNA, 20 bp, synthetic construct
  source 1..20: mol_type = other DNA
ccccaaacaaaagaaaaaca

SEQ ID NO: 193438 - DNA, 20 bp, synthetic construct
  source 1..20: mol_type = other DNA
cccccaaacaaaagaaaaac

SEQ ID NO: 193439 - DNA, 20 bp, synthetic construct
  source 1..20: mol_type = other DNA
ccccccaaacaaaagaaaaa

SEQ ID NO: 193440 - DNA, 20 bp, synthetic construct
  source 1..20: mol_type = other DNA
tccccccaaacaaaagaaaa

SEQ ID NO: 193441 - DNA, 20 bp, synthetic construct
  source 1..20: mol_type = other DNA
atccccccaaacaaaagaaa

SEQ ID NO: 193442 - DNA, 20 bp, synthetic construct
  source 1..20: mol_type = other DNA
catccccccaaacaaaagaa

SEQ ID NO: 193443 - DNA, 20 bp, synthetic construct
  source 1..20: mol_type = other DNA
ccatccccccaaacaaaaga

SEQ ID NO: 193444 - DNA, 20 bp, synthetic construct
  source 1..20: mol_type = other DNA
tccatccccccaaacaaaag

SEQ ID NO: 193445 - DNA, 20 bp, synthetic construct
  source 1..20: mol_type = other DNA
atccatccccccaaacaaaa

SEQ ID NO: 193446 - DNA, 20 bp, synthetic construct
  source 1..20: mol_type = other DNA
aatccatccccccaaacaaa

SEQ ID NO: 193447 - DNA, 20 bp, synthetic construct
  source 1..20: mol_type = other DNA
aaatccatccccccaaacaa

SEQ ID NO: 193448 - DNA, 20 bp, synthetic construct
  source 1..20: mol_type = other DNA
caaatccatccccccaaaca

SEQ ID NO: 193449 - DNA, 20 bp, synthetic construct
  source 1..20: mol_type = other DNA
ccaaatccatccccccaaac

SEQ ID NO: 193450 - DNA, 20 bp, synthetic construct
  source 1..20: mol_type = other DNA
accaaatccatccccccaaa

SEQ ID NO: 193451 - DNA, 20 bp, synthetic construct
  source 1..20: mol_type = other DNA
aaccaaatccatccccccaa

SEQ ID NO: 193452 - DNA, 20 bp, synthetic construct
  source 1..20: mol_type = other DNA
aaaccaaatccatcccccca

SEQ ID NO: 193453 - DNA, 20 bp, synthetic construct
  source 1..20: mol_type = other DNA
gaaaccaaatccatcccccc

SEQ ID NO: 193454 - DNA, 20 bp, synthetic construct
  source 1..20: mol_type = other DNA
ggaaaccaaatccatccccc

SEQ ID NO: 193455 - DNA, 20 bp, synthetic construct
  source 1..20: mol_type = other DNA
gggaaaccaaatccatcccc

SEQ ID NO: 193456 - DNA, 20 bp, synthetic construct
  source 1..20: mol_type = other DNA
ggggaaaccaaatccatccc

SEQ ID NO: 193457 - DNA, 20 bp, synthetic construct
  source 1..20: mol_type = other DNA
gggggaaaccaaatccatcc

SEQ ID NO: 193458 - DNA, 20 bp, synthetic construct
  source 1..20: mol_type = other DNA
cgggggaaaccaaatccatc

SEQ ID NO: 193459 - DNA, 20 bp, synthetic construct
  source 1..20: mol_type = other DNA
tcgggggaaaccaaatccat

SEQ ID NO: 193460 - DNA, 20 bp, synthetic construct
  source 1..20: mol_type = other DNA
ctcgggggaaaccaaatcca

SEQ ID NO: 193461 - DNA, 20 bp, synthetic construct
  source 1..20: mol_type = other DNA
gctcgggggaaaccaaatcc

SEQ ID NO: 193462 - DNA, 20 bp, synthetic construct
  source 1..20: mol_type = other DNA
ggctcgggggaaaccaaatc

SEQ ID NO: 193463 - DNA, 20 bp, synthetic construct
  source 1..20: mol_type = other DNA
gggctcgggggaaaccaaat

SEQ ID NO: 193464 - DNA, 20 bp, synthetic construct
  source 1..20: mol_type = other DNA
agggctcgggggaaaccaaa

SEQ ID NO: 193465 - DNA, 20 bp, synthetic construct
  source 1..20: mol_type = other DNA
gagggctcgggggaaaccaa

SEQ ID NO: 193466 - DNA, 20 bp, synthetic construct
  source 1..20: mol_type = other DNA
agagggctcgggggaaacca

SEQ ID NO: 193467 - DNA, 20 bp, synthetic construct
  source 1..20: mol_type = other DNA
cagagggctcgggggaaacc

SEQ ID NO: 193468 - DNA, 20 bp, synthetic construct
  source 1..20: mol_type = other DNA
acagagggctcgggggaaac

SEQ ID NO: 193469 - DNA, 20 bp, synthetic construct
  source 1..20: mol_type = other DNA
gacagagggctcgggggaaa

SEQ ID NO: 193470 - DNA, 20 bp, synthetic construct
  source 1..20: mol_type = other DNA
ggacagagggctcgggggaa

SEQ ID NO: 193471 - DNA, 20 bp, synthetic construct
  source 1..20: mol_type = other DNA
aggacagagggctcggggga

SEQ ID NO: 193472 - DNA, 20 bp, synthetic construct
  source 1..20: mol_type = other DNA
gaggacagagggctcggggg

SEQ ID NO: 193473 - DNA, 20 bp, synthetic construct
  source 1..20: mol_type = other DNA
ggaggacagagggctcgggg

SEQ ID NO: 193474 - DNA, 20 bp, synthetic construct
  source 1..20: mol_type = other DNA
aggaggacagagggctcggg

SEQ ID NO: 193475 - DNA, 20 bp, synthetic construct
  source 1..20: mol_type = other DNA
caggaggacagagggctcgg

SEQ ID NO: 193476 - DNA, 20 bp, synthetic construct
  source 1..20: mol_type = other DNA
acaggaggacagagggctcg

SEQ ID NO: 193477 - DNA, 20 bp, synthetic construct
  source 1..20: mol_type = other DNA
gacaggaggacagagggctc

SEQ ID NO: 193478 - DNA, 20 bp, synthetic construct
  source 1..20: mol_type = other DNA
tgacaggaggacagagggct

SEQ ID NO: 193479 - DNA, 20 bp, synthetic construct
  source 1..20: mol_type = other DNA
gtgacaggaggacagagggc

SEQ ID NO: 193480 - DNA, 20 bp, synthetic construct
  source 1..20: mol_type = other DNA
ggtgacaggaggacagaggg

SEQ ID NO: 193481 - DNA, 20 bp, synthetic construct
  source 1..20: mol_type = other DNA
aggtgacaggaggacagagg

SEQ ID NO: 193482 - DNA, 20 bp, synthetic construct
  source 1..20: mol_type = other DNA
caggtgacaggaggacagag

SEQ ID NO: 193483 - DNA, 20 bp, synthetic construct
  source 1..20: mol_type = other DNA
ccaggtgacaggaggacaga

SEQ ID NO: 193484 - DNA, 20 bp, synthetic construct
  source 1..20: mol_type = other DNA
gccaggtgacaggaggacag

SEQ ID NO: 193485 - DNA, 20 bp, synthetic construct
  source 1..20: mol_type = other DNA
agccaggtgacaggaggaca

SEQ ID NO: 193486 - DNA, 20 bp, synthetic construct
  source 1..20: mol_type = other DNA
cagccaggtgacaggaggac

SEQ ID NO: 193487 - DNA, 20 bp, synthetic construct
  source 1..20: mol_type = other DNA
ccagccaggtgacaggagga

SEQ ID NO: 193488 - DNA, 20 bp, synthetic construct
  source 1..20: mol_type = other DNA
accagccaggtgacaggagg

SEQ ID NO: 193489 - DNA, 20 bp, synthetic construct
  source 1..20: mol_type = other DNA
caccagccaggtgacaggag

SEQ ID NO: 193490 - DNA, 20 bp, synthetic construct
  source 1..20: mol_type = other DNA
gcaccagccaggtgacagga

SEQ ID NO: 193491 - DNA, 20 bp, synthetic construct
  source 1..20: mol_type = other DNA
agcaccagccaggtgacagg

SEQ ID NO: 193492 - DNA, 20 bp, synthetic construct
  source 1..20: mol_type = other DNA
gagcaccagccaggtgacag

SEQ ID NO: 193493 - DNA, 20 bp, synthetic construct
  source 1..20: mol_type = other DNA
cgagcaccagccaggtgaca

SEQ ID NO: 193494 - DNA, 20 bp, synthetic construct
  source 1..20: mol_type = other DNA
ccgagcaccagccaggtgac

SEQ ID NO: 193495 - DNA, 20 bp, synthetic construct
  source 1..20: mol_type = other DNA
gccgagcaccagccaggtga

SEQ ID NO: 193496 - DNA, 20 bp, synthetic construct
  source 1..20: mol_type = other DNA
tgccgagcaccagccaggtg

SEQ ID NO: 193497 - DNA, 20 bp, synthetic construct
  source 1..20: mol_type = other DNA
ttgccgagcaccagccaggt

SEQ ID NO: 193498 - DNA, 20 bp, synthetic construct
  source 1..20: mol_type = other DNA
attgccgagcaccagccagg

SEQ ID NO: 193499 - DNA, 20 bp, synthetic construct
  source 1..20: mol_type = other DNA
cattgccgagcaccagccag

SEQ ID NO: 193500 - DNA, 20 bp, synthetic construct
  source 1..20: mol_type = other DNA
acattgccgagcaccagcca

SEQ ID NO: 193501 - DNA, 20 bp, synthetic construct
  source 1..20: mol_type = other DNA
aacattgccgagcaccagcc

SEQ ID NO: 193502 - DNA, 20 bp, synthetic construct
  source 1..20: mol_type = other DNA
caacattgccgagcaccagc

SEQ ID NO: 193503 - DNA, 20 bp, synthetic construct
  source 1..20: mol_type = other DNA
tcaacattgccgagcaccag

SEQ ID NO: 193504 - DNA, 20 bp, synthetic construct
  source 1..20: mol_type = other DNA
gtcaacattgccgagcacca

SEQ ID NO: 193505 - DNA, 20 bp, synthetic construct
  source 1..20: mol_type = other DNA
ggtcaacattgccgagcacc

SEQ ID NO: 193506 - DNA, 20 bp, synthetic construct
  source 1..20: mol_type = other DNA
tggtcaacattgccgagcac

SEQ ID NO: 193507 - DNA, 20 bp, synthetic construct
  source 1..20: mol_type = other DNA
ctggtcaacattgccgagca

SEQ ID NO: 193508 - DNA, 20 bp, synthetic construct
  source 1..20: mol_type = other DNA
gctggtcaacattgccgagc

SEQ ID NO: 193509 - DNA, 20 bp, synthetic construct
  source 1..20: mol_type = other DNA
agctggtcaacattgccgag

SEQ ID NO: 193510 - DNA, 20 bp, synthetic construct
  source 1..20: mol_type = other DNA
cagctggtcaacattgccga

SEQ ID NO: 193511 - DNA, 20 bp, synthetic construct
  source 1..20: mol_type = other DNA
gcagctggtcaacattgccg

SEQ ID NO: 193512 - DNA, 20 bp, synthetic construct
  source 1..20: mol_type = other DNA
ggcagctggtcaacattgcc

SEQ ID NO: 193513 - DNA, 20 bp, synthetic construct
  source 1..20: mol_type = other DNA
aggcagctggtcaacattgc

SEQ ID NO: 193514 - DNA, 20 bp, synthetic construct
  source 1..20: mol_type = other DNA
caggcagctggtcaacattg

SEQ ID NO: 193515 - DNA, 20 bp, synthetic construct
  source 1..20: mol_type = other DNA
ccaggcagctggtcaacatt

SEQ ID NO: 193516 - DNA, 20 bp, synthetic construct
  source 1..20: mol_type = other DNA
gccaggcagctggtcaacat

SEQ ID NO: 193517 - DNA, 20 bp, synthetic construct
  source 1..20: mol_type = other DNA
agccaggcagctggtcaaca

SEQ ID NO: 193518 - DNA, 20 bp, synthetic construct
  source 1..20: mol_type = other DNA
cagccaggcagctggtcaac

SEQ ID NO: 193519 - DNA, 20 bp, synthetic construct
  source 1..20: mol_type = other DNA
ccagccaggcagctggtcaa

SEQ ID NO: 193520 - DNA, 20 bp, synthetic construct
  source 1..20: mol_type = other DNA
tccagccaggcagctggtca

SEQ ID NO: 193521 - DNA, 20 bp, synthetic construct
  source 1..20: mol_type = other DNA
ctccagccaggcagctggtc

SEQ ID NO: 193522 - DNA, 20 bp, synthetic construct
  source 1..20: mol_type = other DNA
actccagccaggcagctggt

SEQ ID NO: 193523 - DNA, 20 bp, synthetic construct
  source 1..20: mol_type = other DNA
aactccagccaggcagctgg

SEQ ID NO: 193524 - DNA, 20 bp, synthetic construct
  source 1..20: mol_type = other DNA
caactccagccaggcagctg

SEQ ID NO: 193525 - DNA, 20 bp, synthetic construct
  source 1..20: mol_type = other DNA
ccaactccagccaggcagct

SEQ ID NO: 193526 - DNA, 20 bp, synthetic construct
  source 1..20: mol_type = other DNA
gccaactccagccaggcagc

SEQ ID NO: 193527 - DNA, 20 bp, synthetic construct
  source 1..20: mol_type = other DNA
tgccaactccagccaggcag

SEQ ID NO: 193528 - DNA, 20 bp, synthetic construct
  source 1..20: mol_type = other DNA
ctgccaactccagccaggca

SEQ ID NO: 193529 - DNA, 20 bp, synthetic construct
  source 1..20: mol_type = other DNA
actgccaactccagccaggc

SEQ ID NO: 193530 - DNA, 20 bp, synthetic construct
  source 1..20: mol_type = other DNA
cactgccaactccagccagg

SEQ ID NO: 193531 - DNA, 20 bp, synthetic construct
  source 1..20: mol_type = other DNA
ccactgccaactccagccag

SEQ ID NO: 193532 - DNA, 20 bp, synthetic construct
  source 1..20: mol_type = other DNA
gccactgccaactccagcca

SEQ ID NO: 193533 - DNA, 20 bp, synthetic construct
  source 1..20: mol_type = other DNA
agccactgccaactccagcc

SEQ ID NO: 193534 - DNA, 20 bp, synthetic construct
  source 1..20: mol_type = other DNA
tagccactgccaactccagc

SEQ ID NO: 193535 - DNA, 20 bp, synthetic construct
  source 1..20: mol_type = other DNA
ttagccactgccaactccag

SEQ ID NO: 193536 - DNA, 20 bp, synthetic construct
  source 1..20: mol_type = other DNA
cttagccactgccaactcca

SEQ ID NO: 193537 - DNA, 20 bp, synthetic construct
  source 1..20: mol_type = other DNA
ccttagccactgccaactcc

SEQ ID NO: 193538 - DNA, 20 bp, synthetic construct
  source 1..20: mol_type = other DNA
gccttagccactgccaactc

SEQ ID NO: 193539 - DNA, 20 bp, synthetic construct
  source 1..20: mol_type = other DNA
agccttagccactgccaact

SEQ ID NO: 193540 - DNA, 20 bp, synthetic construct
  source 1..20: mol_type = other DNA
cagccttagccactgccaac

SEQ ID NO: 193541 - DNA, 20 bp, synthetic construct
  source 1..20: mol_type = other DNA
acagccttagccactgccaa

SEQ ID NO: 193542 - DNA, 20 bp, synthetic construct
  source 1..20: mol_type = other DNA
cacagccttagccactgcca

SEQ ID NO: 193543 - DNA, 20 bp, synthetic construct
  source 1..20: mol_type = other DNA
tcacagccttagccactgcc

SEQ ID NO: 193544 - DNA, 20 bp, synthetic construct
  source 1..20: mol_type = other DNA
gtcacagccttagccactgc

SEQ ID NO: 193545 - DNA, 20 bp, synthetic construct
  source 1..20: mol_type = other DNA
tgtcacagccttagccactg

SEQ ID NO: 193546 - DNA, 20 bp, synthetic construct
  source 1..20: mol_type = other DNA
ctgtcacagccttagccact

SEQ ID NO: 193547 - DNA, 20 bp, synthetic construct
  source 1..20: mol_type = other DNA
gctgtcacagccttagccac

SEQ ID NO: 193548 - DNA, 20 bp, synthetic construct
  source 1..20: mol_type = other DNA
agctgtcacagccttagcca

SEQ ID NO: 193549 - DNA, 20 bp, synthetic construct
  source 1..20: mol_type = other DNA
tagctgtcacagccttagcc

SEQ ID NO: 193550 - DNA, 20 bp, synthetic construct
  source 1..20: mol_type = other DNA
ttagctgtcacagccttagc

SEQ ID NO: 193551 - DNA, 20 bp, synthetic construct
  source 1..20: mol_type = other DNA
gttagctgtcacagccttag

SEQ ID NO: 193552 - DNA, 20 bp, synthetic construct
  source 1..20: mol_type = other DNA
tgttagctgtcacagcctta

SEQ ID NO: 193553 - DNA, 20 bp, synthetic construct
  source 1..20: mol_type = other DNA
atgttagctgtcacagcctt

SEQ ID NO: 193554 - DNA, 20 bp, synthetic construct
  source 1..20: mol_type = other DNA
catgttagctgtcacagcct

SEQ ID NO: 193555 - DNA, 20 bp, synthetic construct
  source 1..20: mol_type = other DNA
acatgttagctgtcacagcc

SEQ ID NO: 193556 - DNA, 20 bp, synthetic construct
  source 1..20: mol_type = other DNA
aacatgttagctgtcacagc

SEQ ID NO: 193557 - DNA, 20 bp, synthetic construct
  source 1..20: mol_type = other DNA
gaacatgttagctgtcacag

SEQ ID NO: 193558 - DNA, 20 bp, synthetic construct
  source 1..20: mol_type = other DNA
ggaacatgttagctgtcaca

SEQ ID NO: 193559 - DNA, 20 bp, synthetic construct
  source 1..20: mol_type = other DNA
aggaacatgttagctgtcac

SEQ ID NO: 193560 - DNA, 20 bp, synthetic construct
  source 1..20: mol_type = other DNA
caggaacatgttagctgtca

SEQ ID NO: 193561 - DNA, 20 bp, synthetic construct
  source 1..20: mol_type = other DNA
tcaggaacatgttagctgtc

SEQ ID NO: 193562 - DNA, 20 bp, synthetic construct
  source 1..20: mol_type = other DNA
ctcaggaacatgttagctgt

SEQ ID NO: 193563 - DNA, 20 bp, synthetic construct
  source 1..20: mol_type = other DNA
actcaggaacatgttagctg

SEQ ID NO: 193564 - DNA, 20 bp, synthetic construct
  source 1..20: mol_type = other DNA
gactcaggaacatgttagct

SEQ ID NO: 193565 - DNA, 20 bp, synthetic construct
  source 1..20: mol_type = other DNA
ggactcaggaacatgttagc

SEQ ID NO: 193566 - DNA, 20 bp, synthetic construct
  source 1..20: mol_type = other DNA
aggactcaggaacatgttag

SEQ ID NO: 193567 - DNA, 20 bp, synthetic construct
  source 1..20: mol_type = other DNA
gaggactcaggaacatgtta

SEQ ID NO: 193568 - DNA, 20 bp, synthetic construct
  source 1..20: mol_type = other DNA
agaggactcaggaacatgtt

SEQ ID NO: 193569 - DNA, 20 bp, synthetic construct
  source 1..20: mol_type = other DNA
gagaggactcaggaacatgt

SEQ ID NO: 193570 - DNA, 20 bp, synthetic construct
  source 1..20: mol_type = other DNA
tgagaggactcaggaacatg

SEQ ID NO: 193571 - DNA, 20 bp, synthetic construct
  source 1..20: mol_type = other DNA
atgagaggactcaggaacat

SEQ ID NO: 193572 - DNA, 20 bp, synthetic construct
  source 1..20: mol_type = other DNA
aatgagaggactcaggaaca

SEQ ID NO: 193573 - DNA, 20 bp, synthetic construct
  source 1..20: mol_type = other DNA
aaatgagaggactcaggaac

SEQ ID NO: 193574 - DNA, 20 bp, synthetic construct
  source 1..20: mol_type = other DNA
gaaatgagaggactcaggaa

SEQ ID NO: 193575 - DNA, 20 bp, synthetic construct
  source 1..20: mol_type = other DNA
agaaatgagaggactcagga

SEQ ID NO: 193576 - DNA, 20 bp, synthetic construct
  source 1..20: mol_type = other DNA
aagaaatgagaggactcagg

SEQ ID NO: 193577 - DNA, 20 bp, synthetic construct
  source 1..20: mol_type = other DNA
gaagaaatgagaggactcag

SEQ ID NO: 193578 - DNA, 20 bp, synthetic construct
  source 1..20: mol_type = other DNA
tgaagaaatgagaggactca

SEQ ID NO: 193579 - DNA, 20 bp, synthetic construct
  source 1..20: mol_type = other DNA
gtgaagaaatgagaggactc

SEQ ID NO: 193580 - DNA, 20 bp, synthetic construct
  source 1..20: mol_type = other DNA
ggtgaagaaatgagaggact

SEQ ID NO: 193581 - DNA, 20 bp, synthetic construct
  source 1..20: mol_type = other DNA
tggtgaagaaatgagaggac

SEQ ID NO: 193582 - DNA, 20 bp, synthetic construct
  source 1..20: mol_type = other DNA
atggtgaagaaatgagagga

SEQ ID NO: 193583 - DNA, 20 bp, synthetic construct
  source 1..20: mol_type = other DNA
tatggtgaagaaatgagagg

SEQ ID NO: 193584 - DNA, 20 bp, synthetic construct
  source 1..20: mol_type = other DNA
ttatggtgaagaaatgagag

SEQ ID NO: 193585 - DNA, 20 bp, synthetic construct
  source 1..20: mol_type = other DNA
attatggtgaagaaatgaga

SEQ ID NO: 193586 - DNA, 20 bp, synthetic construct
  source 1..20: mol_type = other DNA
cattatggtgaagaaatgag

SEQ ID NO: 193587 - DNA, 20 bp, synthetic construct
  source 1..20: mol_type = other DNA
gcattatggtgaagaaatga

SEQ ID NO: 193588 - DNA, 20 bp, synthetic construct
  source 1..20: mol_type = other DNA
ggcattatggtgaagaaatg

SEQ ID NO: 193589 - DNA, 20 bp, synthetic construct
  source 1..20: mol_type = other DNA
gggcattatggtgaagaaat

SEQ ID NO: 193590 - DNA, 20 bp, synthetic construct
  source 1..20: mol_type = other DNA
agggcattatggtgaagaaa

SEQ ID NO: 193591 - DNA, 20 bp, synthetic construct
  source 1..20: mol_type = other DNA
cagggcattatggtgaagaa

SEQ ID NO: 193592 - DNA, 20 bp, synthetic construct
  source 1..20: mol_type = other DNA
acagggcattatggtgaaga

SEQ ID NO: 193593 - DNA, 20 bp, synthetic construct
  source 1..20: mol_type = other DNA
aacagggcattatggtgaag

SEQ ID NO: 193594 - DNA, 20 bp, synthetic construct
  source 1..20: mol_type = other DNA
caacagggcattatggtgaa

SEQ ID NO: 193595 - DNA, 20 bp, synthetic construct
  source 1..20: mol_type = other DNA
tcaacagggcattatggtga

SEQ ID NO: 193596 - DNA, 20 bp, synthetic construct
  source 1..20: mol_type = other DNA
ctcaacagggcattatggtg

SEQ ID NO: 193597 - DNA, 20 bp, synthetic construct
  source 1..20: mol_type = other DNA
actcaacagggcattatggt

SEQ ID NO: 193598 - DNA, 20 bp, synthetic construct
  source 1..20: mol_type = other DNA
aactcaacagggcattatgg

SEQ ID NO: 193599 - DNA, 20 bp, synthetic construct
  source 1..20: mol_type = other DNA
aaactcaacagggcattatg

SEQ ID NO: 193600 - DNA, 20 bp, synthetic construct
  source 1..20: mol_type = other DNA
caaactcaacagggcattat

SEQ ID NO: 193601 - DNA, 20 bp, synthetic construct
  source 1..20: mol_type = other DNA
gcaaactcaacagggcatta

SEQ ID NO: 193602 - DNA, 20 bp, synthetic construct
  source 1..20: mol_type = other DNA
tgcaaactcaacagggcatt

SEQ ID NO: 193603 - DNA, 20 bp, synthetic construct
  source 1..20: mol_type = other DNA
ctgcaaactcaacagggcat

SEQ ID NO: 193604 - DNA, 20 bp, synthetic construct
  source 1..20: mol_type = other DNA
tctgcaaactcaacagggca

SEQ ID NO: 193605 - DNA, 20 bp, synthetic construct
  source 1..20: mol_type = other DNA
atctgcaaactcaacagggc

SEQ ID NO: 193606 - DNA, 20 bp, synthetic construct
  source 1..20: mol_type = other DNA
tatctgcaaactcaacaggg

SEQ ID NO: 193607 - DNA, 20 bp, synthetic construct
  source 1..20: mol_type = other DNA
gtatctgcaaactcaacagg

SEQ ID NO: 193608 - DNA, 20 bp, synthetic construct
  source 1..20: mol_type = other DNA
agtatctgcaaactcaacag

SEQ ID NO: 193609 - DNA, 20 bp, synthetic construct
  source 1..20: mol_type = other DNA
cagtatctgcaaactcaaca

SEQ ID NO: 193610 - DNA, 20 bp, synthetic construct
  source 1..20: mol_type = other DNA
acagtatctgcaaactcaac

SEQ ID NO: 193611 - DNA, 20 bp, synthetic construct
  source 1..20: mol_type = other DNA
gacagtatctgcaaactcaa

SEQ ID NO: 193612 - DNA, 20 bp, synthetic construct
  source 1..20: mol_type = other DNA
agacagtatctgcaaactca

SEQ ID NO: 193613 - DNA, 20 bp, synthetic construct
  source 1..20: mol_type = other DNA
gagacagtatctgcaaactc

SEQ ID NO: 193614 - DNA, 20 bp, synthetic construct
  source 1..20: mol_type = other DNA
agagacagtatctgcaaact

SEQ ID NO: 193615 - DNA, 20 bp, synthetic construct
  source 1..20: mol_type = other DNA
cagagacagtatctgcaaac

SEQ ID NO: 193616 - DNA, 20 bp, synthetic construct
  source 1..20: mol_type = other DNA
acagagacagtatctgcaaa

SEQ ID NO: 193617 - DNA, 20 bp, synthetic construct
  source 1..20: mol_type = other DNA
aacagagacagtatctgcaa

SEQ ID NO: 193618 - DNA, 20 bp, synthetic construct
  source 1..20: mol_type = other DNA
aaacagagacagtatctgca

SEQ ID NO: 193619 - DNA, 20 bp, synthetic construct
  source 1..20: mol_type = other DNA
aaaacagagacagtatctgc

SEQ ID NO: 193620 - DNA, 20 bp, synthetic construct
  source 1..20: mol_type = other DNA
aaaaacagagacagtatctg

SEQ ID NO: 193621 - DNA, 20 bp, synthetic construct
  source 1..20: mol_type = other DNA
taaaaacagagacagtatct

SEQ ID NO: 193622 - DNA, 20 bp, synthetic construct
  source 1..20: mol_type = other DNA
ataaaaacagagacagtatc

SEQ ID NO: 193623 - DNA, 20 bp, synthetic construct
  source 1..20: mol_type = other DNA
gataaaaacagagacagtat

SEQ ID NO: 193624 - DNA, 20 bp, synthetic construct
  source 1..20: mol_type = other DNA
agataaaaacagagacagta

SEQ ID NO: 193625 - DNA, 20 bp, synthetic construct
  source 1..20: mol_type = other DNA
gagataaaaacagagacagt

SEQ ID NO: 193626 - DNA, 20 bp, synthetic construct
  source 1..20: mol_type = other DNA
ggagataaaaacagagacag

SEQ ID NO: 193627 - DNA, 20 bp, synthetic construct
  source 1..20: mol_type = other DNA
gggagataaaaacagagaca

SEQ ID NO: 193628 - DNA, 20 bp, synthetic construct
  source 1..20: mol_type = other DNA
cgggagataaaaacagagac

SEQ ID NO: 193629 - DNA, 20 bp, synthetic construct
  source 1..20: mol_type = other DNA
ccgggagataaaaacagaga

SEQ ID NO: 193630 - DNA, 20 bp, synthetic construct
  source 1..20: mol_type = other DNA
cccgggagataaaaacagag

SEQ ID NO: 193631 - DNA, 20 bp, synthetic construct
  source 1..20: mol_type = other DNA
ccccgggagataaaaacaga

SEQ ID NO: 193632 - DNA, 20 bp, synthetic construct
  source 1..20: mol_type = other DNA
tccccgggagataaaaacag

SEQ ID NO: 193633 - DNA, 20 bp, synthetic construct
  source 1..20: mol_type = other DNA
ttccccgggagataaaaaca

SEQ ID NO: 193634 - DNA, 20 bp, synthetic construct
  source 1..20: mol_type = other DNA
tttccccgggagataaaaac

SEQ ID NO: 193635 - DNA, 20 bp, synthetic construct
  source 1..20: mol_type = other DNA
gtttccccgggagataaaaa

SEQ ID NO: 193636 - DNA, 20 bp, synthetic construct
  source 1..20: mol_type = other DNA
agtttccccgggagataaaa

SEQ ID NO: 193637 - DNA, 20 bp, synthetic construct
  source 1..20: mol_type = other DNA
cagtttccccgggagataaa

SEQ ID NO: 193638 - DNA, 20 bp, synthetic construct
  source 1..20: mol_type = other DNA
tcagtttccccgggagataa

SEQ ID NO: 193639 - DNA, 20 bp, synthetic construct
  source 1..20: mol_type = other DNA
ctcagtttccccgggagata

SEQ ID NO: 193640 - DNA, 20 bp, synthetic construct
  source 1..20: mol_type = other DNA
cctcagtttccccgggagat

SEQ ID NO: 193641 - DNA, 20 bp, synthetic construct
  source 1..20: mol_type = other DNA
gcctcagtttccccgggaga

SEQ ID NO: 193642 - DNA, 20 bp, synthetic construct
  source 1..20: mol_type = other DNA
agcctcagtttccccgggag

SEQ ID NO: 193643 - DNA, 20 bp, synthetic construct
  source 1..20: mol_type = other DNA
gagcctcagtttccccggga

SEQ ID NO: 193644 - DNA, 20 bp, synthetic construct
  source 1..20: mol_type = other DNA
tgagcctcagtttccccggg

SEQ ID NO: 193645 - DNA, 20 bp, synthetic construct
  source 1..20: mol_type = other DNA
ctgagcctcagtttccccgg

SEQ ID NO: 193646 - DNA, 20 bp, synthetic construct
  source 1..20: mol_type = other DNA
tctgagcctcagtttccccg

SEQ ID NO: 193647 - DNA, 20 bp, synthetic construct
  source 1..20: mol_type = other DNA
ctctgagcctcagtttcccc

SEQ ID NO: 193648 - DNA, 20 bp, synthetic construct
  source 1..20: mol_type = other DNA
actctgagcctcagtttccc

SEQ ID NO: 193649 - DNA, 20 bp, synthetic construct
  source 1..20: mol_type = other DNA
cactctgagcctcagtttcc

SEQ ID NO: 193650 - DNA, 20 bp, synthetic construct
  source 1..20: mol_type = other DNA
ccactctgagcctcagtttc

SEQ ID NO: 193651 - DNA, 20 bp, synthetic construct
  source 1..20: mol_type = other DNA
gccactctgagcctcagttt

SEQ ID NO: 193652 - DNA, 20 bp, synthetic construct
  source 1..20: mol_type = other DNA
agccactctgagcctcagtt

SEQ ID NO: 193653 - DNA, 20 bp, synthetic construct
  source 1..20: mol_type = other DNA
tagccactctgagcctcagt

SEQ ID NO: 193654 - DNA, 20 bp, synthetic construct
  source 1..20: mol_type = other DNA
ctagccactctgagcctcag

SEQ ID NO: 193655 - DNA, 20 bp, synthetic construct
  source 1..20: mol_type = other DNA
cctagccactctgagcctca

SEQ ID NO: 193656 - DNA, 20 bp, synthetic construct
  source 1..20: mol_type = other DNA
gcctagccactctgagcctc

SEQ ID NO: 193657 - DNA, 20 bp, synthetic construct
  source 1..20: mol_type = other DNA
ggcctagccactctgagcct

SEQ ID NO: 193658 - DNA, 20 bp, synthetic construct
  source 1..20: mol_type = other DNA
tggcctagccactctgagcc

SEQ ID NO: 193659 - DNA, 20 bp, synthetic construct
  source 1..20: mol_type = other DNA
gtggcctagccactctgagc

SEQ ID NO: 193660 - DNA, 20 bp, synthetic construct
  source 1..20: mol_type = other DNA
ggtggcctagccactctgag

SEQ ID NO: 193661 - DNA, 20 bp, synthetic construct
  source 1..20: mol_type = other DNA
aggtggcctagccactctga

SEQ ID NO: 193662 - DNA, 20 bp, synthetic construct
  source 1..20: mol_type = other DNA
aaggtggcctagccactctg

SEQ ID NO: 193663 - DNA, 20 bp, synthetic construct
  source 1..20: mol_type = other DNA
gaaggtggcctagccactct

SEQ ID NO: 193664 - DNA, 20 bp, synthetic construct
  source 1..20: mol_type = other DNA
ggaaggtggcctagccactc

SEQ ID NO: 193665 - DNA, 20 bp, synthetic construct
  source 1..20: mol_type = other DNA
gggaaggtggcctagccact

SEQ ID NO: 193666 - DNA, 20 bp, synthetic construct
  source 1..20: mol_type = other DNA
tgggaaggtggcctagccac

SEQ ID NO: 193667 - DNA, 20 bp, synthetic construct
  source 1..20: mol_type = other DNA
atgggaaggtggcctagcca

SEQ ID NO: 193668 - DNA, 20 bp, synthetic construct
  source 1..20: mol_type = other DNA
catgggaaggtggcctagcc

SEQ ID NO: 193669 - DNA, 20 bp, synthetic construct
  source 1..20: mol_type = other DNA
ccatgggaaggtggcctagc

SEQ ID NO: 193670 - DNA, 20 bp, synthetic construct
  source 1..20: mol_type = other DNA
accatgggaaggtggcctag

SEQ ID NO: 193671 - DNA, 20 bp, synthetic construct
  source 1..20: mol_type = other DNA
gaccatgggaaggtggccta

SEQ ID NO: 193672 - DNA, 20 bp, synthetic construct
  source 1..20: mol_type = other DNA
ggaccatgggaaggtggcct

SEQ ID NO: 193673 - DNA, 20 bp, synthetic construct
  source 1..20: mol_type = other DNA
gggaccatgggaaggtggcc

SEQ ID NO: 193674 - DNA, 20 bp, synthetic construct
  source 1..20: mol_type = other DNA
agggaccatgggaaggtggc

SEQ ID NO: 193675 - DNA, 20 bp, synthetic construct
  source 1..20: mol_type = other DNA
gagggaccatgggaaggtgg

SEQ ID NO: 193676 - DNA, 20 bp, synthetic construct
  source 1..20: mol_type = other DNA
tgagggaccatgggaaggtg

SEQ ID NO: 193677 - DNA, 20 bp, synthetic construct
  source 1..20: mol_type = other DNA
ctgagggaccatgggaaggt

SEQ ID NO: 193678 - DNA, 20 bp, synthetic construct
  source 1..20: mol_type = other DNA
gctgagggaccatgggaagg

SEQ ID NO: 193679 - DNA, 20 bp, synthetic construct
  source 1..20: mol_type = other DNA
agctgagggaccatgggaag

SEQ ID NO: 193680 - DNA, 20 bp, synthetic construct
  source 1..20: mol_type = other DNA
gagctgagggaccatgggaa

SEQ ID NO: 193681 - DNA, 20 bp, synthetic construct
  source 1..20: mol_type = other DNA
tgagctgagggaccatggga

SEQ ID NO: 193682 - DNA, 20 bp, synthetic construct
  source 1..20: mol_type = other DNA
atgagctgagggaccatggg

SEQ ID NO: 193683 - DNA, 20 bp, synthetic construct
  source 1..20: mol_type = other DNA
catgagctgagggaccatgg

SEQ ID NO: 193684 - DNA, 20 bp, synthetic construct
  source 1..20: mol_type = other DNA
tcatgagctgagggaccatg

SEQ ID NO: 193685 - DNA, 20 bp, synthetic construct
  source 1..20: mol_type = other DNA
ctcatgagctgagggaccat

SEQ ID NO: 193686 - DNA, 20 bp, synthetic construct
  source 1..20: mol_type = other DNA
cctcatgagctgagggacca

SEQ ID NO: 193687 - DNA, 20 bp, synthetic construct
  source 1..20: mol_type = other DNA
ccctcatgagctgagggacc

SEQ ID NO: 193688 - DNA, 20 bp, synthetic construct
  source 1..20: mol_type = other DNA
gccctcatgagctgagggac

SEQ ID NO: 193689 - DNA, 20 bp, synthetic construct
  source 1..20: mol_type = other DNA
ggccctcatgagctgaggga

SEQ ID NO: 193690 - DNA, 20 bp, synthetic construct
  source 1..20: mol_type = other DNA
tggccctcatgagctgaggg

SEQ ID NO: 193691 - DNA, 20 bp, synthetic construct
  source 1..20: mol_type = other DNA
gtggccctcatgagctgagg

SEQ ID NO: 193692 - DNA, 20 bp, synthetic construct
  source 1..20: mol_type = other DNA
tgtggccctcatgagctgag

SEQ ID NO: 193693 - DNA, 20 bp, synthetic construct
  source 1..20: mol_type = other DNA
gtgtggccctcatgagctga

SEQ ID NO: 193694 - DNA, 20 bp, synthetic construct
  source 1..20: mol_type = other DNA
tgtgtggccctcatgagctg

SEQ ID NO: 193695 - DNA, 20 bp, synthetic construct
  source 1..20: mol_type = other DNA
ctgtgtggccctcatgagct

SEQ ID NO: 193696 - DNA, 20 bp, synthetic construct
  source 1..20: mol_type = other DNA
cctgtgtggccctcatgagc

SEQ ID NO: 193697 - DNA, 20 bp, synthetic construct
  source 1..20: mol_type = other DNA
ccctgtgtggccctcatgag

SEQ ID NO: 193698 - DNA, 20 bp, synthetic construct
  source 1..20: mol_type = other DNA
gccctgtgtggccctcatga

SEQ ID NO: 193699 - DNA, 20 bp, synthetic construct
  source 1..20: mol_type = other DNA
tgccctgtgtggccctcatg

SEQ ID NO: 193700 - DNA, 20 bp, synthetic construct
  source 1..20: mol_type = other DNA
atgccctgtgtggccctcat

SEQ ID NO: 193701 - DNA, 20 bp, synthetic construct
  source 1..20: mol_type = other DNA
aatgccctgtgtggccctca

SEQ ID NO: 193702 - DNA, 20 bp, synthetic construct
  source 1..20: mol_type = other DNA
caatgccctgtgtggccctc

SEQ ID NO: 193703 - DNA, 20 bp, synthetic construct
  source 1..20: mol_type = other DNA
gcaatgccctgtgtggccct

SEQ ID NO: 193704 - DNA, 20 bp, synthetic construct
  source 1..20: mol_type = other DNA
cgcaatgccctgtgtggccc

SEQ ID NO: 193705 - DNA, 20 bp, synthetic construct
  source 1..20: mol_type = other DNA
ccgcaatgccctgtgtggcc

SEQ ID NO: 193706 - DNA, 20 bp, synthetic construct
  source 1..20: mol_type = other DNA
accgcaatgccctgtgtggc

SEQ ID NO: 193707 - DNA, 20 bp, synthetic construct
  source 1..20: mol_type = other DNA
caccgcaatgccctgtgtgg

SEQ ID NO: 193708 - DNA, 20 bp, synthetic construct
  source 1..20: mol_type = other DNA
ccaccgcaatgccctgtgtg

SEQ ID NO: 193709 - DNA, 20 bp, synthetic construct
  source 1..20: mol_type = other DNA
gccaccgcaatgccctgtgt

SEQ ID NO: 193710 - DNA, 20 bp, synthetic construct
  source 1..20: mol_type = other DNA
ggccaccgcaatgccctgtg

SEQ ID NO: 193711 - DNA, 20 bp, synthetic construct
  source 1..20: mol_type = other DNA
aggccaccgcaatgccctgt

SEQ ID NO: 193712 - DNA, 20 bp, synthetic construct
  source 1..20: mol_type = other DNA
aaggccaccgcaatgccctg

SEQ ID NO: 193713 - DNA, 20 bp, synthetic construct
  source 1..20: mol_type = other DNA
gaaggccaccgcaatgccct

SEQ ID NO: 193714 - DNA, 20 bp, synthetic construct
  source 1..20: mol_type = other DNA
agaaggccaccgcaatgccc

SEQ ID NO: 193715 - DNA, 20 bp, synthetic construct
  source 1..20: mol_type = other DNA
gagaaggccaccgcaatgcc

SEQ ID NO: 193716 - DNA, 20 bp, synthetic construct
  source 1..20: mol_type = other DNA
ggagaaggccaccgcaatgc

SEQ ID NO: 193717 - DNA, 20 bp, synthetic construct
  source 1..20: mol_type = other DNA
aggagaaggccaccgcaatg

SEQ ID NO: 193718 - DNA, 20 bp, synthetic construct
  source 1..20: mol_type = other DNA
gaggagaaggccaccgcaat

SEQ ID NO: 193719 - DNA, 20 bp, synthetic construct
  source 1..20: mol_type = other DNA
tgaggagaaggccaccgcaa

SEQ ID NO: 193720 - DNA, 20 bp, synthetic construct
  source 1..20: mol_type = other DNA
ctgaggagaaggccaccgca

SEQ ID NO: 193721 - DNA, 20 bp, synthetic construct
  source 1..20: mol_type = other DNA
gctgaggagaaggccaccgc

SEQ ID NO: 193722 - DNA, 20 bp, synthetic construct
  source 1..20: mol_type = other DNA
ggctgaggagaaggccaccg

SEQ ID NO: 193723 - DNA, 20 bp, synthetic construct
  source 1..20: mol_type = other DNA
aggctgaggagaaggccacc

SEQ ID NO: 193724 - DNA, 20 bp, synthetic construct
  source 1..20: mol_type = other DNA
aaggctgaggagaaggccac

SEQ ID NO: 193725 - DNA, 20 bp, synthetic construct
  source 1..20: mol_type = other DNA
caaggctgaggagaaggcca

SEQ ID NO: 193726 - DNA, 20 bp, synthetic construct
  source 1..20: mol_type = other DNA
tcaaggctgaggagaaggcc

SEQ ID NO: 193727 - DNA, 20 bp, synthetic construct
  source 1..20: mol_type = other DNA
gtcaaggctgaggagaaggc

SEQ ID NO: 193728 - DNA, 20 bp, synthetic construct
  source 1..20: mol_type = other DNA
ggtcaaggctgaggagaagg

SEQ ID NO: 193729 - DNA, 20 bp, synthetic construct
  source 1..20: mol_type = other DNA
gggtcaaggctgaggagaag

SEQ ID NO: 193730 - DNA, 20 bp, synthetic construct
  source 1..20: mol_type = other DNA
agggtcaaggctgaggagaa

SEQ ID NO: 193731 - DNA, 20 bp, synthetic construct
  source 1..20: mol_type = other DNA
gagggtcaaggctgaggaga

SEQ ID NO: 193732 - DNA, 20 bp, synthetic construct
  source 1..20: mol_type = other DNA
ggagggtcaaggctgaggag

SEQ ID NO: 193733 - DNA, 20 bp, synthetic construct
  source 1..20: mol_type = other DNA
cggagggtcaaggctgagga

SEQ ID NO: 193734 - DNA, 20 bp, synthetic construct
  source 1..20: mol_type = other DNA
ccggagggtcaaggctgagg

SEQ ID NO: 193735 - DNA, 20 bp, synthetic construct
  source 1..20: mol_type = other DNA
gccggagggtcaaggctgag

SEQ ID NO: 193736 - DNA, 20 bp, synthetic construct
  source 1..20: mol_type = other DNA
ggccggagggtcaaggctga

SEQ ID NO: 193737 - DNA, 20 bp, synthetic construct
  source 1..20: mol_type = other DNA
gggccggagggtcaaggctg

SEQ ID NO: 193738 - DNA, 20 bp, synthetic construct
  source 1..20: mol_type = other DNA
ggggccggagggtcaaggct

SEQ ID NO: 193739 - DNA, 20 bp, synthetic construct
  source 1..20: mol_type = other DNA
tggggccggagggtcaaggc

SEQ ID NO: 193740 - DNA, 20 bp, synthetic construct
  source 1..20: mol_type = other DNA
ctggggccggagggtcaagg

SEQ ID NO: 193741 - DNA, 20 bp, synthetic construct
  source 1..20: mol_type = other DNA
gctggggccggagggtcaag

SEQ ID NO: 193742 - DNA, 20 bp, synthetic construct
  source 1..20: mol_type = other DNA
tgctggggccggagggtcaa

SEQ ID NO: 193743 - DNA, 20 bp, synthetic construct
  source 1..20: mol_type = other DNA
atgctggggccggagggtca

SEQ ID NO: 193744 - DNA, 20 bp, synthetic construct
  source 1..20: mol_type = other DNA
aatgctggggccggagggtc

SEQ ID NO: 193745 - DNA, 20 bp, synthetic construct
  source 1..20: mol_type = other DNA
caatgctggggccggagggt

SEQ ID NO: 193746 - DNA, 20 bp, synthetic construct
  source 1..20: mol_type = other DNA
gcaatgctggggccggaggg

SEQ ID NO: 193747 - DNA, 20 bp, synthetic construct
  source 1..20: mol_type = other DNA
agcaatgctggggccggagg

SEQ ID NO: 193748 - DNA, 20 bp, synthetic construct
  source 1..20: mol_type = other DNA
cagcaatgctggggccggag

SEQ ID NO: 193749 - DNA, 20 bp, synthetic construct
  source 1..20: mol_type = other DNA
gcagcaatgctggggccgga

SEQ ID NO: 193750 - DNA, 20 bp, synthetic construct
  source 1..20: mol_type = other DNA
ggcagcaatgctggggccgg

SEQ ID NO: 193751 - DNA, 20 bp, synthetic construct
  source 1..20: mol_type = other DNA
aggcagcaatgctggggccg

SEQ ID NO: 193752 - DNA, 20 bp, synthetic construct
  source 1..20: mol_type = other DNA
gaggcagcaatgctggggcc

SEQ ID NO: 193753 - DNA, 20 bp, synthetic construct
  source 1..20: mol_type = other DNA
tgaggcagcaatgctggggc

SEQ ID NO: 193754 - DNA, 20 bp, synthetic construct
  source 1..20: mol_type = other DNA
ttgaggcagcaatgctgggg

SEQ ID NO: 193755 - DNA, 20 bp, synthetic construct
  source 1..20: mol_type = other DNA
cttgaggcagcaatgctggg

SEQ ID NO: 193756 - DNA, 20 bp, synthetic construct
  source 1..20: mol_type = other DNA
ccttgaggcagcaatgctgg

SEQ ID NO: 193757 - DNA, 20 bp, synthetic construct
  source 1..20: mol_type = other DNA
cccttgaggcagcaatgctg

SEQ ID NO: 193758 - DNA, 20 bp, synthetic construct
  source 1..20: mol_type = other DNA
ccccttgaggcagcaatgct

SEQ ID NO: 193759 - DNA, 20 bp, synthetic construct
  source 1..20: mol_type = other DNA
accccttgaggcagcaatgc

SEQ ID NO: 193760 - DNA, 20 bp, synthetic construct
  source 1..20: mol_type = other DNA
gaccccttgaggcagcaatg

SEQ ID NO: 193761 - DNA, 20 bp, synthetic construct
  source 1..20: mol_type = other DNA
agaccccttgaggcagcaat

SEQ ID NO: 193762 - DNA, 20 bp, synthetic construct
  source 1..20: mol_type = other DNA
gagaccccttgaggcagcaa

SEQ ID NO: 193763 - DNA, 20 bp, synthetic construct
  source 1..20: mol_type = other DNA
ggagaccccttgaggcagca

SEQ ID NO: 193764 - DNA, 20 bp, synthetic construct
  source 1..20: mol_type = other DNA
aggagaccccttgaggcagc

SEQ ID NO: 193765 - DNA, 20 bp, synthetic construct
  source 1..20: mol_type = other DNA
gaggagaccccttgaggcag

SEQ ID NO: 193766 - DNA, 20 bp, synthetic construct
  source 1..20: mol_type = other DNA
agaggagaccccttgaggca

SEQ ID NO: 193767 - DNA, 20 bp, synthetic construct
  source 1..20: mol_type = other DNA
cagaggagaccccttgaggc

SEQ ID NO: 193768 - DNA, 20 bp, synthetic construct
  source 1..20: mol_type = other DNA
gcagaggagaccccttgagg

SEQ ID NO: 193769 - DNA, 20 bp, synthetic construct
  source 1..20: mol_type = other DNA
agcagaggagaccccttgag

SEQ ID NO: 193770 - DNA, 20 bp, synthetic construct
  source 1..20: mol_type = other DNA
cagcagaggagaccccttga

SEQ ID NO: 193771 - DNA, 20 bp, synthetic construct
  source 1..20: mol_type = other DNA
tcagcagaggagaccccttg

SEQ ID NO: 193772 - DNA, 20 bp, synthetic construct
  source 1..20: mol_type = other DNA
ctcagcagaggagacccctt

SEQ ID NO: 193773 - DNA, 20 bp, synthetic construct
  source 1..20: mol_type = other DNA
gctcagcagaggagacccct

SEQ ID NO: 193774 - DNA, 20 bp, synthetic construct
  source 1..20: mol_type = other DNA
ggctcagcagaggagacccc

SEQ ID NO: 193775 - DNA, 20 bp, synthetic construct
  source 1..20: mol_type = other DNA
cggctcagcagaggagaccc

SEQ ID NO: 193776 - DNA, 20 bp, synthetic construct
  source 1..20: mol_type = other DNA
acggctcagcagaggagacc

SEQ ID NO: 193777 - DNA, 20 bp, synthetic construct
  source 1..20: mol_type = other DNA
cacggctcagcagaggagac

SEQ ID NO: 193778 - DNA, 20 bp, synthetic construct
  source 1..20: mol_type = other DNA
gcacggctcagcagaggaga

SEQ ID NO: 193779 - DNA, 20 bp, synthetic construct
  source 1..20: mol_type = other DNA
tgcacggctcagcagaggag

SEQ ID NO: 193780 - DNA, 20 bp, synthetic construct
  source 1..20: mol_type = other DNA
gtgcacggctcagcagagga

SEQ ID NO: 193781 - DNA, 20 bp, synthetic construct
  source 1..20: mol_type = other DNA
ggtgcacggctcagcagagg

SEQ ID NO: 193782 - DNA, 20 bp, synthetic construct
  source 1..20: mol_type = other DNA
aggtgcacggctcagcagag

SEQ ID NO: 193783 - DNA, 20 bp, synthetic construct
  source 1..20: mol_type = other DNA
aaggtgcacggctcagcaga

SEQ ID NO: 193784 - DNA, 20 bp, synthetic construct
  source 1..20: mol_type = other DNA
gaaggtgcacggctcagcag

SEQ ID NO: 193785 - DNA, 20 bp, synthetic construct
  source 1..20: mol_type = other DNA
agaaggtgcacggctcagca

SEQ ID NO: 193786 - DNA, 20 bp, synthetic construct
  source 1..20: mol_type = other DNA
cagaaggtgcacggctcagc

SEQ ID NO: 193787 - DNA, 20 bp, synthetic construct
  source 1..20: mol_type = other DNA
gcagaaggtgcacggctcag

SEQ ID NO: 193788 - DNA, 20 bp, synthetic construct
  source 1..20: mol_type = other DNA
ggcagaaggtgcacggctca

SEQ ID NO: 193789 - DNA, 20 bp, synthetic construct
  source 1..20: mol_type = other DNA
aggcagaaggtgcacggctc

SEQ ID NO: 193790 - DNA, 20 bp, synthetic construct
  source 1..20: mol_type = other DNA
caggcagaaggtgcacggct

SEQ ID NO: 193791 - DNA, 20 bp, synthetic construct
  source 1..20: mol_type = other DNA
ccaggcagaaggtgcacggc

SEQ ID NO: 193792 - DNA, 20 bp, synthetic construct
  source 1..20: mol_type = other DNA
gccaggcagaaggtgcacgg

SEQ ID NO: 193793 - DNA, 20 bp, synthetic construct
  source 1..20: mol_type = other DNA
tgccaggcagaaggtgcacg

SEQ ID NO: 193794 - DNA, 20 bp, synthetic construct
  source 1..20: mol_type = other DNA
ctgccaggcagaaggtgcac

SEQ ID NO: 193795 - DNA, 20 bp, synthetic construct
  source 1..20: mol_type = other DNA
gctgccaggcagaaggtgca

SEQ ID NO: 193796 - DNA, 20 bp, synthetic construct
  source 1..20: mol_type = other DNA
agctgccaggcagaaggtgc

SEQ ID NO: 193797 - DNA, 20 bp, synthetic construct
  source 1..20: mol_type = other DNA
gagctgccaggcagaaggtg

SEQ ID NO: 193798 - DNA, 20 bp, synthetic construct
  source 1..20: mol_type = other DNA
ggagctgccaggcagaaggt

SEQ ID NO: 193799 - DNA, 20 bp, synthetic construct
  source 1..20: mol_type = other DNA
tggagctgccaggcagaagg

SEQ ID NO: 193800 - DNA, 20 bp, synthetic construct
  source 1..20: mol_type = other DNA
ttggagctgccaggcagaag

SEQ ID NO: 193801 - DNA, 20 bp, synthetic construct
  source 1..20: mol_type = other DNA
gttggagctgccaggcagaa

SEQ ID NO: 193802 - DNA, 20 bp, synthetic construct
  source 1..20: mol_type = other DNA
agttggagctgccaggcaga

SEQ ID NO: 193803 - DNA, 20 bp, synthetic construct
  source 1..20: mol_type = other DNA
gagttggagctgccaggcag

SEQ ID NO: 193804 - DNA, 20 bp, synthetic construct
  source 1..20: mol_type = other DNA
agagttggagctgccaggca

SEQ ID NO: 193805 - DNA, 20 bp, synthetic construct
  source 1..20: mol_type = other DNA
cagagttggagctgccaggc

SEQ ID NO: 193806 - DNA, 20 bp, synthetic construct
  source 1..20: mol_type = other DNA
acagagttggagctgccagg

SEQ ID NO: 193807 - DNA, 20 bp, synthetic construct
  source 1..20: mol_type = other DNA
cacagagttggagctgccag

SEQ ID NO: 193808 - DNA, 20 bp, synthetic construct
  source 1..20: mol_type = other DNA
ccacagagttggagctgcca

SEQ ID NO: 193809 - DNA, 20 bp, synthetic construct
  source 1..20: mol_type = other DNA
gccacagagttggagctgcc

SEQ ID NO: 193810 - DNA, 20 bp, synthetic construct
  source 1..20: mol_type = other DNA
agccacagagttggagctgc

SEQ ID NO: 193811 - DNA, 20 bp, synthetic construct
  source 1..20: mol_type = other DNA
cagccacagagttggagctg

SEQ ID NO: 193812 - DNA, 20 bp, synthetic construct
  source 1..20: mol_type = other DNA
acagccacagagttggagct

SEQ ID NO: 193813 - DNA, 20 bp, synthetic construct
  source 1..20: mol_type = other DNA
cacagccacagagttggagc

SEQ ID NO: 193814 - DNA, 20 bp, synthetic construct
  source 1..20: mol_type = other DNA
acacagccacagagttggag

SEQ ID NO: 193815 - DNA, 20 bp, synthetic construct
  source 1..20: mol_type = other DNA
aacacagccacagagttgga

SEQ ID NO: 193816 - DNA, 20 bp, synthetic construct
  source 1..20: mol_type = other DNA
gaacacagccacagagttgg

SEQ ID NO: 193817 - DNA, 20 bp, synthetic construct
  source 1..20: mol_type = other DNA
tgaacacagccacagagttg

SEQ ID NO: 193818 - DNA, 20 bp, synthetic construct
  source 1..20: mol_type = other DNA
ctgaacacagccacagagtt

SEQ ID NO: 193819 - DNA, 20 bp, synthetic construct
  source 1..20: mol_type = other DNA
actgaacacagccacagagt

SEQ ID NO: 193820 - DNA, 20 bp, synthetic construct
  source 1..20: mol_type = other DNA
cactgaacacagccacagag

SEQ ID NO: 193821 - DNA, 20 bp, synthetic construct
  source 1..20: mol_type = other DNA
ccactgaacacagccacaga

SEQ ID NO: 193822 - DNA, 20 bp, synthetic construct
  source 1..20: mol_type = other DNA
gccactgaacacagccacag

SEQ ID NO: 193823 - DNA, 20 bp, synthetic construct
  source 1..20: mol_type = other DNA
agccactgaacacagccaca

SEQ ID NO: 193824 - DNA, 20 bp, synthetic construct
  source 1..20: mol_type = other DNA
gagccactgaacacagccac

SEQ ID NO: 193825 - DNA, 20 bp, synthetic construct
  source 1..20: mol_type = other DNA
tgagccactgaacacagcca

SEQ ID NO: 193826 - DNA, 20 bp, synthetic construct
  source 1..20: mol_type = other DNA
ctgagccactgaacacagcc

SEQ ID NO: 193827 - DNA, 20 bp, synthetic construct
  source 1..20: mol_type = other DNA
gctgagccactgaacacagc

SEQ ID NO: 193828 - DNA, 20 bp, synthetic construct
  source 1..20: mol_type = other DNA
tgctgagccactgaacacag

SEQ ID NO: 193829 - DNA, 20 bp, synthetic construct
  source 1..20: mol_type = other DNA
gtgctgagccactgaacaca

SEQ ID NO: 193830 - DNA, 20 bp, synthetic construct
  source 1..20: mol_type = other DNA
agtgctgagccactgaacac

SEQ ID NO: 193831 - DNA, 20 bp, synthetic construct
  source 1..20: mol_type = other DNA
cagtgctgagccactgaaca

SEQ ID NO: 193832 - DNA, 20 bp, synthetic construct
  source 1..20: mol_type = other DNA
gcagtgctgagccactgaac

SEQ ID NO: 193833 - DNA, 20 bp, synthetic construct
  source 1..20: mol_type = other DNA
ggcagtgctgagccactgaa

SEQ ID NO: 193834 - DNA, 20 bp, synthetic construct
  source 1..20: mol_type = other DNA
gggcagtgctgagccactga

SEQ ID NO: 193835 - DNA, 20 bp, synthetic construct
  source 1..20: mol_type = other DNA
ggggcagtgctgagccactg

SEQ ID NO: 193836 - DNA, 20 bp, synthetic construct
  source 1..20: mol_type = other DNA
aggggcagtgctgagccact

SEQ ID NO: 193837 - DNA, 20 bp, synthetic construct
  source 1..20: mol_type = other DNA
aaggggcagtgctgagccac

SEQ ID NO: 193838 - DNA, 20 bp, synthetic construct
  source 1..20: mol_type = other DNA
caaggggcagtgctgagcca

SEQ ID NO: 193839 - DNA, 20 bp, synthetic construct
  source 1..20: mol_type = other DNA
tcaaggggcagtgctgagcc

SEQ ID NO: 193840 - DNA, 20 bp, synthetic construct
  source 1..20: mol_type = other DNA
gtcaaggggcagtgctgagc

SEQ ID NO: 193841 - DNA, 20 bp, synthetic construct
  source 1..20: mol_type = other DNA
ggtcaaggggcagtgctgag

SEQ ID NO: 193842 - DNA, 20 bp, synthetic construct
  source 1..20: mol_type = other DNA
gggtcaaggggcagtgctga

SEQ ID NO: 193843 - DNA, 20 bp, synthetic construct
  source 1..20: mol_type = other DNA
agggtcaaggggcagtgctg

SEQ ID NO: 193844 - DNA, 20 bp, synthetic construct
  source 1..20: mol_type = other DNA
gagggtcaaggggcagtgct

SEQ ID NO: 193845 - DNA, 20 bp, synthetic construct
  source 1..20: mol_type = other DNA
ggagggtcaaggggcagtgc

SEQ ID NO: 193846 - DNA, 20 bp, synthetic construct
  source 1..20: mol_type = other DNA
gggagggtcaaggggcagtg

SEQ ID NO: 193847 - DNA, 20 bp, synthetic construct
  source 1..20: mol_type = other DNA
agggagggtcaaggggcagt

SEQ ID NO: 193848 - DNA, 20 bp, synthetic construct
  source 1..20: mol_type = other DNA
cagggagggtcaaggggcag

SEQ ID NO: 193849 - DNA, 20 bp, synthetic construct
  source 1..20: mol_type = other DNA
ccagggagggtcaaggggca

SEQ ID NO: 193850 - DNA, 20 bp, synthetic construct
  source 1..20: mol_type = other DNA
gccagggagggtcaaggggc

SEQ ID NO: 193851 - DNA, 20 bp, synthetic construct
  source 1..20: mol_type = other DNA
ggccagggagggtcaagggg

SEQ ID NO: 193852 - DNA, 20 bp, synthetic construct
  source 1..20: mol_type = other DNA
aggccagggagggtcaaggg

SEQ ID NO: 193853 - DNA, 20 bp, synthetic construct
  source 1..20: mol_type = other DNA
aaggccagggagggtcaagg

SEQ ID NO: 193854 - DNA, 20 bp, synthetic construct
  source 1..20: mol_type = other DNA
gaaggccagggagggtcaag

SEQ ID NO: 193855 - DNA, 20 bp, synthetic construct
  source 1..20: mol_type = other DNA
agaaggccagggagggtcaa

SEQ ID NO: 193856 - DNA, 20 bp, synthetic construct
  source 1..20: mol_type = other DNA
cagaaggccagggagggtca

SEQ ID NO: 193857 - DNA, 20 bp, synthetic construct
  source 1..20: mol_type = other DNA
gcagaaggccagggagggtc

SEQ ID NO: 193858 - DNA, 20 bp, synthetic construct
  source 1..20: mol_type = other DNA
cgcagaaggccagggagggt

SEQ ID NO: 193859 - DNA, 20 bp, synthetic construct
  source 1..20: mol_type = other DNA
ccgcagaaggccagggaggg

SEQ ID NO: 193860 - DNA, 20 bp, synthetic construct
  source 1..20: mol_type = other DNA
tccgcagaaggccagggagg

SEQ ID NO: 193861 - DNA, 20 bp, synthetic construct
  source 1..20: mol_type = other DNA
atccgcagaaggccagggag

SEQ ID NO: 193862 - DNA, 20 bp, synthetic construct
  source 1..20: mol_type = other DNA
catccgcagaaggccaggga

SEQ ID NO: 193863 - DNA, 20 bp, synthetic construct
  source 1..20: mol_type = other DNA
gcatccgcagaaggccaggg

SEQ ID NO: 193864 - DNA, 20 bp, synthetic construct
  source 1..20: mol_type = other DNA
ggcatccgcagaaggccagg

SEQ ID NO: 193865 - DNA, 20 bp, synthetic construct
  source 1..20: mol_type = other DNA
tggcatccgcagaaggccag

SEQ ID NO: 193866 - DNA, 20 bp, synthetic construct
  source 1..20: mol_type = other DNA
ctggcatccgcagaaggcca

SEQ ID NO: 193867 - DNA, 20 bp, synthetic construct
  source 1..20: mol_type = other DNA
tctggcatccgcagaaggcc

SEQ ID NO: 193868 - DNA, 20 bp, synthetic construct
  source 1..20: mol_type = other DNA
gtctggcatccgcagaaggc

SEQ ID NO: 193869 - DNA, 20 bp, synthetic construct
  source 1..20: mol_type = other DNA
agtctggcatccgcagaagg

SEQ ID NO: 193870 - DNA, 20 bp, synthetic construct
  source 1..20: mol_type = other DNA
cagtctggcatccgcagaag

SEQ ID NO: 193871 - DNA, 20 bp, synthetic construct
  source 1..20: mol_type = other DNA
ccagtctggcatccgcagaa

SEQ ID NO: 193872 - DNA, 20 bp, synthetic construct
  source 1..20: mol_type = other DNA
tccagtctggcatccgcaga

SEQ ID NO: 193873 - DNA, 20 bp, synthetic construct
  source 1..20: mol_type = other DNA
ctccagtctggcatccgcag

SEQ ID NO: 193874 - DNA, 20 bp, synthetic construct
  source 1..20: mol_type = other DNA
gctccagtctggcatccgca

SEQ ID NO: 193875 - DNA, 20 bp, synthetic construct
  source 1..20: mol_type = other DNA
tgctccagtctggcatccgc

SEQ ID NO: 193876 - DNA, 20 bp, synthetic construct
  source 1..20: mol_type = other DNA
gtgctccagtctggcatccg

SEQ ID NO: 193877 - DNA, 20 bp, synthetic construct
  source 1..20: mol_type = other DNA
agtgctccagtctggcatcc

SEQ ID NO: 193878 - DNA, 20 bp, synthetic construct
  source 1..20: mol_type = other DNA
gagtgctccagtctggcatc

SEQ ID NO: 193879 - DNA, 20 bp, synthetic construct
  source 1..20: mol_type = other DNA
agagtgctccagtctggcat

SEQ ID NO: 193880 - DNA, 20 bp, synthetic construct
  source 1..20: mol_type = other DNA
cagagtgctccagtctggca

SEQ ID NO: 193881 - DNA, 20 bp, synthetic construct
  source 1..20: mol_type = other DNA
tcagagtgctccagtctggc

SEQ ID NO: 193882 - DNA, 20 bp, synthetic construct
  source 1..20: mol_type = other DNA
gtcagagtgctccagtctgg

SEQ ID NO: 193883 - DNA, 20 bp, synthetic construct
  source 1..20: mol_type = other DNA
tgtcagagtgctccagtctg

SEQ ID NO: 193884 - DNA, 20 bp, synthetic construct
  source 1..20: mol_type = other DNA
ttgtcagagtgctccagtct

SEQ ID NO: 193885 - DNA, 20 bp, synthetic construct
  source 1..20: mol_type = other DNA
cttgtcagagtgctccagtc

SEQ ID NO: 193886 - DNA, 20 bp, synthetic construct
  source 1..20: mol_type = other DNA
ccttgtcagagtgctccagt

SEQ ID NO: 193887 - DNA, 20 bp, synthetic construct
  source 1..20: mol_type = other DNA
accttgtcagagtgctccag

SEQ ID NO: 193888 - DNA, 20 bp, synthetic construct
  source 1..20: mol_type = other DNA
gaccttgtcagagtgctcca

SEQ ID NO: 193889 - DNA, 20 bp, synthetic construct
  source 1..20: mol_type = other DNA
agaccttgtcagagtgctcc

SEQ ID NO: 193890 - DNA, 20 bp, synthetic construct
  source 1..20: mol_type = other DNA
cagaccttgtcagagtgctc

SEQ ID NO: 193891 - DNA, 20 bp, synthetic construct
  source 1..20: mol_type = other DNA
ccagaccttgtcagagtgct

SEQ ID NO: 193892 - DNA, 20 bp, synthetic construct
  source 1..20: mol_type = other DNA
cccagaccttgtcagagtgc

SEQ ID NO: 193893 - DNA, 20 bp, synthetic construct
  source 1..20: mol_type = other DNA
ccccagaccttgtcagagtg

SEQ ID NO: 193894 - DNA, 20 bp, synthetic construct
  source 1..20: mol_type = other DNA
accccagaccttgtcagagt

SEQ ID NO: 193895 - DNA, 20 bp, synthetic construct
  source 1..20: mol_type = other DNA
caccccagaccttgtcagag

SEQ ID NO: 193896 - DNA, 20 bp, synthetic construct
  source 1..20: mol_type = other DNA
ccaccccagaccttgtcaga

SEQ ID NO: 193897 - DNA, 20 bp, synthetic construct
  source 1..20: mol_type = other DNA
accaccccagaccttgtcag

SEQ ID NO: 193898 - DNA, 20 bp, synthetic construct
  source 1..20: mol_type = other DNA
aaccaccccagaccttgtca

SEQ ID NO: 193899 - DNA, 20 bp, synthetic construct
  source 1..20: mol_type = other DNA
caaccaccccagaccttgtc

SEQ ID NO: 193900 - DNA, 20 bp, synthetic construct
  source 1..20: mol_type = other DNA
acaaccaccccagaccttgt

SEQ ID NO: 193901 - DNA, 20 bp, synthetic construct
  source 1..20: mol_type = other DNA
tacaaccaccccagaccttg

SEQ ID NO: 193902 - DNA, 20 bp, synthetic construct
  source 1..20: mol_type = other DNA
atacaaccaccccagacctt

SEQ ID NO: 193903 - DNA, 20 bp, synthetic construct
  source 1..20: mol_type = other DNA
catacaaccaccccagacct

SEQ ID NO: 193904 - DNA, 20 bp, synthetic construct
  source 1..20: mol_type = other DNA
ccatacaaccaccccagacc

SEQ ID NO: 193905 - DNA, 20 bp, synthetic construct
  source 1..20: mol_type = other DNA
cccatacaaccaccccagac

SEQ ID NO: 193906 - DNA, 20 bp, synthetic construct
  source 1..20: mol_type = other DNA
acccatacaaccaccccaga

SEQ ID NO: 193907 - DNA, 20 bp, synthetic construct
  source 1..20: mol_type = other DNA
gacccatacaaccaccccag

SEQ ID NO: 193908 - DNA, 20 bp, synthetic construct
  source 1..20: mol_type = other DNA
ggacccatacaaccacccca

SEQ ID NO: 193909 - DNA, 20 bp, synthetic construct
  source 1..20: mol_type = other DNA
aggacccatacaaccacccc

SEQ ID NO: 193910 - DNA, 20 bp, synthetic construct
  source 1..20: mol_type = other DNA
caggacccatacaaccaccc

SEQ ID NO: 193911 - DNA, 20 bp, synthetic construct
  source 1..20: mol_type = other DNA
acaggacccatacaaccacc

SEQ ID NO: 193912 - DNA, 20 bp, synthetic construct
  source 1..20: mol_type = other DNA
cacaggacccatacaaccac

SEQ ID NO: 193913 - DNA, 20 bp, synthetic construct
  source 1..20: mol_type = other DNA
tcacaggacccatacaacca

SEQ ID NO: 193914 - DNA, 20 bp, synthetic construct
  source 1..20: mol_type = other DNA
gtcacaggacccatacaacc

SEQ ID NO: 193915 - DNA, 20 bp, synthetic construct
  source 1..20: mol_type = other DNA
ggtcacaggacccatacaac

SEQ ID NO: 193916 - DNA, 20 bp, synthetic construct
  source 1..20: mol_type = other DNA
aggtcacaggacccatacaa

SEQ ID NO: 193917 - DNA, 20 bp, synthetic construct
  source 1..20: mol_type = other DNA
gaggtcacaggacccataca

SEQ ID NO: 193918 - DNA, 20 bp, synthetic construct
  source 1..20: mol_type = other DNA
agaggtcacaggacccatac

SEQ ID NO: 193919 - DNA, 20 bp, synthetic construct
  source 1..20: mol_type = other DNA
tagaggtcacaggacccata

SEQ ID NO: 193920 - DNA, 20 bp, synthetic construct
  source 1..20: mol_type = other DNA
atagaggtcacaggacccat

SEQ ID NO: 193921 - DNA, 20 bp, synthetic construct
  source 1..20: mol_type = other DNA
tatagaggtcacaggaccca

SEQ ID NO: 193922 - DNA, 20 bp, synthetic construct
  source 1..20: mol_type = other DNA
gtatagaggtcacaggaccc

SEQ ID NO: 193923 - DNA, 20 bp, synthetic construct
  source 1..20: mol_type = other DNA
tgtatagaggtcacaggacc

SEQ ID NO: 193924 - DNA, 20 bp, synthetic construct
  source 1..20: mol_type = other DNA
gtgtatagaggtcacaggac

SEQ ID NO: 193925 - DNA, 20 bp, synthetic construct
  source 1..20: mol_type = other DNA
ggtgtatagaggtcacagga

SEQ ID NO: 193926 - DNA, 20 bp, synthetic construct
  source 1..20: mol_type = other DNA
aggtgtatagaggtcacagg

SEQ ID NO: 193927 - DNA, 20 bp, synthetic construct
  source 1..20: mol_type = other DNA
gaggtgtatagaggtcacag

SEQ ID NO: 193928 - DNA, 20 bp, synthetic construct
  source 1..20: mol_type = other DNA
ggaggtgtatagaggtcaca

SEQ ID NO: 193929 - DNA, 20 bp, synthetic construct
  source 1..20: mol_type = other DNA
gggaggtgtatagaggtcac

SEQ ID NO: 193930 - DNA, 20 bp, synthetic construct
  source 1..20: mol_type = other DNA
tgggaggtgtatagaggtca

SEQ ID NO: 193931 - DNA, 20 bp, synthetic construct
  source 1..20: mol_type = other DNA
ctgggaggtgtatagaggtc

SEQ ID NO: 193932 - DNA, 20 bp, synthetic construct
  source 1..20: mol_type = other DNA
actgggaggtgtatagaggt

SEQ ID NO: 193933 - DNA, 20 bp, synthetic construct
  source 1..20: mol_type = other DNA
cactgggaggtgtatagagg

SEQ ID NO: 193934 - DNA, 20 bp, synthetic construct
  source 1..20: mol_type = other DNA
gcactgggaggtgtatagag

SEQ ID NO: 193935 - DNA, 20 bp, synthetic construct
  source 1..20: mol_type = other DNA
ggcactgggaggtgtataga

SEQ ID NO: 193936 - DNA, 20 bp, synthetic construct
  source 1..20: mol_type = other DNA
aggcactgggaggtgtatag

SEQ ID NO: 193937 - DNA, 20 bp, synthetic construct
  source 1..20: mol_type = other DNA
caggcactgggaggtgtata

SEQ ID NO: 193938 - DNA, 20 bp, synthetic construct
  source 1..20: mol_type = other DNA
ccaggcactgggaggtgtat

SEQ ID NO: 193939 - DNA, 20 bp, synthetic construct
  source 1..20: mol_type = other DNA
cccaggcactgggaggtgta

SEQ ID NO: 193940 - DNA, 20 bp, synthetic construct
  source 1..20: mol_type = other DNA
tcccaggcactgggaggtgt

SEQ ID NO: 193941 - DNA, 20 bp, synthetic construct
  source 1..20: mol_type = other DNA
ttcccaggcactgggaggtg

SEQ ID NO: 193942 - DNA, 20 bp, synthetic construct
  source 1..20: mol_type = other DNA
attcccaggcactgggaggt

SEQ ID NO: 193943 - DNA, 20 bp, synthetic construct
  source 1..20: mol_type = other DNA
gattcccaggcactgggagg

SEQ ID NO: 193944 - DNA, 20 bp, synthetic construct
  source 1..20: mol_type = other DNA
ggattcccaggcactgggag

SEQ ID NO: 193945 - DNA, 20 bp, synthetic construct
  source 1..20: mol_type = other DNA
aggattcccaggcactggga

SEQ ID NO: 193946 - DNA, 20 bp, synthetic construct
  source 1..20: mol_type = other DNA
caggattcccaggcactggg

SEQ ID NO: 193947 - DNA, 20 bp, synthetic construct
  source 1..20: mol_type = other DNA
gcaggattcccaggcactgg

SEQ ID NO: 193948 - DNA, 20 bp, synthetic construct
  source 1..20: mol_type = other DNA
tgcaggattcccaggcactg

SEQ ID NO: 193949 - DNA, 20 bp, synthetic construct
  source 1..20: mol_type = other DNA
ctgcaggattcccaggcact

SEQ ID NO: 193950 - DNA, 20 bp, synthetic construct
  source 1..20: mol_type = other DNA
tctgcaggattcccaggcac

SEQ ID NO: 193951 - DNA, 20 bp, synthetic construct
  source 1..20: mol_type = other DNA
atctgcaggattcccaggca

SEQ ID NO: 193952 - DNA, 20 bp, synthetic construct
  source 1..20: mol_type = other DNA
tatctgcaggattcccaggc

SEQ ID NO: 193953 - DNA, 20 bp, synthetic construct
  source 1..20: mol_type = other DNA
gtatctgcaggattcccagg

SEQ ID NO: 193954 - DNA, 20 bp, synthetic construct
  source 1..20: mol_type = other DNA
tgtatctgcaggattcccag

SEQ ID NO: 193955 - DNA, 20 bp, synthetic construct
  source 1..20: mol_type = other DNA
gtgtatctgcaggattccca

SEQ ID NO: 193956 - DNA, 20 bp, synthetic construct
  source 1..20: mol_type = other DNA
ggtgtatctgcaggattccc

SEQ ID NO: 193957 - DNA, 20 bp, synthetic construct
  source 1..20: mol_type = other DNA
gggtgtatctgcaggattcc

SEQ ID NO: 193958 - DNA, 20 bp, synthetic construct
  source 1..20: mol_type = other DNA
agggtgtatctgcaggattc

SEQ ID NO: 193959 - DNA, 20 bp, synthetic construct
  source 1..20: mol_type = other DNA
gagggtgtatctgcaggatt

SEQ ID NO: 193960 - DNA, 20 bp, synthetic construct
  source 1..20: mol_type = other DNA
ggagggtgtatctgcaggat

SEQ ID NO: 193961 - DNA, 20 bp, synthetic construct
  source 1..20: mol_type = other DNA
aggagggtgtatctgcagga

SEQ ID NO: 193962 - DNA, 20 bp, synthetic construct
  source 1..20: mol_type = other DNA
aaggagggtgtatctgcagg

SEQ ID NO: 193963 - DNA, 20 bp, synthetic construct
  source 1..20: mol_type = other DNA
taaggagggtgtatctgcag

SEQ ID NO: 193964 - DNA, 20 bp, synthetic construct
  source 1..20: mol_type = other DNA
ctaaggagggtgtatctgca

SEQ ID NO: 193965 - DNA, 20 bp, synthetic construct
  source 1..20: mol_type = other DNA
gctaaggagggtgtatctgc

SEQ ID NO: 193966 - DNA, 20 bp, synthetic construct
  source 1..20: mol_type = other DNA
ggctaaggagggtgtatctg

SEQ ID NO: 193967 - DNA, 20 bp, synthetic construct
  source 1..20: mol_type = other DNA
cggctaaggagggtgtatct

SEQ ID NO: 193968 - DNA, 20 bp, synthetic construct
  source 1..20: mol_type = other DNA
acggctaaggagggtgtatc

SEQ ID NO: 193969 - DNA, 20 bp, synthetic construct
  source 1..20: mol_type = other DNA
gacggctaaggagggtgtat

SEQ ID NO: 193970 - DNA, 20 bp, synthetic construct
  source 1..20: mol_type = other DNA
ggacggctaaggagggtgta

SEQ ID NO: 193971 - DNA, 20 bp, synthetic construct
  source 1..20: mol_type = other DNA
gggacggctaaggagggtgt

SEQ ID NO: 193972 - DNA, 20 bp, synthetic construct
  source 1..20: mol_type = other DNA
agggacggctaaggagggtg

SEQ ID NO: 193973 - DNA, 20 bp, synthetic construct
  source 1..20: mol_type = other DNA
tagggacggctaaggagggt

SEQ ID NO: 193974 - DNA, 20 bp, synthetic construct
  source 1..20: mol_type = other DNA
ttagggacggctaaggaggg

SEQ ID NO: 193975 - DNA, 20 bp, synthetic construct
  source 1..20: mol_type = other DNA
gttagggacggctaaggagg

SEQ ID NO: 193976 - DNA, 20 bp, synthetic construct
  source 1..20: mol_type = other DNA
ggttagggacggctaaggag

SEQ ID NO: 193977 - DNA, 20 bp, synthetic construct
  source 1..20: mol_type = other DNA
tggttagggacggctaagga

SEQ ID NO: 193978 - DNA, 20 bp, synthetic construct
  source 1..20: mol_type = other DNA
atggttagggacggctaagg

SEQ ID NO: 193979 - DNA, 20 bp, synthetic construct
  source 1..20: mol_type = other DNA
tatggttagggacggctaag

SEQ ID NO: 193980 - DNA, 20 bp, synthetic construct
  source 1..20: mol_type = other DNA
ctatggttagggacggctaa

SEQ ID NO: 193981 - DNA, 20 bp, synthetic construct
  source 1..20: mol_type = other DNA
tctatggttagggacggcta

SEQ ID NO: 193982 - DNA, 20 bp, synthetic construct
  source 1..20: mol_type = other DNA
ctctatggttagggacggct

SEQ ID NO: 193983 - DNA, 20 bp, synthetic construct
  source 1..20: mol_type = other DNA
cctctatggttagggacggc

SEQ ID NO: 193984 - DNA, 20 bp, synthetic construct
  source 1..20: mol_type = other DNA
tcctctatggttagggacgg

SEQ ID NO: 193985 - DNA, 20 bp, synthetic construct
  source 1..20: mol_type = other DNA
gtcctctatggttagggacg

SEQ ID NO: 193986 - DNA, 20 bp, synthetic construct
  source 1..20: mol_type = other DNA
tgtcctctatggttagggac

SEQ ID NO: 193987 - DNA, 20 bp, synthetic construct
  source 1..20: mol_type = other DNA
atgtcctctatggttaggga

SEQ ID NO: 193988 - DNA, 20 bp, synthetic construct
  source 1..20: mol_type = other DNA
aatgtcctctatggttaggg

SEQ ID NO: 193989 - DNA, 20 bp, synthetic construct
  source 1..20: mol_type = other DNA
aaatgtcctctatggttagg

SEQ ID NO: 193990 - DNA, 20 bp, synthetic construct
  source 1..20: mol_type = other DNA
gaaatgtcctctatggttag

SEQ ID NO: 193991 - DNA, 20 bp, synthetic construct
  source 1..20: mol_type = other DNA
agaaatgtcctctatggtta

SEQ ID NO: 193992 - DNA, 20 bp, synthetic construct
  source 1..20: mol_type = other DNA
cagaaatgtcctctatggtt

SEQ ID NO: 193993 - DNA, 20 bp, synthetic construct
  source 1..20: mol_type = other DNA
tcagaaatgtcctctatggt

SEQ ID NO: 193994 - DNA, 20 bp, synthetic construct
  source 1..20: mol_type = other DNA
ctcagaaatgtcctctatgg

SEQ ID NO: 193995 - DNA, 20 bp, synthetic construct
  source 1..20: mol_type = other DNA
cctcagaaatgtcctctatg

SEQ ID NO: 193996 - DNA, 20 bp, synthetic construct
  source 1..20: mol_type = other DNA
acctcagaaatgtcctctat

SEQ ID NO: 193997 - DNA, 20 bp, synthetic construct
  source 1..20: mol_type = other DNA
gacctcagaaatgtcctcta

SEQ ID NO: 193998 - DNA, 20 bp, synthetic construct
  source 1..20: mol_type = other DNA
ggacctcagaaatgtcctct

SEQ ID NO: 193999 - DNA, 20 bp, synthetic construct
  source 1..20: mol_type = other DNA
gggacctcagaaatgtcctc

SEQ ID NO: 194000 - DNA, 20 bp, synthetic construct
  source 1..20: mol_type = other DNA
ggggacctcagaaatgtcct

SEQ ID NO: 194001 - DNA, 20 bp, synthetic construct
  source 1..20: mol_type = other DNA
cggggacctcagaaatgtcc

SEQ ID NO: 194002 - DNA, 20 bp, synthetic construct
  source 1..20: mol_type = other DNA
tcggggacctcagaaatgtc

SEQ ID NO: 194003 - DNA, 20 bp, synthetic construct
  source 1..20: mol_type = other DNA
ctcggggacctcagaaatgt

SEQ ID NO: 194004 - DNA, 20 bp, synthetic construct
  source 1..20: mol_type = other DNA
tctcggggacctcagaaatg

SEQ ID NO: 194005 - DNA, 20 bp, synthetic construct
  source 1..20: mol_type = other DNA
ctctcggggacctcagaaat

SEQ ID NO: 194006 - DNA, 20 bp, synthetic construct
  source 1..20: mol_type = other DNA
tctctcggggacctcagaaa

SEQ ID NO: 194007 - DNA, 20 bp, synthetic construct
  source 1..20: mol_type = other DNA
ctctctcggggacctcagaa

SEQ ID NO: 194008 - DNA, 20 bp, synthetic construct
  source 1..20: mol_type = other DNA
actctctcggggacctcaga

SEQ ID NO: 194009 - DNA, 20 bp, synthetic construct
  source 1..20: mol_type = other DNA
cactctctcggggacctcag

SEQ ID NO: 194010 - DNA, 20 bp, synthetic construct
  source 1..20: mol_type = other DNA
ccactctctcggggacctca

SEQ ID NO: 194011 - DNA, 20 bp, synthetic construct
  source 1..20: mol_type = other DNA
cccactctctcggggacctc

SEQ ID NO: 194012 - DNA, 20 bp, synthetic construct
  source 1..20: mol_type = other DNA
ccccactctctcggggacct

SEQ ID NO: 194013 - DNA, 20 bp, synthetic construct
  source 1..20: mol_type = other DNA
gccccactctctcggggacc

SEQ ID NO: 194014 - DNA, 20 bp, synthetic construct
  source 1..20: mol_type = other DNA
tgccccactctctcggggac

SEQ ID NO: 194015 - DNA, 20 bp, synthetic construct
  source 1..20: mol_type = other DNA
gtgccccactctctcgggga

SEQ ID NO: 194016 - DNA, 20 bp, synthetic construct
  source 1..20: mol_type = other DNA
ggtgccccactctctcgggg

SEQ ID NO: 194017 - DNA, 20 bp, synthetic construct
  source 1..20: mol_type = other DNA
gggtgccccactctctcggg

SEQ ID NO: 194018 - DNA, 20 bp, synthetic construct
  source 1..20: mol_type = other DNA
ggggtgccccactctctcgg

SEQ ID NO: 194019 - DNA, 20 bp, synthetic construct
  source 1..20: mol_type = other DNA
aggggtgccccactctctcg

SEQ ID NO: 194020 - DNA, 20 bp, synthetic construct
  source 1..20: mol_type = other DNA
caggggtgccccactctctc

SEQ ID NO: 194021 - DNA, 20 bp, synthetic construct
  source 1..20: mol_type = other DNA
gcaggggtgccccactctct

SEQ ID NO: 194022 - DNA, 20 bp, synthetic construct
  source 1..20: mol_type = other DNA
tgcaggggtgccccactctc

SEQ ID NO: 194023 - DNA, 20 bp, synthetic construct
  source 1..20: mol_type = other DNA
ctgcaggggtgccccactct

SEQ ID NO: 194024 - DNA, 20 bp, synthetic construct
  source 1..20: mol_type = other DNA
cctgcaggggtgccccactc

SEQ ID NO: 194025 - DNA, 20 bp, synthetic construct
  source 1..20: mol_type = other DNA
tcctgcaggggtgccccact

SEQ ID NO: 194026 - DNA, 20 bp, synthetic construct
  source 1..20: mol_type = other DNA
atcctgcaggggtgccccac

SEQ ID NO: 194027 - DNA, 20 bp, synthetic construct
  source 1..20: mol_type = other DNA
gatcctgcaggggtgcccca

SEQ ID NO: 194028 - DNA, 20 bp, synthetic construct
  source 1..20: mol_type = other DNA
ggatcctgcaggggtgcccc

SEQ ID NO: 194029 - DNA, 20 bp, synthetic construct
  source 1..20: mol_type = other DNA
tggatcctgcaggggtgccc

SEQ ID NO: 194030 - DNA, 20 bp, synthetic construct
  source 1..20: mol_type = other DNA
ttggatcctgcaggggtgcc

SEQ ID NO: 194031 - DNA, 20 bp, synthetic construct
  source 1..20: mol_type = other DNA
gttggatcctgcaggggtgc

SEQ ID NO: 194032 - DNA, 20 bp, synthetic construct
  source 1..20: mol_type = other DNA
agttggatcctgcaggggtg

SEQ ID NO: 194033 - DNA, 20 bp, synthetic construct
  source 1..20: mol_type = other DNA
cagttggatcctgcaggggt

SEQ ID NO: 194034 - DNA, 20 bp, synthetic construct
  source 1..20: mol_type = other DNA
gcagttggatcctgcagggg

SEQ ID NO: 194035 - DNA, 20 bp, synthetic construct
  source 1..20: mol_type = other DNA
agcagttggatcctgcaggg

SEQ ID NO: 194036 - DNA, 20 bp, synthetic construct
  source 1..20: mol_type = other DNA
cagcagttggatcctgcagg

SEQ ID NO: 194037 - DNA, 20 bp, synthetic construct
  source 1..20: mol_type = other DNA
ccagcagttggatcctgcag

SEQ ID NO: 194038 - DNA, 20 bp, synthetic construct
  source 1..20: mol_type = other DNA
cccagcagttggatcctgca

SEQ ID NO: 194039 - DNA, 20 bp, synthetic construct
  source 1..20: mol_type = other DNA
gcccagcagttggatcctgc

SEQ ID NO: 194040 - DNA, 20 bp, synthetic construct
  source 1..20: mol_type = other DNA
ggcccagcagttggatcctg

SEQ ID NO: 194041 - DNA, 20 bp, synthetic construct
  source 1..20: mol_type = other DNA
gggcccagcagttggatcct

SEQ ID NO: 194042 - DNA, 20 bp, synthetic construct
  source 1..20: mol_type = other DNA
tgggcccagcagttggatcc

SEQ ID NO: 194043 - DNA, 20 bp, synthetic construct
  source 1..20: mol_type = other DNA
ctgggcccagcagttggatc

SEQ ID NO: 194044 - DNA, 20 bp, synthetic construct
  source 1..20: mol_type = other DNA
cctgggcccagcagttggat

SEQ ID NO: 194045 - DNA, 20 bp, synthetic construct
  source 1..20: mol_type = other DNA
tcctgggcccagcagttgga

SEQ ID NO: 194046 - DNA, 20 bp, synthetic construct
  source 1..20: mol_type = other DNA
ttcctgggcccagcagttgg

SEQ ID NO: 194047 - DNA, 20 bp, synthetic construct
  source 1..20: mol_type = other DNA
cttcctgggcccagcagttg

SEQ ID NO: 194048 - DNA, 20 bp, synthetic construct
  source 1..20: mol_type = other DNA
ccttcctgggcccagcagtt

SEQ ID NO: 194049 - DNA, 20 bp, synthetic construct
  source 1..20: mol_type = other DNA
tccttcctgggcccagcagt

SEQ ID NO: 194050 - DNA, 20 bp, synthetic construct
  source 1..20: mol_type = other DNA
atccttcctgggcccagcag

SEQ ID NO: 194051 - DNA, 20 bp, synthetic construct
  source 1..20: mol_type = other DNA
tatccttcctgggcccagca

SEQ ID NO: 194052 - DNA, 20 bp, synthetic construct
  source 1..20: mol_type = other DNA
ctatccttcctgggcccagc

SEQ ID NO: 194053 - DNA, 20 bp, synthetic construct
  source 1..20: mol_type = other DNA
gctatccttcctgggcccag

SEQ ID NO: 194054 - DNA, 20 bp, synthetic construct
  source 1..20: mol_type = other DNA
tgctatccttcctgggccca

SEQ ID NO: 194055 - DNA, 20 bp, synthetic construct
  source 1..20: mol_type = other DNA
ctgctatccttcctgggccc

SEQ ID NO: 194056 - DNA, 20 bp, synthetic construct
  source 1..20: mol_type = other DNA
gctgctatccttcctgggcc

SEQ ID NO: 194057 - DNA, 20 bp, synthetic construct
  source 1..20: mol_type = other DNA
tgctgctatccttcctgggc

SEQ ID NO: 194058 - DNA, 20 bp, synthetic construct
  source 1..20: mol_type = other DNA
ctgctgctatccttcctggg

SEQ ID NO: 194059 - DNA, 20 bp, synthetic construct
  source 1..20: mol_type = other DNA
gctgctgctatccttcctgg

SEQ ID NO: 194060 - DNA, 20 bp, synthetic construct
  source 1..20: mol_type = other DNA
tgctgctgctatccttcctg

SEQ ID NO: 194061 - DNA, 20 bp, synthetic construct
  source 1..20: mol_type = other DNA
atgctgctgctatccttcct

SEQ ID NO: 194062 - DNA, 20 bp, synthetic construct
  source 1..20: mol_type = other DNA
catgctgctgctatccttcc

SEQ ID NO: 194063 - DNA, 20 bp, synthetic construct
  source 1..20: mol_type = other DNA
tcatgctgctgctatccttc

SEQ ID NO: 194064 - DNA, 20 bp, synthetic construct
  source 1..20: mol_type = other DNA
ctcatgctgctgctatcctt

SEQ ID NO: 194065 - DNA, 20 bp, synthetic construct
  source 1..20: mol_type = other DNA
cctcatgctgctgctatcct

SEQ ID NO: 194066 - DNA, 20 bp, synthetic construct
  source 1..20: mol_type = other DNA
ccctcatgctgctgctatcc

SEQ ID NO: 194067 - DNA, 20 bp, synthetic construct
  source 1..20: mol_type = other DNA
cccctcatgctgctgctatc

SEQ ID NO: 194068 - DNA, 20 bp, synthetic construct
  source 1..20: mol_type = other DNA
acccctcatgctgctgctat

SEQ ID NO: 194069 - DNA, 20 bp, synthetic construct
  source 1..20: mol_type = other DNA
aacccctcatgctgctgcta

SEQ ID NO: 194070 - DNA, 20 bp, synthetic construct
  source 1..20: mol_type = other DNA
gaacccctcatgctgctgct

SEQ ID NO: 194071 - DNA, 20 bp, synthetic construct
  source 1..20: mol_type = other DNA
ggaacccctcatgctgctgc

SEQ ID NO: 194072 - DNA, 20 bp, synthetic construct
  source 1..20: mol_type = other DNA
tggaacccctcatgctgctg

SEQ ID NO: 194073 - DNA, 20 bp, synthetic construct
  source 1..20: mol_type = other DNA
atggaacccctcatgctgct

SEQ ID NO: 194074 - DNA, 20 bp, synthetic construct
  source 1..20: mol_type = other DNA
aatggaacccctcatgctgc

SEQ ID NO: 194075 - DNA, 20 bp, synthetic construct
  source 1..20: mol_type = other DNA
taatggaacccctcatgctg

SEQ ID NO: 194076 - DNA, 20 bp, synthetic construct
  source 1..20: mol_type = other DNA
ctaatggaacccctcatgct

SEQ ID NO: 194077 - DNA, 20 bp, synthetic construct
  source 1..20: mol_type = other DNA
gctaatggaacccctcatgc

SEQ ID NO: 194078 - DNA, 20 bp, synthetic construct
  source 1..20: mol_type = other DNA
ggctaatggaacccctcatg

SEQ ID NO: 194079 - DNA, 20 bp, synthetic construct
  source 1..20: mol_type = other DNA
tggctaatggaacccctcat

SEQ ID NO: 194080 - DNA, 20 bp, synthetic construct
  source 1..20: mol_type = other DNA
gtggctaatggaacccctca

SEQ ID NO: 194081 - DNA, 20 bp, synthetic construct
  source 1..20: mol_type = other DNA
tgtggctaatggaacccctc

SEQ ID NO: 194082 - DNA, 20 bp, synthetic construct
  source 1..20: mol_type = other DNA
ttgtggctaatggaacccct

SEQ ID NO: 194083 - DNA, 20 bp, synthetic construct
  source 1..20: mol_type = other DNA
tttgtggctaatggaacccc

SEQ ID NO: 194084 - DNA, 20 bp, synthetic construct
  source 1..20: mol_type = other DNA
gtttgtggctaatggaaccc

SEQ ID NO: 194085 - DNA, 20 bp, synthetic construct
  source 1..20: mol_type = other DNA
agtttgtggctaatggaacc

SEQ ID NO: 194086 - DNA, 20 bp, synthetic construct
  source 1..20: mol_type = other DNA
gagtttgtggctaatggaac

SEQ ID NO: 194087 - DNA, 20 bp, synthetic construct
  source 1..20: mol_type = other DNA
tgagtttgtggctaatggaa

SEQ ID NO: 194088 - DNA, 20 bp, synthetic construct
  source 1..20: mol_type = other DNA
gtgagtttgtggctaatgga

SEQ ID NO: 194089 - DNA, 20 bp, synthetic construct
  source 1..20: mol_type = other DNA
cgtgagtttgtggctaatgg

SEQ ID NO: 194090 - DNA, 20 bp, synthetic construct
  source 1..20: mol_type = other DNA
ccgtgagtttgtggctaatg

SEQ ID NO: 194091 - DNA, 20 bp, synthetic construct
  source 1..20: mol_type = other DNA
gccgtgagtttgtggctaat

SEQ ID NO: 194092 - DNA, 20 bp, synthetic construct
  source 1..20: mol_type = other DNA
tgccgtgagtttgtggctaa

SEQ ID NO: 194093 - DNA, 20 bp, synthetic construct
  source 1..20: mol_type = other DNA
atgccgtgagtttgtggcta

SEQ ID NO: 194094 - DNA, 20 bp, synthetic construct
  source 1..20: mol_type = other DNA
catgccgtgagtttgtggct

SEQ ID NO: 194095 - DNA, 20 bp, synthetic construct
  source 1..20: mol_type = other DNA
ccatgccgtgagtttgtggc

SEQ ID NO: 194096 - DNA, 20 bp, synthetic construct
  source 1..20: mol_type = other DNA
tccatgccgtgagtttgtgg

SEQ ID NO: 194097 - DNA, 20 bp, synthetic construct
  source 1..20: mol_type = other DNA
ttccatgccgtgagtttgtg

SEQ ID NO: 194098 - DNA, 20 bp, synthetic construct
  source 1..20: mol_type = other DNA
gttccatgccgtgagtttgt

SEQ ID NO: 194099 - DNA, 20 bp, synthetic construct
  source 1..20: mol_type = other DNA
ggttccatgccgtgagtttg

SEQ ID NO: 194100 - DNA, 20 bp, synthetic construct
  source 1..20: mol_type = other DNA
aggttccatgccgtgagttt

SEQ ID NO: 194101 - DNA, 20 bp, synthetic construct
  source 1..20: mol_type = other DNA
aaggttccatgccgtgagtt

SEQ ID NO: 194102 - DNA, 20 bp, synthetic construct
  source 1..20: mol_type = other DNA
gaaggttccatgccgtgagt

SEQ ID NO: 194103 - DNA, 20 bp, synthetic construct
  source 1..20: mol_type = other DNA
tgaaggttccatgccgtgag

SEQ ID NO: 194104 - DNA, 20 bp, synthetic construct
  source 1..20: mol_type = other DNA
gtgaaggttccatgccgtga

SEQ ID NO: 194105 - DNA, 20 bp, synthetic construct
  source 1..20: mol_type = other DNA
ggtgaaggttccatgccgtg

SEQ ID NO: 194106 - DNA, 20 bp, synthetic construct
  source 1..20: mol_type = other DNA
gggtgaaggttccatgccgt

SEQ ID NO: 194107 - DNA, 20 bp, synthetic construct
  source 1..20: mol_type = other DNA
tgggtgaaggttccatgccg

SEQ ID NO: 194108 - DNA, 20 bp, synthetic construct
  source 1..20: mol_type = other DNA
gtgggtgaaggttccatgcc

SEQ ID NO: 194109 - DNA, 20 bp, synthetic construct
  source 1..20: mol_type = other DNA
ggtgggtgaaggttccatgc

SEQ ID NO: 194110 - DNA, 20 bp, synthetic construct
  source 1..20: mol_type = other DNA
aggtgggtgaaggttccatg

SEQ ID NO: 194111 - DNA, 20 bp, synthetic construct
  source 1..20: mol_type = other DNA
gaggtgggtgaaggttccat

SEQ ID NO: 194112 - DNA, 20 bp, synthetic construct
  source 1..20: mol_type = other DNA
cgaggtgggtgaaggttcca

SEQ ID NO: 194113 - DNA, 20 bp, synthetic construct
  source 1..20: mol_type = other DNA
gcgaggtgggtgaaggttcc

SEQ ID NO: 194114 - DNA, 20 bp, synthetic construct
  source 1..20: mol_type = other DNA
ggcgaggtgggtgaaggttc

SEQ ID NO: 194115 - DNA, 20 bp, synthetic construct
  source 1..20: mol_type = other DNA
gggcgaggtgggtgaaggtt

SEQ ID NO: 194116 - DNA, 20 bp, synthetic construct
  source 1..20: mol_type = other DNA
ggggcgaggtgggtgaaggt

SEQ ID NO: 194117 - DNA, 20 bp, synthetic construct
  source 1..20: mol_type = other DNA
aggggcgaggtgggtgaagg

SEQ ID NO: 194118 - DNA, 20 bp, synthetic construct
  source 1..20: mol_type = other DNA
gaggggcgaggtgggtgaag

SEQ ID NO: 194119 - DNA, 20 bp, synthetic construct
  source 1..20: mol_type = other DNA
tgaggggcgaggtgggtgaa

SEQ ID NO: 194120 - DNA, 20 bp, synthetic construct
  source 1..20: mol_type = other DNA
atgaggggcgaggtgggtga

SEQ ID NO: 194121 - DNA, 20 bp, synthetic construct
  source 1..20: mol_type = other DNA
gatgaggggcgaggtgggtg

SEQ ID NO: 194122 - DNA, 20 bp, synthetic construct
  source 1..20: mol_type = other DNA
agatgaggggcgaggtgggt

SEQ ID NO: 194123 - DNA, 20 bp, synthetic construct
  source 1..20: mol_type = other DNA
cagatgaggggcgaggtggg

SEQ ID NO: 194124 - DNA, 20 bp, synthetic construct
  source 1..20: mol_type = other DNA
gcagatgaggggcgaggtgg

SEQ ID NO: 194125 - DNA, 20 bp, synthetic construct
  source 1..20: mol_type = other DNA
agcagatgaggggcgaggtg

SEQ ID NO: 194126 - DNA, 20 bp, synthetic construct
  source 1..20: mol_type = other DNA
cagcagatgaggggcgaggt

SEQ ID NO: 194127 - DNA, 20 bp, synthetic construct
  source 1..20: mol_type = other DNA
acagcagatgaggggcgagg

SEQ ID NO: 194128 - DNA, 20 bp, synthetic construct
  source 1..20: mol_type = other DNA
aacagcagatgaggggcgag

SEQ ID NO: 194129 - DNA, 20 bp, synthetic construct
  source 1..20: mol_type = other DNA
aaacagcagatgaggggcga

SEQ ID NO: 194130 - DNA, 20 bp, synthetic construct
  source 1..20: mol_type = other DNA
taaacagcagatgaggggcg

SEQ ID NO: 194131 - DNA, 20 bp, synthetic construct
  source 1..20: mol_type = other DNA
ctaaacagcagatgaggggc

SEQ ID NO: 194132 - DNA, 20 bp, synthetic construct
  source 1..20: mol_type = other DNA
gctaaacagcagatgagggg

SEQ ID NO: 194133 - DNA, 20 bp, synthetic construct
  source 1..20: mol_type = other DNA
tgctaaacagcagatgaggg

SEQ ID NO: 194134 - DNA, 20 bp, synthetic construct
  source 1..20: mol_type = other DNA
gtgctaaacagcagatgagg

SEQ ID NO: 194135 - DNA, 20 bp, synthetic construct
  source 1..20: mol_type = other DNA
ggtgctaaacagcagatgag

SEQ ID NO: 194136 - DNA, 20 bp, synthetic construct
  source 1..20: mol_type = other DNA
aggtgctaaacagcagatga

SEQ ID NO: 194137 - DNA, 20 bp, synthetic construct
  source 1..20: mol_type = other DNA
caggtgctaaacagcagatg

SEQ ID NO: 194138 - DNA, 20 bp, synthetic construct
  source 1..20: mol_type = other DNA
ccaggtgctaaacagcagat

SEQ ID NO: 194139 - DNA, 20 bp, synthetic construct
  source 1..20: mol_type = other DNA
gccaggtgctaaacagcaga

SEQ ID NO: 194140 - DNA, 20 bp, synthetic construct
  source 1..20: mol_type = other DNA
tgccaggtgctaaacagcag

SEQ ID NO: 194141 - DNA, 20 bp, synthetic construct
  source 1..20: mol_type = other DNA
gtgccaggtgctaaacagca

SEQ ID NO: 194142 - DNA, 20 bp, synthetic construct
  source 1..20: mol_type = other DNA
cgtgccaggtgctaaacagc

SEQ ID NO: 194143 - DNA, 20 bp, synthetic construct
  source 1..20: mol_type = other DNA
gcgtgccaggtgctaaacag

SEQ ID NO: 194144 - DNA, 20 bp, synthetic construct
  source 1..20: mol_type = other DNA
ggcgtgccaggtgctaaaca

SEQ ID NO: 194145 - DNA, 20 bp, synthetic construct
  source 1..20: mol_type = other DNA
cggcgtgccaggtgctaaac

SEQ ID NO: 194146 - DNA, 20 bp, synthetic construct
  source 1..20: mol_type = other DNA
acggcgtgccaggtgctaaa

SEQ ID NO: 194147 - DNA, 20 bp, synthetic construct
  source 1..20: mol_type = other DNA
cacggcgtgccaggtgctaa

SEQ ID NO: 194148 - DNA, 20 bp, synthetic construct
  source 1..20: mol_type = other DNA
acacggcgtgccaggtgcta

SEQ ID NO: 194149 - DNA, 20 bp, synthetic construct
  source 1..20: mol_type = other DNA
tacacggcgtgccaggtgct

SEQ ID NO: 194150 - DNA, 20 bp, synthetic construct
  source 1..20: mol_type = other DNA
atacacggcgtgccaggtgc

SEQ ID NO: 194151 - DNA, 20 bp, synthetic construct
  source 1..20: mol_type = other DNA
tatacacggcgtgccaggtg

SEQ ID NO: 194152 - DNA, 20 bp, synthetic construct
  source 1..20: mol_type = other DNA
gtatacacggcgtgccaggt

SEQ ID NO: 194153 - DNA, 20 bp, synthetic construct
  source 1..20: mol_type = other DNA
agtatacacggcgtgccagg

SEQ ID NO: 194154 - DNA, 20 bp, synthetic construct
  source 1..20: mol_type = other DNA
aagtatacacggcgtgccag

SEQ ID NO: 194155 - DNA, 20 bp, synthetic construct
  source 1..20: mol_type = other DNA
taagtatacacggcgtgcca

SEQ ID NO: 194156 - DNA, 20 bp, synthetic construct
  source 1..20: mol_type = other DNA
gtaagtatacacggcgtgcc

SEQ ID NO: 194157 - DNA, 20 bp, synthetic construct
  source 1..20: mol_type = other DNA
agtaagtatacacggcgtgc

SEQ ID NO: 194158 - DNA, 20 bp, synthetic construct
  source 1..20: mol_type = other DNA
cagtaagtatacacggcgtg

SEQ ID NO: 194159 - DNA, 20 bp, synthetic construct
  source 1..20: mol_type = other DNA
tcagtaagtatacacggcgt

SEQ ID NO: 194160 - DNA, 20 bp, synthetic construct
  source 1..20: mol_type = other DNA
atcagtaagtatacacggcg

SEQ ID NO: 194161 - DNA, 20 bp, synthetic construct
  source 1..20: mol_type = other DNA
aatcagtaagtatacacggc

SEQ ID NO: 194162 - DNA, 20 bp, synthetic construct
  source 1..20: mol_type = other DNA
taatcagtaagtatacacgg

SEQ ID NO: 194163 - DNA, 20 bp, synthetic construct
  source 1..20: mol_type = other DNA
ataatcagtaagtatacacg

SEQ ID NO: 194164 - DNA, 20 bp, synthetic construct
  source 1..20: mol_type = other DNA
aataatcagtaagtatacac

SEQ ID NO: 194165 - DNA, 20 bp, synthetic construct
  source 1..20: mol_type = other DNA
taataatcagtaagtataca

SEQ ID NO: 194166 - DNA, 20 bp, synthetic construct
  source 1..20: mol_type = other DNA
gtaataatcagtaagtatac

SEQ ID NO: 194167 - DNA, 20 bp, synthetic construct
  source 1..20: mol_type = other DNA
tgtaataatcagtaagtata

SEQ ID NO: 194168 - DNA, 20 bp, synthetic construct
  source 1..20: mol_type = other DNA
atgtaataatcagtaagtat

SEQ ID NO: 194169 - DNA, 20 bp, synthetic construct
  source 1..20: mol_type = other DNA
aatgtaataatcagtaagta

SEQ ID NO: 194170 - DNA, 20 bp, synthetic construct
  source 1..20: mol_type = other DNA
aaatgtaataatcagtaagt

SEQ ID NO: 194171 - DNA, 20 bp, synthetic construct
  source 1..20: mol_type = other DNA
aaaatgtaataatcagtaag

SEQ ID NO: 194172 - DNA, 20 bp, synthetic construct
  source 1..20: mol_type = other DNA
taaaatgtaataatcagtaa

SEQ ID NO: 194173 - DNA, 20 bp, synthetic construct
  source 1..20: mol_type = other DNA
ttaaaatgtaataatcagta

SEQ ID NO: 194174 - DNA, 20 bp, synthetic construct
  source 1..20: mol_type = other DNA
attaaaatgtaataatcagt

SEQ ID NO: 194175 - DNA, 20 bp, synthetic construct
  source 1..20: mol_type = other DNA
cattaaaatgtaataatcag

SEQ ID NO: 194176 - DNA, 20 bp, synthetic construct
  source 1..20: mol_type = other DNA
ccattaaaatgtaataatca

SEQ ID NO: 194177 - DNA, 20 bp, synthetic construct
  source 1..20: mol_type = other DNA
gccattaaaatgtaataatc

SEQ ID NO: 194178 - DNA, 20 bp, synthetic construct
  source 1..20: mol_type = other DNA
tgccattaaaatgtaataat

SEQ ID NO: 194179 - DNA, 20 bp, synthetic construct
  source 1..20: mol_type = other DNA
ttgccattaaaatgtaataa

SEQ ID NO: 194180 - DNA, 20 bp, synthetic construct
  source 1..20: mol_type = other DNA
tttgccattaaaatgtaata

SEQ ID NO: 194181 - DNA, 20 bp, synthetic construct
  source 1..20: mol_type = other DNA
atttgccattaaaatgtaat

SEQ ID NO: 194182 - DNA, 20 bp, synthetic construct
  source 1..20: mol_type = other DNA
aatttgccattaaaatgtaa

SEQ ID NO: 194183 - DNA, 20 bp, synthetic construct
  source 1..20: mol_type = other DNA
taatttgccattaaaatgta

SEQ ID NO: 194184 - DNA, 20 bp, synthetic construct
  source 1..20: mol_type = other DNA
ataatttgccattaaaatgt

SEQ ID NO: 194185 - DNA, 20 bp, synthetic construct
  source 1..20: mol_type = other DNA
tataatttgccattaaaatg

SEQ ID NO: 194186 - DNA, 20 bp, synthetic construct
  source 1..20: mol_type = other DNA
ctataatttgccattaaaat

SEQ ID NO: 194187 - DNA, 20 bp, synthetic construct
  source 1..20: mol_type = other DNA
actataatttgccattaaaa

SEQ ID NO: 194188 - DNA, 20 bp, synthetic construct
  source 1..20: mol_type = other DNA
cactataatttgccattaaa

SEQ ID NO: 194189 - DNA, 20 bp, synthetic construct
  source 1..20: mol_type = other DNA
ccactataatttgccattaa

SEQ ID NO: 194190 - DNA, 20 bp, synthetic construct
  source 1..20: mol_type = other DNA
gccactataatttgccatta

SEQ ID NO: 194191 - DNA, 20 bp, synthetic construct
  source 1..20: mol_type = other DNA
tgccactataatttgccatt

SEQ ID NO: 194192 - DNA, 20 bp, synthetic construct
  source 1..20: mol_type = other DNA
ttgccactataatttgccat

SEQ ID NO: 194193 - DNA, 20 bp, synthetic construct
  source 1..20: mol_type = other DNA
tttgccactataatttgcca

SEQ ID NO: 194194 - DNA, 20 bp, synthetic construct
  source 1..20: mol_type = other DNA
gtttgccactataatttgcc

SEQ ID NO: 194195 - DNA, 20 bp, synthetic construct
  source 1..20: mol_type = other DNA
cgtttgccactataatttgc

SEQ ID NO: 194196 - DNA, 20 bp, synthetic construct
  source 1..20: mol_type = other DNA
acgtttgccactataatttg

SEQ ID NO: 194197 - DNA, 20 bp, synthetic construct
  source 1..20: mol_type = other DNA
tacgtttgccactataattt

SEQ ID NO: 194198 - DNA, 20 bp, synthetic construct
  source 1..20: mol_type = other DNA
atacgtttgccactataatt

SEQ ID NO: 194199 - DNA, 20 bp, synthetic construct
  source 1..20: mol_type = other DNA
catacgtttgccactataat

SEQ ID NO: 194200 - DNA, 20 bp, synthetic construct
  source 1..20: mol_type = other DNA
gcatacgtttgccactataa

SEQ ID NO: 194201 - DNA, 20 bp, synthetic construct
  source 1..20: mol_type = other DNA
tgcatacgtttgccactata

SEQ ID NO: 194202 - DNA, 20 bp, synthetic construct
  source 1..20: mol_type = other DNA
atgcatacgtttgccactat

SEQ ID NO: 194203 - DNA, 20 bp, synthetic construct
  source 1..20: mol_type = other DNA
gatgcatacgtttgccacta

SEQ ID NO: 194204 - DNA, 20 bp, synthetic construct
  source 1..20: mol_type = other DNA
agatgcatacgtttgccact

SEQ ID NO: 194205 - DNA, 20 bp, synthetic construct
  source 1..20: mol_type = other DNA
aagatgcatacgtttgccac

SEQ ID NO: 194206 - DNA, 20 bp, synthetic construct
  source 1..20: mol_type = other DNA
aaagatgcatacgtttgcca

SEQ ID NO: 194207 - DNA, 20 bp, synthetic construct
  source 1..20: mol_type = other DNA
caaagatgcatacgtttgcc

SEQ ID NO: 194208 - DNA, 20 bp, synthetic construct
  source 1..20: mol_type = other DNA
gcaaagatgcatacgtttgc

SEQ ID NO: 194209 - DNA, 20 bp, synthetic construct
  source 1..20: mol_type = other DNA
tgcaaagatgcatacgtttg

SEQ ID NO: 194210 - DNA, 20 bp, synthetic construct
  source 1..20: mol_type = other DNA
gtgcaaagatgcatacgttt

SEQ ID NO: 194211 - DNA, 20 bp, synthetic construct
  source 1..20: mol_type = other DNA
tgtgcaaagatgcatacgtt

SEQ ID NO: 194212 - DNA, 20 bp, synthetic construct
  source 1..20: mol_type = other DNA
ttgtgcaaagatgcatacgt

SEQ ID NO: 194213 - DNA, 20 bp, synthetic construct
  source 1..20: mol_type = other DNA
attgtgcaaagatgcatacg

SEQ ID NO: 194214 - DNA, 20 bp, synthetic construct
  source 1..20: mol_type = other DNA
aattgtgcaaagatgcatac

SEQ ID NO: 194215 - DNA, 20 bp, synthetic construct
  source 1..20: mol_type = other DNA
caattgtgcaaagatgcata

SEQ ID NO: 194216 - DNA, 20 bp, synthetic construct
  source 1..20: mol_type = other DNA
acaattgtgcaaagatgcat

SEQ ID NO: 194217 - DNA, 20 bp, synthetic construct
  source 1..20: mol_type = other DNA
aacaattgtgcaaagatgca

SEQ ID NO: 194218 - DNA, 20 bp, synthetic construct
  source 1..20: mol_type = other DNA
caacaattgtgcaaagatgc

SEQ ID NO: 194219 - DNA, 20 bp, synthetic construct
  source 1..20: mol_type = other DNA
acaacaattgtgcaaagatg

SEQ ID NO: 194220 - DNA, 20 bp, synthetic construct
  source 1..20: mol_type = other DNA
tacaacaattgtgcaaagat

SEQ ID NO: 194221 - DNA, 20 bp, synthetic construct
  source 1..20: mol_type = other DNA
gtacaacaattgtgcaaaga

SEQ ID NO: 194222 - DNA, 20 bp, synthetic construct
  source 1..20: mol_type = other DNA
tgtacaacaattgtgcaaag

SEQ ID NO: 194223 - DNA, 20 bp, synthetic construct
  source 1..20: mol_type = other DNA
ctgtacaacaattgtgcaaa

SEQ ID NO: 194224 - DNA, 20 bp, synthetic construct
  source 1..20: mol_type = other DNA
gctgtacaacaattgtgcaa

SEQ ID NO: 194225 - DNA, 20 bp, synthetic construct
  source 1..20: mol_type = other DNA
tgctgtacaacaattgtgca

SEQ ID NO: 194226 - DNA, 20 bp, synthetic construct
  source 1..20: mol_type = other DNA
atgctgtacaacaattgtgc

SEQ ID NO: 194227 - DNA, 20 bp, synthetic construct
  source 1..20: mol_type = other DNA
catgctgtacaacaattgtg

SEQ ID NO: 194228 - DNA, 20 bp, synthetic construct
  source 1..20: mol_type = other DNA
tcatgctgtacaacaattgt

SEQ ID NO: 194229 - DNA, 20 bp, synthetic construct
  source 1..20: mol_type = other DNA
atcatgctgtacaacaattg

SEQ ID NO: 194230 - DNA, 20 bp, synthetic construct
  source 1..20: mol_type = other DNA
catcatgctgtacaacaatt

SEQ ID NO: 194231 - DNA, 20 bp, synthetic construct
  source 1..20: mol_type = other DNA
tcatcatgctgtacaacaat

SEQ ID NO: 194232 - DNA, 20 bp, synthetic construct
  source 1..20: mol_type = other DNA
ttcatcatgctgtacaacaa

SEQ ID NO: 194233 - DNA, 20 bp, synthetic construct
  source 1..20: mol_type = other DNA
gttcatcatgctgtacaaca

SEQ ID NO: 194234 - DNA, 20 bp, synthetic construct
  source 1..20: mol_type = other DNA
tgttcatcatgctgtacaac

SEQ ID NO: 194235 - DNA, 20 bp, synthetic construct
  source 1..20: mol_type = other DNA
ttgttcatcatgctgtacaa

SEQ ID NO: 194236 - DNA, 20 bp, synthetic construct
  source 1..20: mol_type = other DNA
cttgttcatcatgctgtaca

SEQ ID NO: 194237 - DNA, 20 bp, synthetic construct
  source 1..20: mol_type = other DNA
acttgttcatcatgctgtac

SEQ ID NO: 194238 - DNA, 20 bp, synthetic construct
  source 1..20: mol_type = other DNA
gacttgttcatcatgctgta

SEQ ID NO: 194239 - DNA, 20 bp, synthetic construct
  source 1..20: mol_type = other DNA
tgacttgttcatcatgctgt

SEQ ID NO: 194240 - DNA, 20 bp, synthetic construct
  source 1..20: mol_type = other DNA
atgacttgttcatcatgctg

SEQ ID NO: 194241 - DNA, 20 bp, synthetic construct
  source 1..20: mol_type = other DNA
aatgacttgttcatcatgct

SEQ ID NO: 194242 - DNA, 20 bp, synthetic construct
  source 1..20: mol_type = other DNA
taatgacttgttcatcatgc

SEQ ID NO: 194243 - DNA, 20 bp, synthetic construct
  source 1..20: mol_type = other DNA
ttaatgacttgttcatcatg

SEQ ID NO: 194244 - DNA, 20 bp, synthetic construct
  source 1..20: mol_type = other DNA
attaatgacttgttcatcat

SEQ ID NO: 194245 - DNA, 20 bp, synthetic construct
  source 1..20: mol_type = other DNA
tattaatgacttgttcatca

SEQ ID NO: 194246 - DNA, 20 bp, synthetic construct
  source 1..20: mol_type = other DNA
ctattaatgacttgttcatc

SEQ ID NO: 194247 - DNA, 20 bp, synthetic construct
  source 1..20: mol_type = other DNA
actattaatgacttgttcat

SEQ ID NO: 194248 - DNA, 20 bp, synthetic construct
  source 1..20: mol_type = other DNA
tactattaatgacttgttca

SEQ ID NO: 194249 - DNA, 20 bp, synthetic construct
  source 1..20: mol_type = other DNA
ttactattaatgacttgttc

SEQ ID NO: 194250 - DNA, 20 bp, synthetic construct
  source 1..20: mol_type = other DNA
tttactattaatgacttgtt

SEQ ID NO: 194251 - DNA, 20 bp, synthetic construct
  source 1..20: mol_type = other DNA
ctttactattaatgacttgt

SEQ ID NO: 194252 - DNA, 20 bp, synthetic construct
  source 1..20: mol_type = other DNA
tctttactattaatgacttg

SEQ ID NO: 194253 - DNA, 20 bp, synthetic construct
  source 1..20: mol_type = other DNA
ttctttactattaatgactt

SEQ ID NO: 194254 - DNA, 20 bp, synthetic construct
  source 1..20: mol_type = other DNA
attctttactattaatgact

SEQ ID NO: 194255 - DNA, 20 bp, synthetic construct
  source 1..20: mol_type = other DNA
tattctttactattaatgac

SEQ ID NO: 194256 - DNA, 20 bp, synthetic construct
  source 1..20: mol_type = other DNA
ttattctttactattaatga

SEQ ID NO: 194257 - DNA, 20 bp, synthetic construct
  source 1..20: mol_type = other DNA
tttattctttactattaatg

SEQ ID NO: 194258 - DNA, 20 bp, synthetic construct
  source 1..20: mol_type = other DNA
atttattctttactattaat

SEQ ID NO: 194259 - DNA, 20 bp, synthetic construct
  source 1..20: mol_type = other DNA
catttattctttactattaa

SEQ ID NO: 194260 - DNA, 20 bp, synthetic construct
  source 1..20: mol_type = other DNA
acatttattctttactatta

SEQ ID NO: 194261 - DNA, 20 bp, synthetic construct
  source 1..20: mol_type = other DNA
cacatttattctttactatt

SEQ ID NO: 194262 - DNA, 20 bp, synthetic construct
  source 1..20: mol_type = other DNA
tcacatttattctttactat

SEQ ID NO: 194263 - DNA, 20 bp, synthetic construct
  source 1..20: mol_type = other DNA
ttcacatttattctttacta

SEQ ID NO: 194264 - DNA, 20 bp, synthetic construct
  source 1..20: mol_type = other DNA
tttcacatttattctttact

SEQ ID NO: 194265 - DNA, 20 bp, synthetic construct
  source 1..20: mol_type = other DNA
ctttcacatttattctttac

SEQ ID NO: 194266 - DNA, 20 bp, synthetic construct
  source 1..20: mol_type = other DNA
actttcacatttattcttta

SEQ ID NO: 194267 - DNA, 20 bp, synthetic construct
  source 1..20: mol_type = other DNA
cactttcacatttattcttt

SEQ ID NO: 194268 - DNA, 20 bp, synthetic construct
  source 1..20: mol_type = other DNA
tcactttcacatttattctt

SEQ ID NO: 194269 - DNA, 20 bp, synthetic construct
  source 1..20: mol_type = other DNA
ctcactttcacatttattct

SEQ ID NO: 194270 - DNA, 20 bp, synthetic construct
  source 1..20: mol_type = other DNA
tctcactttcacatttattc

SEQ ID NO: 194271 - DNA, 20 bp, synthetic construct
  source 1..20: mol_type = other DNA
ttctcactttcacatttatt

SEQ ID NO: 194272 - DNA, 20 bp, synthetic construct
  source 1..20: mol_type = other DNA
tttctcactttcacatttat

SEQ ID NO: 194273 - DNA, 20 bp, synthetic construct
  source 1..20: mol_type = other DNA
ttttctcactttcacattta

SEQ ID NO: 194274 - DNA, 20 bp, synthetic construct
  source 1..20: mol_type = other DNA
tttttctcactttcacattt

SEQ ID NO: 194275 - DNA, 20 bp, synthetic construct
  source 1..20: mol_type = other DNA
atttttctcactttcacatt

SEQ ID NO: 194276 - DNA, 20 bp, synthetic construct
  source 1..20: mol_type = other DNA
gatttttctcactttcacat

SEQ ID NO: 194277 - DNA, 20 bp, synthetic construct
  source 1..20: mol_type = other DNA
agatttttctcactttcaca

SEQ ID NO: 194278 - DNA, 20 bp, synthetic construct
  source 1..20: mol_type = other DNA
cagatttttctcactttcac

SEQ ID NO: 194279 - DNA, 20 bp, synthetic construct
  source 1..20: mol_type = other DNA
tcagatttttctcactttca

SEQ ID NO: 194280 - DNA, 20 bp, synthetic construct
  source 1..20: mol_type = other DNA
gtcagatttttctcactttc

SEQ ID NO: 194281 - DNA, 20 bp, synthetic construct
  source 1..20: mol_type = other DNA
agtcagatttttctcacttt

SEQ ID NO: 194282 - DNA, 20 bp, synthetic construct
  source 1..20: mol_type = other DNA
cagtcagatttttctcactt

SEQ ID NO: 194283 - DNA, 20 bp, synthetic construct
  source 1..20: mol_type = other DNA
gcagtcagatttttctcact

SEQ ID NO: 194284 - DNA, 20 bp, synthetic construct
  source 1..20: mol_type = other DNA
ggcagtcagatttttctcac

SEQ ID NO: 194285 - DNA, 20 bp, synthetic construct
  source 1..20: mol_type = other DNA
tggcagtcagatttttctca

SEQ ID NO: 194286 - DNA, 20 bp, synthetic construct
  source 1..20: mol_type = other DNA
ttggcagtcagatttttctc

SEQ ID NO: 194287 - DNA, 20 bp, synthetic construct
  source 1..20: mol_type = other DNA
tttggcagtcagatttttct

SEQ ID NO: 194288 - DNA, 20 bp, synthetic construct
  source 1..20: mol_type = other DNA
ctttggcagtcagatttttc

SEQ ID NO: 194289 - DNA, 20 bp, synthetic construct
  source 1..20: mol_type = other DNA
actttggcagtcagattttt

SEQ ID NO: 194290 - DNA, 20 bp, synthetic construct
  source 1..20: mol_type = other DNA
aactttggcagtcagatttt

SEQ ID NO: 194291 - DNA, 20 bp, synthetic construct
  source 1..20: mol_type = other DNA
aaactttggcagtcagattt

SEQ ID NO: 194292 - DNA, 20 bp, synthetic construct
  source 1..20: mol_type = other DNA
aaaactttggcagtcagatt

SEQ ID NO: 194293 - DNA, 20 bp, synthetic construct
  source 1..20: mol_type = other DNA
aaaaactttggcagtcagat

SEQ ID NO: 194294 - DNA, 20 bp, synthetic construct
  source 1..20: mol_type = other DNA
taaaaactttggcagtcaga

SEQ ID NO: 194295 - DNA, 20 bp, synthetic construct
  source 1..20: mol_type = other DNA
gtaaaaactttggcagtcag

SEQ ID NO: 194296 - DNA, 20 bp, synthetic construct
  source 1..20: mol_type = other DNA
agtaaaaactttggcagtca

SEQ ID NO: 194297 - DNA, 20 bp, synthetic construct
  source 1..20: mol_type = other DNA
gagtaaaaactttggcagtc

SEQ ID NO: 194298 - DNA, 20 bp, synthetic construct
  source 1..20: mol_type = other DNA
ggagtaaaaactttggcagt

SEQ ID NO: 194299 - DNA, 20 bp, synthetic construct
  source 1..20: mol_type = other DNA
aggagtaaaaactttggcag

SEQ ID NO: 194300 - DNA, 20 bp, synthetic construct
  source 1..20: mol_type = other DNA
aaggagtaaaaactttggca

SEQ ID NO: 194301 - DNA, 20 bp, synthetic construct
  source 1..20: mol_type = other DNA
gaaggagtaaaaactttggc

SEQ ID NO: 194302 - DNA, 20 bp, synthetic construct
  source 1..20: mol_type = other DNA
ggaaggagtaaaaactttgg

SEQ ID NO: 194303 - DNA, 20 bp, synthetic construct
  source 1..20: mol_type = other DNA
aggaaggagtaaaaactttg

SEQ ID NO: 194304 - DNA, 20 bp, synthetic construct
  source 1..20: mol_type = other DNA
aaggaaggagtaaaaacttt

SEQ ID NO: 194305 - DNA, 20 bp, synthetic construct
  source 1..20: mol_type = other DNA
gaaggaaggagtaaaaactt

SEQ ID NO: 194306 - DNA, 20 bp, synthetic construct
  source 1..20: mol_type = other DNA
ggaaggaaggagtaaaaact

SEQ ID NO: 194307 - DNA, 20 bp, synthetic construct
  source 1..20: mol_type = other DNA
gggaaggaaggagtaaaaac

SEQ ID NO: 194308 - DNA, 20 bp, synthetic construct
  source 1..20: mol_type = other DNA
agggaaggaaggagtaaaaa

SEQ ID NO: 194309 - DNA, 20 bp, synthetic construct
  source 1..20: mol_type = other DNA
gagggaaggaaggagtaaaa

SEQ ID NO: 194310 - DNA, 20 bp, synthetic construct
  source 1..20: mol_type = other DNA
ggagggaaggaaggagtaaa

SEQ ID NO: 194311 - DNA, 20 bp, synthetic construct
  source 1..20: mol_type = other DNA
gggagggaaggaaggagtaa

SEQ ID NO: 194312 - DNA, 20 bp, synthetic construct
  source 1..20: mol_type = other DNA
ggggagggaaggaaggagta

SEQ ID NO: 194313 - DNA, 20 bp, synthetic construct
  source 1..20: mol_type = other DNA
tggggagggaaggaaggagt

SEQ ID NO: 194314 - DNA, 20 bp, synthetic construct
  source 1..20: mol_type = other DNA
ctggggagggaaggaaggag

SEQ ID NO: 194315 - DNA, 20 bp, synthetic construct
  source 1..20: mol_type = other DNA
tctggggagggaaggaagga

SEQ ID NO: 194316 - DNA, 20 bp, synthetic construct
  source 1..20: mol_type = other DNA
gtctggggagggaaggaagg

SEQ ID NO: 194317 - DNA, 20 bp, synthetic construct
  source 1..20: mol_type = other DNA
agtctggggagggaaggaag

SEQ ID NO: 194318 - DNA, 20 bp, synthetic construct
  source 1..20: mol_type = other DNA
aagtctggggagggaaggaa

SEQ ID NO: 194319 - DNA, 20 bp, synthetic construct
  source 1..20: mol_type = other DNA
aaagtctggggagggaagga

SEQ ID NO: 194320 - DNA, 20 bp, synthetic construct
  source 1..20: mol_type = other DNA
aaaagtctggggagggaagg

SEQ ID NO: 194321 - DNA, 20 bp, synthetic construct
  source 1..20: mol_type = other DNA
taaaagtctggggagggaag

SEQ ID NO: 194322 - DNA, 20 bp, synthetic construct
  source 1..20: mol_type = other DNA
ttaaaagtctggggagggaa

SEQ ID NO: 194323 - DNA, 20 bp, synthetic construct
  source 1..20: mol_type = other DNA
tttaaaagtctggggaggga

SEQ ID NO: 194324 - DNA, 20 bp, synthetic construct
  source 1..20: mol_type = other DNA
atttaaaagtctggggaggg

SEQ ID NO: 194325 - DNA, 20 bp, synthetic construct
  source 1..20: mol_type = other DNA
catttaaaagtctggggagg

SEQ ID NO: 194326 - DNA, 20 bp, synthetic construct
  source 1..20: mol_type = other DNA
tcatttaaaagtctggggag

SEQ ID NO: 194327 - DNA, 20 bp, synthetic construct
  source 1..20: mol_type = other DNA
ttcatttaaaagtctgggga

SEQ ID NO: 194328 - DNA, 20 bp, synthetic construct
  source 1..20: mol_type = other DNA
tttcatttaaaagtctgggg

SEQ ID NO: 194329 - DNA, 20 bp, synthetic construct
  source 1..20: mol_type = other DNA
ctttcatttaaaagtctggg

SEQ ID NO: 194330 - DNA, 20 bp, synthetic construct
  source 1..20: mol_type = other DNA
actttcatttaaaagtctgg

SEQ ID NO: 194331 - DNA, 20 bp, synthetic construct
  source 1..20: mol_type = other DNA
aactttcatttaaaagtctg

SEQ ID NO: 194332 - DNA, 20 bp, synthetic construct
  source 1..20: mol_type = other DNA
aaactttcatttaaaagtct

SEQ ID NO: 194333 - DNA, 20 bp, synthetic construct
  source 1..20: mol_type = other DNA
taaactttcatttaaaagtc

SEQ ID NO: 194334 - DNA, 20 bp, synthetic construct
  source 1..20: mol_type = other DNA
ctaaactttcatttaaaagt

SEQ ID NO: 194335 - DNA, 20 bp, synthetic construct
  source 1..20: mol_type = other DNA
cctaaactttcatttaaaag

SEQ ID NO: 194336 - DNA, 20 bp, synthetic construct
  source 1..20: mol_type = other DNA
ccctaaactttcatttaaaa

SEQ ID NO: 194337 - DNA, 20 bp, synthetic construct
  source 1..20: mol_type = other DNA
tccctaaactttcatttaaa

SEQ ID NO: 194338 - DNA, 20 bp, synthetic construct
  source 1..20: mol_type = other DNA
atccctaaactttcatttaa

SEQ ID NO: 194339 - DNA, 20 bp, synthetic construct
  source 1..20: mol_type = other DNA
tatccctaaactttcattta

SEQ ID NO: 194340 - DNA, 20 bp, synthetic construct
  source 1..20: mol_type = other DNA
ttatccctaaactttcattt

SEQ ID NO: 194341 - DNA, 20 bp, synthetic construct
  source 1..20: mol_type = other DNA
attatccctaaactttcatt

SEQ ID NO: 194342 - DNA, 20 bp, synthetic construct
  source 1..20: mol_type = other DNA
gattatccctaaactttcat

SEQ ID NO: 194343 - DNA, 20 bp, synthetic construct
  source 1..20: mol_type = other DNA
ggattatccctaaactttca

SEQ ID NO: 194344 - DNA, 20 bp, synthetic construct
  source 1..20: mol_type = other DNA
gggattatccctaaactttc

SEQ ID NO: 194345 - DNA, 20 bp, synthetic construct
  source 1..20: mol_type = other DNA
agggattatccctaaacttt

SEQ ID NO: 194346 - DNA, 20 bp, synthetic construct
  source 1..20: mol_type = other DNA
aagggattatccctaaactt

SEQ ID NO: 194347 - DNA, 20 bp, synthetic construct
  source 1..20: mol_type = other DNA
taagggattatccctaaact

SEQ ID NO: 194348 - DNA, 20 bp, synthetic construct
  source 1..20: mol_type = other DNA
ctaagggattatccctaaac

SEQ ID NO: 194349 - DNA, 20 bp, synthetic construct
  source 1..20: mol_type = other DNA
actaagggattatccctaaa

SEQ ID NO: 194350 - DNA, 20 bp, synthetic construct
  source 1..20: mol_type = other DNA
aactaagggattatccctaa

SEQ ID NO: 194351 - DNA, 20 bp, synthetic construct
  source 1..20: mol_type = other DNA
caactaagggattatcccta

SEQ ID NO: 194352 - DNA, 20 bp, synthetic construct
  source 1..20: mol_type = other DNA
acaactaagggattatccct

SEQ ID NO: 194353 - DNA, 20 bp, synthetic construct
  source 1..20: mol_type = other DNA
gacaactaagggattatccc

SEQ ID NO: 194354 - DNA, 20 bp, synthetic construct
  source 1..20: mol_type = other DNA
ggacaactaagggattatcc

SEQ ID NO: 194355 - DNA, 20 bp, synthetic construct
  source 1..20: mol_type = other DNA
aggacaactaagggattatc

SEQ ID NO: 194356 - DNA, 20 bp, synthetic construct
  source 1..20: mol_type = other DNA
caggacaactaagggattat

SEQ ID NO: 194357 - DNA, 20 bp, synthetic construct
  source 1..20: mol_type = other DNA
gcaggacaactaagggatta

SEQ ID NO: 194358 - DNA, 20 bp, synthetic construct
  source 1..20: mol_type = other DNA
agcaggacaactaagggatt

SEQ ID NO: 194359 - DNA, 20 bp, synthetic construct
  source 1..20: mol_type = other DNA
tagcaggacaactaagggat

SEQ ID NO: 194360 - DNA, 20 bp, synthetic construct
  source 1..20: mol_type = other DNA
ctagcaggacaactaaggga

SEQ ID NO: 194361 - DNA, 20 bp, synthetic construct
  source 1..20: mol_type = other DNA
actagcaggacaactaaggg

SEQ ID NO: 194362 - DNA, 20 bp, synthetic construct
  source 1..20: mol_type = other DNA
tactagcaggacaactaagg

SEQ ID NO: 194363 - DNA, 20 bp, synthetic construct
  source 1..20: mol_type = other DNA
ctactagcaggacaactaag

SEQ ID NO: 194364 - DNA, 20 bp, synthetic construct
  source 1..20: mol_type = other DNA
cctactagcaggacaactaa

SEQ ID NO: 194365 - DNA, 20 bp, synthetic construct
  source 1..20: mol_type = other DNA
tcctactagcaggacaacta

SEQ ID NO: 194366 - DNA, 20 bp, synthetic construct
  source 1..20: mol_type = other DNA
gtcctactagcaggacaact

SEQ ID NO: 194367 - DNA, 20 bp, synthetic construct
  source 1..20: mol_type = other DNA
agtcctactagcaggacaac

SEQ ID NO: 194368 - DNA, 20 bp, synthetic construct
  source 1..20: mol_type = other DNA
aagtcctactagcaggacaa

SEQ ID NO: 194369 - DNA, 20 bp, synthetic construct
  source 1..20: mol_type = other DNA
caagtcctactagcaggaca

SEQ ID NO: 194370 - DNA, 20 bp, synthetic construct
  source 1..20: mol_type = other DNA
gcaagtcctactagcaggac

SEQ ID NO: 194371 - DNA, 20 bp, synthetic construct
  source 1..20: mol_type = other DNA
tgcaagtcctactagcagga

SEQ ID NO: 194372 - DNA, 20 bp, synthetic construct
  source 1..20: mol_type = other DNA
ttgcaagtcctactagcagg

SEQ ID NO: 194373 - DNA, 20 bp, synthetic construct
  source 1..20: mol_type = other DNA
attgcaagtcctactagcag

SEQ ID NO: 194374 - DNA, 20 bp, synthetic construct
  source 1..20: mol_type = other DNA
aattgcaagtcctactagca

SEQ ID NO: 194375 - DNA, 20 bp, synthetic construct
  source 1..20: mol_type = other DNA
taattgcaagtcctactagc

SEQ ID NO: 194376 - DNA, 20 bp, synthetic construct
  source 1..20: mol_type = other DNA
ttaattgcaagtcctactag

SEQ ID NO: 194377 - DNA, 20 bp, synthetic construct
  source 1..20: mol_type = other DNA
tttaattgcaagtcctacta

SEQ ID NO: 194378 - DNA, 20 bp, synthetic construct
  source 1..20: mol_type = other DNA
ttttaattgcaagtcctact

SEQ ID NO: 194379 - DNA, 20 bp, synthetic construct
  source 1..20: mol_type = other DNA
cttttaattgcaagtcctac

SEQ ID NO: 194380 - DNA, 20 bp, synthetic construct
  source 1..20: mol_type = other DNA
tcttttaattgcaagtccta

SEQ ID NO: 194381 - DNA, 20 bp, synthetic construct
  source 1..20: mol_type = other DNA
ttcttttaattgcaagtcct

SEQ ID NO: 194382 - DNA, 20 bp, synthetic construct
  source 1..20: mol_type = other DNA
attcttttaattgcaagtcc

SEQ ID NO: 194383 - DNA, 20 bp, synthetic construct
  source 1..20: mol_type = other DNA
aattcttttaattgcaagtc

SEQ ID NO: 194384 - DNA, 20 bp, synthetic construct
  source 1..20: mol_type = other DNA
caattcttttaattgcaagt

SEQ ID NO: 194385 - DNA, 20 bp, synthetic construct
  source 1..20: mol_type = other DNA
ccaattcttttaattgcaag

SEQ ID NO: 194386 - DNA, 20 bp, synthetic construct
  source 1..20: mol_type = other DNA
cccaattcttttaattgcaa

SEQ ID NO: 194387 - DNA, 20 bp, synthetic construct
  source 1..20: mol_type = other DNA
gcccaattcttttaattgca

SEQ ID NO: 194388 - DNA, 20 bp, synthetic construct
  source 1..20: mol_type = other DNA
ggcccaattcttttaattgc

SEQ ID NO: 194389 - DNA, 20 bp, synthetic construct
  source 1..20: mol_type = other DNA
tggcccaattcttttaattg

SEQ ID NO: 194390 - DNA, 20 bp, synthetic construct
  source 1..20: mol_type = other DNA
ttggcccaattcttttaatt

SEQ ID NO: 194391 - DNA, 20 bp, synthetic construct
  source 1..20: mol_type = other DNA
cttggcccaattcttttaat

SEQ ID NO: 194392 - DNA, 20 bp, synthetic construct
  source 1..20: mol_type = other DNA
tcttggcccaattcttttaa

SEQ ID NO: 194393 - DNA, 20 bp, synthetic construct
  source 1..20: mol_type = other DNA
ttcttggcccaattctttta

SEQ ID NO: 194394 - DNA, 20 bp, synthetic construct
  source 1..20: mol_type = other DNA
gttcttggcccaattctttt

SEQ ID NO: 194395 - DNA, 20 bp, synthetic construct
  source 1..20: mol_type = other DNA
tgttcttggcccaattcttt

SEQ ID NO: 194396 - DNA, 20 bp, synthetic construct
  source 1..20: mol_type = other DNA
gtgttcttggcccaattctt

SEQ ID NO: 194397 - DNA, 20 bp, synthetic construct
  source 1..20: mol_type = other DNA
agtgttcttggcccaattct

SEQ ID NO: 194398 - DNA, 20 bp, synthetic construct
  source 1..20: mol_type = other DNA
aagtgttcttggcccaattc

SEQ ID NO: 194399 - DNA, 20 bp, synthetic construct
  source 1..20: mol_type = other DNA
gaagtgttcttggcccaatt

SEQ ID NO: 194400 - DNA, 20 bp, synthetic construct
  source 1..20: mol_type = other DNA
agaagtgttcttggcccaat

SEQ ID NO: 194401 - DNA, 20 bp, synthetic construct
  source 1..20: mol_type = other DNA
tagaagtgttcttggcccaa

SEQ ID NO: 194402 - DNA, 20 bp, synthetic construct
  source 1..20: mol_type = other DNA
gtagaagtgttcttggccca

SEQ ID NO: 194403 - DNA, 20 bp, synthetic construct
  source 1..20: mol_type = other DNA
cgtagaagtgttcttggccc

SEQ ID NO: 194404 - DNA, 20 bp, synthetic construct
  source 1..20: mol_type = other DNA
gcgtagaagtgttcttggcc

SEQ ID NO: 194405 - DNA, 20 bp, synthetic construct
  source 1..20: mol_type = other DNA
agcgtagaagtgttcttggc

SEQ ID NO: 194406 - DNA, 20 bp, synthetic construct
  source 1..20: mol_type = other DNA
aagcgtagaagtgttcttgg

SEQ ID NO: 194407 - DNA, 20 bp, synthetic construct
  source 1..20: mol_type = other DNA
gaagcgtagaagtgttcttg

SEQ ID NO: 194408 - DNA, 20 bp, synthetic construct
  source 1..20: mol_type = other DNA
agaagcgtagaagtgttctt

SEQ ID NO: 194409 - DNA, 20 bp, synthetic construct
  source 1..20: mol_type = other DNA
gagaagcgtagaagtgttct

SEQ ID NO: 194410 - DNA, 20 bp, synthetic construct
  source 1..20: mol_type = other DNA
ggagaagcgtagaagtgttc

SEQ ID NO: 194411 - DNA, 20 bp, synthetic construct
  source 1..20: mol_type = other DNA
aggagaagcgtagaagtgtt

SEQ ID NO: 194412 - DNA, 20 bp, synthetic construct
  source 1..20: mol_type = other DNA
aaggagaagcgtagaagtgt

SEQ ID NO: 194413 - DNA, 20 bp, synthetic construct
  source 1..20: mol_type = other DNA
aaaggagaagcgtagaagtg

SEQ ID NO: 194414 - DNA, 20 bp, synthetic construct
  source 1..20: mol_type = other DNA
aaaaggagaagcgtagaagt

SEQ ID NO: 194415 - DNA, 20 bp, synthetic construct
  source 1..20: mol_type = other DNA
taaaaggagaagcgtagaag

SEQ ID NO: 194416 - DNA, 20 bp, synthetic construct
  source 1..20: mol_type = other DNA
ctaaaaggagaagcgtagaa

SEQ ID NO: 194417 - DNA, 20 bp, synthetic construct
  source 1..20: mol_type = other DNA
cctaaaaggagaagcgtaga

SEQ ID NO: 194418 - DNA, 20 bp, synthetic construct
  source 1..20: mol_type = other DNA
acctaaaaggagaagcgtag

SEQ ID NO: 194419 - DNA, 20 bp, synthetic construct
  source 1..20: mol_type = other DNA
aacctaaaaggagaagcgta

SEQ ID NO: 194420 - DNA, 20 bp, synthetic construct
  source 1..20: mol_type = other DNA
aaacctaaaaggagaagcgt

SEQ ID NO: 194421 - DNA, 20 bp, synthetic construct
  source 1..20: mol_type = other DNA
caaacctaaaaggagaagcg

SEQ ID NO: 194422 - DNA, 20 bp, synthetic construct
  source 1..20: mol_type = other DNA
ccaaacctaaaaggagaagc

SEQ ID NO: 194423 - DNA, 20 bp, synthetic construct
  source 1..20: mol_type = other DNA
cccaaacctaaaaggagaag

SEQ ID NO: 194424 - DNA, 20 bp, synthetic construct
  source 1..20: mol_type = other DNA
acccaaacctaaaaggagaa

SEQ ID NO: 194425 - DNA, 20 bp, synthetic construct
  source 1..20: mol_type = other DNA
cacccaaacctaaaaggaga

SEQ ID NO: 194426 - DNA, 20 bp, synthetic construct
  source 1..20: mol_type = other DNA
acacccaaacctaaaaggag

SEQ ID NO: 194427 - DNA, 20 bp, synthetic construct
  source 1..20: mol_type = other DNA
tacacccaaacctaaaagga

SEQ ID NO: 194428 - DNA, 20 bp, synthetic construct
  source 1..20: mol_type = other DNA
ttacacccaaacctaaaagg

SEQ ID NO: 194429 - DNA, 20 bp, synthetic construct
  source 1..20: mol_type = other DNA
tttacacccaaacctaaaag

SEQ ID NO: 194430 - DNA, 20 bp, synthetic construct
  source 1..20: mol_type = other DNA
atttacacccaaacctaaaa

SEQ ID NO: 194431 - DNA, 20 bp, synthetic construct
  source 1..20: mol_type = other DNA
aatttacacccaaacctaaa

SEQ ID NO: 194432 - DNA, 20 bp, synthetic construct
  source 1..20: mol_type = other DNA
gaatttacacccaaacctaa

SEQ ID NO: 194433 - DNA, 20 bp, synthetic construct
  source 1..20: mol_type = other DNA
cgaatttacacccaaaccta

SEQ ID NO: 194434 - DNA, 20 bp, synthetic construct
  source 1..20: mol_type = other DNA
ccgaatttacacccaaacct

SEQ ID NO: 194435 - DNA, 20 bp, synthetic construct
  source 1..20: mol_type = other DNA
cccgaatttacacccaaacc

SEQ ID NO: 194436 - DNA, 20 bp, synthetic construct
  source 1..20: mol_type = other DNA
ccccgaatttacacccaaac

SEQ ID NO: 194437 - DNA, 20 bp, synthetic construct
  source 1..20: mol_type = other DNA
accccgaatttacacccaaa

SEQ ID NO: 194438 - DNA, 20 bp, synthetic construct
  source 1..20: mol_type = other DNA
taccccgaatttacacccaa

SEQ ID NO: 194439 - DNA, 20 bp, synthetic construct
  source 1..20: mol_type = other DNA
ataccccgaatttacaccca

SEQ ID NO: 194440 - DNA, 20 bp, synthetic construct
  source 1..20: mol_type = other DNA
aataccccgaatttacaccc

SEQ ID NO: 194441 - DNA, 20 bp, synthetic construct
  source 1..20: mol_type = other DNA
aaataccccgaatttacacc

SEQ ID NO: 194442 - DNA, 20 bp, synthetic construct
  source 1..20: mol_type = other DNA
gaaataccccgaatttacac

SEQ ID NO: 194443 - DNA, 20 bp, synthetic construct
  source 1..20: mol_type = other DNA
agaaataccccgaatttaca

SEQ ID NO: 194444 - DNA, 20 bp, synthetic construct
  source 1..20: mol_type = other DNA
gagaaataccccgaatttac

SEQ ID NO: 194445 - DNA, 20 bp, synthetic construct
  source 1..20: mol_type = other DNA
tgagaaataccccgaattta

SEQ ID NO: 194446 - DNA, 20 bp, synthetic construct
  source 1..20: mol_type = other DNA
gtgagaaataccccgaattt

SEQ ID NO: 194447 - DNA, 20 bp, synthetic construct
  source 1..20: mol_type = other DNA
agtgagaaataccccgaatt

SEQ ID NO: 194448 - DNA, 20 bp, synthetic construct
  source 1..20: mol_type = other DNA
cagtgagaaataccccgaat

SEQ ID NO: 194449 - DNA, 20 bp, synthetic construct
  source 1..20: mol_type = other DNA
tcagtgagaaataccccgaa

SEQ ID NO: 194450 - DNA, 20 bp, synthetic construct
  source 1..20: mol_type = other DNA
atcagtgagaaataccccga

SEQ ID NO: 194451 - DNA, 20 bp, synthetic construct
  source 1..20: mol_type = other DNA
catcagtgagaaataccccg

SEQ ID NO: 194452 - DNA, 20 bp, synthetic construct
  source 1..20: mol_type = other DNA
tcatcagtgagaaatacccc

SEQ ID NO: 194453 - DNA, 20 bp, synthetic construct
  source 1..20: mol_type = other DNA
ttcatcagtgagaaataccc

SEQ ID NO: 194454 - DNA, 20 bp, synthetic construct
  source 1..20: mol_type = other DNA
tttcatcagtgagaaatacc

SEQ ID NO: 194455 - DNA, 20 bp, synthetic construct
  source 1..20: mol_type = other DNA
ctttcatcagtgagaaatac

SEQ ID NO: 194456 - DNA, 20 bp, synthetic construct
  source 1..20: mol_type = other DNA
gctttcatcagtgagaaata

SEQ ID NO: 194457 - DNA, 20 bp, synthetic construct
  source 1..20: mol_type = other DNA
ggctttcatcagtgagaaat

SEQ ID NO: 194458 - DNA, 20 bp, synthetic construct
  source 1..20: mol_type = other DNA
aggctttcatcagtgagaaa

SEQ ID NO: 194459 - DNA, 20 bp, synthetic construct
  source 1..20: mol_type = other DNA
caggctttcatcagtgagaa

SEQ ID NO: 194460 - DNA, 20 bp, synthetic construct
  source 1..20: mol_type = other DNA
ccaggctttcatcagtgaga

SEQ ID NO: 194461 - DNA, 20 bp, synthetic construct
  source 1..20: mol_type = other DNA
accaggctttcatcagtgag

SEQ ID NO: 194462 - DNA, 20 bp, synthetic construct
  source 1..20: mol_type = other DNA
caccaggctttcatcagtga

SEQ ID NO: 194463 - DNA, 20 bp, synthetic construct
  source 1..20: mol_type = other DNA
gcaccaggctttcatcagtg

SEQ ID NO: 194464 - DNA, 20 bp, synthetic construct
  source 1..20: mol_type = other DNA
tgcaccaggctttcatcagt

SEQ ID NO: 194465 - DNA, 20 bp, synthetic construct
  source 1..20: mol_type = other DNA
ctgcaccaggctttcatcag

SEQ ID NO: 194466 - DNA, 20 bp, synthetic construct
  source 1..20: mol_type = other DNA
cctgcaccaggctttcatca

SEQ ID NO: 194467 - DNA, 20 bp, synthetic construct
  source 1..20: mol_type = other DNA
ccctgcaccaggctttcatc

SEQ ID NO: 194468 - DNA, 20 bp, synthetic construct
  source 1..20: mol_type = other DNA
gccctgcaccaggctttcat

SEQ ID NO: 194469 - DNA, 20 bp, synthetic construct
  source 1..20: mol_type = other DNA
tgccctgcaccaggctttca

SEQ ID NO: 194470 - DNA, 20 bp, synthetic construct
  source 1..20: mol_type = other DNA
ctgccctgcaccaggctttc

SEQ ID NO: 194471 - DNA, 20 bp, synthetic construct
  source 1..20: mol_type = other DNA
tctgccctgcaccaggcttt

SEQ ID NO: 194472 - DNA, 20 bp, synthetic construct
  source 1..20: mol_type = other DNA
gtctgccctgcaccaggctt

SEQ ID NO: 194473 - DNA, 20 bp, synthetic construct
  source 1..20: mol_type = other DNA
ggtctgccctgcaccaggct

SEQ ID NO: 194474 - DNA, 20 bp, synthetic construct
  source 1..20: mol_type = other DNA
cggtctgccctgcaccaggc

SEQ ID NO: 194475 - DNA, 20 bp, synthetic construct
  source 1..20: mol_type = other DNA
acggtctgccctgcaccagg

SEQ ID NO: 194476 - DNA, 20 bp, synthetic construct
  source 1..20: mol_type = other DNA
cacggtctgccctgcaccag

SEQ ID NO: 194477 - DNA, 20 bp, synthetic construct
  source 1..20: mol_type = other DNA
ccacggtctgccctgcacca

SEQ ID NO: 194478 - DNA, 20 bp, synthetic construct
  source 1..20: mol_type = other DNA
cccacggtctgccctgcacc

SEQ ID NO: 194479 - DNA, 20 bp, synthetic construct
  source 1..20: mol_type = other DNA
tcccacggtctgccctgcac

SEQ ID NO: 194480 - DNA, 20 bp, synthetic construct
  source 1..20: mol_type = other DNA
ttcccacggtctgccctgca

SEQ ID NO: 194481 - DNA, 20 bp, synthetic construct
  source 1..20: mol_type = other DNA
cttcccacggtctgccctgc

SEQ ID NO: 194482 - DNA, 20 bp, synthetic construct
  source 1..20: mol_type = other DNA
gcttcccacggtctgccctg

SEQ ID NO: 194483 - DNA, 20 bp, synthetic construct
  source 1..20: mol_type = other DNA
agcttcccacggtctgccct

SEQ ID NO: 194484 - DNA, 20 bp, synthetic construct
  source 1..20: mol_type = other DNA
aagcttcccacggtctgccc

SEQ ID NO: 194485 - DNA, 20 bp, synthetic construct
  source 1..20: mol_type = other DNA
aaagcttcccacggtctgcc

SEQ ID NO: 194486 - DNA, 20 bp, synthetic construct
  source 1..20: mol_type = other DNA
gaaagcttcccacggtctgc

SEQ ID NO: 194487 - DNA, 20 bp, synthetic construct
  source 1..20: mol_type = other DNA
tgaaagcttcccacggtctg

SEQ ID NO: 194488 - DNA, 20 bp, synthetic construct
  source 1..20: mol_type = other DNA
atgaaagcttcccacggtct

SEQ ID NO: 194489 - DNA, 20 bp, synthetic construct
  source 1..20: mol_type = other DNA
aatgaaagcttcccacggtc

SEQ ID NO: 194490 - DNA, 20 bp, synthetic construct
  source 1..20: mol_type = other DNA
aaatgaaagcttcccacggt

SEQ ID NO: 194491 - DNA, 20 bp, synthetic construct
  source 1..20: mol_type = other DNA
gaaatgaaagcttcccacgg

SEQ ID NO: 194492 - DNA, 20 bp, synthetic construct
  source 1..20: mol_type = other DNA
ggaaatgaaagcttcccacg

SEQ ID NO: 194493 - DNA, 20 bp, synthetic construct
  source 1..20: mol_type = other DNA
cggaaatgaaagcttcccac

SEQ ID NO: 194494 - DNA, 20 bp, synthetic construct
  source 1..20: mol_type = other DNA
ccggaaatgaaagcttccca

SEQ ID NO: 194495 - DNA, 20 bp, synthetic construct
  source 1..20: mol_type = other DNA
tccggaaatgaaagcttccc

SEQ ID NO: 194496 - DNA, 20 bp, synthetic construct
  source 1..20: mol_type = other DNA
ttccggaaatgaaagcttcc

SEQ ID NO: 194497 - DNA, 20 bp, synthetic construct
  source 1..20: mol_type = other DNA
attccggaaatgaaagcttc

SEQ ID NO: 194498 - DNA, 20 bp, synthetic construct
  source 1..20: mol_type = other DNA
cattccggaaatgaaagctt

SEQ ID NO: 194499 - DNA, 20 bp, synthetic construct
  source 1..20: mol_type = other DNA
ccattccggaaatgaaagct

SEQ ID NO: 194500 - DNA, 20 bp, synthetic construct
  source 1..20: mol_type = other DNA
tccattccggaaatgaaagc

SEQ ID NO: 194501 - DNA, 20 bp, synthetic construct
  source 1..20: mol_type = other DNA
gtccattccggaaatgaaag

SEQ ID NO: 194502 - DNA, 20 bp, synthetic construct
  source 1..20: mol_type = other DNA
ggtccattccggaaatgaaa

SEQ ID NO: 194503 - DNA, 20 bp, synthetic construct
  source 1..20: mol_type = other DNA
tggtccattccggaaatgaa

SEQ ID NO: 194504 - DNA, 20 bp, synthetic construct
  source 1..20: mol_type = other DNA
atggtccattccggaaatga

SEQ ID NO: 194505 - DNA, 20 bp, synthetic construct
  source 1..20: mol_type = other DNA
gatggtccattccggaaatg

SEQ ID NO: 194506 - DNA, 20 bp, synthetic construct
  source 1..20: mol_type = other DNA
tgatggtccattccggaaat

SEQ ID NO: 194507 - DNA, 20 bp, synthetic construct
  source 1..20: mol_type = other DNA
ttgatggtccattccggaaa

SEQ ID NO: 194508 - DNA, 20 bp, synthetic construct
  source 1..20: mol_type = other DNA
gttgatggtccattccggaa

SEQ ID NO: 194509 - DNA, 20 bp, synthetic construct
  source 1..20: mol_type = other DNA
tgttgatggtccattccgga

SEQ ID NO: 194510 - DNA, 20 bp, synthetic construct
  source 1..20: mol_type = other DNA
atgttgatggtccattccgg

SEQ ID NO: 194511 - DNA, 20 bp, synthetic construct
  source 1..20: mol_type = other DNA
gatgttgatggtccattccg

SEQ ID NO: 194512 - DNA, 20 bp, synthetic construct
  source 1..20: mol_type = other DNA
ggatgttgatggtccattcc

SEQ ID NO: 194513 - DNA, 20 bp, synthetic construct
  source 1..20: mol_type = other DNA
gggatgttgatggtccattc

SEQ ID NO: 194514 - DNA, 20 bp, synthetic construct
  source 1..20: mol_type = other DNA
agggatgttgatggtccatt

SEQ ID NO: 194515 - DNA, 20 bp, synthetic construct
  source 1..20: mol_type = other DNA
aagggatgttgatggtccat

SEQ ID NO: 194516 - DNA, 20 bp, synthetic construct
  source 1..20: mol_type = other DNA
caagggatgttgatggtcca

SEQ ID NO: 194517 - DNA, 20 bp, synthetic construct
  source 1..20: mol_type = other DNA
ccaagggatgttgatggtcc

SEQ ID NO: 194518 - DNA, 20 bp, synthetic construct
  source 1..20: mol_type = other DNA
tccaagggatgttgatggtc

SEQ ID NO: 194519 - DNA, 20 bp, synthetic construct
  source 1..20: mol_type = other DNA
ctccaagggatgttgatggt

SEQ ID NO: 194520 - DNA, 20 bp, synthetic construct
  source 1..20: mol_type = other DNA
tctccaagggatgttgatgg

SEQ ID NO: 194521 - DNA, 20 bp, synthetic construct
  source 1..20: mol_type = other DNA
ttctccaagggatgttgatg

SEQ ID NO: 194522 - DNA, 20 bp, synthetic construct
  source 1..20: mol_type = other DNA
cttctccaagggatgttgat

SEQ ID NO: 194523 - DNA, 20 bp, synthetic construct
  source 1..20: mol_type = other DNA
tcttctccaagggatgttga

SEQ ID NO: 194524 - DNA, 20 bp, synthetic construct
  source 1..20: mol_type = other DNA
ttcttctccaagggatgttg

SEQ ID NO: 194525 - DNA, 20 bp, synthetic construct
  source 1..20: mol_type = other DNA
attcttctccaagggatgtt

SEQ ID NO: 194526 - DNA, 20 bp, synthetic construct
  source 1..20: mol_type = other DNA
aattcttctccaagggatgt

SEQ ID NO: 194527 - DNA, 20 bp, synthetic construct
  source 1..20: mol_type = other DNA
gaattcttctccaagggatg

SEQ ID NO: 194528 - DNA, 20 bp, synthetic construct
  source 1..20: mol_type = other DNA
agaattcttctccaagggat

SEQ ID NO: 194529 - DNA, 20 bp, synthetic construct
  source 1..20: mol_type = other DNA
gagaattcttctccaaggga

SEQ ID NO: 194530 - DNA, 20 bp, synthetic construct
  source 1..20: mol_type = other DNA
agagaattcttctccaaggg

SEQ ID NO: 194531 - DNA, 20 bp, synthetic construct
  source 1..20: mol_type = other DNA
aagagaattcttctccaagg

SEQ ID NO: 194532 - DNA, 20 bp, synthetic construct
  source 1..20: mol_type = other DNA
gaagagaattcttctccaag

SEQ ID NO: 194533 - DNA, 20 bp, synthetic construct
  source 1..20: mol_type = other DNA
agaagagaattcttctccaa

SEQ ID NO: 194534 - DNA, 20 bp, synthetic construct
  source 1..20: mol_type = other DNA
gagaagagaattcttctcca

SEQ ID NO: 194535 - DNA, 20 bp, synthetic construct
  source 1..20: mol_type = other DNA
ggagaagagaattcttctcc

SEQ ID NO: 194536 - DNA, 20 bp, synthetic construct
  source 1..20: mol_type = other DNA
tggagaagagaattcttctc

SEQ ID NO: 194537 - DNA, 20 bp, synthetic construct
  source 1..20: mol_type = other DNA
ctggagaagagaattcttct

SEQ ID NO: 194538 - DNA, 20 bp, synthetic construct
  source 1..20: mol_type = other DNA
tctggagaagagaattcttc

SEQ ID NO: 194539 - DNA, 20 bp, synthetic construct
  source 1..20: mol_type = other DNA
gtctggagaagagaattctt

SEQ ID NO: 194540 - DNA, 20 bp, synthetic construct
  source 1..20: mol_type = other DNA
ggtctggagaagagaattct

SEQ ID NO: 194541 - DNA, 20 bp, synthetic construct
  source 1..20: mol_type = other DNA
gggtctggagaagagaattc

SEQ ID NO: 194542 - DNA, 20 bp, synthetic construct
  source 1..20: mol_type = other DNA
tgggtctggagaagagaatt

SEQ ID NO: 194543 - DNA, 20 bp, synthetic construct
  source 1..20: mol_type = other DNA
ctgggtctggagaagagaat

SEQ ID NO: 194544 - DNA, 20 bp, synthetic construct
  source 1..20: mol_type = other DNA
tctgggtctggagaagagaa

SEQ ID NO: 194545 - DNA, 20 bp, synthetic construct
  source 1..20: mol_type = other DNA
gtctgggtctggagaagaga

SEQ ID NO: 194546 - DNA, 20 bp, synthetic construct
  source 1..20: mol_type = other DNA
ggtctgggtctggagaagag

SEQ ID NO: 194547 - DNA, 20 bp, synthetic construct
  source 1..20: mol_type = other DNA
aggtctgggtctggagaaga

SEQ ID NO: 194548 - DNA, 20 bp, synthetic construct
  source 1..20: mol_type = other DNA
caggtctgggtctggagaag

SEQ ID NO: 194549 - DNA, 20 bp, synthetic construct
  source 1..20: mol_type = other DNA
ccaggtctgggtctggagaa

SEQ ID NO: 194550 - DNA, 20 bp, synthetic construct
  source 1..20: mol_type = other DNA
accaggtctgggtctggaga

SEQ ID NO: 194551 - DNA, 20 bp, synthetic construct
  source 1..20: mol_type = other DNA
caccaggtctgggtctggag

SEQ ID NO: 194552 - DNA, 20 bp, synthetic construct
  source 1..20: mol_type = other DNA
acaccaggtctgggtctgga

SEQ ID NO: 194553 - DNA, 20 bp, synthetic construct
  source 1..20: mol_type = other DNA
gacaccaggtctgggtctgg

SEQ ID NO: 194554 - DNA, 20 bp, synthetic construct
  source 1..20: mol_type = other DNA
ggacaccaggtctgggtctg

SEQ ID NO: 194555 - DNA, 20 bp, synthetic construct
  source 1..20: mol_type = other DNA
aggacaccaggtctgggtct

SEQ ID NO: 194556 - DNA, 20 bp, synthetic construct
  source 1..20: mol_type = other DNA
caggacaccaggtctgggtc

SEQ ID NO: 194557 - DNA, 20 bp, synthetic construct
  source 1..20: mol_type = other DNA
ccaggacaccaggtctgggt

SEQ ID NO: 194558 - DNA, 20 bp, synthetic construct
  source 1..20: mol_type = other DNA
gccaggacaccaggtctggg

SEQ ID NO: 194559 - DNA, 20 bp, synthetic construct
  source 1..20: mol_type = other DNA
tgccaggacaccaggtctgg

SEQ ID NO: 194560 - DNA, 20 bp, synthetic construct
  source 1..20: mol_type = other DNA
gtgccaggacaccaggtctg

SEQ ID NO: 194561 - DNA, 20 bp, synthetic construct
  source 1..20: mol_type = other DNA
ggtgccaggacaccaggtct

SEQ ID NO: 194562 - DNA, 20 bp, synthetic construct
  source 1..20: mol_type = other DNA
gggtgccaggacaccaggtc

SEQ ID NO: 194563 - DNA, 20 bp, synthetic construct
  source 1..20: mol_type = other DNA
tgggtgccaggacaccaggt

SEQ ID NO: 194564 - DNA, 20 bp, synthetic construct
  source 1..20: mol_type = other DNA
atgggtgccaggacaccagg

SEQ ID NO: 194565 - DNA, 20 bp, synthetic construct
  source 1..20: mol_type = other DNA
aatgggtgccaggacaccag

SEQ ID NO: 194566 - DNA, 20 bp, synthetic construct
  source 1..20: mol_type = other DNA
caatgggtgccaggacacca

SEQ ID NO: 194567 - DNA, 20 bp, synthetic construct
  source 1..20: mol_type = other DNA
ccaatgggtgccaggacacc

SEQ ID NO: 194568 - DNA, 20 bp, synthetic construct
  source 1..20: mol_type = other DNA
cccaatgggtgccaggacac

SEQ ID NO: 194569 - DNA, 20 bp, synthetic construct
  source 1..20: mol_type = other DNA
gcccaatgggtgccaggaca

SEQ ID NO: 194570 - DNA, 20 bp, synthetic construct
  source 1..20: mol_type = other DNA
tgcccaatgggtgccaggac

SEQ ID NO: 194571 - DNA, 20 bp, synthetic construct
  source 1..20: mol_type = other DNA
ttgcccaatgggtgccagga

SEQ ID NO: 194572 - DNA, 20 bp, synthetic construct
  source 1..20: mol_type = other DNA
cttgcccaatgggtgccagg

SEQ ID NO: 194573 - DNA, 20 bp, synthetic construct
  source 1..20: mol_type = other DNA
acttgcccaatgggtgccag

SEQ ID NO: 194574 - DNA, 20 bp, synthetic construct
  source 1..20: mol_type = other DNA
cacttgcccaatgggtgcca

SEQ ID NO: 194575 - DNA, 20 bp, synthetic construct
  source 1..20: mol_type = other DNA
ccacttgcccaatgggtgcc

SEQ ID NO: 194576 - DNA, 20 bp, synthetic construct
  source 1..20: mol_type = other DNA
cccacttgcccaatgggtgc

SEQ ID NO: 194577 - DNA, 20 bp, synthetic construct
  source 1..20: mol_type = other DNA
acccacttgcccaatgggtg

SEQ ID NO: 194578 - DNA, 20 bp, synthetic construct
  source 1..20: mol_type = other DNA
gacccacttgcccaatgggt

SEQ ID NO: 194579 - DNA, 20 bp, synthetic construct
  source 1..20: mol_type = other DNA
ggacccacttgcccaatggg

SEQ ID NO: 194580 - DNA, 20 bp, synthetic construct
  source 1..20: mol_type = other DNA
aggacccacttgcccaatgg

SEQ ID NO: 194581 - DNA, 20 bp, synthetic construct
  source 1..20: mol_type = other DNA
taggacccacttgcccaatg

SEQ ID NO: 194582 - DNA, 20 bp, synthetic construct
  source 1..20: mol_type = other DNA
ctaggacccacttgcccaat

SEQ ID NO: 194583 - DNA, 20 bp, synthetic construct
  source 1..20: mol_type = other DNA
tctaggacccacttgcccaa

SEQ ID NO: 194584 - DNA, 20 bp, synthetic construct
  source 1..20: mol_type = other DNA
ttctaggacccacttgccca

SEQ ID NO: 194585 - DNA, 20 bp, synthetic construct
  source 1..20: mol_type = other DNA
cttctaggacccacttgccc

SEQ ID NO: 194586 - DNA, 20 bp, synthetic construct
  source 1..20: mol_type = other DNA
tcttctaggacccacttgcc

SEQ ID NO: 194587 - DNA, 20 bp, synthetic construct
  source 1..20: mol_type = other DNA
gtcttctaggacccacttgc

SEQ ID NO: 194588 - DNA, 20 bp, synthetic construct
  source 1..20: mol_type = other DNA
tgtcttctaggacccacttg

SEQ ID NO: 194589 - DNA, 20 bp, synthetic construct
  source 1..20: mol_type = other DNA
ttgtcttctaggacccactt

SEQ ID NO: 194590 - DNA, 20 bp, synthetic construct
  source 1..20: mol_type = other DNA
tttgtcttctaggacccact

SEQ ID NO: 194591 - DNA, 20 bp, synthetic construct
  source 1..20: mol_type = other DNA
gtttgtcttctaggacccac

SEQ ID NO: 194592 - DNA, 20 bp, synthetic construct
  source 1..20: mol_type = other DNA
ggtttgtcttctaggaccca

SEQ ID NO: 194593 - DNA, 20 bp, synthetic construct
  source 1..20: mol_type = other DNA
aggtttgtcttctaggaccc

SEQ ID NO: 194594 - DNA, 20 bp, synthetic construct
  source 1..20: mol_type = other DNA
caggtttgtcttctaggacc

SEQ ID NO: 194595 - DNA, 20 bp, synthetic construct
  source 1..20: mol_type = other DNA
ccaggtttgtcttctaggac

SEQ ID NO: 194596 - DNA, 20 bp, synthetic construct
  source 1..20: mol_type = other DNA
accaggtttgtcttctagga

SEQ ID NO: 194597 - DNA, 20 bp, synthetic construct
  source 1..20: mol_type = other DNA
gaccaggtttgtcttctagg

SEQ ID NO: 194598 - DNA, 20 bp, synthetic construct
  source 1..20: mol_type = other DNA
tgaccaggtttgtcttctag

SEQ ID NO: 194599 - DNA, 20 bp, synthetic construct
  source 1..20: mol_type = other DNA
ctgaccaggtttgtcttcta

SEQ ID NO: 194600 - DNA, 20 bp, synthetic construct
  source 1..20: mol_type = other DNA
tctgaccaggtttgtcttct

SEQ ID NO: 194601 - DNA, 20 bp, synthetic construct
  source 1..20: mol_type = other DNA
ctctgaccaggtttgtcttc

SEQ ID NO: 194602 - DNA, 20 bp, synthetic construct
  source 1..20: mol_type = other DNA
gctctgaccaggtttgtctt

SEQ ID NO: 194603 - DNA, 20 bp, synthetic construct
  source 1..20: mol_type = other DNA
ggctctgaccaggtttgtct

SEQ ID NO: 194604 - DNA, 20 bp, synthetic construct
  source 1..20: mol_type = other DNA
aggctctgaccaggtttgtc

SEQ ID NO: 194605 - DNA, 20 bp, synthetic construct
  source 1..20: mol_type = other DNA
caggctctgaccaggtttgt

SEQ ID NO: 194606 - DNA, 20 bp, synthetic construct
  source 1..20: mol_type = other DNA
ccaggctctgaccaggtttg

SEQ ID NO: 194607 - DNA, 20 bp, synthetic construct
  source 1..20: mol_type = other DNA
tccaggctctgaccaggttt

SEQ ID NO: 194608 - DNA, 20 bp, synthetic construct
  source 1..20: mol_type = other DNA
ctccaggctctgaccaggtt

SEQ ID NO: 194609 - DNA, 20 bp, synthetic construct
  source 1..20: mol_type = other DNA
cctccaggctctgaccaggt

SEQ ID NO: 194610 - DNA, 20 bp, synthetic construct
  source 1..20: mol_type = other DNA
gcctccaggctctgaccagg

SEQ ID NO: 194611 - DNA, 20 bp, synthetic construct
  source 1..20: mol_type = other DNA
agcctccaggctctgaccag

SEQ ID NO: 194612 - DNA, 20 bp, synthetic construct
  source 1..20: mol_type = other DNA
cagcctccaggctctgacca

SEQ ID NO: 194613 - DNA, 20 bp, synthetic construct
  source 1..20: mol_type = other DNA
gcagcctccaggctctgacc

SEQ ID NO: 194614 - DNA, 20 bp, synthetic construct
  source 1..20: mol_type = other DNA
agcagcctccaggctctgac

SEQ ID NO: 194615 - DNA, 20 bp, synthetic construct
  source 1..20: mol_type = other DNA
aagcagcctccaggctctga

SEQ ID NO: 194616 - DNA, 20 bp, synthetic construct
  source 1..20: mol_type = other DNA
taagcagcctccaggctctg

SEQ ID NO: 194617 - DNA, 20 bp, synthetic construct
  source 1..20: mol_type = other DNA
ctaagcagcctccaggctct

SEQ ID NO: 194618 - DNA, 20 bp, synthetic construct
  source 1..20: mol_type = other DNA
gctaagcagcctccaggctc

SEQ ID NO: 194619 - DNA, 20 bp, synthetic construct
  source 1..20: mol_type = other DNA
tgctaagcagcctccaggct

SEQ ID NO: 194620 - DNA, 20 bp, synthetic construct
  source 1..20: mol_type = other DNA
atgctaagcagcctccaggc

SEQ ID NO: 194621 - DNA, 20 bp, synthetic construct
  source 1..20: mol_type = other DNA
aatgctaagcagcctccagg

SEQ ID NO: 194622 - DNA, 20 bp, synthetic construct
  source 1..20: mol_type = other DNA
gaatgctaagcagcctccag

SEQ ID NO: 194623 - DNA, 20 bp, synthetic construct
  source 1..20: mol_type = other DNA
ggaatgctaagcagcctcca

SEQ ID NO: 194624 - DNA, 20 bp, synthetic construct
  source 1..20: mol_type = other DNA
gggaatgctaagcagcctcc

SEQ ID NO: 194625 - DNA, 20 bp, synthetic construct
  source 1..20: mol_type = other DNA
ggggaatgctaagcagcctc

SEQ ID NO: 194626 - DNA, 20 bp, synthetic construct
  source 1..20: mol_type = other DNA
tggggaatgctaagcagcct

SEQ ID NO: 194627 - DNA, 20 bp, synthetic construct
  source 1..20: mol_type = other DNA
gtggggaatgctaagcagcc

SEQ ID NO: 194628 - DNA, 20 bp, synthetic construct
  source 1..20: mol_type = other DNA
cgtggggaatgctaagcagc

SEQ ID NO: 194629 - DNA, 20 bp, synthetic construct
  source 1..20: mol_type = other DNA
gcgtggggaatgctaagcag

SEQ ID NO: 194630 - DNA, 20 bp, synthetic construct
  source 1..20: mol_type = other DNA
tgcgtggggaatgctaagca

SEQ ID NO: 194631 - DNA, 20 bp, synthetic construct
  source 1..20: mol_type = other DNA
gtgcgtggggaatgctaagc

SEQ ID NO: 194632 - DNA, 20 bp, synthetic construct
  source 1..20: mol_type = other DNA
tgtgcgtggggaatgctaag

SEQ ID NO: 194633 - DNA, 20 bp, synthetic construct
  source 1..20: mol_type = other DNA
atgtgcgtggggaatgctaa

SEQ ID NO: 194634 - DNA, 20 bp, synthetic construct
  source 1..20: mol_type = other DNA
aatgtgcgtggggaatgcta

SEQ ID NO: 194635 - DNA, 20 bp, synthetic construct
  source 1..20: mol_type = other DNA
taatgtgcgtggggaatgct

SEQ ID NO: 194636 - DNA, 20 bp, synthetic construct
  source 1..20: mol_type = other DNA
ctaatgtgcgtggggaatgc

SEQ ID NO: 194637 - DNA, 20 bp, synthetic construct
  source 1..20: mol_type = other DNA
gctaatgtgcgtggggaatg

SEQ ID NO: 194638 - DNA, 20 bp, synthetic construct
  source 1..20: mol_type = other DNA
tgctaatgtgcgtggggaat

SEQ ID NO: 194639 - DNA, 20 bp, synthetic construct
  source 1..20: mol_type = other DNA
ctgctaatgtgcgtggggaa

SEQ ID NO: 194640 - DNA, 20 bp, synthetic construct
  source 1..20: mol_type = other DNA
gctgctaatgtgcgtgggga

SEQ ID NO: 194641 - DNA, 20 bp, synthetic construct
  source 1..20: mol_type = other DNA
agctgctaatgtgcgtgggg

SEQ ID NO: 194642 - DNA, 20 bp, synthetic construct
  source 1..20: mol_type = other DNA
gagctgctaatgtgcgtggg

SEQ ID NO: 194643 - DNA, 20 bp, synthetic construct
  source 1..20: mol_type = other DNA
cgagctgctaatgtgcgtgg

SEQ ID NO: 194644 - DNA, 20 bp, synthetic construct
  source 1..20: mol_type = other DNA
ccgagctgctaatgtgcgtg

SEQ ID NO: 194645 - DNA, 20 bp, synthetic construct
  source 1..20: mol_type = other DNA
tccgagctgctaatgtgcgt

SEQ ID NO: 194646 - DNA, 20 bp, synthetic construct
  source 1..20: mol_type = other DNA
ctccgagctgctaatgtgcg

SEQ ID NO: 194647 - DNA, 20 bp, synthetic construct
  source 1..20: mol_type = other DNA
tctccgagctgctaatgtgc

SEQ ID NO: 194648 - DNA, 20 bp, synthetic construct
  source 1..20: mol_type = other DNA
ctctccgagctgctaatgtg

SEQ ID NO: 194649 - DNA, 20 bp, synthetic construct
  source 1..20: mol_type = other DNA
gctctccgagctgctaatgt

SEQ ID NO: 194650 - DNA, 20 bp, synthetic construct
  source 1..20: mol_type = other DNA
agctctccgagctgctaatg

SEQ ID NO: 194651 - DNA, 20 bp, synthetic construct
  source 1..20: mol_type = other DNA
gagctctccgagctgctaat

SEQ ID NO: 194652 - DNA, 20 bp, synthetic construct
  source 1..20: mol_type = other DNA
tgagctctccgagctgctaa

SEQ ID NO: 194653 - DNA, 20 bp, synthetic construct
  source 1..20: mol_type = other DNA
ctgagctctccgagctgcta

SEQ ID NO: 194654 - DNA, 20 bp, synthetic construct
  source 1..20: mol_type = other DNA
cctgagctctccgagctgct

SEQ ID NO: 194655 - DNA, 20 bp, synthetic construct
  source 1..20: mol_type = other DNA
tcctgagctctccgagctgc

SEQ ID NO: 194656 - DNA, 20 bp, synthetic construct
  source 1..20: mol_type = other DNA
ttcctgagctctccgagctg

SEQ ID NO: 194657 - DNA, 20 bp, synthetic construct
  source 1..20: mol_type = other DNA
cttcctgagctctccgagct

SEQ ID NO: 194658 - DNA, 20 bp, synthetic construct
  source 1..20: mol_type = other DNA
gcttcctgagctctccgagc

SEQ ID NO: 194659 - DNA, 20 bp, synthetic construct
  source 1..20: mol_type = other DNA
ggcttcctgagctctccgag

SEQ ID NO: 194660 - DNA, 20 bp, synthetic construct
  source 1..20: mol_type = other DNA
cggcttcctgagctctccga

SEQ ID NO: 194661 - DNA, 20 bp, synthetic construct
  source 1..20: mol_type = other DNA
gcggcttcctgagctctccg

SEQ ID NO: 194662 - DNA, 20 bp, synthetic construct
  source 1..20: mol_type = other DNA
tgcggcttcctgagctctcc

SEQ ID NO: 194663 - DNA, 20 bp, synthetic construct
  source 1..20: mol_type = other DNA
ctgcggcttcctgagctctc

SEQ ID NO: 194664 - DNA, 20 bp, synthetic construct
  source 1..20: mol_type = other DNA
gctgcggcttcctgagctct

SEQ ID NO: 194665 - DNA, 20 bp, synthetic construct
  source 1..20: mol_type = other DNA
ggctgcggcttcctgagctc

SEQ ID NO: 194666 - DNA, 20 bp, synthetic construct
  source 1..20: mol_type = other DNA
gggctgcggcttcctgagct

SEQ ID NO: 194667 - DNA, 20 bp, synthetic construct
  source 1..20: mol_type = other DNA
ggggctgcggcttcctgagc

SEQ ID NO: 194668 - DNA, 20 bp, synthetic construct
  source 1..20: mol_type = other DNA
aggggctgcggcttcctgag

SEQ ID NO: 194669 - DNA, 20 bp, synthetic construct
  source 1..20: mol_type = other DNA
gaggggctgcggcttcctga

SEQ ID NO: 194670 - DNA, 20 bp, synthetic construct
  source 1..20: mol_type = other DNA
ggaggggctgcggcttcctg

SEQ ID NO: 194671 - DNA, 20 bp, synthetic construct
  source 1..20: mol_type = other DNA
aggaggggctgcggcttcct

SEQ ID NO: 194672 - DNA, 20 bp, synthetic construct
  source 1..20: mol_type = other DNA
aaggaggggctgcggcttcc

SEQ ID NO: 194673 - DNA, 20 bp, synthetic construct
  source 1..20: mol_type = other DNA
caaggaggggctgcggcttc

SEQ ID NO: 194674 - DNA, 20 bp, synthetic construct
  source 1..20: mol_type = other DNA
gcaaggaggggctgcggctt

SEQ ID NO: 194675 - DNA, 20 bp, synthetic construct
  source 1..20: mol_type = other DNA
ggcaaggaggggctgcggct

SEQ ID NO: 194676 - DNA, 20 bp, synthetic construct
  source 1..20: mol_type = other DNA
aggcaaggaggggctgcggc

SEQ ID NO: 194677 - DNA, 20 bp, synthetic construct
  source 1..20: mol_type = other DNA
gaggcaaggaggggctgcgg

SEQ ID NO: 194678 - DNA, 20 bp, synthetic construct
  source 1..20: mol_type = other DNA
tgaggcaaggaggggctgcg

SEQ ID NO: 194679 - DNA, 20 bp, synthetic construct
  source 1..20: mol_type = other DNA
gtgaggcaaggaggggctgc

SEQ ID NO: 194680 - DNA, 20 bp, synthetic construct
  source 1..20: mol_type = other DNA
ggtgaggcaaggaggggctg

SEQ ID NO: 194681 - DNA, 20 bp, synthetic construct
  source 1..20: mol_type = other DNA
tggtgaggcaaggaggggct

SEQ ID NO: 194682 - DNA, 20 bp, synthetic construct
  source 1..20: mol_type = other DNA
ctggtgaggcaaggaggggc

SEQ ID NO: 194683 - DNA, 20 bp, synthetic construct
  source 1..20: mol_type = other DNA
gctggtgaggcaaggagggg

SEQ ID NO: 194684 - DNA, 20 bp, synthetic construct
  source 1..20: mol_type = other DNA
ggctggtgaggcaaggaggg

SEQ ID NO: 194685 - DNA, 20 bp, synthetic construct
  source 1..20: mol_type = other DNA
aggctggtgaggcaaggagg

SEQ ID NO: 194686 - DNA, 20 bp, synthetic construct
  source 1..20: mol_type = other DNA
caggctggtgaggcaaggag

SEQ ID NO: 194687 - DNA, 20 bp, synthetic construct
  source 1..20: mol_type = other DNA
ccaggctggtgaggcaagga

SEQ ID NO: 194688 - DNA, 20 bp, synthetic construct
  source 1..20: mol_type = other DNA
tccaggctggtgaggcaagg

SEQ ID NO: 194689 - DNA, 20 bp, synthetic construct
  source 1..20: mol_type = other DNA
atccaggctggtgaggcaag

SEQ ID NO: 194690 - DNA, 20 bp, synthetic construct
  source 1..20: mol_type = other DNA
gatccaggctggtgaggcaa

SEQ ID NO: 194691 - DNA, 20 bp, synthetic construct
  source 1..20: mol_type = other DNA
tgatccaggctggtgaggca

SEQ ID NO: 194692 - DNA, 20 bp, synthetic construct
  source 1..20: mol_type = other DNA
ctgatccaggctggtgaggc

SEQ ID NO: 194693 - DNA, 20 bp, synthetic construct
  source 1..20: mol_type = other DNA
cctgatccaggctggtgagg

SEQ ID NO: 194694 - DNA, 20 bp, synthetic construct
  source 1..20: mol_type = other DNA
tcctgatccaggctggtgag

SEQ ID NO: 194695 - DNA, 20 bp, synthetic construct
  source 1..20: mol_type = other DNA
gtcctgatccaggctggtga

SEQ ID NO: 194696 - DNA, 20 bp, synthetic construct
  source 1..20: mol_type = other DNA
tgtcctgatccaggctggtg

SEQ ID NO: 194697 - DNA, 20 bp, synthetic construct
  source 1..20: mol_type = other DNA
ctgtcctgatccaggctggt

SEQ ID NO: 194698 - DNA, 20 bp, synthetic construct
  source 1..20: mol_type = other DNA
gctgtcctgatccaggctgg

SEQ ID NO: 194699 - DNA, 20 bp, synthetic construct
  source 1..20: mol_type = other DNA
tgctgtcctgatccaggctg

SEQ ID NO: 194700 - DNA, 20 bp, synthetic construct
  source 1..20: mol_type = other DNA
atgctgtcctgatccaggct

SEQ ID NO: 194701 - DNA, 20 bp, synthetic construct
  source 1..20: mol_type = other DNA
gatgctgtcctgatccaggc

SEQ ID NO: 194702 - DNA, 20 bp, synthetic construct
  source 1..20: mol_type = other DNA
ggatgctgtcctgatccagg

SEQ ID NO: 194703 - DNA, 20 bp, synthetic construct
  source 1..20: mol_type = other DNA
gggatgctgtcctgatccag

SEQ ID NO: 194704 - DNA, 20 bp, synthetic construct
  source 1..20: mol_type = other DNA
ggggatgctgtcctgatcca

SEQ ID NO: 194705 - DNA, 20 bp, synthetic construct
  source 1..20: mol_type = other DNA
aggggatgctgtcctgatcc

SEQ ID NO: 194706 - DNA, 20 bp, synthetic construct
  source 1..20: mol_type = other DNA
caggggatgctgtcctgatc

SEQ ID NO: 194707 - DNA, 20 bp, synthetic construct
  source 1..20: mol_type = other DNA
ccaggggatgctgtcctgat

SEQ ID NO: 194708 - DNA, 20 bp, synthetic construct
  source 1..20: mol_type = other DNA
tccaggggatgctgtcctga

SEQ ID NO: 194709 - DNA, 20 bp, synthetic construct
  source 1..20: mol_type = other DNA
ttccaggggatgctgtcctg

SEQ ID NO: 194710 - DNA, 20 bp, synthetic construct
  source 1..20: mol_type = other DNA
cttccaggggatgctgtcct

SEQ ID NO: 194711 - DNA, 20 bp, synthetic construct
  source 1..20: mol_type = other DNA
tcttccaggggatgctgtcc

SEQ ID NO: 194712 - DNA, 20 bp, synthetic construct
  source 1..20: mol_type = other DNA
gtcttccaggggatgctgtc

SEQ ID NO: 194713 - DNA, 20 bp, synthetic construct
  source 1..20: mol_type = other DNA
tgtcttccaggggatgctgt

SEQ ID NO: 194714 - DNA, 20 bp, synthetic construct
  source 1..20: mol_type = other DNA
gtgtcttccaggggatgctg

SEQ ID NO: 194715 - DNA, 20 bp, synthetic construct
  source 1..20: mol_type = other DNA
tgtgtcttccaggggatgct

SEQ ID NO: 194716 - DNA, 20 bp, synthetic construct
  source 1..20: mol_type = other DNA
gtgtgtcttccaggggatgc

SEQ ID NO: 194717 - DNA, 20 bp, synthetic construct
  source 1..20: mol_type = other DNA
tgtgtgtcttccaggggatg

SEQ ID NO: 194718 - DNA, 20 bp, synthetic construct
  source 1..20: mol_type = other DNA
ctgtgtgtcttccaggggat

SEQ ID NO: 194719 - DNA, 20 bp, synthetic construct
  source 1..20: mol_type = other DNA
cctgtgtgtcttccagggga

SEQ ID NO: 194720 - DNA, 20 bp, synthetic construct
  source 1..20: mol_type = other DNA
ccctgtgtgtcttccagggg

SEQ ID NO: 194721 - DNA, 20 bp, synthetic construct
  source 1..20: mol_type = other DNA
gccctgtgtgtcttccaggg

SEQ ID NO: 194722 - DNA, 20 bp, synthetic construct
  source 1..20: mol_type = other DNA
ggccctgtgtgtcttccagg

SEQ ID NO: 194723 - DNA, 20 bp, synthetic construct
  source 1..20: mol_type = other DNA
aggccctgtgtgtcttccag

SEQ ID NO: 194724 - DNA, 20 bp, synthetic construct
  source 1..20: mol_type = other DNA
caggccctgtgtgtcttcca

SEQ ID NO: 194725 - DNA, 20 bp, synthetic construct
  source 1..20: mol_type = other DNA
ccaggccctgtgtgtcttcc

SEQ ID NO: 194726 - DNA, 20 bp, synthetic construct
  source 1..20: mol_type = other DNA
gccaggccctgtgtgtcttc

SEQ ID NO: 194727 - DNA, 20 bp, synthetic construct
  source 1..20: mol_type = other DNA
ggccaggccctgtgtgtctt

SEQ ID NO: 194728 - DNA, 20 bp, synthetic construct
  source 1..20: mol_type = other DNA
aggccaggccctgtgtgtct

SEQ ID NO: 194729 - DNA, 20 bp, synthetic construct
  source 1..20: mol_type = other DNA
gaggccaggccctgtgtgtc

SEQ ID NO: 194730 - DNA, 20 bp, synthetic construct
  source 1..20: mol_type = other DNA
agaggccaggccctgtgtgt

SEQ ID NO: 194731 - DNA, 20 bp, synthetic construct
  source 1..20: mol_type = other DNA
cagaggccaggccctgtgtg

SEQ ID NO: 194732 - DNA, 20 bp, synthetic construct
  source 1..20: mol_type = other DNA
tcagaggccaggccctgtgt

SEQ ID NO: 194733 - DNA, 20 bp, synthetic construct
  source 1..20: mol_type = other DNA
atcagaggccaggccctgtg

SEQ ID NO: 194734 - DNA, 20 bp, synthetic construct
  source 1..20: mol_type = other DNA
aatcagaggccaggccctgt

SEQ ID NO: 194735 - DNA, 20 bp, synthetic construct
  source 1..20: mol_type = other DNA
taatcagaggccaggccctg

SEQ ID NO: 194736 - DNA, 20 bp, synthetic construct
  source 1..20: mol_type = other DNA
gtaatcagaggccaggccct

SEQ ID NO: 194737 - DNA, 20 bp, synthetic construct
  source 1..20: mol_type = other DNA
ggtaatcagaggccaggccc

SEQ ID NO: 194738 - DNA, 20 bp, synthetic construct
  source 1..20: mol_type = other DNA
gggtaatcagaggccaggcc

SEQ ID NO: 194739 - DNA, 20 bp, synthetic construct
  source 1..20: mol_type = other DNA
tgggtaatcagaggccaggc

SEQ ID NO: 194740 - DNA, 20 bp, synthetic construct
  source 1..20: mol_type = other DNA
ctgggtaatcagaggccagg

SEQ ID NO: 194741 - DNA, 20 bp, synthetic construct
  source 1..20: mol_type = other DNA
gctgggtaatcagaggccag

SEQ ID NO: 194742 - DNA, 20 bp, synthetic construct
  source 1..20: mol_type = other DNA
ggctgggtaatcagaggcca

SEQ ID NO: 194743 - DNA, 20 bp, synthetic construct
  source 1..20: mol_type = other DNA
aggctgggtaatcagaggcc

SEQ ID NO: 194744 - DNA, 20 bp, synthetic construct
  source 1..20: mol_type = other DNA
caggctgggtaatcagaggc

SEQ ID NO: 194745 - DNA, 20 bp, synthetic construct
  source 1..20: mol_type = other DNA
ccaggctgggtaatcagagg

SEQ ID NO: 194746 - DNA, 20 bp, synthetic construct
  source 1..20: mol_type = other DNA
tccaggctgggtaatcagag

SEQ ID NO: 194747 - DNA, 20 bp, synthetic construct
  source 1..20: mol_type = other DNA
ctccaggctgggtaatcaga

SEQ ID NO: 194748 - DNA, 20 bp, synthetic construct
  source 1..20: mol_type = other DNA
cctccaggctgggtaatcag

SEQ ID NO: 194749 - DNA, 20 bp, synthetic construct
  source 1..20: mol_type = other DNA
ccctccaggctgggtaatca

SEQ ID NO: 194750 - DNA, 20 bp, synthetic construct
  source 1..20: mol_type = other DNA
tccctccaggctgggtaatc

SEQ ID NO: 194751 - DNA, 20 bp, synthetic construct
  source 1..20: mol_type = other DNA
ttccctccaggctgggtaat

SEQ ID NO: 194752 - DNA, 20 bp, synthetic construct
  source 1..20: mol_type = other DNA
tttccctccaggctgggtaa

SEQ ID NO: 194753 - DNA, 20 bp, synthetic construct
  source 1..20: mol_type = other DNA
ctttccctccaggctgggta

SEQ ID NO: 194754 - DNA, 20 bp, synthetic construct
  source 1..20: mol_type = other DNA
gctttccctccaggctgggt

SEQ ID NO: 194755 - DNA, 20 bp, synthetic construct
  source 1..20: mol_type = other DNA
agctttccctccaggctggg

SEQ ID NO: 194756 - DNA, 20 bp, synthetic construct
  source 1..20: mol_type = other DNA
gagctttccctccaggctgg

SEQ ID NO: 194757 - DNA, 20 bp, synthetic construct
  source 1..20: mol_type = other DNA
tgagctttccctccaggctg

SEQ ID NO: 194758 - DNA, 20 bp, synthetic construct
  source 1..20: mol_type = other DNA
ttgagctttccctccaggct

SEQ ID NO: 194759 - DNA, 20 bp, synthetic construct
  source 1..20: mol_type = other DNA
attgagctttccctccaggc

SEQ ID NO: 194760 - DNA, 20 bp, synthetic construct
  source 1..20: mol_type = other DNA
gattgagctttccctccagg

SEQ ID NO: 194761 - DNA, 20 bp, synthetic construct
  source 1..20: mol_type = other DNA
cgattgagctttccctccag

SEQ ID NO: 194762 - DNA, 20 bp, synthetic construct
  source 1..20: mol_type = other DNA
tcgattgagctttccctcca

SEQ ID NO: 194763 - DNA, 20 bp, synthetic construct
  source 1..20: mol_type = other DNA
ctcgattgagctttccctcc

SEQ ID NO: 194764 - DNA, 20 bp, synthetic construct
  source 1..20: mol_type = other DNA
gctcgattgagctttccctc

SEQ ID NO: 194765 - DNA, 20 bp, synthetic construct
  source 1..20: mol_type = other DNA
tgctcgattgagctttccct

SEQ ID NO: 194766 - DNA, 20 bp, synthetic construct
  source 1..20: mol_type = other DNA
atgctcgattgagctttccc

SEQ ID NO: 194767 - DNA, 20 bp, synthetic construct
  source 1..20: mol_type = other DNA
gatgctcgattgagctttcc

SEQ ID NO: 194768 - DNA, 20 bp, synthetic construct
  source 1..20: mol_type = other DNA
tgatgctcgattgagctttc

SEQ ID NO: 194769 - DNA, 20 bp, synthetic construct
  source 1..20: mol_type = other DNA
atgatgctcgattgagcttt

SEQ ID NO: 194770 - DNA, 20 bp, synthetic construct
  source 1..20: mol_type = other DNA
catgatgctcgattgagctt

SEQ ID NO: 194771 - DNA, 20 bp, synthetic construct
  source 1..20: mol_type = other DNA
acatgatgctcgattgagct

SEQ ID NO: 194772 - DNA, 20 bp, synthetic construct
  source 1..20: mol_type = other DNA
gacatgatgctcgattgagc

SEQ ID NO: 194773 - DNA, 20 bp, synthetic construct
  source 1..20: mol_type = other DNA
tgacatgatgctcgattgag

SEQ ID NO: 194774 - DNA, 20 bp, synthetic construct
  source 1..20: mol_type = other DNA
gtgacatgatgctcgattga

SEQ ID NO: 194775 - DNA, 20 bp, synthetic construct
  source 1..20: mol_type = other DNA
ggtgacatgatgctcgattg

SEQ ID NO: 194776 - DNA, 20 bp, synthetic construct
  source 1..20: mol_type = other DNA
gggtgacatgatgctcgatt

SEQ ID NO: 194777 - DNA, 20 bp, synthetic construct
  source 1..20: mol_type = other DNA
cgggtgacatgatgctcgat

SEQ ID NO: 194778 - DNA, 20 bp, synthetic construct
  source 1..20: mol_type = other DNA
ccgggtgacatgatgctcga

SEQ ID NO: 194779 - DNA, 20 bp, synthetic construct
  source 1..20: mol_type = other DNA
accgggtgacatgatgctcg

SEQ ID NO: 194780 - DNA, 20 bp, synthetic construct
  source 1..20: mol_type = other DNA
caccgggtgacatgatgctc

SEQ ID NO: 194781 - DNA, 20 bp, synthetic construct
  source 1..20: mol_type = other DNA
gcaccgggtgacatgatgct

SEQ ID NO: 194782 - DNA, 20 bp, synthetic construct
  source 1..20: mol_type = other DNA
ggcaccgggtgacatgatgc

SEQ ID NO: 194783 - DNA, 20 bp, synthetic construct
  source 1..20: mol_type = other DNA
gggcaccgggtgacatgatg

SEQ ID NO: 194784 - DNA, 20 bp, synthetic construct
  source 1..20: mol_type = other DNA
ggggcaccgggtgacatgat

SEQ ID NO: 194785 - DNA, 20 bp, synthetic construct
  source 1..20: mol_type = other DNA
gggggcaccgggtgacatga

SEQ ID NO: 194786 - DNA, 20 bp, synthetic construct
  source 1..20: mol_type = other DNA
tgggggcaccgggtgacatg

SEQ ID NO: 194787 - DNA, 20 bp, synthetic construct
  source 1..20: mol_type = other DNA
atgggggcaccgggtgacat

SEQ ID NO: 194788 - DNA, 20 bp, synthetic construct
  source 1..20: mol_type = other DNA
catgggggcaccgggtgaca

SEQ ID NO: 194789 - DNA, 20 bp, synthetic construct
  source 1..20: mol_type = other DNA
gcatgggggcaccgggtgac

SEQ ID NO: 194790 - DNA, 20 bp, synthetic construct
  source 1..20: mol_type = other DNA
tgcatgggggcaccgggtga

SEQ ID NO: 194791 - DNA, 20 bp, synthetic construct
  source 1..20: mol_type = other DNA
ctgcatgggggcaccgggtg

SEQ ID NO: 194792 - DNA, 20 bp, synthetic construct
  source 1..20: mol_type = other DNA
cctgcatgggggcaccgggt

SEQ ID NO: 194793 - DNA, 20 bp, synthetic construct
  source 1..20: mol_type = other DNA
ccctgcatgggggcaccggg

SEQ ID NO: 194794 - DNA, 20 bp, synthetic construct
  source 1..20: mol_type = other DNA
accctgcatgggggcaccgg

SEQ ID NO: 194795 - DNA, 20 bp, synthetic construct
  source 1..20: mol_type = other DNA
caccctgcatgggggcaccg

SEQ ID NO: 194796 - DNA, 20 bp, synthetic construct
  source 1..20: mol_type = other DNA
ccaccctgcatgggggcacc

SEQ ID NO: 194797 - DNA, 20 bp, synthetic construct
  source 1..20: mol_type = other DNA
gccaccctgcatgggggcac

SEQ ID NO: 194798 - DNA, 20 bp, synthetic construct
  source 1..20: mol_type = other DNA
tgccaccctgcatgggggca

SEQ ID NO: 194799 - DNA, 20 bp, synthetic construct
  source 1..20: mol_type = other DNA
gtgccaccctgcatgggggc

SEQ ID NO: 194800 - DNA, 20 bp, synthetic construct
  source 1..20: mol_type = other DNA
agtgccaccctgcatggggg

SEQ ID NO: 194801 - DNA, 20 bp, synthetic construct
  source 1..20: mol_type = other DNA
cagtgccaccctgcatgggg

SEQ ID NO: 194802 - DNA, 20 bp, synthetic construct
  source 1..20: mol_type = other DNA
ccagtgccaccctgcatggg

SEQ ID NO: 194803 - DNA, 20 bp, synthetic construct
  source 1..20: mol_type = other DNA
accagtgccaccctgcatgg

SEQ ID NO: 194804 - DNA, 20 bp, synthetic construct
  source 1..20: mol_type = other DNA
caccagtgccaccctgcatg

SEQ ID NO: 194805 - DNA, 20 bp, synthetic construct
  source 1..20: mol_type = other DNA
tcaccagtgccaccctgcat

SEQ ID NO: 194806 - DNA, 20 bp, synthetic construct
  source 1..20: mol_type = other DNA
ctcaccagtgccaccctgca

SEQ ID NO: 194807 - DNA, 20 bp, synthetic construct
  source 1..20: mol_type = other DNA
tctcaccagtgccaccctgc

SEQ ID NO: 194808 - DNA, 20 bp, synthetic construct
  source 1..20: mol_type = other DNA
gtctcaccagtgccaccctg

SEQ ID NO: 194809 - DNA, 20 bp, synthetic construct
  source 1..20: mol_type = other DNA
ggtctcaccagtgccaccct

SEQ ID NO: 194810 - DNA, 20 bp, synthetic construct
  source 1..20: mol_type = other DNA
gggtctcaccagtgccaccc

SEQ ID NO: 194811 - DNA, 20 bp, synthetic construct
  source 1..20: mol_type = other DNA
ggggtctcaccagtgccacc

SEQ ID NO: 194812 - DNA, 20 bp, synthetic construct
  source 1..20: mol_type = other DNA
gggggtctcaccagtgccac

SEQ ID NO: 194813 - DNA, 20 bp, synthetic construct
  source 1..20: mol_type = other DNA
tgggggtctcaccagtgcca

SEQ ID NO: 194814 - DNA, 20 bp, synthetic construct
  source 1..20: mol_type = other DNA
ttgggggtctcaccagtgcc

SEQ ID NO: 194815 - DNA, 20 bp, synthetic construct
  source 1..20: mol_type = other DNA
cttgggggtctcaccagtgc

SEQ ID NO: 194816 - DNA, 20 bp, synthetic construct
  source 1..20: mol_type = other DNA
gcttgggggtctcaccagtg

SEQ ID NO: 194817 - DNA, 20 bp, synthetic construct
  source 1..20: mol_type = other DNA
ggcttgggggtctcaccagt

SEQ ID NO: 194818 - DNA, 20 bp, synthetic construct
  source 1..20: mol_type = other DNA
tggcttgggggtctcaccag

SEQ ID NO: 194819 - DNA, 20 bp, synthetic construct
  source 1..20: mol_type = other DNA
ttggcttgggggtctcacca

SEQ ID NO: 194820 - DNA, 20 bp, synthetic construct
  source 1..20: mol_type = other DNA
attggcttgggggtctcacc

SEQ ID NO: 194821 - DNA, 20 bp, synthetic construct
  source 1..20: mol_type = other DNA
cattggcttgggggtctcac

SEQ ID NO: 194822 - DNA, 20 bp, synthetic construct
  source 1..20: mol_type = other DNA
tcattggcttgggggtctca

SEQ ID NO: 194823 - DNA, 20 bp, synthetic construct
  source 1..20: mol_type = other DNA
atcattggcttgggggtctc

SEQ ID NO: 194824 - DNA, 20 bp, synthetic construct
  source 1..20: mol_type = other DNA
tatcattggcttgggggtct

SEQ ID NO: 194825 - DNA, 20 bp, synthetic construct
  source 1..20: mol_type = other DNA
gtatcattggcttgggggtc

SEQ ID NO: 194826 - DNA, 20 bp, synthetic construct
  source 1..20: mol_type = other DNA
ggtatcattggcttgggggt

SEQ ID NO: 194827 - DNA, 20 bp, synthetic construct
  source 1..20: mol_type = other DNA
tggtatcattggcttggggg

SEQ ID NO: 194828 - DNA, 20 bp, synthetic construct
  source 1..20: mol_type = other DNA
gtggtatcattggcttgggg

SEQ ID NO: 194829 - DNA, 20 bp, synthetic construct
  source 1..20: mol_type = other DNA
ggtggtatcattggcttggg

SEQ ID NO: 194830 - DNA, 20 bp, synthetic construct
  source 1..20: mol_type = other DNA
aggtggtatcattggcttgg

SEQ ID NO: 194831 - DNA, 20 bp, synthetic construct
  source 1..20: mol_type = other DNA
gaggtggtatcattggcttg

SEQ ID NO: 194832 - DNA, 20 bp, synthetic construct
  source 1..20: mol_type = other DNA
tgaggtggtatcattggctt

SEQ ID NO: 194833 - DNA, 20 bp, synthetic construct
  source 1..20: mol_type = other DNA
gtgaggtggtatcattggct

SEQ ID NO: 194834 - DNA, 20 bp, synthetic construct
  source 1..20: mol_type = other DNA
tgtgaggtggtatcattggc

SEQ ID NO: 194835 - DNA, 20 bp, synthetic construct
  source 1..20: mol_type = other DNA
ctgtgaggtggtatcattgg

SEQ ID NO: 194836 - DNA, 20 bp, synthetic construct
  source 1..20: mol_type = other DNA
cctgtgaggtggtatcattg

SEQ ID NO: 194837 - DNA, 20 bp, synthetic construct
  source 1..20: mol_type = other DNA
tcctgtgaggtggtatcatt

SEQ ID NO: 194838 - DNA, 20 bp, synthetic construct
  source 1..20: mol_type = other DNA
ctcctgtgaggtggtatcat

SEQ ID NO: 194839 - DNA, 20 bp, synthetic construct
  source 1..20: mol_type = other DNA
actcctgtgaggtggtatca

SEQ ID NO: 194840 - DNA, 20 bp, synthetic construct
  source 1..20: mol_type = other DNA
cactcctgtgaggtggtatc

SEQ ID NO: 194841 - DNA, 20 bp, synthetic construct
  source 1..20: mol_type = other DNA
gcactcctgtgaggtggtat

SEQ ID NO: 194842 - DNA, 20 bp, synthetic construct
  source 1..20: mol_type = other DNA
tgcactcctgtgaggtggta

SEQ ID NO: 194843 - DNA, 20 bp, synthetic construct
  source 1..20: mol_type = other DNA
ctgcactcctgtgaggtggt

SEQ ID NO: 194844 - DNA, 20 bp, synthetic construct
  source 1..20: mol_type = other DNA
cctgcactcctgtgaggtgg

SEQ ID NO: 194845 - DNA, 20 bp, synthetic construct
  source 1..20: mol_type = other DNA
gcctgcactcctgtgaggtg

SEQ ID NO: 194846 - DNA, 20 bp, synthetic construct
  source 1..20: mol_type = other DNA
ggcctgcactcctgtgaggt

SEQ ID NO: 194847 - DNA, 20 bp, synthetic construct
  source 1..20: mol_type = other DNA
gggcctgcactcctgtgagg

SEQ ID NO: 194848 - DNA, 20 bp, synthetic construct
  source 1..20: mol_type = other DNA
tgggcctgcactcctgtgag

SEQ ID NO: 194849 - DNA, 20 bp, synthetic construct
  source 1..20: mol_type = other DNA
atgggcctgcactcctgtga

SEQ ID NO: 194850 - DNA, 20 bp, synthetic construct
  source 1..20: mol_type = other DNA
aatgggcctgcactcctgtg

SEQ ID NO: 194851 - DNA, 20 bp, synthetic construct
  source 1..20: mol_type = other DNA
caatgggcctgcactcctgt

SEQ ID NO: 194852 - DNA, 20 bp, synthetic construct
  source 1..20: mol_type = other DNA
acaatgggcctgcactcctg

SEQ ID NO: 194853 - DNA, 20 bp, synthetic construct
  source 1..20: mol_type = other DNA
cacaatgggcctgcactcct

SEQ ID NO: 194854 - DNA, 20 bp, synthetic construct
  source 1..20: mol_type = other DNA
ccacaatgggcctgcactcc

SEQ ID NO: 194855 - DNA, 20 bp, synthetic construct
  source 1..20: mol_type = other DNA
gccacaatgggcctgcactc

SEQ ID NO: 194856 - DNA, 20 bp, synthetic construct
  source 1..20: mol_type = other DNA
ggccacaatgggcctgcact

SEQ ID NO: 194857 - DNA, 20 bp, synthetic construct
  source 1..20: mol_type = other DNA
tggccacaatgggcctgcac

SEQ ID NO: 194858 - DNA, 20 bp, synthetic construct
  source 1..20: mol_type = other DNA
ctggccacaatgggcctgca

SEQ ID NO: 194859 - DNA, 20 bp, synthetic construct
  source 1..20: mol_type = other DNA
tctggccacaatgggcctgc

SEQ ID NO: 194860 - DNA, 20 bp, synthetic construct
  source 1..20: mol_type = other DNA
atctggccacaatgggcctg

SEQ ID NO: 194861 - DNA, 20 bp, synthetic construct
  source 1..20: mol_type = other DNA
gatctggccacaatgggcct

SEQ ID NO: 194862 - DNA, 20 bp, synthetic construct
  source 1..20: mol_type = other DNA
tgatctggccacaatgggcc

SEQ ID NO: 194863 - DNA, 20 bp, synthetic construct
  source 1..20: mol_type = other DNA
atgatctggccacaatgggc

SEQ ID NO: 194864 - DNA, 20 bp, synthetic construct
  source 1..20: mol_type = other DNA
gatgatctggccacaatggg

SEQ ID NO: 194865 - DNA, 20 bp, synthetic construct
  source 1..20: mol_type = other DNA
agatgatctggccacaatgg

SEQ ID NO: 194866 - DNA, 20 bp, synthetic construct
  source 1..20: mol_type = other DNA
aagatgatctggccacaatg

SEQ ID NO: 194867 - DNA, 20 bp, synthetic construct
  source 1..20: mol_type = other DNA
caagatgatctggccacaat

SEQ ID NO: 194868 - DNA, 20 bp, synthetic construct
  source 1..20: mol_type = other DNA
tcaagatgatctggccacaa

SEQ ID NO: 194869 - DNA, 20 bp, synthetic construct
  source 1..20: mol_type = other DNA
gtcaagatgatctggccaca

SEQ ID NO: 194870 - DNA, 20 bp, synthetic construct
  source 1..20: mol_type = other DNA
agtcaagatgatctggccac

SEQ ID NO: 194871 - DNA, 20 bp, synthetic construct
  source 1..20: mol_type = other DNA
aagtcaagatgatctggcca

SEQ ID NO: 194872 - DNA, 20 bp, synthetic construct
  source 1..20: mol_type = other DNA
aaagtcaagatgatctggcc

SEQ ID NO: 194873 - DNA, 20 bp, synthetic construct
  source 1..20: mol_type = other DNA
aaaagtcaagatgatctggc

SEQ ID NO: 194874 - DNA, 20 bp, synthetic construct
  source 1..20: mol_type = other DNA
gaaaagtcaagatgatctgg

SEQ ID NO: 194875 - DNA, 20 bp, synthetic construct
  source 1..20: mol_type = other DNA
tgaaaagtcaagatgatctg

SEQ ID NO: 194876 - DNA, 20 bp, synthetic construct
  source 1..20: mol_type = other DNA
ttgaaaagtcaagatgatct

SEQ ID NO: 194877 - DNA, 20 bp, synthetic construct
  source 1..20: mol_type = other DNA
cttgaaaagtcaagatgatc

SEQ ID NO: 194878 - DNA, 20 bp, synthetic construct
  source 1..20: mol_type = other DNA
tcttgaaaagtcaagatgat

SEQ ID NO: 194879 - DNA, 20 bp, synthetic construct
  source 1..20: mol_type = other DNA
atcttgaaaagtcaagatga

SEQ ID NO: 194880 - DNA, 20 bp, synthetic construct
  source 1..20: mol_type = other DNA
tatcttgaaaagtcaagatg

SEQ ID NO: 194881 - DNA, 20 bp, synthetic construct
  source 1..20: mol_type = other DNA
ttatcttgaaaagtcaagat

SEQ ID NO: 194882 - DNA, 20 bp, synthetic construct
  source 1..20: mol_type = other DNA
tttatcttgaaaagtcaaga

SEQ ID NO: 194883 - DNA, 20 bp, synthetic construct
  source 1..20: mol_type = other DNA
atttatcttgaaaagtcaag

SEQ ID NO: 194884 - DNA, 20 bp, synthetic construct
  source 1..20: mol_type = other DNA
gatttatcttgaaaagtcaa

SEQ ID NO: 194885 - DNA, 20 bp, synthetic construct
  source 1..20: mol_type = other DNA
tgatttatcttgaaaagtca

SEQ ID NO: 194886 - DNA, 20 bp, synthetic construct
  source 1..20: mol_type = other DNA
ctgatttatcttgaaaagtc

SEQ ID NO: 194887 - DNA, 20 bp, synthetic construct
  source 1..20: mol_type = other DNA
tctgatttatcttgaaaagt

SEQ ID NO: 194888 - DNA, 20 bp, synthetic construct
  source 1..20: mol_type = other DNA
ttctgatttatcttgaaaag

SEQ ID NO: 194889 - DNA, 20 bp, synthetic construct
  source 1..20: mol_type = other DNA
tttctgatttatcttgaaaa

SEQ ID NO: 194890 - DNA, 20 bp, synthetic construct
  source 1..20: mol_type = other DNA
atttctgatttatcttgaaa

SEQ ID NO: 194891 - DNA, 20 bp, synthetic construct
  source 1..20: mol_type = other DNA
gatttctgatttatcttgaa

SEQ ID NO: 194892 - DNA, 20 bp, synthetic construct
  source 1..20: mol_type = other DNA
cgatttctgatttatcttga

SEQ ID NO: 194893 - DNA, 20 bp, synthetic construct
  source 1..20: mol_type = other DNA
acgatttctgatttatcttg

SEQ ID NO: 194894 - DNA, 20 bp, synthetic construct
  source 1..20: mol_type = other DNA
tacgatttctgatttatctt

SEQ ID NO: 194895 - DNA, 20 bp, synthetic construct
  source 1..20: mol_type = other DNA
atacgatttctgatttatct

SEQ ID NO: 194896 - DNA, 20 bp, synthetic construct
  source 1..20: mol_type = other DNA
aatacgatttctgatttatc

SEQ ID NO: 194897 - DNA, 20 bp, synthetic construct
  source 1..20: mol_type = other DNA
aaatacgatttctgatttat

SEQ ID NO: 194898 - DNA, 20 bp, synthetic construct
  source 1..20: mol_type = other DNA
gaaatacgatttctgattta

SEQ ID NO: 194899 - DNA, 20 bp, synthetic construct
  source 1..20: mol_type = other DNA
ggaaatacgatttctgattt

SEQ ID NO: 194900 - DNA, 20 bp, synthetic construct
  source 1..20: mol_type = other DNA
tggaaatacgatttctgatt

SEQ ID NO: 194901 - DNA, 20 bp, synthetic construct
  source 1..20: mol_type = other DNA
atggaaatacgatttctgat

SEQ ID NO: 194902 - DNA, 20 bp, synthetic construct
  source 1..20: mol_type = other DNA
catggaaatacgatttctga

SEQ ID NO: 194903 - DNA, 20 bp, synthetic construct
  source 1..20: mol_type = other DNA
tcatggaaatacgatttctg

SEQ ID NO: 194904 - DNA, 20 bp, synthetic construct
  source 1..20: mol_type = other DNA
ctcatggaaatacgatttct

SEQ ID NO: 194905 - DNA, 20 bp, synthetic construct
  source 1..20: mol_type = other DNA
tctcatggaaatacgatttc

SEQ ID NO: 194906 - DNA, 20 bp, synthetic construct
  source 1..20: mol_type = other DNA
atctcatggaaatacgattt

SEQ ID NO: 194907 - DNA, 20 bp, synthetic construct
  source 1..20: mol_type = other DNA
tatctcatggaaatacgatt

SEQ ID NO: 194908 - DNA, 20 bp, synthetic construct
  source 1..20: mol_type = other DNA
atatctcatggaaatacgat

SEQ ID NO: 194909 - DNA, 20 bp, synthetic construct
  source 1..20: mol_type = other DNA
gatatctcatggaaatacga

SEQ ID NO: 194910 - DNA, 20 bp, synthetic construct
  source 1..20: mol_type = other DNA
ggatatctcatggaaatacg

SEQ ID NO: 194911 - DNA, 20 bp, synthetic construct
  source 1..20: mol_type = other DNA
gggatatctcatggaaatac

SEQ ID NO: 194912 - DNA, 20 bp, synthetic construct
  source 1..20: mol_type = other DNA
agggatatctcatggaaata

SEQ ID NO: 194913 - DNA, 20 bp, synthetic construct
  source 1..20: mol_type = other DNA
tagggatatctcatggaaat

SEQ ID NO: 194914 - DNA, 20 bp, synthetic construct
  source 1..20: mol_type = other DNA
atagggatatctcatggaaa

SEQ ID NO: 194915 - DNA, 20 bp, synthetic construct
  source 1..20: mol_type = other DNA
aatagggatatctcatggaa

SEQ ID NO: 194916 - DNA, 20 bp, synthetic construct
  source 1..20: mol_type = other DNA
aaatagggatatctcatgga

SEQ ID NO: 194917 - DNA, 20 bp, synthetic construct
  source 1..20: mol_type = other DNA
caaatagggatatctcatgg

SEQ ID NO: 194918 - DNA, 20 bp, synthetic construct
  source 1..20: mol_type = other DNA
gcaaatagggatatctcatg

SEQ ID NO: 194919 - DNA, 20 bp, synthetic construct
  source 1..20: mol_type = other DNA
tgcaaatagggatatctcat

SEQ ID NO: 194920 - DNA, 20 bp, synthetic construct
  source 1..20: mol_type = other DNA
ttgcaaatagggatatctca

SEQ ID NO: 194921 - DNA, 20 bp, synthetic construct
  source 1..20: mol_type = other DNA
cttgcaaatagggatatctc

SEQ ID NO: 194922 - DNA, 20 bp, synthetic construct
  source 1..20: mol_type = other DNA
acttgcaaatagggatatct

SEQ ID NO: 194923 - DNA, 20 bp, synthetic construct
  source 1..20: mol_type = other DNA
cacttgcaaatagggatatc

SEQ ID NO: 194924 - DNA, 20 bp, synthetic construct
  source 1..20: mol_type = other DNA
tcacttgcaaatagggatat

SEQ ID NO: 194925 - DNA, 20 bp, synthetic construct
  source 1..20: mol_type = other DNA
atcacttgcaaatagggata

SEQ ID NO: 194926 - DNA, 20 bp, synthetic construct
  source 1..20: mol_type = other DNA
catcacttgcaaatagggat

SEQ ID NO: 194927 - DNA, 20 bp, synthetic construct
  source 1..20: mol_type = other DNA
ccatcacttgcaaataggga

SEQ ID NO: 194928 - DNA, 20 bp, synthetic construct
  source 1..20: mol_type = other DNA
accatcacttgcaaataggg

SEQ ID NO: 194929 - DNA, 20 bp, synthetic construct
  source 1..20: mol_type = other DNA
caccatcacttgcaaatagg

SEQ ID NO: 194930 - DNA, 20 bp, synthetic construct
  source 1..20: mol_type = other DNA
tcaccatcacttgcaaatag

SEQ ID NO: 194931 - DNA, 20 bp, synthetic construct
  source 1..20: mol_type = other DNA
gtcaccatcacttgcaaata

SEQ ID NO: 194932 - DNA, 20 bp, synthetic construct
  source 1..20: mol_type = other DNA
agtcaccatcacttgcaaat

SEQ ID NO: 194933 - DNA, 20 bp, synthetic construct
  source 1..20: mol_type = other DNA
tagtcaccatcacttgcaaa

SEQ ID NO: 194934 - DNA, 20 bp, synthetic construct
  source 1..20: mol_type = other DNA
ttagtcaccatcacttgcaa

SEQ ID NO: 194935 - DNA, 20 bp, synthetic construct
  source 1..20: mol_type = other DNA
tttagtcaccatcacttgca

SEQ ID NO: 194936 - DNA, 20 bp, synthetic construct
  source 1..20: mol_type = other DNA
atttagtcaccatcacttgc

SEQ ID NO: 194937 - DNA, 20 bp, synthetic construct
  source 1..20: mol_type = other DNA
aatttagtcaccatcacttg

SEQ ID NO: 194938 - DNA, 20 bp, synthetic construct
  source 1..20: mol_type = other DNA
taatttagtcaccatcactt

SEQ ID NO: 194939 - DNA, 20 bp, synthetic construct
  source 1..20: mol_type = other DNA
ctaatttagtcaccatcact

SEQ ID NO: 194940 - DNA, 20 bp, synthetic construct
  source 1..20: mol_type = other DNA
tctaatttagtcaccatcac

SEQ ID NO: 194941 - DNA, 20 bp, synthetic construct
  source 1..20: mol_type = other DNA
ttctaatttagtcaccatca

SEQ ID NO: 194942 - DNA, 20 bp, synthetic construct
  source 1..20: mol_type = other DNA
cttctaatttagtcaccatc

SEQ ID NO: 194943 - DNA, 20 bp, synthetic construct
  source 1..20: mol_type = other DNA
acttctaatttagtcaccat

SEQ ID NO: 194944 - DNA, 20 bp, synthetic construct
  source 1..20: mol_type = other DNA
aacttctaatttagtcacca

SEQ ID NO: 194945 - DNA, 20 bp, synthetic construct
  source 1..20: mol_type = other DNA
aaacttctaatttagtcacc

SEQ ID NO: 194946 - DNA, 20 bp, synthetic construct
  source 1..20: mol_type = other DNA
aaaacttctaatttagtcac

SEQ ID NO: 194947 - DNA, 20 bp, synthetic construct
  source 1..20: mol_type = other DNA
aaaaacttctaatttagtca

SEQ ID NO: 194948 - DNA, 20 bp, synthetic construct
  source 1..20: mol_type = other DNA
caaaaacttctaatttagtc

SEQ ID NO: 194949 - DNA, 20 bp, synthetic construct
  source 1..20: mol_type = other DNA
tcaaaaacttctaatttagt

SEQ ID NO: 194950 - DNA, 20 bp, synthetic construct
  source 1..20: mol_type = other DNA
ttcaaaaacttctaatttag

SEQ ID NO: 194951 - DNA, 20 bp, synthetic construct
  source 1..20: mol_type = other DNA
attcaaaaacttctaattta

SEQ ID NO: 194952 - DNA, 20 bp, synthetic construct
  source 1..20: mol_type = other DNA
tattcaaaaacttctaattt

SEQ ID NO: 194953 - DNA, 20 bp, synthetic construct
  source 1..20: mol_type = other DNA
atattcaaaaacttctaatt

SEQ ID NO: 194954 - DNA, 20 bp, synthetic construct
  source 1..20: mol_type = other DNA
aatattcaaaaacttctaat

SEQ ID NO: 194955 - DNA, 20 bp, synthetic construct
  source 1..20: mol_type = other DNA
caatattcaaaaacttctaa

SEQ ID NO: 194956 - DNA, 20 bp, synthetic construct
  source 1..20: mol_type = other DNA
acaatattcaaaaacttcta

SEQ ID NO: 194957 - DNA, 20 bp, synthetic construct
  source 1..20: mol_type = other DNA
tacaatattcaaaaacttct

SEQ ID NO: 194958 - DNA, 20 bp, synthetic construct
  source 1..20: mol_type = other DNA
ttacaatattcaaaaacttc

SEQ ID NO: 194959 - DNA, 20 bp, synthetic construct
  source 1..20: mol_type = other DNA
gttacaatattcaaaaactt

SEQ ID NO: 194960 - DNA, 20 bp, synthetic construct
  source 1..20: mol_type = other DNA
tgttacaatattcaaaaact

SEQ ID NO: 194961 - DNA, 20 bp, synthetic construct
  source 1..20: mol_type = other DNA
atgttacaatattcaaaaac

SEQ ID NO: 194962 - DNA, 20 bp, synthetic construct
  source 1..20: mol_type = other DNA
catgttacaatattcaaaaa

SEQ ID NO: 194963 - DNA, 20 bp, synthetic construct
  source 1..20: mol_type = other DNA
acatgttacaatattcaaaa

SEQ ID NO: 194964 - DNA, 20 bp, synthetic construct
  source 1..20: mol_type = other DNA
aacatgttacaatattcaaa

SEQ ID NO: 194965 - DNA, 20 bp, synthetic construct
  source 1..20: mol_type = other DNA
gaacatgttacaatattcaa

SEQ ID NO: 194966 - DNA, 20 bp, synthetic construct
  source 1..20: mol_type = other DNA
cgaacatgttacaatattca

SEQ ID NO: 194967 - DNA, 20 bp, synthetic construct
  source 1..20: mol_type = other DNA
acgaacatgttacaatattc

SEQ ID NO: 194968 - DNA, 20 bp, synthetic construct
  source 1..20: mol_type = other DNA
tacgaacatgttacaatatt

SEQ ID NO: 194969 - DNA, 20 bp, synthetic construct
  source 1..20: mol_type = other DNA
ctacgaacatgttacaatat

SEQ ID NO: 194970 - DNA, 20 bp, synthetic construct
  source 1..20: mol_type = other DNA
cctacgaacatgttacaata

SEQ ID NO: 194971 - DNA, 20 bp, synthetic construct
  source 1..20: mol_type = other DNA
gcctacgaacatgttacaat

SEQ ID NO: 194972 - DNA, 20 bp, synthetic construct
  source 1..20: mol_type = other DNA
agcctacgaacatgttacaa

SEQ ID NO: 194973 - DNA, 20 bp, synthetic construct
  source 1..20: mol_type = other DNA
cagcctacgaacatgttaca

SEQ ID NO: 194974 - DNA, 20 bp, synthetic construct
  source 1..20: mol_type = other DNA
acagcctacgaacatgttac

SEQ ID NO: 194975 - DNA, 20 bp, synthetic construct
  source 1..20: mol_type = other DNA
aacagcctacgaacatgtta

SEQ ID NO: 194976 - DNA, 20 bp, synthetic construct
  source 1..20: mol_type = other DNA
aaacagcctacgaacatgtt

SEQ ID NO: 194977 - DNA, 20 bp, synthetic construct
  source 1..20: mol_type = other DNA
caaacagcctacgaacatgt

SEQ ID NO: 194978 - DNA, 20 bp, synthetic construct
  source 1..20: mol_type = other DNA
acaaacagcctacgaacatg

SEQ ID NO: 194979 - DNA, 20 bp, synthetic construct
  source 1..20: mol_type = other DNA
gacaaacagcctacgaacat

SEQ ID NO: 194980 - DNA, 20 bp, synthetic construct
  source 1..20: mol_type = other DNA
agacaaacagcctacgaaca

SEQ ID NO: 194981 - DNA, 20 bp, synthetic construct
  source 1..20: mol_type = other DNA
cagacaaacagcctacgaac

SEQ ID NO: 194982 - DNA, 20 bp, synthetic construct
  source 1..20: mol_type = other DNA
ccagacaaacagcctacgaa

SEQ ID NO: 194983 - DNA, 20 bp, synthetic construct
  source 1..20: mol_type = other DNA
accagacaaacagcctacga

SEQ ID NO: 194984 - DNA, 20 bp, synthetic construct
  source 1..20: mol_type = other DNA
aaccagacaaacagcctacg

SEQ ID NO: 194985 - DNA, 20 bp, synthetic construct
  source 1..20: mol_type = other DNA
aaaccagacaaacagcctac

SEQ ID NO: 194986 - DNA, 20 bp, synthetic construct
  source 1..20: mol_type = other DNA
taaaccagacaaacagccta

SEQ ID NO: 194987 - DNA, 20 bp, synthetic construct
  source 1..20: mol_type = other DNA
ttaaaccagacaaacagcct

SEQ ID NO: 194988 - DNA, 20 bp, synthetic construct
  source 1..20: mol_type = other DNA
tttaaaccagacaaacagcc

SEQ ID NO: 194989 - DNA, 20 bp, synthetic construct
  source 1..20: mol_type = other DNA
gtttaaaccagacaaacagc

SEQ ID NO: 194990 - DNA, 20 bp, synthetic construct
  source 1..20: mol_type = other DNA
agtttaaaccagacaaacag

SEQ ID NO: 194991 - DNA, 20 bp, synthetic construct
  source 1..20: mol_type = other DNA
gagtttaaaccagacaaaca

SEQ ID NO: 194992 - DNA, 20 bp, synthetic construct
  source 1..20: mol_type = other DNA
agagtttaaaccagacaaac

SEQ ID NO: 194993 - DNA, 20 bp, synthetic construct
  source 1..20: mol_type = other DNA
tagagtttaaaccagacaaa

SEQ ID NO: 194994 - DNA, 20 bp, synthetic construct
  source 1..20: mol_type = other DNA
atagagtttaaaccagacaa

SEQ ID NO: 194995 - DNA, 20 bp, synthetic construct
  source 1..20: mol_type = other DNA
gatagagtttaaaccagaca

SEQ ID NO: 194996 - DNA, 20 bp, synthetic construct
  source 1..20: mol_type = other DNA
agatagagtttaaaccagac

SEQ ID NO: 194997 - DNA, 20 bp, synthetic construct
  source 1..20: mol_type = other DNA
cagatagagtttaaaccaga

SEQ ID NO: 194998 - DNA, 20 bp, synthetic construct
  source 1..20: mol_type = other DNA
ccagatagagtttaaaccag

SEQ ID NO: 194999 - DNA, 20 bp, synthetic construct
  source 1..20: mol_type = other DNA
tccagatagagtttaaacca

SEQ ID NO: 195000 - DNA, 20 bp, synthetic construct
  source 1..20: mol_type = other DNA
ctccagatagagtttaaacc

SEQ ID NO: 195001 - DNA, 20 bp, synthetic construct
  source 1..20: mol_type = other DNA
cctccagatagagtttaaac

SEQ ID NO: 195002 - DNA, 20 bp, synthetic construct
  source 1..20: mol_type = other DNA
tcctccagatagagtttaaa

SEQ ID NO: 195003 - DNA, 20 bp, synthetic construct
  source 1..20: mol_type = other DNA
ttcctccagatagagtttaa

SEQ ID NO: 195004 - DNA, 20 bp, synthetic construct
  source 1..20: mol_type = other DNA
attcctccagatagagttta

SEQ ID NO: 195005 - DNA, 20 bp, synthetic construct
  source 1..20: mol_type = other DNA
aattcctccagatagagttt

SEQ ID NO: 195006 - DNA, 20 bp, synthetic construct
  source 1..20: mol_type = other DNA
gaattcctccagatagagtt

SEQ ID NO: 195007 - DNA, 20 bp, synthetic construct
  source 1..20: mol_type = other DNA
tgaattcctccagatagagt

SEQ ID NO: 195008 - DNA, 20 bp, synthetic construct
  source 1..20: mol_type = other DNA
ttgaattcctccagatagag

SEQ ID NO: 195009 - DNA, 20 bp, synthetic construct
  source 1..20: mol_type = other DNA
cttgaattcctccagataga

SEQ ID NO: 195010 - DNA, 20 bp, synthetic construct
  source 1..20: mol_type = other DNA
gcttgaattcctccagatag

SEQ ID NO: 195011 - DNA, 20 bp, synthetic construct
  source 1..20: mol_type = other DNA
agcttgaattcctccagata

SEQ ID NO: 195012 - DNA, 20 bp, synthetic construct
  source 1..20: mol_type = other DNA
tagcttgaattcctccagat

SEQ ID NO: 195013 - DNA, 20 bp, synthetic construct
  source 1..20: mol_type = other DNA
ctagcttgaattcctccaga

SEQ ID NO: 195014 - DNA, 20 bp, synthetic construct
  source 1..20: mol_type = other DNA
tctagcttgaattcctccag

SEQ ID NO: 195015 - DNA, 20 bp, synthetic construct
  source 1..20: mol_type = other DNA
gtctagcttgaattcctcca

SEQ ID NO: 195016 - DNA, 20 bp, synthetic construct
  source 1..20: mol_type = other DNA
agtctagcttgaattcctcc

SEQ ID NO: 195017 - DNA, 20 bp, synthetic construct
  source 1..20: mol_type = other DNA
aagtctagcttgaattcctc

SEQ ID NO: 195018 - DNA, 20 bp, synthetic construct
  source 1..20: mol_type = other DNA
gaagtctagcttgaattcct

SEQ ID NO: 195019 - DNA, 20 bp, synthetic construct
  source 1..20: mol_type = other DNA
tgaagtctagcttgaattcc

SEQ ID NO: 195020 - DNA, 20 bp, synthetic construct
  source 1..20: mol_type = other DNA
ctgaagtctagcttgaattc

SEQ ID NO: 195021 - DNA, 20 bp, synthetic construct
  source 1..20: mol_type = other DNA
cctgaagtctagcttgaatt

SEQ ID NO: 195022 - DNA, 20 bp, synthetic construct
  source 1..20: mol_type = other DNA
tcctgaagtctagcttgaat

SEQ ID NO: 195023 - DNA, 20 bp, synthetic construct
  source 1..20: mol_type = other DNA
ttcctgaagtctagcttgaa

SEQ ID NO: 195024 - DNA, 20 bp, synthetic construct
  source 1..20: mol_type = other DNA
attcctgaagtctagcttga

SEQ ID NO: 195025 - DNA, 20 bp, synthetic construct
  source 1..20: mol_type = other DNA
tattcctgaagtctagcttg

SEQ ID NO: 195026 - DNA, 20 bp, synthetic construct
  source 1..20: mol_type = other DNA
ttattcctgaagtctagctt

SEQ ID NO: 195027 - DNA, 20 bp, synthetic construct
  source 1..20: mol_type = other DNA
gttattcctgaagtctagct

SEQ ID NO: 195028 - DNA, 20 bp, synthetic construct
  source 1..20: mol_type = other DNA
agttattcctgaagtctagc

SEQ ID NO: 195029 - DNA, 20 bp, synthetic construct
  source 1..20: mol_type = other DNA
aagttattcctgaagtctag

SEQ ID NO: 195030 - DNA, 20 bp, synthetic construct
  source 1..20: mol_type = other DNA
gaagttattcctgaagtcta

SEQ ID NO: 195031 - DNA, 20 bp, synthetic construct
  source 1..20: mol_type = other DNA
agaagttattcctgaagtct

SEQ ID NO: 195032 - DNA, 20 bp, synthetic construct
  source 1..20: mol_type = other DNA
aagaagttattcctgaagtc

SEQ ID NO: 195033 - DNA, 20 bp, synthetic construct
  source 1..20: mol_type = other DNA
caagaagttattcctgaagt

SEQ ID NO: 195034 - DNA, 20 bp, synthetic construct
  source 1..20: mol_type = other DNA
tcaagaagttattcctgaag

SEQ ID NO: 195035 - DNA, 20 bp, synthetic construct
  source 1..20: mol_type = other DNA
ctcaagaagttattcctgaa

SEQ ID NO: 195036 - DNA, 20 bp, synthetic construct
  source 1..20: mol_type = other DNA
cctcaagaagttattcctga

SEQ ID NO: 195037 - DNA, 20 bp, synthetic construct
  source 1..20: mol_type = other DNA
gcctcaagaagttattcctg

SEQ ID NO: 195038 - DNA, 20 bp, synthetic construct
  source 1..20: mol_type = other DNA
tgcctcaagaagttattcct

SEQ ID NO: 195039 - DNA, 20 bp, synthetic construct
  source 1..20: mol_type = other DNA
ttgcctcaagaagttattcc

SEQ ID NO: 195040 - DNA, 20 bp, synthetic construct
  source 1..20: mol_type = other DNA
cttgcctcaagaagttattc

SEQ ID NO: 195041 - DNA, 20 bp, synthetic construct
  source 1..20: mol_type = other DNA
ccttgcctcaagaagttatt

SEQ ID NO: 195042 - DNA, 20 bp, synthetic construct
  source 1..20: mol_type = other DNA
tccttgcctcaagaagttat

SEQ ID NO: 195043 - DNA, 20 bp, synthetic construct
  source 1..20: mol_type = other DNA
atccttgcctcaagaagtta

SEQ ID NO: 195044 - DNA, 20 bp, synthetic construct
  source 1..20: mol_type = other DNA
aatccttgcctcaagaagtt

SEQ ID NO: 195045 - DNA, 20 bp, synthetic construct
  source 1..20: mol_type = other DNA
aaatccttgcctcaagaagt

SEQ ID NO: 195046 - DNA, 20 bp, synthetic construct
  source 1..20: mol_type = other DNA
aaaatccttgcctcaagaag

SEQ ID NO: 195047 - DNA, 20 bp, synthetic construct
  source 1..20: mol_type = other DNA
caaaatccttgcctcaagaa

SEQ ID NO: 195048 - DNA, 20 bp, synthetic construct
  source 1..20: mol_type = other DNA
tcaaaatccttgcctcaaga

SEQ ID NO: 195049 - DNA, 20 bp, synthetic construct
  source 1..20: mol_type = other DNA
ctcaaaatccttgcctcaag

SEQ ID NO: 195050 - DNA, 20 bp, synthetic construct
  source 1..20: mol_type = other DNA
tctcaaaatccttgcctcaa

SEQ ID NO: 195051 - DNA, 20 bp, synthetic construct
  source 1..20: mol_type = other DNA
gtctcaaaatccttgcctca

SEQ ID NO: 195052 - DNA, 20 bp, synthetic construct
  source 1..20: mol_type = other DNA
ggtctcaaaatccttgcctc

SEQ ID NO: 195053 - DNA, 20 bp, synthetic construct
  source 1..20: mol_type = other DNA
aggtctcaaaatccttgcct

SEQ ID NO: 195054 - DNA, 20 bp, synthetic construct
  source 1..20: mol_type = other DNA
aaggtctcaaaatccttgcc

SEQ ID NO: 195055 - DNA, 20 bp, synthetic construct
  source 1..20: mol_type = other DNA
taaggtctcaaaatccttgc

SEQ ID NO: 195056 - DNA, 20 bp, synthetic construct
  source 1..20: mol_type = other DNA
ctaaggtctcaaaatccttg

SEQ ID NO: 195057 - DNA, 20 bp, synthetic construct
  source 1..20: mol_type = other DNA
cctaaggtctcaaaatcctt

SEQ ID NO: 195058 - DNA, 20 bp, synthetic construct
  source 1..20: mol_type = other DNA
ccctaaggtctcaaaatcct

SEQ ID NO: 195059 - DNA, 20 bp, synthetic construct
  source 1..20: mol_type = other DNA
tccctaaggtctcaaaatcc

SEQ ID NO: 195060 - DNA, 20 bp, synthetic construct
  source 1..20: mol_type = other DNA
ttccctaaggtctcaaaatc

SEQ ID NO: 195061 - DNA, 20 bp, synthetic construct
  source 1..20: mol_type = other DNA
tttccctaaggtctcaaaat

SEQ ID NO: 195062 - DNA, 20 bp, synthetic construct
  source 1..20: mol_type = other DNA
ctttccctaaggtctcaaaa

SEQ ID NO: 195063 - DNA, 20 bp, synthetic construct
  source 1..20: mol_type = other DNA
tctttccctaaggtctcaaa

SEQ ID NO: 195064 - DNA, 20 bp, synthetic construct
  source 1..20: mol_type = other DNA
ttctttccctaaggtctcaa

SEQ ID NO: 195065 - DNA, 20 bp, synthetic construct
  source 1..20: mol_type = other DNA
cttctttccctaaggtctca

SEQ ID NO: 195066 - DNA, 20 bp, synthetic construct
  source 1..20: mol_type = other DNA
ccttctttccctaaggtctc

SEQ ID NO: 195067 - DNA, 20 bp, synthetic construct
  source 1..20: mol_type = other DNA
tccttctttccctaaggtct

SEQ ID NO: 195068 - DNA, 20 bp, synthetic construct
  source 1..20: mol_type = other DNA
gtccttctttccctaaggtc

SEQ ID NO: 195069 - DNA, 20 bp, synthetic construct
  source 1..20: mol_type = other DNA
cgtccttctttccctaaggt

SEQ ID NO: 195070 - DNA, 20 bp, synthetic construct
  source 1..20: mol_type = other DNA
acgtccttctttccctaagg

SEQ ID NO: 195071 - DNA, 20 bp, synthetic construct
  source 1..20: mol_type = other DNA
gacgtccttctttccctaag

SEQ ID NO: 195072 - DNA, 20 bp, synthetic construct
  source 1..20: mol_type = other DNA
agacgtccttctttccctaa

SEQ ID NO: 195073 - DNA, 20 bp, synthetic construct
  source 1..20: mol_type = other DNA
aagacgtccttctttcccta

SEQ ID NO: 195074 - DNA, 20 bp, synthetic construct
  source 1..20: mol_type = other DNA
caagacgtccttctttccct

SEQ ID NO: 195075 - DNA, 20 bp, synthetic construct
  source 1..20: mol_type = other DNA
ccaagacgtccttctttccc

SEQ ID NO: 195076 - DNA, 20 bp, synthetic construct
  source 1..20: mol_type = other DNA
cccaagacgtccttctttcc

SEQ ID NO: 195077 - DNA, 20 bp, synthetic construct
  source 1..20: mol_type = other DNA
ccccaagacgtccttctttc

SEQ ID NO: 195078 - DNA, 20 bp, synthetic construct
  source 1..20: mol_type = other DNA
cccccaagacgtccttcttt

SEQ ID NO: 195079 - DNA, 20 bp, synthetic construct
  source 1..20: mol_type = other DNA
acccccaagacgtccttctt

SEQ ID NO: 195080 - DNA, 20 bp, synthetic construct
  source 1..20: mol_type = other DNA
tacccccaagacgtccttct

SEQ ID NO: 195081 - DNA, 20 bp, synthetic construct
  source 1..20: mol_type = other DNA
atacccccaagacgtccttc

SEQ ID NO: 195082 - DNA, 20 bp, synthetic construct
  source 1..20: mol_type = other DNA
aatacccccaagacgtcctt

SEQ ID NO: 195083 - DNA, 20 bp, synthetic construct
  source 1..20: mol_type = other DNA
gaatacccccaagacgtcct

SEQ ID NO: 195084 - DNA, 20 bp, synthetic construct
  source 1..20: mol_type = other DNA
agaatacccccaagacgtcc

SEQ ID NO: 195085 - DNA, 20 bp, synthetic construct
  source 1..20: mol_type = other DNA
cagaatacccccaagacgtc

SEQ ID NO: 195086 - DNA, 20 bp, synthetic construct
  source 1..20: mol_type = other DNA
tcagaatacccccaagacgt

SEQ ID NO: 195087 - DNA, 20 bp, synthetic construct
  source 1..20: mol_type = other DNA
gtcagaatacccccaagacg

SEQ ID NO: 195088 - DNA, 20 bp, synthetic construct
  source 1..20: mol_type = other DNA
agtcagaatacccccaagac

SEQ ID NO: 195089 - DNA, 20 bp, synthetic construct
  source 1..20: mol_type = other DNA
cagtcagaatacccccaaga

SEQ ID NO: 195090 - DNA, 20 bp, synthetic construct
  source 1..20: mol_type = other DNA
acagtcagaatacccccaag

SEQ ID NO: 195091 - DNA, 20 bp, synthetic construct
  source 1..20: mol_type = other DNA
aacagtcagaatacccccaa

SEQ ID NO: 195092 - DNA, 20 bp, synthetic construct
  source 1..20: mol_type = other DNA
caacagtcagaataccccca

SEQ ID NO: 195093 - DNA, 20 bp, synthetic construct
  source 1..20: mol_type = other DNA
acaacagtcagaataccccc

SEQ ID NO: 195094 - DNA, 20 bp, synthetic construct
  source 1..20: mol_type = other DNA
gacaacagtcagaatacccc

SEQ ID NO: 195095 - DNA, 20 bp, synthetic construct
  source 1..20: mol_type = other DNA
ggacaacagtcagaataccc

SEQ ID NO: 195096 - DNA, 20 bp, synthetic construct
  source 1..20: mol_type = other DNA
aggacaacagtcagaatacc

SEQ ID NO: 195097 - DNA, 20 bp, synthetic construct
  source 1..20: mol_type = other DNA
gaggacaacagtcagaatac

SEQ ID NO: 195098 - DNA, 20 bp, synthetic construct
  source 1..20: mol_type = other DNA
ggaggacaacagtcagaata

SEQ ID NO: 195099 - DNA, 20 bp, synthetic construct
  source 1..20: mol_type = other DNA
aggaggacaacagtcagaat

SEQ ID NO: 195100 - DNA, 20 bp, synthetic construct
  source 1..20: mol_type = other DNA
caggaggacaacagtcagaa

SEQ ID NO: 195101 - DNA, 20 bp, synthetic construct
  source 1..20: mol_type = other DNA
ccaggaggacaacagtcaga

SEQ ID NO: 195102 - DNA, 20 bp, synthetic construct
  source 1..20: mol_type = other DNA
tccaggaggacaacagtcag

SEQ ID NO: 195103 - DNA, 20 bp, synthetic construct
  source 1..20: mol_type = other DNA
ttccaggaggacaacagtca

SEQ ID NO: 195104 - DNA, 20 bp, synthetic construct
  source 1..20: mol_type = other DNA
cttccaggaggacaacagtc

SEQ ID NO: 195105 - DNA, 20 bp, synthetic construct
  source 1..20: mol_type = other DNA
ccttccaggaggacaacagt

SEQ ID NO: 195106 - DNA, 20 bp, synthetic construct
  source 1..20: mol_type = other DNA
cccttccaggaggacaacag

SEQ ID NO: 195107 - DNA, 20 bp, synthetic construct
  source 1..20: mol_type = other DNA
tcccttccaggaggacaaca

SEQ ID NO: 195108 - DNA, 20 bp, synthetic construct
  source 1..20: mol_type = other DNA
ttcccttccaggaggacaac

SEQ ID NO: 195109 - DNA, 20 bp, synthetic construct
  source 1..20: mol_type = other DNA
cttcccttccaggaggacaa

SEQ ID NO: 195110 - DNA, 20 bp, synthetic construct
  source 1..20: mol_type = other DNA
tcttcccttccaggaggaca

SEQ ID NO: 195111 - DNA, 20 bp, synthetic construct
  source 1..20: mol_type = other DNA
ttcttcccttccaggaggac

SEQ ID NO: 195112 - DNA, 20 bp, synthetic construct
  source 1..20: mol_type = other DNA
gttcttcccttccaggagga

SEQ ID NO: 195113 - DNA, 20 bp, synthetic construct
  source 1..20: mol_type = other DNA
tgttcttcccttccaggagg

SEQ ID NO: 195114 - DNA, 20 bp, synthetic construct
  source 1..20: mol_type = other DNA
ctgttcttcccttccaggag

SEQ ID NO: 195115 - DNA, 20 bp, synthetic construct
  source 1..20: mol_type = other DNA
tctgttcttcccttccagga

SEQ ID NO: 195116 - DNA, 20 bp, synthetic construct
  source 1..20: mol_type = other DNA
ctctgttcttcccttccagg

SEQ ID NO: 195117 - DNA, 20 bp, synthetic construct
  source 1..20: mol_type = other DNA
tctctgttcttcccttccag

SEQ ID NO: 195118 - DNA, 20 bp, synthetic construct
  source 1..20: mol_type = other DNA
ttctctgttcttcccttcca

SEQ ID NO: 195119 - DNA, 20 bp, synthetic construct
  source 1..20: mol_type = other DNA
gttctctgttcttcccttcc

SEQ ID NO: 195120 - DNA, 20 bp, synthetic construct
  source 1..20: mol_type = other DNA
agttctctgttcttcccttc

SEQ ID NO: 195121 - DNA, 20 bp, synthetic construct
  source 1..20: mol_type = other DNA
tagttctctgttcttccctt

SEQ ID NO: 195122 - DNA, 20 bp, synthetic construct
  source 1..20: mol_type = other DNA
ctagttctctgttcttccct

SEQ ID NO: 195123 - DNA, 20 bp, synthetic construct
  source 1..20: mol_type = other DNA
tctagttctctgttcttccc

SEQ ID NO: 195124 - DNA, 20 bp, synthetic construct
  source 1..20: mol_type = other DNA
ttctagttctctgttcttcc

SEQ ID NO: 195125 - DNA, 20 bp, synthetic construct
  source 1..20: mol_type = other DNA
cttctagttctctgttcttc

SEQ ID NO: 195126 - DNA, 20 bp, synthetic construct
  source 1..20: mol_type = other DNA
tcttctagttctctgttctt

SEQ ID NO: 195127 - DNA, 20 bp, synthetic construct
  source 1..20: mol_type = other DNA
gtcttctagttctctgttct

SEQ ID NO: 195128 - DNA, 20 bp, synthetic construct
  source 1..20: mol_type = other DNA
agtcttctagttctctgttc

SEQ ID NO: 195129 - DNA, 20 bp, synthetic construct
  source 1..20: mol_type = other DNA
cagtcttctagttctctgtt

SEQ ID NO: 195130 - DNA, 20 bp, synthetic construct
  source 1..20: mol_type = other DNA
gcagtcttctagttctctgt

SEQ ID NO: 195131 - DNA, 20 bp, synthetic construct
  source 1..20: mol_type = other DNA
ggcagtcttctagttctctg

SEQ ID NO: 195132 - DNA, 20 bp, synthetic construct
  source 1..20: mol_type = other DNA
gggcagtcttctagttctct

SEQ ID NO: 195133 - DNA, 20 bp, synthetic construct
  source 1..20: mol_type = other DNA
agggcagtcttctagttctc

SEQ ID NO: 195134 - DNA, 20 bp, synthetic construct
  source 1..20: mol_type = other DNA
aagggcagtcttctagttct

SEQ ID NO: 195135 - DNA, 20 bp, synthetic construct
  source 1..20: mol_type = other DNA
taagggcagtcttctagttc

SEQ ID NO: 195136 - DNA, 20 bp, synthetic construct
  source 1..20: mol_type = other DNA
ctaagggcagtcttctagtt

SEQ ID NO: 195137 - DNA, 20 bp, synthetic construct
  source 1..20: mol_type = other DNA
gctaagggcagtcttctagt

SEQ ID NO: 195138 - DNA, 20 bp, synthetic construct
  source 1..20: mol_type = other DNA
cgctaagggcagtcttctag

SEQ ID NO: 195139 - DNA, 20 bp, synthetic construct
  source 1..20: mol_type = other DNA
tcgctaagggcagtcttcta

SEQ ID NO: 195140 - DNA, 20 bp, synthetic construct
  source 1..20: mol_type = other DNA
ttcgctaagggcagtcttct

SEQ ID NO: 195141 - DNA, 20 bp, synthetic construct
  source 1..20: mol_type = other DNA
cttcgctaagggcagtcttc

SEQ ID NO: 195142 - DNA, 20 bp, synthetic construct
  source 1..20: mol_type = other DNA
acttcgctaagggcagtctt

SEQ ID NO: 195143 - DNA, 20 bp, synthetic construct
  source 1..20: mol_type = other DNA
aacttcgctaagggcagtct

SEQ ID NO: 195144 - DNA, 20 bp, synthetic construct
  source 1..20: mol_type = other DNA
gaacttcgctaagggcagtc

SEQ ID NO: 195145 - DNA, 20 bp, synthetic construct
  source 1..20: mol_type = other DNA
tgaacttcgctaagggcagt

SEQ ID NO: 195146 - DNA, 20 bp, synthetic construct
  source 1..20: mol_type = other DNA
ttgaacttcgctaagggcag

SEQ ID NO: 195147 - DNA, 20 bp, synthetic construct
  source 1..20: mol_type = other DNA
tttgaacttcgctaagggca

SEQ ID NO: 195148 - DNA, 20 bp, synthetic construct
  source 1..20: mol_type = other DNA
ctttgaacttcgctaagggc

SEQ ID NO: 195149 - DNA, 20 bp, synthetic construct
  source 1..20: mol_type = other DNA
gctttgaacttcgctaaggg

SEQ ID NO: 195150 - DNA, 20 bp, synthetic construct
  source 1..20: mol_type = other DNA
tgctttgaacttcgctaagg

SEQ ID NO: 195151 - DNA, 20 bp, synthetic construct
  source 1..20: mol_type = other DNA
gtgctttgaacttcgctaag

SEQ ID NO: 195152 - DNA, 20 bp, synthetic construct
  source 1..20: mol_type = other DNA
ggtgctttgaacttcgctaa

SEQ ID NO: 195153 - DNA, 20 bp, synthetic construct
  source 1..20: mol_type = other DNA
aggtgctttgaacttcgcta

SEQ ID NO: 195154 - DNA, 20 bp, synthetic construct
  source 1..20: mol_type = other DNA
taggtgctttgaacttcgct

SEQ ID NO: 195155 - DNA, 20 bp, synthetic construct
  source 1..20: mol_type = other DNA
ttaggtgctttgaacttcgc

SEQ ID NO: 195156 - DNA, 20 bp, synthetic construct
  source 1..20: mol_type = other DNA
cttaggtgctttgaacttcg

SEQ ID NO: 195157 - DNA, 20 bp, synthetic construct
  source 1..20: mol_type = other DNA
gcttaggtgctttgaacttc

SEQ ID NO: 195158 - DNA, 20 bp, synthetic construct
  source 1..20: mol_type = other DNA
ggcttaggtgctttgaactt

SEQ ID NO: 195159 - DNA, 20 bp, synthetic construct
  source 1..20: mol_type = other DNA
gggcttaggtgctttgaact

SEQ ID NO: 195160 - DNA, 20 bp, synthetic construct
  source 1..20: mol_type = other DNA
cgggcttaggtgctttgaac

SEQ ID NO: 195161 - DNA, 20 bp, synthetic construct
  source 1..20: mol_type = other DNA
ccgggcttaggtgctttgaa

SEQ ID NO: 195162 - DNA, 20 bp, synthetic construct
  source 1..20: mol_type = other DNA
cccgggcttaggtgctttga

SEQ ID NO: 195163 - DNA, 20 bp, synthetic construct
  source 1..20: mol_type = other DNA
tcccgggcttaggtgctttg

SEQ ID NO: 195164 - DNA, 20 bp, synthetic construct
  source 1..20: mol_type = other DNA
gtcccgggcttaggtgcttt

SEQ ID NO: 195165 - DNA, 20 bp, synthetic construct
  source 1..20: mol_type = other DNA
ggtcccgggcttaggtgctt

SEQ ID NO: 195166 - DNA, 20 bp, synthetic construct
  source 1..20: mol_type = other DNA
gggtcccgggcttaggtgct

SEQ ID NO: 195167 - DNA, 20 bp, synthetic construct
  source 1..20: mol_type = other DNA
agggtcccgggcttaggtgc

SEQ ID NO: 195168 - DNA, 20 bp, synthetic construct
  source 1..20: mol_type = other DNA
gagggtcccgggcttaggtg

SEQ ID NO: 195169 - DNA, 20 bp, synthetic construct
  source 1..20: mol_type = other DNA
tgagggtcccgggcttaggt

SEQ ID NO: 195170 - DNA, 20 bp, synthetic construct
  source 1..20: mol_type = other DNA
ctgagggtcccgggcttagg

SEQ ID NO: 195171 - DNA, 20 bp, synthetic construct
  source 1..20: mol_type = other DNA
gctgagggtcccgggcttag

SEQ ID NO: 195172 - DNA, 20 bp, synthetic construct
  source 1..20: mol_type = other DNA
tgctgagggtcccgggctta

SEQ ID NO: 195173 - DNA, 20 bp, synthetic construct
  source 1..20: mol_type = other DNA
ttgctgagggtcccgggctt

SEQ ID NO: 195174 - DNA, 20 bp, synthetic construct
  source 1..20: mol_type = other DNA
cttgctgagggtcccgggct

SEQ ID NO: 195175 - DNA, 20 bp, synthetic construct
  source 1..20: mol_type = other DNA
acttgctgagggtcccgggc

SEQ ID NO: 195176 - DNA, 20 bp, synthetic construct
  source 1..20: mol_type = other DNA
cacttgctgagggtcccggg

SEQ ID NO: 195177 - DNA, 20 bp, synthetic construct
  source 1..20: mol_type = other DNA
acacttgctgagggtcccgg

SEQ ID NO: 195178 - DNA, 20 bp, synthetic construct
  source 1..20: mol_type = other DNA
aacacttgctgagggtcccg

SEQ ID NO: 195179 - DNA, 20 bp, synthetic construct
  source 1..20: mol_type = other DNA
gaacacttgctgagggtccc

SEQ ID NO: 195180 - DNA, 20 bp, synthetic construct
  source 1..20: mol_type = other DNA
agaacacttgctgagggtcc

SEQ ID NO: 195181 - DNA, 20 bp, synthetic construct
  source 1..20: mol_type = other DNA
aagaacacttgctgagggtc

SEQ ID NO: 195182 - DNA, 20 bp, synthetic construct
  source 1..20: mol_type = other DNA
caagaacacttgctgagggt

SEQ ID NO: 195183 - DNA, 20 bp, synthetic construct
  source 1..20: mol_type = other DNA
tcaagaacacttgctgaggg

SEQ ID NO: 195184 - DNA, 20 bp, synthetic construct
  source 1..20: mol_type = other DNA
ctcaagaacacttgctgagg

SEQ ID NO: 195185 - DNA, 20 bp, synthetic construct
  source 1..20: mol_type = other DNA
actcaagaacacttgctgag

SEQ ID NO: 195186 - DNA, 20 bp, synthetic construct
  source 1..20: mol_type = other DNA
gactcaagaacacttgctga

SEQ ID NO: 195187 - DNA, 20 bp, synthetic construct
  source 1..20: mol_type = other DNA
tgactcaagaacacttgctg

SEQ ID NO: 195188 - DNA, 20 bp, synthetic construct
  source 1..20: mol_type = other DNA
gtgactcaagaacacttgct

SEQ ID NO: 195189 - DNA, 20 bp, synthetic construct
  source 1..20: mol_type = other DNA
tgtgactcaagaacacttgc

SEQ ID NO: 195190 - DNA, 20 bp, synthetic construct
  source 1..20: mol_type = other DNA
ctgtgactcaagaacacttg

SEQ ID NO: 195191 - DNA, 20 bp, synthetic construct
  source 1..20: mol_type = other DNA
tctgtgactcaagaacactt

SEQ ID NO: 195192 - DNA, 20 bp, synthetic construct
  source 1..20: mol_type = other DNA
atctgtgactcaagaacact

SEQ ID NO: 195193 - DNA, 20 bp, synthetic construct
  source 1..20: mol_type = other DNA
aatctgtgactcaagaacac

SEQ ID NO: 195194 - DNA, 20 bp, synthetic construct
  source 1..20: mol_type = other DNA
gaatctgtgactcaagaaca

SEQ ID NO: 195195 - DNA, 20 bp, synthetic construct
  source 1..20: mol_type = other DNA
agaatctgtgactcaagaac

SEQ ID NO: 195196 - DNA, 20 bp, synthetic construct
  source 1..20: mol_type = other DNA
gagaatctgtgactcaagaa

SEQ ID NO: 195197 - DNA, 20 bp, synthetic construct
  source 1..20: mol_type = other DNA
ggagaatctgtgactcaaga

SEQ ID NO: 195198 - DNA, 20 bp, synthetic construct
  source 1..20: mol_type = other DNA
gggagaatctgtgactcaag

SEQ ID NO: 195199 - DNA, 20 bp, synthetic construct
  source 1..20: mol_type = other DNA
agggagaatctgtgactcaa

SEQ ID NO: 195200 - DNA, 20 bp, synthetic construct
  source 1..20: mol_type = other DNA
cagggagaatctgtgactca

SEQ ID NO: 195201 - DNA, 20 bp, synthetic construct
  source 1..20: mol_type = other DNA
tcagggagaatctgtgactc

SEQ ID NO: 195202 - DNA, 20 bp, synthetic construct
  source 1..20: mol_type = other DNA
ctcagggagaatctgtgact

SEQ ID NO: 195203 - DNA, 20 bp, synthetic construct
  source 1..20: mol_type = other DNA
cctcagggagaatctgtgac

SEQ ID NO: 195204 - DNA, 20 bp, synthetic construct
  source 1..20: mol_type = other DNA
gcctcagggagaatctgtga

SEQ ID NO: 195205 - DNA, 20 bp, synthetic construct
  source 1..20: mol_type = other DNA
cgcctcagggagaatctgtg

SEQ ID NO: 195206 - DNA, 20 bp, synthetic construct
  source 1..20: mol_type = other DNA
gcgcctcagggagaatctgt

SEQ ID NO: 195207 - DNA, 20 bp, synthetic construct
  source 1..20: mol_type = other DNA
ggcgcctcagggagaatctg

SEQ ID NO: 195208 - DNA, 20 bp, synthetic construct
  source 1..20: mol_type = other DNA
aggcgcctcagggagaatct

SEQ ID NO: 195209 - DNA, 20 bp, synthetic construct
  source 1..20: mol_type = other DNA
gaggcgcctcagggagaatc

SEQ ID NO: 195210 - DNA, 20 bp, synthetic construct
  source 1..20: mol_type = other DNA
agaggcgcctcagggagaat

SEQ ID NO: 195211 - DNA, 20 bp, synthetic construct
  source 1..20: mol_type = other DNA
aagaggcgcctcagggagaa

SEQ ID NO: 195212 - DNA, 20 bp, synthetic construct
  source 1..20: mol_type = other DNA
aaagaggcgcctcagggaga

SEQ ID NO: 195213 - DNA, 20 bp, synthetic construct
  source 1..20: mol_type = other DNA
gaaagaggcgcctcagggag

SEQ ID NO: 195214 - DNA, 20 bp, synthetic construct
  source 1..20: mol_type = other DNA
agaaagaggcgcctcaggga

SEQ ID NO: 195215 - DNA, 20 bp, synthetic construct
  source 1..20: mol_type = other DNA
cagaaagaggcgcctcaggg

SEQ ID NO: 195216 - DNA, 20 bp, synthetic construct
  source 1..20: mol_type = other DNA
ccagaaagaggcgcctcagg

SEQ ID NO: 195217 - DNA, 20 bp, synthetic construct
  source 1..20: mol_type = other DNA
gccagaaagaggcgcctcag

SEQ ID NO: 195218 - DNA, 20 bp, synthetic construct
  source 1..20: mol_type = other DNA
agccagaaagaggcgcctca

SEQ ID NO: 195219 - DNA, 20 bp, synthetic construct
  source 1..20: mol_type = other DNA
gagccagaaagaggcgcctc

SEQ ID NO: 195220 - DNA, 20 bp, synthetic construct
  source 1..20: mol_type = other DNA
ggagccagaaagaggcgcct

SEQ ID NO: 195221 - DNA, 20 bp, synthetic construct
  source 1..20: mol_type = other DNA
tggagccagaaagaggcgcc

SEQ ID NO: 195222 - DNA, 20 bp, synthetic construct
  source 1..20: mol_type = other DNA
atggagccagaaagaggcgc

SEQ ID NO: 195223 - DNA, 20 bp, synthetic construct
  source 1..20: mol_type = other DNA
tatggagccagaaagaggcg

SEQ ID NO: 195224 - DNA, 20 bp, synthetic construct
  source 1..20: mol_type = other DNA
ctatggagccagaaagaggc

SEQ ID NO: 195225 - DNA, 20 bp, synthetic construct
  source 1..20: mol_type = other DNA
tctatggagccagaaagagg

SEQ ID NO: 195226 - DNA, 20 bp, synthetic construct
  source 1..20: mol_type = other DNA
ttctatggagccagaaagag

SEQ ID NO: 195227 - DNA, 20 bp, synthetic construct
  source 1..20: mol_type = other DNA
attctatggagccagaaaga

SEQ ID NO: 195228 - DNA, 20 bp, synthetic construct
  source 1..20: mol_type = other DNA
cattctatggagccagaaag

SEQ ID NO: 195229 - DNA, 20 bp, synthetic construct
  source 1..20: mol_type = other DNA
ccattctatggagccagaaa

SEQ ID NO: 195230 - DNA, 20 bp, synthetic construct
  source 1..20: mol_type = other DNA
gccattctatggagccagaa

SEQ ID NO: 195231 - DNA, 20 bp, synthetic construct
  source 1..20: mol_type = other DNA
agccattctatggagccaga

SEQ ID NO: 195232 - DNA, 20 bp, synthetic construct
  source 1..20: mol_type = other DNA
cagccattctatggagccag

SEQ ID NO: 195233 - DNA, 20 bp, synthetic construct
  source 1..20: mol_type = other DNA
tcagccattctatggagcca

SEQ ID NO: 195234 - DNA, 20 bp, synthetic construct
  source 1..20: mol_type = other DNA
atcagccattctatggagcc

SEQ ID NO: 195235 - DNA, 20 bp, synthetic construct
  source 1..20: mol_type = other DNA
aatcagccattctatggagc

SEQ ID NO: 195236 - DNA, 20 bp, synthetic construct
  source 1..20: mol_type = other DNA
gaatcagccattctatggag

SEQ ID NO: 195237 - DNA, 20 bp, synthetic construct
  source 1..20: mol_type = other DNA
agaatcagccattctatgga

SEQ ID NO: 195238 - DNA, 20 bp, synthetic construct
  source 1..20: mol_type = other DNA
cagaatcagccattctatgg

SEQ ID NO: 195239 - DNA, 20 bp, synthetic construct
  source 1..20: mol_type = other DNA
acagaatcagccattctatg

SEQ ID NO: 195240 - DNA, 20 bp, synthetic construct
  source 1..20: mol_type = other DNA
tacagaatcagccattctat

SEQ ID NO: 195241 - DNA, 20 bp, synthetic construct
  source 1..20: mol_type = other DNA
ttacagaatcagccattcta

SEQ ID NO: 195242 - DNA, 20 bp, synthetic construct
  source 1..20: mol_type = other DNA
gttacagaatcagccattct

SEQ ID NO: 195243 - DNA, 20 bp, synthetic construct
  source 1..20: mol_type = other DNA
agttacagaatcagccattc

SEQ ID NO: 195244 - DNA, 20 bp, synthetic construct
  source 1..20: mol_type = other DNA
gagttacagaatcagccatt

SEQ ID NO: 195245 - DNA, 20 bp, synthetic construct
  source 1..20: mol_type = other DNA
cgagttacagaatcagccat

SEQ ID NO: 195246 - DNA, 20 bp, synthetic construct
  source 1..20: mol_type = other DNA
ccgagttacagaatcagcca

SEQ ID NO: 195247 - DNA, 20 bp, synthetic construct
  source 1..20: mol_type = other DNA
accgagttacagaatcagcc

SEQ ID NO: 195248 - DNA, 20 bp, synthetic construct
  source 1..20: mol_type = other DNA
caccgagttacagaatcagc

SEQ ID NO: 195249 - DNA, 20 bp, synthetic construct
  source 1..20: mol_type = other DNA
tcaccgagttacagaatcag

SEQ ID NO: 195250 - DNA, 20 bp, synthetic construct
  source 1..20: mol_type = other DNA
ctcaccgagttacagaatca

SEQ ID NO: 195251 - DNA, 20 bp, synthetic construct
  source 1..20: mol_type = other DNA
actcaccgagttacagaatc

SEQ ID NO: 195252 - DNA, 20 bp, synthetic construct
  source 1..20: mol_type = other DNA
aactcaccgagttacagaat

SEQ ID NO: 195253 - DNA, 20 bp, synthetic construct
  source 1..20: mol_type = other DNA
aaactcaccgagttacagaa

SEQ ID NO: 195254 - DNA, 20 bp, synthetic construct
  source 1..20: mol_type = other DNA
caaactcaccgagttacaga

SEQ ID NO: 195255 - DNA, 20 bp, synthetic construct
  source 1..20: mol_type = other DNA
gcaaactcaccgagttacag

SEQ ID NO: 195256 - DNA, 20 bp, synthetic construct
  source 1..20: mol_type = other DNA
agcaaactcaccgagttaca

SEQ ID NO: 195257 - DNA, 20 bp, synthetic construct
  source 1..20: mol_type = other DNA
aagcaaactcaccgagttac

SEQ ID NO: 195258 - DNA, 20 bp, synthetic construct
  source 1..20: mol_type = other DNA
aaagcaaactcaccgagtta

SEQ ID NO: 195259 - DNA, 20 bp, synthetic construct
  source 1..20: mol_type = other DNA
aaaagcaaactcaccgagtt

SEQ ID NO: 195260 - DNA, 20 bp, synthetic construct
  source 1..20: mol_type = other DNA
aaaaagcaaactcaccgagt

SEQ ID NO: 195261 - DNA, 20 bp, synthetic construct
  source 1..20: mol_type = other DNA
aaaaaagcaaactcaccgag

SEQ ID NO: 195262 - DNA, 20 bp, synthetic construct
  source 1..20: mol_type = other DNA
aaaaaaagcaaactcaccga

SEQ ID NO: 195263 - DNA, 20 bp, synthetic construct
  source 1..20: mol_type = other DNA
aaaaaaaagcaaactcaccg

SEQ ID NO: 195264 - DNA, 20 bp, synthetic construct
  source 1..20: mol_type = other DNA
aaaaaaaaagcaaactcacc

SEQ ID NO: 195265 - DNA, 20 bp, synthetic construct
  source 1..20: mol_type = other DNA
aaaaaaaaaagcaaactcac

SEQ ID NO: 195266 - DNA, 20 bp, synthetic construct
  source 1..20: mol_type = other DNA
aaaaaaaaaaagcaaactca

SEQ ID NO: 195267 - DNA, 20 bp, synthetic construct
  source 1..20: mol_type = other DNA
gaaaaaaaaaaagcaaactc

SEQ ID NO: 195268 - DNA, 20 bp, synthetic construct
  source 1..20: mol_type = other DNA
ggaaaaaaaaaaagcaaact

SEQ ID NO: 195269 - DNA, 20 bp, synthetic construct
  source 1..20: mol_type = other DNA
aggaaaaaaaaaaagcaaac

SEQ ID NO: 195270 - DNA, 20 bp, synthetic construct
  source 1..20: mol_type = other DNA
gaggaaaaaaaaaaagcaaa

SEQ ID NO: 195271 - DNA, 20 bp, synthetic construct
  source 1..20: mol_type = other DNA
ggaggaaaaaaaaaaagcaa

SEQ ID NO: 195272 - DNA, 20 bp, synthetic construct
  source 1..20: mol_type = other DNA
tggaggaaaaaaaaaaagca

SEQ ID NO: 195273 - DNA, 20 bp, synthetic construct
  source 1..20: mol_type = other DNA
atggaggaaaaaaaaaaagc

SEQ ID NO: 195274 - DNA, 20 bp, synthetic construct
  source 1..20: mol_type = other DNA
gatggaggaaaaaaaaaaag

SEQ ID NO: 195275 - DNA, 20 bp, synthetic construct
  source 1..20: mol_type = other DNA
tgatggaggaaaaaaaaaaa

SEQ ID NO: 195276 - DNA, 20 bp, synthetic construct
  source 1..20: mol_type = other DNA
gtgatggaggaaaaaaaaaa

SEQ ID NO: 195277 - DNA, 20 bp, synthetic construct
  source 1..20: mol_type = other DNA
ggtgatggaggaaaaaaaaa

SEQ ID NO: 195278 - DNA, 20 bp, synthetic construct
  source 1..20: mol_type = other DNA
gggtgatggaggaaaaaaaa

SEQ ID NO: 195279 - DNA, 20 bp, synthetic construct
  source 1..20: mol_type = other DNA
tgggtgatggaggaaaaaaa

SEQ ID NO: 195280 - DNA, 20 bp, synthetic construct
  source 1..20: mol_type = other DNA
ctgggtgatggaggaaaaaa

SEQ ID NO: 195281 - DNA, 20 bp, synthetic construct
  source 1..20: mol_type = other DNA
cctgggtgatggaggaaaaa

SEQ ID NO: 195282 - DNA, 20 bp, synthetic construct
  source 1..20: mol_type = other DNA
gcctgggtgatggaggaaaa

SEQ ID NO: 195283 - DNA, 20 bp, synthetic construct
  source 1..20: mol_type = other DNA
agcctgggtgatggaggaaa

SEQ ID NO: 195284 - DNA, 20 bp, synthetic construct
  source 1..20: mol_type = other DNA
cagcctgggtgatggaggaa

SEQ ID NO: 195285 - DNA, 20 bp, synthetic construct
  source 1..20: mol_type = other DNA
ccagcctgggtgatggagga

SEQ ID NO: 195286 - DNA, 20 bp, synthetic construct
  source 1..20: mol_type = other DNA
tccagcctgggtgatggagg

SEQ ID NO: 195287 - DNA, 20 bp, synthetic construct
  source 1..20: mol_type = other DNA
ctccagcctgggtgatggag

SEQ ID NO: 195288 - DNA, 20 bp, synthetic construct
  source 1..20: mol_type = other DNA
actccagcctgggtgatgga

SEQ ID NO: 195289 - DNA, 20 bp, synthetic construct
  source 1..20: mol_type = other DNA
cactccagcctgggtgatgg

SEQ ID NO: 195290 - DNA, 20 bp, synthetic construct
  source 1..20: mol_type = other DNA
gcactccagcctgggtgatg

SEQ ID NO: 195291 - DNA, 20 bp, synthetic construct
  source 1..20: mol_type = other DNA
tgcactccagcctgggtgat

SEQ ID NO: 195292 - DNA, 20 bp, synthetic construct
  source 1..20: mol_type = other DNA
ctgcactccagcctgggtga

SEQ ID NO: 195293 - DNA, 20 bp, synthetic construct
  source 1..20: mol_type = other DNA
actgcactccagcctgggtg

SEQ ID NO: 195294 - DNA, 20 bp, synthetic construct
  source 1..20: mol_type = other DNA
cactgcactccagcctgggt

SEQ ID NO: 195295 - DNA, 20 bp, synthetic construct
  source 1..20: mol_type = other DNA
tcactgcactccagcctggg

SEQ ID NO: 195296 - DNA, 20 bp, synthetic construct
  source 1..20: mol_type = other DNA
ttcactgcactccagcctgg

SEQ ID NO: 195297 - DNA, 20 bp, synthetic construct
  source 1..20: mol_type = other DNA
cttcactgcactccagcctg

SEQ ID NO: 195298 - DNA, 20 bp, synthetic construct
  source 1..20: mol_type = other DNA
gcttcactgcactccagcct

SEQ ID NO: 195299 - DNA, 20 bp, synthetic construct
  source 1..20: mol_type = other DNA
agcttcactgcactccagcc

SEQ ID NO: 195300 - DNA, 20 bp, synthetic construct
  source 1..20: mol_type = other DNA
cagcttcactgcactccagc

SEQ ID NO: 195301 - DNA, 20 bp, synthetic construct
  source 1..20: mol_type = other DNA
ccagcttcactgcactccag

SEQ ID NO: 195302 - DNA, 20 bp, synthetic construct
  source 1..20: mol_type = other DNA
tccagcttcactgcactcca

SEQ ID NO: 195303 - DNA, 20 bp, synthetic construct
  source 1..20: mol_type = other DNA
ctccagcttcactgcactcc

SEQ ID NO: 195304 - DNA, 20 bp, synthetic construct
  source 1..20: mol_type = other DNA
actccagcttcactgcactc

SEQ ID NO: 195305 - DNA, 20 bp, synthetic construct
  source 1..20: mol_type = other DNA
cactccagcttcactgcact

SEQ ID NO: 195306 - DNA, 20 bp, synthetic construct
  source 1..20: mol_type = other DNA
gcactccagcttcactgcac

SEQ ID NO: 195307 - DNA, 20 bp, synthetic construct
  source 1..20: mol_type = other DNA
ggcactccagcttcactgca

SEQ ID NO: 195308 - DNA, 20 bp, synthetic construct
  source 1..20: mol_type = other DNA
cggcactccagcttcactgc

SEQ ID NO: 195309 - DNA, 20 bp, synthetic construct
  source 1..20: mol_type = other DNA
acggcactccagcttcactg

SEQ ID NO: 195310 - DNA, 20 bp, synthetic construct
  source 1..20: mol_type = other DNA
cacggcactccagcttcact

SEQ ID NO: 195311 - DNA, 20 bp, synthetic construct
  source 1..20: mol_type = other DNA
ccacggcactccagcttcac

SEQ ID NO: 195312 - DNA, 20 bp, synthetic construct
  source 1..20: mol_type = other DNA
tccacggcactccagcttca

SEQ ID NO: 195313 - DNA, 20 bp, synthetic construct
  source 1..20: mol_type = other DNA
ctccacggcactccagcttc

SEQ ID NO: 195314 - DNA, 20 bp, synthetic construct
  source 1..20: mol_type = other DNA
gctccacggcactccagctt

SEQ ID NO: 195315 - DNA, 20 bp, synthetic construct
  source 1..20: mol_type = other DNA
cgctccacggcactccagct

SEQ ID NO: 195316 - DNA, 20 bp, synthetic construct
  source 1..20: mol_type = other DNA
tcgctccacggcactccagc

SEQ ID NO: 195317 - DNA, 20 bp, synthetic construct
  source 1..20: mol_type = other DNA
atcgctccacggcactccag

SEQ ID NO: 195318 - DNA, 20 bp, synthetic construct
  source 1..20: mol_type = other DNA
gatcgctccacggcactcca

SEQ ID NO: 195319 - DNA, 20 bp, synthetic construct
  source 1..20: mol_type = other DNA
tgatcgctccacggcactcc

SEQ ID NO: 195320 - DNA, 20 bp, synthetic construct
  source 1..20: mol_type = other DNA
gtgatcgctccacggcactc

SEQ ID NO: 195321 - DNA, 20 bp, synthetic construct
  source 1..20: mol_type = other DNA
agtgatcgctccacggcact

SEQ ID NO: 195322 - DNA, 20 bp, synthetic construct
  source 1..20: mol_type = other DNA
cagtgatcgctccacggcac

SEQ ID NO: 195323 - DNA, 20 bp, synthetic construct
  source 1..20: mol_type = other DNA
gcagtgatcgctccacggca

SEQ ID NO: 195324 - DNA, 20 bp, synthetic construct
  source 1..20: mol_type = other DNA
tgcagtgatcgctccacggc

SEQ ID NO: 195325 - DNA, 20 bp, synthetic construct
  source 1..20: mol_type = other DNA
ttgcagtgatcgctccacgg

SEQ ID NO: 195326 - DNA, 20 bp, synthetic construct
  source 1..20: mol_type = other DNA
gttgcagtgatcgctccacg

SEQ ID NO: 195327 - DNA, 20 bp, synthetic construct
  source 1..20: mol_type = other DNA
ggttgcagtgatcgctccac

SEQ ID NO: 195328 - DNA, 20 bp, synthetic construct
  source 1..20: mol_type = other DNA
aggttgcagtgatcgctcca

SEQ ID NO: 195329 - DNA, 20 bp, synthetic construct
  source 1..20: mol_type = other DNA
gaggttgcagtgatcgctcc

SEQ ID NO: 195330 - DNA, 20 bp, synthetic construct
  source 1..20: mol_type = other DNA
agaggttgcagtgatcgctc

SEQ ID NO: 195331 - DNA, 20 bp, synthetic construct
  source 1..20: mol_type = other DNA
cagaggttgcagtgatcgct

SEQ ID NO: 195332 - DNA, 20 bp, synthetic construct
  source 1..20: mol_type = other DNA
acagaggttgcagtgatcgc

SEQ ID NO: 195333 - DNA, 20 bp, synthetic construct
  source 1..20: mol_type = other DNA
gacagaggttgcagtgatcg

SEQ ID NO: 195334 - DNA, 20 bp, synthetic construct
  source 1..20: mol_type = other DNA
agacagaggttgcagtgatc

SEQ ID NO: 195335 - DNA, 20 bp, synthetic construct
  source 1..20: mol_type = other DNA
gagacagaggttgcagtgat

SEQ ID NO: 195336 - DNA, 20 bp, synthetic construct
  source 1..20: mol_type = other DNA
ggagacagaggttgcagtga

SEQ ID NO: 195337 - DNA, 20 bp, synthetic construct
  source 1..20: mol_type = other DNA
gggagacagaggttgcagtg

SEQ ID NO: 195338 - DNA, 20 bp, synthetic construct
  source 1..20: mol_type = other DNA
tgggagacagaggttgcagt

SEQ ID NO: 195339 - DNA, 20 bp, synthetic construct
  source 1..20: mol_type = other DNA
ctgggagacagaggttgcag

SEQ ID NO: 195340 - DNA, 20 bp, synthetic construct
  source 1..20: mol_type = other DNA
cctgggagacagaggttgca

SEQ ID NO: 195341 - DNA, 20 bp, synthetic construct
  source 1..20: mol_type = other DNA
acctgggagacagaggttgc

SEQ ID NO: 195342 - DNA, 20 bp, synthetic construct
  source 1..20: mol_type = other DNA
aacctgggagacagaggttg

SEQ ID NO: 195343 - DNA, 20 bp, synthetic construct
  source 1..20: mol_type = other DNA
gaacctgggagacagaggtt

SEQ ID NO: 195344 - DNA, 20 bp, synthetic construct
  source 1..20: mol_type = other DNA
tgaacctgggagacagaggt

SEQ ID NO: 195345 - DNA, 20 bp, synthetic construct
  source 1..20: mol_type = other DNA
ttgaacctgggagacagagg

SEQ ID NO: 195346 - DNA, 20 bp, synthetic construct
  source 1..20: mol_type = other DNA
cttgaacctgggagacagag

SEQ ID NO: 195347 - DNA, 20 bp, synthetic construct
  source 1..20: mol_type = other DNA
gcttgaacctgggagacaga

SEQ ID NO: 195348 - DNA, 20 bp, synthetic construct
  source 1..20: mol_type = other DNA
tgcttgaacctgggagacag

SEQ ID NO: 195349 - DNA, 20 bp, synthetic construct
  source 1..20: mol_type = other DNA
ttgcttgaacctgggagaca

SEQ ID NO: 195350 - DNA, 20 bp, synthetic construct
  source 1..20: mol_type = other DNA
attgcttgaacctgggagac

SEQ ID NO: 195351 - DNA, 20 bp, synthetic construct
  source 1..20: mol_type = other DNA
aattgcttgaacctgggaga

SEQ ID NO: 195352 - DNA, 20 bp, synthetic construct
  source 1..20: mol_type = other DNA
gaattgcttgaacctgggag

SEQ ID NO: 195353 - DNA, 20 bp, synthetic construct
  source 1..20: mol_type = other DNA
agaattgcttgaacctggga

SEQ ID NO: 195354 - DNA, 20 bp, synthetic construct
  source 1..20: mol_type = other DNA
gagaattgcttgaacctggg

SEQ ID NO: 195355 - DNA, 20 bp, synthetic construct
  source 1..20: mol_type = other DNA
ggagaattgcttgaacctgg

SEQ ID NO: 195356 - DNA, 20 bp, synthetic construct
  source 1..20: mol_type = other DNA
aggagaattgcttgaacctg

SEQ ID NO: 195357 - DNA, 20 bp, synthetic construct
  source 1..20: mol_type = other DNA
aaggagaattgcttgaacct

SEQ ID NO: 195358 - DNA, 20 bp, synthetic construct
  source 1..20: mol_type = other DNA
gaaggagaattgcttgaacc

SEQ ID NO: 195359 - DNA, 20 bp, synthetic construct
  source 1..20: mol_type = other DNA
ggaaggagaattgcttgaac

SEQ ID NO: 195360 - DNA, 20 bp, synthetic construct
  source 1..20: mol_type = other DNA
aggaaggagaattgcttgaa

SEQ ID NO: 195361 - DNA, 20 bp, synthetic construct
  source 1..20: mol_type = other DNA
gaggaaggagaattgcttga

SEQ ID NO: 195362 - DNA, 20 bp, synthetic construct
  source 1..20: mol_type = other DNA
tgaggaaggagaattgcttg

SEQ ID NO: 195363 - DNA, 20 bp, synthetic construct
  source 1..20: mol_type = other DNA
ctgaggaaggagaattgctt

SEQ ID NO: 195364 - DNA, 20 bp, synthetic construct
  source 1..20: mol_type = other DNA
gctgaggaaggagaattgct

SEQ ID NO: 195365 - DNA, 20 bp, synthetic construct
  source 1..20: mol_type = other DNA
ggctgaggaaggagaattgc

SEQ ID NO: 195366 - DNA, 20 bp, synthetic construct
  source 1..20: mol_type = other DNA
aggctgaggaaggagaattg

SEQ ID NO: 195367 - DNA, 20 bp, synthetic construct
  source 1..20: mol_type = other DNA
gaggctgaggaaggagaatt

SEQ ID NO: 195368 - DNA, 20 bp, synthetic construct
  source 1..20: mol_type = other DNA
ggaggctgaggaaggagaat

SEQ ID NO: 195369 - DNA, 20 bp, synthetic construct
  source 1..20: mol_type = other DNA
gggaggctgaggaaggagaa

SEQ ID NO: 195370 - DNA, 20 bp, synthetic construct
  source 1..20: mol_type = other DNA
tgggaggctgaggaaggaga

SEQ ID NO: 195371 - DNA, 20 bp, synthetic construct
  source 1..20: mol_type = other DNA
ttgggaggctgaggaaggag

SEQ ID NO: 195372 - DNA, 20 bp, synthetic construct
  source 1..20: mol_type = other DNA
cttgggaggctgaggaagga

SEQ ID NO: 195373 - DNA, 20 bp, synthetic construct
  source 1..20: mol_type = other DNA
acttgggaggctgaggaagg

SEQ ID NO: 195374 - DNA, 20 bp, synthetic construct
  source 1..20: mol_type = other DNA
tacttgggaggctgaggaag

SEQ ID NO: 195375 - DNA, 20 bp, synthetic construct
  source 1..20: mol_type = other DNA
ctacttgggaggctgaggaa

SEQ ID NO: 195376 - DNA, 20 bp, synthetic construct
  source 1..20: mol_type = other DNA
gctacttgggaggctgagga

SEQ ID NO: 195377 - DNA, 20 bp, synthetic construct
  source 1..20: mol_type = other DNA
agctacttgggaggctgagg

SEQ ID NO: 195378 - DNA, 20 bp, synthetic construct
  source 1..20: mol_type = other DNA
cagctacttgggaggctgag

SEQ ID NO: 195379 - DNA, 20 bp, synthetic construct
  source 1..20: mol_type = other DNA
ccagctacttgggaggctga

SEQ ID NO: 195380 - DNA, 20 bp, synthetic construct
  source 1..20: mol_type = other DNA
cccagctacttgggaggctg

SEQ ID NO: 195381 - DNA, 20 bp, synthetic construct
  source 1..20: mol_type = other DNA
tcccagctacttgggaggct

SEQ ID NO: 195382 - DNA, 20 bp, synthetic construct
  source 1..20: mol_type = other DNA
atcccagctacttgggaggc

SEQ ID NO: 195383 - DNA, 20 bp, synthetic construct
  source 1..20: mol_type = other DNA
aatcccagctacttgggagg

SEQ ID NO: 195384 - DNA, 20 bp, synthetic construct
  source 1..20: mol_type = other DNA
taatcccagctacttgggag

SEQ ID NO: 195385 - DNA, 20 bp, synthetic construct
  source 1..20: mol_type = other DNA
gtaatcccagctacttggga

SEQ ID NO: 195386 - DNA, 20 bp, synthetic construct
  source 1..20: mol_type = other DNA
tgtaatcccagctacttggg

SEQ ID NO: 195387 - DNA, 20 bp, synthetic construct
  source 1..20: mol_type = other DNA
ttgtaatcccagctacttgg

SEQ ID NO: 195388 - DNA, 20 bp, synthetic construct
  source 1..20: mol_type = other DNA
cttgtaatcccagctacttg

SEQ ID NO: 195389 - DNA, 20 bp, synthetic construct
  source 1..20: mol_type = other DNA
gcttgtaatcccagctactt

SEQ ID NO: 195390 - DNA, 20 bp, synthetic construct
  source 1..20: mol_type = other DNA
tgcttgtaatcccagctact

SEQ ID NO: 195391 - DNA, 20 bp, synthetic construct
  source 1..20: mol_type = other DNA
atgcttgtaatcccagctac

SEQ ID NO: 195392 - DNA, 20 bp, synthetic construct
  source 1..20: mol_type = other DNA
catgcttgtaatcccagcta

SEQ ID NO: 195393 - DNA, 20 bp, synthetic construct
  source 1..20: mol_type = other DNA
gcatgcttgtaatcccagct

SEQ ID NO: 195394 - DNA, 20 bp, synthetic construct
  source 1..20: mol_type = other DNA
tgcatgcttgtaatcccagc

SEQ ID NO: 195395 - DNA, 20 bp, synthetic construct
  source 1..20: mol_type = other DNA
ctgcatgcttgtaatcccag

SEQ ID NO: 195396 - DNA, 20 bp, synthetic construct
  source 1..20: mol_type = other DNA
gctgcatgcttgtaatccca

SEQ ID NO: 195397 - DNA, 20 bp, synthetic construct
  source 1..20: mol_type = other DNA
tgctgcatgcttgtaatccc

SEQ ID NO: 195398 - DNA, 20 bp, synthetic construct
  source 1..20: mol_type = other DNA
gtgctgcatgcttgtaatcc

SEQ ID NO: 195399 - DNA, 20 bp, synthetic construct
  source 1..20: mol_type = other DNA
ggtgctgcatgcttgtaatc

SEQ ID NO: 195400 - DNA, 20 bp, synthetic construct
  source 1..20: mol_type = other DNA
tggtgctgcatgcttgtaat

SEQ ID NO: 195401 - DNA, 20 bp, synthetic construct
  source 1..20: mol_type = other DNA
gtggtgctgcatgcttgtaa

SEQ ID NO: 195402 - DNA, 20 bp, synthetic construct
  source 1..20: mol_type = other DNA
tgtggtgctgcatgcttgta

SEQ ID NO: 195403 - DNA, 20 bp, synthetic construct
  source 1..20: mol_type = other DNA
gtgtggtgctgcatgcttgt

SEQ ID NO: 195404 - DNA, 20 bp, synthetic construct
  source 1..20: mol_type = other DNA
ggtgtggtgctgcatgcttg

SEQ ID NO: 195405 - DNA, 20 bp, synthetic construct
  source 1..20: mol_type = other DNA
aggtgtggtgctgcatgctt

SEQ ID NO: 195406 - DNA, 20 bp, synthetic construct
  source 1..20: mol_type = other DNA
caggtgtggtgctgcatgct

SEQ ID NO: 195407 - DNA, 20 bp, synthetic construct
  source 1..20: mol_type = other DNA
ccaggtgtggtgctgcatgc

SEQ ID NO: 195408 - DNA, 20 bp, synthetic construct
  source 1..20: mol_type = other DNA
gccaggtgtggtgctgcatg

SEQ ID NO: 195409 - DNA, 20 bp, synthetic construct
  source 1..20: mol_type = other DNA
agccaggtgtggtgctgcat

SEQ ID NO: 195410 - DNA, 20 bp, synthetic construct
  source 1..20: mol_type = other DNA
tagccaggtgtggtgctgca

SEQ ID NO: 195411 - DNA, 20 bp, synthetic construct
  source 1..20: mol_type = other DNA
ttagccaggtgtggtgctgc

SEQ ID NO: 195412 - DNA, 20 bp, synthetic construct
  source 1..20: mol_type = other DNA
attagccaggtgtggtgctg

SEQ ID NO: 195413 - DNA, 20 bp, synthetic construct
  source 1..20: mol_type = other DNA
aattagccaggtgtggtgct

SEQ ID NO: 195414 - DNA, 20 bp, synthetic construct
  source 1..20: mol_type = other DNA
aaattagccaggtgtggtgc

SEQ ID NO: 195415 - DNA, 20 bp, synthetic construct
  source 1..20: mol_type = other DNA
aaaattagccaggtgtggtg

SEQ ID NO: 195416 - DNA, 20 bp, synthetic construct
  source 1..20: mol_type = other DNA
aaaaattagccaggtgtggt

SEQ ID NO: 195417 - DNA, 20 bp, synthetic construct
  source 1..20: mol_type = other DNA
caaaaattagccaggtgtgg

SEQ ID NO: 195418 - DNA, 20 bp, synthetic construct
  source 1..20: mol_type = other DNA
acaaaaattagccaggtgtg

SEQ ID NO: 195419 - DNA, 20 bp, synthetic construct
  source 1..20: mol_type = other DNA
cacaaaaattagccaggtgt

SEQ ID NO: 195420 - DNA, 20 bp, synthetic construct
  source 1..20: mol_type = other DNA
acacaaaaattagccaggtg

SEQ ID NO: 195421 - DNA, 20 bp, synthetic construct
  source 1..20: mol_type = other DNA
aacacaaaaattagccaggt

SEQ ID NO: 195422 - DNA, 20 bp, synthetic construct
  source 1..20: mol_type = other DNA
aaacacaaaaattagccagg

SEQ ID NO: 195423 - DNA, 20 bp, synthetic construct
  source 1..20: mol_type = other DNA
aaaacacaaaaattagccag

SEQ ID NO: 195424 - DNA, 20 bp, synthetic construct
  source 1..20: mol_type = other DNA
aaaaacacaaaaattagcca

SEQ ID NO: 195425 - DNA, 20 bp, synthetic construct
  source 1..20: mol_type = other DNA
taaaaacacaaaaattagcc

SEQ ID NO: 195426 - DNA, 20 bp, synthetic construct
  source 1..20: mol_type = other DNA
ttaaaaacacaaaaattagc

SEQ ID NO: 195427 - DNA, 20 bp, synthetic construct
  source 1..20: mol_type = other DNA
attaaaaacacaaaaattag

SEQ ID NO: 195428 - DNA, 20 bp, synthetic construct
  source 1..20: mol_type = other DNA
tattaaaaacacaaaaatta

SEQ ID NO: 195429 - DNA, 20 bp, synthetic construct
  source 1..20: mol_type = other DNA
ctattaaaaacacaaaaatt

SEQ ID NO: 195430 - DNA, 20 bp, synthetic construct
  source 1..20: mol_type = other DNA
tctattaaaaacacaaaaat

SEQ ID NO: 195431 - DNA, 20 bp, synthetic construct
  source 1..20: mol_type = other DNA
ctctattaaaaacacaaaaa

SEQ ID NO: 195432 - DNA, 20 bp, synthetic construct
  source 1..20: mol_type = other DNA
tctctattaaaaacacaaaa

SEQ ID NO: 195433 - DNA, 20 bp, synthetic construct
  source 1..20: mol_type = other DNA
gtctctattaaaaacacaaa

SEQ ID NO: 195434 - DNA, 20 bp, synthetic construct
  source 1..20: mol_type = other DNA
cgtctctattaaaaacacaa

SEQ ID NO: 195435 - DNA, 20 bp, synthetic construct
  source 1..20: mol_type = other DNA
ccgtctctattaaaaacaca

SEQ ID NO: 195436 - DNA, 20 bp, synthetic construct
  source 1..20: mol_type = other DNA
gccgtctctattaaaaacac

SEQ ID NO: 195437 - DNA, 20 bp, synthetic construct
  source 1..20: mol_type = other DNA
ggccgtctctattaaaaaca

SEQ ID NO: 195438 - DNA, 20 bp, synthetic construct
  source 1..20: mol_type = other DNA
gggccgtctctattaaaaac

SEQ ID NO: 195439 - DNA, 20 bp, synthetic construct
  source 1..20: mol_type = other DNA
cgggccgtctctattaaaaa

SEQ ID NO: 195440 - DNA, 20 bp, synthetic construct
  source 1..20: mol_type = other DNA
tcgggccgtctctattaaaa

SEQ ID NO: 195441 - DNA, 20 bp, synthetic construct
  source 1..20: mol_type = other DNA
ttcgggccgtctctattaaa

SEQ ID NO: 195442 - DNA, 20 bp, synthetic construct
  source 1..20: mol_type = other DNA
cttcgggccgtctctattaa

SEQ ID NO: 195443 - DNA, 20 bp, synthetic construct
  source 1..20: mol_type = other DNA
acttcgggccgtctctatta

SEQ ID NO: 195444 - DNA, 20 bp, synthetic construct
  source 1..20: mol_type = other DNA
cacttcgggccgtctctatt

SEQ ID NO: 195445 - DNA, 20 bp, synthetic construct
  source 1..20: mol_type = other DNA
gcacttcgggccgtctctat

SEQ ID NO: 195446 - DNA, 20 bp, synthetic construct
  source 1..20: mol_type = other DNA
agcacttcgggccgtctcta

SEQ ID NO: 195447 - DNA, 20 bp, synthetic construct
  source 1..20: mol_type = other DNA
tagcacttcgggccgtctct

SEQ ID NO: 195448 - DNA, 20 bp, synthetic construct
  source 1..20: mol_type = other DNA
ctagcacttcgggccgtctc

SEQ ID NO: 195449 - DNA, 20 bp, synthetic construct
  source 1..20: mol_type = other DNA
cctagcacttcgggccgtct

SEQ ID NO: 195450 - DNA, 20 bp, synthetic construct
  source 1..20: mol_type = other DNA
tcctagcacttcgggccgtc

SEQ ID NO: 195451 - DNA, 20 bp, synthetic construct
  source 1..20: mol_type = other DNA
atcctagcacttcgggccgt

SEQ ID NO: 195452 - DNA, 20 bp, synthetic construct
  source 1..20: mol_type = other DNA
aatcctagcacttcgggccg

SEQ ID NO: 195453 - DNA, 20 bp, synthetic construct
  source 1..20: mol_type = other DNA
taatcctagcacttcgggcc

SEQ ID NO: 195454 - DNA, 20 bp, synthetic construct
  source 1..20: mol_type = other DNA
gtaatcctagcacttcgggc

SEQ ID NO: 195455 - DNA, 20 bp, synthetic construct
  source 1..20: mol_type = other DNA
tgtaatcctagcacttcggg

SEQ ID NO: 195456 - DNA, 20 bp, synthetic construct
  source 1..20: mol_type = other DNA
ctgtaatcctagcacttcgg

SEQ ID NO: 195457 - DNA, 20 bp, synthetic construct
  source 1..20: mol_type = other DNA
cctgtaatcctagcacttcg

SEQ ID NO: 195458 - DNA, 20 bp, synthetic construct
  source 1..20: mol_type = other DNA
gcctgtaatcctagcacttc

SEQ ID NO: 195459 - DNA, 20 bp, synthetic construct
  source 1..20: mol_type = other DNA
tgcctgtaatcctagcactt

SEQ ID NO: 195460 - DNA, 20 bp, synthetic construct
  source 1..20: mol_type = other DNA
atgcctgtaatcctagcact

SEQ ID NO: 195461 - DNA, 20 bp, synthetic construct
  source 1..20: mol_type = other DNA
catgcctgtaatcctagcac

SEQ ID NO: 195462 - DNA, 20 bp, synthetic construct
  source 1..20: mol_type = other DNA
tcatgcctgtaatcctagca

SEQ ID NO: 195463 - DNA, 20 bp, synthetic construct
  source 1..20: mol_type = other DNA
ctcatgcctgtaatcctagc

SEQ ID NO: 195464 - DNA, 20 bp, synthetic construct
  source 1..20: mol_type = other DNA
gctcatgcctgtaatcctag

SEQ ID NO: 195465 - DNA, 20 bp, synthetic construct
  source 1..20: mol_type = other DNA
ggctcatgcctgtaatccta

SEQ ID NO: 195466 - DNA, 20 bp, synthetic construct
  source 1..20: mol_type = other DNA
tggctcatgcctgtaatcct

SEQ ID NO: 195467 - DNA, 20 bp, synthetic construct
  source 1..20: mol_type = other DNA
gtggctcatgcctgtaatcc

SEQ ID NO: 195468 - DNA, 20 bp, synthetic construct
  source 1..20: mol_type = other DNA
ggtggctcatgcctgtaatc

SEQ ID NO: 195469 - DNA, 20 bp, synthetic construct
  source 1..20: mol_type = other DNA
cggtggctcatgcctgtaat

SEQ ID NO: 195470 - DNA, 20 bp, synthetic construct
  source 1..20: mol_type = other DNA
gcggtggctcatgcctgtaa

SEQ ID NO: 195471 - DNA, 20 bp, synthetic construct
  source 1..20: mol_type = other DNA
cgcggtggctcatgcctgta

SEQ ID NO: 195472 - DNA, 20 bp, synthetic construct
  source 1..20: mol_type = other DNA
ccgcggtggctcatgcctgt

SEQ ID NO: 195473 - DNA, 20 bp, synthetic construct
  source 1..20: mol_type = other DNA
gccgcggtggctcatgcctg

SEQ ID NO: 195474 - DNA, 20 bp, synthetic construct
  source 1..20: mol_type = other DNA
ggccgcggtggctcatgcct

SEQ ID NO: 195475 - DNA, 20 bp, synthetic construct
  source 1..20: mol_type = other DNA
tggccgcggtggctcatgcc

SEQ ID NO: 195476 - DNA, 20 bp, synthetic construct
  source 1..20: mol_type = other DNA
ctggccgcggtggctcatgc

SEQ ID NO: 195477 - DNA, 20 bp, synthetic construct
  source 1..20: mol_type = other DNA
gctggccgcggtggctcatg

SEQ ID NO: 195478 - DNA, 20 bp, synthetic construct
  source 1..20: mol_type = other DNA
ggctggccgcggtggctcat

SEQ ID NO: 195479 - DNA, 20 bp, synthetic construct
  source 1..20: mol_type = other DNA
tggctggccgcggtggctca

SEQ ID NO: 195480 - DNA, 20 bp, synthetic construct
  source 1..20: mol_type = other DNA
atggctggccgcggtggctc

SEQ ID NO: 195481 - DNA, 20 bp, synthetic construct
  source 1..20: mol_type = other DNA
tatggctggccgcggtggct

SEQ ID NO: 195482 - DNA, 20 bp, synthetic construct
  source 1..20: mol_type = other DNA
ttatggctggccgcggtggc

SEQ ID NO: 195483 - DNA, 20 bp, synthetic construct
  source 1..20: mol_type = other DNA
gttatggctggccgcggtgg

SEQ ID NO: 195484 - DNA, 20 bp, synthetic construct
  source 1..20: mol_type = other DNA
agttatggctggccgcggtg

SEQ ID NO: 195485 - DNA, 20 bp, synthetic construct
  source 1..20: mol_type = other DNA
gagttatggctggccgcggt

SEQ ID NO: 195486 - DNA, 20 bp, synthetic construct
  source 1..20: mol_type = other DNA
agagttatggctggccgcgg

SEQ ID NO: 195487 - DNA, 20 bp, synthetic construct
  source 1..20: mol_type = other DNA
cagagttatggctggccgcg

SEQ ID NO: 195488 - DNA, 20 bp, synthetic construct
  source 1..20: mol_type = other DNA
acagagttatggctggccgc

SEQ ID NO: 195489 - DNA, 20 bp, synthetic construct
  source 1..20: mol_type = other DNA
cacagagttatggctggccg

SEQ ID NO: 195490 - DNA, 20 bp, synthetic construct
  source 1..20: mol_type = other DNA
tcacagagttatggctggcc

SEQ ID NO: 195491 - DNA, 20 bp, synthetic construct
  source 1..20: mol_type = other DNA
gtcacagagttatggctggc

SEQ ID NO: 195492 - DNA, 20 bp, synthetic construct
  source 1..20: mol_type = other DNA
agtcacagagttatggctgg

SEQ ID NO: 195493 - DNA, 20 bp, synthetic construct
  source 1..20: mol_type = other DNA
gagtcacagagttatggctg

SEQ ID NO: 195494 - DNA, 20 bp, synthetic construct
  source 1..20: mol_type = other DNA
agagtcacagagttatggct

SEQ ID NO: 195495 - DNA, 20 bp, synthetic construct
  source 1..20: mol_type = other DNA
aagagtcacagagttatggc

SEQ ID NO: 195496 - DNA, 20 bp, synthetic construct
  source 1..20: mol_type = other DNA
caagagtcacagagttatgg

SEQ ID NO: 195497 - DNA, 20 bp, synthetic construct
  source 1..20: mol_type = other DNA
acaagagtcacagagttatg

SEQ ID NO: 195498 - DNA, 20 bp, synthetic construct
  source 1..20: mol_type = other DNA
aacaagagtcacagagttat

SEQ ID NO: 195499 - DNA, 20 bp, synthetic construct
  source 1..20: mol_type = other DNA
taacaagagtcacagagtta

SEQ ID NO: 195500 - DNA, 20 bp, synthetic construct
  source 1..20: mol_type = other DNA
gtaacaagagtcacagagtt

SEQ ID NO: 195501 - DNA, 20 bp, synthetic construct
  source 1..20: mol_type = other DNA
tgtaacaagagtcacagagt

SEQ ID NO: 195502 - DNA, 20 bp, synthetic construct
  source 1..20: mol_type = other DNA
ttgtaacaagagtcacagag

SEQ ID NO: 195503 - DNA, 20 bp, synthetic construct
  source 1..20: mol_type = other DNA
tttgtaacaagagtcacaga

SEQ ID NO: 195504 - DNA, 20 bp, synthetic construct
  source 1..20: mol_type = other DNA
ctttgtaacaagagtcacag

SEQ ID NO: 195505 - DNA, 20 bp, synthetic construct
  source 1..20: mol_type = other DNA
cctttgtaacaagagtcaca

SEQ ID NO: 195506 - DNA, 20 bp, synthetic construct
  source 1..20: mol_type = other DNA
gcctttgtaacaagagtcac

SEQ ID NO: 195507 - DNA, 20 bp, synthetic construct
  source 1..20: mol_type = other DNA
ggcctttgtaacaagagtca

SEQ ID NO: 195508 - DNA, 20 bp, synthetic construct
  source 1..20: mol_type = other DNA
aggcctttgtaacaagagtc

SEQ ID NO: 195509 - DNA, 20 bp, synthetic construct
  source 1..20: mol_type = other DNA
aaggcctttgtaacaagagt

SEQ ID NO: 195510 - DNA, 20 bp, synthetic construct
  source 1..20: mol_type = other DNA
taaggcctttgtaacaagag

SEQ ID NO: 195511 - DNA, 20 bp, synthetic construct
  source 1..20: mol_type = other DNA
ataaggcctttgtaacaaga

SEQ ID NO: 195512 - DNA, 20 bp, synthetic construct
  source 1..20: mol_type = other DNA
tataaggcctttgtaacaag

SEQ ID NO: 195513 - DNA, 20 bp, synthetic construct
  source 1..20: mol_type = other DNA
atataaggcctttgtaacaa

SEQ ID NO: 195514 - DNA, 20 bp, synthetic construct
  source 1..20: mol_type = other DNA
aatataaggcctttgtaaca

SEQ ID NO: 195515 - DNA, 20 bp, synthetic construct
  source 1..20: mol_type = other DNA
aaatataaggcctttgtaac

SEQ ID NO: 195516 - DNA, 20 bp, synthetic construct
  source 1..20: mol_type = other DNA
aaaatataaggcctttgtaa

SEQ ID NO: 195517 - DNA, 20 bp, synthetic construct
  source 1..20: mol_type = other DNA
caaaatataaggcctttgta

SEQ ID NO: 195518 - DNA, 20 bp, synthetic construct
  source 1..20: mol_type = other DNA
gcaaaatataaggcctttgt

SEQ ID NO: 195519 - DNA, 20 bp, synthetic construct
  source 1..20: mol_type = other DNA
agcaaaatataaggcctttg

SEQ ID NO: 195520 - DNA, 20 bp, synthetic construct
  source 1..20: mol_type = other DNA
gagcaaaatataaggccttt

SEQ ID NO: 195521 - DNA, 20 bp, synthetic construct
  source 1..20: mol_type = other DNA
agagcaaaatataaggcctt

SEQ ID NO: 195522 - DNA, 20 bp, synthetic construct
  source 1..20: mol_type = other DNA
aagagcaaaatataaggcct

SEQ ID NO: 195523 - DNA, 20 bp, synthetic construct
  source 1..20: mol_type = other DNA
aaagagcaaaatataaggcc

SEQ ID NO: 195524 - DNA, 20 bp, synthetic construct
  source 1..20: mol_type = other DNA
caaagagcaaaatataaggc

SEQ ID NO: 195525 - DNA, 20 bp, synthetic construct
  source 1..20: mol_type = other DNA
tcaaagagcaaaatataagg

SEQ ID NO: 195526 - DNA, 20 bp, synthetic construct
  source 1..20: mol_type = other DNA
ctcaaagagcaaaatataag

SEQ ID NO: 195527 - DNA, 20 bp, synthetic construct
  source 1..20: mol_type = other DNA
cctcaaagagcaaaatataa

SEQ ID NO: 195528 - DNA, 20 bp, synthetic construct
  source 1..20: mol_type = other DNA
ccctcaaagagcaaaatata

SEQ ID NO: 195529 - DNA, 20 bp, synthetic construct
  source 1..20: mol_type = other DNA
accctcaaagagcaaaatat

SEQ ID NO: 195530 - DNA, 20 bp, synthetic construct
  source 1..20: mol_type = other DNA
caccctcaaagagcaaaata

SEQ ID NO: 195531 - DNA, 20 bp, synthetic construct
  source 1..20: mol_type = other DNA
ccaccctcaaagagcaaaat

SEQ ID NO: 195532 - DNA, 20 bp, synthetic construct
  source 1..20: mol_type = other DNA
accaccctcaaagagcaaaa

SEQ ID NO: 195533 - DNA, 20 bp, synthetic construct
  source 1..20: mol_type = other DNA
aaccaccctcaaagagcaaa

SEQ ID NO: 195534 - DNA, 20 bp, synthetic construct
  source 1..20: mol_type = other DNA
aaaccaccctcaaagagcaa

SEQ ID NO: 195535 - DNA, 20 bp, synthetic construct
  source 1..20: mol_type = other DNA
aaaaccaccctcaaagagca

SEQ ID NO: 195536 - DNA, 20 bp, synthetic construct
  source 1..20: mol_type = other DNA
caaaaccaccctcaaagagc

SEQ ID NO: 195537 - DNA, 20 bp, synthetic construct
  source 1..20: mol_type = other DNA
ccaaaaccaccctcaaagag

SEQ ID NO: 195538 - DNA, 20 bp, synthetic construct
  source 1..20: mol_type = other DNA
accaaaaccaccctcaaaga

SEQ ID NO: 195539 - DNA, 20 bp, synthetic construct
  source 1..20: mol_type = other DNA
aaccaaaaccaccctcaaag

SEQ ID NO: 195540 - DNA, 20 bp, synthetic construct
  source 1..20: mol_type = other DNA
aaaccaaaaccaccctcaaa

SEQ ID NO: 195541 - DNA, 20 bp, synthetic construct
  source 1..20: mol_type = other DNA
caaaccaaaaccaccctcaa

SEQ ID NO: 195542 - DNA, 20 bp, synthetic construct
  source 1..20: mol_type = other DNA
tcaaaccaaaaccaccctca

SEQ ID NO: 195543 - DNA, 20 bp, synthetic construct
  source 1..20: mol_type = other DNA
atcaaaccaaaaccaccctc

SEQ ID NO: 195544 - DNA, 20 bp, synthetic construct
  source 1..20: mol_type = other DNA
catcaaaccaaaaccaccct

SEQ ID NO: 195545 - DNA, 20 bp, synthetic construct
  source 1..20: mol_type = other DNA
gcatcaaaccaaaaccaccc

SEQ ID NO: 195546 - DNA, 20 bp, synthetic construct
  source 1..20: mol_type = other DNA
ggcatcaaaccaaaaccacc

SEQ ID NO: 195547 - DNA, 20 bp, synthetic construct
  source 1..20: mol_type = other DNA
aggcatcaaaccaaaaccac

SEQ ID NO: 195548 - DNA, 20 bp, synthetic construct
  source 1..20: mol_type = other DNA
caggcatcaaaccaaaacca

SEQ ID NO: 195549 - DNA, 20 bp, synthetic construct
  source 1..20: mol_type = other DNA
acaggcatcaaaccaaaacc

SEQ ID NO: 195550 - DNA, 20 bp, synthetic construct
  source 1..20: mol_type = other DNA
aacaggcatcaaaccaaaac

SEQ ID NO: 195551 - DNA, 20 bp, synthetic construct
  source 1..20: mol_type = other DNA
caacaggcatcaaaccaaaa

SEQ ID NO: 195552 - DNA, 20 bp, synthetic construct
  source 1..20: mol_type = other DNA
ccaacaggcatcaaaccaaa

SEQ ID NO: 195553 - DNA, 20 bp, synthetic construct
  source 1..20: mol_type = other DNA
accaacaggcatcaaaccaa

SEQ ID NO: 195554 - DNA, 20 bp, synthetic construct
  source 1..20: mol_type = other DNA
aaccaacaggcatcaaacca

SEQ ID NO: 195555 - DNA, 20 bp, synthetic construct
  source 1..20: mol_type = other DNA
caaccaacaggcatcaaacc

SEQ ID NO: 195556 - DNA, 20 bp, synthetic construct
  source 1..20: mol_type = other DNA
gcaaccaacaggcatcaaac

SEQ ID NO: 195557 - DNA, 20 bp, synthetic construct
  source 1..20: mol_type = other DNA
ggcaaccaacaggcatcaaa

SEQ ID NO: 195558 - DNA, 20 bp, synthetic construct
  source 1..20: mol_type = other DNA
tggcaaccaacaggcatcaa

SEQ ID NO: 195559 - DNA, 20 bp, synthetic construct
  source 1..20: mol_type = other DNA
atggcaaccaacaggcatca

SEQ ID NO: 195560 - DNA, 20 bp, synthetic construct
  source 1..20: mol_type = other DNA
gatggcaaccaacaggcatc

SEQ ID NO: 195561 - DNA, 20 bp, synthetic construct
  source 1..20: mol_type = other DNA
agatggcaaccaacaggcat

SEQ ID NO: 195562 - DNA, 20 bp, synthetic construct
  source 1..20: mol_type = other DNA
aagatggcaaccaacaggca

SEQ ID NO: 195563 - DNA, 20 bp, synthetic construct
  source 1..20: mol_type = other DNA
aaagatggcaaccaacaggc

SEQ ID NO: 195564 - DNA, 20 bp, synthetic construct
  source 1..20: mol_type = other DNA
aaaagatggcaaccaacagg

SEQ ID NO: 195565 - DNA, 20 bp, synthetic construct
  source 1..20: mol_type = other DNA
taaaagatggcaaccaacag

SEQ ID NO: 195566 - DNA, 20 bp, synthetic construct
  source 1..20: mol_type = other DNA
ttaaaagatggcaaccaaca

SEQ ID NO: 195567 - DNA, 20 bp, synthetic construct
  source 1..20: mol_type = other DNA
gttaaaagatggcaaccaac

SEQ ID NO: 195568 - DNA, 20 bp, synthetic construct
  source 1..20: mol_type = other DNA
agttaaaagatggcaaccaa

SEQ ID NO: 195569 - DNA, 20 bp, synthetic construct
  source 1..20: mol_type = other DNA
tagttaaaagatggcaacca

SEQ ID NO: 195570 - DNA, 20 bp, synthetic construct
  source 1..20: mol_type = other DNA
ctagttaaaagatggcaacc

SEQ ID NO: 195571 - DNA, 20 bp, synthetic construct
  source 1..20: mol_type = other DNA
cctagttaaaagatggcaac

SEQ ID NO: 195572 - DNA, 20 bp, synthetic construct
  source 1..20: mol_type = other DNA
ccctagttaaaagatggcaa

SEQ ID NO: 195573 - DNA, 20 bp, synthetic construct
  source 1..20: mol_type = other DNA
tccctagttaaaagatggca

SEQ ID NO: 195574 - DNA, 20 bp, synthetic construct
  source 1..20: mol_type = other DNA
atccctagttaaaagatggc

SEQ ID NO: 195575 - DNA, 20 bp, synthetic construct
  source 1..20: mol_type = other DNA
catccctagttaaaagatgg

SEQ ID NO: 195576 - DNA, 20 bp, synthetic construct
  source 1..20: mol_type = other DNA
acatccctagttaaaagatg

SEQ ID NO: 195577 - DNA, 20 bp, synthetic construct
  source 1..20: mol_type = other DNA
aacatccctagttaaaagat

SEQ ID NO: 195578 - DNA, 20 bp, synthetic construct
  source 1..20: mol_type = other DNA
aaacatccctagttaaaaga

SEQ ID NO: 195579 - DNA, 20 bp, synthetic construct
  source 1..20: mol_type = other DNA
aaaacatccctagttaaaag

SEQ ID NO: 195580 - DNA, 20 bp, synthetic construct
  source 1..20: mol_type = other DNA
taaaacatccctagttaaaa

SEQ ID NO: 195581 - DNA, 20 bp, synthetic construct
  source 1..20: mol_type = other DNA
ataaaacatccctagttaaa

SEQ ID NO: 195582 - DNA, 20 bp, synthetic construct
  source 1..20: mol_type = other DNA
gataaaacatccctagttaa

SEQ ID NO: 195583 - DNA, 20 bp, synthetic construct
  source 1..20: mol_type = other DNA
tgataaaacatccctagtta

SEQ ID NO: 195584 - DNA, 20 bp, synthetic construct
  source 1..20: mol_type = other DNA
ttgataaaacatccctagtt

SEQ ID NO: 195585 - DNA, 20 bp, synthetic construct
  source 1..20: mol_type = other DNA
tttgataaaacatccctagt

SEQ ID NO: 195586 - DNA, 20 bp, synthetic construct
  source 1..20: mol_type = other DNA
ttttgataaaacatccctag

SEQ ID NO: 195587 - DNA, 20 bp, synthetic construct
  source 1..20: mol_type = other DNA
attttgataaaacatcccta

SEQ ID NO: 195588 - DNA, 20 bp, synthetic construct
  source 1..20: mol_type = other DNA
cattttgataaaacatccct

SEQ ID NO: 195589 - DNA, 20 bp, synthetic construct
  source 1..20: mol_type = other DNA
gcattttgataaaacatccc

SEQ ID NO: 195590 - DNA, 20 bp, synthetic construct
  source 1..20: mol_type = other DNA
ggcattttgataaaacatcc

SEQ ID NO: 195591 - DNA, 20 bp, synthetic construct
  source 1..20: mol_type = other DNA
gggcattttgataaaacatc

SEQ ID NO: 195592 - DNA, 20 bp, synthetic construct
  source 1..20: mol_type = other DNA
tgggcattttgataaaacat

SEQ ID NO: 195593 - DNA, 20 bp, synthetic construct
  source 1..20: mol_type = other DNA
ctgggcattttgataaaaca

SEQ ID NO: 195594 - DNA, 20 bp, synthetic construct
  source 1..20: mol_type = other DNA
gctgggcattttgataaaac

SEQ ID NO: 195595 - DNA, 20 bp, synthetic construct
  source 1..20: mol_type = other DNA
ggctgggcattttgataaaa

SEQ ID NO: 195596 - DNA, 20 bp, synthetic construct
  source 1..20: mol_type = other DNA
tggctgggcattttgataaa

SEQ ID NO: 195597 - DNA, 20 bp, synthetic construct
  source 1..20: mol_type = other DNA
ttggctgggcattttgataa

SEQ ID NO: 195598 - DNA, 20 bp, synthetic construct
  source 1..20: mol_type = other DNA
tttggctgggcattttgata

SEQ ID NO: 195599 - DNA, 20 bp, synthetic construct
  source 1..20: mol_type = other DNA
ctttggctgggcattttgat

SEQ ID NO: 195600 - DNA, 20 bp, synthetic construct
  source 1..20: mol_type = other DNA
actttggctgggcattttga

SEQ ID NO: 195601 - DNA, 20 bp, synthetic construct
  source 1..20: mol_type = other DNA
cactttggctgggcattttg

SEQ ID NO: 195602 - DNA, 20 bp, synthetic construct
  source 1..20: mol_type = other DNA
acactttggctgggcatttt

SEQ ID NO: 195603 - DNA, 20 bp, synthetic construct
  source 1..20: mol_type = other DNA
gacactttggctgggcattt

SEQ ID NO: 195604 - DNA, 20 bp, synthetic construct
  source 1..20: mol_type = other DNA
ggacactttggctgggcatt

SEQ ID NO: 195605 - DNA, 20 bp, synthetic construct
  source 1..20: mol_type = other DNA
tggacactttggctgggcat

SEQ ID NO: 195606 - DNA, 20 bp, synthetic construct
  source 1..20: mol_type = other DNA
ttggacactttggctgggca

SEQ ID NO: 195607 - DNA, 20 bp, synthetic construct
  source 1..20: mol_type = other DNA
tttggacactttggctgggc

SEQ ID NO: 195608 - DNA, 20 bp, synthetic construct
  source 1..20: mol_type = other DNA
gtttggacactttggctggg

SEQ ID NO: 195609 - DNA, 20 bp, synthetic construct
  source 1..20: mol_type = other DNA
tgtttggacactttggctgg

SEQ ID NO: 195610 - DNA, 20 bp, synthetic construct
  source 1..20: mol_type = other DNA
ttgtttggacactttggctg

SEQ ID NO: 195611 - DNA, 20 bp, synthetic construct
  source 1..20: mol_type = other DNA
tttgtttggacactttggct

SEQ ID NO: 195612 - DNA, 20 bp, synthetic construct
  source 1..20: mol_type = other DNA
atttgtttggacactttggc

SEQ ID NO: 195613 - DNA, 20 bp, synthetic construct
  source 1..20: mol_type = other DNA
aatttgtttggacactttgg

SEQ ID NO: 195614 - DNA, 20 bp, synthetic construct
  source 1..20: mol_type = other DNA
taatttgtttggacactttg

SEQ ID NO: 195615 - DNA, 20 bp, synthetic construct
  source 1..20: mol_type = other DNA
ataatttgtttggacacttt

SEQ ID NO: 195616 - DNA, 20 bp, synthetic construct
  source 1..20: mol_type = other DNA
tataatttgtttggacactt

SEQ ID NO: 195617 - DNA, 20 bp, synthetic construct
  source 1..20: mol_type = other DNA
gtataatttgtttggacact

SEQ ID NO: 195618 - DNA, 20 bp, synthetic construct
  source 1..20: mol_type = other DNA
ggtataatttgtttggacac

SEQ ID NO: 195619 - DNA, 20 bp, synthetic construct
  source 1..20: mol_type = other DNA
aggtataatttgtttggaca

SEQ ID NO: 195620 - DNA, 20 bp, synthetic construct
  source 1..20: mol_type = other DNA
aaggtataatttgtttggac

SEQ ID NO: 195621 - DNA, 20 bp, synthetic construct
  source 1..20: mol_type = other DNA
taaggtataatttgtttgga

SEQ ID NO: 195622 - DNA, 20 bp, synthetic construct
  source 1..20: mol_type = other DNA
ttaaggtataatttgtttgg

SEQ ID NO: 195623 - DNA, 20 bp, synthetic construct
  source 1..20: mol_type = other DNA
tttaaggtataatttgtttg

SEQ ID NO: 195624 - DNA, 20 bp, synthetic construct
  source 1..20: mol_type = other DNA
ctttaaggtataatttgttt

SEQ ID NO: 195625 - DNA, 20 bp, synthetic construct
  source 1..20: mol_type = other DNA
actttaaggtataatttgtt

SEQ ID NO: 195626 - DNA, 20 bp, synthetic construct
  source 1..20: mol_type = other DNA
aactttaaggtataatttgt

SEQ ID NO: 195627 - DNA, 20 bp, synthetic construct
  source 1..20: mol_type = other DNA
aaactttaaggtataatttg

SEQ ID NO: 195628 - DNA, 20 bp, synthetic construct
  source 1..20: mol_type = other DNA
caaactttaaggtataattt

SEQ ID NO: 195629 - DNA, 20 bp, synthetic construct
  source 1..20: mol_type = other DNA
tcaaactttaaggtataatt

SEQ ID NO: 195630 - DNA, 20 bp, synthetic construct
  source 1..20: mol_type = other DNA
ttcaaactttaaggtataat

SEQ ID NO: 195631 - DNA, 20 bp, synthetic construct
  source 1..20: mol_type = other DNA
tttcaaactttaaggtataa

SEQ ID NO: 195632 - DNA, 20 bp, synthetic construct
  source 1..20: mol_type = other DNA
ttttcaaactttaaggtata

SEQ ID NO: 195633 - DNA, 20 bp, synthetic construct
  source 1..20: mol_type = other DNA
attttcaaactttaaggtat

SEQ ID NO: 195634 - DNA, 20 bp, synthetic construct
  source 1..20: mol_type = other DNA
cattttcaaactttaaggta

SEQ ID NO: 195635 - DNA, 20 bp, synthetic construct
  source 1..20: mol_type = other DNA
acattttcaaactttaaggt

SEQ ID NO: 195636 - DNA, 20 bp, synthetic construct
  source 1..20: mol_type = other DNA
gacattttcaaactttaagg

SEQ ID NO: 195637 - DNA, 20 bp, synthetic construct
  source 1..20: mol_type = other DNA
agacattttcaaactttaag

SEQ ID NO: 195638 - DNA, 20 bp, synthetic construct
  source 1..20: mol_type = other DNA
cagacattttcaaactttaa

SEQ ID NO: 195639 - DNA, 20 bp, synthetic construct
  source 1..20: mol_type = other DNA
ccagacattttcaaacttta

SEQ ID NO: 195640 - DNA, 20 bp, synthetic construct
  source 1..20: mol_type = other DNA
gccagacattttcaaacttt

SEQ ID NO: 195641 - DNA, 20 bp, synthetic construct
  source 1..20: mol_type = other DNA
tgccagacattttcaaactt

SEQ ID NO: 195642 - DNA, 20 bp, synthetic construct
  source 1..20: mol_type = other DNA
gtgccagacattttcaaact

SEQ ID NO: 195643 - DNA, 20 bp, synthetic construct
  source 1..20: mol_type = other DNA
agtgccagacattttcaaac

SEQ ID NO: 195644 - DNA, 20 bp, synthetic construct
  source 1..20: mol_type = other DNA
aagtgccagacattttcaaa

SEQ ID NO: 195645 - DNA, 20 bp, synthetic construct
  source 1..20: mol_type = other DNA
gaagtgccagacattttcaa

SEQ ID NO: 195646 - DNA, 20 bp, synthetic construct
  source 1..20: mol_type = other DNA
agaagtgccagacattttca

SEQ ID NO: 195647 - DNA, 20 bp, synthetic construct
  source 1..20: mol_type = other DNA
tagaagtgccagacattttc

SEQ ID NO: 195648 - DNA, 20 bp, synthetic construct
  source 1..20: mol_type = other DNA
ttagaagtgccagacatttt

SEQ ID NO: 195649 - DNA, 20 bp, synthetic construct
  source 1..20: mol_type = other DNA
attagaagtgccagacattt

SEQ ID NO: 195650 - DNA, 20 bp, synthetic construct
  source 1..20: mol_type = other DNA
aattagaagtgccagacatt

SEQ ID NO: 195651 - DNA, 20 bp, synthetic construct
  source 1..20: mol_type = other DNA
gaattagaagtgccagacat

SEQ ID NO: 195652 - DNA, 20 bp, synthetic construct
  source 1..20: mol_type = other DNA
tgaattagaagtgccagaca

SEQ ID NO: 195653 - DNA, 20 bp, synthetic construct
  source 1..20: mol_type = other DNA
ttgaattagaagtgccagac

SEQ ID NO: 195654 - DNA, 20 bp, synthetic construct
  source 1..20: mol_type = other DNA
attgaattagaagtgccaga

SEQ ID NO: 195655 - DNA, 20 bp, synthetic construct
  source 1..20: mol_type = other DNA
cattgaattagaagtgccag

SEQ ID NO: 195656 - DNA, 20 bp, synthetic construct
  source 1..20: mol_type = other DNA
gcattgaattagaagtgcca

SEQ ID NO: 195657 - DNA, 20 bp, synthetic construct
  source 1..20: mol_type = other DNA
ggcattgaattagaagtgcc

SEQ ID NO: 195658 - DNA, 20 bp, synthetic construct
  source 1..20: mol_type = other DNA
aggcattgaattagaagtgc

SEQ ID NO: 195659 - DNA, 20 bp, synthetic construct
  source 1..20: mol_type = other DNA
caggcattgaattagaagtg

SEQ ID NO: 195660 - DNA, 20 bp, synthetic construct
  source 1..20: mol_type = other DNA
acaggcattgaattagaagt

SEQ ID NO: 195661 - DNA, 20 bp, synthetic construct
  source 1..20: mol_type = other DNA
aacaggcattgaattagaag

SEQ ID NO: 195662 - DNA, 20 bp, synthetic construct
  source 1..20: mol_type = other DNA
caacaggcattgaattagaa

SEQ ID NO: 195663 - DNA, 20 bp, synthetic construct
  source 1..20: mol_type = other DNA
acaacaggcattgaattaga

SEQ ID NO: 195664 - DNA, 20 bp, synthetic construct
  source 1..20: mol_type = other DNA
cacaacaggcattgaattag

SEQ ID NO: 195665 - DNA, 20 bp, synthetic construct
  source 1..20: mol_type = other DNA
gcacaacaggcattgaatta

SEQ ID NO: 195666 - DNA, 20 bp, synthetic construct
  source 1..20: mol_type = other DNA
ggcacaacaggcattgaatt

SEQ ID NO: 195667 - DNA, 20 bp, synthetic construct
  source 1..20: mol_type = other DNA
tggcacaacaggcattgaat

SEQ ID NO: 195668 - DNA, 20 bp, synthetic construct
  source 1..20: mol_type = other DNA
ctggcacaacaggcattgaa

SEQ ID NO: 195669 - DNA, 20 bp, synthetic construct
  source 1..20: mol_type = other DNA
cctggcacaacaggcattga

SEQ ID NO: 195670 - DNA, 20 bp, synthetic construct
  source 1..20: mol_type = other DNA
gcctggcacaacaggcattg

SEQ ID NO: 195671 - DNA, 20 bp, synthetic construct
  source 1..20: mol_type = other DNA
tgcctggcacaacaggcatt

SEQ ID NO: 195672 - DNA, 20 bp, synthetic construct
  source 1..20: mol_type = other DNA
gtgcctggcacaacaggcat

SEQ ID NO: 195673 - DNA, 20 bp, synthetic construct
  source 1..20: mol_type = other DNA
agtgcctggcacaacaggca

SEQ ID NO: 195674 - DNA, 20 bp, synthetic construct
  source 1..20: mol_type = other DNA
cagtgcctggcacaacaggc

SEQ ID NO: 195675 - DNA, 20 bp, synthetic construct
  source 1..20: mol_type = other DNA
ccagtgcctggcacaacagg

SEQ ID NO: 195676 - DNA, 20 bp, synthetic construct
  source 1..20: mol_type = other DNA
cccagtgcctggcacaacag

SEQ ID NO: 195677 - DNA, 20 bp, synthetic construct
  source 1..20: mol_type = other DNA
gcccagtgcctggcacaaca

SEQ ID NO: 195678 - DNA, 20 bp, synthetic construct
  source 1..20: mol_type = other DNA
agcccagtgcctggcacaac

SEQ ID NO: 195679 - DNA, 20 bp, synthetic construct
  source 1..20: mol_type = other DNA
cagcccagtgcctggcacaa

SEQ ID NO: 195680 - DNA, 20 bp, synthetic construct
  source 1..20: mol_type = other DNA
gcagcccagtgcctggcaca

SEQ ID NO: 195681 - DNA, 20 bp, synthetic construct
  source 1..20: mol_type = other DNA
agcagcccagtgcctggcac

SEQ ID NO: 195682 - DNA, 20 bp, synthetic construct
  source 1..20: mol_type = other DNA
cagcagcccagtgcctggca

SEQ ID NO: 195683 - DNA, 20 bp, synthetic construct
  source 1..20: mol_type = other DNA
tcagcagcccagtgcctggc

SEQ ID NO: 195684 - DNA, 20 bp, synthetic construct
  source 1..20: mol_type = other DNA
ctcagcagcccagtgcctgg

SEQ ID NO: 195685 - DNA, 20 bp, synthetic construct
  source 1..20: mol_type = other DNA
cctcagcagcccagtgcctg

SEQ ID NO: 195686 - DNA, 20 bp, synthetic construct
  source 1..20: mol_type = other DNA
tcctcagcagcccagtgcct

SEQ ID NO: 195687 - DNA, 20 bp, synthetic construct
  source 1..20: mol_type = other DNA
ttcctcagcagcccagtgcc

SEQ ID NO: 195688 - DNA, 20 bp, synthetic construct
  source 1..20: mol_type = other DNA
gttcctcagcagcccagtgc

SEQ ID NO: 195689 - DNA, 20 bp, synthetic construct
  source 1..20: mol_type = other DNA
agttcctcagcagcccagtg

SEQ ID NO: 195690 - DNA, 20 bp, synthetic construct
  source 1..20: mol_type = other DNA
cagttcctcagcagcccagt

SEQ ID NO: 195691 - DNA, 20 bp, synthetic construct
  source 1..20: mol_type = other DNA
tcagttcctcagcagcccag

SEQ ID NO: 195692 - DNA, 20 bp, synthetic construct
  source 1..20: mol_type = other DNA
ctcagttcctcagcagccca

SEQ ID NO: 195693 - DNA, 20 bp, synthetic construct
  source 1..20: mol_type = other DNA
actcagttcctcagcagccc

SEQ ID NO: 195694 - DNA, 20 bp, synthetic construct
  source 1..20: mol_type = other DNA
gactcagttcctcagcagcc

SEQ ID NO: 195695 - DNA, 20 bp, synthetic construct
  source 1..20: mol_type = other DNA
ggactcagttcctcagcagc

SEQ ID NO: 195696 - DNA, 20 bp, synthetic construct
  source 1..20: mol_type = other DNA
gggactcagttcctcagcag

SEQ ID NO: 195697 - DNA, 20 bp, synthetic construct
  source 1..20: mol_type = other DNA
cgggactcagttcctcagca

SEQ ID NO: 195698 - DNA, 20 bp, synthetic construct
  source 1..20: mol_type = other DNA
acgggactcagttcctcagc

SEQ ID NO: 195699 - DNA, 20 bp, synthetic construct
  source 1..20: mol_type = other DNA
gacgggactcagttcctcag

SEQ ID NO: 195700 - DNA, 20 bp, synthetic construct
  source 1..20: mol_type = other DNA
ggacgggactcagttcctca

SEQ ID NO: 195701 - DNA, 20 bp, synthetic construct
  source 1..20: mol_type = other DNA
gggacgggactcagttcctc

SEQ ID NO: 195702 - DNA, 20 bp, synthetic construct
  source 1..20: mol_type = other DNA
agggacgggactcagttcct

SEQ ID NO: 195703 - DNA, 20 bp, synthetic construct
  source 1..20: mol_type = other DNA
cagggacgggactcagttcc

SEQ ID NO: 195704 - DNA, 20 bp, synthetic construct
  source 1..20: mol_type = other DNA
gcagggacgggactcagttc

SEQ ID NO: 195705 - DNA, 20 bp, synthetic construct
  source 1..20: mol_type = other DNA
tgcagggacgggactcagtt

SEQ ID NO: 195706 - DNA, 20 bp, synthetic construct
  source 1..20: mol_type = other DNA
ctgcagggacgggactcagt

SEQ ID NO: 195707 - DNA, 20 bp, synthetic construct
  source 1..20: mol_type = other DNA
cctgcagggacgggactcag

SEQ ID NO: 195708 - DNA, 20 bp, synthetic construct
  source 1..20: mol_type = other DNA
gcctgcagggacgggactca

SEQ ID NO: 195709 - DNA, 20 bp, synthetic construct
  source 1..20: mol_type = other DNA
agcctgcagggacgggactc

SEQ ID NO: 195710 - DNA, 20 bp, synthetic construct
  source 1..20: mol_type = other DNA
tagcctgcagggacgggact

SEQ ID NO: 195711 - DNA, 20 bp, synthetic construct
  source 1..20: mol_type = other DNA
ctagcctgcagggacgggac

SEQ ID NO: 195712 - DNA, 20 bp, synthetic construct
  source 1..20: mol_type = other DNA
gctagcctgcagggacggga

SEQ ID NO: 195713 - DNA, 20 bp, synthetic construct
  source 1..20: mol_type = other DNA
agctagcctgcagggacggg

SEQ ID NO: 195714 - DNA, 20 bp, synthetic construct
  source 1..20: mol_type = other DNA
tagctagcctgcagggacgg

SEQ ID NO: 195715 - DNA, 20 bp, synthetic construct
  source 1..20: mol_type = other DNA
ctagctagcctgcagggacg

SEQ ID NO: 195716 - DNA, 20 bp, synthetic construct
  source 1..20: mol_type = other DNA
tctagctagcctgcagggac

SEQ ID NO: 195717 - DNA, 20 bp, synthetic construct
  source 1..20: mol_type = other DNA
ctctagctagcctgcaggga

SEQ ID NO: 195718 - DNA, 20 bp, synthetic construct
  source 1..20: mol_type = other DNA
tctctagctagcctgcaggg

SEQ ID NO: 195719 - DNA, 20 bp, synthetic construct
  source 1..20: mol_type = other DNA
ttctctagctagcctgcagg

SEQ ID NO: 195720 - DNA, 20 bp, synthetic construct
  source 1..20: mol_type = other DNA
gttctctagctagcctgcag

SEQ ID NO: 195721 - DNA, 20 bp, synthetic construct
  source 1..20: mol_type = other DNA
tgttctctagctagcctgca

SEQ ID NO: 195722 - DNA, 20 bp, synthetic construct
  source 1..20: mol_type = other DNA
gtgttctctagctagcctgc

SEQ ID NO: 195723 - DNA, 20 bp, synthetic construct
  source 1..20: mol_type = other DNA
tgtgttctctagctagcctg

SEQ ID NO: 195724 - DNA, 20 bp, synthetic construct
  source 1..20: mol_type = other DNA
gtgtgttctctagctagcct

SEQ ID NO: 195725 - DNA, 20 bp, synthetic construct
  source 1..20: mol_type = other DNA
tgtgtgttctctagctagcc

SEQ ID NO: 195726 - DNA, 20 bp, synthetic construct
  source 1..20: mol_type = other DNA
gtgtgtgttctctagctagc

SEQ ID NO: 195727 - DNA, 20 bp, synthetic construct
  source 1..20: mol_type = other DNA
tgtgtgtgttctctagctag

SEQ ID NO: 195728 - DNA, 20 bp, synthetic construct
  source 1..20: mol_type = other DNA
gtgtgtgtgttctctagcta

SEQ ID NO: 195729 - DNA, 20 bp, synthetic construct
  source 1..20: mol_type = other DNA
tgtgtgtgtgttctctagct

SEQ ID NO: 195730 - DNA, 20 bp, synthetic construct
  source 1..20: mol_type = other DNA
gtgtgtgtgtgttctctagc

SEQ ID NO: 195731 - DNA, 20 bp, synthetic construct
  source 1..20: mol_type = other DNA
tgtgtgtgtgtgttctctag

SEQ ID NO: 195732 - DNA, 20 bp, synthetic construct
  source 1..20: mol_type = other DNA
gtgtgtgtgtgtgttctcta

SEQ ID NO: 195733 - DNA, 20 bp, synthetic construct
  source 1..20: mol_type = other DNA
tgtgtgtgtgtgtgttctct

SEQ ID NO: 195734 - DNA, 20 bp, synthetic construct
  source 1..20: mol_type = other DNA
gtgtgtgtgtgtgtgttctc

SEQ ID NO: 195735 - DNA, 20 bp, synthetic construct
  source 1..20: mol_type = other DNA
tgtgtgtgtgtgtgtgttct

SEQ ID NO: 195736 - DNA, 20 bp, synthetic construct
  source 1..20: mol_type = other DNA
gtgtgtgtgtgtgtgtgttc

SEQ ID NO: 195737 - DNA, 20 bp, synthetic construct
  source 1..20: mol_type = other DNA
tgtgtgtgtgtgtgtgtgtt

SEQ ID NO: 195738 - DNA, 20 bp, synthetic construct
  source 1..20: mol_type = other DNA
gtgtgtgtgtgtgtgtgtgt

SEQ ID NO: 195739 - DNA, 20 bp, synthetic construct
  source 1..20: mol_type = other DNA
tgtgtgtgtgtgtgtgtgtg

SEQ ID NO: 195740 - DNA, 20 bp, synthetic construct
  source 1..20: mol_type = other DNA
gtgtgtgtgtgtgtgtgtgt

SEQ ID NO: 195741 - DNA, 20 bp, synthetic construct
  source 1..20: mol_type = other DNA
tgtgtgtgtgtgtgtgtgtg

SEQ ID NO: 195742 - DNA, 20 bp, synthetic construct
  source 1..20: mol_type = other DNA
gtgtgtgtgtgtgtgtgtgt

SEQ ID NO: 195743 - DNA, 20 bp, synthetic construct
  source 1..20: mol_type = other DNA
tgtgtgtgtgtgtgtgtgtg

SEQ ID NO: 195744 - DNA, 20 bp, synthetic construct
  source 1..20: mol_type = other DNA
gtgtgtgtgtgtgtgtgtgt

SEQ ID NO: 195745 - DNA, 20 bp, synthetic construct
  source 1..20: mol_type = other DNA
tgtgtgtgtgtgtgtgtgtg

SEQ ID NO: 195746 - DNA, 20 bp, synthetic construct
  source 1..20: mol_type = other DNA
gtgtgtgtgtgtgtgtgtgt

SEQ ID NO: 195747 - DNA, 20 bp, synthetic construct
  source 1..20: mol_type = other DNA
tgtgtgtgtgtgtgtgtgtg

SEQ ID NO: 195748 - DNA, 20 bp, synthetic construct
  source 1..20: mol_type = other DNA
gtgtgtgtgtgtgtgtgtgt

SEQ ID NO: 195749 - DNA, 20 bp, synthetic construct
  source 1..20: mol_type = other DNA
tgtgtgtgtgtgtgtgtgtg

SEQ ID NO: 195750 - DNA, 20 bp, synthetic construct
  source 1..20: mol_type = other DNA
gtgtgtgtgtgtgtgtgtgt

SEQ ID NO: 195751 - DNA, 20 bp, synthetic construct
  source 1..20: mol_type = other DNA
tgtgtgtgtgtgtgtgtgtg

SEQ ID NO: 195752 - DNA, 20 bp, synthetic construct
  source 1..20: mol_type = other DNA
ctgtgtgtgtgtgtgtgtgt

SEQ ID NO: 195753 - DNA, 20 bp, synthetic construct
  source 1..20: mol_type = other DNA
tctgtgtgtgtgtgtgtgtg

SEQ ID NO: 195754 - DNA, 20 bp, synthetic construct
  source 1..20: mol_type = other DNA
ctctgtgtgtgtgtgtgtgt

SEQ ID NO: 195755 - DNA, 20 bp, synthetic construct
  source 1..20: mol_type = other DNA
actctgtgtgtgtgtgtgtg

SEQ ID NO: 195756 - DNA, 20 bp, synthetic construct
  source 1..20: mol_type = other DNA
cactctgtgtgtgtgtgtgt

SEQ ID NO: 195757 - DNA, 20 bp, synthetic construct
  source 1..20: mol_type = other DNA
ccactctgtgtgtgtgtgtg

SEQ ID NO: 195758 - DNA, 20 bp, synthetic construct
  source 1..20: mol_type = other DNA
accactctgtgtgtgtgtgt

SEQ ID NO: 195759 - DNA, 20 bp, synthetic construct
  source 1..20: mol_type = other DNA
gaccactctgtgtgtgtgtg

SEQ ID NO: 195760 - DNA, 20 bp, synthetic construct
  source 1..20: mol_type = other DNA
agaccactctgtgtgtgtgt

SEQ ID NO: 195761 - DNA, 20 bp, synthetic construct
  source 1..20: mol_type = other DNA
aagaccactctgtgtgtgtg

SEQ ID NO: 195762 - DNA, 20 bp, synthetic construct
  source 1..20: mol_type = other DNA
taagaccactctgtgtgtgt

SEQ ID NO: 195763 - DNA, 20 bp, synthetic construct
  source 1..20: mol_type = other DNA
gtaagaccactctgtgtgtg

SEQ ID NO: 195764 - DNA, 20 bp, synthetic construct
  source 1..20: mol_type = other DNA
tgtaagaccactctgtgtgt

SEQ ID NO: 195765 - DNA, 20 bp, synthetic construct
  source 1..20: mol_type = other DNA
ttgtaagaccactctgtgtg

SEQ ID NO: 195766 - DNA, 20 bp, synthetic construct
  source 1..20: mol_type = other DNA
cttgtaagaccactctgtgt

SEQ ID NO: 195767 - DNA, 20 bp, synthetic construct
  source 1..20: mol_type = other DNA
acttgtaagaccactctgtg

SEQ ID NO: 195768 - DNA, 20 bp, synthetic construct
  source 1..20: mol_type = other DNA
gacttgtaagaccactctgt

SEQ ID NO: 195769 - DNA, 20 bp, synthetic construct
  source 1..20: mol_type = other DNA
tgacttgtaagaccactctg

SEQ ID NO: 195770 - DNA, 20 bp, synthetic construct
  source 1..20: mol_type = other DNA
ctgacttgtaagaccactct

SEQ ID NO: 195771 - DNA, 20 bp, synthetic construct
  source 1..20: mol_type = other DNA
actgacttgtaagaccactc

SEQ ID NO: 195772 - DNA, 20 bp, synthetic construct
  source 1..20: mol_type = other DNA
aactgacttgtaagaccact

SEQ ID NO: 195773 - DNA, 20 bp, synthetic construct
  source 1..20: mol_type = other DNA
aaactgacttgtaagaccac

SEQ ID NO: 195774 - DNA, 20 bp, synthetic construct
  source 1..20: mol_type = other DNA
aaaactgacttgtaagacca

SEQ ID NO: 195775 - DNA, 20 bp, synthetic construct
  source 1..20: mol_type = other DNA
taaaactgacttgtaagacc

SEQ ID NO: 195776 - DNA, 20 bp, synthetic construct
  source 1..20: mol_type = other DNA
ataaaactgacttgtaagac

SEQ ID NO: 195777 - DNA, 20 bp, synthetic construct
  source 1..20: mol_type = other DNA
tataaaactgacttgtaaga

SEQ ID NO: 195778 - DNA, 20 bp, synthetic construct
  source 1..20: mol_type = other DNA
atataaaactgacttgtaag

SEQ ID NO: 195779 - DNA, 20 bp, synthetic construct
  source 1..20: mol_type = other DNA
aatataaaactgacttgtaa

SEQ ID NO: 195780 - DNA, 20 bp, synthetic construct
  source 1..20: mol_type = other DNA
gaatataaaactgacttgta

SEQ ID NO: 195781 - DNA, 20 bp, synthetic construct
  source 1..20: mol_type = other DNA
agaatataaaactgacttgt

SEQ ID NO: 195782 - DNA, 20 bp, synthetic construct
  source 1..20: mol_type = other DNA
tagaatataaaactgacttg

SEQ ID NO: 195783 - DNA, 20 bp, synthetic construct
  source 1..20: mol_type = other DNA
gtagaatataaaactgactt

SEQ ID NO: 195784 - DNA, 20 bp, synthetic construct
  source 1..20: mol_type = other DNA
ggtagaatataaaactgact

SEQ ID NO: 195785 - DNA, 20 bp, synthetic construct
  source 1..20: mol_type = other DNA
aggtagaatataaaactgac

SEQ ID NO: 195786 - DNA, 20 bp, synthetic construct
  source 1..20: mol_type = other DNA
taggtagaatataaaactga

SEQ ID NO: 195787 - DNA, 20 bp, synthetic construct
  source 1..20: mol_type = other DNA
ataggtagaatataaaactg

SEQ ID NO: 195788 - DNA, 20 bp, synthetic construct
  source 1..20: mol_type = other DNA
tataggtagaatataaaact

SEQ ID NO: 195789 - DNA, 20 bp, synthetic construct
  source 1..20: mol_type = other DNA
atataggtagaatataaaac

SEQ ID NO: 195790 - DNA, 20 bp, synthetic construct
  source 1..20: mol_type = other DNA
catataggtagaatataaaa

SEQ ID NO: 195791 - DNA, 20 bp, synthetic construct
  source 1..20: mol_type = other DNA
gcatataggtagaatataaa

SEQ ID NO: 195792 - DNA, 20 bp, synthetic construct
  source 1..20: mol_type = other DNA
tgcatataggtagaatataa

SEQ ID NO: 195793 - DNA, 20 bp, synthetic construct
  source 1..20: mol_type = other DNA
ttgcatataggtagaatata

SEQ ID NO: 195794 - DNA, 20 bp, synthetic construct
  source 1..20: mol_type = other DNA
attgcatataggtagaatat

SEQ ID NO: 195795 - DNA, 20 bp, synthetic construct
  source 1..20: mol_type = other DNA
tattgcatataggtagaata

SEQ ID NO: 195796 - DNA, 20 bp, synthetic construct
  source 1..20: mol_type = other DNA
ttattgcatataggtagaat

SEQ ID NO: 195797 - DNA, 20 bp, synthetic construct
  source 1..20: mol_type = other DNA
tttattgcatataggtagaa

SEQ ID NO: 195798 - DNA, 20 bp, synthetic construct
  source 1..20: mol_type = other DNA
ctttattgcatataggtaga

SEQ ID NO: 195799 - DNA, 20 bp, synthetic construct
  source 1..20: mol_type = other DNA
cctttattgcatataggtag

SEQ ID NO: 195800 - DNA, 20 bp, synthetic construct
  source 1..20: mol_type = other DNA
acctttattgcatataggta

SEQ ID NO: 195801 - DNA, 20 bp, synthetic construct
  source 1..20: mol_type = other DNA
tacctttattgcatataggt

SEQ ID NO: 195802 - DNA, 20 bp, synthetic construct
  source 1..20: mol_type = other DNA
atacctttattgcatatagg

SEQ ID NO: 195803 - DNA, 20 bp, synthetic construct
  source 1..20: mol_type = other DNA
aatacctttattgcatatag

SEQ ID NO: 195804 - DNA, 20 bp, synthetic construct
  source 1..20: mol_type = other DNA
taatacctttattgcatata

SEQ ID NO: 195805 - DNA, 20 bp, synthetic construct
  source 1..20: mol_type = other DNA
ataatacctttattgcatat

SEQ ID NO: 195806 - DNA, 20 bp, synthetic construct
  source 1..20: mol_type = other DNA
aataatacctttattgcata

SEQ ID NO: 195807 - DNA, 20 bp, synthetic construct
  source 1..20: mol_type = other DNA
taataatacctttattgcat

SEQ ID NO: 195808 - DNA, 20 bp, synthetic construct
  source 1..20: mol_type = other DNA
ataataatacctttattgca

SEQ ID NO: 195809 - DNA, 20 bp, synthetic construct
  source 1..20: mol_type = other DNA
cataataatacctttattgc

SEQ ID NO: 195810 - DNA, 20 bp, synthetic construct
  source 1..20: mol_type = other DNA
acataataatacctttattg

SEQ ID NO: 195811 - DNA, 20 bp, synthetic construct
  source 1..20: mol_type = other DNA
aacataataatacctttatt

SEQ ID NO: 195812 - DNA, 20 bp, synthetic construct
  source 1..20: mol_type = other DNA
caacataataatacctttat

SEQ ID NO: 195813 - DNA, 20 bp, synthetic construct
  source 1..20: mol_type = other DNA
tcaacataataataccttta

SEQ ID NO: 195814 - DNA, 20 bp, synthetic construct
  source 1..20: mol_type = other DNA
ctcaacataataataccttt

SEQ ID NO: 195815 - DNA, 20 bp, synthetic construct
  source 1..20: mol_type = other DNA
cctcaacataataatacctt

SEQ ID NO: 195816 - DNA, 20 bp, synthetic construct
  source 1..20: mol_type = other DNA
acctcaacataataatacct

SEQ ID NO: 195817 - DNA, 20 bp, synthetic construct
  source 1..20: mol_type = other DNA
cacctcaacataataatacc

SEQ ID NO: 195818 - DNA, 20 bp, synthetic construct
  source 1..20: mol_type = other DNA
gcacctcaacataataatac

SEQ ID NO: 195819 - DNA, 20 bp, synthetic construct
  source 1..20: mol_type = other DNA
ggcacctcaacataataata

SEQ ID NO: 195820 - DNA, 20 bp, synthetic construct
  source 1..20: mol_type = other DNA
aggcacctcaacataataat

SEQ ID NO: 195821 - DNA, 20 bp, synthetic construct
  source 1..20: mol_type = other DNA
aaggcacctcaacataataa

SEQ ID NO: 195822 - DNA, 20 bp, synthetic construct
  source 1..20: mol_type = other DNA
caaggcacctcaacataata

SEQ ID NO: 195823 - DNA, 20 bp, synthetic construct
  source 1..20: mol_type = other DNA
tcaaggcacctcaacataat

SEQ ID NO: 195824 - DNA, 20 bp, synthetic construct
  source 1..20: mol_type = other DNA
atcaaggcacctcaacataa

SEQ ID NO: 195825 - DNA, 20 bp, synthetic construct
  source 1..20: mol_type = other DNA
tatcaaggcacctcaacata

SEQ ID NO: 195826 - DNA, 20 bp, synthetic construct
  source 1..20: mol_type = other DNA
atatcaaggcacctcaacat

SEQ ID NO: 195827 - DNA, 20 bp, synthetic construct
  source 1..20: mol_type = other DNA
tatatcaaggcacctcaaca

SEQ ID NO: 195828 - DNA, 20 bp, synthetic construct
  source 1..20: mol_type = other DNA
ttatatcaaggcacctcaac

SEQ ID NO: 195829 - DNA, 20 bp, synthetic construct
  source 1..20: mol_type = other DNA
tttatatcaaggcacctcaa

SEQ ID NO: 195830 - DNA, 20 bp, synthetic construct
  source 1..20: mol_type = other DNA
ttttatatcaaggcacctca

SEQ ID NO: 195831 - DNA, 20 bp, synthetic construct
  source 1..20: mol_type = other DNA
tttttatatcaaggcacctc

SEQ ID NO: 195832 - DNA, 20 bp, synthetic construct
  source 1..20: mol_type = other DNA
atttttatatcaaggcacct

SEQ ID NO: 195833 - DNA, 20 bp, synthetic construct
  source 1..20: mol_type = other DNA
aatttttatatcaaggcacc

SEQ ID NO: 195834 - DNA, 20 bp, synthetic construct
  source 1..20: mol_type = other DNA
aaatttttatatcaaggcac

SEQ ID NO: 195835 - DNA, 20 bp, synthetic construct
  source 1..20: mol_type = other DNA
aaaatttttatatcaaggca

SEQ ID NO: 195836 - DNA, 20 bp, synthetic construct
  source 1..20: mol_type = other DNA
aaaaatttttatatcaaggc

SEQ ID NO: 195837 - DNA, 20 bp, synthetic construct
  source 1..20: mol_type = other DNA
gaaaaatttttatatcaagg

SEQ ID NO: 195838 - DNA, 20 bp, synthetic construct
  source 1..20: mol_type = other DNA
agaaaaatttttatatcaag

SEQ ID NO: 195839 - DNA, 20 bp, synthetic construct
  source 1..20: mol_type = other DNA
aagaaaaatttttatatcaa

SEQ ID NO: 195840 - DNA, 20 bp, synthetic construct
  source 1..20: mol_type = other DNA
taagaaaaatttttatatca

SEQ ID NO: 195841 - DNA, 20 bp, synthetic construct
  source 1..20: mol_type = other DNA
ttaagaaaaatttttatatc

SEQ ID NO: 195842 - DNA, 20 bp, synthetic construct
  source 1..20: mol_type = other DNA
tttaagaaaaatttttatat

SEQ ID NO: 195843 - DNA, 20 bp, synthetic construct
  source 1..20: mol_type = other DNA
ctttaagaaaaatttttata

SEQ ID NO: 195844 - DNA, 20 bp, synthetic construct
  source 1..20: mol_type = other DNA
cctttaagaaaaatttttat

SEQ ID NO: 195845 - DNA, 20 bp, synthetic construct
  source 1..20: mol_type = other DNA
tcctttaagaaaaattttta

SEQ ID NO: 195846 - DNA, 20 bp, synthetic construct
  source 1..20: mol_type = other DNA
ctcctttaagaaaaattttt

SEQ ID NO: 195847 - DNA, 20 bp, synthetic construct
  source 1..20: mol_type = other DNA
tctcctttaagaaaaatttt

SEQ ID NO: 195848 - DNA, 20 bp, synthetic construct
  source 1..20: mol_type = other DNA
ctctcctttaagaaaaattt

SEQ ID NO: 195849 - DNA, 20 bp, synthetic construct
  source 1..20: mol_type = other DNA
cctctcctttaagaaaaatt

SEQ ID NO: 195850 - DNA, 20 bp, synthetic construct
  source 1..20: mol_type = other DNA
tcctctcctttaagaaaaat

SEQ ID NO: 195851 - DNA, 20 bp, synthetic construct
  source 1..20: mol_type = other DNA
atcctctcctttaagaaaaa

SEQ ID NO: 195852 - DNA, 20 bp, synthetic construct
  source 1..20: mol_type = other DNA
catcctctcctttaagaaaa

SEQ ID NO: 195853 - DNA, 20 bp, synthetic construct
  source 1..20: mol_type = other DNA
gcatcctctcctttaagaaa

SEQ ID NO: 195854 - DNA, 20 bp, synthetic construct
  source 1..20: mol_type = other DNA
ggcatcctctcctttaagaa

SEQ ID NO: 195855 - DNA, 20 bp, synthetic construct
  source 1..20: mol_type = other DNA
aggcatcctctcctttaaga

SEQ ID NO: 195856 - DNA, 20 bp, synthetic construct
  source 1..20: mol_type = other DNA
taggcatcctctcctttaag

SEQ ID NO: 195857 - DNA, 20 bp, synthetic construct
  source 1..20: mol_type = other DNA
ttaggcatcctctcctttaa

SEQ ID NO: 195858 - DNA, 20 bp, synthetic construct
  source 1..20: mol_type = other DNA
tttaggcatcctctccttta

SEQ ID NO: 195859 - DNA, 20 bp, synthetic construct
  source 1..20: mol_type = other DNA
ttttaggcatcctctccttt

SEQ ID NO: 195860 - DNA, 20 bp, synthetic construct
  source 1..20: mol_type = other DNA
gttttaggcatcctctcctt

SEQ ID NO: 195861 - DNA, 20 bp, synthetic construct
  source 1..20: mol_type = other DNA
tgttttaggcatcctctcct

SEQ ID NO: 195862 - DNA, 20 bp, synthetic construct
  source 1..20: mol_type = other DNA
ctgttttaggcatcctctcc

SEQ ID NO: 195863 - DNA, 20 bp, synthetic construct
  source 1..20: mol_type = other DNA
cctgttttaggcatcctctc

SEQ ID NO: 195864 - DNA, 20 bp, synthetic construct
  source 1..20: mol_type = other DNA
gcctgttttaggcatcctct

SEQ ID NO: 195865 - DNA, 20 bp, synthetic construct
  source 1..20: mol_type = other DNA
tgcctgttttaggcatcctc

SEQ ID NO: 195866 - DNA, 20 bp, synthetic construct
  source 1..20: mol_type = other DNA
atgcctgttttaggcatcct

SEQ ID NO: 195867 - DNA, 20 bp, synthetic construct
  source 1..20: mol_type = other DNA
aatgcctgttttaggcatcc

SEQ ID NO: 195868 - DNA, 20 bp, synthetic construct
  source 1..20: mol_type = other DNA
taatgcctgttttaggcatc

SEQ ID NO: 195869 - DNA, 20 bp, synthetic construct
  source 1..20: mol_type = other DNA
gtaatgcctgttttaggcat

SEQ ID NO: 195870 - DNA, 20 bp, synthetic construct
  source 1..20: mol_type = other DNA
ggtaatgcctgttttaggca

SEQ ID NO: 195871 - DNA, 20 bp, synthetic construct
  source 1..20: mol_type = other DNA
aggtaatgcctgttttaggc

SEQ ID NO: 195872 - DNA, 20 bp, synthetic construct
  source 1..20: mol_type = other DNA
caggtaatgcctgttttagg

SEQ ID NO: 195873 - DNA, 20 bp, synthetic construct
  source 1..20: mol_type = other DNA
tcaggtaatgcctgttttag

SEQ ID NO: 195874 - DNA, 20 bp, synthetic construct
  source 1..20: mol_type = other DNA
ttcaggtaatgcctgtttta

SEQ ID NO: 195875 - DNA, 20 bp, synthetic construct
  source 1..20: mol_type = other DNA
tttcaggtaatgcctgtttt

SEQ ID NO: 195876 - DNA, 20 bp, synthetic construct
  source 1..20: mol_type = other DNA
gtttcaggtaatgcctgttt

SEQ ID NO: 195877 - DNA, 20 bp, synthetic construct
  source 1..20: mol_type = other DNA
ggtttcaggtaatgcctgtt

SEQ ID NO: 195878 - DNA, 20 bp, synthetic construct
  source 1..20: mol_type = other DNA
aggtttcaggtaatgcctgt

SEQ ID NO: 195879 - DNA, 20 bp, synthetic construct
  source 1..20: mol_type = other DNA
gaggtttcaggtaatgcctg

SEQ ID NO: 195880 - DNA, 20 bp, synthetic construct
  source 1..20: mol_type = other DNA
ggaggtttcaggtaatgcct

SEQ ID NO: 195881 - DNA, 20 bp, synthetic construct
  source 1..20: mol_type = other DNA
aggaggtttcaggtaatgcc

SEQ ID NO: 195882 - DNA, 20 bp, synthetic construct
  source 1..20: mol_type = other DNA
gaggaggtttcaggtaatgc

SEQ ID NO: 195883 - DNA, 20 bp, synthetic construct
  source 1..20: mol_type = other DNA
agaggaggtttcaggtaatg

SEQ ID NO: 195884 - DNA, 20 bp, synthetic construct
  source 1..20: mol_type = other DNA
gagaggaggtttcaggtaat

SEQ ID NO: 195885 - DNA, 20 bp, synthetic construct
  source 1..20: mol_type = other DNA
agagaggaggtttcaggtaa

SEQ ID NO: 195886 - DNA, 20 bp, synthetic construct
  source 1..20: mol_type = other DNA
gagagaggaggtttcaggta

SEQ ID NO: 195887 - DNA, 20 bp, synthetic construct
  source 1..20: mol_type = other DNA
ggagagaggaggtttcaggt

SEQ ID NO: 195888 - DNA, 20 bp, synthetic construct
  source 1..20: mol_type = other DNA
tggagagaggaggtttcagg

SEQ ID NO: 195889 - DNA, 20 bp, synthetic construct
  source 1..20: mol_type = other DNA
ctggagagaggaggtttcag

SEQ ID NO: 195890 - DNA, 20 bp, synthetic construct
  source 1..20: mol_type = other DNA
gctggagagaggaggtttca

SEQ ID NO: 195891 - DNA, 20 bp, synthetic construct
  source 1..20: mol_type = other DNA
tgctggagagaggaggtttc

SEQ ID NO: 195892 - DNA, 20 bp, synthetic construct
  source 1..20: mol_type = other DNA
atgctggagagaggaggttt

SEQ ID NO: 195893 - DNA, 20 bp, synthetic construct
  source 1..20: mol_type = other DNA
aatgctggagagaggaggtt

SEQ ID NO: 195894 - DNA, 20 bp, synthetic construct
  source 1..20: mol_type = other DNA
caatgctggagagaggaggt

SEQ ID NO: 195895 - DNA, 20 bp, synthetic construct
  source 1..20: mol_type = other DNA
ccaatgctggagagaggagg

SEQ ID NO: 195896 - DNA, 20 bp, synthetic construct
  source 1..20: mol_type = other DNA
accaatgctggagagaggag

SEQ ID NO: 195897 - DNA, 20 bp, synthetic construct
  source 1..20: mol_type = other DNA
aaccaatgctggagagagga

SEQ ID NO: 195898 - DNA, 20 bp, synthetic construct
  source 1..20: mol_type = other DNA
caaccaatgctggagagagg

SEQ ID NO: 195899 - DNA, 20 bp, synthetic construct
  source 1..20: mol_type = other DNA
acaaccaatgctggagagag

SEQ ID NO: 195900 - DNA, 20 bp, synthetic construct
  source 1..20: mol_type = other DNA
gacaaccaatgctggagaga

SEQ ID NO: 195901 - DNA, 20 bp, synthetic construct
  source 1..20: mol_type = other DNA
agacaaccaatgctggagag

SEQ ID NO: 195902 - DNA, 20 bp, synthetic construct
  source 1..20: mol_type = other DNA
aagacaaccaatgctggaga

SEQ ID NO: 195903 - DNA, 20 bp, synthetic construct
  source 1..20: mol_type = other DNA
gaagacaaccaatgctggag

SEQ ID NO: 195904 - DNA, 20 bp, synthetic construct
  source 1..20: mol_type = other DNA
agaagacaaccaatgctgga

SEQ ID NO: 195905 - DNA, 20 bp, synthetic construct
  source 1..20: mol_type = other DNA
cagaagacaaccaatgctgg

SEQ ID NO: 195906 - DNA, 20 bp, synthetic construct
  source 1..20: mol_type = other DNA
acagaagacaaccaatgctg

SEQ ID NO: 195907 - DNA, 20 bp, synthetic construct
  source 1..20: mol_type = other DNA
gacagaagacaaccaatgct

SEQ ID NO: 195908 - DNA, 20 bp, synthetic construct
  source 1..20: mol_type = other DNA
tgacagaagacaaccaatgc

SEQ ID NO: 195909 - DNA, 20 bp, synthetic construct
  source 1..20: mol_type = other DNA
atgacagaagacaaccaatg

SEQ ID NO: 195910 - DNA, 20 bp, synthetic construct
  source 1..20: mol_type = other DNA
catgacagaagacaaccaat

SEQ ID NO: 195911 - DNA, 20 bp, synthetic construct
  source 1..20: mol_type = other DNA
tcatgacagaagacaaccaa

SEQ ID NO: 195912 - DNA, 20 bp, synthetic construct
  source 1..20: mol_type = other DNA
gtcatgacagaagacaacca

SEQ ID NO: 195913 - DNA, 20 bp, synthetic construct
  source 1..20: mol_type = other DNA
agtcatgacagaagacaacc

SEQ ID NO: 195914 - DNA, 20 bp, synthetic construct
  source 1..20: mol_type = other DNA
gagtcatgacagaagacaac

SEQ ID NO: 195915 - DNA, 20 bp, synthetic construct
  source 1..20: mol_type = other DNA
tgagtcatgacagaagacaa

SEQ ID NO: 195916 - DNA, 20 bp, synthetic construct
  source 1..20: mol_type = other DNA
ctgagtcatgacagaagaca

SEQ ID NO: 195917 - DNA, 20 bp, synthetic construct
  source 1..20: mol_type = other DNA
cctgagtcatgacagaagac

SEQ ID NO: 195918 - DNA, 20 bp, synthetic construct
  source 1..20: mol_type = other DNA
ccctgagtcatgacagaaga

SEQ ID NO: 195919 - DNA, 20 bp, synthetic construct
  source 1..20: mol_type = other DNA
accctgagtcatgacagaag

SEQ ID NO: 195920 - DNA, 20 bp, synthetic construct
  source 1..20: mol_type = other DNA
aaccctgagtcatgacagaa

SEQ ID NO: 195921 - DNA, 20 bp, synthetic construct
  source 1..20: mol_type = other DNA
aaaccctgagtcatgacaga

SEQ ID NO: 195922 - DNA, 20 bp, synthetic construct
  source 1..20: mol_type = other DNA
aaaaccctgagtcatgacag

SEQ ID NO: 195923 - DNA, 20 bp, synthetic construct
  source 1..20: mol_type = other DNA
gaaaaccctgagtcatgaca

SEQ ID NO: 195924 - DNA, 20 bp, synthetic construct
  source 1..20: mol_type = other DNA
tgaaaaccctgagtcatgac

SEQ ID NO: 195925 - DNA, 20 bp, synthetic construct
  source 1..20: mol_type = other DNA
gtgaaaaccctgagtcatga

SEQ ID NO: 195926 - DNA, 20 bp, synthetic construct
  source 1..20: mol_type = other DNA
agtgaaaaccctgagtcatg

SEQ ID NO: 195927 - DNA, 20 bp, synthetic construct
  source 1..20: mol_type = other DNA
cagtgaaaaccctgagtcat

SEQ ID NO: 195928 - DNA, 20 bp, synthetic construct
  source 1..20: mol_type = other DNA
tcagtgaaaaccctgagtca

SEQ ID NO: 195929 - DNA, 20 bp, synthetic construct
  source 1..20: mol_type = other DNA
ctcagtgaaaaccctgagtc

SEQ ID NO: 195930 - DNA, 20 bp, synthetic construct
  source 1..20: mol_type = other DNA
tctcagtgaaaaccctgagt

SEQ ID NO: 195931 - DNA, 20 bp, synthetic construct
  source 1..20: mol_type = other DNA
ttctcagtgaaaaccctgag

SEQ ID NO: 195932 - DNA, 20 bp, synthetic construct
  source 1..20: mol_type = other DNA
attctcagtgaaaaccctga

SEQ ID NO: 195933 - DNA, 20 bp, synthetic construct
  source 1..20: mol_type = other DNA
cattctcagtgaaaaccctg

SEQ ID NO: 195934 - DNA, 20 bp, synthetic construct
  source 1..20: mol_type = other DNA
ccattctcagtgaaaaccct

SEQ ID NO: 195935 - DNA, 20 bp, synthetic construct
  source 1..20: mol_type = other DNA
cccattctcagtgaaaaccc

SEQ ID NO: 195936 - DNA, 20 bp, synthetic construct
  source 1..20: mol_type = other DNA
tcccattctcagtgaaaacc

SEQ ID NO: 195937 - DNA, 20 bp, synthetic construct
  source 1..20: mol_type = other DNA
atcccattctcagtgaaaac

SEQ ID NO: 195938 - DNA, 20 bp, synthetic construct
  source 1..20: mol_type = other DNA
catcccattctcagtgaaaa

SEQ ID NO: 195939 - DNA, 20 bp, synthetic construct
  source 1..20: mol_type = other DNA
ccatcccattctcagtgaaa

SEQ ID NO: 195940 - DNA, 20 bp, synthetic construct
  source 1..20: mol_type = other DNA
tccatcccattctcagtgaa

SEQ ID NO: 195941 - DNA, 20 bp, synthetic construct
  source 1..20: mol_type = other DNA
ttccatcccattctcagtga

SEQ ID NO: 195942 - DNA, 20 bp, synthetic construct
  source 1..20: mol_type = other DNA
tttccatcccattctcagtg

SEQ ID NO: 195943 - DNA, 20 bp, synthetic construct
  source 1..20: mol_type = other DNA
atttccatcccattctcagt

SEQ ID NO: 195944 - DNA, 20 bp, synthetic construct
  source 1..20: mol_type = other DNA
catttccatcccattctcag

SEQ ID NO: 195945 - DNA, 20 bp, synthetic construct
  source 1..20: mol_type = other DNA
acatttccatcccattctca

SEQ ID NO: 195946 - DNA, 20 bp, synthetic construct
  source 1..20: mol_type = other DNA
cacatttccatcccattctc

SEQ ID NO: 195947 - DNA, 20 bp, synthetic construct
  source 1..20: mol_type = other DNA
ccacatttccatcccattct

SEQ ID NO: 195948 - DNA, 20 bp, synthetic construct
  source 1..20: mol_type = other DNA
accacatttccatcccattc

SEQ ID NO: 195949 - DNA, 20 bp, synthetic construct
  source 1..20: mol_type = other DNA
gaccacatttccatcccatt

SEQ ID NO: 195950 - DNA, 20 bp, synthetic construct
  source 1..20: mol_type = other DNA
agaccacatttccatcccat

SEQ ID NO: 195951 - DNA, 20 bp, synthetic construct
  source 1..20: mol_type = other DNA
tagaccacatttccatccca

SEQ ID NO: 195952 - DNA, 20 bp, synthetic construct
  source 1..20: mol_type = other DNA
ttagaccacatttccatccc

SEQ ID NO: 195953 - DNA, 20 bp, synthetic construct
  source 1..20: mol_type = other DNA
tttagaccacatttccatcc

SEQ ID NO: 195954 - DNA, 20 bp, synthetic construct
  source 1..20: mol_type = other DNA
ctttagaccacatttccatc

SEQ ID NO: 195955 - DNA, 20 bp, synthetic construct
  source 1..20: mol_type = other DNA
tctttagaccacatttccat

SEQ ID NO: 195956 - DNA, 20 bp, synthetic construct
  source 1..20: mol_type = other DNA
atctttagaccacatttcca

SEQ ID NO: 195957 - DNA, 20 bp, synthetic construct
  source 1..20: mol_type = other DNA
tatctttagaccacatttcc

SEQ ID NO: 195958 - DNA, 20 bp, synthetic construct
  source 1..20: mol_type = other DNA
ctatctttagaccacatttc

SEQ ID NO: 195959 - DNA, 20 bp, synthetic construct
  source 1..20: mol_type = other DNA
cctatctttagaccacattt

SEQ ID NO: 195960 - DNA, 20 bp, synthetic construct
  source 1..20: mol_type = other DNA
ccctatctttagaccacatt

SEQ ID NO: 195961 - DNA, 20 bp, synthetic construct
  source 1..20: mol_type = other DNA
gccctatctttagaccacat

SEQ ID NO: 195962 - DNA, 20 bp, synthetic construct
  source 1..20: mol_type = other DNA
ggccctatctttagaccaca

SEQ ID NO: 195963 - DNA, 20 bp, synthetic construct
  source 1..20: mol_type = other DNA
tggccctatctttagaccac

SEQ ID NO: 195964 - DNA, 20 bp, synthetic construct
  source 1..20: mol_type = other DNA
ttggccctatctttagacca

SEQ ID NO: 195965 - DNA, 20 bp, synthetic construct
  source 1..20: mol_type = other DNA
attggccctatctttagacc

SEQ ID NO: 195966 - DNA, 20 bp, synthetic construct
  source 1..20: mol_type = other DNA
cattggccctatctttagac

SEQ ID NO: 195967 - DNA, 20 bp, synthetic construct
  source 1..20: mol_type = other DNA
acattggccctatctttaga

SEQ ID NO: 195968 - DNA, 20 bp, synthetic construct
  source 1..20: mol_type = other DNA
aacattggccctatctttag

SEQ ID NO: 195969 - DNA, 20 bp, synthetic construct
  source 1..20: mol_type = other DNA
caacattggccctatcttta

SEQ ID NO: 195970 - DNA, 20 bp, synthetic construct
  source 1..20: mol_type = other DNA
ccaacattggccctatcttt

SEQ ID NO: 195971 - DNA, 20 bp, synthetic construct
  source 1..20: mol_type = other DNA
cccaacattggccctatctt

SEQ ID NO: 195972 - DNA, 20 bp, synthetic construct
  source 1..20: mol_type = other DNA
tcccaacattggccctatct

SEQ ID NO: 195973 - DNA, 20 bp, synthetic construct
  source 1..20: mol_type = other DNA
gtcccaacattggccctatc

SEQ ID NO: 195974 - DNA, 20 bp, synthetic construct
  source 1..20: mol_type = other DNA
agtcccaacattggccctat

SEQ ID NO: 195975 - DNA, 20 bp, synthetic construct
  source 1..20: mol_type = other DNA
cagtcccaacattggcccta

SEQ ID NO: 195976 - DNA, 20 bp, synthetic construct
  source 1..20: mol_type = other DNA
ccagtcccaacattggccct

SEQ ID NO: 195977 - DNA, 20 bp, synthetic construct
  source 1..20: mol_type = other DNA
tccagtcccaacattggccc

SEQ ID NO: 195978 - DNA, 20 bp, synthetic construct
  source 1..20: mol_type = other DNA
atccagtcccaacattggcc

SEQ ID NO: 195979 - DNA, 20 bp, synthetic construct
  source 1..20: mol_type = other DNA
gatccagtcccaacattggc

SEQ ID NO: 195980 - DNA, 20 bp, synthetic construct
  source 1..20: mol_type = other DNA
ggatccagtcccaacattgg

SEQ ID NO: 195981 - DNA, 20 bp, synthetic construct
  source 1..20: mol_type = other DNA
gggatccagtcccaacattg

SEQ ID NO: 195982 - DNA, 20 bp, synthetic construct
  source 1..20: mol_type = other DNA
ggggatccagtcccaacatt

SEQ ID NO: 195983 - DNA, 20 bp, synthetic construct
  source 1..20: mol_type = other DNA
aggggatccagtcccaacat

SEQ ID NO: 195984 - DNA, 20 bp, synthetic construct
  source 1..20: mol_type = other DNA
gaggggatccagtcccaaca

SEQ ID NO: 195985 - DNA, 20 bp, synthetic construct
  source 1..20: mol_type = other DNA
agaggggatccagtcccaac

SEQ ID NO: 195986 - DNA, 20 bp, synthetic construct
  source 1..20: mol_type = other DNA
cagaggggatccagtcccaa

SEQ ID NO: 195987 - DNA, 20 bp, synthetic construct
  source 1..20: mol_type = other DNA
ccagaggggatccagtccca

SEQ ID NO: 195988 - DNA, 20 bp, synthetic construct
  source 1..20: mol_type = other DNA
cccagaggggatccagtccc

SEQ ID NO: 195989 - DNA, 20 bp, synthetic construct
  source 1..20: mol_type = other DNA
tcccagaggggatccagtcc

SEQ ID NO: 195990 - DNA, 20 bp, synthetic construct
  source 1..20: mol_type = other DNA
ttcccagaggggatccagtc

SEQ ID NO: 195991 - DNA, 20 bp, synthetic construct
  source 1..20: mol_type = other DNA
cttcccagaggggatccagt

SEQ ID NO: 195992 - DNA, 20 bp, synthetic construct
  source 1..20: mol_type = other DNA
acttcccagaggggatccag

SEQ ID NO: 195993 - DNA, 20 bp, synthetic construct
  source 1..20: mol_type = other DNA
gacttcccagaggggatcca

SEQ ID NO: 195994 - DNA, 20 bp, synthetic construct
  source 1..20: mol_type = other DNA
tgacttcccagaggggatcc

SEQ ID NO: 195995 - DNA, 20 bp, synthetic construct
  source 1..20: mol_type = other DNA
ctgacttcccagaggggatc

SEQ ID NO: 195996 - DNA, 20 bp, synthetic construct
  source 1..20: mol_type = other DNA
tctgacttcccagaggggat

SEQ ID NO: 195997 - DNA, 20 bp, synthetic construct
  source 1..20: mol_type = other DNA
gtctgacttcccagagggga

SEQ ID NO: 195998 - DNA, 20 bp, synthetic construct
  source 1..20: mol_type = other DNA
ggtctgacttcccagagggg

SEQ ID NO: 195999 - DNA, 20 bp, synthetic construct
  source 1..20: mol_type = other DNA
tggtctgacttcccagaggg

SEQ ID NO: 196000 - DNA, 20 bp, synthetic construct
  source 1..20: mol_type = other DNA
ctggtctgacttcccagagg

SEQ ID NO: 196001 - DNA, 20 bp, synthetic construct
  source 1..20: mol_type = other DNA
cctggtctgacttcccagag

SEQ ID NO: 196002 - DNA, 20 bp, synthetic construct
  source 1..20: mol_type = other DNA
gcctggtctgacttcccaga

SEQ ID NO: 196003 - DNA, 20 bp, synthetic construct
  source 1..20: mol_type = other DNA
agcctggtctgacttcccag

SEQ ID NO: 196004 - DNA, 20 bp, synthetic construct
  source 1..20: mol_type = other DNA
tagcctggtctgacttccca

SEQ ID NO: 196005 - DNA, 20 bp, synthetic construct
  source 1..20: mol_type = other DNA
ctagcctggtctgacttccc

SEQ ID NO: 196006 - DNA, 20 bp, synthetic construct
  source 1..20: mol_type = other DNA
cctagcctggtctgacttcc

SEQ ID NO: 196007 - DNA, 20 bp, synthetic construct
  source 1..20: mol_type = other DNA
ccctagcctggtctgacttc

SEQ ID NO: 196008 - DNA, 20 bp, synthetic construct
  source 1..20: mol_type = other DNA
gccctagcctggtctgactt

SEQ ID NO: 196009 - DNA, 20 bp, synthetic construct
  source 1..20: mol_type = other DNA
tgccctagcctggtctgact

SEQ ID NO: 196010 - DNA, 20 bp, synthetic construct
  source 1..20: mol_type = other DNA
ctgccctagcctggtctgac

SEQ ID NO: 196011 - DNA, 20 bp, synthetic construct
  source 1..20: mol_type = other DNA
cctgccctagcctggtctga

SEQ ID NO: 196012 - DNA, 20 bp, synthetic construct
  source 1..20: mol_type = other DNA
acctgccctagcctggtctg

SEQ ID NO: 196013 - DNA, 20 bp, synthetic construct
  source 1..20: mol_type = other DNA
gacctgccctagcctggtct

SEQ ID NO: 196014 - DNA, 20 bp, synthetic construct
  source 1..20: mol_type = other DNA
ggacctgccctagcctggtc

SEQ ID NO: 196015 - DNA, 20 bp, synthetic construct
  source 1..20: mol_type = other DNA
aggacctgccctagcctggt

SEQ ID NO: 196016 - DNA, 20 bp, synthetic construct
  source 1..20: mol_type = other DNA
aaggacctgccctagcctgg

SEQ ID NO: 196017 - DNA, 20 bp, synthetic construct
  source 1..20: mol_type = other DNA
caaggacctgccctagcctg

SEQ ID NO: 196018 - DNA, 20 bp, synthetic construct
  source 1..20: mol_type = other DNA
tcaaggacctgccctagcct

SEQ ID NO: 196019 - DNA, 20 bp, synthetic construct
  source 1..20: mol_type = other DNA
ttcaaggacctgccctagcc

SEQ ID NO: 196020 - DNA, 20 bp, synthetic construct
  source 1..20: mol_type = other DNA
cttcaaggacctgccctagc

SEQ ID NO: 196021 - DNA, 20 bp, synthetic construct
  source 1..20: mol_type = other DNA
gcttcaaggacctgccctag

SEQ ID NO: 196022 - DNA, 20 bp, synthetic construct
  source 1..20: mol_type = other DNA
ggcttcaaggacctgcccta

SEQ ID NO: 196023 - DNA, 20 bp, synthetic construct
  source 1..20: mol_type = other DNA
tggcttcaaggacctgccct

SEQ ID NO: 196024 - DNA, 20 bp, synthetic construct
  source 1..20: mol_type = other DNA
atggcttcaaggacctgccc

SEQ ID NO: 196025 - DNA, 20 bp, synthetic construct
  source 1..20: mol_type = other DNA
gatggcttcaaggacctgcc

SEQ ID NO: 196026 - DNA, 20 bp, synthetic construct
  source 1..20: mol_type = other DNA
tgatggcttcaaggacctgc

SEQ ID NO: 196027 - DNA, 20 bp, synthetic construct
  source 1..20: mol_type = other DNA
ctgatggcttcaaggacctg

SEQ ID NO: 196028 - DNA, 20 bp, synthetic construct
  source 1..20: mol_type = other DNA
cctgatggcttcaaggacct

SEQ ID NO: 196029 - DNA, 20 bp, synthetic construct
  source 1..20: mol_type = other DNA
tcctgatggcttcaaggacc

SEQ ID NO: 196030 - DNA, 20 bp, synthetic construct
  source 1..20: mol_type = other DNA
ttcctgatggcttcaaggac

SEQ ID NO: 196031 - DNA, 20 bp, synthetic construct
  source 1..20: mol_type = other DNA
tttcctgatggcttcaagga

SEQ ID NO: 196032 - DNA, 20 bp, synthetic construct
  source 1..20: mol_type = other DNA
ttttcctgatggcttcaagg

SEQ ID NO: 196033 - DNA, 20 bp, synthetic construct
  source 1..20: mol_type = other DNA
cttttcctgatggcttcaag

SEQ ID NO: 196034 - DNA, 20 bp, synthetic construct
  source 1..20: mol_type = other DNA
gcttttcctgatggcttcaa

SEQ ID NO: 196035 - DNA, 20 bp, synthetic construct
  source 1..20: mol_type = other DNA
ggcttttcctgatggcttca

SEQ ID NO: 196036 - DNA, 20 bp, synthetic construct
  source 1..20: mol_type = other DNA
aggcttttcctgatggcttc

SEQ ID NO: 196037 - DNA, 20 bp, synthetic construct
  source 1..20: mol_type = other DNA
gaggcttttcctgatggctt

SEQ ID NO: 196038 - DNA, 20 bp, synthetic construct
  source 1..20: mol_type = other DNA
agaggcttttcctgatggct

SEQ ID NO: 196039 - DNA, 20 bp, synthetic construct
  source 1..20: mol_type = other DNA
cagaggcttttcctgatggc

SEQ ID NO: 196040 - DNA, 20 bp, synthetic construct
  source 1..20: mol_type = other DNA
ccagaggcttttcctgatgg

SEQ ID NO: 196041 - DNA, 20 bp, synthetic construct
  source 1..20: mol_type = other DNA
tccagaggcttttcctgatg

SEQ ID NO: 196042 - DNA, 20 bp, synthetic construct
  source 1..20: mol_type = other DNA
ctccagaggcttttcctgat

SEQ ID NO: 196043 - DNA, 20 bp, synthetic construct
  source 1..20: mol_type = other DNA
gctccagaggcttttcctga

SEQ ID NO: 196044 - DNA, 20 bp, synthetic construct
  source 1..20: mol_type = other DNA
ggctccagaggcttttcctg

SEQ ID NO: 196045 - DNA, 20 bp, synthetic construct
  source 1..20: mol_type = other DNA
tggctccagaggcttttcct

SEQ ID NO: 196046 - DNA, 20 bp, synthetic construct
  source 1..20: mol_type = other DNA
ctggctccagaggcttttcc

SEQ ID NO: 196047 - DNA, 20 bp, synthetic construct
  source 1..20: mol_type = other DNA
tctggctccagaggcttttc

SEQ ID NO: 196048 - DNA, 20 bp, synthetic construct
  source 1..20: mol_type = other DNA
ttctggctccagaggctttt

SEQ ID NO: 196049 - DNA, 20 bp, synthetic construct
  source 1..20: mol_type = other DNA
tttctggctccagaggcttt

SEQ ID NO: 196050 - DNA, 20 bp, synthetic construct
  source 1..20: mol_type = other DNA
gtttctggctccagaggctt

SEQ ID NO: 196051 - DNA, 20 bp, synthetic construct
  source 1..20: mol_type = other DNA
tgtttctggctccagaggct

SEQ ID NO: 196052 - DNA, 20 bp, synthetic construct
  source 1..20: mol_type = other DNA
ttgtttctggctccagaggc

SEQ ID NO: 196053 - DNA, 20 bp, synthetic construct
  source 1..20: mol_type = other DNA
tttgtttctggctccagagg

SEQ ID NO: 196054 - DNA, 20 bp, synthetic construct
  source 1..20: mol_type = other DNA
ttttgtttctggctccagag

SEQ ID NO: 196055 - DNA, 20 bp, synthetic construct
  source 1..20: mol_type = other DNA
gttttgtttctggctccaga

SEQ ID NO: 196056 - DNA, 20 bp, synthetic construct
  source 1..20: mol_type = other DNA
tgttttgtttctggctccag

SEQ ID NO: 196057 - DNA, 20 bp, synthetic construct
  source 1..20: mol_type = other DNA
ttgttttgtttctggctcca

SEQ ID NO: 196058 - DNA, 20 bp, synthetic construct
  source 1..20: mol_type = other DNA
tttgttttgtttctggctcc

SEQ ID NO: 196059 - DNA, 20 bp, synthetic construct
  source 1..20: mol_type = other DNA
ttttgttttgtttctggctc

SEQ ID NO: 196060 - DNA, 20 bp, synthetic construct
  source 1..20: mol_type = other DNA
tttttgttttgtttctggct

SEQ ID NO: 196061 - DNA, 20 bp, synthetic construct
  source 1..20: mol_type = other DNA
ttttttgttttgtttctggc

SEQ ID NO: 196062 - DNA, 20 bp, synthetic construct
  source 1..20: mol_type = other DNA
tttttttgttttgtttctgg

SEQ ID NO: 196063 - DNA, 20 bp, synthetic construct
  source 1..20: mol_type = other DNA
ttttttttgttttgtttctg

SEQ ID NO: 196064 - DNA, 20 bp, synthetic construct
  source 1..20: mol_type = other DNA
tttttttttgttttgtttct

SEQ ID NO: 196065 - DNA, 20 bp, synthetic construct
  source 1..20: mol_type = other DNA
ttttttttttgttttgtttc

SEQ ID NO: 196066 - DNA, 20 bp, synthetic construct
  source 1..20: mol_type = other DNA
attttttttttgttttgttt

SEQ ID NO: 196067 - DNA, 20 bp, synthetic construct
  source 1..20: mol_type = other DNA
cattttttttttgttttgtt

SEQ ID NO: 196068 - DNA, 20 bp, synthetic construct
  source 1..20: mol_type = other DNA
ccattttttttttgttttgt

SEQ ID NO: 196069 - DNA, 20 bp, synthetic construct
  source 1..20: mol_type = other DNA
accattttttttttgttttg

SEQ ID NO: 196070 - DNA, 20 bp, synthetic construct
  source 1..20: mol_type = other DNA
caccattttttttttgtttt

SEQ ID NO: 196071 - DNA, 20 bp, synthetic construct
  source 1..20: mol_type = other DNA
acaccattttttttttgttt

SEQ ID NO: 196072 - DNA, 20 bp, synthetic construct
  source 1..20: mol_type = other DNA
aacaccattttttttttgtt

SEQ ID NO: 196073 - DNA, 20 bp, synthetic construct
  source 1..20: mol_type = other DNA
taacaccattttttttttgt

SEQ ID NO: 196074 - DNA, 20 bp, synthetic construct
  source 1..20: mol_type = other DNA
ttaacaccattttttttttg

SEQ ID NO: 196075 - DNA, 20 bp, synthetic construct
  source 1..20: mol_type = other DNA
gttaacaccatttttttttt

SEQ ID NO: 196076 - DNA, 20 bp, synthetic construct
  source 1..20: mol_type = other DNA
agttaacaccattttttttt

SEQ ID NO: 196077 - DNA, 20 bp, synthetic construct
  source 1..20: mol_type = other DNA
tagttaacaccatttttttt

SEQ ID NO: 196078 - DNA, 20 bp, synthetic construct
  source 1..20: mol_type = other DNA
ttagttaacaccattttttt

SEQ ID NO: 196079 - DNA, 20 bp, synthetic construct
  source 1..20: mol_type = other DNA
tttagttaacaccatttttt

SEQ ID NO: 196080 - DNA, 20 bp, synthetic construct
  source 1..20: mol_type = other DNA
gtttagttaacaccattttt

SEQ ID NO: 196081 - DNA, 20 bp, synthetic construct
  source 1..20: mol_type = other DNA
agtttagttaacaccatttt

SEQ ID NO: 196082 - DNA, 20 bp, synthetic construct
  source 1..20: mol_type = other DNA
gagtttagttaacaccattt

SEQ ID NO: 196083 - DNA, 20 bp, synthetic construct
  source 1..20: mol_type = other DNA
tgagtttagttaacaccatt

SEQ ID NO: 196084 - DNA, 20 bp, synthetic construct
  source 1..20: mol_type = other DNA
ctgagtttagttaacaccat

SEQ ID NO: 196085 - DNA, 20 bp, synthetic construct
  source 1..20: mol_type = other DNA
actgagtttagttaacacca

SEQ ID NO: 196086 - DNA, 20 bp, synthetic construct
  source 1..20: mol_type = other DNA
gactgagtttagttaacacc

SEQ ID NO: 196087 - DNA, 20 bp, synthetic construct
  source 1..20: mol_type = other DNA
agactgagtttagttaacac

SEQ ID NO: 196088 - DNA, 20 bp, synthetic construct
  source 1..20: mol_type = other DNA
gagactgagtttagttaaca

SEQ ID NO: 196089 - DNA, 20 bp, synthetic construct
  source 1..20: mol_type = other DNA
tgagactgagtttagttaac

SEQ ID NO: 196090 - DNA, 20 bp, synthetic construct
  source 1..20: mol_type = other DNA
ttgagactgagtttagttaa

SEQ ID NO: 196091 - DNA, 20 bp, synthetic construct
  source 1..20: mol_type = other DNA
tttgagactgagtttagtta

SEQ ID NO: 196092 - DNA, 20 bp, synthetic construct
  source 1..20: mol_type = other DNA
atttgagactgagtttagtt

SEQ ID NO: 196093 - DNA, 20 bp, synthetic construct
  source 1..20: mol_type = other DNA
gatttgagactgagtttagt

SEQ ID NO: 196094 - DNA, 20 bp, synthetic construct
  source 1..20: mol_type = other DNA
ggatttgagactgagtttag

SEQ ID NO: 196095 - DNA, 20 bp, synthetic construct
  source 1..20: mol_type = other DNA
aggatttgagactgagttta

SEQ ID NO: 196096 - DNA, 20 bp, synthetic construct
  source 1..20: mol_type = other DNA
caggatttgagactgagttt

SEQ ID NO: 196097 - DNA, 20 bp, synthetic construct
  source 1..20: mol_type = other DNA
tcaggatttgagactgagtt

SEQ ID NO: 196098 - DNA, 20 bp, synthetic construct
  source 1..20: mol_type = other DNA
ttcaggatttgagactgagt

SEQ ID NO: 196099 - DNA, 20 bp, synthetic construct
  source 1..20: mol_type = other DNA
attcaggatttgagactgag

SEQ ID NO: 196100 - DNA, 20 bp, synthetic construct
  source 1..20: mol_type = other DNA
tattcaggatttgagactga

SEQ ID NO: 196101 - DNA, 20 bp, synthetic construct
  source 1..20: mol_type = other DNA
ctattcaggatttgagactg

SEQ ID NO: 196102 - DNA, 20 bp, synthetic construct
  source 1..20: mol_type = other DNA
cctattcaggatttgagact

SEQ ID NO: 196103 - DNA, 20 bp, synthetic construct
  source 1..20: mol_type = other DNA
tcctattcaggatttgagac

SEQ ID NO: 196104 - DNA, 20 bp, synthetic construct
  source 1..20: mol_type = other DNA
gtcctattcaggatttgaga

SEQ ID NO: 196105 - DNA, 20 bp, synthetic construct
  source 1..20: mol_type = other DNA
agtcctattcaggatttgag

SEQ ID NO: 196106 - DNA, 20 bp, synthetic construct
  source 1..20: mol_type = other DNA
gagtcctattcaggatttga

SEQ ID NO: 196107 - DNA, 20 bp, synthetic construct
  source 1..20: mol_type = other DNA
tgagtcctattcaggatttg

SEQ ID NO: 196108 - DNA, 20 bp, synthetic construct
  source 1..20: mol_type = other DNA
ttgagtcctattcaggattt

SEQ ID NO: 196109 - DNA, 20 bp, synthetic construct
  source 1..20: mol_type = other DNA
cttgagtcctattcaggatt

SEQ ID NO: 196110 - DNA, 20 bp, synthetic construct
  source 1..20: mol_type = other DNA
acttgagtcctattcaggat

SEQ ID NO: 196111 - DNA, 20 bp, synthetic construct
  source 1..20: mol_type = other DNA
gacttgagtcctattcagga

SEQ ID NO: 196112 - DNA, 20 bp, synthetic construct
  source 1..20: mol_type = other DNA
tgacttgagtcctattcagg

SEQ ID NO: 196113 - DNA, 20 bp, synthetic construct
  source 1..20: mol_type = other DNA
ttgacttgagtcctattcag

SEQ ID NO: 196114 - DNA, 20 bp, synthetic construct
  source 1..20: mol_type = other DNA
cttgacttgagtcctattca

SEQ ID NO: 196115 - DNA, 20 bp, synthetic construct
  source 1..20: mol_type = other DNA
gcttgacttgagtcctattc

SEQ ID NO: 196116 - DNA, 20 bp, synthetic construct
  source 1..20: mol_type = other DNA
tgcttgacttgagtcctatt

SEQ ID NO: 196117 - DNA, 20 bp, synthetic construct
  source 1..20: mol_type = other DNA
ttgcttgacttgagtcctat

SEQ ID NO: 196118 - DNA, 20 bp, synthetic construct
  source 1..20: mol_type = other DNA
tttgcttgacttgagtccta

SEQ ID NO: 196119 - DNA, 20 bp, synthetic construct
  source 1..20: mol_type = other DNA
ttttgcttgacttgagtcct

SEQ ID NO: 196120 - DNA, 20 bp, synthetic construct
  source 1..20: mol_type = other DNA
attttgcttgacttgagtcc

SEQ ID NO: 196121 - DNA, 20 bp, synthetic construct
  source 1..20: mol_type = other DNA
tattttgcttgacttgagtc

SEQ ID NO: 196122 - DNA, 20 bp, synthetic construct
  source 1..20: mol_type = other DNA
ttattttgcttgacttgagt

SEQ ID NO: 196123 - DNA, 20 bp, synthetic construct
  source 1..20: mol_type = other DNA
attattttgcttgacttgag

SEQ ID NO: 196124 - DNA, 20 bp, synthetic construct
  source 1..20: mol_type = other DNA
aattattttgcttgacttga

SEQ ID NO: 196125 - DNA, 20 bp, synthetic construct
  source 1..20: mol_type = other DNA
taattattttgcttgacttg

SEQ ID NO: 196126 - DNA, 20 bp, synthetic construct
  source 1..20: mol_type = other DNA
ttaattattttgcttgactt

SEQ ID NO: 196127 - DNA, 20 bp, synthetic construct
  source 1..20: mol_type = other DNA
tttaattattttgcttgact

SEQ ID NO: 196128 - DNA, 20 bp, synthetic construct
  source 1..20: mol_type = other DNA
ctttaattattttgcttgac

SEQ ID NO: 196129 - DNA, 20 bp, synthetic construct
  source 1..20: mol_type = other DNA
cctttaattattttgcttga

SEQ ID NO: 196130 - DNA, 20 bp, synthetic construct
  source 1..20: mol_type = other DNA
tcctttaattattttgcttg

SEQ ID NO: 196131 - DNA, 20 bp, synthetic construct
  source 1..20: mol_type = other DNA
ctcctttaattattttgctt

SEQ ID NO: 196132 - DNA, 20 bp, synthetic construct
  source 1..20: mol_type = other DNA
actcctttaattattttgct

SEQ ID NO: 196133 - DNA, 20 bp, synthetic construct
  source 1..20: mol_type = other DNA
aactcctttaattattttgc

SEQ ID NO: 196134 - DNA, 20 bp, synthetic construct
  source 1..20: mol_type = other DNA
taactcctttaattattttg

SEQ ID NO: 196135 - DNA, 20 bp, synthetic construct
  source 1..20: mol_type = other DNA
ctaactcctttaattatttt

SEQ ID NO: 196136 - DNA, 20 bp, synthetic construct
  source 1..20: mol_type = other DNA
gctaactcctttaattattt

SEQ ID NO: 196137 - DNA, 20 bp, synthetic construct
  source 1..20: mol_type = other DNA
tgctaactcctttaattatt

SEQ ID NO: 196138 - DNA, 20 bp, synthetic construct
  source 1..20: mol_type = other DNA
ttgctaactcctttaattat

SEQ ID NO: 196139 - DNA, 20 bp, synthetic construct
  source 1..20: mol_type = other DNA
tttgctaactcctttaatta

SEQ ID NO: 196140 - DNA, 20 bp, synthetic construct
  source 1..20: mol_type = other DNA
ctttgctaactcctttaatt

SEQ ID NO: 196141 - DNA, 20 bp, synthetic construct
  source 1..20: mol_type = other DNA
cctttgctaactcctttaat

SEQ ID NO: 196142 - DNA, 20 bp, synthetic construct
  source 1..20: mol_type = other DNA
ccctttgctaactcctttaa

SEQ ID NO: 196143 - DNA, 20 bp, synthetic construct
  source 1..20: mol_type = other DNA
gccctttgctaactccttta

SEQ ID NO: 196144 - DNA, 20 bp, synthetic construct
  source 1..20: mol_type = other DNA
tgccctttgctaactccttt

SEQ ID NO: 196145 - DNA, 20 bp, synthetic construct
  source 1..20: mol_type = other DNA
ttgccctttgctaactcctt

SEQ ID NO: 196146 - DNA, 20 bp, synthetic construct
  source 1..20: mol_type = other DNA
cttgccctttgctaactcct

SEQ ID NO: 196147 - DNA, 20 bp, synthetic construct
  source 1..20: mol_type = other DNA
acttgccctttgctaactcc

SEQ ID NO: 196148 - DNA, 20 bp, synthetic construct
  source 1..20: mol_type = other DNA
gacttgccctttgctaactc

SEQ ID NO: 196149 - DNA, 20 bp, synthetic construct
  source 1..20: mol_type = other DNA
tgacttgccctttgctaact

SEQ ID NO: 196150 - DNA, 20 bp, synthetic construct
  source 1..20: mol_type = other DNA
ctgacttgccctttgctaac

SEQ ID NO: 196151 - DNA, 20 bp, synthetic construct
  source 1..20: mol_type = other DNA
tctgacttgccctttgctaa

SEQ ID NO: 196152 - DNA, 20 bp, synthetic construct
  source 1..20: mol_type = other DNA
ctctgacttgccctttgcta

SEQ ID NO: 196153 - DNA, 20 bp, synthetic construct
  source 1..20: mol_type = other DNA
tctctgacttgccctttgct

SEQ ID NO: 196154 - DNA, 20 bp, synthetic construct
  source 1..20: mol_type = other DNA
ctctctgacttgccctttgc

SEQ ID NO: 196155 - DNA, 20 bp, synthetic construct
  source 1..20: mol_type = other DNA
tctctctgacttgccctttg

SEQ ID NO: 196156 - DNA, 20 bp, synthetic construct
  source 1..20: mol_type = other DNA
gtctctctgacttgcccttt

SEQ ID NO: 196157 - DNA, 20 bp, synthetic construct
  source 1..20: mol_type = other DNA
ggtctctctgacttgccctt

SEQ ID NO: 196158 - DNA, 20 bp, synthetic construct
  source 1..20: mol_type = other DNA
cggtctctctgacttgccct

SEQ ID NO: 196159 - DNA, 20 bp, synthetic construct
  source 1..20: mol_type = other DNA
tcggtctctctgacttgccc

SEQ ID NO: 196160 - DNA, 20 bp, synthetic construct
  source 1..20: mol_type = other DNA
ctcggtctctctgacttgcc

SEQ ID NO: 196161 - DNA, 20 bp, synthetic construct
  source 1..20: mol_type = other DNA
gctcggtctctctgacttgc

SEQ ID NO: 196162 - DNA, 20 bp, synthetic construct
  source 1..20: mol_type = other DNA
tgctcggtctctctgacttg

SEQ ID NO: 196163 - DNA, 20 bp, synthetic construct
  source 1..20: mol_type = other DNA
ttgctcggtctctctgactt

SEQ ID NO: 196164 - DNA, 20 bp, synthetic construct
  source 1..20: mol_type = other DNA
gttgctcggtctctctgact

SEQ ID NO: 196165 - DNA, 20 bp, synthetic construct
  source 1..20: mol_type = other DNA
tgttgctcggtctctctgac

SEQ ID NO: 196166 - DNA, 20 bp, synthetic construct
  source 1..20: mol_type = other DNA
gtgttgctcggtctctctga

SEQ ID NO: 196167 - DNA, 20 bp, synthetic construct
  source 1..20: mol_type = other DNA
ggtgttgctcggtctctctg

SEQ ID NO: 196168 - DNA, 20 bp, synthetic construct
  source 1..20: mol_type = other DNA
tggtgttgctcggtctctct

SEQ ID NO: 196169 - DNA, 20 bp, synthetic construct
  source 1..20: mol_type = other DNA
ttggtgttgctcggtctctc

SEQ ID NO: 196170 - DNA, 20 bp, synthetic construct
  source 1..20: mol_type = other DNA
attggtgttgctcggtctct

SEQ ID NO: 196171 - DNA, 20 bp, synthetic construct
  source 1..20: mol_type = other DNA
cattggtgttgctcggtctc

SEQ ID NO: 196172 - DNA, 20 bp, synthetic construct
  source 1..20: mol_type = other DNA
acattggtgttgctcggtct

SEQ ID NO: 196173 - DNA, 20 bp, synthetic construct
  source 1..20: mol_type = other DNA
gacattggtgttgctcggtc

SEQ ID NO: 196174 - DNA, 20 bp, synthetic construct
  source 1..20: mol_type = other DNA
agacattggtgttgctcggt

SEQ ID NO: 196175 - DNA, 20 bp, synthetic construct
  source 1..20: mol_type = other DNA
aagacattggtgttgctcgg

SEQ ID NO: 196176 - DNA, 20 bp, synthetic construct
  source 1..20: mol_type = other DNA
gaagacattggtgttgctcg

SEQ ID NO: 196177 - DNA, 20 bp, synthetic construct
  source 1..20: mol_type = other DNA
ggaagacattggtgttgctc

SEQ ID NO: 196178 - DNA, 20 bp, synthetic construct
  source 1..20: mol_type = other DNA
cggaagacattggtgttgct

SEQ ID NO: 196179 - DNA, 20 bp, synthetic construct
  source 1..20: mol_type = other DNA
ccggaagacattggtgttgc

SEQ ID NO: 196180 - DNA, 20 bp, synthetic construct
  source 1..20: mol_type = other DNA
cccggaagacattggtgttg

SEQ ID NO: 196181 - DNA, 20 bp, synthetic construct
  source 1..20: mol_type = other DNA
tcccggaagacattggtgtt

SEQ ID NO: 196182 - DNA, 20 bp, synthetic construct
  source 1..20: mol_type = other DNA
ctcccggaagacattggtgt

SEQ ID NO: 196183 - DNA, 20 bp, synthetic construct
  source 1..20: mol_type = other DNA
gctcccggaagacattggtg

SEQ ID NO: 196184 - DNA, 20 bp, synthetic construct
  source 1..20: mol_type = other DNA
ggctcccggaagacattggt

SEQ ID NO: 196185 - DNA, 20 bp, synthetic construct
  source 1..20: mol_type = other DNA
gggctcccggaagacattgg

SEQ ID NO: 196186 - DNA, 20 bp, synthetic construct
  source 1..20: mol_type = other DNA
agggctcccggaagacattg

SEQ ID NO: 196187 - DNA, 20 bp, synthetic construct
  source 1..20: mol_type = other DNA
cagggctcccggaagacatt

SEQ ID NO: 196188 - DNA, 20 bp, synthetic construct
  source 1..20: mol_type = other DNA
acagggctcccggaagacat

SEQ ID NO: 196189 - DNA, 20 bp, synthetic construct
  source 1..20: mol_type = other DNA
cacagggctcccggaagaca

SEQ ID NO: 196190 - DNA, 20 bp, synthetic construct
  source 1..20: mol_type = other DNA
ccacagggctcccggaagac

SEQ ID NO: 196191 - DNA, 20 bp, synthetic construct
  source 1..20: mol_type = other DNA
gccacagggctcccggaaga

SEQ ID NO: 196192 - DNA, 20 bp, synthetic construct
  source 1..20: mol_type = other DNA
cgccacagggctcccggaag

SEQ ID NO: 196193 - DNA, 20 bp, synthetic construct
  source 1..20: mol_type = other DNA
tcgccacagggctcccggaa

SEQ ID NO: 196194 - DNA, 20 bp, synthetic construct
  source 1..20: mol_type = other DNA
ctcgccacagggctcccgga

SEQ ID NO: 196195 - DNA, 20 bp, synthetic construct
  source 1..20: mol_type = other DNA
actcgccacagggctcccgg

SEQ ID NO: 196196 - DNA, 20 bp, synthetic construct
  source 1..20: mol_type = other DNA
cactcgccacagggctcccg

SEQ ID NO: 196197 - DNA, 20 bp, synthetic construct
  source 1..20: mol_type = other DNA
tcactcgccacagggctccc

SEQ ID NO: 196198 - DNA, 20 bp, synthetic construct
  source 1..20: mol_type = other DNA
gtcactcgccacagggctcc

SEQ ID NO: 196199 - DNA, 20 bp, synthetic construct
  source 1..20: mol_type = other DNA
tgtcactcgccacagggctc

SEQ ID NO: 196200 - DNA, 20 bp, synthetic construct
  source 1..20: mol_type = other DNA
ctgtcactcgccacagggct

SEQ ID NO: 196201 - DNA, 20 bp, synthetic construct
  source 1..20: mol_type = other DNA
tctgtcactcgccacagggc

SEQ ID NO: 196202 - DNA, 20 bp, synthetic construct
  source 1..20: mol_type = other DNA
ctctgtcactcgccacaggg

SEQ ID NO: 196203 - DNA, 20 bp, synthetic construct
  source 1..20: mol_type = other DNA
gctctgtcactcgccacagg

SEQ ID NO: 196204 - DNA, 20 bp, synthetic construct
  source 1..20: mol_type = other DNA
ggctctgtcactcgccacag

SEQ ID NO: 196205 - DNA, 20 bp, synthetic construct
  source 1..20: mol_type = other DNA
aggctctgtcactcgccaca

SEQ ID NO: 196206 - DNA, 20 bp, synthetic construct
  source 1..20: mol_type = other DNA
caggctctgtcactcgccac

SEQ ID NO: 196207 - DNA, 20 bp, synthetic construct
  source 1..20: mol_type = other DNA
ccaggctctgtcactcgcca

SEQ ID NO: 196208 - DNA, 20 bp, synthetic construct
  source 1..20: mol_type = other DNA
tccaggctctgtcactcgcc

SEQ ID NO: 196209 - DNA, 20 bp, synthetic construct
  source 1..20: mol_type = other DNA
gtccaggctctgtcactcgc

SEQ ID NO: 196210 - DNA, 20 bp, synthetic construct
  source 1..20: mol_type = other DNA
agtccaggctctgtcactcg

SEQ ID NO: 196211 - DNA, 20 bp, synthetic construct
  source 1..20: mol_type = other DNA
gagtccaggctctgtcactc

SEQ ID NO: 196212 - DNA, 20 bp, synthetic construct
  source 1..20: mol_type = other DNA
agagtccaggctctgtcact

SEQ ID NO: 196213 - DNA, 20 bp, synthetic construct
  source 1..20: mol_type = other DNA
cagagtccaggctctgtcac

SEQ ID NO: 196214 - DNA, 20 bp, synthetic construct
  source 1..20: mol_type = other DNA
ccagagtccaggctctgtca

SEQ ID NO: 196215 - DNA, 20 bp, synthetic construct
  source 1..20: mol_type = other DNA
tccagagtccaggctctgtc

SEQ ID NO: 196216 - DNA, 20 bp, synthetic construct
  source 1..20: mol_type = other DNA
ctccagagtccaggctctgt

SEQ ID NO: 196217 - DNA, 20 bp, synthetic construct
  source 1..20: mol_type = other DNA
actccagagtccaggctctg

SEQ ID NO: 196218 - DNA, 20 bp, synthetic construct
  source 1..20: mol_type = other DNA
tactccagagtccaggctct

SEQ ID NO: 196219 - DNA, 20 bp, synthetic construct
  source 1..20: mol_type = other DNA
ctactccagagtccaggctc

SEQ ID NO: 196220 - DNA, 20 bp, synthetic construct
  source 1..20: mol_type = other DNA
tctactccagagtccaggct

SEQ ID NO: 196221 - DNA, 20 bp, synthetic construct
  source 1..20: mol_type = other DNA
ttctactccagagtccaggc

SEQ ID NO: 196222 - DNA, 20 bp, synthetic construct
  source 1..20: mol_type = other DNA
gttctactccagagtccagg

SEQ ID NO: 196223 - DNA, 20 bp, synthetic construct
  source 1..20: mol_type = other DNA
agttctactccagagtccag

SEQ ID NO: 196224 - DNA, 20 bp, synthetic construct
  source 1..20: mol_type = other DNA
gagttctactccagagtcca

SEQ ID NO: 196225 - DNA, 20 bp, synthetic construct
  source 1..20: mol_type = other DNA
tgagttctactccagagtcc

SEQ ID NO: 196226 - DNA, 20 bp, synthetic construct
  source 1..20: mol_type = other DNA
atgagttctactccagagtc

SEQ ID NO: 196227 - DNA, 20 bp, synthetic construct
  source 1..20: mol_type = other DNA
gatgagttctactccagagt

SEQ ID NO: 196228 - DNA, 20 bp, synthetic construct
  source 1..20: mol_type = other DNA
agatgagttctactccagag

SEQ ID NO: 196229 - DNA, 20 bp, synthetic construct
  source 1..20: mol_type = other DNA
aagatgagttctactccaga

SEQ ID NO: 196230 - DNA, 20 bp, synthetic construct
  source 1..20: mol_type = other DNA
caagatgagttctactccag

SEQ ID NO: 196231 - DNA, 20 bp, synthetic construct
  source 1..20: mol_type = other DNA
acaagatgagttctactcca

SEQ ID NO: 196232 - DNA, 20 bp, synthetic construct
  source 1..20: mol_type = other DNA
cacaagatgagttctactcc

SEQ ID NO: 196233 - DNA, 20 bp, synthetic construct
  source 1..20: mol_type = other DNA
acacaagatgagttctactc

SEQ ID NO: 196234 - DNA, 20 bp, synthetic construct
  source 1..20: mol_type = other DNA
gacacaagatgagttctact

SEQ ID NO: 196235 - DNA, 20 bp, synthetic construct
  source 1..20: mol_type = other DNA
agacacaagatgagttctac

SEQ ID NO: 196236 - DNA, 20 bp, synthetic construct
  source 1..20: mol_type = other DNA
aagacacaagatgagttcta

SEQ ID NO: 196237 - DNA, 20 bp, synthetic construct
  source 1..20: mol_type = other DNA
gaagacacaagatgagttct

SEQ ID NO: 196238 - DNA, 20 bp, synthetic construct
  source 1..20: mol_type = other DNA
agaagacacaagatgagttc

SEQ ID NO: 196239 - DNA, 20 bp, synthetic construct
  source 1..20: mol_type = other DNA
aagaagacacaagatgagtt

SEQ ID NO: 196240 - DNA, 20 bp, synthetic construct
  source 1..20: mol_type = other DNA
gaagaagacacaagatgagt

SEQ ID NO: 196241 - DNA, 20 bp, synthetic construct
  source 1..20: mol_type = other DNA
agaagaagacacaagatgag

SEQ ID NO: 196242 - DNA, 20 bp, synthetic construct
  source 1..20: mol_type = other DNA
cagaagaagacacaagatga

SEQ ID NO: 196243 - DNA, 20 bp, synthetic construct
  source 1..20: mol_type = other DNA
gcagaagaagacacaagatg

SEQ ID NO: 196244 - DNA, 20 bp, synthetic construct
  source 1..20: mol_type = other DNA
ggcagaagaagacacaagat

SEQ ID NO: 196245 - DNA, 20 bp, synthetic construct
  source 1..20: mol_type = other DNA
tggcagaagaagacacaaga

SEQ ID NO: 196246 - DNA, 20 bp, synthetic construct
  source 1..20: mol_type = other DNA
gtggcagaagaagacacaag

SEQ ID NO: 196247 - DNA, 20 bp, synthetic construct
  source 1..20: mol_type = other DNA
agtggcagaagaagacacaa

SEQ ID NO: 196248 - DNA, 20 bp, synthetic construct
  source 1..20: mol_type = other DNA
gagtggcagaagaagacaca

SEQ ID NO: 196249 - DNA, 20 bp, synthetic construct
  source 1..20: mol_type = other DNA
cgagtggcagaagaagacac

SEQ ID NO: 196250 - DNA, 20 bp, synthetic construct
  source 1..20: mol_type = other DNA
acgagtggcagaagaagaca

SEQ ID NO: 196251 - DNA, 20 bp, synthetic construct
  source 1..20: mol_type = other DNA
aacgagtggcagaagaagac

SEQ ID NO: 196252 - DNA, 20 bp, synthetic construct
  source 1..20: mol_type = other DNA
taacgagtggcagaagaaga

SEQ ID NO: 196253 - DNA, 20 bp, synthetic construct
  source 1..20: mol_type = other DNA
ctaacgagtggcagaagaag

SEQ ID NO: 196254 - DNA, 20 bp, synthetic construct
  source 1..20: mol_type = other DNA
gctaacgagtggcagaagaa

SEQ ID NO: 196255 - DNA, 20 bp, synthetic construct
  source 1..20: mol_type = other DNA
agctaacgagtggcagaaga

SEQ ID NO: 196256 - DNA, 20 bp, synthetic construct
  source 1..20: mol_type = other DNA
cagctaacgagtggcagaag

SEQ ID NO: 196257 - DNA, 20 bp, synthetic construct
  source 1..20: mol_type = other DNA
ccagctaacgagtggcagaa

SEQ ID NO: 196258 - DNA, 20 bp, synthetic construct
  source 1..20: mol_type = other DNA
cccagctaacgagtggcaga

SEQ ID NO: 196259 - DNA, 20 bp, synthetic construct
  source 1..20: mol_type = other DNA
acccagctaacgagtggcag

SEQ ID NO: 196260 - DNA, 20 bp, synthetic construct
  source 1..20: mol_type = other DNA
cacccagctaacgagtggca

SEQ ID NO: 196261 - DNA, 20 bp, synthetic construct
  source 1..20: mol_type = other DNA
tcacccagctaacgagtggc

SEQ ID NO: 196262 - DNA, 20 bp, synthetic construct
  source 1..20: mol_type = other DNA
gtcacccagctaacgagtgg

SEQ ID NO: 196263 - DNA, 20 bp, synthetic construct
  source 1..20: mol_type = other DNA
ggtcacccagctaacgagtg

SEQ ID NO: 196264 - DNA, 20 bp, synthetic construct
  source 1..20: mol_type = other DNA
aggtcacccagctaacgagt

SEQ ID NO: 196265 - DNA, 20 bp, synthetic construct
  source 1..20: mol_type = other DNA
aaggtcacccagctaacgag

SEQ ID NO: 196266 - DNA, 20 bp, synthetic construct
  source 1..20: mol_type = other DNA
caaggtcacccagctaacga

SEQ ID NO: 196267 - DNA, 20 bp, synthetic construct
  source 1..20: mol_type = other DNA
tcaaggtcacccagctaacg

SEQ ID NO: 196268 - DNA, 20 bp, synthetic construct
  source 1..20: mol_type = other DNA
ctcaaggtcacccagctaac

SEQ ID NO: 196269 - DNA, 20 bp, synthetic construct
  source 1..20: mol_type = other DNA
gctcaaggtcacccagctaa

SEQ ID NO: 196270 - DNA, 20 bp, synthetic construct
  source 1..20: mol_type = other DNA
ggctcaaggtcacccagcta

SEQ ID NO: 196271 - DNA, 20 bp, synthetic construct
  source 1..20: mol_type = other DNA
tggctcaaggtcacccagct

SEQ ID NO: 196272 - DNA, 20 bp, synthetic construct
  source 1..20: mol_type = other DNA
ttggctcaaggtcacccagc

SEQ ID NO: 196273 - DNA, 20 bp, synthetic construct
  source 1..20: mol_type = other DNA
cttggctcaaggtcacccag

SEQ ID NO: 196274 - DNA, 20 bp, synthetic construct
  source 1..20: mol_type = other DNA
gcttggctcaaggtcaccca

SEQ ID NO: 196275 - DNA, 20 bp, synthetic construct
  source 1..20: mol_type = other DNA
ggcttggctcaaggtcaccc

SEQ ID NO: 196276 - DNA, 20 bp, synthetic construct
  source 1..20: mol_type = other DNA
gggcttggctcaaggtcacc

SEQ ID NO: 196277 - DNA, 20 bp, synthetic construct
  source 1..20: mol_type = other DNA
ggggcttggctcaaggtcac

SEQ ID NO: 196278 - DNA, 20 bp, synthetic construct
  source 1..20: mol_type = other DNA
aggggcttggctcaaggtca

SEQ ID NO: 196279 - DNA, 20 bp, synthetic construct
  source 1..20: mol_type = other DNA
aaggggcttggctcaaggtc

SEQ ID NO: 196280 - DNA, 20 bp, synthetic construct
  source 1..20: mol_type = other DNA
taaggggcttggctcaaggt

SEQ ID NO: 196281 - DNA, 20 bp, synthetic construct
  source 1..20: mol_type = other DNA
ttaaggggcttggctcaagg

SEQ ID NO: 196282 - DNA, 20 bp, synthetic construct
  source 1..20: mol_type = other DNA
gttaaggggcttggctcaag

SEQ ID NO: 196283 - DNA, 20 bp, synthetic construct
  source 1..20: mol_type = other DNA
ggttaaggggcttggctcaa

SEQ ID NO: 196284 - DNA, 20 bp, synthetic construct
  source 1..20: mol_type = other DNA
aggttaaggggcttggctca

SEQ ID NO: 196285 - DNA, 20 bp, synthetic construct
  source 1..20: mol_type = other DNA
gaggttaaggggcttggctc

SEQ ID NO: 196286 - DNA, 20 bp, synthetic construct
  source 1..20: mol_type = other DNA
agaggttaaggggcttggct

SEQ ID NO: 196287 - DNA, 20 bp, synthetic construct
  source 1..20: mol_type = other DNA
aagaggttaaggggcttggc

SEQ ID NO: 196288 - DNA, 20 bp, synthetic construct
  source 1..20: mol_type = other DNA
caagaggttaaggggcttgg

SEQ ID NO: 196289 - DNA, 20 bp, synthetic construct
  source 1..20: mol_type = other DNA
ccaagaggttaaggggcttg

SEQ ID NO: 196290 - DNA, 20 bp, synthetic construct
  source 1..20: mol_type = other DNA
tccaagaggttaaggggctt

SEQ ID NO: 196291 - DNA, 20 bp, synthetic construct
  source 1..20: mol_type = other DNA
gtccaagaggttaaggggct

SEQ ID NO: 196292 - DNA, 20 bp, synthetic construct
  source 1..20: mol_type = other DNA
ggtccaagaggttaaggggc

SEQ ID NO: 196293 - DNA, 20 bp, synthetic construct
  source 1..20: mol_type = other DNA
gggtccaagaggttaagggg

SEQ ID NO: 196294 - DNA, 20 bp, synthetic construct
  source 1..20: mol_type = other DNA
agggtccaagaggttaaggg

SEQ ID NO: 196295 - DNA, 20 bp, synthetic construct
  source 1..20: mol_type = other DNA
tagggtccaagaggttaagg

SEQ ID NO: 196296 - DNA, 20 bp, synthetic construct
  source 1..20: mol_type = other DNA
atagggtccaagaggttaag

SEQ ID NO: 196297 - DNA, 20 bp, synthetic construct
  source 1..20: mol_type = other DNA
catagggtccaagaggttaa

SEQ ID NO: 196298 - DNA, 20 bp, synthetic construct
  source 1..20: mol_type = other DNA
acatagggtccaagaggtta

SEQ ID NO: 196299 - DNA, 20 bp, synthetic construct
  source 1..20: mol_type = other DNA
aacatagggtccaagaggtt

SEQ ID NO: 196300 - DNA, 20 bp, synthetic construct
  source 1..20: mol_type = other DNA
gaacatagggtccaagaggt

SEQ ID NO: 196301 - DNA, 20 bp, synthetic construct
  source 1..20: mol_type = other DNA
agaacatagggtccaagagg

SEQ ID NO: 196302 - DNA, 20 bp, synthetic construct
  source 1..20: mol_type = other DNA
aagaacatagggtccaagag

SEQ ID NO: 196303 - DNA, 20 bp, synthetic construct
  source 1..20: mol_type = other DNA
taagaacatagggtccaaga

SEQ ID NO: 196304 - DNA, 20 bp, synthetic construct
  source 1..20: mol_type = other DNA
ataagaacatagggtccaag

SEQ ID NO: 196305 - DNA, 20 bp, synthetic construct
  source 1..20: mol_type = other DNA
gataagaacatagggtccaa

SEQ ID NO: 196306 - DNA, 20 bp, synthetic construct
  source 1..20: mol_type = other DNA
agataagaacatagggtcca

SEQ ID NO: 196307 - DNA, 20 bp, synthetic construct
  source 1..20: mol_type = other DNA
gagataagaacatagggtcc

SEQ ID NO: 196308 - DNA, 20 bp, synthetic construct
  source 1..20: mol_type = other DNA
agagataagaacatagggtc

SEQ ID NO: 196309 - DNA, 20 bp, synthetic construct
  source 1..20: mol_type = other DNA
tagagataagaacatagggt

SEQ ID NO: 196310 - DNA, 20 bp, synthetic construct
  source 1..20: mol_type = other DNA
ttagagataagaacataggg

SEQ ID NO: 196311 - DNA, 20 bp, synthetic construct
  source 1..20: mol_type = other DNA
cttagagataagaacatagg

SEQ ID NO: 196312 - DNA, 20 bp, synthetic construct
  source 1..20: mol_type = other DNA
acttagagataagaacatag

SEQ ID NO: 196313 - DNA, 20 bp, synthetic construct
  source 1..20: mol_type = other DNA
tacttagagataagaacata

SEQ ID NO: 196314 - DNA, 20 bp, synthetic construct
  source 1..20: mol_type = other DNA
ctacttagagataagaacat

SEQ ID NO: 196315 - DNA, 20 bp, synthetic construct
  source 1..20: mol_type = other DNA
cctacttagagataagaaca

SEQ ID NO: 196316 - DNA, 20 bp, synthetic construct
  source 1..20: mol_type = other DNA
ccctacttagagataagaac

SEQ ID NO: 196317 - DNA, 20 bp, synthetic construct
  source 1..20: mol_type = other DNA
cccctacttagagataagaa

SEQ ID NO: 196318 - DNA, 20 bp, synthetic construct
  source 1..20: mol_type = other DNA
gcccctacttagagataaga

SEQ ID NO: 196319 - DNA, 20 bp, synthetic construct
  source 1..20: mol_type = other DNA
agcccctacttagagataag

SEQ ID NO: 196320 - DNA, 20 bp, synthetic construct
  source 1..20: mol_type = other DNA
cagcccctacttagagataa

SEQ ID NO: 196321 - DNA, 20 bp, synthetic construct
  source 1..20: mol_type = other DNA
ccagcccctacttagagata

SEQ ID NO: 196322 - DNA, 20 bp, synthetic construct
  source 1..20: mol_type = other DNA
accagcccctacttagagat

SEQ ID NO: 196323 - DNA, 20 bp, synthetic construct
  source 1..20: mol_type = other DNA
taccagcccctacttagaga

SEQ ID NO: 196324 - DNA, 20 bp, synthetic construct
  source 1..20: mol_type = other DNA
ttaccagcccctacttagag

SEQ ID NO: 196325 - DNA, 20 bp, synthetic construct
  source 1..20: mol_type = other DNA
attaccagcccctacttaga

SEQ ID NO: 196326 - DNA, 20 bp, synthetic construct
  source 1..20: mol_type = other DNA
tattaccagcccctacttag

SEQ ID NO: 196327 - DNA, 20 bp, synthetic construct
  source 1..20: mol_type = other DNA
atattaccagcccctactta

SEQ ID NO: 196328 - DNA, 20 bp, synthetic construct
  source 1..20: mol_type = other DNA
gatattaccagcccctactt

SEQ ID NO: 196329 - DNA, 20 bp, synthetic construct
  source 1..20: mol_type = other DNA
agatattaccagcccctact

SEQ ID NO: 196330 - DNA, 20 bp, synthetic construct
  source 1..20: mol_type = other DNA
aagatattaccagcccctac

SEQ ID NO: 196331 - DNA, 20 bp, synthetic construct
  source 1..20: mol_type = other DNA
gaagatattaccagccccta

SEQ ID NO: 196332 - DNA, 20 bp, synthetic construct
  source 1..20: mol_type = other DNA
ggaagatattaccagcccct

SEQ ID NO: 196333 - DNA, 20 bp, synthetic construct
  source 1..20: mol_type = other DNA
gggaagatattaccagcccc

SEQ ID NO: 196334 - DNA, 20 bp, synthetic construct
  source 1..20: mol_type = other DNA
ggggaagatattaccagccc

SEQ ID NO: 196335 - DNA, 20 bp, synthetic construct
  source 1..20: mol_type = other DNA
aggggaagatattaccagcc

SEQ ID NO: 196336 - DNA, 20 bp, synthetic construct
  source 1..20: mol_type = other DNA
aaggggaagatattaccagc

SEQ ID NO: 196337 - DNA, 20 bp, synthetic construct
  source 1..20: mol_type = other DNA
aaaggggaagatattaccag

SEQ ID NO: 196338 - DNA, 20 bp, synthetic construct
  source 1..20: mol_type = other DNA
caaaggggaagatattacca

SEQ ID NO: 196339 - DNA, 20 bp, synthetic construct
  source 1..20: mol_type = other DNA
tcaaaggggaagatattacc

SEQ ID NO: 196340 - DNA, 20 bp, synthetic construct
  source 1..20: mol_type = other DNA
ctcaaaggggaagatattac

SEQ ID NO: 196341 - DNA, 20 bp, synthetic construct
  source 1..20: mol_type = other DNA
cctcaaaggggaagatatta

SEQ ID NO: 196342 - DNA, 20 bp, synthetic construct
  source 1..20: mol_type = other DNA
tcctcaaaggggaagatatt

SEQ ID NO: 196343 - DNA, 20 bp, synthetic construct
  source 1..20: mol_type = other DNA
ttcctcaaaggggaagatat

SEQ ID NO: 196344 - DNA, 20 bp, synthetic construct
  source 1..20: mol_type = other DNA
attcctcaaaggggaagata

SEQ ID NO: 196345 - DNA, 20 bp, synthetic construct
  source 1..20: mol_type = other DNA
cattcctcaaaggggaagat

SEQ ID NO: 196346 - DNA, 20 bp, synthetic construct
  source 1..20: mol_type = other DNA
gcattcctcaaaggggaaga

SEQ ID NO: 196347 - DNA, 20 bp, synthetic construct
  source 1..20: mol_type = other DNA
ggcattcctcaaaggggaag

SEQ ID NO: 196348 - DNA, 20 bp, synthetic construct
  source 1..20: mol_type = other DNA
gggcattcctcaaaggggaa

SEQ ID NO: 196349 - DNA, 20 bp, synthetic construct
  source 1..20: mol_type = other DNA
agggcattcctcaaagggga

SEQ ID NO: 196350 - DNA, 20 bp, synthetic construct
  source 1..20: mol_type = other DNA
gagggcattcctcaaagggg

SEQ ID NO: 196351 - DNA, 20 bp, synthetic construct
  source 1..20: mol_type = other DNA
agagggcattcctcaaaggg

SEQ ID NO: 196352 - DNA, 20 bp, synthetic construct
  source 1..20: mol_type = other DNA
tagagggcattcctcaaagg

SEQ ID NO: 196353 - DNA, 20 bp, synthetic construct
  source 1..20: mol_type = other DNA
ttagagggcattcctcaaag

SEQ ID NO: 196354 - DNA, 20 bp, synthetic construct
  source 1..20: mol_type = other DNA
cttagagggcattcctcaaa

SEQ ID NO: 196355 - DNA, 20 bp, synthetic construct
  source 1..20: mol_type = other DNA
ccttagagggcattcctcaa

SEQ ID NO: 196356 - DNA, 20 bp, synthetic construct
  source 1..20: mol_type = other DNA
cccttagagggcattcctca

SEQ ID NO: 196357 - DNA, 20 bp, synthetic construct
  source 1..20: mol_type = other DNA
ccccttagagggcattcctc

SEQ ID NO: 196358 - DNA, 20 bp, synthetic construct
  source 1..20: mol_type = other DNA
accccttagagggcattcct

SEQ ID NO: 196359 - DNA, 20 bp, synthetic construct
  source 1..20: mol_type = other DNA
caccccttagagggcattcc

SEQ ID NO: 196360 - DNA, 20 bp, synthetic construct
  source 1..20: mol_type = other DNA
acaccccttagagggcattc

SEQ ID NO: 196361 - DNA, 20 bp, synthetic construct
  source 1..20: mol_type = other DNA
aacaccccttagagggcatt

SEQ ID NO: 196362 - DNA, 20 bp, synthetic construct
  source 1..20: mol_type = other DNA
caacaccccttagagggcat

SEQ ID NO: 196363 - DNA, 20 bp, synthetic construct
  source 1..20: mol_type = other DNA
acaacaccccttagagggca

SEQ ID NO: 196364 - DNA, 20 bp, synthetic construct
  source 1..20: mol_type = other DNA
cacaacaccccttagagggc

SEQ ID NO: 196365 - DNA, 20 bp, synthetic construct
  source 1..20: mol_type = other DNA
tcacaacaccccttagaggg

SEQ ID NO: 196366 - DNA, 20 bp, synthetic construct
  source 1..20: mol_type = other DNA
ttcacaacaccccttagagg

SEQ ID NO: 196367 - DNA, 20 bp, synthetic construct
  source 1..20: mol_type = other DNA
cttcacaacaccccttagag

SEQ ID NO: 196368 - DNA, 20 bp, synthetic construct
  source 1..20: mol_type = other DNA
tcttcacaacaccccttaga

SEQ ID NO: 196369 - DNA, 20 bp, synthetic construct
  source 1..20: mol_type = other DNA
atcttcacaacaccccttag

SEQ ID NO: 196370 - DNA, 20 bp, synthetic construct
  source 1..20: mol_type = other DNA
aatcttcacaacacccctta

SEQ ID NO: 196371 - DNA, 20 bp, synthetic construct
  source 1..20: mol_type = other DNA
gaatcttcacaacacccctt

SEQ ID NO: 196372 - DNA, 20 bp, synthetic construct
  source 1..20: mol_type = other DNA
cgaatcttcacaacacccct

SEQ ID NO: 196373 - DNA, 20 bp, synthetic construct
  source 1..20: mol_type = other DNA
ccgaatcttcacaacacccc

SEQ ID NO: 196374 - DNA, 20 bp, synthetic construct
  source 1..20: mol_type = other DNA
accgaatcttcacaacaccc

SEQ ID NO: 196375 - DNA, 20 bp, synthetic construct
  source 1..20: mol_type = other DNA
taccgaatcttcacaacacc

SEQ ID NO: 196376 - DNA, 20 bp, synthetic construct
  source 1..20: mol_type = other DNA
ttaccgaatcttcacaacac

SEQ ID NO: 196377 - DNA, 20 bp, synthetic construct
  source 1..20: mol_type = other DNA
cttaccgaatcttcacaaca

SEQ ID NO: 196378 - DNA, 20 bp, synthetic construct
  source 1..20: mol_type = other DNA
ccttaccgaatcttcacaac

SEQ ID NO: 196379 - DNA, 20 bp, synthetic construct
  source 1..20: mol_type = other DNA
accttaccgaatcttcacaa

SEQ ID NO: 196380 - DNA, 20 bp, synthetic construct
  source 1..20: mol_type = other DNA
caccttaccgaatcttcaca

SEQ ID NO: 196381 - DNA, 20 bp, synthetic construct
  source 1..20: mol_type = other DNA
ccaccttaccgaatcttcac

SEQ ID NO: 196382 - DNA, 20 bp, synthetic construct
  source 1..20: mol_type = other DNA
gccaccttaccgaatcttca

SEQ ID NO: 196383 - DNA, 20 bp, synthetic construct
  source 1..20: mol_type = other DNA
tgccaccttaccgaatcttc

SEQ ID NO: 196384 - DNA, 20 bp, synthetic construct
  source 1..20: mol_type = other DNA
ctgccaccttaccgaatctt

SEQ ID NO: 196385 - DNA, 20 bp, synthetic construct
  source 1..20: mol_type = other DNA
cctgccaccttaccgaatct

SEQ ID NO: 196386 - DNA, 20 bp, synthetic construct
  source 1..20: mol_type = other DNA
ccctgccaccttaccgaatc

SEQ ID NO: 196387 - DNA, 20 bp, synthetic construct
  source 1..20: mol_type = other DNA
cccctgccaccttaccgaat

SEQ ID NO: 196388 - DNA, 20 bp, synthetic construct
  source 1..20: mol_type = other DNA
acccctgccaccttaccgaa

SEQ ID NO: 196389 - DNA, 20 bp, synthetic construct
  source 1..20: mol_type = other DNA
tacccctgccaccttaccga

SEQ ID NO: 196390 - DNA, 20 bp, synthetic construct
  source 1..20: mol_type = other DNA
ctacccctgccaccttaccg

SEQ ID NO: 196391 - DNA, 20 bp, synthetic construct
  source 1..20: mol_type = other DNA
cctacccctgccaccttacc

SEQ ID NO: 196392 - DNA, 20 bp, synthetic construct
  source 1..20: mol_type = other DNA
tcctacccctgccaccttac

SEQ ID NO: 196393 - DNA, 20 bp, synthetic construct
  source 1..20: mol_type = other DNA
gtcctacccctgccacctta

SEQ ID NO: 196394 - DNA, 20 bp, synthetic construct
  source 1..20: mol_type = other DNA
agtcctacccctgccacctt

SEQ ID NO: 196395 - DNA, 20 bp, synthetic construct
  source 1..20: mol_type = other DNA
gagtcctacccctgccacct

SEQ ID NO: 196396 - DNA, 20 bp, synthetic construct
  source 1..20: mol_type = other DNA
ggagtcctacccctgccacc

SEQ ID NO: 196397 - DNA, 20 bp, synthetic construct
  source 1..20: mol_type = other DNA
aggagtcctacccctgccac

SEQ ID NO: 196398 - DNA, 20 bp, synthetic construct
  source 1..20: mol_type = other DNA
caggagtcctacccctgcca

SEQ ID NO: 196399 - DNA, 20 bp, synthetic construct
  source 1..20: mol_type = other DNA
ccaggagtcctacccctgcc

SEQ ID NO: 196400 - DNA, 20 bp, synthetic construct
  source 1..20: mol_type = other DNA
gccaggagtcctacccctgc

SEQ ID NO: 196401 - DNA, 20 bp, synthetic construct
  source 1..20: mol_type = other DNA
ggccaggagtcctacccctg

SEQ ID NO: 196402 - DNA, 20 bp, synthetic construct
  source 1..20: mol_type = other DNA
tggccaggagtcctacccct

SEQ ID NO: 196403 - DNA, 20 bp, synthetic construct
  source 1..20: mol_type = other DNA
ctggccaggagtcctacccc

SEQ ID NO: 196404 - DNA, 20 bp, synthetic construct
  source 1..20: mol_type = other DNA
tctggccaggagtcctaccc

SEQ ID NO: 196405 - DNA, 20 bp, synthetic construct
  source 1..20: mol_type = other DNA
ttctggccaggagtcctacc

SEQ ID NO: 196406 - DNA, 20 bp, synthetic construct
  source 1..20: mol_type = other DNA
tttctggccaggagtcctac

SEQ ID NO: 196407 - DNA, 20 bp, synthetic construct
  source 1..20: mol_type = other DNA
gtttctggccaggagtccta

SEQ ID NO: 196408 - DNA, 20 bp, synthetic construct
  source 1..20: mol_type = other DNA
tgtttctggccaggagtcct

SEQ ID NO: 196409 - DNA, 20 bp, synthetic construct
  source 1..20: mol_type = other DNA
ctgtttctggccaggagtcc

SEQ ID NO: 196410 - DNA, 20 bp, synthetic construct
  source 1..20: mol_type = other DNA
cctgtttctggccaggagtc

SEQ ID NO: 196411 - DNA, 20 bp, synthetic construct
  source 1..20: mol_type = other DNA
gcctgtttctggccaggagt

SEQ ID NO: 196412 - DNA, 20 bp, synthetic construct
  source 1..20: mol_type = other DNA
tgcctgtttctggccaggag

SEQ ID NO: 196413 - DNA, 20 bp, synthetic construct
  source 1..20: mol_type = other DNA
gtgcctgtttctggccagga

SEQ ID NO: 196414 - DNA, 20 bp, synthetic construct
  source 1..20: mol_type = other DNA
tgtgcctgtttctggccagg

SEQ ID NO: 196415 - DNA, 20 bp, synthetic construct
  source 1..20: mol_type = other DNA
atgtgcctgtttctggccag

SEQ ID NO: 196416 - DNA, 20 bp, synthetic construct
  source 1..20: mol_type = other DNA
tatgtgcctgtttctggcca

SEQ ID NO: 196417 - DNA, 20 bp, synthetic construct
  source 1..20: mol_type = other DNA
ttatgtgcctgtttctggcc

SEQ ID NO: 196418 - DNA, 20 bp, synthetic construct
  source 1..20: mol_type = other DNA
attatgtgcctgtttctggc

SEQ ID NO: 196419 - DNA, 20 bp, synthetic construct
  source 1..20: mol_type = other DNA
tattatgtgcctgtttctgg

SEQ ID NO: 196420 - DNA, 20 bp, synthetic construct
  source 1..20: mol_type = other DNA
ttattatgtgcctgtttctg

SEQ ID NO: 196421 - DNA, 20 bp, synthetic construct
  source 1..20: mol_type = other DNA
tttattatgtgcctgtttct

SEQ ID NO: 196422 - DNA, 20 bp, synthetic construct
  source 1..20: mol_type = other DNA
atttattatgtgcctgtttc

SEQ ID NO: 196423 - DNA, 20 bp, synthetic construct
  source 1..20: mol_type = other DNA
catttattatgtgcctgttt

SEQ ID NO: 196424 - DNA, 20 bp, synthetic construct
  source 1..20: mol_type = other DNA
gcatttattatgtgcctgtt

SEQ ID NO: 196425 - DNA, 20 bp, synthetic construct
  source 1..20: mol_type = other DNA
agcatttattatgtgcctgt

SEQ ID NO: 196426 - DNA, 20 bp, synthetic construct
  source 1..20: mol_type = other DNA
tagcatttattatgtgcctg

SEQ ID NO: 196427 - DNA, 20 bp, synthetic construct
  source 1..20: mol_type = other DNA
ttagcatttattatgtgcct

SEQ ID NO: 196428 - DNA, 20 bp, synthetic construct
  source 1..20: mol_type = other DNA
cttagcatttattatgtgcc

SEQ ID NO: 196429 - DNA, 20 bp, synthetic construct
  source 1..20: mol_type = other DNA
acttagcatttattatgtgc

SEQ ID NO: 196430 - DNA, 20 bp, synthetic construct
  source 1..20: mol_type = other DNA
gacttagcatttattatgtg

SEQ ID NO: 196431 - DNA, 20 bp, synthetic construct
  source 1..20: mol_type = other DNA
agacttagcatttattatgt

SEQ ID NO: 196432 - DNA, 20 bp, synthetic construct
  source 1..20: mol_type = other DNA
gagacttagcatttattatg

SEQ ID NO: 196433 - DNA, 20 bp, synthetic construct
  source 1..20: mol_type = other DNA
agagacttagcatttattat

SEQ ID NO: 196434 - DNA, 20 bp, synthetic construct
  source 1..20: mol_type = other DNA
gagagacttagcatttatta

SEQ ID NO: 196435 - DNA, 20 bp, synthetic construct
  source 1..20: mol_type = other DNA
ggagagacttagcatttatt

SEQ ID NO: 196436 - DNA, 20 bp, synthetic construct
  source 1..20: mol_type = other DNA
aggagagacttagcatttat

SEQ ID NO: 196437 - DNA, 20 bp, synthetic construct
  source 1..20: mol_type = other DNA
aaggagagacttagcattta

SEQ ID NO: 196438 - DNA, 20 bp, synthetic construct
  source 1..20: mol_type = other DNA
gaaggagagacttagcattt

SEQ ID NO: 196439 - DNA, 20 bp, synthetic construct
  source 1..20: mol_type = other DNA
agaaggagagacttagcatt

SEQ ID NO: 196440 - DNA, 20 bp, synthetic construct
  source 1..20: mol_type = other DNA
gagaaggagagacttagcat

SEQ ID NO: 196441 - DNA, 20 bp, synthetic construct
  source 1..20: mol_type = other DNA
agagaaggagagacttagca

SEQ ID NO: 196442 - DNA, 20 bp, synthetic construct
  source 1..20: mol_type = other DNA
gagagaaggagagacttagc

SEQ ID NO: 196443 - DNA, 20 bp, synthetic construct
  source 1..20: mol_type = other DNA
ggagagaaggagagacttag

SEQ ID NO: 196444 - DNA, 20 bp, synthetic construct
  source 1..20: mol_type = other DNA
tggagagaaggagagactta

SEQ ID NO: 196445 - DNA, 20 bp, synthetic construct
  source 1..20: mol_type = other DNA
gtggagagaaggagagactt

SEQ ID NO: 196446 - DNA, 20 bp, synthetic construct
  source 1..20: mol_type = other DNA
ggtggagagaaggagagact

SEQ ID NO: 196447 - DNA, 20 bp, synthetic construct
  source 1..20: mol_type = other DNA
aggtggagagaaggagagac

SEQ ID NO: 196448 - DNA, 20 bp, synthetic construct
  source 1..20: mol_type = other DNA
caggtggagagaaggagaga

SEQ ID NO: 196449 - DNA, 20 bp, synthetic construct
  source 1..20: mol_type = other DNA
gcaggtggagagaaggagag

SEQ ID NO: 196450 - DNA, 20 bp, synthetic construct
  source 1..20: mol_type = other DNA
agcaggtggagagaaggaga

SEQ ID NO: 196451 - DNA, 20 bp, synthetic construct
  source 1..20: mol_type = other DNA
cagcaggtggagagaaggag

SEQ ID NO: 196452 - DNA, 20 bp, synthetic construct
  source 1..20: mol_type = other DNA
ccagcaggtggagagaagga

SEQ ID NO: 196453 - DNA, 20 bp, synthetic construct
  source 1..20: mol_type = other DNA
tccagcaggtggagagaagg

SEQ ID NO: 196454 - DNA, 20 bp, synthetic construct
  source 1..20: mol_type = other DNA
atccagcaggtggagagaag

SEQ ID NO: 196455 - DNA, 20 bp, synthetic construct
  source 1..20: mol_type = other DNA
catccagcaggtggagagaa

SEQ ID NO: 196456 - DNA, 20 bp, synthetic construct
  source 1..20: mol_type = other DNA
gcatccagcaggtggagaga

SEQ ID NO: 196457 - DNA, 20 bp, synthetic construct
  source 1..20: mol_type = other DNA
agcatccagcaggtggagag

SEQ ID NO: 196458 - DNA, 20 bp, synthetic construct
  source 1..20: mol_type = other DNA
cagcatccagcaggtggaga

SEQ ID NO: 196459 - DNA, 20 bp, synthetic construct
  source 1..20: mol_type = other DNA
acagcatccagcaggtggag

SEQ ID NO: 196460 - DNA, 20 bp, synthetic construct
  source 1..20: mol_type = other DNA
tacagcatccagcaggtgga

SEQ ID NO: 196461 - DNA, 20 bp, synthetic construct
  source 1..20: mol_type = other DNA
ctacagcatccagcaggtgg

SEQ ID NO: 196462 - DNA, 20 bp, synthetic construct
  source 1..20: mol_type = other DNA
tctacagcatccagcaggtg

SEQ ID NO: 196463 - DNA, 20 bp, synthetic construct
  source 1..20: mol_type = other DNA
atctacagcatccagcaggt

SEQ ID NO: 196464 - DNA, 20 bp, synthetic construct
  source 1..20: mol_type = other DNA
tatctacagcatccagcagg

SEQ ID NO: 196465 - DNA, 20 bp, synthetic construct
  source 1..20: mol_type = other DNA
gtatctacagcatccagcag

SEQ ID NO: 196466 - DNA, 20 bp, synthetic construct
  source 1..20: mol_type = other DNA
agtatctacagcatccagca

SEQ ID NO: 196467 - DNA, 20 bp, synthetic construct
  source 1..20: mol_type = other DNA
tagtatctacagcatccagc

SEQ ID NO: 196468 - DNA, 20 bp, synthetic construct
  source 1..20: mol_type = other DNA
ttagtatctacagcatccag

SEQ ID NO: 196469 - DNA, 20 bp, synthetic construct
  source 1..20: mol_type = other DNA
cttagtatctacagcatcca

SEQ ID NO: 196470 - DNA, 20 bp, synthetic construct
  source 1..20: mol_type = other DNA
ccttagtatctacagcatcc

SEQ ID NO: 196471 - DNA, 20 bp, synthetic construct
  source 1..20: mol_type = other DNA
tccttagtatctacagcatc

SEQ ID NO: 196472 - DNA, 20 bp, synthetic construct
  source 1..20: mol_type = other DNA
atccttagtatctacagcat

SEQ ID NO: 196473 - DNA, 20 bp, synthetic construct
  source 1..20: mol_type = other DNA
aatccttagtatctacagca

SEQ ID NO: 196474 - DNA, 20 bp, synthetic construct
  source 1..20: mol_type = other DNA
aaatccttagtatctacagc

SEQ ID NO: 196475 - DNA, 20 bp, synthetic construct
  source 1..20: mol_type = other DNA
gaaatccttagtatctacag

SEQ ID NO: 196476 - DNA, 20 bp, synthetic construct
  source 1..20: mol_type = other DNA
cgaaatccttagtatctaca

SEQ ID NO: 196477 - DNA, 20 bp, synthetic construct
  source 1..20: mol_type = other DNA
tcgaaatccttagtatctac

SEQ ID NO: 196478 - DNA, 20 bp, synthetic construct
  source 1..20: mol_type = other DNA
atcgaaatccttagtatcta

SEQ ID NO: 196479 - DNA, 20 bp, synthetic construct
  source 1..20: mol_type = other DNA
catcgaaatccttagtatct

SEQ ID NO: 196480 - DNA, 20 bp, synthetic construct
  source 1..20: mol_type = other DNA
acatcgaaatccttagtatc

SEQ ID NO: 196481 - DNA, 20 bp, synthetic construct
  source 1..20: mol_type = other DNA
cacatcgaaatccttagtat

SEQ ID NO: 196482 - DNA, 20 bp, synthetic construct
  source 1..20: mol_type = other DNA
tcacatcgaaatccttagta

SEQ ID NO: 196483 - DNA, 20 bp, synthetic construct
  source 1..20: mol_type = other DNA
ttcacatcgaaatccttagt

SEQ ID NO: 196484 - DNA, 20 bp, synthetic construct
  source 1..20: mol_type = other DNA
attcacatcgaaatccttag

SEQ ID NO: 196485 - DNA, 20 bp, synthetic construct
  source 1..20: mol_type = other DNA
cattcacatcgaaatcctta

SEQ ID NO: 196486 - DNA, 20 bp, synthetic construct
  source 1..20: mol_type = other DNA
tcattcacatcgaaatcctt

SEQ ID NO: 196487 - DNA, 20 bp, synthetic construct
  source 1..20: mol_type = other DNA
ctcattcacatcgaaatcct

SEQ ID NO: 196488 - DNA, 20 bp, synthetic construct
  source 1..20: mol_type = other DNA
tctcattcacatcgaaatcc

SEQ ID NO: 196489 - DNA, 20 bp, synthetic construct
  source 1..20: mol_type = other DNA
gtctcattcacatcgaaatc

SEQ ID NO: 196490 - DNA, 20 bp, synthetic construct
  source 1..20: mol_type = other DNA
tgtctcattcacatcgaaat

SEQ ID NO: 196491 - DNA, 20 bp, synthetic construct
  source 1..20: mol_type = other DNA
ttgtctcattcacatcgaaa

SEQ ID NO: 196492 - DNA, 20 bp, synthetic construct
  source 1..20: mol_type = other DNA
tttgtctcattcacatcgaa

SEQ ID NO: 196493 - DNA, 20 bp, synthetic construct
  source 1..20: mol_type = other DNA
ttttgtctcattcacatcga

SEQ ID NO: 196494 - DNA, 20 bp, synthetic construct
  source 1..20: mol_type = other DNA
gttttgtctcattcacatcg

SEQ ID NO: 196495 - DNA, 20 bp, synthetic construct
  source 1..20: mol_type = other DNA
ggttttgtctcattcacatc

SEQ ID NO: 196496 - DNA, 20 bp, synthetic construct
  source 1..20: mol_type = other DNA
gggttttgtctcattcacat

SEQ ID NO: 196497 - DNA, 20 bp, synthetic construct
  source 1..20: mol_type = other DNA
ggggttttgtctcattcaca

SEQ ID NO: 196498 - DNA, 20 bp, synthetic construct
  source 1..20: mol_type = other DNA
aggggttttgtctcattcac

SEQ ID NO: 196499 - DNA, 20 bp, synthetic construct
  source 1..20: mol_type = other DNA
caggggttttgtctcattca

SEQ ID NO: 196500 - DNA, 20 bp, synthetic construct
  source 1..20: mol_type = other DNA
gcaggggttttgtctcattc

SEQ ID NO: 196501 - DNA, 20 bp, synthetic construct
  source 1..20: mol_type = other DNA
ggcaggggttttgtctcatt

SEQ ID NO: 196502 - DNA, 20 bp, synthetic construct
  source 1..20: mol_type = other DNA
aggcaggggttttgtctcat

SEQ ID NO: 196503 - DNA, 20 bp, synthetic construct
  source 1..20: mol_type = other DNA
aaggcaggggttttgtctca

SEQ ID NO: 196504 - DNA, 20 bp, synthetic construct
  source 1..20: mol_type = other DNA
gaaggcaggggttttgtctc

SEQ ID NO: 196505 - DNA, 20 bp, synthetic construct
  source 1..20: mol_type = other DNA
ggaaggcaggggttttgtct

SEQ ID NO: 196506 - DNA, 20 bp, synthetic construct
  source 1..20: mol_type = other DNA
tggaaggcaggggttttgtc

SEQ ID NO: 196507 - DNA, 20 bp, synthetic construct
  source 1..20: mol_type = other DNA
ctggaaggcaggggttttgt

SEQ ID NO: 196508 - DNA, 20 bp, synthetic construct
  source 1..20: mol_type = other DNA
cctggaaggcaggggttttg

SEQ ID NO: 196509 - DNA, 20 bp, synthetic construct
  source 1..20: mol_type = other DNA
tcctggaaggcaggggtttt

SEQ ID NO: 196510 - DNA, 20 bp, synthetic construct
  source 1..20: mol_type = other DNA
ctcctggaaggcaggggttt

SEQ ID NO: 196511 - DNA, 20 bp, synthetic construct
  source 1..20: mol_type = other DNA
gctcctggaaggcaggggtt

SEQ ID NO: 196512 - DNA, 20 bp, synthetic construct
  source 1..20: mol_type = other DNA
ggctcctggaaggcaggggt

SEQ ID NO: 196513 - DNA, 20 bp, synthetic construct
  source 1..20: mol_type = other DNA
aggctcctggaaggcagggg

SEQ ID NO: 196514 - DNA, 20 bp, synthetic construct
  source 1..20: mol_type = other DNA
aaggctcctggaaggcaggg

SEQ ID NO: 196515 - DNA, 20 bp, synthetic construct
  source 1..20: mol_type = other DNA
aaaggctcctggaaggcagg

SEQ ID NO: 196516 - DNA, 20 bp, synthetic construct
  source 1..20: mol_type = other DNA
caaaggctcctggaaggcag

SEQ ID NO: 196517 - DNA, 20 bp, synthetic construct
  source 1..20: mol_type = other DNA
tcaaaggctcctggaaggca

SEQ ID NO: 196518 - DNA, 20 bp, synthetic construct
  source 1..20: mol_type = other DNA
ctcaaaggctcctggaaggc

SEQ ID NO: 196519 - DNA, 20 bp, synthetic construct
  source 1..20: mol_type = other DNA
tctcaaaggctcctggaagg

SEQ ID NO: 196520 - DNA, 20 bp, synthetic construct
  source 1..20: mol_type = other DNA
ttctcaaaggctcctggaag

SEQ ID NO: 196521 - DNA, 20 bp, synthetic construct
  source 1..20: mol_type = other DNA
attctcaaaggctcctggaa

SEQ ID NO: 196522 - DNA, 20 bp, synthetic construct
  source 1..20: mol_type = other DNA
gattctcaaaggctcctgga

SEQ ID NO: 196523 - DNA, 20 bp, synthetic construct
  source 1..20: mol_type = other DNA
tgattctcaaaggctcctgg

SEQ ID NO: 196524 - DNA, 20 bp, synthetic construct
  source 1..20: mol_type = other DNA
ctgattctcaaaggctcctg

SEQ ID NO: 196525 - DNA, 20 bp, synthetic construct
  source 1..20: mol_type = other DNA
tctgattctcaaaggctcct

SEQ ID NO: 196526 - DNA, 20 bp, synthetic construct
  source 1..20: mol_type = other DNA
ctctgattctcaaaggctcc

SEQ ID NO: 196527 - DNA, 20 bp, synthetic construct
  source 1..20: mol_type = other DNA
tctctgattctcaaaggctc

SEQ ID NO: 196528 - DNA, 20 bp, synthetic construct
  source 1..20: mol_type = other DNA
ttctctgattctcaaaggct

SEQ ID NO: 196529 - DNA, 20 bp, synthetic construct
  source 1..20: mol_type = other DNA
gttctctgattctcaaaggc

SEQ ID NO: 196530 - DNA, 20 bp, synthetic construct
  source 1..20: mol_type = other DNA
agttctctgattctcaaagg

SEQ ID NO: 196531 - DNA, 20 bp, synthetic construct
  source 1..20: mol_type = other DNA
tagttctctgattctcaaag

SEQ ID NO: 196532 - DNA, 20 bp, synthetic construct
  source 1..20: mol_type = other DNA
ctagttctctgattctcaaa

SEQ ID NO: 196533 - DNA, 20 bp, synthetic construct
  source 1..20: mol_type = other DNA
tctagttctctgattctcaa

SEQ ID NO: 196534 - DNA, 20 bp, synthetic construct
  source 1..20: mol_type = other DNA
gtctagttctctgattctca

SEQ ID NO: 196535 - DNA, 20 bp, synthetic construct
  source 1..20: mol_type = other DNA
ggtctagttctctgattctc

SEQ ID NO: 196536 - DNA, 20 bp, synthetic construct
  source 1..20: mol_type = other DNA
gggtctagttctctgattct

SEQ ID NO: 196537 - DNA, 20 bp, synthetic construct
  source 1..20: mol_type = other DNA
tgggtctagttctctgattc

SEQ ID NO: 196538 - DNA, 20 bp, synthetic construct
  source 1..20: mol_type = other DNA
atgggtctagttctctgatt

SEQ ID NO: 196539 - DNA, 20 bp, synthetic construct
  source 1..20: mol_type = other DNA
aatgggtctagttctctgat

SEQ ID NO: 196540 - DNA, 20 bp, synthetic construct
  source 1..20: mol_type = other DNA
aaatgggtctagttctctga

SEQ ID NO: 196541 - DNA, 20 bp, synthetic construct
  source 1..20: mol_type = other DNA
gaaatgggtctagttctctg

SEQ ID NO: 196542 - DNA, 20 bp, synthetic construct
  source 1..20: mol_type = other DNA
ggaaatgggtctagttctct

SEQ ID NO: 196543 - DNA, 20 bp, synthetic construct
  source 1..20: mol_type = other DNA
tggaaatgggtctagttctc

SEQ ID NO: 196544 - DNA, 20 bp, synthetic construct
  source 1..20: mol_type = other DNA
ctggaaatgggtctagttct

SEQ ID NO: 196545 - DNA, 20 bp, synthetic construct
  source 1..20: mol_type = other DNA
tctggaaatgggtctagttc

SEQ ID NO: 196546 - DNA, 20 bp, synthetic construct
  source 1..20: mol_type = other DNA
ttctggaaatgggtctagtt

SEQ ID NO: 196547 - DNA, 20 bp, synthetic construct
  source 1..20: mol_type = other DNA
gttctggaaatgggtctagt

SEQ ID NO: 196548 - DNA, 20 bp, synthetic construct
  source 1..20: mol_type = other DNA
tgttctggaaatgggtctag

SEQ ID NO: 196549 - DNA, 20 bp, synthetic construct
  source 1..20: mol_type = other DNA
ttgttctggaaatgggtcta

SEQ ID NO: 196550 - DNA, 20 bp, synthetic construct
  source 1..20: mol_type = other DNA
cttgttctggaaatgggtct

SEQ ID NO: 196551 - DNA, 20 bp, synthetic construct
  source 1..20: mol_type = other DNA
ccttgttctggaaatgggtc

SEQ ID NO: 196552 - DNA, 20 bp, synthetic construct
  source 1..20: mol_type = other DNA
cccttgttctggaaatgggt

SEQ ID NO: 196553 - DNA, 20 bp, synthetic construct
  source 1..20: mol_type = other DNA
ccccttgttctggaaatggg

SEQ ID NO: 196554 - DNA, 20 bp, synthetic construct
  source 1..20: mol_type = other DNA
tccccttgttctggaaatgg

SEQ ID NO: 196555 - DNA, 20 bp, synthetic construct
  source 1..20: mol_type = other DNA
atccccttgttctggaaatg

SEQ ID NO: 196556 - DNA, 20 bp, synthetic construct
  source 1..20: mol_type = other DNA
catccccttgttctggaaat

SEQ ID NO: 196557 - DNA, 20 bp, synthetic construct
  source 1..20: mol_type = other DNA
gcatccccttgttctggaaa

SEQ ID NO: 196558 - DNA, 20 bp, synthetic construct
  source 1..20: mol_type = other DNA
tgcatccccttgttctggaa

SEQ ID NO: 196559 - DNA, 20 bp, synthetic construct
  source 1..20: mol_type = other DNA
ctgcatccccttgttctgga

SEQ ID NO: 196560 - DNA, 20 bp, synthetic construct
  source 1..20: mol_type = other DNA
cctgcatccccttgttctgg

SEQ ID NO: 196561 - DNA, 20 bp, synthetic construct
  source 1..20: mol_type = other DNA
ccctgcatccccttgttctg

SEQ ID NO: 196562 - DNA, 20 bp, synthetic construct
  source 1..20: mol_type = other DNA
accctgcatccccttgttct

SEQ ID NO: 196563 - DNA, 20 bp, synthetic construct
  source 1..20: mol_type = other DNA
gaccctgcatccccttgttc

SEQ ID NO: 196564 - DNA, 20 bp, synthetic construct
  source 1..20: mol_type = other DNA
agaccctgcatccccttgtt

SEQ ID NO: 196565 - DNA, 20 bp, synthetic construct
  source 1..20: mol_type = other DNA
cagaccctgcatccccttgt

SEQ ID NO: 196566 - DNA, 20 bp, synthetic construct
  source 1..20: mol_type = other DNA
ccagaccctgcatccccttg

SEQ ID NO: 196567 - DNA, 20 bp, synthetic construct
  source 1..20: mol_type = other DNA
tccagaccctgcatcccctt

SEQ ID NO: 196568 - DNA, 20 bp, synthetic construct
  source 1..20: mol_type = other DNA
atccagaccctgcatcccct

SEQ ID NO: 196569 - DNA, 20 bp, synthetic construct
  source 1..20: mol_type = other DNA
tatccagaccctgcatcccc

SEQ ID NO: 196570 - DNA, 20 bp, synthetic construct
  source 1..20: mol_type = other DNA
ttatccagaccctgcatccc

SEQ ID NO: 196571 - DNA, 20 bp, synthetic construct
  source 1..20: mol_type = other DNA
tttatccagaccctgcatcc

SEQ ID NO: 196572 - DNA, 20 bp, synthetic construct
  source 1..20: mol_type = other DNA
ctttatccagaccctgcatc

SEQ ID NO: 196573 - DNA, 20 bp, synthetic construct
  source 1..20: mol_type = other DNA
actttatccagaccctgcat

SEQ ID NO: 196574 - DNA, 20 bp, synthetic construct
  source 1..20: mol_type = other DNA
aactttatccagaccctgca

SEQ ID NO: 196575 - DNA, 20 bp, synthetic construct
  source 1..20: mol_type = other DNA
aaactttatccagaccctgc

SEQ ID NO: 196576 - DNA, 20 bp, synthetic construct
  source 1..20: mol_type = other DNA
aaaactttatccagaccctg

SEQ ID NO: 196577 - DNA, 20 bp, synthetic construct
  source 1..20: mol_type = other DNA
caaaactttatccagaccct

SEQ ID NO: 196578 - DNA, 20 bp, synthetic construct
  source 1..20: mol_type = other DNA
ccaaaactttatccagaccc

SEQ ID NO: 196579 - DNA, 20 bp, synthetic construct
  source 1..20: mol_type = other DNA
cccaaaactttatccagacc

SEQ ID NO: 196580 - DNA, 20 bp, synthetic construct
  source 1..20: mol_type = other DNA
ccccaaaactttatccagac

SEQ ID NO: 196581 - DNA, 20 bp, synthetic construct
  source 1..20: mol_type = other DNA
tccccaaaactttatccaga

SEQ ID NO: 196582 - DNA, 20 bp, synthetic construct
  source 1..20: mol_type = other DNA
atccccaaaactttatccag

SEQ ID NO: 196583 - DNA, 20 bp, synthetic construct
  source 1..20: mol_type = other DNA
gatccccaaaactttatcca

SEQ ID NO: 196584 - DNA, 20 bp, synthetic construct
  source 1..20: mol_type = other DNA
tgatccccaaaactttatcc

SEQ ID NO: 196585 - DNA, 20 bp, synthetic construct
  source 1..20: mol_type = other DNA
ttgatccccaaaactttatc

SEQ ID NO: 196586 - DNA, 20 bp, synthetic construct
  source 1..20: mol_type = other DNA
attgatccccaaaactttat

SEQ ID NO: 196587 - DNA, 20 bp, synthetic construct
  source 1..20: mol_type = other DNA
tattgatccccaaaacttta

SEQ ID NO: 196588 - DNA, 20 bp, synthetic construct
  source 1..20: mol_type = other DNA
ctattgatccccaaaacttt

SEQ ID NO: 196589 - DNA, 20 bp, synthetic construct
  source 1..20: mol_type = other DNA
tctattgatccccaaaactt

SEQ ID NO: 196590 - DNA, 20 bp, synthetic construct
  source 1..20: mol_type = other DNA
ctctattgatccccaaaact

SEQ ID NO: 196591 - DNA, 20 bp, synthetic construct
  source 1..20: mol_type = other DNA
gctctattgatccccaaaac

SEQ ID NO: 196592 - DNA, 20 bp, synthetic construct
  source 1..20: mol_type = other DNA
tgctctattgatccccaaaa

SEQ ID NO: 196593 - DNA, 20 bp, synthetic construct
  source 1..20: mol_type = other DNA
ctgctctattgatccccaaa

SEQ ID NO: 196594 - DNA, 20 bp, synthetic construct
  source 1..20: mol_type = other DNA
tctgctctattgatccccaa

SEQ ID NO: 196595 - DNA, 20 bp, synthetic construct
  source 1..20: mol_type = other DNA
ctctgctctattgatcccca

SEQ ID NO: 196596 - DNA, 20 bp, synthetic construct
  source 1..20: mol_type = other DNA
cctctgctctattgatcccc

SEQ ID NO: 196597 - DNA, 20 bp, synthetic construct
  source 1..20: mol_type = other DNA
ccctctgctctattgatccc

SEQ ID NO: 196598 - DNA, 20 bp, synthetic construct
  source 1..20: mol_type = other DNA
gccctctgctctattgatcc

SEQ ID NO: 196599 - DNA, 20 bp, synthetic construct
  source 1..20: mol_type = other DNA
agccctctgctctattgatc

SEQ ID NO: 196600 - DNA, 20 bp, synthetic construct
  source 1..20: mol_type = other DNA
gagccctctgctctattgat

SEQ ID NO: 196601 - DNA, 20 bp, synthetic construct
  source 1..20: mol_type = other DNA
ggagccctctgctctattga

SEQ ID NO: 196602 - DNA, 20 bp, synthetic construct
  source 1..20: mol_type = other DNA
gggagccctctgctctattg

SEQ ID NO: 196603 - DNA, 20 bp, synthetic construct
  source 1..20: mol_type = other DNA
tgggagccctctgctctatt

SEQ ID NO: 196604 - DNA, 20 bp, synthetic construct
  source 1..20: mol_type = other DNA
ctgggagccctctgctctat

SEQ ID NO: 196605 - DNA, 20 bp, synthetic construct
  source 1..20: mol_type = other DNA
tctgggagccctctgctcta

SEQ ID NO: 196606 - DNA, 20 bp, synthetic construct
  source 1..20: mol_type = other DNA
ctctgggagccctctgctct

SEQ ID NO: 196607 - DNA, 20 bp, synthetic construct
  source 1..20: mol_type = other DNA
cctctgggagccctctgctc

SEQ ID NO: 196608 - DNA, 20 bp, synthetic construct
  source 1..20: mol_type = other DNA
tcctctgggagccctctgct

SEQ ID NO: 196609 - DNA, 20 bp, synthetic construct
  source 1..20: mol_type = other DNA
atcctctgggagccctctgc

SEQ ID NO: 196610 - DNA, 20 bp, synthetic construct
  source 1..20: mol_type = other DNA
gatcctctgggagccctctg

SEQ ID NO: 196611 - DNA, 20 bp, synthetic construct
  source 1..20: mol_type = other DNA
ggatcctctgggagccctct

SEQ ID NO: 196612 - DNA, 20 bp, synthetic construct
  source 1..20: mol_type = other DNA
gggatcctctgggagccctc

SEQ ID NO: 196613 - DNA, 20 bp, synthetic construct
  source 1..20: mol_type = other DNA
tgggatcctctgggagccct

SEQ ID NO: 196614 - DNA, 20 bp, synthetic construct
  source 1..20: mol_type = other DNA
atgggatcctctgggagccc

SEQ ID NO: 196615 - DNA, 20 bp, synthetic construct
  source 1..20: mol_type = other DNA
tatgggatcctctgggagcc

SEQ ID NO: 196616 - DNA, 20 bp, synthetic construct
  source 1..20: mol_type = other DNA
ctatgggatcctctgggagc

SEQ ID NO: 196617 - DNA, 20 bp, synthetic construct
  source 1..20: mol_type = other DNA
cctatgggatcctctgggag

SEQ ID NO: 196618 - DNA, 20 bp, synthetic construct
  source 1..20: mol_type = other DNA
ccctatgggatcctctggga

SEQ ID NO: 196619 - DNA, 20 bp, synthetic construct
  source 1..20: mol_type = other DNA
accctatgggatcctctggg

SEQ ID NO: 196620 - DNA, 20 bp, synthetic construct
  source 1..20: mol_type = other DNA
aaccctatgggatcctctgg

SEQ ID NO: 196621 - DNA, 20 bp, synthetic construct
  source 1..20: mol_type = other DNA
caaccctatgggatcctctg

SEQ ID NO: 196622 - DNA, 20 bp, synthetic construct
  source 1..20: mol_type = other DNA
tcaaccctatgggatcctct

SEQ ID NO: 196623 - DNA, 20 bp, synthetic construct
  source 1..20: mol_type = other DNA
gtcaaccctatgggatcctc

SEQ ID NO: 196624 - DNA, 20 bp, synthetic construct
  source 1..20: mol_type = other DNA
agtcaaccctatgggatcct

SEQ ID NO: 196625 - DNA, 20 bp, synthetic construct
  source 1..20: mol_type = other DNA
gagtcaaccctatgggatcc

SEQ ID NO: 196626 - DNA, 20 bp, synthetic construct
  source 1..20: mol_type = other DNA
ggagtcaaccctatgggatc

SEQ ID NO: 196627 - DNA, 20 bp, synthetic construct
  source 1..20: mol_type = other DNA
aggagtcaaccctatgggat

SEQ ID NO: 196628 - DNA, 20 bp, synthetic construct
  source 1..20: mol_type = other DNA
taggagtcaaccctatggga

SEQ ID NO: 196629 - DNA, 20 bp, synthetic construct
  source 1..20: mol_type = other DNA
ttaggagtcaaccctatggg

SEQ ID NO: 196630 - DNA, 20 bp, synthetic construct
  source 1..20: mol_type = other DNA
gttaggagtcaaccctatgg

SEQ ID NO: 196631 - DNA, 20 bp, synthetic construct
  source 1..20: mol_type = other DNA
agttaggagtcaaccctatg

SEQ ID NO: 196632 - DNA, 20 bp, synthetic construct
  source 1..20: mol_type = other DNA
gagttaggagtcaaccctat

SEQ ID NO: 196633 - DNA, 20 bp, synthetic construct
  source 1..20: mol_type = other DNA
tgagttaggagtcaacccta

SEQ ID NO: 196634 - DNA, 20 bp, synthetic construct
  source 1..20: mol_type = other DNA
ttgagttaggagtcaaccct

SEQ ID NO: 196635 - DNA, 20 bp, synthetic construct
  source 1..20: mol_type = other DNA
cttgagttaggagtcaaccc

SEQ ID NO: 196636 - DNA, 20 bp, synthetic construct
  source 1..20: mol_type = other DNA
ccttgagttaggagtcaacc

SEQ ID NO: 196637 - DNA, 20 bp, synthetic construct
  source 1..20: mol_type = other DNA
cccttgagttaggagtcaac

SEQ ID NO: 196638 - DNA, 20 bp, synthetic construct
  source 1..20: mol_type = other DNA
gcccttgagttaggagtcaa

SEQ ID NO: 196639 - DNA, 20 bp, synthetic construct
  source 1..20: mol_type = other DNA
tgcccttgagttaggagtca

SEQ ID NO: 196640 - DNA, 20 bp, synthetic construct
  source 1..20: mol_type = other DNA
atgcccttgagttaggagtc

SEQ ID NO: 196641 - DNA, 20 bp, synthetic construct
  source 1..20: mol_type = other DNA
catgcccttgagttaggagt

SEQ ID NO: 196642 - DNA, 20 bp, synthetic construct
  source 1..20: mol_type = other DNA
tcatgcccttgagttaggag

SEQ ID NO: 196643 - DNA, 20 bp, synthetic construct
  source 1..20: mol_type = other DNA
ctcatgcccttgagttagga

SEQ ID NO: 196644 - DNA, 20 bp, synthetic construct
  source 1..20: mol_type = other DNA
tctcatgcccttgagttagg

SEQ ID NO: 196645 - DNA, 20 bp, synthetic construct
  source 1..20: mol_type = other DNA
gtctcatgcccttgagttag

SEQ ID NO: 196646 - DNA, 20 bp, synthetic construct
  source 1..20: mol_type = other DNA
tgtctcatgcccttgagtta

SEQ ID NO: 196647 - DNA, 20 bp, synthetic construct
  source 1..20: mol_type = other DNA
ttgtctcatgcccttgagtt

SEQ ID NO: 196648 - DNA, 20 bp, synthetic construct
  source 1..20: mol_type = other DNA
gttgtctcatgcccttgagt

SEQ ID NO: 196649 - DNA, 20 bp, synthetic construct
  source 1..20: mol_type = other DNA
ggttgtctcatgcccttgag

SEQ ID NO: 196650 - DNA, 20 bp, synthetic construct
  source 1..20: mol_type = other DNA
gggttgtctcatgcccttga

SEQ ID NO: 196651 - DNA, 20 bp, synthetic construct
  source 1..20: mol_type = other DNA
ggggttgtctcatgcccttg

SEQ ID NO: 196652 - DNA, 20 bp, synthetic construct
  source 1..20: mol_type = other DNA
gggggttgtctcatgccctt

SEQ ID NO: 196653 - DNA, 20 bp, synthetic construct
  source 1..20: mol_type = other DNA
tgggggttgtctcatgccct

SEQ ID NO: 196654 - DNA, 20 bp, synthetic construct
  source 1..20: mol_type = other DNA
ctgggggttgtctcatgccc

SEQ ID NO: 196655 - DNA, 20 bp, synthetic construct
  source 1..20: mol_type = other DNA
cctgggggttgtctcatgcc

SEQ ID NO: 196656 - DNA, 20 bp, synthetic construct
  source 1..20: mol_type = other DNA
tcctgggggttgtctcatgc

SEQ ID NO: 196657 - DNA, 20 bp, synthetic construct
  source 1..20: mol_type = other DNA
ttcctgggggttgtctcatg

SEQ ID NO: 196658 - DNA, 20 bp, synthetic construct
  source 1..20: mol_type = other DNA
cttcctgggggttgtctcat

SEQ ID NO: 196659 - DNA, 20 bp, synthetic construct
  source 1..20: mol_type = other DNA
ccttcctgggggttgtctca

SEQ ID NO: 196660 - DNA, 20 bp, synthetic construct
  source 1..20: mol_type = other DNA
cccttcctgggggttgtctc

SEQ ID NO: 196661 - DNA, 20 bp, synthetic construct
  source 1..20: mol_type = other DNA
gcccttcctgggggttgtct

SEQ ID NO: 196662 - DNA, 20 bp, synthetic construct
  source 1..20: mol_type = other DNA
tgcccttcctgggggttgtc

SEQ ID NO: 196663 - DNA, 20 bp, synthetic construct
  source 1..20: mol_type = other DNA
gtgcccttcctgggggttgt

SEQ ID NO: 196664 - DNA, 20 bp, synthetic construct
  source 1..20: mol_type = other DNA
ggtgcccttcctgggggttg

SEQ ID NO: 196665 - DNA, 20 bp, synthetic construct
  source 1..20: mol_type = other DNA
gggtgcccttcctgggggtt

SEQ ID NO: 196666 - DNA, 20 bp, synthetic construct
  source 1..20: mol_type = other DNA
agggtgcccttcctgggggt

SEQ ID NO: 196667 - DNA, 20 bp, synthetic construct
  source 1..20: mol_type = other DNA
cagggtgcccttcctggggg

SEQ ID NO: 196668 - DNA, 20 bp, synthetic construct
  source 1..20: mol_type = other DNA
ccagggtgcccttcctgggg

SEQ ID NO: 196669 - DNA, 20 bp, synthetic construct
  source 1..20: mol_type = other DNA
tccagggtgcccttcctggg

SEQ ID NO: 196670 - DNA, 20 bp, synthetic construct
  source 1..20: mol_type = other DNA
ttccagggtgcccttcctgg

SEQ ID NO: 196671 - DNA, 20 bp, synthetic construct
  source 1..20: mol_type = other DNA
cttccagggtgcccttcctg

SEQ ID NO: 196672 - DNA, 20 bp, synthetic construct
  source 1..20: mol_type = other DNA
ccttccagggtgcccttcct

SEQ ID NO: 196673 - DNA, 20 bp, synthetic construct
  source 1..20: mol_type = other DNA
cccttccagggtgcccttcc

SEQ ID NO: 196674 - DNA, 20 bp, synthetic construct
  source 1..20: mol_type = other DNA
ccccttccagggtgcccttc

SEQ ID NO: 196675 - DNA, 20 bp, synthetic construct
  source 1..20: mol_type = other DNA
accccttccagggtgccctt

SEQ ID NO: 196676 - DNA, 20 bp, synthetic construct
  source 1..20: mol_type = other DNA
gaccccttccagggtgccct

SEQ ID NO: 196677 - DNA, 20 bp, synthetic construct
  source 1..20: mol_type = other DNA
ggaccccttccagggtgccc

SEQ ID NO: 196678 - DNA, 20 bp, synthetic construct
  source 1..20: mol_type = other DNA
cggaccccttccagggtgcc

SEQ ID NO: 196679 - DNA, 20 bp, synthetic construct
  source 1..20: mol_type = other DNA
ccggaccccttccagggtgc

SEQ ID NO: 196680 - DNA, 20 bp, synthetic construct
  source 1..20: mol_type = other DNA
gccggaccccttccagggtg

SEQ ID NO: 196681 - DNA, 20 bp, synthetic construct
  source 1..20: mol_type = other DNA
agccggaccccttccagggt

SEQ ID NO: 196682 - DNA, 20 bp, synthetic construct
  source 1..20: mol_type = other DNA
cagccggaccccttccaggg

SEQ ID NO: 196683 - DNA, 20 bp, synthetic construct
  source 1..20: mol_type = other DNA
acagccggaccccttccagg

SEQ ID NO: 196684 - DNA, 20 bp, synthetic construct
  source 1..20: mol_type = other DNA
gacagccggaccccttccag

SEQ ID NO: 196685 - DNA, 20 bp, synthetic construct
  source 1..20: mol_type = other DNA
ggacagccggaccccttcca

SEQ ID NO: 196686 - DNA, 20 bp, synthetic construct
  source 1..20: mol_type = other DNA
gggacagccggaccccttcc

SEQ ID NO: 196687 - DNA, 20 bp, synthetic construct
  source 1..20: mol_type = other DNA
agggacagccggaccccttc

SEQ ID NO: 196688 - DNA, 20 bp, synthetic construct
  source 1..20: mol_type = other DNA
cagggacagccggacccctt

SEQ ID NO: 196689 - DNA, 20 bp, synthetic construct
  source 1..20: mol_type = other DNA
tcagggacagccggacccct

SEQ ID NO: 196690 - DNA, 20 bp, synthetic construct
  source 1..20: mol_type = other DNA
atcagggacagccggacccc

SEQ ID NO: 196691 - DNA, 20 bp, synthetic construct
  source 1..20: mol_type = other DNA
aatcagggacagccggaccc

SEQ ID NO: 196692 - DNA, 20 bp, synthetic construct
  source 1..20: mol_type = other DNA
aaatcagggacagccggacc

SEQ ID NO: 196693 - DNA, 20 bp, synthetic construct
  source 1..20: mol_type = other DNA
taaatcagggacagccggac

SEQ ID NO: 196694 - DNA, 20 bp, synthetic construct
  source 1..20: mol_type = other DNA
gtaaatcagggacagccgga

SEQ ID NO: 196695 - DNA, 20 bp, synthetic construct
  source 1..20: mol_type = other DNA
agtaaatcagggacagccgg

SEQ ID NO: 196696 - DNA, 20 bp, synthetic construct
  source 1..20: mol_type = other DNA
aagtaaatcagggacagccg

SEQ ID NO: 196697 - DNA, 20 bp, synthetic construct
  source 1..20: mol_type = other DNA
caagtaaatcagggacagcc

SEQ ID NO: 196698 - DNA, 20 bp, synthetic construct
  source 1..20: mol_type = other DNA
acaagtaaatcagggacagc

SEQ ID NO: 196699 - DNA, 20 bp, synthetic construct
  source 1..20: mol_type = other DNA
cacaagtaaatcagggacag

SEQ ID NO: 196700 - DNA, 20 bp, synthetic construct
  source 1..20: mol_type = other DNA
ccacaagtaaatcagggaca

SEQ ID NO: 196701 - DNA, 20 bp, synthetic construct
  source 1..20: mol_type = other DNA
cccacaagtaaatcagggac

SEQ ID NO: 196702 - DNA, 20 bp, synthetic construct
  source 1..20: mol_type = other DNA
gcccacaagtaaatcaggga

SEQ ID NO: 196703 - DNA, 20 bp, synthetic construct
  source 1..20: mol_type = other DNA
tgcccacaagtaaatcaggg

SEQ ID NO: 196704 - DNA, 20 bp, synthetic construct
  source 1..20: mol_type = other DNA
gtgcccacaagtaaatcagg

SEQ ID NO: 196705 - DNA, 20 bp, synthetic construct
  source 1..20: mol_type = other DNA
agtgcccacaagtaaatcag

SEQ ID NO: 196706 - DNA, 20 bp, synthetic construct
  source 1..20: mol_type = other DNA
cagtgcccacaagtaaatca

SEQ ID NO: 196707 - DNA, 20 bp, synthetic construct
  source 1..20: mol_type = other DNA
ccagtgcccacaagtaaatc

SEQ ID NO: 196708 - DNA, 20 bp, synthetic construct
  source 1..20: mol_type = other DNA
cccagtgcccacaagtaaat

SEQ ID NO: 196709 - DNA, 20 bp, synthetic construct
  source 1..20: mol_type = other DNA
ccccagtgcccacaagtaaa

SEQ ID NO: 196710 - DNA, 20 bp, synthetic construct
  source 1..20: mol_type = other DNA
cccccagtgcccacaagtaa

SEQ ID NO: 196711 - DNA, 20 bp, synthetic construct
  source 1..20: mol_type = other DNA
tcccccagtgcccacaagta

SEQ ID NO: 196712 - DNA, 20 bp, synthetic construct
  source 1..20: mol_type = other DNA
ttcccccagtgcccacaagt

SEQ ID NO: 196713 - DNA, 20 bp, synthetic construct
  source 1..20: mol_type = other DNA
attcccccagtgcccacaag

SEQ ID NO: 196714 - DNA, 20 bp, synthetic construct
  source 1..20: mol_type = other DNA
cattcccccagtgcccacaa

SEQ ID NO: 196715 - DNA, 20 bp, synthetic construct
  source 1..20: mol_type = other DNA
gcattcccccagtgcccaca

SEQ ID NO: 196716 - DNA, 20 bp, synthetic construct
  source 1..20: mol_type = other DNA
ggcattcccccagtgcccac

SEQ ID NO: 196717 - DNA, 20 bp, synthetic construct
  source 1..20: mol_type = other DNA
gggcattcccccagtgccca

SEQ ID NO: 196718 - DNA, 20 bp, synthetic construct
  source 1..20: mol_type = other DNA
cgggcattcccccagtgccc

SEQ ID NO: 196719 - DNA, 20 bp, synthetic construct
  source 1..20: mol_type = other DNA
ccgggcattcccccagtgcc

SEQ ID NO: 196720 - DNA, 20 bp, synthetic construct
  source 1..20: mol_type = other DNA
tccgggcattcccccagtgc

SEQ ID NO: 196721 - DNA, 20 bp, synthetic construct
  source 1..20: mol_type = other DNA
ctccgggcattcccccagtg

SEQ ID NO: 196722 - DNA, 20 bp, synthetic construct
  source 1..20: mol_type = other DNA
gctccgggcattcccccagt

SEQ ID NO: 196723 - DNA, 20 bp, synthetic construct
  source 1..20: mol_type = other DNA
ggctccgggcattcccccag

SEQ ID NO: 196724 - DNA, 20 bp, synthetic construct
  source 1..20: mol_type = other DNA
tggctccgggcattccccca

SEQ ID NO: 196725 - DNA, 20 bp, synthetic construct
  source 1..20: mol_type = other DNA
atggctccgggcattccccc

SEQ ID NO: 196726 - DNA, 20 bp, synthetic construct
  source 1..20: mol_type = other DNA
gatggctccgggcattcccc

SEQ ID NO: 196727 - DNA, 20 bp, synthetic construct
  source 1..20: mol_type = other DNA
ggatggctccgggcattccc

SEQ ID NO: 196728 - DNA, 20 bp, synthetic construct
  source 1..20: mol_type = other DNA
tggatggctccgggcattcc

SEQ ID NO: 196729 - DNA, 20 bp, synthetic construct
  source 1..20: mol_type = other DNA
ctggatggctccgggcattc

SEQ ID NO: 196730 - DNA, 20 bp, synthetic construct
  source 1..20: mol_type = other DNA
gctggatggctccgggcatt

SEQ ID NO: 196731 - DNA, 20 bp, synthetic construct
  source 1..20: mol_type = other DNA
ggctggatggctccgggcat

SEQ ID NO: 196732 - DNA, 20 bp, synthetic construct
  source 1..20: mol_type = other DNA
gggctggatggctccgggca

SEQ ID NO: 196733 - DNA, 20 bp, synthetic construct
  source 1..20: mol_type = other DNA
agggctggatggctccgggc

SEQ ID NO: 196734 - DNA, 20 bp, synthetic construct
  source 1..20: mol_type = other DNA
gagggctggatggctccggg

SEQ ID NO: 196735 - DNA, 20 bp, synthetic construct
  source 1..20: mol_type = other DNA
tgagggctggatggctccgg

SEQ ID NO: 196736 - DNA, 20 bp, synthetic construct
  source 1..20: mol_type = other DNA
ctgagggctggatggctccg

SEQ ID NO: 196737 - DNA, 20 bp, synthetic construct
  source 1..20: mol_type = other DNA
cctgagggctggatggctcc

SEQ ID NO: 196738 - DNA, 20 bp, synthetic construct
  source 1..20: mol_type = other DNA
ccctgagggctggatggctc

SEQ ID NO: 196739 - DNA, 20 bp, synthetic construct
  source 1..20: mol_type = other DNA
gccctgagggctggatggct

SEQ ID NO: 196740 - DNA, 20 bp, synthetic construct
  source 1..20: mol_type = other DNA
agccctgagggctggatggc

SEQ ID NO: 196741 - DNA, 20 bp, synthetic construct
  source 1..20: mol_type = other DNA
gagccctgagggctggatgg

SEQ ID NO: 196742 - DNA, 20 bp, synthetic construct
  source 1..20: mol_type = other DNA
agagccctgagggctggatg

SEQ ID NO: 196743 - DNA, 20 bp, synthetic construct
  source 1..20: mol_type = other DNA
cagagccctgagggctggat

SEQ ID NO: 196744 - DNA, 20 bp, synthetic construct
  source 1..20: mol_type = other DNA
acagagccctgagggctgga

SEQ ID NO: 196745 - DNA, 20 bp, synthetic construct
  source 1..20: mol_type = other DNA
cacagagccctgagggctgg

SEQ ID NO: 196746 - DNA, 20 bp, synthetic construct
  source 1..20: mol_type = other DNA
acacagagccctgagggctg

SEQ ID NO: 196747 - DNA, 20 bp, synthetic construct
  source 1..20: mol_type = other DNA
cacacagagccctgagggct

SEQ ID NO: 196748 - DNA, 20 bp, synthetic construct
  source 1..20: mol_type = other DNA
tcacacagagccctgagggc

SEQ ID NO: 196749 - DNA, 20 bp, synthetic construct
  source 1..20: mol_type = other DNA
atcacacagagccctgaggg

SEQ ID NO: 196750 - DNA, 20 bp, synthetic construct
  source 1..20: mol_type = other DNA
aatcacacagagccctgagg

SEQ ID NO: 196751 - DNA, 20 bp, synthetic construct
  source 1..20: mol_type = other DNA
gaatcacacagagccctgag

SEQ ID NO: 196752 - DNA, 20 bp, synthetic construct
  source 1..20: mol_type = other DNA
agaatcacacagagccctga

SEQ ID NO: 196753 - DNA, 20 bp, synthetic construct
  source 1..20: mol_type = other DNA
cagaatcacacagagccctg

SEQ ID NO: 196754 - DNA, 20 bp, synthetic construct
  source 1..20: mol_type = other DNA
ccagaatcacacagagccct

SEQ ID NO: 196755 - DNA, 20 bp, synthetic construct
  source 1..20: mol_type = other DNA
cccagaatcacacagagccc

SEQ ID NO: 196756 - DNA, 20 bp, synthetic construct
  source 1..20: mol_type = other DNA
acccagaatcacacagagcc

SEQ ID NO: 196757 - DNA, 20 bp, synthetic construct
  source 1..20: mol_type = other DNA
aacccagaatcacacagagc

SEQ ID NO: 196758 - DNA, 20 bp, synthetic construct
  source 1..20: mol_type = other DNA
gaacccagaatcacacagag

SEQ ID NO: 196759 - DNA, 20 bp, synthetic construct
  source 1..20: mol_type = other DNA
ggaacccagaatcacacaga

SEQ ID NO: 196760 - DNA, 20 bp, synthetic construct
  source 1..20: mol_type = other DNA
aggaacccagaatcacacag

SEQ ID NO: 196761 - DNA, 20 bp, synthetic construct
  source 1..20: mol_type = other DNA
gaggaacccagaatcacaca

SEQ ID NO: 196762 - DNA, 20 bp, synthetic construct
  source 1..20: mol_type = other DNA
ggaggaacccagaatcacac

SEQ ID NO: 196763 - DNA, 20 bp, synthetic construct
  source 1..20: mol_type = other DNA
gggaggaacccagaatcaca

SEQ ID NO: 196764 - DNA, 20 bp, synthetic construct
  source 1..20: mol_type = other DNA
tgggaggaacccagaatcac

SEQ ID NO: 196765 - DNA, 20 bp, synthetic construct
  source 1..20: mol_type = other DNA
atgggaggaacccagaatca

SEQ ID NO: 196766 - DNA, 20 bp, synthetic construct
  source 1..20: mol_type = other DNA
tatgggaggaacccagaatc

SEQ ID NO: 196767 - DNA, 20 bp, synthetic construct
  source 1..20: mol_type = other DNA
ttatgggaggaacccagaat

SEQ ID NO: 196768 - DNA, 20 bp, synthetic construct
  source 1..20: mol_type = other DNA
tttatgggaggaacccagaa

SEQ ID NO: 196769 - DNA, 20 bp, synthetic construct
  source 1..20: mol_type = other DNA
ttttatgggaggaacccaga

SEQ ID NO: 196770 - DNA, 20 bp, synthetic construct
  source 1..20: mol_type = other DNA
cttttatgggaggaacccag

SEQ ID NO: 196771 - DNA, 20 bp, synthetic construct
  source 1..20: mol_type = other DNA
tcttttatgggaggaaccca

SEQ ID NO: 196772 - DNA, 20 bp, synthetic construct
  source 1..20: mol_type = other DNA
atcttttatgggaggaaccc

SEQ ID NO: 196773 - DNA, 20 bp, synthetic construct
  source 1..20: mol_type = other DNA
tatcttttatgggaggaacc

SEQ ID NO: 196774 - DNA, 20 bp, synthetic construct
  source 1..20: mol_type = other DNA
ttatcttttatgggaggaac

SEQ ID NO: 196775 - DNA, 20 bp, synthetic construct
  source 1..20: mol_type = other DNA
attatcttttatgggaggaa

SEQ ID NO: 196776 - DNA, 20 bp, synthetic construct
  source 1..20: mol_type = other DNA
gattatcttttatgggagga

SEQ ID NO: 196777 - DNA, 20 bp, synthetic construct
  source 1..20: mol_type = other DNA
tgattatcttttatgggagg

SEQ ID NO: 196778 - DNA, 20 bp, synthetic construct
  source 1..20: mol_type = other DNA
ctgattatcttttatgggag

SEQ ID NO: 196779 - DNA, 20 bp, synthetic construct
  source 1..20: mol_type = other DNA
tctgattatcttttatggga

SEQ ID NO: 196780 - DNA, 20 bp, synthetic construct
  source 1..20: mol_type = other DNA
atctgattatcttttatggg

SEQ ID NO: 196781 - DNA, 20 bp, synthetic construct
  source 1..20: mol_type = other DNA
aatctgattatcttttatgg

SEQ ID NO: 196782 - DNA, 20 bp, synthetic construct
  source 1..20: mol_type = other DNA
gaatctgattatcttttatg

SEQ ID NO: 196783 - DNA, 20 bp, synthetic construct
  source 1..20: mol_type = other DNA
agaatctgattatcttttat

SEQ ID NO: 196784 - DNA, 20 bp, synthetic construct
  source 1..20: mol_type = other DNA
aagaatctgattatctttta

SEQ ID NO: 196785 - DNA, 20 bp, synthetic construct
  source 1..20: mol_type = other DNA
aaagaatctgattatctttt

SEQ ID NO: 196786 - DNA, 20 bp, synthetic construct
  source 1..20: mol_type = other DNA
gaaagaatctgattatcttt

SEQ ID NO: 196787 - DNA, 20 bp, synthetic construct
  source 1..20: mol_type = other DNA
tgaaagaatctgattatctt

SEQ ID NO: 196788 - DNA, 20 bp, synthetic construct
  source 1..20: mol_type = other DNA
gtgaaagaatctgattatct

SEQ ID NO: 196789 - DNA, 20 bp, synthetic construct
  source 1..20: mol_type = other DNA
cgtgaaagaatctgattatc

SEQ ID NO: 196790 - DNA, 20 bp, synthetic construct
  source 1..20: mol_type = other DNA
acgtgaaagaatctgattat

SEQ ID NO: 196791 - DNA, 20 bp, synthetic construct
  source 1..20: mol_type = other DNA
aacgtgaaagaatctgatta

SEQ ID NO: 196792 - DNA, 20 bp, synthetic construct
  source 1..20: mol_type = other DNA
taacgtgaaagaatctgatt

SEQ ID NO: 196793 - DNA, 20 bp, synthetic construct
  source 1..20: mol_type = other DNA
ttaacgtgaaagaatctgat

SEQ ID NO: 196794 - DNA, 20 bp, synthetic construct
  source 1..20: mol_type = other DNA
attaacgtgaaagaatctga

SEQ ID NO: 196795 - DNA, 20 bp, synthetic construct
  source 1..20: mol_type = other DNA
cattaacgtgaaagaatctg

SEQ ID NO: 196796 - DNA, 20 bp, synthetic construct
  source 1..20: mol_type = other DNA
acattaacgtgaaagaatct

SEQ ID NO: 196797 - DNA, 20 bp, synthetic construct
  source 1..20: mol_type = other DNA
gacattaacgtgaaagaatc

SEQ ID NO: 196798 - DNA, 20 bp, synthetic construct
  source 1..20: mol_type = other DNA
agacattaacgtgaaagaat

SEQ ID NO: 196799 - DNA, 20 bp, synthetic construct
  source 1..20: mol_type = other DNA
aagacattaacgtgaaagaa

SEQ ID NO: 196800 - DNA, 20 bp, synthetic construct
  source 1..20: mol_type = other DNA
aaagacattaacgtgaaaga

SEQ ID NO: 196801 - DNA, 20 bp, synthetic construct
  source 1..20: mol_type = other DNA
gaaagacattaacgtgaaag

SEQ ID NO: 196802 - DNA, 20 bp, synthetic construct
  source 1..20: mol_type = other DNA
agaaagacattaacgtgaaa

SEQ ID NO: 196803 - DNA, 20 bp, synthetic construct
  source 1..20: mol_type = other DNA
gagaaagacattaacgtgaa

SEQ ID NO: 196804 - DNA, 20 bp, synthetic construct
  source 1..20: mol_type = other DNA
ggagaaagacattaacgtga

SEQ ID NO: 196805 - DNA, 20 bp, synthetic construct
  source 1..20: mol_type = other DNA
tggagaaagacattaacgtg

SEQ ID NO: 196806 - DNA, 20 bp, synthetic construct
  source 1..20: mol_type = other DNA
gtggagaaagacattaacgt

SEQ ID NO: 196807 - DNA, 20 bp, synthetic construct
  source 1..20: mol_type = other DNA
ggtggagaaagacattaacg

SEQ ID NO: 196808 - DNA, 20 bp, synthetic construct
  source 1..20: mol_type = other DNA
aggtggagaaagacattaac

SEQ ID NO: 196809 - DNA, 20 bp, synthetic construct
  source 1..20: mol_type = other DNA
gaggtggagaaagacattaa

SEQ ID NO: 196810 - DNA, 20 bp, synthetic construct
  source 1..20: mol_type = other DNA
tgaggtggagaaagacatta

SEQ ID NO: 196811 - DNA, 20 bp, synthetic construct
  source 1..20: mol_type = other DNA
atgaggtggagaaagacatt

SEQ ID NO: 196812 - DNA, 20 bp, synthetic construct
  source 1..20: mol_type = other DNA
aatgaggtggagaaagacat

SEQ ID NO: 196813 - DNA, 20 bp, synthetic construct
  source 1..20: mol_type = other DNA
caatgaggtggagaaagaca

SEQ ID NO: 196814 - DNA, 20 bp, synthetic construct
  source 1..20: mol_type = other DNA
gcaatgaggtggagaaagac

SEQ ID NO: 196815 - DNA, 20 bp, synthetic construct
  source 1..20: mol_type = other DNA
tgcaatgaggtggagaaaga

SEQ ID NO: 196816 - DNA, 20 bp, synthetic construct
  source 1..20: mol_type = other DNA
gtgcaatgaggtggagaaag

SEQ ID NO: 196817 - DNA, 20 bp, synthetic construct
  source 1..20: mol_type = other DNA
tgtgcaatgaggtggagaaa

SEQ ID NO: 196818 - DNA, 20 bp, synthetic construct
  source 1..20: mol_type = other DNA
atgtgcaatgaggtggagaa

SEQ ID NO: 196819 - DNA, 20 bp, synthetic construct
  source 1..20: mol_type = other DNA
gatgtgcaatgaggtggaga

SEQ ID NO: 196820 - DNA, 20 bp, synthetic construct
  source 1..20: mol_type = other DNA
tgatgtgcaatgaggtggag

SEQ ID NO: 196821 - DNA, 20 bp, synthetic construct
  source 1..20: mol_type = other DNA
atgatgtgcaatgaggtgga

SEQ ID NO: 196822 - DNA, 20 bp, synthetic construct
  source 1..20: mol_type = other DNA
catgatgtgcaatgaggtgg

SEQ ID NO: 196823 - DNA, 20 bp, synthetic construct
  source 1..20: mol_type = other DNA
gcatgatgtgcaatgaggtg

SEQ ID NO: 196824 - DNA, 20 bp, synthetic construct
  source 1..20: mol_type = other DNA
tgcatgatgtgcaatgaggt

SEQ ID NO: 196825 - DNA, 20 bp, synthetic construct
  source 1..20: mol_type = other DNA
ctgcatgatgtgcaatgagg

SEQ ID NO: 196826 - DNA, 20 bp, synthetic construct
  source 1..20: mol_type = other DNA
gctgcatgatgtgcaatgag

SEQ ID NO: 196827 - DNA, 20 bp, synthetic construct
  source 1..20: mol_type = other DNA
agctgcatgatgtgcaatga

SEQ ID NO: 196828 - DNA, 20 bp, synthetic construct
  source 1..20: mol_type = other DNA
tagctgcatgatgtgcaatg

SEQ ID NO: 196829 - DNA, 20 bp, synthetic construct
  source 1..20: mol_type = other DNA
atagctgcatgatgtgcaat

SEQ ID NO: 196830 - DNA, 20 bp, synthetic construct
  source 1..20: mol_type = other DNA
aatagctgcatgatgtgcaa

SEQ ID NO: 196831 - DNA, 20 bp, synthetic construct
  source 1..20: mol_type = other DNA
gaatagctgcatgatgtgca

SEQ ID NO: 196832 - DNA, 20 bp, synthetic construct
  source 1..20: mol_type = other DNA
tgaatagctgcatgatgtgc

SEQ ID NO: 196833 - DNA, 20 bp, synthetic construct
  source 1..20: mol_type = other DNA
atgaatagctgcatgatgtg

SEQ ID NO: 196834 - DNA, 20 bp, synthetic construct
  source 1..20: mol_type = other DNA
aatgaatagctgcatgatgt

SEQ ID NO: 196835 - DNA, 20 bp, synthetic construct
  source 1..20: mol_type = other DNA
caatgaatagctgcatgatg

SEQ ID NO: 196836 - DNA, 20 bp, synthetic construct
  source 1..20: mol_type = other DNA
tcaatgaatagctgcatgat

SEQ ID NO: 196837 - DNA, 20 bp, synthetic construct
  source 1..20: mol_type = other DNA
gtcaatgaatagctgcatga

SEQ ID NO: 196838 - DNA, 20 bp, synthetic construct
  source 1..20: mol_type = other DNA
agtcaatgaatagctgcatg

SEQ ID NO: 196839 - DNA, 20 bp, synthetic construct
  source 1..20: mol_type = other DNA
gagtcaatgaatagctgcat

SEQ ID NO: 196840 - DNA, 20 bp, synthetic construct
  source 1..20: mol_type = other DNA
tgagtcaatgaatagctgca

SEQ ID NO: 196841 - DNA, 20 bp, synthetic construct
  source 1..20: mol_type = other DNA
ctgagtcaatgaatagctgc

SEQ ID NO: 196842 - DNA, 20 bp, synthetic construct
  source 1..20: mol_type = other DNA
gctgagtcaatgaatagctg

SEQ ID NO: 196843 - DNA, 20 bp, synthetic construct
  source 1..20: mol_type = other DNA
tgctgagtcaatgaatagct

SEQ ID NO: 196844 - DNA, 20 bp, synthetic construct
  source 1..20: mol_type = other DNA
ttgctgagtcaatgaatagc

SEQ ID NO: 196845 - DNA, 20 bp, synthetic construct
  source 1..20: mol_type = other DNA
cttgctgagtcaatgaatag

SEQ ID NO: 196846 - DNA, 20 bp, synthetic construct
  source 1..20: mol_type = other DNA
acttgctgagtcaatgaata

SEQ ID NO: 196847 - DNA, 20 bp, synthetic construct
  source 1..20: mol_type = other DNA
tacttgctgagtcaatgaat

SEQ ID NO: 196848 - DNA, 20 bp, synthetic construct
  source 1..20: mol_type = other DNA
atacttgctgagtcaatgaa

SEQ ID NO: 196849 - DNA, 20 bp, synthetic construct
  source 1..20: mol_type = other DNA
gatacttgctgagtcaatga

SEQ ID NO: 196850 - DNA, 20 bp, synthetic construct
  source 1..20: mol_type = other DNA
tgatacttgctgagtcaatg

SEQ ID NO: 196851 - DNA, 20 bp, synthetic construct
  source 1..20: mol_type = other DNA
ctgatacttgctgagtcaat

SEQ ID NO: 196852 - DNA, 20 bp, synthetic construct
  source 1..20: mol_type = other DNA
gctgatacttgctgagtcaa

SEQ ID NO: 196853 - DNA, 20 bp, synthetic construct
  source 1..20: mol_type = other DNA
agctgatacttgctgagtca

SEQ ID NO: 196854 - DNA, 20 bp, synthetic construct
  source 1..20: mol_type = other DNA
aagctgatacttgctgagtc

SEQ ID NO: 196855 - DNA, 20 bp, synthetic construct
  source 1..20: mol_type = other DNA
aaagctgatacttgctgagt

SEQ ID NO: 196856 - DNA, 20 bp, synthetic construct
  source 1..20: mol_type = other DNA
caaagctgatacttgctgag

SEQ ID NO: 196857 - DNA, 20 bp, synthetic construct
  source 1..20: mol_type = other DNA
gcaaagctgatacttgctga

SEQ ID NO: 196858 - DNA, 20 bp, synthetic construct
  source 1..20: mol_type = other DNA
tgcaaagctgatacttgctg

SEQ ID NO: 196859 - DNA, 20 bp, synthetic construct
  source 1..20: mol_type = other DNA
atgcaaagctgatacttgct

SEQ ID NO: 196860 - DNA, 20 bp, synthetic construct
  source 1..20: mol_type = other DNA
catgcaaagctgatacttgc

SEQ ID NO: 196861 - DNA, 20 bp, synthetic construct
  source 1..20: mol_type = other DNA
gcatgcaaagctgatacttg

SEQ ID NO: 196862 - DNA, 20 bp, synthetic construct
  source 1..20: mol_type = other DNA
cgcatgcaaagctgatactt

SEQ ID NO: 196863 - DNA, 20 bp, synthetic construct
  source 1..20: mol_type = other DNA
tcgcatgcaaagctgatact

SEQ ID NO: 196864 - DNA, 20 bp, synthetic construct
  source 1..20: mol_type = other DNA
gtcgcatgcaaagctgatac

SEQ ID NO: 196865 - DNA, 20 bp, synthetic construct
  source 1..20: mol_type = other DNA
ggtcgcatgcaaagctgata

SEQ ID NO: 196866 - DNA, 20 bp, synthetic construct
  source 1..20: mol_type = other DNA
aggtcgcatgcaaagctgat

SEQ ID NO: 196867 - DNA, 20 bp, synthetic construct
  source 1..20: mol_type = other DNA
aaggtcgcatgcaaagctga

SEQ ID NO: 196868 - DNA, 20 bp, synthetic construct
  source 1..20: mol_type = other DNA
caaggtcgcatgcaaagctg

SEQ ID NO: 196869 - DNA, 20 bp, synthetic construct
  source 1..20: mol_type = other DNA
ccaaggtcgcatgcaaagct

SEQ ID NO: 196870 - DNA, 20 bp, synthetic construct
  source 1..20: mol_type = other DNA
gccaaggtcgcatgcaaagc

SEQ ID NO: 196871 - DNA, 20 bp, synthetic construct
  source 1..20: mol_type = other DNA
ggccaaggtcgcatgcaaag

SEQ ID NO: 196872 - DNA, 20 bp, synthetic construct
  source 1..20: mol_type = other DNA
aggccaaggtcgcatgcaaa

SEQ ID NO: 196873 - DNA, 20 bp, synthetic construct
  source 1..20: mol_type = other DNA
taggccaaggtcgcatgcaa

SEQ ID NO: 196874 - DNA, 20 bp, synthetic construct
  source 1..20: mol_type = other DNA
gtaggccaaggtcgcatgca

SEQ ID NO: 196875 - DNA, 20 bp, synthetic construct
  source 1..20: mol_type = other DNA
ggtaggccaaggtcgcatgc

SEQ ID NO: 196876 - DNA, 20 bp, synthetic construct
  source 1..20: mol_type = other DNA
gggtaggccaaggtcgcatg

SEQ ID NO: 196877 - DNA, 20 bp, synthetic construct
  source 1..20: mol_type = other DNA
tgggtaggccaaggtcgcat

SEQ ID NO: 196878 - DNA, 20 bp, synthetic construct
  source 1..20: mol_type = other DNA
gtgggtaggccaaggtcgca

SEQ ID NO: 196879 - DNA, 20 bp, synthetic construct
  source 1..20: mol_type = other DNA
agtgggtaggccaaggtcgc

SEQ ID NO: 196880 - DNA, 20 bp, synthetic construct
  source 1..20: mol_type = other DNA
aagtgggtaggccaaggtcg

SEQ ID NO: 196881 - DNA, 20 bp, synthetic construct
  source 1..20: mol_type = other DNA
aaagtgggtaggccaaggtc

SEQ ID NO: 196882 - DNA, 20 bp, synthetic construct
  source 1..20: mol_type = other DNA
taaagtgggtaggccaaggt

SEQ ID NO: 196883 - DNA, 20 bp, synthetic construct
  source 1..20: mol_type = other DNA
ctaaagtgggtaggccaagg

SEQ ID NO: 196884 - DNA, 20 bp, synthetic construct
  source 1..20: mol_type = other DNA
gctaaagtgggtaggccaag

SEQ ID NO: 196885 - DNA, 20 bp, synthetic construct
  source 1..20: mol_type = other DNA
agctaaagtgggtaggccaa

SEQ ID NO: 196886 - DNA, 20 bp, synthetic construct
  source 1..20: mol_type = other DNA
aagctaaagtgggtaggcca

SEQ ID NO: 196887 - DNA, 20 bp, synthetic construct
  source 1..20: mol_type = other DNA
aaagctaaagtgggtaggcc

SEQ ID NO: 196888 - DNA, 20 bp, synthetic construct
  source 1..20: mol_type = other DNA
aaaagctaaagtgggtaggc

SEQ ID NO: 196889 - DNA, 20 bp, synthetic construct
  source 1..20: mol_type = other DNA
taaaagctaaagtgggtagg

SEQ ID NO: 196890 - DNA, 20 bp, synthetic construct
  source 1..20: mol_type = other DNA
ctaaaagctaaagtgggtag

SEQ ID NO: 196891 - DNA, 20 bp, synthetic construct
  source 1..20: mol_type = other DNA
actaaaagctaaagtgggta

SEQ ID NO: 196892 - DNA, 20 bp, synthetic construct
  source 1..20: mol_type = other DNA
tactaaaagctaaagtgggt

SEQ ID NO: 196893 - DNA, 20 bp, synthetic construct
  source 1..20: mol_type = other DNA
ttactaaaagctaaagtggg

SEQ ID NO: 196894 - DNA, 20 bp, synthetic construct
  source 1..20: mol_type = other DNA
attactaaaagctaaagtgg

SEQ ID NO: 196895 - DNA, 20 bp, synthetic construct
  source 1..20: mol_type = other DNA
tattactaaaagctaaagtg

SEQ ID NO: 196896 - DNA, 20 bp, synthetic construct
  source 1..20: mol_type = other DNA
ctattactaaaagctaaagt

SEQ ID NO: 196897 - DNA, 20 bp, synthetic construct
  source 1..20: mol_type = other DNA
gctattactaaaagctaaag

SEQ ID NO: 196898 - DNA, 20 bp, synthetic construct
  source 1..20: mol_type = other DNA
agctattactaaaagctaaa

SEQ ID NO: 196899 - DNA, 20 bp, synthetic construct
  source 1..20: mol_type = other DNA
gagctattactaaaagctaa

SEQ ID NO: 196900 - DNA, 20 bp, synthetic construct
  source 1..20: mol_type = other DNA
ggagctattactaaaagcta

SEQ ID NO: 196901 - DNA, 20 bp, synthetic construct
  source 1..20: mol_type = other DNA
gggagctattactaaaagct

SEQ ID NO: 196902 - DNA, 20 bp, synthetic construct
  source 1..20: mol_type = other DNA
agggagctattactaaaagc

SEQ ID NO: 196903 - DNA, 20 bp, synthetic construct
  source 1..20: mol_type = other DNA
aagggagctattactaaaag

SEQ ID NO: 196904 - DNA, 20 bp, synthetic construct
  source 1..20: mol_type = other DNA
gaagggagctattactaaaa

SEQ ID NO: 196905 - DNA, 20 bp, synthetic construct
  source 1..20: mol_type = other DNA
agaagggagctattactaaa

SEQ ID NO: 196906 - DNA, 20 bp, synthetic construct
  source 1..20: mol_type = other DNA
aagaagggagctattactaa

SEQ ID NO: 196907 - DNA, 20 bp, synthetic construct
  source 1..20: mol_type = other DNA
caagaagggagctattacta

SEQ ID NO: 196908 - DNA, 20 bp, synthetic construct
  source 1..20: mol_type = other DNA
tcaagaagggagctattact

SEQ ID NO: 196909 - DNA, 20 bp, synthetic construct
  source 1..20: mol_type = other DNA
ttcaagaagggagctattac

SEQ ID NO: 196910 - DNA, 20 bp, synthetic construct
  source 1..20: mol_type = other DNA
attcaagaagggagctatta

SEQ ID NO: 196911 - DNA, 20 bp, synthetic construct
  source 1..20: mol_type = other DNA
tattcaagaagggagctatt

SEQ ID NO: 196912 - DNA, 20 bp, synthetic construct
  source 1..20: mol_type = other DNA
ttattcaagaagggagctat

SEQ ID NO: 196913 - DNA, 20 bp, synthetic construct
  source 1..20: mol_type = other DNA
attattcaagaagggagcta

SEQ ID NO: 196914 - DNA, 20 bp, synthetic construct
  source 1..20: mol_type = other DNA
tattattcaagaagggagct

SEQ ID NO: 196915 - DNA, 20 bp, synthetic construct
  source 1..20: mol_type = other DNA
gtattattcaagaagggagc

SEQ ID NO: 196916 - DNA, 20 bp, synthetic construct
  source 1..20: mol_type = other DNA
tgtattattcaagaagggag

SEQ ID NO: 196917 - DNA, 20 bp, synthetic construct
  source 1..20: mol_type = other DNA
ttgtattattcaagaaggga

SEQ ID NO: 196918 - DNA, 20 bp, synthetic construct
  source 1..20: mol_type = other DNA
gttgtattattcaagaaggg

SEQ ID NO: 196919 - DNA, 20 bp, synthetic construct
  source 1..20: mol_type = other DNA
ggttgtattattcaagaagg

SEQ ID NO: 196920 - DNA, 20 bp, synthetic construct
  source 1..20: mol_type = other DNA
tggttgtattattcaagaag

SEQ ID NO: 196921 - DNA, 20 bp, synthetic construct
  source 1..20: mol_type = other DNA
ctggttgtattattcaagaa

SEQ ID NO: 196922 - DNA, 20 bp, synthetic construct
  source 1..20: mol_type = other DNA
actggttgtattattcaaga

SEQ ID NO: 196923 - DNA, 20 bp, synthetic construct
  source 1..20: mol_type = other DNA
cactggttgtattattcaag

SEQ ID NO: 196924 - DNA, 20 bp, synthetic construct
  source 1..20: mol_type = other DNA
ccactggttgtattattcaa

SEQ ID NO: 196925 - DNA, 20 bp, synthetic construct
  source 1..20: mol_type = other DNA
cccactggttgtattattca

SEQ ID NO: 196926 - DNA, 20 bp, synthetic construct
  source 1..20: mol_type = other DNA
ccccactggttgtattattc

SEQ ID NO: 196927 - DNA, 20 bp, synthetic construct
  source 1..20: mol_type = other DNA
tccccactggttgtattatt

SEQ ID NO: 196928 - DNA, 20 bp, synthetic construct
  source 1..20: mol_type = other DNA
ttccccactggttgtattat

SEQ ID NO: 196929 - DNA, 20 bp, synthetic construct
  source 1..20: mol_type = other DNA
tttccccactggttgtatta

SEQ ID NO: 196930 - DNA, 20 bp, synthetic construct
  source 1..20: mol_type = other DNA
gtttccccactggttgtatt

SEQ ID NO: 196931 - DNA, 20 bp, synthetic construct
  source 1..20: mol_type = other DNA
tgtttccccactggttgtat

SEQ ID NO: 196932 - DNA, 20 bp, synthetic construct
  source 1..20: mol_type = other DNA
ctgtttccccactggttgta

SEQ ID NO: 196933 - DNA, 20 bp, synthetic construct
  source 1..20: mol_type = other DNA
tctgtttccccactggttgt

SEQ ID NO: 196934 - DNA, 20 bp, synthetic construct
  source 1..20: mol_type = other DNA
ttctgtttccccactggttg

SEQ ID NO: 196935 - DNA, 20 bp, synthetic construct
  source 1..20: mol_type = other DNA
gttctgtttccccactggtt

SEQ ID NO: 196936 - DNA, 20 bp, synthetic construct
  source 1..20: mol_type = other DNA
ggttctgtttccccactggt

SEQ ID NO: 196937 - DNA, 20 bp, synthetic construct
  source 1..20: mol_type = other DNA
aggttctgtttccccactgg

SEQ ID NO: 196938 - DNA, 20 bp, synthetic construct
  source 1..20: mol_type = other DNA
taggttctgtttccccactg

SEQ ID NO: 196939 - DNA, 20 bp, synthetic construct
  source 1..20: mol_type = other DNA
ttaggttctgtttccccact

SEQ ID NO: 196940 - DNA, 20 bp, synthetic construct
  source 1..20: mol_type = other DNA
gttaggttctgtttccccac

SEQ ID NO: 196941 - DNA, 20 bp, synthetic construct
  source 1..20: mol_type = other DNA
agttaggttctgtttcccca

SEQ ID NO: 196942 - DNA, 20 bp, synthetic construct
  source 1..20: mol_type = other DNA
gagttaggttctgtttcccc

SEQ ID NO: 196943 - DNA, 20 bp, synthetic construct
  source 1..20: mol_type = other DNA
agagttaggttctgtttccc

SEQ ID NO: 196944 - DNA, 20 bp, synthetic construct
  source 1..20: mol_type = other DNA
aagagttaggttctgtttcc

SEQ ID NO: 196945 - DNA, 20 bp, synthetic construct
  source 1..20: mol_type = other DNA
taagagttaggttctgtttc

SEQ ID NO: 196946 - DNA, 20 bp, synthetic construct
  source 1..20: mol_type = other DNA
gtaagagttaggttctgttt

SEQ ID NO: 196947 - DNA, 20 bp, synthetic construct
  source 1..20: mol_type = other DNA
ggtaagagttaggttctgtt

SEQ ID NO: 196948 - DNA, 20 bp, synthetic construct
  source 1..20: mol_type = other DNA
aggtaagagttaggttctgt

SEQ ID NO: 196949 - DNA, 20 bp, synthetic construct
  source 1..20: mol_type = other DNA
gaggtaagagttaggttctg

SEQ ID NO: 196950 - DNA, 20 bp, synthetic construct
  source 1..20: mol_type = other DNA
agaggtaagagttaggttct

SEQ ID NO: 196951 - DNA, 20 bp, synthetic construct
  source 1..20: mol_type = other DNA
cagaggtaagagttaggttc

SEQ ID NO: 196952 - DNA, 20 bp, synthetic construct
  source 1..20: mol_type = other DNA
ccagaggtaagagttaggtt

SEQ ID NO: 196953 - DNA, 20 bp, synthetic construct
  source 1..20: mol_type = other DNA
cccagaggtaagagttaggt

SEQ ID NO: 196954 - DNA, 20 bp, synthetic construct
  source 1..20: mol_type = other DNA
tcccagaggtaagagttagg

SEQ ID NO: 196955 - DNA, 20 bp, synthetic construct
  source 1..20: mol_type = other DNA
ctcccagaggtaagagttag

SEQ ID NO: 196956 - DNA, 20 bp, synthetic construct
  source 1..20: mol_type = other DNA
cctcccagaggtaagagtta

SEQ ID NO: 196957 - DNA, 20 bp, synthetic construct
  source 1..20: mol_type = other DNA
gcctcccagaggtaagagtt

SEQ ID NO: 196958 - DNA, 20 bp, synthetic construct
  source 1..20: mol_type = other DNA
agcctcccagaggtaagagt

SEQ ID NO: 196959 - DNA, 20 bp, synthetic construct
  source 1..20: mol_type = other DNA
aagcctcccagaggtaagag

SEQ ID NO: 196960 - DNA, 20 bp, synthetic construct
  source 1..20: mol_type = other DNA
taagcctcccagaggtaaga

SEQ ID NO: 196961 - DNA, 20 bp, synthetic construct
  source 1..20: mol_type = other DNA
ataagcctcccagaggtaag

SEQ ID NO: 196962 - DNA, 20 bp, synthetic construct
  source 1..20: mol_type = other DNA
aataagcctcccagaggtaa

SEQ ID NO: 196963 - DNA, 20 bp, synthetic construct
  source 1..20: mol_type = other DNA
aaataagcctcccagaggta

SEQ ID NO: 196964 - DNA, 20 bp, synthetic construct
  source 1..20: mol_type = other DNA
caaataagcctcccagaggt

SEQ ID NO: 196965 - DNA, 20 bp, synthetic construct
  source 1..20: mol_type = other DNA
gcaaataagcctcccagagg

SEQ ID NO: 196966 - DNA, 20 bp, synthetic construct
  source 1..20: mol_type = other DNA
agcaaataagcctcccagag

SEQ ID NO: 196967 - DNA, 20 bp, synthetic construct
  source 1..20: mol_type = other DNA
aagcaaataagcctcccaga

SEQ ID NO: 196968 - DNA, 20 bp, synthetic construct
  source 1..20: mol_type = other DNA
aaagcaaataagcctcccag

SEQ ID NO: 196969 - DNA, 20 bp, synthetic construct
  source 1..20: mol_type = other DNA
caaagcaaataagcctccca

SEQ ID NO: 196970 - DNA, 20 bp, synthetic construct
  source 1..20: mol_type = other DNA
tcaaagcaaataagcctccc

SEQ ID NO: 196971 - DNA, 20 bp, synthetic construct
  source 1..20: mol_type = other DNA
ctcaaagcaaataagcctcc

SEQ ID NO: 196972 - DNA, 20 bp, synthetic construct
  source 1..20: mol_type = other DNA
tctcaaagcaaataagcctc

SEQ ID NO: 196973 - DNA, 20 bp, synthetic construct
  source 1..20: mol_type = other DNA
ttctcaaagcaaataagcct

SEQ ID NO: 196974 - DNA, 20 bp, synthetic construct
  source 1..20: mol_type = other DNA
gttctcaaagcaaataagcc

SEQ ID NO: 196975 - DNA, 20 bp, synthetic construct
  source 1..20: mol_type = other DNA
tgttctcaaagcaaataagc

SEQ ID NO: 196976 - DNA, 20 bp, synthetic construct
  source 1..20: mol_type = other DNA
atgttctcaaagcaaataag

SEQ ID NO: 196977 - DNA, 20 bp, synthetic construct
  source 1..20: mol_type = other DNA
tatgttctcaaagcaaataa

SEQ ID NO: 196978 - DNA, 20 bp, synthetic construct
  source 1..20: mol_type = other DNA
atatgttctcaaagcaaata

SEQ ID NO: 196979 - DNA, 20 bp, synthetic construct
  source 1..20: mol_type = other DNA
catatgttctcaaagcaaat

SEQ ID NO: 196980 - DNA, 20 bp, synthetic construct
  source 1..20: mol_type = other DNA
acatatgttctcaaagcaaa

SEQ ID NO: 196981 - DNA, 20 bp, synthetic construct
  source 1..20: mol_type = other DNA
gacatatgttctcaaagcaa

SEQ ID NO: 196982 - DNA, 20 bp, synthetic construct
  source 1..20: mol_type = other DNA
ggacatatgttctcaaagca

SEQ ID NO: 196983 - DNA, 20 bp, synthetic construct
  source 1..20: mol_type = other DNA
aggacatatgttctcaaagc

SEQ ID NO: 196984 - DNA, 20 bp, synthetic construct
  source 1..20: mol_type = other DNA
caggacatatgttctcaaag

SEQ ID NO: 196985 - DNA, 20 bp, synthetic construct
  source 1..20: mol_type = other DNA
gcaggacatatgttctcaaa

SEQ ID NO: 196986 - DNA, 20 bp, synthetic construct
  source 1..20: mol_type = other DNA
tgcaggacatatgttctcaa

SEQ ID NO: 196987 - DNA, 20 bp, synthetic construct
  source 1..20: mol_type = other DNA
ctgcaggacatatgttctca

SEQ ID NO: 196988 - DNA, 20 bp, synthetic construct
  source 1..20: mol_type = other DNA
actgcaggacatatgttctc

SEQ ID NO: 196989 - DNA, 20 bp, synthetic construct
  source 1..20: mol_type = other DNA
aactgcaggacatatgttct

SEQ ID NO: 196990 - DNA, 20 bp, synthetic construct
  source 1..20: mol_type = other DNA
aaactgcaggacatatgttc

SEQ ID NO: 196991 - DNA, 20 bp, synthetic construct
  source 1..20: mol_type = other DNA
aaaactgcaggacatatgtt

SEQ ID NO: 196992 - DNA, 20 bp, synthetic construct
  source 1..20: mol_type = other DNA
caaaactgcaggacatatgt

SEQ ID NO: 196993 - DNA, 20 bp, synthetic construct
  source 1..20: mol_type = other DNA
acaaaactgcaggacatatg

SEQ ID NO: 196994 - DNA, 20 bp, synthetic construct
  source 1..20: mol_type = other DNA
aacaaaactgcaggacatat

SEQ ID NO: 196995 - DNA, 20 bp, synthetic construct
  source 1..20: mol_type = other DNA
gaacaaaactgcaggacata

SEQ ID NO: 196996 - DNA, 20 bp, synthetic construct
  source 1..20: mol_type = other DNA
tgaacaaaactgcaggacat

SEQ ID NO: 196997 - DNA, 20 bp, synthetic construct
  source 1..20: mol_type = other DNA
atgaacaaaactgcaggaca

SEQ ID NO: 196998 - DNA, 20 bp, synthetic construct
  source 1..20: mol_type = other DNA
tatgaacaaaactgcaggac

SEQ ID NO: 196999 - DNA, 20 bp, synthetic construct
  source 1..20: mol_type = other DNA
atatgaacaaaactgcagga

SEQ ID NO: 197000 - DNA, 20 bp, synthetic construct
  source 1..20: mol_type = other DNA
catatgaacaaaactgcagg

SEQ ID NO: 197001 - DNA, 20 bp, synthetic construct
  source 1..20: mol_type = other DNA
ccatatgaacaaaactgcag

SEQ ID NO: 197002 - DNA, 20 bp, synthetic construct
  source 1..20: mol_type = other DNA
gccatatgaacaaaactgca

SEQ ID NO: 197003 - DNA, 20 bp, synthetic construct
  source 1..20: mol_type = other DNA
tgccatatgaacaaaactgc

SEQ ID NO: 197004 - DNA, 20 bp, synthetic construct
  source 1..20: mol_type = other DNA
ctgccatatgaacaaaactg

SEQ ID NO: 197005 - DNA, 20 bp, synthetic construct
  source 1..20: mol_type = other DNA
actgccatatgaacaaaact

SEQ ID NO: 197006 - DNA, 20 bp, synthetic construct
  source 1..20: mol_type = other DNA
cactgccatatgaacaaaac

SEQ ID NO: 197007 - DNA, 20 bp, synthetic construct
  source 1..20: mol_type = other DNA
tcactgccatatgaacaaaa

SEQ ID NO: 197008 - DNA, 20 bp, synthetic construct
  source 1..20: mol_type = other DNA
ttcactgccatatgaacaaa

SEQ ID NO: 197009 - DNA, 20 bp, synthetic construct
  source 1..20: mol_type = other DNA
cttcactgccatatgaacaa

SEQ ID NO: 197010 - DNA, 20 bp, synthetic construct
  source 1..20: mol_type = other DNA
acttcactgccatatgaaca

SEQ ID NO: 197011 - DNA, 20 bp, synthetic construct
  source 1..20: mol_type = other DNA
aacttcactgccatatgaac

SEQ ID NO: 197012 - DNA, 20 bp, synthetic construct
  source 1..20: mol_type = other DNA
aaacttcactgccatatgaa

SEQ ID NO: 197013 - DNA, 20 bp, synthetic construct
  source 1..20: mol_type = other DNA
gaaacttcactgccatatga

SEQ ID NO: 197014 - DNA, 20 bp, synthetic construct
  source 1..20: mol_type = other DNA
cgaaacttcactgccatatg

SEQ ID NO: 197015 - DNA, 20 bp, synthetic construct
  source 1..20: mol_type = other DNA
acgaaacttcactgccatat

SEQ ID NO: 197016 - DNA, 20 bp, synthetic construct
  source 1..20: mol_type = other DNA
cacgaaacttcactgccata

SEQ ID NO: 197017 - DNA, 20 bp, synthetic construct
  source 1..20: mol_type = other DNA
gcacgaaacttcactgccat

SEQ ID NO: 197018 - DNA, 20 bp, synthetic construct
  source 1..20: mol_type = other DNA
tgcacgaaacttcactgcca

SEQ ID NO: 197019 - DNA, 20 bp, synthetic construct
  source 1..20: mol_type = other DNA
gtgcacgaaacttcactgcc

SEQ ID NO: 197020 - DNA, 20 bp, synthetic construct
  source 1..20: mol_type = other DNA
tgtgcacgaaacttcactgc

SEQ ID NO: 197021 - DNA, 20 bp, synthetic construct
  source 1..20: mol_type = other DNA
gtgtgcacgaaacttcactg

SEQ ID NO: 197022 - DNA, 20 bp, synthetic construct
  source 1..20: mol_type = other DNA
tgtgtgcacgaaacttcact

SEQ ID NO: 197023 - DNA, 20 bp, synthetic construct
  source 1..20: mol_type = other DNA
gtgtgtgcacgaaacttcac

SEQ ID NO: 197024 - DNA, 20 bp, synthetic construct
  source 1..20: mol_type = other DNA
agtgtgtgcacgaaacttca

SEQ ID NO: 197025 - DNA, 20 bp, synthetic construct
  source 1..20: mol_type = other DNA
gagtgtgtgcacgaaacttc

SEQ ID NO: 197026 - DNA, 20 bp, synthetic construct
  source 1..20: mol_type = other DNA
agagtgtgtgcacgaaactt

SEQ ID NO: 197027 - DNA, 20 bp, synthetic construct
  source 1..20: mol_type = other DNA
tagagtgtgtgcacgaaact

SEQ ID NO: 197028 - DNA, 20 bp, synthetic construct
  source 1..20: mol_type = other DNA
ctagagtgtgtgcacgaaac

SEQ ID NO: 197029 - DNA, 20 bp, synthetic construct
  source 1..20: mol_type = other DNA
tctagagtgtgtgcacgaaa

SEQ ID NO: 197030 - DNA, 20 bp, synthetic construct
  source 1..20: mol_type = other DNA
ctctagagtgtgtgcacgaa

SEQ ID NO: 197031 - DNA, 20 bp, synthetic construct
  source 1..20: mol_type = other DNA
gctctagagtgtgtgcacga

SEQ ID NO: 197032 - DNA, 20 bp, synthetic construct
  source 1..20: mol_type = other DNA
ggctctagagtgtgtgcacg

SEQ ID NO: 197033 - DNA, 20 bp, synthetic construct
  source 1..20: mol_type = other DNA
tggctctagagtgtgtgcac

SEQ ID NO: 197034 - DNA, 20 bp, synthetic construct
  source 1..20: mol_type = other DNA
ctggctctagagtgtgtgca

SEQ ID NO: 197035 - DNA, 20 bp, synthetic construct
  source 1..20: mol_type = other DNA
cctggctctagagtgtgtgc

SEQ ID NO: 197036 - DNA, 20 bp, synthetic construct
  source 1..20: mol_type = other DNA
gcctggctctagagtgtgtg

SEQ ID NO: 197037 - DNA, 20 bp, synthetic construct
  source 1..20: mol_type = other DNA
tgcctggctctagagtgtgt

SEQ ID NO: 197038 - DNA, 20 bp, synthetic construct
  source 1..20: mol_type = other DNA
ctgcctggctctagagtgtg

SEQ ID NO: 197039 - DNA, 20 bp, synthetic construct
  source 1..20: mol_type = other DNA
gctgcctggctctagagtgt

SEQ ID NO: 197040 - DNA, 20 bp, synthetic construct
  source 1..20: mol_type = other DNA
ggctgcctggctctagagtg

SEQ ID NO: 197041 - DNA, 20 bp, synthetic construct
  source 1..20: mol_type = other DNA
aggctgcctggctctagagt

SEQ ID NO: 197042 - DNA, 20 bp, synthetic construct
  source 1..20: mol_type = other DNA
caggctgcctggctctagag

SEQ ID NO: 197043 - DNA, 20 bp, synthetic construct
  source 1..20: mol_type = other DNA
ccaggctgcctggctctaga

SEQ ID NO: 197044 - DNA, 20 bp, synthetic construct
  source 1..20: mol_type = other DNA
cccaggctgcctggctctag

SEQ ID NO: 197045 - DNA, 20 bp, synthetic construct
  source 1..20: mol_type = other DNA
acccaggctgcctggctcta

SEQ ID NO: 197046 - DNA, 20 bp, synthetic construct
  source 1..20: mol_type = other DNA
aacccaggctgcctggctct

SEQ ID NO: 197047 - DNA, 20 bp, synthetic construct
  source 1..20: mol_type = other DNA
gaacccaggctgcctggctc

SEQ ID NO: 197048 - DNA, 20 bp, synthetic construct
  source 1..20: mol_type = other DNA
tgaacccaggctgcctggct

SEQ ID NO: 197049 - DNA, 20 bp, synthetic construct
  source 1..20: mol_type = other DNA
ttgaacccaggctgcctggc

SEQ ID NO: 197050 - DNA, 20 bp, synthetic construct
  source 1..20: mol_type = other DNA
tttgaacccaggctgcctgg

SEQ ID NO: 197051 - DNA, 20 bp, synthetic construct
  source 1..20: mol_type = other DNA
ctttgaacccaggctgcctg

SEQ ID NO: 197052 - DNA, 20 bp, synthetic construct
  source 1..20: mol_type = other DNA
gctttgaacccaggctgcct

SEQ ID NO: 197053 - DNA, 20 bp, synthetic construct
  source 1..20: mol_type = other DNA
cgctttgaacccaggctgcc

SEQ ID NO: 197054 - DNA, 20 bp, synthetic construct
  source 1..20: mol_type = other DNA
gcgctttgaacccaggctgc

SEQ ID NO: 197055 - DNA, 20 bp, synthetic construct
  source 1..20: mol_type = other DNA
tgcgctttgaacccaggctg

SEQ ID NO: 197056 - DNA, 20 bp, synthetic construct
  source 1..20: mol_type = other DNA
ctgcgctttgaacccaggct

SEQ ID NO: 197057 - DNA, 20 bp, synthetic construct
  source 1..20: mol_type = other DNA
gctgcgctttgaacccaggc

SEQ ID NO: 197058 - DNA, 20 bp, synthetic construct
  source 1..20: mol_type = other DNA
agctgcgctttgaacccagg

SEQ ID NO: 197059 - DNA, 20 bp, synthetic construct
  source 1..20: mol_type = other DNA
gagctgcgctttgaacccag

SEQ ID NO: 197060 - DNA, 20 bp, synthetic construct
  source 1..20: mol_type = other DNA
agagctgcgctttgaaccca

SEQ ID NO: 197061 - DNA, 20 bp, synthetic construct
  source 1..20: mol_type = other DNA
cagagctgcgctttgaaccc

SEQ ID NO: 197062 - DNA, 20 bp, synthetic construct
  source 1..20: mol_type = other DNA
gcagagctgcgctttgaacc

SEQ ID NO: 197063 - DNA, 20 bp, synthetic construct
  source 1..20: mol_type = other DNA
ggcagagctgcgctttgaac

SEQ ID NO: 197064 - DNA, 20 bp, synthetic construct
  source 1..20: mol_type = other DNA
tggcagagctgcgctttgaa

SEQ ID NO: 197065 - DNA, 20 bp, synthetic construct
  source 1..20: mol_type = other DNA
ctggcagagctgcgctttga

SEQ ID NO: 197066 - DNA, 20 bp, synthetic construct
  source 1..20: mol_type = other DNA
cctggcagagctgcgctttg

SEQ ID NO: 197067 - DNA, 20 bp, synthetic construct
  source 1..20: mol_type = other DNA
acctggcagagctgcgcttt

SEQ ID NO: 197068 - DNA, 20 bp, synthetic construct
  source 1..20: mol_type = other DNA
gacctggcagagctgcgctt

SEQ ID NO: 197069 - DNA, 20 bp, synthetic construct
  source 1..20: mol_type = other DNA
ggacctggcagagctgcgct

SEQ ID NO: 197070 - DNA, 20 bp, synthetic construct
  source 1..20: mol_type = other DNA
aggacctggcagagctgcgc

SEQ ID NO: 197071 - DNA, 20 bp, synthetic construct
  source 1..20: mol_type = other DNA
taggacctggcagagctgcg

SEQ ID NO: 197072 - DNA, 20 bp, synthetic construct
  source 1..20: mol_type = other DNA
ttaggacctggcagagctgc

SEQ ID NO: 197073 - DNA, 20 bp, synthetic construct
  source 1..20: mol_type = other DNA
gttaggacctggcagagctg

SEQ ID NO: 197074 - DNA, 20 bp, synthetic construct
  source 1..20: mol_type = other DNA
agttaggacctggcagagct

SEQ ID NO: 197075 - DNA, 20 bp, synthetic construct
  source 1..20: mol_type = other DNA
cagttaggacctggcagagc

SEQ ID NO: 197076 - DNA, 20 bp, synthetic construct
  source 1..20: mol_type = other DNA
gcagttaggacctggcagag

SEQ ID NO: 197077 - DNA, 20 bp, synthetic construct
  source 1..20: mol_type = other DNA
tgcagttaggacctggcaga

SEQ ID NO: 197078 - DNA, 20 bp, synthetic construct
  source 1..20: mol_type = other DNA
atgcagttaggacctggcag

SEQ ID NO: 197079 - DNA, 20 bp, synthetic construct
  source 1..20: mol_type = other DNA
catgcagttaggacctggca

SEQ ID NO: 197080 - DNA, 20 bp, synthetic construct
  source 1..20: mol_type = other DNA
tcatgcagttaggacctggc

SEQ ID NO: 197081 - DNA, 20 bp, synthetic construct
  source 1..20: mol_type = other DNA
ttcatgcagttaggacctgg

SEQ ID NO: 197082 - DNA, 20 bp, synthetic construct
  source 1..20: mol_type = other DNA
attcatgcagttaggacctg

SEQ ID NO: 197083 - DNA, 20 bp, synthetic construct
  source 1..20: mol_type = other DNA
aattcatgcagttaggacct

SEQ ID NO: 197084 - DNA, 20 bp, synthetic construct
  source 1..20: mol_type = other DNA
aaattcatgcagttaggacc

SEQ ID NO: 197085 - DNA, 20 bp, synthetic construct
  source 1..20: mol_type = other DNA
caaattcatgcagttaggac

SEQ ID NO: 197086 - DNA, 20 bp, synthetic construct
  source 1..20: mol_type = other DNA
ccaaattcatgcagttagga

SEQ ID NO: 197087 - DNA, 20 bp, synthetic construct
  source 1..20: mol_type = other DNA
cccaaattcatgcagttagg

SEQ ID NO: 197088 - DNA, 20 bp, synthetic construct
  source 1..20: mol_type = other DNA
gcccaaattcatgcagttag

SEQ ID NO: 197089 - DNA, 20 bp, synthetic construct
  source 1..20: mol_type = other DNA
tgcccaaattcatgcagtta

SEQ ID NO: 197090 - DNA, 20 bp, synthetic construct
  source 1..20: mol_type = other DNA
ttgcccaaattcatgcagtt

SEQ ID NO: 197091 - DNA, 20 bp, synthetic construct
  source 1..20: mol_type = other DNA
cttgcccaaattcatgcagt

SEQ ID NO: 197092 - DNA, 20 bp, synthetic construct
  source 1..20: mol_type = other DNA
acttgcccaaattcatgcag

SEQ ID NO: 197093 - DNA, 20 bp, synthetic construct
  source 1..20: mol_type = other DNA
gacttgcccaaattcatgca

SEQ ID NO: 197094 - DNA, 20 bp, synthetic construct
  source 1..20: mol_type = other DNA
cgacttgcccaaattcatgc

SEQ ID NO: 197095 - DNA, 20 bp, synthetic construct
  source 1..20: mol_type = other DNA
gcgacttgcccaaattcatg

SEQ ID NO: 197096 - DNA, 20 bp, synthetic construct
  source 1..20: mol_type = other DNA
agcgacttgcccaaattcat

SEQ ID NO: 197097 - DNA, 20 bp, synthetic construct
  source 1..20: mol_type = other DNA
gagcgacttgcccaaattca

SEQ ID NO: 197098 - DNA, 20 bp, synthetic construct
  source 1..20: mol_type = other DNA
tgagcgacttgcccaaattc

SEQ ID NO: 197099 - DNA, 20 bp, synthetic construct
  source 1..20: mol_type = other DNA
ttgagcgacttgcccaaatt

SEQ ID NO: 197100 - DNA, 20 bp, synthetic construct
  source 1..20: mol_type = other DNA
gttgagcgacttgcccaaat

SEQ ID NO: 197101 - DNA, 20 bp, synthetic construct
  source 1..20: mol_type = other DNA
ggttgagcgacttgcccaaa

SEQ ID NO: 197102 - DNA, 20 bp, synthetic construct
  source 1..20: mol_type = other DNA
aggttgagcgacttgcccaa

SEQ ID NO: 197103 - DNA, 20 bp, synthetic construct
  source 1..20: mol_type = other DNA
gaggttgagcgacttgccca

SEQ ID NO: 197104 - DNA, 20 bp, synthetic construct
  source 1..20: mol_type = other DNA
agaggttgagcgacttgccc

SEQ ID NO: 197105 - DNA, 20 bp, synthetic construct
  source 1..20: mol_type = other DNA
gagaggttgagcgacttgcc

SEQ ID NO: 197106 - DNA, 20 bp, synthetic construct
  source 1..20: mol_type = other DNA
ggagaggttgagcgacttgc

SEQ ID NO: 197107 - DNA, 20 bp, synthetic construct
  source 1..20: mol_type = other DNA
tggagaggttgagcgacttg

SEQ ID NO: 197108 - DNA, 20 bp, synthetic construct
  source 1..20: mol_type = other DNA
atggagaggttgagcgactt

SEQ ID NO: 197109 - DNA, 20 bp, synthetic construct
  source 1..20: mol_type = other DNA
catggagaggttgagcgact

SEQ ID NO: 197110 - DNA, 20 bp, synthetic construct
  source 1..20: mol_type = other DNA
gcatggagaggttgagcgac

SEQ ID NO: 197111 - DNA, 20 bp, synthetic construct
  source 1..20: mol_type = other DNA
ggcatggagaggttgagcga

SEQ ID NO: 197112 - DNA, 20 bp, synthetic construct
  source 1..20: mol_type = other DNA
aggcatggagaggttgagcg

SEQ ID NO: 197113 - DNA, 20 bp, synthetic construct
  source 1..20: mol_type = other DNA
caggcatggagaggttgagc

SEQ ID NO: 197114 - DNA, 20 bp, synthetic construct
  source 1..20: mol_type = other DNA
tcaggcatggagaggttgag

SEQ ID NO: 197115 - DNA, 20 bp, synthetic construct
  source 1..20: mol_type = other DNA
ctcaggcatggagaggttga

SEQ ID NO: 197116 - DNA, 20 bp, synthetic construct
  source 1..20: mol_type = other DNA
actcaggcatggagaggttg

SEQ ID NO: 197117 - DNA, 20 bp, synthetic construct
  source 1..20: mol_type = other DNA
aactcaggcatggagaggtt

SEQ ID NO: 197118 - DNA, 20 bp, synthetic construct
  source 1..20: mol_type = other DNA
aaactcaggcatggagaggt

SEQ ID NO: 197119 - DNA, 20 bp, synthetic construct
  source 1..20: mol_type = other DNA
gaaactcaggcatggagagg

SEQ ID NO: 197120 - DNA, 20 bp, synthetic construct
  source 1..20: mol_type = other DNA
ggaaactcaggcatggagag

SEQ ID NO: 197121 - DNA, 20 bp, synthetic construct
  source 1..20: mol_type = other DNA
aggaaactcaggcatggaga

SEQ ID NO: 197122 - DNA, 20 bp, synthetic construct
  source 1..20: mol_type = other DNA
gaggaaactcaggcatggag

SEQ ID NO: 197123 - DNA, 20 bp, synthetic construct
  source 1..20: mol_type = other DNA
tgaggaaactcaggcatgga

SEQ ID NO: 197124 - DNA, 20 bp, synthetic construct
  source 1..20: mol_type = other DNA
atgaggaaactcaggcatgg

SEQ ID NO: 197125 - DNA, 20 bp, synthetic construct
  source 1..20: mol_type = other DNA
gatgaggaaactcaggcatg

SEQ ID NO: 197126 - DNA, 20 bp, synthetic construct
  source 1..20: mol_type = other DNA
agatgaggaaactcaggcat

SEQ ID NO: 197127 - DNA, 20 bp, synthetic construct
  source 1..20: mol_type = other DNA
cagatgaggaaactcaggca

SEQ ID NO: 197128 - DNA, 20 bp, synthetic construct
  source 1..20: mol_type = other DNA
acagatgaggaaactcaggc

SEQ ID NO: 197129 - DNA, 20 bp, synthetic construct
  source 1..20: mol_type = other DNA
tacagatgaggaaactcagg

SEQ ID NO: 197130 - DNA, 20 bp, synthetic construct
  source 1..20: mol_type = other DNA
ttacagatgaggaaactcag

SEQ ID NO: 197131 - DNA, 20 bp, synthetic construct
  source 1..20: mol_type = other DNA
cttacagatgaggaaactca

SEQ ID NO: 197132 - DNA, 20 bp, synthetic construct
  source 1..20: mol_type = other DNA
tcttacagatgaggaaactc

SEQ ID NO: 197133 - DNA, 20 bp, synthetic construct
  source 1..20: mol_type = other DNA
atcttacagatgaggaaact

SEQ ID NO: 197134 - DNA, 20 bp, synthetic construct
  source 1..20: mol_type = other DNA
aatcttacagatgaggaaac

SEQ ID NO: 197135 - DNA, 20 bp, synthetic construct
  source 1..20: mol_type = other DNA
caatcttacagatgaggaaa

SEQ ID NO: 197136 - DNA, 20 bp, synthetic construct
  source 1..20: mol_type = other DNA
ccaatcttacagatgaggaa

SEQ ID NO: 197137 - DNA, 20 bp, synthetic construct
  source 1..20: mol_type = other DNA
tccaatcttacagatgagga

SEQ ID NO: 197138 - DNA, 20 bp, synthetic construct
  source 1..20: mol_type = other DNA
ctccaatcttacagatgagg

SEQ ID NO: 197139 - DNA, 20 bp, synthetic construct
  source 1..20: mol_type = other DNA
gctccaatcttacagatgag

SEQ ID NO: 197140 - DNA, 20 bp, synthetic construct
  source 1..20: mol_type = other DNA
tgctccaatcttacagatga

SEQ ID NO: 197141 - DNA, 20 bp, synthetic construct
  source 1..20: mol_type = other DNA
ttgctccaatcttacagatg

SEQ ID NO: 197142 - DNA, 20 bp, synthetic construct
  source 1..20: mol_type = other DNA
attgctccaatcttacagat

SEQ ID NO: 197143 - DNA, 20 bp, synthetic construct
  source 1..20: mol_type = other DNA
cattgctccaatcttacaga

SEQ ID NO: 197144 - DNA, 20 bp, synthetic construct
  source 1..20: mol_type = other DNA
ccattgctccaatcttacag

SEQ ID NO: 197145 - DNA, 20 bp, synthetic construct
  source 1..20: mol_type = other DNA
accattgctccaatcttaca

SEQ ID NO: 197146 - DNA, 20 bp, synthetic construct
  source 1..20: mol_type = other DNA
taccattgctccaatcttac

SEQ ID NO: 197147 - DNA, 20 bp, synthetic construct
  source 1..20: mol_type = other DNA
ttaccattgctccaatctta

SEQ ID NO: 197148 - DNA, 20 bp, synthetic construct
  source 1..20: mol_type = other DNA
attaccattgctccaatctt

SEQ ID NO: 197149 - DNA, 20 bp, synthetic construct
  source 1..20: mol_type = other DNA
tattaccattgctccaatct

SEQ ID NO: 197150 - DNA, 20 bp, synthetic construct
  source 1..20: mol_type = other DNA
gtattaccattgctccaatc

SEQ ID NO: 197151 - DNA, 20 bp, synthetic construct
  source 1..20: mol_type = other DNA
ggtattaccattgctccaat

SEQ ID NO: 197152 - DNA, 20 bp, synthetic construct
  source 1..20: mol_type = other DNA
aggtattaccattgctccaa

SEQ ID NO: 197153 - DNA, 20 bp, synthetic construct
  source 1..20: mol_type = other DNA
caggtattaccattgctcca

SEQ ID NO: 197154 - DNA, 20 bp, synthetic construct
  source 1..20: mol_type = other DNA
gcaggtattaccattgctcc

SEQ ID NO: 197155 - DNA, 20 bp, synthetic construct
  source 1..20: mol_type = other DNA
agcaggtattaccattgctc

SEQ ID NO: 197156 - DNA, 20 bp, synthetic construct
  source 1..20: mol_type = other DNA
aagcaggtattaccattgct

SEQ ID NO: 197157 - DNA, 20 bp, synthetic construct
  source 1..20: mol_type = other DNA
aaagcaggtattaccattgc

SEQ ID NO: 197158 - DNA, 20 bp, synthetic construct
  source 1..20: mol_type = other DNA
aaaagcaggtattaccattg

SEQ ID NO: 197159 - DNA, 20 bp, synthetic construct
  source 1..20: mol_type = other DNA
aaaaagcaggtattaccatt

SEQ ID NO: 197160 - DNA, 20 bp, synthetic construct
  source 1..20: mol_type = other DNA
taaaaagcaggtattaccat

SEQ ID NO: 197161 - DNA, 20 bp, synthetic construct
  source 1..20: mol_type = other DNA
ctaaaaagcaggtattacca

SEQ ID NO: 197162 - DNA, 20 bp, synthetic construct
  source 1..20: mol_type = other DNA
cctaaaaagcaggtattacc

SEQ ID NO: 197163 - DNA, 20 bp, synthetic construct
  source 1..20: mol_type = other DNA
ccctaaaaagcaggtattac

SEQ ID NO: 197164 - DNA, 20 bp, synthetic construct
  source 1..20: mol_type = other DNA
accctaaaaagcaggtatta

SEQ ID NO: 197165 - DNA, 20 bp, synthetic construct
  source 1..20: mol_type = other DNA
aaccctaaaaagcaggtatt

SEQ ID NO: 197166 - DNA, 20 bp, synthetic construct
  source 1..20: mol_type = other DNA
caaccctaaaaagcaggtat

SEQ ID NO: 197167 - DNA, 20 bp, synthetic construct
  source 1..20: mol_type = other DNA
tcaaccctaaaaagcaggta

SEQ ID NO: 197168 - DNA, 20 bp, synthetic construct
  source 1..20: mol_type = other DNA
ctcaaccctaaaaagcaggt

SEQ ID NO: 197169 - DNA, 20 bp, synthetic construct
  source 1..20: mol_type = other DNA
tctcaaccctaaaaagcagg

SEQ ID NO: 197170 - DNA, 20 bp, synthetic construct
  source 1..20: mol_type = other DNA
ttctcaaccctaaaaagcag

SEQ ID NO: 197171 - DNA, 20 bp, synthetic construct
  source 1..20: mol_type = other DNA
cttctcaaccctaaaaagca

SEQ ID NO: 197172 - DNA, 20 bp, synthetic construct
  source 1..20: mol_type = other DNA
tcttctcaaccctaaaaagc

SEQ ID NO: 197173 - DNA, 20 bp, synthetic construct
  source 1..20: mol_type = other DNA
ctcttctcaaccctaaaaag

SEQ ID NO: 197174 - DNA, 20 bp, synthetic construct
  source 1..20: mol_type = other DNA
tctcttctcaaccctaaaaa

SEQ ID NO: 197175 - DNA, 20 bp, synthetic construct
  source 1..20: mol_type = other DNA
ttctcttctcaaccctaaaa

SEQ ID NO: 197176 - DNA, 20 bp, synthetic construct
  source 1..20: mol_type = other DNA
attctcttctcaaccctaaa

SEQ ID NO: 197177 - DNA, 20 bp, synthetic construct
  source 1..20: mol_type = other DNA
aattctcttctcaaccctaa

SEQ ID NO: 197178 - DNA, 20 bp, synthetic construct
  source 1..20: mol_type = other DNA
taattctcttctcaacccta

SEQ ID NO: 197179 - DNA, 20 bp, synthetic construct
  source 1..20: mol_type = other DNA
ttaattctcttctcaaccct

SEQ ID NO: 197180 - DNA, 20 bp, synthetic construct
  source 1..20: mol_type = other DNA
tttaattctcttctcaaccc

SEQ ID NO: 197181 - DNA, 20 bp, synthetic construct
  source 1..20: mol_type = other DNA
atttaattctcttctcaacc

SEQ ID NO: 197182 - DNA, 20 bp, synthetic construct
  source 1..20: mol_type = other DNA
catttaattctcttctcaac

SEQ ID NO: 197183 - DNA, 20 bp, synthetic construct
  source 1..20: mol_type = other DNA
tcatttaattctcttctcaa

SEQ ID NO: 197184 - DNA, 20 bp, synthetic construct
  source 1..20: mol_type = other DNA
ttcatttaattctcttctca

SEQ ID NO: 197185 - DNA, 20 bp, synthetic construct
  source 1..20: mol_type = other DNA
attcatttaattctcttctc

SEQ ID NO: 197186 - DNA, 20 bp, synthetic construct
  source 1..20: mol_type = other DNA
aattcatttaattctcttct

SEQ ID NO: 197187 - DNA, 20 bp, synthetic construct
  source 1..20: mol_type = other DNA
taattcatttaattctcttc

SEQ ID NO: 197188 - DNA, 20 bp, synthetic construct
  source 1..20: mol_type = other DNA
ttaattcatttaattctctt

SEQ ID NO: 197189 - DNA, 20 bp, synthetic construct
  source 1..20: mol_type = other DNA
cttaattcatttaattctct

SEQ ID NO: 197190 - DNA, 20 bp, synthetic construct
  source 1..20: mol_type = other DNA
tcttaattcatttaattctc

SEQ ID NO: 197191 - DNA, 20 bp, synthetic construct
  source 1..20: mol_type = other DNA
atcttaattcatttaattct

SEQ ID NO: 197192 - DNA, 20 bp, synthetic construct
  source 1..20: mol_type = other DNA
catcttaattcatttaattc

SEQ ID NO: 197193 - DNA, 20 bp, synthetic construct
  source 1..20: mol_type = other DNA
ccatcttaattcatttaatt

SEQ ID NO: 197194 - DNA, 20 bp, synthetic construct
  source 1..20: mol_type = other DNA
cccatcttaattcatttaat

SEQ ID NO: 197195 - DNA, 20 bp, synthetic construct
  source 1..20: mol_type = other DNA
acccatcttaattcatttaa

SEQ ID NO: 197196 - DNA, 20 bp, synthetic construct
  source 1..20: mol_type = other DNA
tacccatcttaattcattta

SEQ ID NO: 197197 - DNA, 20 bp, synthetic construct
  source 1..20: mol_type = other DNA
ttacccatcttaattcattt

SEQ ID NO: 197198 - DNA, 20 bp, synthetic construct
  source 1..20: mol_type = other DNA
tttacccatcttaattcatt

SEQ ID NO: 197199 - DNA, 20 bp, synthetic construct
  source 1..20: mol_type = other DNA
ctttacccatcttaattcat

SEQ ID NO: 197200 - DNA, 20 bp, synthetic construct
  source 1..20: mol_type = other DNA
actttacccatcttaattca

SEQ ID NO: 197201 - DNA, 20 bp, synthetic construct
  source 1..20: mol_type = other DNA
cactttacccatcttaattc

SEQ ID NO: 197202 - DNA, 20 bp, synthetic construct
  source 1..20: mol_type = other DNA
gcactttacccatcttaatt

SEQ ID NO: 197203 - DNA, 20 bp, synthetic construct
  source 1..20: mol_type = other DNA
agcactttacccatcttaat

SEQ ID NO: 197204 - DNA, 20 bp, synthetic construct
  source 1..20: mol_type = other DNA
aagcactttacccatcttaa

SEQ ID NO: 197205 - DNA, 20 bp, synthetic construct
  source 1..20: mol_type = other DNA
taagcactttacccatctta

SEQ ID NO: 197206 - DNA, 20 bp, synthetic construct
  source 1..20: mol_type = other DNA
ctaagcactttacccatctt

SEQ ID NO: 197207 - DNA, 20 bp, synthetic construct
  source 1..20: mol_type = other DNA
tctaagcactttacccatct

SEQ ID NO: 197208 - DNA, 20 bp, synthetic construct
  source 1..20: mol_type = other DNA
ctctaagcactttacccatc

SEQ ID NO: 197209 - DNA, 20 bp, synthetic construct
  source 1..20: mol_type = other DNA
actctaagcactttacccat

SEQ ID NO: 197210 - DNA, 20 bp, synthetic construct
  source 1..20: mol_type = other DNA
cactctaagcactttaccca

SEQ ID NO: 197211 - DNA, 20 bp, synthetic construct
  source 1..20: mol_type = other DNA
ccactctaagcactttaccc

SEQ ID NO: 197212 - DNA, 20 bp, synthetic construct
  source 1..20: mol_type = other DNA
tccactctaagcactttacc

SEQ ID NO: 197213 - DNA, 20 bp, synthetic construct
  source 1..20: mol_type = other DNA
ctccactctaagcactttac

SEQ ID NO: 197214 - DNA, 20 bp, synthetic construct
  source 1..20: mol_type = other DNA
gctccactctaagcacttta

SEQ ID NO: 197215 - DNA, 20 bp, synthetic construct
  source 1..20: mol_type = other DNA
agctccactctaagcacttt

SEQ ID NO: 197216 - DNA, 20 bp, synthetic construct
  source 1..20: mol_type = other DNA
aagctccactctaagcactt

SEQ ID NO: 197217 - DNA, 20 bp, synthetic construct
  source 1..20: mol_type = other DNA
aaagctccactctaagcact

SEQ ID NO: 197218 - DNA, 20 bp, synthetic construct
  source 1..20: mol_type = other DNA
caaagctccactctaagcac

SEQ ID NO: 197219 - DNA, 20 bp, synthetic construct
  source 1..20: mol_type = other DNA
gcaaagctccactctaagca

SEQ ID NO: 197220 - DNA, 20 bp, synthetic construct
  source 1..20: mol_type = other DNA
tgcaaagctccactctaagc

SEQ ID NO: 197221 - DNA, 20 bp, synthetic construct
  source 1..20: mol_type = other DNA
ttgcaaagctccactctaag

SEQ ID NO: 197222 - DNA, 20 bp, synthetic construct
  source 1..20: mol_type = other DNA
cttgcaaagctccactctaa

SEQ ID NO: 197223 - DNA, 20 bp, synthetic construct
  source 1..20: mol_type = other DNA
acttgcaaagctccactcta

SEQ ID NO: 197224 - DNA, 20 bp, synthetic construct
  source 1..20: mol_type = other DNA
tacttgcaaagctccactct

SEQ ID NO: 197225 - DNA, 20 bp, synthetic construct
  source 1..20: mol_type = other DNA
ctacttgcaaagctccactc

SEQ ID NO: 197226 - DNA, 20 bp, synthetic construct
  source 1..20: mol_type = other DNA
actacttgcaaagctccact

SEQ ID NO: 197227 - DNA, 20 bp, synthetic construct
  source 1..20: mol_type = other DNA
tactacttgcaaagctccac

SEQ ID NO: 197228 - DNA, 20 bp, synthetic construct
  source 1..20: mol_type = other DNA
ttactacttgcaaagctcca

SEQ ID NO: 197229 - DNA, 20 bp, synthetic construct
  source 1..20: mol_type = other DNA
cttactacttgcaaagctcc

SEQ ID NO: 197230 - DNA, 20 bp, synthetic construct
  source 1..20: mol_type = other DNA
acttactacttgcaaagctc

SEQ ID NO: 197231 - DNA, 20 bp, synthetic construct
  source 1..20: mol_type = other DNA
cacttactacttgcaaagct

SEQ ID NO: 197232 - DNA, 20 bp, synthetic construct
  source 1..20: mol_type = other DNA
gcacttactacttgcaaagc

SEQ ID NO: 197233 - DNA, 20 bp, synthetic construct
  source 1..20: mol_type = other DNA
agcacttactacttgcaaag

SEQ ID NO: 197234 - DNA, 20 bp, synthetic construct
  source 1..20: mol_type = other DNA
tagcacttactacttgcaaa

SEQ ID NO: 197235 - DNA, 20 bp, synthetic construct
  source 1..20: mol_type = other DNA
atagcacttactacttgcaa

SEQ ID NO: 197236 - DNA, 20 bp, synthetic construct
  source 1..20: mol_type = other DNA
catagcacttactacttgca

SEQ ID NO: 197237 - DNA, 20 bp, synthetic construct
  source 1..20: mol_type = other DNA
acatagcacttactacttgc

SEQ ID NO: 197238 - DNA, 20 bp, synthetic construct
  source 1..20: mol_type = other DNA
tacatagcacttactacttg

SEQ ID NO: 197239 - DNA, 20 bp, synthetic construct
  source 1..20: mol_type = other DNA
ttacatagcacttactactt

SEQ ID NO: 197240 - DNA, 20 bp, synthetic construct
  source 1..20: mol_type = other DNA
cttacatagcacttactact

SEQ ID NO: 197241 - DNA, 20 bp, synthetic construct
  source 1..20: mol_type = other DNA
acttacatagcacttactac

SEQ ID NO: 197242 - DNA, 20 bp, synthetic construct
  source 1..20: mol_type = other DNA
cacttacatagcacttacta

SEQ ID NO: 197243 - DNA, 20 bp, synthetic construct
  source 1..20: mol_type = other DNA
acacttacatagcacttact

SEQ ID NO: 197244 - DNA, 20 bp, synthetic construct
  source 1..20: mol_type = other DNA
aacacttacatagcacttac

SEQ ID NO: 197245 - DNA, 20 bp, synthetic construct
  source 1..20: mol_type = other DNA
gaacacttacatagcactta

SEQ ID NO: 197246 - DNA, 20 bp, synthetic construct
  source 1..20: mol_type = other DNA
cgaacacttacatagcactt

SEQ ID NO: 197247 - DNA, 20 bp, synthetic construct
  source 1..20: mol_type = other DNA
tcgaacacttacatagcact

SEQ ID NO: 197248 - DNA, 20 bp, synthetic construct
  source 1..20: mol_type = other DNA
atcgaacacttacatagcac

SEQ ID NO: 197249 - DNA, 20 bp, synthetic construct
  source 1..20: mol_type = other DNA
aatcgaacacttacatagca

SEQ ID NO: 197250 - DNA, 20 bp, synthetic construct
  source 1..20: mol_type = other DNA
aaatcgaacacttacatagc

SEQ ID NO: 197251 - DNA, 20 bp, synthetic construct
  source 1..20: mol_type = other DNA
taaatcgaacacttacatag

SEQ ID NO: 197252 - DNA, 20 bp, synthetic construct
  source 1..20: mol_type = other DNA
ttaaatcgaacacttacata

SEQ ID NO: 197253 - DNA, 20 bp, synthetic construct
  source 1..20: mol_type = other DNA
tttaaatcgaacacttacat

SEQ ID NO: 197254 - DNA, 20 bp, synthetic construct
  source 1..20: mol_type = other DNA
ttttaaatcgaacacttaca

SEQ ID NO: 197255 - DNA, 20 bp, synthetic construct
  source 1..20: mol_type = other DNA
attttaaatcgaacacttac

SEQ ID NO: 197256 - DNA, 20 bp, synthetic construct
  source 1..20: mol_type = other DNA
cattttaaatcgaacactta

SEQ ID NO: 197257 - DNA, 20 bp, synthetic construct
  source 1..20: mol_type = other DNA
tcattttaaatcgaacactt

SEQ ID NO: 197258 - DNA, 20 bp, synthetic construct
  source 1..20: mol_type = other DNA
ttcattttaaatcgaacact

SEQ ID NO: 197259 - DNA, 20 bp, synthetic construct
  source 1..20: mol_type = other DNA
tttcattttaaatcgaacac

SEQ ID NO: 197260 - DNA, 20 bp, synthetic construct
  source 1..20: mol_type = other DNA
ctttcattttaaatcgaaca

SEQ ID NO: 197261 - DNA, 20 bp, synthetic construct
  source 1..20: mol_type = other DNA
tctttcattttaaatcgaac

SEQ ID NO: 197262 - DNA, 20 bp, synthetic construct
  source 1..20: mol_type = other DNA
gtctttcattttaaatcgaa

SEQ ID NO: 197263 - DNA, 20 bp, synthetic construct
  source 1..20: mol_type = other DNA
ggtctttcattttaaatcga

SEQ ID NO: 197264 - DNA, 20 bp, synthetic construct
  source 1..20: mol_type = other DNA
gggtctttcattttaaatcg

SEQ ID NO: 197265 - DNA, 20 bp, synthetic construct
  source 1..20: mol_type = other DNA
agggtctttcattttaaatc

SEQ ID NO: 197266 - DNA, 20 bp, synthetic construct
  source 1..20: mol_type = other DNA
aagggtctttcattttaaat

SEQ ID NO: 197267 - DNA, 20 bp, synthetic construct
  source 1..20: mol_type = other DNA
taagggtctttcattttaaa

SEQ ID NO: 197268 - DNA, 20 bp, synthetic construct
  source 1..20: mol_type = other DNA
ttaagggtctttcattttaa

SEQ ID NO: 197269 - DNA, 20 bp, synthetic construct
  source 1..20: mol_type = other DNA
tttaagggtctttcatttta

SEQ ID NO: 197270 - DNA, 20 bp, synthetic construct
  source 1..20: mol_type = other DNA
atttaagggtctttcatttt

SEQ ID NO: 197271 - DNA, 20 bp, synthetic construct
  source 1..20: mol_type = other DNA
tatttaagggtctttcattt

SEQ ID NO: 197272 - DNA, 20 bp, synthetic construct
  source 1..20: mol_type = other DNA
gtatttaagggtctttcatt

SEQ ID NO: 197273 - DNA, 20 bp, synthetic construct
  source 1..20: mol_type = other DNA
tgtatttaagggtctttcat

SEQ ID NO: 197274 - DNA, 20 bp, synthetic construct
  source 1..20: mol_type = other DNA
atgtatttaagggtctttca

SEQ ID NO: 197275 - DNA, 20 bp, synthetic construct
  source 1..20: mol_type = other DNA
aatgtatttaagggtctttc

SEQ ID NO: 197276 - DNA, 20 bp, synthetic construct
  source 1..20: mol_type = other DNA
gaatgtatttaagggtcttt

SEQ ID NO: 197277 - DNA, 20 bp, synthetic construct
  source 1..20: mol_type = other DNA
agaatgtatttaagggtctt

SEQ ID NO: 197278 - DNA, 20 bp, synthetic construct
  source 1..20: mol_type = other DNA
aagaatgtatttaagggtct

SEQ ID NO: 197279 - DNA, 20 bp, synthetic construct
  source 1..20: mol_type = other DNA
aaagaatgtatttaagggtc

SEQ ID NO: 197280 - DNA, 20 bp, synthetic construct
  source 1..20: mol_type = other DNA
caaagaatgtatttaagggt

SEQ ID NO: 197281 - DNA, 20 bp, synthetic construct
  source 1..20: mol_type = other DNA
acaaagaatgtatttaaggg

SEQ ID NO: 197282 - DNA, 20 bp, synthetic construct
  source 1..20: mol_type = other DNA
aacaaagaatgtatttaagg

SEQ ID NO: 197283 - DNA, 20 bp, synthetic construct
  source 1..20: mol_type = other DNA
gaacaaagaatgtatttaag

SEQ ID NO: 197284 - DNA, 20 bp, synthetic construct
  source 1..20: mol_type = other DNA
tgaacaaagaatgtatttaa

SEQ ID NO: 197285 - DNA, 20 bp, synthetic construct
  source 1..20: mol_type = other DNA
atgaacaaagaatgtattta

SEQ ID NO: 197286 - DNA, 20 bp, synthetic construct
  source 1..20: mol_type = other DNA
aatgaacaaagaatgtattt

SEQ ID NO: 197287 - DNA, 20 bp, synthetic construct
  source 1..20: mol_type = other DNA
aaatgaacaaagaatgtatt

SEQ ID NO: 197288 - DNA, 20 bp, synthetic construct
  source 1..20: mol_type = other DNA
gaaatgaacaaagaatgtat

SEQ ID NO: 197289 - DNA, 20 bp, synthetic construct
  source 1..20: mol_type = other DNA
tgaaatgaacaaagaatgta

SEQ ID NO: 197290 - DNA, 20 bp, synthetic construct
  source 1..20: mol_type = other DNA
gtgaaatgaacaaagaatgt

SEQ ID NO: 197291 - DNA, 20 bp, synthetic construct
  source 1..20: mol_type = other DNA
tgtgaaatgaacaaagaatg

SEQ ID NO: 197292 - DNA, 20 bp, synthetic construct
  source 1..20: mol_type = other DNA
ttgtgaaatgaacaaagaat

SEQ ID NO: 197293 - DNA, 20 bp, synthetic construct
  source 1..20: mol_type = other DNA
cttgtgaaatgaacaaagaa

SEQ ID NO: 197294 - DNA, 20 bp, synthetic construct
  source 1..20: mol_type = other DNA
gcttgtgaaatgaacaaaga

SEQ ID NO: 197295 - DNA, 20 bp, synthetic construct
  source 1..20: mol_type = other DNA
ggcttgtgaaatgaacaaag

SEQ ID NO: 197296 - DNA, 20 bp, synthetic construct
  source 1..20: mol_type = other DNA
gggcttgtgaaatgaacaaa

SEQ ID NO: 197297 - DNA, 20 bp, synthetic construct
  source 1..20: mol_type = other DNA
agggcttgtgaaatgaacaa

SEQ ID NO: 197298 - DNA, 20 bp, synthetic construct
  source 1..20: mol_type = other DNA
aagggcttgtgaaatgaaca

SEQ ID NO: 197299 - DNA, 20 bp, synthetic construct
  source 1..20: mol_type = other DNA
gaagggcttgtgaaatgaac

SEQ ID NO: 197300 - DNA, 20 bp, synthetic construct
  source 1..20: mol_type = other DNA
tgaagggcttgtgaaatgaa

SEQ ID NO: 197301 - DNA, 20 bp, synthetic construct
  source 1..20: mol_type = other DNA
atgaagggcttgtgaaatga

SEQ ID NO: 197302 - DNA, 20 bp, synthetic construct
  source 1..20: mol_type = other DNA
aatgaagggcttgtgaaatg

SEQ ID NO: 197303 - DNA, 20 bp, synthetic construct
  source 1..20: mol_type = other DNA
aaatgaagggcttgtgaaat

SEQ ID NO: 197304 - DNA, 20 bp, synthetic construct
  source 1..20: mol_type = other DNA
gaaatgaagggcttgtgaaa

SEQ ID NO: 197305 - DNA, 20 bp, synthetic construct
  source 1..20: mol_type = other DNA
tgaaatgaagggcttgtgaa

SEQ ID NO: 197306 - DNA, 20 bp, synthetic construct
  source 1..20: mol_type = other DNA
gtgaaatgaagggcttgtga

SEQ ID NO: 197307 - DNA, 20 bp, synthetic construct
  source 1..20: mol_type = other DNA
tgtgaaatgaagggcttgtg

SEQ ID NO: 197308 - DNA, 20 bp, synthetic construct
  source 1..20: mol_type = other DNA
ttgtgaaatgaagggcttgt

SEQ ID NO: 197309 - DNA, 20 bp, synthetic construct
  source 1..20: mol_type = other DNA
gttgtgaaatgaagggcttg

SEQ ID NO: 197310 - DNA, 20 bp, synthetic construct
  source 1..20: mol_type = other DNA
ggttgtgaaatgaagggctt

SEQ ID NO: 197311 - DNA, 20 bp, synthetic construct
  source 1..20: mol_type = other DNA
aggttgtgaaatgaagggct

SEQ ID NO: 197312 - DNA, 20 bp, synthetic construct
  source 1..20: mol_type = other DNA
aaggttgtgaaatgaagggc

SEQ ID NO: 197313 - DNA, 20 bp, synthetic construct
  source 1..20: mol_type = other DNA
taaggttgtgaaatgaaggg

SEQ ID NO: 197314 - DNA, 20 bp, synthetic construct
  source 1..20: mol_type = other DNA
gtaaggttgtgaaatgaagg

SEQ ID NO: 197315 - DNA, 20 bp, synthetic construct
  source 1..20: mol_type = other DNA
tgtaaggttgtgaaatgaag

SEQ ID NO: 197316 - DNA, 20 bp, synthetic construct
  source 1..20: mol_type = other DNA
atgtaaggttgtgaaatgaa

SEQ ID NO: 197317 - DNA, 20 bp, synthetic construct
  source 1..20: mol_type = other DNA
aatgtaaggttgtgaaatga

SEQ ID NO: 197318 - DNA, 20 bp, synthetic construct
  source 1..20: mol_type = other DNA
aaatgtaaggttgtgaaatg

SEQ ID NO: 197319 - DNA, 20 bp, synthetic construct
  source 1..20: mol_type = other DNA
gaaatgtaaggttgtgaaat

SEQ ID NO: 197320 - DNA, 20 bp, synthetic construct
  source 1..20: mol_type = other DNA
tgaaatgtaaggttgtgaaa

SEQ ID NO: 197321 - DNA, 20 bp, synthetic construct
  source 1..20: mol_type = other DNA
gtgaaatgtaaggttgtgaa

SEQ ID NO: 197322 - DNA, 20 bp, synthetic construct
  source 1..20: mol_type = other DNA
tgtgaaatgtaaggttgtga

SEQ ID NO: 197323 - DNA, 20 bp, synthetic construct
  source 1..20: mol_type = other DNA
ttgtgaaatgtaaggttgtg

SEQ ID NO: 197324 - DNA, 20 bp, synthetic construct
  source 1..20: mol_type = other DNA
gttgtgaaatgtaaggttgt

SEQ ID NO: 197325 - DNA, 20 bp, synthetic construct
  source 1..20: mol_type = other DNA
ggttgtgaaatgtaaggttg

SEQ ID NO: 197326 - DNA, 20 bp, synthetic construct
  source 1..20: mol_type = other DNA
tggttgtgaaatgtaaggtt

SEQ ID NO: 197327 - DNA, 20 bp, synthetic construct
  source 1..20: mol_type = other DNA
ttggttgtgaaatgtaaggt

SEQ ID NO: 197328 - DNA, 20 bp, synthetic construct
  source 1..20: mol_type = other DNA
cttggttgtgaaatgtaagg

SEQ ID NO: 197329 - DNA, 20 bp, synthetic construct
  source 1..20: mol_type = other DNA
gcttggttgtgaaatgtaag

SEQ ID NO: 197330 - DNA, 20 bp, synthetic construct
  source 1..20: mol_type = other DNA
agcttggttgtgaaatgtaa

SEQ ID NO: 197331 - DNA, 20 bp, synthetic construct
  source 1..20: mol_type = other DNA
gagcttggttgtgaaatgta

SEQ ID NO: 197332 - DNA, 20 bp, synthetic construct
  source 1..20: mol_type = other DNA
agagcttggttgtgaaatgt

SEQ ID NO: 197333 - DNA, 20 bp, synthetic construct
  source 1..20: mol_type = other DNA
cagagcttggttgtgaaatg

SEQ ID NO: 197334 - DNA, 20 bp, synthetic construct
  source 1..20: mol_type = other DNA
acagagcttggttgtgaaat

SEQ ID NO: 197335 - DNA, 20 bp, synthetic construct
  source 1..20: mol_type = other DNA
gacagagcttggttgtgaaa

SEQ ID NO: 197336 - DNA, 20 bp, synthetic construct
  source 1..20: mol_type = other DNA
agacagagcttggttgtgaa

SEQ ID NO: 197337 - DNA, 20 bp, synthetic construct
  source 1..20: mol_type = other DNA
gagacagagcttggttgtga

SEQ ID NO: 197338 - DNA, 20 bp, synthetic construct
  source 1..20: mol_type = other DNA
ggagacagagcttggttgtg

SEQ ID NO: 197339 - DNA, 20 bp, synthetic construct
  source 1..20: mol_type = other DNA
gggagacagagcttggttgt

SEQ ID NO: 197340 - DNA, 20 bp, synthetic construct
  source 1..20: mol_type = other DNA
ggggagacagagcttggttg

SEQ ID NO: 197341 - DNA, 20 bp, synthetic construct
  source 1..20: mol_type = other DNA
aggggagacagagcttggtt

SEQ ID NO: 197342 - DNA, 20 bp, synthetic construct
  source 1..20: mol_type = other DNA
caggggagacagagcttggt

SEQ ID NO: 197343 - DNA, 20 bp, synthetic construct
  source 1..20: mol_type = other DNA
ccaggggagacagagcttgg

SEQ ID NO: 197344 - DNA, 20 bp, synthetic construct
  source 1..20: mol_type = other DNA
tccaggggagacagagcttg

SEQ ID NO: 197345 - DNA, 20 bp, synthetic construct
  source 1..20: mol_type = other DNA
ttccaggggagacagagctt

SEQ ID NO: 197346 - DNA, 20 bp, synthetic construct
  source 1..20: mol_type = other DNA
attccaggggagacagagct

SEQ ID NO: 197347 - DNA, 20 bp, synthetic construct
  source 1..20: mol_type = other DNA
gattccaggggagacagagc

SEQ ID NO: 197348 - DNA, 20 bp, synthetic construct
  source 1..20: mol_type = other DNA
ggattccaggggagacagag

SEQ ID NO: 197349 - DNA, 20 bp, synthetic construct
  source 1..20: mol_type = other DNA
tggattccaggggagacaga

SEQ ID NO: 197350 - DNA, 20 bp, synthetic construct
  source 1..20: mol_type = other DNA
ctggattccaggggagacag

SEQ ID NO: 197351 - DNA, 20 bp, synthetic construct
  source 1..20: mol_type = other DNA
gctggattccaggggagaca

SEQ ID NO: 197352 - DNA, 20 bp, synthetic construct
  source 1..20: mol_type = other DNA
ggctggattccaggggagac

SEQ ID NO: 197353 - DNA, 20 bp, synthetic construct
  source 1..20: mol_type = other DNA
tggctggattccaggggaga

SEQ ID NO: 197354 - DNA, 20 bp, synthetic construct
  source 1..20: mol_type = other DNA
atggctggattccaggggag

SEQ ID NO: 197355 - DNA, 20 bp, synthetic construct
  source 1..20: mol_type = other DNA
tatggctggattccagggga

SEQ ID NO: 197356 - DNA, 20 bp, synthetic construct
  source 1..20: mol_type = other DNA
ttatggctggattccagggg

SEQ ID NO: 197357 - DNA, 20 bp, synthetic construct
  source 1..20: mol_type = other DNA
gttatggctggattccaggg

SEQ ID NO: 197358 - DNA, 20 bp, synthetic construct
  source 1..20: mol_type = other DNA
agttatggctggattccagg

SEQ ID NO: 197359 - DNA, 20 bp, synthetic construct
  source 1..20: mol_type = other DNA
gagttatggctggattccag

SEQ ID NO: 197360 - DNA, 20 bp, synthetic construct
  source 1..20: mol_type = other DNA
agagttatggctggattcca

SEQ ID NO: 197361 - DNA, 20 bp, synthetic construct
  source 1..20: mol_type = other DNA
cagagttatggctggattcc

SEQ ID NO: 197362 - DNA, 20 bp, synthetic construct
  source 1..20: mol_type = other DNA
gcagagttatggctggattc

SEQ ID NO: 197363 - DNA, 20 bp, synthetic construct
  source 1..20: mol_type = other DNA
agcagagttatggctggatt

SEQ ID NO: 197364 - DNA, 20 bp, synthetic construct
  source 1..20: mol_type = other DNA
gagcagagttatggctggat

SEQ ID NO: 197365 - DNA, 20 bp, synthetic construct
  source 1..20: mol_type = other DNA
tgagcagagttatggctgga

SEQ ID NO: 197366 - DNA, 20 bp, synthetic construct
  source 1..20: mol_type = other DNA
gtgagcagagttatggctgg

SEQ ID NO: 197367 - DNA, 20 bp, synthetic construct
  source 1..20: mol_type = other DNA
tgtgagcagagttatggctg

SEQ ID NO: 197368 - DNA, 20 bp, synthetic construct
  source 1..20: mol_type = other DNA
ttgtgagcagagttatggct

SEQ ID NO: 197369 - DNA, 20 bp, synthetic construct
  source 1..20: mol_type = other DNA
cttgtgagcagagttatggc

SEQ ID NO: 197370 - DNA, 20 bp, synthetic construct
  source 1..20: mol_type = other DNA
acttgtgagcagagttatgg

SEQ ID NO: 197371 - DNA, 20 bp, synthetic construct
  source 1..20: mol_type = other DNA
cacttgtgagcagagttatg

SEQ ID NO: 197372 - DNA, 20 bp, synthetic construct
  source 1..20: mol_type = other DNA
acacttgtgagcagagttat

SEQ ID NO: 197373 - DNA, 20 bp, synthetic construct
  source 1..20: mol_type = other DNA
cacacttgtgagcagagtta

SEQ ID NO: 197374 - DNA, 20 bp, synthetic construct
  source 1..20: mol_type = other DNA
tcacacttgtgagcagagtt

SEQ ID NO: 197375 - DNA, 20 bp, synthetic construct
  source 1..20: mol_type = other DNA
ctcacacttgtgagcagagt

SEQ ID NO: 197376 - DNA, 20 bp, synthetic construct
  source 1..20: mol_type = other DNA
tctcacacttgtgagcagag

SEQ ID NO: 197377 - DNA, 20 bp, synthetic construct
  source 1..20: mol_type = other DNA
gtctcacacttgtgagcaga

SEQ ID NO: 197378 - DNA, 20 bp, synthetic construct
  source 1..20: mol_type = other DNA
tgtctcacacttgtgagcag

SEQ ID NO: 197379 - DNA, 20 bp, synthetic construct
  source 1..20: mol_type = other DNA
ctgtctcacacttgtgagca

SEQ ID NO: 197380 - DNA, 20 bp, synthetic construct
  source 1..20: mol_type = other DNA
cctgtctcacacttgtgagc

SEQ ID NO: 197381 - DNA, 20 bp, synthetic construct
  source 1..20: mol_type = other DNA
gcctgtctcacacttgtgag

SEQ ID NO: 197382 - DNA, 20 bp, synthetic construct
  source 1..20: mol_type = other DNA
ggcctgtctcacacttgtga

SEQ ID NO: 197383 - DNA, 20 bp, synthetic construct
  source 1..20: mol_type = other DNA
gggcctgtctcacacttgtg

SEQ ID NO: 197384 - DNA, 20 bp, synthetic construct
  source 1..20: mol_type = other DNA
ggggcctgtctcacacttgt

SEQ ID NO: 197385 - DNA, 20 bp, synthetic construct
  source 1..20: mol_type = other DNA
tggggcctgtctcacacttg

SEQ ID NO: 197386 - DNA, 20 bp, synthetic construct
  source 1..20: mol_type = other DNA
ctggggcctgtctcacactt

SEQ ID NO: 197387 - DNA, 20 bp, synthetic construct
  source 1..20: mol_type = other DNA
gctggggcctgtctcacact

SEQ ID NO: 197388 - DNA, 20 bp, synthetic construct
  source 1..20: mol_type = other DNA
tgctggggcctgtctcacac

SEQ ID NO: 197389 - DNA, 20 bp, synthetic construct
  source 1..20: mol_type = other DNA
ctgctggggcctgtctcaca

SEQ ID NO: 197390 - DNA, 20 bp, synthetic construct
  source 1..20: mol_type = other DNA
tctgctggggcctgtctcac

SEQ ID NO: 197391 - DNA, 20 bp, synthetic construct
  source 1..20: mol_type = other DNA
ctctgctggggcctgtctca

SEQ ID NO: 197392 - DNA, 20 bp, synthetic construct
  source 1..20: mol_type = other DNA
gctctgctggggcctgtctc

SEQ ID NO: 197393 - DNA, 20 bp, synthetic construct
  source 1..20: mol_type = other DNA
agctctgctggggcctgtct

SEQ ID NO: 197394 - DNA, 20 bp, synthetic construct
  source 1..20: mol_type = other DNA
cagctctgctggggcctgtc

SEQ ID NO: 197395 - DNA, 20 bp, synthetic construct
  source 1..20: mol_type = other DNA
gcagctctgctggggcctgt

SEQ ID NO: 197396 - DNA, 20 bp, synthetic construct
  source 1..20: mol_type = other DNA
tgcagctctgctggggcctg

SEQ ID NO: 197397 - DNA, 20 bp, synthetic construct
  source 1..20: mol_type = other DNA
gtgcagctctgctggggcct

SEQ ID NO: 197398 - DNA, 20 bp, synthetic construct
  source 1..20: mol_type = other DNA
cgtgcagctctgctggggcc

SEQ ID NO: 197399 - DNA, 20 bp, synthetic construct
  source 1..20: mol_type = other DNA
tcgtgcagctctgctggggc

SEQ ID NO: 197400 - DNA, 20 bp, synthetic construct
  source 1..20: mol_type = other DNA
ttcgtgcagctctgctgggg

SEQ ID NO: 197401 - DNA, 20 bp, synthetic construct
  source 1..20: mol_type = other DNA
cttcgtgcagctctgctggg

SEQ ID NO: 197402 - DNA, 20 bp, synthetic construct
  source 1..20: mol_type = other DNA
tcttcgtgcagctctgctgg

SEQ ID NO: 197403 - DNA, 20 bp, synthetic construct
  source 1..20: mol_type = other DNA
ctcttcgtgcagctctgctg

SEQ ID NO: 197404 - DNA, 20 bp, synthetic construct
  source 1..20: mol_type = other DNA
cctcttcgtgcagctctgct

SEQ ID NO: 197405 - DNA, 20 bp, synthetic construct
  source 1..20: mol_type = other DNA
tcctcttcgtgcagctctgc

SEQ ID NO: 197406 - DNA, 20 bp, synthetic construct
  source 1..20: mol_type = other DNA
ctcctcttcgtgcagctctg

SEQ ID NO: 197407 - DNA, 20 bp, synthetic construct
  source 1..20: mol_type = other DNA
tctcctcttcgtgcagctct

SEQ ID NO: 197408 - DNA, 20 bp, synthetic construct
  source 1..20: mol_type = other DNA
ctctcctcttcgtgcagctc

SEQ ID NO: 197409 - DNA, 20 bp, synthetic construct
  source 1..20: mol_type = other DNA
tctctcctcttcgtgcagct

SEQ ID NO: 197410 - DNA, 20 bp, synthetic construct
  source 1..20: mol_type = other DNA
ttctctcctcttcgtgcagc

SEQ ID NO: 197411 - DNA, 20 bp, synthetic construct
  source 1..20: mol_type = other DNA
cttctctcctcttcgtgcag

SEQ ID NO: 197412 - DNA, 20 bp, synthetic construct
  source 1..20: mol_type = other DNA
ccttctctcctcttcgtgca

SEQ ID NO: 197413 - DNA, 20 bp, synthetic construct
  source 1..20: mol_type = other DNA
gccttctctcctcttcgtgc

SEQ ID NO: 197414 - DNA, 20 bp, synthetic construct
  source 1..20: mol_type = other DNA
tgccttctctcctcttcgtg

SEQ ID NO: 197415 - DNA, 20 bp, synthetic construct
  source 1..20: mol_type = other DNA
ctgccttctctcctcttcgt

SEQ ID NO: 197416 - DNA, 20 bp, synthetic construct
  source 1..20: mol_type = other DNA
gctgccttctctcctcttcg

SEQ ID NO: 197417 - DNA, 20 bp, synthetic construct
  source 1..20: mol_type = other DNA
ggctgccttctctcctcttc

SEQ ID NO: 197418 - DNA, 20 bp, synthetic construct
  source 1..20: mol_type = other DNA
gggctgccttctctcctctt

SEQ ID NO: 197419 - DNA, 20 bp, synthetic construct
  source 1..20: mol_type = other DNA
ggggctgccttctctcctct

SEQ ID NO: 197420 - DNA, 20 bp, synthetic construct
  source 1..20: mol_type = other DNA
gggggctgccttctctcctc

SEQ ID NO: 197421 - DNA, 20 bp, synthetic construct
  source 1..20: mol_type = other DNA
ggggggctgccttctctcct

SEQ ID NO: 197422 - DNA, 20 bp, synthetic construct
  source 1..20: mol_type = other DNA
tggggggctgccttctctcc

SEQ ID NO: 197423 - DNA, 20 bp, synthetic construct
  source 1..20: mol_type = other DNA
ctggggggctgccttctctc

SEQ ID NO: 197424 - DNA, 20 bp, synthetic construct
  source 1..20: mol_type = other DNA
tctggggggctgccttctct

SEQ ID NO: 197425 - DNA, 20 bp, synthetic construct
  source 1..20: mol_type = other DNA
gtctggggggctgccttctc

SEQ ID NO: 197426 - DNA, 20 bp, synthetic construct
  source 1..20: mol_type = other DNA
agtctggggggctgccttct

SEQ ID NO: 197427 - DNA, 20 bp, synthetic construct
  source 1..20: mol_type = other DNA
gagtctggggggctgccttc

SEQ ID NO: 197428 - DNA, 20 bp, synthetic construct
  source 1..20: mol_type = other DNA
ggagtctggggggctgcctt

SEQ ID NO: 197429 - DNA, 20 bp, synthetic construct
  source 1..20: mol_type = other DNA
gggagtctggggggctgcct

SEQ ID NO: 197430 - DNA, 20 bp, synthetic construct
  source 1..20: mol_type = other DNA
tgggagtctggggggctgcc

SEQ ID NO: 197431 - DNA, 20 bp, synthetic construct
  source 1..20: mol_type = other DNA
ttgggagtctggggggctgc

SEQ ID NO: 197432 - DNA, 20 bp, synthetic construct
  source 1..20: mol_type = other DNA
gttgggagtctggggggctg

SEQ ID NO: 197433 - DNA, 20 bp, synthetic construct
  source 1..20: mol_type = other DNA
ggttgggagtctggggggct

SEQ ID NO: 197434 - DNA, 20 bp, synthetic construct
  source 1..20: mol_type = other DNA
gggttgggagtctggggggc

SEQ ID NO: 197435 - DNA, 20 bp, synthetic construct
  source 1..20: mol_type = other DNA
ggggttgggagtctgggggg

SEQ ID NO: 197436 - DNA, 20 bp, synthetic construct
  source 1..20: mol_type = other DNA
gggggttgggagtctggggg

SEQ ID NO: 197437 - DNA, 20 bp, synthetic construct
  source 1..20: mol_type = other DNA
agggggttgggagtctgggg

SEQ ID NO: 197438 - DNA, 20 bp, synthetic construct
  source 1..20: mol_type = other DNA
cagggggttgggagtctggg

SEQ ID NO: 197439 - DNA, 20 bp, synthetic construct
  source 1..20: mol_type = other DNA
acagggggttgggagtctgg

SEQ ID NO: 197440 - DNA, 20 bp, synthetic construct
  source 1..20: mol_type = other DNA
gacagggggttgggagtctg

SEQ ID NO: 197441 - DNA, 20 bp, synthetic construct
  source 1..20: mol_type = other DNA
ggacagggggttgggagtct

SEQ ID NO: 197442 - DNA, 20 bp, synthetic construct
  source 1..20: mol_type = other DNA
tggacagggggttgggagtc

SEQ ID NO: 197443 - DNA, 20 bp, synthetic construct
  source 1..20: mol_type = other DNA
ttggacagggggttgggagt

SEQ ID NO: 197444 - DNA, 20 bp, synthetic construct
  source 1..20: mol_type = other DNA
cttggacagggggttgggag

SEQ ID NO: 197445 - DNA, 20 bp, synthetic construct
  source 1..20: mol_type = other DNA
tcttggacagggggttggga

SEQ ID NO: 197446 - DNA, 20 bp, synthetic construct
  source 1..20: mol_type = other DNA
atcttggacagggggttggg

SEQ ID NO: 197447 - DNA, 20 bp, synthetic construct
  source 1..20: mol_type = other DNA
catcttggacagggggttgg

SEQ ID NO: 197448 - DNA, 20 bp, synthetic construct
  source 1..20: mol_type = other DNA
ccatcttggacagggggttg

SEQ ID NO: 197449 - DNA, 20 bp, synthetic construct
  source 1..20: mol_type = other DNA
gccatcttggacagggggtt

SEQ ID NO: 197450 - DNA, 20 bp, synthetic construct
  source 1..20: mol_type = other DNA
tgccatcttggacagggggt

SEQ ID NO: 197451 - DNA, 20 bp, synthetic construct
  source 1..20: mol_type = other DNA
ttgccatcttggacaggggg

SEQ ID NO: 197452 - DNA, 20 bp, synthetic construct
  source 1..20: mol_type = other DNA
tttgccatcttggacagggg

SEQ ID NO: 197453 - DNA, 20 bp, synthetic construct
  source 1..20: mol_type = other DNA
ttttgccatcttggacaggg

SEQ ID NO: 197454 - DNA, 20 bp, synthetic construct
  source 1..20: mol_type = other DNA
gttttgccatcttggacagg

SEQ ID NO: 197455 - DNA, 20 bp, synthetic construct
  source 1..20: mol_type = other DNA
ggttttgccatcttggacag

SEQ ID NO: 197456 - DNA, 20 bp, synthetic construct
  source 1..20: mol_type = other DNA
tggttttgccatcttggaca

SEQ ID NO: 197457 - DNA, 20 bp, synthetic construct
  source 1..20: mol_type = other DNA
ctggttttgccatcttggac

SEQ ID NO: 197458 - DNA, 20 bp, synthetic construct
  source 1..20: mol_type = other DNA
tctggttttgccatcttgga

SEQ ID NO: 197459 - DNA, 20 bp, synthetic construct
  source 1..20: mol_type = other DNA
ttctggttttgccatcttgg

SEQ ID NO: 197460 - DNA, 20 bp, synthetic construct
  source 1..20: mol_type = other DNA
gttctggttttgccatcttg

SEQ ID NO: 197461 - DNA, 20 bp, synthetic construct
  source 1..20: mol_type = other DNA
tgttctggttttgccatctt

SEQ ID NO: 197462 - DNA, 20 bp, synthetic construct
  source 1..20: mol_type = other DNA
gtgttctggttttgccatct

SEQ ID NO: 197463 - DNA, 20 bp, synthetic construct
  source 1..20: mol_type = other DNA
tgtgttctggttttgccatc

SEQ ID NO: 197464 - DNA, 20 bp, synthetic construct
  source 1..20: mol_type = other DNA
ctgtgttctggttttgccat

SEQ ID NO: 197465 - DNA, 20 bp, synthetic construct
  source 1..20: mol_type = other DNA
gctgtgttctggttttgcca

SEQ ID NO: 197466 - DNA, 20 bp, synthetic construct
  source 1..20: mol_type = other DNA
ggctgtgttctggttttgcc

SEQ ID NO: 197467 - DNA, 20 bp, synthetic construct
  source 1..20: mol_type = other DNA
aggctgtgttctggttttgc

SEQ ID NO: 197468 - DNA, 20 bp, synthetic construct
  source 1..20: mol_type = other DNA
gaggctgtgttctggttttg

SEQ ID NO: 197469 - DNA, 20 bp, synthetic construct
  source 1..20: mol_type = other DNA
agaggctgtgttctggtttt

SEQ ID NO: 197470 - DNA, 20 bp, synthetic construct
  source 1..20: mol_type = other DNA
cagaggctgtgttctggttt

SEQ ID NO: 197471 - DNA, 20 bp, synthetic construct
  source 1..20: mol_type = other DNA
acagaggctgtgttctggtt

SEQ ID NO: 197472 - DNA, 20 bp, synthetic construct
  source 1..20: mol_type = other DNA
tacagaggctgtgttctggt

SEQ ID NO: 197473 - DNA, 20 bp, synthetic construct
  source 1..20: mol_type = other DNA
gtacagaggctgtgttctgg

SEQ ID NO: 197474 - DNA, 20 bp, synthetic construct
  source 1..20: mol_type = other DNA
ggtacagaggctgtgttctg

SEQ ID NO: 197475 - DNA, 20 bp, synthetic construct
  source 1..20: mol_type = other DNA
tggtacagaggctgtgttct

SEQ ID NO: 197476 - DNA, 20 bp, synthetic construct
  source 1..20: mol_type = other DNA
gtggtacagaggctgtgttc

SEQ ID NO: 197477 - DNA, 20 bp, synthetic construct
  source 1..20: mol_type = other DNA
ggtggtacagaggctgtgtt

SEQ ID NO: 197478 - DNA, 20 bp, synthetic construct
  source 1..20: mol_type = other DNA
gggtggtacagaggctgtgt

SEQ ID NO: 197479 - DNA, 20 bp, synthetic construct
  source 1..20: mol_type = other DNA
ggggtggtacagaggctgtg

SEQ ID NO: 197480 - DNA, 20 bp, synthetic construct
  source 1..20: mol_type = other DNA
tggggtggtacagaggctgt

SEQ ID NO: 197481 - DNA, 20 bp, synthetic construct
  source 1..20: mol_type = other DNA
ctggggtggtacagaggctg

SEQ ID NO: 197482 - DNA, 20 bp, synthetic construct
  source 1..20: mol_type = other DNA
gctggggtggtacagaggct

SEQ ID NO: 197483 - DNA, 20 bp, synthetic construct
  source 1..20: mol_type = other DNA
tgctggggtggtacagaggc

SEQ ID NO: 197484 - DNA, 20 bp, synthetic construct
  source 1..20: mol_type = other DNA
ctgctggggtggtacagagg

SEQ ID NO: 197485 - DNA, 20 bp, synthetic construct
  source 1..20: mol_type = other DNA
cctgctggggtggtacagag

SEQ ID NO: 197486 - DNA, 20 bp, synthetic construct
  source 1..20: mol_type = other DNA
acctgctggggtggtacaga

SEQ ID NO: 197487 - DNA, 20 bp, synthetic construct
  source 1..20: mol_type = other DNA
tacctgctggggtggtacag

SEQ ID NO: 197488 - DNA, 20 bp, synthetic construct
  source 1..20: mol_type = other DNA
atacctgctggggtggtaca

SEQ ID NO: 197489 - DNA, 20 bp, synthetic construct
  source 1..20: mol_type = other DNA
aatacctgctggggtggtac

SEQ ID NO: 197490 - DNA, 20 bp, synthetic construct
  source 1..20: mol_type = other DNA
gaatacctgctggggtggta

SEQ ID NO: 197491 - DNA, 20 bp, synthetic construct
  source 1..20: mol_type = other DNA
tgaatacctgctggggtggt

SEQ ID NO: 197492 - DNA, 20 bp, synthetic construct
  source 1..20: mol_type = other DNA
ctgaatacctgctggggtgg

SEQ ID NO: 197493 - DNA, 20 bp, synthetic construct
  source 1..20: mol_type = other DNA
tctgaatacctgctggggtg

SEQ ID NO: 197494 - DNA, 20 bp, synthetic construct
  source 1..20: mol_type = other DNA
ttctgaatacctgctggggt

SEQ ID NO: 197495 - DNA, 20 bp, synthetic construct
  source 1..20: mol_type = other DNA
attctgaatacctgctgggg

SEQ ID NO: 197496 - DNA, 20 bp, synthetic construct
  source 1..20: mol_type = other DNA
gattctgaatacctgctggg

SEQ ID NO: 197497 - DNA, 20 bp, synthetic construct
  source 1..20: mol_type = other DNA
agattctgaatacctgctgg

SEQ ID NO: 197498 - DNA, 20 bp, synthetic construct
  source 1..20: mol_type = other DNA
cagattctgaatacctgctg

SEQ ID NO: 197499 - DNA, 20 bp, synthetic construct
  source 1..20: mol_type = other DNA
gcagattctgaatacctgct

SEQ ID NO: 197500 - DNA, 20 bp, synthetic construct
  source 1..20: mol_type = other DNA
tgcagattctgaatacctgc

SEQ ID NO: 197501 - DNA, 20 bp, synthetic construct
  source 1..20: mol_type = other DNA
ttgcagattctgaatacctg

SEQ ID NO: 197502 - DNA, 20 bp, synthetic construct
  source 1..20: mol_type = other DNA
attgcagattctgaatacct

SEQ ID NO: 197503 - DNA, 20 bp, synthetic construct
  source 1..20: mol_type = other DNA
gattgcagattctgaatacc

SEQ ID NO: 197504 - DNA, 20 bp, synthetic construct
  source 1..20: mol_type = other DNA
agattgcagattctgaatac

SEQ ID NO: 197505 - DNA, 20 bp, synthetic construct
  source 1..20: mol_type = other DNA
gagattgcagattctgaata

SEQ ID NO: 197506 - DNA, 20 bp, synthetic construct
  source 1..20: mol_type = other DNA
ggagattgcagattctgaat

SEQ ID NO: 197507 - DNA, 20 bp, synthetic construct
  source 1..20: mol_type = other DNA
tggagattgcagattctgaa

SEQ ID NO: 197508 - DNA, 20 bp, synthetic construct
  source 1..20: mol_type = other DNA
ttggagattgcagattctga

SEQ ID NO: 197509 - DNA, 20 bp, synthetic construct
  source 1..20: mol_type = other DNA
tttggagattgcagattctg

SEQ ID NO: 197510 - DNA, 20 bp, synthetic construct
  source 1..20: mol_type = other DNA
ctttggagattgcagattct

SEQ ID NO: 197511 - DNA, 20 bp, synthetic construct
  source 1..20: mol_type = other DNA
gctttggagattgcagattc

SEQ ID NO: 197512 - DNA, 20 bp, synthetic construct
  source 1..20: mol_type = other DNA
ggctttggagattgcagatt

SEQ ID NO: 197513 - DNA, 20 bp, synthetic construct
  source 1..20: mol_type = other DNA
gggctttggagattgcagat

SEQ ID NO: 197514 - DNA, 20 bp, synthetic construct
  source 1..20: mol_type = other DNA
tgggctttggagattgcaga

SEQ ID NO: 197515 - DNA, 20 bp, synthetic construct
  source 1..20: mol_type = other DNA
gtgggctttggagattgcag

SEQ ID NO: 197516 - DNA, 20 bp, synthetic construct
  source 1..20: mol_type = other DNA
agtgggctttggagattgca

SEQ ID NO: 197517 - DNA, 20 bp, synthetic construct
  source 1..20: mol_type = other DNA
aagtgggctttggagattgc

SEQ ID NO: 197518 - DNA, 20 bp, synthetic construct
  source 1..20: mol_type = other DNA
gaagtgggctttggagattg

SEQ ID NO: 197519 - DNA, 20 bp, synthetic construct
  source 1..20: mol_type = other DNA
tgaagtgggctttggagatt

SEQ ID NO: 197520 - DNA, 20 bp, synthetic construct
  source 1..20: mol_type = other DNA
ttgaagtgggctttggagat

SEQ ID NO: 197521 - DNA, 20 bp, synthetic construct
  source 1..20: mol_type = other DNA
attgaagtgggctttggaga

SEQ ID NO: 197522 - DNA, 20 bp, synthetic construct
  source 1..20: mol_type = other DNA
aattgaagtgggctttggag

SEQ ID NO: 197523 - DNA, 20 bp, synthetic construct
  source 1..20: mol_type = other DNA
caattgaagtgggctttgga

SEQ ID NO: 197524 - DNA, 20 bp, synthetic construct
  source 1..20: mol_type = other DNA
acaattgaagtgggctttgg

SEQ ID NO: 197525 - DNA, 20 bp, synthetic construct
  source 1..20: mol_type = other DNA
tacaattgaagtgggctttg

SEQ ID NO: 197526 - DNA, 20 bp, synthetic construct
  source 1..20: mol_type = other DNA
ttacaattgaagtgggcttt

SEQ ID NO: 197527 - DNA, 20 bp, synthetic construct
  source 1..20: mol_type = other DNA
tttacaattgaagtgggctt

SEQ ID NO: 197528 - DNA, 20 bp, synthetic construct
  source 1..20: mol_type = other DNA
atttacaattgaagtgggct

SEQ ID NO: 197529 - DNA, 20 bp, synthetic construct
  source 1..20: mol_type = other DNA
catttacaattgaagtgggc

SEQ ID NO: 197530 - DNA, 20 bp, synthetic construct
  source 1..20: mol_type = other DNA
acatttacaattgaagtggg

SEQ ID NO: 197531 - DNA, 20 bp, synthetic construct
  source 1..20: mol_type = other DNA
tacatttacaattgaagtgg

SEQ ID NO: 197532 - DNA, 20 bp, synthetic construct
  source 1..20: mol_type = other DNA
ctacatttacaattgaagtg

SEQ ID NO: 197533 - DNA, 20 bp, synthetic construct
  source 1..20: mol_type = other DNA
tctacatttacaattgaagt

SEQ ID NO: 197534 - DNA, 20 bp, synthetic construct
  source 1..20: mol_type = other DNA
ctctacatttacaattgaag

SEQ ID NO: 197535 - DNA, 20 bp, synthetic construct
  source 1..20: mol_type = other DNA
gctctacatttacaattgaa

SEQ ID NO: 197536 - DNA, 20 bp, synthetic construct
  source 1..20: mol_type = other DNA
ggctctacatttacaattga

SEQ ID NO: 197537 - DNA, 20 bp, synthetic construct
  source 1..20: mol_type = other DNA
tggctctacatttacaattg

SEQ ID NO: 197538 - DNA, 20 bp, synthetic construct
  source 1..20: mol_type = other DNA
gtggctctacatttacaatt

SEQ ID NO: 197539 - DNA, 20 bp, synthetic construct
  source 1..20: mol_type = other DNA
cgtggctctacatttacaat

SEQ ID NO: 197540 - DNA, 20 bp, synthetic construct
  source 1..20: mol_type = other DNA
acgtggctctacatttacaa

SEQ ID NO: 197541 - DNA, 20 bp, synthetic construct
  source 1..20: mol_type = other DNA
cacgtggctctacatttaca

SEQ ID NO: 197542 - DNA, 20 bp, synthetic construct
  source 1..20: mol_type = other DNA
gcacgtggctctacatttac

SEQ ID NO: 197543 - DNA, 20 bp, synthetic construct
  source 1..20: mol_type = other DNA
cgcacgtggctctacattta

SEQ ID NO: 197544 - DNA, 20 bp, synthetic construct
  source 1..20: mol_type = other DNA
gcgcacgtggctctacattt

SEQ ID NO: 197545 - DNA, 20 bp, synthetic construct
  source 1..20: mol_type = other DNA
agcgcacgtggctctacatt

SEQ ID NO: 197546 - DNA, 20 bp, synthetic construct
  source 1..20: mol_type = other DNA
aagcgcacgtggctctacat

SEQ ID NO: 197547 - DNA, 20 bp, synthetic construct
  source 1..20: mol_type = other DNA
aaagcgcacgtggctctaca

SEQ ID NO: 197548 - DNA, 20 bp, synthetic construct
  source 1..20: mol_type = other DNA
taaagcgcacgtggctctac

SEQ ID NO: 197549 - DNA, 20 bp, synthetic construct
  source 1..20: mol_type = other DNA
ttaaagcgcacgtggctcta

SEQ ID NO: 197550 - DNA, 20 bp, synthetic construct
  source 1..20: mol_type = other DNA
cttaaagcgcacgtggctct

SEQ ID NO: 197551 - DNA, 20 bp, synthetic construct
  source 1..20: mol_type = other DNA
acttaaagcgcacgtggctc

SEQ ID NO: 197552 - DNA, 20 bp, synthetic construct
  source 1..20: mol_type = other DNA
gacttaaagcgcacgtggct

SEQ ID NO: 197553 - DNA, 20 bp, synthetic construct
  source 1..20: mol_type = other DNA
tgacttaaagcgcacgtggc

SEQ ID NO: 197554 - DNA, 20 bp, synthetic construct
  source 1..20: mol_type = other DNA
gtgacttaaagcgcacgtgg

SEQ ID NO: 197555 - DNA, 20 bp, synthetic construct
  source 1..20: mol_type = other DNA
ggtgacttaaagcgcacgtg

SEQ ID NO: 197556 - DNA, 20 bp, synthetic construct
  source 1..20: mol_type = other DNA
aggtgacttaaagcgcacgt

SEQ ID NO: 197557 - DNA, 20 bp, synthetic construct
  source 1..20: mol_type = other DNA
caggtgacttaaagcgcacg

SEQ ID NO: 197558 - DNA, 20 bp, synthetic construct
  source 1..20: mol_type = other DNA
acaggtgacttaaagcgcac

SEQ ID NO: 197559 - DNA, 20 bp, synthetic construct
  source 1..20: mol_type = other DNA
gacaggtgacttaaagcgca

SEQ ID NO: 197560 - DNA, 20 bp, synthetic construct
  source 1..20: mol_type = other DNA
tgacaggtgacttaaagcgc

SEQ ID NO: 197561 - DNA, 20 bp, synthetic construct
  source 1..20: mol_type = other DNA
gtgacaggtgacttaaagcg

SEQ ID NO: 197562 - DNA, 20 bp, synthetic construct
  source 1..20: mol_type = other DNA
agtgacaggtgacttaaagc

SEQ ID NO: 197563 - DNA, 20 bp, synthetic construct
  source 1..20: mol_type = other DNA
gagtgacaggtgacttaaag

SEQ ID NO: 197564 - DNA, 20 bp, synthetic construct
  source 1..20: mol_type = other DNA
agagtgacaggtgacttaaa

SEQ ID NO: 197565 - DNA, 20 bp, synthetic construct
  source 1..20: mol_type = other DNA
cagagtgacaggtgacttaa

SEQ ID NO: 197566 - DNA, 20 bp, synthetic construct
  source 1..20: mol_type = other DNA
ccagagtgacaggtgactta

SEQ ID NO: 197567 - DNA, 20 bp, synthetic construct
  source 1..20: mol_type = other DNA
tccagagtgacaggtgactt

SEQ ID NO: 197568 - DNA, 20 bp, synthetic construct
  source 1..20: mol_type = other DNA
ctccagagtgacaggtgact

SEQ ID NO: 197569 - DNA, 20 bp, synthetic construct
  source 1..20: mol_type = other DNA
cctccagagtgacaggtgac

SEQ ID NO: 197570 - DNA, 20 bp, synthetic construct
  source 1..20: mol_type = other DNA
gcctccagagtgacaggtga

SEQ ID NO: 197571 - DNA, 20 bp, synthetic construct
  source 1..20: mol_type = other DNA
agcctccagagtgacaggtg

SEQ ID NO: 197572 - DNA, 20 bp, synthetic construct
  source 1..20: mol_type = other DNA
gagcctccagagtgacaggt

SEQ ID NO: 197573 - DNA, 20 bp, synthetic construct
  source 1..20: mol_type = other DNA
agagcctccagagtgacagg

SEQ ID NO: 197574 - DNA, 20 bp, synthetic construct
  source 1..20: mol_type = other DNA
aagagcctccagagtgacag

SEQ ID NO: 197575 - DNA, 20 bp, synthetic construct
  source 1..20: mol_type = other DNA
aaagagcctccagagtgaca

SEQ ID NO: 197576 - DNA, 20 bp, synthetic construct
  source 1..20: mol_type = other DNA
aaaagagcctccagagtgac

SEQ ID NO: 197577 - DNA, 20 bp, synthetic construct
  source 1..20: mol_type = other DNA
caaaagagcctccagagtga

SEQ ID NO: 197578 - DNA, 20 bp, synthetic construct
  source 1..20: mol_type = other DNA
gcaaaagagcctccagagtg

SEQ ID NO: 197579 - DNA, 20 bp, synthetic construct
  source 1..20: mol_type = other DNA
agcaaaagagcctccagagt

SEQ ID NO: 197580 - DNA, 20 bp, synthetic construct
  source 1..20: mol_type = other DNA
gagcaaaagagcctccagag

SEQ ID NO: 197581 - DNA, 20 bp, synthetic construct
  source 1..20: mol_type = other DNA
tgagcaaaagagcctccaga

SEQ ID NO: 197582 - DNA, 20 bp, synthetic construct
  source 1..20: mol_type = other DNA
ctgagcaaaagagcctccag

SEQ ID NO: 197583 - DNA, 20 bp, synthetic construct
  source 1..20: mol_type = other DNA
actgagcaaaagagcctcca

SEQ ID NO: 197584 - DNA, 20 bp, synthetic construct
  source 1..20: mol_type = other DNA
aactgagcaaaagagcctcc

SEQ ID NO: 197585 - DNA, 20 bp, synthetic construct
  source 1..20: mol_type = other DNA
gaactgagcaaaagagcctc

SEQ ID NO: 197586 - DNA, 20 bp, synthetic construct
  source 1..20: mol_type = other DNA
ggaactgagcaaaagagcct

SEQ ID NO: 197587 - DNA, 20 bp, synthetic construct
  source 1..20: mol_type = other DNA
aggaactgagcaaaagagcc

SEQ ID NO: 197588 - DNA, 20 bp, synthetic construct
  source 1..20: mol_type = other DNA
gaggaactgagcaaaagagc

SEQ ID NO: 197589 - DNA, 20 bp, synthetic construct
  source 1..20: mol_type = other DNA
tgaggaactgagcaaaagag

SEQ ID NO: 197590 - DNA, 20 bp, synthetic construct
  source 1..20: mol_type = other DNA
gtgaggaactgagcaaaaga

SEQ ID NO: 197591 - DNA, 20 bp, synthetic construct
  source 1..20: mol_type = other DNA
ggtgaggaactgagcaaaag

SEQ ID NO: 197592 - DNA, 20 bp, synthetic construct
  source 1..20: mol_type = other DNA
tggtgaggaactgagcaaaa

SEQ ID NO: 197593 - DNA, 20 bp, synthetic construct
  source 1..20: mol_type = other DNA
atggtgaggaactgagcaaa

SEQ ID NO: 197594 - DNA, 20 bp, synthetic construct
  source 1..20: mol_type = other DNA
aatggtgaggaactgagcaa

SEQ ID NO: 197595 - DNA, 20 bp, synthetic construct
  source 1..20: mol_type = other DNA
taatggtgaggaactgagca

SEQ ID NO: 197596 - DNA, 20 bp, synthetic construct
  source 1..20: mol_type = other DNA
ctaatggtgaggaactgagc

SEQ ID NO: 197597 - DNA, 20 bp, synthetic construct
  source 1..20: mol_type = other DNA
gctaatggtgaggaactgag

SEQ ID NO: 197598 - DNA, 20 bp, synthetic construct
  source 1..20: mol_type = other DNA
tgctaatggtgaggaactga

SEQ ID NO: 197599 - DNA, 20 bp, synthetic construct
  source 1..20: mol_type = other DNA
ctgctaatggtgaggaactg

SEQ ID NO: 197600 - DNA, 20 bp, synthetic construct
  source 1..20: mol_type = other DNA
cctgctaatggtgaggaact

SEQ ID NO: 197601 - DNA, 20 bp, synthetic construct
  source 1..20: mol_type = other DNA
ccctgctaatggtgaggaac

SEQ ID NO: 197602 - DNA, 20 bp, synthetic construct
  source 1..20: mol_type = other DNA
tccctgctaatggtgaggaa

SEQ ID NO: 197603 - DNA, 20 bp, synthetic construct
  source 1..20: mol_type = other DNA
atccctgctaatggtgagga

SEQ ID NO: 197604 - DNA, 20 bp, synthetic construct
  source 1..20: mol_type = other DNA
catccctgctaatggtgagg

SEQ ID NO: 197605 - DNA, 20 bp, synthetic construct
  source 1..20: mol_type = other DNA
tcatccctgctaatggtgag

SEQ ID NO: 197606 - DNA, 20 bp, synthetic construct
  source 1..20: mol_type = other DNA
gtcatccctgctaatggtga

SEQ ID NO: 197607 - DNA, 20 bp, synthetic construct
  source 1..20: mol_type = other DNA
tgtcatccctgctaatggtg

SEQ ID NO: 197608 - DNA, 20 bp, synthetic construct
  source 1..20: mol_type = other DNA
ctgtcatccctgctaatggt

SEQ ID NO: 197609 - DNA, 20 bp, synthetic construct
  source 1..20: mol_type = other DNA
cctgtcatccctgctaatgg

SEQ ID NO: 197610 - DNA, 20 bp, synthetic construct
  source 1..20: mol_type = other DNA
ccctgtcatccctgctaatg

SEQ ID NO: 197611 - DNA, 20 bp, synthetic construct
  source 1..20: mol_type = other DNA
tccctgtcatccctgctaat

SEQ ID NO: 197612 - DNA, 20 bp, synthetic construct
  source 1..20: mol_type = other DNA
ctccctgtcatccctgctaa

SEQ ID NO: 197613 - DNA, 20 bp, synthetic construct
  source 1..20: mol_type = other DNA
actccctgtcatccctgcta

SEQ ID NO: 197614 - DNA, 20 bp, synthetic construct
  source 1..20: mol_type = other DNA
cactccctgtcatccctgct

SEQ ID NO: 197615 - DNA, 20 bp, synthetic construct
  source 1..20: mol_type = other DNA
gcactccctgtcatccctgc

SEQ ID NO: 197616 - DNA, 20 bp, synthetic construct
  source 1..20: mol_type = other DNA
tgcactccctgtcatccctg

SEQ ID NO: 197617 - DNA, 20 bp, synthetic construct
  source 1..20: mol_type = other DNA
ctgcactccctgtcatccct

SEQ ID NO: 197618 - DNA, 20 bp, synthetic construct
  source 1..20: mol_type = other DNA
cctgcactccctgtcatccc

SEQ ID NO: 197619 - DNA, 20 bp, synthetic construct
  source 1..20: mol_type = other DNA
tcctgcactccctgtcatcc

SEQ ID NO: 197620 - DNA, 20 bp, synthetic construct
  source 1..20: mol_type = other DNA
ctcctgcactccctgtcatc

SEQ ID NO: 197621 - DNA, 20 bp, synthetic construct
  source 1..20: mol_type = other DNA
actcctgcactccctgtcat

SEQ ID NO: 197622 - DNA, 20 bp, synthetic construct
  source 1..20: mol_type = other DNA
cactcctgcactccctgtca

SEQ ID NO: 197623 - DNA, 20 bp, synthetic construct
  source 1..20: mol_type = other DNA
gcactcctgcactccctgtc

SEQ ID NO: 197624 - DNA, 20 bp, synthetic construct
  source 1..20: mol_type = other DNA
cgcactcctgcactccctgt

SEQ ID NO: 197625 - DNA, 20 bp, synthetic construct
  source 1..20: mol_type = other DNA
ccgcactcctgcactccctg

SEQ ID NO: 197626 - DNA, 20 bp, synthetic construct
  source 1..20: mol_type = other DNA
accgcactcctgcactccct

SEQ ID NO: 197627 - DNA, 20 bp, synthetic construct
  source 1..20: mol_type = other DNA
gaccgcactcctgcactccc

SEQ ID NO: 197628 - DNA, 20 bp, synthetic construct
  source 1..20: mol_type = other DNA
cgaccgcactcctgcactcc

SEQ ID NO: 197629 - DNA, 20 bp, synthetic construct
  source 1..20: mol_type = other DNA
tcgaccgcactcctgcactc

SEQ ID NO: 197630 - DNA, 20 bp, synthetic construct
  source 1..20: mol_type = other DNA
gtcgaccgcactcctgcact

SEQ ID NO: 197631 - DNA, 20 bp, synthetic construct
  source 1..20: mol_type = other DNA
agtcgaccgcactcctgcac

SEQ ID NO: 197632 - DNA, 20 bp, synthetic construct
  source 1..20: mol_type = other DNA
gagtcgaccgcactcctgca

SEQ ID NO: 197633 - DNA, 20 bp, synthetic construct
  source 1..20: mol_type = other DNA
ggagtcgaccgcactcctgc

SEQ ID NO: 197634 - DNA, 20 bp, synthetic construct
  source 1..20: mol_type = other DNA
gggagtcgaccgcactcctg

SEQ ID NO: 197635 - DNA, 20 bp, synthetic construct
  source 1..20: mol_type = other DNA
tgggagtcgaccgcactcct

SEQ ID NO: 197636 - DNA, 20 bp, synthetic construct
  source 1..20: mol_type = other DNA
ctgggagtcgaccgcactcc

SEQ ID NO: 197637 - DNA, 20 bp, synthetic construct
  source 1..20: mol_type = other DNA
tctgggagtcgaccgcactc

SEQ ID NO: 197638 - DNA, 20 bp, synthetic construct
  source 1..20: mol_type = other DNA
atctgggagtcgaccgcact

SEQ ID NO: 197639 - DNA, 20 bp, synthetic construct
  source 1..20: mol_type = other DNA
tatctgggagtcgaccgcac

SEQ ID NO: 197640 - DNA, 20 bp, synthetic construct
  source 1..20: mol_type = other DNA
atatctgggagtcgaccgca

SEQ ID NO: 197641 - DNA, 20 bp, synthetic construct
  source 1..20: mol_type = other DNA
aatatctgggagtcgaccgc

SEQ ID NO: 197642 - DNA, 20 bp, synthetic construct
  source 1..20: mol_type = other DNA
caatatctgggagtcgaccg

SEQ ID NO: 197643 - DNA, 20 bp, synthetic construct
  source 1..20: mol_type = other DNA
ccaatatctgggagtcgacc

SEQ ID NO: 197644 - DNA, 20 bp, synthetic construct
  source 1..20: mol_type = other DNA
tccaatatctgggagtcgac

SEQ ID NO: 197645 - DNA, 20 bp, synthetic construct
  source 1..20: mol_type = other DNA
ctccaatatctgggagtcga

SEQ ID NO: 197646 - DNA, 20 bp, synthetic construct
  source 1..20: mol_type = other DNA
tctccaatatctgggagtcg

SEQ ID NO: 197647 - DNA, 20 bp, synthetic construct
  source 1..20: mol_type = other DNA
ctctccaatatctgggagtc

SEQ ID NO: 197648 - DNA, 20 bp, synthetic construct
  source 1..20: mol_type = other DNA
gctctccaatatctgggagt

SEQ ID NO: 197649 - DNA, 20 bp, synthetic construct
  source 1..20: mol_type = other DNA
cgctctccaatatctgggag

SEQ ID NO: 197650 - DNA, 20 bp, synthetic construct
  source 1..20: mol_type = other DNA
gcgctctccaatatctggga

SEQ ID NO: 197651 - DNA, 20 bp, synthetic construct
  source 1..20: mol_type = other DNA
agcgctctccaatatctggg

SEQ ID NO: 197652 - DNA, 20 bp, synthetic construct
  source 1..20: mol_type = other DNA
cagcgctctccaatatctgg

SEQ ID NO: 197653 - DNA, 20 bp, synthetic construct
  source 1..20: mol_type = other DNA
ccagcgctctccaatatctg

SEQ ID NO: 197654 - DNA, 20 bp, synthetic construct
  source 1..20: mol_type = other DNA
cccagcgctctccaatatct

SEQ ID NO: 197655 - DNA, 20 bp, synthetic construct
  source 1..20: mol_type = other DNA
gcccagcgctctccaatatc

SEQ ID NO: 197656 - DNA, 20 bp, synthetic construct
  source 1..20: mol_type = other DNA
agcccagcgctctccaatat

SEQ ID NO: 197657 - DNA, 20 bp, synthetic construct
  source 1..20: mol_type = other DNA
tagcccagcgctctccaata

SEQ ID NO: 197658 - DNA, 20 bp, synthetic construct
  source 1..20: mol_type = other DNA
ctagcccagcgctctccaat

SEQ ID NO: 197659 - DNA, 20 bp, synthetic construct
  source 1..20: mol_type = other DNA
gctagcccagcgctctccaa

SEQ ID NO: 197660 - DNA, 20 bp, synthetic construct
  source 1..20: mol_type = other DNA
agctagcccagcgctctcca

SEQ ID NO: 197661 - DNA, 20 bp, synthetic construct
  source 1..20: mol_type = other DNA
cagctagcccagcgctctcc

SEQ ID NO: 197662 - DNA, 20 bp, synthetic construct
  source 1..20: mol_type = other DNA
gcagctagcccagcgctctc

SEQ ID NO: 197663 - DNA, 20 bp, synthetic construct
  source 1..20: mol_type = other DNA
ggcagctagcccagcgctct

SEQ ID NO: 197664 - DNA, 20 bp, synthetic construct
  source 1..20: mol_type = other DNA
gggcagctagcccagcgctc

SEQ ID NO: 197665 - DNA, 20 bp, synthetic construct
  source 1..20: mol_type = other DNA
tgggcagctagcccagcgct

SEQ ID NO: 197666 - DNA, 20 bp, synthetic construct
  source 1..20: mol_type = other DNA
atgggcagctagcccagcgc

SEQ ID NO: 197667 - DNA, 20 bp, synthetic construct
  source 1..20: mol_type = other DNA
aatgggcagctagcccagcg

SEQ ID NO: 197668 - DNA, 20 bp, synthetic construct
  source 1..20: mol_type = other DNA
gaatgggcagctagcccagc

SEQ ID NO: 197669 - DNA, 20 bp, synthetic construct
  source 1..20: mol_type = other DNA
agaatgggcagctagcccag

SEQ ID NO: 197670 - DNA, 20 bp, synthetic construct
  source 1..20: mol_type = other DNA
gagaatgggcagctagccca

SEQ ID NO: 197671 - DNA, 20 bp, synthetic construct
  source 1..20: mol_type = other DNA
ggagaatgggcagctagccc

SEQ ID NO: 197672 - DNA, 20 bp, synthetic construct
  source 1..20: mol_type = other DNA
gggagaatgggcagctagcc

SEQ ID NO: 197673 - DNA, 20 bp, synthetic construct
  source 1..20: mol_type = other DNA
cgggagaatgggcagctagc

SEQ ID NO: 197674 - DNA, 20 bp, synthetic construct
  source 1..20: mol_type = other DNA
ccgggagaatgggcagctag

SEQ ID NO: 197675 - DNA, 20 bp, synthetic construct
  source 1..20: mol_type = other DNA
gccgggagaatgggcagcta

SEQ ID NO: 197676 - DNA, 20 bp, synthetic construct
  source 1..20: mol_type = other DNA
ggccgggagaatgggcagct

SEQ ID NO: 197677 - DNA, 20 bp, synthetic construct
  source 1..20: mol_type = other DNA
aggccgggagaatgggcagc

SEQ ID NO: 197678 - DNA, 20 bp, synthetic construct
  source 1..20: mol_type = other DNA
gaggccgggagaatgggcag

SEQ ID NO: 197679 - DNA, 20 bp, synthetic construct
  source 1..20: mol_type = other DNA
ggaggccgggagaatgggca

SEQ ID NO: 197680 - DNA, 20 bp, synthetic construct
  source 1..20: mol_type = other DNA
tggaggccgggagaatgggc

SEQ ID NO: 197681 - DNA, 20 bp, synthetic construct
  source 1..20: mol_type = other DNA
gtggaggccgggagaatggg

SEQ ID NO: 197682 - DNA, 20 bp, synthetic construct
  source 1..20: mol_type = other DNA
agtggaggccgggagaatgg

SEQ ID NO: 197683 - DNA, 20 bp, synthetic construct
  source 1..20: mol_type = other DNA
gagtggaggccgggagaatg

SEQ ID NO: 197684 - DNA, 20 bp, synthetic construct
  source 1..20: mol_type = other DNA
ggagtggaggccgggagaat

SEQ ID NO: 197685 - DNA, 20 bp, synthetic construct
  source 1..20: mol_type = other DNA
aggagtggaggccgggagaa

SEQ ID NO: 197686 - DNA, 20 bp, synthetic construct
  source 1..20: mol_type = other DNA
gaggagtggaggccgggaga

SEQ ID NO: 197687 - DNA, 20 bp, synthetic construct
  source 1..20: mol_type = other DNA
agaggagtggaggccgggag

SEQ ID NO: 197688 - DNA, 20 bp, synthetic construct
  source 1..20: mol_type = other DNA
aagaggagtggaggccggga

SEQ ID NO: 197689 - DNA, 20 bp, synthetic construct
  source 1..20: mol_type = other DNA
aaagaggagtggaggccggg

SEQ ID NO: 197690 - DNA, 20 bp, synthetic construct
  source 1..20: mol_type = other DNA
caaagaggagtggaggccgg

SEQ ID NO: 197691 - DNA, 20 bp, synthetic construct
  source 1..20: mol_type = other DNA
gcaaagaggagtggaggccg

SEQ ID NO: 197692 - DNA, 20 bp, synthetic construct
  source 1..20: mol_type = other DNA
agcaaagaggagtggaggcc

SEQ ID NO: 197693 - DNA, 20 bp, synthetic construct
  source 1..20: mol_type = other DNA
cagcaaagaggagtggaggc

SEQ ID NO: 197694 - DNA, 20 bp, synthetic construct
  source 1..20: mol_type = other DNA
acagcaaagaggagtggagg

SEQ ID NO: 197695 - DNA, 20 bp, synthetic construct
  source 1..20: mol_type = other DNA
gacagcaaagaggagtggag

SEQ ID NO: 197696 - DNA, 20 bp, synthetic construct
  source 1..20: mol_type = other DNA
ggacagcaaagaggagtgga

SEQ ID NO: 197697 - DNA, 20 bp, synthetic construct
  source 1..20: mol_type = other DNA
tggacagcaaagaggagtgg

SEQ ID NO: 197698 - DNA, 20 bp, synthetic construct
  source 1..20: mol_type = other DNA
ctggacagcaaagaggagtg

SEQ ID NO: 197699 - DNA, 20 bp, synthetic construct
  source 1..20: mol_type = other DNA
gctggacagcaaagaggagt

SEQ ID NO: 197700 - DNA, 20 bp, synthetic construct
  source 1..20: mol_type = other DNA
ggctggacagcaaagaggag

SEQ ID NO: 197701 - DNA, 20 bp, synthetic construct
  source 1..20: mol_type = other DNA
tggctggacagcaaagagga

SEQ ID NO: 197702 - DNA, 20 bp, synthetic construct
  source 1..20: mol_type = other DNA
atggctggacagcaaagagg

SEQ ID NO: 197703 - DNA, 20 bp, synthetic construct
  source 1..20: mol_type = other DNA
gatggctggacagcaaagag

SEQ ID NO: 197704 - DNA, 20 bp, synthetic construct
  source 1..20: mol_type = other DNA
tgatggctggacagcaaaga

SEQ ID NO: 197705 - DNA, 20 bp, synthetic construct
  source 1..20: mol_type = other DNA
gtgatggctggacagcaaag

SEQ ID NO: 197706 - DNA, 20 bp, synthetic construct
  source 1..20: mol_type = other DNA
agtgatggctggacagcaaa

SEQ ID NO: 197707 - DNA, 20 bp, synthetic construct
  source 1..20: mol_type = other DNA
aagtgatggctggacagcaa

SEQ ID NO: 197708 - DNA, 20 bp, synthetic construct
  source 1..20: mol_type = other DNA
caagtgatggctggacagca

SEQ ID NO: 197709 - DNA, 20 bp, synthetic construct
  source 1..20: mol_type = other DNA
gcaagtgatggctggacagc

SEQ ID NO: 197710 - DNA, 20 bp, synthetic construct
  source 1..20: mol_type = other DNA
agcaagtgatggctggacag

SEQ ID NO: 197711 - DNA, 20 bp, synthetic construct
  source 1..20: mol_type = other DNA
gagcaagtgatggctggaca

SEQ ID NO: 197712 - DNA, 20 bp, synthetic construct
  source 1..20: mol_type = other DNA
agagcaagtgatggctggac

SEQ ID NO: 197713 - DNA, 20 bp, synthetic construct
  source 1..20: mol_type = other DNA
aagagcaagtgatggctgga

SEQ ID NO: 197714 - DNA, 20 bp, synthetic construct
  source 1..20: mol_type = other DNA
aaagagcaagtgatggctgg

SEQ ID NO: 197715 - DNA, 20 bp, synthetic construct
  source 1..20: mol_type = other DNA
caaagagcaagtgatggctg

SEQ ID NO: 197716 - DNA, 20 bp, synthetic construct
  source 1..20: mol_type = other DNA
tcaaagagcaagtgatggct

SEQ ID NO: 197717 - DNA, 20 bp, synthetic construct
  source 1..20: mol_type = other DNA
ttcaaagagcaagtgatggc

SEQ ID NO: 197718 - DNA, 20 bp, synthetic construct
  source 1..20: mol_type = other DNA
cttcaaagagcaagtgatgg

SEQ ID NO: 197719 - DNA, 20 bp, synthetic construct
  source 1..20: mol_type = other DNA
ccttcaaagagcaagtgatg

SEQ ID NO: 197720 - DNA, 20 bp, synthetic construct
  source 1..20: mol_type = other DNA
gccttcaaagagcaagtgat

SEQ ID NO: 197721 - DNA, 20 bp, synthetic construct
  source 1..20: mol_type = other DNA
tgccttcaaagagcaagtga

SEQ ID NO: 197722 - DNA, 20 bp, synthetic construct
  source 1..20: mol_type = other DNA
ttgccttcaaagagcaagtg

SEQ ID NO: 197723 - DNA, 20 bp, synthetic construct
  source 1..20: mol_type = other DNA
tttgccttcaaagagcaagt

SEQ ID NO: 197724 - DNA, 20 bp, synthetic construct
  source 1..20: mol_type = other DNA
gtttgccttcaaagagcaag

SEQ ID NO: 197725 - DNA, 20 bp, synthetic construct
  source 1..20: mol_type = other DNA
tgtttgccttcaaagagcaa

SEQ ID NO: 197726 - DNA, 20 bp, synthetic construct
  source 1..20: mol_type = other DNA
ttgtttgccttcaaagagca

SEQ ID NO: 197727 - DNA, 20 bp, synthetic construct
  source 1..20: mol_type = other DNA
tttgtttgccttcaaagagc

SEQ ID NO: 197728 - DNA, 20 bp, synthetic construct
  source 1..20: mol_type = other DNA
ttttgtttgccttcaaagag

SEQ ID NO: 197729 - DNA, 20 bp, synthetic construct
  source 1..20: mol_type = other DNA
gttttgtttgccttcaaaga

SEQ ID NO: 197730 - DNA, 20 bp, synthetic construct
  source 1..20: mol_type = other DNA
tgttttgtttgccttcaaag

SEQ ID NO: 197731 - DNA, 20 bp, synthetic construct
  source 1..20: mol_type = other DNA
ctgttttgtttgccttcaaa

SEQ ID NO: 197732 - DNA, 20 bp, synthetic construct
  source 1..20: mol_type = other DNA
tctgttttgtttgccttcaa

SEQ ID NO: 197733 - DNA, 20 bp, synthetic construct
  source 1..20: mol_type = other DNA
ttctgttttgtttgccttca

SEQ ID NO: 197734 - DNA, 20 bp, synthetic construct
  source 1..20: mol_type = other DNA
tttctgttttgtttgccttc

SEQ ID NO: 197735 - DNA, 20 bp, synthetic construct
  source 1..20: mol_type = other DNA
ttttctgttttgtttgcctt

SEQ ID NO: 197736 - DNA, 20 bp, synthetic construct
  source 1..20: mol_type = other DNA
gttttctgttttgtttgcct

SEQ ID NO: 197737 - DNA, 20 bp, synthetic construct
  source 1..20: mol_type = other DNA
tgttttctgttttgtttgcc

SEQ ID NO: 197738 - DNA, 20 bp, synthetic construct
  source 1..20: mol_type = other DNA
ctgttttctgttttgtttgc

SEQ ID NO: 197739 - DNA, 20 bp, synthetic construct
  source 1..20: mol_type = other DNA
actgttttctgttttgtttg

SEQ ID NO: 197740 - DNA, 20 bp, synthetic construct
  source 1..20: mol_type = other DNA
cactgttttctgttttgttt

SEQ ID NO: 197741 - DNA, 20 bp, synthetic construct
  source 1..20: mol_type = other DNA
gcactgttttctgttttgtt

SEQ ID NO: 197742 - DNA, 20 bp, synthetic construct
  source 1..20: mol_type = other DNA
ggcactgttttctgttttgt

SEQ ID NO: 197743 - DNA, 20 bp, synthetic construct
  source 1..20: mol_type = other DNA
tggcactgttttctgttttg

SEQ ID NO: 197744 - DNA, 20 bp, synthetic construct
  source 1..20: mol_type = other DNA
ttggcactgttttctgtttt

SEQ ID NO: 197745 - DNA, 20 bp, synthetic construct
  source 1..20: mol_type = other DNA
tttggcactgttttctgttt

SEQ ID NO: 197746 - DNA, 20 bp, synthetic construct
  source 1..20: mol_type = other DNA
ttttggcactgttttctgtt

SEQ ID NO: 197747 - DNA, 20 bp, synthetic construct
  source 1..20: mol_type = other DNA
cttttggcactgttttctgt

SEQ ID NO: 197748 - DNA, 20 bp, synthetic construct
  source 1..20: mol_type = other DNA
acttttggcactgttttctg

SEQ ID NO: 197749 - DNA, 20 bp, synthetic construct
  source 1..20: mol_type = other DNA
tacttttggcactgttttct

SEQ ID NO: 197750 - DNA, 20 bp, synthetic construct
  source 1..20: mol_type = other DNA
atacttttggcactgttttc

SEQ ID NO: 197751 - DNA, 20 bp, synthetic construct
  source 1..20: mol_type = other DNA
catacttttggcactgtttt

SEQ ID NO: 197752 - DNA, 20 bp, synthetic construct
  source 1..20: mol_type = other DNA
ccatacttttggcactgttt

SEQ ID NO: 197753 - DNA, 20 bp, synthetic construct
  source 1..20: mol_type = other DNA
cccatacttttggcactgtt

SEQ ID NO: 197754 - DNA, 20 bp, synthetic construct
  source 1..20: mol_type = other DNA
tcccatacttttggcactgt

SEQ ID NO: 197755 - DNA, 20 bp, synthetic construct
  source 1..20: mol_type = other DNA
ttcccatacttttggcactg

SEQ ID NO: 197756 - DNA, 20 bp, synthetic construct
  source 1..20: mol_type = other DNA
cttcccatacttttggcact

SEQ ID NO: 197757 - DNA, 20 bp, synthetic construct
  source 1..20: mol_type = other DNA
tcttcccatacttttggcac

SEQ ID NO: 197758 - DNA, 20 bp, synthetic construct
  source 1..20: mol_type = other DNA
ttcttcccatacttttggca

SEQ ID NO: 197759 - DNA, 20 bp, synthetic construct
  source 1..20: mol_type = other DNA
tttcttcccatacttttggc

SEQ ID NO: 197760 - DNA, 20 bp, synthetic construct
  source 1..20: mol_type = other DNA
ctttcttcccatacttttgg

SEQ ID NO: 197761 - DNA, 20 bp, synthetic construct
  source 1..20: mol_type = other DNA
gctttcttcccatacttttg

SEQ ID NO: 197762 - DNA, 20 bp, synthetic construct
  source 1..20: mol_type = other DNA
ggctttcttcccatactttt

SEQ ID NO: 197763 - DNA, 20 bp, synthetic construct
  source 1..20: mol_type = other DNA
tggctttcttcccatacttt

SEQ ID NO: 197764 - DNA, 20 bp, synthetic construct
  source 1..20: mol_type = other DNA
ctggctttcttcccatactt

SEQ ID NO: 197765 - DNA, 20 bp, synthetic construct
  source 1..20: mol_type = other DNA
gctggctttcttcccatact

SEQ ID NO: 197766 - DNA, 20 bp, synthetic construct
  source 1..20: mol_type = other DNA
agctggctttcttcccatac

SEQ ID NO: 197767 - DNA, 20 bp, synthetic construct
  source 1..20: mol_type = other DNA
aagctggctttcttcccata

SEQ ID NO: 197768 - DNA, 20 bp, synthetic construct
  source 1..20: mol_type = other DNA
gaagctggctttcttcccat

SEQ ID NO: 197769 - DNA, 20 bp, synthetic construct
  source 1..20: mol_type = other DNA
agaagctggctttcttccca

SEQ ID NO: 197770 - DNA, 20 bp, synthetic construct
  source 1..20: mol_type = other DNA
gagaagctggctttcttccc

SEQ ID NO: 197771 - DNA, 20 bp, synthetic construct
  source 1..20: mol_type = other DNA
ggagaagctggctttcttcc

SEQ ID NO: 197772 - DNA, 20 bp, synthetic construct
  source 1..20: mol_type = other DNA
gggagaagctggctttcttc

SEQ ID NO: 197773 - DNA, 20 bp, synthetic construct
  source 1..20: mol_type = other DNA
ggggagaagctggctttctt

SEQ ID NO: 197774 - DNA, 20 bp, synthetic construct
  source 1..20: mol_type = other DNA
aggggagaagctggctttct

SEQ ID NO: 197775 - DNA, 20 bp, synthetic construct
  source 1..20: mol_type = other DNA
caggggagaagctggctttc

SEQ ID NO: 197776 - DNA, 20 bp, synthetic construct
  source 1..20: mol_type = other DNA
ccaggggagaagctggcttt

SEQ ID NO: 197777 - DNA, 20 bp, synthetic construct
  source 1..20: mol_type = other DNA
cccaggggagaagctggctt

SEQ ID NO: 197778 - DNA, 20 bp, synthetic construct
  source 1..20: mol_type = other DNA
ccccaggggagaagctggct

SEQ ID NO: 197779 - DNA, 20 bp, synthetic construct
  source 1..20: mol_type = other DNA
accccaggggagaagctggc

SEQ ID NO: 197780 - DNA, 20 bp, synthetic construct
  source 1..20: mol_type = other DNA
caccccaggggagaagctgg

SEQ ID NO: 197781 - DNA, 20 bp, synthetic construct
  source 1..20: mol_type = other DNA
gcaccccaggggagaagctg

SEQ ID NO: 197782 - DNA, 20 bp, synthetic construct
  source 1..20: mol_type = other DNA
ggcaccccaggggagaagct

SEQ ID NO: 197783 - DNA, 20 bp, synthetic construct
  source 1..20: mol_type = other DNA
aggcaccccaggggagaagc

SEQ ID NO: 197784 - DNA, 20 bp, synthetic construct
  source 1..20: mol_type = other DNA
caggcaccccaggggagaag

SEQ ID NO: 197785 - DNA, 20 bp, synthetic construct
  source 1..20: mol_type = other DNA
acaggcaccccaggggagaa

SEQ ID NO: 197786 - DNA, 20 bp, synthetic construct
  source 1..20: mol_type = other DNA
cacaggcaccccaggggaga

SEQ ID NO: 197787 - DNA, 20 bp, synthetic construct
  source 1..20: mol_type = other DNA
tcacaggcaccccaggggag

SEQ ID NO: 197788 - DNA, 20 bp, synthetic construct
  source 1..20: mol_type = other DNA
atcacaggcaccccagggga

SEQ ID NO: 197789 - DNA, 20 bp, synthetic construct
  source 1..20: mol_type = other DNA
catcacaggcaccccagggg

SEQ ID NO: 197790 - DNA, 20 bp, synthetic construct
  source 1..20: mol_type = other DNA
gcatcacaggcaccccaggg

SEQ ID NO: 197791 - DNA, 20 bp, synthetic construct
  source 1..20: mol_type = other DNA
ggcatcacaggcaccccagg

SEQ ID NO: 197792 - DNA, 20 bp, synthetic construct
  source 1..20: mol_type = other DNA
tggcatcacaggcaccccag

SEQ ID NO: 197793 - DNA, 20 bp, synthetic construct
  source 1..20: mol_type = other DNA
atggcatcacaggcacccca

SEQ ID NO: 197794 - DNA, 20 bp, synthetic construct
  source 1..20: mol_type = other DNA
catggcatcacaggcacccc

SEQ ID NO: 197795 - DNA, 20 bp, synthetic construct
  source 1..20: mol_type = other DNA
gcatggcatcacaggcaccc

SEQ ID NO: 197796 - DNA, 20 bp, synthetic construct
  source 1..20: mol_type = other DNA
ggcatggcatcacaggcacc

SEQ ID NO: 197797 - DNA, 20 bp, synthetic construct
  source 1..20: mol_type = other DNA
gggcatggcatcacaggcac

SEQ ID NO: 197798 - DNA, 20 bp, synthetic construct
  source 1..20: mol_type = other DNA
tgggcatggcatcacaggca

SEQ ID NO: 197799 - DNA, 20 bp, synthetic construct
  source 1..20: mol_type = other DNA
gtgggcatggcatcacaggc

SEQ ID NO: 197800 - DNA, 20 bp, synthetic construct
  source 1..20: mol_type = other DNA
ggtgggcatggcatcacagg

SEQ ID NO: 197801 - DNA, 20 bp, synthetic construct
  source 1..20: mol_type = other DNA
gggtgggcatggcatcacag

SEQ ID NO: 197802 - DNA, 20 bp, synthetic construct
  source 1..20: mol_type = other DNA
agggtgggcatggcatcaca

SEQ ID NO: 197803 - DNA, 20 bp, synthetic construct
  source 1..20: mol_type = other DNA
gagggtgggcatggcatcac

SEQ ID NO: 197804 - DNA, 20 bp, synthetic construct
  source 1..20: mol_type = other DNA
ggagggtgggcatggcatca

SEQ ID NO: 197805 - DNA, 20 bp, synthetic construct
  source 1..20: mol_type = other DNA
gggagggtgggcatggcatc

SEQ ID NO: 197806 - DNA, 20 bp, synthetic construct
  source 1..20: mol_type = other DNA
agggagggtgggcatggcat

SEQ ID NO: 197807 - DNA, 20 bp, synthetic construct
  source 1..20: mol_type = other DNA
cagggagggtgggcatggca

SEQ ID NO: 197808 - DNA, 20 bp, synthetic construct
  source 1..20: mol_type = other DNA
tcagggagggtgggcatggc

SEQ ID NO: 197809 - DNA, 20 bp, synthetic construct
  source 1..20: mol_type = other DNA
gtcagggagggtgggcatgg

SEQ ID NO: 197810 - DNA, 20 bp, synthetic construct
  source 1..20: mol_type = other DNA
ggtcagggagggtgggcatg

SEQ ID NO: 197811 - DNA, 20 bp, synthetic construct
  source 1..20: mol_type = other DNA
tggtcagggagggtgggcat

SEQ ID NO: 197812 - DNA, 20 bp, synthetic construct
  source 1..20: mol_type = other DNA
gtggtcagggagggtgggca

SEQ ID NO: 197813 - DNA, 20 bp, synthetic construct
  source 1..20: mol_type = other DNA
cgtggtcagggagggtgggc

SEQ ID NO: 197814 - DNA, 20 bp, synthetic construct
  source 1..20: mol_type = other DNA
gcgtggtcagggagggtggg

SEQ ID NO: 197815 - DNA, 20 bp, synthetic construct
  source 1..20: mol_type = other DNA
tgcgtggtcagggagggtgg

SEQ ID NO: 197816 - DNA, 20 bp, synthetic construct
  source 1..20: mol_type = other DNA
ctgcgtggtcagggagggtg

SEQ ID NO: 197817 - DNA, 20 bp, synthetic construct
  source 1..20: mol_type = other DNA
gctgcgtggtcagggagggt

SEQ ID NO: 197818 - DNA, 20 bp, synthetic construct
  source 1..20: mol_type = other DNA
ggctgcgtggtcagggaggg

SEQ ID NO: 197819 - DNA, 20 bp, synthetic construct
  source 1..20: mol_type = other DNA
gggctgcgtggtcagggagg

SEQ ID NO: 197820 - DNA, 20 bp, synthetic construct
  source 1..20: mol_type = other DNA
ggggctgcgtggtcagggag

SEQ ID NO: 197821 - DNA, 20 bp, synthetic construct
  source 1..20: mol_type = other DNA
aggggctgcgtggtcaggga

SEQ ID NO: 197822 - DNA, 20 bp, synthetic construct
  source 1..20: mol_type = other DNA
caggggctgcgtggtcaggg

SEQ ID NO: 197823 - DNA, 20 bp, synthetic construct
  source 1..20: mol_type = other DNA
acaggggctgcgtggtcagg

SEQ ID NO: 197824 - DNA, 20 bp, synthetic construct
  source 1..20: mol_type = other DNA
cacaggggctgcgtggtcag

SEQ ID NO: 197825 - DNA, 20 bp, synthetic construct
  source 1..20: mol_type = other DNA
ccacaggggctgcgtggtca

SEQ ID NO: 197826 - DNA, 20 bp, synthetic construct
  source 1..20: mol_type = other DNA
tccacaggggctgcgtggtc

SEQ ID NO: 197827 - DNA, 20 bp, synthetic construct
  source 1..20: mol_type = other DNA
gtccacaggggctgcgtggt

SEQ ID NO: 197828 - DNA, 20 bp, synthetic construct
  source 1..20: mol_type = other DNA
ggtccacaggggctgcgtgg

SEQ ID NO: 197829 - DNA, 20 bp, synthetic construct
  source 1..20: mol_type = other DNA
gggtccacaggggctgcgtg

SEQ ID NO: 197830 - DNA, 20 bp, synthetic construct
  source 1..20: mol_type = other DNA
agggtccacaggggctgcgt

SEQ ID NO: 197831 - DNA, 20 bp, synthetic construct
  source 1..20: mol_type = other DNA
gagggtccacaggggctgcg

SEQ ID NO: 197832 - DNA, 20 bp, synthetic construct
  source 1..20: mol_type = other DNA
tgagggtccacaggggctgc

SEQ ID NO: 197833 - DNA, 20 bp, synthetic construct
  source 1..20: mol_type = other DNA
ctgagggtccacaggggctg

SEQ ID NO: 197834 - DNA, 20 bp, synthetic construct
  source 1..20: mol_type = other DNA
cctgagggtccacaggggct

SEQ ID NO: 197835 - DNA, 20 bp, synthetic construct
  source 1..20: mol_type = other DNA
ccctgagggtccacaggggc

SEQ ID NO: 197836 - DNA, 20 bp, synthetic construct
  source 1..20: mol_type = other DNA
gccctgagggtccacagggg

SEQ ID NO: 197837 - DNA, 20 bp, synthetic construct
  source 1..20: mol_type = other DNA
ggccctgagggtccacaggg

SEQ ID NO: 197838 - DNA, 20 bp, synthetic construct
  source 1..20: mol_type = other DNA
gggccctgagggtccacagg

SEQ ID NO: 197839 - DNA, 20 bp, synthetic construct
  source 1..20: mol_type = other DNA
ggggccctgagggtccacag

SEQ ID NO: 197840 - DNA, 20 bp, synthetic construct
  source 1..20: mol_type = other DNA
tggggccctgagggtccaca

SEQ ID NO: 197841 - DNA, 20 bp, synthetic construct
  source 1..20: mol_type = other DNA
ttggggccctgagggtccac

SEQ ID NO: 197842 - DNA, 20 bp, synthetic construct
  source 1..20: mol_type = other DNA
cttggggccctgagggtcca

SEQ ID NO: 197843 - DNA, 20 bp, synthetic construct
  source 1..20: mol_type = other DNA
gcttggggccctgagggtcc

SEQ ID NO: 197844 - DNA, 20 bp, synthetic construct
  source 1..20: mol_type = other DNA
ggcttggggccctgagggtc

SEQ ID NO: 197845 - DNA, 20 bp, synthetic construct
  source 1..20: mol_type = other DNA
gggcttggggccctgagggt

SEQ ID NO: 197846 - DNA, 20 bp, synthetic construct
  source 1..20: mol_type = other DNA
ggggcttggggccctgaggg

SEQ ID NO: 197847 - DNA, 20 bp, synthetic construct
  source 1..20: mol_type = other DNA
gggggcttggggccctgagg

SEQ ID NO: 197848 - DNA, 20 bp, synthetic construct
  source 1..20: mol_type = other DNA
tgggggcttggggccctgag

SEQ ID NO: 197849 - DNA, 20 bp, synthetic construct
  source 1..20: mol_type = other DNA
atgggggcttggggccctga

SEQ ID NO: 197850 - DNA, 20 bp, synthetic construct
  source 1..20: mol_type = other DNA
aatgggggcttggggccctg

SEQ ID NO: 197851 - DNA, 20 bp, synthetic construct
  source 1..20: mol_type = other DNA
aaatgggggcttggggccct

SEQ ID NO: 197852 - DNA, 20 bp, synthetic construct
  source 1..20: mol_type = other DNA
gaaatgggggcttggggccc

SEQ ID NO: 197853 - DNA, 20 bp, synthetic construct
  source 1..20: mol_type = other DNA
ggaaatgggggcttggggcc

SEQ ID NO: 197854 - DNA, 20 bp, synthetic construct
  source 1..20: mol_type = other DNA
tggaaatgggggcttggggc

SEQ ID NO: 197855 - DNA, 20 bp, synthetic construct
  source 1..20: mol_type = other DNA
atggaaatgggggcttgggg

SEQ ID NO: 197856 - DNA, 20 bp, synthetic construct
  source 1..20: mol_type = other DNA
gatggaaatgggggcttggg

SEQ ID NO: 197857 - DNA, 20 bp, synthetic construct
  source 1..20: mol_type = other DNA
tgatggaaatgggggcttgg

SEQ ID NO: 197858 - DNA, 20 bp, synthetic construct
  source 1..20: mol_type = other DNA
gtgatggaaatgggggcttg

SEQ ID NO: 197859 - DNA, 20 bp, synthetic construct
  source 1..20: mol_type = other DNA
tgtgatggaaatgggggctt

SEQ ID NO: 197860 - DNA, 20 bp, synthetic construct
  source 1..20: mol_type = other DNA
atgtgatggaaatgggggct

SEQ ID NO: 197861 - DNA, 20 bp, synthetic construct
  source 1..20: mol_type = other DNA
catgtgatggaaatgggggc

SEQ ID NO: 197862 - DNA, 20 bp, synthetic construct
  source 1..20: mol_type = other DNA
gcatgtgatggaaatggggg

SEQ ID NO: 197863 - DNA, 20 bp, synthetic construct
  source 1..20: mol_type = other DNA
cgcatgtgatggaaatgggg

SEQ ID NO: 197864 - DNA, 20 bp, synthetic construct
  source 1..20: mol_type = other DNA
acgcatgtgatggaaatggg

SEQ ID NO: 197865 - DNA, 20 bp, synthetic construct
  source 1..20: mol_type = other DNA
tacgcatgtgatggaaatgg

SEQ ID NO: 197866 - DNA, 20 bp, synthetic construct
  source 1..20: mol_type = other DNA
gtacgcatgtgatggaaatg

SEQ ID NO: 197867 - DNA, 20 bp, synthetic construct
  source 1..20: mol_type = other DNA
tgtacgcatgtgatggaaat

SEQ ID NO: 197868 - DNA, 20 bp, synthetic construct
  source 1..20: mol_type = other DNA
gtgtacgcatgtgatggaaa

SEQ ID NO: 197869 - DNA, 20 bp, synthetic construct
  source 1..20: mol_type = other DNA
ggtgtacgcatgtgatggaa

SEQ ID NO: 197870 - DNA, 20 bp, synthetic construct
  source 1..20: mol_type = other DNA
gggtgtacgcatgtgatgga

SEQ ID NO: 197871 - DNA, 20 bp, synthetic construct
  source 1..20: mol_type = other DNA
tgggtgtacgcatgtgatgg

SEQ ID NO: 197872 - DNA, 20 bp, synthetic construct
  source 1..20: mol_type = other DNA
atgggtgtacgcatgtgatg

SEQ ID NO: 197873 - DNA, 20 bp, synthetic construct
  source 1..20: mol_type = other DNA
catgggtgtacgcatgtgat

SEQ ID NO: 197874 - DNA, 20 bp, synthetic construct
  source 1..20: mol_type = other DNA
acatgggtgtacgcatgtga

SEQ ID NO: 197875 - DNA, 20 bp, synthetic construct
  source 1..20: mol_type = other DNA
cacatgggtgtacgcatgtg

SEQ ID NO: 197876 - DNA, 20 bp, synthetic construct
  source 1..20: mol_type = other DNA
acacatgggtgtacgcatgt

SEQ ID NO: 197877 - DNA, 20 bp, synthetic construct
  source 1..20: mol_type = other DNA
cacacatgggtgtacgcatg

SEQ ID NO: 197878 - DNA, 20 bp, synthetic construct
  source 1..20: mol_type = other DNA
acacacatgggtgtacgcat

SEQ ID NO: 197879 - DNA, 20 bp, synthetic construct
  source 1..20: mol_type = other DNA
gacacacatgggtgtacgca

SEQ ID NO: 197880 - DNA, 20 bp, synthetic construct
  source 1..20: mol_type = other DNA
ggacacacatgggtgtacgc

SEQ ID NO: 197881 - DNA, 20 bp, synthetic construct
  source 1..20: mol_type = other DNA
tggacacacatgggtgtacg

SEQ ID NO: 197882 - DNA, 20 bp, synthetic construct
  source 1..20: mol_type = other DNA
atggacacacatgggtgtac

SEQ ID NO: 197883 - DNA, 20 bp, synthetic construct
  source 1..20: mol_type = other DNA
tatggacacacatgggtgta

SEQ ID NO: 197884 - DNA, 20 bp, synthetic construct
  source 1..20: mol_type = other DNA
ctatggacacacatgggtgt

SEQ ID NO: 197885 - DNA, 20 bp, synthetic construct
  source 1..20: mol_type = other DNA
gctatggacacacatgggtg

SEQ ID NO: 197886 - DNA, 20 bp, synthetic construct
  source 1..20: mol_type = other DNA
ggctatggacacacatgggt

SEQ ID NO: 197887 - DNA, 20 bp, synthetic construct
  source 1..20: mol_type = other DNA
cggctatggacacacatggg

SEQ ID NO: 197888 - DNA, 20 bp, synthetic construct
  source 1..20: mol_type = other DNA
gcggctatggacacacatgg

SEQ ID NO: 197889 - DNA, 20 bp, synthetic construct
  source 1..20: mol_type = other DNA
ggcggctatggacacacatg

SEQ ID NO: 197890 - DNA, 20 bp, synthetic construct
  source 1..20: mol_type = other DNA
gggcggctatggacacacat

SEQ ID NO: 197891 - DNA, 20 bp, synthetic construct
  source 1..20: mol_type = other DNA
tgggcggctatggacacaca

SEQ ID NO: 197892 - DNA, 20 bp, synthetic construct
  source 1..20: mol_type = other DNA
atgggcggctatggacacac

SEQ ID NO: 197893 - DNA, 20 bp, synthetic construct
  source 1..20: mol_type = other DNA
gatgggcggctatggacaca

SEQ ID NO: 197894 - DNA, 20 bp, synthetic construct
  source 1..20: mol_type = other DNA
agatgggcggctatggacac

SEQ ID NO: 197895 - DNA, 20 bp, synthetic construct
  source 1..20: mol_type = other DNA
gagatgggcggctatggaca

SEQ ID NO: 197896 - DNA, 20 bp, synthetic construct
  source 1..20: mol_type = other DNA
tgagatgggcggctatggac

SEQ ID NO: 197897 - DNA, 20 bp, synthetic construct
  source 1..20: mol_type = other DNA
ctgagatgggcggctatgga

SEQ ID NO: 197898 - DNA, 20 bp, synthetic construct
  source 1..20: mol_type = other DNA
actgagatgggcggctatgg

SEQ ID NO: 197899 - DNA, 20 bp, synthetic construct
  source 1..20: mol_type = other DNA
gactgagatgggcggctatg

SEQ ID NO: 197900 - DNA, 20 bp, synthetic construct
  source 1..20: mol_type = other DNA
tgactgagatgggcggctat

SEQ ID NO: 197901 - DNA, 20 bp, synthetic construct
  source 1..20: mol_type = other DNA
ttgactgagatgggcggcta

SEQ ID NO: 197902 - DNA, 20 bp, synthetic construct
  source 1..20: mol_type = other DNA
attgactgagatgggcggct

SEQ ID NO: 197903 - DNA, 20 bp, synthetic construct
  source 1..20: mol_type = other DNA
tattgactgagatgggcggc

SEQ ID NO: 197904 - DNA, 20 bp, synthetic construct
  source 1..20: mol_type = other DNA
ttattgactgagatgggcgg

SEQ ID NO: 197905 - DNA, 20 bp, synthetic construct
  source 1..20: mol_type = other DNA
cttattgactgagatgggcg

SEQ ID NO: 197906 - DNA, 20 bp, synthetic construct
  source 1..20: mol_type = other DNA
ccttattgactgagatgggc

SEQ ID NO: 197907 - DNA, 20 bp, synthetic construct
  source 1..20: mol_type = other DNA
gccttattgactgagatggg

SEQ ID NO: 197908 - DNA, 20 bp, synthetic construct
  source 1..20: mol_type = other DNA
agccttattgactgagatgg

SEQ ID NO: 197909 - DNA, 20 bp, synthetic construct
  source 1..20: mol_type = other DNA
cagccttattgactgagatg

SEQ ID NO: 197910 - DNA, 20 bp, synthetic construct
  source 1..20: mol_type = other DNA
gcagccttattgactgagat

SEQ ID NO: 197911 - DNA, 20 bp, synthetic construct
  source 1..20: mol_type = other DNA
agcagccttattgactgaga

SEQ ID NO: 197912 - DNA, 20 bp, synthetic construct
  source 1..20: mol_type = other DNA
gagcagccttattgactgag

SEQ ID NO: 197913 - DNA, 20 bp, synthetic construct
  source 1..20: mol_type = other DNA
ggagcagccttattgactga

SEQ ID NO: 197914 - DNA, 20 bp, synthetic construct
  source 1..20: mol_type = other DNA
aggagcagccttattgactg

SEQ ID NO: 197915 - DNA, 20 bp, synthetic construct
  source 1..20: mol_type = other DNA
caggagcagccttattgact

SEQ ID NO: 197916 - DNA, 20 bp, synthetic construct
  source 1..20: mol_type = other DNA
gcaggagcagccttattgac

SEQ ID NO: 197917 - DNA, 20 bp, synthetic construct
  source 1..20: mol_type = other DNA
ggcaggagcagccttattga

SEQ ID NO: 197918 - DNA, 20 bp, synthetic construct
  source 1..20: mol_type = other DNA
gggcaggagcagccttattg

SEQ ID NO: 197919 - DNA, 20 bp, synthetic construct
  source 1..20: mol_type = other DNA
tgggcaggagcagccttatt

SEQ ID NO: 197920 - DNA, 20 bp, synthetic construct
  source 1..20: mol_type = other DNA
gtgggcaggagcagccttat

SEQ ID NO: 197921 - DNA, 20 bp, synthetic construct
  source 1..20: mol_type = other DNA
agtgggcaggagcagcctta

SEQ ID NO: 197922 - DNA, 20 bp, synthetic construct
  source 1..20: mol_type = other DNA
aagtgggcaggagcagcctt

SEQ ID NO: 197923 - DNA, 20 bp, synthetic construct
  source 1..20: mol_type = other DNA
caagtgggcaggagcagcct

SEQ ID NO: 197924 - DNA, 20 bp, synthetic construct
  source 1..20: mol_type = other DNA
ccaagtgggcaggagcagcc

SEQ ID NO: 197925 - DNA, 20 bp, synthetic construct
  source 1..20: mol_type = other DNA
tccaagtgggcaggagcagc

SEQ ID NO: 197926 - DNA, 20 bp, synthetic construct
  source 1..20: mol_type = other DNA
ttccaagtgggcaggagcag

SEQ ID NO: 197927 - DNA, 20 bp, synthetic construct
  source 1..20: mol_type = other DNA
attccaagtgggcaggagca

SEQ ID NO: 197928 - DNA, 20 bp, synthetic construct
  source 1..20: mol_type = other DNA
tattccaagtgggcaggagc

SEQ ID NO: 197929 - DNA, 20 bp, synthetic construct
  source 1..20: mol_type = other DNA
ctattccaagtgggcaggag

SEQ ID NO: 197930 - DNA, 20 bp, synthetic construct
  source 1..20: mol_type = other DNA
actattccaagtgggcagga

SEQ ID NO: 197931 - DNA, 20 bp, synthetic construct
  source 1..20: mol_type = other DNA
cactattccaagtgggcagg

SEQ ID NO: 197932 - DNA, 20 bp, synthetic construct
  source 1..20: mol_type = other DNA
ccactattccaagtgggcag

SEQ ID NO: 197933 - DNA, 20 bp, synthetic construct
  source 1..20: mol_type = other DNA
accactattccaagtgggca

SEQ ID NO: 197934 - DNA, 20 bp, synthetic construct
  source 1..20: mol_type = other DNA
caccactattccaagtgggc

SEQ ID NO: 197935 - DNA, 20 bp, synthetic construct
  source 1..20: mol_type = other DNA
tcaccactattccaagtggg

SEQ ID NO: 197936 - DNA, 20 bp, synthetic construct
  source 1..20: mol_type = other DNA
gtcaccactattccaagtgg

SEQ ID NO: 197937 - DNA, 20 bp, synthetic construct
  source 1..20: mol_type = other DNA
tgtcaccactattccaagtg

SEQ ID NO: 197938 - DNA, 20 bp, synthetic construct
  source 1..20: mol_type = other DNA
ttgtcaccactattccaagt

SEQ ID NO: 197939 - DNA, 20 bp, synthetic construct
  source 1..20: mol_type = other DNA
gttgtcaccactattccaag

SEQ ID NO: 197940 - DNA, 20 bp, synthetic construct
  source 1..20: mol_type = other DNA
ggttgtcaccactattccaa

SEQ ID NO: 197941 - DNA, 20 bp, synthetic construct
  source 1..20: mol_type = other DNA
tggttgtcaccactattcca

SEQ ID NO: 197942 - DNA, 20 bp, synthetic construct
  source 1..20: mol_type = other DNA
ctggttgtcaccactattcc

SEQ ID NO: 197943 - DNA, 20 bp, synthetic construct
  source 1..20: mol_type = other DNA
cctggttgtcaccactattc

SEQ ID NO: 197944 - DNA, 20 bp, synthetic construct
  source 1..20: mol_type = other DNA
tcctggttgtcaccactatt

SEQ ID NO: 197945 - DNA, 20 bp, synthetic construct
  source 1..20: mol_type = other DNA
ctcctggttgtcaccactat

SEQ ID NO: 197946 - DNA, 20 bp, synthetic construct
  source 1..20: mol_type = other DNA
actcctggttgtcaccacta

SEQ ID NO: 197947 - DNA, 20 bp, synthetic construct
  source 1..20: mol_type = other DNA
cactcctggttgtcaccact

SEQ ID NO: 197948 - DNA, 20 bp, synthetic construct
  source 1..20: mol_type = other DNA
ccactcctggttgtcaccac

SEQ ID NO: 197949 - DNA, 20 bp, synthetic construct
  source 1..20: mol_type = other DNA
gccactcctggttgtcacca

SEQ ID NO: 197950 - DNA, 20 bp, synthetic construct
  source 1..20: mol_type = other DNA
agccactcctggttgtcacc

SEQ ID NO: 197951 - DNA, 20 bp, synthetic construct
  source 1..20: mol_type = other DNA
aagccactcctggttgtcac

SEQ ID NO: 197952 - DNA, 20 bp, synthetic construct
  source 1..20: mol_type = other DNA
taagccactcctggttgtca

SEQ ID NO: 197953 - DNA, 20 bp, synthetic construct
  source 1..20: mol_type = other DNA
ataagccactcctggttgtc

SEQ ID NO: 197954 - DNA, 20 bp, synthetic construct
  source 1..20: mol_type = other DNA
cataagccactcctggttgt

SEQ ID NO: 197955 - DNA, 20 bp, synthetic construct
  source 1..20: mol_type = other DNA
ccataagccactcctggttg

SEQ ID NO: 197956 - DNA, 20 bp, synthetic construct
  source 1..20: mol_type = other DNA
cccataagccactcctggtt

SEQ ID NO: 197957 - DNA, 20 bp, synthetic construct
  source 1..20: mol_type = other DNA
tcccataagccactcctggt

SEQ ID NO: 197958 - DNA, 20 bp, synthetic construct
  source 1..20: mol_type = other DNA
ttcccataagccactcctgg

SEQ ID NO: 197959 - DNA, 20 bp, synthetic construct
  source 1..20: mol_type = other DNA
gttcccataagccactcctg

SEQ ID NO: 197960 - DNA, 20 bp, synthetic construct
  source 1..20: mol_type = other DNA
agttcccataagccactcct

SEQ ID NO: 197961 - DNA, 20 bp, synthetic construct
  source 1..20: mol_type = other DNA
tagttcccataagccactcc

SEQ ID NO: 197962 - DNA, 20 bp, synthetic construct
  source 1..20: mol_type = other DNA
atagttcccataagccactc

SEQ ID NO: 197963 - DNA, 20 bp, synthetic construct
  source 1..20: mol_type = other DNA
gatagttcccataagccact

SEQ ID NO: 197964 - DNA, 20 bp, synthetic construct
  source 1..20: mol_type = other DNA
ggatagttcccataagccac

SEQ ID NO: 197965 - DNA, 20 bp, synthetic construct
  source 1..20: mol_type = other DNA
gggatagttcccataagcca

SEQ ID NO: 197966 - DNA, 20 bp, synthetic construct
  source 1..20: mol_type = other DNA
tgggatagttcccataagcc

SEQ ID NO: 197967 - DNA, 20 bp, synthetic construct
  source 1..20: mol_type = other DNA
ttgggatagttcccataagc

SEQ ID NO: 197968 - DNA, 20 bp, synthetic construct
  source 1..20: mol_type = other DNA
attgggatagttcccataag

SEQ ID NO: 197969 - DNA, 20 bp, synthetic construct
  source 1..20: mol_type = other DNA
cattgggatagttcccataa

SEQ ID NO: 197970 - DNA, 20 bp, synthetic construct
  source 1..20: mol_type = other DNA
ccattgggatagttcccata

SEQ ID NO: 197971 - DNA, 20 bp, synthetic construct
  source 1..20: mol_type = other DNA
gccattgggatagttcccat

SEQ ID NO: 197972 - DNA, 20 bp, synthetic construct
  source 1..20: mol_type = other DNA
ggccattgggatagttccca

SEQ ID NO: 197973 - DNA, 20 bp, synthetic construct
  source 1..20: mol_type = other DNA
aggccattgggatagttccc

SEQ ID NO: 197974 - DNA, 20 bp, synthetic construct
  source 1..20: mol_type = other DNA
caggccattgggatagttcc

SEQ ID NO: 197975 - DNA, 20 bp, synthetic construct
  source 1..20: mol_type = other DNA
tcaggccattgggatagttc

SEQ ID NO: 197976 - DNA, 20 bp, synthetic construct
  source 1..20: mol_type = other DNA
gtcaggccattgggatagtt

SEQ ID NO: 197977 - DNA, 20 bp, synthetic construct
  source 1..20: mol_type = other DNA
tgtcaggccattgggatagt

SEQ ID NO: 197978 - DNA, 20 bp, synthetic construct
  source 1..20: mol_type = other DNA
ctgtcaggccattgggatag

SEQ ID NO: 197979 - DNA, 20 bp, synthetic construct
  source 1..20: mol_type = other DNA
gctgtcaggccattgggata

SEQ ID NO: 197980 - DNA, 20 bp, synthetic construct
  source 1..20: mol_type = other DNA
tgctgtcaggccattgggat

SEQ ID NO: 197981 - DNA, 20 bp, synthetic construct
  source 1..20: mol_type = other DNA
atgctgtcaggccattggga

SEQ ID NO: 197982 - DNA, 20 bp, synthetic construct
  source 1..20: mol_type = other DNA
catgctgtcaggccattggg

SEQ ID NO: 197983 - DNA, 20 bp, synthetic construct
  source 1..20: mol_type = other DNA
acatgctgtcaggccattgg

SEQ ID NO: 197984 - DNA, 20 bp, synthetic construct
  source 1..20: mol_type = other DNA
gacatgctgtcaggccattg

SEQ ID NO: 197985 - DNA, 20 bp, synthetic construct
  source 1..20: mol_type = other DNA
ggacatgctgtcaggccatt

SEQ ID NO: 197986 - DNA, 20 bp, synthetic construct
  source 1..20: mol_type = other DNA
cggacatgctgtcaggccat

SEQ ID NO: 197987 - DNA, 20 bp, synthetic construct
  source 1..20: mol_type = other DNA
gcggacatgctgtcaggcca

SEQ ID NO: 197988 - DNA, 20 bp, synthetic construct
  source 1..20: mol_type = other DNA
agcggacatgctgtcaggcc

SEQ ID NO: 197989 - DNA, 20 bp, synthetic construct
  source 1..20: mol_type = other DNA
cagcggacatgctgtcaggc

SEQ ID NO: 197990 - DNA, 20 bp, synthetic construct
  source 1..20: mol_type = other DNA
gcagcggacatgctgtcagg

SEQ ID NO: 197991 - DNA, 20 bp, synthetic construct
  source 1..20: mol_type = other DNA
tgcagcggacatgctgtcag

SEQ ID NO: 197992 - DNA, 20 bp, synthetic construct
  source 1..20: mol_type = other DNA
ttgcagcggacatgctgtca

SEQ ID NO: 197993 - DNA, 20 bp, synthetic construct
  source 1..20: mol_type = other DNA
tttgcagcggacatgctgtc

SEQ ID NO: 197994 - DNA, 20 bp, synthetic construct
  source 1..20: mol_type = other DNA
gtttgcagcggacatgctgt

SEQ ID NO: 197995 - DNA, 20 bp, synthetic construct
  source 1..20: mol_type = other DNA
ggtttgcagcggacatgctg

SEQ ID NO: 197996 - DNA, 20 bp, synthetic construct
  source 1..20: mol_type = other DNA
cggtttgcagcggacatgct

SEQ ID NO: 197997 - DNA, 20 bp, synthetic construct
  source 1..20: mol_type = other DNA
gcggtttgcagcggacatgc

SEQ ID NO: 197998 - DNA, 20 bp, synthetic construct
  source 1..20: mol_type = other DNA
agcggtttgcagcggacatg

SEQ ID NO: 197999 - DNA, 20 bp, synthetic construct
  source 1..20: mol_type = other DNA
cagcggtttgcagcggacat

SEQ ID NO: 198000 - DNA, 20 bp, synthetic construct
  source 1..20: mol_type = other DNA
tcagcggtttgcagcggaca

SEQ ID NO: 198001 - DNA, 20 bp, synthetic construct
  source 1..20: mol_type = other DNA
ctcagcggtttgcagcggac

SEQ ID NO: 198002 - DNA, 20 bp, synthetic construct
  source 1..20: mol_type = other DNA
cctcagcggtttgcagcgga

SEQ ID NO: 198003 - DNA, 20 bp, synthetic construct
  source 1..20: mol_type = other DNA
acctcagcggtttgcagcgg

SEQ ID NO: 198004 - DNA, 20 bp, synthetic construct
  source 1..20: mol_type = other DNA
tacctcagcggtttgcagcg

SEQ ID NO: 198005 - DNA, 20 bp, synthetic construct
  source 1..20: mol_type = other DNA
ctacctcagcggtttgcagc

SEQ ID NO: 198006 - DNA, 20 bp, synthetic construct
  source 1..20: mol_type = other DNA
cctacctcagcggtttgcag

SEQ ID NO: 198007 - DNA, 20 bp, synthetic construct
  source 1..20: mol_type = other DNA
tcctacctcagcggtttgca

SEQ ID NO: 198008 - DNA, 20 bp, synthetic construct
  source 1..20: mol_type = other DNA
gtcctacctcagcggtttgc

SEQ ID NO: 198009 - DNA, 20 bp, synthetic construct
  source 1..20: mol_type = other DNA
tgtcctacctcagcggtttg

SEQ ID NO: 198010 - DNA, 20 bp, synthetic construct
  source 1..20: mol_type = other DNA
gtgtcctacctcagcggttt

SEQ ID NO: 198011 - DNA, 20 bp, synthetic construct
  source 1..20: mol_type = other DNA
agtgtcctacctcagcggtt

SEQ ID NO: 198012 - DNA, 20 bp, synthetic construct
  source 1..20: mol_type = other DNA
cagtgtcctacctcagcggt

SEQ ID NO: 198013 - DNA, 20 bp, synthetic construct
  source 1..20: mol_type = other DNA
gcagtgtcctacctcagcgg

SEQ ID NO: 198014 - DNA, 20 bp, synthetic construct
  source 1..20: mol_type = other DNA
ggcagtgtcctacctcagcg

SEQ ID NO: 198015 - DNA, 20 bp, synthetic construct
  source 1..20: mol_type = other DNA
gggcagtgtcctacctcagc

SEQ ID NO: 198016 - DNA, 20 bp, synthetic construct
  source 1..20: mol_type = other DNA
agggcagtgtcctacctcag

SEQ ID NO: 198017 - DNA, 20 bp, synthetic construct
  source 1..20: mol_type = other DNA
gagggcagtgtcctacctca

SEQ ID NO: 198018 - DNA, 20 bp, synthetic construct
  source 1..20: mol_type = other DNA
tgagggcagtgtcctacctc

SEQ ID NO: 198019 - DNA, 20 bp, synthetic construct
  source 1..20: mol_type = other DNA
atgagggcagtgtcctacct

SEQ ID NO: 198020 - DNA, 20 bp, synthetic construct
  source 1..20: mol_type = other DNA
catgagggcagtgtcctacc

SEQ ID NO: 198021 - DNA, 20 bp, synthetic construct
  source 1..20: mol_type = other DNA
acatgagggcagtgtcctac

SEQ ID NO: 198022 - DNA, 20 bp, synthetic construct
  source 1..20: mol_type = other DNA
gacatgagggcagtgtccta

SEQ ID NO: 198023 - DNA, 20 bp, synthetic construct
  source 1..20: mol_type = other DNA
agacatgagggcagtgtcct

SEQ ID NO: 198024 - DNA, 20 bp, synthetic construct
  source 1..20: mol_type = other DNA
tagacatgagggcagtgtcc

SEQ ID NO: 198025 - DNA, 20 bp, synthetic construct
  source 1..20: mol_type = other DNA
ctagacatgagggcagtgtc

SEQ ID NO: 198026 - DNA, 20 bp, synthetic construct
  source 1..20: mol_type = other DNA
gctagacatgagggcagtgt

SEQ ID NO: 198027 - DNA, 20 bp, synthetic construct
  source 1..20: mol_type = other DNA
agctagacatgagggcagtg

SEQ ID NO: 198028 - DNA, 20 bp, synthetic construct
  source 1..20: mol_type = other DNA
cagctagacatgagggcagt

SEQ ID NO: 198029 - DNA, 20 bp, synthetic construct
  source 1..20: mol_type = other DNA
tcagctagacatgagggcag

SEQ ID NO: 198030 - DNA, 20 bp, synthetic construct
  source 1..20: mol_type = other DNA
atcagctagacatgagggca

SEQ ID NO: 198031 - DNA, 20 bp, synthetic construct
  source 1..20: mol_type = other DNA
gatcagctagacatgagggc

SEQ ID NO: 198032 - DNA, 20 bp, synthetic construct
  source 1..20: mol_type = other DNA
tgatcagctagacatgaggg

SEQ ID NO: 198033 - DNA, 20 bp, synthetic construct
  source 1..20: mol_type = other DNA
ctgatcagctagacatgagg

SEQ ID NO: 198034 - DNA, 20 bp, synthetic construct
  source 1..20: mol_type = other DNA
gctgatcagctagacatgag

SEQ ID NO: 198035 - DNA, 20 bp, synthetic construct
  source 1..20: mol_type = other DNA
tgctgatcagctagacatga

SEQ ID NO: 198036 - DNA, 20 bp, synthetic construct
  source 1..20: mol_type = other DNA
ttgctgatcagctagacatg

SEQ ID NO: 198037 - DNA, 20 bp, synthetic construct
  source 1..20: mol_type = other DNA
cttgctgatcagctagacat

SEQ ID NO: 198038 - DNA, 20 bp, synthetic construct
  source 1..20: mol_type = other DNA
tcttgctgatcagctagaca

SEQ ID NO: 198039 - DNA, 20 bp, synthetic construct
  source 1..20: mol_type = other DNA
ctcttgctgatcagctagac

SEQ ID NO: 198040 - DNA, 20 bp, synthetic construct
  source 1..20: mol_type = other DNA
cctcttgctgatcagctaga

SEQ ID NO: 198041 - DNA, 20 bp, synthetic construct
  source 1..20: mol_type = other DNA
gcctcttgctgatcagctag

SEQ ID NO: 198042 - DNA, 20 bp, synthetic construct
  source 1..20: mol_type = other DNA
cgcctcttgctgatcagcta

SEQ ID NO: 198043 - DNA, 20 bp, synthetic construct
  source 1..20: mol_type = other DNA
gcgcctcttgctgatcagct

SEQ ID NO: 198044 - DNA, 20 bp, synthetic construct
  source 1..20: mol_type = other DNA
tgcgcctcttgctgatcagc

SEQ ID NO: 198045 - DNA, 20 bp, synthetic construct
  source 1..20: mol_type = other DNA
ctgcgcctcttgctgatcag

SEQ ID NO: 198046 - DNA, 20 bp, synthetic construct
  source 1..20: mol_type = other DNA
actgcgcctcttgctgatca

SEQ ID NO: 198047 - DNA, 20 bp, synthetic construct
  source 1..20: mol_type = other DNA
aactgcgcctcttgctgatc

SEQ ID NO: 198048 - DNA, 20 bp, synthetic construct
  source 1..20: mol_type = other DNA
caactgcgcctcttgctgat

SEQ ID NO: 198049 - DNA, 20 bp, synthetic construct
  source 1..20: mol_type = other DNA
gcaactgcgcctcttgctga

SEQ ID NO: 198050 - DNA, 20 bp, synthetic construct
  source 1..20: mol_type = other DNA
agcaactgcgcctcttgctg

SEQ ID NO: 198051 - DNA, 20 bp, synthetic construct
  source 1..20: mol_type = other DNA
aagcaactgcgcctcttgct

SEQ ID NO: 198052 - DNA, 20 bp, synthetic construct
  source 1..20: mol_type = other DNA
aaagcaactgcgcctcttgc

SEQ ID NO: 198053 - DNA, 20 bp, synthetic construct
  source 1..20: mol_type = other DNA
gaaagcaactgcgcctcttg

SEQ ID NO: 198054 - DNA, 20 bp, synthetic construct
  source 1..20: mol_type = other DNA
agaaagcaactgcgcctctt

SEQ ID NO: 198055 - DNA, 20 bp, synthetic construct
  source 1..20: mol_type = other DNA
aagaaagcaactgcgcctct

SEQ ID NO: 198056 - DNA, 20 bp, synthetic construct
  source 1..20: mol_type = other DNA
taagaaagcaactgcgcctc

SEQ ID NO: 198057 - DNA, 20 bp, synthetic construct
  source 1..20: mol_type = other DNA
ctaagaaagcaactgcgcct

SEQ ID NO: 198058 - DNA, 20 bp, synthetic construct
  source 1..20: mol_type = other DNA
cctaagaaagcaactgcgcc

SEQ ID NO: 198059 - DNA, 20 bp, synthetic construct
  source 1..20: mol_type = other DNA
acctaagaaagcaactgcgc

SEQ ID NO: 198060 - DNA, 20 bp, synthetic construct
  source 1..20: mol_type = other DNA
tacctaagaaagcaactgcg

SEQ ID NO: 198061 - DNA, 20 bp, synthetic construct
  source 1..20: mol_type = other DNA
ttacctaagaaagcaactgc

SEQ ID NO: 198062 - DNA, 20 bp, synthetic construct
  source 1..20: mol_type = other DNA
gttacctaagaaagcaactg

SEQ ID NO: 198063 - DNA, 20 bp, synthetic construct
  source 1..20: mol_type = other DNA
tgttacctaagaaagcaact

SEQ ID NO: 198064 - DNA, 20 bp, synthetic construct
  source 1..20: mol_type = other DNA
atgttacctaagaaagcaac

SEQ ID NO: 198065 - DNA, 20 bp, synthetic construct
  source 1..20: mol_type = other DNA
aatgttacctaagaaagcaa

SEQ ID NO: 198066 - DNA, 20 bp, synthetic construct
  source 1..20: mol_type = other DNA
caatgttacctaagaaagca

SEQ ID NO: 198067 - DNA, 20 bp, synthetic construct
  source 1..20: mol_type = other DNA
gcaatgttacctaagaaagc

SEQ ID NO: 198068 - DNA, 20 bp, synthetic construct
  source 1..20: mol_type = other DNA
agcaatgttacctaagaaag

SEQ ID NO: 198069 - DNA, 20 bp, synthetic construct
  source 1..20: mol_type = other DNA
cagcaatgttacctaagaaa

SEQ ID NO: 198070 - DNA, 20 bp, synthetic construct
  source 1..20: mol_type = other DNA
gcagcaatgttacctaagaa

SEQ ID NO: 198071 - DNA, 20 bp, synthetic construct
  source 1..20: mol_type = other DNA
agcagcaatgttacctaaga

SEQ ID NO: 198072 - DNA, 20 bp, synthetic construct
  source 1..20: mol_type = other DNA
cagcagcaatgttacctaag

SEQ ID NO: 198073 - DNA, 20 bp, synthetic construct
  source 1..20: mol_type = other DNA
acagcagcaatgttacctaa

SEQ ID NO: 198074 - DNA, 20 bp, synthetic construct
  source 1..20: mol_type = other DNA
cacagcagcaatgttaccta

SEQ ID NO: 198075 - DNA, 20 bp, synthetic construct
  source 1..20: mol_type = other DNA
acacagcagcaatgttacct

SEQ ID NO: 198076 - DNA, 20 bp, synthetic construct
  source 1..20: mol_type = other DNA
gacacagcagcaatgttacc

SEQ ID NO: 198077 - DNA, 20 bp, synthetic construct
  source 1..20: mol_type = other DNA
ggacacagcagcaatgttac

SEQ ID NO: 198078 - DNA, 20 bp, synthetic construct
  source 1..20: mol_type = other DNA
aggacacagcagcaatgtta

SEQ ID NO: 198079 - DNA, 20 bp, synthetic construct
  source 1..20: mol_type = other DNA
caggacacagcagcaatgtt

SEQ ID NO: 198080 - DNA, 20 bp, synthetic construct
  source 1..20: mol_type = other DNA
ccaggacacagcagcaatgt

SEQ ID NO: 198081 - DNA, 20 bp, synthetic construct
  source 1..20: mol_type = other DNA
gccaggacacagcagcaatg

SEQ ID NO: 198082 - DNA, 20 bp, synthetic construct
  source 1..20: mol_type = other DNA
ggccaggacacagcagcaat

SEQ ID NO: 198083 - DNA, 20 bp, synthetic construct
  source 1..20: mol_type = other DNA
tggccaggacacagcagcaa

SEQ ID NO: 198084 - DNA, 20 bp, synthetic construct
  source 1..20: mol_type = other DNA
atggccaggacacagcagca

SEQ ID NO: 198085 - DNA, 20 bp, synthetic construct
  source 1..20: mol_type = other DNA
aatggccaggacacagcagc

SEQ ID NO: 198086 - DNA, 20 bp, synthetic construct
  source 1..20: mol_type = other DNA
caatggccaggacacagcag

SEQ ID NO: 198087 - DNA, 20 bp, synthetic construct
  source 1..20: mol_type = other DNA
gcaatggccaggacacagca

SEQ ID NO: 198088 - DNA, 20 bp, synthetic construct
  source 1..20: mol_type = other DNA
agcaatggccaggacacagc

SEQ ID NO: 198089 - DNA, 20 bp, synthetic construct
  source 1..20: mol_type = other DNA
cagcaatggccaggacacag

SEQ ID NO: 198090 - DNA, 20 bp, synthetic construct
  source 1..20: mol_type = other DNA
ccagcaatggccaggacaca

SEQ ID NO: 198091 - DNA, 20 bp, synthetic construct
  source 1..20: mol_type = other DNA
cccagcaatggccaggacac

SEQ ID NO: 198092 - DNA, 20 bp, synthetic construct
  source 1..20: mol_type = other DNA
ccccagcaatggccaggaca

SEQ ID NO: 198093 - DNA, 20 bp, synthetic construct
  source 1..20: mol_type = other DNA
cccccagcaatggccaggac

SEQ ID NO: 198094 - DNA, 20 bp, synthetic construct
  source 1..20: mol_type = other DNA
ccccccagcaatggccagga

SEQ ID NO: 198095 - DNA, 20 bp, synthetic construct
  source 1..20: mol_type = other DNA
accccccagcaatggccagg

SEQ ID NO: 198096 - DNA, 20 bp, synthetic construct
  source 1..20: mol_type = other DNA
caccccccagcaatggccag

SEQ ID NO: 198097 - DNA, 20 bp, synthetic construct
  source 1..20: mol_type = other DNA
ccaccccccagcaatggcca

SEQ ID NO: 198098 - DNA, 20 bp, synthetic construct
  source 1..20: mol_type = other DNA
gccaccccccagcaatggcc

SEQ ID NO: 198099 - DNA, 20 bp, synthetic construct
  source 1..20: mol_type = other DNA
tgccaccccccagcaatggc

SEQ ID NO: 198100 - DNA, 20 bp, synthetic construct
  source 1..20: mol_type = other DNA
gtgccaccccccagcaatgg

SEQ ID NO: 198101 - DNA, 20 bp, synthetic construct
  source 1..20: mol_type = other DNA
agtgccaccccccagcaatg

SEQ ID NO: 198102 - DNA, 20 bp, synthetic construct
  source 1..20: mol_type = other DNA
aagtgccaccccccagcaat

SEQ ID NO: 198103 - DNA, 20 bp, synthetic construct
  source 1..20: mol_type = other DNA
taagtgccaccccccagcaa

SEQ ID NO: 198104 - DNA, 20 bp, synthetic construct
  source 1..20: mol_type = other DNA
ttaagtgccaccccccagca

SEQ ID NO: 198105 - DNA, 20 bp, synthetic construct
  source 1..20: mol_type = other DNA
attaagtgccaccccccagc

SEQ ID NO: 198106 - DNA, 20 bp, synthetic construct
  source 1..20: mol_type = other DNA
gattaagtgccaccccccag

SEQ ID NO: 198107 - DNA, 20 bp, synthetic construct
  source 1..20: mol_type = other DNA
agattaagtgccacccccca

SEQ ID NO: 198108 - DNA, 20 bp, synthetic construct
  source 1..20: mol_type = other DNA
tagattaagtgccacccccc

SEQ ID NO: 198109 - DNA, 20 bp, synthetic construct
  source 1..20: mol_type = other DNA
gtagattaagtgccaccccc

SEQ ID NO: 198110 - DNA, 20 bp, synthetic construct
  source 1..20: mol_type = other DNA
tgtagattaagtgccacccc

SEQ ID NO: 198111 - DNA, 20 bp, synthetic construct
  source 1..20: mol_type = other DNA
gtgtagattaagtgccaccc

SEQ ID NO: 198112 - DNA, 20 bp, synthetic construct
  source 1..20: mol_type = other DNA
ggtgtagattaagtgccacc

SEQ ID NO: 198113 - DNA, 20 bp, synthetic construct
  source 1..20: mol_type = other DNA
tggtgtagattaagtgccac

SEQ ID NO: 198114 - DNA, 20 bp, synthetic construct
  source 1..20: mol_type = other DNA
ctggtgtagattaagtgcca

SEQ ID NO: 198115 - DNA, 20 bp, synthetic construct
  source 1..20: mol_type = other DNA
tctggtgtagattaagtgcc

SEQ ID NO: 198116 - DNA, 20 bp, synthetic construct
  source 1..20: mol_type = other DNA
ttctggtgtagattaagtgc

SEQ ID NO: 198117 - DNA, 20 bp, synthetic construct
  source 1..20: mol_type = other DNA
attctggtgtagattaagtg

SEQ ID NO: 198118 - DNA, 20 bp, synthetic construct
  source 1..20: mol_type = other DNA
aattctggtgtagattaagt

SEQ ID NO: 198119 - DNA, 20 bp, synthetic construct
  source 1..20: mol_type = other DNA
aaattctggtgtagattaag

SEQ ID NO: 198120 - DNA, 20 bp, synthetic construct
  source 1..20: mol_type = other DNA
aaaattctggtgtagattaa

SEQ ID NO: 198121 - DNA, 20 bp, synthetic construct
  source 1..20: mol_type = other DNA
gaaaattctggtgtagatta

SEQ ID NO: 198122 - DNA, 20 bp, synthetic construct
  source 1..20: mol_type = other DNA
ggaaaattctggtgtagatt

SEQ ID NO: 198123 - DNA, 20 bp, synthetic construct
  source 1..20: mol_type = other DNA
gggaaaattctggtgtagat

SEQ ID NO: 198124 - DNA, 20 bp, synthetic construct
  source 1..20: mol_type = other DNA
agggaaaattctggtgtaga

SEQ ID NO: 198125 - DNA, 20 bp, synthetic construct
  source 1..20: mol_type = other DNA
gagggaaaattctggtgtag

SEQ ID NO: 198126 - DNA, 20 bp, synthetic construct
  source 1..20: mol_type = other DNA
ggagggaaaattctggtgta

SEQ ID NO: 198127 - DNA, 20 bp, synthetic construct
  source 1..20: mol_type = other DNA
aggagggaaaattctggtgt

SEQ ID NO: 198128 - DNA, 20 bp, synthetic construct
  source 1..20: mol_type = other DNA
caggagggaaaattctggtg

SEQ ID NO: 198129 - DNA, 20 bp, synthetic construct
  source 1..20: mol_type = other DNA
acaggagggaaaattctggt

SEQ ID NO: 198130 - DNA, 20 bp, synthetic construct
  source 1..20: mol_type = other DNA
tacaggagggaaaattctgg

SEQ ID NO: 198131 - DNA, 20 bp, synthetic construct
  source 1..20: mol_type = other DNA
atacaggagggaaaattctg

SEQ ID NO: 198132 - DNA, 20 bp, synthetic construct
  source 1..20: mol_type = other DNA
gatacaggagggaaaattct

SEQ ID NO: 198133 - DNA, 20 bp, synthetic construct
  source 1..20: mol_type = other DNA
agatacaggagggaaaattc

SEQ ID NO: 198134 - DNA, 20 bp, synthetic construct
  source 1..20: mol_type = other DNA
aagatacaggagggaaaatt

SEQ ID NO: 198135 - DNA, 20 bp, synthetic construct
  source 1..20: mol_type = other DNA
gaagatacaggagggaaaat

SEQ ID NO: 198136 - DNA, 20 bp, synthetic construct
  source 1..20: mol_type = other DNA
ggaagatacaggagggaaaa

SEQ ID NO: 198137 - DNA, 20 bp, synthetic construct
  source 1..20: mol_type = other DNA
tggaagatacaggagggaaa

SEQ ID NO: 198138 - DNA, 20 bp, synthetic construct
  source 1..20: mol_type = other DNA
ttggaagatacaggagggaa

SEQ ID NO: 198139 - DNA, 20 bp, synthetic construct
  source 1..20: mol_type = other DNA
cttggaagatacaggaggga

SEQ ID NO: 198140 - DNA, 20 bp, synthetic construct
  source 1..20: mol_type = other DNA
gcttggaagatacaggaggg

SEQ ID NO: 198141 - DNA, 20 bp, synthetic construct
  source 1..20: mol_type = other DNA
agcttggaagatacaggagg

SEQ ID NO: 198142 - DNA, 20 bp, synthetic construct
  source 1..20: mol_type = other DNA
cagcttggaagatacaggag

SEQ ID NO: 198143 - DNA, 20 bp, synthetic construct
  source 1..20: mol_type = other DNA
gcagcttggaagatacagga

SEQ ID NO: 198144 - DNA, 20 bp, synthetic construct
  source 1..20: mol_type = other DNA
agcagcttggaagatacagg

SEQ ID NO: 198145 - DNA, 20 bp, synthetic construct
  source 1..20: mol_type = other DNA
aagcagcttggaagatacag

SEQ ID NO: 198146 - DNA, 20 bp, synthetic construct
  source 1..20: mol_type = other DNA
caagcagcttggaagataca

SEQ ID NO: 198147 - DNA, 20 bp, synthetic construct
  source 1..20: mol_type = other DNA
ccaagcagcttggaagatac

SEQ ID NO: 198148 - DNA, 20 bp, synthetic construct
  source 1..20: mol_type = other DNA
tccaagcagcttggaagata

SEQ ID NO: 198149 - DNA, 20 bp, synthetic construct
  source 1..20: mol_type = other DNA
atccaagcagcttggaagat

SEQ ID NO: 198150 - DNA, 20 bp, synthetic construct
  source 1..20: mol_type = other DNA
gatccaagcagcttggaaga

SEQ ID NO: 198151 - DNA, 20 bp, synthetic construct
  source 1..20: mol_type = other DNA
agatccaagcagcttggaag

SEQ ID NO: 198152 - DNA, 20 bp, synthetic construct
  source 1..20: mol_type = other DNA
aagatccaagcagcttggaa

SEQ ID NO: 198153 - DNA, 20 bp, synthetic construct
  source 1..20: mol_type = other DNA
caagatccaagcagcttgga

SEQ ID NO: 198154 - DNA, 20 bp, synthetic construct
  source 1..20: mol_type = other DNA
ccaagatccaagcagcttgg

SEQ ID NO: 198155 - DNA, 20 bp, synthetic construct
  source 1..20: mol_type = other DNA
accaagatccaagcagcttg

SEQ ID NO: 198156 - DNA, 20 bp, synthetic construct
  source 1..20: mol_type = other DNA
caccaagatccaagcagctt

SEQ ID NO: 198157 - DNA, 20 bp, synthetic construct
  source 1..20: mol_type = other DNA
gcaccaagatccaagcagct

SEQ ID NO: 198158 - DNA, 20 bp, synthetic construct
  source 1..20: mol_type = other DNA
agcaccaagatccaagcagc

SEQ ID NO: 198159 - DNA, 20 bp, synthetic construct
  source 1..20: mol_type = other DNA
cagcaccaagatccaagcag

SEQ ID NO: 198160 - DNA, 20 bp, synthetic construct
  source 1..20: mol_type = other DNA
tcagcaccaagatccaagca

SEQ ID NO: 198161 - DNA, 20 bp, synthetic construct
  source 1..20: mol_type = other DNA
ttcagcaccaagatccaagc

SEQ ID NO: 198162 - DNA, 20 bp, synthetic construct
  source 1..20: mol_type = other DNA
attcagcaccaagatccaag

SEQ ID NO: 198163 - DNA, 20 bp, synthetic construct
  source 1..20: mol_type = other DNA
aattcagcaccaagatccaa

SEQ ID NO: 198164 - DNA, 20 bp, synthetic construct
  source 1..20: mol_type = other DNA
taattcagcaccaagatcca

SEQ ID NO: 198165 - DNA, 20 bp, synthetic construct
  source 1..20: mol_type = other DNA
ctaattcagcaccaagatcc

SEQ ID NO: 198166 - DNA, 20 bp, synthetic construct
  source 1..20: mol_type = other DNA
cctaattcagcaccaagatc

SEQ ID NO: 198167 - DNA, 20 bp, synthetic construct
  source 1..20: mol_type = other DNA
acctaattcagcaccaagat

SEQ ID NO: 198168 - DNA, 20 bp, synthetic construct
  source 1..20: mol_type = other DNA
aacctaattcagcaccaaga

SEQ ID NO: 198169 - DNA, 20 bp, synthetic construct
  source 1..20: mol_type = other DNA
caacctaattcagcaccaag

SEQ ID NO: 198170 - DNA, 20 bp, synthetic construct
  source 1..20: mol_type = other DNA
ccaacctaattcagcaccaa

SEQ ID NO: 198171 - DNA, 20 bp, synthetic construct
  source 1..20: mol_type = other DNA
tccaacctaattcagcacca

SEQ ID NO: 198172 - DNA, 20 bp, synthetic construct
  source 1..20: mol_type = other DNA
gtccaacctaattcagcacc

SEQ ID NO: 198173 - DNA, 20 bp, synthetic construct
  source 1..20: mol_type = other DNA
agtccaacctaattcagcac

SEQ ID NO: 198174 - DNA, 20 bp, synthetic construct
  source 1..20: mol_type = other DNA
aagtccaacctaattcagca

SEQ ID NO: 198175 - DNA, 20 bp, synthetic construct
  source 1..20: mol_type = other DNA
aaagtccaacctaattcagc

SEQ ID NO: 198176 - DNA, 20 bp, synthetic construct
  source 1..20: mol_type = other DNA
caaagtccaacctaattcag

SEQ ID NO: 198177 - DNA, 20 bp, synthetic construct
  source 1..20: mol_type = other DNA
acaaagtccaacctaattca

SEQ ID NO: 198178 - DNA, 20 bp, synthetic construct
  source 1..20: mol_type = other DNA
gacaaagtccaacctaattc

SEQ ID NO: 198179 - DNA, 20 bp, synthetic construct
  source 1..20: mol_type = other DNA
agacaaagtccaacctaatt

SEQ ID NO: 198180 - DNA, 20 bp, synthetic construct
  source 1..20: mol_type = other DNA
aagacaaagtccaacctaat

SEQ ID NO: 198181 - DNA, 20 bp, synthetic construct
  source 1..20: mol_type = other DNA
caagacaaagtccaacctaa

SEQ ID NO: 198182 - DNA, 20 bp, synthetic construct
  source 1..20: mol_type = other DNA
acaagacaaagtccaaccta

SEQ ID NO: 198183 - DNA, 20 bp, synthetic construct
  source 1..20: mol_type = other DNA
cacaagacaaagtccaacct

SEQ ID NO: 198184 - DNA, 20 bp, synthetic construct
  source 1..20: mol_type = other DNA
ccacaagacaaagtccaacc

SEQ ID NO: 198185 - DNA, 20 bp, synthetic construct
  source 1..20: mol_type = other DNA
cccacaagacaaagtccaac

SEQ ID NO: 198186 - DNA, 20 bp, synthetic construct
  source 1..20: mol_type = other DNA
ccccacaagacaaagtccaa

SEQ ID NO: 198187 - DNA, 20 bp, synthetic construct
  source 1..20: mol_type = other DNA
tccccacaagacaaagtcca

SEQ ID NO: 198188 - DNA, 20 bp, synthetic construct
  source 1..20: mol_type = other DNA
ttccccacaagacaaagtcc

SEQ ID NO: 198189 - DNA, 20 bp, synthetic construct
  source 1..20: mol_type = other DNA
cttccccacaagacaaagtc

SEQ ID NO: 198190 - DNA, 20 bp, synthetic construct
  source 1..20: mol_type = other DNA
ccttccccacaagacaaagt

SEQ ID NO: 198191 - DNA, 20 bp, synthetic construct
  source 1..20: mol_type = other DNA
cccttccccacaagacaaag

SEQ ID NO: 198192 - DNA, 20 bp, synthetic construct
  source 1..20: mol_type = other DNA
tcccttccccacaagacaaa

SEQ ID NO: 198193 - DNA, 20 bp, synthetic construct
  source 1..20: mol_type = other DNA
ctcccttccccacaagacaa

SEQ ID NO: 198194 - DNA, 20 bp, synthetic construct
  source 1..20: mol_type = other DNA
cctcccttccccacaagaca

SEQ ID NO: 198195 - DNA, 20 bp, synthetic construct
  source 1..20: mol_type = other DNA
tcctcccttccccacaagac

SEQ ID NO: 198196 - DNA, 20 bp, synthetic construct
  source 1..20: mol_type = other DNA
gtcctcccttccccacaaga

SEQ ID NO: 198197 - DNA, 20 bp, synthetic construct
  source 1..20: mol_type = other DNA
agtcctcccttccccacaag

SEQ ID NO: 198198 - DNA, 20 bp, synthetic construct
  source 1..20: mol_type = other DNA
tagtcctcccttccccacaa

SEQ ID NO: 198199 - DNA, 20 bp, synthetic construct
  source 1..20: mol_type = other DNA
atagtcctcccttccccaca

SEQ ID NO: 198200 - DNA, 20 bp, synthetic construct
  source 1..20: mol_type = other DNA
tatagtcctcccttccccac

SEQ ID NO: 198201 - DNA, 20 bp, synthetic construct
  source 1..20: mol_type = other DNA
ctatagtcctcccttcccca

SEQ ID NO: 198202 - DNA, 20 bp, synthetic construct
  source 1..20: mol_type = other DNA
tctatagtcctcccttcccc

SEQ ID NO: 198203 - DNA, 20 bp, synthetic construct
  source 1..20: mol_type = other DNA
gtctatagtcctcccttccc

SEQ ID NO: 198204 - DNA, 20 bp, synthetic construct
  source 1..20: mol_type = other DNA
ggtctatagtcctcccttcc

SEQ ID NO: 198205 - DNA, 20 bp, synthetic construct
  source 1..20: mol_type = other DNA
gggtctatagtcctcccttc

SEQ ID NO: 198206 - DNA, 20 bp, synthetic construct
  source 1..20: mol_type = other DNA
agggtctatagtcctccctt

SEQ ID NO: 198207 - DNA, 20 bp, synthetic construct
  source 1..20: mol_type = other DNA
gagggtctatagtcctccct

SEQ ID NO: 198208 - DNA, 20 bp, synthetic construct
  source 1..20: mol_type = other DNA
tgagggtctatagtcctccc

SEQ ID NO: 198209 - DNA, 20 bp, synthetic construct
  source 1..20: mol_type = other DNA
ttgagggtctatagtcctcc

SEQ ID NO: 198210 - DNA, 20 bp, synthetic construct
  source 1..20: mol_type = other DNA
gttgagggtctatagtcctc

SEQ ID NO: 198211 - DNA, 20 bp, synthetic construct
  source 1..20: mol_type = other DNA
cgttgagggtctatagtcct

SEQ ID NO: 198212 - DNA, 20 bp, synthetic construct
  source 1..20: mol_type = other DNA
acgttgagggtctatagtcc

SEQ ID NO: 198213 - DNA, 20 bp, synthetic construct
  source 1..20: mol_type = other DNA
tacgttgagggtctatagtc

SEQ ID NO: 198214 - DNA, 20 bp, synthetic construct
  source 1..20: mol_type = other DNA
ttacgttgagggtctatagt

SEQ ID NO: 198215 - DNA, 20 bp, synthetic construct
  source 1..20: mol_type = other DNA
cttacgttgagggtctatag

SEQ ID NO: 198216 - DNA, 20 bp, synthetic construct
  source 1..20: mol_type = other DNA
gcttacgttgagggtctata

SEQ ID NO: 198217 - DNA, 20 bp, synthetic construct
  source 1..20: mol_type = other DNA
tgcttacgttgagggtctat

SEQ ID NO: 198218 - DNA, 20 bp, synthetic construct
  source 1..20: mol_type = other DNA
ttgcttacgttgagggtcta

SEQ ID NO: 198219 - DNA, 20 bp, synthetic construct
  source 1..20: mol_type = other DNA
attgcttacgttgagggtct

SEQ ID NO: 198220 - DNA, 20 bp, synthetic construct
  source 1..20: mol_type = other DNA
cattgcttacgttgagggtc

SEQ ID NO: 198221 - DNA, 20 bp, synthetic construct
  source 1..20: mol_type = other DNA
ccattgcttacgttgagggt

SEQ ID NO: 198222 - DNA, 20 bp, synthetic construct
  source 1..20: mol_type = other DNA
accattgcttacgttgaggg

SEQ ID NO: 198223 - DNA, 20 bp, synthetic construct
  source 1..20: mol_type = other DNA
gaccattgcttacgttgagg

SEQ ID NO: 198224 - DNA, 20 bp, synthetic construct
  source 1..20: mol_type = other DNA
tgaccattgcttacgttgag

SEQ ID NO: 198225 - DNA, 20 bp, synthetic construct
  source 1..20: mol_type = other DNA
ctgaccattgcttacgttga

SEQ ID NO: 198226 - DNA, 20 bp, synthetic construct
  source 1..20: mol_type = other DNA
tctgaccattgcttacgttg

SEQ ID NO: 198227 - DNA, 20 bp, synthetic construct
  source 1..20: mol_type = other DNA
gtctgaccattgcttacgtt

SEQ ID NO: 198228 - DNA, 20 bp, synthetic construct
  source 1..20: mol_type = other DNA
agtctgaccattgcttacgt

SEQ ID NO: 198229 - DNA, 20 bp, synthetic construct
  source 1..20: mol_type = other DNA
tagtctgaccattgcttacg

SEQ ID NO: 198230 - DNA, 20 bp, synthetic construct
  source 1..20: mol_type = other DNA
atagtctgaccattgcttac

SEQ ID NO: 198231 - DNA, 20 bp, synthetic construct
  source 1..20: mol_type = other DNA
aatagtctgaccattgctta

SEQ ID NO: 198232 - DNA, 20 bp, synthetic construct
  source 1..20: mol_type = other DNA
gaatagtctgaccattgctt

SEQ ID NO: 198233 - DNA, 20 bp, synthetic construct
  source 1..20: mol_type = other DNA
agaatagtctgaccattgct

SEQ ID NO: 198234 - DNA, 20 bp, synthetic construct
  source 1..20: mol_type = other DNA
tagaatagtctgaccattgc

SEQ ID NO: 198235 - DNA, 20 bp, synthetic construct
  source 1..20: mol_type = other DNA
ttagaatagtctgaccattg

SEQ ID NO: 198236 - DNA, 20 bp, synthetic construct
  source 1..20: mol_type = other DNA
cttagaatagtctgaccatt

SEQ ID NO: 198237 - DNA, 20 bp, synthetic construct
  source 1..20: mol_type = other DNA
tcttagaatagtctgaccat

SEQ ID NO: 198238 - DNA, 20 bp, synthetic construct
  source 1..20: mol_type = other DNA
ttcttagaatagtctgacca

SEQ ID NO: 198239 - DNA, 20 bp, synthetic construct
  source 1..20: mol_type = other DNA
tttcttagaatagtctgacc

SEQ ID NO: 198240 - DNA, 20 bp, synthetic construct
  source 1..20: mol_type = other DNA
ttttcttagaatagtctgac

SEQ ID NO: 198241 - DNA, 20 bp, synthetic construct
  source 1..20: mol_type = other DNA
gttttcttagaatagtctga

SEQ ID NO: 198242 - DNA, 20 bp, synthetic construct
  source 1..20: mol_type = other DNA
agttttcttagaatagtctg

SEQ ID NO: 198243 - DNA, 20 bp, synthetic construct
  source 1..20: mol_type = other DNA
gagttttcttagaatagtct

SEQ ID NO: 198244 - DNA, 20 bp, synthetic construct
  source 1..20: mol_type = other DNA
cgagttttcttagaatagtc

SEQ ID NO: 198245 - DNA, 20 bp, synthetic construct
  source 1..20: mol_type = other DNA
gcgagttttcttagaatagt

SEQ ID NO: 198246 - DNA, 20 bp, synthetic construct
  source 1..20: mol_type = other DNA
ggcgagttttcttagaatag

SEQ ID NO: 198247 - DNA, 20 bp, synthetic construct
  source 1..20: mol_type = other DNA
cggcgagttttcttagaata

SEQ ID NO: 198248 - DNA, 20 bp, synthetic construct
  source 1..20: mol_type = other DNA
tcggcgagttttcttagaat

SEQ ID NO: 198249 - DNA, 20 bp, synthetic construct
  source 1..20: mol_type = other DNA
ttcggcgagttttcttagaa

SEQ ID NO: 198250 - DNA, 20 bp, synthetic construct
  source 1..20: mol_type = other DNA
attcggcgagttttcttaga

SEQ ID NO: 198251 - DNA, 20 bp, synthetic construct
  source 1..20: mol_type = other DNA
aattcggcgagttttcttag

SEQ ID NO: 198252 - DNA, 20 bp, synthetic construct
  source 1..20: mol_type = other DNA
taattcggcgagttttctta

SEQ ID NO: 198253 - DNA, 20 bp, synthetic construct
  source 1..20: mol_type = other DNA
ttaattcggcgagttttctt

SEQ ID NO: 198254 - DNA, 20 bp, synthetic construct
  source 1..20: mol_type = other DNA
tttaattcggcgagttttct

SEQ ID NO: 198255 - DNA, 20 bp, synthetic construct
  source 1..20: mol_type = other DNA
ctttaattcggcgagttttc

SEQ ID NO: 198256 - DNA, 20 bp, synthetic construct
  source 1..20: mol_type = other DNA
gctttaattcggcgagtttt

SEQ ID NO: 198257 - DNA, 20 bp, synthetic construct
  source 1..20: mol_type = other DNA
tgctttaattcggcgagttt

SEQ ID NO: 198258 - DNA, 20 bp, synthetic construct
  source 1..20: mol_type = other DNA
atgctttaattcggcgagtt

SEQ ID NO: 198259 - DNA, 20 bp, synthetic construct
  source 1..20: mol_type = other DNA
catgctttaattcggcgagt

SEQ ID NO: 198260 - DNA, 20 bp, synthetic construct
  source 1..20: mol_type = other DNA
tcatgctttaattcggcgag

SEQ ID NO: 198261 - DNA, 20 bp, synthetic construct
  source 1..20: mol_type = other DNA
ctcatgctttaattcggcga

SEQ ID NO: 198262 - DNA, 20 bp, synthetic construct
  source 1..20: mol_type = other DNA
cctcatgctttaattcggcg

SEQ ID NO: 198263 - DNA, 20 bp, synthetic construct
  source 1..20: mol_type = other DNA
acctcatgctttaattcggc

SEQ ID NO: 198264 - DNA, 20 bp, synthetic construct
  source 1..20: mol_type = other DNA
tacctcatgctttaattcgg

SEQ ID NO: 198265 - DNA, 20 bp, synthetic construct
  source 1..20: mol_type = other DNA
ttacctcatgctttaattcg

SEQ ID NO: 198266 - DNA, 20 bp, synthetic construct
  source 1..20: mol_type = other DNA
tttacctcatgctttaattc

SEQ ID NO: 198267 - DNA, 20 bp, synthetic construct
  source 1..20: mol_type = other DNA
atttacctcatgctttaatt

SEQ ID NO: 198268 - DNA, 20 bp, synthetic construct
  source 1..20: mol_type = other DNA
aatttacctcatgctttaat

SEQ ID NO: 198269 - DNA, 20 bp, synthetic construct
  source 1..20: mol_type = other DNA
aaatttacctcatgctttaa

SEQ ID NO: 198270 - DNA, 20 bp, synthetic construct
  source 1..20: mol_type = other DNA
taaatttacctcatgcttta

SEQ ID NO: 198271 - DNA, 20 bp, synthetic construct
  source 1..20: mol_type = other DNA
ctaaatttacctcatgcttt

SEQ ID NO: 198272 - DNA, 20 bp, synthetic construct
  source 1..20: mol_type = other DNA
actaaatttacctcatgctt

SEQ ID NO: 198273 - DNA, 20 bp, synthetic construct
  source 1..20: mol_type = other DNA
aactaaatttacctcatgct

SEQ ID NO: 198274 - DNA, 20 bp, synthetic construct
  source 1..20: mol_type = other DNA
gaactaaatttacctcatgc

SEQ ID NO: 198275 - DNA, 20 bp, synthetic construct
  source 1..20: mol_type = other DNA
agaactaaatttacctcatg

SEQ ID NO: 198276 - DNA, 20 bp, synthetic construct
  source 1..20: mol_type = other DNA
cagaactaaatttacctcat

SEQ ID NO: 198277 - DNA, 20 bp, synthetic construct
  source 1..20: mol_type = other DNA
tcagaactaaatttacctca

SEQ ID NO: 198278 - DNA, 20 bp, synthetic construct
  source 1..20: mol_type = other DNA
gtcagaactaaatttacctc

SEQ ID NO: 198279 - DNA, 20 bp, synthetic construct
  source 1..20: mol_type = other DNA
agtcagaactaaatttacct

SEQ ID NO: 198280 - DNA, 20 bp, synthetic construct
  source 1..20: mol_type = other DNA
aagtcagaactaaatttacc

SEQ ID NO: 198281 - DNA, 20 bp, synthetic construct
  source 1..20: mol_type = other DNA
gaagtcagaactaaatttac

SEQ ID NO: 198282 - DNA, 20 bp, synthetic construct
  source 1..20: mol_type = other DNA
agaagtcagaactaaattta

SEQ ID NO: 198283 - DNA, 20 bp, synthetic construct
  source 1..20: mol_type = other DNA
cagaagtcagaactaaattt

SEQ ID NO: 198284 - DNA, 20 bp, synthetic construct
  source 1..20: mol_type = other DNA
acagaagtcagaactaaatt

SEQ ID NO: 198285 - DNA, 20 bp, synthetic construct
  source 1..20: mol_type = other DNA
gacagaagtcagaactaaat

SEQ ID NO: 198286 - DNA, 20 bp, synthetic construct
  source 1..20: mol_type = other DNA
ggacagaagtcagaactaaa

SEQ ID NO: 198287 - DNA, 20 bp, synthetic construct
  source 1..20: mol_type = other DNA
tggacagaagtcagaactaa

SEQ ID NO: 198288 - DNA, 20 bp, synthetic construct
  source 1..20: mol_type = other DNA
gtggacagaagtcagaacta

SEQ ID NO: 198289 - DNA, 20 bp, synthetic construct
  source 1..20: mol_type = other DNA
ggtggacagaagtcagaact

SEQ ID NO: 198290 - DNA, 20 bp, synthetic construct
  source 1..20: mol_type = other DNA
gggtggacagaagtcagaac

SEQ ID NO: 198291 - DNA, 20 bp, synthetic construct
  source 1..20: mol_type = other DNA
ggggtggacagaagtcagaa

SEQ ID NO: 198292 - DNA, 20 bp, synthetic construct
  source 1..20: mol_type = other DNA
tggggtggacagaagtcaga

SEQ ID NO: 198293 - DNA, 20 bp, synthetic construct
  source 1..20: mol_type = other DNA
gtggggtggacagaagtcag

SEQ ID NO: 198294 - DNA, 20 bp, synthetic construct
  source 1..20: mol_type = other DNA
agtggggtggacagaagtca

SEQ ID NO: 198295 - DNA, 20 bp, synthetic construct
  source 1..20: mol_type = other DNA
cagtggggtggacagaagtc

SEQ ID NO: 198296 - DNA, 20 bp, synthetic construct
  source 1..20: mol_type = other DNA
gcagtggggtggacagaagt

SEQ ID NO: 198297 - DNA, 20 bp, synthetic construct
  source 1..20: mol_type = other DNA
ggcagtggggtggacagaag

SEQ ID NO: 198298 - DNA, 20 bp, synthetic construct
  source 1..20: mol_type = other DNA
tggcagtggggtggacagaa

SEQ ID NO: 198299 - DNA, 20 bp, synthetic construct
  source 1..20: mol_type = other DNA
gtggcagtggggtggacaga

SEQ ID NO: 198300 - DNA, 20 bp, synthetic construct
  source 1..20: mol_type = other DNA
agtggcagtggggtggacag

SEQ ID NO: 198301 - DNA, 20 bp, synthetic construct
  source 1..20: mol_type = other DNA
cagtggcagtggggtggaca

SEQ ID NO: 198302 - DNA, 20 bp, synthetic construct
  source 1..20: mol_type = other DNA
acagtggcagtggggtggac

SEQ ID NO: 198303 - DNA, 20 bp, synthetic construct
  source 1..20: mol_type = other DNA
gacagtggcagtggggtgga

SEQ ID NO: 198304 - DNA, 20 bp, synthetic construct
  source 1..20: mol_type = other DNA
ggacagtggcagtggggtgg

SEQ ID NO: 198305 - DNA, 20 bp, synthetic construct
  source 1..20: mol_type = other DNA
gggacagtggcagtggggtg

SEQ ID NO: 198306 - DNA, 20 bp, synthetic construct
  source 1..20: mol_type = other DNA
ggggacagtggcagtggggt

SEQ ID NO: 198307 - DNA, 20 bp, synthetic construct
  source 1..20: mol_type = other DNA
aggggacagtggcagtgggg

SEQ ID NO: 198308 - DNA, 20 bp, synthetic construct
  source 1..20: mol_type = other DNA
aaggggacagtggcagtggg

SEQ ID NO: 198309 - DNA, 20 bp, synthetic construct
  source 1..20: mol_type = other DNA
aaaggggacagtggcagtgg

SEQ ID NO: 198310 - DNA, 20 bp, synthetic construct
  source 1..20: mol_type = other DNA
aaaaggggacagtggcagtg

SEQ ID NO: 198311 - DNA, 20 bp, synthetic construct
  source 1..20: mol_type = other DNA
taaaaggggacagtggcagt

SEQ ID NO: 198312 - DNA, 20 bp, synthetic construct
  source 1..20: mol_type = other DNA
ataaaaggggacagtggcag

SEQ ID NO: 198313 - DNA, 20 bp, synthetic construct
  source 1..20: mol_type = other DNA
gataaaaggggacagtggca

SEQ ID NO: 198314 - DNA, 20 bp, synthetic construct
  source 1..20: mol_type = other DNA
ggataaaaggggacagtggc

SEQ ID NO: 198315 - DNA, 20 bp, synthetic construct
  source 1..20: mol_type = other DNA
gggataaaaggggacagtgg

SEQ ID NO: 198316 - DNA, 20 bp, synthetic construct
  source 1..20: mol_type = other DNA
tgggataaaaggggacagtg

SEQ ID NO: 198317 - DNA, 20 bp, synthetic construct
  source 1..20: mol_type = other DNA
atgggataaaaggggacagt

SEQ ID NO: 198318 - DNA, 20 bp, synthetic construct
  source 1..20: mol_type = other DNA
catgggataaaaggggacag

SEQ ID NO: 198319 - DNA, 20 bp, synthetic construct
  source 1..20: mol_type = other DNA
tcatgggataaaaggggaca

SEQ ID NO: 198320 - DNA, 20 bp, synthetic construct
  source 1..20: mol_type = other DNA
atcatgggataaaaggggac

SEQ ID NO: 198321 - DNA, 20 bp, synthetic construct
  source 1..20: mol_type = other DNA
gatcatgggataaaagggga

SEQ ID NO: 198322 - DNA, 20 bp, synthetic construct
  source 1..20: mol_type = other DNA
ggatcatgggataaaagggg

SEQ ID NO: 198323 - DNA, 20 bp, synthetic construct
  source 1..20: mol_type = other DNA
gggatcatgggataaaaggg

SEQ ID NO: 198324 - DNA, 20 bp, synthetic construct
  source 1..20: mol_type = other DNA
agggatcatgggataaaagg

SEQ ID NO: 198325 - DNA, 20 bp, synthetic construct
  source 1..20: mol_type = other DNA
aagggatcatgggataaaag

SEQ ID NO: 198326 - DNA, 20 bp, synthetic construct
  source 1..20: mol_type = other DNA
caagggatcatgggataaaa

SEQ ID NO: 198327 - DNA, 20 bp, synthetic construct
  source 1..20: mol_type = other DNA
gcaagggatcatgggataaa

SEQ ID NO: 198328 - DNA, 20 bp, synthetic construct
  source 1..20: mol_type = other DNA
agcaagggatcatgggataa

SEQ ID NO: 198329 - DNA, 20 bp, synthetic construct
  source 1..20: mol_type = other DNA
aagcaagggatcatgggata

SEQ ID NO: 198330 - DNA, 20 bp, synthetic construct
  source 1..20: mol_type = other DNA
aaagcaagggatcatgggat

SEQ ID NO: 198331 - DNA, 20 bp, synthetic construct
  source 1..20: mol_type = other DNA
aaaagcaagggatcatggga

SEQ ID NO: 198332 - DNA, 20 bp, synthetic construct
  source 1..20: mol_type = other DNA
gaaaagcaagggatcatggg

SEQ ID NO: 198333 - DNA, 20 bp, synthetic construct
  source 1..20: mol_type = other DNA
agaaaagcaagggatcatgg

SEQ ID NO: 198334 - DNA, 20 bp, synthetic construct
  source 1..20: mol_type = other DNA
aagaaaagcaagggatcatg

SEQ ID NO: 198335 - DNA, 20 bp, synthetic construct
  source 1..20: mol_type = other DNA
aaagaaaagcaagggatcat

SEQ ID NO: 198336 - DNA, 20 bp, synthetic construct
  source 1..20: mol_type = other DNA
aaaagaaaagcaagggatca

SEQ ID NO: 198337 - DNA, 20 bp, synthetic construct
  source 1..20: mol_type = other DNA
gaaaagaaaagcaagggatc

SEQ ID NO: 198338 - DNA, 20 bp, synthetic construct
  source 1..20: mol_type = other DNA
ggaaaagaaaagcaagggat

SEQ ID NO: 198339 - DNA, 20 bp, synthetic construct
  source 1..20: mol_type = other DNA
aggaaaagaaaagcaaggga

SEQ ID NO: 198340 - DNA, 20 bp, synthetic construct
  source 1..20: mol_type = other DNA
gaggaaaagaaaagcaaggg

SEQ ID NO: 198341 - DNA, 20 bp, synthetic construct
  source 1..20: mol_type = other DNA
ggaggaaaagaaaagcaagg

SEQ ID NO: 198342 - DNA, 20 bp, synthetic construct
  source 1..20: mol_type = other DNA
aggaggaaaagaaaagcaag

SEQ ID NO: 198343 - DNA, 20 bp, synthetic construct
  source 1..20: mol_type = other DNA
gaggaggaaaagaaaagcaa

SEQ ID NO: 198344 - DNA, 20 bp, synthetic construct
  source 1..20: mol_type = other DNA
agaggaggaaaagaaaagca

SEQ ID NO: 198345 - DNA, 20 bp, synthetic construct
  source 1..20: mol_type = other DNA
gagaggaggaaaagaaaagc

SEQ ID NO: 198346 - DNA, 20 bp, synthetic construct
  source 1..20: mol_type = other DNA
agagaggaggaaaagaaaag

SEQ ID NO: 198347 - DNA, 20 bp, synthetic construct
  source 1..20: mol_type = other DNA
gagagaggaggaaaagaaaa

SEQ ID NO: 198348 - DNA, 20 bp, synthetic construct
  source 1..20: mol_type = other DNA
ggagagaggaggaaaagaaa

SEQ ID NO: 198349 - DNA, 20 bp, synthetic construct
  source 1..20: mol_type = other DNA
gggagagaggaggaaaagaa

SEQ ID NO: 198350 - DNA, 20 bp, synthetic construct
  source 1..20: mol_type = other DNA
agggagagaggaggaaaaga

SEQ ID NO: 198351 - DNA, 20 bp, synthetic construct
  source 1..20: mol_type = other DNA
tagggagagaggaggaaaag

SEQ ID NO: 198352 - DNA, 20 bp, synthetic construct
  source 1..20: mol_type = other DNA
atagggagagaggaggaaaa

SEQ ID NO: 198353 - DNA, 20 bp, synthetic construct
  source 1..20: mol_type = other DNA
gatagggagagaggaggaaa

SEQ ID NO: 198354 - DNA, 20 bp, synthetic construct
  source 1..20: mol_type = other DNA
agatagggagagaggaggaa

SEQ ID NO: 198355 - DNA, 20 bp, synthetic construct
  source 1..20: mol_type = other DNA
gagatagggagagaggagga

SEQ ID NO: 198356 - DNA, 20 bp, synthetic construct
  source 1..20: mol_type = other DNA
agagatagggagagaggagg

SEQ ID NO: 198357 - DNA, 20 bp, synthetic construct
  source 1..20: mol_type = other DNA
aagagatagggagagaggag

SEQ ID NO: 198358 - DNA, 20 bp, synthetic construct
  source 1..20: mol_type = other DNA
caagagatagggagagagga

SEQ ID NO: 198359 - DNA, 20 bp, synthetic construct
  source 1..20: mol_type = other DNA
acaagagatagggagagagg

SEQ ID NO: 198360 - DNA, 20 bp, synthetic construct
  source 1..20: mol_type = other DNA
cacaagagatagggagagag

SEQ ID NO: 198361 - DNA, 20 bp, synthetic construct
  source 1..20: mol_type = other DNA
acacaagagatagggagaga

SEQ ID NO: 198362 - DNA, 20 bp, synthetic construct
  source 1..20: mol_type = other DNA
aacacaagagatagggagag

SEQ ID NO: 198363 - DNA, 20 bp, synthetic construct
  source 1..20: mol_type = other DNA
aaacacaagagatagggaga

SEQ ID NO: 198364 - DNA, 20 bp, synthetic construct
  source 1..20: mol_type = other DNA
caaacacaagagatagggag

SEQ ID NO: 198365 - DNA, 20 bp, synthetic construct
  source 1..20: mol_type = other DNA
tcaaacacaagagataggga

SEQ ID NO: 198366 - DNA, 20 bp, synthetic construct
  source 1..20: mol_type = other DNA
gtcaaacacaagagataggg

SEQ ID NO: 198367 - DNA, 20 bp, synthetic construct
  source 1..20: mol_type = other DNA
cgtcaaacacaagagatagg

SEQ ID NO: 198368 - DNA, 20 bp, synthetic construct
  source 1..20: mol_type = other DNA
gcgtcaaacacaagagatag

SEQ ID NO: 198369 - DNA, 20 bp, synthetic construct
  source 1..20: mol_type = other DNA
tgcgtcaaacacaagagata

SEQ ID NO: 198370 - DNA, 20 bp, synthetic construct
  source 1..20: mol_type = other DNA
atgcgtcaaacacaagagat

SEQ ID NO: 198371 - DNA, 20 bp, synthetic construct
  source 1..20: mol_type = other DNA
catgcgtcaaacacaagaga

SEQ ID NO: 198372 - DNA, 20 bp, synthetic construct
  source 1..20: mol_type = other DNA
tcatgcgtcaaacacaagag

SEQ ID NO: 198373 - DNA, 20 bp, synthetic construct
  source 1..20: mol_type = other DNA
atcatgcgtcaaacacaaga

SEQ ID NO: 198374 - DNA, 20 bp, synthetic construct
  source 1..20: mol_type = other DNA
tatcatgcgtcaaacacaag

SEQ ID NO: 198375 - DNA, 20 bp, synthetic construct
  source 1..20: mol_type = other DNA
ctatcatgcgtcaaacacaa

SEQ ID NO: 198376 - DNA, 20 bp, synthetic construct
  source 1..20: mol_type = other DNA
cctatcatgcgtcaaacaca

SEQ ID NO: 198377 - DNA, 20 bp, synthetic construct
  source 1..20: mol_type = other DNA
tcctatcatgcgtcaaacac

SEQ ID NO: 198378 - DNA, 20 bp, synthetic construct
  source 1..20: mol_type = other DNA
ttcctatcatgcgtcaaaca

SEQ ID NO: 198379 - DNA, 20 bp, synthetic construct
  source 1..20: mol_type = other DNA
attcctatcatgcgtcaaac

SEQ ID NO: 198380 - DNA, 20 bp, synthetic construct
  source 1..20: mol_type = other DNA
aattcctatcatgcgtcaaa

SEQ ID NO: 198381 - DNA, 20 bp, synthetic construct
  source 1..20: mol_type = other DNA
gaattcctatcatgcgtcaa

SEQ ID NO: 198382 - DNA, 20 bp, synthetic construct
  source 1..20: mol_type = other DNA
tgaattcctatcatgcgtca

SEQ ID NO: 198383 - DNA, 20 bp, synthetic construct
  source 1..20: mol_type = other DNA
ctgaattcctatcatgcgtc

SEQ ID NO: 198384 - DNA, 20 bp, synthetic construct
  source 1..20: mol_type = other DNA
tctgaattcctatcatgcgt

SEQ ID NO: 198385 - DNA, 20 bp, synthetic construct
  source 1..20: mol_type = other DNA
ttctgaattcctatcatgcg

SEQ ID NO: 198386 - DNA, 20 bp, synthetic construct
  source 1..20: mol_type = other DNA
tttctgaattcctatcatgc

SEQ ID NO: 198387 - DNA, 20 bp, synthetic construct
  source 1..20: mol_type = other DNA
atttctgaattcctatcatg

SEQ ID NO: 198388 - DNA, 20 bp, synthetic construct
  source 1..20: mol_type = other DNA
tatttctgaattcctatcat

SEQ ID NO: 198389 - DNA, 20 bp, synthetic construct
  source 1..20: mol_type = other DNA
atatttctgaattcctatca

SEQ ID NO: 198390 - DNA, 20 bp, synthetic construct
  source 1..20: mol_type = other DNA
tatatttctgaattcctatc

SEQ ID NO: 198391 - DNA, 20 bp, synthetic construct
  source 1..20: mol_type = other DNA
atatatttctgaattcctat

SEQ ID NO: 198392 - DNA, 20 bp, synthetic construct
  source 1..20: mol_type = other DNA
catatatttctgaattccta

SEQ ID NO: 198393 - DNA, 20 bp, synthetic construct
  source 1..20: mol_type = other DNA
acatatatttctgaattcct

SEQ ID NO: 198394 - DNA, 20 bp, synthetic construct
  source 1..20: mol_type = other DNA
aacatatatttctgaattcc

SEQ ID NO: 198395 - DNA, 20 bp, synthetic construct
  source 1..20: mol_type = other DNA
aaacatatatttctgaattc

SEQ ID NO: 198396 - DNA, 20 bp, synthetic construct
  source 1..20: mol_type = other DNA
caaacatatatttctgaatt

SEQ ID NO: 198397 - DNA, 20 bp, synthetic construct
  source 1..20: mol_type = other DNA
acaaacatatatttctgaat

SEQ ID NO: 198398 - DNA, 20 bp, synthetic construct
  source 1..20: mol_type = other DNA
cacaaacatatatttctgaa

SEQ ID NO: 198399 - DNA, 20 bp, synthetic construct
  source 1..20: mol_type = other DNA
ccacaaacatatatttctga

SEQ ID NO: 198400 - DNA, 20 bp, synthetic construct
  source 1..20: mol_type = other DNA
tccacaaacatatatttctg

SEQ ID NO: 198401 - DNA, 20 bp, synthetic construct
  source 1..20: mol_type = other DNA
atccacaaacatatatttct

SEQ ID NO: 198402 - DNA, 20 bp, synthetic construct
  source 1..20: mol_type = other DNA
aatccacaaacatatatttc

SEQ ID NO: 198403 - DNA, 20 bp, synthetic construct
  source 1..20: mol_type = other DNA
aaatccacaaacatatattt

SEQ ID NO: 198404 - DNA, 20 bp, synthetic construct
  source 1..20: mol_type = other DNA
caaatccacaaacatatatt

SEQ ID NO: 198405 - DNA, 20 bp, synthetic construct
  source 1..20: mol_type = other DNA
acaaatccacaaacatatat

SEQ ID NO: 198406 - DNA, 20 bp, synthetic construct
  source 1..20: mol_type = other DNA
aacaaatccacaaacatata

SEQ ID NO: 198407 - DNA, 20 bp, synthetic construct
  source 1..20: mol_type = other DNA
aaacaaatccacaaacatat

SEQ ID NO: 198408 - DNA, 20 bp, synthetic construct
  source 1..20: mol_type = other DNA
taaacaaatccacaaacata

SEQ ID NO: 198409 - DNA, 20 bp, synthetic construct
  source 1..20: mol_type = other DNA
ataaacaaatccacaaacat

SEQ ID NO: 198410 - DNA, 20 bp, synthetic construct
  source 1..20: mol_type = other DNA
aataaacaaatccacaaaca

SEQ ID NO: 198411 - DNA, 20 bp, synthetic construct
  source 1..20: mol_type = other DNA
gaataaacaaatccacaaac

SEQ ID NO: 198412 - DNA, 20 bp, synthetic construct
  source 1..20: mol_type = other DNA
tgaataaacaaatccacaaa

SEQ ID NO: 198413 - DNA, 20 bp, synthetic construct
  source 1..20: mol_type = other DNA
gtgaataaacaaatccacaa

SEQ ID NO: 198414 - DNA, 20 bp, synthetic construct
  source 1..20: mol_type = other DNA
cgtgaataaacaaatccaca

SEQ ID NO: 198415 - DNA, 20 bp, synthetic construct
  source 1..20: mol_type = other DNA
acgtgaataaacaaatccac

SEQ ID NO: 198416 - DNA, 20 bp, synthetic construct
  source 1..20: mol_type = other DNA
tacgtgaataaacaaatcca

SEQ ID NO: 198417 - DNA, 20 bp, synthetic construct
  source 1..20: mol_type = other DNA
ctacgtgaataaacaaatcc

SEQ ID NO: 198418 - DNA, 20 bp, synthetic construct
  source 1..20: mol_type = other DNA
gctacgtgaataaacaaatc

SEQ ID NO: 198419 - DNA, 20 bp, synthetic construct
  source 1..20: mol_type = other DNA
tgctacgtgaataaacaaat

SEQ ID NO: 198420 - DNA, 20 bp, synthetic construct
  source 1..20: mol_type = other DNA
ttgctacgtgaataaacaaa

SEQ ID NO: 198421 - DNA, 20 bp, synthetic construct
  source 1..20: mol_type = other DNA
tttgctacgtgaataaacaa

SEQ ID NO: 198422 - DNA, 20 bp, synthetic construct
  source 1..20: mol_type = other DNA
gtttgctacgtgaataaaca

SEQ ID NO: 198423 - DNA, 20 bp, synthetic construct
  source 1..20: mol_type = other DNA
ggtttgctacgtgaataaac

SEQ ID NO: 198424 - DNA, 20 bp, synthetic construct
  source 1..20: mol_type = other DNA
tggtttgctacgtgaataaa

SEQ ID NO: 198425 - DNA, 20 bp, synthetic construct
  source 1..20: mol_type = other DNA
atggtttgctacgtgaataa

SEQ ID NO: 198426 - DNA, 20 bp, synthetic construct
  source 1..20: mol_type = other DNA
aatggtttgctacgtgaata

SEQ ID NO: 198427 - DNA, 20 bp, synthetic construct
  source 1..20: mol_type = other DNA
aaatggtttgctacgtgaat

SEQ ID NO: 198428 - DNA, 20 bp, synthetic construct
  source 1..20: mol_type = other DNA
gaaatggtttgctacgtgaa

SEQ ID NO: 198429 - DNA, 20 bp, synthetic construct
  source 1..20: mol_type = other DNA
agaaatggtttgctacgtga

SEQ ID NO: 198430 - DNA, 20 bp, synthetic construct
  source 1..20: mol_type = other DNA
aagaaatggtttgctacgtg

SEQ ID NO: 198431 - DNA, 20 bp, synthetic construct
  source 1..20: mol_type = other DNA
caagaaatggtttgctacgt

SEQ ID NO: 198432 - DNA, 20 bp, synthetic construct
  source 1..20: mol_type = other DNA
tcaagaaatggtttgctacg

SEQ ID NO: 198433 - DNA, 20 bp, synthetic construct
  source 1..20: mol_type = other DNA
ctcaagaaatggtttgctac

SEQ ID NO: 198434 - DNA, 20 bp, synthetic construct
  source 1..20: mol_type = other DNA
actcaagaaatggtttgcta

SEQ ID NO: 198435 - DNA, 20 bp, synthetic construct
  source 1..20: mol_type = other DNA
cactcaagaaatggtttgct

SEQ ID NO: 198436 - DNA, 20 bp, synthetic construct
  source 1..20: mol_type = other DNA
gcactcaagaaatggtttgc

SEQ ID NO: 198437 - DNA, 20 bp, synthetic construct
  source 1..20: mol_type = other DNA
ggcactcaagaaatggtttg

SEQ ID NO: 198438 - DNA, 20 bp, synthetic construct
  source 1..20: mol_type = other DNA
aggcactcaagaaatggttt

SEQ ID NO: 198439 - DNA, 20 bp, synthetic construct
  source 1..20: mol_type = other DNA
taggcactcaagaaatggtt

SEQ ID NO: 198440 - DNA, 20 bp, synthetic construct
  source 1..20: mol_type = other DNA
gtaggcactcaagaaatggt

SEQ ID NO: 198441 - DNA, 20 bp, synthetic construct
  source 1..20: mol_type = other DNA
ggtaggcactcaagaaatgg

SEQ ID NO: 198442 - DNA, 20 bp, synthetic construct
  source 1..20: mol_type = other DNA
tggtaggcactcaagaaatg

SEQ ID NO: 198443 - DNA, 20 bp, synthetic construct
  source 1..20: mol_type = other DNA
atggtaggcactcaagaaat

SEQ ID NO: 198444 - DNA, 20 bp, synthetic construct
  source 1..20: mol_type = other DNA
catggtaggcactcaagaaa

SEQ ID NO: 198445 - DNA, 20 bp, synthetic construct
  source 1..20: mol_type = other DNA
ccatggtaggcactcaagaa

SEQ ID NO: 198446 - DNA, 20 bp, synthetic construct
  source 1..20: mol_type = other DNA
cccatggtaggcactcaaga

SEQ ID NO: 198447 - DNA, 20 bp, synthetic construct
  source 1..20: mol_type = other DNA
gcccatggtaggcactcaag

SEQ ID NO: 198448 - DNA, 20 bp, synthetic construct
  source 1..20: mol_type = other DNA
ggcccatggtaggcactcaa

SEQ ID NO: 198449 - DNA, 20 bp, synthetic construct
  source 1..20: mol_type = other DNA
tggcccatggtaggcactca

SEQ ID NO: 198450 - DNA, 20 bp, synthetic construct
  source 1..20: mol_type = other DNA
ctggcccatggtaggcactc

SEQ ID NO: 198451 - DNA, 20 bp, synthetic construct
  source 1..20: mol_type = other DNA
cctggcccatggtaggcact

SEQ ID NO: 198452 - DNA, 20 bp, synthetic construct
  source 1..20: mol_type = other DNA
acctggcccatggtaggcac

SEQ ID NO: 198453 - DNA, 20 bp, synthetic construct
  source 1..20: mol_type = other DNA
tacctggcccatggtaggca

SEQ ID NO: 198454 - DNA, 20 bp, synthetic construct
  source 1..20: mol_type = other DNA
ctacctggcccatggtaggc

SEQ ID NO: 198455 - DNA, 20 bp, synthetic construct
  source 1..20: mol_type = other DNA
tctacctggcccatggtagg

SEQ ID NO: 198456 - DNA, 20 bp, synthetic construct
  source 1..20: mol_type = other DNA
ttctacctggcccatggtag

SEQ ID NO: 198457 - DNA, 20 bp, synthetic construct
  source 1..20: mol_type = other DNA
attctacctggcccatggta

SEQ ID NO: 198458 - DNA, 20 bp, synthetic construct
  source 1..20: mol_type = other DNA
cattctacctggcccatggt

SEQ ID NO: 198459 - DNA, 20 bp, synthetic construct
  source 1..20: mol_type = other DNA
ccattctacctggcccatgg

SEQ ID NO: 198460 - DNA, 20 bp, synthetic construct
  source 1..20: mol_type = other DNA
cccattctacctggcccatg

SEQ ID NO: 198461 - DNA, 20 bp, synthetic construct
  source 1..20: mol_type = other DNA
gcccattctacctggcccat

SEQ ID NO: 198462 - DNA, 20 bp, synthetic construct
  source 1..20: mol_type = other DNA
cgcccattctacctggccca

SEQ ID NO: 198463 - DNA, 20 bp, synthetic construct
  source 1..20: mol_type = other DNA
ccgcccattctacctggccc

SEQ ID NO: 198464 - DNA, 20 bp, synthetic construct
  source 1..20: mol_type = other DNA
gccgcccattctacctggcc

SEQ ID NO: 198465 - DNA, 20 bp, synthetic construct
  source 1..20: mol_type = other DNA
ggccgcccattctacctggc

SEQ ID NO: 198466 - DNA, 20 bp, synthetic construct
  source 1..20: mol_type = other DNA
gggccgcccattctacctgg

SEQ ID NO: 198467 - DNA, 20 bp, synthetic construct
  source 1..20: mol_type = other DNA
ggggccgcccattctacctg

SEQ ID NO: 198468 - DNA, 20 bp, synthetic construct
  source 1..20: mol_type = other DNA
cggggccgcccattctacct

SEQ ID NO: 198469 - DNA, 20 bp, synthetic construct
  source 1..20: mol_type = other DNA
ccggggccgcccattctacc

SEQ ID NO: 198470 - DNA, 20 bp, synthetic construct
  source 1..20: mol_type = other DNA
cccggggccgcccattctac

SEQ ID NO: 198471 - DNA, 20 bp, synthetic construct
  source 1..20: mol_type = other DNA
gcccggggccgcccattcta

SEQ ID NO: 198472 - DNA, 20 bp, synthetic construct
  source 1..20: mol_type = other DNA
agcccggggccgcccattct

SEQ ID NO: 198473 - DNA, 20 bp, synthetic construct
  source 1..20: mol_type = other DNA
cagcccggggccgcccattc

SEQ ID NO: 198474 - DNA, 20 bp, synthetic construct
  source 1..20: mol_type = other DNA
gcagcccggggccgcccatt

SEQ ID NO: 198475 - DNA, 20 bp, synthetic construct
  source 1..20: mol_type = other DNA
tgcagcccggggccgcccat

SEQ ID NO: 198476 - DNA, 20 bp, synthetic construct
  source 1..20: mol_type = other DNA
ctgcagcccggggccgccca

SEQ ID NO: 198477 - DNA, 20 bp, synthetic construct
  source 1..20: mol_type = other DNA
actgcagcccggggccgccc

SEQ ID NO: 198478 - DNA, 20 bp, synthetic construct
  source 1..20: mol_type = other DNA
cactgcagcccggggccgcc

SEQ ID NO: 198479 - DNA, 20 bp, synthetic construct
  source 1..20: mol_type = other DNA
ccactgcagcccggggccgc

SEQ ID NO: 198480 - DNA, 20 bp, synthetic construct
  source 1..20: mol_type = other DNA
accactgcagcccggggccg

SEQ ID NO: 198481 - DNA, 20 bp, synthetic construct
  source 1..20: mol_type = other DNA
aaccactgcagcccggggcc

SEQ ID NO: 198482 - DNA, 20 bp, synthetic construct
  source 1..20: mol_type = other DNA
aaaccactgcagcccggggc

SEQ ID NO: 198483 - DNA, 20 bp, synthetic construct
  source 1..20: mol_type = other DNA
gaaaccactgcagcccgggg

SEQ ID NO: 198484 - DNA, 20 bp, synthetic construct
  source 1..20: mol_type = other DNA
agaaaccactgcagcccggg

SEQ ID NO: 198485 - DNA, 20 bp, synthetic construct
  source 1..20: mol_type = other DNA
aagaaaccactgcagcccgg

SEQ ID NO: 198486 - DNA, 20 bp, synthetic construct
  source 1..20: mol_type = other DNA
gaagaaaccactgcagcccg

SEQ ID NO: 198487 - DNA, 20 bp, synthetic construct
  source 1..20: mol_type = other DNA
tgaagaaaccactgcagccc

SEQ ID NO: 198488 - DNA, 20 bp, synthetic construct
  source 1..20: mol_type = other DNA
ctgaagaaaccactgcagcc

SEQ ID NO: 198489 - DNA, 20 bp, synthetic construct
  source 1..20: mol_type = other DNA
gctgaagaaaccactgcagc

SEQ ID NO: 198490 - DNA, 20 bp, synthetic construct
  source 1..20: mol_type = other DNA
ggctgaagaaaccactgcag

SEQ ID NO: 198491 - DNA, 20 bp, synthetic construct
  source 1..20: mol_type = other DNA
gggctgaagaaaccactgca

SEQ ID NO: 198492 - DNA, 20 bp, synthetic construct
  source 1..20: mol_type = other DNA
ggggctgaagaaaccactgc

SEQ ID NO: 198493 - DNA, 20 bp, synthetic construct
  source 1..20: mol_type = other DNA
aggggctgaagaaaccactg

SEQ ID NO: 198494 - DNA, 20 bp, synthetic construct
  source 1..20: mol_type = other DNA
gaggggctgaagaaaccact

SEQ ID NO: 198495 - DNA, 20 bp, synthetic construct
  source 1..20: mol_type = other DNA
agaggggctgaagaaaccac

SEQ ID NO: 198496 - DNA, 20 bp, synthetic construct
  source 1..20: mol_type = other DNA
gagaggggctgaagaaacca

SEQ ID NO: 198497 - DNA, 20 bp, synthetic construct
  source 1..20: mol_type = other DNA
ggagaggggctgaagaaacc

SEQ ID NO: 198498 - DNA, 20 bp, synthetic construct
  source 1..20: mol_type = other DNA
tggagaggggctgaagaaac

SEQ ID NO: 198499 - DNA, 20 bp, synthetic construct
  source 1..20: mol_type = other DNA
ctggagaggggctgaagaaa

SEQ ID NO: 198500 - DNA, 20 bp, synthetic construct
  source 1..20: mol_type = other DNA
cctggagaggggctgaagaa

SEQ ID NO: 198501 - DNA, 20 bp, synthetic construct
  source 1..20: mol_type = other DNA
ccctggagaggggctgaaga

SEQ ID NO: 198502 - DNA, 20 bp, synthetic construct
  source 1..20: mol_type = other DNA
accctggagaggggctgaag

SEQ ID NO: 198503 - DNA, 20 bp, synthetic construct
  source 1..20: mol_type = other DNA
aaccctggagaggggctgaa

SEQ ID NO: 198504 - DNA, 20 bp, synthetic construct
  source 1..20: mol_type = other DNA
aaaccctggagaggggctga

SEQ ID NO: 198505 - DNA, 20 bp, synthetic construct
  source 1..20: mol_type = other DNA
taaaccctggagaggggctg

SEQ ID NO: 198506 - DNA, 20 bp, synthetic construct
  source 1..20: mol_type = other DNA
gtaaaccctggagaggggct

SEQ ID NO: 198507 - DNA, 20 bp, synthetic construct
  source 1..20: mol_type = other DNA
tgtaaaccctggagaggggc

SEQ ID NO: 198508 - DNA, 20 bp, synthetic construct
  source 1..20: mol_type = other DNA
gtgtaaaccctggagagggg

SEQ ID NO: 198509 - DNA, 20 bp, synthetic construct
  source 1..20: mol_type = other DNA
agtgtaaaccctggagaggg

SEQ ID NO: 198510 - DNA, 20 bp, synthetic construct
  source 1..20: mol_type = other DNA
cagtgtaaaccctggagagg

SEQ ID NO: 198511 - DNA, 20 bp, synthetic construct
  source 1..20: mol_type = other DNA
acagtgtaaaccctggagag

SEQ ID NO: 198512 - DNA, 20 bp, synthetic construct
  source 1..20: mol_type = other DNA
cacagtgtaaaccctggaga

SEQ ID NO: 198513 - DNA, 20 bp, synthetic construct
  source 1..20: mol_type = other DNA
gcacagtgtaaaccctggag

SEQ ID NO: 198514 - DNA, 20 bp, synthetic construct
  source 1..20: mol_type = other DNA
tgcacagtgtaaaccctgga

SEQ ID NO: 198515 - DNA, 20 bp, synthetic construct
  source 1..20: mol_type = other DNA
ttgcacagtgtaaaccctgg

SEQ ID NO: 198516 - DNA, 20 bp, synthetic construct
  source 1..20: mol_type = other DNA
cttgcacagtgtaaaccctg

SEQ ID NO: 198517 - DNA, 20 bp, synthetic construct
  source 1..20: mol_type = other DNA
tcttgcacagtgtaaaccct

SEQ ID NO: 198518 - DNA, 20 bp, synthetic construct
  source 1..20: mol_type = other DNA
gtcttgcacagtgtaaaccc

SEQ ID NO: 198519 - DNA, 20 bp, synthetic construct
  source 1..20: mol_type = other DNA
cgtcttgcacagtgtaaacc

SEQ ID NO: 198520 - DNA, 20 bp, synthetic construct
  source 1..20: mol_type = other DNA
ccgtcttgcacagtgtaaac

SEQ ID NO: 198521 - DNA, 20 bp, synthetic construct
  source 1..20: mol_type = other DNA
accgtcttgcacagtgtaaa

SEQ ID NO: 198522 - DNA, 20 bp, synthetic construct
  source 1..20: mol_type = other DNA
aaccgtcttgcacagtgtaa

SEQ ID NO: 198523 - DNA, 20 bp, synthetic construct
  source 1..20: mol_type = other DNA
aaaccgtcttgcacagtgta

SEQ ID NO: 198524 - DNA, 20 bp, synthetic construct
  source 1..20: mol_type = other DNA
caaaccgtcttgcacagtgt

SEQ ID NO: 198525 - DNA, 20 bp, synthetic construct
  source 1..20: mol_type = other DNA
acaaaccgtcttgcacagtg

SEQ ID NO: 198526 - DNA, 20 bp, synthetic construct
  source 1..20: mol_type = other DNA
cacaaaccgtcttgcacagt

SEQ ID NO: 198527 - DNA, 20 bp, synthetic construct
  source 1..20: mol_type = other DNA
tcacaaaccgtcttgcacag

SEQ ID NO: 198528 - DNA, 20 bp, synthetic construct
  source 1..20: mol_type = other DNA
atcacaaaccgtcttgcaca

SEQ ID NO: 198529 - DNA, 20 bp, synthetic construct
  source 1..20: mol_type = other DNA
catcacaaaccgtcttgcac

SEQ ID NO: 198530 - DNA, 20 bp, synthetic construct
  source 1..20: mol_type = other DNA
ccatcacaaaccgtcttgca

SEQ ID NO: 198531 - DNA, 20 bp, synthetic construct
  source 1..20: mol_type = other DNA
cccatcacaaaccgtcttgc

SEQ ID NO: 198532 - DNA, 20 bp, synthetic construct
  source 1..20: mol_type = other DNA
acccatcacaaaccgtcttg

SEQ ID NO: 198533 - DNA, 20 bp, synthetic construct
  source 1..20: mol_type = other DNA
gacccatcacaaaccgtctt

SEQ ID NO: 198534 - DNA, 20 bp, synthetic construct
  source 1..20: mol_type = other DNA
ggacccatcacaaaccgtct

SEQ ID NO: 198535 - DNA, 20 bp, synthetic construct
  source 1..20: mol_type = other DNA
aggacccatcacaaaccgtc

SEQ ID NO: 198536 - DNA, 20 bp, synthetic construct
  source 1..20: mol_type = other DNA
gaggacccatcacaaaccgt

SEQ ID NO: 198537 - DNA, 20 bp, synthetic construct
  source 1..20: mol_type = other DNA
ggaggacccatcacaaaccg

SEQ ID NO: 198538 - DNA, 20 bp, synthetic construct
  source 1..20: mol_type = other DNA
gggaggacccatcacaaacc

SEQ ID NO: 198539 - DNA, 20 bp, synthetic construct
  source 1..20: mol_type = other DNA
tgggaggacccatcacaaac

SEQ ID NO: 198540 - DNA, 20 bp, synthetic construct
  source 1..20: mol_type = other DNA
atgggaggacccatcacaaa

SEQ ID NO: 198541 - DNA, 20 bp, synthetic construct
  source 1..20: mol_type = other DNA
gatgggaggacccatcacaa

SEQ ID NO: 198542 - DNA, 20 bp, synthetic construct
  source 1..20: mol_type = other DNA
cgatgggaggacccatcaca

SEQ ID NO: 198543 - DNA, 20 bp, synthetic construct
  source 1..20: mol_type = other DNA
tcgatgggaggacccatcac

SEQ ID NO: 198544 - DNA, 20 bp, synthetic construct
  source 1..20: mol_type = other DNA
ctcgatgggaggacccatca

SEQ ID NO: 198545 - DNA, 20 bp, synthetic construct
  source 1..20: mol_type = other DNA
cctcgatgggaggacccatc

SEQ ID NO: 198546 - DNA, 20 bp, synthetic construct
  source 1..20: mol_type = other DNA
tcctcgatgggaggacccat

SEQ ID NO: 198547 - DNA, 20 bp, synthetic construct
  source 1..20: mol_type = other DNA
gtcctcgatgggaggaccca

SEQ ID NO: 198548 - DNA, 20 bp, synthetic construct
  source 1..20: mol_type = other DNA
ggtcctcgatgggaggaccc

SEQ ID NO: 198549 - DNA, 20 bp, synthetic construct
  source 1..20: mol_type = other DNA
tggtcctcgatgggaggacc

SEQ ID NO: 198550 - DNA, 20 bp, synthetic construct
  source 1..20: mol_type = other DNA
gtggtcctcgatgggaggac

SEQ ID NO: 198551 - DNA, 20 bp, synthetic construct
  source 1..20: mol_type = other DNA
tgtggtcctcgatgggagga

SEQ ID NO: 198552 - DNA, 20 bp, synthetic construct
  source 1..20: mol_type = other DNA
gtgtggtcctcgatgggagg

SEQ ID NO: 198553 - DNA, 20 bp, synthetic construct
  source 1..20: mol_type = other DNA
agtgtggtcctcgatgggag

SEQ ID NO: 198554 - DNA, 20 bp, synthetic construct
  source 1..20: mol_type = other DNA
gagtgtggtcctcgatggga

SEQ ID NO: 198555 - DNA, 20 bp, synthetic construct
  source 1..20: mol_type = other DNA
agagtgtggtcctcgatggg

SEQ ID NO: 198556 - DNA, 20 bp, synthetic construct
  source 1..20: mol_type = other DNA
aagagtgtggtcctcgatgg

SEQ ID NO: 198557 - DNA, 20 bp, synthetic construct
  source 1..20: mol_type = other DNA
gaagagtgtggtcctcgatg

SEQ ID NO: 198558 - DNA, 20 bp, synthetic construct
  source 1..20: mol_type = other DNA
agaagagtgtggtcctcgat

SEQ ID NO: 198559 - DNA, 20 bp, synthetic construct
  source 1..20: mol_type = other DNA
aagaagagtgtggtcctcga

SEQ ID NO: 198560 - DNA, 20 bp, synthetic construct
  source 1..20: mol_type = other DNA
aaagaagagtgtggtcctcg

SEQ ID NO: 198561 - DNA, 20 bp, synthetic construct
  source 1..20: mol_type = other DNA
gaaagaagagtgtggtcctc

SEQ ID NO: 198562 - DNA, 20 bp, synthetic construct
  source 1..20: mol_type = other DNA
agaaagaagagtgtggtcct

SEQ ID NO: 198563 - DNA, 20 bp, synthetic construct
  source 1..20: mol_type = other DNA
gagaaagaagagtgtggtcc

SEQ ID NO: 198564 - DNA, 20 bp, synthetic construct
  source 1..20: mol_type = other DNA
agagaaagaagagtgtggtc

SEQ ID NO: 198565 - DNA, 20 bp, synthetic construct
  source 1..20: mol_type = other DNA
cagagaaagaagagtgtggt

SEQ ID NO: 198566 - DNA, 20 bp, synthetic construct
  source 1..20: mol_type = other DNA
acagagaaagaagagtgtgg

SEQ ID NO: 198567 - DNA, 20 bp, synthetic construct
  source 1..20: mol_type = other DNA
cacagagaaagaagagtgtg

SEQ ID NO: 198568 - DNA, 20 bp, synthetic construct
  source 1..20: mol_type = other DNA
gcacagagaaagaagagtgt

SEQ ID NO: 198569 - DNA, 20 bp, synthetic construct
  source 1..20: mol_type = other DNA
ggcacagagaaagaagagtg

SEQ ID NO: 198570 - DNA, 20 bp, synthetic construct
  source 1..20: mol_type = other DNA
gggcacagagaaagaagagt

SEQ ID NO: 198571 - DNA, 20 bp, synthetic construct
  source 1..20: mol_type = other DNA
ggggcacagagaaagaagag

SEQ ID NO: 198572 - DNA, 20 bp, synthetic construct
  source 1..20: mol_type = other DNA
aggggcacagagaaagaaga

SEQ ID NO: 198573 - DNA, 20 bp, synthetic construct
  source 1..20: mol_type = other DNA
aaggggcacagagaaagaag

SEQ ID NO: 198574 - DNA, 20 bp, synthetic construct
  source 1..20: mol_type = other DNA
caaggggcacagagaaagaa

SEQ ID NO: 198575 - DNA, 20 bp, synthetic construct
  source 1..20: mol_type = other DNA
ccaaggggcacagagaaaga

SEQ ID NO: 198576 - DNA, 20 bp, synthetic construct
  source 1..20: mol_type = other DNA
accaaggggcacagagaaag

SEQ ID NO: 198577 - DNA, 20 bp, synthetic construct
  source 1..20: mol_type = other DNA
gaccaaggggcacagagaaa

SEQ ID NO: 198578 - DNA, 20 bp, synthetic construct
  source 1..20: mol_type = other DNA
ggaccaaggggcacagagaa

SEQ ID NO: 198579 - DNA, 20 bp, synthetic construct
  source 1..20: mol_type = other DNA
aggaccaaggggcacagaga

SEQ ID NO: 198580 - DNA, 20 bp, synthetic construct
  source 1..20: mol_type = other DNA
gaggaccaaggggcacagag

SEQ ID NO: 198581 - DNA, 20 bp, synthetic construct
  source 1..20: mol_type = other DNA
tgaggaccaaggggcacaga

SEQ ID NO: 198582 - DNA, 20 bp, synthetic construct
  source 1..20: mol_type = other DNA
ctgaggaccaaggggcacag

SEQ ID NO: 198583 - DNA, 20 bp, synthetic construct
  source 1..20: mol_type = other DNA
actgaggaccaaggggcaca

SEQ ID NO: 198584 - DNA, 20 bp, synthetic construct
  source 1..20: mol_type = other DNA
gactgaggaccaaggggcac

SEQ ID NO: 198585 - DNA, 20 bp, synthetic construct
  source 1..20: mol_type = other DNA
agactgaggaccaaggggca

SEQ ID NO: 198586 - DNA, 20 bp, synthetic construct
  source 1..20: mol_type = other DNA
gagactgaggaccaaggggc

SEQ ID NO: 198587 - DNA, 20 bp, synthetic construct
  source 1..20: mol_type = other DNA
agagactgaggaccaagggg

SEQ ID NO: 198588 - DNA, 20 bp, synthetic construct
  source 1..20: mol_type = other DNA
cagagactgaggaccaaggg

SEQ ID NO: 198589 - DNA, 20 bp, synthetic construct
  source 1..20: mol_type = other DNA
tcagagactgaggaccaagg

SEQ ID NO: 198590 - DNA, 20 bp, synthetic construct
  source 1..20: mol_type = other DNA
gtcagagactgaggaccaag

SEQ ID NO: 198591 - DNA, 20 bp, synthetic construct
  source 1..20: mol_type = other DNA
ggtcagagactgaggaccaa

SEQ ID NO: 198592 - DNA, 20 bp, synthetic construct
  source 1..20: mol_type = other DNA
gggtcagagactgaggacca

SEQ ID NO: 198593 - DNA, 20 bp, synthetic construct
  source 1..20: mol_type = other DNA
ggggtcagagactgaggacc

SEQ ID NO: 198594 - DNA, 20 bp, synthetic construct
  source 1..20: mol_type = other DNA
tggggtcagagactgaggac

SEQ ID NO: 198595 - DNA, 20 bp, synthetic construct
  source 1..20: mol_type = other DNA
gtggggtcagagactgagga

SEQ ID NO: 198596 - DNA, 20 bp, synthetic construct
  source 1..20: mol_type = other DNA
agtggggtcagagactgagg

SEQ ID NO: 198597 - DNA, 20 bp, synthetic construct
  source 1..20: mol_type = other DNA
aagtggggtcagagactgag

SEQ ID NO: 198598 - DNA, 20 bp, synthetic construct
  source 1..20: mol_type = other DNA
gaagtggggtcagagactga

SEQ ID NO: 198599 - DNA, 20 bp, synthetic construct
  source 1..20: mol_type = other DNA
tgaagtggggtcagagactg

SEQ ID NO: 198600 - DNA, 20 bp, synthetic construct
  source 1..20: mol_type = other DNA
ttgaagtggggtcagagact

SEQ ID NO: 198601 - DNA, 20 bp, synthetic construct
  source 1..20: mol_type = other DNA
tttgaagtggggtcagagac

SEQ ID NO: 198602 - DNA, 20 bp, synthetic construct
  source 1..20: mol_type = other DNA
ctttgaagtggggtcagaga

SEQ ID NO: 198603 - DNA, 20 bp, synthetic construct
  source 1..20: mol_type = other DNA
cctttgaagtggggtcagag

SEQ ID NO: 198604 - DNA, 20 bp, synthetic construct
  source 1..20: mol_type = other DNA
gcctttgaagtggggtcaga

SEQ ID NO: 198605 - DNA, 20 bp, synthetic construct
  source 1..20: mol_type = other DNA
tgcctttgaagtggggtcag

SEQ ID NO: 198606 - DNA, 20 bp, synthetic construct
  source 1..20: mol_type = other DNA
ctgcctttgaagtggggtca

SEQ ID NO: 198607 - DNA, 20 bp, synthetic construct
  source 1..20: mol_type = other DNA
gctgcctttgaagtggggtc

SEQ ID NO: 198608 - DNA, 20 bp, synthetic construct
  source 1..20: mol_type = other DNA
tgctgcctttgaagtggggt

SEQ ID NO: 198609 - DNA, 20 bp, synthetic construct
  source 1..20: mol_type = other DNA
atgctgcctttgaagtgggg

SEQ ID NO: 198610 - DNA, 20 bp, synthetic construct
  source 1..20: mol_type = other DNA
aatgctgcctttgaagtggg

SEQ ID NO: 198611 - DNA, 20 bp, synthetic construct
  source 1..20: mol_type = other DNA
gaatgctgcctttgaagtgg

SEQ ID NO: 198612 - DNA, 20 bp, synthetic construct
  source 1..20: mol_type = other DNA
tgaatgctgcctttgaagtg

SEQ ID NO: 198613 - DNA, 20 bp, synthetic construct
  source 1..20: mol_type = other DNA
gtgaatgctgcctttgaagt

SEQ ID NO: 198614 - DNA, 20 bp, synthetic construct
  source 1..20: mol_type = other DNA
agtgaatgctgcctttgaag

SEQ ID NO: 198615 - DNA, 20 bp, synthetic construct
  source 1..20: mol_type = other DNA
gagtgaatgctgcctttgaa

SEQ ID NO: 198616 - DNA, 20 bp, synthetic construct
  source 1..20: mol_type = other DNA
tgagtgaatgctgcctttga

SEQ ID NO: 198617 - DNA, 20 bp, synthetic construct
  source 1..20: mol_type = other DNA
ctgagtgaatgctgcctttg

SEQ ID NO: 198618 - DNA, 20 bp, synthetic construct
  source 1..20: mol_type = other DNA
cctgagtgaatgctgccttt

SEQ ID NO: 198619 - DNA, 20 bp, synthetic construct
  source 1..20: mol_type = other DNA
ccctgagtgaatgctgcctt

SEQ ID NO: 198620 - DNA, 20 bp, synthetic construct
  source 1..20: mol_type = other DNA
tccctgagtgaatgctgcct

SEQ ID NO: 198621 - DNA, 20 bp, synthetic construct
  source 1..20: mol_type = other DNA
ttccctgagtgaatgctgcc

SEQ ID NO: 198622 - DNA, 20 bp, synthetic construct
  source 1..20: mol_type = other DNA
cttccctgagtgaatgctgc

SEQ ID NO: 198623 - DNA, 20 bp, synthetic construct
  source 1..20: mol_type = other DNA
gcttccctgagtgaatgctg

SEQ ID NO: 198624 - DNA, 20 bp, synthetic construct
  source 1..20: mol_type = other DNA
agcttccctgagtgaatgct

SEQ ID NO: 198625 - DNA, 20 bp, synthetic construct
  source 1..20: mol_type = other DNA
gagcttccctgagtgaatgc

SEQ ID NO: 198626 - DNA, 20 bp, synthetic construct
  source 1..20: mol_type = other DNA
ggagcttccctgagtgaatg

SEQ ID NO: 198627 - DNA, 20 bp, synthetic construct
  source 1..20: mol_type = other DNA
gggagcttccctgagtgaat

SEQ ID NO: 198628 - DNA, 20 bp, synthetic construct
  source 1..20: mol_type = other DNA
tgggagcttccctgagtgaa

SEQ ID NO: 198629 - DNA, 20 bp, synthetic construct
  source 1..20: mol_type = other DNA
atgggagcttccctgagtga

SEQ ID NO: 198630 - DNA, 20 bp, synthetic construct
  source 1..20: mol_type = other DNA
tatgggagcttccctgagtg

SEQ ID NO: 198631 - DNA, 20 bp, synthetic construct
  source 1..20: mol_type = other DNA
gtatgggagcttccctgagt

SEQ ID NO: 198632 - DNA, 20 bp, synthetic construct
  source 1..20: mol_type = other DNA
tgtatgggagcttccctgag

SEQ ID NO: 198633 - DNA, 20 bp, synthetic construct
  source 1..20: mol_type = other DNA
ttgtatgggagcttccctga

SEQ ID NO: 198634 - DNA, 20 bp, synthetic construct
  source 1..20: mol_type = other DNA
attgtatgggagcttccctg

SEQ ID NO: 198635 - DNA, 20 bp, synthetic construct
  source 1..20: mol_type = other DNA
cattgtatgggagcttccct

SEQ ID NO: 198636 - DNA, 20 bp, synthetic construct
  source 1..20: mol_type = other DNA
gcattgtatgggagcttccc

SEQ ID NO: 198637 - DNA, 20 bp, synthetic construct
  source 1..20: mol_type = other DNA
agcattgtatgggagcttcc

SEQ ID NO: 198638 - DNA, 20 bp, synthetic construct
  source 1..20: mol_type = other DNA
tagcattgtatgggagcttc

SEQ ID NO: 198639 - DNA, 20 bp, synthetic construct
  source 1..20: mol_type = other DNA
ctagcattgtatgggagctt

SEQ ID NO: 198640 - DNA, 20 bp, synthetic construct
  source 1..20: mol_type = other DNA
actagcattgtatgggagct

SEQ ID NO: 198641 - DNA, 20 bp, synthetic construct
  source 1..20: mol_type = other DNA
gactagcattgtatgggagc

SEQ ID NO: 198642 - DNA, 20 bp, synthetic construct
  source 1..20: mol_type = other DNA
tgactagcattgtatgggag

SEQ ID NO: 198643 - DNA, 20 bp, synthetic construct
  source 1..20: mol_type = other DNA
ctgactagcattgtatggga

SEQ ID NO: 198644 - DNA, 20 bp, synthetic construct
  source 1..20: mol_type = other DNA
tctgactagcattgtatggg

SEQ ID NO: 198645 - DNA, 20 bp, synthetic construct
  source 1..20: mol_type = other DNA
ctctgactagcattgtatgg

SEQ ID NO: 198646 - DNA, 20 bp, synthetic construct
  source 1..20: mol_type = other DNA
actctgactagcattgtatg

SEQ ID NO: 198647 - DNA, 20 bp, synthetic construct
  source 1..20: mol_type = other DNA
tactctgactagcattgtat

SEQ ID NO: 198648 - DNA, 20 bp, synthetic construct
  source 1..20: mol_type = other DNA
ttactctgactagcattgta

SEQ ID NO: 198649 - DNA, 20 bp, synthetic construct
  source 1..20: mol_type = other DNA
tttactctgactagcattgt

SEQ ID NO: 198650 - DNA, 20 bp, synthetic construct
  source 1..20: mol_type = other DNA
ttttactctgactagcattg

SEQ ID NO: 198651 - DNA, 20 bp, synthetic construct
  source 1..20: mol_type = other DNA
cttttactctgactagcatt

SEQ ID NO: 198652 - DNA, 20 bp, synthetic construct
  source 1..20: mol_type = other DNA
acttttactctgactagcat

SEQ ID NO: 198653 - DNA, 20 bp, synthetic construct
  source 1..20: mol_type = other DNA
aacttttactctgactagca

SEQ ID NO: 198654 - DNA, 20 bp, synthetic construct
  source 1..20: mol_type = other DNA
aaacttttactctgactagc

SEQ ID NO: 198655 - DNA, 20 bp, synthetic construct
  source 1..20: mol_type = other DNA
caaacttttactctgactag

SEQ ID NO: 198656 - DNA, 20 bp, synthetic construct
  source 1..20: mol_type = other DNA
ccaaacttttactctgacta

SEQ ID NO: 198657 - DNA, 20 bp, synthetic construct
  source 1..20: mol_type = other DNA
tccaaacttttactctgact

SEQ ID NO: 198658 - DNA, 20 bp, synthetic construct
  source 1..20: mol_type = other DNA
gtccaaacttttactctgac

SEQ ID NO: 198659 - DNA, 20 bp, synthetic construct
  source 1..20: mol_type = other DNA
tgtccaaacttttactctga

SEQ ID NO: 198660 - DNA, 20 bp, synthetic construct
  source 1..20: mol_type = other DNA
ttgtccaaacttttactctg

SEQ ID NO: 198661 - DNA, 20 bp, synthetic construct
  source 1..20: mol_type = other DNA
tttgtccaaacttttactct

SEQ ID NO: 198662 - DNA, 20 bp, synthetic construct
  source 1..20: mol_type = other DNA
atttgtccaaacttttactc

SEQ ID NO: 198663 - DNA, 20 bp, synthetic construct
  source 1..20: mol_type = other DNA
aatttgtccaaacttttact

SEQ ID NO: 198664 - DNA, 20 bp, synthetic construct
  source 1..20: mol_type = other DNA
caatttgtccaaacttttac

SEQ ID NO: 198665 - DNA, 20 bp, synthetic construct
  source 1..20: mol_type = other DNA
gcaatttgtccaaactttta

SEQ ID NO: 198666 - DNA, 20 bp, synthetic construct
  source 1..20: mol_type = other DNA
ggcaatttgtccaaactttt

SEQ ID NO: 198667 - DNA, 20 bp, synthetic construct
  source 1..20: mol_type = other DNA
tggcaatttgtccaaacttt

SEQ ID NO: 198668 - DNA, 20 bp, synthetic construct
  source 1..20: mol_type = other DNA
ctggcaatttgtccaaactt

SEQ ID NO: 198669 - DNA, 20 bp, synthetic construct
  source 1..20: mol_type = other DNA
cctggcaatttgtccaaact

SEQ ID NO: 198670 - DNA, 20 bp, synthetic construct
  source 1..20: mol_type = other DNA
tcctggcaatttgtccaaac

SEQ ID NO: 198671 - DNA, 20 bp, synthetic construct
  source 1..20: mol_type = other DNA
ttcctggcaatttgtccaaa

SEQ ID NO: 198672 - DNA, 20 bp, synthetic construct
  source 1..20: mol_type = other DNA
cttcctggcaatttgtccaa

SEQ ID NO: 198673 - DNA, 20 bp, synthetic construct
  source 1..20: mol_type = other DNA
gcttcctggcaatttgtcca

SEQ ID NO: 198674 - DNA, 20 bp, synthetic construct
  source 1..20: mol_type = other DNA
tgcttcctggcaatttgtcc

SEQ ID NO: 198675 - DNA, 20 bp, synthetic construct
  source 1..20: mol_type = other DNA
ctgcttcctggcaatttgtc

SEQ ID NO: 198676 - DNA, 20 bp, synthetic construct
  source 1..20: mol_type = other DNA
gctgcttcctggcaatttgt

SEQ ID NO: 198677 - DNA, 20 bp, synthetic construct
  source 1..20: mol_type = other DNA
agctgcttcctggcaatttg

SEQ ID NO: 198678 - DNA, 20 bp, synthetic construct
  source 1..20: mol_type = other DNA
aagctgcttcctggcaattt

SEQ ID NO: 198679 - DNA, 20 bp, synthetic construct
  source 1..20: mol_type = other DNA
caagctgcttcctggcaatt

SEQ ID NO: 198680 - DNA, 20 bp, synthetic construct
  source 1..20: mol_type = other DNA
acaagctgcttcctggcaat

SEQ ID NO: 198681 - DNA, 20 bp, synthetic construct
  source 1..20: mol_type = other DNA
gacaagctgcttcctggcaa

SEQ ID NO: 198682 - DNA, 20 bp, synthetic construct
  source 1..20: mol_type = other DNA
tgacaagctgcttcctggca

SEQ ID NO: 198683 - DNA, 20 bp, synthetic construct
  source 1..20: mol_type = other DNA
ctgacaagctgcttcctggc

SEQ ID NO: 198684 - DNA, 20 bp, synthetic construct
  source 1..20: mol_type = other DNA
actgacaagctgcttcctgg

SEQ ID NO: 198685 - DNA, 20 bp, synthetic construct
  source 1..20: mol_type = other DNA
tactgacaagctgcttcctg

SEQ ID NO: 198686 - DNA, 20 bp, synthetic construct
  source 1..20: mol_type = other DNA
atactgacaagctgcttcct

SEQ ID NO: 198687 - DNA, 20 bp, synthetic construct
  source 1..20: mol_type = other DNA
catactgacaagctgcttcc

SEQ ID NO: 198688 - DNA, 20 bp, synthetic construct
  source 1..20: mol_type = other DNA
gcatactgacaagctgcttc

SEQ ID NO: 198689 - DNA, 20 bp, synthetic construct
  source 1..20: mol_type = other DNA
tgcatactgacaagctgctt

SEQ ID NO: 198690 - DNA, 20 bp, synthetic construct
  source 1..20: mol_type = other DNA
atgcatactgacaagctgct

SEQ ID NO: 198691 - DNA, 20 bp, synthetic construct
  source 1..20: mol_type = other DNA
tatgcatactgacaagctgc

SEQ ID NO: 198692 - DNA, 20 bp, synthetic construct
  source 1..20: mol_type = other DNA
ttatgcatactgacaagctg

SEQ ID NO: 198693 - DNA, 20 bp, synthetic construct
  source 1..20: mol_type = other DNA
tttatgcatactgacaagct

SEQ ID NO: 198694 - DNA, 20 bp, synthetic construct
  source 1..20: mol_type = other DNA
gtttatgcatactgacaagc

SEQ ID NO: 198695 - DNA, 20 bp, synthetic construct
  source 1..20: mol_type = other DNA
tgtttatgcatactgacaag

SEQ ID NO: 198696 - DNA, 20 bp, synthetic construct
  source 1..20: mol_type = other DNA
ctgtttatgcatactgacaa

SEQ ID NO: 198697 - DNA, 20 bp, synthetic construct
  source 1..20: mol_type = other DNA
gctgtttatgcatactgaca

SEQ ID NO: 198698 - DNA, 20 bp, synthetic construct
  source 1..20: mol_type = other DNA
ggctgtttatgcatactgac

SEQ ID NO: 198699 - DNA, 20 bp, synthetic construct
  source 1..20: mol_type = other DNA
aggctgtttatgcatactga

SEQ ID NO: 198700 - DNA, 20 bp, synthetic construct
  source 1..20: mol_type = other DNA
aaggctgtttatgcatactg

SEQ ID NO: 198701 - DNA, 20 bp, synthetic construct
  source 1..20: mol_type = other DNA
aaaggctgtttatgcatact

SEQ ID NO: 198702 - DNA, 20 bp, synthetic construct
  source 1..20: mol_type = other DNA
taaaggctgtttatgcatac

SEQ ID NO: 198703 - DNA, 20 bp, synthetic construct
  source 1..20: mol_type = other DNA
ttaaaggctgtttatgcata

SEQ ID NO: 198704 - DNA, 20 bp, synthetic construct
  source 1..20: mol_type = other DNA
tttaaaggctgtttatgcat

SEQ ID NO: 198705 - DNA, 20 bp, synthetic construct
  source 1..20: mol_type = other DNA
ttttaaaggctgtttatgca

SEQ ID NO: 198706 - DNA, 20 bp, synthetic construct
  source 1..20: mol_type = other DNA
attttaaaggctgtttatgc

SEQ ID NO: 198707 - DNA, 20 bp, synthetic construct
  source 1..20: mol_type = other DNA
tattttaaaggctgtttatg

SEQ ID NO: 198708 - DNA, 20 bp, synthetic construct
  source 1..20: mol_type = other DNA
atattttaaaggctgtttat

SEQ ID NO: 198709 - DNA, 20 bp, synthetic construct
  source 1..20: mol_type = other DNA
aatattttaaaggctgttta

SEQ ID NO: 198710 - DNA, 20 bp, synthetic construct
  source 1..20: mol_type = other DNA
taatattttaaaggctgttt

SEQ ID NO: 198711 - DNA, 20 bp, synthetic construct
  source 1..20: mol_type = other DNA
gtaatattttaaaggctgtt

SEQ ID NO: 198712 - DNA, 20 bp, synthetic construct
  source 1..20: mol_type = other DNA
agtaatattttaaaggctgt

SEQ ID NO: 198713 - DNA, 20 bp, synthetic construct
  source 1..20: mol_type = other DNA
tagtaatattttaaaggctg

SEQ ID NO: 198714 - DNA, 20 bp, synthetic construct
  source 1..20: mol_type = other DNA
gtagtaatattttaaaggct

SEQ ID NO: 198715 - DNA, 20 bp, synthetic construct
  source 1..20: mol_type = other DNA
agtagtaatattttaaaggc

SEQ ID NO: 198716 - DNA, 20 bp, synthetic construct
  source 1..20: mol_type = other DNA
gagtagtaatattttaaagg

SEQ ID NO: 198717 - DNA, 20 bp, synthetic construct
  source 1..20: mol_type = other DNA
agagtagtaatattttaaag

SEQ ID NO: 198718 - DNA, 20 bp, synthetic construct
  source 1..20: mol_type = other DNA
aagagtagtaatattttaaa

SEQ ID NO: 198719 - DNA, 20 bp, synthetic construct
  source 1..20: mol_type = other DNA
aaagagtagtaatattttaa

SEQ ID NO: 198720 - DNA, 20 bp, synthetic construct
  source 1..20: mol_type = other DNA
caaagagtagtaatatttta

SEQ ID NO: 198721 - DNA, 20 bp, synthetic construct
  source 1..20: mol_type = other DNA
tcaaagagtagtaatatttt

SEQ ID NO: 198722 - DNA, 20 bp, synthetic construct
  source 1..20: mol_type = other DNA
gtcaaagagtagtaatattt

SEQ ID NO: 198723 - DNA, 20 bp, synthetic construct
  source 1..20: mol_type = other DNA
ggtcaaagagtagtaatatt

SEQ ID NO: 198724 - DNA, 20 bp, synthetic construct
  source 1..20: mol_type = other DNA
gggtcaaagagtagtaatat

SEQ ID NO: 198725 - DNA, 20 bp, synthetic construct
  source 1..20: mol_type = other DNA
tgggtcaaagagtagtaata

SEQ ID NO: 198726 - DNA, 20 bp, synthetic construct
  source 1..20: mol_type = other DNA
ctgggtcaaagagtagtaat

SEQ ID NO: 198727 - DNA, 20 bp, synthetic construct
  source 1..20: mol_type = other DNA
tctgggtcaaagagtagtaa

SEQ ID NO: 198728 - DNA, 20 bp, synthetic construct
  source 1..20: mol_type = other DNA
ttctgggtcaaagagtagta

SEQ ID NO: 198729 - DNA, 20 bp, synthetic construct
  source 1..20: mol_type = other DNA
attctgggtcaaagagtagt

SEQ ID NO: 198730 - DNA, 20 bp, synthetic construct
  source 1..20: mol_type = other DNA
aattctgggtcaaagagtag

SEQ ID NO: 198731 - DNA, 20 bp, synthetic construct
  source 1..20: mol_type = other DNA
aaattctgggtcaaagagta

SEQ ID NO: 198732 - DNA, 20 bp, synthetic construct
  source 1..20: mol_type = other DNA
gaaattctgggtcaaagagt

SEQ ID NO: 198733 - DNA, 20 bp, synthetic construct
  source 1..20: mol_type = other DNA
tgaaattctgggtcaaagag

SEQ ID NO: 198734 - DNA, 20 bp, synthetic construct
  source 1..20: mol_type = other DNA
gtgaaattctgggtcaaaga

SEQ ID NO: 198735 - DNA, 20 bp, synthetic construct
  source 1..20: mol_type = other DNA
agtgaaattctgggtcaaag

SEQ ID NO: 198736 - DNA, 20 bp, synthetic construct
  source 1..20: mol_type = other DNA
aagtgaaattctgggtcaaa

SEQ ID NO: 198737 - DNA, 20 bp, synthetic construct
  source 1..20: mol_type = other DNA
gaagtgaaattctgggtcaa

SEQ ID NO: 198738 - DNA, 20 bp, synthetic construct
  source 1..20: mol_type = other DNA
agaagtgaaattctgggtca

SEQ ID NO: 198739 - DNA, 20 bp, synthetic construct
  source 1..20: mol_type = other DNA
tagaagtgaaattctgggtc

SEQ ID NO: 198740 - DNA, 20 bp, synthetic construct
  source 1..20: mol_type = other DNA
ctagaagtgaaattctgggt

SEQ ID NO: 198741 - DNA, 20 bp, synthetic construct
  source 1..20: mol_type = other DNA
cctagaagtgaaattctggg

SEQ ID NO: 198742 - DNA, 20 bp, synthetic construct
  source 1..20: mol_type = other DNA
tcctagaagtgaaattctgg

SEQ ID NO: 198743 - DNA, 20 bp, synthetic construct
  source 1..20: mol_type = other DNA
ttcctagaagtgaaattctg

SEQ ID NO: 198744 - DNA, 20 bp, synthetic construct
  source 1..20: mol_type = other DNA
attcctagaagtgaaattct

SEQ ID NO: 198745 - DNA, 20 bp, synthetic construct
  source 1..20: mol_type = other DNA
gattcctagaagtgaaattc

SEQ ID NO: 198746 - DNA, 20 bp, synthetic construct
  source 1..20: mol_type = other DNA
agattcctagaagtgaaatt

SEQ ID NO: 198747 - DNA, 20 bp, synthetic construct
  source 1..20: mol_type = other DNA
cagattcctagaagtgaaat

SEQ ID NO: 198748 - DNA, 20 bp, synthetic construct
  source 1..20: mol_type = other DNA
acagattcctagaagtgaaa

SEQ ID NO: 198749 - DNA, 20 bp, synthetic construct
  source 1..20: mol_type = other DNA
gacagattcctagaagtgaa

SEQ ID NO: 198750 - DNA, 20 bp, synthetic construct
  source 1..20: mol_type = other DNA
ggacagattcctagaagtga

SEQ ID NO: 198751 - DNA, 20 bp, synthetic construct
  source 1..20: mol_type = other DNA
aggacagattcctagaagtg

SEQ ID NO: 198752 - DNA, 20 bp, synthetic construct
  source 1..20: mol_type = other DNA
taggacagattcctagaagt

SEQ ID NO: 198753 - DNA, 20 bp, synthetic construct
  source 1..20: mol_type = other DNA
ttaggacagattcctagaag

SEQ ID NO: 198754 - DNA, 20 bp, synthetic construct
  source 1..20: mol_type = other DNA
cttaggacagattcctagaa

SEQ ID NO: 198755 - DNA, 20 bp, synthetic construct
  source 1..20: mol_type = other DNA
ccttaggacagattcctaga

SEQ ID NO: 198756 - DNA, 20 bp, synthetic construct
  source 1..20: mol_type = other DNA
tccttaggacagattcctag

SEQ ID NO: 198757 - DNA, 20 bp, synthetic construct
  source 1..20: mol_type = other DNA
ttccttaggacagattccta

SEQ ID NO: 198758 - DNA, 20 bp, synthetic construct
  source 1..20: mol_type = other DNA
cttccttaggacagattcct

SEQ ID NO: 198759 - DNA, 20 bp, synthetic construct
  source 1..20: mol_type = other DNA
acttccttaggacagattcc

SEQ ID NO: 198760 - DNA, 20 bp, synthetic construct
  source 1..20: mol_type = other DNA
tacttccttaggacagattc

SEQ ID NO: 198761 - DNA, 20 bp, synthetic construct
  source 1..20: mol_type = other DNA
ctacttccttaggacagatt

SEQ ID NO: 198762 - DNA, 20 bp, synthetic construct
  source 1..20: mol_type = other DNA
actacttccttaggacagat

SEQ ID NO: 198763 - DNA, 20 bp, synthetic construct
  source 1..20: mol_type = other DNA
gactacttccttaggacaga

SEQ ID NO: 198764 - DNA, 20 bp, synthetic construct
  source 1..20: mol_type = other DNA
tgactacttccttaggacag

SEQ ID NO: 198765 - DNA, 20 bp, synthetic construct
  source 1..20: mol_type = other DNA
gtgactacttccttaggaca

SEQ ID NO: 198766 - DNA, 20 bp, synthetic construct
  source 1..20: mol_type = other DNA
tgtgactacttccttaggac

SEQ ID NO: 198767 - DNA, 20 bp, synthetic construct
  source 1..20: mol_type = other DNA
atgtgactacttccttagga

SEQ ID NO: 198768 - DNA, 20 bp, synthetic construct
  source 1..20: mol_type = other DNA
catgtgactacttccttagg

SEQ ID NO: 198769 - DNA, 20 bp, synthetic construct
  source 1..20: mol_type = other DNA
gcatgtgactacttccttag

SEQ ID NO: 198770 - DNA, 20 bp, synthetic construct
  source 1..20: mol_type = other DNA
tgcatgtgactacttcctta

SEQ ID NO: 198771 - DNA, 20 bp, synthetic construct
  source 1..20: mol_type = other DNA
ttgcatgtgactacttcctt

SEQ ID NO: 198772 - DNA, 20 bp, synthetic construct
  source 1..20: mol_type = other DNA
tttgcatgtgactacttcct

SEQ ID NO: 198773 - DNA, 20 bp, synthetic construct
  source 1..20: mol_type = other DNA
ttttgcatgtgactacttcc

SEQ ID NO: 198774 - DNA, 20 bp, synthetic construct
  source 1..20: mol_type = other DNA
cttttgcatgtgactacttc

SEQ ID NO: 198775 - DNA, 20 bp, synthetic construct
  source 1..20: mol_type = other DNA
tcttttgcatgtgactactt

SEQ ID NO: 198776 - DNA, 20 bp, synthetic construct
  source 1..20: mol_type = other DNA
atcttttgcatgtgactact

SEQ ID NO: 198777 - DNA, 20 bp, synthetic construct
  source 1..20: mol_type = other DNA
aatcttttgcatgtgactac

SEQ ID NO: 198778 - DNA, 20 bp, synthetic construct
  source 1..20: mol_type = other DNA
aaatcttttgcatgtgacta

SEQ ID NO: 198779 - DNA, 20 bp, synthetic construct
  source 1..20: mol_type = other DNA
taaatcttttgcatgtgact

SEQ ID NO: 198780 - DNA, 20 bp, synthetic construct
  source 1..20: mol_type = other DNA
ataaatcttttgcatgtgac

SEQ ID NO: 198781 - DNA, 20 bp, synthetic construct
  source 1..20: mol_type = other DNA
cataaatcttttgcatgtga

SEQ ID NO: 198782 - DNA, 20 bp, synthetic construct
  source 1..20: mol_type = other DNA
acataaatcttttgcatgtg

SEQ ID NO: 198783 - DNA, 20 bp, synthetic construct
  source 1..20: mol_type = other DNA
tacataaatcttttgcatgt

SEQ ID NO: 198784 - DNA, 20 bp, synthetic construct
  source 1..20: mol_type = other DNA
gtacataaatcttttgcatg

SEQ ID NO: 198785 - DNA, 20 bp, synthetic construct
  source 1..20: mol_type = other DNA
ggtacataaatcttttgcat

SEQ ID NO: 198786 - DNA, 20 bp, synthetic construct
  source 1..20: mol_type = other DNA
tggtacataaatcttttgca

SEQ ID NO: 198787 - DNA, 20 bp, synthetic construct
  source 1..20: mol_type = other DNA
ttggtacataaatcttttgc

SEQ ID NO: 198788 - DNA, 20 bp, synthetic construct
  source 1..20: mol_type = other DNA
cttggtacataaatcttttg

SEQ ID NO: 198789 - DNA, 20 bp, synthetic construct
  source 1..20: mol_type = other DNA
tcttggtacataaatctttt

SEQ ID NO: 198790 - DNA, 20 bp, synthetic construct
  source 1..20: mol_type = other DNA
atcttggtacataaatcttt

SEQ ID NO: 198791 - DNA, 20 bp, synthetic construct
  source 1..20: mol_type = other DNA
catcttggtacataaatctt

SEQ ID NO: 198792 - DNA, 20 bp, synthetic construct
  source 1..20: mol_type = other DNA
acatcttggtacataaatct

SEQ ID NO: 198793 - DNA, 20 bp, synthetic construct
  source 1..20: mol_type = other DNA
aacatcttggtacataaatc

SEQ ID NO: 198794 - DNA, 20 bp, synthetic construct
  source 1..20: mol_type = other DNA
gaacatcttggtacataaat

SEQ ID NO: 198795 - DNA, 20 bp, synthetic construct
  source 1..20: mol_type = other DNA
tgaacatcttggtacataaa

SEQ ID NO: 198796 - DNA, 20 bp, synthetic construct
  source 1..20: mol_type = other DNA
atgaacatcttggtacataa

SEQ ID NO: 198797 - DNA, 20 bp, synthetic construct
  source 1..20: mol_type = other DNA
gatgaacatcttggtacata

SEQ ID NO: 198798 - DNA, 20 bp, synthetic construct
  source 1..20: mol_type = other DNA
tgatgaacatcttggtacat

SEQ ID NO: 198799 - DNA, 20 bp, synthetic construct
  source 1..20: mol_type = other DNA
ttgatgaacatcttggtaca

SEQ ID NO: 198800 - DNA, 20 bp, synthetic construct
  source 1..20: mol_type = other DNA
tttgatgaacatcttggtac

SEQ ID NO: 198801 - DNA, 20 bp, synthetic construct
  source 1..20: mol_type = other DNA
ctttgatgaacatcttggta

SEQ ID NO: 198802 - DNA, 20 bp, synthetic construct
  source 1..20: mol_type = other DNA
actttgatgaacatcttggt

SEQ ID NO: 198803 - DNA, 20 bp, synthetic construct
  source 1..20: mol_type = other DNA
cactttgatgaacatcttgg

SEQ ID NO: 198804 - DNA, 20 bp, synthetic construct
  source 1..20: mol_type = other DNA
acactttgatgaacatcttg

SEQ ID NO: 198805 - DNA, 20 bp, synthetic construct
  source 1..20: mol_type = other DNA
aacactttgatgaacatctt

SEQ ID NO: 198806 - DNA, 20 bp, synthetic construct
  source 1..20: mol_type = other DNA
caacactttgatgaacatct

SEQ ID NO: 198807 - DNA, 20 bp, synthetic construct
  source 1..20: mol_type = other DNA
acaacactttgatgaacatc

SEQ ID NO: 198808 - DNA, 20 bp, synthetic construct
  source 1..20: mol_type = other DNA
aacaacactttgatgaacat

SEQ ID NO: 198809 - DNA, 20 bp, synthetic construct
  source 1..20: mol_type = other DNA
aaacaacactttgatgaaca

SEQ ID NO: 198810 - DNA, 20 bp, synthetic construct
  source 1..20: mol_type = other DNA
aaaacaacactttgatgaac

SEQ ID NO: 198811 - DNA, 20 bp, synthetic construct
  source 1..20: mol_type = other DNA
taaaacaacactttgatgaa

SEQ ID NO: 198812 - DNA, 20 bp, synthetic construct
  source 1..20: mol_type = other DNA
ataaaacaacactttgatga

SEQ ID NO: 198813 - DNA, 20 bp, synthetic construct
  source 1..20: mol_type = other DNA
tataaaacaacactttgatg

SEQ ID NO: 198814 - DNA, 20 bp, synthetic construct
  source 1..20: mol_type = other DNA
ttataaaacaacactttgat

SEQ ID NO: 198815 - DNA, 20 bp, synthetic construct
  source 1..20: mol_type = other DNA
gttataaaacaacactttga

SEQ ID NO: 198816 - DNA, 20 bp, synthetic construct
  source 1..20: mol_type = other DNA
tgttataaaacaacactttg

SEQ ID NO: 198817 - DNA, 20 bp, synthetic construct
  source 1..20: mol_type = other DNA
ctgttataaaacaacacttt

SEQ ID NO: 198818 - DNA, 20 bp, synthetic construct
  source 1..20: mol_type = other DNA
cctgttataaaacaacactt

SEQ ID NO: 198819 - DNA, 20 bp, synthetic construct
  source 1..20: mol_type = other DNA
tcctgttataaaacaacact

SEQ ID NO: 198820 - DNA, 20 bp, synthetic construct
  source 1..20: mol_type = other DNA
ttcctgttataaaacaacac

SEQ ID NO: 198821 - DNA, 20 bp, synthetic construct
  source 1..20: mol_type = other DNA
cttcctgttataaaacaaca

SEQ ID NO: 198822 - DNA, 20 bp, synthetic construct
  source 1..20: mol_type = other DNA
acttcctgttataaaacaac

SEQ ID NO: 198823 - DNA, 20 bp, synthetic construct
  source 1..20: mol_type = other DNA
gacttcctgttataaaacaa

SEQ ID NO: 198824 - DNA, 20 bp, synthetic construct
  source 1..20: mol_type = other DNA
agacttcctgttataaaaca

SEQ ID NO: 198825 - DNA, 20 bp, synthetic construct
  source 1..20: mol_type = other DNA
gagacttcctgttataaaac

SEQ ID NO: 198826 - DNA, 20 bp, synthetic construct
  source 1..20: mol_type = other DNA
tgagacttcctgttataaaa

SEQ ID NO: 198827 - DNA, 20 bp, synthetic construct
  source 1..20: mol_type = other DNA
ctgagacttcctgttataaa

SEQ ID NO: 198828 - DNA, 20 bp, synthetic construct
  source 1..20: mol_type = other DNA
tctgagacttcctgttataa

SEQ ID NO: 198829 - DNA, 20 bp, synthetic construct
  source 1..20: mol_type = other DNA
ttctgagacttcctgttata

SEQ ID NO: 198830 - DNA, 20 bp, synthetic construct
  source 1..20: mol_type = other DNA
cttctgagacttcctgttat

SEQ ID NO: 198831 - DNA, 20 bp, synthetic construct
  source 1..20: mol_type = other DNA
gcttctgagacttcctgtta

SEQ ID NO: 198832 - DNA, 20 bp, synthetic construct
  source 1..20: mol_type = other DNA
agcttctgagacttcctgtt

SEQ ID NO: 198833 - DNA, 20 bp, synthetic construct
  source 1..20: mol_type = other DNA
cagcttctgagacttcctgt

SEQ ID NO: 198834 - DNA, 20 bp, synthetic construct
  source 1..20: mol_type = other DNA
ccagcttctgagacttcctg

SEQ ID NO: 198835 - DNA, 20 bp, synthetic construct
  source 1..20: mol_type = other DNA
tccagcttctgagacttcct

SEQ ID NO: 198836 - DNA, 20 bp, synthetic construct
  source 1..20: mol_type = other DNA
atccagcttctgagacttcc

SEQ ID NO: 198837 - DNA, 20 bp, synthetic construct
  source 1..20: mol_type = other DNA
tatccagcttctgagacttc

SEQ ID NO: 198838 - DNA, 20 bp, synthetic construct
  source 1..20: mol_type = other DNA
ttatccagcttctgagactt

SEQ ID NO: 198839 - DNA, 20 bp, synthetic construct
  source 1..20: mol_type = other DNA
tttatccagcttctgagact

SEQ ID NO: 198840 - DNA, 20 bp, synthetic construct
  source 1..20: mol_type = other DNA
atttatccagcttctgagac

SEQ ID NO: 198841 - DNA, 20 bp, synthetic construct
  source 1..20: mol_type = other DNA
tatttatccagcttctgaga

SEQ ID NO: 198842 - DNA, 20 bp, synthetic construct
  source 1..20: mol_type = other DNA
atatttatccagcttctgag

SEQ ID NO: 198843 - DNA, 20 bp, synthetic construct
  source 1..20: mol_type = other DNA
gatatttatccagcttctga

SEQ ID NO: 198844 - DNA, 20 bp, synthetic construct
  source 1..20: mol_type = other DNA
ggatatttatccagcttctg

SEQ ID NO: 198845 - DNA, 20 bp, synthetic construct
  source 1..20: mol_type = other DNA
tggatatttatccagcttct

SEQ ID NO: 198846 - DNA, 20 bp, synthetic construct
  source 1..20: mol_type = other DNA
ttggatatttatccagcttc

SEQ ID NO: 198847 - DNA, 20 bp, synthetic construct
  source 1..20: mol_type = other DNA
gttggatatttatccagctt

SEQ ID NO: 198848 - DNA, 20 bp, synthetic construct
  source 1..20: mol_type = other DNA
ggttggatatttatccagct

SEQ ID NO: 198849 - DNA, 20 bp, synthetic construct
  source 1..20: mol_type = other DNA
aggttggatatttatccagc

SEQ ID NO: 198850 - DNA, 20 bp, synthetic construct
  source 1..20: mol_type = other DNA
gaggttggatatttatccag

SEQ ID NO: 198851 - DNA, 20 bp, synthetic construct
  source 1..20: mol_type = other DNA
agaggttggatatttatcca

SEQ ID NO: 198852 - DNA, 20 bp, synthetic construct
  source 1..20: mol_type = other DNA
cagaggttggatatttatcc

SEQ ID NO: 198853 - DNA, 20 bp, synthetic construct
  source 1..20: mol_type = other DNA
ccagaggttggatatttatc

SEQ ID NO: 198854 - DNA, 20 bp, synthetic construct
  source 1..20: mol_type = other DNA
tccagaggttggatatttat

SEQ ID NO: 198855 - DNA, 20 bp, synthetic construct
  source 1..20: mol_type = other DNA
ttccagaggttggatattta

SEQ ID NO: 198856 - DNA, 20 bp, synthetic construct
  source 1..20: mol_type = other DNA
tttccagaggttggatattt

SEQ ID NO: 198857 - DNA, 20 bp, synthetic construct
  source 1..20: mol_type = other DNA
atttccagaggttggatatt

SEQ ID NO: 198858 - DNA, 20 bp, synthetic construct
  source 1..20: mol_type = other DNA
catttccagaggttggatat

SEQ ID NO: 198859 - DNA, 20 bp, synthetic construct
  source 1..20: mol_type = other DNA
ccatttccagaggttggata

SEQ ID NO: 198860 - DNA, 20 bp, synthetic construct
  source 1..20: mol_type = other DNA
accatttccagaggttggat

SEQ ID NO: 198861 - DNA, 20 bp, synthetic construct
  source 1..20: mol_type = other DNA
aaccatttccagaggttgga

SEQ ID NO: 198862 - DNA, 20 bp, synthetic construct
  source 1..20: mol_type = other DNA
taaccatttccagaggttgg

SEQ ID NO: 198863 - DNA, 20 bp, synthetic construct
  source 1..20: mol_type = other DNA
ctaaccatttccagaggttg

SEQ ID NO: 198864 - DNA, 20 bp, synthetic construct
  source 1..20: mol_type = other DNA
tctaaccatttccagaggtt

SEQ ID NO: 198865 - DNA, 20 bp, synthetic construct
  source 1..20: mol_type = other DNA
atctaaccatttccagaggt

SEQ ID NO: 198866 - DNA, 20 bp, synthetic construct
  source 1..20: mol_type = other DNA
tatctaaccatttccagagg

SEQ ID NO: 198867 - DNA, 20 bp, synthetic construct
  source 1..20: mol_type = other DNA
ctatctaaccatttccagag

SEQ ID NO: 198868 - DNA, 20 bp, synthetic construct
  source 1..20: mol_type = other DNA
tctatctaaccatttccaga

SEQ ID NO: 198869 - DNA, 20 bp, synthetic construct
  source 1..20: mol_type = other DNA
ttctatctaaccatttccag

SEQ ID NO: 198870 - DNA, 20 bp, synthetic construct
  source 1..20: mol_type = other DNA
attctatctaaccatttcca

SEQ ID NO: 198871 - DNA, 20 bp, synthetic construct
  source 1..20: mol_type = other DNA
tattctatctaaccatttcc

SEQ ID NO: 198872 - DNA, 20 bp, synthetic construct
  source 1..20: mol_type = other DNA
ctattctatctaaccatttc

SEQ ID NO: 198873 - DNA, 20 bp, synthetic construct
  source 1..20: mol_type = other DNA
actattctatctaaccattt

SEQ ID NO: 198874 - DNA, 20 bp, synthetic construct
  source 1..20: mol_type = other DNA
tactattctatctaaccatt

SEQ ID NO: 198875 - DNA, 20 bp, synthetic construct
  source 1..20: mol_type = other DNA
atactattctatctaaccat

SEQ ID NO: 198876 - DNA, 20 bp, synthetic construct
  source 1..20: mol_type = other DNA
catactattctatctaacca

SEQ ID NO: 198877 - DNA, 20 bp, synthetic construct
  source 1..20: mol_type = other DNA
acatactattctatctaacc

SEQ ID NO: 198878 - DNA, 20 bp, synthetic construct
  source 1..20: mol_type = other DNA
tacatactattctatctaac

SEQ ID NO: 198879 - DNA, 20 bp, synthetic construct
  source 1..20: mol_type = other DNA
ctacatactattctatctaa

SEQ ID NO: 198880 - DNA, 20 bp, synthetic construct
  source 1..20: mol_type = other DNA
gctacatactattctatcta

SEQ ID NO: 198881 - DNA, 20 bp, synthetic construct
  source 1..20: mol_type = other DNA
ggctacatactattctatct

SEQ ID NO: 198882 - DNA, 20 bp, synthetic construct
  source 1..20: mol_type = other DNA
tggctacatactattctatc

SEQ ID NO: 198883 - DNA, 20 bp, synthetic construct
  source 1..20: mol_type = other DNA
atggctacatactattctat

SEQ ID NO: 198884 - DNA, 20 bp, synthetic construct
  source 1..20: mol_type = other DNA
aatggctacatactattcta

SEQ ID NO: 198885 - DNA, 20 bp, synthetic construct
  source 1..20: mol_type = other DNA
taatggctacatactattct

SEQ ID NO: 198886 - DNA, 20 bp, synthetic construct
  source 1..20: mol_type = other DNA
ctaatggctacatactattc

SEQ ID NO: 198887 - DNA, 20 bp, synthetic construct
  source 1..20: mol_type = other DNA
tctaatggctacatactatt

SEQ ID NO: 198888 - DNA, 20 bp, synthetic construct
  source 1..20: mol_type = other DNA
ttctaatggctacatactat

SEQ ID NO: 198889 - DNA, 20 bp, synthetic construct
  source 1..20: mol_type = other DNA
tttctaatggctacatacta

SEQ ID NO: 198890 - DNA, 20 bp, synthetic construct
  source 1..20: mol_type = other DNA
ttttctaatggctacatact

SEQ ID NO: 198891 - DNA, 20 bp, synthetic construct
  source 1..20: mol_type = other DNA
attttctaatggctacatac

SEQ ID NO: 198892 - DNA, 20 bp, synthetic construct
  source 1..20: mol_type = other DNA
aattttctaatggctacata

SEQ ID NO: 198893 - DNA, 20 bp, synthetic construct
  source 1..20: mol_type = other DNA
taattttctaatggctacat

SEQ ID NO: 198894 - DNA, 20 bp, synthetic construct
  source 1..20: mol_type = other DNA
ataattttctaatggctaca

SEQ ID NO: 198895 - DNA, 20 bp, synthetic construct
  source 1..20: mol_type = other DNA
cataattttctaatggctac

SEQ ID NO: 198896 - DNA, 20 bp, synthetic construct
  source 1..20: mol_type = other DNA
acataattttctaatggcta

SEQ ID NO: 198897 - DNA, 20 bp, synthetic construct
  source 1..20: mol_type = other DNA
gacataattttctaatggct

SEQ ID NO: 198898 - DNA, 20 bp, synthetic construct
  source 1..20: mol_type = other DNA
agacataattttctaatggc

SEQ ID NO: 198899 - DNA, 20 bp, synthetic construct
  source 1..20: mol_type = other DNA
tagacataattttctaatgg

SEQ ID NO: 198900 - DNA, 20 bp, synthetic construct
  source 1..20: mol_type = other DNA
atagacataattttctaatg

SEQ ID NO: 198901 - DNA, 20 bp, synthetic construct
  source 1..20: mol_type = other DNA
catagacataattttctaat

SEQ ID NO: 198902 - DNA, 20 bp, synthetic construct
  source 1..20: mol_type = other DNA
ccatagacataattttctaa

SEQ ID NO: 198903 - DNA, 20 bp, synthetic construct
  source 1..20: mol_type = other DNA
cccatagacataattttcta

SEQ ID NO: 198904 - DNA, 20 bp, synthetic construct
  source 1..20: mol_type = other DNA
ccccatagacataattttct

SEQ ID NO: 198905 - DNA, 20 bp, synthetic construct
  source 1..20: mol_type = other DNA
accccatagacataattttc

SEQ ID NO: 198906 - DNA, 20 bp, synthetic construct
  source 1..20: mol_type = other DNA
aaccccatagacataatttt

SEQ ID NO: 198907 - DNA, 20 bp, synthetic construct
  source 1..20: mol_type = other DNA
aaaccccatagacataattt

SEQ ID NO: 198908 - DNA, 20 bp, synthetic construct
  source 1..20: mol_type = other DNA
taaaccccatagacataatt

SEQ ID NO: 198909 - DNA, 20 bp, synthetic construct
  source 1..20: mol_type = other DNA
ttaaaccccatagacataat

SEQ ID NO: 198910 - DNA, 20 bp, synthetic construct
  source 1..20: mol_type = other DNA
tttaaaccccatagacataa

SEQ ID NO: 198911 - DNA, 20 bp, synthetic construct
  source 1..20: mol_type = other DNA
ttttaaaccccatagacata

SEQ ID NO: 198912 - DNA, 20 bp, synthetic construct
  source 1..20: mol_type = other DNA
attttaaaccccatagacat

SEQ ID NO: 198913 - DNA, 20 bp, synthetic construct
  source 1..20: mol_type = other DNA
cattttaaaccccatagaca

SEQ ID NO: 198914 - DNA, 20 bp, synthetic construct
  source 1..20: mol_type = other DNA
acattttaaaccccatagac

SEQ ID NO: 198915 - DNA, 20 bp, synthetic construct
  source 1..20: mol_type = other DNA
gacattttaaaccccataga

SEQ ID NO: 198916 - DNA, 20 bp, synthetic construct
  source 1..20: mol_type = other DNA
tgacattttaaaccccatag

SEQ ID NO: 198917 - DNA, 20 bp, synthetic construct
  source 1..20: mol_type = other DNA
atgacattttaaaccccata

SEQ ID NO: 198918 - DNA, 20 bp, synthetic construct
  source 1..20: mol_type = other DNA
catgacattttaaaccccat

SEQ ID NO: 198919 - DNA, 20 bp, synthetic construct
  source 1..20: mol_type = other DNA
ccatgacattttaaacccca

SEQ ID NO: 198920 - DNA, 20 bp, synthetic construct
  source 1..20: mol_type = other DNA
cccatgacattttaaacccc

SEQ ID NO: 198921 - DNA, 20 bp, synthetic construct
  source 1..20: mol_type = other DNA
tcccatgacattttaaaccc

SEQ ID NO: 198922 - DNA, 20 bp, synthetic construct
  source 1..20: mol_type = other DNA
ttcccatgacattttaaacc

SEQ ID NO: 198923 - DNA, 20 bp, synthetic construct
  source 1..20: mol_type = other DNA
tttcccatgacattttaaac

SEQ ID NO: 198924 - DNA, 20 bp, synthetic construct
  source 1..20: mol_type = other DNA
ttttcccatgacattttaaa

SEQ ID NO: 198925 - DNA, 20 bp, synthetic construct
  source 1..20: mol_type = other DNA
gttttcccatgacattttaa

SEQ ID NO: 198926 - DNA, 20 bp, synthetic construct
  source 1..20: mol_type = other DNA
tgttttcccatgacatttta

SEQ ID NO: 198927 - DNA, 20 bp, synthetic construct
  source 1..20: mol_type = other DNA
gtgttttcccatgacatttt

SEQ ID NO: 198928 - DNA, 20 bp, synthetic construct
  source 1..20: mol_type = other DNA
agtgttttcccatgacattt

SEQ ID NO: 198929 - DNA, 20 bp, synthetic construct
  source 1..20: mol_type = other DNA
aagtgttttcccatgacatt

SEQ ID NO: 198930 - DNA, 20 bp, synthetic construct
  source 1..20: mol_type = other DNA
gaagtgttttcccatgacat

SEQ ID NO: 198931 - DNA, 20 bp, synthetic construct
  source 1..20: mol_type = other DNA
agaagtgttttcccatgaca

SEQ ID NO: 198932 - DNA, 20 bp, synthetic construct
  source 1..20: mol_type = other DNA
cagaagtgttttcccatgac

SEQ ID NO: 198933 - DNA, 20 bp, synthetic construct
  source 1..20: mol_type = other DNA
tcagaagtgttttcccatga

SEQ ID NO: 198934 - DNA, 20 bp, synthetic construct
  source 1..20: mol_type = other DNA
gtcagaagtgttttcccatg

SEQ ID NO: 198935 - DNA, 20 bp, synthetic construct
  source 1..20: mol_type = other DNA
tgtcagaagtgttttcccat

SEQ ID NO: 198936 - DNA, 20 bp, synthetic construct
  source 1..20: mol_type = other DNA
atgtcagaagtgttttccca

SEQ ID NO: 198937 - DNA, 20 bp, synthetic construct
  source 1..20: mol_type = other DNA
tatgtcagaagtgttttccc

SEQ ID NO: 198938 - DNA, 20 bp, synthetic construct
  source 1..20: mol_type = other DNA
ttatgtcagaagtgttttcc

SEQ ID NO: 198939 - DNA, 20 bp, synthetic construct
  source 1..20: mol_type = other DNA
tttatgtcagaagtgttttc

SEQ ID NO: 198940 - DNA, 20 bp, synthetic construct
  source 1..20: mol_type = other DNA
ttttatgtcagaagtgtttt

SEQ ID NO: 198941 - DNA, 20 bp, synthetic construct
  source 1..20: mol_type = other DNA
cttttatgtcagaagtgttt

SEQ ID NO: 198942 - DNA, 20 bp, synthetic construct
  source 1..20: mol_type = other DNA
tcttttatgtcagaagtgtt

SEQ ID NO: 198943 - DNA, 20 bp, synthetic construct
  source 1..20: mol_type = other DNA
ctcttttatgtcagaagtgt

SEQ ID NO: 198944 - DNA, 20 bp, synthetic construct
  source 1..20: mol_type = other DNA
gctcttttatgtcagaagtg

SEQ ID NO: 198945 - DNA, 20 bp, synthetic construct
  source 1..20: mol_type = other DNA
tgctcttttatgtcagaagt

SEQ ID NO: 198946 - DNA, 20 bp, synthetic construct
  source 1..20: mol_type = other DNA
atgctcttttatgtcagaag

SEQ ID NO: 198947 - DNA, 20 bp, synthetic construct
  source 1..20: mol_type = other DNA
catgctcttttatgtcagaa

SEQ ID NO: 198948 - DNA, 20 bp, synthetic construct
  source 1..20: mol_type = other DNA
tcatgctcttttatgtcaga

SEQ ID NO: 198949 - DNA, 20 bp, synthetic construct
  source 1..20: mol_type = other DNA
ctcatgctcttttatgtcag

SEQ ID NO: 198950 - DNA, 20 bp, synthetic construct
  source 1..20: mol_type = other DNA
tctcatgctcttttatgtca

SEQ ID NO: 198951 - DNA, 20 bp, synthetic construct
  source 1..20: mol_type = other DNA
ttctcatgctcttttatgtc

SEQ ID NO: 198952 - DNA, 20 bp, synthetic construct
  source 1..20: mol_type = other DNA
gttctcatgctcttttatgt

SEQ ID NO: 198953 - DNA, 20 bp, synthetic construct
  source 1..20: mol_type = other DNA
agttctcatgctcttttatg

SEQ ID NO: 198954 - DNA, 20 bp, synthetic construct
  source 1..20: mol_type = other DNA
cagttctcatgctcttttat

SEQ ID NO: 198955 - DNA, 20 bp, synthetic construct
  source 1..20: mol_type = other DNA
acagttctcatgctctttta

SEQ ID NO: 198956 - DNA, 20 bp, synthetic construct
  source 1..20: mol_type = other DNA
tacagttctcatgctctttt

SEQ ID NO: 198957 - DNA, 20 bp, synthetic construct
  source 1..20: mol_type = other DNA
atacagttctcatgctcttt

SEQ ID NO: 198958 - DNA, 20 bp, synthetic construct
  source 1..20: mol_type = other DNA
tatacagttctcatgctctt

SEQ ID NO: 198959 - DNA, 20 bp, synthetic construct
  source 1..20: mol_type = other DNA
atatacagttctcatgctct

SEQ ID NO: 198960 - DNA, 20 bp, synthetic construct
  source 1..20: mol_type = other DNA
aatatacagttctcatgctc

SEQ ID NO: 198961 - DNA, 20 bp, synthetic construct
  source 1..20: mol_type = other DNA
aaatatacagttctcatgct

SEQ ID NO: 198962 - DNA, 20 bp, synthetic construct
  source 1..20: mol_type = other DNA
taaatatacagttctcatgc

SEQ ID NO: 198963 - DNA, 20 bp, synthetic construct
  source 1..20: mol_type = other DNA
ctaaatatacagttctcatg

SEQ ID NO: 198964 - DNA, 20 bp, synthetic construct
  source 1..20: mol_type = other DNA
gctaaatatacagttctcat

SEQ ID NO: 198965 - DNA, 20 bp, synthetic construct
  source 1..20: mol_type = other DNA
tgctaaatatacagttctca

SEQ ID NO: 198966 - DNA, 20 bp, synthetic construct
  source 1..20: mol_type = other DNA
atgctaaatatacagttctc

SEQ ID NO: 198967 - DNA, 20 bp, synthetic construct
  source 1..20: mol_type = other DNA
tatgctaaatatacagttct

SEQ ID NO: 198968 - DNA, 20 bp, synthetic construct
  source 1..20: mol_type = other DNA
ttatgctaaatatacagttc

SEQ ID NO: 198969 - DNA, 20 bp, synthetic construct
  source 1..20: mol_type = other DNA
attatgctaaatatacagtt

SEQ ID NO: 198970 - DNA, 20 bp, synthetic construct
  source 1..20: mol_type = other DNA
gattatgctaaatatacagt

SEQ ID NO: 198971 - DNA, 20 bp, synthetic construct
  source 1..20: mol_type = other DNA
agattatgctaaatatacag

SEQ ID NO: 198972 - DNA, 20 bp, synthetic construct
  source 1..20: mol_type = other DNA
aagattatgctaaatataca

SEQ ID NO: 198973 - DNA, 20 bp, synthetic construct
  source 1..20: mol_type = other DNA
taagattatgctaaatatac

SEQ ID NO: 198974 - DNA, 20 bp, synthetic construct
  source 1..20: mol_type = other DNA
ttaagattatgctaaatata

SEQ ID NO: 198975 - DNA, 20 bp, synthetic construct
  source 1..20: mol_type = other DNA
gttaagattatgctaaatat

SEQ ID NO: 198976 - DNA, 20 bp, synthetic construct
  source 1..20: mol_type = other DNA
agttaagattatgctaaata

SEQ ID NO: 198977 - DNA, 20 bp, synthetic construct
  source 1..20: mol_type = other DNA
tagttaagattatgctaaat

SEQ ID NO: 198978 - DNA, 20 bp, synthetic construct
  source 1..20: mol_type = other DNA
atagttaagattatgctaaa

SEQ ID NO: 198979 - DNA, 20 bp, synthetic construct
  source 1..20: mol_type = other DNA
catagttaagattatgctaa

SEQ ID NO: 198980 - DNA, 20 bp, synthetic construct
  source 1..20: mol_type = other DNA
acatagttaagattatgcta

SEQ ID NO: 198981 - DNA, 20 bp, synthetic construct
  source 1..20: mol_type = other DNA
aacatagttaagattatgct

SEQ ID NO: 198982 - DNA, 20 bp, synthetic construct
  source 1..20: mol_type = other DNA
aaacatagttaagattatgc

SEQ ID NO: 198983 - DNA, 20 bp, synthetic construct
  source 1..20: mol_type = other DNA
aaaacatagttaagattatg

SEQ ID NO: 198984 - DNA, 20 bp, synthetic construct
  source 1..20: mol_type = other DNA
taaaacatagttaagattat

SEQ ID NO: 198985 - DNA, 20 bp, synthetic construct
  source 1..20: mol_type = other DNA
ctaaaacatagttaagatta

SEQ ID NO: 198986 - DNA, 20 bp, synthetic construct
  source 1..20: mol_type = other DNA
tctaaaacatagttaagatt

SEQ ID NO: 198987 - DNA, 20 bp, synthetic construct
  source 1..20: mol_type = other DNA
ttctaaaacatagttaagat

SEQ ID NO: 198988 - DNA, 20 bp, synthetic construct
  source 1..20: mol_type = other DNA
attctaaaacatagttaaga

SEQ ID NO: 198989 - DNA, 20 bp, synthetic construct
  source 1..20: mol_type = other DNA
cattctaaaacatagttaag

SEQ ID NO: 198990 - DNA, 20 bp, synthetic construct
  source 1..20: mol_type = other DNA
gcattctaaaacatagttaa

SEQ ID NO: 198991 - DNA, 20 bp, synthetic construct
  source 1..20: mol_type = other DNA
tgcattctaaaacatagtta

SEQ ID NO: 198992 - DNA, 20 bp, synthetic construct
  source 1..20: mol_type = other DNA
gtgcattctaaaacatagtt

SEQ ID NO: 198993 - DNA, 20 bp, synthetic construct
  source 1..20: mol_type = other DNA
tgtgcattctaaaacatagt

SEQ ID NO: 198994 - DNA, 20 bp, synthetic construct
  source 1..20: mol_type = other DNA
ctgtgcattctaaaacatag

SEQ ID NO: 198995 - DNA, 20 bp, synthetic construct
  source 1..20: mol_type = other DNA
cctgtgcattctaaaacata

SEQ ID NO: 198996 - DNA, 20 bp, synthetic construct
  source 1..20: mol_type = other DNA
tcctgtgcattctaaaacat

SEQ ID NO: 198997 - DNA, 20 bp, synthetic construct
  source 1..20: mol_type = other DNA
ttcctgtgcattctaaaaca

SEQ ID NO: 198998 - DNA, 20 bp, synthetic construct
  source 1..20: mol_type = other DNA
tttcctgtgcattctaaaac

SEQ ID NO: 198999 - DNA, 20 bp, synthetic construct
  source 1..20: mol_type = other DNA
ttttcctgtgcattctaaaa

SEQ ID NO: 199000 - DNA, 20 bp, synthetic construct
  source 1..20: mol_type = other DNA
tttttcctgtgcattctaaa

SEQ ID NO: 199001 - DNA, 20 bp, synthetic construct
  source 1..20: mol_type = other DNA
ttttttcctgtgcattctaa

SEQ ID NO: 199002 - DNA, 20 bp, synthetic construct
  source 1..20: mol_type = other DNA
tttttttcctgtgcattcta

SEQ ID NO: 199003 - DNA, 20 bp, synthetic construct
  source 1..20: mol_type = other DNA
atttttttcctgtgcattct

SEQ ID NO: 199004 - DNA, 20 bp, synthetic construct
  source 1..20: mol_type = other DNA
catttttttcctgtgcattc

SEQ ID NO: 199005 - DNA, 20 bp, synthetic construct
  source 1..20: mol_type = other DNA
acatttttttcctgtgcatt

SEQ ID NO: 199006 - DNA, 20 bp, synthetic construct
  source 1..20: mol_type = other DNA
tacatttttttcctgtgcat

SEQ ID NO: 199007 - DNA, 20 bp, synthetic construct
  source 1..20: mol_type = other DNA
gtacatttttttcctgtgca

SEQ ID NO: 199008 - DNA, 20 bp, synthetic construct
  source 1..20: mol_type = other DNA
tgtacatttttttcctgtgc

SEQ ID NO: 199009 - DNA, 20 bp, synthetic construct
  source 1..20: mol_type = other DNA
ttgtacatttttttcctgtg

SEQ ID NO: 199010 - DNA, 20 bp, synthetic construct
  source 1..20: mol_type = other DNA
tttgtacatttttttcctgt

SEQ ID NO: 199011 - DNA, 20 bp, synthetic construct
  source 1..20: mol_type = other DNA
gtttgtacatttttttcctg

SEQ ID NO: 199012 - DNA, 20 bp, synthetic construct
  source 1..20: mol_type = other DNA
tgtttgtacatttttttcct

SEQ ID NO: 199013 - DNA, 20 bp, synthetic construct
  source 1..20: mol_type = other DNA
atgtttgtacatttttttcc

SEQ ID NO: 199014 - DNA, 20 bp, synthetic construct
  source 1..20: mol_type = other DNA
tatgtttgtacatttttttc

SEQ ID NO: 199015 - DNA, 20 bp, synthetic construct
  source 1..20: mol_type = other DNA
atatgtttgtacattttttt

SEQ ID NO: 199016 - DNA, 20 bp, synthetic construct
  source 1..20: mol_type = other DNA
aatatgtttgtacatttttt

SEQ ID NO: 199017 - DNA, 20 bp, synthetic construct
  source 1..20: mol_type = other DNA
gaatatgtttgtacattttt

SEQ ID NO: 199018 - DNA, 20 bp, synthetic construct
  source 1..20: mol_type = other DNA
tgaatatgtttgtacatttt

SEQ ID NO: 199019 - DNA, 20 bp, synthetic construct
  source 1..20: mol_type = other DNA
atgaatatgtttgtacattt

SEQ ID NO: 199020 - DNA, 20 bp, synthetic construct
  source 1..20: mol_type = other DNA
tatgaatatgtttgtacatt

SEQ ID NO: 199021 - DNA, 20 bp, synthetic construct
  source 1..20: mol_type = other DNA
ctatgaatatgtttgtacat

SEQ ID NO: 199022 - DNA, 20 bp, synthetic construct
  source 1..20: mol_type = other DNA
actatgaatatgtttgtaca

SEQ ID NO: 199023 - DNA, 20 bp, synthetic construct
  source 1..20: mol_type = other DNA
cactatgaatatgtttgtac

SEQ ID NO: 199024 - DNA, 20 bp, synthetic construct
  source 1..20: mol_type = other DNA
tcactatgaatatgtttgta

SEQ ID NO: 199025 - DNA, 20 bp, synthetic construct
  source 1..20: mol_type = other DNA
atcactatgaatatgtttgt

SEQ ID NO: 199026 - DNA, 20 bp, synthetic construct
  source 1..20: mol_type = other DNA
catcactatgaatatgtttg

SEQ ID NO: 199027 - DNA, 20 bp, synthetic construct
  source 1..20: mol_type = other DNA
acatcactatgaatatgttt

SEQ ID NO: 199028 - DNA, 20 bp, synthetic construct
  source 1..20: mol_type = other DNA
gacatcactatgaatatgtt

SEQ ID NO: 199029 - DNA, 20 bp, synthetic construct
  source 1..20: mol_type = other DNA
agacatcactatgaatatgt

SEQ ID NO: 199030 - DNA, 20 bp, synthetic construct
  source 1..20: mol_type = other DNA
gagacatcactatgaatatg

SEQ ID NO: 199031 - DNA, 20 bp, synthetic construct
  source 1..20: mol_type = other DNA
agagacatcactatgaatat

SEQ ID NO: 199032 - DNA, 20 bp, synthetic construct
  source 1..20: mol_type = other DNA
cagagacatcactatgaata

SEQ ID NO: 199033 - DNA, 20 bp, synthetic construct
  source 1..20: mol_type = other DNA
ccagagacatcactatgaat

SEQ ID NO: 199034 - DNA, 20 bp, synthetic construct
  source 1..20: mol_type = other DNA
accagagacatcactatgaa

SEQ ID NO: 199035 - DNA, 20 bp, synthetic construct
  source 1..20: mol_type = other DNA
caccagagacatcactatga

SEQ ID NO: 199036 - DNA, 20 bp, synthetic construct
  source 1..20: mol_type = other DNA
ccaccagagacatcactatg

SEQ ID NO: 199037 - DNA, 20 bp, synthetic construct
  source 1..20: mol_type = other DNA
accaccagagacatcactat

SEQ ID NO: 199038 - DNA, 20 bp, synthetic construct
  source 1..20: mol_type = other DNA
taccaccagagacatcacta

SEQ ID NO: 199039 - DNA, 20 bp, synthetic construct
  source 1..20: mol_type = other DNA
ctaccaccagagacatcact

SEQ ID NO: 199040 - DNA, 20 bp, synthetic construct
  source 1..20: mol_type = other DNA
cctaccaccagagacatcac

SEQ ID NO: 199041 - DNA, 20 bp, synthetic construct
  source 1..20: mol_type = other DNA
tcctaccaccagagacatca

SEQ ID NO: 199042 - DNA, 20 bp, synthetic construct
  source 1..20: mol_type = other DNA
atcctaccaccagagacatc

SEQ ID NO: 199043 - DNA, 20 bp, synthetic construct
  source 1..20: mol_type = other DNA
aatcctaccaccagagacat

SEQ ID NO: 199044 - DNA, 20 bp, synthetic construct
  source 1..20: mol_type = other DNA
taatcctaccaccagagaca

SEQ ID NO: 199045 - DNA, 20 bp, synthetic construct
  source 1..20: mol_type = other DNA
ataatcctaccaccagagac

SEQ ID NO: 199046 - DNA, 20 bp, synthetic construct
  source 1..20: mol_type = other DNA
cataatcctaccaccagaga

SEQ ID NO: 199047 - DNA, 20 bp, synthetic construct
  source 1..20: mol_type = other DNA
tcataatcctaccaccagag

SEQ ID NO: 199048 - DNA, 20 bp, synthetic construct
  source 1..20: mol_type = other DNA
atcataatcctaccaccaga

SEQ ID NO: 199049 - DNA, 20 bp, synthetic construct
  source 1..20: mol_type = other DNA
gatcataatcctaccaccag

SEQ ID NO: 199050 - DNA, 20 bp, synthetic construct
  source 1..20: mol_type = other DNA
tgatcataatcctaccacca

SEQ ID NO: 199051 - DNA, 20 bp, synthetic construct
  source 1..20: mol_type = other DNA
ctgatcataatcctaccacc

SEQ ID NO: 199052 - DNA, 20 bp, synthetic construct
  source 1..20: mol_type = other DNA
actgatcataatcctaccac

SEQ ID NO: 199053 - DNA, 20 bp, synthetic construct
  source 1..20: mol_type = other DNA
tactgatcataatcctacca

SEQ ID NO: 199054 - DNA, 20 bp, synthetic construct
  source 1..20: mol_type = other DNA
ttactgatcataatcctacc

SEQ ID NO: 199055 - DNA, 20 bp, synthetic construct
  source 1..20: mol_type = other DNA
cttactgatcataatcctac

SEQ ID NO: 199056 - DNA, 20 bp, synthetic construct
  source 1..20: mol_type = other DNA
acttactgatcataatccta

SEQ ID NO: 199057 - DNA, 20 bp, synthetic construct
  source 1..20: mol_type = other DNA
tacttactgatcataatcct

SEQ ID NO: 199058 - DNA, 20 bp, synthetic construct
  source 1..20: mol_type = other DNA
gtacttactgatcataatcc

SEQ ID NO: 199059 - DNA, 20 bp, synthetic construct
  source 1..20: mol_type = other DNA
agtacttactgatcataatc

SEQ ID NO: 199060 - DNA, 20 bp, synthetic construct
  source 1..20: mol_type = other DNA
aagtacttactgatcataat

SEQ ID NO: 199061 - DNA, 20 bp, synthetic construct
  source 1..20: mol_type = other DNA
gaagtacttactgatcataa

SEQ ID NO: 199062 - DNA, 20 bp, synthetic construct
  source 1..20: mol_type = other DNA
agaagtacttactgatcata

SEQ ID NO: 199063 - DNA, 20 bp, synthetic construct
  source 1..20: mol_type = other DNA
cagaagtacttactgatcat

SEQ ID NO: 199064 - DNA, 20 bp, synthetic construct
  source 1..20: mol_type = other DNA
acagaagtacttactgatca

SEQ ID NO: 199065 - DNA, 20 bp, synthetic construct
  source 1..20: mol_type = other DNA
gacagaagtacttactgatc

SEQ ID NO: 199066 - DNA, 20 bp, synthetic construct
  source 1..20: mol_type = other DNA
agacagaagtacttactgat

SEQ ID NO: 199067 - DNA, 20 bp, synthetic construct
  source 1..20: mol_type = other DNA
gagacagaagtacttactga

SEQ ID NO: 199068 - DNA, 20 bp, synthetic construct
  source 1..20: mol_type = other DNA
agagacagaagtacttactg

SEQ ID NO: 199069 - DNA, 20 bp, synthetic construct
  source 1..20: mol_type = other DNA
aagagacagaagtacttact

SEQ ID NO: 199070 - DNA, 20 bp, synthetic construct
  source 1..20: mol_type = other DNA
gaagagacagaagtacttac

SEQ ID NO: 199071 - DNA, 20 bp, synthetic construct
  source 1..20: mol_type = other DNA
tgaagagacagaagtactta

SEQ ID NO: 199072 - DNA, 20 bp, synthetic construct
  source 1..20: mol_type = other DNA
atgaagagacagaagtactt

SEQ ID NO: 199073 - DNA, 20 bp, synthetic construct
  source 1..20: mol_type = other DNA
tatgaagagacagaagtact

SEQ ID NO: 199074 - DNA, 20 bp, synthetic construct
  source 1..20: mol_type = other DNA
atatgaagagacagaagtac

SEQ ID NO: 199075 - DNA, 20 bp, synthetic construct
  source 1..20: mol_type = other DNA
aatatgaagagacagaagta

SEQ ID NO: 199076 - DNA, 20 bp, synthetic construct
  source 1..20: mol_type = other DNA
aaatatgaagagacagaagt

SEQ ID NO: 199077 - DNA, 20 bp, synthetic construct
  source 1..20: mol_type = other DNA
aaaatatgaagagacagaag

SEQ ID NO: 199078 - DNA, 20 bp, synthetic construct
  source 1..20: mol_type = other DNA
gaaaatatgaagagacagaa

SEQ ID NO: 199079 - DNA, 20 bp, synthetic construct
  source 1..20: mol_type = other DNA
ggaaaatatgaagagacaga

SEQ ID NO: 199080 - DNA, 20 bp, synthetic construct
  source 1..20: mol_type = other DNA
aggaaaatatgaagagacag

SEQ ID NO: 199081 - DNA, 20 bp, synthetic construct
  source 1..20: mol_type = other DNA
caggaaaatatgaagagaca

SEQ ID NO: 199082 - DNA, 20 bp, synthetic construct
  source 1..20: mol_type = other DNA
acaggaaaatatgaagagac

SEQ ID NO: 199083 - DNA, 20 bp, synthetic construct
  source 1..20: mol_type = other DNA
tacaggaaaatatgaagaga

SEQ ID NO: 199084 - DNA, 20 bp, synthetic construct
  source 1..20: mol_type = other DNA
atacaggaaaatatgaagag

SEQ ID NO: 199085 - DNA, 20 bp, synthetic construct
  source 1..20: mol_type = other DNA
aatacaggaaaatatgaaga

SEQ ID NO: 199086 - DNA, 20 bp, synthetic construct
  source 1..20: mol_type = other DNA
aaatacaggaaaatatgaag

SEQ ID NO: 199087 - DNA, 20 bp, synthetic construct
  source 1..20: mol_type = other DNA
caaatacaggaaaatatgaa

SEQ ID NO: 199088 - DNA, 20 bp, synthetic construct
  source 1..20: mol_type = other DNA
tcaaatacaggaaaatatga

SEQ ID NO: 199089 - DNA, 20 bp, synthetic construct
  source 1..20: mol_type = other DNA
atcaaatacaggaaaatatg

SEQ ID NO: 199090 - DNA, 20 bp, synthetic construct
  source 1..20: mol_type = other DNA
tatcaaatacaggaaaatat

SEQ ID NO: 199091 - DNA, 20 bp, synthetic construct
  source 1..20: mol_type = other DNA
ttatcaaatacaggaaaata

SEQ ID NO: 199092 - DNA, 20 bp, synthetic construct
  source 1..20: mol_type = other DNA
attatcaaatacaggaaaat

SEQ ID NO: 199093 - DNA, 20 bp, synthetic construct
  source 1..20: mol_type = other DNA
tattatcaaatacaggaaaa

SEQ ID NO: 199094 - DNA, 20 bp, synthetic construct
  source 1..20: mol_type = other DNA
gtattatcaaatacaggaaa

SEQ ID NO: 199095 - DNA, 20 bp, synthetic construct
  source 1..20: mol_type = other DNA
tgtattatcaaatacaggaa

SEQ ID NO: 199096 - DNA, 20 bp, synthetic construct
  source 1..20: mol_type = other DNA
atgtattatcaaatacagga

SEQ ID NO: 199097 - DNA, 20 bp, synthetic construct
  source 1..20: mol_type = other DNA
catgtattatcaaatacagg

SEQ ID NO: 199098 - DNA, 20 bp, synthetic construct
  source 1..20: mol_type = other DNA
gcatgtattatcaaatacag

SEQ ID NO: 199099 - DNA, 20 bp, synthetic construct
  source 1..20: mol_type = other DNA
tgcatgtattatcaaataca

SEQ ID NO: 199100 - DNA, 20 bp, synthetic construct
  source 1..20: mol_type = other DNA
atgcatgtattatcaaatac

SEQ ID NO: 199101 - DNA, 20 bp, synthetic construct
  source 1..20: mol_type = other DNA
tatgcatgtattatcaaata

SEQ ID NO: 199102 - DNA, 20 bp, synthetic construct
  source 1..20: mol_type = other DNA
atatgcatgtattatcaaat

SEQ ID NO: 199103 - DNA, 20 bp, synthetic construct
  source 1..20: mol_type = other DNA
catatgcatgtattatcaaa

SEQ ID NO: 199104 - DNA, 20 bp, synthetic construct
  source 1..20: mol_type = other DNA
acatatgcatgtattatcaa

SEQ ID NO: 199105 - DNA, 20 bp, synthetic construct
  source 1..20: mol_type = other DNA
aacatatgcatgtattatca

SEQ ID NO: 199106 - DNA, 20 bp, synthetic construct
  source 1..20: mol_type = other DNA
caacatatgcatgtattatc

SEQ ID NO: 199107 - DNA, 20 bp, synthetic construct
  source 1..20: mol_type = other DNA
acaacatatgcatgtattat

SEQ ID NO: 199108 - DNA, 20 bp, synthetic construct
  source 1..20: mol_type = other DNA
aacaacatatgcatgtatta

SEQ ID NO: 199109 - DNA, 20 bp, synthetic construct
  source 1..20: mol_type = other DNA
aaacaacatatgcatgtatt

SEQ ID NO: 199110 - DNA, 20 bp, synthetic construct
  source 1..20: mol_type = other DNA
aaaacaacatatgcatgtat

SEQ ID NO: 199111 - DNA, 20 bp, synthetic construct
  source 1..20: mol_type = other DNA
aaaaacaacatatgcatgta

SEQ ID NO: 199112 - DNA, 20 bp, synthetic construct
  source 1..20: mol_type = other DNA
taaaaacaacatatgcatgt

SEQ ID NO: 199113 - DNA, 20 bp, synthetic construct
  source 1..20: mol_type = other DNA
ttaaaaacaacatatgcatg

SEQ ID NO: 199114 - DNA, 20 bp, synthetic construct
  source 1..20: mol_type = other DNA
tttaaaaacaacatatgcat

SEQ ID NO: 199115 - DNA, 20 bp, synthetic construct
  source 1..20: mol_type = other DNA
ttttaaaaacaacatatgca

SEQ ID NO: 199116 - DNA, 20 bp, synthetic construct
  source 1..20: mol_type = other DNA
attttaaaaacaacatatgc

SEQ ID NO: 199117 - DNA, 20 bp, synthetic construct
  source 1..20: mol_type = other DNA
tattttaaaaacaacatatg

SEQ ID NO: 199118 - DNA, 20 bp, synthetic construct
  source 1..20: mol_type = other DNA
ttattttaaaaacaacatat

SEQ ID NO: 199119 - DNA, 20 bp, synthetic construct
  source 1..20: mol_type = other DNA
cttattttaaaaacaacata

SEQ ID NO: 199120 - DNA, 20 bp, synthetic construct
  source 1..20: mol_type = other DNA
tcttattttaaaaacaacat

SEQ ID NO: 199121 - DNA, 20 bp, synthetic construct
  source 1..20: mol_type = other DNA
ttcttattttaaaaacaaca

SEQ ID NO: 199122 - DNA, 20 bp, synthetic construct
  source 1..20: mol_type = other DNA
tttcttattttaaaaacaac

SEQ ID NO: 199123 - DNA, 20 bp, synthetic construct
  source 1..20: mol_type = other DNA
ttttcttattttaaaaacaa

SEQ ID NO: 199124 - DNA, 20 bp, synthetic construct
  source 1..20: mol_type = other DNA
tttttcttattttaaaaaca

SEQ ID NO: 199125 - DNA, 20 bp, synthetic construct
  source 1..20: mol_type = other DNA
atttttcttattttaaaaac

SEQ ID NO: 199126 - DNA, 20 bp, synthetic construct
  source 1..20: mol_type = other DNA
aatttttcttattttaaaaa

SEQ ID NO: 199127 - DNA, 20 bp, synthetic construct
  source 1..20: mol_type = other DNA
aaatttttcttattttaaaa

SEQ ID NO: 199128 - DNA, 20 bp, synthetic construct
  source 1..20: mol_type = other DNA
aaaatttttcttattttaaa

SEQ ID NO: 199129 - DNA, 20 bp, synthetic construct
  source 1..20: mol_type = other DNA
taaaatttttcttattttaa

SEQ ID NO: 199130 - DNA, 20 bp, synthetic construct
  source 1..20: mol_type = other DNA
ttaaaatttttcttatttta

SEQ ID NO: 199131 - DNA, 20 bp, synthetic construct
  source 1..20: mol_type = other DNA
cttaaaatttttcttatttt

SEQ ID NO: 199132 - DNA, 20 bp, synthetic construct
  source 1..20: mol_type = other DNA
acttaaaatttttcttattt

SEQ ID NO: 199133 - DNA, 20 bp, synthetic construct
  source 1..20: mol_type = other DNA
aacttaaaatttttcttatt

SEQ ID NO: 199134 - DNA, 20 bp, synthetic construct
  source 1..20: mol_type = other DNA
aaacttaaaatttttcttat

SEQ ID NO: 199135 - DNA, 20 bp, synthetic construct
  source 1..20: mol_type = other DNA
taaacttaaaatttttctta

SEQ ID NO: 199136 - DNA, 20 bp, synthetic construct
  source 1..20: mol_type = other DNA
ttaaacttaaaatttttctt

SEQ ID NO: 199137 - DNA, 20 bp, synthetic construct
  source 1..20: mol_type = other DNA
tttaaacttaaaatttttct

SEQ ID NO: 199138 - DNA, 20 bp, synthetic construct
  source 1..20: mol_type = other DNA
ttttaaacttaaaatttttc

SEQ ID NO: 199139 - DNA, 20 bp, synthetic construct
  source 1..20: mol_type = other DNA
attttaaacttaaaattttt

SEQ ID NO: 199140 - DNA, 20 bp, synthetic construct
  source 1..20: mol_type = other DNA
aattttaaacttaaaatttt

SEQ ID NO: 199141 - DNA, 20 bp, synthetic construct
  source 1..20: mol_type = other DNA
caattttaaacttaaaattt

SEQ ID NO: 199142 - DNA, 20 bp, synthetic construct
  source 1..20: mol_type = other DNA
ccaattttaaacttaaaatt

SEQ ID NO: 199143 - DNA, 20 bp, synthetic construct
  source 1..20: mol_type = other DNA
tccaattttaaacttaaaat

SEQ ID NO: 199144 - DNA, 20 bp, synthetic construct
  source 1..20: mol_type = other DNA
ctccaattttaaacttaaaa

SEQ ID NO: 199145 - DNA, 20 bp, synthetic construct
  source 1..20: mol_type = other DNA
gctccaattttaaacttaaa

SEQ ID NO: 199146 - DNA, 20 bp, synthetic construct
  source 1..20: mol_type = other DNA
agctccaattttaaacttaa

SEQ ID NO: 199147 - DNA, 20 bp, synthetic construct
  source 1..20: mol_type = other DNA
cagctccaattttaaactta

SEQ ID NO: 199148 - DNA, 20 bp, synthetic construct
  source 1..20: mol_type = other DNA
tcagctccaattttaaactt

SEQ ID NO: 199149 - DNA, 20 bp, synthetic construct
  source 1..20: mol_type = other DNA
ttcagctccaattttaaact

SEQ ID NO: 199150 - DNA, 20 bp, synthetic construct
  source 1..20: mol_type = other DNA
tttcagctccaattttaaac

SEQ ID NO: 199151 - DNA, 20 bp, synthetic construct
  source 1..20: mol_type = other DNA
ttttcagctccaattttaaa

SEQ ID NO: 199152 - DNA, 20 bp, synthetic construct
  source 1..20: mol_type = other DNA
cttttcagctccaattttaa

SEQ ID NO: 199153 - DNA, 20 bp, synthetic construct
  source 1..20: mol_type = other DNA
acttttcagctccaatttta

SEQ ID NO: 199154 - DNA, 20 bp, synthetic construct
  source 1..20: mol_type = other DNA
cacttttcagctccaatttt

SEQ ID NO: 199155 - DNA, 20 bp, synthetic construct
  source 1..20: mol_type = other DNA
acacttttcagctccaattt

SEQ ID NO: 199156 - DNA, 20 bp, synthetic construct
  source 1..20: mol_type = other DNA
aacacttttcagctccaatt

SEQ ID NO: 199157 - DNA, 20 bp, synthetic construct
  source 1..20: mol_type = other DNA
aaacacttttcagctccaat

SEQ ID NO: 199158 - DNA, 20 bp, synthetic construct
  source 1..20: mol_type = other DNA
aaaacacttttcagctccaa

SEQ ID NO: 199159 - DNA, 20 bp, synthetic construct
  source 1..20: mol_type = other DNA
aaaaacacttttcagctcca

SEQ ID NO: 199160 - DNA, 20 bp, synthetic construct
  source 1..20: mol_type = other DNA
taaaaacacttttcagctcc

SEQ ID NO: 199161 - DNA, 20 bp, synthetic construct
  source 1..20: mol_type = other DNA
ctaaaaacacttttcagctc

SEQ ID NO: 199162 - DNA, 20 bp, synthetic construct
  source 1..20: mol_type = other DNA
cctaaaaacacttttcagct

SEQ ID NO: 199163 - DNA, 20 bp, synthetic construct
  source 1..20: mol_type = other DNA
acctaaaaacacttttcagc

SEQ ID NO: 199164 - DNA, 20 bp, synthetic construct
  source 1..20: mol_type = other DNA
gacctaaaaacacttttcag

SEQ ID NO: 199165 - DNA, 20 bp, synthetic construct
  source 1..20: mol_type = other DNA
tgacctaaaaacacttttca

SEQ ID NO: 199166 - DNA, 20 bp, synthetic construct
  source 1..20: mol_type = other DNA
ctgacctaaaaacacttttc

SEQ ID NO: 199167 - DNA, 20 bp, synthetic construct
  source 1..20: mol_type = other DNA
cctgacctaaaaacactttt

SEQ ID NO: 199168 - DNA, 20 bp, synthetic construct
  source 1..20: mol_type = other DNA
gcctgacctaaaaacacttt

SEQ ID NO: 199169 - DNA, 20 bp, synthetic construct
  source 1..20: mol_type = other DNA
cgcctgacctaaaaacactt

SEQ ID NO: 199170 - DNA, 20 bp, synthetic construct
  source 1..20: mol_type = other DNA
tcgcctgacctaaaaacact

SEQ ID NO: 199171 - DNA, 20 bp, synthetic construct
  source 1..20: mol_type = other DNA
ctcgcctgacctaaaaacac

SEQ ID NO: 199172 - DNA, 20 bp, synthetic construct
  source 1..20: mol_type = other DNA
cctcgcctgacctaaaaaca

SEQ ID NO: 199173 - DNA, 20 bp, synthetic construct
  source 1..20: mol_type = other DNA
acctcgcctgacctaaaaac

SEQ ID NO: 199174 - DNA, 20 bp, synthetic construct
  source 1..20: mol_type = other DNA
cacctcgcctgacctaaaaa

SEQ ID NO: 199175 - DNA, 20 bp, synthetic construct
  source 1..20: mol_type = other DNA
ccacctcgcctgacctaaaa

SEQ ID NO: 199176 - DNA, 20 bp, synthetic construct
  source 1..20: mol_type = other DNA
gccacctcgcctgacctaaa

SEQ ID NO: 199177 - DNA, 20 bp, synthetic construct
  source 1..20: mol_type = other DNA
agccacctcgcctgacctaa

SEQ ID NO: 199178 - DNA, 20 bp, synthetic construct
  source 1..20: mol_type = other DNA
gagccacctcgcctgaccta

SEQ ID NO: 199179 - DNA, 20 bp, synthetic construct
  source 1..20: mol_type = other DNA
tgagccacctcgcctgacct

SEQ ID NO: 199180 - DNA, 20 bp, synthetic construct
  source 1..20: mol_type = other DNA
gtgagccacctcgcctgacc

SEQ ID NO: 199181 - DNA, 20 bp, synthetic construct
  source 1..20: mol_type = other DNA
tgtgagccacctcgcctgac

SEQ ID NO: 199182 - DNA, 20 bp, synthetic construct
  source 1..20: mol_type = other DNA
gtgtgagccacctcgcctga

SEQ ID NO: 199183 - DNA, 20 bp, synthetic construct
  source 1..20: mol_type = other DNA
ggtgtgagccacctcgcctg

SEQ ID NO: 199184 - DNA, 20 bp, synthetic construct
  source 1..20: mol_type = other DNA
aggtgtgagccacctcgcct

SEQ ID NO: 199185 - DNA, 20 bp, synthetic construct
  source 1..20: mol_type = other DNA
caggtgtgagccacctcgcc

SEQ ID NO: 199186 - DNA, 20 bp, synthetic construct
  source 1..20: mol_type = other DNA
acaggtgtgagccacctcgc

SEQ ID NO: 199187 - DNA, 20 bp, synthetic construct
  source 1..20: mol_type = other DNA
tacaggtgtgagccacctcg

SEQ ID NO: 199188 - DNA, 20 bp, synthetic construct
  source 1..20: mol_type = other DNA
ttacaggtgtgagccacctc

SEQ ID NO: 199189 - DNA, 20 bp, synthetic construct
  source 1..20: mol_type = other DNA
attacaggtgtgagccacct

SEQ ID NO: 199190 - DNA, 20 bp, synthetic construct
  source 1..20: mol_type = other DNA
tattacaggtgtgagccacc

SEQ ID NO: 199191 - DNA, 20 bp, synthetic construct
  source 1..20: mol_type = other DNA
ctattacaggtgtgagccac

SEQ ID NO: 199192 - DNA, 20 bp, synthetic construct
  source 1..20: mol_type = other DNA
gctattacaggtgtgagcca

SEQ ID NO: 199193 - DNA, 20 bp, synthetic construct
  source 1..20: mol_type = other DNA
tgctattacaggtgtgagcc

SEQ ID NO: 199194 - DNA, 20 bp, synthetic construct
  source 1..20: mol_type = other DNA
gtgctattacaggtgtgagc

SEQ ID NO: 199195 - DNA, 20 bp, synthetic construct
  source 1..20: mol_type = other DNA
ggtgctattacaggtgtgag

SEQ ID NO: 199196 - DNA, 20 bp, synthetic construct
  source 1..20: mol_type = other DNA
tggtgctattacaggtgtga

SEQ ID NO: 199197 - DNA, 20 bp, synthetic construct
  source 1..20: mol_type = other DNA
gtggtgctattacaggtgtg

SEQ ID NO: 199198 - DNA, 20 bp, synthetic construct
  source 1..20: mol_type = other DNA
agtggtgctattacaggtgt

SEQ ID NO: 199199 - DNA, 20 bp, synthetic construct
  source 1..20: mol_type = other DNA
aagtggtgctattacaggtg

SEQ ID NO: 199200 - DNA, 20 bp, synthetic construct
  source 1..20: mol_type = other DNA
aaagtggtgctattacaggt

SEQ ID NO: 199201 - DNA, 20 bp, synthetic construct
  source 1..20: mol_type = other DNA
caaagtggtgctattacagg

SEQ ID NO: 199202 - DNA, 20 bp, synthetic construct
  source 1..20: mol_type = other DNA
ccaaagtggtgctattacag

SEQ ID NO: 199203 - DNA, 20 bp, synthetic construct
  source 1..20: mol_type = other DNA
cccaaagtggtgctattaca

SEQ ID NO: 199204 - DNA, 20 bp, synthetic construct
  source 1..20: mol_type = other DNA
tcccaaagtggtgctattac

SEQ ID NO: 199205 - DNA, 20 bp, synthetic construct
  source 1..20: mol_type = other DNA
ctcccaaagtggtgctatta

SEQ ID NO: 199206 - DNA, 20 bp, synthetic construct
  source 1..20: mol_type = other DNA
cctcccaaagtggtgctatt

SEQ ID NO: 199207 - DNA, 20 bp, synthetic construct
  source 1..20: mol_type = other DNA
gcctcccaaagtggtgctat

SEQ ID NO: 199208 - DNA, 20 bp, synthetic construct
  source 1..20: mol_type = other DNA
agcctcccaaagtggtgcta

SEQ ID NO: 199209 - DNA, 20 bp, synthetic construct
  source 1..20: mol_type = other DNA
cagcctcccaaagtggtgct

SEQ ID NO: 199210 - DNA, 20 bp, synthetic construct
  source 1..20: mol_type = other DNA
tcagcctcccaaagtggtgc

SEQ ID NO: 199211 - DNA, 20 bp, synthetic construct
  source 1..20: mol_type = other DNA
ctcagcctcccaaagtggtg

SEQ ID NO: 199212 - DNA, 20 bp, synthetic construct
  source 1..20: mol_type = other DNA
cctcagcctcccaaagtggt

SEQ ID NO: 199213 - DNA, 20 bp, synthetic construct
  source 1..20: mol_type = other DNA
gcctcagcctcccaaagtgg

SEQ ID NO: 199214 - DNA, 20 bp, synthetic construct
  source 1..20: mol_type = other DNA
tgcctcagcctcccaaagtg

SEQ ID NO: 199215 - DNA, 20 bp, synthetic construct
  source 1..20: mol_type = other DNA
ctgcctcagcctcccaaagt

SEQ ID NO: 199216 - DNA, 20 bp, synthetic construct
  source 1..20: mol_type = other DNA
actgcctcagcctcccaaag

SEQ ID NO: 199217 - DNA, 20 bp, synthetic construct
  source 1..20: mol_type = other DNA
gactgcctcagcctcccaaa

SEQ ID NO: 199218 - DNA, 20 bp, synthetic construct
  source 1..20: mol_type = other DNA
tgactgcctcagcctcccaa

SEQ ID NO: 199219 - DNA, 20 bp, synthetic construct
  source 1..20: mol_type = other DNA
ctgactgcctcagcctccca

SEQ ID NO: 199220 - DNA, 20 bp, synthetic construct
  source 1..20: mol_type = other DNA
tctgactgcctcagcctccc

SEQ ID NO: 199221 - DNA, 20 bp, synthetic construct
  source 1..20: mol_type = other DNA
atctgactgcctcagcctcc

SEQ ID NO: 199222 - DNA, 20 bp, synthetic construct
  source 1..20: mol_type = other DNA
gatctgactgcctcagcctc

SEQ ID NO: 199223 - DNA, 20 bp, synthetic construct
  source 1..20: mol_type = other DNA
tgatctgactgcctcagcct

SEQ ID NO: 199224 - DNA, 20 bp, synthetic construct
  source 1..20: mol_type = other DNA
gtgatctgactgcctcagcc

SEQ ID NO: 199225 - DNA, 20 bp, synthetic construct
  source 1..20: mol_type = other DNA
agtgatctgactgcctcagc

SEQ ID NO: 199226 - DNA, 20 bp, synthetic construct
  source 1..20: mol_type = other DNA
aagtgatctgactgcctcag

SEQ ID NO: 199227 - DNA, 20 bp, synthetic construct
  source 1..20: mol_type = other DNA
caagtgatctgactgcctca

SEQ ID NO: 199228 - DNA, 20 bp, synthetic construct
  source 1..20: mol_type = other DNA
tcaagtgatctgactgcctc

SEQ ID NO: 199229 - DNA, 20 bp, synthetic construct
  source 1..20: mol_type = other DNA
ctcaagtgatctgactgcct

SEQ ID NO: 199230 - DNA, 20 bp, synthetic construct
  source 1..20: mol_type = other DNA
gctcaagtgatctgactgcc

SEQ ID NO: 199231 - DNA, 20 bp, synthetic construct
  source 1..20: mol_type = other DNA
ggctcaagtgatctgactgc

SEQ ID NO: 199232 - DNA, 20 bp, synthetic construct
  source 1..20: mol_type = other DNA
gggctcaagtgatctgactg

SEQ ID NO: 199233 - DNA, 20 bp, synthetic construct
  source 1..20: mol_type = other DNA
tgggctcaagtgatctgact

SEQ ID NO: 199234 - DNA, 20 bp, synthetic construct
  source 1..20: mol_type = other DNA
ctgggctcaagtgatctgac

SEQ ID NO: 199235 - DNA, 20 bp, synthetic construct
  source 1..20: mol_type = other DNA
cctgggctcaagtgatctga

SEQ ID NO: 199236 - DNA, 20 bp, synthetic construct
  source 1..20: mol_type = other DNA
tcctgggctcaagtgatctg

SEQ ID NO: 199237 - DNA, 20 bp, synthetic construct
  source 1..20: mol_type = other DNA
ctcctgggctcaagtgatct

SEQ ID NO: 199238 - DNA, 20 bp, synthetic construct
  source 1..20: mol_type = other DNA
actcctgggctcaagtgatc

SEQ ID NO: 199239 - DNA, 20 bp, synthetic construct
  source 1..20: mol_type = other DNA
aactcctgggctcaagtgat

SEQ ID NO: 199240 - DNA, 20 bp, synthetic construct
  source 1..20: mol_type = other DNA
gaactcctgggctcaagtga

SEQ ID NO: 199241 - DNA, 20 bp, synthetic construct
  source 1..20: mol_type = other DNA
cgaactcctgggctcaagtg

SEQ ID NO: 199242 - DNA, 20 bp, synthetic construct
  source 1..20: mol_type = other DNA
tcgaactcctgggctcaagt

SEQ ID NO: 199243 - DNA, 20 bp, synthetic construct
  source 1..20: mol_type = other DNA
ctcgaactcctgggctcaag

SEQ ID NO: 199244 - DNA, 20 bp, synthetic construct
  source 1..20: mol_type = other DNA
tctcgaactcctgggctcaa

SEQ ID NO: 199245 - DNA, 20 bp, synthetic construct
  source 1..20: mol_type = other DNA
gtctcgaactcctgggctca

SEQ ID NO: 199246 - DNA, 20 bp, synthetic construct
  source 1..20: mol_type = other DNA
ggtctcgaactcctgggctc

SEQ ID NO: 199247 - DNA, 20 bp, synthetic construct
  source 1..20: mol_type = other DNA
tggtctcgaactcctgggct

SEQ ID NO: 199248 - DNA, 20 bp, synthetic construct
  source 1..20: mol_type = other DNA
ctggtctcgaactcctgggc

SEQ ID NO: 199249 - DNA, 20 bp, synthetic construct
  source 1..20: mol_type = other DNA
gctggtctcgaactcctggg

SEQ ID NO: 199250 - DNA, 20 bp, synthetic construct
  source 1..20: mol_type = other DNA
ggctggtctcgaactcctgg

SEQ ID NO: 199251 - DNA, 20 bp, synthetic construct
  source 1..20: mol_type = other DNA
aggctggtctcgaactcctg

SEQ ID NO: 199252 - DNA, 20 bp, synthetic construct
  source 1..20: mol_type = other DNA
caggctggtctcgaactcct

SEQ ID NO: 199253 - DNA, 20 bp, synthetic construct
  source 1..20: mol_type = other DNA
ccaggctggtctcgaactcc

SEQ ID NO: 199254 - DNA, 20 bp, synthetic construct
  source 1..20: mol_type = other DNA
gccaggctggtctcgaactc

SEQ ID NO: 199255 - DNA, 20 bp, synthetic construct
  source 1..20: mol_type = other DNA
ggccaggctggtctcgaact

SEQ ID NO: 199256 - DNA, 20 bp, synthetic construct
  source 1..20: mol_type = other DNA
tggccaggctggtctcgaac

SEQ ID NO: 199257 - DNA, 20 bp, synthetic construct
  source 1..20: mol_type = other DNA
ttggccaggctggtctcgaa

SEQ ID NO: 199258 - DNA, 20 bp, synthetic construct
  source 1..20: mol_type = other DNA
gttggccaggctggtctcga

SEQ ID NO: 199259 - DNA, 20 bp, synthetic construct
  source 1..20: mol_type = other DNA
tgttggccaggctggtctcg

SEQ ID NO: 199260 - DNA, 20 bp, synthetic construct
  source 1..20: mol_type = other DNA
atgttggccaggctggtctc

SEQ ID NO: 199261 - DNA, 20 bp, synthetic construct
  source 1..20: mol_type = other DNA
catgttggccaggctggtct

SEQ ID NO: 199262 - DNA, 20 bp, synthetic construct
  source 1..20: mol_type = other DNA
ccatgttggccaggctggtc

SEQ ID NO: 199263 - DNA, 20 bp, synthetic construct
  source 1..20: mol_type = other DNA
accatgttggccaggctggt

SEQ ID NO: 199264 - DNA, 20 bp, synthetic construct
  source 1..20: mol_type = other DNA
caccatgttggccaggctgg

SEQ ID NO: 199265 - DNA, 20 bp, synthetic construct
  source 1..20: mol_type = other DNA
tcaccatgttggccaggctg

SEQ ID NO: 199266 - DNA, 20 bp, synthetic construct
  source 1..20: mol_type = other DNA
ttcaccatgttggccaggct

SEQ ID NO: 199267 - DNA, 20 bp, synthetic construct
  source 1..20: mol_type = other DNA
tttcaccatgttggccaggc

SEQ ID NO: 199268 - DNA, 20 bp, synthetic construct
  source 1..20: mol_type = other DNA
gtttcaccatgttggccagg

SEQ ID NO: 199269 - DNA, 20 bp, synthetic construct
  source 1..20: mol_type = other DNA
ggtttcaccatgttggccag

SEQ ID NO: 199270 - DNA, 20 bp, synthetic construct
  source 1..20: mol_type = other DNA
gggtttcaccatgttggcca

SEQ ID NO: 199271 - DNA, 20 bp, synthetic construct
  source 1..20: mol_type = other DNA
ggggtttcaccatgttggcc

SEQ ID NO: 199272 - DNA, 20 bp, synthetic construct
  source 1..20: mol_type = other DNA
tggggtttcaccatgttggc

SEQ ID NO: 199273 - DNA, 20 bp, synthetic construct
  source 1..20: mol_type = other DNA
atggggtttcaccatgttgg

SEQ ID NO: 199274 - DNA, 20 bp, synthetic construct
  source 1..20: mol_type = other DNA
gatggggtttcaccatgttg

SEQ ID NO: 199275 - DNA, 20 bp, synthetic construct
  source 1..20: mol_type = other DNA
agatggggtttcaccatgtt

SEQ ID NO: 199276 - DNA, 20 bp, synthetic construct
  source 1..20: mol_type = other DNA
gagatggggtttcaccatgt

SEQ ID NO: 199277 - DNA, 20 bp, synthetic construct
  source 1..20: mol_type = other DNA
agagatggggtttcaccatg

SEQ ID NO: 199278 - DNA, 20 bp, synthetic construct
  source 1..20: mol_type = other DNA
tagagatggggtttcaccat

SEQ ID NO: 199279 - DNA, 20 bp, synthetic construct
  source 1..20: mol_type = other DNA
gtagagatggggtttcacca

SEQ ID NO: 199280 - DNA, 20 bp, synthetic construct
  source 1..20: mol_type = other DNA
agtagagatggggtttcacc

SEQ ID NO: 199281 - DNA, 20 bp, synthetic construct
  source 1..20: mol_type = other DNA
tagtagagatggggtttcac

SEQ ID NO: 199282 - DNA, 20 bp, synthetic construct
  source 1..20: mol_type = other DNA
ttagtagagatggggtttca

SEQ ID NO: 199283 - DNA, 20 bp, synthetic construct
  source 1..20: mol_type = other DNA
tttagtagagatggggtttc

SEQ ID NO: 199284 - DNA, 20 bp, synthetic construct
  source 1..20: mol_type = other DNA
ttttagtagagatggggttt

SEQ ID NO: 199285 - DNA, 20 bp, synthetic construct
  source 1..20: mol_type = other DNA
tttttagtagagatggggtt

SEQ ID NO: 199286 - DNA, 20 bp, synthetic construct
  source 1..20: mol_type = other DNA
atttttagtagagatggggt

SEQ ID NO: 199287 - DNA, 20 bp, synthetic construct
  source 1..20: mol_type = other DNA
tatttttagtagagatgggg

SEQ ID NO: 199288 - DNA, 20 bp, synthetic construct
  source 1..20: mol_type = other DNA
ttatttttagtagagatggg

SEQ ID NO: 199289 - DNA, 20 bp, synthetic construct
  source 1..20: mol_type = other DNA
tttatttttagtagagatgg

SEQ ID NO: 199290 - DNA, 20 bp, synthetic construct
  source 1..20: mol_type = other DNA
ttttatttttagtagagatg

SEQ ID NO: 199291 - DNA, 20 bp, synthetic construct
  source 1..20: mol_type = other DNA
tttttatttttagtagagat

SEQ ID NO: 199292 - DNA, 20 bp, synthetic construct
  source 1..20: mol_type = other DNA
ttttttatttttagtagaga

SEQ ID NO: 199293 - DNA, 20 bp, synthetic construct
  source 1..20: mol_type = other DNA
tttttttatttttagtagag

SEQ ID NO: 199294 - DNA, 20 bp, synthetic construct
  source 1..20: mol_type = other DNA
atttttttatttttagtaga

SEQ ID NO: 199295 - DNA, 20 bp, synthetic construct
  source 1..20: mol_type = other DNA
aatttttttatttttagtag

SEQ ID NO: 199296 - DNA, 20 bp, synthetic construct
  source 1..20: mol_type = other DNA
taatttttttatttttagta

SEQ ID NO: 199297 - DNA, 20 bp, synthetic construct
  source 1..20: mol_type = other DNA
ctaatttttttatttttagt

SEQ ID NO: 199298 - DNA, 20 bp, synthetic construct
  source 1..20: mol_type = other DNA
gctaatttttttatttttag

SEQ ID NO: 199299 - DNA, 20 bp, synthetic construct
  source 1..20: mol_type = other DNA
ggctaatttttttattttta

SEQ ID NO: 199300 - DNA, 20 bp, synthetic construct
  source 1..20: mol_type = other DNA
tggctaatttttttattttt

SEQ ID NO: 199301 - DNA, 20 bp, synthetic construct
  source 1..20: mol_type = other DNA
atggctaatttttttatttt

SEQ ID NO: 199302 - DNA, 20 bp, synthetic construct
  source 1..20: mol_type = other DNA
catggctaatttttttattt

SEQ ID NO: 199303 - DNA, 20 bp, synthetic construct
  source 1..20: mol_type = other DNA
acatggctaatttttttatt

SEQ ID NO: 199304 - DNA, 20 bp, synthetic construct
  source 1..20: mol_type = other DNA
cacatggctaatttttttat

SEQ ID NO: 199305 - DNA, 20 bp, synthetic construct
  source 1..20: mol_type = other DNA
acacatggctaattttttta

SEQ ID NO: 199306 - DNA, 20 bp, synthetic construct
  source 1..20: mol_type = other DNA
cacacatggctaattttttt

SEQ ID NO: 199307 - DNA, 20 bp, synthetic construct
  source 1..20: mol_type = other DNA
ccacacatggctaatttttt

SEQ ID NO: 199308 - DNA, 20 bp, synthetic construct
  source 1..20: mol_type = other DNA
accacacatggctaattttt

SEQ ID NO: 199309 - DNA, 20 bp, synthetic construct
  source 1..20: mol_type = other DNA
caccacacatggctaatttt

SEQ ID NO: 199310 - DNA, 20 bp, synthetic construct
  source 1..20: mol_type = other DNA
ccaccacacatggctaattt

SEQ ID NO: 199311 - DNA, 20 bp, synthetic construct
  source 1..20: mol_type = other DNA
gccaccacacatggctaatt

SEQ ID NO: 199312 - DNA, 20 bp, synthetic construct
  source 1..20: mol_type = other DNA
tgccaccacacatggctaat

SEQ ID NO: 199313 - DNA, 20 bp, synthetic construct
  source 1..20: mol_type = other DNA
gtgccaccacacatggctaa

SEQ ID NO: 199314 - DNA, 20 bp, synthetic construct
  source 1..20: mol_type = other DNA
tgtgccaccacacatggcta

SEQ ID NO: 199315 - DNA, 20 bp, synthetic construct
  source 1..20: mol_type = other DNA
gtgtgccaccacacatggct

SEQ ID NO: 199316 - DNA, 20 bp, synthetic construct
  source 1..20: mol_type = other DNA
tgtgtgccaccacacatggc

SEQ ID NO: 199317 - DNA, 20 bp, synthetic construct
  source 1..20: mol_type = other DNA
atgtgtgccaccacacatgg

SEQ ID NO: 199318 - DNA, 20 bp, synthetic construct
  source 1..20: mol_type = other DNA
gatgtgtgccaccacacatg

SEQ ID NO: 199319 - DNA, 20 bp, synthetic construct
  source 1..20: mol_type = other DNA
agatgtgtgccaccacacat

SEQ ID NO: 199320 - DNA, 20 bp, synthetic construct
  source 1..20: mol_type = other DNA
cagatgtgtgccaccacaca

SEQ ID NO: 199321 - DNA, 20 bp, synthetic construct
  source 1..20: mol_type = other DNA
acagatgtgtgccaccacac

SEQ ID NO: 199322 - DNA, 20 bp, synthetic construct
  source 1..20: mol_type = other DNA
tacagatgtgtgccaccaca

SEQ ID NO: 199323 - DNA, 20 bp, synthetic construct
  source 1..20: mol_type = other DNA
ttacagatgtgtgccaccac

SEQ ID NO: 199324 - DNA, 20 bp, synthetic construct
  source 1..20: mol_type = other DNA
attacagatgtgtgccacca

SEQ ID NO: 199325 - DNA, 20 bp, synthetic construct
  source 1..20: mol_type = other DNA
gattacagatgtgtgccacc

SEQ ID NO: 199326 - DNA, 20 bp, synthetic construct
  source 1..20: mol_type = other DNA
ggattacagatgtgtgccac

SEQ ID NO: 199327 - DNA, 20 bp, synthetic construct
  source 1..20: mol_type = other DNA
gggattacagatgtgtgcca

SEQ ID NO: 199328 - DNA, 20 bp, synthetic construct
  source 1..20: mol_type = other DNA
tgggattacagatgtgtgcc

SEQ ID NO: 199329 - DNA, 20 bp, synthetic construct
  source 1..20: mol_type = other DNA
ctgggattacagatgtgtgc

SEQ ID NO: 199330 - DNA, 20 bp, synthetic construct
  source 1..20: mol_type = other DNA
gctgggattacagatgtgtg

SEQ ID NO: 199331 - DNA, 20 bp, synthetic construct
  source 1..20: mol_type = other DNA
agctgggattacagatgtgt

SEQ ID NO: 199332 - DNA, 20 bp, synthetic construct
  source 1..20: mol_type = other DNA
tagctgggattacagatgtg

SEQ ID NO: 199333 - DNA, 20 bp, synthetic construct
  source 1..20: mol_type = other DNA
gtagctgggattacagatgt

SEQ ID NO: 199334 - DNA, 20 bp, synthetic construct
  source 1..20: mol_type = other DNA
agtagctgggattacagatg

SEQ ID NO: 199335 - DNA, 20 bp, synthetic construct
  source 1..20: mol_type = other DNA
aagtagctgggattacagat

SEQ ID NO: 199336 - DNA, 20 bp, synthetic construct
  source 1..20: mol_type = other DNA
caagtagctgggattacaga

SEQ ID NO: 199337 - DNA, 20 bp, synthetic construct
  source 1..20: mol_type = other DNA
ccaagtagctgggattacag

SEQ ID NO: 199338 - DNA, 20 bp, synthetic construct
  source 1..20: mol_type = other DNA
cccaagtagctgggattaca

SEQ ID NO: 199339 - DNA, 20 bp, synthetic construct
  source 1..20: mol_type = other DNA
tcccaagtagctgggattac

SEQ ID NO: 199340 - DNA, 20 bp, synthetic construct
  source 1..20: mol_type = other DNA
ctcccaagtagctgggatta

SEQ ID NO: 199341 - DNA, 20 bp, synthetic construct
  source 1..20: mol_type = other DNA
cctcccaagtagctgggatt

SEQ ID NO: 199342 - DNA, 20 bp, synthetic construct
  source 1..20: mol_type = other DNA
gcctcccaagtagctgggat

SEQ ID NO: 199343 - DNA, 20 bp, synthetic construct
  source 1..20: mol_type = other DNA
agcctcccaagtagctggga

SEQ ID NO: 199344 - DNA, 20 bp, synthetic construct
  source 1..20: mol_type = other DNA
cagcctcccaagtagctggg

SEQ ID NO: 199345 - DNA, 20 bp, synthetic construct
  source 1..20: mol_type = other DNA
tcagcctcccaagtagctgg

SEQ ID NO: 199346 - DNA, 20 bp, synthetic construct
  source 1..20: mol_type = other DNA
ctcagcctcccaagtagctg

SEQ ID NO: 199347 - DNA, 20 bp, synthetic construct
  source 1..20: mol_type = other DNA
cctcagcctcccaagtagct

SEQ ID NO: 199348 - DNA, 20 bp, synthetic construct
  source 1..20: mol_type = other DNA
gcctcagcctcccaagtagc

SEQ ID NO: 199349 - DNA, 20 bp, synthetic construct
  source 1..20: mol_type = other DNA
tgcctcagcctcccaagtag

SEQ ID NO: 199350 - DNA, 20 bp, synthetic construct
  source 1..20: mol_type = other DNA
atgcctcagcctcccaagta

SEQ ID NO: 199351 - DNA, 20 bp, synthetic construct
  source 1..20: mol_type = other DNA
catgcctcagcctcccaagt

SEQ ID NO: 199352 - DNA, 20 bp, synthetic construct
  source 1..20: mol_type = other DNA
tcatgcctcagcctcccaag

SEQ ID NO: 199353 - DNA, 20 bp, synthetic construct
  source 1..20: mol_type = other DNA
ctcatgcctcagcctcccaa

SEQ ID NO: 199354 - DNA, 20 bp, synthetic construct
  source 1..20: mol_type = other DNA
tctcatgcctcagcctccca

SEQ ID NO: 199355 - DNA, 20 bp, synthetic construct
  source 1..20: mol_type = other DNA
ttctcatgcctcagcctccc

SEQ ID NO: 199356 - DNA, 20 bp, synthetic construct
  source 1..20: mol_type = other DNA
attctcatgcctcagcctcc

SEQ ID NO: 199357 - DNA, 20 bp, synthetic construct
  source 1..20: mol_type = other DNA
aattctcatgcctcagcctc

SEQ ID NO: 199358 - DNA, 20 bp, synthetic construct
  source 1..20: mol_type = other DNA
caattctcatgcctcagcct

SEQ ID NO: 199359 - DNA, 20 bp, synthetic construct
  source 1..20: mol_type = other DNA
gcaattctcatgcctcagcc

SEQ ID NO: 199360 - DNA, 20 bp, synthetic construct
  source 1..20: mol_type = other DNA
agcaattctcatgcctcagc

SEQ ID NO: 199361 - DNA, 20 bp, synthetic construct
  source 1..20: mol_type = other DNA
aagcaattctcatgcctcag

SEQ ID NO: 199362 - DNA, 20 bp, synthetic construct
  source 1..20: mol_type = other DNA
caagcaattctcatgcctca

SEQ ID NO: 199363 - DNA, 20 bp, synthetic construct
  source 1..20: mol_type = other DNA
tcaagcaattctcatgcctc

SEQ ID NO: 199364 - DNA, 20 bp, synthetic construct
  source 1..20: mol_type = other DNA
ttcaagcaattctcatgcct

SEQ ID NO: 199365 - DNA, 20 bp, synthetic construct
  source 1..20: mol_type = other DNA
gttcaagcaattctcatgcc

SEQ ID NO: 199366 - DNA, 20 bp, synthetic construct
  source 1..20: mol_type = other DNA
ggttcaagcaattctcatgc

SEQ ID NO: 199367 - DNA, 20 bp, synthetic construct
  source 1..20: mol_type = other DNA
gggttcaagcaattctcatg

SEQ ID NO: 199368 - DNA, 20 bp, synthetic construct
  source 1..20: mol_type = other DNA
tgggttcaagcaattctcat

SEQ ID NO: 199369 - DNA, 20 bp, synthetic construct
  source 1..20: mol_type = other DNA
ctgggttcaagcaattctca

SEQ ID NO: 199370 - DNA, 20 bp, synthetic construct
  source 1..20: mol_type = other DNA
cctgggttcaagcaattctc

SEQ ID NO: 199371 - DNA, 20 bp, synthetic construct
  source 1..20: mol_type = other DNA
tcctgggttcaagcaattct

SEQ ID NO: 199372 - DNA, 20 bp, synthetic construct
  source 1..20: mol_type = other DNA
ctcctgggttcaagcaattc

SEQ ID NO: 199373 - DNA, 20 bp, synthetic construct
  source 1..20: mol_type = other DNA
cctcctgggttcaagcaatt

SEQ ID NO: 199374 - DNA, 20 bp, synthetic construct
  source 1..20: mol_type = other DNA
acctcctgggttcaagcaat

SEQ ID NO: 199375 - DNA, 20 bp, synthetic construct
  source 1..20: mol_type = other DNA
cacctcctgggttcaagcaa

SEQ ID NO: 199376 - DNA, 20 bp, synthetic construct
  source 1..20: mol_type = other DNA
ccacctcctgggttcaagca

SEQ ID NO: 199377 - DNA, 20 bp, synthetic construct
  source 1..20: mol_type = other DNA
tccacctcctgggttcaagc

SEQ ID NO: 199378 - DNA, 20 bp, synthetic construct
  source 1..20: mol_type = other DNA
ctccacctcctgggttcaag

SEQ ID NO: 199379 - DNA, 20 bp, synthetic construct
  source 1..20: mol_type = other DNA
cctccacctcctgggttcaa

SEQ ID NO: 199380 - DNA, 20 bp, synthetic construct
  source 1..20: mol_type = other DNA
acctccacctcctgggttca

SEQ ID NO: 199381 - DNA, 20 bp, synthetic construct
  source 1..20: mol_type = other DNA
aacctccacctcctgggttc

SEQ ID NO: 199382 - DNA, 20 bp, synthetic construct
  source 1..20: mol_type = other DNA
caacctccacctcctgggtt

SEQ ID NO: 199383 - DNA, 20 bp, synthetic construct
  source 1..20: mol_type = other DNA
gcaacctccacctcctgggt

SEQ ID NO: 199384 - DNA, 20 bp, synthetic construct
  source 1..20: mol_type = other DNA
tgcaacctccacctcctggg

SEQ ID NO: 199385 - DNA, 20 bp, synthetic construct
  source 1..20: mol_type = other DNA
ctgcaacctccacctcctgg

SEQ ID NO: 199386 - DNA, 20 bp, synthetic construct
  source 1..20: mol_type = other DNA
actgcaacctccacctcctg

SEQ ID NO: 199387 - DNA, 20 bp, synthetic construct
  source 1..20: mol_type = other DNA
cactgcaacctccacctcct

SEQ ID NO: 199388 - DNA, 20 bp, synthetic construct
  source 1..20: mol_type = other DNA
tcactgcaacctccacctcc

SEQ ID NO: 199389 - DNA, 20 bp, synthetic construct
  source 1..20: mol_type = other DNA
ctcactgcaacctccacctc

SEQ ID NO: 199390 - DNA, 20 bp, synthetic construct
  source 1..20: mol_type = other DNA
gctcactgcaacctccacct

SEQ ID NO: 199391 - DNA, 20 bp, synthetic construct
  source 1..20: mol_type = other DNA
ggctcactgcaacctccacc

SEQ ID NO: 199392 - DNA, 20 bp, synthetic construct
  source 1..20: mol_type = other DNA
tggctcactgcaacctccac

SEQ ID NO: 199393 - DNA, 20 bp, synthetic construct
  source 1..20: mol_type = other DNA
ttggctcactgcaacctcca

SEQ ID NO: 199394 - DNA, 20 bp, synthetic construct
  source 1..20: mol_type = other DNA
cttggctcactgcaacctcc

SEQ ID NO: 199395 - DNA, 20 bp, synthetic construct
  source 1..20: mol_type = other DNA
tcttggctcactgcaacctc

SEQ ID NO: 199396 - DNA, 20 bp, synthetic construct
  source 1..20: mol_type = other DNA
atcttggctcactgcaacct

SEQ ID NO: 199397 - DNA, 20 bp, synthetic construct
  source 1..20: mol_type = other DNA
gatcttggctcactgcaacc

SEQ ID NO: 199398 - DNA, 20 bp, synthetic construct
  source 1..20: mol_type = other DNA
cgatcttggctcactgcaac

SEQ ID NO: 199399 - DNA, 20 bp, synthetic construct
  source 1..20: mol_type = other DNA
acgatcttggctcactgcaa

SEQ ID NO: 199400 - DNA, 20 bp, synthetic construct
  source 1..20: mol_type = other DNA
cacgatcttggctcactgca

SEQ ID NO: 199401 - DNA, 20 bp, synthetic construct
  source 1..20: mol_type = other DNA
gcacgatcttggctcactgc

SEQ ID NO: 199402 - DNA, 20 bp, synthetic construct
  source 1..20: mol_type = other DNA
ggcacgatcttggctcactg

SEQ ID NO: 199403 - DNA, 20 bp, synthetic construct
  source 1..20: mol_type = other DNA
tggcacgatcttggctcact

SEQ ID NO: 199404 - DNA, 20 bp, synthetic construct
  source 1..20: mol_type = other DNA
gtggcacgatcttggctcac

SEQ ID NO: 199405 - DNA, 20 bp, synthetic construct
  source 1..20: mol_type = other DNA
agtggcacgatcttggctca

SEQ ID NO: 199406 - DNA, 20 bp, synthetic construct
  source 1..20: mol_type = other DNA
cagtggcacgatcttggctc

SEQ ID NO: 199407 - DNA, 20 bp, synthetic construct
  source 1..20: mol_type = other DNA
gcagtggcacgatcttggct

SEQ ID NO: 199408 - DNA, 20 bp, synthetic construct
  source 1..20: mol_type = other DNA
tgcagtggcacgatcttggc

SEQ ID NO: 199409 - DNA, 20 bp, synthetic construct
  source 1..20: mol_type = other DNA
gtgcagtggcacgatcttgg

SEQ ID NO: 199410 - DNA, 20 bp, synthetic construct
  source 1..20: mol_type = other DNA
agtgcagtggcacgatcttg

SEQ ID NO: 199411 - DNA, 20 bp, synthetic construct
  source 1..20: mol_type = other DNA
gagtgcagtggcacgatctt

SEQ ID NO: 199412 - DNA, 20 bp, synthetic construct
  source 1..20: mol_type = other DNA
agagtgcagtggcacgatct

SEQ ID NO: 199413 - DNA, 20 bp, synthetic construct
  source 1..20: mol_type = other DNA
tagagtgcagtggcacgatc

SEQ ID NO: 199414 - DNA, 20 bp, synthetic construct
  source 1..20: mol_type = other DNA
ctagagtgcagtggcacgat

SEQ ID NO: 199415 - DNA, 20 bp, synthetic construct
  source 1..20: mol_type = other DNA
actagagtgcagtggcacga

SEQ ID NO: 199416 - DNA, 20 bp, synthetic construct
  source 1..20: mol_type = other DNA
gactagagtgcagtggcacg

SEQ ID NO: 199417 - DNA, 20 bp, synthetic construct
  source 1..20: mol_type = other DNA
agactagagtgcagtggcac

SEQ ID NO: 199418 - DNA, 20 bp, synthetic construct
  source 1..20: mol_type = other DNA
cagactagagtgcagtggca

SEQ ID NO: 199419 - DNA, 20 bp, synthetic construct
  source 1..20: mol_type = other DNA
ccagactagagtgcagtggc

SEQ ID NO: 199420 - DNA, 20 bp, synthetic construct
  source 1..20: mol_type = other DNA
cccagactagagtgcagtgg

SEQ ID NO: 199421 - DNA, 20 bp, synthetic construct
  source 1..20: mol_type = other DNA
gcccagactagagtgcagtg

SEQ ID NO: 199422 - DNA, 20 bp, synthetic construct
  source 1..20: mol_type = other DNA
tgcccagactagagtgcagt

SEQ ID NO: 199423 - DNA, 20 bp, synthetic construct
  source 1..20: mol_type = other DNA
ttgcccagactagagtgcag

SEQ ID NO: 199424 - DNA, 20 bp, synthetic construct
  source 1..20: mol_type = other DNA
gttgcccagactagagtgca

SEQ ID NO: 199425 - DNA, 20 bp, synthetic construct
  source 1..20: mol_type = other DNA
tgttgcccagactagagtgc

SEQ ID NO: 199426 - DNA, 20 bp, synthetic construct
  source 1..20: mol_type = other DNA
ctgttgcccagactagagtg

SEQ ID NO: 199427 - DNA, 20 bp, synthetic construct
  source 1..20: mol_type = other DNA
tctgttgcccagactagagt

SEQ ID NO: 199428 - DNA, 20 bp, synthetic construct
  source 1..20: mol_type = other DNA
ctctgttgcccagactagag

SEQ ID NO: 199429 - DNA, 20 bp, synthetic construct
  source 1..20: mol_type = other DNA
actctgttgcccagactaga

SEQ ID NO: 199430 - DNA, 20 bp, synthetic construct
  source 1..20: mol_type = other DNA
tactctgttgcccagactag

SEQ ID NO: 199431 - DNA, 20 bp, synthetic construct
  source 1..20: mol_type = other DNA
ttactctgttgcccagacta

SEQ ID NO: 199432 - DNA, 20 bp, synthetic construct
  source 1..20: mol_type = other DNA
cttactctgttgcccagact

SEQ ID NO: 199433 - DNA, 20 bp, synthetic construct
  source 1..20: mol_type = other DNA
tcttactctgttgcccagac

SEQ ID NO: 199434 - DNA, 20 bp, synthetic construct
  source 1..20: mol_type = other DNA
gtcttactctgttgcccaga

SEQ ID NO: 199435 - DNA, 20 bp, synthetic construct
  source 1..20: mol_type = other DNA
agtcttactctgttgcccag

SEQ ID NO: 199436 - DNA, 20 bp, synthetic construct
  source 1..20: mol_type = other DNA
gagtcttactctgttgccca

SEQ ID NO: 199437 - DNA, 20 bp, synthetic construct
  source 1..20: mol_type = other DNA
agagtcttactctgttgccc

SEQ ID NO: 199438 - DNA, 20 bp, synthetic construct
  source 1..20: mol_type = other DNA
tagagtcttactctgttgcc

SEQ ID NO: 199439 - DNA, 20 bp, synthetic construct
  source 1..20: mol_type = other DNA
atagagtcttactctgttgc

SEQ ID NO: 199440 - DNA, 20 bp, synthetic construct
  source 1..20: mol_type = other DNA
catagagtcttactctgttg

SEQ ID NO: 199441 - DNA, 20 bp, synthetic construct
  source 1..20: mol_type = other DNA
acatagagtcttactctgtt

SEQ ID NO: 199442 - DNA, 20 bp, synthetic construct
  source 1..20: mol_type = other DNA
gacatagagtcttactctgt

SEQ ID NO: 199443 - DNA, 20 bp, synthetic construct
  source 1..20: mol_type = other DNA
tgacatagagtcttactctg

SEQ ID NO: 199444 - DNA, 20 bp, synthetic construct
  source 1..20: mol_type = other DNA
ttgacatagagtcttactct

SEQ ID NO: 199445 - DNA, 20 bp, synthetic construct
  source 1..20: mol_type = other DNA
tttgacatagagtcttactc

SEQ ID NO: 199446 - DNA, 20 bp, synthetic construct
  source 1..20: mol_type = other DNA
ctttgacatagagtcttact

SEQ ID NO: 199447 - DNA, 20 bp, synthetic construct
  source 1..20: mol_type = other DNA
tctttgacatagagtcttac

SEQ ID NO: 199448 - DNA, 20 bp, synthetic construct
  source 1..20: mol_type = other DNA
ttctttgacatagagtctta

SEQ ID NO: 199449 - DNA, 20 bp, synthetic construct
  source 1..20: mol_type = other DNA
tttctttgacatagagtctt

SEQ ID NO: 199450 - DNA, 20 bp, synthetic construct
  source 1..20: mol_type = other DNA
ttttctttgacatagagtct

SEQ ID NO: 199451 - DNA, 20 bp, synthetic construct
  source 1..20: mol_type = other DNA
tttttctttgacatagagtc

SEQ ID NO: 199452 - DNA, 20 bp, synthetic construct
  source 1..20: mol_type = other DNA
ttttttctttgacatagagt

SEQ ID NO: 199453 - DNA, 20 bp, synthetic construct
  source 1..20: mol_type = other DNA
tttttttctttgacatagag

SEQ ID NO: 199454 - DNA, 20 bp, synthetic construct
  source 1..20: mol_type = other DNA
ttttttttctttgacataga

SEQ ID NO: 199455 - DNA, 20 bp, synthetic construct
  source 1..20: mol_type = other DNA
tttttttttctttgacatag

SEQ ID NO: 199456 - DNA, 20 bp, synthetic construct
  source 1..20: mol_type = other DNA
ttttttttttctttgacata

SEQ ID NO: 199457 - DNA, 20 bp, synthetic construct
  source 1..20: mol_type = other DNA
tttttttttttctttgacat

SEQ ID NO: 199458 - DNA, 20 bp, synthetic construct
  source 1..20: mol_type = other DNA
ttttttttttttctttgaca

SEQ ID NO: 199459 - DNA, 20 bp, synthetic construct
  source 1..20: mol_type = other DNA
cttttttttttttctttgac

SEQ ID NO: 199460 - DNA, 20 bp, synthetic construct
  source 1..20: mol_type = other DNA
tcttttttttttttctttga

SEQ ID NO: 199461 - DNA, 20 bp, synthetic construct
  source 1..20: mol_type = other DNA
ttcttttttttttttctttg

SEQ ID NO: 199462 - DNA, 20 bp, synthetic construct
  source 1..20: mol_type = other DNA
tttcttttttttttttcttt

SEQ ID NO: 199463 - DNA, 20 bp, synthetic construct
  source 1..20: mol_type = other DNA
ttttcttttttttttttctt

SEQ ID NO: 199464 - DNA, 20 bp, synthetic construct
  source 1..20: mol_type = other DNA
cttttcttttttttttttct

SEQ ID NO: 199465 - DNA, 20 bp, synthetic construct
  source 1..20: mol_type = other DNA
gcttttcttttttttttttc

SEQ ID NO: 199466 - DNA, 20 bp, synthetic construct
  source 1..20: mol_type = other DNA
ggcttttctttttttttttt

SEQ ID NO: 199467 - DNA, 20 bp, synthetic construct
  source 1..20: mol_type = other DNA
aggcttttcttttttttttt

SEQ ID NO: 199468 - DNA, 20 bp, synthetic construct
  source 1..20: mol_type = other DNA
aaggcttttctttttttttt

SEQ ID NO: 199469 - DNA, 20 bp, synthetic construct
  source 1..20: mol_type = other DNA
aaaggcttttcttttttttt

SEQ ID NO: 199470 - DNA, 20 bp, synthetic construct
  source 1..20: mol_type = other DNA
aaaaggcttttctttttttt

SEQ ID NO: 199471 - DNA, 20 bp, synthetic construct
  source 1..20: mol_type = other DNA
aaaaaggcttttcttttttt

SEQ ID NO: 199472 - DNA, 20 bp, synthetic construct
  source 1..20: mol_type = other DNA
taaaaaggcttttctttttt

SEQ ID NO: 199473 - DNA, 20 bp, synthetic construct
  source 1..20: mol_type = other DNA
ttaaaaaggcttttcttttt

SEQ ID NO: 199474 - DNA, 20 bp, synthetic construct
  source 1..20: mol_type = other DNA
tttaaaaaggcttttctttt

SEQ ID NO: 199475 - DNA, 20 bp, synthetic construct
  source 1..20: mol_type = other DNA
gtttaaaaaggcttttcttt

SEQ ID NO: 199476 - DNA, 20 bp, synthetic construct
  source 1..20: mol_type = other DNA
tgtttaaaaaggcttttctt

SEQ ID NO: 199477 - DNA, 20 bp, synthetic construct
  source 1..20: mol_type = other DNA
ctgtttaaaaaggcttttct

SEQ ID NO: 199478 - DNA, 20 bp, synthetic construct
  source 1..20: mol_type = other DNA
actgtttaaaaaggcttttc

SEQ ID NO: 199479 - DNA, 20 bp, synthetic construct
  source 1..20: mol_type = other DNA
tactgtttaaaaaggctttt

SEQ ID NO: 199480 - DNA, 20 bp, synthetic construct
  source 1..20: mol_type = other DNA
ctactgtttaaaaaggcttt

SEQ ID NO: 199481 - DNA, 20 bp, synthetic construct
  source 1..20: mol_type = other DNA
gctactgtttaaaaaggctt

SEQ ID NO: 199482 - DNA, 20 bp, synthetic construct
  source 1..20: mol_type = other DNA
tgctactgtttaaaaaggct

SEQ ID NO: 199483 - DNA, 20 bp, synthetic construct
  source 1..20: mol_type = other DNA
ctgctactgtttaaaaaggc

SEQ ID NO: 199484 - DNA, 20 bp, synthetic construct
  source 1..20: mol_type = other DNA
tctgctactgtttaaaaagg

SEQ ID NO: 199485 - DNA, 20 bp, synthetic construct
  source 1..20: mol_type = other DNA
gtctgctactgtttaaaaag

SEQ ID NO: 199486 - DNA, 20 bp, synthetic construct
  source 1..20: mol_type = other DNA
tgtctgctactgtttaaaaa

SEQ ID NO: 199487 - DNA, 20 bp, synthetic construct
  source 1..20: mol_type = other DNA
atgtctgctactgtttaaaa

SEQ ID NO: 199488 - DNA, 20 bp, synthetic construct
  source 1..20: mol_type = other DNA
tatgtctgctactgtttaaa

SEQ ID NO: 199489 - DNA, 20 bp, synthetic construct
  source 1..20: mol_type = other DNA
ttatgtctgctactgtttaa

SEQ ID NO: 199490 - DNA, 20 bp, synthetic construct
  source 1..20: mol_type = other DNA
gttatgtctgctactgttta

SEQ ID NO: 199491 - DNA, 20 bp, synthetic construct
  source 1..20: mol_type = other DNA
agttatgtctgctactgttt

SEQ ID NO: 199492 - DNA, 20 bp, synthetic construct
  source 1..20: mol_type = other DNA
tagttatgtctgctactgtt

SEQ ID NO: 199493 - DNA, 20 bp, synthetic construct
  source 1..20: mol_type = other DNA
atagttatgtctgctactgt

SEQ ID NO: 199494 - DNA, 20 bp, synthetic construct
  source 1..20: mol_type = other DNA
tatagttatgtctgctactg

SEQ ID NO: 199495 - DNA, 20 bp, synthetic construct
  source 1..20: mol_type = other DNA
atatagttatgtctgctact

SEQ ID NO: 199496 - DNA, 20 bp, synthetic construct
  source 1..20: mol_type = other DNA
tatatagttatgtctgctac

SEQ ID NO: 199497 - DNA, 20 bp, synthetic construct
  source 1..20: mol_type = other DNA
ttatatagttatgtctgcta

SEQ ID NO: 199498 - DNA, 20 bp, synthetic construct
  source 1..20: mol_type = other DNA
attatatagttatgtctgct

SEQ ID NO: 199499 - DNA, 20 bp, synthetic construct
  source 1..20: mol_type = other DNA
gattatatagttatgtctgc

SEQ ID NO: 199500 - DNA, 20 bp, synthetic construct
  source 1..20: mol_type = other DNA
ggattatatagttatgtctg

SEQ ID NO: 199501 - DNA, 20 bp, synthetic construct
  source 1..20: mol_type = other DNA
aggattatatagttatgtct

SEQ ID NO: 199502 - DNA, 20 bp, synthetic construct
  source 1..20: mol_type = other DNA
aaggattatatagttatgtc

SEQ ID NO: 199503 - DNA, 20 bp, synthetic construct
  source 1..20: mol_type = other DNA
taaggattatatagttatgt

SEQ ID NO: 199504 - DNA, 20 bp, synthetic construct
  source 1..20: mol_type = other DNA
gtaaggattatatagttatg

SEQ ID NO: 199505 - DNA, 20 bp, synthetic construct
  source 1..20: mol_type = other DNA
agtaaggattatatagttat

SEQ ID NO: 199506 - DNA, 20 bp, synthetic construct
  source 1..20: mol_type = other DNA
tagtaaggattatatagtta

SEQ ID NO: 199507 - DNA, 20 bp, synthetic construct
  source 1..20: mol_type = other DNA
ttagtaaggattatatagtt

SEQ ID NO: 199508 - DNA, 20 bp, synthetic construct
  source 1..20: mol_type = other DNA
cttagtaaggattatatagt

SEQ ID NO: 199509 - DNA, 20 bp, synthetic construct
  source 1..20: mol_type = other DNA
gcttagtaaggattatatag

SEQ ID NO: 199510 - DNA, 20 bp, synthetic construct
  source 1..20: mol_type = other DNA
agcttagtaaggattatata

SEQ ID NO: 199511 - DNA, 20 bp, synthetic construct
  source 1..20: mol_type = other DNA
cagcttagtaaggattatat

SEQ ID NO: 199512 - DNA, 20 bp, synthetic construct
  source 1..20: mol_type = other DNA
acagcttagtaaggattata

SEQ ID NO: 199513 - DNA, 20 bp, synthetic construct
  source 1..20: mol_type = other DNA
gacagcttagtaaggattat

SEQ ID NO: 199514 - DNA, 20 bp, synthetic construct
  source 1..20: mol_type = other DNA
cgacagcttagtaaggatta

SEQ ID NO: 199515 - DNA, 20 bp, synthetic construct
  source 1..20: mol_type = other DNA
ccgacagcttagtaaggatt

SEQ ID NO: 199516 - DNA, 20 bp, synthetic construct
  source 1..20: mol_type = other DNA
accgacagcttagtaaggat

SEQ ID NO: 199517 - DNA, 20 bp, synthetic construct
  source 1..20: mol_type = other DNA
gaccgacagcttagtaagga

SEQ ID NO: 199518 - DNA, 20 bp, synthetic construct
  source 1..20: mol_type = other DNA
tgaccgacagcttagtaagg

SEQ ID NO: 199519 - DNA, 20 bp, synthetic construct
  source 1..20: mol_type = other DNA
ttgaccgacagcttagtaag

SEQ ID NO: 199520 - DNA, 20 bp, synthetic construct
  source 1..20: mol_type = other DNA
tttgaccgacagcttagtaa

SEQ ID NO: 199521 - DNA, 20 bp, synthetic construct
  source 1..20: mol_type = other DNA
atttgaccgacagcttagta

SEQ ID NO: 199522 - DNA, 20 bp, synthetic construct
  source 1..20: mol_type = other DNA
aatttgaccgacagcttagt

SEQ ID NO: 199523 - DNA, 20 bp, synthetic construct
  source 1..20: mol_type = other DNA
aaatttgaccgacagcttag

SEQ ID NO: 199524 - DNA, 20 bp, synthetic construct
  source 1..20: mol_type = other DNA
aaaatttgaccgacagctta

SEQ ID NO: 199525 - DNA, 20 bp, synthetic construct
  source 1..20: mol_type = other DNA
aaaaatttgaccgacagctt

SEQ ID NO: 199526 - DNA, 20 bp, synthetic construct
  source 1..20: mol_type = other DNA
taaaaatttgaccgacagct

SEQ ID NO: 199527 - DNA, 20 bp, synthetic construct
  source 1..20: mol_type = other DNA
ataaaaatttgaccgacagc

SEQ ID NO: 199528 - DNA, 20 bp, synthetic construct
  source 1..20: mol_type = other DNA
aataaaaatttgaccgacag

SEQ ID NO: 199529 - DNA, 20 bp, synthetic construct
  source 1..20: mol_type = other DNA
aaataaaaatttgaccgaca

SEQ ID NO: 199530 - DNA, 20 bp, synthetic construct
  source 1..20: mol_type = other DNA
taaataaaaatttgaccgac

SEQ ID NO: 199531 - DNA, 20 bp, synthetic construct
  source 1..20: mol_type = other DNA
ataaataaaaatttgaccga

SEQ ID NO: 199532 - DNA, 20 bp, synthetic construct
  source 1..20: mol_type = other DNA
tataaataaaaatttgaccg

SEQ ID NO: 199533 - DNA, 20 bp, synthetic construct
  source 1..20: mol_type = other DNA
atataaataaaaatttgacc

SEQ ID NO: 199534 - DNA, 20 bp, synthetic construct
  source 1..20: mol_type = other DNA
tatataaataaaaatttgac

SEQ ID NO: 199535 - DNA, 20 bp, synthetic construct
  source 1..20: mol_type = other DNA
atatataaataaaaatttga

SEQ ID NO: 199536 - DNA, 20 bp, synthetic construct
  source 1..20: mol_type = other DNA
aatatataaataaaaatttg

SEQ ID NO: 199537 - DNA, 20 bp, synthetic construct
  source 1..20: mol_type = other DNA
aaatatataaataaaaattt

SEQ ID NO: 199538 - DNA, 20 bp, synthetic construct
  source 1..20: mol_type = other DNA
taaatatataaataaaaatt

SEQ ID NO: 199539 - DNA, 20 bp, synthetic construct
  source 1..20: mol_type = other DNA
ataaatatataaataaaaat

SEQ ID NO: 199540 - DNA, 20 bp, synthetic construct
  source 1..20: mol_type = other DNA
aataaatatataaataaaaa

SEQ ID NO: 199541 - DNA, 20 bp, synthetic construct
  source 1..20: mol_type = other DNA
aaataaatatataaataaaa

SEQ ID NO: 199542 - DNA, 20 bp, synthetic construct
  source 1..20: mol_type = other DNA
aaaataaatatataaataaa

SEQ ID NO: 199543 - DNA, 20 bp, synthetic construct
  source 1..20: mol_type = other DNA
taaaataaatatataaataa

SEQ ID NO: 199544 - DNA, 20 bp, synthetic construct
  source 1..20: mol_type = other DNA
ataaaataaatatataaata

SEQ ID NO: 199545 - DNA, 20 bp, synthetic construct
  source 1..20: mol_type = other DNA
aataaaataaatatataaat

SEQ ID NO: 199546 - DNA, 20 bp, synthetic construct
  source 1..20: mol_type = other DNA
gaataaaataaatatataaa

SEQ ID NO: 199547 - DNA, 20 bp, synthetic construct
  source 1..20: mol_type = other DNA
tgaataaaataaatatataa

SEQ ID NO: 199548 - DNA, 20 bp, synthetic construct
  source 1..20: mol_type = other DNA
atgaataaaataaatatata

SEQ ID NO: 199549 - DNA, 20 bp, synthetic construct
  source 1..20: mol_type = other DNA
aatgaataaaataaatatat

SEQ ID NO: 199550 - DNA, 20 bp, synthetic construct
  source 1..20: mol_type = other DNA
aaatgaataaaataaatata

SEQ ID NO: 199551 - DNA, 20 bp, synthetic construct
  source 1..20: mol_type = other DNA
taaatgaataaaataaatat

SEQ ID NO: 199552 - DNA, 20 bp, synthetic construct
  source 1..20: mol_type = other DNA
ataaatgaataaaataaata

SEQ ID NO: 199553 - DNA, 20 bp, synthetic construct
  source 1..20: mol_type = other DNA
aataaatgaataaaataaat

SEQ ID NO: 199554 - DNA, 20 bp, synthetic construct
  source 1..20: mol_type = other DNA
taataaatgaataaaataaa

SEQ ID NO: 199555 - DNA, 20 bp, synthetic construct
  source 1..20: mol_type = other DNA
ataataaatgaataaaataa

SEQ ID NO: 199556 - DNA, 20 bp, synthetic construct
  source 1..20: mol_type = other DNA
aataataaatgaataaaata

SEQ ID NO: 199557 - DNA, 20 bp, synthetic construct
  source 1..20: mol_type = other DNA
aaataataaatgaataaaat

SEQ ID NO: 199558 - DNA, 20 bp, synthetic construct
  source 1..20: mol_type = other DNA
aaaataataaatgaataaaa

SEQ ID NO: 199559 - DNA, 20 bp, synthetic construct
  source 1..20: mol_type = other DNA
aaaaataataaatgaataaa

SEQ ID NO: 199560 - DNA, 20 bp, synthetic construct
  source 1..20: mol_type = other DNA
taaaaataataaatgaataa

SEQ ID NO: 199561 - DNA, 20 bp, synthetic construct
  source 1..20: mol_type = other DNA
ctaaaaataataaatgaata

SEQ ID NO: 199562 - DNA, 20 bp, synthetic construct
  source 1..20: mol_type = other DNA
tctaaaaataataaatgaat

SEQ ID NO: 199563 - DNA, 20 bp, synthetic construct
  source 1..20: mol_type = other DNA
gtctaaaaataataaatgaa

SEQ ID NO: 199564 - DNA, 20 bp, synthetic construct
  source 1..20: mol_type = other DNA
tgtctaaaaataataaatga

SEQ ID NO: 199565 - DNA, 20 bp, synthetic construct
  source 1..20: mol_type = other DNA
ctgtctaaaaataataaatg

SEQ ID NO: 199566 - DNA, 20 bp, synthetic construct
  source 1..20: mol_type = other DNA
cctgtctaaaaataataaat

SEQ ID NO: 199567 - DNA, 20 bp, synthetic construct
  source 1..20: mol_type = other DNA
ccctgtctaaaaataataaa

SEQ ID NO: 199568 - DNA, 20 bp, synthetic construct
  source 1..20: mol_type = other DNA
accctgtctaaaaataataa

SEQ ID NO: 199569 - DNA, 20 bp, synthetic construct
  source 1..20: mol_type = other DNA
gaccctgtctaaaaataata

SEQ ID NO: 199570 - DNA, 20 bp, synthetic construct
  source 1..20: mol_type = other DNA
agaccctgtctaaaaataat

SEQ ID NO: 199571 - DNA, 20 bp, synthetic construct
  source 1..20: mol_type = other DNA
gagaccctgtctaaaaataa

SEQ ID NO: 199572 - DNA, 20 bp, synthetic construct
  source 1..20: mol_type = other DNA
tgagaccctgtctaaaaata

SEQ ID NO: 199573 - DNA, 20 bp, synthetic construct
  source 1..20: mol_type = other DNA
gtgagaccctgtctaaaaat

SEQ ID NO: 199574 - DNA, 20 bp, synthetic construct
  source 1..20: mol_type = other DNA
agtgagaccctgtctaaaaa

SEQ ID NO: 199575 - DNA, 20 bp, synthetic construct
  source 1..20: mol_type = other DNA
gagtgagaccctgtctaaaa

SEQ ID NO: 199576 - DNA, 20 bp, synthetic construct
  source 1..20: mol_type = other DNA
agagtgagaccctgtctaaa

SEQ ID NO: 199577 - DNA, 20 bp, synthetic construct
  source 1..20: mol_type = other DNA
cagagtgagaccctgtctaa

SEQ ID NO: 199578 - DNA, 20 bp, synthetic construct
  source 1..20: mol_type = other DNA
acagagtgagaccctgtcta

SEQ ID NO: 199579 - DNA, 20 bp, synthetic construct
  source 1..20: mol_type = other DNA
aacagagtgagaccctgtct

SEQ ID NO: 199580 - DNA, 20 bp, synthetic construct
  source 1..20: mol_type = other DNA
caacagagtgagaccctgtc

SEQ ID NO: 199581 - DNA, 20 bp, synthetic construct
  source 1..20: mol_type = other DNA
gcaacagagtgagaccctgt

SEQ ID NO: 199582 - DNA, 20 bp, synthetic construct
  source 1..20: mol_type = other DNA
ggcaacagagtgagaccctg

SEQ ID NO: 199583 - DNA, 20 bp, synthetic construct
  source 1..20: mol_type = other DNA
gggcaacagagtgagaccct

SEQ ID NO: 199584 - DNA, 20 bp, synthetic construct
  source 1..20: mol_type = other DNA
tgggcaacagagtgagaccc

SEQ ID NO: 199585 - DNA, 20 bp, synthetic construct
  source 1..20: mol_type = other DNA
ctgggcaacagagtgagacc

SEQ ID NO: 199586 - DNA, 20 bp, synthetic construct
  source 1..20: mol_type = other DNA
cctgggcaacagagtgagac

SEQ ID NO: 199587 - DNA, 20 bp, synthetic construct
  source 1..20: mol_type = other DNA
gcctgggcaacagagtgaga

SEQ ID NO: 199588 - DNA, 20 bp, synthetic construct
  source 1..20: mol_type = other DNA
agcctgggcaacagagtgag

SEQ ID NO: 199589 - DNA, 20 bp, synthetic construct
  source 1..20: mol_type = other DNA
cagcctgggcaacagagtga

SEQ ID NO: 199590 - DNA, 20 bp, synthetic construct
  source 1..20: mol_type = other DNA
ccagcctgggcaacagagtg

SEQ ID NO: 199591 - DNA, 20 bp, synthetic construct
  source 1..20: mol_type = other DNA
tccagcctgggcaacagagt

SEQ ID NO: 199592 - DNA, 20 bp, synthetic construct
  source 1..20: mol_type = other DNA
ctccagcctgggcaacagag

SEQ ID NO: 199593 - DNA, 20 bp, synthetic construct
  source 1..20: mol_type = other DNA
actccagcctgggcaacaga

SEQ ID NO: 199594 - DNA, 20 bp, synthetic construct
  source 1..20: mol_type = other DNA
tactccagcctgggcaacag

SEQ ID NO: 199595 - DNA, 20 bp, synthetic construct
  source 1..20: mol_type = other DNA
gtactccagcctgggcaaca

SEQ ID NO: 199596 - DNA, 20 bp, synthetic construct
  source 1..20: mol_type = other DNA
tgtactccagcctgggcaac

SEQ ID NO: 199597 - DNA, 20 bp, synthetic construct
  source 1..20: mol_type = other DNA
ctgtactccagcctgggcaa

SEQ ID NO: 199598 - DNA, 20 bp, synthetic construct
  source 1..20: mol_type = other DNA
actgtactccagcctgggca

SEQ ID NO: 199599 - DNA, 20 bp, synthetic construct
  source 1..20: mol_type = other DNA
cactgtactccagcctgggc

SEQ ID NO: 199600 - DNA, 20 bp, synthetic construct
  source 1..20: mol_type = other DNA
ccactgtactccagcctggg

SEQ ID NO: 199601 - DNA, 20 bp, synthetic construct
  source 1..20: mol_type = other DNA
gccactgtactccagcctgg

SEQ ID NO: 199602 - DNA, 20 bp, synthetic construct
  source 1..20: mol_type = other DNA
cgccactgtactccagcctg

SEQ ID NO: 199603 - DNA, 20 bp, synthetic construct
  source 1..20: mol_type = other DNA
acgccactgtactccagcct

SEQ ID NO: 199604 - DNA, 20 bp, synthetic construct
  source 1..20: mol_type = other DNA
cacgccactgtactccagcc

SEQ ID NO: 199605 - DNA, 20 bp, synthetic construct
  source 1..20: mol_type = other DNA
tcacgccactgtactccagc

SEQ ID NO: 199606 - DNA, 20 bp, synthetic construct
  source 1..20: mol_type = other DNA
atcacgccactgtactccag

SEQ ID NO: 199607 - DNA, 20 bp, synthetic construct
  source 1..20: mol_type = other DNA
gatcacgccactgtactcca

SEQ ID NO: 199608 - DNA, 20 bp, synthetic construct
  source 1..20: mol_type = other DNA
tgatcacgccactgtactcc

SEQ ID NO: 199609 - DNA, 20 bp, synthetic construct
  source 1..20: mol_type = other DNA
atgatcacgccactgtactc

SEQ ID NO: 199610 - DNA, 20 bp, synthetic construct
  source 1..20: mol_type = other DNA
catgatcacgccactgtact

SEQ ID NO: 199611 - DNA, 20 bp, synthetic construct
  source 1..20: mol_type = other DNA
ccatgatcacgccactgtac

SEQ ID NO: 199612 - DNA, 20 bp, synthetic construct
  source 1..20: mol_type = other DNA
gccatgatcacgccactgta

SEQ ID NO: 199613 - DNA, 20 bp, synthetic construct
  source 1..20: mol_type = other DNA
agccatgatcacgccactgt

SEQ ID NO: 199614 - DNA, 20 bp, synthetic construct
  source 1..20: mol_type = other DNA
gagccatgatcacgccactg

SEQ ID NO: 199615 - DNA, 20 bp, synthetic construct
  source 1..20: mol_type = other DNA
agagccatgatcacgccact

SEQ ID NO: 199616 - DNA, 20 bp, synthetic construct
  source 1..20: mol_type = other DNA
gagagccatgatcacgccac

SEQ ID NO: 199617 - DNA, 20 bp, synthetic construct
  source 1..20: mol_type = other DNA
agagagccatgatcacgcca

SEQ ID NO: 199618 - DNA, 20 bp, synthetic construct
  source 1..20: mol_type = other DNA
aagagagccatgatcacgcc

SEQ ID NO: 199619 - DNA, 20 bp, synthetic construct
  source 1..20: mol_type = other DNA
gaagagagccatgatcacgc

SEQ ID NO: 199620 - DNA, 20 bp, synthetic construct
  source 1..20: mol_type = other DNA
tgaagagagccatgatcacg

SEQ ID NO: 199621 - DNA, 20 bp, synthetic construct
  source 1..20: mol_type = other DNA
ttgaagagagccatgatcac

SEQ ID NO: 199622 - DNA, 20 bp, synthetic construct
  source 1..20: mol_type = other DNA
tttgaagagagccatgatca

SEQ ID NO: 199623 - DNA, 20 bp, synthetic construct
  source 1..20: mol_type = other DNA
gtttgaagagagccatgatc

SEQ ID NO: 199624 - DNA, 20 bp, synthetic construct
  source 1..20: mol_type = other DNA
agtttgaagagagccatgat

SEQ ID NO: 199625 - DNA, 20 bp, synthetic construct
  source 1..20: mol_type = other DNA
aagtttgaagagagccatga

SEQ ID NO: 199626 - DNA, 20 bp, synthetic construct
  source 1..20: mol_type = other DNA
caagtttgaagagagccatg

SEQ ID NO: 199627 - DNA, 20 bp, synthetic construct
  source 1..20: mol_type = other DNA
tcaagtttgaagagagccat

SEQ ID NO: 199628 - DNA, 20 bp, synthetic construct
  source 1..20: mol_type = other DNA
gtcaagtttgaagagagcca

SEQ ID NO: 199629 - DNA, 20 bp, synthetic construct
  source 1..20: mol_type = other DNA
ggtcaagtttgaagagagcc

SEQ ID NO: 199630 - DNA, 20 bp, synthetic construct
  source 1..20: mol_type = other DNA
aggtcaagtttgaagagagc

SEQ ID NO: 199631 - DNA, 20 bp, synthetic construct
  source 1..20: mol_type = other DNA
gaggtcaagtttgaagagag

SEQ ID NO: 199632 - DNA, 20 bp, synthetic construct
  source 1..20: mol_type = other DNA
ggaggtcaagtttgaagaga

SEQ ID NO: 199633 - DNA, 20 bp, synthetic construct
  source 1..20: mol_type = other DNA
gggaggtcaagtttgaagag

SEQ ID NO: 199634 - DNA, 20 bp, synthetic construct
  source 1..20: mol_type = other DNA
cgggaggtcaagtttgaaga

SEQ ID NO: 199635 - DNA, 20 bp, synthetic construct
  source 1..20: mol_type = other DNA
ccgggaggtcaagtttgaag

SEQ ID NO: 199636 - DNA, 20 bp, synthetic construct
  source 1..20: mol_type = other DNA
cccgggaggtcaagtttgaa

SEQ ID NO: 199637 - DNA, 20 bp, synthetic construct
  source 1..20: mol_type = other DNA
gcccgggaggtcaagtttga

SEQ ID NO: 199638 - DNA, 20 bp, synthetic construct
  source 1..20: mol_type = other DNA
agcccgggaggtcaagtttg

SEQ ID NO: 199639 - DNA, 20 bp, synthetic construct
  source 1..20: mol_type = other DNA
gagcccgggaggtcaagttt

SEQ ID NO: 199640 - DNA, 20 bp, synthetic construct
  source 1..20: mol_type = other DNA
tgagcccgggaggtcaagtt

SEQ ID NO: 199641 - DNA, 20 bp, synthetic construct
  source 1..20: mol_type = other DNA
ttgagcccgggaggtcaagt

SEQ ID NO: 199642 - DNA, 20 bp, synthetic construct
  source 1..20: mol_type = other DNA
cttgagcccgggaggtcaag

SEQ ID NO: 199643 - DNA, 20 bp, synthetic construct
  source 1..20: mol_type = other DNA
acttgagcccgggaggtcaa

SEQ ID NO: 199644 - DNA, 20 bp, synthetic construct
  source 1..20: mol_type = other DNA
cacttgagcccgggaggtca

SEQ ID NO: 199645 - DNA, 20 bp, synthetic construct
  source 1..20: mol_type = other DNA
tcacttgagcccgggaggtc

SEQ ID NO: 199646 - DNA, 20 bp, synthetic construct
  source 1..20: mol_type = other DNA
atcacttgagcccgggaggt

SEQ ID NO: 199647 - DNA, 20 bp, synthetic construct
  source 1..20: mol_type = other DNA
gatcacttgagcccgggagg

SEQ ID NO: 199648 - DNA, 20 bp, synthetic construct
  source 1..20: mol_type = other DNA
ggatcacttgagcccgggag

SEQ ID NO: 199649 - DNA, 20 bp, synthetic construct
  source 1..20: mol_type = other DNA
aggatcacttgagcccggga

SEQ ID NO: 199650 - DNA, 20 bp, synthetic construct
  source 1..20: mol_type = other DNA
gaggatcacttgagcccggg

SEQ ID NO: 199651 - DNA, 20 bp, synthetic construct
  source 1..20: mol_type = other DNA
ggaggatcacttgagcccgg

SEQ ID NO: 199652 - DNA, 20 bp, synthetic construct
  source 1..20: mol_type = other DNA
gggaggatcacttgagcccg

SEQ ID NO: 199653 - DNA, 20 bp, synthetic construct
  source 1..20: mol_type = other DNA
tgggaggatcacttgagccc

SEQ ID NO: 199654 - DNA, 20 bp, synthetic construct
  source 1..20: mol_type = other DNA
atgggaggatcacttgagcc

SEQ ID NO: 199655 - DNA, 20 bp, synthetic construct
  source 1..20: mol_type = other DNA
gatgggaggatcacttgagc

SEQ ID NO: 199656 - DNA, 20 bp, synthetic construct
  source 1..20: mol_type = other DNA
agatgggaggatcacttgag

SEQ ID NO: 199657 - DNA, 20 bp, synthetic construct
  source 1..20: mol_type = other DNA
aagatgggaggatcacttga

SEQ ID NO: 199658 - DNA, 20 bp, synthetic construct
  source 1..20: mol_type = other DNA
taagatgggaggatcacttg

SEQ ID NO: 199659 - DNA, 20 bp, synthetic construct
  source 1..20: mol_type = other DNA
ctaagatgggaggatcactt

SEQ ID NO: 199660 - DNA, 20 bp, synthetic construct
  source 1..20: mol_type = other DNA
gctaagatgggaggatcact

SEQ ID NO: 199661 - DNA, 20 bp, synthetic construct
  source 1..20: mol_type = other DNA
ggctaagatgggaggatcac

SEQ ID NO: 199662 - DNA, 20 bp, synthetic construct
  source 1..20: mol_type = other DNA
aggctaagatgggaggatca

SEQ ID NO: 199663 - DNA, 20 bp, synthetic construct
  source 1..20: mol_type = other DNA
gaggctaagatgggaggatc

SEQ ID NO: 199664 - DNA, 20 bp, synthetic construct
  source 1..20: mol_type = other DNA
ggaggctaagatgggaggat

SEQ ID NO: 199665 - DNA, 20 bp, synthetic construct
  source 1..20: mol_type = other DNA
gggaggctaagatgggagga

SEQ ID NO: 199666 - DNA, 20 bp, synthetic construct
  source 1..20: mol_type = other DNA
tgggaggctaagatgggagg

SEQ ID NO: 199667 - DNA, 20 bp, synthetic construct
  source 1..20: mol_type = other DNA
ttgggaggctaagatgggag

SEQ ID NO: 199668 - DNA, 20 bp, synthetic construct
  source 1..20: mol_type = other DNA
cttgggaggctaagatggga

SEQ ID NO: 199669 - DNA, 20 bp, synthetic construct
  source 1..20: mol_type = other DNA
acttgggaggctaagatggg

SEQ ID NO: 199670 - DNA, 20 bp, synthetic construct
  source 1..20: mol_type = other DNA
tacttgggaggctaagatgg

SEQ ID NO: 199671 - DNA, 20 bp, synthetic construct
  source 1..20: mol_type = other DNA
ctacttgggaggctaagatg

SEQ ID NO: 199672 - DNA, 20 bp, synthetic construct
  source 1..20: mol_type = other DNA
tctacttgggaggctaagat

SEQ ID NO: 199673 - DNA, 20 bp, synthetic construct
  source 1..20: mol_type = other DNA
atctacttgggaggctaaga

SEQ ID NO: 199674 - DNA, 20 bp, synthetic construct
  source 1..20: mol_type = other DNA
catctacttgggaggctaag

SEQ ID NO: 199675 - DNA, 20 bp, synthetic construct
  source 1..20: mol_type = other DNA
ccatctacttgggaggctaa

SEQ ID NO: 199676 - DNA, 20 bp, synthetic construct
  source 1..20: mol_type = other DNA
cccatctacttgggaggcta

SEQ ID NO: 199677 - DNA, 20 bp, synthetic construct
  source 1..20: mol_type = other DNA
tcccatctacttgggaggct

SEQ ID NO: 199678 - DNA, 20 bp, synthetic construct
  source 1..20: mol_type = other DNA
gtcccatctacttgggaggc

SEQ ID NO: 199679 - DNA, 20 bp, synthetic construct
  source 1..20: mol_type = other DNA
ggtcccatctacttgggagg

SEQ ID NO: 199680 - DNA, 20 bp, synthetic construct
  source 1..20: mol_type = other DNA
tggtcccatctacttgggag

SEQ ID NO: 199681 - DNA, 20 bp, synthetic construct
  source 1..20: mol_type = other DNA
gtggtcccatctacttggga

SEQ ID NO: 199682 - DNA, 20 bp, synthetic construct
  source 1..20: mol_type = other DNA
tgtggtcccatctacttggg

SEQ ID NO: 199683 - DNA, 20 bp, synthetic construct
  source 1..20: mol_type = other DNA
ctgtggtcccatctacttgg

SEQ ID NO: 199684 - DNA, 20 bp, synthetic construct
  source 1..20: mol_type = other DNA
cctgtggtcccatctacttg

SEQ ID NO: 199685 - DNA, 20 bp, synthetic construct
  source 1..20: mol_type = other DNA
acctgtggtcccatctactt

SEQ ID NO: 199686 - DNA, 20 bp, synthetic construct
  source 1..20: mol_type = other DNA
cacctgtggtcccatctact

SEQ ID NO: 199687 - DNA, 20 bp, synthetic construct
  source 1..20: mol_type = other DNA
gcacctgtggtcccatctac

SEQ ID NO: 199688 - DNA, 20 bp, synthetic construct
  source 1..20: mol_type = other DNA
tgcacctgtggtcccatcta

SEQ ID NO: 199689 - DNA, 20 bp, synthetic construct
  source 1..20: mol_type = other DNA
atgcacctgtggtcccatct

SEQ ID NO: 199690 - DNA, 20 bp, synthetic construct
  source 1..20: mol_type = other DNA
tatgcacctgtggtcccatc

SEQ ID NO: 199691 - DNA, 20 bp, synthetic construct
  source 1..20: mol_type = other DNA
gtatgcacctgtggtcccat

SEQ ID NO: 199692 - DNA, 20 bp, synthetic construct
  source 1..20: mol_type = other DNA
ggtatgcacctgtggtccca

SEQ ID NO: 199693 - DNA, 20 bp, synthetic construct
  source 1..20: mol_type = other DNA
tggtatgcacctgtggtccc

SEQ ID NO: 199694 - DNA, 20 bp, synthetic construct
  source 1..20: mol_type = other DNA
gtggtatgcacctgtggtcc

SEQ ID NO: 199695 - DNA, 20 bp, synthetic construct
  source 1..20: mol_type = other DNA
ggtggtatgcacctgtggtc

SEQ ID NO: 199696 - DNA, 20 bp, synthetic construct
  source 1..20: mol_type = other DNA
tggtggtatgcacctgtggt

SEQ ID NO: 199697 - DNA, 20 bp, synthetic construct
  source 1..20: mol_type = other DNA
gtggtggtatgcacctgtgg

SEQ ID NO: 199698 - DNA, 20 bp, synthetic construct
  source 1..20: mol_type = other DNA
tgtggtggtatgcacctgtg

SEQ ID NO: 199699 - DNA, 20 bp, synthetic construct
  source 1..20: mol_type = other DNA
gtgtggtggtatgcacctgt

SEQ ID NO: 199700 - DNA, 20 bp, synthetic construct
  source 1..20: mol_type = other DNA
ggtgtggtggtatgcacctg

SEQ ID NO: 199701 - DNA, 20 bp, synthetic construct
  source 1..20: mol_type = other DNA
aggtgtggtggtatgcacct

SEQ ID NO: 199702 - DNA, 20 bp, synthetic construct
  source 1..20: mol_type = other DNA
caggtgtggtggtatgcacc

SEQ ID NO: 199703 - DNA, 20 bp, synthetic construct
  source 1..20: mol_type = other DNA
ccaggtgtggtggtatgcac

SEQ ID NO: 199704 - DNA, 20 bp, synthetic construct
  source 1..20: mol_type = other DNA
gccaggtgtggtggtatgca

SEQ ID NO: 199705 - DNA, 20 bp, synthetic construct
  source 1..20: mol_type = other DNA
agccaggtgtggtggtatgc

SEQ ID NO: 199706 - DNA, 20 bp, synthetic construct
  source 1..20: mol_type = other DNA
tagccaggtgtggtggtatg

SEQ ID NO: 199707 - DNA, 20 bp, synthetic construct
  source 1..20: mol_type = other DNA
ttagccaggtgtggtggtat

SEQ ID NO: 199708 - DNA, 20 bp, synthetic construct
  source 1..20: mol_type = other DNA
attagccaggtgtggtggta

SEQ ID NO: 199709 - DNA, 20 bp, synthetic construct
  source 1..20: mol_type = other DNA
aattagccaggtgtggtggt

SEQ ID NO: 199710 - DNA, 20 bp, synthetic construct
  source 1..20: mol_type = other DNA
aaattagccaggtgtggtgg

SEQ ID NO: 199711 - DNA, 20 bp, synthetic construct
  source 1..20: mol_type = other DNA
aaaattagccaggtgtggtg

SEQ ID NO: 199712 - DNA, 20 bp, synthetic construct
  source 1..20: mol_type = other DNA
aaaaattagccaggtgtggt

SEQ ID NO: 199713 - DNA, 20 bp, synthetic construct
  source 1..20: mol_type = other DNA
aaaaaattagccaggtgtgg

SEQ ID NO: 199714 - DNA, 20 bp, synthetic construct
  source 1..20: mol_type = other DNA
aaaaaaattagccaggtgtg

SEQ ID NO: 199715 - DNA, 20 bp, synthetic construct
  source 1..20: mol_type = other DNA
aaaaaaaattagccaggtgt

SEQ ID NO: 199716 - DNA, 20 bp, synthetic construct
  source 1..20: mol_type = other DNA
taaaaaaaattagccaggtg

SEQ ID NO: 199717 - DNA, 20 bp, synthetic construct
  source 1..20: mol_type = other DNA
ataaaaaaaattagccaggt

SEQ ID NO: 199718 - DNA, 20 bp, synthetic construct
  source 1..20: mol_type = other DNA
aataaaaaaaattagccagg

SEQ ID NO: 199719 - DNA, 20 bp, synthetic construct
  source 1..20: mol_type = other DNA
aaataaaaaaaattagccag

SEQ ID NO: 199720 - DNA, 20 bp, synthetic construct
  source 1..20: mol_type = other DNA
aaaataaaaaaaattagcca

SEQ ID NO: 199721 - DNA, 20 bp, synthetic construct
  source 1..20: mol_type = other DNA
aaaaataaaaaaaattagcc

SEQ ID NO: 199722 - DNA, 20 bp, synthetic construct
  source 1..20: mol_type = other DNA
aaaaaataaaaaaaattagc

SEQ ID NO: 199723 - DNA, 20 bp, synthetic construct
  source 1..20: mol_type = other DNA
taaaaaataaaaaaaattag

SEQ ID NO: 199724 - DNA, 20 bp, synthetic construct
  source 1..20: mol_type = other DNA
ataaaaaataaaaaaaatta

SEQ ID NO: 199725 - DNA, 20 bp, synthetic construct
  source 1..20: mol_type = other DNA
aataaaaaataaaaaaaatt

SEQ ID NO: 199726 - DNA, 20 bp, synthetic construct
  source 1..20: mol_type = other DNA
aaataaaaaataaaaaaaat

SEQ ID NO: 199727 - DNA, 20 bp, synthetic construct
  source 1..20: mol_type = other DNA
aaaataaaaaataaaaaaaa

SEQ ID NO: 199728 - DNA, 20 bp, synthetic construct
  source 1..20: mol_type = other DNA
aaaaataaaaaataaaaaaa

SEQ ID NO: 199729 - DNA, 20 bp, synthetic construct
  source 1..20: mol_type = other DNA
taaaaataaaaaataaaaaa

SEQ ID NO: 199730 - DNA, 20 bp, synthetic construct
  source 1..20: mol_type = other DNA
ctaaaaataaaaaataaaaa

SEQ ID NO: 199731 - DNA, 20 bp, synthetic construct
  source 1..20: mol_type = other DNA
tctaaaaataaaaaataaaa

SEQ ID NO: 199732 - DNA, 20 bp, synthetic construct
  source 1..20: mol_type = other DNA
ctctaaaaataaaaaataaa

SEQ ID NO: 199733 - DNA, 20 bp, synthetic construct
  source 1..20: mol_type = other DNA
tctctaaaaataaaaaataa

SEQ ID NO: 199734 - DNA, 20 bp, synthetic construct
  source 1..20: mol_type = other DNA
atctctaaaaataaaaaata

SEQ ID NO: 199735 - DNA, 20 bp, synthetic construct
  source 1..20: mol_type = other DNA
catctctaaaaataaaaaat

SEQ ID NO: 199736 - DNA, 20 bp, synthetic construct
  source 1..20: mol_type = other DNA
ccatctctaaaaataaaaaa

SEQ ID NO: 199737 - DNA, 20 bp, synthetic construct
  source 1..20: mol_type = other DNA
accatctctaaaaataaaaa

SEQ ID NO: 199738 - DNA, 20 bp, synthetic construct
  source 1..20: mol_type = other DNA
caccatctctaaaaataaaa

SEQ ID NO: 199739 - DNA, 20 bp, synthetic construct
  source 1..20: mol_type = other DNA
acaccatctctaaaaataaa

SEQ ID NO: 199740 - DNA, 20 bp, synthetic construct
  source 1..20: mol_type = other DNA
aacaccatctctaaaaataa

SEQ ID NO: 199741 - DNA, 20 bp, synthetic construct
  source 1..20: mol_type = other DNA
aaacaccatctctaaaaata

SEQ ID NO: 199742 - DNA, 20 bp, synthetic construct
  source 1..20: mol_type = other DNA
taaacaccatctctaaaaat

SEQ ID NO: 199743 - DNA, 20 bp, synthetic construct
  source 1..20: mol_type = other DNA
gtaaacaccatctctaaaaa

SEQ ID NO: 199744 - DNA, 20 bp, synthetic construct
  source 1..20: mol_type = other DNA
agtaaacaccatctctaaaa

SEQ ID NO: 199745 - DNA, 20 bp, synthetic construct
  source 1..20: mol_type = other DNA
tagtaaacaccatctctaaa

SEQ ID NO: 199746 - DNA, 20 bp, synthetic construct
  source 1..20: mol_type = other DNA
atagtaaacaccatctctaa

SEQ ID NO: 199747 - DNA, 20 bp, synthetic construct
  source 1..20: mol_type = other DNA
catagtaaacaccatctcta

SEQ ID NO: 199748 - DNA, 20 bp, synthetic construct
  source 1..20: mol_type = other DNA
acatagtaaacaccatctct

SEQ ID NO: 199749 - DNA, 20 bp, synthetic construct
  source 1..20: mol_type = other DNA
aacatagtaaacaccatctc

SEQ ID NO: 199750 - DNA, 20 bp, synthetic construct
  source 1..20: mol_type = other DNA
caacatagtaaacaccatct

SEQ ID NO: 199751 - DNA, 20 bp, synthetic construct
  source 1..20: mol_type = other DNA
gcaacatagtaaacaccatc

SEQ ID NO: 199752 - DNA, 20 bp, synthetic construct
  source 1..20: mol_type = other DNA
ggcaacatagtaaacaccat

SEQ ID NO: 199753 - DNA, 20 bp, synthetic construct
  source 1..20: mol_type = other DNA
gggcaacatagtaaacacca

SEQ ID NO: 199754 - DNA, 20 bp, synthetic construct
  source 1..20: mol_type = other DNA
tgggcaacatagtaaacacc

SEQ ID NO: 199755 - DNA, 20 bp, synthetic construct
  source 1..20: mol_type = other DNA
ctgggcaacatagtaaacac

SEQ ID NO: 199756 - DNA, 20 bp, synthetic construct
  source 1..20: mol_type = other DNA
cctgggcaacatagtaaaca

SEQ ID NO: 199757 - DNA, 20 bp, synthetic construct
  source 1..20: mol_type = other DNA
gcctgggcaacatagtaaac

SEQ ID NO: 199758 - DNA, 20 bp, synthetic construct
  source 1..20: mol_type = other DNA
agcctgggcaacatagtaaa

SEQ ID NO: 199759 - DNA, 20 bp, synthetic construct
  source 1..20: mol_type = other DNA
tagcctgggcaacatagtaa

SEQ ID NO: 199760 - DNA, 20 bp, synthetic construct
  source 1..20: mol_type = other DNA
ctagcctgggcaacatagta

SEQ ID NO: 199761 - DNA, 20 bp, synthetic construct
  source 1..20: mol_type = other DNA
actagcctgggcaacatagt

SEQ ID NO: 199762 - DNA, 20 bp, synthetic construct
  source 1..20: mol_type = other DNA
gactagcctgggcaacatag

SEQ ID NO: 199763 - DNA, 20 bp, synthetic construct
  source 1..20: mol_type = other DNA
agactagcctgggcaacata

SEQ ID NO: 199764 - DNA, 20 bp, synthetic construct
  source 1..20: mol_type = other DNA
gagactagcctgggcaacat

SEQ ID NO: 199765 - DNA, 20 bp, synthetic construct
  source 1..20: mol_type = other DNA
tgagactagcctgggcaaca

SEQ ID NO: 199766 - DNA, 20 bp, synthetic construct
  source 1..20: mol_type = other DNA
ttgagactagcctgggcaac

SEQ ID NO: 199767 - DNA, 20 bp, synthetic construct
  source 1..20: mol_type = other DNA
tttgagactagcctgggcaa

SEQ ID NO: 199768 - DNA, 20 bp, synthetic construct
  source 1..20: mol_type = other DNA
gtttgagactagcctgggca

SEQ ID NO: 199769 - DNA, 20 bp, synthetic construct
  source 1..20: mol_type = other DNA
agtttgagactagcctgggc

SEQ ID NO: 199770 - DNA, 20 bp, synthetic construct
  source 1..20: mol_type = other DNA
gagtttgagactagcctggg

SEQ ID NO: 199771 - DNA, 20 bp, synthetic construct
  source 1..20: mol_type = other DNA
ggagtttgagactagcctgg

SEQ ID NO: 199772 - DNA, 20 bp, synthetic construct
  source 1..20: mol_type = other DNA
aggagtttgagactagcctg

SEQ ID NO: 199773 - DNA, 20 bp, synthetic construct
  source 1..20: mol_type = other DNA
caggagtttgagactagcct

SEQ ID NO: 199774 - DNA, 20 bp, synthetic construct
  source 1..20: mol_type = other DNA
ccaggagtttgagactagcc

SEQ ID NO: 199775 - DNA, 20 bp, synthetic construct
  source 1..20: mol_type = other DNA
cccaggagtttgagactagc

SEQ ID NO: 199776 - DNA, 20 bp, synthetic construct
  source 1..20: mol_type = other DNA
gcccaggagtttgagactag

SEQ ID NO: 199777 - DNA, 20 bp, synthetic construct
  source 1..20: mol_type = other DNA
agcccaggagtttgagacta

SEQ ID NO: 199778 - DNA, 20 bp, synthetic construct
  source 1..20: mol_type = other DNA
gagcccaggagtttgagact

SEQ ID NO: 199779 - DNA, 20 bp, synthetic construct
  source 1..20: mol_type = other DNA
tgagcccaggagtttgagac

SEQ ID NO: 199780 - DNA, 20 bp, synthetic construct
  source 1..20: mol_type = other DNA
ttgagcccaggagtttgaga

SEQ ID NO: 199781 - DNA, 20 bp, synthetic construct
  source 1..20: mol_type = other DNA
cttgagcccaggagtttgag

SEQ ID NO: 199782 - DNA, 20 bp, synthetic construct
  source 1..20: mol_type = other DNA
gcttgagcccaggagtttga

SEQ ID NO: 199783 - DNA, 20 bp, synthetic construct
  source 1..20: mol_type = other DNA
agcttgagcccaggagtttg

SEQ ID NO: 199784 - DNA, 20 bp, synthetic construct
  source 1..20: mol_type = other DNA
tagcttgagcccaggagttt

SEQ ID NO: 199785 - DNA, 20 bp, synthetic construct
  source 1..20: mol_type = other DNA
atagcttgagcccaggagtt

SEQ ID NO: 199786 - DNA, 20 bp, synthetic construct
  source 1..20: mol_type = other DNA
gatagcttgagcccaggagt

SEQ ID NO: 199787 - DNA, 20 bp, synthetic construct
  source 1..20: mol_type = other DNA
ggatagcttgagcccaggag

SEQ ID NO: 199788 - DNA, 20 bp, synthetic construct
  source 1..20: mol_type = other DNA
aggatagcttgagcccagga

SEQ ID NO: 199789 - DNA, 20 bp, synthetic construct
  source 1..20: mol_type = other DNA
gaggatagcttgagcccagg

SEQ ID NO: 199790 - DNA, 20 bp, synthetic construct
  source 1..20: mol_type = other DNA
ggaggatagcttgagcccag

SEQ ID NO: 199791 - DNA, 20 bp, synthetic construct
  source 1..20: mol_type = other DNA
gggaggatagcttgagccca

SEQ ID NO: 199792 - DNA, 20 bp, synthetic construct
  source 1..20: mol_type = other DNA
tgggaggatagcttgagccc

SEQ ID NO: 199793 - DNA, 20 bp, synthetic construct
  source 1..20: mol_type = other DNA
gtgggaggatagcttgagcc

SEQ ID NO: 199794 - DNA, 20 bp, synthetic construct
  source 1..20: mol_type = other DNA
ggtgggaggatagcttgagc

SEQ ID NO: 199795 - DNA, 20 bp, synthetic construct
  source 1..20: mol_type = other DNA
aggtgggaggatagcttgag

SEQ ID NO: 199796 - DNA, 20 bp, synthetic construct
  source 1..20: mol_type = other DNA
gaggtgggaggatagcttga

SEQ ID NO: 199797 - DNA, 20 bp, synthetic construct
  source 1..20: mol_type = other DNA
cgaggtgggaggatagcttg

SEQ ID NO: 199798 - DNA, 20 bp, synthetic construct
  source 1..20: mol_type = other DNA
ccgaggtgggaggatagctt

SEQ ID NO: 199799 - DNA, 20 bp, synthetic construct
  source 1..20: mol_type = other DNA
gccgaggtgggaggatagct

SEQ ID NO: 199800 - DNA, 20 bp, synthetic construct
  source 1..20: mol_type = other DNA
ggccgaggtgggaggatagc

SEQ ID NO: 199801 - DNA, 20 bp, synthetic construct
  source 1..20: mol_type = other DNA
aggccgaggtgggaggatag

SEQ ID NO: 199802 - DNA, 20 bp, synthetic construct
  source 1..20: mol_type = other DNA
gaggccgaggtgggaggata

SEQ ID NO: 199803 - DNA, 20 bp, synthetic construct
  source 1..20: mol_type = other DNA
ggaggccgaggtgggaggat

SEQ ID NO: 199804 - DNA, 20 bp, synthetic construct
  source 1..20: mol_type = other DNA
gggaggccgaggtgggagga

SEQ ID NO: 199805 - DNA, 20 bp, synthetic construct
  source 1..20: mol_type = other DNA
cgggaggccgaggtgggagg

SEQ ID NO: 199806 - DNA, 20 bp, synthetic construct
  source 1..20: mol_type = other DNA
tcgggaggccgaggtgggag

SEQ ID NO: 199807 - DNA, 20 bp, synthetic construct
  source 1..20: mol_type = other DNA
ttcgggaggccgaggtggga

SEQ ID NO: 199808 - DNA, 20 bp, synthetic construct
  source 1..20: mol_type = other DNA
cttcgggaggccgaggtggg

SEQ ID NO: 199809 - DNA, 20 bp, synthetic construct
  source 1..20: mol_type = other DNA
acttcgggaggccgaggtgg

SEQ ID NO: 199810 - DNA, 20 bp, synthetic construct
  source 1..20: mol_type = other DNA
cacttcgggaggccgaggtg

SEQ ID NO: 199811 - DNA, 20 bp, synthetic construct
  source 1..20: mol_type = other DNA
gcacttcgggaggccgaggt

SEQ ID NO: 199812 - DNA, 20 bp, synthetic construct
  source 1..20: mol_type = other DNA
agcacttcgggaggccgagg

SEQ ID NO: 199813 - DNA, 20 bp, synthetic construct
  source 1..20: mol_type = other DNA
cagcacttcgggaggccgag

SEQ ID NO: 199814 - DNA, 20 bp, synthetic construct
  source 1..20: mol_type = other DNA
ccagcacttcgggaggccga

SEQ ID NO: 199815 - DNA, 20 bp, synthetic construct
  source 1..20: mol_type = other DNA
cccagcacttcgggaggccg

SEQ ID NO: 199816 - DNA, 20 bp, synthetic construct
  source 1..20: mol_type = other DNA
ccccagcacttcgggaggcc

SEQ ID NO: 199817 - DNA, 20 bp, synthetic construct
  source 1..20: mol_type = other DNA
accccagcacttcgggaggc

SEQ ID NO: 199818 - DNA, 20 bp, synthetic construct
  source 1..20: mol_type = other DNA
aaccccagcacttcgggagg

SEQ ID NO: 199819 - DNA, 20 bp, synthetic construct
  source 1..20: mol_type = other DNA
taaccccagcacttcgggag

SEQ ID NO: 199820 - DNA, 20 bp, synthetic construct
  source 1..20: mol_type = other DNA
gtaaccccagcacttcggga

SEQ ID NO: 199821 - DNA, 20 bp, synthetic construct
  source 1..20: mol_type = other DNA
ggtaaccccagcacttcggg

SEQ ID NO: 199822 - DNA, 20 bp, synthetic construct
  source 1..20: mol_type = other DNA
tggtaaccccagcacttcgg

SEQ ID NO: 199823 - DNA, 20 bp, synthetic construct
  source 1..20: mol_type = other DNA
ctggtaaccccagcacttcg

SEQ ID NO: 199824 - DNA, 20 bp, synthetic construct
  source 1..20: mol_type = other DNA
gctggtaaccccagcacttc

SEQ ID NO: 199825 - DNA, 20 bp, synthetic construct
  source 1..20: mol_type = other DNA
tgctggtaaccccagcactt

SEQ ID NO: 199826 - DNA, 20 bp, synthetic construct
  source 1..20: mol_type = other DNA
atgctggtaaccccagcact

SEQ ID NO: 199827 - DNA, 20 bp, synthetic construct
  source 1..20: mol_type = other DNA
catgctggtaaccccagcac

SEQ ID NO: 199828 - DNA, 20 bp, synthetic construct
  source 1..20: mol_type = other DNA
tcatgctggtaaccccagca

SEQ ID NO: 199829 - DNA, 20 bp, synthetic construct
  source 1..20: mol_type = other DNA
ctcatgctggtaaccccagc

SEQ ID NO: 199830 - DNA, 20 bp, synthetic construct
  source 1..20: mol_type = other DNA
gctcatgctggtaaccccag

SEQ ID NO: 199831 - DNA, 20 bp, synthetic construct
  source 1..20: mol_type = other DNA
ggctcatgctggtaacccca

SEQ ID NO: 199832 - DNA, 20 bp, synthetic construct
  source 1..20: mol_type = other DNA
tggctcatgctggtaacccc

SEQ ID NO: 199833 - DNA, 20 bp, synthetic construct
  source 1..20: mol_type = other DNA
gtggctcatgctggtaaccc

SEQ ID NO: 199834 - DNA, 20 bp, synthetic construct
  source 1..20: mol_type = other DNA
agtggctcatgctggtaacc

SEQ ID NO: 199835 - DNA, 20 bp, synthetic construct
  source 1..20: mol_type = other DNA
cagtggctcatgctggtaac

SEQ ID NO: 199836 - DNA, 20 bp, synthetic construct
  source 1..20: mol_type = other DNA
acagtggctcatgctggtaa

SEQ ID NO: 199837 - DNA, 20 bp, synthetic construct
  source 1..20: mol_type = other DNA
tacagtggctcatgctggta

SEQ ID NO: 199838 - DNA, 20 bp, synthetic construct
  source 1..20: mol_type = other DNA
gtacagtggctcatgctggt

SEQ ID NO: 199839 - DNA, 20 bp, synthetic construct
  source 1..20: mol_type = other DNA
ggtacagtggctcatgctgg

SEQ ID NO: 199840 - DNA, 20 bp, synthetic construct
  source 1..20: mol_type = other DNA
gggtacagtggctcatgctg

SEQ ID NO: 199841 - DNA, 20 bp, synthetic construct
  source 1..20: mol_type = other DNA
tgggtacagtggctcatgct

SEQ ID NO: 199842 - DNA, 20 bp, synthetic construct
  source 1..20: mol_type = other DNA
ctgggtacagtggctcatgc

SEQ ID NO: 199843 - DNA, 20 bp, synthetic construct
  source 1..20: mol_type = other DNA
gctgggtacagtggctcatg

SEQ ID NO: 199844 - DNA, 20 bp, synthetic construct
  source 1..20: mol_type = other DNA
ggctgggtacagtggctcat

SEQ ID NO: 199845 - DNA, 20 bp, synthetic construct
  source 1..20: mol_type = other DNA
gggctgggtacagtggctca

SEQ ID NO: 199846 - DNA, 20 bp, synthetic construct
  source 1..20: mol_type = other DNA
agggctgggtacagtggctc

SEQ ID NO: 199847 - DNA, 20 bp, synthetic construct
  source 1..20: mol_type = other DNA
gagggctgggtacagtggct

SEQ ID NO: 199848 - DNA, 20 bp, synthetic construct
  source 1..20: mol_type = other DNA
tgagggctgggtacagtggc

SEQ ID NO: 199849 - DNA, 20 bp, synthetic construct
  source 1..20: mol_type = other DNA
ttgagggctgggtacagtgg

SEQ ID NO: 199850 - DNA, 20 bp, synthetic construct
  source 1..20: mol_type = other DNA
tttgagggctgggtacagtg

SEQ ID NO: 199851 - DNA, 20 bp, synthetic construct
  source 1..20: mol_type = other DNA
atttgagggctgggtacagt

SEQ ID NO: 199852 - DNA, 20 bp, synthetic construct
  source 1..20: mol_type = other DNA
aatttgagggctgggtacag

SEQ ID NO: 199853 - DNA, 20 bp, synthetic construct
  source 1..20: mol_type = other DNA
aaatttgagggctgggtaca

SEQ ID NO: 199854 - DNA, 20 bp, synthetic construct
  source 1..20: mol_type = other DNA
aaaatttgagggctgggtac

SEQ ID NO: 199855 - DNA, 20 bp, synthetic construct
  source 1..20: mol_type = other DNA
aaaaatttgagggctgggta

SEQ ID NO: 199856 - DNA, 20 bp, synthetic construct
  source 1..20: mol_type = other DNA
taaaaatttgagggctgggt

SEQ ID NO: 199857 - DNA, 20 bp, synthetic construct
  source 1..20: mol_type = other DNA
ttaaaaatttgagggctggg

SEQ ID NO: 199858 - DNA, 20 bp, synthetic construct
  source 1..20: mol_type = other DNA
tttaaaaatttgagggctgg

SEQ ID NO: 199859 - DNA, 20 bp, synthetic construct
  source 1..20: mol_type = other DNA
ttttaaaaatttgagggctg

SEQ ID NO: 199860 - DNA, 20 bp, synthetic construct
  source 1..20: mol_type = other DNA
tttttaaaaatttgagggct

SEQ ID NO: 199861 - DNA, 20 bp, synthetic construct
  source 1..20: mol_type = other DNA
atttttaaaaatttgagggc

SEQ ID NO: 199862 - DNA, 20 bp, synthetic construct
  source 1..20: mol_type = other DNA
gatttttaaaaatttgaggg

SEQ ID NO: 199863 - DNA, 20 bp, synthetic construct
  source 1..20: mol_type = other DNA
agatttttaaaaatttgagg

SEQ ID NO: 199864 - DNA, 20 bp, synthetic construct
  source 1..20: mol_type = other DNA
tagatttttaaaaatttgag

SEQ ID NO: 199865 - DNA, 20 bp, synthetic construct
  source 1..20: mol_type = other DNA
atagatttttaaaaatttga

SEQ ID NO: 199866 - DNA, 20 bp, synthetic construct
  source 1..20: mol_type = other DNA
tatagatttttaaaaatttg

SEQ ID NO: 199867 - DNA, 20 bp, synthetic construct
  source 1..20: mol_type = other DNA
ttatagatttttaaaaattt

SEQ ID NO: 199868 - DNA, 20 bp, synthetic construct
  source 1..20: mol_type = other DNA
cttatagatttttaaaaatt

SEQ ID NO: 199869 - DNA, 20 bp, synthetic construct
  source 1..20: mol_type = other DNA
tcttatagatttttaaaaat

SEQ ID NO: 199870 - DNA, 20 bp, synthetic construct
  source 1..20: mol_type = other DNA
ctcttatagatttttaaaaa

SEQ ID NO: 199871 - DNA, 20 bp, synthetic construct
  source 1..20: mol_type = other DNA
tctcttatagatttttaaaa

SEQ ID NO: 199872 - DNA, 20 bp, synthetic construct
  source 1..20: mol_type = other DNA
gtctcttatagatttttaaa

SEQ ID NO: 199873 - DNA, 20 bp, synthetic construct
  source 1..20: mol_type = other DNA
tgtctcttatagatttttaa

SEQ ID NO: 199874 - DNA, 20 bp, synthetic construct
  source 1..20: mol_type = other DNA
atgtctcttatagattttta

SEQ ID NO: 199875 - DNA, 20 bp, synthetic construct
  source 1..20: mol_type = other DNA
aatgtctcttatagattttt

SEQ ID NO: 199876 - DNA, 20 bp, synthetic construct
  source 1..20: mol_type = other DNA
taatgtctcttatagatttt

SEQ ID NO: 199877 - DNA, 20 bp, synthetic construct
  source 1..20: mol_type = other DNA
ataatgtctcttatagattt

SEQ ID NO: 199878 - DNA, 20 bp, synthetic construct
  source 1..20: mol_type = other DNA
aataatgtctcttatagatt

SEQ ID NO: 199879 - DNA, 20 bp, synthetic construct
  source 1..20: mol_type = other DNA
caataatgtctcttatagat

SEQ ID NO: 199880 - DNA, 20 bp, synthetic construct
  source 1..20: mol_type = other DNA
ccaataatgtctcttataga

SEQ ID NO: 199881 - DNA, 20 bp, synthetic construct
  source 1..20: mol_type = other DNA
tccaataatgtctcttatag

SEQ ID NO: 199882 - DNA, 20 bp, synthetic construct
  source 1..20: mol_type = other DNA
gtccaataatgtctcttata

SEQ ID NO: 199883 - DNA, 20 bp, synthetic construct
  source 1..20: mol_type = other DNA
tgtccaataatgtctcttat

SEQ ID NO: 199884 - DNA, 20 bp, synthetic construct
  source 1..20: mol_type = other DNA
ttgtccaataatgtctctta

SEQ ID NO: 199885 - DNA, 20 bp, synthetic construct
  source 1..20: mol_type = other DNA
attgtccaataatgtctctt

SEQ ID NO: 199886 - DNA, 20 bp, synthetic construct
  source 1..20: mol_type = other DNA
aattgtccaataatgtctct

SEQ ID NO: 199887 - DNA, 20 bp, synthetic construct
  source 1..20: mol_type = other DNA
taattgtccaataatgtctc

SEQ ID NO: 199888 - DNA, 20 bp, synthetic construct
  source 1..20: mol_type = other DNA
ctaattgtccaataatgtct

SEQ ID NO: 199889 - DNA, 20 bp, synthetic construct
  source 1..20: mol_type = other DNA
tctaattgtccaataatgtc

SEQ ID NO: 199890 - DNA, 20 bp, synthetic construct
  source 1..20: mol_type = other DNA
ctctaattgtccaataatgt

SEQ ID NO: 199891 - DNA, 20 bp, synthetic construct
  source 1..20: mol_type = other DNA
tctctaattgtccaataatg

SEQ ID NO: 199892 - DNA, 20 bp, synthetic construct
  source 1..20: mol_type = other DNA
ttctctaattgtccaataat

SEQ ID NO: 199893 - DNA, 20 bp, synthetic construct
  source 1..20: mol_type = other DNA
tttctctaattgtccaataa

SEQ ID NO: 199894 - DNA, 20 bp, synthetic construct
  source 1..20: mol_type = other DNA
atttctctaattgtccaata

SEQ ID NO: 199895 - DNA, 20 bp, synthetic construct
  source 1..20: mol_type = other DNA
aatttctctaattgtccaat

SEQ ID NO: 199896 - DNA, 20 bp, synthetic construct
  source 1..20: mol_type = other DNA
gaatttctctaattgtccaa

SEQ ID NO: 199897 - DNA, 20 bp, synthetic construct
  source 1..20: mol_type = other DNA
tgaatttctctaattgtcca

SEQ ID NO: 199898 - DNA, 20 bp, synthetic construct
  source 1..20: mol_type = other DNA
gtgaatttctctaattgtcc

SEQ ID NO: 199899 - DNA, 20 bp, synthetic construct
  source 1..20: mol_type = other DNA
tgtgaatttctctaattgtc

SEQ ID NO: 199900 - DNA, 20 bp, synthetic construct
  source 1..20: mol_type = other DNA
atgtgaatttctctaattgt

SEQ ID NO: 199901 - DNA, 20 bp, synthetic construct
  source 1..20: mol_type = other DNA
tatgtgaatttctctaattg

SEQ ID NO: 199902 - DNA, 20 bp, synthetic construct
  source 1..20: mol_type = other DNA
atatgtgaatttctctaatt

SEQ ID NO: 199903 - DNA, 20 bp, synthetic construct
  source 1..20: mol_type = other DNA
catatgtgaatttctctaat

SEQ ID NO: 199904 - DNA, 20 bp, synthetic construct
  source 1..20: mol_type = other DNA
ccatatgtgaatttctctaa

SEQ ID NO: 199905 - DNA, 20 bp, synthetic construct
  source 1..20: mol_type = other DNA
tccatatgtgaatttctcta

SEQ ID NO: 199906 - DNA, 20 bp, synthetic construct
  source 1..20: mol_type = other DNA
gtccatatgtgaatttctct

SEQ ID NO: 199907 - DNA, 20 bp, synthetic construct
  source 1..20: mol_type = other DNA
agtccatatgtgaatttctc

SEQ ID NO: 199908 - DNA, 20 bp, synthetic construct
  source 1..20: mol_type = other DNA
aagtccatatgtgaatttct

SEQ ID NO: 199909 - DNA, 20 bp, synthetic construct
  source 1..20: mol_type = other DNA
taagtccatatgtgaatttc

SEQ ID NO: 199910 - DNA, 20 bp, synthetic construct
  source 1..20: mol_type = other DNA
ataagtccatatgtgaattt

SEQ ID NO: 199911 - DNA, 20 bp, synthetic construct
  source 1..20: mol_type = other DNA
tataagtccatatgtgaatt

SEQ ID NO: 199912 - DNA, 20 bp, synthetic construct
  source 1..20: mol_type = other DNA
ttataagtccatatgtgaat

SEQ ID NO: 199913 - DNA, 20 bp, synthetic construct
  source 1..20: mol_type = other DNA
attataagtccatatgtgaa

SEQ ID NO: 199914 - DNA, 20 bp, synthetic construct
  source 1..20: mol_type = other DNA
tattataagtccatatgtga

SEQ ID NO: 199915 - DNA, 20 bp, synthetic construct
  source 1..20: mol_type = other DNA
ctattataagtccatatgtg

SEQ ID NO: 199916 - DNA, 20 bp, synthetic construct
  source 1..20: mol_type = other DNA
actattataagtccatatgt

SEQ ID NO: 199917 - DNA, 20 bp, synthetic construct
  source 1..20: mol_type = other DNA
tactattataagtccatatg

SEQ ID NO: 199918 - DNA, 20 bp, synthetic construct
  source 1..20: mol_type = other DNA
atactattataagtccatat

SEQ ID NO: 199919 - DNA, 20 bp, synthetic construct
  source 1..20: mol_type = other DNA
gatactattataagtccata

SEQ ID NO: 199920 - DNA, 20 bp, synthetic construct
  source 1..20: mol_type = other DNA
tgatactattataagtccat

SEQ ID NO: 199921 - DNA, 20 bp, synthetic construct
  source 1..20: mol_type = other DNA
ctgatactattataagtcca

SEQ ID NO: 199922 - DNA, 20 bp, synthetic construct
  source 1..20: mol_type = other DNA
tctgatactattataagtcc

SEQ ID NO: 199923 - DNA, 20 bp, synthetic construct
  source 1..20: mol_type = other DNA
ctctgatactattataagtc

SEQ ID NO: 199924 - DNA, 20 bp, synthetic construct
  source 1..20: mol_type = other DNA
actctgatactattataagt

SEQ ID NO: 199925 - DNA, 20 bp, synthetic construct
  source 1..20: mol_type = other DNA
cactctgatactattataag

SEQ ID NO: 199926 - DNA, 20 bp, synthetic construct
  source 1..20: mol_type = other DNA
acactctgatactattataa

SEQ ID NO: 199927 - DNA, 20 bp, synthetic construct
  source 1..20: mol_type = other DNA
cacactctgatactattata

SEQ ID NO: 199928 - DNA, 20 bp, synthetic construct
  source 1..20: mol_type = other DNA
acacactctgatactattat

SEQ ID NO: 199929 - DNA, 20 bp, synthetic construct
  source 1..20: mol_type = other DNA
cacacactctgatactatta

SEQ ID NO: 199930 - DNA, 20 bp, synthetic construct
  source 1..20: mol_type = other DNA
ccacacactctgatactatt

SEQ ID NO: 199931 - DNA, 20 bp, synthetic construct
  source 1..20: mol_type = other DNA
accacacactctgatactat

SEQ ID NO: 199932 - DNA, 20 bp, synthetic construct
  source 1..20: mol_type = other DNA
caccacacactctgatacta

SEQ ID NO: 199933 - DNA, 20 bp, synthetic construct
  source 1..20: mol_type = other DNA
acaccacacactctgatact

SEQ ID NO: 199934 - DNA, 20 bp, synthetic construct
  source 1..20: mol_type = other DNA
cacaccacacactctgatac

SEQ ID NO: 199935 - DNA, 20 bp, synthetic construct
  source 1..20: mol_type = other DNA
tcacaccacacactctgata

SEQ ID NO: 199936 - DNA, 20 bp, synthetic construct
  source 1..20: mol_type = other DNA
atcacaccacacactctgat

SEQ ID NO: 199937 - DNA, 20 bp, synthetic construct
  source 1..20: mol_type = other DNA
catcacaccacacactctga

SEQ ID NO: 199938 - DNA, 20 bp, synthetic construct
  source 1..20: mol_type = other DNA
ccatcacaccacacactctg

SEQ ID NO: 199939 - DNA, 20 bp, synthetic construct
  source 1..20: mol_type = other DNA
accatcacaccacacactct

SEQ ID NO: 199940 - DNA, 20 bp, synthetic construct
  source 1..20: mol_type = other DNA
aaccatcacaccacacactc

SEQ ID NO: 199941 - DNA, 20 bp, synthetic construct
  source 1..20: mol_type = other DNA
gaaccatcacaccacacact

SEQ ID NO: 199942 - DNA, 20 bp, synthetic construct
  source 1..20: mol_type = other DNA
agaaccatcacaccacacac

SEQ ID NO: 199943 - DNA, 20 bp, synthetic construct
  source 1..20: mol_type = other DNA
cagaaccatcacaccacaca

SEQ ID NO: 199944 - DNA, 20 bp, synthetic construct
  source 1..20: mol_type = other DNA
ccagaaccatcacaccacac

SEQ ID NO: 199945 - DNA, 20 bp, synthetic construct
  source 1..20: mol_type = other DNA
tccagaaccatcacaccaca

SEQ ID NO: 199946 - DNA, 20 bp, synthetic construct
  source 1..20: mol_type = other DNA
ctccagaaccatcacaccac

SEQ ID NO: 199947 - DNA, 20 bp, synthetic construct
  source 1..20: mol_type = other DNA
cctccagaaccatcacacca

SEQ ID NO: 199948 - DNA, 20 bp, synthetic construct
  source 1..20: mol_type = other DNA
ccctccagaaccatcacacc

SEQ ID NO: 199949 - DNA, 20 bp, synthetic construct
  source 1..20: mol_type = other DNA
tccctccagaaccatcacac

SEQ ID NO: 199950 - DNA, 20 bp, synthetic construct
  source 1..20: mol_type = other DNA
ttccctccagaaccatcaca

SEQ ID NO: 199951 - DNA, 20 bp, synthetic construct
  source 1..20: mol_type = other DNA
attccctccagaaccatcac

SEQ ID NO: 199952 - DNA, 20 bp, synthetic construct
  source 1..20: mol_type = other DNA
cattccctccagaaccatca

SEQ ID NO: 199953 - DNA, 20 bp, synthetic construct
  source 1..20: mol_type = other DNA
ccattccctccagaaccatc

SEQ ID NO: 199954 - DNA, 20 bp, synthetic construct
  source 1..20: mol_type = other DNA
tccattccctccagaaccat

SEQ ID NO: 199955 - DNA, 20 bp, synthetic construct
  source 1..20: mol_type = other DNA
gtccattccctccagaacca

SEQ ID NO: 199956 - DNA, 20 bp, synthetic construct
  source 1..20: mol_type = other DNA
agtccattccctccagaacc

SEQ ID NO: 199957 - DNA, 20 bp, synthetic construct
  source 1..20: mol_type = other DNA
aagtccattccctccagaac

SEQ ID NO: 199958 - DNA, 20 bp, synthetic construct
  source 1..20: mol_type = other DNA
aaagtccattccctccagaa

SEQ ID NO: 199959 - DNA, 20 bp, synthetic construct
  source 1..20: mol_type = other DNA
aaaagtccattccctccaga

SEQ ID NO: 199960 - DNA, 20 bp, synthetic construct
  source 1..20: mol_type = other DNA
aaaaagtccattccctccag

SEQ ID NO: 199961 - DNA, 20 bp, synthetic construct
  source 1..20: mol_type = other DNA
gaaaaagtccattccctcca

SEQ ID NO: 199962 - DNA, 20 bp, synthetic construct
  source 1..20: mol_type = other DNA
agaaaaagtccattccctcc

SEQ ID NO: 199963 - DNA, 20 bp, synthetic construct
  source 1..20: mol_type = other DNA
aagaaaaagtccattccctc

SEQ ID NO: 199964 - DNA, 20 bp, synthetic construct
  source 1..20: mol_type = other DNA
aaagaaaaagtccattccct

SEQ ID NO: 199965 - DNA, 20 bp, synthetic construct
  source 1..20: mol_type = other DNA
caaagaaaaagtccattccc

SEQ ID NO: 199966 - DNA, 20 bp, synthetic construct
  source 1..20: mol_type = other DNA
ccaaagaaaaagtccattcc

SEQ ID NO: 199967 - DNA, 20 bp, synthetic construct
  source 1..20: mol_type = other DNA
tccaaagaaaaagtccattc

SEQ ID NO: 199968 - DNA, 20 bp, synthetic construct
  source 1..20: mol_type = other DNA
ctccaaagaaaaagtccatt

SEQ ID NO: 199969 - DNA, 20 bp, synthetic construct
  source 1..20: mol_type = other DNA
tctccaaagaaaaagtccat

SEQ ID NO: 199970 - DNA, 20 bp, synthetic construct
  source 1..20: mol_type = other DNA
gtctccaaagaaaaagtcca

SEQ ID NO: 199971 - DNA, 20 bp, synthetic construct
  source 1..20: mol_type = other DNA
tgtctccaaagaaaaagtcc

SEQ ID NO: 199972 - DNA, 20 bp, synthetic construct
  source 1..20: mol_type = other DNA
ctgtctccaaagaaaaagtc

SEQ ID NO: 199973 - DNA, 20 bp, synthetic construct
  source 1..20: mol_type = other DNA
cctgtctccaaagaaaaagt

SEQ ID NO: 199974 - DNA, 20 bp, synthetic construct
  source 1..20: mol_type = other DNA
gcctgtctccaaagaaaaag

SEQ ID NO: 199975 - DNA, 20 bp, synthetic construct
  source 1..20: mol_type = other DNA
agcctgtctccaaagaaaaa

SEQ ID NO: 199976 - DNA, 20 bp, synthetic construct
  source 1..20: mol_type = other DNA
aagcctgtctccaaagaaaa

SEQ ID NO: 199977 - DNA, 20 bp, synthetic construct
  source 1..20: mol_type = other DNA
aaagcctgtctccaaagaaa

SEQ ID NO: 199978 - DNA, 20 bp, synthetic construct
  source 1..20: mol_type = other DNA
aaaagcctgtctccaaagaa

SEQ ID NO: 199979 - DNA, 20 bp, synthetic construct
  source 1..20: mol_type = other DNA
gaaaagcctgtctccaaaga

SEQ ID NO: 199980 - DNA, 20 bp, synthetic construct
  source 1..20: mol_type = other DNA
agaaaagcctgtctccaaag

SEQ ID NO: 199981 - DNA, 20 bp, synthetic construct
  source 1..20: mol_type = other DNA
tagaaaagcctgtctccaaa

SEQ ID NO: 199982 - DNA, 20 bp, synthetic construct
  source 1..20: mol_type = other DNA
atagaaaagcctgtctccaa

SEQ ID NO: 199983 - DNA, 20 bp, synthetic construct
  source 1..20: mol_type = other DNA
catagaaaagcctgtctcca

SEQ ID NO: 199984 - DNA, 20 bp, synthetic construct
  source 1..20: mol_type = other DNA
gcatagaaaagcctgtctcc

SEQ ID NO: 199985 - DNA, 20 bp, synthetic construct
  source 1..20: mol_type = other DNA
ggcatagaaaagcctgtctc

SEQ ID NO: 199986 - DNA, 20 bp, synthetic construct
  source 1..20: mol_type = other DNA
gggcatagaaaagcctgtct

SEQ ID NO: 199987 - DNA, 20 bp, synthetic construct
  source 1..20: mol_type = other DNA
tgggcatagaaaagcctgtc

SEQ ID NO: 199988 - DNA, 20 bp, synthetic construct
  source 1..20: mol_type = other DNA
gtgggcatagaaaagcctgt

SEQ ID NO: 199989 - DNA, 20 bp, synthetic construct
  source 1..20: mol_type = other DNA
ggtgggcatagaaaagcctg

SEQ ID NO: 199990 - DNA, 20 bp, synthetic construct
  source 1..20: mol_type = other DNA
gggtgggcatagaaaagcct

SEQ ID NO: 199991 - DNA, 20 bp, synthetic construct
  source 1..20: mol_type = other DNA
agggtgggcatagaaaagcc

SEQ ID NO: 199992 - DNA, 20 bp, synthetic construct
  source 1..20: mol_type = other DNA
aagggtgggcatagaaaagc

SEQ ID NO: 199993 - DNA, 20 bp, synthetic construct
  source 1..20: mol_type = other DNA
aaagggtgggcatagaaaag

SEQ ID NO: 199994 - DNA, 20 bp, synthetic construct
  source 1..20: mol_type = other DNA
aaaagggtgggcatagaaaa

SEQ ID NO: 199995 - DNA, 20 bp, synthetic construct
  source 1..20: mol_type = other DNA
taaaagggtgggcatagaaa

SEQ ID NO: 199996 - DNA, 20 bp, synthetic construct
  source 1..20: mol_type = other DNA
ataaaagggtgggcatagaa

SEQ ID NO: 199997 - DNA, 20 bp, synthetic construct
  source 1..20: mol_type = other DNA
gataaaagggtgggcataga

SEQ ID NO: 199998 - DNA, 20 bp, synthetic construct
  source 1..20: mol_type = other DNA
agataaaagggtgggcatag

SEQ ID NO: 199999 - DNA, 20 bp, synthetic construct
  source 1..20: mol_type = other DNA
aagataaaagggtgggcata

SEQ ID NO: 200000 - DNA, 20 bp, synthetic construct
  source 1..20: mol_type = other DNA
caagataaaagggtgggcat

SEQ ID NO: 200001 - DNA, 20 bp, synthetic construct
  source 1..20: mol_type = other DNA
gcaagataaaagggtgggca

SEQ ID NO: 200002 - DNA, 20 bp, synthetic construct
  source 1..20: mol_type = other DNA
agcaagataaaagggtgggc

SEQ ID NO: 200003 - DNA, 20 bp, synthetic construct
  source 1..20: mol_type = other DNA
tagcaagataaaagggtggg

SEQ ID NO: 200004 - DNA, 20 bp, synthetic construct
  source 1..20: mol_type = other DNA
ttagcaagataaaagggtgg

SEQ ID NO: 200005 - DNA, 20 bp, synthetic construct
  source 1..20: mol_type = other DNA
gttagcaagataaaagggtg

SEQ ID NO: 200006 - DNA, 20 bp, synthetic construct
  source 1..20: mol_type = other DNA
agttagcaagataaaagggt

SEQ ID NO: 200007 - DNA, 20 bp, synthetic construct
  source 1..20: mol_type = other DNA
aagttagcaagataaaaggg

SEQ ID NO: 200008 - DNA, 20 bp, synthetic construct
  source 1..20: mol_type = other DNA
taagttagcaagataaaagg

SEQ ID NO: 200009 - DNA, 20 bp, synthetic construct
  source 1..20: mol_type = other DNA
ataagttagcaagataaaag

SEQ ID NO: 200010 - DNA, 20 bp, synthetic construct
  source 1..20: mol_type = other DNA
gataagttagcaagataaaa

SEQ ID NO: 200011 - DNA, 20 bp, synthetic construct
  source 1..20: mol_type = other DNA
tgataagttagcaagataaa

SEQ ID NO: 200012 - DNA, 20 bp, synthetic construct
  source 1..20: mol_type = other DNA
atgataagttagcaagataa

SEQ ID NO: 200013 - DNA, 20 bp, synthetic construct
  source 1..20: mol_type = other DNA
gatgataagttagcaagata

SEQ ID NO: 200014 - DNA, 20 bp, synthetic construct
  source 1..20: mol_type = other DNA
tgatgataagttagcaagat

SEQ ID NO: 200015 - DNA, 20 bp, synthetic construct
  source 1..20: mol_type = other DNA
atgatgataagttagcaaga

SEQ ID NO: 200016 - DNA, 20 bp, synthetic construct
  source 1..20: mol_type = other DNA
gatgatgataagttagcaag

SEQ ID NO: 200017 - DNA, 20 bp, synthetic construct
  source 1..20: mol_type = other DNA
ggatgatgataagttagcaa

SEQ ID NO: 200018 - DNA, 20 bp, synthetic construct
  source 1..20: mol_type = other DNA
tggatgatgataagttagca

SEQ ID NO: 200019 - DNA, 20 bp, synthetic construct
  source 1..20: mol_type = other DNA
ctggatgatgataagttagc

SEQ ID NO: 200020 - DNA, 20 bp, synthetic construct
  source 1..20: mol_type = other DNA
cctggatgatgataagttag

SEQ ID NO: 200021 - DNA, 20 bp, synthetic construct
  source 1..20: mol_type = other DNA
acctggatgatgataagtta

SEQ ID NO: 200022 - DNA, 20 bp, synthetic construct
  source 1..20: mol_type = other DNA
aacctggatgatgataagtt

SEQ ID NO: 200023 - DNA, 20 bp, synthetic construct
  source 1..20: mol_type = other DNA
gaacctggatgatgataagt

SEQ ID NO: 200024 - DNA, 20 bp, synthetic construct
  source 1..20: mol_type = other DNA
ggaacctggatgatgataag

SEQ ID NO: 200025 - DNA, 20 bp, synthetic construct
  source 1..20: mol_type = other DNA
tggaacctggatgatgataa

SEQ ID NO: 200026 - DNA, 20 bp, synthetic construct
  source 1..20: mol_type = other DNA
ctggaacctggatgatgata

SEQ ID NO: 200027 - DNA, 20 bp, synthetic construct
  source 1..20: mol_type = other DNA
gctggaacctggatgatgat

SEQ ID NO: 200028 - DNA, 20 bp, synthetic construct
  source 1..20: mol_type = other DNA
tgctggaacctggatgatga

SEQ ID NO: 200029 - DNA, 20 bp, synthetic construct
  source 1..20: mol_type = other DNA
ctgctggaacctggatgatg

SEQ ID NO: 200030 - DNA, 20 bp, synthetic construct
  source 1..20: mol_type = other DNA
tctgctggaacctggatgat

SEQ ID NO: 200031 - DNA, 20 bp, synthetic construct
  source 1..20: mol_type = other DNA
ttctgctggaacctggatga

SEQ ID NO: 200032 - DNA, 20 bp, synthetic construct
  source 1..20: mol_type = other DNA
tttctgctggaacctggatg

SEQ ID NO: 200033 - DNA, 20 bp, synthetic construct
  source 1..20: mol_type = other DNA
gtttctgctggaacctggat

SEQ ID NO: 200034 - DNA, 20 bp, synthetic construct
  source 1..20: mol_type = other DNA
tgtttctgctggaacctgga

SEQ ID NO: 200035 - DNA, 20 bp, synthetic construct
  source 1..20: mol_type = other DNA
atgtttctgctggaacctgg

SEQ ID NO: 200036 - DNA, 20 bp, synthetic construct
  source 1..20: mol_type = other DNA
aatgtttctgctggaacctg

SEQ ID NO: 200037 - DNA, 20 bp, synthetic construct
  source 1..20: mol_type = other DNA
taatgtttctgctggaacct

SEQ ID NO: 200038 - DNA, 20 bp, synthetic construct
  source 1..20: mol_type = other DNA
gtaatgtttctgctggaacc

SEQ ID NO: 200039 - DNA, 20 bp, synthetic construct
  source 1..20: mol_type = other DNA
agtaatgtttctgctggaac

SEQ ID NO: 200040 - DNA, 20 bp, synthetic construct
  source 1..20: mol_type = other DNA
aagtaatgtttctgctggaa

SEQ ID NO: 200041 - DNA, 20 bp, synthetic construct
  source 1..20: mol_type = other DNA
gaagtaatgtttctgctgga

SEQ ID NO: 200042 - DNA, 20 bp, synthetic construct
  source 1..20: mol_type = other DNA
ggaagtaatgtttctgctgg

SEQ ID NO: 200043 - DNA, 20 bp, synthetic construct
  source 1..20: mol_type = other DNA
gggaagtaatgtttctgctg

SEQ ID NO: 200044 - DNA, 20 bp, synthetic construct
  source 1..20: mol_type = other DNA
ggggaagtaatgtttctgct

SEQ ID NO: 200045 - DNA, 20 bp, synthetic construct
  source 1..20: mol_type = other DNA
gggggaagtaatgtttctgc

SEQ ID NO: 200046 - DNA, 20 bp, synthetic construct
  source 1..20: mol_type = other DNA
tgggggaagtaatgtttctg

SEQ ID NO: 200047 - DNA, 20 bp, synthetic construct
  source 1..20: mol_type = other DNA
ctgggggaagtaatgtttct

SEQ ID NO: 200048 - DNA, 20 bp, synthetic construct
  source 1..20: mol_type = other DNA
cctgggggaagtaatgtttc

SEQ ID NO: 200049 - DNA, 20 bp, synthetic construct
  source 1..20: mol_type = other DNA
tcctgggggaagtaatgttt

SEQ ID NO: 200050 - DNA, 20 bp, synthetic construct
  source 1..20: mol_type = other DNA
ttcctgggggaagtaatgtt

SEQ ID NO: 200051 - DNA, 20 bp, synthetic construct
  source 1..20: mol_type = other DNA
tttcctgggggaagtaatgt

SEQ ID NO: 200052 - DNA, 20 bp, synthetic construct
  source 1..20: mol_type = other DNA
atttcctgggggaagtaatg

SEQ ID NO: 200053 - DNA, 20 bp, synthetic construct
  source 1..20: mol_type = other DNA
aatttcctgggggaagtaat

SEQ ID NO: 200054 - DNA, 20 bp, synthetic construct
  source 1..20: mol_type = other DNA
aaatttcctgggggaagtaa

SEQ ID NO: 200055 - DNA, 20 bp, synthetic construct
  source 1..20: mol_type = other DNA
gaaatttcctgggggaagta

SEQ ID NO: 200056 - DNA, 20 bp, synthetic construct
  source 1..20: mol_type = other DNA
agaaatttcctgggggaagt

SEQ ID NO: 200057 - DNA, 20 bp, synthetic construct
  source 1..20: mol_type = other DNA
aagaaatttcctgggggaag

SEQ ID NO: 200058 - DNA, 20 bp, synthetic construct
  source 1..20: mol_type = other DNA
taagaaatttcctgggggaa

SEQ ID NO: 200059 - DNA, 20 bp, synthetic construct
  source 1..20: mol_type = other DNA
ttaagaaatttcctggggga

SEQ ID NO: 200060 - DNA, 20 bp, synthetic construct
  source 1..20: mol_type = other DNA
cttaagaaatttcctggggg

SEQ ID NO: 200061 - DNA, 20 bp, synthetic construct
  source 1..20: mol_type = other DNA
ccttaagaaatttcctgggg

SEQ ID NO: 200062 - DNA, 20 bp, synthetic construct
  source 1..20: mol_type = other DNA
cccttaagaaatttcctggg

SEQ ID NO: 200063 - DNA, 20 bp, synthetic construct
  source 1..20: mol_type = other DNA
acccttaagaaatttcctgg

SEQ ID NO: 200064 - DNA, 20 bp, synthetic construct
  source 1..20: mol_type = other DNA
cacccttaagaaatttcctg

SEQ ID NO: 200065 - DNA, 20 bp, synthetic construct
  source 1..20: mol_type = other DNA
gcacccttaagaaatttcct

SEQ ID NO: 200066 - DNA, 20 bp, synthetic construct
  source 1..20: mol_type = other DNA
tgcacccttaagaaatttcc

SEQ ID NO: 200067 - DNA, 20 bp, synthetic construct
  source 1..20: mol_type = other DNA
ctgcacccttaagaaatttc

SEQ ID NO: 200068 - DNA, 20 bp, synthetic construct
  source 1..20: mol_type = other DNA
actgcacccttaagaaattt

SEQ ID NO: 200069 - DNA, 20 bp, synthetic construct
  source 1..20: mol_type = other DNA
tactgcacccttaagaaatt

SEQ ID NO: 200070 - DNA, 20 bp, synthetic construct
  source 1..20: mol_type = other DNA
atactgcacccttaagaaat

SEQ ID NO: 200071 - DNA, 20 bp, synthetic construct
  source 1..20: mol_type = other DNA
gatactgcacccttaagaaa

SEQ ID NO: 200072 - DNA, 20 bp, synthetic construct
  source 1..20: mol_type = other DNA
tgatactgcacccttaagaa

SEQ ID NO: 200073 - DNA, 20 bp, synthetic construct
  source 1..20: mol_type = other DNA
atgatactgcacccttaaga

SEQ ID NO: 200074 - DNA, 20 bp, synthetic construct
  source 1..20: mol_type = other DNA
catgatactgcacccttaag

SEQ ID NO: 200075 - DNA, 20 bp, synthetic construct
  source 1..20: mol_type = other DNA
tcatgatactgcacccttaa

SEQ ID NO: 200076 - DNA, 20 bp, synthetic construct
  source 1..20: mol_type = other DNA
atcatgatactgcaccctta

SEQ ID NO: 200077 - DNA, 20 bp, synthetic construct
  source 1..20: mol_type = other DNA
catcatgatactgcaccctt

SEQ ID NO: 200078 - DNA, 20 bp, synthetic construct
  source 1..20: mol_type = other DNA
acatcatgatactgcaccct

SEQ ID NO: 200079 - DNA, 20 bp, synthetic construct
  source 1..20: mol_type = other DNA
gacatcatgatactgcaccc

SEQ ID NO: 200080 - DNA, 20 bp, synthetic construct
  source 1..20: mol_type = other DNA
agacatcatgatactgcacc

SEQ ID NO: 200081 - DNA, 20 bp, synthetic construct
  source 1..20: mol_type = other DNA
cagacatcatgatactgcac

SEQ ID NO: 200082 - DNA, 20 bp, synthetic construct
  source 1..20: mol_type = other DNA
gcagacatcatgatactgca

SEQ ID NO: 200083 - DNA, 20 bp, synthetic construct
  source 1..20: mol_type = other DNA
tgcagacatcatgatactgc

SEQ ID NO: 200084 - DNA, 20 bp, synthetic construct
  source 1..20: mol_type = other DNA
ctgcagacatcatgatactg

SEQ ID NO: 200085 - DNA, 20 bp, synthetic construct
  source 1..20: mol_type = other DNA
gctgcagacatcatgatact

SEQ ID NO: 200086 - DNA, 20 bp, synthetic construct
  source 1..20: mol_type = other DNA
tgctgcagacatcatgatac

SEQ ID NO: 200087 - DNA, 20 bp, synthetic construct
  source 1..20: mol_type = other DNA
ttgctgcagacatcatgata

SEQ ID NO: 200088 - DNA, 20 bp, synthetic construct
  source 1..20: mol_type = other DNA
tttgctgcagacatcatgat

SEQ ID NO: 200089 - DNA, 20 bp, synthetic construct
  source 1..20: mol_type = other DNA
atttgctgcagacatcatga

SEQ ID NO: 200090 - DNA, 20 bp, synthetic construct
  source 1..20: mol_type = other DNA
aatttgctgcagacatcatg

SEQ ID NO: 200091 - DNA, 20 bp, synthetic construct
  source 1..20: mol_type = other DNA
gaatttgctgcagacatcat

SEQ ID NO: 200092 - DNA, 20 bp, synthetic construct
  source 1..20: mol_type = other DNA
agaatttgctgcagacatca

SEQ ID NO: 200093 - DNA, 20 bp, synthetic construct
  source 1..20: mol_type = other DNA
gagaatttgctgcagacatc

SEQ ID NO: 200094 - DNA, 20 bp, synthetic construct
  source 1..20: mol_type = other DNA
tgagaatttgctgcagacat

SEQ ID NO: 200095 - DNA, 20 bp, synthetic construct
  source 1..20: mol_type = other DNA
ttgagaatttgctgcagaca

SEQ ID NO: 200096 - DNA, 20 bp, synthetic construct
  source 1..20: mol_type = other DNA
tttgagaatttgctgcagac

SEQ ID NO: 200097 - DNA, 20 bp, synthetic construct
  source 1..20: mol_type = other DNA
atttgagaatttgctgcaga

SEQ ID NO: 200098 - DNA, 20 bp, synthetic construct
  source 1..20: mol_type = other DNA
tatttgagaatttgctgcag

SEQ ID NO: 200099 - DNA, 20 bp, synthetic construct
  source 1..20: mol_type = other DNA
ctatttgagaatttgctgca

SEQ ID NO: 200100 - DNA, 20 bp, synthetic construct
  source 1..20: mol_type = other DNA
gctatttgagaatttgctgc

SEQ ID NO: 200101 - DNA, 20 bp, synthetic construct
  source 1..20: mol_type = other DNA
agctatttgagaatttgctg

SEQ ID NO: 200102 - DNA, 20 bp, synthetic construct
  source 1..20: mol_type = other DNA
gagctatttgagaatttgct

SEQ ID NO: 200103 - DNA, 20 bp, synthetic construct
  source 1..20: mol_type = other DNA
tgagctatttgagaatttgc

SEQ ID NO: 200104 - DNA, 20 bp, synthetic construct
  source 1..20: mol_type = other DNA
ctgagctatttgagaatttg

SEQ ID NO: 200105 - DNA, 20 bp, synthetic construct
  source 1..20: mol_type = other DNA
cctgagctatttgagaattt

SEQ ID NO: 200106 - DNA, 20 bp, synthetic construct
  source 1..20: mol_type = other DNA
tcctgagctatttgagaatt

SEQ ID NO: 200107 - DNA, 20 bp, synthetic construct
  source 1..20: mol_type = other DNA
ttcctgagctatttgagaat

SEQ ID NO: 200108 - DNA, 20 bp, synthetic construct
  source 1..20: mol_type = other DNA
tttcctgagctatttgagaa

SEQ ID NO: 200109 - DNA, 20 bp, synthetic construct
  source 1..20: mol_type = other DNA
ttttcctgagctatttgaga

SEQ ID NO: 200110 - DNA, 20 bp, synthetic construct
  source 1..20: mol_type = other DNA
tttttcctgagctatttgag

SEQ ID NO: 200111 - DNA, 20 bp, synthetic construct
  source 1..20: mol_type = other DNA
ttttttcctgagctatttga

SEQ ID NO: 200112 - DNA, 20 bp, synthetic construct
  source 1..20: mol_type = other DNA
cttttttcctgagctatttg

SEQ ID NO: 200113 - DNA, 20 bp, synthetic construct
  source 1..20: mol_type = other DNA
acttttttcctgagctattt

SEQ ID NO: 200114 - DNA, 20 bp, synthetic construct
  source 1..20: mol_type = other DNA
tacttttttcctgagctatt

SEQ ID NO: 200115 - DNA, 20 bp, synthetic construct
  source 1..20: mol_type = other DNA
gtacttttttcctgagctat

SEQ ID NO: 200116 - DNA, 20 bp, synthetic construct
  source 1..20: mol_type = other DNA
cgtacttttttcctgagcta

SEQ ID NO: 200117 - DNA, 20 bp, synthetic construct
  source 1..20: mol_type = other DNA
acgtacttttttcctgagct

SEQ ID NO: 200118 - DNA, 20 bp, synthetic construct
  source 1..20: mol_type = other DNA
cacgtacttttttcctgagc

SEQ ID NO: 200119 - DNA, 20 bp, synthetic construct
  source 1..20: mol_type = other DNA
acacgtacttttttcctgag

SEQ ID NO: 200120 - DNA, 20 bp, synthetic construct
  source 1..20: mol_type = other DNA
cacacgtacttttttcctga

SEQ ID NO: 200121 - DNA, 20 bp, synthetic construct
  source 1..20: mol_type = other DNA
acacacgtacttttttcctg

SEQ ID NO: 200122 - DNA, 20 bp, synthetic construct
  source 1..20: mol_type = other DNA
cacacacgtacttttttcct

SEQ ID NO: 200123 - DNA, 20 bp, synthetic construct
  source 1..20: mol_type = other DNA
ccacacacgtacttttttcc

SEQ ID NO: 200124 - DNA, 20 bp, synthetic construct
  source 1..20: mol_type = other DNA
accacacacgtacttttttc

SEQ ID NO: 200125 - DNA, 20 bp, synthetic construct
  source 1..20: mol_type = other DNA
taccacacacgtactttttt

SEQ ID NO: 200126 - DNA, 20 bp, synthetic construct
  source 1..20: mol_type = other DNA
ataccacacacgtacttttt

SEQ ID NO: 200127 - DNA, 20 bp, synthetic construct
  source 1..20: mol_type = other DNA
cataccacacacgtactttt

SEQ ID NO: 200128 - DNA, 20 bp, synthetic construct
  source 1..20: mol_type = other DNA
tcataccacacacgtacttt

SEQ ID NO: 200129 - DNA, 20 bp, synthetic construct
  source 1..20: mol_type = other DNA
ctcataccacacacgtactt

SEQ ID NO: 200130 - DNA, 20 bp, synthetic construct
  source 1..20: mol_type = other DNA
actcataccacacacgtact

SEQ ID NO: 200131 - DNA, 20 bp, synthetic construct
  source 1..20: mol_type = other DNA
cactcataccacacacgtac

SEQ ID NO: 200132 - DNA, 20 bp, synthetic construct
  source 1..20: mol_type = other DNA
acactcataccacacacgta

SEQ ID NO: 200133 - DNA, 20 bp, synthetic construct
  source 1..20: mol_type = other DNA
cacactcataccacacacgt

SEQ ID NO: 200134 - DNA, 20 bp, synthetic construct
  source 1..20: mol_type = other DNA
acacactcataccacacacg

SEQ ID NO: 200135 - DNA, 20 bp, synthetic construct
  source 1..20: mol_type = other DNA
cacacactcataccacacac

SEQ ID NO: 200136 - DNA, 20 bp, synthetic construct
  source 1..20: mol_type = other DNA
acacacactcataccacaca

SEQ ID NO: 200137 - DNA, 20 bp, synthetic construct
  source 1..20: mol_type = other DNA
tacacacactcataccacac

SEQ ID NO: 200138 - DNA, 20 bp, synthetic construct
  source 1..20: mol_type = other DNA
atacacacactcataccaca

SEQ ID NO: 200139 - DNA, 20 bp, synthetic construct
  source 1..20: mol_type = other DNA
catacacacactcataccac

SEQ ID NO: 200140 - DNA, 20 bp, synthetic construct
  source 1..20: mol_type = other DNA
acatacacacactcatacca

SEQ ID NO: 200141 - DNA, 20 bp, synthetic construct
  source 1..20: mol_type = other DNA
tacatacacacactcatacc

SEQ ID NO: 200142 - DNA, 20 bp, synthetic construct
  source 1..20: mol_type = other DNA
atacatacacacactcatac

SEQ ID NO: 200143 - DNA, 20 bp, synthetic construct
  source 1..20: mol_type = other DNA
catacatacacacactcata

SEQ ID NO: 200144 - DNA, 20 bp, synthetic construct
  source 1..20: mol_type = other DNA
acatacatacacacactcat

SEQ ID NO: 200145 - DNA, 20 bp, synthetic construct
  source 1..20: mol_type = other DNA
cacatacatacacacactca

SEQ ID NO: 200146 - DNA, 20 bp, synthetic construct
  source 1..20: mol_type = other DNA
acacatacatacacacactc

SEQ ID NO: 200147 - DNA, 20 bp, synthetic construct
  source 1..20: mol_type = other DNA
cacacatacatacacacact

SEQ ID NO: 200148 - DNA, 20 bp, synthetic construct
  source 1..20: mol_type = other DNA
acacacatacatacacacac

SEQ ID NO: 200149 - DNA, 20 bp, synthetic construct
  source 1..20: mol_type = other DNA
tacacacatacatacacaca

SEQ ID NO: 200150 - DNA, 20 bp, synthetic construct
  source 1..20: mol_type = other DNA
atacacacatacatacacac

SEQ ID NO: 200151 - DNA, 20 bp, synthetic construct
  source 1..20: mol_type = other DNA
tatacacacatacatacaca

SEQ ID NO: 200152 - DNA, 20 bp, synthetic construct
  source 1..20: mol_type = other DNA
atatacacacatacatacac

SEQ ID NO: 200153 - DNA, 20 bp, synthetic construct
  source 1..20: mol_type = other DNA
tatatacacacatacataca

SEQ ID NO: 200154 - DNA, 20 bp, synthetic construct
  source 1..20: mol_type = other DNA
atatatacacacatacatac

SEQ ID NO: 200155 - DNA, 20 bp, synthetic construct
  source 1..20: mol_type = other DNA
tatatatacacacatacata

SEQ ID NO: 200156 - DNA, 20 bp, synthetic construct
  source 1..20: mol_type = other DNA
atatatatacacacatacat

SEQ ID NO: 200157 - DNA, 20 bp, synthetic construct
  source 1..20: mol_type = other DNA
tatatatatacacacataca

SEQ ID NO: 200158 - DNA, 20 bp, synthetic construct
  source 1..20: mol_type = other DNA
gtatatatatacacacatac

SEQ ID NO: 200159 - DNA, 20 bp, synthetic construct
  source 1..20: mol_type = other DNA
tgtatatatatacacacata

SEQ ID NO: 200160 - DNA, 20 bp, synthetic construct
  source 1..20: mol_type = other DNA
gtgtatatatatacacacat

SEQ ID NO: 200161 - DNA, 20 bp, synthetic construct
  source 1..20: mol_type = other DNA
tgtgtatatatatacacaca

SEQ ID NO: 200162 - DNA, 20 bp, synthetic construct
  source 1..20: mol_type = other DNA
atgtgtatatatatacacac

SEQ ID NO: 200163 - DNA, 20 bp, synthetic construct
  source 1..20: mol_type = other DNA
tatgtgtatatatatacaca

SEQ ID NO: 200164 - DNA, 20 bp, synthetic construct
  source 1..20: mol_type = other DNA
atatgtgtatatatatacac

SEQ ID NO: 200165 - DNA, 20 bp, synthetic construct
  source 1..20: mol_type = other DNA
tatatgtgtatatatataca

SEQ ID NO: 200166 - DNA, 20 bp, synthetic construct
  source 1..20: mol_type = other DNA
atatatgtgtatatatatac

SEQ ID NO: 200167 - DNA, 20 bp, synthetic construct
  source 1..20: mol_type = other DNA
tatatatgtgtatatatata

SEQ ID NO: 200168 - DNA, 20 bp, synthetic construct
  source 1..20: mol_type = other DNA
gtatatatgtgtatatatat

SEQ ID NO: 200169 - DNA, 20 bp, synthetic construct
  source 1..20: mol_type = other DNA
tgtatatatgtgtatatata

SEQ ID NO: 200170 - DNA, 20 bp, synthetic construct
  source 1..20: mol_type = other DNA
gtgtatatatgtgtatatat

SEQ ID NO: 200171 - DNA, 20 bp, synthetic construct
  source 1..20: mol_type = other DNA
tgtgtatatatgtgtatata

SEQ ID NO: 200172 - DNA, 20 bp, synthetic construct
  source 1..20: mol_type = other DNA
atgtgtatatatgtgtatat

SEQ ID NO: 200173 - DNA, 20 bp, synthetic construct
  source 1..20: mol_type = other DNA
tatgtgtatatatgtgtata

SEQ ID NO: 200174 - DNA, 20 bp, synthetic construct
  source 1..20: mol_type = other DNA
atatgtgtatatatgtgtat

SEQ ID NO: 200175 - DNA, 20 bp, synthetic construct
  source 1..20: mol_type = other DNA
tatatgtgtatatatgtgta

SEQ ID NO: 200176 - DNA, 20 bp, synthetic construct
  source 1..20: mol_type = other DNA
atatatgtgtatatatgtgt

SEQ ID NO: 200177 - DNA, 20 bp, synthetic construct
  source 1..20: mol_type = other DNA
tatatatgtgtatatatgtg

SEQ ID NO: 200178 - DNA, 20 bp, synthetic construct
  source 1..20: mol_type = other DNA
atatatatgtgtatatatgt

SEQ ID NO: 200179 - DNA, 20 bp, synthetic construct
  source 1..20: mol_type = other DNA
tatatatatgtgtatatatg

SEQ ID NO: 200180 - DNA, 20 bp, synthetic construct
  source 1..20: mol_type = other DNA
gtatatatatgtgtatatat

SEQ ID NO: 200181 - DNA, 20 bp, synthetic construct
  source 1..20: mol_type = other DNA
tgtatatatatgtgtatata

SEQ ID NO: 200182 - DNA, 20 bp, synthetic construct
  source 1..20: mol_type = other DNA
atgtatatatatgtgtatat

SEQ ID NO: 200183 - DNA, 20 bp, synthetic construct
  source 1..20: mol_type = other DNA
tatgtatatatatgtgtata

SEQ ID NO: 200184 - DNA, 20 bp, synthetic construct
  source 1..20: mol_type = other DNA
atatgtatatatatgtgtat

SEQ ID NO: 200185 - DNA, 20 bp, synthetic construct
  source 1..20: mol_type = other DNA
tatatgtatatatatgtgta

SEQ ID NO: 200186 - DNA, 20 bp, synthetic construct
  source 1..20: mol_type = other DNA
atatatgtatatatatgtgt

SEQ ID NO: 200187 - DNA, 20 bp, synthetic construct
  source 1..20: mol_type = other DNA
catatatgtatatatatgtg

SEQ ID NO: 200188 - DNA, 20 bp, synthetic construct
  source 1..20: mol_type = other DNA
acatatatgtatatatatgt

SEQ ID NO: 200189 - DNA, 20 bp, synthetic construct
  source 1..20: mol_type = other DNA
cacatatatgtatatatatg

SEQ ID NO: 200190 - DNA, 20 bp, synthetic construct
  source 1..20: mol_type = other DNA
acacatatatgtatatatat

SEQ ID NO: 200191 - DNA, 20 bp, synthetic construct
  source 1..20: mol_type = other DNA
tacacatatatgtatatata

SEQ ID NO: 200192 - DNA, 20 bp, synthetic construct
  source 1..20: mol_type = other DNA
atacacatatatgtatatat

SEQ ID NO: 200193 - DNA, 20 bp, synthetic construct
  source 1..20: mol_type = other DNA
tatacacatatatgtatata

SEQ ID NO: 200194 - DNA, 20 bp, synthetic construct
  source 1..20: mol_type = other DNA
atatacacatatatgtatat

SEQ ID NO: 200195 - DNA, 20 bp, synthetic construct
  source 1..20: mol_type = other DNA
tatatacacatatatgtata

SEQ ID NO: 200196 - DNA, 20 bp, synthetic construct
  source 1..20: mol_type = other DNA
atatatacacatatatgtat

SEQ ID NO: 200197 - DNA, 20 bp, synthetic construct
  source 1..20: mol_type = other DNA
tatatatacacatatatgta

SEQ ID NO: 200198 - DNA, 20 bp, synthetic construct
  source 1..20: mol_type = other DNA
atatatatacacatatatgt

SEQ ID NO: 200199 - DNA, 20 bp, synthetic construct
  source 1..20: mol_type = other DNA
tatatatatacacatatatg

SEQ ID NO: 200200 - DNA, 20 bp, synthetic construct
  source 1..20: mol_type = other DNA
gtatatatatacacatatat

SEQ ID NO: 200201 - DNA, 20 bp, synthetic construct
  source 1..20: mol_type = other DNA
tgtatatatatacacatata

SEQ ID NO: 200202 - DNA, 20 bp, synthetic construct
  source 1..20: mol_type = other DNA
atgtatatatatacacatat

SEQ ID NO: 200203 - DNA, 20 bp, synthetic construct
  source 1..20: mol_type = other DNA
tatgtatatatatacacata

SEQ ID NO: 200204 - DNA, 20 bp, synthetic construct
  source 1..20: mol_type = other DNA
atatgtatatatatacacat

SEQ ID NO: 200205 - DNA, 20 bp, synthetic construct
  source 1..20: mol_type = other DNA
tatatgtatatatatacaca

SEQ ID NO: 200206 - DNA, 20 bp, synthetic construct
  source 1..20: mol_type = other DNA
atatatgtatatatatacac

SEQ ID NO: 200207 - DNA, 20 bp, synthetic construct
  source 1..20: mol_type = other DNA
catatatgtatatatataca

SEQ ID NO: 200208 - DNA, 20 bp, synthetic construct
  source 1..20: mol_type = other DNA
acatatatgtatatatatac

SEQ ID NO: 200209 - DNA, 20 bp, synthetic construct
  source 1..20: mol_type = other DNA
cacatatatgtatatatata

SEQ ID NO: 200210 - DNA, 20 bp, synthetic construct
  source 1..20: mol_type = other DNA
acacatatatgtatatatat

SEQ ID NO: 200211 - DNA, 20 bp, synthetic construct
  source 1..20: mol_type = other DNA
tacacatatatgtatatata

SEQ ID NO: 200212 - DNA, 20 bp, synthetic construct
  source 1..20: mol_type = other DNA
atacacatatatgtatatat

SEQ ID NO: 200213 - DNA, 20 bp, synthetic construct
  source 1..20: mol_type = other DNA
tatacacatatatgtatata

SEQ ID NO: 200214 - DNA, 20 bp, synthetic construct
  source 1..20: mol_type = other DNA
atatacacatatatgtatat

SEQ ID NO: 200215 - DNA, 20 bp, synthetic construct
  source 1..20: mol_type = other DNA
tatatacacatatatgtata

SEQ ID NO: 200216 - DNA, 20 bp, synthetic construct
  source 1..20: mol_type = other DNA
atatatacacatatatgtat

SEQ ID NO: 200217 - DNA, 20 bp, synthetic construct
  source 1..20: mol_type = other DNA
tatatatacacatatatgta

SEQ ID NO: 200218 - DNA, 20 bp, synthetic construct
  source 1..20: mol_type = other DNA
atatatatacacatatatgt

SEQ ID NO: 200219 - DNA, 20 bp, synthetic construct
  source 1..20: mol_type = other DNA
tatatatatacacatatatg

SEQ ID NO: 200220 - DNA, 20 bp, synthetic construct
  source 1..20: mol_type = other DNA
gtatatatatacacatatat

SEQ ID NO: 200221 - DNA, 20 bp, synthetic construct
  source 1..20: mol_type = other DNA
tgtatatatatacacatata

SEQ ID NO: 200222 - DNA, 20 bp, synthetic construct
  source 1..20: mol_type = other DNA
gtgtatatatatacacatat

SEQ ID NO: 200223 - DNA, 20 bp, synthetic construct
  source 1..20: mol_type = other DNA
tgtgtatatatatacacata

SEQ ID NO: 200224 - DNA, 20 bp, synthetic construct
  source 1..20: mol_type = other DNA
gtgtgtatatatatacacat

SEQ ID NO: 200225 - DNA, 20 bp, synthetic construct
  source 1..20: mol_type = other DNA
tgtgtgtatatatatacaca

SEQ ID NO: 200226 - DNA, 20 bp, synthetic construct
  source 1..20: mol_type = other DNA
gtgtgtgtatatatatacac

SEQ ID NO: 200227 - DNA, 20 bp, synthetic construct
  source 1..20: mol_type = other DNA
tgtgtgtgtatatatataca

SEQ ID NO: 200228 - DNA, 20 bp, synthetic construct
  source 1..20: mol_type = other DNA
atgtgtgtgtatatatatac

SEQ ID NO: 200229 - DNA, 20 bp, synthetic construct
  source 1..20: mol_type = other DNA
tatgtgtgtgtatatatata

SEQ ID NO: 200230 - DNA, 20 bp, synthetic construct
  source 1..20: mol_type = other DNA
gtatgtgtgtgtatatatat

SEQ ID NO: 200231 - DNA, 20 bp, synthetic construct
  source 1..20: mol_type = other DNA
tgtatgtgtgtgtatatata

SEQ ID NO: 200232 - DNA, 20 bp, synthetic construct
  source 1..20: mol_type = other DNA
gtgtatgtgtgtgtatatat

SEQ ID NO: 200233 - DNA, 20 bp, synthetic construct
  source 1..20: mol_type = other DNA
tgtgtatgtgtgtgtatata

SEQ ID NO: 200234 - DNA, 20 bp, synthetic construct
  source 1..20: mol_type = other DNA
atgtgtatgtgtgtgtatat

SEQ ID NO: 200235 - DNA, 20 bp, synthetic construct
  source 1..20: mol_type = other DNA
tatgtgtatgtgtgtgtata

SEQ ID NO: 200236 - DNA, 20 bp, synthetic construct
  source 1..20: mol_type = other DNA
atatgtgtatgtgtgtgtat

SEQ ID NO: 200237 - DNA, 20 bp, synthetic construct
  source 1..20: mol_type = other DNA
tatatgtgtatgtgtgtgta

SEQ ID NO: 200238 - DNA, 20 bp, synthetic construct
  source 1..20: mol_type = other DNA
atatatgtgtatgtgtgtgt

SEQ ID NO: 200239 - DNA, 20 bp, synthetic construct
  source 1..20: mol_type = other DNA
tatatatgtgtatgtgtgtg

SEQ ID NO: 200240 - DNA, 20 bp, synthetic construct
  source 1..20: mol_type = other DNA
atatatatgtgtatgtgtgt

SEQ ID NO: 200241 - DNA, 20 bp, synthetic construct
  source 1..20: mol_type = other DNA
tatatatatgtgtatgtgtg

SEQ ID NO: 200242 - DNA, 20 bp, synthetic construct
  source 1..20: mol_type = other DNA
gtatatatatgtgtatgtgt

SEQ ID NO: 200243 - DNA, 20 bp, synthetic construct
  source 1..20: mol_type = other DNA
tgtatatatatgtgtatgtg

SEQ ID NO: 200244 - DNA, 20 bp, synthetic construct
  source 1..20: mol_type = other DNA
gtgtatatatatgtgtatgt

SEQ ID NO: 200245 - DNA, 20 bp, synthetic construct
  source 1..20: mol_type = other DNA
tgtgtatatatatgtgtatg

SEQ ID NO: 200246 - DNA, 20 bp, synthetic construct
  source 1..20: mol_type = other DNA
gtgtgtatatatatgtgtat

SEQ ID NO: 200247 - DNA, 20 bp, synthetic construct
  source 1..20: mol_type = other DNA
tgtgtgtatatatatgtgta

SEQ ID NO: 200248 - DNA, 20 bp, synthetic construct
  source 1..20: mol_type = other DNA
gtgtgtgtatatatatgtgt

SEQ ID NO: 200249 - DNA, 20 bp, synthetic construct
  source 1..20: mol_type = other DNA
tgtgtgtgtatatatatgtg

SEQ ID NO: 200250 - DNA, 20 bp, synthetic construct
  source 1..20: mol_type = other DNA
gtgtgtgtgtatatatatgt

SEQ ID NO: 200251 - DNA, 20 bp, synthetic construct
  source 1..20: mol_type = other DNA
tgtgtgtgtgtatatatatg

SEQ ID NO: 200252 - DNA, 20 bp, synthetic construct
  source 1..20: mol_type = other DNA
atgtgtgtgtgtatatatat

SEQ ID NO: 200253 - DNA, 20 bp, synthetic construct
  source 1..20: mol_type = other DNA
tatgtgtgtgtgtatatata

SEQ ID NO: 200254 - DNA, 20 bp, synthetic construct
  source 1..20: mol_type = other DNA
gtatgtgtgtgtgtatatat

SEQ ID NO: 200255 - DNA, 20 bp, synthetic construct
  source 1..20: mol_type = other DNA
tgtatgtgtgtgtgtatata

SEQ ID NO: 200256 - DNA, 20 bp, synthetic construct
  source 1..20: mol_type = other DNA
atgtatgtgtgtgtgtatat

SEQ ID NO: 200257 - DNA, 20 bp, synthetic construct
  source 1..20: mol_type = other DNA
tatgtatgtgtgtgtgtata

SEQ ID NO: 200258 - DNA, 20 bp, synthetic construct
  source 1..20: mol_type = other DNA
gtatgtatgtgtgtgtgtat

SEQ ID NO: 200259 - DNA, 20 bp, synthetic construct
  source 1..20: mol_type = other DNA
tgtatgtatgtgtgtgtgta

SEQ ID NO: 200260 - DNA, 20 bp, synthetic construct
  source 1..20: mol_type = other DNA
atgtatgtatgtgtgtgtgt

SEQ ID NO: 200261 - DNA, 20 bp, synthetic construct
  source 1..20: mol_type = other DNA
catgtatgtatgtgtgtgtg

SEQ ID NO: 200262 - DNA, 20 bp, synthetic construct
  source 1..20: mol_type = other DNA
acatgtatgtatgtgtgtgt

SEQ ID NO: 200263 - DNA, 20 bp, synthetic construct
  source 1..20: mol_type = other DNA
tacatgtatgtatgtgtgtg

SEQ ID NO: 200264 - DNA, 20 bp, synthetic construct
  source 1..20: mol_type = other DNA
atacatgtatgtatgtgtgt

SEQ ID NO: 200265 - DNA, 20 bp, synthetic construct
  source 1..20: mol_type = other DNA
aatacatgtatgtatgtgtg

SEQ ID NO: 200266 - DNA, 20 bp, synthetic construct
  source 1..20: mol_type = other DNA
aaatacatgtatgtatgtgt

SEQ ID NO: 200267 - DNA, 20 bp, synthetic construct
  source 1..20: mol_type = other DNA
aaaatacatgtatgtatgtg

SEQ ID NO: 200268 - DNA, 20 bp, synthetic construct
  source 1..20: mol_type = other DNA
aaaaatacatgtatgtatgt

SEQ ID NO: 200269 - DNA, 20 bp, synthetic construct
  source 1..20: mol_type = other DNA
taaaaatacatgtatgtatg

SEQ ID NO: 200270 - DNA, 20 bp, synthetic construct
  source 1..20: mol_type = other DNA
ataaaaatacatgtatgtat

SEQ ID NO: 200271 - DNA, 20 bp, synthetic construct
  source 1..20: mol_type = other DNA
tataaaaatacatgtatgta

SEQ ID NO: 200272 - DNA, 20 bp, synthetic construct
  source 1..20: mol_type = other DNA
atataaaaatacatgtatgt

SEQ ID NO: 200273 - DNA, 20 bp, synthetic construct
  source 1..20: mol_type = other DNA
tatataaaaatacatgtatg

SEQ ID NO: 200274 - DNA, 20 bp, synthetic construct
  source 1..20: mol_type = other DNA
ttatataaaaatacatgtat

SEQ ID NO: 200275 - DNA, 20 bp, synthetic construct
  source 1..20: mol_type = other DNA
attatataaaaatacatgta

SEQ ID NO: 200276 - DNA, 20 bp, synthetic construct
  source 1..20: mol_type = other DNA
aattatataaaaatacatgt

SEQ ID NO: 200277 - DNA, 20 bp, synthetic construct
  source 1..20: mol_type = other DNA
taattatataaaaatacatg

SEQ ID NO: 200278 - DNA, 20 bp, synthetic construct
  source 1..20: mol_type = other DNA
ataattatataaaaatacat

SEQ ID NO: 200279 - DNA, 20 bp, synthetic construct
  source 1..20: mol_type = other DNA
tataattatataaaaataca

SEQ ID NO: 200280 - DNA, 20 bp, synthetic construct
  source 1..20: mol_type = other DNA
atataattatataaaaatac

SEQ ID NO: 200281 - DNA, 20 bp, synthetic construct
  source 1..20: mol_type = other DNA
tatataattatataaaaata

SEQ ID NO: 200282 - DNA, 20 bp, synthetic construct
  source 1..20: mol_type = other DNA
atatataattatataaaaat

SEQ ID NO: 200283 - DNA, 20 bp, synthetic construct
  source 1..20: mol_type = other DNA
catatataattatataaaaa

SEQ ID NO: 200284 - DNA, 20 bp, synthetic construct
  source 1..20: mol_type = other DNA
gcatatataattatataaaa

SEQ ID NO: 200285 - DNA, 20 bp, synthetic construct
  source 1..20: mol_type = other DNA
tgcatatataattatataaa

SEQ ID NO: 200286 - DNA, 20 bp, synthetic construct
  source 1..20: mol_type = other DNA
ctgcatatataattatataa

SEQ ID NO: 200287 - DNA, 20 bp, synthetic construct
  source 1..20: mol_type = other DNA
tctgcatatataattatata

SEQ ID NO: 200288 - DNA, 20 bp, synthetic construct
  source 1..20: mol_type = other DNA
ctctgcatatataattatat

SEQ ID NO: 200289 - DNA, 20 bp, synthetic construct
  source 1..20: mol_type = other DNA
tctctgcatatataattata

SEQ ID NO: 200290 - DNA, 20 bp, synthetic construct
  source 1..20: mol_type = other DNA
ctctctgcatatataattat

SEQ ID NO: 200291 - DNA, 20 bp, synthetic construct
  source 1..20: mol_type = other DNA
actctctgcatatataatta

SEQ ID NO: 200292 - DNA, 20 bp, synthetic construct
  source 1..20: mol_type = other DNA
cactctctgcatatataatt

SEQ ID NO: 200293 - DNA, 20 bp, synthetic construct
  source 1..20: mol_type = other DNA
gcactctctgcatatataat

SEQ ID NO: 200294 - DNA, 20 bp, synthetic construct
  source 1..20: mol_type = other DNA
tgcactctctgcatatataa

SEQ ID NO: 200295 - DNA, 20 bp, synthetic construct
  source 1..20: mol_type = other DNA
ttgcactctctgcatatata

SEQ ID NO: 200296 - DNA, 20 bp, synthetic construct
  source 1..20: mol_type = other DNA
tttgcactctctgcatatat

SEQ ID NO: 200297 - DNA, 20 bp, synthetic construct
  source 1..20: mol_type = other DNA
atttgcactctctgcatata

SEQ ID NO: 200298 - DNA, 20 bp, synthetic construct
  source 1..20: mol_type = other DNA
catttgcactctctgcatat

SEQ ID NO: 200299 - DNA, 20 bp, synthetic construct
  source 1..20: mol_type = other DNA
acatttgcactctctgcata

SEQ ID NO: 200300 - DNA, 20 bp, synthetic construct
  source 1..20: mol_type = other DNA
aacatttgcactctctgcat

SEQ ID NO: 200301 - DNA, 20 bp, synthetic construct
  source 1..20: mol_type = other DNA
caacatttgcactctctgca

SEQ ID NO: 200302 - DNA, 20 bp, synthetic construct
  source 1..20: mol_type = other DNA
gcaacatttgcactctctgc

SEQ ID NO: 200303 - DNA, 20 bp, synthetic construct
  source 1..20: mol_type = other DNA
ggcaacatttgcactctctg

SEQ ID NO: 200304 - DNA, 20 bp, synthetic construct
  source 1..20: mol_type = other DNA
tggcaacatttgcactctct

SEQ ID NO: 200305 - DNA, 20 bp, synthetic construct
  source 1..20: mol_type = other DNA
ttggcaacatttgcactctc

SEQ ID NO: 200306 - DNA, 20 bp, synthetic construct
  source 1..20: mol_type = other DNA
cttggcaacatttgcactct

SEQ ID NO: 200307 - DNA, 20 bp, synthetic construct
  source 1..20: mol_type = other DNA
acttggcaacatttgcactc

SEQ ID NO: 200308 - DNA, 20 bp, synthetic construct
  source 1..20: mol_type = other DNA
aacttggcaacatttgcact

SEQ ID NO: 200309 - DNA, 20 bp, synthetic construct
  source 1..20: mol_type = other DNA
taacttggcaacatttgcac

SEQ ID NO: 200310 - DNA, 20 bp, synthetic construct
  source 1..20: mol_type = other DNA
ttaacttggcaacatttgca

SEQ ID NO: 200311 - DNA, 20 bp, synthetic construct
  source 1..20: mol_type = other DNA
tttaacttggcaacatttgc

SEQ ID NO: 200312 - DNA, 20 bp, synthetic construct
  source 1..20: mol_type = other DNA
ctttaacttggcaacatttg

SEQ ID NO: 200313 - DNA, 20 bp, synthetic construct
  source 1..20: mol_type = other DNA
tctttaacttggcaacattt

SEQ ID NO: 200314 - DNA, 20 bp, synthetic construct
  source 1..20: mol_type = other DNA
atctttaacttggcaacatt

SEQ ID NO: 200315 - DNA, 20 bp, synthetic construct
  source 1..20: mol_type = other DNA
aatctttaacttggcaacat

SEQ ID NO: 200316 - DNA, 20 bp, synthetic construct
  source 1..20: mol_type = other DNA
caatctttaacttggcaaca

SEQ ID NO: 200317 - DNA, 20 bp, synthetic construct
  source 1..20: mol_type = other DNA
ccaatctttaacttggcaac

SEQ ID NO: 200318 - DNA, 20 bp, synthetic construct
  source 1..20: mol_type = other DNA
accaatctttaacttggcaa

SEQ ID NO: 200319 - DNA, 20 bp, synthetic construct
  source 1..20: mol_type = other DNA
caccaatctttaacttggca

SEQ ID NO: 200320 - DNA, 20 bp, synthetic construct
  source 1..20: mol_type = other DNA
tcaccaatctttaacttggc

SEQ ID NO: 200321 - DNA, 20 bp, synthetic construct
  source 1..20: mol_type = other DNA
ctcaccaatctttaacttgg

SEQ ID NO: 200322 - DNA, 20 bp, synthetic construct
  source 1..20: mol_type = other DNA
actcaccaatctttaacttg

SEQ ID NO: 200323 - DNA, 20 bp, synthetic construct
  source 1..20: mol_type = other DNA
gactcaccaatctttaactt

SEQ ID NO: 200324 - DNA, 20 bp, synthetic construct
  source 1..20: mol_type = other DNA
agactcaccaatctttaact

SEQ ID NO: 200325 - DNA, 20 bp, synthetic construct
  source 1..20: mol_type = other DNA
tagactcaccaatctttaac

SEQ ID NO: 200326 - DNA, 20 bp, synthetic construct
  source 1..20: mol_type = other DNA
ctagactcaccaatctttaa

SEQ ID NO: 200327 - DNA, 20 bp, synthetic construct
  source 1..20: mol_type = other DNA
cctagactcaccaatcttta

SEQ ID NO: 200328 - DNA, 20 bp, synthetic construct
  source 1..20: mol_type = other DNA
acctagactcaccaatcttt

SEQ ID NO: 200329 - DNA, 20 bp, synthetic construct
  source 1..20: mol_type = other DNA
cacctagactcaccaatctt

SEQ ID NO: 200330 - DNA, 20 bp, synthetic construct
  source 1..20: mol_type = other DNA
tcacctagactcaccaatct

SEQ ID NO: 200331 - DNA, 20 bp, synthetic construct
  source 1..20: mol_type = other DNA
ttcacctagactcaccaatc

SEQ ID NO: 200332 - DNA, 20 bp, synthetic construct
  source 1..20: mol_type = other DNA
cttcacctagactcaccaat

SEQ ID NO: 200333 - DNA, 20 bp, synthetic construct
  source 1..20: mol_type = other DNA
ccttcacctagactcaccaa

SEQ ID NO: 200334 - DNA, 20 bp, synthetic construct
  source 1..20: mol_type = other DNA
cccttcacctagactcacca

SEQ ID NO: 200335 - DNA, 20 bp, synthetic construct
  source 1..20: mol_type = other DNA
tcccttcacctagactcacc

SEQ ID NO: 200336 - DNA, 20 bp, synthetic construct
  source 1..20: mol_type = other DNA
ttcccttcacctagactcac

SEQ ID NO: 200337 - DNA, 20 bp, synthetic construct
  source 1..20: mol_type = other DNA
attcccttcacctagactca

SEQ ID NO: 200338 - DNA, 20 bp, synthetic construct
  source 1..20: mol_type = other DNA
tattcccttcacctagactc

SEQ ID NO: 200339 - DNA, 20 bp, synthetic construct
  source 1..20: mol_type = other DNA
atattcccttcacctagact

SEQ ID NO: 200340 - DNA, 20 bp, synthetic construct
  source 1..20: mol_type = other DNA
catattcccttcacctagac

SEQ ID NO: 200341 - DNA, 20 bp, synthetic construct
  source 1..20: mol_type = other DNA
ccatattcccttcacctaga

SEQ ID NO: 200342 - DNA, 20 bp, synthetic construct
  source 1..20: mol_type = other DNA
accatattcccttcacctag

SEQ ID NO: 200343 - DNA, 20 bp, synthetic construct
  source 1..20: mol_type = other DNA
taccatattcccttcaccta

SEQ ID NO: 200344 - DNA, 20 bp, synthetic construct
  source 1..20: mol_type = other DNA
ataccatattcccttcacct

SEQ ID NO: 200345 - DNA, 20 bp, synthetic construct
  source 1..20: mol_type = other DNA
aataccatattcccttcacc

SEQ ID NO: 200346 - DNA, 20 bp, synthetic construct
  source 1..20: mol_type = other DNA
aaataccatattcccttcac

SEQ ID NO: 200347 - DNA, 20 bp, synthetic construct
  source 1..20: mol_type = other DNA
taaataccatattcccttca

SEQ ID NO: 200348 - DNA, 20 bp, synthetic construct
  source 1..20: mol_type = other DNA
ataaataccatattcccttc

SEQ ID NO: 200349 - DNA, 20 bp, synthetic construct
  source 1..20: mol_type = other DNA
aataaataccatattccctt

SEQ ID NO: 200350 - DNA, 20 bp, synthetic construct
  source 1..20: mol_type = other DNA
caataaataccatattccct

SEQ ID NO: 200351 - DNA, 20 bp, synthetic construct
  source 1..20: mol_type = other DNA
acaataaataccatattccc

SEQ ID NO: 200352 - DNA, 20 bp, synthetic construct
  source 1..20: mol_type = other DNA
tacaataaataccatattcc

SEQ ID NO: 200353 - DNA, 20 bp, synthetic construct
  source 1..20: mol_type = other DNA
atacaataaataccatattc

SEQ ID NO: 200354 - DNA, 20 bp, synthetic construct
  source 1..20: mol_type = other DNA
aatacaataaataccatatt

SEQ ID NO: 200355 - DNA, 20 bp, synthetic construct
  source 1..20: mol_type = other DNA
taatacaataaataccatat

SEQ ID NO: 200356 - DNA, 20 bp, synthetic construct
  source 1..20: mol_type = other DNA
ataatacaataaataccata

SEQ ID NO: 200357 - DNA, 20 bp, synthetic construct
  source 1..20: mol_type = other DNA
aataatacaataaataccat

SEQ ID NO: 200358 - DNA, 20 bp, synthetic construct
  source 1..20: mol_type = other DNA
aaataatacaataaatacca

SEQ ID NO: 200359 - DNA, 20 bp, synthetic construct
  source 1..20: mol_type = other DNA
caaataatacaataaatacc

SEQ ID NO: 200360 - DNA, 20 bp, synthetic construct
  source 1..20: mol_type = other DNA
acaaataatacaataaatac

SEQ ID NO: 200361 - DNA, 20 bp, synthetic construct
  source 1..20: mol_type = other DNA
cacaaataatacaataaata

SEQ ID NO: 200362 - DNA, 20 bp, synthetic construct
  source 1..20: mol_type = other DNA
gcacaaataatacaataaat

SEQ ID NO: 200363 - DNA, 20 bp, synthetic construct
  source 1..20: mol_type = other DNA
tgcacaaataatacaataaa

SEQ ID NO: 200364 - DNA, 20 bp, synthetic construct
  source 1..20: mol_type = other DNA
ttgcacaaataatacaataa

SEQ ID NO: 200365 - DNA, 20 bp, synthetic construct
  source 1..20: mol_type = other DNA
gttgcacaaataatacaata

SEQ ID NO: 200366 - DNA, 20 bp, synthetic construct
  source 1..20: mol_type = other DNA
agttgcacaaataatacaat

SEQ ID NO: 200367 - DNA, 20 bp, synthetic construct
  source 1..20: mol_type = other DNA
aagttgcacaaataatacaa

SEQ ID NO: 200368 - DNA, 20 bp, synthetic construct
  source 1..20: mol_type = other DNA
aaagttgcacaaataataca

SEQ ID NO: 200369 - DNA, 20 bp, synthetic construct
  source 1..20: mol_type = other DNA
aaaagttgcacaaataatac

SEQ ID NO: 200370 - DNA, 20 bp, synthetic construct
  source 1..20: mol_type = other DNA
gaaaagttgcacaaataata

SEQ ID NO: 200371 - DNA, 20 bp, synthetic construct
  source 1..20: mol_type = other DNA
agaaaagttgcacaaataat

SEQ ID NO: 200372 - DNA, 20 bp, synthetic construct
  source 1..20: mol_type = other DNA
aagaaaagttgcacaaataa

SEQ ID NO: 200373 - DNA, 20 bp, synthetic construct
  source 1..20: mol_type = other DNA
taagaaaagttgcacaaata

SEQ ID NO: 200374 - DNA, 20 bp, synthetic construct
  source 1..20: mol_type = other DNA
ttaagaaaagttgcacaaat

SEQ ID NO: 200375 - DNA, 20 bp, synthetic construct
  source 1..20: mol_type = other DNA
cttaagaaaagttgcacaaa

SEQ ID NO: 200376 - DNA, 20 bp, synthetic construct
  source 1..20: mol_type = other DNA
acttaagaaaagttgcacaa

SEQ ID NO: 200377 - DNA, 20 bp, synthetic construct
  source 1..20: mol_type = other DNA
aacttaagaaaagttgcaca

SEQ ID NO: 200378 - DNA, 20 bp, synthetic construct
  source 1..20: mol_type = other DNA
aaacttaagaaaagttgcac

SEQ ID NO: 200379 - DNA, 20 bp, synthetic construct
  source 1..20: mol_type = other DNA
caaacttaagaaaagttgca

SEQ ID NO: 200380 - DNA, 20 bp, synthetic construct
  source 1..20: mol_type = other DNA
tcaaacttaagaaaagttgc

SEQ ID NO: 200381 - DNA, 20 bp, synthetic construct
  source 1..20: mol_type = other DNA
ttcaaacttaagaaaagttg

SEQ ID NO: 200382 - DNA, 20 bp, synthetic construct
  source 1..20: mol_type = other DNA
tttcaaacttaagaaaagtt

SEQ ID NO: 200383 - DNA, 20 bp, synthetic construct
  source 1..20: mol_type = other DNA
ttttcaaacttaagaaaagt

SEQ ID NO: 200384 - DNA, 20 bp, synthetic construct
  source 1..20: mol_type = other DNA
attttcaaacttaagaaaag

SEQ ID NO: 200385 - DNA, 20 bp, synthetic construct
  source 1..20: mol_type = other DNA
aattttcaaacttaagaaaa

SEQ ID NO: 200386 - DNA, 20 bp, synthetic construct
  source 1..20: mol_type = other DNA
aaattttcaaacttaagaaa

SEQ ID NO: 200387 - DNA, 20 bp, synthetic construct
  source 1..20: mol_type = other DNA
aaaattttcaaacttaagaa

SEQ ID NO: 200388 - DNA, 20 bp, synthetic construct
  source 1..20: mol_type = other DNA
gaaaattttcaaacttaaga

SEQ ID NO: 200389 - DNA, 20 bp, synthetic construct
  source 1..20: mol_type = other DNA
tgaaaattttcaaacttaag

SEQ ID NO: 200390 - DNA, 20 bp, synthetic construct
  source 1..20: mol_type = other DNA
ttgaaaattttcaaacttaa

SEQ ID NO: 200391 - DNA, 20 bp, synthetic construct
  source 1..20: mol_type = other DNA
tttgaaaattttcaaactta

SEQ ID NO: 200392 - DNA, 20 bp, synthetic construct
  source 1..20: mol_type = other DNA
ttttgaaaattttcaaactt

SEQ ID NO: 200393 - DNA, 20 bp, synthetic construct
  source 1..20: mol_type = other DNA
gttttgaaaattttcaaact

SEQ ID NO: 200394 - DNA, 20 bp, synthetic construct
  source 1..20: mol_type = other DNA
tgttttgaaaattttcaaac

SEQ ID NO: 200395 - DNA, 20 bp, synthetic construct
  source 1..20: mol_type = other DNA
ttgttttgaaaattttcaaa

SEQ ID NO: 200396 - DNA, 20 bp, synthetic construct
  source 1..20: mol_type = other DNA
tttgttttgaaaattttcaa

SEQ ID NO: 200397 - DNA, 20 bp, synthetic construct
  source 1..20: mol_type = other DNA
ttttgttttgaaaattttca

SEQ ID NO: 200398 - DNA, 20 bp, synthetic construct
  source 1..20: mol_type = other DNA
tttttgttttgaaaattttc

SEQ ID NO: 200399 - DNA, 20 bp, synthetic construct
  source 1..20: mol_type = other DNA
ttttttgttttgaaaatttt

SEQ ID NO: 200400 - DNA, 20 bp, synthetic construct
  source 1..20: mol_type = other DNA
attttttgttttgaaaattt

SEQ ID NO: 200401 - DNA, 20 bp, synthetic construct
  source 1..20: mol_type = other DNA
aattttttgttttgaaaatt

SEQ ID NO: 200402 - DNA, 20 bp, synthetic construct
  source 1..20: mol_type = other DNA
caattttttgttttgaaaat

SEQ ID NO: 200403 - DNA, 20 bp, synthetic construct
  source 1..20: mol_type = other DNA
ccaattttttgttttgaaaa

SEQ ID NO: 200404 - DNA, 20 bp, synthetic construct
  source 1..20: mol_type = other DNA
tccaattttttgttttgaaa

SEQ ID NO: 200405 - DNA, 20 bp, synthetic construct
  source 1..20: mol_type = other DNA
ctccaattttttgttttgaa

SEQ ID NO: 200406 - DNA, 20 bp, synthetic construct
  source 1..20: mol_type = other DNA
cctccaattttttgttttga

SEQ ID NO: 200407 - DNA, 20 bp, synthetic construct
  source 1..20: mol_type = other DNA
tcctccaattttttgttttg

SEQ ID NO: 200408 - DNA, 20 bp, synthetic construct
  source 1..20: mol_type = other DNA
ttcctccaattttttgtttt

SEQ ID NO: 200409 - DNA, 20 bp, synthetic construct
  source 1..20: mol_type = other DNA
cttcctccaattttttgttt

SEQ ID NO: 200410 - DNA, 20 bp, synthetic construct
  source 1..20: mol_type = other DNA
tcttcctccaattttttgtt

SEQ ID NO: 200411 - DNA, 20 bp, synthetic construct
  source 1..20: mol_type = other DNA
ttcttcctccaattttttgt

SEQ ID NO: 200412 - DNA, 20 bp, synthetic construct
  source 1..20: mol_type = other DNA
cttcttcctccaattttttg

SEQ ID NO: 200413 - DNA, 20 bp, synthetic construct
  source 1..20: mol_type = other DNA
ccttcttcctccaatttttt

SEQ ID NO: 200414 - DNA, 20 bp, synthetic construct
  source 1..20: mol_type = other DNA
gccttcttcctccaattttt

SEQ ID NO: 200415 - DNA, 20 bp, synthetic construct
  source 1..20: mol_type = other DNA
tgccttcttcctccaatttt

SEQ ID NO: 200416 - DNA, 20 bp, synthetic construct
  source 1..20: mol_type = other DNA
atgccttcttcctccaattt

SEQ ID NO: 200417 - DNA, 20 bp, synthetic construct
  source 1..20: mol_type = other DNA
catgccttcttcctccaatt

SEQ ID NO: 200418 - DNA, 20 bp, synthetic construct
  source 1..20: mol_type = other DNA
gcatgccttcttcctccaat

SEQ ID NO: 200419 - DNA, 20 bp, synthetic construct
  source 1..20: mol_type = other DNA
ggcatgccttcttcctccaa

SEQ ID NO: 200420 - DNA, 20 bp, synthetic construct
  source 1..20: mol_type = other DNA
tggcatgccttcttcctcca

SEQ ID NO: 200421 - DNA, 20 bp, synthetic construct
  source 1..20: mol_type = other DNA
ctggcatgccttcttcctcc

SEQ ID NO: 200422 - DNA, 20 bp, synthetic construct
  source 1..20: mol_type = other DNA
actggcatgccttcttcctc

SEQ ID NO: 200423 - DNA, 20 bp, synthetic construct
  source 1..20: mol_type = other DNA
gactggcatgccttcttcct

SEQ ID NO: 200424 - DNA, 20 bp, synthetic construct
  source 1..20: mol_type = other DNA
agactggcatgccttcttcc

SEQ ID NO: 200425 - DNA, 20 bp, synthetic construct
  source 1..20: mol_type = other DNA
tagactggcatgccttcttc

SEQ ID NO: 200426 - DNA, 20 bp, synthetic construct
  source 1..20: mol_type = other DNA
gtagactggcatgccttctt

SEQ ID NO: 200427 - DNA, 20 bp, synthetic construct
  source 1..20: mol_type = other DNA
ggtagactggcatgccttct

SEQ ID NO: 200428 - DNA, 20 bp, synthetic construct
  source 1..20: mol_type = other DNA
gggtagactggcatgccttc

SEQ ID NO: 200429 - DNA, 20 bp, synthetic construct
  source 1..20: mol_type = other DNA
ggggtagactggcatgcctt

SEQ ID NO: 200430 - DNA, 20 bp, synthetic construct
  source 1..20: mol_type = other DNA
tggggtagactggcatgcct

SEQ ID NO: 200431 - DNA, 20 bp, synthetic construct
  source 1..20: mol_type = other DNA
ttggggtagactggcatgcc

SEQ ID NO: 200432 - DNA, 20 bp, synthetic construct
  source 1..20: mol_type = other DNA
cttggggtagactggcatgc

SEQ ID NO: 200433 - DNA, 20 bp, synthetic construct
  source 1..20: mol_type = other DNA
gcttggggtagactggcatg

SEQ ID NO: 200434 - DNA, 20 bp, synthetic construct
  source 1..20: mol_type = other DNA
ggcttggggtagactggcat

SEQ ID NO: 200435 - DNA, 20 bp, synthetic construct
  source 1..20: mol_type = other DNA
gggcttggggtagactggca

SEQ ID NO: 200436 - DNA, 20 bp, synthetic construct
  source 1..20: mol_type = other DNA
agggcttggggtagactggc

SEQ ID NO: 200437 - DNA, 20 bp, synthetic construct
  source 1..20: mol_type = other DNA
gagggcttggggtagactgg

SEQ ID NO: 200438 - DNA, 20 bp, synthetic construct
  source 1..20: mol_type = other DNA
ggagggcttggggtagactg

SEQ ID NO: 200439 - DNA, 20 bp, synthetic construct
  source 1..20: mol_type = other DNA
tggagggcttggggtagact

SEQ ID NO: 200440 - DNA, 20 bp, synthetic construct
  source 1..20: mol_type = other DNA
atggagggcttggggtagac

SEQ ID NO: 200441 - DNA, 20 bp, synthetic construct
  source 1..20: mol_type = other DNA
aatggagggcttggggtaga

SEQ ID NO: 200442 - DNA, 20 bp, synthetic construct
  source 1..20: mol_type = other DNA
caatggagggcttggggtag

SEQ ID NO: 200443 - DNA, 20 bp, synthetic construct
  source 1..20: mol_type = other DNA
ccaatggagggcttggggta

SEQ ID NO: 200444 - DNA, 20 bp, synthetic construct
  source 1..20: mol_type = other DNA
tccaatggagggcttggggt

SEQ ID NO: 200445 - DNA, 20 bp, synthetic construct
  source 1..20: mol_type = other DNA
ttccaatggagggcttgggg

SEQ ID NO: 200446 - DNA, 20 bp, synthetic construct
  source 1..20: mol_type = other DNA
attccaatggagggcttggg

SEQ ID NO: 200447 - DNA, 20 bp, synthetic construct
  source 1..20: mol_type = other DNA
cattccaatggagggcttgg

SEQ ID NO: 200448 - DNA, 20 bp, synthetic construct
  source 1..20: mol_type = other DNA
gcattccaatggagggcttg

SEQ ID NO: 200449 - DNA, 20 bp, synthetic construct
  source 1..20: mol_type = other DNA
agcattccaatggagggctt

SEQ ID NO: 200450 - DNA, 20 bp, synthetic construct
  source 1..20: mol_type = other DNA
cagcattccaatggagggct

SEQ ID NO: 200451 - DNA, 20 bp, synthetic construct
  source 1..20: mol_type = other DNA
tcagcattccaatggagggc

SEQ ID NO: 200452 - DNA, 20 bp, synthetic construct
  source 1..20: mol_type = other DNA
ttcagcattccaatggaggg

SEQ ID NO: 200453 - DNA, 20 bp, synthetic construct
  source 1..20: mol_type = other DNA
tttcagcattccaatggagg

SEQ ID NO: 200454 - DNA, 20 bp, synthetic construct
  source 1..20: mol_type = other DNA
ttttcagcattccaatggag

SEQ ID NO: 200455 - DNA, 20 bp, synthetic construct
  source 1..20: mol_type = other DNA
attttcagcattccaatgga

SEQ ID NO: 200456 - DNA, 20 bp, synthetic construct
  source 1..20: mol_type = other DNA
gattttcagcattccaatgg

SEQ ID NO: 200457 - DNA, 20 bp, synthetic construct
  source 1..20: mol_type = other DNA
agattttcagcattccaatg

SEQ ID NO: 200458 - DNA, 20 bp, synthetic construct
  source 1..20: mol_type = other DNA
tagattttcagcattccaat

SEQ ID NO: 200459 - DNA, 20 bp, synthetic construct
  source 1..20: mol_type = other DNA
ttagattttcagcattccaa

SEQ ID NO: 200460 - DNA, 20 bp, synthetic construct
  source 1..20: mol_type = other DNA
tttagattttcagcattcca

SEQ ID NO: 200461 - DNA, 20 bp, synthetic construct
  source 1..20: mol_type = other DNA
gtttagattttcagcattcc

SEQ ID NO: 200462 - DNA, 20 bp, synthetic construct
  source 1..20: mol_type = other DNA
tgtttagattttcagcattc

SEQ ID NO: 200463 - DNA, 20 bp, synthetic construct
  source 1..20: mol_type = other DNA
ttgtttagattttcagcatt

SEQ ID NO: 200464 - DNA, 20 bp, synthetic construct
  source 1..20: mol_type = other DNA
attgtttagattttcagcat

SEQ ID NO: 200465 - DNA, 20 bp, synthetic construct
  source 1..20: mol_type = other DNA
cattgtttagattttcagca

SEQ ID NO: 200466 - DNA, 20 bp, synthetic construct
  source 1..20: mol_type = other DNA
acattgtttagattttcagc

SEQ ID NO: 200467 - DNA, 20 bp, synthetic construct
  source 1..20: mol_type = other DNA
cacattgtttagattttcag

SEQ ID NO: 200468 - DNA, 20 bp, synthetic construct
  source 1..20: mol_type = other DNA
tcacattgtttagattttca

SEQ ID NO: 200469 - DNA, 20 bp, synthetic construct
  source 1..20: mol_type = other DNA
atcacattgtttagattttc

SEQ ID NO: 200470 - DNA, 20 bp, synthetic construct
  source 1..20: mol_type = other DNA
aatcacattgtttagatttt

SEQ ID NO: 200471 - DNA, 20 bp, synthetic construct
  source 1..20: mol_type = other DNA
aaatcacattgtttagattt

SEQ ID NO: 200472 - DNA, 20 bp, synthetic construct
  source 1..20: mol_type = other DNA
caaatcacattgtttagatt

SEQ ID NO: 200473 - DNA, 20 bp, synthetic construct
  source 1..20: mol_type = other DNA
ccaaatcacattgtttagat

SEQ ID NO: 200474 - DNA, 20 bp, synthetic construct
  source 1..20: mol_type = other DNA
gccaaatcacattgtttaga

SEQ ID NO: 200475 - DNA, 20 bp, synthetic construct
  source 1..20: mol_type = other DNA
tgccaaatcacattgtttag

SEQ ID NO: 200476 - DNA, 20 bp, synthetic construct
  source 1..20: mol_type = other DNA
ttgccaaatcacattgttta

SEQ ID NO: 200477 - DNA, 20 bp, synthetic construct
  source 1..20: mol_type = other DNA
attgccaaatcacattgttt

SEQ ID NO: 200478 - DNA, 20 bp, synthetic construct
  source 1..20: mol_type = other DNA
aattgccaaatcacattgtt

SEQ ID NO: 200479 - DNA, 20 bp, synthetic construct
  source 1..20: mol_type = other DNA
aaattgccaaatcacattgt

SEQ ID NO: 200480 - DNA, 20 bp, synthetic construct
  source 1..20: mol_type = other DNA
gaaattgccaaatcacattg

SEQ ID NO: 200481 - DNA, 20 bp, synthetic construct
  source 1..20: mol_type = other DNA
tgaaattgccaaatcacatt

SEQ ID NO: 200482 - DNA, 20 bp, synthetic construct
  source 1..20: mol_type = other DNA
atgaaattgccaaatcacat

SEQ ID NO: 200483 - DNA, 20 bp, synthetic construct
  source 1..20: mol_type = other DNA
aatgaaattgccaaatcaca

SEQ ID NO: 200484 - DNA, 20 bp, synthetic construct
  source 1..20: mol_type = other DNA
aaatgaaattgccaaatcac

SEQ ID NO: 200485 - DNA, 20 bp, synthetic construct
  source 1..20: mol_type = other DNA
gaaatgaaattgccaaatca

SEQ ID NO: 200486 - DNA, 20 bp, synthetic construct
  source 1..20: mol_type = other DNA
agaaatgaaattgccaaatc

SEQ ID NO: 200487 - DNA, 20 bp, synthetic construct
  source 1..20: mol_type = other DNA
aagaaatgaaattgccaaat

SEQ ID NO: 200488 - DNA, 20 bp, synthetic construct
  source 1..20: mol_type = other DNA
aaagaaatgaaattgccaaa

SEQ ID NO: 200489 - DNA, 20 bp, synthetic construct
  source 1..20: mol_type = other DNA
aaaagaaatgaaattgccaa

SEQ ID NO: 200490 - DNA, 20 bp, synthetic construct
  source 1..20: mol_type = other DNA
gaaaagaaatgaaattgcca

SEQ ID NO: 200491 - DNA, 20 bp, synthetic construct
  source 1..20: mol_type = other DNA
agaaaagaaatgaaattgcc

SEQ ID NO: 200492 - DNA, 20 bp, synthetic construct
  source 1..20: mol_type = other DNA
cagaaaagaaatgaaattgc

SEQ ID NO: 200493 - DNA, 20 bp, synthetic construct
  source 1..20: mol_type = other DNA
acagaaaagaaatgaaattg

SEQ ID NO: 200494 - DNA, 20 bp, synthetic construct
  source 1..20: mol_type = other DNA
aacagaaaagaaatgaaatt

SEQ ID NO: 200495 - DNA, 20 bp, synthetic construct
  source 1..20: mol_type = other DNA
caacagaaaagaaatgaaat

SEQ ID NO: 200496 - DNA, 20 bp, synthetic construct
  source 1..20: mol_type = other DNA
acaacagaaaagaaatgaaa

SEQ ID NO: 200497 - DNA, 20 bp, synthetic construct
  source 1..20: mol_type = other DNA
cacaacagaaaagaaatgaa

SEQ ID NO: 200498 - DNA, 20 bp, synthetic construct
  source 1..20: mol_type = other DNA
ccacaacagaaaagaaatga

SEQ ID NO: 200499 - DNA, 20 bp, synthetic construct
  source 1..20: mol_type = other DNA
cccacaacagaaaagaaatg

SEQ ID NO: 200500 - DNA, 20 bp, synthetic construct
  source 1..20: mol_type = other DNA
gcccacaacagaaaagaaat

SEQ ID NO: 200501 - DNA, 20 bp, synthetic construct
  source 1..20: mol_type = other DNA
ggcccacaacagaaaagaaa

SEQ ID NO: 200502 - DNA, 20 bp, synthetic construct
  source 1..20: mol_type = other DNA
tggcccacaacagaaaagaa

SEQ ID NO: 200503 - DNA, 20 bp, synthetic construct
  source 1..20: mol_type = other DNA
ctggcccacaacagaaaaga

SEQ ID NO: 200504 - DNA, 20 bp, synthetic construct
  source 1..20: mol_type = other DNA
actggcccacaacagaaaag

SEQ ID NO: 200505 - DNA, 20 bp, synthetic construct
  source 1..20: mol_type = other DNA
tactggcccacaacagaaaa

SEQ ID NO: 200506 - DNA, 20 bp, synthetic construct
  source 1..20: mol_type = other DNA
ctactggcccacaacagaaa

SEQ ID NO: 200507 - DNA, 20 bp, synthetic construct
  source 1..20: mol_type = other DNA
actactggcccacaacagaa

SEQ ID NO: 200508 - DNA, 20 bp, synthetic construct
  source 1..20: mol_type = other DNA
gactactggcccacaacaga

SEQ ID NO: 200509 - DNA, 20 bp, synthetic construct
  source 1..20: mol_type = other DNA
ggactactggcccacaacag

SEQ ID NO: 200510 - DNA, 20 bp, synthetic construct
  source 1..20: mol_type = other DNA
aggactactggcccacaaca

SEQ ID NO: 200511 - DNA, 20 bp, synthetic construct
  source 1..20: mol_type = other DNA
aaggactactggcccacaac

SEQ ID NO: 200512 - DNA, 20 bp, synthetic construct
  source 1..20: mol_type = other DNA
taaggactactggcccacaa

SEQ ID NO: 200513 - DNA, 20 bp, synthetic construct
  source 1..20: mol_type = other DNA
ctaaggactactggcccaca

SEQ ID NO: 200514 - DNA, 20 bp, synthetic construct
  source 1..20: mol_type = other DNA
tctaaggactactggcccac

SEQ ID NO: 200515 - DNA, 20 bp, synthetic construct
  source 1..20: mol_type = other DNA
atctaaggactactggccca

SEQ ID NO: 200516 - DNA, 20 bp, synthetic construct
  source 1..20: mol_type = other DNA
catctaaggactactggccc

SEQ ID NO: 200517 - DNA, 20 bp, synthetic construct
  source 1..20: mol_type = other DNA
acatctaaggactactggcc

SEQ ID NO: 200518 - DNA, 20 bp, synthetic construct
  source 1..20: mol_type = other DNA
aacatctaaggactactggc

SEQ ID NO: 200519 - DNA, 20 bp, synthetic construct
  source 1..20: mol_type = other DNA
caacatctaaggactactgg

SEQ ID NO: 200520 - DNA, 20 bp, synthetic construct
  source 1..20: mol_type = other DNA
ccaacatctaaggactactg

SEQ ID NO: 200521 - DNA, 20 bp, synthetic construct
  source 1..20: mol_type = other DNA
cccaacatctaaggactact

SEQ ID NO: 200522 - DNA, 20 bp, synthetic construct
  source 1..20: mol_type = other DNA
ccccaacatctaaggactac

SEQ ID NO: 200523 - DNA, 20 bp, synthetic construct
  source 1..20: mol_type = other DNA
tccccaacatctaaggacta

SEQ ID NO: 200524 - DNA, 20 bp, synthetic construct
  source 1..20: mol_type = other DNA
ttccccaacatctaaggact

SEQ ID NO: 200525 - DNA, 20 bp, synthetic construct
  source 1..20: mol_type = other DNA
cttccccaacatctaaggac

SEQ ID NO: 200526 - DNA, 20 bp, synthetic construct
  source 1..20: mol_type = other DNA
ccttccccaacatctaagga

SEQ ID NO: 200527 - DNA, 20 bp, synthetic construct
  source 1..20: mol_type = other DNA
cccttccccaacatctaagg

SEQ ID NO: 200528 - DNA, 20 bp, synthetic construct
  source 1..20: mol_type = other DNA
ccccttccccaacatctaag

SEQ ID NO: 200529 - DNA, 20 bp, synthetic construct
  source 1..20: mol_type = other DNA
cccccttccccaacatctaa

SEQ ID NO: 200530 - DNA, 20 bp, synthetic construct
  source 1..20: mol_type = other DNA
acccccttccccaacatcta

SEQ ID NO: 200531 - DNA, 20 bp, synthetic construct
  source 1..20: mol_type = other DNA
tacccccttccccaacatct

SEQ ID NO: 200532 - DNA, 20 bp, synthetic construct
  source 1..20: mol_type = other DNA
ctacccccttccccaacatc

SEQ ID NO: 200533 - DNA, 20 bp, synthetic construct
  source 1..20: mol_type = other DNA
actacccccttccccaacat

SEQ ID NO: 200534 - DNA, 20 bp, synthetic construct
  source 1..20: mol_type = other DNA
gactacccccttccccaaca

SEQ ID NO: 200535 - DNA, 20 bp, synthetic construct
  source 1..20: mol_type = other DNA
cgactacccccttccccaac

SEQ ID NO: 200536 - DNA, 20 bp, synthetic construct
  source 1..20: mol_type = other DNA
gcgactacccccttccccaa

SEQ ID NO: 200537 - DNA, 20 bp, synthetic construct
  source 1..20: mol_type = other DNA
agcgactacccccttcccca

SEQ ID NO: 200538 - DNA, 20 bp, synthetic construct
  source 1..20: mol_type = other DNA
cagcgactacccccttcccc

SEQ ID NO: 200539 - DNA, 20 bp, synthetic construct
  source 1..20: mol_type = other DNA
tcagcgactacccccttccc

SEQ ID NO: 200540 - DNA, 20 bp, synthetic construct
  source 1..20: mol_type = other DNA
ctcagcgactacccccttcc

SEQ ID NO: 200541 - DNA, 20 bp, synthetic construct
  source 1..20: mol_type = other DNA
cctcagcgactacccccttc

SEQ ID NO: 200542 - DNA, 20 bp, synthetic construct
  source 1..20: mol_type = other DNA
acctcagcgactaccccctt

SEQ ID NO: 200543 - DNA, 20 bp, synthetic construct
  source 1..20: mol_type = other DNA
cacctcagcgactaccccct

SEQ ID NO: 200544 - DNA, 20 bp, synthetic construct
  source 1..20: mol_type = other DNA
acacctcagcgactaccccc

SEQ ID NO: 200545 - DNA, 20 bp, synthetic construct
  source 1..20: mol_type = other DNA
cacacctcagcgactacccc

SEQ ID NO: 200546 - DNA, 20 bp, synthetic construct
  source 1..20: mol_type = other DNA
ccacacctcagcgactaccc

SEQ ID NO: 200547 - DNA, 20 bp, synthetic construct
  source 1..20: mol_type = other DNA
accacacctcagcgactacc

SEQ ID NO: 200548 - DNA, 20 bp, synthetic construct
  source 1..20: mol_type = other DNA
aaccacacctcagcgactac

SEQ ID NO: 200549 - DNA, 20 bp, synthetic construct
  source 1..20: mol_type = other DNA
caaccacacctcagcgacta

SEQ ID NO: 200550 - DNA, 20 bp, synthetic construct
  source 1..20: mol_type = other DNA
tcaaccacacctcagcgact

SEQ ID NO: 200551 - DNA, 20 bp, synthetic construct
  source 1..20: mol_type = other DNA
gtcaaccacacctcagcgac

SEQ ID NO: 200552 - DNA, 20 bp, synthetic construct
  source 1..20: mol_type = other DNA
agtcaaccacacctcagcga

SEQ ID NO: 200553 - DNA, 20 bp, synthetic construct
  source 1..20: mol_type = other DNA
aagtcaaccacacctcagcg

SEQ ID NO: 200554 - DNA, 20 bp, synthetic construct
  source 1..20: mol_type = other DNA
taagtcaaccacacctcagc

SEQ ID NO: 200555 - DNA, 20 bp, synthetic construct
  source 1..20: mol_type = other DNA
ctaagtcaaccacacctcag

SEQ ID NO: 200556 - DNA, 20 bp, synthetic construct
  source 1..20: mol_type = other DNA
cctaagtcaaccacacctca

SEQ ID NO: 200557 - DNA, 20 bp, synthetic construct
  source 1..20: mol_type = other DNA
tcctaagtcaaccacacctc

SEQ ID NO: 200558 - DNA, 20 bp, synthetic construct
  source 1..20: mol_type = other DNA
atcctaagtcaaccacacct

SEQ ID NO: 200559 - DNA, 20 bp, synthetic construct
  source 1..20: mol_type = other DNA
catcctaagtcaaccacacc

SEQ ID NO: 200560 - DNA, 20 bp, synthetic construct
  source 1..20: mol_type = other DNA
ccatcctaagtcaaccacac

SEQ ID NO: 200561 - DNA, 20 bp, synthetic construct
  source 1..20: mol_type = other DNA
tccatcctaagtcaaccaca

SEQ ID NO: 200562 - DNA, 20 bp, synthetic construct
  source 1..20: mol_type = other DNA
ttccatcctaagtcaaccac

SEQ ID NO: 200563 - DNA, 20 bp, synthetic construct
  source 1..20: mol_type = other DNA
cttccatcctaagtcaacca

SEQ ID NO: 200564 - DNA, 20 bp, synthetic construct
  source 1..20: mol_type = other DNA
tcttccatcctaagtcaacc

SEQ ID NO: 200565 - DNA, 20 bp, synthetic construct
  source 1..20: mol_type = other DNA
ttcttccatcctaagtcaac

SEQ ID NO: 200566 - DNA, 20 bp, synthetic construct
  source 1..20: mol_type = other DNA
cttcttccatcctaagtcaa

SEQ ID NO: 200567 - DNA, 20 bp, synthetic construct
  source 1..20: mol_type = other DNA
gcttcttccatcctaagtca

SEQ ID NO: 200568 - DNA, 20 bp, synthetic construct
  source 1..20: mol_type = other DNA
tgcttcttccatcctaagtc

SEQ ID NO: 200569 - DNA, 20 bp, synthetic construct
  source 1..20: mol_type = other DNA
ctgcttcttccatcctaagt

SEQ ID NO: 200570 - DNA, 20 bp, synthetic construct
  source 1..20: mol_type = other DNA
tctgcttcttccatcctaag

SEQ ID NO: 200571 - DNA, 20 bp, synthetic construct
  source 1..20: mol_type = other DNA
ttctgcttcttccatcctaa

SEQ ID NO: 200572 - DNA, 20 bp, synthetic construct
  source 1..20: mol_type = other DNA
cttctgcttcttccatccta

SEQ ID NO: 200573 - DNA, 20 bp, synthetic construct
  source 1..20: mol_type = other DNA
acttctgcttcttccatcct

SEQ ID NO: 200574 - DNA, 20 bp, synthetic construct
  source 1..20: mol_type = other DNA
gacttctgcttcttccatcc

SEQ ID NO: 200575 - DNA, 20 bp, synthetic construct
  source 1..20: mol_type = other DNA
tgacttctgcttcttccatc

SEQ ID NO: 200576 - DNA, 20 bp, synthetic construct
  source 1..20: mol_type = other DNA
ttgacttctgcttcttccat

SEQ ID NO: 200577 - DNA, 20 bp, synthetic construct
  source 1..20: mol_type = other DNA
cttgacttctgcttcttcca

SEQ ID NO: 200578 - DNA, 20 bp, synthetic construct
  source 1..20: mol_type = other DNA
tcttgacttctgcttcttcc

SEQ ID NO: 200579 - DNA, 20 bp, synthetic construct
  source 1..20: mol_type = other DNA
gtcttgacttctgcttcttc

SEQ ID NO: 200580 - DNA, 20 bp, synthetic construct
  source 1..20: mol_type = other DNA
agtcttgacttctgcttctt

SEQ ID NO: 200581 - DNA, 20 bp, synthetic construct
  source 1..20: mol_type = other DNA
gagtcttgacttctgcttct

SEQ ID NO: 200582 - DNA, 20 bp, synthetic construct
  source 1..20: mol_type = other DNA
ggagtcttgacttctgcttc

SEQ ID NO: 200583 - DNA, 20 bp, synthetic construct
  source 1..20: mol_type = other DNA
gggagtcttgacttctgctt

SEQ ID NO: 200584 - DNA, 20 bp, synthetic construct
  source 1..20: mol_type = other DNA
tgggagtcttgacttctgct

SEQ ID NO: 200585 - DNA, 20 bp, synthetic construct
  source 1..20: mol_type = other DNA
ctgggagtcttgacttctgc

SEQ ID NO: 200586 - DNA, 20 bp, synthetic construct
  source 1..20: mol_type = other DNA
cctgggagtcttgacttctg

SEQ ID NO: 200587 - DNA, 20 bp, synthetic construct
  source 1..20: mol_type = other DNA
ccctgggagtcttgacttct

SEQ ID NO: 200588 - DNA, 20 bp, synthetic construct
  source 1..20: mol_type = other DNA
accctgggagtcttgacttc

SEQ ID NO: 200589 - DNA, 20 bp, synthetic construct
  source 1..20: mol_type = other DNA
gaccctgggagtcttgactt

SEQ ID NO: 200590 - DNA, 20 bp, synthetic construct
  source 1..20: mol_type = other DNA
tgaccctgggagtcttgact

SEQ ID NO: 200591 - DNA, 20 bp, synthetic construct
  source 1..20: mol_type = other DNA
ttgaccctgggagtcttgac

SEQ ID NO: 200592 - DNA, 20 bp, synthetic construct
  source 1..20: mol_type = other DNA
tttgaccctgggagtcttga

SEQ ID NO: 200593 - DNA, 20 bp, synthetic construct
  source 1..20: mol_type = other DNA
ctttgaccctgggagtcttg

SEQ ID NO: 200594 - DNA, 20 bp, synthetic construct
  source 1..20: mol_type = other DNA
actttgaccctgggagtctt

SEQ ID NO: 200595 - DNA, 20 bp, synthetic construct
  source 1..20: mol_type = other DNA
cactttgaccctgggagtct

SEQ ID NO: 200596 - DNA, 20 bp, synthetic construct
  source 1..20: mol_type = other DNA
ccactttgaccctgggagtc

SEQ ID NO: 200597 - DNA, 20 bp, synthetic construct
  source 1..20: mol_type = other DNA
accactttgaccctgggagt

SEQ ID NO: 200598 - DNA, 20 bp, synthetic construct
  source 1..20: mol_type = other DNA
aaccactttgaccctgggag

SEQ ID NO: 200599 - DNA, 20 bp, synthetic construct
  source 1..20: mol_type = other DNA
aaaccactttgaccctggga

SEQ ID NO: 200600 - DNA, 20 bp, synthetic construct
  source 1..20: mol_type = other DNA
caaaccactttgaccctggg

SEQ ID NO: 200601 - DNA, 20 bp, synthetic construct
  source 1..20: mol_type = other DNA
gcaaaccactttgaccctgg

SEQ ID NO: 200602 - DNA, 20 bp, synthetic construct
  source 1..20: mol_type = other DNA
agcaaaccactttgaccctg

SEQ ID NO: 200603 - DNA, 20 bp, synthetic construct
  source 1..20: mol_type = other DNA
gagcaaaccactttgaccct

SEQ ID NO: 200604 - DNA, 20 bp, synthetic construct
  source 1..20: mol_type = other DNA
agagcaaaccactttgaccc

SEQ ID NO: 200605 - DNA, 20 bp, synthetic construct
  source 1..20: mol_type = other DNA
cagagcaaaccactttgacc

SEQ ID NO: 200606 - DNA, 20 bp, synthetic construct
  source 1..20: mol_type = other DNA
gcagagcaaaccactttgac

SEQ ID NO: 200607 - DNA, 20 bp, synthetic construct
  source 1..20: mol_type = other DNA
agcagagcaaaccactttga

SEQ ID NO: 200608 - DNA, 20 bp, synthetic construct
  source 1..20: mol_type = other DNA
cagcagagcaaaccactttg

SEQ ID NO: 200609 - DNA, 20 bp, synthetic construct
  source 1..20: mol_type = other DNA
tcagcagagcaaaccacttt

SEQ ID NO: 200610 - DNA, 20 bp, synthetic construct
  source 1..20: mol_type = other DNA
gtcagcagagcaaaccactt

SEQ ID NO: 200611 - DNA, 20 bp, synthetic construct
  source 1..20: mol_type = other DNA
ggtcagcagagcaaaccact

SEQ ID NO: 200612 - DNA, 20 bp, synthetic construct
  source 1..20: mol_type = other DNA
gggtcagcagagcaaaccac

SEQ ID NO: 200613 - DNA, 20 bp, synthetic construct
  source 1..20: mol_type = other DNA
tgggtcagcagagcaaacca

SEQ ID NO: 200614 - DNA, 20 bp, synthetic construct
  source 1..20: mol_type = other DNA
ttgggtcagcagagcaaacc

SEQ ID NO: 200615 - DNA, 20 bp, synthetic construct
  source 1..20: mol_type = other DNA
cttgggtcagcagagcaaac

SEQ ID NO: 200616 - DNA, 20 bp, synthetic construct
  source 1..20: mol_type = other DNA
acttgggtcagcagagcaaa

SEQ ID NO: 200617 - DNA, 20 bp, synthetic construct
  source 1..20: mol_type = other DNA
cacttgggtcagcagagcaa

SEQ ID NO: 200618 - DNA, 20 bp, synthetic construct
  source 1..20: mol_type = other DNA
acacttgggtcagcagagca

SEQ ID NO: 200619 - DNA, 20 bp, synthetic construct
  source 1..20: mol_type = other DNA
cacacttgggtcagcagagc

SEQ ID NO: 200620 - DNA, 20 bp, synthetic construct
  source 1..20: mol_type = other DNA
ccacacttgggtcagcagag

SEQ ID NO: 200621 - DNA, 20 bp, synthetic construct
  source 1..20: mol_type = other DNA
cccacacttgggtcagcaga

SEQ ID NO: 200622 - DNA, 20 bp, synthetic construct
  source 1..20: mol_type = other DNA
tcccacacttgggtcagcag

SEQ ID NO: 200623 - DNA, 20 bp, synthetic construct
  source 1..20: mol_type = other DNA
ctcccacacttgggtcagca

SEQ ID NO: 200624 - DNA, 20 bp, synthetic construct
  source 1..20: mol_type = other DNA
cctcccacacttgggtcagc

SEQ ID NO: 200625 - DNA, 20 bp, synthetic construct
  source 1..20: mol_type = other DNA
gcctcccacacttgggtcag

SEQ ID NO: 200626 - DNA, 20 bp, synthetic construct
  source 1..20: mol_type = other DNA
ggcctcccacacttgggtca

SEQ ID NO: 200627 - DNA, 20 bp, synthetic construct
  source 1..20: mol_type = other DNA
gggcctcccacacttgggtc

SEQ ID NO: 200628 - DNA, 20 bp, synthetic construct
  source 1..20: mol_type = other DNA
tgggcctcccacacttgggt

SEQ ID NO: 200629 - DNA, 20 bp, synthetic construct
  source 1..20: mol_type = other DNA
ctgggcctcccacacttggg

SEQ ID NO: 200630 - DNA, 20 bp, synthetic construct
  source 1..20: mol_type = other DNA
tctgggcctcccacacttgg

SEQ ID NO: 200631 - DNA, 20 bp, synthetic construct
  source 1..20: mol_type = other DNA
ctctgggcctcccacacttg

SEQ ID NO: 200632 - DNA, 20 bp, synthetic construct
  source 1..20: mol_type = other DNA
actctgggcctcccacactt

SEQ ID NO: 200633 - DNA, 20 bp, synthetic construct
  source 1..20: mol_type = other DNA
gactctgggcctcccacact

SEQ ID NO: 200634 - DNA, 20 bp, synthetic construct
  source 1..20: mol_type = other DNA
tgactctgggcctcccacac

SEQ ID NO: 200635 - DNA, 20 bp, synthetic construct
  source 1..20: mol_type = other DNA
ctgactctgggcctcccaca

SEQ ID NO: 200636 - DNA, 20 bp, synthetic construct
  source 1..20: mol_type = other DNA
gctgactctgggcctcccac

SEQ ID NO: 200637 - DNA, 20 bp, synthetic construct
  source 1..20: mol_type = other DNA
cgctgactctgggcctccca

SEQ ID NO: 200638 - DNA, 20 bp, synthetic construct
  source 1..20: mol_type = other DNA
acgctgactctgggcctccc

SEQ ID NO: 200639 - DNA, 20 bp, synthetic construct
  source 1..20: mol_type = other DNA
aacgctgactctgggcctcc

SEQ ID NO: 200640 - DNA, 20 bp, synthetic construct
  source 1..20: mol_type = other DNA
aaacgctgactctgggcctc

SEQ ID NO: 200641 - DNA, 20 bp, synthetic construct
  source 1..20: mol_type = other DNA
gaaacgctgactctgggcct

SEQ ID NO: 200642 - DNA, 20 bp, synthetic construct
  source 1..20: mol_type = other DNA
tgaaacgctgactctgggcc

SEQ ID NO: 200643 - DNA, 20 bp, synthetic construct
  source 1..20: mol_type = other DNA
ctgaaacgctgactctgggc

SEQ ID NO: 200644 - DNA, 20 bp, synthetic construct
  source 1..20: mol_type = other DNA
cctgaaacgctgactctggg

SEQ ID NO: 200645 - DNA, 20 bp, synthetic construct
  source 1..20: mol_type = other DNA
acctgaaacgctgactctgg

SEQ ID NO: 200646 - DNA, 20 bp, synthetic construct
  source 1..20: mol_type = other DNA
cacctgaaacgctgactctg

SEQ ID NO: 200647 - DNA, 20 bp, synthetic construct
  source 1..20: mol_type = other DNA
acacctgaaacgctgactct

SEQ ID NO: 200648 - DNA, 20 bp, synthetic construct
  source 1..20: mol_type = other DNA
cacacctgaaacgctgactc

SEQ ID NO: 200649 - DNA, 20 bp, synthetic construct
  source 1..20: mol_type = other DNA
gcacacctgaaacgctgact

SEQ ID NO: 200650 - DNA, 20 bp, synthetic construct
  source 1..20: mol_type = other DNA
agcacacctgaaacgctgac

SEQ ID NO: 200651 - DNA, 20 bp, synthetic construct
  source 1..20: mol_type = other DNA
tagcacacctgaaacgctga

SEQ ID NO: 200652 - DNA, 20 bp, synthetic construct
  source 1..20: mol_type = other DNA
ttagcacacctgaaacgctg

SEQ ID NO: 200653 - DNA, 20 bp, synthetic construct
  source 1..20: mol_type = other DNA
attagcacacctgaaacgct

SEQ ID NO: 200654 - DNA, 20 bp, synthetic construct
  source 1..20: mol_type = other DNA
aattagcacacctgaaacgc

SEQ ID NO: 200655 - DNA, 20 bp, synthetic construct
  source 1..20: mol_type = other DNA
gaattagcacacctgaaacg

SEQ ID NO: 200656 - DNA, 20 bp, synthetic construct
  source 1..20: mol_type = other DNA
tgaattagcacacctgaaac

SEQ ID NO: 200657 - DNA, 20 bp, synthetic construct
  source 1..20: mol_type = other DNA
ctgaattagcacacctgaaa

SEQ ID NO: 200658 - DNA, 20 bp, synthetic construct
  source 1..20: mol_type = other DNA
gctgaattagcacacctgaa

SEQ ID NO: 200659 - DNA, 20 bp, synthetic construct
  source 1..20: mol_type = other DNA
tgctgaattagcacacctga

SEQ ID NO: 200660 - DNA, 20 bp, synthetic construct
  source 1..20: mol_type = other DNA
atgctgaattagcacacctg

SEQ ID NO: 200661 - DNA, 20 bp, synthetic construct
  source 1..20: mol_type = other DNA
catgctgaattagcacacct

SEQ ID NO: 200662 - DNA, 20 bp, synthetic construct
  source 1..20: mol_type = other DNA
ccatgctgaattagcacacc

SEQ ID NO: 200663 - DNA, 20 bp, synthetic construct
  source 1..20: mol_type = other DNA
accatgctgaattagcacac

SEQ ID NO: 200664 - DNA, 20 bp, synthetic construct
  source 1..20: mol_type = other DNA
aaccatgctgaattagcaca

SEQ ID NO: 200665 - DNA, 20 bp, synthetic construct
  source 1..20: mol_type = other DNA
gaaccatgctgaattagcac

SEQ ID NO: 200666 - DNA, 20 bp, synthetic construct
  source 1..20: mol_type = other DNA
agaaccatgctgaattagca

SEQ ID NO: 200667 - DNA, 20 bp, synthetic construct
  source 1..20: mol_type = other DNA
tagaaccatgctgaattagc

SEQ ID NO: 200668 - DNA, 20 bp, synthetic construct
  source 1..20: mol_type = other DNA
atagaaccatgctgaattag

SEQ ID NO: 200669 - DNA, 20 bp, synthetic construct
  source 1..20: mol_type = other DNA
aatagaaccatgctgaatta

SEQ ID NO: 200670 - DNA, 20 bp, synthetic construct
  source 1..20: mol_type = other DNA
gaatagaaccatgctgaatt

SEQ ID NO: 200671 - DNA, 20 bp, synthetic construct
  source 1..20: mol_type = other DNA
tgaatagaaccatgctgaat

SEQ ID NO: 200672 - DNA, 20 bp, synthetic construct
  source 1..20: mol_type = other DNA
gtgaatagaaccatgctgaa

SEQ ID NO: 200673 - DNA, 20 bp, synthetic construct
  source 1..20: mol_type = other DNA
cgtgaatagaaccatgctga

SEQ ID NO: 200674 - DNA, 20 bp, synthetic construct
  source 1..20: mol_type = other DNA
ccgtgaatagaaccatgctg

SEQ ID NO: 200675 - DNA, 20 bp, synthetic construct
  source 1..20: mol_type = other DNA
gccgtgaatagaaccatgct

SEQ ID NO: 200676 - DNA, 20 bp, synthetic construct
  source 1..20: mol_type = other DNA
ggccgtgaatagaaccatgc

SEQ ID NO: 200677 - DNA, 20 bp, synthetic construct
  source 1..20: mol_type = other DNA
tggccgtgaatagaaccatg

SEQ ID NO: 200678 - DNA, 20 bp, synthetic construct
  source 1..20: mol_type = other DNA
ttggccgtgaatagaaccat

SEQ ID NO: 200679 - DNA, 20 bp, synthetic construct
  source 1..20: mol_type = other DNA
tttggccgtgaatagaacca

SEQ ID NO: 200680 - DNA, 20 bp, synthetic construct
  source 1..20: mol_type = other DNA
ctttggccgtgaatagaacc

SEQ ID NO: 200681 - DNA, 20 bp, synthetic construct
  source 1..20: mol_type = other DNA
actttggccgtgaatagaac

SEQ ID NO: 200682 - DNA, 20 bp, synthetic construct
  source 1..20: mol_type = other DNA
gactttggccgtgaatagaa

SEQ ID NO: 200683 - DNA, 20 bp, synthetic construct
  source 1..20: mol_type = other DNA
ggactttggccgtgaataga

SEQ ID NO: 200684 - DNA, 20 bp, synthetic construct
  source 1..20: mol_type = other DNA
tggactttggccgtgaatag

SEQ ID NO: 200685 - DNA, 20 bp, synthetic construct
  source 1..20: mol_type = other DNA
gtggactttggccgtgaata

SEQ ID NO: 200686 - DNA, 20 bp, synthetic construct
  source 1..20: mol_type = other DNA
ggtggactttggccgtgaat

SEQ ID NO: 200687 - DNA, 20 bp, synthetic construct
  source 1..20: mol_type = other DNA
gggtggactttggccgtgaa

SEQ ID NO: 200688 - DNA, 20 bp, synthetic construct
  source 1..20: mol_type = other DNA
agggtggactttggccgtga

SEQ ID NO: 200689 - DNA, 20 bp, synthetic construct
  source 1..20: mol_type = other DNA
cagggtggactttggccgtg

SEQ ID NO: 200690 - DNA, 20 bp, synthetic construct
  source 1..20: mol_type = other DNA
ccagggtggactttggccgt

SEQ ID NO: 200691 - DNA, 20 bp, synthetic construct
  source 1..20: mol_type = other DNA
cccagggtggactttggccg

SEQ ID NO: 200692 - DNA, 20 bp, synthetic construct
  source 1..20: mol_type = other DNA
gcccagggtggactttggcc

SEQ ID NO: 200693 - DNA, 20 bp, synthetic construct
  source 1..20: mol_type = other DNA
tgcccagggtggactttggc

SEQ ID NO: 200694 - DNA, 20 bp, synthetic construct
  source 1..20: mol_type = other DNA
gtgcccagggtggactttgg

SEQ ID NO: 200695 - DNA, 20 bp, synthetic construct
  source 1..20: mol_type = other DNA
ggtgcccagggtggactttg

SEQ ID NO: 200696 - DNA, 20 bp, synthetic construct
  source 1..20: mol_type = other DNA
aggtgcccagggtggacttt

SEQ ID NO: 200697 - DNA, 20 bp, synthetic construct
  source 1..20: mol_type = other DNA
gaggtgcccagggtggactt

SEQ ID NO: 200698 - DNA, 20 bp, synthetic construct
  source 1..20: mol_type = other DNA
agaggtgcccagggtggact

SEQ ID NO: 200699 - DNA, 20 bp, synthetic construct
  source 1..20: mol_type = other DNA
gagaggtgcccagggtggac

SEQ ID NO: 200700 - DNA, 20 bp, synthetic construct
  source 1..20: mol_type = other DNA
agagaggtgcccagggtgga

SEQ ID NO: 200701 - DNA, 20 bp, synthetic construct
  source 1..20: mol_type = other DNA
cagagaggtgcccagggtgg

SEQ ID NO: 200702 - DNA, 20 bp, synthetic construct
  source 1..20: mol_type = other DNA
ccagagaggtgcccagggtg

SEQ ID NO: 200703 - DNA, 20 bp, synthetic construct
  source 1..20: mol_type = other DNA
gccagagaggtgcccagggt

SEQ ID NO: 200704 - DNA, 20 bp, synthetic construct
  source 1..20: mol_type = other DNA
tgccagagaggtgcccaggg

SEQ ID NO: 200705 - DNA, 20 bp, synthetic construct
  source 1..20: mol_type = other DNA
ctgccagagaggtgcccagg

SEQ ID NO: 200706 - DNA, 20 bp, synthetic construct
  source 1..20: mol_type = other DNA
gctgccagagaggtgcccag

SEQ ID NO: 200707 - DNA, 20 bp, synthetic construct
  source 1..20: mol_type = other DNA
tgctgccagagaggtgccca

SEQ ID NO: 200708 - DNA, 20 bp, synthetic construct
  source 1..20: mol_type = other DNA
ttgctgccagagaggtgccc

SEQ ID NO: 200709 - DNA, 20 bp, synthetic construct
  source 1..20: mol_type = other DNA
attgctgccagagaggtgcc

SEQ ID NO: 200710 - DNA, 20 bp, synthetic construct
  source 1..20: mol_type = other DNA
gattgctgccagagaggtgc

SEQ ID NO: 200711 - DNA, 20 bp, synthetic construct
  source 1..20: mol_type = other DNA
agattgctgccagagaggtg

SEQ ID NO: 200712 - DNA, 20 bp, synthetic construct
  source 1..20: mol_type = other DNA
aagattgctgccagagaggt

SEQ ID NO: 200713 - DNA, 20 bp, synthetic construct
  source 1..20: mol_type = other DNA
caagattgctgccagagagg

SEQ ID NO: 200714 - DNA, 20 bp, synthetic construct
  source 1..20: mol_type = other DNA
ccaagattgctgccagagag

SEQ ID NO: 200715 - DNA, 20 bp, synthetic construct
  source 1..20: mol_type = other DNA
cccaagattgctgccagaga

SEQ ID NO: 200716 - DNA, 20 bp, synthetic construct
  source 1..20: mol_type = other DNA
acccaagattgctgccagag

SEQ ID NO: 200717 - DNA, 20 bp, synthetic construct
  source 1..20: mol_type = other DNA
cacccaagattgctgccaga

SEQ ID NO: 200718 - DNA, 20 bp, synthetic construct
  source 1..20: mol_type = other DNA
tcacccaagattgctgccag

SEQ ID NO: 200719 - DNA, 20 bp, synthetic construct
  source 1..20: mol_type = other DNA
gtcacccaagattgctgcca

SEQ ID NO: 200720 - DNA, 20 bp, synthetic construct
  source 1..20: mol_type = other DNA
agtcacccaagattgctgcc

SEQ ID NO: 200721 - DNA, 20 bp, synthetic construct
  source 1..20: mol_type = other DNA
gagtcacccaagattgctgc

SEQ ID NO: 200722 - DNA, 20 bp, synthetic construct
  source 1..20: mol_type = other DNA
agagtcacccaagattgctg

SEQ ID NO: 200723 - DNA, 20 bp, synthetic construct
  source 1..20: mol_type = other DNA
tagagtcacccaagattgct

SEQ ID NO: 200724 - DNA, 20 bp, synthetic construct
  source 1..20: mol_type = other DNA
gtagagtcacccaagattgc

SEQ ID NO: 200725 - DNA, 20 bp, synthetic construct
  source 1..20: mol_type = other DNA
agtagagtcacccaagattg

SEQ ID NO: 200726 - DNA, 20 bp, synthetic construct
  source 1..20: mol_type = other DNA
tagtagagtcacccaagatt

SEQ ID NO: 200727 - DNA, 20 bp, synthetic construct
  source 1..20: mol_type = other DNA
ttagtagagtcacccaagat

SEQ ID NO: 200728 - DNA, 20 bp, synthetic construct
  source 1..20: mol_type = other DNA
cttagtagagtcacccaaga

SEQ ID NO: 200729 - DNA, 20 bp, synthetic construct
  source 1..20: mol_type = other DNA
ccttagtagagtcacccaag

SEQ ID NO: 200730 - DNA, 20 bp, synthetic construct
  source 1..20: mol_type = other DNA
gccttagtagagtcacccaa

SEQ ID NO: 200731 - DNA, 20 bp, synthetic construct
  source 1..20: mol_type = other DNA
ggccttagtagagtcaccca

SEQ ID NO: 200732 - DNA, 20 bp, synthetic construct
  source 1..20: mol_type = other DNA
tggccttagtagagtcaccc

SEQ ID NO: 200733 - DNA, 20 bp, synthetic construct
  source 1..20: mol_type = other DNA
ctggccttagtagagtcacc

SEQ ID NO: 200734 - DNA, 20 bp, synthetic construct
  source 1..20: mol_type = other DNA
cctggccttagtagagtcac

SEQ ID NO: 200735 - DNA, 20 bp, synthetic construct
  source 1..20: mol_type = other DNA
gcctggccttagtagagtca

SEQ ID NO: 200736 - DNA, 20 bp, synthetic construct
  source 1..20: mol_type = other DNA
ggcctggccttagtagagtc

SEQ ID NO: 200737 - DNA, 20 bp, synthetic construct
  source 1..20: mol_type = other DNA
aggcctggccttagtagagt

SEQ ID NO: 200738 - DNA, 20 bp, synthetic construct
  source 1..20: mol_type = other DNA
gaggcctggccttagtagag

SEQ ID NO: 200739 - DNA, 20 bp, synthetic construct
  source 1..20: mol_type = other DNA
ggaggcctggccttagtaga

SEQ ID NO: 200740 - DNA, 20 bp, synthetic construct
  source 1..20: mol_type = other DNA
tggaggcctggccttagtag

SEQ ID NO: 200741 - DNA, 20 bp, synthetic construct
  source 1..20: mol_type = other DNA
atggaggcctggccttagta

SEQ ID NO: 200742 - DNA, 20 bp, synthetic construct
  source 1..20: mol_type = other DNA
catggaggcctggccttagt

SEQ ID NO: 200743 - DNA, 20 bp, synthetic construct
  source 1..20: mol_type = other DNA
tcatggaggcctggccttag

SEQ ID NO: 200744 - DNA, 20 bp, synthetic construct
  source 1..20: mol_type = other DNA
gtcatggaggcctggcctta

SEQ ID NO: 200745 - DNA, 20 bp, synthetic construct
  source 1..20: mol_type = other DNA
ggtcatggaggcctggcctt

SEQ ID NO: 200746 - DNA, 20 bp, synthetic construct
  source 1..20: mol_type = other DNA
gggtcatggaggcctggcct

SEQ ID NO: 200747 - DNA, 20 bp, synthetic construct
  source 1..20: mol_type = other DNA
agggtcatggaggcctggcc

SEQ ID NO: 200748 - DNA, 20 bp, synthetic construct
  source 1..20: mol_type = other DNA
tagggtcatggaggcctggc

SEQ ID NO: 200749 - DNA, 20 bp, synthetic construct
  source 1..20: mol_type = other DNA
atagggtcatggaggcctgg

SEQ ID NO: 200750 - DNA, 20 bp, synthetic construct
  source 1..20: mol_type = other DNA
catagggtcatggaggcctg

SEQ ID NO: 200751 - DNA, 20 bp, synthetic construct
  source 1..20: mol_type = other DNA
acatagggtcatggaggcct

SEQ ID NO: 200752 - DNA, 20 bp, synthetic construct
  source 1..20: mol_type = other DNA
gacatagggtcatggaggcc

SEQ ID NO: 200753 - DNA, 20 bp, synthetic construct
  source 1..20: mol_type = other DNA
agacatagggtcatggaggc

SEQ ID NO: 200754 - DNA, 20 bp, synthetic construct
  source 1..20: mol_type = other DNA
cagacatagggtcatggagg

SEQ ID NO: 200755 - DNA, 20 bp, synthetic construct
  source 1..20: mol_type = other DNA
ccagacatagggtcatggag

SEQ ID NO: 200756 - DNA, 20 bp, synthetic construct
  source 1..20: mol_type = other DNA
tccagacatagggtcatgga

SEQ ID NO: 200757 - DNA, 20 bp, synthetic construct
  source 1..20: mol_type = other DNA
atccagacatagggtcatgg

SEQ ID NO: 200758 - DNA, 20 bp, synthetic construct
  source 1..20: mol_type = other DNA
gatccagacatagggtcatg

SEQ ID NO: 200759 - DNA, 20 bp, synthetic construct
  source 1..20: mol_type = other DNA
ggatccagacatagggtcat

SEQ ID NO: 200760 - DNA, 20 bp, synthetic construct
  source 1..20: mol_type = other DNA
gggatccagacatagggtca

SEQ ID NO: 200761 - DNA, 20 bp, synthetic construct
  source 1..20: mol_type = other DNA
tgggatccagacatagggtc

SEQ ID NO: 200762 - DNA, 20 bp, synthetic construct
  source 1..20: mol_type = other DNA
atgggatccagacatagggt

SEQ ID NO: 200763 - DNA, 20 bp, synthetic construct
  source 1..20: mol_type = other DNA
tatgggatccagacataggg

SEQ ID NO: 200764 - DNA, 20 bp, synthetic construct
  source 1..20: mol_type = other DNA
atatgggatccagacatagg

SEQ ID NO: 200765 - DNA, 20 bp, synthetic construct
  source 1..20: mol_type = other DNA
gatatgggatccagacatag

SEQ ID NO: 200766 - DNA, 20 bp, synthetic construct
  source 1..20: mol_type = other DNA
agatatgggatccagacata

SEQ ID NO: 200767 - DNA, 20 bp, synthetic construct
  source 1..20: mol_type = other DNA
gagatatgggatccagacat

SEQ ID NO: 200768 - DNA, 20 bp, synthetic construct
  source 1..20: mol_type = other DNA
ggagatatgggatccagaca

SEQ ID NO: 200769 - DNA, 20 bp, synthetic construct
  source 1..20: mol_type = other DNA
tggagatatgggatccagac

SEQ ID NO: 200770 - DNA, 20 bp, synthetic construct
  source 1..20: mol_type = other DNA
gtggagatatgggatccaga

SEQ ID NO: 200771 - DNA, 20 bp, synthetic construct
  source 1..20: mol_type = other DNA
ggtggagatatgggatccag

SEQ ID NO: 200772 - DNA, 20 bp, synthetic construct
  source 1..20: mol_type = other DNA
aggtggagatatgggatcca

SEQ ID NO: 200773 - DNA, 20 bp, synthetic construct
  source 1..20: mol_type = other DNA
gaggtggagatatgggatcc

SEQ ID NO: 200774 - DNA, 20 bp, synthetic construct
  source 1..20: mol_type = other DNA
agaggtggagatatgggatc

SEQ ID NO: 200775 - DNA, 20 bp, synthetic construct
  source 1..20: mol_type = other DNA
gagaggtggagatatgggat

SEQ ID NO: 200776 - DNA, 20 bp, synthetic construct
  source 1..20: mol_type = other DNA
ggagaggtggagatatggga

SEQ ID NO: 200777 - DNA, 20 bp, synthetic construct
  source 1..20: mol_type = other DNA
gggagaggtggagatatggg

SEQ ID NO: 200778 - DNA, 20 bp, synthetic construct
  source 1..20: mol_type = other DNA
tgggagaggtggagatatgg

SEQ ID NO: 200779 - DNA, 20 bp, synthetic construct
  source 1..20: mol_type = other DNA
gtgggagaggtggagatatg

SEQ ID NO: 200780 - DNA, 20 bp, synthetic construct
  source 1..20: mol_type = other DNA
agtgggagaggtggagatat

SEQ ID NO: 200781 - DNA, 20 bp, synthetic construct
  source 1..20: mol_type = other DNA
cagtgggagaggtggagata

SEQ ID NO: 200782 - DNA, 20 bp, synthetic construct
  source 1..20: mol_type = other DNA
acagtgggagaggtggagat

SEQ ID NO: 200783 - DNA, 20 bp, synthetic construct
  source 1..20: mol_type = other DNA
gacagtgggagaggtggaga

SEQ ID NO: 200784 - DNA, 20 bp, synthetic construct
  source 1..20: mol_type = other DNA
agacagtgggagaggtggag

SEQ ID NO: 200785 - DNA, 20 bp, synthetic construct
  source 1..20: mol_type = other DNA
gagacagtgggagaggtgga

SEQ ID NO: 200786 - DNA, 20 bp, synthetic construct
  source 1..20: mol_type = other DNA
tgagacagtgggagaggtgg

SEQ ID NO: 200787 - DNA, 20 bp, synthetic construct
  source 1..20: mol_type = other DNA
ctgagacagtgggagaggtg

SEQ ID NO: 200788 - DNA, 20 bp, synthetic construct
  source 1..20: mol_type = other DNA
cctgagacagtgggagaggt

SEQ ID NO: 200789 - DNA, 20 bp, synthetic construct
  source 1..20: mol_type = other DNA
tcctgagacagtgggagagg

SEQ ID NO: 200790 - DNA, 20 bp, synthetic construct
  source 1..20: mol_type = other DNA
ttcctgagacagtgggagag

SEQ ID NO: 200791 - DNA, 20 bp, synthetic construct
  source 1..20: mol_type = other DNA
gttcctgagacagtgggaga

SEQ ID NO: 200792 - DNA, 20 bp, synthetic construct
  source 1..20: mol_type = other DNA
cgttcctgagacagtgggag

SEQ ID NO: 200793 - DNA, 20 bp, synthetic construct
  source 1..20: mol_type = other DNA
ccgttcctgagacagtggga

SEQ ID NO: 200794 - DNA, 20 bp, synthetic construct
  source 1..20: mol_type = other DNA
accgttcctgagacagtggg

SEQ ID NO: 200795 - DNA, 20 bp, synthetic construct
  source 1..20: mol_type = other DNA
caccgttcctgagacagtgg

SEQ ID NO: 200796 - DNA, 20 bp, synthetic construct
  source 1..20: mol_type = other DNA
gcaccgttcctgagacagtg

SEQ ID NO: 200797 - DNA, 20 bp, synthetic construct
  source 1..20: mol_type = other DNA
agcaccgttcctgagacagt

SEQ ID NO: 200798 - DNA, 20 bp, synthetic construct
  source 1..20: mol_type = other DNA
aagcaccgttcctgagacag

SEQ ID NO: 200799 - DNA, 20 bp, synthetic construct
  source 1..20: mol_type = other DNA
taagcaccgttcctgagaca

SEQ ID NO: 200800 - DNA, 20 bp, synthetic construct
  source 1..20: mol_type = other DNA
ctaagcaccgttcctgagac

SEQ ID NO: 200801 - DNA, 20 bp, synthetic construct
  source 1..20: mol_type = other DNA
gctaagcaccgttcctgaga

SEQ ID NO: 200802 - DNA, 20 bp, synthetic construct
  source 1..20: mol_type = other DNA
agctaagcaccgttcctgag

SEQ ID NO: 200803 - DNA, 20 bp, synthetic construct
  source 1..20: mol_type = other DNA
aagctaagcaccgttcctga

SEQ ID NO: 200804 - DNA, 20 bp, synthetic construct
  source 1..20: mol_type = other DNA
aaagctaagcaccgttcctg

SEQ ID NO: 200805 - DNA, 20 bp, synthetic construct
  source 1..20: mol_type = other DNA
aaaagctaagcaccgttcct

SEQ ID NO: 200806 - DNA, 20 bp, synthetic construct
  source 1..20: mol_type = other DNA
aaaaagctaagcaccgttcc

SEQ ID NO: 200807 - DNA, 20 bp, synthetic construct
  source 1..20: mol_type = other DNA
gaaaaagctaagcaccgttc

SEQ ID NO: 200808 - DNA, 20 bp, synthetic construct
  source 1..20: mol_type = other DNA
agaaaaagctaagcaccgtt

SEQ ID NO: 200809 - DNA, 20 bp, synthetic construct
  source 1..20: mol_type = other DNA
aagaaaaagctaagcaccgt

SEQ ID NO: 200810 - DNA, 20 bp, synthetic construct
  source 1..20: mol_type = other DNA
aaagaaaaagctaagcaccg

SEQ ID NO: 200811 - DNA, 20 bp, synthetic construct
  source 1..20: mol_type = other DNA
aaaagaaaaagctaagcacc

SEQ ID NO: 200812 - DNA, 20 bp, synthetic construct
  source 1..20: mol_type = other DNA
gaaaagaaaaagctaagcac

SEQ ID NO: 200813 - DNA, 20 bp, synthetic construct
  source 1..20: mol_type = other DNA
ggaaaagaaaaagctaagca

SEQ ID NO: 200814 - DNA, 20 bp, synthetic construct
  source 1..20: mol_type = other DNA
gggaaaagaaaaagctaagc

SEQ ID NO: 200815 - DNA, 20 bp, synthetic construct
  source 1..20: mol_type = other DNA
agggaaaagaaaaagctaag

SEQ ID NO: 200816 - DNA, 20 bp, synthetic construct
  source 1..20: mol_type = other DNA
gagggaaaagaaaaagctaa

SEQ ID NO: 200817 - DNA, 20 bp, synthetic construct
  source 1..20: mol_type = other DNA
agagggaaaagaaaaagcta

SEQ ID NO: 200818 - DNA, 20 bp, synthetic construct
  source 1..20: mol_type = other DNA
gagagggaaaagaaaaagct

SEQ ID NO: 200819 - DNA, 20 bp, synthetic construct
  source 1..20: mol_type = other DNA
ggagagggaaaagaaaaagc

SEQ ID NO: 200820 - DNA, 20 bp, synthetic construct
  source 1..20: mol_type = other DNA
aggagagggaaaagaaaaag

SEQ ID NO: 200821 - DNA, 20 bp, synthetic construct
  source 1..20: mol_type = other DNA
caggagagggaaaagaaaaa

SEQ ID NO: 200822 - DNA, 20 bp, synthetic construct
  source 1..20: mol_type = other DNA
acaggagagggaaaagaaaa

SEQ ID NO: 200823 - DNA, 20 bp, synthetic construct
  source 1..20: mol_type = other DNA
gacaggagagggaaaagaaa

SEQ ID NO: 200824 - DNA, 20 bp, synthetic construct
  source 1..20: mol_type = other DNA
agacaggagagggaaaagaa

SEQ ID NO: 200825 - DNA, 20 bp, synthetic construct
  source 1..20: mol_type = other DNA
aagacaggagagggaaaaga

SEQ ID NO: 200826 - DNA, 20 bp, synthetic construct
  source 1..20: mol_type = other DNA
gaagacaggagagggaaaag

SEQ ID NO: 200827 - DNA, 20 bp, synthetic construct
  source 1..20: mol_type = other DNA
agaagacaggagagggaaaa

SEQ ID NO: 200828 - DNA, 20 bp, synthetic construct
  source 1..20: mol_type = other DNA
aagaagacaggagagggaaa

SEQ ID NO: 200829 - DNA, 20 bp, synthetic construct
  source 1..20: mol_type = other DNA
aaagaagacaggagagggaa

SEQ ID NO: 200830 - DNA, 20 bp, synthetic construct
  source 1..20: mol_type = other DNA
caaagaagacaggagaggga

SEQ ID NO: 200831 - DNA, 20 bp, synthetic construct
  source 1..20: mol_type = other DNA
gcaaagaagacaggagaggg

SEQ ID NO: 200832 - DNA, 20 bp, synthetic construct
  source 1..20: mol_type = other DNA
ggcaaagaagacaggagagg

SEQ ID NO: 200833 - DNA, 20 bp, synthetic construct
  source 1..20: mol_type = other DNA
tggcaaagaagacaggagag

SEQ ID NO: 200834 - DNA, 20 bp, synthetic construct
  source 1..20: mol_type = other DNA
ctggcaaagaagacaggaga

SEQ ID NO: 200835 - DNA, 20 bp, synthetic construct
  source 1..20: mol_type = other DNA
gctggcaaagaagacaggag

SEQ ID NO: 200836 - DNA, 20 bp, synthetic construct
  source 1..20: mol_type = other DNA
tgctggcaaagaagacagga

SEQ ID NO: 200837 - DNA, 20 bp, synthetic construct
  source 1..20: mol_type = other DNA
atgctggcaaagaagacagg

SEQ ID NO: 200838 - DNA, 20 bp, synthetic construct
  source 1..20: mol_type = other DNA
catgctggcaaagaagacag

SEQ ID NO: 200839 - DNA, 20 bp, synthetic construct
  source 1..20: mol_type = other DNA
acatgctggcaaagaagaca

SEQ ID NO: 200840 - DNA, 20 bp, synthetic construct
  source 1..20: mol_type = other DNA
tacatgctggcaaagaagac

SEQ ID NO: 200841 - DNA, 20 bp, synthetic construct
  source 1..20: mol_type = other DNA
ctacatgctggcaaagaaga

SEQ ID NO: 200842 - DNA, 20 bp, synthetic construct
  source 1..20: mol_type = other DNA
tctacatgctggcaaagaag

SEQ ID NO: 200843 - DNA, 20 bp, synthetic construct
  source 1..20: mol_type = other DNA
ttctacatgctggcaaagaa

SEQ ID NO: 200844 - DNA, 20 bp, synthetic construct
  source 1..20: mol_type = other DNA
tttctacatgctggcaaaga

SEQ ID NO: 200845 - DNA, 20 bp, synthetic construct
  source 1..20: mol_type = other DNA
ctttctacatgctggcaaag

SEQ ID NO: 200846 - DNA, 20 bp, synthetic construct
  source 1..20: mol_type = other DNA
actttctacatgctggcaaa

SEQ ID NO: 200847 - DNA, 20 bp, synthetic construct
  source 1..20: mol_type = other DNA
aactttctacatgctggcaa

SEQ ID NO: 200848 - DNA, 20 bp, synthetic construct
  source 1..20: mol_type = other DNA
aaactttctacatgctggca

SEQ ID NO: 200849 - DNA, 20 bp, synthetic construct
  source 1..20: mol_type = other DNA
taaactttctacatgctggc

SEQ ID NO: 200850 - DNA, 20 bp, synthetic construct
  source 1..20: mol_type = other DNA
ttaaactttctacatgctgg

SEQ ID NO: 200851 - DNA, 20 bp, synthetic construct
  source 1..20: mol_type = other DNA
tttaaactttctacatgctg

SEQ ID NO: 200852 - DNA, 20 bp, synthetic construct
  source 1..20: mol_type = other DNA
atttaaactttctacatgct

SEQ ID NO: 200853 - DNA, 20 bp, synthetic construct
  source 1..20: mol_type = other DNA
tatttaaactttctacatgc

SEQ ID NO: 200854 - DNA, 20 bp, synthetic construct
  source 1..20: mol_type = other DNA
ttatttaaactttctacatg

SEQ ID NO: 200855 - DNA, 20 bp, synthetic construct
  source 1..20: mol_type = other DNA
attatttaaactttctacat

SEQ ID NO: 200856 - DNA, 20 bp, synthetic construct
  source 1..20: mol_type = other DNA
aattatttaaactttctaca

SEQ ID NO: 200857 - DNA, 20 bp, synthetic construct
  source 1..20: mol_type = other DNA
gaattatttaaactttctac

SEQ ID NO: 200858 - DNA, 20 bp, synthetic construct
  source 1..20: mol_type = other DNA
ggaattatttaaactttcta

SEQ ID NO: 200859 - DNA, 20 bp, synthetic construct
  source 1..20: mol_type = other DNA
gggaattatttaaactttct

SEQ ID NO: 200860 - DNA, 20 bp, synthetic construct
  source 1..20: mol_type = other DNA
ggggaattatttaaactttc

SEQ ID NO: 200861 - DNA, 20 bp, synthetic construct
  source 1..20: mol_type = other DNA
aggggaattatttaaacttt

SEQ ID NO: 200862 - DNA, 20 bp, synthetic construct
  source 1..20: mol_type = other DNA
gaggggaattatttaaactt

SEQ ID NO: 200863 - DNA, 20 bp, synthetic construct
  source 1..20: mol_type = other DNA
agaggggaattatttaaact

SEQ ID NO: 200864 - DNA, 20 bp, synthetic construct
  source 1..20: mol_type = other DNA
aagaggggaattatttaaac

SEQ ID NO: 200865 - DNA, 20 bp, synthetic construct
  source 1..20: mol_type = other DNA
aaagaggggaattatttaaa

SEQ ID NO: 200866 - DNA, 20 bp, synthetic construct
  source 1..20: mol_type = other DNA
taaagaggggaattatttaa

SEQ ID NO: 200867 - DNA, 20 bp, synthetic construct
  source 1..20: mol_type = other DNA
gtaaagaggggaattattta

SEQ ID NO: 200868 - DNA, 20 bp, synthetic construct
  source 1..20: mol_type = other DNA
tgtaaagaggggaattattt

SEQ ID NO: 200869 - DNA, 20 bp, synthetic construct
  source 1..20: mol_type = other DNA
ttgtaaagaggggaattatt

SEQ ID NO: 200870 - DNA, 20 bp, synthetic construct
  source 1..20: mol_type = other DNA
gttgtaaagaggggaattat

SEQ ID NO: 200871 - DNA, 20 bp, synthetic construct
  source 1..20: mol_type = other DNA
tgttgtaaagaggggaatta

SEQ ID NO: 200872 - DNA, 20 bp, synthetic construct
  source 1..20: mol_type = other DNA
ttgttgtaaagaggggaatt

SEQ ID NO: 200873 - DNA, 20 bp, synthetic construct
  source 1..20: mol_type = other DNA
tttgttgtaaagaggggaat

SEQ ID NO: 200874 - DNA, 20 bp, synthetic construct
  source 1..20: mol_type = other DNA
ttttgttgtaaagaggggaa

SEQ ID NO: 200875 - DNA, 20 bp, synthetic construct
  source 1..20: mol_type = other DNA
gttttgttgtaaagagggga

SEQ ID NO: 200876 - DNA, 20 bp, synthetic construct
  source 1..20: mol_type = other DNA
tgttttgttgtaaagagggg

SEQ ID NO: 200877 - DNA, 20 bp, synthetic construct
  source 1..20: mol_type = other DNA
ttgttttgttgtaaagaggg

SEQ ID NO: 200878 - DNA, 20 bp, synthetic construct
  source 1..20: mol_type = other DNA
tttgttttgttgtaaagagg

SEQ ID NO: 200879 - DNA, 20 bp, synthetic construct
  source 1..20: mol_type = other DNA
ttttgttttgttgtaaagag

SEQ ID NO: 200880 - DNA, 20 bp, synthetic construct
  source 1..20: mol_type = other DNA
gttttgttttgttgtaaaga

SEQ ID NO: 200881 - DNA, 20 bp, synthetic construct
  source 1..20: mol_type = other DNA
tgttttgttttgttgtaaag

SEQ ID NO: 200882 - DNA, 20 bp, synthetic construct
  source 1..20: mol_type = other DNA
atgttttgttttgttgtaaa

SEQ ID NO: 200883 - DNA, 20 bp, synthetic construct
  source 1..20: mol_type = other DNA
tatgttttgttttgttgtaa

SEQ ID NO: 200884 - DNA, 20 bp, synthetic construct
  source 1..20: mol_type = other DNA
gtatgttttgttttgttgta

SEQ ID NO: 200885 - DNA, 20 bp, synthetic construct
  source 1..20: mol_type = other DNA
ggtatgttttgttttgttgt

SEQ ID NO: 200886 - DNA, 20 bp, synthetic construct
  source 1..20: mol_type = other DNA
gggtatgttttgttttgttg

SEQ ID NO: 200887 - DNA, 20 bp, synthetic construct
  source 1..20: mol_type = other DNA
ggggtatgttttgttttgtt

SEQ ID NO: 200888 - DNA, 20 bp, synthetic construct
  source 1..20: mol_type = other DNA
gggggtatgttttgttttgt

SEQ ID NO: 200889 - DNA, 20 bp, synthetic construct
  source 1..20: mol_type = other DNA
agggggtatgttttgttttg

SEQ ID NO: 200890 - DNA, 20 bp, synthetic construct
  source 1..20: mol_type = other DNA
aagggggtatgttttgtttt

SEQ ID NO: 200891 - DNA, 20 bp, synthetic construct
  source 1..20: mol_type = other DNA
gaagggggtatgttttgttt

SEQ ID NO: 200892 - DNA, 20 bp, synthetic construct
  source 1..20: mol_type = other DNA
tgaagggggtatgttttgtt

SEQ ID NO: 200893 - DNA, 20 bp, synthetic construct
  source 1..20: mol_type = other DNA
ctgaagggggtatgttttgt

SEQ ID NO: 200894 - DNA, 20 bp, synthetic construct
  source 1..20: mol_type = other DNA
actgaagggggtatgttttg

SEQ ID NO: 200895 - DNA, 20 bp, synthetic construct
  source 1..20: mol_type = other DNA
gactgaagggggtatgtttt

SEQ ID NO: 200896 - DNA, 20 bp, synthetic construct
  source 1..20: mol_type = other DNA
tgactgaagggggtatgttt

SEQ ID NO: 200897 - DNA, 20 bp, synthetic construct
  source 1..20: mol_type = other DNA
ttgactgaagggggtatgtt

SEQ ID NO: 200898 - DNA, 20 bp, synthetic construct
  source 1..20: mol_type = other DNA
gttgactgaagggggtatgt

SEQ ID NO: 200899 - DNA, 20 bp, synthetic construct
  source 1..20: mol_type = other DNA
ggttgactgaagggggtatg

SEQ ID NO: 200900 - DNA, 20 bp, synthetic construct
  source 1..20: mol_type = other DNA
tggttgactgaagggggtat

SEQ ID NO: 200901 - DNA, 20 bp, synthetic construct
  source 1..20: mol_type = other DNA
gtggttgactgaagggggta

SEQ ID NO: 200902 - DNA, 20 bp, synthetic construct
  source 1..20: mol_type = other DNA
ggtggttgactgaagggggt

SEQ ID NO: 200903 - DNA, 20 bp, synthetic construct
  source 1..20: mol_type = other DNA
gggtggttgactgaaggggg

SEQ ID NO: 200904 - DNA, 20 bp, synthetic construct
  source 1..20: mol_type = other DNA
agggtggttgactgaagggg

SEQ ID NO: 200905 - DNA, 20 bp, synthetic construct
  source 1..20: mol_type = other DNA
tagggtggttgactgaaggg

SEQ ID NO: 200906 - DNA, 20 bp, synthetic construct
  source 1..20: mol_type = other DNA
ctagggtggttgactgaagg

SEQ ID NO: 200907 - DNA, 20 bp, synthetic construct
  source 1..20: mol_type = other DNA
gctagggtggttgactgaag

SEQ ID NO: 200908 - DNA, 20 bp, synthetic construct
  source 1..20: mol_type = other DNA
agctagggtggttgactgaa

SEQ ID NO: 200909 - DNA, 20 bp, synthetic construct
  source 1..20: mol_type = other DNA
gagctagggtggttgactga

SEQ ID NO: 200910 - DNA, 20 bp, synthetic construct
  source 1..20: mol_type = other DNA
agagctagggtggttgactg

SEQ ID NO: 200911 - DNA, 20 bp, synthetic construct
  source 1..20: mol_type = other DNA
gagagctagggtggttgact

SEQ ID NO: 200912 - DNA, 20 bp, synthetic construct
  source 1..20: mol_type = other DNA
agagagctagggtggttgac

SEQ ID NO: 200913 - DNA, 20 bp, synthetic construct
  source 1..20: mol_type = other DNA
aagagagctagggtggttga

SEQ ID NO: 200914 - DNA, 20 bp, synthetic construct
  source 1..20: mol_type = other DNA
gaagagagctagggtggttg

SEQ ID NO: 200915 - DNA, 20 bp, synthetic construct
  source 1..20: mol_type = other DNA
agaagagagctagggtggtt

SEQ ID NO: 200916 - DNA, 20 bp, synthetic construct
  source 1..20: mol_type = other DNA
gagaagagagctagggtggt

SEQ ID NO: 200917 - DNA, 20 bp, synthetic construct
  source 1..20: mol_type = other DNA
ggagaagagagctagggtgg

SEQ ID NO: 200918 - DNA, 20 bp, synthetic construct
  source 1..20: mol_type = other DNA
aggagaagagagctagggtg

SEQ ID NO: 200919 - DNA, 20 bp, synthetic construct
  source 1..20: mol_type = other DNA
aaggagaagagagctagggt

SEQ ID NO: 200920 - DNA, 20 bp, synthetic construct
  source 1..20: mol_type = other DNA
aaaggagaagagagctaggg

SEQ ID NO: 200921 - DNA, 20 bp, synthetic construct
  source 1..20: mol_type = other DNA
aaaaggagaagagagctagg

SEQ ID NO: 200922 - DNA, 20 bp, synthetic construct
  source 1..20: mol_type = other DNA
gaaaaggagaagagagctag

SEQ ID NO: 200923 - DNA, 20 bp, synthetic construct
  source 1..20: mol_type = other DNA
ggaaaaggagaagagagcta

SEQ ID NO: 200924 - DNA, 20 bp, synthetic construct
  source 1..20: mol_type = other DNA
gggaaaaggagaagagagct

SEQ ID NO: 200925 - DNA, 20 bp, synthetic construct
  source 1..20: mol_type = other DNA
tgggaaaaggagaagagagc

SEQ ID NO: 200926 - DNA, 20 bp, synthetic construct
  source 1..20: mol_type = other DNA
ctgggaaaaggagaagagag

SEQ ID NO: 200927 - DNA, 20 bp, synthetic construct
  source 1..20: mol_type = other DNA
gctgggaaaaggagaagaga

SEQ ID NO: 200928 - DNA, 20 bp, synthetic construct
  source 1..20: mol_type = other DNA
ggctgggaaaaggagaagag

SEQ ID NO: 200929 - DNA, 20 bp, synthetic construct
  source 1..20: mol_type = other DNA
tggctgggaaaaggagaaga

SEQ ID NO: 200930 - DNA, 20 bp, synthetic construct
  source 1..20: mol_type = other DNA
ctggctgggaaaaggagaag

SEQ ID NO: 200931 - DNA, 20 bp, synthetic construct
  source 1..20: mol_type = other DNA
tctggctgggaaaaggagaa

SEQ ID NO: 200932 - DNA, 20 bp, synthetic construct
  source 1..20: mol_type = other DNA
atctggctgggaaaaggaga

SEQ ID NO: 200933 - DNA, 20 bp, synthetic construct
  source 1..20: mol_type = other DNA
aatctggctgggaaaaggag

SEQ ID NO: 200934 - DNA, 20 bp, synthetic construct
  source 1..20: mol_type = other DNA
aaatctggctgggaaaagga

SEQ ID NO: 200935 - DNA, 20 bp, synthetic construct
  source 1..20: mol_type = other DNA
aaaatctggctgggaaaagg

SEQ ID NO: 200936 - DNA, 20 bp, synthetic construct
  source 1..20: mol_type = other DNA
aaaaatctggctgggaaaag

SEQ ID NO: 200937 - DNA, 20 bp, synthetic construct
  source 1..20: mol_type = other DNA
aaaaaatctggctgggaaaa

SEQ ID NO: 200938 - DNA, 20 bp, synthetic construct
  source 1..20: mol_type = other DNA
aaaaaaatctggctgggaaa

SEQ ID NO: 200939 - DNA, 20 bp, synthetic construct
  source 1..20: mol_type = other DNA
taaaaaaatctggctgggaa

SEQ ID NO: 200940 - DNA, 20 bp, synthetic construct
  source 1..20: mol_type = other DNA
ttaaaaaaatctggctggga

SEQ ID NO: 200941 - DNA, 20 bp, synthetic construct
  source 1..20: mol_type = other DNA
tttaaaaaaatctggctggg

SEQ ID NO: 200942 - DNA, 20 bp, synthetic construct
  source 1..20: mol_type = other DNA
ttttaaaaaaatctggctgg

SEQ ID NO: 200943 - DNA, 20 bp, synthetic construct
  source 1..20: mol_type = other DNA
cttttaaaaaaatctggctg

SEQ ID NO: 200944 - DNA, 20 bp, synthetic construct
  source 1..20: mol_type = other DNA
gcttttaaaaaaatctggct

SEQ ID NO: 200945 - DNA, 20 bp, synthetic construct
  source 1..20: mol_type = other DNA
tgcttttaaaaaaatctggc

SEQ ID NO: 200946 - DNA, 20 bp, synthetic construct
  source 1..20: mol_type = other DNA
atgcttttaaaaaaatctgg

SEQ ID NO: 200947 - DNA, 20 bp, synthetic construct
  source 1..20: mol_type = other DNA
gatgcttttaaaaaaatctg

SEQ ID NO: 200948 - DNA, 20 bp, synthetic construct
  source 1..20: mol_type = other DNA
ggatgcttttaaaaaaatct

SEQ ID NO: 200949 - DNA, 20 bp, synthetic construct
  source 1..20: mol_type = other DNA
aggatgcttttaaaaaaatc

SEQ ID NO: 200950 - DNA, 20 bp, synthetic construct
  source 1..20: mol_type = other DNA
taggatgcttttaaaaaaat

SEQ ID NO: 200951 - DNA, 20 bp, synthetic construct
  source 1..20: mol_type = other DNA
ctaggatgcttttaaaaaaa

SEQ ID NO: 200952 - DNA, 20 bp, synthetic construct
  source 1..20: mol_type = other DNA
cctaggatgcttttaaaaaa

SEQ ID NO: 200953 - DNA, 20 bp, synthetic construct
  source 1..20: mol_type = other DNA
gcctaggatgcttttaaaaa

SEQ ID NO: 200954 - DNA, 20 bp, synthetic construct
  source 1..20: mol_type = other DNA
ggcctaggatgcttttaaaa

SEQ ID NO: 200955 - DNA, 20 bp, synthetic construct
  source 1..20: mol_type = other DNA
tggcctaggatgcttttaaa

SEQ ID NO: 200956 - DNA, 20 bp, synthetic construct
  source 1..20: mol_type = other DNA
ctggcctaggatgcttttaa

SEQ ID NO: 200957 - DNA, 20 bp, synthetic construct
  source 1..20: mol_type = other DNA
cctggcctaggatgctttta

SEQ ID NO: 200958 - DNA, 20 bp, synthetic construct
  source 1..20: mol_type = other DNA
gcctggcctaggatgctttt

SEQ ID NO: 200959 - DNA, 20 bp, synthetic construct
  source 1..20: mol_type = other DNA
cgcctggcctaggatgcttt

SEQ ID NO: 200960 - DNA, 20 bp, synthetic construct
  source 1..20: mol_type = other DNA
gcgcctggcctaggatgctt

SEQ ID NO: 200961 - DNA, 20 bp, synthetic construct
  source 1..20: mol_type = other DNA
cgcgcctggcctaggatgct

SEQ ID NO: 200962 - DNA, 20 bp, synthetic construct
  source 1..20: mol_type = other DNA
ccgcgcctggcctaggatgc

SEQ ID NO: 200963 - DNA, 20 bp, synthetic construct
  source 1..20: mol_type = other DNA
accgcgcctggcctaggatg

SEQ ID NO: 200964 - DNA, 20 bp, synthetic construct
  source 1..20: mol_type = other DNA
caccgcgcctggcctaggat

SEQ ID NO: 200965 - DNA, 20 bp, synthetic construct
  source 1..20: mol_type = other DNA
tcaccgcgcctggcctagga

SEQ ID NO: 200966 - DNA, 20 bp, synthetic construct
  source 1..20: mol_type = other DNA
gtcaccgcgcctggcctagg

SEQ ID NO: 200967 - DNA, 20 bp, synthetic construct
  source 1..20: mol_type = other DNA
agtcaccgcgcctggcctag

SEQ ID NO: 200968 - DNA, 20 bp, synthetic construct
  source 1..20: mol_type = other DNA
gagtcaccgcgcctggccta

SEQ ID NO: 200969 - DNA, 20 bp, synthetic construct
  source 1..20: mol_type = other DNA
tgagtcaccgcgcctggcct

SEQ ID NO: 200970 - DNA, 20 bp, synthetic construct
  source 1..20: mol_type = other DNA
gtgagtcaccgcgcctggcc

SEQ ID NO: 200971 - DNA, 20 bp, synthetic construct
  source 1..20: mol_type = other DNA
cgtgagtcaccgcgcctggc

SEQ ID NO: 200972 - DNA, 20 bp, synthetic construct
  source 1..20: mol_type = other DNA
gcgtgagtcaccgcgcctgg

SEQ ID NO: 200973 - DNA, 20 bp, synthetic construct
  source 1..20: mol_type = other DNA
ggcgtgagtcaccgcgcctg

SEQ ID NO: 200974 - DNA, 20 bp, synthetic construct
  source 1..20: mol_type = other DNA
aggcgtgagtcaccgcgcct

SEQ ID NO: 200975 - DNA, 20 bp, synthetic construct
  source 1..20: mol_type = other DNA
caggcgtgagtcaccgcgcc

SEQ ID NO: 200976 - DNA, 20 bp, synthetic construct
  source 1..20: mol_type = other DNA
acaggcgtgagtcaccgcgc

SEQ ID NO: 200977 - DNA, 20 bp, synthetic construct
  source 1..20: mol_type = other DNA
tacaggcgtgagtcaccgcg

SEQ ID NO: 200978 - DNA, 20 bp, synthetic construct
  source 1..20: mol_type = other DNA
ttacaggcgtgagtcaccgc

SEQ ID NO: 200979 - DNA, 20 bp, synthetic construct
  source 1..20: mol_type = other DNA
attacaggcgtgagtcaccg

SEQ ID NO: 200980 - DNA, 20 bp, synthetic construct
  source 1..20: mol_type = other DNA
aattacaggcgtgagtcacc

SEQ ID NO: 200981 - DNA, 20 bp, synthetic construct
  source 1..20: mol_type = other DNA
gaattacaggcgtgagtcac

SEQ ID NO: 200982 - DNA, 20 bp, synthetic construct
  source 1..20: mol_type = other DNA
ggaattacaggcgtgagtca

SEQ ID NO: 200983 - DNA, 20 bp, synthetic construct
  source 1..20: mol_type = other DNA
tggaattacaggcgtgagtc

SEQ ID NO: 200984 - DNA, 20 bp, synthetic construct
  source 1..20: mol_type = other DNA
ctggaattacaggcgtgagt

SEQ ID NO: 200985 - DNA, 20 bp, synthetic construct
  source 1..20: mol_type = other DNA
gctggaattacaggcgtgag

SEQ ID NO: 200986 - DNA, 20 bp, synthetic construct
  source 1..20: mol_type = other DNA
tgctggaattacaggcgtga

SEQ ID NO: 200987 - DNA, 20 bp, synthetic construct
  source 1..20: mol_type = other DNA
gtgctggaattacaggcgtg

SEQ ID NO: 200988 - DNA, 20 bp, synthetic construct
  source 1..20: mol_type = other DNA
agtgctggaattacaggcgt

SEQ ID NO: 200989 - DNA, 20 bp, synthetic construct
  source 1..20: mol_type = other DNA
aagtgctggaattacaggcg

SEQ ID NO: 200990 - DNA, 20 bp, synthetic construct
  source 1..20: mol_type = other DNA
aaagtgctggaattacaggc

SEQ ID NO: 200991 - DNA, 20 bp, synthetic construct
  source 1..20: mol_type = other DNA
caaagtgctggaattacagg

SEQ ID NO: 200992 - DNA, 20 bp, synthetic construct
  source 1..20: mol_type = other DNA
ccaaagtgctggaattacag

SEQ ID NO: 200993 - DNA, 20 bp, synthetic construct
  source 1..20: mol_type = other DNA
cccaaagtgctggaattaca

SEQ ID NO: 200994 - DNA, 20 bp, synthetic construct
  source 1..20: mol_type = other DNA
tcccaaagtgctggaattac

SEQ ID NO: 200995 - DNA, 20 bp, synthetic construct
  source 1..20: mol_type = other DNA
ctcccaaagtgctggaatta

SEQ ID NO: 200996 - DNA, 20 bp, synthetic construct
  source 1..20: mol_type = other DNA
cctcccaaagtgctggaatt

SEQ ID NO: 200997 - DNA, 20 bp, synthetic construct
  source 1..20: mol_type = other DNA
gcctcccaaagtgctggaat

SEQ ID NO: 200998 - DNA, 20 bp, synthetic construct
  source 1..20: mol_type = other DNA
ggcctcccaaagtgctggaa

SEQ ID NO: 200999 - DNA, 20 bp, synthetic construct
  source 1..20: mol_type = other DNA
tggcctcccaaagtgctgga

SEQ ID NO: 201000 - DNA, 20 bp, synthetic construct
  source 1..20: mol_type = other DNA
ttggcctcccaaagtgctgg

SEQ ID NO: 201001 - DNA, 20 bp, synthetic construct
  source 1..20: mol_type = other DNA
cttggcctcccaaagtgctg

SEQ ID NO: 201002 - DNA, 20 bp, synthetic construct
  source 1..20: mol_type = other DNA
ccttggcctcccaaagtgct

SEQ ID NO: 201003 - DNA, 20 bp, synthetic construct
  source 1..20: mol_type = other DNA
accttggcctcccaaagtgc

SEQ ID NO: 201004 - DNA, 20 bp, synthetic construct
  source 1..20: mol_type = other DNA
caccttggcctcccaaagtg

SEQ ID NO: 201005 - DNA, 20 bp, synthetic construct
  source 1..20: mol_type = other DNA
ccaccttggcctcccaaagt

SEQ ID NO: 201006 - DNA, 20 bp, synthetic construct
  source 1..20: mol_type = other DNA
cccaccttggcctcccaaag

SEQ ID NO: 201007 - DNA, 20 bp, synthetic construct
  source 1..20: mol_type = other DNA
acccaccttggcctcccaaa

SEQ ID NO: 201008 - DNA, 20 bp, synthetic construct
  source 1..20: mol_type = other DNA
cacccaccttggcctcccaa

SEQ ID NO: 201009 - DNA, 20 bp, synthetic construct
  source 1..20: mol_type = other DNA
ccacccaccttggcctccca

SEQ ID NO: 201010 - DNA, 20 bp, synthetic construct
  source 1..20: mol_type = other DNA
tccacccaccttggcctccc

SEQ ID NO: 201011 - DNA, 20 bp, synthetic construct
  source 1..20: mol_type = other DNA
atccacccaccttggcctcc

SEQ ID NO: 201012 - DNA, 20 bp, synthetic construct
  source 1..20: mol_type = other DNA
gatccacccaccttggcctc

SEQ ID NO: 201013 - DNA, 20 bp, synthetic construct
  source 1..20: mol_type = other DNA
tgatccacccaccttggcct

SEQ ID NO: 201014 - DNA, 20 bp, synthetic construct
  source 1..20: mol_type = other DNA
gtgatccacccaccttggcc

SEQ ID NO: 201015 - DNA, 20 bp, synthetic construct
  source 1..20: mol_type = other DNA
tgtgatccacccaccttggc

SEQ ID NO: 201016 - DNA, 20 bp, synthetic construct
  source 1..20: mol_type = other DNA
ttgtgatccacccaccttgg

SEQ ID NO: 201017 - DNA, 20 bp, synthetic construct
  source 1..20: mol_type = other DNA
cttgtgatccacccaccttg

SEQ ID NO: 201018 - DNA, 20 bp, synthetic construct
  source 1..20: mol_type = other DNA
ccttgtgatccacccacctt

SEQ ID NO: 201019 - DNA, 20 bp, synthetic construct
  source 1..20: mol_type = other DNA
accttgtgatccacccacct

SEQ ID NO: 201020 - DNA, 20 bp, synthetic construct
  source 1..20: mol_type = other DNA
gaccttgtgatccacccacc

SEQ ID NO: 201021 - DNA, 20 bp, synthetic construct
  source 1..20: mol_type = other DNA
tgaccttgtgatccacccac

SEQ ID NO: 201022 - DNA, 20 bp, synthetic construct
  source 1..20: mol_type = other DNA
ctgaccttgtgatccaccca

SEQ ID NO: 201023 - DNA, 20 bp, synthetic construct
  source 1..20: mol_type = other DNA
cctgaccttgtgatccaccc

SEQ ID NO: 201024 - DNA, 20 bp, synthetic construct
  source 1..20: mol_type = other DNA
tcctgaccttgtgatccacc

SEQ ID NO: 201025 - DNA, 20 bp, synthetic construct
  source 1..20: mol_type = other DNA
ctcctgaccttgtgatccac

SEQ ID NO: 201026 - DNA, 20 bp, synthetic construct
  source 1..20: mol_type = other DNA
tctcctgaccttgtgatcca

SEQ ID NO: 201027 - DNA, 20 bp, synthetic construct
  source 1..20: mol_type = other DNA
atctcctgaccttgtgatcc

SEQ ID NO: 201028 - DNA, 20 bp, synthetic construct
  source 1..20: mol_type = other DNA
gatctcctgaccttgtgatc

SEQ ID NO: 201029 - DNA, 20 bp, synthetic construct
  source 1..20: mol_type = other DNA
cgatctcctgaccttgtgat

SEQ ID NO: 201030 - DNA, 20 bp, synthetic construct
  source 1..20: mol_type = other DNA
tcgatctcctgaccttgtga

SEQ ID NO: 201031 - DNA, 20 bp, synthetic construct
  source 1..20: mol_type = other DNA
ctcgatctcctgaccttgtg

SEQ ID NO: 201032 - DNA, 20 bp, synthetic construct
  source 1..20: mol_type = other DNA
tctcgatctcctgaccttgt

SEQ ID NO: 201033 - DNA, 20 bp, synthetic construct
  source 1..20: mol_type = other DNA
gtctcgatctcctgaccttg

SEQ ID NO: 201034 - DNA, 20 bp, synthetic construct
  source 1..20: mol_type = other DNA
ggtctcgatctcctgacctt

SEQ ID NO: 201035 - DNA, 20 bp, synthetic construct
  source 1..20: mol_type = other DNA
tggtctcgatctcctgacct

SEQ ID NO: 201036 - DNA, 20 bp, synthetic construct
  source 1..20: mol_type = other DNA
atggtctcgatctcctgacc

SEQ ID NO: 201037 - DNA, 20 bp, synthetic construct
  source 1..20: mol_type = other DNA
gatggtctcgatctcctgac

SEQ ID NO: 201038 - DNA, 20 bp, synthetic construct
  source 1..20: mol_type = other DNA
ggatggtctcgatctcctga

SEQ ID NO: 201039 - DNA, 20 bp, synthetic construct
  source 1..20: mol_type = other DNA
aggatggtctcgatctcctg

SEQ ID NO: 201040 - DNA, 20 bp, synthetic construct
  source 1..20: mol_type = other DNA
caggatggtctcgatctcct

SEQ ID NO: 201041 - DNA, 20 bp, synthetic construct
  source 1..20: mol_type = other DNA
ccaggatggtctcgatctcc

SEQ ID NO: 201042 - DNA, 20 bp, synthetic construct
  source 1..20: mol_type = other DNA
gccaggatggtctcgatctc

SEQ ID NO: 201043 - DNA, 20 bp, synthetic construct
  source 1..20: mol_type = other DNA
agccaggatggtctcgatct

SEQ ID NO: 201044 - DNA, 20 bp, synthetic construct
  source 1..20: mol_type = other DNA
tagccaggatggtctcgatc

SEQ ID NO: 201045 - DNA, 20 bp, synthetic construct
  source 1..20: mol_type = other DNA
ttagccaggatggtctcgat

SEQ ID NO: 201046 - DNA, 20 bp, synthetic construct
  source 1..20: mol_type = other DNA
gttagccaggatggtctcga

SEQ ID NO: 201047 - DNA, 20 bp, synthetic construct
  source 1..20: mol_type = other DNA
tgttagccaggatggtctcg

SEQ ID NO: 201048 - DNA, 20 bp, synthetic construct
  source 1..20: mol_type = other DNA
atgttagccaggatggtctc

SEQ ID NO: 201049 - DNA, 20 bp, synthetic construct
  source 1..20: mol_type = other DNA
catgttagccaggatggtct

SEQ ID NO: 201050 - DNA, 20 bp, synthetic construct
  source 1..20: mol_type = other DNA
ccatgttagccaggatggtc

SEQ ID NO: 201051 - DNA, 20 bp, synthetic construct
  source 1..20: mol_type = other DNA
accatgttagccaggatggt

SEQ ID NO: 201052 - DNA, 20 bp, synthetic construct
  source 1..20: mol_type = other DNA
caccatgttagccaggatgg

SEQ ID NO: 201053 - DNA, 20 bp, synthetic construct
  source 1..20: mol_type = other DNA
tcaccatgttagccaggatg

SEQ ID NO: 201054 - DNA, 20 bp, synthetic construct
  source 1..20: mol_type = other DNA
ttcaccatgttagccaggat

SEQ ID NO: 201055 - DNA, 20 bp, synthetic construct
  source 1..20: mol_type = other DNA
tttcaccatgttagccagga

SEQ ID NO: 201056 - DNA, 20 bp, synthetic construct
  source 1..20: mol_type = other DNA
gtttcaccatgttagccagg

SEQ ID NO: 201057 - DNA, 20 bp, synthetic construct
  source 1..20: mol_type = other DNA
ggtttcaccatgttagccag

SEQ ID NO: 201058 - DNA, 20 bp, synthetic construct
  source 1..20: mol_type = other DNA
gggtttcaccatgttagcca

SEQ ID NO: 201059 - DNA, 20 bp, synthetic construct
  source 1..20: mol_type = other DNA
ggggtttcaccatgttagcc

SEQ ID NO: 201060 - DNA, 20 bp, synthetic construct
  source 1..20: mol_type = other DNA
tggggtttcaccatgttagc

SEQ ID NO: 201061 - DNA, 20 bp, synthetic construct
  source 1..20: mol_type = other DNA
atggggtttcaccatgttag

SEQ ID NO: 201062 - DNA, 20 bp, synthetic construct
  source 1..20: mol_type = other DNA
gatggggtttcaccatgtta

SEQ ID NO: 201063 - DNA, 20 bp, synthetic construct
  source 1..20: mol_type = other DNA
agatggggtttcaccatgtt

SEQ ID NO: 201064 - DNA, 20 bp, synthetic construct
  source 1..20: mol_type = other DNA
gagatggggtttcaccatgt

SEQ ID NO: 201065 - DNA, 20 bp, synthetic construct
  source 1..20: mol_type = other DNA
agagatggggtttcaccatg

SEQ ID NO: 201066 - DNA, 20 bp, synthetic construct
  source 1..20: mol_type = other DNA
tagagatggggtttcaccat

SEQ ID NO: 201067 - DNA, 20 bp, synthetic construct
  source 1..20: mol_type = other DNA
gtagagatggggtttcacca

SEQ ID NO: 201068 - DNA, 20 bp, synthetic construct
  source 1..20: mol_type = other DNA
agtagagatggggtttcacc

SEQ ID NO: 201069 - DNA, 20 bp, synthetic construct
  source 1..20: mol_type = other DNA
tagtagagatggggtttcac

SEQ ID NO: 201070 - DNA, 20 bp, synthetic construct
  source 1..20: mol_type = other DNA
ttagtagagatggggtttca

SEQ ID NO: 201071 - DNA, 20 bp, synthetic construct
  source 1..20: mol_type = other DNA
tttagtagagatggggtttc

SEQ ID NO: 201072 - DNA, 20 bp, synthetic construct
  source 1..20: mol_type = other DNA
ttttagtagagatggggttt

SEQ ID NO: 201073 - DNA, 20 bp, synthetic construct
  source 1..20: mol_type = other DNA
tttttagtagagatggggtt

SEQ ID NO: 201074 - DNA, 20 bp, synthetic construct
  source 1..20: mol_type = other DNA
atttttagtagagatggggt

SEQ ID NO: 201075 - DNA, 20 bp, synthetic construct
  source 1..20: mol_type = other DNA
tatttttagtagagatgggg

SEQ ID NO: 201076 - DNA, 20 bp, synthetic construct
  source 1..20: mol_type = other DNA
gtatttttagtagagatggg

SEQ ID NO: 201077 - DNA, 20 bp, synthetic construct
  source 1..20: mol_type = other DNA
tgtatttttagtagagatgg

SEQ ID NO: 201078 - DNA, 20 bp, synthetic construct
  source 1..20: mol_type = other DNA
ttgtatttttagtagagatg

SEQ ID NO: 201079 - DNA, 20 bp, synthetic construct
  source 1..20: mol_type = other DNA
tttgtatttttagtagagat

SEQ ID NO: 201080 - DNA, 20 bp, synthetic construct
  source 1..20: mol_type = other DNA
ttttgtatttttagtagaga

SEQ ID NO: 201081 - DNA, 20 bp, synthetic construct
  source 1..20: mol_type = other DNA
tttttgtatttttagtagag

SEQ ID NO: 201082 - DNA, 20 bp, synthetic construct
  source 1..20: mol_type = other DNA
ttttttgtatttttagtaga

SEQ ID NO: 201083 - DNA, 20 bp, synthetic construct
  source 1..20: mol_type = other DNA
cttttttgtatttttagtag

SEQ ID NO: 201084 - DNA, 20 bp, synthetic construct
  source 1..20: mol_type = other DNA
acttttttgtatttttagta

SEQ ID NO: 201085 - DNA, 20 bp, synthetic construct
  source 1..20: mol_type = other DNA
tacttttttgtatttttagt

SEQ ID NO: 201086 - DNA, 20 bp, synthetic construct
  source 1..20: mol_type = other DNA
ctacttttttgtatttttag

SEQ ID NO: 201087 - DNA, 20 bp, synthetic construct
  source 1..20: mol_type = other DNA
gctacttttttgtattttta

SEQ ID NO: 201088 - DNA, 20 bp, synthetic construct
  source 1..20: mol_type = other DNA
ggctacttttttgtattttt

SEQ ID NO: 201089 - DNA, 20 bp, synthetic construct
  source 1..20: mol_type = other DNA
cggctacttttttgtatttt

SEQ ID NO: 201090 - DNA, 20 bp, synthetic construct
  source 1..20: mol_type = other DNA
ccggctacttttttgtattt

SEQ ID NO: 201091 - DNA, 20 bp, synthetic construct
  source 1..20: mol_type = other DNA
cccggctacttttttgtatt

SEQ ID NO: 201092 - DNA, 20 bp, synthetic construct
  source 1..20: mol_type = other DNA
tcccggctacttttttgtat

SEQ ID NO: 201093 - DNA, 20 bp, synthetic construct
  source 1..20: mol_type = other DNA
ctcccggctacttttttgta

SEQ ID NO: 201094 - DNA, 20 bp, synthetic construct
  source 1..20: mol_type = other DNA
actcccggctacttttttgt

SEQ ID NO: 201095 - DNA, 20 bp, synthetic construct
  source 1..20: mol_type = other DNA
cactcccggctacttttttg

SEQ ID NO: 201096 - DNA, 20 bp, synthetic construct
  source 1..20: mol_type = other DNA
ccactcccggctactttttt

SEQ ID NO: 201097 - DNA, 20 bp, synthetic construct
  source 1..20: mol_type = other DNA
accactcccggctacttttt

SEQ ID NO: 201098 - DNA, 20 bp, synthetic construct
  source 1..20: mol_type = other DNA
caccactcccggctactttt

SEQ ID NO: 201099 - DNA, 20 bp, synthetic construct
  source 1..20: mol_type = other DNA
ccaccactcccggctacttt

SEQ ID NO: 201100 - DNA, 20 bp, synthetic construct
  source 1..20: mol_type = other DNA
gccaccactcccggctactt

SEQ ID NO: 201101 - DNA, 20 bp, synthetic construct
  source 1..20: mol_type = other DNA
tgccaccactcccggctact

SEQ ID NO: 201102 - DNA, 20 bp, synthetic construct
  source 1..20: mol_type = other DNA
ctgccaccactcccggctac

SEQ ID NO: 201103 - DNA, 20 bp, synthetic construct
  source 1..20: mol_type = other DNA
cctgccaccactcccggcta

SEQ ID NO: 201104 - DNA, 20 bp, synthetic construct
  source 1..20: mol_type = other DNA
acctgccaccactcccggct

SEQ ID NO: 201105 - DNA, 20 bp, synthetic construct
  source 1..20: mol_type = other DNA
cacctgccaccactcccggc

SEQ ID NO: 201106 - DNA, 20 bp, synthetic construct
  source 1..20: mol_type = other DNA
gcacctgccaccactcccgg

SEQ ID NO: 201107 - DNA, 20 bp, synthetic construct
  source 1..20: mol_type = other DNA
ggcacctgccaccactcccg

SEQ ID NO: 201108 - DNA, 20 bp, synthetic construct
  source 1..20: mol_type = other DNA
aggcacctgccaccactccc

SEQ ID NO: 201109 - DNA, 20 bp, synthetic construct
  source 1..20: mol_type = other DNA
caggcacctgccaccactcc

SEQ ID NO: 201110 - DNA, 20 bp, synthetic construct
  source 1..20: mol_type = other DNA
acaggcacctgccaccactc

SEQ ID NO: 201111 - DNA, 20 bp, synthetic construct
  source 1..20: mol_type = other DNA
tacaggcacctgccaccact

SEQ ID NO: 201112 - DNA, 20 bp, synthetic construct
  source 1..20: mol_type = other DNA
ctacaggcacctgccaccac

SEQ ID NO: 201113 - DNA, 20 bp, synthetic construct
  source 1..20: mol_type = other DNA
actacaggcacctgccacca

SEQ ID NO: 201114 - DNA, 20 bp, synthetic construct
  source 1..20: mol_type = other DNA
gactacaggcacctgccacc

SEQ ID NO: 201115 - DNA, 20 bp, synthetic construct
  source 1..20: mol_type = other DNA
ggactacaggcacctgccac

SEQ ID NO: 201116 - DNA, 20 bp, synthetic construct
  source 1..20: mol_type = other DNA
gggactacaggcacctgcca

SEQ ID NO: 201117 - DNA, 20 bp, synthetic construct
  source 1..20: mol_type = other DNA
tgggactacaggcacctgcc

SEQ ID NO: 201118 - DNA, 20 bp, synthetic construct
  source 1..20: mol_type = other DNA
ctgggactacaggcacctgc

SEQ ID NO: 201119 - DNA, 20 bp, synthetic construct
  source 1..20: mol_type = other DNA
gctgggactacaggcacctg

SEQ ID NO: 201120 - DNA, 20 bp, synthetic construct
  source 1..20: mol_type = other DNA
agctgggactacaggcacct

SEQ ID NO: 201121 - DNA, 20 bp, synthetic construct
  source 1..20: mol_type = other DNA
tagctgggactacaggcacc

SEQ ID NO: 201122 - DNA, 20 bp, synthetic construct
  source 1..20: mol_type = other DNA
gtagctgggactacaggcac

SEQ ID NO: 201123 - DNA, 20 bp, synthetic construct
  source 1..20: mol_type = other DNA
agtagctgggactacaggca

SEQ ID NO: 201124 - DNA, 20 bp, synthetic construct
  source 1..20: mol_type = other DNA
gagtagctgggactacaggc

SEQ ID NO: 201125 - DNA, 20 bp, synthetic construct
  source 1..20: mol_type = other DNA
cgagtagctgggactacagg

SEQ ID NO: 201126 - DNA, 20 bp, synthetic construct
  source 1..20: mol_type = other DNA
ccgagtagctgggactacag

SEQ ID NO: 201127 - DNA, 20 bp, synthetic construct
  source 1..20: mol_type = other DNA
cccgagtagctgggactaca

SEQ ID NO: 201128 - DNA, 20 bp, synthetic construct
  source 1..20: mol_type = other DNA
tcccgagtagctgggactac

SEQ ID NO: 201129 - DNA, 20 bp, synthetic construct
  source 1..20: mol_type = other DNA
ctcccgagtagctgggacta

SEQ ID NO: 201130 - DNA, 20 bp, synthetic construct
  source 1..20: mol_type = other DNA
cctcccgagtagctgggact

SEQ ID NO: 201131 - DNA, 20 bp, synthetic construct
  source 1..20: mol_type = other DNA
gcctcccgagtagctgggac

SEQ ID NO: 201132 - DNA, 20 bp, synthetic construct
  source 1..20: mol_type = other DNA
agcctcccgagtagctggga

SEQ ID NO: 201133 - DNA, 20 bp, synthetic construct
  source 1..20: mol_type = other DNA
cagcctcccgagtagctggg

SEQ ID NO: 201134 - DNA, 20 bp, synthetic construct
  source 1..20: mol_type = other DNA
tcagcctcccgagtagctgg

SEQ ID NO: 201135 - DNA, 20 bp, synthetic construct
  source 1..20: mol_type = other DNA
ctcagcctcccgagtagctg

SEQ ID NO: 201136 - DNA, 20 bp, synthetic construct
  source 1..20: mol_type = other DNA
cctcagcctcccgagtagct

SEQ ID NO: 201137 - DNA, 20 bp, synthetic construct
  source 1..20: mol_type = other DNA
gcctcagcctcccgagtagc

SEQ ID NO: 201138 - DNA, 20 bp, synthetic construct
  source 1..20: mol_type = other DNA
tgcctcagcctcccgagtag

SEQ ID NO: 201139 - DNA, 20 bp, synthetic construct
  source 1..20: mol_type = other DNA
ctgcctcagcctcccgagta

SEQ ID NO: 201140 - DNA, 20 bp, synthetic construct
  source 1..20: mol_type = other DNA
cctgcctcagcctcccgagt

SEQ ID NO: 201141 - DNA, 20 bp, synthetic construct
  source 1..20: mol_type = other DNA
tcctgcctcagcctcccgag

SEQ ID NO: 201142 - DNA, 20 bp, synthetic construct
  source 1..20: mol_type = other DNA
ctcctgcctcagcctcccga

SEQ ID NO: 201143 - DNA, 20 bp, synthetic construct
  source 1..20: mol_type = other DNA
tctcctgcctcagcctcccg

SEQ ID NO: 201144 - DNA, 20 bp, synthetic construct
  source 1..20: mol_type = other DNA
ttctcctgcctcagcctccc

SEQ ID NO: 201145 - DNA, 20 bp, synthetic construct
  source 1..20: mol_type = other DNA
attctcctgcctcagcctcc

SEQ ID NO: 201146 - DNA, 20 bp, synthetic construct
  source 1..20: mol_type = other DNA
cattctcctgcctcagcctc

SEQ ID NO: 201147 - DNA, 20 bp, synthetic construct
  source 1..20: mol_type = other DNA
ccattctcctgcctcagcct

SEQ ID NO: 201148 - DNA, 20 bp, synthetic construct
  source 1..20: mol_type = other DNA
gccattctcctgcctcagcc

SEQ ID NO: 201149 - DNA, 20 bp, synthetic construct
  source 1..20: mol_type = other DNA
cgccattctcctgcctcagc

SEQ ID NO: 201150 - DNA, 20 bp, synthetic construct
  source 1..20: mol_type = other DNA
acgccattctcctgcctcag

SEQ ID NO: 201151 - DNA, 20 bp, synthetic construct
  source 1..20: mol_type = other DNA
cacgccattctcctgcctca

SEQ ID NO: 201152 - DNA, 20 bp, synthetic construct
  source 1..20: mol_type = other DNA
tcacgccattctcctgcctc

SEQ ID NO: 201153 - DNA, 20 bp, synthetic construct
  source 1..20: mol_type = other DNA
ttcacgccattctcctgcct

SEQ ID NO: 201154 - DNA, 20 bp, synthetic construct
  source 1..20: mol_type = other DNA
gttcacgccattctcctgcc

SEQ ID NO: 201155 - DNA, 20 bp, synthetic construct
  source 1..20: mol_type = other DNA
ggttcacgccattctcctgc

SEQ ID NO: 201156 - DNA, 20 bp, synthetic construct
  source 1..20: mol_type = other DNA
aggttcacgccattctcctg

SEQ ID NO: 201157 - DNA, 20 bp, synthetic construct
  source 1..20: mol_type = other DNA
caggttcacgccattctcct

SEQ ID NO: 201158 - DNA, 20 bp, synthetic construct
  source 1..20: mol_type = other DNA
ccaggttcacgccattctcc

SEQ ID NO: 201159 - DNA, 20 bp, synthetic construct
  source 1..20: mol_type = other DNA
accaggttcacgccattctc

SEQ ID NO: 201160 - DNA, 20 bp, synthetic construct
  source 1..20: mol_type = other DNA
taccaggttcacgccattct

SEQ ID NO: 201161 - DNA, 20 bp, synthetic construct
  source 1..20: mol_type = other DNA
ctaccaggttcacgccattc

SEQ ID NO: 201162 - DNA, 20 bp, synthetic construct
  source 1..20: mol_type = other DNA
cctaccaggttcacgccatt

SEQ ID NO: 201163 - DNA, 20 bp, synthetic construct
  source 1..20: mol_type = other DNA
gcctaccaggttcacgccat

SEQ ID NO: 201164 - DNA, 20 bp, synthetic construct
  source 1..20: mol_type = other DNA
cgcctaccaggttcacgcca

SEQ ID NO: 201165 - DNA, 20 bp, synthetic construct
  source 1..20: mol_type = other DNA
ccgcctaccaggttcacgcc

SEQ ID NO: 201166 - DNA, 20 bp, synthetic construct
  source 1..20: mol_type = other DNA
tccgcctaccaggttcacgc

SEQ ID NO: 201167 - DNA, 20 bp, synthetic construct
  source 1..20: mol_type = other DNA
ctccgcctaccaggttcacg

SEQ ID NO: 201168 - DNA, 20 bp, synthetic construct
  source 1..20: mol_type = other DNA
cctccgcctaccaggttcac

SEQ ID NO: 201169 - DNA, 20 bp, synthetic construct
  source 1..20: mol_type = other DNA
acctccgcctaccaggttca

SEQ ID NO: 201170 - DNA, 20 bp, synthetic construct
  source 1..20: mol_type = other DNA
aacctccgcctaccaggttc

SEQ ID NO: 201171 - DNA, 20 bp, synthetic construct
  source 1..20: mol_type = other DNA
caacctccgcctaccaggtt

SEQ ID NO: 201172 - DNA, 20 bp, synthetic construct
  source 1..20: mol_type = other DNA
gcaacctccgcctaccaggt

SEQ ID NO: 201173 - DNA, 20 bp, synthetic construct
  source 1..20: mol_type = other DNA
tgcaacctccgcctaccagg

SEQ ID NO: 201174 - DNA, 20 bp, synthetic construct
  source 1..20: mol_type = other DNA
ctgcaacctccgcctaccag

SEQ ID NO: 201175 - DNA, 20 bp, synthetic construct
  source 1..20: mol_type = other DNA
actgcaacctccgcctacca

SEQ ID NO: 201176 - DNA, 20 bp, synthetic construct
  source 1..20: mol_type = other DNA
cactgcaacctccgcctacc

SEQ ID NO: 201177 - DNA, 20 bp, synthetic construct
  source 1..20: mol_type = other DNA
tcactgcaacctccgcctac

SEQ ID NO: 201178 - DNA, 20 bp, synthetic construct
  source 1..20: mol_type = other DNA
ctcactgcaacctccgccta

SEQ ID NO: 201179 - DNA, 20 bp, synthetic construct
  source 1..20: mol_type = other DNA
gctcactgcaacctccgcct

SEQ ID NO: 201180 - DNA, 20 bp, synthetic construct
  source 1..20: mol_type = other DNA
ggctcactgcaacctccgcc

SEQ ID NO: 201181 - DNA, 20 bp, synthetic construct
  source 1..20: mol_type = other DNA
cggctcactgcaacctccgc

SEQ ID NO: 201182 - DNA, 20 bp, synthetic construct
  source 1..20: mol_type = other DNA
tcggctcactgcaacctccg

SEQ ID NO: 201183 - DNA, 20 bp, synthetic construct
  source 1..20: mol_type = other DNA
ctcggctcactgcaacctcc

SEQ ID NO: 201184 - DNA, 20 bp, synthetic construct
  source 1..20: mol_type = other DNA
tctcggctcactgcaacctc

SEQ ID NO: 201185 - DNA, 20 bp, synthetic construct
  source 1..20: mol_type = other DNA
atctcggctcactgcaacct

SEQ ID NO: 201186 - DNA, 20 bp, synthetic construct
  source 1..20: mol_type = other DNA
catctcggctcactgcaacc

SEQ ID NO: 201187 - DNA, 20 bp, synthetic construct
  source 1..20: mol_type = other DNA
ccatctcggctcactgcaac

SEQ ID NO: 201188 - DNA, 20 bp, synthetic construct
  source 1..20: mol_type = other DNA
gccatctcggctcactgcaa

SEQ ID NO: 201189 - DNA, 20 bp, synthetic construct
  source 1..20: mol_type = other DNA
cgccatctcggctcactgca

SEQ ID NO: 201190 - DNA, 20 bp, synthetic construct
  source 1..20: mol_type = other DNA
gcgccatctcggctcactgc

SEQ ID NO: 201191 - DNA, 20 bp, synthetic construct
  source 1..20: mol_type = other DNA
ggcgccatctcggctcactg

SEQ ID NO: 201192 - DNA, 20 bp, synthetic construct
  source 1..20: mol_type = other DNA
tggcgccatctcggctcact

SEQ ID NO: 201193 - DNA, 20 bp, synthetic construct
  source 1..20: mol_type = other DNA
gtggcgccatctcggctcac

SEQ ID NO: 201194 - DNA, 20 bp, synthetic construct
  source 1..20: mol_type = other DNA
agtggcgccatctcggctca

SEQ ID NO: 201195 - DNA, 20 bp, synthetic construct
  source 1..20: mol_type = other DNA
cagtggcgccatctcggctc

SEQ ID NO: 201196 - DNA, 20 bp, synthetic construct
  source 1..20: mol_type = other DNA
gcagtggcgccatctcggct

SEQ ID NO: 201197 - DNA, 20 bp, synthetic construct
  source 1..20: mol_type = other DNA
tgcagtggcgccatctcggc

SEQ ID NO: 201198 - DNA, 20 bp, synthetic construct
  source 1..20: mol_type = other DNA
gtgcagtggcgccatctcgg

SEQ ID NO: 201199 - DNA, 20 bp, synthetic construct
  source 1..20: mol_type = other DNA
agtgcagtggcgccatctcg

SEQ ID NO: 201200 - DNA, 20 bp, synthetic construct
  source 1..20: mol_type = other DNA
gagtgcagtggcgccatctc

SEQ ID NO: 201201 - DNA, 20 bp, synthetic construct
  source 1..20: mol_type = other DNA
ggagtgcagtggcgccatct

SEQ ID NO: 201202 - DNA, 20 bp, synthetic construct
  source 1..20: mol_type = other DNA
tggagtgcagtggcgccatc

SEQ ID NO: 201203 - DNA, 20 bp, synthetic construct
  source 1..20: mol_type = other DNA
ctggagtgcagtggcgccat

SEQ ID NO: 201204 - DNA, 20 bp, synthetic construct
  source 1..20: mol_type = other DNA
gctggagtgcagtggcgcca

SEQ ID NO: 201205 - DNA, 20 bp, synthetic construct
  source 1..20: mol_type = other DNA
ggctggagtgcagtggcgcc

SEQ ID NO: 201206 - DNA, 20 bp, synthetic construct
  source 1..20: mol_type = other DNA
aggctggagtgcagtggcgc

SEQ ID NO: 201207 - DNA, 20 bp, synthetic construct
  source 1..20: mol_type = other DNA
caggctggagtgcagtggcg

SEQ ID NO: 201208 - DNA, 20 bp, synthetic construct
  source 1..20: mol_type = other DNA
ccaggctggagtgcagtggc

SEQ ID NO: 201209 - DNA, 20 bp, synthetic construct
  source 1..20: mol_type = other DNA
cccaggctggagtgcagtgg

SEQ ID NO: 201210 - DNA, 20 bp, synthetic construct
  source 1..20: mol_type = other DNA
acccaggctggagtgcagtg

SEQ ID NO: 201211 - DNA, 20 bp, synthetic construct
  source 1..20: mol_type = other DNA
cacccaggctggagtgcagt

SEQ ID NO: 201212 - DNA, 20 bp, synthetic construct
  source 1..20: mol_type = other DNA
tcacccaggctggagtgcag

SEQ ID NO: 201213 - DNA, 20 bp, synthetic construct
  source 1..20: mol_type = other DNA
gtcacccaggctggagtgca

SEQ ID NO: 201214 - DNA, 20 bp, synthetic construct
  source 1..20: mol_type = other DNA
tgtcacccaggctggagtgc

SEQ ID NO: 201215 - DNA, 20 bp, synthetic construct
  source 1..20: mol_type = other DNA
ctgtcacccaggctggagtg

SEQ ID NO: 201216 - DNA, 20 bp, synthetic construct
  source 1..20: mol_type = other DNA
tctgtcacccaggctggagt

SEQ ID NO: 201217 - DNA, 20 bp, synthetic construct
  source 1..20: mol_type = other DNA
ctctgtcacccaggctggag

SEQ ID NO: 201218 - DNA, 20 bp, synthetic construct
  source 1..20: mol_type = other DNA
actctgtcacccaggctgga

SEQ ID NO: 201219 - DNA, 20 bp, synthetic construct
  source 1..20: mol_type = other DNA
cactctgtcacccaggctgg

SEQ ID NO: 201220 - DNA, 20 bp, synthetic construct
  source 1..20: mol_type = other DNA
tcactctgtcacccaggctg

SEQ ID NO: 201221 - DNA, 20 bp, synthetic construct
  source 1..20: mol_type = other DNA
ctcactctgtcacccaggct

SEQ ID NO: 201222 - DNA, 20 bp, synthetic construct
  source 1..20: mol_type = other DNA
tctcactctgtcacccaggc

SEQ ID NO: 201223 - DNA, 20 bp, synthetic construct
  source 1..20: mol_type = other DNA
gtctcactctgtcacccagg

SEQ ID NO: 201224 - DNA, 20 bp, synthetic construct
  source 1..20: mol_type = other DNA
agtctcactctgtcacccag

SEQ ID NO: 201225 - DNA, 20 bp, synthetic construct
  source 1..20: mol_type = other DNA
gagtctcactctgtcaccca

SEQ ID NO: 201226 - DNA, 20 bp, synthetic construct
  source 1..20: mol_type = other DNA
ggagtctcactctgtcaccc

SEQ ID NO: 201227 - DNA, 20 bp, synthetic construct
  source 1..20: mol_type = other DNA
cggagtctcactctgtcacc

SEQ ID NO: 201228 - DNA, 20 bp, synthetic construct
  source 1..20: mol_type = other DNA
acggagtctcactctgtcac

SEQ ID NO: 201229 - DNA, 20 bp, synthetic construct
  source 1..20: mol_type = other DNA
gacggagtctcactctgtca

SEQ ID NO: 201230 - DNA, 20 bp, synthetic construct
  source 1..20: mol_type = other DNA
agacggagtctcactctgtc

SEQ ID NO: 201231 - DNA, 20 bp, synthetic construct
  source 1..20: mol_type = other DNA
gagacggagtctcactctgt

SEQ ID NO: 201232 - DNA, 20 bp, synthetic construct
  source 1..20: mol_type = other DNA
tgagacggagtctcactctg

SEQ ID NO: 201233 - DNA, 20 bp, synthetic construct
  source 1..20: mol_type = other DNA
ctgagacggagtctcactct

SEQ ID NO: 201234 - DNA, 20 bp, synthetic construct
  source 1..20: mol_type = other DNA
cctgagacggagtctcactc

SEQ ID NO: 201235 - DNA, 20 bp, synthetic construct
  source 1..20: mol_type = other DNA
tcctgagacggagtctcact

SEQ ID NO: 201236 - DNA, 20 bp, synthetic construct
  source 1..20: mol_type = other DNA
ttcctgagacggagtctcac

SEQ ID NO: 201237 - DNA, 20 bp, synthetic construct
  source 1..20: mol_type = other DNA
tttcctgagacggagtctca

SEQ ID NO: 201238 - DNA, 20 bp, synthetic construct
  source 1..20: mol_type = other DNA
ttttcctgagacggagtctc

SEQ ID NO: 201239 - DNA, 20 bp, synthetic construct
  source 1..20: mol_type = other DNA
tttttcctgagacggagtct

SEQ ID NO: 201240 - DNA, 20 bp, synthetic construct
  source 1..20: mol_type = other DNA
ttttttcctgagacggagtc

SEQ ID NO: 201241 - DNA, 20 bp, synthetic construct
  source 1..20: mol_type = other DNA
tttttttcctgagacggagt

SEQ ID NO: 201242 - DNA, 20 bp, synthetic construct
  source 1..20: mol_type = other DNA
ttttttttcctgagacggag

SEQ ID NO: 201243 - DNA, 20 bp, synthetic construct
  source 1..20: mol_type = other DNA
tttttttttcctgagacgga

SEQ ID NO: 201244 - DNA, 20 bp, synthetic construct
  source 1..20: mol_type = other DNA
ttttttttttcctgagacgg

SEQ ID NO: 201245 - DNA, 20 bp, synthetic construct
  source 1..20: mol_type = other DNA
tttttttttttcctgagacg

SEQ ID NO: 201246 - DNA, 20 bp, synthetic construct
  source 1..20: mol_type = other DNA
ttttttttttttcctgagac

SEQ ID NO: 201247 - DNA, 20 bp, synthetic construct
  source 1..20: mol_type = other DNA
tttttttttttttcctgaga

SEQ ID NO: 201248 - DNA, 20 bp, synthetic construct
  source 1..20: mol_type = other DNA
ttttttttttttttcctgag

SEQ ID NO: 201249 - DNA, 20 bp, synthetic construct
  source 1..20: mol_type = other DNA
tttttttttttttttcctga

SEQ ID NO: 201250 - DNA, 20 bp, synthetic construct
  source 1..20: mol_type = other DNA
ttttttttttttttttcctg

SEQ ID NO: 201251 - DNA, 20 bp, synthetic construct
  source 1..20: mol_type = other DNA
tttttttttttttttttcct

SEQ ID NO: 201252 - DNA, 20 bp, synthetic construct
  source 1..20: mol_type = other DNA
ttttttttttttttttttcc

SEQ ID NO: 201253 - DNA, 20 bp, synthetic construct
  source 1..20: mol_type = other DNA
tttttttttttttttttttc

SEQ ID NO: 201254 - DNA, 20 bp, synthetic construct
  source 1..20: mol_type = other DNA
tttttttttttttttttttt

SEQ ID NO: 201255 - DNA, 20 bp, synthetic construct
  source 1..20: mol_type = other DNA
tttttttttttttttttttt

SEQ ID NO: 201256 - DNA, 20 bp, synthetic construct
  source 1..20: mol_type = other DNA
tttttttttttttttttttt

SEQ ID NO: 201257 - DNA, 20 bp, synthetic construct
  source 1..20: mol_type = other DNA
tttttttttttttttttttt

SEQ ID NO: 201258 - DNA, 20 bp, synthetic construct
  source 1..20: mol_type = other DNA
tttttttttttttttttttt

SEQ ID NO: 201259 - DNA, 20 bp, synthetic construct
  source 1..20: mol_type = other DNA
tttttttttttttttttttt

SEQ ID NO: 201260 - DNA, 20 bp, synthetic construct
  source 1..20: mol_type = other DNA
cttttttttttttttttttt

SEQ ID NO: 201261 - DNA, 20 bp, synthetic construct
  source 1..20: mol_type = other DNA
gctttttttttttttttttt

SEQ ID NO: 201262 - DNA, 20 bp, synthetic construct
  source 1..20: mol_type = other DNA
tgcttttttttttttttttt

SEQ ID NO: 201263 - DNA, 20 bp, synthetic construct
  source 1..20: mol_type = other DNA
atgctttttttttttttttt

SEQ ID NO: 201264 - DNA, 20 bp, synthetic construct
  source 1..20: mol_type = other DNA
gatgcttttttttttttttt

SEQ ID NO: 201265 - DNA, 20 bp, synthetic construct
  source 1..20: mol_type = other DNA
ggatgctttttttttttttt

SEQ ID NO: 201266 - DNA, 20 bp, synthetic construct
  source 1..20: mol_type = other DNA
aggatgcttttttttttttt

SEQ ID NO: 201267 - DNA, 20 bp, synthetic construct
  source 1..20: mol_type = other DNA
gaggatgctttttttttttt

SEQ ID NO: 201268 - DNA, 20 bp, synthetic construct
  source 1..20: mol_type = other DNA
tgaggatgcttttttttttt

SEQ ID NO: 201269 - DNA, 20 bp, synthetic construct
  source 1..20: mol_type = other DNA
ctgaggatgctttttttttt

SEQ ID NO: 201270 - DNA, 20 bp, synthetic construct
  source 1..20: mol_type = other DNA
gctgaggatgcttttttttt

SEQ ID NO: 201271 - DNA, 20 bp, synthetic construct
  source 1..20: mol_type = other DNA
tgctgaggatgctttttttt

SEQ ID NO: 201272 - DNA, 20 bp, synthetic construct
  source 1..20: mol_type = other DNA
gtgctgaggatgcttttttt

SEQ ID NO: 201273 - DNA, 20 bp, synthetic construct
  source 1..20: mol_type = other DNA
agtgctgaggatgctttttt

SEQ ID NO: 201274 - DNA, 20 bp, synthetic construct
  source 1..20: mol_type = other DNA
aagtgctgaggatgcttttt

SEQ ID NO: 201275 - DNA, 20 bp, synthetic construct
  source 1..20: mol_type = other DNA
aaagtgctgaggatgctttt

SEQ ID NO: 201276 - DNA, 20 bp, synthetic construct
  source 1..20: mol_type = other DNA
caaagtgctgaggatgcttt

SEQ ID NO: 201277 - DNA, 20 bp, synthetic construct
  source 1..20: mol_type = other DNA
ccaaagtgctgaggatgctt

SEQ ID NO: 201278 - DNA, 20 bp, synthetic construct
  source 1..20: mol_type = other DNA
gccaaagtgctgaggatgct

SEQ ID NO: 201279 - DNA, 20 bp, synthetic construct
  source 1..20: mol_type = other DNA
tgccaaagtgctgaggatgc

SEQ ID NO: 201280 - DNA, 20 bp, synthetic construct
  source 1..20: mol_type = other DNA
ttgccaaagtgctgaggatg

SEQ ID NO: 201281 - DNA, 20 bp, synthetic construct
  source 1..20: mol_type = other DNA
gttgccaaagtgctgaggat

SEQ ID NO: 201282 - DNA, 20 bp, synthetic construct
  source 1..20: mol_type = other DNA
agttgccaaagtgctgagga

SEQ ID NO: 201283 - DNA, 20 bp, synthetic construct
  source 1..20: mol_type = other DNA
gagttgccaaagtgctgagg

SEQ ID NO: 201284 - DNA, 20 bp, synthetic construct
  source 1..20: mol_type = other DNA
ggagttgccaaagtgctgag

SEQ ID NO: 201285 - DNA, 20 bp, synthetic construct
  source 1..20: mol_type = other DNA
tggagttgccaaagtgctga

SEQ ID NO: 201286 - DNA, 20 bp, synthetic construct
  source 1..20: mol_type = other DNA
atggagttgccaaagtgctg

SEQ ID NO: 201287 - DNA, 20 bp, synthetic construct
  source 1..20: mol_type = other DNA
gatggagttgccaaagtgct

SEQ ID NO: 201288 - DNA, 20 bp, synthetic construct
  source 1..20: mol_type = other DNA
agatggagttgccaaagtgc

SEQ ID NO: 201289 - DNA, 20 bp, synthetic construct
  source 1..20: mol_type = other DNA
gagatggagttgccaaagtg

SEQ ID NO: 201290 - DNA, 20 bp, synthetic construct
  source 1..20: mol_type = other DNA
ggagatggagttgccaaagt

SEQ ID NO: 201291 - DNA, 20 bp, synthetic construct
  source 1..20: mol_type = other DNA
aggagatggagttgccaaag

SEQ ID NO: 201292 - DNA, 20 bp, synthetic construct
  source 1..20: mol_type = other DNA
gaggagatggagttgccaaa

SEQ ID NO: 201293 - DNA, 20 bp, synthetic construct
  source 1..20: mol_type = other DNA
ggaggagatggagttgccaa

SEQ ID NO: 201294 - DNA, 20 bp, synthetic construct
  source 1..20: mol_type = other DNA
gggaggagatggagttgcca

SEQ ID NO: 201295 - DNA, 20 bp, synthetic construct
  source 1..20: mol_type = other DNA
tgggaggagatggagttgcc

SEQ ID NO: 201296 - DNA, 20 bp, synthetic construct
  source 1..20: mol_type = other DNA
ttgggaggagatggagttgc

SEQ ID NO: 201297 - DNA, 20 bp, synthetic construct
  source 1..20: mol_type = other DNA
gttgggaggagatggagttg

SEQ ID NO: 201298 - DNA, 20 bp, synthetic construct
  source 1..20: mol_type = other DNA
tgttgggaggagatggagtt

SEQ ID NO: 201299 - DNA, 20 bp, synthetic construct
  source 1..20: mol_type = other DNA
atgttgggaggagatggagt

SEQ ID NO: 201300 - DNA, 20 bp, synthetic construct
  source 1..20: mol_type = other DNA
catgttgggaggagatggag

SEQ ID NO: 201301 - DNA, 20 bp, synthetic construct
  source 1..20: mol_type = other DNA
acatgttgggaggagatgga

SEQ ID NO: 201302 - DNA, 20 bp, synthetic construct
  source 1..20: mol_type = other DNA
gacatgttgggaggagatgg

SEQ ID NO: 201303 - DNA, 20 bp, synthetic construct
  source 1..20: mol_type = other DNA
ggacatgttgggaggagatg

SEQ ID NO: 201304 - DNA, 20 bp, synthetic construct
  source 1..20: mol_type = other DNA
gggacatgttgggaggagat

SEQ ID NO: 201305 - DNA, 20 bp, synthetic construct
  source 1..20: mol_type = other DNA
agggacatgttgggaggaga

SEQ ID NO: 201306 - DNA, 20 bp, synthetic construct
  source 1..20: mol_type = other DNA
cagggacatgttgggaggag

SEQ ID NO: 201307 - DNA, 20 bp, synthetic construct
  source 1..20: mol_type = other DNA
acagggacatgttgggagga

SEQ ID NO: 201308 - DNA, 20 bp, synthetic construct
  source 1..20: mol_type = other DNA
aacagggacatgttgggagg

SEQ ID NO: 201309 - DNA, 20 bp, synthetic construct
  source 1..20: mol_type = other DNA
taacagggacatgttgggag

SEQ ID NO: 201310 - DNA, 20 bp, synthetic construct
  source 1..20: mol_type = other DNA
gtaacagggacatgttggga

SEQ ID NO: 201311 - DNA, 20 bp, synthetic construct
  source 1..20: mol_type = other DNA
agtaacagggacatgttggg

SEQ ID NO: 201312 - DNA, 20 bp, synthetic construct
  source 1..20: mol_type = other DNA
cagtaacagggacatgttgg

SEQ ID NO: 201313 - DNA, 20 bp, synthetic construct
  source 1..20: mol_type = other DNA
ccagtaacagggacatgttg

SEQ ID NO: 201314 - DNA, 20 bp, synthetic construct
  source 1..20: mol_type = other DNA
tccagtaacagggacatgtt

SEQ ID NO: 201315 - DNA, 20 bp, synthetic construct
  source 1..20: mol_type = other DNA
ttccagtaacagggacatgt

SEQ ID NO: 201316 - DNA, 20 bp, synthetic construct
  source 1..20: mol_type = other DNA
attccagtaacagggacatg

SEQ ID NO: 201317 - DNA, 20 bp, synthetic construct
  source 1..20: mol_type = other DNA
gattccagtaacagggacat

SEQ ID NO: 201318 - DNA, 20 bp, synthetic construct
  source 1..20: mol_type = other DNA
ggattccagtaacagggaca

SEQ ID NO: 201319 - DNA, 20 bp, synthetic construct
  source 1..20: mol_type = other DNA
tggattccagtaacagggac

SEQ ID NO: 201320 - DNA, 20 bp, synthetic construct
  source 1..20: mol_type = other DNA
ctggattccagtaacaggga

SEQ ID NO: 201321 - DNA, 20 bp, synthetic construct
  source 1..20: mol_type = other DNA
gctggattccagtaacaggg

SEQ ID NO: 201322 - DNA, 20 bp, synthetic construct
  source 1..20: mol_type = other DNA
ggctggattccagtaacagg

SEQ ID NO: 201323 - DNA, 20 bp, synthetic construct
  source 1..20: mol_type = other DNA
tggctggattccagtaacag

SEQ ID NO: 201324 - DNA, 20 bp, synthetic construct
  source 1..20: mol_type = other DNA
ctggctggattccagtaaca

SEQ ID NO: 201325 - DNA, 20 bp, synthetic construct
  source 1..20: mol_type = other DNA
cctggctggattccagtaac

SEQ ID NO: 201326 - DNA, 20 bp, synthetic construct
  source 1..20: mol_type = other DNA
tcctggctggattccagtaa

SEQ ID NO: 201327 - DNA, 20 bp, synthetic construct
  source 1..20: mol_type = other DNA
gtcctggctggattccagta

SEQ ID NO: 201328 - DNA, 20 bp, synthetic construct
  source 1..20: mol_type = other DNA
agtcctggctggattccagt

SEQ ID NO: 201329 - DNA, 20 bp, synthetic construct
  source 1..20: mol_type = other DNA
gagtcctggctggattccag

SEQ ID NO: 201330 - DNA, 20 bp, synthetic construct
  source 1..20: mol_type = other DNA
tgagtcctggctggattcca

SEQ ID NO: 201331 - DNA, 20 bp, synthetic construct
  source 1..20: mol_type = other DNA
ctgagtcctggctggattcc

SEQ ID NO: 201332 - DNA, 20 bp, synthetic construct
  source 1..20: mol_type = other DNA
gctgagtcctggctggattc

SEQ ID NO: 201333 - DNA, 20 bp, synthetic construct
  source 1..20: mol_type = other DNA
ggctgagtcctggctggatt

SEQ ID NO: 201334 - DNA, 20 bp, synthetic construct
  source 1..20: mol_type = other DNA
gggctgagtcctggctggat

SEQ ID NO: 201335 - DNA, 20 bp, synthetic construct
  source 1..20: mol_type = other DNA
ggggctgagtcctggctgga

SEQ ID NO: 201336 - DNA, 20 bp, synthetic construct
  source 1..20: mol_type = other DNA
cggggctgagtcctggctgg

SEQ ID NO: 201337 - DNA, 20 bp, synthetic construct
  source 1..20: mol_type = other DNA
tcggggctgagtcctggctg

SEQ ID NO: 201338 - DNA, 20 bp, synthetic construct
  source 1..20: mol_type = other DNA
atcggggctgagtcctggct

SEQ ID NO: 201339 - DNA, 20 bp, synthetic construct
  source 1..20: mol_type = other DNA
gatcggggctgagtcctggc

SEQ ID NO: 201340 - DNA, 20 bp, synthetic construct
  source 1..20: mol_type = other DNA
agatcggggctgagtcctgg

SEQ ID NO: 201341 - DNA, 20 bp, synthetic construct
  source 1..20: mol_type = other DNA
aagatcggggctgagtcctg

SEQ ID NO: 201342 - DNA, 20 bp, synthetic construct
  source 1..20: mol_type = other DNA
aaagatcggggctgagtcct

SEQ ID NO: 201343 - DNA, 20 bp, synthetic construct
  source 1..20: mol_type = other DNA
gaaagatcggggctgagtcc

SEQ ID NO: 201344 - DNA, 20 bp, synthetic construct
  source 1..20: mol_type = other DNA
agaaagatcggggctgagtc

SEQ ID NO: 201345 - DNA, 20 bp, synthetic construct
  source 1..20: mol_type = other DNA
tagaaagatcggggctgagt

SEQ ID NO: 201346 - DNA, 20 bp, synthetic construct
  source 1..20: mol_type = other DNA
gtagaaagatcggggctgag

SEQ ID NO: 201347 - DNA, 20 bp, synthetic construct
  source 1..20: mol_type = other DNA
agtagaaagatcggggctga

SEQ ID NO: 201348 - DNA, 20 bp, synthetic construct
  source 1..20: mol_type = other DNA
gagtagaaagatcggggctg

SEQ ID NO: 201349 - DNA, 20 bp, synthetic construct
  source 1..20: mol_type = other DNA
agagtagaaagatcggggct

SEQ ID NO: 201350 - DNA, 20 bp, synthetic construct
  source 1..20: mol_type = other DNA
tagagtagaaagatcggggc

SEQ ID NO: 201351 - DNA, 20 bp, synthetic construct
  source 1..20: mol_type = other DNA
ttagagtagaaagatcgggg

SEQ ID NO: 201352 - DNA, 20 bp, synthetic construct
  source 1..20: mol_type = other DNA
gttagagtagaaagatcggg

SEQ ID NO: 201353 - DNA, 20 bp, synthetic construct
  source 1..20: mol_type = other DNA
ggttagagtagaaagatcgg

SEQ ID NO: 201354 - DNA, 20 bp, synthetic construct
  source 1..20: mol_type = other DNA
tggttagagtagaaagatcg

SEQ ID NO: 201355 - DNA, 20 bp, synthetic construct
  source 1..20: mol_type = other DNA
ctggttagagtagaaagatc

SEQ ID NO: 201356 - DNA, 20 bp, synthetic construct
  source 1..20: mol_type = other DNA
actggttagagtagaaagat

SEQ ID NO: 201357 - DNA, 20 bp, synthetic construct
  source 1..20: mol_type = other DNA
aactggttagagtagaaaga

SEQ ID NO: 201358 - DNA, 20 bp, synthetic construct
  source 1..20: mol_type = other DNA
caactggttagagtagaaag

SEQ ID NO: 201359 - DNA, 20 bp, synthetic construct
  source 1..20: mol_type = other DNA
acaactggttagagtagaaa

SEQ ID NO: 201360 - DNA, 20 bp, synthetic construct
  source 1..20: mol_type = other DNA
gacaactggttagagtagaa

SEQ ID NO: 201361 - DNA, 20 bp, synthetic construct
  source 1..20: mol_type = other DNA
agacaactggttagagtaga

SEQ ID NO: 201362 - DNA, 20 bp, synthetic construct
  source 1..20: mol_type = other DNA
gagacaactggttagagtag

SEQ ID NO: 201363 - DNA, 20 bp, synthetic construct
  source 1..20: mol_type = other DNA
tgagacaactggttagagta

SEQ ID NO: 201364 - DNA, 20 bp, synthetic construct
  source 1..20: mol_type = other DNA
ctgagacaactggttagagt

SEQ ID NO: 201365 - DNA, 20 bp, synthetic construct
  source 1..20: mol_type = other DNA
actgagacaactggttagag

SEQ ID NO: 201366 - DNA, 20 bp, synthetic construct
  source 1..20: mol_type = other DNA
aactgagacaactggttaga

SEQ ID NO: 201367 - DNA, 20 bp, synthetic construct
  source 1..20: mol_type = other DNA
taactgagacaactggttag

SEQ ID NO: 201368 - DNA, 20 bp, synthetic construct
  source 1..20: mol_type = other DNA
ttaactgagacaactggtta

SEQ ID NO: 201369 - DNA, 20 bp, synthetic construct
  source 1..20: mol_type = other DNA
gttaactgagacaactggtt

SEQ ID NO: 201370 - DNA, 20 bp, synthetic construct
  source 1..20: mol_type = other DNA
tgttaactgagacaactggt

SEQ ID NO: 201371 - DNA, 20 bp, synthetic construct
  source 1..20: mol_type = other DNA
ttgttaactgagacaactgg

SEQ ID NO: 201372 - DNA, 20 bp, synthetic construct
  source 1..20: mol_type = other DNA
cttgttaactgagacaactg

SEQ ID NO: 201373 - DNA, 20 bp, synthetic construct
  source 1..20: mol_type = other DNA
ccttgttaactgagacaact

SEQ ID NO: 201374 - DNA, 20 bp, synthetic construct
  source 1..20: mol_type = other DNA
tccttgttaactgagacaac

SEQ ID NO: 201375 - DNA, 20 bp, synthetic construct
  source 1..20: mol_type = other DNA
gtccttgttaactgagacaa

SEQ ID NO: 201376 - DNA, 20 bp, synthetic construct
  source 1..20: mol_type = other DNA
tgtccttgttaactgagaca

SEQ ID NO: 201377 - DNA, 20 bp, synthetic construct
  source 1..20: mol_type = other DNA
ctgtccttgttaactgagac

SEQ ID NO: 201378 - DNA, 20 bp, synthetic construct
  source 1..20: mol_type = other DNA
cctgtccttgttaactgaga

SEQ ID NO: 201379 - DNA, 20 bp, synthetic construct
  source 1..20: mol_type = other DNA
acctgtccttgttaactgag

SEQ ID NO: 201380 - DNA, 20 bp, synthetic construct
  source 1..20: mol_type = other DNA
aacctgtccttgttaactga

SEQ ID NO: 201381 - DNA, 20 bp, synthetic construct
  source 1..20: mol_type = other DNA
aaacctgtccttgttaactg

SEQ ID NO: 201382 - DNA, 20 bp, synthetic construct
  source 1..20: mol_type = other DNA
taaacctgtccttgttaact

SEQ ID NO: 201383 - DNA, 20 bp, synthetic construct
  source 1..20: mol_type = other DNA
ataaacctgtccttgttaac

SEQ ID NO: 201384 - DNA, 20 bp, synthetic construct
  source 1..20: mol_type = other DNA
cataaacctgtccttgttaa

SEQ ID NO: 201385 - DNA, 20 bp, synthetic construct
  source 1..20: mol_type = other DNA
gcataaacctgtccttgtta

SEQ ID NO: 201386 - DNA, 20 bp, synthetic construct
  source 1..20: mol_type = other DNA
agcataaacctgtccttgtt

SEQ ID NO: 201387 - DNA, 20 bp, synthetic construct
  source 1..20: mol_type = other DNA
cagcataaacctgtccttgt

SEQ ID NO: 201388 - DNA, 20 bp, synthetic construct
  source 1..20: mol_type = other DNA
gcagcataaacctgtccttg

SEQ ID NO: 201389 - DNA, 20 bp, synthetic construct
  source 1..20: mol_type = other DNA
tgcagcataaacctgtcctt

SEQ ID NO: 201390 - DNA, 20 bp, synthetic construct
  source 1..20: mol_type = other DNA
ctgcagcataaacctgtcct

SEQ ID NO: 201391 - DNA, 20 bp, synthetic construct
  source 1..20: mol_type = other DNA
actgcagcataaacctgtcc

SEQ ID NO: 201392 - DNA, 20 bp, synthetic construct
  source 1..20: mol_type = other DNA
cactgcagcataaacctgtc

SEQ ID NO: 201393 - DNA, 20 bp, synthetic construct
  source 1..20: mol_type = other DNA
tcactgcagcataaacctgt

SEQ ID NO: 201394 - DNA, 20 bp, synthetic construct
  source 1..20: mol_type = other DNA
gtcactgcagcataaacctg

SEQ ID NO: 201395 - DNA, 20 bp, synthetic construct
  source 1..20: mol_type = other DNA
tgtcactgcagcataaacct

SEQ ID NO: 201396 - DNA, 20 bp, synthetic construct
  source 1..20: mol_type = other DNA
ttgtcactgcagcataaacc

SEQ ID NO: 201397 - DNA, 20 bp, synthetic construct
  source 1..20: mol_type = other DNA
tttgtcactgcagcataaac

SEQ ID NO: 201398 - DNA, 20 bp, synthetic construct
  source 1..20: mol_type = other DNA
gtttgtcactgcagcataaa

SEQ ID NO: 201399 - DNA, 20 bp, synthetic construct
  source 1..20: mol_type = other DNA
tgtttgtcactgcagcataa

SEQ ID NO: 201400 - DNA, 20 bp, synthetic construct
  source 1..20: mol_type = other DNA
ttgtttgtcactgcagcata

SEQ ID NO: 201401 - DNA, 20 bp, synthetic construct
  source 1..20: mol_type = other DNA
cttgtttgtcactgcagcat

SEQ ID NO: 201402 - DNA, 20 bp, synthetic construct
  source 1..20: mol_type = other DNA
tcttgtttgtcactgcagca

SEQ ID NO: 201403 - DNA, 20 bp, synthetic construct
  source 1..20: mol_type = other DNA
atcttgtttgtcactgcagc

SEQ ID NO: 201404 - DNA, 20 bp, synthetic construct
  source 1..20: mol_type = other DNA
gatcttgtttgtcactgcag

SEQ ID NO: 201405 - DNA, 20 bp, synthetic construct
  source 1..20: mol_type = other DNA
ggatcttgtttgtcactgca

SEQ ID NO: 201406 - DNA, 20 bp, synthetic construct
  source 1..20: mol_type = other DNA
gggatcttgtttgtcactgc

SEQ ID NO: 201407 - DNA, 20 bp, synthetic construct
  source 1..20: mol_type = other DNA
tgggatcttgtttgtcactg

SEQ ID NO: 201408 - DNA, 20 bp, synthetic construct
  source 1..20: mol_type = other DNA
ttgggatcttgtttgtcact

SEQ ID NO: 201409 - DNA, 20 bp, synthetic construct
  source 1..20: mol_type = other DNA
tttgggatcttgtttgtcac

SEQ ID NO: 201410 - DNA, 20 bp, synthetic construct
  source 1..20: mol_type = other DNA
atttgggatcttgtttgtca

SEQ ID NO: 201411 - DNA, 20 bp, synthetic construct
  source 1..20: mol_type = other DNA
aatttgggatcttgtttgtc

SEQ ID NO: 201412 - DNA, 20 bp, synthetic construct
  source 1..20: mol_type = other DNA
gaatttgggatcttgtttgt

SEQ ID NO: 201413 - DNA, 20 bp, synthetic construct
  source 1..20: mol_type = other DNA
agaatttgggatcttgtttg

SEQ ID NO: 201414 - DNA, 20 bp, synthetic construct
  source 1..20: mol_type = other DNA
aagaatttgggatcttgttt

SEQ ID NO: 201415 - DNA, 20 bp, synthetic construct
  source 1..20: mol_type = other DNA
caagaatttgggatcttgtt

SEQ ID NO: 201416 - DNA, 20 bp, synthetic construct
  source 1..20: mol_type = other DNA
acaagaatttgggatcttgt

SEQ ID NO: 201417 - DNA, 20 bp, synthetic construct
  source 1..20: mol_type = other DNA
cacaagaatttgggatcttg

SEQ ID NO: 201418 - DNA, 20 bp, synthetic construct
  source 1..20: mol_type = other DNA
ccacaagaatttgggatctt

SEQ ID NO: 201419 - DNA, 20 bp, synthetic construct
  source 1..20: mol_type = other DNA
gccacaagaatttgggatct

SEQ ID NO: 201420 - DNA, 20 bp, synthetic construct
  source 1..20: mol_type = other DNA
agccacaagaatttgggatc

SEQ ID NO: 201421 - DNA, 20 bp, synthetic construct
  source 1..20: mol_type = other DNA
aagccacaagaatttgggat

SEQ ID NO: 201422 - DNA, 20 bp, synthetic construct
  source 1..20: mol_type = other DNA
gaagccacaagaatttggga

SEQ ID NO: 201423 - DNA, 20 bp, synthetic construct
  source 1..20: mol_type = other DNA
tgaagccacaagaatttggg

SEQ ID NO: 201424 - DNA, 20 bp, synthetic construct
  source 1..20: mol_type = other DNA
gtgaagccacaagaatttgg

SEQ ID NO: 201425 - DNA, 20 bp, synthetic construct
  source 1..20: mol_type = other DNA
tgtgaagccacaagaatttg

SEQ ID NO: 201426 - DNA, 20 bp, synthetic construct
  source 1..20: mol_type = other DNA
gtgtgaagccacaagaattt

SEQ ID NO: 201427 - DNA, 20 bp, synthetic construct
  source 1..20: mol_type = other DNA
tgtgtgaagccacaagaatt

SEQ ID NO: 201428 - DNA, 20 bp, synthetic construct
  source 1..20: mol_type = other DNA
atgtgtgaagccacaagaat

SEQ ID NO: 201429 - DNA, 20 bp, synthetic construct
  source 1..20: mol_type = other DNA
gatgtgtgaagccacaagaa

SEQ ID NO: 201430 - DNA, 20 bp, synthetic construct
  source 1..20: mol_type = other DNA
agatgtgtgaagccacaaga

SEQ ID NO: 201431 - DNA, 20 bp, synthetic construct
  source 1..20: mol_type = other DNA
cagatgtgtgaagccacaag

SEQ ID NO: 201432 - DNA, 20 bp, synthetic construct
  source 1..20: mol_type = other DNA
ccagatgtgtgaagccacaa

SEQ ID NO: 201433 - DNA, 20 bp, synthetic construct
  source 1..20: mol_type = other DNA
gccagatgtgtgaagccaca

SEQ ID NO: 201434 - DNA, 20 bp, synthetic construct
  source 1..20: mol_type = other DNA
tgccagatgtgtgaagccac

SEQ ID NO: 201435 - DNA, 20 bp, synthetic construct
  source 1..20: mol_type = other DNA
gtgccagatgtgtgaagcca

SEQ ID NO: 201436 - DNA, 20 bp, synthetic construct
  source 1..20: mol_type = other DNA
ggtgccagatgtgtgaagcc

SEQ ID NO: 201437 - DNA, 20 bp, synthetic construct
  source 1..20: mol_type = other DNA
tggtgccagatgtgtgaagc

SEQ ID NO: 201438 - DNA, 20 bp, synthetic construct
  source 1..20: mol_type = other DNA
gtggtgccagatgtgtgaag

SEQ ID NO: 201439 - DNA, 20 bp, synthetic construct
  source 1..20: mol_type = other DNA
ggtggtgccagatgtgtgaa

SEQ ID NO: 201440 - DNA, 20 bp, synthetic construct
  source 1..20: mol_type = other DNA
aggtggtgccagatgtgtga

SEQ ID NO: 201441 - DNA, 20 bp, synthetic construct
  source 1..20: mol_type = other DNA
gaggtggtgccagatgtgtg

SEQ ID NO: 201442 - DNA, 20 bp, synthetic construct
  source 1..20: mol_type = other DNA
tgaggtggtgccagatgtgt

SEQ ID NO: 201443 - DNA, 20 bp, synthetic construct
  source 1..20: mol_type = other DNA
atgaggtggtgccagatgtg

SEQ ID NO: 201444 - DNA, 20 bp, synthetic construct
  source 1..20: mol_type = other DNA
gatgaggtggtgccagatgt

SEQ ID NO: 201445 - DNA, 20 bp, synthetic construct
  source 1..20: mol_type = other DNA
agatgaggtggtgccagatg

SEQ ID NO: 201446 - DNA, 20 bp, synthetic construct
  source 1..20: mol_type = other DNA
aagatgaggtggtgccagat

SEQ ID NO: 201447 - DNA, 20 bp, synthetic construct
  source 1..20: mol_type = other DNA
gaagatgaggtggtgccaga

SEQ ID NO: 201448 - DNA, 20 bp, synthetic construct
  source 1..20: mol_type = other DNA
ggaagatgaggtggtgccag

SEQ ID NO: 201449 - DNA, 20 bp, synthetic construct
  source 1..20: mol_type = other DNA
tggaagatgaggtggtgcca

SEQ ID NO: 201450 - DNA, 20 bp, synthetic construct
  source 1..20: mol_type = other DNA
ctggaagatgaggtggtgcc

SEQ ID NO: 201451 - DNA, 20 bp, synthetic construct
  source 1..20: mol_type = other DNA
gctggaagatgaggtggtgc

SEQ ID NO: 201452 - DNA, 20 bp, synthetic construct
  source 1..20: mol_type = other DNA
ggctggaagatgaggtggtg

SEQ ID NO: 201453 - DNA, 20 bp, synthetic construct
  source 1..20: mol_type = other DNA
aggctggaagatgaggtggt

SEQ ID NO: 201454 - DNA, 20 bp, synthetic construct
  source 1..20: mol_type = other DNA
aaggctggaagatgaggtgg

SEQ ID NO: 201455 - DNA, 20 bp, synthetic construct
  source 1..20: mol_type = other DNA
taaggctggaagatgaggtg

SEQ ID NO: 201456 - DNA, 20 bp, synthetic construct
  source 1..20: mol_type = other DNA
ctaaggctggaagatgaggt

SEQ ID NO: 201457 - DNA, 20 bp, synthetic construct
  source 1..20: mol_type = other DNA
cctaaggctggaagatgagg

SEQ ID NO: 201458 - DNA, 20 bp, synthetic construct
  source 1..20: mol_type = other DNA
tcctaaggctggaagatgag

SEQ ID NO: 201459 - DNA, 20 bp, synthetic construct
  source 1..20: mol_type = other DNA
ctcctaaggctggaagatga

SEQ ID NO: 201460 - DNA, 20 bp, synthetic construct
  source 1..20: mol_type = other DNA
actcctaaggctggaagatg

SEQ ID NO: 201461 - DNA, 20 bp, synthetic construct
  source 1..20: mol_type = other DNA
gactcctaaggctggaagat

SEQ ID NO: 201462 - DNA, 20 bp, synthetic construct
  source 1..20: mol_type = other DNA
tgactcctaaggctggaaga

SEQ ID NO: 201463 - DNA, 20 bp, synthetic construct
  source 1..20: mol_type = other DNA
atgactcctaaggctggaag

SEQ ID NO: 201464 - DNA, 20 bp, synthetic construct
  source 1..20: mol_type = other DNA
gatgactcctaaggctggaa

SEQ ID NO: 201465 - DNA, 20 bp, synthetic construct
  source 1..20: mol_type = other DNA
agatgactcctaaggctgga

SEQ ID NO: 201466 - DNA, 20 bp, synthetic construct
  source 1..20: mol_type = other DNA
aagatgactcctaaggctgg

SEQ ID NO: 201467 - DNA, 20 bp, synthetic construct
  source 1..20: mol_type = other DNA
aaagatgactcctaaggctg

SEQ ID NO: 201468 - DNA, 20 bp, synthetic construct
  source 1..20: mol_type = other DNA
aaaagatgactcctaaggct

SEQ ID NO: 201469 - DNA, 20 bp, synthetic construct
  source 1..20: mol_type = other DNA
taaaagatgactcctaaggc

SEQ ID NO: 201470 - DNA, 20 bp, synthetic construct
  source 1..20: mol_type = other DNA
ctaaaagatgactcctaagg

SEQ ID NO: 201471 - DNA, 20 bp, synthetic construct
  source 1..20: mol_type = other DNA
actaaaagatgactcctaag

SEQ ID NO: 201472 - DNA, 20 bp, synthetic construct
  source 1..20: mol_type = other DNA
aactaaaagatgactcctaa

SEQ ID NO: 201473 - DNA, 20 bp, synthetic construct
  source 1..20: mol_type = other DNA
gaactaaaagatgactccta

SEQ ID NO: 201474 - DNA, 20 bp, synthetic construct
  source 1..20: mol_type = other DNA
ggaactaaaagatgactcct

SEQ ID NO: 201475 - DNA, 20 bp, synthetic construct
  source 1..20: mol_type = other DNA
aggaactaaaagatgactcc

SEQ ID NO: 201476 - DNA, 20 bp, synthetic construct
  source 1..20: mol_type = other DNA
aaggaactaaaagatgactc

SEQ ID NO: 201477 - DNA, 20 bp, synthetic construct
  source 1..20: mol_type = other DNA
caaggaactaaaagatgact

SEQ ID NO: 201478 - DNA, 20 bp, synthetic construct
  source 1..20: mol_type = other DNA
tcaaggaactaaaagatgac

SEQ ID NO: 201479 - DNA, 20 bp, synthetic construct
  source 1..20: mol_type = other DNA
ttcaaggaactaaaagatga

SEQ ID NO: 201480 - DNA, 20 bp, synthetic construct
  source 1..20: mol_type = other DNA
tttcaaggaactaaaagatg

SEQ ID NO: 201481 - DNA, 20 bp, synthetic construct
  source 1..20: mol_type = other DNA
ttttcaaggaactaaaagat

SEQ ID NO: 201482 - DNA, 20 bp, synthetic construct
  source 1..20: mol_type = other DNA
gttttcaaggaactaaaaga

SEQ ID NO: 201483 - DNA, 20 bp, synthetic construct
  source 1..20: mol_type = other DNA
agttttcaaggaactaaaag

SEQ ID NO: 201484 - DNA, 20 bp, synthetic construct
  source 1..20: mol_type = other DNA
gagttttcaaggaactaaaa

SEQ ID NO: 201485 - DNA, 20 bp, synthetic construct
  source 1..20: mol_type = other DNA
agagttttcaaggaactaaa

SEQ ID NO: 201486 - DNA, 20 bp, synthetic construct
  source 1..20: mol_type = other DNA
aagagttttcaaggaactaa

SEQ ID NO: 201487 - DNA, 20 bp, synthetic construct
  source 1..20: mol_type = other DNA
aaagagttttcaaggaacta

SEQ ID NO: 201488 - DNA, 20 bp, synthetic construct
  source 1..20: mol_type = other DNA
taaagagttttcaaggaact

SEQ ID NO: 201489 - DNA, 20 bp, synthetic construct
  source 1..20: mol_type = other DNA
gtaaagagttttcaaggaac

SEQ ID NO: 201490 - DNA, 20 bp, synthetic construct
  source 1..20: mol_type = other DNA
tgtaaagagttttcaaggaa

SEQ ID NO: 201491 - DNA, 20 bp, synthetic construct
  source 1..20: mol_type = other DNA
ctgtaaagagttttcaagga

SEQ ID NO: 201492 - DNA, 20 bp, synthetic construct
  source 1..20: mol_type = other DNA
actgtaaagagttttcaagg

SEQ ID NO: 201493 - DNA, 20 bp, synthetic construct
  source 1..20: mol_type = other DNA
aactgtaaagagttttcaag

SEQ ID NO: 201494 - DNA, 20 bp, synthetic construct
  source 1..20: mol_type = other DNA
aaactgtaaagagttttcaa

SEQ ID NO: 201495 - DNA, 20 bp, synthetic construct
  source 1..20: mol_type = other DNA
aaaactgtaaagagttttca

SEQ ID NO: 201496 - DNA, 20 bp, synthetic construct
  source 1..20: mol_type = other DNA
gaaaactgtaaagagttttc

SEQ ID NO: 201497 - DNA, 20 bp, synthetic construct
  source 1..20: mol_type = other DNA
agaaaactgtaaagagtttt

SEQ ID NO: 201498 - DNA, 20 bp, synthetic construct
  source 1..20: mol_type = other DNA
cagaaaactgtaaagagttt

SEQ ID NO: 201499 - DNA, 20 bp, synthetic construct
  source 1..20: mol_type = other DNA
acagaaaactgtaaagagtt

SEQ ID NO: 201500 - DNA, 20 bp, synthetic construct
  source 1..20: mol_type = other DNA
aacagaaaactgtaaagagt

SEQ ID NO: 201501 - DNA, 20 bp, synthetic construct
  source 1..20: mol_type = other DNA
caacagaaaactgtaaagag

SEQ ID NO: 201502 - DNA, 20 bp, synthetic construct
  source 1..20: mol_type = other DNA
ccaacagaaaactgtaaaga

SEQ ID NO: 201503 - DNA, 20 bp, synthetic construct
  source 1..20: mol_type = other DNA
cccaacagaaaactgtaaag

SEQ ID NO: 201504 - DNA, 20 bp, synthetic construct
  source 1..20: mol_type = other DNA
ccccaacagaaaactgtaaa

SEQ ID NO: 201505 - DNA, 20 bp, synthetic construct
  source 1..20: mol_type = other DNA
gccccaacagaaaactgtaa

SEQ ID NO: 201506 - DNA, 20 bp, synthetic construct
  source 1..20: mol_type = other DNA
ggccccaacagaaaactgta

SEQ ID NO: 201507 - DNA, 20 bp, synthetic construct
  source 1..20: mol_type = other DNA
aggccccaacagaaaactgt

SEQ ID NO: 201508 - DNA, 20 bp, synthetic construct
  source 1..20: mol_type = other DNA
aaggccccaacagaaaactg

SEQ ID NO: 201509 - DNA, 20 bp, synthetic construct
  source 1..20: mol_type = other DNA
caaggccccaacagaaaact

SEQ ID NO: 201510 - DNA, 20 bp, synthetic construct
  source 1..20: mol_type = other DNA
acaaggccccaacagaaaac

SEQ ID NO: 201511 - DNA, 20 bp, synthetic construct
  source 1..20: mol_type = other DNA
gacaaggccccaacagaaaa

SEQ ID NO: 201512 - DNA, 20 bp, synthetic construct
  source 1..20: mol_type = other DNA
tgacaaggccccaacagaaa

SEQ ID NO: 201513 - DNA, 20 bp, synthetic construct
  source 1..20: mol_type = other DNA
atgacaaggccccaacagaa

SEQ ID NO: 201514 - DNA, 20 bp, synthetic construct
  source 1..20: mol_type = other DNA
tatgacaaggccccaacaga

SEQ ID NO: 201515 - DNA, 20 bp, synthetic construct
  source 1..20: mol_type = other DNA
atatgacaaggccccaacag

SEQ ID NO: 201516 - DNA, 20 bp, synthetic construct
  source 1..20: mol_type = other DNA
tatatgacaaggccccaaca

SEQ ID NO: 201517 - DNA, 20 bp, synthetic construct
  source 1..20: mol_type = other DNA
gtatatgacaaggccccaac

SEQ ID NO: 201518 - DNA, 20 bp, synthetic construct
  source 1..20: mol_type = other DNA
agtatatgacaaggccccaa

SEQ ID NO: 201519 - DNA, 20 bp, synthetic construct
  source 1..20: mol_type = other DNA
tagtatatgacaaggcccca

SEQ ID NO: 201520 - DNA, 20 bp, synthetic construct
  source 1..20: mol_type = other DNA
atagtatatgacaaggcccc

SEQ ID NO: 201521 - DNA, 20 bp, synthetic construct
  source 1..20: mol_type = other DNA
aatagtatatgacaaggccc

SEQ ID NO: 201522 - DNA, 20 bp, synthetic construct
  source 1..20: mol_type = other DNA
gaatagtatatgacaaggcc

SEQ ID NO: 201523 - DNA, 20 bp, synthetic construct
  source 1..20: mol_type = other DNA
ggaatagtatatgacaaggc

SEQ ID NO: 201524 - DNA, 20 bp, synthetic construct
  source 1..20: mol_type = other DNA
gggaatagtatatgacaagg

SEQ ID NO: 201525 - DNA, 20 bp, synthetic construct
  source 1..20: mol_type = other DNA
ggggaatagtatatgacaag

SEQ ID NO: 201526 - DNA, 20 bp, synthetic construct
  source 1..20: mol_type = other DNA
aggggaatagtatatgacaa

SEQ ID NO: 201527 - DNA, 20 bp, synthetic construct
  source 1..20: mol_type = other DNA
caggggaatagtatatgaca

SEQ ID NO: 201528 - DNA, 20 bp, synthetic construct
  source 1..20: mol_type = other DNA
ccaggggaatagtatatgac

SEQ ID NO: 201529 - DNA, 20 bp, synthetic construct
  source 1..20: mol_type = other DNA
tccaggggaatagtatatga

SEQ ID NO: 201530 - DNA, 20 bp, synthetic construct
  source 1..20: mol_type = other DNA
ttccaggggaatagtatatg

SEQ ID NO: 201531 - DNA, 20 bp, synthetic construct
  source 1..20: mol_type = other DNA
attccaggggaatagtatat

SEQ ID NO: 201532 - DNA, 20 bp, synthetic construct
  source 1..20: mol_type = other DNA
cattccaggggaatagtata

SEQ ID NO: 201533 - DNA, 20 bp, synthetic construct
  source 1..20: mol_type = other DNA
acattccaggggaatagtat

SEQ ID NO: 201534 - DNA, 20 bp, synthetic construct
  source 1..20: mol_type = other DNA
aacattccaggggaatagta

SEQ ID NO: 201535 - DNA, 20 bp, synthetic construct
  source 1..20: mol_type = other DNA
gaacattccaggggaatagt

SEQ ID NO: 201536 - DNA, 20 bp, synthetic construct
  source 1..20: mol_type = other DNA
agaacattccaggggaatag

SEQ ID NO: 201537 - DNA, 20 bp, synthetic construct
  source 1..20: mol_type = other DNA
aagaacattccaggggaata

SEQ ID NO: 201538 - DNA, 20 bp, synthetic construct
  source 1..20: mol_type = other DNA
aaagaacattccaggggaat

SEQ ID NO: 201539 - DNA, 20 bp, synthetic construct
  source 1..20: mol_type = other DNA
gaaagaacattccaggggaa

SEQ ID NO: 201540 - DNA, 20 bp, synthetic construct
  source 1..20: mol_type = other DNA
ggaaagaacattccagggga

SEQ ID NO: 201541 - DNA, 20 bp, synthetic construct
  source 1..20: mol_type = other DNA
aggaaagaacattccagggg

SEQ ID NO: 201542 - DNA, 20 bp, synthetic construct
  source 1..20: mol_type = other DNA
taggaaagaacattccaggg

SEQ ID NO: 201543 - DNA, 20 bp, synthetic construct
  source 1..20: mol_type = other DNA
ataggaaagaacattccagg

SEQ ID NO: 201544 - DNA, 20 bp, synthetic construct
  source 1..20: mol_type = other DNA
gataggaaagaacattccag

SEQ ID NO: 201545 - DNA, 20 bp, synthetic construct
  source 1..20: mol_type = other DNA
ggataggaaagaacattcca

SEQ ID NO: 201546 - DNA, 20 bp, synthetic construct
  source 1..20: mol_type = other DNA
gggataggaaagaacattcc

SEQ ID NO: 201547 - DNA, 20 bp, synthetic construct
  source 1..20: mol_type = other DNA
ggggataggaaagaacattc

SEQ ID NO: 201548 - DNA, 20 bp, synthetic construct
  source 1..20: mol_type = other DNA
aggggataggaaagaacatt

SEQ ID NO: 201549 - DNA, 20 bp, synthetic construct
  source 1..20: mol_type = other DNA
gaggggataggaaagaacat

SEQ ID NO: 201550 - DNA, 20 bp, synthetic construct
  source 1..20: mol_type = other DNA
ggaggggataggaaagaaca

SEQ ID NO: 201551 - DNA, 20 bp, synthetic construct
  source 1..20: mol_type = other DNA
gggaggggataggaaagaac

SEQ ID NO: 201552 - DNA, 20 bp, synthetic construct
  source 1..20: mol_type = other DNA
agggaggggataggaaagaa

SEQ ID NO: 201553 - DNA, 20 bp, synthetic construct
  source 1..20: mol_type = other DNA
aagggaggggataggaaaga

SEQ ID NO: 201554 - DNA, 20 bp, synthetic construct
  source 1..20: mol_type = other DNA
aaagggaggggataggaaag

SEQ ID NO: 201555 - DNA, 20 bp, synthetic construct
  source 1..20: mol_type = other DNA
gaaagggaggggataggaaa

SEQ ID NO: 201556 - DNA, 20 bp, synthetic construct
  source 1..20: mol_type = other DNA
tgaaagggaggggataggaa

SEQ ID NO: 201557 - DNA, 20 bp, synthetic construct
  source 1..20: mol_type = other DNA
gtgaaagggaggggatagga

SEQ ID NO: 201558 - DNA, 20 bp, synthetic construct
  source 1..20: mol_type = other DNA
ggtgaaagggaggggatagg

SEQ ID NO: 201559 - DNA, 20 bp, synthetic construct
  source 1..20: mol_type = other DNA
aggtgaaagggaggggatag

SEQ ID NO: 201560 - DNA, 20 bp, synthetic construct
  source 1..20: mol_type = other DNA
aaggtgaaagggaggggata

SEQ ID NO: 201561 - DNA, 20 bp, synthetic construct
  source 1..20: mol_type = other DNA
caaggtgaaagggaggggat

SEQ ID NO: 201562 - DNA, 20 bp, synthetic construct
  source 1..20: mol_type = other DNA
gcaaggtgaaagggagggga

SEQ ID NO: 201563 - DNA, 20 bp, synthetic construct
  source 1..20: mol_type = other DNA
agcaaggtgaaagggagggg

SEQ ID NO: 201564 - DNA, 20 bp, synthetic construct
  source 1..20: mol_type = other DNA
tagcaaggtgaaagggaggg

SEQ ID NO: 201565 - DNA, 20 bp, synthetic construct
  source 1..20: mol_type = other DNA
ttagcaaggtgaaagggagg

SEQ ID NO: 201566 - DNA, 20 bp, synthetic construct
  source 1..20: mol_type = other DNA
gttagcaaggtgaaagggag

SEQ ID NO: 201567 - DNA, 20 bp, synthetic construct
  source 1..20: mol_type = other DNA
agttagcaaggtgaaaggga

SEQ ID NO: 201568 - DNA, 20 bp, synthetic construct
  source 1..20: mol_type = other DNA
aagttagcaaggtgaaaggg

SEQ ID NO: 201569 - DNA, 20 bp, synthetic construct
  source 1..20: mol_type = other DNA
caagttagcaaggtgaaagg

SEQ ID NO: 201570 - DNA, 20 bp, synthetic construct
  source 1..20: mol_type = other DNA
acaagttagcaaggtgaaag

SEQ ID NO: 201571 - DNA, 20 bp, synthetic construct
  source 1..20: mol_type = other DNA
cacaagttagcaaggtgaaa

SEQ ID NO: 201572 - DNA, 20 bp, synthetic construct
  source 1..20: mol_type = other DNA
gcacaagttagcaaggtgaa

SEQ ID NO: 201573 - DNA, 20 bp, synthetic construct
  source 1..20: mol_type = other DNA
ggcacaagttagcaaggtga

SEQ ID NO: 201574 - DNA, 20 bp, synthetic construct
  source 1..20: mol_type = other DNA
gggcacaagttagcaaggtg

SEQ ID NO: 201575 - DNA, 20 bp, synthetic construct
  source 1..20: mol_type = other DNA
tgggcacaagttagcaaggt

SEQ ID NO: 201576 - DNA, 20 bp, synthetic construct
  source 1..20: mol_type = other DNA
atgggcacaagttagcaagg

SEQ ID NO: 201577 - DNA, 20 bp, synthetic construct
  source 1..20: mol_type = other DNA
gatgggcacaagttagcaag

SEQ ID NO: 201578 - DNA, 20 bp, synthetic construct
  source 1..20: mol_type = other DNA
ggatgggcacaagttagcaa

SEQ ID NO: 201579 - DNA, 20 bp, synthetic construct
  source 1..20: mol_type = other DNA
aggatgggcacaagttagca

SEQ ID NO: 201580 - DNA, 20 bp, synthetic construct
  source 1..20: mol_type = other DNA
aaggatgggcacaagttagc

SEQ ID NO: 201581 - DNA, 20 bp, synthetic construct
  source 1..20: mol_type = other DNA
gaaggatgggcacaagttag

SEQ ID NO: 201582 - DNA, 20 bp, synthetic construct
  source 1..20: mol_type = other DNA
tgaaggatgggcacaagtta

SEQ ID NO: 201583 - DNA, 20 bp, synthetic construct
  source 1..20: mol_type = other DNA
ctgaaggatgggcacaagtt

SEQ ID NO: 201584 - DNA, 20 bp, synthetic construct
  source 1..20: mol_type = other DNA
cctgaaggatgggcacaagt

SEQ ID NO: 201585 - DNA, 20 bp, synthetic construct
  source 1..20: mol_type = other DNA
acctgaaggatgggcacaag

SEQ ID NO: 201586 - DNA, 20 bp, synthetic construct
  source 1..20: mol_type = other DNA
gacctgaaggatgggcacaa

SEQ ID NO: 201587 - DNA, 20 bp, synthetic construct
  source 1..20: mol_type = other DNA
agacctgaaggatgggcaca

SEQ ID NO: 201588 - DNA, 20 bp, synthetic construct
  source 1..20: mol_type = other DNA
gagacctgaaggatgggcac

SEQ ID NO: 201589 - DNA, 20 bp, synthetic construct
  source 1..20: mol_type = other DNA
tgagacctgaaggatgggca

SEQ ID NO: 201590 - DNA, 20 bp, synthetic construct
  source 1..20: mol_type = other DNA
ctgagacctgaaggatgggc

SEQ ID NO: 201591 - DNA, 20 bp, synthetic construct
  source 1..20: mol_type = other DNA
gctgagacctgaaggatggg

SEQ ID NO: 201592 - DNA, 20 bp, synthetic construct
  source 1..20: mol_type = other DNA
tgctgagacctgaaggatgg

SEQ ID NO: 201593 - DNA, 20 bp, synthetic construct
  source 1..20: mol_type = other DNA
ctgctgagacctgaaggatg

SEQ ID NO: 201594 - DNA, 20 bp, synthetic construct
  source 1..20: mol_type = other DNA
tctgctgagacctgaaggat

SEQ ID NO: 201595 - DNA, 20 bp, synthetic construct
  source 1..20: mol_type = other DNA
ttctgctgagacctgaagga

SEQ ID NO: 201596 - DNA, 20 bp, synthetic construct
  source 1..20: mol_type = other DNA
tttctgctgagacctgaagg

SEQ ID NO: 201597 - DNA, 20 bp, synthetic construct
  source 1..20: mol_type = other DNA
gtttctgctgagacctgaag

SEQ ID NO: 201598 - DNA, 20 bp, synthetic construct
  source 1..20: mol_type = other DNA
tgtttctgctgagacctgaa

SEQ ID NO: 201599 - DNA, 20 bp, synthetic construct
  source 1..20: mol_type = other DNA
atgtttctgctgagacctga

SEQ ID NO: 201600 - DNA, 20 bp, synthetic construct
  source 1..20: mol_type = other DNA
gatgtttctgctgagacctg

SEQ ID NO: 201601 - DNA, 20 bp, synthetic construct
  source 1..20: mol_type = other DNA
tgatgtttctgctgagacct

SEQ ID NO: 201602 - DNA, 20 bp, synthetic construct
  source 1..20: mol_type = other DNA
gtgatgtttctgctgagacc

SEQ ID NO: 201603 - DNA, 20 bp, synthetic construct
  source 1..20: mol_type = other DNA
agtgatgtttctgctgagac

SEQ ID NO: 201604 - DNA, 20 bp, synthetic construct
  source 1..20: mol_type = other DNA
aagtgatgtttctgctgaga

SEQ ID NO: 201605 - DNA, 20 bp, synthetic construct
  source 1..20: mol_type = other DNA
gaagtgatgtttctgctgag

SEQ ID NO: 201606 - DNA, 20 bp, synthetic construct
  source 1..20: mol_type = other DNA
ggaagtgatgtttctgctga

SEQ ID NO: 201607 - DNA, 20 bp, synthetic construct
  source 1..20: mol_type = other DNA
aggaagtgatgtttctgctg

SEQ ID NO: 201608 - DNA, 20 bp, synthetic construct
  source 1..20: mol_type = other DNA
aaggaagtgatgtttctgct

SEQ ID NO: 201609 - DNA, 20 bp, synthetic construct
  source 1..20: mol_type = other DNA
caaggaagtgatgtttctgc

SEQ ID NO: 201610 - DNA, 20 bp, synthetic construct
  source 1..20: mol_type = other DNA
ccaaggaagtgatgtttctg

SEQ ID NO: 201611 - DNA, 20 bp, synthetic construct
  source 1..20: mol_type = other DNA
cccaaggaagtgatgtttct

SEQ ID NO: 201612 - DNA, 20 bp, synthetic construct
  source 1..20: mol_type = other DNA
ccccaaggaagtgatgtttc

SEQ ID NO: 201613 - DNA, 20 bp, synthetic construct
  source 1..20: mol_type = other DNA
tccccaaggaagtgatgttt

SEQ ID NO: 201614 - DNA, 20 bp, synthetic construct
  source 1..20: mol_type = other DNA
ttccccaaggaagtgatgtt

SEQ ID NO: 201615 - DNA, 20 bp, synthetic construct
  source 1..20: mol_type = other DNA
cttccccaaggaagtgatgt

SEQ ID NO: 201616 - DNA, 20 bp, synthetic construct
  source 1..20: mol_type = other DNA
acttccccaaggaagtgatg

SEQ ID NO: 201617 - DNA, 20 bp, synthetic construct
  source 1..20: mol_type = other DNA
aacttccccaaggaagtgat

SEQ ID NO: 201618 - DNA, 20 bp, synthetic construct
  source 1..20: mol_type = other DNA
aaacttccccaaggaagtga

SEQ ID NO: 201619 - DNA, 20 bp, synthetic construct
  source 1..20: mol_type = other DNA
aaaacttccccaaggaagtg

SEQ ID NO: 201620 - DNA, 20 bp, synthetic construct
  source 1..20: mol_type = other DNA
gaaaacttccccaaggaagt

SEQ ID NO: 201621 - DNA, 20 bp, synthetic construct
  source 1..20: mol_type = other DNA
agaaaacttccccaaggaag

SEQ ID NO: 201622 - DNA, 20 bp, synthetic construct
  source 1..20: mol_type = other DNA
gagaaaacttccccaaggaa

SEQ ID NO: 201623 - DNA, 20 bp, synthetic construct
  source 1..20: mol_type = other DNA
ggagaaaacttccccaagga

SEQ ID NO: 201624 - DNA, 20 bp, synthetic construct
  source 1..20: mol_type = other DNA
tggagaaaacttccccaagg

SEQ ID NO: 201625 - DNA, 20 bp, synthetic construct
  source 1..20: mol_type = other DNA
ttggagaaaacttccccaag

SEQ ID NO: 201626 - DNA, 20 bp, synthetic construct
  source 1..20: mol_type = other DNA
gttggagaaaacttccccaa

SEQ ID NO: 201627 - DNA, 20 bp, synthetic construct
  source 1..20: mol_type = other DNA
tgttggagaaaacttcccca

SEQ ID NO: 201628 - DNA, 20 bp, synthetic construct
  source 1..20: mol_type = other DNA
gtgttggagaaaacttcccc

SEQ ID NO: 201629 - DNA, 20 bp, synthetic construct
  source 1..20: mol_type = other DNA
ggtgttggagaaaacttccc

SEQ ID NO: 201630 - DNA, 20 bp, synthetic construct
  source 1..20: mol_type = other DNA
gggtgttggagaaaacttcc

SEQ ID NO: 201631 - DNA, 20 bp, synthetic construct
  source 1..20: mol_type = other DNA
tgggtgttggagaaaacttc

SEQ ID NO: 201632 - DNA, 20 bp, synthetic construct
  source 1..20: mol_type = other DNA
gtgggtgttggagaaaactt

SEQ ID NO: 201633 - DNA, 20 bp, synthetic construct
  source 1..20: mol_type = other DNA
tgtgggtgttggagaaaact

SEQ ID NO: 201634 - DNA, 20 bp, synthetic construct
  source 1..20: mol_type = other DNA
gtgtgggtgttggagaaaac

SEQ ID NO: 201635 - DNA, 20 bp, synthetic construct
  source 1..20: mol_type = other DNA
agtgtgggtgttggagaaaa

SEQ ID NO: 201636 - DNA, 20 bp, synthetic construct
  source 1..20: mol_type = other DNA
tagtgtgggtgttggagaaa

SEQ ID NO: 201637 - DNA, 20 bp, synthetic construct
  source 1..20: mol_type = other DNA
gtagtgtgggtgttggagaa

SEQ ID NO: 201638 - DNA, 20 bp, synthetic construct
  source 1..20: mol_type = other DNA
tgtagtgtgggtgttggaga

SEQ ID NO: 201639 - DNA, 20 bp, synthetic construct
  source 1..20: mol_type = other DNA
gtgtagtgtgggtgttggag

SEQ ID NO: 201640 - DNA, 20 bp, synthetic construct
  source 1..20: mol_type = other DNA
tgtgtagtgtgggtgttgga

SEQ ID NO: 201641 - DNA, 20 bp, synthetic construct
  source 1..20: mol_type = other DNA
ctgtgtagtgtgggtgttgg

SEQ ID NO: 201642 - DNA, 20 bp, synthetic construct
  source 1..20: mol_type = other DNA
cctgtgtagtgtgggtgttg

SEQ ID NO: 201643 - DNA, 20 bp, synthetic construct
  source 1..20: mol_type = other DNA
acctgtgtagtgtgggtgtt

SEQ ID NO: 201644 - DNA, 20 bp, synthetic construct
  source 1..20: mol_type = other DNA
cacctgtgtagtgtgggtgt

SEQ ID NO: 201645 - DNA, 20 bp, synthetic construct
  source 1..20: mol_type = other DNA
acacctgtgtagtgtgggtg

SEQ ID NO: 201646 - DNA, 20 bp, synthetic construct
  source 1..20: mol_type = other DNA
gacacctgtgtagtgtgggt

SEQ ID NO: 201647 - DNA, 20 bp, synthetic construct
  source 1..20: mol_type = other DNA
ggacacctgtgtagtgtggg

SEQ ID NO: 201648 - DNA, 20 bp, synthetic construct
  source 1..20: mol_type = other DNA
gggacacctgtgtagtgtgg

SEQ ID NO: 201649 - DNA, 20 bp, synthetic construct
  source 1..20: mol_type = other DNA
tgggacacctgtgtagtgtg

SEQ ID NO: 201650 - DNA, 20 bp, synthetic construct
  source 1..20: mol_type = other DNA
atgggacacctgtgtagtgt

SEQ ID NO: 201651 - DNA, 20 bp, synthetic construct
  source 1..20: mol_type = other DNA
gatgggacacctgtgtagtg

SEQ ID NO: 201652 - DNA, 20 bp, synthetic construct
  source 1..20: mol_type = other DNA
agatgggacacctgtgtagt

SEQ ID NO: 201653 - DNA, 20 bp, synthetic construct
  source 1..20: mol_type = other DNA
tagatgggacacctgtgtag

SEQ ID NO: 201654 - DNA, 20 bp, synthetic construct
  source 1..20: mol_type = other DNA
gtagatgggacacctgtgta

SEQ ID NO: 201655 - DNA, 20 bp, synthetic construct
  source 1..20: mol_type = other DNA
tgtagatgggacacctgtgt

SEQ ID NO: 201656 - DNA, 20 bp, synthetic construct
  source 1..20: mol_type = other DNA
gtgtagatgggacacctgtg

SEQ ID NO: 201657 - DNA, 20 bp, synthetic construct
  source 1..20: mol_type = other DNA
agtgtagatgggacacctgt

SEQ ID NO: 201658 - DNA, 20 bp, synthetic construct
  source 1..20: mol_type = other DNA
gagtgtagatgggacacctg

SEQ ID NO: 201659 - DNA, 20 bp, synthetic construct
  source 1..20: mol_type = other DNA
ggagtgtagatgggacacct

SEQ ID NO: 201660 - DNA, 20 bp, synthetic construct
  source 1..20: mol_type = other DNA
aggagtgtagatgggacacc

SEQ ID NO: 201661 - DNA, 20 bp, synthetic construct
  source 1..20: mol_type = other DNA
taggagtgtagatgggacac

SEQ ID NO: 201662 - DNA, 20 bp, synthetic construct
  source 1..20: mol_type = other DNA
ataggagtgtagatgggaca

SEQ ID NO: 201663 - DNA, 20 bp, synthetic construct
  source 1..20: mol_type = other DNA
cataggagtgtagatgggac

SEQ ID NO: 201664 - DNA, 20 bp, synthetic construct
  source 1..20: mol_type = other DNA
tcataggagtgtagatggga

SEQ ID NO: 201665 - DNA, 20 bp, synthetic construct
  source 1..20: mol_type = other DNA
gtcataggagtgtagatggg

SEQ ID NO: 201666 - DNA, 20 bp, synthetic construct
  source 1..20: mol_type = other DNA
agtcataggagtgtagatgg

SEQ ID NO: 201667 - DNA, 20 bp, synthetic construct
  source 1..20: mol_type = other DNA
aagtcataggagtgtagatg

SEQ ID NO: 201668 - DNA, 20 bp, synthetic construct
  source 1..20: mol_type = other DNA
aaagtcataggagtgtagat

SEQ ID NO: 201669 - DNA, 20 bp, synthetic construct
  source 1..20: mol_type = other DNA
caaagtcataggagtgtaga

SEQ ID NO: 201670 - DNA, 20 bp, synthetic construct
  source 1..20: mol_type = other DNA
acaaagtcataggagtgtag

SEQ ID NO: 201671 - DNA, 20 bp, synthetic construct
  source 1..20: mol_type = other DNA
cacaaagtcataggagtgta

SEQ ID NO: 201672 - DNA, 20 bp, synthetic construct
  source 1..20: mol_type = other DNA
ccacaaagtcataggagtgt

SEQ ID NO: 201673 - DNA, 20 bp, synthetic construct
  source 1..20: mol_type = other DNA
accacaaagtcataggagtg

SEQ ID NO: 201674 - DNA, 20 bp, synthetic construct
  source 1..20: mol_type = other DNA
taccacaaagtcataggagt

SEQ ID NO: 201675 - DNA, 20 bp, synthetic construct
  source 1..20: mol_type = other DNA
gtaccacaaagtcataggag

SEQ ID NO: 201676 - DNA, 20 bp, synthetic construct
  source 1..20: mol_type = other DNA
agtaccacaaagtcatagga

SEQ ID NO: 201677 - DNA, 20 bp, synthetic construct
  source 1..20: mol_type = other DNA
aagtaccacaaagtcatagg

SEQ ID NO: 201678 - DNA, 20 bp, synthetic construct
  source 1..20: mol_type = other DNA
caagtaccacaaagtcatag

SEQ ID NO: 201679 - DNA, 20 bp, synthetic construct
  source 1..20: mol_type = other DNA
acaagtaccacaaagtcata

SEQ ID NO: 201680 - DNA, 20 bp, synthetic construct
  source 1..20: mol_type = other DNA
gacaagtaccacaaagtcat

SEQ ID NO: 201681 - DNA, 20 bp, synthetic construct
  source 1..20: mol_type = other DNA
agacaagtaccacaaagtca

SEQ ID NO: 201682 - DNA, 20 bp, synthetic construct
  source 1..20: mol_type = other DNA
gagacaagtaccacaaagtc

SEQ ID NO: 201683 - DNA, 20 bp, synthetic construct
  source 1..20: mol_type = other DNA
tgagacaagtaccacaaagt

SEQ ID NO: 201684 - DNA, 20 bp, synthetic construct
  source 1..20: mol_type = other DNA
gtgagacaagtaccacaaag

SEQ ID NO: 201685 - DNA, 20 bp, synthetic construct
  source 1..20: mol_type = other DNA
agtgagacaagtaccacaaa

SEQ ID NO: 201686 - DNA, 20 bp, synthetic construct
  source 1..20: mol_type = other DNA
aagtgagacaagtaccacaa

SEQ ID NO: 201687 - DNA, 20 bp, synthetic construct
  source 1..20: mol_type = other DNA
gaagtgagacaagtaccaca

SEQ ID NO: 201688 - DNA, 20 bp, synthetic construct
  source 1..20: mol_type = other DNA
tgaagtgagacaagtaccac

SEQ ID NO: 201689 - DNA, 20 bp, synthetic construct
  source 1..20: mol_type = other DNA
atgaagtgagacaagtacca

SEQ ID NO: 201690 - DNA, 20 bp, synthetic construct
  source 1..20: mol_type = other DNA
aatgaagtgagacaagtacc

SEQ ID NO: 201691 - DNA, 20 bp, synthetic construct
  source 1..20: mol_type = other DNA
aaatgaagtgagacaagtac

SEQ ID NO: 201692 - DNA, 20 bp, synthetic construct
  source 1..20: mol_type = other DNA
aaaatgaagtgagacaagta

SEQ ID NO: 201693 - DNA, 20 bp, synthetic construct
  source 1..20: mol_type = other DNA
gaaaatgaagtgagacaagt

SEQ ID NO: 201694 - DNA, 20 bp, synthetic construct
  source 1..20: mol_type = other DNA
ggaaaatgaagtgagacaag

SEQ ID NO: 201695 - DNA, 20 bp, synthetic construct
  source 1..20: mol_type = other DNA
tggaaaatgaagtgagacaa

SEQ ID NO: 201696 - DNA, 20 bp, synthetic construct
  source 1..20: mol_type = other DNA
gtggaaaatgaagtgagaca

SEQ ID NO: 201697 - DNA, 20 bp, synthetic construct
  source 1..20: mol_type = other DNA
agtggaaaatgaagtgagac

SEQ ID NO: 201698 - DNA, 20 bp, synthetic construct
  source 1..20: mol_type = other DNA
cagtggaaaatgaagtgaga

SEQ ID NO: 201699 - DNA, 20 bp, synthetic construct
  source 1..20: mol_type = other DNA
gcagtggaaaatgaagtgag

SEQ ID NO: 201700 - DNA, 20 bp, synthetic construct
  source 1..20: mol_type = other DNA
ggcagtggaaaatgaagtga

SEQ ID NO: 201701 - DNA, 20 bp, synthetic construct
  source 1..20: mol_type = other DNA
aggcagtggaaaatgaagtg

SEQ ID NO: 201702 - DNA, 20 bp, synthetic construct
  source 1..20: mol_type = other DNA
aaggcagtggaaaatgaagt

SEQ ID NO: 201703 - DNA, 20 bp, synthetic construct
  source 1..20: mol_type = other DNA
gaaggcagtggaaaatgaag

SEQ ID NO: 201704 - DNA, 20 bp, synthetic construct
  source 1..20: mol_type = other DNA
ggaaggcagtggaaaatgaa

SEQ ID NO: 201705 - DNA, 20 bp, synthetic construct
  source 1..20: mol_type = other DNA
gggaaggcagtggaaaatga

SEQ ID NO: 201706 - DNA, 20 bp, synthetic construct
  source 1..20: mol_type = other DNA
ggggaaggcagtggaaaatg

SEQ ID NO: 201707 - DNA, 20 bp, synthetic construct
  source 1..20: mol_type = other DNA
tggggaaggcagtggaaaat

SEQ ID NO: 201708 - DNA, 20 bp, synthetic construct
  source 1..20: mol_type = other DNA
gtggggaaggcagtggaaaa

SEQ ID NO: 201709 - DNA, 20 bp, synthetic construct
  source 1..20: mol_type = other DNA
tgtggggaaggcagtggaaa

SEQ ID NO: 201710 - DNA, 20 bp, synthetic construct
  source 1..20: mol_type = other DNA
ttgtggggaaggcagtggaa

SEQ ID NO: 201711 - DNA, 20 bp, synthetic construct
  source 1..20: mol_type = other DNA
cttgtggggaaggcagtgga

SEQ ID NO: 201712 - DNA, 20 bp, synthetic construct
  source 1..20: mol_type = other DNA
ccttgtggggaaggcagtgg

SEQ ID NO: 201713 - DNA, 20 bp, synthetic construct
  source 1..20: mol_type = other DNA
gccttgtggggaaggcagtg

SEQ ID NO: 201714 - DNA, 20 bp, synthetic construct
  source 1..20: mol_type = other DNA
tgccttgtggggaaggcagt

SEQ ID NO: 201715 - DNA, 20 bp, synthetic construct
  source 1..20: mol_type = other DNA
gtgccttgtggggaaggcag

SEQ ID NO: 201716 - DNA, 20 bp, synthetic construct
  source 1..20: mol_type = other DNA
ggtgccttgtggggaaggca

SEQ ID NO: 201717 - DNA, 20 bp, synthetic construct
  source 1..20: mol_type = other DNA
aggtgccttgtggggaaggc

SEQ ID NO: 201718 - DNA, 20 bp, synthetic construct
  source 1..20: mol_type = other DNA
caggtgccttgtggggaagg

SEQ ID NO: 201719 - DNA, 20 bp, synthetic construct
  source 1..20: mol_type = other DNA
gcaggtgccttgtggggaag

SEQ ID NO: 201720 - DNA, 20 bp, synthetic construct
  source 1..20: mol_type = other DNA
tgcaggtgccttgtggggaa

SEQ ID NO: 201721 - DNA, 20 bp, synthetic construct
  source 1..20: mol_type = other DNA
gtgcaggtgccttgtgggga

SEQ ID NO: 201722 - DNA, 20 bp, synthetic construct
  source 1..20: mol_type = other DNA
tgtgcaggtgccttgtgggg

SEQ ID NO: 201723 - DNA, 20 bp, synthetic construct
  source 1..20: mol_type = other DNA
ttgtgcaggtgccttgtggg

SEQ ID NO: 201724 - DNA, 20 bp, synthetic construct
  source 1..20: mol_type = other DNA
cttgtgcaggtgccttgtgg

SEQ ID NO: 201725 - DNA, 20 bp, synthetic construct
  source 1..20: mol_type = other DNA
ccttgtgcaggtgccttgtg

SEQ ID NO: 201726 - DNA, 20 bp, synthetic construct
  source 1..20: mol_type = other DNA
cccttgtgcaggtgccttgt

SEQ ID NO: 201727 - DNA, 20 bp, synthetic construct
  source 1..20: mol_type = other DNA
gcccttgtgcaggtgccttg

SEQ ID NO: 201728 - DNA, 20 bp, synthetic construct
  source 1..20: mol_type = other DNA
tgcccttgtgcaggtgcctt

SEQ ID NO: 201729 - DNA, 20 bp, synthetic construct
  source 1..20: mol_type = other DNA
ttgcccttgtgcaggtgcct

SEQ ID NO: 201730 - DNA, 20 bp, synthetic construct
  source 1..20: mol_type = other DNA
cttgcccttgtgcaggtgcc

SEQ ID NO: 201731 - DNA, 20 bp, synthetic construct
  source 1..20: mol_type = other DNA
ccttgcccttgtgcaggtgc

SEQ ID NO: 201732 - DNA, 20 bp, synthetic construct
  source 1..20: mol_type = other DNA
tccttgcccttgtgcaggtg

SEQ ID NO: 201733 - DNA, 20 bp, synthetic construct
  source 1..20: mol_type = other DNA
gtccttgcccttgtgcaggt

SEQ ID NO: 201734 - DNA, 20 bp, synthetic construct
  source 1..20: mol_type = other DNA
ggtccttgcccttgtgcagg

SEQ ID NO: 201735 - DNA, 20 bp, synthetic construct
  source 1..20: mol_type = other DNA
cggtccttgcccttgtgcag

SEQ ID NO: 201736 - DNA, 20 bp, synthetic construct
  source 1..20: mol_type = other DNA
acggtccttgcccttgtgca

SEQ ID NO: 201737 - DNA, 20 bp, synthetic construct
  source 1..20: mol_type = other DNA
tacggtccttgcccttgtgc

SEQ ID NO: 201738 - DNA, 20 bp, synthetic construct
  source 1..20: mol_type = other DNA
gtacggtccttgcccttgtg

SEQ ID NO: 201739 - DNA, 20 bp, synthetic construct
  source 1..20: mol_type = other DNA
ggtacggtccttgcccttgt

SEQ ID NO: 201740 - DNA, 20 bp, synthetic construct
  source 1..20: mol_type = other DNA
tggtacggtccttgcccttg

SEQ ID NO: 201741 - DNA, 20 bp, synthetic construct
  source 1..20: mol_type = other DNA
gtggtacggtccttgccctt

SEQ ID NO: 201742 - DNA, 20 bp, synthetic construct
  source 1..20: mol_type = other DNA
agtggtacggtccttgccct

SEQ ID NO: 201743 - DNA, 20 bp, synthetic construct
  source 1..20: mol_type = other DNA
cagtggtacggtccttgccc

SEQ ID NO: 201744 - DNA, 20 bp, synthetic construct
  source 1..20: mol_type = other DNA
acagtggtacggtccttgcc

SEQ ID NO: 201745 - DNA, 20 bp, synthetic construct
  source 1..20: mol_type = other DNA
tacagtggtacggtccttgc

SEQ ID NO: 201746 - DNA, 20 bp, synthetic construct
  source 1..20: mol_type = other DNA
gtacagtggtacggtccttg

SEQ ID NO: 201747 - DNA, 20 bp, synthetic construct
  source 1..20: mol_type = other DNA
ggtacagtggtacggtcctt

SEQ ID NO: 201748 - DNA, 20 bp, synthetic construct
  source 1..20: mol_type = other DNA
aggtacagtggtacggtcct

SEQ ID NO: 201749 - DNA, 20 bp, synthetic construct
  source 1..20: mol_type = other DNA
taggtacagtggtacggtcc

SEQ ID NO: 201750 - DNA, 20 bp, synthetic construct
  source 1..20: mol_type = other DNA
ataggtacagtggtacggtc

SEQ ID NO: 201751 - DNA, 20 bp, synthetic construct
  source 1..20: mol_type = other DNA
cataggtacagtggtacggt

SEQ ID NO: 201752 - DNA, 20 bp, synthetic construct
  source 1..20: mol_type = other DNA
acataggtacagtggtacgg

SEQ ID NO: 201753 - DNA, 20 bp, synthetic construct
  source 1..20: mol_type = other DNA
gacataggtacagtggtacg

SEQ ID NO: 201754 - DNA, 20 bp, synthetic construct
  source 1..20: mol_type = other DNA
tgacataggtacagtggtac

SEQ ID NO: 201755 - DNA, 20 bp, synthetic construct
  source 1..20: mol_type = other DNA
gtgacataggtacagtggta

SEQ ID NO: 201756 - DNA, 20 bp, synthetic construct
  source 1..20: mol_type = other DNA
agtgacataggtacagtggt

SEQ ID NO: 201757 - DNA, 20 bp, synthetic construct
  source 1..20: mol_type = other DNA
gagtgacataggtacagtgg

SEQ ID NO: 201758 - DNA, 20 bp, synthetic construct
  source 1..20: mol_type = other DNA
tgagtgacataggtacagtg

SEQ ID NO: 201759 - DNA, 20 bp, synthetic construct
  source 1..20: mol_type = other DNA
atgagtgacataggtacagt

SEQ ID NO: 201760 - DNA, 20 bp, synthetic construct
  source 1..20: mol_type = other DNA
aatgagtgacataggtacag

SEQ ID NO: 201761 - DNA, 20 bp, synthetic construct
  source 1..20: mol_type = other DNA
caatgagtgacataggtaca

SEQ ID NO: 201762 - DNA, 20 bp, synthetic construct
  source 1..20: mol_type = other DNA
gcaatgagtgacataggtac

SEQ ID NO: 201763 - DNA, 20 bp, synthetic construct
  source 1..20: mol_type = other DNA
agcaatgagtgacataggta

SEQ ID NO: 201764 - DNA, 20 bp, synthetic construct
  source 1..20: mol_type = other DNA
cagcaatgagtgacataggt

SEQ ID NO: 201765 - DNA, 20 bp, synthetic construct
  source 1..20: mol_type = other DNA
acagcaatgagtgacatagg

SEQ ID NO: 201766 - DNA, 20 bp, synthetic construct
  source 1..20: mol_type = other DNA
cacagcaatgagtgacatag

SEQ ID NO: 201767 - DNA, 20 bp, synthetic construct
  source 1..20: mol_type = other DNA
ccacagcaatgagtgacata

SEQ ID NO: 201768 - DNA, 20 bp, synthetic construct
  source 1..20: mol_type = other DNA
accacagcaatgagtgacat

SEQ ID NO: 201769 - DNA, 20 bp, synthetic construct
  source 1..20: mol_type = other DNA
gaccacagcaatgagtgaca

SEQ ID NO: 201770 - DNA, 20 bp, synthetic construct
  source 1..20: mol_type = other DNA
tgaccacagcaatgagtgac

SEQ ID NO: 201771 - DNA, 20 bp, synthetic construct
  source 1..20: mol_type = other DNA
gtgaccacagcaatgagtga

SEQ ID NO: 201772 - DNA, 20 bp, synthetic construct
  source 1..20: mol_type = other DNA
ggtgaccacagcaatgagtg

SEQ ID NO: 201773 - DNA, 20 bp, synthetic construct
  source 1..20: mol_type = other DNA
aggtgaccacagcaatgagt

SEQ ID NO: 201774 - DNA, 20 bp, synthetic construct
  source 1..20: mol_type = other DNA
caggtgaccacagcaatgag

SEQ ID NO: 201775 - DNA, 20 bp, synthetic construct
  source 1..20: mol_type = other DNA
gcaggtgaccacagcaatga

SEQ ID NO: 201776 - DNA, 20 bp, synthetic construct
  source 1..20: mol_type = other DNA
tgcaggtgaccacagcaatg

SEQ ID NO: 201777 - DNA, 20 bp, synthetic construct
  source 1..20: mol_type = other DNA
gtgcaggtgaccacagcaat

SEQ ID NO: 201778 - DNA, 20 bp, synthetic construct
  source 1..20: mol_type = other DNA
agtgcaggtgaccacagcaa

SEQ ID NO: 201779 - DNA, 20 bp, synthetic construct
  source 1..20: mol_type = other DNA
gagtgcaggtgaccacagca

SEQ ID NO: 201780 - DNA, 20 bp, synthetic construct
  source 1..20: mol_type = other DNA
agagtgcaggtgaccacagc

SEQ ID NO: 201781 - DNA, 20 bp, synthetic construct
  source 1..20: mol_type = other DNA
cagagtgcaggtgaccacag

SEQ ID NO: 201782 - DNA, 20 bp, synthetic construct
  source 1..20: mol_type = other DNA
ccagagtgcaggtgaccaca

SEQ ID NO: 201783 - DNA, 20 bp, synthetic construct
  source 1..20: mol_type = other DNA
gccagagtgcaggtgaccac

SEQ ID NO: 201784 - DNA, 20 bp, synthetic construct
  source 1..20: mol_type = other DNA
agccagagtgcaggtgacca

SEQ ID NO: 201785 - DNA, 20 bp, synthetic construct
  source 1..20: mol_type = other DNA
cagccagagtgcaggtgacc

SEQ ID NO: 201786 - DNA, 20 bp, synthetic construct
  source 1..20: mol_type = other DNA
gcagccagagtgcaggtgac

SEQ ID NO: 201787 - DNA, 20 bp, synthetic construct
  source 1..20: mol_type = other DNA
ggcagccagagtgcaggtga

SEQ ID NO: 201788 - DNA, 20 bp, synthetic construct
  source 1..20: mol_type = other DNA
aggcagccagagtgcaggtg

SEQ ID NO: 201789 - DNA, 20 bp, synthetic construct
  source 1..20: mol_type = other DNA
taggcagccagagtgcaggt

SEQ ID NO: 201790 - DNA, 20 bp, synthetic construct
  source 1..20: mol_type = other DNA
gtaggcagccagagtgcagg

SEQ ID NO: 201791 - DNA, 20 bp, synthetic construct
  source 1..20: mol_type = other DNA
ggtaggcagccagagtgcag

SEQ ID NO: 201792 - DNA, 20 bp, synthetic construct
  source 1..20: mol_type = other DNA
aggtaggcagccagagtgca

SEQ ID NO: 201793 - DNA, 20 bp, synthetic construct
  source 1..20: mol_type = other DNA
aaggtaggcagccagagtgc

SEQ ID NO: 201794 - DNA, 20 bp, synthetic construct
  source 1..20: mol_type = other DNA
taaggtaggcagccagagtg

SEQ ID NO: 201795 - DNA, 20 bp, synthetic construct
  source 1..20: mol_type = other DNA
ttaaggtaggcagccagagt

SEQ ID NO: 201796 - DNA, 20 bp, synthetic construct
  source 1..20: mol_type = other DNA
gttaaggtaggcagccagag

SEQ ID NO: 201797 - DNA, 20 bp, synthetic construct
  source 1..20: mol_type = other DNA
agttaaggtaggcagccaga

SEQ ID NO: 201798 - DNA, 20 bp, synthetic construct
  source 1..20: mol_type = other DNA
tagttaaggtaggcagccag

SEQ ID NO: 201799 - DNA, 20 bp, synthetic construct
  source 1..20: mol_type = other DNA
gtagttaaggtaggcagcca

SEQ ID NO: 201800 - DNA, 20 bp, synthetic construct
  source 1..20: mol_type = other DNA
tgtagttaaggtaggcagcc

SEQ ID NO: 201801 - DNA, 20 bp, synthetic construct
  source 1..20: mol_type = other DNA
gtgtagttaaggtaggcagc

SEQ ID NO: 201802 - DNA, 20 bp, synthetic construct
  source 1..20: mol_type = other DNA
tgtgtagttaaggtaggcag

SEQ ID NO: 201803 - DNA, 20 bp, synthetic construct
  source 1..20: mol_type = other DNA
atgtgtagttaaggtaggca

SEQ ID NO: 201804 - DNA, 20 bp, synthetic construct
  source 1..20: mol_type = other DNA
aatgtgtagttaaggtaggc

SEQ ID NO: 201805 - DNA, 20 bp, synthetic construct
  source 1..20: mol_type = other DNA
taatgtgtagttaaggtagg

SEQ ID NO: 201806 - DNA, 20 bp, synthetic construct
  source 1..20: mol_type = other DNA
ctaatgtgtagttaaggtag

SEQ ID NO: 201807 - DNA, 20 bp, synthetic construct
  source 1..20: mol_type = other DNA
tctaatgtgtagttaaggta

SEQ ID NO: 201808 - DNA, 20 bp, synthetic construct
  source 1..20: mol_type = other DNA
ttctaatgtgtagttaaggt

SEQ ID NO: 201809 - DNA, 20 bp, synthetic construct
  source 1..20: mol_type = other DNA
attctaatgtgtagttaagg

SEQ ID NO: 201810 - DNA, 20 bp, synthetic construct
  source 1..20: mol_type = other DNA
gattctaatgtgtagttaag

SEQ ID NO: 201811 - DNA, 20 bp, synthetic construct
  source 1..20: mol_type = other DNA
tgattctaatgtgtagttaa

SEQ ID NO: 201812 - DNA, 20 bp, synthetic construct
  source 1..20: mol_type = other DNA
gtgattctaatgtgtagtta

SEQ ID NO: 201813 - DNA, 20 bp, synthetic construct
  source 1..20: mol_type = other DNA
ggtgattctaatgtgtagtt

SEQ ID NO: 201814 - DNA, 20 bp, synthetic construct
  source 1..20: mol_type = other DNA
aggtgattctaatgtgtagt

SEQ ID NO: 201815 - DNA, 20 bp, synthetic construct
  source 1..20: mol_type = other DNA
caggtgattctaatgtgtag

SEQ ID NO: 201816 - DNA, 20 bp, synthetic construct
  source 1..20: mol_type = other DNA
tcaggtgattctaatgtgta

SEQ ID NO: 201817 - DNA, 20 bp, synthetic construct
  source 1..20: mol_type = other DNA
ctcaggtgattctaatgtgt

SEQ ID NO: 201818 - DNA, 20 bp, synthetic construct
  source 1..20: mol_type = other DNA
cctcaggtgattctaatgtg

SEQ ID NO: 201819 - DNA, 20 bp, synthetic construct
  source 1..20: mol_type = other DNA
tcctcaggtgattctaatgt

SEQ ID NO: 201820 - DNA, 20 bp, synthetic construct
  source 1..20: mol_type = other DNA
ctcctcaggtgattctaatg

SEQ ID NO: 201821 - DNA, 20 bp, synthetic construct
  source 1..20: mol_type = other DNA
gctcctcaggtgattctaat

SEQ ID NO: 201822 - DNA, 20 bp, synthetic construct
  source 1..20: mol_type = other DNA
agctcctcaggtgattctaa

SEQ ID NO: 201823 - DNA, 20 bp, synthetic construct
  source 1..20: mol_type = other DNA
aagctcctcaggtgattcta

SEQ ID NO: 201824 - DNA, 20 bp, synthetic construct
  source 1..20: mol_type = other DNA
aaagctcctcaggtgattct

SEQ ID NO: 201825 - DNA, 20 bp, synthetic construct
  source 1..20: mol_type = other DNA
aaaagctcctcaggtgattc

SEQ ID NO: 201826 - DNA, 20 bp, synthetic construct
  source 1..20: mol_type = other DNA
taaaagctcctcaggtgatt

SEQ ID NO: 201827 - DNA, 20 bp, synthetic construct
  source 1..20: mol_type = other DNA
ttaaaagctcctcaggtgat

SEQ ID NO: 201828 - DNA, 20 bp, synthetic construct
  source 1..20: mol_type = other DNA
tttaaaagctcctcaggtga

SEQ ID NO: 201829 - DNA, 20 bp, synthetic construct
  source 1..20: mol_type = other DNA
ctttaaaagctcctcaggtg

SEQ ID NO: 201830 - DNA, 20 bp, synthetic construct
  source 1..20: mol_type = other DNA
gctttaaaagctcctcaggt

SEQ ID NO: 201831 - DNA, 20 bp, synthetic construct
  source 1..20: mol_type = other DNA
ggctttaaaagctcctcagg

SEQ ID NO: 201832 - DNA, 20 bp, synthetic construct
  source 1..20: mol_type = other DNA
tggctttaaaagctcctcag

SEQ ID NO: 201833 - DNA, 20 bp, synthetic construct
  source 1..20: mol_type = other DNA
gtggctttaaaagctcctca

SEQ ID NO: 201834 - DNA, 20 bp, synthetic construct
  source 1..20: mol_type = other DNA
tgtggctttaaaagctcctc

SEQ ID NO: 201835 - DNA, 20 bp, synthetic construct
  source 1..20: mol_type = other DNA
ttgtggctttaaaagctcct

SEQ ID NO: 201836 - DNA, 20 bp, synthetic construct
  source 1..20: mol_type = other DNA
attgtggctttaaaagctcc

SEQ ID NO: 201837 - DNA, 20 bp, synthetic construct
  source 1..20: mol_type = other DNA
cattgtggctttaaaagctc

SEQ ID NO: 201838 - DNA, 20 bp, synthetic construct
  source 1..20: mol_type = other DNA
gcattgtggctttaaaagct

SEQ ID NO: 201839 - DNA, 20 bp, synthetic construct
  source 1..20: mol_type = other DNA
tgcattgtggctttaaaagc

SEQ ID NO: 201840 - DNA, 20 bp, synthetic construct
  source 1..20: mol_type = other DNA
ttgcattgtggctttaaaag

SEQ ID NO: 201841 - DNA, 20 bp, synthetic construct
  source 1..20: mol_type = other DNA
cttgcattgtggctttaaaa

SEQ ID NO: 201842 - DNA, 20 bp, synthetic construct
  source 1..20: mol_type = other DNA
tcttgcattgtggctttaaa

SEQ ID NO: 201843 - DNA, 20 bp, synthetic construct
  source 1..20: mol_type = other DNA
gtcttgcattgtggctttaa

SEQ ID NO: 201844 - DNA, 20 bp, synthetic construct
  source 1..20: mol_type = other DNA
agtcttgcattgtggcttta

SEQ ID NO: 201845 - DNA, 20 bp, synthetic construct
  source 1..20: mol_type = other DNA
gagtcttgcattgtggcttt

SEQ ID NO: 201846 - DNA, 20 bp, synthetic construct
  source 1..20: mol_type = other DNA
ggagtcttgcattgtggctt

SEQ ID NO: 201847 - DNA, 20 bp, synthetic construct
  source 1..20: mol_type = other DNA
tggagtcttgcattgtggct

SEQ ID NO: 201848 - DNA, 20 bp, synthetic construct
  source 1..20: mol_type = other DNA
gtggagtcttgcattgtggc

SEQ ID NO: 201849 - DNA, 20 bp, synthetic construct
  source 1..20: mol_type = other DNA
ggtggagtcttgcattgtgg

SEQ ID NO: 201850 - DNA, 20 bp, synthetic construct
  source 1..20: mol_type = other DNA
gggtggagtcttgcattgtg

SEQ ID NO: 201851 - DNA, 20 bp, synthetic construct
  source 1..20: mol_type = other DNA
agggtggagtcttgcattgt

SEQ ID NO: 201852 - DNA, 20 bp, synthetic construct
  source 1..20: mol_type = other DNA
tagggtggagtcttgcattg

SEQ ID NO: 201853 - DNA, 20 bp, synthetic construct
  source 1..20: mol_type = other DNA
ctagggtggagtcttgcatt

SEQ ID NO: 201854 - DNA, 20 bp, synthetic construct
  source 1..20: mol_type = other DNA
cctagggtggagtcttgcat

SEQ ID NO: 201855 - DNA, 20 bp, synthetic construct
  source 1..20: mol_type = other DNA
gcctagggtggagtcttgca

SEQ ID NO: 201856 - DNA, 20 bp, synthetic construct
  source 1..20: mol_type = other DNA
ggcctagggtggagtcttgc

SEQ ID NO: 201857 - DNA, 20 bp, synthetic construct
  source 1..20: mol_type = other DNA
tggcctagggtggagtcttg

SEQ ID NO: 201858 - DNA, 20 bp, synthetic construct
  source 1..20: mol_type = other DNA
ttggcctagggtggagtctt

SEQ ID NO: 201859 - DNA, 20 bp, synthetic construct
  source 1..20: mol_type = other DNA
attggcctagggtggagtct

SEQ ID NO: 201860 - DNA, 20 bp, synthetic construct
  source 1..20: mol_type = other DNA
aattggcctagggtggagtc

SEQ ID NO: 201861 - DNA, 20 bp, synthetic construct
  source 1..20: mol_type = other DNA
caattggcctagggtggagt

SEQ ID NO: 201862 - DNA, 20 bp, synthetic construct
  source 1..20: mol_type = other DNA
ccaattggcctagggtggag

SEQ ID NO: 201863 - DNA, 20 bp, synthetic construct
  source 1..20: mol_type = other DNA
tccaattggcctagggtgga

SEQ ID NO: 201864 - DNA, 20 bp, synthetic construct
  source 1..20: mol_type = other DNA
atccaattggcctagggtgg

SEQ ID NO: 201865 - DNA, 20 bp, synthetic construct
  source 1..20: mol_type = other DNA
gatccaattggcctagggtg

SEQ ID NO: 201866 - DNA, 20 bp, synthetic construct
  source 1..20: mol_type = other DNA
ggatccaattggcctagggt

SEQ ID NO: 201867 - DNA, 20 bp, synthetic construct
  source 1..20: mol_type = other DNA
tggatccaattggcctaggg

SEQ ID NO: 201868 - DNA, 20 bp, synthetic construct
  source 1..20: mol_type = other DNA
ttggatccaattggcctagg

SEQ ID NO: 201869 - DNA, 20 bp, synthetic construct
  source 1..20: mol_type = other DNA
tttggatccaattggcctag

SEQ ID NO: 201870 - DNA, 20 bp, synthetic construct
  source 1..20: mol_type = other DNA
atttggatccaattggccta

SEQ ID NO: 201871 - DNA, 20 bp, synthetic construct
  source 1..20: mol_type = other DNA
gatttggatccaattggcct

SEQ ID NO: 201872 - DNA, 20 bp, synthetic construct
  source 1..20: mol_type = other DNA
ggatttggatccaattggcc

SEQ ID NO: 201873 - DNA, 20 bp, synthetic construct
  source 1..20: mol_type = other DNA
gggatttggatccaattggc

SEQ ID NO: 201874 - DNA, 20 bp, synthetic construct
  source 1..20: mol_type = other DNA
agggatttggatccaattgg

SEQ ID NO: 201875 - DNA, 20 bp, synthetic construct
  source 1..20: mol_type = other DNA
cagggatttggatccaattg

SEQ ID NO: 201876 - DNA, 20 bp, synthetic construct
  source 1..20: mol_type = other DNA
ccagggatttggatccaatt

SEQ ID NO: 201877 - DNA, 20 bp, synthetic construct
  source 1..20: mol_type = other DNA
cccagggatttggatccaat

SEQ ID NO: 201878 - DNA, 20 bp, synthetic construct
  source 1..20: mol_type = other DNA
ccccagggatttggatccaa

SEQ ID NO: 201879 - DNA, 20 bp, synthetic construct
  source 1..20: mol_type = other DNA
accccagggatttggatcca

SEQ ID NO: 201880 - DNA, 20 bp, synthetic construct
  source 1..20: mol_type = other DNA
taccccagggatttggatcc

SEQ ID NO: 201881 - DNA, 20 bp, synthetic construct
  source 1..20: mol_type = other DNA
ctaccccagggatttggatc

SEQ ID NO: 201882 - DNA, 20 bp, synthetic construct
  source 1..20: mol_type = other DNA
cctaccccagggatttggat

SEQ ID NO: 201883 - DNA, 20 bp, synthetic construct
  source 1..20: mol_type = other DNA
ccctaccccagggatttgga

SEQ ID NO: 201884 - DNA, 20 bp, synthetic construct
  source 1..20: mol_type = other DNA
gccctaccccagggatttgg

SEQ ID NO: 201885 - DNA, 20 bp, synthetic construct
  source 1..20: mol_type = other DNA
ggccctaccccagggatttg

SEQ ID NO: 201886 - DNA, 20 bp, synthetic construct
  source 1..20: mol_type = other DNA
tggccctaccccagggattt

SEQ ID NO: 201887 - DNA, 20 bp, synthetic construct
  source 1..20: mol_type = other DNA
ctggccctaccccagggatt

SEQ ID NO: 201888 - DNA, 20 bp, synthetic construct
  source 1..20: mol_type = other DNA
tctggccctaccccagggat

SEQ ID NO: 201889 - DNA, 20 bp, synthetic construct
  source 1..20: mol_type = other DNA
gtctggccctaccccaggga

SEQ ID NO: 201890 - DNA, 20 bp, synthetic construct
  source 1..20: mol_type = other DNA
tgtctggccctaccccaggg

SEQ ID NO: 201891 - DNA, 20 bp, synthetic construct
  source 1..20: mol_type = other DNA
atgtctggccctaccccagg

SEQ ID NO: 201892 - DNA, 20 bp, synthetic construct
  source 1..20: mol_type = other DNA
gatgtctggccctaccccag

SEQ ID NO: 201893 - DNA, 20 bp, synthetic construct
  source 1..20: mol_type = other DNA
tgatgtctggccctacccca

SEQ ID NO: 201894 - DNA, 20 bp, synthetic construct
  source 1..20: mol_type = other DNA
ctgatgtctggccctacccc

SEQ ID NO: 201895 - DNA, 20 bp, synthetic construct
  source 1..20: mol_type = other DNA
actgatgtctggccctaccc

SEQ ID NO: 201896 - DNA, 20 bp, synthetic construct
  source 1..20: mol_type = other DNA
cactgatgtctggccctacc

SEQ ID NO: 201897 - DNA, 20 bp, synthetic construct
  source 1..20: mol_type = other DNA
ccactgatgtctggccctac

SEQ ID NO: 201898 - DNA, 20 bp, synthetic construct
  source 1..20: mol_type = other DNA
tccactgatgtctggcccta

SEQ ID NO: 201899 - DNA, 20 bp, synthetic construct
  source 1..20: mol_type = other DNA
ctccactgatgtctggccct

SEQ ID NO: 201900 - DNA, 20 bp, synthetic construct
  source 1..20: mol_type = other DNA
actccactgatgtctggccc

SEQ ID NO: 201901 - DNA, 20 bp, synthetic construct
  source 1..20: mol_type = other DNA
aactccactgatgtctggcc

SEQ ID NO: 201902 - DNA, 20 bp, synthetic construct
  source 1..20: mol_type = other DNA
taactccactgatgtctggc

SEQ ID NO: 201903 - DNA, 20 bp, synthetic construct
  source 1..20: mol_type = other DNA
ataactccactgatgtctgg

SEQ ID NO: 201904 - DNA, 20 bp, synthetic construct
  source 1..20: mol_type = other DNA
tataactccactgatgtctg

SEQ ID NO: 201905 - DNA, 20 bp, synthetic construct
  source 1..20: mol_type = other DNA
atataactccactgatgtct

SEQ ID NO: 201906 - DNA, 20 bp, synthetic construct
  source 1..20: mol_type = other DNA
tatataactccactgatgtc

SEQ ID NO: 201907 - DNA, 20 bp, synthetic construct
  source 1..20: mol_type = other DNA
atatataactccactgatgt

SEQ ID NO: 201908 - DNA, 20 bp, synthetic construct
  source 1..20: mol_type = other DNA
tatatataactccactgatg

SEQ ID NO: 201909 - DNA, 20 bp, synthetic construct
  source 1..20: mol_type = other DNA
gtatatataactccactgat

SEQ ID NO: 201910 - DNA, 20 bp, synthetic construct
  source 1..20: mol_type = other DNA
tgtatatataactccactga

SEQ ID NO: 201911 - DNA, 20 bp, synthetic construct
  source 1..20: mol_type = other DNA
atgtatatataactccactg

SEQ ID NO: 201912 - DNA, 20 bp, synthetic construct
  source 1..20: mol_type = other DNA
tatgtatatataactccact

SEQ ID NO: 201913 - DNA, 20 bp, synthetic construct
  source 1..20: mol_type = other DNA
atatgtatatataactccac

SEQ ID NO: 201914 - DNA, 20 bp, synthetic construct
  source 1..20: mol_type = other DNA
tatatgtatatataactcca

SEQ ID NO: 201915 - DNA, 20 bp, synthetic construct
  source 1..20: mol_type = other DNA
atatatgtatatataactcc

SEQ ID NO: 201916 - DNA, 20 bp, synthetic construct
  source 1..20: mol_type = other DNA
tatatatgtatatataactc

SEQ ID NO: 201917 - DNA, 20 bp, synthetic construct
  source 1..20: mol_type = other DNA
atatatatgtatatataact

SEQ ID NO: 201918 - DNA, 20 bp, synthetic construct
  source 1..20: mol_type = other DNA
tatatatatgtatatataac

SEQ ID NO: 201919 - DNA, 20 bp, synthetic construct
  source 1..20: mol_type = other DNA
atatatatatgtatatataa

SEQ ID NO: 201920 - DNA, 20 bp, synthetic construct
  source 1..20: mol_type = other DNA
aatatatatatgtatatata

SEQ ID NO: 201921 - DNA, 20 bp, synthetic construct
  source 1..20: mol_type = other DNA
aaatatatatatgtatatat

SEQ ID NO: 201922 - DNA, 20 bp, synthetic construct
  source 1..20: mol_type = other DNA
aaaatatatatatgtatata

SEQ ID NO: 201923 - DNA, 20 bp, synthetic construct
  source 1..20: mol_type = other DNA
caaaatatatatatgtatat

SEQ ID NO: 201924 - DNA, 20 bp, synthetic construct
  source 1..20: mol_type = other DNA
acaaaatatatatatgtata

SEQ ID NO: 201925 - DNA, 20 bp, synthetic construct
  source 1..20: mol_type = other DNA
aacaaaatatatatatgtat

SEQ ID NO: 201926 - DNA, 20 bp, synthetic construct
  source 1..20: mol_type = other DNA
aaacaaaatatatatatgta

SEQ ID NO: 201927 - DNA, 20 bp, synthetic construct
  source 1..20: mol_type = other DNA
caaacaaaatatatatatgt

SEQ ID NO: 201928 - DNA, 20 bp, synthetic construct
  source 1..20: mol_type = other DNA
acaaacaaaatatatatatg

SEQ ID NO: 201929 - DNA, 20 bp, synthetic construct
  source 1..20: mol_type = other DNA
aacaaacaaaatatatatat

SEQ ID NO: 201930 - DNA, 20 bp, synthetic construct
  source 1..20: mol_type = other DNA
aaacaaacaaaatatatata

SEQ ID NO: 201931 - DNA, 20 bp, synthetic construct
  source 1..20: mol_type = other DNA
caaacaaacaaaatatatat

SEQ ID NO: 201932 - DNA, 20 bp, synthetic construct
  source 1..20: mol_type = other DNA
acaaacaaacaaaatatata

SEQ ID NO: 201933 - DNA, 20 bp, synthetic construct
  source 1..20: mol_type = other DNA
aacaaacaaacaaaatatat

SEQ ID NO: 201934 - DNA, 20 bp, synthetic construct
  source 1..20: mol_type = other DNA
aaacaaacaaacaaaatata

SEQ ID NO: 201935 - DNA, 20 bp, synthetic construct
  source 1..20: mol_type = other DNA
caaacaaacaaacaaaatat

SEQ ID NO: 201936 - DNA, 20 bp, synthetic construct
  source 1..20: mol_type = other DNA
acaaacaaacaaacaaaata

SEQ ID NO: 201937 - DNA, 20 bp, synthetic construct
  source 1..20: mol_type = other DNA
aacaaacaaacaaacaaaat

SEQ ID NO: 201938 - DNA, 20 bp, synthetic construct
  source 1..20: mol_type = other DNA
aaacaaacaaacaaacaaaa

SEQ ID NO: 201939 - DNA, 20 bp, synthetic construct
  source 1..20: mol_type = other DNA
caaacaaacaaacaaacaaa

SEQ ID NO: 201940 - DNA, 20 bp, synthetic construct
  source 1..20: mol_type = other DNA
acaaacaaacaaacaaacaa

SEQ ID NO: 201941 - DNA, 20 bp, synthetic construct
  source 1..20: mol_type = other DNA
aacaaacaaacaaacaaaca

SEQ ID NO: 201942 - DNA, 20 bp, synthetic construct
  source 1..20: mol_type = other DNA
aaacaaacaaacaaacaaac

SEQ ID NO: 201943 - DNA, 20 bp, synthetic construct
  source 1..20: mol_type = other DNA
aaaacaaacaaacaaacaaa

SEQ ID NO: 201944 - DNA, 20 bp, synthetic construct
  source 1..20: mol_type = other DNA
aaaaacaaacaaacaaacaa

SEQ ID NO: 201945 - DNA, 20 bp, synthetic construct
  source 1..20: mol_type = other DNA
aaaaaacaaacaaacaaaca

SEQ ID NO: 201946 - DNA, 20 bp, synthetic construct
  source 1..20: mol_type = other DNA
caaaaaacaaacaaacaaac

SEQ ID NO: 201947 - DNA, 20 bp, synthetic construct
  source 1..20: mol_type = other DNA
tcaaaaaacaaacaaacaaa

SEQ ID NO: 201948 - DNA, 20 bp, synthetic construct
  source 1..20: mol_type = other DNA
ctcaaaaaacaaacaaacaa

SEQ ID NO: 201949 - DNA, 20 bp, synthetic construct
  source 1..20: mol_type = other DNA
tctcaaaaaacaaacaaaca

SEQ ID NO: 201950 - DNA, 20 bp, synthetic construct
  source 1..20: mol_type = other DNA
gtctcaaaaaacaaacaaac

SEQ ID NO: 201951 - DNA, 20 bp, synthetic construct
  source 1..20: mol_type = other DNA
tgtctcaaaaaacaaacaaa

SEQ ID NO: 201952 - DNA, 20 bp, synthetic construct
  source 1..20: mol_type = other DNA
ctgtctcaaaaaacaaacaa

SEQ ID NO: 201953 - DNA, 20 bp, synthetic construct
  source 1..20: mol_type = other DNA
tctgtctcaaaaaacaaaca

SEQ ID NO: 201954 - DNA, 20 bp, synthetic construct
  source 1..20: mol_type = other DNA
ctctgtctcaaaaaacaaac

SEQ ID NO: 201955 - DNA, 20 bp, synthetic construct
  source 1..20: mol_type = other DNA
actctgtctcaaaaaacaaa

SEQ ID NO: 201956 - DNA, 20 bp, synthetic construct
  source 1..20: mol_type = other DNA
aactctgtctcaaaaaacaa

SEQ ID NO: 201957 - DNA, 20 bp, synthetic construct
  source 1..20: mol_type = other DNA
aaactctgtctcaaaaaaca

SEQ ID NO: 201958 - DNA, 20 bp, synthetic construct
  source 1..20: mol_type = other DNA
aaaactctgtctcaaaaaac

SEQ ID NO: 201959 - DNA, 20 bp, synthetic construct
  source 1..20: mol_type = other DNA
caaaactctgtctcaaaaaa

SEQ ID NO: 201960 - DNA, 20 bp, synthetic construct
  source 1..20: mol_type = other DNA
gcaaaactctgtctcaaaaa

SEQ ID NO: 201961 - DNA, 20 bp, synthetic construct
  source 1..20: mol_type = other DNA
agcaaaactctgtctcaaaa

SEQ ID NO: 201962 - DNA, 20 bp, synthetic construct
  source 1..20: mol_type = other DNA
gagcaaaactctgtctcaaa

SEQ ID NO: 201963 - DNA, 20 bp, synthetic construct
  source 1..20: mol_type = other DNA
agagcaaaactctgtctcaa

SEQ ID NO: 201964 - DNA, 20 bp, synthetic construct
  source 1..20: mol_type = other DNA
cagagcaaaactctgtctca

SEQ ID NO: 201965 - DNA, 20 bp, synthetic construct
  source 1..20: mol_type = other DNA
acagagcaaaactctgtctc

SEQ ID NO: 201966 - DNA, 20 bp, synthetic construct
  source 1..20: mol_type = other DNA
gacagagcaaaactctgtct

SEQ ID NO: 201967 - DNA, 20 bp, synthetic construct
  source 1..20: mol_type = other DNA
tgacagagcaaaactctgtc

SEQ ID NO: 201968 - DNA, 20 bp, synthetic construct
  source 1..20: mol_type = other DNA
gtgacagagcaaaactctgt

SEQ ID NO: 201969 - DNA, 20 bp, synthetic construct
  source 1..20: mol_type = other DNA
ggtgacagagcaaaactctg

SEQ ID NO: 201970 - DNA, 20 bp, synthetic construct
  source 1..20: mol_type = other DNA
gggtgacagagcaaaactct

SEQ ID NO: 201971 - DNA, 20 bp, synthetic construct
  source 1..20: mol_type = other DNA
tgggtgacagagcaaaactc

SEQ ID NO: 201972 - DNA, 20 bp, synthetic construct
  source 1..20: mol_type = other DNA
ctgggtgacagagcaaaact

SEQ ID NO: 201973 - DNA, 20 bp, synthetic construct
  source 1..20: mol_type = other DNA
cctgggtgacagagcaaaac

SEQ ID NO: 201974 - DNA, 20 bp, synthetic construct
  source 1..20: mol_type = other DNA
gcctgggtgacagagcaaaa

SEQ ID NO: 201975 - DNA, 20 bp, synthetic construct
  source 1..20: mol_type = other DNA
agcctgggtgacagagcaaa

SEQ ID NO: 201976 - DNA, 20 bp, synthetic construct
  source 1..20: mol_type = other DNA
cagcctgggtgacagagcaa

SEQ ID NO: 201977 - DNA, 20 bp, synthetic construct
  source 1..20: mol_type = other DNA
ccagcctgggtgacagagca

SEQ ID NO: 201978 - DNA, 20 bp, synthetic construct
  source 1..20: mol_type = other DNA
tccagcctgggtgacagagc

SEQ ID NO: 201979 - DNA, 20 bp, synthetic construct
  source 1..20: mol_type = other DNA
ctccagcctgggtgacagag

SEQ ID NO: 201980 - DNA, 20 bp, synthetic construct
  source 1..20: mol_type = other DNA
actccagcctgggtgacaga

SEQ ID NO: 201981 - DNA, 20 bp, synthetic construct
  source 1..20: mol_type = other DNA
cactccagcctgggtgacag

SEQ ID NO: 201982 - DNA, 20 bp, synthetic construct
  source 1..20: mol_type = other DNA
gcactccagcctgggtgaca

SEQ ID NO: 201983 - DNA, 20 bp, synthetic construct
  source 1..20: mol_type = other DNA
tgcactccagcctgggtgac

SEQ ID NO: 201984 - DNA, 20 bp, synthetic construct
  source 1..20: mol_type = other DNA
ctgcactccagcctgggtga

SEQ ID NO: 201985 - DNA, 20 bp, synthetic construct
  source 1..20: mol_type = other DNA
actgcactccagcctgggtg

SEQ ID NO: 201986 - DNA, 20 bp, synthetic construct
  source 1..20: mol_type = other DNA
cactgcactccagcctgggt

SEQ ID NO: 201987 - DNA, 20 bp, synthetic construct
  source 1..20: mol_type = other DNA
ccactgcactccagcctggg

SEQ ID NO: 201988 - DNA, 20 bp, synthetic construct
  source 1..20: mol_type = other DNA
gccactgcactccagcctgg

SEQ ID NO: 201989 - DNA, 20 bp, synthetic construct
  source 1..20: mol_type = other DNA
cgccactgcactccagcctg

SEQ ID NO: 201990 - DNA, 20 bp, synthetic construct
  source 1..20: mol_type = other DNA
gcgccactgcactccagcct

SEQ ID NO: 201991 - DNA, 20 bp, synthetic construct
  source 1..20: mol_type = other DNA
cgcgccactgcactccagcc

SEQ ID NO: 201992 - DNA, 20 bp, synthetic construct
  source 1..20: mol_type = other DNA
tcgcgccactgcactccagc

SEQ ID NO: 201993 - DNA, 20 bp, synthetic construct
  source 1..20: mol_type = other DNA
atcgcgccactgcactccag

SEQ ID NO: 201994 - DNA, 20 bp, synthetic construct
  source 1..20: mol_type = other DNA
gatcgcgccactgcactcca

SEQ ID NO: 201995 - DNA, 20 bp, synthetic construct
  source 1..20: mol_type = other DNA
agatcgcgccactgcactcc

SEQ ID NO: 201996 - DNA, 20 bp, synthetic construct
  source 1..20: mol_type = other DNA
aagatcgcgccactgcactc

SEQ ID NO: 201997 - DNA, 20 bp, synthetic construct
  source 1..20: mol_type = other DNA
caagatcgcgccactgcact

SEQ ID NO: 201998 - DNA, 20 bp, synthetic construct
  source 1..20: mol_type = other DNA
ccaagatcgcgccactgcac

SEQ ID NO: 201999 - DNA, 20 bp, synthetic construct
  source 1..20: mol_type = other DNA
gccaagatcgcgccactgca

SEQ ID NO: 202000 - DNA, 20 bp, synthetic construct
  source 1..20: mol_type = other DNA
agccaagatcgcgccactgc

SEQ ID NO: 202001 - DNA, 20 bp, synthetic construct
  source 1..20: mol_type = other DNA
gagccaagatcgcgccactg

SEQ ID NO: 202002 - DNA, 20 bp, synthetic construct
  source 1..20: mol_type = other DNA
tgagccaagatcgcgccact

SEQ ID NO: 202003 - DNA, 20 bp, synthetic construct
  source 1..20: mol_type = other DNA
gtgagccaagatcgcgccac

SEQ ID NO: 202004 - DNA, 20 bp, synthetic construct
  source 1..20: mol_type = other DNA
agtgagccaagatcgcgcca

SEQ ID NO: 202005 - DNA, 20 bp, synthetic construct
  source 1..20: mol_type = other DNA
cagtgagccaagatcgcgcc

SEQ ID NO: 202006 - DNA, 20 bp, synthetic construct
  source 1..20: mol_type = other DNA
gcagtgagccaagatcgcgc

SEQ ID NO: 202007 - DNA, 20 bp, synthetic construct
  source 1..20: mol_type = other DNA
tgcagtgagccaagatcgcg

SEQ ID NO: 202008 - DNA, 20 bp, synthetic construct
  source 1..20: mol_type = other DNA
ttgcagtgagccaagatcgc

SEQ ID NO: 202009 - DNA, 20 bp, synthetic construct
  source 1..20: mol_type = other DNA
cttgcagtgagccaagatcg

SEQ ID NO: 202010 - DNA, 20 bp, synthetic construct
  source 1..20: mol_type = other DNA
gcttgcagtgagccaagatc

SEQ ID NO: 202011 - DNA, 20 bp, synthetic construct
  source 1..20: mol_type = other DNA
agcttgcagtgagccaagat

SEQ ID NO: 202012 - DNA, 20 bp, synthetic construct
  source 1..20: mol_type = other DNA
gagcttgcagtgagccaaga

SEQ ID NO: 202013 - DNA, 20 bp, synthetic construct
  source 1..20: mol_type = other DNA
ggagcttgcagtgagccaag

SEQ ID NO: 202014 - DNA, 20 bp, synthetic construct
  source 1..20: mol_type = other DNA
cggagcttgcagtgagccaa

SEQ ID NO: 202015 - DNA, 20 bp, synthetic construct
  source 1..20: mol_type = other DNA
gcggagcttgcagtgagcca

SEQ ID NO: 202016 - DNA, 20 bp, synthetic construct
  source 1..20: mol_type = other DNA
ggcggagcttgcagtgagcc

SEQ ID NO: 202017 - DNA, 20 bp, synthetic construct
  source 1..20: mol_type = other DNA
aggcggagcttgcagtgagc

SEQ ID NO: 202018 - DNA, 20 bp, synthetic construct
  source 1..20: mol_type = other DNA
gaggcggagcttgcagtgag

SEQ ID NO: 202019 - DNA, 20 bp, synthetic construct
  source 1..20: mol_type = other DNA
agaggcggagcttgcagtga

SEQ ID NO: 202020 - DNA, 20 bp, synthetic construct
  source 1..20: mol_type = other DNA
gagaggcggagcttgcagtg

SEQ ID NO: 202021 - DNA, 20 bp, synthetic construct
  source 1..20: mol_type = other DNA
cgagaggcggagcttgcagt

SEQ ID NO: 202022 - DNA, 20 bp, synthetic construct
  source 1..20: mol_type = other DNA
ccgagaggcggagcttgcag

SEQ ID NO: 202023 - DNA, 20 bp, synthetic construct
  source 1..20: mol_type = other DNA
cccgagaggcggagcttgca

SEQ ID NO: 202024 - DNA, 20 bp, synthetic construct
  source 1..20: mol_type = other DNA
acccgagaggcggagcttgc

SEQ ID NO: 202025 - DNA, 20 bp, synthetic construct
  source 1..20: mol_type = other DNA
aacccgagaggcggagcttg

SEQ ID NO: 202026 - DNA, 20 bp, synthetic construct
  source 1..20: mol_type = other DNA
gaacccgagaggcggagctt

SEQ ID NO: 202027 - DNA, 20 bp, synthetic construct
  source 1..20: mol_type = other DNA
tgaacccgagaggcggagct

SEQ ID NO: 202028 - DNA, 20 bp, synthetic construct
  source 1..20: mol_type = other DNA
gtgaacccgagaggcggagc

SEQ ID NO: 202029 - DNA, 20 bp, synthetic construct
  source 1..20: mol_type = other DNA
tgtgaacccgagaggcggag

SEQ ID NO: 202030 - DNA, 20 bp, synthetic construct
  source 1..20: mol_type = other DNA
gtgtgaacccgagaggcgga

SEQ ID NO: 202031 - DNA, 20 bp, synthetic construct
  source 1..20: mol_type = other DNA
ggtgtgaacccgagaggcgg

SEQ ID NO: 202032 - DNA, 20 bp, synthetic construct
  source 1..20: mol_type = other DNA
tggtgtgaacccgagaggcg

SEQ ID NO: 202033 - DNA, 20 bp, synthetic construct
  source 1..20: mol_type = other DNA
atggtgtgaacccgagaggc

SEQ ID NO: 202034 - DNA, 20 bp, synthetic construct
  source 1..20: mol_type = other DNA
aatggtgtgaacccgagagg

SEQ ID NO: 202035 - DNA, 20 bp, synthetic construct
  source 1..20: mol_type = other DNA
gaatggtgtgaacccgagag

SEQ ID NO: 202036 - DNA, 20 bp, synthetic construct
  source 1..20: mol_type = other DNA
agaatggtgtgaacccgaga

SEQ ID NO: 202037 - DNA, 20 bp, synthetic construct
  source 1..20: mol_type = other DNA
gagaatggtgtgaacccgag

SEQ ID NO: 202038 - DNA, 20 bp, synthetic construct
  source 1..20: mol_type = other DNA
ggagaatggtgtgaacccga

SEQ ID NO: 202039 - DNA, 20 bp, synthetic construct
  source 1..20: mol_type = other DNA
aggagaatggtgtgaacccg

SEQ ID NO: 202040 - DNA, 20 bp, synthetic construct
  source 1..20: mol_type = other DNA
caggagaatggtgtgaaccc

SEQ ID NO: 202041 - DNA, 20 bp, synthetic construct
  source 1..20: mol_type = other DNA
gcaggagaatggtgtgaacc

SEQ ID NO: 202042 - DNA, 20 bp, synthetic construct
  source 1..20: mol_type = other DNA
ggcaggagaatggtgtgaac

SEQ ID NO: 202043 - DNA, 20 bp, synthetic construct
  source 1..20: mol_type = other DNA
aggcaggagaatggtgtgaa

SEQ ID NO: 202044 - DNA, 20 bp, synthetic construct
  source 1..20: mol_type = other DNA
gaggcaggagaatggtgtga

SEQ ID NO: 202045 - DNA, 20 bp, synthetic construct
  source 1..20: mol_type = other DNA
tgaggcaggagaatggtgtg

SEQ ID NO: 202046 - DNA, 20 bp, synthetic construct
  source 1..20: mol_type = other DNA
ctgaggcaggagaatggtgt

SEQ ID NO: 202047 - DNA, 20 bp, synthetic construct
  source 1..20: mol_type = other DNA
gctgaggcaggagaatggtg

SEQ ID NO: 202048 - DNA, 20 bp, synthetic construct
  source 1..20: mol_type = other DNA
ggctgaggcaggagaatggt

SEQ ID NO: 202049 - DNA, 20 bp, synthetic construct
  source 1..20: mol_type = other DNA
aggctgaggcaggagaatgg

SEQ ID NO: 202050 - DNA, 20 bp, synthetic construct
  source 1..20: mol_type = other DNA
gaggctgaggcaggagaatg

SEQ ID NO: 202051 - DNA, 20 bp, synthetic construct
  source 1..20: mol_type = other DNA
ggaggctgaggcaggagaat

SEQ ID NO: 202052 - DNA, 20 bp, synthetic construct
  source 1..20: mol_type = other DNA
aggaggctgaggcaggagaa

SEQ ID NO: 202053 - DNA, 20 bp, synthetic construct
  source 1..20: mol_type = other DNA
caggaggctgaggcaggaga

SEQ ID NO: 202054 - DNA, 20 bp, synthetic construct
  source 1..20: mol_type = other DNA
tcaggaggctgaggcaggag

SEQ ID NO: 202055 - DNA, 20 bp, synthetic construct
  source 1..20: mol_type = other DNA
ctcaggaggctgaggcagga

SEQ ID NO: 202056 - DNA, 20 bp, synthetic construct
  source 1..20: mol_type = other DNA
actcaggaggctgaggcagg

SEQ ID NO: 202057 - DNA, 20 bp, synthetic construct
  source 1..20: mol_type = other DNA
cactcaggaggctgaggcag

SEQ ID NO: 202058 - DNA, 20 bp, synthetic construct
  source 1..20: mol_type = other DNA
ccactcaggaggctgaggca

SEQ ID NO: 202059 - DNA, 20 bp, synthetic construct
  source 1..20: mol_type = other DNA
gccactcaggaggctgaggc

SEQ ID NO: 202060 - DNA, 20 bp, synthetic construct
  source 1..20: mol_type = other DNA
agccactcaggaggctgagg

SEQ ID NO: 202061 - DNA, 20 bp, synthetic construct
  source 1..20: mol_type = other DNA
cagccactcaggaggctgag

SEQ ID NO: 202062 - DNA, 20 bp, synthetic construct
  source 1..20: mol_type = other DNA
ccagccactcaggaggctga

SEQ ID NO: 202063 - DNA, 20 bp, synthetic construct
  source 1..20: mol_type = other DNA
tccagccactcaggaggctg

SEQ ID NO: 202064 - DNA, 20 bp, synthetic construct
  source 1..20: mol_type = other DNA
ttccagccactcaggaggct

SEQ ID NO: 202065 - DNA, 20 bp, synthetic construct
  source 1..20: mol_type = other DNA
gttccagccactcaggaggc

SEQ ID NO: 202066 - DNA, 20 bp, synthetic construct
  source 1..20: mol_type = other DNA
agttccagccactcaggagg

SEQ ID NO: 202067 - DNA, 20 bp, synthetic construct
  source 1..20: mol_type = other DNA
tagttccagccactcaggag

SEQ ID NO: 202068 - DNA, 20 bp, synthetic construct
  source 1..20: mol_type = other DNA
gtagttccagccactcagga

SEQ ID NO: 202069 - DNA, 20 bp, synthetic construct
  source 1..20: mol_type = other DNA
tgtagttccagccactcagg

SEQ ID NO: 202070 - DNA, 20 bp, synthetic construct
  source 1..20: mol_type = other DNA
ttgtagttccagccactcag

SEQ ID NO: 202071 - DNA, 20 bp, synthetic construct
  source 1..20: mol_type = other DNA
cttgtagttccagccactca

SEQ ID NO: 202072 - DNA, 20 bp, synthetic construct
  source 1..20: mol_type = other DNA
acttgtagttccagccactc

SEQ ID NO: 202073 - DNA, 20 bp, synthetic construct
  source 1..20: mol_type = other DNA
cacttgtagttccagccact

SEQ ID NO: 202074 - DNA, 20 bp, synthetic construct
  source 1..20: mol_type = other DNA
gcacttgtagttccagccac

SEQ ID NO: 202075 - DNA, 20 bp, synthetic construct
  source 1..20: mol_type = other DNA
agcacttgtagttccagcca

SEQ ID NO: 202076 - DNA, 20 bp, synthetic construct
  source 1..20: mol_type = other DNA
gagcacttgtagttccagcc

SEQ ID NO: 202077 - DNA, 20 bp, synthetic construct
  source 1..20: mol_type = other DNA
cgagcacttgtagttccagc

SEQ ID NO: 202078 - DNA, 20 bp, synthetic construct
  source 1..20: mol_type = other DNA
gcgagcacttgtagttccag

SEQ ID NO: 202079 - DNA, 20 bp, synthetic construct
  source 1..20: mol_type = other DNA
ggcgagcacttgtagttcca

SEQ ID NO: 202080 - DNA, 20 bp, synthetic construct
  source 1..20: mol_type = other DNA
tggcgagcacttgtagttcc

SEQ ID NO: 202081 - DNA, 20 bp, synthetic construct
  source 1..20: mol_type = other DNA
gtggcgagcacttgtagttc

SEQ ID NO: 202082 - DNA, 20 bp, synthetic construct
  source 1..20: mol_type = other DNA
ggtggcgagcacttgtagtt

SEQ ID NO: 202083 - DNA, 20 bp, synthetic construct
  source 1..20: mol_type = other DNA
tggtggcgagcacttgtagt

SEQ ID NO: 202084 - DNA, 20 bp, synthetic construct
  source 1..20: mol_type = other DNA
gtggtggcgagcacttgtag

SEQ ID NO: 202085 - DNA, 20 bp, synthetic construct
  source 1..20: mol_type = other DNA
cgtggtggcgagcacttgta

SEQ ID NO: 202086 - DNA, 20 bp, synthetic construct
  source 1..20: mol_type = other DNA
gcgtggtggcgagcacttgt

SEQ ID NO: 202087 - DNA, 20 bp, synthetic construct
  source 1..20: mol_type = other DNA
ggcgtggtggcgagcacttg

SEQ ID NO: 202088 - DNA, 20 bp, synthetic construct
  source 1..20: mol_type = other DNA
gggcgtggtggcgagcactt

SEQ ID NO: 202089 - DNA, 20 bp, synthetic construct
  source 1..20: mol_type = other DNA
tgggcgtggtggcgagcact

SEQ ID NO: 202090 - DNA, 20 bp, synthetic construct
  source 1..20: mol_type = other DNA
ctgggcgtggtggcgagcac

SEQ ID NO: 202091 - DNA, 20 bp, synthetic construct
  source 1..20: mol_type = other DNA
gctgggcgtggtggcgagca

SEQ ID NO: 202092 - DNA, 20 bp, synthetic construct
  source 1..20: mol_type = other DNA
agctgggcgtggtggcgagc

SEQ ID NO: 202093 - DNA, 20 bp, synthetic construct
  source 1..20: mol_type = other DNA
tagctgggcgtggtggcgag

SEQ ID NO: 202094 - DNA, 20 bp, synthetic construct
  source 1..20: mol_type = other DNA
ttagctgggcgtggtggcga

SEQ ID NO: 202095 - DNA, 20 bp, synthetic construct
  source 1..20: mol_type = other DNA
attagctgggcgtggtggcg

SEQ ID NO: 202096 - DNA, 20 bp, synthetic construct
  source 1..20: mol_type = other DNA
aattagctgggcgtggtggc

SEQ ID NO: 202097 - DNA, 20 bp, synthetic construct
  source 1..20: mol_type = other DNA
aaattagctgggcgtggtgg

SEQ ID NO: 202098 - DNA, 20 bp, synthetic construct
  source 1..20: mol_type = other DNA
aaaattagctgggcgtggtg

SEQ ID NO: 202099 - DNA, 20 bp, synthetic construct
  source 1..20: mol_type = other DNA
aaaaattagctgggcgtggt

SEQ ID NO: 202100 - DNA, 20 bp, synthetic construct
  source 1..20: mol_type = other DNA
aaaaaattagctgggcgtgg

SEQ ID NO: 202101 - DNA, 20 bp, synthetic construct
  source 1..20: mol_type = other DNA
aaaaaaattagctgggcgtg

SEQ ID NO: 202102 - DNA, 20 bp, synthetic construct
  source 1..20: mol_type = other DNA
caaaaaaattagctgggcgt

SEQ ID NO: 202103 - DNA, 20 bp, synthetic construct
  source 1..20: mol_type = other DNA
acaaaaaaattagctgggcg

SEQ ID NO: 202104 - DNA, 20 bp, synthetic construct
  source 1..20: mol_type = other DNA
cacaaaaaaattagctgggc

SEQ ID NO: 202105 - DNA, 20 bp, synthetic construct
  source 1..20: mol_type = other DNA
acacaaaaaaattagctggg

SEQ ID NO: 202106 - DNA, 20 bp, synthetic construct
  source 1..20: mol_type = other DNA
aacacaaaaaaattagctgg

SEQ ID NO: 202107 - DNA, 20 bp, synthetic construct
  source 1..20: mol_type = other DNA
aaacacaaaaaaattagctg

SEQ ID NO: 202108 - DNA, 20 bp, synthetic construct
  source 1..20: mol_type = other DNA
aaaacacaaaaaaattagct

SEQ ID NO: 202109 - DNA, 20 bp, synthetic construct
  source 1..20: mol_type = other DNA
aaaaacacaaaaaaattagc

SEQ ID NO: 202110 - DNA, 20 bp, synthetic construct
  source 1..20: mol_type = other DNA
taaaaacacaaaaaaattag

SEQ ID NO: 202111 - DNA, 20 bp, synthetic construct
  source 1..20: mol_type = other DNA
ctaaaaacacaaaaaaatta

SEQ ID NO: 202112 - DNA, 20 bp, synthetic construct
  source 1..20: mol_type = other DNA
actaaaaacacaaaaaaatt

SEQ ID NO: 202113 - DNA, 20 bp, synthetic construct
  source 1..20: mol_type = other DNA
tactaaaaacacaaaaaaat

SEQ ID NO: 202114 - DNA, 20 bp, synthetic construct
  source 1..20: mol_type = other DNA
ctactaaaaacacaaaaaaa

SEQ ID NO: 202115 - DNA, 20 bp, synthetic construct
  source 1..20: mol_type = other DNA
tctactaaaaacacaaaaaa

SEQ ID NO: 202116 - DNA, 20 bp, synthetic construct
  source 1..20: mol_type = other DNA
ctctactaaaaacacaaaaa

SEQ ID NO: 202117 - DNA, 20 bp, synthetic construct
  source 1..20: mol_type = other DNA
tctctactaaaaacacaaaa

SEQ ID NO: 202118 - DNA, 20 bp, synthetic construct
  source 1..20: mol_type = other DNA
atctctactaaaaacacaaa

SEQ ID NO: 202119 - DNA, 20 bp, synthetic construct
  source 1..20: mol_type = other DNA
catctctactaaaaacacaa

SEQ ID NO: 202120 - DNA, 20 bp, synthetic construct
  source 1..20: mol_type = other DNA
ccatctctactaaaaacaca

SEQ ID NO: 202121 - DNA, 20 bp, synthetic construct
  source 1..20: mol_type = other DNA
cccatctctactaaaaacac

SEQ ID NO: 202122 - DNA, 20 bp, synthetic construct
  source 1..20: mol_type = other DNA
ccccatctctactaaaaaca

SEQ ID NO: 202123 - DNA, 20 bp, synthetic construct
  source 1..20: mol_type = other DNA
accccatctctactaaaaac

SEQ ID NO: 202124 - DNA, 20 bp, synthetic construct
  source 1..20: mol_type = other DNA
aaccccatctctactaaaaa

SEQ ID NO: 202125 - DNA, 20 bp, synthetic construct
  source 1..20: mol_type = other DNA
aaaccccatctctactaaaa

SEQ ID NO: 202126 - DNA, 20 bp, synthetic construct
  source 1..20: mol_type = other DNA
gaaaccccatctctactaaa

SEQ ID NO: 202127 - DNA, 20 bp, synthetic construct
  source 1..20: mol_type = other DNA
tgaaaccccatctctactaa

SEQ ID NO: 202128 - DNA, 20 bp, synthetic construct
  source 1..20: mol_type = other DNA
gtgaaaccccatctctacta

SEQ ID NO: 202129 - DNA, 20 bp, synthetic construct
  source 1..20: mol_type = other DNA
ggtgaaaccccatctctact

SEQ ID NO: 202130 - DNA, 20 bp, synthetic construct
  source 1..20: mol_type = other DNA
cggtgaaaccccatctctac

SEQ ID NO: 202131 - DNA, 20 bp, synthetic construct
  source 1..20: mol_type = other DNA
acggtgaaaccccatctcta

SEQ ID NO: 202132 - DNA, 20 bp, synthetic construct
  source 1..20: mol_type = other DNA
cacggtgaaaccccatctct

SEQ ID NO: 202133 - DNA, 20 bp, synthetic construct
  source 1..20: mol_type = other DNA
acacggtgaaaccccatctc

SEQ ID NO: 202134 - DNA, 20 bp, synthetic construct
  source 1..20: mol_type = other DNA
aacacggtgaaaccccatct

SEQ ID NO: 202135 - DNA, 20 bp, synthetic construct
  source 1..20: mol_type = other DNA
taacacggtgaaaccccatc

SEQ ID NO: 202136 - DNA, 20 bp, synthetic construct
  source 1..20: mol_type = other DNA
ctaacacggtgaaaccccat

SEQ ID NO: 202137 - DNA, 20 bp, synthetic construct
  source 1..20: mol_type = other DNA
gctaacacggtgaaacccca

SEQ ID NO: 202138 - DNA, 20 bp, synthetic construct
  source 1..20: mol_type = other DNA
ggctaacacggtgaaacccc

SEQ ID NO: 202139 - DNA, 20 bp, synthetic construct
  source 1..20: mol_type = other DNA
tggctaacacggtgaaaccc

SEQ ID NO: 202140 - DNA, 20 bp, synthetic construct
  source 1..20: mol_type = other DNA
ctggctaacacggtgaaacc

SEQ ID NO: 202141 - DNA, 20 bp, synthetic construct
  source 1..20: mol_type = other DNA
cctggctaacacggtgaaac

SEQ ID NO: 202142 - DNA, 20 bp, synthetic construct
  source 1..20: mol_type = other DNA
tcctggctaacacggtgaaa

SEQ ID NO: 202143 - DNA, 20 bp, synthetic construct
  source 1..20: mol_type = other DNA
atcctggctaacacggtgaa

SEQ ID NO: 202144 - DNA, 20 bp, synthetic construct
  source 1..20: mol_type = other DNA
catcctggctaacacggtga

SEQ ID NO: 202145 - DNA, 20 bp, synthetic construct
  source 1..20: mol_type = other DNA
ccatcctggctaacacggtg

SEQ ID NO: 202146 - DNA, 20 bp, synthetic construct
  source 1..20: mol_type = other DNA
accatcctggctaacacggt

SEQ ID NO: 202147 - DNA, 20 bp, synthetic construct
  source 1..20: mol_type = other DNA
gaccatcctggctaacacgg

SEQ ID NO: 202148 - DNA, 20 bp, synthetic construct
  source 1..20: mol_type = other DNA
agaccatcctggctaacacg

SEQ ID NO: 202149 - DNA, 20 bp, synthetic construct
  source 1..20: mol_type = other DNA
gagaccatcctggctaacac

SEQ ID NO: 202150 - DNA, 20 bp, synthetic construct
  source 1..20: mol_type = other DNA
cgagaccatcctggctaaca

SEQ ID NO: 202151 - DNA, 20 bp, synthetic construct
  source 1..20: mol_type = other DNA
tcgagaccatcctggctaac

SEQ ID NO: 202152 - DNA, 20 bp, synthetic construct
  source 1..20: mol_type = other DNA
atcgagaccatcctggctaa

SEQ ID NO: 202153 - DNA, 20 bp, synthetic construct
  source 1..20: mol_type = other DNA
gatcgagaccatcctggcta

SEQ ID NO: 202154 - DNA, 20 bp, synthetic construct
  source 1..20: mol_type = other DNA
agatcgagaccatcctggct

SEQ ID NO: 202155 - DNA, 20 bp, synthetic construct
  source 1..20: mol_type = other DNA
gagatcgagaccatcctggc

SEQ ID NO: 202156 - DNA, 20 bp, synthetic construct
  source 1..20: mol_type = other DNA
ggagatcgagaccatcctgg

SEQ ID NO: 202157 - DNA, 20 bp, synthetic construct
  source 1..20: mol_type = other DNA
aggagatcgagaccatcctg

SEQ ID NO: 202158 - DNA, 20 bp, synthetic construct
  source 1..20: mol_type = other DNA
caggagatcgagaccatcct

SEQ ID NO: 202159 - DNA, 20 bp, synthetic construct
  source 1..20: mol_type = other DNA
tcaggagatcgagaccatcc

SEQ ID NO: 202160 - DNA, 20 bp, synthetic construct
  source 1..20: mol_type = other DNA
gtcaggagatcgagaccatc

SEQ ID NO: 202161 - DNA, 20 bp, synthetic construct
  source 1..20: mol_type = other DNA
ggtcaggagatcgagaccat

SEQ ID NO: 202162 - DNA, 20 bp, synthetic construct
  source 1..20: mol_type = other DNA
aggtcaggagatcgagacca

SEQ ID NO: 202163 - DNA, 20 bp, synthetic construct
  source 1..20: mol_type = other DNA
gaggtcaggagatcgagacc

SEQ ID NO: 202164 - DNA, 20 bp, synthetic construct
  source 1..20: mol_type = other DNA
tgaggtcaggagatcgagac

SEQ ID NO: 202165 - DNA, 20 bp, synthetic construct
  source 1..20: mol_type = other DNA
atgaggtcaggagatcgaga

SEQ ID NO: 202166 - DNA, 20 bp, synthetic construct
  source 1..20: mol_type = other DNA
catgaggtcaggagatcgag

SEQ ID NO: 202167 - DNA, 20 bp, synthetic construct
  source 1..20: mol_type = other DNA
tcatgaggtcaggagatcga

SEQ ID NO: 202168 - DNA, 20 bp, synthetic construct
  source 1..20: mol_type = other DNA
atcatgaggtcaggagatcg

SEQ ID NO: 202169 - DNA, 20 bp, synthetic construct
  source 1..20: mol_type = other DNA
gatcatgaggtcaggagatc

SEQ ID NO: 202170 - DNA, 20 bp, synthetic construct
  source 1..20: mol_type = other DNA
agatcatgaggtcaggagat

SEQ ID NO: 202171 - DNA, 20 bp, synthetic construct
  source 1..20: mol_type = other DNA
cagatcatgaggtcaggaga

SEQ ID NO: 202172 - DNA, 20 bp, synthetic construct
  source 1..20: mol_type = other DNA
gcagatcatgaggtcaggag

SEQ ID NO: 202173 - DNA, 20 bp, synthetic construct
  source 1..20: mol_type = other DNA
ggcagatcatgaggtcagga

SEQ ID NO: 202174 - DNA, 20 bp, synthetic construct
  source 1..20: mol_type = other DNA
aggcagatcatgaggtcagg

SEQ ID NO: 202175 - DNA, 20 bp, synthetic construct
  source 1..20: mol_type = other DNA
caggcagatcatgaggtcag

SEQ ID NO: 202176 - DNA, 20 bp, synthetic construct
  source 1..20: mol_type = other DNA
gcaggcagatcatgaggtca

SEQ ID NO: 202177 - DNA, 20 bp, synthetic construct
  source 1..20: mol_type = other DNA
ggcaggcagatcatgaggtc

SEQ ID NO: 202178 - DNA, 20 bp, synthetic construct
  source 1..20: mol_type = other DNA
aggcaggcagatcatgaggt

SEQ ID NO: 202179 - DNA, 20 bp, synthetic construct
  source 1..20: mol_type = other DNA
gaggcaggcagatcatgagg

SEQ ID NO: 202180 - DNA, 20 bp, synthetic construct
  source 1..20: mol_type = other DNA
tgaggcaggcagatcatgag

SEQ ID NO: 202181 - DNA, 20 bp, synthetic construct
  source 1..20: mol_type = other DNA
atgaggcaggcagatcatga

SEQ ID NO: 202182 - DNA, 20 bp, synthetic construct
  source 1..20: mol_type = other DNA
gatgaggcaggcagatcatg

SEQ ID NO: 202183 - DNA, 20 bp, synthetic construct
  source 1..20: mol_type = other DNA
tgatgaggcaggcagatcat

SEQ ID NO: 202184 - DNA, 20 bp, synthetic construct
  source 1..20: mol_type = other DNA
ctgatgaggcaggcagatca

SEQ ID NO: 202185 - DNA, 20 bp, synthetic construct
  source 1..20: mol_type = other DNA
gctgatgaggcaggcagatc

SEQ ID NO: 202186 - DNA, 20 bp, synthetic construct
  source 1..20: mol_type = other DNA
ggctgatgaggcaggcagat

SEQ ID NO: 202187 - DNA, 20 bp, synthetic construct
  source 1..20: mol_type = other DNA
aggctgatgaggcaggcaga

SEQ ID NO: 202188 - DNA, 20 bp, synthetic construct
  source 1..20: mol_type = other DNA
gaggctgatgaggcaggcag

SEQ ID NO: 202189 - DNA, 20 bp, synthetic construct
  source 1..20: mol_type = other DNA
ggaggctgatgaggcaggca

SEQ ID NO: 202190 - DNA, 20 bp, synthetic construct
  source 1..20: mol_type = other DNA
gggaggctgatgaggcaggc

SEQ ID NO: 202191 - DNA, 20 bp, synthetic construct
  source 1..20: mol_type = other DNA
tgggaggctgatgaggcagg

SEQ ID NO: 202192 - DNA, 20 bp, synthetic construct
  source 1..20: mol_type = other DNA
ctgggaggctgatgaggcag

SEQ ID NO: 202193 - DNA, 20 bp, synthetic construct
  source 1..20: mol_type = other DNA
tctgggaggctgatgaggca

SEQ ID NO: 202194 - DNA, 20 bp, synthetic construct
  source 1..20: mol_type = other DNA
ctctgggaggctgatgaggc

SEQ ID NO: 202195 - DNA, 20 bp, synthetic construct
  source 1..20: mol_type = other DNA
actctgggaggctgatgagg

SEQ ID NO: 202196 - DNA, 20 bp, synthetic construct
  source 1..20: mol_type = other DNA
cactctgggaggctgatgag

SEQ ID NO: 202197 - DNA, 20 bp, synthetic construct
  source 1..20: mol_type = other DNA
gcactctgggaggctgatga

SEQ ID NO: 202198 - DNA, 20 bp, synthetic construct
  source 1..20: mol_type = other DNA
agcactctgggaggctgatg

SEQ ID NO: 202199 - DNA, 20 bp, synthetic construct
  source 1..20: mol_type = other DNA
cagcactctgggaggctgat

SEQ ID NO: 202200 - DNA, 20 bp, synthetic construct
  source 1..20: mol_type = other DNA
ccagcactctgggaggctga

SEQ ID NO: 202201 - DNA, 20 bp, synthetic construct
  source 1..20: mol_type = other DNA
cccagcactctgggaggctg

SEQ ID NO: 202202 - DNA, 20 bp, synthetic construct
  source 1..20: mol_type = other DNA
tcccagcactctgggaggct

SEQ ID NO: 202203 - DNA, 20 bp, synthetic construct
  source 1..20: mol_type = other DNA
atcccagcactctgggaggc

SEQ ID NO: 202204 - DNA, 20 bp, synthetic construct
  source 1..20: mol_type = other DNA
aatcccagcactctgggagg

SEQ ID NO: 202205 - DNA, 20 bp, synthetic construct
  source 1..20: mol_type = other DNA
taatcccagcactctgggag

SEQ ID NO: 202206 - DNA, 20 bp, synthetic construct
  source 1..20: mol_type = other DNA
gtaatcccagcactctggga

SEQ ID NO: 202207 - DNA, 20 bp, synthetic construct
  source 1..20: mol_type = other DNA
tgtaatcccagcactctggg

SEQ ID NO: 202208 - DNA, 20 bp, synthetic construct
  source 1..20: mol_type = other DNA
ctgtaatcccagcactctgg

SEQ ID NO: 202209 - DNA, 20 bp, synthetic construct
  source 1..20: mol_type = other DNA
cctgtaatcccagcactctg

SEQ ID NO: 202210 - DNA, 20 bp, synthetic construct
  source 1..20: mol_type = other DNA
gcctgtaatcccagcactct

SEQ ID NO: 202211 - DNA, 20 bp, synthetic construct
  source 1..20: mol_type = other DNA
tgcctgtaatcccagcactc

SEQ ID NO: 202212 - DNA, 20 bp, synthetic construct
  source 1..20: mol_type = other DNA
atgcctgtaatcccagcact

SEQ ID NO: 202213 - DNA, 20 bp, synthetic construct
  source 1..20: mol_type = other DNA
catgcctgtaatcccagcac

SEQ ID NO: 202214 - DNA, 20 bp, synthetic construct
  source 1..20: mol_type = other DNA
tcatgcctgtaatcccagca

SEQ ID NO: 202215 - DNA, 20 bp, synthetic construct
  source 1..20: mol_type = other DNA
ctcatgcctgtaatcccagc

SEQ ID NO: 202216 - DNA, 20 bp, synthetic construct
  source 1..20: mol_type = other DNA
gctcatgcctgtaatcccag

SEQ ID NO: 202217 - DNA, 20 bp, synthetic construct
  source 1..20: mol_type = other DNA
ggctcatgcctgtaatccca

SEQ ID NO: 202218 - DNA, 20 bp, synthetic construct
  source 1..20: mol_type = other DNA
tggctcatgcctgtaatccc

SEQ ID NO: 202219 - DNA, 20 bp, synthetic construct
  source 1..20: mol_type = other DNA
gtggctcatgcctgtaatcc

SEQ ID NO: 202220 - DNA, 20 bp, synthetic construct
  source 1..20: mol_type = other DNA
agtggctcatgcctgtaatc

SEQ ID NO: 202221 - DNA, 20 bp, synthetic construct
  source 1..20: mol_type = other DNA
cagtggctcatgcctgtaat

SEQ ID NO: 202222 - DNA, 20 bp, synthetic construct
  source 1..20: mol_type = other DNA
gcagtggctcatgcctgtaa

SEQ ID NO: 202223 - DNA, 20 bp, synthetic construct
  source 1..20: mol_type = other DNA
tgcagtggctcatgcctgta

SEQ ID NO: 202224 - DNA, 20 bp, synthetic construct
  source 1..20: mol_type = other DNA
gtgcagtggctcatgcctgt

SEQ ID NO: 202225 - DNA, 20 bp, synthetic construct
  source 1..20: mol_type = other DNA
ggtgcagtggctcatgcctg

SEQ ID NO: 202226 - DNA, 20 bp, synthetic construct
  source 1..20: mol_type = other DNA
gggtgcagtggctcatgcct

SEQ ID NO: 202227 - DNA, 20 bp, synthetic construct
  source 1..20: mol_type = other DNA
cgggtgcagtggctcatgcc

SEQ ID NO: 202228 - DNA, 20 bp, synthetic construct
  source 1..20: mol_type = other DNA
ccgggtgcagtggctcatgc

SEQ ID NO: 202229 - DNA, 20 bp, synthetic construct
  source 1..20: mol_type = other DNA
gccgggtgcagtggctcatg

SEQ ID NO: 202230 - DNA, 20 bp, synthetic construct
  source 1..20: mol_type = other DNA
ggccgggtgcagtggctcat

SEQ ID NO: 202231 - DNA, 20 bp, synthetic construct
  source 1..20: mol_type = other DNA
tggccgggtgcagtggctca

SEQ ID NO: 202232 - DNA, 20 bp, synthetic construct
  source 1..20: mol_type = other DNA
atggccgggtgcagtggctc

SEQ ID NO: 202233 - DNA, 20 bp, synthetic construct
  source 1..20: mol_type = other DNA
gatggccgggtgcagtggct

SEQ ID NO: 202234 - DNA, 20 bp, synthetic construct
  source 1..20: mol_type = other DNA
tgatggccgggtgcagtggc

SEQ ID NO: 202235 - DNA, 20 bp, synthetic construct
  source 1..20: mol_type = other DNA
ctgatggccgggtgcagtgg

SEQ ID NO: 202236 - DNA, 20 bp, synthetic construct
  source 1..20: mol_type = other DNA
actgatggccgggtgcagtg

SEQ ID NO: 202237 - DNA, 20 bp, synthetic construct
  source 1..20: mol_type = other DNA
cactgatggccgggtgcagt

SEQ ID NO: 202238 - DNA, 20 bp, synthetic construct
  source 1..20: mol_type = other DNA
ccactgatggccgggtgcag

SEQ ID NO: 202239 - DNA, 20 bp, synthetic construct
  source 1..20: mol_type = other DNA
tccactgatggccgggtgca

SEQ ID NO: 202240 - DNA, 20 bp, synthetic construct
  source 1..20: mol_type = other DNA
atccactgatggccgggtgc

SEQ ID NO: 202241 - DNA, 20 bp, synthetic construct
  source 1..20: mol_type = other DNA
tatccactgatggccgggtg

SEQ ID NO: 202242 - DNA, 20 bp, synthetic construct
  source 1..20: mol_type = other DNA
atatccactgatggccgggt

SEQ ID NO: 202243 - DNA, 20 bp, synthetic construct
  source 1..20: mol_type = other DNA
tatatccactgatggccggg

SEQ ID NO: 202244 - DNA, 20 bp, synthetic construct
  source 1..20: mol_type = other DNA
atatatccactgatggccgg

SEQ ID NO: 202245 - DNA, 20 bp, synthetic construct
  source 1..20: mol_type = other DNA
aatatatccactgatggccg

SEQ ID NO: 202246 - DNA, 20 bp, synthetic construct
  source 1..20: mol_type = other DNA
aaatatatccactgatggcc

SEQ ID NO: 202247 - DNA, 20 bp, synthetic construct
  source 1..20: mol_type = other DNA
aaaatatatccactgatggc

SEQ ID NO: 202248 - DNA, 20 bp, synthetic construct
  source 1..20: mol_type = other DNA
aaaaatatatccactgatgg

SEQ ID NO: 202249 - DNA, 20 bp, synthetic construct
  source 1..20: mol_type = other DNA
taaaaatatatccactgatg

SEQ ID NO: 202250 - DNA, 20 bp, synthetic construct
  source 1..20: mol_type = other DNA
ttaaaaatatatccactgat

SEQ ID NO: 202251 - DNA, 20 bp, synthetic construct
  source 1..20: mol_type = other DNA
tttaaaaatatatccactga

SEQ ID NO: 202252 - DNA, 20 bp, synthetic construct
  source 1..20: mol_type = other DNA
ctttaaaaatatatccactg

SEQ ID NO: 202253 - DNA, 20 bp, synthetic construct
  source 1..20: mol_type = other DNA
gctttaaaaatatatccact

SEQ ID NO: 202254 - DNA, 20 bp, synthetic construct
  source 1..20: mol_type = other DNA
tgctttaaaaatatatccac

SEQ ID NO: 202255 - DNA, 20 bp, synthetic construct
  source 1..20: mol_type = other DNA
gtgctttaaaaatatatcca

SEQ ID NO: 202256 - DNA, 20 bp, synthetic construct
  source 1..20: mol_type = other DNA
agtgctttaaaaatatatcc

SEQ ID NO: 202257 - DNA, 20 bp, synthetic construct
  source 1..20: mol_type = other DNA
cagtgctttaaaaatatatc

SEQ ID NO: 202258 - DNA, 20 bp, synthetic construct
  source 1..20: mol_type = other DNA
gcagtgctttaaaaatatat

SEQ ID NO: 202259 - DNA, 20 bp, synthetic construct
  source 1..20: mol_type = other DNA
tgcagtgctttaaaaatata

SEQ ID NO: 202260 - DNA, 20 bp, synthetic construct
  source 1..20: mol_type = other DNA
ctgcagtgctttaaaaatat

SEQ ID NO: 202261 - DNA, 20 bp, synthetic construct
  source 1..20: mol_type = other DNA
tctgcagtgctttaaaaata

SEQ ID NO: 202262 - DNA, 20 bp, synthetic construct
  source 1..20: mol_type = other DNA
ctctgcagtgctttaaaaat

SEQ ID NO: 202263 - DNA, 20 bp, synthetic construct
  source 1..20: mol_type = other DNA
tctctgcagtgctttaaaaa

SEQ ID NO: 202264 - DNA, 20 bp, synthetic construct
  source 1..20: mol_type = other DNA
ttctctgcagtgctttaaaa

SEQ ID NO: 202265 - DNA, 20 bp, synthetic construct
  source 1..20: mol_type = other DNA
attctctgcagtgctttaaa

SEQ ID NO: 202266 - DNA, 20 bp, synthetic construct
  source 1..20: mol_type = other DNA
aattctctgcagtgctttaa

SEQ ID NO: 202267 - DNA, 20 bp, synthetic construct
  source 1..20: mol_type = other DNA
gaattctctgcagtgcttta

SEQ ID NO: 202268 - DNA, 20 bp, synthetic construct
  source 1..20: mol_type = other DNA
agaattctctgcagtgcttt

SEQ ID NO: 202269 - DNA, 20 bp, synthetic construct
  source 1..20: mol_type = other DNA
cagaattctctgcagtgctt

SEQ ID NO: 202270 - DNA, 20 bp, synthetic construct
  source 1..20: mol_type = other DNA
acagaattctctgcagtgct

SEQ ID NO: 202271 - DNA, 20 bp, synthetic construct
  source 1..20: mol_type = other DNA
aacagaattctctgcagtgc

SEQ ID NO: 202272 - DNA, 20 bp, synthetic construct
  source 1..20: mol_type = other DNA
caacagaattctctgcagtg

SEQ ID NO: 202273 - DNA, 20 bp, synthetic construct
  source 1..20: mol_type = other DNA
gcaacagaattctctgcagt

SEQ ID NO: 202274 - DNA, 20 bp, synthetic construct
  source 1..20: mol_type = other DNA
tgcaacagaattctctgcag

SEQ ID NO: 202275 - DNA, 20 bp, synthetic construct
  source 1..20: mol_type = other DNA
atgcaacagaattctctgca

SEQ ID NO: 202276 - DNA, 20 bp, synthetic construct
  source 1..20: mol_type = other DNA
gatgcaacagaattctctgc

SEQ ID NO: 202277 - DNA, 20 bp, synthetic construct
  source 1..20: mol_type = other DNA
tgatgcaacagaattctctg

SEQ ID NO: 202278 - DNA, 20 bp, synthetic construct
  source 1..20: mol_type = other DNA
ctgatgcaacagaattctct

SEQ ID NO: 202279 - DNA, 20 bp, synthetic construct
  source 1..20: mol_type = other DNA
gctgatgcaacagaattctc

SEQ ID NO: 202280 - DNA, 20 bp, synthetic construct
  source 1..20: mol_type = other DNA
agctgatgcaacagaattct

SEQ ID NO: 202281 - DNA, 20 bp, synthetic construct
  source 1..20: mol_type = other DNA
aagctgatgcaacagaattc

SEQ ID NO: 202282 - DNA, 20 bp, synthetic construct
  source 1..20: mol_type = other DNA
caagctgatgcaacagaatt

SEQ ID NO: 202283 - DNA, 20 bp, synthetic construct
  source 1..20: mol_type = other DNA
tcaagctgatgcaacagaat

SEQ ID NO: 202284 - DNA, 20 bp, synthetic construct
  source 1..20: mol_type = other DNA
ctcaagctgatgcaacagaa

SEQ ID NO: 202285 - DNA, 20 bp, synthetic construct
  source 1..20: mol_type = other DNA
tctcaagctgatgcaacaga

SEQ ID NO: 202286 - DNA, 20 bp, synthetic construct
  source 1..20: mol_type = other DNA
ttctcaagctgatgcaacag

SEQ ID NO: 202287 - DNA, 20 bp, synthetic construct
  source 1..20: mol_type = other DNA
gttctcaagctgatgcaaca

SEQ ID NO: 202288 - DNA, 20 bp, synthetic construct
  source 1..20: mol_type = other DNA
ggttctcaagctgatgcaac

SEQ ID NO: 202289 - DNA, 20 bp, synthetic construct
  source 1..20: mol_type = other DNA
tggttctcaagctgatgcaa

SEQ ID NO: 202290 - DNA, 20 bp, synthetic construct
  source 1..20: mol_type = other DNA
gtggttctcaagctgatgca

SEQ ID NO: 202291 - DNA, 20 bp, synthetic construct
  source 1..20: mol_type = other DNA
agtggttctcaagctgatgc

SEQ ID NO: 202292 - DNA, 20 bp, synthetic construct
  source 1..20: mol_type = other DNA
cagtggttctcaagctgatg

SEQ ID NO: 202293 - DNA, 20 bp, synthetic construct
  source 1..20: mol_type = other DNA
tcagtggttctcaagctgat

SEQ ID NO: 202294 - DNA, 20 bp, synthetic construct
  source 1..20: mol_type = other DNA
atcagtggttctcaagctga

SEQ ID NO: 202295 - DNA, 20 bp, synthetic construct
  source 1..20: mol_type = other DNA
gatcagtggttctcaagctg

SEQ ID NO: 202296 - DNA, 20 bp, synthetic construct
  source 1..20: mol_type = other DNA
agatcagtggttctcaagct

SEQ ID NO: 202297 - DNA, 20 bp, synthetic construct
  source 1..20: mol_type = other DNA
cagatcagtggttctcaagc

SEQ ID NO: 202298 - DNA, 20 bp, synthetic construct
  source 1..20: mol_type = other DNA
gcagatcagtggttctcaag

SEQ ID NO: 202299 - DNA, 20 bp, synthetic construct
  source 1..20: mol_type = other DNA
ggcagatcagtggttctcaa

SEQ ID NO: 202300 - DNA, 20 bp, synthetic construct
  source 1..20: mol_type = other DNA
aggcagatcagtggttctca

SEQ ID NO: 202301 - DNA, 20 bp, synthetic construct
  source 1..20: mol_type = other DNA
aaggcagatcagtggttctc

SEQ ID NO: 202302 - DNA, 20 bp, synthetic construct
  source 1..20: mol_type = other DNA
caaggcagatcagtggttct

SEQ ID NO: 202303 - DNA, 20 bp, synthetic construct
  source 1..20: mol_type = other DNA
acaaggcagatcagtggttc

SEQ ID NO: 202304 - DNA, 20 bp, synthetic construct
  source 1..20: mol_type = other DNA
cacaaggcagatcagtggtt

SEQ ID NO: 202305 - DNA, 20 bp, synthetic construct
  source 1..20: mol_type = other DNA
gcacaaggcagatcagtggt

SEQ ID NO: 202306 - DNA, 20 bp, synthetic construct
  source 1..20: mol_type = other DNA
agcacaaggcagatcagtgg

SEQ ID NO: 202307 - DNA, 20 bp, synthetic construct
  source 1..20: mol_type = other DNA
aagcacaaggcagatcagtg

SEQ ID NO: 202308 - DNA, 20 bp, synthetic construct
  source 1..20: mol_type = other DNA
gaagcacaaggcagatcagt

SEQ ID NO: 202309 - DNA, 20 bp, synthetic construct
  source 1..20: mol_type = other DNA
tgaagcacaaggcagatcag

SEQ ID NO: 202310 - DNA, 20 bp, synthetic construct
  source 1..20: mol_type = other DNA
gtgaagcacaaggcagatca

SEQ ID NO: 202311 - DNA, 20 bp, synthetic construct
  source 1..20: mol_type = other DNA
tgtgaagcacaaggcagatc

SEQ ID NO: 202312 - DNA, 20 bp, synthetic construct
  source 1..20: mol_type = other DNA
atgtgaagcacaaggcagat

SEQ ID NO: 202313 - DNA, 20 bp, synthetic construct
  source 1..20: mol_type = other DNA
aatgtgaagcacaaggcaga

SEQ ID NO: 202314 - DNA, 20 bp, synthetic construct
  source 1..20: mol_type = other DNA
aaatgtgaagcacaaggcag

SEQ ID NO: 202315 - DNA, 20 bp, synthetic construct
  source 1..20: mol_type = other DNA
taaatgtgaagcacaaggca

SEQ ID NO: 202316 - DNA, 20 bp, synthetic construct
  source 1..20: mol_type = other DNA
ttaaatgtgaagcacaaggc

SEQ ID NO: 202317 - DNA, 20 bp, synthetic construct
  source 1..20: mol_type = other DNA
tttaaatgtgaagcacaagg

SEQ ID NO: 202318 - DNA, 20 bp, synthetic construct
  source 1..20: mol_type = other DNA
ttttaaatgtgaagcacaag

SEQ ID NO: 202319 - DNA, 20 bp, synthetic construct
  source 1..20: mol_type = other DNA
gttttaaatgtgaagcacaa

SEQ ID NO: 202320 - DNA, 20 bp, synthetic construct
  source 1..20: mol_type = other DNA
agttttaaatgtgaagcaca

SEQ ID NO: 202321 - DNA, 20 bp, synthetic construct
  source 1..20: mol_type = other DNA
aagttttaaatgtgaagcac

SEQ ID NO: 202322 - DNA, 20 bp, synthetic construct
  source 1..20: mol_type = other DNA
aaagttttaaatgtgaagca

SEQ ID NO: 202323 - DNA, 20 bp, synthetic construct
  source 1..20: mol_type = other DNA
aaaagttttaaatgtgaagc

SEQ ID NO: 202324 - DNA, 20 bp, synthetic construct
  source 1..20: mol_type = other DNA
aaaaagttttaaatgtgaag

SEQ ID NO: 202325 - DNA, 20 bp, synthetic construct
  source 1..20: mol_type = other DNA
aaaaaagttttaaatgtgaa

SEQ ID NO: 202326 - DNA, 20 bp, synthetic construct
  source 1..20: mol_type = other DNA
aaaaaaagttttaaatgtga

SEQ ID NO: 202327 - DNA, 20 bp, synthetic construct
  source 1..20: mol_type = other DNA
aaaaaaaagttttaaatgtg

SEQ ID NO: 202328 - DNA, 20 bp, synthetic construct
  source 1..20: mol_type = other DNA
taaaaaaaagttttaaatgt

SEQ ID NO: 202329 - DNA, 20 bp, synthetic construct
  source 1..20: mol_type = other DNA
ttaaaaaaaagttttaaatg

SEQ ID NO: 202330 - DNA, 20 bp, synthetic construct
  source 1..20: mol_type = other DNA
attaaaaaaaagttttaaat

SEQ ID NO: 202331 - DNA, 20 bp, synthetic construct
  source 1..20: mol_type = other DNA
cattaaaaaaaagttttaaa

SEQ ID NO: 202332 - DNA, 20 bp, synthetic construct
  source 1..20: mol_type = other DNA
tcattaaaaaaaagttttaa

SEQ ID NO: 202333 - DNA, 20 bp, synthetic construct
  source 1..20: mol_type = other DNA
ttcattaaaaaaaagtttta

SEQ ID NO: 202334 - DNA, 20 bp, synthetic construct
  source 1..20: mol_type = other DNA
attcattaaaaaaaagtttt

SEQ ID NO: 202335 - DNA, 20 bp, synthetic construct
  source 1..20: mol_type = other DNA
tattcattaaaaaaaagttt

SEQ ID NO: 202336 - DNA, 20 bp, synthetic construct
  source 1..20: mol_type = other DNA
ttattcattaaaaaaaagtt

SEQ ID NO: 202337 - DNA, 20 bp, synthetic construct
  source 1..20: mol_type = other DNA
tttattcattaaaaaaaagt

SEQ ID NO: 202338 - DNA, 20 bp, synthetic construct
  source 1..20: mol_type = other DNA
atttattcattaaaaaaaag

SEQ ID NO: 202339 - DNA, 20 bp, synthetic construct
  source 1..20: mol_type = other DNA
tatttattcattaaaaaaaa

SEQ ID NO: 202340 - DNA, 20 bp, synthetic construct
  source 1..20: mol_type = other DNA
ttatttattcattaaaaaaa

SEQ ID NO: 202341 - DNA, 20 bp, synthetic construct
  source 1..20: mol_type = other DNA
tttatttattcattaaaaaa

SEQ ID NO: 202342 - DNA, 20 bp, synthetic construct
  source 1..20: mol_type = other DNA
gtttatttattcattaaaaa

SEQ ID NO: 202343 - DNA, 20 bp, synthetic construct
  source 1..20: mol_type = other DNA
ggtttatttattcattaaaa

SEQ ID NO: 202344 - DNA, 20 bp, synthetic construct
  source 1..20: mol_type = other DNA
gggtttatttattcattaaa

SEQ ID NO: 202345 - DNA, 20 bp, synthetic construct
  source 1..20: mol_type = other DNA
ggggtttatttattcattaa

SEQ ID NO: 202346 - DNA, 20 bp, synthetic construct
  source 1..20: mol_type = other DNA
tggggtttatttattcatta

SEQ ID NO: 202347 - DNA, 20 bp, synthetic construct
  source 1..20: mol_type = other DNA
ttggggtttatttattcatt

SEQ ID NO: 202348 - DNA, 20 bp, synthetic construct
  source 1..20: mol_type = other DNA
tttggggtttatttattcat

SEQ ID NO: 202349 - DNA, 20 bp, synthetic construct
  source 1..20: mol_type = other DNA
ttttggggtttatttattca

SEQ ID NO: 202350 - DNA, 20 bp, synthetic construct
  source 1..20: mol_type = other DNA
tttttggggtttatttattc

SEQ ID NO: 202351 - DNA, 20 bp, synthetic construct
  source 1..20: mol_type = other DNA
ttttttggggtttatttatt

SEQ ID NO: 202352 - DNA, 20 bp, synthetic construct
  source 1..20: mol_type = other DNA
attttttggggtttatttat

SEQ ID NO: 202353 - DNA, 20 bp, synthetic construct
  source 1..20: mol_type = other DNA
aattttttggggtttattta

SEQ ID NO: 202354 - DNA, 20 bp, synthetic construct
  source 1..20: mol_type = other DNA
taattttttggggtttattt

SEQ ID NO: 202355 - DNA, 20 bp, synthetic construct
  source 1..20: mol_type = other DNA
ttaattttttggggtttatt

SEQ ID NO: 202356 - DNA, 20 bp, synthetic construct
  source 1..20: mol_type = other DNA
attaattttttggggtttat

SEQ ID NO: 202357 - DNA, 20 bp, synthetic construct
  source 1..20: mol_type = other DNA
gattaattttttggggttta

SEQ ID NO: 202358 - DNA, 20 bp, synthetic construct
  source 1..20: mol_type = other DNA
agattaattttttggggttt

SEQ ID NO: 202359 - DNA, 20 bp, synthetic construct
  source 1..20: mol_type = other DNA
gagattaattttttggggtt

SEQ ID NO: 202360 - DNA, 20 bp, synthetic construct
  source 1..20: mol_type = other DNA
ggagattaattttttggggt

SEQ ID NO: 202361 - DNA, 20 bp, synthetic construct
  source 1..20: mol_type = other DNA
gggagattaattttttgggg

SEQ ID NO: 202362 - DNA, 20 bp, synthetic construct
  source 1..20: mol_type = other DNA
agggagattaattttttggg

SEQ ID NO: 202363 - DNA, 20 bp, synthetic construct
  source 1..20: mol_type = other DNA
tagggagattaattttttgg

SEQ ID NO: 202364 - DNA, 20 bp, synthetic construct
  source 1..20: mol_type = other DNA
ttagggagattaattttttg

SEQ ID NO: 202365 - DNA, 20 bp, synthetic construct
  source 1..20: mol_type = other DNA
cttagggagattaatttttt

SEQ ID NO: 202366 - DNA, 20 bp, synthetic construct
  source 1..20: mol_type = other DNA
gcttagggagattaattttt

SEQ ID NO: 202367 - DNA, 20 bp, synthetic construct
  source 1..20: mol_type = other DNA
ggcttagggagattaatttt

SEQ ID NO: 202368 - DNA, 20 bp, synthetic construct
  source 1..20: mol_type = other DNA
aggcttagggagattaattt

SEQ ID NO: 202369 - DNA, 20 bp, synthetic construct
  source 1..20: mol_type = other DNA
gaggcttagggagattaatt

SEQ ID NO: 202370 - DNA, 20 bp, synthetic construct
  source 1..20: mol_type = other DNA
ggaggcttagggagattaat

SEQ ID NO: 202371 - DNA, 20 bp, synthetic construct
  source 1..20: mol_type = other DNA
gggaggcttagggagattaa

SEQ ID NO: 202372 - DNA, 20 bp, synthetic construct
  source 1..20: mol_type = other DNA
agggaggcttagggagatta

SEQ ID NO: 202373 - DNA, 20 bp, synthetic construct
  source 1..20: mol_type = other DNA
tagggaggcttagggagatt

SEQ ID NO: 202374 - DNA, 20 bp, synthetic construct
  source 1..20: mol_type = other DNA
ctagggaggcttagggagat

SEQ ID NO: 202375 - DNA, 20 bp, synthetic construct
  source 1..20: mol_type = other DNA
tctagggaggcttagggaga

SEQ ID NO: 202376 - DNA, 20 bp, synthetic construct
  source 1..20: mol_type = other DNA
ttctagggaggcttagggag

SEQ ID NO: 202377 - DNA, 20 bp, synthetic construct
  source 1..20: mol_type = other DNA
cttctagggaggcttaggga

SEQ ID NO: 202378 - DNA, 20 bp, synthetic construct
  source 1..20: mol_type = other DNA
tcttctagggaggcttaggg

SEQ ID NO: 202379 - DNA, 20 bp, synthetic construct
  source 1..20: mol_type = other DNA
atcttctagggaggcttagg

SEQ ID NO: 202380 - DNA, 20 bp, synthetic construct
  source 1..20: mol_type = other DNA
tatcttctagggaggcttag

SEQ ID NO: 202381 - DNA, 20 bp, synthetic construct
  source 1..20: mol_type = other DNA
ctatcttctagggaggctta

SEQ ID NO: 202382 - DNA, 20 bp, synthetic construct
  source 1..20: mol_type = other DNA
cctatcttctagggaggctt

SEQ ID NO: 202383 - DNA, 20 bp, synthetic construct
  source 1..20: mol_type = other DNA
tcctatcttctagggaggct

SEQ ID NO: 202384 - DNA, 20 bp, synthetic construct
  source 1..20: mol_type = other DNA
atcctatcttctagggaggc

SEQ ID NO: 202385 - DNA, 20 bp, synthetic construct
  source 1..20: mol_type = other DNA
catcctatcttctagggagg

SEQ ID NO: 202386 - DNA, 20 bp, synthetic construct
  source 1..20: mol_type = other DNA
ccatcctatcttctagggag

SEQ ID NO: 202387 - DNA, 20 bp, synthetic construct
  source 1..20: mol_type = other DNA
accatcctatcttctaggga

SEQ ID NO: 202388 - DNA, 20 bp, synthetic construct
  source 1..20: mol_type = other DNA
taccatcctatcttctaggg

SEQ ID NO: 202389 - DNA, 20 bp, synthetic construct
  source 1..20: mol_type = other DNA
ttaccatcctatcttctagg

SEQ ID NO: 202390 - DNA, 20 bp, synthetic construct
  source 1..20: mol_type = other DNA
cttaccatcctatcttctag

SEQ ID NO: 202391 - DNA, 20 bp, synthetic construct
  source 1..20: mol_type = other DNA
ccttaccatcctatcttcta

SEQ ID NO: 202392 - DNA, 20 bp, synthetic construct
  source 1..20: mol_type = other DNA
tccttaccatcctatcttct

SEQ ID NO: 202393 - DNA, 20 bp, synthetic construct
  source 1..20: mol_type = other DNA
atccttaccatcctatcttc

SEQ ID NO: 202394 - DNA, 20 bp, synthetic construct
  source 1..20: mol_type = other DNA
tatccttaccatcctatctt

SEQ ID NO: 202395 - DNA, 20 bp, synthetic construct
  source 1..20: mol_type = other DNA
atatccttaccatcctatct

SEQ ID NO: 202396 - DNA, 20 bp, synthetic construct
  source 1..20: mol_type = other DNA
aatatccttaccatcctatc

SEQ ID NO: 202397 - DNA, 20 bp, synthetic construct
  source 1..20: mol_type = other DNA
aaatatccttaccatcctat

SEQ ID NO: 202398 - DNA, 20 bp, synthetic construct
  source 1..20: mol_type = other DNA
aaaatatccttaccatccta

SEQ ID NO: 202399 - DNA, 20 bp, synthetic construct
  source 1..20: mol_type = other DNA
gaaaatatccttaccatcct

SEQ ID NO: 202400 - DNA, 20 bp, synthetic construct
  source 1..20: mol_type = other DNA
ggaaaatatccttaccatcc

SEQ ID NO: 202401 - DNA, 20 bp, synthetic construct
  source 1..20: mol_type = other DNA
aggaaaatatccttaccatc

SEQ ID NO: 202402 - DNA, 20 bp, synthetic construct
  source 1..20: mol_type = other DNA
taggaaaatatccttaccat

SEQ ID NO: 202403 - DNA, 20 bp, synthetic construct
  source 1..20: mol_type = other DNA
ctaggaaaatatccttacca

SEQ ID NO: 202404 - DNA, 20 bp, synthetic construct
  source 1..20: mol_type = other DNA
cctaggaaaatatccttacc

SEQ ID NO: 202405 - DNA, 20 bp, synthetic construct
  source 1..20: mol_type = other DNA
acctaggaaaatatccttac

SEQ ID NO: 202406 - DNA, 20 bp, synthetic construct
  source 1..20: mol_type = other DNA
tacctaggaaaatatcctta

SEQ ID NO: 202407 - DNA, 20 bp, synthetic construct
  source 1..20: mol_type = other DNA
ttacctaggaaaatatcctt

SEQ ID NO: 202408 - DNA, 20 bp, synthetic construct
  source 1..20: mol_type = other DNA
tttacctaggaaaatatcct

SEQ ID NO: 202409 - DNA, 20 bp, synthetic construct
  source 1..20: mol_type = other DNA
ttttacctaggaaaatatcc

SEQ ID NO: 202410 - DNA, 20 bp, synthetic construct
  source 1..20: mol_type = other DNA
tttttacctaggaaaatatc

SEQ ID NO: 202411 - DNA, 20 bp, synthetic construct
  source 1..20: mol_type = other DNA
atttttacctaggaaaatat

SEQ ID NO: 202412 - DNA, 20 bp, synthetic construct
  source 1..20: mol_type = other DNA
tatttttacctaggaaaata

SEQ ID NO: 202413 - DNA, 20 bp, synthetic construct
  source 1..20: mol_type = other DNA
atatttttacctaggaaaat

SEQ ID NO: 202414 - DNA, 20 bp, synthetic construct
  source 1..20: mol_type = other DNA
catatttttacctaggaaaa

SEQ ID NO: 202415 - DNA, 20 bp, synthetic construct
  source 1..20: mol_type = other DNA
acatatttttacctaggaaa

SEQ ID NO: 202416 - DNA, 20 bp, synthetic construct
  source 1..20: mol_type = other DNA
aacatatttttacctaggaa

SEQ ID NO: 202417 - DNA, 20 bp, synthetic construct
  source 1..20: mol_type = other DNA
taacatatttttacctagga

SEQ ID NO: 202418 - DNA, 20 bp, synthetic construct
  source 1..20: mol_type = other DNA
ttaacatatttttacctagg

SEQ ID NO: 202419 - DNA, 20 bp, synthetic construct
  source 1..20: mol_type = other DNA
attaacatatttttacctag

SEQ ID NO: 202420 - DNA, 20 bp, synthetic construct
  source 1..20: mol_type = other DNA
aattaacatatttttaccta

SEQ ID NO: 202421 - DNA, 20 bp, synthetic construct
  source 1..20: mol_type = other DNA
aaattaacatatttttacct

SEQ ID NO: 202422 - DNA, 20 bp, synthetic construct
  source 1..20: mol_type = other DNA
gaaattaacatatttttacc

SEQ ID NO: 202423 - DNA, 20 bp, synthetic construct
  source 1..20: mol_type = other DNA
tgaaattaacatatttttac

SEQ ID NO: 202424 - DNA, 20 bp, synthetic construct
  source 1..20: mol_type = other DNA
atgaaattaacatattttta

SEQ ID NO: 202425 - DNA, 20 bp, synthetic construct
  source 1..20: mol_type = other DNA
tatgaaattaacatattttt

SEQ ID NO: 202426 - DNA, 20 bp, synthetic construct
  source 1..20: mol_type = other DNA
atatgaaattaacatatttt

SEQ ID NO: 202427 - DNA, 20 bp, synthetic construct
  source 1..20: mol_type = other DNA
aatatgaaattaacatattt

SEQ ID NO: 202428 - DNA, 20 bp, synthetic construct
  source 1..20: mol_type = other DNA
aaatatgaaattaacatatt

SEQ ID NO: 202429 - DNA, 20 bp, synthetic construct
  source 1..20: mol_type = other DNA
gaaatatgaaattaacatat

SEQ ID NO: 202430 - DNA, 20 bp, synthetic construct
  source 1..20: mol_type = other DNA
tgaaatatgaaattaacata

SEQ ID NO: 202431 - DNA, 20 bp, synthetic construct
  source 1..20: mol_type = other DNA
atgaaatatgaaattaacat

SEQ ID NO: 202432 - DNA, 20 bp, synthetic construct
  source 1..20: mol_type = other DNA
catgaaatatgaaattaaca

SEQ ID NO: 202433 - DNA, 20 bp, synthetic construct
  source 1..20: mol_type = other DNA
tcatgaaatatgaaattaac

SEQ ID NO: 202434 - DNA, 20 bp, synthetic construct
  source 1..20: mol_type = other DNA
ttcatgaaatatgaaattaa

SEQ ID NO: 202435 - DNA, 20 bp, synthetic construct
  source 1..20: mol_type = other DNA
tttcatgaaatatgaaatta

SEQ ID NO: 202436 - DNA, 20 bp, synthetic construct
  source 1..20: mol_type = other DNA
atttcatgaaatatgaaatt

SEQ ID NO: 202437 - DNA, 20 bp, synthetic construct
  source 1..20: mol_type = other DNA
aatttcatgaaatatgaaat

SEQ ID NO: 202438 - DNA, 20 bp, synthetic construct
  source 1..20: mol_type = other DNA
aaatttcatgaaatatgaaa

SEQ ID NO: 202439 - DNA, 20 bp, synthetic construct
  source 1..20: mol_type = other DNA
gaaatttcatgaaatatgaa

SEQ ID NO: 202440 - DNA, 20 bp, synthetic construct
  source 1..20: mol_type = other DNA
tgaaatttcatgaaatatga

SEQ ID NO: 202441 - DNA, 20 bp, synthetic construct
  source 1..20: mol_type = other DNA
atgaaatttcatgaaatatg

SEQ ID NO: 202442 - DNA, 20 bp, synthetic construct
  source 1..20: mol_type = other DNA
catgaaatttcatgaaatat

SEQ ID NO: 202443 - DNA, 20 bp, synthetic construct
  source 1..20: mol_type = other DNA
acatgaaatttcatgaaata

SEQ ID NO: 202444 - DNA, 20 bp, synthetic construct
  source 1..20: mol_type = other DNA
aacatgaaatttcatgaaat

SEQ ID NO: 202445 - DNA, 20 bp, synthetic construct
  source 1..20: mol_type = other DNA
aaacatgaaatttcatgaaa

SEQ ID NO: 202446 - DNA, 20 bp, synthetic construct
  source 1..20: mol_type = other DNA
gaaacatgaaatttcatgaa

SEQ ID NO: 202447 - DNA, 20 bp, synthetic construct
  source 1..20: mol_type = other DNA
tgaaacatgaaatttcatga

SEQ ID NO: 202448 - DNA, 20 bp, synthetic construct
  source 1..20: mol_type = other DNA
atgaaacatgaaatttcatg

SEQ ID NO: 202449 - DNA, 20 bp, synthetic construct
  source 1..20: mol_type = other DNA
aatgaaacatgaaatttcat

SEQ ID NO: 202450 - DNA, 20 bp, synthetic construct
  source 1..20: mol_type = other DNA
aaatgaaacatgaaatttca

SEQ ID NO: 202451 - DNA, 20 bp, synthetic construct
  source 1..20: mol_type = other DNA
gaaatgaaacatgaaatttc

SEQ ID NO: 202452 - DNA, 20 bp, synthetic construct
  source 1..20: mol_type = other DNA
tgaaatgaaacatgaaattt

SEQ ID NO: 202453 - DNA, 20 bp, synthetic construct
  source 1..20: mol_type = other DNA
ttgaaatgaaacatgaaatt

SEQ ID NO: 202454 - DNA, 20 bp, synthetic construct
  source 1..20: mol_type = other DNA
attgaaatgaaacatgaaat

SEQ ID NO: 202455 - DNA, 20 bp, synthetic construct
  source 1..20: mol_type = other DNA
gattgaaatgaaacatgaaa

SEQ ID NO: 202456 - DNA, 20 bp, synthetic construct
  source 1..20: mol_type = other DNA
tgattgaaatgaaacatgaa

SEQ ID NO: 202457 - DNA, 20 bp, synthetic construct
  source 1..20: mol_type = other DNA
ttgattgaaatgaaacatga

SEQ ID NO: 202458 - DNA, 20 bp, synthetic construct
  source 1..20: mol_type = other DNA
cttgattgaaatgaaacatg

SEQ ID NO: 202459 - DNA, 20 bp, synthetic construct
  source 1..20: mol_type = other DNA
gcttgattgaaatgaaacat

SEQ ID NO: 202460 - DNA, 20 bp, synthetic construct
  source 1..20: mol_type = other DNA
agcttgattgaaatgaaaca

SEQ ID NO: 202461 - DNA, 20 bp, synthetic construct
  source 1..20: mol_type = other DNA
gagcttgattgaaatgaaac

SEQ ID NO: 202462 - DNA, 20 bp, synthetic construct
  source 1..20: mol_type = other DNA
agagcttgattgaaatgaaa

SEQ ID NO: 202463 - DNA, 20 bp, synthetic construct
  source 1..20: mol_type = other DNA
cagagcttgattgaaatgaa

SEQ ID NO: 202464 - DNA, 20 bp, synthetic construct
  source 1..20: mol_type = other DNA
acagagcttgattgaaatga

SEQ ID NO: 202465 - DNA, 20 bp, synthetic construct
  source 1..20: mol_type = other DNA
gacagagcttgattgaaatg

SEQ ID NO: 202466 - DNA, 20 bp, synthetic construct
  source 1..20: mol_type = other DNA
tgacagagcttgattgaaat

SEQ ID NO: 202467 - DNA, 20 bp, synthetic construct
  source 1..20: mol_type = other DNA
atgacagagcttgattgaaa

SEQ ID NO: 202468 - DNA, 20 bp, synthetic construct
  source 1..20: mol_type = other DNA
tatgacagagcttgattgaa

SEQ ID NO: 202469 - DNA, 20 bp, synthetic construct
  source 1..20: mol_type = other DNA
gtatgacagagcttgattga

SEQ ID NO: 202470 - DNA, 20 bp, synthetic construct
  source 1..20: mol_type = other DNA
tgtatgacagagcttgattg

SEQ ID NO: 202471 - DNA, 20 bp, synthetic construct
  source 1..20: mol_type = other DNA
gtgtatgacagagcttgatt

SEQ ID NO: 202472 - DNA, 20 bp, synthetic construct
  source 1..20: mol_type = other DNA
ggtgtatgacagagcttgat

SEQ ID NO: 202473 - DNA, 20 bp, synthetic construct
  source 1..20: mol_type = other DNA
aggtgtatgacagagcttga

SEQ ID NO: 202474 - DNA, 20 bp, synthetic construct
  source 1..20: mol_type = other DNA
aaggtgtatgacagagcttg

SEQ ID NO: 202475 - DNA, 20 bp, synthetic construct
  source 1..20: mol_type = other DNA
taaggtgtatgacagagctt

SEQ ID NO: 202476 - DNA, 20 bp, synthetic construct
  source 1..20: mol_type = other DNA
gtaaggtgtatgacagagct

SEQ ID NO: 202477 - DNA, 20 bp, synthetic construct
  source 1..20: mol_type = other DNA
tgtaaggtgtatgacagagc

SEQ ID NO: 202478 - DNA, 20 bp, synthetic construct
  source 1..20: mol_type = other DNA
atgtaaggtgtatgacagag

SEQ ID NO: 202479 - DNA, 20 bp, synthetic construct
  source 1..20: mol_type = other DNA
catgtaaggtgtatgacaga

SEQ ID NO: 202480 - DNA, 20 bp, synthetic construct
  source 1..20: mol_type = other DNA
ccatgtaaggtgtatgacag

SEQ ID NO: 202481 - DNA, 20 bp, synthetic construct
  source 1..20: mol_type = other DNA
cccatgtaaggtgtatgaca

SEQ ID NO: 202482 - DNA, 20 bp, synthetic construct
  source 1..20: mol_type = other DNA
ccccatgtaaggtgtatgac

SEQ ID NO: 202483 - DNA, 20 bp, synthetic construct
  source 1..20: mol_type = other DNA
gccccatgtaaggtgtatga

SEQ ID NO: 202484 - DNA, 20 bp, synthetic construct
  source 1..20: mol_type = other DNA
tgccccatgtaaggtgtatg

SEQ ID NO: 202485 - DNA, 20 bp, synthetic construct
  source 1..20: mol_type = other DNA
ttgccccatgtaaggtgtat

SEQ ID NO: 202486 - DNA, 20 bp, synthetic construct
  source 1..20: mol_type = other DNA
cttgccccatgtaaggtgta

SEQ ID NO: 202487 - DNA, 20 bp, synthetic construct
  source 1..20: mol_type = other DNA
gcttgccccatgtaaggtgt

SEQ ID NO: 202488 - DNA, 20 bp, synthetic construct
  source 1..20: mol_type = other DNA
ggcttgccccatgtaaggtg

SEQ ID NO: 202489 - DNA, 20 bp, synthetic construct
  source 1..20: mol_type = other DNA
gggcttgccccatgtaaggt

SEQ ID NO: 202490 - DNA, 20 bp, synthetic construct
  source 1..20: mol_type = other DNA
tgggcttgccccatgtaagg

SEQ ID NO: 202491 - DNA, 20 bp, synthetic construct
  source 1..20: mol_type = other DNA
ctgggcttgccccatgtaag

SEQ ID NO: 202492 - DNA, 20 bp, synthetic construct
  source 1..20: mol_type = other DNA
actgggcttgccccatgtaa

SEQ ID NO: 202493 - DNA, 20 bp, synthetic construct
  source 1..20: mol_type = other DNA
cactgggcttgccccatgta

SEQ ID NO: 202494 - DNA, 20 bp, synthetic construct
  source 1..20: mol_type = other DNA
gcactgggcttgccccatgt

SEQ ID NO: 202495 - DNA, 20 bp, synthetic construct
  source 1..20: mol_type = other DNA
ggcactgggcttgccccatg

SEQ ID NO: 202496 - DNA, 20 bp, synthetic construct
  source 1..20: mol_type = other DNA
aggcactgggcttgccccat

SEQ ID NO: 202497 - DNA, 20 bp, synthetic construct
  source 1..20: mol_type = other DNA
caggcactgggcttgcccca

SEQ ID NO: 202498 - DNA, 20 bp, synthetic construct
  source 1..20: mol_type = other DNA
ccaggcactgggcttgcccc

SEQ ID NO: 202499 - DNA, 20 bp, synthetic construct
  source 1..20: mol_type = other DNA
cccaggcactgggcttgccc

SEQ ID NO: 202500 - DNA, 20 bp, synthetic construct
  source 1..20: mol_type = other DNA
gcccaggcactgggcttgcc

SEQ ID NO: 202501 - DNA, 20 bp, synthetic construct
  source 1..20: mol_type = other DNA
tgcccaggcactgggcttgc

SEQ ID NO: 202502 - DNA, 20 bp, synthetic construct
  source 1..20: mol_type = other DNA
ctgcccaggcactgggcttg

SEQ ID NO: 202503 - DNA, 20 bp, synthetic construct
  source 1..20: mol_type = other DNA
cctgcccaggcactgggctt

SEQ ID NO: 202504 - DNA, 20 bp, synthetic construct
  source 1..20: mol_type = other DNA
ccctgcccaggcactgggct

SEQ ID NO: 202505 - DNA, 20 bp, synthetic construct
  source 1..20: mol_type = other DNA
accctgcccaggcactgggc

SEQ ID NO: 202506 - DNA, 20 bp, synthetic construct
  source 1..20: mol_type = other DNA
caccctgcccaggcactggg

SEQ ID NO: 202507 - DNA, 20 bp, synthetic construct
  source 1..20: mol_type = other DNA
acaccctgcccaggcactgg

SEQ ID NO: 202508 - DNA, 20 bp, synthetic construct
  source 1..20: mol_type = other DNA
tacaccctgcccaggcactg

SEQ ID NO: 202509 - DNA, 20 bp, synthetic construct
  source 1..20: mol_type = other DNA
ttacaccctgcccaggcact

SEQ ID NO: 202510 - DNA, 20 bp, synthetic construct
  source 1..20: mol_type = other DNA
attacaccctgcccaggcac

SEQ ID NO: 202511 - DNA, 20 bp, synthetic construct
  source 1..20: mol_type = other DNA
aattacaccctgcccaggca

SEQ ID NO: 202512 - DNA, 20 bp, synthetic construct
  source 1..20: mol_type = other DNA
taattacaccctgcccaggc

SEQ ID NO: 202513 - DNA, 20 bp, synthetic construct
  source 1..20: mol_type = other DNA
ataattacaccctgcccagg

SEQ ID NO: 202514 - DNA, 20 bp, synthetic construct
  source 1..20: mol_type = other DNA
tataattacaccctgcccag

SEQ ID NO: 202515 - DNA, 20 bp, synthetic construct
  source 1..20: mol_type = other DNA
gtataattacaccctgccca

SEQ ID NO: 202516 - DNA, 20 bp, synthetic construct
  source 1..20: mol_type = other DNA
agtataattacaccctgccc

SEQ ID NO: 202517 - DNA, 20 bp, synthetic construct
  source 1..20: mol_type = other DNA
gagtataattacaccctgcc

SEQ ID NO: 202518 - DNA, 20 bp, synthetic construct
  source 1..20: mol_type = other DNA
tgagtataattacaccctgc

SEQ ID NO: 202519 - DNA, 20 bp, synthetic construct
  source 1..20: mol_type = other DNA
atgagtataattacaccctg

SEQ ID NO: 202520 - DNA, 20 bp, synthetic construct
  source 1..20: mol_type = other DNA
aatgagtataattacaccct

SEQ ID NO: 202521 - DNA, 20 bp, synthetic construct
  source 1..20: mol_type = other DNA
taatgagtataattacaccc

SEQ ID NO: 202522 - DNA, 20 bp, synthetic construct
  source 1..20: mol_type = other DNA
gtaatgagtataattacacc

SEQ ID NO: 202523 - DNA, 20 bp, synthetic construct
  source 1..20: mol_type = other DNA
tgtaatgagtataattacac

SEQ ID NO: 202524 - DNA, 20 bp, synthetic construct
  source 1..20: mol_type = other DNA
gtgtaatgagtataattaca

SEQ ID NO: 202525 - DNA, 20 bp, synthetic construct
  source 1..20: mol_type = other DNA
tgtgtaatgagtataattac

SEQ ID NO: 202526 - DNA, 20 bp, synthetic construct
  source 1..20: mol_type = other DNA
ctgtgtaatgagtataatta

SEQ ID NO: 202527 - DNA, 20 bp, synthetic construct
  source 1..20: mol_type = other DNA
cctgtgtaatgagtataatt

SEQ ID NO: 202528 - DNA, 20 bp, synthetic construct
  source 1..20: mol_type = other DNA
gcctgtgtaatgagtataat

SEQ ID NO: 202529 - DNA, 20 bp, synthetic construct
  source 1..20: mol_type = other DNA
tgcctgtgtaatgagtataa

SEQ ID NO: 202530 - DNA, 20 bp, synthetic construct
  source 1..20: mol_type = other DNA
ttgcctgtgtaatgagtata

SEQ ID NO: 202531 - DNA, 20 bp, synthetic construct
  source 1..20: mol_type = other DNA
cttgcctgtgtaatgagtat

SEQ ID NO: 202532 - DNA, 20 bp, synthetic construct
  source 1..20: mol_type = other DNA
ccttgcctgtgtaatgagta

SEQ ID NO: 202533 - DNA, 20 bp, synthetic construct
  source 1..20: mol_type = other DNA
tccttgcctgtgtaatgagt

SEQ ID NO: 202534 - DNA, 20 bp, synthetic construct
  source 1..20: mol_type = other DNA
ttccttgcctgtgtaatgag

SEQ ID NO: 202535 - DNA, 20 bp, synthetic construct
  source 1..20: mol_type = other DNA
tttccttgcctgtgtaatga

SEQ ID NO: 202536 - DNA, 20 bp, synthetic construct
  source 1..20: mol_type = other DNA
ttttccttgcctgtgtaatg

SEQ ID NO: 202537 - DNA, 20 bp, synthetic construct
  source 1..20: mol_type = other DNA
cttttccttgcctgtgtaat

SEQ ID NO: 202538 - DNA, 20 bp, synthetic construct
  source 1..20: mol_type = other DNA
acttttccttgcctgtgtaa

SEQ ID NO: 202539 - DNA, 20 bp, synthetic construct
  source 1..20: mol_type = other DNA
gacttttccttgcctgtgta

SEQ ID NO: 202540 - DNA, 20 bp, synthetic construct
  source 1..20: mol_type = other DNA
tgacttttccttgcctgtgt

SEQ ID NO: 202541 - DNA, 20 bp, synthetic construct
  source 1..20: mol_type = other DNA
gtgacttttccttgcctgtg

SEQ ID NO: 202542 - DNA, 20 bp, synthetic construct
  source 1..20: mol_type = other DNA
tgtgacttttccttgcctgt

SEQ ID NO: 202543 - DNA, 20 bp, synthetic construct
  source 1..20: mol_type = other DNA
atgtgacttttccttgcctg

SEQ ID NO: 202544 - DNA, 20 bp, synthetic construct
  source 1..20: mol_type = other DNA
aatgtgacttttccttgcct

SEQ ID NO: 202545 - DNA, 20 bp, synthetic construct
  source 1..20: mol_type = other DNA
taatgtgacttttccttgcc

SEQ ID NO: 202546 - DNA, 20 bp, synthetic construct
  source 1..20: mol_type = other DNA
ctaatgtgacttttccttgc

SEQ ID NO: 202547 - DNA, 20 bp, synthetic construct
  source 1..20: mol_type = other DNA
cctaatgtgacttttccttg

SEQ ID NO: 202548 - DNA, 20 bp, synthetic construct
  source 1..20: mol_type = other DNA
acctaatgtgacttttcctt

SEQ ID NO: 202549 - DNA, 20 bp, synthetic construct
  source 1..20: mol_type = other DNA
cacctaatgtgacttttcct

SEQ ID NO: 202550 - DNA, 20 bp, synthetic construct
  source 1..20: mol_type = other DNA
tcacctaatgtgacttttcc

SEQ ID NO: 202551 - DNA, 20 bp, synthetic construct
  source 1..20: mol_type = other DNA
atcacctaatgtgacttttc

SEQ ID NO: 202552 - DNA, 20 bp, synthetic construct
  source 1..20: mol_type = other DNA
catcacctaatgtgactttt

SEQ ID NO: 202553 - DNA, 20 bp, synthetic construct
  source 1..20: mol_type = other DNA
ccatcacctaatgtgacttt

SEQ ID NO: 202554 - DNA, 20 bp, synthetic construct
  source 1..20: mol_type = other DNA
tccatcacctaatgtgactt

SEQ ID NO: 202555 - DNA, 20 bp, synthetic construct
  source 1..20: mol_type = other DNA
ctccatcacctaatgtgact

SEQ ID NO: 202556 - DNA, 20 bp, synthetic construct
  source 1..20: mol_type = other DNA
gctccatcacctaatgtgac

SEQ ID NO: 202557 - DNA, 20 bp, synthetic construct
  source 1..20: mol_type = other DNA
tgctccatcacctaatgtga

SEQ ID NO: 202558 - DNA, 20 bp, synthetic construct
  source 1..20: mol_type = other DNA
gtgctccatcacctaatgtg

SEQ ID NO: 202559 - DNA, 20 bp, synthetic construct
  source 1..20: mol_type = other DNA
tgtgctccatcacctaatgt

SEQ ID NO: 202560 - DNA, 20 bp, synthetic construct
  source 1..20: mol_type = other DNA
ttgtgctccatcacctaatg

SEQ ID NO: 202561 - DNA, 20 bp, synthetic construct
  source 1..20: mol_type = other DNA
tttgtgctccatcacctaat

SEQ ID NO: 202562 - DNA, 20 bp, synthetic construct
  source 1..20: mol_type = other DNA
atttgtgctccatcacctaa

SEQ ID NO: 202563 - DNA, 20 bp, synthetic construct
  source 1..20: mol_type = other DNA
tatttgtgctccatcaccta

SEQ ID NO: 202564 - DNA, 20 bp, synthetic construct
  source 1..20: mol_type = other DNA
ctatttgtgctccatcacct

SEQ ID NO: 202565 - DNA, 20 bp, synthetic construct
  source 1..20: mol_type = other DNA
cctatttgtgctccatcacc

SEQ ID NO: 202566 - DNA, 20 bp, synthetic construct
  source 1..20: mol_type = other DNA
gcctatttgtgctccatcac

SEQ ID NO: 202567 - DNA, 20 bp, synthetic construct
  source 1..20: mol_type = other DNA
tgcctatttgtgctccatca

SEQ ID NO: 202568 - DNA, 20 bp, synthetic construct
  source 1..20: mol_type = other DNA
ctgcctatttgtgctccatc

SEQ ID NO: 202569 - DNA, 20 bp, synthetic construct
  source 1..20: mol_type = other DNA
actgcctatttgtgctccat

SEQ ID NO: 202570 - DNA, 20 bp, synthetic construct
  source 1..20: mol_type = other DNA
aactgcctatttgtgctcca

SEQ ID NO: 202571 - DNA, 20 bp, synthetic construct
  source 1..20: mol_type = other DNA
taactgcctatttgtgctcc

SEQ ID NO: 202572 - DNA, 20 bp, synthetic construct
  source 1..20: mol_type = other DNA
ttaactgcctatttgtgctc

SEQ ID NO: 202573 - DNA, 20 bp, synthetic construct
  source 1..20: mol_type = other DNA
attaactgcctatttgtgct

SEQ ID NO: 202574 - DNA, 20 bp, synthetic construct
  source 1..20: mol_type = other DNA
cattaactgcctatttgtgc

SEQ ID NO: 202575 - DNA, 20 bp, synthetic construct
  source 1..20: mol_type = other DNA
ccattaactgcctatttgtg

SEQ ID NO: 202576 - DNA, 20 bp, synthetic construct
  source 1..20: mol_type = other DNA
accattaactgcctatttgt

SEQ ID NO: 202577 - DNA, 20 bp, synthetic construct
  source 1..20: mol_type = other DNA
aaccattaactgcctatttg

SEQ ID NO: 202578 - DNA, 20 bp, synthetic construct
  source 1..20: mol_type = other DNA
aaaccattaactgcctattt

SEQ ID NO: 202579 - DNA, 20 bp, synthetic construct
  source 1..20: mol_type = other DNA
gaaaccattaactgcctatt

SEQ ID NO: 202580 - DNA, 20 bp, synthetic construct
  source 1..20: mol_type = other DNA
tgaaaccattaactgcctat

SEQ ID NO: 202581 - DNA, 20 bp, synthetic construct
  source 1..20: mol_type = other DNA
ctgaaaccattaactgccta

SEQ ID NO: 202582 - DNA, 20 bp, synthetic construct
  source 1..20: mol_type = other DNA
cctgaaaccattaactgcct

SEQ ID NO: 202583 - DNA, 20 bp, synthetic construct
  source 1..20: mol_type = other DNA
ccctgaaaccattaactgcc

SEQ ID NO: 202584 - DNA, 20 bp, synthetic construct
  source 1..20: mol_type = other DNA
gccctgaaaccattaactgc

SEQ ID NO: 202585 - DNA, 20 bp, synthetic construct
  source 1..20: mol_type = other DNA
agccctgaaaccattaactg

SEQ ID NO: 202586 - DNA, 20 bp, synthetic construct
  source 1..20: mol_type = other DNA
tagccctgaaaccattaact

SEQ ID NO: 202587 - DNA, 20 bp, synthetic construct
  source 1..20: mol_type = other DNA
ctagccctgaaaccattaac

SEQ ID NO: 202588 - DNA, 20 bp, synthetic construct
  source 1..20: mol_type = other DNA
actagccctgaaaccattaa

SEQ ID NO: 202589 - DNA, 20 bp, synthetic construct
  source 1..20: mol_type = other DNA
aactagccctgaaaccatta

SEQ ID NO: 202590 - DNA, 20 bp, synthetic construct
  source 1..20: mol_type = other DNA
taactagccctgaaaccatt

SEQ ID NO: 202591 - DNA, 20 bp, synthetic construct
  source 1..20: mol_type = other DNA
ctaactagccctgaaaccat

SEQ ID NO: 202592 - DNA, 20 bp, synthetic construct
  source 1..20: mol_type = other DNA
cctaactagccctgaaacca

SEQ ID NO: 202593 - DNA, 20 bp, synthetic construct
  source 1..20: mol_type = other DNA
tcctaactagccctgaaacc

SEQ ID NO: 202594 - DNA, 20 bp, synthetic construct
  source 1..20: mol_type = other DNA
atcctaactagccctgaaac

SEQ ID NO: 202595 - DNA, 20 bp, synthetic construct
  source 1..20: mol_type = other DNA
tatcctaactagccctgaaa

SEQ ID NO: 202596 - DNA, 20 bp, synthetic construct
  source 1..20: mol_type = other DNA
atatcctaactagccctgaa

SEQ ID NO: 202597 - DNA, 20 bp, synthetic construct
  source 1..20: mol_type = other DNA
catatcctaactagccctga

SEQ ID NO: 202598 - DNA, 20 bp, synthetic construct
  source 1..20: mol_type = other DNA
acatatcctaactagccctg

SEQ ID NO: 202599 - DNA, 20 bp, synthetic construct
  source 1..20: mol_type = other DNA
aacatatcctaactagccct

SEQ ID NO: 202600 - DNA, 20 bp, synthetic construct
  source 1..20: mol_type = other DNA
aaacatatcctaactagccc

SEQ ID NO: 202601 - DNA, 20 bp, synthetic construct
  source 1..20: mol_type = other DNA
caaacatatcctaactagcc

SEQ ID NO: 202602 - DNA, 20 bp, synthetic construct
  source 1..20: mol_type = other DNA
acaaacatatcctaactagc

SEQ ID NO: 202603 - DNA, 20 bp, synthetic construct
  source 1..20: mol_type = other DNA
gacaaacatatcctaactag

SEQ ID NO: 202604 - DNA, 20 bp, synthetic construct
  source 1..20: mol_type = other DNA
agacaaacatatcctaacta

SEQ ID NO: 202605 - DNA, 20 bp, synthetic construct
  source 1..20: mol_type = other DNA
aagacaaacatatcctaact

SEQ ID NO: 202606 - DNA, 20 bp, synthetic construct
  source 1..20: mol_type = other DNA
aaagacaaacatatcctaac

SEQ ID NO: 202607 - DNA, 20 bp, synthetic construct
  source 1..20: mol_type = other DNA
gaaagacaaacatatcctaa

SEQ ID NO: 202608 - DNA, 20 bp, synthetic construct
  source 1..20: mol_type = other DNA
tgaaagacaaacatatccta

SEQ ID NO: 202609 - DNA, 20 bp, synthetic construct
  source 1..20: mol_type = other DNA
ttgaaagacaaacatatcct

SEQ ID NO: 202610 - DNA, 20 bp, synthetic construct
  source 1..20: mol_type = other DNA
attgaaagacaaacatatcc

SEQ ID NO: 202611 - DNA, 20 bp, synthetic construct
  source 1..20: mol_type = other DNA
aattgaaagacaaacatatc

SEQ ID NO: 202612 - DNA, 20 bp, synthetic construct
  source 1..20: mol_type = other DNA
caattgaaagacaaacatat

SEQ ID NO: 202613 - DNA, 20 bp, synthetic construct
  source 1..20: mol_type = other DNA
gcaattgaaagacaaacata

SEQ ID NO: 202614 - DNA, 20 bp, synthetic construct
  source 1..20: mol_type = other DNA
tgcaattgaaagacaaacat

SEQ ID NO: 202615 - DNA, 20 bp, synthetic construct
  source 1..20: mol_type = other DNA
ttgcaattgaaagacaaaca

SEQ ID NO: 202616 - DNA, 20 bp, synthetic construct
  source 1..20: mol_type = other DNA
cttgcaattgaaagacaaac

SEQ ID NO: 202617 - DNA, 20 bp, synthetic construct
  source 1..20: mol_type = other DNA
acttgcaattgaaagacaaa

SEQ ID NO: 202618 - DNA, 20 bp, synthetic construct
  source 1..20: mol_type = other DNA
tacttgcaattgaaagacaa

SEQ ID NO: 202619 - DNA, 20 bp, synthetic construct
  source 1..20: mol_type = other DNA
ttacttgcaattgaaagaca

SEQ ID NO: 202620 - DNA, 20 bp, synthetic construct
  source 1..20: mol_type = other DNA
attacttgcaattgaaagac

SEQ ID NO: 202621 - DNA, 20 bp, synthetic construct
  source 1..20: mol_type = other DNA
tattacttgcaattgaaaga

SEQ ID NO: 202622 - DNA, 20 bp, synthetic construct
  source 1..20: mol_type = other DNA
ctattacttgcaattgaaag

SEQ ID NO: 202623 - DNA, 20 bp, synthetic construct
  source 1..20: mol_type = other DNA
tctattacttgcaattgaaa

SEQ ID NO: 202624 - DNA, 20 bp, synthetic construct
  source 1..20: mol_type = other DNA
ttctattacttgcaattgaa

SEQ ID NO: 202625 - DNA, 20 bp, synthetic construct
  source 1..20: mol_type = other DNA
cttctattacttgcaattga

SEQ ID NO: 202626 - DNA, 20 bp, synthetic construct
  source 1..20: mol_type = other DNA
gcttctattacttgcaattg

SEQ ID NO: 202627 - DNA, 20 bp, synthetic construct
  source 1..20: mol_type = other DNA
ggcttctattacttgcaatt

SEQ ID NO: 202628 - DNA, 20 bp, synthetic construct
  source 1..20: mol_type = other DNA
gggcttctattacttgcaat

SEQ ID NO: 202629 - DNA, 20 bp, synthetic construct
  source 1..20: mol_type = other DNA
tgggcttctattacttgcaa

SEQ ID NO: 202630 - DNA, 20 bp, synthetic construct
  source 1..20: mol_type = other DNA
ttgggcttctattacttgca

SEQ ID NO: 202631 - DNA, 20 bp, synthetic construct
  source 1..20: mol_type = other DNA
tttgggcttctattacttgc

SEQ ID NO: 202632 - DNA, 20 bp, synthetic construct
  source 1..20: mol_type = other DNA
ctttgggcttctattacttg

SEQ ID NO: 202633 - DNA, 20 bp, synthetic construct
  source 1..20: mol_type = other DNA
tctttgggcttctattactt

SEQ ID NO: 202634 - DNA, 20 bp, synthetic construct
  source 1..20: mol_type = other DNA
ttctttgggcttctattact

SEQ ID NO: 202635 - DNA, 20 bp, synthetic construct
  source 1..20: mol_type = other DNA
tttctttgggcttctattac

SEQ ID NO: 202636 - DNA, 20 bp, synthetic construct
  source 1..20: mol_type = other DNA
atttctttgggcttctatta

SEQ ID NO: 202637 - DNA, 20 bp, synthetic construct
  source 1..20: mol_type = other DNA
aatttctttgggcttctatt

SEQ ID NO: 202638 - DNA, 20 bp, synthetic construct
  source 1..20: mol_type = other DNA
caatttctttgggcttctat

SEQ ID NO: 202639 - DNA, 20 bp, synthetic construct
  source 1..20: mol_type = other DNA
ccaatttctttgggcttcta

SEQ ID NO: 202640 - DNA, 20 bp, synthetic construct
  source 1..20: mol_type = other DNA
accaatttctttgggcttct

SEQ ID NO: 202641 - DNA, 20 bp, synthetic construct
  source 1..20: mol_type = other DNA
aaccaatttctttgggcttc

SEQ ID NO: 202642 - DNA, 20 bp, synthetic construct
  source 1..20: mol_type = other DNA
taaccaatttctttgggctt

SEQ ID NO: 202643 - DNA, 20 bp, synthetic construct
  source 1..20: mol_type = other DNA
ataaccaatttctttgggct

SEQ ID NO: 202644 - DNA, 20 bp, synthetic construct
  source 1..20: mol_type = other DNA
aataaccaatttctttgggc

SEQ ID NO: 202645 - DNA, 20 bp, synthetic construct
  source 1..20: mol_type = other DNA
aaataaccaatttctttggg

SEQ ID NO: 202646 - DNA, 20 bp, synthetic construct
  source 1..20: mol_type = other DNA
taaataaccaatttctttgg

SEQ ID NO: 202647 - DNA, 20 bp, synthetic construct
  source 1..20: mol_type = other DNA
ataaataaccaatttctttg

SEQ ID NO: 202648 - DNA, 20 bp, synthetic construct
  source 1..20: mol_type = other DNA
tataaataaccaatttcttt

SEQ ID NO: 202649 - DNA, 20 bp, synthetic construct
  source 1..20: mol_type = other DNA
atataaataaccaatttctt

SEQ ID NO: 202650 - DNA, 20 bp, synthetic construct
  source 1..20: mol_type = other DNA
tatataaataaccaatttct

SEQ ID NO: 202651 - DNA, 20 bp, synthetic construct
  source 1..20: mol_type = other DNA
ttatataaataaccaatttc

SEQ ID NO: 202652 - DNA, 20 bp, synthetic construct
  source 1..20: mol_type = other DNA
attatataaataaccaattt

SEQ ID NO: 202653 - DNA, 20 bp, synthetic construct
  source 1..20: mol_type = other DNA
tattatataaataaccaatt

SEQ ID NO: 202654 - DNA, 20 bp, synthetic construct
  source 1..20: mol_type = other DNA
atattatataaataaccaat

SEQ ID NO: 202655 - DNA, 20 bp, synthetic construct
  source 1..20: mol_type = other DNA
tatattatataaataaccaa

SEQ ID NO: 202656 - DNA, 20 bp, synthetic construct
  source 1..20: mol_type = other DNA
ttatattatataaataacca

SEQ ID NO: 202657 - DNA, 20 bp, synthetic construct
  source 1..20: mol_type = other DNA
attatattatataaataacc

SEQ ID NO: 202658 - DNA, 20 bp, synthetic construct
  source 1..20: mol_type = other DNA
aattatattatataaataac

SEQ ID NO: 202659 - DNA, 20 bp, synthetic construct
  source 1..20: mol_type = other DNA
caattatattatataaataa

SEQ ID NO: 202660 - DNA, 20 bp, synthetic construct
  source 1..20: mol_type = other DNA
tcaattatattatataaata

SEQ ID NO: 202661 - DNA, 20 bp, synthetic construct
  source 1..20: mol_type = other DNA
atcaattatattatataaat

SEQ ID NO: 202662 - DNA, 20 bp, synthetic construct
  source 1..20: mol_type = other DNA
aatcaattatattatataaa

SEQ ID NO: 202663 - DNA, 20 bp, synthetic construct
  source 1..20: mol_type = other DNA
caatcaattatattatataa

SEQ ID NO: 202664 - DNA, 20 bp, synthetic construct
  source 1..20: mol_type = other DNA
ccaatcaattatattatata

SEQ ID NO: 202665 - DNA, 20 bp, synthetic construct
  source 1..20: mol_type = other DNA
accaatcaattatattatat

SEQ ID NO: 202666 - DNA, 20 bp, synthetic construct
  source 1..20: mol_type = other DNA
aaccaatcaattatattata

SEQ ID NO: 202667 - DNA, 20 bp, synthetic construct
  source 1..20: mol_type = other DNA
gaaccaatcaattatattat

SEQ ID NO: 202668 - DNA, 20 bp, synthetic construct
  source 1..20: mol_type = other DNA
ggaaccaatcaattatatta

SEQ ID NO: 202669 - DNA, 20 bp, synthetic construct
  source 1..20: mol_type = other DNA
gggaaccaatcaattatatt

SEQ ID NO: 202670 - DNA, 20 bp, synthetic construct
  source 1..20: mol_type = other DNA
tgggaaccaatcaattatat

SEQ ID NO: 202671 - DNA, 20 bp, synthetic construct
  source 1..20: mol_type = other DNA
ttgggaaccaatcaattata

SEQ ID NO: 202672 - DNA, 20 bp, synthetic construct
  source 1..20: mol_type = other DNA
tttgggaaccaatcaattat

SEQ ID NO: 202673 - DNA, 20 bp, synthetic construct
  source 1..20: mol_type = other DNA
atttgggaaccaatcaatta

SEQ ID NO: 202674 - DNA, 20 bp, synthetic construct
  source 1..20: mol_type = other DNA
aatttgggaaccaatcaatt

SEQ ID NO: 202675 - DNA, 20 bp, synthetic construct
  source 1..20: mol_type = other DNA
aaatttgggaaccaatcaat

SEQ ID NO: 202676 - DNA, 20 bp, synthetic construct
  source 1..20: mol_type = other DNA
caaatttgggaaccaatcaa

SEQ ID NO: 202677 - DNA, 20 bp, synthetic construct
  source 1..20: mol_type = other DNA
tcaaatttgggaaccaatca

SEQ ID NO: 202678 - DNA, 20 bp, synthetic construct
  source 1..20: mol_type = other DNA
ttcaaatttgggaaccaatc

SEQ ID NO: 202679 - DNA, 20 bp, synthetic construct
  source 1..20: mol_type = other DNA
tttcaaatttgggaaccaat

SEQ ID NO: 202680 - DNA, 20 bp, synthetic construct
  source 1..20: mol_type = other DNA
ttttcaaatttgggaaccaa

SEQ ID NO: 202681 - DNA, 20 bp, synthetic construct
  source 1..20: mol_type = other DNA
tttttcaaatttgggaacca

SEQ ID NO: 202682 - DNA, 20 bp, synthetic construct
  source 1..20: mol_type = other DNA
atttttcaaatttgggaacc

SEQ ID NO: 202683 - DNA, 20 bp, synthetic construct
  source 1..20: mol_type = other DNA
aatttttcaaatttgggaac

SEQ ID NO: 202684 - DNA, 20 bp, synthetic construct
  source 1..20: mol_type = other DNA
gaatttttcaaatttgggaa

SEQ ID NO: 202685 - DNA, 20 bp, synthetic construct
  source 1..20: mol_type = other DNA
tgaatttttcaaatttggga

SEQ ID NO: 202686 - DNA, 20 bp, synthetic construct
  source 1..20: mol_type = other DNA
ctgaatttttcaaatttggg

SEQ ID NO: 202687 - DNA, 20 bp, synthetic construct
  source 1..20: mol_type = other DNA
cctgaatttttcaaatttgg

SEQ ID NO: 202688 - DNA, 20 bp, synthetic construct
  source 1..20: mol_type = other DNA
tcctgaatttttcaaatttg

SEQ ID NO: 202689 - DNA, 20 bp, synthetic construct
  source 1..20: mol_type = other DNA
ttcctgaatttttcaaattt

SEQ ID NO: 202690 - DNA, 20 bp, synthetic construct
  source 1..20: mol_type = other DNA
attcctgaatttttcaaatt

SEQ ID NO: 202691 - DNA, 20 bp, synthetic construct
  source 1..20: mol_type = other DNA
tattcctgaatttttcaaat

SEQ ID NO: 202692 - DNA, 20 bp, synthetic construct
  source 1..20: mol_type = other DNA
ctattcctgaatttttcaaa

SEQ ID NO: 202693 - DNA, 20 bp, synthetic construct
  source 1..20: mol_type = other DNA
tctattcctgaatttttcaa

SEQ ID NO: 202694 - DNA, 20 bp, synthetic construct
  source 1..20: mol_type = other DNA
gtctattcctgaatttttca

SEQ ID NO: 202695 - DNA, 20 bp, synthetic construct
  source 1..20: mol_type = other DNA
ggtctattcctgaatttttc

SEQ ID NO: 202696 - DNA, 20 bp, synthetic construct
  source 1..20: mol_type = other DNA
gggtctattcctgaattttt

SEQ ID NO: 202697 - DNA, 20 bp, synthetic construct
  source 1..20: mol_type = other DNA
tgggtctattcctgaatttt

SEQ ID NO: 202698 - DNA, 20 bp, synthetic construct
  source 1..20: mol_type = other DNA
ctgggtctattcctgaattt

SEQ ID NO: 202699 - DNA, 20 bp, synthetic construct
  source 1..20: mol_type = other DNA
gctgggtctattcctgaatt

SEQ ID NO: 202700 - DNA, 20 bp, synthetic construct
  source 1..20: mol_type = other DNA
agctgggtctattcctgaat

SEQ ID NO: 202701 - DNA, 20 bp, synthetic construct
  source 1..20: mol_type = other DNA
aagctgggtctattcctgaa

SEQ ID NO: 202702 - DNA, 20 bp, synthetic construct
  source 1..20: mol_type = other DNA
taagctgggtctattcctga

SEQ ID NO: 202703 - DNA, 20 bp, synthetic construct
  source 1..20: mol_type = other DNA
ctaagctgggtctattcctg

SEQ ID NO: 202704 - DNA, 20 bp, synthetic construct
  source 1..20: mol_type = other DNA
cctaagctgggtctattcct

SEQ ID NO: 202705 - DNA, 20 bp, synthetic construct
  source 1..20: mol_type = other DNA
acctaagctgggtctattcc

SEQ ID NO: 202706 - DNA, 20 bp, synthetic construct
  source 1..20: mol_type = other DNA
tacctaagctgggtctattc

SEQ ID NO: 202707 - DNA, 20 bp, synthetic construct
  source 1..20: mol_type = other DNA
gtacctaagctgggtctatt

SEQ ID NO: 202708 - DNA, 20 bp, synthetic construct
  source 1..20: mol_type = other DNA
tgtacctaagctgggtctat

SEQ ID NO: 202709 - DNA, 20 bp, synthetic construct
  source 1..20: mol_type = other DNA
ctgtacctaagctgggtcta

SEQ ID NO: 202710 - DNA, 20 bp, synthetic construct
  source 1..20: mol_type = other DNA
gctgtacctaagctgggtct

SEQ ID NO: 202711 - DNA, 20 bp, synthetic construct
  source 1..20: mol_type = other DNA
agctgtacctaagctgggtc

SEQ ID NO: 202712 - DNA, 20 bp, synthetic construct
  source 1..20: mol_type = other DNA
cagctgtacctaagctgggt

SEQ ID NO: 202713 - DNA, 20 bp, synthetic construct
  source 1..20: mol_type = other DNA
ccagctgtacctaagctggg

SEQ ID NO: 202714 - DNA, 20 bp, synthetic construct
  source 1..20: mol_type = other DNA
tccagctgtacctaagctgg

SEQ ID NO: 202715 - DNA, 20 bp, synthetic construct
  source 1..20: mol_type = other DNA
atccagctgtacctaagctg

SEQ ID NO: 202716 - DNA, 20 bp, synthetic construct
  source 1..20: mol_type = other DNA
gatccagctgtacctaagct

SEQ ID NO: 202717 - DNA, 20 bp, synthetic construct
  source 1..20: mol_type = other DNA
ggatccagctgtacctaagc

SEQ ID NO: 202718 - DNA, 20 bp, synthetic construct
  source 1..20: mol_type = other DNA
tggatccagctgtacctaag

SEQ ID NO: 202719 - DNA, 20 bp, synthetic construct
  source 1..20: mol_type = other DNA
ctggatccagctgtacctaa

SEQ ID NO: 202720 - DNA, 20 bp, synthetic construct
  source 1..20: mol_type = other DNA
actggatccagctgtaccta

SEQ ID NO: 202721 - DNA, 20 bp, synthetic construct
  source 1..20: mol_type = other DNA
gactggatccagctgtacct

SEQ ID NO: 202722 - DNA, 20 bp, synthetic construct
  source 1..20: mol_type = other DNA
tgactggatccagctgtacc

SEQ ID NO: 202723 - DNA, 20 bp, synthetic construct
  source 1..20: mol_type = other DNA
gtgactggatccagctgtac

SEQ ID NO: 202724 - DNA, 20 bp, synthetic construct
  source 1..20: mol_type = other DNA
agtgactggatccagctgta

SEQ ID NO: 202725 - DNA, 20 bp, synthetic construct
  source 1..20: mol_type = other DNA
gagtgactggatccagctgt

SEQ ID NO: 202726 - DNA, 20 bp, synthetic construct
  source 1..20: mol_type = other DNA
tgagtgactggatccagctg

SEQ ID NO: 202727 - DNA, 20 bp, synthetic construct
  source 1..20: mol_type = other DNA
ttgagtgactggatccagct

SEQ ID NO: 202728 - DNA, 20 bp, synthetic construct
  source 1..20: mol_type = other DNA
tttgagtgactggatccagc

SEQ ID NO: 202729 - DNA, 20 bp, synthetic construct
  source 1..20: mol_type = other DNA
gtttgagtgactggatccag

SEQ ID NO: 202730 - DNA, 20 bp, synthetic construct
  source 1..20: mol_type = other DNA
tgtttgagtgactggatcca

SEQ ID NO: 202731 - DNA, 20 bp, synthetic construct
  source 1..20: mol_type = other DNA
ttgtttgagtgactggatcc

SEQ ID NO: 202732 - DNA, 20 bp, synthetic construct
  source 1..20: mol_type = other DNA
attgtttgagtgactggatc

SEQ ID NO: 202733 - DNA, 20 bp, synthetic construct
  source 1..20: mol_type = other DNA
cattgtttgagtgactggat

SEQ ID NO: 202734 - DNA, 20 bp, synthetic construct
  source 1..20: mol_type = other DNA
acattgtttgagtgactgga

SEQ ID NO: 202735 - DNA, 20 bp, synthetic construct
  source 1..20: mol_type = other DNA
gacattgtttgagtgactgg

SEQ ID NO: 202736 - DNA, 20 bp, synthetic construct
  source 1..20: mol_type = other DNA
tgacattgtttgagtgactg

SEQ ID NO: 202737 - DNA, 20 bp, synthetic construct
  source 1..20: mol_type = other DNA
gtgacattgtttgagtgact

SEQ ID NO: 202738 - DNA, 20 bp, synthetic construct
  source 1..20: mol_type = other DNA
tgtgacattgtttgagtgac

SEQ ID NO: 202739 - DNA, 20 bp, synthetic construct
  source 1..20: mol_type = other DNA
ttgtgacattgtttgagtga

SEQ ID NO: 202740 - DNA, 20 bp, synthetic construct
  source 1..20: mol_type = other DNA
tttgtgacattgtttgagtg

SEQ ID NO: 202741 - DNA, 20 bp, synthetic construct
  source 1..20: mol_type = other DNA
ctttgtgacattgtttgagt

SEQ ID NO: 202742 - DNA, 20 bp, synthetic construct
  source 1..20: mol_type = other DNA
tctttgtgacattgtttgag

SEQ ID NO: 202743 - DNA, 20 bp, synthetic construct
  source 1..20: mol_type = other DNA
ttctttgtgacattgtttga

SEQ ID NO: 202744 - DNA, 20 bp, synthetic construct
  source 1..20: mol_type = other DNA
gttctttgtgacattgtttg

SEQ ID NO: 202745 - DNA, 20 bp, synthetic construct
  source 1..20: mol_type = other DNA
ggttctttgtgacattgttt

SEQ ID NO: 202746 - DNA, 20 bp, synthetic construct
  source 1..20: mol_type = other DNA
gggttctttgtgacattgtt

SEQ ID NO: 202747 - DNA, 20 bp, synthetic construct
  source 1..20: mol_type = other DNA
agggttctttgtgacattgt

SEQ ID NO: 202748 - DNA, 20 bp, synthetic construct
  source 1..20: mol_type = other DNA
aagggttctttgtgacattg

SEQ ID NO: 202749 - DNA, 20 bp, synthetic construct
  source 1..20: mol_type = other DNA
aaagggttctttgtgacatt

SEQ ID NO: 202750 - DNA, 20 bp, synthetic construct
  source 1..20: mol_type = other DNA
caaagggttctttgtgacat

SEQ ID NO: 202751 - DNA, 20 bp, synthetic construct
  source 1..20: mol_type = other DNA
tcaaagggttctttgtgaca

SEQ ID NO: 202752 - DNA, 20 bp, synthetic construct
  source 1..20: mol_type = other DNA
gtcaaagggttctttgtgac

SEQ ID NO: 202753 - DNA, 20 bp, synthetic construct
  source 1..20: mol_type = other DNA
tgtcaaagggttctttgtga

SEQ ID NO: 202754 - DNA, 20 bp, synthetic construct
  source 1..20: mol_type = other DNA
ctgtcaaagggttctttgtg

SEQ ID NO: 202755 - DNA, 20 bp, synthetic construct
  source 1..20: mol_type = other DNA
cctgtcaaagggttctttgt

SEQ ID NO: 202756 - DNA, 20 bp, synthetic construct
  source 1..20: mol_type = other DNA
tcctgtcaaagggttctttg

SEQ ID NO: 202757 - DNA, 20 bp, synthetic construct
  source 1..20: mol_type = other DNA
ttcctgtcaaagggttcttt

SEQ ID NO: 202758 - DNA, 20 bp, synthetic construct
  source 1..20: mol_type = other DNA
attcctgtcaaagggttctt

SEQ ID NO: 202759 - DNA, 20 bp, synthetic construct
  source 1..20: mol_type = other DNA
cattcctgtcaaagggttct

SEQ ID NO: 202760 - DNA, 20 bp, synthetic construct
  source 1..20: mol_type = other DNA
acattcctgtcaaagggttc

SEQ ID NO: 202761 - DNA, 20 bp, synthetic construct
  source 1..20: mol_type = other DNA
tacattcctgtcaaagggtt

SEQ ID NO: 202762 - DNA, 20 bp, synthetic construct
  source 1..20: mol_type = other DNA
atacattcctgtcaaagggt

SEQ ID NO: 202763 - DNA, 20 bp, synthetic construct
  source 1..20: mol_type = other DNA
gatacattcctgtcaaaggg

SEQ ID NO: 202764 - DNA, 20 bp, synthetic construct
  source 1..20: mol_type = other DNA
ggatacattcctgtcaaagg

SEQ ID NO: 202765 - DNA, 20 bp, synthetic construct
  source 1..20: mol_type = other DNA
aggatacattcctgtcaaag

SEQ ID NO: 202766 - DNA, 20 bp, synthetic construct
  source 1..20: mol_type = other DNA
caggatacattcctgtcaaa

SEQ ID NO: 202767 - DNA, 20 bp, synthetic construct
  source 1..20: mol_type = other DNA
acaggatacattcctgtcaa

SEQ ID NO: 202768 - DNA, 20 bp, synthetic construct
  source 1..20: mol_type = other DNA
cacaggatacattcctgtca

SEQ ID NO: 202769 - DNA, 20 bp, synthetic construct
  source 1..20: mol_type = other DNA
acacaggatacattcctgtc

SEQ ID NO: 202770 - DNA, 20 bp, synthetic construct
  source 1..20: mol_type = other DNA
aacacaggatacattcctgt

SEQ ID NO: 202771 - DNA, 20 bp, synthetic construct
  source 1..20: mol_type = other DNA
caacacaggatacattcctg

SEQ ID NO: 202772 - DNA, 20 bp, synthetic construct
  source 1..20: mol_type = other DNA
tcaacacaggatacattcct

SEQ ID NO: 202773 - DNA, 20 bp, synthetic construct
  source 1..20: mol_type = other DNA
gtcaacacaggatacattcc

SEQ ID NO: 202774 - DNA, 20 bp, synthetic construct
  source 1..20: mol_type = other DNA
agtcaacacaggatacattc

SEQ ID NO: 202775 - DNA, 20 bp, synthetic construct
  source 1..20: mol_type = other DNA
gagtcaacacaggatacatt

SEQ ID NO: 202776 - DNA, 20 bp, synthetic construct
  source 1..20: mol_type = other DNA
agagtcaacacaggatacat

SEQ ID NO: 202777 - DNA, 20 bp, synthetic construct
  source 1..20: mol_type = other DNA
tagagtcaacacaggataca

SEQ ID NO: 202778 - DNA, 20 bp, synthetic construct
  source 1..20: mol_type = other DNA
gtagagtcaacacaggatac

SEQ ID NO: 202779 - DNA, 20 bp, synthetic construct
  source 1..20: mol_type = other DNA
agtagagtcaacacaggata

SEQ ID NO: 202780 - DNA, 20 bp, synthetic construct
  source 1..20: mol_type = other DNA
aagtagagtcaacacaggat

SEQ ID NO: 202781 - DNA, 20 bp, synthetic construct
  source 1..20: mol_type = other DNA
aaagtagagtcaacacagga

SEQ ID NO: 202782 - DNA, 20 bp, synthetic construct
  source 1..20: mol_type = other DNA
caaagtagagtcaacacagg

SEQ ID NO: 202783 - DNA, 20 bp, synthetic construct
  source 1..20: mol_type = other DNA
gcaaagtagagtcaacacag

SEQ ID NO: 202784 - DNA, 20 bp, synthetic construct
  source 1..20: mol_type = other DNA
agcaaagtagagtcaacaca

SEQ ID NO: 202785 - DNA, 20 bp, synthetic construct
  source 1..20: mol_type = other DNA
gagcaaagtagagtcaacac

SEQ ID NO: 202786 - DNA, 20 bp, synthetic construct
  source 1..20: mol_type = other DNA
agagcaaagtagagtcaaca

SEQ ID NO: 202787 - DNA, 20 bp, synthetic construct
  source 1..20: mol_type = other DNA
cagagcaaagtagagtcaac

SEQ ID NO: 202788 - DNA, 20 bp, synthetic construct
  source 1..20: mol_type = other DNA
tcagagcaaagtagagtcaa

SEQ ID NO: 202789 - DNA, 20 bp, synthetic construct
  source 1..20: mol_type = other DNA
ctcagagcaaagtagagtca

SEQ ID NO: 202790 - DNA, 20 bp, synthetic construct
  source 1..20: mol_type = other DNA
actcagagcaaagtagagtc

SEQ ID NO: 202791 - DNA, 20 bp, synthetic construct
  source 1..20: mol_type = other DNA
tactcagagcaaagtagagt

SEQ ID NO: 202792 - DNA, 20 bp, synthetic construct
  source 1..20: mol_type = other DNA
ctactcagagcaaagtagag

SEQ ID NO: 202793 - DNA, 20 bp, synthetic construct
  source 1..20: mol_type = other DNA
actactcagagcaaagtaga

SEQ ID NO: 202794 - DNA, 20 bp, synthetic construct
  source 1..20: mol_type = other DNA
gactactcagagcaaagtag

SEQ ID NO: 202795 - DNA, 20 bp, synthetic construct
  source 1..20: mol_type = other DNA
agactactcagagcaaagta

SEQ ID NO: 202796 - DNA, 20 bp, synthetic construct
  source 1..20: mol_type = other DNA
aagactactcagagcaaagt

SEQ ID NO: 202797 - DNA, 20 bp, synthetic construct
  source 1..20: mol_type = other DNA
aaagactactcagagcaaag

SEQ ID NO: 202798 - DNA, 20 bp, synthetic construct
  source 1..20: mol_type = other DNA
gaaagactactcagagcaaa

SEQ ID NO: 202799 - DNA, 20 bp, synthetic construct
  source 1..20: mol_type = other DNA
ggaaagactactcagagcaa

SEQ ID NO: 202800 - DNA, 20 bp, synthetic construct
  source 1..20: mol_type = other DNA
gggaaagactactcagagca

SEQ ID NO: 202801 - DNA, 20 bp, synthetic construct
  source 1..20: mol_type = other DNA
ggggaaagactactcagagc

SEQ ID NO: 202802 - DNA, 20 bp, synthetic construct
  source 1..20: mol_type = other DNA
tggggaaagactactcagag

SEQ ID NO: 202803 - DNA, 20 bp, synthetic construct
  source 1..20: mol_type = other DNA
ctggggaaagactactcaga

SEQ ID NO: 202804 - DNA, 20 bp, synthetic construct
  source 1..20: mol_type = other DNA
cctggggaaagactactcag

SEQ ID NO: 202805 - DNA, 20 bp, synthetic construct
  source 1..20: mol_type = other DNA
acctggggaaagactactca

SEQ ID NO: 202806 - DNA, 20 bp, synthetic construct
  source 1..20: mol_type = other DNA
cacctggggaaagactactc

SEQ ID NO: 202807 - DNA, 20 bp, synthetic construct
  source 1..20: mol_type = other DNA
tcacctggggaaagactact

SEQ ID NO: 202808 - DNA, 20 bp, synthetic construct
  source 1..20: mol_type = other DNA
atcacctggggaaagactac

SEQ ID NO: 202809 - DNA, 20 bp, synthetic construct
  source 1..20: mol_type = other DNA
catcacctggggaaagacta

SEQ ID NO: 202810 - DNA, 20 bp, synthetic construct
  source 1..20: mol_type = other DNA
tcatcacctggggaaagact

SEQ ID NO: 202811 - DNA, 20 bp, synthetic construct
  source 1..20: mol_type = other DNA
atcatcacctggggaaagac

SEQ ID NO: 202812 - DNA, 20 bp, synthetic construct
  source 1..20: mol_type = other DNA
tatcatcacctggggaaaga

SEQ ID NO: 202813 - DNA, 20 bp, synthetic construct
  source 1..20: mol_type = other DNA
ttatcatcacctggggaaag

SEQ ID NO: 202814 - DNA, 20 bp, synthetic construct
  source 1..20: mol_type = other DNA
tttatcatcacctggggaaa

SEQ ID NO: 202815 - DNA, 20 bp, synthetic construct
  source 1..20: mol_type = other DNA
ttttatcatcacctggggaa

SEQ ID NO: 202816 - DNA, 20 bp, synthetic construct
  source 1..20: mol_type = other DNA
tttttatcatcacctgggga

SEQ ID NO: 202817 - DNA, 20 bp, synthetic construct
  source 1..20: mol_type = other DNA
atttttatcatcacctgggg

SEQ ID NO: 202818 - DNA, 20 bp, synthetic construct
  source 1..20: mol_type = other DNA
catttttatcatcacctggg

SEQ ID NO: 202819 - DNA, 20 bp, synthetic construct
  source 1..20: mol_type = other DNA
ccatttttatcatcacctgg

SEQ ID NO: 202820 - DNA, 20 bp, synthetic construct
  source 1..20: mol_type = other DNA
accatttttatcatcacctg

SEQ ID NO: 202821 - DNA, 20 bp, synthetic construct
  source 1..20: mol_type = other DNA
gaccatttttatcatcacct

SEQ ID NO: 202822 - DNA, 20 bp, synthetic construct
  source 1..20: mol_type = other DNA
tgaccatttttatcatcacc

SEQ ID NO: 202823 - DNA, 20 bp, synthetic construct
  source 1..20: mol_type = other DNA
atgaccatttttatcatcac

SEQ ID NO: 202824 - DNA, 20 bp, synthetic construct
  source 1..20: mol_type = other DNA
gatgaccatttttatcatca

SEQ ID NO: 202825 - DNA, 20 bp, synthetic construct
  source 1..20: mol_type = other DNA
tgatgaccatttttatcatc

SEQ ID NO: 202826 - DNA, 20 bp, synthetic construct
  source 1..20: mol_type = other DNA
atgatgaccatttttatcat

SEQ ID NO: 202827 - DNA, 20 bp, synthetic construct
  source 1..20: mol_type = other DNA
gatgatgaccatttttatca

SEQ ID NO: 202828 - DNA, 20 bp, synthetic construct
  source 1..20: mol_type = other DNA
cgatgatgaccatttttatc

SEQ ID NO: 202829 - DNA, 20 bp, synthetic construct
  source 1..20: mol_type = other DNA
gcgatgatgaccatttttat

SEQ ID NO: 202830 - DNA, 20 bp, synthetic construct
  source 1..20: mol_type = other DNA
ggcgatgatgaccattttta

SEQ ID NO: 202831 - DNA, 20 bp, synthetic construct
  source 1..20: mol_type = other DNA
tggcgatgatgaccattttt

SEQ ID NO: 202832 - DNA, 20 bp, synthetic construct
  source 1..20: mol_type = other DNA
ctggcgatgatgaccatttt

SEQ ID NO: 202833 - DNA, 20 bp, synthetic construct
  source 1..20: mol_type = other DNA
cctggcgatgatgaccattt

SEQ ID NO: 202834 - DNA, 20 bp, synthetic construct
  source 1..20: mol_type = other DNA
gcctggcgatgatgaccatt

SEQ ID NO: 202835 - DNA, 20 bp, synthetic construct
  source 1..20: mol_type = other DNA
agcctggcgatgatgaccat

SEQ ID NO: 202836 - DNA, 20 bp, synthetic construct
  source 1..20: mol_type = other DNA
aagcctggcgatgatgacca

SEQ ID NO: 202837 - DNA, 20 bp, synthetic construct
  source 1..20: mol_type = other DNA
caagcctggcgatgatgacc

SEQ ID NO: 202838 - DNA, 20 bp, synthetic construct
  source 1..20: mol_type = other DNA
acaagcctggcgatgatgac

SEQ ID NO: 202839 - DNA, 20 bp, synthetic construct
  source 1..20: mol_type = other DNA
cacaagcctggcgatgatga

SEQ ID NO: 202840 - DNA, 20 bp, synthetic construct
  source 1..20: mol_type = other DNA
acacaagcctggcgatgatg

SEQ ID NO: 202841 - DNA, 20 bp, synthetic construct
  source 1..20: mol_type = other DNA
gacacaagcctggcgatgat

SEQ ID NO: 202842 - DNA, 20 bp, synthetic construct
  source 1..20: mol_type = other DNA
ggacacaagcctggcgatga

SEQ ID NO: 202843 - DNA, 20 bp, synthetic construct
  source 1..20: mol_type = other DNA
aggacacaagcctggcgatg

SEQ ID NO: 202844 - DNA, 20 bp, synthetic construct
  source 1..20: mol_type = other DNA
caggacacaagcctggcgat

SEQ ID NO: 202845 - DNA, 20 bp, synthetic construct
  source 1..20: mol_type = other DNA
acaggacacaagcctggcga

SEQ ID NO: 202846 - DNA, 20 bp, synthetic construct
  source 1..20: mol_type = other DNA
aacaggacacaagcctggcg

SEQ ID NO: 202847 - DNA, 20 bp, synthetic construct
  source 1..20: mol_type = other DNA
aaacaggacacaagcctggc

SEQ ID NO: 202848 - DNA, 20 bp, synthetic construct
  source 1..20: mol_type = other DNA
taaacaggacacaagcctgg

SEQ ID NO: 202849 - DNA, 20 bp, synthetic construct
  source 1..20: mol_type = other DNA
ctaaacaggacacaagcctg

SEQ ID NO: 202850 - DNA, 20 bp, synthetic construct
  source 1..20: mol_type = other DNA
actaaacaggacacaagcct

SEQ ID NO: 202851 - DNA, 20 bp, synthetic construct
  source 1..20: mol_type = other DNA
tactaaacaggacacaagcc

SEQ ID NO: 202852 - DNA, 20 bp, synthetic construct
  source 1..20: mol_type = other DNA
ctactaaacaggacacaagc

SEQ ID NO: 202853 - DNA, 20 bp, synthetic construct
  source 1..20: mol_type = other DNA
cctactaaacaggacacaag

SEQ ID NO: 202854 - DNA, 20 bp, synthetic construct
  source 1..20: mol_type = other DNA
tcctactaaacaggacacaa

SEQ ID NO: 202855 - DNA, 20 bp, synthetic construct
  source 1..20: mol_type = other DNA
ttcctactaaacaggacaca

SEQ ID NO: 202856 - DNA, 20 bp, synthetic construct
  source 1..20: mol_type = other DNA
attcctactaaacaggacac

SEQ ID NO: 202857 - DNA, 20 bp, synthetic construct
  source 1..20: mol_type = other DNA
tattcctactaaacaggaca

SEQ ID NO: 202858 - DNA, 20 bp, synthetic construct
  source 1..20: mol_type = other DNA
atattcctactaaacaggac

SEQ ID NO: 202859 - DNA, 20 bp, synthetic construct
  source 1..20: mol_type = other DNA
tatattcctactaaacagga

SEQ ID NO: 202860 - DNA, 20 bp, synthetic construct
  source 1..20: mol_type = other DNA
gtatattcctactaaacagg

SEQ ID NO: 202861 - DNA, 20 bp, synthetic construct
  source 1..20: mol_type = other DNA
tgtatattcctactaaacag

SEQ ID NO: 202862 - DNA, 20 bp, synthetic construct
  source 1..20: mol_type = other DNA
ttgtatattcctactaaaca

SEQ ID NO: 202863 - DNA, 20 bp, synthetic construct
  source 1..20: mol_type = other DNA
cttgtatattcctactaaac

SEQ ID NO: 202864 - DNA, 20 bp, synthetic construct
  source 1..20: mol_type = other DNA
tcttgtatattcctactaaa

SEQ ID NO: 202865 - DNA, 20 bp, synthetic construct
  source 1..20: mol_type = other DNA
ttcttgtatattcctactaa

SEQ ID NO: 202866 - DNA, 20 bp, synthetic construct
  source 1..20: mol_type = other DNA
cttcttgtatattcctacta

SEQ ID NO: 202867 - DNA, 20 bp, synthetic construct
  source 1..20: mol_type = other DNA
tcttcttgtatattcctact

SEQ ID NO: 202868 - DNA, 20 bp, synthetic construct
  source 1..20: mol_type = other DNA
ctcttcttgtatattcctac

SEQ ID NO: 202869 - DNA, 20 bp, synthetic construct
  source 1..20: mol_type = other DNA
gctcttcttgtatattccta

SEQ ID NO: 202870 - DNA, 20 bp, synthetic construct
  source 1..20: mol_type = other DNA
agctcttcttgtatattcct

SEQ ID NO: 202871 - DNA, 20 bp, synthetic construct
  source 1..20: mol_type = other DNA
gagctcttcttgtatattcc

SEQ ID NO: 202872 - DNA, 20 bp, synthetic construct
  source 1..20: mol_type = other DNA
tgagctcttcttgtatattc

SEQ ID NO: 202873 - DNA, 20 bp, synthetic construct
  source 1..20: mol_type = other DNA
ctgagctcttcttgtatatt

SEQ ID NO: 202874 - DNA, 20 bp, synthetic construct
  source 1..20: mol_type = other DNA
actgagctcttcttgtatat

SEQ ID NO: 202875 - DNA, 20 bp, synthetic construct
  source 1..20: mol_type = other DNA
tactgagctcttcttgtata

SEQ ID NO: 202876 - DNA, 20 bp, synthetic construct
  source 1..20: mol_type = other DNA
ttactgagctcttcttgtat

SEQ ID NO: 202877 - DNA, 20 bp, synthetic construct
  source 1..20: mol_type = other DNA
tttactgagctcttcttgta

SEQ ID NO: 202878 - DNA, 20 bp, synthetic construct
  source 1..20: mol_type = other DNA
atttactgagctcttcttgt

SEQ ID NO: 202879 - DNA, 20 bp, synthetic construct
  source 1..20: mol_type = other DNA
catttactgagctcttcttg

SEQ ID NO: 202880 - DNA, 20 bp, synthetic construct
  source 1..20: mol_type = other DNA
gcatttactgagctcttctt

SEQ ID NO: 202881 - DNA, 20 bp, synthetic construct
  source 1..20: mol_type = other DNA
agcatttactgagctcttct

SEQ ID NO: 202882 - DNA, 20 bp, synthetic construct
  source 1..20: mol_type = other DNA
cagcatttactgagctcttc

SEQ ID NO: 202883 - DNA, 20 bp, synthetic construct
  source 1..20: mol_type = other DNA
ccagcatttactgagctctt

SEQ ID NO: 202884 - DNA, 20 bp, synthetic construct
  source 1..20: mol_type = other DNA
gccagcatttactgagctct

SEQ ID NO: 202885 - DNA, 20 bp, synthetic construct
  source 1..20: mol_type = other DNA
ggccagcatttactgagctc

SEQ ID NO: 202886 - DNA, 20 bp, synthetic construct
  source 1..20: mol_type = other DNA
gggccagcatttactgagct

SEQ ID NO: 202887 - DNA, 20 bp, synthetic construct
  source 1..20: mol_type = other DNA
ggggccagcatttactgagc

SEQ ID NO: 202888 - DNA, 20 bp, synthetic construct
  source 1..20: mol_type = other DNA
tggggccagcatttactgag

SEQ ID NO: 202889 - DNA, 20 bp, synthetic construct
  source 1..20: mol_type = other DNA
gtggggccagcatttactga

SEQ ID NO: 202890 - DNA, 20 bp, synthetic construct
  source 1..20: mol_type = other DNA
ggtggggccagcatttactg

SEQ ID NO: 202891 - DNA, 20 bp, synthetic construct
  source 1..20: mol_type = other DNA
tggtggggccagcatttact

SEQ ID NO: 202892 - DNA, 20 bp, synthetic construct
  source 1..20: mol_type = other DNA
gtggtggggccagcatttac

SEQ ID NO: 202893 - DNA, 20 bp, synthetic construct
  source 1..20: mol_type = other DNA
agtggtggggccagcattta

SEQ ID NO: 202894 - DNA, 20 bp, synthetic construct
  source 1..20: mol_type = other DNA
tagtggtggggccagcattt

SEQ ID NO: 202895 - DNA, 20 bp, synthetic construct
  source 1..20: mol_type = other DNA
ttagtggtggggccagcatt

SEQ ID NO: 202896 - DNA, 20 bp, synthetic construct
  source 1..20: mol_type = other DNA
cttagtggtggggccagcat

SEQ ID NO: 202897 - DNA, 20 bp, synthetic construct
  source 1..20: mol_type = other DNA
gcttagtggtggggccagca

SEQ ID NO: 202898 - DNA, 20 bp, synthetic construct
  source 1..20: mol_type = other DNA
tgcttagtggtggggccagc

SEQ ID NO: 202899 - DNA, 20 bp, synthetic construct
  source 1..20: mol_type = other DNA
ttgcttagtggtggggccag

SEQ ID NO: 202900 - DNA, 20 bp, synthetic construct
  source 1..20: mol_type = other DNA
tttgcttagtggtggggcca

SEQ ID NO: 202901 - DNA, 20 bp, synthetic construct
  source 1..20: mol_type = other DNA
ttttgcttagtggtggggcc

SEQ ID NO: 202902 - DNA, 20 bp, synthetic construct
  source 1..20: mol_type = other DNA
tttttgcttagtggtggggc

SEQ ID NO: 202903 - DNA, 20 bp, synthetic construct
  source 1..20: mol_type = other DNA
gtttttgcttagtggtgggg

SEQ ID NO: 202904 - DNA, 20 bp, synthetic construct
  source 1..20: mol_type = other DNA
tgtttttgcttagtggtggg

SEQ ID NO: 202905 - DNA, 20 bp, synthetic construct
  source 1..20: mol_type = other DNA
ttgtttttgcttagtggtgg

SEQ ID NO: 202906 - DNA, 20 bp, synthetic construct
  source 1..20: mol_type = other DNA
tttgtttttgcttagtggtg

SEQ ID NO: 202907 - DNA, 20 bp, synthetic construct
  source 1..20: mol_type = other DNA
ttttgtttttgcttagtggt

SEQ ID NO: 202908 - DNA, 20 bp, synthetic construct
  source 1..20: mol_type = other DNA
gttttgtttttgcttagtgg

SEQ ID NO: 202909 - DNA, 20 bp, synthetic construct
  source 1..20: mol_type = other DNA
agttttgtttttgcttagtg

SEQ ID NO: 202910 - DNA, 20 bp, synthetic construct
  source 1..20: mol_type = other DNA
aagttttgtttttgcttagt

SEQ ID NO: 202911 - DNA, 20 bp, synthetic construct
  source 1..20: mol_type = other DNA
aaagttttgtttttgcttag

SEQ ID NO: 202912 - DNA, 20 bp, synthetic construct
  source 1..20: mol_type = other DNA
aaaagttttgtttttgctta

SEQ ID NO: 202913 - DNA, 20 bp, synthetic construct
  source 1..20: mol_type = other DNA
caaaagttttgtttttgctt

SEQ ID NO: 202914 - DNA, 20 bp, synthetic construct
  source 1..20: mol_type = other DNA
acaaaagttttgtttttgct

SEQ ID NO: 202915 - DNA, 20 bp, synthetic construct
  source 1..20: mol_type = other DNA
aacaaaagttttgtttttgc

SEQ ID NO: 202916 - DNA, 20 bp, synthetic construct
  source 1..20: mol_type = other DNA
caacaaaagttttgtttttg

SEQ ID NO: 202917 - DNA, 20 bp, synthetic construct
  source 1..20: mol_type = other DNA
acaacaaaagttttgttttt

SEQ ID NO: 202918 - DNA, 20 bp, synthetic construct
  source 1..20: mol_type = other DNA
aacaacaaaagttttgtttt

SEQ ID NO: 202919 - DNA, 20 bp, synthetic construct
  source 1..20: mol_type = other DNA
caacaacaaaagttttgttt

SEQ ID NO: 202920 - DNA, 20 bp, synthetic construct
  source 1..20: mol_type = other DNA
acaacaacaaaagttttgtt

SEQ ID NO: 202921 - DNA, 20 bp, synthetic construct
  source 1..20: mol_type = other DNA
aacaacaacaaaagttttgt

SEQ ID NO: 202922 - DNA, 20 bp, synthetic construct
  source 1..20: mol_type = other DNA
taacaacaacaaaagttttg

SEQ ID NO: 202923 - DNA, 20 bp, synthetic construct
  source 1..20: mol_type = other DNA
ataacaacaacaaaagtttt

SEQ ID NO: 202924 - DNA, 20 bp, synthetic construct
  source 1..20: mol_type = other DNA
aataacaacaacaaaagttt

SEQ ID NO: 202925 - DNA, 20 bp, synthetic construct
  source 1..20: mol_type = other DNA
caataacaacaacaaaagtt

SEQ ID NO: 202926 - DNA, 20 bp, synthetic construct
  source 1..20: mol_type = other DNA
acaataacaacaacaaaagt

SEQ ID NO: 202927 - DNA, 20 bp, synthetic construct
  source 1..20: mol_type = other DNA
aacaataacaacaacaaaag

SEQ ID NO: 202928 - DNA, 20 bp, synthetic construct
  source 1..20: mol_type = other DNA
caacaataacaacaacaaaa

SEQ ID NO: 202929 - DNA, 20 bp, synthetic construct
  source 1..20: mol_type = other DNA
acaacaataacaacaacaaa

SEQ ID NO: 202930 - DNA, 20 bp, synthetic construct
  source 1..20: mol_type = other DNA
aacaacaataacaacaacaa

SEQ ID NO: 202931 - DNA, 20 bp, synthetic construct
  source 1..20: mol_type = other DNA
aaacaacaataacaacaaca

SEQ ID NO: 202932 - DNA, 20 bp, synthetic construct
  source 1..20: mol_type = other DNA
aaaacaacaataacaacaac

SEQ ID NO: 202933 - DNA, 20 bp, synthetic construct
  source 1..20: mol_type = other DNA
taaaacaacaataacaacaa

SEQ ID NO: 202934 - DNA, 20 bp, synthetic construct
  source 1..20: mol_type = other DNA
ttaaaacaacaataacaaca

SEQ ID NO: 202935 - DNA, 20 bp, synthetic construct
  source 1..20: mol_type = other DNA
tttaaaacaacaataacaac

SEQ ID NO: 202936 - DNA, 20 bp, synthetic construct
  source 1..20: mol_type = other DNA
atttaaaacaacaataacaa

SEQ ID NO: 202937 - DNA, 20 bp, synthetic construct
  source 1..20: mol_type = other DNA
tatttaaaacaacaataaca

SEQ ID NO: 202938 - DNA, 20 bp, synthetic construct
  source 1..20: mol_type = other DNA
ttatttaaaacaacaataac

SEQ ID NO: 202939 - DNA, 20 bp, synthetic construct
  source 1..20: mol_type = other DNA
gttatttaaaacaacaataa

SEQ ID NO: 202940 - DNA, 20 bp, synthetic construct
  source 1..20: mol_type = other DNA
tgttatttaaaacaacaata

SEQ ID NO: 202941 - DNA, 20 bp, synthetic construct
  source 1..20: mol_type = other DNA
ctgttatttaaaacaacaat

SEQ ID NO: 202942 - DNA, 20 bp, synthetic construct
  source 1..20: mol_type = other DNA
gctgttatttaaaacaacaa

SEQ ID NO: 202943 - DNA, 20 bp, synthetic construct
  source 1..20: mol_type = other DNA
agctgttatttaaaacaaca

SEQ ID NO: 202944 - DNA, 20 bp, synthetic construct
  source 1..20: mol_type = other DNA
aagctgttatttaaaacaac

SEQ ID NO: 202945 - DNA, 20 bp, synthetic construct
  source 1..20: mol_type = other DNA
taagctgttatttaaaacaa

SEQ ID NO: 202946 - DNA, 20 bp, synthetic construct
  source 1..20: mol_type = other DNA
ctaagctgttatttaaaaca

SEQ ID NO: 202947 - DNA, 20 bp, synthetic construct
  source 1..20: mol_type = other DNA
tctaagctgttatttaaaac

SEQ ID NO: 202948 - DNA, 20 bp, synthetic construct
  source 1..20: mol_type = other DNA
gtctaagctgttatttaaaa

SEQ ID NO: 202949 - DNA, 20 bp, synthetic construct
  source 1..20: mol_type = other DNA
ggtctaagctgttatttaaa

SEQ ID NO: 202950 - DNA, 20 bp, synthetic construct
  source 1..20: mol_type = other DNA
aggtctaagctgttatttaa

SEQ ID NO: 202951 - DNA, 20 bp, synthetic construct
  source 1..20: mol_type = other DNA
aaggtctaagctgttattta

SEQ ID NO: 202952 - DNA, 20 bp, synthetic construct
  source 1..20: mol_type = other DNA
aaaggtctaagctgttattt

SEQ ID NO: 202953 - DNA, 20 bp, synthetic construct
  source 1..20: mol_type = other DNA
gaaaggtctaagctgttatt

SEQ ID NO: 202954 - DNA, 20 bp, synthetic construct
  source 1..20: mol_type = other DNA
agaaaggtctaagctgttat

SEQ ID NO: 202955 - DNA, 20 bp, synthetic construct
  source 1..20: mol_type = other DNA
aagaaaggtctaagctgtta

SEQ ID NO: 202956 - DNA, 20 bp, synthetic construct
  source 1..20: mol_type = other DNA
gaagaaaggtctaagctgtt

SEQ ID NO: 202957 - DNA, 20 bp, synthetic construct
  source 1..20: mol_type = other DNA
agaagaaaggtctaagctgt

SEQ ID NO: 202958 - DNA, 20 bp, synthetic construct
  source 1..20: mol_type = other DNA
aagaagaaaggtctaagctg

SEQ ID NO: 202959 - DNA, 20 bp, synthetic construct
  source 1..20: mol_type = other DNA
aaagaagaaaggtctaagct

SEQ ID NO: 202960 - DNA, 20 bp, synthetic construct
  source 1..20: mol_type = other DNA
gaaagaagaaaggtctaagc

SEQ ID NO: 202961 - DNA, 20 bp, synthetic construct
  source 1..20: mol_type = other DNA
ggaaagaagaaaggtctaag

SEQ ID NO: 202962 - DNA, 20 bp, synthetic construct
  source 1..20: mol_type = other DNA
aggaaagaagaaaggtctaa

SEQ ID NO: 202963 - DNA, 20 bp, synthetic construct
  source 1..20: mol_type = other DNA
aaggaaagaagaaaggtcta

SEQ ID NO: 202964 - DNA, 20 bp, synthetic construct
  source 1..20: mol_type = other DNA
caaggaaagaagaaaggtct

SEQ ID NO: 202965 - DNA, 20 bp, synthetic construct
  source 1..20: mol_type = other DNA
acaaggaaagaagaaaggtc

SEQ ID NO: 202966 - DNA, 20 bp, synthetic construct
  source 1..20: mol_type = other DNA
aacaaggaaagaagaaaggt

SEQ ID NO: 202967 - DNA, 20 bp, synthetic construct
  source 1..20: mol_type = other DNA
taacaaggaaagaagaaagg

SEQ ID NO: 202968 - DNA, 20 bp, synthetic construct
  source 1..20: mol_type = other DNA
ataacaaggaaagaagaaag

SEQ ID NO: 202969 - DNA, 20 bp, synthetic construct
  source 1..20: mol_type = other DNA
aataacaaggaaagaagaaa

SEQ ID NO: 202970 - DNA, 20 bp, synthetic construct
  source 1..20: mol_type = other DNA
gaataacaaggaaagaagaa

SEQ ID NO: 202971 - DNA, 20 bp, synthetic construct
  source 1..20: mol_type = other DNA
agaataacaaggaaagaaga

SEQ ID NO: 202972 - DNA, 20 bp, synthetic construct
  source 1..20: mol_type = other DNA
gagaataacaaggaaagaag

SEQ ID NO: 202973 - DNA, 20 bp, synthetic construct
  source 1..20: mol_type = other DNA
agagaataacaaggaaagaa

SEQ ID NO: 202974 - DNA, 20 bp, synthetic construct
  source 1..20: mol_type = other DNA
aagagaataacaaggaaaga

SEQ ID NO: 202975 - DNA, 20 bp, synthetic construct
  source 1..20: mol_type = other DNA
aaagagaataacaaggaaag

SEQ ID NO: 202976 - DNA, 20 bp, synthetic construct
  source 1..20: mol_type = other DNA
gaaagagaataacaaggaaa

SEQ ID NO: 202977 - DNA, 20 bp, synthetic construct
  source 1..20: mol_type = other DNA
tgaaagagaataacaaggaa

SEQ ID NO: 202978 - DNA, 20 bp, synthetic construct
  source 1..20: mol_type = other DNA
atgaaagagaataacaagga

SEQ ID NO: 202979 - DNA, 20 bp, synthetic construct
  source 1..20: mol_type = other DNA
gatgaaagagaataacaagg

SEQ ID NO: 202980 - DNA, 20 bp, synthetic construct
  source 1..20: mol_type = other DNA
agatgaaagagaataacaag

SEQ ID NO: 202981 - DNA, 20 bp, synthetic construct
  source 1..20: mol_type = other DNA
cagatgaaagagaataacaa

SEQ ID NO: 202982 - DNA, 20 bp, synthetic construct
  source 1..20: mol_type = other DNA
acagatgaaagagaataaca

SEQ ID NO: 202983 - DNA, 20 bp, synthetic construct
  source 1..20: mol_type = other DNA
tacagatgaaagagaataac

SEQ ID NO: 202984 - DNA, 20 bp, synthetic construct
  source 1..20: mol_type = other DNA
ttacagatgaaagagaataa

SEQ ID NO: 202985 - DNA, 20 bp, synthetic construct
  source 1..20: mol_type = other DNA
attacagatgaaagagaata

SEQ ID NO: 202986 - DNA, 20 bp, synthetic construct
  source 1..20: mol_type = other DNA
gattacagatgaaagagaat

SEQ ID NO: 202987 - DNA, 20 bp, synthetic construct
  source 1..20: mol_type = other DNA
ggattacagatgaaagagaa

SEQ ID NO: 202988 - DNA, 20 bp, synthetic construct
  source 1..20: mol_type = other DNA
tggattacagatgaaagaga

SEQ ID NO: 202989 - DNA, 20 bp, synthetic construct
  source 1..20: mol_type = other DNA
ctggattacagatgaaagag

SEQ ID NO: 202990 - DNA, 20 bp, synthetic construct
  source 1..20: mol_type = other DNA
actggattacagatgaaaga

SEQ ID NO: 202991 - DNA, 20 bp, synthetic construct
  source 1..20: mol_type = other DNA
aactggattacagatgaaag

SEQ ID NO: 202992 - DNA, 20 bp, synthetic construct
  source 1..20: mol_type = other DNA
aaactggattacagatgaaa

SEQ ID NO: 202993 - DNA, 20 bp, synthetic construct
  source 1..20: mol_type = other DNA
aaaactggattacagatgaa

SEQ ID NO: 202994 - DNA, 20 bp, synthetic construct
  source 1..20: mol_type = other DNA
gaaaactggattacagatga

SEQ ID NO: 202995 - DNA, 20 bp, synthetic construct
  source 1..20: mol_type = other DNA
agaaaactggattacagatg

SEQ ID NO: 202996 - DNA, 20 bp, synthetic construct
  source 1..20: mol_type = other DNA
tagaaaactggattacagat

SEQ ID NO: 202997 - DNA, 20 bp, synthetic construct
  source 1..20: mol_type = other DNA
gtagaaaactggattacaga

SEQ ID NO: 202998 - DNA, 20 bp, synthetic construct
  source 1..20: mol_type = other DNA
agtagaaaactggattacag

SEQ ID NO: 202999 - DNA, 20 bp, synthetic construct
  source 1..20: mol_type = other DNA
aagtagaaaactggattaca

SEQ ID NO: 203000 - DNA, 20 bp, synthetic construct
  source 1..20: mol_type = other DNA
gaagtagaaaactggattac

SEQ ID NO: 203001 - DNA, 20 bp, synthetic construct
  source 1..20: mol_type = other DNA
agaagtagaaaactggatta

SEQ ID NO: 203002 - DNA, 20 bp, synthetic construct
  source 1..20: mol_type = other DNA
cagaagtagaaaactggatt

SEQ ID NO: 203003 - DNA, 20 bp, synthetic construct
  source 1..20: mol_type = other DNA
tcagaagtagaaaactggat

SEQ ID NO: 203004 - DNA, 20 bp, synthetic construct
  source 1..20: mol_type = other DNA
ttcagaagtagaaaactgga

SEQ ID NO: 203005 - DNA, 20 bp, synthetic construct
  source 1..20: mol_type = other DNA
cttcagaagtagaaaactgg

SEQ ID NO: 203006 - DNA, 20 bp, synthetic construct
  source 1..20: mol_type = other DNA
acttcagaagtagaaaactg

SEQ ID NO: 203007 - DNA, 20 bp, synthetic construct
  source 1..20: mol_type = other DNA
tacttcagaagtagaaaact

SEQ ID NO: 203008 - DNA, 20 bp, synthetic construct
  source 1..20: mol_type = other DNA
atacttcagaagtagaaaac

SEQ ID NO: 203009 - DNA, 20 bp, synthetic construct
  source 1..20: mol_type = other DNA
tatacttcagaagtagaaaa

SEQ ID NO: 203010 - DNA, 20 bp, synthetic construct
  source 1..20: mol_type = other DNA
ctatacttcagaagtagaaa

SEQ ID NO: 203011 - DNA, 20 bp, synthetic construct
  source 1..20: mol_type = other DNA
tctatacttcagaagtagaa

SEQ ID NO: 203012 - DNA, 20 bp, synthetic construct
  source 1..20: mol_type = other DNA
ttctatacttcagaagtaga

SEQ ID NO: 203013 - DNA, 20 bp, synthetic construct
  source 1..20: mol_type = other DNA
attctatacttcagaagtag

SEQ ID NO: 203014 - DNA, 20 bp, synthetic construct
  source 1..20: mol_type = other DNA
cattctatacttcagaagta

SEQ ID NO: 203015 - DNA, 20 bp, synthetic construct
  source 1..20: mol_type = other DNA
acattctatacttcagaagt

SEQ ID NO: 203016 - DNA, 20 bp, synthetic construct
  source 1..20: mol_type = other DNA
aacattctatacttcagaag

SEQ ID NO: 203017 - DNA, 20 bp, synthetic construct
  source 1..20: mol_type = other DNA
gaacattctatacttcagaa

SEQ ID NO: 203018 - DNA, 20 bp, synthetic construct
  source 1..20: mol_type = other DNA
agaacattctatacttcaga

SEQ ID NO: 203019 - DNA, 20 bp, synthetic construct
  source 1..20: mol_type = other DNA
cagaacattctatacttcag

SEQ ID NO: 203020 - DNA, 20 bp, synthetic construct
  source 1..20: mol_type = other DNA
tcagaacattctatacttca

SEQ ID NO: 203021 - DNA, 20 bp, synthetic construct
  source 1..20: mol_type = other DNA
atcagaacattctatacttc

SEQ ID NO: 203022 - DNA, 20 bp, synthetic construct
  source 1..20: mol_type = other DNA
catcagaacattctatactt

SEQ ID NO: 203023 - DNA, 20 bp, synthetic construct
  source 1..20: mol_type = other DNA
tcatcagaacattctatact

SEQ ID NO: 203024 - DNA, 20 bp, synthetic construct
  source 1..20: mol_type = other DNA
atcatcagaacattctatac

SEQ ID NO: 203025 - DNA, 20 bp, synthetic construct
  source 1..20: mol_type = other DNA
aatcatcagaacattctata

SEQ ID NO: 203026 - DNA, 20 bp, synthetic construct
  source 1..20: mol_type = other DNA
aaatcatcagaacattctat

SEQ ID NO: 203027 - DNA, 20 bp, synthetic construct
  source 1..20: mol_type = other DNA
taaatcatcagaacattcta

SEQ ID NO: 203028 - DNA, 20 bp, synthetic construct
  source 1..20: mol_type = other DNA
ataaatcatcagaacattct

SEQ ID NO: 203029 - DNA, 20 bp, synthetic construct
  source 1..20: mol_type = other DNA
aataaatcatcagaacattc

SEQ ID NO: 203030 - DNA, 20 bp, synthetic construct
  source 1..20: mol_type = other DNA
gaataaatcatcagaacatt

SEQ ID NO: 203031 - DNA, 20 bp, synthetic construct
  source 1..20: mol_type = other DNA
agaataaatcatcagaacat

SEQ ID NO: 203032 - DNA, 20 bp, synthetic construct
  source 1..20: mol_type = other DNA
aagaataaatcatcagaaca

SEQ ID NO: 203033 - DNA, 20 bp, synthetic construct
  source 1..20: mol_type = other DNA
gaagaataaatcatcagaac

SEQ ID NO: 203034 - DNA, 20 bp, synthetic construct
  source 1..20: mol_type = other DNA
tgaagaataaatcatcagaa

SEQ ID NO: 203035 - DNA, 20 bp, synthetic construct
  source 1..20: mol_type = other DNA
atgaagaataaatcatcaga

SEQ ID NO: 203036 - DNA, 20 bp, synthetic construct
  source 1..20: mol_type = other DNA
aatgaagaataaatcatcag

SEQ ID NO: 203037 - DNA, 20 bp, synthetic construct
  source 1..20: mol_type = other DNA
taatgaagaataaatcatca

SEQ ID NO: 203038 - DNA, 20 bp, synthetic construct
  source 1..20: mol_type = other DNA
gtaatgaagaataaatcatc

SEQ ID NO: 203039 - DNA, 20 bp, synthetic construct
  source 1..20: mol_type = other DNA
ggtaatgaagaataaatcat

SEQ ID NO: 203040 - DNA, 20 bp, synthetic construct
  source 1..20: mol_type = other DNA
gggtaatgaagaataaatca

SEQ ID NO: 203041 - DNA, 20 bp, synthetic construct
  source 1..20: mol_type = other DNA
tgggtaatgaagaataaatc

SEQ ID NO: 203042 - DNA, 20 bp, synthetic construct
  source 1..20: mol_type = other DNA
gtgggtaatgaagaataaat

SEQ ID NO: 203043 - DNA, 20 bp, synthetic construct
  source 1..20: mol_type = other DNA
tgtgggtaatgaagaataaa

SEQ ID NO: 203044 - DNA, 20 bp, synthetic construct
  source 1..20: mol_type = other DNA
ttgtgggtaatgaagaataa

SEQ ID NO: 203045 - DNA, 20 bp, synthetic construct
  source 1..20: mol_type = other DNA
gttgtgggtaatgaagaata

SEQ ID NO: 203046 - DNA, 20 bp, synthetic construct
  source 1..20: mol_type = other DNA
agttgtgggtaatgaagaat

SEQ ID NO: 203047 - DNA, 20 bp, synthetic construct
  source 1..20: mol_type = other DNA
aagttgtgggtaatgaagaa

SEQ ID NO: 203048 - DNA, 20 bp, synthetic construct
  source 1..20: mol_type = other DNA
caagttgtgggtaatgaaga

SEQ ID NO: 203049 - DNA, 20 bp, synthetic construct
  source 1..20: mol_type = other DNA
gcaagttgtgggtaatgaag

SEQ ID NO: 203050 - DNA, 20 bp, synthetic construct
  source 1..20: mol_type = other DNA
tgcaagttgtgggtaatgaa

SEQ ID NO: 203051 - DNA, 20 bp, synthetic construct
  source 1..20: mol_type = other DNA
gtgcaagttgtgggtaatga

SEQ ID NO: 203052 - DNA, 20 bp, synthetic construct
  source 1..20: mol_type = other DNA
tgtgcaagttgtgggtaatg

SEQ ID NO: 203053 - DNA, 20 bp, synthetic construct
  source 1..20: mol_type = other DNA
atgtgcaagttgtgggtaat

SEQ ID NO: 203054 - DNA, 20 bp, synthetic construct
  source 1..20: mol_type = other DNA
catgtgcaagttgtgggtaa

SEQ ID NO: 203055 - DNA, 20 bp, synthetic construct
  source 1..20: mol_type = other DNA
acatgtgcaagttgtgggta

SEQ ID NO: 203056 - DNA, 20 bp, synthetic construct
  source 1..20: mol_type = other DNA
aacatgtgcaagttgtgggt

SEQ ID NO: 203057 - DNA, 20 bp, synthetic construct
  source 1..20: mol_type = other DNA
aaacatgtgcaagttgtggg

SEQ ID NO: 203058 - DNA, 20 bp, synthetic construct
  source 1..20: mol_type = other DNA
taaacatgtgcaagttgtgg

SEQ ID NO: 203059 - DNA, 20 bp, synthetic construct
  source 1..20: mol_type = other DNA
ataaacatgtgcaagttgtg

SEQ ID NO: 203060 - DNA, 20 bp, synthetic construct
  source 1..20: mol_type = other DNA
aataaacatgtgcaagttgt

SEQ ID NO: 203061 - DNA, 20 bp, synthetic construct
  source 1..20: mol_type = other DNA
aaataaacatgtgcaagttg

SEQ ID NO: 203062 - DNA, 20 bp, synthetic construct
  source 1..20: mol_type = other DNA
taaataaacatgtgcaagtt

SEQ ID NO: 203063 - DNA, 20 bp, synthetic construct
  source 1..20: mol_type = other DNA
ttaaataaacatgtgcaagt

SEQ ID NO: 203064 - DNA, 20 bp, synthetic construct
  source 1..20: mol_type = other DNA
tttaaataaacatgtgcaag

SEQ ID NO: 203065 - DNA, 20 bp, synthetic construct
  source 1..20: mol_type = other DNA
ttttaaataaacatgtgcaa

SEQ ID NO: 203066 - DNA, 20 bp, synthetic construct
  source 1..20: mol_type = other DNA
tttttaaataaacatgtgca

SEQ ID NO: 203067 - DNA, 20 bp, synthetic construct
  source 1..20: mol_type = other DNA
atttttaaataaacatgtgc

SEQ ID NO: 203068 - DNA, 20 bp, synthetic construct
  source 1..20: mol_type = other DNA
catttttaaataaacatgtg

SEQ ID NO: 203069 - DNA, 20 bp, synthetic construct
  source 1..20: mol_type = other DNA
gcatttttaaataaacatgt

SEQ ID NO: 203070 - DNA, 20 bp, synthetic construct
  source 1..20: mol_type = other DNA
ggcatttttaaataaacatg

SEQ ID NO: 203071 - DNA, 20 bp, synthetic construct
  source 1..20: mol_type = other DNA
tggcatttttaaataaacat

SEQ ID NO: 203072 - DNA, 20 bp, synthetic construct
  source 1..20: mol_type = other DNA
ctggcatttttaaataaaca

SEQ ID NO: 203073 - DNA, 20 bp, synthetic construct
  source 1..20: mol_type = other DNA
cctggcatttttaaataaac

SEQ ID NO: 203074 - DNA, 20 bp, synthetic construct
  source 1..20: mol_type = other DNA
tcctggcatttttaaataaa

SEQ ID NO: 203075 - DNA, 20 bp, synthetic construct
  source 1..20: mol_type = other DNA
atcctggcatttttaaataa

SEQ ID NO: 203076 - DNA, 20 bp, synthetic construct
  source 1..20: mol_type = other DNA
aatcctggcatttttaaata

SEQ ID NO: 203077 - DNA, 20 bp, synthetic construct
  source 1..20: mol_type = other DNA
caatcctggcatttttaaat

SEQ ID NO: 203078 - DNA, 20 bp, synthetic construct
  source 1..20: mol_type = other DNA
gcaatcctggcatttttaaa

SEQ ID NO: 203079 - DNA, 20 bp, synthetic construct
  source 1..20: mol_type = other DNA
ggcaatcctggcatttttaa

SEQ ID NO: 203080 - DNA, 20 bp, synthetic construct
  source 1..20: mol_type = other DNA
aggcaatcctggcattttta

SEQ ID NO: 203081 - DNA, 20 bp, synthetic construct
  source 1..20: mol_type = other DNA
caggcaatcctggcattttt

SEQ ID NO: 203082 - DNA, 20 bp, synthetic construct
  source 1..20: mol_type = other DNA
ccaggcaatcctggcatttt

SEQ ID NO: 203083 - DNA, 20 bp, synthetic construct
  source 1..20: mol_type = other DNA
gccaggcaatcctggcattt

SEQ ID NO: 203084 - DNA, 20 bp, synthetic construct
  source 1..20: mol_type = other DNA
ggccaggcaatcctggcatt

SEQ ID NO: 203085 - DNA, 20 bp, synthetic construct
  source 1..20: mol_type = other DNA
cggccaggcaatcctggcat

SEQ ID NO: 203086 - DNA, 20 bp, synthetic construct
  source 1..20: mol_type = other DNA
acggccaggcaatcctggca

SEQ ID NO: 203087 - DNA, 20 bp, synthetic construct
  source 1..20: mol_type = other DNA
aacggccaggcaatcctggc

SEQ ID NO: 203088 - DNA, 20 bp, synthetic construct
  source 1..20: mol_type = other DNA
caacggccaggcaatcctgg

SEQ ID NO: 203089 - DNA, 20 bp, synthetic construct
  source 1..20: mol_type = other DNA
acaacggccaggcaatcctg

SEQ ID NO: 203090 - DNA, 20 bp, synthetic construct
  source 1..20: mol_type = other DNA
cacaacggccaggcaatcct

SEQ ID NO: 203091 - DNA, 20 bp, synthetic construct
  source 1..20: mol_type = other DNA
acacaacggccaggcaatcc

SEQ ID NO: 203092 - DNA, 20 bp, synthetic construct
  source 1..20: mol_type = other DNA
cacacaacggccaggcaatc

SEQ ID NO: 203093 - DNA, 20 bp, synthetic construct
  source 1..20: mol_type = other DNA
gcacacaacggccaggcaat

SEQ ID NO: 203094 - DNA, 20 bp, synthetic construct
  source 1..20: mol_type = other DNA
agcacacaacggccaggcaa

SEQ ID NO: 203095 - DNA, 20 bp, synthetic construct
  source 1..20: mol_type = other DNA
cagcacacaacggccaggca

SEQ ID NO: 203096 - DNA, 20 bp, synthetic construct
  source 1..20: mol_type = other DNA
acagcacacaacggccaggc

SEQ ID NO: 203097 - DNA, 20 bp, synthetic construct
  source 1..20: mol_type = other DNA
aacagcacacaacggccagg

SEQ ID NO: 203098 - DNA, 20 bp, synthetic construct
  source 1..20: mol_type = other DNA
taacagcacacaacggccag

SEQ ID NO: 203099 - DNA, 20 bp, synthetic construct
  source 1..20: mol_type = other DNA
ttaacagcacacaacggcca

SEQ ID NO: 203100 - DNA, 20 bp, synthetic construct
  source 1..20: mol_type = other DNA
gttaacagcacacaacggcc

SEQ ID NO: 203101 - DNA, 20 bp, synthetic construct
  source 1..20: mol_type = other DNA
ggttaacagcacacaacggc

SEQ ID NO: 203102 - DNA, 20 bp, synthetic construct
  source 1..20: mol_type = other DNA
aggttaacagcacacaacgg

SEQ ID NO: 203103 - DNA, 20 bp, synthetic construct
  source 1..20: mol_type = other DNA
aaggttaacagcacacaacg

SEQ ID NO: 203104 - DNA, 20 bp, synthetic construct
  source 1..20: mol_type = other DNA
aaaggttaacagcacacaac

SEQ ID NO: 203105 - DNA, 20 bp, synthetic construct
  source 1..20: mol_type = other DNA
caaaggttaacagcacacaa

SEQ ID NO: 203106 - DNA, 20 bp, synthetic construct
  source 1..20: mol_type = other DNA
acaaaggttaacagcacaca

SEQ ID NO: 203107 - DNA, 20 bp, synthetic construct
  source 1..20: mol_type = other DNA
aacaaaggttaacagcacac

SEQ ID NO: 203108 - DNA, 20 bp, synthetic construct
  source 1..20: mol_type = other DNA
aaacaaaggttaacagcaca

SEQ ID NO: 203109 - DNA, 20 bp, synthetic construct
  source 1..20: mol_type = other DNA
caaacaaaggttaacagcac

SEQ ID NO: 203110 - DNA, 20 bp, synthetic construct
  source 1..20: mol_type = other DNA
gcaaacaaaggttaacagca

SEQ ID NO: 203111 - DNA, 20 bp, synthetic construct
  source 1..20: mol_type = other DNA
agcaaacaaaggttaacagc

SEQ ID NO: 203112 - DNA, 20 bp, synthetic construct
  source 1..20: mol_type = other DNA
cagcaaacaaaggttaacag

SEQ ID NO: 203113 - DNA, 20 bp, synthetic construct
  source 1..20: mol_type = other DNA
acagcaaacaaaggttaaca

SEQ ID NO: 203114 - DNA, 20 bp, synthetic construct
  source 1..20: mol_type = other DNA
aacagcaaacaaaggttaac

SEQ ID NO: 203115 - DNA, 20 bp, synthetic construct
  source 1..20: mol_type = other DNA
taacagcaaacaaaggttaa

SEQ ID NO: 203116 - DNA, 20 bp, synthetic construct
  source 1..20: mol_type = other DNA
ctaacagcaaacaaaggtta

SEQ ID NO: 203117 - DNA, 20 bp, synthetic construct
  source 1..20: mol_type = other DNA
actaacagcaaacaaaggtt

SEQ ID NO: 203118 - DNA, 20 bp, synthetic construct
  source 1..20: mol_type = other DNA
cactaacagcaaacaaaggt

SEQ ID NO: 203119 - DNA, 20 bp, synthetic construct
  source 1..20: mol_type = other DNA
ccactaacagcaaacaaagg

SEQ ID NO: 203120 - DNA, 20 bp, synthetic construct
  source 1..20: mol_type = other DNA
tccactaacagcaaacaaag

SEQ ID NO: 203121 - DNA, 20 bp, synthetic construct
  source 1..20: mol_type = other DNA
atccactaacagcaaacaaa

SEQ ID NO: 203122 - DNA, 20 bp, synthetic construct
  source 1..20: mol_type = other DNA
gatccactaacagcaaacaa

SEQ ID NO: 203123 - DNA, 20 bp, synthetic construct
  source 1..20: mol_type = other DNA
ggatccactaacagcaaaca

SEQ ID NO: 203124 - DNA, 20 bp, synthetic construct
  source 1..20: mol_type = other DNA
gggatccactaacagcaaac

SEQ ID NO: 203125 - DNA, 20 bp, synthetic construct
  source 1..20: mol_type = other DNA
agggatccactaacagcaaa

SEQ ID NO: 203126 - DNA, 20 bp, synthetic construct
  source 1..20: mol_type = other DNA
cagggatccactaacagcaa

SEQ ID NO: 203127 - DNA, 20 bp, synthetic construct
  source 1..20: mol_type = other DNA
tcagggatccactaacagca

SEQ ID NO: 203128 - DNA, 20 bp, synthetic construct
  source 1..20: mol_type = other DNA
ttcagggatccactaacagc

SEQ ID NO: 203129 - DNA, 20 bp, synthetic construct
  source 1..20: mol_type = other DNA
cttcagggatccactaacag

SEQ ID NO: 203130 - DNA, 20 bp, synthetic construct
  source 1..20: mol_type = other DNA
acttcagggatccactaaca

SEQ ID NO: 203131 - DNA, 20 bp, synthetic construct
  source 1..20: mol_type = other DNA
aacttcagggatccactaac

SEQ ID NO: 203132 - DNA, 20 bp, synthetic construct
  source 1..20: mol_type = other DNA
gaacttcagggatccactaa

SEQ ID NO: 203133 - DNA, 20 bp, synthetic construct
  source 1..20: mol_type = other DNA
tgaacttcagggatccacta

SEQ ID NO: 203134 - DNA, 20 bp, synthetic construct
  source 1..20: mol_type = other DNA
ctgaacttcagggatccact

SEQ ID NO: 203135 - DNA, 20 bp, synthetic construct
  source 1..20: mol_type = other DNA
cctgaacttcagggatccac

SEQ ID NO: 203136 - DNA, 20 bp, synthetic construct
  source 1..20: mol_type = other DNA
gcctgaacttcagggatcca

SEQ ID NO: 203137 - DNA, 20 bp, synthetic construct
  source 1..20: mol_type = other DNA
agcctgaacttcagggatcc

SEQ ID NO: 203138 - DNA, 20 bp, synthetic construct
  source 1..20: mol_type = other DNA
gagcctgaacttcagggatc

SEQ ID NO: 203139 - DNA, 20 bp, synthetic construct
  source 1..20: mol_type = other DNA
ggagcctgaacttcagggat

SEQ ID NO: 203140 - DNA, 20 bp, synthetic construct
  source 1..20: mol_type = other DNA
gggagcctgaacttcaggga

SEQ ID NO: 203141 - DNA, 20 bp, synthetic construct
  source 1..20: mol_type = other DNA
tgggagcctgaacttcaggg

SEQ ID NO: 203142 - DNA, 20 bp, synthetic construct
  source 1..20: mol_type = other DNA
ctgggagcctgaacttcagg

SEQ ID NO: 203143 - DNA, 20 bp, synthetic construct
  source 1..20: mol_type = other DNA
cctgggagcctgaacttcag

SEQ ID NO: 203144 - DNA, 20 bp, synthetic construct
  source 1..20: mol_type = other DNA
ccctgggagcctgaacttca

SEQ ID NO: 203145 - DNA, 20 bp, synthetic construct
  source 1..20: mol_type = other DNA
cccctgggagcctgaacttc

SEQ ID NO: 203146 - DNA, 20 bp, synthetic construct
  source 1..20: mol_type = other DNA
tcccctgggagcctgaactt

SEQ ID NO: 203147 - DNA, 20 bp, synthetic construct
  source 1..20: mol_type = other DNA
ctcccctgggagcctgaact

SEQ ID NO: 203148 - DNA, 20 bp, synthetic construct
  source 1..20: mol_type = other DNA
gctcccctgggagcctgaac

SEQ ID NO: 203149 - DNA, 20 bp, synthetic construct
  source 1..20: mol_type = other DNA
tgctcccctgggagcctgaa

SEQ ID NO: 203150 - DNA, 20 bp, synthetic construct
  source 1..20: mol_type = other DNA
ctgctcccctgggagcctga

SEQ ID NO: 203151 - DNA, 20 bp, synthetic construct
  source 1..20: mol_type = other DNA
tctgctcccctgggagcctg

SEQ ID NO: 203152 - DNA, 20 bp, synthetic construct
  source 1..20: mol_type = other DNA
atctgctcccctgggagcct

SEQ ID NO: 203153 - DNA, 20 bp, synthetic construct
  source 1..20: mol_type = other DNA
tatctgctcccctgggagcc

SEQ ID NO: 203154 - DNA, 20 bp, synthetic construct
  source 1..20: mol_type = other DNA
ttatctgctcccctgggagc

SEQ ID NO: 203155 - DNA, 20 bp, synthetic construct
  source 1..20: mol_type = other DNA
attatctgctcccctgggag

SEQ ID NO: 203156 - DNA, 20 bp, synthetic construct
  source 1..20: mol_type = other DNA
cattatctgctcccctggga

SEQ ID NO: 203157 - DNA, 20 bp, synthetic construct
  source 1..20: mol_type = other DNA
ccattatctgctcccctggg

SEQ ID NO: 203158 - DNA, 20 bp, synthetic construct
  source 1..20: mol_type = other DNA
cccattatctgctcccctgg

SEQ ID NO: 203159 - DNA, 20 bp, synthetic construct
  source 1..20: mol_type = other DNA
acccattatctgctcccctg

SEQ ID NO: 203160 - DNA, 20 bp, synthetic construct
  source 1..20: mol_type = other DNA
tacccattatctgctcccct

SEQ ID NO: 203161 - DNA, 20 bp, synthetic construct
  source 1..20: mol_type = other DNA
atacccattatctgctcccc

SEQ ID NO: 203162 - DNA, 20 bp, synthetic construct
  source 1..20: mol_type = other DNA
gatacccattatctgctccc

SEQ ID NO: 203163 - DNA, 20 bp, synthetic construct
  source 1..20: mol_type = other DNA
ggatacccattatctgctcc

SEQ ID NO: 203164 - DNA, 20 bp, synthetic construct
  source 1..20: mol_type = other DNA
tggatacccattatctgctc

SEQ ID NO: 203165 - DNA, 20 bp, synthetic construct
  source 1..20: mol_type = other DNA
ctggatacccattatctgct

SEQ ID NO: 203166 - DNA, 20 bp, synthetic construct
  source 1..20: mol_type = other DNA
actggatacccattatctgc

SEQ ID NO: 203167 - DNA, 20 bp, synthetic construct
  source 1..20: mol_type = other DNA
aactggatacccattatctg

SEQ ID NO: 203168 - DNA, 20 bp, synthetic construct
  source 1..20: mol_type = other DNA
gaactggatacccattatct

SEQ ID NO: 203169 - DNA, 20 bp, synthetic construct
  source 1..20: mol_type = other DNA
ggaactggatacccattatc

SEQ ID NO: 203170 - DNA, 20 bp, synthetic construct
  source 1..20: mol_type = other DNA
aggaactggatacccattat

SEQ ID NO: 203171 - DNA, 20 bp, synthetic construct
  source 1..20: mol_type = other DNA
caggaactggatacccatta

SEQ ID NO: 203172 - DNA, 20 bp, synthetic construct
  source 1..20: mol_type = other DNA
gcaggaactggatacccatt

SEQ ID NO: 203173 - DNA, 20 bp, synthetic construct
  source 1..20: mol_type = other DNA
tgcaggaactggatacccat

SEQ ID NO: 203174 - DNA, 20 bp, synthetic construct
  source 1..20: mol_type = other DNA
ttgcaggaactggataccca

SEQ ID NO: 203175 - DNA, 20 bp, synthetic construct
  source 1..20: mol_type = other DNA
attgcaggaactggataccc

SEQ ID NO: 203176 - DNA, 20 bp, synthetic construct
  source 1..20: mol_type = other DNA
tattgcaggaactggatacc

SEQ ID NO: 203177 - DNA, 20 bp, synthetic construct
  source 1..20: mol_type = other DNA
atattgcaggaactggatac

SEQ ID NO: 203178 - DNA, 20 bp, synthetic construct
  source 1..20: mol_type = other DNA
gatattgcaggaactggata

SEQ ID NO: 203179 - DNA, 20 bp, synthetic construct
  source 1..20: mol_type = other DNA
ggatattgcaggaactggat

SEQ ID NO: 203180 - DNA, 20 bp, synthetic construct
  source 1..20: mol_type = other DNA
tggatattgcaggaactgga

SEQ ID NO: 203181 - DNA, 20 bp, synthetic construct
  source 1..20: mol_type = other DNA
gtggatattgcaggaactgg

SEQ ID NO: 203182 - DNA, 20 bp, synthetic construct
  source 1..20: mol_type = other DNA
ggtggatattgcaggaactg

SEQ ID NO: 203183 - DNA, 20 bp, synthetic construct
  source 1..20: mol_type = other DNA
gggtggatattgcaggaact

SEQ ID NO: 203184 - DNA, 20 bp, synthetic construct
  source 1..20: mol_type = other DNA
agggtggatattgcaggaac

SEQ ID NO: 203185 - DNA, 20 bp, synthetic construct
  source 1..20: mol_type = other DNA
gagggtggatattgcaggaa

SEQ ID NO: 203186 - DNA, 20 bp, synthetic construct
  source 1..20: mol_type = other DNA
agagggtggatattgcagga

SEQ ID NO: 203187 - DNA, 20 bp, synthetic construct
  source 1..20: mol_type = other DNA
cagagggtggatattgcagg

SEQ ID NO: 203188 - DNA, 20 bp, synthetic construct
  source 1..20: mol_type = other DNA
ccagagggtggatattgcag

SEQ ID NO: 203189 - DNA, 20 bp, synthetic construct
  source 1..20: mol_type = other DNA
gccagagggtggatattgca

SEQ ID NO: 203190 - DNA, 20 bp, synthetic construct
  source 1..20: mol_type = other DNA
tgccagagggtggatattgc

SEQ ID NO: 203191 - DNA, 20 bp, synthetic construct
  source 1..20: mol_type = other DNA
ttgccagagggtggatattg

SEQ ID NO: 203192 - DNA, 20 bp, synthetic construct
  source 1..20: mol_type = other DNA
cttgccagagggtggatatt

SEQ ID NO: 203193 - DNA, 20 bp, synthetic construct
  source 1..20: mol_type = other DNA
gcttgccagagggtggatat

SEQ ID NO: 203194 - DNA, 20 bp, synthetic construct
  source 1..20: mol_type = other DNA
ggcttgccagagggtggata

SEQ ID NO: 203195 - DNA, 20 bp, synthetic construct
  source 1..20: mol_type = other DNA
tggcttgccagagggtggat

SEQ ID NO: 203196 - DNA, 20 bp, synthetic construct
  source 1..20: mol_type = other DNA
ttggcttgccagagggtgga

SEQ ID NO: 203197 - DNA, 20 bp, synthetic construct
  source 1..20: mol_type = other DNA
cttggcttgccagagggtgg

SEQ ID NO: 203198 - DNA, 20 bp, synthetic construct
  source 1..20: mol_type = other DNA
acttggcttgccagagggtg

SEQ ID NO: 203199 - DNA, 20 bp, synthetic construct
  source 1..20: mol_type = other DNA
aacttggcttgccagagggt

SEQ ID NO: 203200 - DNA, 20 bp, synthetic construct
  source 1..20: mol_type = other DNA
gaacttggcttgccagaggg

SEQ ID NO: 203201 - DNA, 20 bp, synthetic construct
  source 1..20: mol_type = other DNA
ggaacttggcttgccagagg

SEQ ID NO: 203202 - DNA, 20 bp, synthetic construct
  source 1..20: mol_type = other DNA
aggaacttggcttgccagag

SEQ ID NO: 203203 - DNA, 20 bp, synthetic construct
  source 1..20: mol_type = other DNA
aaggaacttggcttgccaga

SEQ ID NO: 203204 - DNA, 20 bp, synthetic construct
  source 1..20: mol_type = other DNA
gaaggaacttggcttgccag

SEQ ID NO: 203205 - DNA, 20 bp, synthetic construct
  source 1..20: mol_type = other DNA
ggaaggaacttggcttgcca

SEQ ID NO: 203206 - DNA, 20 bp, synthetic construct
  source 1..20: mol_type = other DNA
aggaaggaacttggcttgcc

SEQ ID NO: 203207 - DNA, 20 bp, synthetic construct
  source 1..20: mol_type = other DNA
caggaaggaacttggcttgc

SEQ ID NO: 203208 - DNA, 20 bp, synthetic construct
  source 1..20: mol_type = other DNA
ccaggaaggaacttggcttg

SEQ ID NO: 203209 - DNA, 20 bp, synthetic construct
  source 1..20: mol_type = other DNA
cccaggaaggaacttggctt

SEQ ID NO: 203210 - DNA, 20 bp, synthetic construct
  source 1..20: mol_type = other DNA
acccaggaaggaacttggct

SEQ ID NO: 203211 - DNA, 20 bp, synthetic construct
  source 1..20: mol_type = other DNA
tacccaggaaggaacttggc

SEQ ID NO: 203212 - DNA, 20 bp, synthetic construct
  source 1..20: mol_type = other DNA
ttacccaggaaggaacttgg

SEQ ID NO: 203213 - DNA, 20 bp, synthetic construct
  source 1..20: mol_type = other DNA
cttacccaggaaggaacttg

SEQ ID NO: 203214 - DNA, 20 bp, synthetic construct
  source 1..20: mol_type = other DNA
ccttacccaggaaggaactt

SEQ ID NO: 203215 - DNA, 20 bp, synthetic construct
  source 1..20: mol_type = other DNA
accttacccaggaaggaact

SEQ ID NO: 203216 - DNA, 20 bp, synthetic construct
  source 1..20: mol_type = other DNA
aaccttacccaggaaggaac

SEQ ID NO: 203217 - DNA, 20 bp, synthetic construct
  source 1..20: mol_type = other DNA
aaaccttacccaggaaggaa

SEQ ID NO: 203218 - DNA, 20 bp, synthetic construct
  source 1..20: mol_type = other DNA
aaaaccttacccaggaagga

SEQ ID NO: 203219 - DNA, 20 bp, synthetic construct
  source 1..20: mol_type = other DNA
caaaaccttacccaggaagg

SEQ ID NO: 203220 - DNA, 20 bp, synthetic construct
  source 1..20: mol_type = other DNA
gcaaaaccttacccaggaag

SEQ ID NO: 203221 - DNA, 20 bp, synthetic construct
  source 1..20: mol_type = other DNA
ggcaaaaccttacccaggaa

SEQ ID NO: 203222 - DNA, 20 bp, synthetic construct
  source 1..20: mol_type = other DNA
aggcaaaaccttacccagga

SEQ ID NO: 203223 - DNA, 20 bp, synthetic construct
  source 1..20: mol_type = other DNA
taggcaaaaccttacccagg

SEQ ID NO: 203224 - DNA, 20 bp, synthetic construct
  source 1..20: mol_type = other DNA
gtaggcaaaaccttacccag

SEQ ID NO: 203225 - DNA, 20 bp, synthetic construct
  source 1..20: mol_type = other DNA
ggtaggcaaaaccttaccca

SEQ ID NO: 203226 - DNA, 20 bp, synthetic construct
  source 1..20: mol_type = other DNA
aggtaggcaaaaccttaccc

SEQ ID NO: 203227 - DNA, 20 bp, synthetic construct
  source 1..20: mol_type = other DNA
caggtaggcaaaaccttacc

SEQ ID NO: 203228 - DNA, 20 bp, synthetic construct
  source 1..20: mol_type = other DNA
gcaggtaggcaaaaccttac

SEQ ID NO: 203229 - DNA, 20 bp, synthetic construct
  source 1..20: mol_type = other DNA
tgcaggtaggcaaaacctta

SEQ ID NO: 203230 - DNA, 20 bp, synthetic construct
  source 1..20: mol_type = other DNA
atgcaggtaggcaaaacctt

SEQ ID NO: 203231 - DNA, 20 bp, synthetic construct
  source 1..20: mol_type = other DNA
aatgcaggtaggcaaaacct

SEQ ID NO: 203232 - DNA, 20 bp, synthetic construct
  source 1..20: mol_type = other DNA
gaatgcaggtaggcaaaacc

SEQ ID NO: 203233 - DNA, 20 bp, synthetic construct
  source 1..20: mol_type = other DNA
ggaatgcaggtaggcaaaac

SEQ ID NO: 203234 - DNA, 20 bp, synthetic construct
  source 1..20: mol_type = other DNA
aggaatgcaggtaggcaaaa

SEQ ID NO: 203235 - DNA, 20 bp, synthetic construct
  source 1..20: mol_type = other DNA
taggaatgcaggtaggcaaa

SEQ ID NO: 203236 - DNA, 20 bp, synthetic construct
  source 1..20: mol_type = other DNA
ctaggaatgcaggtaggcaa

SEQ ID NO: 203237 - DNA, 20 bp, synthetic construct
  source 1..20: mol_type = other DNA
cctaggaatgcaggtaggca

SEQ ID NO: 203238 - DNA, 20 bp, synthetic construct
  source 1..20: mol_type = other DNA
ccctaggaatgcaggtaggc

SEQ ID NO: 203239 - DNA, 20 bp, synthetic construct
  source 1..20: mol_type = other DNA
tccctaggaatgcaggtagg

SEQ ID NO: 203240 - DNA, 20 bp, synthetic construct
  source 1..20: mol_type = other DNA
ttccctaggaatgcaggtag

SEQ ID NO: 203241 - DNA, 20 bp, synthetic construct
  source 1..20: mol_type = other DNA
cttccctaggaatgcaggta

SEQ ID NO: 203242 - DNA, 20 bp, synthetic construct
  source 1..20: mol_type = other DNA
acttccctaggaatgcaggt

SEQ ID NO: 203243 - DNA, 20 bp, synthetic construct
  source 1..20: mol_type = other DNA
aacttccctaggaatgcagg

SEQ ID NO: 203244 - DNA, 20 bp, synthetic construct
  source 1..20: mol_type = other DNA
aaacttccctaggaatgcag

SEQ ID NO: 203245 - DNA, 20 bp, synthetic construct
  source 1..20: mol_type = other DNA
gaaacttccctaggaatgca

SEQ ID NO: 203246 - DNA, 20 bp, synthetic construct
  source 1..20: mol_type = other DNA
agaaacttccctaggaatgc

SEQ ID NO: 203247 - DNA, 20 bp, synthetic construct
  source 1..20: mol_type = other DNA
cagaaacttccctaggaatg

SEQ ID NO: 203248 - DNA, 20 bp, synthetic construct
  source 1..20: mol_type = other DNA
ccagaaacttccctaggaat

SEQ ID NO: 203249 - DNA, 20 bp, synthetic construct
  source 1..20: mol_type = other DNA
cccagaaacttccctaggaa

SEQ ID NO: 203250 - DNA, 20 bp, synthetic construct
  source 1..20: mol_type = other DNA
gcccagaaacttccctagga

SEQ ID NO: 203251 - DNA, 20 bp, synthetic construct
  source 1..20: mol_type = other DNA
ggcccagaaacttccctagg

SEQ ID NO: 203252 - DNA, 20 bp, synthetic construct
  source 1..20: mol_type = other DNA
aggcccagaaacttccctag

SEQ ID NO: 203253 - DNA, 20 bp, synthetic construct
  source 1..20: mol_type = other DNA
caggcccagaaacttcccta

SEQ ID NO: 203254 - DNA, 20 bp, synthetic construct
  source 1..20: mol_type = other DNA
tcaggcccagaaacttccct

SEQ ID NO: 203255 - DNA, 20 bp, synthetic construct
  source 1..20: mol_type = other DNA
gtcaggcccagaaacttccc

SEQ ID NO: 203256 - DNA, 20 bp, synthetic construct
  source 1..20: mol_type = other DNA
ggtcaggcccagaaacttcc

SEQ ID NO: 203257 - DNA, 20 bp, synthetic construct
  source 1..20: mol_type = other DNA
tggtcaggcccagaaacttc

SEQ ID NO: 203258 - DNA, 20 bp, synthetic construct
  source 1..20: mol_type = other DNA
gtggtcaggcccagaaactt

SEQ ID NO: 203259 - DNA, 20 bp, synthetic construct
  source 1..20: mol_type = other DNA
ggtggtcaggcccagaaact

SEQ ID NO: 203260 - DNA, 20 bp, synthetic construct
  source 1..20: mol_type = other DNA
tggtggtcaggcccagaaac

SEQ ID NO: 203261 - DNA, 20 bp, synthetic construct
  source 1..20: mol_type = other DNA
ttggtggtcaggcccagaaa

SEQ ID NO: 203262 - DNA, 20 bp, synthetic construct
  source 1..20: mol_type = other DNA
cttggtggtcaggcccagaa

SEQ ID NO: 203263 - DNA, 20 bp, synthetic construct
  source 1..20: mol_type = other DNA
gcttggtggtcaggcccaga

SEQ ID NO: 203264 - DNA, 20 bp, synthetic construct
  source 1..20: mol_type = other DNA
ggcttggtggtcaggcccag

SEQ ID NO: 203265 - DNA, 20 bp, synthetic construct
  source 1..20: mol_type = other DNA
tggcttggtggtcaggccca

SEQ ID NO: 203266 - DNA, 20 bp, synthetic construct
  source 1..20: mol_type = other DNA
ctggcttggtggtcaggccc

SEQ ID NO: 203267 - DNA, 20 bp, synthetic construct
  source 1..20: mol_type = other DNA
gctggcttggtggtcaggcc

SEQ ID NO: 203268 - DNA, 20 bp, synthetic construct
  source 1..20: mol_type = other DNA
agctggcttggtggtcaggc

SEQ ID NO: 203269 - DNA, 20 bp, synthetic construct
  source 1..20: mol_type = other DNA
gagctggcttggtggtcagg

SEQ ID NO: 203270 - DNA, 20 bp, synthetic construct
  source 1..20: mol_type = other DNA
agagctggcttggtggtcag

SEQ ID NO: 203271 - DNA, 20 bp, synthetic construct
  source 1..20: mol_type = other DNA
cagagctggcttggtggtca

SEQ ID NO: 203272 - DNA, 20 bp, synthetic construct
  source 1..20: mol_type = other DNA
tcagagctggcttggtggtc

SEQ ID NO: 203273 - DNA, 20 bp, synthetic construct
  source 1..20: mol_type = other DNA
ctcagagctggcttggtggt

SEQ ID NO: 203274 - DNA, 20 bp, synthetic construct
  source 1..20: mol_type = other DNA
tctcagagctggcttggtgg

SEQ ID NO: 203275 - DNA, 20 bp, synthetic construct
  source 1..20: mol_type = other DNA
ttctcagagctggcttggtg

SEQ ID NO: 203276 - DNA, 20 bp, synthetic construct
  source 1..20: mol_type = other DNA
cttctcagagctggcttggt

SEQ ID NO: 203277 - DNA, 20 bp, synthetic construct
  source 1..20: mol_type = other DNA
ccttctcagagctggcttgg

SEQ ID NO: 203278 - DNA, 20 bp, synthetic construct
  source 1..20: mol_type = other DNA
cccttctcagagctggcttg

SEQ ID NO: 203279 - DNA, 20 bp, synthetic construct
  source 1..20: mol_type = other DNA
ccccttctcagagctggctt

SEQ ID NO: 203280 - DNA, 20 bp, synthetic construct
  source 1..20: mol_type = other DNA
accccttctcagagctggct

SEQ ID NO: 203281 - DNA, 20 bp, synthetic construct
  source 1..20: mol_type = other DNA
caccccttctcagagctggc

SEQ ID NO: 203282 - DNA, 20 bp, synthetic construct
  source 1..20: mol_type = other DNA
gcaccccttctcagagctgg

SEQ ID NO: 203283 - DNA, 20 bp, synthetic construct
  source 1..20: mol_type = other DNA
tgcaccccttctcagagctg

SEQ ID NO: 203284 - DNA, 20 bp, synthetic construct
  source 1..20: mol_type = other DNA
atgcaccccttctcagagct

SEQ ID NO: 203285 - DNA, 20 bp, synthetic construct
  source 1..20: mol_type = other DNA
tatgcaccccttctcagagc

SEQ ID NO: 203286 - DNA, 20 bp, synthetic construct
  source 1..20: mol_type = other DNA
ttatgcaccccttctcagag

SEQ ID NO: 203287 - DNA, 20 bp, synthetic construct
  source 1..20: mol_type = other DNA
cttatgcaccccttctcaga

SEQ ID NO: 203288 - DNA, 20 bp, synthetic construct
  source 1..20: mol_type = other DNA
gcttatgcaccccttctcag

SEQ ID NO: 203289 - DNA, 20 bp, synthetic construct
  source 1..20: mol_type = other DNA
ggcttatgcaccccttctca

SEQ ID NO: 203290 - DNA, 20 bp, synthetic construct
  source 1..20: mol_type = other DNA
gggcttatgcaccccttctc

SEQ ID NO: 203291 - DNA, 20 bp, synthetic construct
  source 1..20: mol_type = other DNA
ggggcttatgcaccccttct

SEQ ID NO: 203292 - DNA, 20 bp, synthetic construct
  source 1..20: mol_type = other DNA
tggggcttatgcaccccttc

SEQ ID NO: 203293 - DNA, 20 bp, synthetic construct
  source 1..20: mol_type = other DNA
gtggggcttatgcacccctt

SEQ ID NO: 203294 - DNA, 20 bp, synthetic construct
  source 1..20: mol_type = other DNA
ggtggggcttatgcacccct

SEQ ID NO: 203295 - DNA, 20 bp, synthetic construct
  source 1..20: mol_type = other DNA
tggtggggcttatgcacccc

SEQ ID NO: 203296 - DNA, 20 bp, synthetic construct
  source 1..20: mol_type = other DNA
atggtggggcttatgcaccc

SEQ ID NO: 203297 - DNA, 20 bp, synthetic construct
  source 1..20: mol_type = other DNA
catggtggggcttatgcacc

SEQ ID NO: 203298 - DNA, 20 bp, synthetic construct
  source 1..20: mol_type = other DNA
gcatggtggggcttatgcac

SEQ ID NO: 203299 - DNA, 20 bp, synthetic construct
  source 1..20: mol_type = other DNA
agcatggtggggcttatgca

SEQ ID NO: 203300 - DNA, 20 bp, synthetic construct
  source 1..20: mol_type = other DNA
aagcatggtggggcttatgc

SEQ ID NO: 203301 - DNA, 20 bp, synthetic construct
  source 1..20: mol_type = other DNA
aaagcatggtggggcttatg

SEQ ID NO: 203302 - DNA, 20 bp, synthetic construct
  source 1..20: mol_type = other DNA
caaagcatggtggggcttat

SEQ ID NO: 203303 - DNA, 20 bp, synthetic construct
  source 1..20: mol_type = other DNA
ccaaagcatggtggggctta

SEQ ID NO: 203304 - DNA, 20 bp, synthetic construct
  source 1..20: mol_type = other DNA
gccaaagcatggtggggctt

SEQ ID NO: 203305 - DNA, 20 bp, synthetic construct
  source 1..20: mol_type = other DNA
agccaaagcatggtggggct

SEQ ID NO: 203306 - DNA, 20 bp, synthetic construct
  source 1..20: mol_type = other DNA
gagccaaagcatggtggggc

SEQ ID NO: 203307 - DNA, 20 bp, synthetic construct
  source 1..20: mol_type = other DNA
agagccaaagcatggtgggg

SEQ ID NO: 203308 - DNA, 20 bp, synthetic construct
  source 1..20: mol_type = other DNA
cagagccaaagcatggtggg

SEQ ID NO: 203309 - DNA, 20 bp, synthetic construct
  source 1..20: mol_type = other DNA
acagagccaaagcatggtgg

SEQ ID NO: 203310 - DNA, 20 bp, synthetic construct
  source 1..20: mol_type = other DNA
gacagagccaaagcatggtg

SEQ ID NO: 203311 - DNA, 20 bp, synthetic construct
  source 1..20: mol_type = other DNA
ggacagagccaaagcatggt

SEQ ID NO: 203312 - DNA, 20 bp, synthetic construct
  source 1..20: mol_type = other DNA
gggacagagccaaagcatgg

SEQ ID NO: 203313 - DNA, 20 bp, synthetic construct
  source 1..20: mol_type = other DNA
agggacagagccaaagcatg

SEQ ID NO: 203314 - DNA, 20 bp, synthetic construct
  source 1..20: mol_type = other DNA
tagggacagagccaaagcat

SEQ ID NO: 203315 - DNA, 20 bp, synthetic construct
  source 1..20: mol_type = other DNA
atagggacagagccaaagca

SEQ ID NO: 203316 - DNA, 20 bp, synthetic construct
  source 1..20: mol_type = other DNA
tatagggacagagccaaagc

SEQ ID NO: 203317 - DNA, 20 bp, synthetic construct
  source 1..20: mol_type = other DNA
ctatagggacagagccaaag

SEQ ID NO: 203318 - DNA, 20 bp, synthetic construct
  source 1..20: mol_type = other DNA
tctatagggacagagccaaa

SEQ ID NO: 203319 - DNA, 20 bp, synthetic construct
  source 1..20: mol_type = other DNA
ttctatagggacagagccaa

SEQ ID NO: 203320 - DNA, 20 bp, synthetic construct
  source 1..20: mol_type = other DNA
attctatagggacagagcca

SEQ ID NO: 203321 - DNA, 20 bp, synthetic construct
  source 1..20: mol_type = other DNA
tattctatagggacagagcc

SEQ ID NO: 203322 - DNA, 20 bp, synthetic construct
  source 1..20: mol_type = other DNA
atattctatagggacagagc

SEQ ID NO: 203323 - DNA, 20 bp, synthetic construct
  source 1..20: mol_type = other DNA
aatattctatagggacagag

SEQ ID NO: 203324 - DNA, 20 bp, synthetic construct
  source 1..20: mol_type = other DNA
aaatattctatagggacaga

SEQ ID NO: 203325 - DNA, 20 bp, synthetic construct
  source 1..20: mol_type = other DNA
aaaatattctatagggacag

SEQ ID NO: 203326 - DNA, 20 bp, synthetic construct
  source 1..20: mol_type = other DNA
taaaatattctatagggaca

SEQ ID NO: 203327 - DNA, 20 bp, synthetic construct
  source 1..20: mol_type = other DNA
ataaaatattctatagggac

SEQ ID NO: 203328 - DNA, 20 bp, synthetic construct
  source 1..20: mol_type = other DNA
cataaaatattctataggga

SEQ ID NO: 203329 - DNA, 20 bp, synthetic construct
  source 1..20: mol_type = other DNA
acataaaatattctataggg

SEQ ID NO: 203330 - DNA, 20 bp, synthetic construct
  source 1..20: mol_type = other DNA
aacataaaatattctatagg

SEQ ID NO: 203331 - DNA, 20 bp, synthetic construct
  source 1..20: mol_type = other DNA
caacataaaatattctatag

SEQ ID NO: 203332 - DNA, 20 bp, synthetic construct
  source 1..20: mol_type = other DNA
acaacataaaatattctata

SEQ ID NO: 203333 - DNA, 20 bp, synthetic construct
  source 1..20: mol_type = other DNA
aacaacataaaatattctat

SEQ ID NO: 203334 - DNA, 20 bp, synthetic construct
  source 1..20: mol_type = other DNA
taacaacataaaatattcta

SEQ ID NO: 203335 - DNA, 20 bp, synthetic construct
  source 1..20: mol_type = other DNA
gtaacaacataaaatattct

SEQ ID NO: 203336 - DNA, 20 bp, synthetic construct
  source 1..20: mol_type = other DNA
agtaacaacataaaatattc

SEQ ID NO: 203337 - DNA, 20 bp, synthetic construct
  source 1..20: mol_type = other DNA
cagtaacaacataaaatatt

SEQ ID NO: 203338 - DNA, 20 bp, synthetic construct
  source 1..20: mol_type = other DNA
tcagtaacaacataaaatat

SEQ ID NO: 203339 - DNA, 20 bp, synthetic construct
  source 1..20: mol_type = other DNA
ttcagtaacaacataaaata

SEQ ID NO: 203340 - DNA, 20 bp, synthetic construct
  source 1..20: mol_type = other DNA
tttcagtaacaacataaaat

SEQ ID NO: 203341 - DNA, 20 bp, synthetic construct
  source 1..20: mol_type = other DNA
ttttcagtaacaacataaaa

SEQ ID NO: 203342 - DNA, 20 bp, synthetic construct
  source 1..20: mol_type = other DNA
gttttcagtaacaacataaa

SEQ ID NO: 203343 - DNA, 20 bp, synthetic construct
  source 1..20: mol_type = other DNA
agttttcagtaacaacataa

SEQ ID NO: 203344 - DNA, 20 bp, synthetic construct
  source 1..20: mol_type = other DNA
tagttttcagtaacaacata

SEQ ID NO: 203345 - DNA, 20 bp, synthetic construct
  source 1..20: mol_type = other DNA
ttagttttcagtaacaacat

SEQ ID NO: 203346 - DNA, 20 bp, synthetic construct
  source 1..20: mol_type = other DNA
tttagttttcagtaacaaca

SEQ ID NO: 203347 - DNA, 20 bp, synthetic construct
  source 1..20: mol_type = other DNA
ctttagttttcagtaacaac

SEQ ID NO: 203348 - DNA, 20 bp, synthetic construct
  source 1..20: mol_type = other DNA
cctttagttttcagtaacaa

SEQ ID NO: 203349 - DNA, 20 bp, synthetic construct
  source 1..20: mol_type = other DNA
tcctttagttttcagtaaca

SEQ ID NO: 203350 - DNA, 20 bp, synthetic construct
  source 1..20: mol_type = other DNA
ttcctttagttttcagtaac

SEQ ID NO: 203351 - DNA, 20 bp, synthetic construct
  source 1..20: mol_type = other DNA
cttcctttagttttcagtaa

SEQ ID NO: 203352 - DNA, 20 bp, synthetic construct
  source 1..20: mol_type = other DNA
tcttcctttagttttcagta

SEQ ID NO: 203353 - DNA, 20 bp, synthetic construct
  source 1..20: mol_type = other DNA
atcttcctttagttttcagt

SEQ ID NO: 203354 - DNA, 20 bp, synthetic construct
  source 1..20: mol_type = other DNA
catcttcctttagttttcag

SEQ ID NO: 203355 - DNA, 20 bp, synthetic construct
  source 1..20: mol_type = other DNA
ccatcttcctttagttttca

SEQ ID NO: 203356 - DNA, 20 bp, synthetic construct
  source 1..20: mol_type = other DNA
cccatcttcctttagttttc

SEQ ID NO: 203357 - DNA, 20 bp, synthetic construct
  source 1..20: mol_type = other DNA
acccatcttcctttagtttt

SEQ ID NO: 203358 - DNA, 20 bp, synthetic construct
  source 1..20: mol_type = other DNA
cacccatcttcctttagttt

SEQ ID NO: 203359 - DNA, 20 bp, synthetic construct
  source 1..20: mol_type = other DNA
gcacccatcttcctttagtt

SEQ ID NO: 203360 - DNA, 20 bp, synthetic construct
  source 1..20: mol_type = other DNA
cgcacccatcttcctttagt

SEQ ID NO: 203361 - DNA, 20 bp, synthetic construct
  source 1..20: mol_type = other DNA
ccgcacccatcttcctttag

SEQ ID NO: 203362 - DNA, 20 bp, synthetic construct
  source 1..20: mol_type = other DNA
accgcacccatcttccttta

SEQ ID NO: 203363 - DNA, 20 bp, synthetic construct
  source 1..20: mol_type = other DNA
caccgcacccatcttccttt

SEQ ID NO: 203364 - DNA, 20 bp, synthetic construct
  source 1..20: mol_type = other DNA
ccaccgcacccatcttcctt

SEQ ID NO: 203365 - DNA, 20 bp, synthetic construct
  source 1..20: mol_type = other DNA
gccaccgcacccatcttcct

SEQ ID NO: 203366 - DNA, 20 bp, synthetic construct
  source 1..20: mol_type = other DNA
agccaccgcacccatcttcc

SEQ ID NO: 203367 - DNA, 20 bp, synthetic construct
  source 1..20: mol_type = other DNA
gagccaccgcacccatcttc

SEQ ID NO: 203368 - DNA, 20 bp, synthetic construct
  source 1..20: mol_type = other DNA
tgagccaccgcacccatctt

SEQ ID NO: 203369 - DNA, 20 bp, synthetic construct
  source 1..20: mol_type = other DNA
atgagccaccgcacccatct

SEQ ID NO: 203370 - DNA, 20 bp, synthetic construct
  source 1..20: mol_type = other DNA
catgagccaccgcacccatc

SEQ ID NO: 203371 - DNA, 20 bp, synthetic construct
  source 1..20: mol_type = other DNA
gcatgagccaccgcacccat

SEQ ID NO: 203372 - DNA, 20 bp, synthetic construct
  source 1..20: mol_type = other DNA
ggcatgagccaccgcaccca

SEQ ID NO: 203373 - DNA, 20 bp, synthetic construct
  source 1..20: mol_type = other DNA
aggcatgagccaccgcaccc

SEQ ID NO: 203374 - DNA, 20 bp, synthetic construct
  source 1..20: mol_type = other DNA
caggcatgagccaccgcacc

SEQ ID NO: 203375 - DNA, 20 bp, synthetic construct
  source 1..20: mol_type = other DNA
acaggcatgagccaccgcac

SEQ ID NO: 203376 - DNA, 20 bp, synthetic construct
  source 1..20: mol_type = other DNA
tacaggcatgagccaccgca

SEQ ID NO: 203377 - DNA, 20 bp, synthetic construct
  source 1..20: mol_type = other DNA
ttacaggcatgagccaccgc

SEQ ID NO: 203378 - DNA, 20 bp, synthetic construct
  source 1..20: mol_type = other DNA
attacaggcatgagccaccg

SEQ ID NO: 203379 - DNA, 20 bp, synthetic construct
  source 1..20: mol_type = other DNA
gattacaggcatgagccacc

SEQ ID NO: 203380 - DNA, 20 bp, synthetic construct
  source 1..20: mol_type = other DNA
ggattacaggcatgagccac

SEQ ID NO: 203381 - DNA, 20 bp, synthetic construct
  source 1..20: mol_type = other DNA
gggattacaggcatgagcca

SEQ ID NO: 203382 - DNA, 20 bp, synthetic construct
  source 1..20: mol_type = other DNA
tgggattacaggcatgagcc

SEQ ID NO: 203383 - DNA, 20 bp, synthetic construct
  source 1..20: mol_type = other DNA
ctgggattacaggcatgagc

SEQ ID NO: 203384 - DNA, 20 bp, synthetic construct
  source 1..20: mol_type = other DNA
gctgggattacaggcatgag

SEQ ID NO: 203385 - DNA, 20 bp, synthetic construct
  source 1..20: mol_type = other DNA
tgctgggattacaggcatga

SEQ ID NO: 203386 - DNA, 20 bp, synthetic construct
  source 1..20: mol_type = other DNA
gtgctgggattacaggcatg

SEQ ID NO: 203387 - DNA, 20 bp, synthetic construct
  source 1..20: mol_type = other DNA
agtgctgggattacaggcat

SEQ ID NO: 203388 - DNA, 20 bp, synthetic construct
  source 1..20: mol_type = other DNA
aagtgctgggattacaggca

SEQ ID NO: 203389 - DNA, 20 bp, synthetic construct
  source 1..20: mol_type = other DNA
aaagtgctgggattacaggc

SEQ ID NO: 203390 - DNA, 20 bp, synthetic construct
  source 1..20: mol_type = other DNA
caaagtgctgggattacagg

SEQ ID NO: 203391 - DNA, 20 bp, synthetic construct
  source 1..20: mol_type = other DNA
ccaaagtgctgggattacag

SEQ ID NO: 203392 - DNA, 20 bp, synthetic construct
  source 1..20: mol_type = other DNA
cccaaagtgctgggattaca

SEQ ID NO: 203393 - DNA, 20 bp, synthetic construct
  source 1..20: mol_type = other DNA
tcccaaagtgctgggattac

SEQ ID NO: 203394 - DNA, 20 bp, synthetic construct
  source 1..20: mol_type = other DNA
ctcccaaagtgctgggatta

SEQ ID NO: 203395 - DNA, 20 bp, synthetic construct
  source 1..20: mol_type = other DNA
cctcccaaagtgctgggatt

SEQ ID NO: 203396 - DNA, 20 bp, synthetic construct
  source 1..20: mol_type = other DNA
gcctcccaaagtgctgggat

SEQ ID NO: 203397 - DNA, 20 bp, synthetic construct
  source 1..20: mol_type = other DNA
ggcctcccaaagtgctggga

SEQ ID NO: 203398 - DNA, 20 bp, synthetic construct
  source 1..20: mol_type = other DNA
tggcctcccaaagtgctggg

SEQ ID NO: 203399 - DNA, 20 bp, synthetic construct
  source 1..20: mol_type = other DNA
ttggcctcccaaagtgctgg

SEQ ID NO: 203400 - DNA, 20 bp, synthetic construct
  source 1..20: mol_type = other DNA
cttggcctcccaaagtgctg

SEQ ID NO: 203401 - DNA, 20 bp, synthetic construct
  source 1..20: mol_type = other DNA
tcttggcctcccaaagtgct

SEQ ID NO: 203402 - DNA, 20 bp, synthetic construct
  source 1..20: mol_type = other DNA
gtcttggcctcccaaagtgc

SEQ ID NO: 203403 - DNA, 20 bp, synthetic construct
  source 1..20: mol_type = other DNA
tgtcttggcctcccaaagtg

SEQ ID NO: 203404 - DNA, 20 bp, synthetic construct
  source 1..20: mol_type = other DNA
ctgtcttggcctcccaaagt

SEQ ID NO: 203405 - DNA, 20 bp, synthetic construct
  source 1..20: mol_type = other DNA
tctgtcttggcctcccaaag

SEQ ID NO: 203406 - DNA, 20 bp, synthetic construct
  source 1..20: mol_type = other DNA
atctgtcttggcctcccaaa

SEQ ID NO: 203407 - DNA, 20 bp, synthetic construct
  source 1..20: mol_type = other DNA
aatctgtcttggcctcccaa

SEQ ID NO: 203408 - DNA, 20 bp, synthetic construct
  source 1..20: mol_type = other DNA
caatctgtcttggcctccca

SEQ ID NO: 203409 - DNA, 20 bp, synthetic construct
  source 1..20: mol_type = other DNA
tcaatctgtcttggcctccc

SEQ ID NO: 203410 - DNA, 20 bp, synthetic construct
  source 1..20: mol_type = other DNA
atcaatctgtcttggcctcc

SEQ ID NO: 203411 - DNA, 20 bp, synthetic construct
  source 1..20: mol_type = other DNA
gatcaatctgtcttggcctc

SEQ ID NO: 203412 - DNA, 20 bp, synthetic construct
  source 1..20: mol_type = other DNA
tgatcaatctgtcttggcct

SEQ ID NO: 203413 - DNA, 20 bp, synthetic construct
  source 1..20: mol_type = other DNA
gtgatcaatctgtcttggcc

SEQ ID NO: 203414 - DNA, 20 bp, synthetic construct
  source 1..20: mol_type = other DNA
agtgatcaatctgtcttggc

SEQ ID NO: 203415 - DNA, 20 bp, synthetic construct
  source 1..20: mol_type = other DNA
gagtgatcaatctgtcttgg

SEQ ID NO: 203416 - DNA, 20 bp, synthetic construct
  source 1..20: mol_type = other DNA
cgagtgatcaatctgtcttg

SEQ ID NO: 203417 - DNA, 20 bp, synthetic construct
  source 1..20: mol_type = other DNA
tcgagtgatcaatctgtctt

SEQ ID NO: 203418 - DNA, 20 bp, synthetic construct
  source 1..20: mol_type = other DNA
atcgagtgatcaatctgtct

SEQ ID NO: 203419 - DNA, 20 bp, synthetic construct
  source 1..20: mol_type = other DNA
catcgagtgatcaatctgtc

SEQ ID NO: 203420 - DNA, 20 bp, synthetic construct
  source 1..20: mol_type = other DNA
gcatcgagtgatcaatctgt

SEQ ID NO: 203421 - DNA, 20 bp, synthetic construct
  source 1..20: mol_type = other DNA
ggcatcgagtgatcaatctg

SEQ ID NO: 203422 - DNA, 20 bp, synthetic construct
  source 1..20: mol_type = other DNA
tggcatcgagtgatcaatct

SEQ ID NO: 203423 - DNA, 20 bp, synthetic construct
  source 1..20: mol_type = other DNA
ctggcatcgagtgatcaatc

SEQ ID NO: 203424 - DNA, 20 bp, synthetic construct
  source 1..20: mol_type = other DNA
cctggcatcgagtgatcaat

SEQ ID NO: 203425 - DNA, 20 bp, synthetic construct
  source 1..20: mol_type = other DNA
tcctggcatcgagtgatcaa

SEQ ID NO: 203426 - DNA, 20 bp, synthetic construct
  source 1..20: mol_type = other DNA
ctcctggcatcgagtgatca

SEQ ID NO: 203427 - DNA, 20 bp, synthetic construct
  source 1..20: mol_type = other DNA
actcctggcatcgagtgatc

SEQ ID NO: 203428 - DNA, 20 bp, synthetic construct
  source 1..20: mol_type = other DNA
aactcctggcatcgagtgat

SEQ ID NO: 203429 - DNA, 20 bp, synthetic construct
  source 1..20: mol_type = other DNA
gaactcctggcatcgagtga

SEQ ID NO: 203430 - DNA, 20 bp, synthetic construct
  source 1..20: mol_type = other DNA
tgaactcctggcatcgagtg

SEQ ID NO: 203431 - DNA, 20 bp, synthetic construct
  source 1..20: mol_type = other DNA
ttgaactcctggcatcgagt

SEQ ID NO: 203432 - DNA, 20 bp, synthetic construct
  source 1..20: mol_type = other DNA
cttgaactcctggcatcgag

SEQ ID NO: 203433 - DNA, 20 bp, synthetic construct
  source 1..20: mol_type = other DNA
tcttgaactcctggcatcga

SEQ ID NO: 203434 - DNA, 20 bp, synthetic construct
  source 1..20: mol_type = other DNA
gtcttgaactcctggcatcg

SEQ ID NO: 203435 - DNA, 20 bp, synthetic construct
  source 1..20: mol_type = other DNA
ggtcttgaactcctggcatc

SEQ ID NO: 203436 - DNA, 20 bp, synthetic construct
  source 1..20: mol_type = other DNA
tggtcttgaactcctggcat

SEQ ID NO: 203437 - DNA, 20 bp, synthetic construct
  source 1..20: mol_type = other DNA
ctggtcttgaactcctggca

SEQ ID NO: 203438 - DNA, 20 bp, synthetic construct
  source 1..20: mol_type = other DNA
gctggtcttgaactcctggc

SEQ ID NO: 203439 - DNA, 20 bp, synthetic construct
  source 1..20: mol_type = other DNA
ggctggtcttgaactcctgg

SEQ ID NO: 203440 - DNA, 20 bp, synthetic construct
  source 1..20: mol_type = other DNA
aggctggtcttgaactcctg

SEQ ID NO: 203441 - DNA, 20 bp, synthetic construct
  source 1..20: mol_type = other DNA
caggctggtcttgaactcct

SEQ ID NO: 203442 - DNA, 20 bp, synthetic construct
  source 1..20: mol_type = other DNA
ccaggctggtcttgaactcc

SEQ ID NO: 203443 - DNA, 20 bp, synthetic construct
  source 1..20: mol_type = other DNA
gccaggctggtcttgaactc

SEQ ID NO: 203444 - DNA, 20 bp, synthetic construct
  source 1..20: mol_type = other DNA
ggccaggctggtcttgaact

SEQ ID NO: 203445 - DNA, 20 bp, synthetic construct
  source 1..20: mol_type = other DNA
tggccaggctggtcttgaac

SEQ ID NO: 203446 - DNA, 20 bp, synthetic construct
  source 1..20: mol_type = other DNA
ttggccaggctggtcttgaa

SEQ ID NO: 203447 - DNA, 20 bp, synthetic construct
  source 1..20: mol_type = other DNA
gttggccaggctggtcttga

SEQ ID NO: 203448 - DNA, 20 bp, synthetic construct
  source 1..20: mol_type = other DNA
tgttggccaggctggtcttg

SEQ ID NO: 203449 - DNA, 20 bp, synthetic construct
  source 1..20: mol_type = other DNA
atgttggccaggctggtctt

SEQ ID NO: 203450 - DNA, 20 bp, synthetic construct
  source 1..20: mol_type = other DNA
catgttggccaggctggtct

SEQ ID NO: 203451 - DNA, 20 bp, synthetic construct
  source 1..20: mol_type = other DNA
ccatgttggccaggctggtc

SEQ ID NO: 203452 - DNA, 20 bp, synthetic construct
  source 1..20: mol_type = other DNA
accatgttggccaggctggt

SEQ ID NO: 203453 - DNA, 20 bp, synthetic construct
  source 1..20: mol_type = other DNA
caccatgttggccaggctgg

SEQ ID NO: 203454 - DNA, 20 bp, synthetic construct
  source 1..20: mol_type = other DNA
tcaccatgttggccaggctg

SEQ ID NO: 203455 - DNA, 20 bp, synthetic construct
  source 1..20: mol_type = other DNA
ttcaccatgttggccaggct

SEQ ID NO: 203456 - DNA, 20 bp, synthetic construct
  source 1..20: mol_type = other DNA
tttcaccatgttggccaggc

SEQ ID NO: 203457 - DNA, 20 bp, synthetic construct
  source 1..20: mol_type = other DNA
gtttcaccatgttggccagg

SEQ ID NO: 203458 - DNA, 20 bp, synthetic construct
  source 1..20: mol_type = other DNA
ggtttcaccatgttggccag

SEQ ID NO: 203459 - DNA, 20 bp, synthetic construct
  source 1..20: mol_type = other DNA
aggtttcaccatgttggcca

SEQ ID NO: 203460 - DNA, 20 bp, synthetic construct
  source 1..20: mol_type = other DNA
aaggtttcaccatgttggcc

SEQ ID NO: 203461 - DNA, 20 bp, synthetic construct
  source 1..20: mol_type = other DNA
caaggtttcaccatgttggc

SEQ ID NO: 203462 - DNA, 20 bp, synthetic construct
  source 1..20: mol_type = other DNA
acaaggtttcaccatgttgg

SEQ ID NO: 203463 - DNA, 20 bp, synthetic construct
  source 1..20: mol_type = other DNA
gacaaggtttcaccatgttg

SEQ ID NO: 203464 - DNA, 20 bp, synthetic construct
  source 1..20: mol_type = other DNA
agacaaggtttcaccatgtt

SEQ ID NO: 203465 - DNA, 20 bp, synthetic construct
  source 1..20: mol_type = other DNA
gagacaaggtttcaccatgt

SEQ ID NO: 203466 - DNA, 20 bp, synthetic construct
  source 1..20: mol_type = other DNA
agagacaaggtttcaccatg

SEQ ID NO: 203467 - DNA, 20 bp, synthetic construct
  source 1..20: mol_type = other DNA
tagagacaaggtttcaccat

SEQ ID NO: 203468 - DNA, 20 bp, synthetic construct
  source 1..20: mol_type = other DNA
gtagagacaaggtttcacca

SEQ ID NO: 203469 - DNA, 20 bp, synthetic construct
  source 1..20: mol_type = other DNA
tgtagagacaaggtttcacc

SEQ ID NO: 203470 - DNA, 20 bp, synthetic construct
  source 1..20: mol_type = other DNA
ttgtagagacaaggtttcac

SEQ ID NO: 203471 - DNA, 20 bp, synthetic construct
  source 1..20: mol_type = other DNA
tttgtagagacaaggtttca

SEQ ID NO: 203472 - DNA, 20 bp, synthetic construct
  source 1..20: mol_type = other DNA
ttttgtagagacaaggtttc

SEQ ID NO: 203473 - DNA, 20 bp, synthetic construct
  source 1..20: mol_type = other DNA
tttttgtagagacaaggttt

SEQ ID NO: 203474 - DNA, 20 bp, synthetic construct
  source 1..20: mol_type = other DNA
gtttttgtagagacaaggtt

SEQ ID NO: 203475 - DNA, 20 bp, synthetic construct
  source 1..20: mol_type = other DNA
tgtttttgtagagacaaggt

SEQ ID NO: 203476 - DNA, 20 bp, synthetic construct
  source 1..20: mol_type = other DNA
ttgtttttgtagagacaagg

SEQ ID NO: 203477 - DNA, 20 bp, synthetic construct
  source 1..20: mol_type = other DNA
tttgtttttgtagagacaag

SEQ ID NO: 203478 - DNA, 20 bp, synthetic construct
  source 1..20: mol_type = other DNA
ttttgtttttgtagagacaa

SEQ ID NO: 203479 - DNA, 20 bp, synthetic construct
  source 1..20: mol_type = other DNA
gttttgtttttgtagagaca

SEQ ID NO: 203480 - DNA, 20 bp, synthetic construct
  source 1..20: mol_type = other DNA
tgttttgtttttgtagagac

SEQ ID NO: 203481 - DNA, 20 bp, synthetic construct
  source 1..20: mol_type = other DNA
ttgttttgtttttgtagaga

SEQ ID NO: 203482 - DNA, 20 bp, synthetic construct
  source 1..20: mol_type = other DNA
tttgttttgtttttgtagag

SEQ ID NO: 203483 - DNA, 20 bp, synthetic construct
  source 1..20: mol_type = other DNA
ttttgttttgtttttgtaga

SEQ ID NO: 203484 - DNA, 20 bp, synthetic construct
  source 1..20: mol_type = other DNA
gttttgttttgtttttgtag

SEQ ID NO: 203485 - DNA, 20 bp, synthetic construct
  source 1..20: mol_type = other DNA
tgttttgttttgtttttgta

SEQ ID NO: 203486 - DNA, 20 bp, synthetic construct
  source 1..20: mol_type = other DNA
ttgttttgttttgtttttgt

SEQ ID NO: 203487 - DNA, 20 bp, synthetic construct
  source 1..20: mol_type = other DNA
tttgttttgttttgtttttg

SEQ ID NO: 203488 - DNA, 20 bp, synthetic construct
  source 1..20: mol_type = other DNA
ttttgttttgttttgttttt

SEQ ID NO: 203489 - DNA, 20 bp, synthetic construct
  source 1..20: mol_type = other DNA
tttttgttttgttttgtttt

SEQ ID NO: 203490 - DNA, 20 bp, synthetic construct
  source 1..20: mol_type = other DNA
atttttgttttgttttgttt

SEQ ID NO: 203491 - DNA, 20 bp, synthetic construct
  source 1..20: mol_type = other DNA
aatttttgttttgttttgtt

SEQ ID NO: 203492 - DNA, 20 bp, synthetic construct
  source 1..20: mol_type = other DNA
taatttttgttttgttttgt

SEQ ID NO: 203493 - DNA, 20 bp, synthetic construct
  source 1..20: mol_type = other DNA
ctaatttttgttttgttttg

SEQ ID NO: 203494 - DNA, 20 bp, synthetic construct
  source 1..20: mol_type = other DNA
gctaatttttgttttgtttt

SEQ ID NO: 203495 - DNA, 20 bp, synthetic construct
  source 1..20: mol_type = other DNA
ggctaatttttgttttgttt

SEQ ID NO: 203496 - DNA, 20 bp, synthetic construct
  source 1..20: mol_type = other DNA
cggctaatttttgttttgtt

SEQ ID NO: 203497 - DNA, 20 bp, synthetic construct
  source 1..20: mol_type = other DNA
ccggctaatttttgttttgt

SEQ ID NO: 203498 - DNA, 20 bp, synthetic construct
  source 1..20: mol_type = other DNA
cccggctaatttttgttttg

SEQ ID NO: 203499 - DNA, 20 bp, synthetic construct
  source 1..20: mol_type = other DNA
acccggctaatttttgtttt

SEQ ID NO: 203500 - DNA, 20 bp, synthetic construct
  source 1..20: mol_type = other DNA
tacccggctaatttttgttt

SEQ ID NO: 203501 - DNA, 20 bp, synthetic construct
  source 1..20: mol_type = other DNA
atacccggctaatttttgtt

SEQ ID NO: 203502 - DNA, 20 bp, synthetic construct
  source 1..20: mol_type = other DNA
catacccggctaatttttgt

SEQ ID NO: 203503 - DNA, 20 bp, synthetic construct
  source 1..20: mol_type = other DNA
ccatacccggctaatttttg

SEQ ID NO: 203504 - DNA, 20 bp, synthetic construct
  source 1..20: mol_type = other DNA
accatacccggctaattttt

SEQ ID NO: 203505 - DNA, 20 bp, synthetic construct
  source 1..20: mol_type = other DNA
caccatacccggctaatttt

SEQ ID NO: 203506 - DNA, 20 bp, synthetic construct
  source 1..20: mol_type = other DNA
ccaccatacccggctaattt

SEQ ID NO: 203507 - DNA, 20 bp, synthetic construct
  source 1..20: mol_type = other DNA
gccaccatacccggctaatt

SEQ ID NO: 203508 - DNA, 20 bp, synthetic construct
  source 1..20: mol_type = other DNA
tgccaccatacccggctaat

SEQ ID NO: 203509 - DNA, 20 bp, synthetic construct
  source 1..20: mol_type = other DNA
atgccaccatacccggctaa

SEQ ID NO: 203510 - DNA, 20 bp, synthetic construct
  source 1..20: mol_type = other DNA
catgccaccatacccggcta

SEQ ID NO: 203511 - DNA, 20 bp, synthetic construct
  source 1..20: mol_type = other DNA
gcatgccaccatacccggct

SEQ ID NO: 203512 - DNA, 20 bp, synthetic construct
  source 1..20: mol_type = other DNA
tgcatgccaccatacccggc

SEQ ID NO: 203513 - DNA, 20 bp, synthetic construct
  source 1..20: mol_type = other DNA
gtgcatgccaccatacccgg

SEQ ID NO: 203514 - DNA, 20 bp, synthetic construct
  source 1..20: mol_type = other DNA
ggtgcatgccaccatacccg

SEQ ID NO: 203515 - DNA, 20 bp, synthetic construct
  source 1..20: mol_type = other DNA
aggtgcatgccaccataccc

SEQ ID NO: 203516 - DNA, 20 bp, synthetic construct
  source 1..20: mol_type = other DNA
caggtgcatgccaccatacc

SEQ ID NO: 203517 - DNA, 20 bp, synthetic construct
  source 1..20: mol_type = other DNA
acaggtgcatgccaccatac

SEQ ID NO: 203518 - DNA, 20 bp, synthetic construct
  source 1..20: mol_type = other DNA
cacaggtgcatgccaccata

SEQ ID NO: 203519 - DNA, 20 bp, synthetic construct
  source 1..20: mol_type = other DNA
ccacaggtgcatgccaccat

SEQ ID NO: 203520 - DNA, 20 bp, synthetic construct
  source 1..20: mol_type = other DNA
accacaggtgcatgccacca

SEQ ID NO: 203521 - DNA, 20 bp, synthetic construct
  source 1..20: mol_type = other DNA
taccacaggtgcatgccacc

SEQ ID NO: 203522 - DNA, 20 bp, synthetic construct
  source 1..20: mol_type = other DNA
gtaccacaggtgcatgccac

SEQ ID NO: 203523 - DNA, 20 bp, synthetic construct
  source 1..20: mol_type = other DNA
ggtaccacaggtgcatgcca

SEQ ID NO: 203524 - DNA, 20 bp, synthetic construct
  source 1..20: mol_type = other DNA
tggtaccacaggtgcatgcc

SEQ ID NO: 203525 - DNA, 20 bp, synthetic construct
  source 1..20: mol_type = other DNA
ctggtaccacaggtgcatgc

SEQ ID NO: 203526 - DNA, 20 bp, synthetic construct
  source 1..20: mol_type = other DNA
gctggtaccacaggtgcatg

SEQ ID NO: 203527 - DNA, 20 bp, synthetic construct
  source 1..20: mol_type = other DNA
agctggtaccacaggtgcat

SEQ ID NO: 203528 - DNA, 20 bp, synthetic construct
  source 1..20: mol_type = other DNA
tagctggtaccacaggtgca

SEQ ID NO: 203529 - DNA, 20 bp, synthetic construct
  source 1..20: mol_type = other DNA
gtagctggtaccacaggtgc

SEQ ID NO: 203530 - DNA, 20 bp, synthetic construct
  source 1..20: mol_type = other DNA
agtagctggtaccacaggtg

SEQ ID NO: 203531 - DNA, 20 bp, synthetic construct
  source 1..20: mol_type = other DNA
gagtagctggtaccacaggt

SEQ ID NO: 203532 - DNA, 20 bp, synthetic construct
  source 1..20: mol_type = other DNA
tgagtagctggtaccacagg

SEQ ID NO: 203533 - DNA, 20 bp, synthetic construct
  source 1..20: mol_type = other DNA
ttgagtagctggtaccacag

SEQ ID NO: 203534 - DNA, 20 bp, synthetic construct
  source 1..20: mol_type = other DNA
cttgagtagctggtaccaca

SEQ ID NO: 203535 - DNA, 20 bp, synthetic construct
  source 1..20: mol_type = other DNA
tcttgagtagctggtaccac

SEQ ID NO: 203536 - DNA, 20 bp, synthetic construct
  source 1..20: mol_type = other DNA
ctcttgagtagctggtacca

SEQ ID NO: 203537 - DNA, 20 bp, synthetic construct
  source 1..20: mol_type = other DNA
cctcttgagtagctggtacc

SEQ ID NO: 203538 - DNA, 20 bp, synthetic construct
  source 1..20: mol_type = other DNA
gcctcttgagtagctggtac

SEQ ID NO: 203539 - DNA, 20 bp, synthetic construct
  source 1..20: mol_type = other DNA
agcctcttgagtagctggta

SEQ ID NO: 203540 - DNA, 20 bp, synthetic construct
  source 1..20: mol_type = other DNA
cagcctcttgagtagctggt

SEQ ID NO: 203541 - DNA, 20 bp, synthetic construct
  source 1..20: mol_type = other DNA
tcagcctcttgagtagctgg

SEQ ID NO: 203542 - DNA, 20 bp, synthetic construct
  source 1..20: mol_type = other DNA
ctcagcctcttgagtagctg

SEQ ID NO: 203543 - DNA, 20 bp, synthetic construct
  source 1..20: mol_type = other DNA
cctcagcctcttgagtagct

SEQ ID NO: 203544 - DNA, 20 bp, synthetic construct
  source 1..20: mol_type = other DNA
gcctcagcctcttgagtagc

SEQ ID NO: 203545 - DNA, 20 bp, synthetic construct
  source 1..20: mol_type = other DNA
tgcctcagcctcttgagtag

SEQ ID NO: 203546 - DNA, 20 bp, synthetic construct
  source 1..20: mol_type = other DNA
gtgcctcagcctcttgagta

SEQ ID NO: 203547 - DNA, 20 bp, synthetic construct
  source 1..20: mol_type = other DNA
tgtgcctcagcctcttgagt

SEQ ID NO: 203548 - DNA, 20 bp, synthetic construct
  source 1..20: mol_type = other DNA
ttgtgcctcagcctcttgag

SEQ ID NO: 203549 - DNA, 20 bp, synthetic construct
  source 1..20: mol_type = other DNA
cttgtgcctcagcctcttga

SEQ ID NO: 203550 - DNA, 20 bp, synthetic construct
  source 1..20: mol_type = other DNA
tcttgtgcctcagcctcttg

SEQ ID NO: 203551 - DNA, 20 bp, synthetic construct
  source 1..20: mol_type = other DNA
ttcttgtgcctcagcctctt

SEQ ID NO: 203552 - DNA, 20 bp, synthetic construct
  source 1..20: mol_type = other DNA
attcttgtgcctcagcctct

SEQ ID NO: 203553 - DNA, 20 bp, synthetic construct
  source 1..20: mol_type = other DNA
gattcttgtgcctcagcctc

SEQ ID NO: 203554 - DNA, 20 bp, synthetic construct
  source 1..20: mol_type = other DNA
agattcttgtgcctcagcct

SEQ ID NO: 203555 - DNA, 20 bp, synthetic construct
  source 1..20: mol_type = other DNA
gagattcttgtgcctcagcc

SEQ ID NO: 203556 - DNA, 20 bp, synthetic construct
  source 1..20: mol_type = other DNA
agagattcttgtgcctcagc

SEQ ID NO: 203557 - DNA, 20 bp, synthetic construct
  source 1..20: mol_type = other DNA
aagagattcttgtgcctcag

SEQ ID NO: 203558 - DNA, 20 bp, synthetic construct
  source 1..20: mol_type = other DNA
caagagattcttgtgcctca

SEQ ID NO: 203559 - DNA, 20 bp, synthetic construct
  source 1..20: mol_type = other DNA
tcaagagattcttgtgcctc

SEQ ID NO: 203560 - DNA, 20 bp, synthetic construct
  source 1..20: mol_type = other DNA
ttcaagagattcttgtgcct

SEQ ID NO: 203561 - DNA, 20 bp, synthetic construct
  source 1..20: mol_type = other DNA
gttcaagagattcttgtgcc

SEQ ID NO: 203562 - DNA, 20 bp, synthetic construct
  source 1..20: mol_type = other DNA
ggttcaagagattcttgtgc

SEQ ID NO: 203563 - DNA, 20 bp, synthetic construct
  source 1..20: mol_type = other DNA
aggttcaagagattcttgtg

SEQ ID NO: 203564 - DNA, 20 bp, synthetic construct
  source 1..20: mol_type = other DNA
caggttcaagagattcttgt

SEQ ID NO: 203565 - DNA, 20 bp, synthetic construct
  source 1..20: mol_type = other DNA
ccaggttcaagagattcttg

SEQ ID NO: 203566 - DNA, 20 bp, synthetic construct
  source 1..20: mol_type = other DNA
cccaggttcaagagattctt

SEQ ID NO: 203567 - DNA, 20 bp, synthetic construct
  source 1..20: mol_type = other DNA
tcccaggttcaagagattct

SEQ ID NO: 203568 - DNA, 20 bp, synthetic construct
  source 1..20: mol_type = other DNA
ctcccaggttcaagagattc

SEQ ID NO: 203569 - DNA, 20 bp, synthetic construct
  source 1..20: mol_type = other DNA
cctcccaggttcaagagatt

SEQ ID NO: 203570 - DNA, 20 bp, synthetic construct
  source 1..20: mol_type = other DNA
acctcccaggttcaagagat

SEQ ID NO: 203571 - DNA, 20 bp, synthetic construct
  source 1..20: mol_type = other DNA
tacctcccaggttcaagaga

SEQ ID NO: 203572 - DNA, 20 bp, synthetic construct
  source 1..20: mol_type = other DNA
ctacctcccaggttcaagag

SEQ ID NO: 203573 - DNA, 20 bp, synthetic construct
  source 1..20: mol_type = other DNA
tctacctcccaggttcaaga

SEQ ID NO: 203574 - DNA, 20 bp, synthetic construct
  source 1..20: mol_type = other DNA
ctctacctcccaggttcaag

SEQ ID NO: 203575 - DNA, 20 bp, synthetic construct
  source 1..20: mol_type = other DNA
cctctacctcccaggttcaa

SEQ ID NO: 203576 - DNA, 20 bp, synthetic construct
  source 1..20: mol_type = other DNA
acctctacctcccaggttca

SEQ ID NO: 203577 - DNA, 20 bp, synthetic construct
  source 1..20: mol_type = other DNA
aacctctacctcccaggttc

SEQ ID NO: 203578 - DNA, 20 bp, synthetic construct
  source 1..20: mol_type = other DNA
caacctctacctcccaggtt

SEQ ID NO: 203579 - DNA, 20 bp, synthetic construct
  source 1..20: mol_type = other DNA
gcaacctctacctcccaggt

SEQ ID NO: 203580 - DNA, 20 bp, synthetic construct
  source 1..20: mol_type = other DNA
tgcaacctctacctcccagg

SEQ ID NO: 203581 - DNA, 20 bp, synthetic construct
  source 1..20: mol_type = other DNA
ctgcaacctctacctcccag

SEQ ID NO: 203582 - DNA, 20 bp, synthetic construct
  source 1..20: mol_type = other DNA
actgcaacctctacctccca

SEQ ID NO: 203583 - DNA, 20 bp, synthetic construct
  source 1..20: mol_type = other DNA
cactgcaacctctacctccc

SEQ ID NO: 203584 - DNA, 20 bp, synthetic construct
  source 1..20: mol_type = other DNA
tcactgcaacctctacctcc

SEQ ID NO: 203585 - DNA, 20 bp, synthetic construct
  source 1..20: mol_type = other DNA
ctcactgcaacctctacctc

SEQ ID NO: 203586 - DNA, 20 bp, synthetic construct
  source 1..20: mol_type = other DNA
gctcactgcaacctctacct

SEQ ID NO: 203587 - DNA, 20 bp, synthetic construct
  source 1..20: mol_type = other DNA
ggctcactgcaacctctacc

SEQ ID NO: 203588 - DNA, 20 bp, synthetic construct
  source 1..20: mol_type = other DNA
cggctcactgcaacctctac

SEQ ID NO: 203589 - DNA, 20 bp, synthetic construct
  source 1..20: mol_type = other DNA
tcggctcactgcaacctcta

SEQ ID NO: 203590 - DNA, 20 bp, synthetic construct
  source 1..20: mol_type = other DNA
ctcggctcactgcaacctct

SEQ ID NO: 203591 - DNA, 20 bp, synthetic construct
  source 1..20: mol_type = other DNA
tctcggctcactgcaacctc

SEQ ID NO: 203592 - DNA, 20 bp, synthetic construct
  source 1..20: mol_type = other DNA
atctcggctcactgcaacct

SEQ ID NO: 203593 - DNA, 20 bp, synthetic construct
  source 1..20: mol_type = other DNA
gatctcggctcactgcaacc

SEQ ID NO: 203594 - DNA, 20 bp, synthetic construct
  source 1..20: mol_type = other DNA
cgatctcggctcactgcaac

SEQ ID NO: 203595 - DNA, 20 bp, synthetic construct
  source 1..20: mol_type = other DNA
gcgatctcggctcactgcaa

SEQ ID NO: 203596 - DNA, 20 bp, synthetic construct
  source 1..20: mol_type = other DNA
tgcgatctcggctcactgca

SEQ ID NO: 203597 - DNA, 20 bp, synthetic construct
  source 1..20: mol_type = other DNA
gtgcgatctcggctcactgc

SEQ ID NO: 203598 - DNA, 20 bp, synthetic construct
  source 1..20: mol_type = other DNA
agtgcgatctcggctcactg

SEQ ID NO: 203599 - DNA, 20 bp, synthetic construct
  source 1..20: mol_type = other DNA
tagtgcgatctcggctcact

SEQ ID NO: 203600 - DNA, 20 bp, synthetic construct
  source 1..20: mol_type = other DNA
gtagtgcgatctcggctcac

SEQ ID NO: 203601 - DNA, 20 bp, synthetic construct
  source 1..20: mol_type = other DNA
agtagtgcgatctcggctca

SEQ ID NO: 203602 - DNA, 20 bp, synthetic construct
  source 1..20: mol_type = other DNA
cagtagtgcgatctcggctc

SEQ ID NO: 203603 - DNA, 20 bp, synthetic construct
  source 1..20: mol_type = other DNA
gcagtagtgcgatctcggct

SEQ ID NO: 203604 - DNA, 20 bp, synthetic construct
  source 1..20: mol_type = other DNA
tgcagtagtgcgatctcggc

SEQ ID NO: 203605 - DNA, 20 bp, synthetic construct
  source 1..20: mol_type = other DNA
atgcagtagtgcgatctcgg

SEQ ID NO: 203606 - DNA, 20 bp, synthetic construct
  source 1..20: mol_type = other DNA
aatgcagtagtgcgatctcg

SEQ ID NO: 203607 - DNA, 20 bp, synthetic construct
  source 1..20: mol_type = other DNA
gaatgcagtagtgcgatctc

SEQ ID NO: 203608 - DNA, 20 bp, synthetic construct
  source 1..20: mol_type = other DNA
ggaatgcagtagtgcgatct

SEQ ID NO: 203609 - DNA, 20 bp, synthetic construct
  source 1..20: mol_type = other DNA
tggaatgcagtagtgcgatc

SEQ ID NO: 203610 - DNA, 20 bp, synthetic construct
  source 1..20: mol_type = other DNA
ctggaatgcagtagtgcgat

SEQ ID NO: 203611 - DNA, 20 bp, synthetic construct
  source 1..20: mol_type = other DNA
gctggaatgcagtagtgcga

SEQ ID NO: 203612 - DNA, 20 bp, synthetic construct
  source 1..20: mol_type = other DNA
ggctggaatgcagtagtgcg

SEQ ID NO: 203613 - DNA, 20 bp, synthetic construct
  source 1..20: mol_type = other DNA
aggctggaatgcagtagtgc

SEQ ID NO: 203614 - DNA, 20 bp, synthetic construct
  source 1..20: mol_type = other DNA
caggctggaatgcagtagtg

SEQ ID NO: 203615 - DNA, 20 bp, synthetic construct
  source 1..20: mol_type = other DNA
ccaggctggaatgcagtagt

SEQ ID NO: 203616 - DNA, 20 bp, synthetic construct
  source 1..20: mol_type = other DNA
cccaggctggaatgcagtag

SEQ ID NO: 203617 - DNA, 20 bp, synthetic construct
  source 1..20: mol_type = other DNA
acccaggctggaatgcagta

SEQ ID NO: 203618 - DNA, 20 bp, synthetic construct
  source 1..20: mol_type = other DNA
cacccaggctggaatgcagt

SEQ ID NO: 203619 - DNA, 20 bp, synthetic construct
  source 1..20: mol_type = other DNA
tcacccaggctggaatgcag

SEQ ID NO: 203620 - DNA, 20 bp, synthetic construct
  source 1..20: mol_type = other DNA
gtcacccaggctggaatgca

SEQ ID NO: 203621 - DNA, 20 bp, synthetic construct
  source 1..20: mol_type = other DNA
tgtcacccaggctggaatgc

SEQ ID NO: 203622 - DNA, 20 bp, synthetic construct
  source 1..20: mol_type = other DNA
ctgtcacccaggctggaatg

SEQ ID NO: 203623 - DNA, 20 bp, synthetic construct
  source 1..20: mol_type = other DNA
tctgtcacccaggctggaat

SEQ ID NO: 203624 - DNA, 20 bp, synthetic construct
  source 1..20: mol_type = other DNA
ctctgtcacccaggctggaa

SEQ ID NO: 203625 - DNA, 20 bp, synthetic construct
  source 1..20: mol_type = other DNA
gctctgtcacccaggctgga

SEQ ID NO: 203626 - DNA, 20 bp, synthetic construct
  source 1..20: mol_type = other DNA
tgctctgtcacccaggctgg

SEQ ID NO: 203627 - DNA, 20 bp, synthetic construct
  source 1..20: mol_type = other DNA
ttgctctgtcacccaggctg

SEQ ID NO: 203628 - DNA, 20 bp, synthetic construct
  source 1..20: mol_type = other DNA
cttgctctgtcacccaggct

SEQ ID NO: 203629 - DNA, 20 bp, synthetic construct
  source 1..20: mol_type = other DNA
tcttgctctgtcacccaggc

SEQ ID NO: 203630 - DNA, 20 bp, synthetic construct
  source 1..20: mol_type = other DNA
atcttgctctgtcacccagg

SEQ ID NO: 203631 - DNA, 20 bp, synthetic construct
  source 1..20: mol_type = other DNA
aatcttgctctgtcacccag

SEQ ID NO: 203632 - DNA, 20 bp, synthetic construct
  source 1..20: mol_type = other DNA
gaatcttgctctgtcaccca

SEQ ID NO: 203633 - DNA, 20 bp, synthetic construct
  source 1..20: mol_type = other DNA
agaatcttgctctgtcaccc

SEQ ID NO: 203634 - DNA, 20 bp, synthetic construct
  source 1..20: mol_type = other DNA
cagaatcttgctctgtcacc

SEQ ID NO: 203635 - DNA, 20 bp, synthetic construct
  source 1..20: mol_type = other DNA
acagaatcttgctctgtcac

SEQ ID NO: 203636 - DNA, 20 bp, synthetic construct
  source 1..20: mol_type = other DNA
gacagaatcttgctctgtca

SEQ ID NO: 203637 - DNA, 20 bp, synthetic construct
  source 1..20: mol_type = other DNA
agacagaatcttgctctgtc

SEQ ID NO: 203638 - DNA, 20 bp, synthetic construct
  source 1..20: mol_type = other DNA
gagacagaatcttgctctgt

SEQ ID NO: 203639 - DNA, 20 bp, synthetic construct
  source 1..20: mol_type = other DNA
ggagacagaatcttgctctg

SEQ ID NO: 203640 - DNA, 20 bp, synthetic construct
  source 1..20: mol_type = other DNA
tggagacagaatcttgctct

SEQ ID NO: 203641 - DNA, 20 bp, synthetic construct
  source 1..20: mol_type = other DNA
ttggagacagaatcttgctc

SEQ ID NO: 203642 - DNA, 20 bp, synthetic construct
  source 1..20: mol_type = other DNA
tttggagacagaatcttgct

SEQ ID NO: 203643 - DNA, 20 bp, synthetic construct
  source 1..20: mol_type = other DNA
ttttggagacagaatcttgc

SEQ ID NO: 203644 - DNA, 20 bp, synthetic construct
  source 1..20: mol_type = other DNA
tttttggagacagaatcttg

SEQ ID NO: 203645 - DNA, 20 bp, synthetic construct
  source 1..20: mol_type = other DNA
ttttttggagacagaatctt

SEQ ID NO: 203646 - DNA, 20 bp, synthetic construct
  source 1..20: mol_type = other DNA
tttttttggagacagaatct

SEQ ID NO: 203647 - DNA, 20 bp, synthetic construct
  source 1..20: mol_type = other DNA
ttttttttggagacagaatc

SEQ ID NO: 203648 - DNA, 20 bp, synthetic construct
  source 1..20: mol_type = other DNA
tttttttttggagacagaat

SEQ ID NO: 203649 - DNA, 20 bp, synthetic construct
  source 1..20: mol_type = other DNA
ttttttttttggagacagaa

SEQ ID NO: 203650 - DNA, 20 bp, synthetic construct
  source 1..20: mol_type = other DNA
tttttttttttggagacaga

SEQ ID NO: 203651 - DNA, 20 bp, synthetic construct
  source 1..20: mol_type = other DNA
ttttttttttttggagacag

SEQ ID NO: 203652 - DNA, 20 bp, synthetic construct
  source 1..20: mol_type = other DNA
tttttttttttttggagaca

SEQ ID NO: 203653 - DNA, 20 bp, synthetic construct
  source 1..20: mol_type = other DNA
ttttttttttttttggagac

SEQ ID NO: 203654 - DNA, 20 bp, synthetic construct
  source 1..20: mol_type = other DNA
tttttttttttttttggaga

SEQ ID NO: 203655 - DNA, 20 bp, synthetic construct
  source 1..20: mol_type = other DNA
ttttttttttttttttggag

SEQ ID NO: 203656 - DNA, 20 bp, synthetic construct
  source 1..20: mol_type = other DNA
tttttttttttttttttgga

SEQ ID NO: 203657 - DNA, 20 bp, synthetic construct
  source 1..20: mol_type = other DNA
ctttttttttttttttttgg

SEQ ID NO: 203658 - DNA, 20 bp, synthetic construct
  source 1..20: mol_type = other DNA
tctttttttttttttttttg

SEQ ID NO: 203659 - DNA, 20 bp, synthetic construct
  source 1..20: mol_type = other DNA
ttcttttttttttttttttt

SEQ ID NO: 203660 - DNA, 20 bp, synthetic construct
  source 1..20: mol_type = other DNA
tttctttttttttttttttt

SEQ ID NO: 203661 - DNA, 20 bp, synthetic construct
  source 1..20: mol_type = other DNA
ttttcttttttttttttttt

SEQ ID NO: 203662 - DNA, 20 bp, synthetic construct
  source 1..20: mol_type = other DNA
cttttctttttttttttttt

SEQ ID NO: 203663 - DNA, 20 bp, synthetic construct
  source 1..20: mol_type = other DNA
ccttttcttttttttttttt

SEQ ID NO: 203664 - DNA, 20 bp, synthetic construct
  source 1..20: mol_type = other DNA
tccttttctttttttttttt

SEQ ID NO: 203665 - DNA, 20 bp, synthetic construct
  source 1..20: mol_type = other DNA
ttccttttcttttttttttt

SEQ ID NO: 203666 - DNA, 20 bp, synthetic construct
  source 1..20: mol_type = other DNA
tttccttttctttttttttt

SEQ ID NO: 203667 - DNA, 20 bp, synthetic construct
  source 1..20: mol_type = other DNA
ctttccttttcttttttttt

SEQ ID NO: 203668 - DNA, 20 bp, synthetic construct
  source 1..20: mol_type = other DNA
gctttccttttctttttttt

SEQ ID NO: 203669 - DNA, 20 bp, synthetic construct
  source 1..20: mol_type = other DNA
agctttccttttcttttttt

SEQ ID NO: 203670 - DNA, 20 bp, synthetic construct
  source 1..20: mol_type = other DNA
tagctttccttttctttttt

SEQ ID NO: 203671 - DNA, 20 bp, synthetic construct
  source 1..20: mol_type = other DNA
ttagctttccttttcttttt

SEQ ID NO: 203672 - DNA, 20 bp, synthetic construct
  source 1..20: mol_type = other DNA
tttagctttccttttctttt

SEQ ID NO: 203673 - DNA, 20 bp, synthetic construct
  source 1..20: mol_type = other DNA
ctttagctttccttttcttt

SEQ ID NO: 203674 - DNA, 20 bp, synthetic construct
  source 1..20: mol_type = other DNA
cctttagctttccttttctt

SEQ ID NO: 203675 - DNA, 20 bp, synthetic construct
  source 1..20: mol_type = other DNA
tcctttagctttccttttct

SEQ ID NO: 203676 - DNA, 20 bp, synthetic construct
  source 1..20: mol_type = other DNA
ctcctttagctttccttttc

SEQ ID NO: 203677 - DNA, 20 bp, synthetic construct
  source 1..20: mol_type = other DNA
tctcctttagctttcctttt

SEQ ID NO: 203678 - DNA, 20 bp, synthetic construct
  source 1..20: mol_type = other DNA
ctctcctttagctttccttt

SEQ ID NO: 203679 - DNA, 20 bp, synthetic construct
  source 1..20: mol_type = other DNA
tctctcctttagctttcctt

SEQ ID NO: 203680 - DNA, 20 bp, synthetic construct
  source 1..20: mol_type = other DNA
ctctctcctttagctttcct

SEQ ID NO: 203681 - DNA, 20 bp, synthetic construct
  source 1..20: mol_type = other DNA
tctctctcctttagctttcc

SEQ ID NO: 203682 - DNA, 20 bp, synthetic construct
  source 1..20: mol_type = other DNA
gtctctctcctttagctttc

SEQ ID NO: 203683 - DNA, 20 bp, synthetic construct
  source 1..20: mol_type = other DNA
agtctctctcctttagcttt

SEQ ID NO: 203684 - DNA, 20 bp, synthetic construct
  source 1..20: mol_type = other DNA
tagtctctctcctttagctt

SEQ ID NO: 203685 - DNA, 20 bp, synthetic construct
  source 1..20: mol_type = other DNA
ttagtctctctcctttagct

SEQ ID NO: 203686 - DNA, 20 bp, synthetic construct
  source 1..20: mol_type = other DNA
tttagtctctctcctttagc

SEQ ID NO: 203687 - DNA, 20 bp, synthetic construct
  source 1..20: mol_type = other DNA
ttttagtctctctcctttag

SEQ ID NO: 203688 - DNA, 20 bp, synthetic construct
  source 1..20: mol_type = other DNA
attttagtctctctccttta

SEQ ID NO: 203689 - DNA, 20 bp, synthetic construct
  source 1..20: mol_type = other DNA
cattttagtctctctccttt

SEQ ID NO: 203690 - DNA, 20 bp, synthetic construct
  source 1..20: mol_type = other DNA
tcattttagtctctctcctt

SEQ ID NO: 203691 - DNA, 20 bp, synthetic construct
  source 1..20: mol_type = other DNA
atcattttagtctctctcct

SEQ ID NO: 203692 - DNA, 20 bp, synthetic construct
  source 1..20: mol_type = other DNA
tatcattttagtctctctcc

SEQ ID NO: 203693 - DNA, 20 bp, synthetic construct
  source 1..20: mol_type = other DNA
atatcattttagtctctctc

SEQ ID NO: 203694 - DNA, 20 bp, synthetic construct
  source 1..20: mol_type = other DNA
gatatcattttagtctctct

SEQ ID NO: 203695 - DNA, 20 bp, synthetic construct
  source 1..20: mol_type = other DNA
tgatatcattttagtctctc

SEQ ID NO: 203696 - DNA, 20 bp, synthetic construct
  source 1..20: mol_type = other DNA
ctgatatcattttagtctct

SEQ ID NO: 203697 - DNA, 20 bp, synthetic construct
  source 1..20: mol_type = other DNA
cctgatatcattttagtctc

SEQ ID NO: 203698 - DNA, 20 bp, synthetic construct
  source 1..20: mol_type = other DNA
acctgatatcattttagtct

SEQ ID NO: 203699 - DNA, 20 bp, synthetic construct
  source 1..20: mol_type = other DNA
aacctgatatcattttagtc

SEQ ID NO: 203700 - DNA, 20 bp, synthetic construct
  source 1..20: mol_type = other DNA
gaacctgatatcattttagt

SEQ ID NO: 203701 - DNA, 20 bp, synthetic construct
  source 1..20: mol_type = other DNA
ggaacctgatatcattttag

SEQ ID NO: 203702 - DNA, 20 bp, synthetic construct
  source 1..20: mol_type = other DNA
aggaacctgatatcatttta

SEQ ID NO: 203703 - DNA, 20 bp, synthetic construct
  source 1..20: mol_type = other DNA
caggaacctgatatcatttt

SEQ ID NO: 203704 - DNA, 20 bp, synthetic construct
  source 1..20: mol_type = other DNA
ccaggaacctgatatcattt

SEQ ID NO: 203705 - DNA, 20 bp, synthetic construct
  source 1..20: mol_type = other DNA
tccaggaacctgatatcatt

SEQ ID NO: 203706 - DNA, 20 bp, synthetic construct
  source 1..20: mol_type = other DNA
ctccaggaacctgatatcat

SEQ ID NO: 203707 - DNA, 20 bp, synthetic construct
  source 1..20: mol_type = other DNA
tctccaggaacctgatatca

SEQ ID NO: 203708 - DNA, 20 bp, synthetic construct
  source 1..20: mol_type = other DNA
ttctccaggaacctgatatc

SEQ ID NO: 203709 - DNA, 20 bp, synthetic construct
  source 1..20: mol_type = other DNA
gttctccaggaacctgatat

SEQ ID NO: 203710 - DNA, 20 bp, synthetic construct
  source 1..20: mol_type = other DNA
tgttctccaggaacctgata

SEQ ID NO: 203711 - DNA, 20 bp, synthetic construct
  source 1..20: mol_type = other DNA
ttgttctccaggaacctgat

SEQ ID NO: 203712 - DNA, 20 bp, synthetic construct
  source 1..20: mol_type = other DNA
tttgttctccaggaacctga

SEQ ID NO: 203713 - DNA, 20 bp, synthetic construct
  source 1..20: mol_type = other DNA
gtttgttctccaggaacctg

SEQ ID NO: 203714 - DNA, 20 bp, synthetic construct
  source 1..20: mol_type = other DNA
tgtttgttctccaggaacct

SEQ ID NO: 203715 - DNA, 20 bp, synthetic construct
  source 1..20: mol_type = other DNA
ctgtttgttctccaggaacc

SEQ ID NO: 203716 - DNA, 20 bp, synthetic construct
  source 1..20: mol_type = other DNA
tctgtttgttctccaggaac

SEQ ID NO: 203717 - DNA, 20 bp, synthetic construct
  source 1..20: mol_type = other DNA
gtctgtttgttctccaggaa

SEQ ID NO: 203718 - DNA, 20 bp, synthetic construct
  source 1..20: mol_type = other DNA
tgtctgtttgttctccagga

SEQ ID NO: 203719 - DNA, 20 bp, synthetic construct
  source 1..20: mol_type = other DNA
atgtctgtttgttctccagg

SEQ ID NO: 203720 - DNA, 20 bp, synthetic construct
  source 1..20: mol_type = other DNA
catgtctgtttgttctccag

SEQ ID NO: 203721 - DNA, 20 bp, synthetic construct
  source 1..20: mol_type = other DNA
tcatgtctgtttgttctcca

SEQ ID NO: 203722 - DNA, 20 bp, synthetic construct
  source 1..20: mol_type = other DNA
atcatgtctgtttgttctcc

SEQ ID NO: 203723 - DNA, 20 bp, synthetic construct
  source 1..20: mol_type = other DNA
aatcatgtctgtttgttctc

SEQ ID NO: 203724 - DNA, 20 bp, synthetic construct
  source 1..20: mol_type = other DNA
aaatcatgtctgtttgttct

SEQ ID NO: 203725 - DNA, 20 bp, synthetic construct
  source 1..20: mol_type = other DNA
aaaatcatgtctgtttgttc

SEQ ID NO: 203726 - DNA, 20 bp, synthetic construct
  source 1..20: mol_type = other DNA
caaaatcatgtctgtttgtt

SEQ ID NO: 203727 - DNA, 20 bp, synthetic construct
  source 1..20: mol_type = other DNA
gcaaaatcatgtctgtttgt

SEQ ID NO: 203728 - DNA, 20 bp, synthetic construct
  source 1..20: mol_type = other DNA
agcaaaatcatgtctgtttg

SEQ ID NO: 203729 - DNA, 20 bp, synthetic construct
  source 1..20: mol_type = other DNA
aagcaaaatcatgtctgttt

SEQ ID NO: 203730 - DNA, 20 bp, synthetic construct
  source 1..20: mol_type = other DNA
gaagcaaaatcatgtctgtt

SEQ ID NO: 203731 - DNA, 20 bp, synthetic construct
  source 1..20: mol_type = other DNA
tgaagcaaaatcatgtctgt

SEQ ID NO: 203732 - DNA, 20 bp, synthetic construct
  source 1..20: mol_type = other DNA
atgaagcaaaatcatgtctg

SEQ ID NO: 203733 - DNA, 20 bp, synthetic construct
  source 1..20: mol_type = other DNA
catgaagcaaaatcatgtct

SEQ ID NO: 203734 - DNA, 20 bp, synthetic construct
  source 1..20: mol_type = other DNA
ccatgaagcaaaatcatgtc

SEQ ID NO: 203735 - DNA, 20 bp, synthetic construct
  source 1..20: mol_type = other DNA
gccatgaagcaaaatcatgt

SEQ ID NO: 203736 - DNA, 20 bp, synthetic construct
  source 1..20: mol_type = other DNA
tgccatgaagcaaaatcatg

SEQ ID NO: 203737 - DNA, 20 bp, synthetic construct
  source 1..20: mol_type = other DNA
ctgccatgaagcaaaatcat

SEQ ID NO: 203738 - DNA, 20 bp, synthetic construct
  source 1..20: mol_type = other DNA
cctgccatgaagcaaaatca

SEQ ID NO: 203739 - DNA, 20 bp, synthetic construct
  source 1..20: mol_type = other DNA
tcctgccatgaagcaaaatc

SEQ ID NO: 203740 - DNA, 20 bp, synthetic construct
  source 1..20: mol_type = other DNA
gtcctgccatgaagcaaaat

SEQ ID NO: 203741 - DNA, 20 bp, synthetic construct
  source 1..20: mol_type = other DNA
tgtcctgccatgaagcaaaa

SEQ ID NO: 203742 - DNA, 20 bp, synthetic construct
  source 1..20: mol_type = other DNA
ctgtcctgccatgaagcaaa

SEQ ID NO: 203743 - DNA, 20 bp, synthetic construct
  source 1..20: mol_type = other DNA
gctgtcctgccatgaagcaa

SEQ ID NO: 203744 - DNA, 20 bp, synthetic construct
  source 1..20: mol_type = other DNA
ggctgtcctgccatgaagca

SEQ ID NO: 203745 - DNA, 20 bp, synthetic construct
  source 1..20: mol_type = other DNA
cggctgtcctgccatgaagc

SEQ ID NO: 203746 - DNA, 20 bp, synthetic construct
  source 1..20: mol_type = other DNA
ccggctgtcctgccatgaag

SEQ ID NO: 203747 - DNA, 20 bp, synthetic construct
  source 1..20: mol_type = other DNA
tccggctgtcctgccatgaa

SEQ ID NO: 203748 - DNA, 20 bp, synthetic construct
  source 1..20: mol_type = other DNA
ttccggctgtcctgccatga

SEQ ID NO: 203749 - DNA, 20 bp, synthetic construct
  source 1..20: mol_type = other DNA
cttccggctgtcctgccatg

SEQ ID NO: 203750 - DNA, 20 bp, synthetic construct
  source 1..20: mol_type = other DNA
tcttccggctgtcctgccat

SEQ ID NO: 203751 - DNA, 20 bp, synthetic construct
  source 1..20: mol_type = other DNA
ttcttccggctgtcctgcca

SEQ ID NO: 203752 - DNA, 20 bp, synthetic construct
  source 1..20: mol_type = other DNA
cttcttccggctgtcctgcc

SEQ ID NO: 203753 - DNA, 20 bp, synthetic construct
  source 1..20: mol_type = other DNA
acttcttccggctgtcctgc

SEQ ID NO: 203754 - DNA, 20 bp, synthetic construct
  source 1..20: mol_type = other DNA
cacttcttccggctgtcctg

SEQ ID NO: 203755 - DNA, 20 bp, synthetic construct
  source 1..20: mol_type = other DNA
ccacttcttccggctgtcct

SEQ ID NO: 203756 - DNA, 20 bp, synthetic construct
  source 1..20: mol_type = other DNA
cccacttcttccggctgtcc

SEQ ID NO: 203757 - DNA, 20 bp, synthetic construct
  source 1..20: mol_type = other DNA
tcccacttcttccggctgtc

SEQ ID NO: 203758 - DNA, 20 bp, synthetic construct
  source 1..20: mol_type = other DNA
atcccacttcttccggctgt

SEQ ID NO: 203759 - DNA, 20 bp, synthetic construct
  source 1..20: mol_type = other DNA
aatcccacttcttccggctg

SEQ ID NO: 203760 - DNA, 20 bp, synthetic construct
  source 1..20: mol_type = other DNA
taatcccacttcttccggct

SEQ ID NO: 203761 - DNA, 20 bp, synthetic construct
  source 1..20: mol_type = other DNA
ataatcccacttcttccggc

SEQ ID NO: 203762 - DNA, 20 bp, synthetic construct
  source 1..20: mol_type = other DNA
tataatcccacttcttccgg

SEQ ID NO: 203763 - DNA, 20 bp, synthetic construct
  source 1..20: mol_type = other DNA
atataatcccacttcttccg

SEQ ID NO: 203764 - DNA, 20 bp, synthetic construct
  source 1..20: mol_type = other DNA
gatataatcccacttcttcc

SEQ ID NO: 203765 - DNA, 20 bp, synthetic construct
  source 1..20: mol_type = other DNA
ggatataatcccacttcttc

SEQ ID NO: 203766 - DNA, 20 bp, synthetic construct
  source 1..20: mol_type = other DNA
aggatataatcccacttctt

SEQ ID NO: 203767 - DNA, 20 bp, synthetic construct
  source 1..20: mol_type = other DNA
gaggatataatcccacttct

SEQ ID NO: 203768 - DNA, 20 bp, synthetic construct
  source 1..20: mol_type = other DNA
tgaggatataatcccacttc

SEQ ID NO: 203769 - DNA, 20 bp, synthetic construct
  source 1..20: mol_type = other DNA
gtgaggatataatcccactt

SEQ ID NO: 203770 - DNA, 20 bp, synthetic construct
  source 1..20: mol_type = other DNA
tgtgaggatataatcccact

SEQ ID NO: 203771 - DNA, 20 bp, synthetic construct
  source 1..20: mol_type = other DNA
atgtgaggatataatcccac

SEQ ID NO: 203772 - DNA, 20 bp, synthetic construct
  source 1..20: mol_type = other DNA
aatgtgaggatataatccca

SEQ ID NO: 203773 - DNA, 20 bp, synthetic construct
  source 1..20: mol_type = other DNA
taatgtgaggatataatccc

SEQ ID NO: 203774 - DNA, 20 bp, synthetic construct
  source 1..20: mol_type = other DNA
gtaatgtgaggatataatcc

SEQ ID NO: 203775 - DNA, 20 bp, synthetic construct
  source 1..20: mol_type = other DNA
tgtaatgtgaggatataatc

SEQ ID NO: 203776 - DNA, 20 bp, synthetic construct
  source 1..20: mol_type = other DNA
ttgtaatgtgaggatataat

SEQ ID NO: 203777 - DNA, 20 bp, synthetic construct
  source 1..20: mol_type = other DNA
tttgtaatgtgaggatataa

SEQ ID NO: 203778 - DNA, 20 bp, synthetic construct
  source 1..20: mol_type = other DNA
atttgtaatgtgaggatata

SEQ ID NO: 203779 - DNA, 20 bp, synthetic construct
  source 1..20: mol_type = other DNA
tatttgtaatgtgaggatat

SEQ ID NO: 203780 - DNA, 20 bp, synthetic construct
  source 1..20: mol_type = other DNA
ttatttgtaatgtgaggata

SEQ ID NO: 203781 - DNA, 20 bp, synthetic construct
  source 1..20: mol_type = other DNA
cttatttgtaatgtgaggat

SEQ ID NO: 203782 - DNA, 20 bp, synthetic construct
  source 1..20: mol_type = other DNA
tcttatttgtaatgtgagga

SEQ ID NO: 203783 - DNA, 20 bp, synthetic construct
  source 1..20: mol_type = other DNA
ttcttatttgtaatgtgagg

SEQ ID NO: 203784 - DNA, 20 bp, synthetic construct
  source 1..20: mol_type = other DNA
tttcttatttgtaatgtgag

SEQ ID NO: 203785 - DNA, 20 bp, synthetic construct
  source 1..20: mol_type = other DNA
ttttcttatttgtaatgtga

SEQ ID NO: 203786 - DNA, 20 bp, synthetic construct
  source 1..20: mol_type = other DNA
gttttcttatttgtaatgtg

SEQ ID NO: 203787 - DNA, 20 bp, synthetic construct
  source 1..20: mol_type = other DNA
agttttcttatttgtaatgt

SEQ ID NO: 203788 - DNA, 20 bp, synthetic construct
  source 1..20: mol_type = other DNA
cagttttcttatttgtaatg

SEQ ID NO: 203789 - DNA, 20 bp, synthetic construct
  source 1..20: mol_type = other DNA
tcagttttcttatttgtaat

SEQ ID NO: 203790 - DNA, 20 bp, synthetic construct
  source 1..20: mol_type = other DNA
ctcagttttcttatttgtaa

SEQ ID NO: 203791 - DNA, 20 bp, synthetic construct
  source 1..20: mol_type = other DNA
tctcagttttcttatttgta

SEQ ID NO: 203792 - DNA, 20 bp, synthetic construct
  source 1..20: mol_type = other DNA
gtctcagttttcttatttgt

SEQ ID NO: 203793 - DNA, 20 bp, synthetic construct
  source 1..20: mol_type = other DNA
agtctcagttttcttatttg

SEQ ID NO: 203794 - DNA, 20 bp, synthetic construct
  source 1..20: mol_type = other DNA
gagtctcagttttcttattt

SEQ ID NO: 203795 - DNA, 20 bp, synthetic construct
  source 1..20: mol_type = other DNA
tgagtctcagttttcttatt

SEQ ID NO: 203796 - DNA, 20 bp, synthetic construct
  source 1..20: mol_type = other DNA
ctgagtctcagttttcttat

SEQ ID NO: 203797 - DNA, 20 bp, synthetic construct
  source 1..20: mol_type = other DNA
tctgagtctcagttttctta

SEQ ID NO: 203798 - DNA, 20 bp, synthetic construct
  source 1..20: mol_type = other DNA
ttctgagtctcagttttctt

SEQ ID NO: 203799 - DNA, 20 bp, synthetic construct
  source 1..20: mol_type = other DNA
attctgagtctcagttttct

SEQ ID NO: 203800 - DNA, 20 bp, synthetic construct
  source 1..20: mol_type = other DNA
cattctgagtctcagttttc

SEQ ID NO: 203801 - DNA, 20 bp, synthetic construct
  source 1..20: mol_type = other DNA
ccattctgagtctcagtttt

SEQ ID NO: 203802 - DNA, 20 bp, synthetic construct
  source 1..20: mol_type = other DNA
accattctgagtctcagttt

SEQ ID NO: 203803 - DNA, 20 bp, synthetic construct
  source 1..20: mol_type = other DNA
aaccattctgagtctcagtt

SEQ ID NO: 203804 - DNA, 20 bp, synthetic construct
  source 1..20: mol_type = other DNA
taaccattctgagtctcagt

SEQ ID NO: 203805 - DNA, 20 bp, synthetic construct
  source 1..20: mol_type = other DNA
ttaaccattctgagtctcag

SEQ ID NO: 203806 - DNA, 20 bp, synthetic construct
  source 1..20: mol_type = other DNA
cttaaccattctgagtctca

SEQ ID NO: 203807 - DNA, 20 bp, synthetic construct
  source 1..20: mol_type = other DNA
acttaaccattctgagtctc

SEQ ID NO: 203808 - DNA, 20 bp, synthetic construct
  source 1..20: mol_type = other DNA
gacttaaccattctgagtct

SEQ ID NO: 203809 - DNA, 20 bp, synthetic construct
  source 1..20: mol_type = other DNA
tgacttaaccattctgagtc

SEQ ID NO: 203810 - DNA, 20 bp, synthetic construct
  source 1..20: mol_type = other DNA
gtgacttaaccattctgagt

SEQ ID NO: 203811 - DNA, 20 bp, synthetic construct
  source 1..20: mol_type = other DNA
agtgacttaaccattctgag

SEQ ID NO: 203812 - DNA, 20 bp, synthetic construct
  source 1..20: mol_type = other DNA
aagtgacttaaccattctga

SEQ ID NO: 203813 - DNA, 20 bp, synthetic construct
  source 1..20: mol_type = other DNA
caagtgacttaaccattctg

SEQ ID NO: 203814 - DNA, 20 bp, synthetic construct
  source 1..20: mol_type = other DNA
acaagtgacttaaccattct

SEQ ID NO: 203815 - DNA, 20 bp, synthetic construct
  source 1..20: mol_type = other DNA
gacaagtgacttaaccattc

SEQ ID NO: 203816 - DNA, 20 bp, synthetic construct
  source 1..20: mol_type = other DNA
ggacaagtgacttaaccatt

SEQ ID NO: 203817 - DNA, 20 bp, synthetic construct
  source 1..20: mol_type = other DNA
gggacaagtgacttaaccat

SEQ ID NO: 203818 - DNA, 20 bp, synthetic construct
  source 1..20: mol_type = other DNA
tgggacaagtgacttaacca

SEQ ID NO: 203819 - DNA, 20 bp, synthetic construct
  source 1..20: mol_type = other DNA
ctgggacaagtgacttaacc

SEQ ID NO: 203820 - DNA, 20 bp, synthetic construct
  source 1..20: mol_type = other DNA
cctgggacaagtgacttaac

SEQ ID NO: 203821 - DNA, 20 bp, synthetic construct
  source 1..20: mol_type = other DNA
gcctgggacaagtgacttaa

SEQ ID NO: 203822 - DNA, 20 bp, synthetic construct
  source 1..20: mol_type = other DNA
ggcctgggacaagtgactta

SEQ ID NO: 203823 - DNA, 20 bp, synthetic construct
  source 1..20: mol_type = other DNA
tggcctgggacaagtgactt

SEQ ID NO: 203824 - DNA, 20 bp, synthetic construct
  source 1..20: mol_type = other DNA
gtggcctgggacaagtgact

SEQ ID NO: 203825 - DNA, 20 bp, synthetic construct
  source 1..20: mol_type = other DNA
tgtggcctgggacaagtgac

SEQ ID NO: 203826 - DNA, 20 bp, synthetic construct
  source 1..20: mol_type = other DNA
gtgtggcctgggacaagtga

SEQ ID NO: 203827 - DNA, 20 bp, synthetic construct
  source 1..20: mol_type = other DNA
tgtgtggcctgggacaagtg

SEQ ID NO: 203828 - DNA, 20 bp, synthetic construct
  source 1..20: mol_type = other DNA
ctgtgtggcctgggacaagt

SEQ ID NO: 203829 - DNA, 20 bp, synthetic construct
  source 1..20: mol_type = other DNA
gctgtgtggcctgggacaag

SEQ ID NO: 203830 - DNA, 20 bp, synthetic construct
  source 1..20: mol_type = other DNA
ggctgtgtggcctgggacaa

SEQ ID NO: 203831 - DNA, 20 bp, synthetic construct
  source 1..20: mol_type = other DNA
tggctgtgtggcctgggaca

SEQ ID NO: 203832 - DNA, 20 bp, synthetic construct
  source 1..20: mol_type = other DNA
ctggctgtgtggcctgggac

SEQ ID NO: 203833 - DNA, 20 bp, synthetic construct
  source 1..20: mol_type = other DNA
actggctgtgtggcctggga

SEQ ID NO: 203834 - DNA, 20 bp, synthetic construct
  source 1..20: mol_type = other DNA
tactggctgtgtggcctggg

SEQ ID NO: 203835 - DNA, 20 bp, synthetic construct
  source 1..20: mol_type = other DNA
ttactggctgtgtggcctgg

SEQ ID NO: 203836 - DNA, 20 bp, synthetic construct
  source 1..20: mol_type = other DNA
tttactggctgtgtggcctg

SEQ ID NO: 203837 - DNA, 20 bp, synthetic construct
  source 1..20: mol_type = other DNA
atttactggctgtgtggcct

SEQ ID NO: 203838 - DNA, 20 bp, synthetic construct
  source 1..20: mol_type = other DNA
aatttactggctgtgtggcc

SEQ ID NO: 203839 - DNA, 20 bp, synthetic construct
  source 1..20: mol_type = other DNA
taatttactggctgtgtggc

SEQ ID NO: 203840 - DNA, 20 bp, synthetic construct
  source 1..20: mol_type = other DNA
gtaatttactggctgtgtgg

SEQ ID NO: 203841 - DNA, 20 bp, synthetic construct
  source 1..20: mol_type = other DNA
tgtaatttactggctgtgtg

SEQ ID NO: 203842 - DNA, 20 bp, synthetic construct
  source 1..20: mol_type = other DNA
ctgtaatttactggctgtgt

SEQ ID NO: 203843 - DNA, 20 bp, synthetic construct
  source 1..20: mol_type = other DNA
tctgtaatttactggctgtg

SEQ ID NO: 203844 - DNA, 20 bp, synthetic construct
  source 1..20: mol_type = other DNA
ttctgtaatttactggctgt

SEQ ID NO: 203845 - DNA, 20 bp, synthetic construct
  source 1..20: mol_type = other DNA
tttctgtaatttactggctg

SEQ ID NO: 203846 - DNA, 20 bp, synthetic construct
  source 1..20: mol_type = other DNA
gtttctgtaatttactggct

SEQ ID NO: 203847 - DNA, 20 bp, synthetic construct
  source 1..20: mol_type = other DNA
tgtttctgtaatttactggc

SEQ ID NO: 203848 - DNA, 20 bp, synthetic construct
  source 1..20: mol_type = other DNA
ctgtttctgtaatttactgg

SEQ ID NO: 203849 - DNA, 20 bp, synthetic construct
  source 1..20: mol_type = other DNA
tctgtttctgtaatttactg

SEQ ID NO: 203850 - DNA, 20 bp, synthetic construct
  source 1..20: mol_type = other DNA
ttctgtttctgtaatttact

SEQ ID NO: 203851 - DNA, 20 bp, synthetic construct
  source 1..20: mol_type = other DNA
attctgtttctgtaatttac

SEQ ID NO: 203852 - DNA, 20 bp, synthetic construct
  source 1..20: mol_type = other DNA
aattctgtttctgtaattta

SEQ ID NO: 203853 - DNA, 20 bp, synthetic construct
  source 1..20: mol_type = other DNA
aaattctgtttctgtaattt

SEQ ID NO: 203854 - DNA, 20 bp, synthetic construct
  source 1..20: mol_type = other DNA
caaattctgtttctgtaatt

SEQ ID NO: 203855 - DNA, 20 bp, synthetic construct
  source 1..20: mol_type = other DNA
tcaaattctgtttctgtaat

SEQ ID NO: 203856 - DNA, 20 bp, synthetic construct
  source 1..20: mol_type = other DNA
ttcaaattctgtttctgtaa

SEQ ID NO: 203857 - DNA, 20 bp, synthetic construct
  source 1..20: mol_type = other DNA
gttcaaattctgtttctgta

SEQ ID NO: 203858 - DNA, 20 bp, synthetic construct
  source 1..20: mol_type = other DNA
ggttcaaattctgtttctgt

SEQ ID NO: 203859 - DNA, 20 bp, synthetic construct
  source 1..20: mol_type = other DNA
gggttcaaattctgtttctg

SEQ ID NO: 203860 - DNA, 20 bp, synthetic construct
  source 1..20: mol_type = other DNA
tgggttcaaattctgtttct

SEQ ID NO: 203861 - DNA, 20 bp, synthetic construct
  source 1..20: mol_type = other DNA
ttgggttcaaattctgtttc

SEQ ID NO: 203862 - DNA, 20 bp, synthetic construct
  source 1..20: mol_type = other DNA
tttgggttcaaattctgttt

SEQ ID NO: 203863 - DNA, 20 bp, synthetic construct
  source 1..20: mol_type = other DNA
atttgggttcaaattctgtt

SEQ ID NO: 203864 - DNA, 20 bp, synthetic construct
  source 1..20: mol_type = other DNA
gatttgggttcaaattctgt

SEQ ID NO: 203865 - DNA, 20 bp, synthetic construct
  source 1..20: mol_type = other DNA
agatttgggttcaaattctg

SEQ ID NO: 203866 - DNA, 20 bp, synthetic construct
  source 1..20: mol_type = other DNA
aagatttgggttcaaattct

SEQ ID NO: 203867 - DNA, 20 bp, synthetic construct
  source 1..20: mol_type = other DNA
gaagatttgggttcaaattc

SEQ ID NO: 203868 - DNA, 20 bp, synthetic construct
  source 1..20: mol_type = other DNA
ggaagatttgggttcaaatt

SEQ ID NO: 203869 - DNA, 20 bp, synthetic construct
  source 1..20: mol_type = other DNA
tggaagatttgggttcaaat

SEQ ID NO: 203870 - DNA, 20 bp, synthetic construct
  source 1..20: mol_type = other DNA
ctggaagatttgggttcaaa

SEQ ID NO: 203871 - DNA, 20 bp, synthetic construct
  source 1..20: mol_type = other DNA
gctggaagatttgggttcaa

SEQ ID NO: 203872 - DNA, 20 bp, synthetic construct
  source 1..20: mol_type = other DNA
agctggaagatttgggttca

SEQ ID NO: 203873 - DNA, 20 bp, synthetic construct
  source 1..20: mol_type = other DNA
gagctggaagatttgggttc

SEQ ID NO: 203874 - DNA, 20 bp, synthetic construct
  source 1..20: mol_type = other DNA
ggagctggaagatttgggtt

SEQ ID NO: 203875 - DNA, 20 bp, synthetic construct
  source 1..20: mol_type = other DNA
tggagctggaagatttgggt

SEQ ID NO: 203876 - DNA, 20 bp, synthetic construct
  source 1..20: mol_type = other DNA
ttggagctggaagatttggg

SEQ ID NO: 203877 - DNA, 20 bp, synthetic construct
  source 1..20: mol_type = other DNA
tttggagctggaagatttgg

SEQ ID NO: 203878 - DNA, 20 bp, synthetic construct
  source 1..20: mol_type = other DNA
ctttggagctggaagatttg

SEQ ID NO: 203879 - DNA, 20 bp, synthetic construct
  source 1..20: mol_type = other DNA
gctttggagctggaagattt

SEQ ID NO: 203880 - DNA, 20 bp, synthetic construct
  source 1..20: mol_type = other DNA
agctttggagctggaagatt

SEQ ID NO: 203881 - DNA, 20 bp, synthetic construct
  source 1..20: mol_type = other DNA
aagctttggagctggaagat

SEQ ID NO: 203882 - DNA, 20 bp, synthetic construct
  source 1..20: mol_type = other DNA
caagctttggagctggaaga

SEQ ID NO: 203883 - DNA, 20 bp, synthetic construct
  source 1..20: mol_type = other DNA
acaagctttggagctggaag

SEQ ID NO: 203884 - DNA, 20 bp, synthetic construct
  source 1..20: mol_type = other DNA
cacaagctttggagctggaa

SEQ ID NO: 203885 - DNA, 20 bp, synthetic construct
  source 1..20: mol_type = other DNA
acacaagctttggagctgga

SEQ ID NO: 203886 - DNA, 20 bp, synthetic construct
  source 1..20: mol_type = other DNA
aacacaagctttggagctgg

SEQ ID NO: 203887 - DNA, 20 bp, synthetic construct
  source 1..20: mol_type = other DNA
gaacacaagctttggagctg

SEQ ID NO: 203888 - DNA, 20 bp, synthetic construct
  source 1..20: mol_type = other DNA
agaacacaagctttggagct

SEQ ID NO: 203889 - DNA, 20 bp, synthetic construct
  source 1..20: mol_type = other DNA
aagaacacaagctttggagc

SEQ ID NO: 203890 - DNA, 20 bp, synthetic construct
  source 1..20: mol_type = other DNA
aaagaacacaagctttggag

SEQ ID NO: 203891 - DNA, 20 bp, synthetic construct
  source 1..20: mol_type = other DNA
aaaagaacacaagctttgga

SEQ ID NO: 203892 - DNA, 20 bp, synthetic construct
  source 1..20: mol_type = other DNA
gaaaagaacacaagctttgg

SEQ ID NO: 203893 - DNA, 20 bp, synthetic construct
  source 1..20: mol_type = other DNA
tgaaaagaacacaagctttg

SEQ ID NO: 203894 - DNA, 20 bp, synthetic construct
  source 1..20: mol_type = other DNA
gtgaaaagaacacaagcttt

SEQ ID NO: 203895 - DNA, 20 bp, synthetic construct
  source 1..20: mol_type = other DNA
agtgaaaagaacacaagctt

SEQ ID NO: 203896 - DNA, 20 bp, synthetic construct
  source 1..20: mol_type = other DNA
tagtgaaaagaacacaagct

SEQ ID NO: 203897 - DNA, 20 bp, synthetic construct
  source 1..20: mol_type = other DNA
gtagtgaaaagaacacaagc

SEQ ID NO: 203898 - DNA, 20 bp, synthetic construct
  source 1..20: mol_type = other DNA
ggtagtgaaaagaacacaag

SEQ ID NO: 203899 - DNA, 20 bp, synthetic construct
  source 1..20: mol_type = other DNA
aggtagtgaaaagaacacaa

SEQ ID NO: 203900 - DNA, 20 bp, synthetic construct
  source 1..20: mol_type = other DNA
gaggtagtgaaaagaacaca

SEQ ID NO: 203901 - DNA, 20 bp, synthetic construct
  source 1..20: mol_type = other DNA
ggaggtagtgaaaagaacac

SEQ ID NO: 203902 - DNA, 20 bp, synthetic construct
  source 1..20: mol_type = other DNA
aggaggtagtgaaaagaaca

SEQ ID NO: 203903 - DNA, 20 bp, synthetic construct
  source 1..20: mol_type = other DNA
caggaggtagtgaaaagaac

SEQ ID NO: 203904 - DNA, 20 bp, synthetic construct
  source 1..20: mol_type = other DNA
gcaggaggtagtgaaaagaa

SEQ ID NO: 203905 - DNA, 20 bp, synthetic construct
  source 1..20: mol_type = other DNA
agcaggaggtagtgaaaaga

SEQ ID NO: 203906 - DNA, 20 bp, synthetic construct
  source 1..20: mol_type = other DNA
aagcaggaggtagtgaaaag

SEQ ID NO: 203907 - DNA, 20 bp, synthetic construct
  source 1..20: mol_type = other DNA
taagcaggaggtagtgaaaa

SEQ ID NO: 203908 - DNA, 20 bp, synthetic construct
  source 1..20: mol_type = other DNA
ttaagcaggaggtagtgaaa

SEQ ID NO: 203909 - DNA, 20 bp, synthetic construct
  source 1..20: mol_type = other DNA
attaagcaggaggtagtgaa

SEQ ID NO: 203910 - DNA, 20 bp, synthetic construct
  source 1..20: mol_type = other DNA
aattaagcaggaggtagtga

SEQ ID NO: 203911 - DNA, 20 bp, synthetic construct
  source 1..20: mol_type = other DNA
aaattaagcaggaggtagtg

SEQ ID NO: 203912 - DNA, 20 bp, synthetic construct
  source 1..20: mol_type = other DNA
aaaattaagcaggaggtagt

SEQ ID NO: 203913 - DNA, 20 bp, synthetic construct
  source 1..20: mol_type = other DNA
aaaaattaagcaggaggtag

SEQ ID NO: 203914 - DNA, 20 bp, synthetic construct
  source 1..20: mol_type = other DNA
aaaaaattaagcaggaggta

SEQ ID NO: 203915 - DNA, 20 bp, synthetic construct
  source 1..20: mol_type = other DNA
taaaaaattaagcaggaggt

SEQ ID NO: 203916 - DNA, 20 bp, synthetic construct
  source 1..20: mol_type = other DNA
ttaaaaaattaagcaggagg

SEQ ID NO: 203917 - DNA, 20 bp, synthetic construct
  source 1..20: mol_type = other DNA
attaaaaaattaagcaggag

SEQ ID NO: 203918 - DNA, 20 bp, synthetic construct
  source 1..20: mol_type = other DNA
aattaaaaaattaagcagga

SEQ ID NO: 203919 - DNA, 20 bp, synthetic construct
  source 1..20: mol_type = other DNA
aaattaaaaaattaagcagg

SEQ ID NO: 203920 - DNA, 20 bp, synthetic construct
  source 1..20: mol_type = other DNA
gaaattaaaaaattaagcag

SEQ ID NO: 203921 - DNA, 20 bp, synthetic construct
  source 1..20: mol_type = other DNA
agaaattaaaaaattaagca

SEQ ID NO: 203922 - DNA, 20 bp, synthetic construct
  source 1..20: mol_type = other DNA
tagaaattaaaaaattaagc

SEQ ID NO: 203923 - DNA, 20 bp, synthetic construct
  source 1..20: mol_type = other DNA
ttagaaattaaaaaattaag

SEQ ID NO: 203924 - DNA, 20 bp, synthetic construct
  source 1..20: mol_type = other DNA
cttagaaattaaaaaattaa

SEQ ID NO: 203925 - DNA, 20 bp, synthetic construct
  source 1..20: mol_type = other DNA
tcttagaaattaaaaaatta

SEQ ID NO: 203926 - DNA, 20 bp, synthetic construct
  source 1..20: mol_type = other DNA
atcttagaaattaaaaaatt

SEQ ID NO: 203927 - DNA, 20 bp, synthetic construct
  source 1..20: mol_type = other DNA
aatcttagaaattaaaaaat

SEQ ID NO: 203928 - DNA, 20 bp, synthetic construct
  source 1..20: mol_type = other DNA
taatcttagaaattaaaaaa

SEQ ID NO: 203929 - DNA, 20 bp, synthetic construct
  source 1..20: mol_type = other DNA
ctaatcttagaaattaaaaa

SEQ ID NO: 203930 - DNA, 20 bp, synthetic construct
  source 1..20: mol_type = other DNA
tctaatcttagaaattaaaa

SEQ ID NO: 203931 - DNA, 20 bp, synthetic construct
  source 1..20: mol_type = other DNA
gtctaatcttagaaattaaa

SEQ ID NO: 203932 - DNA, 20 bp, synthetic construct
  source 1..20: mol_type = other DNA
ggtctaatcttagaaattaa

SEQ ID NO: 203933 - DNA, 20 bp, synthetic construct
  source 1..20: mol_type = other DNA
gggtctaatcttagaaatta

SEQ ID NO: 203934 - DNA, 20 bp, synthetic construct
  source 1..20: mol_type = other DNA
agggtctaatcttagaaatt

SEQ ID NO: 203935 - DNA, 20 bp, synthetic construct
  source 1..20: mol_type = other DNA
aagggtctaatcttagaaat

SEQ ID NO: 203936 - DNA, 20 bp, synthetic construct
  source 1..20: mol_type = other DNA
gaagggtctaatcttagaaa

SEQ ID NO: 203937 - DNA, 20 bp, synthetic construct
  source 1..20: mol_type = other DNA
tgaagggtctaatcttagaa

SEQ ID NO: 203938 - DNA, 20 bp, synthetic construct
  source 1..20: mol_type = other DNA
atgaagggtctaatcttaga

SEQ ID NO: 203939 - DNA, 20 bp, synthetic construct
  source 1..20: mol_type = other DNA
gatgaagggtctaatcttag

SEQ ID NO: 203940 - DNA, 20 bp, synthetic construct
  source 1..20: mol_type = other DNA
agatgaagggtctaatctta

SEQ ID NO: 203941 - DNA, 20 bp, synthetic construct
  source 1..20: mol_type = other DNA
tagatgaagggtctaatctt

SEQ ID NO: 203942 - DNA, 20 bp, synthetic construct
  source 1..20: mol_type = other DNA
atagatgaagggtctaatct

SEQ ID NO: 203943 - DNA, 20 bp, synthetic construct
  source 1..20: mol_type = other DNA
gatagatgaagggtctaatc

SEQ ID NO: 203944 - DNA, 20 bp, synthetic construct
  source 1..20: mol_type = other DNA
ggatagatgaagggtctaat

SEQ ID NO: 203945 - DNA, 20 bp, synthetic construct
  source 1..20: mol_type = other DNA
tggatagatgaagggtctaa

SEQ ID NO: 203946 - DNA, 20 bp, synthetic construct
  source 1..20: mol_type = other DNA
atggatagatgaagggtcta

SEQ ID NO: 203947 - DNA, 20 bp, synthetic construct
  source 1..20: mol_type = other DNA
catggatagatgaagggtct

SEQ ID NO: 203948 - DNA, 20 bp, synthetic construct
  source 1..20: mol_type = other DNA
tcatggatagatgaagggtc

SEQ ID NO: 203949 - DNA, 20 bp, synthetic construct
  source 1..20: mol_type = other DNA
gtcatggatagatgaagggt

SEQ ID NO: 203950 - DNA, 20 bp, synthetic construct
  source 1..20: mol_type = other DNA
tgtcatggatagatgaaggg

SEQ ID NO: 203951 - DNA, 20 bp, synthetic construct
  source 1..20: mol_type = other DNA
gtgtcatggatagatgaagg

SEQ ID NO: 203952 - DNA, 20 bp, synthetic construct
  source 1..20: mol_type = other DNA
ggtgtcatggatagatgaag

SEQ ID NO: 203953 - DNA, 20 bp, synthetic construct
  source 1..20: mol_type = other DNA
aggtgtcatggatagatgaa

SEQ ID NO: 203954 - DNA, 20 bp, synthetic construct
  source 1..20: mol_type = other DNA
caggtgtcatggatagatga

SEQ ID NO: 203955 - DNA, 20 bp, synthetic construct
  source 1..20: mol_type = other DNA
gcaggtgtcatggatagatg

SEQ ID NO: 203956 - DNA, 20 bp, synthetic construct
  source 1..20: mol_type = other DNA
ggcaggtgtcatggatagat

SEQ ID NO: 203957 - DNA, 20 bp, synthetic construct
  source 1..20: mol_type = other DNA
aggcaggtgtcatggataga

SEQ ID NO: 203958 - DNA, 20 bp, synthetic construct
  source 1..20: mol_type = other DNA
caggcaggtgtcatggatag

SEQ ID NO: 203959 - DNA, 20 bp, synthetic construct
  source 1..20: mol_type = other DNA
acaggcaggtgtcatggata

SEQ ID NO: 203960 - DNA, 20 bp, synthetic construct
  source 1..20: mol_type = other DNA
gacaggcaggtgtcatggat

SEQ ID NO: 203961 - DNA, 20 bp, synthetic construct
  source 1..20: mol_type = other DNA
tgacaggcaggtgtcatgga

SEQ ID NO: 203962 - DNA, 20 bp, synthetic construct
  source 1..20: mol_type = other DNA
atgacaggcaggtgtcatgg

SEQ ID NO: 203963 - DNA, 20 bp, synthetic construct
  source 1..20: mol_type = other DNA
gatgacaggcaggtgtcatg

SEQ ID NO: 203964 - DNA, 20 bp, synthetic construct
  source 1..20: mol_type = other DNA
ggatgacaggcaggtgtcat

SEQ ID NO: 203965 - DNA, 20 bp, synthetic construct
  source 1..20: mol_type = other DNA
gggatgacaggcaggtgtca

SEQ ID NO: 203966 - DNA, 20 bp, synthetic construct
  source 1..20: mol_type = other DNA
ggggatgacaggcaggtgtc

SEQ ID NO: 203967 - DNA, 20 bp, synthetic construct
  source 1..20: mol_type = other DNA
aggggatgacaggcaggtgt

SEQ ID NO: 203968 - DNA, 20 bp, synthetic construct
  source 1..20: mol_type = other DNA
caggggatgacaggcaggtg

SEQ ID NO: 203969 - DNA, 20 bp, synthetic construct
  source 1..20: mol_type = other DNA
tcaggggatgacaggcaggt

SEQ ID NO: 203970 - DNA, 20 bp, synthetic construct
  source 1..20: mol_type = other DNA
ttcaggggatgacaggcagg

SEQ ID NO: 203971 - DNA, 20 bp, synthetic construct
  source 1..20: mol_type = other DNA
tttcaggggatgacaggcag

SEQ ID NO: 203972 - DNA, 20 bp, synthetic construct
  source 1..20: mol_type = other DNA
ttttcaggggatgacaggca

SEQ ID NO: 203973 - DNA, 20 bp, synthetic construct
  source 1..20: mol_type = other DNA
tttttcaggggatgacaggc

SEQ ID NO: 203974 - DNA, 20 bp, synthetic construct
  source 1..20: mol_type = other DNA
ttttttcaggggatgacagg

SEQ ID NO: 203975 - DNA, 20 bp, synthetic construct
  source 1..20: mol_type = other DNA
cttttttcaggggatgacag

SEQ ID NO: 203976 - DNA, 20 bp, synthetic construct
  source 1..20: mol_type = other DNA
ccttttttcaggggatgaca

SEQ ID NO: 203977 - DNA, 20 bp, synthetic construct
  source 1..20: mol_type = other DNA
accttttttcaggggatgac

SEQ ID NO: 203978 - DNA, 20 bp, synthetic construct
  source 1..20: mol_type = other DNA
caccttttttcaggggatga

SEQ ID NO: 203979 - DNA, 20 bp, synthetic construct
  source 1..20: mol_type = other DNA
tcaccttttttcaggggatg

SEQ ID NO: 203980 - DNA, 20 bp, synthetic construct
  source 1..20: mol_type = other DNA
ttcaccttttttcaggggat

SEQ ID NO: 203981 - DNA, 20 bp, synthetic construct
  source 1..20: mol_type = other DNA
gttcaccttttttcagggga

SEQ ID NO: 203982 - DNA, 20 bp, synthetic construct
  source 1..20: mol_type = other DNA
cgttcaccttttttcagggg

SEQ ID NO: 203983 - DNA, 20 bp, synthetic construct
  source 1..20: mol_type = other DNA
gcgttcaccttttttcaggg

SEQ ID NO: 203984 - DNA, 20 bp, synthetic construct
  source 1..20: mol_type = other DNA
ggcgttcaccttttttcagg

SEQ ID NO: 203985 - DNA, 20 bp, synthetic construct
  source 1..20: mol_type = other DNA
cggcgttcaccttttttcag

SEQ ID NO: 203986 - DNA, 20 bp, synthetic construct
  source 1..20: mol_type = other DNA
acggcgttcaccttttttca

SEQ ID NO: 203987 - DNA, 20 bp, synthetic construct
  source 1..20: mol_type = other DNA
aacggcgttcaccttttttc

SEQ ID NO: 203988 - DNA, 20 bp, synthetic construct
  source 1..20: mol_type = other DNA
gaacggcgttcacctttttt

SEQ ID NO: 203989 - DNA, 20 bp, synthetic construct
  source 1..20: mol_type = other DNA
tgaacggcgttcaccttttt

SEQ ID NO: 203990 - DNA, 20 bp, synthetic construct
  source 1..20: mol_type = other DNA
ctgaacggcgttcacctttt

SEQ ID NO: 203991 - DNA, 20 bp, synthetic construct
  source 1..20: mol_type = other DNA
tctgaacggcgttcaccttt

SEQ ID NO: 203992 - DNA, 20 bp, synthetic construct
  source 1..20: mol_type = other DNA
ttctgaacggcgttcacctt

SEQ ID NO: 203993 - DNA, 20 bp, synthetic construct
  source 1..20: mol_type = other DNA
tttctgaacggcgttcacct

SEQ ID NO: 203994 - DNA, 20 bp, synthetic construct
  source 1..20: mol_type = other DNA
atttctgaacggcgttcacc

SEQ ID NO: 203995 - DNA, 20 bp, synthetic construct
  source 1..20: mol_type = other DNA
aatttctgaacggcgttcac

SEQ ID NO: 203996 - DNA, 20 bp, synthetic construct
  source 1..20: mol_type = other DNA
aaatttctgaacggcgttca

SEQ ID NO: 203997 - DNA, 20 bp, synthetic construct
  source 1..20: mol_type = other DNA
aaaatttctgaacggcgttc

SEQ ID NO: 203998 - DNA, 20 bp, synthetic construct
  source 1..20: mol_type = other DNA
aaaaatttctgaacggcgtt

SEQ ID NO: 203999 - DNA, 20 bp, synthetic construct
  source 1..20: mol_type = other DNA
gaaaaatttctgaacggcgt

SEQ ID NO: 204000 - DNA, 20 bp, synthetic construct
  source 1..20: mol_type = other DNA
agaaaaatttctgaacggcg

SEQ ID NO: 204001 - DNA, 20 bp, synthetic construct
  source 1..20: mol_type = other DNA
tagaaaaatttctgaacggc

SEQ ID NO: 204002 - DNA, 20 bp, synthetic construct
  source 1..20: mol_type = other DNA
ctagaaaaatttctgaacgg

SEQ ID NO: 204003 - DNA, 20 bp, synthetic construct
  source 1..20: mol_type = other DNA
gctagaaaaatttctgaacg

SEQ ID NO: 204004 - DNA, 20 bp, synthetic construct
  source 1..20: mol_type = other DNA
ggctagaaaaatttctgaac

SEQ ID NO: 204005 - DNA, 20 bp, synthetic construct
  source 1..20: mol_type = other DNA
aggctagaaaaatttctgaa

SEQ ID NO: 204006 - DNA, 20 bp, synthetic construct
  source 1..20: mol_type = other DNA
caggctagaaaaatttctga

SEQ ID NO: 204007 - DNA, 20 bp, synthetic construct
  source 1..20: mol_type = other DNA
tcaggctagaaaaatttctg

SEQ ID NO: 204008 - DNA, 20 bp, synthetic construct
  source 1..20: mol_type = other DNA
ctcaggctagaaaaatttct

SEQ ID NO: 204009 - DNA, 20 bp, synthetic construct
  source 1..20: mol_type = other DNA
gctcaggctagaaaaatttc

SEQ ID NO: 204010 - DNA, 20 bp, synthetic construct
  source 1..20: mol_type = other DNA
agctcaggctagaaaaattt

SEQ ID NO: 204011 - DNA, 20 bp, synthetic construct
  source 1..20: mol_type = other DNA
gagctcaggctagaaaaatt

SEQ ID NO: 204012 - DNA, 20 bp, synthetic construct
  source 1..20: mol_type = other DNA
tgagctcaggctagaaaaat

SEQ ID NO: 204013 - DNA, 20 bp, synthetic construct
  source 1..20: mol_type = other DNA
gtgagctcaggctagaaaaa

SEQ ID NO: 204014 - DNA, 20 bp, synthetic construct
  source 1..20: mol_type = other DNA
agtgagctcaggctagaaaa

SEQ ID NO: 204015 - DNA, 20 bp, synthetic construct
  source 1..20: mol_type = other DNA
gagtgagctcaggctagaaa

SEQ ID NO: 204016 - DNA, 20 bp, synthetic construct
  source 1..20: mol_type = other DNA
ggagtgagctcaggctagaa

SEQ ID NO: 204017 - DNA, 20 bp, synthetic construct
  source 1..20: mol_type = other DNA
gggagtgagctcaggctaga

SEQ ID NO: 204018 - DNA, 20 bp, synthetic construct
  source 1..20: mol_type = other DNA
tgggagtgagctcaggctag

SEQ ID NO: 204019 - DNA, 20 bp, synthetic construct
  source 1..20: mol_type = other DNA
ctgggagtgagctcaggcta

SEQ ID NO: 204020 - DNA, 20 bp, synthetic construct
  source 1..20: mol_type = other DNA
actgggagtgagctcaggct

SEQ ID NO: 204021 - DNA, 20 bp, synthetic construct
  source 1..20: mol_type = other DNA
aactgggagtgagctcaggc

SEQ ID NO: 204022 - DNA, 20 bp, synthetic construct
  source 1..20: mol_type = other DNA
gaactgggagtgagctcagg

SEQ ID NO: 204023 - DNA, 20 bp, synthetic construct
  source 1..20: mol_type = other DNA
tgaactgggagtgagctcag

SEQ ID NO: 204024 - DNA, 20 bp, synthetic construct
  source 1..20: mol_type = other DNA
gtgaactgggagtgagctca

SEQ ID NO: 204025 - DNA, 20 bp, synthetic construct
  source 1..20: mol_type = other DNA
agtgaactgggagtgagctc

SEQ ID NO: 204026 - DNA, 20 bp, synthetic construct
  source 1..20: mol_type = other DNA
aagtgaactgggagtgagct

SEQ ID NO: 204027 - DNA, 20 bp, synthetic construct
  source 1..20: mol_type = other DNA
taagtgaactgggagtgagc

SEQ ID NO: 204028 - DNA, 20 bp, synthetic construct
  source 1..20: mol_type = other DNA
ataagtgaactgggagtgag

SEQ ID NO: 204029 - DNA, 20 bp, synthetic construct
  source 1..20: mol_type = other DNA
aataagtgaactgggagtga

SEQ ID NO: 204030 - DNA, 20 bp, synthetic construct
  source 1..20: mol_type = other DNA
aaataagtgaactgggagtg

SEQ ID NO: 204031 - DNA, 20 bp, synthetic construct
  source 1..20: mol_type = other DNA
aaaataagtgaactgggagt

SEQ ID NO: 204032 - DNA, 20 bp, synthetic construct
  source 1..20: mol_type = other DNA
aaaaataagtgaactgggag

SEQ ID NO: 204033 - DNA, 20 bp, synthetic construct
  source 1..20: mol_type = other DNA
caaaaataagtgaactggga

SEQ ID NO: 204034 - DNA, 20 bp, synthetic construct
  source 1..20: mol_type = other DNA
gcaaaaataagtgaactggg

SEQ ID NO: 204035 - DNA, 20 bp, synthetic construct
  source 1..20: mol_type = other DNA
agcaaaaataagtgaactgg

SEQ ID NO: 204036 - DNA, 20 bp, synthetic construct
  source 1..20: mol_type = other DNA
aagcaaaaataagtgaactg

SEQ ID NO: 204037 - DNA, 20 bp, synthetic construct
  source 1..20: mol_type = other DNA
aaagcaaaaataagtgaact

SEQ ID NO: 204038 - DNA, 20 bp, synthetic construct
  source 1..20: mol_type = other DNA
caaagcaaaaataagtgaac

SEQ ID NO: 204039 - DNA, 20 bp, synthetic construct
  source 1..20: mol_type = other DNA
acaaagcaaaaataagtgaa

SEQ ID NO: 204040 - DNA, 20 bp, synthetic construct
  source 1..20: mol_type = other DNA
gacaaagcaaaaataagtga

SEQ ID NO: 204041 - DNA, 20 bp, synthetic construct
  source 1..20: mol_type = other DNA
tgacaaagcaaaaataagtg

SEQ ID NO: 204042 - DNA, 20 bp, synthetic construct
  source 1..20: mol_type = other DNA
atgacaaagcaaaaataagt

SEQ ID NO: 204043 - DNA, 20 bp, synthetic construct
  source 1..20: mol_type = other DNA
catgacaaagcaaaaataag

SEQ ID NO: 204044 - DNA, 20 bp, synthetic construct
  source 1..20: mol_type = other DNA
ccatgacaaagcaaaaataa

SEQ ID NO: 204045 - DNA, 20 bp, synthetic construct
  source 1..20: mol_type = other DNA
gccatgacaaagcaaaaata

SEQ ID NO: 204046 - DNA, 20 bp, synthetic construct
  source 1..20: mol_type = other DNA
agccatgacaaagcaaaaat

SEQ ID NO: 204047 - DNA, 20 bp, synthetic construct
  source 1..20: mol_type = other DNA
cagccatgacaaagcaaaaa

SEQ ID NO: 204048 - DNA, 20 bp, synthetic construct
  source 1..20: mol_type = other DNA
gcagccatgacaaagcaaaa

SEQ ID NO: 204049 - DNA, 20 bp, synthetic construct
  source 1..20: mol_type = other DNA
ggcagccatgacaaagcaaa

SEQ ID NO: 204050 - DNA, 20 bp, synthetic construct
  source 1..20: mol_type = other DNA
gggcagccatgacaaagcaa

SEQ ID NO: 204051 - DNA, 20 bp, synthetic construct
  source 1..20: mol_type = other DNA
tgggcagccatgacaaagca

SEQ ID NO: 204052 - DNA, 20 bp, synthetic construct
  source 1..20: mol_type = other DNA
ctgggcagccatgacaaagc

SEQ ID NO: 204053 - DNA, 20 bp, synthetic construct
  source 1..20: mol_type = other DNA
actgggcagccatgacaaag

SEQ ID NO: 204054 - DNA, 20 bp, synthetic construct
  source 1..20: mol_type = other DNA
gactgggcagccatgacaaa

SEQ ID NO: 204055 - DNA, 20 bp, synthetic construct
  source 1..20: mol_type = other DNA
ggactgggcagccatgacaa

SEQ ID NO: 204056 - DNA, 20 bp, synthetic construct
  source 1..20: mol_type = other DNA
gggactgggcagccatgaca

SEQ ID NO: 204057 - DNA, 20 bp, synthetic construct
  source 1..20: mol_type = other DNA
ggggactgggcagccatgac

SEQ ID NO: 204058 - DNA, 20 bp, synthetic construct
  source 1..20: mol_type = other DNA
tggggactgggcagccatga

SEQ ID NO: 204059 - DNA, 20 bp, synthetic construct
  source 1..20: mol_type = other DNA
gtggggactgggcagccatg

SEQ ID NO: 204060 - DNA, 20 bp, synthetic construct
  source 1..20: mol_type = other DNA
agtggggactgggcagccat

SEQ ID NO: 204061 - DNA, 20 bp, synthetic construct
  source 1..20: mol_type = other DNA
aagtggggactgggcagcca

SEQ ID NO: 204062 - DNA, 20 bp, synthetic construct
  source 1..20: mol_type = other DNA
caagtggggactgggcagcc

SEQ ID NO: 204063 - DNA, 20 bp, synthetic construct
  source 1..20: mol_type = other DNA
acaagtggggactgggcagc

SEQ ID NO: 204064 - DNA, 20 bp, synthetic construct
  source 1..20: mol_type = other DNA
tacaagtggggactgggcag

SEQ ID NO: 204065 - DNA, 20 bp, synthetic construct
  source 1..20: mol_type = other DNA
ctacaagtggggactgggca

SEQ ID NO: 204066 - DNA, 20 bp, synthetic construct
  source 1..20: mol_type = other DNA
tctacaagtggggactgggc

SEQ ID NO: 204067 - DNA, 20 bp, synthetic construct
  source 1..20: mol_type = other DNA
gtctacaagtggggactggg

SEQ ID NO: 204068 - DNA, 20 bp, synthetic construct
  source 1..20: mol_type = other DNA
ggtctacaagtggggactgg

SEQ ID NO: 204069 - DNA, 20 bp, synthetic construct
  source 1..20: mol_type = other DNA
tggtctacaagtggggactg

SEQ ID NO: 204070 - DNA, 20 bp, synthetic construct
  source 1..20: mol_type = other DNA
ctggtctacaagtggggact

SEQ ID NO: 204071 - DNA, 20 bp, synthetic construct
  source 1..20: mol_type = other DNA
cctggtctacaagtggggac

SEQ ID NO: 204072 - DNA, 20 bp, synthetic construct
  source 1..20: mol_type = other DNA
tcctggtctacaagtgggga

SEQ ID NO: 204073 - DNA, 20 bp, synthetic construct
  source 1..20: mol_type = other DNA
ttcctggtctacaagtgggg

SEQ ID NO: 204074 - DNA, 20 bp, synthetic construct
  source 1..20: mol_type = other DNA
attcctggtctacaagtggg

SEQ ID NO: 204075 - DNA, 20 bp, synthetic construct
  source 1..20: mol_type = other DNA
tattcctggtctacaagtgg

SEQ ID NO: 204076 - DNA, 20 bp, synthetic construct
  source 1..20: mol_type = other DNA
ctattcctggtctacaagtg

SEQ ID NO: 204077 - DNA, 20 bp, synthetic construct
  source 1..20: mol_type = other DNA
cctattcctggtctacaagt

SEQ ID NO: 204078 - DNA, 20 bp, synthetic construct
  source 1..20: mol_type = other DNA
acctattcctggtctacaag

SEQ ID NO: 204079 - DNA, 20 bp, synthetic construct
  source 1..20: mol_type = other DNA
gacctattcctggtctacaa

SEQ ID NO: 204080 - DNA, 20 bp, synthetic construct
  source 1..20: mol_type = other DNA
tgacctattcctggtctaca

SEQ ID NO: 204081 - DNA, 20 bp, synthetic construct
  source 1..20: mol_type = other DNA
atgacctattcctggtctac

SEQ ID NO: 204082 - DNA, 20 bp, synthetic construct
  source 1..20: mol_type = other DNA
catgacctattcctggtcta

SEQ ID NO: 204083 - DNA, 20 bp, synthetic construct
  source 1..20: mol_type = other DNA
ccatgacctattcctggtct

SEQ ID NO: 204084 - DNA, 20 bp, synthetic construct
  source 1..20: mol_type = other DNA
gccatgacctattcctggtc

SEQ ID NO: 204085 - DNA, 20 bp, synthetic construct
  source 1..20: mol_type = other DNA
agccatgacctattcctggt

SEQ ID NO: 204086 - DNA, 20 bp, synthetic construct
  source 1..20: mol_type = other DNA
cagccatgacctattcctgg

SEQ ID NO: 204087 - DNA, 20 bp, synthetic construct
  source 1..20: mol_type = other DNA
gcagccatgacctattcctg

SEQ ID NO: 204088 - DNA, 20 bp, synthetic construct
  source 1..20: mol_type = other DNA
cgcagccatgacctattcct

SEQ ID NO: 204089 - DNA, 20 bp, synthetic construct
  source 1..20: mol_type = other DNA
ccgcagccatgacctattcc

SEQ ID NO: 204090 - DNA, 20 bp, synthetic construct
  source 1..20: mol_type = other DNA
cccgcagccatgacctattc

SEQ ID NO: 204091 - DNA, 20 bp, synthetic construct
  source 1..20: mol_type = other DNA
ccccgcagccatgacctatt

SEQ ID NO: 204092 - DNA, 20 bp, synthetic construct
  source 1..20: mol_type = other DNA
tccccgcagccatgacctat

SEQ ID NO: 204093 - DNA, 20 bp, synthetic construct
  source 1..20: mol_type = other DNA
gtccccgcagccatgaccta

SEQ ID NO: 204094 - DNA, 20 bp, synthetic construct
  source 1..20: mol_type = other DNA
agtccccgcagccatgacct

SEQ ID NO: 204095 - DNA, 20 bp, synthetic construct
  source 1..20: mol_type = other DNA
tagtccccgcagccatgacc

SEQ ID NO: 204096 - DNA, 20 bp, synthetic construct
  source 1..20: mol_type = other DNA
gtagtccccgcagccatgac

SEQ ID NO: 204097 - DNA, 20 bp, synthetic construct
  source 1..20: mol_type = other DNA
tgtagtccccgcagccatga

SEQ ID NO: 204098 - DNA, 20 bp, synthetic construct
  source 1..20: mol_type = other DNA
gtgtagtccccgcagccatg

SEQ ID NO: 204099 - DNA, 20 bp, synthetic construct
  source 1..20: mol_type = other DNA
cgtgtagtccccgcagccat

SEQ ID NO: 204100 - DNA, 20 bp, synthetic construct
  source 1..20: mol_type = other DNA
gcgtgtagtccccgcagcca

SEQ ID NO: 204101 - DNA, 20 bp, synthetic construct
  source 1..20: mol_type = other DNA
agcgtgtagtccccgcagcc

SEQ ID NO: 204102 - DNA, 20 bp, synthetic construct
  source 1..20: mol_type = other DNA
cagcgtgtagtccccgcagc

SEQ ID NO: 204103 - DNA, 20 bp, synthetic construct
  source 1..20: mol_type = other DNA
acagcgtgtagtccccgcag

SEQ ID NO: 204104 - DNA, 20 bp, synthetic construct
  source 1..20: mol_type = other DNA
gacagcgtgtagtccccgca

SEQ ID NO: 204105 - DNA, 20 bp, synthetic construct
  source 1..20: mol_type = other DNA
cgacagcgtgtagtccccgc

SEQ ID NO: 204106 - DNA, 20 bp, synthetic construct
  source 1..20: mol_type = other DNA
gcgacagcgtgtagtccccg

SEQ ID NO: 204107 - DNA, 20 bp, synthetic construct
  source 1..20: mol_type = other DNA
agcgacagcgtgtagtcccc

SEQ ID NO: 204108 - DNA, 20 bp, synthetic construct
  source 1..20: mol_type = other DNA
cagcgacagcgtgtagtccc

SEQ ID NO: 204109 - DNA, 20 bp, synthetic construct
  source 1..20: mol_type = other DNA
gcagcgacagcgtgtagtcc

SEQ ID NO: 204110 - DNA, 20 bp, synthetic construct
  source 1..20: mol_type = other DNA
agcagcgacagcgtgtagtc

SEQ ID NO: 204111 - DNA, 20 bp, synthetic construct
  source 1..20: mol_type = other DNA
cagcagcgacagcgtgtagt

SEQ ID NO: 204112 - DNA, 20 bp, synthetic construct
  source 1..20: mol_type = other DNA
gcagcagcgacagcgtgtag

SEQ ID NO: 204113 - DNA, 20 bp, synthetic construct
  source 1..20: mol_type = other DNA
tgcagcagcgacagcgtgta

SEQ ID NO: 204114 - DNA, 20 bp, synthetic construct
  source 1..20: mol_type = other DNA
ttgcagcagcgacagcgtgt

SEQ ID NO: 204115 - DNA, 20 bp, synthetic construct
  source 1..20: mol_type = other DNA
cttgcagcagcgacagcgtg

SEQ ID NO: 204116 - DNA, 20 bp, synthetic construct
  source 1..20: mol_type = other DNA
ccttgcagcagcgacagcgt

SEQ ID NO: 204117 - DNA, 20 bp, synthetic construct
  source 1..20: mol_type = other DNA
cccttgcagcagcgacagcg

SEQ ID NO: 204118 - DNA, 20 bp, synthetic construct
  source 1..20: mol_type = other DNA
gcccttgcagcagcgacagc

SEQ ID NO: 204119 - DNA, 20 bp, synthetic construct
  source 1..20: mol_type = other DNA
ggcccttgcagcagcgacag

SEQ ID NO: 204120 - DNA, 20 bp, synthetic construct
  source 1..20: mol_type = other DNA
cggcccttgcagcagcgaca

SEQ ID NO: 204121 - DNA, 20 bp, synthetic construct
  source 1..20: mol_type = other DNA
ccggcccttgcagcagcgac

SEQ ID NO: 204122 - DNA, 20 bp, synthetic construct
  source 1..20: mol_type = other DNA
gccggcccttgcagcagcga

SEQ ID NO: 204123 - DNA, 20 bp, synthetic construct
  source 1..20: mol_type = other DNA
ggccggcccttgcagcagcg

SEQ ID NO: 204124 - DNA, 20 bp, synthetic construct
  source 1..20: mol_type = other DNA
aggccggcccttgcagcagc

SEQ ID NO: 204125 - DNA, 20 bp, synthetic construct
  source 1..20: mol_type = other DNA
gaggccggcccttgcagcag

SEQ ID NO: 204126 - DNA, 20 bp, synthetic construct
  source 1..20: mol_type = other DNA
agaggccggcccttgcagca

SEQ ID NO: 204127 - DNA, 20 bp, synthetic construct
  source 1..20: mol_type = other DNA
cagaggccggcccttgcagc

SEQ ID NO: 204128 - DNA, 20 bp, synthetic construct
  source 1..20: mol_type = other DNA
acagaggccggcccttgcag

SEQ ID NO: 204129 - DNA, 20 bp, synthetic construct
  source 1..20: mol_type = other DNA
aacagaggccggcccttgca

SEQ ID NO: 204130 - DNA, 20 bp, synthetic construct
  source 1..20: mol_type = other DNA
aaacagaggccggcccttgc

SEQ ID NO: 204131 - DNA, 20 bp, synthetic construct
  source 1..20: mol_type = other DNA
gaaacagaggccggcccttg

SEQ ID NO: 204132 - DNA, 20 bp, synthetic construct
  source 1..20: mol_type = other DNA
ggaaacagaggccggccctt

SEQ ID NO: 204133 - DNA, 20 bp, synthetic construct
  source 1..20: mol_type = other DNA
cggaaacagaggccggccct

SEQ ID NO: 204134 - DNA, 20 bp, synthetic construct
  source 1..20: mol_type = other DNA
ccggaaacagaggccggccc

SEQ ID NO: 204135 - DNA, 20 bp, synthetic construct
  source 1..20: mol_type = other DNA
cccggaaacagaggccggcc

SEQ ID NO: 204136 - DNA, 20 bp, synthetic construct
  source 1..20: mol_type = other DNA
ccccggaaacagaggccggc

SEQ ID NO: 204137 - DNA, 20 bp, synthetic construct
  source 1..20: mol_type = other DNA
gccccggaaacagaggccgg

SEQ ID NO: 204138 - DNA, 20 bp, synthetic construct
  source 1..20: mol_type = other DNA
agccccggaaacagaggccg

SEQ ID NO: 204139 - DNA, 20 bp, synthetic construct
  source 1..20: mol_type = other DNA
cagccccggaaacagaggcc

SEQ ID NO: 204140 - DNA, 20 bp, synthetic construct
  source 1..20: mol_type = other DNA
tcagccccggaaacagaggc

SEQ ID NO: 204141 - DNA, 20 bp, synthetic construct
  source 1..20: mol_type = other DNA
ctcagccccggaaacagagg

SEQ ID NO: 204142 - DNA, 20 bp, synthetic construct
  source 1..20: mol_type = other DNA
actcagccccggaaacagag

SEQ ID NO: 204143 - DNA, 20 bp, synthetic construct
  source 1..20: mol_type = other DNA
cactcagccccggaaacaga

SEQ ID NO: 204144 - DNA, 20 bp, synthetic construct
  source 1..20: mol_type = other DNA
ccactcagccccggaaacag

SEQ ID NO: 204145 - DNA, 20 bp, synthetic construct
  source 1..20: mol_type = other DNA
cccactcagccccggaaaca

SEQ ID NO: 204146 - DNA, 20 bp, synthetic construct
  source 1..20: mol_type = other DNA
ccccactcagccccggaaac

SEQ ID NO: 204147 - DNA, 20 bp, synthetic construct
  source 1..20: mol_type = other DNA
cccccactcagccccggaaa

SEQ ID NO: 204148 - DNA, 20 bp, synthetic construct
  source 1..20: mol_type = other DNA
gcccccactcagccccggaa

SEQ ID NO: 204149 - DNA, 20 bp, synthetic construct
  source 1..20: mol_type = other DNA
ggcccccactcagccccgga

SEQ ID NO: 204150 - DNA, 20 bp, synthetic construct
  source 1..20: mol_type = other DNA
tggcccccactcagccccgg

SEQ ID NO: 204151 - DNA, 20 bp, synthetic construct
  source 1..20: mol_type = other DNA
ctggcccccactcagccccg

SEQ ID NO: 204152 - DNA, 20 bp, synthetic construct
  source 1..20: mol_type = other DNA
tctggcccccactcagcccc

SEQ ID NO: 204153 - DNA, 20 bp, synthetic construct
  source 1..20: mol_type = other DNA
gtctggcccccactcagccc

SEQ ID NO: 204154 - DNA, 20 bp, synthetic construct
  source 1..20: mol_type = other DNA
ggtctggcccccactcagcc

SEQ ID NO: 204155 - DNA, 20 bp, synthetic construct
  source 1..20: mol_type = other DNA
aggtctggcccccactcagc

SEQ ID NO: 204156 - DNA, 20 bp, synthetic construct
  source 1..20: mol_type = other DNA
caggtctggcccccactcag

SEQ ID NO: 204157 - DNA, 20 bp, synthetic construct
  source 1..20: mol_type = other DNA
gcaggtctggcccccactca

SEQ ID NO: 204158 - DNA, 20 bp, synthetic construct
  source 1..20: mol_type = other DNA
ggcaggtctggcccccactc

SEQ ID NO: 204159 - DNA, 20 bp, synthetic construct
  source 1..20: mol_type = other DNA
tggcaggtctggcccccact

SEQ ID NO: 204160 - DNA, 20 bp, synthetic construct
  source 1..20: mol_type = other DNA
ctggcaggtctggcccccac

SEQ ID NO: 204161 - DNA, 20 bp, synthetic construct
  source 1..20: mol_type = other DNA
cctggcaggtctggccccca

SEQ ID NO: 204162 - DNA, 20 bp, synthetic construct
  source 1..20: mol_type = other DNA
tcctggcaggtctggccccc

SEQ ID NO: 204163 - DNA, 20 bp, synthetic construct
  source 1..20: mol_type = other DNA
ctcctggcaggtctggcccc

SEQ ID NO: 204164 - DNA, 20 bp, synthetic construct
  source 1..20: mol_type = other DNA
gctcctggcaggtctggccc

SEQ ID NO: 204165 - DNA, 20 bp, synthetic construct
  source 1..20: mol_type = other DNA
tgctcctggcaggtctggcc

SEQ ID NO: 204166 - DNA, 20 bp, synthetic construct
  source 1..20: mol_type = other DNA
gtgctcctggcaggtctggc

SEQ ID NO: 204167 - DNA, 20 bp, synthetic construct
  source 1..20: mol_type = other DNA
ggtgctcctggcaggtctgg

SEQ ID NO: 204168 - DNA, 20 bp, synthetic construct
  source 1..20: mol_type = other DNA
tggtgctcctggcaggtctg

SEQ ID NO: 204169 - DNA, 20 bp, synthetic construct
  source 1..20: mol_type = other DNA
atggtgctcctggcaggtct

SEQ ID NO: 204170 - DNA, 20 bp, synthetic construct
  source 1..20: mol_type = other DNA
gatggtgctcctggcaggtc

SEQ ID NO: 204171 - DNA, 20 bp, synthetic construct
  source 1..20: mol_type = other DNA
agatggtgctcctggcaggt

SEQ ID NO: 204172 - DNA, 20 bp, synthetic construct
  source 1..20: mol_type = other DNA
aagatggtgctcctggcagg

SEQ ID NO: 204173 - DNA, 20 bp, synthetic construct
  source 1..20: mol_type = other DNA
gaagatggtgctcctggcag

SEQ ID NO: 204174 - DNA, 20 bp, synthetic construct
  source 1..20: mol_type = other DNA
agaagatggtgctcctggca

SEQ ID NO: 204175 - DNA, 20 bp, synthetic construct
  source 1..20: mol_type = other DNA
cagaagatggtgctcctggc

SEQ ID NO: 204176 - DNA, 20 bp, synthetic construct
  source 1..20: mol_type = other DNA
acagaagatggtgctcctgg

SEQ ID NO: 204177 - DNA, 20 bp, synthetic construct
  source 1..20: mol_type = other DNA
cacagaagatggtgctcctg

SEQ ID NO: 204178 - DNA, 20 bp, synthetic construct
  source 1..20: mol_type = other DNA
ccacagaagatggtgctcct

SEQ ID NO: 204179 - DNA, 20 bp, synthetic construct
  source 1..20: mol_type = other DNA
cccacagaagatggtgctcc

SEQ ID NO: 204180 - DNA, 20 bp, synthetic construct
  source 1..20: mol_type = other DNA
acccacagaagatggtgctc

SEQ ID NO: 204181 - DNA, 20 bp, synthetic construct
  source 1..20: mol_type = other DNA
gacccacagaagatggtgct

SEQ ID NO: 204182 - DNA, 20 bp, synthetic construct
  source 1..20: mol_type = other DNA
ggacccacagaagatggtgc

SEQ ID NO: 204183 - DNA, 20 bp, synthetic construct
  source 1..20: mol_type = other DNA
aggacccacagaagatggtg

SEQ ID NO: 204184 - DNA, 20 bp, synthetic construct
  source 1..20: mol_type = other DNA
caggacccacagaagatggt

SEQ ID NO: 204185 - DNA, 20 bp, synthetic construct
  source 1..20: mol_type = other DNA
gcaggacccacagaagatgg

SEQ ID NO: 204186 - DNA, 20 bp, synthetic construct
  source 1..20: mol_type = other DNA
ggcaggacccacagaagatg

SEQ ID NO: 204187 - DNA, 20 bp, synthetic construct
  source 1..20: mol_type = other DNA
aggcaggacccacagaagat

SEQ ID NO: 204188 - DNA, 20 bp, synthetic construct
  source 1..20: mol_type = other DNA
caggcaggacccacagaaga

SEQ ID NO: 204189 - DNA, 20 bp, synthetic construct
  source 1..20: mol_type = other DNA
ccaggcaggacccacagaag

SEQ ID NO: 204190 - DNA, 20 bp, synthetic construct
  source 1..20: mol_type = other DNA
tccaggcaggacccacagaa

SEQ ID NO: 204191 - DNA, 20 bp, synthetic construct
  source 1..20: mol_type = other DNA
atccaggcaggacccacaga

SEQ ID NO: 204192 - DNA, 20 bp, synthetic construct
  source 1..20: mol_type = other DNA
catccaggcaggacccacag

SEQ ID NO: 204193 - DNA, 20 bp, synthetic construct
  source 1..20: mol_type = other DNA
acatccaggcaggacccaca

SEQ ID NO: 204194 - DNA, 20 bp, synthetic construct
  source 1..20: mol_type = other DNA
gacatccaggcaggacccac

SEQ ID NO: 204195 - DNA, 20 bp, synthetic construct
  source 1..20: mol_type = other DNA
tgacatccaggcaggaccca

SEQ ID NO: 204196 - DNA, 20 bp, synthetic construct
  source 1..20: mol_type = other DNA
gtgacatccaggcaggaccc

SEQ ID NO: 204197 - DNA, 20 bp, synthetic construct
  source 1..20: mol_type = other DNA
tgtgacatccaggcaggacc

SEQ ID NO: 204198 - DNA, 20 bp, synthetic construct
  source 1..20: mol_type = other DNA
atgtgacatccaggcaggac

SEQ ID NO: 204199 - DNA, 20 bp, synthetic construct
  source 1..20: mol_type = other DNA
gatgtgacatccaggcagga

SEQ ID NO: 204200 - DNA, 20 bp, synthetic construct
  source 1..20: mol_type = other DNA
ggatgtgacatccaggcagg

SEQ ID NO: 204201 - DNA, 20 bp, synthetic construct
  source 1..20: mol_type = other DNA
gggatgtgacatccaggcag

SEQ ID NO: 204202 - DNA, 20 bp, synthetic construct
  source 1..20: mol_type = other DNA
cgggatgtgacatccaggca

SEQ ID NO: 204203 - DNA, 20 bp, synthetic construct
  source 1..20: mol_type = other DNA
ccgggatgtgacatccaggc

SEQ ID NO: 204204 - DNA, 20 bp, synthetic construct
  source 1..20: mol_type = other DNA
gccgggatgtgacatccagg

SEQ ID NO: 204205 - DNA, 20 bp, synthetic construct
  source 1..20: mol_type = other DNA
ggccgggatgtgacatccag

SEQ ID NO: 204206 - DNA, 20 bp, synthetic construct
  source 1..20: mol_type = other DNA
gggccgggatgtgacatcca

SEQ ID NO: 204207 - DNA, 20 bp, synthetic construct
  source 1..20: mol_type = other DNA
ggggccgggatgtgacatcc

SEQ ID NO: 204208 - DNA, 20 bp, synthetic construct
  source 1..20: mol_type = other DNA
tggggccgggatgtgacatc

SEQ ID NO: 204209 - DNA, 20 bp, synthetic construct
  source 1..20: mol_type = other DNA
ttggggccgggatgtgacat

SEQ ID NO: 204210 - DNA, 20 bp, synthetic construct
  source 1..20: mol_type = other DNA
cttggggccgggatgtgaca

SEQ ID NO: 204211 - DNA, 20 bp, synthetic construct
  source 1..20: mol_type = other DNA
tcttggggccgggatgtgac

SEQ ID NO: 204212 - DNA, 20 bp, synthetic construct
  source 1..20: mol_type = other DNA
ttcttggggccgggatgtga

SEQ ID NO: 204213 - DNA, 20 bp, synthetic construct
  source 1..20: mol_type = other DNA
cttcttggggccgggatgtg

SEQ ID NO: 204214 - DNA, 20 bp, synthetic construct
  source 1..20: mol_type = other DNA
acttcttggggccgggatgt

SEQ ID NO: 204215 - DNA, 20 bp, synthetic construct
  source 1..20: mol_type = other DNA
gacttcttggggccgggatg

SEQ ID NO: 204216 - DNA, 20 bp, synthetic construct
  source 1..20: mol_type = other DNA
tgacttcttggggccgggat

SEQ ID NO: 204217 - DNA, 20 bp, synthetic construct
  source 1..20: mol_type = other DNA
gtgacttcttggggccggga

SEQ ID NO: 204218 - DNA, 20 bp, synthetic construct
  source 1..20: mol_type = other DNA
agtgacttcttggggccggg

SEQ ID NO: 204219 - DNA, 20 bp, synthetic construct
  source 1..20: mol_type = other DNA
cagtgacttcttggggccgg

SEQ ID NO: 204220 - DNA, 20 bp, synthetic construct
  source 1..20: mol_type = other DNA
gcagtgacttcttggggccg

SEQ ID NO: 204221 - DNA, 20 bp, synthetic construct
  source 1..20: mol_type = other DNA
tgcagtgacttcttggggcc

SEQ ID NO: 204222 - DNA, 20 bp, synthetic construct
  source 1..20: mol_type = other DNA
ttgcagtgacttcttggggc

SEQ ID NO: 204223 - DNA, 20 bp, synthetic construct
  source 1..20: mol_type = other DNA
tttgcagtgacttcttgggg

SEQ ID NO: 204224 - DNA, 20 bp, synthetic construct
  source 1..20: mol_type = other DNA
gtttgcagtgacttcttggg

SEQ ID NO: 204225 - DNA, 20 bp, synthetic construct
  source 1..20: mol_type = other DNA
ggtttgcagtgacttcttgg

SEQ ID NO: 204226 - DNA, 20 bp, synthetic construct
  source 1..20: mol_type = other DNA
aggtttgcagtgacttcttg

SEQ ID NO: 204227 - DNA, 20 bp, synthetic construct
  source 1..20: mol_type = other DNA
aaggtttgcagtgacttctt

SEQ ID NO: 204228 - DNA, 20 bp, synthetic construct
  source 1..20: mol_type = other DNA
gaaggtttgcagtgacttct

SEQ ID NO: 204229 - DNA, 20 bp, synthetic construct
  source 1..20: mol_type = other DNA
cgaaggtttgcagtgacttc

SEQ ID NO: 204230 - DNA, 20 bp, synthetic construct
  source 1..20: mol_type = other DNA
acgaaggtttgcagtgactt

SEQ ID NO: 204231 - DNA, 20 bp, synthetic construct
  source 1..20: mol_type = other DNA
tacgaaggtttgcagtgact

SEQ ID NO: 204232 - DNA, 20 bp, synthetic construct
  source 1..20: mol_type = other DNA
atacgaaggtttgcagtgac

SEQ ID NO: 204233 - DNA, 20 bp, synthetic construct
  source 1..20: mol_type = other DNA
aatacgaaggtttgcagtga

SEQ ID NO: 204234 - DNA, 20 bp, synthetic construct
  source 1..20: mol_type = other DNA
taatacgaaggtttgcagtg

SEQ ID NO: 204235 - DNA, 20 bp, synthetic construct
  source 1..20: mol_type = other DNA
ataatacgaaggtttgcagt

SEQ ID NO: 204236 - DNA, 20 bp, synthetic construct
  source 1..20: mol_type = other DNA
aataatacgaaggtttgcag

SEQ ID NO: 204237 - DNA, 20 bp, synthetic construct
  source 1..20: mol_type = other DNA
caataatacgaaggtttgca

SEQ ID NO: 204238 - DNA, 20 bp, synthetic construct
  source 1..20: mol_type = other DNA
tcaataatacgaaggtttgc

SEQ ID NO: 204239 - DNA, 20 bp, synthetic construct
  source 1..20: mol_type = other DNA
ctcaataatacgaaggtttg

SEQ ID NO: 204240 - DNA, 20 bp, synthetic construct
  source 1..20: mol_type = other DNA
gctcaataatacgaaggttt

SEQ ID NO: 204241 - DNA, 20 bp, synthetic construct
  source 1..20: mol_type = other DNA
agctcaataatacgaaggtt

SEQ ID NO: 204242 - DNA, 20 bp, synthetic construct
  source 1..20: mol_type = other DNA
aagctcaataatacgaaggt

SEQ ID NO: 204243 - DNA, 20 bp, synthetic construct
  source 1..20: mol_type = other DNA
gaagctcaataatacgaagg

SEQ ID NO: 204244 - DNA, 20 bp, synthetic construct
  source 1..20: mol_type = other DNA
tgaagctcaataatacgaag

SEQ ID NO: 204245 - DNA, 20 bp, synthetic construct
  source 1..20: mol_type = other DNA
gtgaagctcaataatacgaa

SEQ ID NO: 204246 - DNA, 20 bp, synthetic construct
  source 1..20: mol_type = other DNA
tgtgaagctcaataatacga

SEQ ID NO: 204247 - DNA, 20 bp, synthetic construct
  source 1..20: mol_type = other DNA
atgtgaagctcaataatacg

SEQ ID NO: 204248 - DNA, 20 bp, synthetic construct
  source 1..20: mol_type = other DNA
gatgtgaagctcaataatac

SEQ ID NO: 204249 - DNA, 20 bp, synthetic construct
  source 1..20: mol_type = other DNA
ggatgtgaagctcaataata

SEQ ID NO: 204250 - DNA, 20 bp, synthetic construct
  source 1..20: mol_type = other DNA
aggatgtgaagctcaataat

SEQ ID NO: 204251 - DNA, 20 bp, synthetic construct
  source 1..20: mol_type = other DNA
taggatgtgaagctcaataa

SEQ ID NO: 204252 - DNA, 20 bp, synthetic construct
  source 1..20: mol_type = other DNA
ctaggatgtgaagctcaata

SEQ ID NO: 204253 - DNA, 20 bp, synthetic construct
  source 1..20: mol_type = other DNA
tctaggatgtgaagctcaat

SEQ ID NO: 204254 - DNA, 20 bp, synthetic construct
  source 1..20: mol_type = other DNA
ttctaggatgtgaagctcaa

SEQ ID NO: 204255 - DNA, 20 bp, synthetic construct
  source 1..20: mol_type = other DNA
attctaggatgtgaagctca

SEQ ID NO: 204256 - DNA, 20 bp, synthetic construct
  source 1..20: mol_type = other DNA
aattctaggatgtgaagctc

SEQ ID NO: 204257 - DNA, 20 bp, synthetic construct
  source 1..20: mol_type = other DNA
aaattctaggatgtgaagct

SEQ ID NO: 204258 - DNA, 20 bp, synthetic construct
  source 1..20: mol_type = other DNA
caaattctaggatgtgaagc

SEQ ID NO: 204259 - DNA, 20 bp, synthetic construct
  source 1..20: mol_type = other DNA
gcaaattctaggatgtgaag

SEQ ID NO: 204260 - DNA, 20 bp, synthetic construct
  source 1..20: mol_type = other DNA
agcaaattctaggatgtgaa

SEQ ID NO: 204261 - DNA, 20 bp, synthetic construct
  source 1..20: mol_type = other DNA
cagcaaattctaggatgtga

SEQ ID NO: 204262 - DNA, 20 bp, synthetic construct
  source 1..20: mol_type = other DNA
acagcaaattctaggatgtg

SEQ ID NO: 204263 - DNA, 20 bp, synthetic construct
  source 1..20: mol_type = other DNA
gacagcaaattctaggatgt

SEQ ID NO: 204264 - DNA, 20 bp, synthetic construct
  source 1..20: mol_type = other DNA
tgacagcaaattctaggatg

SEQ ID NO: 204265 - DNA, 20 bp, synthetic construct
  source 1..20: mol_type = other DNA
gtgacagcaaattctaggat

SEQ ID NO: 204266 - DNA, 20 bp, synthetic construct
  source 1..20: mol_type = other DNA
agtgacagcaaattctagga

SEQ ID NO: 204267 - DNA, 20 bp, synthetic construct
  source 1..20: mol_type = other DNA
cagtgacagcaaattctagg

SEQ ID NO: 204268 - DNA, 20 bp, synthetic construct
  source 1..20: mol_type = other DNA
acagtgacagcaaattctag

SEQ ID NO: 204269 - DNA, 20 bp, synthetic construct
  source 1..20: mol_type = other DNA
cacagtgacagcaaattcta

SEQ ID NO: 204270 - DNA, 20 bp, synthetic construct
  source 1..20: mol_type = other DNA
ccacagtgacagcaaattct

SEQ ID NO: 204271 - DNA, 20 bp, synthetic construct
  source 1..20: mol_type = other DNA
gccacagtgacagcaaattc

SEQ ID NO: 204272 - DNA, 20 bp, synthetic construct
  source 1..20: mol_type = other DNA
agccacagtgacagcaaatt

SEQ ID NO: 204273 - DNA, 20 bp, synthetic construct
  source 1..20: mol_type = other DNA
cagccacagtgacagcaaat

SEQ ID NO: 204274 - DNA, 20 bp, synthetic construct
  source 1..20: mol_type = other DNA
gcagccacagtgacagcaaa

SEQ ID NO: 204275 - DNA, 20 bp, synthetic construct
  source 1..20: mol_type = other DNA
agcagccacagtgacagcaa

SEQ ID NO: 204276 - DNA, 20 bp, synthetic construct
  source 1..20: mol_type = other DNA
cagcagccacagtgacagca

SEQ ID NO: 204277 - DNA, 20 bp, synthetic construct
  source 1..20: mol_type = other DNA
gcagcagccacagtgacagc

SEQ ID NO: 204278 - DNA, 20 bp, synthetic construct
  source 1..20: mol_type = other DNA
tgcagcagccacagtgacag

SEQ ID NO: 204279 - DNA, 20 bp, synthetic construct
  source 1..20: mol_type = other DNA
atgcagcagccacagtgaca

SEQ ID NO: 204280 - DNA, 20 bp, synthetic construct
  source 1..20: mol_type = other DNA
catgcagcagccacagtgac

SEQ ID NO: 204281 - DNA, 20 bp, synthetic construct
  source 1..20: mol_type = other DNA
tcatgcagcagccacagtga

SEQ ID NO: 204282 - DNA, 20 bp, synthetic construct
  source 1..20: mol_type = other DNA
ttcatgcagcagccacagtg

SEQ ID NO: 204283 - DNA, 20 bp, synthetic construct
  source 1..20: mol_type = other DNA
cttcatgcagcagccacagt

SEQ ID NO: 204284 - DNA, 20 bp, synthetic construct
  source 1..20: mol_type = other DNA
acttcatgcagcagccacag

SEQ ID NO: 204285 - DNA, 20 bp, synthetic construct
  source 1..20: mol_type = other DNA
aacttcatgcagcagccaca

SEQ ID NO: 204286 - DNA, 20 bp, synthetic construct
  source 1..20: mol_type = other DNA
caacttcatgcagcagccac

SEQ ID NO: 204287 - DNA, 20 bp, synthetic construct
  source 1..20: mol_type = other DNA
acaacttcatgcagcagcca

SEQ ID NO: 204288 - DNA, 20 bp, synthetic construct
  source 1..20: mol_type = other DNA
gacaacttcatgcagcagcc

SEQ ID NO: 204289 - DNA, 20 bp, synthetic construct
  source 1..20: mol_type = other DNA
ggacaacttcatgcagcagc

SEQ ID NO: 204290 - DNA, 20 bp, synthetic construct
  source 1..20: mol_type = other DNA
aggacaacttcatgcagcag

SEQ ID NO: 204291 - DNA, 20 bp, synthetic construct
  source 1..20: mol_type = other DNA
caggacaacttcatgcagca

SEQ ID NO: 204292 - DNA, 20 bp, synthetic construct
  source 1..20: mol_type = other DNA
tcaggacaacttcatgcagc

SEQ ID NO: 204293 - DNA, 20 bp, synthetic construct
  source 1..20: mol_type = other DNA
ctcaggacaacttcatgcag

SEQ ID NO: 204294 - DNA, 20 bp, synthetic construct
  source 1..20: mol_type = other DNA
tctcaggacaacttcatgca

SEQ ID NO: 204295 - DNA, 20 bp, synthetic construct
  source 1..20: mol_type = other DNA
ctctcaggacaacttcatgc

SEQ ID NO: 204296 - DNA, 20 bp, synthetic construct
  source 1..20: mol_type = other DNA
tctctcaggacaacttcatg

SEQ ID NO: 204297 - DNA, 20 bp, synthetic construct
  source 1..20: mol_type = other DNA
ttctctcaggacaacttcat

SEQ ID NO: 204298 - DNA, 20 bp, synthetic construct
  source 1..20: mol_type = other DNA
tttctctcaggacaacttca

SEQ ID NO: 204299 - DNA, 20 bp, synthetic construct
  source 1..20: mol_type = other DNA
gtttctctcaggacaacttc

SEQ ID NO: 204300 - DNA, 20 bp, synthetic construct
  source 1..20: mol_type = other DNA
cgtttctctcaggacaactt

SEQ ID NO: 204301 - DNA, 20 bp, synthetic construct
  source 1..20: mol_type = other DNA
ccgtttctctcaggacaact

SEQ ID NO: 204302 - DNA, 20 bp, synthetic construct
  source 1..20: mol_type = other DNA
cccgtttctctcaggacaac

SEQ ID NO: 204303 - DNA, 20 bp, synthetic construct
  source 1..20: mol_type = other DNA
gcccgtttctctcaggacaa

SEQ ID NO: 204304 - DNA, 20 bp, synthetic construct
  source 1..20: mol_type = other DNA
tgcccgtttctctcaggaca

SEQ ID NO: 204305 - DNA, 20 bp, synthetic construct
  source 1..20: mol_type = other DNA
atgcccgtttctctcaggac

SEQ ID NO: 204306 - DNA, 20 bp, synthetic construct
  source 1..20: mol_type = other DNA
aatgcccgtttctctcagga

SEQ ID NO: 204307 - DNA, 20 bp, synthetic construct
  source 1..20: mol_type = other DNA
caatgcccgtttctctcagg

SEQ ID NO: 204308 - DNA, 20 bp, synthetic construct
  source 1..20: mol_type = other DNA
acaatgcccgtttctctcag

SEQ ID NO: 204309 - DNA, 20 bp, synthetic construct
  source 1..20: mol_type = other DNA
gacaatgcccgtttctctca

SEQ ID NO: 204310 - DNA, 20 bp, synthetic construct
  source 1..20: mol_type = other DNA
tgacaatgcccgtttctctc

SEQ ID NO: 204311 - DNA, 20 bp, synthetic construct
  source 1..20: mol_type = other DNA
atgacaatgcccgtttctct

SEQ ID NO: 204312 - DNA, 20 bp, synthetic construct
  source 1..20: mol_type = other DNA
aatgacaatgcccgtttctc

SEQ ID NO: 204313 - DNA, 20 bp, synthetic construct
  source 1..20: mol_type = other DNA
taatgacaatgcccgtttct

SEQ ID NO: 204314 - DNA, 20 bp, synthetic construct
  source 1..20: mol_type = other DNA
ttaatgacaatgcccgtttc

SEQ ID NO: 204315 - DNA, 20 bp, synthetic construct
  source 1..20: mol_type = other DNA
gttaatgacaatgcccgttt

SEQ ID NO: 204316 - DNA, 20 bp, synthetic construct
  source 1..20: mol_type = other DNA
tgttaatgacaatgcccgtt

SEQ ID NO: 204317 - DNA, 20 bp, synthetic construct
  source 1..20: mol_type = other DNA
ctgttaatgacaatgcccgt

SEQ ID NO: 204318 - DNA, 20 bp, synthetic construct
  source 1..20: mol_type = other DNA
cctgttaatgacaatgcccg

SEQ ID NO: 204319 - DNA, 20 bp, synthetic construct
  source 1..20: mol_type = other DNA
ccctgttaatgacaatgccc

SEQ ID NO: 204320 - DNA, 20 bp, synthetic construct
  source 1..20: mol_type = other DNA
tccctgttaatgacaatgcc

SEQ ID NO: 204321 - DNA, 20 bp, synthetic construct
  source 1..20: mol_type = other DNA
ttccctgttaatgacaatgc

SEQ ID NO: 204322 - DNA, 20 bp, synthetic construct
  source 1..20: mol_type = other DNA
tttccctgttaatgacaatg

SEQ ID NO: 204323 - DNA, 20 bp, synthetic construct
  source 1..20: mol_type = other DNA
atttccctgttaatgacaat

SEQ ID NO: 204324 - DNA, 20 bp, synthetic construct
  source 1..20: mol_type = other DNA
aatttccctgttaatgacaa

SEQ ID NO: 204325 - DNA, 20 bp, synthetic construct
  source 1..20: mol_type = other DNA
caatttccctgttaatgaca

SEQ ID NO: 204326 - DNA, 20 bp, synthetic construct
  source 1..20: mol_type = other DNA
tcaatttccctgttaatgac

SEQ ID NO: 204327 - DNA, 20 bp, synthetic construct
  source 1..20: mol_type = other DNA
atcaatttccctgttaatga

SEQ ID NO: 204328 - DNA, 20 bp, synthetic construct
  source 1..20: mol_type = other DNA
catcaatttccctgttaatg

SEQ ID NO: 204329 - DNA, 20 bp, synthetic construct
  source 1..20: mol_type = other DNA
ccatcaatttccctgttaat

SEQ ID NO: 204330 - DNA, 20 bp, synthetic construct
  source 1..20: mol_type = other DNA
accatcaatttccctgttaa

SEQ ID NO: 204331 - DNA, 20 bp, synthetic construct
  source 1..20: mol_type = other DNA
gaccatcaatttccctgtta

SEQ ID NO: 204332 - DNA, 20 bp, synthetic construct
  source 1..20: mol_type = other DNA
agaccatcaatttccctgtt

SEQ ID NO: 204333 - DNA, 20 bp, synthetic construct
  source 1..20: mol_type = other DNA
cagaccatcaatttccctgt

SEQ ID NO: 204334 - DNA, 20 bp, synthetic construct
  source 1..20: mol_type = other DNA
ccagaccatcaatttccctg

SEQ ID NO: 204335 - DNA, 20 bp, synthetic construct
  source 1..20: mol_type = other DNA
cccagaccatcaatttccct

SEQ ID NO: 204336 - DNA, 20 bp, synthetic construct
  source 1..20: mol_type = other DNA
ccccagaccatcaatttccc

SEQ ID NO: 204337 - DNA, 20 bp, synthetic construct
  source 1..20: mol_type = other DNA
cccccagaccatcaatttcc

SEQ ID NO: 204338 - DNA, 20 bp, synthetic construct
  source 1..20: mol_type = other DNA
tcccccagaccatcaatttc

SEQ ID NO: 204339 - DNA, 20 bp, synthetic construct
  source 1..20: mol_type = other DNA
ttcccccagaccatcaattt

SEQ ID NO: 204340 - DNA, 20 bp, synthetic construct
  source 1..20: mol_type = other DNA
tttcccccagaccatcaatt

SEQ ID NO: 204341 - DNA, 20 bp, synthetic construct
  source 1..20: mol_type = other DNA
ttttcccccagaccatcaat

SEQ ID NO: 204342 - DNA, 20 bp, synthetic construct
  source 1..20: mol_type = other DNA
cttttcccccagaccatcaa

SEQ ID NO: 204343 - DNA, 20 bp, synthetic construct
  source 1..20: mol_type = other DNA
acttttcccccagaccatca

SEQ ID NO: 204344 - DNA, 20 bp, synthetic construct
  source 1..20: mol_type = other DNA
gacttttcccccagaccatc

SEQ ID NO: 204345 - DNA, 20 bp, synthetic construct
  source 1..20: mol_type = other DNA
tgacttttcccccagaccat

SEQ ID NO: 204346 - DNA, 20 bp, synthetic construct
  source 1..20: mol_type = other DNA
atgacttttcccccagacca

SEQ ID NO: 204347 - DNA, 20 bp, synthetic construct
  source 1..20: mol_type = other DNA
gatgacttttcccccagacc

SEQ ID NO: 204348 - DNA, 20 bp, synthetic construct
  source 1..20: mol_type = other DNA
ggatgacttttcccccagac

SEQ ID NO: 204349 - DNA, 20 bp, synthetic construct
  source 1..20: mol_type = other DNA
aggatgacttttcccccaga

SEQ ID NO: 204350 - DNA, 20 bp, synthetic construct
  source 1..20: mol_type = other DNA
gaggatgacttttcccccag

SEQ ID NO: 204351 - DNA, 20 bp, synthetic construct
  source 1..20: mol_type = other DNA
tgaggatgacttttccccca

SEQ ID NO: 204352 - DNA, 20 bp, synthetic construct
  source 1..20: mol_type = other DNA
atgaggatgacttttccccc

SEQ ID NO: 204353 - DNA, 20 bp, synthetic construct
  source 1..20: mol_type = other DNA
aatgaggatgacttttcccc

SEQ ID NO: 204354 - DNA, 20 bp, synthetic construct
  source 1..20: mol_type = other DNA
gaatgaggatgacttttccc

SEQ ID NO: 204355 - DNA, 20 bp, synthetic construct
  source 1..20: mol_type = other DNA
agaatgaggatgacttttcc

SEQ ID NO: 204356 - DNA, 20 bp, synthetic construct
  source 1..20: mol_type = other DNA
gagaatgaggatgacttttc

SEQ ID NO: 204357 - DNA, 20 bp, synthetic construct
  source 1..20: mol_type = other DNA
agagaatgaggatgactttt

SEQ ID NO: 204358 - DNA, 20 bp, synthetic construct
  source 1..20: mol_type = other DNA
aagagaatgaggatgacttt

SEQ ID NO: 204359 - DNA, 20 bp, synthetic construct
  source 1..20: mol_type = other DNA
caagagaatgaggatgactt

SEQ ID NO: 204360 - DNA, 20 bp, synthetic construct
  source 1..20: mol_type = other DNA
gcaagagaatgaggatgact

SEQ ID NO: 204361 - DNA, 20 bp, synthetic construct
  source 1..20: mol_type = other DNA
tgcaagagaatgaggatgac

SEQ ID NO: 204362 - DNA, 20 bp, synthetic construct
  source 1..20: mol_type = other DNA
ctgcaagagaatgaggatga

SEQ ID NO: 204363 - DNA, 20 bp, synthetic construct
  source 1..20: mol_type = other DNA
tctgcaagagaatgaggatg

SEQ ID NO: 204364 - DNA, 20 bp, synthetic construct
  source 1..20: mol_type = other DNA
atctgcaagagaatgaggat

SEQ ID NO: 204365 - DNA, 20 bp, synthetic construct
  source 1..20: mol_type = other DNA
gatctgcaagagaatgagga

SEQ ID NO: 204366 - DNA, 20 bp, synthetic construct
  source 1..20: mol_type = other DNA
agatctgcaagagaatgagg

SEQ ID NO: 204367 - DNA, 20 bp, synthetic construct
  source 1..20: mol_type = other DNA
tagatctgcaagagaatgag

SEQ ID NO: 204368 - DNA, 20 bp, synthetic construct
  source 1..20: mol_type = other DNA
atagatctgcaagagaatga

SEQ ID NO: 204369 - DNA, 20 bp, synthetic construct
  source 1..20: mol_type = other DNA
catagatctgcaagagaatg

SEQ ID NO: 204370 - DNA, 20 bp, synthetic construct
  source 1..20: mol_type = other DNA
ccatagatctgcaagagaat

SEQ ID NO: 204371 - DNA, 20 bp, synthetic construct
  source 1..20: mol_type = other DNA
cccatagatctgcaagagaa

SEQ ID NO: 204372 - DNA, 20 bp, synthetic construct
  source 1..20: mol_type = other DNA
acccatagatctgcaagaga

SEQ ID NO: 204373 - DNA, 20 bp, synthetic construct
  source 1..20: mol_type = other DNA
cacccatagatctgcaagag

SEQ ID NO: 204374 - DNA, 20 bp, synthetic construct
  source 1..20: mol_type = other DNA
tcacccatagatctgcaaga

SEQ ID NO: 204375 - DNA, 20 bp, synthetic construct
  source 1..20: mol_type = other DNA
atcacccatagatctgcaag

SEQ ID NO: 204376 - DNA, 20 bp, synthetic construct
  source 1..20: mol_type = other DNA
aatcacccatagatctgcaa

SEQ ID NO: 204377 - DNA, 20 bp, synthetic construct
  source 1..20: mol_type = other DNA
caatcacccatagatctgca

SEQ ID NO: 204378 - DNA, 20 bp, synthetic construct
  source 1..20: mol_type = other DNA
tcaatcacccatagatctgc

SEQ ID NO: 204379 - DNA, 20 bp, synthetic construct
  source 1..20: mol_type = other DNA
ctcaatcacccatagatctg

SEQ ID NO: 204380 - DNA, 20 bp, synthetic construct
  source 1..20: mol_type = other DNA
tctcaatcacccatagatct

SEQ ID NO: 204381 - DNA, 20 bp, synthetic construct
  source 1..20: mol_type = other DNA
gtctcaatcacccatagatc

SEQ ID NO: 204382 - DNA, 20 bp, synthetic construct
  source 1..20: mol_type = other DNA
agtctcaatcacccatagat

SEQ ID NO: 204383 - DNA, 20 bp, synthetic construct
  source 1..20: mol_type = other DNA
cagtctcaatcacccataga

SEQ ID NO: 204384 - DNA, 20 bp, synthetic construct
  source 1..20: mol_type = other DNA
ccagtctcaatcacccatag

SEQ ID NO: 204385 - DNA, 20 bp, synthetic construct
  source 1..20: mol_type = other DNA
gccagtctcaatcacccata

SEQ ID NO: 204386 - DNA, 20 bp, synthetic construct
  source 1..20: mol_type = other DNA
agccagtctcaatcacccat

SEQ ID NO: 204387 - DNA, 20 bp, synthetic construct
  source 1..20: mol_type = other DNA
cagccagtctcaatcaccca

SEQ ID NO: 204388 - DNA, 20 bp, synthetic construct
  source 1..20: mol_type = other DNA
tcagccagtctcaatcaccc

SEQ ID NO: 204389 - DNA, 20 bp, synthetic construct
  source 1..20: mol_type = other DNA
atcagccagtctcaatcacc

SEQ ID NO: 204390 - DNA, 20 bp, synthetic construct
  source 1..20: mol_type = other DNA
catcagccagtctcaatcac

SEQ ID NO: 204391 - DNA, 20 bp, synthetic construct
  source 1..20: mol_type = other DNA
acatcagccagtctcaatca

SEQ ID NO: 204392 - DNA, 20 bp, synthetic construct
  source 1..20: mol_type = other DNA
aacatcagccagtctcaatc

SEQ ID NO: 204393 - DNA, 20 bp, synthetic construct
  source 1..20: mol_type = other DNA
caacatcagccagtctcaat

SEQ ID NO: 204394 - DNA, 20 bp, synthetic construct
  source 1..20: mol_type = other DNA
tcaacatcagccagtctcaa

SEQ ID NO: 204395 - DNA, 20 bp, synthetic construct
  source 1..20: mol_type = other DNA
ttcaacatcagccagtctca

SEQ ID NO: 204396 - DNA, 20 bp, synthetic construct
  source 1..20: mol_type = other DNA
cttcaacatcagccagtctc

SEQ ID NO: 204397 - DNA, 20 bp, synthetic construct
  source 1..20: mol_type = other DNA
ccttcaacatcagccagtct

SEQ ID NO: 204398 - DNA, 20 bp, synthetic construct
  source 1..20: mol_type = other DNA
cccttcaacatcagccagtc

SEQ ID NO: 204399 - DNA, 20 bp, synthetic construct
  source 1..20: mol_type = other DNA
ccccttcaacatcagccagt

SEQ ID NO: 204400 - DNA, 20 bp, synthetic construct
  source 1..20: mol_type = other DNA
accccttcaacatcagccag

SEQ ID NO: 204401 - DNA, 20 bp, synthetic construct
  source 1..20: mol_type = other DNA
aaccccttcaacatcagcca

SEQ ID NO: 204402 - DNA, 20 bp, synthetic construct
  source 1..20: mol_type = other DNA
aaaccccttcaacatcagcc

SEQ ID NO: 204403 - DNA, 20 bp, synthetic construct
  source 1..20: mol_type = other DNA
gaaaccccttcaacatcagc

SEQ ID NO: 204404 - DNA, 20 bp, synthetic construct
  source 1..20: mol_type = other DNA
agaaaccccttcaacatcag

SEQ ID NO: 204405 - DNA, 20 bp, synthetic construct
  source 1..20: mol_type = other DNA
gagaaaccccttcaacatca

SEQ ID NO: 204406 - DNA, 20 bp, synthetic construct
  source 1..20: mol_type = other DNA
tgagaaaccccttcaacatc

SEQ ID NO: 204407 - DNA, 20 bp, synthetic construct
  source 1..20: mol_type = other DNA
ctgagaaaccccttcaacat

SEQ ID NO: 204408 - DNA, 20 bp, synthetic construct
  source 1..20: mol_type = other DNA
gctgagaaaccccttcaaca

SEQ ID NO: 204409 - DNA, 20 bp, synthetic construct
  source 1..20: mol_type = other DNA
ggctgagaaaccccttcaac

SEQ ID NO: 204410 - DNA, 20 bp, synthetic construct
  source 1..20: mol_type = other DNA
tggctgagaaaccccttcaa

SEQ ID NO: 204411 - DNA, 20 bp, synthetic construct
  source 1..20: mol_type = other DNA
atggctgagaaaccccttca

SEQ ID NO: 204412 - DNA, 20 bp, synthetic construct
  source 1..20: mol_type = other DNA
gatggctgagaaaccccttc

SEQ ID NO: 204413 - DNA, 20 bp, synthetic construct
  source 1..20: mol_type = other DNA
cgatggctgagaaacccctt

SEQ ID NO: 204414 - DNA, 20 bp, synthetic construct
  source 1..20: mol_type = other DNA
acgatggctgagaaacccct

SEQ ID NO: 204415 - DNA, 20 bp, synthetic construct
  source 1..20: mol_type = other DNA
cacgatggctgagaaacccc

SEQ ID NO: 204416 - DNA, 20 bp, synthetic construct
  source 1..20: mol_type = other DNA
acacgatggctgagaaaccc

SEQ ID NO: 204417 - DNA, 20 bp, synthetic construct
  source 1..20: mol_type = other DNA
cacacgatggctgagaaacc

SEQ ID NO: 204418 - DNA, 20 bp, synthetic construct
  source 1..20: mol_type = other DNA
gcacacgatggctgagaaac

SEQ ID NO: 204419 - DNA, 20 bp, synthetic construct
  source 1..20: mol_type = other DNA
ggcacacgatggctgagaaa

SEQ ID NO: 204420 - DNA, 20 bp, synthetic construct
  source 1..20: mol_type = other DNA
tggcacacgatggctgagaa

SEQ ID NO: 204421 - DNA, 20 bp, synthetic construct
  source 1..20: mol_type = other DNA
atggcacacgatggctgaga

SEQ ID NO: 204422 - DNA, 20 bp, synthetic construct
  source 1..20: mol_type = other DNA
catggcacacgatggctgag

SEQ ID NO: 204423 - DNA, 20 bp, synthetic construct
  source 1..20: mol_type = other DNA
acatggcacacgatggctga

SEQ ID NO: 204424 - DNA, 20 bp, synthetic construct
  source 1..20: mol_type = other DNA
aacatggcacacgatggctg

SEQ ID NO: 204425 - DNA, 20 bp, synthetic construct
  source 1..20: mol_type = other DNA
taacatggcacacgatggct

SEQ ID NO: 204426 - DNA, 20 bp, synthetic construct
  source 1..20: mol_type = other DNA
ataacatggcacacgatggc

SEQ ID NO: 204427 - DNA, 20 bp, synthetic construct
  source 1..20: mol_type = other DNA
cataacatggcacacgatgg

SEQ ID NO: 204428 - DNA, 20 bp, synthetic construct
  source 1..20: mol_type = other DNA
ccataacatggcacacgatg

SEQ ID NO: 204429 - DNA, 20 bp, synthetic construct
  source 1..20: mol_type = other DNA
tccataacatggcacacgat

SEQ ID NO: 204430 - DNA, 20 bp, synthetic construct
  source 1..20: mol_type = other DNA
ttccataacatggcacacga

SEQ ID NO: 204431 - DNA, 20 bp, synthetic construct
  source 1..20: mol_type = other DNA
gttccataacatggcacacg

SEQ ID NO: 204432 - DNA, 20 bp, synthetic construct
  source 1..20: mol_type = other DNA
tgttccataacatggcacac

SEQ ID NO: 204433 - DNA, 20 bp, synthetic construct
  source 1..20: mol_type = other DNA
ctgttccataacatggcaca

SEQ ID NO: 204434 - DNA, 20 bp, synthetic construct
  source 1..20: mol_type = other DNA
actgttccataacatggcac

SEQ ID NO: 204435 - DNA, 20 bp, synthetic construct
  source 1..20: mol_type = other DNA
cactgttccataacatggca

SEQ ID NO: 204436 - DNA, 20 bp, synthetic construct
  source 1..20: mol_type = other DNA
ccactgttccataacatggc

SEQ ID NO: 204437 - DNA, 20 bp, synthetic construct
  source 1..20: mol_type = other DNA
accactgttccataacatgg

SEQ ID NO: 204438 - DNA, 20 bp, synthetic construct
  source 1..20: mol_type = other DNA
caccactgttccataacatg

SEQ ID NO: 204439 - DNA, 20 bp, synthetic construct
  source 1..20: mol_type = other DNA
acaccactgttccataacat

SEQ ID NO: 204440 - DNA, 20 bp, synthetic construct
  source 1..20: mol_type = other DNA
tacaccactgttccataaca

SEQ ID NO: 204441 - DNA, 20 bp, synthetic construct
  source 1..20: mol_type = other DNA
ctacaccactgttccataac

SEQ ID NO: 204442 - DNA, 20 bp, synthetic construct
  source 1..20: mol_type = other DNA
gctacaccactgttccataa

SEQ ID NO: 204443 - DNA, 20 bp, synthetic construct
  source 1..20: mol_type = other DNA
ggctacaccactgttccata

SEQ ID NO: 204444 - DNA, 20 bp, synthetic construct
  source 1..20: mol_type = other DNA
tggctacaccactgttccat

SEQ ID NO: 204445 - DNA, 20 bp, synthetic construct
  source 1..20: mol_type = other DNA
ctggctacaccactgttcca

SEQ ID NO: 204446 - DNA, 20 bp, synthetic construct
  source 1..20: mol_type = other DNA
gctggctacaccactgttcc

SEQ ID NO: 204447 - DNA, 20 bp, synthetic construct
  source 1..20: mol_type = other DNA
ggctggctacaccactgttc

SEQ ID NO: 204448 - DNA, 20 bp, synthetic construct
  source 1..20: mol_type = other DNA
tggctggctacaccactgtt

SEQ ID NO: 204449 - DNA, 20 bp, synthetic construct
  source 1..20: mol_type = other DNA
atggctggctacaccactgt

SEQ ID NO: 204450 - DNA, 20 bp, synthetic construct
  source 1..20: mol_type = other DNA
aatggctggctacaccactg

SEQ ID NO: 204451 - DNA, 20 bp, synthetic construct
  source 1..20: mol_type = other DNA
aaatggctggctacaccact

SEQ ID NO: 204452 - DNA, 20 bp, synthetic construct
  source 1..20: mol_type = other DNA
caaatggctggctacaccac

SEQ ID NO: 204453 - DNA, 20 bp, synthetic construct
  source 1..20: mol_type = other DNA
tcaaatggctggctacacca

SEQ ID NO: 204454 - DNA, 20 bp, synthetic construct
  source 1..20: mol_type = other DNA
gtcaaatggctggctacacc

SEQ ID NO: 204455 - DNA, 20 bp, synthetic construct
  source 1..20: mol_type = other DNA
tgtcaaatggctggctacac

SEQ ID NO: 204456 - DNA, 20 bp, synthetic construct
  source 1..20: mol_type = other DNA
gtgtcaaatggctggctaca

SEQ ID NO: 204457 - DNA, 20 bp, synthetic construct
  source 1..20: mol_type = other DNA
ggtgtcaaatggctggctac

SEQ ID NO: 204458 - DNA, 20 bp, synthetic construct
  source 1..20: mol_type = other DNA
gggtgtcaaatggctggcta

SEQ ID NO: 204459 - DNA, 20 bp, synthetic construct
  source 1..20: mol_type = other DNA
tgggtgtcaaatggctggct

SEQ ID NO: 204460 - DNA, 20 bp, synthetic construct
  source 1..20: mol_type = other DNA
ctgggtgtcaaatggctggc

SEQ ID NO: 204461 - DNA, 20 bp, synthetic construct
  source 1..20: mol_type = other DNA
gctgggtgtcaaatggctgg

SEQ ID NO: 204462 - DNA, 20 bp, synthetic construct
  source 1..20: mol_type = other DNA
cgctgggtgtcaaatggctg

SEQ ID NO: 204463 - DNA, 20 bp, synthetic construct
  source 1..20: mol_type = other DNA
gcgctgggtgtcaaatggct

SEQ ID NO: 204464 - DNA, 20 bp, synthetic construct
  source 1..20: mol_type = other DNA
agcgctgggtgtcaaatggc

SEQ ID NO: 204465 - DNA, 20 bp, synthetic construct
  source 1..20: mol_type = other DNA
cagcgctgggtgtcaaatgg

SEQ ID NO: 204466 - DNA, 20 bp, synthetic construct
  source 1..20: mol_type = other DNA
tcagcgctgggtgtcaaatg

SEQ ID NO: 204467 - DNA, 20 bp, synthetic construct
  source 1..20: mol_type = other DNA
gtcagcgctgggtgtcaaat

SEQ ID NO: 204468 - DNA, 20 bp, synthetic construct
  source 1..20: mol_type = other DNA
ggtcagcgctgggtgtcaaa

SEQ ID NO: 204469 - DNA, 20 bp, synthetic construct
  source 1..20: mol_type = other DNA
aggtcagcgctgggtgtcaa

SEQ ID NO: 204470 - DNA, 20 bp, synthetic construct
  source 1..20: mol_type = other DNA
aaggtcagcgctgggtgtca

SEQ ID NO: 204471 - DNA, 20 bp, synthetic construct
  source 1..20: mol_type = other DNA
aaaggtcagcgctgggtgtc

SEQ ID NO: 204472 - DNA, 20 bp, synthetic construct
  source 1..20: mol_type = other DNA
caaaggtcagcgctgggtgt

SEQ ID NO: 204473 - DNA, 20 bp, synthetic construct
  source 1..20: mol_type = other DNA
acaaaggtcagcgctgggtg

SEQ ID NO: 204474 - DNA, 20 bp, synthetic construct
  source 1..20: mol_type = other DNA
aacaaaggtcagcgctgggt

SEQ ID NO: 204475 - DNA, 20 bp, synthetic construct
  source 1..20: mol_type = other DNA
aaacaaaggtcagcgctggg

SEQ ID NO: 204476 - DNA, 20 bp, synthetic construct
  source 1..20: mol_type = other DNA
taaacaaaggtcagcgctgg

SEQ ID NO: 204477 - DNA, 20 bp, synthetic construct
  source 1..20: mol_type = other DNA
ttaaacaaaggtcagcgctg

SEQ ID NO: 204478 - DNA, 20 bp, synthetic construct
  source 1..20: mol_type = other DNA
gttaaacaaaggtcagcgct

SEQ ID NO: 204479 - DNA, 20 bp, synthetic construct
  source 1..20: mol_type = other DNA
tgttaaacaaaggtcagcgc

SEQ ID NO: 204480 - DNA, 20 bp, synthetic construct
  source 1..20: mol_type = other DNA
ttgttaaacaaaggtcagcg

SEQ ID NO: 204481 - DNA, 20 bp, synthetic construct
  source 1..20: mol_type = other DNA
gttgttaaacaaaggtcagc

SEQ ID NO: 204482 - DNA, 20 bp, synthetic construct
  source 1..20: mol_type = other DNA
ggttgttaaacaaaggtcag

SEQ ID NO: 204483 - DNA, 20 bp, synthetic construct
  source 1..20: mol_type = other DNA
aggttgttaaacaaaggtca

SEQ ID NO: 204484 - DNA, 20 bp, synthetic construct
  source 1..20: mol_type = other DNA
gaggttgttaaacaaaggtc

SEQ ID NO: 204485 - DNA, 20 bp, synthetic construct
  source 1..20: mol_type = other DNA
tgaggttgttaaacaaaggt

SEQ ID NO: 204486 - DNA, 20 bp, synthetic construct
  source 1..20: mol_type = other DNA
gtgaggttgttaaacaaagg

SEQ ID NO: 204487 - DNA, 20 bp, synthetic construct
  source 1..20: mol_type = other DNA
ggtgaggttgttaaacaaag

SEQ ID NO: 204488 - DNA, 20 bp, synthetic construct
  source 1..20: mol_type = other DNA
aggtgaggttgttaaacaaa

SEQ ID NO: 204489 - DNA, 20 bp, synthetic construct
  source 1..20: mol_type = other DNA
taggtgaggttgttaaacaa

SEQ ID NO: 204490 - DNA, 20 bp, synthetic construct
  source 1..20: mol_type = other DNA
ataggtgaggttgttaaaca

SEQ ID NO: 204491 - DNA, 20 bp, synthetic construct
  source 1..20: mol_type = other DNA
tataggtgaggttgttaaac

SEQ ID NO: 204492 - DNA, 20 bp, synthetic construct
  source 1..20: mol_type = other DNA
atataggtgaggttgttaaa

SEQ ID NO: 204493 - DNA, 20 bp, synthetic construct
  source 1..20: mol_type = other DNA
tatataggtgaggttgttaa

SEQ ID NO: 204494 - DNA, 20 bp, synthetic construct
  source 1..20: mol_type = other DNA
atatataggtgaggttgtta

SEQ ID NO: 204495 - DNA, 20 bp, synthetic construct
  source 1..20: mol_type = other DNA
catatataggtgaggttgtt

SEQ ID NO: 204496 - DNA, 20 bp, synthetic construct
  source 1..20: mol_type = other DNA
tcatatataggtgaggttgt

SEQ ID NO: 204497 - DNA, 20 bp, synthetic construct
  source 1..20: mol_type = other DNA
gtcatatataggtgaggttg

SEQ ID NO: 204498 - DNA, 20 bp, synthetic construct
  source 1..20: mol_type = other DNA
tgtcatatataggtgaggtt

SEQ ID NO: 204499 - DNA, 20 bp, synthetic construct
  source 1..20: mol_type = other DNA
ttgtcatatataggtgaggt

SEQ ID NO: 204500 - DNA, 20 bp, synthetic construct
  source 1..20: mol_type = other DNA
tttgtcatatataggtgagg

SEQ ID NO: 204501 - DNA, 20 bp, synthetic construct
  source 1..20: mol_type = other DNA
ttttgtcatatataggtgag

SEQ ID NO: 204502 - DNA, 20 bp, synthetic construct
  source 1..20: mol_type = other DNA
attttgtcatatataggtga

SEQ ID NO: 204503 - DNA, 20 bp, synthetic construct
  source 1..20: mol_type = other DNA
cattttgtcatatataggtg

SEQ ID NO: 204504 - DNA, 20 bp, synthetic construct
  source 1..20: mol_type = other DNA
tcattttgtcatatataggt

SEQ ID NO: 204505 - DNA, 20 bp, synthetic construct
  source 1..20: mol_type = other DNA
atcattttgtcatatatagg

SEQ ID NO: 204506 - DNA, 20 bp, synthetic construct
  source 1..20: mol_type = other DNA
aatcattttgtcatatatag

SEQ ID NO: 204507 - DNA, 20 bp, synthetic construct
  source 1..20: mol_type = other DNA
caatcattttgtcatatata

SEQ ID NO: 204508 - DNA, 20 bp, synthetic construct
  source 1..20: mol_type = other DNA
acaatcattttgtcatatat

SEQ ID NO: 204509 - DNA, 20 bp, synthetic construct
  source 1..20: mol_type = other DNA
gacaatcattttgtcatata

SEQ ID NO: 204510 - DNA, 20 bp, synthetic construct
  source 1..20: mol_type = other DNA
tgacaatcattttgtcatat

SEQ ID NO: 204511 - DNA, 20 bp, synthetic construct
  source 1..20: mol_type = other DNA
ctgacaatcattttgtcata

SEQ ID NO: 204512 - DNA, 20 bp, synthetic construct
  source 1..20: mol_type = other DNA
tctgacaatcattttgtcat

SEQ ID NO: 204513 - DNA, 20 bp, synthetic construct
  source 1..20: mol_type = other DNA
ttctgacaatcattttgtca

SEQ ID NO: 204514 - DNA, 20 bp, synthetic construct
  source 1..20: mol_type = other DNA
tttctgacaatcattttgtc

SEQ ID NO: 204515 - DNA, 20 bp, synthetic construct
  source 1..20: mol_type = other DNA
atttctgacaatcattttgt

SEQ ID NO: 204516 - DNA, 20 bp, synthetic construct
  source 1..20: mol_type = other DNA
tatttctgacaatcattttg

SEQ ID NO: 204517 - DNA, 20 bp, synthetic construct
  source 1..20: mol_type = other DNA
ttatttctgacaatcatttt

SEQ ID NO: 204518 - DNA, 20 bp, synthetic construct
  source 1..20: mol_type = other DNA
attatttctgacaatcattt

SEQ ID NO: 204519 - DNA, 20 bp, synthetic construct
  source 1..20: mol_type = other DNA
gattatttctgacaatcatt

SEQ ID NO: 204520 - DNA, 20 bp, synthetic construct
  source 1..20: mol_type = other DNA
cgattatttctgacaatcat

SEQ ID NO: 204521 - DNA, 20 bp, synthetic construct
  source 1..20: mol_type = other DNA
acgattatttctgacaatca

SEQ ID NO: 204522 - DNA, 20 bp, synthetic construct
  source 1..20: mol_type = other DNA
cacgattatttctgacaatc

SEQ ID NO: 204523 - DNA, 20 bp, synthetic construct
  source 1..20: mol_type = other DNA
acacgattatttctgacaat

SEQ ID NO: 204524 - DNA, 20 bp, synthetic construct
  source 1..20: mol_type = other DNA
tacacgattatttctgacaa

SEQ ID NO: 204525 - DNA, 20 bp, synthetic construct
  source 1..20: mol_type = other DNA
ttacacgattatttctgaca

SEQ ID NO: 204526 - DNA, 20 bp, synthetic construct
  source 1..20: mol_type = other DNA
attacacgattatttctgac

SEQ ID NO: 204527 - DNA, 20 bp, synthetic construct
  source 1..20: mol_type = other DNA
cattacacgattatttctga

SEQ ID NO: 204528 - DNA, 20 bp, synthetic construct
  source 1..20: mol_type = other DNA
tcattacacgattatttctg

SEQ ID NO: 204529 - DNA, 20 bp, synthetic construct
  source 1..20: mol_type = other DNA
ttcattacacgattatttct

SEQ ID NO: 204530 - DNA, 20 bp, synthetic construct
  source 1..20: mol_type = other DNA
tttcattacacgattatttc

SEQ ID NO: 204531 - DNA, 20 bp, synthetic construct
  source 1..20: mol_type = other DNA
atttcattacacgattattt

SEQ ID NO: 204532 - DNA, 20 bp, synthetic construct
  source 1..20: mol_type = other DNA
catttcattacacgattatt

SEQ ID NO: 204533 - DNA, 20 bp, synthetic construct
  source 1..20: mol_type = other DNA
tcatttcattacacgattat

SEQ ID NO: 204534 - DNA, 20 bp, synthetic construct
  source 1..20: mol_type = other DNA
gtcatttcattacacgatta

SEQ ID NO: 204535 - DNA, 20 bp, synthetic construct
  source 1..20: mol_type = other DNA
agtcatttcattacacgatt

SEQ ID NO: 204536 - DNA, 20 bp, synthetic construct
  source 1..20: mol_type = other DNA
cagtcatttcattacacgat

SEQ ID NO: 204537 - DNA, 20 bp, synthetic construct
  source 1..20: mol_type = other DNA
acagtcatttcattacacga

SEQ ID NO: 204538 - DNA, 20 bp, synthetic construct
  source 1..20: mol_type = other DNA
tacagtcatttcattacacg

SEQ ID NO: 204539 - DNA, 20 bp, synthetic construct
  source 1..20: mol_type = other DNA
ttacagtcatttcattacac

SEQ ID NO: 204540 - DNA, 20 bp, synthetic construct
  source 1..20: mol_type = other DNA
attacagtcatttcattaca

SEQ ID NO: 204541 - DNA, 20 bp, synthetic construct
  source 1..20: mol_type = other DNA
tattacagtcatttcattac

SEQ ID NO: 204542 - DNA, 20 bp, synthetic construct
  source 1..20: mol_type = other DNA
ttattacagtcatttcatta

SEQ ID NO: 204543 - DNA, 20 bp, synthetic construct
  source 1..20: mol_type = other DNA
attattacagtcatttcatt

SEQ ID NO: 204544 - DNA, 20 bp, synthetic construct
  source 1..20: mol_type = other DNA
cattattacagtcatttcat

SEQ ID NO: 204545 - DNA, 20 bp, synthetic construct
  source 1..20: mol_type = other DNA
ccattattacagtcatttca

SEQ ID NO: 204546 - DNA, 20 bp, synthetic construct
  source 1..20: mol_type = other DNA
gccattattacagtcatttc

SEQ ID NO: 204547 - DNA, 20 bp, synthetic construct
  source 1..20: mol_type = other DNA
ggccattattacagtcattt

SEQ ID NO: 204548 - DNA, 20 bp, synthetic construct
  source 1..20: mol_type = other DNA
tggccattattacagtcatt

SEQ ID NO: 204549 - DNA, 20 bp, synthetic construct
  source 1..20: mol_type = other DNA
ctggccattattacagtcat

SEQ ID NO: 204550 - DNA, 20 bp, synthetic construct
  source 1..20: mol_type = other DNA
tctggccattattacagtca

SEQ ID NO: 204551 - DNA, 20 bp, synthetic construct
  source 1..20: mol_type = other DNA
ttctggccattattacagtc

SEQ ID NO: 204552 - DNA, 20 bp, synthetic construct
  source 1..20: mol_type = other DNA
tttctggccattattacagt

SEQ ID NO: 204553 - DNA, 20 bp, synthetic construct
  source 1..20: mol_type = other DNA
ttttctggccattattacag

SEQ ID NO: 204554 - DNA, 20 bp, synthetic construct
  source 1..20: mol_type = other DNA
cttttctggccattattaca

SEQ ID NO: 204555 - DNA, 20 bp, synthetic construct
  source 1..20: mol_type = other DNA
tcttttctggccattattac

SEQ ID NO: 204556 - DNA, 20 bp, synthetic construct
  source 1..20: mol_type = other DNA
ttcttttctggccattatta

SEQ ID NO: 204557 - DNA, 20 bp, synthetic construct
  source 1..20: mol_type = other DNA
tttcttttctggccattatt

SEQ ID NO: 204558 - DNA, 20 bp, synthetic construct
  source 1..20: mol_type = other DNA
gtttcttttctggccattat

SEQ ID NO: 204559 - DNA, 20 bp, synthetic construct
  source 1..20: mol_type = other DNA
cgtttcttttctggccatta

SEQ ID NO: 204560 - DNA, 20 bp, synthetic construct
  source 1..20: mol_type = other DNA
gcgtttcttttctggccatt

SEQ ID NO: 204561 - DNA, 20 bp, synthetic construct
  source 1..20: mol_type = other DNA
tgcgtttcttttctggccat

SEQ ID NO: 204562 - DNA, 20 bp, synthetic construct
  source 1..20: mol_type = other DNA
ctgcgtttcttttctggcca

SEQ ID NO: 204563 - DNA, 20 bp, synthetic construct
  source 1..20: mol_type = other DNA
tctgcgtttcttttctggcc

SEQ ID NO: 204564 - DNA, 20 bp, synthetic construct
  source 1..20: mol_type = other DNA
atctgcgtttcttttctggc

SEQ ID NO: 204565 - DNA, 20 bp, synthetic construct
  source 1..20: mol_type = other DNA
tatctgcgtttcttttctgg

SEQ ID NO: 204566 - DNA, 20 bp, synthetic construct
  source 1..20: mol_type = other DNA
ctatctgcgtttcttttctg

SEQ ID NO: 204567 - DNA, 20 bp, synthetic construct
  source 1..20: mol_type = other DNA
actatctgcgtttcttttct

SEQ ID NO: 204568 - DNA, 20 bp, synthetic construct
  source 1..20: mol_type = other DNA
tactatctgcgtttcttttc

SEQ ID NO: 204569 - DNA, 20 bp, synthetic construct
  source 1..20: mol_type = other DNA
ttactatctgcgtttctttt

SEQ ID NO: 204570 - DNA, 20 bp, synthetic construct
  source 1..20: mol_type = other DNA
tttactatctgcgtttcttt

SEQ ID NO: 204571 - DNA, 20 bp, synthetic construct
  source 1..20: mol_type = other DNA
ttttactatctgcgtttctt

SEQ ID NO: 204572 - DNA, 20 bp, synthetic construct
  source 1..20: mol_type = other DNA
attttactatctgcgtttct

SEQ ID NO: 204573 - DNA, 20 bp, synthetic construct
  source 1..20: mol_type = other DNA
cattttactatctgcgtttc

SEQ ID NO: 204574 - DNA, 20 bp, synthetic construct
  source 1..20: mol_type = other DNA
acattttactatctgcgttt

SEQ ID NO: 204575 - DNA, 20 bp, synthetic construct
  source 1..20: mol_type = other DNA
aacattttactatctgcgtt

SEQ ID NO: 204576 - DNA, 20 bp, synthetic construct
  source 1..20: mol_type = other DNA
aaacattttactatctgcgt

SEQ ID NO: 204577 - DNA, 20 bp, synthetic construct
  source 1..20: mol_type = other DNA
gaaacattttactatctgcg

SEQ ID NO: 204578 - DNA, 20 bp, synthetic construct
  source 1..20: mol_type = other DNA
agaaacattttactatctgc

SEQ ID NO: 204579 - DNA, 20 bp, synthetic construct
  source 1..20: mol_type = other DNA
gagaaacattttactatctg

SEQ ID NO: 204580 - DNA, 20 bp, synthetic construct
  source 1..20: mol_type = other DNA
agagaaacattttactatct

SEQ ID NO: 204581 - DNA, 20 bp, synthetic construct
  source 1..20: mol_type = other DNA
aagagaaacattttactatc

SEQ ID NO: 204582 - DNA, 20 bp, synthetic construct
  source 1..20: mol_type = other DNA
caagagaaacattttactat

SEQ ID NO: 204583 - DNA, 20 bp, synthetic construct
  source 1..20: mol_type = other DNA
acaagagaaacattttacta

SEQ ID NO: 204584 - DNA, 20 bp, synthetic construct
  source 1..20: mol_type = other DNA
aacaagagaaacattttact

SEQ ID NO: 204585 - DNA, 20 bp, synthetic construct
  source 1..20: mol_type = other DNA
caacaagagaaacattttac

SEQ ID NO: 204586 - DNA, 20 bp, synthetic construct
  source 1..20: mol_type = other DNA
tcaacaagagaaacatttta

SEQ ID NO: 204587 - DNA, 20 bp, synthetic construct
  source 1..20: mol_type = other DNA
ttcaacaagagaaacatttt

SEQ ID NO: 204588 - DNA, 20 bp, synthetic construct
  source 1..20: mol_type = other DNA
gttcaacaagagaaacattt

SEQ ID NO: 204589 - DNA, 20 bp, synthetic construct
  source 1..20: mol_type = other DNA
agttcaacaagagaaacatt

SEQ ID NO: 204590 - DNA, 20 bp, synthetic construct
  source 1..20: mol_type = other DNA
gagttcaacaagagaaacat

SEQ ID NO: 204591 - DNA, 20 bp, synthetic construct
  source 1..20: mol_type = other DNA
agagttcaacaagagaaaca

SEQ ID NO: 204592 - DNA, 20 bp, synthetic construct
  source 1..20: mol_type = other DNA
cagagttcaacaagagaaac

SEQ ID NO: 204593 - DNA, 20 bp, synthetic construct
  source 1..20: mol_type = other DNA
acagagttcaacaagagaaa

SEQ ID NO: 204594 - DNA, 20 bp, synthetic construct
  source 1..20: mol_type = other DNA
tacagagttcaacaagagaa

SEQ ID NO: 204595 - DNA, 20 bp, synthetic construct
  source 1..20: mol_type = other DNA
gtacagagttcaacaagaga

SEQ ID NO: 204596 - DNA, 20 bp, synthetic construct
  source 1..20: mol_type = other DNA
tgtacagagttcaacaagag

SEQ ID NO: 204597 - DNA, 20 bp, synthetic construct
  source 1..20: mol_type = other DNA
atgtacagagttcaacaaga

SEQ ID NO: 204598 - DNA, 20 bp, synthetic construct
  source 1..20: mol_type = other DNA
tatgtacagagttcaacaag

SEQ ID NO: 204599 - DNA, 20 bp, synthetic construct
  source 1..20: mol_type = other DNA
atatgtacagagttcaacaa

SEQ ID NO: 204600 - DNA, 20 bp, synthetic construct
  source 1..20: mol_type = other DNA
tatatgtacagagttcaaca

SEQ ID NO: 204601 - DNA, 20 bp, synthetic construct
  source 1..20: mol_type = other DNA
ttatatgtacagagttcaac

SEQ ID NO: 204602 - DNA, 20 bp, synthetic construct
  source 1..20: mol_type = other DNA
attatatgtacagagttcaa

SEQ ID NO: 204603 - DNA, 20 bp, synthetic construct
  source 1..20: mol_type = other DNA
aattatatgtacagagttca

SEQ ID NO: 204604 - DNA, 20 bp, synthetic construct
  source 1..20: mol_type = other DNA
caattatatgtacagagttc

SEQ ID NO: 204605 - DNA, 20 bp, synthetic construct
  source 1..20: mol_type = other DNA
gcaattatatgtacagagtt

SEQ ID NO: 204606 - DNA, 20 bp, synthetic construct
  source 1..20: mol_type = other DNA
tgcaattatatgtacagagt

SEQ ID NO: 204607 - DNA, 20 bp, synthetic construct
  source 1..20: mol_type = other DNA
gtgcaattatatgtacagag

SEQ ID NO: 204608 - DNA, 20 bp, synthetic construct
  source 1..20: mol_type = other DNA
ggtgcaattatatgtacaga

SEQ ID NO: 204609 - DNA, 20 bp, synthetic construct
  source 1..20: mol_type = other DNA
tggtgcaattatatgtacag

SEQ ID NO: 204610 - DNA, 20 bp, synthetic construct
  source 1..20: mol_type = other DNA
ctggtgcaattatatgtaca

SEQ ID NO: 204611 - DNA, 20 bp, synthetic construct
  source 1..20: mol_type = other DNA
cctggtgcaattatatgtac

SEQ ID NO: 204612 - DNA, 20 bp, synthetic construct
  source 1..20: mol_type = other DNA
tcctggtgcaattatatgta

SEQ ID NO: 204613 - DNA, 20 bp, synthetic construct
  source 1..20: mol_type = other DNA
atcctggtgcaattatatgt

SEQ ID NO: 204614 - DNA, 20 bp, synthetic construct
  source 1..20: mol_type = other DNA
aatcctggtgcaattatatg

SEQ ID NO: 204615 - DNA, 20 bp, synthetic construct
  source 1..20: mol_type = other DNA
aaatcctggtgcaattatat

SEQ ID NO: 204616 - DNA, 20 bp, synthetic construct
  source 1..20: mol_type = other DNA
aaaatcctggtgcaattata

SEQ ID NO: 204617 - DNA, 20 bp, synthetic construct
  source 1..20: mol_type = other DNA
aaaaatcctggtgcaattat

SEQ ID NO: 204618 - DNA, 20 bp, synthetic construct
  source 1..20: mol_type = other DNA
aaaaaatcctggtgcaatta

SEQ ID NO: 204619 - DNA, 20 bp, synthetic construct
  source 1..20: mol_type = other DNA
aaaaaaatcctggtgcaatt

SEQ ID NO: 204620 - DNA, 20 bp, synthetic construct
  source 1..20: mol_type = other DNA
gaaaaaaatcctggtgcaat

SEQ ID NO: 204621 - DNA, 20 bp, synthetic construct
  source 1..20: mol_type = other DNA
tgaaaaaaatcctggtgcaa

SEQ ID NO: 204622 - DNA, 20 bp, synthetic construct
  source 1..20: mol_type = other DNA
ttgaaaaaaatcctggtgca

SEQ ID NO: 204623 - DNA, 20 bp, synthetic construct
  source 1..20: mol_type = other DNA
tttgaaaaaaatcctggtgc

SEQ ID NO: 204624 - DNA, 20 bp, synthetic construct
  source 1..20: mol_type = other DNA
atttgaaaaaaatcctggtg

SEQ ID NO: 204625 - DNA, 20 bp, synthetic construct
  source 1..20: mol_type = other DNA
tatttgaaaaaaatcctggt

SEQ ID NO: 204626 - DNA, 20 bp, synthetic construct
  source 1..20: mol_type = other DNA
ttatttgaaaaaaatcctgg

SEQ ID NO: 204627 - DNA, 20 bp, synthetic construct
  source 1..20: mol_type = other DNA
tttatttgaaaaaaatcctg

SEQ ID NO: 204628 - DNA, 20 bp, synthetic construct
  source 1..20: mol_type = other DNA
ttttatttgaaaaaaatcct

SEQ ID NO: 204629 - DNA, 20 bp, synthetic construct
  source 1..20: mol_type = other DNA
tttttatttgaaaaaaatcc

SEQ ID NO: 204630 - DNA, 20 bp, synthetic construct
  source 1..20: mol_type = other DNA
ctttttatttgaaaaaaatc

SEQ ID NO: 204631 - DNA, 20 bp, synthetic construct
  source 1..20: mol_type = other DNA
actttttatttgaaaaaaat

SEQ ID NO: 204632 - DNA, 20 bp, synthetic construct
  source 1..20: mol_type = other DNA
tactttttatttgaaaaaaa

SEQ ID NO: 204633 - DNA, 20 bp, synthetic construct
  source 1..20: mol_type = other DNA
ttactttttatttgaaaaaa

SEQ ID NO: 204634 - DNA, 20 bp, synthetic construct
  source 1..20: mol_type = other DNA
tttactttttatttgaaaaa

SEQ ID NO: 204635 - DNA, 20 bp, synthetic construct
  source 1..20: mol_type = other DNA
atttactttttatttgaaaa

SEQ ID NO: 204636 - DNA, 20 bp, synthetic construct
  source 1..20: mol_type = other DNA
tatttactttttatttgaaa

SEQ ID NO: 204637 - DNA, 20 bp, synthetic construct
  source 1..20: mol_type = other DNA
atatttactttttatttgaa

SEQ ID NO: 204638 - DNA, 20 bp, synthetic construct
  source 1..20: mol_type = other DNA
aatatttactttttatttga

SEQ ID NO: 204639 - DNA, 20 bp, synthetic construct
  source 1..20: mol_type = other DNA
taatatttactttttatttg

SEQ ID NO: 204640 - DNA, 20 bp, synthetic construct
  source 1..20: mol_type = other DNA
ataatatttactttttattt

SEQ ID NO: 204641 - DNA, 20 bp, synthetic construct
  source 1..20: mol_type = other DNA
tataatatttactttttatt

SEQ ID NO: 204642 - DNA, 20 bp, synthetic construct
  source 1..20: mol_type = other DNA
gtataatatttactttttat

SEQ ID NO: 204643 - DNA, 20 bp, synthetic construct
  source 1..20: mol_type = other DNA
agtataatatttacttttta

SEQ ID NO: 204644 - DNA, 20 bp, synthetic construct
  source 1..20: mol_type = other DNA
tagtataatatttacttttt

SEQ ID NO: 204645 - DNA, 20 bp, synthetic construct
  source 1..20: mol_type = other DNA
gtagtataatatttactttt

SEQ ID NO: 204646 - DNA, 20 bp, synthetic construct
  source 1..20: mol_type = other DNA
tgtagtataatatttacttt

SEQ ID NO: 204647 - DNA, 20 bp, synthetic construct
  source 1..20: mol_type = other DNA
ttgtagtataatatttactt

SEQ ID NO: 204648 - DNA, 20 bp, synthetic construct
  source 1..20: mol_type = other DNA
tttgtagtataatatttact

SEQ ID NO: 204649 - DNA, 20 bp, synthetic construct
  source 1..20: mol_type = other DNA
ttttgtagtataatatttac

SEQ ID NO: 204650 - DNA, 20 bp, synthetic construct
  source 1..20: mol_type = other DNA
tttttgtagtataatattta

SEQ ID NO: 204651 - DNA, 20 bp, synthetic construct
  source 1..20: mol_type = other DNA
ttttttgtagtataatattt

SEQ ID NO: 204652 - DNA, 20 bp, synthetic construct
  source 1..20: mol_type = other DNA
cttttttgtagtataatatt

SEQ ID NO: 204653 - DNA, 20 bp, synthetic construct
  source 1..20: mol_type = other DNA
ccttttttgtagtataatat

SEQ ID NO: 204654 - DNA, 20 bp, synthetic construct
  source 1..20: mol_type = other DNA
cccttttttgtagtataata

SEQ ID NO: 204655 - DNA, 20 bp, synthetic construct
  source 1..20: mol_type = other DNA
tcccttttttgtagtataat

SEQ ID NO: 204656 - DNA, 20 bp, synthetic construct
  source 1..20: mol_type = other DNA
ttcccttttttgtagtataa

SEQ ID NO: 204657 - DNA, 20 bp, synthetic construct
  source 1..20: mol_type = other DNA
tttcccttttttgtagtata

SEQ ID NO: 204658 - DNA, 20 bp, synthetic construct
  source 1..20: mol_type = other DNA
ttttcccttttttgtagtat

SEQ ID NO: 204659 - DNA, 20 bp, synthetic construct
  source 1..20: mol_type = other DNA
tttttcccttttttgtagta

SEQ ID NO: 204660 - DNA, 20 bp, synthetic construct
  source 1..20: mol_type = other DNA
ctttttcccttttttgtagt

SEQ ID NO: 204661 - DNA, 20 bp, synthetic construct
  source 1..20: mol_type = other DNA
gctttttcccttttttgtag

SEQ ID NO: 204662 - DNA, 20 bp, synthetic construct
  source 1..20: mol_type = other DNA
tgctttttcccttttttgta

SEQ ID NO: 204663 - DNA, 20 bp, synthetic construct
  source 1..20: mol_type = other DNA
gtgctttttcccttttttgt

SEQ ID NO: 204664 - DNA, 20 bp, synthetic construct
  source 1..20: mol_type = other DNA
tgtgctttttcccttttttg

SEQ ID NO: 204665 - DNA, 20 bp, synthetic construct
  source 1..20: mol_type = other DNA
ttgtgctttttccctttttt

SEQ ID NO: 204666 - DNA, 20 bp, synthetic construct
  source 1..20: mol_type = other DNA
cttgtgctttttcccttttt

SEQ ID NO: 204667 - DNA, 20 bp, synthetic construct
  source 1..20: mol_type = other DNA
gcttgtgctttttccctttt

SEQ ID NO: 204668 - DNA, 20 bp, synthetic construct
  source 1..20: mol_type = other DNA
tgcttgtgctttttcccttt

SEQ ID NO: 204669 - DNA, 20 bp, synthetic construct
  source 1..20: mol_type = other DNA
atgcttgtgctttttccctt

SEQ ID NO: 204670 - DNA, 20 bp, synthetic construct
  source 1..20: mol_type = other DNA
aatgcttgtgctttttccct

SEQ ID NO: 204671 - DNA, 20 bp, synthetic construct
  source 1..20: mol_type = other DNA
aaatgcttgtgctttttccc

SEQ ID NO: 204672 - DNA, 20 bp, synthetic construct
  source 1..20: mol_type = other DNA
taaatgcttgtgctttttcc

SEQ ID NO: 204673 - DNA, 20 bp, synthetic construct
  source 1..20: mol_type = other DNA
ataaatgcttgtgctttttc

SEQ ID NO: 204674 - DNA, 20 bp, synthetic construct
  source 1..20: mol_type = other DNA
aataaatgcttgtgcttttt

SEQ ID NO: 204675 - DNA, 20 bp, synthetic construct
  source 1..20: mol_type = other DNA
taataaatgcttgtgctttt

SEQ ID NO: 204676 - DNA, 20 bp, synthetic construct
  source 1..20: mol_type = other DNA
ttaataaatgcttgtgcttt

SEQ ID NO: 204677 - DNA, 20 bp, synthetic construct
  source 1..20: mol_type = other DNA
tttaataaatgcttgtgctt

SEQ ID NO: 204678 - DNA, 20 bp, synthetic construct
  source 1..20: mol_type = other DNA
atttaataaatgcttgtgct

SEQ ID NO: 204679 - DNA, 20 bp, synthetic construct
  source 1..20: mol_type = other DNA
tatttaataaatgcttgtgc

SEQ ID NO: 204680 - DNA, 20 bp, synthetic construct
  source 1..20: mol_type = other DNA
ctatttaataaatgcttgtg

SEQ ID NO: 204681 - DNA, 20 bp, synthetic construct
  source 1..20: mol_type = other DNA
gctatttaataaatgcttgt

SEQ ID NO: 204682 - DNA, 20 bp, synthetic construct
  source 1..20: mol_type = other DNA
agctatttaataaatgcttg

SEQ ID NO: 204683 - DNA, 20 bp, synthetic construct
  source 1..20: mol_type = other DNA
aagctatttaataaatgctt

SEQ ID NO: 204684 - DNA, 20 bp, synthetic construct
  source 1..20: mol_type = other DNA
aaagctatttaataaatgct

SEQ ID NO: 204685 - DNA, 20 bp, synthetic construct
  source 1..20: mol_type = other DNA
gaaagctatttaataaatgc

SEQ ID NO: 204686 - DNA, 20 bp, synthetic construct
  source 1..20: mol_type = other DNA
agaaagctatttaataaatg

SEQ ID NO: 204687 - DNA, 20 bp, synthetic construct
  source 1..20: mol_type = other DNA
tagaaagctatttaataaat

SEQ ID NO: 204688 - DNA, 20 bp, synthetic construct
  source 1..20: mol_type = other DNA
atagaaagctatttaataaa

SEQ ID NO: 204689 - DNA, 20 bp, synthetic construct
  source 1..20: mol_type = other DNA
tatagaaagctatttaataa

SEQ ID NO: 204690 - DNA, 20 bp, synthetic construct
  source 1..20: mol_type = other DNA
atatagaaagctatttaata

SEQ ID NO: 204691 - DNA, 20 bp, synthetic construct
  source 1..20: mol_type = other DNA
gatatagaaagctatttaat

SEQ ID NO: 204692 - DNA, 20 bp, synthetic construct
  source 1..20: mol_type = other DNA
agatatagaaagctatttaa

SEQ ID NO: 204693 - DNA, 20 bp, synthetic construct
  source 1..20: mol_type = other DNA
aagatatagaaagctattta

SEQ ID NO: 204694 - DNA, 20 bp, synthetic construct
  source 1..20: mol_type = other DNA
aaagatatagaaagctattt

SEQ ID NO: 204695 - DNA, 20 bp, synthetic construct
  source 1..20: mol_type = other DNA
gaaagatatagaaagctatt

SEQ ID NO: 204696 - DNA, 20 bp, synthetic construct
  source 1..20: mol_type = other DNA
agaaagatatagaaagctat

SEQ ID NO: 204697 - DNA, 20 bp, synthetic construct
  source 1..20: mol_type = other DNA
cagaaagatatagaaagcta

SEQ ID NO: 204698 - DNA, 20 bp, synthetic construct
  source 1..20: mol_type = other DNA
tcagaaagatatagaaagct

SEQ ID NO: 204699 - DNA, 20 bp, synthetic construct
  source 1..20: mol_type = other DNA
ctcagaaagatatagaaagc

SEQ ID NO: 204700 - DNA, 20 bp, synthetic construct
  source 1..20: mol_type = other DNA
actcagaaagatatagaaag

SEQ ID NO: 204701 - DNA, 20 bp, synthetic construct
  source 1..20: mol_type = other DNA
aactcagaaagatatagaaa

SEQ ID NO: 204702 - DNA, 20 bp, synthetic construct
  source 1..20: mol_type = other DNA
aaactcagaaagatatagaa

SEQ ID NO: 204703 - DNA, 20 bp, synthetic construct
  source 1..20: mol_type = other DNA
aaaactcagaaagatataga

SEQ ID NO: 204704 - DNA, 20 bp, synthetic construct
  source 1..20: mol_type = other DNA
caaaactcagaaagatatag

SEQ ID NO: 204705 - DNA, 20 bp, synthetic construct
  source 1..20: mol_type = other DNA
tcaaaactcagaaagatata

SEQ ID NO: 204706 - DNA, 20 bp, synthetic construct
  source 1..20: mol_type = other DNA
atcaaaactcagaaagatat

SEQ ID NO: 204707 - DNA, 20 bp, synthetic construct
  source 1..20: mol_type = other DNA
gatcaaaactcagaaagata

SEQ ID NO: 204708 - DNA, 20 bp, synthetic construct
  source 1..20: mol_type = other DNA
ggatcaaaactcagaaagat

SEQ ID NO: 204709 - DNA, 20 bp, synthetic construct
  source 1..20: mol_type = other DNA
aggatcaaaactcagaaaga

SEQ ID NO: 204710 - DNA, 20 bp, synthetic construct
  source 1..20: mol_type = other DNA
aaggatcaaaactcagaaag

SEQ ID NO: 204711 - DNA, 20 bp, synthetic construct
  source 1..20: mol_type = other DNA
aaaggatcaaaactcagaaa

SEQ ID NO: 204712 - DNA, 20 bp, synthetic construct
  source 1..20: mol_type = other DNA
caaaggatcaaaactcagaa

SEQ ID NO: 204713 - DNA, 20 bp, synthetic construct
  source 1..20: mol_type = other DNA
tcaaaggatcaaaactcaga

SEQ ID NO: 204714 - DNA, 20 bp, synthetic construct
  source 1..20: mol_type = other DNA
atcaaaggatcaaaactcag

SEQ ID NO: 204715 - DNA, 20 bp, synthetic construct
  source 1..20: mol_type = other DNA
aatcaaaggatcaaaactca

SEQ ID NO: 204716 - DNA, 20 bp, synthetic construct
  source 1..20: mol_type = other DNA
caatcaaaggatcaaaactc

SEQ ID NO: 204717 - DNA, 20 bp, synthetic construct
  source 1..20: mol_type = other DNA
gcaatcaaaggatcaaaact

SEQ ID NO: 204718 - DNA, 20 bp, synthetic construct
  source 1..20: mol_type = other DNA
tgcaatcaaaggatcaaaac

SEQ ID NO: 204719 - DNA, 20 bp, synthetic construct
  source 1..20: mol_type = other DNA
ctgcaatcaaaggatcaaaa

SEQ ID NO: 204720 - DNA, 20 bp, synthetic construct
  source 1..20: mol_type = other DNA
tctgcaatcaaaggatcaaa

SEQ ID NO: 204721 - DNA, 20 bp, synthetic construct
  source 1..20: mol_type = other DNA
gtctgcaatcaaaggatcaa

SEQ ID NO: 204722 - DNA, 20 bp, synthetic construct
  source 1..20: mol_type = other DNA
agtctgcaatcaaaggatca

SEQ ID NO: 204723 - DNA, 20 bp, synthetic construct
  source 1..20: mol_type = other DNA
cagtctgcaatcaaaggatc

SEQ ID NO: 204724 - DNA, 20 bp, synthetic construct
  source 1..20: mol_type = other DNA
tcagtctgcaatcaaaggat

SEQ ID NO: 204725 - DNA, 20 bp, synthetic construct
  source 1..20: mol_type = other DNA
atcagtctgcaatcaaagga

SEQ ID NO: 204726 - DNA, 20 bp, synthetic construct
  source 1..20: mol_type = other DNA
catcagtctgcaatcaaagg

SEQ ID NO: 204727 - DNA, 20 bp, synthetic construct
  source 1..20: mol_type = other DNA
acatcagtctgcaatcaaag

SEQ ID NO: 204728 - DNA, 20 bp, synthetic construct
  source 1..20: mol_type = other DNA
tacatcagtctgcaatcaaa

SEQ ID NO: 204729 - DNA, 20 bp, synthetic construct
  source 1..20: mol_type = other DNA
ttacatcagtctgcaatcaa

SEQ ID NO: 204730 - DNA, 20 bp, synthetic construct
  source 1..20: mol_type = other DNA
attacatcagtctgcaatca

SEQ ID NO: 204731 - DNA, 20 bp, synthetic construct
  source 1..20: mol_type = other DNA
tattacatcagtctgcaatc

SEQ ID NO: 204732 - DNA, 20 bp, synthetic construct
  source 1..20: mol_type = other DNA
atattacatcagtctgcaat

SEQ ID NO: 204733 - DNA, 20 bp, synthetic construct
  source 1..20: mol_type = other DNA
aatattacatcagtctgcaa

SEQ ID NO: 204734 - DNA, 20 bp, synthetic construct
  source 1..20: mol_type = other DNA
aaatattacatcagtctgca

SEQ ID NO: 204735 - DNA, 20 bp, synthetic construct
  source 1..20: mol_type = other DNA
aaaatattacatcagtctgc

SEQ ID NO: 204736 - DNA, 20 bp, synthetic construct
  source 1..20: mol_type = other DNA
taaaatattacatcagtctg

SEQ ID NO: 204737 - DNA, 20 bp, synthetic construct
  source 1..20: mol_type = other DNA
ataaaatattacatcagtct

SEQ ID NO: 204738 - DNA, 20 bp, synthetic construct
  source 1..20: mol_type = other DNA
cataaaatattacatcagtc

SEQ ID NO: 204739 - DNA, 20 bp, synthetic construct
  source 1..20: mol_type = other DNA
acataaaatattacatcagt

SEQ ID NO: 204740 - DNA, 20 bp, synthetic construct
  source 1..20: mol_type = other DNA
tacataaaatattacatcag

SEQ ID NO: 204741 - DNA, 20 bp, synthetic construct
  source 1..20: mol_type = other DNA
ttacataaaatattacatca

SEQ ID NO: 204742 - DNA, 20 bp, synthetic construct
  source 1..20: mol_type = other DNA
tttacataaaatattacatc

SEQ ID NO: 204743 - DNA, 20 bp, synthetic construct
  source 1..20: mol_type = other DNA
atttacataaaatattacat

SEQ ID NO: 204744 - DNA, 20 bp, synthetic construct
  source 1..20: mol_type = other DNA
gatttacataaaatattaca

SEQ ID NO: 204745 - DNA, 20 bp, synthetic construct
  source 1..20: mol_type = other DNA
tgatttacataaaatattac

SEQ ID NO: 204746 - DNA, 20 bp, synthetic construct
  source 1..20: mol_type = other DNA
atgatttacataaaatatta

SEQ ID NO: 204747 - DNA, 20 bp, synthetic construct
  source 1..20: mol_type = other DNA
aatgatttacataaaatatt

SEQ ID NO: 204748 - DNA, 20 bp, synthetic construct
  source 1..20: mol_type = other DNA
caatgatttacataaaatat

SEQ ID NO: 204749 - DNA, 20 bp, synthetic construct
  source 1..20: mol_type = other DNA
gcaatgatttacataaaata

SEQ ID NO: 204750 - DNA, 20 bp, synthetic construct
  source 1..20: mol_type = other DNA
agcaatgatttacataaaat

SEQ ID NO: 204751 - DNA, 20 bp, synthetic construct
  source 1..20: mol_type = other DNA
aagcaatgatttacataaaa

SEQ ID NO: 204752 - DNA, 20 bp, synthetic construct
  source 1..20: mol_type = other DNA
caagcaatgatttacataaa

SEQ ID NO: 204753 - DNA, 20 bp, synthetic construct
  source 1..20: mol_type = other DNA
ccaagcaatgatttacataa

SEQ ID NO: 204754 - DNA, 20 bp, synthetic construct
  source 1..20: mol_type = other DNA
accaagcaatgatttacata

SEQ ID NO: 204755 - DNA, 20 bp, synthetic construct
  source 1..20: mol_type = other DNA
aaccaagcaatgatttacat

SEQ ID NO: 204756 - DNA, 20 bp, synthetic construct
  source 1..20: mol_type = other DNA
taaccaagcaatgatttaca

SEQ ID NO: 204757 - DNA, 20 bp, synthetic construct
  source 1..20: mol_type = other DNA
gtaaccaagcaatgatttac

SEQ ID NO: 204758 - DNA, 20 bp, synthetic construct
  source 1..20: mol_type = other DNA
agtaaccaagcaatgattta

SEQ ID NO: 204759 - DNA, 20 bp, synthetic construct
  source 1..20: mol_type = other DNA
tagtaaccaagcaatgattt

SEQ ID NO: 204760 - DNA, 20 bp, synthetic construct
  source 1..20: mol_type = other DNA
ttagtaaccaagcaatgatt

SEQ ID NO: 204761 - DNA, 20 bp, synthetic construct
  source 1..20: mol_type = other DNA
cttagtaaccaagcaatgat

SEQ ID NO: 204762 - DNA, 20 bp, synthetic construct
  source 1..20: mol_type = other DNA
acttagtaaccaagcaatga

SEQ ID NO: 204763 - DNA, 20 bp, synthetic construct
  source 1..20: mol_type = other DNA
cacttagtaaccaagcaatg

SEQ ID NO: 204764 - DNA, 20 bp, synthetic construct
  source 1..20: mol_type = other DNA
tcacttagtaaccaagcaat

SEQ ID NO: 204765 - DNA, 20 bp, synthetic construct
  source 1..20: mol_type = other DNA
ttcacttagtaaccaagcaa

SEQ ID NO: 204766 - DNA, 20 bp, synthetic construct
  source 1..20: mol_type = other DNA
gttcacttagtaaccaagca

SEQ ID NO: 204767 - DNA, 20 bp, synthetic construct
  source 1..20: mol_type = other DNA
agttcacttagtaaccaagc

SEQ ID NO: 204768 - DNA, 20 bp, synthetic construct
  source 1..20: mol_type = other DNA
aagttcacttagtaaccaag

SEQ ID NO: 204769 - DNA, 20 bp, synthetic construct
  source 1..20: mol_type = other DNA
aaagttcacttagtaaccaa

SEQ ID NO: 204770 - DNA, 20 bp, synthetic construct
  source 1..20: mol_type = other DNA
taaagttcacttagtaacca

SEQ ID NO: 204771 - DNA, 20 bp, synthetic construct
  source 1..20: mol_type = other DNA
ttaaagttcacttagtaacc

SEQ ID NO: 204772 - DNA, 20 bp, synthetic construct
  source 1..20: mol_type = other DNA
cttaaagttcacttagtaac

SEQ ID NO: 204773 - DNA, 20 bp, synthetic construct
  source 1..20: mol_type = other DNA
tcttaaagttcacttagtaa

SEQ ID NO: 204774 - DNA, 20 bp, synthetic construct
  source 1..20: mol_type = other DNA
ttcttaaagttcacttagta

SEQ ID NO: 204775 - DNA, 20 bp, synthetic construct
  source 1..20: mol_type = other DNA
tttcttaaagttcacttagt

SEQ ID NO: 204776 - DNA, 20 bp, synthetic construct
  source 1..20: mol_type = other DNA
ttttcttaaagttcacttag

SEQ ID NO: 204777 - DNA, 20 bp, synthetic construct
  source 1..20: mol_type = other DNA
cttttcttaaagttcactta

SEQ ID NO: 204778 - DNA, 20 bp, synthetic construct
  source 1..20: mol_type = other DNA
acttttcttaaagttcactt

SEQ ID NO: 204779 - DNA, 20 bp, synthetic construct
  source 1..20: mol_type = other DNA
cacttttcttaaagttcact

SEQ ID NO: 204780 - DNA, 20 bp, synthetic construct
  source 1..20: mol_type = other DNA
tcacttttcttaaagttcac

SEQ ID NO: 204781 - DNA, 20 bp, synthetic construct
  source 1..20: mol_type = other DNA
ctcacttttcttaaagttca

SEQ ID NO: 204782 - DNA, 20 bp, synthetic construct
  source 1..20: mol_type = other DNA
tctcacttttcttaaagttc

SEQ ID NO: 204783 - DNA, 20 bp, synthetic construct
  source 1..20: mol_type = other DNA
gtctcacttttcttaaagtt

SEQ ID NO: 204784 - DNA, 20 bp, synthetic construct
  source 1..20: mol_type = other DNA
cgtctcacttttcttaaagt

SEQ ID NO: 204785 - DNA, 20 bp, synthetic construct
  source 1..20: mol_type = other DNA
acgtctcacttttcttaaag

SEQ ID NO: 204786 - DNA, 20 bp, synthetic construct
  source 1..20: mol_type = other DNA
gacgtctcacttttcttaaa

SEQ ID NO: 204787 - DNA, 20 bp, synthetic construct
  source 1..20: mol_type = other DNA
agacgtctcacttttcttaa

SEQ ID NO: 204788 - DNA, 20 bp, synthetic construct
  source 1..20: mol_type = other DNA
cagacgtctcacttttctta

SEQ ID NO: 204789 - DNA, 20 bp, synthetic construct
  source 1..20: mol_type = other DNA
gcagacgtctcacttttctt

SEQ ID NO: 204790 - DNA, 20 bp, synthetic construct
  source 1..20: mol_type = other DNA
tgcagacgtctcacttttct

SEQ ID NO: 204791 - DNA, 20 bp, synthetic construct
  source 1..20: mol_type = other DNA
ctgcagacgtctcacttttc

SEQ ID NO: 204792 - DNA, 20 bp, synthetic construct
  source 1..20: mol_type = other DNA
tctgcagacgtctcactttt

SEQ ID NO: 204793 - DNA, 20 bp, synthetic construct
  source 1..20: mol_type = other DNA
ttctgcagacgtctcacttt

SEQ ID NO: 204794 - DNA, 20 bp, synthetic construct
  source 1..20: mol_type = other DNA
cttctgcagacgtctcactt

SEQ ID NO: 204795 - DNA, 20 bp, synthetic construct
  source 1..20: mol_type = other DNA
acttctgcagacgtctcact

SEQ ID NO: 204796 - DNA, 20 bp, synthetic construct
  source 1..20: mol_type = other DNA
aacttctgcagacgtctcac

SEQ ID NO: 204797 - DNA, 20 bp, synthetic construct
  source 1..20: mol_type = other DNA
caacttctgcagacgtctca

SEQ ID NO: 204798 - DNA, 20 bp, synthetic construct
  source 1..20: mol_type = other DNA
gcaacttctgcagacgtctc

SEQ ID NO: 204799 - DNA, 20 bp, synthetic construct
  source 1..20: mol_type = other DNA
ggcaacttctgcagacgtct

SEQ ID NO: 204800 - DNA, 20 bp, synthetic construct
  source 1..20: mol_type = other DNA
gggcaacttctgcagacgtc

SEQ ID NO: 204801 - DNA, 20 bp, synthetic construct
  source 1..20: mol_type = other DNA
tgggcaacttctgcagacgt

SEQ ID NO: 204802 - DNA, 20 bp, synthetic construct
  source 1..20: mol_type = other DNA
atgggcaacttctgcagacg

SEQ ID NO: 204803 - DNA, 20 bp, synthetic construct
  source 1..20: mol_type = other DNA
tatgggcaacttctgcagac

SEQ ID NO: 204804 - DNA, 20 bp, synthetic construct
  source 1..20: mol_type = other DNA
ttatgggcaacttctgcaga

SEQ ID NO: 204805 - DNA, 20 bp, synthetic construct
  source 1..20: mol_type = other DNA
attatgggcaacttctgcag

SEQ ID NO: 204806 - DNA, 20 bp, synthetic construct
  source 1..20: mol_type = other DNA
aattatgggcaacttctgca

SEQ ID NO: 204807 - DNA, 20 bp, synthetic construct
  source 1..20: mol_type = other DNA
aaattatgggcaacttctgc

SEQ ID NO: 204808 - DNA, 20 bp, synthetic construct
  source 1..20: mol_type = other DNA
taaattatgggcaacttctg

SEQ ID NO: 204809 - DNA, 20 bp, synthetic construct
  source 1..20: mol_type = other DNA
ctaaattatgggcaacttct

SEQ ID NO: 204810 - DNA, 20 bp, synthetic construct
  source 1..20: mol_type = other DNA
gctaaattatgggcaacttc

SEQ ID NO: 204811 - DNA, 20 bp, synthetic construct
  source 1..20: mol_type = other DNA
tgctaaattatgggcaactt

SEQ ID NO: 204812 - DNA, 20 bp, synthetic construct
  source 1..20: mol_type = other DNA
ctgctaaattatgggcaact

SEQ ID NO: 204813 - DNA, 20 bp, synthetic construct
  source 1..20: mol_type = other DNA
gctgctaaattatgggcaac

SEQ ID NO: 204814 - DNA, 20 bp, synthetic construct
  source 1..20: mol_type = other DNA
agctgctaaattatgggcaa

SEQ ID NO: 204815 - DNA, 20 bp, synthetic construct
  source 1..20: mol_type = other DNA
tagctgctaaattatgggca

SEQ ID NO: 204816 - DNA, 20 bp, synthetic construct
  source 1..20: mol_type = other DNA
gtagctgctaaattatgggc

SEQ ID NO: 204817 - DNA, 20 bp, synthetic construct
  source 1..20: mol_type = other DNA
agtagctgctaaattatggg

SEQ ID NO: 204818 - DNA, 20 bp, synthetic construct
  source 1..20: mol_type = other DNA
cagtagctgctaaattatgg

SEQ ID NO: 204819 - DNA, 20 bp, synthetic construct
  source 1..20: mol_type = other DNA
acagtagctgctaaattatg

SEQ ID NO: 204820 - DNA, 20 bp, synthetic construct
  source 1..20: mol_type = other DNA
tacagtagctgctaaattat

SEQ ID NO: 204821 - DNA, 20 bp, synthetic construct
  source 1..20: mol_type = other DNA
atacagtagctgctaaatta

SEQ ID NO: 204822 - DNA, 20 bp, synthetic construct
  source 1..20: mol_type = other DNA
aatacagtagctgctaaatt

SEQ ID NO: 204823 - DNA, 20 bp, synthetic construct
  source 1..20: mol_type = other DNA
caatacagtagctgctaaat

SEQ ID NO: 204824 - DNA, 20 bp, synthetic construct
  source 1..20: mol_type = other DNA
acaatacagtagctgctaaa

SEQ ID NO: 204825 - DNA, 20 bp, synthetic construct
  source 1..20: mol_type = other DNA
tacaatacagtagctgctaa

SEQ ID NO: 204826 - DNA, 20 bp, synthetic construct
  source 1..20: mol_type = other DNA
gtacaatacagtagctgcta

SEQ ID NO: 204827 - DNA, 20 bp, synthetic construct
  source 1..20: mol_type = other DNA
ggtacaatacagtagctgct

SEQ ID NO: 204828 - DNA, 20 bp, synthetic construct
  source 1..20: mol_type = other DNA
tggtacaatacagtagctgc

SEQ ID NO: 204829 - DNA, 20 bp, synthetic construct
  source 1..20: mol_type = other DNA
atggtacaatacagtagctg

SEQ ID NO: 204830 - DNA, 20 bp, synthetic construct
  source 1..20: mol_type = other DNA
aatggtacaatacagtagct

SEQ ID NO: 204831 - DNA, 20 bp, synthetic construct
  source 1..20: mol_type = other DNA
caatggtacaatacagtagc

SEQ ID NO: 204832 - DNA, 20 bp, synthetic construct
  source 1..20: mol_type = other DNA
tcaatggtacaatacagtag

SEQ ID NO: 204833 - DNA, 20 bp, synthetic construct
  source 1..20: mol_type = other DNA
atcaatggtacaatacagta

SEQ ID NO: 204834 - DNA, 20 bp, synthetic construct
  source 1..20: mol_type = other DNA
catcaatggtacaatacagt

SEQ ID NO: 204835 - DNA, 20 bp, synthetic construct
  source 1..20: mol_type = other DNA
acatcaatggtacaatacag

SEQ ID NO: 204836 - DNA, 20 bp, synthetic construct
  source 1..20: mol_type = other DNA
tacatcaatggtacaataca

SEQ ID NO: 204837 - DNA, 20 bp, synthetic construct
  source 1..20: mol_type = other DNA
gtacatcaatggtacaatac

SEQ ID NO: 204838 - DNA, 20 bp, synthetic construct
  source 1..20: mol_type = other DNA
cgtacatcaatggtacaata

SEQ ID NO: 204839 - DNA, 20 bp, synthetic construct
  source 1..20: mol_type = other DNA
ccgtacatcaatggtacaat

SEQ ID NO: 204840 - DNA, 20 bp, synthetic construct
  source 1..20: mol_type = other DNA
gccgtacatcaatggtacaa

SEQ ID NO: 204841 - DNA, 20 bp, synthetic construct
  source 1..20: mol_type = other DNA
agccgtacatcaatggtaca

SEQ ID NO: 204842 - DNA, 20 bp, synthetic construct
  source 1..20: mol_type = other DNA
aagccgtacatcaatggtac

SEQ ID NO: 204843 - DNA, 20 bp, synthetic construct
  source 1..20: mol_type = other DNA
aaagccgtacatcaatggta

SEQ ID NO: 204844 - DNA, 20 bp, synthetic construct
  source 1..20: mol_type = other DNA
taaagccgtacatcaatggt

SEQ ID NO: 204845 - DNA, 20 bp, synthetic construct
  source 1..20: mol_type = other DNA
ataaagccgtacatcaatgg

SEQ ID NO: 204846 - DNA, 20 bp, synthetic construct
  source 1..20: mol_type = other DNA
aataaagccgtacatcaatg

SEQ ID NO: 204847 - DNA, 20 bp, synthetic construct
  source 1..20: mol_type = other DNA
aaataaagccgtacatcaat

SEQ ID NO: 204848 - DNA, 20 bp, synthetic construct
  source 1..20: mol_type = other DNA
aaaataaagccgtacatcaa

SEQ ID NO: 204849 - DNA, 20 bp, synthetic construct
  source 1..20: mol_type = other DNA
gaaaataaagccgtacatca

SEQ ID NO: 204850 - DNA, 20 bp, synthetic construct
  source 1..20: mol_type = other DNA
agaaaataaagccgtacatc

SEQ ID NO: 204851 - DNA, 20 bp, synthetic construct
  source 1..20: mol_type = other DNA
aagaaaataaagccgtacat

SEQ ID NO: 204852 - DNA, 20 bp, synthetic construct
  source 1..20: mol_type = other DNA
caagaaaataaagccgtaca

SEQ ID NO: 204853 - DNA, 20 bp, synthetic construct
  source 1..20: mol_type = other DNA
tcaagaaaataaagccgtac

SEQ ID NO: 204854 - DNA, 20 bp, synthetic construct
  source 1..20: mol_type = other DNA
atcaagaaaataaagccgta

SEQ ID NO: 204855 - DNA, 20 bp, synthetic construct
  source 1..20: mol_type = other DNA
aatcaagaaaataaagccgt

SEQ ID NO: 204856 - DNA, 20 bp, synthetic construct
  source 1..20: mol_type = other DNA
taatcaagaaaataaagccg

SEQ ID NO: 204857 - DNA, 20 bp, synthetic construct
  source 1..20: mol_type = other DNA
ttaatcaagaaaataaagcc

SEQ ID NO: 204858 - DNA, 20 bp, synthetic construct
  source 1..20: mol_type = other DNA
attaatcaagaaaataaagc

SEQ ID NO: 204859 - DNA, 20 bp, synthetic construct
  source 1..20: mol_type = other DNA
aattaatcaagaaaataaag

SEQ ID NO: 204860 - DNA, 20 bp, synthetic construct
  source 1..20: mol_type = other DNA
taattaatcaagaaaataaa

SEQ ID NO: 204861 - DNA, 20 bp, synthetic construct
  source 1..20: mol_type = other DNA
ataattaatcaagaaaataa

SEQ ID NO: 204862 - DNA, 20 bp, synthetic construct
  source 1..20: mol_type = other DNA
aataattaatcaagaaaata

SEQ ID NO: 204863 - DNA, 20 bp, synthetic construct
  source 1..20: mol_type = other DNA
aaataattaatcaagaaaat

SEQ ID NO: 204864 - DNA, 20 bp, synthetic construct
  source 1..20: mol_type = other DNA
taaataattaatcaagaaaa

SEQ ID NO: 204865 - DNA, 20 bp, synthetic construct
  source 1..20: mol_type = other DNA
ttaaataattaatcaagaaa

SEQ ID NO: 204866 - DNA, 20 bp, synthetic construct
  source 1..20: mol_type = other DNA
tttaaataattaatcaagaa

SEQ ID NO: 204867 - DNA, 20 bp, synthetic construct
  source 1..20: mol_type = other DNA
gtttaaataattaatcaaga

SEQ ID NO: 204868 - DNA, 20 bp, synthetic construct
  source 1..20: mol_type = other DNA
tgtttaaataattaatcaag

SEQ ID NO: 204869 - DNA, 20 bp, synthetic construct
  source 1..20: mol_type = other DNA
ttgtttaaataattaatcaa

SEQ ID NO: 204870 - DNA, 20 bp, synthetic construct
  source 1..20: mol_type = other DNA
attgtttaaataattaatca

SEQ ID NO: 204871 - DNA, 20 bp, synthetic construct
  source 1..20: mol_type = other DNA
tattgtttaaataattaatc

SEQ ID NO: 204872 - DNA, 20 bp, synthetic construct
  source 1..20: mol_type = other DNA
atattgtttaaataattaat

SEQ ID NO: 204873 - DNA, 20 bp, synthetic construct
  source 1..20: mol_type = other DNA
tatattgtttaaataattaa

SEQ ID NO: 204874 - DNA, 20 bp, synthetic construct
  source 1..20: mol_type = other DNA
ttatattgtttaaataatta

SEQ ID NO: 204875 - DNA, 20 bp, synthetic construct
  source 1..20: mol_type = other DNA
attatattgtttaaataatt

SEQ ID NO: 204876 - DNA, 20 bp, synthetic construct
  source 1..20: mol_type = other DNA
aattatattgtttaaataat

SEQ ID NO: 204877 - DNA, 20 bp, synthetic construct
  source 1..20: mol_type = other DNA
gaattatattgtttaaataa

SEQ ID NO: 204878 - DNA, 20 bp, synthetic construct
  source 1..20: mol_type = other DNA
tgaattatattgtttaaata

SEQ ID NO: 204879 - DNA, 20 bp, synthetic construct
  source 1..20: mol_type = other DNA
gtgaattatattgtttaaat

SEQ ID NO: 204880 - DNA, 20 bp, synthetic construct
  source 1..20: mol_type = other DNA
tgtgaattatattgtttaaa

SEQ ID NO: 204881 - DNA, 20 bp, synthetic construct
  source 1..20: mol_type = other DNA
ttgtgaattatattgtttaa

SEQ ID NO: 204882 - DNA, 20 bp, synthetic construct
  source 1..20: mol_type = other DNA
attgtgaattatattgttta

SEQ ID NO: 204883 - DNA, 20 bp, synthetic construct
  source 1..20: mol_type = other DNA
aattgtgaattatattgttt

SEQ ID NO: 204884 - DNA, 20 bp, synthetic construct
  source 1..20: mol_type = other DNA
aaattgtgaattatattgtt

SEQ ID NO: 204885 - DNA, 20 bp, synthetic construct
  source 1..20: mol_type = other DNA
aaaattgtgaattatattgt

SEQ ID NO: 204886 - DNA, 20 bp, synthetic construct
  source 1..20: mol_type = other DNA
taaaattgtgaattatattg

SEQ ID NO: 204887 - DNA, 20 bp, synthetic construct
  source 1..20: mol_type = other DNA
ttaaaattgtgaattatatt

SEQ ID NO: 204888 - DNA, 20 bp, synthetic construct
  source 1..20: mol_type = other DNA
tttaaaattgtgaattatat

SEQ ID NO: 204889 - DNA, 20 bp, synthetic construct
  source 1..20: mol_type = other DNA
ttttaaaattgtgaattata

SEQ ID NO: 204890 - DNA, 20 bp, synthetic construct
  source 1..20: mol_type = other DNA
attttaaaattgtgaattat

SEQ ID NO: 204891 - DNA, 20 bp, synthetic construct
  source 1..20: mol_type = other DNA
tattttaaaattgtgaatta

SEQ ID NO: 204892 - DNA, 20 bp, synthetic construct
  source 1..20: mol_type = other DNA
ttattttaaaattgtgaatt

SEQ ID NO: 204893 - DNA, 20 bp, synthetic construct
  source 1..20: mol_type = other DNA
attattttaaaattgtgaat

SEQ ID NO: 204894 - DNA, 20 bp, synthetic construct
  source 1..20: mol_type = other DNA
tattattttaaaattgtgaa

SEQ ID NO: 204895 - DNA, 20 bp, synthetic construct
  source 1..20: mol_type = other DNA
ttattattttaaaattgtga

SEQ ID NO: 204896 - DNA, 20 bp, synthetic construct
  source 1..20: mol_type = other DNA
tttattattttaaaattgtg

SEQ ID NO: 204897 - DNA, 20 bp, synthetic construct
  source 1..20: mol_type = other DNA
atttattattttaaaattgt

SEQ ID NO: 204898 - DNA, 20 bp, synthetic construct
  source 1..20: mol_type = other DNA
aatttattattttaaaattg

SEQ ID NO: 204899 - DNA, 20 bp, synthetic construct
  source 1..20: mol_type = other DNA
aaatttattattttaaaatt

SEQ ID NO: 204900 - DNA, 20 bp, synthetic construct
  source 1..20: mol_type = other DNA
gaaatttattattttaaaat

SEQ ID NO: 204901 - DNA, 20 bp, synthetic construct
  source 1..20: mol_type = other DNA
ggaaatttattattttaaaa

SEQ ID NO: 204902 - DNA, 20 bp, synthetic construct
  source 1..20: mol_type = other DNA
tggaaatttattattttaaa

SEQ ID NO: 204903 - DNA, 20 bp, synthetic construct
  source 1..20: mol_type = other DNA
gtggaaatttattattttaa

SEQ ID NO: 204904 - DNA, 20 bp, synthetic construct
  source 1..20: mol_type = other DNA
agtggaaatttattatttta

SEQ ID NO: 204905 - DNA, 20 bp, synthetic construct
  source 1..20: mol_type = other DNA
aagtggaaatttattatttt

SEQ ID NO: 204906 - DNA, 20 bp, synthetic construct
  source 1..20: mol_type = other DNA
taagtggaaatttattattt

SEQ ID NO: 204907 - DNA, 20 bp, synthetic construct
  source 1..20: mol_type = other DNA
ttaagtggaaatttattatt

SEQ ID NO: 204908 - DNA, 20 bp, synthetic construct
  source 1..20: mol_type = other DNA
tttaagtggaaatttattat

SEQ ID NO: 204909 - DNA, 20 bp, synthetic construct
  source 1..20: mol_type = other DNA
ttttaagtggaaatttatta

SEQ ID NO: 204910 - DNA, 20 bp, synthetic construct
  source 1..20: mol_type = other DNA
attttaagtggaaatttatt

SEQ ID NO: 204911 - DNA, 20 bp, synthetic construct
  source 1..20: mol_type = other DNA
cattttaagtggaaatttat

SEQ ID NO: 204912 - DNA, 20 bp, synthetic construct
  source 1..20: mol_type = other DNA
ccattttaagtggaaattta

SEQ ID NO: 204913 - DNA, 20 bp, synthetic construct
  source 1..20: mol_type = other DNA
accattttaagtggaaattt

SEQ ID NO: 204914 - DNA, 20 bp, synthetic construct
  source 1..20: mol_type = other DNA
taccattttaagtggaaatt

SEQ ID NO: 204915 - DNA, 20 bp, synthetic construct
  source 1..20: mol_type = other DNA
ataccattttaagtggaaat

SEQ ID NO: 204916 - DNA, 20 bp, synthetic construct
  source 1..20: mol_type = other DNA
aataccattttaagtggaaa

SEQ ID NO: 204917 - DNA, 20 bp, synthetic construct
  source 1..20: mol_type = other DNA
aaataccattttaagtggaa

SEQ ID NO: 204918 - DNA, 20 bp, synthetic construct
  source 1..20: mol_type = other DNA
taaataccattttaagtgga

SEQ ID NO: 204919 - DNA, 20 bp, synthetic construct
  source 1..20: mol_type = other DNA
ttaaataccattttaagtgg

SEQ ID NO: 204920 - DNA, 20 bp, synthetic construct
  source 1..20: mol_type = other DNA
tttaaataccattttaagtg

SEQ ID NO: 204921 - DNA, 20 bp, synthetic construct
  source 1..20: mol_type = other DNA
gtttaaataccattttaagt

SEQ ID NO: 204922 - DNA, 20 bp, synthetic construct
  source 1..20: mol_type = other DNA
agtttaaataccattttaag

SEQ ID NO: 204923 - DNA, 20 bp, synthetic construct
  source 1..20: mol_type = other DNA
gagtttaaataccattttaa

SEQ ID NO: 204924 - DNA, 20 bp, synthetic construct
  source 1..20: mol_type = other DNA
tgagtttaaataccatttta

SEQ ID NO: 204925 - DNA, 20 bp, synthetic construct
  source 1..20: mol_type = other DNA
ctgagtttaaataccatttt

SEQ ID NO: 204926 - DNA, 20 bp, synthetic construct
  source 1..20: mol_type = other DNA
gctgagtttaaataccattt

SEQ ID NO: 204927 - DNA, 20 bp, synthetic construct
  source 1..20: mol_type = other DNA
tgctgagtttaaataccatt

SEQ ID NO: 204928 - DNA, 20 bp, synthetic construct
  source 1..20: mol_type = other DNA
ttgctgagtttaaataccat

SEQ ID NO: 204929 - DNA, 20 bp, synthetic construct
  source 1..20: mol_type = other DNA
tttgctgagtttaaatacca

SEQ ID NO: 204930 - DNA, 20 bp, synthetic construct
  source 1..20: mol_type = other DNA
ttttgctgagtttaaatacc

SEQ ID NO: 204931 - DNA, 20 bp, synthetic construct
  source 1..20: mol_type = other DNA
attttgctgagtttaaatac

SEQ ID NO: 204932 - DNA, 20 bp, synthetic construct
  source 1..20: mol_type = other DNA
tattttgctgagtttaaata

SEQ ID NO: 204933 - DNA, 20 bp, synthetic construct
  source 1..20: mol_type = other DNA
atattttgctgagtttaaat

SEQ ID NO: 204934 - DNA, 20 bp, synthetic construct
  source 1..20: mol_type = other DNA
tatattttgctgagtttaaa

SEQ ID NO: 204935 - DNA, 20 bp, synthetic construct
  source 1..20: mol_type = other DNA
atatattttgctgagtttaa

SEQ ID NO: 204936 - DNA, 20 bp, synthetic construct
  source 1..20: mol_type = other DNA
gatatattttgctgagttta

SEQ ID NO: 204937 - DNA, 20 bp, synthetic construct
  source 1..20: mol_type = other DNA
tgatatattttgctgagttt

SEQ ID NO: 204938 - DNA, 20 bp, synthetic construct
  source 1..20: mol_type = other DNA
atgatatattttgctgagtt

SEQ ID NO: 204939 - DNA, 20 bp, synthetic construct
  source 1..20: mol_type = other DNA
gatgatatattttgctgagt

SEQ ID NO: 204940 - DNA, 20 bp, synthetic construct
  source 1..20: mol_type = other DNA
agatgatatattttgctgag

SEQ ID NO: 204941 - DNA, 20 bp, synthetic construct
  source 1..20: mol_type = other DNA
tagatgatatattttgctga

SEQ ID NO: 204942 - DNA, 20 bp, synthetic construct
  source 1..20: mol_type = other DNA
atagatgatatattttgctg

SEQ ID NO: 204943 - DNA, 20 bp, synthetic construct
  source 1..20: mol_type = other DNA
catagatgatatattttgct

SEQ ID NO: 204944 - DNA, 20 bp, synthetic construct
  source 1..20: mol_type = other DNA
tcatagatgatatattttgc

SEQ ID NO: 204945 - DNA, 20 bp, synthetic construct
  source 1..20: mol_type = other DNA
ctcatagatgatatattttg

SEQ ID NO: 204946 - DNA, 20 bp, synthetic construct
  source 1..20: mol_type = other DNA
actcatagatgatatatttt

SEQ ID NO: 204947 - DNA, 20 bp, synthetic construct
  source 1..20: mol_type = other DNA
tactcatagatgatatattt

SEQ ID NO: 204948 - DNA, 20 bp, synthetic construct
  source 1..20: mol_type = other DNA
ttactcatagatgatatatt

SEQ ID NO: 204949 - DNA, 20 bp, synthetic construct
  source 1..20: mol_type = other DNA
tttactcatagatgatatat

SEQ ID NO: 204950 - DNA, 20 bp, synthetic construct
  source 1..20: mol_type = other DNA
ttttactcatagatgatata

SEQ ID NO: 204951 - DNA, 20 bp, synthetic construct
  source 1..20: mol_type = other DNA
attttactcatagatgatat

SEQ ID NO: 204952 - DNA, 20 bp, synthetic construct
  source 1..20: mol_type = other DNA
aattttactcatagatgata

SEQ ID NO: 204953 - DNA, 20 bp, synthetic construct
  source 1..20: mol_type = other DNA
aaattttactcatagatgat

SEQ ID NO: 204954 - DNA, 20 bp, synthetic construct
  source 1..20: mol_type = other DNA
caaattttactcatagatga

SEQ ID NO: 204955 - DNA, 20 bp, synthetic construct
  source 1..20: mol_type = other DNA
acaaattttactcatagatg

SEQ ID NO: 204956 - DNA, 20 bp, synthetic construct
  source 1..20: mol_type = other DNA
tacaaattttactcatagat

SEQ ID NO: 204957 - DNA, 20 bp, synthetic construct
  source 1..20: mol_type = other DNA
atacaaattttactcataga

SEQ ID NO: 204958 - DNA, 20 bp, synthetic construct
  source 1..20: mol_type = other DNA
aatacaaattttactcatag

SEQ ID NO: 204959 - DNA, 20 bp, synthetic construct
  source 1..20: mol_type = other DNA
aaatacaaattttactcata

SEQ ID NO: 204960 - DNA, 20 bp, synthetic construct
  source 1..20: mol_type = other DNA
taaatacaaattttactcat

SEQ ID NO: 204961 - DNA, 20 bp, synthetic construct
  source 1..20: mol_type = other DNA
gtaaatacaaattttactca

SEQ ID NO: 204962 - DNA, 20 bp, synthetic construct
  source 1..20: mol_type = other DNA
ggtaaatacaaattttactc

SEQ ID NO: 204963 - DNA, 20 bp, synthetic construct
  source 1..20: mol_type = other DNA
tggtaaatacaaattttact

SEQ ID NO: 204964 - DNA, 20 bp, synthetic construct
  source 1..20: mol_type = other DNA
ttggtaaatacaaattttac

SEQ ID NO: 204965 - DNA, 20 bp, synthetic construct
  source 1..20: mol_type = other DNA
cttggtaaatacaaatttta

SEQ ID NO: 204966 - DNA, 20 bp, synthetic construct
  source 1..20: mol_type = other DNA
gcttggtaaatacaaatttt

SEQ ID NO: 204967 - DNA, 20 bp, synthetic construct
  source 1..20: mol_type = other DNA
tgcttggtaaatacaaattt

SEQ ID NO: 204968 - DNA, 20 bp, synthetic construct
  source 1..20: mol_type = other DNA
ttgcttggtaaatacaaatt

SEQ ID NO: 204969 - DNA, 20 bp, synthetic construct
  source 1..20: mol_type = other DNA
tttgcttggtaaatacaaat

SEQ ID NO: 204970 - DNA, 20 bp, synthetic construct
  source 1..20: mol_type = other DNA
ttttgcttggtaaatacaaa

SEQ ID NO: 204971 - DNA, 20 bp, synthetic construct
  source 1..20: mol_type = other DNA
tttttgcttggtaaatacaa

SEQ ID NO: 204972 - DNA, 20 bp, synthetic construct
  source 1..20: mol_type = other DNA
atttttgcttggtaaataca

SEQ ID NO: 204973 - DNA, 20 bp, synthetic construct
  source 1..20: mol_type = other DNA
tatttttgcttggtaaatac

SEQ ID NO: 204974 - DNA, 20 bp, synthetic construct
  source 1..20: mol_type = other DNA
atatttttgcttggtaaata

SEQ ID NO: 204975 - DNA, 20 bp, synthetic construct
  source 1..20: mol_type = other DNA
aatatttttgcttggtaaat

SEQ ID NO: 204976 - DNA, 20 bp, synthetic construct
  source 1..20: mol_type = other DNA
taatatttttgcttggtaaa

SEQ ID NO: 204977 - DNA, 20 bp, synthetic construct
  source 1..20: mol_type = other DNA
gtaatatttttgcttggtaa

SEQ ID NO: 204978 - DNA, 20 bp, synthetic construct
  source 1..20: mol_type = other DNA
tgtaatatttttgcttggta

SEQ ID NO: 204979 - DNA, 20 bp, synthetic construct
  source 1..20: mol_type = other DNA
ctgtaatatttttgcttggt

SEQ ID NO: 204980 - DNA, 20 bp, synthetic construct
  source 1..20: mol_type = other DNA
actgtaatatttttgcttgg

SEQ ID NO: 204981 - DNA, 20 bp, synthetic construct
  source 1..20: mol_type = other DNA
aactgtaatatttttgcttg

SEQ ID NO: 204982 - DNA, 20 bp, synthetic construct
  source 1..20: mol_type = other DNA
aaactgtaatatttttgctt

SEQ ID NO: 204983 - DNA, 20 bp, synthetic construct
  source 1..20: mol_type = other DNA
caaactgtaatatttttgct

SEQ ID NO: 204984 - DNA, 20 bp, synthetic construct
  source 1..20: mol_type = other DNA
acaaactgtaatatttttgc

SEQ ID NO: 204985 - DNA, 20 bp, synthetic construct
  source 1..20: mol_type = other DNA
cacaaactgtaatatttttg

SEQ ID NO: 204986 - DNA, 20 bp, synthetic construct
  source 1..20: mol_type = other DNA
ccacaaactgtaatattttt

SEQ ID NO: 204987 - DNA, 20 bp, synthetic construct
  source 1..20: mol_type = other DNA
accacaaactgtaatatttt

SEQ ID NO: 204988 - DNA, 20 bp, synthetic construct
  source 1..20: mol_type = other DNA
aaccacaaactgtaatattt

SEQ ID NO: 204989 - DNA, 20 bp, synthetic construct
  source 1..20: mol_type = other DNA
gaaccacaaactgtaatatt

SEQ ID NO: 204990 - DNA, 20 bp, synthetic construct
  source 1..20: mol_type = other DNA
tgaaccacaaactgtaatat

SEQ ID NO: 204991 - DNA, 20 bp, synthetic construct
  source 1..20: mol_type = other DNA
gtgaaccacaaactgtaata

SEQ ID NO: 204992 - DNA, 20 bp, synthetic construct
  source 1..20: mol_type = other DNA
tgtgaaccacaaactgtaat

SEQ ID NO: 204993 - DNA, 20 bp, synthetic construct
  source 1..20: mol_type = other DNA
atgtgaaccacaaactgtaa

SEQ ID NO: 204994 - DNA, 20 bp, synthetic construct
  source 1..20: mol_type = other DNA
catgtgaaccacaaactgta

SEQ ID NO: 204995 - DNA, 20 bp, synthetic construct
  source 1..20: mol_type = other DNA
gcatgtgaaccacaaactgt

SEQ ID NO: 204996 - DNA, 20 bp, synthetic construct
  source 1..20: mol_type = other DNA
agcatgtgaaccacaaactg

SEQ ID NO: 204997 - DNA, 20 bp, synthetic construct
  source 1..20: mol_type = other DNA
cagcatgtgaaccacaaact

SEQ ID NO: 204998 - DNA, 20 bp, synthetic construct
  source 1..20: mol_type = other DNA
acagcatgtgaaccacaaac

SEQ ID NO: 204999 - DNA, 20 bp, synthetic construct
  source 1..20: mol_type = other DNA
gacagcatgtgaaccacaaa

SEQ ID NO: 205000 - DNA, 20 bp, synthetic construct
  source 1..20: mol_type = other DNA
agacagcatgtgaaccacaa

SEQ ID NO: 205001 - DNA, 20 bp, synthetic construct
  source 1..20: mol_type = other DNA
gagacagcatgtgaaccaca

SEQ ID NO: 205002 - DNA, 20 bp, synthetic construct
  source 1..20: mol_type = other DNA
tgagacagcatgtgaaccac

SEQ ID NO: 205003 - DNA, 20 bp, synthetic construct
  source 1..20: mol_type = other DNA
gtgagacagcatgtgaacca

SEQ ID NO: 205004 - DNA, 20 bp, synthetic construct
  source 1..20: mol_type = other DNA
agtgagacagcatgtgaacc

SEQ ID NO: 205005 - DNA, 20 bp, synthetic construct
  source 1..20: mol_type = other DNA
cagtgagacagcatgtgaac

SEQ ID NO: 205006 - DNA, 20 bp, synthetic construct
  source 1..20: mol_type = other DNA
acagtgagacagcatgtgaa

SEQ ID NO: 205007 - DNA, 20 bp, synthetic construct
  source 1..20: mol_type = other DNA
aacagtgagacagcatgtga

SEQ ID NO: 205008 - DNA, 20 bp, synthetic construct
  source 1..20: mol_type = other DNA
aaacagtgagacagcatgtg

SEQ ID NO: 205009 - DNA, 20 bp, synthetic construct
  source 1..20: mol_type = other DNA
aaaacagtgagacagcatgt

SEQ ID NO: 205010 - DNA, 20 bp, synthetic construct
  source 1..20: mol_type = other DNA
taaaacagtgagacagcatg

SEQ ID NO: 205011 - DNA, 20 bp, synthetic construct
  source 1..20: mol_type = other DNA
ttaaaacagtgagacagcat

SEQ ID NO: 205012 - DNA, 20 bp, synthetic construct
  source 1..20: mol_type = other DNA
tttaaaacagtgagacagca

SEQ ID NO: 205013 - DNA, 20 bp, synthetic construct
  source 1..20: mol_type = other DNA
atttaaaacagtgagacagc

SEQ ID NO: 205014 - DNA, 20 bp, synthetic construct
  source 1..20: mol_type = other DNA
aatttaaaacagtgagacag

SEQ ID NO: 205015 - DNA, 20 bp, synthetic construct
  source 1..20: mol_type = other DNA
aaatttaaaacagtgagaca

SEQ ID NO: 205016 - DNA, 20 bp, synthetic construct
  source 1..20: mol_type = other DNA
aaaatttaaaacagtgagac

SEQ ID NO: 205017 - DNA, 20 bp, synthetic construct
  source 1..20: mol_type = other DNA
taaaatttaaaacagtgaga

SEQ ID NO: 205018 - DNA, 20 bp, synthetic construct
  source 1..20: mol_type = other DNA
ttaaaatttaaaacagtgag

SEQ ID NO: 205019 - DNA, 20 bp, synthetic construct
  source 1..20: mol_type = other DNA
tttaaaatttaaaacagtga

SEQ ID NO: 205020 - DNA, 20 bp, synthetic construct
  source 1..20: mol_type = other DNA
atttaaaatttaaaacagtg

SEQ ID NO: 205021 - DNA, 20 bp, synthetic construct
  source 1..20: mol_type = other DNA
tatttaaaatttaaaacagt

SEQ ID NO: 205022 - DNA, 20 bp, synthetic construct
  source 1..20: mol_type = other DNA
gtatttaaaatttaaaacag

SEQ ID NO: 205023 - DNA, 20 bp, synthetic construct
  source 1..20: mol_type = other DNA
tgtatttaaaatttaaaaca

SEQ ID NO: 205024 - DNA, 20 bp, synthetic construct
  source 1..20: mol_type = other DNA
ttgtatttaaaatttaaaac

SEQ ID NO: 205025 - DNA, 20 bp, synthetic construct
  source 1..20: mol_type = other DNA
tttgtatttaaaatttaaaa

SEQ ID NO: 205026 - DNA, 20 bp, synthetic construct
  source 1..20: mol_type = other DNA
ttttgtatttaaaatttaaa

SEQ ID NO: 205027 - DNA, 20 bp, synthetic construct
  source 1..20: mol_type = other DNA
tttttgtatttaaaatttaa

SEQ ID NO: 205028 - DNA, 20 bp, synthetic construct
  source 1..20: mol_type = other DNA
gtttttgtatttaaaattta

SEQ ID NO: 205029 - DNA, 20 bp, synthetic construct
  source 1..20: mol_type = other DNA
agtttttgtatttaaaattt

SEQ ID NO: 205030 - DNA, 20 bp, synthetic construct
  source 1..20: mol_type = other DNA
gagtttttgtatttaaaatt

SEQ ID NO: 205031 - DNA, 20 bp, synthetic construct
  source 1..20: mol_type = other DNA
ggagtttttgtatttaaaat

SEQ ID NO: 205032 - DNA, 20 bp, synthetic construct
  source 1..20: mol_type = other DNA
tggagtttttgtatttaaaa

SEQ ID NO: 205033 - DNA, 20 bp, synthetic construct
  source 1..20: mol_type = other DNA
ttggagtttttgtatttaaa

SEQ ID NO: 205034 - DNA, 20 bp, synthetic construct
  source 1..20: mol_type = other DNA
cttggagtttttgtatttaa

SEQ ID NO: 205035 - DNA, 20 bp, synthetic construct
  source 1..20: mol_type = other DNA
acttggagtttttgtattta

SEQ ID NO: 205036 - DNA, 20 bp, synthetic construct
  source 1..20: mol_type = other DNA
tacttggagtttttgtattt

SEQ ID NO: 205037 - DNA, 20 bp, synthetic construct
  source 1..20: mol_type = other DNA
ctacttggagtttttgtatt

SEQ ID NO: 205038 - DNA, 20 bp, synthetic construct
  source 1..20: mol_type = other DNA
cctacttggagtttttgtat

SEQ ID NO: 205039 - DNA, 20 bp, synthetic construct
  source 1..20: mol_type = other DNA
gcctacttggagtttttgta

SEQ ID NO: 205040 - DNA, 20 bp, synthetic construct
  source 1..20: mol_type = other DNA
agcctacttggagtttttgt

SEQ ID NO: 205041 - DNA, 20 bp, synthetic construct
  source 1..20: mol_type = other DNA
cagcctacttggagtttttg

SEQ ID NO: 205042 - DNA, 20 bp, synthetic construct
  source 1..20: mol_type = other DNA
ccagcctacttggagttttt

SEQ ID NO: 205043 - DNA, 20 bp, synthetic construct
  source 1..20: mol_type = other DNA
cccagcctacttggagtttt

SEQ ID NO: 205044 - DNA, 20 bp, synthetic construct
  source 1..20: mol_type = other DNA
acccagcctacttggagttt

SEQ ID NO: 205045 - DNA, 20 bp, synthetic construct
  source 1..20: mol_type = other DNA
cacccagcctacttggagtt

SEQ ID NO: 205046 - DNA, 20 bp, synthetic construct
  source 1..20: mol_type = other DNA
acacccagcctacttggagt

SEQ ID NO: 205047 - DNA, 20 bp, synthetic construct
  source 1..20: mol_type = other DNA
cacacccagcctacttggag

SEQ ID NO: 205048 - DNA, 20 bp, synthetic construct
  source 1..20: mol_type = other DNA
ccacacccagcctacttgga

SEQ ID NO: 205049 - DNA, 20 bp, synthetic construct
  source 1..20: mol_type = other DNA
accacacccagcctacttgg

SEQ ID NO: 205050 - DNA, 20 bp, synthetic construct
  source 1..20: mol_type = other DNA
caccacacccagcctacttg

SEQ ID NO: 205051 - DNA, 20 bp, synthetic construct
  source 1..20: mol_type = other DNA
ccaccacacccagcctactt

SEQ ID NO: 205052 - DNA, 20 bp, synthetic construct
  source 1..20: mol_type = other DNA
gccaccacacccagcctact

SEQ ID NO: 205053 - DNA, 20 bp, synthetic construct
  source 1..20: mol_type = other DNA
agccaccacacccagcctac

SEQ ID NO: 205054 - DNA, 20 bp, synthetic construct
  source 1..20: mol_type = other DNA
gagccaccacacccagccta

SEQ ID NO: 205055 - DNA, 20 bp, synthetic construct
  source 1..20: mol_type = other DNA
tgagccaccacacccagcct

SEQ ID NO: 205056 - DNA, 20 bp, synthetic construct
  source 1..20: mol_type = other DNA
gtgagccaccacacccagcc

SEQ ID NO: 205057 - DNA, 20 bp, synthetic construct
  source 1..20: mol_type = other DNA
tgtgagccaccacacccagc

SEQ ID NO: 205058 - DNA, 20 bp, synthetic construct
  source 1..20: mol_type = other DNA
gtgtgagccaccacacccag

SEQ ID NO: 205059 - DNA, 20 bp, synthetic construct
  source 1..20: mol_type = other DNA
ggtgtgagccaccacaccca

SEQ ID NO: 205060 - DNA, 20 bp, synthetic construct
  source 1..20: mol_type = other DNA
aggtgtgagccaccacaccc

SEQ ID NO: 205061 - DNA, 20 bp, synthetic construct
  source 1..20: mol_type = other DNA
caggtgtgagccaccacacc

SEQ ID NO: 205062 - DNA, 20 bp, synthetic construct
  source 1..20: mol_type = other DNA
acaggtgtgagccaccacac

SEQ ID NO: 205063 - DNA, 20 bp, synthetic construct
  source 1..20: mol_type = other DNA
tacaggtgtgagccaccaca

SEQ ID NO: 205064 - DNA, 20 bp, synthetic construct
  source 1..20: mol_type = other DNA
ttacaggtgtgagccaccac

SEQ ID NO: 205065 - DNA, 20 bp, synthetic construct
  source 1..20: mol_type = other DNA
attacaggtgtgagccacca

SEQ ID NO: 205066 - DNA, 20 bp, synthetic construct
  source 1..20: mol_type = other DNA
gattacaggtgtgagccacc

SEQ ID NO: 205067 - DNA, 20 bp, synthetic construct
  source 1..20: mol_type = other DNA
ggattacaggtgtgagccac

SEQ ID NO: 205068 - DNA, 20 bp, synthetic construct
  source 1..20: mol_type = other DNA
gggattacaggtgtgagcca

SEQ ID NO: 205069 - DNA, 20 bp, synthetic construct
  source 1..20: mol_type = other DNA
tgggattacaggtgtgagcc

SEQ ID NO: 205070 - DNA, 20 bp, synthetic construct
  source 1..20: mol_type = other DNA
ctgggattacaggtgtgagc

SEQ ID NO: 205071 - DNA, 20 bp, synthetic construct
  source 1..20: mol_type = other DNA
actgggattacaggtgtgag

SEQ ID NO: 205072 - DNA, 20 bp, synthetic construct
  source 1..20: mol_type = other DNA
tactgggattacaggtgtga

SEQ ID NO: 205073 - DNA, 20 bp, synthetic construct
  source 1..20: mol_type = other DNA
gtactgggattacaggtgtg

SEQ ID NO: 205074 - DNA, 20 bp, synthetic construct
  source 1..20: mol_type = other DNA
agtactgggattacaggtgt

SEQ ID NO: 205075 - DNA, 20 bp, synthetic construct
  source 1..20: mol_type = other DNA
aagtactgggattacaggtg

SEQ ID NO: 205076 - DNA, 20 bp, synthetic construct
  source 1..20: mol_type = other DNA
aaagtactgggattacaggt

SEQ ID NO: 205077 - DNA, 20 bp, synthetic construct
  source 1..20: mol_type = other DNA
caaagtactgggattacagg

SEQ ID NO: 205078 - DNA, 20 bp, synthetic construct
  source 1..20: mol_type = other DNA
ccaaagtactgggattacag

SEQ ID NO: 205079 - DNA, 20 bp, synthetic construct
  source 1..20: mol_type = other DNA
cccaaagtactgggattaca

SEQ ID NO: 205080 - DNA, 20 bp, synthetic construct
  source 1..20: mol_type = other DNA
tcccaaagtactgggattac

SEQ ID NO: 205081 - DNA, 20 bp, synthetic construct
  source 1..20: mol_type = other DNA
ctcccaaagtactgggatta

SEQ ID NO: 205082 - DNA, 20 bp, synthetic construct
  source 1..20: mol_type = other DNA
cctcccaaagtactgggatt

SEQ ID NO: 205083 - DNA, 20 bp, synthetic construct
  source 1..20: mol_type = other DNA
gcctcccaaagtactgggat

SEQ ID NO: 205084 - DNA, 20 bp, synthetic construct
  source 1..20: mol_type = other DNA
agcctcccaaagtactggga

SEQ ID NO: 205085 - DNA, 20 bp, synthetic construct
  source 1..20: mol_type = other DNA
cagcctcccaaagtactggg

SEQ ID NO: 205086 - DNA, 20 bp, synthetic construct
  source 1..20: mol_type = other DNA
tcagcctcccaaagtactgg

SEQ ID NO: 205087 - DNA, 20 bp, synthetic construct
  source 1..20: mol_type = other DNA
ctcagcctcccaaagtactg

SEQ ID NO: 205088 - DNA, 20 bp, synthetic construct
  source 1..20: mol_type = other DNA
cctcagcctcccaaagtact

SEQ ID NO: 205089 - DNA, 20 bp, synthetic construct
  source 1..20: mol_type = other DNA
gcctcagcctcccaaagtac

SEQ ID NO: 205090 - DNA, 20 bp, synthetic construct
  source 1..20: mol_type = other DNA
tgcctcagcctcccaaagta

SEQ ID NO: 205091 - DNA, 20 bp, synthetic construct
  source 1..20: mol_type = other DNA
ctgcctcagcctcccaaagt

SEQ ID NO: 205092 - DNA, 20 bp, synthetic construct
  source 1..20: mol_type = other DNA
cctgcctcagcctcccaaag

SEQ ID NO: 205093 - DNA, 20 bp, synthetic construct
  source 1..20: mol_type = other DNA
gcctgcctcagcctcccaaa

SEQ ID NO: 205094 - DNA, 20 bp, synthetic construct
  source 1..20: mol_type = other DNA
tgcctgcctcagcctcccaa

SEQ ID NO: 205095 - DNA, 20 bp, synthetic construct
  source 1..20: mol_type = other DNA
atgcctgcctcagcctccca

SEQ ID NO: 205096 - DNA, 20 bp, synthetic construct
  source 1..20: mol_type = other DNA
tatgcctgcctcagcctccc

SEQ ID NO: 205097 - DNA, 20 bp, synthetic construct
  source 1..20: mol_type = other DNA
atatgcctgcctcagcctcc

SEQ ID NO: 205098 - DNA, 20 bp, synthetic construct
  source 1..20: mol_type = other DNA
gatatgcctgcctcagcctc

SEQ ID NO: 205099 - DNA, 20 bp, synthetic construct
  source 1..20: mol_type = other DNA
cgatatgcctgcctcagcct

SEQ ID NO: 205100 - DNA, 20 bp, synthetic construct
  source 1..20: mol_type = other DNA
gcgatatgcctgcctcagcc

SEQ ID NO: 205101 - DNA, 20 bp, synthetic construct
  source 1..20: mol_type = other DNA
agcgatatgcctgcctcagc

SEQ ID NO: 205102 - DNA, 20 bp, synthetic construct
  source 1..20: mol_type = other DNA
aagcgatatgcctgcctcag

SEQ ID NO: 205103 - DNA, 20 bp, synthetic construct
  source 1..20: mol_type = other DNA
caagcgatatgcctgcctca

SEQ ID NO: 205104 - DNA, 20 bp, synthetic construct
  source 1..20: mol_type = other DNA
tcaagcgatatgcctgcctc

SEQ ID NO: 205105 - DNA, 20 bp, synthetic construct
  source 1..20: mol_type = other DNA
ctcaagcgatatgcctgcct

SEQ ID NO: 205106 - DNA, 20 bp, synthetic construct
  source 1..20: mol_type = other DNA
actcaagcgatatgcctgcc

SEQ ID NO: 205107 - DNA, 20 bp, synthetic construct
  source 1..20: mol_type = other DNA
aactcaagcgatatgcctgc

SEQ ID NO: 205108 - DNA, 20 bp, synthetic construct
  source 1..20: mol_type = other DNA
gaactcaagcgatatgcctg

SEQ ID NO: 205109 - DNA, 20 bp, synthetic construct
  source 1..20: mol_type = other DNA
tgaactcaagcgatatgcct

SEQ ID NO: 205110 - DNA, 20 bp, synthetic construct
  source 1..20: mol_type = other DNA
ctgaactcaagcgatatgcc

SEQ ID NO: 205111 - DNA, 20 bp, synthetic construct
  source 1..20: mol_type = other DNA
cctgaactcaagcgatatgc

SEQ ID NO: 205112 - DNA, 20 bp, synthetic construct
  source 1..20: mol_type = other DNA
tcctgaactcaagcgatatg

SEQ ID NO: 205113 - DNA, 20 bp, synthetic construct
  source 1..20: mol_type = other DNA
ctcctgaactcaagcgatat

SEQ ID NO: 205114 - DNA, 20 bp, synthetic construct
  source 1..20: mol_type = other DNA
actcctgaactcaagcgata

SEQ ID NO: 205115 - DNA, 20 bp, synthetic construct
  source 1..20: mol_type = other DNA
aactcctgaactcaagcgat

SEQ ID NO: 205116 - DNA, 20 bp, synthetic construct
  source 1..20: mol_type = other DNA
gaactcctgaactcaagcga

SEQ ID NO: 205117 - DNA, 20 bp, synthetic construct
  source 1..20: mol_type = other DNA
tgaactcctgaactcaagcg

SEQ ID NO: 205118 - DNA, 20 bp, synthetic construct
  source 1..20: mol_type = other DNA
ttgaactcctgaactcaagc

SEQ ID NO: 205119 - DNA, 20 bp, synthetic construct
  source 1..20: mol_type = other DNA
cttgaactcctgaactcaag

SEQ ID NO: 205120 - DNA, 20 bp, synthetic construct
  source 1..20: mol_type = other DNA
tcttgaactcctgaactcaa

SEQ ID NO: 205121 - DNA, 20 bp, synthetic construct
  source 1..20: mol_type = other DNA
atcttgaactcctgaactca

SEQ ID NO: 205122 - DNA, 20 bp, synthetic construct
  source 1..20: mol_type = other DNA
aatcttgaactcctgaactc

SEQ ID NO: 205123 - DNA, 20 bp, synthetic construct
  source 1..20: mol_type = other DNA
aaatcttgaactcctgaact

SEQ ID NO: 205124 - DNA, 20 bp, synthetic construct
  source 1..20: mol_type = other DNA
caaatcttgaactcctgaac

SEQ ID NO: 205125 - DNA, 20 bp, synthetic construct
  source 1..20: mol_type = other DNA
gcaaatcttgaactcctgaa

SEQ ID NO: 205126 - DNA, 20 bp, synthetic construct
  source 1..20: mol_type = other DNA
ggcaaatcttgaactcctga

SEQ ID NO: 205127 - DNA, 20 bp, synthetic construct
  source 1..20: mol_type = other DNA
aggcaaatcttgaactcctg

SEQ ID NO: 205128 - DNA, 20 bp, synthetic construct
  source 1..20: mol_type = other DNA
caggcaaatcttgaactcct

SEQ ID NO: 205129 - DNA, 20 bp, synthetic construct
  source 1..20: mol_type = other DNA
ccaggcaaatcttgaactcc

SEQ ID NO: 205130 - DNA, 20 bp, synthetic construct
  source 1..20: mol_type = other DNA
cccaggcaaatcttgaactc

SEQ ID NO: 205131 - DNA, 20 bp, synthetic construct
  source 1..20: mol_type = other DNA
gcccaggcaaatcttgaact

SEQ ID NO: 205132 - DNA, 20 bp, synthetic construct
  source 1..20: mol_type = other DNA
tgcccaggcaaatcttgaac

SEQ ID NO: 205133 - DNA, 20 bp, synthetic construct
  source 1..20: mol_type = other DNA
ttgcccaggcaaatcttgaa

SEQ ID NO: 205134 - DNA, 20 bp, synthetic construct
  source 1..20: mol_type = other DNA
gttgcccaggcaaatcttga

SEQ ID NO: 205135 - DNA, 20 bp, synthetic construct
  source 1..20: mol_type = other DNA
tgttgcccaggcaaatcttg

SEQ ID NO: 205136 - DNA, 20 bp, synthetic construct
  source 1..20: mol_type = other DNA
atgttgcccaggcaaatctt

SEQ ID NO: 205137 - DNA, 20 bp, synthetic construct
  source 1..20: mol_type = other DNA
tatgttgcccaggcaaatct

SEQ ID NO: 205138 - DNA, 20 bp, synthetic construct
  source 1..20: mol_type = other DNA
ctatgttgcccaggcaaatc

SEQ ID NO: 205139 - DNA, 20 bp, synthetic construct
  source 1..20: mol_type = other DNA
actatgttgcccaggcaaat

SEQ ID NO: 205140 - DNA, 20 bp, synthetic construct
  source 1..20: mol_type = other DNA
cactatgttgcccaggcaaa

SEQ ID NO: 205141 - DNA, 20 bp, synthetic construct
  source 1..20: mol_type = other DNA
tcactatgttgcccaggcaa

SEQ ID NO: 205142 - DNA, 20 bp, synthetic construct
  source 1..20: mol_type = other DNA
ctcactatgttgcccaggca

SEQ ID NO: 205143 - DNA, 20 bp, synthetic construct
  source 1..20: mol_type = other DNA
tctcactatgttgcccaggc

SEQ ID NO: 205144 - DNA, 20 bp, synthetic construct
  source 1..20: mol_type = other DNA
atctcactatgttgcccagg

SEQ ID NO: 205145 - DNA, 20 bp, synthetic construct
  source 1..20: mol_type = other DNA
gatctcactatgttgcccag

SEQ ID NO: 205146 - DNA, 20 bp, synthetic construct
  source 1..20: mol_type = other DNA
ggatctcactatgttgccca

SEQ ID NO: 205147 - DNA, 20 bp, synthetic construct
  source 1..20: mol_type = other DNA
aggatctcactatgttgccc

SEQ ID NO: 205148 - DNA, 20 bp, synthetic construct
  source 1..20: mol_type = other DNA
caggatctcactatgttgcc

SEQ ID NO: 205149 - DNA, 20 bp, synthetic construct
  source 1..20: mol_type = other DNA
acaggatctcactatgttgc

SEQ ID NO: 205150 - DNA, 20 bp, synthetic construct
  source 1..20: mol_type = other DNA
gacaggatctcactatgttg

SEQ ID NO: 205151 - DNA, 20 bp, synthetic construct
  source 1..20: mol_type = other DNA
agacaggatctcactatgtt

SEQ ID NO: 205152 - DNA, 20 bp, synthetic construct
  source 1..20: mol_type = other DNA
gagacaggatctcactatgt

SEQ ID NO: 205153 - DNA, 20 bp, synthetic construct
  source 1..20: mol_type = other DNA
agagacaggatctcactatg

SEQ ID NO: 205154 - DNA, 20 bp, synthetic construct
  source 1..20: mol_type = other DNA
tagagacaggatctcactat

SEQ ID NO: 205155 - DNA, 20 bp, synthetic construct
  source 1..20: mol_type = other DNA
gtagagacaggatctcacta

SEQ ID NO: 205156 - DNA, 20 bp, synthetic construct
  source 1..20: mol_type = other DNA
agtagagacaggatctcact

SEQ ID NO: 205157 - DNA, 20 bp, synthetic construct
  source 1..20: mol_type = other DNA
cagtagagacaggatctcac

SEQ ID NO: 205158 - DNA, 20 bp, synthetic construct
  source 1..20: mol_type = other DNA
tcagtagagacaggatctca

SEQ ID NO: 205159 - DNA, 20 bp, synthetic construct
  source 1..20: mol_type = other DNA
ttcagtagagacaggatctc

SEQ ID NO: 205160 - DNA, 20 bp, synthetic construct
  source 1..20: mol_type = other DNA
tttcagtagagacaggatct

SEQ ID NO: 205161 - DNA, 20 bp, synthetic construct
  source 1..20: mol_type = other DNA
ttttcagtagagacaggatc

SEQ ID NO: 205162 - DNA, 20 bp, synthetic construct
  source 1..20: mol_type = other DNA
gttttcagtagagacaggat

SEQ ID NO: 205163 - DNA, 20 bp, synthetic construct
  source 1..20: mol_type = other DNA
tgttttcagtagagacagga

SEQ ID NO: 205164 - DNA, 20 bp, synthetic construct
  source 1..20: mol_type = other DNA
ttgttttcagtagagacagg

SEQ ID NO: 205165 - DNA, 20 bp, synthetic construct
  source 1..20: mol_type = other DNA
attgttttcagtagagacag

SEQ ID NO: 205166 - DNA, 20 bp, synthetic construct
  source 1..20: mol_type = other DNA
aattgttttcagtagagaca

SEQ ID NO: 205167 - DNA, 20 bp, synthetic construct
  source 1..20: mol_type = other DNA
taattgttttcagtagagac

SEQ ID NO: 205168 - DNA, 20 bp, synthetic construct
  source 1..20: mol_type = other DNA
ctaattgttttcagtagaga

SEQ ID NO: 205169 - DNA, 20 bp, synthetic construct
  source 1..20: mol_type = other DNA
gctaattgttttcagtagag

SEQ ID NO: 205170 - DNA, 20 bp, synthetic construct
  source 1..20: mol_type = other DNA
agctaattgttttcagtaga

SEQ ID NO: 205171 - DNA, 20 bp, synthetic construct
  source 1..20: mol_type = other DNA
cagctaattgttttcagtag

SEQ ID NO: 205172 - DNA, 20 bp, synthetic construct
  source 1..20: mol_type = other DNA
ccagctaattgttttcagta

SEQ ID NO: 205173 - DNA, 20 bp, synthetic construct
  source 1..20: mol_type = other DNA
cccagctaattgttttcagt

SEQ ID NO: 205174 - DNA, 20 bp, synthetic construct
  source 1..20: mol_type = other DNA
acccagctaattgttttcag

SEQ ID NO: 205175 - DNA, 20 bp, synthetic construct
  source 1..20: mol_type = other DNA
cacccagctaattgttttca

SEQ ID NO: 205176 - DNA, 20 bp, synthetic construct
  source 1..20: mol_type = other DNA
acacccagctaattgttttc

SEQ ID NO: 205177 - DNA, 20 bp, synthetic construct
  source 1..20: mol_type = other DNA
cacacccagctaattgtttt

SEQ ID NO: 205178 - DNA, 20 bp, synthetic construct
  source 1..20: mol_type = other DNA
ccacacccagctaattgttt

SEQ ID NO: 205179 - DNA, 20 bp, synthetic construct
  source 1..20: mol_type = other DNA
accacacccagctaattgtt

SEQ ID NO: 205180 - DNA, 20 bp, synthetic construct
  source 1..20: mol_type = other DNA
caccacacccagctaattgt

SEQ ID NO: 205181 - DNA, 20 bp, synthetic construct
  source 1..20: mol_type = other DNA
ccaccacacccagctaattg

SEQ ID NO: 205182 - DNA, 20 bp, synthetic construct
  source 1..20: mol_type = other DNA
gccaccacacccagctaatt

SEQ ID NO: 205183 - DNA, 20 bp, synthetic construct
  source 1..20: mol_type = other DNA
tgccaccacacccagctaat

SEQ ID NO: 205184 - DNA, 20 bp, synthetic construct
  source 1..20: mol_type = other DNA
gtgccaccacacccagctaa

SEQ ID NO: 205185 - DNA, 20 bp, synthetic construct
  source 1..20: mol_type = other DNA
tgtgccaccacacccagcta

SEQ ID NO: 205186 - DNA, 20 bp, synthetic construct
  source 1..20: mol_type = other DNA
atgtgccaccacacccagct

SEQ ID NO: 205187 - DNA, 20 bp, synthetic construct
  source 1..20: mol_type = other DNA
catgtgccaccacacccagc

SEQ ID NO: 205188 - DNA, 20 bp, synthetic construct
  source 1..20: mol_type = other DNA
gcatgtgccaccacacccag

SEQ ID NO: 205189 - DNA, 20 bp, synthetic construct
  source 1..20: mol_type = other DNA
ggcatgtgccaccacaccca

SEQ ID NO: 205190 - DNA, 20 bp, synthetic construct
  source 1..20: mol_type = other DNA
aggcatgtgccaccacaccc

SEQ ID NO: 205191 - DNA, 20 bp, synthetic construct
  source 1..20: mol_type = other DNA
caggcatgtgccaccacacc

SEQ ID NO: 205192 - DNA, 20 bp, synthetic construct
  source 1..20: mol_type = other DNA
gcaggcatgtgccaccacac

SEQ ID NO: 205193 - DNA, 20 bp, synthetic construct
  source 1..20: mol_type = other DNA
cgcaggcatgtgccaccaca

SEQ ID NO: 205194 - DNA, 20 bp, synthetic construct
  source 1..20: mol_type = other DNA
ccgcaggcatgtgccaccac

SEQ ID NO: 205195 - DNA, 20 bp, synthetic construct
  source 1..20: mol_type = other DNA
accgcaggcatgtgccacca

SEQ ID NO: 205196 - DNA, 20 bp, synthetic construct
  source 1..20: mol_type = other DNA
gaccgcaggcatgtgccacc

SEQ ID NO: 205197 - DNA, 20 bp, synthetic construct
  source 1..20: mol_type = other DNA
ggaccgcaggcatgtgccac

SEQ ID NO: 205198 - DNA, 20 bp, synthetic construct
  source 1..20: mol_type = other DNA
gggaccgcaggcatgtgcca

SEQ ID NO: 205199 - DNA, 20 bp, synthetic construct
  source 1..20: mol_type = other DNA
tgggaccgcaggcatgtgcc

SEQ ID NO: 205200 - DNA, 20 bp, synthetic construct
  source 1..20: mol_type = other DNA
ctgggaccgcaggcatgtgc

SEQ ID NO: 205201 - DNA, 20 bp, synthetic construct
  source 1..20: mol_type = other DNA
gctgggaccgcaggcatgtg

SEQ ID NO: 205202 - DNA, 20 bp, synthetic construct
  source 1..20: mol_type = other DNA
agctgggaccgcaggcatgt

SEQ ID NO: 205203 - DNA, 20 bp, synthetic construct
  source 1..20: mol_type = other DNA
tagctgggaccgcaggcatg

SEQ ID NO: 205204 - DNA, 20 bp, synthetic construct
  source 1..20: mol_type = other DNA
gtagctgggaccgcaggcat

SEQ ID NO: 205205 - DNA, 20 bp, synthetic construct
  source 1..20: mol_type = other DNA
agtagctgggaccgcaggca

SEQ ID NO: 205206 - DNA, 20 bp, synthetic construct
  source 1..20: mol_type = other DNA
gagtagctgggaccgcaggc

SEQ ID NO: 205207 - DNA, 20 bp, synthetic construct
  source 1..20: mol_type = other DNA
tgagtagctgggaccgcagg

SEQ ID NO: 205208 - DNA, 20 bp, synthetic construct
  source 1..20: mol_type = other DNA
ctgagtagctgggaccgcag

SEQ ID NO: 205209 - DNA, 20 bp, synthetic construct
  source 1..20: mol_type = other DNA
cctgagtagctgggaccgca

SEQ ID NO: 205210 - DNA, 20 bp, synthetic construct
  source 1..20: mol_type = other DNA
tcctgagtagctgggaccgc

SEQ ID NO: 205211 - DNA, 20 bp, synthetic construct
  source 1..20: mol_type = other DNA
ctcctgagtagctgggaccg

SEQ ID NO: 205212 - DNA, 20 bp, synthetic construct
  source 1..20: mol_type = other DNA
cctcctgagtagctgggacc

SEQ ID NO: 205213 - DNA, 20 bp, synthetic construct
  source 1..20: mol_type = other DNA
gcctcctgagtagctgggac

SEQ ID NO: 205214 - DNA, 20 bp, synthetic construct
  source 1..20: mol_type = other DNA
agcctcctgagtagctggga

SEQ ID NO: 205215 - DNA, 20 bp, synthetic construct
  source 1..20: mol_type = other DNA
cagcctcctgagtagctggg

SEQ ID NO: 205216 - DNA, 20 bp, synthetic construct
  source 1..20: mol_type = other DNA
tcagcctcctgagtagctgg

SEQ ID NO: 205217 - DNA, 20 bp, synthetic construct
  source 1..20: mol_type = other DNA
ctcagcctcctgagtagctg

SEQ ID NO: 205218 - DNA, 20 bp, synthetic construct
  source 1..20: mol_type = other DNA
tctcagcctcctgagtagct

SEQ ID NO: 205219 - DNA, 20 bp, synthetic construct
  source 1..20: mol_type = other DNA
atctcagcctcctgagtagc

SEQ ID NO: 205220 - DNA, 20 bp, synthetic construct
  source 1..20: mol_type = other DNA
tatctcagcctcctgagtag

SEQ ID NO: 205221 - DNA, 20 bp, synthetic construct
  source 1..20: mol_type = other DNA
ctatctcagcctcctgagta

SEQ ID NO: 205222 - DNA, 20 bp, synthetic construct
  source 1..20: mol_type = other DNA
cctatctcagcctcctgagt

SEQ ID NO: 205223 - DNA, 20 bp, synthetic construct
  source 1..20: mol_type = other DNA
tcctatctcagcctcctgag

SEQ ID NO: 205224 - DNA, 20 bp, synthetic construct
  source 1..20: mol_type = other DNA
ctcctatctcagcctcctga

SEQ ID NO: 205225 - DNA, 20 bp, synthetic construct
  source 1..20: mol_type = other DNA
cctcctatctcagcctcctg

SEQ ID NO: 205226 - DNA, 20 bp, synthetic construct
  source 1..20: mol_type = other DNA
tcctcctatctcagcctcct

SEQ ID NO: 205227 - DNA, 20 bp, synthetic construct
  source 1..20: mol_type = other DNA
atcctcctatctcagcctcc

SEQ ID NO: 205228 - DNA, 20 bp, synthetic construct
  source 1..20: mol_type = other DNA
gatcctcctatctcagcctc

SEQ ID NO: 205229 - DNA, 20 bp, synthetic construct
  source 1..20: mol_type = other DNA
tgatcctcctatctcagcct

SEQ ID NO: 205230 - DNA, 20 bp, synthetic construct
  source 1..20: mol_type = other DNA
gtgatcctcctatctcagcc

SEQ ID NO: 205231 - DNA, 20 bp, synthetic construct
  source 1..20: mol_type = other DNA
agtgatcctcctatctcagc

SEQ ID NO: 205232 - DNA, 20 bp, synthetic construct
  source 1..20: mol_type = other DNA
aagtgatcctcctatctcag

SEQ ID NO: 205233 - DNA, 20 bp, synthetic construct
  source 1..20: mol_type = other DNA
caagtgatcctcctatctca

SEQ ID NO: 205234 - DNA, 20 bp, synthetic construct
  source 1..20: mol_type = other DNA
tcaagtgatcctcctatctc

SEQ ID NO: 205235 - DNA, 20 bp, synthetic construct
  source 1..20: mol_type = other DNA
ttcaagtgatcctcctatct

SEQ ID NO: 205236 - DNA, 20 bp, synthetic construct
  source 1..20: mol_type = other DNA
gttcaagtgatcctcctatc

SEQ ID NO: 205237 - DNA, 20 bp, synthetic construct
  source 1..20: mol_type = other DNA
ggttcaagtgatcctcctat

SEQ ID NO: 205238 - DNA, 20 bp, synthetic construct
  source 1..20: mol_type = other DNA
gggttcaagtgatcctccta

SEQ ID NO: 205239 - DNA, 20 bp, synthetic construct
  source 1..20: mol_type = other DNA
agggttcaagtgatcctcct

SEQ ID NO: 205240 - DNA, 20 bp, synthetic construct
  source 1..20: mol_type = other DNA
cagggttcaagtgatcctcc

SEQ ID NO: 205241 - DNA, 20 bp, synthetic construct
  source 1..20: mol_type = other DNA
ccagggttcaagtgatcctc

SEQ ID NO: 205242 - DNA, 20 bp, synthetic construct
  source 1..20: mol_type = other DNA
cccagggttcaagtgatcct

SEQ ID NO: 205243 - DNA, 20 bp, synthetic construct
  source 1..20: mol_type = other DNA
ccccagggttcaagtgatcc

SEQ ID NO: 205244 - DNA, 20 bp, synthetic construct
  source 1..20: mol_type = other DNA
cccccagggttcaagtgatc

SEQ ID NO: 205245 - DNA, 20 bp, synthetic construct
  source 1..20: mol_type = other DNA
tcccccagggttcaagtgat

SEQ ID NO: 205246 - DNA, 20 bp, synthetic construct
  source 1..20: mol_type = other DNA
gtcccccagggttcaagtga

SEQ ID NO: 205247 - DNA, 20 bp, synthetic construct
  source 1..20: mol_type = other DNA
tgtcccccagggttcaagtg

SEQ ID NO: 205248 - DNA, 20 bp, synthetic construct
  source 1..20: mol_type = other DNA
ctgtcccccagggttcaagt

SEQ ID NO: 205249 - DNA, 20 bp, synthetic construct
  source 1..20: mol_type = other DNA
tctgtcccccagggttcaag

SEQ ID NO: 205250 - DNA, 20 bp, synthetic construct
  source 1..20: mol_type = other DNA
ctctgtcccccagggttcaa

SEQ ID NO: 205251 - DNA, 20 bp, synthetic construct
  source 1..20: mol_type = other DNA
cctctgtcccccagggttca

SEQ ID NO: 205252 - DNA, 20 bp, synthetic construct
  source 1..20: mol_type = other DNA
acctctgtcccccagggttc

SEQ ID NO: 205253 - DNA, 20 bp, synthetic construct
  source 1..20: mol_type = other DNA
aacctctgtcccccagggtt

SEQ ID NO: 205254 - DNA, 20 bp, synthetic construct
  source 1..20: mol_type = other DNA
caacctctgtcccccagggt

SEQ ID NO: 205255 - DNA, 20 bp, synthetic construct
  source 1..20: mol_type = other DNA
gcaacctctgtcccccaggg

SEQ ID NO: 205256 - DNA, 20 bp, synthetic construct
  source 1..20: mol_type = other DNA
tgcaacctctgtcccccagg

SEQ ID NO: 205257 - DNA, 20 bp, synthetic construct
  source 1..20: mol_type = other DNA
ctgcaacctctgtcccccag

SEQ ID NO: 205258 - DNA, 20 bp, synthetic construct
  source 1..20: mol_type = other DNA
actgcaacctctgtccccca

SEQ ID NO: 205259 - DNA, 20 bp, synthetic construct
  source 1..20: mol_type = other DNA
cactgcaacctctgtccccc

SEQ ID NO: 205260 - DNA, 20 bp, synthetic construct
  source 1..20: mol_type = other DNA
tcactgcaacctctgtcccc

SEQ ID NO: 205261 - DNA, 20 bp, synthetic construct
  source 1..20: mol_type = other DNA
ctcactgcaacctctgtccc

SEQ ID NO: 205262 - DNA, 20 bp, synthetic construct
  source 1..20: mol_type = other DNA
cctcactgcaacctctgtcc

SEQ ID NO: 205263 - DNA, 20 bp, synthetic construct
  source 1..20: mol_type = other DNA
gcctcactgcaacctctgtc

SEQ ID NO: 205264 - DNA, 20 bp, synthetic construct
  source 1..20: mol_type = other DNA
tgcctcactgcaacctctgt

SEQ ID NO: 205265 - DNA, 20 bp, synthetic construct
  source 1..20: mol_type = other DNA
ttgcctcactgcaacctctg

SEQ ID NO: 205266 - DNA, 20 bp, synthetic construct
  source 1..20: mol_type = other DNA
cttgcctcactgcaacctct

SEQ ID NO: 205267 - DNA, 20 bp, synthetic construct
  source 1..20: mol_type = other DNA
tcttgcctcactgcaacctc

SEQ ID NO: 205268 - DNA, 20 bp, synthetic construct
  source 1..20: mol_type = other DNA
atcttgcctcactgcaacct

SEQ ID NO: 205269 - DNA, 20 bp, synthetic construct
  source 1..20: mol_type = other DNA
aatcttgcctcactgcaacc

SEQ ID NO: 205270 - DNA, 20 bp, synthetic construct
  source 1..20: mol_type = other DNA
caatcttgcctcactgcaac

SEQ ID NO: 205271 - DNA, 20 bp, synthetic construct
  source 1..20: mol_type = other DNA
gcaatcttgcctcactgcaa

SEQ ID NO: 205272 - DNA, 20 bp, synthetic construct
  source 1..20: mol_type = other DNA
tgcaatcttgcctcactgca

SEQ ID NO: 205273 - DNA, 20 bp, synthetic construct
  source 1..20: mol_type = other DNA
gtgcaatcttgcctcactgc

SEQ ID NO: 205274 - DNA, 20 bp, synthetic construct
  source 1..20: mol_type = other DNA
ggtgcaatcttgcctcactg

SEQ ID NO: 205275 - DNA, 20 bp, synthetic construct
  source 1..20: mol_type = other DNA
tggtgcaatcttgcctcact

SEQ ID NO: 205276 - DNA, 20 bp, synthetic construct
  source 1..20: mol_type = other DNA
gtggtgcaatcttgcctcac

SEQ ID NO: 205277 - DNA, 20 bp, synthetic construct
  source 1..20: mol_type = other DNA
agtggtgcaatcttgcctca

SEQ ID NO: 205278 - DNA, 20 bp, synthetic construct
  source 1..20: mol_type = other DNA
cagtggtgcaatcttgcctc

SEQ ID NO: 205279 - DNA, 20 bp, synthetic construct
  source 1..20: mol_type = other DNA
gcagtggtgcaatcttgcct

SEQ ID NO: 205280 - DNA, 20 bp, synthetic construct
  source 1..20: mol_type = other DNA
tgcagtggtgcaatcttgcc

SEQ ID NO: 205281 - DNA, 20 bp, synthetic construct
  source 1..20: mol_type = other DNA
gtgcagtggtgcaatcttgc

SEQ ID NO: 205282 - DNA, 20 bp, synthetic construct
  source 1..20: mol_type = other DNA
agtgcagtggtgcaatcttg

SEQ ID NO: 205283 - DNA, 20 bp, synthetic construct
  source 1..20: mol_type = other DNA
gagtgcagtggtgcaatctt

SEQ ID NO: 205284 - DNA, 20 bp, synthetic construct
  source 1..20: mol_type = other DNA
ggagtgcagtggtgcaatct

SEQ ID NO: 205285 - DNA, 20 bp, synthetic construct
  source 1..20: mol_type = other DNA
tggagtgcagtggtgcaatc

SEQ ID NO: 205286 - DNA, 20 bp, synthetic construct
  source 1..20: mol_type = other DNA
ctggagtgcagtggtgcaat

SEQ ID NO: 205287 - DNA, 20 bp, synthetic construct
  source 1..20: mol_type = other DNA
gctggagtgcagtggtgcaa

SEQ ID NO: 205288 - DNA, 20 bp, synthetic construct
  source 1..20: mol_type = other DNA
ggctggagtgcagtggtgca

SEQ ID NO: 205289 - DNA, 20 bp, synthetic construct
  source 1..20: mol_type = other DNA
aggctggagtgcagtggtgc

SEQ ID NO: 205290 - DNA, 20 bp, synthetic construct
  source 1..20: mol_type = other DNA
caggctggagtgcagtggtg

SEQ ID NO: 205291 - DNA, 20 bp, synthetic construct
  source 1..20: mol_type = other DNA
ccaggctggagtgcagtggt

SEQ ID NO: 205292 - DNA, 20 bp, synthetic construct
  source 1..20: mol_type = other DNA
cccaggctggagtgcagtgg

SEQ ID NO: 205293 - DNA, 20 bp, synthetic construct
  source 1..20: mol_type = other DNA
acccaggctggagtgcagtg

SEQ ID NO: 205294 - DNA, 20 bp, synthetic construct
  source 1..20: mol_type = other DNA
cacccaggctggagtgcagt

SEQ ID NO: 205295 - DNA, 20 bp, synthetic construct
  source 1..20: mol_type = other DNA
tcacccaggctggagtgcag

SEQ ID NO: 205296 - DNA, 20 bp, synthetic construct
  source 1..20: mol_type = other DNA
gtcacccaggctggagtgca

SEQ ID NO: 205297 - DNA, 20 bp, synthetic construct
  source 1..20: mol_type = other DNA
tgtcacccaggctggagtgc

SEQ ID NO: 205298 - DNA, 20 bp, synthetic construct
  source 1..20: mol_type = other DNA
ctgtcacccaggctggagtg

SEQ ID NO: 205299 - DNA, 20 bp, synthetic construct
  source 1..20: mol_type = other DNA
tctgtcacccaggctggagt

SEQ ID NO: 205300 - DNA, 20 bp, synthetic construct
  source 1..20: mol_type = other DNA
atctgtcacccaggctggag

SEQ ID NO: 205301 - DNA, 20 bp, synthetic construct
  source 1..20: mol_type = other DNA
aatctgtcacccaggctgga

SEQ ID NO: 205302 - DNA, 20 bp, synthetic construct
  source 1..20: mol_type = other DNA
caatctgtcacccaggctgg

SEQ ID NO: 205303 - DNA, 20 bp, synthetic construct
  source 1..20: mol_type = other DNA
tcaatctgtcacccaggctg

SEQ ID NO: 205304 - DNA, 20 bp, synthetic construct
  source 1..20: mol_type = other DNA
ctcaatctgtcacccaggct

SEQ ID NO: 205305 - DNA, 20 bp, synthetic construct
  source 1..20: mol_type = other DNA
tctcaatctgtcacccaggc

SEQ ID NO: 205306 - DNA, 20 bp, synthetic construct
  source 1..20: mol_type = other DNA
gtctcaatctgtcacccagg

SEQ ID NO: 205307 - DNA, 20 bp, synthetic construct
  source 1..20: mol_type = other DNA
ggtctcaatctgtcacccag

SEQ ID NO: 205308 - DNA, 20 bp, synthetic construct
  source 1..20: mol_type = other DNA
gggtctcaatctgtcaccca

SEQ ID NO: 205309 - DNA, 20 bp, synthetic construct
  source 1..20: mol_type = other DNA
agggtctcaatctgtcaccc

SEQ ID NO: 205310 - DNA, 20 bp, synthetic construct
  source 1..20: mol_type = other DNA
cagggtctcaatctgtcacc

SEQ ID NO: 205311 - DNA, 20 bp, synthetic construct
  source 1..20: mol_type = other DNA
acagggtctcaatctgtcac

SEQ ID NO: 205312 - DNA, 20 bp, synthetic construct
  source 1..20: mol_type = other DNA
gacagggtctcaatctgtca

SEQ ID NO: 205313 - DNA, 20 bp, synthetic construct
  source 1..20: mol_type = other DNA
agacagggtctcaatctgtc

SEQ ID NO: 205314 - DNA, 20 bp, synthetic construct
  source 1..20: mol_type = other DNA
gagacagggtctcaatctgt

SEQ ID NO: 205315 - DNA, 20 bp, synthetic construct
  source 1..20: mol_type = other DNA
tgagacagggtctcaatctg

SEQ ID NO: 205316 - DNA, 20 bp, synthetic construct
  source 1..20: mol_type = other DNA
ttgagacagggtctcaatct

SEQ ID NO: 205317 - DNA, 20 bp, synthetic construct
  source 1..20: mol_type = other DNA
tttgagacagggtctcaatc

SEQ ID NO: 205318 - DNA, 20 bp, synthetic construct
  source 1..20: mol_type = other DNA
ttttgagacagggtctcaat

SEQ ID NO: 205319 - DNA, 20 bp, synthetic construct
  source 1..20: mol_type = other DNA
tttttgagacagggtctcaa

SEQ ID NO: 205320 - DNA, 20 bp, synthetic construct
  source 1..20: mol_type = other DNA
ttttttgagacagggtctca

SEQ ID NO: 205321 - DNA, 20 bp, synthetic construct
  source 1..20: mol_type = other DNA
tttttttgagacagggtctc

SEQ ID NO: 205322 - DNA, 20 bp, synthetic construct
  source 1..20: mol_type = other DNA
ctttttttgagacagggtct

SEQ ID NO: 205323 - DNA, 20 bp, synthetic construct
  source 1..20: mol_type = other DNA
tctttttttgagacagggtc

SEQ ID NO: 205324 - DNA, 20 bp, synthetic construct
  source 1..20: mol_type = other DNA
ttctttttttgagacagggt

SEQ ID NO: 205325 - DNA, 20 bp, synthetic construct
  source 1..20: mol_type = other DNA
tttctttttttgagacaggg

SEQ ID NO: 205326 - DNA, 20 bp, synthetic construct
  source 1..20: mol_type = other DNA
ttttctttttttgagacagg

SEQ ID NO: 205327 - DNA, 20 bp, synthetic construct
  source 1..20: mol_type = other DNA
tttttctttttttgagacag

SEQ ID NO: 205328 - DNA, 20 bp, synthetic construct
  source 1..20: mol_type = other DNA
ttttttctttttttgagaca

SEQ ID NO: 205329 - DNA, 20 bp, synthetic construct
  source 1..20: mol_type = other DNA
tttttttctttttttgagac

SEQ ID NO: 205330 - DNA, 20 bp, synthetic construct
  source 1..20: mol_type = other DNA
ttttttttctttttttgaga

SEQ ID NO: 205331 - DNA, 20 bp, synthetic construct
  source 1..20: mol_type = other DNA
tttttttttctttttttgag

SEQ ID NO: 205332 - DNA, 20 bp, synthetic construct
  source 1..20: mol_type = other DNA
ttttttttttctttttttga

SEQ ID NO: 205333 - DNA, 20 bp, synthetic construct
  source 1..20: mol_type = other DNA
tttttttttttctttttttg

SEQ ID NO: 205334 - DNA, 20 bp, synthetic construct
  source 1..20: mol_type = other DNA
ttttttttttttcttttttt

SEQ ID NO: 205335 - DNA, 20 bp, synthetic construct
  source 1..20: mol_type = other DNA
cttttttttttttctttttt

SEQ ID NO: 205336 - DNA, 20 bp, synthetic construct
  source 1..20: mol_type = other DNA
tcttttttttttttcttttt

SEQ ID NO: 205337 - DNA, 20 bp, synthetic construct
  source 1..20: mol_type = other DNA
ttcttttttttttttctttt

SEQ ID NO: 205338 - DNA, 20 bp, synthetic construct
  source 1..20: mol_type = other DNA
tttcttttttttttttcttt

SEQ ID NO: 205339 - DNA, 20 bp, synthetic construct
  source 1..20: mol_type = other DNA
gtttcttttttttttttctt

SEQ ID NO: 205340 - DNA, 20 bp, synthetic construct
  source 1..20: mol_type = other DNA
tgtttcttttttttttttct

SEQ ID NO: 205341 - DNA, 20 bp, synthetic construct
  source 1..20: mol_type = other DNA
gtgtttcttttttttttttc

SEQ ID NO: 205342 - DNA, 20 bp, synthetic construct
  source 1..20: mol_type = other DNA
tgtgtttctttttttttttt

SEQ ID NO: 205343 - DNA, 20 bp, synthetic construct
  source 1..20: mol_type = other DNA
ttgtgtttcttttttttttt

SEQ ID NO: 205344 - DNA, 20 bp, synthetic construct
  source 1..20: mol_type = other DNA
tttgtgtttctttttttttt

SEQ ID NO: 205345 - DNA, 20 bp, synthetic construct
  source 1..20: mol_type = other DNA
ttttgtgtttcttttttttt

SEQ ID NO: 205346 - DNA, 20 bp, synthetic construct
  source 1..20: mol_type = other DNA
tttttgtgtttctttttttt

SEQ ID NO: 205347 - DNA, 20 bp, synthetic construct
  source 1..20: mol_type = other DNA
gtttttgtgtttcttttttt

SEQ ID NO: 205348 - DNA, 20 bp, synthetic construct
  source 1..20: mol_type = other DNA
agtttttgtgtttctttttt

SEQ ID NO: 205349 - DNA, 20 bp, synthetic construct
  source 1..20: mol_type = other DNA
gagtttttgtgtttcttttt

SEQ ID NO: 205350 - DNA, 20 bp, synthetic construct
  source 1..20: mol_type = other DNA
ggagtttttgtgtttctttt

SEQ ID NO: 205351 - DNA, 20 bp, synthetic construct
  source 1..20: mol_type = other DNA
tggagtttttgtgtttcttt

SEQ ID NO: 205352 - DNA, 20 bp, synthetic construct
  source 1..20: mol_type = other DNA
ctggagtttttgtgtttctt

SEQ ID NO: 205353 - DNA, 20 bp, synthetic construct
  source 1..20: mol_type = other DNA
cctggagtttttgtgtttct

SEQ ID NO: 205354 - DNA, 20 bp, synthetic construct
  source 1..20: mol_type = other DNA
acctggagtttttgtgtttc

SEQ ID NO: 205355 - DNA, 20 bp, synthetic construct
  source 1..20: mol_type = other DNA
cacctggagtttttgtgttt

SEQ ID NO: 205356 - DNA, 20 bp, synthetic construct
  source 1..20: mol_type = other DNA
ccacctggagtttttgtgtt

SEQ ID NO: 205357 - DNA, 20 bp, synthetic construct
  source 1..20: mol_type = other DNA
accacctggagtttttgtgt

SEQ ID NO: 205358 - DNA, 20 bp, synthetic construct
  source 1..20: mol_type = other DNA
gaccacctggagtttttgtg

SEQ ID NO: 205359 - DNA, 20 bp, synthetic construct
  source 1..20: mol_type = other DNA
cgaccacctggagtttttgt

SEQ ID NO: 205360 - DNA, 20 bp, synthetic construct
  source 1..20: mol_type = other DNA
gcgaccacctggagtttttg

SEQ ID NO: 205361 - DNA, 20 bp, synthetic construct
  source 1..20: mol_type = other DNA
tgcgaccacctggagttttt

SEQ ID NO: 205362 - DNA, 20 bp, synthetic construct
  source 1..20: mol_type = other DNA
gtgcgaccacctggagtttt

SEQ ID NO: 205363 - DNA, 20 bp, synthetic construct
  source 1..20: mol_type = other DNA
tgtgcgaccacctggagttt

SEQ ID NO: 205364 - DNA, 20 bp, synthetic construct
  source 1..20: mol_type = other DNA
ctgtgcgaccacctggagtt

SEQ ID NO: 205365 - DNA, 20 bp, synthetic construct
  source 1..20: mol_type = other DNA
tctgtgcgaccacctggagt

SEQ ID NO: 205366 - DNA, 20 bp, synthetic construct
  source 1..20: mol_type = other DNA
ttctgtgcgaccacctggag

SEQ ID NO: 205367 - DNA, 20 bp, synthetic construct
  source 1..20: mol_type = other DNA
attctgtgcgaccacctgga

SEQ ID NO: 205368 - DNA, 20 bp, synthetic construct
  source 1..20: mol_type = other DNA
cattctgtgcgaccacctgg

SEQ ID NO: 205369 - DNA, 20 bp, synthetic construct
  source 1..20: mol_type = other DNA
tcattctgtgcgaccacctg

SEQ ID NO: 205370 - DNA, 20 bp, synthetic construct
  source 1..20: mol_type = other DNA
gtcattctgtgcgaccacct

SEQ ID NO: 205371 - DNA, 20 bp, synthetic construct
  source 1..20: mol_type = other DNA
tgtcattctgtgcgaccacc

SEQ ID NO: 205372 - DNA, 20 bp, synthetic construct
  source 1..20: mol_type = other DNA
ctgtcattctgtgcgaccac

SEQ ID NO: 205373 - DNA, 20 bp, synthetic construct
  source 1..20: mol_type = other DNA
cctgtcattctgtgcgacca

SEQ ID NO: 205374 - DNA, 20 bp, synthetic construct
  source 1..20: mol_type = other DNA
tcctgtcattctgtgcgacc

SEQ ID NO: 205375 - DNA, 20 bp, synthetic construct
  source 1..20: mol_type = other DNA
gtcctgtcattctgtgcgac

SEQ ID NO: 205376 - DNA, 20 bp, synthetic construct
  source 1..20: mol_type = other DNA
agtcctgtcattctgtgcga

SEQ ID NO: 205377 - DNA, 20 bp, synthetic construct
  source 1..20: mol_type = other DNA
cagtcctgtcattctgtgcg

SEQ ID NO: 205378 - DNA, 20 bp, synthetic construct
  source 1..20: mol_type = other DNA
tcagtcctgtcattctgtgc

SEQ ID NO: 205379 - DNA, 20 bp, synthetic construct
  source 1..20: mol_type = other DNA
ttcagtcctgtcattctgtg

SEQ ID NO: 205380 - DNA, 20 bp, synthetic construct
  source 1..20: mol_type = other DNA
cttcagtcctgtcattctgt

SEQ ID NO: 205381 - DNA, 20 bp, synthetic construct
  source 1..20: mol_type = other DNA
acttcagtcctgtcattctg

SEQ ID NO: 205382 - DNA, 20 bp, synthetic construct
  source 1..20: mol_type = other DNA
tacttcagtcctgtcattct

SEQ ID NO: 205383 - DNA, 20 bp, synthetic construct
  source 1..20: mol_type = other DNA
ttacttcagtcctgtcattc

SEQ ID NO: 205384 - DNA, 20 bp, synthetic construct
  source 1..20: mol_type = other DNA
gttacttcagtcctgtcatt

SEQ ID NO: 205385 - DNA, 20 bp, synthetic construct
  source 1..20: mol_type = other DNA
agttacttcagtcctgtcat

SEQ ID NO: 205386 - DNA, 20 bp, synthetic construct
  source 1..20: mol_type = other DNA
aagttacttcagtcctgtca

SEQ ID NO: 205387 - DNA, 20 bp, synthetic construct
  source 1..20: mol_type = other DNA
taagttacttcagtcctgtc

SEQ ID NO: 205388 - DNA, 20 bp, synthetic construct
  source 1..20: mol_type = other DNA
ctaagttacttcagtcctgt

SEQ ID NO: 205389 - DNA, 20 bp, synthetic construct
  source 1..20: mol_type = other DNA
gctaagttacttcagtcctg

SEQ ID NO: 205390 - DNA, 20 bp, synthetic construct
  source 1..20: mol_type = other DNA
agctaagttacttcagtcct

SEQ ID NO: 205391 - DNA, 20 bp, synthetic construct
  source 1..20: mol_type = other DNA
gagctaagttacttcagtcc

SEQ ID NO: 205392 - DNA, 20 bp, synthetic construct
  source 1..20: mol_type = other DNA
ggagctaagttacttcagtc

SEQ ID NO: 205393 - DNA, 20 bp, synthetic construct
  source 1..20: mol_type = other DNA
tggagctaagttacttcagt

SEQ ID NO: 205394 - DNA, 20 bp, synthetic construct
  source 1..20: mol_type = other DNA
ttggagctaagttacttcag

SEQ ID NO: 205395 - DNA, 20 bp, synthetic construct
  source 1..20: mol_type = other DNA
attggagctaagttacttca

SEQ ID NO: 205396 - DNA, 20 bp, synthetic construct
  source 1..20: mol_type = other DNA
aattggagctaagttacttc

SEQ ID NO: 205397 - DNA, 20 bp, synthetic construct
  source 1..20: mol_type = other DNA
aaattggagctaagttactt

SEQ ID NO: 205398 - DNA, 20 bp, synthetic construct
  source 1..20: mol_type = other DNA
gaaattggagctaagttact

SEQ ID NO: 205399 - DNA, 20 bp, synthetic construct
  source 1..20: mol_type = other DNA
agaaattggagctaagttac

SEQ ID NO: 205400 - DNA, 20 bp, synthetic construct
  source 1..20: mol_type = other DNA
cagaaattggagctaagtta

SEQ ID NO: 205401 - DNA, 20 bp, synthetic construct
  source 1..20: mol_type = other DNA
acagaaattggagctaagtt

SEQ ID NO: 205402 - DNA, 20 bp, synthetic construct
  source 1..20: mol_type = other DNA
gacagaaattggagctaagt

SEQ ID NO: 205403 - DNA, 20 bp, synthetic construct
  source 1..20: mol_type = other DNA
agacagaaattggagctaag

SEQ ID NO: 205404 - DNA, 20 bp, synthetic construct
  source 1..20: mol_type = other DNA
aagacagaaattggagctaa

SEQ ID NO: 205405 - DNA, 20 bp, synthetic construct
  source 1..20: mol_type = other DNA
gaagacagaaattggagcta

SEQ ID NO: 205406 - DNA, 20 bp, synthetic construct
  source 1..20: mol_type = other DNA
tgaagacagaaattggagct

SEQ ID NO: 205407 - DNA, 20 bp, synthetic construct
  source 1..20: mol_type = other DNA
atgaagacagaaattggagc

SEQ ID NO: 205408 - DNA, 20 bp, synthetic construct
  source 1..20: mol_type = other DNA
tatgaagacagaaattggag

SEQ ID NO: 205409 - DNA, 20 bp, synthetic construct
  source 1..20: mol_type = other DNA
ttatgaagacagaaattgga

SEQ ID NO: 205410 - DNA, 20 bp, synthetic construct
  source 1..20: mol_type = other DNA
attatgaagacagaaattgg

SEQ ID NO: 205411 - DNA, 20 bp, synthetic construct
  source 1..20: mol_type = other DNA
gattatgaagacagaaattg

SEQ ID NO: 205412 - DNA, 20 bp, synthetic construct
  source 1..20: mol_type = other DNA
tgattatgaagacagaaatt

SEQ ID NO: 205413 - DNA, 20 bp, synthetic construct
  source 1..20: mol_type = other DNA
gtgattatgaagacagaaat

SEQ ID NO: 205414 - DNA, 20 bp, synthetic construct
  source 1..20: mol_type = other DNA
agtgattatgaagacagaaa

SEQ ID NO: 205415 - DNA, 20 bp, synthetic construct
  source 1..20: mol_type = other DNA
cagtgattatgaagacagaa

SEQ ID NO: 205416 - DNA, 20 bp, synthetic construct
  source 1..20: mol_type = other DNA
acagtgattatgaagacaga

SEQ ID NO: 205417 - DNA, 20 bp, synthetic construct
  source 1..20: mol_type = other DNA
gacagtgattatgaagacag

SEQ ID NO: 205418 - DNA, 20 bp, synthetic construct
  source 1..20: mol_type = other DNA
ggacagtgattatgaagaca

SEQ ID NO: 205419 - DNA, 20 bp, synthetic construct
  source 1..20: mol_type = other DNA
aggacagtgattatgaagac

SEQ ID NO: 205420 - DNA, 20 bp, synthetic construct
  source 1..20: mol_type = other DNA
taggacagtgattatgaaga

SEQ ID NO: 205421 - DNA, 20 bp, synthetic construct
  source 1..20: mol_type = other DNA
gtaggacagtgattatgaag

SEQ ID NO: 205422 - DNA, 20 bp, synthetic construct
  source 1..20: mol_type = other DNA
ggtaggacagtgattatgaa

SEQ ID NO: 205423 - DNA, 20 bp, synthetic construct
  source 1..20: mol_type = other DNA
tggtaggacagtgattatga

SEQ ID NO: 205424 - DNA, 20 bp, synthetic construct
  source 1..20: mol_type = other DNA
atggtaggacagtgattatg

SEQ ID NO: 205425 - DNA, 20 bp, synthetic construct
  source 1..20: mol_type = other DNA
aatggtaggacagtgattat

SEQ ID NO: 205426 - DNA, 20 bp, synthetic construct
  source 1..20: mol_type = other DNA
caatggtaggacagtgatta

SEQ ID NO: 205427 - DNA, 20 bp, synthetic construct
  source 1..20: mol_type = other DNA
acaatggtaggacagtgatt

SEQ ID NO: 205428 - DNA, 20 bp, synthetic construct
  source 1..20: mol_type = other DNA
gacaatggtaggacagtgat

SEQ ID NO: 205429 - DNA, 20 bp, synthetic construct
  source 1..20: mol_type = other DNA
agacaatggtaggacagtga

SEQ ID NO: 205430 - DNA, 20 bp, synthetic construct
  source 1..20: mol_type = other DNA
cagacaatggtaggacagtg

SEQ ID NO: 205431 - DNA, 20 bp, synthetic construct
  source 1..20: mol_type = other DNA
acagacaatggtaggacagt

SEQ ID NO: 205432 - DNA, 20 bp, synthetic construct
  source 1..20: mol_type = other DNA
cacagacaatggtaggacag

SEQ ID NO: 205433 - DNA, 20 bp, synthetic construct
  source 1..20: mol_type = other DNA
gcacagacaatggtaggaca

SEQ ID NO: 205434 - DNA, 20 bp, synthetic construct
  source 1..20: mol_type = other DNA
agcacagacaatggtaggac

SEQ ID NO: 205435 - DNA, 20 bp, synthetic construct
  source 1..20: mol_type = other DNA
aagcacagacaatggtagga

SEQ ID NO: 205436 - DNA, 20 bp, synthetic construct
  source 1..20: mol_type = other DNA
taagcacagacaatggtagg

SEQ ID NO: 205437 - DNA, 20 bp, synthetic construct
  source 1..20: mol_type = other DNA
ctaagcacagacaatggtag

SEQ ID NO: 205438 - DNA, 20 bp, synthetic construct
  source 1..20: mol_type = other DNA
tctaagcacagacaatggta

SEQ ID NO: 205439 - DNA, 20 bp, synthetic construct
  source 1..20: mol_type = other DNA
ttctaagcacagacaatggt

SEQ ID NO: 205440 - DNA, 20 bp, synthetic construct
  source 1..20: mol_type = other DNA
attctaagcacagacaatgg

SEQ ID NO: 205441 - DNA, 20 bp, synthetic construct
  source 1..20: mol_type = other DNA
gattctaagcacagacaatg

SEQ ID NO: 205442 - DNA, 20 bp, synthetic construct
  source 1..20: mol_type = other DNA
agattctaagcacagacaat

SEQ ID NO: 205443 - DNA, 20 bp, synthetic construct
  source 1..20: mol_type = other DNA
tagattctaagcacagacaa

SEQ ID NO: 205444 - DNA, 20 bp, synthetic construct
  source 1..20: mol_type = other DNA
gtagattctaagcacagaca

SEQ ID NO: 205445 - DNA, 20 bp, synthetic construct
  source 1..20: mol_type = other DNA
agtagattctaagcacagac

SEQ ID NO: 205446 - DNA, 20 bp, synthetic construct
  source 1..20: mol_type = other DNA
aagtagattctaagcacaga

SEQ ID NO: 205447 - DNA, 20 bp, synthetic construct
  source 1..20: mol_type = other DNA
caagtagattctaagcacag

SEQ ID NO: 205448 - DNA, 20 bp, synthetic construct
  source 1..20: mol_type = other DNA
gcaagtagattctaagcaca

SEQ ID NO: 205449 - DNA, 20 bp, synthetic construct
  source 1..20: mol_type = other DNA
agcaagtagattctaagcac

SEQ ID NO: 205450 - DNA, 20 bp, synthetic construct
  source 1..20: mol_type = other DNA
aagcaagtagattctaagca

SEQ ID NO: 205451 - DNA, 20 bp, synthetic construct
  source 1..20: mol_type = other DNA
taagcaagtagattctaagc

SEQ ID NO: 205452 - DNA, 20 bp, synthetic construct
  source 1..20: mol_type = other DNA
ttaagcaagtagattctaag

SEQ ID NO: 205453 - DNA, 20 bp, synthetic construct
  source 1..20: mol_type = other DNA
attaagcaagtagattctaa

SEQ ID NO: 205454 - DNA, 20 bp, synthetic construct
  source 1..20: mol_type = other DNA
cattaagcaagtagattcta

SEQ ID NO: 205455 - DNA, 20 bp, synthetic construct
  source 1..20: mol_type = other DNA
gcattaagcaagtagattct

SEQ ID NO: 205456 - DNA, 20 bp, synthetic construct
  source 1..20: mol_type = other DNA
tgcattaagcaagtagattc

SEQ ID NO: 205457 - DNA, 20 bp, synthetic construct
  source 1..20: mol_type = other DNA
ctgcattaagcaagtagatt

SEQ ID NO: 205458 - DNA, 20 bp, synthetic construct
  source 1..20: mol_type = other DNA
cctgcattaagcaagtagat

SEQ ID NO: 205459 - DNA, 20 bp, synthetic construct
  source 1..20: mol_type = other DNA
tcctgcattaagcaagtaga

SEQ ID NO: 205460 - DNA, 20 bp, synthetic construct
  source 1..20: mol_type = other DNA
ttcctgcattaagcaagtag

SEQ ID NO: 205461 - DNA, 20 bp, synthetic construct
  source 1..20: mol_type = other DNA
gttcctgcattaagcaagta

SEQ ID NO: 205462 - DNA, 20 bp, synthetic construct
  source 1..20: mol_type = other DNA
tgttcctgcattaagcaagt

SEQ ID NO: 205463 - DNA, 20 bp, synthetic construct
  source 1..20: mol_type = other DNA
atgttcctgcattaagcaag

SEQ ID NO: 205464 - DNA, 20 bp, synthetic construct
  source 1..20: mol_type = other DNA
catgttcctgcattaagcaa

SEQ ID NO: 205465 - DNA, 20 bp, synthetic construct
  source 1..20: mol_type = other DNA
acatgttcctgcattaagca

SEQ ID NO: 205466 - DNA, 20 bp, synthetic construct
  source 1..20: mol_type = other DNA
cacatgttcctgcattaagc

SEQ ID NO: 205467 - DNA, 20 bp, synthetic construct
  source 1..20: mol_type = other DNA
acacatgttcctgcattaag

SEQ ID NO: 205468 - DNA, 20 bp, synthetic construct
  source 1..20: mol_type = other DNA
aacacatgttcctgcattaa

SEQ ID NO: 205469 - DNA, 20 bp, synthetic construct
  source 1..20: mol_type = other DNA
gaacacatgttcctgcatta

SEQ ID NO: 205470 - DNA, 20 bp, synthetic construct
  source 1..20: mol_type = other DNA
agaacacatgttcctgcatt

SEQ ID NO: 205471 - DNA, 20 bp, synthetic construct
  source 1..20: mol_type = other DNA
gagaacacatgttcctgcat

SEQ ID NO: 205472 - DNA, 20 bp, synthetic construct
  source 1..20: mol_type = other DNA
tgagaacacatgttcctgca

SEQ ID NO: 205473 - DNA, 20 bp, synthetic construct
  source 1..20: mol_type = other DNA
gtgagaacacatgttcctgc

SEQ ID NO: 205474 - DNA, 20 bp, synthetic construct
  source 1..20: mol_type = other DNA
tgtgagaacacatgttcctg

SEQ ID NO: 205475 - DNA, 20 bp, synthetic construct
  source 1..20: mol_type = other DNA
ctgtgagaacacatgttcct

SEQ ID NO: 205476 - DNA, 20 bp, synthetic construct
  source 1..20: mol_type = other DNA
tctgtgagaacacatgttcc

SEQ ID NO: 205477 - DNA, 20 bp, synthetic construct
  source 1..20: mol_type = other DNA
ctctgtgagaacacatgttc

SEQ ID NO: 205478 - DNA, 20 bp, synthetic construct
  source 1..20: mol_type = other DNA
tctctgtgagaacacatgtt

SEQ ID NO: 205479 - DNA, 20 bp, synthetic construct
  source 1..20: mol_type = other DNA
atctctgtgagaacacatgt

SEQ ID NO: 205480 - DNA, 20 bp, synthetic construct
  source 1..20: mol_type = other DNA
catctctgtgagaacacatg

SEQ ID NO: 205481 - DNA, 20 bp, synthetic construct
  source 1..20: mol_type = other DNA
ccatctctgtgagaacacat

SEQ ID NO: 205482 - DNA, 20 bp, synthetic construct
  source 1..20: mol_type = other DNA
tccatctctgtgagaacaca

SEQ ID NO: 205483 - DNA, 20 bp, synthetic construct
  source 1..20: mol_type = other DNA
ttccatctctgtgagaacac

SEQ ID NO: 205484 - DNA, 20 bp, synthetic construct
  source 1..20: mol_type = other DNA
tttccatctctgtgagaaca

SEQ ID NO: 205485 - DNA, 20 bp, synthetic construct
  source 1..20: mol_type = other DNA
ttttccatctctgtgagaac

SEQ ID NO: 205486 - DNA, 20 bp, synthetic construct
  source 1..20: mol_type = other DNA
attttccatctctgtgagaa

SEQ ID NO: 205487 - DNA, 20 bp, synthetic construct
  source 1..20: mol_type = other DNA
cattttccatctctgtgaga

SEQ ID NO: 205488 - DNA, 20 bp, synthetic construct
  source 1..20: mol_type = other DNA
gcattttccatctctgtgag

SEQ ID NO: 205489 - DNA, 20 bp, synthetic construct
  source 1..20: mol_type = other DNA
tgcattttccatctctgtga

SEQ ID NO: 205490 - DNA, 20 bp, synthetic construct
  source 1..20: mol_type = other DNA
ttgcattttccatctctgtg

SEQ ID NO: 205491 - DNA, 20 bp, synthetic construct
  source 1..20: mol_type = other DNA
tttgcattttccatctctgt

SEQ ID NO: 205492 - DNA, 20 bp, synthetic construct
  source 1..20: mol_type = other DNA
atttgcattttccatctctg

SEQ ID NO: 205493 - DNA, 20 bp, synthetic construct
  source 1..20: mol_type = other DNA
catttgcattttccatctct

SEQ ID NO: 205494 - DNA, 20 bp, synthetic construct
  source 1..20: mol_type = other DNA
ccatttgcattttccatctc

SEQ ID NO: 205495 - DNA, 20 bp, synthetic construct
  source 1..20: mol_type = other DNA
gccatttgcattttccatct

SEQ ID NO: 205496 - DNA, 20 bp, synthetic construct
  source 1..20: mol_type = other DNA
cgccatttgcattttccatc

SEQ ID NO: 205497 - DNA, 20 bp, synthetic construct
  source 1..20: mol_type = other DNA
gcgccatttgcattttccat

SEQ ID NO: 205498 - DNA, 20 bp, synthetic construct
  source 1..20: mol_type = other DNA
ggcgccatttgcattttcca

SEQ ID NO: 205499 - DNA, 20 bp, synthetic construct
  source 1..20: mol_type = other DNA
tggcgccatttgcattttcc

SEQ ID NO: 205500 - DNA, 20 bp, synthetic construct
  source 1..20: mol_type = other DNA
ctggcgccatttgcattttc

SEQ ID NO: 205501 - DNA, 20 bp, synthetic construct
  source 1..20: mol_type = other DNA
tctggcgccatttgcatttt

SEQ ID NO: 205502 - DNA, 20 bp, synthetic construct
  source 1..20: mol_type = other DNA
ttctggcgccatttgcattt

SEQ ID NO: 205503 - DNA, 20 bp, synthetic construct
  source 1..20: mol_type = other DNA
cttctggcgccatttgcatt

SEQ ID NO: 205504 - DNA, 20 bp, synthetic construct
  source 1..20: mol_type = other DNA
gcttctggcgccatttgcat

SEQ ID NO: 205505 - DNA, 20 bp, synthetic construct
  source 1..20: mol_type = other DNA
tgcttctggcgccatttgca

SEQ ID NO: 205506 - DNA, 20 bp, synthetic construct
  source 1..20: mol_type = other DNA
ttgcttctggcgccatttgc

SEQ ID NO: 205507 - DNA, 20 bp, synthetic construct
  source 1..20: mol_type = other DNA
cttgcttctggcgccatttg

SEQ ID NO: 205508 - DNA, 20 bp, synthetic construct
  source 1..20: mol_type = other DNA
gcttgcttctggcgccattt

SEQ ID NO: 205509 - DNA, 20 bp, synthetic construct
  source 1..20: mol_type = other DNA
agcttgcttctggcgccatt

SEQ ID NO: 205510 - DNA, 20 bp, synthetic construct
  source 1..20: mol_type = other DNA
cagcttgcttctggcgccat

SEQ ID NO: 205511 - DNA, 20 bp, synthetic construct
  source 1..20: mol_type = other DNA
ccagcttgcttctggcgcca

SEQ ID NO: 205512 - DNA, 20 bp, synthetic construct
  source 1..20: mol_type = other DNA
tccagcttgcttctggcgcc

SEQ ID NO: 205513 - DNA, 20 bp, synthetic construct
  source 1..20: mol_type = other DNA
ttccagcttgcttctggcgc

SEQ ID NO: 205514 - DNA, 20 bp, synthetic construct
  source 1..20: mol_type = other DNA
tttccagcttgcttctggcg

SEQ ID NO: 205515 - DNA, 20 bp, synthetic construct
  source 1..20: mol_type = other DNA
atttccagcttgcttctggc

SEQ ID NO: 205516 - DNA, 20 bp, synthetic construct
  source 1..20: mol_type = other DNA
aatttccagcttgcttctgg

SEQ ID NO: 205517 - DNA, 20 bp, synthetic construct
  source 1..20: mol_type = other DNA
gaatttccagcttgcttctg

SEQ ID NO: 205518 - DNA, 20 bp, synthetic construct
  source 1..20: mol_type = other DNA
agaatttccagcttgcttct

SEQ ID NO: 205519 - DNA, 20 bp, synthetic construct
  source 1..20: mol_type = other DNA
cagaatttccagcttgcttc

SEQ ID NO: 205520 - DNA, 20 bp, synthetic construct
  source 1..20: mol_type = other DNA
tcagaatttccagcttgctt

SEQ ID NO: 205521 - DNA, 20 bp, synthetic construct
  source 1..20: mol_type = other DNA
ttcagaatttccagcttgct

SEQ ID NO: 205522 - DNA, 20 bp, synthetic construct
  source 1..20: mol_type = other DNA
gttcagaatttccagcttgc

SEQ ID NO: 205523 - DNA, 20 bp, synthetic construct
  source 1..20: mol_type = other DNA
ggttcagaatttccagcttg

SEQ ID NO: 205524 - DNA, 20 bp, synthetic construct
  source 1..20: mol_type = other DNA
tggttcagaatttccagctt

SEQ ID NO: 205525 - DNA, 20 bp, synthetic construct
  source 1..20: mol_type = other DNA
atggttcagaatttccagct

SEQ ID NO: 205526 - DNA, 20 bp, synthetic construct
  source 1..20: mol_type = other DNA
aatggttcagaatttccagc

SEQ ID NO: 205527 - DNA, 20 bp, synthetic construct
  source 1..20: mol_type = other DNA
taatggttcagaatttccag

SEQ ID NO: 205528 - DNA, 20 bp, synthetic construct
  source 1..20: mol_type = other DNA
ttaatggttcagaatttcca

SEQ ID NO: 205529 - DNA, 20 bp, synthetic construct
  source 1..20: mol_type = other DNA
cttaatggttcagaatttcc

SEQ ID NO: 205530 - DNA, 20 bp, synthetic construct
  source 1..20: mol_type = other DNA
tcttaatggttcagaatttc

SEQ ID NO: 205531 - DNA, 20 bp, synthetic construct
  source 1..20: mol_type = other DNA
ttcttaatggttcagaattt

SEQ ID NO: 205532 - DNA, 20 bp, synthetic construct
  source 1..20: mol_type = other DNA
attcttaatggttcagaatt

SEQ ID NO: 205533 - DNA, 20 bp, synthetic construct
  source 1..20: mol_type = other DNA
aattcttaatggttcagaat

SEQ ID NO: 205534 - DNA, 20 bp, synthetic construct
  source 1..20: mol_type = other DNA
aaattcttaatggttcagaa

SEQ ID NO: 205535 - DNA, 20 bp, synthetic construct
  source 1..20: mol_type = other DNA
taaattcttaatggttcaga

SEQ ID NO: 205536 - DNA, 20 bp, synthetic construct
  source 1..20: mol_type = other DNA
gtaaattcttaatggttcag

SEQ ID NO: 205537 - DNA, 20 bp, synthetic construct
  source 1..20: mol_type = other DNA
agtaaattcttaatggttca

SEQ ID NO: 205538 - DNA, 20 bp, synthetic construct
  source 1..20: mol_type = other DNA
gagtaaattcttaatggttc

SEQ ID NO: 205539 - DNA, 20 bp, synthetic construct
  source 1..20: mol_type = other DNA
agagtaaattcttaatggtt

SEQ ID NO: 205540 - DNA, 20 bp, synthetic construct
  source 1..20: mol_type = other DNA
gagagtaaattcttaatggt

SEQ ID NO: 205541 - DNA, 20 bp, synthetic construct
  source 1..20: mol_type = other DNA
agagagtaaattcttaatgg

SEQ ID NO: 205542 - DNA, 20 bp, synthetic construct
  source 1..20: mol_type = other DNA
cagagagtaaattcttaatg

SEQ ID NO: 205543 - DNA, 20 bp, synthetic construct
  source 1..20: mol_type = other DNA
gcagagagtaaattcttaat

SEQ ID NO: 205544 - DNA, 20 bp, synthetic construct
  source 1..20: mol_type = other DNA
ggcagagagtaaattcttaa

SEQ ID NO: 205545 - DNA, 20 bp, synthetic construct
  source 1..20: mol_type = other DNA
tggcagagagtaaattctta

SEQ ID NO: 205546 - DNA, 20 bp, synthetic construct
  source 1..20: mol_type = other DNA
ctggcagagagtaaattctt

SEQ ID NO: 205547 - DNA, 20 bp, synthetic construct
  source 1..20: mol_type = other DNA
cctggcagagagtaaattct

SEQ ID NO: 205548 - DNA, 20 bp, synthetic construct
  source 1..20: mol_type = other DNA
gcctggcagagagtaaattc

SEQ ID NO: 205549 - DNA, 20 bp, synthetic construct
  source 1..20: mol_type = other DNA
tgcctggcagagagtaaatt

SEQ ID NO: 205550 - DNA, 20 bp, synthetic construct
  source 1..20: mol_type = other DNA
gtgcctggcagagagtaaat

SEQ ID NO: 205551 - DNA, 20 bp, synthetic construct
  source 1..20: mol_type = other DNA
cgtgcctggcagagagtaaa

SEQ ID NO: 205552 - DNA, 20 bp, synthetic construct
  source 1..20: mol_type = other DNA
ccgtgcctggcagagagtaa

SEQ ID NO: 205553 - DNA, 20 bp, synthetic construct
  source 1..20: mol_type = other DNA
accgtgcctggcagagagta

SEQ ID NO: 205554 - DNA, 20 bp, synthetic construct
  source 1..20: mol_type = other DNA
caccgtgcctggcagagagt

SEQ ID NO: 205555 - DNA, 20 bp, synthetic construct
  source 1..20: mol_type = other DNA
ccaccgtgcctggcagagag

SEQ ID NO: 205556 - DNA, 20 bp, synthetic construct
  source 1..20: mol_type = other DNA
gccaccgtgcctggcagaga

SEQ ID NO: 205557 - DNA, 20 bp, synthetic construct
  source 1..20: mol_type = other DNA
agccaccgtgcctggcagag

SEQ ID NO: 205558 - DNA, 20 bp, synthetic construct
  source 1..20: mol_type = other DNA
gagccaccgtgcctggcaga

SEQ ID NO: 205559 - DNA, 20 bp, synthetic construct
  source 1..20: mol_type = other DNA
tgagccaccgtgcctggcag

SEQ ID NO: 205560 - DNA, 20 bp, synthetic construct
  source 1..20: mol_type = other DNA
gtgagccaccgtgcctggca

SEQ ID NO: 205561 - DNA, 20 bp, synthetic construct
  source 1..20: mol_type = other DNA
cgtgagccaccgtgcctggc

SEQ ID NO: 205562 - DNA, 20 bp, synthetic construct
  source 1..20: mol_type = other DNA
gcgtgagccaccgtgcctgg

SEQ ID NO: 205563 - DNA, 20 bp, synthetic construct
  source 1..20: mol_type = other DNA
ggcgtgagccaccgtgcctg

SEQ ID NO: 205564 - DNA, 20 bp, synthetic construct
  source 1..20: mol_type = other DNA
aggcgtgagccaccgtgcct

SEQ ID NO: 205565 - DNA, 20 bp, synthetic construct
  source 1..20: mol_type = other DNA
caggcgtgagccaccgtgcc

SEQ ID NO: 205566 - DNA, 20 bp, synthetic construct
  source 1..20: mol_type = other DNA
acaggcgtgagccaccgtgc

SEQ ID NO: 205567 - DNA, 20 bp, synthetic construct
  source 1..20: mol_type = other DNA
tacaggcgtgagccaccgtg

SEQ ID NO: 205568 - DNA, 20 bp, synthetic construct
  source 1..20: mol_type = other DNA
ttacaggcgtgagccaccgt

SEQ ID NO: 205569 - DNA, 20 bp, synthetic construct
  source 1..20: mol_type = other DNA
attacaggcgtgagccaccg

SEQ ID NO: 205570 - DNA, 20 bp, synthetic construct
  source 1..20: mol_type = other DNA
gattacaggcgtgagccacc

SEQ ID NO: 205571 - DNA, 20 bp, synthetic construct
  source 1..20: mol_type = other DNA
ggattacaggcgtgagccac

SEQ ID NO: 205572 - DNA, 20 bp, synthetic construct
  source 1..20: mol_type = other DNA
gggattacaggcgtgagcca

SEQ ID NO: 205573 - DNA, 20 bp, synthetic construct
  source 1..20: mol_type = other DNA
tgggattacaggcgtgagcc

SEQ ID NO: 205574 - DNA, 20 bp, synthetic construct
  source 1..20: mol_type = other DNA
ctgggattacaggcgtgagc

SEQ ID NO: 205575 - DNA, 20 bp, synthetic construct
  source 1..20: mol_type = other DNA
cctgggattacaggcgtgag

SEQ ID NO: 205576 - DNA, 20 bp, synthetic construct
  source 1..20: mol_type = other DNA
tcctgggattacaggcgtga

SEQ ID NO: 205577 - DNA, 20 bp, synthetic construct
  source 1..20: mol_type = other DNA
gtcctgggattacaggcgtg

SEQ ID NO: 205578 - DNA, 20 bp, synthetic construct
  source 1..20: mol_type = other DNA
agtcctgggattacaggcgt

SEQ ID NO: 205579 - DNA, 20 bp, synthetic construct
  source 1..20: mol_type = other DNA
aagtcctgggattacaggcg

SEQ ID NO: 205580 - DNA, 20 bp, synthetic construct
  source 1..20: mol_type = other DNA
aaagtcctgggattacaggc

SEQ ID NO: 205581 - DNA, 20 bp, synthetic construct
  source 1..20: mol_type = other DNA
caaagtcctgggattacagg

SEQ ID NO: 205582 - DNA, 20 bp, synthetic construct
  source 1..20: mol_type = other DNA
ccaaagtcctgggattacag

SEQ ID NO: 205583 - DNA, 20 bp, synthetic construct
  source 1..20: mol_type = other DNA
cccaaagtcctgggattaca

SEQ ID NO: 205584 - DNA, 20 bp, synthetic construct
  source 1..20: mol_type = other DNA
tcccaaagtcctgggattac

SEQ ID NO: 205585 - DNA, 20 bp, synthetic construct
  source 1..20: mol_type = other DNA
ctcccaaagtcctgggatta

SEQ ID NO: 205586 - DNA, 20 bp, synthetic construct
  source 1..20: mol_type = other DNA
cctcccaaagtcctgggatt

SEQ ID NO: 205587 - DNA, 20 bp, synthetic construct
  source 1..20: mol_type = other DNA
gcctcccaaagtcctgggat

SEQ ID NO: 205588 - DNA, 20 bp, synthetic construct
  source 1..20: mol_type = other DNA
agcctcccaaagtcctggga

SEQ ID NO: 205589 - DNA, 20 bp, synthetic construct
  source 1..20: mol_type = other DNA
cagcctcccaaagtcctggg

SEQ ID NO: 205590 - DNA, 20 bp, synthetic construct
  source 1..20: mol_type = other DNA
tcagcctcccaaagtcctgg

SEQ ID NO: 205591 - DNA, 20 bp, synthetic construct
  source 1..20: mol_type = other DNA
ctcagcctcccaaagtcctg

SEQ ID NO: 205592 - DNA, 20 bp, synthetic construct
  source 1..20: mol_type = other DNA
cctcagcctcccaaagtcct

SEQ ID NO: 205593 - DNA, 20 bp, synthetic construct
  source 1..20: mol_type = other DNA
gcctcagcctcccaaagtcc

SEQ ID NO: 205594 - DNA, 20 bp, synthetic construct
  source 1..20: mol_type = other DNA
tgcctcagcctcccaaagtc

SEQ ID NO: 205595 - DNA, 20 bp, synthetic construct
  source 1..20: mol_type = other DNA
ctgcctcagcctcccaaagt

SEQ ID NO: 205596 - DNA, 20 bp, synthetic construct
  source 1..20: mol_type = other DNA
cctgcctcagcctcccaaag

SEQ ID NO: 205597 - DNA, 20 bp, synthetic construct
  source 1..20: mol_type = other DNA
gcctgcctcagcctcccaaa

SEQ ID NO: 205598 - DNA, 20 bp, synthetic construct
  source 1..20: mol_type = other DNA
tgcctgcctcagcctcccaa

SEQ ID NO: 205599 - DNA, 20 bp, synthetic construct
  source 1..20: mol_type = other DNA
ctgcctgcctcagcctccca

SEQ ID NO: 205600 - DNA, 20 bp, synthetic construct
  source 1..20: mol_type = other DNA
tctgcctgcctcagcctccc

SEQ ID NO: 205601 - DNA, 20 bp, synthetic construct
  source 1..20: mol_type = other DNA
atctgcctgcctcagcctcc

SEQ ID NO: 205602 - DNA, 20 bp, synthetic construct
  source 1..20: mol_type = other DNA
gatctgcctgcctcagcctc

SEQ ID NO: 205603 - DNA, 20 bp, synthetic construct
  source 1..20: mol_type = other DNA
tgatctgcctgcctcagcct

SEQ ID NO: 205604 - DNA, 20 bp, synthetic construct
  source 1..20: mol_type = other DNA
atgatctgcctgcctcagcc

SEQ ID NO: 205605 - DNA, 20 bp, synthetic construct
  source 1..20: mol_type = other DNA
gatgatctgcctgcctcagc

SEQ ID NO: 205606 - DNA, 20 bp, synthetic construct
  source 1..20: mol_type = other DNA
agatgatctgcctgcctcag

SEQ ID NO: 205607 - DNA, 20 bp, synthetic construct
  source 1..20: mol_type = other DNA
cagatgatctgcctgcctca

SEQ ID NO: 205608 - DNA, 20 bp, synthetic construct
  source 1..20: mol_type = other DNA
tcagatgatctgcctgcctc

SEQ ID NO: 205609 - DNA, 20 bp, synthetic construct
  source 1..20: mol_type = other DNA
ctcagatgatctgcctgcct

SEQ ID NO: 205610 - DNA, 20 bp, synthetic construct
  source 1..20: mol_type = other DNA
cctcagatgatctgcctgcc

SEQ ID NO: 205611 - DNA, 20 bp, synthetic construct
  source 1..20: mol_type = other DNA
acctcagatgatctgcctgc

SEQ ID NO: 205612 - DNA, 20 bp, synthetic construct
  source 1..20: mol_type = other DNA
gacctcagatgatctgcctg

SEQ ID NO: 205613 - DNA, 20 bp, synthetic construct
  source 1..20: mol_type = other DNA
tgacctcagatgatctgcct

SEQ ID NO: 205614 - DNA, 20 bp, synthetic construct
  source 1..20: mol_type = other DNA
ctgacctcagatgatctgcc

SEQ ID NO: 205615 - DNA, 20 bp, synthetic construct
  source 1..20: mol_type = other DNA
cctgacctcagatgatctgc

SEQ ID NO: 205616 - DNA, 20 bp, synthetic construct
  source 1..20: mol_type = other DNA
tcctgacctcagatgatctg

SEQ ID NO: 205617 - DNA, 20 bp, synthetic construct
  source 1..20: mol_type = other DNA
ctcctgacctcagatgatct

SEQ ID NO: 205618 - DNA, 20 bp, synthetic construct
  source 1..20: mol_type = other DNA
actcctgacctcagatgatc

SEQ ID NO: 205619 - DNA, 20 bp, synthetic construct
  source 1..20: mol_type = other DNA
aactcctgacctcagatgat

SEQ ID NO: 205620 - DNA, 20 bp, synthetic construct
  source 1..20: mol_type = other DNA
gaactcctgacctcagatga

SEQ ID NO: 205621 - DNA, 20 bp, synthetic construct
  source 1..20: mol_type = other DNA
tgaactcctgacctcagatg

SEQ ID NO: 205622 - DNA, 20 bp, synthetic construct
  source 1..20: mol_type = other DNA
ttgaactcctgacctcagat

SEQ ID NO: 205623 - DNA, 20 bp, synthetic construct
  source 1..20: mol_type = other DNA
cttgaactcctgacctcaga

SEQ ID NO: 205624 - DNA, 20 bp, synthetic construct
  source 1..20: mol_type = other DNA
tcttgaactcctgacctcag

SEQ ID NO: 205625 - DNA, 20 bp, synthetic construct
  source 1..20: mol_type = other DNA
gtcttgaactcctgacctca

SEQ ID NO: 205626 - DNA, 20 bp, synthetic construct
  source 1..20: mol_type = other DNA
ggtcttgaactcctgacctc

SEQ ID NO: 205627 - DNA, 20 bp, synthetic construct
  source 1..20: mol_type = other DNA
tggtcttgaactcctgacct

SEQ ID NO: 205628 - DNA, 20 bp, synthetic construct
  source 1..20: mol_type = other DNA
ctggtcttgaactcctgacc

SEQ ID NO: 205629 - DNA, 20 bp, synthetic construct
  source 1..20: mol_type = other DNA
gctggtcttgaactcctgac

SEQ ID NO: 205630 - DNA, 20 bp, synthetic construct
  source 1..20: mol_type = other DNA
ggctggtcttgaactcctga

SEQ ID NO: 205631 - DNA, 20 bp, synthetic construct
  source 1..20: mol_type = other DNA
aggctggtcttgaactcctg

SEQ ID NO: 205632 - DNA, 20 bp, synthetic construct
  source 1..20: mol_type = other DNA
caggctggtcttgaactcct

SEQ ID NO: 205633 - DNA, 20 bp, synthetic construct
  source 1..20: mol_type = other DNA
ccaggctggtcttgaactcc

SEQ ID NO: 205634 - DNA, 20 bp, synthetic construct
  source 1..20: mol_type = other DNA
gccaggctggtcttgaactc

SEQ ID NO: 205635 - DNA, 20 bp, synthetic construct
  source 1..20: mol_type = other DNA
ggccaggctggtcttgaact

SEQ ID NO: 205636 - DNA, 20 bp, synthetic construct
  source 1..20: mol_type = other DNA
tggccaggctggtcttgaac

SEQ ID NO: 205637 - DNA, 20 bp, synthetic construct
  source 1..20: mol_type = other DNA
ttggccaggctggtcttgaa

SEQ ID NO: 205638 - DNA, 20 bp, synthetic construct
  source 1..20: mol_type = other DNA
gttggccaggctggtcttga

SEQ ID NO: 205639 - DNA, 20 bp, synthetic construct
  source 1..20: mol_type = other DNA
tgttggccaggctggtcttg

SEQ ID NO: 205640 - DNA, 20 bp, synthetic construct
  source 1..20: mol_type = other DNA
atgttggccaggctggtctt

SEQ ID NO: 205641 - DNA, 20 bp, synthetic construct
  source 1..20: mol_type = other DNA
catgttggccaggctggtct

SEQ ID NO: 205642 - DNA, 20 bp, synthetic construct
  source 1..20: mol_type = other DNA
ccatgttggccaggctggtc

SEQ ID NO: 205643 - DNA, 20 bp, synthetic construct
  source 1..20: mol_type = other DNA
accatgttggccaggctggt

SEQ ID NO: 205644 - DNA, 20 bp, synthetic construct
  source 1..20: mol_type = other DNA
caccatgttggccaggctgg

SEQ ID NO: 205645 - DNA, 20 bp, synthetic construct
  source 1..20: mol_type = other DNA
tcaccatgttggccaggctg

SEQ ID NO: 205646 - DNA, 20 bp, synthetic construct
  source 1..20: mol_type = other DNA
ttcaccatgttggccaggct

SEQ ID NO: 205647 - DNA, 20 bp, synthetic construct
  source 1..20: mol_type = other DNA
tttcaccatgttggccaggc

SEQ ID NO: 205648 - DNA, 20 bp, synthetic construct
  source 1..20: mol_type = other DNA
gtttcaccatgttggccagg

SEQ ID NO: 205649 - DNA, 20 bp, synthetic construct
  source 1..20: mol_type = other DNA
agtttcaccatgttggccag

SEQ ID NO: 205650 - DNA, 20 bp, synthetic construct
  source 1..20: mol_type = other DNA
aagtttcaccatgttggcca

SEQ ID NO: 205651 - DNA, 20 bp, synthetic construct
  source 1..20: mol_type = other DNA
gaagtttcaccatgttggcc

SEQ ID NO: 205652 - DNA, 20 bp, synthetic construct
  source 1..20: mol_type = other DNA
tgaagtttcaccatgttggc

SEQ ID NO: 205653 - DNA, 20 bp, synthetic construct
  source 1..20: mol_type = other DNA
atgaagtttcaccatgttgg

SEQ ID NO: 205654 - DNA, 20 bp, synthetic construct
  source 1..20: mol_type = other DNA
gatgaagtttcaccatgttg

SEQ ID NO: 205655 - DNA, 20 bp, synthetic construct
  source 1..20: mol_type = other DNA
agatgaagtttcaccatgtt

SEQ ID NO: 205656 - DNA, 20 bp, synthetic construct
  source 1..20: mol_type = other DNA
gagatgaagtttcaccatgt

SEQ ID NO: 205657 - DNA, 20 bp, synthetic construct
  source 1..20: mol_type = other DNA
agagatgaagtttcaccatg

SEQ ID NO: 205658 - DNA, 20 bp, synthetic construct
  source 1..20: mol_type = other DNA
tagagatgaagtttcaccat

SEQ ID NO: 205659 - DNA, 20 bp, synthetic construct
  source 1..20: mol_type = other DNA
gtagagatgaagtttcacca

SEQ ID NO: 205660 - DNA, 20 bp, synthetic construct
  source 1..20: mol_type = other DNA
tgtagagatgaagtttcacc

SEQ ID NO: 205661 - DNA, 20 bp, synthetic construct
  source 1..20: mol_type = other DNA
ttgtagagatgaagtttcac

SEQ ID NO: 205662 - DNA, 20 bp, synthetic construct
  source 1..20: mol_type = other DNA
tttgtagagatgaagtttca

SEQ ID NO: 205663 - DNA, 20 bp, synthetic construct
  source 1..20: mol_type = other DNA
ttttgtagagatgaagtttc

SEQ ID NO: 205664 - DNA, 20 bp, synthetic construct
  source 1..20: mol_type = other DNA
tttttgtagagatgaagttt

SEQ ID NO: 205665 - DNA, 20 bp, synthetic construct
  source 1..20: mol_type = other DNA
atttttgtagagatgaagtt

SEQ ID NO: 205666 - DNA, 20 bp, synthetic construct
  source 1..20: mol_type = other DNA
tatttttgtagagatgaagt

SEQ ID NO: 205667 - DNA, 20 bp, synthetic construct
  source 1..20: mol_type = other DNA
gtatttttgtagagatgaag

SEQ ID NO: 205668 - DNA, 20 bp, synthetic construct
  source 1..20: mol_type = other DNA
tgtatttttgtagagatgaa

SEQ ID NO: 205669 - DNA, 20 bp, synthetic construct
  source 1..20: mol_type = other DNA
ttgtatttttgtagagatga

SEQ ID NO: 205670 - DNA, 20 bp, synthetic construct
  source 1..20: mol_type = other DNA
tttgtatttttgtagagatg

SEQ ID NO: 205671 - DNA, 20 bp, synthetic construct
  source 1..20: mol_type = other DNA
ttttgtatttttgtagagat

SEQ ID NO: 205672 - DNA, 20 bp, synthetic construct
  source 1..20: mol_type = other DNA
tttttgtatttttgtagaga

SEQ ID NO: 205673 - DNA, 20 bp, synthetic construct
  source 1..20: mol_type = other DNA
atttttgtatttttgtagag

SEQ ID NO: 205674 - DNA, 20 bp, synthetic construct
  source 1..20: mol_type = other DNA
aatttttgtatttttgtaga

SEQ ID NO: 205675 - DNA, 20 bp, synthetic construct
  source 1..20: mol_type = other DNA
taatttttgtatttttgtag

SEQ ID NO: 205676 - DNA, 20 bp, synthetic construct
  source 1..20: mol_type = other DNA
ctaatttttgtatttttgta

SEQ ID NO: 205677 - DNA, 20 bp, synthetic construct
  source 1..20: mol_type = other DNA
gctaatttttgtatttttgt

SEQ ID NO: 205678 - DNA, 20 bp, synthetic construct
  source 1..20: mol_type = other DNA
ggctaatttttgtatttttg

SEQ ID NO: 205679 - DNA, 20 bp, synthetic construct
  source 1..20: mol_type = other DNA
tggctaatttttgtattttt

SEQ ID NO: 205680 - DNA, 20 bp, synthetic construct
  source 1..20: mol_type = other DNA
ctggctaatttttgtatttt

SEQ ID NO: 205681 - DNA, 20 bp, synthetic construct
  source 1..20: mol_type = other DNA
cctggctaatttttgtattt

SEQ ID NO: 205682 - DNA, 20 bp, synthetic construct
  source 1..20: mol_type = other DNA
gcctggctaatttttgtatt

SEQ ID NO: 205683 - DNA, 20 bp, synthetic construct
  source 1..20: mol_type = other DNA
tgcctggctaatttttgtat

SEQ ID NO: 205684 - DNA, 20 bp, synthetic construct
  source 1..20: mol_type = other DNA
atgcctggctaatttttgta

SEQ ID NO: 205685 - DNA, 20 bp, synthetic construct
  source 1..20: mol_type = other DNA
catgcctggctaatttttgt

SEQ ID NO: 205686 - DNA, 20 bp, synthetic construct
  source 1..20: mol_type = other DNA
tcatgcctggctaatttttg

SEQ ID NO: 205687 - DNA, 20 bp, synthetic construct
  source 1..20: mol_type = other DNA
atcatgcctggctaattttt

SEQ ID NO: 205688 - DNA, 20 bp, synthetic construct
  source 1..20: mol_type = other DNA
catcatgcctggctaatttt

SEQ ID NO: 205689 - DNA, 20 bp, synthetic construct
  source 1..20: mol_type = other DNA
ccatcatgcctggctaattt

SEQ ID NO: 205690 - DNA, 20 bp, synthetic construct
  source 1..20: mol_type = other DNA
accatcatgcctggctaatt

SEQ ID NO: 205691 - DNA, 20 bp, synthetic construct
  source 1..20: mol_type = other DNA
caccatcatgcctggctaat

SEQ ID NO: 205692 - DNA, 20 bp, synthetic construct
  source 1..20: mol_type = other DNA
ccaccatcatgcctggctaa

SEQ ID NO: 205693 - DNA, 20 bp, synthetic construct
  source 1..20: mol_type = other DNA
cccaccatcatgcctggcta

SEQ ID NO: 205694 - DNA, 20 bp, synthetic construct
  source 1..20: mol_type = other DNA
acccaccatcatgcctggct

SEQ ID NO: 205695 - DNA, 20 bp, synthetic construct
  source 1..20: mol_type = other DNA
cacccaccatcatgcctggc

SEQ ID NO: 205696 - DNA, 20 bp, synthetic construct
  source 1..20: mol_type = other DNA
gcacccaccatcatgcctgg

SEQ ID NO: 205697 - DNA, 20 bp, synthetic construct
  source 1..20: mol_type = other DNA
ggcacccaccatcatgcctg

SEQ ID NO: 205698 - DNA, 20 bp, synthetic construct
  source 1..20: mol_type = other DNA
aggcacccaccatcatgcct

SEQ ID NO: 205699 - DNA, 20 bp, synthetic construct
  source 1..20: mol_type = other DNA
caggcacccaccatcatgcc

SEQ ID NO: 205700 - DNA, 20 bp, synthetic construct
  source 1..20: mol_type = other DNA
acaggcacccaccatcatgc

SEQ ID NO: 205701 - DNA, 20 bp, synthetic construct
  source 1..20: mol_type = other DNA
tacaggcacccaccatcatg

SEQ ID NO: 205702 - DNA, 20 bp, synthetic construct
  source 1..20: mol_type = other DNA
ttacaggcacccaccatcat

SEQ ID NO: 205703 - DNA, 20 bp, synthetic construct
  source 1..20: mol_type = other DNA
attacaggcacccaccatca

SEQ ID NO: 205704 - DNA, 20 bp, synthetic construct
  source 1..20: mol_type = other DNA
gattacaggcacccaccatc

SEQ ID NO: 205705 - DNA, 20 bp, synthetic construct
  source 1..20: mol_type = other DNA
ggattacaggcacccaccat

SEQ ID NO: 205706 - DNA, 20 bp, synthetic construct
  source 1..20: mol_type = other DNA
gggattacaggcacccacca

SEQ ID NO: 205707 - DNA, 20 bp, synthetic construct
  source 1..20: mol_type = other DNA
tgggattacaggcacccacc

SEQ ID NO: 205708 - DNA, 20 bp, synthetic construct
  source 1..20: mol_type = other DNA
ctgggattacaggcacccac

SEQ ID NO: 205709 - DNA, 20 bp, synthetic construct
  source 1..20: mol_type = other DNA
gctgggattacaggcaccca

SEQ ID NO: 205710 - DNA, 20 bp, synthetic construct
  source 1..20: mol_type = other DNA
agctgggattacaggcaccc

SEQ ID NO: 205711 - DNA, 20 bp, synthetic construct
  source 1..20: mol_type = other DNA
tagctgggattacaggcacc

SEQ ID NO: 205712 - DNA, 20 bp, synthetic construct
  source 1..20: mol_type = other DNA
gtagctgggattacaggcac

SEQ ID NO: 205713 - DNA, 20 bp, synthetic construct
  source 1..20: mol_type = other DNA
agtagctgggattacaggca

SEQ ID NO: 205714 - DNA, 20 bp, synthetic construct
  source 1..20: mol_type = other DNA
gagtagctgggattacaggc

SEQ ID NO: 205715 - DNA, 20 bp, synthetic construct
  source 1..20: mol_type = other DNA
cgagtagctgggattacagg

SEQ ID NO: 205716 - DNA, 20 bp, synthetic construct
  source 1..20: mol_type = other DNA
ccgagtagctgggattacag

SEQ ID NO: 205717 - DNA, 20 bp, synthetic construct
  source 1..20: mol_type = other DNA
cccgagtagctgggattaca

SEQ ID NO: 205718 - DNA, 20 bp, synthetic construct
  source 1..20: mol_type = other DNA
tcccgagtagctgggattac

SEQ ID NO: 205719 - DNA, 20 bp, synthetic construct
  source 1..20: mol_type = other DNA
ctcccgagtagctgggatta

SEQ ID NO: 205720 - DNA, 20 bp, synthetic construct
  source 1..20: mol_type = other DNA
cctcccgagtagctgggatt

SEQ ID NO: 205721 - DNA, 20 bp, synthetic construct
  source 1..20: mol_type = other DNA
gcctcccgagtagctgggat

SEQ ID NO: 205722 - DNA, 20 bp, synthetic construct
  source 1..20: mol_type = other DNA
agcctcccgagtagctggga

SEQ ID NO: 205723 - DNA, 20 bp, synthetic construct
  source 1..20: mol_type = other DNA
cagcctcccgagtagctggg

SEQ ID NO: 205724 - DNA, 20 bp, synthetic construct
  source 1..20: mol_type = other DNA
tcagcctcccgagtagctgg

SEQ ID NO: 205725 - DNA, 20 bp, synthetic construct
  source 1..20: mol_type = other DNA
ctcagcctcccgagtagctg

SEQ ID NO: 205726 - DNA, 20 bp, synthetic construct
  source 1..20: mol_type = other DNA
cctcagcctcccgagtagct

SEQ ID NO: 205727 - DNA, 20 bp, synthetic construct
  source 1..20: mol_type = other DNA
gcctcagcctcccgagtagc

SEQ ID NO: 205728 - DNA, 20 bp, synthetic construct
  source 1..20: mol_type = other DNA
tgcctcagcctcccgagtag

SEQ ID NO: 205729 - DNA, 20 bp, synthetic construct
  source 1..20: mol_type = other DNA
ctgcctcagcctcccgagta

SEQ ID NO: 205730 - DNA, 20 bp, synthetic construct
  source 1..20: mol_type = other DNA
cctgcctcagcctcccgagt

SEQ ID NO: 205731 - DNA, 20 bp, synthetic construct
  source 1..20: mol_type = other DNA
tcctgcctcagcctcccgag

SEQ ID NO: 205732 - DNA, 20 bp, synthetic construct
  source 1..20: mol_type = other DNA
ctcctgcctcagcctcccga

SEQ ID NO: 205733 - DNA, 20 bp, synthetic construct
  source 1..20: mol_type = other DNA
tctcctgcctcagcctcccg

SEQ ID NO: 205734 - DNA, 20 bp, synthetic construct
  source 1..20: mol_type = other DNA
ttctcctgcctcagcctccc

SEQ ID NO: 205735 - DNA, 20 bp, synthetic construct
  source 1..20: mol_type = other DNA
attctcctgcctcagcctcc

SEQ ID NO: 205736 - DNA, 20 bp, synthetic construct
  source 1..20: mol_type = other DNA
gattctcctgcctcagcctc

SEQ ID NO: 205737 - DNA, 20 bp, synthetic construct
  source 1..20: mol_type = other DNA
cgattctcctgcctcagcct

SEQ ID NO: 205738 - DNA, 20 bp, synthetic construct
  source 1..20: mol_type = other DNA
gcgattctcctgcctcagcc

SEQ ID NO: 205739 - DNA, 20 bp, synthetic construct
  source 1..20: mol_type = other DNA
agcgattctcctgcctcagc

SEQ ID NO: 205740 - DNA, 20 bp, synthetic construct
  source 1..20: mol_type = other DNA
aagcgattctcctgcctcag

SEQ ID NO: 205741 - DNA, 20 bp, synthetic construct
  source 1..20: mol_type = other DNA
caagcgattctcctgcctca

SEQ ID NO: 205742 - DNA, 20 bp, synthetic construct
  source 1..20: mol_type = other DNA
gcaagcgattctcctgcctc

SEQ ID NO: 205743 - DNA, 20 bp, synthetic construct
  source 1..20: mol_type = other DNA
tgcaagcgattctcctgcct

SEQ ID NO: 205744 - DNA, 20 bp, synthetic construct
  source 1..20: mol_type = other DNA
gtgcaagcgattctcctgcc

SEQ ID NO: 205745 - DNA, 20 bp, synthetic construct
  source 1..20: mol_type = other DNA
ggtgcaagcgattctcctgc

SEQ ID NO: 205746 - DNA, 20 bp, synthetic construct
  source 1..20: mol_type = other DNA
aggtgcaagcgattctcctg

SEQ ID NO: 205747 - DNA, 20 bp, synthetic construct
  source 1..20: mol_type = other DNA
caggtgcaagcgattctcct

SEQ ID NO: 205748 - DNA, 20 bp, synthetic construct
  source 1..20: mol_type = other DNA
tcaggtgcaagcgattctcc

SEQ ID NO: 205749 - DNA, 20 bp, synthetic construct
  source 1..20: mol_type = other DNA
ctcaggtgcaagcgattctc

SEQ ID NO: 205750 - DNA, 20 bp, synthetic construct
  source 1..20: mol_type = other DNA
tctcaggtgcaagcgattct

SEQ ID NO: 205751 - DNA, 20 bp, synthetic construct
  source 1..20: mol_type = other DNA
ctctcaggtgcaagcgattc

SEQ ID NO: 205752 - DNA, 20 bp, synthetic construct
  source 1..20: mol_type = other DNA
cctctcaggtgcaagcgatt

SEQ ID NO: 205753 - DNA, 20 bp, synthetic construct
  source 1..20: mol_type = other DNA
acctctcaggtgcaagcgat

SEQ ID NO: 205754 - DNA, 20 bp, synthetic construct
  source 1..20: mol_type = other DNA
cacctctcaggtgcaagcga

SEQ ID NO: 205755 - DNA, 20 bp, synthetic construct
  source 1..20: mol_type = other DNA
ccacctctcaggtgcaagcg

SEQ ID NO: 205756 - DNA, 20 bp, synthetic construct
  source 1..20: mol_type = other DNA
tccacctctcaggtgcaagc

SEQ ID NO: 205757 - DNA, 20 bp, synthetic construct
  source 1..20: mol_type = other DNA
ctccacctctcaggtgcaag

SEQ ID NO: 205758 - DNA, 20 bp, synthetic construct
  source 1..20: mol_type = other DNA
cctccacctctcaggtgcaa

SEQ ID NO: 205759 - DNA, 20 bp, synthetic construct
  source 1..20: mol_type = other DNA
acctccacctctcaggtgca

SEQ ID NO: 205760 - DNA, 20 bp, synthetic construct
  source 1..20: mol_type = other DNA
aacctccacctctcaggtgc

SEQ ID NO: 205761 - DNA, 20 bp, synthetic construct
  source 1..20: mol_type = other DNA
caacctccacctctcaggtg

SEQ ID NO: 205762 - DNA, 20 bp, synthetic construct
  source 1..20: mol_type = other DNA
gcaacctccacctctcaggt

SEQ ID NO: 205763 - DNA, 20 bp, synthetic construct
  source 1..20: mol_type = other DNA
tgcaacctccacctctcagg

SEQ ID NO: 205764 - DNA, 20 bp, synthetic construct
  source 1..20: mol_type = other DNA
ctgcaacctccacctctcag

SEQ ID NO: 205765 - DNA, 20 bp, synthetic construct
  source 1..20: mol_type = other DNA
actgcaacctccacctctca

SEQ ID NO: 205766 - DNA, 20 bp, synthetic construct
  source 1..20: mol_type = other DNA
cactgcaacctccacctctc

SEQ ID NO: 205767 - DNA, 20 bp, synthetic construct
  source 1..20: mol_type = other DNA
tcactgcaacctccacctct

SEQ ID NO: 205768 - DNA, 20 bp, synthetic construct
  source 1..20: mol_type = other DNA
ctcactgcaacctccacctc

SEQ ID NO: 205769 - DNA, 20 bp, synthetic construct
  source 1..20: mol_type = other DNA
gctcactgcaacctccacct

SEQ ID NO: 205770 - DNA, 20 bp, synthetic construct
  source 1..20: mol_type = other DNA
ggctcactgcaacctccacc

SEQ ID NO: 205771 - DNA, 20 bp, synthetic construct
  source 1..20: mol_type = other DNA
cggctcactgcaacctccac

SEQ ID NO: 205772 - DNA, 20 bp, synthetic construct
  source 1..20: mol_type = other DNA
tcggctcactgcaacctcca

SEQ ID NO: 205773 - DNA, 20 bp, synthetic construct
  source 1..20: mol_type = other DNA
ctcggctcactgcaacctcc

SEQ ID NO: 205774 - DNA, 20 bp, synthetic construct
  source 1..20: mol_type = other DNA
tctcggctcactgcaacctc

SEQ ID NO: 205775 - DNA, 20 bp, synthetic construct
  source 1..20: mol_type = other DNA
atctcggctcactgcaacct

SEQ ID NO: 205776 - DNA, 20 bp, synthetic construct
  source 1..20: mol_type = other DNA
gatctcggctcactgcaacc

SEQ ID NO: 205777 - DNA, 20 bp, synthetic construct
  source 1..20: mol_type = other DNA
agatctcggctcactgcaac

SEQ ID NO: 205778 - DNA, 20 bp, synthetic construct
  source 1..20: mol_type = other DNA
tagatctcggctcactgcaa

SEQ ID NO: 205779 - DNA, 20 bp, synthetic construct
  source 1..20: mol_type = other DNA
atagatctcggctcactgca

SEQ ID NO: 205780 - DNA, 20 bp, synthetic construct
  source 1..20: mol_type = other DNA
gatagatctcggctcactgc

SEQ ID NO: 205781 - DNA, 20 bp, synthetic construct
  source 1..20: mol_type = other DNA
agatagatctcggctcactg

SEQ ID NO: 205782 - DNA, 20 bp, synthetic construct
  source 1..20: mol_type = other DNA
cagatagatctcggctcact

SEQ ID NO: 205783 - DNA, 20 bp, synthetic construct
  source 1..20: mol_type = other DNA
gcagatagatctcggctcac

SEQ ID NO: 205784 - DNA, 20 bp, synthetic construct
  source 1..20: mol_type = other DNA
tgcagatagatctcggctca

SEQ ID NO: 205785 - DNA, 20 bp, synthetic construct
  source 1..20: mol_type = other DNA
gtgcagatagatctcggctc

SEQ ID NO: 205786 - DNA, 20 bp, synthetic construct
  source 1..20: mol_type = other DNA
ggtgcagatagatctcggct

SEQ ID NO: 205787 - DNA, 20 bp, synthetic construct
  source 1..20: mol_type = other DNA
tggtgcagatagatctcggc

SEQ ID NO: 205788 - DNA, 20 bp, synthetic construct
  source 1..20: mol_type = other DNA
atggtgcagatagatctcgg

SEQ ID NO: 205789 - DNA, 20 bp, synthetic construct
  source 1..20: mol_type = other DNA
aatggtgcagatagatctcg

SEQ ID NO: 205790 - DNA, 20 bp, synthetic construct
  source 1..20: mol_type = other DNA
caatggtgcagatagatctc

SEQ ID NO: 205791 - DNA, 20 bp, synthetic construct
  source 1..20: mol_type = other DNA
gcaatggtgcagatagatct

SEQ ID NO: 205792 - DNA, 20 bp, synthetic construct
  source 1..20: mol_type = other DNA
tgcaatggtgcagatagatc

SEQ ID NO: 205793 - DNA, 20 bp, synthetic construct
  source 1..20: mol_type = other DNA
gtgcaatggtgcagatagat

SEQ ID NO: 205794 - DNA, 20 bp, synthetic construct
  source 1..20: mol_type = other DNA
agtgcaatggtgcagataga

SEQ ID NO: 205795 - DNA, 20 bp, synthetic construct
  source 1..20: mol_type = other DNA
aagtgcaatggtgcagatag

SEQ ID NO: 205796 - DNA, 20 bp, synthetic construct
  source 1..20: mol_type = other DNA
gaagtgcaatggtgcagata

SEQ ID NO: 205797 - DNA, 20 bp, synthetic construct
  source 1..20: mol_type = other DNA
tgaagtgcaatggtgcagat

SEQ ID NO: 205798 - DNA, 20 bp, synthetic construct
  source 1..20: mol_type = other DNA
ctgaagtgcaatggtgcaga

SEQ ID NO: 205799 - DNA, 20 bp, synthetic construct
  source 1..20: mol_type = other DNA
gctgaagtgcaatggtgcag

SEQ ID NO: 205800 - DNA, 20 bp, synthetic construct
  source 1..20: mol_type = other DNA
ggctgaagtgcaatggtgca

SEQ ID NO: 205801 - DNA, 20 bp, synthetic construct
  source 1..20: mol_type = other DNA
aggctgaagtgcaatggtgc

SEQ ID NO: 205802 - DNA, 20 bp, synthetic construct
  source 1..20: mol_type = other DNA
caggctgaagtgcaatggtg

SEQ ID NO: 205803 - DNA, 20 bp, synthetic construct
  source 1..20: mol_type = other DNA
ccaggctgaagtgcaatggt

SEQ ID NO: 205804 - DNA, 20 bp, synthetic construct
  source 1..20: mol_type = other DNA
cccaggctgaagtgcaatgg

SEQ ID NO: 205805 - DNA, 20 bp, synthetic construct
  source 1..20: mol_type = other DNA
tcccaggctgaagtgcaatg

SEQ ID NO: 205806 - DNA, 20 bp, synthetic construct
  source 1..20: mol_type = other DNA
ctcccaggctgaagtgcaat

SEQ ID NO: 205807 - DNA, 20 bp, synthetic construct
  source 1..20: mol_type = other DNA
tctcccaggctgaagtgcaa

SEQ ID NO: 205808 - DNA, 20 bp, synthetic construct
  source 1..20: mol_type = other DNA
gtctcccaggctgaagtgca

SEQ ID NO: 205809 - DNA, 20 bp, synthetic construct
  source 1..20: mol_type = other DNA
tgtctcccaggctgaagtgc

SEQ ID NO: 205810 - DNA, 20 bp, synthetic construct
  source 1..20: mol_type = other DNA
ctgtctcccaggctgaagtg

SEQ ID NO: 205811 - DNA, 20 bp, synthetic construct
  source 1..20: mol_type = other DNA
tctgtctcccaggctgaagt

SEQ ID NO: 205812 - DNA, 20 bp, synthetic construct
  source 1..20: mol_type = other DNA
ctctgtctcccaggctgaag

SEQ ID NO: 205813 - DNA, 20 bp, synthetic construct
  source 1..20: mol_type = other DNA
actctgtctcccaggctgaa

SEQ ID NO: 205814 - DNA, 20 bp, synthetic construct
  source 1..20: mol_type = other DNA
tactctgtctcccaggctga

SEQ ID NO: 205815 - DNA, 20 bp, synthetic construct
  source 1..20: mol_type = other DNA
ttactctgtctcccaggctg

SEQ ID NO: 205816 - DNA, 20 bp, synthetic construct
  source 1..20: mol_type = other DNA
cttactctgtctcccaggct

SEQ ID NO: 205817 - DNA, 20 bp, synthetic construct
  source 1..20: mol_type = other DNA
tcttactctgtctcccaggc

SEQ ID NO: 205818 - DNA, 20 bp, synthetic construct
  source 1..20: mol_type = other DNA
gtcttactctgtctcccagg

SEQ ID NO: 205819 - DNA, 20 bp, synthetic construct
  source 1..20: mol_type = other DNA
agtcttactctgtctcccag

SEQ ID NO: 205820 - DNA, 20 bp, synthetic construct
  source 1..20: mol_type = other DNA
gagtcttactctgtctccca

SEQ ID NO: 205821 - DNA, 20 bp, synthetic construct
  source 1..20: mol_type = other DNA
ggagtcttactctgtctccc

SEQ ID NO: 205822 - DNA, 20 bp, synthetic construct
  source 1..20: mol_type = other DNA
tggagtcttactctgtctcc

SEQ ID NO: 205823 - DNA, 20 bp, synthetic construct
  source 1..20: mol_type = other DNA
atggagtcttactctgtctc

SEQ ID NO: 205824 - DNA, 20 bp, synthetic construct
  source 1..20: mol_type = other DNA
gatggagtcttactctgtct

SEQ ID NO: 205825 - DNA, 20 bp, synthetic construct
  source 1..20: mol_type = other DNA
agatggagtcttactctgtc

SEQ ID NO: 205826 - DNA, 20 bp, synthetic construct
  source 1..20: mol_type = other DNA
gagatggagtcttactctgt

SEQ ID NO: 205827 - DNA, 20 bp, synthetic construct
  source 1..20: mol_type = other DNA
tgagatggagtcttactctg

SEQ ID NO: 205828 - DNA, 20 bp, synthetic construct
  source 1..20: mol_type = other DNA
ttgagatggagtcttactct

SEQ ID NO: 205829 - DNA, 20 bp, synthetic construct
  source 1..20: mol_type = other DNA
tttgagatggagtcttactc

SEQ ID NO: 205830 - DNA, 20 bp, synthetic construct
  source 1..20: mol_type = other DNA
ttttgagatggagtcttact

SEQ ID NO: 205831 - DNA, 20 bp, synthetic construct
  source 1..20: mol_type = other DNA
tttttgagatggagtcttac

SEQ ID NO: 205832 - DNA, 20 bp, synthetic construct
  source 1..20: mol_type = other DNA
ttttttgagatggagtctta

SEQ ID NO: 205833 - DNA, 20 bp, synthetic construct
  source 1..20: mol_type = other DNA
tttttttgagatggagtctt

SEQ ID NO: 205834 - DNA, 20 bp, synthetic construct
  source 1..20: mol_type = other DNA
ttttttttgagatggagtct

SEQ ID NO: 205835 - DNA, 20 bp, synthetic construct
  source 1..20: mol_type = other DNA
tttttttttgagatggagtc

SEQ ID NO: 205836 - DNA, 20 bp, synthetic construct
  source 1..20: mol_type = other DNA
ttttttttttgagatggagt

SEQ ID NO: 205837 - DNA, 20 bp, synthetic construct
  source 1..20: mol_type = other DNA
tttttttttttgagatggag

SEQ ID NO: 205838 - DNA, 20 bp, synthetic construct
  source 1..20: mol_type = other DNA
ttttttttttttgagatgga

SEQ ID NO: 205839 - DNA, 20 bp, synthetic construct
  source 1..20: mol_type = other DNA
tttttttttttttgagatgg

SEQ ID NO: 205840 - DNA, 20 bp, synthetic construct
  source 1..20: mol_type = other DNA
ttttttttttttttgagatg

SEQ ID NO: 205841 - DNA, 20 bp, synthetic construct
  source 1..20: mol_type = other DNA
tttttttttttttttgagat

SEQ ID NO: 205842 - DNA, 20 bp, synthetic construct
  source 1..20: mol_type = other DNA
ttttttttttttttttgaga

SEQ ID NO: 205843 - DNA, 20 bp, synthetic construct
  source 1..20: mol_type = other DNA
tttttttttttttttttgag

SEQ ID NO: 205844 - DNA, 20 bp, synthetic construct
  source 1..20: mol_type = other DNA
ttttttttttttttttttga

SEQ ID NO: 205845 - DNA, 20 bp, synthetic construct
  source 1..20: mol_type = other DNA
tttttttttttttttttttg

SEQ ID NO: 205846 - DNA, 20 bp, synthetic construct
  source 1..20: mol_type = other DNA
tttttttttttttttttttt

SEQ ID NO: 205847 - DNA, 20 bp, synthetic construct
  source 1..20: mol_type = other DNA
tttttttttttttttttttt

SEQ ID NO: 205848 - DNA, 20 bp, synthetic construct
  source 1..20: mol_type = other DNA
cttttttttttttttttttt

SEQ ID NO: 205849 - DNA, 20 bp, synthetic construct
  source 1..20: mol_type = other DNA
tctttttttttttttttttt

SEQ ID NO: 205850 - DNA, 20 bp, synthetic construct
  source 1..20: mol_type = other DNA
ttcttttttttttttttttt

SEQ ID NO: 205851 - DNA, 20 bp, synthetic construct
  source 1..20: mol_type = other DNA
gttctttttttttttttttt

SEQ ID NO: 205852 - DNA, 20 bp, synthetic construct
  source 1..20: mol_type = other DNA
agttcttttttttttttttt

SEQ ID NO: 205853 - DNA, 20 bp, synthetic construct
  source 1..20: mol_type = other DNA
aagttctttttttttttttt

SEQ ID NO: 205854 - DNA, 20 bp, synthetic construct
  source 1..20: mol_type = other DNA
taagttcttttttttttttt

SEQ ID NO: 205855 - DNA, 20 bp, synthetic construct
  source 1..20: mol_type = other DNA
gtaagttctttttttttttt

SEQ ID NO: 205856 - DNA, 20 bp, synthetic construct
  source 1..20: mol_type = other DNA
agtaagttcttttttttttt

SEQ ID NO: 205857 - DNA, 20 bp, synthetic construct
  source 1..20: mol_type = other DNA
gagtaagttctttttttttt

SEQ ID NO: 205858 - DNA, 20 bp, synthetic construct
  source 1..20: mol_type = other DNA
agagtaagttcttttttttt

SEQ ID NO: 205859 - DNA, 20 bp, synthetic construct
  source 1..20: mol_type = other DNA
gagagtaagttctttttttt

SEQ ID NO: 205860 - DNA, 20 bp, synthetic construct
  source 1..20: mol_type = other DNA
tgagagtaagttcttttttt

SEQ ID NO: 205861 - DNA, 20 bp, synthetic construct
  source 1..20: mol_type = other DNA
ttgagagtaagttctttttt

SEQ ID NO: 205862 - DNA, 20 bp, synthetic construct
  source 1..20: mol_type = other DNA
tttgagagtaagttcttttt

SEQ ID NO: 205863 - DNA, 20 bp, synthetic construct
  source 1..20: mol_type = other DNA
ttttgagagtaagttctttt

SEQ ID NO: 205864 - DNA, 20 bp, synthetic construct
  source 1..20: mol_type = other DNA
attttgagagtaagttcttt

SEQ ID NO: 205865 - DNA, 20 bp, synthetic construct
  source 1..20: mol_type = other DNA
tattttgagagtaagttctt

SEQ ID NO: 205866 - DNA, 20 bp, synthetic construct
  source 1..20: mol_type = other DNA
ttattttgagagtaagttct

SEQ ID NO: 205867 - DNA, 20 bp, synthetic construct
  source 1..20: mol_type = other DNA
tttattttgagagtaagttc

SEQ ID NO: 205868 - DNA, 20 bp, synthetic construct
  source 1..20: mol_type = other DNA
atttattttgagagtaagtt

SEQ ID NO: 205869 - DNA, 20 bp, synthetic construct
  source 1..20: mol_type = other DNA
tatttattttgagagtaagt

SEQ ID NO: 205870 - DNA, 20 bp, synthetic construct
  source 1..20: mol_type = other DNA
gtatttattttgagagtaag

SEQ ID NO: 205871 - DNA, 20 bp, synthetic construct
  source 1..20: mol_type = other DNA
cgtatttattttgagagtaa

SEQ ID NO: 205872 - DNA, 20 bp, synthetic construct
  source 1..20: mol_type = other DNA
acgtatttattttgagagta

SEQ ID NO: 205873 - DNA, 20 bp, synthetic construct
  source 1..20: mol_type = other DNA
cacgtatttattttgagagt

SEQ ID NO: 205874 - DNA, 20 bp, synthetic construct
  source 1..20: mol_type = other DNA
acacgtatttattttgagag

SEQ ID NO: 205875 - DNA, 20 bp, synthetic construct
  source 1..20: mol_type = other DNA
cacacgtatttattttgaga

SEQ ID NO: 205876 - DNA, 20 bp, synthetic construct
  source 1..20: mol_type = other DNA
ccacacgtatttattttgag

SEQ ID NO: 205877 - DNA, 20 bp, synthetic construct
  source 1..20: mol_type = other DNA
gccacacgtatttattttga

SEQ ID NO: 205878 - DNA, 20 bp, synthetic construct
  source 1..20: mol_type = other DNA
agccacacgtatttattttg

SEQ ID NO: 205879 - DNA, 20 bp, synthetic construct
  source 1..20: mol_type = other DNA
cagccacacgtatttatttt

SEQ ID NO: 205880 - DNA, 20 bp, synthetic construct
  source 1..20: mol_type = other DNA
tcagccacacgtatttattt

SEQ ID NO: 205881 - DNA, 20 bp, synthetic construct
  source 1..20: mol_type = other DNA
gtcagccacacgtatttatt

SEQ ID NO: 205882 - DNA, 20 bp, synthetic construct
  source 1..20: mol_type = other DNA
agtcagccacacgtatttat

SEQ ID NO: 205883 - DNA, 20 bp, synthetic construct
  source 1..20: mol_type = other DNA
gagtcagccacacgtattta

SEQ ID NO: 205884 - DNA, 20 bp, synthetic construct
  source 1..20: mol_type = other DNA
ggagtcagccacacgtattt

SEQ ID NO: 205885 - DNA, 20 bp, synthetic construct
  source 1..20: mol_type = other DNA
tggagtcagccacacgtatt

SEQ ID NO: 205886 - DNA, 20 bp, synthetic construct
  source 1..20: mol_type = other DNA
gtggagtcagccacacgtat

SEQ ID NO: 205887 - DNA, 20 bp, synthetic construct
  source 1..20: mol_type = other DNA
tgtggagtcagccacacgta

SEQ ID NO: 205888 - DNA, 20 bp, synthetic construct
  source 1..20: mol_type = other DNA
atgtggagtcagccacacgt

SEQ ID NO: 205889 - DNA, 20 bp, synthetic construct
  source 1..20: mol_type = other DNA
tatgtggagtcagccacacg

SEQ ID NO: 205890 - DNA, 20 bp, synthetic construct
  source 1..20: mol_type = other DNA
atatgtggagtcagccacac

SEQ ID NO: 205891 - DNA, 20 bp, synthetic construct
  source 1..20: mol_type = other DNA
catatgtggagtcagccaca

SEQ ID NO: 205892 - DNA, 20 bp, synthetic construct
  source 1..20: mol_type = other DNA
ccatatgtggagtcagccac

SEQ ID NO: 205893 - DNA, 20 bp, synthetic construct
  source 1..20: mol_type = other DNA
accatatgtggagtcagcca

SEQ ID NO: 205894 - DNA, 20 bp, synthetic construct
  source 1..20: mol_type = other DNA
taccatatgtggagtcagcc

SEQ ID NO: 205895 - DNA, 20 bp, synthetic construct
  source 1..20: mol_type = other DNA
ctaccatatgtggagtcagc

SEQ ID NO: 205896 - DNA, 20 bp, synthetic construct
  source 1..20: mol_type = other DNA
cctaccatatgtggagtcag

SEQ ID NO: 205897 - DNA, 20 bp, synthetic construct
  source 1..20: mol_type = other DNA
ccctaccatatgtggagtca

SEQ ID NO: 205898 - DNA, 20 bp, synthetic construct
  source 1..20: mol_type = other DNA
gccctaccatatgtggagtc

SEQ ID NO: 205899 - DNA, 20 bp, synthetic construct
  source 1..20: mol_type = other DNA
ggccctaccatatgtggagt

SEQ ID NO: 205900 - DNA, 20 bp, synthetic construct
  source 1..20: mol_type = other DNA
tggccctaccatatgtggag

SEQ ID NO: 205901 - DNA, 20 bp, synthetic construct
  source 1..20: mol_type = other DNA
ttggccctaccatatgtgga

SEQ ID NO: 205902 - DNA, 20 bp, synthetic construct
  source 1..20: mol_type = other DNA
gttggccctaccatatgtgg

SEQ ID NO: 205903 - DNA, 20 bp, synthetic construct
  source 1..20: mol_type = other DNA
agttggccctaccatatgtg

SEQ ID NO: 205904 - DNA, 20 bp, synthetic construct
  source 1..20: mol_type = other DNA
cagttggccctaccatatgt

SEQ ID NO: 205905 - DNA, 20 bp, synthetic construct
  source 1..20: mol_type = other DNA
acagttggccctaccatatg

SEQ ID NO: 205906 - DNA, 20 bp, synthetic construct
  source 1..20: mol_type = other DNA
tacagttggccctaccatat

SEQ ID NO: 205907 - DNA, 20 bp, synthetic construct
  source 1..20: mol_type = other DNA
atacagttggccctaccata

SEQ ID NO: 205908 - DNA, 20 bp, synthetic construct
  source 1..20: mol_type = other DNA
tatacagttggccctaccat

SEQ ID NO: 205909 - DNA, 20 bp, synthetic construct
  source 1..20: mol_type = other DNA
ttatacagttggccctacca

SEQ ID NO: 205910 - DNA, 20 bp, synthetic construct
  source 1..20: mol_type = other DNA
gttatacagttggccctacc

SEQ ID NO: 205911 - DNA, 20 bp, synthetic construct
  source 1..20: mol_type = other DNA
agttatacagttggccctac

SEQ ID NO: 205912 - DNA, 20 bp, synthetic construct
  source 1..20: mol_type = other DNA
tagttatacagttggcccta

SEQ ID NO: 205913 - DNA, 20 bp, synthetic construct
  source 1..20: mol_type = other DNA
ctagttatacagttggccct

SEQ ID NO: 205914 - DNA, 20 bp, synthetic construct
  source 1..20: mol_type = other DNA
tctagttatacagttggccc

SEQ ID NO: 205915 - DNA, 20 bp, synthetic construct
  source 1..20: mol_type = other DNA
ttctagttatacagttggcc

SEQ ID NO: 205916 - DNA, 20 bp, synthetic construct
  source 1..20: mol_type = other DNA
cttctagttatacagttggc

SEQ ID NO: 205917 - DNA, 20 bp, synthetic construct
  source 1..20: mol_type = other DNA
acttctagttatacagttgg

SEQ ID NO: 205918 - DNA, 20 bp, synthetic construct
  source 1..20: mol_type = other DNA
aacttctagttatacagttg

SEQ ID NO: 205919 - DNA, 20 bp, synthetic construct
  source 1..20: mol_type = other DNA
gaacttctagttatacagtt

SEQ ID NO: 205920 - DNA, 20 bp, synthetic construct
  source 1..20: mol_type = other DNA
agaacttctagttatacagt

SEQ ID NO: 205921 - DNA, 20 bp, synthetic construct
  source 1..20: mol_type = other DNA
gagaacttctagttatacag

SEQ ID NO: 205922 - DNA, 20 bp, synthetic construct
  source 1..20: mol_type = other DNA
ggagaacttctagttataca

SEQ ID NO: 205923 - DNA, 20 bp, synthetic construct
  source 1..20: mol_type = other DNA
tggagaacttctagttatac

SEQ ID NO: 205924 - DNA, 20 bp, synthetic construct
  source 1..20: mol_type = other DNA
ttggagaacttctagttata

SEQ ID NO: 205925 - DNA, 20 bp, synthetic construct
  source 1..20: mol_type = other DNA
tttggagaacttctagttat

SEQ ID NO: 205926 - DNA, 20 bp, synthetic construct
  source 1..20: mol_type = other DNA
atttggagaacttctagtta

SEQ ID NO: 205927 - DNA, 20 bp, synthetic construct
  source 1..20: mol_type = other DNA
tatttggagaacttctagtt

SEQ ID NO: 205928 - DNA, 20 bp, synthetic construct
  source 1..20: mol_type = other DNA
ttatttggagaacttctagt

SEQ ID NO: 205929 - DNA, 20 bp, synthetic construct
  source 1..20: mol_type = other DNA
gttatttggagaacttctag

SEQ ID NO: 205930 - DNA, 20 bp, synthetic construct
  source 1..20: mol_type = other DNA
agttatttggagaacttcta

SEQ ID NO: 205931 - DNA, 20 bp, synthetic construct
  source 1..20: mol_type = other DNA
aagttatttggagaacttct

SEQ ID NO: 205932 - DNA, 20 bp, synthetic construct
  source 1..20: mol_type = other DNA
gaagttatttggagaacttc

SEQ ID NO: 205933 - DNA, 20 bp, synthetic construct
  source 1..20: mol_type = other DNA
agaagttatttggagaactt

SEQ ID NO: 205934 - DNA, 20 bp, synthetic construct
  source 1..20: mol_type = other DNA
cagaagttatttggagaact

SEQ ID NO: 205935 - DNA, 20 bp, synthetic construct
  source 1..20: mol_type = other DNA
acagaagttatttggagaac

SEQ ID NO: 205936 - DNA, 20 bp, synthetic construct
  source 1..20: mol_type = other DNA
cacagaagttatttggagaa

SEQ ID NO: 205937 - DNA, 20 bp, synthetic construct
  source 1..20: mol_type = other DNA
ccacagaagttatttggaga

SEQ ID NO: 205938 - DNA, 20 bp, synthetic construct
  source 1..20: mol_type = other DNA
tccacagaagttatttggag

SEQ ID NO: 205939 - DNA, 20 bp, synthetic construct
  source 1..20: mol_type = other DNA
ctccacagaagttatttgga

SEQ ID NO: 205940 - DNA, 20 bp, synthetic construct
  source 1..20: mol_type = other DNA
tctccacagaagttatttgg

SEQ ID NO: 205941 - DNA, 20 bp, synthetic construct
  source 1..20: mol_type = other DNA
ttctccacagaagttatttg

SEQ ID NO: 205942 - DNA, 20 bp, synthetic construct
  source 1..20: mol_type = other DNA
tttctccacagaagttattt

SEQ ID NO: 205943 - DNA, 20 bp, synthetic construct
  source 1..20: mol_type = other DNA
ttttctccacagaagttatt

SEQ ID NO: 205944 - DNA, 20 bp, synthetic construct
  source 1..20: mol_type = other DNA
tttttctccacagaagttat

SEQ ID NO: 205945 - DNA, 20 bp, synthetic construct
  source 1..20: mol_type = other DNA
ttttttctccacagaagtta

SEQ ID NO: 205946 - DNA, 20 bp, synthetic construct
  source 1..20: mol_type = other DNA
tttttttctccacagaagtt

SEQ ID NO: 205947 - DNA, 20 bp, synthetic construct
  source 1..20: mol_type = other DNA
ttttttttctccacagaagt

SEQ ID NO: 205948 - DNA, 20 bp, synthetic construct
  source 1..20: mol_type = other DNA
cttttttttctccacagaag

SEQ ID NO: 205949 - DNA, 20 bp, synthetic construct
  source 1..20: mol_type = other DNA
acttttttttctccacagaa

SEQ ID NO: 205950 - DNA, 20 bp, synthetic construct
  source 1..20: mol_type = other DNA
aacttttttttctccacaga

SEQ ID NO: 205951 - DNA, 20 bp, synthetic construct
  source 1..20: mol_type = other DNA
aaacttttttttctccacag

SEQ ID NO: 205952 - DNA, 20 bp, synthetic construct
  source 1..20: mol_type = other DNA
taaacttttttttctccaca

SEQ ID NO: 205953 - DNA, 20 bp, synthetic construct
  source 1..20: mol_type = other DNA
ataaacttttttttctccac

SEQ ID NO: 205954 - DNA, 20 bp, synthetic construct
  source 1..20: mol_type = other DNA
aataaacttttttttctcca

SEQ ID NO: 205955 - DNA, 20 bp, synthetic construct
  source 1..20: mol_type = other DNA
taataaacttttttttctcc

SEQ ID NO: 205956 - DNA, 20 bp, synthetic construct
  source 1..20: mol_type = other DNA
ttaataaacttttttttctc

SEQ ID NO: 205957 - DNA, 20 bp, synthetic construct
  source 1..20: mol_type = other DNA
tttaataaacttttttttct

SEQ ID NO: 205958 - DNA, 20 bp, synthetic construct
  source 1..20: mol_type = other DNA
ctttaataaacttttttttc

SEQ ID NO: 205959 - DNA, 20 bp, synthetic construct
  source 1..20: mol_type = other DNA
cctttaataaactttttttt

SEQ ID NO: 205960 - DNA, 20 bp, synthetic construct
  source 1..20: mol_type = other DNA
acctttaataaacttttttt

SEQ ID NO: 205961 - DNA, 20 bp, synthetic construct
  source 1..20: mol_type = other DNA
aacctttaataaactttttt

SEQ ID NO: 205962 - DNA, 20 bp, synthetic construct
  source 1..20: mol_type = other DNA
taacctttaataaacttttt

SEQ ID NO: 205963 - DNA, 20 bp, synthetic construct
  source 1..20: mol_type = other DNA
ttaacctttaataaactttt

SEQ ID NO: 205964 - DNA, 20 bp, synthetic construct
  source 1..20: mol_type = other DNA
gttaacctttaataaacttt

SEQ ID NO: 205965 - DNA, 20 bp, synthetic construct
  source 1..20: mol_type = other DNA
agttaacctttaataaactt

SEQ ID NO: 205966 - DNA, 20 bp, synthetic construct
  source 1..20: mol_type = other DNA
aagttaacctttaataaact

SEQ ID NO: 205967 - DNA, 20 bp, synthetic construct
  source 1..20: mol_type = other DNA
aaagttaacctttaataaac

SEQ ID NO: 205968 - DNA, 20 bp, synthetic construct
  source 1..20: mol_type = other DNA
aaaagttaacctttaataaa

SEQ ID NO: 205969 - DNA, 20 bp, synthetic construct
  source 1..20: mol_type = other DNA
aaaaagttaacctttaataa

SEQ ID NO: 205970 - DNA, 20 bp, synthetic construct
  source 1..20: mol_type = other DNA
aaaaaagttaacctttaata

SEQ ID NO: 205971 - DNA, 20 bp, synthetic construct
  source 1..20: mol_type = other DNA
taaaaaagttaacctttaat

SEQ ID NO: 205972 - DNA, 20 bp, synthetic construct
  source 1..20: mol_type = other DNA
ttaaaaaagttaacctttaa

SEQ ID NO: 205973 - DNA, 20 bp, synthetic construct
  source 1..20: mol_type = other DNA
tttaaaaaagttaaccttta

SEQ ID NO: 205974 - DNA, 20 bp, synthetic construct
  source 1..20: mol_type = other DNA
ctttaaaaaagttaaccttt

SEQ ID NO: 205975 - DNA, 20 bp, synthetic construct
  source 1..20: mol_type = other DNA
actttaaaaaagttaacctt

SEQ ID NO: 205976 - DNA, 20 bp, synthetic construct
  source 1..20: mol_type = other DNA
cactttaaaaaagttaacct

SEQ ID NO: 205977 - DNA, 20 bp, synthetic construct
  source 1..20: mol_type = other DNA
gcactttaaaaaagttaacc

SEQ ID NO: 205978 - DNA, 20 bp, synthetic construct
  source 1..20: mol_type = other DNA
agcactttaaaaaagttaac

SEQ ID NO: 205979 - DNA, 20 bp, synthetic construct
  source 1..20: mol_type = other DNA
tagcactttaaaaaagttaa

SEQ ID NO: 205980 - DNA, 20 bp, synthetic construct
  source 1..20: mol_type = other DNA
ttagcactttaaaaaagtta

SEQ ID NO: 205981 - DNA, 20 bp, synthetic construct
  source 1..20: mol_type = other DNA
gttagcactttaaaaaagtt

SEQ ID NO: 205982 - DNA, 20 bp, synthetic construct
  source 1..20: mol_type = other DNA
agttagcactttaaaaaagt

SEQ ID NO: 205983 - DNA, 20 bp, synthetic construct
  source 1..20: mol_type = other DNA
tagttagcactttaaaaaag

SEQ ID NO: 205984 - DNA, 20 bp, synthetic construct
  source 1..20: mol_type = other DNA
ctagttagcactttaaaaaa

SEQ ID NO: 205985 - DNA, 20 bp, synthetic construct
  source 1..20: mol_type = other DNA
tctagttagcactttaaaaa

SEQ ID NO: 205986 - DNA, 20 bp, synthetic construct
  source 1..20: mol_type = other DNA
ttctagttagcactttaaaa

SEQ ID NO: 205987 - DNA, 20 bp, synthetic construct
  source 1..20: mol_type = other DNA
gttctagttagcactttaaa

SEQ ID NO: 205988 - DNA, 20 bp, synthetic construct
  source 1..20: mol_type = other DNA
ggttctagttagcactttaa

SEQ ID NO: 205989 - DNA, 20 bp, synthetic construct
  source 1..20: mol_type = other DNA
aggttctagttagcacttta

SEQ ID NO: 205990 - DNA, 20 bp, synthetic construct
  source 1..20: mol_type = other DNA
aaggttctagttagcacttt

SEQ ID NO: 205991 - DNA, 20 bp, synthetic construct
  source 1..20: mol_type = other DNA
taaggttctagttagcactt

SEQ ID NO: 205992 - DNA, 20 bp, synthetic construct
  source 1..20: mol_type = other DNA
gtaaggttctagttagcact

SEQ ID NO: 205993 - DNA, 20 bp, synthetic construct
  source 1..20: mol_type = other DNA
agtaaggttctagttagcac

SEQ ID NO: 205994 - DNA, 20 bp, synthetic construct
  source 1..20: mol_type = other DNA
tagtaaggttctagttagca

SEQ ID NO: 205995 - DNA, 20 bp, synthetic construct
  source 1..20: mol_type = other DNA
ttagtaaggttctagttagc

SEQ ID NO: 205996 - DNA, 20 bp, synthetic construct
  source 1..20: mol_type = other DNA
gttagtaaggttctagttag

SEQ ID NO: 205997 - DNA, 20 bp, synthetic construct
  source 1..20: mol_type = other DNA
tgttagtaaggttctagtta

SEQ ID NO: 205998 - DNA, 20 bp, synthetic construct
  source 1..20: mol_type = other DNA
gtgttagtaaggttctagtt

SEQ ID NO: 205999 - DNA, 20 bp, synthetic construct
  source 1..20: mol_type = other DNA
agtgttagtaaggttctagt

SEQ ID NO: 206000 - DNA, 20 bp, synthetic construct
  source 1..20: mol_type = other DNA
cagtgttagtaaggttctag

SEQ ID NO: 206001 - DNA, 20 bp, synthetic construct
  source 1..20: mol_type = other DNA
tcagtgttagtaaggttcta

SEQ ID NO: 206002 - DNA, 20 bp, synthetic construct
  source 1..20: mol_type = other DNA
ctcagtgttagtaaggttct

SEQ ID NO: 206003 - DNA, 20 bp, synthetic construct
  source 1..20: mol_type = other DNA
tctcagtgttagtaaggttc

SEQ ID NO: 206004 - DNA, 20 bp, synthetic construct
  source 1..20: mol_type = other DNA
atctcagtgttagtaaggtt

SEQ ID NO: 206005 - DNA, 20 bp, synthetic construct
  source 1..20: mol_type = other DNA
gatctcagtgttagtaaggt

SEQ ID NO: 206006 - DNA, 20 bp, synthetic construct
  source 1..20: mol_type = other DNA
cgatctcagtgttagtaagg

SEQ ID NO: 206007 - DNA, 20 bp, synthetic construct
  source 1..20: mol_type = other DNA
gcgatctcagtgttagtaag

SEQ ID NO: 206008 - DNA, 20 bp, synthetic construct
  source 1..20: mol_type = other DNA
tgcgatctcagtgttagtaa

SEQ ID NO: 206009 - DNA, 20 bp, synthetic construct
  source 1..20: mol_type = other DNA
gtgcgatctcagtgttagta

SEQ ID NO: 206010 - DNA, 20 bp, synthetic construct
  source 1..20: mol_type = other DNA
ggtgcgatctcagtgttagt

SEQ ID NO: 206011 - DNA, 20 bp, synthetic construct
  source 1..20: mol_type = other DNA
tggtgcgatctcagtgttag

SEQ ID NO: 206012 - DNA, 20 bp, synthetic construct
  source 1..20: mol_type = other DNA
ttggtgcgatctcagtgtta

SEQ ID NO: 206013 - DNA, 20 bp, synthetic construct
  source 1..20: mol_type = other DNA
attggtgcgatctcagtgtt

SEQ ID NO: 206014 - DNA, 20 bp, synthetic construct
  source 1..20: mol_type = other DNA
aattggtgcgatctcagtgt

SEQ ID NO: 206015 - DNA, 20 bp, synthetic construct
  source 1..20: mol_type = other DNA
caattggtgcgatctcagtg

SEQ ID NO: 206016 - DNA, 20 bp, synthetic construct
  source 1..20: mol_type = other DNA
acaattggtgcgatctcagt

SEQ ID NO: 206017 - DNA, 20 bp, synthetic construct
  source 1..20: mol_type = other DNA
aacaattggtgcgatctcag

SEQ ID NO: 206018 - DNA, 20 bp, synthetic construct
  source 1..20: mol_type = other DNA
aaacaattggtgcgatctca

SEQ ID NO: 206019 - DNA, 20 bp, synthetic construct
  source 1..20: mol_type = other DNA
taaacaattggtgcgatctc

SEQ ID NO: 206020 - DNA, 20 bp, synthetic construct
  source 1..20: mol_type = other DNA
ataaacaattggtgcgatct

SEQ ID NO: 206021 - DNA, 20 bp, synthetic construct
  source 1..20: mol_type = other DNA
tataaacaattggtgcgatc

SEQ ID NO: 206022 - DNA, 20 bp, synthetic construct
  source 1..20: mol_type = other DNA
ttataaacaattggtgcgat

SEQ ID NO: 206023 - DNA, 20 bp, synthetic construct
  source 1..20: mol_type = other DNA
gttataaacaattggtgcga

SEQ ID NO: 206024 - DNA, 20 bp, synthetic construct
  source 1..20: mol_type = other DNA
agttataaacaattggtgcg

SEQ ID NO: 206025 - DNA, 20 bp, synthetic construct
  source 1..20: mol_type = other DNA
aagttataaacaattggtgc

SEQ ID NO: 206026 - DNA, 20 bp, synthetic construct
  source 1..20: mol_type = other DNA
taagttataaacaattggtg

SEQ ID NO: 206027 - DNA, 20 bp, synthetic construct
  source 1..20: mol_type = other DNA
ctaagttataaacaattggt

SEQ ID NO: 206028 - DNA, 20 bp, synthetic construct
  source 1..20: mol_type = other DNA
tctaagttataaacaattgg

SEQ ID NO: 206029 - DNA, 20 bp, synthetic construct
  source 1..20: mol_type = other DNA
gtctaagttataaacaattg

SEQ ID NO: 206030 - DNA, 20 bp, synthetic construct
  source 1..20: mol_type = other DNA
tgtctaagttataaacaatt

SEQ ID NO: 206031 - DNA, 20 bp, synthetic construct
  source 1..20: mol_type = other DNA
ctgtctaagttataaacaat

SEQ ID NO: 206032 - DNA, 20 bp, synthetic construct
  source 1..20: mol_type = other DNA
cctgtctaagttataaacaa

SEQ ID NO: 206033 - DNA, 20 bp, synthetic construct
  source 1..20: mol_type = other DNA
ccctgtctaagttataaaca

SEQ ID NO: 206034 - DNA, 20 bp, synthetic construct
  source 1..20: mol_type = other DNA
gccctgtctaagttataaac

SEQ ID NO: 206035 - DNA, 20 bp, synthetic construct
  source 1..20: mol_type = other DNA
ggccctgtctaagttataaa

SEQ ID NO: 206036 - DNA, 20 bp, synthetic construct
  source 1..20: mol_type = other DNA
cggccctgtctaagttataa

SEQ ID NO: 206037 - DNA, 20 bp, synthetic construct
  source 1..20: mol_type = other DNA
ccggccctgtctaagttata

SEQ ID NO: 206038 - DNA, 20 bp, synthetic construct
  source 1..20: mol_type = other DNA
cccggccctgtctaagttat

SEQ ID NO: 206039 - DNA, 20 bp, synthetic construct
  source 1..20: mol_type = other DNA
acccggccctgtctaagtta

SEQ ID NO: 206040 - DNA, 20 bp, synthetic construct
  source 1..20: mol_type = other DNA
cacccggccctgtctaagtt

SEQ ID NO: 206041 - DNA, 20 bp, synthetic construct
  source 1..20: mol_type = other DNA
gcacccggccctgtctaagt

SEQ ID NO: 206042 - DNA, 20 bp, synthetic construct
  source 1..20: mol_type = other DNA
tgcacccggccctgtctaag

SEQ ID NO: 206043 - DNA, 20 bp, synthetic construct
  source 1..20: mol_type = other DNA
ctgcacccggccctgtctaa

SEQ ID NO: 206044 - DNA, 20 bp, synthetic construct
  source 1..20: mol_type = other DNA
actgcacccggccctgtcta

SEQ ID NO: 206045 - DNA, 20 bp, synthetic construct
  source 1..20: mol_type = other DNA
cactgcacccggccctgtct

SEQ ID NO: 206046 - DNA, 20 bp, synthetic construct
  source 1..20: mol_type = other DNA
ccactgcacccggccctgtc

SEQ ID NO: 206047 - DNA, 20 bp, synthetic construct
  source 1..20: mol_type = other DNA
gccactgcacccggccctgt

SEQ ID NO: 206048 - DNA, 20 bp, synthetic construct
  source 1..20: mol_type = other DNA
agccactgcacccggccctg

SEQ ID NO: 206049 - DNA, 20 bp, synthetic construct
  source 1..20: mol_type = other DNA
gagccactgcacccggccct

SEQ ID NO: 206050 - DNA, 20 bp, synthetic construct
  source 1..20: mol_type = other DNA
tgagccactgcacccggccc

SEQ ID NO: 206051 - DNA, 20 bp, synthetic construct
  source 1..20: mol_type = other DNA
atgagccactgcacccggcc

SEQ ID NO: 206052 - DNA, 20 bp, synthetic construct
  source 1..20: mol_type = other DNA
catgagccactgcacccggc

SEQ ID NO: 206053 - DNA, 20 bp, synthetic construct
  source 1..20: mol_type = other DNA
gcatgagccactgcacccgg

SEQ ID NO: 206054 - DNA, 20 bp, synthetic construct
  source 1..20: mol_type = other DNA
ggcatgagccactgcacccg

SEQ ID NO: 206055 - DNA, 20 bp, synthetic construct
  source 1..20: mol_type = other DNA
aggcatgagccactgcaccc

SEQ ID NO: 206056 - DNA, 20 bp, synthetic construct
  source 1..20: mol_type = other DNA
taggcatgagccactgcacc

SEQ ID NO: 206057 - DNA, 20 bp, synthetic construct
  source 1..20: mol_type = other DNA
ataggcatgagccactgcac

SEQ ID NO: 206058 - DNA, 20 bp, synthetic construct
  source 1..20: mol_type = other DNA
tataggcatgagccactgca

SEQ ID NO: 206059 - DNA, 20 bp, synthetic construct
  source 1..20: mol_type = other DNA
ttataggcatgagccactgc

SEQ ID NO: 206060 - DNA, 20 bp, synthetic construct
  source 1..20: mol_type = other DNA
attataggcatgagccactg

SEQ ID NO: 206061 - DNA, 20 bp, synthetic construct
  source 1..20: mol_type = other DNA
gattataggcatgagccact

SEQ ID NO: 206062 - DNA, 20 bp, synthetic construct
  source 1..20: mol_type = other DNA
ggattataggcatgagccac

SEQ ID NO: 206063 - DNA, 20 bp, synthetic construct
  source 1..20: mol_type = other DNA
gggattataggcatgagcca

SEQ ID NO: 206064 - DNA, 20 bp, synthetic construct
  source 1..20: mol_type = other DNA
tgggattataggcatgagcc

SEQ ID NO: 206065 - DNA, 20 bp, synthetic construct
  source 1..20: mol_type = other DNA
ttgggattataggcatgagc

SEQ ID NO: 206066 - DNA, 20 bp, synthetic construct
  source 1..20: mol_type = other DNA
gttgggattataggcatgag

SEQ ID NO: 206067 - DNA, 20 bp, synthetic construct
  source 1..20: mol_type = other DNA
tgttgggattataggcatga

SEQ ID NO: 206068 - DNA, 20 bp, synthetic construct
  source 1..20: mol_type = other DNA
gtgttgggattataggcatg

SEQ ID NO: 206069 - DNA, 20 bp, synthetic construct
  source 1..20: mol_type = other DNA
agtgttgggattataggcat

SEQ ID NO: 206070 - DNA, 20 bp, synthetic construct
  source 1..20: mol_type = other DNA
aagtgttgggattataggca

SEQ ID NO: 206071 - DNA, 20 bp, synthetic construct
  source 1..20: mol_type = other DNA
aaagtgttgggattataggc

SEQ ID NO: 206072 - DNA, 20 bp, synthetic construct
  source 1..20: mol_type = other DNA
caaagtgttgggattatagg

SEQ ID NO: 206073 - DNA, 20 bp, synthetic construct
  source 1..20: mol_type = other DNA
ccaaagtgttgggattatag

SEQ ID NO: 206074 - DNA, 20 bp, synthetic construct
  source 1..20: mol_type = other DNA
cccaaagtgttgggattata

SEQ ID NO: 206075 - DNA, 20 bp, synthetic construct
  source 1..20: mol_type = other DNA
tcccaaagtgttgggattat

SEQ ID NO: 206076 - DNA, 20 bp, synthetic construct
  source 1..20: mol_type = other DNA
ctcccaaagtgttgggatta

SEQ ID NO: 206077 - DNA, 20 bp, synthetic construct
  source 1..20: mol_type = other DNA
cctcccaaagtgttgggatt

SEQ ID NO: 206078 - DNA, 20 bp, synthetic construct
  source 1..20: mol_type = other DNA
gcctcccaaagtgttgggat

SEQ ID NO: 206079 - DNA, 20 bp, synthetic construct
  source 1..20: mol_type = other DNA
ggcctcccaaagtgttggga

SEQ ID NO: 206080 - DNA, 20 bp, synthetic construct
  source 1..20: mol_type = other DNA
cggcctcccaaagtgttggg

SEQ ID NO: 206081 - DNA, 20 bp, synthetic construct
  source 1..20: mol_type = other DNA
tcggcctcccaaagtgttgg

SEQ ID NO: 206082 - DNA, 20 bp, synthetic construct
  source 1..20: mol_type = other DNA
ctcggcctcccaaagtgttg

SEQ ID NO: 206083 - DNA, 20 bp, synthetic construct
  source 1..20: mol_type = other DNA
cctcggcctcccaaagtgtt

SEQ ID NO: 206084 - DNA, 20 bp, synthetic construct
  source 1..20: mol_type = other DNA
gcctcggcctcccaaagtgt

SEQ ID NO: 206085 - DNA, 20 bp, synthetic construct
  source 1..20: mol_type = other DNA
tgcctcggcctcccaaagtg

SEQ ID NO: 206086 - DNA, 20 bp, synthetic construct
  source 1..20: mol_type = other DNA
ctgcctcggcctcccaaagt

SEQ ID NO: 206087 - DNA, 20 bp, synthetic construct
  source 1..20: mol_type = other DNA
cctgcctcggcctcccaaag

SEQ ID NO: 206088 - DNA, 20 bp, synthetic construct
  source 1..20: mol_type = other DNA
acctgcctcggcctcccaaa

SEQ ID NO: 206089 - DNA, 20 bp, synthetic construct
  source 1..20: mol_type = other DNA
cacctgcctcggcctcccaa

SEQ ID NO: 206090 - DNA, 20 bp, synthetic construct
  source 1..20: mol_type = other DNA
ccacctgcctcggcctccca

SEQ ID NO: 206091 - DNA, 20 bp, synthetic construct
  source 1..20: mol_type = other DNA
tccacctgcctcggcctccc

SEQ ID NO: 206092 - DNA, 20 bp, synthetic construct
  source 1..20: mol_type = other DNA
atccacctgcctcggcctcc

SEQ ID NO: 206093 - DNA, 20 bp, synthetic construct
  source 1..20: mol_type = other DNA
gatccacctgcctcggcctc

SEQ ID NO: 206094 - DNA, 20 bp, synthetic construct
  source 1..20: mol_type = other DNA
tgatccacctgcctcggcct

SEQ ID NO: 206095 - DNA, 20 bp, synthetic construct
  source 1..20: mol_type = other DNA
gtgatccacctgcctcggcc

SEQ ID NO: 206096 - DNA, 20 bp, synthetic construct
  source 1..20: mol_type = other DNA
agtgatccacctgcctcggc

SEQ ID NO: 206097 - DNA, 20 bp, synthetic construct
  source 1..20: mol_type = other DNA
aagtgatccacctgcctcgg

SEQ ID NO: 206098 - DNA, 20 bp, synthetic construct
  source 1..20: mol_type = other DNA
caagtgatccacctgcctcg

SEQ ID NO: 206099 - DNA, 20 bp, synthetic construct
  source 1..20: mol_type = other DNA
tcaagtgatccacctgcctc

SEQ ID NO: 206100 - DNA, 20 bp, synthetic construct
  source 1..20: mol_type = other DNA
atcaagtgatccacctgcct

SEQ ID NO: 206101 - DNA, 20 bp, synthetic construct
  source 1..20: mol_type = other DNA
catcaagtgatccacctgcc

SEQ ID NO: 206102 - DNA, 20 bp, synthetic construct
  source 1..20: mol_type = other DNA
acatcaagtgatccacctgc

SEQ ID NO: 206103 - DNA, 20 bp, synthetic construct
  source 1..20: mol_type = other DNA
gacatcaagtgatccacctg

SEQ ID NO: 206104 - DNA, 20 bp, synthetic construct
  source 1..20: mol_type = other DNA
tgacatcaagtgatccacct

SEQ ID NO: 206105 - DNA, 20 bp, synthetic construct
  source 1..20: mol_type = other DNA
ctgacatcaagtgatccacc

SEQ ID NO: 206106 - DNA, 20 bp, synthetic construct
  source 1..20: mol_type = other DNA
cctgacatcaagtgatccac

SEQ ID NO: 206107 - DNA, 20 bp, synthetic construct
  source 1..20: mol_type = other DNA
tcctgacatcaagtgatcca

SEQ ID NO: 206108 - DNA, 20 bp, synthetic construct
  source 1..20: mol_type = other DNA
ctcctgacatcaagtgatcc

SEQ ID NO: 206109 - DNA, 20 bp, synthetic construct
  source 1..20: mol_type = other DNA
actcctgacatcaagtgatc

SEQ ID NO: 206110 - DNA, 20 bp, synthetic construct
  source 1..20: mol_type = other DNA
aactcctgacatcaagtgat

SEQ ID NO: 206111 - DNA, 20 bp, synthetic construct
  source 1..20: mol_type = other DNA
gaactcctgacatcaagtga

SEQ ID NO: 206112 - DNA, 20 bp, synthetic construct
  source 1..20: mol_type = other DNA
cgaactcctgacatcaagtg

SEQ ID NO: 206113 - DNA, 20 bp, synthetic construct
  source 1..20: mol_type = other DNA
tcgaactcctgacatcaagt

SEQ ID NO: 206114 - DNA, 20 bp, synthetic construct
  source 1..20: mol_type = other DNA
ctcgaactcctgacatcaag

SEQ ID NO: 206115 - DNA, 20 bp, synthetic construct
  source 1..20: mol_type = other DNA
tctcgaactcctgacatcaa

SEQ ID NO: 206116 - DNA, 20 bp, synthetic construct
  source 1..20: mol_type = other DNA
gtctcgaactcctgacatca

SEQ ID NO: 206117 - DNA, 20 bp, synthetic construct
  source 1..20: mol_type = other DNA
ggtctcgaactcctgacatc

SEQ ID NO: 206118 - DNA, 20 bp, synthetic construct
  source 1..20: mol_type = other DNA
tggtctcgaactcctgacat

SEQ ID NO: 206119 - DNA, 20 bp, synthetic construct
  source 1..20: mol_type = other DNA
ctggtctcgaactcctgaca

SEQ ID NO: 206120 - DNA, 20 bp, synthetic construct
  source 1..20: mol_type = other DNA
gctggtctcgaactcctgac

SEQ ID NO: 206121 - DNA, 20 bp, synthetic construct
  source 1..20: mol_type = other DNA
ggctggtctcgaactcctga

SEQ ID NO: 206122 - DNA, 20 bp, synthetic construct
  source 1..20: mol_type = other DNA
aggctggtctcgaactcctg

SEQ ID NO: 206123 - DNA, 20 bp, synthetic construct
  source 1..20: mol_type = other DNA
taggctggtctcgaactcct

SEQ ID NO: 206124 - DNA, 20 bp, synthetic construct
  source 1..20: mol_type = other DNA
ttaggctggtctcgaactcc

SEQ ID NO: 206125 - DNA, 20 bp, synthetic construct
  source 1..20: mol_type = other DNA
gttaggctggtctcgaactc

SEQ ID NO: 206126 - DNA, 20 bp, synthetic construct
  source 1..20: mol_type = other DNA
ggttaggctggtctcgaact

SEQ ID NO: 206127 - DNA, 20 bp, synthetic construct
  source 1..20: mol_type = other DNA
tggttaggctggtctcgaac

SEQ ID NO: 206128 - DNA, 20 bp, synthetic construct
  source 1..20: mol_type = other DNA
ttggttaggctggtctcgaa

SEQ ID NO: 206129 - DNA, 20 bp, synthetic construct
  source 1..20: mol_type = other DNA
gttggttaggctggtctcga

SEQ ID NO: 206130 - DNA, 20 bp, synthetic construct
  source 1..20: mol_type = other DNA
tgttggttaggctggtctcg

SEQ ID NO: 206131 - DNA, 20 bp, synthetic construct
  source 1..20: mol_type = other DNA
atgttggttaggctggtctc

SEQ ID NO: 206132 - DNA, 20 bp, synthetic construct
  source 1..20: mol_type = other DNA
catgttggttaggctggtct

SEQ ID NO: 206133 - DNA, 20 bp, synthetic construct
  source 1..20: mol_type = other DNA
tcatgttggttaggctggtc

SEQ ID NO: 206134 - DNA, 20 bp, synthetic construct
  source 1..20: mol_type = other DNA
atcatgttggttaggctggt

SEQ ID NO: 206135 - DNA, 20 bp, synthetic construct
  source 1..20: mol_type = other DNA
catcatgttggttaggctgg

SEQ ID NO: 206136 - DNA, 20 bp, synthetic construct
  source 1..20: mol_type = other DNA
tcatcatgttggttaggctg

SEQ ID NO: 206137 - DNA, 20 bp, synthetic construct
  source 1..20: mol_type = other DNA
ttcatcatgttggttaggct

SEQ ID NO: 206138 - DNA, 20 bp, synthetic construct
  source 1..20: mol_type = other DNA
tttcatcatgttggttaggc

SEQ ID NO: 206139 - DNA, 20 bp, synthetic construct
  source 1..20: mol_type = other DNA
gtttcatcatgttggttagg

SEQ ID NO: 206140 - DNA, 20 bp, synthetic construct
  source 1..20: mol_type = other DNA
ggtttcatcatgttggttag

SEQ ID NO: 206141 - DNA, 20 bp, synthetic construct
  source 1..20: mol_type = other DNA
gggtttcatcatgttggtta

SEQ ID NO: 206142 - DNA, 20 bp, synthetic construct
  source 1..20: mol_type = other DNA
ggggtttcatcatgttggtt

SEQ ID NO: 206143 - DNA, 20 bp, synthetic construct
  source 1..20: mol_type = other DNA
tggggtttcatcatgttggt

SEQ ID NO: 206144 - DNA, 20 bp, synthetic construct
  source 1..20: mol_type = other DNA
atggggtttcatcatgttgg

SEQ ID NO: 206145 - DNA, 20 bp, synthetic construct
  source 1..20: mol_type = other DNA
gatggggtttcatcatgttg

SEQ ID NO: 206146 - DNA, 20 bp, synthetic construct
  source 1..20: mol_type = other DNA
agatggggtttcatcatgtt

SEQ ID NO: 206147 - DNA, 20 bp, synthetic construct
  source 1..20: mol_type = other DNA
gagatggggtttcatcatgt

SEQ ID NO: 206148 - DNA, 20 bp, synthetic construct
  source 1..20: mol_type = other DNA
agagatggggtttcatcatg

SEQ ID NO: 206149 - DNA, 20 bp, synthetic construct
  source 1..20: mol_type = other DNA
tagagatggggtttcatcat

SEQ ID NO: 206150 - DNA, 20 bp, synthetic construct
  source 1..20: mol_type = other DNA
gtagagatggggtttcatca

SEQ ID NO: 206151 - DNA, 20 bp, synthetic construct
  source 1..20: mol_type = other DNA
agtagagatggggtttcatc

SEQ ID NO: 206152 - DNA, 20 bp, synthetic construct
  source 1..20: mol_type = other DNA
tagtagagatggggtttcat

SEQ ID NO: 206153 - DNA, 20 bp, synthetic construct
  source 1..20: mol_type = other DNA
ttagtagagatggggtttca

SEQ ID NO: 206154 - DNA, 20 bp, synthetic construct
  source 1..20: mol_type = other DNA
tttagtagagatggggtttc

SEQ ID NO: 206155 - DNA, 20 bp, synthetic construct
  source 1..20: mol_type = other DNA
ttttagtagagatggggttt

SEQ ID NO: 206156 - DNA, 20 bp, synthetic construct
  source 1..20: mol_type = other DNA
tttttagtagagatggggtt

SEQ ID NO: 206157 - DNA, 20 bp, synthetic construct
  source 1..20: mol_type = other DNA
atttttagtagagatggggt

SEQ ID NO: 206158 - DNA, 20 bp, synthetic construct
  source 1..20: mol_type = other DNA
tatttttagtagagatgggg

SEQ ID NO: 206159 - DNA, 20 bp, synthetic construct
  source 1..20: mol_type = other DNA
gtatttttagtagagatggg

SEQ ID NO: 206160 - DNA, 20 bp, synthetic construct
  source 1..20: mol_type = other DNA
tgtatttttagtagagatgg

SEQ ID NO: 206161 - DNA, 20 bp, synthetic construct
  source 1..20: mol_type = other DNA
ttgtatttttagtagagatg

SEQ ID NO: 206162 - DNA, 20 bp, synthetic construct
  source 1..20: mol_type = other DNA
tttgtatttttagtagagat

SEQ ID NO: 206163 - DNA, 20 bp, synthetic construct
  source 1..20: mol_type = other DNA
ttttgtatttttagtagaga

SEQ ID NO: 206164 - DNA, 20 bp, synthetic construct
  source 1..20: mol_type = other DNA
tttttgtatttttagtagag

SEQ ID NO: 206165 - DNA, 20 bp, synthetic construct
  source 1..20: mol_type = other DNA
atttttgtatttttagtaga

SEQ ID NO: 206166 - DNA, 20 bp, synthetic construct
  source 1..20: mol_type = other DNA
aatttttgtatttttagtag

SEQ ID NO: 206167 - DNA, 20 bp, synthetic construct
  source 1..20: mol_type = other DNA
taatttttgtatttttagta

SEQ ID NO: 206168 - DNA, 20 bp, synthetic construct
  source 1..20: mol_type = other DNA
ctaatttttgtatttttagt

SEQ ID NO: 206169 - DNA, 20 bp, synthetic construct
  source 1..20: mol_type = other DNA
gctaatttttgtatttttag

SEQ ID NO: 206170 - DNA, 20 bp, synthetic construct
  source 1..20: mol_type = other DNA
ggctaatttttgtattttta

SEQ ID NO: 206171 - DNA, 20 bp, synthetic construct
  source 1..20: mol_type = other DNA
tggctaatttttgtattttt

SEQ ID NO: 206172 - DNA, 20 bp, synthetic construct
  source 1..20: mol_type = other DNA
ctggctaatttttgtatttt

SEQ ID NO: 206173 - DNA, 20 bp, synthetic construct
  source 1..20: mol_type = other DNA
cctggctaatttttgtattt

SEQ ID NO: 206174 - DNA, 20 bp, synthetic construct
  source 1..20: mol_type = other DNA
gcctggctaatttttgtatt

SEQ ID NO: 206175 - DNA, 20 bp, synthetic construct
  source 1..20: mol_type = other DNA
tgcctggctaatttttgtat

SEQ ID NO: 206176 - DNA, 20 bp, synthetic construct
  source 1..20: mol_type = other DNA
gtgcctggctaatttttgta

SEQ ID NO: 206177 - DNA, 20 bp, synthetic construct
  source 1..20: mol_type = other DNA
cgtgcctggctaatttttgt

SEQ ID NO: 206178 - DNA, 20 bp, synthetic construct
  source 1..20: mol_type = other DNA
ccgtgcctggctaatttttg

SEQ ID NO: 206179 - DNA, 20 bp, synthetic construct
  source 1..20: mol_type = other DNA
accgtgcctggctaattttt

SEQ ID NO: 206180 - DNA, 20 bp, synthetic construct
  source 1..20: mol_type = other DNA
caccgtgcctggctaatttt

SEQ ID NO: 206181 - DNA, 20 bp, synthetic construct
  source 1..20: mol_type = other DNA
ccaccgtgcctggctaattt

SEQ ID NO: 206182 - DNA, 20 bp, synthetic construct
  source 1..20: mol_type = other DNA
accaccgtgcctggctaatt

SEQ ID NO: 206183 - DNA, 20 bp, synthetic construct
  source 1..20: mol_type = other DNA
taccaccgtgcctggctaat

SEQ ID NO: 206184 - DNA, 20 bp, synthetic construct
  source 1..20: mol_type = other DNA
gtaccaccgtgcctggctaa

SEQ ID NO: 206185 - DNA, 20 bp, synthetic construct
  source 1..20: mol_type = other DNA
tgtaccaccgtgcctggcta

SEQ ID NO: 206186 - DNA, 20 bp, synthetic construct
  source 1..20: mol_type = other DNA
gtgtaccaccgtgcctggct

SEQ ID NO: 206187 - DNA, 20 bp, synthetic construct
  source 1..20: mol_type = other DNA
cgtgtaccaccgtgcctggc

SEQ ID NO: 206188 - DNA, 20 bp, synthetic construct
  source 1..20: mol_type = other DNA
gcgtgtaccaccgtgcctgg

SEQ ID NO: 206189 - DNA, 20 bp, synthetic construct
  source 1..20: mol_type = other DNA
ggcgtgtaccaccgtgcctg

SEQ ID NO: 206190 - DNA, 20 bp, synthetic construct
  source 1..20: mol_type = other DNA
aggcgtgtaccaccgtgcct

SEQ ID NO: 206191 - DNA, 20 bp, synthetic construct
  source 1..20: mol_type = other DNA
caggcgtgtaccaccgtgcc

SEQ ID NO: 206192 - DNA, 20 bp, synthetic construct
  source 1..20: mol_type = other DNA
acaggcgtgtaccaccgtgc

SEQ ID NO: 206193 - DNA, 20 bp, synthetic construct
  source 1..20: mol_type = other DNA
tacaggcgtgtaccaccgtg

SEQ ID NO: 206194 - DNA, 20 bp, synthetic construct
  source 1..20: mol_type = other DNA
ttacaggcgtgtaccaccgt

SEQ ID NO: 206195 - DNA, 20 bp, synthetic construct
  source 1..20: mol_type = other DNA
attacaggcgtgtaccaccg

SEQ ID NO: 206196 - DNA, 20 bp, synthetic construct
  source 1..20: mol_type = other DNA
gattacaggcgtgtaccacc

SEQ ID NO: 206197 - DNA, 20 bp, synthetic construct
  source 1..20: mol_type = other DNA
ggattacaggcgtgtaccac

SEQ ID NO: 206198 - DNA, 20 bp, synthetic construct
  source 1..20: mol_type = other DNA
gggattacaggcgtgtacca

SEQ ID NO: 206199 - DNA, 20 bp, synthetic construct
  source 1..20: mol_type = other DNA
tgggattacaggcgtgtacc

SEQ ID NO: 206200 - DNA, 20 bp, synthetic construct
  source 1..20: mol_type = other DNA
ctgggattacaggcgtgtac

SEQ ID NO: 206201 - DNA, 20 bp, synthetic construct
  source 1..20: mol_type = other DNA
gctgggattacaggcgtgta

SEQ ID NO: 206202 - DNA, 20 bp, synthetic construct
  source 1..20: mol_type = other DNA
agctgggattacaggcgtgt

SEQ ID NO: 206203 - DNA, 20 bp, synthetic construct
  source 1..20: mol_type = other DNA
tagctgggattacaggcgtg

SEQ ID NO: 206204 - DNA, 20 bp, synthetic construct
  source 1..20: mol_type = other DNA
gtagctgggattacaggcgt

SEQ ID NO: 206205 - DNA, 20 bp, synthetic construct
  source 1..20: mol_type = other DNA
agtagctgggattacaggcg

SEQ ID NO: 206206 - DNA, 20 bp, synthetic construct
  source 1..20: mol_type = other DNA
cagtagctgggattacaggc

SEQ ID NO: 206207 - DNA, 20 bp, synthetic construct
  source 1..20: mol_type = other DNA
ccagtagctgggattacagg

SEQ ID NO: 206208 - DNA, 20 bp, synthetic construct
  source 1..20: mol_type = other DNA
cccagtagctgggattacag

SEQ ID NO: 206209 - DNA, 20 bp, synthetic construct
  source 1..20: mol_type = other DNA
ccccagtagctgggattaca

SEQ ID NO: 206210 - DNA, 20 bp, synthetic construct
  source 1..20: mol_type = other DNA
tccccagtagctgggattac

SEQ ID NO: 206211 - DNA, 20 bp, synthetic construct
  source 1..20: mol_type = other DNA
ctccccagtagctgggatta

SEQ ID NO: 206212 - DNA, 20 bp, synthetic construct
  source 1..20: mol_type = other DNA
cctccccagtagctgggatt

SEQ ID NO: 206213 - DNA, 20 bp, synthetic construct
  source 1..20: mol_type = other DNA
ccctccccagtagctgggat

SEQ ID NO: 206214 - DNA, 20 bp, synthetic construct
  source 1..20: mol_type = other DNA
accctccccagtagctggga

SEQ ID NO: 206215 - DNA, 20 bp, synthetic construct
  source 1..20: mol_type = other DNA
caccctccccagtagctggg

SEQ ID NO: 206216 - DNA, 20 bp, synthetic construct
  source 1..20: mol_type = other DNA
tcaccctccccagtagctgg

SEQ ID NO: 206217 - DNA, 20 bp, synthetic construct
  source 1..20: mol_type = other DNA
ctcaccctccccagtagctg

SEQ ID NO: 206218 - DNA, 20 bp, synthetic construct
  source 1..20: mol_type = other DNA
cctcaccctccccagtagct

SEQ ID NO: 206219 - DNA, 20 bp, synthetic construct
  source 1..20: mol_type = other DNA
gcctcaccctccccagtagc

SEQ ID NO: 206220 - DNA, 20 bp, synthetic construct
  source 1..20: mol_type = other DNA
tgcctcaccctccccagtag

SEQ ID NO: 206221 - DNA, 20 bp, synthetic construct
  source 1..20: mol_type = other DNA
ctgcctcaccctccccagta

SEQ ID NO: 206222 - DNA, 20 bp, synthetic construct
  source 1..20: mol_type = other DNA
cctgcctcaccctccccagt

SEQ ID NO: 206223 - DNA, 20 bp, synthetic construct
  source 1..20: mol_type = other DNA
tcctgcctcaccctccccag

SEQ ID NO: 206224 - DNA, 20 bp, synthetic construct
  source 1..20: mol_type = other DNA
ctcctgcctcaccctcccca

SEQ ID NO: 206225 - DNA, 20 bp, synthetic construct
  source 1..20: mol_type = other DNA
tctcctgcctcaccctcccc

SEQ ID NO: 206226 - DNA, 20 bp, synthetic construct
  source 1..20: mol_type = other DNA
ttctcctgcctcaccctccc

SEQ ID NO: 206227 - DNA, 20 bp, synthetic construct
  source 1..20: mol_type = other DNA
attctcctgcctcaccctcc

SEQ ID NO: 206228 - DNA, 20 bp, synthetic construct
  source 1..20: mol_type = other DNA
gattctcctgcctcaccctc

SEQ ID NO: 206229 - DNA, 20 bp, synthetic construct
  source 1..20: mol_type = other DNA
agattctcctgcctcaccct

SEQ ID NO: 206230 - DNA, 20 bp, synthetic construct
  source 1..20: mol_type = other DNA
gagattctcctgcctcaccc

SEQ ID NO: 206231 - DNA, 20 bp, synthetic construct
  source 1..20: mol_type = other DNA
agagattctcctgcctcacc

SEQ ID NO: 206232 - DNA, 20 bp, synthetic construct
  source 1..20: mol_type = other DNA
aagagattctcctgcctcac

SEQ ID NO: 206233 - DNA, 20 bp, synthetic construct
  source 1..20: mol_type = other DNA
caagagattctcctgcctca

SEQ ID NO: 206234 - DNA, 20 bp, synthetic construct
  source 1..20: mol_type = other DNA
tcaagagattctcctgcctc

SEQ ID NO: 206235 - DNA, 20 bp, synthetic construct
  source 1..20: mol_type = other DNA
ttcaagagattctcctgcct

SEQ ID NO: 206236 - DNA, 20 bp, synthetic construct
  source 1..20: mol_type = other DNA
gttcaagagattctcctgcc

SEQ ID NO: 206237 - DNA, 20 bp, synthetic construct
  source 1..20: mol_type = other DNA
ggttcaagagattctcctgc

SEQ ID NO: 206238 - DNA, 20 bp, synthetic construct
  source 1..20: mol_type = other DNA
gggttcaagagattctcctg

SEQ ID NO: 206239 - DNA, 20 bp, synthetic construct
  source 1..20: mol_type = other DNA
tgggttcaagagattctcct

SEQ ID NO: 206240 - DNA, 20 bp, synthetic construct
  source 1..20: mol_type = other DNA
ctgggttcaagagattctcc

SEQ ID NO: 206241 - DNA, 20 bp, synthetic construct
  source 1..20: mol_type = other DNA
cctgggttcaagagattctc

SEQ ID NO: 206242 - DNA, 20 bp, synthetic construct
  source 1..20: mol_type = other DNA
tcctgggttcaagagattct

SEQ ID NO: 206243 - DNA, 20 bp, synthetic construct
  source 1..20: mol_type = other DNA
ctcctgggttcaagagattc

SEQ ID NO: 206244 - DNA, 20 bp, synthetic construct
  source 1..20: mol_type = other DNA
cctcctgggttcaagagatt

SEQ ID NO: 206245 - DNA, 20 bp, synthetic construct
  source 1..20: mol_type = other DNA
gcctcctgggttcaagagat

SEQ ID NO: 206246 - DNA, 20 bp, synthetic construct
  source 1..20: mol_type = other DNA
cgcctcctgggttcaagaga

SEQ ID NO: 206247 - DNA, 20 bp, synthetic construct
  source 1..20: mol_type = other DNA
ccgcctcctgggttcaagag

SEQ ID NO: 206248 - DNA, 20 bp, synthetic construct
  source 1..20: mol_type = other DNA
tccgcctcctgggttcaaga

SEQ ID NO: 206249 - DNA, 20 bp, synthetic construct
  source 1..20: mol_type = other DNA
ctccgcctcctgggttcaag

SEQ ID NO: 206250 - DNA, 20 bp, synthetic construct
  source 1..20: mol_type = other DNA
tctccgcctcctgggttcaa

SEQ ID NO: 206251 - DNA, 20 bp, synthetic construct
  source 1..20: mol_type = other DNA
atctccgcctcctgggttca

SEQ ID NO: 206252 - DNA, 20 bp, synthetic construct
  source 1..20: mol_type = other DNA
aatctccgcctcctgggttc

SEQ ID NO: 206253 - DNA, 20 bp, synthetic construct
  source 1..20: mol_type = other DNA
caatctccgcctcctgggtt

SEQ ID NO: 206254 - DNA, 20 bp, synthetic construct
  source 1..20: mol_type = other DNA
gcaatctccgcctcctgggt

SEQ ID NO: 206255 - DNA, 20 bp, synthetic construct
  source 1..20: mol_type = other DNA
tgcaatctccgcctcctggg

SEQ ID NO: 206256 - DNA, 20 bp, synthetic construct
  source 1..20: mol_type = other DNA
ctgcaatctccgcctcctgg

SEQ ID NO: 206257 - DNA, 20 bp, synthetic construct
  source 1..20: mol_type = other DNA
actgcaatctccgcctcctg

SEQ ID NO: 206258 - DNA, 20 bp, synthetic construct
  source 1..20: mol_type = other DNA
cactgcaatctccgcctcct

SEQ ID NO: 206259 - DNA, 20 bp, synthetic construct
  source 1..20: mol_type = other DNA
ccactgcaatctccgcctcc

SEQ ID NO: 206260 - DNA, 20 bp, synthetic construct
  source 1..20: mol_type = other DNA
cccactgcaatctccgcctc

SEQ ID NO: 206261 - DNA, 20 bp, synthetic construct
  source 1..20: mol_type = other DNA
gcccactgcaatctccgcct

SEQ ID NO: 206262 - DNA, 20 bp, synthetic construct
  source 1..20: mol_type = other DNA
ggcccactgcaatctccgcc

SEQ ID NO: 206263 - DNA, 20 bp, synthetic construct
  source 1..20: mol_type = other DNA
tggcccactgcaatctccgc

SEQ ID NO: 206264 - DNA, 20 bp, synthetic construct
  source 1..20: mol_type = other DNA
ttggcccactgcaatctccg

SEQ ID NO: 206265 - DNA, 20 bp, synthetic construct
  source 1..20: mol_type = other DNA
cttggcccactgcaatctcc

SEQ ID NO: 206266 - DNA, 20 bp, synthetic construct
  source 1..20: mol_type = other DNA
tcttggcccactgcaatctc

SEQ ID NO: 206267 - DNA, 20 bp, synthetic construct
  source 1..20: mol_type = other DNA
atcttggcccactgcaatct

SEQ ID NO: 206268 - DNA, 20 bp, synthetic construct
  source 1..20: mol_type = other DNA
gatcttggcccactgcaatc

SEQ ID NO: 206269 - DNA, 20 bp, synthetic construct
  source 1..20: mol_type = other DNA
cgatcttggcccactgcaat

SEQ ID NO: 206270 - DNA, 20 bp, synthetic construct
  source 1..20: mol_type = other DNA
gcgatcttggcccactgcaa

SEQ ID NO: 206271 - DNA, 20 bp, synthetic construct
  source 1..20: mol_type = other DNA
tgcgatcttggcccactgca

SEQ ID NO: 206272 - DNA, 20 bp, synthetic construct
  source 1..20: mol_type = other DNA
gtgcgatcttggcccactgc

SEQ ID NO: 206273 - DNA, 20 bp, synthetic construct
  source 1..20: mol_type = other DNA
ggtgcgatcttggcccactg

SEQ ID NO: 206274 - DNA, 20 bp, synthetic construct
  source 1..20: mol_type = other DNA
tggtgcgatcttggcccact

SEQ ID NO: 206275 - DNA, 20 bp, synthetic construct
  source 1..20: mol_type = other DNA
atggtgcgatcttggcccac

SEQ ID NO: 206276 - DNA, 20 bp, synthetic construct
  source 1..20: mol_type = other DNA
aatggtgcgatcttggccca

SEQ ID NO: 206277 - DNA, 20 bp, synthetic construct
  source 1..20: mol_type = other DNA
caatggtgcgatcttggccc

SEQ ID NO: 206278 - DNA, 20 bp, synthetic construct
  source 1..20: mol_type = other DNA
gcaatggtgcgatcttggcc

SEQ ID NO: 206279 - DNA, 20 bp, synthetic construct
  source 1..20: mol_type = other DNA
tgcaatggtgcgatcttggc

SEQ ID NO: 206280 - DNA, 20 bp, synthetic construct
  source 1..20: mol_type = other DNA
gtgcaatggtgcgatcttgg

SEQ ID NO: 206281 - DNA, 20 bp, synthetic construct
  source 1..20: mol_type = other DNA
agtgcaatggtgcgatcttg

SEQ ID NO: 206282 - DNA, 20 bp, synthetic construct
  source 1..20: mol_type = other DNA
gagtgcaatggtgcgatctt

SEQ ID NO: 206283 - DNA, 20 bp, synthetic construct
  source 1..20: mol_type = other DNA
agagtgcaatggtgcgatct

SEQ ID NO: 206284 - DNA, 20 bp, synthetic construct
  source 1..20: mol_type = other DNA
tagagtgcaatggtgcgatc

SEQ ID NO: 206285 - DNA, 20 bp, synthetic construct
  source 1..20: mol_type = other DNA
ctagagtgcaatggtgcgat

SEQ ID NO: 206286 - DNA, 20 bp, synthetic construct
  source 1..20: mol_type = other DNA
gctagagtgcaatggtgcga

SEQ ID NO: 206287 - DNA, 20 bp, synthetic construct
  source 1..20: mol_type = other DNA
ggctagagtgcaatggtgcg

SEQ ID NO: 206288 - DNA, 20 bp, synthetic construct
  source 1..20: mol_type = other DNA
gggctagagtgcaatggtgc

SEQ ID NO: 206289 - DNA, 20 bp, synthetic construct
  source 1..20: mol_type = other DNA
ggggctagagtgcaatggtg

SEQ ID NO: 206290 - DNA, 20 bp, synthetic construct
  source 1..20: mol_type = other DNA
tggggctagagtgcaatggt

SEQ ID NO: 206291 - DNA, 20 bp, synthetic construct
  source 1..20: mol_type = other DNA
ctggggctagagtgcaatgg

SEQ ID NO: 206292 - DNA, 20 bp, synthetic construct
  source 1..20: mol_type = other DNA
gctggggctagagtgcaatg

SEQ ID NO: 206293 - DNA, 20 bp, synthetic construct
  source 1..20: mol_type = other DNA
tgctggggctagagtgcaat

SEQ ID NO: 206294 - DNA, 20 bp, synthetic construct
  source 1..20: mol_type = other DNA
ttgctggggctagagtgcaa

SEQ ID NO: 206295 - DNA, 20 bp, synthetic construct
  source 1..20: mol_type = other DNA
gttgctggggctagagtgca

SEQ ID NO: 206296 - DNA, 20 bp, synthetic construct
  source 1..20: mol_type = other DNA
tgttgctggggctagagtgc

SEQ ID NO: 206297 - DNA, 20 bp, synthetic construct
  source 1..20: mol_type = other DNA
ttgttgctggggctagagtg

SEQ ID NO: 206298 - DNA, 20 bp, synthetic construct
  source 1..20: mol_type = other DNA
cttgttgctggggctagagt

SEQ ID NO: 206299 - DNA, 20 bp, synthetic construct
  source 1..20: mol_type = other DNA
tcttgttgctggggctagag

SEQ ID NO: 206300 - DNA, 20 bp, synthetic construct
  source 1..20: mol_type = other DNA
ctcttgttgctggggctaga

SEQ ID NO: 206301 - DNA, 20 bp, synthetic construct
  source 1..20: mol_type = other DNA
actcttgttgctggggctag

SEQ ID NO: 206302 - DNA, 20 bp, synthetic construct
  source 1..20: mol_type = other DNA
cactcttgttgctggggcta

SEQ ID NO: 206303 - DNA, 20 bp, synthetic construct
  source 1..20: mol_type = other DNA
tcactcttgttgctggggct

SEQ ID NO: 206304 - DNA, 20 bp, synthetic construct
  source 1..20: mol_type = other DNA
ttcactcttgttgctggggc

SEQ ID NO: 206305 - DNA, 20 bp, synthetic construct
  source 1..20: mol_type = other DNA
tttcactcttgttgctgggg

SEQ ID NO: 206306 - DNA, 20 bp, synthetic construct
  source 1..20: mol_type = other DNA
gtttcactcttgttgctggg

SEQ ID NO: 206307 - DNA, 20 bp, synthetic construct
  source 1..20: mol_type = other DNA
agtttcactcttgttgctgg

SEQ ID NO: 206308 - DNA, 20 bp, synthetic construct
  source 1..20: mol_type = other DNA
gagtttcactcttgttgctg

SEQ ID NO: 206309 - DNA, 20 bp, synthetic construct
  source 1..20: mol_type = other DNA
agagtttcactcttgttgct

SEQ ID NO: 206310 - DNA, 20 bp, synthetic construct
  source 1..20: mol_type = other DNA
cagagtttcactcttgttgc

SEQ ID NO: 206311 - DNA, 20 bp, synthetic construct
  source 1..20: mol_type = other DNA
acagagtttcactcttgttg

SEQ ID NO: 206312 - DNA, 20 bp, synthetic construct
  source 1..20: mol_type = other DNA
aacagagtttcactcttgtt

SEQ ID NO: 206313 - DNA, 20 bp, synthetic construct
  source 1..20: mol_type = other DNA
aaacagagtttcactcttgt

SEQ ID NO: 206314 - DNA, 20 bp, synthetic construct
  source 1..20: mol_type = other DNA
gaaacagagtttcactcttg

SEQ ID NO: 206315 - DNA, 20 bp, synthetic construct
  source 1..20: mol_type = other DNA
tgaaacagagtttcactctt

SEQ ID NO: 206316 - DNA, 20 bp, synthetic construct
  source 1..20: mol_type = other DNA
ttgaaacagagtttcactct

SEQ ID NO: 206317 - DNA, 20 bp, synthetic construct
  source 1..20: mol_type = other DNA
tttgaaacagagtttcactc

SEQ ID NO: 206318 - DNA, 20 bp, synthetic construct
  source 1..20: mol_type = other DNA
gtttgaaacagagtttcact

SEQ ID NO: 206319 - DNA, 20 bp, synthetic construct
  source 1..20: mol_type = other DNA
tgtttgaaacagagtttcac

SEQ ID NO: 206320 - DNA, 20 bp, synthetic construct
  source 1..20: mol_type = other DNA
ttgtttgaaacagagtttca

SEQ ID NO: 206321 - DNA, 20 bp, synthetic construct
  source 1..20: mol_type = other DNA
tttgtttgaaacagagtttc

SEQ ID NO: 206322 - DNA, 20 bp, synthetic construct
  source 1..20: mol_type = other DNA
gtttgtttgaaacagagttt

SEQ ID NO: 206323 - DNA, 20 bp, synthetic construct
  source 1..20: mol_type = other DNA
tgtttgtttgaaacagagtt

SEQ ID NO: 206324 - DNA, 20 bp, synthetic construct
  source 1..20: mol_type = other DNA
ttgtttgtttgaaacagagt

SEQ ID NO: 206325 - DNA, 20 bp, synthetic construct
  source 1..20: mol_type = other DNA
tttgtttgtttgaaacagag

SEQ ID NO: 206326 - DNA, 20 bp, synthetic construct
  source 1..20: mol_type = other DNA
gtttgtttgtttgaaacaga

SEQ ID NO: 206327 - DNA, 20 bp, synthetic construct
  source 1..20: mol_type = other DNA
tgtttgtttgtttgaaacag

SEQ ID NO: 206328 - DNA, 20 bp, synthetic construct
  source 1..20: mol_type = other DNA
ttgtttgtttgtttgaaaca

SEQ ID NO: 206329 - DNA, 20 bp, synthetic construct
  source 1..20: mol_type = other DNA
tttgtttgtttgtttgaaac

SEQ ID NO: 206330 - DNA, 20 bp, synthetic construct
  source 1..20: mol_type = other DNA
ttttgtttgtttgtttgaaa

SEQ ID NO: 206331 - DNA, 20 bp, synthetic construct
  source 1..20: mol_type = other DNA
tttttgtttgtttgtttgaa

SEQ ID NO: 206332 - DNA, 20 bp, synthetic construct
  source 1..20: mol_type = other DNA
ttttttgtttgtttgtttga

SEQ ID NO: 206333 - DNA, 20 bp, synthetic construct
  source 1..20: mol_type = other DNA
tttttttgtttgtttgtttg

SEQ ID NO: 206334 - DNA, 20 bp, synthetic construct
  source 1..20: mol_type = other DNA
ttttttttgtttgtttgttt

SEQ ID NO: 206335 - DNA, 20 bp, synthetic construct
  source 1..20: mol_type = other DNA
tttttttttgtttgtttgtt

SEQ ID NO: 206336 - DNA, 20 bp, synthetic construct
  source 1..20: mol_type = other DNA
ttttttttttgtttgtttgt

SEQ ID NO: 206337 - DNA, 20 bp, synthetic construct
  source 1..20: mol_type = other DNA
tttttttttttgtttgtttg

SEQ ID NO: 206338 - DNA, 20 bp, synthetic construct
  source 1..20: mol_type = other DNA
gtttttttttttgtttgttt

SEQ ID NO: 206339 - DNA, 20 bp, synthetic construct
  source 1..20: mol_type = other DNA
ggtttttttttttgtttgtt

SEQ ID NO: 206340 - DNA, 20 bp, synthetic construct
  source 1..20: mol_type = other DNA
aggtttttttttttgtttgt

SEQ ID NO: 206341 - DNA, 20 bp, synthetic construct
  source 1..20: mol_type = other DNA
gaggtttttttttttgtttg

SEQ ID NO: 206342 - DNA, 20 bp, synthetic construct
  source 1..20: mol_type = other DNA
agaggtttttttttttgttt

SEQ ID NO: 206343 - DNA, 20 bp, synthetic construct
  source 1..20: mol_type = other DNA
aagaggtttttttttttgtt

SEQ ID NO: 206344 - DNA, 20 bp, synthetic construct
  source 1..20: mol_type = other DNA
caagaggtttttttttttgt

SEQ ID NO: 206345 - DNA, 20 bp, synthetic construct
  source 1..20: mol_type = other DNA
ccaagaggtttttttttttg

SEQ ID NO: 206346 - DNA, 20 bp, synthetic construct
  source 1..20: mol_type = other DNA
tccaagaggttttttttttt

SEQ ID NO: 206347 - DNA, 20 bp, synthetic construct
  source 1..20: mol_type = other DNA
gtccaagaggtttttttttt

SEQ ID NO: 206348 - DNA, 20 bp, synthetic construct
  source 1..20: mol_type = other DNA
ggtccaagaggttttttttt

SEQ ID NO: 206349 - DNA, 20 bp, synthetic construct
  source 1..20: mol_type = other DNA
tggtccaagaggtttttttt

SEQ ID NO: 206350 - DNA, 20 bp, synthetic construct
  source 1..20: mol_type = other DNA
ctggtccaagaggttttttt

SEQ ID NO: 206351 - DNA, 20 bp, synthetic construct
  source 1..20: mol_type = other DNA
cctggtccaagaggtttttt

SEQ ID NO: 206352 - DNA, 20 bp, synthetic construct
  source 1..20: mol_type = other DNA
tcctggtccaagaggttttt

SEQ ID NO: 206353 - DNA, 20 bp, synthetic construct
  source 1..20: mol_type = other DNA
ttcctggtccaagaggtttt

SEQ ID NO: 206354 - DNA, 20 bp, synthetic construct
  source 1..20: mol_type = other DNA
tttcctggtccaagaggttt

SEQ ID NO: 206355 - DNA, 20 bp, synthetic construct
  source 1..20: mol_type = other DNA
ttttcctggtccaagaggtt

SEQ ID NO: 206356 - DNA, 20 bp, synthetic construct
  source 1..20: mol_type = other DNA
attttcctggtccaagaggt

SEQ ID NO: 206357 - DNA, 20 bp, synthetic construct
  source 1..20: mol_type = other DNA
tattttcctggtccaagagg

SEQ ID NO: 206358 - DNA, 20 bp, synthetic construct
  source 1..20: mol_type = other DNA
atattttcctggtccaagag

SEQ ID NO: 206359 - DNA, 20 bp, synthetic construct
  source 1..20: mol_type = other DNA
aatattttcctggtccaaga

SEQ ID NO: 206360 - DNA, 20 bp, synthetic construct
  source 1..20: mol_type = other DNA
aaatattttcctggtccaag

SEQ ID NO: 206361 - DNA, 20 bp, synthetic construct
  source 1..20: mol_type = other DNA
aaaatattttcctggtccaa

SEQ ID NO: 206362 - DNA, 20 bp, synthetic construct
  source 1..20: mol_type = other DNA
aaaaatattttcctggtcca

SEQ ID NO: 206363 - DNA, 20 bp, synthetic construct
  source 1..20: mol_type = other DNA
aaaaaatattttcctggtcc

SEQ ID NO: 206364 - DNA, 20 bp, synthetic construct
  source 1..20: mol_type = other DNA
taaaaaatattttcctggtc

SEQ ID NO: 206365 - DNA, 20 bp, synthetic construct
  source 1..20: mol_type = other DNA
ttaaaaaatattttcctggt

SEQ ID NO: 206366 - DNA, 20 bp, synthetic construct
  source 1..20: mol_type = other DNA
cttaaaaaatattttcctgg

SEQ ID NO: 206367 - DNA, 20 bp, synthetic construct
  source 1..20: mol_type = other DNA
ccttaaaaaatattttcctg

SEQ ID NO: 206368 - DNA, 20 bp, synthetic construct
  source 1..20: mol_type = other DNA
cccttaaaaaatattttcct

SEQ ID NO: 206369 - DNA, 20 bp, synthetic construct
  source 1..20: mol_type = other DNA
tcccttaaaaaatattttcc

SEQ ID NO: 206370 - DNA, 20 bp, synthetic construct
  source 1..20: mol_type = other DNA
ctcccttaaaaaatattttc

SEQ ID NO: 206371 - DNA, 20 bp, synthetic construct
  source 1..20: mol_type = other DNA
cctcccttaaaaaatatttt

SEQ ID NO: 206372 - DNA, 20 bp, synthetic construct
  source 1..20: mol_type = other DNA
tcctcccttaaaaaatattt

SEQ ID NO: 206373 - DNA, 20 bp, synthetic construct
  source 1..20: mol_type = other DNA
ctcctcccttaaaaaatatt

SEQ ID NO: 206374 - DNA, 20 bp, synthetic construct
  source 1..20: mol_type = other DNA
actcctcccttaaaaaatat

SEQ ID NO: 206375 - DNA, 20 bp, synthetic construct
  source 1..20: mol_type = other DNA
tactcctcccttaaaaaata

SEQ ID NO: 206376 - DNA, 20 bp, synthetic construct
  source 1..20: mol_type = other DNA
atactcctcccttaaaaaat

SEQ ID NO: 206377 - DNA, 20 bp, synthetic construct
  source 1..20: mol_type = other DNA
aatactcctcccttaaaaaa

SEQ ID NO: 206378 - DNA, 20 bp, synthetic construct
  source 1..20: mol_type = other DNA
aaatactcctcccttaaaaa

SEQ ID NO: 206379 - DNA, 20 bp, synthetic construct
  source 1..20: mol_type = other DNA
aaaatactcctcccttaaaa

SEQ ID NO: 206380 - DNA, 20 bp, synthetic construct
  source 1..20: mol_type = other DNA
taaaatactcctcccttaaa

SEQ ID NO: 206381 - DNA, 20 bp, synthetic construct
  source 1..20: mol_type = other DNA
ataaaatactcctcccttaa

SEQ ID NO: 206382 - DNA, 20 bp, synthetic construct
  source 1..20: mol_type = other DNA
gataaaatactcctccctta

SEQ ID NO: 206383 - DNA, 20 bp, synthetic construct
  source 1..20: mol_type = other DNA
tgataaaatactcctccctt

SEQ ID NO: 206384 - DNA, 20 bp, synthetic construct
  source 1..20: mol_type = other DNA
gtgataaaatactcctccct

SEQ ID NO: 206385 - DNA, 20 bp, synthetic construct
  source 1..20: mol_type = other DNA
agtgataaaatactcctccc

SEQ ID NO: 206386 - DNA, 20 bp, synthetic construct
  source 1..20: mol_type = other DNA
cagtgataaaatactcctcc

SEQ ID NO: 206387 - DNA, 20 bp, synthetic construct
  source 1..20: mol_type = other DNA
ccagtgataaaatactcctc

SEQ ID NO: 206388 - DNA, 20 bp, synthetic construct
  source 1..20: mol_type = other DNA
gccagtgataaaatactcct

SEQ ID NO: 206389 - DNA, 20 bp, synthetic construct
  source 1..20: mol_type = other DNA
tgccagtgataaaatactcc

SEQ ID NO: 206390 - DNA, 20 bp, synthetic construct
  source 1..20: mol_type = other DNA
atgccagtgataaaatactc

SEQ ID NO: 206391 - DNA, 20 bp, synthetic construct
  source 1..20: mol_type = other DNA
aatgccagtgataaaatact

SEQ ID NO: 206392 - DNA, 20 bp, synthetic construct
  source 1..20: mol_type = other DNA
caatgccagtgataaaatac

SEQ ID NO: 206393 - DNA, 20 bp, synthetic construct
  source 1..20: mol_type = other DNA
acaatgccagtgataaaata

SEQ ID NO: 206394 - DNA, 20 bp, synthetic construct
  source 1..20: mol_type = other DNA
aacaatgccagtgataaaat

SEQ ID NO: 206395 - DNA, 20 bp, synthetic construct
  source 1..20: mol_type = other DNA
aaacaatgccagtgataaaa

SEQ ID NO: 206396 - DNA, 20 bp, synthetic construct
  source 1..20: mol_type = other DNA
taaacaatgccagtgataaa

SEQ ID NO: 206397 - DNA, 20 bp, synthetic construct
  source 1..20: mol_type = other DNA
ctaaacaatgccagtgataa

SEQ ID NO: 206398 - DNA, 20 bp, synthetic construct
  source 1..20: mol_type = other DNA
cctaaacaatgccagtgata

SEQ ID NO: 206399 - DNA, 20 bp, synthetic construct
  source 1..20: mol_type = other DNA
tcctaaacaatgccagtgat

SEQ ID NO: 206400 - DNA, 20 bp, synthetic construct
  source 1..20: mol_type = other DNA
atcctaaacaatgccagtga

SEQ ID NO: 206401 - DNA, 20 bp, synthetic construct
  source 1..20: mol_type = other DNA
aatcctaaacaatgccagtg

SEQ ID NO: 206402 - DNA, 20 bp, synthetic construct
  source 1..20: mol_type = other DNA
caatcctaaacaatgccagt

SEQ ID NO: 206403 - DNA, 20 bp, synthetic construct
  source 1..20: mol_type = other DNA
gcaatcctaaacaatgccag

SEQ ID NO: 206404 - DNA, 20 bp, synthetic construct
  source 1..20: mol_type = other DNA
tgcaatcctaaacaatgcca

SEQ ID NO: 206405 - DNA, 20 bp, synthetic construct
  source 1..20: mol_type = other DNA
ctgcaatcctaaacaatgcc

SEQ ID NO: 206406 - DNA, 20 bp, synthetic construct
  source 1..20: mol_type = other DNA
cctgcaatcctaaacaatgc

SEQ ID NO: 206407 - DNA, 20 bp, synthetic construct
  source 1..20: mol_type = other DNA
gcctgcaatcctaaacaatg

SEQ ID NO: 206408 - DNA, 20 bp, synthetic construct
  source 1..20: mol_type = other DNA
tgcctgcaatcctaaacaat

SEQ ID NO: 206409 - DNA, 20 bp, synthetic construct
  source 1..20: mol_type = other DNA
gtgcctgcaatcctaaacaa

SEQ ID NO: 206410 - DNA, 20 bp, synthetic construct
  source 1..20: mol_type = other DNA
tgtgcctgcaatcctaaaca

SEQ ID NO: 206411 - DNA, 20 bp, synthetic construct
  source 1..20: mol_type = other DNA
atgtgcctgcaatcctaaac

SEQ ID NO: 206412 - DNA, 20 bp, synthetic construct
  source 1..20: mol_type = other DNA
catgtgcctgcaatcctaaa

SEQ ID NO: 206413 - DNA, 20 bp, synthetic construct
  source 1..20: mol_type = other DNA
tcatgtgcctgcaatcctaa

SEQ ID NO: 206414 - DNA, 20 bp, synthetic construct
  source 1..20: mol_type = other DNA
atcatgtgcctgcaatccta

SEQ ID NO: 206415 - DNA, 20 bp, synthetic construct
  source 1..20: mol_type = other DNA
catcatgtgcctgcaatcct

SEQ ID NO: 206416 - DNA, 20 bp, synthetic construct
  source 1..20: mol_type = other DNA
gcatcatgtgcctgcaatcc

SEQ ID NO: 206417 - DNA, 20 bp, synthetic construct
  source 1..20: mol_type = other DNA
agcatcatgtgcctgcaatc

SEQ ID NO: 206418 - DNA, 20 bp, synthetic construct
  source 1..20: mol_type = other DNA
tagcatcatgtgcctgcaat

SEQ ID NO: 206419 - DNA, 20 bp, synthetic construct
  source 1..20: mol_type = other DNA
ttagcatcatgtgcctgcaa

SEQ ID NO: 206420 - DNA, 20 bp, synthetic construct
  source 1..20: mol_type = other DNA
attagcatcatgtgcctgca

SEQ ID NO: 206421 - DNA, 20 bp, synthetic construct
  source 1..20: mol_type = other DNA
cattagcatcatgtgcctgc

SEQ ID NO: 206422 - DNA, 20 bp, synthetic construct
  source 1..20: mol_type = other DNA
tcattagcatcatgtgcctg

SEQ ID NO: 206423 - DNA, 20 bp, synthetic construct
  source 1..20: mol_type = other DNA
ttcattagcatcatgtgcct

SEQ ID NO: 206424 - DNA, 20 bp, synthetic construct
  source 1..20: mol_type = other DNA
tttcattagcatcatgtgcc

SEQ ID NO: 206425 - DNA, 20 bp, synthetic construct
  source 1..20: mol_type = other DNA
ttttcattagcatcatgtgc

SEQ ID NO: 206426 - DNA, 20 bp, synthetic construct
  source 1..20: mol_type = other DNA
cttttcattagcatcatgtg

SEQ ID NO: 206427 - DNA, 20 bp, synthetic construct
  source 1..20: mol_type = other DNA
gcttttcattagcatcatgt

SEQ ID NO: 206428 - DNA, 20 bp, synthetic construct
  source 1..20: mol_type = other DNA
tgcttttcattagcatcatg

SEQ ID NO: 206429 - DNA, 20 bp, synthetic construct
  source 1..20: mol_type = other DNA
ctgcttttcattagcatcat

SEQ ID NO: 206430 - DNA, 20 bp, synthetic construct
  source 1..20: mol_type = other DNA
tctgcttttcattagcatca

SEQ ID NO: 206431 - DNA, 20 bp, synthetic construct
  source 1..20: mol_type = other DNA
gtctgcttttcattagcatc

SEQ ID NO: 206432 - DNA, 20 bp, synthetic construct
  source 1..20: mol_type = other DNA
agtctgcttttcattagcat

SEQ ID NO: 206433 - DNA, 20 bp, synthetic construct
  source 1..20: mol_type = other DNA
tagtctgcttttcattagca

SEQ ID NO: 206434 - DNA, 20 bp, synthetic construct
  source 1..20: mol_type = other DNA
ttagtctgcttttcattagc

SEQ ID NO: 206435 - DNA, 20 bp, synthetic construct
  source 1..20: mol_type = other DNA
gttagtctgcttttcattag

SEQ ID NO: 206436 - DNA, 20 bp, synthetic construct
  source 1..20: mol_type = other DNA
agttagtctgcttttcatta

SEQ ID NO: 206437 - DNA, 20 bp, synthetic construct
  source 1..20: mol_type = other DNA
tagttagtctgcttttcatt

SEQ ID NO: 206438 - DNA, 20 bp, synthetic construct
  source 1..20: mol_type = other DNA
atagttagtctgcttttcat

SEQ ID NO: 206439 - DNA, 20 bp, synthetic construct
  source 1..20: mol_type = other DNA
aatagttagtctgcttttca

SEQ ID NO: 206440 - DNA, 20 bp, synthetic construct
  source 1..20: mol_type = other DNA
taatagttagtctgcttttc

SEQ ID NO: 206441 - DNA, 20 bp, synthetic construct
  source 1..20: mol_type = other DNA
ctaatagttagtctgctttt

SEQ ID NO: 206442 - DNA, 20 bp, synthetic construct
  source 1..20: mol_type = other DNA
actaatagttagtctgcttt

SEQ ID NO: 206443 - DNA, 20 bp, synthetic construct
  source 1..20: mol_type = other DNA
aactaatagttagtctgctt

SEQ ID NO: 206444 - DNA, 20 bp, synthetic construct
  source 1..20: mol_type = other DNA
caactaatagttagtctgct

SEQ ID NO: 206445 - DNA, 20 bp, synthetic construct
  source 1..20: mol_type = other DNA
ccaactaatagttagtctgc

SEQ ID NO: 206446 - DNA, 20 bp, synthetic construct
  source 1..20: mol_type = other DNA
accaactaatagttagtctg

SEQ ID NO: 206447 - DNA, 20 bp, synthetic construct
  source 1..20: mol_type = other DNA
aaccaactaatagttagtct

SEQ ID NO: 206448 - DNA, 20 bp, synthetic construct
  source 1..20: mol_type = other DNA
aaaccaactaatagttagtc

SEQ ID NO: 206449 - DNA, 20 bp, synthetic construct
  source 1..20: mol_type = other DNA
aaaaccaactaatagttagt

SEQ ID NO: 206450 - DNA, 20 bp, synthetic construct
  source 1..20: mol_type = other DNA
taaaaccaactaatagttag

SEQ ID NO: 206451 - DNA, 20 bp, synthetic construct
  source 1..20: mol_type = other DNA
ataaaaccaactaatagtta

SEQ ID NO: 206452 - DNA, 20 bp, synthetic construct
  source 1..20: mol_type = other DNA
aataaaaccaactaatagtt

SEQ ID NO: 206453 - DNA, 20 bp, synthetic construct
  source 1..20: mol_type = other DNA
taataaaaccaactaatagt

SEQ ID NO: 206454 - DNA, 20 bp, synthetic construct
  source 1..20: mol_type = other DNA
gtaataaaaccaactaatag

SEQ ID NO: 206455 - DNA, 20 bp, synthetic construct
  source 1..20: mol_type = other DNA
agtaataaaaccaactaata

SEQ ID NO: 206456 - DNA, 20 bp, synthetic construct
  source 1..20: mol_type = other DNA
cagtaataaaaccaactaat

SEQ ID NO: 206457 - DNA, 20 bp, synthetic construct
  source 1..20: mol_type = other DNA
acagtaataaaaccaactaa

SEQ ID NO: 206458 - DNA, 20 bp, synthetic construct
  source 1..20: mol_type = other DNA
aacagtaataaaaccaacta

SEQ ID NO: 206459 - DNA, 20 bp, synthetic construct
  source 1..20: mol_type = other DNA
aaacagtaataaaaccaact

SEQ ID NO: 206460 - DNA, 20 bp, synthetic construct
  source 1..20: mol_type = other DNA
aaaacagtaataaaaccaac

SEQ ID NO: 206461 - DNA, 20 bp, synthetic construct
  source 1..20: mol_type = other DNA
aaaaacagtaataaaaccaa

SEQ ID NO: 206462 - DNA, 20 bp, synthetic construct
  source 1..20: mol_type = other DNA
caaaaacagtaataaaacca

SEQ ID NO: 206463 - DNA, 20 bp, synthetic construct
  source 1..20: mol_type = other DNA
tcaaaaacagtaataaaacc

SEQ ID NO: 206464 - DNA, 20 bp, synthetic construct
  source 1..20: mol_type = other DNA
ttcaaaaacagtaataaaac

SEQ ID NO: 206465 - DNA, 20 bp, synthetic construct
  source 1..20: mol_type = other DNA
gttcaaaaacagtaataaaa

SEQ ID NO: 206466 - DNA, 20 bp, synthetic construct
  source 1..20: mol_type = other DNA
agttcaaaaacagtaataaa

SEQ ID NO: 206467 - DNA, 20 bp, synthetic construct
  source 1..20: mol_type = other DNA
gagttcaaaaacagtaataa

SEQ ID NO: 206468 - DNA, 20 bp, synthetic construct
  source 1..20: mol_type = other DNA
agagttcaaaaacagtaata

SEQ ID NO: 206469 - DNA, 20 bp, synthetic construct
  source 1..20: mol_type = other DNA
gagagttcaaaaacagtaat

SEQ ID NO: 206470 - DNA, 20 bp, synthetic construct
  source 1..20: mol_type = other DNA
agagagttcaaaaacagtaa

SEQ ID NO: 206471 - DNA, 20 bp, synthetic construct
  source 1..20: mol_type = other DNA
gagagagttcaaaaacagta

SEQ ID NO: 206472 - DNA, 20 bp, synthetic construct
  source 1..20: mol_type = other DNA
agagagagttcaaaaacagt

SEQ ID NO: 206473 - DNA, 20 bp, synthetic construct
  source 1..20: mol_type = other DNA
gagagagagttcaaaaacag

SEQ ID NO: 206474 - DNA, 20 bp, synthetic construct
  source 1..20: mol_type = other DNA
agagagagagttcaaaaaca

SEQ ID NO: 206475 - DNA, 20 bp, synthetic construct
  source 1..20: mol_type = other DNA
gagagagagagttcaaaaac

SEQ ID NO: 206476 - DNA, 20 bp, synthetic construct
  source 1..20: mol_type = other DNA
ggagagagagagttcaaaaa

SEQ ID NO: 206477 - DNA, 20 bp, synthetic construct
  source 1..20: mol_type = other DNA
gggagagagagagttcaaaa

SEQ ID NO: 206478 - DNA, 20 bp, synthetic construct
  source 1..20: mol_type = other DNA
agggagagagagagttcaaa

SEQ ID NO: 206479 - DNA, 20 bp, synthetic construct
  source 1..20: mol_type = other DNA
aagggagagagagagttcaa

SEQ ID NO: 206480 - DNA, 20 bp, synthetic construct
  source 1..20: mol_type = other DNA
aaagggagagagagagttca

SEQ ID NO: 206481 - DNA, 20 bp, synthetic construct
  source 1..20: mol_type = other DNA
aaaagggagagagagagttc

SEQ ID NO: 206482 - DNA, 20 bp, synthetic construct
  source 1..20: mol_type = other DNA
aaaaagggagagagagagtt

SEQ ID NO: 206483 - DNA, 20 bp, synthetic construct
  source 1..20: mol_type = other DNA
aaaaaagggagagagagagt

SEQ ID NO: 206484 - DNA, 20 bp, synthetic construct
  source 1..20: mol_type = other DNA
aaaaaaagggagagagagag

SEQ ID NO: 206485 - DNA, 20 bp, synthetic construct
  source 1..20: mol_type = other DNA
aaaaaaaagggagagagaga

SEQ ID NO: 206486 - DNA, 20 bp, synthetic construct
  source 1..20: mol_type = other DNA
aaaaaaaaagggagagagag

SEQ ID NO: 206487 - DNA, 20 bp, synthetic construct
  source 1..20: mol_type = other DNA
aaaaaaaaaagggagagaga

SEQ ID NO: 206488 - DNA, 20 bp, synthetic construct
  source 1..20: mol_type = other DNA
aaaaaaaaaaagggagagag

SEQ ID NO: 206489 - DNA, 20 bp, synthetic construct
  source 1..20: mol_type = other DNA
aaaaaaaaaaaagggagaga

SEQ ID NO: 206490 - DNA, 20 bp, synthetic construct
  source 1..20: mol_type = other DNA
aaaaaaaaaaaaagggagag

SEQ ID NO: 206491 - DNA, 20 bp, synthetic construct
  source 1..20: mol_type = other DNA
aaaaaaaaaaaaaagggaga

SEQ ID NO: 206492 - DNA, 20 bp, synthetic construct
  source 1..20: mol_type = other DNA
caaaaaaaaaaaaaagggag

SEQ ID NO: 206493 - DNA, 20 bp, synthetic construct
  source 1..20: mol_type = other DNA
tcaaaaaaaaaaaaaaggga

SEQ ID NO: 206494 - DNA, 20 bp, synthetic construct
  source 1..20: mol_type = other DNA
ctcaaaaaaaaaaaaaaggg

SEQ ID NO: 206495 - DNA, 20 bp, synthetic construct
  source 1..20: mol_type = other DNA
tctcaaaaaaaaaaaaaagg

SEQ ID NO: 206496 - DNA, 20 bp, synthetic construct
  source 1..20: mol_type = other DNA
gtctcaaaaaaaaaaaaaag

SEQ ID NO: 206497 - DNA, 20 bp, synthetic construct
  source 1..20: mol_type = other DNA
tgtctcaaaaaaaaaaaaaa

SEQ ID NO: 206498 - DNA, 20 bp, synthetic construct
  source 1..20: mol_type = other DNA
ctgtctcaaaaaaaaaaaaa

SEQ ID NO: 206499 - DNA, 20 bp, synthetic construct
  source 1..20: mol_type = other DNA
tctgtctcaaaaaaaaaaaa

SEQ ID NO: 206500 - DNA, 20 bp, synthetic construct
  source 1..20: mol_type = other DNA
ctctgtctcaaaaaaaaaaa

SEQ ID NO: 206501 - DNA, 20 bp, synthetic construct
  source 1..20: mol_type = other DNA
actctgtctcaaaaaaaaaa

SEQ ID NO: 206502 - DNA, 20 bp, synthetic construct
  source 1..20: mol_type = other DNA
gactctgtctcaaaaaaaaa

SEQ ID NO: 206503 - DNA, 20 bp, synthetic construct
  source 1..20: mol_type = other DNA
agactctgtctcaaaaaaaa

SEQ ID NO: 206504 - DNA, 20 bp, synthetic construct
  source 1..20: mol_type = other DNA
gagactctgtctcaaaaaaa

SEQ ID NO: 206505 - DNA, 20 bp, synthetic construct
  source 1..20: mol_type = other DNA
agagactctgtctcaaaaaa

SEQ ID NO: 206506 - DNA, 20 bp, synthetic construct
  source 1..20: mol_type = other DNA
gagagactctgtctcaaaaa

SEQ ID NO: 206507 - DNA, 20 bp, synthetic construct
  source 1..20: mol_type = other DNA
agagagactctgtctcaaaa

SEQ ID NO: 206508 - DNA, 20 bp, synthetic construct
  source 1..20: mol_type = other DNA
gagagagactctgtctcaaa

SEQ ID NO: 206509 - DNA, 20 bp, synthetic construct
  source 1..20: mol_type = other DNA
agagagagactctgtctcaa

SEQ ID NO: 206510 - DNA, 20 bp, synthetic construct
  source 1..20: mol_type = other DNA
gagagagagactctgtctca

SEQ ID NO: 206511 - DNA, 20 bp, synthetic construct
  source 1..20: mol_type = other DNA
agagagagagactctgtctc

SEQ ID NO: 206512 - DNA, 20 bp, synthetic construct
  source 1..20: mol_type = other DNA
cagagagagagactctgtct

SEQ ID NO: 206513 - DNA, 20 bp, synthetic construct
  source 1..20: mol_type = other DNA
acagagagagagactctgtc

SEQ ID NO: 206514 - DNA, 20 bp, synthetic construct
  source 1..20: mol_type = other DNA
gacagagagagagactctgt

SEQ ID NO: 206515 - DNA, 20 bp, synthetic construct
  source 1..20: mol_type = other DNA
tgacagagagagagactctg

SEQ ID NO: 206516 - DNA, 20 bp, synthetic construct
  source 1..20: mol_type = other DNA
gtgacagagagagagactct

SEQ ID NO: 206517 - DNA, 20 bp, synthetic construct
  source 1..20: mol_type = other DNA
ggtgacagagagagagactc

SEQ ID NO: 206518 - DNA, 20 bp, synthetic construct
  source 1..20: mol_type = other DNA
gggtgacagagagagagact

SEQ ID NO: 206519 - DNA, 20 bp, synthetic construct
  source 1..20: mol_type = other DNA
tgggtgacagagagagagac

SEQ ID NO: 206520 - DNA, 20 bp, synthetic construct
  source 1..20: mol_type = other DNA
ctgggtgacagagagagaga

SEQ ID NO: 206521 - DNA, 20 bp, synthetic construct
  source 1..20: mol_type = other DNA
cctgggtgacagagagagag

SEQ ID NO: 206522 - DNA, 20 bp, synthetic construct
  source 1..20: mol_type = other DNA
gcctgggtgacagagagaga

SEQ ID NO: 206523 - DNA, 20 bp, synthetic construct
  source 1..20: mol_type = other DNA
agcctgggtgacagagagag

SEQ ID NO: 206524 - DNA, 20 bp, synthetic construct
  source 1..20: mol_type = other DNA
cagcctgggtgacagagaga

SEQ ID NO: 206525 - DNA, 20 bp, synthetic construct
  source 1..20: mol_type = other DNA
ccagcctgggtgacagagag

SEQ ID NO: 206526 - DNA, 20 bp, synthetic construct
  source 1..20: mol_type = other DNA
tccagcctgggtgacagaga

SEQ ID NO: 206527 - DNA, 20 bp, synthetic construct
  source 1..20: mol_type = other DNA
ttccagcctgggtgacagag

SEQ ID NO: 206528 - DNA, 20 bp, synthetic construct
  source 1..20: mol_type = other DNA
attccagcctgggtgacaga

SEQ ID NO: 206529 - DNA, 20 bp, synthetic construct
  source 1..20: mol_type = other DNA
cattccagcctgggtgacag

SEQ ID NO: 206530 - DNA, 20 bp, synthetic construct
  source 1..20: mol_type = other DNA
gcattccagcctgggtgaca

SEQ ID NO: 206531 - DNA, 20 bp, synthetic construct
  source 1..20: mol_type = other DNA
tgcattccagcctgggtgac

SEQ ID NO: 206532 - DNA, 20 bp, synthetic construct
  source 1..20: mol_type = other DNA
ctgcattccagcctgggtga

SEQ ID NO: 206533 - DNA, 20 bp, synthetic construct
  source 1..20: mol_type = other DNA
actgcattccagcctgggtg

SEQ ID NO: 206534 - DNA, 20 bp, synthetic construct
  source 1..20: mol_type = other DNA
cactgcattccagcctgggt

SEQ ID NO: 206535 - DNA, 20 bp, synthetic construct
  source 1..20: mol_type = other DNA
tcactgcattccagcctggg

SEQ ID NO: 206536 - DNA, 20 bp, synthetic construct
  source 1..20: mol_type = other DNA
gtcactgcattccagcctgg

SEQ ID NO: 206537 - DNA, 20 bp, synthetic construct
  source 1..20: mol_type = other DNA
agtcactgcattccagcctg

SEQ ID NO: 206538 - DNA, 20 bp, synthetic construct
  source 1..20: mol_type = other DNA
cagtcactgcattccagcct

SEQ ID NO: 206539 - DNA, 20 bp, synthetic construct
  source 1..20: mol_type = other DNA
gcagtcactgcattccagcc

SEQ ID NO: 206540 - DNA, 20 bp, synthetic construct
  source 1..20: mol_type = other DNA
tgcagtcactgcattccagc

SEQ ID NO: 206541 - DNA, 20 bp, synthetic construct
  source 1..20: mol_type = other DNA
ctgcagtcactgcattccag

SEQ ID NO: 206542 - DNA, 20 bp, synthetic construct
  source 1..20: mol_type = other DNA
actgcagtcactgcattcca

SEQ ID NO: 206543 - DNA, 20 bp, synthetic construct
  source 1..20: mol_type = other DNA
gactgcagtcactgcattcc

SEQ ID NO: 206544 - DNA, 20 bp, synthetic construct
  source 1..20: mol_type = other DNA
agactgcagtcactgcattc

SEQ ID NO: 206545 - DNA, 20 bp, synthetic construct
  source 1..20: mol_type = other DNA
gagactgcagtcactgcatt

SEQ ID NO: 206546 - DNA, 20 bp, synthetic construct
  source 1..20: mol_type = other DNA
tgagactgcagtcactgcat

SEQ ID NO: 206547 - DNA, 20 bp, synthetic construct
  source 1..20: mol_type = other DNA
ctgagactgcagtcactgca

SEQ ID NO: 206548 - DNA, 20 bp, synthetic construct
  source 1..20: mol_type = other DNA
gctgagactgcagtcactgc

SEQ ID NO: 206549 - DNA, 20 bp, synthetic construct
  source 1..20: mol_type = other DNA
agctgagactgcagtcactg

SEQ ID NO: 206550 - DNA, 20 bp, synthetic construct
  source 1..20: mol_type = other DNA
gagctgagactgcagtcact

SEQ ID NO: 206551 - DNA, 20 bp, synthetic construct
  source 1..20: mol_type = other DNA
tgagctgagactgcagtcac

SEQ ID NO: 206552 - DNA, 20 bp, synthetic construct
  source 1..20: mol_type = other DNA
gtgagctgagactgcagtca

SEQ ID NO: 206553 - DNA, 20 bp, synthetic construct
  source 1..20: mol_type = other DNA
agtgagctgagactgcagtc

SEQ ID NO: 206554 - DNA, 20 bp, synthetic construct
  source 1..20: mol_type = other DNA
tagtgagctgagactgcagt

SEQ ID NO: 206555 - DNA, 20 bp, synthetic construct
  source 1..20: mol_type = other DNA
gtagtgagctgagactgcag

SEQ ID NO: 206556 - DNA, 20 bp, synthetic construct
  source 1..20: mol_type = other DNA
tgtagtgagctgagactgca

SEQ ID NO: 206557 - DNA, 20 bp, synthetic construct
  source 1..20: mol_type = other DNA
atgtagtgagctgagactgc

SEQ ID NO: 206558 - DNA, 20 bp, synthetic construct
  source 1..20: mol_type = other DNA
gatgtagtgagctgagactg

SEQ ID NO: 206559 - DNA, 20 bp, synthetic construct
  source 1..20: mol_type = other DNA
ggatgtagtgagctgagact

SEQ ID NO: 206560 - DNA, 20 bp, synthetic construct
  source 1..20: mol_type = other DNA
aggatgtagtgagctgagac

SEQ ID NO: 206561 - DNA, 20 bp, synthetic construct
  source 1..20: mol_type = other DNA
gaggatgtagtgagctgaga

SEQ ID NO: 206562 - DNA, 20 bp, synthetic construct
  source 1..20: mol_type = other DNA
agaggatgtagtgagctgag

SEQ ID NO: 206563 - DNA, 20 bp, synthetic construct
  source 1..20: mol_type = other DNA
cagaggatgtagtgagctga

SEQ ID NO: 206564 - DNA, 20 bp, synthetic construct
  source 1..20: mol_type = other DNA
gcagaggatgtagtgagctg

SEQ ID NO: 206565 - DNA, 20 bp, synthetic construct
  source 1..20: mol_type = other DNA
ggcagaggatgtagtgagct

SEQ ID NO: 206566 - DNA, 20 bp, synthetic construct
  source 1..20: mol_type = other DNA
aggcagaggatgtagtgagc

SEQ ID NO: 206567 - DNA, 20 bp, synthetic construct
  source 1..20: mol_type = other DNA
gaggcagaggatgtagtgag

SEQ ID NO: 206568 - DNA, 20 bp, synthetic construct
  source 1..20: mol_type = other DNA
ggaggcagaggatgtagtga

SEQ ID NO: 206569 - DNA, 20 bp, synthetic construct
  source 1..20: mol_type = other DNA
aggaggcagaggatgtagtg

SEQ ID NO: 206570 - DNA, 20 bp, synthetic construct
  source 1..20: mol_type = other DNA
gaggaggcagaggatgtagt

SEQ ID NO: 206571 - DNA, 20 bp, synthetic construct
  source 1..20: mol_type = other DNA
tgaggaggcagaggatgtag

SEQ ID NO: 206572 - DNA, 20 bp, synthetic construct
  source 1..20: mol_type = other DNA
ctgaggaggcagaggatgta

SEQ ID NO: 206573 - DNA, 20 bp, synthetic construct
  source 1..20: mol_type = other DNA
actgaggaggcagaggatgt

SEQ ID NO: 206574 - DNA, 20 bp, synthetic construct
  source 1..20: mol_type = other DNA
aactgaggaggcagaggatg

SEQ ID NO: 206575 - DNA, 20 bp, synthetic construct
  source 1..20: mol_type = other DNA
gaactgaggaggcagaggat

SEQ ID NO: 206576 - DNA, 20 bp, synthetic construct
  source 1..20: mol_type = other DNA
tgaactgaggaggcagagga

SEQ ID NO: 206577 - DNA, 20 bp, synthetic construct
  source 1..20: mol_type = other DNA
ttgaactgaggaggcagagg

SEQ ID NO: 206578 - DNA, 20 bp, synthetic construct
  source 1..20: mol_type = other DNA
cttgaactgaggaggcagag

SEQ ID NO: 206579 - DNA, 20 bp, synthetic construct
  source 1..20: mol_type = other DNA
acttgaactgaggaggcaga

SEQ ID NO: 206580 - DNA, 20 bp, synthetic construct
  source 1..20: mol_type = other DNA
cacttgaactgaggaggcag

SEQ ID NO: 206581 - DNA, 20 bp, synthetic construct
  source 1..20: mol_type = other DNA
tcacttgaactgaggaggca

SEQ ID NO: 206582 - DNA, 20 bp, synthetic construct
  source 1..20: mol_type = other DNA
atcacttgaactgaggaggc

SEQ ID NO: 206583 - DNA, 20 bp, synthetic construct
  source 1..20: mol_type = other DNA
aatcacttgaactgaggagg

SEQ ID NO: 206584 - DNA, 20 bp, synthetic construct
  source 1..20: mol_type = other DNA
gaatcacttgaactgaggag

SEQ ID NO: 206585 - DNA, 20 bp, synthetic construct
  source 1..20: mol_type = other DNA
agaatcacttgaactgagga

SEQ ID NO: 206586 - DNA, 20 bp, synthetic construct
  source 1..20: mol_type = other DNA
gagaatcacttgaactgagg

SEQ ID NO: 206587 - DNA, 20 bp, synthetic construct
  source 1..20: mol_type = other DNA
cgagaatcacttgaactgag

SEQ ID NO: 206588 - DNA, 20 bp, synthetic construct
  source 1..20: mol_type = other DNA
acgagaatcacttgaactga

SEQ ID NO: 206589 - DNA, 20 bp, synthetic construct
  source 1..20: mol_type = other DNA
cacgagaatcacttgaactg

SEQ ID NO: 206590 - DNA, 20 bp, synthetic construct
  source 1..20: mol_type = other DNA
gcacgagaatcacttgaact

SEQ ID NO: 206591 - DNA, 20 bp, synthetic construct
  source 1..20: mol_type = other DNA
ggcacgagaatcacttgaac

SEQ ID NO: 206592 - DNA, 20 bp, synthetic construct
  source 1..20: mol_type = other DNA
aggcacgagaatcacttgaa

SEQ ID NO: 206593 - DNA, 20 bp, synthetic construct
  source 1..20: mol_type = other DNA
gaggcacgagaatcacttga

SEQ ID NO: 206594 - DNA, 20 bp, synthetic construct
  source 1..20: mol_type = other DNA
tgaggcacgagaatcacttg

SEQ ID NO: 206595 - DNA, 20 bp, synthetic construct
  source 1..20: mol_type = other DNA
ctgaggcacgagaatcactt

SEQ ID NO: 206596 - DNA, 20 bp, synthetic construct
  source 1..20: mol_type = other DNA
gctgaggcacgagaatcact

SEQ ID NO: 206597 - DNA, 20 bp, synthetic construct
  source 1..20: mol_type = other DNA
ggctgaggcacgagaatcac

SEQ ID NO: 206598 - DNA, 20 bp, synthetic construct
  source 1..20: mol_type = other DNA
aggctgaggcacgagaatca

SEQ ID NO: 206599 - DNA, 20 bp, synthetic construct
  source 1..20: mol_type = other DNA
gaggctgaggcacgagaatc

SEQ ID NO: 206600 - DNA, 20 bp, synthetic construct
  source 1..20: mol_type = other DNA
ggaggctgaggcacgagaat

SEQ ID NO: 206601 - DNA, 20 bp, synthetic construct
  source 1..20: mol_type = other DNA
gggaggctgaggcacgagaa

SEQ ID NO: 206602 - DNA, 20 bp, synthetic construct
  source 1..20: mol_type = other DNA
cgggaggctgaggcacgaga

SEQ ID NO: 206603 - DNA, 20 bp, synthetic construct
  source 1..20: mol_type = other DNA
tcgggaggctgaggcacgag

SEQ ID NO: 206604 - DNA, 20 bp, synthetic construct
  source 1..20: mol_type = other DNA
ctcgggaggctgaggcacga

SEQ ID NO: 206605 - DNA, 20 bp, synthetic construct
  source 1..20: mol_type = other DNA
actcgggaggctgaggcacg

SEQ ID NO: 206606 - DNA, 20 bp, synthetic construct
  source 1..20: mol_type = other DNA
tactcgggaggctgaggcac

SEQ ID NO: 206607 - DNA, 20 bp, synthetic construct
  source 1..20: mol_type = other DNA
ctactcgggaggctgaggca

SEQ ID NO: 206608 - DNA, 20 bp, synthetic construct
  source 1..20: mol_type = other DNA
gctactcgggaggctgaggc

SEQ ID NO: 206609 - DNA, 20 bp, synthetic construct
  source 1..20: mol_type = other DNA
agctactcgggaggctgagg

SEQ ID NO: 206610 - DNA, 20 bp, synthetic construct
  source 1..20: mol_type = other DNA
cagctactcgggaggctgag

SEQ ID NO: 206611 - DNA, 20 bp, synthetic construct
  source 1..20: mol_type = other DNA
ccagctactcgggaggctga

SEQ ID NO: 206612 - DNA, 20 bp, synthetic construct
  source 1..20: mol_type = other DNA
cccagctactcgggaggctg

SEQ ID NO: 206613 - DNA, 20 bp, synthetic construct
  source 1..20: mol_type = other DNA
tcccagctactcgggaggct

SEQ ID NO: 206614 - DNA, 20 bp, synthetic construct
  source 1..20: mol_type = other DNA
atcccagctactcgggaggc

SEQ ID NO: 206615 - DNA, 20 bp, synthetic construct
  source 1..20: mol_type = other DNA
aatcccagctactcgggagg

SEQ ID NO: 206616 - DNA, 20 bp, synthetic construct
  source 1..20: mol_type = other DNA
taatcccagctactcgggag

SEQ ID NO: 206617 - DNA, 20 bp, synthetic construct
  source 1..20: mol_type = other DNA
gtaatcccagctactcggga

SEQ ID NO: 206618 - DNA, 20 bp, synthetic construct
  source 1..20: mol_type = other DNA
tgtaatcccagctactcggg

SEQ ID NO: 206619 - DNA, 20 bp, synthetic construct
  source 1..20: mol_type = other DNA
ctgtaatcccagctactcgg

SEQ ID NO: 206620 - DNA, 20 bp, synthetic construct
  source 1..20: mol_type = other DNA
cctgtaatcccagctactcg

SEQ ID NO: 206621 - DNA, 20 bp, synthetic construct
  source 1..20: mol_type = other DNA
ccctgtaatcccagctactc

SEQ ID NO: 206622 - DNA, 20 bp, synthetic construct
  source 1..20: mol_type = other DNA
gccctgtaatcccagctact

SEQ ID NO: 206623 - DNA, 20 bp, synthetic construct
  source 1..20: mol_type = other DNA
tgccctgtaatcccagctac

SEQ ID NO: 206624 - DNA, 20 bp, synthetic construct
  source 1..20: mol_type = other DNA
gtgccctgtaatcccagcta

SEQ ID NO: 206625 - DNA, 20 bp, synthetic construct
  source 1..20: mol_type = other DNA
ggtgccctgtaatcccagct

SEQ ID NO: 206626 - DNA, 20 bp, synthetic construct
  source 1..20: mol_type = other DNA
tggtgccctgtaatcccagc

SEQ ID NO: 206627 - DNA, 20 bp, synthetic construct
  source 1..20: mol_type = other DNA
gtggtgccctgtaatcccag

SEQ ID NO: 206628 - DNA, 20 bp, synthetic construct
  source 1..20: mol_type = other DNA
tgtggtgccctgtaatccca

SEQ ID NO: 206629 - DNA, 20 bp, synthetic construct
  source 1..20: mol_type = other DNA
gtgtggtgccctgtaatccc

SEQ ID NO: 206630 - DNA, 20 bp, synthetic construct
  source 1..20: mol_type = other DNA
ggtgtggtgccctgtaatcc

SEQ ID NO: 206631 - DNA, 20 bp, synthetic construct
  source 1..20: mol_type = other DNA
tggtgtggtgccctgtaatc

SEQ ID NO: 206632 - DNA, 20 bp, synthetic construct
  source 1..20: mol_type = other DNA
ctggtgtggtgccctgtaat

SEQ ID NO: 206633 - DNA, 20 bp, synthetic construct
  source 1..20: mol_type = other DNA
cctggtgtggtgccctgtaa

SEQ ID NO: 206634 - DNA, 20 bp, synthetic construct
  source 1..20: mol_type = other DNA
gcctggtgtggtgccctgta

SEQ ID NO: 206635 - DNA, 20 bp, synthetic construct
  source 1..20: mol_type = other DNA
agcctggtgtggtgccctgt

SEQ ID NO: 206636 - DNA, 20 bp, synthetic construct
  source 1..20: mol_type = other DNA
tagcctggtgtggtgccctg

SEQ ID NO: 206637 - DNA, 20 bp, synthetic construct
  source 1..20: mol_type = other DNA
ttagcctggtgtggtgccct

SEQ ID NO: 206638 - DNA, 20 bp, synthetic construct
  source 1..20: mol_type = other DNA
cttagcctggtgtggtgccc

SEQ ID NO: 206639 - DNA, 20 bp, synthetic construct
  source 1..20: mol_type = other DNA
acttagcctggtgtggtgcc

SEQ ID NO: 206640 - DNA, 20 bp, synthetic construct
  source 1..20: mol_type = other DNA
aacttagcctggtgtggtgc

SEQ ID NO: 206641 - DNA, 20 bp, synthetic construct
  source 1..20: mol_type = other DNA
aaacttagcctggtgtggtg

SEQ ID NO: 206642 - DNA, 20 bp, synthetic construct
  source 1..20: mol_type = other DNA
aaaacttagcctggtgtggt

SEQ ID NO: 206643 - DNA, 20 bp, synthetic construct
  source 1..20: mol_type = other DNA
aaaaacttagcctggtgtgg

SEQ ID NO: 206644 - DNA, 20 bp, synthetic construct
  source 1..20: mol_type = other DNA
caaaaacttagcctggtgtg

SEQ ID NO: 206645 - DNA, 20 bp, synthetic construct
  source 1..20: mol_type = other DNA
acaaaaacttagcctggtgt

SEQ ID NO: 206646 - DNA, 20 bp, synthetic construct
  source 1..20: mol_type = other DNA
tacaaaaacttagcctggtg

SEQ ID NO: 206647 - DNA, 20 bp, synthetic construct
  source 1..20: mol_type = other DNA
atacaaaaacttagcctggt

SEQ ID NO: 206648 - DNA, 20 bp, synthetic construct
  source 1..20: mol_type = other DNA
aatacaaaaacttagcctgg

SEQ ID NO: 206649 - DNA, 20 bp, synthetic construct
  source 1..20: mol_type = other DNA
aaatacaaaaacttagcctg

SEQ ID NO: 206650 - DNA, 20 bp, synthetic construct
  source 1..20: mol_type = other DNA
aaaatacaaaaacttagcct

SEQ ID NO: 206651 - DNA, 20 bp, synthetic construct
  source 1..20: mol_type = other DNA
aaaaatacaaaaacttagcc

SEQ ID NO: 206652 - DNA, 20 bp, synthetic construct
  source 1..20: mol_type = other DNA
taaaaatacaaaaacttagc

SEQ ID NO: 206653 - DNA, 20 bp, synthetic construct
  source 1..20: mol_type = other DNA
ctaaaaatacaaaaacttag

SEQ ID NO: 206654 - DNA, 20 bp, synthetic construct
  source 1..20: mol_type = other DNA
actaaaaatacaaaaactta

SEQ ID NO: 206655 - DNA, 20 bp, synthetic construct
  source 1..20: mol_type = other DNA
tactaaaaatacaaaaactt

SEQ ID NO: 206656 - DNA, 20 bp, synthetic construct
  source 1..20: mol_type = other DNA
ctactaaaaatacaaaaact

SEQ ID NO: 206657 - DNA, 20 bp, synthetic construct
  source 1..20: mol_type = other DNA
tctactaaaaatacaaaaac

SEQ ID NO: 206658 - DNA, 20 bp, synthetic construct
  source 1..20: mol_type = other DNA
ctctactaaaaatacaaaaa

SEQ ID NO: 206659 - DNA, 20 bp, synthetic construct
  source 1..20: mol_type = other DNA
cctctactaaaaatacaaaa

SEQ ID NO: 206660 - DNA, 20 bp, synthetic construct
  source 1..20: mol_type = other DNA
gcctctactaaaaatacaaa

SEQ ID NO: 206661 - DNA, 20 bp, synthetic construct
  source 1..20: mol_type = other DNA
tgcctctactaaaaatacaa

SEQ ID NO: 206662 - DNA, 20 bp, synthetic construct
  source 1..20: mol_type = other DNA
ctgcctctactaaaaataca

SEQ ID NO: 206663 - DNA, 20 bp, synthetic construct
  source 1..20: mol_type = other DNA
cctgcctctactaaaaatac

SEQ ID NO: 206664 - DNA, 20 bp, synthetic construct
  source 1..20: mol_type = other DNA
ccctgcctctactaaaaata

SEQ ID NO: 206665 - DNA, 20 bp, synthetic construct
  source 1..20: mol_type = other DNA
accctgcctctactaaaaat

SEQ ID NO: 206666 - DNA, 20 bp, synthetic construct
  source 1..20: mol_type = other DNA
aaccctgcctctactaaaaa

SEQ ID NO: 206667 - DNA, 20 bp, synthetic construct
  source 1..20: mol_type = other DNA
aaaccctgcctctactaaaa

SEQ ID NO: 206668 - DNA, 20 bp, synthetic construct
  source 1..20: mol_type = other DNA
gaaaccctgcctctactaaa

SEQ ID NO: 206669 - DNA, 20 bp, synthetic construct
  source 1..20: mol_type = other DNA
tgaaaccctgcctctactaa

SEQ ID NO: 206670 - DNA, 20 bp, synthetic construct
  source 1..20: mol_type = other DNA
gtgaaaccctgcctctacta

SEQ ID NO: 206671 - DNA, 20 bp, synthetic construct
  source 1..20: mol_type = other DNA
ggtgaaaccctgcctctact

SEQ ID NO: 206672 - DNA, 20 bp, synthetic construct
  source 1..20: mol_type = other DNA
tggtgaaaccctgcctctac

SEQ ID NO: 206673 - DNA, 20 bp, synthetic construct
  source 1..20: mol_type = other DNA
atggtgaaaccctgcctcta

SEQ ID NO: 206674 - DNA, 20 bp, synthetic construct
  source 1..20: mol_type = other DNA
catggtgaaaccctgcctct

SEQ ID NO: 206675 - DNA, 20 bp, synthetic construct
  source 1..20: mol_type = other DNA
acatggtgaaaccctgcctc

SEQ ID NO: 206676 - DNA, 20 bp, synthetic construct
  source 1..20: mol_type = other DNA
aacatggtgaaaccctgcct

SEQ ID NO: 206677 - DNA, 20 bp, synthetic construct
  source 1..20: mol_type = other DNA
caacatggtgaaaccctgcc

SEQ ID NO: 206678 - DNA, 20 bp, synthetic construct
  source 1..20: mol_type = other DNA
gcaacatggtgaaaccctgc

SEQ ID NO: 206679 - DNA, 20 bp, synthetic construct
  source 1..20: mol_type = other DNA
ggcaacatggtgaaaccctg

SEQ ID NO: 206680 - DNA, 20 bp, synthetic construct
  source 1..20: mol_type = other DNA
gggcaacatggtgaaaccct

SEQ ID NO: 206681 - DNA, 20 bp, synthetic construct
  source 1..20: mol_type = other DNA
tgggcaacatggtgaaaccc

SEQ ID NO: 206682 - DNA, 20 bp, synthetic construct
  source 1..20: mol_type = other DNA
ctgggcaacatggtgaaacc

SEQ ID NO: 206683 - DNA, 20 bp, synthetic construct
  source 1..20: mol_type = other DNA
cctgggcaacatggtgaaac

SEQ ID NO: 206684 - DNA, 20 bp, synthetic construct
  source 1..20: mol_type = other DNA
gcctgggcaacatggtgaaa

SEQ ID NO: 206685 - DNA, 20 bp, synthetic construct
  source 1..20: mol_type = other DNA
agcctgggcaacatggtgaa

SEQ ID NO: 206686 - DNA, 20 bp, synthetic construct
  source 1..20: mol_type = other DNA
cagcctgggcaacatggtga

SEQ ID NO: 206687 - DNA, 20 bp, synthetic construct
  source 1..20: mol_type = other DNA
ccagcctgggcaacatggtg

SEQ ID NO: 206688 - DNA, 20 bp, synthetic construct
  source 1..20: mol_type = other DNA
accagcctgggcaacatggt

SEQ ID NO: 206689 - DNA, 20 bp, synthetic construct
  source 1..20: mol_type = other DNA
gaccagcctgggcaacatgg

SEQ ID NO: 206690 - DNA, 20 bp, synthetic construct
  source 1..20: mol_type = other DNA
agaccagcctgggcaacatg

SEQ ID NO: 206691 - DNA, 20 bp, synthetic construct
  source 1..20: mol_type = other DNA
gagaccagcctgggcaacat

SEQ ID NO: 206692 - DNA, 20 bp, synthetic construct
  source 1..20: mol_type = other DNA
tgagaccagcctgggcaaca

SEQ ID NO: 206693 - DNA, 20 bp, synthetic construct
  source 1..20: mol_type = other DNA
ttgagaccagcctgggcaac

SEQ ID NO: 206694 - DNA, 20 bp, synthetic construct
  source 1..20: mol_type = other DNA
tttgagaccagcctgggcaa

SEQ ID NO: 206695 - DNA, 20 bp, synthetic construct
  source 1..20: mol_type = other DNA
gtttgagaccagcctgggca

SEQ ID NO: 206696 - DNA, 20 bp, synthetic construct
  source 1..20: mol_type = other DNA
agtttgagaccagcctgggc

SEQ ID NO: 206697 - DNA, 20 bp, synthetic construct
  source 1..20: mol_type = other DNA
gagtttgagaccagcctggg

SEQ ID NO: 206698 - DNA, 20 bp, synthetic construct
  source 1..20: mol_type = other DNA
ggagtttgagaccagcctgg

SEQ ID NO: 206699 - DNA, 20 bp, synthetic construct
  source 1..20: mol_type = other DNA
aggagtttgagaccagcctg

SEQ ID NO: 206700 - DNA, 20 bp, synthetic construct
  source 1..20: mol_type = other DNA
caggagtttgagaccagcct

SEQ ID NO: 206701 - DNA, 20 bp, synthetic construct
  source 1..20: mol_type = other DNA
ccaggagtttgagaccagcc

SEQ ID NO: 206702 - DNA, 20 bp, synthetic construct
  source 1..20: mol_type = other DNA
gccaggagtttgagaccagc

SEQ ID NO: 206703 - DNA, 20 bp, synthetic construct
  source 1..20: mol_type = other DNA
ggccaggagtttgagaccag

SEQ ID NO: 206704 - DNA, 20 bp, synthetic construct
  source 1..20: mol_type = other DNA
aggccaggagtttgagacca

SEQ ID NO: 206705 - DNA, 20 bp, synthetic construct
  source 1..20: mol_type = other DNA
gaggccaggagtttgagacc

SEQ ID NO: 206706 - DNA, 20 bp, synthetic construct
  source 1..20: mol_type = other DNA
tgaggccaggagtttgagac

SEQ ID NO: 206707 - DNA, 20 bp, synthetic construct
  source 1..20: mol_type = other DNA
ttgaggccaggagtttgaga

SEQ ID NO: 206708 - DNA, 20 bp, synthetic construct
  source 1..20: mol_type = other DNA
cttgaggccaggagtttgag

SEQ ID NO: 206709 - DNA, 20 bp, synthetic construct
  source 1..20: mol_type = other DNA
gcttgaggccaggagtttga

SEQ ID NO: 206710 - DNA, 20 bp, synthetic construct
  source 1..20: mol_type = other DNA
cgcttgaggccaggagtttg

SEQ ID NO: 206711 - DNA, 20 bp, synthetic construct
  source 1..20: mol_type = other DNA
tcgcttgaggccaggagttt

SEQ ID NO: 206712 - DNA, 20 bp, synthetic construct
  source 1..20: mol_type = other DNA
atcgcttgaggccaggagtt

SEQ ID NO: 206713 - DNA, 20 bp, synthetic construct
  source 1..20: mol_type = other DNA
gatcgcttgaggccaggagt

SEQ ID NO: 206714 - DNA, 20 bp, synthetic construct
  source 1..20: mol_type = other DNA
agatcgcttgaggccaggag

SEQ ID NO: 206715 - DNA, 20 bp, synthetic construct
  source 1..20: mol_type = other DNA
cagatcgcttgaggccagga

SEQ ID NO: 206716 - DNA, 20 bp, synthetic construct
  source 1..20: mol_type = other DNA
gcagatcgcttgaggccagg

SEQ ID NO: 206717 - DNA, 20 bp, synthetic construct
  source 1..20: mol_type = other DNA
ggcagatcgcttgaggccag

SEQ ID NO: 206718 - DNA, 20 bp, synthetic construct
  source 1..20: mol_type = other DNA
gggcagatcgcttgaggcca

SEQ ID NO: 206719 - DNA, 20 bp, synthetic construct
  source 1..20: mol_type = other DNA
tgggcagatcgcttgaggcc

SEQ ID NO: 206720 - DNA, 20 bp, synthetic construct
  source 1..20: mol_type = other DNA
atgggcagatcgcttgaggc

SEQ ID NO: 206721 - DNA, 20 bp, synthetic construct
  source 1..20: mol_type = other DNA
gatgggcagatcgcttgagg

SEQ ID NO: 206722 - DNA, 20 bp, synthetic construct
  source 1..20: mol_type = other DNA
agatgggcagatcgcttgag

SEQ ID NO: 206723 - DNA, 20 bp, synthetic construct
  source 1..20: mol_type = other DNA
aagatgggcagatcgcttga

SEQ ID NO: 206724 - DNA, 20 bp, synthetic construct
  source 1..20: mol_type = other DNA
caagatgggcagatcgcttg

SEQ ID NO: 206725 - DNA, 20 bp, synthetic construct
  source 1..20: mol_type = other DNA
tcaagatgggcagatcgctt

SEQ ID NO: 206726 - DNA, 20 bp, synthetic construct
  source 1..20: mol_type = other DNA
gtcaagatgggcagatcgct

SEQ ID NO: 206727 - DNA, 20 bp, synthetic construct
  source 1..20: mol_type = other DNA
ggtcaagatgggcagatcgc

SEQ ID NO: 206728 - DNA, 20 bp, synthetic construct
  source 1..20: mol_type = other DNA
aggtcaagatgggcagatcg

SEQ ID NO: 206729 - DNA, 20 bp, synthetic construct
  source 1..20: mol_type = other DNA
gaggtcaagatgggcagatc

SEQ ID NO: 206730 - DNA, 20 bp, synthetic construct
  source 1..20: mol_type = other DNA
ggaggtcaagatgggcagat

SEQ ID NO: 206731 - DNA, 20 bp, synthetic construct
  source 1..20: mol_type = other DNA
gggaggtcaagatgggcaga

SEQ ID NO: 206732 - DNA, 20 bp, synthetic construct
  source 1..20: mol_type = other DNA
tgggaggtcaagatgggcag

SEQ ID NO: 206733 - DNA, 20 bp, synthetic construct
  source 1..20: mol_type = other DNA
ttgggaggtcaagatgggca

SEQ ID NO: 206734 - DNA, 20 bp, synthetic construct
  source 1..20: mol_type = other DNA
tttgggaggtcaagatgggc

SEQ ID NO: 206735 - DNA, 20 bp, synthetic construct
  source 1..20: mol_type = other DNA
ctttgggaggtcaagatggg

SEQ ID NO: 206736 - DNA, 20 bp, synthetic construct
  source 1..20: mol_type = other DNA
actttgggaggtcaagatgg

SEQ ID NO: 206737 - DNA, 20 bp, synthetic construct
  source 1..20: mol_type = other DNA
cactttgggaggtcaagatg

SEQ ID NO: 206738 - DNA, 20 bp, synthetic construct
  source 1..20: mol_type = other DNA
acactttgggaggtcaagat

SEQ ID NO: 206739 - DNA, 20 bp, synthetic construct
  source 1..20: mol_type = other DNA
aacactttgggaggtcaaga

SEQ ID NO: 206740 - DNA, 20 bp, synthetic construct
  source 1..20: mol_type = other DNA
caacactttgggaggtcaag

SEQ ID NO: 206741 - DNA, 20 bp, synthetic construct
  source 1..20: mol_type = other DNA
ccaacactttgggaggtcaa

SEQ ID NO: 206742 - DNA, 20 bp, synthetic construct
  source 1..20: mol_type = other DNA
cccaacactttgggaggtca

SEQ ID NO: 206743 - DNA, 20 bp, synthetic construct
  source 1..20: mol_type = other DNA
tcccaacactttgggaggtc

SEQ ID NO: 206744 - DNA, 20 bp, synthetic construct
  source 1..20: mol_type = other DNA
atcccaacactttgggaggt

SEQ ID NO: 206745 - DNA, 20 bp, synthetic construct
  source 1..20: mol_type = other DNA
aatcccaacactttgggagg

SEQ ID NO: 206746 - DNA, 20 bp, synthetic construct
  source 1..20: mol_type = other DNA
taatcccaacactttgggag

SEQ ID NO: 206747 - DNA, 20 bp, synthetic construct
  source 1..20: mol_type = other DNA
gtaatcccaacactttggga

SEQ ID NO: 206748 - DNA, 20 bp, synthetic construct
  source 1..20: mol_type = other DNA
tgtaatcccaacactttggg

SEQ ID NO: 206749 - DNA, 20 bp, synthetic construct
  source 1..20: mol_type = other DNA
ctgtaatcccaacactttgg

SEQ ID NO: 206750 - DNA, 20 bp, synthetic construct
  source 1..20: mol_type = other DNA
cctgtaatcccaacactttg

SEQ ID NO: 206751 - DNA, 20 bp, synthetic construct
  source 1..20: mol_type = other DNA
gcctgtaatcccaacacttt

SEQ ID NO: 206752 - DNA, 20 bp, synthetic construct
  source 1..20: mol_type = other DNA
cgcctgtaatcccaacactt

SEQ ID NO: 206753 - DNA, 20 bp, synthetic construct
  source 1..20: mol_type = other DNA
acgcctgtaatcccaacact

SEQ ID NO: 206754 - DNA, 20 bp, synthetic construct
  source 1..20: mol_type = other DNA
cacgcctgtaatcccaacac

SEQ ID NO: 206755 - DNA, 20 bp, synthetic construct
  source 1..20: mol_type = other DNA
tcacgcctgtaatcccaaca

SEQ ID NO: 206756 - DNA, 20 bp, synthetic construct
  source 1..20: mol_type = other DNA
ctcacgcctgtaatcccaac

SEQ ID NO: 206757 - DNA, 20 bp, synthetic construct
  source 1..20: mol_type = other DNA
gctcacgcctgtaatcccaa

SEQ ID NO: 206758 - DNA, 20 bp, synthetic construct
  source 1..20: mol_type = other DNA
ggctcacgcctgtaatccca

SEQ ID NO: 206759 - DNA, 20 bp, synthetic construct
  source 1..20: mol_type = other DNA
tggctcacgcctgtaatccc

SEQ ID NO: 206760 - DNA, 20 bp, synthetic construct
  source 1..20: mol_type = other DNA
gtggctcacgcctgtaatcc

SEQ ID NO: 206761 - DNA, 20 bp, synthetic construct
  source 1..20: mol_type = other DNA
ggtggctcacgcctgtaatc

SEQ ID NO: 206762 - DNA, 20 bp, synthetic construct
  source 1..20: mol_type = other DNA
cggtggctcacgcctgtaat

SEQ ID NO: 206763 - DNA, 20 bp, synthetic construct
  source 1..20: mol_type = other DNA
acggtggctcacgcctgtaa

SEQ ID NO: 206764 - DNA, 20 bp, synthetic construct
  source 1..20: mol_type = other DNA
cacggtggctcacgcctgta

SEQ ID NO: 206765 - DNA, 20 bp, synthetic construct
  source 1..20: mol_type = other DNA
gcacggtggctcacgcctgt

SEQ ID NO: 206766 - DNA, 20 bp, synthetic construct
  source 1..20: mol_type = other DNA
ggcacggtggctcacgcctg

SEQ ID NO: 206767 - DNA, 20 bp, synthetic construct
  source 1..20: mol_type = other DNA
aggcacggtggctcacgcct

SEQ ID NO: 206768 - DNA, 20 bp, synthetic construct
  source 1..20: mol_type = other DNA
taggcacggtggctcacgcc

SEQ ID NO: 206769 - DNA, 20 bp, synthetic construct
  source 1..20: mol_type = other DNA
ctaggcacggtggctcacgc

SEQ ID NO: 206770 - DNA, 20 bp, synthetic construct
  source 1..20: mol_type = other DNA
gctaggcacggtggctcacg

SEQ ID NO: 206771 - DNA, 20 bp, synthetic construct
  source 1..20: mol_type = other DNA
ggctaggcacggtggctcac

SEQ ID NO: 206772 - DNA, 20 bp, synthetic construct
  source 1..20: mol_type = other DNA
gggctaggcacggtggctca

SEQ ID NO: 206773 - DNA, 20 bp, synthetic construct
  source 1..20: mol_type = other DNA
agggctaggcacggtggctc

SEQ ID NO: 206774 - DNA, 20 bp, synthetic construct
  source 1..20: mol_type = other DNA
cagggctaggcacggtggct

SEQ ID NO: 206775 - DNA, 20 bp, synthetic construct
  source 1..20: mol_type = other DNA
acagggctaggcacggtggc

SEQ ID NO: 206776 - DNA, 20 bp, synthetic construct
  source 1..20: mol_type = other DNA
aacagggctaggcacggtgg

SEQ ID NO: 206777 - DNA, 20 bp, synthetic construct
  source 1..20: mol_type = other DNA
aaacagggctaggcacggtg

SEQ ID NO: 206778 - DNA, 20 bp, synthetic construct
  source 1..20: mol_type = other DNA
aaaacagggctaggcacggt

SEQ ID NO: 206779 - DNA, 20 bp, synthetic construct
  source 1..20: mol_type = other DNA
aaaaacagggctaggcacgg

SEQ ID NO: 206780 - DNA, 20 bp, synthetic construct
  source 1..20: mol_type = other DNA
caaaaacagggctaggcacg

SEQ ID NO: 206781 - DNA, 20 bp, synthetic construct
  source 1..20: mol_type = other DNA
tcaaaaacagggctaggcac

SEQ ID NO: 206782 - DNA, 20 bp, synthetic construct
  source 1..20: mol_type = other DNA
ttcaaaaacagggctaggca

SEQ ID NO: 206783 - DNA, 20 bp, synthetic construct
  source 1..20: mol_type = other DNA
gttcaaaaacagggctaggc

SEQ ID NO: 206784 - DNA, 20 bp, synthetic construct
  source 1..20: mol_type = other DNA
agttcaaaaacagggctagg

SEQ ID NO: 206785 - DNA, 20 bp, synthetic construct
  source 1..20: mol_type = other DNA
gagttcaaaaacagggctag

SEQ ID NO: 206786 - DNA, 20 bp, synthetic construct
  source 1..20: mol_type = other DNA
agagttcaaaaacagggcta

SEQ ID NO: 206787 - DNA, 20 bp, synthetic construct
  source 1..20: mol_type = other DNA
gagagttcaaaaacagggct

SEQ ID NO: 206788 - DNA, 20 bp, synthetic construct
  source 1..20: mol_type = other DNA
agagagttcaaaaacagggc

SEQ ID NO: 206789 - DNA, 20 bp, synthetic construct
  source 1..20: mol_type = other DNA
tagagagttcaaaaacaggg

SEQ ID NO: 206790 - DNA, 20 bp, synthetic construct
  source 1..20: mol_type = other DNA
ctagagagttcaaaaacagg

SEQ ID NO: 206791 - DNA, 20 bp, synthetic construct
  source 1..20: mol_type = other DNA
tctagagagttcaaaaacag

SEQ ID NO: 206792 - DNA, 20 bp, synthetic construct
  source 1..20: mol_type = other DNA
ctctagagagttcaaaaaca

SEQ ID NO: 206793 - DNA, 20 bp, synthetic construct
  source 1..20: mol_type = other DNA
tctctagagagttcaaaaac

SEQ ID NO: 206794 - DNA, 20 bp, synthetic construct
  source 1..20: mol_type = other DNA
gtctctagagagttcaaaaa

SEQ ID NO: 206795 - DNA, 20 bp, synthetic construct
  source 1..20: mol_type = other DNA
tgtctctagagagttcaaaa

SEQ ID NO: 206796 - DNA, 20 bp, synthetic construct
  source 1..20: mol_type = other DNA
ctgtctctagagagttcaaa

SEQ ID NO: 206797 - DNA, 20 bp, synthetic construct
  source 1..20: mol_type = other DNA
actgtctctagagagttcaa

SEQ ID NO: 206798 - DNA, 20 bp, synthetic construct
  source 1..20: mol_type = other DNA
gactgtctctagagagttca

SEQ ID NO: 206799 - DNA, 20 bp, synthetic construct
  source 1..20: mol_type = other DNA
ggactgtctctagagagttc

SEQ ID NO: 206800 - DNA, 20 bp, synthetic construct
  source 1..20: mol_type = other DNA
tggactgtctctagagagtt

SEQ ID NO: 206801 - DNA, 20 bp, synthetic construct
  source 1..20: mol_type = other DNA
ctggactgtctctagagagt

SEQ ID NO: 206802 - DNA, 20 bp, synthetic construct
  source 1..20: mol_type = other DNA
gctggactgtctctagagag

SEQ ID NO: 206803 - DNA, 20 bp, synthetic construct
  source 1..20: mol_type = other DNA
ggctggactgtctctagaga

SEQ ID NO: 206804 - DNA, 20 bp, synthetic construct
  source 1..20: mol_type = other DNA
gggctggactgtctctagag

SEQ ID NO: 206805 - DNA, 20 bp, synthetic construct
  source 1..20: mol_type = other DNA
ggggctggactgtctctaga

SEQ ID NO: 206806 - DNA, 20 bp, synthetic construct
  source 1..20: mol_type = other DNA
aggggctggactgtctctag

SEQ ID NO: 206807 - DNA, 20 bp, synthetic construct
  source 1..20: mol_type = other DNA
aaggggctggactgtctcta

SEQ ID NO: 206808 - DNA, 20 bp, synthetic construct
  source 1..20: mol_type = other DNA
taaggggctggactgtctct

SEQ ID NO: 206809 - DNA, 20 bp, synthetic construct
  source 1..20: mol_type = other DNA
ataaggggctggactgtctc

SEQ ID NO: 206810 - DNA, 20 bp, synthetic construct
  source 1..20: mol_type = other DNA
aataaggggctggactgtct

SEQ ID NO: 206811 - DNA, 20 bp, synthetic construct
  source 1..20: mol_type = other DNA
taataaggggctggactgtc

SEQ ID NO: 206812 - DNA, 20 bp, synthetic construct
  source 1..20: mol_type = other DNA
gtaataaggggctggactgt

SEQ ID NO: 206813 - DNA, 20 bp, synthetic construct
  source 1..20: mol_type = other DNA
agtaataaggggctggactg

SEQ ID NO: 206814 - DNA, 20 bp, synthetic construct
  source 1..20: mol_type = other DNA
aagtaataaggggctggact

SEQ ID NO: 206815 - DNA, 20 bp, synthetic construct
  source 1..20: mol_type = other DNA
caagtaataaggggctggac

SEQ ID NO: 206816 - DNA, 20 bp, synthetic construct
  source 1..20: mol_type = other DNA
acaagtaataaggggctgga

SEQ ID NO: 206817 - DNA, 20 bp, synthetic construct
  source 1..20: mol_type = other DNA
gacaagtaataaggggctgg

SEQ ID NO: 206818 - DNA, 20 bp, synthetic construct
  source 1..20: mol_type = other DNA
ggacaagtaataaggggctg

SEQ ID NO: 206819 - DNA, 20 bp, synthetic construct
  source 1..20: mol_type = other DNA
aggacaagtaataaggggct

SEQ ID NO: 206820 - DNA, 20 bp, synthetic construct
  source 1..20: mol_type = other DNA
caggacaagtaataaggggc

SEQ ID NO: 206821 - DNA, 20 bp, synthetic construct
  source 1..20: mol_type = other DNA
tcaggacaagtaataagggg

SEQ ID NO: 206822 - DNA, 20 bp, synthetic construct
  source 1..20: mol_type = other DNA
ctcaggacaagtaataaggg

SEQ ID NO: 206823 - DNA, 20 bp, synthetic construct
  source 1..20: mol_type = other DNA
cctcaggacaagtaataagg

SEQ ID NO: 206824 - DNA, 20 bp, synthetic construct
  source 1..20: mol_type = other DNA
gcctcaggacaagtaataag

SEQ ID NO: 206825 - DNA, 20 bp, synthetic construct
  source 1..20: mol_type = other DNA
tgcctcaggacaagtaataa

SEQ ID NO: 206826 - DNA, 20 bp, synthetic construct
  source 1..20: mol_type = other DNA
ctgcctcaggacaagtaata

SEQ ID NO: 206827 - DNA, 20 bp, synthetic construct
  source 1..20: mol_type = other DNA
gctgcctcaggacaagtaat

SEQ ID NO: 206828 - DNA, 20 bp, synthetic construct
  source 1..20: mol_type = other DNA
agctgcctcaggacaagtaa

SEQ ID NO: 206829 - DNA, 20 bp, synthetic construct
  source 1..20: mol_type = other DNA
cagctgcctcaggacaagta

SEQ ID NO: 206830 - DNA, 20 bp, synthetic construct
  source 1..20: mol_type = other DNA
gcagctgcctcaggacaagt

SEQ ID NO: 206831 - DNA, 20 bp, synthetic construct
  source 1..20: mol_type = other DNA
agcagctgcctcaggacaag

SEQ ID NO: 206832 - DNA, 20 bp, synthetic construct
  source 1..20: mol_type = other DNA
gagcagctgcctcaggacaa

SEQ ID NO: 206833 - DNA, 20 bp, synthetic construct
  source 1..20: mol_type = other DNA
ggagcagctgcctcaggaca

SEQ ID NO: 206834 - DNA, 20 bp, synthetic construct
  source 1..20: mol_type = other DNA
gggagcagctgcctcaggac

SEQ ID NO: 206835 - DNA, 20 bp, synthetic construct
  source 1..20: mol_type = other DNA
agggagcagctgcctcagga

SEQ ID NO: 206836 - DNA, 20 bp, synthetic construct
  source 1..20: mol_type = other DNA
aagggagcagctgcctcagg

SEQ ID NO: 206837 - DNA, 20 bp, synthetic construct
  source 1..20: mol_type = other DNA
gaagggagcagctgcctcag

SEQ ID NO: 206838 - DNA, 20 bp, synthetic construct
  source 1..20: mol_type = other DNA
tgaagggagcagctgcctca

SEQ ID NO: 206839 - DNA, 20 bp, synthetic construct
  source 1..20: mol_type = other DNA
gtgaagggagcagctgcctc

SEQ ID NO: 206840 - DNA, 20 bp, synthetic construct
  source 1..20: mol_type = other DNA
ggtgaagggagcagctgcct

SEQ ID NO: 206841 - DNA, 20 bp, synthetic construct
  source 1..20: mol_type = other DNA
aggtgaagggagcagctgcc

SEQ ID NO: 206842 - DNA, 20 bp, synthetic construct
  source 1..20: mol_type = other DNA
caggtgaagggagcagctgc

SEQ ID NO: 206843 - DNA, 20 bp, synthetic construct
  source 1..20: mol_type = other DNA
ccaggtgaagggagcagctg

SEQ ID NO: 206844 - DNA, 20 bp, synthetic construct
  source 1..20: mol_type = other DNA
gccaggtgaagggagcagct

SEQ ID NO: 206845 - DNA, 20 bp, synthetic construct
  source 1..20: mol_type = other DNA
ggccaggtgaagggagcagc

SEQ ID NO: 206846 - DNA, 20 bp, synthetic construct
  source 1..20: mol_type = other DNA
gggccaggtgaagggagcag

SEQ ID NO: 206847 - DNA, 20 bp, synthetic construct
  source 1..20: mol_type = other DNA
ggggccaggtgaagggagca

SEQ ID NO: 206848 - DNA, 20 bp, synthetic construct
  source 1..20: mol_type = other DNA
gggggccaggtgaagggagc

SEQ ID NO: 206849 - DNA, 20 bp, synthetic construct
  source 1..20: mol_type = other DNA
ggggggccaggtgaagggag

SEQ ID NO: 206850 - DNA, 20 bp, synthetic construct
  source 1..20: mol_type = other DNA
cggggggccaggtgaaggga

SEQ ID NO: 206851 - DNA, 20 bp, synthetic construct
  source 1..20: mol_type = other DNA
gcggggggccaggtgaaggg

SEQ ID NO: 206852 - DNA, 20 bp, synthetic construct
  source 1..20: mol_type = other DNA
tgcggggggccaggtgaagg

SEQ ID NO: 206853 - DNA, 20 bp, synthetic construct
  source 1..20: mol_type = other DNA
atgcggggggccaggtgaag

SEQ ID NO: 206854 - DNA, 20 bp, synthetic construct
  source 1..20: mol_type = other DNA
aatgcggggggccaggtgaa

SEQ ID NO: 206855 - DNA, 20 bp, synthetic construct
  source 1..20: mol_type = other DNA
caatgcggggggccaggtga

SEQ ID NO: 206856 - DNA, 20 bp, synthetic construct
  source 1..20: mol_type = other DNA
acaatgcggggggccaggtg

SEQ ID NO: 206857 - DNA, 20 bp, synthetic construct
  source 1..20: mol_type = other DNA
cacaatgcggggggccaggt

SEQ ID NO: 206858 - DNA, 20 bp, synthetic construct
  source 1..20: mol_type = other DNA
acacaatgcggggggccagg

SEQ ID NO: 206859 - DNA, 20 bp, synthetic construct
  source 1..20: mol_type = other DNA
aacacaatgcggggggccag

SEQ ID NO: 206860 - DNA, 20 bp, synthetic construct
  source 1..20: mol_type = other DNA
gaacacaatgcggggggcca

SEQ ID NO: 206861 - DNA, 20 bp, synthetic construct
  source 1..20: mol_type = other DNA
ggaacacaatgcggggggcc

SEQ ID NO: 206862 - DNA, 20 bp, synthetic construct
  source 1..20: mol_type = other DNA
cggaacacaatgcggggggc

SEQ ID NO: 206863 - DNA, 20 bp, synthetic construct
  source 1..20: mol_type = other DNA
ccggaacacaatgcgggggg

SEQ ID NO: 206864 - DNA, 20 bp, synthetic construct
  source 1..20: mol_type = other DNA
tccggaacacaatgcggggg

SEQ ID NO: 206865 - DNA, 20 bp, synthetic construct
  source 1..20: mol_type = other DNA
gtccggaacacaatgcgggg

SEQ ID NO: 206866 - DNA, 20 bp, synthetic construct
  source 1..20: mol_type = other DNA
ggtccggaacacaatgcggg

SEQ ID NO: 206867 - DNA, 20 bp, synthetic construct
  source 1..20: mol_type = other DNA
gggtccggaacacaatgcgg

SEQ ID NO: 206868 - DNA, 20 bp, synthetic construct
  source 1..20: mol_type = other DNA
agggtccggaacacaatgcg

SEQ ID NO: 206869 - DNA, 20 bp, synthetic construct
  source 1..20: mol_type = other DNA
aagggtccggaacacaatgc

SEQ ID NO: 206870 - DNA, 20 bp, synthetic construct
  source 1..20: mol_type = other DNA
caagggtccggaacacaatg

SEQ ID NO: 206871 - DNA, 20 bp, synthetic construct
  source 1..20: mol_type = other DNA
acaagggtccggaacacaat

SEQ ID NO: 206872 - DNA, 20 bp, synthetic construct
  source 1..20: mol_type = other DNA
gacaagggtccggaacacaa

SEQ ID NO: 206873 - DNA, 20 bp, synthetic construct
  source 1..20: mol_type = other DNA
ggacaagggtccggaacaca

SEQ ID NO: 206874 - DNA, 20 bp, synthetic construct
  source 1..20: mol_type = other DNA
aggacaagggtccggaacac

SEQ ID NO: 206875 - DNA, 20 bp, synthetic construct
  source 1..20: mol_type = other DNA
caggacaagggtccggaaca

SEQ ID NO: 206876 - DNA, 20 bp, synthetic construct
  source 1..20: mol_type = other DNA
ccaggacaagggtccggaac

SEQ ID NO: 206877 - DNA, 20 bp, synthetic construct
  source 1..20: mol_type = other DNA
accaggacaagggtccggaa

SEQ ID NO: 206878 - DNA, 20 bp, synthetic construct
  source 1..20: mol_type = other DNA
caccaggacaagggtccgga

SEQ ID NO: 206879 - DNA, 20 bp, synthetic construct
  source 1..20: mol_type = other DNA
ccaccaggacaagggtccgg

SEQ ID NO: 206880 - DNA, 20 bp, synthetic construct
  source 1..20: mol_type = other DNA
accaccaggacaagggtccg

SEQ ID NO: 206881 - DNA, 20 bp, synthetic construct
  source 1..20: mol_type = other DNA
caccaccaggacaagggtcc

SEQ ID NO: 206882 - DNA, 20 bp, synthetic construct
  source 1..20: mol_type = other DNA
gcaccaccaggacaagggtc

SEQ ID NO: 206883 - DNA, 20 bp, synthetic construct
  source 1..20: mol_type = other DNA
agcaccaccaggacaagggt

SEQ ID NO: 206884 - DNA, 20 bp, synthetic construct
  source 1..20: mol_type = other DNA
tagcaccaccaggacaaggg

SEQ ID NO: 206885 - DNA, 20 bp, synthetic construct
  source 1..20: mol_type = other DNA
ttagcaccaccaggacaagg

SEQ ID NO: 206886 - DNA, 20 bp, synthetic construct
  source 1..20: mol_type = other DNA
tttagcaccaccaggacaag

SEQ ID NO: 206887 - DNA, 20 bp, synthetic construct
  source 1..20: mol_type = other DNA
ctttagcaccaccaggacaa

SEQ ID NO: 206888 - DNA, 20 bp, synthetic construct
  source 1..20: mol_type = other DNA
tctttagcaccaccaggaca

SEQ ID NO: 206889 - DNA, 20 bp, synthetic construct
  source 1..20: mol_type = other DNA
ttctttagcaccaccaggac

SEQ ID NO: 206890 - DNA, 20 bp, synthetic construct
  source 1..20: mol_type = other DNA
attctttagcaccaccagga

SEQ ID NO: 206891 - DNA, 20 bp, synthetic construct
  source 1..20: mol_type = other DNA
tattctttagcaccaccagg

SEQ ID NO: 206892 - DNA, 20 bp, synthetic construct
  source 1..20: mol_type = other DNA
atattctttagcaccaccag

SEQ ID NO: 206893 - DNA, 20 bp, synthetic construct
  source 1..20: mol_type = other DNA
gatattctttagcaccacca

SEQ ID NO: 206894 - DNA, 20 bp, synthetic construct
  source 1..20: mol_type = other DNA
agatattctttagcaccacc

SEQ ID NO: 206895 - DNA, 20 bp, synthetic construct
  source 1..20: mol_type = other DNA
gagatattctttagcaccac

SEQ ID NO: 206896 - DNA, 20 bp, synthetic construct
  source 1..20: mol_type = other DNA
agagatattctttagcacca

SEQ ID NO: 206897 - DNA, 20 bp, synthetic construct
  source 1..20: mol_type = other DNA
cagagatattctttagcacc

SEQ ID NO: 206898 - DNA, 20 bp, synthetic construct
  source 1..20: mol_type = other DNA
acagagatattctttagcac

SEQ ID NO: 206899 - DNA, 20 bp, synthetic construct
  source 1..20: mol_type = other DNA
gacagagatattctttagca

SEQ ID NO: 206900 - DNA, 20 bp, synthetic construct
  source 1..20: mol_type = other DNA
cgacagagatattctttagc

SEQ ID NO: 206901 - DNA, 20 bp, synthetic construct
  source 1..20: mol_type = other DNA
tcgacagagatattctttag

SEQ ID NO: 206902 - DNA, 20 bp, synthetic construct
  source 1..20: mol_type = other DNA
atcgacagagatattcttta

SEQ ID NO: 206903 - DNA, 20 bp, synthetic construct
  source 1..20: mol_type = other DNA
gatcgacagagatattcttt

SEQ ID NO: 206904 - DNA, 20 bp, synthetic construct
  source 1..20: mol_type = other DNA
ggatcgacagagatattctt

SEQ ID NO: 206905 - DNA, 20 bp, synthetic construct
  source 1..20: mol_type = other DNA
aggatcgacagagatattct

SEQ ID NO: 206906 - DNA, 20 bp, synthetic construct
  source 1..20: mol_type = other DNA
aaggatcgacagagatattc

SEQ ID NO: 206907 - DNA, 20 bp, synthetic construct
  source 1..20: mol_type = other DNA
aaaggatcgacagagatatt

SEQ ID NO: 206908 - DNA, 20 bp, synthetic construct
  source 1..20: mol_type = other DNA
caaaggatcgacagagatat

SEQ ID NO: 206909 - DNA, 20 bp, synthetic construct
  source 1..20: mol_type = other DNA
ccaaaggatcgacagagata

SEQ ID NO: 206910 - DNA, 20 bp, synthetic construct
  source 1..20: mol_type = other DNA
cccaaaggatcgacagagat

SEQ ID NO: 206911 - DNA, 20 bp, synthetic construct
  source 1..20: mol_type = other DNA
ccccaaaggatcgacagaga

SEQ ID NO: 206912 - DNA, 20 bp, synthetic construct
  source 1..20: mol_type = other DNA
tccccaaaggatcgacagag

SEQ ID NO: 206913 - DNA, 20 bp, synthetic construct
  source 1..20: mol_type = other DNA
gtccccaaaggatcgacaga

SEQ ID NO: 206914 - DNA, 20 bp, synthetic construct
  source 1..20: mol_type = other DNA
agtccccaaaggatcgacag

SEQ ID NO: 206915 - DNA, 20 bp, synthetic construct
  source 1..20: mol_type = other DNA
cagtccccaaaggatcgaca

SEQ ID NO: 206916 - DNA, 20 bp, synthetic construct
  source 1..20: mol_type = other DNA
ccagtccccaaaggatcgac

SEQ ID NO: 206917 - DNA, 20 bp, synthetic construct
  source 1..20: mol_type = other DNA
cccagtccccaaaggatcga

SEQ ID NO: 206918 - DNA, 20 bp, synthetic construct
  source 1..20: mol_type = other DNA
ccccagtccccaaaggatcg

SEQ ID NO: 206919 - DNA, 20 bp, synthetic construct
  source 1..20: mol_type = other DNA
tccccagtccccaaaggatc

SEQ ID NO: 206920 - DNA, 20 bp, synthetic construct
  source 1..20: mol_type = other DNA
ttccccagtccccaaaggat

SEQ ID NO: 206921 - DNA, 20 bp, synthetic construct
  source 1..20: mol_type = other DNA
tttccccagtccccaaagga

SEQ ID NO: 206922 - DNA, 20 bp, synthetic construct
  source 1..20: mol_type = other DNA
gtttccccagtccccaaagg

SEQ ID NO: 206923 - DNA, 20 bp, synthetic construct
  source 1..20: mol_type = other DNA
agtttccccagtccccaaag

SEQ ID NO: 206924 - DNA, 20 bp, synthetic construct
  source 1..20: mol_type = other DNA
cagtttccccagtccccaaa

SEQ ID NO: 206925 - DNA, 20 bp, synthetic construct
  source 1..20: mol_type = other DNA
tcagtttccccagtccccaa

SEQ ID NO: 206926 - DNA, 20 bp, synthetic construct
  source 1..20: mol_type = other DNA
ctcagtttccccagtcccca

SEQ ID NO: 206927 - DNA, 20 bp, synthetic construct
  source 1..20: mol_type = other DNA
cctcagtttccccagtcccc

SEQ ID NO: 206928 - DNA, 20 bp, synthetic construct
  source 1..20: mol_type = other DNA
gcctcagtttccccagtccc

SEQ ID NO: 206929 - DNA, 20 bp, synthetic construct
  source 1..20: mol_type = other DNA
ggcctcagtttccccagtcc

SEQ ID NO: 206930 - DNA, 20 bp, synthetic construct
  source 1..20: mol_type = other DNA
gggcctcagtttccccagtc

SEQ ID NO: 206931 - DNA, 20 bp, synthetic construct
  source 1..20: mol_type = other DNA
tgggcctcagtttccccagt

SEQ ID NO: 206932 - DNA, 20 bp, synthetic construct
  source 1..20: mol_type = other DNA
ctgggcctcagtttccccag

SEQ ID NO: 206933 - DNA, 20 bp, synthetic construct
  source 1..20: mol_type = other DNA
actgggcctcagtttcccca

SEQ ID NO: 206934 - DNA, 20 bp, synthetic construct
  source 1..20: mol_type = other DNA
cactgggcctcagtttcccc

SEQ ID NO: 206935 - DNA, 20 bp, synthetic construct
  source 1..20: mol_type = other DNA
gcactgggcctcagtttccc

SEQ ID NO: 206936 - DNA, 20 bp, synthetic construct
  source 1..20: mol_type = other DNA
ggcactgggcctcagtttcc

SEQ ID NO: 206937 - DNA, 20 bp, synthetic construct
  source 1..20: mol_type = other DNA
tggcactgggcctcagtttc

SEQ ID NO: 206938 - DNA, 20 bp, synthetic construct
  source 1..20: mol_type = other DNA
gtggcactgggcctcagttt

SEQ ID NO: 206939 - DNA, 20 bp, synthetic construct
  source 1..20: mol_type = other DNA
cgtggcactgggcctcagtt

SEQ ID NO: 206940 - DNA, 20 bp, synthetic construct
  source 1..20: mol_type = other DNA
gcgtggcactgggcctcagt

SEQ ID NO: 206941 - DNA, 20 bp, synthetic construct
  source 1..20: mol_type = other DNA
cgcgtggcactgggcctcag

SEQ ID NO: 206942 - DNA, 20 bp, synthetic construct
  source 1..20: mol_type = other DNA
tcgcgtggcactgggcctca

SEQ ID NO: 206943 - DNA, 20 bp, synthetic construct
  source 1..20: mol_type = other DNA
atcgcgtggcactgggcctc

SEQ ID NO: 206944 - DNA, 20 bp, synthetic construct
  source 1..20: mol_type = other DNA
catcgcgtggcactgggcct

SEQ ID NO: 206945 - DNA, 20 bp, synthetic construct
  source 1..20: mol_type = other DNA
gcatcgcgtggcactgggcc

SEQ ID NO: 206946 - DNA, 20 bp, synthetic construct
  source 1..20: mol_type = other DNA
ggcatcgcgtggcactgggc

SEQ ID NO: 206947 - DNA, 20 bp, synthetic construct
  source 1..20: mol_type = other DNA
tggcatcgcgtggcactggg

SEQ ID NO: 206948 - DNA, 20 bp, synthetic construct
  source 1..20: mol_type = other DNA
atggcatcgcgtggcactgg

SEQ ID NO: 206949 - DNA, 20 bp, synthetic construct
  source 1..20: mol_type = other DNA
aatggcatcgcgtggcactg

SEQ ID NO: 206950 - DNA, 20 bp, synthetic construct
  source 1..20: mol_type = other DNA
aaatggcatcgcgtggcact

SEQ ID NO: 206951 - DNA, 20 bp, synthetic construct
  source 1..20: mol_type = other DNA
caaatggcatcgcgtggcac

SEQ ID NO: 206952 - DNA, 20 bp, synthetic construct
  source 1..20: mol_type = other DNA
acaaatggcatcgcgtggca

SEQ ID NO: 206953 - DNA, 20 bp, synthetic construct
  source 1..20: mol_type = other DNA
aacaaatggcatcgcgtggc

SEQ ID NO: 206954 - DNA, 20 bp, synthetic construct
  source 1..20: mol_type = other DNA
gaacaaatggcatcgcgtgg

SEQ ID NO: 206955 - DNA, 20 bp, synthetic construct
  source 1..20: mol_type = other DNA
tgaacaaatggcatcgcgtg

SEQ ID NO: 206956 - DNA, 20 bp, synthetic construct
  source 1..20: mol_type = other DNA
ctgaacaaatggcatcgcgt

SEQ ID NO: 206957 - DNA, 20 bp, synthetic construct
  source 1..20: mol_type = other DNA
cctgaacaaatggcatcgcg

SEQ ID NO: 206958 - DNA, 20 bp, synthetic construct
  source 1..20: mol_type = other DNA
ccctgaacaaatggcatcgc

SEQ ID NO: 206959 - DNA, 20 bp, synthetic construct
  source 1..20: mol_type = other DNA
tccctgaacaaatggcatcg

SEQ ID NO: 206960 - DNA, 20 bp, synthetic construct
  source 1..20: mol_type = other DNA
ttccctgaacaaatggcatc

SEQ ID NO: 206961 - DNA, 20 bp, synthetic construct
  source 1..20: mol_type = other DNA
cttccctgaacaaatggcat

SEQ ID NO: 206962 - DNA, 20 bp, synthetic construct
  source 1..20: mol_type = other DNA
tcttccctgaacaaatggca

SEQ ID NO: 206963 - DNA, 20 bp, synthetic construct
  source 1..20: mol_type = other DNA
atcttccctgaacaaatggc

SEQ ID NO: 206964 - DNA, 20 bp, synthetic construct
  source 1..20: mol_type = other DNA
aatcttccctgaacaaatgg

SEQ ID NO: 206965 - DNA, 20 bp, synthetic construct
  source 1..20: mol_type = other DNA
taatcttccctgaacaaatg

SEQ ID NO: 206966 - DNA, 20 bp, synthetic construct
  source 1..20: mol_type = other DNA
ctaatcttccctgaacaaat

SEQ ID NO: 206967 - DNA, 20 bp, synthetic construct
  source 1..20: mol_type = other DNA
cctaatcttccctgaacaaa

SEQ ID NO: 206968 - DNA, 20 bp, synthetic construct
  source 1..20: mol_type = other DNA
acctaatcttccctgaacaa

SEQ ID NO: 206969 - DNA, 20 bp, synthetic construct
  source 1..20: mol_type = other DNA
gacctaatcttccctgaaca

SEQ ID NO: 206970 - DNA, 20 bp, synthetic construct
  source 1..20: mol_type = other DNA
tgacctaatcttccctgaac

SEQ ID NO: 206971 - DNA, 20 bp, synthetic construct
  source 1..20: mol_type = other DNA
atgacctaatcttccctgaa

SEQ ID NO: 206972 - DNA, 20 bp, synthetic construct
  source 1..20: mol_type = other DNA
gatgacctaatcttccctga

SEQ ID NO: 206973 - DNA, 20 bp, synthetic construct
  source 1..20: mol_type = other DNA
agatgacctaatcttccctg

SEQ ID NO: 206974 - DNA, 20 bp, synthetic construct
  source 1..20: mol_type = other DNA
cagatgacctaatcttccct

SEQ ID NO: 206975 - DNA, 20 bp, synthetic construct
  source 1..20: mol_type = other DNA
gcagatgacctaatcttccc

SEQ ID NO: 206976 - DNA, 20 bp, synthetic construct
  source 1..20: mol_type = other DNA
agcagatgacctaatcttcc

SEQ ID NO: 206977 - DNA, 20 bp, synthetic construct
  source 1..20: mol_type = other DNA
tagcagatgacctaatcttc

SEQ ID NO: 206978 - DNA, 20 bp, synthetic construct
  source 1..20: mol_type = other DNA
ctagcagatgacctaatctt

SEQ ID NO: 206979 - DNA, 20 bp, synthetic construct
  source 1..20: mol_type = other DNA
cctagcagatgacctaatct

SEQ ID NO: 206980 - DNA, 20 bp, synthetic construct
  source 1..20: mol_type = other DNA
acctagcagatgacctaatc

SEQ ID NO: 206981 - DNA, 20 bp, synthetic construct
  source 1..20: mol_type = other DNA
gacctagcagatgacctaat

SEQ ID NO: 206982 - DNA, 20 bp, synthetic construct
  source 1..20: mol_type = other DNA
ggacctagcagatgacctaa

SEQ ID NO: 206983 - DNA, 20 bp, synthetic construct
  source 1..20: mol_type = other DNA
gggacctagcagatgaccta

SEQ ID NO: 206984 - DNA, 20 bp, synthetic construct
  source 1..20: mol_type = other DNA
ggggacctagcagatgacct

SEQ ID NO: 206985 - DNA, 20 bp, synthetic construct
  source 1..20: mol_type = other DNA
tggggacctagcagatgacc

SEQ ID NO: 206986 - DNA, 20 bp, synthetic construct
  source 1..20: mol_type = other DNA
ctggggacctagcagatgac

SEQ ID NO: 206987 - DNA, 20 bp, synthetic construct
  source 1..20: mol_type = other DNA
actggggacctagcagatga

SEQ ID NO: 206988 - DNA, 20 bp, synthetic construct
  source 1..20: mol_type = other DNA
gactggggacctagcagatg

SEQ ID NO: 206989 - DNA, 20 bp, synthetic construct
  source 1..20: mol_type = other DNA
tgactggggacctagcagat

SEQ ID NO: 206990 - DNA, 20 bp, synthetic construct
  source 1..20: mol_type = other DNA
gtgactggggacctagcaga

SEQ ID NO: 206991 - DNA, 20 bp, synthetic construct
  source 1..20: mol_type = other DNA
agtgactggggacctagcag

SEQ ID NO: 206992 - DNA, 20 bp, synthetic construct
  source 1..20: mol_type = other DNA
aagtgactggggacctagca

SEQ ID NO: 206993 - DNA, 20 bp, synthetic construct
  source 1..20: mol_type = other DNA
caagtgactggggacctagc

SEQ ID NO: 206994 - DNA, 20 bp, synthetic construct
  source 1..20: mol_type = other DNA
tcaagtgactggggacctag

SEQ ID NO: 206995 - DNA, 20 bp, synthetic construct
  source 1..20: mol_type = other DNA
gtcaagtgactggggaccta

SEQ ID NO: 206996 - DNA, 20 bp, synthetic construct
  source 1..20: mol_type = other DNA
ggtcaagtgactggggacct

SEQ ID NO: 206997 - DNA, 20 bp, synthetic construct
  source 1..20: mol_type = other DNA
aggtcaagtgactggggacc

SEQ ID NO: 206998 - DNA, 20 bp, synthetic construct
  source 1..20: mol_type = other DNA
aaggtcaagtgactggggac

SEQ ID NO: 206999 - DNA, 20 bp, synthetic construct
  source 1..20: mol_type = other DNA
gaaggtcaagtgactgggga

SEQ ID NO: 207000 - DNA, 20 bp, synthetic construct
  source 1..20: mol_type = other DNA
agaaggtcaagtgactgggg

SEQ ID NO: 207001 - DNA, 20 bp, synthetic construct
  source 1..20: mol_type = other DNA
aagaaggtcaagtgactggg

SEQ ID NO: 207002 - DNA, 20 bp, synthetic construct
  source 1..20: mol_type = other DNA
gaagaaggtcaagtgactgg

SEQ ID NO: 207003 - DNA, 20 bp, synthetic construct
  source 1..20: mol_type = other DNA
ggaagaaggtcaagtgactg

SEQ ID NO: 207004 - DNA, 20 bp, synthetic construct
  source 1..20: mol_type = other DNA
gggaagaaggtcaagtgact

SEQ ID NO: 207005 - DNA, 20 bp, synthetic construct
  source 1..20: mol_type = other DNA
tgggaagaaggtcaagtgac

SEQ ID NO: 207006 - DNA, 20 bp, synthetic construct
  source 1..20: mol_type = other DNA
ctgggaagaaggtcaagtga

SEQ ID NO: 207007 - DNA, 20 bp, synthetic construct
  source 1..20: mol_type = other DNA
tctgggaagaaggtcaagtg

SEQ ID NO: 207008 - DNA, 20 bp, synthetic construct
  source 1..20: mol_type = other DNA
gtctgggaagaaggtcaagt

SEQ ID NO: 207009 - DNA, 20 bp, synthetic construct
  source 1..20: mol_type = other DNA
tgtctgggaagaaggtcaag

SEQ ID NO: 207010 - DNA, 20 bp, synthetic construct
  source 1..20: mol_type = other DNA
ctgtctgggaagaaggtcaa

SEQ ID NO: 207011 - DNA, 20 bp, synthetic construct
  source 1..20: mol_type = other DNA
cctgtctgggaagaaggtca

SEQ ID NO: 207012 - DNA, 20 bp, synthetic construct
  source 1..20: mol_type = other DNA
tcctgtctgggaagaaggtc

SEQ ID NO: 207013 - DNA, 20 bp, synthetic construct
  source 1..20: mol_type = other DNA
ttcctgtctgggaagaaggt

SEQ ID NO: 207014 - DNA, 20 bp, synthetic construct
  source 1..20: mol_type = other DNA
cttcctgtctgggaagaagg

SEQ ID NO: 207015 - DNA, 20 bp, synthetic construct
  source 1..20: mol_type = other DNA
tcttcctgtctgggaagaag

SEQ ID NO: 207016 - DNA, 20 bp, synthetic construct
  source 1..20: mol_type = other DNA
ttcttcctgtctgggaagaa

SEQ ID NO: 207017 - DNA, 20 bp, synthetic construct
  source 1..20: mol_type = other DNA
cttcttcctgtctgggaaga

SEQ ID NO: 207018 - DNA, 20 bp, synthetic construct
  source 1..20: mol_type = other DNA
gcttcttcctgtctgggaag

SEQ ID NO: 207019 - DNA, 20 bp, synthetic construct
  source 1..20: mol_type = other DNA
agcttcttcctgtctgggaa

SEQ ID NO: 207020 - DNA, 20 bp, synthetic construct
  source 1..20: mol_type = other DNA
cagcttcttcctgtctggga

SEQ ID NO: 207021 - DNA, 20 bp, synthetic construct
  source 1..20: mol_type = other DNA
gcagcttcttcctgtctggg

SEQ ID NO: 207022 - DNA, 20 bp, synthetic construct
  source 1..20: mol_type = other DNA
agcagcttcttcctgtctgg

SEQ ID NO: 207023 - DNA, 20 bp, synthetic construct
  source 1..20: mol_type = other DNA
gagcagcttcttcctgtctg

SEQ ID NO: 207024 - DNA, 20 bp, synthetic construct
  source 1..20: mol_type = other DNA
agagcagcttcttcctgtct

SEQ ID NO: 207025 - DNA, 20 bp, synthetic construct
  source 1..20: mol_type = other DNA
cagagcagcttcttcctgtc

SEQ ID NO: 207026 - DNA, 20 bp, synthetic construct
  source 1..20: mol_type = other DNA
ccagagcagcttcttcctgt

SEQ ID NO: 207027 - DNA, 20 bp, synthetic construct
  source 1..20: mol_type = other DNA
cccagagcagcttcttcctg

SEQ ID NO: 207028 - DNA, 20 bp, synthetic construct
  source 1..20: mol_type = other DNA
acccagagcagcttcttcct

SEQ ID NO: 207029 - DNA, 20 bp, synthetic construct
  source 1..20: mol_type = other DNA
gacccagagcagcttcttcc

SEQ ID NO: 207030 - DNA, 20 bp, synthetic construct
  source 1..20: mol_type = other DNA
agacccagagcagcttcttc

SEQ ID NO: 207031 - DNA, 20 bp, synthetic construct
  source 1..20: mol_type = other DNA
gagacccagagcagcttctt

SEQ ID NO: 207032 - DNA, 20 bp, synthetic construct
  source 1..20: mol_type = other DNA
agagacccagagcagcttct

SEQ ID NO: 207033 - DNA, 20 bp, synthetic construct
  source 1..20: mol_type = other DNA
gagagacccagagcagcttc

SEQ ID NO: 207034 - DNA, 20 bp, synthetic construct
  source 1..20: mol_type = other DNA
tgagagacccagagcagctt

SEQ ID NO: 207035 - DNA, 20 bp, synthetic construct
  source 1..20: mol_type = other DNA
ctgagagacccagagcagct

SEQ ID NO: 207036 - DNA, 20 bp, synthetic construct
  source 1..20: mol_type = other DNA
actgagagacccagagcagc

SEQ ID NO: 207037 - DNA, 20 bp, synthetic construct
  source 1..20: mol_type = other DNA
cactgagagacccagagcag

SEQ ID NO: 207038 - DNA, 20 bp, synthetic construct
  source 1..20: mol_type = other DNA
gcactgagagacccagagca

SEQ ID NO: 207039 - DNA, 20 bp, synthetic construct
  source 1..20: mol_type = other DNA
agcactgagagacccagagc

SEQ ID NO: 207040 - DNA, 20 bp, synthetic construct
  source 1..20: mol_type = other DNA
gagcactgagagacccagag

SEQ ID NO: 207041 - DNA, 20 bp, synthetic construct
  source 1..20: mol_type = other DNA
ggagcactgagagacccaga

SEQ ID NO: 207042 - DNA, 20 bp, synthetic construct
  source 1..20: mol_type = other DNA
tggagcactgagagacccag

SEQ ID NO: 207043 - DNA, 20 bp, synthetic construct
  source 1..20: mol_type = other DNA
gtggagcactgagagaccca

SEQ ID NO: 207044 - DNA, 20 bp, synthetic construct
  source 1..20: mol_type = other DNA
cgtggagcactgagagaccc

SEQ ID NO: 207045 - DNA, 20 bp, synthetic construct
  source 1..20: mol_type = other DNA
acgtggagcactgagagacc

SEQ ID NO: 207046 - DNA, 20 bp, synthetic construct
  source 1..20: mol_type = other DNA
cacgtggagcactgagagac

SEQ ID NO: 207047 - DNA, 20 bp, synthetic construct
  source 1..20: mol_type = other DNA
acacgtggagcactgagaga

SEQ ID NO: 207048 - DNA, 20 bp, synthetic construct
  source 1..20: mol_type = other DNA
gacacgtggagcactgagag

SEQ ID NO: 207049 - DNA, 20 bp, synthetic construct
  source 1..20: mol_type = other DNA
agacacgtggagcactgaga

SEQ ID NO: 207050 - DNA, 20 bp, synthetic construct
  source 1..20: mol_type = other DNA
aagacacgtggagcactgag

SEQ ID NO: 207051 - DNA, 20 bp, synthetic construct
  source 1..20: mol_type = other DNA
aaagacacgtggagcactga

SEQ ID NO: 207052 - DNA, 20 bp, synthetic construct
  source 1..20: mol_type = other DNA
caaagacacgtggagcactg

SEQ ID NO: 207053 - DNA, 20 bp, synthetic construct
  source 1..20: mol_type = other DNA
gcaaagacacgtggagcact

SEQ ID NO: 207054 - DNA, 20 bp, synthetic construct
  source 1..20: mol_type = other DNA
tgcaaagacacgtggagcac

SEQ ID NO: 207055 - DNA, 20 bp, synthetic construct
  source 1..20: mol_type = other DNA
gtgcaaagacacgtggagca

SEQ ID NO: 207056 - DNA, 20 bp, synthetic construct
  source 1..20: mol_type = other DNA
tgtgcaaagacacgtggagc

SEQ ID NO: 207057 - DNA, 20 bp, synthetic construct
  source 1..20: mol_type = other DNA
atgtgcaaagacacgtggag

SEQ ID NO: 207058 - DNA, 20 bp, synthetic construct
  source 1..20: mol_type = other DNA
aatgtgcaaagacacgtgga

SEQ ID NO: 207059 - DNA, 20 bp, synthetic construct
  source 1..20: mol_type = other DNA
caatgtgcaaagacacgtgg

SEQ ID NO: 207060 - DNA, 20 bp, synthetic construct
  source 1..20: mol_type = other DNA
tcaatgtgcaaagacacgtg

SEQ ID NO: 207061 - DNA, 20 bp, synthetic construct
  source 1..20: mol_type = other DNA
ttcaatgtgcaaagacacgt

SEQ ID NO: 207062 - DNA, 20 bp, synthetic construct
  source 1..20: mol_type = other DNA
tttcaatgtgcaaagacacg

SEQ ID NO: 207063 - DNA, 20 bp, synthetic construct
  source 1..20: mol_type = other DNA
atttcaatgtgcaaagacac

SEQ ID NO: 207064 - DNA, 20 bp, synthetic construct
  source 1..20: mol_type = other DNA
catttcaatgtgcaaagaca

SEQ ID NO: 207065 - DNA, 20 bp, synthetic construct
  source 1..20: mol_type = other DNA
acatttcaatgtgcaaagac

SEQ ID NO: 207066 - DNA, 20 bp, synthetic construct
  source 1..20: mol_type = other DNA
aacatttcaatgtgcaaaga

SEQ ID NO: 207067 - DNA, 20 bp, synthetic construct
  source 1..20: mol_type = other DNA
aaacatttcaatgtgcaaag

SEQ ID NO: 207068 - DNA, 20 bp, synthetic construct
  source 1..20: mol_type = other DNA
aaaacatttcaatgtgcaaa

SEQ ID NO: 207069 - DNA, 20 bp, synthetic construct
  source 1..20: mol_type = other DNA
gaaaacatttcaatgtgcaa

SEQ ID NO: 207070 - DNA, 20 bp, synthetic construct
  source 1..20: mol_type = other DNA
agaaaacatttcaatgtgca

SEQ ID NO: 207071 - DNA, 20 bp, synthetic construct
  source 1..20: mol_type = other DNA
cagaaaacatttcaatgtgc

SEQ ID NO: 207072 - DNA, 20 bp, synthetic construct
  source 1..20: mol_type = other DNA
tcagaaaacatttcaatgtg

SEQ ID NO: 207073 - DNA, 20 bp, synthetic construct
  source 1..20: mol_type = other DNA
atcagaaaacatttcaatgt

SEQ ID NO: 207074 - DNA, 20 bp, synthetic construct
  source 1..20: mol_type = other DNA
aatcagaaaacatttcaatg

SEQ ID NO: 207075 - DNA, 20 bp, synthetic construct
  source 1..20: mol_type = other DNA
aaatcagaaaacatttcaat

SEQ ID NO: 207076 - DNA, 20 bp, synthetic construct
  source 1..20: mol_type = other DNA
aaaatcagaaaacatttcaa

SEQ ID NO: 207077 - DNA, 20 bp, synthetic construct
  source 1..20: mol_type = other DNA
aaaaatcagaaaacatttca

SEQ ID NO: 207078 - DNA, 20 bp, synthetic construct
  source 1..20: mol_type = other DNA
aaaaaatcagaaaacatttc

SEQ ID NO: 207079 - DNA, 20 bp, synthetic construct
  source 1..20: mol_type = other DNA
aaaaaaatcagaaaacattt

SEQ ID NO: 207080 - DNA, 20 bp, synthetic construct
  source 1..20: mol_type = other DNA
aaaaaaaatcagaaaacatt

SEQ ID NO: 207081 - DNA, 20 bp, synthetic construct
  source 1..20: mol_type = other DNA
aaaaaaaaatcagaaaacat

SEQ ID NO: 207082 - DNA, 20 bp, synthetic construct
  source 1..20: mol_type = other DNA
aaaaaaaaaatcagaaaaca

SEQ ID NO: 207083 - DNA, 20 bp, synthetic construct
  source 1..20: mol_type = other DNA
aaaaaaaaaaatcagaaaac

SEQ ID NO: 207084 - DNA, 20 bp, synthetic construct
  source 1..20: mol_type = other DNA
aaaaaaaaaaaatcagaaaa

SEQ ID NO: 207085 - DNA, 20 bp, synthetic construct
  source 1..20: mol_type = other DNA
aaaaaaaaaaaaatcagaaa

SEQ ID NO: 207086 - DNA, 20 bp, synthetic construct
  source 1..20: mol_type = other DNA
aaaaaaaaaaaaaatcagaa

SEQ ID NO: 207087 - DNA, 20 bp, synthetic construct
  source 1..20: mol_type = other DNA
aaaaaaaaaaaaaaatcaga

SEQ ID NO: 207088 - DNA, 20 bp, synthetic construct
  source 1..20: mol_type = other DNA
aaaaaaaaaaaaaaaatcag

SEQ ID NO: 207089 - DNA, 20 bp, synthetic construct
  source 1..20: mol_type = other DNA
aaaaaaaaaaaaaaaaatca

SEQ ID NO: 207090 - DNA, 20 bp, synthetic construct
  source 1..20: mol_type = other DNA
aaaaaaaaaaaaaaaaaatc

SEQ ID NO: 207091 - DNA, 20 bp, synthetic construct
  source 1..20: mol_type = other DNA
caaaaaaaaaaaaaaaaaat

SEQ ID NO: 207092 - DNA, 20 bp, synthetic construct
  source 1..20: mol_type = other DNA
gcaaaaaaaaaaaaaaaaaa

SEQ ID NO: 207093 - DNA, 20 bp, synthetic construct
  source 1..20: mol_type = other DNA
agcaaaaaaaaaaaaaaaaa

SEQ ID NO: 207094 - DNA, 20 bp, synthetic construct
  source 1..20: mol_type = other DNA
cagcaaaaaaaaaaaaaaaa

SEQ ID NO: 207095 - DNA, 20 bp, synthetic construct
  source 1..20: mol_type = other DNA
acagcaaaaaaaaaaaaaaa

SEQ ID NO: 207096 - DNA, 20 bp, synthetic construct
  source 1..20: mol_type = other DNA
aacagcaaaaaaaaaaaaaa

SEQ ID NO: 207097 - DNA, 20 bp, synthetic construct
  source 1..20: mol_type = other DNA
taacagcaaaaaaaaaaaaa

SEQ ID NO: 207098 - DNA, 20 bp, synthetic construct
  source 1..20: mol_type = other DNA
gtaacagcaaaaaaaaaaaa

SEQ ID NO: 207099 - DNA, 20 bp, synthetic construct
  source 1..20: mol_type = other DNA
tgtaacagcaaaaaaaaaaa

SEQ ID NO: 207100 - DNA, 20 bp, synthetic construct
  source 1..20: mol_type = other DNA
atgtaacagcaaaaaaaaaa

SEQ ID NO: 207101 - DNA, 20 bp, synthetic construct
  source 1..20: mol_type = other DNA
aatgtaacagcaaaaaaaaa

SEQ ID NO: 207102 - DNA, 20 bp, synthetic construct
  source 1..20: mol_type = other DNA
aaatgtaacagcaaaaaaaa

SEQ ID NO: 207103 - DNA, 20 bp, synthetic construct
  source 1..20: mol_type = other DNA
taaatgtaacagcaaaaaaa

SEQ ID NO: 207104 - DNA, 20 bp, synthetic construct
  source 1..20: mol_type = other DNA
gtaaatgtaacagcaaaaaa

SEQ ID NO: 207105 - DNA, 20 bp, synthetic construct
  source 1..20: mol_type = other DNA
agtaaatgtaacagcaaaaa

SEQ ID NO: 207106 - DNA, 20 bp, synthetic construct
  source 1..20: mol_type = other DNA
aagtaaatgtaacagcaaaa

SEQ ID NO: 207107 - DNA, 20 bp, synthetic construct
  source 1..20: mol_type = other DNA
aaagtaaatgtaacagcaaa

SEQ ID NO: 207108 - DNA, 20 bp, synthetic construct
  source 1..20: mol_type = other DNA
aaaagtaaatgtaacagcaa

SEQ ID NO: 207109 - DNA, 20 bp, synthetic construct
  source 1..20: mol_type = other DNA
taaaagtaaatgtaacagca

SEQ ID NO: 207110 - DNA, 20 bp, synthetic construct
  source 1..20: mol_type = other DNA
ttaaaagtaaatgtaacagc

SEQ ID NO: 207111 - DNA, 20 bp, synthetic construct
  source 1..20: mol_type = other DNA
tttaaaagtaaatgtaacag

SEQ ID NO: 207112 - DNA, 20 bp, synthetic construct
  source 1..20: mol_type = other DNA
ttttaaaagtaaatgtaaca

SEQ ID NO: 207113 - DNA, 20 bp, synthetic construct
  source 1..20: mol_type = other DNA
tttttaaaagtaaatgtaac

SEQ ID NO: 207114 - DNA, 20 bp, synthetic construct
  source 1..20: mol_type = other DNA
ttttttaaaagtaaatgtaa

SEQ ID NO: 207115 - DNA, 20 bp, synthetic construct
  source 1..20: mol_type = other DNA
attttttaaaagtaaatgta

SEQ ID NO: 207116 - DNA, 20 bp, synthetic construct
  source 1..20: mol_type = other DNA
tattttttaaaagtaaatgt

SEQ ID NO: 207117 - DNA, 20 bp, synthetic construct
  source 1..20: mol_type = other DNA
ttattttttaaaagtaaatg

SEQ ID NO: 207118 - DNA, 20 bp, synthetic construct
  source 1..20: mol_type = other DNA
gttattttttaaaagtaaat

SEQ ID NO: 207119 - DNA, 20 bp, synthetic construct
  source 1..20: mol_type = other DNA
tgttattttttaaaagtaaa

SEQ ID NO: 207120 - DNA, 20 bp, synthetic construct
  source 1..20: mol_type = other DNA
ttgttattttttaaaagtaa

SEQ ID NO: 207121 - DNA, 20 bp, synthetic construct
  source 1..20: mol_type = other DNA
cttgttattttttaaaagta

SEQ ID NO: 207122 - DNA, 20 bp, synthetic construct
  source 1..20: mol_type = other DNA
gcttgttattttttaaaagt

SEQ ID NO: 207123 - DNA, 20 bp, synthetic construct
  source 1..20: mol_type = other DNA
tgcttgttattttttaaaag

SEQ ID NO: 207124 - DNA, 20 bp, synthetic construct
  source 1..20: mol_type = other DNA
ttgcttgttattttttaaaa

SEQ ID NO: 207125 - DNA, 20 bp, synthetic construct
  source 1..20: mol_type = other DNA
attgcttgttattttttaaa

SEQ ID NO: 207126 - DNA, 20 bp, synthetic construct
  source 1..20: mol_type = other DNA
tattgcttgttattttttaa

SEQ ID NO: 207127 - DNA, 20 bp, synthetic construct
  source 1..20: mol_type = other DNA
ttattgcttgttatttttta

SEQ ID NO: 207128 - DNA, 20 bp, synthetic construct
  source 1..20: mol_type = other DNA
tttattgcttgttatttttt

SEQ ID NO: 207129 - DNA, 20 bp, synthetic construct
  source 1..20: mol_type = other DNA
ttttattgcttgttattttt

SEQ ID NO: 207130 - DNA, 20 bp, synthetic construct
  source 1..20: mol_type = other DNA
attttattgcttgttatttt

SEQ ID NO: 207131 - DNA, 20 bp, synthetic construct
  source 1..20: mol_type = other DNA
cattttattgcttgttattt

SEQ ID NO: 207132 - DNA, 20 bp, synthetic construct
  source 1..20: mol_type = other DNA
acattttattgcttgttatt

SEQ ID NO: 207133 - DNA, 20 bp, synthetic construct
  source 1..20: mol_type = other DNA
aacattttattgcttgttat

SEQ ID NO: 207134 - DNA, 20 bp, synthetic construct
  source 1..20: mol_type = other DNA
taacattttattgcttgtta

SEQ ID NO: 207135 - DNA, 20 bp, synthetic construct
  source 1..20: mol_type = other DNA
gtaacattttattgcttgtt

SEQ ID NO: 207136 - DNA, 20 bp, synthetic construct
  source 1..20: mol_type = other DNA
tgtaacattttattgcttgt

SEQ ID NO: 207137 - DNA, 20 bp, synthetic construct
  source 1..20: mol_type = other DNA
atgtaacattttattgcttg

SEQ ID NO: 207138 - DNA, 20 bp, synthetic construct
  source 1..20: mol_type = other DNA
aatgtaacattttattgctt

SEQ ID NO: 207139 - DNA, 20 bp, synthetic construct
  source 1..20: mol_type = other DNA
aaatgtaacattttattgct

SEQ ID NO: 207140 - DNA, 20 bp, synthetic construct
  source 1..20: mol_type = other DNA
caaatgtaacattttattgc

SEQ ID NO: 207141 - DNA, 20 bp, synthetic construct
  source 1..20: mol_type = other DNA
tcaaatgtaacattttattg

SEQ ID NO: 207142 - DNA, 20 bp, synthetic construct
  source 1..20: mol_type = other DNA
ctcaaatgtaacattttatt

SEQ ID NO: 207143 - DNA, 20 bp, synthetic construct
  source 1..20: mol_type = other DNA
tctcaaatgtaacattttat

SEQ ID NO: 207144 - DNA, 20 bp, synthetic construct
  source 1..20: mol_type = other DNA
ttctcaaatgtaacatttta

SEQ ID NO: 207145 - DNA, 20 bp, synthetic construct
  source 1..20: mol_type = other DNA
cttctcaaatgtaacatttt

SEQ ID NO: 207146 - DNA, 20 bp, synthetic construct
  source 1..20: mol_type = other DNA
ccttctcaaatgtaacattt

SEQ ID NO: 207147 - DNA, 20 bp, synthetic construct
  source 1..20: mol_type = other DNA
accttctcaaatgtaacatt

SEQ ID NO: 207148 - DNA, 20 bp, synthetic construct
  source 1..20: mol_type = other DNA
aaccttctcaaatgtaacat

SEQ ID NO: 207149 - DNA, 20 bp, synthetic construct
  source 1..20: mol_type = other DNA
caaccttctcaaatgtaaca

SEQ ID NO: 207150 - DNA, 20 bp, synthetic construct
  source 1..20: mol_type = other DNA
tcaaccttctcaaatgtaac

SEQ ID NO: 207151 - DNA, 20 bp, synthetic construct
  source 1..20: mol_type = other DNA
ttcaaccttctcaaatgtaa

SEQ ID NO: 207152 - DNA, 20 bp, synthetic construct
  source 1..20: mol_type = other DNA
tttcaaccttctcaaatgta

SEQ ID NO: 207153 - DNA, 20 bp, synthetic construct
  source 1..20: mol_type = other DNA
atttcaaccttctcaaatgt

SEQ ID NO: 207154 - DNA, 20 bp, synthetic construct
  source 1..20: mol_type = other DNA
catttcaaccttctcaaatg

SEQ ID NO: 207155 - DNA, 20 bp, synthetic construct
  source 1..20: mol_type = other DNA
tcatttcaaccttctcaaat

SEQ ID NO: 207156 - DNA, 20 bp, synthetic construct
  source 1..20: mol_type = other DNA
ctcatttcaaccttctcaaa

SEQ ID NO: 207157 - DNA, 20 bp, synthetic construct
  source 1..20: mol_type = other DNA
tctcatttcaaccttctcaa

SEQ ID NO: 207158 - DNA, 20 bp, synthetic construct
  source 1..20: mol_type = other DNA
ttctcatttcaaccttctca

SEQ ID NO: 207159 - DNA, 20 bp, synthetic construct
  source 1..20: mol_type = other DNA
attctcatttcaaccttctc

SEQ ID NO: 207160 - DNA, 20 bp, synthetic construct
  source 1..20: mol_type = other DNA
aattctcatttcaaccttct

SEQ ID NO: 207161 - DNA, 20 bp, synthetic construct
  source 1..20: mol_type = other DNA
caattctcatttcaaccttc

SEQ ID NO: 207162 - DNA, 20 bp, synthetic construct
  source 1..20: mol_type = other DNA
tcaattctcatttcaacctt

SEQ ID NO: 207163 - DNA, 20 bp, synthetic construct
  source 1..20: mol_type = other DNA
atcaattctcatttcaacct

SEQ ID NO: 207164 - DNA, 20 bp, synthetic construct
  source 1..20: mol_type = other DNA
aatcaattctcatttcaacc

SEQ ID NO: 207165 - DNA, 20 bp, synthetic construct
  source 1..20: mol_type = other DNA
aaatcaattctcatttcaac

SEQ ID NO: 207166 - DNA, 20 bp, synthetic construct
  source 1..20: mol_type = other DNA
caaatcaattctcatttcaa

SEQ ID NO: 207167 - DNA, 20 bp, synthetic construct
  source 1..20: mol_type = other DNA
tcaaatcaattctcatttca

SEQ ID NO: 207168 - DNA, 20 bp, synthetic construct
  source 1..20: mol_type = other DNA
ctcaaatcaattctcatttc

SEQ ID NO: 207169 - DNA, 20 bp, synthetic construct
  source 1..20: mol_type = other DNA
actcaaatcaattctcattt

SEQ ID NO: 207170 - DNA, 20 bp, synthetic construct
  source 1..20: mol_type = other DNA
aactcaaatcaattctcatt

SEQ ID NO: 207171 - DNA, 20 bp, synthetic construct
  source 1..20: mol_type = other DNA
taactcaaatcaattctcat

SEQ ID NO: 207172 - DNA, 20 bp, synthetic construct
  source 1..20: mol_type = other DNA
ttaactcaaatcaattctca

SEQ ID NO: 207173 - DNA, 20 bp, synthetic construct
  source 1..20: mol_type = other DNA
tttaactcaaatcaattctc

SEQ ID NO: 207174 - DNA, 20 bp, synthetic construct
  source 1..20: mol_type = other DNA
atttaactcaaatcaattct

SEQ ID NO: 207175 - DNA, 20 bp, synthetic construct
  source 1..20: mol_type = other DNA
aatttaactcaaatcaattc

SEQ ID NO: 207176 - DNA, 20 bp, synthetic construct
  source 1..20: mol_type = other DNA
gaatttaactcaaatcaatt

SEQ ID NO: 207177 - DNA, 20 bp, synthetic construct
  source 1..20: mol_type = other DNA
agaatttaactcaaatcaat

SEQ ID NO: 207178 - DNA, 20 bp, synthetic construct
  source 1..20: mol_type = other DNA
tagaatttaactcaaatcaa

SEQ ID NO: 207179 - DNA, 20 bp, synthetic construct
  source 1..20: mol_type = other DNA
ctagaatttaactcaaatca

SEQ ID NO: 207180 - DNA, 20 bp, synthetic construct
  source 1..20: mol_type = other DNA
gctagaatttaactcaaatc

SEQ ID NO: 207181 - DNA, 20 bp, synthetic construct
  source 1..20: mol_type = other DNA
tgctagaatttaactcaaat

SEQ ID NO: 207182 - DNA, 20 bp, synthetic construct
  source 1..20: mol_type = other DNA
ctgctagaatttaactcaaa

SEQ ID NO: 207183 - DNA, 20 bp, synthetic construct
  source 1..20: mol_type = other DNA
tctgctagaatttaactcaa

SEQ ID NO: 207184 - DNA, 20 bp, synthetic construct
  source 1..20: mol_type = other DNA
atctgctagaatttaactca

SEQ ID NO: 207185 - DNA, 20 bp, synthetic construct
  source 1..20: mol_type = other DNA
aatctgctagaatttaactc

SEQ ID NO: 207186 - DNA, 20 bp, synthetic construct
  source 1..20: mol_type = other DNA
aaatctgctagaatttaact

SEQ ID NO: 207187 - DNA, 20 bp, synthetic construct
  source 1..20: mol_type = other DNA
aaaatctgctagaatttaac

SEQ ID NO: 207188 - DNA, 20 bp, synthetic construct
  source 1..20: mol_type = other DNA
aaaaatctgctagaatttaa

SEQ ID NO: 207189 - DNA, 20 bp, synthetic construct
  source 1..20: mol_type = other DNA
gaaaaatctgctagaattta

SEQ ID NO: 207190 - DNA, 20 bp, synthetic construct
  source 1..20: mol_type = other DNA
agaaaaatctgctagaattt

SEQ ID NO: 207191 - DNA, 20 bp, synthetic construct
  source 1..20: mol_type = other DNA
aagaaaaatctgctagaatt

SEQ ID NO: 207192 - DNA, 20 bp, synthetic construct
  source 1..20: mol_type = other DNA
taagaaaaatctgctagaat

SEQ ID NO: 207193 - DNA, 20 bp, synthetic construct
  source 1..20: mol_type = other DNA
ctaagaaaaatctgctagaa

SEQ ID NO: 207194 - DNA, 20 bp, synthetic construct
  source 1..20: mol_type = other DNA
tctaagaaaaatctgctaga

SEQ ID NO: 207195 - DNA, 20 bp, synthetic construct
  source 1..20: mol_type = other DNA
ttctaagaaaaatctgctag

SEQ ID NO: 207196 - DNA, 20 bp, synthetic construct
  source 1..20: mol_type = other DNA
cttctaagaaaaatctgcta

SEQ ID NO: 207197 - DNA, 20 bp, synthetic construct
  source 1..20: mol_type = other DNA
tcttctaagaaaaatctgct

SEQ ID NO: 207198 - DNA, 20 bp, synthetic construct
  source 1..20: mol_type = other DNA
ttcttctaagaaaaatctgc

SEQ ID NO: 207199 - DNA, 20 bp, synthetic construct
  source 1..20: mol_type = other DNA
attcttctaagaaaaatctg

SEQ ID NO: 207200 - DNA, 20 bp, synthetic construct
  source 1..20: mol_type = other DNA
cattcttctaagaaaaatct

SEQ ID NO: 207201 - DNA, 20 bp, synthetic construct
  source 1..20: mol_type = other DNA
tcattcttctaagaaaaatc

SEQ ID NO: 207202 - DNA, 20 bp, synthetic construct
  source 1..20: mol_type = other DNA
atcattcttctaagaaaaat

SEQ ID NO: 207203 - DNA, 20 bp, synthetic construct
  source 1..20: mol_type = other DNA
tatcattcttctaagaaaaa

SEQ ID NO: 207204 - DNA, 20 bp, synthetic construct
  source 1..20: mol_type = other DNA
atatcattcttctaagaaaa

SEQ ID NO: 207205 - DNA, 20 bp, synthetic construct
  source 1..20: mol_type = other DNA
gatatcattcttctaagaaa

SEQ ID NO: 207206 - DNA, 20 bp, synthetic construct
  source 1..20: mol_type = other DNA
tgatatcattcttctaagaa

SEQ ID NO: 207207 - DNA, 20 bp, synthetic construct
  source 1..20: mol_type = other DNA
atgatatcattcttctaaga

SEQ ID NO: 207208 - DNA, 20 bp, synthetic construct
  source 1..20: mol_type = other DNA
gatgatatcattcttctaag

SEQ ID NO: 207209 - DNA, 20 bp, synthetic construct
  source 1..20: mol_type = other DNA
tgatgatatcattcttctaa

SEQ ID NO: 207210 - DNA, 20 bp, synthetic construct
  source 1..20: mol_type = other DNA
atgatgatatcattcttcta

SEQ ID NO: 207211 - DNA, 20 bp, synthetic construct
  source 1..20: mol_type = other DNA
gatgatgatatcattcttct

SEQ ID NO: 207212 - DNA, 20 bp, synthetic construct
  source 1..20: mol_type = other DNA
agatgatgatatcattcttc

SEQ ID NO: 207213 - DNA, 20 bp, synthetic construct
  source 1..20: mol_type = other DNA
gagatgatgatatcattctt

SEQ ID NO: 207214 - DNA, 20 bp, synthetic construct
  source 1..20: mol_type = other DNA
ggagatgatgatatcattct

SEQ ID NO: 207215 - DNA, 20 bp, synthetic construct
  source 1..20: mol_type = other DNA
tggagatgatgatatcattc

SEQ ID NO: 207216 - DNA, 20 bp, synthetic construct
  source 1..20: mol_type = other DNA
ctggagatgatgatatcatt

SEQ ID NO: 207217 - DNA, 20 bp, synthetic construct
  source 1..20: mol_type = other DNA
gctggagatgatgatatcat

SEQ ID NO: 207218 - DNA, 20 bp, synthetic construct
  source 1..20: mol_type = other DNA
agctggagatgatgatatca

SEQ ID NO: 207219 - DNA, 20 bp, synthetic construct
  source 1..20: mol_type = other DNA
tagctggagatgatgatatc

SEQ ID NO: 207220 - DNA, 20 bp, synthetic construct
  source 1..20: mol_type = other DNA
gtagctggagatgatgatat

SEQ ID NO: 207221 - DNA, 20 bp, synthetic construct
  source 1..20: mol_type = other DNA
ggtagctggagatgatgata

SEQ ID NO: 207222 - DNA, 20 bp, synthetic construct
  source 1..20: mol_type = other DNA
aggtagctggagatgatgat

SEQ ID NO: 207223 - DNA, 20 bp, synthetic construct
  source 1..20: mol_type = other DNA
caggtagctggagatgatga

SEQ ID NO: 207224 - DNA, 20 bp, synthetic construct
  source 1..20: mol_type = other DNA
gcaggtagctggagatgatg

SEQ ID NO: 207225 - DNA, 20 bp, synthetic construct
  source 1..20: mol_type = other DNA
tgcaggtagctggagatgat

SEQ ID NO: 207226 - DNA, 20 bp, synthetic construct
  source 1..20: mol_type = other DNA
ttgcaggtagctggagatga

SEQ ID NO: 207227 - DNA, 20 bp, synthetic construct
  source 1..20: mol_type = other DNA
attgcaggtagctggagatg

SEQ ID NO: 207228 - DNA, 20 bp, synthetic construct
  source 1..20: mol_type = other DNA
aattgcaggtagctggagat

SEQ ID NO: 207229 - DNA, 20 bp, synthetic construct
  source 1..20: mol_type = other DNA
caattgcaggtagctggaga

SEQ ID NO: 207230 - DNA, 20 bp, synthetic construct
  source 1..20: mol_type = other DNA
tcaattgcaggtagctggag

SEQ ID NO: 207231 - DNA, 20 bp, synthetic construct
  source 1..20: mol_type = other DNA
atcaattgcaggtagctgga

SEQ ID NO: 207232 - DNA, 20 bp, synthetic construct
  source 1..20: mol_type = other DNA
gatcaattgcaggtagctgg

SEQ ID NO: 207233 - DNA, 20 bp, synthetic construct
  source 1..20: mol_type = other DNA
agatcaattgcaggtagctg

SEQ ID NO: 207234 - DNA, 20 bp, synthetic construct
  source 1..20: mol_type = other DNA
tagatcaattgcaggtagct

SEQ ID NO: 207235 - DNA, 20 bp, synthetic construct
  source 1..20: mol_type = other DNA
gtagatcaattgcaggtagc

SEQ ID NO: 207236 - DNA, 20 bp, synthetic construct
  source 1..20: mol_type = other DNA
agtagatcaattgcaggtag

SEQ ID NO: 207237 - DNA, 20 bp, synthetic construct
  source 1..20: mol_type = other DNA
gagtagatcaattgcaggta

SEQ ID NO: 207238 - DNA, 20 bp, synthetic construct
  source 1..20: mol_type = other DNA
agagtagatcaattgcaggt

SEQ ID NO: 207239 - DNA, 20 bp, synthetic construct
  source 1..20: mol_type = other DNA
cagagtagatcaattgcagg

SEQ ID NO: 207240 - DNA, 20 bp, synthetic construct
  source 1..20: mol_type = other DNA
tcagagtagatcaattgcag

SEQ ID NO: 207241 - DNA, 20 bp, synthetic construct
  source 1..20: mol_type = other DNA
ttcagagtagatcaattgca

SEQ ID NO: 207242 - DNA, 20 bp, synthetic construct
  source 1..20: mol_type = other DNA
attcagagtagatcaattgc

SEQ ID NO: 207243 - DNA, 20 bp, synthetic construct
  source 1..20: mol_type = other DNA
aattcagagtagatcaattg

SEQ ID NO: 207244 - DNA, 20 bp, synthetic construct
  source 1..20: mol_type = other DNA
taattcagagtagatcaatt

SEQ ID NO: 207245 - DNA, 20 bp, synthetic construct
  source 1..20: mol_type = other DNA
ttaattcagagtagatcaat

SEQ ID NO: 207246 - DNA, 20 bp, synthetic construct
  source 1..20: mol_type = other DNA
cttaattcagagtagatcaa

SEQ ID NO: 207247 - DNA, 20 bp, synthetic construct
  source 1..20: mol_type = other DNA
tcttaattcagagtagatca

SEQ ID NO: 207248 - DNA, 20 bp, synthetic construct
  source 1..20: mol_type = other DNA
ttcttaattcagagtagatc

SEQ ID NO: 207249 - DNA, 20 bp, synthetic construct
  source 1..20: mol_type = other DNA
tttcttaattcagagtagat

SEQ ID NO: 207250 - DNA, 20 bp, synthetic construct
  source 1..20: mol_type = other DNA
ctttcttaattcagagtaga

SEQ ID NO: 207251 - DNA, 20 bp, synthetic construct
  source 1..20: mol_type = other DNA
tctttcttaattcagagtag

SEQ ID NO: 207252 - DNA, 20 bp, synthetic construct
  source 1..20: mol_type = other DNA
ctctttcttaattcagagta

SEQ ID NO: 207253 - DNA, 20 bp, synthetic construct
  source 1..20: mol_type = other DNA
tctctttcttaattcagagt

SEQ ID NO: 207254 - DNA, 20 bp, synthetic construct
  source 1..20: mol_type = other DNA
gtctctttcttaattcagag

SEQ ID NO: 207255 - DNA, 20 bp, synthetic construct
  source 1..20: mol_type = other DNA
agtctctttcttaattcaga

SEQ ID NO: 207256 - DNA, 20 bp, synthetic construct
  source 1..20: mol_type = other DNA
aagtctctttcttaattcag

SEQ ID NO: 207257 - DNA, 20 bp, synthetic construct
  source 1..20: mol_type = other DNA
gaagtctctttcttaattca

SEQ ID NO: 207258 - DNA, 20 bp, synthetic construct
  source 1..20: mol_type = other DNA
ggaagtctctttcttaattc

SEQ ID NO: 207259 - DNA, 20 bp, synthetic construct
  source 1..20: mol_type = other DNA
tggaagtctctttcttaatt

SEQ ID NO: 207260 - DNA, 20 bp, synthetic construct
  source 1..20: mol_type = other DNA
atggaagtctctttcttaat

SEQ ID NO: 207261 - DNA, 20 bp, synthetic construct
  source 1..20: mol_type = other DNA
aatggaagtctctttcttaa

SEQ ID NO: 207262 - DNA, 20 bp, synthetic construct
  source 1..20: mol_type = other DNA
aaatggaagtctctttctta

SEQ ID NO: 207263 - DNA, 20 bp, synthetic construct
  source 1..20: mol_type = other DNA
caaatggaagtctctttctt

SEQ ID NO: 207264 - DNA, 20 bp, synthetic construct
  source 1..20: mol_type = other DNA
acaaatggaagtctctttct

SEQ ID NO: 207265 - DNA, 20 bp, synthetic construct
  source 1..20: mol_type = other DNA
aacaaatggaagtctctttc

SEQ ID NO: 207266 - DNA, 20 bp, synthetic construct
  source 1..20: mol_type = other DNA
caacaaatggaagtctcttt

SEQ ID NO: 207267 - DNA, 20 bp, synthetic construct
  source 1..20: mol_type = other DNA
acaacaaatggaagtctctt

SEQ ID NO: 207268 - DNA, 20 bp, synthetic construct
  source 1..20: mol_type = other DNA
aacaacaaatggaagtctct

SEQ ID NO: 207269 - DNA, 20 bp, synthetic construct
  source 1..20: mol_type = other DNA
aaacaacaaatggaagtctc

SEQ ID NO: 207270 - DNA, 20 bp, synthetic construct
  source 1..20: mol_type = other DNA
taaacaacaaatggaagtct

SEQ ID NO: 207271 - DNA, 20 bp, synthetic construct
  source 1..20: mol_type = other DNA
ataaacaacaaatggaagtc

SEQ ID NO: 207272 - DNA, 20 bp, synthetic construct
  source 1..20: mol_type = other DNA
tataaacaacaaatggaagt

SEQ ID NO: 207273 - DNA, 20 bp, synthetic construct
  source 1..20: mol_type = other DNA
atataaacaacaaatggaag

SEQ ID NO: 207274 - DNA, 20 bp, synthetic construct
  source 1..20: mol_type = other DNA
aatataaacaacaaatggaa

SEQ ID NO: 207275 - DNA, 20 bp, synthetic construct
  source 1..20: mol_type = other DNA
aaatataaacaacaaatgga

SEQ ID NO: 207276 - DNA, 20 bp, synthetic construct
  source 1..20: mol_type = other DNA
aaaatataaacaacaaatgg

SEQ ID NO: 207277 - DNA, 20 bp, synthetic construct
  source 1..20: mol_type = other DNA
caaaatataaacaacaaatg

SEQ ID NO: 207278 - DNA, 20 bp, synthetic construct
  source 1..20: mol_type = other DNA
gcaaaatataaacaacaaat

SEQ ID NO: 207279 - DNA, 20 bp, synthetic construct
  source 1..20: mol_type = other DNA
tgcaaaatataaacaacaaa

SEQ ID NO: 207280 - DNA, 20 bp, synthetic construct
  source 1..20: mol_type = other DNA
gtgcaaaatataaacaacaa

SEQ ID NO: 207281 - DNA, 20 bp, synthetic construct
  source 1..20: mol_type = other DNA
agtgcaaaatataaacaaca

SEQ ID NO: 207282 - DNA, 20 bp, synthetic construct
  source 1..20: mol_type = other DNA
gagtgcaaaatataaacaac

SEQ ID NO: 207283 - DNA, 20 bp, synthetic construct
  source 1..20: mol_type = other DNA
agagtgcaaaatataaacaa

SEQ ID NO: 207284 - DNA, 20 bp, synthetic construct
  source 1..20: mol_type = other DNA
aagagtgcaaaatataaaca

SEQ ID NO: 207285 - DNA, 20 bp, synthetic construct
  source 1..20: mol_type = other DNA
caagagtgcaaaatataaac

SEQ ID NO: 207286 - DNA, 20 bp, synthetic construct
  source 1..20: mol_type = other DNA
tcaagagtgcaaaatataaa

SEQ ID NO: 207287 - DNA, 20 bp, synthetic construct
  source 1..20: mol_type = other DNA
atcaagagtgcaaaatataa

SEQ ID NO: 207288 - DNA, 20 bp, synthetic construct
  source 1..20: mol_type = other DNA
catcaagagtgcaaaatata

SEQ ID NO: 207289 - DNA, 20 bp, synthetic construct
  source 1..20: mol_type = other DNA
acatcaagagtgcaaaatat

SEQ ID NO: 207290 - DNA, 20 bp, synthetic construct
  source 1..20: mol_type = other DNA
cacatcaagagtgcaaaata

SEQ ID NO: 207291 - DNA, 20 bp, synthetic construct
  source 1..20: mol_type = other DNA
acacatcaagagtgcaaaat

SEQ ID NO: 207292 - DNA, 20 bp, synthetic construct
  source 1..20: mol_type = other DNA
aacacatcaagagtgcaaaa

SEQ ID NO: 207293 - DNA, 20 bp, synthetic construct
  source 1..20: mol_type = other DNA
aaacacatcaagagtgcaaa

SEQ ID NO: 207294 - DNA, 20 bp, synthetic construct
  source 1..20: mol_type = other DNA
gaaacacatcaagagtgcaa

SEQ ID NO: 207295 - DNA, 20 bp, synthetic construct
  source 1..20: mol_type = other DNA
agaaacacatcaagagtgca

SEQ ID NO: 207296 - DNA, 20 bp, synthetic construct
  source 1..20: mol_type = other DNA
aagaaacacatcaagagtgc

SEQ ID NO: 207297 - DNA, 20 bp, synthetic construct
  source 1..20: mol_type = other DNA
aaagaaacacatcaagagtg

SEQ ID NO: 207298 - DNA, 20 bp, synthetic construct
  source 1..20: mol_type = other DNA
taaagaaacacatcaagagt

SEQ ID NO: 207299 - DNA, 20 bp, synthetic construct
  source 1..20: mol_type = other DNA
ttaaagaaacacatcaagag

SEQ ID NO: 207300 - DNA, 20 bp, synthetic construct
  source 1..20: mol_type = other DNA
tttaaagaaacacatcaaga

SEQ ID NO: 207301 - DNA, 20 bp, synthetic construct
  source 1..20: mol_type = other DNA
atttaaagaaacacatcaag

SEQ ID NO: 207302 - DNA, 20 bp, synthetic construct
  source 1..20: mol_type = other DNA
aatttaaagaaacacatcaa

SEQ ID NO: 207303 - DNA, 20 bp, synthetic construct
  source 1..20: mol_type = other DNA
taatttaaagaaacacatca

SEQ ID NO: 207304 - DNA, 20 bp, synthetic construct
  source 1..20: mol_type = other DNA
ataatttaaagaaacacatc

SEQ ID NO: 207305 - DNA, 20 bp, synthetic construct
  source 1..20: mol_type = other DNA
cataatttaaagaaacacat

SEQ ID NO: 207306 - DNA, 20 bp, synthetic construct
  source 1..20: mol_type = other DNA
ccataatttaaagaaacaca

SEQ ID NO: 207307 - DNA, 20 bp, synthetic construct
  source 1..20: mol_type = other DNA
accataatttaaagaaacac

SEQ ID NO: 207308 - DNA, 20 bp, synthetic construct
  source 1..20: mol_type = other DNA
gaccataatttaaagaaaca

SEQ ID NO: 207309 - DNA, 20 bp, synthetic construct
  source 1..20: mol_type = other DNA
tgaccataatttaaagaaac

SEQ ID NO: 207310 - DNA, 20 bp, synthetic construct
  source 1..20: mol_type = other DNA
atgaccataatttaaagaaa

SEQ ID NO: 207311 - DNA, 20 bp, synthetic construct
  source 1..20: mol_type = other DNA
catgaccataatttaaagaa

SEQ ID NO: 207312 - DNA, 20 bp, synthetic construct
  source 1..20: mol_type = other DNA
ccatgaccataatttaaaga

SEQ ID NO: 207313 - DNA, 20 bp, synthetic construct
  source 1..20: mol_type = other DNA
cccatgaccataatttaaag

SEQ ID NO: 207314 - DNA, 20 bp, synthetic construct
  source 1..20: mol_type = other DNA
gcccatgaccataatttaaa

SEQ ID NO: 207315 - DNA, 20 bp, synthetic construct
  source 1..20: mol_type = other DNA
ggcccatgaccataatttaa

SEQ ID NO: 207316 - DNA, 20 bp, synthetic construct
  source 1..20: mol_type = other DNA
tggcccatgaccataattta

SEQ ID NO: 207317 - DNA, 20 bp, synthetic construct
  source 1..20: mol_type = other DNA
ctggcccatgaccataattt

SEQ ID NO: 207318 - DNA, 20 bp, synthetic construct
  source 1..20: mol_type = other DNA
cctggcccatgaccataatt

SEQ ID NO: 207319 - DNA, 20 bp, synthetic construct
  source 1..20: mol_type = other DNA
acctggcccatgaccataat

SEQ ID NO: 207320 - DNA, 20 bp, synthetic construct
  source 1..20: mol_type = other DNA
cacctggcccatgaccataa

SEQ ID NO: 207321 - DNA, 20 bp, synthetic construct
  source 1..20: mol_type = other DNA
acacctggcccatgaccata

SEQ ID NO: 207322 - DNA, 20 bp, synthetic construct
  source 1..20: mol_type = other DNA
tacacctggcccatgaccat

SEQ ID NO: 207323 - DNA, 20 bp, synthetic construct
  source 1..20: mol_type = other DNA
ctacacctggcccatgacca

SEQ ID NO: 207324 - DNA, 20 bp, synthetic construct
  source 1..20: mol_type = other DNA
cctacacctggcccatgacc

SEQ ID NO: 207325 - DNA, 20 bp, synthetic construct
  source 1..20: mol_type = other DNA
tcctacacctggcccatgac

SEQ ID NO: 207326 - DNA, 20 bp, synthetic construct
  source 1..20: mol_type = other DNA
ctcctacacctggcccatga

SEQ ID NO: 207327 - DNA, 20 bp, synthetic construct
  source 1..20: mol_type = other DNA
gctcctacacctggcccatg

SEQ ID NO: 207328 - DNA, 20 bp, synthetic construct
  source 1..20: mol_type = other DNA
agctcctacacctggcccat

SEQ ID NO: 207329 - DNA, 20 bp, synthetic construct
  source 1..20: mol_type = other DNA
gagctcctacacctggccca

SEQ ID NO: 207330 - DNA, 20 bp, synthetic construct
  source 1..20: mol_type = other DNA
tgagctcctacacctggccc

SEQ ID NO: 207331 - DNA, 20 bp, synthetic construct
  source 1..20: mol_type = other DNA
gtgagctcctacacctggcc

SEQ ID NO: 207332 - DNA, 20 bp, synthetic construct
  source 1..20: mol_type = other DNA
tgtgagctcctacacctggc

SEQ ID NO: 207333 - DNA, 20 bp, synthetic construct
  source 1..20: mol_type = other DNA
gtgtgagctcctacacctgg

SEQ ID NO: 207334 - DNA, 20 bp, synthetic construct
  source 1..20: mol_type = other DNA
ggtgtgagctcctacacctg

SEQ ID NO: 207335 - DNA, 20 bp, synthetic construct
  source 1..20: mol_type = other DNA
aggtgtgagctcctacacct

SEQ ID NO: 207336 - DNA, 20 bp, synthetic construct
  source 1..20: mol_type = other DNA
caggtgtgagctcctacacc

SEQ ID NO: 207337 - DNA, 20 bp, synthetic construct
  source 1..20: mol_type = other DNA
acaggtgtgagctcctacac

SEQ ID NO: 207338 - DNA, 20 bp, synthetic construct
  source 1..20: mol_type = other DNA
tacaggtgtgagctcctaca

SEQ ID NO: 207339 - DNA, 20 bp, synthetic construct
  source 1..20: mol_type = other DNA
ttacaggtgtgagctcctac

SEQ ID NO: 207340 - DNA, 20 bp, synthetic construct
  source 1..20: mol_type = other DNA
attacaggtgtgagctccta

SEQ ID NO: 207341 - DNA, 20 bp, synthetic construct
  source 1..20: mol_type = other DNA
gattacaggtgtgagctcct

SEQ ID NO: 207342 - DNA, 20 bp, synthetic construct
  source 1..20: mol_type = other DNA
ggattacaggtgtgagctcc

SEQ ID NO: 207343 - DNA, 20 bp, synthetic construct
  source 1..20: mol_type = other DNA
gggattacaggtgtgagctc

SEQ ID NO: 207344 - DNA, 20 bp, synthetic construct
  source 1..20: mol_type = other DNA
tgggattacaggtgtgagct

SEQ ID NO: 207345 - DNA, 20 bp, synthetic construct
  source 1..20: mol_type = other DNA
ctgggattacaggtgtgagc

SEQ ID NO: 207346 - DNA, 20 bp, synthetic construct
  source 1..20: mol_type = other DNA
gctgggattacaggtgtgag

SEQ ID NO: 207347 - DNA, 20 bp, synthetic construct
  source 1..20: mol_type = other DNA
tgctgggattacaggtgtga

SEQ ID NO: 207348 - DNA, 20 bp, synthetic construct
  source 1..20: mol_type = other DNA
gtgctgggattacaggtgtg

SEQ ID NO: 207349 - DNA, 20 bp, synthetic construct
  source 1..20: mol_type = other DNA
ggtgctgggattacaggtgt

SEQ ID NO: 207350 - DNA, 20 bp, synthetic construct
  source 1..20: mol_type = other DNA
aggtgctgggattacaggtg

SEQ ID NO: 207351 - DNA, 20 bp, synthetic construct
  source 1..20: mol_type = other DNA
aaggtgctgggattacaggt

SEQ ID NO: 207352 - DNA, 20 bp, synthetic construct
  source 1..20: mol_type = other DNA
caaggtgctgggattacagg

SEQ ID NO: 207353 - DNA, 20 bp, synthetic construct
  source 1..20: mol_type = other DNA
ccaaggtgctgggattacag

SEQ ID NO: 207354 - DNA, 20 bp, synthetic construct
  source 1..20: mol_type = other DNA
cccaaggtgctgggattaca

SEQ ID NO: 207355 - DNA, 20 bp, synthetic construct
  source 1..20: mol_type = other DNA
tcccaaggtgctgggattac

SEQ ID NO: 207356 - DNA, 20 bp, synthetic construct
  source 1..20: mol_type = other DNA
gtcccaaggtgctgggatta

SEQ ID NO: 207357 - DNA, 20 bp, synthetic construct
  source 1..20: mol_type = other DNA
agtcccaaggtgctgggatt

SEQ ID NO: 207358 - DNA, 20 bp, synthetic construct
  source 1..20: mol_type = other DNA
gagtcccaaggtgctgggat

SEQ ID NO: 207359 - DNA, 20 bp, synthetic construct
  source 1..20: mol_type = other DNA
agagtcccaaggtgctggga

SEQ ID NO: 207360 - DNA, 20 bp, synthetic construct
  source 1..20: mol_type = other DNA
cagagtcccaaggtgctggg

SEQ ID NO: 207361 - DNA, 20 bp, synthetic construct
  source 1..20: mol_type = other DNA
tcagagtcccaaggtgctgg

SEQ ID NO: 207362 - DNA, 20 bp, synthetic construct
  source 1..20: mol_type = other DNA
ctcagagtcccaaggtgctg

SEQ ID NO: 207363 - DNA, 20 bp, synthetic construct
  source 1..20: mol_type = other DNA
cctcagagtcccaaggtgct

SEQ ID NO: 207364 - DNA, 20 bp, synthetic construct
  source 1..20: mol_type = other DNA
tcctcagagtcccaaggtgc

SEQ ID NO: 207365 - DNA, 20 bp, synthetic construct
  source 1..20: mol_type = other DNA
ctcctcagagtcccaaggtg

SEQ ID NO: 207366 - DNA, 20 bp, synthetic construct
  source 1..20: mol_type = other DNA
cctcctcagagtcccaaggt

SEQ ID NO: 207367 - DNA, 20 bp, synthetic construct
  source 1..20: mol_type = other DNA
ccctcctcagagtcccaagg

SEQ ID NO: 207368 - DNA, 20 bp, synthetic construct
  source 1..20: mol_type = other DNA
tccctcctcagagtcccaag

SEQ ID NO: 207369 - DNA, 20 bp, synthetic construct
  source 1..20: mol_type = other DNA
ctccctcctcagagtcccaa

SEQ ID NO: 207370 - DNA, 20 bp, synthetic construct
  source 1..20: mol_type = other DNA
cctccctcctcagagtccca

SEQ ID NO: 207371 - DNA, 20 bp, synthetic construct
  source 1..20: mol_type = other DNA
tcctccctcctcagagtccc

SEQ ID NO: 207372 - DNA, 20 bp, synthetic construct
  source 1..20: mol_type = other DNA
atcctccctcctcagagtcc

SEQ ID NO: 207373 - DNA, 20 bp, synthetic construct
  source 1..20: mol_type = other DNA
gatcctccctcctcagagtc

SEQ ID NO: 207374 - DNA, 20 bp, synthetic construct
  source 1..20: mol_type = other DNA
tgatcctccctcctcagagt

SEQ ID NO: 207375 - DNA, 20 bp, synthetic construct
  source 1..20: mol_type = other DNA
gtgatcctccctcctcagag

SEQ ID NO: 207376 - DNA, 20 bp, synthetic construct
  source 1..20: mol_type = other DNA
agtgatcctccctcctcaga

SEQ ID NO: 207377 - DNA, 20 bp, synthetic construct
  source 1..20: mol_type = other DNA
cagtgatcctccctcctcag

SEQ ID NO: 207378 - DNA, 20 bp, synthetic construct
  source 1..20: mol_type = other DNA
ccagtgatcctccctcctca

SEQ ID NO: 207379 - DNA, 20 bp, synthetic construct
  source 1..20: mol_type = other DNA
tccagtgatcctccctcctc

SEQ ID NO: 207380 - DNA, 20 bp, synthetic construct
  source 1..20: mol_type = other DNA
ctccagtgatcctccctcct

SEQ ID NO: 207381 - DNA, 20 bp, synthetic construct
  source 1..20: mol_type = other DNA
cctccagtgatcctccctcc

SEQ ID NO: 207382 - DNA, 20 bp, synthetic construct
  source 1..20: mol_type = other DNA
gcctccagtgatcctccctc

SEQ ID NO: 207383 - DNA, 20 bp, synthetic construct
  source 1..20: mol_type = other DNA
ggcctccagtgatcctccct

SEQ ID NO: 207384 - DNA, 20 bp, synthetic construct
  source 1..20: mol_type = other DNA
tggcctccagtgatcctccc

SEQ ID NO: 207385 - DNA, 20 bp, synthetic construct
  source 1..20: mol_type = other DNA
ctggcctccagtgatcctcc

SEQ ID NO: 207386 - DNA, 20 bp, synthetic construct
  source 1..20: mol_type = other DNA
cctggcctccagtgatcctc

SEQ ID NO: 207387 - DNA, 20 bp, synthetic construct
  source 1..20: mol_type = other DNA
tcctggcctccagtgatcct

SEQ ID NO: 207388 - DNA, 20 bp, synthetic construct
  source 1..20: mol_type = other DNA
ctcctggcctccagtgatcc

SEQ ID NO: 207389 - DNA, 20 bp, synthetic construct
  source 1..20: mol_type = other DNA
actcctggcctccagtgatc

SEQ ID NO: 207390 - DNA, 20 bp, synthetic construct
  source 1..20: mol_type = other DNA
aactcctggcctccagtgat

SEQ ID NO: 207391 - DNA, 20 bp, synthetic construct
  source 1..20: mol_type = other DNA
gaactcctggcctccagtga

SEQ ID NO: 207392 - DNA, 20 bp, synthetic construct
  source 1..20: mol_type = other DNA
tgaactcctggcctccagtg

SEQ ID NO: 207393 - DNA, 20 bp, synthetic construct
  source 1..20: mol_type = other DNA
ttgaactcctggcctccagt

SEQ ID NO: 207394 - DNA, 20 bp, synthetic construct
  source 1..20: mol_type = other DNA
cttgaactcctggcctccag

SEQ ID NO: 207395 - DNA, 20 bp, synthetic construct
  source 1..20: mol_type = other DNA
tcttgaactcctggcctcca

SEQ ID NO: 207396 - DNA, 20 bp, synthetic construct
  source 1..20: mol_type = other DNA
gtcttgaactcctggcctcc

SEQ ID NO: 207397 - DNA, 20 bp, synthetic construct
  source 1..20: mol_type = other DNA
ggtcttgaactcctggcctc

SEQ ID NO: 207398 - DNA, 20 bp, synthetic construct
  source 1..20: mol_type = other DNA
aggtcttgaactcctggcct

SEQ ID NO: 207399 - DNA, 20 bp, synthetic construct
  source 1..20: mol_type = other DNA
gaggtcttgaactcctggcc

SEQ ID NO: 207400 - DNA, 20 bp, synthetic construct
  source 1..20: mol_type = other DNA
cgaggtcttgaactcctggc

SEQ ID NO: 207401 - DNA, 20 bp, synthetic construct
  source 1..20: mol_type = other DNA
acgaggtcttgaactcctgg

SEQ ID NO: 207402 - DNA, 20 bp, synthetic construct
  source 1..20: mol_type = other DNA
gacgaggtcttgaactcctg

SEQ ID NO: 207403 - DNA, 20 bp, synthetic construct
  source 1..20: mol_type = other DNA
agacgaggtcttgaactcct

SEQ ID NO: 207404 - DNA, 20 bp, synthetic construct
  source 1..20: mol_type = other DNA
cagacgaggtcttgaactcc

SEQ ID NO: 207405 - DNA, 20 bp, synthetic construct
  source 1..20: mol_type = other DNA
acagacgaggtcttgaactc

SEQ ID NO: 207406 - DNA, 20 bp, synthetic construct
  source 1..20: mol_type = other DNA
tacagacgaggtcttgaact

SEQ ID NO: 207407 - DNA, 20 bp, synthetic construct
  source 1..20: mol_type = other DNA
gtacagacgaggtcttgaac

SEQ ID NO: 207408 - DNA, 20 bp, synthetic construct
  source 1..20: mol_type = other DNA
tgtacagacgaggtcttgaa

SEQ ID NO: 207409 - DNA, 20 bp, synthetic construct
  source 1..20: mol_type = other DNA
ctgtacagacgaggtcttga

SEQ ID NO: 207410 - DNA, 20 bp, synthetic construct
  source 1..20: mol_type = other DNA
actgtacagacgaggtcttg

SEQ ID NO: 207411 - DNA, 20 bp, synthetic construct
  source 1..20: mol_type = other DNA
tactgtacagacgaggtctt

SEQ ID NO: 207412 - DNA, 20 bp, synthetic construct
  source 1..20: mol_type = other DNA
ttactgtacagacgaggtct

SEQ ID NO: 207413 - DNA, 20 bp, synthetic construct
  source 1..20: mol_type = other DNA
tttactgtacagacgaggtc

SEQ ID NO: 207414 - DNA, 20 bp, synthetic construct
  source 1..20: mol_type = other DNA
atttactgtacagacgaggt

SEQ ID NO: 207415 - DNA, 20 bp, synthetic construct
  source 1..20: mol_type = other DNA
aatttactgtacagacgagg

SEQ ID NO: 207416 - DNA, 20 bp, synthetic construct
  source 1..20: mol_type = other DNA
aaatttactgtacagacgag

SEQ ID NO: 207417 - DNA, 20 bp, synthetic construct
  source 1..20: mol_type = other DNA
aaaatttactgtacagacga

SEQ ID NO: 207418 - DNA, 20 bp, synthetic construct
  source 1..20: mol_type = other DNA
taaaatttactgtacagacg

SEQ ID NO: 207419 - DNA, 20 bp, synthetic construct
  source 1..20: mol_type = other DNA
ttaaaatttactgtacagac

SEQ ID NO: 207420 - DNA, 20 bp, synthetic construct
  source 1..20: mol_type = other DNA
tttaaaatttactgtacaga

SEQ ID NO: 207421 - DNA, 20 bp, synthetic construct
  source 1..20: mol_type = other DNA
ttttaaaatttactgtacag

SEQ ID NO: 207422 - DNA, 20 bp, synthetic construct
  source 1..20: mol_type = other DNA
tttttaaaatttactgtaca

SEQ ID NO: 207423 - DNA, 20 bp, synthetic construct
  source 1..20: mol_type = other DNA
atttttaaaatttactgtac

SEQ ID NO: 207424 - DNA, 20 bp, synthetic construct
  source 1..20: mol_type = other DNA
aatttttaaaatttactgta

SEQ ID NO: 207425 - DNA, 20 bp, synthetic construct
  source 1..20: mol_type = other DNA
taatttttaaaatttactgt

SEQ ID NO: 207426 - DNA, 20 bp, synthetic construct
  source 1..20: mol_type = other DNA
ctaatttttaaaatttactg

SEQ ID NO: 207427 - DNA, 20 bp, synthetic construct
  source 1..20: mol_type = other DNA
gctaatttttaaaatttact

SEQ ID NO: 207428 - DNA, 20 bp, synthetic construct
  source 1..20: mol_type = other DNA
ggctaatttttaaaatttac

SEQ ID NO: 207429 - DNA, 20 bp, synthetic construct
  source 1..20: mol_type = other DNA
tggctaatttttaaaattta

SEQ ID NO: 207430 - DNA, 20 bp, synthetic construct
  source 1..20: mol_type = other DNA
ctggctaatttttaaaattt

SEQ ID NO: 207431 - DNA, 20 bp, synthetic construct
  source 1..20: mol_type = other DNA
cctggctaatttttaaaatt

SEQ ID NO: 207432 - DNA, 20 bp, synthetic construct
  source 1..20: mol_type = other DNA
gcctggctaatttttaaaat

SEQ ID NO: 207433 - DNA, 20 bp, synthetic construct
  source 1..20: mol_type = other DNA
tgcctggctaatttttaaaa

SEQ ID NO: 207434 - DNA, 20 bp, synthetic construct
  source 1..20: mol_type = other DNA
atgcctggctaatttttaaa

SEQ ID NO: 207435 - DNA, 20 bp, synthetic construct
  source 1..20: mol_type = other DNA
catgcctggctaatttttaa

SEQ ID NO: 207436 - DNA, 20 bp, synthetic construct
  source 1..20: mol_type = other DNA
ccatgcctggctaattttta

SEQ ID NO: 207437 - DNA, 20 bp, synthetic construct
  source 1..20: mol_type = other DNA
accatgcctggctaattttt

SEQ ID NO: 207438 - DNA, 20 bp, synthetic construct
  source 1..20: mol_type = other DNA
taccatgcctggctaatttt

SEQ ID NO: 207439 - DNA, 20 bp, synthetic construct
  source 1..20: mol_type = other DNA
ctaccatgcctggctaattt

SEQ ID NO: 207440 - DNA, 20 bp, synthetic construct
  source 1..20: mol_type = other DNA
gctaccatgcctggctaatt

SEQ ID NO: 207441 - DNA, 20 bp, synthetic construct
  source 1..20: mol_type = other DNA
tgctaccatgcctggctaat

SEQ ID NO: 207442 - DNA, 20 bp, synthetic construct
  source 1..20: mol_type = other DNA
atgctaccatgcctggctaa

SEQ ID NO: 207443 - DNA, 20 bp, synthetic construct
  source 1..20: mol_type = other DNA
aatgctaccatgcctggcta

SEQ ID NO: 207444 - DNA, 20 bp, synthetic construct
  source 1..20: mol_type = other DNA
gaatgctaccatgcctggct

SEQ ID NO: 207445 - DNA, 20 bp, synthetic construct
  source 1..20: mol_type = other DNA
tgaatgctaccatgcctggc

SEQ ID NO: 207446 - DNA, 20 bp, synthetic construct
  source 1..20: mol_type = other DNA
gtgaatgctaccatgcctgg

SEQ ID NO: 207447 - DNA, 20 bp, synthetic construct
  source 1..20: mol_type = other DNA
ggtgaatgctaccatgcctg

SEQ ID NO: 207448 - DNA, 20 bp, synthetic construct
  source 1..20: mol_type = other DNA
aggtgaatgctaccatgcct

SEQ ID NO: 207449 - DNA, 20 bp, synthetic construct
  source 1..20: mol_type = other DNA
caggtgaatgctaccatgcc

SEQ ID NO: 207450 - DNA, 20 bp, synthetic construct
  source 1..20: mol_type = other DNA
acaggtgaatgctaccatgc

SEQ ID NO: 207451 - DNA, 20 bp, synthetic construct
  source 1..20: mol_type = other DNA
tacaggtgaatgctaccatg

SEQ ID NO: 207452 - DNA, 20 bp, synthetic construct
  source 1..20: mol_type = other DNA
ctacaggtgaatgctaccat

SEQ ID NO: 207453 - DNA, 20 bp, synthetic construct
  source 1..20: mol_type = other DNA
actacaggtgaatgctacca

SEQ ID NO: 207454 - DNA, 20 bp, synthetic construct
  source 1..20: mol_type = other DNA
gactacaggtgaatgctacc

SEQ ID NO: 207455 - DNA, 20 bp, synthetic construct
  source 1..20: mol_type = other DNA
agactacaggtgaatgctac

SEQ ID NO: 207456 - DNA, 20 bp, synthetic construct
  source 1..20: mol_type = other DNA
aagactacaggtgaatgcta

SEQ ID NO: 207457 - DNA, 20 bp, synthetic construct
  source 1..20: mol_type = other DNA
taagactacaggtgaatgct

SEQ ID NO: 207458 - DNA, 20 bp, synthetic construct
  source 1..20: mol_type = other DNA
ctaagactacaggtgaatgc

SEQ ID NO: 207459 - DNA, 20 bp, synthetic construct
  source 1..20: mol_type = other DNA
gctaagactacaggtgaatg

SEQ ID NO: 207460 - DNA, 20 bp, synthetic construct
  source 1..20: mol_type = other DNA
agctaagactacaggtgaat

SEQ ID NO: 207461 - DNA, 20 bp, synthetic construct
  source 1..20: mol_type = other DNA
tagctaagactacaggtgaa

SEQ ID NO: 207462 - DNA, 20 bp, synthetic construct
  source 1..20: mol_type = other DNA
gtagctaagactacaggtga

SEQ ID NO: 207463 - DNA, 20 bp, synthetic construct
  source 1..20: mol_type = other DNA
agtagctaagactacaggtg

SEQ ID NO: 207464 - DNA, 20 bp, synthetic construct
  source 1..20: mol_type = other DNA
aagtagctaagactacaggt

SEQ ID NO: 207465 - DNA, 20 bp, synthetic construct
  source 1..20: mol_type = other DNA
caagtagctaagactacagg

SEQ ID NO: 207466 - DNA, 20 bp, synthetic construct
  source 1..20: mol_type = other DNA
ccaagtagctaagactacag

SEQ ID NO: 207467 - DNA, 20 bp, synthetic construct
  source 1..20: mol_type = other DNA
cccaagtagctaagactaca

SEQ ID NO: 207468 - DNA, 20 bp, synthetic construct
  source 1..20: mol_type = other DNA
tcccaagtagctaagactac

SEQ ID NO: 207469 - DNA, 20 bp, synthetic construct
  source 1..20: mol_type = other DNA
ctcccaagtagctaagacta

SEQ ID NO: 207470 - DNA, 20 bp, synthetic construct
  source 1..20: mol_type = other DNA
cctcccaagtagctaagact

SEQ ID NO: 207471 - DNA, 20 bp, synthetic construct
  source 1..20: mol_type = other DNA
gcctcccaagtagctaagac

SEQ ID NO: 207472 - DNA, 20 bp, synthetic construct
  source 1..20: mol_type = other DNA
agcctcccaagtagctaaga

SEQ ID NO: 207473 - DNA, 20 bp, synthetic construct
  source 1..20: mol_type = other DNA
cagcctcccaagtagctaag

SEQ ID NO: 207474 - DNA, 20 bp, synthetic construct
  source 1..20: mol_type = other DNA
tcagcctcccaagtagctaa

SEQ ID NO: 207475 - DNA, 20 bp, synthetic construct
  source 1..20: mol_type = other DNA
ctcagcctcccaagtagcta

SEQ ID NO: 207476 - DNA, 20 bp, synthetic construct
  source 1..20: mol_type = other DNA
tctcagcctcccaagtagct

SEQ ID NO: 207477 - DNA, 20 bp, synthetic construct
  source 1..20: mol_type = other DNA
atctcagcctcccaagtagc

SEQ ID NO: 207478 - DNA, 20 bp, synthetic construct
  source 1..20: mol_type = other DNA
catctcagcctcccaagtag

SEQ ID NO: 207479 - DNA, 20 bp, synthetic construct
  source 1..20: mol_type = other DNA
ccatctcagcctcccaagta

SEQ ID NO: 207480 - DNA, 20 bp, synthetic construct
  source 1..20: mol_type = other DNA
cccatctcagcctcccaagt

SEQ ID NO: 207481 - DNA, 20 bp, synthetic construct
  source 1..20: mol_type = other DNA
tcccatctcagcctcccaag

SEQ ID NO: 207482 - DNA, 20 bp, synthetic construct
  source 1..20: mol_type = other DNA
ctcccatctcagcctcccaa

SEQ ID NO: 207483 - DNA, 20 bp, synthetic construct
  source 1..20: mol_type = other DNA
cctcccatctcagcctccca

SEQ ID NO: 207484 - DNA, 20 bp, synthetic construct
  source 1..20: mol_type = other DNA
tcctcccatctcagcctccc

SEQ ID NO: 207485 - DNA, 20 bp, synthetic construct
  source 1..20: mol_type = other DNA
atcctcccatctcagcctcc

SEQ ID NO: 207486 - DNA, 20 bp, synthetic construct
  source 1..20: mol_type = other DNA
aatcctcccatctcagcctc

SEQ ID NO: 207487 - DNA, 20 bp, synthetic construct
  source 1..20: mol_type = other DNA
caatcctcccatctcagcct

SEQ ID NO: 207488 - DNA, 20 bp, synthetic construct
  source 1..20: mol_type = other DNA
gcaatcctcccatctcagcc

SEQ ID NO: 207489 - DNA, 20 bp, synthetic construct
  source 1..20: mol_type = other DNA
agcaatcctcccatctcagc

SEQ ID NO: 207490 - DNA, 20 bp, synthetic construct
  source 1..20: mol_type = other DNA
aagcaatcctcccatctcag

SEQ ID NO: 207491 - DNA, 20 bp, synthetic construct
  source 1..20: mol_type = other DNA
caagcaatcctcccatctca

SEQ ID NO: 207492 - DNA, 20 bp, synthetic construct
  source 1..20: mol_type = other DNA
tcaagcaatcctcccatctc

SEQ ID NO: 207493 - DNA, 20 bp, synthetic construct
  source 1..20: mol_type = other DNA
ctcaagcaatcctcccatct

SEQ ID NO: 207494 - DNA, 20 bp, synthetic construct
  source 1..20: mol_type = other DNA
gctcaagcaatcctcccatc

SEQ ID NO: 207495 - DNA, 20 bp, synthetic construct
  source 1..20: mol_type = other DNA
ggctcaagcaatcctcccat

SEQ ID NO: 207496 - DNA, 20 bp, synthetic construct
  source 1..20: mol_type = other DNA
tggctcaagcaatcctccca

SEQ ID NO: 207497 - DNA, 20 bp, synthetic construct
  source 1..20: mol_type = other DNA
ctggctcaagcaatcctccc

SEQ ID NO: 207498 - DNA, 20 bp, synthetic construct
  source 1..20: mol_type = other DNA
tctggctcaagcaatcctcc

SEQ ID NO: 207499 - DNA, 20 bp, synthetic construct
  source 1..20: mol_type = other DNA
ttctggctcaagcaatcctc

SEQ ID NO: 207500 - DNA, 20 bp, synthetic construct
  source 1..20: mol_type = other DNA
gttctggctcaagcaatcct

SEQ ID NO: 207501 - DNA, 20 bp, synthetic construct
  source 1..20: mol_type = other DNA
agttctggctcaagcaatcc

SEQ ID NO: 207502 - DNA, 20 bp, synthetic construct
  source 1..20: mol_type = other DNA
aagttctggctcaagcaatc

SEQ ID NO: 207503 - DNA, 20 bp, synthetic construct
  source 1..20: mol_type = other DNA
aaagttctggctcaagcaat

SEQ ID NO: 207504 - DNA, 20 bp, synthetic construct
  source 1..20: mol_type = other DNA
caaagttctggctcaagcaa

SEQ ID NO: 207505 - DNA, 20 bp, synthetic construct
  source 1..20: mol_type = other DNA
tcaaagttctggctcaagca

SEQ ID NO: 207506 - DNA, 20 bp, synthetic construct
  source 1..20: mol_type = other DNA
ctcaaagttctggctcaagc

SEQ ID NO: 207507 - DNA, 20 bp, synthetic construct
  source 1..20: mol_type = other DNA
cctcaaagttctggctcaag

SEQ ID NO: 207508 - DNA, 20 bp, synthetic construct
  source 1..20: mol_type = other DNA
gcctcaaagttctggctcaa

SEQ ID NO: 207509 - DNA, 20 bp, synthetic construct
  source 1..20: mol_type = other DNA
agcctcaaagttctggctca

SEQ ID NO: 207510 - DNA, 20 bp, synthetic construct
  source 1..20: mol_type = other DNA
tagcctcaaagttctggctc

SEQ ID NO: 207511 - DNA, 20 bp, synthetic construct
  source 1..20: mol_type = other DNA
gtagcctcaaagttctggct

SEQ ID NO: 207512 - DNA, 20 bp, synthetic construct
  source 1..20: mol_type = other DNA
tgtagcctcaaagttctggc

SEQ ID NO: 207513 - DNA, 20 bp, synthetic construct
  source 1..20: mol_type = other DNA
ctgtagcctcaaagttctgg

SEQ ID NO: 207514 - DNA, 20 bp, synthetic construct
  source 1..20: mol_type = other DNA
actgtagcctcaaagttctg

SEQ ID NO: 207515 - DNA, 20 bp, synthetic construct
  source 1..20: mol_type = other DNA
cactgtagcctcaaagttct

SEQ ID NO: 207516 - DNA, 20 bp, synthetic construct
  source 1..20: mol_type = other DNA
tcactgtagcctcaaagttc

SEQ ID NO: 207517 - DNA, 20 bp, synthetic construct
  source 1..20: mol_type = other DNA
ctcactgtagcctcaaagtt

SEQ ID NO: 207518 - DNA, 20 bp, synthetic construct
  source 1..20: mol_type = other DNA
actcactgtagcctcaaagt

SEQ ID NO: 207519 - DNA, 20 bp, synthetic construct
  source 1..20: mol_type = other DNA
aactcactgtagcctcaaag

SEQ ID NO: 207520 - DNA, 20 bp, synthetic construct
  source 1..20: mol_type = other DNA
taactcactgtagcctcaaa

SEQ ID NO: 207521 - DNA, 20 bp, synthetic construct
  source 1..20: mol_type = other DNA
ataactcactgtagcctcaa

SEQ ID NO: 207522 - DNA, 20 bp, synthetic construct
  source 1..20: mol_type = other DNA
aataactcactgtagcctca

SEQ ID NO: 207523 - DNA, 20 bp, synthetic construct
  source 1..20: mol_type = other DNA
aaataactcactgtagcctc

SEQ ID NO: 207524 - DNA, 20 bp, synthetic construct
  source 1..20: mol_type = other DNA
aaaataactcactgtagcct

SEQ ID NO: 207525 - DNA, 20 bp, synthetic construct
  source 1..20: mol_type = other DNA
gaaaataactcactgtagcc

SEQ ID NO: 207526 - DNA, 20 bp, synthetic construct
  source 1..20: mol_type = other DNA
tgaaaataactcactgtagc

SEQ ID NO: 207527 - DNA, 20 bp, synthetic construct
  source 1..20: mol_type = other DNA
gtgaaaataactcactgtag

SEQ ID NO: 207528 - DNA, 20 bp, synthetic construct
  source 1..20: mol_type = other DNA
cgtgaaaataactcactgta

SEQ ID NO: 207529 - DNA, 20 bp, synthetic construct
  source 1..20: mol_type = other DNA
gcgtgaaaataactcactgt

SEQ ID NO: 207530 - DNA, 20 bp, synthetic construct
  source 1..20: mol_type = other DNA
ggcgtgaaaataactcactg

SEQ ID NO: 207531 - DNA, 20 bp, synthetic construct
  source 1..20: mol_type = other DNA
tggcgtgaaaataactcact

SEQ ID NO: 207532 - DNA, 20 bp, synthetic construct
  source 1..20: mol_type = other DNA
gtggcgtgaaaataactcac

SEQ ID NO: 207533 - DNA, 20 bp, synthetic construct
  source 1..20: mol_type = other DNA
agtggcgtgaaaataactca

SEQ ID NO: 207534 - DNA, 20 bp, synthetic construct
  source 1..20: mol_type = other DNA
cagtggcgtgaaaataactc

SEQ ID NO: 207535 - DNA, 20 bp, synthetic construct
  source 1..20: mol_type = other DNA
gcagtggcgtgaaaataact

SEQ ID NO: 207536 - DNA, 20 bp, synthetic construct
  source 1..20: mol_type = other DNA
ggcagtggcgtgaaaataac

SEQ ID NO: 207537 - DNA, 20 bp, synthetic construct
  source 1..20: mol_type = other DNA
gggcagtggcgtgaaaataa

SEQ ID NO: 207538 - DNA, 20 bp, synthetic construct
  source 1..20: mol_type = other DNA
agggcagtggcgtgaaaata

SEQ ID NO: 207539 - DNA, 20 bp, synthetic construct
  source 1..20: mol_type = other DNA
gagggcagtggcgtgaaaat

SEQ ID NO: 207540 - DNA, 20 bp, synthetic construct
  source 1..20: mol_type = other DNA
agagggcagtggcgtgaaaa

SEQ ID NO: 207541 - DNA, 20 bp, synthetic construct
  source 1..20: mol_type = other DNA
tagagggcagtggcgtgaaa

SEQ ID NO: 207542 - DNA, 20 bp, synthetic construct
  source 1..20: mol_type = other DNA
ctagagggcagtggcgtgaa

SEQ ID NO: 207543 - DNA, 20 bp, synthetic construct
  source 1..20: mol_type = other DNA
gctagagggcagtggcgtga

SEQ ID NO: 207544 - DNA, 20 bp, synthetic construct
  source 1..20: mol_type = other DNA
ggctagagggcagtggcgtg

SEQ ID NO: 207545 - DNA, 20 bp, synthetic construct
  source 1..20: mol_type = other DNA
aggctagagggcagtggcgt

SEQ ID NO: 207546 - DNA, 20 bp, synthetic construct
  source 1..20: mol_type = other DNA
caggctagagggcagtggcg

SEQ ID NO: 207547 - DNA, 20 bp, synthetic construct
  source 1..20: mol_type = other DNA
ccaggctagagggcagtggc

SEQ ID NO: 207548 - DNA, 20 bp, synthetic construct
  source 1..20: mol_type = other DNA
gccaggctagagggcagtgg

SEQ ID NO: 207549 - DNA, 20 bp, synthetic construct
  source 1..20: mol_type = other DNA
agccaggctagagggcagtg

SEQ ID NO: 207550 - DNA, 20 bp, synthetic construct
  source 1..20: mol_type = other DNA
cagccaggctagagggcagt

SEQ ID NO: 207551 - DNA, 20 bp, synthetic construct
  source 1..20: mol_type = other DNA
tcagccaggctagagggcag

SEQ ID NO: 207552 - DNA, 20 bp, synthetic construct
  source 1..20: mol_type = other DNA
gtcagccaggctagagggca

SEQ ID NO: 207553 - DNA, 20 bp, synthetic construct
  source 1..20: mol_type = other DNA
tgtcagccaggctagagggc

SEQ ID NO: 207554 - DNA, 20 bp, synthetic construct
  source 1..20: mol_type = other DNA
ctgtcagccaggctagaggg

SEQ ID NO: 207555 - DNA, 20 bp, synthetic construct
  source 1..20: mol_type = other DNA
tctgtcagccaggctagagg

SEQ ID NO: 207556 - DNA, 20 bp, synthetic construct
  source 1..20: mol_type = other DNA
ctctgtcagccaggctagag

SEQ ID NO: 207557 - DNA, 20 bp, synthetic construct
  source 1..20: mol_type = other DNA
gctctgtcagccaggctaga

SEQ ID NO: 207558 - DNA, 20 bp, synthetic construct
  source 1..20: mol_type = other DNA
tgctctgtcagccaggctag

SEQ ID NO: 207559 - DNA, 20 bp, synthetic construct
  source 1..20: mol_type = other DNA
ttgctctgtcagccaggcta

SEQ ID NO: 207560 - DNA, 20 bp, synthetic construct
  source 1..20: mol_type = other DNA
cttgctctgtcagccaggct

SEQ ID NO: 207561 - DNA, 20 bp, synthetic construct
  source 1..20: mol_type = other DNA
tcttgctctgtcagccaggc

SEQ ID NO: 207562 - DNA, 20 bp, synthetic construct
  source 1..20: mol_type = other DNA
gtcttgctctgtcagccagg

SEQ ID NO: 207563 - DNA, 20 bp, synthetic construct
  source 1..20: mol_type = other DNA
ggtcttgctctgtcagccag

SEQ ID NO: 207564 - DNA, 20 bp, synthetic construct
  source 1..20: mol_type = other DNA
aggtcttgctctgtcagcca

SEQ ID NO: 207565 - DNA, 20 bp, synthetic construct
  source 1..20: mol_type = other DNA
caggtcttgctctgtcagcc

SEQ ID NO: 207566 - DNA, 20 bp, synthetic construct
  source 1..20: mol_type = other DNA
gcaggtcttgctctgtcagc

SEQ ID NO: 207567 - DNA, 20 bp, synthetic construct
  source 1..20: mol_type = other DNA
ggcaggtcttgctctgtcag

SEQ ID NO: 207568 - DNA, 20 bp, synthetic construct
  source 1..20: mol_type = other DNA
aggcaggtcttgctctgtca

SEQ ID NO: 207569 - DNA, 20 bp, synthetic construct
  source 1..20: mol_type = other DNA
gaggcaggtcttgctctgtc

SEQ ID NO: 207570 - DNA, 20 bp, synthetic construct
  source 1..20: mol_type = other DNA
tgaggcaggtcttgctctgt

SEQ ID NO: 207571 - DNA, 20 bp, synthetic construct
  source 1..20: mol_type = other DNA
ttgaggcaggtcttgctctg

SEQ ID NO: 207572 - DNA, 20 bp, synthetic construct
  source 1..20: mol_type = other DNA
tttgaggcaggtcttgctct

SEQ ID NO: 207573 - DNA, 20 bp, synthetic construct
  source 1..20: mol_type = other DNA
ttttgaggcaggtcttgctc

SEQ ID NO: 207574 - DNA, 20 bp, synthetic construct
  source 1..20: mol_type = other DNA
tttttgaggcaggtcttgct

SEQ ID NO: 207575 - DNA, 20 bp, synthetic construct
  source 1..20: mol_type = other DNA
ttttttgaggcaggtcttgc

SEQ ID NO: 207576 - DNA, 20 bp, synthetic construct
  source 1..20: mol_type = other DNA
tttttttgaggcaggtcttg

SEQ ID NO: 207577 - DNA, 20 bp, synthetic construct
  source 1..20: mol_type = other DNA
atttttttgaggcaggtctt

SEQ ID NO: 207578 - DNA, 20 bp, synthetic construct
  source 1..20: mol_type = other DNA
tatttttttgaggcaggtct

SEQ ID NO: 207579 - DNA, 20 bp, synthetic construct
  source 1..20: mol_type = other DNA
ttatttttttgaggcaggtc

SEQ ID NO: 207580 - DNA, 20 bp, synthetic construct
  source 1..20: mol_type = other DNA
cttatttttttgaggcaggt

SEQ ID NO: 207581 - DNA, 20 bp, synthetic construct
  source 1..20: mol_type = other DNA
acttatttttttgaggcagg

SEQ ID NO: 207582 - DNA, 20 bp, synthetic construct
  source 1..20: mol_type = other DNA
tacttatttttttgaggcag

SEQ ID NO: 207583 - DNA, 20 bp, synthetic construct
  source 1..20: mol_type = other DNA
ttacttatttttttgaggca

SEQ ID NO: 207584 - DNA, 20 bp, synthetic construct
  source 1..20: mol_type = other DNA
tttacttatttttttgaggc

SEQ ID NO: 207585 - DNA, 20 bp, synthetic construct
  source 1..20: mol_type = other DNA
ttttacttatttttttgagg

SEQ ID NO: 207586 - DNA, 20 bp, synthetic construct
  source 1..20: mol_type = other DNA
tttttacttatttttttgag

SEQ ID NO: 207587 - DNA, 20 bp, synthetic construct
  source 1..20: mol_type = other DNA
ttttttacttatttttttga

SEQ ID NO: 207588 - DNA, 20 bp, synthetic construct
  source 1..20: mol_type = other DNA
attttttacttatttttttg

SEQ ID NO: 207589 - DNA, 20 bp, synthetic construct
  source 1..20: mol_type = other DNA
tattttttacttattttttt

SEQ ID NO: 207590 - DNA, 20 bp, synthetic construct
  source 1..20: mol_type = other DNA
ttattttttacttatttttt

SEQ ID NO: 207591 - DNA, 20 bp, synthetic construct
  source 1..20: mol_type = other DNA
tttattttttacttattttt

SEQ ID NO: 207592 - DNA, 20 bp, synthetic construct
  source 1..20: mol_type = other DNA
atttattttttacttatttt

SEQ ID NO: 207593 - DNA, 20 bp, synthetic construct
  source 1..20: mol_type = other DNA
aatttattttttacttattt

SEQ ID NO: 207594 - DNA, 20 bp, synthetic construct
  source 1..20: mol_type = other DNA
taatttattttttacttatt

SEQ ID NO: 207595 - DNA, 20 bp, synthetic construct
  source 1..20: mol_type = other DNA
ttaatttattttttacttat

SEQ ID NO: 207596 - DNA, 20 bp, synthetic construct
  source 1..20: mol_type = other DNA
tttaatttattttttactta

SEQ ID NO: 207597 - DNA, 20 bp, synthetic construct
  source 1..20: mol_type = other DNA
atttaatttattttttactt

SEQ ID NO: 207598 - DNA, 20 bp, synthetic construct
  source 1..20: mol_type = other DNA
aatttaatttattttttact

SEQ ID NO: 207599 - DNA, 20 bp, synthetic construct
  source 1..20: mol_type = other DNA
aaatttaatttattttttac

SEQ ID NO: 207600 - DNA, 20 bp, synthetic construct
  source 1..20: mol_type = other DNA
gaaatttaatttatttttta

SEQ ID NO: 207601 - DNA, 20 bp, synthetic construct
  source 1..20: mol_type = other DNA
tgaaatttaatttatttttt

SEQ ID NO: 207602 - DNA, 20 bp, synthetic construct
  source 1..20: mol_type = other DNA
ttgaaatttaatttattttt

SEQ ID NO: 207603 - DNA, 20 bp, synthetic construct
  source 1..20: mol_type = other DNA
attgaaatttaatttatttt

SEQ ID NO: 207604 - DNA, 20 bp, synthetic construct
  source 1..20: mol_type = other DNA
gattgaaatttaatttattt

SEQ ID NO: 207605 - DNA, 20 bp, synthetic construct
  source 1..20: mol_type = other DNA
tgattgaaatttaatttatt

SEQ ID NO: 207606 - DNA, 20 bp, synthetic construct
  source 1..20: mol_type = other DNA
atgattgaaatttaatttat

SEQ ID NO: 207607 - DNA, 20 bp, synthetic construct
  source 1..20: mol_type = other DNA
aatgattgaaatttaattta

SEQ ID NO: 207608 - DNA, 20 bp, synthetic construct
  source 1..20: mol_type = other DNA
taatgattgaaatttaattt

SEQ ID NO: 207609 - DNA, 20 bp, synthetic construct
  source 1..20: mol_type = other DNA
ctaatgattgaaatttaatt

SEQ ID NO: 207610 - DNA, 20 bp, synthetic construct
  source 1..20: mol_type = other DNA
gctaatgattgaaatttaat

SEQ ID NO: 207611 - DNA, 20 bp, synthetic construct
  source 1..20: mol_type = other DNA
tgctaatgattgaaatttaa

SEQ ID NO: 207612 - DNA, 20 bp, synthetic construct
  source 1..20: mol_type = other DNA
ctgctaatgattgaaattta

SEQ ID NO: 207613 - DNA, 20 bp, synthetic construct
  source 1..20: mol_type = other DNA
actgctaatgattgaaattt

SEQ ID NO: 207614 - DNA, 20 bp, synthetic construct
  source 1..20: mol_type = other DNA
gactgctaatgattgaaatt

SEQ ID NO: 207615 - DNA, 20 bp, synthetic construct
  source 1..20: mol_type = other DNA
tgactgctaatgattgaaat

SEQ ID NO: 207616 - DNA, 20 bp, synthetic construct
  source 1..20: mol_type = other DNA
atgactgctaatgattgaaa

SEQ ID NO: 207617 - DNA, 20 bp, synthetic construct
  source 1..20: mol_type = other DNA
aatgactgctaatgattgaa

SEQ ID NO: 207618 - DNA, 20 bp, synthetic construct
  source 1..20: mol_type = other DNA
taatgactgctaatgattga

SEQ ID NO: 207619 - DNA, 20 bp, synthetic construct
  source 1..20: mol_type = other DNA
ctaatgactgctaatgattg

SEQ ID NO: 207620 - DNA, 20 bp, synthetic construct
  source 1..20: mol_type = other DNA
cctaatgactgctaatgatt

SEQ ID NO: 207621 - DNA, 20 bp, synthetic construct
  source 1..20: mol_type = other DNA
tcctaatgactgctaatgat

SEQ ID NO: 207622 - DNA, 20 bp, synthetic construct
  source 1..20: mol_type = other DNA
atcctaatgactgctaatga

SEQ ID NO: 207623 - DNA, 20 bp, synthetic construct
  source 1..20: mol_type = other DNA
tatcctaatgactgctaatg

SEQ ID NO: 207624 - DNA, 20 bp, synthetic construct
  source 1..20: mol_type = other DNA
atatcctaatgactgctaat

SEQ ID NO: 207625 - DNA, 20 bp, synthetic construct
  source 1..20: mol_type = other DNA
aatatcctaatgactgctaa

SEQ ID NO: 207626 - DNA, 20 bp, synthetic construct
  source 1..20: mol_type = other DNA
aaatatcctaatgactgcta

SEQ ID NO: 207627 - DNA, 20 bp, synthetic construct
  source 1..20: mol_type = other DNA
taaatatcctaatgactgct

SEQ ID NO: 207628 - DNA, 20 bp, synthetic construct
  source 1..20: mol_type = other DNA
ttaaatatcctaatgactgc

SEQ ID NO: 207629 - DNA, 20 bp, synthetic construct
  source 1..20: mol_type = other DNA
tttaaatatcctaatgactg

SEQ ID NO: 207630 - DNA, 20 bp, synthetic construct
  source 1..20: mol_type = other DNA
atttaaatatcctaatgact

SEQ ID NO: 207631 - DNA, 20 bp, synthetic construct
  source 1..20: mol_type = other DNA
tatttaaatatcctaatgac

SEQ ID NO: 207632 - DNA, 20 bp, synthetic construct
  source 1..20: mol_type = other DNA
gtatttaaatatcctaatga

SEQ ID NO: 207633 - DNA, 20 bp, synthetic construct
  source 1..20: mol_type = other DNA
tgtatttaaatatcctaatg

SEQ ID NO: 207634 - DNA, 20 bp, synthetic construct
  source 1..20: mol_type = other DNA
ctgtatttaaatatcctaat

SEQ ID NO: 207635 - DNA, 20 bp, synthetic construct
  source 1..20: mol_type = other DNA
actgtatttaaatatcctaa

SEQ ID NO: 207636 - DNA, 20 bp, synthetic construct
  source 1..20: mol_type = other DNA
tactgtatttaaatatccta

SEQ ID NO: 207637 - DNA, 20 bp, synthetic construct
  source 1..20: mol_type = other DNA
atactgtatttaaatatcct

SEQ ID NO: 207638 - DNA, 20 bp, synthetic construct
  source 1..20: mol_type = other DNA
catactgtatttaaatatcc

SEQ ID NO: 207639 - DNA, 20 bp, synthetic construct
  source 1..20: mol_type = other DNA
acatactgtatttaaatatc

SEQ ID NO: 207640 - DNA, 20 bp, synthetic construct
  source 1..20: mol_type = other DNA
aacatactgtatttaaatat

SEQ ID NO: 207641 - DNA, 20 bp, synthetic construct
  source 1..20: mol_type = other DNA
caacatactgtatttaaata

SEQ ID NO: 207642 - DNA, 20 bp, synthetic construct
  source 1..20: mol_type = other DNA
tcaacatactgtatttaaat

SEQ ID NO: 207643 - DNA, 20 bp, synthetic construct
  source 1..20: mol_type = other DNA
ttcaacatactgtatttaaa

SEQ ID NO: 207644 - DNA, 20 bp, synthetic construct
  source 1..20: mol_type = other DNA
attcaacatactgtatttaa

SEQ ID NO: 207645 - DNA, 20 bp, synthetic construct
  source 1..20: mol_type = other DNA
gattcaacatactgtattta

SEQ ID NO: 207646 - DNA, 20 bp, synthetic construct
  source 1..20: mol_type = other DNA
tgattcaacatactgtattt

SEQ ID NO: 207647 - DNA, 20 bp, synthetic construct
  source 1..20: mol_type = other DNA
ttgattcaacatactgtatt

SEQ ID NO: 207648 - DNA, 20 bp, synthetic construct
  source 1..20: mol_type = other DNA
tttgattcaacatactgtat

SEQ ID NO: 207649 - DNA, 20 bp, synthetic construct
  source 1..20: mol_type = other DNA
ctttgattcaacatactgta

SEQ ID NO: 207650 - DNA, 20 bp, synthetic construct
  source 1..20: mol_type = other DNA
actttgattcaacatactgt

SEQ ID NO: 207651 - DNA, 20 bp, synthetic construct
  source 1..20: mol_type = other DNA
aactttgattcaacatactg

SEQ ID NO: 207652 - DNA, 20 bp, synthetic construct
  source 1..20: mol_type = other DNA
taactttgattcaacatact

SEQ ID NO: 207653 - DNA, 20 bp, synthetic construct
  source 1..20: mol_type = other DNA
gtaactttgattcaacatac

SEQ ID NO: 207654 - DNA, 20 bp, synthetic construct
  source 1..20: mol_type = other DNA
cgtaactttgattcaacata

SEQ ID NO: 207655 - DNA, 20 bp, synthetic construct
  source 1..20: mol_type = other DNA
gcgtaactttgattcaacat

SEQ ID NO: 207656 - DNA, 20 bp, synthetic construct
  source 1..20: mol_type = other DNA
tgcgtaactttgattcaaca

SEQ ID NO: 207657 - DNA, 20 bp, synthetic construct
  source 1..20: mol_type = other DNA
atgcgtaactttgattcaac

SEQ ID NO: 207658 - DNA, 20 bp, synthetic construct
  source 1..20: mol_type = other DNA
catgcgtaactttgattcaa

SEQ ID NO: 207659 - DNA, 20 bp, synthetic construct
  source 1..20: mol_type = other DNA
acatgcgtaactttgattca

SEQ ID NO: 207660 - DNA, 20 bp, synthetic construct
  source 1..20: mol_type = other DNA
cacatgcgtaactttgattc

SEQ ID NO: 207661 - DNA, 20 bp, synthetic construct
  source 1..20: mol_type = other DNA
acacatgcgtaactttgatt

SEQ ID NO: 207662 - DNA, 20 bp, synthetic construct
  source 1..20: mol_type = other DNA
cacacatgcgtaactttgat

SEQ ID NO: 207663 - DNA, 20 bp, synthetic construct
  source 1..20: mol_type = other DNA
acacacatgcgtaactttga

SEQ ID NO: 207664 - DNA, 20 bp, synthetic construct
  source 1..20: mol_type = other DNA
tacacacatgcgtaactttg

SEQ ID NO: 207665 - DNA, 20 bp, synthetic construct
  source 1..20: mol_type = other DNA
atacacacatgcgtaacttt

SEQ ID NO: 207666 - DNA, 20 bp, synthetic construct
  source 1..20: mol_type = other DNA
aatacacacatgcgtaactt

SEQ ID NO: 207667 - DNA, 20 bp, synthetic construct
  source 1..20: mol_type = other DNA
aaatacacacatgcgtaact

SEQ ID NO: 207668 - DNA, 20 bp, synthetic construct
  source 1..20: mol_type = other DNA
aaaatacacacatgcgtaac

SEQ ID NO: 207669 - DNA, 20 bp, synthetic construct
  source 1..20: mol_type = other DNA
aaaaatacacacatgcgtaa

SEQ ID NO: 207670 - DNA, 20 bp, synthetic construct
  source 1..20: mol_type = other DNA
aaaaaatacacacatgcgta

SEQ ID NO: 207671 - DNA, 20 bp, synthetic construct
  source 1..20: mol_type = other DNA
aaaaaaatacacacatgcgt

SEQ ID NO: 207672 - DNA, 20 bp, synthetic construct
  source 1..20: mol_type = other DNA
aaaaaaaatacacacatgcg

SEQ ID NO: 207673 - DNA, 20 bp, synthetic construct
  source 1..20: mol_type = other DNA
aaaaaaaaatacacacatgc

SEQ ID NO: 207674 - DNA, 20 bp, synthetic construct
  source 1..20: mol_type = other DNA
gaaaaaaaaatacacacatg

SEQ ID NO: 207675 - DNA, 20 bp, synthetic construct
  source 1..20: mol_type = other DNA
ggaaaaaaaaatacacacat

SEQ ID NO: 207676 - DNA, 20 bp, synthetic construct
  source 1..20: mol_type = other DNA
tggaaaaaaaaatacacaca

SEQ ID NO: 207677 - DNA, 20 bp, synthetic construct
  source 1..20: mol_type = other DNA
ctggaaaaaaaaatacacac

SEQ ID NO: 207678 - DNA, 20 bp, synthetic construct
  source 1..20: mol_type = other DNA
tctggaaaaaaaaatacaca

SEQ ID NO: 207679 - DNA, 20 bp, synthetic construct
  source 1..20: mol_type = other DNA
ctctggaaaaaaaaatacac

SEQ ID NO: 207680 - DNA, 20 bp, synthetic construct
  source 1..20: mol_type = other DNA
tctctggaaaaaaaaataca

SEQ ID NO: 207681 - DNA, 20 bp, synthetic construct
  source 1..20: mol_type = other DNA
ctctctggaaaaaaaaatac

SEQ ID NO: 207682 - DNA, 20 bp, synthetic construct
  source 1..20: mol_type = other DNA
actctctggaaaaaaaaata

SEQ ID NO: 207683 - DNA, 20 bp, synthetic construct
  source 1..20: mol_type = other DNA
aactctctggaaaaaaaaat

SEQ ID NO: 207684 - DNA, 20 bp, synthetic construct
  source 1..20: mol_type = other DNA
caactctctggaaaaaaaaa

SEQ ID NO: 207685 - DNA, 20 bp, synthetic construct
  source 1..20: mol_type = other DNA
acaactctctggaaaaaaaa

SEQ ID NO: 207686 - DNA, 20 bp, synthetic construct
  source 1..20: mol_type = other DNA
aacaactctctggaaaaaaa

SEQ ID NO: 207687 - DNA, 20 bp, synthetic construct
  source 1..20: mol_type = other DNA
aaacaactctctggaaaaaa

SEQ ID NO: 207688 - DNA, 20 bp, synthetic construct
  source 1..20: mol_type = other DNA
taaacaactctctggaaaaa

SEQ ID NO: 207689 - DNA, 20 bp, synthetic construct
  source 1..20: mol_type = other DNA
ataaacaactctctggaaaa

SEQ ID NO: 207690 - DNA, 20 bp, synthetic construct
  source 1..20: mol_type = other DNA
gataaacaactctctggaaa

SEQ ID NO: 207691 - DNA, 20 bp, synthetic construct
  source 1..20: mol_type = other DNA
tgataaacaactctctggaa

SEQ ID NO: 207692 - DNA, 20 bp, synthetic construct
  source 1..20: mol_type = other DNA
atgataaacaactctctgga

SEQ ID NO: 207693 - DNA, 20 bp, synthetic construct
  source 1..20: mol_type = other DNA
catgataaacaactctctgg

SEQ ID NO: 207694 - DNA, 20 bp, synthetic construct
  source 1..20: mol_type = other DNA
acatgataaacaactctctg

SEQ ID NO: 207695 - DNA, 20 bp, synthetic construct
  source 1..20: mol_type = other DNA
cacatgataaacaactctct

SEQ ID NO: 207696 - DNA, 20 bp, synthetic construct
  source 1..20: mol_type = other DNA
ccacatgataaacaactctc

SEQ ID NO: 207697 - DNA, 20 bp, synthetic construct
  source 1..20: mol_type = other DNA
cccacatgataaacaactct

SEQ ID NO: 207698 - DNA, 20 bp, synthetic construct
  source 1..20: mol_type = other DNA
acccacatgataaacaactc

SEQ ID NO: 207699 - DNA, 20 bp, synthetic construct
  source 1..20: mol_type = other DNA
aacccacatgataaacaact

SEQ ID NO: 207700 - DNA, 20 bp, synthetic construct
  source 1..20: mol_type = other DNA
aaacccacatgataaacaac

SEQ ID NO: 207701 - DNA, 20 bp, synthetic construct
  source 1..20: mol_type = other DNA
aaaacccacatgataaacaa

SEQ ID NO: 207702 - DNA, 20 bp, synthetic construct
  source 1..20: mol_type = other DNA
taaaacccacatgataaaca

SEQ ID NO: 207703 - DNA, 20 bp, synthetic construct
  source 1..20: mol_type = other DNA
ttaaaacccacatgataaac

SEQ ID NO: 207704 - DNA, 20 bp, synthetic construct
  source 1..20: mol_type = other DNA
attaaaacccacatgataaa

SEQ ID NO: 207705 - DNA, 20 bp, synthetic construct
  source 1..20: mol_type = other DNA
aattaaaacccacatgataa

SEQ ID NO: 207706 - DNA, 20 bp, synthetic construct
  source 1..20: mol_type = other DNA
aaattaaaacccacatgata

SEQ ID NO: 207707 - DNA, 20 bp, synthetic construct
  source 1..20: mol_type = other DNA
taaattaaaacccacatgat

SEQ ID NO: 207708 - DNA, 20 bp, synthetic construct
  source 1..20: mol_type = other DNA
ttaaattaaaacccacatga

SEQ ID NO: 207709 - DNA, 20 bp, synthetic construct
  source 1..20: mol_type = other DNA
gttaaattaaaacccacatg

SEQ ID NO: 207710 - DNA, 20 bp, synthetic construct
  source 1..20: mol_type = other DNA
agttaaattaaaacccacat

SEQ ID NO: 207711 - DNA, 20 bp, synthetic construct
  source 1..20: mol_type = other DNA
aagttaaattaaaacccaca

SEQ ID NO: 207712 - DNA, 20 bp, synthetic construct
  source 1..20: mol_type = other DNA
aaagttaaattaaaacccac

SEQ ID NO: 207713 - DNA, 20 bp, synthetic construct
  source 1..20: mol_type = other DNA
taaagttaaattaaaaccca

SEQ ID NO: 207714 - DNA, 20 bp, synthetic construct
  source 1..20: mol_type = other DNA
ttaaagttaaattaaaaccc

SEQ ID NO: 207715 - DNA, 20 bp, synthetic construct
  source 1..20: mol_type = other DNA
tttaaagttaaattaaaacc

SEQ ID NO: 207716 - DNA, 20 bp, synthetic construct
  source 1..20: mol_type = other DNA
ttttaaagttaaattaaaac

SEQ ID NO: 207717 - DNA, 20 bp, synthetic construct
  source 1..20: mol_type = other DNA
tttttaaagttaaattaaaa

SEQ ID NO: 207718 - DNA, 20 bp, synthetic construct
  source 1..20: mol_type = other DNA
ttttttaaagttaaattaaa

SEQ ID NO: 207719 - DNA, 20 bp, synthetic construct
  source 1..20: mol_type = other DNA
tttttttaaagttaaattaa

SEQ ID NO: 207720 - DNA, 20 bp, synthetic construct
  source 1..20: mol_type = other DNA
atttttttaaagttaaatta

SEQ ID NO: 207721 - DNA, 20 bp, synthetic construct
  source 1..20: mol_type = other DNA
catttttttaaagttaaatt

SEQ ID NO: 207722 - DNA, 20 bp, synthetic construct
  source 1..20: mol_type = other DNA
acatttttttaaagttaaat

SEQ ID NO: 207723 - DNA, 20 bp, synthetic construct
  source 1..20: mol_type = other DNA
aacatttttttaaagttaaa

SEQ ID NO: 207724 - DNA, 20 bp, synthetic construct
  source 1..20: mol_type = other DNA
caacatttttttaaagttaa

SEQ ID NO: 207725 - DNA, 20 bp, synthetic construct
  source 1..20: mol_type = other DNA
ccaacatttttttaaagtta

SEQ ID NO: 207726 - DNA, 20 bp, synthetic construct
  source 1..20: mol_type = other DNA
gccaacatttttttaaagtt

SEQ ID NO: 207727 - DNA, 20 bp, synthetic construct
  source 1..20: mol_type = other DNA
agccaacatttttttaaagt

SEQ ID NO: 207728 - DNA, 20 bp, synthetic construct
  source 1..20: mol_type = other DNA
cagccaacatttttttaaag

SEQ ID NO: 207729 - DNA, 20 bp, synthetic construct
  source 1..20: mol_type = other DNA
ccagccaacatttttttaaa

SEQ ID NO: 207730 - DNA, 20 bp, synthetic construct
  source 1..20: mol_type = other DNA
tccagccaacatttttttaa

SEQ ID NO: 207731 - DNA, 20 bp, synthetic construct
  source 1..20: mol_type = other DNA
gtccagccaacattttttta

SEQ ID NO: 207732 - DNA, 20 bp, synthetic construct
  source 1..20: mol_type = other DNA
tgtccagccaacattttttt

SEQ ID NO: 207733 - DNA, 20 bp, synthetic construct
  source 1..20: mol_type = other DNA
ctgtccagccaacatttttt

SEQ ID NO: 207734 - DNA, 20 bp, synthetic construct
  source 1..20: mol_type = other DNA
actgtccagccaacattttt

SEQ ID NO: 207735 - DNA, 20 bp, synthetic construct
  source 1..20: mol_type = other DNA
aactgtccagccaacatttt

SEQ ID NO: 207736 - DNA, 20 bp, synthetic construct
  source 1..20: mol_type = other DNA
caactgtccagccaacattt

SEQ ID NO: 207737 - DNA, 20 bp, synthetic construct
  source 1..20: mol_type = other DNA
gcaactgtccagccaacatt

SEQ ID NO: 207738 - DNA, 20 bp, synthetic construct
  source 1..20: mol_type = other DNA
ggcaactgtccagccaacat

SEQ ID NO: 207739 - DNA, 20 bp, synthetic construct
  source 1..20: mol_type = other DNA
gggcaactgtccagccaaca

SEQ ID NO: 207740 - DNA, 20 bp, synthetic construct
  source 1..20: mol_type = other DNA
tgggcaactgtccagccaac

SEQ ID NO: 207741 - DNA, 20 bp, synthetic construct
  source 1..20: mol_type = other DNA
ttgggcaactgtccagccaa

SEQ ID NO: 207742 - DNA, 20 bp, synthetic construct
  source 1..20: mol_type = other DNA
tttgggcaactgtccagcca

SEQ ID NO: 207743 - DNA, 20 bp, synthetic construct
  source 1..20: mol_type = other DNA
atttgggcaactgtccagcc

SEQ ID NO: 207744 - DNA, 20 bp, synthetic construct
  source 1..20: mol_type = other DNA
catttgggcaactgtccagc

SEQ ID NO: 207745 - DNA, 20 bp, synthetic construct
  source 1..20: mol_type = other DNA
ccatttgggcaactgtccag

SEQ ID NO: 207746 - DNA, 20 bp, synthetic construct
  source 1..20: mol_type = other DNA
accatttgggcaactgtcca

SEQ ID NO: 207747 - DNA, 20 bp, synthetic construct
  source 1..20: mol_type = other DNA
taccatttgggcaactgtcc

SEQ ID NO: 207748 - DNA, 20 bp, synthetic construct
  source 1..20: mol_type = other DNA
ataccatttgggcaactgtc

SEQ ID NO: 207749 - DNA, 20 bp, synthetic construct
  source 1..20: mol_type = other DNA
gataccatttgggcaactgt

SEQ ID NO: 207750 - DNA, 20 bp, synthetic construct
  source 1..20: mol_type = other DNA
tgataccatttgggcaactg

SEQ ID NO: 207751 - DNA, 20 bp, synthetic construct
  source 1..20: mol_type = other DNA
atgataccatttgggcaact

SEQ ID NO: 207752 - DNA, 20 bp, synthetic construct
  source 1..20: mol_type = other DNA
gatgataccatttgggcaac

SEQ ID NO: 207753 - DNA, 20 bp, synthetic construct
  source 1..20: mol_type = other DNA
tgatgataccatttgggcaa

SEQ ID NO: 207754 - DNA, 20 bp, synthetic construct
  source 1..20: mol_type = other DNA
ctgatgataccatttgggca

SEQ ID NO: 207755 - DNA, 20 bp, synthetic construct
  source 1..20: mol_type = other DNA
gctgatgataccatttgggc

SEQ ID NO: 207756 - DNA, 20 bp, synthetic construct
  source 1..20: mol_type = other DNA
ggctgatgataccatttggg

SEQ ID NO: 207757 - DNA, 20 bp, synthetic construct
  source 1..20: mol_type = other DNA
tggctgatgataccatttgg

SEQ ID NO: 207758 - DNA, 20 bp, synthetic construct
  source 1..20: mol_type = other DNA
atggctgatgataccatttg

SEQ ID NO: 207759 - DNA, 20 bp, synthetic construct
  source 1..20: mol_type = other DNA
aatggctgatgataccattt

SEQ ID NO: 207760 - DNA, 20 bp, synthetic construct
  source 1..20: mol_type = other DNA
aaatggctgatgataccatt

SEQ ID NO: 207761 - DNA, 20 bp, synthetic construct
  source 1..20: mol_type = other DNA
caaatggctgatgataccat

SEQ ID NO: 207762 - DNA, 20 bp, synthetic construct
  source 1..20: mol_type = other DNA
ccaaatggctgatgatacca

SEQ ID NO: 207763 - DNA, 20 bp, synthetic construct
  source 1..20: mol_type = other DNA
accaaatggctgatgatacc

SEQ ID NO: 207764 - DNA, 20 bp, synthetic construct
  source 1..20: mol_type = other DNA
aaccaaatggctgatgatac

SEQ ID NO: 207765 - DNA, 20 bp, synthetic construct
  source 1..20: mol_type = other DNA
caaccaaatggctgatgata

SEQ ID NO: 207766 - DNA, 20 bp, synthetic construct
  source 1..20: mol_type = other DNA
tcaaccaaatggctgatgat

SEQ ID NO: 207767 - DNA, 20 bp, synthetic construct
  source 1..20: mol_type = other DNA
ctcaaccaaatggctgatga

SEQ ID NO: 207768 - DNA, 20 bp, synthetic construct
  source 1..20: mol_type = other DNA
tctcaaccaaatggctgatg

SEQ ID NO: 207769 - DNA, 20 bp, synthetic construct
  source 1..20: mol_type = other DNA
ttctcaaccaaatggctgat

SEQ ID NO: 207770 - DNA, 20 bp, synthetic construct
  source 1..20: mol_type = other DNA
gttctcaaccaaatggctga

SEQ ID NO: 207771 - DNA, 20 bp, synthetic construct
  source 1..20: mol_type = other DNA
cgttctcaaccaaatggctg

SEQ ID NO: 207772 - DNA, 20 bp, synthetic construct
  source 1..20: mol_type = other DNA
acgttctcaaccaaatggct

SEQ ID NO: 207773 - DNA, 20 bp, synthetic construct
  source 1..20: mol_type = other DNA
tacgttctcaaccaaatggc

SEQ ID NO: 207774 - DNA, 20 bp, synthetic construct
  source 1..20: mol_type = other DNA
atacgttctcaaccaaatgg

SEQ ID NO: 207775 - DNA, 20 bp, synthetic construct
  source 1..20: mol_type = other DNA
catacgttctcaaccaaatg

SEQ ID NO: 207776 - DNA, 20 bp, synthetic construct
  source 1..20: mol_type = other DNA
acatacgttctcaaccaaat

SEQ ID NO: 207777 - DNA, 20 bp, synthetic construct
  source 1..20: mol_type = other DNA
gacatacgttctcaaccaaa

SEQ ID NO: 207778 - DNA, 20 bp, synthetic construct
  source 1..20: mol_type = other DNA
ggacatacgttctcaaccaa

SEQ ID NO: 207779 - DNA, 20 bp, synthetic construct
  source 1..20: mol_type = other DNA
aggacatacgttctcaacca

SEQ ID NO: 207780 - DNA, 20 bp, synthetic construct
  source 1..20: mol_type = other DNA
caggacatacgttctcaacc

SEQ ID NO: 207781 - DNA, 20 bp, synthetic construct
  source 1..20: mol_type = other DNA
gcaggacatacgttctcaac

SEQ ID NO: 207782 - DNA, 20 bp, synthetic construct
  source 1..20: mol_type = other DNA
cgcaggacatacgttctcaa

SEQ ID NO: 207783 - DNA, 20 bp, synthetic construct
  source 1..20: mol_type = other DNA
ccgcaggacatacgttctca

SEQ ID NO: 207784 - DNA, 20 bp, synthetic construct
  source 1..20: mol_type = other DNA
cccgcaggacatacgttctc

SEQ ID NO: 207785 - DNA, 20 bp, synthetic construct
  source 1..20: mol_type = other DNA
gcccgcaggacatacgttct

SEQ ID NO: 207786 - DNA, 20 bp, synthetic construct
  source 1..20: mol_type = other DNA
agcccgcaggacatacgttc

SEQ ID NO: 207787 - DNA, 20 bp, synthetic construct
  source 1..20: mol_type = other DNA
gagcccgcaggacatacgtt

SEQ ID NO: 207788 - DNA, 20 bp, synthetic construct
  source 1..20: mol_type = other DNA
ggagcccgcaggacatacgt

SEQ ID NO: 207789 - DNA, 20 bp, synthetic construct
  source 1..20: mol_type = other DNA
aggagcccgcaggacatacg

SEQ ID NO: 207790 - DNA, 20 bp, synthetic construct
  source 1..20: mol_type = other DNA
gaggagcccgcaggacatac

SEQ ID NO: 207791 - DNA, 20 bp, synthetic construct
  source 1..20: mol_type = other DNA
agaggagcccgcaggacata

SEQ ID NO: 207792 - DNA, 20 bp, synthetic construct
  source 1..20: mol_type = other DNA
cagaggagcccgcaggacat

SEQ ID NO: 207793 - DNA, 20 bp, synthetic construct
  source 1..20: mol_type = other DNA
acagaggagcccgcaggaca

SEQ ID NO: 207794 - DNA, 20 bp, synthetic construct
  source 1..20: mol_type = other DNA
gacagaggagcccgcaggac

SEQ ID NO: 207795 - DNA, 20 bp, synthetic construct
  source 1..20: mol_type = other DNA
tgacagaggagcccgcagga

SEQ ID NO: 207796 - DNA, 20 bp, synthetic construct
  source 1..20: mol_type = other DNA
gtgacagaggagcccgcagg

SEQ ID NO: 207797 - DNA, 20 bp, synthetic construct
  source 1..20: mol_type = other DNA
agtgacagaggagcccgcag

SEQ ID NO: 207798 - DNA, 20 bp, synthetic construct
  source 1..20: mol_type = other DNA
cagtgacagaggagcccgca

SEQ ID NO: 207799 - DNA, 20 bp, synthetic construct
  source 1..20: mol_type = other DNA
ccagtgacagaggagcccgc

SEQ ID NO: 207800 - DNA, 20 bp, synthetic construct
  source 1..20: mol_type = other DNA
tccagtgacagaggagcccg

SEQ ID NO: 207801 - DNA, 20 bp, synthetic construct
  source 1..20: mol_type = other DNA
ctccagtgacagaggagccc

SEQ ID NO: 207802 - DNA, 20 bp, synthetic construct
  source 1..20: mol_type = other DNA
actccagtgacagaggagcc

SEQ ID NO: 207803 - DNA, 20 bp, synthetic construct
  source 1..20: mol_type = other DNA
aactccagtgacagaggagc

SEQ ID NO: 207804 - DNA, 20 bp, synthetic construct
  source 1..20: mol_type = other DNA
aaactccagtgacagaggag

SEQ ID NO: 207805 - DNA, 20 bp, synthetic construct
  source 1..20: mol_type = other DNA
aaaactccagtgacagagga

SEQ ID NO: 207806 - DNA, 20 bp, synthetic construct
  source 1..20: mol_type = other DNA
caaaactccagtgacagagg

SEQ ID NO: 207807 - DNA, 20 bp, synthetic construct
  source 1..20: mol_type = other DNA
gcaaaactccagtgacagag

SEQ ID NO: 207808 - DNA, 20 bp, synthetic construct
  source 1..20: mol_type = other DNA
agcaaaactccagtgacaga

SEQ ID NO: 207809 - DNA, 20 bp, synthetic construct
  source 1..20: mol_type = other DNA
tagcaaaactccagtgacag

SEQ ID NO: 207810 - DNA, 20 bp, synthetic construct
  source 1..20: mol_type = other DNA
ctagcaaaactccagtgaca

SEQ ID NO: 207811 - DNA, 20 bp, synthetic construct
  source 1..20: mol_type = other DNA
gctagcaaaactccagtgac

SEQ ID NO: 207812 - DNA, 20 bp, synthetic construct
  source 1..20: mol_type = other DNA
agctagcaaaactccagtga

SEQ ID NO: 207813 - DNA, 20 bp, synthetic construct
  source 1..20: mol_type = other DNA
cagctagcaaaactccagtg

SEQ ID NO: 207814 - DNA, 20 bp, synthetic construct
  source 1..20: mol_type = other DNA
tcagctagcaaaactccagt

SEQ ID NO: 207815 - DNA, 20 bp, synthetic construct
  source 1..20: mol_type = other DNA
gtcagctagcaaaactccag

SEQ ID NO: 207816 - DNA, 20 bp, synthetic construct
  source 1..20: mol_type = other DNA
tgtcagctagcaaaactcca

SEQ ID NO: 207817 - DNA, 20 bp, synthetic construct
  source 1..20: mol_type = other DNA
ctgtcagctagcaaaactcc

SEQ ID NO: 207818 - DNA, 20 bp, synthetic construct
  source 1..20: mol_type = other DNA
gctgtcagctagcaaaactc

SEQ ID NO: 207819 - DNA, 20 bp, synthetic construct
  source 1..20: mol_type = other DNA
ggctgtcagctagcaaaact

SEQ ID NO: 207820 - DNA, 20 bp, synthetic construct
  source 1..20: mol_type = other DNA
tggctgtcagctagcaaaac

SEQ ID NO: 207821 - DNA, 20 bp, synthetic construct
  source 1..20: mol_type = other DNA
gtggctgtcagctagcaaaa

SEQ ID NO: 207822 - DNA, 20 bp, synthetic construct
  source 1..20: mol_type = other DNA
agtggctgtcagctagcaaa

SEQ ID NO: 207823 - DNA, 20 bp, synthetic construct
  source 1..20: mol_type = other DNA
cagtggctgtcagctagcaa

SEQ ID NO: 207824 - DNA, 20 bp, synthetic construct
  source 1..20: mol_type = other DNA
ccagtggctgtcagctagca

SEQ ID NO: 207825 - DNA, 20 bp, synthetic construct
  source 1..20: mol_type = other DNA
gccagtggctgtcagctagc

SEQ ID NO: 207826 - DNA, 20 bp, synthetic construct
  source 1..20: mol_type = other DNA
agccagtggctgtcagctag

SEQ ID NO: 207827 - DNA, 20 bp, synthetic construct
  source 1..20: mol_type = other DNA
tagccagtggctgtcagcta

SEQ ID NO: 207828 - DNA, 20 bp, synthetic construct
  source 1..20: mol_type = other DNA
ctagccagtggctgtcagct

SEQ ID NO: 207829 - DNA, 20 bp, synthetic construct
  source 1..20: mol_type = other DNA
actagccagtggctgtcagc

SEQ ID NO: 207830 - DNA, 20 bp, synthetic construct
  source 1..20: mol_type = other DNA
aactagccagtggctgtcag

SEQ ID NO: 207831 - DNA, 20 bp, synthetic construct
  source 1..20: mol_type = other DNA
taactagccagtggctgtca

SEQ ID NO: 207832 - DNA, 20 bp, synthetic construct
  source 1..20: mol_type = other DNA
ctaactagccagtggctgtc

SEQ ID NO: 207833 - DNA, 20 bp, synthetic construct
  source 1..20: mol_type = other DNA
tctaactagccagtggctgt

SEQ ID NO: 207834 - DNA, 20 bp, synthetic construct
  source 1..20: mol_type = other DNA
ctctaactagccagtggctg

SEQ ID NO: 207835 - DNA, 20 bp, synthetic construct
  source 1..20: mol_type = other DNA
tctctaactagccagtggct

SEQ ID NO: 207836 - DNA, 20 bp, synthetic construct
  source 1..20: mol_type = other DNA
gtctctaactagccagtggc

SEQ ID NO: 207837 - DNA, 20 bp, synthetic construct
  source 1..20: mol_type = other DNA
agtctctaactagccagtgg

SEQ ID NO: 207838 - DNA, 20 bp, synthetic construct
  source 1..20: mol_type = other DNA
cagtctctaactagccagtg

SEQ ID NO: 207839 - DNA, 20 bp, synthetic construct
  source 1..20: mol_type = other DNA
gcagtctctaactagccagt

SEQ ID NO: 207840 - DNA, 20 bp, synthetic construct
  source 1..20: mol_type = other DNA
tgcagtctctaactagccag

SEQ ID NO: 207841 - DNA, 20 bp, synthetic construct
  source 1..20: mol_type = other DNA
ctgcagtctctaactagcca

SEQ ID NO: 207842 - DNA, 20 bp, synthetic construct
  source 1..20: mol_type = other DNA
actgcagtctctaactagcc

SEQ ID NO: 207843 - DNA, 20 bp, synthetic construct
  source 1..20: mol_type = other DNA
gactgcagtctctaactagc

SEQ ID NO: 207844 - DNA, 20 bp, synthetic construct
  source 1..20: mol_type = other DNA
tgactgcagtctctaactag

SEQ ID NO: 207845 - DNA, 20 bp, synthetic construct
  source 1..20: mol_type = other DNA
ctgactgcagtctctaacta

SEQ ID NO: 207846 - DNA, 20 bp, synthetic construct
  source 1..20: mol_type = other DNA
gctgactgcagtctctaact

SEQ ID NO: 207847 - DNA, 20 bp, synthetic construct
  source 1..20: mol_type = other DNA
tgctgactgcagtctctaac

SEQ ID NO: 207848 - DNA, 20 bp, synthetic construct
  source 1..20: mol_type = other DNA
gtgctgactgcagtctctaa

SEQ ID NO: 207849 - DNA, 20 bp, synthetic construct
  source 1..20: mol_type = other DNA
tgtgctgactgcagtctcta

SEQ ID NO: 207850 - DNA, 20 bp, synthetic construct
  source 1..20: mol_type = other DNA
ctgtgctgactgcagtctct

SEQ ID NO: 207851 - DNA, 20 bp, synthetic construct
  source 1..20: mol_type = other DNA
tctgtgctgactgcagtctc

SEQ ID NO: 207852 - DNA, 20 bp, synthetic construct
  source 1..20: mol_type = other DNA
atctgtgctgactgcagtct

SEQ ID NO: 207853 - DNA, 20 bp, synthetic construct
  source 1..20: mol_type = other DNA
catctgtgctgactgcagtc

SEQ ID NO: 207854 - DNA, 20 bp, synthetic construct
  source 1..20: mol_type = other DNA
gcatctgtgctgactgcagt

SEQ ID NO: 207855 - DNA, 20 bp, synthetic construct
  source 1..20: mol_type = other DNA
tgcatctgtgctgactgcag

SEQ ID NO: 207856 - DNA, 20 bp, synthetic construct
  source 1..20: mol_type = other DNA
ctgcatctgtgctgactgca

SEQ ID NO: 207857 - DNA, 20 bp, synthetic construct
  source 1..20: mol_type = other DNA
cctgcatctgtgctgactgc

SEQ ID NO: 207858 - DNA, 20 bp, synthetic construct
  source 1..20: mol_type = other DNA
gcctgcatctgtgctgactg

SEQ ID NO: 207859 - DNA, 20 bp, synthetic construct
  source 1..20: mol_type = other DNA
cgcctgcatctgtgctgact

SEQ ID NO: 207860 - DNA, 20 bp, synthetic construct
  source 1..20: mol_type = other DNA
acgcctgcatctgtgctgac

SEQ ID NO: 207861 - DNA, 20 bp, synthetic construct
  source 1..20: mol_type = other DNA
cacgcctgcatctgtgctga

SEQ ID NO: 207862 - DNA, 20 bp, synthetic construct
  source 1..20: mol_type = other DNA
ccacgcctgcatctgtgctg

SEQ ID NO: 207863 - DNA, 20 bp, synthetic construct
  source 1..20: mol_type = other DNA
tccacgcctgcatctgtgct

SEQ ID NO: 207864 - DNA, 20 bp, synthetic construct
  source 1..20: mol_type = other DNA
gtccacgcctgcatctgtgc

SEQ ID NO: 207865 - DNA, 20 bp, synthetic construct
  source 1..20: mol_type = other DNA
agtccacgcctgcatctgtg

SEQ ID NO: 207866 - DNA, 20 bp, synthetic construct
  source 1..20: mol_type = other DNA
aagtccacgcctgcatctgt

SEQ ID NO: 207867 - DNA, 20 bp, synthetic construct
  source 1..20: mol_type = other DNA
caagtccacgcctgcatctg

SEQ ID NO: 207868 - DNA, 20 bp, synthetic construct
  source 1..20: mol_type = other DNA
gcaagtccacgcctgcatct

SEQ ID NO: 207869 - DNA, 20 bp, synthetic construct
  source 1..20: mol_type = other DNA
cgcaagtccacgcctgcatc

SEQ ID NO: 207870 - DNA, 20 bp, synthetic construct
  source 1..20: mol_type = other DNA
gcgcaagtccacgcctgcat

SEQ ID NO: 207871 - DNA, 20 bp, synthetic construct
  source 1..20: mol_type = other DNA
tgcgcaagtccacgcctgca

SEQ ID NO: 207872 - DNA, 20 bp, synthetic construct
  source 1..20: mol_type = other DNA
gtgcgcaagtccacgcctgc

SEQ ID NO: 207873 - DNA, 20 bp, synthetic construct
  source 1..20: mol_type = other DNA
cgtgcgcaagtccacgcctg

SEQ ID NO: 207874 - DNA, 20 bp, synthetic construct
  source 1..20: mol_type = other DNA
acgtgcgcaagtccacgcct

SEQ ID NO: 207875 - DNA, 20 bp, synthetic construct
  source 1..20: mol_type = other DNA
tacgtgcgcaagtccacgcc

SEQ ID NO: 207876 - DNA, 20 bp, synthetic construct
  source 1..20: mol_type = other DNA
ttacgtgcgcaagtccacgc

SEQ ID NO: 207877 - DNA, 20 bp, synthetic construct
  source 1..20: mol_type = other DNA
gttacgtgcgcaagtccacg

SEQ ID NO: 207878 - DNA, 20 bp, synthetic construct
  source 1..20: mol_type = other DNA
ggttacgtgcgcaagtccac

SEQ ID NO: 207879 - DNA, 20 bp, synthetic construct
  source 1..20: mol_type = other DNA
tggttacgtgcgcaagtcca

SEQ ID NO: 207880 - DNA, 20 bp, synthetic construct
  source 1..20: mol_type = other DNA
atggttacgtgcgcaagtcc

SEQ ID NO: 207881 - DNA, 20 bp, synthetic construct
  source 1..20: mol_type = other DNA
catggttacgtgcgcaagtc

SEQ ID NO: 207882 - DNA, 20 bp, synthetic construct
  source 1..20: mol_type = other DNA
acatggttacgtgcgcaagt

SEQ ID NO: 207883 - DNA, 20 bp, synthetic construct
  source 1..20: mol_type = other DNA
gacatggttacgtgcgcaag

SEQ ID NO: 207884 - DNA, 20 bp, synthetic construct
  source 1..20: mol_type = other DNA
tgacatggttacgtgcgcaa

SEQ ID NO: 207885 - DNA, 20 bp, synthetic construct
  source 1..20: mol_type = other DNA
ttgacatggttacgtgcgca

SEQ ID NO: 207886 - DNA, 20 bp, synthetic construct
  source 1..20: mol_type = other DNA
attgacatggttacgtgcgc

SEQ ID NO: 207887 - DNA, 20 bp, synthetic construct
  source 1..20: mol_type = other DNA
cattgacatggttacgtgcg

SEQ ID NO: 207888 - DNA, 20 bp, synthetic construct
  source 1..20: mol_type = other DNA
gcattgacatggttacgtgc

SEQ ID NO: 207889 - DNA, 20 bp, synthetic construct
  source 1..20: mol_type = other DNA
tgcattgacatggttacgtg

SEQ ID NO: 207890 - DNA, 20 bp, synthetic construct
  source 1..20: mol_type = other DNA
ttgcattgacatggttacgt

SEQ ID NO: 207891 - DNA, 20 bp, synthetic construct
  source 1..20: mol_type = other DNA
tttgcattgacatggttacg

SEQ ID NO: 207892 - DNA, 20 bp, synthetic construct
  source 1..20: mol_type = other DNA
ctttgcattgacatggttac

SEQ ID NO: 207893 - DNA, 20 bp, synthetic construct
  source 1..20: mol_type = other DNA
gctttgcattgacatggtta

SEQ ID NO: 207894 - DNA, 20 bp, synthetic construct
  source 1..20: mol_type = other DNA
ggctttgcattgacatggtt

SEQ ID NO: 207895 - DNA, 20 bp, synthetic construct
  source 1..20: mol_type = other DNA
tggctttgcattgacatggt

SEQ ID NO: 207896 - DNA, 20 bp, synthetic construct
  source 1..20: mol_type = other DNA
atggctttgcattgacatgg

SEQ ID NO: 207897 - DNA, 20 bp, synthetic construct
  source 1..20: mol_type = other DNA
gatggctttgcattgacatg

SEQ ID NO: 207898 - DNA, 20 bp, synthetic construct
  source 1..20: mol_type = other DNA
tgatggctttgcattgacat

SEQ ID NO: 207899 - DNA, 20 bp, synthetic construct
  source 1..20: mol_type = other DNA
gtgatggctttgcattgaca

SEQ ID NO: 207900 - DNA, 20 bp, synthetic construct
  source 1..20: mol_type = other DNA
agtgatggctttgcattgac

SEQ ID NO: 207901 - DNA, 20 bp, synthetic construct
  source 1..20: mol_type = other DNA
aagtgatggctttgcattga

SEQ ID NO: 207902 - DNA, 20 bp, synthetic construct
  source 1..20: mol_type = other DNA
gaagtgatggctttgcattg

SEQ ID NO: 207903 - DNA, 20 bp, synthetic construct
  source 1..20: mol_type = other DNA
agaagtgatggctttgcatt

SEQ ID NO: 207904 - DNA, 20 bp, synthetic construct
  source 1..20: mol_type = other DNA
aagaagtgatggctttgcat

SEQ ID NO: 207905 - DNA, 20 bp, synthetic construct
  source 1..20: mol_type = other DNA
taagaagtgatggctttgca

SEQ ID NO: 207906 - DNA, 20 bp, synthetic construct
  source 1..20: mol_type = other DNA
ttaagaagtgatggctttgc

SEQ ID NO: 207907 - DNA, 20 bp, synthetic construct
  source 1..20: mol_type = other DNA
tttaagaagtgatggctttg

SEQ ID NO: 207908 - DNA, 20 bp, synthetic construct
  source 1..20: mol_type = other DNA
ttttaagaagtgatggcttt

SEQ ID NO: 207909 - DNA, 20 bp, synthetic construct
  source 1..20: mol_type = other DNA
tttttaagaagtgatggctt

SEQ ID NO: 207910 - DNA, 20 bp, synthetic construct
  source 1..20: mol_type = other DNA
atttttaagaagtgatggct

SEQ ID NO: 207911 - DNA, 20 bp, synthetic construct
  source 1..20: mol_type = other DNA
aatttttaagaagtgatggc

SEQ ID NO: 207912 - DNA, 20 bp, synthetic construct
  source 1..20: mol_type = other DNA
gaatttttaagaagtgatgg

SEQ ID NO: 207913 - DNA, 20 bp, synthetic construct
  source 1..20: mol_type = other DNA
agaatttttaagaagtgatg

SEQ ID NO: 207914 - DNA, 20 bp, synthetic construct
  source 1..20: mol_type = other DNA
cagaatttttaagaagtgat

SEQ ID NO: 207915 - DNA, 20 bp, synthetic construct
  source 1..20: mol_type = other DNA
tcagaatttttaagaagtga

SEQ ID NO: 207916 - DNA, 20 bp, synthetic construct
  source 1..20: mol_type = other DNA
ttcagaatttttaagaagtg

SEQ ID NO: 207917 - DNA, 20 bp, synthetic construct
  source 1..20: mol_type = other DNA
gttcagaatttttaagaagt

SEQ ID NO: 207918 - DNA, 20 bp, synthetic construct
  source 1..20: mol_type = other DNA
ggttcagaatttttaagaag

SEQ ID NO: 207919 - DNA, 20 bp, synthetic construct
  source 1..20: mol_type = other DNA
gggttcagaatttttaagaa

SEQ ID NO: 207920 - DNA, 20 bp, synthetic construct
  source 1..20: mol_type = other DNA
agggttcagaatttttaaga

SEQ ID NO: 207921 - DNA, 20 bp, synthetic construct
  source 1..20: mol_type = other DNA
cagggttcagaatttttaag

SEQ ID NO: 207922 - DNA, 20 bp, synthetic construct
  source 1..20: mol_type = other DNA
gcagggttcagaatttttaa

SEQ ID NO: 207923 - DNA, 20 bp, synthetic construct
  source 1..20: mol_type = other DNA
agcagggttcagaattttta

SEQ ID NO: 207924 - DNA, 20 bp, synthetic construct
  source 1..20: mol_type = other DNA
cagcagggttcagaattttt

SEQ ID NO: 207925 - DNA, 20 bp, synthetic construct
  source 1..20: mol_type = other DNA
acagcagggttcagaatttt

SEQ ID NO: 207926 - DNA, 20 bp, synthetic construct
  source 1..20: mol_type = other DNA
gacagcagggttcagaattt

SEQ ID NO: 207927 - DNA, 20 bp, synthetic construct
  source 1..20: mol_type = other DNA
agacagcagggttcagaatt

SEQ ID NO: 207928 - DNA, 20 bp, synthetic construct
  source 1..20: mol_type = other DNA
cagacagcagggttcagaat

SEQ ID NO: 207929 - DNA, 20 bp, synthetic construct
  source 1..20: mol_type = other DNA
tcagacagcagggttcagaa

SEQ ID NO: 207930 - DNA, 20 bp, synthetic construct
  source 1..20: mol_type = other DNA
ctcagacagcagggttcaga

SEQ ID NO: 207931 - DNA, 20 bp, synthetic construct
  source 1..20: mol_type = other DNA
tctcagacagcagggttcag

SEQ ID NO: 207932 - DNA, 20 bp, synthetic construct
  source 1..20: mol_type = other DNA
atctcagacagcagggttca

SEQ ID NO: 207933 - DNA, 20 bp, synthetic construct
  source 1..20: mol_type = other DNA
catctcagacagcagggttc

SEQ ID NO: 207934 - DNA, 20 bp, synthetic construct
  source 1..20: mol_type = other DNA
ccatctcagacagcagggtt

SEQ ID NO: 207935 - DNA, 20 bp, synthetic construct
  source 1..20: mol_type = other DNA
accatctcagacagcagggt

SEQ ID NO: 207936 - DNA, 20 bp, synthetic construct
  source 1..20: mol_type = other DNA
caccatctcagacagcaggg

SEQ ID NO: 207937 - DNA, 20 bp, synthetic construct
  source 1..20: mol_type = other DNA
ccaccatctcagacagcagg

SEQ ID NO: 207938 - DNA, 20 bp, synthetic construct
  source 1..20: mol_type = other DNA
accaccatctcagacagcag

SEQ ID NO: 207939 - DNA, 20 bp, synthetic construct
  source 1..20: mol_type = other DNA
caccaccatctcagacagca

SEQ ID NO: 207940 - DNA, 20 bp, synthetic construct
  source 1..20: mol_type = other DNA
gcaccaccatctcagacagc

SEQ ID NO: 207941 - DNA, 20 bp, synthetic construct
  source 1..20: mol_type = other DNA
tgcaccaccatctcagacag

SEQ ID NO: 207942 - DNA, 20 bp, synthetic construct
  source 1..20: mol_type = other DNA
ctgcaccaccatctcagaca

SEQ ID NO: 207943 - DNA, 20 bp, synthetic construct
  source 1..20: mol_type = other DNA
gctgcaccaccatctcagac

SEQ ID NO: 207944 - DNA, 20 bp, synthetic construct
  source 1..20: mol_type = other DNA
cgctgcaccaccatctcaga

SEQ ID NO: 207945 - DNA, 20 bp, synthetic construct
  source 1..20: mol_type = other DNA
ccgctgcaccaccatctcag

SEQ ID NO: 207946 - DNA, 20 bp, synthetic construct
  source 1..20: mol_type = other DNA
tccgctgcaccaccatctca

SEQ ID NO: 207947 - DNA, 20 bp, synthetic construct
  source 1..20: mol_type = other DNA
atccgctgcaccaccatctc

SEQ ID NO: 207948 - DNA, 20 bp, synthetic construct
  source 1..20: mol_type = other DNA
tatccgctgcaccaccatct

SEQ ID NO: 207949 - DNA, 20 bp, synthetic construct
  source 1..20: mol_type = other DNA
ctatccgctgcaccaccatc

SEQ ID NO: 207950 - DNA, 20 bp, synthetic construct
  source 1..20: mol_type = other DNA
tctatccgctgcaccaccat

SEQ ID NO: 207951 - DNA, 20 bp, synthetic construct
  source 1..20: mol_type = other DNA
ttctatccgctgcaccacca

SEQ ID NO: 207952 - DNA, 20 bp, synthetic construct
  source 1..20: mol_type = other DNA
gttctatccgctgcaccacc

SEQ ID NO: 207953 - DNA, 20 bp, synthetic construct
  source 1..20: mol_type = other DNA
agttctatccgctgcaccac

SEQ ID NO: 207954 - DNA, 20 bp, synthetic construct
  source 1..20: mol_type = other DNA
gagttctatccgctgcacca

SEQ ID NO: 207955 - DNA, 20 bp, synthetic construct
  source 1..20: mol_type = other DNA
agagttctatccgctgcacc

SEQ ID NO: 207956 - DNA, 20 bp, synthetic construct
  source 1..20: mol_type = other DNA
cagagttctatccgctgcac

SEQ ID NO: 207957 - DNA, 20 bp, synthetic construct
  source 1..20: mol_type = other DNA
gcagagttctatccgctgca

SEQ ID NO: 207958 - DNA, 20 bp, synthetic construct
  source 1..20: mol_type = other DNA
agcagagttctatccgctgc

SEQ ID NO: 207959 - DNA, 20 bp, synthetic construct
  source 1..20: mol_type = other DNA
gagcagagttctatccgctg

SEQ ID NO: 207960 - DNA, 20 bp, synthetic construct
  source 1..20: mol_type = other DNA
agagcagagttctatccgct

SEQ ID NO: 207961 - DNA, 20 bp, synthetic construct
  source 1..20: mol_type = other DNA
tagagcagagttctatccgc

SEQ ID NO: 207962 - DNA, 20 bp, synthetic construct
  source 1..20: mol_type = other DNA
ttagagcagagttctatccg

SEQ ID NO: 207963 - DNA, 20 bp, synthetic construct
  source 1..20: mol_type = other DNA
cttagagcagagttctatcc

SEQ ID NO: 207964 - DNA, 20 bp, synthetic construct
  source 1..20: mol_type = other DNA
tcttagagcagagttctatc

SEQ ID NO: 207965 - DNA, 20 bp, synthetic construct
  source 1..20: mol_type = other DNA
ctcttagagcagagttctat

SEQ ID NO: 207966 - DNA, 20 bp, synthetic construct
  source 1..20: mol_type = other DNA
cctcttagagcagagttcta

SEQ ID NO: 207967 - DNA, 20 bp, synthetic construct
  source 1..20: mol_type = other DNA
gcctcttagagcagagttct

SEQ ID NO: 207968 - DNA, 20 bp, synthetic construct
  source 1..20: mol_type = other DNA
tgcctcttagagcagagttc

SEQ ID NO: 207969 - DNA, 20 bp, synthetic construct
  source 1..20: mol_type = other DNA
ctgcctcttagagcagagtt

SEQ ID NO: 207970 - DNA, 20 bp, synthetic construct
  source 1..20: mol_type = other DNA
actgcctcttagagcagagt

SEQ ID NO: 207971 - DNA, 20 bp, synthetic construct
  source 1..20: mol_type = other DNA
tactgcctcttagagcagag

SEQ ID NO: 207972 - DNA, 20 bp, synthetic construct
  source 1..20: mol_type = other DNA
ctactgcctcttagagcaga

SEQ ID NO: 207973 - DNA, 20 bp, synthetic construct
  source 1..20: mol_type = other DNA
gctactgcctcttagagcag

SEQ ID NO: 207974 - DNA, 20 bp, synthetic construct
  source 1..20: mol_type = other DNA
agctactgcctcttagagca

SEQ ID NO: 207975 - DNA, 20 bp, synthetic construct
  source 1..20: mol_type = other DNA
tagctactgcctcttagagc

SEQ ID NO: 207976 - DNA, 20 bp, synthetic construct
  source 1..20: mol_type = other DNA
ttagctactgcctcttagag

SEQ ID NO: 207977 - DNA, 20 bp, synthetic construct
  source 1..20: mol_type = other DNA
attagctactgcctcttaga

SEQ ID NO: 207978 - DNA, 20 bp, synthetic construct
  source 1..20: mol_type = other DNA
aattagctactgcctcttag

SEQ ID NO: 207979 - DNA, 20 bp, synthetic construct
  source 1..20: mol_type = other DNA
gaattagctactgcctctta

SEQ ID NO: 207980 - DNA, 20 bp, synthetic construct
  source 1..20: mol_type = other DNA
ggaattagctactgcctctt

SEQ ID NO: 207981 - DNA, 20 bp, synthetic construct
  source 1..20: mol_type = other DNA
tggaattagctactgcctct

SEQ ID NO: 207982 - DNA, 20 bp, synthetic construct
  source 1..20: mol_type = other DNA
atggaattagctactgcctc

SEQ ID NO: 207983 - DNA, 20 bp, synthetic construct
  source 1..20: mol_type = other DNA
catggaattagctactgcct

SEQ ID NO: 207984 - DNA, 20 bp, synthetic construct
  source 1..20: mol_type = other DNA
acatggaattagctactgcc

SEQ ID NO: 207985 - DNA, 20 bp, synthetic construct
  source 1..20: mol_type = other DNA
gacatggaattagctactgc

SEQ ID NO: 207986 - DNA, 20 bp, synthetic construct
  source 1..20: mol_type = other DNA
agacatggaattagctactg

SEQ ID NO: 207987 - DNA, 20 bp, synthetic construct
  source 1..20: mol_type = other DNA
aagacatggaattagctact

SEQ ID NO: 207988 - DNA, 20 bp, synthetic construct
  source 1..20: mol_type = other DNA
gaagacatggaattagctac

SEQ ID NO: 207989 - DNA, 20 bp, synthetic construct
  source 1..20: mol_type = other DNA
agaagacatggaattagcta

SEQ ID NO: 207990 - DNA, 20 bp, synthetic construct
  source 1..20: mol_type = other DNA
aagaagacatggaattagct

SEQ ID NO: 207991 - DNA, 20 bp, synthetic construct
  source 1..20: mol_type = other DNA
aaagaagacatggaattagc

SEQ ID NO: 207992 - DNA, 20 bp, synthetic construct
  source 1..20: mol_type = other DNA
caaagaagacatggaattag

SEQ ID NO: 207993 - DNA, 20 bp, synthetic construct
  source 1..20: mol_type = other DNA
gcaaagaagacatggaatta

SEQ ID NO: 207994 - DNA, 20 bp, synthetic construct
  source 1..20: mol_type = other DNA
ggcaaagaagacatggaatt

SEQ ID NO: 207995 - DNA, 20 bp, synthetic construct
  source 1..20: mol_type = other DNA
gggcaaagaagacatggaat

SEQ ID NO: 207996 - DNA, 20 bp, synthetic construct
  source 1..20: mol_type = other DNA
agggcaaagaagacatggaa

SEQ ID NO: 207997 - DNA, 20 bp, synthetic construct
  source 1..20: mol_type = other DNA
aagggcaaagaagacatgga

SEQ ID NO: 207998 - DNA, 20 bp, synthetic construct
  source 1..20: mol_type = other DNA
caagggcaaagaagacatgg

SEQ ID NO: 207999 - DNA, 20 bp, synthetic construct
  source 1..20: mol_type = other DNA
tcaagggcaaagaagacatg

SEQ ID NO: 208000 - DNA, 20 bp, synthetic construct
  source 1..20: mol_type = other DNA
gtcaagggcaaagaagacat

SEQ ID NO: 208001 - DNA, 20 bp, synthetic construct
  source 1..20: mol_type = other DNA
agtcaagggcaaagaagaca

SEQ ID NO: 208002 - DNA, 20 bp, synthetic construct
  source 1..20: mol_type = other DNA
tagtcaagggcaaagaagac

SEQ ID NO: 208003 - DNA, 20 bp, synthetic construct
  source 1..20: mol_type = other DNA
ctagtcaagggcaaagaaga

SEQ ID NO: 208004 - DNA, 20 bp, synthetic construct
  source 1..20: mol_type = other DNA
gctagtcaagggcaaagaag

SEQ ID NO: 208005 - DNA, 20 bp, synthetic construct
  source 1..20: mol_type = other DNA
agctagtcaagggcaaagaa

SEQ ID NO: 208006 - DNA, 20 bp, synthetic construct
  source 1..20: mol_type = other DNA
cagctagtcaagggcaaaga

SEQ ID NO: 208007 - DNA, 20 bp, synthetic construct
  source 1..20: mol_type = other DNA
tcagctagtcaagggcaaag

SEQ ID NO: 208008 - DNA, 20 bp, synthetic construct
  source 1..20: mol_type = other DNA
ctcagctagtcaagggcaaa

SEQ ID NO: 208009 - DNA, 20 bp, synthetic construct
  source 1..20: mol_type = other DNA
actcagctagtcaagggcaa

SEQ ID NO: 208010 - DNA, 20 bp, synthetic construct
  source 1..20: mol_type = other DNA
cactcagctagtcaagggca

SEQ ID NO: 208011 - DNA, 20 bp, synthetic construct
  source 1..20: mol_type = other DNA
tcactcagctagtcaagggc

SEQ ID NO: 208012 - DNA, 20 bp, synthetic construct
  source 1..20: mol_type = other DNA
gtcactcagctagtcaaggg

SEQ ID NO: 208013 - DNA, 20 bp, synthetic construct
  source 1..20: mol_type = other DNA
agtcactcagctagtcaagg

SEQ ID NO: 208014 - DNA, 20 bp, synthetic construct
  source 1..20: mol_type = other DNA
aagtcactcagctagtcaag

SEQ ID NO: 208015 - DNA, 20 bp, synthetic construct
  source 1..20: mol_type = other DNA
aaagtcactcagctagtcaa

SEQ ID NO: 208016 - DNA, 20 bp, synthetic construct
  source 1..20: mol_type = other DNA
caaagtcactcagctagtca

SEQ ID NO: 208017 - DNA, 20 bp, synthetic construct
  source 1..20: mol_type = other DNA
gcaaagtcactcagctagtc

SEQ ID NO: 208018 - DNA, 20 bp, synthetic construct
  source 1..20: mol_type = other DNA
tgcaaagtcactcagctagt

SEQ ID NO: 208019 - DNA, 20 bp, synthetic construct
  source 1..20: mol_type = other DNA
gtgcaaagtcactcagctag

SEQ ID NO: 208020 - DNA, 20 bp, synthetic construct
  source 1..20: mol_type = other DNA
tgtgcaaagtcactcagcta

SEQ ID NO: 208021 - DNA, 20 bp, synthetic construct
  source 1..20: mol_type = other DNA
atgtgcaaagtcactcagct

SEQ ID NO: 208022 - DNA, 20 bp, synthetic construct
  source 1..20: mol_type = other DNA
catgtgcaaagtcactcagc

SEQ ID NO: 208023 - DNA, 20 bp, synthetic construct
  source 1..20: mol_type = other DNA
ccatgtgcaaagtcactcag

SEQ ID NO: 208024 - DNA, 20 bp, synthetic construct
  source 1..20: mol_type = other DNA
cccatgtgcaaagtcactca

SEQ ID NO: 208025 - DNA, 20 bp, synthetic construct
  source 1..20: mol_type = other DNA
ccccatgtgcaaagtcactc

SEQ ID NO: 208026 - DNA, 20 bp, synthetic construct
  source 1..20: mol_type = other DNA
gccccatgtgcaaagtcact

SEQ ID NO: 208027 - DNA, 20 bp, synthetic construct
  source 1..20: mol_type = other DNA
agccccatgtgcaaagtcac

SEQ ID NO: 208028 - DNA, 20 bp, synthetic construct
  source 1..20: mol_type = other DNA
aagccccatgtgcaaagtca

SEQ ID NO: 208029 - DNA, 20 bp, synthetic construct
  source 1..20: mol_type = other DNA
caagccccatgtgcaaagtc

SEQ ID NO: 208030 - DNA, 20 bp, synthetic construct
  source 1..20: mol_type = other DNA
gcaagccccatgtgcaaagt

SEQ ID NO: 208031 - DNA, 20 bp, synthetic construct
  source 1..20: mol_type = other DNA
ggcaagccccatgtgcaaag

SEQ ID NO: 208032 - DNA, 20 bp, synthetic construct
  source 1..20: mol_type = other DNA
aggcaagccccatgtgcaaa

SEQ ID NO: 208033 - DNA, 20 bp, synthetic construct
  source 1..20: mol_type = other DNA
gaggcaagccccatgtgcaa

SEQ ID NO: 208034 - DNA, 20 bp, synthetic construct
  source 1..20: mol_type = other DNA
agaggcaagccccatgtgca

SEQ ID NO: 208035 - DNA, 20 bp, synthetic construct
  source 1..20: mol_type = other DNA
gagaggcaagccccatgtgc

SEQ ID NO: 208036 - DNA, 20 bp, synthetic construct
  source 1..20: mol_type = other DNA
agagaggcaagccccatgtg

SEQ ID NO: 208037 - DNA, 20 bp, synthetic construct
  source 1..20: mol_type = other DNA
cagagaggcaagccccatgt

SEQ ID NO: 208038 - DNA, 20 bp, synthetic construct
  source 1..20: mol_type = other DNA
acagagaggcaagccccatg

SEQ ID NO: 208039 - DNA, 20 bp, synthetic construct
  source 1..20: mol_type = other DNA
aacagagaggcaagccccat

SEQ ID NO: 208040 - DNA, 20 bp, synthetic construct
  source 1..20: mol_type = other DNA
caacagagaggcaagcccca

SEQ ID NO: 208041 - DNA, 20 bp, synthetic construct
  source 1..20: mol_type = other DNA
gcaacagagaggcaagcccc

SEQ ID NO: 208042 - DNA, 20 bp, synthetic construct
  source 1..20: mol_type = other DNA
ggcaacagagaggcaagccc

SEQ ID NO: 208043 - DNA, 20 bp, synthetic construct
  source 1..20: mol_type = other DNA
aggcaacagagaggcaagcc

SEQ ID NO: 208044 - DNA, 20 bp, synthetic construct
  source 1..20: mol_type = other DNA
aaggcaacagagaggcaagc

SEQ ID NO: 208045 - DNA, 20 bp, synthetic construct
  source 1..20: mol_type = other DNA
caaggcaacagagaggcaag

SEQ ID NO: 208046 - DNA, 20 bp, synthetic construct
  source 1..20: mol_type = other DNA
acaaggcaacagagaggcaa

SEQ ID NO: 208047 - DNA, 20 bp, synthetic construct
  source 1..20: mol_type = other DNA
gacaaggcaacagagaggca

SEQ ID NO: 208048 - DNA, 20 bp, synthetic construct
  source 1..20: mol_type = other DNA
agacaaggcaacagagaggc

SEQ ID NO: 208049 - DNA, 20 bp, synthetic construct
  source 1..20: mol_type = other DNA
cagacaaggcaacagagagg

SEQ ID NO: 208050 - DNA, 20 bp, synthetic construct
  source 1..20: mol_type = other DNA
gcagacaaggcaacagagag

SEQ ID NO: 208051 - DNA, 20 bp, synthetic construct
  source 1..20: mol_type = other DNA
tgcagacaaggcaacagaga

SEQ ID NO: 208052 - DNA, 20 bp, synthetic construct
  source 1..20: mol_type = other DNA
ttgcagacaaggcaacagag

SEQ ID NO: 208053 - DNA, 20 bp, synthetic construct
  source 1..20: mol_type = other DNA
tttgcagacaaggcaacaga

SEQ ID NO: 208054 - DNA, 20 bp, synthetic construct
  source 1..20: mol_type = other DNA
ctttgcagacaaggcaacag

SEQ ID NO: 208055 - DNA, 20 bp, synthetic construct
  source 1..20: mol_type = other DNA
actttgcagacaaggcaaca

SEQ ID NO: 208056 - DNA, 20 bp, synthetic construct
  source 1..20: mol_type = other DNA
cactttgcagacaaggcaac

SEQ ID NO: 208057 - DNA, 20 bp, synthetic construct
  source 1..20: mol_type = other DNA
ccactttgcagacaaggcaa

SEQ ID NO: 208058 - DNA, 20 bp, synthetic construct
  source 1..20: mol_type = other DNA
tccactttgcagacaaggca

SEQ ID NO: 208059 - DNA, 20 bp, synthetic construct
  source 1..20: mol_type = other DNA
ttccactttgcagacaaggc

SEQ ID NO: 208060 - DNA, 20 bp, synthetic construct
  source 1..20: mol_type = other DNA
attccactttgcagacaagg

SEQ ID NO: 208061 - DNA, 20 bp, synthetic construct
  source 1..20: mol_type = other DNA
gattccactttgcagacaag

SEQ ID NO: 208062 - DNA, 20 bp, synthetic construct
  source 1..20: mol_type = other DNA
tgattccactttgcagacaa

SEQ ID NO: 208063 - DNA, 20 bp, synthetic construct
  source 1..20: mol_type = other DNA
atgattccactttgcagaca

SEQ ID NO: 208064 - DNA, 20 bp, synthetic construct
  source 1..20: mol_type = other DNA
gatgattccactttgcagac

SEQ ID NO: 208065 - DNA, 20 bp, synthetic construct
  source 1..20: mol_type = other DNA
agatgattccactttgcaga

SEQ ID NO: 208066 - DNA, 20 bp, synthetic construct
  source 1..20: mol_type = other DNA
aagatgattccactttgcag

SEQ ID NO: 208067 - DNA, 20 bp, synthetic construct
  source 1..20: mol_type = other DNA
aaagatgattccactttgca

SEQ ID NO: 208068 - DNA, 20 bp, synthetic construct
  source 1..20: mol_type = other DNA
aaaagatgattccactttgc

SEQ ID NO: 208069 - DNA, 20 bp, synthetic construct
  source 1..20: mol_type = other DNA
gaaaagatgattccactttg

SEQ ID NO: 208070 - DNA, 20 bp, synthetic construct
  source 1..20: mol_type = other DNA
ggaaaagatgattccacttt

SEQ ID NO: 208071 - DNA, 20 bp, synthetic construct
  source 1..20: mol_type = other DNA
aggaaaagatgattccactt

SEQ ID NO: 208072 - DNA, 20 bp, synthetic construct
  source 1..20: mol_type = other DNA
aaggaaaagatgattccact

SEQ ID NO: 208073 - DNA, 20 bp, synthetic construct
  source 1..20: mol_type = other DNA
caaggaaaagatgattccac

SEQ ID NO: 208074 - DNA, 20 bp, synthetic construct
  source 1..20: mol_type = other DNA
gcaaggaaaagatgattcca

SEQ ID NO: 208075 - DNA, 20 bp, synthetic construct
  source 1..20: mol_type = other DNA
agcaaggaaaagatgattcc

SEQ ID NO: 208076 - DNA, 20 bp, synthetic construct
  source 1..20: mol_type = other DNA
tagcaaggaaaagatgattc

SEQ ID NO: 208077 - DNA, 20 bp, synthetic construct
  source 1..20: mol_type = other DNA
ctagcaaggaaaagatgatt

SEQ ID NO: 208078 - DNA, 20 bp, synthetic construct
  source 1..20: mol_type = other DNA
tctagcaaggaaaagatgat

SEQ ID NO: 208079 - DNA, 20 bp, synthetic construct
  source 1..20: mol_type = other DNA
gtctagcaaggaaaagatga

SEQ ID NO: 208080 - DNA, 20 bp, synthetic construct
  source 1..20: mol_type = other DNA
tgtctagcaaggaaaagatg

SEQ ID NO: 208081 - DNA, 20 bp, synthetic construct
  source 1..20: mol_type = other DNA
ctgtctagcaaggaaaagat

SEQ ID NO: 208082 - DNA, 20 bp, synthetic construct
  source 1..20: mol_type = other DNA
tctgtctagcaaggaaaaga

SEQ ID NO: 208083 - DNA, 20 bp, synthetic construct
  source 1..20: mol_type = other DNA
ttctgtctagcaaggaaaag

SEQ ID NO: 208084 - DNA, 20 bp, synthetic construct
  source 1..20: mol_type = other DNA
cttctgtctagcaaggaaaa

SEQ ID NO: 208085 - DNA, 20 bp, synthetic construct
  source 1..20: mol_type = other DNA
ccttctgtctagcaaggaaa

SEQ ID NO: 208086 - DNA, 20 bp, synthetic construct
  source 1..20: mol_type = other DNA
accttctgtctagcaaggaa

SEQ ID NO: 208087 - DNA, 20 bp, synthetic construct
  source 1..20: mol_type = other DNA
caccttctgtctagcaagga

SEQ ID NO: 208088 - DNA, 20 bp, synthetic construct
  source 1..20: mol_type = other DNA
ccaccttctgtctagcaagg

SEQ ID NO: 208089 - DNA, 20 bp, synthetic construct
  source 1..20: mol_type = other DNA
tccaccttctgtctagcaag

SEQ ID NO: 208090 - DNA, 20 bp, synthetic construct
  source 1..20: mol_type = other DNA
gtccaccttctgtctagcaa

SEQ ID NO: 208091 - DNA, 20 bp, synthetic construct
  source 1..20: mol_type = other DNA
ggtccaccttctgtctagca

SEQ ID NO: 208092 - DNA, 20 bp, synthetic construct
  source 1..20: mol_type = other DNA
gggtccaccttctgtctagc

SEQ ID NO: 208093 - DNA, 20 bp, synthetic construct
  source 1..20: mol_type = other DNA
agggtccaccttctgtctag

SEQ ID NO: 208094 - DNA, 20 bp, synthetic construct
  source 1..20: mol_type = other DNA
cagggtccaccttctgtcta

SEQ ID NO: 208095 - DNA, 20 bp, synthetic construct
  source 1..20: mol_type = other DNA
ccagggtccaccttctgtct

SEQ ID NO: 208096 - DNA, 20 bp, synthetic construct
  source 1..20: mol_type = other DNA
tccagggtccaccttctgtc

SEQ ID NO: 208097 - DNA, 20 bp, synthetic construct
  source 1..20: mol_type = other DNA
gtccagggtccaccttctgt

SEQ ID NO: 208098 - DNA, 20 bp, synthetic construct
  source 1..20: mol_type = other DNA
ggtccagggtccaccttctg

SEQ ID NO: 208099 - DNA, 20 bp, synthetic construct
  source 1..20: mol_type = other DNA
aggtccagggtccaccttct

SEQ ID NO: 208100 - DNA, 20 bp, synthetic construct
  source 1..20: mol_type = other DNA
taggtccagggtccaccttc

SEQ ID NO: 208101 - DNA, 20 bp, synthetic construct
  source 1..20: mol_type = other DNA
ataggtccagggtccacctt

SEQ ID NO: 208102 - DNA, 20 bp, synthetic construct
  source 1..20: mol_type = other DNA
cataggtccagggtccacct

SEQ ID NO: 208103 - DNA, 20 bp, synthetic construct
  source 1..20: mol_type = other DNA
ccataggtccagggtccacc

SEQ ID NO: 208104 - DNA, 20 bp, synthetic construct
  source 1..20: mol_type = other DNA
gccataggtccagggtccac

SEQ ID NO: 208105 - DNA, 20 bp, synthetic construct
  source 1..20: mol_type = other DNA
ggccataggtccagggtcca

SEQ ID NO: 208106 - DNA, 20 bp, synthetic construct
  source 1..20: mol_type = other DNA
aggccataggtccagggtcc

SEQ ID NO: 208107 - DNA, 20 bp, synthetic construct
  source 1..20: mol_type = other DNA
aaggccataggtccagggtc

SEQ ID NO: 208108 - DNA, 20 bp, synthetic construct
  source 1..20: mol_type = other DNA
aaaggccataggtccagggt

SEQ ID NO: 208109 - DNA, 20 bp, synthetic construct
  source 1..20: mol_type = other DNA
aaaaggccataggtccaggg

SEQ ID NO: 208110 - DNA, 20 bp, synthetic construct
  source 1..20: mol_type = other DNA
aaaaaggccataggtccagg

SEQ ID NO: 208111 - DNA, 20 bp, synthetic construct
  source 1..20: mol_type = other DNA
caaaaaggccataggtccag

SEQ ID NO: 208112 - DNA, 20 bp, synthetic construct
  source 1..20: mol_type = other DNA
tcaaaaaggccataggtcca

SEQ ID NO: 208113 - DNA, 20 bp, synthetic construct
  source 1..20: mol_type = other DNA
ctcaaaaaggccataggtcc

SEQ ID NO: 208114 - DNA, 20 bp, synthetic construct
  source 1..20: mol_type = other DNA
actcaaaaaggccataggtc

SEQ ID NO: 208115 - DNA, 20 bp, synthetic construct
  source 1..20: mol_type = other DNA
aactcaaaaaggccataggt

SEQ ID NO: 208116 - DNA, 20 bp, synthetic construct
  source 1..20: mol_type = other DNA
aaactcaaaaaggccatagg

SEQ ID NO: 208117 - DNA, 20 bp, synthetic construct
  source 1..20: mol_type = other DNA
gaaactcaaaaaggccatag

SEQ ID NO: 208118 - DNA, 20 bp, synthetic construct
  source 1..20: mol_type = other DNA
ggaaactcaaaaaggccata

SEQ ID NO: 208119 - DNA, 20 bp, synthetic construct
  source 1..20: mol_type = other DNA
gggaaactcaaaaaggccat

SEQ ID NO: 208120 - DNA, 20 bp, synthetic construct
  source 1..20: mol_type = other DNA
ggggaaactcaaaaaggcca

SEQ ID NO: 208121 - DNA, 20 bp, synthetic construct
  source 1..20: mol_type = other DNA
gggggaaactcaaaaaggcc

SEQ ID NO: 208122 - DNA, 20 bp, synthetic construct
  source 1..20: mol_type = other DNA
ggggggaaactcaaaaaggc

SEQ ID NO: 208123 - DNA, 20 bp, synthetic construct
  source 1..20: mol_type = other DNA
gggggggaaactcaaaaagg

SEQ ID NO: 208124 - DNA, 20 bp, synthetic construct
  source 1..20: mol_type = other DNA
cgggggggaaactcaaaaag

SEQ ID NO: 208125 - DNA, 20 bp, synthetic construct
  source 1..20: mol_type = other DNA
gcgggggggaaactcaaaaa

SEQ ID NO: 208126 - DNA, 20 bp, synthetic construct
  source 1..20: mol_type = other DNA
agcgggggggaaactcaaaa

SEQ ID NO: 208127 - DNA, 20 bp, synthetic construct
  source 1..20: mol_type = other DNA
aagcgggggggaaactcaaa

SEQ ID NO: 208128 - DNA, 20 bp, synthetic construct
  source 1..20: mol_type = other DNA
gaagcgggggggaaactcaa

SEQ ID NO: 208129 - DNA, 20 bp, synthetic construct
  source 1..20: mol_type = other DNA
agaagcgggggggaaactca

SEQ ID NO: 208130 - DNA, 20 bp, synthetic construct
  source 1..20: mol_type = other DNA
aagaagcgggggggaaactc

SEQ ID NO: 208131 - DNA, 20 bp, synthetic construct
  source 1..20: mol_type = other DNA
taagaagcgggggggaaact

SEQ ID NO: 208132 - DNA, 20 bp, synthetic construct
  source 1..20: mol_type = other DNA
ctaagaagcgggggggaaac

SEQ ID NO: 208133 - DNA, 20 bp, synthetic construct
  source 1..20: mol_type = other DNA
tctaagaagcgggggggaaa

SEQ ID NO: 208134 - DNA, 20 bp, synthetic construct
  source 1..20: mol_type = other DNA
ttctaagaagcgggggggaa

SEQ ID NO: 208135 - DNA, 20 bp, synthetic construct
  source 1..20: mol_type = other DNA
cttctaagaagcggggggga

SEQ ID NO: 208136 - DNA, 20 bp, synthetic construct
  source 1..20: mol_type = other DNA
ccttctaagaagcggggggg

SEQ ID NO: 208137 - DNA, 20 bp, synthetic construct
  source 1..20: mol_type = other DNA
tccttctaagaagcgggggg

SEQ ID NO: 208138 - DNA, 20 bp, synthetic construct
  source 1..20: mol_type = other DNA
gtccttctaagaagcggggg

SEQ ID NO: 208139 - DNA, 20 bp, synthetic construct
  source 1..20: mol_type = other DNA
ggtccttctaagaagcgggg

SEQ ID NO: 208140 - DNA, 20 bp, synthetic construct
  source 1..20: mol_type = other DNA
aggtccttctaagaagcggg

SEQ ID NO: 208141 - DNA, 20 bp, synthetic construct
  source 1..20: mol_type = other DNA
gaggtccttctaagaagcgg

SEQ ID NO: 208142 - DNA, 20 bp, synthetic construct
  source 1..20: mol_type = other DNA
agaggtccttctaagaagcg

SEQ ID NO: 208143 - DNA, 20 bp, synthetic construct
  source 1..20: mol_type = other DNA
cagaggtccttctaagaagc

SEQ ID NO: 208144 - DNA, 20 bp, synthetic construct
  source 1..20: mol_type = other DNA
tcagaggtccttctaagaag

SEQ ID NO: 208145 - DNA, 20 bp, synthetic construct
  source 1..20: mol_type = other DNA
atcagaggtccttctaagaa

SEQ ID NO: 208146 - DNA, 20 bp, synthetic construct
  source 1..20: mol_type = other DNA
gatcagaggtccttctaaga

SEQ ID NO: 208147 - DNA, 20 bp, synthetic construct
  source 1..20: mol_type = other DNA
ggatcagaggtccttctaag

SEQ ID NO: 208148 - DNA, 20 bp, synthetic construct
  source 1..20: mol_type = other DNA
aggatcagaggtccttctaa

SEQ ID NO: 208149 - DNA, 20 bp, synthetic construct
  source 1..20: mol_type = other DNA
taggatcagaggtccttcta

SEQ ID NO: 208150 - DNA, 20 bp, synthetic construct
  source 1..20: mol_type = other DNA
gtaggatcagaggtccttct

SEQ ID NO: 208151 - DNA, 20 bp, synthetic construct
  source 1..20: mol_type = other DNA
agtaggatcagaggtccttc

SEQ ID NO: 208152 - DNA, 20 bp, synthetic construct
  source 1..20: mol_type = other DNA
cagtaggatcagaggtcctt

SEQ ID NO: 208153 - DNA, 20 bp, synthetic construct
  source 1..20: mol_type = other DNA
tcagtaggatcagaggtcct

SEQ ID NO: 208154 - DNA, 20 bp, synthetic construct
  source 1..20: mol_type = other DNA
ctcagtaggatcagaggtcc

SEQ ID NO: 208155 - DNA, 20 bp, synthetic construct
  source 1..20: mol_type = other DNA
actcagtaggatcagaggtc

SEQ ID NO: 208156 - DNA, 20 bp, synthetic construct
  source 1..20: mol_type = other DNA
aactcagtaggatcagaggt

SEQ ID NO: 208157 - DNA, 20 bp, synthetic construct
  source 1..20: mol_type = other DNA
aaactcagtaggatcagagg

SEQ ID NO: 208158 - DNA, 20 bp, synthetic construct
  source 1..20: mol_type = other DNA
taaactcagtaggatcagag

SEQ ID NO: 208159 - DNA, 20 bp, synthetic construct
  source 1..20: mol_type = other DNA
ttaaactcagtaggatcaga

SEQ ID NO: 208160 - DNA, 20 bp, synthetic construct
  source 1..20: mol_type = other DNA
attaaactcagtaggatcag

SEQ ID NO: 208161 - DNA, 20 bp, synthetic construct
  source 1..20: mol_type = other DNA
tattaaactcagtaggatca

SEQ ID NO: 208162 - DNA, 20 bp, synthetic construct
  source 1..20: mol_type = other DNA
gtattaaactcagtaggatc

SEQ ID NO: 208163 - DNA, 20 bp, synthetic construct
  source 1..20: mol_type = other DNA
ggtattaaactcagtaggat

SEQ ID NO: 208164 - DNA, 20 bp, synthetic construct
  source 1..20: mol_type = other DNA
gggtattaaactcagtagga

SEQ ID NO: 208165 - DNA, 20 bp, synthetic construct
  source 1..20: mol_type = other DNA
tgggtattaaactcagtagg

SEQ ID NO: 208166 - DNA, 20 bp, synthetic construct
  source 1..20: mol_type = other DNA
gtgggtattaaactcagtag

SEQ ID NO: 208167 - DNA, 20 bp, synthetic construct
  source 1..20: mol_type = other DNA
cgtgggtattaaactcagta

SEQ ID NO: 208168 - DNA, 20 bp, synthetic construct
  source 1..20: mol_type = other DNA
ccgtgggtattaaactcagt

SEQ ID NO: 208169 - DNA, 20 bp, synthetic construct
  source 1..20: mol_type = other DNA
cccgtgggtattaaactcag

SEQ ID NO: 208170 - DNA, 20 bp, synthetic construct
  source 1..20: mol_type = other DNA
acccgtgggtattaaactca

SEQ ID NO: 208171 - DNA, 20 bp, synthetic construct
  source 1..20: mol_type = other DNA
aacccgtgggtattaaactc

SEQ ID NO: 208172 - DNA, 20 bp, synthetic construct
  source 1..20: mol_type = other DNA
taacccgtgggtattaaact

SEQ ID NO: 208173 - DNA, 20 bp, synthetic construct
  source 1..20: mol_type = other DNA
ttaacccgtgggtattaaac

SEQ ID NO: 208174 - DNA, 20 bp, synthetic construct
  source 1..20: mol_type = other DNA
attaacccgtgggtattaaa

SEQ ID NO: 208175 - DNA, 20 bp, synthetic construct
  source 1..20: mol_type = other DNA
tattaacccgtgggtattaa

SEQ ID NO: 208176 - DNA, 20 bp, synthetic construct
  source 1..20: mol_type = other DNA
ttattaacccgtgggtatta

SEQ ID NO: 208177 - DNA, 20 bp, synthetic construct
  source 1..20: mol_type = other DNA
attattaacccgtgggtatt

SEQ ID NO: 208178 - DNA, 20 bp, synthetic construct
  source 1..20: mol_type = other DNA
aattattaacccgtgggtat

SEQ ID NO: 208179 - DNA, 20 bp, synthetic construct
  source 1..20: mol_type = other DNA
caattattaacccgtgggta

SEQ ID NO: 208180 - DNA, 20 bp, synthetic construct
  source 1..20: mol_type = other DNA
ccaattattaacccgtgggt

SEQ ID NO: 208181 - DNA, 20 bp, synthetic construct
  source 1..20: mol_type = other DNA
cccaattattaacccgtggg

SEQ ID NO: 208182 - DNA, 20 bp, synthetic construct
  source 1..20: mol_type = other DNA
tcccaattattaacccgtgg

SEQ ID NO: 208183 - DNA, 20 bp, synthetic construct
  source 1..20: mol_type = other DNA
ttcccaattattaacccgtg

SEQ ID NO: 208184 - DNA, 20 bp, synthetic construct
  source 1..20: mol_type = other DNA
tttcccaattattaacccgt

SEQ ID NO: 208185 - DNA, 20 bp, synthetic construct
  source 1..20: mol_type = other DNA
ttttcccaattattaacccg

SEQ ID NO: 208186 - DNA, 20 bp, synthetic construct
  source 1..20: mol_type = other DNA
cttttcccaattattaaccc

SEQ ID NO: 208187 - DNA, 20 bp, synthetic construct
  source 1..20: mol_type = other DNA
gcttttcccaattattaacc

SEQ ID NO: 208188 - DNA, 20 bp, synthetic construct
  source 1..20: mol_type = other DNA
tgcttttcccaattattaac

SEQ ID NO: 208189 - DNA, 20 bp, synthetic construct
  source 1..20: mol_type = other DNA
ttgcttttcccaattattaa

SEQ ID NO: 208190 - DNA, 20 bp, synthetic construct
  source 1..20: mol_type = other DNA
tttgcttttcccaattatta

SEQ ID NO: 208191 - DNA, 20 bp, synthetic construct
  source 1..20: mol_type = other DNA
ctttgcttttcccaattatt

SEQ ID NO: 208192 - DNA, 20 bp, synthetic construct
  source 1..20: mol_type = other DNA
cctttgcttttcccaattat

SEQ ID NO: 208193 - DNA, 20 bp, synthetic construct
  source 1..20: mol_type = other DNA
tcctttgcttttcccaatta

SEQ ID NO: 208194 - DNA, 20 bp, synthetic construct
  source 1..20: mol_type = other DNA
ttcctttgcttttcccaatt

SEQ ID NO: 208195 - DNA, 20 bp, synthetic construct
  source 1..20: mol_type = other DNA
cttcctttgcttttcccaat

SEQ ID NO: 208196 - DNA, 20 bp, synthetic construct
  source 1..20: mol_type = other DNA
gcttcctttgcttttcccaa

SEQ ID NO: 208197 - DNA, 20 bp, synthetic construct
  source 1..20: mol_type = other DNA
cgcttcctttgcttttccca

SEQ ID NO: 208198 - DNA, 20 bp, synthetic construct
  source 1..20: mol_type = other DNA
gcgcttcctttgcttttccc

SEQ ID NO: 208199 - DNA, 20 bp, synthetic construct
  source 1..20: mol_type = other DNA
agcgcttcctttgcttttcc

SEQ ID NO: 208200 - DNA, 20 bp, synthetic construct
  source 1..20: mol_type = other DNA
aagcgcttcctttgcttttc

SEQ ID NO: 208201 - DNA, 20 bp, synthetic construct
  source 1..20: mol_type = other DNA
gaagcgcttcctttgctttt

SEQ ID NO: 208202 - DNA, 20 bp, synthetic construct
  source 1..20: mol_type = other DNA
agaagcgcttcctttgcttt

SEQ ID NO: 208203 - DNA, 20 bp, synthetic construct
  source 1..20: mol_type = other DNA
cagaagcgcttcctttgctt

SEQ ID NO: 208204 - DNA, 20 bp, synthetic construct
  source 1..20: mol_type = other DNA
acagaagcgcttcctttgct

SEQ ID NO: 208205 - DNA, 20 bp, synthetic construct
  source 1..20: mol_type = other DNA
aacagaagcgcttcctttgc

SEQ ID NO: 208206 - DNA, 20 bp, synthetic construct
  source 1..20: mol_type = other DNA
aaacagaagcgcttcctttg

SEQ ID NO: 208207 - DNA, 20 bp, synthetic construct
  source 1..20: mol_type = other DNA
taaacagaagcgcttccttt

SEQ ID NO: 208208 - DNA, 20 bp, synthetic construct
  source 1..20: mol_type = other DNA
ctaaacagaagcgcttcctt

SEQ ID NO: 208209 - DNA, 20 bp, synthetic construct
  source 1..20: mol_type = other DNA
cctaaacagaagcgcttcct

SEQ ID NO: 208210 - DNA, 20 bp, synthetic construct
  source 1..20: mol_type = other DNA
acctaaacagaagcgcttcc

SEQ ID NO: 208211 - DNA, 20 bp, synthetic construct
  source 1..20: mol_type = other DNA
tacctaaacagaagcgcttc

SEQ ID NO: 208212 - DNA, 20 bp, synthetic construct
  source 1..20: mol_type = other DNA
ttacctaaacagaagcgctt

SEQ ID NO: 208213 - DNA, 20 bp, synthetic construct
  source 1..20: mol_type = other DNA
attacctaaacagaagcgct

SEQ ID NO: 208214 - DNA, 20 bp, synthetic construct
  source 1..20: mol_type = other DNA
aattacctaaacagaagcgc

SEQ ID NO: 208215 - DNA, 20 bp, synthetic construct
  source 1..20: mol_type = other DNA
taattacctaaacagaagcg

SEQ ID NO: 208216 - DNA, 20 bp, synthetic construct
  source 1..20: mol_type = other DNA
ataattacctaaacagaagc

SEQ ID NO: 208217 - DNA, 20 bp, synthetic construct
  source 1..20: mol_type = other DNA
tataattacctaaacagaag

SEQ ID NO: 208218 - DNA, 20 bp, synthetic construct
  source 1..20: mol_type = other DNA
atataattacctaaacagaa

SEQ ID NO: 208219 - DNA, 20 bp, synthetic construct
  source 1..20: mol_type = other DNA
catataattacctaaacaga

SEQ ID NO: 208220 - DNA, 20 bp, synthetic construct
  source 1..20: mol_type = other DNA
gcatataattacctaaacag

SEQ ID NO: 208221 - DNA, 20 bp, synthetic construct
  source 1..20: mol_type = other DNA
tgcatataattacctaaaca

SEQ ID NO: 208222 - DNA, 20 bp, synthetic construct
  source 1..20: mol_type = other DNA
atgcatataattacctaaac

SEQ ID NO: 208223 - DNA, 20 bp, synthetic construct
  source 1..20: mol_type = other DNA
catgcatataattacctaaa

SEQ ID NO: 208224 - DNA, 20 bp, synthetic construct
  source 1..20: mol_type = other DNA
acatgcatataattacctaa

SEQ ID NO: 208225 - DNA, 20 bp, synthetic construct
  source 1..20: mol_type = other DNA
aacatgcatataattaccta

SEQ ID NO: 208226 - DNA, 20 bp, synthetic construct
  source 1..20: mol_type = other DNA
aaacatgcatataattacct

SEQ ID NO: 208227 - DNA, 20 bp, synthetic construct
  source 1..20: mol_type = other DNA
aaaacatgcatataattacc

SEQ ID NO: 208228 - DNA, 20 bp, synthetic construct
  source 1..20: mol_type = other DNA
aaaaacatgcatataattac

SEQ ID NO: 208229 - DNA, 20 bp, synthetic construct
  source 1..20: mol_type = other DNA
caaaaacatgcatataatta

SEQ ID NO: 208230 - DNA, 20 bp, synthetic construct
  source 1..20: mol_type = other DNA
acaaaaacatgcatataatt

SEQ ID NO: 208231 - DNA, 20 bp, synthetic construct
  source 1..20: mol_type = other DNA
gacaaaaacatgcatataat

SEQ ID NO: 208232 - DNA, 20 bp, synthetic construct
  source 1..20: mol_type = other DNA
agacaaaaacatgcatataa

SEQ ID NO: 208233 - DNA, 20 bp, synthetic construct
  source 1..20: mol_type = other DNA
aagacaaaaacatgcatata

SEQ ID NO: 208234 - DNA, 20 bp, synthetic construct
  source 1..20: mol_type = other DNA
aaagacaaaaacatgcatat

SEQ ID NO: 208235 - DNA, 20 bp, synthetic construct
  source 1..20: mol_type = other DNA
aaaagacaaaaacatgcata

SEQ ID NO: 208236 - DNA, 20 bp, synthetic construct
  source 1..20: mol_type = other DNA
aaaaagacaaaaacatgcat

SEQ ID NO: 208237 - DNA, 20 bp, synthetic construct
  source 1..20: mol_type = other DNA
gaaaaagacaaaaacatgca

SEQ ID NO: 208238 - DNA, 20 bp, synthetic construct
  source 1..20: mol_type = other DNA
agaaaaagacaaaaacatgc

SEQ ID NO: 208239 - DNA, 20 bp, synthetic construct
  source 1..20: mol_type = other DNA
cagaaaaagacaaaaacatg

SEQ ID NO: 208240 - DNA, 20 bp, synthetic construct
  source 1..20: mol_type = other DNA
ccagaaaaagacaaaaacat

SEQ ID NO: 208241 - DNA, 20 bp, synthetic construct
  source 1..20: mol_type = other DNA
gccagaaaaagacaaaaaca

SEQ ID NO: 208242 - DNA, 20 bp, synthetic construct
  source 1..20: mol_type = other DNA
agccagaaaaagacaaaaac

SEQ ID NO: 208243 - DNA, 20 bp, synthetic construct
  source 1..20: mol_type = other DNA
cagccagaaaaagacaaaaa

SEQ ID NO: 208244 - DNA, 20 bp, synthetic construct
  source 1..20: mol_type = other DNA
ccagccagaaaaagacaaaa

SEQ ID NO: 208245 - DNA, 20 bp, synthetic construct
  source 1..20: mol_type = other DNA
tccagccagaaaaagacaaa

SEQ ID NO: 208246 - DNA, 20 bp, synthetic construct
  source 1..20: mol_type = other DNA
ttccagccagaaaaagacaa

SEQ ID NO: 208247 - DNA, 20 bp, synthetic construct
  source 1..20: mol_type = other DNA
tttccagccagaaaaagaca

SEQ ID NO: 208248 - DNA, 20 bp, synthetic construct
  source 1..20: mol_type = other DNA
ctttccagccagaaaaagac

SEQ ID NO: 208249 - DNA, 20 bp, synthetic construct
  source 1..20: mol_type = other DNA
tctttccagccagaaaaaga

SEQ ID NO: 208250 - DNA, 20 bp, synthetic construct
  source 1..20: mol_type = other DNA
atctttccagccagaaaaag

SEQ ID NO: 208251 - DNA, 20 bp, synthetic construct
  source 1..20: mol_type = other DNA
tatctttccagccagaaaaa

SEQ ID NO: 208252 - DNA, 20 bp, synthetic construct
  source 1..20: mol_type = other DNA
atatctttccagccagaaaa

SEQ ID NO: 208253 - DNA, 20 bp, synthetic construct
  source 1..20: mol_type = other DNA
gatatctttccagccagaaa

SEQ ID NO: 208254 - DNA, 20 bp, synthetic construct
  source 1..20: mol_type = other DNA
ggatatctttccagccagaa

SEQ ID NO: 208255 - DNA, 20 bp, synthetic construct
  source 1..20: mol_type = other DNA
tggatatctttccagccaga

SEQ ID NO: 208256 - DNA, 20 bp, synthetic construct
  source 1..20: mol_type = other DNA
ttggatatctttccagccag

SEQ ID NO: 208257 - DNA, 20 bp, synthetic construct
  source 1..20: mol_type = other DNA
cttggatatctttccagcca

SEQ ID NO: 208258 - DNA, 20 bp, synthetic construct
  source 1..20: mol_type = other DNA
gcttggatatctttccagcc

SEQ ID NO: 208259 - DNA, 20 bp, synthetic construct
  source 1..20: mol_type = other DNA
ggcttggatatctttccagc

SEQ ID NO: 208260 - DNA, 20 bp, synthetic construct
  source 1..20: mol_type = other DNA
tggcttggatatctttccag

SEQ ID NO: 208261 - DNA, 20 bp, synthetic construct
  source 1..20: mol_type = other DNA
gtggcttggatatctttcca

SEQ ID NO: 208262 - DNA, 20 bp, synthetic construct
  source 1..20: mol_type = other DNA
agtggcttggatatctttcc

SEQ ID NO: 208263 - DNA, 20 bp, synthetic construct
  source 1..20: mol_type = other DNA
cagtggcttggatatctttc

SEQ ID NO: 208264 - DNA, 20 bp, synthetic construct
  source 1..20: mol_type = other DNA
ccagtggcttggatatcttt

SEQ ID NO: 208265 - DNA, 20 bp, synthetic construct
  source 1..20: mol_type = other DNA
cccagtggcttggatatctt

SEQ ID NO: 208266 - DNA, 20 bp, synthetic construct
  source 1..20: mol_type = other DNA
tcccagtggcttggatatct

SEQ ID NO: 208267 - DNA, 20 bp, synthetic construct
  source 1..20: mol_type = other DNA
ttcccagtggcttggatatc

SEQ ID NO: 208268 - DNA, 20 bp, synthetic construct
  source 1..20: mol_type = other DNA
cttcccagtggcttggatat

SEQ ID NO: 208269 - DNA, 20 bp, synthetic construct
  source 1..20: mol_type = other DNA
ccttcccagtggcttggata

SEQ ID NO: 208270 - DNA, 20 bp, synthetic construct
  source 1..20: mol_type = other DNA
accttcccagtggcttggat

SEQ ID NO: 208271 - DNA, 20 bp, synthetic construct
  source 1..20: mol_type = other DNA
gaccttcccagtggcttgga

SEQ ID NO: 208272 - DNA, 20 bp, synthetic construct
  source 1..20: mol_type = other DNA
ggaccttcccagtggcttgg

SEQ ID NO: 208273 - DNA, 20 bp, synthetic construct
  source 1..20: mol_type = other DNA
cggaccttcccagtggcttg

SEQ ID NO: 208274 - DNA, 20 bp, synthetic construct
  source 1..20: mol_type = other DNA
acggaccttcccagtggctt

SEQ ID NO: 208275 - DNA, 20 bp, synthetic construct
  source 1..20: mol_type = other DNA
cacggaccttcccagtggct

SEQ ID NO: 208276 - DNA, 20 bp, synthetic construct
  source 1..20: mol_type = other DNA
ccacggaccttcccagtggc

SEQ ID NO: 208277 - DNA, 20 bp, synthetic construct
  source 1..20: mol_type = other DNA
gccacggaccttcccagtgg

SEQ ID NO: 208278 - DNA, 20 bp, synthetic construct
  source 1..20: mol_type = other DNA
agccacggaccttcccagtg

SEQ ID NO: 208279 - DNA, 20 bp, synthetic construct
  source 1..20: mol_type = other DNA
tagccacggaccttcccagt

SEQ ID NO: 208280 - DNA, 20 bp, synthetic construct
  source 1..20: mol_type = other DNA
gtagccacggaccttcccag

SEQ ID NO: 208281 - DNA, 20 bp, synthetic construct
  source 1..20: mol_type = other DNA
ggtagccacggaccttccca

SEQ ID NO: 208282 - DNA, 20 bp, synthetic construct
  source 1..20: mol_type = other DNA
gggtagccacggaccttccc

SEQ ID NO: 208283 - DNA, 20 bp, synthetic construct
  source 1..20: mol_type = other DNA
tgggtagccacggaccttcc

SEQ ID NO: 208284 - DNA, 20 bp, synthetic construct
  source 1..20: mol_type = other DNA
ctgggtagccacggaccttc

SEQ ID NO: 208285 - DNA, 20 bp, synthetic construct
  source 1..20: mol_type = other DNA
cctgggtagccacggacctt

SEQ ID NO: 208286 - DNA, 20 bp, synthetic construct
  source 1..20: mol_type = other DNA
ccctgggtagccacggacct

SEQ ID NO: 208287 - DNA, 20 bp, synthetic construct
  source 1..20: mol_type = other DNA
accctgggtagccacggacc

SEQ ID NO: 208288 - DNA, 20 bp, synthetic construct
  source 1..20: mol_type = other DNA
taccctgggtagccacggac

SEQ ID NO: 208289 - DNA, 20 bp, synthetic construct
  source 1..20: mol_type = other DNA
ctaccctgggtagccacgga

SEQ ID NO: 208290 - DNA, 20 bp, synthetic construct
  source 1..20: mol_type = other DNA
gctaccctgggtagccacgg

SEQ ID NO: 208291 - DNA, 20 bp, synthetic construct
  source 1..20: mol_type = other DNA
ggctaccctgggtagccacg

SEQ ID NO: 208292 - DNA, 20 bp, synthetic construct
  source 1..20: mol_type = other DNA
gggctaccctgggtagccac

SEQ ID NO: 208293 - DNA, 20 bp, synthetic construct
  source 1..20: mol_type = other DNA
agggctaccctgggtagcca

SEQ ID NO: 208294 - DNA, 20 bp, synthetic construct
  source 1..20: mol_type = other DNA
gagggctaccctgggtagcc

SEQ ID NO: 208295 - DNA, 20 bp, synthetic construct
  source 1..20: mol_type = other DNA
agagggctaccctgggtagc

SEQ ID NO: 208296 - DNA, 20 bp, synthetic construct
  source 1..20: mol_type = other DNA
gagagggctaccctgggtag

SEQ ID NO: 208297 - DNA, 20 bp, synthetic construct
  source 1..20: mol_type = other DNA
agagagggctaccctgggta

SEQ ID NO: 208298 - DNA, 20 bp, synthetic construct
  source 1..20: mol_type = other DNA
cagagagggctaccctgggt

SEQ ID NO: 208299 - DNA, 20 bp, synthetic construct
  source 1..20: mol_type = other DNA
ccagagagggctaccctggg

SEQ ID NO: 208300 - DNA, 20 bp, synthetic construct
  source 1..20: mol_type = other DNA
cccagagagggctaccctgg

SEQ ID NO: 208301 - DNA, 20 bp, synthetic construct
  source 1..20: mol_type = other DNA
ccccagagagggctaccctg

SEQ ID NO: 208302 - DNA, 20 bp, synthetic construct
  source 1..20: mol_type = other DNA
tccccagagagggctaccct

SEQ ID NO: 208303 - DNA, 20 bp, synthetic construct
  source 1..20: mol_type = other DNA
ctccccagagagggctaccc

SEQ ID NO: 208304 - DNA, 20 bp, synthetic construct
  source 1..20: mol_type = other DNA
cctccccagagagggctacc

SEQ ID NO: 208305 - DNA, 20 bp, synthetic construct
  source 1..20: mol_type = other DNA
ccctccccagagagggctac

SEQ ID NO: 208306 - DNA, 20 bp, synthetic construct
  source 1..20: mol_type = other DNA
gccctccccagagagggcta

SEQ ID NO: 208307 - DNA, 20 bp, synthetic construct
  source 1..20: mol_type = other DNA
agccctccccagagagggct

SEQ ID NO: 208308 - DNA, 20 bp, synthetic construct
  source 1..20: mol_type = other DNA
cagccctccccagagagggc

SEQ ID NO: 208309 - DNA, 20 bp, synthetic construct
  source 1..20: mol_type = other DNA
gcagccctccccagagaggg

SEQ ID NO: 208310 - DNA, 20 bp, synthetic construct
  source 1..20: mol_type = other DNA
agcagccctccccagagagg

SEQ ID NO: 208311 - DNA, 20 bp, synthetic construct
  source 1..20: mol_type = other DNA
tagcagccctccccagagag

SEQ ID NO: 208312 - DNA, 20 bp, synthetic construct
  source 1..20: mol_type = other DNA
atagcagccctccccagaga

SEQ ID NO: 208313 - DNA, 20 bp, synthetic construct
  source 1..20: mol_type = other DNA
tatagcagccctccccagag

SEQ ID NO: 208314 - DNA, 20 bp, synthetic construct
  source 1..20: mol_type = other DNA
atatagcagccctccccaga

SEQ ID NO: 208315 - DNA, 20 bp, synthetic construct
  source 1..20: mol_type = other DNA
gatatagcagccctccccag

SEQ ID NO: 208316 - DNA, 20 bp, synthetic construct
  source 1..20: mol_type = other DNA
ggatatagcagccctcccca

SEQ ID NO: 208317 - DNA, 20 bp, synthetic construct
  source 1..20: mol_type = other DNA
tggatatagcagccctcccc

SEQ ID NO: 208318 - DNA, 20 bp, synthetic construct
  source 1..20: mol_type = other DNA
ttggatatagcagccctccc

SEQ ID NO: 208319 - DNA, 20 bp, synthetic construct
  source 1..20: mol_type = other DNA
cttggatatagcagccctcc

SEQ ID NO: 208320 - DNA, 20 bp, synthetic construct
  source 1..20: mol_type = other DNA
tcttggatatagcagccctc

SEQ ID NO: 208321 - DNA, 20 bp, synthetic construct
  source 1..20: mol_type = other DNA
ctcttggatatagcagccct

SEQ ID NO: 208322 - DNA, 20 bp, synthetic construct
  source 1..20: mol_type = other DNA
gctcttggatatagcagccc

SEQ ID NO: 208323 - DNA, 20 bp, synthetic construct
  source 1..20: mol_type = other DNA
ggctcttggatatagcagcc

SEQ ID NO: 208324 - DNA, 20 bp, synthetic construct
  source 1..20: mol_type = other DNA
gggctcttggatatagcagc

SEQ ID NO: 208325 - DNA, 20 bp, synthetic construct
  source 1..20: mol_type = other DNA
ggggctcttggatatagcag

SEQ ID NO: 208326 - DNA, 20 bp, synthetic construct
  source 1..20: mol_type = other DNA
aggggctcttggatatagca

SEQ ID NO: 208327 - DNA, 20 bp, synthetic construct
  source 1..20: mol_type = other DNA
gaggggctcttggatatagc

SEQ ID NO: 208328 - DNA, 20 bp, synthetic construct
  source 1..20: mol_type = other DNA
tgaggggctcttggatatag

SEQ ID NO: 208329 - DNA, 20 bp, synthetic construct
  source 1..20: mol_type = other DNA
atgaggggctcttggatata

SEQ ID NO: 208330 - DNA, 20 bp, synthetic construct
  source 1..20: mol_type = other DNA
catgaggggctcttggatat

SEQ ID NO: 208331 - DNA, 20 bp, synthetic construct
  source 1..20: mol_type = other DNA
tcatgaggggctcttggata

SEQ ID NO: 208332 - DNA, 20 bp, synthetic construct
  source 1..20: mol_type = other DNA
ctcatgaggggctcttggat

SEQ ID NO: 208333 - DNA, 20 bp, synthetic construct
  source 1..20: mol_type = other DNA
tctcatgaggggctcttgga

SEQ ID NO: 208334 - DNA, 20 bp, synthetic construct
  source 1..20: mol_type = other DNA
ttctcatgaggggctcttgg

SEQ ID NO: 208335 - DNA, 20 bp, synthetic construct
  source 1..20: mol_type = other DNA
attctcatgaggggctcttg

SEQ ID NO: 208336 - DNA, 20 bp, synthetic construct
  source 1..20: mol_type = other DNA
aattctcatgaggggctctt

SEQ ID NO: 208337 - DNA, 20 bp, synthetic construct
  source 1..20: mol_type = other DNA
aaattctcatgaggggctct

SEQ ID NO: 208338 - DNA, 20 bp, synthetic construct
  source 1..20: mol_type = other DNA
caaattctcatgaggggctc

SEQ ID NO: 208339 - DNA, 20 bp, synthetic construct
  source 1..20: mol_type = other DNA
tcaaattctcatgaggggct

SEQ ID NO: 208340 - DNA, 20 bp, synthetic construct
  source 1..20: mol_type = other DNA
ttcaaattctcatgaggggc

SEQ ID NO: 208341 - DNA, 20 bp, synthetic construct
  source 1..20: mol_type = other DNA
tttcaaattctcatgagggg

SEQ ID NO: 208342 - DNA, 20 bp, synthetic construct
  source 1..20: mol_type = other DNA
ttttcaaattctcatgaggg

SEQ ID NO: 208343 - DNA, 20 bp, synthetic construct
  source 1..20: mol_type = other DNA
attttcaaattctcatgagg

SEQ ID NO: 208344 - DNA, 20 bp, synthetic construct
  source 1..20: mol_type = other DNA
gattttcaaattctcatgag

SEQ ID NO: 208345 - DNA, 20 bp, synthetic construct
  source 1..20: mol_type = other DNA
cgattttcaaattctcatga

SEQ ID NO: 208346 - DNA, 20 bp, synthetic construct
  source 1..20: mol_type = other DNA
tcgattttcaaattctcatg

SEQ ID NO: 208347 - DNA, 20 bp, synthetic construct
  source 1..20: mol_type = other DNA
gtcgattttcaaattctcat

SEQ ID NO: 208348 - DNA, 20 bp, synthetic construct
  source 1..20: mol_type = other DNA
ggtcgattttcaaattctca

SEQ ID NO: 208349 - DNA, 20 bp, synthetic construct
  source 1..20: mol_type = other DNA
tggtcgattttcaaattctc

SEQ ID NO: 208350 - DNA, 20 bp, synthetic construct
  source 1..20: mol_type = other DNA
atggtcgattttcaaattct

SEQ ID NO: 208351 - DNA, 20 bp, synthetic construct
  source 1..20: mol_type = other DNA
catggtcgattttcaaattc

SEQ ID NO: 208352 - DNA, 20 bp, synthetic construct
  source 1..20: mol_type = other DNA
ccatggtcgattttcaaatt

SEQ ID NO: 208353 - DNA, 20 bp, synthetic construct
  source 1..20: mol_type = other DNA
accatggtcgattttcaaat

SEQ ID NO: 208354 - DNA, 20 bp, synthetic construct
  source 1..20: mol_type = other DNA
taccatggtcgattttcaaa

SEQ ID NO: 208355 - DNA, 20 bp, synthetic construct
  source 1..20: mol_type = other DNA
ctaccatggtcgattttcaa

SEQ ID NO: 208356 - DNA, 20 bp, synthetic construct
  source 1..20: mol_type = other DNA
cctaccatggtcgattttca

SEQ ID NO: 208357 - DNA, 20 bp, synthetic construct
  source 1..20: mol_type = other DNA
ccctaccatggtcgattttc

SEQ ID NO: 208358 - DNA, 20 bp, synthetic construct
  source 1..20: mol_type = other DNA
gccctaccatggtcgatttt

SEQ ID NO: 208359 - DNA, 20 bp, synthetic construct
  source 1..20: mol_type = other DNA
ggccctaccatggtcgattt

SEQ ID NO: 208360 - DNA, 20 bp, synthetic construct
  source 1..20: mol_type = other DNA
aggccctaccatggtcgatt

SEQ ID NO: 208361 - DNA, 20 bp, synthetic construct
  source 1..20: mol_type = other DNA
caggccctaccatggtcgat

SEQ ID NO: 208362 - DNA, 20 bp, synthetic construct
  source 1..20: mol_type = other DNA
gcaggccctaccatggtcga

SEQ ID NO: 208363 - DNA, 20 bp, synthetic construct
  source 1..20: mol_type = other DNA
agcaggccctaccatggtcg

SEQ ID NO: 208364 - DNA, 20 bp, synthetic construct
  source 1..20: mol_type = other DNA
cagcaggccctaccatggtc

SEQ ID NO: 208365 - DNA, 20 bp, synthetic construct
  source 1..20: mol_type = other DNA
tcagcaggccctaccatggt

SEQ ID NO: 208366 - DNA, 20 bp, synthetic construct
  source 1..20: mol_type = other DNA
gtcagcaggccctaccatgg

SEQ ID NO: 208367 - DNA, 20 bp, synthetic construct
  source 1..20: mol_type = other DNA
agtcagcaggccctaccatg

SEQ ID NO: 208368 - DNA, 20 bp, synthetic construct
  source 1..20: mol_type = other DNA
aagtcagcaggccctaccat

SEQ ID NO: 208369 - DNA, 20 bp, synthetic construct
  source 1..20: mol_type = other DNA
aaagtcagcaggccctacca

SEQ ID NO: 208370 - DNA, 20 bp, synthetic construct
  source 1..20: mol_type = other DNA
aaaagtcagcaggccctacc

SEQ ID NO: 208371 - DNA, 20 bp, synthetic construct
  source 1..20: mol_type = other DNA
caaaagtcagcaggccctac

SEQ ID NO: 208372 - DNA, 20 bp, synthetic construct
  source 1..20: mol_type = other DNA
tcaaaagtcagcaggcccta

SEQ ID NO: 208373 - DNA, 20 bp, synthetic construct
  source 1..20: mol_type = other DNA
gtcaaaagtcagcaggccct

SEQ ID NO: 208374 - DNA, 20 bp, synthetic construct
  source 1..20: mol_type = other DNA
tgtcaaaagtcagcaggccc

SEQ ID NO: 208375 - DNA, 20 bp, synthetic construct
  source 1..20: mol_type = other DNA
ctgtcaaaagtcagcaggcc

SEQ ID NO: 208376 - DNA, 20 bp, synthetic construct
  source 1..20: mol_type = other DNA
gctgtcaaaagtcagcaggc

SEQ ID NO: 208377 - DNA, 20 bp, synthetic construct
  source 1..20: mol_type = other DNA
agctgtcaaaagtcagcagg

SEQ ID NO: 208378 - DNA, 20 bp, synthetic construct
  source 1..20: mol_type = other DNA
tagctgtcaaaagtcagcag

SEQ ID NO: 208379 - DNA, 20 bp, synthetic construct
  source 1..20: mol_type = other DNA
ttagctgtcaaaagtcagca

SEQ ID NO: 208380 - DNA, 20 bp, synthetic construct
  source 1..20: mol_type = other DNA
attagctgtcaaaagtcagc

SEQ ID NO: 208381 - DNA, 20 bp, synthetic construct
  source 1..20: mol_type = other DNA
cattagctgtcaaaagtcag

SEQ ID NO: 208382 - DNA, 20 bp, synthetic construct
  source 1..20: mol_type = other DNA
ccattagctgtcaaaagtca

SEQ ID NO: 208383 - DNA, 20 bp, synthetic construct
  source 1..20: mol_type = other DNA
accattagctgtcaaaagtc

SEQ ID NO: 208384 - DNA, 20 bp, synthetic construct
  source 1..20: mol_type = other DNA
caccattagctgtcaaaagt

SEQ ID NO: 208385 - DNA, 20 bp, synthetic construct
  source 1..20: mol_type = other DNA
acaccattagctgtcaaaag

SEQ ID NO: 208386 - DNA, 20 bp, synthetic construct
  source 1..20: mol_type = other DNA
cacaccattagctgtcaaaa

SEQ ID NO: 208387 - DNA, 20 bp, synthetic construct
  source 1..20: mol_type = other DNA
gcacaccattagctgtcaaa

SEQ ID NO: 208388 - DNA, 20 bp, synthetic construct
  source 1..20: mol_type = other DNA
agcacaccattagctgtcaa

SEQ ID NO: 208389 - DNA, 20 bp, synthetic construct
  source 1..20: mol_type = other DNA
cagcacaccattagctgtca

SEQ ID NO: 208390 - DNA, 20 bp, synthetic construct
  source 1..20: mol_type = other DNA
tcagcacaccattagctgtc

SEQ ID NO: 208391 - DNA, 20 bp, synthetic construct
  source 1..20: mol_type = other DNA
ctcagcacaccattagctgt

SEQ ID NO: 208392 - DNA, 20 bp, synthetic construct
  source 1..20: mol_type = other DNA
tctcagcacaccattagctg

SEQ ID NO: 208393 - DNA, 20 bp, synthetic construct
  source 1..20: mol_type = other DNA
ttctcagcacaccattagct

SEQ ID NO: 208394 - DNA, 20 bp, synthetic construct
  source 1..20: mol_type = other DNA
attctcagcacaccattagc

SEQ ID NO: 208395 - DNA, 20 bp, synthetic construct
  source 1..20: mol_type = other DNA
aattctcagcacaccattag

SEQ ID NO: 208396 - DNA, 20 bp, synthetic construct
  source 1..20: mol_type = other DNA
caattctcagcacaccatta

SEQ ID NO: 208397 - DNA, 20 bp, synthetic construct
  source 1..20: mol_type = other DNA
acaattctcagcacaccatt

SEQ ID NO: 208398 - DNA, 20 bp, synthetic construct
  source 1..20: mol_type = other DNA
gacaattctcagcacaccat

SEQ ID NO: 208399 - DNA, 20 bp, synthetic construct
  source 1..20: mol_type = other DNA
ggacaattctcagcacacca

SEQ ID NO: 208400 - DNA, 20 bp, synthetic construct
  source 1..20: mol_type = other DNA
gggacaattctcagcacacc

SEQ ID NO: 208401 - DNA, 20 bp, synthetic construct
  source 1..20: mol_type = other DNA
agggacaattctcagcacac

SEQ ID NO: 208402 - DNA, 20 bp, synthetic construct
  source 1..20: mol_type = other DNA
gagggacaattctcagcaca

SEQ ID NO: 208403 - DNA, 20 bp, synthetic construct
  source 1..20: mol_type = other DNA
ggagggacaattctcagcac

SEQ ID NO: 208404 - DNA, 20 bp, synthetic construct
  source 1..20: mol_type = other DNA
tggagggacaattctcagca

SEQ ID NO: 208405 - DNA, 20 bp, synthetic construct
  source 1..20: mol_type = other DNA
ttggagggacaattctcagc

SEQ ID NO: 208406 - DNA, 20 bp, synthetic construct
  source 1..20: mol_type = other DNA
tttggagggacaattctcag

SEQ ID NO: 208407 - DNA, 20 bp, synthetic construct
  source 1..20: mol_type = other DNA
ctttggagggacaattctca

SEQ ID NO: 208408 - DNA, 20 bp, synthetic construct
  source 1..20: mol_type = other DNA
tctttggagggacaattctc

SEQ ID NO: 208409 - DNA, 20 bp, synthetic construct
  source 1..20: mol_type = other DNA
atctttggagggacaattct

SEQ ID NO: 208410 - DNA, 20 bp, synthetic construct
  source 1..20: mol_type = other DNA
catctttggagggacaattc

SEQ ID NO: 208411 - DNA, 20 bp, synthetic construct
  source 1..20: mol_type = other DNA
gcatctttggagggacaatt

SEQ ID NO: 208412 - DNA, 20 bp, synthetic construct
  source 1..20: mol_type = other DNA
ggcatctttggagggacaat

SEQ ID NO: 208413 - DNA, 20 bp, synthetic construct
  source 1..20: mol_type = other DNA
aggcatctttggagggacaa

SEQ ID NO: 208414 - DNA, 20 bp, synthetic construct
  source 1..20: mol_type = other DNA
aaggcatctttggagggaca

SEQ ID NO: 208415 - DNA, 20 bp, synthetic construct
  source 1..20: mol_type = other DNA
aaaggcatctttggagggac

SEQ ID NO: 208416 - DNA, 20 bp, synthetic construct
  source 1..20: mol_type = other DNA
gaaaggcatctttggaggga

SEQ ID NO: 208417 - DNA, 20 bp, synthetic construct
  source 1..20: mol_type = other DNA
ggaaaggcatctttggaggg

SEQ ID NO: 208418 - DNA, 20 bp, synthetic construct
  source 1..20: mol_type = other DNA
tggaaaggcatctttggagg

SEQ ID NO: 208419 - DNA, 20 bp, synthetic construct
  source 1..20: mol_type = other DNA
atggaaaggcatctttggag

SEQ ID NO: 208420 - DNA, 20 bp, synthetic construct
  source 1..20: mol_type = other DNA
aatggaaaggcatctttgga

SEQ ID NO: 208421 - DNA, 20 bp, synthetic construct
  source 1..20: mol_type = other DNA
gaatggaaaggcatctttgg

SEQ ID NO: 208422 - DNA, 20 bp, synthetic construct
  source 1..20: mol_type = other DNA
ggaatggaaaggcatctttg

SEQ ID NO: 208423 - DNA, 20 bp, synthetic construct
  source 1..20: mol_type = other DNA
gggaatggaaaggcatcttt

SEQ ID NO: 208424 - DNA, 20 bp, synthetic construct
  source 1..20: mol_type = other DNA
agggaatggaaaggcatctt

SEQ ID NO: 208425 - DNA, 20 bp, synthetic construct
  source 1..20: mol_type = other DNA
gagggaatggaaaggcatct

SEQ ID NO: 208426 - DNA, 20 bp, synthetic construct
  source 1..20: mol_type = other DNA
cgagggaatggaaaggcatc

SEQ ID NO: 208427 - DNA, 20 bp, synthetic construct
  source 1..20: mol_type = other DNA
ccgagggaatggaaaggcat

SEQ ID NO: 208428 - DNA, 20 bp, synthetic construct
  source 1..20: mol_type = other DNA
cccgagggaatggaaaggca

SEQ ID NO: 208429 - DNA, 20 bp, synthetic construct
  source 1..20: mol_type = other DNA
tcccgagggaatggaaaggc

SEQ ID NO: 208430 - DNA, 20 bp, synthetic construct
  source 1..20: mol_type = other DNA
ctcccgagggaatggaaagg

SEQ ID NO: 208431 - DNA, 20 bp, synthetic construct
  source 1..20: mol_type = other DNA
tctcccgagggaatggaaag

SEQ ID NO: 208432 - DNA, 20 bp, synthetic construct
  source 1..20: mol_type = other DNA
ctctcccgagggaatggaaa

SEQ ID NO: 208433 - DNA, 20 bp, synthetic construct
  source 1..20: mol_type = other DNA
actctcccgagggaatggaa

SEQ ID NO: 208434 - DNA, 20 bp, synthetic construct
  source 1..20: mol_type = other DNA
gactctcccgagggaatgga

SEQ ID NO: 208435 - DNA, 20 bp, synthetic construct
  source 1..20: mol_type = other DNA
agactctcccgagggaatgg

SEQ ID NO: 208436 - DNA, 20 bp, synthetic construct
  source 1..20: mol_type = other DNA
cagactctcccgagggaatg

SEQ ID NO: 208437 - DNA, 20 bp, synthetic construct
  source 1..20: mol_type = other DNA
ccagactctcccgagggaat

SEQ ID NO: 208438 - DNA, 20 bp, synthetic construct
  source 1..20: mol_type = other DNA
cccagactctcccgagggaa

SEQ ID NO: 208439 - DNA, 20 bp, synthetic construct
  source 1..20: mol_type = other DNA
gcccagactctcccgaggga

SEQ ID NO: 208440 - DNA, 20 bp, synthetic construct
  source 1..20: mol_type = other DNA
tgcccagactctcccgaggg

SEQ ID NO: 208441 - DNA, 20 bp, synthetic construct
  source 1..20: mol_type = other DNA
ctgcccagactctcccgagg

SEQ ID NO: 208442 - DNA, 20 bp, synthetic construct
  source 1..20: mol_type = other DNA
gctgcccagactctcccgag

SEQ ID NO: 208443 - DNA, 20 bp, synthetic construct
  source 1..20: mol_type = other DNA
ggctgcccagactctcccga

SEQ ID NO: 208444 - DNA, 20 bp, synthetic construct
  source 1..20: mol_type = other DNA
gggctgcccagactctcccg

SEQ ID NO: 208445 - DNA, 20 bp, synthetic construct
  source 1..20: mol_type = other DNA
ggggctgcccagactctccc

SEQ ID NO: 208446 - DNA, 20 bp, synthetic construct
  source 1..20: mol_type = other DNA
aggggctgcccagactctcc

SEQ ID NO: 208447 - DNA, 20 bp, synthetic construct
  source 1..20: mol_type = other DNA
taggggctgcccagactctc

SEQ ID NO: 208448 - DNA, 20 bp, synthetic construct
  source 1..20: mol_type = other DNA
gtaggggctgcccagactct

SEQ ID NO: 208449 - DNA, 20 bp, synthetic construct
  source 1..20: mol_type = other DNA
agtaggggctgcccagactc

SEQ ID NO: 208450 - DNA, 20 bp, synthetic construct
  source 1..20: mol_type = other DNA
cagtaggggctgcccagact

SEQ ID NO: 208451 - DNA, 20 bp, synthetic construct
  source 1..20: mol_type = other DNA
ccagtaggggctgcccagac

SEQ ID NO: 208452 - DNA, 20 bp, synthetic construct
  source 1..20: mol_type = other DNA
cccagtaggggctgcccaga

SEQ ID NO: 208453 - DNA, 20 bp, synthetic construct
  source 1..20: mol_type = other DNA
ccccagtaggggctgcccag

SEQ ID NO: 208454 - DNA, 20 bp, synthetic construct
  source 1..20: mol_type = other DNA
cccccagtaggggctgccca

SEQ ID NO: 208455 - DNA, 20 bp, synthetic construct
  source 1..20: mol_type = other DNA
gcccccagtaggggctgccc

SEQ ID NO: 208456 - DNA, 20 bp, synthetic construct
  source 1..20: mol_type = other DNA
agcccccagtaggggctgcc

SEQ ID NO: 208457 - DNA, 20 bp, synthetic construct
  source 1..20: mol_type = other DNA
cagcccccagtaggggctgc

SEQ ID NO: 208458 - DNA, 20 bp, synthetic construct
  source 1..20: mol_type = other DNA
ccagcccccagtaggggctg

SEQ ID NO: 208459 - DNA, 20 bp, synthetic construct
  source 1..20: mol_type = other DNA
cccagcccccagtaggggct

SEQ ID NO: 208460 - DNA, 20 bp, synthetic construct
  source 1..20: mol_type = other DNA
tcccagcccccagtaggggc

SEQ ID NO: 208461 - DNA, 20 bp, synthetic construct
  source 1..20: mol_type = other DNA
atcccagcccccagtagggg

SEQ ID NO: 208462 - DNA, 20 bp, synthetic construct
  source 1..20: mol_type = other DNA
catcccagcccccagtaggg

SEQ ID NO: 208463 - DNA, 20 bp, synthetic construct
  source 1..20: mol_type = other DNA
gcatcccagcccccagtagg

SEQ ID NO: 208464 - DNA, 20 bp, synthetic construct
  source 1..20: mol_type = other DNA
agcatcccagcccccagtag

SEQ ID NO: 208465 - DNA, 20 bp, synthetic construct
  source 1..20: mol_type = other DNA
cagcatcccagcccccagta

SEQ ID NO: 208466 - DNA, 20 bp, synthetic construct
  source 1..20: mol_type = other DNA
ccagcatcccagcccccagt

SEQ ID NO: 208467 - DNA, 20 bp, synthetic construct
  source 1..20: mol_type = other DNA
gccagcatcccagcccccag

SEQ ID NO: 208468 - DNA, 20 bp, synthetic construct
  source 1..20: mol_type = other DNA
agccagcatcccagccccca

SEQ ID NO: 208469 - DNA, 20 bp, synthetic construct
  source 1..20: mol_type = other DNA
gagccagcatcccagccccc

SEQ ID NO: 208470 - DNA, 20 bp, synthetic construct
  source 1..20: mol_type = other DNA
agagccagcatcccagcccc

SEQ ID NO: 208471 - DNA, 20 bp, synthetic construct
  source 1..20: mol_type = other DNA
aagagccagcatcccagccc

SEQ ID NO: 208472 - DNA, 20 bp, synthetic construct
  source 1..20: mol_type = other DNA
gaagagccagcatcccagcc

SEQ ID NO: 208473 - DNA, 20 bp, synthetic construct
  source 1..20: mol_type = other DNA
ggaagagccagcatcccagc

SEQ ID NO: 208474 - DNA, 20 bp, synthetic construct
  source 1..20: mol_type = other DNA
gggaagagccagcatcccag

SEQ ID NO: 208475 - DNA, 20 bp, synthetic construct
  source 1..20: mol_type = other DNA
agggaagagccagcatccca

SEQ ID NO: 208476 - DNA, 20 bp, synthetic construct
  source 1..20: mol_type = other DNA
gagggaagagccagcatccc

SEQ ID NO: 208477 - DNA, 20 bp, synthetic construct
  source 1..20: mol_type = other DNA
tgagggaagagccagcatcc

SEQ ID NO: 208478 - DNA, 20 bp, synthetic construct
  source 1..20: mol_type = other DNA
ctgagggaagagccagcatc

SEQ ID NO: 208479 - DNA, 20 bp, synthetic construct
  source 1..20: mol_type = other DNA
gctgagggaagagccagcat

SEQ ID NO: 208480 - DNA, 20 bp, synthetic construct
  source 1..20: mol_type = other DNA
ggctgagggaagagccagca

SEQ ID NO: 208481 - DNA, 20 bp, synthetic construct
  source 1..20: mol_type = other DNA
aggctgagggaagagccagc

SEQ ID NO: 208482 - DNA, 20 bp, synthetic construct
  source 1..20: mol_type = other DNA
gaggctgagggaagagccag

SEQ ID NO: 208483 - DNA, 20 bp, synthetic construct
  source 1..20: mol_type = other DNA
ggaggctgagggaagagcca

SEQ ID NO: 208484 - DNA, 20 bp, synthetic construct
  source 1..20: mol_type = other DNA
tggaggctgagggaagagcc

SEQ ID NO: 208485 - DNA, 20 bp, synthetic construct
  source 1..20: mol_type = other DNA
gtggaggctgagggaagagc

SEQ ID NO: 208486 - DNA, 20 bp, synthetic construct
  source 1..20: mol_type = other DNA
ggtggaggctgagggaagag

SEQ ID NO: 208487 - DNA, 20 bp, synthetic construct
  source 1..20: mol_type = other DNA
gggtggaggctgagggaaga

SEQ ID NO: 208488 - DNA, 20 bp, synthetic construct
  source 1..20: mol_type = other DNA
ggggtggaggctgagggaag

SEQ ID NO: 208489 - DNA, 20 bp, synthetic construct
  source 1..20: mol_type = other DNA
tggggtggaggctgagggaa

SEQ ID NO: 208490 - DNA, 20 bp, synthetic construct
  source 1..20: mol_type = other DNA
ttggggtggaggctgaggga

SEQ ID NO: 208491 - DNA, 20 bp, synthetic construct
  source 1..20: mol_type = other DNA
gttggggtggaggctgaggg

SEQ ID NO: 208492 - DNA, 20 bp, synthetic construct
  source 1..20: mol_type = other DNA
agttggggtggaggctgagg

SEQ ID NO: 208493 - DNA, 20 bp, synthetic construct
  source 1..20: mol_type = other DNA
cagttggggtggaggctgag

SEQ ID NO: 208494 - DNA, 20 bp, synthetic construct
  source 1..20: mol_type = other DNA
gcagttggggtggaggctga

SEQ ID NO: 208495 - DNA, 20 bp, synthetic construct
  source 1..20: mol_type = other DNA
agcagttggggtggaggctg

SEQ ID NO: 208496 - DNA, 20 bp, synthetic construct
  source 1..20: mol_type = other DNA
gagcagttggggtggaggct

SEQ ID NO: 208497 - DNA, 20 bp, synthetic construct
  source 1..20: mol_type = other DNA
agagcagttggggtggaggc

SEQ ID NO: 208498 - DNA, 20 bp, synthetic construct
  source 1..20: mol_type = other DNA
gagagcagttggggtggagg

SEQ ID NO: 208499 - DNA, 20 bp, synthetic construct
  source 1..20: mol_type = other DNA
agagagcagttggggtggag

SEQ ID NO: 208500 - DNA, 20 bp, synthetic construct
  source 1..20: mol_type = other DNA
aagagagcagttggggtgga

SEQ ID NO: 208501 - DNA, 20 bp, synthetic construct
  source 1..20: mol_type = other DNA
gaagagagcagttggggtgg

SEQ ID NO: 208502 - DNA, 20 bp, synthetic construct
  source 1..20: mol_type = other DNA
ggaagagagcagttggggtg

SEQ ID NO: 208503 - DNA, 20 bp, synthetic construct
  source 1..20: mol_type = other DNA
gggaagagagcagttggggt

SEQ ID NO: 208504 - DNA, 20 bp, synthetic construct
  source 1..20: mol_type = other DNA
agggaagagagcagttgggg

SEQ ID NO: 208505 - DNA, 20 bp, synthetic construct
  source 1..20: mol_type = other DNA
gagggaagagagcagttggg

SEQ ID NO: 208506 - DNA, 20 bp, synthetic construct
  source 1..20: mol_type = other DNA
ggagggaagagagcagttgg

SEQ ID NO: 208507 - DNA, 20 bp, synthetic construct
  source 1..20: mol_type = other DNA
aggagggaagagagcagttg

SEQ ID NO: 208508 - DNA, 20 bp, synthetic construct
  source 1..20: mol_type = other DNA
gaggagggaagagagcagtt

SEQ ID NO: 208509 - DNA, 20 bp, synthetic construct
  source 1..20: mol_type = other DNA
ggaggagggaagagagcagt

SEQ ID NO: 208510 - DNA, 20 bp, synthetic construct
  source 1..20: mol_type = other DNA
gggaggagggaagagagcag

SEQ ID NO: 208511 - DNA, 20 bp, synthetic construct
  source 1..20: mol_type = other DNA
ggggaggagggaagagagca

SEQ ID NO: 208512 - DNA, 20 bp, synthetic construct
  source 1..20: mol_type = other DNA
aggggaggagggaagagagc

SEQ ID NO: 208513 - DNA, 20 bp, synthetic construct
  source 1..20: mol_type = other DNA
gaggggaggagggaagagag

SEQ ID NO: 208514 - DNA, 20 bp, synthetic construct
  source 1..20: mol_type = other DNA
ggaggggaggagggaagaga

SEQ ID NO: 208515 - DNA, 20 bp, synthetic construct
  source 1..20: mol_type = other DNA
gggaggggaggagggaagag

SEQ ID NO: 208516 - DNA, 20 bp, synthetic construct
  source 1..20: mol_type = other DNA
ggggaggggaggagggaaga

SEQ ID NO: 208517 - DNA, 20 bp, synthetic construct
  source 1..20: mol_type = other DNA
tggggaggggaggagggaag

SEQ ID NO: 208518 - DNA, 20 bp, synthetic construct
  source 1..20: mol_type = other DNA
ctggggaggggaggagggaa

SEQ ID NO: 208519 - DNA, 20 bp, synthetic construct
  source 1..20: mol_type = other DNA
gctggggaggggaggaggga

SEQ ID NO: 208520 - DNA, 20 bp, synthetic construct
  source 1..20: mol_type = other DNA
ggctggggaggggaggaggg

SEQ ID NO: 208521 - DNA, 20 bp, synthetic construct
  source 1..20: mol_type = other DNA
gggctggggaggggaggagg

SEQ ID NO: 208522 - DNA, 20 bp, synthetic construct
  source 1..20: mol_type = other DNA
ggggctggggaggggaggag

SEQ ID NO: 208523 - DNA, 20 bp, synthetic construct
  source 1..20: mol_type = other DNA
gggggctggggaggggagga

SEQ ID NO: 208524 - DNA, 20 bp, synthetic construct
  source 1..20: mol_type = other DNA
agggggctggggaggggagg

SEQ ID NO: 208525 - DNA, 20 bp, synthetic construct
  source 1..20: mol_type = other DNA
tagggggctggggaggggag

SEQ ID NO: 208526 - DNA, 20 bp, synthetic construct
  source 1..20: mol_type = other DNA
ttagggggctggggagggga

SEQ ID NO: 208527 - DNA, 20 bp, synthetic construct
  source 1..20: mol_type = other DNA
attagggggctggggagggg

SEQ ID NO: 208528 - DNA, 20 bp, synthetic construct
  source 1..20: mol_type = other DNA
aattagggggctggggaggg

SEQ ID NO: 208529 - DNA, 20 bp, synthetic construct
  source 1..20: mol_type = other DNA
aaattagggggctggggagg

SEQ ID NO: 208530 - DNA, 20 bp, synthetic construct
  source 1..20: mol_type = other DNA
gaaattagggggctggggag

SEQ ID NO: 208531 - DNA, 20 bp, synthetic construct
  source 1..20: mol_type = other DNA
agaaattagggggctgggga

SEQ ID NO: 208532 - DNA, 20 bp, synthetic construct
  source 1..20: mol_type = other DNA
gagaaattagggggctgggg

SEQ ID NO: 208533 - DNA, 20 bp, synthetic construct
  source 1..20: mol_type = other DNA
agagaaattagggggctggg

SEQ ID NO: 208534 - DNA, 20 bp, synthetic construct
  source 1..20: mol_type = other DNA
gagagaaattagggggctgg

SEQ ID NO: 208535 - DNA, 20 bp, synthetic construct
  source 1..20: mol_type = other DNA
tgagagaaattagggggctg

SEQ ID NO: 208536 - DNA, 20 bp, synthetic construct
  source 1..20: mol_type = other DNA
gtgagagaaattagggggct

SEQ ID NO: 208537 - DNA, 20 bp, synthetic construct
  source 1..20: mol_type = other DNA
tgtgagagaaattagggggc

SEQ ID NO: 208538 - DNA, 20 bp, synthetic construct
  source 1..20: mol_type = other DNA
ttgtgagagaaattaggggg

SEQ ID NO: 208539 - DNA, 20 bp, synthetic construct
  source 1..20: mol_type = other DNA
cttgtgagagaaattagggg

SEQ ID NO: 208540 - DNA, 20 bp, synthetic construct
  source 1..20: mol_type = other DNA
ccttgtgagagaaattaggg

SEQ ID NO: 208541 - DNA, 20 bp, synthetic construct
  source 1..20: mol_type = other DNA
gccttgtgagagaaattagg

SEQ ID NO: 208542 - DNA, 20 bp, synthetic construct
  source 1..20: mol_type = other DNA
agccttgtgagagaaattag

SEQ ID NO: 208543 - DNA, 20 bp, synthetic construct
  source 1..20: mol_type = other DNA
aagccttgtgagagaaatta

SEQ ID NO: 208544 - DNA, 20 bp, synthetic construct
  source 1..20: mol_type = other DNA
aaagccttgtgagagaaatt

SEQ ID NO: 208545 - DNA, 20 bp, synthetic construct
  source 1..20: mol_type = other DNA
caaagccttgtgagagaaat

SEQ ID NO: 208546 - DNA, 20 bp, synthetic construct
  source 1..20: mol_type = other DNA
acaaagccttgtgagagaaa

SEQ ID NO: 208547 - DNA, 20 bp, synthetic construct
  source 1..20: mol_type = other DNA
aacaaagccttgtgagagaa

SEQ ID NO: 208548 - DNA, 20 bp, synthetic construct
  source 1..20: mol_type = other DNA
gaacaaagccttgtgagaga

SEQ ID NO: 208549 - DNA, 20 bp, synthetic construct
  source 1..20: mol_type = other DNA
agaacaaagccttgtgagag

SEQ ID NO: 208550 - DNA, 20 bp, synthetic construct
  source 1..20: mol_type = other DNA
cagaacaaagccttgtgaga

SEQ ID NO: 208551 - DNA, 20 bp, synthetic construct
  source 1..20: mol_type = other DNA
gcagaacaaagccttgtgag

SEQ ID NO: 208552 - DNA, 20 bp, synthetic construct
  source 1..20: mol_type = other DNA
tgcagaacaaagccttgtga

SEQ ID NO: 208553 - DNA, 20 bp, synthetic construct
  source 1..20: mol_type = other DNA
ctgcagaacaaagccttgtg

SEQ ID NO: 208554 - DNA, 20 bp, synthetic construct
  source 1..20: mol_type = other DNA
gctgcagaacaaagccttgt

SEQ ID NO: 208555 - DNA, 20 bp, synthetic construct
  source 1..20: mol_type = other DNA
tgctgcagaacaaagccttg

SEQ ID NO: 208556 - DNA, 20 bp, synthetic construct
  source 1..20: mol_type = other DNA
ttgctgcagaacaaagcctt

SEQ ID NO: 208557 - DNA, 20 bp, synthetic construct
  source 1..20: mol_type = other DNA
gttgctgcagaacaaagcct

SEQ ID NO: 208558 - DNA, 20 bp, synthetic construct
  source 1..20: mol_type = other DNA
ggttgctgcagaacaaagcc

SEQ ID NO: 208559 - DNA, 20 bp, synthetic construct
  source 1..20: mol_type = other DNA
aggttgctgcagaacaaagc

SEQ ID NO: 208560 - DNA, 20 bp, synthetic construct
  source 1..20: mol_type = other DNA
aaggttgctgcagaacaaag

SEQ ID NO: 208561 - DNA, 20 bp, synthetic construct
  source 1..20: mol_type = other DNA
aaaggttgctgcagaacaaa

SEQ ID NO: 208562 - DNA, 20 bp, synthetic construct
  source 1..20: mol_type = other DNA
gaaaggttgctgcagaacaa

SEQ ID NO: 208563 - DNA, 20 bp, synthetic construct
  source 1..20: mol_type = other DNA
ggaaaggttgctgcagaaca

SEQ ID NO: 208564 - DNA, 20 bp, synthetic construct
  source 1..20: mol_type = other DNA
aggaaaggttgctgcagaac

SEQ ID NO: 208565 - DNA, 20 bp, synthetic construct
  source 1..20: mol_type = other DNA
taggaaaggttgctgcagaa

SEQ ID NO: 208566 - DNA, 20 bp, synthetic construct
  source 1..20: mol_type = other DNA
ttaggaaaggttgctgcaga

SEQ ID NO: 208567 - DNA, 20 bp, synthetic construct
  source 1..20: mol_type = other DNA
attaggaaaggttgctgcag

SEQ ID NO: 208568 - DNA, 20 bp, synthetic construct
  source 1..20: mol_type = other DNA
cattaggaaaggttgctgca

SEQ ID NO: 208569 - DNA, 20 bp, synthetic construct
  source 1..20: mol_type = other DNA
gcattaggaaaggttgctgc

SEQ ID NO: 208570 - DNA, 20 bp, synthetic construct
  source 1..20: mol_type = other DNA
tgcattaggaaaggttgctg

SEQ ID NO: 208571 - DNA, 20 bp, synthetic construct
  source 1..20: mol_type = other DNA
ctgcattaggaaaggttgct

SEQ ID NO: 208572 - DNA, 20 bp, synthetic construct
  source 1..20: mol_type = other DNA
actgcattaggaaaggttgc

SEQ ID NO: 208573 - DNA, 20 bp, synthetic construct
  source 1..20: mol_type = other DNA
gactgcattaggaaaggttg

SEQ ID NO: 208574 - DNA, 20 bp, synthetic construct
  source 1..20: mol_type = other DNA
ggactgcattaggaaaggtt

SEQ ID NO: 208575 - DNA, 20 bp, synthetic construct
  source 1..20: mol_type = other DNA
aggactgcattaggaaaggt

SEQ ID NO: 208576 - DNA, 20 bp, synthetic construct
  source 1..20: mol_type = other DNA
caggactgcattaggaaagg

SEQ ID NO: 208577 - DNA, 20 bp, synthetic construct
  source 1..20: mol_type = other DNA
ccaggactgcattaggaaag

SEQ ID NO: 208578 - DNA, 20 bp, synthetic construct
  source 1..20: mol_type = other DNA
gccaggactgcattaggaaa

SEQ ID NO: 208579 - DNA, 20 bp, synthetic construct
  source 1..20: mol_type = other DNA
ggccaggactgcattaggaa

SEQ ID NO: 208580 - DNA, 20 bp, synthetic construct
  source 1..20: mol_type = other DNA
aggccaggactgcattagga

SEQ ID NO: 208581 - DNA, 20 bp, synthetic construct
  source 1..20: mol_type = other DNA
gaggccaggactgcattagg

SEQ ID NO: 208582 - DNA, 20 bp, synthetic construct
  source 1..20: mol_type = other DNA
agaggccaggactgcattag

SEQ ID NO: 208583 - DNA, 20 bp, synthetic construct
  source 1..20: mol_type = other DNA
aagaggccaggactgcatta

SEQ ID NO: 208584 - DNA, 20 bp, synthetic construct
  source 1..20: mol_type = other DNA
gaagaggccaggactgcatt

SEQ ID NO: 208585 - DNA, 20 bp, synthetic construct
  source 1..20: mol_type = other DNA
cgaagaggccaggactgcat

SEQ ID NO: 208586 - DNA, 20 bp, synthetic construct
  source 1..20: mol_type = other DNA
gcgaagaggccaggactgca

SEQ ID NO: 208587 - DNA, 20 bp, synthetic construct
  source 1..20: mol_type = other DNA
tgcgaagaggccaggactgc

SEQ ID NO: 208588 - DNA, 20 bp, synthetic construct
  source 1..20: mol_type = other DNA
ctgcgaagaggccaggactg

SEQ ID NO: 208589 - DNA, 20 bp, synthetic construct
  source 1..20: mol_type = other DNA
gctgcgaagaggccaggact

SEQ ID NO: 208590 - DNA, 20 bp, synthetic construct
  source 1..20: mol_type = other DNA
agctgcgaagaggccaggac

SEQ ID NO: 208591 - DNA, 20 bp, synthetic construct
  source 1..20: mol_type = other DNA
aagctgcgaagaggccagga

SEQ ID NO: 208592 - DNA, 20 bp, synthetic construct
  source 1..20: mol_type = other DNA
gaagctgcgaagaggccagg

SEQ ID NO: 208593 - DNA, 20 bp, synthetic construct
  source 1..20: mol_type = other DNA
tgaagctgcgaagaggccag

SEQ ID NO: 208594 - DNA, 20 bp, synthetic construct
  source 1..20: mol_type = other DNA
atgaagctgcgaagaggcca

SEQ ID NO: 208595 - DNA, 20 bp, synthetic construct
  source 1..20: mol_type = other DNA
aatgaagctgcgaagaggcc

SEQ ID NO: 208596 - DNA, 20 bp, synthetic construct
  source 1..20: mol_type = other DNA
taatgaagctgcgaagaggc

SEQ ID NO: 208597 - DNA, 20 bp, synthetic construct
  source 1..20: mol_type = other DNA
gtaatgaagctgcgaagagg

SEQ ID NO: 208598 - DNA, 20 bp, synthetic construct
  source 1..20: mol_type = other DNA
tgtaatgaagctgcgaagag

SEQ ID NO: 208599 - DNA, 20 bp, synthetic construct
  source 1..20: mol_type = other DNA
atgtaatgaagctgcgaaga

SEQ ID NO: 208600 - DNA, 20 bp, synthetic construct
  source 1..20: mol_type = other DNA
tatgtaatgaagctgcgaag

SEQ ID NO: 208601 - DNA, 20 bp, synthetic construct
  source 1..20: mol_type = other DNA
ttatgtaatgaagctgcgaa

SEQ ID NO: 208602 - DNA, 20 bp, synthetic construct
  source 1..20: mol_type = other DNA
gttatgtaatgaagctgcga

SEQ ID NO: 208603 - DNA, 20 bp, synthetic construct
  source 1..20: mol_type = other DNA
ggttatgtaatgaagctgcg

SEQ ID NO: 208604 - DNA, 20 bp, synthetic construct
  source 1..20: mol_type = other DNA
aggttatgtaatgaagctgc

SEQ ID NO: 208605 - DNA, 20 bp, synthetic construct
  source 1..20: mol_type = other DNA
aaggttatgtaatgaagctg

SEQ ID NO: 208606 - DNA, 20 bp, synthetic construct
  source 1..20: mol_type = other DNA
gaaggttatgtaatgaagct

SEQ ID NO: 208607 - DNA, 20 bp, synthetic construct
  source 1..20: mol_type = other DNA
ggaaggttatgtaatgaagc

SEQ ID NO: 208608 - DNA, 20 bp, synthetic construct
  source 1..20: mol_type = other DNA
cggaaggttatgtaatgaag

SEQ ID NO: 208609 - DNA, 20 bp, synthetic construct
  source 1..20: mol_type = other DNA
acggaaggttatgtaatgaa

SEQ ID NO: 208610 - DNA, 20 bp, synthetic construct
  source 1..20: mol_type = other DNA
cacggaaggttatgtaatga

SEQ ID NO: 208611 - DNA, 20 bp, synthetic construct
  source 1..20: mol_type = other DNA
ccacggaaggttatgtaatg

SEQ ID NO: 208612 - DNA, 20 bp, synthetic construct
  source 1..20: mol_type = other DNA
tccacggaaggttatgtaat

SEQ ID NO: 208613 - DNA, 20 bp, synthetic construct
  source 1..20: mol_type = other DNA
gtccacggaaggttatgtaa

SEQ ID NO: 208614 - DNA, 20 bp, synthetic construct
  source 1..20: mol_type = other DNA
agtccacggaaggttatgta

SEQ ID NO: 208615 - DNA, 20 bp, synthetic construct
  source 1..20: mol_type = other DNA
gagtccacggaaggttatgt

SEQ ID NO: 208616 - DNA, 20 bp, synthetic construct
  source 1..20: mol_type = other DNA
ggagtccacggaaggttatg

SEQ ID NO: 208617 - DNA, 20 bp, synthetic construct
  source 1..20: mol_type = other DNA
aggagtccacggaaggttat

SEQ ID NO: 208618 - DNA, 20 bp, synthetic construct
  source 1..20: mol_type = other DNA
caggagtccacggaaggtta

SEQ ID NO: 208619 - DNA, 20 bp, synthetic construct
  source 1..20: mol_type = other DNA
ccaggagtccacggaaggtt

SEQ ID NO: 208620 - DNA, 20 bp, synthetic construct
  source 1..20: mol_type = other DNA
accaggagtccacggaaggt

SEQ ID NO: 208621 - DNA, 20 bp, synthetic construct
  source 1..20: mol_type = other DNA
gaccaggagtccacggaagg

SEQ ID NO: 208622 - DNA, 20 bp, synthetic construct
  source 1..20: mol_type = other DNA
ggaccaggagtccacggaag

SEQ ID NO: 208623 - DNA, 20 bp, synthetic construct
  source 1..20: mol_type = other DNA
tggaccaggagtccacggaa

SEQ ID NO: 208624 - DNA, 20 bp, synthetic construct
  source 1..20: mol_type = other DNA
ttggaccaggagtccacgga

SEQ ID NO: 208625 - DNA, 20 bp, synthetic construct
  source 1..20: mol_type = other DNA
cttggaccaggagtccacgg

SEQ ID NO: 208626 - DNA, 20 bp, synthetic construct
  source 1..20: mol_type = other DNA
ccttggaccaggagtccacg

SEQ ID NO: 208627 - DNA, 20 bp, synthetic construct
  source 1..20: mol_type = other DNA
tccttggaccaggagtccac

SEQ ID NO: 208628 - DNA, 20 bp, synthetic construct
  source 1..20: mol_type = other DNA
atccttggaccaggagtcca

SEQ ID NO: 208629 - DNA, 20 bp, synthetic construct
  source 1..20: mol_type = other DNA
gatccttggaccaggagtcc

SEQ ID NO: 208630 - DNA, 20 bp, synthetic construct
  source 1..20: mol_type = other DNA
tgatccttggaccaggagtc

SEQ ID NO: 208631 - DNA, 20 bp, synthetic construct
  source 1..20: mol_type = other DNA
gtgatccttggaccaggagt

SEQ ID NO: 208632 - DNA, 20 bp, synthetic construct
  source 1..20: mol_type = other DNA
ggtgatccttggaccaggag

SEQ ID NO: 208633 - DNA, 20 bp, synthetic construct
  source 1..20: mol_type = other DNA
gggtgatccttggaccagga

SEQ ID NO: 208634 - DNA, 20 bp, synthetic construct
  source 1..20: mol_type = other DNA
ggggtgatccttggaccagg

SEQ ID NO: 208635 - DNA, 20 bp, synthetic construct
  source 1..20: mol_type = other DNA
tggggtgatccttggaccag

SEQ ID NO: 208636 - DNA, 20 bp, synthetic construct
  source 1..20: mol_type = other DNA
ctggggtgatccttggacca

SEQ ID NO: 208637 - DNA, 20 bp, synthetic construct
  source 1..20: mol_type = other DNA
tctggggtgatccttggacc

SEQ ID NO: 208638 - DNA, 20 bp, synthetic construct
  source 1..20: mol_type = other DNA
ttctggggtgatccttggac

SEQ ID NO: 208639 - DNA, 20 bp, synthetic construct
  source 1..20: mol_type = other DNA
tttctggggtgatccttgga

SEQ ID NO: 208640 - DNA, 20 bp, synthetic construct
  source 1..20: mol_type = other DNA
ctttctggggtgatccttgg

SEQ ID NO: 208641 - DNA, 20 bp, synthetic construct
  source 1..20: mol_type = other DNA
gctttctggggtgatccttg

SEQ ID NO: 208642 - DNA, 20 bp, synthetic construct
  source 1..20: mol_type = other DNA
ggctttctggggtgatcctt

SEQ ID NO: 208643 - DNA, 20 bp, synthetic construct
  source 1..20: mol_type = other DNA
tggctttctggggtgatcct

SEQ ID NO: 208644 - DNA, 20 bp, synthetic construct
  source 1..20: mol_type = other DNA
ctggctttctggggtgatcc

SEQ ID NO: 208645 - DNA, 20 bp, synthetic construct
  source 1..20: mol_type = other DNA
actggctttctggggtgatc

SEQ ID NO: 208646 - DNA, 20 bp, synthetic construct
  source 1..20: mol_type = other DNA
gactggctttctggggtgat

SEQ ID NO: 208647 - DNA, 20 bp, synthetic construct
  source 1..20: mol_type = other DNA
tgactggctttctggggtga

SEQ ID NO: 208648 - DNA, 20 bp, synthetic construct
  source 1..20: mol_type = other DNA
ctgactggctttctggggtg

SEQ ID NO: 208649 - DNA, 20 bp, synthetic construct
  source 1..20: mol_type = other DNA
tctgactggctttctggggt

SEQ ID NO: 208650 - DNA, 20 bp, synthetic construct
  source 1..20: mol_type = other DNA
ctctgactggctttctgggg

SEQ ID NO: 208651 - DNA, 20 bp, synthetic construct
  source 1..20: mol_type = other DNA
cctctgactggctttctggg

SEQ ID NO: 208652 - DNA, 20 bp, synthetic construct
  source 1..20: mol_type = other DNA
acctctgactggctttctgg

SEQ ID NO: 208653 - DNA, 20 bp, synthetic construct
  source 1..20: mol_type = other DNA
tacctctgactggctttctg

SEQ ID NO: 208654 - DNA, 20 bp, synthetic construct
  source 1..20: mol_type = other DNA
ctacctctgactggctttct

SEQ ID NO: 208655 - DNA, 20 bp, synthetic construct
  source 1..20: mol_type = other DNA
cctacctctgactggctttc

SEQ ID NO: 208656 - DNA, 20 bp, synthetic construct
  source 1..20: mol_type = other DNA
gcctacctctgactggcttt

SEQ ID NO: 208657 - DNA, 20 bp, synthetic construct
  source 1..20: mol_type = other DNA
tgcctacctctgactggctt

SEQ ID NO: 208658 - DNA, 20 bp, synthetic construct
  source 1..20: mol_type = other DNA
gtgcctacctctgactggct

SEQ ID NO: 208659 - DNA, 20 bp, synthetic construct
  source 1..20: mol_type = other DNA
cgtgcctacctctgactggc

SEQ ID NO: 208660 - DNA, 20 bp, synthetic construct
  source 1..20: mol_type = other DNA
gcgtgcctacctctgactgg

SEQ ID NO: 208661 - DNA, 20 bp, synthetic construct
  source 1..20: mol_type = other DNA
tgcgtgcctacctctgactg

SEQ ID NO: 208662 - DNA, 20 bp, synthetic construct
  source 1..20: mol_type = other DNA
ctgcgtgcctacctctgact

SEQ ID NO: 208663 - DNA, 20 bp, synthetic construct
  source 1..20: mol_type = other DNA
gctgcgtgcctacctctgac

SEQ ID NO: 208664 - DNA, 20 bp, synthetic construct
  source 1..20: mol_type = other DNA
agctgcgtgcctacctctga

SEQ ID NO: 208665 - DNA, 20 bp, synthetic construct
  source 1..20: mol_type = other DNA
cagctgcgtgcctacctctg

SEQ ID NO: 208666 - DNA, 20 bp, synthetic construct
  source 1..20: mol_type = other DNA
ccagctgcgtgcctacctct

SEQ ID NO: 208667 - DNA, 20 bp, synthetic construct
  source 1..20: mol_type = other DNA
cccagctgcgtgcctacctc

SEQ ID NO: 208668 - DNA, 20 bp, synthetic construct
  source 1..20: mol_type = other DNA
ccccagctgcgtgcctacct

SEQ ID NO: 208669 - DNA, 20 bp, synthetic construct
  source 1..20: mol_type = other DNA
accccagctgcgtgcctacc

SEQ ID NO: 208670 - DNA, 20 bp, synthetic construct
  source 1..20: mol_type = other DNA
gaccccagctgcgtgcctac

SEQ ID NO: 208671 - DNA, 20 bp, synthetic construct
  source 1..20: mol_type = other DNA
ggaccccagctgcgtgccta

SEQ ID NO: 208672 - DNA, 20 bp, synthetic construct
  source 1..20: mol_type = other DNA
tggaccccagctgcgtgcct

SEQ ID NO: 208673 - DNA, 20 bp, synthetic construct
  source 1..20: mol_type = other DNA
atggaccccagctgcgtgcc

SEQ ID NO: 208674 - DNA, 20 bp, synthetic construct
  source 1..20: mol_type = other DNA
aatggaccccagctgcgtgc

SEQ ID NO: 208675 - DNA, 20 bp, synthetic construct
  source 1..20: mol_type = other DNA
aaatggaccccagctgcgtg

SEQ ID NO: 208676 - DNA, 20 bp, synthetic construct
  source 1..20: mol_type = other DNA
taaatggaccccagctgcgt

SEQ ID NO: 208677 - DNA, 20 bp, synthetic construct
  source 1..20: mol_type = other DNA
gtaaatggaccccagctgcg

SEQ ID NO: 208678 - DNA, 20 bp, synthetic construct
  source 1..20: mol_type = other DNA
agtaaatggaccccagctgc

SEQ ID NO: 208679 - DNA, 20 bp, synthetic construct
  source 1..20: mol_type = other DNA
aagtaaatggaccccagctg

SEQ ID NO: 208680 - DNA, 20 bp, synthetic construct
  source 1..20: mol_type = other DNA
taagtaaatggaccccagct

SEQ ID NO: 208681 - DNA, 20 bp, synthetic construct
  source 1..20: mol_type = other DNA
gtaagtaaatggaccccagc

SEQ ID NO: 208682 - DNA, 20 bp, synthetic construct
  source 1..20: mol_type = other DNA
ggtaagtaaatggaccccag

SEQ ID NO: 208683 - DNA, 20 bp, synthetic construct
  source 1..20: mol_type = other DNA
aggtaagtaaatggacccca

SEQ ID NO: 208684 - DNA, 20 bp, synthetic construct
  source 1..20: mol_type = other DNA
aaggtaagtaaatggacccc

SEQ ID NO: 208685 - DNA, 20 bp, synthetic construct
  source 1..20: mol_type = other DNA
gaaggtaagtaaatggaccc

SEQ ID NO: 208686 - DNA, 20 bp, synthetic construct
  source 1..20: mol_type = other DNA
ggaaggtaagtaaatggacc

SEQ ID NO: 208687 - DNA, 20 bp, synthetic construct
  source 1..20: mol_type = other DNA
gggaaggtaagtaaatggac

SEQ ID NO: 208688 - DNA, 20 bp, synthetic construct
  source 1..20: mol_type = other DNA
ggggaaggtaagtaaatgga

SEQ ID NO: 208689 - DNA, 20 bp, synthetic construct
  source 1..20: mol_type = other DNA
tggggaaggtaagtaaatgg

SEQ ID NO: 208690 - DNA, 20 bp, synthetic construct
  source 1..20: mol_type = other DNA
gtggggaaggtaagtaaatg

SEQ ID NO: 208691 - DNA, 20 bp, synthetic construct
  source 1..20: mol_type = other DNA
ggtggggaaggtaagtaaat

SEQ ID NO: 208692 - DNA, 20 bp, synthetic construct
  source 1..20: mol_type = other DNA
gggtggggaaggtaagtaaa

SEQ ID NO: 208693 - DNA, 20 bp, synthetic construct
  source 1..20: mol_type = other DNA
ggggtggggaaggtaagtaa

SEQ ID NO: 208694 - DNA, 20 bp, synthetic construct
  source 1..20: mol_type = other DNA
gggggtggggaaggtaagta

SEQ ID NO: 208695 - DNA, 20 bp, synthetic construct
  source 1..20: mol_type = other DNA
agggggtggggaaggtaagt

SEQ ID NO: 208696 - DNA, 20 bp, synthetic construct
  source 1..20: mol_type = other DNA
gagggggtggggaaggtaag

SEQ ID NO: 208697 - DNA, 20 bp, synthetic construct
  source 1..20: mol_type = other DNA
cgagggggtggggaaggtaa

SEQ ID NO: 208698 - DNA, 20 bp, synthetic construct
  source 1..20: mol_type = other DNA
ccgagggggtggggaaggta

SEQ ID NO: 208699 - DNA, 20 bp, synthetic construct
  source 1..20: mol_type = other DNA
tccgagggggtggggaaggt

SEQ ID NO: 208700 - DNA, 20 bp, synthetic construct
  source 1..20: mol_type = other DNA
ttccgagggggtggggaagg

SEQ ID NO: 208701 - DNA, 20 bp, synthetic construct
  source 1..20: mol_type = other DNA
gttccgagggggtggggaag

SEQ ID NO: 208702 - DNA, 20 bp, synthetic construct
  source 1..20: mol_type = other DNA
agttccgagggggtggggaa

SEQ ID NO: 208703 - DNA, 20 bp, synthetic construct
  source 1..20: mol_type = other DNA
gagttccgagggggtgggga

SEQ ID NO: 208704 - DNA, 20 bp, synthetic construct
  source 1..20: mol_type = other DNA
tgagttccgagggggtgggg

SEQ ID NO: 208705 - DNA, 20 bp, synthetic construct
  source 1..20: mol_type = other DNA
ctgagttccgagggggtggg

SEQ ID NO: 208706 - DNA, 20 bp, synthetic construct
  source 1..20: mol_type = other DNA
tctgagttccgagggggtgg

SEQ ID NO: 208707 - DNA, 20 bp, synthetic construct
  source 1..20: mol_type = other DNA
ctctgagttccgagggggtg

SEQ ID NO: 208708 - DNA, 20 bp, synthetic construct
  source 1..20: mol_type = other DNA
cctctgagttccgagggggt

SEQ ID NO: 208709 - DNA, 20 bp, synthetic construct
  source 1..20: mol_type = other DNA
acctctgagttccgaggggg

SEQ ID NO: 208710 - DNA, 20 bp, synthetic construct
  source 1..20: mol_type = other DNA
cacctctgagttccgagggg

SEQ ID NO: 208711 - DNA, 20 bp, synthetic construct
  source 1..20: mol_type = other DNA
ccacctctgagttccgaggg

SEQ ID NO: 208712 - DNA, 20 bp, synthetic construct
  source 1..20: mol_type = other DNA
accacctctgagttccgagg

SEQ ID NO: 208713 - DNA, 20 bp, synthetic construct
  source 1..20: mol_type = other DNA
caccacctctgagttccgag

SEQ ID NO: 208714 - DNA, 20 bp, synthetic construct
  source 1..20: mol_type = other DNA
gcaccacctctgagttccga

SEQ ID NO: 208715 - DNA, 20 bp, synthetic construct
  source 1..20: mol_type = other DNA
tgcaccacctctgagttccg

SEQ ID NO: 208716 - DNA, 20 bp, synthetic construct
  source 1..20: mol_type = other DNA
ctgcaccacctctgagttcc

SEQ ID NO: 208717 - DNA, 20 bp, synthetic construct
  source 1..20: mol_type = other DNA
cctgcaccacctctgagttc

SEQ ID NO: 208718 - DNA, 20 bp, synthetic construct
  source 1..20: mol_type = other DNA
tcctgcaccacctctgagtt

SEQ ID NO: 208719 - DNA, 20 bp, synthetic construct
  source 1..20: mol_type = other DNA
ttcctgcaccacctctgagt

SEQ ID NO: 208720 - DNA, 20 bp, synthetic construct
  source 1..20: mol_type = other DNA
attcctgcaccacctctgag

SEQ ID NO: 208721 - DNA, 20 bp, synthetic construct
  source 1..20: mol_type = other DNA
aattcctgcaccacctctga

SEQ ID NO: 208722 - DNA, 20 bp, synthetic construct
  source 1..20: mol_type = other DNA
aaattcctgcaccacctctg

SEQ ID NO: 208723 - DNA, 20 bp, synthetic construct
  source 1..20: mol_type = other DNA
caaattcctgcaccacctct

SEQ ID NO: 208724 - DNA, 20 bp, synthetic construct
  source 1..20: mol_type = other DNA
ccaaattcctgcaccacctc

SEQ ID NO: 208725 - DNA, 20 bp, synthetic construct
  source 1..20: mol_type = other DNA
tccaaattcctgcaccacct

SEQ ID NO: 208726 - DNA, 20 bp, synthetic construct
  source 1..20: mol_type = other DNA
gtccaaattcctgcaccacc

SEQ ID NO: 208727 - DNA, 20 bp, synthetic construct
  source 1..20: mol_type = other DNA
agtccaaattcctgcaccac

SEQ ID NO: 208728 - DNA, 20 bp, synthetic construct
  source 1..20: mol_type = other DNA
gagtccaaattcctgcacca

SEQ ID NO: 208729 - DNA, 20 bp, synthetic construct
  source 1..20: mol_type = other DNA
ggagtccaaattcctgcacc

SEQ ID NO: 208730 - DNA, 20 bp, synthetic construct
  source 1..20: mol_type = other DNA
tggagtccaaattcctgcac

SEQ ID NO: 208731 - DNA, 20 bp, synthetic construct
  source 1..20: mol_type = other DNA
ttggagtccaaattcctgca

SEQ ID NO: 208732 - DNA, 20 bp, synthetic construct
  source 1..20: mol_type = other DNA
cttggagtccaaattcctgc

SEQ ID NO: 208733 - DNA, 20 bp, synthetic construct
  source 1..20: mol_type = other DNA
tcttggagtccaaattcctg

SEQ ID NO: 208734 - DNA, 20 bp, synthetic construct
  source 1..20: mol_type = other DNA
ttcttggagtccaaattcct

SEQ ID NO: 208735 - DNA, 20 bp, synthetic construct
  source 1..20: mol_type = other DNA
attcttggagtccaaattcc

SEQ ID NO: 208736 - DNA, 20 bp, synthetic construct
  source 1..20: mol_type = other DNA
aattcttggagtccaaattc

SEQ ID NO: 208737 - DNA, 20 bp, synthetic construct
  source 1..20: mol_type = other DNA
taattcttggagtccaaatt

SEQ ID NO: 208738 - DNA, 20 bp, synthetic construct
  source 1..20: mol_type = other DNA
ttaattcttggagtccaaat

SEQ ID NO: 208739 - DNA, 20 bp, synthetic construct
  source 1..20: mol_type = other DNA
gttaattcttggagtccaaa

SEQ ID NO: 208740 - DNA, 20 bp, synthetic construct
  source 1..20: mol_type = other DNA
tgttaattcttggagtccaa

SEQ ID NO: 208741 - DNA, 20 bp, synthetic construct
  source 1..20: mol_type = other DNA
ctgttaattcttggagtcca

SEQ ID NO: 208742 - DNA, 20 bp, synthetic construct
  source 1..20: mol_type = other DNA
gctgttaattcttggagtcc

SEQ ID NO: 208743 - DNA, 20 bp, synthetic construct
  source 1..20: mol_type = other DNA
agctgttaattcttggagtc

SEQ ID NO: 208744 - DNA, 20 bp, synthetic construct
  source 1..20: mol_type = other DNA
gagctgttaattcttggagt

SEQ ID NO: 208745 - DNA, 20 bp, synthetic construct
  source 1..20: mol_type = other DNA
ggagctgttaattcttggag

SEQ ID NO: 208746 - DNA, 20 bp, synthetic construct
  source 1..20: mol_type = other DNA
tggagctgttaattcttgga

SEQ ID NO: 208747 - DNA, 20 bp, synthetic construct
  source 1..20: mol_type = other DNA
gtggagctgttaattcttgg

SEQ ID NO: 208748 - DNA, 20 bp, synthetic construct
  source 1..20: mol_type = other DNA
ggtggagctgttaattcttg

SEQ ID NO: 208749 - DNA, 20 bp, synthetic construct
  source 1..20: mol_type = other DNA
tggtggagctgttaattctt

SEQ ID NO: 208750 - DNA, 20 bp, synthetic construct
  source 1..20: mol_type = other DNA
gtggtggagctgttaattct

SEQ ID NO: 208751 - DNA, 20 bp, synthetic construct
  source 1..20: mol_type = other DNA
ggtggtggagctgttaattc

SEQ ID NO: 208752 - DNA, 20 bp, synthetic construct
  source 1..20: mol_type = other DNA
tggtggtggagctgttaatt

SEQ ID NO: 208753 - DNA, 20 bp, synthetic construct
  source 1..20: mol_type = other DNA
atggtggtggagctgttaat

SEQ ID NO: 208754 - DNA, 20 bp, synthetic construct
  source 1..20: mol_type = other DNA
gatggtggtggagctgttaa

SEQ ID NO: 208755 - DNA, 20 bp, synthetic construct
  source 1..20: mol_type = other DNA
tgatggtggtggagctgtta

SEQ ID NO: 208756 - DNA, 20 bp, synthetic construct
  source 1..20: mol_type = other DNA
gtgatggtggtggagctgtt

SEQ ID NO: 208757 - DNA, 20 bp, synthetic construct
  source 1..20: mol_type = other DNA
ggtgatggtggtggagctgt

SEQ ID NO: 208758 - DNA, 20 bp, synthetic construct
  source 1..20: mol_type = other DNA
tggtgatggtggtggagctg

SEQ ID NO: 208759 - DNA, 20 bp, synthetic construct
  source 1..20: mol_type = other DNA
ctggtgatggtggtggagct

SEQ ID NO: 208760 - DNA, 20 bp, synthetic construct
  source 1..20: mol_type = other DNA
tctggtgatggtggtggagc

SEQ ID NO: 208761 - DNA, 20 bp, synthetic construct
  source 1..20: mol_type = other DNA
ctctggtgatggtggtggag

SEQ ID NO: 208762 - DNA, 20 bp, synthetic construct
  source 1..20: mol_type = other DNA
gctctggtgatggtggtgga

SEQ ID NO: 208763 - DNA, 20 bp, synthetic construct
  source 1..20: mol_type = other DNA
ggctctggtgatggtggtgg

SEQ ID NO: 208764 - DNA, 20 bp, synthetic construct
  source 1..20: mol_type = other DNA
tggctctggtgatggtggtg

SEQ ID NO: 208765 - DNA, 20 bp, synthetic construct
  source 1..20: mol_type = other DNA
ttggctctggtgatggtggt

SEQ ID NO: 208766 - DNA, 20 bp, synthetic construct
  source 1..20: mol_type = other DNA
tttggctctggtgatggtgg

SEQ ID NO: 208767 - DNA, 20 bp, synthetic construct
  source 1..20: mol_type = other DNA
ttttggctctggtgatggtg

SEQ ID NO: 208768 - DNA, 20 bp, synthetic construct
  source 1..20: mol_type = other DNA
gttttggctctggtgatggt

SEQ ID NO: 208769 - DNA, 20 bp, synthetic construct
  source 1..20: mol_type = other DNA
agttttggctctggtgatgg

SEQ ID NO: 208770 - DNA, 20 bp, synthetic construct
  source 1..20: mol_type = other DNA
gagttttggctctggtgatg

SEQ ID NO: 208771 - DNA, 20 bp, synthetic construct
  source 1..20: mol_type = other DNA
tgagttttggctctggtgat

SEQ ID NO: 208772 - DNA, 20 bp, synthetic construct
  source 1..20: mol_type = other DNA
ctgagttttggctctggtga

SEQ ID NO: 208773 - DNA, 20 bp, synthetic construct
  source 1..20: mol_type = other DNA
cctgagttttggctctggtg

SEQ ID NO: 208774 - DNA, 20 bp, synthetic construct
  source 1..20: mol_type = other DNA
tcctgagttttggctctggt

SEQ ID NO: 208775 - DNA, 20 bp, synthetic construct
  source 1..20: mol_type = other DNA
atcctgagttttggctctgg

SEQ ID NO: 208776 - DNA, 20 bp, synthetic construct
  source 1..20: mol_type = other DNA
catcctgagttttggctctg

SEQ ID NO: 208777 - DNA, 20 bp, synthetic construct
  source 1..20: mol_type = other DNA
gcatcctgagttttggctct

SEQ ID NO: 208778 - DNA, 20 bp, synthetic construct
  source 1..20: mol_type = other DNA
tgcatcctgagttttggctc

SEQ ID NO: 208779 - DNA, 20 bp, synthetic construct
  source 1..20: mol_type = other DNA
atgcatcctgagttttggct

SEQ ID NO: 208780 - DNA, 20 bp, synthetic construct
  source 1..20: mol_type = other DNA
catgcatcctgagttttggc

SEQ ID NO: 208781 - DNA, 20 bp, synthetic construct
  source 1..20: mol_type = other DNA
acatgcatcctgagttttgg

SEQ ID NO: 208782 - DNA, 20 bp, synthetic construct
  source 1..20: mol_type = other DNA
cacatgcatcctgagttttg

SEQ ID NO: 208783 - DNA, 20 bp, synthetic construct
  source 1..20: mol_type = other DNA
gcacatgcatcctgagtttt

SEQ ID NO: 208784 - DNA, 20 bp, synthetic construct
  source 1..20: mol_type = other DNA
agcacatgcatcctgagttt

SEQ ID NO: 208785 - DNA, 20 bp, synthetic construct
  source 1..20: mol_type = other DNA
aagcacatgcatcctgagtt

SEQ ID NO: 208786 - DNA, 20 bp, synthetic construct
  source 1..20: mol_type = other DNA
gaagcacatgcatcctgagt

SEQ ID NO: 208787 - DNA, 20 bp, synthetic construct
  source 1..20: mol_type = other DNA
tgaagcacatgcatcctgag

SEQ ID NO: 208788 - DNA, 20 bp, synthetic construct
  source 1..20: mol_type = other DNA
atgaagcacatgcatcctga

SEQ ID NO: 208789 - DNA, 20 bp, synthetic construct
  source 1..20: mol_type = other DNA
gatgaagcacatgcatcctg

SEQ ID NO: 208790 - DNA, 20 bp, synthetic construct
  source 1..20: mol_type = other DNA
agatgaagcacatgcatcct

SEQ ID NO: 208791 - DNA, 20 bp, synthetic construct
  source 1..20: mol_type = other DNA
cagatgaagcacatgcatcc

SEQ ID NO: 208792 - DNA, 20 bp, synthetic construct
  source 1..20: mol_type = other DNA
gcagatgaagcacatgcatc

SEQ ID NO: 208793 - DNA, 20 bp, synthetic construct
  source 1..20: mol_type = other DNA
agcagatgaagcacatgcat

SEQ ID NO: 208794 - DNA, 20 bp, synthetic construct
  source 1..20: mol_type = other DNA
cagcagatgaagcacatgca

SEQ ID NO: 208795 - DNA, 20 bp, synthetic construct
  source 1..20: mol_type = other DNA
gcagcagatgaagcacatgc

SEQ ID NO: 208796 - DNA, 20 bp, synthetic construct
  source 1..20: mol_type = other DNA
agcagcagatgaagcacatg

SEQ ID NO: 208797 - DNA, 20 bp, synthetic construct
  source 1..20: mol_type = other DNA
aagcagcagatgaagcacat

SEQ ID NO: 208798 - DNA, 20 bp, synthetic construct
  source 1..20: mol_type = other DNA
taagcagcagatgaagcaca

SEQ ID NO: 208799 - DNA, 20 bp, synthetic construct
  source 1..20: mol_type = other DNA
ataagcagcagatgaagcac

SEQ ID NO: 208800 - DNA, 20 bp, synthetic construct
  source 1..20: mol_type = other DNA
aataagcagcagatgaagca

SEQ ID NO: 208801 - DNA, 20 bp, synthetic construct
  source 1..20: mol_type = other DNA
aaataagcagcagatgaagc

SEQ ID NO: 208802 - DNA, 20 bp, synthetic construct
  source 1..20: mol_type = other DNA
gaaataagcagcagatgaag

SEQ ID NO: 208803 - DNA, 20 bp, synthetic construct
  source 1..20: mol_type = other DNA
ggaaataagcagcagatgaa

SEQ ID NO: 208804 - DNA, 20 bp, synthetic construct
  source 1..20: mol_type = other DNA
tggaaataagcagcagatga

SEQ ID NO: 208805 - DNA, 20 bp, synthetic construct
  source 1..20: mol_type = other DNA
ctggaaataagcagcagatg

SEQ ID NO: 208806 - DNA, 20 bp, synthetic construct
  source 1..20: mol_type = other DNA
gctggaaataagcagcagat

SEQ ID NO: 208807 - DNA, 20 bp, synthetic construct
  source 1..20: mol_type = other DNA
agctggaaataagcagcaga

SEQ ID NO: 208808 - DNA, 20 bp, synthetic construct
  source 1..20: mol_type = other DNA
cagctggaaataagcagcag

SEQ ID NO: 208809 - DNA, 20 bp, synthetic construct
  source 1..20: mol_type = other DNA
tcagctggaaataagcagca

SEQ ID NO: 208810 - DNA, 20 bp, synthetic construct
  source 1..20: mol_type = other DNA
ctcagctggaaataagcagc

SEQ ID NO: 208811 - DNA, 20 bp, synthetic construct
  source 1..20: mol_type = other DNA
tctcagctggaaataagcag

SEQ ID NO: 208812 - DNA, 20 bp, synthetic construct
  source 1..20: mol_type = other DNA
ctctcagctggaaataagca

SEQ ID NO: 208813 - DNA, 20 bp, synthetic construct
  source 1..20: mol_type = other DNA
gctctcagctggaaataagc

SEQ ID NO: 208814 - DNA, 20 bp, synthetic construct
  source 1..20: mol_type = other DNA
ggctctcagctggaaataag

SEQ ID NO: 208815 - DNA, 20 bp, synthetic construct
  source 1..20: mol_type = other DNA
tggctctcagctggaaataa

SEQ ID NO: 208816 - DNA, 20 bp, synthetic construct
  source 1..20: mol_type = other DNA
ctggctctcagctggaaata

SEQ ID NO: 208817 - DNA, 20 bp, synthetic construct
  source 1..20: mol_type = other DNA
actggctctcagctggaaat

SEQ ID NO: 208818 - DNA, 20 bp, synthetic construct
  source 1..20: mol_type = other DNA
cactggctctcagctggaaa

SEQ ID NO: 208819 - DNA, 20 bp, synthetic construct
  source 1..20: mol_type = other DNA
ccactggctctcagctggaa

SEQ ID NO: 208820 - DNA, 20 bp, synthetic construct
  source 1..20: mol_type = other DNA
accactggctctcagctgga

SEQ ID NO: 208821 - DNA, 20 bp, synthetic construct
  source 1..20: mol_type = other DNA
caccactggctctcagctgg

SEQ ID NO: 208822 - DNA, 20 bp, synthetic construct
  source 1..20: mol_type = other DNA
gcaccactggctctcagctg

SEQ ID NO: 208823 - DNA, 20 bp, synthetic construct
  source 1..20: mol_type = other DNA
ggcaccactggctctcagct

SEQ ID NO: 208824 - DNA, 20 bp, synthetic construct
  source 1..20: mol_type = other DNA
tggcaccactggctctcagc

SEQ ID NO: 208825 - DNA, 20 bp, synthetic construct
  source 1..20: mol_type = other DNA
atggcaccactggctctcag

SEQ ID NO: 208826 - DNA, 20 bp, synthetic construct
  source 1..20: mol_type = other DNA
catggcaccactggctctca

SEQ ID NO: 208827 - DNA, 20 bp, synthetic construct
  source 1..20: mol_type = other DNA
ccatggcaccactggctctc

SEQ ID NO: 208828 - DNA, 20 bp, synthetic construct
  source 1..20: mol_type = other DNA
accatggcaccactggctct

SEQ ID NO: 208829 - DNA, 20 bp, synthetic construct
  source 1..20: mol_type = other DNA
aaccatggcaccactggctc

SEQ ID NO: 208830 - DNA, 20 bp, synthetic construct
  source 1..20: mol_type = other DNA
gaaccatggcaccactggct

SEQ ID NO: 208831 - DNA, 20 bp, synthetic construct
  source 1..20: mol_type = other DNA
ggaaccatggcaccactggc

SEQ ID NO: 208832 - DNA, 20 bp, synthetic construct
  source 1..20: mol_type = other DNA
aggaaccatggcaccactgg

SEQ ID NO: 208833 - DNA, 20 bp, synthetic construct
  source 1..20: mol_type = other DNA
aaggaaccatggcaccactg

SEQ ID NO: 208834 - DNA, 20 bp, synthetic construct
  source 1..20: mol_type = other DNA
taaggaaccatggcaccact

SEQ ID NO: 208835 - DNA, 20 bp, synthetic construct
  source 1..20: mol_type = other DNA
ctaaggaaccatggcaccac

SEQ ID NO: 208836 - DNA, 20 bp, synthetic construct
  source 1..20: mol_type = other DNA
cctaaggaaccatggcacca

SEQ ID NO: 208837 - DNA, 20 bp, synthetic construct
  source 1..20: mol_type = other DNA
ccctaaggaaccatggcacc

SEQ ID NO: 208838 - DNA, 20 bp, synthetic construct
  source 1..20: mol_type = other DNA
tccctaaggaaccatggcac

SEQ ID NO: 208839 - DNA, 20 bp, synthetic construct
  source 1..20: mol_type = other DNA
ctccctaaggaaccatggca

SEQ ID NO: 208840 - DNA, 20 bp, synthetic construct
  source 1..20: mol_type = other DNA
gctccctaaggaaccatggc

SEQ ID NO: 208841 - DNA, 20 bp, synthetic construct
  source 1..20: mol_type = other DNA
ggctccctaaggaaccatgg

SEQ ID NO: 208842 - DNA, 20 bp, synthetic construct
  source 1..20: mol_type = other DNA
cggctccctaaggaaccatg

SEQ ID NO: 208843 - DNA, 20 bp, synthetic construct
  source 1..20: mol_type = other DNA
ccggctccctaaggaaccat

SEQ ID NO: 208844 - DNA, 20 bp, synthetic construct
  source 1..20: mol_type = other DNA
accggctccctaaggaacca

SEQ ID NO: 208845 - DNA, 20 bp, synthetic construct
  source 1..20: mol_type = other DNA
gaccggctccctaaggaacc

SEQ ID NO: 208846 - DNA, 20 bp, synthetic construct
  source 1..20: mol_type = other DNA
ggaccggctccctaaggaac

SEQ ID NO: 208847 - DNA, 20 bp, synthetic construct
  source 1..20: mol_type = other DNA
gggaccggctccctaaggaa

SEQ ID NO: 208848 - DNA, 20 bp, synthetic construct
  source 1..20: mol_type = other DNA
ggggaccggctccctaagga

SEQ ID NO: 208849 - DNA, 20 bp, synthetic construct
  source 1..20: mol_type = other DNA
aggggaccggctccctaagg

SEQ ID NO: 208850 - DNA, 20 bp, synthetic construct
  source 1..20: mol_type = other DNA
caggggaccggctccctaag

SEQ ID NO: 208851 - DNA, 20 bp, synthetic construct
  source 1..20: mol_type = other DNA
tcaggggaccggctccctaa

SEQ ID NO: 208852 - DNA, 20 bp, synthetic construct
  source 1..20: mol_type = other DNA
atcaggggaccggctcccta

SEQ ID NO: 208853 - DNA, 20 bp, synthetic construct
  source 1..20: mol_type = other DNA
catcaggggaccggctccct

SEQ ID NO: 208854 - DNA, 20 bp, synthetic construct
  source 1..20: mol_type = other DNA
gcatcaggggaccggctccc

SEQ ID NO: 208855 - DNA, 20 bp, synthetic construct
  source 1..20: mol_type = other DNA
ggcatcaggggaccggctcc

SEQ ID NO: 208856 - DNA, 20 bp, synthetic construct
  source 1..20: mol_type = other DNA
cggcatcaggggaccggctc

SEQ ID NO: 208857 - DNA, 20 bp, synthetic construct
  source 1..20: mol_type = other DNA
ccggcatcaggggaccggct

SEQ ID NO: 208858 - DNA, 20 bp, synthetic construct
  source 1..20: mol_type = other DNA
gccggcatcaggggaccggc

SEQ ID NO: 208859 - DNA, 20 bp, synthetic construct
  source 1..20: mol_type = other DNA
agccggcatcaggggaccgg

SEQ ID NO: 208860 - DNA, 20 bp, synthetic construct
  source 1..20: mol_type = other DNA
gagccggcatcaggggaccg

SEQ ID NO: 208861 - DNA, 20 bp, synthetic construct
  source 1..20: mol_type = other DNA
ggagccggcatcaggggacc

SEQ ID NO: 208862 - DNA, 20 bp, synthetic construct
  source 1..20: mol_type = other DNA
aggagccggcatcaggggac

SEQ ID NO: 208863 - DNA, 20 bp, synthetic construct
  source 1..20: mol_type = other DNA
caggagccggcatcagggga

SEQ ID NO: 208864 - DNA, 20 bp, synthetic construct
  source 1..20: mol_type = other DNA
ccaggagccggcatcagggg

SEQ ID NO: 208865 - DNA, 20 bp, synthetic construct
  source 1..20: mol_type = other DNA
gccaggagccggcatcaggg

SEQ ID NO: 208866 - DNA, 20 bp, synthetic construct
  source 1..20: mol_type = other DNA
ggccaggagccggcatcagg

SEQ ID NO: 208867 - DNA, 20 bp, synthetic construct
  source 1..20: mol_type = other DNA
gggccaggagccggcatcag

SEQ ID NO: 208868 - DNA, 20 bp, synthetic construct
  source 1..20: mol_type = other DNA
ggggccaggagccggcatca

SEQ ID NO: 208869 - DNA, 20 bp, synthetic construct
  source 1..20: mol_type = other DNA
tggggccaggagccggcatc

SEQ ID NO: 208870 - DNA, 20 bp, synthetic construct
  source 1..20: mol_type = other DNA
ttggggccaggagccggcat

SEQ ID NO: 208871 - DNA, 20 bp, synthetic construct
  source 1..20: mol_type = other DNA
tttggggccaggagccggca

SEQ ID NO: 208872 - DNA, 20 bp, synthetic construct
  source 1..20: mol_type = other DNA
atttggggccaggagccggc

SEQ ID NO: 208873 - DNA, 20 bp, synthetic construct
  source 1..20: mol_type = other DNA
gatttggggccaggagccgg

SEQ ID NO: 208874 - DNA, 20 bp, synthetic construct
  source 1..20: mol_type = other DNA
agatttggggccaggagccg

SEQ ID NO: 208875 - DNA, 20 bp, synthetic construct
  source 1..20: mol_type = other DNA
gagatttggggccaggagcc

SEQ ID NO: 208876 - DNA, 20 bp, synthetic construct
  source 1..20: mol_type = other DNA
agagatttggggccaggagc

SEQ ID NO: 208877 - DNA, 20 bp, synthetic construct
  source 1..20: mol_type = other DNA
gagagatttggggccaggag

SEQ ID NO: 208878 - DNA, 20 bp, synthetic construct
  source 1..20: mol_type = other DNA
agagagatttggggccagga

SEQ ID NO: 208879 - DNA, 20 bp, synthetic construct
  source 1..20: mol_type = other DNA
cagagagatttggggccagg

SEQ ID NO: 208880 - DNA, 20 bp, synthetic construct
  source 1..20: mol_type = other DNA
tcagagagatttggggccag

SEQ ID NO: 208881 - DNA, 20 bp, synthetic construct
  source 1..20: mol_type = other DNA
atcagagagatttggggcca

SEQ ID NO: 208882 - DNA, 20 bp, synthetic construct
  source 1..20: mol_type = other DNA
gatcagagagatttggggcc

SEQ ID NO: 208883 - DNA, 20 bp, synthetic construct
  source 1..20: mol_type = other DNA
ggatcagagagatttggggc

SEQ ID NO: 208884 - DNA, 20 bp, synthetic construct
  source 1..20: mol_type = other DNA
cggatcagagagatttgggg

SEQ ID NO: 208885 - DNA, 20 bp, synthetic construct
  source 1..20: mol_type = other DNA
ccggatcagagagatttggg

SEQ ID NO: 208886 - DNA, 20 bp, synthetic construct
  source 1..20: mol_type = other DNA
cccggatcagagagatttgg

SEQ ID NO: 208887 - DNA, 20 bp, synthetic construct
  source 1..20: mol_type = other DNA
gcccggatcagagagatttg

SEQ ID NO: 208888 - DNA, 20 bp, synthetic construct
  source 1..20: mol_type = other DNA
agcccggatcagagagattt

SEQ ID NO: 208889 - DNA, 20 bp, synthetic construct
  source 1..20: mol_type = other DNA
gagcccggatcagagagatt

SEQ ID NO: 208890 - DNA, 20 bp, synthetic construct
  source 1..20: mol_type = other DNA
agagcccggatcagagagat

SEQ ID NO: 208891 - DNA, 20 bp, synthetic construct
  source 1..20: mol_type = other DNA
aagagcccggatcagagaga

SEQ ID NO: 208892 - DNA, 20 bp, synthetic construct
  source 1..20: mol_type = other DNA
gaagagcccggatcagagag

SEQ ID NO: 208893 - DNA, 20 bp, synthetic construct
  source 1..20: mol_type = other DNA
ggaagagcccggatcagaga

SEQ ID NO: 208894 - DNA, 20 bp, synthetic construct
  source 1..20: mol_type = other DNA
tggaagagcccggatcagag

SEQ ID NO: 208895 - DNA, 20 bp, synthetic construct
  source 1..20: mol_type = other DNA
ctggaagagcccggatcaga

SEQ ID NO: 208896 - DNA, 20 bp, synthetic construct
  source 1..20: mol_type = other DNA
tctggaagagcccggatcag

SEQ ID NO: 208897 - DNA, 20 bp, synthetic construct
  source 1..20: mol_type = other DNA
ttctggaagagcccggatca

SEQ ID NO: 208898 - DNA, 20 bp, synthetic construct
  source 1..20: mol_type = other DNA
attctggaagagcccggatc

SEQ ID NO: 208899 - DNA, 20 bp, synthetic construct
  source 1..20: mol_type = other DNA
cattctggaagagcccggat

SEQ ID NO: 208900 - DNA, 20 bp, synthetic construct
  source 1..20: mol_type = other DNA
acattctggaagagcccgga

SEQ ID NO: 208901 - DNA, 20 bp, synthetic construct
  source 1..20: mol_type = other DNA
gacattctggaagagcccgg

SEQ ID NO: 208902 - DNA, 20 bp, synthetic construct
  source 1..20: mol_type = other DNA
agacattctggaagagcccg

SEQ ID NO: 208903 - DNA, 20 bp, synthetic construct
  source 1..20: mol_type = other DNA
aagacattctggaagagccc

SEQ ID NO: 208904 - DNA, 20 bp, synthetic construct
  source 1..20: mol_type = other DNA
caagacattctggaagagcc

SEQ ID NO: 208905 - DNA, 20 bp, synthetic construct
  source 1..20: mol_type = other DNA
acaagacattctggaagagc

SEQ ID NO: 208906 - DNA, 20 bp, synthetic construct
  source 1..20: mol_type = other DNA
gacaagacattctggaagag

SEQ ID NO: 208907 - DNA, 20 bp, synthetic construct
  source 1..20: mol_type = other DNA
agacaagacattctggaaga

SEQ ID NO: 208908 - DNA, 20 bp, synthetic construct
  source 1..20: mol_type = other DNA
gagacaagacattctggaag

SEQ ID NO: 208909 - DNA, 20 bp, synthetic construct
  source 1..20: mol_type = other DNA
ggagacaagacattctggaa

SEQ ID NO: 208910 - DNA, 20 bp, synthetic construct
  source 1..20: mol_type = other DNA
tggagacaagacattctgga

SEQ ID NO: 208911 - DNA, 20 bp, synthetic construct
  source 1..20: mol_type = other DNA
gtggagacaagacattctgg

SEQ ID NO: 208912 - DNA, 20 bp, synthetic construct
  source 1..20: mol_type = other DNA
ggtggagacaagacattctg

SEQ ID NO: 208913 - DNA, 20 bp, synthetic construct
  source 1..20: mol_type = other DNA
tggtggagacaagacattct

SEQ ID NO: 208914 - DNA, 20 bp, synthetic construct
  source 1..20: mol_type = other DNA
atggtggagacaagacattc

SEQ ID NO: 208915 - DNA, 20 bp, synthetic construct
  source 1..20: mol_type = other DNA
gatggtggagacaagacatt

SEQ ID NO: 208916 - DNA, 20 bp, synthetic construct
  source 1..20: mol_type = other DNA
cgatggtggagacaagacat

SEQ ID NO: 208917 - DNA, 20 bp, synthetic construct
  source 1..20: mol_type = other DNA
gcgatggtggagacaagaca

SEQ ID NO: 208918 - DNA, 20 bp, synthetic construct
  source 1..20: mol_type = other DNA
ggcgatggtggagacaagac

SEQ ID NO: 208919 - DNA, 20 bp, synthetic construct
  source 1..20: mol_type = other DNA
aggcgatggtggagacaaga

SEQ ID NO: 208920 - DNA, 20 bp, synthetic construct
  source 1..20: mol_type = other DNA
aaggcgatggtggagacaag

SEQ ID NO: 208921 - DNA, 20 bp, synthetic construct
  source 1..20: mol_type = other DNA
aaaggcgatggtggagacaa

SEQ ID NO: 208922 - DNA, 20 bp, synthetic construct
  source 1..20: mol_type = other DNA
caaaggcgatggtggagaca

SEQ ID NO: 208923 - DNA, 20 bp, synthetic construct
  source 1..20: mol_type = other DNA
tcaaaggcgatggtggagac

SEQ ID NO: 208924 - DNA, 20 bp, synthetic construct
  source 1..20: mol_type = other DNA
gtcaaaggcgatggtggaga

SEQ ID NO: 208925 - DNA, 20 bp, synthetic construct
  source 1..20: mol_type = other DNA
ggtcaaaggcgatggtggag

SEQ ID NO: 208926 - DNA, 20 bp, synthetic construct
  source 1..20: mol_type = other DNA
tggtcaaaggcgatggtgga

SEQ ID NO: 208927 - DNA, 20 bp, synthetic construct
  source 1..20: mol_type = other DNA
ttggtcaaaggcgatggtgg

SEQ ID NO: 208928 - DNA, 20 bp, synthetic construct
  source 1..20: mol_type = other DNA
attggtcaaaggcgatggtg

SEQ ID NO: 208929 - DNA, 20 bp, synthetic construct
  source 1..20: mol_type = other DNA
cattggtcaaaggcgatggt

SEQ ID NO: 208930 - DNA, 20 bp, synthetic construct
  source 1..20: mol_type = other DNA
ccattggtcaaaggcgatgg

SEQ ID NO: 208931 - DNA, 20 bp, synthetic construct
  source 1..20: mol_type = other DNA
accattggtcaaaggcgatg

SEQ ID NO: 208932 - DNA, 20 bp, synthetic construct
  source 1..20: mol_type = other DNA
caccattggtcaaaggcgat

SEQ ID NO: 208933 - DNA, 20 bp, synthetic construct
  source 1..20: mol_type = other DNA
acaccattggtcaaaggcga

SEQ ID NO: 208934 - DNA, 20 bp, synthetic construct
  source 1..20: mol_type = other DNA
gacaccattggtcaaaggcg

SEQ ID NO: 208935 - DNA, 20 bp, synthetic construct
  source 1..20: mol_type = other DNA
ggacaccattggtcaaaggc

SEQ ID NO: 208936 - DNA, 20 bp, synthetic construct
  source 1..20: mol_type = other DNA
gggacaccattggtcaaagg

SEQ ID NO: 208937 - DNA, 20 bp, synthetic construct
  source 1..20: mol_type = other DNA
agggacaccattggtcaaag

SEQ ID NO: 208938 - DNA, 20 bp, synthetic construct
  source 1..20: mol_type = other DNA
aagggacaccattggtcaaa

SEQ ID NO: 208939 - DNA, 20 bp, synthetic construct
  source 1..20: mol_type = other DNA
aaagggacaccattggtcaa

SEQ ID NO: 208940 - DNA, 20 bp, synthetic construct
  source 1..20: mol_type = other DNA
caaagggacaccattggtca

SEQ ID NO: 208941 - DNA, 20 bp, synthetic construct
  source 1..20: mol_type = other DNA
gcaaagggacaccattggtc

SEQ ID NO: 208942 - DNA, 20 bp, synthetic construct
  source 1..20: mol_type = other DNA
ggcaaagggacaccattggt

SEQ ID NO: 208943 - DNA, 20 bp, synthetic construct
  source 1..20: mol_type = other DNA
aggcaaagggacaccattgg

SEQ ID NO: 208944 - DNA, 20 bp, synthetic construct
  source 1..20: mol_type = other DNA
caggcaaagggacaccattg

SEQ ID NO: 208945 - DNA, 20 bp, synthetic construct
  source 1..20: mol_type = other DNA
ccaggcaaagggacaccatt

SEQ ID NO: 208946 - DNA, 20 bp, synthetic construct
  source 1..20: mol_type = other DNA
accaggcaaagggacaccat

SEQ ID NO: 208947 - DNA, 20 bp, synthetic construct
  source 1..20: mol_type = other DNA
taccaggcaaagggacacca

SEQ ID NO: 208948 - DNA, 20 bp, synthetic construct
  source 1..20: mol_type = other DNA
ttaccaggcaaagggacacc

SEQ ID NO: 208949 - DNA, 20 bp, synthetic construct
  source 1..20: mol_type = other DNA
attaccaggcaaagggacac

SEQ ID NO: 208950 - DNA, 20 bp, synthetic construct
  source 1..20: mol_type = other DNA
cattaccaggcaaagggaca

SEQ ID NO: 208951 - DNA, 20 bp, synthetic construct
  source 1..20: mol_type = other DNA
acattaccaggcaaagggac

SEQ ID NO: 208952 - DNA, 20 bp, synthetic construct
  source 1..20: mol_type = other DNA
gacattaccaggcaaaggga

SEQ ID NO: 208953 - DNA, 20 bp, synthetic construct
  source 1..20: mol_type = other DNA
ggacattaccaggcaaaggg

SEQ ID NO: 208954 - DNA, 20 bp, synthetic construct
  source 1..20: mol_type = other DNA
gggacattaccaggcaaagg

SEQ ID NO: 208955 - DNA, 20 bp, synthetic construct
  source 1..20: mol_type = other DNA
ggggacattaccaggcaaag

SEQ ID NO: 208956 - DNA, 20 bp, synthetic construct
  source 1..20: mol_type = other DNA
aggggacattaccaggcaaa

SEQ ID NO: 208957 - DNA, 20 bp, synthetic construct
  source 1..20: mol_type = other DNA
aaggggacattaccaggcaa

SEQ ID NO: 208958 - DNA, 20 bp, synthetic construct
  source 1..20: mol_type = other DNA
aaaggggacattaccaggca

SEQ ID NO: 208959 - DNA, 20 bp, synthetic construct
  source 1..20: mol_type = other DNA
caaaggggacattaccaggc

SEQ ID NO: 208960 - DNA, 20 bp, synthetic construct
  source 1..20: mol_type = other DNA
gcaaaggggacattaccagg

SEQ ID NO: 208961 - DNA, 20 bp, synthetic construct
  source 1..20: mol_type = other DNA
ggcaaaggggacattaccag

SEQ ID NO: 208962 - DNA, 20 bp, synthetic construct
  source 1..20: mol_type = other DNA
aggcaaaggggacattacca

SEQ ID NO: 208963 - DNA, 20 bp, synthetic construct
  source 1..20: mol_type = other DNA
caggcaaaggggacattacc

SEQ ID NO: 208964 - DNA, 20 bp, synthetic construct
  source 1..20: mol_type = other DNA
tcaggcaaaggggacattac

SEQ ID NO: 208965 - DNA, 20 bp, synthetic construct
  source 1..20: mol_type = other DNA
atcaggcaaaggggacatta

SEQ ID NO: 208966 - DNA, 20 bp, synthetic construct
  source 1..20: mol_type = other DNA
catcaggcaaaggggacatt

SEQ ID NO: 208967 - DNA, 20 bp, synthetic construct
  source 1..20: mol_type = other DNA
tcatcaggcaaaggggacat

SEQ ID NO: 208968 - DNA, 20 bp, synthetic construct
  source 1..20: mol_type = other DNA
atcatcaggcaaaggggaca

SEQ ID NO: 208969 - DNA, 20 bp, synthetic construct
  source 1..20: mol_type = other DNA
catcatcaggcaaaggggac

SEQ ID NO: 208970 - DNA, 20 bp, synthetic construct
  source 1..20: mol_type = other DNA
ccatcatcaggcaaagggga

SEQ ID NO: 208971 - DNA, 20 bp, synthetic construct
  source 1..20: mol_type = other DNA
gccatcatcaggcaaagggg

SEQ ID NO: 208972 - DNA, 20 bp, synthetic construct
  source 1..20: mol_type = other DNA
ggccatcatcaggcaaaggg

SEQ ID NO: 208973 - DNA, 20 bp, synthetic construct
  source 1..20: mol_type = other DNA
gggccatcatcaggcaaagg

SEQ ID NO: 208974 - DNA, 20 bp, synthetic construct
  source 1..20: mol_type = other DNA
agggccatcatcaggcaaag

SEQ ID NO: 208975 - DNA, 20 bp, synthetic construct
  source 1..20: mol_type = other DNA
cagggccatcatcaggcaaa

SEQ ID NO: 208976 - DNA, 20 bp, synthetic construct
  source 1..20: mol_type = other DNA
acagggccatcatcaggcaa

SEQ ID NO: 208977 - DNA, 20 bp, synthetic construct
  source 1..20: mol_type = other DNA
gacagggccatcatcaggca

SEQ ID NO: 208978 - DNA, 20 bp, synthetic construct
  source 1..20: mol_type = other DNA
tgacagggccatcatcaggc

SEQ ID NO: 208979 - DNA, 20 bp, synthetic construct
  source 1..20: mol_type = other DNA
gtgacagggccatcatcagg

SEQ ID NO: 208980 - DNA, 20 bp, synthetic construct
  source 1..20: mol_type = other DNA
agtgacagggccatcatcag

SEQ ID NO: 208981 - DNA, 20 bp, synthetic construct
  source 1..20: mol_type = other DNA
gagtgacagggccatcatca

SEQ ID NO: 208982 - DNA, 20 bp, synthetic construct
  source 1..20: mol_type = other DNA
ggagtgacagggccatcatc

SEQ ID NO: 208983 - DNA, 20 bp, synthetic construct
  source 1..20: mol_type = other DNA
aggagtgacagggccatcat

SEQ ID NO: 208984 - DNA, 20 bp, synthetic construct
  source 1..20: mol_type = other DNA
gaggagtgacagggccatca

SEQ ID NO: 208985 - DNA, 20 bp, synthetic construct
  source 1..20: mol_type = other DNA
agaggagtgacagggccatc

SEQ ID NO: 208986 - DNA, 20 bp, synthetic construct
  source 1..20: mol_type = other DNA
gagaggagtgacagggccat

SEQ ID NO: 208987 - DNA, 20 bp, synthetic construct
  source 1..20: mol_type = other DNA
agagaggagtgacagggcca

SEQ ID NO: 208988 - DNA, 20 bp, synthetic construct
  source 1..20: mol_type = other DNA
aagagaggagtgacagggcc

SEQ ID NO: 208989 - DNA, 20 bp, synthetic construct
  source 1..20: mol_type = other DNA
aaagagaggagtgacagggc

SEQ ID NO: 208990 - DNA, 20 bp, synthetic construct
  source 1..20: mol_type = other DNA
taaagagaggagtgacaggg

SEQ ID NO: 208991 - DNA, 20 bp, synthetic construct
  source 1..20: mol_type = other DNA
ctaaagagaggagtgacagg

SEQ ID NO: 208992 - DNA, 20 bp, synthetic construct
  source 1..20: mol_type = other DNA
gctaaagagaggagtgacag

SEQ ID NO: 208993 - DNA, 20 bp, synthetic construct
  source 1..20: mol_type = other DNA
tgctaaagagaggagtgaca

SEQ ID NO: 208994 - DNA, 20 bp, synthetic construct
  source 1..20: mol_type = other DNA
gtgctaaagagaggagtgac

SEQ ID NO: 208995 - DNA, 20 bp, synthetic construct
  source 1..20: mol_type = other DNA
tgtgctaaagagaggagtga

SEQ ID NO: 208996 - DNA, 20 bp, synthetic construct
  source 1..20: mol_type = other DNA
ctgtgctaaagagaggagtg

SEQ ID NO: 208997 - DNA, 20 bp, synthetic construct
  source 1..20: mol_type = other DNA
tctgtgctaaagagaggagt

SEQ ID NO: 208998 - DNA, 20 bp, synthetic construct
  source 1..20: mol_type = other DNA
ctctgtgctaaagagaggag

SEQ ID NO: 208999 - DNA, 20 bp, synthetic construct
  source 1..20: mol_type = other DNA
cctctgtgctaaagagagga

SEQ ID NO: 209000 - DNA, 20 bp, synthetic construct
  source 1..20: mol_type = other DNA
tcctctgtgctaaagagagg

SEQ ID NO: 209001 - DNA, 20 bp, synthetic construct
  source 1..20: mol_type = other DNA
ctcctctgtgctaaagagag

SEQ ID NO: 209002 - DNA, 20 bp, synthetic construct
  source 1..20: mol_type = other DNA
cctcctctgtgctaaagaga

SEQ ID NO: 209003 - DNA, 20 bp, synthetic construct
  source 1..20: mol_type = other DNA
gcctcctctgtgctaaagag

SEQ ID NO: 209004 - DNA, 20 bp, synthetic construct
  source 1..20: mol_type = other DNA
agcctcctctgtgctaaaga

SEQ ID NO: 209005 - DNA, 20 bp, synthetic construct
  source 1..20: mol_type = other DNA
cagcctcctctgtgctaaag

SEQ ID NO: 209006 - DNA, 20 bp, synthetic construct
  source 1..20: mol_type = other DNA
acagcctcctctgtgctaaa

SEQ ID NO: 209007 - DNA, 20 bp, synthetic construct
  source 1..20: mol_type = other DNA
aacagcctcctctgtgctaa

SEQ ID NO: 209008 - DNA, 20 bp, synthetic construct
  source 1..20: mol_type = other DNA
aaacagcctcctctgtgcta

SEQ ID NO: 209009 - DNA, 20 bp, synthetic construct
  source 1..20: mol_type = other DNA
gaaacagcctcctctgtgct

SEQ ID NO: 209010 - DNA, 20 bp, synthetic construct
  source 1..20: mol_type = other DNA
tgaaacagcctcctctgtgc

SEQ ID NO: 209011 - DNA, 20 bp, synthetic construct
  source 1..20: mol_type = other DNA
atgaaacagcctcctctgtg

SEQ ID NO: 209012 - DNA, 20 bp, synthetic construct
  source 1..20: mol_type = other DNA
gatgaaacagcctcctctgt

SEQ ID NO: 209013 - DNA, 20 bp, synthetic construct
  source 1..20: mol_type = other DNA
ggatgaaacagcctcctctg

SEQ ID NO: 209014 - DNA, 20 bp, synthetic construct
  source 1..20: mol_type = other DNA
gggatgaaacagcctcctct

SEQ ID NO: 209015 - DNA, 20 bp, synthetic construct
  source 1..20: mol_type = other DNA
agggatgaaacagcctcctc

SEQ ID NO: 209016 - DNA, 20 bp, synthetic construct
  source 1..20: mol_type = other DNA
aagggatgaaacagcctcct

SEQ ID NO: 209017 - DNA, 20 bp, synthetic construct
  source 1..20: mol_type = other DNA
gaagggatgaaacagcctcc

SEQ ID NO: 209018 - DNA, 20 bp, synthetic construct
  source 1..20: mol_type = other DNA
tgaagggatgaaacagcctc

SEQ ID NO: 209019 - DNA, 20 bp, synthetic construct
  source 1..20: mol_type = other DNA
ttgaagggatgaaacagcct

SEQ ID NO: 209020 - DNA, 20 bp, synthetic construct
  source 1..20: mol_type = other DNA
cttgaagggatgaaacagcc

SEQ ID NO: 209021 - DNA, 20 bp, synthetic construct
  source 1..20: mol_type = other DNA
gcttgaagggatgaaacagc

SEQ ID NO: 209022 - DNA, 20 bp, synthetic construct
  source 1..20: mol_type = other DNA
ggcttgaagggatgaaacag

SEQ ID NO: 209023 - DNA, 20 bp, synthetic construct
  source 1..20: mol_type = other DNA
aggcttgaagggatgaaaca

SEQ ID NO: 209024 - DNA, 20 bp, synthetic construct
  source 1..20: mol_type = other DNA
caggcttgaagggatgaaac

SEQ ID NO: 209025 - DNA, 20 bp, synthetic construct
  source 1..20: mol_type = other DNA
gcaggcttgaagggatgaaa

SEQ ID NO: 209026 - DNA, 20 bp, synthetic construct
  source 1..20: mol_type = other DNA
ggcaggcttgaagggatgaa

SEQ ID NO: 209027 - DNA, 20 bp, synthetic construct
  source 1..20: mol_type = other DNA
gggcaggcttgaagggatga

SEQ ID NO: 209028 - DNA, 20 bp, synthetic construct
  source 1..20: mol_type = other DNA
agggcaggcttgaagggatg

SEQ ID NO: 209029 - DNA, 20 bp, synthetic construct
  source 1..20: mol_type = other DNA
gagggcaggcttgaagggat

SEQ ID NO: 209030 - DNA, 20 bp, synthetic construct
  source 1..20: mol_type = other DNA
ggagggcaggcttgaaggga

SEQ ID NO: 209031 - DNA, 20 bp, synthetic construct
  source 1..20: mol_type = other DNA
gggagggcaggcttgaaggg

SEQ ID NO: 209032 - DNA, 20 bp, synthetic construct
  source 1..20: mol_type = other DNA
agggagggcaggcttgaagg

SEQ ID NO: 209033 - DNA, 20 bp, synthetic construct
  source 1..20: mol_type = other DNA
aagggagggcaggcttgaag

SEQ ID NO: 209034 - DNA, 20 bp, synthetic construct
  source 1..20: mol_type = other DNA
gaagggagggcaggcttgaa

SEQ ID NO: 209035 - DNA, 20 bp, synthetic construct
  source 1..20: mol_type = other DNA
tgaagggagggcaggcttga

SEQ ID NO: 209036 - DNA, 20 bp, synthetic construct
  source 1..20: mol_type = other DNA
ttgaagggagggcaggcttg

SEQ ID NO: 209037 - DNA, 20 bp, synthetic construct
  source 1..20: mol_type = other DNA
cttgaagggagggcaggctt

SEQ ID NO: 209038 - DNA, 20 bp, synthetic construct
  source 1..20: mol_type = other DNA
acttgaagggagggcaggct

SEQ ID NO: 209039 - DNA, 20 bp, synthetic construct
  source 1..20: mol_type = other DNA
gacttgaagggagggcaggc

SEQ ID NO: 209040 - DNA, 20 bp, synthetic construct
  source 1..20: mol_type = other DNA
agacttgaagggagggcagg

SEQ ID NO: 209041 - DNA, 20 bp, synthetic construct
  source 1..20: mol_type = other DNA
aagacttgaagggagggcag

SEQ ID NO: 209042 - DNA, 20 bp, synthetic construct
  source 1..20: mol_type = other DNA
taagacttgaagggagggca

SEQ ID NO: 209043 - DNA, 20 bp, synthetic construct
  source 1..20: mol_type = other DNA
ctaagacttgaagggagggc

SEQ ID NO: 209044 - DNA, 20 bp, synthetic construct
  source 1..20: mol_type = other DNA
gctaagacttgaagggaggg

SEQ ID NO: 209045 - DNA, 20 bp, synthetic construct
  source 1..20: mol_type = other DNA
agctaagacttgaagggagg

SEQ ID NO: 209046 - DNA, 20 bp, synthetic construct
  source 1..20: mol_type = other DNA
gagctaagacttgaagggag

SEQ ID NO: 209047 - DNA, 20 bp, synthetic construct
  source 1..20: mol_type = other DNA
tgagctaagacttgaaggga

SEQ ID NO: 209048 - DNA, 20 bp, synthetic construct
  source 1..20: mol_type = other DNA
ttgagctaagacttgaaggg

SEQ ID NO: 209049 - DNA, 20 bp, synthetic construct
  source 1..20: mol_type = other DNA
cttgagctaagacttgaagg

SEQ ID NO: 209050 - DNA, 20 bp, synthetic construct
  source 1..20: mol_type = other DNA
acttgagctaagacttgaag

SEQ ID NO: 209051 - DNA, 20 bp, synthetic construct
  source 1..20: mol_type = other DNA
aacttgagctaagacttgaa

SEQ ID NO: 209052 - DNA, 20 bp, synthetic construct
  source 1..20: mol_type = other DNA
gaacttgagctaagacttga

SEQ ID NO: 209053 - DNA, 20 bp, synthetic construct
  source 1..20: mol_type = other DNA
tgaacttgagctaagacttg

SEQ ID NO: 209054 - DNA, 20 bp, synthetic construct
  source 1..20: mol_type = other DNA
gtgaacttgagctaagactt

SEQ ID NO: 209055 - DNA, 20 bp, synthetic construct
  source 1..20: mol_type = other DNA
ggtgaacttgagctaagact

SEQ ID NO: 209056 - DNA, 20 bp, synthetic construct
  source 1..20: mol_type = other DNA
aggtgaacttgagctaagac

SEQ ID NO: 209057 - DNA, 20 bp, synthetic construct
  source 1..20: mol_type = other DNA
aaggtgaacttgagctaaga

SEQ ID NO: 209058 - DNA, 20 bp, synthetic construct
  source 1..20: mol_type = other DNA
gaaggtgaacttgagctaag

SEQ ID NO: 209059 - DNA, 20 bp, synthetic construct
  source 1..20: mol_type = other DNA
agaaggtgaacttgagctaa

SEQ ID NO: 209060 - DNA, 20 bp, synthetic construct
  source 1..20: mol_type = other DNA
gagaaggtgaacttgagcta

SEQ ID NO: 209061 - DNA, 20 bp, synthetic construct
  source 1..20: mol_type = other DNA
ggagaaggtgaacttgagct

SEQ ID NO: 209062 - DNA, 20 bp, synthetic construct
  source 1..20: mol_type = other DNA
cggagaaggtgaacttgagc

SEQ ID NO: 209063 - DNA, 20 bp, synthetic construct
  source 1..20: mol_type = other DNA
gcggagaaggtgaacttgag

SEQ ID NO: 209064 - DNA, 20 bp, synthetic construct
  source 1..20: mol_type = other DNA
tgcggagaaggtgaacttga

SEQ ID NO: 209065 - DNA, 20 bp, synthetic construct
  source 1..20: mol_type = other DNA
ctgcggagaaggtgaacttg

SEQ ID NO: 209066 - DNA, 20 bp, synthetic construct
  source 1..20: mol_type = other DNA
tctgcggagaaggtgaactt

SEQ ID NO: 209067 - DNA, 20 bp, synthetic construct
  source 1..20: mol_type = other DNA
ctctgcggagaaggtgaact

SEQ ID NO: 209068 - DNA, 20 bp, synthetic construct
  source 1..20: mol_type = other DNA
gctctgcggagaaggtgaac

SEQ ID NO: 209069 - DNA, 20 bp, synthetic construct
  source 1..20: mol_type = other DNA
ggctctgcggagaaggtgaa

SEQ ID NO: 209070 - DNA, 20 bp, synthetic construct
  source 1..20: mol_type = other DNA
aggctctgcggagaaggtga

SEQ ID NO: 209071 - DNA, 20 bp, synthetic construct
  source 1..20: mol_type = other DNA
aaggctctgcggagaaggtg

SEQ ID NO: 209072 - DNA, 20 bp, synthetic construct
  source 1..20: mol_type = other DNA
gaaggctctgcggagaaggt

SEQ ID NO: 209073 - DNA, 20 bp, synthetic construct
  source 1..20: mol_type = other DNA
agaaggctctgcggagaagg

SEQ ID NO: 209074 - DNA, 20 bp, synthetic construct
  source 1..20: mol_type = other DNA
gagaaggctctgcggagaag

SEQ ID NO: 209075 - DNA, 20 bp, synthetic construct
  source 1..20: mol_type = other DNA
ggagaaggctctgcggagaa

SEQ ID NO: 209076 - DNA, 20 bp, synthetic construct
  source 1..20: mol_type = other DNA
tggagaaggctctgcggaga

SEQ ID NO: 209077 - DNA, 20 bp, synthetic construct
  source 1..20: mol_type = other DNA
ttggagaaggctctgcggag

SEQ ID NO: 209078 - DNA, 20 bp, synthetic construct
  source 1..20: mol_type = other DNA
attggagaaggctctgcgga

SEQ ID NO: 209079 - DNA, 20 bp, synthetic construct
  source 1..20: mol_type = other DNA
gattggagaaggctctgcgg

SEQ ID NO: 209080 - DNA, 20 bp, synthetic construct
  source 1..20: mol_type = other DNA
agattggagaaggctctgcg

SEQ ID NO: 209081 - DNA, 20 bp, synthetic construct
  source 1..20: mol_type = other DNA
aagattggagaaggctctgc

SEQ ID NO: 209082 - DNA, 20 bp, synthetic construct
  source 1..20: mol_type = other DNA
gaagattggagaaggctctg

SEQ ID NO: 209083 - DNA, 20 bp, synthetic construct
  source 1..20: mol_type = other DNA
agaagattggagaaggctct

SEQ ID NO: 209084 - DNA, 20 bp, synthetic construct
  source 1..20: mol_type = other DNA
aagaagattggagaaggctc

SEQ ID NO: 209085 - DNA, 20 bp, synthetic construct
  source 1..20: mol_type = other DNA
caagaagattggagaaggct

SEQ ID NO: 209086 - DNA, 20 bp, synthetic construct
  source 1..20: mol_type = other DNA
tcaagaagattggagaaggc

SEQ ID NO: 209087 - DNA, 20 bp, synthetic construct
  source 1..20: mol_type = other DNA
gtcaagaagattggagaagg

SEQ ID NO: 209088 - DNA, 20 bp, synthetic construct
  source 1..20: mol_type = other DNA
agtcaagaagattggagaag

SEQ ID NO: 209089 - DNA, 20 bp, synthetic construct
  source 1..20: mol_type = other DNA
tagtcaagaagattggagaa

SEQ ID NO: 209090 - DNA, 20 bp, synthetic construct
  source 1..20: mol_type = other DNA
gtagtcaagaagattggaga

SEQ ID NO: 209091 - DNA, 20 bp, synthetic construct
  source 1..20: mol_type = other DNA
cgtagtcaagaagattggag

SEQ ID NO: 209092 - DNA, 20 bp, synthetic construct
  source 1..20: mol_type = other DNA
acgtagtcaagaagattgga

SEQ ID NO: 209093 - DNA, 20 bp, synthetic construct
  source 1..20: mol_type = other DNA
gacgtagtcaagaagattgg

SEQ ID NO: 209094 - DNA, 20 bp, synthetic construct
  source 1..20: mol_type = other DNA
agacgtagtcaagaagattg

SEQ ID NO: 209095 - DNA, 20 bp, synthetic construct
  source 1..20: mol_type = other DNA
gagacgtagtcaagaagatt

SEQ ID NO: 209096 - DNA, 20 bp, synthetic construct
  source 1..20: mol_type = other DNA
ggagacgtagtcaagaagat

SEQ ID NO: 209097 - DNA, 20 bp, synthetic construct
  source 1..20: mol_type = other DNA
aggagacgtagtcaagaaga

SEQ ID NO: 209098 - DNA, 20 bp, synthetic construct
  source 1..20: mol_type = other DNA
gaggagacgtagtcaagaag

SEQ ID NO: 209099 - DNA, 20 bp, synthetic construct
  source 1..20: mol_type = other DNA
agaggagacgtagtcaagaa

SEQ ID NO: 209100 - DNA, 20 bp, synthetic construct
  source 1..20: mol_type = other DNA
gagaggagacgtagtcaaga

SEQ ID NO: 209101 - DNA, 20 bp, synthetic construct
  source 1..20: mol_type = other DNA
tgagaggagacgtagtcaag

SEQ ID NO: 209102 - DNA, 20 bp, synthetic construct
  source 1..20: mol_type = other DNA
ctgagaggagacgtagtcaa

SEQ ID NO: 209103 - DNA, 20 bp, synthetic construct
  source 1..20: mol_type = other DNA
gctgagaggagacgtagtca

SEQ ID NO: 209104 - DNA, 20 bp, synthetic construct
  source 1..20: mol_type = other DNA
agctgagaggagacgtagtc

SEQ ID NO: 209105 - DNA, 20 bp, synthetic construct
  source 1..20: mol_type = other DNA
gagctgagaggagacgtagt

SEQ ID NO: 209106 - DNA, 20 bp, synthetic construct
  source 1..20: mol_type = other DNA
ggagctgagaggagacgtag

SEQ ID NO: 209107 - DNA, 20 bp, synthetic construct
  source 1..20: mol_type = other DNA
tggagctgagaggagacgta

SEQ ID NO: 209108 - DNA, 20 bp, synthetic construct
  source 1..20: mol_type = other DNA
ctggagctgagaggagacgt

SEQ ID NO: 209109 - DNA, 20 bp, synthetic construct
  source 1..20: mol_type = other DNA
gctggagctgagaggagacg

SEQ ID NO: 209110 - DNA, 20 bp, synthetic construct
  source 1..20: mol_type = other DNA
tgctggagctgagaggagac

SEQ ID NO: 209111 - DNA, 20 bp, synthetic construct
  source 1..20: mol_type = other DNA
ttgctggagctgagaggaga

SEQ ID NO: 209112 - DNA, 20 bp, synthetic construct
  source 1..20: mol_type = other DNA
gttgctggagctgagaggag

SEQ ID NO: 209113 - DNA, 20 bp, synthetic construct
  source 1..20: mol_type = other DNA
ggttgctggagctgagagga

SEQ ID NO: 209114 - DNA, 20 bp, synthetic construct
  source 1..20: mol_type = other DNA
aggttgctggagctgagagg

SEQ ID NO: 209115 - DNA, 20 bp, synthetic construct
  source 1..20: mol_type = other DNA
gaggttgctggagctgagag

SEQ ID NO: 209116 - DNA, 20 bp, synthetic construct
  source 1..20: mol_type = other DNA
agaggttgctggagctgaga

SEQ ID NO: 209117 - DNA, 20 bp, synthetic construct
  source 1..20: mol_type = other DNA
cagaggttgctggagctgag

SEQ ID NO: 209118 - DNA, 20 bp, synthetic construct
  source 1..20: mol_type = other DNA
acagaggttgctggagctga

SEQ ID NO: 209119 - DNA, 20 bp, synthetic construct
  source 1..20: mol_type = other DNA
gacagaggttgctggagctg

SEQ ID NO: 209120 - DNA, 20 bp, synthetic construct
  source 1..20: mol_type = other DNA
agacagaggttgctggagct

SEQ ID NO: 209121 - DNA, 20 bp, synthetic construct
  source 1..20: mol_type = other DNA
gagacagaggttgctggagc

SEQ ID NO: 209122 - DNA, 20 bp, synthetic construct
  source 1..20: mol_type = other DNA
agagacagaggttgctggag

SEQ ID NO: 209123 - DNA, 20 bp, synthetic construct
  source 1..20: mol_type = other DNA
cagagacagaggttgctgga

SEQ ID NO: 209124 - DNA, 20 bp, synthetic construct
  source 1..20: mol_type = other DNA
ccagagacagaggttgctgg

SEQ ID NO: 209125 - DNA, 20 bp, synthetic construct
  source 1..20: mol_type = other DNA
gccagagacagaggttgctg

SEQ ID NO: 209126 - DNA, 20 bp, synthetic construct
  source 1..20: mol_type = other DNA
tgccagagacagaggttgct

SEQ ID NO: 209127 - DNA, 20 bp, synthetic construct
  source 1..20: mol_type = other DNA
gtgccagagacagaggttgc

SEQ ID NO: 209128 - DNA, 20 bp, synthetic construct
  source 1..20: mol_type = other DNA
agtgccagagacagaggttg

SEQ ID NO: 209129 - DNA, 20 bp, synthetic construct
  source 1..20: mol_type = other DNA
cagtgccagagacagaggtt

SEQ ID NO: 209130 - DNA, 20 bp, synthetic construct
  source 1..20: mol_type = other DNA
tcagtgccagagacagaggt

SEQ ID NO: 209131 - DNA, 20 bp, synthetic construct
  source 1..20: mol_type = other DNA
atcagtgccagagacagagg

SEQ ID NO: 209132 - DNA, 20 bp, synthetic construct
  source 1..20: mol_type = other DNA
aatcagtgccagagacagag

SEQ ID NO: 209133 - DNA, 20 bp, synthetic construct
  source 1..20: mol_type = other DNA
gaatcagtgccagagacaga

SEQ ID NO: 209134 - DNA, 20 bp, synthetic construct
  source 1..20: mol_type = other DNA
ggaatcagtgccagagacag

SEQ ID NO: 209135 - DNA, 20 bp, synthetic construct
  source 1..20: mol_type = other DNA
aggaatcagtgccagagaca

SEQ ID NO: 209136 - DNA, 20 bp, synthetic construct
  source 1..20: mol_type = other DNA
aaggaatcagtgccagagac

SEQ ID NO: 209137 - DNA, 20 bp, synthetic construct
  source 1..20: mol_type = other DNA
taaggaatcagtgccagaga

SEQ ID NO: 209138 - DNA, 20 bp, synthetic construct
  source 1..20: mol_type = other DNA
gtaaggaatcagtgccagag

SEQ ID NO: 209139 - DNA, 20 bp, synthetic construct
  source 1..20: mol_type = other DNA
agtaaggaatcagtgccaga

SEQ ID NO: 209140 - DNA, 20 bp, synthetic construct
  source 1..20: mol_type = other DNA
aagtaaggaatcagtgccag

SEQ ID NO: 209141 - DNA, 20 bp, synthetic construct
  source 1..20: mol_type = other DNA
taagtaaggaatcagtgcca

SEQ ID NO: 209142 - DNA, 20 bp, synthetic construct
  source 1..20: mol_type = other DNA
ctaagtaaggaatcagtgcc

SEQ ID NO: 209143 - DNA, 20 bp, synthetic construct
  source 1..20: mol_type = other DNA
gctaagtaaggaatcagtgc

SEQ ID NO: 209144 - DNA, 20 bp, synthetic construct
  source 1..20: mol_type = other DNA
agctaagtaaggaatcagtg

SEQ ID NO: 209145 - DNA, 20 bp, synthetic construct
  source 1..20: mol_type = other DNA
tagctaagtaaggaatcagt

SEQ ID NO: 209146 - DNA, 20 bp, synthetic construct
  source 1..20: mol_type = other DNA
ttagctaagtaaggaatcag

SEQ ID NO: 209147 - DNA, 20 bp, synthetic construct
  source 1..20: mol_type = other DNA
cttagctaagtaaggaatca

SEQ ID NO: 209148 - DNA, 20 bp, synthetic construct
  source 1..20: mol_type = other DNA
tcttagctaagtaaggaatc

SEQ ID NO: 209149 - DNA, 20 bp, synthetic construct
  source 1..20: mol_type = other DNA
ctcttagctaagtaaggaat

SEQ ID NO: 209150 - DNA, 20 bp, synthetic construct
  source 1..20: mol_type = other DNA
tctcttagctaagtaaggaa

SEQ ID NO: 209151 - DNA, 20 bp, synthetic construct
  source 1..20: mol_type = other DNA
ttctcttagctaagtaagga

SEQ ID NO: 209152 - DNA, 20 bp, synthetic construct
  source 1..20: mol_type = other DNA
attctcttagctaagtaagg

SEQ ID NO: 209153 - DNA, 20 bp, synthetic construct
  source 1..20: mol_type = other DNA
gattctcttagctaagtaag

SEQ ID NO: 209154 - DNA, 20 bp, synthetic construct
  source 1..20: mol_type = other DNA
tgattctcttagctaagtaa

SEQ ID NO: 209155 - DNA, 20 bp, synthetic construct
  source 1..20: mol_type = other DNA
gtgattctcttagctaagta

SEQ ID NO: 209156 - DNA, 20 bp, synthetic construct
  source 1..20: mol_type = other DNA
tgtgattctcttagctaagt

SEQ ID NO: 209157 - DNA, 20 bp, synthetic construct
  source 1..20: mol_type = other DNA
ctgtgattctcttagctaag

SEQ ID NO: 209158 - DNA, 20 bp, synthetic construct
  source 1..20: mol_type = other DNA
tctgtgattctcttagctaa

SEQ ID NO: 209159 - DNA, 20 bp, synthetic construct
  source 1..20: mol_type = other DNA
gtctgtgattctcttagcta

SEQ ID NO: 209160 - DNA, 20 bp, synthetic construct
  source 1..20: mol_type = other DNA
tgtctgtgattctcttagct

SEQ ID NO: 209161 - DNA, 20 bp, synthetic construct
  source 1..20: mol_type = other DNA
gtgtctgtgattctcttagc

SEQ ID NO: 209162 - DNA, 20 bp, synthetic construct
  source 1..20: mol_type = other DNA
agtgtctgtgattctcttag

SEQ ID NO: 209163 - DNA, 20 bp, synthetic construct
  source 1..20: mol_type = other DNA
aagtgtctgtgattctctta

SEQ ID NO: 209164 - DNA, 20 bp, synthetic construct
  source 1..20: mol_type = other DNA
caagtgtctgtgattctctt

SEQ ID NO: 209165 - DNA, 20 bp, synthetic construct
  source 1..20: mol_type = other DNA
ccaagtgtctgtgattctct

SEQ ID NO: 209166 - DNA, 20 bp, synthetic construct
  source 1..20: mol_type = other DNA
cccaagtgtctgtgattctc

SEQ ID NO: 209167 - DNA, 20 bp, synthetic construct
  source 1..20: mol_type = other DNA
ccccaagtgtctgtgattct

SEQ ID NO: 209168 - DNA, 20 bp, synthetic construct
  source 1..20: mol_type = other DNA
gccccaagtgtctgtgattc

SEQ ID NO: 209169 - DNA, 20 bp, synthetic construct
  source 1..20: mol_type = other DNA
agccccaagtgtctgtgatt

SEQ ID NO: 209170 - DNA, 20 bp, synthetic construct
  source 1..20: mol_type = other DNA
gagccccaagtgtctgtgat

SEQ ID NO: 209171 - DNA, 20 bp, synthetic construct
  source 1..20: mol_type = other DNA
tgagccccaagtgtctgtga

SEQ ID NO: 209172 - DNA, 20 bp, synthetic construct
  source 1..20: mol_type = other DNA
ctgagccccaagtgtctgtg

SEQ ID NO: 209173 - DNA, 20 bp, synthetic construct
  source 1..20: mol_type = other DNA
cctgagccccaagtgtctgt

SEQ ID NO: 209174 - DNA, 20 bp, synthetic construct
  source 1..20: mol_type = other DNA
tcctgagccccaagtgtctg

SEQ ID NO: 209175 - DNA, 20 bp, synthetic construct
  source 1..20: mol_type = other DNA
gtcctgagccccaagtgtct

SEQ ID NO: 209176 - DNA, 20 bp, synthetic construct
  source 1..20: mol_type = other DNA
tgtcctgagccccaagtgtc

SEQ ID NO: 209177 - DNA, 20 bp, synthetic construct
  source 1..20: mol_type = other DNA
ttgtcctgagccccaagtgt

SEQ ID NO: 209178 - DNA, 20 bp, synthetic construct
  source 1..20: mol_type = other DNA
attgtcctgagccccaagtg

SEQ ID NO: 209179 - DNA, 20 bp, synthetic construct
  source 1..20: mol_type = other DNA
gattgtcctgagccccaagt

SEQ ID NO: 209180 - DNA, 20 bp, synthetic construct
  source 1..20: mol_type = other DNA
agattgtcctgagccccaag

SEQ ID NO: 209181 - DNA, 20 bp, synthetic construct
  source 1..20: mol_type = other DNA
cagattgtcctgagccccaa

SEQ ID NO: 209182 - DNA, 20 bp, synthetic construct
  source 1..20: mol_type = other DNA
gcagattgtcctgagcccca

SEQ ID NO: 209183 - DNA, 20 bp, synthetic construct
  source 1..20: mol_type = other DNA
agcagattgtcctgagcccc

SEQ ID NO: 209184 - DNA, 20 bp, synthetic construct
  source 1..20: mol_type = other DNA
aagcagattgtcctgagccc

SEQ ID NO: 209185 - DNA, 20 bp, synthetic construct
  source 1..20: mol_type = other DNA
aaagcagattgtcctgagcc

SEQ ID NO: 209186 - DNA, 20 bp, synthetic construct
  source 1..20: mol_type = other DNA
gaaagcagattgtcctgagc

SEQ ID NO: 209187 - DNA, 20 bp, synthetic construct
  source 1..20: mol_type = other DNA
agaaagcagattgtcctgag

SEQ ID NO: 209188 - DNA, 20 bp, synthetic construct
  source 1..20: mol_type = other DNA
gagaaagcagattgtcctga

SEQ ID NO: 209189 - DNA, 20 bp, synthetic construct
  source 1..20: mol_type = other DNA
agagaaagcagattgtcctg

SEQ ID NO: 209190 - DNA, 20 bp, synthetic construct
  source 1..20: mol_type = other DNA
gagagaaagcagattgtcct

SEQ ID NO: 209191 - DNA, 20 bp, synthetic construct
  source 1..20: mol_type = other DNA
agagagaaagcagattgtcc

SEQ ID NO: 209192 - DNA, 20 bp, synthetic construct
  source 1..20: mol_type = other DNA
aagagagaaagcagattgtc

SEQ ID NO: 209193 - DNA, 20 bp, synthetic construct
  source 1..20: mol_type = other DNA
gaagagagaaagcagattgt

SEQ ID NO: 209194 - DNA, 20 bp, synthetic construct
  source 1..20: mol_type = other DNA
agaagagagaaagcagattg

SEQ ID NO: 209195 - DNA, 20 bp, synthetic construct
  source 1..20: mol_type = other DNA
aagaagagagaaagcagatt

SEQ ID NO: 209196 - DNA, 20 bp, synthetic construct
  source 1..20: mol_type = other DNA
taagaagagagaaagcagat

SEQ ID NO: 209197 - DNA, 20 bp, synthetic construct
  source 1..20: mol_type = other DNA
gtaagaagagagaaagcaga

SEQ ID NO: 209198 - DNA, 20 bp, synthetic construct
  source 1..20: mol_type = other DNA
ggtaagaagagagaaagcag

SEQ ID NO: 209199 - DNA, 20 bp, synthetic construct
  source 1..20: mol_type = other DNA
gggtaagaagagagaaagca

SEQ ID NO: 209200 - DNA, 20 bp, synthetic construct
  source 1..20: mol_type = other DNA
tgggtaagaagagagaaagc

SEQ ID NO: 209201 - DNA, 20 bp, synthetic construct
  source 1..20: mol_type = other DNA
atgggtaagaagagagaaag

SEQ ID NO: 209202 - DNA, 20 bp, synthetic construct
  source 1..20: mol_type = other DNA
catgggtaagaagagagaaa

SEQ ID NO: 209203 - DNA, 20 bp, synthetic construct
  source 1..20: mol_type = other DNA
ccatgggtaagaagagagaa

SEQ ID NO: 209204 - DNA, 20 bp, synthetic construct
  source 1..20: mol_type = other DNA
gccatgggtaagaagagaga

SEQ ID NO: 209205 - DNA, 20 bp, synthetic construct
  source 1..20: mol_type = other DNA
ggccatgggtaagaagagag

SEQ ID NO: 209206 - DNA, 20 bp, synthetic construct
  source 1..20: mol_type = other DNA
aggccatgggtaagaagaga

SEQ ID NO: 209207 - DNA, 20 bp, synthetic construct
  source 1..20: mol_type = other DNA
aaggccatgggtaagaagag

SEQ ID NO: 209208 - DNA, 20 bp, synthetic construct
  source 1..20: mol_type = other DNA
caaggccatgggtaagaaga

SEQ ID NO: 209209 - DNA, 20 bp, synthetic construct
  source 1..20: mol_type = other DNA
ccaaggccatgggtaagaag

SEQ ID NO: 209210 - DNA, 20 bp, synthetic construct
  source 1..20: mol_type = other DNA
tccaaggccatgggtaagaa

SEQ ID NO: 209211 - DNA, 20 bp, synthetic construct
  source 1..20: mol_type = other DNA
gtccaaggccatgggtaaga

SEQ ID NO: 209212 - DNA, 20 bp, synthetic construct
  source 1..20: mol_type = other DNA
agtccaaggccatgggtaag

SEQ ID NO: 209213 - DNA, 20 bp, synthetic construct
  source 1..20: mol_type = other DNA
cagtccaaggccatgggtaa

SEQ ID NO: 209214 - DNA, 20 bp, synthetic construct
  source 1..20: mol_type = other DNA
acagtccaaggccatgggta

SEQ ID NO: 209215 - DNA, 20 bp, synthetic construct
  source 1..20: mol_type = other DNA
cacagtccaaggccatgggt

SEQ ID NO: 209216 - DNA, 20 bp, synthetic construct
  source 1..20: mol_type = other DNA
acacagtccaaggccatggg

SEQ ID NO: 209217 - DNA, 20 bp, synthetic construct
  source 1..20: mol_type = other DNA
cacacagtccaaggccatgg

SEQ ID NO: 209218 - DNA, 20 bp, synthetic construct
  source 1..20: mol_type = other DNA
acacacagtccaaggccatg

SEQ ID NO: 209219 - DNA, 20 bp, synthetic construct
  source 1..20: mol_type = other DNA
tacacacagtccaaggccat

SEQ ID NO: 209220 - DNA, 20 bp, synthetic construct
  source 1..20: mol_type = other DNA
gtacacacagtccaaggcca

SEQ ID NO: 209221 - DNA, 20 bp, synthetic construct
  source 1..20: mol_type = other DNA
ggtacacacagtccaaggcc

SEQ ID NO: 209222 - DNA, 20 bp, synthetic construct
  source 1..20: mol_type = other DNA
aggtacacacagtccaaggc

SEQ ID NO: 209223 - DNA, 20 bp, synthetic construct
  source 1..20: mol_type = other DNA
gaggtacacacagtccaagg

SEQ ID NO: 209224 - DNA, 20 bp, synthetic construct
  source 1..20: mol_type = other DNA
agaggtacacacagtccaag

SEQ ID NO: 209225 - DNA, 20 bp, synthetic construct
  source 1..20: mol_type = other DNA
aagaggtacacacagtccaa

SEQ ID NO: 209226 - DNA, 20 bp, synthetic construct
  source 1..20: mol_type = other DNA
aaagaggtacacacagtcca

SEQ ID NO: 209227 - DNA, 20 bp, synthetic construct
  source 1..20: mol_type = other DNA
caaagaggtacacacagtcc

SEQ ID NO: 209228 - DNA, 20 bp, synthetic construct
  source 1..20: mol_type = other DNA
acaaagaggtacacacagtc

SEQ ID NO: 209229 - DNA, 20 bp, synthetic construct
  source 1..20: mol_type = other DNA
gacaaagaggtacacacagt

SEQ ID NO: 209230 - DNA, 20 bp, synthetic construct
  source 1..20: mol_type = other DNA
agacaaagaggtacacacag

SEQ ID NO: 209231 - DNA, 20 bp, synthetic construct
  source 1..20: mol_type = other DNA
gagacaaagaggtacacaca

SEQ ID NO: 209232 - DNA, 20 bp, synthetic construct
  source 1..20: mol_type = other DNA
ggagacaaagaggtacacac

SEQ ID NO: 209233 - DNA, 20 bp, synthetic construct
  source 1..20: mol_type = other DNA
tggagacaaagaggtacaca

SEQ ID NO: 209234 - DNA, 20 bp, synthetic construct
  source 1..20: mol_type = other DNA
gtggagacaaagaggtacac

SEQ ID NO: 209235 - DNA, 20 bp, synthetic construct
  source 1..20: mol_type = other DNA
agtggagacaaagaggtaca

SEQ ID NO: 209236 - DNA, 20 bp, synthetic construct
  source 1..20: mol_type = other DNA
gagtggagacaaagaggtac

SEQ ID NO: 209237 - DNA, 20 bp, synthetic construct
  source 1..20: mol_type = other DNA
ggagtggagacaaagaggta

SEQ ID NO: 209238 - DNA, 20 bp, synthetic construct
  source 1..20: mol_type = other DNA
gggagtggagacaaagaggt

SEQ ID NO: 209239 - DNA, 20 bp, synthetic construct
  source 1..20: mol_type = other DNA
tgggagtggagacaaagagg

SEQ ID NO: 209240 - DNA, 20 bp, synthetic construct
  source 1..20: mol_type = other DNA
ttgggagtggagacaaagag

SEQ ID NO: 209241 - DNA, 20 bp, synthetic construct
  source 1..20: mol_type = other DNA
tttgggagtggagacaaaga

SEQ ID NO: 209242 - DNA, 20 bp, synthetic construct
  source 1..20: mol_type = other DNA
gtttgggagtggagacaaag

SEQ ID NO: 209243 - DNA, 20 bp, synthetic construct
  source 1..20: mol_type = other DNA
ggtttgggagtggagacaaa

SEQ ID NO: 209244 - DNA, 20 bp, synthetic construct
  source 1..20: mol_type = other DNA
gggtttgggagtggagacaa

SEQ ID NO: 209245 - DNA, 20 bp, synthetic construct
  source 1..20: mol_type = other DNA
tgggtttgggagtggagaca

SEQ ID NO: 209246 - DNA, 20 bp, synthetic construct
  source 1..20: mol_type = other DNA
ttgggtttgggagtggagac

SEQ ID NO: 209247 - DNA, 20 bp, synthetic construct
  source 1..20: mol_type = other DNA
gttgggtttgggagtggaga

SEQ ID NO: 209248 - DNA, 20 bp, synthetic construct
  source 1..20: mol_type = other DNA
ggttgggtttgggagtggag

SEQ ID NO: 209249 - DNA, 20 bp, synthetic construct
  source 1..20: mol_type = other DNA
gggttgggtttgggagtgga

SEQ ID NO: 209250 - DNA, 20 bp, synthetic construct
  source 1..20: mol_type = other DNA
ggggttgggtttgggagtgg

SEQ ID NO: 209251 - DNA, 20 bp, synthetic construct
  source 1..20: mol_type = other DNA
gggggttgggtttgggagtg

SEQ ID NO: 209252 - DNA, 20 bp, synthetic construct
  source 1..20: mol_type = other DNA
tgggggttgggtttgggagt

SEQ ID NO: 209253 - DNA, 20 bp, synthetic construct
  source 1..20: mol_type = other DNA
ctgggggttgggtttgggag

SEQ ID NO: 209254 - DNA, 20 bp, synthetic construct
  source 1..20: mol_type = other DNA
tctgggggttgggtttggga

SEQ ID NO: 209255 - DNA, 20 bp, synthetic construct
  source 1..20: mol_type = other DNA
ctctgggggttgggtttggg

SEQ ID NO: 209256 - DNA, 20 bp, synthetic construct
  source 1..20: mol_type = other DNA
cctctgggggttgggtttgg

SEQ ID NO: 209257 - DNA, 20 bp, synthetic construct
  source 1..20: mol_type = other DNA
ccctctgggggttgggtttg

SEQ ID NO: 209258 - DNA, 20 bp, synthetic construct
  source 1..20: mol_type = other DNA
gccctctgggggttgggttt

SEQ ID NO: 209259 - DNA, 20 bp, synthetic construct
  source 1..20: mol_type = other DNA
tgccctctgggggttgggtt

SEQ ID NO: 209260 - DNA, 20 bp, synthetic construct
  source 1..20: mol_type = other DNA
ctgccctctgggggttgggt

SEQ ID NO: 209261 - DNA, 20 bp, synthetic construct
  source 1..20: mol_type = other DNA
tctgccctctgggggttggg

SEQ ID NO: 209262 - DNA, 20 bp, synthetic construct
  source 1..20: mol_type = other DNA
ctctgccctctgggggttgg

SEQ ID NO: 209263 - DNA, 20 bp, synthetic construct
  source 1..20: mol_type = other DNA
tctctgccctctgggggttg

SEQ ID NO: 209264 - DNA, 20 bp, synthetic construct
  source 1..20: mol_type = other DNA
ctctctgccctctgggggtt

SEQ ID NO: 209265 - DNA, 20 bp, synthetic construct
  source 1..20: mol_type = other DNA
gctctctgccctctgggggt

SEQ ID NO: 209266 - DNA, 20 bp, synthetic construct
  source 1..20: mol_type = other DNA
tgctctctgccctctggggg

SEQ ID NO: 209267 - DNA, 20 bp, synthetic construct
  source 1..20: mol_type = other DNA
atgctctctgccctctgggg

SEQ ID NO: 209268 - DNA, 20 bp, synthetic construct
  source 1..20: mol_type = other DNA
catgctctctgccctctggg

SEQ ID NO: 209269 - DNA, 20 bp, synthetic construct
  source 1..20: mol_type = other DNA
acatgctctctgccctctgg

SEQ ID NO: 209270 - DNA, 20 bp, synthetic construct
  source 1..20: mol_type = other DNA
aacatgctctctgccctctg

SEQ ID NO: 209271 - DNA, 20 bp, synthetic construct
  source 1..20: mol_type = other DNA
caacatgctctctgccctct

SEQ ID NO: 209272 - DNA, 20 bp, synthetic construct
  source 1..20: mol_type = other DNA
acaacatgctctctgccctc

SEQ ID NO: 209273 - DNA, 20 bp, synthetic construct
  source 1..20: mol_type = other DNA
gacaacatgctctctgccct

SEQ ID NO: 209274 - DNA, 20 bp, synthetic construct
  source 1..20: mol_type = other DNA
agacaacatgctctctgccc

SEQ ID NO: 209275 - DNA, 20 bp, synthetic construct
  source 1..20: mol_type = other DNA
cagacaacatgctctctgcc

SEQ ID NO: 209276 - DNA, 20 bp, synthetic construct
  source 1..20: mol_type = other DNA
acagacaacatgctctctgc

SEQ ID NO: 209277 - DNA, 20 bp, synthetic construct
  source 1..20: mol_type = other DNA
gacagacaacatgctctctg

SEQ ID NO: 209278 - DNA, 20 bp, synthetic construct
  source 1..20: mol_type = other DNA
ggacagacaacatgctctct

SEQ ID NO: 209279 - DNA, 20 bp, synthetic construct
  source 1..20: mol_type = other DNA
gggacagacaacatgctctc

SEQ ID NO: 209280 - DNA, 20 bp, synthetic construct
  source 1..20: mol_type = other DNA
agggacagacaacatgctct

SEQ ID NO: 209281 - DNA, 20 bp, synthetic construct
  source 1..20: mol_type = other DNA
aagggacagacaacatgctc

SEQ ID NO: 209282 - DNA, 20 bp, synthetic construct
  source 1..20: mol_type = other DNA
aaagggacagacaacatgct

SEQ ID NO: 209283 - DNA, 20 bp, synthetic construct
  source 1..20: mol_type = other DNA
caaagggacagacaacatgc

SEQ ID NO: 209284 - DNA, 20 bp, synthetic construct
  source 1..20: mol_type = other DNA
gcaaagggacagacaacatg

SEQ ID NO: 209285 - DNA, 20 bp, synthetic construct
  source 1..20: mol_type = other DNA
agcaaagggacagacaacat

SEQ ID NO: 209286 - DNA, 20 bp, synthetic construct
  source 1..20: mol_type = other DNA
gagcaaagggacagacaaca

SEQ ID NO: 209287 - DNA, 20 bp, synthetic construct
  source 1..20: mol_type = other DNA
tgagcaaagggacagacaac

SEQ ID NO: 209288 - DNA, 20 bp, synthetic construct
  source 1..20: mol_type = other DNA
ctgagcaaagggacagacaa

SEQ ID NO: 209289 - DNA, 20 bp, synthetic construct
  source 1..20: mol_type = other DNA
gctgagcaaagggacagaca

SEQ ID NO: 209290 - DNA, 20 bp, synthetic construct
  source 1..20: mol_type = other DNA
tgctgagcaaagggacagac

SEQ ID NO: 209291 - DNA, 20 bp, synthetic construct
  source 1..20: mol_type = other DNA
atgctgagcaaagggacaga

SEQ ID NO: 209292 - DNA, 20 bp, synthetic construct
  source 1..20: mol_type = other DNA
catgctgagcaaagggacag

SEQ ID NO: 209293 - DNA, 20 bp, synthetic construct
  source 1..20: mol_type = other DNA
tcatgctgagcaaagggaca

SEQ ID NO: 209294 - DNA, 20 bp, synthetic construct
  source 1..20: mol_type = other DNA
ttcatgctgagcaaagggac

SEQ ID NO: 209295 - DNA, 20 bp, synthetic construct
  source 1..20: mol_type = other DNA
cttcatgctgagcaaaggga

SEQ ID NO: 209296 - DNA, 20 bp, synthetic construct
  source 1..20: mol_type = other DNA
gcttcatgctgagcaaaggg

SEQ ID NO: 209297 - DNA, 20 bp, synthetic construct
  source 1..20: mol_type = other DNA
ggcttcatgctgagcaaagg

SEQ ID NO: 209298 - DNA, 20 bp, synthetic construct
  source 1..20: mol_type = other DNA
tggcttcatgctgagcaaag

SEQ ID NO: 209299 - DNA, 20 bp, synthetic construct
  source 1..20: mol_type = other DNA
atggcttcatgctgagcaaa

SEQ ID NO: 209300 - DNA, 20 bp, synthetic construct
  source 1..20: mol_type = other DNA
catggcttcatgctgagcaa

SEQ ID NO: 209301 - DNA, 20 bp, synthetic construct
  source 1..20: mol_type = other DNA
gcatggcttcatgctgagca

SEQ ID NO: 209302 - DNA, 20 bp, synthetic construct
  source 1..20: mol_type = other DNA
cgcatggcttcatgctgagc

SEQ ID NO: 209303 - DNA, 20 bp, synthetic construct
  source 1..20: mol_type = other DNA
acgcatggcttcatgctgag

SEQ ID NO: 209304 - DNA, 20 bp, synthetic construct
  source 1..20: mol_type = other DNA
cacgcatggcttcatgctga

SEQ ID NO: 209305 - DNA, 20 bp, synthetic construct
  source 1..20: mol_type = other DNA
acacgcatggcttcatgctg

SEQ ID NO: 209306 - DNA, 20 bp, synthetic construct
  source 1..20: mol_type = other DNA
cacacgcatggcttcatgct

SEQ ID NO: 209307 - DNA, 20 bp, synthetic construct
  source 1..20: mol_type = other DNA
ccacacgcatggcttcatgc

SEQ ID NO: 209308 - DNA, 20 bp, synthetic construct
  source 1..20: mol_type = other DNA
accacacgcatggcttcatg

SEQ ID NO: 209309 - DNA, 20 bp, synthetic construct
  source 1..20: mol_type = other DNA
taccacacgcatggcttcat

SEQ ID NO: 209310 - DNA, 20 bp, synthetic construct
  source 1..20: mol_type = other DNA
ctaccacacgcatggcttca

SEQ ID NO: 209311 - DNA, 20 bp, synthetic construct
  source 1..20: mol_type = other DNA
tctaccacacgcatggcttc

SEQ ID NO: 209312 - DNA, 20 bp, synthetic construct
  source 1..20: mol_type = other DNA
atctaccacacgcatggctt

SEQ ID NO: 209313 - DNA, 20 bp, synthetic construct
  source 1..20: mol_type = other DNA
gatctaccacacgcatggct

SEQ ID NO: 209314 - DNA, 20 bp, synthetic construct
  source 1..20: mol_type = other DNA
cgatctaccacacgcatggc

SEQ ID NO: 209315 - DNA, 20 bp, synthetic construct
  source 1..20: mol_type = other DNA
ccgatctaccacacgcatgg

SEQ ID NO: 209316 - DNA, 20 bp, synthetic construct
  source 1..20: mol_type = other DNA
gccgatctaccacacgcatg

SEQ ID NO: 209317 - DNA, 20 bp, synthetic construct
  source 1..20: mol_type = other DNA
tgccgatctaccacacgcat

SEQ ID NO: 209318 - DNA, 20 bp, synthetic construct
  source 1..20: mol_type = other DNA
ctgccgatctaccacacgca

SEQ ID NO: 209319 - DNA, 20 bp, synthetic construct
  source 1..20: mol_type = other DNA
tctgccgatctaccacacgc

SEQ ID NO: 209320 - DNA, 20 bp, synthetic construct
  source 1..20: mol_type = other DNA
ctctgccgatctaccacacg

SEQ ID NO: 209321 - DNA, 20 bp, synthetic construct
  source 1..20: mol_type = other DNA
actctgccgatctaccacac

SEQ ID NO: 209322 - DNA, 20 bp, synthetic construct
  source 1..20: mol_type = other DNA
aactctgccgatctaccaca

SEQ ID NO: 209323 - DNA, 20 bp, synthetic construct
  source 1..20: mol_type = other DNA
gaactctgccgatctaccac

SEQ ID NO: 209324 - DNA, 20 bp, synthetic construct
  source 1..20: mol_type = other DNA
ggaactctgccgatctacca

SEQ ID NO: 209325 - DNA, 20 bp, synthetic construct
  source 1..20: mol_type = other DNA
tggaactctgccgatctacc

SEQ ID NO: 209326 - DNA, 20 bp, synthetic construct
  source 1..20: mol_type = other DNA
atggaactctgccgatctac

SEQ ID NO: 209327 - DNA, 20 bp, synthetic construct
  source 1..20: mol_type = other DNA
tatggaactctgccgatcta

SEQ ID NO: 209328 - DNA, 20 bp, synthetic construct
  source 1..20: mol_type = other DNA
ttatggaactctgccgatct

SEQ ID NO: 209329 - DNA, 20 bp, synthetic construct
  source 1..20: mol_type = other DNA
gttatggaactctgccgatc

SEQ ID NO: 209330 - DNA, 20 bp, synthetic construct
  source 1..20: mol_type = other DNA
agttatggaactctgccgat

SEQ ID NO: 209331 - DNA, 20 bp, synthetic construct
  source 1..20: mol_type = other DNA
aagttatggaactctgccga

SEQ ID NO: 209332 - DNA, 20 bp, synthetic construct
  source 1..20: mol_type = other DNA
caagttatggaactctgccg

SEQ ID NO: 209333 - DNA, 20 bp, synthetic construct
  source 1..20: mol_type = other DNA
acaagttatggaactctgcc

SEQ ID NO: 209334 - DNA, 20 bp, synthetic construct
  source 1..20: mol_type = other DNA
cacaagttatggaactctgc

SEQ ID NO: 209335 - DNA, 20 bp, synthetic construct
  source 1..20: mol_type = other DNA
acacaagttatggaactctg

SEQ ID NO: 209336 - DNA, 20 bp, synthetic construct
  source 1..20: mol_type = other DNA
aacacaagttatggaactct

SEQ ID NO: 209337 - DNA, 20 bp, synthetic construct
  source 1..20: mol_type = other DNA
caacacaagttatggaactc

SEQ ID NO: 209338 - DNA, 20 bp, synthetic construct
  source 1..20: mol_type = other DNA
tcaacacaagttatggaact

SEQ ID NO: 209339 - DNA, 20 bp, synthetic construct
  source 1..20: mol_type = other DNA
gtcaacacaagttatggaac

SEQ ID NO: 209340 - DNA, 20 bp, synthetic construct
  source 1..20: mol_type = other DNA
ggtcaacacaagttatggaa

SEQ ID NO: 209341 - DNA, 20 bp, synthetic construct
  source 1..20: mol_type = other DNA
cggtcaacacaagttatgga

SEQ ID NO: 209342 - DNA, 20 bp, synthetic construct
  source 1..20: mol_type = other DNA
tcggtcaacacaagttatgg

SEQ ID NO: 209343 - DNA, 20 bp, synthetic construct
  source 1..20: mol_type = other DNA
ctcggtcaacacaagttatg

SEQ ID NO: 209344 - DNA, 20 bp, synthetic construct
  source 1..20: mol_type = other DNA
cctcggtcaacacaagttat

SEQ ID NO: 209345 - DNA, 20 bp, synthetic construct
  source 1..20: mol_type = other DNA
ccctcggtcaacacaagtta

SEQ ID NO: 209346 - DNA, 20 bp, synthetic construct
  source 1..20: mol_type = other DNA
cccctcggtcaacacaagtt

SEQ ID NO: 209347 - DNA, 20 bp, synthetic construct
  source 1..20: mol_type = other DNA
acccctcggtcaacacaagt

SEQ ID NO: 209348 - DNA, 20 bp, synthetic construct
  source 1..20: mol_type = other DNA
gacccctcggtcaacacaag

SEQ ID NO: 209349 - DNA, 20 bp, synthetic construct
  source 1..20: mol_type = other DNA
tgacccctcggtcaacacaa

SEQ ID NO: 209350 - DNA, 20 bp, synthetic construct
  source 1..20: mol_type = other DNA
gtgacccctcggtcaacaca

SEQ ID NO: 209351 - DNA, 20 bp, synthetic construct
  source 1..20: mol_type = other DNA
agtgacccctcggtcaacac

SEQ ID NO: 209352 - DNA, 20 bp, synthetic construct
  source 1..20: mol_type = other DNA
aagtgacccctcggtcaaca

SEQ ID NO: 209353 - DNA, 20 bp, synthetic construct
  source 1..20: mol_type = other DNA
aaagtgacccctcggtcaac

SEQ ID NO: 209354 - DNA, 20 bp, synthetic construct
  source 1..20: mol_type = other DNA
caaagtgacccctcggtcaa

SEQ ID NO: 209355 - DNA, 20 bp, synthetic construct
  source 1..20: mol_type = other DNA
gcaaagtgacccctcggtca

SEQ ID NO: 209356 - DNA, 20 bp, synthetic construct
  source 1..20: mol_type = other DNA
agcaaagtgacccctcggtc

SEQ ID NO: 209357 - DNA, 20 bp, synthetic construct
  source 1..20: mol_type = other DNA
gagcaaagtgacccctcggt

SEQ ID NO: 209358 - DNA, 20 bp, synthetic construct
  source 1..20: mol_type = other DNA
agagcaaagtgacccctcgg

SEQ ID NO: 209359 - DNA, 20 bp, synthetic construct
  source 1..20: mol_type = other DNA
cagagcaaagtgacccctcg

SEQ ID NO: 209360 - DNA, 20 bp, synthetic construct
  source 1..20: mol_type = other DNA
tcagagcaaagtgacccctc

SEQ ID NO: 209361 - DNA, 20 bp, synthetic construct
  source 1..20: mol_type = other DNA
ttcagagcaaagtgacccct

SEQ ID NO: 209362 - DNA, 20 bp, synthetic construct
  source 1..20: mol_type = other DNA
tttcagagcaaagtgacccc

SEQ ID NO: 209363 - DNA, 20 bp, synthetic construct
  source 1..20: mol_type = other DNA
atttcagagcaaagtgaccc

SEQ ID NO: 209364 - DNA, 20 bp, synthetic construct
  source 1..20: mol_type = other DNA
aatttcagagcaaagtgacc

SEQ ID NO: 209365 - DNA, 20 bp, synthetic construct
  source 1..20: mol_type = other DNA
taatttcagagcaaagtgac

SEQ ID NO: 209366 - DNA, 20 bp, synthetic construct
  source 1..20: mol_type = other DNA
gtaatttcagagcaaagtga

SEQ ID NO: 209367 - DNA, 20 bp, synthetic construct
  source 1..20: mol_type = other DNA
ggtaatttcagagcaaagtg

SEQ ID NO: 209368 - DNA, 20 bp, synthetic construct
  source 1..20: mol_type = other DNA
gggtaatttcagagcaaagt

SEQ ID NO: 209369 - DNA, 20 bp, synthetic construct
  source 1..20: mol_type = other DNA
ggggtaatttcagagcaaag

SEQ ID NO: 209370 - DNA, 20 bp, synthetic construct
  source 1..20: mol_type = other DNA
aggggtaatttcagagcaaa

SEQ ID NO: 209371 - DNA, 20 bp, synthetic construct
  source 1..20: mol_type = other DNA
caggggtaatttcagagcaa

SEQ ID NO: 209372 - DNA, 20 bp, synthetic construct
  source 1..20: mol_type = other DNA
acaggggtaatttcagagca

SEQ ID NO: 209373 - DNA, 20 bp, synthetic construct
  source 1..20: mol_type = other DNA
cacaggggtaatttcagagc

SEQ ID NO: 209374 - DNA, 20 bp, synthetic construct
  source 1..20: mol_type = other DNA
acacaggggtaatttcagag

SEQ ID NO: 209375 - DNA, 20 bp, synthetic construct
  source 1..20: mol_type = other DNA
gacacaggggtaatttcaga

SEQ ID NO: 209376 - DNA, 20 bp, synthetic construct
  source 1..20: mol_type = other DNA
ggacacaggggtaatttcag

SEQ ID NO: 209377 - DNA, 20 bp, synthetic construct
  source 1..20: mol_type = other DNA
aggacacaggggtaatttca

SEQ ID NO: 209378 - DNA, 20 bp, synthetic construct
  source 1..20: mol_type = other DNA
aaggacacaggggtaatttc

SEQ ID NO: 209379 - DNA, 20 bp, synthetic construct
  source 1..20: mol_type = other DNA
gaaggacacaggggtaattt

SEQ ID NO: 209380 - DNA, 20 bp, synthetic construct
  source 1..20: mol_type = other DNA
tgaaggacacaggggtaatt

SEQ ID NO: 209381 - DNA, 20 bp, synthetic construct
  source 1..20: mol_type = other DNA
ctgaaggacacaggggtaat

SEQ ID NO: 209382 - DNA, 20 bp, synthetic construct
  source 1..20: mol_type = other DNA
actgaaggacacaggggtaa

SEQ ID NO: 209383 - DNA, 20 bp, synthetic construct
  source 1..20: mol_type = other DNA
tactgaaggacacaggggta

SEQ ID NO: 209384 - DNA, 20 bp, synthetic construct
  source 1..20: mol_type = other DNA
atactgaaggacacaggggt

SEQ ID NO: 209385 - DNA, 20 bp, synthetic construct
  source 1..20: mol_type = other DNA
aatactgaaggacacagggg

SEQ ID NO: 209386 - DNA, 20 bp, synthetic construct
  source 1..20: mol_type = other DNA
aaatactgaaggacacaggg

SEQ ID NO: 209387 - DNA, 20 bp, synthetic construct
  source 1..20: mol_type = other DNA
caaatactgaaggacacagg

SEQ ID NO: 209388 - DNA, 20 bp, synthetic construct
  source 1..20: mol_type = other DNA
gcaaatactgaaggacacag

SEQ ID NO: 209389 - DNA, 20 bp, synthetic construct
  source 1..20: mol_type = other DNA
tgcaaatactgaaggacaca

SEQ ID NO: 209390 - DNA, 20 bp, synthetic construct
  source 1..20: mol_type = other DNA
gtgcaaatactgaaggacac

SEQ ID NO: 209391 - DNA, 20 bp, synthetic construct
  source 1..20: mol_type = other DNA
tgtgcaaatactgaaggaca

SEQ ID NO: 209392 - DNA, 20 bp, synthetic construct
  source 1..20: mol_type = other DNA
ctgtgcaaatactgaaggac

SEQ ID NO: 209393 - DNA, 20 bp, synthetic construct
  source 1..20: mol_type = other DNA
tctgtgcaaatactgaagga

SEQ ID NO: 209394 - DNA, 20 bp, synthetic construct
  source 1..20: mol_type = other DNA
atctgtgcaaatactgaagg

SEQ ID NO: 209395 - DNA, 20 bp, synthetic construct
  source 1..20: mol_type = other DNA
tatctgtgcaaatactgaag

SEQ ID NO: 209396 - DNA, 20 bp, synthetic construct
  source 1..20: mol_type = other DNA
ctatctgtgcaaatactgaa

SEQ ID NO: 209397 - DNA, 20 bp, synthetic construct
  source 1..20: mol_type = other DNA
gctatctgtgcaaatactga

SEQ ID NO: 209398 - DNA, 20 bp, synthetic construct
  source 1..20: mol_type = other DNA
agctatctgtgcaaatactg

SEQ ID NO: 209399 - DNA, 20 bp, synthetic construct
  source 1..20: mol_type = other DNA
aagctatctgtgcaaatact

SEQ ID NO: 209400 - DNA, 20 bp, synthetic construct
  source 1..20: mol_type = other DNA
gaagctatctgtgcaaatac

SEQ ID NO: 209401 - DNA, 20 bp, synthetic construct
  source 1..20: mol_type = other DNA
ggaagctatctgtgcaaata

SEQ ID NO: 209402 - DNA, 20 bp, synthetic construct
  source 1..20: mol_type = other DNA
aggaagctatctgtgcaaat

SEQ ID NO: 209403 - DNA, 20 bp, synthetic construct
  source 1..20: mol_type = other DNA
caggaagctatctgtgcaaa

SEQ ID NO: 209404 - DNA, 20 bp, synthetic construct
  source 1..20: mol_type = other DNA
ccaggaagctatctgtgcaa

SEQ ID NO: 209405 - DNA, 20 bp, synthetic construct
  source 1..20: mol_type = other DNA
gccaggaagctatctgtgca

SEQ ID NO: 209406 - DNA, 20 bp, synthetic construct
  source 1..20: mol_type = other DNA
ggccaggaagctatctgtgc

SEQ ID NO: 209407 - DNA, 20 bp, synthetic construct
  source 1..20: mol_type = other DNA
tggccaggaagctatctgtg

SEQ ID NO: 209408 - DNA, 20 bp, synthetic construct
  source 1..20: mol_type = other DNA
ctggccaggaagctatctgt

SEQ ID NO: 209409 - DNA, 20 bp, synthetic construct
  source 1..20: mol_type = other DNA
tctggccaggaagctatctg

SEQ ID NO: 209410 - DNA, 20 bp, synthetic construct
  source 1..20: mol_type = other DNA
gtctggccaggaagctatct

SEQ ID NO: 209411 - DNA, 20 bp, synthetic construct
  source 1..20: mol_type = other DNA
ggtctggccaggaagctatc

SEQ ID NO: 209412 - DNA, 20 bp, synthetic construct
  source 1..20: mol_type = other DNA
cggtctggccaggaagctat

SEQ ID NO: 209413 - DNA, 20 bp, synthetic construct
  source 1..20: mol_type = other DNA
tcggtctggccaggaagcta

SEQ ID NO: 209414 - DNA, 20 bp, synthetic construct
  source 1..20: mol_type = other DNA
ttcggtctggccaggaagct

SEQ ID NO: 209415 - DNA, 20 bp, synthetic construct
  source 1..20: mol_type = other DNA
attcggtctggccaggaagc

SEQ ID NO: 209416 - DNA, 20 bp, synthetic construct
  source 1..20: mol_type = other DNA
tattcggtctggccaggaag

SEQ ID NO: 209417 - DNA, 20 bp, synthetic construct
  source 1..20: mol_type = other DNA
atattcggtctggccaggaa

SEQ ID NO: 209418 - DNA, 20 bp, synthetic construct
  source 1..20: mol_type = other DNA
tatattcggtctggccagga

SEQ ID NO: 209419 - DNA, 20 bp, synthetic construct
  source 1..20: mol_type = other DNA
atatattcggtctggccagg

SEQ ID NO: 209420 - DNA, 20 bp, synthetic construct
  source 1..20: mol_type = other DNA
gatatattcggtctggccag

SEQ ID NO: 209421 - DNA, 20 bp, synthetic construct
  source 1..20: mol_type = other DNA
ggatatattcggtctggcca

SEQ ID NO: 209422 - DNA, 20 bp, synthetic construct
  source 1..20: mol_type = other DNA
tggatatattcggtctggcc

SEQ ID NO: 209423 - DNA, 20 bp, synthetic construct
  source 1..20: mol_type = other DNA
ttggatatattcggtctggc

SEQ ID NO: 209424 - DNA, 20 bp, synthetic construct
  source 1..20: mol_type = other DNA
cttggatatattcggtctgg

SEQ ID NO: 209425 - DNA, 20 bp, synthetic construct
  source 1..20: mol_type = other DNA
ccttggatatattcggtctg

SEQ ID NO: 209426 - DNA, 20 bp, synthetic construct
  source 1..20: mol_type = other DNA
cccttggatatattcggtct

SEQ ID NO: 209427 - DNA, 20 bp, synthetic construct
  source 1..20: mol_type = other DNA
gcccttggatatattcggtc

SEQ ID NO: 209428 - DNA, 20 bp, synthetic construct
  source 1..20: mol_type = other DNA
tgcccttggatatattcggt

SEQ ID NO: 209429 - DNA, 20 bp, synthetic construct
  source 1..20: mol_type = other DNA
atgcccttggatatattcgg

SEQ ID NO: 209430 - DNA, 20 bp, synthetic construct
  source 1..20: mol_type = other DNA
catgcccttggatatattcg

SEQ ID NO: 209431 - DNA, 20 bp, synthetic construct
  source 1..20: mol_type = other DNA
ccatgcccttggatatattc

SEQ ID NO: 209432 - DNA, 20 bp, synthetic construct
  source 1..20: mol_type = other DNA
gccatgcccttggatatatt

SEQ ID NO: 209433 - DNA, 20 bp, synthetic construct
  source 1..20: mol_type = other DNA
ggccatgcccttggatatat

SEQ ID NO: 209434 - DNA, 20 bp, synthetic construct
  source 1..20: mol_type = other DNA
gggccatgcccttggatata

SEQ ID NO: 209435 - DNA, 20 bp, synthetic construct
  source 1..20: mol_type = other DNA
tgggccatgcccttggatat

SEQ ID NO: 209436 - DNA, 20 bp, synthetic construct
  source 1..20: mol_type = other DNA
gtgggccatgcccttggata

SEQ ID NO: 209437 - DNA, 20 bp, synthetic construct
  source 1..20: mol_type = other DNA
ggtgggccatgcccttggat

SEQ ID NO: 209438 - DNA, 20 bp, synthetic construct
  source 1..20: mol_type = other DNA
aggtgggccatgcccttgga

SEQ ID NO: 209439 - DNA, 20 bp, synthetic construct
  source 1..20: mol_type = other DNA
gaggtgggccatgcccttgg

SEQ ID NO: 209440 - DNA, 20 bp, synthetic construct
  source 1..20: mol_type = other DNA
agaggtgggccatgcccttg

SEQ ID NO: 209441 - DNA, 20 bp, synthetic construct
  source 1..20: mol_type = other DNA
cagaggtgggccatgccctt

SEQ ID NO: 209442 - DNA, 20 bp, synthetic construct
  source 1..20: mol_type = other DNA
gcagaggtgggccatgccct

SEQ ID NO: 209443 - DNA, 20 bp, synthetic construct
  source 1..20: mol_type = other DNA
agcagaggtgggccatgccc

SEQ ID NO: 209444 - DNA, 20 bp, synthetic construct
  source 1..20: mol_type = other DNA
gagcagaggtgggccatgcc

SEQ ID NO: 209445 - DNA, 20 bp, synthetic construct
  source 1..20: mol_type = other DNA
ggagcagaggtgggccatgc

SEQ ID NO: 209446 - DNA, 20 bp, synthetic construct
  source 1..20: mol_type = other DNA
aggagcagaggtgggccatg

SEQ ID NO: 209447 - DNA, 20 bp, synthetic construct
  source 1..20: mol_type = other DNA
caggagcagaggtgggccat

SEQ ID NO: 209448 - DNA, 20 bp, synthetic construct
  source 1..20: mol_type = other DNA
acaggagcagaggtgggcca

SEQ ID NO: 209449 - DNA, 20 bp, synthetic construct
  source 1..20: mol_type = other DNA
aacaggagcagaggtgggcc

SEQ ID NO: 209450 - DNA, 20 bp, synthetic construct
  source 1..20: mol_type = other DNA
aaacaggagcagaggtgggc

SEQ ID NO: 209451 - DNA, 20 bp, synthetic construct
  source 1..20: mol_type = other DNA
gaaacaggagcagaggtggg

SEQ ID NO: 209452 - DNA, 20 bp, synthetic construct
  source 1..20: mol_type = other DNA
ggaaacaggagcagaggtgg

SEQ ID NO: 209453 - DNA, 20 bp, synthetic construct
  source 1..20: mol_type = other DNA
tggaaacaggagcagaggtg

SEQ ID NO: 209454 - DNA, 20 bp, synthetic construct
  source 1..20: mol_type = other DNA
ctggaaacaggagcagaggt

SEQ ID NO: 209455 - DNA, 20 bp, synthetic construct
  source 1..20: mol_type = other DNA
cctggaaacaggagcagagg

SEQ ID NO: 209456 - DNA, 20 bp, synthetic construct
  source 1..20: mol_type = other DNA
acctggaaacaggagcagag

SEQ ID NO: 209457 - DNA, 20 bp, synthetic construct
  source 1..20: mol_type = other DNA
gacctggaaacaggagcaga

SEQ ID NO: 209458 - DNA, 20 bp, synthetic construct
  source 1..20: mol_type = other DNA
ggacctggaaacaggagcag

SEQ ID NO: 209459 - DNA, 20 bp, synthetic construct
  source 1..20: mol_type = other DNA
gggacctggaaacaggagca

SEQ ID NO: 209460 - DNA, 20 bp, synthetic construct
  source 1..20: mol_type = other DNA
agggacctggaaacaggagc

SEQ ID NO: 209461 - DNA, 20 bp, synthetic construct
  source 1..20: mol_type = other DNA
cagggacctggaaacaggag

SEQ ID NO: 209462 - DNA, 20 bp, synthetic construct
  source 1..20: mol_type = other DNA
ccagggacctggaaacagga

SEQ ID NO: 209463 - DNA, 20 bp, synthetic construct
  source 1..20: mol_type = other DNA
accagggacctggaaacagg

SEQ ID NO: 209464 - DNA, 20 bp, synthetic construct
  source 1..20: mol_type = other DNA
caccagggacctggaaacag

SEQ ID NO: 209465 - DNA, 20 bp, synthetic construct
  source 1..20: mol_type = other DNA
ccaccagggacctggaaaca

SEQ ID NO: 209466 - DNA, 20 bp, synthetic construct
  source 1..20: mol_type = other DNA
cccaccagggacctggaaac

SEQ ID NO: 209467 - DNA, 20 bp, synthetic construct
  source 1..20: mol_type = other DNA
ccccaccagggacctggaaa

SEQ ID NO: 209468 - DNA, 20 bp, synthetic construct
  source 1..20: mol_type = other DNA
cccccaccagggacctggaa

SEQ ID NO: 209469 - DNA, 20 bp, synthetic construct
  source 1..20: mol_type = other DNA
acccccaccagggacctgga

SEQ ID NO: 209470 - DNA, 20 bp, synthetic construct
  source 1..20: mol_type = other DNA
aacccccaccagggacctgg

SEQ ID NO: 209471 - DNA, 20 bp, synthetic construct
  source 1..20: mol_type = other DNA
taacccccaccagggacctg

SEQ ID NO: 209472 - DNA, 20 bp, synthetic construct
  source 1..20: mol_type = other DNA
ctaacccccaccagggacct

SEQ ID NO: 209473 - DNA, 20 bp, synthetic construct
  source 1..20: mol_type = other DNA
actaacccccaccagggacc

SEQ ID NO: 209474 - DNA, 20 bp, synthetic construct
  source 1..20: mol_type = other DNA
aactaacccccaccagggac

SEQ ID NO: 209475 - DNA, 20 bp, synthetic construct
  source 1..20: mol_type = other DNA
gaactaacccccaccaggga

SEQ ID NO: 209476 - DNA, 20 bp, synthetic construct
  source 1..20: mol_type = other DNA
tgaactaacccccaccaggg

SEQ ID NO: 209477 - DNA, 20 bp, synthetic construct
  source 1..20: mol_type = other DNA
atgaactaacccccaccagg

SEQ ID NO: 209478 - DNA, 20 bp, synthetic construct
  source 1..20: mol_type = other DNA
catgaactaacccccaccag

SEQ ID NO: 209479 - DNA, 20 bp, synthetic construct
  source 1..20: mol_type = other DNA
gcatgaactaacccccacca

SEQ ID NO: 209480 - DNA, 20 bp, synthetic construct
  source 1..20: mol_type = other DNA
ggcatgaactaacccccacc

SEQ ID NO: 209481 - DNA, 20 bp, synthetic construct
  source 1..20: mol_type = other DNA
aggcatgaactaacccccac

SEQ ID NO: 209482 - DNA, 20 bp, synthetic construct
  source 1..20: mol_type = other DNA
aaggcatgaactaaccccca

SEQ ID NO: 209483 - DNA, 20 bp, synthetic construct
  source 1..20: mol_type = other DNA
gaaggcatgaactaaccccc

SEQ ID NO: 209484 - DNA, 20 bp, synthetic construct
  source 1..20: mol_type = other DNA
ggaaggcatgaactaacccc

SEQ ID NO: 209485 - DNA, 20 bp, synthetic construct
  source 1..20: mol_type = other DNA
aggaaggcatgaactaaccc

SEQ ID NO: 209486 - DNA, 20 bp, synthetic construct
  source 1..20: mol_type = other DNA
gaggaaggcatgaactaacc

SEQ ID NO: 209487 - DNA, 20 bp, synthetic construct
  source 1..20: mol_type = other DNA
tgaggaaggcatgaactaac

SEQ ID NO: 209488 - DNA, 20 bp, synthetic construct
  source 1..20: mol_type = other DNA
atgaggaaggcatgaactaa

SEQ ID NO: 209489 - DNA, 20 bp, synthetic construct
  source 1..20: mol_type = other DNA
tatgaggaaggcatgaacta

SEQ ID NO: 209490 - DNA, 20 bp, synthetic construct
  source 1..20: mol_type = other DNA
ttatgaggaaggcatgaact

SEQ ID NO: 209491 - DNA, 20 bp, synthetic construct
  source 1..20: mol_type = other DNA
attatgaggaaggcatgaac

SEQ ID NO: 209492 - DNA, 20 bp, synthetic construct
  source 1..20: mol_type = other DNA
gattatgaggaaggcatgaa

SEQ ID NO: 209493 - DNA, 20 bp, synthetic construct
  source 1..20: mol_type = other DNA
agattatgaggaaggcatga

SEQ ID NO: 209494 - DNA, 20 bp, synthetic construct
  source 1..20: mol_type = other DNA
cagattatgaggaaggcatg

SEQ ID NO: 209495 - DNA, 20 bp, synthetic construct
  source 1..20: mol_type = other DNA
gcagattatgaggaaggcat

SEQ ID NO: 209496 - DNA, 20 bp, synthetic construct
  source 1..20: mol_type = other DNA
ggcagattatgaggaaggca

SEQ ID NO: 209497 - DNA, 20 bp, synthetic construct
  source 1..20: mol_type = other DNA
gggcagattatgaggaaggc

SEQ ID NO: 209498 - DNA, 20 bp, synthetic construct
  source 1..20: mol_type = other DNA
tgggcagattatgaggaagg

SEQ ID NO: 209499 - DNA, 20 bp, synthetic construct
  source 1..20: mol_type = other DNA
gtgggcagattatgaggaag

SEQ ID NO: 209500 - DNA, 20 bp, synthetic construct
  source 1..20: mol_type = other DNA
agtgggcagattatgaggaa

SEQ ID NO: 209501 - DNA, 20 bp, synthetic construct
  source 1..20: mol_type = other DNA
cagtgggcagattatgagga

SEQ ID NO: 209502 - DNA, 20 bp, synthetic construct
  source 1..20: mol_type = other DNA
ccagtgggcagattatgagg

SEQ ID NO: 209503 - DNA, 20 bp, synthetic construct
  source 1..20: mol_type = other DNA
gccagtgggcagattatgag

SEQ ID NO: 209504 - DNA, 20 bp, synthetic construct
  source 1..20: mol_type = other DNA
ggccagtgggcagattatga

SEQ ID NO: 209505 - DNA, 20 bp, synthetic construct
  source 1..20: mol_type = other DNA
aggccagtgggcagattatg

SEQ ID NO: 209506 - DNA, 20 bp, synthetic construct
  source 1..20: mol_type = other DNA
caggccagtgggcagattat

SEQ ID NO: 209507 - DNA, 20 bp, synthetic construct
  source 1..20: mol_type = other DNA
ccaggccagtgggcagatta

SEQ ID NO: 209508 - DNA, 20 bp, synthetic construct
  source 1..20: mol_type = other DNA
accaggccagtgggcagatt

SEQ ID NO: 209509 - DNA, 20 bp, synthetic construct
  source 1..20: mol_type = other DNA
gaccaggccagtgggcagat

SEQ ID NO: 209510 - DNA, 20 bp, synthetic construct
  source 1..20: mol_type = other DNA
ggaccaggccagtgggcaga

SEQ ID NO: 209511 - DNA, 20 bp, synthetic construct
  source 1..20: mol_type = other DNA
aggaccaggccagtgggcag

SEQ ID NO: 209512 - DNA, 20 bp, synthetic construct
  source 1..20: mol_type = other DNA
gaggaccaggccagtgggca

SEQ ID NO: 209513 - DNA, 20 bp, synthetic construct
  source 1..20: mol_type = other DNA
tgaggaccaggccagtgggc

SEQ ID NO: 209514 - DNA, 20 bp, synthetic construct
  source 1..20: mol_type = other DNA
ttgaggaccaggccagtggg

SEQ ID NO: 209515 - DNA, 20 bp, synthetic construct
  source 1..20: mol_type = other DNA
cttgaggaccaggccagtgg

SEQ ID NO: 209516 - DNA, 20 bp, synthetic construct
  source 1..20: mol_type = other DNA
ccttgaggaccaggccagtg

SEQ ID NO: 209517 - DNA, 20 bp, synthetic construct
  source 1..20: mol_type = other DNA
accttgaggaccaggccagt

SEQ ID NO: 209518 - DNA, 20 bp, synthetic construct
  source 1..20: mol_type = other DNA
gaccttgaggaccaggccag

SEQ ID NO: 209519 - DNA, 20 bp, synthetic construct
  source 1..20: mol_type = other DNA
agaccttgaggaccaggcca

SEQ ID NO: 209520 - DNA, 20 bp, synthetic construct
  source 1..20: mol_type = other DNA
aagaccttgaggaccaggcc

SEQ ID NO: 209521 - DNA, 20 bp, synthetic construct
  source 1..20: mol_type = other DNA
gaagaccttgaggaccaggc

SEQ ID NO: 209522 - DNA, 20 bp, synthetic construct
  source 1..20: mol_type = other DNA
ggaagaccttgaggaccagg

SEQ ID NO: 209523 - DNA, 20 bp, synthetic construct
  source 1..20: mol_type = other DNA
gggaagaccttgaggaccag

SEQ ID NO: 209524 - DNA, 20 bp, synthetic construct
  source 1..20: mol_type = other DNA
tgggaagaccttgaggacca

SEQ ID NO: 209525 - DNA, 20 bp, synthetic construct
  source 1..20: mol_type = other DNA
ttgggaagaccttgaggacc

SEQ ID NO: 209526 - DNA, 20 bp, synthetic construct
  source 1..20: mol_type = other DNA
gttgggaagaccttgaggac

SEQ ID NO: 209527 - DNA, 20 bp, synthetic construct
  source 1..20: mol_type = other DNA
agttgggaagaccttgagga

SEQ ID NO: 209528 - DNA, 20 bp, synthetic construct
  source 1..20: mol_type = other DNA
cagttgggaagaccttgagg

SEQ ID NO: 209529 - DNA, 20 bp, synthetic construct
  source 1..20: mol_type = other DNA
gcagttgggaagaccttgag

SEQ ID NO: 209530 - DNA, 20 bp, synthetic construct
  source 1..20: mol_type = other DNA
agcagttgggaagaccttga

SEQ ID NO: 209531 - DNA, 20 bp, synthetic construct
  source 1..20: mol_type = other DNA
gagcagttgggaagaccttg

SEQ ID NO: 209532 - DNA, 20 bp, synthetic construct
  source 1..20: mol_type = other DNA
tgagcagttgggaagacctt

SEQ ID NO: 209533 - DNA, 20 bp, synthetic construct
  source 1..20: mol_type = other DNA
ctgagcagttgggaagacct

SEQ ID NO: 209534 - DNA, 20 bp, synthetic construct
  source 1..20: mol_type = other DNA
gctgagcagttgggaagacc

SEQ ID NO: 209535 - DNA, 20 bp, synthetic construct
  source 1..20: mol_type = other DNA
ggctgagcagttgggaagac

SEQ ID NO: 209536 - DNA, 20 bp, synthetic construct
  source 1..20: mol_type = other DNA
tggctgagcagttgggaaga

SEQ ID NO: 209537 - DNA, 20 bp, synthetic construct
  source 1..20: mol_type = other DNA
ctggctgagcagttgggaag

SEQ ID NO: 209538 - DNA, 20 bp, synthetic construct
  source 1..20: mol_type = other DNA
tctggctgagcagttgggaa

SEQ ID NO: 209539 - DNA, 20 bp, synthetic construct
  source 1..20: mol_type = other DNA
ctctggctgagcagttggga

SEQ ID NO: 209540 - DNA, 20 bp, synthetic construct
  source 1..20: mol_type = other DNA
actctggctgagcagttggg

SEQ ID NO: 209541 - DNA, 20 bp, synthetic construct
  source 1..20: mol_type = other DNA
aactctggctgagcagttgg

SEQ ID NO: 209542 - DNA, 20 bp, synthetic construct
  source 1..20: mol_type = other DNA
caactctggctgagcagttg

SEQ ID NO: 209543 - DNA, 20 bp, synthetic construct
  source 1..20: mol_type = other DNA
tcaactctggctgagcagtt

SEQ ID NO: 209544 - DNA, 20 bp, synthetic construct
  source 1..20: mol_type = other DNA
ctcaactctggctgagcagt

SEQ ID NO: 209545 - DNA, 20 bp, synthetic construct
  source 1..20: mol_type = other DNA
tctcaactctggctgagcag

SEQ ID NO: 209546 - DNA, 20 bp, synthetic construct
  source 1..20: mol_type = other DNA
ttctcaactctggctgagca

SEQ ID NO: 209547 - DNA, 20 bp, synthetic construct
  source 1..20: mol_type = other DNA
tttctcaactctggctgagc

SEQ ID NO: 209548 - DNA, 20 bp, synthetic construct
  source 1..20: mol_type = other DNA
ttttctcaactctggctgag

SEQ ID NO: 209549 - DNA, 20 bp, synthetic construct
  source 1..20: mol_type = other DNA
attttctcaactctggctga

SEQ ID NO: 209550 - DNA, 20 bp, synthetic construct
  source 1..20: mol_type = other DNA
cattttctcaactctggctg

SEQ ID NO: 209551 - DNA, 20 bp, synthetic construct
  source 1..20: mol_type = other DNA
ccattttctcaactctggct

SEQ ID NO: 209552 - DNA, 20 bp, synthetic construct
  source 1..20: mol_type = other DNA
cccattttctcaactctggc

SEQ ID NO: 209553 - DNA, 20 bp, synthetic construct
  source 1..20: mol_type = other DNA
acccattttctcaactctgg

SEQ ID NO: 209554 - DNA, 20 bp, synthetic construct
  source 1..20: mol_type = other DNA
gacccattttctcaactctg

SEQ ID NO: 209555 - DNA, 20 bp, synthetic construct
  source 1..20: mol_type = other DNA
cgacccattttctcaactct

SEQ ID NO: 209556 - DNA, 20 bp, synthetic construct
  source 1..20: mol_type = other DNA
gcgacccattttctcaactc

SEQ ID NO: 209557 - DNA, 20 bp, synthetic construct
  source 1..20: mol_type = other DNA
agcgacccattttctcaact

SEQ ID NO: 209558 - DNA, 20 bp, synthetic construct
  source 1..20: mol_type = other DNA
gagcgacccattttctcaac

SEQ ID NO: 209559 - DNA, 20 bp, synthetic construct
  source 1..20: mol_type = other DNA
ggagcgacccattttctcaa

SEQ ID NO: 209560 - DNA, 20 bp, synthetic construct
  source 1..20: mol_type = other DNA
tggagcgacccattttctca

SEQ ID NO: 209561 - DNA, 20 bp, synthetic construct
  source 1..20: mol_type = other DNA
atggagcgacccattttctc

SEQ ID NO: 209562 - DNA, 20 bp, synthetic construct
  source 1..20: mol_type = other DNA
gatggagcgacccattttct

SEQ ID NO: 209563 - DNA, 20 bp, synthetic construct
  source 1..20: mol_type = other DNA
ggatggagcgacccattttc

SEQ ID NO: 209564 - DNA, 20 bp, synthetic construct
  source 1..20: mol_type = other DNA
aggatggagcgacccatttt

SEQ ID NO: 209565 - DNA, 20 bp, synthetic construct
  source 1..20: mol_type = other DNA
caggatggagcgacccattt

SEQ ID NO: 209566 - DNA, 20 bp, synthetic construct
  source 1..20: mol_type = other DNA
acaggatggagcgacccatt

SEQ ID NO: 209567 - DNA, 20 bp, synthetic construct
  source 1..20: mol_type = other DNA
aacaggatggagcgacccat

SEQ ID NO: 209568 - DNA, 20 bp, synthetic construct
  source 1..20: mol_type = other DNA
aaacaggatggagcgaccca

SEQ ID NO: 209569 - DNA, 20 bp, synthetic construct
  source 1..20: mol_type = other DNA
caaacaggatggagcgaccc

SEQ ID NO: 209570 - DNA, 20 bp, synthetic construct
  source 1..20: mol_type = other DNA
acaaacaggatggagcgacc

SEQ ID NO: 209571 - DNA, 20 bp, synthetic construct
  source 1..20: mol_type = other DNA
cacaaacaggatggagcgac

SEQ ID NO: 209572 - DNA, 20 bp, synthetic construct
  source 1..20: mol_type = other DNA
acacaaacaggatggagcga

SEQ ID NO: 209573 - DNA, 20 bp, synthetic construct
  source 1..20: mol_type = other DNA
gacacaaacaggatggagcg

SEQ ID NO: 209574 - DNA, 20 bp, synthetic construct
  source 1..20: mol_type = other DNA
cgacacaaacaggatggagc

SEQ ID NO: 209575 - DNA, 20 bp, synthetic construct
  source 1..20: mol_type = other DNA
acgacacaaacaggatggag

SEQ ID NO: 209576 - DNA, 20 bp, synthetic construct
  source 1..20: mol_type = other DNA
aacgacacaaacaggatgga

SEQ ID NO: 209577 - DNA, 20 bp, synthetic construct
  source 1..20: mol_type = other DNA
gaacgacacaaacaggatgg

SEQ ID NO: 209578 - DNA, 20 bp, synthetic construct
  source 1..20: mol_type = other DNA
agaacgacacaaacaggatg

SEQ ID NO: 209579 - DNA, 20 bp, synthetic construct
  source 1..20: mol_type = other DNA
gagaacgacacaaacaggat

SEQ ID NO: 209580 - DNA, 20 bp, synthetic construct
  source 1..20: mol_type = other DNA
agagaacgacacaaacagga

SEQ ID NO: 209581 - DNA, 20 bp, synthetic construct
  source 1..20: mol_type = other DNA
gagagaacgacacaaacagg

SEQ ID NO: 209582 - DNA, 20 bp, synthetic construct
  source 1..20: mol_type = other DNA
ggagagaacgacacaaacag

SEQ ID NO: 209583 - DNA, 20 bp, synthetic construct
  source 1..20: mol_type = other DNA
aggagagaacgacacaaaca

SEQ ID NO: 209584 - DNA, 20 bp, synthetic construct
  source 1..20: mol_type = other DNA
aaggagagaacgacacaaac

SEQ ID NO: 209585 - DNA, 20 bp, synthetic construct
  source 1..20: mol_type = other DNA
gaaggagagaacgacacaaa

SEQ ID NO: 209586 - DNA, 20 bp, synthetic construct
  source 1..20: mol_type = other DNA
ggaaggagagaacgacacaa

SEQ ID NO: 209587 - DNA, 20 bp, synthetic construct
  source 1..20: mol_type = other DNA
aggaaggagagaacgacaca

SEQ ID NO: 209588 - DNA, 20 bp, synthetic construct
  source 1..20: mol_type = other DNA
caggaaggagagaacgacac

SEQ ID NO: 209589 - DNA, 20 bp, synthetic construct
  source 1..20: mol_type = other DNA
ccaggaaggagagaacgaca

SEQ ID NO: 209590 - DNA, 20 bp, synthetic construct
  source 1..20: mol_type = other DNA
gccaggaaggagagaacgac

SEQ ID NO: 209591 - DNA, 20 bp, synthetic construct
  source 1..20: mol_type = other DNA
ggccaggaaggagagaacga

SEQ ID NO: 209592 - DNA, 20 bp, synthetic construct
  source 1..20: mol_type = other DNA
gggccaggaaggagagaacg

SEQ ID NO: 209593 - DNA, 20 bp, synthetic construct
  source 1..20: mol_type = other DNA
tgggccaggaaggagagaac

SEQ ID NO: 209594 - DNA, 20 bp, synthetic construct
  source 1..20: mol_type = other DNA
gtgggccaggaaggagagaa

SEQ ID NO: 209595 - DNA, 20 bp, synthetic construct
  source 1..20: mol_type = other DNA
agtgggccaggaaggagaga

SEQ ID NO: 209596 - DNA, 20 bp, synthetic construct
  source 1..20: mol_type = other DNA
gagtgggccaggaaggagag

SEQ ID NO: 209597 - DNA, 20 bp, synthetic construct
  source 1..20: mol_type = other DNA
agagtgggccaggaaggaga

SEQ ID NO: 209598 - DNA, 20 bp, synthetic construct
  source 1..20: mol_type = other DNA
gagagtgggccaggaaggag

SEQ ID NO: 209599 - DNA, 20 bp, synthetic construct
  source 1..20: mol_type = other DNA
ggagagtgggccaggaagga

SEQ ID NO: 209600 - DNA, 20 bp, synthetic construct
  source 1..20: mol_type = other DNA
aggagagtgggccaggaagg

SEQ ID NO: 209601 - DNA, 20 bp, synthetic construct
  source 1..20: mol_type = other DNA
caggagagtgggccaggaag

SEQ ID NO: 209602 - DNA, 20 bp, synthetic construct
  source 1..20: mol_type = other DNA
gcaggagagtgggccaggaa

SEQ ID NO: 209603 - DNA, 20 bp, synthetic construct
  source 1..20: mol_type = other DNA
ggcaggagagtgggccagga

SEQ ID NO: 209604 - DNA, 20 bp, synthetic construct
  source 1..20: mol_type = other DNA
gggcaggagagtgggccagg

SEQ ID NO: 209605 - DNA, 20 bp, synthetic construct
  source 1..20: mol_type = other DNA
tgggcaggagagtgggccag

SEQ ID NO: 209606 - DNA, 20 bp, synthetic construct
  source 1..20: mol_type = other DNA
gtgggcaggagagtgggcca

SEQ ID NO: 209607 - DNA, 20 bp, synthetic construct
  source 1..20: mol_type = other DNA
tgtgggcaggagagtgggcc

SEQ ID NO: 209608 - DNA, 20 bp, synthetic construct
  source 1..20: mol_type = other DNA
ctgtgggcaggagagtgggc

SEQ ID NO: 209609 - DNA, 20 bp, synthetic construct
  source 1..20: mol_type = other DNA
cctgtgggcaggagagtggg

SEQ ID NO: 209610 - DNA, 20 bp, synthetic construct
  source 1..20: mol_type = other DNA
acctgtgggcaggagagtgg

SEQ ID NO: 209611 - DNA, 20 bp, synthetic construct
  source 1..20: mol_type = other DNA
tacctgtgggcaggagagtg

SEQ ID NO: 209612 - DNA, 20 bp, synthetic construct
  source 1..20: mol_type = other DNA
atacctgtgggcaggagagt

SEQ ID NO: 209613 - DNA, 20 bp, synthetic construct
  source 1..20: mol_type = other DNA
gatacctgtgggcaggagag

SEQ ID NO: 209614 - DNA, 20 bp, synthetic construct
  source 1..20: mol_type = other DNA
ggatacctgtgggcaggaga

SEQ ID NO: 209615 - DNA, 20 bp, synthetic construct
  source 1..20: mol_type = other DNA
tggatacctgtgggcaggag

SEQ ID NO: 209616 - DNA, 20 bp, synthetic construct
  source 1..20: mol_type = other DNA
ctggatacctgtgggcagga

SEQ ID NO: 209617 - DNA, 20 bp, synthetic construct
  source 1..20: mol_type = other DNA
cctggatacctgtgggcagg

SEQ ID NO: 209618 - DNA, 20 bp, synthetic construct
  source 1..20: mol_type = other DNA
ccctggatacctgtgggcag

SEQ ID NO: 209619 - DNA, 20 bp, synthetic construct
  source 1..20: mol_type = other DNA
cccctggatacctgtgggca

SEQ ID NO: 209620 - DNA, 20 bp, synthetic construct
  source 1..20: mol_type = other DNA
gcccctggatacctgtgggc

SEQ ID NO: 209621 - DNA, 20 bp, synthetic construct
  source 1..20: mol_type = other DNA
agcccctggatacctgtggg

SEQ ID NO: 209622 - DNA, 20 bp, synthetic construct
  source 1..20: mol_type = other DNA
cagcccctggatacctgtgg

SEQ ID NO: 209623 - DNA, 20 bp, synthetic construct
  source 1..20: mol_type = other DNA
gcagcccctggatacctgtg

SEQ ID NO: 209624 - DNA, 20 bp, synthetic construct
  source 1..20: mol_type = other DNA
ggcagcccctggatacctgt

SEQ ID NO: 209625 - DNA, 20 bp, synthetic construct
  source 1..20: mol_type = other DNA
aggcagcccctggatacctg

SEQ ID NO: 209626 - DNA, 20 bp, synthetic construct
  source 1..20: mol_type = other DNA
caggcagcccctggatacct

SEQ ID NO: 209627 - DNA, 20 bp, synthetic construct
  source 1..20: mol_type = other DNA
acaggcagcccctggatacc

SEQ ID NO: 209628 - DNA, 20 bp, synthetic construct
  source 1..20: mol_type = other DNA
tacaggcagcccctggatac

SEQ ID NO: 209629 - DNA, 20 bp, synthetic construct
  source 1..20: mol_type = other DNA
ctacaggcagcccctggata

SEQ ID NO: 209630 - DNA, 20 bp, synthetic construct
  source 1..20: mol_type = other DNA
gctacaggcagcccctggat

SEQ ID NO: 209631 - DNA, 20 bp, synthetic construct
  source 1..20: mol_type = other DNA
tgctacaggcagcccctgga

SEQ ID NO: 209632 - DNA, 20 bp, synthetic construct
  source 1..20: mol_type = other DNA
atgctacaggcagcccctgg

SEQ ID NO: 209633 - DNA, 20 bp, synthetic construct
  source 1..20: mol_type = other DNA
aatgctacaggcagcccctg

SEQ ID NO: 209634 - DNA, 20 bp, synthetic construct
  source 1..20: mol_type = other DNA
taatgctacaggcagcccct

SEQ ID NO: 209635 - DNA, 20 bp, synthetic construct
  source 1..20: mol_type = other DNA
ctaatgctacaggcagcccc

SEQ ID NO: 209636 - DNA, 20 bp, synthetic construct
  source 1..20: mol_type = other DNA
tctaatgctacaggcagccc

SEQ ID NO: 209637 - DNA, 20 bp, synthetic construct
  source 1..20: mol_type = other DNA
ctctaatgctacaggcagcc

SEQ ID NO: 209638 - DNA, 20 bp, synthetic construct
  source 1..20: mol_type = other DNA
cctctaatgctacaggcagc

SEQ ID NO: 209639 - DNA, 20 bp, synthetic construct
  source 1..20: mol_type = other DNA
tcctctaatgctacaggcag

SEQ ID NO: 209640 - DNA, 20 bp, synthetic construct
  source 1..20: mol_type = other DNA
gtcctctaatgctacaggca

SEQ ID NO: 209641 - DNA, 20 bp, synthetic construct
  source 1..20: mol_type = other DNA
tgtcctctaatgctacaggc

SEQ ID NO: 209642 - DNA, 20 bp, synthetic construct
  source 1..20: mol_type = other DNA
atgtcctctaatgctacagg

SEQ ID NO: 209643 - DNA, 20 bp, synthetic construct
  source 1..20: mol_type = other DNA
tatgtcctctaatgctacag

SEQ ID NO: 209644 - DNA, 20 bp, synthetic construct
  source 1..20: mol_type = other DNA
gtatgtcctctaatgctaca

SEQ ID NO: 209645 - DNA, 20 bp, synthetic construct
  source 1..20: mol_type = other DNA
tgtatgtcctctaatgctac

SEQ ID NO: 209646 - DNA, 20 bp, synthetic construct
  source 1..20: mol_type = other DNA
atgtatgtcctctaatgcta

SEQ ID NO: 209647 - DNA, 20 bp, synthetic construct
  source 1..20: mol_type = other DNA
catgtatgtcctctaatgct

SEQ ID NO: 209648 - DNA, 20 bp, synthetic construct
  source 1..20: mol_type = other DNA
gcatgtatgtcctctaatgc

SEQ ID NO: 209649 - DNA, 20 bp, synthetic construct
  source 1..20: mol_type = other DNA
tgcatgtatgtcctctaatg

SEQ ID NO: 209650 - DNA, 20 bp, synthetic construct
  source 1..20: mol_type = other DNA
gtgcatgtatgtcctctaat

SEQ ID NO: 209651 - DNA, 20 bp, synthetic construct
  source 1..20: mol_type = other DNA
tgtgcatgtatgtcctctaa

SEQ ID NO: 209652 - DNA, 20 bp, synthetic construct
  source 1..20: mol_type = other DNA
atgtgcatgtatgtcctcta

SEQ ID NO: 209653 - DNA, 20 bp, synthetic construct
  source 1..20: mol_type = other DNA
catgtgcatgtatgtcctct

SEQ ID NO: 209654 - DNA, 20 bp, synthetic construct
  source 1..20: mol_type = other DNA
gcatgtgcatgtatgtcctc

SEQ ID NO: 209655 - DNA, 20 bp, synthetic construct
  source 1..20: mol_type = other DNA
cgcatgtgcatgtatgtcct

SEQ ID NO: 209656 - DNA, 20 bp, synthetic construct
  source 1..20: mol_type = other DNA
acgcatgtgcatgtatgtcc

SEQ ID NO: 209657 - DNA, 20 bp, synthetic construct
  source 1..20: mol_type = other DNA
cacgcatgtgcatgtatgtc

SEQ ID NO: 209658 - DNA, 20 bp, synthetic construct
  source 1..20: mol_type = other DNA
ccacgcatgtgcatgtatgt

SEQ ID NO: 209659 - DNA, 20 bp, synthetic construct
  source 1..20: mol_type = other DNA
cccacgcatgtgcatgtatg

SEQ ID NO: 209660 - DNA, 20 bp, synthetic construct
  source 1..20: mol_type = other DNA
gcccacgcatgtgcatgtat

SEQ ID NO: 209661 - DNA, 20 bp, synthetic construct
  source 1..20: mol_type = other DNA
tgcccacgcatgtgcatgta

SEQ ID NO: 209662 - DNA, 20 bp, synthetic construct
  source 1..20: mol_type = other DNA
atgcccacgcatgtgcatgt

SEQ ID NO: 209663 - DNA, 20 bp, synthetic construct
  source 1..20: mol_type = other DNA
catgcccacgcatgtgcatg

SEQ ID NO: 209664 - DNA, 20 bp, synthetic construct
  source 1..20: mol_type = other DNA
ccatgcccacgcatgtgcat

SEQ ID NO: 209665 - DNA, 20 bp, synthetic construct
  source 1..20: mol_type = other DNA
cccatgcccacgcatgtgca

SEQ ID NO: 209666 - DNA, 20 bp, synthetic construct
  source 1..20: mol_type = other DNA
tcccatgcccacgcatgtgc

SEQ ID NO: 209667 - DNA, 20 bp, synthetic construct
  source 1..20: mol_type = other DNA
gtcccatgcccacgcatgtg

SEQ ID NO: 209668 - DNA, 20 bp, synthetic construct
  source 1..20: mol_type = other DNA
tgtcccatgcccacgcatgt

SEQ ID NO: 209669 - DNA, 20 bp, synthetic construct
  source 1..20: mol_type = other DNA
gtgtcccatgcccacgcatg

SEQ ID NO: 209670 - DNA, 20 bp, synthetic construct
  source 1..20: mol_type = other DNA
agtgtcccatgcccacgcat

SEQ ID NO: 209671 - DNA, 20 bp, synthetic construct
  source 1..20: mol_type = other DNA
gagtgtcccatgcccacgca

SEQ ID NO: 209672 - DNA, 20 bp, synthetic construct
  source 1..20: mol_type = other DNA
tgagtgtcccatgcccacgc

SEQ ID NO: 209673 - DNA, 20 bp, synthetic construct
  source 1..20: mol_type = other DNA
gtgagtgtcccatgcccacg

SEQ ID NO: 209674 - DNA, 20 bp, synthetic construct
  source 1..20: mol_type = other DNA
cgtgagtgtcccatgcccac

SEQ ID NO: 209675 - DNA, 20 bp, synthetic construct
  source 1..20: mol_type = other DNA
acgtgagtgtcccatgccca

SEQ ID NO: 209676 - DNA, 20 bp, synthetic construct
  source 1..20: mol_type = other DNA
tacgtgagtgtcccatgccc

SEQ ID NO: 209677 - DNA, 20 bp, synthetic construct
  source 1..20: mol_type = other DNA
ctacgtgagtgtcccatgcc

SEQ ID NO: 209678 - DNA, 20 bp, synthetic construct
  source 1..20: mol_type = other DNA
gctacgtgagtgtcccatgc

SEQ ID NO: 209679 - DNA, 20 bp, synthetic construct
  source 1..20: mol_type = other DNA
ggctacgtgagtgtcccatg

SEQ ID NO: 209680 - DNA, 20 bp, synthetic construct
  source 1..20: mol_type = other DNA
aggctacgtgagtgtcccat

SEQ ID NO: 209681 - DNA, 20 bp, synthetic construct
  source 1..20: mol_type = other DNA
gaggctacgtgagtgtccca

SEQ ID NO: 209682 - DNA, 20 bp, synthetic construct
  source 1..20: mol_type = other DNA
ggaggctacgtgagtgtccc

SEQ ID NO: 209683 - DNA, 20 bp, synthetic construct
  source 1..20: mol_type = other DNA
tggaggctacgtgagtgtcc

SEQ ID NO: 209684 - DNA, 20 bp, synthetic construct
  source 1..20: mol_type = other DNA
ttggaggctacgtgagtgtc

SEQ ID NO: 209685 - DNA, 20 bp, synthetic construct
  source 1..20: mol_type = other DNA
cttggaggctacgtgagtgt

SEQ ID NO: 209686 - DNA, 20 bp, synthetic construct
  source 1..20: mol_type = other DNA
gcttggaggctacgtgagtg

SEQ ID NO: 209687 - DNA, 20 bp, synthetic construct
  source 1..20: mol_type = other DNA
tgcttggaggctacgtgagt

SEQ ID NO: 209688 - DNA, 20 bp, synthetic construct
  source 1..20: mol_type = other DNA
gtgcttggaggctacgtgag

SEQ ID NO: 209689 - DNA, 20 bp, synthetic construct
  source 1..20: mol_type = other DNA
tgtgcttggaggctacgtga

SEQ ID NO: 209690 - DNA, 20 bp, synthetic construct
  source 1..20: mol_type = other DNA
ctgtgcttggaggctacgtg

SEQ ID NO: 209691 - DNA, 20 bp, synthetic construct
  source 1..20: mol_type = other DNA
gctgtgcttggaggctacgt

SEQ ID NO: 209692 - DNA, 20 bp, synthetic construct
  source 1..20: mol_type = other DNA
tgctgtgcttggaggctacg

SEQ ID NO: 209693 - DNA, 20 bp, synthetic construct
  source 1..20: mol_type = other DNA
atgctgtgcttggaggctac

SEQ ID NO: 209694 - DNA, 20 bp, synthetic construct
  source 1..20: mol_type = other DNA
gatgctgtgcttggaggcta

SEQ ID NO: 209695 - DNA, 20 bp, synthetic construct
  source 1..20: mol_type = other DNA
tgatgctgtgcttggaggct

SEQ ID NO: 209696 - DNA, 20 bp, synthetic construct
  source 1..20: mol_type = other DNA
ttgatgctgtgcttggaggc

SEQ ID NO: 209697 - DNA, 20 bp, synthetic construct
  source 1..20: mol_type = other DNA
attgatgctgtgcttggagg

SEQ ID NO: 209698 - DNA, 20 bp, synthetic construct
  source 1..20: mol_type = other DNA
tattgatgctgtgcttggag

SEQ ID NO: 209699 - DNA, 20 bp, synthetic construct
  source 1..20: mol_type = other DNA
ttattgatgctgtgcttgga

SEQ ID NO: 209700 - DNA, 20 bp, synthetic construct
  source 1..20: mol_type = other DNA
attattgatgctgtgcttgg

SEQ ID NO: 209701 - DNA, 20 bp, synthetic construct
  source 1..20: mol_type = other DNA
cattattgatgctgtgcttg

SEQ ID NO: 209702 - DNA, 20 bp, synthetic construct
  source 1..20: mol_type = other DNA
gcattattgatgctgtgctt

SEQ ID NO: 209703 - DNA, 20 bp, synthetic construct
  source 1..20: mol_type = other DNA
tgcattattgatgctgtgct

SEQ ID NO: 209704 - DNA, 20 bp, synthetic construct
  source 1..20: mol_type = other DNA
atgcattattgatgctgtgc

SEQ ID NO: 209705 - DNA, 20 bp, synthetic construct
  source 1..20: mol_type = other DNA
aatgcattattgatgctgtg

SEQ ID NO: 209706 - DNA, 20 bp, synthetic construct
  source 1..20: mol_type = other DNA
gaatgcattattgatgctgt

SEQ ID NO: 209707 - DNA, 20 bp, synthetic construct
  source 1..20: mol_type = other DNA
agaatgcattattgatgctg

SEQ ID NO: 209708 - DNA, 20 bp, synthetic construct
  source 1..20: mol_type = other DNA
cagaatgcattattgatgct

SEQ ID NO: 209709 - DNA, 20 bp, synthetic construct
  source 1..20: mol_type = other DNA
acagaatgcattattgatgc

SEQ ID NO: 209710 - DNA, 20 bp, synthetic construct
  source 1..20: mol_type = other DNA
cacagaatgcattattgatg

SEQ ID NO: 209711 - DNA, 20 bp, synthetic construct
  source 1..20: mol_type = other DNA
gcacagaatgcattattgat

SEQ ID NO: 209712 - DNA, 20 bp, synthetic construct
  source 1..20: mol_type = other DNA
agcacagaatgcattattga

SEQ ID NO: 209713 - DNA, 20 bp, synthetic construct
  source 1..20: mol_type = other DNA
aagcacagaatgcattattg

SEQ ID NO: 209714 - DNA, 20 bp, synthetic construct
  source 1..20: mol_type = other DNA
aaagcacagaatgcattatt

SEQ ID NO: 209715 - DNA, 20 bp, synthetic construct
  source 1..20: mol_type = other DNA
taaagcacagaatgcattat

SEQ ID NO: 209716 - DNA, 20 bp, synthetic construct
  source 1..20: mol_type = other DNA
ataaagcacagaatgcatta

SEQ ID NO: 209717 - DNA, 20 bp, synthetic construct
  source 1..20: mol_type = other DNA
tataaagcacagaatgcatt

SEQ ID NO: 209718 - DNA, 20 bp, synthetic construct
  source 1..20: mol_type = other DNA
ctataaagcacagaatgcat

SEQ ID NO: 209719 - DNA, 20 bp, synthetic construct
  source 1..20: mol_type = other DNA
gctataaagcacagaatgca

SEQ ID NO: 209720 - DNA, 20 bp, synthetic construct
  source 1..20: mol_type = other DNA
tgctataaagcacagaatgc

SEQ ID NO: 209721 - DNA, 20 bp, synthetic construct
  source 1..20: mol_type = other DNA
atgctataaagcacagaatg

SEQ ID NO: 209722 - DNA, 20 bp, synthetic construct
  source 1..20: mol_type = other DNA
catgctataaagcacagaat

SEQ ID NO: 209723 - DNA, 20 bp, synthetic construct
  source 1..20: mol_type = other DNA
ccatgctataaagcacagaa

SEQ ID NO: 209724 - DNA, 20 bp, synthetic construct
  source 1..20: mol_type = other DNA
tccatgctataaagcacaga

SEQ ID NO: 209725 - DNA, 20 bp, synthetic construct
  source 1..20: mol_type = other DNA
ttccatgctataaagcacag

SEQ ID NO: 209726 - DNA, 20 bp, synthetic construct
  source 1..20: mol_type = other DNA
tttccatgctataaagcaca

SEQ ID NO: 209727 - DNA, 20 bp, synthetic construct
  source 1..20: mol_type = other DNA
ctttccatgctataaagcac

SEQ ID NO: 209728 - DNA, 20 bp, synthetic construct
  source 1..20: mol_type = other DNA
gctttccatgctataaagca

SEQ ID NO: 209729 - DNA, 20 bp, synthetic construct
  source 1..20: mol_type = other DNA
agctttccatgctataaagc

SEQ ID NO: 209730 - DNA, 20 bp, synthetic construct
  source 1..20: mol_type = other DNA
cagctttccatgctataaag

SEQ ID NO: 209731 - DNA, 20 bp, synthetic construct
  source 1..20: mol_type = other DNA
gcagctttccatgctataaa

SEQ ID NO: 209732 - DNA, 20 bp, synthetic construct
  source 1..20: mol_type = other DNA
agcagctttccatgctataa

SEQ ID NO: 209733 - DNA, 20 bp, synthetic construct
  source 1..20: mol_type = other DNA
gagcagctttccatgctata

SEQ ID NO: 209734 - DNA, 20 bp, synthetic construct
  source 1..20: mol_type = other DNA
agagcagctttccatgctat

SEQ ID NO: 209735 - DNA, 20 bp, synthetic construct
  source 1..20: mol_type = other DNA
tagagcagctttccatgcta

SEQ ID NO: 209736 - DNA, 20 bp, synthetic construct
  source 1..20: mol_type = other DNA
ttagagcagctttccatgct

SEQ ID NO: 209737 - DNA, 20 bp, synthetic construct
  source 1..20: mol_type = other DNA
tttagagcagctttccatgc

SEQ ID NO: 209738 - DNA, 20 bp, synthetic construct
  source 1..20: mol_type = other DNA
gtttagagcagctttccatg

SEQ ID NO: 209739 - DNA, 20 bp, synthetic construct
  source 1..20: mol_type = other DNA
agtttagagcagctttccat

SEQ ID NO: 209740 - DNA, 20 bp, synthetic construct
  source 1..20: mol_type = other DNA
aagtttagagcagctttcca

SEQ ID NO: 209741 - DNA, 20 bp, synthetic construct
  source 1..20: mol_type = other DNA
aaagtttagagcagctttcc

SEQ ID NO: 209742 - DNA, 20 bp, synthetic construct
  source 1..20: mol_type = other DNA
taaagtttagagcagctttc

SEQ ID NO: 209743 - DNA, 20 bp, synthetic construct
  source 1..20: mol_type = other DNA
ataaagtttagagcagcttt

SEQ ID NO: 209744 - DNA, 20 bp, synthetic construct
  source 1..20: mol_type = other DNA
aataaagtttagagcagctt

SEQ ID NO: 209745 - DNA, 20 bp, synthetic construct
  source 1..20: mol_type = other DNA
taataaagtttagagcagct

SEQ ID NO: 209746 - DNA, 20 bp, synthetic construct
  source 1..20: mol_type = other DNA
gtaataaagtttagagcagc

SEQ ID NO: 209747 - DNA, 20 bp, synthetic construct
  source 1..20: mol_type = other DNA
tgtaataaagtttagagcag

SEQ ID NO: 209748 - DNA, 20 bp, synthetic construct
  source 1..20: mol_type = other DNA
gtgtaataaagtttagagca

SEQ ID NO: 209749 - DNA, 20 bp, synthetic construct
  source 1..20: mol_type = other DNA
tgtgtaataaagtttagagc

SEQ ID NO: 209750 - DNA, 20 bp, synthetic construct
  source 1..20: mol_type = other DNA
ctgtgtaataaagtttagag

SEQ ID NO: 209751 - DNA, 20 bp, synthetic construct
  source 1..20: mol_type = other DNA
actgtgtaataaagtttaga

SEQ ID NO: 209752 - DNA, 20 bp, synthetic construct
  source 1..20: mol_type = other DNA
cactgtgtaataaagtttag

SEQ ID NO: 209753 - DNA, 20 bp, synthetic construct
  source 1..20: mol_type = other DNA
ccactgtgtaataaagttta

SEQ ID NO: 209754 - DNA, 20 bp, synthetic construct
  source 1..20: mol_type = other DNA
tccactgtgtaataaagttt

SEQ ID NO: 209755 - DNA, 20 bp, synthetic construct
  source 1..20: mol_type = other DNA
gtccactgtgtaataaagtt

SEQ ID NO: 209756 - DNA, 20 bp, synthetic construct
  source 1..20: mol_type = other DNA
tgtccactgtgtaataaagt

SEQ ID NO: 209757 - DNA, 20 bp, synthetic construct
  source 1..20: mol_type = other DNA
atgtccactgtgtaataaag

SEQ ID NO: 209758 - DNA, 20 bp, synthetic construct
  source 1..20: mol_type = other DNA
catgtccactgtgtaataaa

SEQ ID NO: 209759 - DNA, 20 bp, synthetic construct
  source 1..20: mol_type = other DNA
acatgtccactgtgtaataa

SEQ ID NO: 209760 - DNA, 20 bp, synthetic construct
  source 1..20: mol_type = other DNA
gacatgtccactgtgtaata

SEQ ID NO: 209761 - DNA, 20 bp, synthetic construct
  source 1..20: mol_type = other DNA
agacatgtccactgtgtaat

SEQ ID NO: 209762 - DNA, 20 bp, synthetic construct
  source 1..20: mol_type = other DNA
cagacatgtccactgtgtaa

SEQ ID NO: 209763 - DNA, 20 bp, synthetic construct
  source 1..20: mol_type = other DNA
tcagacatgtccactgtgta

SEQ ID NO: 209764 - DNA, 20 bp, synthetic construct
  source 1..20: mol_type = other DNA
ttcagacatgtccactgtgt

SEQ ID NO: 209765 - DNA, 20 bp, synthetic construct
  source 1..20: mol_type = other DNA
cttcagacatgtccactgtg

SEQ ID NO: 209766 - DNA, 20 bp, synthetic construct
  source 1..20: mol_type = other DNA
gcttcagacatgtccactgt

SEQ ID NO: 209767 - DNA, 20 bp, synthetic construct
  source 1..20: mol_type = other DNA
tgcttcagacatgtccactg

SEQ ID NO: 209768 - DNA, 20 bp, synthetic construct
  source 1..20: mol_type = other DNA
ctgcttcagacatgtccact

SEQ ID NO: 209769 - DNA, 20 bp, synthetic construct
  source 1..20: mol_type = other DNA
gctgcttcagacatgtccac

SEQ ID NO: 209770 - DNA, 20 bp, synthetic construct
  source 1..20: mol_type = other DNA
agctgcttcagacatgtcca

SEQ ID NO: 209771 - DNA, 20 bp, synthetic construct
  source 1..20: mol_type = other DNA
gagctgcttcagacatgtcc

SEQ ID NO: 209772 - DNA, 20 bp, synthetic construct
  source 1..20: mol_type = other DNA
ggagctgcttcagacatgtc

SEQ ID NO: 209773 - DNA, 20 bp, synthetic construct
  source 1..20: mol_type = other DNA
gggagctgcttcagacatgt

SEQ ID NO: 209774 - DNA, 20 bp, synthetic construct
  source 1..20: mol_type = other DNA
tgggagctgcttcagacatg

SEQ ID NO: 209775 - DNA, 20 bp, synthetic construct
  source 1..20: mol_type = other DNA
ttgggagctgcttcagacat

SEQ ID NO: 209776 - DNA, 20 bp, synthetic construct
  source 1..20: mol_type = other DNA
tttgggagctgcttcagaca

SEQ ID NO: 209777 - DNA, 20 bp, synthetic construct
  source 1..20: mol_type = other DNA
atttgggagctgcttcagac

SEQ ID NO: 209778 - DNA, 20 bp, synthetic construct
  source 1..20: mol_type = other DNA
gatttgggagctgcttcaga

SEQ ID NO: 209779 - DNA, 20 bp, synthetic construct
  source 1..20: mol_type = other DNA
ggatttgggagctgcttcag

SEQ ID NO: 209780 - DNA, 20 bp, synthetic construct
  source 1..20: mol_type = other DNA
tggatttgggagctgcttca

SEQ ID NO: 209781 - DNA, 20 bp, synthetic construct
  source 1..20: mol_type = other DNA
gtggatttgggagctgcttc

SEQ ID NO: 209782 - DNA, 20 bp, synthetic construct
  source 1..20: mol_type = other DNA
ggtggatttgggagctgctt

SEQ ID NO: 209783 - DNA, 20 bp, synthetic construct
  source 1..20: mol_type = other DNA
gggtggatttgggagctgct

SEQ ID NO: 209784 - DNA, 20 bp, synthetic construct
  source 1..20: mol_type = other DNA
ggggtggatttgggagctgc

SEQ ID NO: 209785 - DNA, 20 bp, synthetic construct
  source 1..20: mol_type = other DNA
aggggtggatttgggagctg

SEQ ID NO: 209786 - DNA, 20 bp, synthetic construct
  source 1..20: mol_type = other DNA
caggggtggatttgggagct

SEQ ID NO: 209787 - DNA, 20 bp, synthetic construct
  source 1..20: mol_type = other DNA
tcaggggtggatttgggagc

SEQ ID NO: 209788 - DNA, 20 bp, synthetic construct
  source 1..20: mol_type = other DNA
ctcaggggtggatttgggag

SEQ ID NO: 209789 - DNA, 20 bp, synthetic construct
  source 1..20: mol_type = other DNA
actcaggggtggatttggga

SEQ ID NO: 209790 - DNA, 20 bp, synthetic construct
  source 1..20: mol_type = other DNA
cactcaggggtggatttggg

SEQ ID NO: 209791 - DNA, 20 bp, synthetic construct
  source 1..20: mol_type = other DNA
acactcaggggtggatttgg

SEQ ID NO: 209792 - DNA, 20 bp, synthetic construct
  source 1..20: mol_type = other DNA
cacactcaggggtggatttg

SEQ ID NO: 209793 - DNA, 20 bp, synthetic construct
  source 1..20: mol_type = other DNA
acacactcaggggtggattt

SEQ ID NO: 209794 - DNA, 20 bp, synthetic construct
  source 1..20: mol_type = other DNA
aacacactcaggggtggatt

SEQ ID NO: 209795 - DNA, 20 bp, synthetic construct
  source 1..20: mol_type = other DNA
caacacactcaggggtggat

SEQ ID NO: 209796 - DNA, 20 bp, synthetic construct
  source 1..20: mol_type = other DNA
ccaacacactcaggggtgga

SEQ ID NO: 209797 - DNA, 20 bp, synthetic construct
  source 1..20: mol_type = other DNA
tccaacacactcaggggtgg

SEQ ID NO: 209798 - DNA, 20 bp, synthetic construct
  source 1..20: mol_type = other DNA
ttccaacacactcaggggtg

SEQ ID NO: 209799 - DNA, 20 bp, synthetic construct
  source 1..20: mol_type = other DNA
attccaacacactcaggggt

SEQ ID NO: 209800 - DNA, 20 bp, synthetic construct
  source 1..20: mol_type = other DNA
aattccaacacactcagggg

SEQ ID NO: 209801 - DNA, 20 bp, synthetic construct
  source 1..20: mol_type = other DNA
caattccaacacactcaggg

SEQ ID NO: 209802 - DNA, 20 bp, synthetic construct
  source 1..20: mol_type = other DNA
ccaattccaacacactcagg

SEQ ID NO: 209803 - DNA, 20 bp, synthetic construct
  source 1..20: mol_type = other DNA
gccaattccaacacactcag

SEQ ID NO: 209804 - DNA, 20 bp, synthetic construct
  source 1..20: mol_type = other DNA
tgccaattccaacacactca

SEQ ID NO: 209805 - DNA, 20 bp, synthetic construct
  source 1..20: mol_type = other DNA
ttgccaattccaacacactc

SEQ ID NO: 209806 - DNA, 20 bp, synthetic construct
  source 1..20: mol_type = other DNA
cttgccaattccaacacact

SEQ ID NO: 209807 - DNA, 20 bp, synthetic construct
  source 1..20: mol_type = other DNA
gcttgccaattccaacacac

SEQ ID NO: 209808 - DNA, 20 bp, synthetic construct
  source 1..20: mol_type = other DNA
ggcttgccaattccaacaca

SEQ ID NO: 209809 - DNA, 20 bp, synthetic construct
  source 1..20: mol_type = other DNA
aggcttgccaattccaacac

SEQ ID NO: 209810 - DNA, 20 bp, synthetic construct
  source 1..20: mol_type = other DNA
taggcttgccaattccaaca

SEQ ID NO: 209811 - DNA, 20 bp, synthetic construct
  source 1..20: mol_type = other DNA
ataggcttgccaattccaac

SEQ ID NO: 209812 - DNA, 20 bp, synthetic construct
  source 1..20: mol_type = other DNA
gataggcttgccaattccaa

SEQ ID NO: 209813 - DNA, 20 bp, synthetic construct
  source 1..20: mol_type = other DNA
tgataggcttgccaattcca

SEQ ID NO: 209814 - DNA, 20 bp, synthetic construct
  source 1..20: mol_type = other DNA
gtgataggcttgccaattcc

SEQ ID NO: 209815 - DNA, 20 bp, synthetic construct
  source 1..20: mol_type = other DNA
agtgataggcttgccaattc

SEQ ID NO: 209816 - DNA, 20 bp, synthetic construct
  source 1..20: mol_type = other DNA
aagtgataggcttgccaatt

SEQ ID NO: 209817 - DNA, 20 bp, synthetic construct
  source 1..20: mol_type = other DNA
caagtgataggcttgccaat

SEQ ID NO: 209818 - DNA, 20 bp, synthetic construct
  source 1..20: mol_type = other DNA
ccaagtgataggcttgccaa

SEQ ID NO: 209819 - DNA, 20 bp, synthetic construct
  source 1..20: mol_type = other DNA
cccaagtgataggcttgcca

SEQ ID NO: 209820 - DNA, 20 bp, synthetic construct
  source 1..20: mol_type = other DNA
tcccaagtgataggcttgcc

SEQ ID NO: 209821 - DNA, 20 bp, synthetic construct
  source 1..20: mol_type = other DNA
ctcccaagtgataggcttgc

SEQ ID NO: 209822 - DNA, 20 bp, synthetic construct
  source 1..20: mol_type = other DNA
actcccaagtgataggcttg

SEQ ID NO: 209823 - DNA, 20 bp, synthetic construct
  source 1..20: mol_type = other DNA
gactcccaagtgataggctt

SEQ ID NO: 209824 - DNA, 20 bp, synthetic construct
  source 1..20: mol_type = other DNA
agactcccaagtgataggct

SEQ ID NO: 209825 - DNA, 20 bp, synthetic construct
  source 1..20: mol_type = other DNA
tagactcccaagtgataggc

SEQ ID NO: 209826 - DNA, 20 bp, synthetic construct
  source 1..20: mol_type = other DNA
ctagactcccaagtgatagg

SEQ ID NO: 209827 - DNA, 20 bp, synthetic construct
  source 1..20: mol_type = other DNA
actagactcccaagtgatag

SEQ ID NO: 209828 - DNA, 20 bp, synthetic construct
  source 1..20: mol_type = other DNA
aactagactcccaagtgata

SEQ ID NO: 209829 - DNA, 20 bp, synthetic construct
  source 1..20: mol_type = other DNA
aaactagactcccaagtgat

SEQ ID NO: 209830 - DNA, 20 bp, synthetic construct
  source 1..20: mol_type = other DNA
aaaactagactcccaagtga

SEQ ID NO: 209831 - DNA, 20 bp, synthetic construct
  source 1..20: mol_type = other DNA
aaaaactagactcccaagtg

SEQ ID NO: 209832 - DNA, 20 bp, synthetic construct
  source 1..20: mol_type = other DNA
aaaaaactagactcccaagt

SEQ ID NO: 209833 - DNA, 20 bp, synthetic construct
  source 1..20: mol_type = other DNA
aaaaaaactagactcccaag

SEQ ID NO: 209834 - DNA, 20 bp, synthetic construct
  source 1..20: mol_type = other DNA
caaaaaaactagactcccaa

SEQ ID NO: 209835 - DNA, 20 bp, synthetic construct
  source 1..20: mol_type = other DNA
acaaaaaaactagactccca

SEQ ID NO: 209836 - DNA, 20 bp, synthetic construct
  source 1..20: mol_type = other DNA
aacaaaaaaactagactccc

SEQ ID NO: 209837 - DNA, 20 bp, synthetic construct
  source 1..20: mol_type = other DNA
gaacaaaaaaactagactcc

SEQ ID NO: 209838 - DNA, 20 bp, synthetic construct
  source 1..20: mol_type = other DNA
cgaacaaaaaaactagactc

SEQ ID NO: 209839 - DNA, 20 bp, synthetic construct
  source 1..20: mol_type = other DNA
acgaacaaaaaaactagact

SEQ ID NO: 209840 - DNA, 20 bp, synthetic construct
  source 1..20: mol_type = other DNA
aacgaacaaaaaaactagac

SEQ ID NO: 209841 - DNA, 20 bp, synthetic construct
  source 1..20: mol_type = other DNA
taacgaacaaaaaaactaga

SEQ ID NO: 209842 - DNA, 20 bp, synthetic construct
  source 1..20: mol_type = other DNA
ttaacgaacaaaaaaactag

SEQ ID NO: 209843 - DNA, 20 bp, synthetic construct
  source 1..20: mol_type = other DNA
attaacgaacaaaaaaacta

SEQ ID NO: 209844 - DNA, 20 bp, synthetic construct
  source 1..20: mol_type = other DNA
tattaacgaacaaaaaaact

SEQ ID NO: 209845 - DNA, 20 bp, synthetic construct
  source 1..20: mol_type = other DNA
ttattaacgaacaaaaaaac

SEQ ID NO: 209846 - DNA, 20 bp, synthetic construct
  source 1..20: mol_type = other DNA
attattaacgaacaaaaaaa

SEQ ID NO: 209847 - DNA, 20 bp, synthetic construct
  source 1..20: mol_type = other DNA
tattattaacgaacaaaaaa

SEQ ID NO: 209848 - DNA, 20 bp, synthetic construct
  source 1..20: mol_type = other DNA
ctattattaacgaacaaaaa

SEQ ID NO: 209849 - DNA, 20 bp, synthetic construct
  source 1..20: mol_type = other DNA
tctattattaacgaacaaaa

SEQ ID NO: 209850 - DNA, 20 bp, synthetic construct
  source 1..20: mol_type = other DNA
atctattattaacgaacaaa

SEQ ID NO: 209851 - DNA, 20 bp, synthetic construct
  source 1..20: mol_type = other DNA
catctattattaacgaacaa

SEQ ID NO: 209852 - DNA, 20 bp, synthetic construct
  source 1..20: mol_type = other DNA
gcatctattattaacgaaca

SEQ ID NO: 209853 - DNA, 20 bp, synthetic construct
  source 1..20: mol_type = other DNA
agcatctattattaacgaac

SEQ ID NO: 209854 - DNA, 20 bp, synthetic construct
  source 1..20: mol_type = other DNA
aagcatctattattaacgaa

SEQ ID NO: 209855 - DNA, 20 bp, synthetic construct
  source 1..20: mol_type = other DNA
gaagcatctattattaacga

SEQ ID NO: 209856 - DNA, 20 bp, synthetic construct
  source 1..20: mol_type = other DNA
ggaagcatctattattaacg

SEQ ID NO: 209857 - DNA, 20 bp, synthetic construct
  source 1..20: mol_type = other DNA
aggaagcatctattattaac

SEQ ID NO: 209858 - DNA, 20 bp, synthetic construct
  source 1..20: mol_type = other DNA
caggaagcatctattattaa

SEQ ID NO: 209859 - DNA, 20 bp, synthetic construct
  source 1..20: mol_type = other DNA
acaggaagcatctattatta

SEQ ID NO: 209860 - DNA, 20 bp, synthetic construct
  source 1..20: mol_type = other DNA
cacaggaagcatctattatt

SEQ ID NO: 209861 - DNA, 20 bp, synthetic construct
  source 1..20: mol_type = other DNA
ccacaggaagcatctattat

SEQ ID NO: 209862 - DNA, 20 bp, synthetic construct
  source 1..20: mol_type = other DNA
gccacaggaagcatctatta

SEQ ID NO: 209863 - DNA, 20 bp, synthetic construct
  source 1..20: mol_type = other DNA
ggccacaggaagcatctatt

SEQ ID NO: 209864 - DNA, 20 bp, synthetic construct
  source 1..20: mol_type = other DNA
gggccacaggaagcatctat

SEQ ID NO: 209865 - DNA, 20 bp, synthetic construct
  source 1..20: mol_type = other DNA
ggggccacaggaagcatcta

SEQ ID NO: 209866 - DNA, 20 bp, synthetic construct
  source 1..20: mol_type = other DNA
tggggccacaggaagcatct

SEQ ID NO: 209867 - DNA, 20 bp, synthetic construct
  source 1..20: mol_type = other DNA
ctggggccacaggaagcatc

SEQ ID NO: 209868 - DNA, 20 bp, synthetic construct
  source 1..20: mol_type = other DNA
gctggggccacaggaagcat

SEQ ID NO: 209869 - DNA, 20 bp, synthetic construct
  source 1..20: mol_type = other DNA
agctggggccacaggaagca

SEQ ID NO: 209870 - DNA, 20 bp, synthetic construct
  source 1..20: mol_type = other DNA
aagctggggccacaggaagc

SEQ ID NO: 209871 - DNA, 20 bp, synthetic construct
  source 1..20: mol_type = other DNA
caagctggggccacaggaag

SEQ ID NO: 209872 - DNA, 20 bp, synthetic construct
  source 1..20: mol_type = other DNA
ccaagctggggccacaggaa

SEQ ID NO: 209873 - DNA, 20 bp, synthetic construct
  source 1..20: mol_type = other DNA
gccaagctggggccacagga

SEQ ID NO: 209874 - DNA, 20 bp, synthetic construct
  source 1..20: mol_type = other DNA
tgccaagctggggccacagg

SEQ ID NO: 209875 - DNA, 20 bp, synthetic construct
  source 1..20: mol_type = other DNA
ttgccaagctggggccacag

SEQ ID NO: 209876 - DNA, 20 bp, synthetic construct
  source 1..20: mol_type = other DNA
attgccaagctggggccaca

SEQ ID NO: 209877 - DNA, 20 bp, synthetic construct
  source 1..20: mol_type = other DNA
aattgccaagctggggccac

SEQ ID NO: 209878 - DNA, 20 bp, synthetic construct
  source 1..20: mol_type = other DNA
aaattgccaagctggggcca

SEQ ID NO: 209879 - DNA, 20 bp, synthetic construct
  source 1..20: mol_type = other DNA
aaaattgccaagctggggcc

SEQ ID NO: 209880 - DNA, 20 bp, synthetic construct
  source 1..20: mol_type = other DNA
caaaattgccaagctggggc

SEQ ID NO: 209881 - DNA, 20 bp, synthetic construct
  source 1..20: mol_type = other DNA
tcaaaattgccaagctgggg

SEQ ID NO: 209882 - DNA, 20 bp, synthetic construct
  source 1..20: mol_type = other DNA
atcaaaattgccaagctggg

SEQ ID NO: 209883 - DNA, 20 bp, synthetic construct
  source 1..20: mol_type = other DNA
aatcaaaattgccaagctgg

SEQ ID NO: 209884 - DNA, 20 bp, synthetic construct
  source 1..20: mol_type = other DNA
aaatcaaaattgccaagctg

SEQ ID NO: 209885 - DNA, 20 bp, synthetic construct
  source 1..20: mol_type = other DNA
taaatcaaaattgccaagct

SEQ ID NO: 209886 - DNA, 20 bp, synthetic construct
  source 1..20: mol_type = other DNA
ttaaatcaaaattgccaagc

SEQ ID NO: 209887 - DNA, 20 bp, synthetic construct
  source 1..20: mol_type = other DNA
tttaaatcaaaattgccaag

SEQ ID NO: 209888 - DNA, 20 bp, synthetic construct
  source 1..20: mol_type = other DNA
ctttaaatcaaaattgccaa

SEQ ID NO: 209889 - DNA, 20 bp, synthetic construct
  source 1..20: mol_type = other DNA
actttaaatcaaaattgcca

SEQ ID NO: 209890 - DNA, 20 bp, synthetic construct
  source 1..20: mol_type = other DNA
cactttaaatcaaaattgcc

SEQ ID NO: 209891 - DNA, 20 bp, synthetic construct
  source 1..20: mol_type = other DNA
tcactttaaatcaaaattgc

SEQ ID NO: 209892 - DNA, 20 bp, synthetic construct
  source 1..20: mol_type = other DNA
atcactttaaatcaaaattg

SEQ ID NO: 209893 - DNA, 20 bp, synthetic construct
  source 1..20: mol_type = other DNA
gatcactttaaatcaaaatt

SEQ ID NO: 209894 - DNA, 20 bp, synthetic construct
  source 1..20: mol_type = other DNA
agatcactttaaatcaaaat

SEQ ID NO: 209895 - DNA, 20 bp, synthetic construct
  source 1..20: mol_type = other DNA
aagatcactttaaatcaaaa

SEQ ID NO: 209896 - DNA, 20 bp, synthetic construct
  source 1..20: mol_type = other DNA
taagatcactttaaatcaaa

SEQ ID NO: 209897 - DNA, 20 bp, synthetic construct
  source 1..20: mol_type = other DNA
ttaagatcactttaaatcaa

SEQ ID NO: 209898 - DNA, 20 bp, synthetic construct
  source 1..20: mol_type = other DNA
gttaagatcactttaaatca

SEQ ID NO: 209899 - DNA, 20 bp, synthetic construct
  source 1..20: mol_type = other DNA
agttaagatcactttaaatc

SEQ ID NO: 209900 - DNA, 20 bp, synthetic construct
  source 1..20: mol_type = other DNA
cagttaagatcactttaaat

SEQ ID NO: 209901 - DNA, 20 bp, synthetic construct
  source 1..20: mol_type = other DNA
tcagttaagatcactttaaa

SEQ ID NO: 209902 - DNA, 20 bp, synthetic construct
  source 1..20: mol_type = other DNA
ttcagttaagatcactttaa

SEQ ID NO: 209903 - DNA, 20 bp, synthetic construct
  source 1..20: mol_type = other DNA
cttcagttaagatcacttta

SEQ ID NO: 209904 - DNA, 20 bp, synthetic construct
  source 1..20: mol_type = other DNA
tcttcagttaagatcacttt

SEQ ID NO: 209905 - DNA, 20 bp, synthetic construct
  source 1..20: mol_type = other DNA
ctcttcagttaagatcactt

SEQ ID NO: 209906 - DNA, 20 bp, synthetic construct
  source 1..20: mol_type = other DNA
tctcttcagttaagatcact

SEQ ID NO: 209907 - DNA, 20 bp, synthetic construct
  source 1..20: mol_type = other DNA
gtctcttcagttaagatcac

SEQ ID NO: 209908 - DNA, 20 bp, synthetic construct
  source 1..20: mol_type = other DNA
agtctcttcagttaagatca

SEQ ID NO: 209909 - DNA, 20 bp, synthetic construct
  source 1..20: mol_type = other DNA
tagtctcttcagttaagatc

SEQ ID NO: 209910 - DNA, 20 bp, synthetic construct
  source 1..20: mol_type = other DNA
ttagtctcttcagttaagat

SEQ ID NO: 209911 - DNA, 20 bp, synthetic construct
  source 1..20: mol_type = other DNA
attagtctcttcagttaaga

SEQ ID NO: 209912 - DNA, 20 bp, synthetic construct
  source 1..20: mol_type = other DNA
cattagtctcttcagttaag

SEQ ID NO: 209913 - DNA, 20 bp, synthetic construct
  source 1..20: mol_type = other DNA
ccattagtctcttcagttaa

SEQ ID NO: 209914 - DNA, 20 bp, synthetic construct
  source 1..20: mol_type = other DNA
tccattagtctcttcagtta

SEQ ID NO: 209915 - DNA, 20 bp, synthetic construct
  source 1..20: mol_type = other DNA
gtccattagtctcttcagtt

SEQ ID NO: 209916 - DNA, 20 bp, synthetic construct
  source 1..20: mol_type = other DNA
cgtccattagtctcttcagt

SEQ ID NO: 209917 - DNA, 20 bp, synthetic construct
  source 1..20: mol_type = other DNA
ccgtccattagtctcttcag

SEQ ID NO: 209918 - DNA, 20 bp, synthetic construct
  source 1..20: mol_type = other DNA
cccgtccattagtctcttca

SEQ ID NO: 209919 - DNA, 20 bp, synthetic construct
  source 1..20: mol_type = other DNA
acccgtccattagtctcttc

SEQ ID NO: 209920 - DNA, 20 bp, synthetic construct
  source 1..20: mol_type = other DNA
gacccgtccattagtctctt

SEQ ID NO: 209921 - DNA, 20 bp, synthetic construct
  source 1..20: mol_type = other DNA
agacccgtccattagtctct

SEQ ID NO: 209922 - DNA, 20 bp, synthetic construct
  source 1..20: mol_type = other DNA
cagacccgtccattagtctc

SEQ ID NO: 209923 - DNA, 20 bp, synthetic construct
  source 1..20: mol_type = other DNA
tcagacccgtccattagtct

SEQ ID NO: 209924 - DNA, 20 bp, synthetic construct
  source 1..20: mol_type = other DNA
ttcagacccgtccattagtc

SEQ ID NO: 209925 - DNA, 20 bp, synthetic construct
  source 1..20: mol_type = other DNA
attcagacccgtccattagt

SEQ ID NO: 209926 - DNA, 20 bp, synthetic construct
  source 1..20: mol_type = other DNA
aattcagacccgtccattag

SEQ ID NO: 209927 - DNA, 20 bp, synthetic construct
  source 1..20: mol_type = other DNA
aaattcagacccgtccatta

SEQ ID NO: 209928 - DNA, 20 bp, synthetic construct
  source 1..20: mol_type = other DNA
caaattcagacccgtccatt

SEQ ID NO: 209929 - DNA, 20 bp, synthetic construct
  source 1..20: mol_type = other DNA
acaaattcagacccgtccat

SEQ ID NO: 209930 - DNA, 20 bp, synthetic construct
  source 1..20: mol_type = other DNA
cacaaattcagacccgtcca

SEQ ID NO: 209931 - DNA, 20 bp, synthetic construct
  source 1..20: mol_type = other DNA
gcacaaattcagacccgtcc

SEQ ID NO: 209932 - DNA, 20 bp, synthetic construct
  source 1..20: mol_type = other DNA
ggcacaaattcagacccgtc

SEQ ID NO: 209933 - DNA, 20 bp, synthetic construct
  source 1..20: mol_type = other DNA
aggcacaaattcagacccgt

SEQ ID NO: 209934 - DNA, 20 bp, synthetic construct
  source 1..20: mol_type = other DNA
aaggcacaaattcagacccg

SEQ ID NO: 209935 - DNA, 20 bp, synthetic construct
  source 1..20: mol_type = other DNA
aaaggcacaaattcagaccc

SEQ ID NO: 209936 - DNA, 20 bp, synthetic construct
  source 1..20: mol_type = other DNA
aaaaggcacaaattcagacc

SEQ ID NO: 209937 - DNA, 20 bp, synthetic construct
  source 1..20: mol_type = other DNA
taaaaggcacaaattcagac

SEQ ID NO: 209938 - DNA, 20 bp, synthetic construct
  source 1..20: mol_type = other DNA
ttaaaaggcacaaattcaga

SEQ ID NO: 209939 - DNA, 20 bp, synthetic construct
  source 1..20: mol_type = other DNA
cttaaaaggcacaaattcag

SEQ ID NO: 209940 - DNA, 20 bp, synthetic construct
  source 1..20: mol_type = other DNA
gcttaaaaggcacaaattca

SEQ ID NO: 209941 - DNA, 20 bp, synthetic construct
  source 1..20: mol_type = other DNA
tgcttaaaaggcacaaattc

SEQ ID NO: 209942 - DNA, 20 bp, synthetic construct
  source 1..20: mol_type = other DNA
gtgcttaaaaggcacaaatt

SEQ ID NO: 209943 - DNA, 20 bp, synthetic construct
  source 1..20: mol_type = other DNA
tgtgcttaaaaggcacaaat

SEQ ID NO: 209944 - DNA, 20 bp, synthetic construct
  source 1..20: mol_type = other DNA
ttgtgcttaaaaggcacaaa

SEQ ID NO: 209945 - DNA, 20 bp, synthetic construct
  source 1..20: mol_type = other DNA
tttgtgcttaaaaggcacaa

SEQ ID NO: 209946 - DNA, 20 bp, synthetic construct
  source 1..20: mol_type = other DNA
ctttgtgcttaaaaggcaca

SEQ ID NO: 209947 - DNA, 20 bp, synthetic construct
  source 1..20: mol_type = other DNA
actttgtgcttaaaaggcac

SEQ ID NO: 209948 - DNA, 20 bp, synthetic construct
  source 1..20: mol_type = other DNA
tactttgtgcttaaaaggca

SEQ ID NO: 209949 - DNA, 20 bp, synthetic construct
  source 1..20: mol_type = other DNA
atactttgtgcttaaaaggc

SEQ ID NO: 209950 - DNA, 20 bp, synthetic construct
  source 1..20: mol_type = other DNA
aatactttgtgcttaaaagg

SEQ ID NO: 209951 - DNA, 20 bp, synthetic construct
  source 1..20: mol_type = other DNA
caatactttgtgcttaaaag

SEQ ID NO: 209952 - DNA, 20 bp, synthetic construct
  source 1..20: mol_type = other DNA
gcaatactttgtgcttaaaa

SEQ ID NO: 209953 - DNA, 20 bp, synthetic construct
  source 1..20: mol_type = other DNA
agcaatactttgtgcttaaa

SEQ ID NO: 209954 - DNA, 20 bp, synthetic construct
  source 1..20: mol_type = other DNA
gagcaatactttgtgcttaa

SEQ ID NO: 209955 - DNA, 20 bp, synthetic construct
  source 1..20: mol_type = other DNA
agagcaatactttgtgctta

SEQ ID NO: 209956 - DNA, 20 bp, synthetic construct
  source 1..20: mol_type = other DNA
aagagcaatactttgtgctt

SEQ ID NO: 209957 - DNA, 20 bp, synthetic construct
  source 1..20: mol_type = other DNA
taagagcaatactttgtgct

SEQ ID NO: 209958 - DNA, 20 bp, synthetic construct
  source 1..20: mol_type = other DNA
ttaagagcaatactttgtgc

SEQ ID NO: 209959 - DNA, 20 bp, synthetic construct
  source 1..20: mol_type = other DNA
attaagagcaatactttgtg

SEQ ID NO: 209960 - DNA, 20 bp, synthetic construct
  source 1..20: mol_type = other DNA
aattaagagcaatactttgt

SEQ ID NO: 209961 - DNA, 20 bp, synthetic construct
  source 1..20: mol_type = other DNA
taattaagagcaatactttg

SEQ ID NO: 209962 - DNA, 20 bp, synthetic construct
  source 1..20: mol_type = other DNA
ttaattaagagcaatacttt

SEQ ID NO: 209963 - DNA, 20 bp, synthetic construct
  source 1..20: mol_type = other DNA
gttaattaagagcaatactt

SEQ ID NO: 209964 - DNA, 20 bp, synthetic construct
  source 1..20: mol_type = other DNA
agttaattaagagcaatact

SEQ ID NO: 209965 - DNA, 20 bp, synthetic construct
  source 1..20: mol_type = other DNA
cagttaattaagagcaatac

SEQ ID NO: 209966 - DNA, 20 bp, synthetic construct
  source 1..20: mol_type = other DNA
ccagttaattaagagcaata

SEQ ID NO: 209967 - DNA, 20 bp, synthetic construct
  source 1..20: mol_type = other DNA
tccagttaattaagagcaat

SEQ ID NO: 209968 - DNA, 20 bp, synthetic construct
  source 1..20: mol_type = other DNA
atccagttaattaagagcaa

SEQ ID NO: 209969 - DNA, 20 bp, synthetic construct
  source 1..20: mol_type = other DNA
aatccagttaattaagagca

SEQ ID NO: 209970 - DNA, 20 bp, synthetic construct
  source 1..20: mol_type = other DNA
gaatccagttaattaagagc

SEQ ID NO: 209971 - DNA, 20 bp, synthetic construct
  source 1..20: mol_type = other DNA
agaatccagttaattaagag

SEQ ID NO: 209972 - DNA, 20 bp, synthetic construct
  source 1..20: mol_type = other DNA
tagaatccagttaattaaga

SEQ ID NO: 209973 - DNA, 20 bp, synthetic construct
  source 1..20: mol_type = other DNA
atagaatccagttaattaag

SEQ ID NO: 209974 - DNA, 20 bp, synthetic construct
  source 1..20: mol_type = other DNA
gatagaatccagttaattaa

SEQ ID NO: 209975 - DNA, 20 bp, synthetic construct
  source 1..20: mol_type = other DNA
ggatagaatccagttaatta

SEQ ID NO: 209976 - DNA, 20 bp, synthetic construct
  source 1..20: mol_type = other DNA
aggatagaatccagttaatt

SEQ ID NO: 209977 - DNA, 20 bp, synthetic construct
  source 1..20: mol_type = other DNA
aaggatagaatccagttaat

SEQ ID NO: 209978 - DNA, 20 bp, synthetic construct
  source 1..20: mol_type = other DNA
aaaggatagaatccagttaa

SEQ ID NO: 209979 - DNA, 20 bp, synthetic construct
  source 1..20: mol_type = other DNA
caaaggatagaatccagtta

SEQ ID NO: 209980 - DNA, 20 bp, synthetic construct
  source 1..20: mol_type = other DNA
tcaaaggatagaatccagtt

SEQ ID NO: 209981 - DNA, 20 bp, synthetic construct
  source 1..20: mol_type = other DNA
ctcaaaggatagaatccagt

SEQ ID NO: 209982 - DNA, 20 bp, synthetic construct
  source 1..20: mol_type = other DNA
gctcaaaggatagaatccag

SEQ ID NO: 209983 - DNA, 20 bp, synthetic construct
  source 1..20: mol_type = other DNA
tgctcaaaggatagaatcca

SEQ ID NO: 209984 - DNA, 20 bp, synthetic construct
  source 1..20: mol_type = other DNA
ctgctcaaaggatagaatcc

SEQ ID NO: 209985 - DNA, 20 bp, synthetic construct
  source 1..20: mol_type = other DNA
cctgctcaaaggatagaatc

SEQ ID NO: 209986 - DNA, 20 bp, synthetic construct
  source 1..20: mol_type = other DNA
gcctgctcaaaggatagaat

SEQ ID NO: 209987 - DNA, 20 bp, synthetic construct
  source 1..20: mol_type = other DNA
tgcctgctcaaaggatagaa

SEQ ID NO: 209988 - DNA, 20 bp, synthetic construct
  source 1..20: mol_type = other DNA
ctgcctgctcaaaggataga

SEQ ID NO: 209989 - DNA, 20 bp, synthetic construct
  source 1..20: mol_type = other DNA
tctgcctgctcaaaggatag

SEQ ID NO: 209990 - DNA, 20 bp, synthetic construct
  source 1..20: mol_type = other DNA
ctctgcctgctcaaaggata

SEQ ID NO: 209991 - DNA, 20 bp, synthetic construct
  source 1..20: mol_type = other DNA
cctctgcctgctcaaaggat

SEQ ID NO: 209992 - DNA, 20 bp, synthetic construct
  source 1..20: mol_type = other DNA
gcctctgcctgctcaaagga

SEQ ID NO: 209993 - DNA, 20 bp, synthetic construct
  source 1..20: mol_type = other DNA
ggcctctgcctgctcaaagg

SEQ ID NO: 209994 - DNA, 20 bp, synthetic construct
  source 1..20: mol_type = other DNA
aggcctctgcctgctcaaag

SEQ ID NO: 209995 - DNA, 20 bp, synthetic construct
  source 1..20: mol_type = other DNA
aaggcctctgcctgctcaaa

SEQ ID NO: 209996 - DNA, 20 bp, synthetic construct
  source 1..20: mol_type = other DNA
gaaggcctctgcctgctcaa

SEQ ID NO: 209997 - DNA, 20 bp, synthetic construct
  source 1..20: mol_type = other DNA
ggaaggcctctgcctgctca

SEQ ID NO: 209998 - DNA, 20 bp, synthetic construct
  source 1..20: mol_type = other DNA
gggaaggcctctgcctgctc

SEQ ID NO: 209999 - DNA, 20 bp, synthetic construct
  source 1..20: mol_type = other DNA
ggggaaggcctctgcctgct

SEQ ID NO: 210000 - DNA, 20 bp, synthetic construct
  source 1..20: mol_type = other DNA
gggggaaggcctctgcctgc

SEQ ID NO: 210001 - DNA, 20 bp, synthetic construct
  source 1..20: mol_type = other DNA
tgggggaaggcctctgcctg

SEQ ID NO: 210002 - DNA, 20 bp, synthetic construct
  source 1..20: mol_type = other DNA
ttgggggaaggcctctgcct

SEQ ID NO: 210003 - DNA, 20 bp, synthetic construct
  source 1..20: mol_type = other DNA
cttgggggaaggcctctgcc

SEQ ID NO: 210004 - DNA, 20 bp, synthetic construct
  source 1..20: mol_type = other DNA
ccttgggggaaggcctctgc

SEQ ID NO: 210005 - DNA, 20 bp, synthetic construct
  source 1..20: mol_type = other DNA
cccttgggggaaggcctctg

SEQ ID NO: 210006 - DNA, 20 bp, synthetic construct
  source 1..20: mol_type = other DNA
gcccttgggggaaggcctct

SEQ ID NO: 210007 - DNA, 20 bp, synthetic construct
  source 1..20: mol_type = other DNA
cgcccttgggggaaggcctc

SEQ ID NO: 210008 - DNA, 20 bp, synthetic construct
  source 1..20: mol_type = other DNA
acgcccttgggggaaggcct

SEQ ID NO: 210009 - DNA, 20 bp, synthetic construct
  source 1..20: mol_type = other DNA
gacgcccttgggggaaggcc

SEQ ID NO: 210010 - DNA, 20 bp, synthetic construct
  source 1..20: mol_type = other DNA
tgacgcccttgggggaaggc

SEQ ID NO: 210011 - DNA, 20 bp, synthetic construct
  source 1..20: mol_type = other DNA
atgacgcccttgggggaagg

SEQ ID NO: 210012 - DNA, 20 bp, synthetic construct
  source 1..20: mol_type = other DNA
aatgacgcccttgggggaag

SEQ ID NO: 210013 - DNA, 20 bp, synthetic construct
  source 1..20: mol_type = other DNA
taatgacgcccttgggggaa

SEQ ID NO: 210014 - DNA, 20 bp, synthetic construct
  source 1..20: mol_type = other DNA
ttaatgacgcccttggggga

SEQ ID NO: 210015 - DNA, 20 bp, synthetic construct
  source 1..20: mol_type = other DNA
gttaatgacgcccttggggg

SEQ ID NO: 210016 - DNA, 20 bp, synthetic construct
  source 1..20: mol_type = other DNA
cgttaatgacgcccttgggg

SEQ ID NO: 210017 - DNA, 20 bp, synthetic construct
  source 1..20: mol_type = other DNA
tcgttaatgacgcccttggg

SEQ ID NO: 210018 - DNA, 20 bp, synthetic construct
  source 1..20: mol_type = other DNA
atcgttaatgacgcccttgg

SEQ ID NO: 210019 - DNA, 20 bp, synthetic construct
  source 1..20: mol_type = other DNA
gatcgttaatgacgcccttg

SEQ ID NO: 210020 - DNA, 20 bp, synthetic construct
  source 1..20: mol_type = other DNA
ggatcgttaatgacgccctt

SEQ ID NO: 210021 - DNA, 20 bp, synthetic construct
  source 1..20: mol_type = other DNA
tggatcgttaatgacgccct

SEQ ID NO: 210022 - DNA, 20 bp, synthetic construct
  source 1..20: mol_type = other DNA
gtggatcgttaatgacgccc

SEQ ID NO: 210023 - DNA, 20 bp, synthetic construct
  source 1..20: mol_type = other DNA
tgtggatcgttaatgacgcc

SEQ ID NO: 210024 - DNA, 20 bp, synthetic construct
  source 1..20: mol_type = other DNA
atgtggatcgttaatgacgc

SEQ ID NO: 210025 - DNA, 20 bp, synthetic construct
  source 1..20: mol_type = other DNA
gatgtggatcgttaatgacg

SEQ ID NO: 210026 - DNA, 20 bp, synthetic construct
  source 1..20: mol_type = other DNA
agatgtggatcgttaatgac

SEQ ID NO: 210027 - DNA, 20 bp, synthetic construct
  source 1..20: mol_type = other DNA
cagatgtggatcgttaatga

SEQ ID NO: 210028 - DNA, 20 bp, synthetic construct
  source 1..20: mol_type = other DNA
ccagatgtggatcgttaatg

SEQ ID NO: 210029 - DNA, 20 bp, synthetic construct
  source 1..20: mol_type = other DNA
tccagatgtggatcgttaat

SEQ ID NO: 210030 - DNA, 20 bp, synthetic construct
  source 1..20: mol_type = other DNA
gtccagatgtggatcgttaa

SEQ ID NO: 210031 - DNA, 20 bp, synthetic construct
  source 1..20: mol_type = other DNA
tgtccagatgtggatcgtta

SEQ ID NO: 210032 - DNA, 20 bp, synthetic construct
  source 1..20: mol_type = other DNA
atgtccagatgtggatcgtt

SEQ ID NO: 210033 - DNA, 20 bp, synthetic construct
  source 1..20: mol_type = other DNA
gatgtccagatgtggatcgt

SEQ ID NO: 210034 - DNA, 20 bp, synthetic construct
  source 1..20: mol_type = other DNA
agatgtccagatgtggatcg

SEQ ID NO: 210035 - DNA, 20 bp, synthetic construct
  source 1..20: mol_type = other DNA
aagatgtccagatgtggatc

SEQ ID NO: 210036 - DNA, 20 bp, synthetic construct
  source 1..20: mol_type = other DNA
gaagatgtccagatgtggat

SEQ ID NO: 210037 - DNA, 20 bp, synthetic construct
  source 1..20: mol_type = other DNA
ggaagatgtccagatgtgga

SEQ ID NO: 210038 - DNA, 20 bp, synthetic construct
  source 1..20: mol_type = other DNA
tggaagatgtccagatgtgg

SEQ ID NO: 210039 - DNA, 20 bp, synthetic construct
  source 1..20: mol_type = other DNA
ttggaagatgtccagatgtg

SEQ ID NO: 210040 - DNA, 20 bp, synthetic construct
  source 1..20: mol_type = other DNA
tttggaagatgtccagatgt

SEQ ID NO: 210041 - DNA, 20 bp, synthetic construct
  source 1..20: mol_type = other DNA
ctttggaagatgtccagatg

SEQ ID NO: 210042 - DNA, 20 bp, synthetic construct
  source 1..20: mol_type = other DNA
gctttggaagatgtccagat

SEQ ID NO: 210043 - DNA, 20 bp, synthetic construct
  source 1..20: mol_type = other DNA
ggctttggaagatgtccaga

SEQ ID NO: 210044 - DNA, 20 bp, synthetic construct
  source 1..20: mol_type = other DNA
aggctttggaagatgtccag

SEQ ID NO: 210045 - DNA, 20 bp, synthetic construct
  source 1..20: mol_type = other DNA
aaggctttggaagatgtcca

SEQ ID NO: 210046 - DNA, 20 bp, synthetic construct
  source 1..20: mol_type = other DNA
gaaggctttggaagatgtcc

SEQ ID NO: 210047 - DNA, 20 bp, synthetic construct
  source 1..20: mol_type = other DNA
agaaggctttggaagatgtc

SEQ ID NO: 210048 - DNA, 20 bp, synthetic construct
  source 1..20: mol_type = other DNA
aagaaggctttggaagatgt

SEQ ID NO: 210049 - DNA, 20 bp, synthetic construct
  source 1..20: mol_type = other DNA
gaagaaggctttggaagatg

SEQ ID NO: 210050 - DNA, 20 bp, synthetic construct
  source 1..20: mol_type = other DNA
agaagaaggctttggaagat

SEQ ID NO: 210051 - DNA, 20 bp, synthetic construct
  source 1..20: mol_type = other DNA
cagaagaaggctttggaaga

SEQ ID NO: 210052 - DNA, 20 bp, synthetic construct
  source 1..20: mol_type = other DNA
acagaagaaggctttggaag

SEQ ID NO: 210053 - DNA, 20 bp, synthetic construct
  source 1..20: mol_type = other DNA
aacagaagaaggctttggaa

SEQ ID NO: 210054 - DNA, 20 bp, synthetic construct
  source 1..20: mol_type = other DNA
aaacagaagaaggctttgga

SEQ ID NO: 210055 - DNA, 20 bp, synthetic construct
  source 1..20: mol_type = other DNA
gaaacagaagaaggctttgg

SEQ ID NO: 210056 - DNA, 20 bp, synthetic construct
  source 1..20: mol_type = other DNA
tgaaacagaagaaggctttg

SEQ ID NO: 210057 - DNA, 20 bp, synthetic construct
  source 1..20: mol_type = other DNA
ctgaaacagaagaaggcttt

SEQ ID NO: 210058 - DNA, 20 bp, synthetic construct
  source 1..20: mol_type = other DNA
cctgaaacagaagaaggctt

SEQ ID NO: 210059 - DNA, 20 bp, synthetic construct
  source 1..20: mol_type = other DNA
gcctgaaacagaagaaggct

SEQ ID NO: 210060 - DNA, 20 bp, synthetic construct
  source 1..20: mol_type = other DNA
ggcctgaaacagaagaaggc

SEQ ID NO: 210061 - DNA, 20 bp, synthetic construct
  source 1..20: mol_type = other DNA
tggcctgaaacagaagaagg

SEQ ID NO: 210062 - DNA, 20 bp, synthetic construct
  source 1..20: mol_type = other DNA
ttggcctgaaacagaagaag

SEQ ID NO: 210063 - DNA, 20 bp, synthetic construct
  source 1..20: mol_type = other DNA
gttggcctgaaacagaagaa

SEQ ID NO: 210064 - DNA, 20 bp, synthetic construct
  source 1..20: mol_type = other DNA
ggttggcctgaaacagaaga

SEQ ID NO: 210065 - DNA, 20 bp, synthetic construct
  source 1..20: mol_type = other DNA
cggttggcctgaaacagaag

SEQ ID NO: 210066 - DNA, 20 bp, synthetic construct
  source 1..20: mol_type = other DNA
gcggttggcctgaaacagaa

SEQ ID NO: 210067 - DNA, 20 bp, synthetic construct
  source 1..20: mol_type = other DNA
tgcggttggcctgaaacaga

SEQ ID NO: 210068 - DNA, 20 bp, synthetic construct
  source 1..20: mol_type = other DNA
ctgcggttggcctgaaacag

SEQ ID NO: 210069 - DNA, 20 bp, synthetic construct
  source 1..20: mol_type = other DNA
cctgcggttggcctgaaaca

SEQ ID NO: 210070 - DNA, 20 bp, synthetic construct
  source 1..20: mol_type = other DNA
acctgcggttggcctgaaac

SEQ ID NO: 210071 - DNA, 20 bp, synthetic construct
  source 1..20: mol_type = other DNA
cacctgcggttggcctgaaa

SEQ ID NO: 210072 - DNA, 20 bp, synthetic construct
  source 1..20: mol_type = other DNA
acacctgcggttggcctgaa

SEQ ID NO: 210073 - DNA, 20 bp, synthetic construct
  source 1..20: mol_type = other DNA
cacacctgcggttggcctga

SEQ ID NO: 210074 - DNA, 20 bp, synthetic construct
  source 1..20: mol_type = other DNA
acacacctgcggttggcctg

SEQ ID NO: 210075 - DNA, 20 bp, synthetic construct
  source 1..20: mol_type = other DNA
aacacacctgcggttggcct

SEQ ID NO: 210076 - DNA, 20 bp, synthetic construct
  source 1..20: mol_type = other DNA
gaacacacctgcggttggcc

SEQ ID NO: 210077 - DNA, 20 bp, synthetic construct
  source 1..20: mol_type = other DNA
ggaacacacctgcggttggc

SEQ ID NO: 210078 - DNA, 20 bp, synthetic construct
  source 1..20: mol_type = other DNA
aggaacacacctgcggttgg

SEQ ID NO: 210079 - DNA, 20 bp, synthetic construct
  source 1..20: mol_type = other DNA
caggaacacacctgcggttg

SEQ ID NO: 210080 - DNA, 20 bp, synthetic construct
  source 1..20: mol_type = other DNA
tcaggaacacacctgcggtt

SEQ ID NO: 210081 - DNA, 20 bp, synthetic construct
  source 1..20: mol_type = other DNA
ttcaggaacacacctgcggt

SEQ ID NO: 210082 - DNA, 20 bp, synthetic construct
  source 1..20: mol_type = other DNA
gttcaggaacacacctgcgg

SEQ ID NO: 210083 - DNA, 20 bp, synthetic construct
  source 1..20: mol_type = other DNA
tgttcaggaacacacctgcg

SEQ ID NO: 210084 - DNA, 20 bp, synthetic construct
  source 1..20: mol_type = other DNA
gtgttcaggaacacacctgc

SEQ ID NO: 210085 - DNA, 20 bp, synthetic construct
  source 1..20: mol_type = other DNA
ggtgttcaggaacacacctg

SEQ ID NO: 210086 - DNA, 20 bp, synthetic construct
  source 1..20: mol_type = other DNA
gggtgttcaggaacacacct

SEQ ID NO: 210087 - DNA, 20 bp, synthetic construct
  source 1..20: mol_type = other DNA
tgggtgttcaggaacacacc

SEQ ID NO: 210088 - DNA, 20 bp, synthetic construct
  source 1..20: mol_type = other DNA
ctgggtgttcaggaacacac

SEQ ID NO: 210089 - DNA, 20 bp, synthetic construct
  source 1..20: mol_type = other DNA
cctgggtgttcaggaacaca

SEQ ID NO: 210090 - DNA, 20 bp, synthetic construct
  source 1..20: mol_type = other DNA
tcctgggtgttcaggaacac

SEQ ID NO: 210091 - DNA, 20 bp, synthetic construct
  source 1..20: mol_type = other DNA
ctcctgggtgttcaggaaca

SEQ ID NO: 210092 - DNA, 20 bp, synthetic construct
  source 1..20: mol_type = other DNA
cctcctgggtgttcaggaac

SEQ ID NO: 210093 - DNA, 20 bp, synthetic construct
  source 1..20: mol_type = other DNA
gcctcctgggtgttcaggaa

SEQ ID NO: 210094 - DNA, 20 bp, synthetic construct
  source 1..20: mol_type = other DNA
agcctcctgggtgttcagga

SEQ ID NO: 210095 - DNA, 20 bp, synthetic construct
  source 1..20: mol_type = other DNA
tagcctcctgggtgttcagg

SEQ ID NO: 210096 - DNA, 20 bp, synthetic construct
  source 1..20: mol_type = other DNA
atagcctcctgggtgttcag

SEQ ID NO: 210097 - DNA, 20 bp, synthetic construct
  source 1..20: mol_type = other DNA
catagcctcctgggtgttca

SEQ ID NO: 210098 - DNA, 20 bp, synthetic construct
  source 1..20: mol_type = other DNA
tcatagcctcctgggtgttc

SEQ ID NO: 210099 - DNA, 20 bp, synthetic construct
  source 1..20: mol_type = other DNA
ctcatagcctcctgggtgtt

SEQ ID NO: 210100 - DNA, 20 bp, synthetic construct
  source 1..20: mol_type = other DNA
tctcatagcctcctgggtgt

SEQ ID NO: 210101 - DNA, 20 bp, synthetic construct
  source 1..20: mol_type = other DNA
ctctcatagcctcctgggtg

SEQ ID NO: 210102 - DNA, 20 bp, synthetic construct
  source 1..20: mol_type = other DNA
gctctcatagcctcctgggt

SEQ ID NO: 210103 - DNA, 20 bp, synthetic construct
  source 1..20: mol_type = other DNA
ggctctcatagcctcctggg

SEQ ID NO: 210104 - DNA, 20 bp, synthetic construct
  source 1..20: mol_type = other DNA
tggctctcatagcctcctgg

SEQ ID NO: 210105 - DNA, 20 bp, synthetic construct
  source 1..20: mol_type = other DNA
gtggctctcatagcctcctg

SEQ ID NO: 210106 - DNA, 20 bp, synthetic construct
  source 1..20: mol_type = other DNA
tgtggctctcatagcctcct

SEQ ID NO: 210107 - DNA, 20 bp, synthetic construct
  source 1..20: mol_type = other DNA
atgtggctctcatagcctcc

SEQ ID NO: 210108 - DNA, 20 bp, synthetic construct
  source 1..20: mol_type = other DNA
tatgtggctctcatagcctc

SEQ ID NO: 210109 - DNA, 20 bp, synthetic construct
  source 1..20: mol_type = other DNA
atatgtggctctcatagcct

SEQ ID NO: 210110 - DNA, 20 bp, synthetic construct
  source 1..20: mol_type = other DNA
catatgtggctctcatagcc

SEQ ID NO: 210111 - DNA, 20 bp, synthetic construct
  source 1..20: mol_type = other DNA
gcatatgtggctctcatagc

SEQ ID NO: 210112 - DNA, 20 bp, synthetic construct
  source 1..20: mol_type = other DNA
ggcatatgtggctctcatag

SEQ ID NO: 210113 - DNA, 20 bp, synthetic construct
  source 1..20: mol_type = other DNA
aggcatatgtggctctcata

SEQ ID NO: 210114 - DNA, 20 bp, synthetic construct
  source 1..20: mol_type = other DNA
gaggcatatgtggctctcat

SEQ ID NO: 210115 - DNA, 20 bp, synthetic construct
  source 1..20: mol_type = other DNA
ggaggcatatgtggctctca

SEQ ID NO: 210116 - DNA, 20 bp, synthetic construct
  source 1..20: mol_type = other DNA
gggaggcatatgtggctctc

SEQ ID NO: 210117 - DNA, 20 bp, synthetic construct
  source 1..20: mol_type = other DNA
tgggaggcatatgtggctct

SEQ ID NO: 210118 - DNA, 20 bp, synthetic construct
  source 1..20: mol_type = other DNA
ttgggaggcatatgtggctc

SEQ ID NO: 210119 - DNA, 20 bp, synthetic construct
  source 1..20: mol_type = other DNA
tttgggaggcatatgtggct

SEQ ID NO: 210120 - DNA, 20 bp, synthetic construct
  source 1..20: mol_type = other DNA
atttgggaggcatatgtggc

SEQ ID NO: 210121 - DNA, 20 bp, synthetic construct
  source 1..20: mol_type = other DNA
tatttgggaggcatatgtgg

SEQ ID NO: 210122 - DNA, 20 bp, synthetic construct
  source 1..20: mol_type = other DNA
gtatttgggaggcatatgtg

SEQ ID NO: 210123 - DNA, 20 bp, synthetic construct
  source 1..20: mol_type = other DNA
tgtatttgggaggcatatgt

SEQ ID NO: 210124 - DNA, 20 bp, synthetic construct
  source 1..20: mol_type = other DNA
gtgtatttgggaggcatatg

SEQ ID NO: 210125 - DNA, 20 bp, synthetic construct
  source 1..20: mol_type = other DNA
tgtgtatttgggaggcatat

SEQ ID NO: 210126 - DNA, 20 bp, synthetic construct
  source 1..20: mol_type = other DNA
gtgtgtatttgggaggcata

SEQ ID NO: 210127 - DNA, 20 bp, synthetic construct
  source 1..20: mol_type = other DNA
tgtgtgtatttgggaggcat

SEQ ID NO: 210128 - DNA, 20 bp, synthetic construct
  source 1..20: mol_type = other DNA
ctgtgtgtatttgggaggca

SEQ ID NO: 210129 - DNA, 20 bp, synthetic construct
  source 1..20: mol_type = other DNA
actgtgtgtatttgggaggc

SEQ ID NO: 210130 - DNA, 20 bp, synthetic construct
  source 1..20: mol_type = other DNA
cactgtgtgtatttgggagg

SEQ ID NO: 210131 - DNA, 20 bp, synthetic construct
  source 1..20: mol_type = other DNA
acactgtgtgtatttgggag

SEQ ID NO: 210132 - DNA, 20 bp, synthetic construct
  source 1..20: mol_type = other DNA
cacactgtgtgtatttggga

SEQ ID NO: 210133 - DNA, 20 bp, synthetic construct
  source 1..20: mol_type = other DNA
gcacactgtgtgtatttggg

SEQ ID NO: 210134 - DNA, 20 bp, synthetic construct
  source 1..20: mol_type = other DNA
tgcacactgtgtgtatttgg

SEQ ID NO: 210135 - DNA, 20 bp, synthetic construct
  source 1..20: mol_type = other DNA
atgcacactgtgtgtatttg

SEQ ID NO: 210136 - DNA, 20 bp, synthetic construct
  source 1..20: mol_type = other DNA
catgcacactgtgtgtattt

SEQ ID NO: 210137 - DNA, 20 bp, synthetic construct
  source 1..20: mol_type = other DNA
gcatgcacactgtgtgtatt

SEQ ID NO: 210138 - DNA, 20 bp, synthetic construct
  source 1..20: mol_type = other DNA
ggcatgcacactgtgtgtat

SEQ ID NO: 210139 - DNA, 20 bp, synthetic construct
  source 1..20: mol_type = other DNA
gggcatgcacactgtgtgta

SEQ ID NO: 210140 - DNA, 20 bp, synthetic construct
  source 1..20: mol_type = other DNA
tgggcatgcacactgtgtgt

SEQ ID NO: 210141 - DNA, 20 bp, synthetic construct
  source 1..20: mol_type = other DNA
ctgggcatgcacactgtgtg

SEQ ID NO: 210142 - DNA, 20 bp, synthetic construct
  source 1..20: mol_type = other DNA
cctgggcatgcacactgtgt

SEQ ID NO: 210143 - DNA, 20 bp, synthetic construct
  source 1..20: mol_type = other DNA
ccctgggcatgcacactgtg

SEQ ID NO: 210144 - DNA, 20 bp, synthetic construct
  source 1..20: mol_type = other DNA
tccctgggcatgcacactgt

SEQ ID NO: 210145 - DNA, 20 bp, synthetic construct
  source 1..20: mol_type = other DNA
gtccctgggcatgcacactg

SEQ ID NO: 210146 - DNA, 20 bp, synthetic construct
  source 1..20: mol_type = other DNA
tgtccctgggcatgcacact

SEQ ID NO: 210147 - DNA, 20 bp, synthetic construct
  source 1..20: mol_type = other DNA
atgtccctgggcatgcacac

SEQ ID NO: 210148 - DNA, 20 bp, synthetic construct
  source 1..20: mol_type = other DNA
tatgtccctgggcatgcaca

SEQ ID NO: 210149 - DNA, 20 bp, synthetic construct
  source 1..20: mol_type = other DNA
ctatgtccctgggcatgcac

SEQ ID NO: 210150 - DNA, 20 bp, synthetic construct
  source 1..20: mol_type = other DNA
tctatgtccctgggcatgca

SEQ ID NO: 210151 - DNA, 20 bp, synthetic construct
  source 1..20: mol_type = other DNA
ctctatgtccctgggcatgc

SEQ ID NO: 210152 - DNA, 20 bp, synthetic construct
  source 1..20: mol_type = other DNA
gctctatgtccctgggcatg

SEQ ID NO: 210153 - DNA, 20 bp, synthetic construct
  source 1..20: mol_type = other DNA
tgctctatgtccctgggcat

SEQ ID NO: 210154 - DNA, 20 bp, synthetic construct
  source 1..20: mol_type = other DNA
ctgctctatgtccctgggca

SEQ ID NO: 210155 - DNA, 20 bp, synthetic construct
  source 1..20: mol_type = other DNA
actgctctatgtccctgggc

SEQ ID NO: 210156 - DNA, 20 bp, synthetic construct
  source 1..20: mol_type = other DNA
cactgctctatgtccctggg

SEQ ID NO: 210157 - DNA, 20 bp, synthetic construct
  source 1..20: mol_type = other DNA
acactgctctatgtccctgg

SEQ ID NO: 210158 - DNA, 20 bp, synthetic construct
  source 1..20: mol_type = other DNA
cacactgctctatgtccctg

SEQ ID NO: 210159 - DNA, 20 bp, synthetic construct
  source 1..20: mol_type = other DNA
gcacactgctctatgtccct

SEQ ID NO: 210160 - DNA, 20 bp, synthetic construct
  source 1..20: mol_type = other DNA
tgcacactgctctatgtccc

SEQ ID NO: 210161 - DNA, 20 bp, synthetic construct
  source 1..20: mol_type = other DNA
ttgcacactgctctatgtcc

SEQ ID NO: 210162 - DNA, 20 bp, synthetic construct
  source 1..20: mol_type = other DNA
tttgcacactgctctatgtc

SEQ ID NO: 210163 - DNA, 20 bp, synthetic construct
  source 1..20: mol_type = other DNA
ctttgcacactgctctatgt

SEQ ID NO: 210164 - DNA, 20 bp, synthetic construct
  source 1..20: mol_type = other DNA
actttgcacactgctctatg

SEQ ID NO: 210165 - DNA, 20 bp, synthetic construct
  source 1..20: mol_type = other DNA
gactttgcacactgctctat

SEQ ID NO: 210166 - DNA, 20 bp, synthetic construct
  source 1..20: mol_type = other DNA
ggactttgcacactgctcta

SEQ ID NO: 210167 - DNA, 20 bp, synthetic construct
  source 1..20: mol_type = other DNA
gggactttgcacactgctct

SEQ ID NO: 210168 - DNA, 20 bp, synthetic construct
  source 1..20: mol_type = other DNA
tgggactttgcacactgctc

SEQ ID NO: 210169 - DNA, 20 bp, synthetic construct
  source 1..20: mol_type = other DNA
atgggactttgcacactgct

SEQ ID NO: 210170 - DNA, 20 bp, synthetic construct
  source 1..20: mol_type = other DNA
aatgggactttgcacactgc

SEQ ID NO: 210171 - DNA, 20 bp, synthetic construct
  source 1..20: mol_type = other DNA
gaatgggactttgcacactg

SEQ ID NO: 210172 - DNA, 20 bp, synthetic construct
  source 1..20: mol_type = other DNA
ggaatgggactttgcacact

SEQ ID NO: 210173 - DNA, 20 bp, synthetic construct
  source 1..20: mol_type = other DNA
tggaatgggactttgcacac

SEQ ID NO: 210174 - DNA, 20 bp, synthetic construct
  source 1..20: mol_type = other DNA
atggaatgggactttgcaca

SEQ ID NO: 210175 - DNA, 20 bp, synthetic construct
  source 1..20: mol_type = other DNA
gatggaatgggactttgcac

SEQ ID NO: 210176 - DNA, 20 bp, synthetic construct
  source 1..20: mol_type = other DNA
agatggaatgggactttgca

SEQ ID NO: 210177 - DNA, 20 bp, synthetic construct
  source 1..20: mol_type = other DNA
gagatggaatgggactttgc

SEQ ID NO: 210178 - DNA, 20 bp, synthetic construct
  source 1..20: mol_type = other DNA
agagatggaatgggactttg

SEQ ID NO: 210179 - DNA, 20 bp, synthetic construct
  source 1..20: mol_type = other DNA
gagagatggaatgggacttt

SEQ ID NO: 210180 - DNA, 20 bp, synthetic construct
  source 1..20: mol_type = other DNA
agagagatggaatgggactt

SEQ ID NO: 210181 - DNA, 20 bp, synthetic construct
  source 1..20: mol_type = other DNA
gagagagatggaatgggact

SEQ ID NO: 210182 - DNA, 20 bp, synthetic construct
  source 1..20: mol_type = other DNA
ggagagagatggaatgggac

SEQ ID NO: 210183 - DNA, 20 bp, synthetic construct
  source 1..20: mol_type = other DNA
tggagagagatggaatggga

SEQ ID NO: 210184 - DNA, 20 bp, synthetic construct
  source 1..20: mol_type = other DNA
gtggagagagatggaatggg

SEQ ID NO: 210185 - DNA, 20 bp, synthetic construct
  source 1..20: mol_type = other DNA
ggtggagagagatggaatgg

SEQ ID NO: 210186 - DNA, 20 bp, synthetic construct
  source 1..20: mol_type = other DNA
aggtggagagagatggaatg

SEQ ID NO: 210187 - DNA, 20 bp, synthetic construct
  source 1..20: mol_type = other DNA
caggtggagagagatggaat

SEQ ID NO: 210188 - DNA, 20 bp, synthetic construct
  source 1..20: mol_type = other DNA
ccaggtggagagagatggaa

SEQ ID NO: 210189 - DNA, 20 bp, synthetic construct
  source 1..20: mol_type = other DNA
cccaggtggagagagatgga

SEQ ID NO: 210190 - DNA, 20 bp, synthetic construct
  source 1..20: mol_type = other DNA
tcccaggtggagagagatgg

SEQ ID NO: 210191 - DNA, 20 bp, synthetic construct
  source 1..20: mol_type = other DNA
ctcccaggtggagagagatg

SEQ ID NO: 210192 - DNA, 20 bp, synthetic construct
  source 1..20: mol_type = other DNA
tctcccaggtggagagagat

SEQ ID NO: 210193 - DNA, 20 bp, synthetic construct
  source 1..20: mol_type = other DNA
ctctcccaggtggagagaga

SEQ ID NO: 210194 - DNA, 20 bp, synthetic construct
  source 1..20: mol_type = other DNA
cctctcccaggtggagagag

SEQ ID NO: 210195 - DNA, 20 bp, synthetic construct
  source 1..20: mol_type = other DNA
tcctctcccaggtggagaga

SEQ ID NO: 210196 - DNA, 20 bp, synthetic construct
  source 1..20: mol_type = other DNA
atcctctcccaggtggagag

SEQ ID NO: 210197 - DNA, 20 bp, synthetic construct
  source 1..20: mol_type = other DNA
catcctctcccaggtggaga

SEQ ID NO: 210198 - DNA, 20 bp, synthetic construct
  source 1..20: mol_type = other DNA
ccatcctctcccaggtggag

SEQ ID NO: 210199 - DNA, 20 bp, synthetic construct
  source 1..20: mol_type = other DNA
gccatcctctcccaggtgga

SEQ ID NO: 210200 - DNA, 20 bp, synthetic construct
  source 1..20: mol_type = other DNA
agccatcctctcccaggtgg

SEQ ID NO: 210201 - DNA, 20 bp, synthetic construct
  source 1..20: mol_type = other DNA
gagccatcctctcccaggtg

SEQ ID NO: 210202 - DNA, 20 bp, synthetic construct
  source 1..20: mol_type = other DNA
agagccatcctctcccaggt

SEQ ID NO: 210203 - DNA, 20 bp, synthetic construct
  source 1..20: mol_type = other DNA
aagagccatcctctcccagg

SEQ ID NO: 210204 - DNA, 20 bp, synthetic construct
  source 1..20: mol_type = other DNA
gaagagccatcctctcccag

SEQ ID NO: 210205 - DNA, 20 bp, synthetic construct
  source 1..20: mol_type = other DNA
agaagagccatcctctccca

SEQ ID NO: 210206 - DNA, 20 bp, synthetic construct
  source 1..20: mol_type = other DNA
cagaagagccatcctctccc

SEQ ID NO: 210207 - DNA, 20 bp, synthetic construct
  source 1..20: mol_type = other DNA
acagaagagccatcctctcc

SEQ ID NO: 210208 - DNA, 20 bp, synthetic construct
  source 1..20: mol_type = other DNA
gacagaagagccatcctctc

SEQ ID NO: 210209 - DNA, 20 bp, synthetic construct
  source 1..20: mol_type = other DNA
agacagaagagccatcctct

SEQ ID NO: 210210 - DNA, 20 bp, synthetic construct
  source 1..20: mol_type = other DNA
cagacagaagagccatcctc

SEQ ID NO: 210211 - DNA, 20 bp, synthetic construct
  source 1..20: mol_type = other DNA
tcagacagaagagccatcct

SEQ ID NO: 210212 - DNA, 20 bp, synthetic construct
  source 1..20: mol_type = other DNA
atcagacagaagagccatcc

SEQ ID NO: 210213 - DNA, 20 bp, synthetic construct
  source 1..20: mol_type = other DNA
aatcagacagaagagccatc

SEQ ID NO: 210214 - DNA, 20 bp, synthetic construct
  source 1..20: mol_type = other DNA
gaatcagacagaagagccat

SEQ ID NO: 210215 - DNA, 20 bp, synthetic construct
  source 1..20: mol_type = other DNA
tgaatcagacagaagagcca

SEQ ID NO: 210216 - DNA, 20 bp, synthetic construct
  source 1..20: mol_type = other DNA
atgaatcagacagaagagcc

SEQ ID NO: 210217 - DNA, 20 bp, synthetic construct
  source 1..20: mol_type = other DNA
catgaatcagacagaagagc

SEQ ID NO: 210218 - DNA, 20 bp, synthetic construct
  source 1..20: mol_type = other DNA
ccatgaatcagacagaagag

SEQ ID NO: 210219 - DNA, 20 bp, synthetic construct
  source 1..20: mol_type = other DNA
gccatgaatcagacagaaga

SEQ ID NO: 210220 - DNA, 20 bp, synthetic construct
  source 1..20: mol_type = other DNA
agccatgaatcagacagaag

SEQ ID NO: 210221 - DNA, 20 bp, synthetic construct
  source 1..20: mol_type = other DNA
gagccatgaatcagacagaa

SEQ ID NO: 210222 - DNA, 20 bp, synthetic construct
  source 1..20: mol_type = other DNA
tgagccatgaatcagacaga

SEQ ID NO: 210223 - DNA, 20 bp, synthetic construct
  source 1..20: mol_type = other DNA
ttgagccatgaatcagacag

SEQ ID NO: 210224 - DNA, 20 bp, synthetic construct
  source 1..20: mol_type = other DNA
tttgagccatgaatcagaca

SEQ ID NO: 210225 - DNA, 20 bp, synthetic construct
  source 1..20: mol_type = other DNA
ctttgagccatgaatcagac

SEQ ID NO: 210226 - DNA, 20 bp, synthetic construct
  source 1..20: mol_type = other DNA
actttgagccatgaatcaga

SEQ ID NO: 210227 - DNA, 20 bp, synthetic construct
  source 1..20: mol_type = other DNA
cactttgagccatgaatcag

SEQ ID NO: 210228 - DNA, 20 bp, synthetic construct
  source 1..20: mol_type = other DNA
ccactttgagccatgaatca

SEQ ID NO: 210229 - DNA, 20 bp, synthetic construct
  source 1..20: mol_type = other DNA
accactttgagccatgaatc

SEQ ID NO: 210230 - DNA, 20 bp, synthetic construct
  source 1..20: mol_type = other DNA
taccactttgagccatgaat

SEQ ID NO: 210231 - DNA, 20 bp, synthetic construct
  source 1..20: mol_type = other DNA
ttaccactttgagccatgaa

SEQ ID NO: 210232 - DNA, 20 bp, synthetic construct
  source 1..20: mol_type = other DNA
tttaccactttgagccatga

SEQ ID NO: 210233 - DNA, 20 bp, synthetic construct
  source 1..20: mol_type = other DNA
ctttaccactttgagccatg

SEQ ID NO: 210234 - DNA, 20 bp, synthetic construct
  source 1..20: mol_type = other DNA
cctttaccactttgagccat

SEQ ID NO: 210235 - DNA, 20 bp, synthetic construct
  source 1..20: mol_type = other DNA
tcctttaccactttgagcca

SEQ ID NO: 210236 - DNA, 20 bp, synthetic construct
  source 1..20: mol_type = other DNA
ctcctttaccactttgagcc

SEQ ID NO: 210237 - DNA, 20 bp, synthetic construct
  source 1..20: mol_type = other DNA
gctcctttaccactttgagc

SEQ ID NO: 210238 - DNA, 20 bp, synthetic construct
  source 1..20: mol_type = other DNA
agctcctttaccactttgag

SEQ ID NO: 210239 - DNA, 20 bp, synthetic construct
  source 1..20: mol_type = other DNA
gagctcctttaccactttga

SEQ ID NO: 210240 - DNA, 20 bp, synthetic construct
  source 1..20: mol_type = other DNA
ggagctcctttaccactttg

SEQ ID NO: 210241 - DNA, 20 bp, synthetic construct
  source 1..20: mol_type = other DNA
gggagctcctttaccacttt

SEQ ID NO: 210242 - DNA, 20 bp, synthetic construct
  source 1..20: mol_type = other DNA
ggggagctcctttaccactt

SEQ ID NO: 210243 - DNA, 20 bp, synthetic construct
  source 1..20: mol_type = other DNA
tggggagctcctttaccact

SEQ ID NO: 210244 - DNA, 20 bp, synthetic construct
  source 1..20: mol_type = other DNA
gtggggagctcctttaccac

SEQ ID NO: 210245 - DNA, 20 bp, synthetic construct
  source 1..20: mol_type = other DNA
agtggggagctcctttacca

SEQ ID NO: 210246 - DNA, 20 bp, synthetic construct
  source 1..20: mol_type = other DNA
gagtggggagctcctttacc

SEQ ID NO: 210247 - DNA, 20 bp, synthetic construct
  source 1..20: mol_type = other DNA
ggagtggggagctcctttac

SEQ ID NO: 210248 - DNA, 20 bp, synthetic construct
  source 1..20: mol_type = other DNA
gggagtggggagctccttta

SEQ ID NO: 210249 - DNA, 20 bp, synthetic construct
  source 1..20: mol_type = other DNA
ggggagtggggagctccttt

SEQ ID NO: 210250 - DNA, 20 bp, synthetic construct
  source 1..20: mol_type = other DNA
cggggagtggggagctcctt

SEQ ID NO: 210251 - DNA, 20 bp, synthetic construct
  source 1..20: mol_type = other DNA
acggggagtggggagctcct

SEQ ID NO: 210252 - DNA, 20 bp, synthetic construct
  source 1..20: mol_type = other DNA
gacggggagtggggagctcc

SEQ ID NO: 210253 - DNA, 20 bp, synthetic construct
  source 1..20: mol_type = other DNA
ggacggggagtggggagctc

SEQ ID NO: 210254 - DNA, 20 bp, synthetic construct
  source 1..20: mol_type = other DNA
gggacggggagtggggagct

SEQ ID NO: 210255 - DNA, 20 bp, synthetic construct
  source 1..20: mol_type = other DNA
tgggacggggagtggggagc

SEQ ID NO: 210256 - DNA, 20 bp, synthetic construct
  source 1..20: mol_type = other DNA
gtgggacggggagtggggag

SEQ ID NO: 210257 - DNA, 20 bp, synthetic construct
  source 1..20: mol_type = other DNA
cgtgggacggggagtgggga

SEQ ID NO: 210258 - DNA, 20 bp, synthetic construct
  source 1..20: mol_type = other DNA
gcgtgggacggggagtgggg

SEQ ID NO: 210259 - DNA, 20 bp, synthetic construct
  source 1..20: mol_type = other DNA
ggcgtgggacggggagtggg

SEQ ID NO: 210260 - DNA, 20 bp, synthetic construct
  source 1..20: mol_type = other DNA
aggcgtgggacggggagtgg

SEQ ID NO: 210261 - DNA, 20 bp, synthetic construct
  source 1..20: mol_type = other DNA
taggcgtgggacggggagtg

SEQ ID NO: 210262 - DNA, 20 bp, synthetic construct
  source 1..20: mol_type = other DNA
gtaggcgtgggacggggagt

SEQ ID NO: 210263 - DNA, 20 bp, synthetic construct
  source 1..20: mol_type = other DNA
agtaggcgtgggacggggag

SEQ ID NO: 210264 - DNA, 20 bp, synthetic construct
  source 1..20: mol_type = other DNA
gagtaggcgtgggacgggga

SEQ ID NO: 210265 - DNA, 20 bp, synthetic construct
  source 1..20: mol_type = other DNA
tgagtaggcgtgggacgggg

SEQ ID NO: 210266 - DNA, 20 bp, synthetic construct
  source 1..20: mol_type = other DNA
ctgagtaggcgtgggacggg

SEQ ID NO: 210267 - DNA, 20 bp, synthetic construct
  source 1..20: mol_type = other DNA
tctgagtaggcgtgggacgg

SEQ ID NO: 210268 - DNA, 20 bp, synthetic construct
  source 1..20: mol_type = other DNA
ctctgagtaggcgtgggacg

SEQ ID NO: 210269 - DNA, 20 bp, synthetic construct
  source 1..20: mol_type = other DNA
actctgagtaggcgtgggac

SEQ ID NO: 210270 - DNA, 20 bp, synthetic construct
  source 1..20: mol_type = other DNA
gactctgagtaggcgtggga

SEQ ID NO: 210271 - DNA, 20 bp, synthetic construct
  source 1..20: mol_type = other DNA
agactctgagtaggcgtggg

SEQ ID NO: 210272 - DNA, 20 bp, synthetic construct
  source 1..20: mol_type = other DNA
cagactctgagtaggcgtgg

SEQ ID NO: 210273 - DNA, 20 bp, synthetic construct
  source 1..20: mol_type = other DNA
gcagactctgagtaggcgtg

SEQ ID NO: 210274 - DNA, 20 bp, synthetic construct
  source 1..20: mol_type = other DNA
tgcagactctgagtaggcgt

SEQ ID NO: 210275 - DNA, 20 bp, synthetic construct
  source 1..20: mol_type = other DNA
ttgcagactctgagtaggcg

SEQ ID NO: 210276 - DNA, 20 bp, synthetic construct
  source 1..20: mol_type = other DNA
tttgcagactctgagtaggc

SEQ ID NO: 210277 - DNA, 20 bp, synthetic construct
  source 1..20: mol_type = other DNA
atttgcagactctgagtagg

SEQ ID NO: 210278 - DNA, 20 bp, synthetic construct
  source 1..20: mol_type = other DNA
tatttgcagactctgagtag

SEQ ID NO: 210279 - DNA, 20 bp, synthetic construct
  source 1..20: mol_type = other DNA
atatttgcagactctgagta

SEQ ID NO: 210280 - DNA, 20 bp, synthetic construct
  source 1..20: mol_type = other DNA
catatttgcagactctgagt

SEQ ID NO: 210281 - DNA, 20 bp, synthetic construct
  source 1..20: mol_type = other DNA
acatatttgcagactctgag

SEQ ID NO: 210282 - DNA, 20 bp, synthetic construct
  source 1..20: mol_type = other DNA
tacatatttgcagactctga

SEQ ID NO: 210283 - DNA, 20 bp, synthetic construct
  source 1..20: mol_type = other DNA
atacatatttgcagactctg

SEQ ID NO: 210284 - DNA, 20 bp, synthetic construct
  source 1..20: mol_type = other DNA
catacatatttgcagactct

SEQ ID NO: 210285 - DNA, 20 bp, synthetic construct
  source 1..20: mol_type = other DNA
gcatacatatttgcagactc

SEQ ID NO: 210286 - DNA, 20 bp, synthetic construct
  source 1..20: mol_type = other DNA
cgcatacatatttgcagact

SEQ ID NO: 210287 - DNA, 20 bp, synthetic construct
  source 1..20: mol_type = other DNA
tcgcatacatatttgcagac

SEQ ID NO: 210288 - DNA, 20 bp, synthetic construct
  source 1..20: mol_type = other DNA
atcgcatacatatttgcaga

SEQ ID NO: 210289 - DNA, 20 bp, synthetic construct
  source 1..20: mol_type = other DNA
tatcgcatacatatttgcag

SEQ ID NO: 210290 - DNA, 20 bp, synthetic construct
  source 1..20: mol_type = other DNA
atatcgcatacatatttgca

SEQ ID NO: 210291 - DNA, 20 bp, synthetic construct
  source 1..20: mol_type = other DNA
catatcgcatacatatttgc

SEQ ID NO: 210292 - DNA, 20 bp, synthetic construct
  source 1..20: mol_type = other DNA
tcatatcgcatacatatttg

SEQ ID NO: 210293 - DNA, 20 bp, synthetic construct
  source 1..20: mol_type = other DNA
ctcatatcgcatacatattt

SEQ ID NO: 210294 - DNA, 20 bp, synthetic construct
  source 1..20: mol_type = other DNA
tctcatatcgcatacatatt

SEQ ID NO: 210295 - DNA, 20 bp, synthetic construct
  source 1..20: mol_type = other DNA
ctctcatatcgcatacatat

SEQ ID NO: 210296 - DNA, 20 bp, synthetic construct
  source 1..20: mol_type = other DNA
gctctcatatcgcatacata

SEQ ID NO: 210297 - DNA, 20 bp, synthetic construct
  source 1..20: mol_type = other DNA
agctctcatatcgcatacat

SEQ ID NO: 210298 - DNA, 20 bp, synthetic construct
  source 1..20: mol_type = other DNA
gagctctcatatcgcataca

SEQ ID NO: 210299 - DNA, 20 bp, synthetic construct
  source 1..20: mol_type = other DNA
cgagctctcatatcgcatac

SEQ ID NO: 210300 - DNA, 20 bp, synthetic construct
  source 1..20: mol_type = other DNA
acgagctctcatatcgcata

SEQ ID NO: 210301 - DNA, 20 bp, synthetic construct
  source 1..20: mol_type = other DNA
gacgagctctcatatcgcat

SEQ ID NO: 210302 - DNA, 20 bp, synthetic construct
  source 1..20: mol_type = other DNA
tgacgagctctcatatcgca

SEQ ID NO: 210303 - DNA, 20 bp, synthetic construct
  source 1..20: mol_type = other DNA
ctgacgagctctcatatcgc

SEQ ID NO: 210304 - DNA, 20 bp, synthetic construct
  source 1..20: mol_type = other DNA
actgacgagctctcatatcg

SEQ ID NO: 210305 - DNA, 20 bp, synthetic construct
  source 1..20: mol_type = other DNA
aactgacgagctctcatatc

SEQ ID NO: 210306 - DNA, 20 bp, synthetic construct
  source 1..20: mol_type = other DNA
taactgacgagctctcatat

SEQ ID NO: 210307 - DNA, 20 bp, synthetic construct
  source 1..20: mol_type = other DNA
ctaactgacgagctctcata

SEQ ID NO: 210308 - DNA, 20 bp, synthetic construct
  source 1..20: mol_type = other DNA
gctaactgacgagctctcat

SEQ ID NO: 210309 - DNA, 20 bp, synthetic construct
  source 1..20: mol_type = other DNA
agctaactgacgagctctca

SEQ ID NO: 210310 - DNA, 20 bp, synthetic construct
  source 1..20: mol_type = other DNA
cagctaactgacgagctctc

SEQ ID NO: 210311 - DNA, 20 bp, synthetic construct
  source 1..20: mol_type = other DNA
acagctaactgacgagctct

SEQ ID NO: 210312 - DNA, 20 bp, synthetic construct
  source 1..20: mol_type = other DNA
gacagctaactgacgagctc

SEQ ID NO: 210313 - DNA, 20 bp, synthetic construct
  source 1..20: mol_type = other DNA
agacagctaactgacgagct

SEQ ID NO: 210314 - DNA, 20 bp, synthetic construct
  source 1..20: mol_type = other DNA
aagacagctaactgacgagc

SEQ ID NO: 210315 - DNA, 20 bp, synthetic construct
  source 1..20: mol_type = other DNA
gaagacagctaactgacgag

SEQ ID NO: 210316 - DNA, 20 bp, synthetic construct
  source 1..20: mol_type = other DNA
tgaagacagctaactgacga

SEQ ID NO: 210317 - DNA, 20 bp, synthetic construct
  source 1..20: mol_type = other DNA
ctgaagacagctaactgacg

SEQ ID NO: 210318 - DNA, 20 bp, synthetic construct
  source 1..20: mol_type = other DNA
actgaagacagctaactgac

SEQ ID NO: 210319 - DNA, 20 bp, synthetic construct
  source 1..20: mol_type = other DNA
cactgaagacagctaactga

SEQ ID NO: 210320 - DNA, 20 bp, synthetic construct
  source 1..20: mol_type = other DNA
acactgaagacagctaactg

SEQ ID NO: 210321 - DNA, 20 bp, synthetic construct
  source 1..20: mol_type = other DNA
cacactgaagacagctaact

SEQ ID NO: 210322 - DNA, 20 bp, synthetic construct
  source 1..20: mol_type = other DNA
ccacactgaagacagctaac

SEQ ID NO: 210323 - DNA, 20 bp, synthetic construct
  source 1..20: mol_type = other DNA
gccacactgaagacagctaa

SEQ ID NO: 210324 - DNA, 20 bp, synthetic construct
  source 1..20: mol_type = other DNA
cgccacactgaagacagcta

SEQ ID NO: 210325 - DNA, 20 bp, synthetic construct
  source 1..20: mol_type = other DNA
gcgccacactgaagacagct

SEQ ID NO: 210326 - DNA, 20 bp, synthetic construct
  source 1..20: mol_type = other DNA
tgcgccacactgaagacagc

SEQ ID NO: 210327 - DNA, 20 bp, synthetic construct
  source 1..20: mol_type = other DNA
gtgcgccacactgaagacag

SEQ ID NO: 210328 - DNA, 20 bp, synthetic construct
  source 1..20: mol_type = other DNA
tgtgcgccacactgaagaca

SEQ ID NO: 210329 - DNA, 20 bp, synthetic construct
  source 1..20: mol_type = other DNA
atgtgcgccacactgaagac

SEQ ID NO: 210330 - DNA, 20 bp, synthetic construct
  source 1..20: mol_type = other DNA
aatgtgcgccacactgaaga

SEQ ID NO: 210331 - DNA, 20 bp, synthetic construct
  source 1..20: mol_type = other DNA
aaatgtgcgccacactgaag

SEQ ID NO: 210332 - DNA, 20 bp, synthetic construct
  source 1..20: mol_type = other DNA
caaatgtgcgccacactgaa

SEQ ID NO: 210333 - DNA, 20 bp, synthetic construct
  source 1..20: mol_type = other DNA
tcaaatgtgcgccacactga

SEQ ID NO: 210334 - DNA, 20 bp, synthetic construct
  source 1..20: mol_type = other DNA
ctcaaatgtgcgccacactg

SEQ ID NO: 210335 - DNA, 20 bp, synthetic construct
  source 1..20: mol_type = other DNA
cctcaaatgtgcgccacact

SEQ ID NO: 210336 - DNA, 20 bp, synthetic construct
  source 1..20: mol_type = other DNA
tcctcaaatgtgcgccacac

SEQ ID NO: 210337 - DNA, 20 bp, synthetic construct
  source 1..20: mol_type = other DNA
ctcctcaaatgtgcgccaca

SEQ ID NO: 210338 - DNA, 20 bp, synthetic construct
  source 1..20: mol_type = other DNA
actcctcaaatgtgcgccac

SEQ ID NO: 210339 - DNA, 20 bp, synthetic construct
  source 1..20: mol_type = other DNA
gactcctcaaatgtgcgcca

SEQ ID NO: 210340 - DNA, 20 bp, synthetic construct
  source 1..20: mol_type = other DNA
agactcctcaaatgtgcgcc

SEQ ID NO: 210341 - DNA, 20 bp, synthetic construct
  source 1..20: mol_type = other DNA
cagactcctcaaatgtgcgc

SEQ ID NO: 210342 - DNA, 20 bp, synthetic construct
  source 1..20: mol_type = other DNA
tcagactcctcaaatgtgcg

SEQ ID NO: 210343 - DNA, 20 bp, synthetic construct
  source 1..20: mol_type = other DNA
gtcagactcctcaaatgtgc

SEQ ID NO: 210344 - DNA, 20 bp, synthetic construct
  source 1..20: mol_type = other DNA
agtcagactcctcaaatgtg

SEQ ID NO: 210345 - DNA, 20 bp, synthetic construct
  source 1..20: mol_type = other DNA
gagtcagactcctcaaatgt

SEQ ID NO: 210346 - DNA, 20 bp, synthetic construct
  source 1..20: mol_type = other DNA
ggagtcagactcctcaaatg

SEQ ID NO: 210347 - DNA, 20 bp, synthetic construct
  source 1..20: mol_type = other DNA
gggagtcagactcctcaaat

SEQ ID NO: 210348 - DNA, 20 bp, synthetic construct
  source 1..20: mol_type = other DNA
ggggagtcagactcctcaaa

SEQ ID NO: 210349 - DNA, 20 bp, synthetic construct
  source 1..20: mol_type = other DNA
aggggagtcagactcctcaa

SEQ ID NO: 210350 - DNA, 20 bp, synthetic construct
  source 1..20: mol_type = other DNA
gaggggagtcagactcctca

SEQ ID NO: 210351 - DNA, 20 bp, synthetic construct
  source 1..20: mol_type = other DNA
ggaggggagtcagactcctc

SEQ ID NO: 210352 - DNA, 20 bp, synthetic construct
  source 1..20: mol_type = other DNA
tggaggggagtcagactcct

SEQ ID NO: 210353 - DNA, 20 bp, synthetic construct
  source 1..20: mol_type = other DNA
ctggaggggagtcagactcc

SEQ ID NO: 210354 - DNA, 20 bp, synthetic construct
  source 1..20: mol_type = other DNA
gctggaggggagtcagactc

SEQ ID NO: 210355 - DNA, 20 bp, synthetic construct
  source 1..20: mol_type = other DNA
tgctggaggggagtcagact

SEQ ID NO: 210356 - DNA, 20 bp, synthetic construct
  source 1..20: mol_type = other DNA
gtgctggaggggagtcagac

SEQ ID NO: 210357 - DNA, 20 bp, synthetic construct
  source 1..20: mol_type = other DNA
tgtgctggaggggagtcaga

SEQ ID NO: 210358 - DNA, 20 bp, synthetic construct
  source 1..20: mol_type = other DNA
ctgtgctggaggggagtcag

SEQ ID NO: 210359 - DNA, 20 bp, synthetic construct
  source 1..20: mol_type = other DNA
cctgtgctggaggggagtca

SEQ ID NO: 210360 - DNA, 20 bp, synthetic construct
  source 1..20: mol_type = other DNA
gcctgtgctggaggggagtc

SEQ ID NO: 210361 - DNA, 20 bp, synthetic construct
  source 1..20: mol_type = other DNA
ggcctgtgctggaggggagt

SEQ ID NO: 210362 - DNA, 20 bp, synthetic construct
  source 1..20: mol_type = other DNA
tggcctgtgctggaggggag

SEQ ID NO: 210363 - DNA, 20 bp, synthetic construct
  source 1..20: mol_type = other DNA
ttggcctgtgctggagggga

SEQ ID NO: 210364 - DNA, 20 bp, synthetic construct
  source 1..20: mol_type = other DNA
attggcctgtgctggagggg

SEQ ID NO: 210365 - DNA, 20 bp, synthetic construct
  source 1..20: mol_type = other DNA
cattggcctgtgctggaggg

SEQ ID NO: 210366 - DNA, 20 bp, synthetic construct
  source 1..20: mol_type = other DNA
acattggcctgtgctggagg

SEQ ID NO: 210367 - DNA, 20 bp, synthetic construct
  source 1..20: mol_type = other DNA
cacattggcctgtgctggag

SEQ ID NO: 210368 - DNA, 20 bp, synthetic construct
  source 1..20: mol_type = other DNA
gcacattggcctgtgctgga

SEQ ID NO: 210369 - DNA, 20 bp, synthetic construct
  source 1..20: mol_type = other DNA
tgcacattggcctgtgctgg

SEQ ID NO: 210370 - DNA, 20 bp, synthetic construct
  source 1..20: mol_type = other DNA
gtgcacattggcctgtgctg

SEQ ID NO: 210371 - DNA, 20 bp, synthetic construct
  source 1..20: mol_type = other DNA
agtgcacattggcctgtgct

SEQ ID NO: 210372 - DNA, 20 bp, synthetic construct
  source 1..20: mol_type = other DNA
cagtgcacattggcctgtgc

SEQ ID NO: 210373 - DNA, 20 bp, synthetic construct
  source 1..20: mol_type = other DNA
gcagtgcacattggcctgtg

SEQ ID NO: 210374 - DNA, 20 bp, synthetic construct
  source 1..20: mol_type = other DNA
agcagtgcacattggcctgt

SEQ ID NO: 210375 - DNA, 20 bp, synthetic construct
  source 1..20: mol_type = other DNA
gagcagtgcacattggcctg

SEQ ID NO: 210376 - DNA, 20 bp, synthetic construct
  source 1..20: mol_type = other DNA
agagcagtgcacattggcct

SEQ ID NO: 210377 - DNA, 20 bp, synthetic construct
  source 1..20: mol_type = other DNA
gagagcagtgcacattggcc

SEQ ID NO: 210378 - DNA, 20 bp, synthetic construct
  source 1..20: mol_type = other DNA
ggagagcagtgcacattggc

SEQ ID NO: 210379 - DNA, 20 bp, synthetic construct
  source 1..20: mol_type = other DNA
aggagagcagtgcacattgg

SEQ ID NO: 210380 - DNA, 20 bp, synthetic construct
  source 1..20: mol_type = other DNA
taggagagcagtgcacattg

SEQ ID NO: 210381 - DNA, 20 bp, synthetic construct
  source 1..20: mol_type = other DNA
ataggagagcagtgcacatt

SEQ ID NO: 210382 - DNA, 20 bp, synthetic construct
  source 1..20: mol_type = other DNA
gataggagagcagtgcacat

SEQ ID NO: 210383 - DNA, 20 bp, synthetic construct
  source 1..20: mol_type = other DNA
agataggagagcagtgcaca

SEQ ID NO: 210384 - DNA, 20 bp, synthetic construct
  source 1..20: mol_type = other DNA
aagataggagagcagtgcac

SEQ ID NO: 210385 - DNA, 20 bp, synthetic construct
  source 1..20: mol_type = other DNA
aaagataggagagcagtgca

SEQ ID NO: 210386 - DNA, 20 bp, synthetic construct
  source 1..20: mol_type = other DNA
caaagataggagagcagtgc

SEQ ID NO: 210387 - DNA, 20 bp, synthetic construct
  source 1..20: mol_type = other DNA
acaaagataggagagcagtg

SEQ ID NO: 210388 - DNA, 20 bp, synthetic construct
  source 1..20: mol_type = other DNA
tacaaagataggagagcagt

SEQ ID NO: 210389 - DNA, 20 bp, synthetic construct
  source 1..20: mol_type = other DNA
gtacaaagataggagagcag

SEQ ID NO: 210390 - DNA, 20 bp, synthetic construct
  source 1..20: mol_type = other DNA
ggtacaaagataggagagca

SEQ ID NO: 210391 - DNA, 20 bp, synthetic construct
  source 1..20: mol_type = other DNA
gggtacaaagataggagagc

SEQ ID NO: 210392 - DNA, 20 bp, synthetic construct
  source 1..20: mol_type = other DNA
ggggtacaaagataggagag

SEQ ID NO: 210393 - DNA, 20 bp, synthetic construct
  source 1..20: mol_type = other DNA
gggggtacaaagataggaga

SEQ ID NO: 210394 - DNA, 20 bp, synthetic construct
  source 1..20: mol_type = other DNA
tgggggtacaaagataggag

SEQ ID NO: 210395 - DNA, 20 bp, synthetic construct
  source 1..20: mol_type = other DNA
gtgggggtacaaagatagga

SEQ ID NO: 210396 - DNA, 20 bp, synthetic construct
  source 1..20: mol_type = other DNA
agtgggggtacaaagatagg

SEQ ID NO: 210397 - DNA, 20 bp, synthetic construct
  source 1..20: mol_type = other DNA
cagtgggggtacaaagatag

SEQ ID NO: 210398 - DNA, 20 bp, synthetic construct
  source 1..20: mol_type = other DNA
acagtgggggtacaaagata

SEQ ID NO: 210399 - DNA, 20 bp, synthetic construct
  source 1..20: mol_type = other DNA
aacagtgggggtacaaagat

SEQ ID NO: 210400 - DNA, 20 bp, synthetic construct
  source 1..20: mol_type = other DNA
caacagtgggggtacaaaga

SEQ ID NO: 210401 - DNA, 20 bp, synthetic construct
  source 1..20: mol_type = other DNA
gcaacagtgggggtacaaag

SEQ ID NO: 210402 - DNA, 20 bp, synthetic construct
  source 1..20: mol_type = other DNA
tgcaacagtgggggtacaaa

SEQ ID NO: 210403 - DNA, 20 bp, synthetic construct
  source 1..20: mol_type = other DNA
gtgcaacagtgggggtacaa

SEQ ID NO: 210404 - DNA, 20 bp, synthetic construct
  source 1..20: mol_type = other DNA
agtgcaacagtgggggtaca

SEQ ID NO: 210405 - DNA, 20 bp, synthetic construct
  source 1..20: mol_type = other DNA
cagtgcaacagtgggggtac

SEQ ID NO: 210406 - DNA, 20 bp, synthetic construct
  source 1..20: mol_type = other DNA
acagtgcaacagtgggggta

SEQ ID NO: 210407 - DNA, 20 bp, synthetic construct
  source 1..20: mol_type = other DNA
cacagtgcaacagtgggggt

SEQ ID NO: 210408 - DNA, 20 bp, synthetic construct
  source 1..20: mol_type = other DNA
gcacagtgcaacagtggggg

SEQ ID NO: 210409 - DNA, 20 bp, synthetic construct
  source 1..20: mol_type = other DNA
tgcacagtgcaacagtgggg

SEQ ID NO: 210410 - DNA, 20 bp, synthetic construct
  source 1..20: mol_type = other DNA
ctgcacagtgcaacagtggg

SEQ ID NO: 210411 - DNA, 20 bp, synthetic construct
  source 1..20: mol_type = other DNA
tctgcacagtgcaacagtgg

SEQ ID NO: 210412 - DNA, 20 bp, synthetic construct
  source 1..20: mol_type = other DNA
ctctgcacagtgcaacagtg

SEQ ID NO: 210413 - DNA, 20 bp, synthetic construct
  source 1..20: mol_type = other DNA
cctctgcacagtgcaacagt

SEQ ID NO: 210414 - DNA, 20 bp, synthetic construct
  source 1..20: mol_type = other DNA
acctctgcacagtgcaacag

SEQ ID NO: 210415 - DNA, 20 bp, synthetic construct
  source 1..20: mol_type = other DNA
aacctctgcacagtgcaaca

SEQ ID NO: 210416 - DNA, 20 bp, synthetic construct
  source 1..20: mol_type = other DNA
caacctctgcacagtgcaac

SEQ ID NO: 210417 - DNA, 20 bp, synthetic construct
  source 1..20: mol_type = other DNA
ccaacctctgcacagtgcaa

SEQ ID NO: 210418 - DNA, 20 bp, synthetic construct
  source 1..20: mol_type = other DNA
tccaacctctgcacagtgca

SEQ ID NO: 210419 - DNA, 20 bp, synthetic construct
  source 1..20: mol_type = other DNA
ctccaacctctgcacagtgc

SEQ ID NO: 210420 - DNA, 20 bp, synthetic construct
  source 1..20: mol_type = other DNA
gctccaacctctgcacagtg

SEQ ID NO: 210421 - DNA, 20 bp, synthetic construct
  source 1..20: mol_type = other DNA
ggctccaacctctgcacagt

SEQ ID NO: 210422 - DNA, 20 bp, synthetic construct
  source 1..20: mol_type = other DNA
tggctccaacctctgcacag

SEQ ID NO: 210423 - DNA, 20 bp, synthetic construct
  source 1..20: mol_type = other DNA
atggctccaacctctgcaca

SEQ ID NO: 210424 - DNA, 20 bp, synthetic construct
  source 1..20: mol_type = other DNA
tatggctccaacctctgcac

SEQ ID NO: 210425 - DNA, 20 bp, synthetic construct
  source 1..20: mol_type = other DNA
ctatggctccaacctctgca

SEQ ID NO: 210426 - DNA, 20 bp, synthetic construct
  source 1..20: mol_type = other DNA
tctatggctccaacctctgc

SEQ ID NO: 210427 - DNA, 20 bp, synthetic construct
  source 1..20: mol_type = other DNA
ttctatggctccaacctctg

SEQ ID NO: 210428 - DNA, 20 bp, synthetic construct
  source 1..20: mol_type = other DNA
cttctatggctccaacctct

SEQ ID NO: 210429 - DNA, 20 bp, synthetic construct
  source 1..20: mol_type = other DNA
acttctatggctccaacctc

SEQ ID NO: 210430 - DNA, 20 bp, synthetic construct
  source 1..20: mol_type = other DNA
tacttctatggctccaacct

SEQ ID NO: 210431 - DNA, 20 bp, synthetic construct
  source 1..20: mol_type = other DNA
gtacttctatggctccaacc

SEQ ID NO: 210432 - DNA, 20 bp, synthetic construct
  source 1..20: mol_type = other DNA
ggtacttctatggctccaac

SEQ ID NO: 210433 - DNA, 20 bp, synthetic construct
  source 1..20: mol_type = other DNA
tggtacttctatggctccaa

SEQ ID NO: 210434 - DNA, 20 bp, synthetic construct
  source 1..20: mol_type = other DNA
ctggtacttctatggctcca

SEQ ID NO: 210435 - DNA, 20 bp, synthetic construct
  source 1..20: mol_type = other DNA
tctggtacttctatggctcc

SEQ ID NO: 210436 - DNA, 20 bp, synthetic construct
  source 1..20: mol_type = other DNA
ctctggtacttctatggctc

SEQ ID NO: 210437 - DNA, 20 bp, synthetic construct
  source 1..20: mol_type = other DNA
gctctggtacttctatggct

SEQ ID NO: 210438 - DNA, 20 bp, synthetic construct
  source 1..20: mol_type = other DNA
agctctggtacttctatggc

SEQ ID NO: 210439 - DNA, 20 bp, synthetic construct
  source 1..20: mol_type = other DNA
cagctctggtacttctatgg

SEQ ID NO: 210440 - DNA, 20 bp, synthetic construct
  source 1..20: mol_type = other DNA
acagctctggtacttctatg

SEQ ID NO: 210441 - DNA, 20 bp, synthetic construct
  source 1..20: mol_type = other DNA
cacagctctggtacttctat

SEQ ID NO: 210442 - DNA, 20 bp, synthetic construct
  source 1..20: mol_type = other DNA
tcacagctctggtacttcta

SEQ ID NO: 210443 - DNA, 20 bp, synthetic construct
  source 1..20: mol_type = other DNA
ttcacagctctggtacttct

SEQ ID NO: 210444 - DNA, 20 bp, synthetic construct
  source 1..20: mol_type = other DNA
tttcacagctctggtacttc

SEQ ID NO: 210445 - DNA, 20 bp, synthetic construct
  source 1..20: mol_type = other DNA
ctttcacagctctggtactt

SEQ ID NO: 210446 - DNA, 20 bp, synthetic construct
  source 1..20: mol_type = other DNA
cctttcacagctctggtact

SEQ ID NO: 210447 - DNA, 20 bp, synthetic construct
  source 1..20: mol_type = other DNA
tcctttcacagctctggtac

SEQ ID NO: 210448 - DNA, 20 bp, synthetic construct
  source 1..20: mol_type = other DNA
ctcctttcacagctctggta

SEQ ID NO: 210449 - DNA, 20 bp, synthetic construct
  source 1..20: mol_type = other DNA
tctcctttcacagctctggt

SEQ ID NO: 210450 - DNA, 20 bp, synthetic construct
  source 1..20: mol_type = other DNA
ctctcctttcacagctctgg

SEQ ID NO: 210451 - DNA, 20 bp, synthetic construct
  source 1..20: mol_type = other DNA
cctctcctttcacagctctg

SEQ ID NO: 210452 - DNA, 20 bp, synthetic construct
  source 1..20: mol_type = other DNA
gcctctcctttcacagctct

SEQ ID NO: 210453 - DNA, 20 bp, synthetic construct
  source 1..20: mol_type = other DNA
ggcctctcctttcacagctc

SEQ ID NO: 210454 - DNA, 20 bp, synthetic construct
  source 1..20: mol_type = other DNA
gggcctctcctttcacagct

SEQ ID NO: 210455 - DNA, 20 bp, synthetic construct
  source 1..20: mol_type = other DNA
ggggcctctcctttcacagc

SEQ ID NO: 210456 - DNA, 20 bp, synthetic construct
  source 1..20: mol_type = other DNA
gggggcctctcctttcacag

SEQ ID NO: 210457 - DNA, 20 bp, synthetic construct
  source 1..20: mol_type = other DNA
agggggcctctcctttcaca

SEQ ID NO: 210458 - DNA, 20 bp, synthetic construct
  source 1..20: mol_type = other DNA
gagggggcctctcctttcac

SEQ ID NO: 210459 - DNA, 20 bp, synthetic construct
  source 1..20: mol_type = other DNA
agagggggcctctcctttca

SEQ ID NO: 210460 - DNA, 20 bp, synthetic construct
  source 1..20: mol_type = other DNA
gagagggggcctctcctttc

SEQ ID NO: 210461 - DNA, 20 bp, synthetic construct
  source 1..20: mol_type = other DNA
tgagagggggcctctccttt

SEQ ID NO: 210462 - DNA, 20 bp, synthetic construct
  source 1..20: mol_type = other DNA
gtgagagggggcctctcctt

SEQ ID NO: 210463 - DNA, 20 bp, synthetic construct
  source 1..20: mol_type = other DNA
ggtgagagggggcctctcct

SEQ ID NO: 210464 - DNA, 20 bp, synthetic construct
  source 1..20: mol_type = other DNA
aggtgagagggggcctctcc

SEQ ID NO: 210465 - DNA, 20 bp, synthetic construct
  source 1..20: mol_type = other DNA
gaggtgagagggggcctctc

SEQ ID NO: 210466 - DNA, 20 bp, synthetic construct
  source 1..20: mol_type = other DNA
agaggtgagagggggcctct

SEQ ID NO: 210467 - DNA, 20 bp, synthetic construct
  source 1..20: mol_type = other DNA
cagaggtgagagggggcctc

SEQ ID NO: 210468 - DNA, 20 bp, synthetic construct
  source 1..20: mol_type = other DNA
gcagaggtgagagggggcct

SEQ ID NO: 210469 - DNA, 20 bp, synthetic construct
  source 1..20: mol_type = other DNA
ggcagaggtgagagggggcc

SEQ ID NO: 210470 - DNA, 20 bp, synthetic construct
  source 1..20: mol_type = other DNA
gggcagaggtgagagggggc

SEQ ID NO: 210471 - DNA, 20 bp, synthetic construct
  source 1..20: mol_type = other DNA
agggcagaggtgagaggggg

SEQ ID NO: 210472 - DNA, 20 bp, synthetic construct
  source 1..20: mol_type = other DNA
cagggcagaggtgagagggg

SEQ ID NO: 210473 - DNA, 20 bp, synthetic construct
  source 1..20: mol_type = other DNA
ccagggcagaggtgagaggg

SEQ ID NO: 210474 - DNA, 20 bp, synthetic construct
  source 1..20: mol_type = other DNA
accagggcagaggtgagagg

SEQ ID NO: 210475 - DNA, 20 bp, synthetic construct
  source 1..20: mol_type = other DNA
gaccagggcagaggtgagag

SEQ ID NO: 210476 - DNA, 20 bp, synthetic construct
  source 1..20: mol_type = other DNA
agaccagggcagaggtgaga

SEQ ID NO: 210477 - DNA, 20 bp, synthetic construct
  source 1..20: mol_type = other DNA
gagaccagggcagaggtgag

SEQ ID NO: 210478 - DNA, 20 bp, synthetic construct
  source 1..20: mol_type = other DNA
ggagaccagggcagaggtga

SEQ ID NO: 210479 - DNA, 20 bp, synthetic construct
  source 1..20: mol_type = other DNA
tggagaccagggcagaggtg

SEQ ID NO: 210480 - DNA, 20 bp, synthetic construct
  source 1..20: mol_type = other DNA
atggagaccagggcagaggt

SEQ ID NO: 210481 - DNA, 20 bp, synthetic construct
  source 1..20: mol_type = other DNA
gatggagaccagggcagagg

SEQ ID NO: 210482 - DNA, 20 bp, synthetic construct
  source 1..20: mol_type = other DNA
ggatggagaccagggcagag

SEQ ID NO: 210483 - DNA, 20 bp, synthetic construct
  source 1..20: mol_type = other DNA
gggatggagaccagggcaga

SEQ ID NO: 210484 - DNA, 20 bp, synthetic construct
  source 1..20: mol_type = other DNA
ggggatggagaccagggcag

SEQ ID NO: 210485 - DNA, 20 bp, synthetic construct
  source 1..20: mol_type = other DNA
tggggatggagaccagggca

SEQ ID NO: 210486 - DNA, 20 bp, synthetic construct
  source 1..20: mol_type = other DNA
gtggggatggagaccagggc

SEQ ID NO: 210487 - DNA, 20 bp, synthetic construct
  source 1..20: mol_type = other DNA
agtggggatggagaccaggg

SEQ ID NO: 210488 - DNA, 20 bp, synthetic construct
  source 1..20: mol_type = other DNA
aagtggggatggagaccagg

SEQ ID NO: 210489 - DNA, 20 bp, synthetic construct
  source 1..20: mol_type = other DNA
aaagtggggatggagaccag

SEQ ID NO: 210490 - DNA, 20 bp, synthetic construct
  source 1..20: mol_type = other DNA
gaaagtggggatggagacca

SEQ ID NO: 210491 - DNA, 20 bp, synthetic construct
  source 1..20: mol_type = other DNA
agaaagtggggatggagacc

SEQ ID NO: 210492 - DNA, 20 bp, synthetic construct
  source 1..20: mol_type = other DNA
gagaaagtggggatggagac

SEQ ID NO: 210493 - DNA, 20 bp, synthetic construct
  source 1..20: mol_type = other DNA
agagaaagtggggatggaga

SEQ ID NO: 210494 - DNA, 20 bp, synthetic construct
  source 1..20: mol_type = other DNA
tagagaaagtggggatggag

SEQ ID NO: 210495 - DNA, 20 bp, synthetic construct
  source 1..20: mol_type = other DNA
ctagagaaagtggggatgga

SEQ ID NO: 210496 - DNA, 20 bp, synthetic construct
  source 1..20: mol_type = other DNA
cctagagaaagtggggatgg

SEQ ID NO: 210497 - DNA, 20 bp, synthetic construct
  source 1..20: mol_type = other DNA
tcctagagaaagtggggatg

SEQ ID NO: 210498 - DNA, 20 bp, synthetic construct
  source 1..20: mol_type = other DNA
ttcctagagaaagtggggat

SEQ ID NO: 210499 - DNA, 20 bp, synthetic construct
  source 1..20: mol_type = other DNA
cttcctagagaaagtgggga

SEQ ID NO: 210500 - DNA, 20 bp, synthetic construct
  source 1..20: mol_type = other DNA
gcttcctagagaaagtgggg

SEQ ID NO: 210501 - DNA, 20 bp, synthetic construct
  source 1..20: mol_type = other DNA
agcttcctagagaaagtggg

SEQ ID NO: 210502 - DNA, 20 bp, synthetic construct
  source 1..20: mol_type = other DNA
tagcttcctagagaaagtgg

SEQ ID NO: 210503 - DNA, 20 bp, synthetic construct
  source 1..20: mol_type = other DNA
ctagcttcctagagaaagtg

SEQ ID NO: 210504 - DNA, 20 bp, synthetic construct
  source 1..20: mol_type = other DNA
actagcttcctagagaaagt

SEQ ID NO: 210505 - DNA, 20 bp, synthetic construct
  source 1..20: mol_type = other DNA
tactagcttcctagagaaag

SEQ ID NO: 210506 - DNA, 20 bp, synthetic construct
  source 1..20: mol_type = other DNA
ctactagcttcctagagaaa

SEQ ID NO: 210507 - DNA, 20 bp, synthetic construct
  source 1..20: mol_type = other DNA
cctactagcttcctagagaa

SEQ ID NO: 210508 - DNA, 20 bp, synthetic construct
  source 1..20: mol_type = other DNA
acctactagcttcctagaga

SEQ ID NO: 210509 - DNA, 20 bp, synthetic construct
  source 1..20: mol_type = other DNA
cacctactagcttcctagag

SEQ ID NO: 210510 - DNA, 20 bp, synthetic construct
  source 1..20: mol_type = other DNA
gcacctactagcttcctaga

SEQ ID NO: 210511 - DNA, 20 bp, synthetic construct
  source 1..20: mol_type = other DNA
agcacctactagcttcctag

SEQ ID NO: 210512 - DNA, 20 bp, synthetic construct
  source 1..20: mol_type = other DNA
cagcacctactagcttccta

SEQ ID NO: 210513 - DNA, 20 bp, synthetic construct
  source 1..20: mol_type = other DNA
tcagcacctactagcttcct

SEQ ID NO: 210514 - DNA, 20 bp, synthetic construct
  source 1..20: mol_type = other DNA
gtcagcacctactagcttcc

SEQ ID NO: 210515 - DNA, 20 bp, synthetic construct
  source 1..20: mol_type = other DNA
tgtcagcacctactagcttc

SEQ ID NO: 210516 - DNA, 20 bp, synthetic construct
  source 1..20: mol_type = other DNA
ctgtcagcacctactagctt

SEQ ID NO: 210517 - DNA, 20 bp, synthetic construct
  source 1..20: mol_type = other DNA
cctgtcagcacctactagct

SEQ ID NO: 210518 - DNA, 20 bp, synthetic construct
  source 1..20: mol_type = other DNA
ccctgtcagcacctactagc

SEQ ID NO: 210519 - DNA, 20 bp, synthetic construct
  source 1..20: mol_type = other DNA
cccctgtcagcacctactag

SEQ ID NO: 210520 - DNA, 20 bp, synthetic construct
  source 1..20: mol_type = other DNA
tcccctgtcagcacctacta

SEQ ID NO: 210521 - DNA, 20 bp, synthetic construct
  source 1..20: mol_type = other DNA
ctcccctgtcagcacctact

SEQ ID NO: 210522 - DNA, 20 bp, synthetic construct
  source 1..20: mol_type = other DNA
tctcccctgtcagcacctac

SEQ ID NO: 210523 - DNA, 20 bp, synthetic construct
  source 1..20: mol_type = other DNA
ctctcccctgtcagcaccta

SEQ ID NO: 210524 - DNA, 20 bp, synthetic construct
  source 1..20: mol_type = other DNA
tctctcccctgtcagcacct

SEQ ID NO: 210525 - DNA, 20 bp, synthetic construct
  source 1..20: mol_type = other DNA
ttctctcccctgtcagcacc

SEQ ID NO: 210526 - DNA, 20 bp, synthetic construct
  source 1..20: mol_type = other DNA
cttctctcccctgtcagcac

SEQ ID NO: 210527 - DNA, 20 bp, synthetic construct
  source 1..20: mol_type = other DNA
ccttctctcccctgtcagca

SEQ ID NO: 210528 - DNA, 20 bp, synthetic construct
  source 1..20: mol_type = other DNA
cccttctctcccctgtcagc

SEQ ID NO: 210529 - DNA, 20 bp, synthetic construct
  source 1..20: mol_type = other DNA
tcccttctctcccctgtcag

SEQ ID NO: 210530 - DNA, 20 bp, synthetic construct
  source 1..20: mol_type = other DNA
ctcccttctctcccctgtca

SEQ ID NO: 210531 - DNA, 20 bp, synthetic construct
  source 1..20: mol_type = other DNA
cctcccttctctcccctgtc

SEQ ID NO: 210532 - DNA, 20 bp, synthetic construct
  source 1..20: mol_type = other DNA
ccctcccttctctcccctgt

SEQ ID NO: 210533 - DNA, 20 bp, synthetic construct
  source 1..20: mol_type = other DNA
cccctcccttctctcccctg

SEQ ID NO: 210534 - DNA, 20 bp, synthetic construct
  source 1..20: mol_type = other DNA
tcccctcccttctctcccct

SEQ ID NO: 210535 - DNA, 20 bp, synthetic construct
  source 1..20: mol_type = other DNA
ctcccctcccttctctcccc

SEQ ID NO: 210536 - DNA, 20 bp, synthetic construct
  source 1..20: mol_type = other DNA
cctcccctcccttctctccc

SEQ ID NO: 210537 - DNA, 20 bp, synthetic construct
  source 1..20: mol_type = other DNA
ccctcccctcccttctctcc

SEQ ID NO: 210538 - DNA, 20 bp, synthetic construct
  source 1..20: mol_type = other DNA
cccctcccctcccttctctc

SEQ ID NO: 210539 - DNA, 20 bp, synthetic construct
  source 1..20: mol_type = other DNA
acccctcccctcccttctct

SEQ ID NO: 210540 - DNA, 20 bp, synthetic construct
  source 1..20: mol_type = other DNA
gacccctcccctcccttctc

SEQ ID NO: 210541 - DNA, 20 bp, synthetic construct
  source 1..20: mol_type = other DNA
ggacccctcccctcccttct

SEQ ID NO: 210542 - DNA, 20 bp, synthetic construct
  source 1..20: mol_type = other DNA
tggacccctcccctcccttc

SEQ ID NO: 210543 - DNA, 20 bp, synthetic construct
  source 1..20: mol_type = other DNA
ctggacccctcccctccctt

SEQ ID NO: 210544 - DNA, 20 bp, synthetic construct
  source 1..20: mol_type = other DNA
tctggacccctcccctccct

SEQ ID NO: 210545 - DNA, 20 bp, synthetic construct
  source 1..20: mol_type = other DNA
ttctggacccctcccctccc

SEQ ID NO: 210546 - DNA, 20 bp, synthetic construct
  source 1..20: mol_type = other DNA
tttctggacccctcccctcc

SEQ ID NO: 210547 - DNA, 20 bp, synthetic construct
  source 1..20: mol_type = other DNA
gtttctggacccctcccctc

SEQ ID NO: 210548 - DNA, 20 bp, synthetic construct
  source 1..20: mol_type = other DNA
tgtttctggacccctcccct

SEQ ID NO: 210549 - DNA, 20 bp, synthetic construct
  source 1..20: mol_type = other DNA
ctgtttctggacccctcccc

SEQ ID NO: 210550 - DNA, 20 bp, synthetic construct
  source 1..20: mol_type = other DNA
actgtttctggacccctccc

SEQ ID NO: 210551 - DNA, 20 bp, synthetic construct
  source 1..20: mol_type = other DNA
cactgtttctggacccctcc

SEQ ID NO: 210552 - DNA, 20 bp, synthetic construct
  source 1..20: mol_type = other DNA
ccactgtttctggacccctc

SEQ ID NO: 210553 - DNA, 20 bp, synthetic construct
  source 1..20: mol_type = other DNA
gccactgtttctggacccct

SEQ ID NO: 210554 - DNA, 20 bp, synthetic construct
  source 1..20: mol_type = other DNA
agccactgtttctggacccc

SEQ ID NO: 210555 - DNA, 20 bp, synthetic construct
  source 1..20: mol_type = other DNA
gagccactgtttctggaccc

SEQ ID NO: 210556 - DNA, 20 bp, synthetic construct
  source 1..20: mol_type = other DNA
tgagccactgtttctggacc

SEQ ID NO: 210557 - DNA, 20 bp, synthetic construct
  source 1..20: mol_type = other DNA
atgagccactgtttctggac

SEQ ID NO: 210558 - DNA, 20 bp, synthetic construct
  source 1..20: mol_type = other DNA
catgagccactgtttctgga

SEQ ID NO: 210559 - DNA, 20 bp, synthetic construct
  source 1..20: mol_type = other DNA
gcatgagccactgtttctgg

SEQ ID NO: 210560 - DNA, 20 bp, synthetic construct
  source 1..20: mol_type = other DNA
ggcatgagccactgtttctg

SEQ ID NO: 210561 - DNA, 20 bp, synthetic construct
  source 1..20: mol_type = other DNA
aggcatgagccactgtttct

SEQ ID NO: 210562 - DNA, 20 bp, synthetic construct
  source 1..20: mol_type = other DNA
caggcatgagccactgtttc

SEQ ID NO: 210563 - DNA, 20 bp, synthetic construct
  source 1..20: mol_type = other DNA
gcaggcatgagccactgttt

SEQ ID NO: 210564 - DNA, 20 bp, synthetic construct
  source 1..20: mol_type = other DNA
tgcaggcatgagccactgtt

SEQ ID NO: 210565 - DNA, 20 bp, synthetic construct
  source 1..20: mol_type = other DNA
ttgcaggcatgagccactgt

SEQ ID NO: 210566 - DNA, 20 bp, synthetic construct
  source 1..20: mol_type = other DNA
attgcaggcatgagccactg

SEQ ID NO: 210567 - DNA, 20 bp, synthetic construct
  source 1..20: mol_type = other DNA
gattgcaggcatgagccact

SEQ ID NO: 210568 - DNA, 20 bp, synthetic construct
  source 1..20: mol_type = other DNA
ggattgcaggcatgagccac

SEQ ID NO: 210569 - DNA, 20 bp, synthetic construct
  source 1..20: mol_type = other DNA
aggattgcaggcatgagcca

SEQ ID NO: 210570 - DNA, 20 bp, synthetic construct
  source 1..20: mol_type = other DNA
taggattgcaggcatgagcc

SEQ ID NO: 210571 - DNA, 20 bp, synthetic construct
  source 1..20: mol_type = other DNA
ctaggattgcaggcatgagc

SEQ ID NO: 210572 - DNA, 20 bp, synthetic construct
  source 1..20: mol_type = other DNA
gctaggattgcaggcatgag

SEQ ID NO: 210573 - DNA, 20 bp, synthetic construct
  source 1..20: mol_type = other DNA
tgctaggattgcaggcatga

SEQ ID NO: 210574 - DNA, 20 bp, synthetic construct
  source 1..20: mol_type = other DNA
gtgctaggattgcaggcatg

SEQ ID NO: 210575 - DNA, 20 bp, synthetic construct
  source 1..20: mol_type = other DNA
agtgctaggattgcaggcat

SEQ ID NO: 210576 - DNA, 20 bp, synthetic construct
  source 1..20: mol_type = other DNA
aagtgctaggattgcaggca

SEQ ID NO: 210577 - DNA, 20 bp, synthetic construct
  source 1..20: mol_type = other DNA
aaagtgctaggattgcaggc

SEQ ID NO: 210578 - DNA, 20 bp, synthetic construct
  source 1..20: mol_type = other DNA
caaagtgctaggattgcagg

SEQ ID NO: 210579 - DNA, 20 bp, synthetic construct
  source 1..20: mol_type = other DNA
ccaaagtgctaggattgcag

SEQ ID NO: 210580 - DNA, 20 bp, synthetic construct
  source 1..20: mol_type = other DNA
cccaaagtgctaggattgca

SEQ ID NO: 210581 - DNA, 20 bp, synthetic construct
  source 1..20: mol_type = other DNA
tcccaaagtgctaggattgc

SEQ ID NO: 210582 - DNA, 20 bp, synthetic construct
  source 1..20: mol_type = other DNA
ctcccaaagtgctaggattg

SEQ ID NO: 210583 - DNA, 20 bp, synthetic construct
  source 1..20: mol_type = other DNA
cctcccaaagtgctaggatt

SEQ ID NO: 210584 - DNA, 20 bp, synthetic construct
  source 1..20: mol_type = other DNA
gcctcccaaagtgctaggat

SEQ ID NO: 210585 - DNA, 20 bp, synthetic construct
  source 1..20: mol_type = other DNA
agcctcccaaagtgctagga

SEQ ID NO: 210586 - DNA, 20 bp, synthetic construct
  source 1..20: mol_type = other DNA
cagcctcccaaagtgctagg

SEQ ID NO: 210587 - DNA, 20 bp, synthetic construct
  source 1..20: mol_type = other DNA
tcagcctcccaaagtgctag

SEQ ID NO: 210588 - DNA, 20 bp, synthetic construct
  source 1..20: mol_type = other DNA
ctcagcctcccaaagtgcta

SEQ ID NO: 210589 - DNA, 20 bp, synthetic construct
  source 1..20: mol_type = other DNA
cctcagcctcccaaagtgct

SEQ ID NO: 210590 - DNA, 20 bp, synthetic construct
  source 1..20: mol_type = other DNA
gcctcagcctcccaaagtgc

SEQ ID NO: 210591 - DNA, 20 bp, synthetic construct
  source 1..20: mol_type = other DNA
tgcctcagcctcccaaagtg

SEQ ID NO: 210592 - DNA, 20 bp, synthetic construct
  source 1..20: mol_type = other DNA
ctgcctcagcctcccaaagt

SEQ ID NO: 210593 - DNA, 20 bp, synthetic construct
  source 1..20: mol_type = other DNA
cctgcctcagcctcccaaag

SEQ ID NO: 210594 - DNA, 20 bp, synthetic construct
  source 1..20: mol_type = other DNA
tcctgcctcagcctcccaaa

SEQ ID NO: 210595 - DNA, 20 bp, synthetic construct
  source 1..20: mol_type = other DNA
ctcctgcctcagcctcccaa

SEQ ID NO: 210596 - DNA, 20 bp, synthetic construct
  source 1..20: mol_type = other DNA
cctcctgcctcagcctccca

SEQ ID NO: 210597 - DNA, 20 bp, synthetic construct
  source 1..20: mol_type = other DNA
tcctcctgcctcagcctccc

SEQ ID NO: 210598 - DNA, 20 bp, synthetic construct
  source 1..20: mol_type = other DNA
atcctcctgcctcagcctcc

SEQ ID NO: 210599 - DNA, 20 bp, synthetic construct
  source 1..20: mol_type = other DNA
gatcctcctgcctcagcctc

SEQ ID NO: 210600 - DNA, 20 bp, synthetic construct
  source 1..20: mol_type = other DNA
tgatcctcctgcctcagcct

SEQ ID NO: 210601 - DNA, 20 bp, synthetic construct
  source 1..20: mol_type = other DNA
atgatcctcctgcctcagcc

SEQ ID NO: 210602 - DNA, 20 bp, synthetic construct
  source 1..20: mol_type = other DNA
aatgatcctcctgcctcagc

SEQ ID NO: 210603 - DNA, 20 bp, synthetic construct
  source 1..20: mol_type = other DNA
aaatgatcctcctgcctcag

SEQ ID NO: 210604 - DNA, 20 bp, synthetic construct
  source 1..20: mol_type = other DNA
caaatgatcctcctgcctca

SEQ ID NO: 210605 - DNA, 20 bp, synthetic construct
  source 1..20: mol_type = other DNA
tcaaatgatcctcctgcctc

SEQ ID NO: 210606 - DNA, 20 bp, synthetic construct
  source 1..20: mol_type = other DNA
ctcaaatgatcctcctgcct

SEQ ID NO: 210607 - DNA, 20 bp, synthetic construct
  source 1..20: mol_type = other DNA
cctcaaatgatcctcctgcc

SEQ ID NO: 210608 - DNA, 20 bp, synthetic construct
  source 1..20: mol_type = other DNA
acctcaaatgatcctcctgc

SEQ ID NO: 210609 - DNA, 20 bp, synthetic construct
  source 1..20: mol_type = other DNA
gacctcaaatgatcctcctg

SEQ ID NO: 210610 - DNA, 20 bp, synthetic construct
  source 1..20: mol_type = other DNA
tgacctcaaatgatcctcct

SEQ ID NO: 210611 - DNA, 20 bp, synthetic construct
  source 1..20: mol_type = other DNA
ctgacctcaaatgatcctcc

SEQ ID NO: 210612 - DNA, 20 bp, synthetic construct
  source 1..20: mol_type = other DNA
cctgacctcaaatgatcctc

SEQ ID NO: 210613 - DNA, 20 bp, synthetic construct
  source 1..20: mol_type = other DNA
tcctgacctcaaatgatcct

SEQ ID NO: 210614 - DNA, 20 bp, synthetic construct
  source 1..20: mol_type = other DNA
ctcctgacctcaaatgatcc

SEQ ID NO: 210615 - DNA, 20 bp, synthetic construct
  source 1..20: mol_type = other DNA
actcctgacctcaaatgatc

SEQ ID NO: 210616 - DNA, 20 bp, synthetic construct
  source 1..20: mol_type = other DNA
aactcctgacctcaaatgat

SEQ ID NO: 210617 - DNA, 20 bp, synthetic construct
  source 1..20: mol_type = other DNA
aaactcctgacctcaaatga

SEQ ID NO: 210618 - DNA, 20 bp, synthetic construct
  source 1..20: mol_type = other DNA
caaactcctgacctcaaatg

SEQ ID NO: 210619 - DNA, 20 bp, synthetic construct
  source 1..20: mol_type = other DNA
tcaaactcctgacctcaaat

SEQ ID NO: 210620 - DNA, 20 bp, synthetic construct
  source 1..20: mol_type = other DNA
ctcaaactcctgacctcaaa

SEQ ID NO: 210621 - DNA, 20 bp, synthetic construct
  source 1..20: mol_type = other DNA
tctcaaactcctgacctcaa

SEQ ID NO: 210622 - DNA, 20 bp, synthetic construct
  source 1..20: mol_type = other DNA
gtctcaaactcctgacctca

SEQ ID NO: 210623 - DNA, 20 bp, synthetic construct
  source 1..20: mol_type = other DNA
ggtctcaaactcctgacctc

SEQ ID NO: 210624 - DNA, 20 bp, synthetic construct
  source 1..20: mol_type = other DNA
tggtctcaaactcctgacct

SEQ ID NO: 210625 - DNA, 20 bp, synthetic construct
  source 1..20: mol_type = other DNA
ctggtctcaaactcctgacc

SEQ ID NO: 210626 - DNA, 20 bp, synthetic construct
  source 1..20: mol_type = other DNA
gctggtctcaaactcctgac

SEQ ID NO: 210627 - DNA, 20 bp, synthetic construct
  source 1..20: mol_type = other DNA
ggctggtctcaaactcctga

SEQ ID NO: 210628 - DNA, 20 bp, synthetic construct
  source 1..20: mol_type = other DNA
aggctggtctcaaactcctg

SEQ ID NO: 210629 - DNA, 20 bp, synthetic construct
  source 1..20: mol_type = other DNA
caggctggtctcaaactcct

SEQ ID NO: 210630 - DNA, 20 bp, synthetic construct
  source 1..20: mol_type = other DNA
ccaggctggtctcaaactcc

SEQ ID NO: 210631 - DNA, 20 bp, synthetic construct
  source 1..20: mol_type = other DNA
cccaggctggtctcaaactc

SEQ ID NO: 210632 - DNA, 20 bp, synthetic construct
  source 1..20: mol_type = other DNA
gcccaggctggtctcaaact

SEQ ID NO: 210633 - DNA, 20 bp, synthetic construct
  source 1..20: mol_type = other DNA
tgcccaggctggtctcaaac

SEQ ID NO: 210634 - DNA, 20 bp, synthetic construct
  source 1..20: mol_type = other DNA
ttgcccaggctggtctcaaa

SEQ ID NO: 210635 - DNA, 20 bp, synthetic construct
  source 1..20: mol_type = other DNA
attgcccaggctggtctcaa

SEQ ID NO: 210636 - DNA, 20 bp, synthetic construct
  source 1..20: mol_type = other DNA
cattgcccaggctggtctca

SEQ ID NO: 210637 - DNA, 20 bp, synthetic construct
  source 1..20: mol_type = other DNA
acattgcccaggctggtctc

SEQ ID NO: 210638 - DNA, 20 bp, synthetic construct
  source 1..20: mol_type = other DNA
tacattgcccaggctggtct

SEQ ID NO: 210639 - DNA, 20 bp, synthetic construct
  source 1..20: mol_type = other DNA
ctacattgcccaggctggtc

SEQ ID NO: 210640 - DNA, 20 bp, synthetic construct
  source 1..20: mol_type = other DNA
gctacattgcccaggctggt

SEQ ID NO: 210641 - DNA, 20 bp, synthetic construct
  source 1..20: mol_type = other DNA
tgctacattgcccaggctgg

SEQ ID NO: 210642 - DNA, 20 bp, synthetic construct
  source 1..20: mol_type = other DNA
ttgctacattgcccaggctg

SEQ ID NO: 210643 - DNA, 20 bp, synthetic construct
  source 1..20: mol_type = other DNA
cttgctacattgcccaggct

SEQ ID NO: 210644 - DNA, 20 bp, synthetic construct
  source 1..20: mol_type = other DNA
tcttgctacattgcccaggc

SEQ ID NO: 210645 - DNA, 20 bp, synthetic construct
  source 1..20: mol_type = other DNA
gtcttgctacattgcccagg

SEQ ID NO: 210646 - DNA, 20 bp, synthetic construct
  source 1..20: mol_type = other DNA
ggtcttgctacattgcccag

SEQ ID NO: 210647 - DNA, 20 bp, synthetic construct
  source 1..20: mol_type = other DNA
gggtcttgctacattgccca

SEQ ID NO: 210648 - DNA, 20 bp, synthetic construct
  source 1..20: mol_type = other DNA
agggtcttgctacattgccc

SEQ ID NO: 210649 - DNA, 20 bp, synthetic construct
  source 1..20: mol_type = other DNA
tagggtcttgctacattgcc

SEQ ID NO: 210650 - DNA, 20 bp, synthetic construct
  source 1..20: mol_type = other DNA
atagggtcttgctacattgc

SEQ ID NO: 210651 - DNA, 20 bp, synthetic construct
  source 1..20: mol_type = other DNA
gatagggtcttgctacattg

SEQ ID NO: 210652 - DNA, 20 bp, synthetic construct
  source 1..20: mol_type = other DNA
agatagggtcttgctacatt

SEQ ID NO: 210653 - DNA, 20 bp, synthetic construct
  source 1..20: mol_type = other DNA
gagatagggtcttgctacat

SEQ ID NO: 210654 - DNA, 20 bp, synthetic construct
  source 1..20: mol_type = other DNA
agagatagggtcttgctaca

SEQ ID NO: 210655 - DNA, 20 bp, synthetic construct
  source 1..20: mol_type = other DNA
tagagatagggtcttgctac

SEQ ID NO: 210656 - DNA, 20 bp, synthetic construct
  source 1..20: mol_type = other DNA
gtagagatagggtcttgcta

SEQ ID NO: 210657 - DNA, 20 bp, synthetic construct
  source 1..20: mol_type = other DNA
tgtagagatagggtcttgct

SEQ ID NO: 210658 - DNA, 20 bp, synthetic construct
  source 1..20: mol_type = other DNA
ttgtagagatagggtcttgc

SEQ ID NO: 210659 - DNA, 20 bp, synthetic construct
  source 1..20: mol_type = other DNA
tttgtagagatagggtcttg

SEQ ID NO: 210660 - DNA, 20 bp, synthetic construct
  source 1..20: mol_type = other DNA
ttttgtagagatagggtctt

SEQ ID NO: 210661 - DNA, 20 bp, synthetic construct
  source 1..20: mol_type = other DNA
tttttgtagagatagggtct

SEQ ID NO: 210662 - DNA, 20 bp, synthetic construct
  source 1..20: mol_type = other DNA
ctttttgtagagatagggtc

SEQ ID NO: 210663 - DNA, 20 bp, synthetic construct
  source 1..20: mol_type = other DNA
tctttttgtagagatagggt

SEQ ID NO: 210664 - DNA, 20 bp, synthetic construct
  source 1..20: mol_type = other DNA
ttctttttgtagagataggg

SEQ ID NO: 210665 - DNA, 20 bp, synthetic construct
  source 1..20: mol_type = other DNA
tttctttttgtagagatagg

SEQ ID NO: 210666 - DNA, 20 bp, synthetic construct
  source 1..20: mol_type = other DNA
ttttctttttgtagagatag

SEQ ID NO: 210667 - DNA, 20 bp, synthetic construct
  source 1..20: mol_type = other DNA
tttttctttttgtagagata

SEQ ID NO: 210668 - DNA, 20 bp, synthetic construct
  source 1..20: mol_type = other DNA
ttttttctttttgtagagat

SEQ ID NO: 210669 - DNA, 20 bp, synthetic construct
  source 1..20: mol_type = other DNA
attttttctttttgtagaga

SEQ ID NO: 210670 - DNA, 20 bp, synthetic construct
  source 1..20: mol_type = other DNA
cattttttctttttgtagag

SEQ ID NO: 210671 - DNA, 20 bp, synthetic construct
  source 1..20: mol_type = other DNA
acattttttctttttgtaga

SEQ ID NO: 210672 - DNA, 20 bp, synthetic construct
  source 1..20: mol_type = other DNA
tacattttttctttttgtag

SEQ ID NO: 210673 - DNA, 20 bp, synthetic construct
  source 1..20: mol_type = other DNA
ttacattttttctttttgta

SEQ ID NO: 210674 - DNA, 20 bp, synthetic construct
  source 1..20: mol_type = other DNA
attacattttttctttttgt

SEQ ID NO: 210675 - DNA, 20 bp, synthetic construct
  source 1..20: mol_type = other DNA
aattacattttttctttttg

SEQ ID NO: 210676 - DNA, 20 bp, synthetic construct
  source 1..20: mol_type = other DNA
taattacattttttcttttt

SEQ ID NO: 210677 - DNA, 20 bp, synthetic construct
  source 1..20: mol_type = other DNA
ctaattacattttttctttt

SEQ ID NO: 210678 - DNA, 20 bp, synthetic construct
  source 1..20: mol_type = other DNA
gctaattacattttttcttt

SEQ ID NO: 210679 - DNA, 20 bp, synthetic construct
  source 1..20: mol_type = other DNA
agctaattacattttttctt

SEQ ID NO: 210680 - DNA, 20 bp, synthetic construct
  source 1..20: mol_type = other DNA
cagctaattacattttttct

SEQ ID NO: 210681 - DNA, 20 bp, synthetic construct
  source 1..20: mol_type = other DNA
ccagctaattacattttttc

SEQ ID NO: 210682 - DNA, 20 bp, synthetic construct
  source 1..20: mol_type = other DNA
cccagctaattacatttttt

SEQ ID NO: 210683 - DNA, 20 bp, synthetic construct
  source 1..20: mol_type = other DNA
acccagctaattacattttt

SEQ ID NO: 210684 - DNA, 20 bp, synthetic construct
  source 1..20: mol_type = other DNA
cacccagctaattacatttt

SEQ ID NO: 210685 - DNA, 20 bp, synthetic construct
  source 1..20: mol_type = other DNA
acacccagctaattacattt

SEQ ID NO: 210686 - DNA, 20 bp, synthetic construct
  source 1..20: mol_type = other DNA
cacacccagctaattacatt

SEQ ID NO: 210687 - DNA, 20 bp, synthetic construct
  source 1..20: mol_type = other DNA
ccacacccagctaattacat

SEQ ID NO: 210688 - DNA, 20 bp, synthetic construct
  source 1..20: mol_type = other DNA
accacacccagctaattaca

SEQ ID NO: 210689 - DNA, 20 bp, synthetic construct
  source 1..20: mol_type = other DNA
caccacacccagctaattac

SEQ ID NO: 210690 - DNA, 20 bp, synthetic construct
  source 1..20: mol_type = other DNA
ccaccacacccagctaatta

SEQ ID NO: 210691 - DNA, 20 bp, synthetic construct
  source 1..20: mol_type = other DNA
accaccacacccagctaatt

SEQ ID NO: 210692 - DNA, 20 bp, synthetic construct
  source 1..20: mol_type = other DNA
caccaccacacccagctaat

SEQ ID NO: 210693 - DNA, 20 bp, synthetic construct
  source 1..20: mol_type = other DNA
ccaccaccacacccagctaa

SEQ ID NO: 210694 - DNA, 20 bp, synthetic construct
  source 1..20: mol_type = other DNA
cccaccaccacacccagcta

SEQ ID NO: 210695 - DNA, 20 bp, synthetic construct
  source 1..20: mol_type = other DNA
gcccaccaccacacccagct

SEQ ID NO: 210696 - DNA, 20 bp, synthetic construct
  source 1..20: mol_type = other DNA
tgcccaccaccacacccagc

SEQ ID NO: 210697 - DNA, 20 bp, synthetic construct
  source 1..20: mol_type = other DNA
gtgcccaccaccacacccag

SEQ ID NO: 210698 - DNA, 20 bp, synthetic construct
  source 1..20: mol_type = other DNA
ggtgcccaccaccacaccca

SEQ ID NO: 210699 - DNA, 20 bp, synthetic construct
  source 1..20: mol_type = other DNA
aggtgcccaccaccacaccc

SEQ ID NO: 210700 - DNA, 20 bp, synthetic construct
  source 1..20: mol_type = other DNA
caggtgcccaccaccacacc

SEQ ID NO: 210701 - DNA, 20 bp, synthetic construct
  source 1..20: mol_type = other DNA
acaggtgcccaccaccacac

SEQ ID NO: 210702 - DNA, 20 bp, synthetic construct
  source 1..20: mol_type = other DNA
tacaggtgcccaccaccaca

SEQ ID NO: 210703 - DNA, 20 bp, synthetic construct
  source 1..20: mol_type = other DNA
ctacaggtgcccaccaccac

SEQ ID NO: 210704 - DNA, 20 bp, synthetic construct
  source 1..20: mol_type = other DNA
actacaggtgcccaccacca

SEQ ID NO: 210705 - DNA, 20 bp, synthetic construct
  source 1..20: mol_type = other DNA
gactacaggtgcccaccacc

SEQ ID NO: 210706 - DNA, 20 bp, synthetic construct
  source 1..20: mol_type = other DNA
ggactacaggtgcccaccac

SEQ ID NO: 210707 - DNA, 20 bp, synthetic construct
  source 1..20: mol_type = other DNA
aggactacaggtgcccacca

SEQ ID NO: 210708 - DNA, 20 bp, synthetic construct
  source 1..20: mol_type = other DNA
taggactacaggtgcccacc

SEQ ID NO: 210709 - DNA, 20 bp, synthetic construct
  source 1..20: mol_type = other DNA
ctaggactacaggtgcccac

SEQ ID NO: 210710 - DNA, 20 bp, synthetic construct
  source 1..20: mol_type = other DNA
gctaggactacaggtgccca

SEQ ID NO: 210711 - DNA, 20 bp, synthetic construct
  source 1..20: mol_type = other DNA
agctaggactacaggtgccc

SEQ ID NO: 210712 - DNA, 20 bp, synthetic construct
  source 1..20: mol_type = other DNA
tagctaggactacaggtgcc

SEQ ID NO: 210713 - DNA, 20 bp, synthetic construct
  source 1..20: mol_type = other DNA
gtagctaggactacaggtgc

SEQ ID NO: 210714 - DNA, 20 bp, synthetic construct
  source 1..20: mol_type = other DNA
agtagctaggactacaggtg

SEQ ID NO: 210715 - DNA, 20 bp, synthetic construct
  source 1..20: mol_type = other DNA
aagtagctaggactacaggt

SEQ ID NO: 210716 - DNA, 20 bp, synthetic construct
  source 1..20: mol_type = other DNA
caagtagctaggactacagg

SEQ ID NO: 210717 - DNA, 20 bp, synthetic construct
  source 1..20: mol_type = other DNA
ccaagtagctaggactacag

SEQ ID NO: 210718 - DNA, 20 bp, synthetic construct
  source 1..20: mol_type = other DNA
cccaagtagctaggactaca

SEQ ID NO: 210719 - DNA, 20 bp, synthetic construct
  source 1..20: mol_type = other DNA
tcccaagtagctaggactac

SEQ ID NO: 210720 - DNA, 20 bp, synthetic construct
  source 1..20: mol_type = other DNA
ctcccaagtagctaggacta

SEQ ID NO: 210721 - DNA, 20 bp, synthetic construct
  source 1..20: mol_type = other DNA
cctcccaagtagctaggact

SEQ ID NO: 210722 - DNA, 20 bp, synthetic construct
  source 1..20: mol_type = other DNA
tcctcccaagtagctaggac

SEQ ID NO: 210723 - DNA, 20 bp, synthetic construct
  source 1..20: mol_type = other DNA
atcctcccaagtagctagga

SEQ ID NO: 210724 - DNA, 20 bp, synthetic construct
  source 1..20: mol_type = other DNA
catcctcccaagtagctagg

SEQ ID NO: 210725 - DNA, 20 bp, synthetic construct
  source 1..20: mol_type = other DNA
tcatcctcccaagtagctag

SEQ ID NO: 210726 - DNA, 20 bp, synthetic construct
  source 1..20: mol_type = other DNA
ctcatcctcccaagtagcta

SEQ ID NO: 210727 - DNA, 20 bp, synthetic construct
  source 1..20: mol_type = other DNA
cctcatcctcccaagtagct

SEQ ID NO: 210728 - DNA, 20 bp, synthetic construct
  source 1..20: mol_type = other DNA
acctcatcctcccaagtagc

SEQ ID NO: 210729 - DNA, 20 bp, synthetic construct
  source 1..20: mol_type = other DNA
cacctcatcctcccaagtag

SEQ ID NO: 210730 - DNA, 20 bp, synthetic construct
  source 1..20: mol_type = other DNA
ccacctcatcctcccaagta

SEQ ID NO: 210731 - DNA, 20 bp, synthetic construct
  source 1..20: mol_type = other DNA
cccacctcatcctcccaagt

SEQ ID NO: 210732 - DNA, 20 bp, synthetic construct
  source 1..20: mol_type = other DNA
tcccacctcatcctcccaag

SEQ ID NO: 210733 - DNA, 20 bp, synthetic construct
  source 1..20: mol_type = other DNA
ctcccacctcatcctcccaa

SEQ ID NO: 210734 - DNA, 20 bp, synthetic construct
  source 1..20: mol_type = other DNA
cctcccacctcatcctccca

SEQ ID NO: 210735 - DNA, 20 bp, synthetic construct
  source 1..20: mol_type = other DNA
tcctcccacctcatcctccc

SEQ ID NO: 210736 - DNA, 20 bp, synthetic construct
  source 1..20: mol_type = other DNA
atcctcccacctcatcctcc

SEQ ID NO: 210737 - DNA, 20 bp, synthetic construct
  source 1..20: mol_type = other DNA
aatcctcccacctcatcctc

SEQ ID NO: 210738 - DNA, 20 bp, synthetic construct
  source 1..20: mol_type = other DNA
caatcctcccacctcatcct

SEQ ID NO: 210739 - DNA, 20 bp, synthetic construct
  source 1..20: mol_type = other DNA
gcaatcctcccacctcatcc

SEQ ID NO: 210740 - DNA, 20 bp, synthetic construct
  source 1..20: mol_type = other DNA
agcaatcctcccacctcatc

SEQ ID NO: 210741 - DNA, 20 bp, synthetic construct
  source 1..20: mol_type = other DNA
aagcaatcctcccacctcat

SEQ ID NO: 210742 - DNA, 20 bp, synthetic construct
  source 1..20: mol_type = other DNA
caagcaatcctcccacctca

SEQ ID NO: 210743 - DNA, 20 bp, synthetic construct
  source 1..20: mol_type = other DNA
tcaagcaatcctcccacctc

SEQ ID NO: 210744 - DNA, 20 bp, synthetic construct
  source 1..20: mol_type = other DNA
ctcaagcaatcctcccacct

SEQ ID NO: 210745 - DNA, 20 bp, synthetic construct
  source 1..20: mol_type = other DNA
gctcaagcaatcctcccacc

SEQ ID NO: 210746 - DNA, 20 bp, synthetic construct
  source 1..20: mol_type = other DNA
ggctcaagcaatcctcccac

SEQ ID NO: 210747 - DNA, 20 bp, synthetic construct
  source 1..20: mol_type = other DNA
gggctcaagcaatcctccca

SEQ ID NO: 210748 - DNA, 20 bp, synthetic construct
  source 1..20: mol_type = other DNA
tgggctcaagcaatcctccc

SEQ ID NO: 210749 - DNA, 20 bp, synthetic construct
  source 1..20: mol_type = other DNA
ttgggctcaagcaatcctcc

SEQ ID NO: 210750 - DNA, 20 bp, synthetic construct
  source 1..20: mol_type = other DNA
cttgggctcaagcaatcctc

SEQ ID NO: 210751 - DNA, 20 bp, synthetic construct
  source 1..20: mol_type = other DNA
tcttgggctcaagcaatcct

SEQ ID NO: 210752 - DNA, 20 bp, synthetic construct
  source 1..20: mol_type = other DNA
ctcttgggctcaagcaatcc

SEQ ID NO: 210753 - DNA, 20 bp, synthetic construct
  source 1..20: mol_type = other DNA
actcttgggctcaagcaatc

SEQ ID NO: 210754 - DNA, 20 bp, synthetic construct
  source 1..20: mol_type = other DNA
aactcttgggctcaagcaat

SEQ ID NO: 210755 - DNA, 20 bp, synthetic construct
  source 1..20: mol_type = other DNA
aaactcttgggctcaagcaa

SEQ ID NO: 210756 - DNA, 20 bp, synthetic construct
  source 1..20: mol_type = other DNA
caaactcttgggctcaagca

SEQ ID NO: 210757 - DNA, 20 bp, synthetic construct
  source 1..20: mol_type = other DNA
tcaaactcttgggctcaagc

SEQ ID NO: 210758 - DNA, 20 bp, synthetic construct
  source 1..20: mol_type = other DNA
ctcaaactcttgggctcaag

SEQ ID NO: 210759 - DNA, 20 bp, synthetic construct
  source 1..20: mol_type = other DNA
cctcaaactcttgggctcaa

SEQ ID NO: 210760 - DNA, 20 bp, synthetic construct
  source 1..20: mol_type = other DNA
acctcaaactcttgggctca

SEQ ID NO: 210761 - DNA, 20 bp, synthetic construct
  source 1..20: mol_type = other DNA
aacctcaaactcttgggctc

SEQ ID NO: 210762 - DNA, 20 bp, synthetic construct
  source 1..20: mol_type = other DNA
taacctcaaactcttgggct

SEQ ID NO: 210763 - DNA, 20 bp, synthetic construct
  source 1..20: mol_type = other DNA
gtaacctcaaactcttgggc

SEQ ID NO: 210764 - DNA, 20 bp, synthetic construct
  source 1..20: mol_type = other DNA
tgtaacctcaaactcttggg

SEQ ID NO: 210765 - DNA, 20 bp, synthetic construct
  source 1..20: mol_type = other DNA
ctgtaacctcaaactcttgg

SEQ ID NO: 210766 - DNA, 20 bp, synthetic construct
  source 1..20: mol_type = other DNA
actgtaacctcaaactcttg

SEQ ID NO: 210767 - DNA, 20 bp, synthetic construct
  source 1..20: mol_type = other DNA
tactgtaacctcaaactctt

SEQ ID NO: 210768 - DNA, 20 bp, synthetic construct
  source 1..20: mol_type = other DNA
ttactgtaacctcaaactct

SEQ ID NO: 210769 - DNA, 20 bp, synthetic construct
  source 1..20: mol_type = other DNA
cttactgtaacctcaaactc

SEQ ID NO: 210770 - DNA, 20 bp, synthetic construct
  source 1..20: mol_type = other DNA
gcttactgtaacctcaaact

SEQ ID NO: 210771 - DNA, 20 bp, synthetic construct
  source 1..20: mol_type = other DNA
agcttactgtaacctcaaac

SEQ ID NO: 210772 - DNA, 20 bp, synthetic construct
  source 1..20: mol_type = other DNA
cagcttactgtaacctcaaa

SEQ ID NO: 210773 - DNA, 20 bp, synthetic construct
  source 1..20: mol_type = other DNA
acagcttactgtaacctcaa

SEQ ID NO: 210774 - DNA, 20 bp, synthetic construct
  source 1..20: mol_type = other DNA
cacagcttactgtaacctca

SEQ ID NO: 210775 - DNA, 20 bp, synthetic construct
  source 1..20: mol_type = other DNA
tcacagcttactgtaacctc

SEQ ID NO: 210776 - DNA, 20 bp, synthetic construct
  source 1..20: mol_type = other DNA
atcacagcttactgtaacct

SEQ ID NO: 210777 - DNA, 20 bp, synthetic construct
  source 1..20: mol_type = other DNA
aatcacagcttactgtaacc

SEQ ID NO: 210778 - DNA, 20 bp, synthetic construct
  source 1..20: mol_type = other DNA
caatcacagcttactgtaac

SEQ ID NO: 210779 - DNA, 20 bp, synthetic construct
  source 1..20: mol_type = other DNA
gcaatcacagcttactgtaa

SEQ ID NO: 210780 - DNA, 20 bp, synthetic construct
  source 1..20: mol_type = other DNA
tgcaatcacagcttactgta

SEQ ID NO: 210781 - DNA, 20 bp, synthetic construct
  source 1..20: mol_type = other DNA
gtgcaatcacagcttactgt

SEQ ID NO: 210782 - DNA, 20 bp, synthetic construct
  source 1..20: mol_type = other DNA
ggtgcaatcacagcttactg

SEQ ID NO: 210783 - DNA, 20 bp, synthetic construct
  source 1..20: mol_type = other DNA
tggtgcaatcacagcttact

SEQ ID NO: 210784 - DNA, 20 bp, synthetic construct
  source 1..20: mol_type = other DNA
gtggtgcaatcacagcttac

SEQ ID NO: 210785 - DNA, 20 bp, synthetic construct
  source 1..20: mol_type = other DNA
agtggtgcaatcacagctta

SEQ ID NO: 210786 - DNA, 20 bp, synthetic construct
  source 1..20: mol_type = other DNA
cagtggtgcaatcacagctt

SEQ ID NO: 210787 - DNA, 20 bp, synthetic construct
  source 1..20: mol_type = other DNA
gcagtggtgcaatcacagct

SEQ ID NO: 210788 - DNA, 20 bp, synthetic construct
  source 1..20: mol_type = other DNA
tgcagtggtgcaatcacagc

SEQ ID NO: 210789 - DNA, 20 bp, synthetic construct
  source 1..20: mol_type = other DNA
gtgcagtggtgcaatcacag

SEQ ID NO: 210790 - DNA, 20 bp, synthetic construct
  source 1..20: mol_type = other DNA
agtgcagtggtgcaatcaca

SEQ ID NO: 210791 - DNA, 20 bp, synthetic construct
  source 1..20: mol_type = other DNA
gagtgcagtggtgcaatcac

SEQ ID NO: 210792 - DNA, 20 bp, synthetic construct
  source 1..20: mol_type = other DNA
ggagtgcagtggtgcaatca

SEQ ID NO: 210793 - DNA, 20 bp, synthetic construct
  source 1..20: mol_type = other DNA
tggagtgcagtggtgcaatc

SEQ ID NO: 210794 - DNA, 20 bp, synthetic construct
  source 1..20: mol_type = other DNA
ctggagtgcagtggtgcaat

SEQ ID NO: 210795 - DNA, 20 bp, synthetic construct
  source 1..20: mol_type = other DNA
gctggagtgcagtggtgcaa

SEQ ID NO: 210796 - DNA, 20 bp, synthetic construct
  source 1..20: mol_type = other DNA
ggctggagtgcagtggtgca

SEQ ID NO: 210797 - DNA, 20 bp, synthetic construct
  source 1..20: mol_type = other DNA
aggctggagtgcagtggtgc

SEQ ID NO: 210798 - DNA, 20 bp, synthetic construct
  source 1..20: mol_type = other DNA
caggctggagtgcagtggtg

SEQ ID NO: 210799 - DNA, 20 bp, synthetic construct
  source 1..20: mol_type = other DNA
ccaggctggagtgcagtggt

SEQ ID NO: 210800 - DNA, 20 bp, synthetic construct
  source 1..20: mol_type = other DNA
cccaggctggagtgcagtgg

SEQ ID NO: 210801 - DNA, 20 bp, synthetic construct
  source 1..20: mol_type = other DNA
gcccaggctggagtgcagtg

SEQ ID NO: 210802 - DNA, 20 bp, synthetic construct
  source 1..20: mol_type = other DNA
tgcccaggctggagtgcagt

SEQ ID NO: 210803 - DNA, 20 bp, synthetic construct
  source 1..20: mol_type = other DNA
ttgcccaggctggagtgcag

SEQ ID NO: 210804 - DNA, 20 bp, synthetic construct
  source 1..20: mol_type = other DNA
gttgcccaggctggagtgca

SEQ ID NO: 210805 - DNA, 20 bp, synthetic construct
  source 1..20: mol_type = other DNA
tgttgcccaggctggagtgc

SEQ ID NO: 210806 - DNA, 20 bp, synthetic construct
  source 1..20: mol_type = other DNA
ctgttgcccaggctggagtg

SEQ ID NO: 210807 - DNA, 20 bp, synthetic construct
  source 1..20: mol_type = other DNA
tctgttgcccaggctggagt

SEQ ID NO: 210808 - DNA, 20 bp, synthetic construct
  source 1..20: mol_type = other DNA
ctctgttgcccaggctggag

SEQ ID NO: 210809 - DNA, 20 bp, synthetic construct
  source 1..20: mol_type = other DNA
gctctgttgcccaggctgga

SEQ ID NO: 210810 - DNA, 20 bp, synthetic construct
  source 1..20: mol_type = other DNA
agctctgttgcccaggctgg

SEQ ID NO: 210811 - DNA, 20 bp, synthetic construct
  source 1..20: mol_type = other DNA
cagctctgttgcccaggctg

SEQ ID NO: 210812 - DNA, 20 bp, synthetic construct
  source 1..20: mol_type = other DNA
tcagctctgttgcccaggct

SEQ ID NO: 210813 - DNA, 20 bp, synthetic construct
  source 1..20: mol_type = other DNA
ctcagctctgttgcccaggc

SEQ ID NO: 210814 - DNA, 20 bp, synthetic construct
  source 1..20: mol_type = other DNA
tctcagctctgttgcccagg

SEQ ID NO: 210815 - DNA, 20 bp, synthetic construct
  source 1..20: mol_type = other DNA
gtctcagctctgttgcccag

SEQ ID NO: 210816 - DNA, 20 bp, synthetic construct
  source 1..20: mol_type = other DNA
ggtctcagctctgttgccca

SEQ ID NO: 210817 - DNA, 20 bp, synthetic construct
  source 1..20: mol_type = other DNA
gggtctcagctctgttgccc

SEQ ID NO: 210818 - DNA, 20 bp, synthetic construct
  source 1..20: mol_type = other DNA
agggtctcagctctgttgcc

SEQ ID NO: 210819 - DNA, 20 bp, synthetic construct
  source 1..20: mol_type = other DNA
tagggtctcagctctgttgc

SEQ ID NO: 210820 - DNA, 20 bp, synthetic construct
  source 1..20: mol_type = other DNA
atagggtctcagctctgttg

SEQ ID NO: 210821 - DNA, 20 bp, synthetic construct
  source 1..20: mol_type = other DNA
gatagggtctcagctctgtt

SEQ ID NO: 210822 - DNA, 20 bp, synthetic construct
  source 1..20: mol_type = other DNA
agatagggtctcagctctgt

SEQ ID NO: 210823 - DNA, 20 bp, synthetic construct
  source 1..20: mol_type = other DNA
gagatagggtctcagctctg

SEQ ID NO: 210824 - DNA, 20 bp, synthetic construct
  source 1..20: mol_type = other DNA
tgagatagggtctcagctct

SEQ ID NO: 210825 - DNA, 20 bp, synthetic construct
  source 1..20: mol_type = other DNA
ttgagatagggtctcagctc

SEQ ID NO: 210826 - DNA, 20 bp, synthetic construct
  source 1..20: mol_type = other DNA
tttgagatagggtctcagct

SEQ ID NO: 210827 - DNA, 20 bp, synthetic construct
  source 1..20: mol_type = other DNA
ttttgagatagggtctcagc

SEQ ID NO: 210828 - DNA, 20 bp, synthetic construct
  source 1..20: mol_type = other DNA
tttttgagatagggtctcag

SEQ ID NO: 210829 - DNA, 20 bp, synthetic construct
  source 1..20: mol_type = other DNA
ttttttgagatagggtctca

SEQ ID NO: 210830 - DNA, 20 bp, synthetic construct
  source 1..20: mol_type = other DNA
tttttttgagatagggtctc

SEQ ID NO: 210831 - DNA, 20 bp, synthetic construct
  source 1..20: mol_type = other DNA
ctttttttgagatagggtct

SEQ ID NO: 210832 - DNA, 20 bp, synthetic construct
  source 1..20: mol_type = other DNA
tctttttttgagatagggtc

SEQ ID NO: 210833 - DNA, 20 bp, synthetic construct
  source 1..20: mol_type = other DNA
ttctttttttgagatagggt

SEQ ID NO: 210834 - DNA, 20 bp, synthetic construct
  source 1..20: mol_type = other DNA
tttctttttttgagataggg

SEQ ID NO: 210835 - DNA, 20 bp, synthetic construct
  source 1..20: mol_type = other DNA
ttttctttttttgagatagg

SEQ ID NO: 210836 - DNA, 20 bp, synthetic construct
  source 1..20: mol_type = other DNA
tttttctttttttgagatag

SEQ ID NO: 210837 - DNA, 20 bp, synthetic construct
  source 1..20: mol_type = other DNA
ttttttctttttttgagata

SEQ ID NO: 210838 - DNA, 20 bp, synthetic construct
  source 1..20: mol_type = other DNA
tttttttctttttttgagat

SEQ ID NO: 210839 - DNA, 20 bp, synthetic construct
  source 1..20: mol_type = other DNA
ttttttttctttttttgaga

SEQ ID NO: 210840 - DNA, 20 bp, synthetic construct
  source 1..20: mol_type = other DNA
tttttttttctttttttgag

SEQ ID NO: 210841 - DNA, 20 bp, synthetic construct
  source 1..20: mol_type = other DNA
ttttttttttctttttttga

SEQ ID NO: 210842 - DNA, 20 bp, synthetic construct
  source 1..20: mol_type = other DNA
tttttttttttctttttttg

SEQ ID NO: 210843 - DNA, 20 bp, synthetic construct
  source 1..20: mol_type = other DNA
ctttttttttttcttttttt

SEQ ID NO: 210844 - DNA, 20 bp, synthetic construct
  source 1..20: mol_type = other DNA
tctttttttttttctttttt

SEQ ID NO: 210845 - DNA, 20 bp, synthetic construct
  source 1..20: mol_type = other DNA
ttctttttttttttcttttt

SEQ ID NO: 210846 - DNA, 20 bp, synthetic construct
  source 1..20: mol_type = other DNA
tttctttttttttttctttt

SEQ ID NO: 210847 - DNA, 20 bp, synthetic construct
  source 1..20: mol_type = other DNA
ctttctttttttttttcttt

SEQ ID NO: 210848 - DNA, 20 bp, synthetic construct
  source 1..20: mol_type = other DNA
cctttctttttttttttctt

SEQ ID NO: 210849 - DNA, 20 bp, synthetic construct
  source 1..20: mol_type = other DNA
tcctttctttttttttttct

SEQ ID NO: 210850 - DNA, 20 bp, synthetic construct
  source 1..20: mol_type = other DNA
ctcctttctttttttttttc

SEQ ID NO: 210851 - DNA, 20 bp, synthetic construct
  source 1..20: mol_type = other DNA
tctcctttcttttttttttt

SEQ ID NO: 210852 - DNA, 20 bp, synthetic construct
  source 1..20: mol_type = other DNA
ctctcctttctttttttttt

SEQ ID NO: 210853 - DNA, 20 bp, synthetic construct
  source 1..20: mol_type = other DNA
tctctcctttcttttttttt

SEQ ID NO: 210854 - DNA, 20 bp, synthetic construct
  source 1..20: mol_type = other DNA
ctctctcctttctttttttt

SEQ ID NO: 210855 - DNA, 20 bp, synthetic construct
  source 1..20: mol_type = other DNA
tctctctcctttcttttttt

SEQ ID NO: 210856 - DNA, 20 bp, synthetic construct
  source 1..20: mol_type = other DNA
ctctctctcctttctttttt

SEQ ID NO: 210857 - DNA, 20 bp, synthetic construct
  source 1..20: mol_type = other DNA
tctctctctcctttcttttt

SEQ ID NO: 210858 - DNA, 20 bp, synthetic construct
  source 1..20: mol_type = other DNA
ctctctctctcctttctttt

SEQ ID NO: 210859 - DNA, 20 bp, synthetic construct
  source 1..20: mol_type = other DNA
tctctctctctcctttcttt

SEQ ID NO: 210860 - DNA, 20 bp, synthetic construct
  source 1..20: mol_type = other DNA
ttctctctctctcctttctt

SEQ ID NO: 210861 - DNA, 20 bp, synthetic construct
  source 1..20: mol_type = other DNA
tttctctctctctcctttct

SEQ ID NO: 210862 - DNA, 20 bp, synthetic construct
  source 1..20: mol_type = other DNA
ctttctctctctctcctttc

SEQ ID NO: 210863 - DNA, 20 bp, synthetic construct
  source 1..20: mol_type = other DNA
tctttctctctctctccttt

SEQ ID NO: 210864 - DNA, 20 bp, synthetic construct
  source 1..20: mol_type = other DNA
ttctttctctctctctcctt

SEQ ID NO: 210865 - DNA, 20 bp, synthetic construct
  source 1..20: mol_type = other DNA
tttctttctctctctctcct

SEQ ID NO: 210866 - DNA, 20 bp, synthetic construct
  source 1..20: mol_type = other DNA
ttttctttctctctctctcc

SEQ ID NO: 210867 - DNA, 20 bp, synthetic construct
  source 1..20: mol_type = other DNA
cttttctttctctctctctc

SEQ ID NO: 210868 - DNA, 20 bp, synthetic construct
  source 1..20: mol_type = other DNA
tcttttctttctctctctct

SEQ ID NO: 210869 - DNA, 20 bp, synthetic construct
  source 1..20: mol_type = other DNA
ttcttttctttctctctctc

SEQ ID NO: 210870 - DNA, 20 bp, synthetic construct
  source 1..20: mol_type = other DNA
tttcttttctttctctctct

SEQ ID NO: 210871 - DNA, 20 bp, synthetic construct
  source 1..20: mol_type = other DNA
ttttcttttctttctctctc

SEQ ID NO: 210872 - DNA, 20 bp, synthetic construct
  source 1..20: mol_type = other DNA
cttttcttttctttctctct

SEQ ID NO: 210873 - DNA, 20 bp, synthetic construct
  source 1..20: mol_type = other DNA
tcttttcttttctttctctc

SEQ ID NO: 210874 - DNA, 20 bp, synthetic construct
  source 1..20: mol_type = other DNA
ttcttttcttttctttctct

SEQ ID NO: 210875 - DNA, 20 bp, synthetic construct
  source 1..20: mol_type = other DNA
tttcttttcttttctttctc

SEQ ID NO: 210876 - DNA, 20 bp, synthetic construct
  source 1..20: mol_type = other DNA
ttttcttttcttttctttct

SEQ ID NO: 210877 - DNA, 20 bp, synthetic construct
  source 1..20: mol_type = other DNA
tttttcttttcttttctttc

SEQ ID NO: 210878 - DNA, 20 bp, synthetic construct
  source 1..20: mol_type = other DNA
ttttttcttttcttttcttt

SEQ ID NO: 210879 - DNA, 20 bp, synthetic construct
  source 1..20: mol_type = other DNA
tttttttcttttcttttctt

SEQ ID NO: 210880 - DNA, 20 bp, synthetic construct
  source 1..20: mol_type = other DNA
ttttttttcttttcttttct

SEQ ID NO: 210881 - DNA, 20 bp, synthetic construct
  source 1..20: mol_type = other DNA
tttttttttcttttcttttc

SEQ ID NO: 210882 - DNA, 20 bp, synthetic construct
  source 1..20: mol_type = other DNA
ttttttttttcttttctttt

SEQ ID NO: 210883 - DNA, 20 bp, synthetic construct
  source 1..20: mol_type = other DNA
tttttttttttcttttcttt

SEQ ID NO: 210884 - DNA, 20 bp, synthetic construct
  source 1..20: mol_type = other DNA
ttttttttttttcttttctt

SEQ ID NO: 210885 - DNA, 20 bp, synthetic construct
  source 1..20: mol_type = other DNA
cttttttttttttcttttct

SEQ ID NO: 210886 - DNA, 20 bp, synthetic construct
  source 1..20: mol_type = other DNA
tcttttttttttttcttttc

SEQ ID NO: 210887 - DNA, 20 bp, synthetic construct
  source 1..20: mol_type = other DNA
ttcttttttttttttctttt

SEQ ID NO: 210888 - DNA, 20 bp, synthetic construct
  source 1..20: mol_type = other DNA
cttcttttttttttttcttt

SEQ ID NO: 210889 - DNA, 20 bp, synthetic construct
  source 1..20: mol_type = other DNA
ccttcttttttttttttctt

SEQ ID NO: 210890 - DNA, 20 bp, synthetic construct
  source 1..20: mol_type = other DNA
cccttcttttttttttttct

SEQ ID NO: 210891 - DNA, 20 bp, synthetic construct
  source 1..20: mol_type = other DNA
tcccttcttttttttttttc

SEQ ID NO: 210892 - DNA, 20 bp, synthetic construct
  source 1..20: mol_type = other DNA
ttcccttctttttttttttt

SEQ ID NO: 210893 - DNA, 20 bp, synthetic construct
  source 1..20: mol_type = other DNA
cttcccttcttttttttttt

SEQ ID NO: 210894 - DNA, 20 bp, synthetic construct
  source 1..20: mol_type = other DNA
ccttcccttctttttttttt

SEQ ID NO: 210895 - DNA, 20 bp, synthetic construct
  source 1..20: mol_type = other DNA
cccttcccttcttttttttt

SEQ ID NO: 210896 - DNA, 20 bp, synthetic construct
  source 1..20: mol_type = other DNA
tcccttcccttctttttttt

SEQ ID NO: 210897 - DNA, 20 bp, synthetic construct
  source 1..20: mol_type = other DNA
ttcccttcccttcttttttt

SEQ ID NO: 210898 - DNA, 20 bp, synthetic construct
  source 1..20: mol_type = other DNA
tttcccttcccttctttttt

SEQ ID NO: 210899 - DNA, 20 bp, synthetic construct
  source 1..20: mol_type = other DNA
ctttcccttcccttcttttt

SEQ ID NO: 210900 - DNA, 20 bp, synthetic construct
  source 1..20: mol_type = other DNA
gctttcccttcccttctttt

SEQ ID NO: 210901 - DNA, 20 bp, synthetic construct
  source 1..20: mol_type = other DNA
ggctttcccttcccttcttt

SEQ ID NO: 210902 - DNA, 20 bp, synthetic construct
  source 1..20: mol_type = other DNA
gggctttcccttcccttctt

SEQ ID NO: 210903 - DNA, 20 bp, synthetic construct
  source 1..20: mol_type = other DNA
tgggctttcccttcccttct

SEQ ID NO: 210904 - DNA, 20 bp, synthetic construct
  source 1..20: mol_type = other DNA
ctgggctttcccttcccttc

SEQ ID NO: 210905 - DNA, 20 bp, synthetic construct
  source 1..20: mol_type = other DNA
tctgggctttcccttccctt

SEQ ID NO: 210906 - DNA, 20 bp, synthetic construct
  source 1..20: mol_type = other DNA
ttctgggctttcccttccct

SEQ ID NO: 210907 - DNA, 20 bp, synthetic construct
  source 1..20: mol_type = other DNA
cttctgggctttcccttccc

SEQ ID NO: 210908 - DNA, 20 bp, synthetic construct
  source 1..20: mol_type = other DNA
tcttctgggctttcccttcc

SEQ ID NO: 210909 - DNA, 20 bp, synthetic construct
  source 1..20: mol_type = other DNA
ctcttctgggctttcccttc

SEQ ID NO: 210910 - DNA, 20 bp, synthetic construct
  source 1..20: mol_type = other DNA
actcttctgggctttccctt

SEQ ID NO: 210911 - DNA, 20 bp, synthetic construct
  source 1..20: mol_type = other DNA
cactcttctgggctttccct

SEQ ID NO: 210912 - DNA, 20 bp, synthetic construct
  source 1..20: mol_type = other DNA
acactcttctgggctttccc

SEQ ID NO: 210913 - DNA, 20 bp, synthetic construct
  source 1..20: mol_type = other DNA
cacactcttctgggctttcc

SEQ ID NO: 210914 - DNA, 20 bp, synthetic construct
  source 1..20: mol_type = other DNA
ccacactcttctgggctttc

SEQ ID NO: 210915 - DNA, 20 bp, synthetic construct
  source 1..20: mol_type = other DNA
cccacactcttctgggcttt

SEQ ID NO: 210916 - DNA, 20 bp, synthetic construct
  source 1..20: mol_type = other DNA
ccccacactcttctgggctt

SEQ ID NO: 210917 - DNA, 20 bp, synthetic construct
  source 1..20: mol_type = other DNA
tccccacactcttctgggct

SEQ ID NO: 210918 - DNA, 20 bp, synthetic construct
  source 1..20: mol_type = other DNA
ctccccacactcttctgggc

SEQ ID NO: 210919 - DNA, 20 bp, synthetic construct
  source 1..20: mol_type = other DNA
tctccccacactcttctggg

SEQ ID NO: 210920 - DNA, 20 bp, synthetic construct
  source 1..20: mol_type = other DNA
ctctccccacactcttctgg

SEQ ID NO: 210921 - DNA, 20 bp, synthetic construct
  source 1..20: mol_type = other DNA
cctctccccacactcttctg

SEQ ID NO: 210922 - DNA, 20 bp, synthetic construct
  source 1..20: mol_type = other DNA
tcctctccccacactcttct

SEQ ID NO: 210923 - DNA, 20 bp, synthetic construct
  source 1..20: mol_type = other DNA
ctcctctccccacactcttc

SEQ ID NO: 210924 - DNA, 20 bp, synthetic construct
  source 1..20: mol_type = other DNA
cctcctctccccacactctt

SEQ ID NO: 210925 - DNA, 20 bp, synthetic construct
  source 1..20: mol_type = other DNA
gcctcctctccccacactct

SEQ ID NO: 210926 - DNA, 20 bp, synthetic construct
  source 1..20: mol_type = other DNA
cgcctcctctccccacactc

SEQ ID NO: 210927 - DNA, 20 bp, synthetic construct
  source 1..20: mol_type = other DNA
ccgcctcctctccccacact

SEQ ID NO: 210928 - DNA, 20 bp, synthetic construct
  source 1..20: mol_type = other DNA
gccgcctcctctccccacac

SEQ ID NO: 210929 - DNA, 20 bp, synthetic construct
  source 1..20: mol_type = other DNA
ggccgcctcctctccccaca

SEQ ID NO: 210930 - DNA, 20 bp, synthetic construct
  source 1..20: mol_type = other DNA
cggccgcctcctctccccac

SEQ ID NO: 210931 - DNA, 20 bp, synthetic construct
  source 1..20: mol_type = other DNA
acggccgcctcctctcccca

SEQ ID NO: 210932 - DNA, 20 bp, synthetic construct
  source 1..20: mol_type = other DNA
gacggccgcctcctctcccc

SEQ ID NO: 210933 - DNA, 20 bp, synthetic construct
  source 1..20: mol_type = other DNA
tgacggccgcctcctctccc

SEQ ID NO: 210934 - DNA, 20 bp, synthetic construct
  source 1..20: mol_type = other DNA
atgacggccgcctcctctcc

SEQ ID NO: 210935 - DNA, 20 bp, synthetic construct
  source 1..20: mol_type = other DNA
aatgacggccgcctcctctc

SEQ ID NO: 210936 - DNA, 20 bp, synthetic construct
  source 1..20: mol_type = other DNA
gaatgacggccgcctcctct

SEQ ID NO: 210937 - DNA, 20 bp, synthetic construct
  source 1..20: mol_type = other DNA
agaatgacggccgcctcctc

SEQ ID NO: 210938 - DNA, 20 bp, synthetic construct
  source 1..20: mol_type = other DNA
cagaatgacggccgcctcct

SEQ ID NO: 210939 - DNA, 20 bp, synthetic construct
  source 1..20: mol_type = other DNA
ccagaatgacggccgcctcc

SEQ ID NO: 210940 - DNA, 20 bp, synthetic construct
  source 1..20: mol_type = other DNA
cccagaatgacggccgcctc

SEQ ID NO: 210941 - DNA, 20 bp, synthetic construct
  source 1..20: mol_type = other DNA
ccccagaatgacggccgcct

SEQ ID NO: 210942 - DNA, 20 bp, synthetic construct
  source 1..20: mol_type = other DNA
gccccagaatgacggccgcc

SEQ ID NO: 210943 - DNA, 20 bp, synthetic construct
  source 1..20: mol_type = other DNA
ggccccagaatgacggccgc

SEQ ID NO: 210944 - DNA, 20 bp, synthetic construct
  source 1..20: mol_type = other DNA
gggccccagaatgacggccg

SEQ ID NO: 210945 - DNA, 20 bp, synthetic construct
  source 1..20: mol_type = other DNA
agggccccagaatgacggcc

SEQ ID NO: 210946 - DNA, 20 bp, synthetic construct
  source 1..20: mol_type = other DNA
gagggccccagaatgacggc

SEQ ID NO: 210947 - DNA, 20 bp, synthetic construct
  source 1..20: mol_type = other DNA
tgagggccccagaatgacgg

SEQ ID NO: 210948 - DNA, 20 bp, synthetic construct
  source 1..20: mol_type = other DNA
ctgagggccccagaatgacg

SEQ ID NO: 210949 - DNA, 20 bp, synthetic construct
  source 1..20: mol_type = other DNA
actgagggccccagaatgac

SEQ ID NO: 210950 - DNA, 20 bp, synthetic construct
  source 1..20: mol_type = other DNA
cactgagggccccagaatga

SEQ ID NO: 210951 - DNA, 20 bp, synthetic construct
  source 1..20: mol_type = other DNA
acactgagggccccagaatg

SEQ ID NO: 210952 - DNA, 20 bp, synthetic construct
  source 1..20: mol_type = other DNA
cacactgagggccccagaat

SEQ ID NO: 210953 - DNA, 20 bp, synthetic construct
  source 1..20: mol_type = other DNA
gcacactgagggccccagaa

SEQ ID NO: 210954 - DNA, 20 bp, synthetic construct
  source 1..20: mol_type = other DNA
tgcacactgagggccccaga

SEQ ID NO: 210955 - DNA, 20 bp, synthetic construct
  source 1..20: mol_type = other DNA
gtgcacactgagggccccag

SEQ ID NO: 210956 - DNA, 20 bp, synthetic construct
  source 1..20: mol_type = other DNA
tgtgcacactgagggcccca

SEQ ID NO: 210957 - DNA, 20 bp, synthetic construct
  source 1..20: mol_type = other DNA
ttgtgcacactgagggcccc

SEQ ID NO: 210958 - DNA, 20 bp, synthetic construct
  source 1..20: mol_type = other DNA
gttgtgcacactgagggccc

SEQ ID NO: 210959 - DNA, 20 bp, synthetic construct
  source 1..20: mol_type = other DNA
ggttgtgcacactgagggcc

SEQ ID NO: 210960 - DNA, 20 bp, synthetic construct
  source 1..20: mol_type = other DNA
tggttgtgcacactgagggc

SEQ ID NO: 210961 - DNA, 20 bp, synthetic construct
  source 1..20: mol_type = other DNA
ctggttgtgcacactgaggg

SEQ ID NO: 210962 - DNA, 20 bp, synthetic construct
  source 1..20: mol_type = other DNA
tctggttgtgcacactgagg

SEQ ID NO: 210963 - DNA, 20 bp, synthetic construct
  source 1..20: mol_type = other DNA
atctggttgtgcacactgag

SEQ ID NO: 210964 - DNA, 20 bp, synthetic construct
  source 1..20: mol_type = other DNA
tatctggttgtgcacactga

SEQ ID NO: 210965 - DNA, 20 bp, synthetic construct
  source 1..20: mol_type = other DNA
ttatctggttgtgcacactg

SEQ ID NO: 210966 - DNA, 20 bp, synthetic construct
  source 1..20: mol_type = other DNA
gttatctggttgtgcacact

SEQ ID NO: 210967 - DNA, 20 bp, synthetic construct
  source 1..20: mol_type = other DNA
tgttatctggttgtgcacac

SEQ ID NO: 210968 - DNA, 20 bp, synthetic construct
  source 1..20: mol_type = other DNA
gtgttatctggttgtgcaca

SEQ ID NO: 210969 - DNA, 20 bp, synthetic construct
  source 1..20: mol_type = other DNA
tgtgttatctggttgtgcac

SEQ ID NO: 210970 - DNA, 20 bp, synthetic construct
  source 1..20: mol_type = other DNA
atgtgttatctggttgtgca

SEQ ID NO: 210971 - DNA, 20 bp, synthetic construct
  source 1..20: mol_type = other DNA
catgtgttatctggttgtgc

SEQ ID NO: 210972 - DNA, 20 bp, synthetic construct
  source 1..20: mol_type = other DNA
gcatgtgttatctggttgtg

SEQ ID NO: 210973 - DNA, 20 bp, synthetic construct
  source 1..20: mol_type = other DNA
agcatgtgttatctggttgt

SEQ ID NO: 210974 - DNA, 20 bp, synthetic construct
  source 1..20: mol_type = other DNA
gagcatgtgttatctggttg

SEQ ID NO: 210975 - DNA, 20 bp, synthetic construct
  source 1..20: mol_type = other DNA
agagcatgtgttatctggtt

SEQ ID NO: 210976 - DNA, 20 bp, synthetic construct
  source 1..20: mol_type = other DNA
cagagcatgtgttatctggt

SEQ ID NO: 210977 - DNA, 20 bp, synthetic construct
  source 1..20: mol_type = other DNA
acagagcatgtgttatctgg

SEQ ID NO: 210978 - DNA, 20 bp, synthetic construct
  source 1..20: mol_type = other DNA
cacagagcatgtgttatctg

SEQ ID NO: 210979 - DNA, 20 bp, synthetic construct
  source 1..20: mol_type = other DNA
ccacagagcatgtgttatct

SEQ ID NO: 210980 - DNA, 20 bp, synthetic construct
  source 1..20: mol_type = other DNA
cccacagagcatgtgttatc

SEQ ID NO: 210981 - DNA, 20 bp, synthetic construct
  source 1..20: mol_type = other DNA
gcccacagagcatgtgttat

SEQ ID NO: 210982 - DNA, 20 bp, synthetic construct
  source 1..20: mol_type = other DNA
agcccacagagcatgtgtta

SEQ ID NO: 210983 - DNA, 20 bp, synthetic construct
  source 1..20: mol_type = other DNA
aagcccacagagcatgtgtt

SEQ ID NO: 210984 - DNA, 20 bp, synthetic construct
  source 1..20: mol_type = other DNA
aaagcccacagagcatgtgt

SEQ ID NO: 210985 - DNA, 20 bp, synthetic construct
  source 1..20: mol_type = other DNA
aaaagcccacagagcatgtg

SEQ ID NO: 210986 - DNA, 20 bp, synthetic construct
  source 1..20: mol_type = other DNA
caaaagcccacagagcatgt

SEQ ID NO: 210987 - DNA, 20 bp, synthetic construct
  source 1..20: mol_type = other DNA
acaaaagcccacagagcatg

SEQ ID NO: 210988 - DNA, 20 bp, synthetic construct
  source 1..20: mol_type = other DNA
tacaaaagcccacagagcat

SEQ ID NO: 210989 - DNA, 20 bp, synthetic construct
  source 1..20: mol_type = other DNA
gtacaaaagcccacagagca

SEQ ID NO: 210990 - DNA, 20 bp, synthetic construct
  source 1..20: mol_type = other DNA
ggtacaaaagcccacagagc

SEQ ID NO: 210991 - DNA, 20 bp, synthetic construct
  source 1..20: mol_type = other DNA
tggtacaaaagcccacagag

SEQ ID NO: 210992 - DNA, 20 bp, synthetic construct
  source 1..20: mol_type = other DNA
atggtacaaaagcccacaga

SEQ ID NO: 210993 - DNA, 20 bp, synthetic construct
  source 1..20: mol_type = other DNA
aatggtacaaaagcccacag

SEQ ID NO: 210994 - DNA, 20 bp, synthetic construct
  source 1..20: mol_type = other DNA
aaatggtacaaaagcccaca

SEQ ID NO: 210995 - DNA, 20 bp, synthetic construct
  source 1..20: mol_type = other DNA
aaaatggtacaaaagcccac

SEQ ID NO: 210996 - DNA, 20 bp, synthetic construct
  source 1..20: mol_type = other DNA
caaaatggtacaaaagccca

SEQ ID NO: 210997 - DNA, 20 bp, synthetic construct
  source 1..20: mol_type = other DNA
gcaaaatggtacaaaagccc

SEQ ID NO: 210998 - DNA, 20 bp, synthetic construct
  source 1..20: mol_type = other DNA
agcaaaatggtacaaaagcc

SEQ ID NO: 210999 - DNA, 20 bp, synthetic construct
  source 1..20: mol_type = other DNA
aagcaaaatggtacaaaagc

SEQ ID NO: 211000 - DNA, 20 bp, synthetic construct
  source 1..20: mol_type = other DNA
caagcaaaatggtacaaaag

SEQ ID NO: 211001 - DNA, 20 bp, synthetic construct
  source 1..20: mol_type = other DNA
tcaagcaaaatggtacaaaa

SEQ ID NO: 211002 - DNA, 20 bp, synthetic construct
  source 1..20: mol_type = other DNA
ctcaagcaaaatggtacaaa

SEQ ID NO: 211003 - DNA, 20 bp, synthetic construct
  source 1..20: mol_type = other DNA
gctcaagcaaaatggtacaa

SEQ ID NO: 211004 - DNA, 20 bp, synthetic construct
  source 1..20: mol_type = other DNA
tgctcaagcaaaatggtaca

SEQ ID NO: 211005 - DNA, 20 bp, synthetic construct
  source 1..20: mol_type = other DNA
atgctcaagcaaaatggtac

SEQ ID NO: 211006 - DNA, 20 bp, synthetic construct
  source 1..20: mol_type = other DNA
tatgctcaagcaaaatggta

SEQ ID NO: 211007 - DNA, 20 bp, synthetic construct
  source 1..20: mol_type = other DNA
ttatgctcaagcaaaatggt

SEQ ID NO: 211008 - DNA, 20 bp, synthetic construct
  source 1..20: mol_type = other DNA
tttatgctcaagcaaaatgg

SEQ ID NO: 211009 - DNA, 20 bp, synthetic construct
  source 1..20: mol_type = other DNA
ctttatgctcaagcaaaatg

SEQ ID NO: 211010 - DNA, 20 bp, synthetic construct
  source 1..20: mol_type = other DNA
tctttatgctcaagcaaaat

SEQ ID NO: 211011 - DNA, 20 bp, synthetic construct
  source 1..20: mol_type = other DNA
ttctttatgctcaagcaaaa

SEQ ID NO: 211012 - DNA, 20 bp, synthetic construct
  source 1..20: mol_type = other DNA
tttctttatgctcaagcaaa

SEQ ID NO: 211013 - DNA, 20 bp, synthetic construct
  source 1..20: mol_type = other DNA
ctttctttatgctcaagcaa

SEQ ID NO: 211014 - DNA, 20 bp, synthetic construct
  source 1..20: mol_type = other DNA
cctttctttatgctcaagca

SEQ ID NO: 211015 - DNA, 20 bp, synthetic construct
  source 1..20: mol_type = other DNA
tcctttctttatgctcaagc

SEQ ID NO: 211016 - DNA, 20 bp, synthetic construct
  source 1..20: mol_type = other DNA
ttcctttctttatgctcaag

SEQ ID NO: 211017 - DNA, 20 bp, synthetic construct
  source 1..20: mol_type = other DNA
cttcctttctttatgctcaa

SEQ ID NO: 211018 - DNA, 20 bp, synthetic construct
  source 1..20: mol_type = other DNA
ccttcctttctttatgctca

SEQ ID NO: 211019 - DNA, 20 bp, synthetic construct
  source 1..20: mol_type = other DNA
gccttcctttctttatgctc

SEQ ID NO: 211020 - DNA, 20 bp, synthetic construct
  source 1..20: mol_type = other DNA
agccttcctttctttatgct

SEQ ID NO: 211021 - DNA, 20 bp, synthetic construct
  source 1..20: mol_type = other DNA
cagccttcctttctttatgc

SEQ ID NO: 211022 - DNA, 20 bp, synthetic construct
  source 1..20: mol_type = other DNA
gcagccttcctttctttatg

SEQ ID NO: 211023 - DNA, 20 bp, synthetic construct
  source 1..20: mol_type = other DNA
ggcagccttcctttctttat

SEQ ID NO: 211024 - DNA, 20 bp, synthetic construct
  source 1..20: mol_type = other DNA
gggcagccttcctttcttta

SEQ ID NO: 211025 - DNA, 20 bp, synthetic construct
  source 1..20: mol_type = other DNA
ggggcagccttcctttcttt

SEQ ID NO: 211026 - DNA, 20 bp, synthetic construct
  source 1..20: mol_type = other DNA
aggggcagccttcctttctt

SEQ ID NO: 211027 - DNA, 20 bp, synthetic construct
  source 1..20: mol_type = other DNA
taggggcagccttcctttct

SEQ ID NO: 211028 - DNA, 20 bp, synthetic construct
  source 1..20: mol_type = other DNA
ttaggggcagccttcctttc

SEQ ID NO: 211029 - DNA, 20 bp, synthetic construct
  source 1..20: mol_type = other DNA
tttaggggcagccttccttt

SEQ ID NO: 211030 - DNA, 20 bp, synthetic construct
  source 1..20: mol_type = other DNA
atttaggggcagccttcctt

SEQ ID NO: 211031 - DNA, 20 bp, synthetic construct
  source 1..20: mol_type = other DNA
tatttaggggcagccttcct

SEQ ID NO: 211032 - DNA, 20 bp, synthetic construct
  source 1..20: mol_type = other DNA
ctatttaggggcagccttcc

SEQ ID NO: 211033 - DNA, 20 bp, synthetic construct
  source 1..20: mol_type = other DNA
tctatttaggggcagccttc

SEQ ID NO: 211034 - DNA, 20 bp, synthetic construct
  source 1..20: mol_type = other DNA
ttctatttaggggcagcctt

SEQ ID NO: 211035 - DNA, 20 bp, synthetic construct
  source 1..20: mol_type = other DNA
tttctatttaggggcagcct

SEQ ID NO: 211036 - DNA, 20 bp, synthetic construct
  source 1..20: mol_type = other DNA
ctttctatttaggggcagcc

SEQ ID NO: 211037 - DNA, 20 bp, synthetic construct
  source 1..20: mol_type = other DNA
gctttctatttaggggcagc

SEQ ID NO: 211038 - DNA, 20 bp, synthetic construct
  source 1..20: mol_type = other DNA
tgctttctatttaggggcag

SEQ ID NO: 211039 - DNA, 20 bp, synthetic construct
  source 1..20: mol_type = other DNA
gtgctttctatttaggggca

SEQ ID NO: 211040 - DNA, 20 bp, synthetic construct
  source 1..20: mol_type = other DNA
agtgctttctatttaggggc

SEQ ID NO: 211041 - DNA, 20 bp, synthetic construct
  source 1..20: mol_type = other DNA
gagtgctttctatttagggg

SEQ ID NO: 211042 - DNA, 20 bp, synthetic construct
  source 1..20: mol_type = other DNA
agagtgctttctatttaggg

SEQ ID NO: 211043 - DNA, 20 bp, synthetic construct
  source 1..20: mol_type = other DNA
cagagtgctttctatttagg

SEQ ID NO: 211044 - DNA, 20 bp, synthetic construct
  source 1..20: mol_type = other DNA
ccagagtgctttctatttag

SEQ ID NO: 211045 - DNA, 20 bp, synthetic construct
  source 1..20: mol_type = other DNA
tccagagtgctttctattta

SEQ ID NO: 211046 - DNA, 20 bp, synthetic construct
  source 1..20: mol_type = other DNA
ctccagagtgctttctattt

SEQ ID NO: 211047 - DNA, 20 bp, synthetic construct
  source 1..20: mol_type = other DNA
cctccagagtgctttctatt

SEQ ID NO: 211048 - DNA, 20 bp, synthetic construct
  source 1..20: mol_type = other DNA
gcctccagagtgctttctat

SEQ ID NO: 211049 - DNA, 20 bp, synthetic construct
  source 1..20: mol_type = other DNA
tgcctccagagtgctttcta

SEQ ID NO: 211050 - DNA, 20 bp, synthetic construct
  source 1..20: mol_type = other DNA
ttgcctccagagtgctttct

SEQ ID NO: 211051 - DNA, 20 bp, synthetic construct
  source 1..20: mol_type = other DNA
tttgcctccagagtgctttc

SEQ ID NO: 211052 - DNA, 20 bp, synthetic construct
  source 1..20: mol_type = other DNA
gtttgcctccagagtgcttt

SEQ ID NO: 211053 - DNA, 20 bp, synthetic construct
  source 1..20: mol_type = other DNA
tgtttgcctccagagtgctt

SEQ ID NO: 211054 - DNA, 20 bp, synthetic construct
  source 1..20: mol_type = other DNA
ttgtttgcctccagagtgct

SEQ ID NO: 211055 - DNA, 20 bp, synthetic construct
  source 1..20: mol_type = other DNA
tttgtttgcctccagagtgc

SEQ ID NO: 211056 - DNA, 20 bp, synthetic construct
  source 1..20: mol_type = other DNA
atttgtttgcctccagagtg

SEQ ID NO: 211057 - DNA, 20 bp, synthetic construct
  source 1..20: mol_type = other DNA
gatttgtttgcctccagagt

SEQ ID NO: 211058 - DNA, 20 bp, synthetic construct
  source 1..20: mol_type = other DNA
agatttgtttgcctccagag

SEQ ID NO: 211059 - DNA, 20 bp, synthetic construct
  source 1..20: mol_type = other DNA
cagatttgtttgcctccaga

SEQ ID NO: 211060 - DNA, 20 bp, synthetic construct
  source 1..20: mol_type = other DNA
tcagatttgtttgcctccag

SEQ ID NO: 211061 - DNA, 20 bp, synthetic construct
  source 1..20: mol_type = other DNA
gtcagatttgtttgcctcca

SEQ ID NO: 211062 - DNA, 20 bp, synthetic construct
  source 1..20: mol_type = other DNA
agtcagatttgtttgcctcc

SEQ ID NO: 211063 - DNA, 20 bp, synthetic construct
  source 1..20: mol_type = other DNA
gagtcagatttgtttgcctc

SEQ ID NO: 211064 - DNA, 20 bp, synthetic construct
  source 1..20: mol_type = other DNA
ggagtcagatttgtttgcct

SEQ ID NO: 211065 - DNA, 20 bp, synthetic construct
  source 1..20: mol_type = other DNA
tggagtcagatttgtttgcc

SEQ ID NO: 211066 - DNA, 20 bp, synthetic construct
  source 1..20: mol_type = other DNA
ttggagtcagatttgtttgc

SEQ ID NO: 211067 - DNA, 20 bp, synthetic construct
  source 1..20: mol_type = other DNA
attggagtcagatttgtttg

SEQ ID NO: 211068 - DNA, 20 bp, synthetic construct
  source 1..20: mol_type = other DNA
gattggagtcagatttgttt

SEQ ID NO: 211069 - DNA, 20 bp, synthetic construct
  source 1..20: mol_type = other DNA
ggattggagtcagatttgtt

SEQ ID NO: 211070 - DNA, 20 bp, synthetic construct
  source 1..20: mol_type = other DNA
aggattggagtcagatttgt

SEQ ID NO: 211071 - DNA, 20 bp, synthetic construct
  source 1..20: mol_type = other DNA
caggattggagtcagatttg

SEQ ID NO: 211072 - DNA, 20 bp, synthetic construct
  source 1..20: mol_type = other DNA
ccaggattggagtcagattt

SEQ ID NO: 211073 - DNA, 20 bp, synthetic construct
  source 1..20: mol_type = other DNA
gccaggattggagtcagatt

SEQ ID NO: 211074 - DNA, 20 bp, synthetic construct
  source 1..20: mol_type = other DNA
ggccaggattggagtcagat

SEQ ID NO: 211075 - DNA, 20 bp, synthetic construct
  source 1..20: mol_type = other DNA
gggccaggattggagtcaga

SEQ ID NO: 211076 - DNA, 20 bp, synthetic construct
  source 1..20: mol_type = other DNA
agggccaggattggagtcag

SEQ ID NO: 211077 - DNA, 20 bp, synthetic construct
  source 1..20: mol_type = other DNA
cagggccaggattggagtca

SEQ ID NO: 211078 - DNA, 20 bp, synthetic construct
  source 1..20: mol_type = other DNA
gcagggccaggattggagtc

SEQ ID NO: 211079 - DNA, 20 bp, synthetic construct
  source 1..20: mol_type = other DNA
ggcagggccaggattggagt

SEQ ID NO: 211080 - DNA, 20 bp, synthetic construct
  source 1..20: mol_type = other DNA
tggcagggccaggattggag

SEQ ID NO: 211081 - DNA, 20 bp, synthetic construct
  source 1..20: mol_type = other DNA
gtggcagggccaggattgga

SEQ ID NO: 211082 - DNA, 20 bp, synthetic construct
  source 1..20: mol_type = other DNA
agtggcagggccaggattgg

SEQ ID NO: 211083 - DNA, 20 bp, synthetic construct
  source 1..20: mol_type = other DNA
aagtggcagggccaggattg

SEQ ID NO: 211084 - DNA, 20 bp, synthetic construct
  source 1..20: mol_type = other DNA
aaagtggcagggccaggatt

SEQ ID NO: 211085 - DNA, 20 bp, synthetic construct
  source 1..20: mol_type = other DNA
gaaagtggcagggccaggat

SEQ ID NO: 211086 - DNA, 20 bp, synthetic construct
  source 1..20: mol_type = other DNA
ggaaagtggcagggccagga

SEQ ID NO: 211087 - DNA, 20 bp, synthetic construct
  source 1..20: mol_type = other DNA
gggaaagtggcagggccagg

SEQ ID NO: 211088 - DNA, 20 bp, synthetic construct
  source 1..20: mol_type = other DNA
tgggaaagtggcagggccag

SEQ ID NO: 211089 - DNA, 20 bp, synthetic construct
  source 1..20: mol_type = other DNA
ctgggaaagtggcagggcca

SEQ ID NO: 211090 - DNA, 20 bp, synthetic construct
  source 1..20: mol_type = other DNA
gctgggaaagtggcagggcc

SEQ ID NO: 211091 - DNA, 20 bp, synthetic construct
  source 1..20: mol_type = other DNA
agctgggaaagtggcagggc

SEQ ID NO: 211092 - DNA, 20 bp, synthetic construct
  source 1..20: mol_type = other DNA
cagctgggaaagtggcaggg

SEQ ID NO: 211093 - DNA, 20 bp, synthetic construct
  source 1..20: mol_type = other DNA
tcagctgggaaagtggcagg

SEQ ID NO: 211094 - DNA, 20 bp, synthetic construct
  source 1..20: mol_type = other DNA
ctcagctgggaaagtggcag

SEQ ID NO: 211095 - DNA, 20 bp, synthetic construct
  source 1..20: mol_type = other DNA
cctcagctgggaaagtggca

SEQ ID NO: 211096 - DNA, 20 bp, synthetic construct
  source 1..20: mol_type = other DNA
tcctcagctgggaaagtggc

SEQ ID NO: 211097 - DNA, 20 bp, synthetic construct
  source 1..20: mol_type = other DNA
gtcctcagctgggaaagtgg

SEQ ID NO: 211098 - DNA, 20 bp, synthetic construct
  source 1..20: mol_type = other DNA
agtcctcagctgggaaagtg

SEQ ID NO: 211099 - DNA, 20 bp, synthetic construct
  source 1..20: mol_type = other DNA
aagtcctcagctgggaaagt

SEQ ID NO: 211100 - DNA, 20 bp, synthetic construct
  source 1..20: mol_type = other DNA
taagtcctcagctgggaaag

SEQ ID NO: 211101 - DNA, 20 bp, synthetic construct
  source 1..20: mol_type = other DNA
ctaagtcctcagctgggaaa

SEQ ID NO: 211102 - DNA, 20 bp, synthetic construct
  source 1..20: mol_type = other DNA
tctaagtcctcagctgggaa

SEQ ID NO: 211103 - DNA, 20 bp, synthetic construct
  source 1..20: mol_type = other DNA
gtctaagtcctcagctggga

SEQ ID NO: 211104 - DNA, 20 bp, synthetic construct
  source 1..20: mol_type = other DNA
tgtctaagtcctcagctggg

SEQ ID NO: 211105 - DNA, 20 bp, synthetic construct
  source 1..20: mol_type = other DNA
ttgtctaagtcctcagctgg

SEQ ID NO: 211106 - DNA, 20 bp, synthetic construct
  source 1..20: mol_type = other DNA
cttgtctaagtcctcagctg

SEQ ID NO: 211107 - DNA, 20 bp, synthetic construct
  source 1..20: mol_type = other DNA
gcttgtctaagtcctcagct

SEQ ID NO: 211108 - DNA, 20 bp, synthetic construct
  source 1..20: mol_type = other DNA
tgcttgtctaagtcctcagc

SEQ ID NO: 211109 - DNA, 20 bp, synthetic construct
  source 1..20: mol_type = other DNA
gtgcttgtctaagtcctcag

SEQ ID NO: 211110 - DNA, 20 bp, synthetic construct
  source 1..20: mol_type = other DNA
ggtgcttgtctaagtcctca

SEQ ID NO: 211111 - DNA, 20 bp, synthetic construct
  source 1..20: mol_type = other DNA
gggtgcttgtctaagtcctc

SEQ ID NO: 211112 - DNA, 20 bp, synthetic construct
  source 1..20: mol_type = other DNA
agggtgcttgtctaagtcct

SEQ ID NO: 211113 - DNA, 20 bp, synthetic construct
  source 1..20: mol_type = other DNA
tagggtgcttgtctaagtcc

SEQ ID NO: 211114 - DNA, 20 bp, synthetic construct
  source 1..20: mol_type = other DNA
ctagggtgcttgtctaagtc

SEQ ID NO: 211115 - DNA, 20 bp, synthetic construct
  source 1..20: mol_type = other DNA
gctagggtgcttgtctaagt

SEQ ID NO: 211116 - DNA, 20 bp, synthetic construct
  source 1..20: mol_type = other DNA
ggctagggtgcttgtctaag

SEQ ID NO: 211117 - DNA, 20 bp, synthetic construct
  source 1..20: mol_type = other DNA
aggctagggtgcttgtctaa

SEQ ID NO: 211118 - DNA, 20 bp, synthetic construct
  source 1..20: mol_type = other DNA
gaggctagggtgcttgtcta

SEQ ID NO: 211119 - DNA, 20 bp, synthetic construct
  source 1..20: mol_type = other DNA
agaggctagggtgcttgtct

SEQ ID NO: 211120 - DNA, 20 bp, synthetic construct
  source 1..20: mol_type = other DNA
aagaggctagggtgcttgtc

SEQ ID NO: 211121 - DNA, 20 bp, synthetic construct
  source 1..20: mol_type = other DNA
caagaggctagggtgcttgt

SEQ ID NO: 211122 - DNA, 20 bp, synthetic construct
  source 1..20: mol_type = other DNA
ccaagaggctagggtgcttg

SEQ ID NO: 211123 - DNA, 20 bp, synthetic construct
  source 1..20: mol_type = other DNA
tccaagaggctagggtgctt

SEQ ID NO: 211124 - DNA, 20 bp, synthetic construct
  source 1..20: mol_type = other DNA
gtccaagaggctagggtgct

SEQ ID NO: 211125 - DNA, 20 bp, synthetic construct
  source 1..20: mol_type = other DNA
tgtccaagaggctagggtgc

SEQ ID NO: 211126 - DNA, 20 bp, synthetic construct
  source 1..20: mol_type = other DNA
atgtccaagaggctagggtg

SEQ ID NO: 211127 - DNA, 20 bp, synthetic construct
  source 1..20: mol_type = other DNA
aatgtccaagaggctagggt

SEQ ID NO: 211128 - DNA, 20 bp, synthetic construct
  source 1..20: mol_type = other DNA
gaatgtccaagaggctaggg

SEQ ID NO: 211129 - DNA, 20 bp, synthetic construct
  source 1..20: mol_type = other DNA
agaatgtccaagaggctagg

SEQ ID NO: 211130 - DNA, 20 bp, synthetic construct
  source 1..20: mol_type = other DNA
gagaatgtccaagaggctag

SEQ ID NO: 211131 - DNA, 20 bp, synthetic construct
  source 1..20: mol_type = other DNA
tgagaatgtccaagaggcta

SEQ ID NO: 211132 - DNA, 20 bp, synthetic construct
  source 1..20: mol_type = other DNA
ctgagaatgtccaagaggct

SEQ ID NO: 211133 - DNA, 20 bp, synthetic construct
  source 1..20: mol_type = other DNA
tctgagaatgtccaagaggc

SEQ ID NO: 211134 - DNA, 20 bp, synthetic construct
  source 1..20: mol_type = other DNA
ctctgagaatgtccaagagg

SEQ ID NO: 211135 - DNA, 20 bp, synthetic construct
  source 1..20: mol_type = other DNA
gctctgagaatgtccaagag

SEQ ID NO: 211136 - DNA, 20 bp, synthetic construct
  source 1..20: mol_type = other DNA
ggctctgagaatgtccaaga

SEQ ID NO: 211137 - DNA, 20 bp, synthetic construct
  source 1..20: mol_type = other DNA
tggctctgagaatgtccaag

SEQ ID NO: 211138 - DNA, 20 bp, synthetic construct
  source 1..20: mol_type = other DNA
atggctctgagaatgtccaa

SEQ ID NO: 211139 - DNA, 20 bp, synthetic construct
  source 1..20: mol_type = other DNA
gatggctctgagaatgtcca

SEQ ID NO: 211140 - DNA, 20 bp, synthetic construct
  source 1..20: mol_type = other DNA
agatggctctgagaatgtcc

SEQ ID NO: 211141 - DNA, 20 bp, synthetic construct
  source 1..20: mol_type = other DNA
cagatggctctgagaatgtc

SEQ ID NO: 211142 - DNA, 20 bp, synthetic construct
  source 1..20: mol_type = other DNA
gcagatggctctgagaatgt

SEQ ID NO: 211143 - DNA, 20 bp, synthetic construct
  source 1..20: mol_type = other DNA
agcagatggctctgagaatg

SEQ ID NO: 211144 - DNA, 20 bp, synthetic construct
  source 1..20: mol_type = other DNA
cagcagatggctctgagaat

SEQ ID NO: 211145 - DNA, 20 bp, synthetic construct
  source 1..20: mol_type = other DNA
gcagcagatggctctgagaa

SEQ ID NO: 211146 - DNA, 20 bp, synthetic construct
  source 1..20: mol_type = other DNA
tgcagcagatggctctgaga

SEQ ID NO: 211147 - DNA, 20 bp, synthetic construct
  source 1..20: mol_type = other DNA
ttgcagcagatggctctgag

SEQ ID NO: 211148 - DNA, 20 bp, synthetic construct
  source 1..20: mol_type = other DNA
cttgcagcagatggctctga

SEQ ID NO: 211149 - DNA, 20 bp, synthetic construct
  source 1..20: mol_type = other DNA
acttgcagcagatggctctg

SEQ ID NO: 211150 - DNA, 20 bp, synthetic construct
  source 1..20: mol_type = other DNA
cacttgcagcagatggctct

SEQ ID NO: 211151 - DNA, 20 bp, synthetic construct
  source 1..20: mol_type = other DNA
ccacttgcagcagatggctc

SEQ ID NO: 211152 - DNA, 20 bp, synthetic construct
  source 1..20: mol_type = other DNA
cccacttgcagcagatggct

SEQ ID NO: 211153 - DNA, 20 bp, synthetic construct
  source 1..20: mol_type = other DNA
acccacttgcagcagatggc

SEQ ID NO: 211154 - DNA, 20 bp, synthetic construct
  source 1..20: mol_type = other DNA
cacccacttgcagcagatgg

SEQ ID NO: 211155 - DNA, 20 bp, synthetic construct
  source 1..20: mol_type = other DNA
gcacccacttgcagcagatg

SEQ ID NO: 211156 - DNA, 20 bp, synthetic construct
  source 1..20: mol_type = other DNA
agcacccacttgcagcagat

SEQ ID NO: 211157 - DNA, 20 bp, synthetic construct
  source 1..20: mol_type = other DNA
cagcacccacttgcagcaga

SEQ ID NO: 211158 - DNA, 20 bp, synthetic construct
  source 1..20: mol_type = other DNA
gcagcacccacttgcagcag

SEQ ID NO: 211159 - DNA, 20 bp, synthetic construct
  source 1..20: mol_type = other DNA
ggcagcacccacttgcagca

SEQ ID NO: 211160 - DNA, 20 bp, synthetic construct
  source 1..20: mol_type = other DNA
tggcagcacccacttgcagc

SEQ ID NO: 211161 - DNA, 20 bp, synthetic construct
  source 1..20: mol_type = other DNA
atggcagcacccacttgcag

SEQ ID NO: 211162 - DNA, 20 bp, synthetic construct
  source 1..20: mol_type = other DNA
tatggcagcacccacttgca

SEQ ID NO: 211163 - DNA, 20 bp, synthetic construct
  source 1..20: mol_type = other DNA
gtatggcagcacccacttgc

SEQ ID NO: 211164 - DNA, 20 bp, synthetic construct
  source 1..20: mol_type = other DNA
ggtatggcagcacccacttg

SEQ ID NO: 211165 - DNA, 20 bp, synthetic construct
  source 1..20: mol_type = other DNA
gggtatggcagcacccactt

SEQ ID NO: 211166 - DNA, 20 bp, synthetic construct
  source 1..20: mol_type = other DNA
tgggtatggcagcacccact

SEQ ID NO: 211167 - DNA, 20 bp, synthetic construct
  source 1..20: mol_type = other DNA
gtgggtatggcagcacccac

SEQ ID NO: 211168 - DNA, 20 bp, synthetic construct
  source 1..20: mol_type = other DNA
ggtgggtatggcagcaccca

SEQ ID NO: 211169 - DNA, 20 bp, synthetic construct
  source 1..20: mol_type = other DNA
aggtgggtatggcagcaccc

SEQ ID NO: 211170 - DNA, 20 bp, synthetic construct
  source 1..20: mol_type = other DNA
aaggtgggtatggcagcacc

SEQ ID NO: 211171 - DNA, 20 bp, synthetic construct
  source 1..20: mol_type = other DNA
taaggtgggtatggcagcac

SEQ ID NO: 211172 - DNA, 20 bp, synthetic construct
  source 1..20: mol_type = other DNA
gtaaggtgggtatggcagca

SEQ ID NO: 211173 - DNA, 20 bp, synthetic construct
  source 1..20: mol_type = other DNA
agtaaggtgggtatggcagc

SEQ ID NO: 211174 - DNA, 20 bp, synthetic construct
  source 1..20: mol_type = other DNA
cagtaaggtgggtatggcag

SEQ ID NO: 211175 - DNA, 20 bp, synthetic construct
  source 1..20: mol_type = other DNA
ccagtaaggtgggtatggca

SEQ ID NO: 211176 - DNA, 20 bp, synthetic construct
  source 1..20: mol_type = other DNA
cccagtaaggtgggtatggc

SEQ ID NO: 211177 - DNA, 20 bp, synthetic construct
  source 1..20: mol_type = other DNA
gcccagtaaggtgggtatgg

SEQ ID NO: 211178 - DNA, 20 bp, synthetic construct
  source 1..20: mol_type = other DNA
tgcccagtaaggtgggtatg

SEQ ID NO: 211179 - DNA, 20 bp, synthetic construct
  source 1..20: mol_type = other DNA
ctgcccagtaaggtgggtat

SEQ ID NO: 211180 - DNA, 20 bp, synthetic construct
  source 1..20: mol_type = other DNA
cctgcccagtaaggtgggta

SEQ ID NO: 211181 - DNA, 20 bp, synthetic construct
  source 1..20: mol_type = other DNA
gcctgcccagtaaggtgggt

SEQ ID NO: 211182 - DNA, 20 bp, synthetic construct
  source 1..20: mol_type = other DNA
agcctgcccagtaaggtggg

SEQ ID NO: 211183 - DNA, 20 bp, synthetic construct
  source 1..20: mol_type = other DNA
aagcctgcccagtaaggtgg

SEQ ID NO: 211184 - DNA, 20 bp, synthetic construct
  source 1..20: mol_type = other DNA
caagcctgcccagtaaggtg

SEQ ID NO: 211185 - DNA, 20 bp, synthetic construct
  source 1..20: mol_type = other DNA
ccaagcctgcccagtaaggt

SEQ ID NO: 211186 - DNA, 20 bp, synthetic construct
  source 1..20: mol_type = other DNA
cccaagcctgcccagtaagg

SEQ ID NO: 211187 - DNA, 20 bp, synthetic construct
  source 1..20: mol_type = other DNA
ccccaagcctgcccagtaag

SEQ ID NO: 211188 - DNA, 20 bp, synthetic construct
  source 1..20: mol_type = other DNA
cccccaagcctgcccagtaa

SEQ ID NO: 211189 - DNA, 20 bp, synthetic construct
  source 1..20: mol_type = other DNA
tcccccaagcctgcccagta

SEQ ID NO: 211190 - DNA, 20 bp, synthetic construct
  source 1..20: mol_type = other DNA
gtcccccaagcctgcccagt

SEQ ID NO: 211191 - DNA, 20 bp, synthetic construct
  source 1..20: mol_type = other DNA
ggtcccccaagcctgcccag

SEQ ID NO: 211192 - DNA, 20 bp, synthetic construct
  source 1..20: mol_type = other DNA
tggtcccccaagcctgccca

SEQ ID NO: 211193 - DNA, 20 bp, synthetic construct
  source 1..20: mol_type = other DNA
ttggtcccccaagcctgccc

SEQ ID NO: 211194 - DNA, 20 bp, synthetic construct
  source 1..20: mol_type = other DNA
cttggtcccccaagcctgcc

SEQ ID NO: 211195 - DNA, 20 bp, synthetic construct
  source 1..20: mol_type = other DNA
ccttggtcccccaagcctgc

SEQ ID NO: 211196 - DNA, 20 bp, synthetic construct
  source 1..20: mol_type = other DNA
cccttggtcccccaagcctg

SEQ ID NO: 211197 - DNA, 20 bp, synthetic construct
  source 1..20: mol_type = other DNA
acccttggtcccccaagcct

SEQ ID NO: 211198 - DNA, 20 bp, synthetic construct
  source 1..20: mol_type = other DNA
cacccttggtcccccaagcc

SEQ ID NO: 211199 - DNA, 20 bp, synthetic construct
  source 1..20: mol_type = other DNA
ccacccttggtcccccaagc

SEQ ID NO: 211200 - DNA, 20 bp, synthetic construct
  source 1..20: mol_type = other DNA
accacccttggtcccccaag

SEQ ID NO: 211201 - DNA, 20 bp, synthetic construct
  source 1..20: mol_type = other DNA
taccacccttggtcccccaa

SEQ ID NO: 211202 - DNA, 20 bp, synthetic construct
  source 1..20: mol_type = other DNA
ttaccacccttggtccccca

SEQ ID NO: 211203 - DNA, 20 bp, synthetic construct
  source 1..20: mol_type = other DNA
tttaccacccttggtccccc

SEQ ID NO: 211204 - DNA, 20 bp, synthetic construct
  source 1..20: mol_type = other DNA
atttaccacccttggtcccc

SEQ ID NO: 211205 - DNA, 20 bp, synthetic construct
  source 1..20: mol_type = other DNA
catttaccacccttggtccc

SEQ ID NO: 211206 - DNA, 20 bp, synthetic construct
  source 1..20: mol_type = other DNA
ccatttaccacccttggtcc

SEQ ID NO: 211207 - DNA, 20 bp, synthetic construct
  source 1..20: mol_type = other DNA
gccatttaccacccttggtc

SEQ ID NO: 211208 - DNA, 20 bp, synthetic construct
  source 1..20: mol_type = other DNA
agccatttaccacccttggt

SEQ ID NO: 211209 - DNA, 20 bp, synthetic construct
  source 1..20: mol_type = other DNA
gagccatttaccacccttgg

SEQ ID NO: 211210 - DNA, 20 bp, synthetic construct
  source 1..20: mol_type = other DNA
tgagccatttaccacccttg

SEQ ID NO: 211211 - DNA, 20 bp, synthetic construct
  source 1..20: mol_type = other DNA
ctgagccatttaccaccctt

SEQ ID NO: 211212 - DNA, 20 bp, synthetic construct
  source 1..20: mol_type = other DNA
actgagccatttaccaccct

SEQ ID NO: 211213 - DNA, 20 bp, synthetic construct
  source 1..20: mol_type = other DNA
gactgagccatttaccaccc

SEQ ID NO: 211214 - DNA, 20 bp, synthetic construct
  source 1..20: mol_type = other DNA
agactgagccatttaccacc

SEQ ID NO: 211215 - DNA, 20 bp, synthetic construct
  source 1..20: mol_type = other DNA
aagactgagccatttaccac

SEQ ID NO: 211216 - DNA, 20 bp, synthetic construct
  source 1..20: mol_type = other DNA
aaagactgagccatttacca

SEQ ID NO: 211217 - DNA, 20 bp, synthetic construct
  source 1..20: mol_type = other DNA
gaaagactgagccatttacc

SEQ ID NO: 211218 - DNA, 20 bp, synthetic construct
  source 1..20: mol_type = other DNA
tgaaagactgagccatttac

SEQ ID NO: 211219 - DNA, 20 bp, synthetic construct
  source 1..20: mol_type = other DNA
atgaaagactgagccattta

SEQ ID NO: 211220 - DNA, 20 bp, synthetic construct
  source 1..20: mol_type = other DNA
catgaaagactgagccattt

SEQ ID NO: 211221 - DNA, 20 bp, synthetic construct
  source 1..20: mol_type = other DNA
tcatgaaagactgagccatt

SEQ ID NO: 211222 - DNA, 20 bp, synthetic construct
  source 1..20: mol_type = other DNA
atcatgaaagactgagccat

SEQ ID NO: 211223 - DNA, 20 bp, synthetic construct
  source 1..20: mol_type = other DNA
catcatgaaagactgagcca

SEQ ID NO: 211224 - DNA, 20 bp, synthetic construct
  source 1..20: mol_type = other DNA
gcatcatgaaagactgagcc

SEQ ID NO: 211225 - DNA, 20 bp, synthetic construct
  source 1..20: mol_type = other DNA
cgcatcatgaaagactgagc

SEQ ID NO: 211226 - DNA, 20 bp, synthetic construct
  source 1..20: mol_type = other DNA
ccgcatcatgaaagactgag

SEQ ID NO: 211227 - DNA, 20 bp, synthetic construct
  source 1..20: mol_type = other DNA
gccgcatcatgaaagactga

SEQ ID NO: 211228 - DNA, 20 bp, synthetic construct
  source 1..20: mol_type = other DNA
ggccgcatcatgaaagactg

SEQ ID NO: 211229 - DNA, 20 bp, synthetic construct
  source 1..20: mol_type = other DNA
tggccgcatcatgaaagact

SEQ ID NO: 211230 - DNA, 20 bp, synthetic construct
  source 1..20: mol_type = other DNA
gtggccgcatcatgaaagac

SEQ ID NO: 211231 - DNA, 20 bp, synthetic construct
  source 1..20: mol_type = other DNA
tgtggccgcatcatgaaaga

SEQ ID NO: 211232 - DNA, 20 bp, synthetic construct
  source 1..20: mol_type = other DNA
gtgtggccgcatcatgaaag

SEQ ID NO: 211233 - DNA, 20 bp, synthetic construct
  source 1..20: mol_type = other DNA
tgtgtggccgcatcatgaaa

SEQ ID NO: 211234 - DNA, 20 bp, synthetic construct
  source 1..20: mol_type = other DNA
ctgtgtggccgcatcatgaa

SEQ ID NO: 211235 - DNA, 20 bp, synthetic construct
  source 1..20: mol_type = other DNA
gctgtgtggccgcatcatga

SEQ ID NO: 211236 - DNA, 20 bp, synthetic construct
  source 1..20: mol_type = other DNA
tgctgtgtggccgcatcatg

SEQ ID NO: 211237 - DNA, 20 bp, synthetic construct
  source 1..20: mol_type = other DNA
ctgctgtgtggccgcatcat

SEQ ID NO: 211238 - DNA, 20 bp, synthetic construct
  source 1..20: mol_type = other DNA
cctgctgtgtggccgcatca

SEQ ID NO: 211239 - DNA, 20 bp, synthetic construct
  source 1..20: mol_type = other DNA
acctgctgtgtggccgcatc

SEQ ID NO: 211240 - DNA, 20 bp, synthetic construct
  source 1..20: mol_type = other DNA
cacctgctgtgtggccgcat

SEQ ID NO: 211241 - DNA, 20 bp, synthetic construct
  source 1..20: mol_type = other DNA
gcacctgctgtgtggccgca

SEQ ID NO: 211242 - DNA, 20 bp, synthetic construct
  source 1..20: mol_type = other DNA
cgcacctgctgtgtggccgc

SEQ ID NO: 211243 - DNA, 20 bp, synthetic construct
  source 1..20: mol_type = other DNA
gcgcacctgctgtgtggccg

SEQ ID NO: 211244 - DNA, 20 bp, synthetic construct
  source 1..20: mol_type = other DNA
ggcgcacctgctgtgtggcc

SEQ ID NO: 211245 - DNA, 20 bp, synthetic construct
  source 1..20: mol_type = other DNA
tggcgcacctgctgtgtggc

SEQ ID NO: 211246 - DNA, 20 bp, synthetic construct
  source 1..20: mol_type = other DNA
atggcgcacctgctgtgtgg

SEQ ID NO: 211247 - DNA, 20 bp, synthetic construct
  source 1..20: mol_type = other DNA
gatggcgcacctgctgtgtg

SEQ ID NO: 211248 - DNA, 20 bp, synthetic construct
  source 1..20: mol_type = other DNA
ggatggcgcacctgctgtgt

SEQ ID NO: 211249 - DNA, 20 bp, synthetic construct
  source 1..20: mol_type = other DNA
tggatggcgcacctgctgtg

SEQ ID NO: 211250 - DNA, 20 bp, synthetic construct
  source 1..20: mol_type = other DNA
ctggatggcgcacctgctgt

SEQ ID NO: 211251 - DNA, 20 bp, synthetic construct
  source 1..20: mol_type = other DNA
cctggatggcgcacctgctg

SEQ ID NO: 211252 - DNA, 20 bp, synthetic construct
  source 1..20: mol_type = other DNA
acctggatggcgcacctgct

SEQ ID NO: 211253 - DNA, 20 bp, synthetic construct
  source 1..20: mol_type = other DNA
gacctggatggcgcacctgc

SEQ ID NO: 211254 - DNA, 20 bp, synthetic construct
  source 1..20: mol_type = other DNA
ggacctggatggcgcacctg

SEQ ID NO: 211255 - DNA, 20 bp, synthetic construct
  source 1..20: mol_type = other DNA
tggacctggatggcgcacct

SEQ ID NO: 211256 - DNA, 20 bp, synthetic construct
  source 1..20: mol_type = other DNA
atggacctggatggcgcacc

SEQ ID NO: 211257 - DNA, 20 bp, synthetic construct
  source 1..20: mol_type = other DNA
aatggacctggatggcgcac

SEQ ID NO: 211258 - DNA, 20 bp, synthetic construct
  source 1..20: mol_type = other DNA
aaatggacctggatggcgca

SEQ ID NO: 211259 - DNA, 20 bp, synthetic construct
  source 1..20: mol_type = other DNA
gaaatggacctggatggcgc

SEQ ID NO: 211260 - DNA, 20 bp, synthetic construct
  source 1..20: mol_type = other DNA
agaaatggacctggatggcg

SEQ ID NO: 211261 - DNA, 20 bp, synthetic construct
  source 1..20: mol_type = other DNA
aagaaatggacctggatggc

SEQ ID NO: 211262 - DNA, 20 bp, synthetic construct
  source 1..20: mol_type = other DNA
aaagaaatggacctggatgg

SEQ ID NO: 211263 - DNA, 20 bp, synthetic construct
  source 1..20: mol_type = other DNA
gaaagaaatggacctggatg

SEQ ID NO: 211264 - DNA, 20 bp, synthetic construct
  source 1..20: mol_type = other DNA
ggaaagaaatggacctggat

SEQ ID NO: 211265 - DNA, 20 bp, synthetic construct
  source 1..20: mol_type = other DNA
aggaaagaaatggacctgga

SEQ ID NO: 211266 - DNA, 20 bp, synthetic construct
  source 1..20: mol_type = other DNA
aaggaaagaaatggacctgg

SEQ ID NO: 211267 - DNA, 20 bp, synthetic construct
  source 1..20: mol_type = other DNA
gaaggaaagaaatggacctg

SEQ ID NO: 211268 - DNA, 20 bp, synthetic construct
  source 1..20: mol_type = other DNA
ggaaggaaagaaatggacct

SEQ ID NO: 211269 - DNA, 20 bp, synthetic construct
  source 1..20: mol_type = other DNA
aggaaggaaagaaatggacc

SEQ ID NO: 211270 - DNA, 20 bp, synthetic construct
  source 1..20: mol_type = other DNA
aaggaaggaaagaaatggac

SEQ ID NO: 211271 - DNA, 20 bp, synthetic construct
  source 1..20: mol_type = other DNA
aaaggaaggaaagaaatgga

SEQ ID NO: 211272 - DNA, 20 bp, synthetic construct
  source 1..20: mol_type = other DNA
gaaaggaaggaaagaaatgg

SEQ ID NO: 211273 - DNA, 20 bp, synthetic construct
  source 1..20: mol_type = other DNA
ggaaaggaaggaaagaaatg

SEQ ID NO: 211274 - DNA, 20 bp, synthetic construct
  source 1..20: mol_type = other DNA
gggaaaggaaggaaagaaat

SEQ ID NO: 211275 - DNA, 20 bp, synthetic construct
  source 1..20: mol_type = other DNA
ggggaaaggaaggaaagaaa

SEQ ID NO: 211276 - DNA, 20 bp, synthetic construct
  source 1..20: mol_type = other DNA
gggggaaaggaaggaaagaa

SEQ ID NO: 211277 - DNA, 20 bp, synthetic construct
  source 1..20: mol_type = other DNA
tgggggaaaggaaggaaaga

SEQ ID NO: 211278 - DNA, 20 bp, synthetic construct
  source 1..20: mol_type = other DNA
ttgggggaaaggaaggaaag

SEQ ID NO: 211279 - DNA, 20 bp, synthetic construct
  source 1..20: mol_type = other DNA
tttgggggaaaggaaggaaa

SEQ ID NO: 211280 - DNA, 20 bp, synthetic construct
  source 1..20: mol_type = other DNA
atttgggggaaaggaaggaa

SEQ ID NO: 211281 - DNA, 20 bp, synthetic construct
  source 1..20: mol_type = other DNA
gatttgggggaaaggaagga

SEQ ID NO: 211282 - DNA, 20 bp, synthetic construct
  source 1..20: mol_type = other DNA
tgatttgggggaaaggaagg

SEQ ID NO: 211283 - DNA, 20 bp, synthetic construct
  source 1..20: mol_type = other DNA
ttgatttgggggaaaggaag

SEQ ID NO: 211284 - DNA, 20 bp, synthetic construct
  source 1..20: mol_type = other DNA
cttgatttgggggaaaggaa

SEQ ID NO: 211285 - DNA, 20 bp, synthetic construct
  source 1..20: mol_type = other DNA
acttgatttgggggaaagga

SEQ ID NO: 211286 - DNA, 20 bp, synthetic construct
  source 1..20: mol_type = other DNA
aacttgatttgggggaaagg

SEQ ID NO: 211287 - DNA, 20 bp, synthetic construct
  source 1..20: mol_type = other DNA
caacttgatttgggggaaag

SEQ ID NO: 211288 - DNA, 20 bp, synthetic construct
  source 1..20: mol_type = other DNA
acaacttgatttgggggaaa

SEQ ID NO: 211289 - DNA, 20 bp, synthetic construct
  source 1..20: mol_type = other DNA
gacaacttgatttgggggaa

SEQ ID NO: 211290 - DNA, 20 bp, synthetic construct
  source 1..20: mol_type = other DNA
tgacaacttgatttggggga

SEQ ID NO: 211291 - DNA, 20 bp, synthetic construct
  source 1..20: mol_type = other DNA
atgacaacttgatttggggg

SEQ ID NO: 211292 - DNA, 20 bp, synthetic construct
  source 1..20: mol_type = other DNA
aatgacaacttgatttgggg

SEQ ID NO: 211293 - DNA, 20 bp, synthetic construct
  source 1..20: mol_type = other DNA
taatgacaacttgatttggg

SEQ ID NO: 211294 - DNA, 20 bp, synthetic construct
  source 1..20: mol_type = other DNA
ttaatgacaacttgatttgg

SEQ ID NO: 211295 - DNA, 20 bp, synthetic construct
  source 1..20: mol_type = other DNA
tttaatgacaacttgatttg

SEQ ID NO: 211296 - DNA, 20 bp, synthetic construct
  source 1..20: mol_type = other DNA
ctttaatgacaacttgattt

SEQ ID NO: 211297 - DNA, 20 bp, synthetic construct
  source 1..20: mol_type = other DNA
actttaatgacaacttgatt

SEQ ID NO: 211298 - DNA, 20 bp, synthetic construct
  source 1..20: mol_type = other DNA
tactttaatgacaacttgat

SEQ ID NO: 211299 - DNA, 20 bp, synthetic construct
  source 1..20: mol_type = other DNA
gtactttaatgacaacttga

SEQ ID NO: 211300 - DNA, 20 bp, synthetic construct
  source 1..20: mol_type = other DNA
agtactttaatgacaacttg

SEQ ID NO: 211301 - DNA, 20 bp, synthetic construct
  source 1..20: mol_type = other DNA
tagtactttaatgacaactt

SEQ ID NO: 211302 - DNA, 20 bp, synthetic construct
  source 1..20: mol_type = other DNA
ctagtactttaatgacaact

SEQ ID NO: 211303 - DNA, 20 bp, synthetic construct
  source 1..20: mol_type = other DNA
actagtactttaatgacaac

SEQ ID NO: 211304 - DNA, 20 bp, synthetic construct
  source 1..20: mol_type = other DNA
gactagtactttaatgacaa

SEQ ID NO: 211305 - DNA, 20 bp, synthetic construct
  source 1..20: mol_type = other DNA
ggactagtactttaatgaca

SEQ ID NO: 211306 - DNA, 20 bp, synthetic construct
  source 1..20: mol_type = other DNA
tggactagtactttaatgac

SEQ ID NO: 211307 - DNA, 20 bp, synthetic construct
  source 1..20: mol_type = other DNA
gtggactagtactttaatga

SEQ ID NO: 211308 - DNA, 20 bp, synthetic construct
  source 1..20: mol_type = other DNA
tgtggactagtactttaatg

SEQ ID NO: 211309 - DNA, 20 bp, synthetic construct
  source 1..20: mol_type = other DNA
atgtggactagtactttaat

SEQ ID NO: 211310 - DNA, 20 bp, synthetic construct
  source 1..20: mol_type = other DNA
aatgtggactagtactttaa

SEQ ID NO: 211311 - DNA, 20 bp, synthetic construct
  source 1..20: mol_type = other DNA
taatgtggactagtacttta

SEQ ID NO: 211312 - DNA, 20 bp, synthetic construct
  source 1..20: mol_type = other DNA
ttaatgtggactagtacttt

SEQ ID NO: 211313 - DNA, 20 bp, synthetic construct
  source 1..20: mol_type = other DNA
attaatgtggactagtactt

SEQ ID NO: 211314 - DNA, 20 bp, synthetic construct
  source 1..20: mol_type = other DNA
cattaatgtggactagtact

SEQ ID NO: 211315 - DNA, 20 bp, synthetic construct
  source 1..20: mol_type = other DNA
tcattaatgtggactagtac

SEQ ID NO: 211316 - DNA, 20 bp, synthetic construct
  source 1..20: mol_type = other DNA
ttcattaatgtggactagta

SEQ ID NO: 211317 - DNA, 20 bp, synthetic construct
  source 1..20: mol_type = other DNA
tttcattaatgtggactagt

SEQ ID NO: 211318 - DNA, 20 bp, synthetic construct
  source 1..20: mol_type = other DNA
atttcattaatgtggactag

SEQ ID NO: 211319 - DNA, 20 bp, synthetic construct
  source 1..20: mol_type = other DNA
gatttcattaatgtggacta

SEQ ID NO: 211320 - DNA, 20 bp, synthetic construct
  source 1..20: mol_type = other DNA
tgatttcattaatgtggact

SEQ ID NO: 211321 - DNA, 20 bp, synthetic construct
  source 1..20: mol_type = other DNA
ttgatttcattaatgtggac

SEQ ID NO: 211322 - DNA, 20 bp, synthetic construct
  source 1..20: mol_type = other DNA
gttgatttcattaatgtgga

SEQ ID NO: 211323 - DNA, 20 bp, synthetic construct
  source 1..20: mol_type = other DNA
agttgatttcattaatgtgg

SEQ ID NO: 211324 - DNA, 20 bp, synthetic construct
  source 1..20: mol_type = other DNA
cagttgatttcattaatgtg

SEQ ID NO: 211325 - DNA, 20 bp, synthetic construct
  source 1..20: mol_type = other DNA
acagttgatttcattaatgt

SEQ ID NO: 211326 - DNA, 20 bp, synthetic construct
  source 1..20: mol_type = other DNA
tacagttgatttcattaatg

SEQ ID NO: 211327 - DNA, 20 bp, synthetic construct
  source 1..20: mol_type = other DNA
atacagttgatttcattaat

SEQ ID NO: 211328 - DNA, 20 bp, synthetic construct
  source 1..20: mol_type = other DNA
aatacagttgatttcattaa

SEQ ID NO: 211329 - DNA, 20 bp, synthetic construct
  source 1..20: mol_type = other DNA
taatacagttgatttcatta

SEQ ID NO: 211330 - DNA, 20 bp, synthetic construct
  source 1..20: mol_type = other DNA
ttaatacagttgatttcatt

SEQ ID NO: 211331 - DNA, 20 bp, synthetic construct
  source 1..20: mol_type = other DNA
attaatacagttgatttcat

SEQ ID NO: 211332 - DNA, 20 bp, synthetic construct
  source 1..20: mol_type = other DNA
aattaatacagttgatttca

SEQ ID NO: 211333 - DNA, 20 bp, synthetic construct
  source 1..20: mol_type = other DNA
aaattaatacagttgatttc

SEQ ID NO: 211334 - DNA, 20 bp, synthetic construct
  source 1..20: mol_type = other DNA
aaaattaatacagttgattt

SEQ ID NO: 211335 - DNA, 20 bp, synthetic construct
  source 1..20: mol_type = other DNA
gaaaattaatacagttgatt

SEQ ID NO: 211336 - DNA, 20 bp, synthetic construct
  source 1..20: mol_type = other DNA
agaaaattaatacagttgat

SEQ ID NO: 211337 - DNA, 20 bp, synthetic construct
  source 1..20: mol_type = other DNA
tagaaaattaatacagttga

SEQ ID NO: 211338 - DNA, 20 bp, synthetic construct
  source 1..20: mol_type = other DNA
atagaaaattaatacagttg

SEQ ID NO: 211339 - DNA, 20 bp, synthetic construct
  source 1..20: mol_type = other DNA
aatagaaaattaatacagtt

SEQ ID NO: 211340 - DNA, 20 bp, synthetic construct
  source 1..20: mol_type = other DNA
aaatagaaaattaatacagt

SEQ ID NO: 211341 - DNA, 20 bp, synthetic construct
  source 1..20: mol_type = other DNA
caaatagaaaattaatacag

SEQ ID NO: 211342 - DNA, 20 bp, synthetic construct
  source 1..20: mol_type = other DNA
gcaaatagaaaattaataca

SEQ ID NO: 211343 - DNA, 20 bp, synthetic construct
  source 1..20: mol_type = other DNA
agcaaatagaaaattaatac

SEQ ID NO: 211344 - DNA, 20 bp, synthetic construct
  source 1..20: mol_type = other DNA
cagcaaatagaaaattaata

SEQ ID NO: 211345 - DNA, 20 bp, synthetic construct
  source 1..20: mol_type = other DNA
gcagcaaatagaaaattaat

SEQ ID NO: 211346 - DNA, 20 bp, synthetic construct
  source 1..20: mol_type = other DNA
agcagcaaatagaaaattaa

SEQ ID NO: 211347 - DNA, 20 bp, synthetic construct
  source 1..20: mol_type = other DNA
tagcagcaaatagaaaatta

SEQ ID NO: 211348 - DNA, 20 bp, synthetic construct
  source 1..20: mol_type = other DNA
atagcagcaaatagaaaatt

SEQ ID NO: 211349 - DNA, 20 bp, synthetic construct
  source 1..20: mol_type = other DNA
tatagcagcaaatagaaaat

SEQ ID NO: 211350 - DNA, 20 bp, synthetic construct
  source 1..20: mol_type = other DNA
ttatagcagcaaatagaaaa

SEQ ID NO: 211351 - DNA, 20 bp, synthetic construct
  source 1..20: mol_type = other DNA
attatagcagcaaatagaaa

SEQ ID NO: 211352 - DNA, 20 bp, synthetic construct
  source 1..20: mol_type = other DNA
tattatagcagcaaatagaa

SEQ ID NO: 211353 - DNA, 20 bp, synthetic construct
  source 1..20: mol_type = other DNA
ttattatagcagcaaataga

SEQ ID NO: 211354 - DNA, 20 bp, synthetic construct
  source 1..20: mol_type = other DNA
tttattatagcagcaaatag

SEQ ID NO: 211355 - DNA, 20 bp, synthetic construct
  source 1..20: mol_type = other DNA
atttattatagcagcaaata

SEQ ID NO: 211356 - DNA, 20 bp, synthetic construct
  source 1..20: mol_type = other DNA
gatttattatagcagcaaat

SEQ ID NO: 211357 - DNA, 20 bp, synthetic construct
  source 1..20: mol_type = other DNA
tgatttattatagcagcaaa

SEQ ID NO: 211358 - DNA, 20 bp, synthetic construct
  source 1..20: mol_type = other DNA
atgatttattatagcagcaa

SEQ ID NO: 211359 - DNA, 20 bp, synthetic construct
  source 1..20: mol_type = other DNA
gatgatttattatagcagca

SEQ ID NO: 211360 - DNA, 20 bp, synthetic construct
  source 1..20: mol_type = other DNA
tgatgatttattatagcagc

SEQ ID NO: 211361 - DNA, 20 bp, synthetic construct
  source 1..20: mol_type = other DNA
ctgatgatttattatagcag

SEQ ID NO: 211362 - DNA, 20 bp, synthetic construct
  source 1..20: mol_type = other DNA
tctgatgatttattatagca

SEQ ID NO: 211363 - DNA, 20 bp, synthetic construct
  source 1..20: mol_type = other DNA
ttctgatgatttattatagc

SEQ ID NO: 211364 - DNA, 20 bp, synthetic construct
  source 1..20: mol_type = other DNA
tttctgatgatttattatag

SEQ ID NO: 211365 - DNA, 20 bp, synthetic construct
  source 1..20: mol_type = other DNA
atttctgatgatttattata

SEQ ID NO: 211366 - DNA, 20 bp, synthetic construct
  source 1..20: mol_type = other DNA
aatttctgatgatttattat

SEQ ID NO: 211367 - DNA, 20 bp, synthetic construct
  source 1..20: mol_type = other DNA
aaatttctgatgatttatta

SEQ ID NO: 211368 - DNA, 20 bp, synthetic construct
  source 1..20: mol_type = other DNA
taaatttctgatgatttatt

SEQ ID NO: 211369 - DNA, 20 bp, synthetic construct
  source 1..20: mol_type = other DNA
ctaaatttctgatgatttat

SEQ ID NO: 211370 - DNA, 20 bp, synthetic construct
  source 1..20: mol_type = other DNA
actaaatttctgatgattta

SEQ ID NO: 211371 - DNA, 20 bp, synthetic construct
  source 1..20: mol_type = other DNA
cactaaatttctgatgattt

SEQ ID NO: 211372 - DNA, 20 bp, synthetic construct
  source 1..20: mol_type = other DNA
ccactaaatttctgatgatt

SEQ ID NO: 211373 - DNA, 20 bp, synthetic construct
  source 1..20: mol_type = other DNA
gccactaaatttctgatgat

SEQ ID NO: 211374 - DNA, 20 bp, synthetic construct
  source 1..20: mol_type = other DNA
agccactaaatttctgatga

SEQ ID NO: 211375 - DNA, 20 bp, synthetic construct
  source 1..20: mol_type = other DNA
aagccactaaatttctgatg

SEQ ID NO: 211376 - DNA, 20 bp, synthetic construct
  source 1..20: mol_type = other DNA
taagccactaaatttctgat

SEQ ID NO: 211377 - DNA, 20 bp, synthetic construct
  source 1..20: mol_type = other DNA
ttaagccactaaatttctga

SEQ ID NO: 211378 - DNA, 20 bp, synthetic construct
  source 1..20: mol_type = other DNA
tttaagccactaaatttctg

SEQ ID NO: 211379 - DNA, 20 bp, synthetic construct
  source 1..20: mol_type = other DNA
gtttaagccactaaatttct

SEQ ID NO: 211380 - DNA, 20 bp, synthetic construct
  source 1..20: mol_type = other DNA
ggtttaagccactaaatttc

SEQ ID NO: 211381 - DNA, 20 bp, synthetic construct
  source 1..20: mol_type = other DNA
tggtttaagccactaaattt

SEQ ID NO: 211382 - DNA, 20 bp, synthetic construct
  source 1..20: mol_type = other DNA
ttggtttaagccactaaatt

SEQ ID NO: 211383 - DNA, 20 bp, synthetic construct
  source 1..20: mol_type = other DNA
gttggtttaagccactaaat

SEQ ID NO: 211384 - DNA, 20 bp, synthetic construct
  source 1..20: mol_type = other DNA
tgttggtttaagccactaaa

SEQ ID NO: 211385 - DNA, 20 bp, synthetic construct
  source 1..20: mol_type = other DNA
gtgttggtttaagccactaa

SEQ ID NO: 211386 - DNA, 20 bp, synthetic construct
  source 1..20: mol_type = other DNA
tgtgttggtttaagccacta

SEQ ID NO: 211387 - DNA, 20 bp, synthetic construct
  source 1..20: mol_type = other DNA
ttgtgttggtttaagccact

SEQ ID NO: 211388 - DNA, 20 bp, synthetic construct
  source 1..20: mol_type = other DNA
tttgtgttggtttaagccac

SEQ ID NO: 211389 - DNA, 20 bp, synthetic construct
  source 1..20: mol_type = other DNA
atttgtgttggtttaagcca

SEQ ID NO: 211390 - DNA, 20 bp, synthetic construct
  source 1..20: mol_type = other DNA
catttgtgttggtttaagcc

SEQ ID NO: 211391 - DNA, 20 bp, synthetic construct
  source 1..20: mol_type = other DNA
acatttgtgttggtttaagc

SEQ ID NO: 211392 - DNA, 20 bp, synthetic construct
  source 1..20: mol_type = other DNA
tacatttgtgttggtttaag

SEQ ID NO: 211393 - DNA, 20 bp, synthetic construct
  source 1..20: mol_type = other DNA
atacatttgtgttggtttaa

SEQ ID NO: 211394 - DNA, 20 bp, synthetic construct
  source 1..20: mol_type = other DNA
aatacatttgtgttggttta

SEQ ID NO: 211395 - DNA, 20 bp, synthetic construct
  source 1..20: mol_type = other DNA
taatacatttgtgttggttt

SEQ ID NO: 211396 - DNA, 20 bp, synthetic construct
  source 1..20: mol_type = other DNA
gtaatacatttgtgttggtt

SEQ ID NO: 211397 - DNA, 20 bp, synthetic construct
  source 1..20: mol_type = other DNA
ggtaatacatttgtgttggt

SEQ ID NO: 211398 - DNA, 20 bp, synthetic construct
  source 1..20: mol_type = other DNA
aggtaatacatttgtgttgg

SEQ ID NO: 211399 - DNA, 20 bp, synthetic construct
  source 1..20: mol_type = other DNA
aaggtaatacatttgtgttg

SEQ ID NO: 211400 - DNA, 20 bp, synthetic construct
  source 1..20: mol_type = other DNA
taaggtaatacatttgtgtt

SEQ ID NO: 211401 - DNA, 20 bp, synthetic construct
  source 1..20: mol_type = other DNA
gtaaggtaatacatttgtgt

SEQ ID NO: 211402 - DNA, 20 bp, synthetic construct
  source 1..20: mol_type = other DNA
tgtaaggtaatacatttgtg

SEQ ID NO: 211403 - DNA, 20 bp, synthetic construct
  source 1..20: mol_type = other DNA
ctgtaaggtaatacatttgt

SEQ ID NO: 211404 - DNA, 20 bp, synthetic construct
  source 1..20: mol_type = other DNA
actgtaaggtaatacatttg

SEQ ID NO: 211405 - DNA, 20 bp, synthetic construct
  source 1..20: mol_type = other DNA
aactgtaaggtaatacattt

SEQ ID NO: 211406 - DNA, 20 bp, synthetic construct
  source 1..20: mol_type = other DNA
gaactgtaaggtaatacatt

SEQ ID NO: 211407 - DNA, 20 bp, synthetic construct
  source 1..20: mol_type = other DNA
agaactgtaaggtaatacat

SEQ ID NO: 211408 - DNA, 20 bp, synthetic construct
  source 1..20: mol_type = other DNA
cagaactgtaaggtaataca

SEQ ID NO: 211409 - DNA, 20 bp, synthetic construct
  source 1..20: mol_type = other DNA
ccagaactgtaaggtaatac

SEQ ID NO: 211410 - DNA, 20 bp, synthetic construct
  source 1..20: mol_type = other DNA
tccagaactgtaaggtaata

SEQ ID NO: 211411 - DNA, 20 bp, synthetic construct
  source 1..20: mol_type = other DNA
ctccagaactgtaaggtaat

SEQ ID NO: 211412 - DNA, 20 bp, synthetic construct
  source 1..20: mol_type = other DNA
cctccagaactgtaaggtaa

SEQ ID NO: 211413 - DNA, 20 bp, synthetic construct
  source 1..20: mol_type = other DNA
gcctccagaactgtaaggta

SEQ ID NO: 211414 - DNA, 20 bp, synthetic construct
  source 1..20: mol_type = other DNA
ggcctccagaactgtaaggt

SEQ ID NO: 211415 - DNA, 20 bp, synthetic construct
  source 1..20: mol_type = other DNA
tggcctccagaactgtaagg

SEQ ID NO: 211416 - DNA, 20 bp, synthetic construct
  source 1..20: mol_type = other DNA
ctggcctccagaactgtaag

SEQ ID NO: 211417 - DNA, 20 bp, synthetic construct
  source 1..20: mol_type = other DNA
tctggcctccagaactgtaa

SEQ ID NO: 211418 - DNA, 20 bp, synthetic construct
  source 1..20: mol_type = other DNA
ttctggcctccagaactgta

SEQ ID NO: 211419 - DNA, 20 bp, synthetic construct
  source 1..20: mol_type = other DNA
cttctggcctccagaactgt

SEQ ID NO: 211420 - DNA, 20 bp, synthetic construct
  source 1..20: mol_type = other DNA
gcttctggcctccagaactg

SEQ ID NO: 211421 - DNA, 20 bp, synthetic construct
  source 1..20: mol_type = other DNA
ggcttctggcctccagaact

SEQ ID NO: 211422 - DNA, 20 bp, synthetic construct
  source 1..20: mol_type = other DNA
gggcttctggcctccagaac

SEQ ID NO: 211423 - DNA, 20 bp, synthetic construct
  source 1..20: mol_type = other DNA
agggcttctggcctccagaa

SEQ ID NO: 211424 - DNA, 20 bp, synthetic construct
  source 1..20: mol_type = other DNA
gagggcttctggcctccaga

SEQ ID NO: 211425 - DNA, 20 bp, synthetic construct
  source 1..20: mol_type = other DNA
ggagggcttctggcctccag

SEQ ID NO: 211426 - DNA, 20 bp, synthetic construct
  source 1..20: mol_type = other DNA
tggagggcttctggcctcca

SEQ ID NO: 211427 - DNA, 20 bp, synthetic construct
  source 1..20: mol_type = other DNA
atggagggcttctggcctcc

SEQ ID NO: 211428 - DNA, 20 bp, synthetic construct
  source 1..20: mol_type = other DNA
tatggagggcttctggcctc

SEQ ID NO: 211429 - DNA, 20 bp, synthetic construct
  source 1..20: mol_type = other DNA
ctatggagggcttctggcct

SEQ ID NO: 211430 - DNA, 20 bp, synthetic construct
  source 1..20: mol_type = other DNA
cctatggagggcttctggcc

SEQ ID NO: 211431 - DNA, 20 bp, synthetic construct
  source 1..20: mol_type = other DNA
acctatggagggcttctggc

SEQ ID NO: 211432 - DNA, 20 bp, synthetic construct
  source 1..20: mol_type = other DNA
cacctatggagggcttctgg

SEQ ID NO: 211433 - DNA, 20 bp, synthetic construct
  source 1..20: mol_type = other DNA
acacctatggagggcttctg

SEQ ID NO: 211434 - DNA, 20 bp, synthetic construct
  source 1..20: mol_type = other DNA
gacacctatggagggcttct

SEQ ID NO: 211435 - DNA, 20 bp, synthetic construct
  source 1..20: mol_type = other DNA
tgacacctatggagggcttc

SEQ ID NO: 211436 - DNA, 20 bp, synthetic construct
  source 1..20: mol_type = other DNA
gtgacacctatggagggctt

SEQ ID NO: 211437 - DNA, 20 bp, synthetic construct
  source 1..20: mol_type = other DNA
agtgacacctatggagggct

SEQ ID NO: 211438 - DNA, 20 bp, synthetic construct
  source 1..20: mol_type = other DNA
cagtgacacctatggagggc

SEQ ID NO: 211439 - DNA, 20 bp, synthetic construct
  source 1..20: mol_type = other DNA
ccagtgacacctatggaggg

SEQ ID NO: 211440 - DNA, 20 bp, synthetic construct
  source 1..20: mol_type = other DNA
cccagtgacacctatggagg

SEQ ID NO: 211441 - DNA, 20 bp, synthetic construct
  source 1..20: mol_type = other DNA
gcccagtgacacctatggag

SEQ ID NO: 211442 - DNA, 20 bp, synthetic construct
  source 1..20: mol_type = other DNA
agcccagtgacacctatgga

SEQ ID NO: 211443 - DNA, 20 bp, synthetic construct
  source 1..20: mol_type = other DNA
cagcccagtgacacctatgg

SEQ ID NO: 211444 - DNA, 20 bp, synthetic construct
  source 1..20: mol_type = other DNA
tcagcccagtgacacctatg

SEQ ID NO: 211445 - DNA, 20 bp, synthetic construct
  source 1..20: mol_type = other DNA
ttcagcccagtgacacctat

SEQ ID NO: 211446 - DNA, 20 bp, synthetic construct
  source 1..20: mol_type = other DNA
tttcagcccagtgacaccta

SEQ ID NO: 211447 - DNA, 20 bp, synthetic construct
  source 1..20: mol_type = other DNA
atttcagcccagtgacacct

SEQ ID NO: 211448 - DNA, 20 bp, synthetic construct
  source 1..20: mol_type = other DNA
gatttcagcccagtgacacc

SEQ ID NO: 211449 - DNA, 20 bp, synthetic construct
  source 1..20: mol_type = other DNA
tgatttcagcccagtgacac

SEQ ID NO: 211450 - DNA, 20 bp, synthetic construct
  source 1..20: mol_type = other DNA
ttgatttcagcccagtgaca

SEQ ID NO: 211451 - DNA, 20 bp, synthetic construct
  source 1..20: mol_type = other DNA
cttgatttcagcccagtgac

SEQ ID NO: 211452 - DNA, 20 bp, synthetic construct
  source 1..20: mol_type = other DNA
ccttgatttcagcccagtga

SEQ ID NO: 211453 - DNA, 20 bp, synthetic construct
  source 1..20: mol_type = other DNA
accttgatttcagcccagtg

SEQ ID NO: 211454 - DNA, 20 bp, synthetic construct
  source 1..20: mol_type = other DNA
aaccttgatttcagcccagt

SEQ ID NO: 211455 - DNA, 20 bp, synthetic construct
  source 1..20: mol_type = other DNA
aaaccttgatttcagcccag

SEQ ID NO: 211456 - DNA, 20 bp, synthetic construct
  source 1..20: mol_type = other DNA
aaaaccttgatttcagccca

SEQ ID NO: 211457 - DNA, 20 bp, synthetic construct
  source 1..20: mol_type = other DNA
caaaaccttgatttcagccc

SEQ ID NO: 211458 - DNA, 20 bp, synthetic construct
  source 1..20: mol_type = other DNA
ccaaaaccttgatttcagcc

SEQ ID NO: 211459 - DNA, 20 bp, synthetic construct
  source 1..20: mol_type = other DNA
gccaaaaccttgatttcagc

SEQ ID NO: 211460 - DNA, 20 bp, synthetic construct
  source 1..20: mol_type = other DNA
tgccaaaaccttgatttcag

SEQ ID NO: 211461 - DNA, 20 bp, synthetic construct
  source 1..20: mol_type = other DNA
ttgccaaaaccttgatttca

SEQ ID NO: 211462 - DNA, 20 bp, synthetic construct
  source 1..20: mol_type = other DNA
cttgccaaaaccttgatttc

SEQ ID NO: 211463 - DNA, 20 bp, synthetic construct
  source 1..20: mol_type = other DNA
ccttgccaaaaccttgattt

SEQ ID NO: 211464 - DNA, 20 bp, synthetic construct
  source 1..20: mol_type = other DNA
accttgccaaaaccttgatt

SEQ ID NO: 211465 - DNA, 20 bp, synthetic construct
  source 1..20: mol_type = other DNA
aaccttgccaaaaccttgat

SEQ ID NO: 211466 - DNA, 20 bp, synthetic construct
  source 1..20: mol_type = other DNA
caaccttgccaaaaccttga

SEQ ID NO: 211467 - DNA, 20 bp, synthetic construct
  source 1..20: mol_type = other DNA
gcaaccttgccaaaaccttg

SEQ ID NO: 211468 - DNA, 20 bp, synthetic construct
  source 1..20: mol_type = other DNA
cgcaaccttgccaaaacctt

SEQ ID NO: 211469 - DNA, 20 bp, synthetic construct
  source 1..20: mol_type = other DNA
ccgcaaccttgccaaaacct

SEQ ID NO: 211470 - DNA, 20 bp, synthetic construct
  source 1..20: mol_type = other DNA
accgcaaccttgccaaaacc

SEQ ID NO: 211471 - DNA, 20 bp, synthetic construct
  source 1..20: mol_type = other DNA
gaccgcaaccttgccaaaac

SEQ ID NO: 211472 - DNA, 20 bp, synthetic construct
  source 1..20: mol_type = other DNA
ggaccgcaaccttgccaaaa

SEQ ID NO: 211473 - DNA, 20 bp, synthetic construct
  source 1..20: mol_type = other DNA
aggaccgcaaccttgccaaa

SEQ ID NO: 211474 - DNA, 20 bp, synthetic construct
  source 1..20: mol_type = other DNA
aaggaccgcaaccttgccaa

SEQ ID NO: 211475 - DNA, 20 bp, synthetic construct
  source 1..20: mol_type = other DNA
aaaggaccgcaaccttgcca

SEQ ID NO: 211476 - DNA, 20 bp, synthetic construct
  source 1..20: mol_type = other DNA
gaaaggaccgcaaccttgcc

SEQ ID NO: 211477 - DNA, 20 bp, synthetic construct
  source 1..20: mol_type = other DNA
agaaaggaccgcaaccttgc

SEQ ID NO: 211478 - DNA, 20 bp, synthetic construct
  source 1..20: mol_type = other DNA
cagaaaggaccgcaaccttg

SEQ ID NO: 211479 - DNA, 20 bp, synthetic construct
  source 1..20: mol_type = other DNA
ccagaaaggaccgcaacctt

SEQ ID NO: 211480 - DNA, 20 bp, synthetic construct
  source 1..20: mol_type = other DNA
tccagaaaggaccgcaacct

SEQ ID NO: 211481 - DNA, 20 bp, synthetic construct
  source 1..20: mol_type = other DNA
ctccagaaaggaccgcaacc

SEQ ID NO: 211482 - DNA, 20 bp, synthetic construct
  source 1..20: mol_type = other DNA
cctccagaaaggaccgcaac

SEQ ID NO: 211483 - DNA, 20 bp, synthetic construct
  source 1..20: mol_type = other DNA
ccctccagaaaggaccgcaa

SEQ ID NO: 211484 - DNA, 20 bp, synthetic construct
  source 1..20: mol_type = other DNA
accctccagaaaggaccgca

SEQ ID NO: 211485 - DNA, 20 bp, synthetic construct
  source 1..20: mol_type = other DNA
gaccctccagaaaggaccgc

SEQ ID NO: 211486 - DNA, 20 bp, synthetic construct
  source 1..20: mol_type = other DNA
ggaccctccagaaaggaccg

SEQ ID NO: 211487 - DNA, 20 bp, synthetic construct
  source 1..20: mol_type = other DNA
tggaccctccagaaaggacc

SEQ ID NO: 211488 - DNA, 20 bp, synthetic construct
  source 1..20: mol_type = other DNA
ctggaccctccagaaaggac

SEQ ID NO: 211489 - DNA, 20 bp, synthetic construct
  source 1..20: mol_type = other DNA
cctggaccctccagaaagga

SEQ ID NO: 211490 - DNA, 20 bp, synthetic construct
  source 1..20: mol_type = other DNA
ccctggaccctccagaaagg

SEQ ID NO: 211491 - DNA, 20 bp, synthetic construct
  source 1..20: mol_type = other DNA
cccctggaccctccagaaag

SEQ ID NO: 211492 - DNA, 20 bp, synthetic construct
  source 1..20: mol_type = other DNA
tcccctggaccctccagaaa

SEQ ID NO: 211493 - DNA, 20 bp, synthetic construct
  source 1..20: mol_type = other DNA
ctcccctggaccctccagaa

SEQ ID NO: 211494 - DNA, 20 bp, synthetic construct
  source 1..20: mol_type = other DNA
tctcccctggaccctccaga

SEQ ID NO: 211495 - DNA, 20 bp, synthetic construct
  source 1..20: mol_type = other DNA
ttctcccctggaccctccag

SEQ ID NO: 211496 - DNA, 20 bp, synthetic construct
  source 1..20: mol_type = other DNA
attctcccctggaccctcca

SEQ ID NO: 211497 - DNA, 20 bp, synthetic construct
  source 1..20: mol_type = other DNA
gattctcccctggaccctcc

SEQ ID NO: 211498 - DNA, 20 bp, synthetic construct
  source 1..20: mol_type = other DNA
ggattctcccctggaccctc

SEQ ID NO: 211499 - DNA, 20 bp, synthetic construct
  source 1..20: mol_type = other DNA
tggattctcccctggaccct

SEQ ID NO: 211500 - DNA, 20 bp, synthetic construct
  source 1..20: mol_type = other DNA
atggattctcccctggaccc

SEQ ID NO: 211501 - DNA, 20 bp, synthetic construct
  source 1..20: mol_type = other DNA
aatggattctcccctggacc

SEQ ID NO: 211502 - DNA, 20 bp, synthetic construct
  source 1..20: mol_type = other DNA
aaatggattctcccctggac

SEQ ID NO: 211503 - DNA, 20 bp, synthetic construct
  source 1..20: mol_type = other DNA
aaaatggattctcccctgga

SEQ ID NO: 211504 - DNA, 20 bp, synthetic construct
  source 1..20: mol_type = other DNA
gaaaatggattctcccctgg

SEQ ID NO: 211505 - DNA, 20 bp, synthetic construct
  source 1..20: mol_type = other DNA
agaaaatggattctcccctg

SEQ ID NO: 211506 - DNA, 20 bp, synthetic construct
  source 1..20: mol_type = other DNA
aagaaaatggattctcccct

SEQ ID NO: 211507 - DNA, 20 bp, synthetic construct
  source 1..20: mol_type = other DNA
gaagaaaatggattctcccc

SEQ ID NO: 211508 - DNA, 20 bp, synthetic construct
  source 1..20: mol_type = other DNA
ggaagaaaatggattctccc

SEQ ID NO: 211509 - DNA, 20 bp, synthetic construct
  source 1..20: mol_type = other DNA
aggaagaaaatggattctcc

SEQ ID NO: 211510 - DNA, 20 bp, synthetic construct
  source 1..20: mol_type = other DNA
aaggaagaaaatggattctc

SEQ ID NO: 211511 - DNA, 20 bp, synthetic construct
  source 1..20: mol_type = other DNA
aaaggaagaaaatggattct

SEQ ID NO: 211512 - DNA, 20 bp, synthetic construct
  source 1..20: mol_type = other DNA
aaaaggaagaaaatggattc

SEQ ID NO: 211513 - DNA, 20 bp, synthetic construct
  source 1..20: mol_type = other DNA
aaaaaggaagaaaatggatt

SEQ ID NO: 211514 - DNA, 20 bp, synthetic construct
  source 1..20: mol_type = other DNA
gaaaaaggaagaaaatggat

SEQ ID NO: 211515 - DNA, 20 bp, synthetic construct
  source 1..20: mol_type = other DNA
ggaaaaaggaagaaaatgga

SEQ ID NO: 211516 - DNA, 20 bp, synthetic construct
  source 1..20: mol_type = other DNA
tggaaaaaggaagaaaatgg

SEQ ID NO: 211517 - DNA, 20 bp, synthetic construct
  source 1..20: mol_type = other DNA
ctggaaaaaggaagaaaatg

SEQ ID NO: 211518 - DNA, 20 bp, synthetic construct
  source 1..20: mol_type = other DNA
gctggaaaaaggaagaaaat

SEQ ID NO: 211519 - DNA, 20 bp, synthetic construct
  source 1..20: mol_type = other DNA
agctggaaaaaggaagaaaa

SEQ ID NO: 211520 - DNA, 20 bp, synthetic construct
  source 1..20: mol_type = other DNA
aagctggaaaaaggaagaaa

SEQ ID NO: 211521 - DNA, 20 bp, synthetic construct
  source 1..20: mol_type = other DNA
gaagctggaaaaaggaagaa

SEQ ID NO: 211522 - DNA, 20 bp, synthetic construct
  source 1..20: mol_type = other DNA
agaagctggaaaaaggaaga

SEQ ID NO: 211523 - DNA, 20 bp, synthetic construct
  source 1..20: mol_type = other DNA
tagaagctggaaaaaggaag

SEQ ID NO: 211524 - DNA, 20 bp, synthetic construct
  source 1..20: mol_type = other DNA
ttagaagctggaaaaaggaa

SEQ ID NO: 211525 - DNA, 20 bp, synthetic construct
  source 1..20: mol_type = other DNA
tttagaagctggaaaaagga

SEQ ID NO: 211526 - DNA, 20 bp, synthetic construct
  source 1..20: mol_type = other DNA
ctttagaagctggaaaaagg

SEQ ID NO: 211527 - DNA, 20 bp, synthetic construct
  source 1..20: mol_type = other DNA
cctttagaagctggaaaaag

SEQ ID NO: 211528 - DNA, 20 bp, synthetic construct
  source 1..20: mol_type = other DNA
acctttagaagctggaaaaa

SEQ ID NO: 211529 - DNA, 20 bp, synthetic construct
  source 1..20: mol_type = other DNA
aacctttagaagctggaaaa

SEQ ID NO: 211530 - DNA, 20 bp, synthetic construct
  source 1..20: mol_type = other DNA
aaacctttagaagctggaaa

SEQ ID NO: 211531 - DNA, 20 bp, synthetic construct
  source 1..20: mol_type = other DNA
gaaacctttagaagctggaa

SEQ ID NO: 211532 - DNA, 20 bp, synthetic construct
  source 1..20: mol_type = other DNA
tgaaacctttagaagctgga

SEQ ID NO: 211533 - DNA, 20 bp, synthetic construct
  source 1..20: mol_type = other DNA
atgaaacctttagaagctgg

SEQ ID NO: 211534 - DNA, 20 bp, synthetic construct
  source 1..20: mol_type = other DNA
catgaaacctttagaagctg

SEQ ID NO: 211535 - DNA, 20 bp, synthetic construct
  source 1..20: mol_type = other DNA
gcatgaaacctttagaagct

SEQ ID NO: 211536 - DNA, 20 bp, synthetic construct
  source 1..20: mol_type = other DNA
tgcatgaaacctttagaagc

SEQ ID NO: 211537 - DNA, 20 bp, synthetic construct
  source 1..20: mol_type = other DNA
atgcatgaaacctttagaag

SEQ ID NO: 211538 - DNA, 20 bp, synthetic construct
  source 1..20: mol_type = other DNA
aatgcatgaaacctttagaa

SEQ ID NO: 211539 - DNA, 20 bp, synthetic construct
  source 1..20: mol_type = other DNA
gaatgcatgaaacctttaga

SEQ ID NO: 211540 - DNA, 20 bp, synthetic construct
  source 1..20: mol_type = other DNA
ggaatgcatgaaacctttag

SEQ ID NO: 211541 - DNA, 20 bp, synthetic construct
  source 1..20: mol_type = other DNA
aggaatgcatgaaaccttta

SEQ ID NO: 211542 - DNA, 20 bp, synthetic construct
  source 1..20: mol_type = other DNA
aaggaatgcatgaaaccttt

SEQ ID NO: 211543 - DNA, 20 bp, synthetic construct
  source 1..20: mol_type = other DNA
caaggaatgcatgaaacctt

SEQ ID NO: 211544 - DNA, 20 bp, synthetic construct
  source 1..20: mol_type = other DNA
ccaaggaatgcatgaaacct

SEQ ID NO: 211545 - DNA, 20 bp, synthetic construct
  source 1..20: mol_type = other DNA
gccaaggaatgcatgaaacc

SEQ ID NO: 211546 - DNA, 20 bp, synthetic construct
  source 1..20: mol_type = other DNA
agccaaggaatgcatgaaac

SEQ ID NO: 211547 - DNA, 20 bp, synthetic construct
  source 1..20: mol_type = other DNA
gagccaaggaatgcatgaaa

SEQ ID NO: 211548 - DNA, 20 bp, synthetic construct
  source 1..20: mol_type = other DNA
tgagccaaggaatgcatgaa

SEQ ID NO: 211549 - DNA, 20 bp, synthetic construct
  source 1..20: mol_type = other DNA
atgagccaaggaatgcatga

SEQ ID NO: 211550 - DNA, 20 bp, synthetic construct
  source 1..20: mol_type = other DNA
catgagccaaggaatgcatg

SEQ ID NO: 211551 - DNA, 20 bp, synthetic construct
  source 1..20: mol_type = other DNA
tcatgagccaaggaatgcat

SEQ ID NO: 211552 - DNA, 20 bp, synthetic construct
  source 1..20: mol_type = other DNA
atcatgagccaaggaatgca

SEQ ID NO: 211553 - DNA, 20 bp, synthetic construct
  source 1..20: mol_type = other DNA
gatcatgagccaaggaatgc

SEQ ID NO: 211554 - DNA, 20 bp, synthetic construct
  source 1..20: mol_type = other DNA
agatcatgagccaaggaatg

SEQ ID NO: 211555 - DNA, 20 bp, synthetic construct
  source 1..20: mol_type = other DNA
aagatcatgagccaaggaat

SEQ ID NO: 211556 - DNA, 20 bp, synthetic construct
  source 1..20: mol_type = other DNA
gaagatcatgagccaaggaa

SEQ ID NO: 211557 - DNA, 20 bp, synthetic construct
  source 1..20: mol_type = other DNA
agaagatcatgagccaagga

SEQ ID NO: 211558 - DNA, 20 bp, synthetic construct
  source 1..20: mol_type = other DNA
tagaagatcatgagccaagg

SEQ ID NO: 211559 - DNA, 20 bp, synthetic construct
  source 1..20: mol_type = other DNA
atagaagatcatgagccaag

SEQ ID NO: 211560 - DNA, 20 bp, synthetic construct
  source 1..20: mol_type = other DNA
tatagaagatcatgagccaa

SEQ ID NO: 211561 - DNA, 20 bp, synthetic construct
  source 1..20: mol_type = other DNA
ctatagaagatcatgagcca

SEQ ID NO: 211562 - DNA, 20 bp, synthetic construct
  source 1..20: mol_type = other DNA
gctatagaagatcatgagcc

SEQ ID NO: 211563 - DNA, 20 bp, synthetic construct
  source 1..20: mol_type = other DNA
agctatagaagatcatgagc

SEQ ID NO: 211564 - DNA, 20 bp, synthetic construct
  source 1..20: mol_type = other DNA
tagctatagaagatcatgag

SEQ ID NO: 211565 - DNA, 20 bp, synthetic construct
  source 1..20: mol_type = other DNA
atagctatagaagatcatga

SEQ ID NO: 211566 - DNA, 20 bp, synthetic construct
  source 1..20: mol_type = other DNA
tatagctatagaagatcatg

SEQ ID NO: 211567 - DNA, 20 bp, synthetic construct
  source 1..20: mol_type = other DNA
ctatagctatagaagatcat

SEQ ID NO: 211568 - DNA, 20 bp, synthetic construct
  source 1..20: mol_type = other DNA
actatagctatagaagatca

SEQ ID NO: 211569 - DNA, 20 bp, synthetic construct
  source 1..20: mol_type = other DNA
gactatagctatagaagatc

SEQ ID NO: 211570 - DNA, 20 bp, synthetic construct
  source 1..20: mol_type = other DNA
tgactatagctatagaagat

SEQ ID NO: 211571 - DNA, 20 bp, synthetic construct
  source 1..20: mol_type = other DNA
ctgactatagctatagaaga

SEQ ID NO: 211572 - DNA, 20 bp, synthetic construct
  source 1..20: mol_type = other DNA
tctgactatagctatagaag

SEQ ID NO: 211573 - DNA, 20 bp, synthetic construct
  source 1..20: mol_type = other DNA
ttctgactatagctatagaa

SEQ ID NO: 211574 - DNA, 20 bp, synthetic construct
  source 1..20: mol_type = other DNA
tttctgactatagctataga

SEQ ID NO: 211575 - DNA, 20 bp, synthetic construct
  source 1..20: mol_type = other DNA
ttttctgactatagctatag

SEQ ID NO: 211576 - DNA, 20 bp, synthetic construct
  source 1..20: mol_type = other DNA
tttttctgactatagctata

SEQ ID NO: 211577 - DNA, 20 bp, synthetic construct
  source 1..20: mol_type = other DNA
atttttctgactatagctat

SEQ ID NO: 211578 - DNA, 20 bp, synthetic construct
  source 1..20: mol_type = other DNA
aatttttctgactatagcta

SEQ ID NO: 211579 - DNA, 20 bp, synthetic construct
  source 1..20: mol_type = other DNA
aaatttttctgactatagct

SEQ ID NO: 211580 - DNA, 20 bp, synthetic construct
  source 1..20: mol_type = other DNA
aaaatttttctgactatagc

SEQ ID NO: 211581 - DNA, 20 bp, synthetic construct
  source 1..20: mol_type = other DNA
gaaaatttttctgactatag

SEQ ID NO: 211582 - DNA, 20 bp, synthetic construct
  source 1..20: mol_type = other DNA
ggaaaatttttctgactata

SEQ ID NO: 211583 - DNA, 20 bp, synthetic construct
  source 1..20: mol_type = other DNA
tggaaaatttttctgactat

SEQ ID NO: 211584 - DNA, 20 bp, synthetic construct
  source 1..20: mol_type = other DNA
atggaaaatttttctgacta

SEQ ID NO: 211585 - DNA, 20 bp, synthetic construct
  source 1..20: mol_type = other DNA
gatggaaaatttttctgact

SEQ ID NO: 211586 - DNA, 20 bp, synthetic construct
  source 1..20: mol_type = other DNA
tgatggaaaatttttctgac

SEQ ID NO: 211587 - DNA, 20 bp, synthetic construct
  source 1..20: mol_type = other DNA
ttgatggaaaatttttctga

SEQ ID NO: 211588 - DNA, 20 bp, synthetic construct
  source 1..20: mol_type = other DNA
attgatggaaaatttttctg

SEQ ID NO: 211589 - DNA, 20 bp, synthetic construct
  source 1..20: mol_type = other DNA
gattgatggaaaatttttct

SEQ ID NO: 211590 - DNA, 20 bp, synthetic construct
  source 1..20: mol_type = other DNA
tgattgatggaaaatttttc

SEQ ID NO: 211591 - DNA, 20 bp, synthetic construct
  source 1..20: mol_type = other DNA
atgattgatggaaaattttt

SEQ ID NO: 211592 - DNA, 20 bp, synthetic construct
  source 1..20: mol_type = other DNA
gatgattgatggaaaatttt

SEQ ID NO: 211593 - DNA, 20 bp, synthetic construct
  source 1..20: mol_type = other DNA
agatgattgatggaaaattt

SEQ ID NO: 211594 - DNA, 20 bp, synthetic construct
  source 1..20: mol_type = other DNA
aagatgattgatggaaaatt

SEQ ID NO: 211595 - DNA, 20 bp, synthetic construct
  source 1..20: mol_type = other DNA
gaagatgattgatggaaaat

SEQ ID NO: 211596 - DNA, 20 bp, synthetic construct
  source 1..20: mol_type = other DNA
tgaagatgattgatggaaaa

SEQ ID NO: 211597 - DNA, 20 bp, synthetic construct
  source 1..20: mol_type = other DNA
ttgaagatgattgatggaaa

SEQ ID NO: 211598 - DNA, 20 bp, synthetic construct
  source 1..20: mol_type = other DNA
tttgaagatgattgatggaa

SEQ ID NO: 211599 - DNA, 20 bp, synthetic construct
  source 1..20: mol_type = other DNA
ctttgaagatgattgatgga

SEQ ID NO: 211600 - DNA, 20 bp, synthetic construct
  source 1..20: mol_type = other DNA
gctttgaagatgattgatgg

SEQ ID NO: 211601 - DNA, 20 bp, synthetic construct
  source 1..20: mol_type = other DNA
ggctttgaagatgattgatg

SEQ ID NO: 211602 - DNA, 20 bp, synthetic construct
  source 1..20: mol_type = other DNA
tggctttgaagatgattgat

SEQ ID NO: 211603 - DNA, 20 bp, synthetic construct
  source 1..20: mol_type = other DNA
ctggctttgaagatgattga

SEQ ID NO: 211604 - DNA, 20 bp, synthetic construct
  source 1..20: mol_type = other DNA
gctggctttgaagatgattg

SEQ ID NO: 211605 - DNA, 20 bp, synthetic construct
  source 1..20: mol_type = other DNA
tgctggctttgaagatgatt

SEQ ID NO: 211606 - DNA, 20 bp, synthetic construct
  source 1..20: mol_type = other DNA
ttgctggctttgaagatgat

SEQ ID NO: 211607 - DNA, 20 bp, synthetic construct
  source 1..20: mol_type = other DNA
attgctggctttgaagatga

SEQ ID NO: 211608 - DNA, 20 bp, synthetic construct
  source 1..20: mol_type = other DNA
cattgctggctttgaagatg

SEQ ID NO: 211609 - DNA, 20 bp, synthetic construct
  source 1..20: mol_type = other DNA
ccattgctggctttgaagat

SEQ ID NO: 211610 - DNA, 20 bp, synthetic construct
  source 1..20: mol_type = other DNA
gccattgctggctttgaaga

SEQ ID NO: 211611 - DNA, 20 bp, synthetic construct
  source 1..20: mol_type = other DNA
tgccattgctggctttgaag

SEQ ID NO: 211612 - DNA, 20 bp, synthetic construct
  source 1..20: mol_type = other DNA
ctgccattgctggctttgaa

SEQ ID NO: 211613 - DNA, 20 bp, synthetic construct
  source 1..20: mol_type = other DNA
cctgccattgctggctttga

SEQ ID NO: 211614 - DNA, 20 bp, synthetic construct
  source 1..20: mol_type = other DNA
tcctgccattgctggctttg

SEQ ID NO: 211615 - DNA, 20 bp, synthetic construct
  source 1..20: mol_type = other DNA
atcctgccattgctggcttt

SEQ ID NO: 211616 - DNA, 20 bp, synthetic construct
  source 1..20: mol_type = other DNA
catcctgccattgctggctt

SEQ ID NO: 211617 - DNA, 20 bp, synthetic construct
  source 1..20: mol_type = other DNA
tcatcctgccattgctggct

SEQ ID NO: 211618 - DNA, 20 bp, synthetic construct
  source 1..20: mol_type = other DNA
ctcatcctgccattgctggc

SEQ ID NO: 211619 - DNA, 20 bp, synthetic construct
  source 1..20: mol_type = other DNA
actcatcctgccattgctgg

SEQ ID NO: 211620 - DNA, 20 bp, synthetic construct
  source 1..20: mol_type = other DNA
gactcatcctgccattgctg

SEQ ID NO: 211621 - DNA, 20 bp, synthetic construct
  source 1..20: mol_type = other DNA
ggactcatcctgccattgct

SEQ ID NO: 211622 - DNA, 20 bp, synthetic construct
  source 1..20: mol_type = other DNA
aggactcatcctgccattgc

SEQ ID NO: 211623 - DNA, 20 bp, synthetic construct
  source 1..20: mol_type = other DNA
gaggactcatcctgccattg

SEQ ID NO: 211624 - DNA, 20 bp, synthetic construct
  source 1..20: mol_type = other DNA
tgaggactcatcctgccatt

SEQ ID NO: 211625 - DNA, 20 bp, synthetic construct
  source 1..20: mol_type = other DNA
gtgaggactcatcctgccat

SEQ ID NO: 211626 - DNA, 20 bp, synthetic construct
  source 1..20: mol_type = other DNA
tgtgaggactcatcctgcca

SEQ ID NO: 211627 - DNA, 20 bp, synthetic construct
  source 1..20: mol_type = other DNA
atgtgaggactcatcctgcc

SEQ ID NO: 211628 - DNA, 20 bp, synthetic construct
  source 1..20: mol_type = other DNA
gatgtgaggactcatcctgc

SEQ ID NO: 211629 - DNA, 20 bp, synthetic construct
  source 1..20: mol_type = other DNA
tgatgtgaggactcatcctg

SEQ ID NO: 211630 - DNA, 20 bp, synthetic construct
  source 1..20: mol_type = other DNA
gtgatgtgaggactcatcct

SEQ ID NO: 211631 - DNA, 20 bp, synthetic construct
  source 1..20: mol_type = other DNA
ggtgatgtgaggactcatcc

SEQ ID NO: 211632 - DNA, 20 bp, synthetic construct
  source 1..20: mol_type = other DNA
aggtgatgtgaggactcatc

SEQ ID NO: 211633 - DNA, 20 bp, synthetic construct
  source 1..20: mol_type = other DNA
aaggtgatgtgaggactcat

SEQ ID NO: 211634 - DNA, 20 bp, synthetic construct
  source 1..20: mol_type = other DNA
caaggtgatgtgaggactca

SEQ ID NO: 211635 - DNA, 20 bp, synthetic construct
  source 1..20: mol_type = other DNA
gcaaggtgatgtgaggactc

SEQ ID NO: 211636 - DNA, 20 bp, synthetic construct
  source 1..20: mol_type = other DNA
agcaaggtgatgtgaggact

SEQ ID NO: 211637 - DNA, 20 bp, synthetic construct
  source 1..20: mol_type = other DNA
gagcaaggtgatgtgaggac

SEQ ID NO: 211638 - DNA, 20 bp, synthetic construct
  source 1..20: mol_type = other DNA
agagcaaggtgatgtgagga

SEQ ID NO: 211639 - DNA, 20 bp, synthetic construct
  source 1..20: mol_type = other DNA
cagagcaaggtgatgtgagg

SEQ ID NO: 211640 - DNA, 20 bp, synthetic construct
  source 1..20: mol_type = other DNA
tcagagcaaggtgatgtgag

SEQ ID NO: 211641 - DNA, 20 bp, synthetic construct
  source 1..20: mol_type = other DNA
gtcagagcaaggtgatgtga

SEQ ID NO: 211642 - DNA, 20 bp, synthetic construct
  source 1..20: mol_type = other DNA
tgtcagagcaaggtgatgtg

SEQ ID NO: 211643 - DNA, 20 bp, synthetic construct
  source 1..20: mol_type = other DNA
gtgtcagagcaaggtgatgt

SEQ ID NO: 211644 - DNA, 20 bp, synthetic construct
  source 1..20: mol_type = other DNA
ggtgtcagagcaaggtgatg

SEQ ID NO: 211645 - DNA, 20 bp, synthetic construct
  source 1..20: mol_type = other DNA
tggtgtcagagcaaggtgat

SEQ ID NO: 211646 - DNA, 20 bp, synthetic construct
  source 1..20: mol_type = other DNA
ctggtgtcagagcaaggtga

SEQ ID NO: 211647 - DNA, 20 bp, synthetic construct
  source 1..20: mol_type = other DNA
actggtgtcagagcaaggtg

SEQ ID NO: 211648 - DNA, 20 bp, synthetic construct
  source 1..20: mol_type = other DNA
aactggtgtcagagcaaggt

SEQ ID NO: 211649 - DNA, 20 bp, synthetic construct
  source 1..20: mol_type = other DNA
gaactggtgtcagagcaagg

SEQ ID NO: 211650 - DNA, 20 bp, synthetic construct
  source 1..20: mol_type = other DNA
agaactggtgtcagagcaag

SEQ ID NO: 211651 - DNA, 20 bp, synthetic construct
  source 1..20: mol_type = other DNA
gagaactggtgtcagagcaa

SEQ ID NO: 211652 - DNA, 20 bp, synthetic construct
  source 1..20: mol_type = other DNA
agagaactggtgtcagagca

SEQ ID NO: 211653 - DNA, 20 bp, synthetic construct
  source 1..20: mol_type = other DNA
cagagaactggtgtcagagc

SEQ ID NO: 211654 - DNA, 20 bp, synthetic construct
  source 1..20: mol_type = other DNA
gcagagaactggtgtcagag

SEQ ID NO: 211655 - DNA, 20 bp, synthetic construct
  source 1..20: mol_type = other DNA
ggcagagaactggtgtcaga

SEQ ID NO: 211656 - DNA, 20 bp, synthetic construct
  source 1..20: mol_type = other DNA
aggcagagaactggtgtcag

SEQ ID NO: 211657 - DNA, 20 bp, synthetic construct
  source 1..20: mol_type = other DNA
gaggcagagaactggtgtca

SEQ ID NO: 211658 - DNA, 20 bp, synthetic construct
  source 1..20: mol_type = other DNA
ggaggcagagaactggtgtc

SEQ ID NO: 211659 - DNA, 20 bp, synthetic construct
  source 1..20: mol_type = other DNA
gggaggcagagaactggtgt

SEQ ID NO: 211660 - DNA, 20 bp, synthetic construct
  source 1..20: mol_type = other DNA
agggaggcagagaactggtg

SEQ ID NO: 211661 - DNA, 20 bp, synthetic construct
  source 1..20: mol_type = other DNA
gagggaggcagagaactggt

SEQ ID NO: 211662 - DNA, 20 bp, synthetic construct
  source 1..20: mol_type = other DNA
agagggaggcagagaactgg

SEQ ID NO: 211663 - DNA, 20 bp, synthetic construct
  source 1..20: mol_type = other DNA
aagagggaggcagagaactg

SEQ ID NO: 211664 - DNA, 20 bp, synthetic construct
  source 1..20: mol_type = other DNA
gaagagggaggcagagaact

SEQ ID NO: 211665 - DNA, 20 bp, synthetic construct
  source 1..20: mol_type = other DNA
ggaagagggaggcagagaac

SEQ ID NO: 211666 - DNA, 20 bp, synthetic construct
  source 1..20: mol_type = other DNA
tggaagagggaggcagagaa

SEQ ID NO: 211667 - DNA, 20 bp, synthetic construct
  source 1..20: mol_type = other DNA
gtggaagagggaggcagaga

SEQ ID NO: 211668 - DNA, 20 bp, synthetic construct
  source 1..20: mol_type = other DNA
tgtggaagagggaggcagag

SEQ ID NO: 211669 - DNA, 20 bp, synthetic construct
  source 1..20: mol_type = other DNA
atgtggaagagggaggcaga

SEQ ID NO: 211670 - DNA, 20 bp, synthetic construct
  source 1..20: mol_type = other DNA
catgtggaagagggaggcag

SEQ ID NO: 211671 - DNA, 20 bp, synthetic construct
  source 1..20: mol_type = other DNA
acatgtggaagagggaggca

SEQ ID NO: 211672 - DNA, 20 bp, synthetic construct
  source 1..20: mol_type = other DNA
gacatgtggaagagggaggc

SEQ ID NO: 211673 - DNA, 20 bp, synthetic construct
  source 1..20: mol_type = other DNA
tgacatgtggaagagggagg

SEQ ID NO: 211674 - DNA, 20 bp, synthetic construct
  source 1..20: mol_type = other DNA
ctgacatgtggaagagggag

SEQ ID NO: 211675 - DNA, 20 bp, synthetic construct
  source 1..20: mol_type = other DNA
cctgacatgtggaagaggga

SEQ ID NO: 211676 - DNA, 20 bp, synthetic construct
  source 1..20: mol_type = other DNA
tcctgacatgtggaagaggg

SEQ ID NO: 211677 - DNA, 20 bp, synthetic construct
  source 1..20: mol_type = other DNA
gtcctgacatgtggaagagg

SEQ ID NO: 211678 - DNA, 20 bp, synthetic construct
  source 1..20: mol_type = other DNA
ggtcctgacatgtggaagag

SEQ ID NO: 211679 - DNA, 20 bp, synthetic construct
  source 1..20: mol_type = other DNA
gggtcctgacatgtggaaga

SEQ ID NO: 211680 - DNA, 20 bp, synthetic construct
  source 1..20: mol_type = other DNA
agggtcctgacatgtggaag

SEQ ID NO: 211681 - DNA, 20 bp, synthetic construct
  source 1..20: mol_type = other DNA
gagggtcctgacatgtggaa

SEQ ID NO: 211682 - DNA, 20 bp, synthetic construct
  source 1..20: mol_type = other DNA
tgagggtcctgacatgtgga

SEQ ID NO: 211683 - DNA, 20 bp, synthetic construct
  source 1..20: mol_type = other DNA
atgagggtcctgacatgtgg

SEQ ID NO: 211684 - DNA, 20 bp, synthetic construct
  source 1..20: mol_type = other DNA
catgagggtcctgacatgtg

SEQ ID NO: 211685 - DNA, 20 bp, synthetic construct
  source 1..20: mol_type = other DNA
tcatgagggtcctgacatgt

SEQ ID NO: 211686 - DNA, 20 bp, synthetic construct
  source 1..20: mol_type = other DNA
atcatgagggtcctgacatg

SEQ ID NO: 211687 - DNA, 20 bp, synthetic construct
  source 1..20: mol_type = other DNA
aatcatgagggtcctgacat

SEQ ID NO: 211688 - DNA, 20 bp, synthetic construct
  source 1..20: mol_type = other DNA
taatcatgagggtcctgaca

SEQ ID NO: 211689 - DNA, 20 bp, synthetic construct
  source 1..20: mol_type = other DNA
gtaatcatgagggtcctgac

SEQ ID NO: 211690 - DNA, 20 bp, synthetic construct
  source 1..20: mol_type = other DNA
agtaatcatgagggtcctga

SEQ ID NO: 211691 - DNA, 20 bp, synthetic construct
  source 1..20: mol_type = other DNA
aagtaatcatgagggtcctg

SEQ ID NO: 211692 - DNA, 20 bp, synthetic construct
  source 1..20: mol_type = other DNA
aaagtaatcatgagggtcct

SEQ ID NO: 211693 - DNA, 20 bp, synthetic construct
  source 1..20: mol_type = other DNA
caaagtaatcatgagggtcc

SEQ ID NO: 211694 - DNA, 20 bp, synthetic construct
  source 1..20: mol_type = other DNA
ccaaagtaatcatgagggtc

SEQ ID NO: 211695 - DNA, 20 bp, synthetic construct
  source 1..20: mol_type = other DNA
cccaaagtaatcatgagggt

SEQ ID NO: 211696 - DNA, 20 bp, synthetic construct
  source 1..20: mol_type = other DNA
gcccaaagtaatcatgaggg

SEQ ID NO: 211697 - DNA, 20 bp, synthetic construct
  source 1..20: mol_type = other DNA
agcccaaagtaatcatgagg

SEQ ID NO: 211698 - DNA, 20 bp, synthetic construct
  source 1..20: mol_type = other DNA
gagcccaaagtaatcatgag

SEQ ID NO: 211699 - DNA, 20 bp, synthetic construct
  source 1..20: mol_type = other DNA
tgagcccaaagtaatcatga

SEQ ID NO: 211700 - DNA, 20 bp, synthetic construct
  source 1..20: mol_type = other DNA
gtgagcccaaagtaatcatg

SEQ ID NO: 211701 - DNA, 20 bp, synthetic construct
  source 1..20: mol_type = other DNA
agtgagcccaaagtaatcat

SEQ ID NO: 211702 - DNA, 20 bp, synthetic construct
  source 1..20: mol_type = other DNA
gagtgagcccaaagtaatca

SEQ ID NO: 211703 - DNA, 20 bp, synthetic construct
  source 1..20: mol_type = other DNA
agagtgagcccaaagtaatc

SEQ ID NO: 211704 - DNA, 20 bp, synthetic construct
  source 1..20: mol_type = other DNA
cagagtgagcccaaagtaat

SEQ ID NO: 211705 - DNA, 20 bp, synthetic construct
  source 1..20: mol_type = other DNA
tcagagtgagcccaaagtaa

SEQ ID NO: 211706 - DNA, 20 bp, synthetic construct
  source 1..20: mol_type = other DNA
atcagagtgagcccaaagta

SEQ ID NO: 211707 - DNA, 20 bp, synthetic construct
  source 1..20: mol_type = other DNA
tatcagagtgagcccaaagt

SEQ ID NO: 211708 - DNA, 20 bp, synthetic construct
  source 1..20: mol_type = other DNA
ttatcagagtgagcccaaag

SEQ ID NO: 211709 - DNA, 20 bp, synthetic construct
  source 1..20: mol_type = other DNA
attatcagagtgagcccaaa

SEQ ID NO: 211710 - DNA, 20 bp, synthetic construct
  source 1..20: mol_type = other DNA
gattatcagagtgagcccaa

SEQ ID NO: 211711 - DNA, 20 bp, synthetic construct
  source 1..20: mol_type = other DNA
agattatcagagtgagccca

SEQ ID NO: 211712 - DNA, 20 bp, synthetic construct
  source 1..20: mol_type = other DNA
cagattatcagagtgagccc

SEQ ID NO: 211713 - DNA, 20 bp, synthetic construct
  source 1..20: mol_type = other DNA
ccagattatcagagtgagcc

SEQ ID NO: 211714 - DNA, 20 bp, synthetic construct
  source 1..20: mol_type = other DNA
cccagattatcagagtgagc

SEQ ID NO: 211715 - DNA, 20 bp, synthetic construct
  source 1..20: mol_type = other DNA
tcccagattatcagagtgag

SEQ ID NO: 211716 - DNA, 20 bp, synthetic construct
  source 1..20: mol_type = other DNA
atcccagattatcagagtga

SEQ ID NO: 211717 - DNA, 20 bp, synthetic construct
  source 1..20: mol_type = other DNA
catcccagattatcagagtg

SEQ ID NO: 211718 - DNA, 20 bp, synthetic construct
  source 1..20: mol_type = other DNA
tcatcccagattatcagagt

SEQ ID NO: 211719 - DNA, 20 bp, synthetic construct
  source 1..20: mol_type = other DNA
atcatcccagattatcagag

SEQ ID NO: 211720 - DNA, 20 bp, synthetic construct
  source 1..20: mol_type = other DNA
gatcatcccagattatcaga

SEQ ID NO: 211721 - DNA, 20 bp, synthetic construct
  source 1..20: mol_type = other DNA
agatcatcccagattatcag

SEQ ID NO: 211722 - DNA, 20 bp, synthetic construct
  source 1..20: mol_type = other DNA
gagatcatcccagattatca

SEQ ID NO: 211723 - DNA, 20 bp, synthetic construct
  source 1..20: mol_type = other DNA
agagatcatcccagattatc

SEQ ID NO: 211724 - DNA, 20 bp, synthetic construct
  source 1..20: mol_type = other DNA
gagagatcatcccagattat

SEQ ID NO: 211725 - DNA, 20 bp, synthetic construct
  source 1..20: mol_type = other DNA
agagagatcatcccagatta

SEQ ID NO: 211726 - DNA, 20 bp, synthetic construct
  source 1..20: mol_type = other DNA
tagagagatcatcccagatt

SEQ ID NO: 211727 - DNA, 20 bp, synthetic construct
  source 1..20: mol_type = other DNA
atagagagatcatcccagat

SEQ ID NO: 211728 - DNA, 20 bp, synthetic construct
  source 1..20: mol_type = other DNA
aatagagagatcatcccaga

SEQ ID NO: 211729 - DNA, 20 bp, synthetic construct
  source 1..20: mol_type = other DNA
aaatagagagatcatcccag

SEQ ID NO: 211730 - DNA, 20 bp, synthetic construct
  source 1..20: mol_type = other DNA
aaaatagagagatcatccca

SEQ ID NO: 211731 - DNA, 20 bp, synthetic construct
  source 1..20: mol_type = other DNA
taaaatagagagatcatccc

SEQ ID NO: 211732 - DNA, 20 bp, synthetic construct
  source 1..20: mol_type = other DNA
ctaaaatagagagatcatcc

SEQ ID NO: 211733 - DNA, 20 bp, synthetic construct
  source 1..20: mol_type = other DNA
tctaaaatagagagatcatc

SEQ ID NO: 211734 - DNA, 20 bp, synthetic construct
  source 1..20: mol_type = other DNA
ctctaaaatagagagatcat

SEQ ID NO: 211735 - DNA, 20 bp, synthetic construct
  source 1..20: mol_type = other DNA
actctaaaatagagagatca

SEQ ID NO: 211736 - DNA, 20 bp, synthetic construct
  source 1..20: mol_type = other DNA
gactctaaaatagagagatc

SEQ ID NO: 211737 - DNA, 20 bp, synthetic construct
  source 1..20: mol_type = other DNA
tgactctaaaatagagagat

SEQ ID NO: 211738 - DNA, 20 bp, synthetic construct
  source 1..20: mol_type = other DNA
ctgactctaaaatagagaga

SEQ ID NO: 211739 - DNA, 20 bp, synthetic construct
  source 1..20: mol_type = other DNA
gctgactctaaaatagagag

SEQ ID NO: 211740 - DNA, 20 bp, synthetic construct
  source 1..20: mol_type = other DNA
agctgactctaaaatagaga

SEQ ID NO: 211741 - DNA, 20 bp, synthetic construct
  source 1..20: mol_type = other DNA
cagctgactctaaaatagag

SEQ ID NO: 211742 - DNA, 20 bp, synthetic construct
  source 1..20: mol_type = other DNA
tcagctgactctaaaataga

SEQ ID NO: 211743 - DNA, 20 bp, synthetic construct
  source 1..20: mol_type = other DNA
gtcagctgactctaaaatag

SEQ ID NO: 211744 - DNA, 20 bp, synthetic construct
  source 1..20: mol_type = other DNA
agtcagctgactctaaaata

SEQ ID NO: 211745 - DNA, 20 bp, synthetic construct
  source 1..20: mol_type = other DNA
cagtcagctgactctaaaat

SEQ ID NO: 211746 - DNA, 20 bp, synthetic construct
  source 1..20: mol_type = other DNA
ccagtcagctgactctaaaa

SEQ ID NO: 211747 - DNA, 20 bp, synthetic construct
  source 1..20: mol_type = other DNA
cccagtcagctgactctaaa

SEQ ID NO: 211748 - DNA, 20 bp, synthetic construct
  source 1..20: mol_type = other DNA
tcccagtcagctgactctaa

SEQ ID NO: 211749 - DNA, 20 bp, synthetic construct
  source 1..20: mol_type = other DNA
ttcccagtcagctgactcta

SEQ ID NO: 211750 - DNA, 20 bp, synthetic construct
  source 1..20: mol_type = other DNA
gttcccagtcagctgactct

SEQ ID NO: 211751 - DNA, 20 bp, synthetic construct
  source 1..20: mol_type = other DNA
ggttcccagtcagctgactc

SEQ ID NO: 211752 - DNA, 20 bp, synthetic construct
  source 1..20: mol_type = other DNA
aggttcccagtcagctgact

SEQ ID NO: 211753 - DNA, 20 bp, synthetic construct
  source 1..20: mol_type = other DNA
aaggttcccagtcagctgac

SEQ ID NO: 211754 - DNA, 20 bp, synthetic construct
  source 1..20: mol_type = other DNA
taaggttcccagtcagctga

SEQ ID NO: 211755 - DNA, 20 bp, synthetic construct
  source 1..20: mol_type = other DNA
ttaaggttcccagtcagctg

SEQ ID NO: 211756 - DNA, 20 bp, synthetic construct
  source 1..20: mol_type = other DNA
attaaggttcccagtcagct

SEQ ID NO: 211757 - DNA, 20 bp, synthetic construct
  source 1..20: mol_type = other DNA
aattaaggttcccagtcagc

SEQ ID NO: 211758 - DNA, 20 bp, synthetic construct
  source 1..20: mol_type = other DNA
gaattaaggttcccagtcag

SEQ ID NO: 211759 - DNA, 20 bp, synthetic construct
  source 1..20: mol_type = other DNA
ggaattaaggttcccagtca

SEQ ID NO: 211760 - DNA, 20 bp, synthetic construct
  source 1..20: mol_type = other DNA
tggaattaaggttcccagtc

SEQ ID NO: 211761 - DNA, 20 bp, synthetic construct
  source 1..20: mol_type = other DNA
atggaattaaggttcccagt

SEQ ID NO: 211762 - DNA, 20 bp, synthetic construct
  source 1..20: mol_type = other DNA
gatggaattaaggttcccag

SEQ ID NO: 211763 - DNA, 20 bp, synthetic construct
  source 1..20: mol_type = other DNA
agatggaattaaggttccca

SEQ ID NO: 211764 - DNA, 20 bp, synthetic construct
  source 1..20: mol_type = other DNA
tagatggaattaaggttccc

SEQ ID NO: 211765 - DNA, 20 bp, synthetic construct
  source 1..20: mol_type = other DNA
gtagatggaattaaggttcc

SEQ ID NO: 211766 - DNA, 20 bp, synthetic construct
  source 1..20: mol_type = other DNA
tgtagatggaattaaggttc

SEQ ID NO: 211767 - DNA, 20 bp, synthetic construct
  source 1..20: mol_type = other DNA
ttgtagatggaattaaggtt

SEQ ID NO: 211768 - DNA, 20 bp, synthetic construct
  source 1..20: mol_type = other DNA
gttgtagatggaattaaggt

SEQ ID NO: 211769 - DNA, 20 bp, synthetic construct
  source 1..20: mol_type = other DNA
ggttgtagatggaattaagg

SEQ ID NO: 211770 - DNA, 20 bp, synthetic construct
  source 1..20: mol_type = other DNA
gggttgtagatggaattaag

SEQ ID NO: 211771 - DNA, 20 bp, synthetic construct
  source 1..20: mol_type = other DNA
ggggttgtagatggaattaa

SEQ ID NO: 211772 - DNA, 20 bp, synthetic construct
  source 1..20: mol_type = other DNA
tggggttgtagatggaatta

SEQ ID NO: 211773 - DNA, 20 bp, synthetic construct
  source 1..20: mol_type = other DNA
ttggggttgtagatggaatt

SEQ ID NO: 211774 - DNA, 20 bp, synthetic construct
  source 1..20: mol_type = other DNA
attggggttgtagatggaat

SEQ ID NO: 211775 - DNA, 20 bp, synthetic construct
  source 1..20: mol_type = other DNA
aattggggttgtagatggaa

SEQ ID NO: 211776 - DNA, 20 bp, synthetic construct
  source 1..20: mol_type = other DNA
gaattggggttgtagatgga

SEQ ID NO: 211777 - DNA, 20 bp, synthetic construct
  source 1..20: mol_type = other DNA
ggaattggggttgtagatgg

SEQ ID NO: 211778 - DNA, 20 bp, synthetic construct
  source 1..20: mol_type = other DNA
aggaattggggttgtagatg

SEQ ID NO: 211779 - DNA, 20 bp, synthetic construct
  source 1..20: mol_type = other DNA
gaggaattggggttgtagat

SEQ ID NO: 211780 - DNA, 20 bp, synthetic construct
  source 1..20: mol_type = other DNA
agaggaattggggttgtaga

SEQ ID NO: 211781 - DNA, 20 bp, synthetic construct
  source 1..20: mol_type = other DNA
aagaggaattggggttgtag

SEQ ID NO: 211782 - DNA, 20 bp, synthetic construct
  source 1..20: mol_type = other DNA
aaagaggaattggggttgta

SEQ ID NO: 211783 - DNA, 20 bp, synthetic construct
  source 1..20: mol_type = other DNA
caaagaggaattggggttgt

SEQ ID NO: 211784 - DNA, 20 bp, synthetic construct
  source 1..20: mol_type = other DNA
gcaaagaggaattggggttg

SEQ ID NO: 211785 - DNA, 20 bp, synthetic construct
  source 1..20: mol_type = other DNA
ggcaaagaggaattggggtt

SEQ ID NO: 211786 - DNA, 20 bp, synthetic construct
  source 1..20: mol_type = other DNA
tggcaaagaggaattggggt

SEQ ID NO: 211787 - DNA, 20 bp, synthetic construct
  source 1..20: mol_type = other DNA
atggcaaagaggaattgggg

SEQ ID NO: 211788 - DNA, 20 bp, synthetic construct
  source 1..20: mol_type = other DNA
catggcaaagaggaattggg

SEQ ID NO: 211789 - DNA, 20 bp, synthetic construct
  source 1..20: mol_type = other DNA
acatggcaaagaggaattgg

SEQ ID NO: 211790 - DNA, 20 bp, synthetic construct
  source 1..20: mol_type = other DNA
tacatggcaaagaggaattg

SEQ ID NO: 211791 - DNA, 20 bp, synthetic construct
  source 1..20: mol_type = other DNA
gtacatggcaaagaggaatt

SEQ ID NO: 211792 - DNA, 20 bp, synthetic construct
  source 1..20: mol_type = other DNA
tgtacatggcaaagaggaat

SEQ ID NO: 211793 - DNA, 20 bp, synthetic construct
  source 1..20: mol_type = other DNA
ctgtacatggcaaagaggaa

SEQ ID NO: 211794 - DNA, 20 bp, synthetic construct
  source 1..20: mol_type = other DNA
actgtacatggcaaagagga

SEQ ID NO: 211795 - DNA, 20 bp, synthetic construct
  source 1..20: mol_type = other DNA
cactgtacatggcaaagagg

SEQ ID NO: 211796 - DNA, 20 bp, synthetic construct
  source 1..20: mol_type = other DNA
tcactgtacatggcaaagag

SEQ ID NO: 211797 - DNA, 20 bp, synthetic construct
  source 1..20: mol_type = other DNA
gtcactgtacatggcaaaga

SEQ ID NO: 211798 - DNA, 20 bp, synthetic construct
  source 1..20: mol_type = other DNA
tgtcactgtacatggcaaag

SEQ ID NO: 211799 - DNA, 20 bp, synthetic construct
  source 1..20: mol_type = other DNA
atgtcactgtacatggcaaa

SEQ ID NO: 211800 - DNA, 20 bp, synthetic construct
  source 1..20: mol_type = other DNA
tatgtcactgtacatggcaa

SEQ ID NO: 211801 - DNA, 20 bp, synthetic construct
  source 1..20: mol_type = other DNA
atatgtcactgtacatggca

SEQ ID NO: 211802 - DNA, 20 bp, synthetic construct
  source 1..20: mol_type = other DNA
aatatgtcactgtacatggc

SEQ ID NO: 211803 - DNA, 20 bp, synthetic construct
  source 1..20: mol_type = other DNA
gaatatgtcactgtacatgg

SEQ ID NO: 211804 - DNA, 20 bp, synthetic construct
  source 1..20: mol_type = other DNA
tgaatatgtcactgtacatg

SEQ ID NO: 211805 - DNA, 20 bp, synthetic construct
  source 1..20: mol_type = other DNA
gtgaatatgtcactgtacat

SEQ ID NO: 211806 - DNA, 20 bp, synthetic construct
  source 1..20: mol_type = other DNA
tgtgaatatgtcactgtaca

SEQ ID NO: 211807 - DNA, 20 bp, synthetic construct
  source 1..20: mol_type = other DNA
ctgtgaatatgtcactgtac

SEQ ID NO: 211808 - DNA, 20 bp, synthetic construct
  source 1..20: mol_type = other DNA
cctgtgaatatgtcactgta

SEQ ID NO: 211809 - DNA, 20 bp, synthetic construct
  source 1..20: mol_type = other DNA
acctgtgaatatgtcactgt

SEQ ID NO: 211810 - DNA, 20 bp, synthetic construct
  source 1..20: mol_type = other DNA
aacctgtgaatatgtcactg

SEQ ID NO: 211811 - DNA, 20 bp, synthetic construct
  source 1..20: mol_type = other DNA
gaacctgtgaatatgtcact

SEQ ID NO: 211812 - DNA, 20 bp, synthetic construct
  source 1..20: mol_type = other DNA
agaacctgtgaatatgtcac

SEQ ID NO: 211813 - DNA, 20 bp, synthetic construct
  source 1..20: mol_type = other DNA
cagaacctgtgaatatgtca

SEQ ID NO: 211814 - DNA, 20 bp, synthetic construct
  source 1..20: mol_type = other DNA
ccagaacctgtgaatatgtc

SEQ ID NO: 211815 - DNA, 20 bp, synthetic construct
  source 1..20: mol_type = other DNA
cccagaacctgtgaatatgt

SEQ ID NO: 211816 - DNA, 20 bp, synthetic construct
  source 1..20: mol_type = other DNA
ccccagaacctgtgaatatg

SEQ ID NO: 211817 - DNA, 20 bp, synthetic construct
  source 1..20: mol_type = other DNA
tccccagaacctgtgaatat

SEQ ID NO: 211818 - DNA, 20 bp, synthetic construct
  source 1..20: mol_type = other DNA
atccccagaacctgtgaata

SEQ ID NO: 211819 - DNA, 20 bp, synthetic construct
  source 1..20: mol_type = other DNA
aatccccagaacctgtgaat

SEQ ID NO: 211820 - DNA, 20 bp, synthetic construct
  source 1..20: mol_type = other DNA
taatccccagaacctgtgaa

SEQ ID NO: 211821 - DNA, 20 bp, synthetic construct
  source 1..20: mol_type = other DNA
ctaatccccagaacctgtga

SEQ ID NO: 211822 - DNA, 20 bp, synthetic construct
  source 1..20: mol_type = other DNA
cctaatccccagaacctgtg

SEQ ID NO: 211823 - DNA, 20 bp, synthetic construct
  source 1..20: mol_type = other DNA
tcctaatccccagaacctgt

SEQ ID NO: 211824 - DNA, 20 bp, synthetic construct
  source 1..20: mol_type = other DNA
gtcctaatccccagaacctg

SEQ ID NO: 211825 - DNA, 20 bp, synthetic construct
  source 1..20: mol_type = other DNA
cgtcctaatccccagaacct

SEQ ID NO: 211826 - DNA, 20 bp, synthetic construct
  source 1..20: mol_type = other DNA
tcgtcctaatccccagaacc

SEQ ID NO: 211827 - DNA, 20 bp, synthetic construct
  source 1..20: mol_type = other DNA
ctcgtcctaatccccagaac

SEQ ID NO: 211828 - DNA, 20 bp, synthetic construct
  source 1..20: mol_type = other DNA
gctcgtcctaatccccagaa

SEQ ID NO: 211829 - DNA, 20 bp, synthetic construct
  source 1..20: mol_type = other DNA
ggctcgtcctaatccccaga

SEQ ID NO: 211830 - DNA, 20 bp, synthetic construct
  source 1..20: mol_type = other DNA
aggctcgtcctaatccccag

SEQ ID NO: 211831 - DNA, 20 bp, synthetic construct
  source 1..20: mol_type = other DNA
caggctcgtcctaatcccca

SEQ ID NO: 211832 - DNA, 20 bp, synthetic construct
  source 1..20: mol_type = other DNA
acaggctcgtcctaatcccc

SEQ ID NO: 211833 - DNA, 20 bp, synthetic construct
  source 1..20: mol_type = other DNA
gacaggctcgtcctaatccc

SEQ ID NO: 211834 - DNA, 20 bp, synthetic construct
  source 1..20: mol_type = other DNA
agacaggctcgtcctaatcc

SEQ ID NO: 211835 - DNA, 20 bp, synthetic construct
  source 1..20: mol_type = other DNA
gagacaggctcgtcctaatc

SEQ ID NO: 211836 - DNA, 20 bp, synthetic construct
  source 1..20: mol_type = other DNA
agagacaggctcgtcctaat

SEQ ID NO: 211837 - DNA, 20 bp, synthetic construct
  source 1..20: mol_type = other DNA
cagagacaggctcgtcctaa

SEQ ID NO: 211838 - DNA, 20 bp, synthetic construct
  source 1..20: mol_type = other DNA
tcagagacaggctcgtccta

SEQ ID NO: 211839 - DNA, 20 bp, synthetic construct
  source 1..20: mol_type = other DNA
ttcagagacaggctcgtcct

SEQ ID NO: 211840 - DNA, 20 bp, synthetic construct
  source 1..20: mol_type = other DNA
tttcagagacaggctcgtcc

SEQ ID NO: 211841 - DNA, 20 bp, synthetic construct
  source 1..20: mol_type = other DNA
ctttcagagacaggctcgtc

SEQ ID NO: 211842 - DNA, 20 bp, synthetic construct
  source 1..20: mol_type = other DNA
cctttcagagacaggctcgt

SEQ ID NO: 211843 - DNA, 20 bp, synthetic construct
  source 1..20: mol_type = other DNA
gcctttcagagacaggctcg

SEQ ID NO: 211844 - DNA, 20 bp, synthetic construct
  source 1..20: mol_type = other DNA
agcctttcagagacaggctc

SEQ ID NO: 211845 - DNA, 20 bp, synthetic construct
  source 1..20: mol_type = other DNA
tagcctttcagagacaggct

SEQ ID NO: 211846 - DNA, 20 bp, synthetic construct
  source 1..20: mol_type = other DNA
gtagcctttcagagacaggc

SEQ ID NO: 211847 - DNA, 20 bp, synthetic construct
  source 1..20: mol_type = other DNA
agtagcctttcagagacagg

SEQ ID NO: 211848 - DNA, 20 bp, synthetic construct
  source 1..20: mol_type = other DNA
aagtagcctttcagagacag

SEQ ID NO: 211849 - DNA, 20 bp, synthetic construct
  source 1..20: mol_type = other DNA
aaagtagcctttcagagaca

SEQ ID NO: 211850 - DNA, 20 bp, synthetic construct
  source 1..20: mol_type = other DNA
taaagtagcctttcagagac

SEQ ID NO: 211851 - DNA, 20 bp, synthetic construct
  source 1..20: mol_type = other DNA
gtaaagtagcctttcagaga

SEQ ID NO: 211852 - DNA, 20 bp, synthetic construct
  source 1..20: mol_type = other DNA
tgtaaagtagcctttcagag

SEQ ID NO: 211853 - DNA, 20 bp, synthetic construct
  source 1..20: mol_type = other DNA
atgtaaagtagcctttcaga

SEQ ID NO: 211854 - DNA, 20 bp, synthetic construct
  source 1..20: mol_type = other DNA
catgtaaagtagcctttcag

SEQ ID NO: 211855 - DNA, 20 bp, synthetic construct
  source 1..20: mol_type = other DNA
tcatgtaaagtagcctttca

SEQ ID NO: 211856 - DNA, 20 bp, synthetic construct
  source 1..20: mol_type = other DNA
ttcatgtaaagtagcctttc

SEQ ID NO: 211857 - DNA, 20 bp, synthetic construct
  source 1..20: mol_type = other DNA
tttcatgtaaagtagccttt

SEQ ID NO: 211858 - DNA, 20 bp, synthetic construct
  source 1..20: mol_type = other DNA
ttttcatgtaaagtagcctt

SEQ ID NO: 211859 - DNA, 20 bp, synthetic construct
  source 1..20: mol_type = other DNA
attttcatgtaaagtagcct

SEQ ID NO: 211860 - DNA, 20 bp, synthetic construct
  source 1..20: mol_type = other DNA
aattttcatgtaaagtagcc

SEQ ID NO: 211861 - DNA, 20 bp, synthetic construct
  source 1..20: mol_type = other DNA
gaattttcatgtaaagtagc

SEQ ID NO: 211862 - DNA, 20 bp, synthetic construct
  source 1..20: mol_type = other DNA
tgaattttcatgtaaagtag

SEQ ID NO: 211863 - DNA, 20 bp, synthetic construct
  source 1..20: mol_type = other DNA
atgaattttcatgtaaagta

SEQ ID NO: 211864 - DNA, 20 bp, synthetic construct
  source 1..20: mol_type = other DNA
aatgaattttcatgtaaagt

SEQ ID NO: 211865 - DNA, 20 bp, synthetic construct
  source 1..20: mol_type = other DNA
aaatgaattttcatgtaaag

SEQ ID NO: 211866 - DNA, 20 bp, synthetic construct
  source 1..20: mol_type = other DNA
aaaatgaattttcatgtaaa

SEQ ID NO: 211867 - DNA, 20 bp, synthetic construct
  source 1..20: mol_type = other DNA
aaaaatgaattttcatgtaa

SEQ ID NO: 211868 - DNA, 20 bp, synthetic construct
  source 1..20: mol_type = other DNA
aaaaaatgaattttcatgta

SEQ ID NO: 211869 - DNA, 20 bp, synthetic construct
  source 1..20: mol_type = other DNA
aaaaaaatgaattttcatgt

SEQ ID NO: 211870 - DNA, 20 bp, synthetic construct
  source 1..20: mol_type = other DNA
taaaaaaatgaattttcatg

SEQ ID NO: 211871 - DNA, 20 bp, synthetic construct
  source 1..20: mol_type = other DNA
ttaaaaaaatgaattttcat

SEQ ID NO: 211872 - DNA, 20 bp, synthetic construct
  source 1..20: mol_type = other DNA
attaaaaaaatgaattttca

SEQ ID NO: 211873 - DNA, 20 bp, synthetic construct
  source 1..20: mol_type = other DNA
aattaaaaaaatgaattttc

SEQ ID NO: 211874 - DNA, 20 bp, synthetic construct
  source 1..20: mol_type = other DNA
taattaaaaaaatgaatttt

SEQ ID NO: 211875 - DNA, 20 bp, synthetic construct
  source 1..20: mol_type = other DNA
ttaattaaaaaaatgaattt

SEQ ID NO: 211876 - DNA, 20 bp, synthetic construct
  source 1..20: mol_type = other DNA
cttaattaaaaaaatgaatt

SEQ ID NO: 211877 - DNA, 20 bp, synthetic construct
  source 1..20: mol_type = other DNA
tcttaattaaaaaaatgaat

SEQ ID NO: 211878 - DNA, 20 bp, synthetic construct
  source 1..20: mol_type = other DNA
atcttaattaaaaaaatgaa

SEQ ID NO: 211879 - DNA, 20 bp, synthetic construct
  source 1..20: mol_type = other DNA
aatcttaattaaaaaaatga

SEQ ID NO: 211880 - DNA, 20 bp, synthetic construct
  source 1..20: mol_type = other DNA
aaatcttaattaaaaaaatg

SEQ ID NO: 211881 - DNA, 20 bp, synthetic construct
  source 1..20: mol_type = other DNA
aaaatcttaattaaaaaaat

SEQ ID NO: 211882 - DNA, 20 bp, synthetic construct
  source 1..20: mol_type = other DNA
aaaaatcttaattaaaaaaa

SEQ ID NO: 211883 - DNA, 20 bp, synthetic construct
  source 1..20: mol_type = other DNA
aaaaaatcttaattaaaaaa

SEQ ID NO: 211884 - DNA, 20 bp, synthetic construct
  source 1..20: mol_type = other DNA
aaaaaaatcttaattaaaaa

SEQ ID NO: 211885 - DNA, 20 bp, synthetic construct
  source 1..20: mol_type = other DNA
aaaaaaaatcttaattaaaa

SEQ ID NO: 211886 - DNA, 20 bp, synthetic construct
  source 1..20: mol_type = other DNA
aaaaaaaaatcttaattaaa

SEQ ID NO: 211887 - DNA, 20 bp, synthetic construct
  source 1..20: mol_type = other DNA
gaaaaaaaaatcttaattaa

SEQ ID NO: 211888 - DNA, 20 bp, synthetic construct
  source 1..20: mol_type = other DNA
ggaaaaaaaaatcttaatta

SEQ ID NO: 211889 - DNA, 20 bp, synthetic construct
  source 1..20: mol_type = other DNA
aggaaaaaaaaatcttaatt

SEQ ID NO: 211890 - DNA, 20 bp, synthetic construct
  source 1..20: mol_type = other DNA
gaggaaaaaaaaatcttaat

SEQ ID NO: 211891 - DNA, 20 bp, synthetic construct
  source 1..20: mol_type = other DNA
agaggaaaaaaaaatcttaa

SEQ ID NO: 211892 - DNA, 20 bp, synthetic construct
  source 1..20: mol_type = other DNA
aagaggaaaaaaaaatctta

SEQ ID NO: 211893 - DNA, 20 bp, synthetic construct
  source 1..20: mol_type = other DNA
caagaggaaaaaaaaatctt

SEQ ID NO: 211894 - DNA, 20 bp, synthetic construct
  source 1..20: mol_type = other DNA
tcaagaggaaaaaaaaatct

SEQ ID NO: 211895 - DNA, 20 bp, synthetic construct
  source 1..20: mol_type = other DNA
ctcaagaggaaaaaaaaatc

SEQ ID NO: 211896 - DNA, 20 bp, synthetic construct
  source 1..20: mol_type = other DNA
tctcaagaggaaaaaaaaat

SEQ ID NO: 211897 - DNA, 20 bp, synthetic construct
  source 1..20: mol_type = other DNA
gtctcaagaggaaaaaaaaa

SEQ ID NO: 211898 - DNA, 20 bp, synthetic construct
  source 1..20: mol_type = other DNA
tgtctcaagaggaaaaaaaa

SEQ ID NO: 211899 - DNA, 20 bp, synthetic construct
  source 1..20: mol_type = other DNA
ttgtctcaagaggaaaaaaa

SEQ ID NO: 211900 - DNA, 20 bp, synthetic construct
  source 1..20: mol_type = other DNA
cttgtctcaagaggaaaaaa

SEQ ID NO: 211901 - DNA, 20 bp, synthetic construct
  source 1..20: mol_type = other DNA
ccttgtctcaagaggaaaaa

SEQ ID NO: 211902 - DNA, 20 bp, synthetic construct
  source 1..20: mol_type = other DNA
accttgtctcaagaggaaaa

SEQ ID NO: 211903 - DNA, 20 bp, synthetic construct
  source 1..20: mol_type = other DNA
gaccttgtctcaagaggaaa

SEQ ID NO: 211904 - DNA, 20 bp, synthetic construct
  source 1..20: mol_type = other DNA
agaccttgtctcaagaggaa

SEQ ID NO: 211905 - DNA, 20 bp, synthetic construct
  source 1..20: mol_type = other DNA
gagaccttgtctcaagagga

SEQ ID NO: 211906 - DNA, 20 bp, synthetic construct
  source 1..20: mol_type = other DNA
tgagaccttgtctcaagagg

SEQ ID NO: 211907 - DNA, 20 bp, synthetic construct
  source 1..20: mol_type = other DNA
gtgagaccttgtctcaagag

SEQ ID NO: 211908 - DNA, 20 bp, synthetic construct
  source 1..20: mol_type = other DNA
agtgagaccttgtctcaaga

SEQ ID NO: 211909 - DNA, 20 bp, synthetic construct
  source 1..20: mol_type = other DNA
gagtgagaccttgtctcaag

SEQ ID NO: 211910 - DNA, 20 bp, synthetic construct
  source 1..20: mol_type = other DNA
agagtgagaccttgtctcaa

SEQ ID NO: 211911 - DNA, 20 bp, synthetic construct
  source 1..20: mol_type = other DNA
tagagtgagaccttgtctca

SEQ ID NO: 211912 - DNA, 20 bp, synthetic construct
  source 1..20: mol_type = other DNA
atagagtgagaccttgtctc

SEQ ID NO: 211913 - DNA, 20 bp, synthetic construct
  source 1..20: mol_type = other DNA
catagagtgagaccttgtct

SEQ ID NO: 211914 - DNA, 20 bp, synthetic construct
  source 1..20: mol_type = other DNA
ccatagagtgagaccttgtc

SEQ ID NO: 211915 - DNA, 20 bp, synthetic construct
  source 1..20: mol_type = other DNA
accatagagtgagaccttgt

SEQ ID NO: 211916 - DNA, 20 bp, synthetic construct
  source 1..20: mol_type = other DNA
aaccatagagtgagaccttg

SEQ ID NO: 211917 - DNA, 20 bp, synthetic construct
  source 1..20: mol_type = other DNA
gaaccatagagtgagacctt

SEQ ID NO: 211918 - DNA, 20 bp, synthetic construct
  source 1..20: mol_type = other DNA
tgaaccatagagtgagacct

SEQ ID NO: 211919 - DNA, 20 bp, synthetic construct
  source 1..20: mol_type = other DNA
ctgaaccatagagtgagacc

SEQ ID NO: 211920 - DNA, 20 bp, synthetic construct
  source 1..20: mol_type = other DNA
cctgaaccatagagtgagac

SEQ ID NO: 211921 - DNA, 20 bp, synthetic construct
  source 1..20: mol_type = other DNA
gcctgaaccatagagtgaga

SEQ ID NO: 211922 - DNA, 20 bp, synthetic construct
  source 1..20: mol_type = other DNA
agcctgaaccatagagtgag

SEQ ID NO: 211923 - DNA, 20 bp, synthetic construct
  source 1..20: mol_type = other DNA
cagcctgaaccatagagtga

SEQ ID NO: 211924 - DNA, 20 bp, synthetic construct
  source 1..20: mol_type = other DNA
ccagcctgaaccatagagtg

SEQ ID NO: 211925 - DNA, 20 bp, synthetic construct
  source 1..20: mol_type = other DNA
tccagcctgaaccatagagt

SEQ ID NO: 211926 - DNA, 20 bp, synthetic construct
  source 1..20: mol_type = other DNA
ctccagcctgaaccatagag

SEQ ID NO: 211927 - DNA, 20 bp, synthetic construct
  source 1..20: mol_type = other DNA
actccagcctgaaccataga

SEQ ID NO: 211928 - DNA, 20 bp, synthetic construct
  source 1..20: mol_type = other DNA
cactccagcctgaaccatag

SEQ ID NO: 211929 - DNA, 20 bp, synthetic construct
  source 1..20: mol_type = other DNA
gcactccagcctgaaccata

SEQ ID NO: 211930 - DNA, 20 bp, synthetic construct
  source 1..20: mol_type = other DNA
tgcactccagcctgaaccat

SEQ ID NO: 211931 - DNA, 20 bp, synthetic construct
  source 1..20: mol_type = other DNA
ctgcactccagcctgaacca

SEQ ID NO: 211932 - DNA, 20 bp, synthetic construct
  source 1..20: mol_type = other DNA
actgcactccagcctgaacc

SEQ ID NO: 211933 - DNA, 20 bp, synthetic construct
  source 1..20: mol_type = other DNA
cactgcactccagcctgaac

SEQ ID NO: 211934 - DNA, 20 bp, synthetic construct
  source 1..20: mol_type = other DNA
ccactgcactccagcctgaa

SEQ ID NO: 211935 - DNA, 20 bp, synthetic construct
  source 1..20: mol_type = other DNA
accactgcactccagcctga

SEQ ID NO: 211936 - DNA, 20 bp, synthetic construct
  source 1..20: mol_type = other DNA
taccactgcactccagcctg

SEQ ID NO: 211937 - DNA, 20 bp, synthetic construct
  source 1..20: mol_type = other DNA
ataccactgcactccagcct

SEQ ID NO: 211938 - DNA, 20 bp, synthetic construct
  source 1..20: mol_type = other DNA
cataccactgcactccagcc

SEQ ID NO: 211939 - DNA, 20 bp, synthetic construct
  source 1..20: mol_type = other DNA
tcataccactgcactccagc

SEQ ID NO: 211940 - DNA, 20 bp, synthetic construct
  source 1..20: mol_type = other DNA
atcataccactgcactccag

SEQ ID NO: 211941 - DNA, 20 bp, synthetic construct
  source 1..20: mol_type = other DNA
gatcataccactgcactcca

SEQ ID NO: 211942 - DNA, 20 bp, synthetic construct
  source 1..20: mol_type = other DNA
tgatcataccactgcactcc

SEQ ID NO: 211943 - DNA, 20 bp, synthetic construct
  source 1..20: mol_type = other DNA
gtgatcataccactgcactc

SEQ ID NO: 211944 - DNA, 20 bp, synthetic construct
  source 1..20: mol_type = other DNA
tgtgatcataccactgcact

SEQ ID NO: 211945 - DNA, 20 bp, synthetic construct
  source 1..20: mol_type = other DNA
ctgtgatcataccactgcac

SEQ ID NO: 211946 - DNA, 20 bp, synthetic construct
  source 1..20: mol_type = other DNA
gctgtgatcataccactgca

SEQ ID NO: 211947 - DNA, 20 bp, synthetic construct
  source 1..20: mol_type = other DNA
agctgtgatcataccactgc

SEQ ID NO: 211948 - DNA, 20 bp, synthetic construct
  source 1..20: mol_type = other DNA
gagctgtgatcataccactg

SEQ ID NO: 211949 - DNA, 20 bp, synthetic construct
  source 1..20: mol_type = other DNA
tgagctgtgatcataccact

SEQ ID NO: 211950 - DNA, 20 bp, synthetic construct
  source 1..20: mol_type = other DNA
gtgagctgtgatcataccac

SEQ ID NO: 211951 - DNA, 20 bp, synthetic construct
  source 1..20: mol_type = other DNA
agtgagctgtgatcatacca

SEQ ID NO: 211952 - DNA, 20 bp, synthetic construct
  source 1..20: mol_type = other DNA
cagtgagctgtgatcatacc

SEQ ID NO: 211953 - DNA, 20 bp, synthetic construct
  source 1..20: mol_type = other DNA
gcagtgagctgtgatcatac

SEQ ID NO: 211954 - DNA, 20 bp, synthetic construct
  source 1..20: mol_type = other DNA
tgcagtgagctgtgatcata

SEQ ID NO: 211955 - DNA, 20 bp, synthetic construct
  source 1..20: mol_type = other DNA
ctgcagtgagctgtgatcat

SEQ ID NO: 211956 - DNA, 20 bp, synthetic construct
  source 1..20: mol_type = other DNA
gctgcagtgagctgtgatca

SEQ ID NO: 211957 - DNA, 20 bp, synthetic construct
  source 1..20: mol_type = other DNA
ggctgcagtgagctgtgatc

SEQ ID NO: 211958 - DNA, 20 bp, synthetic construct
  source 1..20: mol_type = other DNA
aggctgcagtgagctgtgat

SEQ ID NO: 211959 - DNA, 20 bp, synthetic construct
  source 1..20: mol_type = other DNA
gaggctgcagtgagctgtga

SEQ ID NO: 211960 - DNA, 20 bp, synthetic construct
  source 1..20: mol_type = other DNA
cgaggctgcagtgagctgtg

SEQ ID NO: 211961 - DNA, 20 bp, synthetic construct
  source 1..20: mol_type = other DNA
tcgaggctgcagtgagctgt

SEQ ID NO: 211962 - DNA, 20 bp, synthetic construct
  source 1..20: mol_type = other DNA
gtcgaggctgcagtgagctg

SEQ ID NO: 211963 - DNA, 20 bp, synthetic construct
  source 1..20: mol_type = other DNA
cgtcgaggctgcagtgagct

SEQ ID NO: 211964 - DNA, 20 bp, synthetic construct
  source 1..20: mol_type = other DNA
acgtcgaggctgcagtgagc

SEQ ID NO: 211965 - DNA, 20 bp, synthetic construct
  source 1..20: mol_type = other DNA
gacgtcgaggctgcagtgag

SEQ ID NO: 211966 - DNA, 20 bp, synthetic construct
  source 1..20: mol_type = other DNA
agacgtcgaggctgcagtga

SEQ ID NO: 211967 - DNA, 20 bp, synthetic construct
  source 1..20: mol_type = other DNA
gagacgtcgaggctgcagtg

SEQ ID NO: 211968 - DNA, 20 bp, synthetic construct
  source 1..20: mol_type = other DNA
agagacgtcgaggctgcagt

SEQ ID NO: 211969 - DNA, 20 bp, synthetic construct
  source 1..20: mol_type = other DNA
cagagacgtcgaggctgcag

SEQ ID NO: 211970 - DNA, 20 bp, synthetic construct
  source 1..20: mol_type = other DNA
ccagagacgtcgaggctgca

SEQ ID NO: 211971 - DNA, 20 bp, synthetic construct
  source 1..20: mol_type = other DNA
cccagagacgtcgaggctgc

SEQ ID NO: 211972 - DNA, 20 bp, synthetic construct
  source 1..20: mol_type = other DNA
gcccagagacgtcgaggctg

SEQ ID NO: 211973 - DNA, 20 bp, synthetic construct
  source 1..20: mol_type = other DNA
agcccagagacgtcgaggct

SEQ ID NO: 211974 - DNA, 20 bp, synthetic construct
  source 1..20: mol_type = other DNA
gagcccagagacgtcgaggc

SEQ ID NO: 211975 - DNA, 20 bp, synthetic construct
  source 1..20: mol_type = other DNA
tgagcccagagacgtcgagg

SEQ ID NO: 211976 - DNA, 20 bp, synthetic construct
  source 1..20: mol_type = other DNA
ctgagcccagagacgtcgag

SEQ ID NO: 211977 - DNA, 20 bp, synthetic construct
  source 1..20: mol_type = other DNA
cctgagcccagagacgtcga

SEQ ID NO: 211978 - DNA, 20 bp, synthetic construct
  source 1..20: mol_type = other DNA
acctgagcccagagacgtcg

SEQ ID NO: 211979 - DNA, 20 bp, synthetic construct
  source 1..20: mol_type = other DNA
cacctgagcccagagacgtc

SEQ ID NO: 211980 - DNA, 20 bp, synthetic construct
  source 1..20: mol_type = other DNA
tcacctgagcccagagacgt

SEQ ID NO: 211981 - DNA, 20 bp, synthetic construct
  source 1..20: mol_type = other DNA
atcacctgagcccagagacg

SEQ ID NO: 211982 - DNA, 20 bp, synthetic construct
  source 1..20: mol_type = other DNA
gatcacctgagcccagagac

SEQ ID NO: 211983 - DNA, 20 bp, synthetic construct
  source 1..20: mol_type = other DNA
ggatcacctgagcccagaga

SEQ ID NO: 211984 - DNA, 20 bp, synthetic construct
  source 1..20: mol_type = other DNA
aggatcacctgagcccagag

SEQ ID NO: 211985 - DNA, 20 bp, synthetic construct
  source 1..20: mol_type = other DNA
gaggatcacctgagcccaga

SEQ ID NO: 211986 - DNA, 20 bp, synthetic construct
  source 1..20: mol_type = other DNA
ggaggatcacctgagcccag

SEQ ID NO: 211987 - DNA, 20 bp, synthetic construct
  source 1..20: mol_type = other DNA
gggaggatcacctgagccca

SEQ ID NO: 211988 - DNA, 20 bp, synthetic construct
  source 1..20: mol_type = other DNA
tgggaggatcacctgagccc

SEQ ID NO: 211989 - DNA, 20 bp, synthetic construct
  source 1..20: mol_type = other DNA
gtgggaggatcacctgagcc

SEQ ID NO: 211990 - DNA, 20 bp, synthetic construct
  source 1..20: mol_type = other DNA
ggtgggaggatcacctgagc

SEQ ID NO: 211991 - DNA, 20 bp, synthetic construct
  source 1..20: mol_type = other DNA
aggtgggaggatcacctgag

SEQ ID NO: 211992 - DNA, 20 bp, synthetic construct
  source 1..20: mol_type = other DNA
gaggtgggaggatcacctga

SEQ ID NO: 211993 - DNA, 20 bp, synthetic construct
  source 1..20: mol_type = other DNA
tgaggtgggaggatcacctg

SEQ ID NO: 211994 - DNA, 20 bp, synthetic construct
  source 1..20: mol_type = other DNA
ctgaggtgggaggatcacct

SEQ ID NO: 211995 - DNA, 20 bp, synthetic construct
  source 1..20: mol_type = other DNA
gctgaggtgggaggatcacc

SEQ ID NO: 211996 - DNA, 20 bp, synthetic construct
  source 1..20: mol_type = other DNA
agctgaggtgggaggatcac

SEQ ID NO: 211997 - DNA, 20 bp, synthetic construct
  source 1..20: mol_type = other DNA
aagctgaggtgggaggatca

SEQ ID NO: 211998 - DNA, 20 bp, synthetic construct
  source 1..20: mol_type = other DNA
gaagctgaggtgggaggatc

SEQ ID NO: 211999 - DNA, 20 bp, synthetic construct
  source 1..20: mol_type = other DNA
ggaagctgaggtgggaggat

SEQ ID NO: 212000 - DNA, 20 bp, synthetic construct
  source 1..20: mol_type = other DNA
gggaagctgaggtgggagga

SEQ ID NO: 212001 - DNA, 20 bp, synthetic construct
  source 1..20: mol_type = other DNA
agggaagctgaggtgggagg

SEQ ID NO: 212002 - DNA, 20 bp, synthetic construct
  source 1..20: mol_type = other DNA
tagggaagctgaggtgggag

SEQ ID NO: 212003 - DNA, 20 bp, synthetic construct
  source 1..20: mol_type = other DNA
ctagggaagctgaggtggga

SEQ ID NO: 212004 - DNA, 20 bp, synthetic construct
  source 1..20: mol_type = other DNA
actagggaagctgaggtggg

SEQ ID NO: 212005 - DNA, 20 bp, synthetic construct
  source 1..20: mol_type = other DNA
tactagggaagctgaggtgg

SEQ ID NO: 212006 - DNA, 20 bp, synthetic construct
  source 1..20: mol_type = other DNA
ctactagggaagctgaggtg

SEQ ID NO: 212007 - DNA, 20 bp, synthetic construct
  source 1..20: mol_type = other DNA
gctactagggaagctgaggt

SEQ ID NO: 212008 - DNA, 20 bp, synthetic construct
  source 1..20: mol_type = other DNA
agctactagggaagctgagg

SEQ ID NO: 212009 - DNA, 20 bp, synthetic construct
  source 1..20: mol_type = other DNA
cagctactagggaagctgag

SEQ ID NO: 212010 - DNA, 20 bp, synthetic construct
  source 1..20: mol_type = other DNA
ccagctactagggaagctga

SEQ ID NO: 212011 - DNA, 20 bp, synthetic construct
  source 1..20: mol_type = other DNA
tccagctactagggaagctg

SEQ ID NO: 212012 - DNA, 20 bp, synthetic construct
  source 1..20: mol_type = other DNA
ttccagctactagggaagct

SEQ ID NO: 212013 - DNA, 20 bp, synthetic construct
  source 1..20: mol_type = other DNA
gttccagctactagggaagc

SEQ ID NO: 212014 - DNA, 20 bp, synthetic construct
  source 1..20: mol_type = other DNA
agttccagctactagggaag

SEQ ID NO: 212015 - DNA, 20 bp, synthetic construct
  source 1..20: mol_type = other DNA
tagttccagctactagggaa

SEQ ID NO: 212016 - DNA, 20 bp, synthetic construct
  source 1..20: mol_type = other DNA
gtagttccagctactaggga

SEQ ID NO: 212017 - DNA, 20 bp, synthetic construct
  source 1..20: mol_type = other DNA
tgtagttccagctactaggg

SEQ ID NO: 212018 - DNA, 20 bp, synthetic construct
  source 1..20: mol_type = other DNA
ctgtagttccagctactagg

SEQ ID NO: 212019 - DNA, 20 bp, synthetic construct
  source 1..20: mol_type = other DNA
cctgtagttccagctactag

SEQ ID NO: 212020 - DNA, 20 bp, synthetic construct
  source 1..20: mol_type = other DNA
ccctgtagttccagctacta

SEQ ID NO: 212021 - DNA, 20 bp, synthetic construct
  source 1..20: mol_type = other DNA
cccctgtagttccagctact

SEQ ID NO: 212022 - DNA, 20 bp, synthetic construct
  source 1..20: mol_type = other DNA
acccctgtagttccagctac

SEQ ID NO: 212023 - DNA, 20 bp, synthetic construct
  source 1..20: mol_type = other DNA
cacccctgtagttccagcta

SEQ ID NO: 212024 - DNA, 20 bp, synthetic construct
  source 1..20: mol_type = other DNA
tcacccctgtagttccagct

SEQ ID NO: 212025 - DNA, 20 bp, synthetic construct
  source 1..20: mol_type = other DNA
ctcacccctgtagttccagc

SEQ ID NO: 212026 - DNA, 20 bp, synthetic construct
  source 1..20: mol_type = other DNA
gctcacccctgtagttccag

SEQ ID NO: 212027 - DNA, 20 bp, synthetic construct
  source 1..20: mol_type = other DNA
ggctcacccctgtagttcca

SEQ ID NO: 212028 - DNA, 20 bp, synthetic construct
  source 1..20: mol_type = other DNA
gggctcacccctgtagttcc

SEQ ID NO: 212029 - DNA, 20 bp, synthetic construct
  source 1..20: mol_type = other DNA
ggggctcacccctgtagttc

SEQ ID NO: 212030 - DNA, 20 bp, synthetic construct
  source 1..20: mol_type = other DNA
gggggctcacccctgtagtt

SEQ ID NO: 212031 - DNA, 20 bp, synthetic construct
  source 1..20: mol_type = other DNA
tgggggctcacccctgtagt

SEQ ID NO: 212032 - DNA, 20 bp, synthetic construct
  source 1..20: mol_type = other DNA
atgggggctcacccctgtag

SEQ ID NO: 212033 - DNA, 20 bp, synthetic construct
  source 1..20: mol_type = other DNA
catgggggctcacccctgta

SEQ ID NO: 212034 - DNA, 20 bp, synthetic construct
  source 1..20: mol_type = other DNA
gcatgggggctcacccctgt

SEQ ID NO: 212035 - DNA, 20 bp, synthetic construct
  source 1..20: mol_type = other DNA
ggcatgggggctcacccctg

SEQ ID NO: 212036 - DNA, 20 bp, synthetic construct
  source 1..20: mol_type = other DNA
gggcatgggggctcacccct

SEQ ID NO: 212037 - DNA, 20 bp, synthetic construct
  source 1..20: mol_type = other DNA
tgggcatgggggctcacccc

SEQ ID NO: 212038 - DNA, 20 bp, synthetic construct
  source 1..20: mol_type = other DNA
ctgggcatgggggctcaccc

SEQ ID NO: 212039 - DNA, 20 bp, synthetic construct
  source 1..20: mol_type = other DNA
gctgggcatgggggctcacc

SEQ ID NO: 212040 - DNA, 20 bp, synthetic construct
  source 1..20: mol_type = other DNA
agctgggcatgggggctcac

SEQ ID NO: 212041 - DNA, 20 bp, synthetic construct
  source 1..20: mol_type = other DNA
tagctgggcatgggggctca

SEQ ID NO: 212042 - DNA, 20 bp, synthetic construct
  source 1..20: mol_type = other DNA
ttagctgggcatgggggctc

SEQ ID NO: 212043 - DNA, 20 bp, synthetic construct
  source 1..20: mol_type = other DNA
attagctgggcatgggggct

SEQ ID NO: 212044 - DNA, 20 bp, synthetic construct
  source 1..20: mol_type = other DNA
aattagctgggcatgggggc

SEQ ID NO: 212045 - DNA, 20 bp, synthetic construct
  source 1..20: mol_type = other DNA
aaattagctgggcatggggg

SEQ ID NO: 212046 - DNA, 20 bp, synthetic construct
  source 1..20: mol_type = other DNA
aaaattagctgggcatgggg

SEQ ID NO: 212047 - DNA, 20 bp, synthetic construct
  source 1..20: mol_type = other DNA
aaaaattagctgggcatggg

SEQ ID NO: 212048 - DNA, 20 bp, synthetic construct
  source 1..20: mol_type = other DNA
aaaaaattagctgggcatgg

SEQ ID NO: 212049 - DNA, 20 bp, synthetic construct
  source 1..20: mol_type = other DNA
aaaaaaattagctgggcatg

SEQ ID NO: 212050 - DNA, 20 bp, synthetic construct
  source 1..20: mol_type = other DNA
aaaaaaaattagctgggcat

SEQ ID NO: 212051 - DNA, 20 bp, synthetic construct
  source 1..20: mol_type = other DNA
aaaaaaaaattagctgggca

SEQ ID NO: 212052 - DNA, 20 bp, synthetic construct
  source 1..20: mol_type = other DNA
aaaaaaaaaattagctgggc

SEQ ID NO: 212053 - DNA, 20 bp, synthetic construct
  source 1..20: mol_type = other DNA
aaaaaaaaaaattagctggg

SEQ ID NO: 212054 - DNA, 20 bp, synthetic construct
  source 1..20: mol_type = other DNA
aaaaaaaaaaaattagctgg

SEQ ID NO: 212055 - DNA, 20 bp, synthetic construct
  source 1..20: mol_type = other DNA
aaaaaaaaaaaaattagctg

SEQ ID NO: 212056 - DNA, 20 bp, synthetic construct
  source 1..20: mol_type = other DNA
aaaaaaaaaaaaaattagct

SEQ ID NO: 212057 - DNA, 20 bp, synthetic construct
  source 1..20: mol_type = other DNA
aaaaaaaaaaaaaaattagc

SEQ ID NO: 212058 - DNA, 20 bp, synthetic construct
  source 1..20: mol_type = other DNA
aaaaaaaaaaaaaaaattag

SEQ ID NO: 212059 - DNA, 20 bp, synthetic construct
  source 1..20: mol_type = other DNA
aaaaaaaaaaaaaaaaatta

SEQ ID NO: 212060 - DNA, 20 bp, synthetic construct
  source 1..20: mol_type = other DNA
aaaaaaaaaaaaaaaaaatt

SEQ ID NO: 212061 - DNA, 20 bp, synthetic construct
  source 1..20: mol_type = other DNA
aaaaaaaaaaaaaaaaaaat

SEQ ID NO: 212062 - DNA, 20 bp, synthetic construct
  source 1..20: mol_type = other DNA
aaaaaaaaaaaaaaaaaaaa

SEQ ID NO: 212063 - DNA, 20 bp, synthetic construct
  source 1..20: mol_type = other DNA
aaaaaaaaaaaaaaaaaaaa

SEQ ID NO: 212064 - DNA, 20 bp, synthetic construct
  source 1..20: mol_type = other DNA
caaaaaaaaaaaaaaaaaaa

SEQ ID NO: 212065 - DNA, 20 bp, synthetic construct
  source 1..20: mol_type = other DNA
tcaaaaaaaaaaaaaaaaaa

SEQ ID NO: 212066 - DNA, 20 bp, synthetic construct
  source 1..20: mol_type = other DNA
ctcaaaaaaaaaaaaaaaaa

SEQ ID NO: 212067 - DNA, 20 bp, synthetic construct
  source 1..20: mol_type = other DNA
tctcaaaaaaaaaaaaaaaa

SEQ ID NO: 212068 - DNA, 20 bp, synthetic construct
  source 1..20: mol_type = other DNA
gtctcaaaaaaaaaaaaaaa

SEQ ID NO: 212069 - DNA, 20 bp, synthetic construct
  source 1..20: mol_type = other DNA
tgtctcaaaaaaaaaaaaaa

SEQ ID NO: 212070 - DNA, 20 bp, synthetic construct
  source 1..20: mol_type = other DNA
ctgtctcaaaaaaaaaaaaa

SEQ ID NO: 212071 - DNA, 20 bp, synthetic construct
  source 1..20: mol_type = other DNA
tctgtctcaaaaaaaaaaaa

SEQ ID NO: 212072 - DNA, 20 bp, synthetic construct
  source 1..20: mol_type = other DNA
ctctgtctcaaaaaaaaaaa

SEQ ID NO: 212073 - DNA, 20 bp, synthetic construct
  source 1..20: mol_type = other DNA
actctgtctcaaaaaaaaaa

SEQ ID NO: 212074 - DNA, 20 bp, synthetic construct
  source 1..20: mol_type = other DNA
gactctgtctcaaaaaaaaa

SEQ ID NO: 212075 - DNA, 20 bp, synthetic construct
  source 1..20: mol_type = other DNA
agactctgtctcaaaaaaaa

SEQ ID NO: 212076 - DNA, 20 bp, synthetic construct
  source 1..20: mol_type = other DNA
gagactctgtctcaaaaaaa

SEQ ID NO: 212077 - DNA, 20 bp, synthetic construct
  source 1..20: mol_type = other DNA
tgagactctgtctcaaaaaa

SEQ ID NO: 212078 - DNA, 20 bp, synthetic construct
  source 1..20: mol_type = other DNA
gtgagactctgtctcaaaaa

SEQ ID NO: 212079 - DNA, 20 bp, synthetic construct
  source 1..20: mol_type = other DNA
agtgagactctgtctcaaaa

SEQ ID NO: 212080 - DNA, 20 bp, synthetic construct
  source 1..20: mol_type = other DNA
gagtgagactctgtctcaaa

SEQ ID NO: 212081 - DNA, 20 bp, synthetic construct
  source 1..20: mol_type = other DNA
tgagtgagactctgtctcaa

SEQ ID NO: 212082 - DNA, 20 bp, synthetic construct
  source 1..20: mol_type = other DNA
ctgagtgagactctgtctca

SEQ ID NO: 212083 - DNA, 20 bp, synthetic construct
  source 1..20: mol_type = other DNA
actgagtgagactctgtctc

SEQ ID NO: 212084 - DNA, 20 bp, synthetic construct
  source 1..20: mol_type = other DNA
gactgagtgagactctgtct

SEQ ID NO: 212085 - DNA, 20 bp, synthetic construct
  source 1..20: mol_type = other DNA
tgactgagtgagactctgtc

SEQ ID NO: 212086 - DNA, 20 bp, synthetic construct
  source 1..20: mol_type = other DNA
gtgactgagtgagactctgt

SEQ ID NO: 212087 - DNA, 20 bp, synthetic construct
  source 1..20: mol_type = other DNA
ggtgactgagtgagactctg

SEQ ID NO: 212088 - DNA, 20 bp, synthetic construct
  source 1..20: mol_type = other DNA
gggtgactgagtgagactct

SEQ ID NO: 212089 - DNA, 20 bp, synthetic construct
  source 1..20: mol_type = other DNA
tgggtgactgagtgagactc

SEQ ID NO: 212090 - DNA, 20 bp, synthetic construct
  source 1..20: mol_type = other DNA
ctgggtgactgagtgagact

SEQ ID NO: 212091 - DNA, 20 bp, synthetic construct
  source 1..20: mol_type = other DNA
cctgggtgactgagtgagac

SEQ ID NO: 212092 - DNA, 20 bp, synthetic construct
  source 1..20: mol_type = other DNA
gcctgggtgactgagtgaga

SEQ ID NO: 212093 - DNA, 20 bp, synthetic construct
  source 1..20: mol_type = other DNA
agcctgggtgactgagtgag

SEQ ID NO: 212094 - DNA, 20 bp, synthetic construct
  source 1..20: mol_type = other DNA
cagcctgggtgactgagtga

SEQ ID NO: 212095 - DNA, 20 bp, synthetic construct
  source 1..20: mol_type = other DNA
ccagcctgggtgactgagtg

SEQ ID NO: 212096 - DNA, 20 bp, synthetic construct
  source 1..20: mol_type = other DNA
accagcctgggtgactgagt

SEQ ID NO: 212097 - DNA, 20 bp, synthetic construct
  source 1..20: mol_type = other DNA
caccagcctgggtgactgag

SEQ ID NO: 212098 - DNA, 20 bp, synthetic construct
  source 1..20: mol_type = other DNA
acaccagcctgggtgactga

SEQ ID NO: 212099 - DNA, 20 bp, synthetic construct
  source 1..20: mol_type = other DNA
cacaccagcctgggtgactg

SEQ ID NO: 212100 - DNA, 20 bp, synthetic construct
  source 1..20: mol_type = other DNA
gcacaccagcctgggtgact

SEQ ID NO: 212101 - DNA, 20 bp, synthetic construct
  source 1..20: mol_type = other DNA
tgcacaccagcctgggtgac

SEQ ID NO: 212102 - DNA, 20 bp, synthetic construct
  source 1..20: mol_type = other DNA
ctgcacaccagcctgggtga

SEQ ID NO: 212103 - DNA, 20 bp, synthetic construct
  source 1..20: mol_type = other DNA
actgcacaccagcctgggtg

SEQ ID NO: 212104 - DNA, 20 bp, synthetic construct
  source 1..20: mol_type = other DNA
cactgcacaccagcctgggt

SEQ ID NO: 212105 - DNA, 20 bp, synthetic construct
  source 1..20: mol_type = other DNA
ccactgcacaccagcctggg

SEQ ID NO: 212106 - DNA, 20 bp, synthetic construct
  source 1..20: mol_type = other DNA
accactgcacaccagcctgg

SEQ ID NO: 212107 - DNA, 20 bp, synthetic construct
  source 1..20: mol_type = other DNA
caccactgcacaccagcctg

SEQ ID NO: 212108 - DNA, 20 bp, synthetic construct
  source 1..20: mol_type = other DNA
gcaccactgcacaccagcct

SEQ ID NO: 212109 - DNA, 20 bp, synthetic construct
  source 1..20: mol_type = other DNA
tgcaccactgcacaccagcc

SEQ ID NO: 212110 - DNA, 20 bp, synthetic construct
  source 1..20: mol_type = other DNA
ttgcaccactgcacaccagc

SEQ ID NO: 212111 - DNA, 20 bp, synthetic construct
  source 1..20: mol_type = other DNA
attgcaccactgcacaccag

SEQ ID NO: 212112 - DNA, 20 bp, synthetic construct
  source 1..20: mol_type = other DNA
gattgcaccactgcacacca

SEQ ID NO: 212113 - DNA, 20 bp, synthetic construct
  source 1..20: mol_type = other DNA
agattgcaccactgcacacc

SEQ ID NO: 212114 - DNA, 20 bp, synthetic construct
  source 1..20: mol_type = other DNA
gagattgcaccactgcacac

SEQ ID NO: 212115 - DNA, 20 bp, synthetic construct
  source 1..20: mol_type = other DNA
tgagattgcaccactgcaca

SEQ ID NO: 212116 - DNA, 20 bp, synthetic construct
  source 1..20: mol_type = other DNA
ctgagattgcaccactgcac

SEQ ID NO: 212117 - DNA, 20 bp, synthetic construct
  source 1..20: mol_type = other DNA
gctgagattgcaccactgca

SEQ ID NO: 212118 - DNA, 20 bp, synthetic construct
  source 1..20: mol_type = other DNA
agctgagattgcaccactgc

SEQ ID NO: 212119 - DNA, 20 bp, synthetic construct
  source 1..20: mol_type = other DNA
gagctgagattgcaccactg

SEQ ID NO: 212120 - DNA, 20 bp, synthetic construct
  source 1..20: mol_type = other DNA
tgagctgagattgcaccact

SEQ ID NO: 212121 - DNA, 20 bp, synthetic construct
  source 1..20: mol_type = other DNA
gtgagctgagattgcaccac

SEQ ID NO: 212122 - DNA, 20 bp, synthetic construct
  source 1..20: mol_type = other DNA
tgtgagctgagattgcacca

SEQ ID NO: 212123 - DNA, 20 bp, synthetic construct
  source 1..20: mol_type = other DNA
ctgtgagctgagattgcacc

SEQ ID NO: 212124 - DNA, 20 bp, synthetic construct
  source 1..20: mol_type = other DNA
gctgtgagctgagattgcac

SEQ ID NO: 212125 - DNA, 20 bp, synthetic construct
  source 1..20: mol_type = other DNA
tgctgtgagctgagattgca

SEQ ID NO: 212126 - DNA, 20 bp, synthetic construct
  source 1..20: mol_type = other DNA
ttgctgtgagctgagattgc

SEQ ID NO: 212127 - DNA, 20 bp, synthetic construct
  source 1..20: mol_type = other DNA
gttgctgtgagctgagattg

SEQ ID NO: 212128 - DNA, 20 bp, synthetic construct
  source 1..20: mol_type = other DNA
ggttgctgtgagctgagatt

SEQ ID NO: 212129 - DNA, 20 bp, synthetic construct
  source 1..20: mol_type = other DNA
aggttgctgtgagctgagat

SEQ ID NO: 212130 - DNA, 20 bp, synthetic construct
  source 1..20: mol_type = other DNA
gaggttgctgtgagctgaga

SEQ ID NO: 212131 - DNA, 20 bp, synthetic construct
  source 1..20: mol_type = other DNA
ggaggttgctgtgagctgag

SEQ ID NO: 212132 - DNA, 20 bp, synthetic construct
  source 1..20: mol_type = other DNA
cggaggttgctgtgagctga

SEQ ID NO: 212133 - DNA, 20 bp, synthetic construct
  source 1..20: mol_type = other DNA
gcggaggttgctgtgagctg

SEQ ID NO: 212134 - DNA, 20 bp, synthetic construct
  source 1..20: mol_type = other DNA
ggcggaggttgctgtgagct

SEQ ID NO: 212135 - DNA, 20 bp, synthetic construct
  source 1..20: mol_type = other DNA
aggcggaggttgctgtgagc

SEQ ID NO: 212136 - DNA, 20 bp, synthetic construct
  source 1..20: mol_type = other DNA
gaggcggaggttgctgtgag

SEQ ID NO: 212137 - DNA, 20 bp, synthetic construct
  source 1..20: mol_type = other DNA
ggaggcggaggttgctgtga

SEQ ID NO: 212138 - DNA, 20 bp, synthetic construct
  source 1..20: mol_type = other DNA
aggaggcggaggttgctgtg

SEQ ID NO: 212139 - DNA, 20 bp, synthetic construct
  source 1..20: mol_type = other DNA
caggaggcggaggttgctgt

SEQ ID NO: 212140 - DNA, 20 bp, synthetic construct
  source 1..20: mol_type = other DNA
ccaggaggcggaggttgctg

SEQ ID NO: 212141 - DNA, 20 bp, synthetic construct
  source 1..20: mol_type = other DNA
cccaggaggcggaggttgct

SEQ ID NO: 212142 - DNA, 20 bp, synthetic construct
  source 1..20: mol_type = other DNA
acccaggaggcggaggttgc

SEQ ID NO: 212143 - DNA, 20 bp, synthetic construct
  source 1..20: mol_type = other DNA
aacccaggaggcggaggttg

SEQ ID NO: 212144 - DNA, 20 bp, synthetic construct
  source 1..20: mol_type = other DNA
gaacccaggaggcggaggtt

SEQ ID NO: 212145 - DNA, 20 bp, synthetic construct
  source 1..20: mol_type = other DNA
tgaacccaggaggcggaggt

SEQ ID NO: 212146 - DNA, 20 bp, synthetic construct
  source 1..20: mol_type = other DNA
ttgaacccaggaggcggagg

SEQ ID NO: 212147 - DNA, 20 bp, synthetic construct
  source 1..20: mol_type = other DNA
cttgaacccaggaggcggag

SEQ ID NO: 212148 - DNA, 20 bp, synthetic construct
  source 1..20: mol_type = other DNA
acttgaacccaggaggcgga

SEQ ID NO: 212149 - DNA, 20 bp, synthetic construct
  source 1..20: mol_type = other DNA
cacttgaacccaggaggcgg

SEQ ID NO: 212150 - DNA, 20 bp, synthetic construct
  source 1..20: mol_type = other DNA
tcacttgaacccaggaggcg

SEQ ID NO: 212151 - DNA, 20 bp, synthetic construct
  source 1..20: mol_type = other DNA
atcacttgaacccaggaggc

SEQ ID NO: 212152 - DNA, 20 bp, synthetic construct
  source 1..20: mol_type = other DNA
aatcacttgaacccaggagg

SEQ ID NO: 212153 - DNA, 20 bp, synthetic construct
  source 1..20: mol_type = other DNA
gaatcacttgaacccaggag

SEQ ID NO: 212154 - DNA, 20 bp, synthetic construct
  source 1..20: mol_type = other DNA
agaatcacttgaacccagga

SEQ ID NO: 212155 - DNA, 20 bp, synthetic construct
  source 1..20: mol_type = other DNA
aagaatcacttgaacccagg

SEQ ID NO: 212156 - DNA, 20 bp, synthetic construct
  source 1..20: mol_type = other DNA
caagaatcacttgaacccag

SEQ ID NO: 212157 - DNA, 20 bp, synthetic construct
  source 1..20: mol_type = other DNA
acaagaatcacttgaaccca

SEQ ID NO: 212158 - DNA, 20 bp, synthetic construct
  source 1..20: mol_type = other DNA
cacaagaatcacttgaaccc

SEQ ID NO: 212159 - DNA, 20 bp, synthetic construct
  source 1..20: mol_type = other DNA
gcacaagaatcacttgaacc

SEQ ID NO: 212160 - DNA, 20 bp, synthetic construct
  source 1..20: mol_type = other DNA
ggcacaagaatcacttgaac

SEQ ID NO: 212161 - DNA, 20 bp, synthetic construct
  source 1..20: mol_type = other DNA
aggcacaagaatcacttgaa

SEQ ID NO: 212162 - DNA, 20 bp, synthetic construct
  source 1..20: mol_type = other DNA
gaggcacaagaatcacttga

SEQ ID NO: 212163 - DNA, 20 bp, synthetic construct
  source 1..20: mol_type = other DNA
tgaggcacaagaatcacttg

SEQ ID NO: 212164 - DNA, 20 bp, synthetic construct
  source 1..20: mol_type = other DNA
ctgaggcacaagaatcactt

SEQ ID NO: 212165 - DNA, 20 bp, synthetic construct
  source 1..20: mol_type = other DNA
gctgaggcacaagaatcact

SEQ ID NO: 212166 - DNA, 20 bp, synthetic construct
  source 1..20: mol_type = other DNA
ggctgaggcacaagaatcac

SEQ ID NO: 212167 - DNA, 20 bp, synthetic construct
  source 1..20: mol_type = other DNA
aggctgaggcacaagaatca

SEQ ID NO: 212168 - DNA, 20 bp, synthetic construct
  source 1..20: mol_type = other DNA
gaggctgaggcacaagaatc

SEQ ID NO: 212169 - DNA, 20 bp, synthetic construct
  source 1..20: mol_type = other DNA
ggaggctgaggcacaagaat

SEQ ID NO: 212170 - DNA, 20 bp, synthetic construct
  source 1..20: mol_type = other DNA
gggaggctgaggcacaagaa

SEQ ID NO: 212171 - DNA, 20 bp, synthetic construct
  source 1..20: mol_type = other DNA
tgggaggctgaggcacaaga

SEQ ID NO: 212172 - DNA, 20 bp, synthetic construct
  source 1..20: mol_type = other DNA
ttgggaggctgaggcacaag

SEQ ID NO: 212173 - DNA, 20 bp, synthetic construct
  source 1..20: mol_type = other DNA
cttgggaggctgaggcacaa

SEQ ID NO: 212174 - DNA, 20 bp, synthetic construct
  source 1..20: mol_type = other DNA
ccttgggaggctgaggcaca

SEQ ID NO: 212175 - DNA, 20 bp, synthetic construct
  source 1..20: mol_type = other DNA
tccttgggaggctgaggcac

SEQ ID NO: 212176 - DNA, 20 bp, synthetic construct
  source 1..20: mol_type = other DNA
ctccttgggaggctgaggca

SEQ ID NO: 212177 - DNA, 20 bp, synthetic construct
  source 1..20: mol_type = other DNA
gctccttgggaggctgaggc

SEQ ID NO: 212178 - DNA, 20 bp, synthetic construct
  source 1..20: mol_type = other DNA
agctccttgggaggctgagg

SEQ ID NO: 212179 - DNA, 20 bp, synthetic construct
  source 1..20: mol_type = other DNA
cagctccttgggaggctgag

SEQ ID NO: 212180 - DNA, 20 bp, synthetic construct
  source 1..20: mol_type = other DNA
ccagctccttgggaggctga

SEQ ID NO: 212181 - DNA, 20 bp, synthetic construct
  source 1..20: mol_type = other DNA
cccagctccttgggaggctg

SEQ ID NO: 212182 - DNA, 20 bp, synthetic construct
  source 1..20: mol_type = other DNA
tcccagctccttgggaggct

SEQ ID NO: 212183 - DNA, 20 bp, synthetic construct
  source 1..20: mol_type = other DNA
gtcccagctccttgggaggc

SEQ ID NO: 212184 - DNA, 20 bp, synthetic construct
  source 1..20: mol_type = other DNA
agtcccagctccttgggagg

SEQ ID NO: 212185 - DNA, 20 bp, synthetic construct
  source 1..20: mol_type = other DNA
tagtcccagctccttgggag

SEQ ID NO: 212186 - DNA, 20 bp, synthetic construct
  source 1..20: mol_type = other DNA
gtagtcccagctccttggga

SEQ ID NO: 212187 - DNA, 20 bp, synthetic construct
  source 1..20: mol_type = other DNA
tgtagtcccagctccttggg

SEQ ID NO: 212188 - DNA, 20 bp, synthetic construct
  source 1..20: mol_type = other DNA
ctgtagtcccagctccttgg

SEQ ID NO: 212189 - DNA, 20 bp, synthetic construct
  source 1..20: mol_type = other DNA
cctgtagtcccagctccttg

SEQ ID NO: 212190 - DNA, 20 bp, synthetic construct
  source 1..20: mol_type = other DNA
acctgtagtcccagctcctt

SEQ ID NO: 212191 - DNA, 20 bp, synthetic construct
  source 1..20: mol_type = other DNA
cacctgtagtcccagctcct

SEQ ID NO: 212192 - DNA, 20 bp, synthetic construct
  source 1..20: mol_type = other DNA
acacctgtagtcccagctcc

SEQ ID NO: 212193 - DNA, 20 bp, synthetic construct
  source 1..20: mol_type = other DNA
cacacctgtagtcccagctc

SEQ ID NO: 212194 - DNA, 20 bp, synthetic construct
  source 1..20: mol_type = other DNA
gcacacctgtagtcccagct

SEQ ID NO: 212195 - DNA, 20 bp, synthetic construct
  source 1..20: mol_type = other DNA
tgcacacctgtagtcccagc

SEQ ID NO: 212196 - DNA, 20 bp, synthetic construct
  source 1..20: mol_type = other DNA
gtgcacacctgtagtcccag

SEQ ID NO: 212197 - DNA, 20 bp, synthetic construct
  source 1..20: mol_type = other DNA
ggtgcacacctgtagtccca

SEQ ID NO: 212198 - DNA, 20 bp, synthetic construct
  source 1..20: mol_type = other DNA
tggtgcacacctgtagtccc

SEQ ID NO: 212199 - DNA, 20 bp, synthetic construct
  source 1..20: mol_type = other DNA
gtggtgcacacctgtagtcc

SEQ ID NO: 212200 - DNA, 20 bp, synthetic construct
  source 1..20: mol_type = other DNA
ggtggtgcacacctgtagtc

SEQ ID NO: 212201 - DNA, 20 bp, synthetic construct
  source 1..20: mol_type = other DNA
tggtggtgcacacctgtagt

SEQ ID NO: 212202 - DNA, 20 bp, synthetic construct
  source 1..20: mol_type = other DNA
gtggtggtgcacacctgtag

SEQ ID NO: 212203 - DNA, 20 bp, synthetic construct
  source 1..20: mol_type = other DNA
cgtggtggtgcacacctgta

SEQ ID NO: 212204 - DNA, 20 bp, synthetic construct
  source 1..20: mol_type = other DNA
gcgtggtggtgcacacctgt

SEQ ID NO: 212205 - DNA, 20 bp, synthetic construct
  source 1..20: mol_type = other DNA
ggcgtggtggtgcacacctg

SEQ ID NO: 212206 - DNA, 20 bp, synthetic construct
  source 1..20: mol_type = other DNA
gggcgtggtggtgcacacct

SEQ ID NO: 212207 - DNA, 20 bp, synthetic construct
  source 1..20: mol_type = other DNA
cgggcgtggtggtgcacacc

SEQ ID NO: 212208 - DNA, 20 bp, synthetic construct
  source 1..20: mol_type = other DNA
tcgggcgtggtggtgcacac

SEQ ID NO: 212209 - DNA, 20 bp, synthetic construct
  source 1..20: mol_type = other DNA
gtcgggcgtggtggtgcaca

SEQ ID NO: 212210 - DNA, 20 bp, synthetic construct
  source 1..20: mol_type = other DNA
agtcgggcgtggtggtgcac

SEQ ID NO: 212211 - DNA, 20 bp, synthetic construct
  source 1..20: mol_type = other DNA
tagtcgggcgtggtggtgca

SEQ ID NO: 212212 - DNA, 20 bp, synthetic construct
  source 1..20: mol_type = other DNA
ttagtcgggcgtggtggtgc

SEQ ID NO: 212213 - DNA, 20 bp, synthetic construct
  source 1..20: mol_type = other DNA
attagtcgggcgtggtggtg

SEQ ID NO: 212214 - DNA, 20 bp, synthetic construct
  source 1..20: mol_type = other DNA
aattagtcgggcgtggtggt

SEQ ID NO: 212215 - DNA, 20 bp, synthetic construct
  source 1..20: mol_type = other DNA
aaattagtcgggcgtggtgg

SEQ ID NO: 212216 - DNA, 20 bp, synthetic construct
  source 1..20: mol_type = other DNA
aaaattagtcgggcgtggtg

SEQ ID NO: 212217 - DNA, 20 bp, synthetic construct
  source 1..20: mol_type = other DNA
aaaaattagtcgggcgtggt

SEQ ID NO: 212218 - DNA, 20 bp, synthetic construct
  source 1..20: mol_type = other DNA
caaaaattagtcgggcgtgg

SEQ ID NO: 212219 - DNA, 20 bp, synthetic construct
  source 1..20: mol_type = other DNA
acaaaaattagtcgggcgtg

SEQ ID NO: 212220 - DNA, 20 bp, synthetic construct
  source 1..20: mol_type = other DNA
tacaaaaattagtcgggcgt

SEQ ID NO: 212221 - DNA, 20 bp, synthetic construct
  source 1..20: mol_type = other DNA
atacaaaaattagtcgggcg

SEQ ID NO: 212222 - DNA, 20 bp, synthetic construct
  source 1..20: mol_type = other DNA
aatacaaaaattagtcgggc

SEQ ID NO: 212223 - DNA, 20 bp, synthetic construct
  source 1..20: mol_type = other DNA
aaatacaaaaattagtcggg

SEQ ID NO: 212224 - DNA, 20 bp, synthetic construct
  source 1..20: mol_type = other DNA
aaaatacaaaaattagtcgg

SEQ ID NO: 212225 - DNA, 20 bp, synthetic construct
  source 1..20: mol_type = other DNA
aaaaatacaaaaattagtcg

SEQ ID NO: 212226 - DNA, 20 bp, synthetic construct
  source 1..20: mol_type = other DNA
taaaaatacaaaaattagtc

SEQ ID NO: 212227 - DNA, 20 bp, synthetic construct
  source 1..20: mol_type = other DNA
ctaaaaatacaaaaattagt

SEQ ID NO: 212228 - DNA, 20 bp, synthetic construct
  source 1..20: mol_type = other DNA
actaaaaatacaaaaattag

SEQ ID NO: 212229 - DNA, 20 bp, synthetic construct
  source 1..20: mol_type = other DNA
tactaaaaatacaaaaatta

SEQ ID NO: 212230 - DNA, 20 bp, synthetic construct
  source 1..20: mol_type = other DNA
ttactaaaaatacaaaaatt

SEQ ID NO: 212231 - DNA, 20 bp, synthetic construct
  source 1..20: mol_type = other DNA
tttactaaaaatacaaaaat

SEQ ID NO: 212232 - DNA, 20 bp, synthetic construct
  source 1..20: mol_type = other DNA
ctttactaaaaatacaaaaa

SEQ ID NO: 212233 - DNA, 20 bp, synthetic construct
  source 1..20: mol_type = other DNA
tctttactaaaaatacaaaa

SEQ ID NO: 212234 - DNA, 20 bp, synthetic construct
  source 1..20: mol_type = other DNA
atctttactaaaaatacaaa

SEQ ID NO: 212235 - DNA, 20 bp, synthetic construct
  source 1..20: mol_type = other DNA
catctttactaaaaatacaa

SEQ ID NO: 212236 - DNA, 20 bp, synthetic construct
  source 1..20: mol_type = other DNA
ccatctttactaaaaataca

SEQ ID NO: 212237 - DNA, 20 bp, synthetic construct
  source 1..20: mol_type = other DNA
cccatctttactaaaaatac

SEQ ID NO: 212238 - DNA, 20 bp, synthetic construct
  source 1..20: mol_type = other DNA
ccccatctttactaaaaata

SEQ ID NO: 212239 - DNA, 20 bp, synthetic construct
  source 1..20: mol_type = other DNA
accccatctttactaaaaat

SEQ ID NO: 212240 - DNA, 20 bp, synthetic construct
  source 1..20: mol_type = other DNA
aaccccatctttactaaaaa

SEQ ID NO: 212241 - DNA, 20 bp, synthetic construct
  source 1..20: mol_type = other DNA
aaaccccatctttactaaaa

SEQ ID NO: 212242 - DNA, 20 bp, synthetic construct
  source 1..20: mol_type = other DNA
gaaaccccatctttactaaa

SEQ ID NO: 212243 - DNA, 20 bp, synthetic construct
  source 1..20: mol_type = other DNA
tgaaaccccatctttactaa

SEQ ID NO: 212244 - DNA, 20 bp, synthetic construct
  source 1..20: mol_type = other DNA
gtgaaaccccatctttacta

SEQ ID NO: 212245 - DNA, 20 bp, synthetic construct
  source 1..20: mol_type = other DNA
ggtgaaaccccatctttact

SEQ ID NO: 212246 - DNA, 20 bp, synthetic construct
  source 1..20: mol_type = other DNA
tggtgaaaccccatctttac

SEQ ID NO: 212247 - DNA, 20 bp, synthetic construct
  source 1..20: mol_type = other DNA
atggtgaaaccccatcttta

SEQ ID NO: 212248 - DNA, 20 bp, synthetic construct
  source 1..20: mol_type = other DNA
catggtgaaaccccatcttt

SEQ ID NO: 212249 - DNA, 20 bp, synthetic construct
  source 1..20: mol_type = other DNA
acatggtgaaaccccatctt

SEQ ID NO: 212250 - DNA, 20 bp, synthetic construct
  source 1..20: mol_type = other DNA
aacatggtgaaaccccatct

SEQ ID NO: 212251 - DNA, 20 bp, synthetic construct
  source 1..20: mol_type = other DNA
caacatggtgaaaccccatc

SEQ ID NO: 212252 - DNA, 20 bp, synthetic construct
  source 1..20: mol_type = other DNA
ccaacatggtgaaaccccat

SEQ ID NO: 212253 - DNA, 20 bp, synthetic construct
  source 1..20: mol_type = other DNA
gccaacatggtgaaacccca

SEQ ID NO: 212254 - DNA, 20 bp, synthetic construct
  source 1..20: mol_type = other DNA
ggccaacatggtgaaacccc

SEQ ID NO: 212255 - DNA, 20 bp, synthetic construct
  source 1..20: mol_type = other DNA
tggccaacatggtgaaaccc

SEQ ID NO: 212256 - DNA, 20 bp, synthetic construct
  source 1..20: mol_type = other DNA
ctggccaacatggtgaaacc

SEQ ID NO: 212257 - DNA, 20 bp, synthetic construct
  source 1..20: mol_type = other DNA
cctggccaacatggtgaaac

SEQ ID NO: 212258 - DNA, 20 bp, synthetic construct
  source 1..20: mol_type = other DNA
gcctggccaacatggtgaaa

SEQ ID NO: 212259 - DNA, 20 bp, synthetic construct
  source 1..20: mol_type = other DNA
agcctggccaacatggtgaa

SEQ ID NO: 212260 - DNA, 20 bp, synthetic construct
  source 1..20: mol_type = other DNA
cagcctggccaacatggtga

SEQ ID NO: 212261 - DNA, 20 bp, synthetic construct
  source 1..20: mol_type = other DNA
ccagcctggccaacatggtg

SEQ ID NO: 212262 - DNA, 20 bp, synthetic construct
  source 1..20: mol_type = other DNA
accagcctggccaacatggt

SEQ ID NO: 212263 - DNA, 20 bp, synthetic construct
  source 1..20: mol_type = other DNA
gaccagcctggccaacatgg

SEQ ID NO: 212264 - DNA, 20 bp, synthetic construct
  source 1..20: mol_type = other DNA
agaccagcctggccaacatg

SEQ ID NO: 212265 - DNA, 20 bp, synthetic construct
  source 1..20: mol_type = other DNA
gagaccagcctggccaacat

SEQ ID NO: 212266 - DNA, 20 bp, synthetic construct
  source 1..20: mol_type = other DNA
tgagaccagcctggccaaca

SEQ ID NO: 212267 - DNA, 20 bp, synthetic construct
  source 1..20: mol_type = other DNA
ttgagaccagcctggccaac

SEQ ID NO: 212268 - DNA, 20 bp, synthetic construct
  source 1..20: mol_type = other DNA
tttgagaccagcctggccaa

SEQ ID NO: 212269 - DNA, 20 bp, synthetic construct
  source 1..20: mol_type = other DNA
gtttgagaccagcctggcca

SEQ ID NO: 212270 - DNA, 20 bp, synthetic construct
  source 1..20: mol_type = other DNA
agtttgagaccagcctggcc

SEQ ID NO: 212271 - DNA, 20 bp, synthetic construct
  source 1..20: mol_type = other DNA
gagtttgagaccagcctggc

SEQ ID NO: 212272 - DNA, 20 bp, synthetic construct
  source 1..20: mol_type = other DNA
ggagtttgagaccagcctgg

SEQ ID NO: 212273 - DNA, 20 bp, synthetic construct
  source 1..20: mol_type = other DNA
aggagtttgagaccagcctg

SEQ ID NO: 212274 - DNA, 20 bp, synthetic construct
  source 1..20: mol_type = other DNA
caggagtttgagaccagcct

SEQ ID NO: 212275 - DNA, 20 bp, synthetic construct
  source 1..20: mol_type = other DNA
tcaggagtttgagaccagcc

SEQ ID NO: 212276 - DNA, 20 bp, synthetic construct
  source 1..20: mol_type = other DNA
atcaggagtttgagaccagc

SEQ ID NO: 212277 - DNA, 20 bp, synthetic construct
  source 1..20: mol_type = other DNA
gatcaggagtttgagaccag

SEQ ID NO: 212278 - DNA, 20 bp, synthetic construct
  source 1..20: mol_type = other DNA
agatcaggagtttgagacca

SEQ ID NO: 212279 - DNA, 20 bp, synthetic construct
  source 1..20: mol_type = other DNA
gagatcaggagtttgagacc

SEQ ID NO: 212280 - DNA, 20 bp, synthetic construct
  source 1..20: mol_type = other DNA
tgagatcaggagtttgagac

SEQ ID NO: 212281 - DNA, 20 bp, synthetic construct
  source 1..20: mol_type = other DNA
ttgagatcaggagtttgaga

SEQ ID NO: 212282 - DNA, 20 bp, synthetic construct
  source 1..20: mol_type = other DNA
cttgagatcaggagtttgag

SEQ ID NO: 212283 - DNA, 20 bp, synthetic construct
  source 1..20: mol_type = other DNA
acttgagatcaggagtttga

SEQ ID NO: 212284 - DNA, 20 bp, synthetic construct
  source 1..20: mol_type = other DNA
cacttgagatcaggagtttg

SEQ ID NO: 212285 - DNA, 20 bp, synthetic construct
  source 1..20: mol_type = other DNA
tcacttgagatcaggagttt

SEQ ID NO: 212286 - DNA, 20 bp, synthetic construct
  source 1..20: mol_type = other DNA
atcacttgagatcaggagtt

SEQ ID NO: 212287 - DNA, 20 bp, synthetic construct
  source 1..20: mol_type = other DNA
gatcacttgagatcaggagt

SEQ ID NO: 212288 - DNA, 20 bp, synthetic construct
  source 1..20: mol_type = other DNA
ggatcacttgagatcaggag

SEQ ID NO: 212289 - DNA, 20 bp, synthetic construct
  source 1..20: mol_type = other DNA
tggatcacttgagatcagga

SEQ ID NO: 212290 - DNA, 20 bp, synthetic construct
  source 1..20: mol_type = other DNA
gtggatcacttgagatcagg

SEQ ID NO: 212291 - DNA, 20 bp, synthetic construct
  source 1..20: mol_type = other DNA
ggtggatcacttgagatcag

SEQ ID NO: 212292 - DNA, 20 bp, synthetic construct
  source 1..20: mol_type = other DNA
tggtggatcacttgagatca

SEQ ID NO: 212293 - DNA, 20 bp, synthetic construct
  source 1..20: mol_type = other DNA
ttggtggatcacttgagatc

SEQ ID NO: 212294 - DNA, 20 bp, synthetic construct
  source 1..20: mol_type = other DNA
gttggtggatcacttgagat

SEQ ID NO: 212295 - DNA, 20 bp, synthetic construct
  source 1..20: mol_type = other DNA
ggttggtggatcacttgaga

SEQ ID NO: 212296 - DNA, 20 bp, synthetic construct
  source 1..20: mol_type = other DNA
aggttggtggatcacttgag

SEQ ID NO: 212297 - DNA, 20 bp, synthetic construct
  source 1..20: mol_type = other DNA
gaggttggtggatcacttga

SEQ ID NO: 212298 - DNA, 20 bp, synthetic construct
  source 1..20: mol_type = other DNA
tgaggttggtggatcacttg

SEQ ID NO: 212299 - DNA, 20 bp, synthetic construct
  source 1..20: mol_type = other DNA
ctgaggttggtggatcactt

SEQ ID NO: 212300 - DNA, 20 bp, synthetic construct
  source 1..20: mol_type = other DNA
gctgaggttggtggatcact

SEQ ID NO: 212301 - DNA, 20 bp, synthetic construct
  source 1..20: mol_type = other DNA
ggctgaggttggtggatcac

SEQ ID NO: 212302 - DNA, 20 bp, synthetic construct
  source 1..20: mol_type = other DNA
aggctgaggttggtggatca

SEQ ID NO: 212303 - DNA, 20 bp, synthetic construct
  source 1..20: mol_type = other DNA
gaggctgaggttggtggatc

SEQ ID NO: 212304 - DNA, 20 bp, synthetic construct
  source 1..20: mol_type = other DNA
agaggctgaggttggtggat

SEQ ID NO: 212305 - DNA, 20 bp, synthetic construct
  source 1..20: mol_type = other DNA
gagaggctgaggttggtgga

SEQ ID NO: 212306 - DNA, 20 bp, synthetic construct
  source 1..20: mol_type = other DNA
tgagaggctgaggttggtgg

SEQ ID NO: 212307 - DNA, 20 bp, synthetic construct
  source 1..20: mol_type = other DNA
ttgagaggctgaggttggtg

SEQ ID NO: 212308 - DNA, 20 bp, synthetic construct
  source 1..20: mol_type = other DNA
tttgagaggctgaggttggt

SEQ ID NO: 212309 - DNA, 20 bp, synthetic construct
  source 1..20: mol_type = other DNA
ctttgagaggctgaggttgg

SEQ ID NO: 212310 - DNA, 20 bp, synthetic construct
  source 1..20: mol_type = other DNA
actttgagaggctgaggttg

SEQ ID NO: 212311 - DNA, 20 bp, synthetic construct
  source 1..20: mol_type = other DNA
cactttgagaggctgaggtt

SEQ ID NO: 212312 - DNA, 20 bp, synthetic construct
  source 1..20: mol_type = other DNA
gcactttgagaggctgaggt

SEQ ID NO: 212313 - DNA, 20 bp, synthetic construct
  source 1..20: mol_type = other DNA
agcactttgagaggctgagg

SEQ ID NO: 212314 - DNA, 20 bp, synthetic construct
  source 1..20: mol_type = other DNA
cagcactttgagaggctgag

SEQ ID NO: 212315 - DNA, 20 bp, synthetic construct
  source 1..20: mol_type = other DNA
ccagcactttgagaggctga

SEQ ID NO: 212316 - DNA, 20 bp, synthetic construct
  source 1..20: mol_type = other DNA
cccagcactttgagaggctg

SEQ ID NO: 212317 - DNA, 20 bp, synthetic construct
  source 1..20: mol_type = other DNA
tcccagcactttgagaggct

SEQ ID NO: 212318 - DNA, 20 bp, synthetic construct
  source 1..20: mol_type = other DNA
atcccagcactttgagaggc

SEQ ID NO: 212319 - DNA, 20 bp, synthetic construct
  source 1..20: mol_type = other DNA
aatcccagcactttgagagg

SEQ ID NO: 212320 - DNA, 20 bp, synthetic construct
  source 1..20: mol_type = other DNA
taatcccagcactttgagag

SEQ ID NO: 212321 - DNA, 20 bp, synthetic construct
  source 1..20: mol_type = other DNA
gtaatcccagcactttgaga

SEQ ID NO: 212322 - DNA, 20 bp, synthetic construct
  source 1..20: mol_type = other DNA
tgtaatcccagcactttgag

SEQ ID NO: 212323 - DNA, 20 bp, synthetic construct
  source 1..20: mol_type = other DNA
ctgtaatcccagcactttga

SEQ ID NO: 212324 - DNA, 20 bp, synthetic construct
  source 1..20: mol_type = other DNA
cctgtaatcccagcactttg

SEQ ID NO: 212325 - DNA, 20 bp, synthetic construct
  source 1..20: mol_type = other DNA
acctgtaatcccagcacttt

SEQ ID NO: 212326 - DNA, 20 bp, synthetic construct
  source 1..20: mol_type = other DNA
cacctgtaatcccagcactt

SEQ ID NO: 212327 - DNA, 20 bp, synthetic construct
  source 1..20: mol_type = other DNA
acacctgtaatcccagcact

SEQ ID NO: 212328 - DNA, 20 bp, synthetic construct
  source 1..20: mol_type = other DNA
tacacctgtaatcccagcac

SEQ ID NO: 212329 - DNA, 20 bp, synthetic construct
  source 1..20: mol_type = other DNA
ttacacctgtaatcccagca

SEQ ID NO: 212330 - DNA, 20 bp, synthetic construct
  source 1..20: mol_type = other DNA
cttacacctgtaatcccagc

SEQ ID NO: 212331 - DNA, 20 bp, synthetic construct
  source 1..20: mol_type = other DNA
gcttacacctgtaatcccag

SEQ ID NO: 212332 - DNA, 20 bp, synthetic construct
  source 1..20: mol_type = other DNA
ggcttacacctgtaatccca

SEQ ID NO: 212333 - DNA, 20 bp, synthetic construct
  source 1..20: mol_type = other DNA
tggcttacacctgtaatccc

SEQ ID NO: 212334 - DNA, 20 bp, synthetic construct
  source 1..20: mol_type = other DNA
ttggcttacacctgtaatcc

SEQ ID NO: 212335 - DNA, 20 bp, synthetic construct
  source 1..20: mol_type = other DNA
gttggcttacacctgtaatc

SEQ ID NO: 212336 - DNA, 20 bp, synthetic construct
  source 1..20: mol_type = other DNA
tgttggcttacacctgtaat

SEQ ID NO: 212337 - DNA, 20 bp, synthetic construct
  source 1..20: mol_type = other DNA
atgttggcttacacctgtaa

SEQ ID NO: 212338 - DNA, 20 bp, synthetic construct
  source 1..20: mol_type = other DNA
catgttggcttacacctgta

SEQ ID NO: 212339 - DNA, 20 bp, synthetic construct
  source 1..20: mol_type = other DNA
gcatgttggcttacacctgt

SEQ ID NO: 212340 - DNA, 20 bp, synthetic construct
  source 1..20: mol_type = other DNA
ggcatgttggcttacacctg

SEQ ID NO: 212341 - DNA, 20 bp, synthetic construct
  source 1..20: mol_type = other DNA
gggcatgttggcttacacct

SEQ ID NO: 212342 - DNA, 20 bp, synthetic construct
  source 1..20: mol_type = other DNA
cgggcatgttggcttacacc

SEQ ID NO: 212343 - DNA, 20 bp, synthetic construct
  source 1..20: mol_type = other DNA
ccgggcatgttggcttacac

SEQ ID NO: 212344 - DNA, 20 bp, synthetic construct
  source 1..20: mol_type = other DNA
gccgggcatgttggcttaca

SEQ ID NO: 212345 - DNA, 20 bp, synthetic construct
  source 1..20: mol_type = other DNA
ggccgggcatgttggcttac

SEQ ID NO: 212346 - DNA, 20 bp, synthetic construct
  source 1..20: mol_type = other DNA
gggccgggcatgttggctta

SEQ ID NO: 212347 - DNA, 20 bp, synthetic construct
  source 1..20: mol_type = other DNA
ggggccgggcatgttggctt

SEQ ID NO: 212348 - DNA, 20 bp, synthetic construct
  source 1..20: mol_type = other DNA
tggggccgggcatgttggct

SEQ ID NO: 212349 - DNA, 20 bp, synthetic construct
  source 1..20: mol_type = other DNA
ctggggccgggcatgttggc

SEQ ID NO: 212350 - DNA, 20 bp, synthetic construct
  source 1..20: mol_type = other DNA
gctggggccgggcatgttgg

SEQ ID NO: 212351 - DNA, 20 bp, synthetic construct
  source 1..20: mol_type = other DNA
agctggggccgggcatgttg

SEQ ID NO: 212352 - DNA, 20 bp, synthetic construct
  source 1..20: mol_type = other DNA
tagctggggccgggcatgtt

SEQ ID NO: 212353 - DNA, 20 bp, synthetic construct
  source 1..20: mol_type = other DNA
ttagctggggccgggcatgt

SEQ ID NO: 212354 - DNA, 20 bp, synthetic construct
  source 1..20: mol_type = other DNA
attagctggggccgggcatg

SEQ ID NO: 212355 - DNA, 20 bp, synthetic construct
  source 1..20: mol_type = other DNA
aattagctggggccgggcat

SEQ ID NO: 212356 - DNA, 20 bp, synthetic construct
  source 1..20: mol_type = other DNA
aaattagctggggccgggca

SEQ ID NO: 212357 - DNA, 20 bp, synthetic construct
  source 1..20: mol_type = other DNA
aaaattagctggggccgggc

SEQ ID NO: 212358 - DNA, 20 bp, synthetic construct
  source 1..20: mol_type = other DNA
aaaaattagctggggccggg

SEQ ID NO: 212359 - DNA, 20 bp, synthetic construct
  source 1..20: mol_type = other DNA
taaaaattagctggggccgg

SEQ ID NO: 212360 - DNA, 20 bp, synthetic construct
  source 1..20: mol_type = other DNA
ttaaaaattagctggggccg

SEQ ID NO: 212361 - DNA, 20 bp, synthetic construct
  source 1..20: mol_type = other DNA
tttaaaaattagctggggcc

SEQ ID NO: 212362 - DNA, 20 bp, synthetic construct
  source 1..20: mol_type = other DNA
atttaaaaattagctggggc

SEQ ID NO: 212363 - DNA, 20 bp, synthetic construct
  source 1..20: mol_type = other DNA
tatttaaaaattagctgggg

SEQ ID NO: 212364 - DNA, 20 bp, synthetic construct
  source 1..20: mol_type = other DNA
atatttaaaaattagctggg

SEQ ID NO: 212365 - DNA, 20 bp, synthetic construct
  source 1..20: mol_type = other DNA
aatatttaaaaattagctgg

SEQ ID NO: 212366 - DNA, 20 bp, synthetic construct
  source 1..20: mol_type = other DNA
aaatatttaaaaattagctg

SEQ ID NO: 212367 - DNA, 20 bp, synthetic construct
  source 1..20: mol_type = other DNA
aaaatatttaaaaattagct

SEQ ID NO: 212368 - DNA, 20 bp, synthetic construct
  source 1..20: mol_type = other DNA
aaaaatatttaaaaattagc

SEQ ID NO: 212369 - DNA, 20 bp, synthetic construct
  source 1..20: mol_type = other DNA
aaaaaatatttaaaaattag

SEQ ID NO: 212370 - DNA, 20 bp, synthetic construct
  source 1..20: mol_type = other DNA
aaaaaaatatttaaaaatta

SEQ ID NO: 212371 - DNA, 20 bp, synthetic construct
  source 1..20: mol_type = other DNA
aaaaaaaatatttaaaaatt

SEQ ID NO: 212372 - DNA, 20 bp, synthetic construct
  source 1..20: mol_type = other DNA
caaaaaaaatatttaaaaat

SEQ ID NO: 212373 - DNA, 20 bp, synthetic construct
  source 1..20: mol_type = other DNA
acaaaaaaaatatttaaaaa

SEQ ID NO: 212374 - DNA, 20 bp, synthetic construct
  source 1..20: mol_type = other DNA
tacaaaaaaaatatttaaaa

SEQ ID NO: 212375 - DNA, 20 bp, synthetic construct
  source 1..20: mol_type = other DNA
ctacaaaaaaaatatttaaa

SEQ ID NO: 212376 - DNA, 20 bp, synthetic construct
  source 1..20: mol_type = other DNA
tctacaaaaaaaatatttaa

SEQ ID NO: 212377 - DNA, 20 bp, synthetic construct
  source 1..20: mol_type = other DNA
ctctacaaaaaaaatattta

SEQ ID NO: 212378 - DNA, 20 bp, synthetic construct
  source 1..20: mol_type = other DNA
tctctacaaaaaaaatattt

SEQ ID NO: 212379 - DNA, 20 bp, synthetic construct
  source 1..20: mol_type = other DNA
atctctacaaaaaaaatatt

SEQ ID NO: 212380 - DNA, 20 bp, synthetic construct
  source 1..20: mol_type = other DNA
catctctacaaaaaaaatat

SEQ ID NO: 212381 - DNA, 20 bp, synthetic construct
  source 1..20: mol_type = other DNA
ccatctctacaaaaaaaata

SEQ ID NO: 212382 - DNA, 20 bp, synthetic construct
  source 1..20: mol_type = other DNA
cccatctctacaaaaaaaat

SEQ ID NO: 212383 - DNA, 20 bp, synthetic construct
  source 1..20: mol_type = other DNA
ccccatctctacaaaaaaaa

SEQ ID NO: 212384 - DNA, 20 bp, synthetic construct
  source 1..20: mol_type = other DNA
accccatctctacaaaaaaa

SEQ ID NO: 212385 - DNA, 20 bp, synthetic construct
  source 1..20: mol_type = other DNA
aaccccatctctacaaaaaa

SEQ ID NO: 212386 - DNA, 20 bp, synthetic construct
  source 1..20: mol_type = other DNA
aaaccccatctctacaaaaa

SEQ ID NO: 212387 - DNA, 20 bp, synthetic construct
  source 1..20: mol_type = other DNA
aaaaccccatctctacaaaa

SEQ ID NO: 212388 - DNA, 20 bp, synthetic construct
  source 1..20: mol_type = other DNA
taaaaccccatctctacaaa

SEQ ID NO: 212389 - DNA, 20 bp, synthetic construct
  source 1..20: mol_type = other DNA
gtaaaaccccatctctacaa

SEQ ID NO: 212390 - DNA, 20 bp, synthetic construct
  source 1..20: mol_type = other DNA
ggtaaaaccccatctctaca

SEQ ID NO: 212391 - DNA, 20 bp, synthetic construct
  source 1..20: mol_type = other DNA
tggtaaaaccccatctctac

SEQ ID NO: 212392 - DNA, 20 bp, synthetic construct
  source 1..20: mol_type = other DNA
atggtaaaaccccatctcta

SEQ ID NO: 212393 - DNA, 20 bp, synthetic construct
  source 1..20: mol_type = other DNA
aatggtaaaaccccatctct

SEQ ID NO: 212394 - DNA, 20 bp, synthetic construct
  source 1..20: mol_type = other DNA
aaatggtaaaaccccatctc

SEQ ID NO: 212395 - DNA, 20 bp, synthetic construct
  source 1..20: mol_type = other DNA
aaaatggtaaaaccccatct

SEQ ID NO: 212396 - DNA, 20 bp, synthetic construct
  source 1..20: mol_type = other DNA
caaaatggtaaaaccccatc

SEQ ID NO: 212397 - DNA, 20 bp, synthetic construct
  source 1..20: mol_type = other DNA
acaaaatggtaaaaccccat

SEQ ID NO: 212398 - DNA, 20 bp, synthetic construct
  source 1..20: mol_type = other DNA
gacaaaatggtaaaacccca

SEQ ID NO: 212399 - DNA, 20 bp, synthetic construct
  source 1..20: mol_type = other DNA
agacaaaatggtaaaacccc

SEQ ID NO: 212400 - DNA, 20 bp, synthetic construct
  source 1..20: mol_type = other DNA
tagacaaaatggtaaaaccc

SEQ ID NO: 212401 - DNA, 20 bp, synthetic construct
  source 1..20: mol_type = other DNA
ctagacaaaatggtaaaacc

SEQ ID NO: 212402 - DNA, 20 bp, synthetic construct
  source 1..20: mol_type = other DNA
cctagacaaaatggtaaaac

SEQ ID NO: 212403 - DNA, 20 bp, synthetic construct
  source 1..20: mol_type = other DNA
gcctagacaaaatggtaaaa

SEQ ID NO: 212404 - DNA, 20 bp, synthetic construct
  source 1..20: mol_type = other DNA
agcctagacaaaatggtaaa

SEQ ID NO: 212405 - DNA, 20 bp, synthetic construct
  source 1..20: mol_type = other DNA
cagcctagacaaaatggtaa

SEQ ID NO: 212406 - DNA, 20 bp, synthetic construct
  source 1..20: mol_type = other DNA
ccagcctagacaaaatggta

SEQ ID NO: 212407 - DNA, 20 bp, synthetic construct
  source 1..20: mol_type = other DNA
accagcctagacaaaatggt

SEQ ID NO: 212408 - DNA, 20 bp, synthetic construct
  source 1..20: mol_type = other DNA
gaccagcctagacaaaatgg

SEQ ID NO: 212409 - DNA, 20 bp, synthetic construct
  source 1..20: mol_type = other DNA
agaccagcctagacaaaatg

SEQ ID NO: 212410 - DNA, 20 bp, synthetic construct
  source 1..20: mol_type = other DNA
aagaccagcctagacaaaat

SEQ ID NO: 212411 - DNA, 20 bp, synthetic construct
  source 1..20: mol_type = other DNA
caagaccagcctagacaaaa

SEQ ID NO: 212412 - DNA, 20 bp, synthetic construct
  source 1..20: mol_type = other DNA
tcaagaccagcctagacaaa

SEQ ID NO: 212413 - DNA, 20 bp, synthetic construct
  source 1..20: mol_type = other DNA
ttcaagaccagcctagacaa

SEQ ID NO: 212414 - DNA, 20 bp, synthetic construct
  source 1..20: mol_type = other DNA
gttcaagaccagcctagaca

SEQ ID NO: 212415 - DNA, 20 bp, synthetic construct
  source 1..20: mol_type = other DNA
agttcaagaccagcctagac

SEQ ID NO: 212416 - DNA, 20 bp, synthetic construct
  source 1..20: mol_type = other DNA
gagttcaagaccagcctaga

SEQ ID NO: 212417 - DNA, 20 bp, synthetic construct
  source 1..20: mol_type = other DNA
ggagttcaagaccagcctag

SEQ ID NO: 212418 - DNA, 20 bp, synthetic construct
  source 1..20: mol_type = other DNA
aggagttcaagaccagccta

SEQ ID NO: 212419 - DNA, 20 bp, synthetic construct
  source 1..20: mol_type = other DNA
caggagttcaagaccagcct

SEQ ID NO: 212420 - DNA, 20 bp, synthetic construct
  source 1..20: mol_type = other DNA
ccaggagttcaagaccagcc

SEQ ID NO: 212421 - DNA, 20 bp, synthetic construct
  source 1..20: mol_type = other DNA
cccaggagttcaagaccagc

SEQ ID NO: 212422 - DNA, 20 bp, synthetic construct
  source 1..20: mol_type = other DNA
gcccaggagttcaagaccag

SEQ ID NO: 212423 - DNA, 20 bp, synthetic construct
  source 1..20: mol_type = other DNA
agcccaggagttcaagacca

SEQ ID NO: 212424 - DNA, 20 bp, synthetic construct
  source 1..20: mol_type = other DNA
gagcccaggagttcaagacc

SEQ ID NO: 212425 - DNA, 20 bp, synthetic construct
  source 1..20: mol_type = other DNA
tgagcccaggagttcaagac

SEQ ID NO: 212426 - DNA, 20 bp, synthetic construct
  source 1..20: mol_type = other DNA
ttgagcccaggagttcaaga

SEQ ID NO: 212427 - DNA, 20 bp, synthetic construct
  source 1..20: mol_type = other DNA
cttgagcccaggagttcaag

SEQ ID NO: 212428 - DNA, 20 bp, synthetic construct
  source 1..20: mol_type = other DNA
gcttgagcccaggagttcaa

SEQ ID NO: 212429 - DNA, 20 bp, synthetic construct
  source 1..20: mol_type = other DNA
tgcttgagcccaggagttca

SEQ ID NO: 212430 - DNA, 20 bp, synthetic construct
  source 1..20: mol_type = other DNA
ttgcttgagcccaggagttc

SEQ ID NO: 212431 - DNA, 20 bp, synthetic construct
  source 1..20: mol_type = other DNA
tttgcttgagcccaggagtt

SEQ ID NO: 212432 - DNA, 20 bp, synthetic construct
  source 1..20: mol_type = other DNA
gtttgcttgagcccaggagt

SEQ ID NO: 212433 - DNA, 20 bp, synthetic construct
  source 1..20: mol_type = other DNA
ggtttgcttgagcccaggag

SEQ ID NO: 212434 - DNA, 20 bp, synthetic construct
  source 1..20: mol_type = other DNA
aggtttgcttgagcccagga

SEQ ID NO: 212435 - DNA, 20 bp, synthetic construct
  source 1..20: mol_type = other DNA
gaggtttgcttgagcccagg

SEQ ID NO: 212436 - DNA, 20 bp, synthetic construct
  source 1..20: mol_type = other DNA
ggaggtttgcttgagcccag

SEQ ID NO: 212437 - DNA, 20 bp, synthetic construct
  source 1..20: mol_type = other DNA
gggaggtttgcttgagccca

SEQ ID NO: 212438 - DNA, 20 bp, synthetic construct
  source 1..20: mol_type = other DNA
tgggaggtttgcttgagccc

SEQ ID NO: 212439 - DNA, 20 bp, synthetic construct
  source 1..20: mol_type = other DNA
gtgggaggtttgcttgagcc

SEQ ID NO: 212440 - DNA, 20 bp, synthetic construct
  source 1..20: mol_type = other DNA
ggtgggaggtttgcttgagc

SEQ ID NO: 212441 - DNA, 20 bp, synthetic construct
  source 1..20: mol_type = other DNA
aggtgggaggtttgcttgag

SEQ ID NO: 212442 - DNA, 20 bp, synthetic construct
  source 1..20: mol_type = other DNA
aaggtgggaggtttgcttga

SEQ ID NO: 212443 - DNA, 20 bp, synthetic construct
  source 1..20: mol_type = other DNA
caaggtgggaggtttgcttg

SEQ ID NO: 212444 - DNA, 20 bp, synthetic construct
  source 1..20: mol_type = other DNA
ccaaggtgggaggtttgctt

SEQ ID NO: 212445 - DNA, 20 bp, synthetic construct
  source 1..20: mol_type = other DNA
accaaggtgggaggtttgct

SEQ ID NO: 212446 - DNA, 20 bp, synthetic construct
  source 1..20: mol_type = other DNA
gaccaaggtgggaggtttgc

SEQ ID NO: 212447 - DNA, 20 bp, synthetic construct
  source 1..20: mol_type = other DNA
agaccaaggtgggaggtttg

SEQ ID NO: 212448 - DNA, 20 bp, synthetic construct
  source 1..20: mol_type = other DNA
gagaccaaggtgggaggttt

SEQ ID NO: 212449 - DNA, 20 bp, synthetic construct
  source 1..20: mol_type = other DNA
ggagaccaaggtgggaggtt

SEQ ID NO: 212450 - DNA, 20 bp, synthetic construct
  source 1..20: mol_type = other DNA
gggagaccaaggtgggaggt

SEQ ID NO: 212451 - DNA, 20 bp, synthetic construct
  source 1..20: mol_type = other DNA
tgggagaccaaggtgggagg

SEQ ID NO: 212452 - DNA, 20 bp, synthetic construct
  source 1..20: mol_type = other DNA
ttgggagaccaaggtgggag

SEQ ID NO: 212453 - DNA, 20 bp, synthetic construct
  source 1..20: mol_type = other DNA
tttgggagaccaaggtggga

SEQ ID NO: 212454 - DNA, 20 bp, synthetic construct
  source 1..20: mol_type = other DNA
ctttgggagaccaaggtggg

SEQ ID NO: 212455 - DNA, 20 bp, synthetic construct
  source 1..20: mol_type = other DNA
actttgggagaccaaggtgg

SEQ ID NO: 212456 - DNA, 20 bp, synthetic construct
  source 1..20: mol_type = other DNA
cactttgggagaccaaggtg

SEQ ID NO: 212457 - DNA, 20 bp, synthetic construct
  source 1..20: mol_type = other DNA
gcactttgggagaccaaggt

SEQ ID NO: 212458 - DNA, 20 bp, synthetic construct
  source 1..20: mol_type = other DNA
agcactttgggagaccaagg

SEQ ID NO: 212459 - DNA, 20 bp, synthetic construct
  source 1..20: mol_type = other DNA
cagcactttgggagaccaag

SEQ ID NO: 212460 - DNA, 20 bp, synthetic construct
  source 1..20: mol_type = other DNA
ccagcactttgggagaccaa

SEQ ID NO: 212461 - DNA, 20 bp, synthetic construct
  source 1..20: mol_type = other DNA
cccagcactttgggagacca

SEQ ID NO: 212462 - DNA, 20 bp, synthetic construct
  source 1..20: mol_type = other DNA
tcccagcactttgggagacc

SEQ ID NO: 212463 - DNA, 20 bp, synthetic construct
  source 1..20: mol_type = other DNA
atcccagcactttgggagac

SEQ ID NO: 212464 - DNA, 20 bp, synthetic construct
  source 1..20: mol_type = other DNA
aatcccagcactttgggaga

SEQ ID NO: 212465 - DNA, 20 bp, synthetic construct
  source 1..20: mol_type = other DNA
taatcccagcactttgggag

SEQ ID NO: 212466 - DNA, 20 bp, synthetic construct
  source 1..20: mol_type = other DNA
gtaatcccagcactttggga

SEQ ID NO: 212467 - DNA, 20 bp, synthetic construct
  source 1..20: mol_type = other DNA
tgtaatcccagcactttggg

SEQ ID NO: 212468 - DNA, 20 bp, synthetic construct
  source 1..20: mol_type = other DNA
ctgtaatcccagcactttgg

SEQ ID NO: 212469 - DNA, 20 bp, synthetic construct
  source 1..20: mol_type = other DNA
gctgtaatcccagcactttg

SEQ ID NO: 212470 - DNA, 20 bp, synthetic construct
  source 1..20: mol_type = other DNA
tgctgtaatcccagcacttt

SEQ ID NO: 212471 - DNA, 20 bp, synthetic construct
  source 1..20: mol_type = other DNA
atgctgtaatcccagcactt

SEQ ID NO: 212472 - DNA, 20 bp, synthetic construct
  source 1..20: mol_type = other DNA
catgctgtaatcccagcact

SEQ ID NO: 212473 - DNA, 20 bp, synthetic construct
  source 1..20: mol_type = other DNA
tcatgctgtaatcccagcac

SEQ ID NO: 212474 - DNA, 20 bp, synthetic construct
  source 1..20: mol_type = other DNA
ctcatgctgtaatcccagca

SEQ ID NO: 212475 - DNA, 20 bp, synthetic construct
  source 1..20: mol_type = other DNA
gctcatgctgtaatcccagc

SEQ ID NO: 212476 - DNA, 20 bp, synthetic construct
  source 1..20: mol_type = other DNA
ggctcatgctgtaatcccag

SEQ ID NO: 212477 - DNA, 20 bp, synthetic construct
  source 1..20: mol_type = other DNA
tggctcatgctgtaatccca

SEQ ID NO: 212478 - DNA, 20 bp, synthetic construct
  source 1..20: mol_type = other DNA
gtggctcatgctgtaatccc

SEQ ID NO: 212479 - DNA, 20 bp, synthetic construct
  source 1..20: mol_type = other DNA
agtggctcatgctgtaatcc

SEQ ID NO: 212480 - DNA, 20 bp, synthetic construct
  source 1..20: mol_type = other DNA
cagtggctcatgctgtaatc

SEQ ID NO: 212481 - DNA, 20 bp, synthetic construct
  source 1..20: mol_type = other DNA
gcagtggctcatgctgtaat

SEQ ID NO: 212482 - DNA, 20 bp, synthetic construct
  source 1..20: mol_type = other DNA
tgcagtggctcatgctgtaa

SEQ ID NO: 212483 - DNA, 20 bp, synthetic construct
  source 1..20: mol_type = other DNA
gtgcagtggctcatgctgta

SEQ ID NO: 212484 - DNA, 20 bp, synthetic construct
  source 1..20: mol_type = other DNA
agtgcagtggctcatgctgt

SEQ ID NO: 212485 - DNA, 20 bp, synthetic construct
  source 1..20: mol_type = other DNA
gagtgcagtggctcatgctg

SEQ ID NO: 212486 - DNA, 20 bp, synthetic construct
  source 1..20: mol_type = other DNA
cgagtgcagtggctcatgct

SEQ ID NO: 212487 - DNA, 20 bp, synthetic construct
  source 1..20: mol_type = other DNA
ccgagtgcagtggctcatgc

SEQ ID NO: 212488 - DNA, 20 bp, synthetic construct
  source 1..20: mol_type = other DNA
gccgagtgcagtggctcatg

SEQ ID NO: 212489 - DNA, 20 bp, synthetic construct
  source 1..20: mol_type = other DNA
ggccgagtgcagtggctcat

SEQ ID NO: 212490 - DNA, 20 bp, synthetic construct
  source 1..20: mol_type = other DNA
aggccgagtgcagtggctca

SEQ ID NO: 212491 - DNA, 20 bp, synthetic construct
  source 1..20: mol_type = other DNA
aaggccgagtgcagtggctc

SEQ ID NO: 212492 - DNA, 20 bp, synthetic construct
  source 1..20: mol_type = other DNA
taaggccgagtgcagtggct

SEQ ID NO: 212493 - DNA, 20 bp, synthetic construct
  source 1..20: mol_type = other DNA
ttaaggccgagtgcagtggc

SEQ ID NO: 212494 - DNA, 20 bp, synthetic construct
  source 1..20: mol_type = other DNA
cttaaggccgagtgcagtgg

SEQ ID NO: 212495 - DNA, 20 bp, synthetic construct
  source 1..20: mol_type = other DNA
tcttaaggccgagtgcagtg

SEQ ID NO: 212496 - DNA, 20 bp, synthetic construct
  source 1..20: mol_type = other DNA
ctcttaaggccgagtgcagt

SEQ ID NO: 212497 - DNA, 20 bp, synthetic construct
  source 1..20: mol_type = other DNA
tctcttaaggccgagtgcag

SEQ ID NO: 212498 - DNA, 20 bp, synthetic construct
  source 1..20: mol_type = other DNA
ttctcttaaggccgagtgca

SEQ ID NO: 212499 - DNA, 20 bp, synthetic construct
  source 1..20: mol_type = other DNA
cttctcttaaggccgagtgc

SEQ ID NO: 212500 - DNA, 20 bp, synthetic construct
  source 1..20: mol_type = other DNA
tcttctcttaaggccgagtg

SEQ ID NO: 212501 - DNA, 20 bp, synthetic construct
  source 1..20: mol_type = other DNA
atcttctcttaaggccgagt

SEQ ID NO: 212502 - DNA, 20 bp, synthetic construct
  source 1..20: mol_type = other DNA
aatcttctcttaaggccgag

SEQ ID NO: 212503 - DNA, 20 bp, synthetic construct
  source 1..20: mol_type = other DNA
aaatcttctcttaaggccga

SEQ ID NO: 212504 - DNA, 20 bp, synthetic construct
  source 1..20: mol_type = other DNA
taaatcttctcttaaggccg

SEQ ID NO: 212505 - DNA, 20 bp, synthetic construct
  source 1..20: mol_type = other DNA
ttaaatcttctcttaaggcc

SEQ ID NO: 212506 - DNA, 20 bp, synthetic construct
  source 1..20: mol_type = other DNA
attaaatcttctcttaaggc

SEQ ID NO: 212507 - DNA, 20 bp, synthetic construct
  source 1..20: mol_type = other DNA
tattaaatcttctcttaagg

SEQ ID NO: 212508 - DNA, 20 bp, synthetic construct
  source 1..20: mol_type = other DNA
ttattaaatcttctcttaag

SEQ ID NO: 212509 - DNA, 20 bp, synthetic construct
  source 1..20: mol_type = other DNA
attattaaatcttctcttaa

SEQ ID NO: 212510 - DNA, 20 bp, synthetic construct
  source 1..20: mol_type = other DNA
aattattaaatcttctctta

SEQ ID NO: 212511 - DNA, 20 bp, synthetic construct
  source 1..20: mol_type = other DNA
taattattaaatcttctctt

SEQ ID NO: 212512 - DNA, 20 bp, synthetic construct
  source 1..20: mol_type = other DNA
ttaattattaaatcttctct

SEQ ID NO: 212513 - DNA, 20 bp, synthetic construct
  source 1..20: mol_type = other DNA
attaattattaaatcttctc

SEQ ID NO: 212514 - DNA, 20 bp, synthetic construct
  source 1..20: mol_type = other DNA
tattaattattaaatcttct

SEQ ID NO: 212515 - DNA, 20 bp, synthetic construct
  source 1..20: mol_type = other DNA
gtattaattattaaatcttc

SEQ ID NO: 212516 - DNA, 20 bp, synthetic construct
  source 1..20: mol_type = other DNA
agtattaattattaaatctt

SEQ ID NO: 212517 - DNA, 20 bp, synthetic construct
  source 1..20: mol_type = other DNA
aagtattaattattaaatct

SEQ ID NO: 212518 - DNA, 20 bp, synthetic construct
  source 1..20: mol_type = other DNA
aaagtattaattattaaatc

SEQ ID NO: 212519 - DNA, 20 bp, synthetic construct
  source 1..20: mol_type = other DNA
taaagtattaattattaaat

SEQ ID NO: 212520 - DNA, 20 bp, synthetic construct
  source 1..20: mol_type = other DNA
gtaaagtattaattattaaa

SEQ ID NO: 212521 - DNA, 20 bp, synthetic construct
  source 1..20: mol_type = other DNA
tgtaaagtattaattattaa

SEQ ID NO: 212522 - DNA, 20 bp, synthetic construct
  source 1..20: mol_type = other DNA
ttgtaaagtattaattatta

SEQ ID NO: 212523 - DNA, 20 bp, synthetic construct
  source 1..20: mol_type = other DNA
gttgtaaagtattaattatt

SEQ ID NO: 212524 - DNA, 20 bp, synthetic construct
  source 1..20: mol_type = other DNA
tgttgtaaagtattaattat

SEQ ID NO: 212525 - DNA, 20 bp, synthetic construct
  source 1..20: mol_type = other DNA
ttgttgtaaagtattaatta

SEQ ID NO: 212526 - DNA, 20 bp, synthetic construct
  source 1..20: mol_type = other DNA
cttgttgtaaagtattaatt

SEQ ID NO: 212527 - DNA, 20 bp, synthetic construct
  source 1..20: mol_type = other DNA
tcttgttgtaaagtattaat

SEQ ID NO: 212528 - DNA, 20 bp, synthetic construct
  source 1..20: mol_type = other DNA
atcttgttgtaaagtattaa

SEQ ID NO: 212529 - DNA, 20 bp, synthetic construct
  source 1..20: mol_type = other DNA
gatcttgttgtaaagtatta

SEQ ID NO: 212530 - DNA, 20 bp, synthetic construct
  source 1..20: mol_type = other DNA
agatcttgttgtaaagtatt

SEQ ID NO: 212531 - DNA, 20 bp, synthetic construct
  source 1..20: mol_type = other DNA
cagatcttgttgtaaagtat

SEQ ID NO: 212532 - DNA, 20 bp, synthetic construct
  source 1..20: mol_type = other DNA
ccagatcttgttgtaaagta

SEQ ID NO: 212533 - DNA, 20 bp, synthetic construct
  source 1..20: mol_type = other DNA
tccagatcttgttgtaaagt

SEQ ID NO: 212534 - DNA, 20 bp, synthetic construct
  source 1..20: mol_type = other DNA
ttccagatcttgttgtaaag

SEQ ID NO: 212535 - DNA, 20 bp, synthetic construct
  source 1..20: mol_type = other DNA
cttccagatcttgttgtaaa

SEQ ID NO: 212536 - DNA, 20 bp, synthetic construct
  source 1..20: mol_type = other DNA
tcttccagatcttgttgtaa

SEQ ID NO: 212537 - DNA, 20 bp, synthetic construct
  source 1..20: mol_type = other DNA
ctcttccagatcttgttgta

SEQ ID NO: 212538 - DNA, 20 bp, synthetic construct
  source 1..20: mol_type = other DNA
cctcttccagatcttgttgt

SEQ ID NO: 212539 - DNA, 20 bp, synthetic construct
  source 1..20: mol_type = other DNA
acctcttccagatcttgttg

SEQ ID NO: 212540 - DNA, 20 bp, synthetic construct
  source 1..20: mol_type = other DNA
cacctcttccagatcttgtt

SEQ ID NO: 212541 - DNA, 20 bp, synthetic construct
  source 1..20: mol_type = other DNA
ccacctcttccagatcttgt

SEQ ID NO: 212542 - DNA, 20 bp, synthetic construct
  source 1..20: mol_type = other DNA
cccacctcttccagatcttg

SEQ ID NO: 212543 - DNA, 20 bp, synthetic construct
  source 1..20: mol_type = other DNA
tcccacctcttccagatctt

SEQ ID NO: 212544 - DNA, 20 bp, synthetic construct
  source 1..20: mol_type = other DNA
atcccacctcttccagatct

SEQ ID NO: 212545 - DNA, 20 bp, synthetic construct
  source 1..20: mol_type = other DNA
catcccacctcttccagatc

SEQ ID NO: 212546 - DNA, 20 bp, synthetic construct
  source 1..20: mol_type = other DNA
tcatcccacctcttccagat

SEQ ID NO: 212547 - DNA, 20 bp, synthetic construct
  source 1..20: mol_type = other DNA
ctcatcccacctcttccaga

SEQ ID NO: 212548 - DNA, 20 bp, synthetic construct
  source 1..20: mol_type = other DNA
actcatcccacctcttccag

SEQ ID NO: 212549 - DNA, 20 bp, synthetic construct
  source 1..20: mol_type = other DNA
tactcatcccacctcttcca

SEQ ID NO: 212550 - DNA, 20 bp, synthetic construct
  source 1..20: mol_type = other DNA
ttactcatcccacctcttcc

SEQ ID NO: 212551 - DNA, 20 bp, synthetic construct
  source 1..20: mol_type = other DNA
gttactcatcccacctcttc

SEQ ID NO: 212552 - DNA, 20 bp, synthetic construct
  source 1..20: mol_type = other DNA
agttactcatcccacctctt

SEQ ID NO: 212553 - DNA, 20 bp, synthetic construct
  source 1..20: mol_type = other DNA
tagttactcatcccacctct

SEQ ID NO: 212554 - DNA, 20 bp, synthetic construct
  source 1..20: mol_type = other DNA
ttagttactcatcccacctc

SEQ ID NO: 212555 - DNA, 20 bp, synthetic construct
  source 1..20: mol_type = other DNA
tttagttactcatcccacct

SEQ ID NO: 212556 - DNA, 20 bp, synthetic construct
  source 1..20: mol_type = other DNA
atttagttactcatcccacc

SEQ ID NO: 212557 - DNA, 20 bp, synthetic construct
  source 1..20: mol_type = other DNA
catttagttactcatcccac

SEQ ID NO: 212558 - DNA, 20 bp, synthetic construct
  source 1..20: mol_type = other DNA
tcatttagttactcatccca

SEQ ID NO: 212559 - DNA, 20 bp, synthetic construct
  source 1..20: mol_type = other DNA
ctcatttagttactcatccc

SEQ ID NO: 212560 - DNA, 20 bp, synthetic construct
  source 1..20: mol_type = other DNA
cctcatttagttactcatcc

SEQ ID NO: 212561 - DNA, 20 bp, synthetic construct
  source 1..20: mol_type = other DNA
tcctcatttagttactcatc

SEQ ID NO: 212562 - DNA, 20 bp, synthetic construct
  source 1..20: mol_type = other DNA
atcctcatttagttactcat

SEQ ID NO: 212563 - DNA, 20 bp, synthetic construct
  source 1..20: mol_type = other DNA
tatcctcatttagttactca

SEQ ID NO: 212564 - DNA, 20 bp, synthetic construct
  source 1..20: mol_type = other DNA
gtatcctcatttagttactc

SEQ ID NO: 212565 - DNA, 20 bp, synthetic construct
  source 1..20: mol_type = other DNA
tgtatcctcatttagttact

SEQ ID NO: 212566 - DNA, 20 bp, synthetic construct
  source 1..20: mol_type = other DNA
ttgtatcctcatttagttac

SEQ ID NO: 212567 - DNA, 20 bp, synthetic construct
  source 1..20: mol_type = other DNA
cttgtatcctcatttagtta

SEQ ID NO: 212568 - DNA, 20 bp, synthetic construct
  source 1..20: mol_type = other DNA
acttgtatcctcatttagtt

SEQ ID NO: 212569 - DNA, 20 bp, synthetic construct
  source 1..20: mol_type = other DNA
tacttgtatcctcatttagt

SEQ ID NO: 212570 - DNA, 20 bp, synthetic construct
  source 1..20: mol_type = other DNA
ttacttgtatcctcatttag

SEQ ID NO: 212571 - DNA, 20 bp, synthetic construct
  source 1..20: mol_type = other DNA
gttacttgtatcctcattta

SEQ ID NO: 212572 - DNA, 20 bp, synthetic construct
  source 1..20: mol_type = other DNA
ggttacttgtatcctcattt

SEQ ID NO: 212573 - DNA, 20 bp, synthetic construct
  source 1..20: mol_type = other DNA
gggttacttgtatcctcatt

SEQ ID NO: 212574 - DNA, 20 bp, synthetic construct
  source 1..20: mol_type = other DNA
cgggttacttgtatcctcat

SEQ ID NO: 212575 - DNA, 20 bp, synthetic construct
  source 1..20: mol_type = other DNA
ccgggttacttgtatcctca

SEQ ID NO: 212576 - DNA, 20 bp, synthetic construct
  source 1..20: mol_type = other DNA
cccgggttacttgtatcctc

SEQ ID NO: 212577 - DNA, 20 bp, synthetic construct
  source 1..20: mol_type = other DNA
acccgggttacttgtatcct

SEQ ID NO: 212578 - DNA, 20 bp, synthetic construct
  source 1..20: mol_type = other DNA
gacccgggttacttgtatcc

SEQ ID NO: 212579 - DNA, 20 bp, synthetic construct
  source 1..20: mol_type = other DNA
tgacccgggttacttgtatc

SEQ ID NO: 212580 - DNA, 20 bp, synthetic construct
  source 1..20: mol_type = other DNA
atgacccgggttacttgtat

SEQ ID NO: 212581 - DNA, 20 bp, synthetic construct
  source 1..20: mol_type = other DNA
tatgacccgggttacttgta

SEQ ID NO: 212582 - DNA, 20 bp, synthetic construct
  source 1..20: mol_type = other DNA
atatgacccgggttacttgt

SEQ ID NO: 212583 - DNA, 20 bp, synthetic construct
  source 1..20: mol_type = other DNA
aatatgacccgggttacttg

SEQ ID NO: 212584 - DNA, 20 bp, synthetic construct
  source 1..20: mol_type = other DNA
aaatatgacccgggttactt

SEQ ID NO: 212585 - DNA, 20 bp, synthetic construct
  source 1..20: mol_type = other DNA
caaatatgacccgggttact

SEQ ID NO: 212586 - DNA, 20 bp, synthetic construct
  source 1..20: mol_type = other DNA
gcaaatatgacccgggttac

SEQ ID NO: 212587 - DNA, 20 bp, synthetic construct
  source 1..20: mol_type = other DNA
agcaaatatgacccgggtta

SEQ ID NO: 212588 - DNA, 20 bp, synthetic construct
  source 1..20: mol_type = other DNA
tagcaaatatgacccgggtt

SEQ ID NO: 212589 - DNA, 20 bp, synthetic construct
  source 1..20: mol_type = other DNA
ttagcaaatatgacccgggt

SEQ ID NO: 212590 - DNA, 20 bp, synthetic construct
  source 1..20: mol_type = other DNA
attagcaaatatgacccggg

SEQ ID NO: 212591 - DNA, 20 bp, synthetic construct
  source 1..20: mol_type = other DNA
tattagcaaatatgacccgg

SEQ ID NO: 212592 - DNA, 20 bp, synthetic construct
  source 1..20: mol_type = other DNA
gtattagcaaatatgacccg

SEQ ID NO: 212593 - DNA, 20 bp, synthetic construct
  source 1..20: mol_type = other DNA
ggtattagcaaatatgaccc

SEQ ID NO: 212594 - DNA, 20 bp, synthetic construct
  source 1..20: mol_type = other DNA
gggtattagcaaatatgacc

SEQ ID NO: 212595 - DNA, 20 bp, synthetic construct
  source 1..20: mol_type = other DNA
agggtattagcaaatatgac

SEQ ID NO: 212596 - DNA, 20 bp, synthetic construct
  source 1..20: mol_type = other DNA
aagggtattagcaaatatga

SEQ ID NO: 212597 - DNA, 20 bp, synthetic construct
  source 1..20: mol_type = other DNA
caagggtattagcaaatatg

SEQ ID NO: 212598 - DNA, 20 bp, synthetic construct
  source 1..20: mol_type = other DNA
ccaagggtattagcaaatat

SEQ ID NO: 212599 - DNA, 20 bp, synthetic construct
  source 1..20: mol_type = other DNA
accaagggtattagcaaata

SEQ ID NO: 212600 - DNA, 20 bp, synthetic construct
  source 1..20: mol_type = other DNA
gaccaagggtattagcaaat

SEQ ID NO: 212601 - DNA, 20 bp, synthetic construct
  source 1..20: mol_type = other DNA
tgaccaagggtattagcaaa

SEQ ID NO: 212602 - DNA, 20 bp, synthetic construct
  source 1..20: mol_type = other DNA
gtgaccaagggtattagcaa

SEQ ID NO: 212603 - DNA, 20 bp, synthetic construct
  source 1..20: mol_type = other DNA
tgtgaccaagggtattagca

SEQ ID NO: 212604 - DNA, 20 bp, synthetic construct
  source 1..20: mol_type = other DNA
atgtgaccaagggtattagc

SEQ ID NO: 212605 - DNA, 20 bp, synthetic construct
  source 1..20: mol_type = other DNA
aatgtgaccaagggtattag

SEQ ID NO: 212606 - DNA, 20 bp, synthetic construct
  source 1..20: mol_type = other DNA
caatgtgaccaagggtatta

SEQ ID NO: 212607 - DNA, 20 bp, synthetic construct
  source 1..20: mol_type = other DNA
tcaatgtgaccaagggtatt

SEQ ID NO: 212608 - DNA, 20 bp, synthetic construct
  source 1..20: mol_type = other DNA
ttcaatgtgaccaagggtat

SEQ ID NO: 212609 - DNA, 20 bp, synthetic construct
  source 1..20: mol_type = other DNA
gttcaatgtgaccaagggta

SEQ ID NO: 212610 - DNA, 20 bp, synthetic construct
  source 1..20: mol_type = other DNA
agttcaatgtgaccaagggt

SEQ ID NO: 212611 - DNA, 20 bp, synthetic construct
  source 1..20: mol_type = other DNA
aagttcaatgtgaccaaggg

SEQ ID NO: 212612 - DNA, 20 bp, synthetic construct
  source 1..20: mol_type = other DNA
caagttcaatgtgaccaagg

SEQ ID NO: 212613 - DNA, 20 bp, synthetic construct
  source 1..20: mol_type = other DNA
tcaagttcaatgtgaccaag

SEQ ID NO: 212614 - DNA, 20 bp, synthetic construct
  source 1..20: mol_type = other DNA
atcaagttcaatgtgaccaa

SEQ ID NO: 212615 - DNA, 20 bp, synthetic construct
  source 1..20: mol_type = other DNA
tatcaagttcaatgtgacca

SEQ ID NO: 212616 - DNA, 20 bp, synthetic construct
  source 1..20: mol_type = other DNA
atatcaagttcaatgtgacc

SEQ ID NO: 212617 - DNA, 20 bp, synthetic construct
  source 1..20: mol_type = other DNA
gatatcaagttcaatgtgac

SEQ ID NO: 212618 - DNA, 20 bp, synthetic construct
  source 1..20: mol_type = other DNA
agatatcaagttcaatgtga

SEQ ID NO: 212619 - DNA, 20 bp, synthetic construct
  source 1..20: mol_type = other DNA
aagatatcaagttcaatgtg

SEQ ID NO: 212620 - DNA, 20 bp, synthetic construct
  source 1..20: mol_type = other DNA
taagatatcaagttcaatgt

SEQ ID NO: 212621 - DNA, 20 bp, synthetic construct
  source 1..20: mol_type = other DNA
ataagatatcaagttcaatg

SEQ ID NO: 212622 - DNA, 20 bp, synthetic construct
  source 1..20: mol_type = other DNA
gataagatatcaagttcaat

SEQ ID NO: 212623 - DNA, 20 bp, synthetic construct
  source 1..20: mol_type = other DNA
tgataagatatcaagttcaa

SEQ ID NO: 212624 - DNA, 20 bp, synthetic construct
  source 1..20: mol_type = other DNA
ctgataagatatcaagttca

SEQ ID NO: 212625 - DNA, 20 bp, synthetic construct
  source 1..20: mol_type = other DNA
tctgataagatatcaagttc

SEQ ID NO: 212626 - DNA, 20 bp, synthetic construct
  source 1..20: mol_type = other DNA
atctgataagatatcaagtt

SEQ ID NO: 212627 - DNA, 20 bp, synthetic construct
  source 1..20: mol_type = other DNA
aatctgataagatatcaagt

SEQ ID NO: 212628 - DNA, 20 bp, synthetic construct
  source 1..20: mol_type = other DNA
aaatctgataagatatcaag

SEQ ID NO: 212629 - DNA, 20 bp, synthetic construct
  source 1..20: mol_type = other DNA
aaaatctgataagatatcaa

SEQ ID NO: 212630 - DNA, 20 bp, synthetic construct
  source 1..20: mol_type = other DNA
gaaaatctgataagatatca

SEQ ID NO: 212631 - DNA, 20 bp, synthetic construct
  source 1..20: mol_type = other DNA
ggaaaatctgataagatatc

SEQ ID NO: 212632 - DNA, 20 bp, synthetic construct
  source 1..20: mol_type = other DNA
aggaaaatctgataagatat

SEQ ID NO: 212633 - DNA, 20 bp, synthetic construct
  source 1..20: mol_type = other DNA
taggaaaatctgataagata

SEQ ID NO: 212634 - DNA, 20 bp, synthetic construct
  source 1..20: mol_type = other DNA
ttaggaaaatctgataagat

SEQ ID NO: 212635 - DNA, 20 bp, synthetic construct
  source 1..20: mol_type = other DNA
attaggaaaatctgataaga

SEQ ID NO: 212636 - DNA, 20 bp, synthetic construct
  source 1..20: mol_type = other DNA
gattaggaaaatctgataag

SEQ ID NO: 212637 - DNA, 20 bp, synthetic construct
  source 1..20: mol_type = other DNA
tgattaggaaaatctgataa

SEQ ID NO: 212638 - DNA, 20 bp, synthetic construct
  source 1..20: mol_type = other DNA
ctgattaggaaaatctgata

SEQ ID NO: 212639 - DNA, 20 bp, synthetic construct
  source 1..20: mol_type = other DNA
gctgattaggaaaatctgat

SEQ ID NO: 212640 - DNA, 20 bp, synthetic construct
  source 1..20: mol_type = other DNA
agctgattaggaaaatctga

SEQ ID NO: 212641 - DNA, 20 bp, synthetic construct
  source 1..20: mol_type = other DNA
gagctgattaggaaaatctg

SEQ ID NO: 212642 - DNA, 20 bp, synthetic construct
  source 1..20: mol_type = other DNA
ggagctgattaggaaaatct

SEQ ID NO: 212643 - DNA, 20 bp, synthetic construct
  source 1..20: mol_type = other DNA
aggagctgattaggaaaatc

SEQ ID NO: 212644 - DNA, 20 bp, synthetic construct
  source 1..20: mol_type = other DNA
aaggagctgattaggaaaat

SEQ ID NO: 212645 - DNA, 20 bp, synthetic construct
  source 1..20: mol_type = other DNA
aaaggagctgattaggaaaa

SEQ ID NO: 212646 - DNA, 20 bp, synthetic construct
  source 1..20: mol_type = other DNA
taaaggagctgattaggaaa

SEQ ID NO: 212647 - DNA, 20 bp, synthetic construct
  source 1..20: mol_type = other DNA
ctaaaggagctgattaggaa

SEQ ID NO: 212648 - DNA, 20 bp, synthetic construct
  source 1..20: mol_type = other DNA
gctaaaggagctgattagga

SEQ ID NO: 212649 - DNA, 20 bp, synthetic construct
  source 1..20: mol_type = other DNA
tgctaaaggagctgattagg

SEQ ID NO: 212650 - DNA, 20 bp, synthetic construct
  source 1..20: mol_type = other DNA
ctgctaaaggagctgattag

SEQ ID NO: 212651 - DNA, 20 bp, synthetic construct
  source 1..20: mol_type = other DNA
gctgctaaaggagctgatta

SEQ ID NO: 212652 - DNA, 20 bp, synthetic construct
  source 1..20: mol_type = other DNA
tgctgctaaaggagctgatt

SEQ ID NO: 212653 - DNA, 20 bp, synthetic construct
  source 1..20: mol_type = other DNA
ctgctgctaaaggagctgat

SEQ ID NO: 212654 - DNA, 20 bp, synthetic construct
  source 1..20: mol_type = other DNA
actgctgctaaaggagctga

SEQ ID NO: 212655 - DNA, 20 bp, synthetic construct
  source 1..20: mol_type = other DNA
cactgctgctaaaggagctg

SEQ ID NO: 212656 - DNA, 20 bp, synthetic construct
  source 1..20: mol_type = other DNA
acactgctgctaaaggagct

SEQ ID NO: 212657 - DNA, 20 bp, synthetic construct
  source 1..20: mol_type = other DNA
aacactgctgctaaaggagc

SEQ ID NO: 212658 - DNA, 20 bp, synthetic construct
  source 1..20: mol_type = other DNA
caacactgctgctaaaggag

SEQ ID NO: 212659 - DNA, 20 bp, synthetic construct
  source 1..20: mol_type = other DNA
gcaacactgctgctaaagga

SEQ ID NO: 212660 - DNA, 20 bp, synthetic construct
  source 1..20: mol_type = other DNA
tgcaacactgctgctaaagg

SEQ ID NO: 212661 - DNA, 20 bp, synthetic construct
  source 1..20: mol_type = other DNA
ctgcaacactgctgctaaag

SEQ ID NO: 212662 - DNA, 20 bp, synthetic construct
  source 1..20: mol_type = other DNA
gctgcaacactgctgctaaa

SEQ ID NO: 212663 - DNA, 20 bp, synthetic construct
  source 1..20: mol_type = other DNA
tgctgcaacactgctgctaa

SEQ ID NO: 212664 - DNA, 20 bp, synthetic construct
  source 1..20: mol_type = other DNA
atgctgcaacactgctgcta

SEQ ID NO: 212665 - DNA, 20 bp, synthetic construct
  source 1..20: mol_type = other DNA
gatgctgcaacactgctgct

SEQ ID NO: 212666 - DNA, 20 bp, synthetic construct
  source 1..20: mol_type = other DNA
agatgctgcaacactgctgc

SEQ ID NO: 212667 - DNA, 20 bp, synthetic construct
  source 1..20: mol_type = other DNA
aagatgctgcaacactgctg

SEQ ID NO: 212668 - DNA, 20 bp, synthetic construct
  source 1..20: mol_type = other DNA
taagatgctgcaacactgct

SEQ ID NO: 212669 - DNA, 20 bp, synthetic construct
  source 1..20: mol_type = other DNA
ataagatgctgcaacactgc

SEQ ID NO: 212670 - DNA, 20 bp, synthetic construct
  source 1..20: mol_type = other DNA
gataagatgctgcaacactg

SEQ ID NO: 212671 - DNA, 20 bp, synthetic construct
  source 1..20: mol_type = other DNA
agataagatgctgcaacact

SEQ ID NO: 212672 - DNA, 20 bp, synthetic construct
  source 1..20: mol_type = other DNA
gagataagatgctgcaacac

SEQ ID NO: 212673 - DNA, 20 bp, synthetic construct
  source 1..20: mol_type = other DNA
tgagataagatgctgcaaca

SEQ ID NO: 212674 - DNA, 20 bp, synthetic construct
  source 1..20: mol_type = other DNA
atgagataagatgctgcaac

SEQ ID NO: 212675 - DNA, 20 bp, synthetic construct
  source 1..20: mol_type = other DNA
aatgagataagatgctgcaa

SEQ ID NO: 212676 - DNA, 20 bp, synthetic construct
  source 1..20: mol_type = other DNA
aaatgagataagatgctgca

SEQ ID NO: 212677 - DNA, 20 bp, synthetic construct
  source 1..20: mol_type = other DNA
aaaatgagataagatgctgc

SEQ ID NO: 212678 - DNA, 20 bp, synthetic construct
  source 1..20: mol_type = other DNA
caaaatgagataagatgctg

SEQ ID NO: 212679 - DNA, 20 bp, synthetic construct
  source 1..20: mol_type = other DNA
acaaaatgagataagatgct

SEQ ID NO: 212680 - DNA, 20 bp, synthetic construct
  source 1..20: mol_type = other DNA
aacaaaatgagataagatgc

SEQ ID NO: 212681 - DNA, 20 bp, synthetic construct
  source 1..20: mol_type = other DNA
aaacaaaatgagataagatg

SEQ ID NO: 212682 - DNA, 20 bp, synthetic construct
  source 1..20: mol_type = other DNA
aaaacaaaatgagataagat

SEQ ID NO: 212683 - DNA, 20 bp, synthetic construct
  source 1..20: mol_type = other DNA
aaaaacaaaatgagataaga

SEQ ID NO: 212684 - DNA, 20 bp, synthetic construct
  source 1..20: mol_type = other DNA
aaaaaacaaaatgagataag

SEQ ID NO: 212685 - DNA, 20 bp, synthetic construct
  source 1..20: mol_type = other DNA
caaaaaacaaaatgagataa

SEQ ID NO: 212686 - DNA, 20 bp, synthetic construct
  source 1..20: mol_type = other DNA
acaaaaaacaaaatgagata

SEQ ID NO: 212687 - DNA, 20 bp, synthetic construct
  source 1..20: mol_type = other DNA
aacaaaaaacaaaatgagat

SEQ ID NO: 212688 - DNA, 20 bp, synthetic construct
  source 1..20: mol_type = other DNA
aaacaaaaaacaaaatgaga

SEQ ID NO: 212689 - DNA, 20 bp, synthetic construct
  source 1..20: mol_type = other DNA
aaaacaaaaaacaaaatgag

SEQ ID NO: 212690 - DNA, 20 bp, synthetic construct
  source 1..20: mol_type = other DNA
aaaaacaaaaaacaaaatga

SEQ ID NO: 212691 - DNA, 20 bp, synthetic construct
  source 1..20: mol_type = other DNA
aaaaaacaaaaaacaaaatg

SEQ ID NO: 212692 - DNA, 20 bp, synthetic construct
  source 1..20: mol_type = other DNA
aaaaaaacaaaaaacaaaat

SEQ ID NO: 212693 - DNA, 20 bp, synthetic construct
  source 1..20: mol_type = other DNA
caaaaaaacaaaaaacaaaa

SEQ ID NO: 212694 - DNA, 20 bp, synthetic construct
  source 1..20: mol_type = other DNA
gcaaaaaaacaaaaaacaaa

SEQ ID NO: 212695 - DNA, 20 bp, synthetic construct
  source 1..20: mol_type = other DNA
ggcaaaaaaacaaaaaacaa

SEQ ID NO: 212696 - DNA, 20 bp, synthetic construct
  source 1..20: mol_type = other DNA
aggcaaaaaaacaaaaaaca

SEQ ID NO: 212697 - DNA, 20 bp, synthetic construct
  source 1..20: mol_type = other DNA
taggcaaaaaaacaaaaaac

SEQ ID NO: 212698 - DNA, 20 bp, synthetic construct
  source 1..20: mol_type = other DNA
ctaggcaaaaaaacaaaaaa

SEQ ID NO: 212699 - DNA, 20 bp, synthetic construct
  source 1..20: mol_type = other DNA
gctaggcaaaaaaacaaaaa

SEQ ID NO: 212700 - DNA, 20 bp, synthetic construct
  source 1..20: mol_type = other DNA
tgctaggcaaaaaaacaaaa

SEQ ID NO: 212701 - DNA, 20 bp, synthetic construct
  source 1..20: mol_type = other DNA
gtgctaggcaaaaaaacaaa

SEQ ID NO: 212702 - DNA, 20 bp, synthetic construct
  source 1..20: mol_type = other DNA
tgtgctaggcaaaaaaacaa

SEQ ID NO: 212703 - DNA, 20 bp, synthetic construct
  source 1..20: mol_type = other DNA
atgtgctaggcaaaaaaaca

SEQ ID NO: 212704 - DNA, 20 bp, synthetic construct
  source 1..20: mol_type = other DNA
catgtgctaggcaaaaaaac

SEQ ID NO: 212705 - DNA, 20 bp, synthetic construct
  source 1..20: mol_type = other DNA
gcatgtgctaggcaaaaaaa

SEQ ID NO: 212706 - DNA, 20 bp, synthetic construct
  source 1..20: mol_type = other DNA
ggcatgtgctaggcaaaaaa

SEQ ID NO: 212707 - DNA, 20 bp, synthetic construct
  source 1..20: mol_type = other DNA
aggcatgtgctaggcaaaaa

SEQ ID NO: 212708 - DNA, 20 bp, synthetic construct
  source 1..20: mol_type = other DNA
caggcatgtgctaggcaaaa

SEQ ID NO: 212709 - DNA, 20 bp, synthetic construct
  source 1..20: mol_type = other DNA
acaggcatgtgctaggcaaa

SEQ ID NO: 212710 - DNA, 20 bp, synthetic construct
  source 1..20: mol_type = other DNA
tacaggcatgtgctaggcaa

SEQ ID NO: 212711 - DNA, 20 bp, synthetic construct
  source 1..20: mol_type = other DNA
ttacaggcatgtgctaggca

SEQ ID NO: 212712 - DNA, 20 bp, synthetic construct
  source 1..20: mol_type = other DNA
tttacaggcatgtgctaggc

SEQ ID NO: 212713 - DNA, 20 bp, synthetic construct
  source 1..20: mol_type = other DNA
atttacaggcatgtgctagg

SEQ ID NO: 212714 - DNA, 20 bp, synthetic construct
  source 1..20: mol_type = other DNA
gatttacaggcatgtgctag

SEQ ID NO: 212715 - DNA, 20 bp, synthetic construct
  source 1..20: mol_type = other DNA
tgatttacaggcatgtgcta

SEQ ID NO: 212716 - DNA, 20 bp, synthetic construct
  source 1..20: mol_type = other DNA
gtgatttacaggcatgtgct

SEQ ID NO: 212717 - DNA, 20 bp, synthetic construct
  source 1..20: mol_type = other DNA
agtgatttacaggcatgtgc

SEQ ID NO: 212718 - DNA, 20 bp, synthetic construct
  source 1..20: mol_type = other DNA
cagtgatttacaggcatgtg

SEQ ID NO: 212719 - DNA, 20 bp, synthetic construct
  source 1..20: mol_type = other DNA
ccagtgatttacaggcatgt

SEQ ID NO: 212720 - DNA, 20 bp, synthetic construct
  source 1..20: mol_type = other DNA
tccagtgatttacaggcatg

SEQ ID NO: 212721 - DNA, 20 bp, synthetic construct
  source 1..20: mol_type = other DNA
atccagtgatttacaggcat

SEQ ID NO: 212722 - DNA, 20 bp, synthetic construct
  source 1..20: mol_type = other DNA
aatccagtgatttacaggca

SEQ ID NO: 212723 - DNA, 20 bp, synthetic construct
  source 1..20: mol_type = other DNA
caatccagtgatttacaggc

SEQ ID NO: 212724 - DNA, 20 bp, synthetic construct
  source 1..20: mol_type = other DNA
tcaatccagtgatttacagg

SEQ ID NO: 212725 - DNA, 20 bp, synthetic construct
  source 1..20: mol_type = other DNA
ctcaatccagtgatttacag

SEQ ID NO: 212726 - DNA, 20 bp, synthetic construct
  source 1..20: mol_type = other DNA
cctcaatccagtgatttaca

SEQ ID NO: 212727 - DNA, 20 bp, synthetic construct
  source 1..20: mol_type = other DNA
acctcaatccagtgatttac

SEQ ID NO: 212728 - DNA, 20 bp, synthetic construct
  source 1..20: mol_type = other DNA
cacctcaatccagtgattta

SEQ ID NO: 212729 - DNA, 20 bp, synthetic construct
  source 1..20: mol_type = other DNA
acacctcaatccagtgattt

SEQ ID NO: 212730 - DNA, 20 bp, synthetic construct
  source 1..20: mol_type = other DNA
aacacctcaatccagtgatt

SEQ ID NO: 212731 - DNA, 20 bp, synthetic construct
  source 1..20: mol_type = other DNA
aaacacctcaatccagtgat

SEQ ID NO: 212732 - DNA, 20 bp, synthetic construct
  source 1..20: mol_type = other DNA
taaacacctcaatccagtga

SEQ ID NO: 212733 - DNA, 20 bp, synthetic construct
  source 1..20: mol_type = other DNA
ctaaacacctcaatccagtg

SEQ ID NO: 212734 - DNA, 20 bp, synthetic construct
  source 1..20: mol_type = other DNA
tctaaacacctcaatccagt

SEQ ID NO: 212735 - DNA, 20 bp, synthetic construct
  source 1..20: mol_type = other DNA
atctaaacacctcaatccag

SEQ ID NO: 212736 - DNA, 20 bp, synthetic construct
  source 1..20: mol_type = other DNA
catctaaacacctcaatcca

SEQ ID NO: 212737 - DNA, 20 bp, synthetic construct
  source 1..20: mol_type = other DNA
acatctaaacacctcaatcc

SEQ ID NO: 212738 - DNA, 20 bp, synthetic construct
  source 1..20: mol_type = other DNA
aacatctaaacacctcaatc

SEQ ID NO: 212739 - DNA, 20 bp, synthetic construct
  source 1..20: mol_type = other DNA
aaacatctaaacacctcaat

SEQ ID NO: 212740 - DNA, 20 bp, synthetic construct
  source 1..20: mol_type = other DNA
caaacatctaaacacctcaa

SEQ ID NO: 212741 - DNA, 20 bp, synthetic construct
  source 1..20: mol_type = other DNA
acaaacatctaaacacctca

SEQ ID NO: 212742 - DNA, 20 bp, synthetic construct
  source 1..20: mol_type = other DNA
aacaaacatctaaacacctc

SEQ ID NO: 212743 - DNA, 20 bp, synthetic construct
  source 1..20: mol_type = other DNA
caacaaacatctaaacacct

SEQ ID NO: 212744 - DNA, 20 bp, synthetic construct
  source 1..20: mol_type = other DNA
acaacaaacatctaaacacc

SEQ ID NO: 212745 - DNA, 20 bp, synthetic construct
  source 1..20: mol_type = other DNA
gacaacaaacatctaaacac

SEQ ID NO: 212746 - DNA, 20 bp, synthetic construct
  source 1..20: mol_type = other DNA
ggacaacaaacatctaaaca

SEQ ID NO: 212747 - DNA, 20 bp, synthetic construct
  source 1..20: mol_type = other DNA
aggacaacaaacatctaaac

SEQ ID NO: 212748 - DNA, 20 bp, synthetic construct
  source 1..20: mol_type = other DNA
aaggacaacaaacatctaaa

SEQ ID NO: 212749 - DNA, 20 bp, synthetic construct
  source 1..20: mol_type = other DNA
aaaggacaacaaacatctaa

SEQ ID NO: 212750 - DNA, 20 bp, synthetic construct
  source 1..20: mol_type = other DNA
caaaggacaacaaacatcta

SEQ ID NO: 212751 - DNA, 20 bp, synthetic construct
  source 1..20: mol_type = other DNA
ccaaaggacaacaaacatct

SEQ ID NO: 212752 - DNA, 20 bp, synthetic construct
  source 1..20: mol_type = other DNA
tccaaaggacaacaaacatc

SEQ ID NO: 212753 - DNA, 20 bp, synthetic construct
  source 1..20: mol_type = other DNA
atccaaaggacaacaaacat

SEQ ID NO: 212754 - DNA, 20 bp, synthetic construct
  source 1..20: mol_type = other DNA
catccaaaggacaacaaaca

SEQ ID NO: 212755 - DNA, 20 bp, synthetic construct
  source 1..20: mol_type = other DNA
gcatccaaaggacaacaaac

SEQ ID NO: 212756 - DNA, 20 bp, synthetic construct
  source 1..20: mol_type = other DNA
agcatccaaaggacaacaaa

SEQ ID NO: 212757 - DNA, 20 bp, synthetic construct
  source 1..20: mol_type = other DNA
aagcatccaaaggacaacaa

SEQ ID NO: 212758 - DNA, 20 bp, synthetic construct
  source 1..20: mol_type = other DNA
gaagcatccaaaggacaaca

SEQ ID NO: 212759 - DNA, 20 bp, synthetic construct
  source 1..20: mol_type = other DNA
agaagcatccaaaggacaac

SEQ ID NO: 212760 - DNA, 20 bp, synthetic construct
  source 1..20: mol_type = other DNA
aagaagcatccaaaggacaa

SEQ ID NO: 212761 - DNA, 20 bp, synthetic construct
  source 1..20: mol_type = other DNA
taagaagcatccaaaggaca

SEQ ID NO: 212762 - DNA, 20 bp, synthetic construct
  source 1..20: mol_type = other DNA
ataagaagcatccaaaggac

SEQ ID NO: 212763 - DNA, 20 bp, synthetic construct
  source 1..20: mol_type = other DNA
tataagaagcatccaaagga

SEQ ID NO: 212764 - DNA, 20 bp, synthetic construct
  source 1..20: mol_type = other DNA
ttataagaagcatccaaagg

SEQ ID NO: 212765 - DNA, 20 bp, synthetic construct
  source 1..20: mol_type = other DNA
tttataagaagcatccaaag

SEQ ID NO: 212766 - DNA, 20 bp, synthetic construct
  source 1..20: mol_type = other DNA
atttataagaagcatccaaa

SEQ ID NO: 212767 - DNA, 20 bp, synthetic construct
  source 1..20: mol_type = other DNA
gatttataagaagcatccaa

SEQ ID NO: 212768 - DNA, 20 bp, synthetic construct
  source 1..20: mol_type = other DNA
ggatttataagaagcatcca

SEQ ID NO: 212769 - DNA, 20 bp, synthetic construct
  source 1..20: mol_type = other DNA
tggatttataagaagcatcc

SEQ ID NO: 212770 - DNA, 20 bp, synthetic construct
  source 1..20: mol_type = other DNA
atggatttataagaagcatc

SEQ ID NO: 212771 - DNA, 20 bp, synthetic construct
  source 1..20: mol_type = other DNA
tatggatttataagaagcat

SEQ ID NO: 212772 - DNA, 20 bp, synthetic construct
  source 1..20: mol_type = other DNA
atatggatttataagaagca

SEQ ID NO: 212773 - DNA, 20 bp, synthetic construct
  source 1..20: mol_type = other DNA
aatatggatttataagaagc

SEQ ID NO: 212774 - DNA, 20 bp, synthetic construct
  source 1..20: mol_type = other DNA
aaatatggatttataagaag

SEQ ID NO: 212775 - DNA, 20 bp, synthetic construct
  source 1..20: mol_type = other DNA
gaaatatggatttataagaa

SEQ ID NO: 212776 - DNA, 20 bp, synthetic construct
  source 1..20: mol_type = other DNA
tgaaatatggatttataaga

SEQ ID NO: 212777 - DNA, 20 bp, synthetic construct
  source 1..20: mol_type = other DNA
atgaaatatggatttataag

SEQ ID NO: 212778 - DNA, 20 bp, synthetic construct
  source 1..20: mol_type = other DNA
catgaaatatggatttataa

SEQ ID NO: 212779 - DNA, 20 bp, synthetic construct
  source 1..20: mol_type = other DNA
ccatgaaatatggatttata

SEQ ID NO: 212780 - DNA, 20 bp, synthetic construct
  source 1..20: mol_type = other DNA
gccatgaaatatggatttat

SEQ ID NO: 212781 - DNA, 20 bp, synthetic construct
  source 1..20: mol_type = other DNA
agccatgaaatatggattta

SEQ ID NO: 212782 - DNA, 20 bp, synthetic construct
  source 1..20: mol_type = other DNA
gagccatgaaatatggattt

SEQ ID NO: 212783 - DNA, 20 bp, synthetic construct
  source 1..20: mol_type = other DNA
ggagccatgaaatatggatt

SEQ ID NO: 212784 - DNA, 20 bp, synthetic construct
  source 1..20: mol_type = other DNA
gggagccatgaaatatggat

SEQ ID NO: 212785 - DNA, 20 bp, synthetic construct
  source 1..20: mol_type = other DNA
agggagccatgaaatatgga

SEQ ID NO: 212786 - DNA, 20 bp, synthetic construct
  source 1..20: mol_type = other DNA
cagggagccatgaaatatgg

SEQ ID NO: 212787 - DNA, 20 bp, synthetic construct
  source 1..20: mol_type = other DNA
ccagggagccatgaaatatg

SEQ ID NO: 212788 - DNA, 20 bp, synthetic construct
  source 1..20: mol_type = other DNA
tccagggagccatgaaatat

SEQ ID NO: 212789 - DNA, 20 bp, synthetic construct
  source 1..20: mol_type = other DNA
ttccagggagccatgaaata

SEQ ID NO: 212790 - DNA, 20 bp, synthetic construct
  source 1..20: mol_type = other DNA
tttccagggagccatgaaat

SEQ ID NO: 212791 - DNA, 20 bp, synthetic construct
  source 1..20: mol_type = other DNA
ctttccagggagccatgaaa

SEQ ID NO: 212792 - DNA, 20 bp, synthetic construct
  source 1..20: mol_type = other DNA
actttccagggagccatgaa

SEQ ID NO: 212793 - DNA, 20 bp, synthetic construct
  source 1..20: mol_type = other DNA
cactttccagggagccatga

SEQ ID NO: 212794 - DNA, 20 bp, synthetic construct
  source 1..20: mol_type = other DNA
gcactttccagggagccatg

SEQ ID NO: 212795 - DNA, 20 bp, synthetic construct
  source 1..20: mol_type = other DNA
agcactttccagggagccat

SEQ ID NO: 212796 - DNA, 20 bp, synthetic construct
  source 1..20: mol_type = other DNA
tagcactttccagggagcca

SEQ ID NO: 212797 - DNA, 20 bp, synthetic construct
  source 1..20: mol_type = other DNA
atagcactttccagggagcc

SEQ ID NO: 212798 - DNA, 20 bp, synthetic construct
  source 1..20: mol_type = other DNA
catagcactttccagggagc

SEQ ID NO: 212799 - DNA, 20 bp, synthetic construct
  source 1..20: mol_type = other DNA
gcatagcactttccagggag

SEQ ID NO: 212800 - DNA, 20 bp, synthetic construct
  source 1..20: mol_type = other DNA
tgcatagcactttccaggga

SEQ ID NO: 212801 - DNA, 20 bp, synthetic construct
  source 1..20: mol_type = other DNA
ttgcatagcactttccaggg

SEQ ID NO: 212802 - DNA, 20 bp, synthetic construct
  source 1..20: mol_type = other DNA
tttgcatagcactttccagg

SEQ ID NO: 212803 - DNA, 20 bp, synthetic construct
  source 1..20: mol_type = other DNA
atttgcatagcactttccag

SEQ ID NO: 212804 - DNA, 20 bp, synthetic construct
  source 1..20: mol_type = other DNA
catttgcatagcactttcca

SEQ ID NO: 212805 - DNA, 20 bp, synthetic construct
  source 1..20: mol_type = other DNA
tcatttgcatagcactttcc

SEQ ID NO: 212806 - DNA, 20 bp, synthetic construct
  source 1..20: mol_type = other DNA
atcatttgcatagcactttc

SEQ ID NO: 212807 - DNA, 20 bp, synthetic construct
  source 1..20: mol_type = other DNA
tatcatttgcatagcacttt

SEQ ID NO: 212808 - DNA, 20 bp, synthetic construct
  source 1..20: mol_type = other DNA
ttatcatttgcatagcactt

SEQ ID NO: 212809 - DNA, 20 bp, synthetic construct
  source 1..20: mol_type = other DNA
cttatcatttgcatagcact

SEQ ID NO: 212810 - DNA, 20 bp, synthetic construct
  source 1..20: mol_type = other DNA
gcttatcatttgcatagcac

SEQ ID NO: 212811 - DNA, 20 bp, synthetic construct
  source 1..20: mol_type = other DNA
agcttatcatttgcatagca

SEQ ID NO: 212812 - DNA, 20 bp, synthetic construct
  source 1..20: mol_type = other DNA
cagcttatcatttgcatagc

SEQ ID NO: 212813 - DNA, 20 bp, synthetic construct
  source 1..20: mol_type = other DNA
gcagcttatcatttgcatag

SEQ ID NO: 212814 - DNA, 20 bp, synthetic construct
  source 1..20: mol_type = other DNA
tgcagcttatcatttgcata

SEQ ID NO: 212815 - DNA, 20 bp, synthetic construct
  source 1..20: mol_type = other DNA
ttgcagcttatcatttgcat

SEQ ID NO: 212816 - DNA, 20 bp, synthetic construct
  source 1..20: mol_type = other DNA
cttgcagcttatcatttgca

SEQ ID NO: 212817 - DNA, 20 bp, synthetic construct
  source 1..20: mol_type = other DNA
ccttgcagcttatcatttgc

SEQ ID NO: 212818 - DNA, 20 bp, synthetic construct
  source 1..20: mol_type = other DNA
tccttgcagcttatcatttg

SEQ ID NO: 212819 - DNA, 20 bp, synthetic construct
  source 1..20: mol_type = other DNA
atccttgcagcttatcattt

SEQ ID NO: 212820 - DNA, 20 bp, synthetic construct
  source 1..20: mol_type = other DNA
catccttgcagcttatcatt

SEQ ID NO: 212821 - DNA, 20 bp, synthetic construct
  source 1..20: mol_type = other DNA
ccatccttgcagcttatcat

SEQ ID NO: 212822 - DNA, 20 bp, synthetic construct
  source 1..20: mol_type = other DNA
tccatccttgcagcttatca

SEQ ID NO: 212823 - DNA, 20 bp, synthetic construct
  source 1..20: mol_type = other DNA
ttccatccttgcagcttatc

SEQ ID NO: 212824 - DNA, 20 bp, synthetic construct
  source 1..20: mol_type = other DNA
tttccatccttgcagcttat

SEQ ID NO: 212825 - DNA, 20 bp, synthetic construct
  source 1..20: mol_type = other DNA
ctttccatccttgcagctta

SEQ ID NO: 212826 - DNA, 20 bp, synthetic construct
  source 1..20: mol_type = other DNA
cctttccatccttgcagctt

SEQ ID NO: 212827 - DNA, 20 bp, synthetic construct
  source 1..20: mol_type = other DNA
tcctttccatccttgcagct

SEQ ID NO: 212828 - DNA, 20 bp, synthetic construct
  source 1..20: mol_type = other DNA
ttcctttccatccttgcagc

SEQ ID NO: 212829 - DNA, 20 bp, synthetic construct
  source 1..20: mol_type = other DNA
tttcctttccatccttgcag

SEQ ID NO: 212830 - DNA, 20 bp, synthetic construct
  source 1..20: mol_type = other DNA
atttcctttccatccttgca

SEQ ID NO: 212831 - DNA, 20 bp, synthetic construct
  source 1..20: mol_type = other DNA
aatttcctttccatccttgc

SEQ ID NO: 212832 - DNA, 20 bp, synthetic construct
  source 1..20: mol_type = other DNA
caatttcctttccatccttg

SEQ ID NO: 212833 - DNA, 20 bp, synthetic construct
  source 1..20: mol_type = other DNA
gcaatttcctttccatcctt

SEQ ID NO: 212834 - DNA, 20 bp, synthetic construct
  source 1..20: mol_type = other DNA
tgcaatttcctttccatcct

SEQ ID NO: 212835 - DNA, 20 bp, synthetic construct
  source 1..20: mol_type = other DNA
ctgcaatttcctttccatcc

SEQ ID NO: 212836 - DNA, 20 bp, synthetic construct
  source 1..20: mol_type = other DNA
actgcaatttcctttccatc

SEQ ID NO: 212837 - DNA, 20 bp, synthetic construct
  source 1..20: mol_type = other DNA
cactgcaatttcctttccat

SEQ ID NO: 212838 - DNA, 20 bp, synthetic construct
  source 1..20: mol_type = other DNA
gcactgcaatttcctttcca

SEQ ID NO: 212839 - DNA, 20 bp, synthetic construct
  source 1..20: mol_type = other DNA
agcactgcaatttcctttcc

SEQ ID NO: 212840 - DNA, 20 bp, synthetic construct
  source 1..20: mol_type = other DNA
gagcactgcaatttcctttc

SEQ ID NO: 212841 - DNA, 20 bp, synthetic construct
  source 1..20: mol_type = other DNA
ggagcactgcaatttccttt

SEQ ID NO: 212842 - DNA, 20 bp, synthetic construct
  source 1..20: mol_type = other DNA
aggagcactgcaatttcctt

SEQ ID NO: 212843 - DNA, 20 bp, synthetic construct
  source 1..20: mol_type = other DNA
caggagcactgcaatttcct

SEQ ID NO: 212844 - DNA, 20 bp, synthetic construct
  source 1..20: mol_type = other DNA
tcaggagcactgcaatttcc

SEQ ID NO: 212845 - DNA, 20 bp, synthetic construct
  source 1..20: mol_type = other DNA
ttcaggagcactgcaatttc

SEQ ID NO: 212846 - DNA, 20 bp, synthetic construct
  source 1..20: mol_type = other DNA
attcaggagcactgcaattt

SEQ ID NO: 212847 - DNA, 20 bp, synthetic construct
  source 1..20: mol_type = other DNA
aattcaggagcactgcaatt

SEQ ID NO: 212848 - DNA, 20 bp, synthetic construct
  source 1..20: mol_type = other DNA
caattcaggagcactgcaat

SEQ ID NO: 212849 - DNA, 20 bp, synthetic construct
  source 1..20: mol_type = other DNA
acaattcaggagcactgcaa

SEQ ID NO: 212850 - DNA, 20 bp, synthetic construct
  source 1..20: mol_type = other DNA
tacaattcaggagcactgca

SEQ ID NO: 212851 - DNA, 20 bp, synthetic construct
  source 1..20: mol_type = other DNA
ttacaattcaggagcactgc

SEQ ID NO: 212852 - DNA, 20 bp, synthetic construct
  source 1..20: mol_type = other DNA
tttacaattcaggagcactg

SEQ ID NO: 212853 - DNA, 20 bp, synthetic construct
  source 1..20: mol_type = other DNA
atttacaattcaggagcact

SEQ ID NO: 212854 - DNA, 20 bp, synthetic construct
  source 1..20: mol_type = other DNA
catttacaattcaggagcac

SEQ ID NO: 212855 - DNA, 20 bp, synthetic construct
  source 1..20: mol_type = other DNA
ccatttacaattcaggagca

SEQ ID NO: 212856 - DNA, 20 bp, synthetic construct
  source 1..20: mol_type = other DNA
cccatttacaattcaggagc

SEQ ID NO: 212857 - DNA, 20 bp, synthetic construct
  source 1..20: mol_type = other DNA
gcccatttacaattcaggag

SEQ ID NO: 212858 - DNA, 20 bp, synthetic construct
  source 1..20: mol_type = other DNA
agcccatttacaattcagga

SEQ ID NO: 212859 - DNA, 20 bp, synthetic construct
  source 1..20: mol_type = other DNA
aagcccatttacaattcagg

SEQ ID NO: 212860 - DNA, 20 bp, synthetic construct
  source 1..20: mol_type = other DNA
aaagcccatttacaattcag

SEQ ID NO: 212861 - DNA, 20 bp, synthetic construct
  source 1..20: mol_type = other DNA
aaaagcccatttacaattca

SEQ ID NO: 212862 - DNA, 20 bp, synthetic construct
  source 1..20: mol_type = other DNA
taaaagcccatttacaattc

SEQ ID NO: 212863 - DNA, 20 bp, synthetic construct
  source 1..20: mol_type = other DNA
gtaaaagcccatttacaatt

SEQ ID NO: 212864 - DNA, 20 bp, synthetic construct
  source 1..20: mol_type = other DNA
cgtaaaagcccatttacaat

SEQ ID NO: 212865 - DNA, 20 bp, synthetic construct
  source 1..20: mol_type = other DNA
tcgtaaaagcccatttacaa

SEQ ID NO: 212866 - DNA, 20 bp, synthetic construct
  source 1..20: mol_type = other DNA
ctcgtaaaagcccatttaca

SEQ ID NO: 212867 - DNA, 20 bp, synthetic construct
  source 1..20: mol_type = other DNA
cctcgtaaaagcccatttac

SEQ ID NO: 212868 - DNA, 20 bp, synthetic construct
  source 1..20: mol_type = other DNA
tcctcgtaaaagcccattta

SEQ ID NO: 212869 - DNA, 20 bp, synthetic construct
  source 1..20: mol_type = other DNA
ctcctcgtaaaagcccattt

SEQ ID NO: 212870 - DNA, 20 bp, synthetic construct
  source 1..20: mol_type = other DNA
cctcctcgtaaaagcccatt

SEQ ID NO: 212871 - DNA, 20 bp, synthetic construct
  source 1..20: mol_type = other DNA
acctcctcgtaaaagcccat

SEQ ID NO: 212872 - DNA, 20 bp, synthetic construct
  source 1..20: mol_type = other DNA
aacctcctcgtaaaagccca

SEQ ID NO: 212873 - DNA, 20 bp, synthetic construct
  source 1..20: mol_type = other DNA
aaacctcctcgtaaaagccc

SEQ ID NO: 212874 - DNA, 20 bp, synthetic construct
  source 1..20: mol_type = other DNA
gaaacctcctcgtaaaagcc

SEQ ID NO: 212875 - DNA, 20 bp, synthetic construct
  source 1..20: mol_type = other DNA
agaaacctcctcgtaaaagc

SEQ ID NO: 212876 - DNA, 20 bp, synthetic construct
  source 1..20: mol_type = other DNA
tagaaacctcctcgtaaaag

SEQ ID NO: 212877 - DNA, 20 bp, synthetic construct
  source 1..20: mol_type = other DNA
ttagaaacctcctcgtaaaa

SEQ ID NO: 212878 - DNA, 20 bp, synthetic construct
  source 1..20: mol_type = other DNA
attagaaacctcctcgtaaa

SEQ ID NO: 212879 - DNA, 20 bp, synthetic construct
  source 1..20: mol_type = other DNA
aattagaaacctcctcgtaa

SEQ ID NO: 212880 - DNA, 20 bp, synthetic construct
  source 1..20: mol_type = other DNA
taattagaaacctcctcgta

SEQ ID NO: 212881 - DNA, 20 bp, synthetic construct
  source 1..20: mol_type = other DNA
gtaattagaaacctcctcgt

SEQ ID NO: 212882 - DNA, 20 bp, synthetic construct
  source 1..20: mol_type = other DNA
agtaattagaaacctcctcg

SEQ ID NO: 212883 - DNA, 20 bp, synthetic construct
  source 1..20: mol_type = other DNA
gagtaattagaaacctcctc

SEQ ID NO: 212884 - DNA, 20 bp, synthetic construct
  source 1..20: mol_type = other DNA
cgagtaattagaaacctcct

SEQ ID NO: 212885 - DNA, 20 bp, synthetic construct
  source 1..20: mol_type = other DNA
gcgagtaattagaaacctcc

SEQ ID NO: 212886 - DNA, 20 bp, synthetic construct
  source 1..20: mol_type = other DNA
agcgagtaattagaaacctc

SEQ ID NO: 212887 - DNA, 20 bp, synthetic construct
  source 1..20: mol_type = other DNA
gagcgagtaattagaaacct

SEQ ID NO: 212888 - DNA, 20 bp, synthetic construct
  source 1..20: mol_type = other DNA
agagcgagtaattagaaacc

SEQ ID NO: 212889 - DNA, 20 bp, synthetic construct
  source 1..20: mol_type = other DNA
aagagcgagtaattagaaac

SEQ ID NO: 212890 - DNA, 20 bp, synthetic construct
  source 1..20: mol_type = other DNA
aaagagcgagtaattagaaa

SEQ ID NO: 212891 - DNA, 20 bp, synthetic construct
  source 1..20: mol_type = other DNA
gaaagagcgagtaattagaa

SEQ ID NO: 212892 - DNA, 20 bp, synthetic construct
  source 1..20: mol_type = other DNA
agaaagagcgagtaattaga

SEQ ID NO: 212893 - DNA, 20 bp, synthetic construct
  source 1..20: mol_type = other DNA
gagaaagagcgagtaattag

SEQ ID NO: 212894 - DNA, 20 bp, synthetic construct
  source 1..20: mol_type = other DNA
agagaaagagcgagtaatta

SEQ ID NO: 212895 - DNA, 20 bp, synthetic construct
  source 1..20: mol_type = other DNA
aagagaaagagcgagtaatt

SEQ ID NO: 212896 - DNA, 20 bp, synthetic construct
  source 1..20: mol_type = other DNA
caagagaaagagcgagtaat

SEQ ID NO: 212897 - DNA, 20 bp, synthetic construct
  source 1..20: mol_type = other DNA
tcaagagaaagagcgagtaa

SEQ ID NO: 212898 - DNA, 20 bp, synthetic construct
  source 1..20: mol_type = other DNA
ttcaagagaaagagcgagta

SEQ ID NO: 212899 - DNA, 20 bp, synthetic construct
  source 1..20: mol_type = other DNA
gttcaagagaaagagcgagt

SEQ ID NO: 212900 - DNA, 20 bp, synthetic construct
  source 1..20: mol_type = other DNA
agttcaagagaaagagcgag

SEQ ID NO: 212901 - DNA, 20 bp, synthetic construct
  source 1..20: mol_type = other DNA
cagttcaagagaaagagcga

SEQ ID NO: 212902 - DNA, 20 bp, synthetic construct
  source 1..20: mol_type = other DNA
tcagttcaagagaaagagcg

SEQ ID NO: 212903 - DNA, 20 bp, synthetic construct
  source 1..20: mol_type = other DNA
ctcagttcaagagaaagagc

SEQ ID NO: 212904 - DNA, 20 bp, synthetic construct
  source 1..20: mol_type = other DNA
cctcagttcaagagaaagag

SEQ ID NO: 212905 - DNA, 20 bp, synthetic construct
  source 1..20: mol_type = other DNA
tcctcagttcaagagaaaga

SEQ ID NO: 212906 - DNA, 20 bp, synthetic construct
  source 1..20: mol_type = other DNA
ctcctcagttcaagagaaag

SEQ ID NO: 212907 - DNA, 20 bp, synthetic construct
  source 1..20: mol_type = other DNA
actcctcagttcaagagaaa

SEQ ID NO: 212908 - DNA, 20 bp, synthetic construct
  source 1..20: mol_type = other DNA
aactcctcagttcaagagaa

SEQ ID NO: 212909 - DNA, 20 bp, synthetic construct
  source 1..20: mol_type = other DNA
caactcctcagttcaagaga

SEQ ID NO: 212910 - DNA, 20 bp, synthetic construct
  source 1..20: mol_type = other DNA
tcaactcctcagttcaagag

SEQ ID NO: 212911 - DNA, 20 bp, synthetic construct
  source 1..20: mol_type = other DNA
ttcaactcctcagttcaaga

SEQ ID NO: 212912 - DNA, 20 bp, synthetic construct
  source 1..20: mol_type = other DNA
cttcaactcctcagttcaag

SEQ ID NO: 212913 - DNA, 20 bp, synthetic construct
  source 1..20: mol_type = other DNA
acttcaactcctcagttcaa

SEQ ID NO: 212914 - DNA, 20 bp, synthetic construct
  source 1..20: mol_type = other DNA
cacttcaactcctcagttca

SEQ ID NO: 212915 - DNA, 20 bp, synthetic construct
  source 1..20: mol_type = other DNA
acacttcaactcctcagttc

SEQ ID NO: 212916 - DNA, 20 bp, synthetic construct
  source 1..20: mol_type = other DNA
tacacttcaactcctcagtt

SEQ ID NO: 212917 - DNA, 20 bp, synthetic construct
  source 1..20: mol_type = other DNA
ctacacttcaactcctcagt

SEQ ID NO: 212918 - DNA, 20 bp, synthetic construct
  source 1..20: mol_type = other DNA
cctacacttcaactcctcag

SEQ ID NO: 212919 - DNA, 20 bp, synthetic construct
  source 1..20: mol_type = other DNA
acctacacttcaactcctca

SEQ ID NO: 212920 - DNA, 20 bp, synthetic construct
  source 1..20: mol_type = other DNA
cacctacacttcaactcctc

SEQ ID NO: 212921 - DNA, 20 bp, synthetic construct
  source 1..20: mol_type = other DNA
ccacctacacttcaactcct

SEQ ID NO: 212922 - DNA, 20 bp, synthetic construct
  source 1..20: mol_type = other DNA
gccacctacacttcaactcc

SEQ ID NO: 212923 - DNA, 20 bp, synthetic construct
  source 1..20: mol_type = other DNA
tgccacctacacttcaactc

SEQ ID NO: 212924 - DNA, 20 bp, synthetic construct
  source 1..20: mol_type = other DNA
ctgccacctacacttcaact

SEQ ID NO: 212925 - DNA, 20 bp, synthetic construct
  source 1..20: mol_type = other DNA
tctgccacctacacttcaac

SEQ ID NO: 212926 - DNA, 20 bp, synthetic construct
  source 1..20: mol_type = other DNA
atctgccacctacacttcaa

SEQ ID NO: 212927 - DNA, 20 bp, synthetic construct
  source 1..20: mol_type = other DNA
gatctgccacctacacttca

SEQ ID NO: 212928 - DNA, 20 bp, synthetic construct
  source 1..20: mol_type = other DNA
ggatctgccacctacacttc

SEQ ID NO: 212929 - DNA, 20 bp, synthetic construct
  source 1..20: mol_type = other DNA
tggatctgccacctacactt

SEQ ID NO: 212930 - DNA, 20 bp, synthetic construct
  source 1..20: mol_type = other DNA
atggatctgccacctacact

SEQ ID NO: 212931 - DNA, 20 bp, synthetic construct
  source 1..20: mol_type = other DNA
tatggatctgccacctacac

SEQ ID NO: 212932 - DNA, 20 bp, synthetic construct
  source 1..20: mol_type = other DNA
ttatggatctgccacctaca

SEQ ID NO: 212933 - DNA, 20 bp, synthetic construct
  source 1..20: mol_type = other DNA
gttatggatctgccacctac

SEQ ID NO: 212934 - DNA, 20 bp, synthetic construct
  source 1..20: mol_type = other DNA
tgttatggatctgccaccta

SEQ ID NO: 212935 - DNA, 20 bp, synthetic construct
  source 1..20: mol_type = other DNA
ctgttatggatctgccacct

SEQ ID NO: 212936 - DNA, 20 bp, synthetic construct
  source 1..20: mol_type = other DNA
tctgttatggatctgccacc

SEQ ID NO: 212937 - DNA, 20 bp, synthetic construct
  source 1..20: mol_type = other DNA
atctgttatggatctgccac

SEQ ID NO: 212938 - DNA, 20 bp, synthetic construct
  source 1..20: mol_type = other DNA
tatctgttatggatctgcca

SEQ ID NO: 212939 - DNA, 20 bp, synthetic construct
  source 1..20: mol_type = other DNA
ttatctgttatggatctgcc

SEQ ID NO: 212940 - DNA, 20 bp, synthetic construct
  source 1..20: mol_type = other DNA
attatctgttatggatctgc

SEQ ID NO: 212941 - DNA, 20 bp, synthetic construct
  source 1..20: mol_type = other DNA
gattatctgttatggatctg

SEQ ID NO: 212942 - DNA, 20 bp, synthetic construct
  source 1..20: mol_type = other DNA
tgattatctgttatggatct

SEQ ID NO: 212943 - DNA, 20 bp, synthetic construct
  source 1..20: mol_type = other DNA
atgattatctgttatggatc

SEQ ID NO: 212944 - DNA, 20 bp, synthetic construct
  source 1..20: mol_type = other DNA
catgattatctgttatggat

SEQ ID NO: 212945 - DNA, 20 bp, synthetic construct
  source 1..20: mol_type = other DNA
acatgattatctgttatgga

SEQ ID NO: 212946 - DNA, 20 bp, synthetic construct
  source 1..20: mol_type = other DNA
cacatgattatctgttatgg

SEQ ID NO: 212947 - DNA, 20 bp, synthetic construct
  source 1..20: mol_type = other DNA
acacatgattatctgttatg

SEQ ID NO: 212948 - DNA, 20 bp, synthetic construct
  source 1..20: mol_type = other DNA
cacacatgattatctgttat

SEQ ID NO: 212949 - DNA, 20 bp, synthetic construct
  source 1..20: mol_type = other DNA
acacacatgattatctgtta

SEQ ID NO: 212950 - DNA, 20 bp, synthetic construct
  source 1..20: mol_type = other DNA
cacacacatgattatctgtt

SEQ ID NO: 212951 - DNA, 20 bp, synthetic construct
  source 1..20: mol_type = other DNA
tcacacacatgattatctgt

SEQ ID NO: 212952 - DNA, 20 bp, synthetic construct
  source 1..20: mol_type = other DNA
atcacacacatgattatctg

SEQ ID NO: 212953 - DNA, 20 bp, synthetic construct
  source 1..20: mol_type = other DNA
catcacacacatgattatct

SEQ ID NO: 212954 - DNA, 20 bp, synthetic construct
  source 1..20: mol_type = other DNA
acatcacacacatgattatc

SEQ ID NO: 212955 - DNA, 20 bp, synthetic construct
  source 1..20: mol_type = other DNA
cacatcacacacatgattat

SEQ ID NO: 212956 - DNA, 20 bp, synthetic construct
  source 1..20: mol_type = other DNA
tcacatcacacacatgatta

SEQ ID NO: 212957 - DNA, 20 bp, synthetic construct
  source 1..20: mol_type = other DNA
gtcacatcacacacatgatt

SEQ ID NO: 212958 - DNA, 20 bp, synthetic construct
  source 1..20: mol_type = other DNA
agtcacatcacacacatgat

SEQ ID NO: 212959 - DNA, 20 bp, synthetic construct
  source 1..20: mol_type = other DNA
aagtcacatcacacacatga

SEQ ID NO: 212960 - DNA, 20 bp, synthetic construct
  source 1..20: mol_type = other DNA
gaagtcacatcacacacatg

SEQ ID NO: 212961 - DNA, 20 bp, synthetic construct
  source 1..20: mol_type = other DNA
tgaagtcacatcacacacat

SEQ ID NO: 212962 - DNA, 20 bp, synthetic construct
  source 1..20: mol_type = other DNA
ctgaagtcacatcacacaca

SEQ ID NO: 212963 - DNA, 20 bp, synthetic construct
  source 1..20: mol_type = other DNA
gctgaagtcacatcacacac

SEQ ID NO: 212964 - DNA, 20 bp, synthetic construct
  source 1..20: mol_type = other DNA
ggctgaagtcacatcacaca

SEQ ID NO: 212965 - DNA, 20 bp, synthetic construct
  source 1..20: mol_type = other DNA
aggctgaagtcacatcacac

SEQ ID NO: 212966 - DNA, 20 bp, synthetic construct
  source 1..20: mol_type = other DNA
caggctgaagtcacatcaca

SEQ ID NO: 212967 - DNA, 20 bp, synthetic construct
  source 1..20: mol_type = other DNA
tcaggctgaagtcacatcac

SEQ ID NO: 212968 - DNA, 20 bp, synthetic construct
  source 1..20: mol_type = other DNA
ctcaggctgaagtcacatca

SEQ ID NO: 212969 - DNA, 20 bp, synthetic construct
  source 1..20: mol_type = other DNA
gctcaggctgaagtcacatc

SEQ ID NO: 212970 - DNA, 20 bp, synthetic construct
  source 1..20: mol_type = other DNA
cgctcaggctgaagtcacat

SEQ ID NO: 212971 - DNA, 20 bp, synthetic construct
  source 1..20: mol_type = other DNA
acgctcaggctgaagtcaca

SEQ ID NO: 212972 - DNA, 20 bp, synthetic construct
  source 1..20: mol_type = other DNA
gacgctcaggctgaagtcac

SEQ ID NO: 212973 - DNA, 20 bp, synthetic construct
  source 1..20: mol_type = other DNA
cgacgctcaggctgaagtca

SEQ ID NO: 212974 - DNA, 20 bp, synthetic construct
  source 1..20: mol_type = other DNA
tcgacgctcaggctgaagtc

SEQ ID NO: 212975 - DNA, 20 bp, synthetic construct
  source 1..20: mol_type = other DNA
ctcgacgctcaggctgaagt

SEQ ID NO: 212976 - DNA, 20 bp, synthetic construct
  source 1..20: mol_type = other DNA
cctcgacgctcaggctgaag

SEQ ID NO: 212977 - DNA, 20 bp, synthetic construct
  source 1..20: mol_type = other DNA
tcctcgacgctcaggctgaa

SEQ ID NO: 212978 - DNA, 20 bp, synthetic construct
  source 1..20: mol_type = other DNA
gtcctcgacgctcaggctga

SEQ ID NO: 212979 - DNA, 20 bp, synthetic construct
  source 1..20: mol_type = other DNA
ggtcctcgacgctcaggctg

SEQ ID NO: 212980 - DNA, 20 bp, synthetic construct
  source 1..20: mol_type = other DNA
tggtcctcgacgctcaggct

SEQ ID NO: 212981 - DNA, 20 bp, synthetic construct
  source 1..20: mol_type = other DNA
ttggtcctcgacgctcaggc

SEQ ID NO: 212982 - DNA, 20 bp, synthetic construct
  source 1..20: mol_type = other DNA
cttggtcctcgacgctcagg

SEQ ID NO: 212983 - DNA, 20 bp, synthetic construct
  source 1..20: mol_type = other DNA
acttggtcctcgacgctcag

SEQ ID NO: 212984 - DNA, 20 bp, synthetic construct
  source 1..20: mol_type = other DNA
gacttggtcctcgacgctca

SEQ ID NO: 212985 - DNA, 20 bp, synthetic construct
  source 1..20: mol_type = other DNA
tgacttggtcctcgacgctc

SEQ ID NO: 212986 - DNA, 20 bp, synthetic construct
  source 1..20: mol_type = other DNA
gtgacttggtcctcgacgct

SEQ ID NO: 212987 - DNA, 20 bp, synthetic construct
  source 1..20: mol_type = other DNA
tgtgacttggtcctcgacgc

SEQ ID NO: 212988 - DNA, 20 bp, synthetic construct
  source 1..20: mol_type = other DNA
ctgtgacttggtcctcgacg

SEQ ID NO: 212989 - DNA, 20 bp, synthetic construct
  source 1..20: mol_type = other DNA
tctgtgacttggtcctcgac

SEQ ID NO: 212990 - DNA, 20 bp, synthetic construct
  source 1..20: mol_type = other DNA
ctctgtgacttggtcctcga

SEQ ID NO: 212991 - DNA, 20 bp, synthetic construct
  source 1..20: mol_type = other DNA
gctctgtgacttggtcctcg

SEQ ID NO: 212992 - DNA, 20 bp, synthetic construct
  source 1..20: mol_type = other DNA
tgctctgtgacttggtcctc

SEQ ID NO: 212993 - DNA, 20 bp, synthetic construct
  source 1..20: mol_type = other DNA
ctgctctgtgacttggtcct

SEQ ID NO: 212994 - DNA, 20 bp, synthetic construct
  source 1..20: mol_type = other DNA
cctgctctgtgacttggtcc

SEQ ID NO: 212995 - DNA, 20 bp, synthetic construct
  source 1..20: mol_type = other DNA
tcctgctctgtgacttggtc

SEQ ID NO: 212996 - DNA, 20 bp, synthetic construct
  source 1..20: mol_type = other DNA
ttcctgctctgtgacttggt

SEQ ID NO: 212997 - DNA, 20 bp, synthetic construct
  source 1..20: mol_type = other DNA
gttcctgctctgtgacttgg

SEQ ID NO: 212998 - DNA, 20 bp, synthetic construct
  source 1..20: mol_type = other DNA
tgttcctgctctgtgacttg

SEQ ID NO: 212999 - DNA, 20 bp, synthetic construct
  source 1..20: mol_type = other DNA
ctgttcctgctctgtgactt

SEQ ID NO: 213000 - DNA, 20 bp, synthetic construct
  source 1..20: mol_type = other DNA
gctgttcctgctctgtgact

SEQ ID NO: 213001 - DNA, 20 bp, synthetic construct
  source 1..20: mol_type = other DNA
ggctgttcctgctctgtgac

SEQ ID NO: 213002 - DNA, 20 bp, synthetic construct
  source 1..20: mol_type = other DNA
tggctgttcctgctctgtga

SEQ ID NO: 213003 - DNA, 20 bp, synthetic construct
  source 1..20: mol_type = other DNA
gtggctgttcctgctctgtg

SEQ ID NO: 213004 - DNA, 20 bp, synthetic construct
  source 1..20: mol_type = other DNA
agtggctgttcctgctctgt

SEQ ID NO: 213005 - DNA, 20 bp, synthetic construct
  source 1..20: mol_type = other DNA
gagtggctgttcctgctctg

SEQ ID NO: 213006 - DNA, 20 bp, synthetic construct
  source 1..20: mol_type = other DNA
agagtggctgttcctgctct

SEQ ID NO: 213007 - DNA, 20 bp, synthetic construct
  source 1..20: mol_type = other DNA
gagagtggctgttcctgctc

SEQ ID NO: 213008 - DNA, 20 bp, synthetic construct
  source 1..20: mol_type = other DNA
ggagagtggctgttcctgct

SEQ ID NO: 213009 - DNA, 20 bp, synthetic construct
  source 1..20: mol_type = other DNA
tggagagtggctgttcctgc

SEQ ID NO: 213010 - DNA, 20 bp, synthetic construct
  source 1..20: mol_type = other DNA
ctggagagtggctgttcctg

SEQ ID NO: 213011 - DNA, 20 bp, synthetic construct
  source 1..20: mol_type = other DNA
actggagagtggctgttcct

SEQ ID NO: 213012 - DNA, 20 bp, synthetic construct
  source 1..20: mol_type = other DNA
cactggagagtggctgttcc

SEQ ID NO: 213013 - DNA, 20 bp, synthetic construct
  source 1..20: mol_type = other DNA
acactggagagtggctgttc

SEQ ID NO: 213014 - DNA, 20 bp, synthetic construct
  source 1..20: mol_type = other DNA
gacactggagagtggctgtt

SEQ ID NO: 213015 - DNA, 20 bp, synthetic construct
  source 1..20: mol_type = other DNA
ggacactggagagtggctgt

SEQ ID NO: 213016 - DNA, 20 bp, synthetic construct
  source 1..20: mol_type = other DNA
aggacactggagagtggctg

SEQ ID NO: 213017 - DNA, 20 bp, synthetic construct
  source 1..20: mol_type = other DNA
aaggacactggagagtggct

SEQ ID NO: 213018 - DNA, 20 bp, synthetic construct
  source 1..20: mol_type = other DNA
caaggacactggagagtggc

SEQ ID NO: 213019 - DNA, 20 bp, synthetic construct
  source 1..20: mol_type = other DNA
ccaaggacactggagagtgg

SEQ ID NO: 213020 - DNA, 20 bp, synthetic construct
  source 1..20: mol_type = other DNA
cccaaggacactggagagtg

SEQ ID NO: 213021 - DNA, 20 bp, synthetic construct
  source 1..20: mol_type = other DNA
ccccaaggacactggagagt

SEQ ID NO: 213022 - DNA, 20 bp, synthetic construct
  source 1..20: mol_type = other DNA
gccccaaggacactggagag

SEQ ID NO: 213023 - DNA, 20 bp, synthetic construct
  source 1..20: mol_type = other DNA
agccccaaggacactggaga

SEQ ID NO: 213024 - DNA, 20 bp, synthetic construct
  source 1..20: mol_type = other DNA
tagccccaaggacactggag

SEQ ID NO: 213025 - DNA, 20 bp, synthetic construct
  source 1..20: mol_type = other DNA
gtagccccaaggacactgga

SEQ ID NO: 213026 - DNA, 20 bp, synthetic construct
  source 1..20: mol_type = other DNA
cgtagccccaaggacactgg

SEQ ID NO: 213027 - DNA, 20 bp, synthetic construct
  source 1..20: mol_type = other DNA
acgtagccccaaggacactg

SEQ ID NO: 213028 - DNA, 20 bp, synthetic construct
  source 1..20: mol_type = other DNA
gacgtagccccaaggacact

SEQ ID NO: 213029 - DNA, 20 bp, synthetic construct
  source 1..20: mol_type = other DNA
agacgtagccccaaggacac

SEQ ID NO: 213030 - DNA, 20 bp, synthetic construct
  source 1..20: mol_type = other DNA
cagacgtagccccaaggaca

SEQ ID NO: 213031 - DNA, 20 bp, synthetic construct
  source 1..20: mol_type = other DNA
tcagacgtagccccaaggac

SEQ ID NO: 213032 - DNA, 20 bp, synthetic construct
  source 1..20: mol_type = other DNA
ctcagacgtagccccaagga

SEQ ID NO: 213033 - DNA, 20 bp, synthetic construct
  source 1..20: mol_type = other DNA
cctcagacgtagccccaagg

SEQ ID NO: 213034 - DNA, 20 bp, synthetic construct
  source 1..20: mol_type = other DNA
tcctcagacgtagccccaag

SEQ ID NO: 213035 - DNA, 20 bp, synthetic construct
  source 1..20: mol_type = other DNA
ctcctcagacgtagccccaa

SEQ ID NO: 213036 - DNA, 20 bp, synthetic construct
  source 1..20: mol_type = other DNA
tctcctcagacgtagcccca

SEQ ID NO: 213037 - DNA, 20 bp, synthetic construct
  source 1..20: mol_type = other DNA
ttctcctcagacgtagcccc

SEQ ID NO: 213038 - DNA, 20 bp, synthetic construct
  source 1..20: mol_type = other DNA
gttctcctcagacgtagccc

SEQ ID NO: 213039 - DNA, 20 bp, synthetic construct
  source 1..20: mol_type = other DNA
ggttctcctcagacgtagcc

SEQ ID NO: 213040 - DNA, 20 bp, synthetic construct
  source 1..20: mol_type = other DNA
aggttctcctcagacgtagc

SEQ ID NO: 213041 - DNA, 20 bp, synthetic construct
  source 1..20: mol_type = other DNA
caggttctcctcagacgtag

SEQ ID NO: 213042 - DNA, 20 bp, synthetic construct
  source 1..20: mol_type = other DNA
ccaggttctcctcagacgta

SEQ ID NO: 213043 - DNA, 20 bp, synthetic construct
  source 1..20: mol_type = other DNA
cccaggttctcctcagacgt

SEQ ID NO: 213044 - DNA, 20 bp, synthetic construct
  source 1..20: mol_type = other DNA
tcccaggttctcctcagacg

SEQ ID NO: 213045 - DNA, 20 bp, synthetic construct
  source 1..20: mol_type = other DNA
atcccaggttctcctcagac

SEQ ID NO: 213046 - DNA, 20 bp, synthetic construct
  source 1..20: mol_type = other DNA
aatcccaggttctcctcaga

SEQ ID NO: 213047 - DNA, 20 bp, synthetic construct
  source 1..20: mol_type = other DNA
aaatcccaggttctcctcag

SEQ ID NO: 213048 - DNA, 20 bp, synthetic construct
  source 1..20: mol_type = other DNA
gaaatcccaggttctcctca

SEQ ID NO: 213049 - DNA, 20 bp, synthetic construct
  source 1..20: mol_type = other DNA
tgaaatcccaggttctcctc

SEQ ID NO: 213050 - DNA, 20 bp, synthetic construct
  source 1..20: mol_type = other DNA
atgaaatcccaggttctcct

SEQ ID NO: 213051 - DNA, 20 bp, synthetic construct
  source 1..20: mol_type = other DNA
tatgaaatcccaggttctcc

SEQ ID NO: 213052 - DNA, 20 bp, synthetic construct
  source 1..20: mol_type = other DNA
atatgaaatcccaggttctc

SEQ ID NO: 213053 - DNA, 20 bp, synthetic construct
  source 1..20: mol_type = other DNA
tatatgaaatcccaggttct

SEQ ID NO: 213054 - DNA, 20 bp, synthetic construct
  source 1..20: mol_type = other DNA
atatatgaaatcccaggttc

SEQ ID NO: 213055 - DNA, 20 bp, synthetic construct
  source 1..20: mol_type = other DNA
catatatgaaatcccaggtt

SEQ ID NO: 213056 - DNA, 20 bp, synthetic construct
  source 1..20: mol_type = other DNA
tcatatatgaaatcccaggt

SEQ ID NO: 213057 - DNA, 20 bp, synthetic construct
  source 1..20: mol_type = other DNA
gtcatatatgaaatcccagg

SEQ ID NO: 213058 - DNA, 20 bp, synthetic construct
  source 1..20: mol_type = other DNA
ggtcatatatgaaatcccag

SEQ ID NO: 213059 - DNA, 20 bp, synthetic construct
  source 1..20: mol_type = other DNA
aggtcatatatgaaatccca

SEQ ID NO: 213060 - DNA, 20 bp, synthetic construct
  source 1..20: mol_type = other DNA
caggtcatatatgaaatccc

SEQ ID NO: 213061 - DNA, 20 bp, synthetic construct
  source 1..20: mol_type = other DNA
gcaggtcatatatgaaatcc

SEQ ID NO: 213062 - DNA, 20 bp, synthetic construct
  source 1..20: mol_type = other DNA
tgcaggtcatatatgaaatc

SEQ ID NO: 213063 - DNA, 20 bp, synthetic construct
  source 1..20: mol_type = other DNA
gtgcaggtcatatatgaaat

SEQ ID NO: 213064 - DNA, 20 bp, synthetic construct
  source 1..20: mol_type = other DNA
agtgcaggtcatatatgaaa

SEQ ID NO: 213065 - DNA, 20 bp, synthetic construct
  source 1..20: mol_type = other DNA
cagtgcaggtcatatatgaa

SEQ ID NO: 213066 - DNA, 20 bp, synthetic construct
  source 1..20: mol_type = other DNA
ccagtgcaggtcatatatga

SEQ ID NO: 213067 - DNA, 20 bp, synthetic construct
  source 1..20: mol_type = other DNA
gccagtgcaggtcatatatg

SEQ ID NO: 213068 - DNA, 20 bp, synthetic construct
  source 1..20: mol_type = other DNA
agccagtgcaggtcatatat

SEQ ID NO: 213069 - DNA, 20 bp, synthetic construct
  source 1..20: mol_type = other DNA
cagccagtgcaggtcatata

SEQ ID NO: 213070 - DNA, 20 bp, synthetic construct
  source 1..20: mol_type = other DNA
ccagccagtgcaggtcatat

SEQ ID NO: 213071 - DNA, 20 bp, synthetic construct
  source 1..20: mol_type = other DNA
cccagccagtgcaggtcata

SEQ ID NO: 213072 - DNA, 20 bp, synthetic construct
  source 1..20: mol_type = other DNA
ccccagccagtgcaggtcat

SEQ ID NO: 213073 - DNA, 20 bp, synthetic construct
  source 1..20: mol_type = other DNA
cccccagccagtgcaggtca

SEQ ID NO: 213074 - DNA, 20 bp, synthetic construct
  source 1..20: mol_type = other DNA
ccccccagccagtgcaggtc
